(19) United States
(12) Patent Application Publication
(10) Pub. No.: US 2015/0191722 A1
(43) Pub. Date: Jul. 9, 2015

(54) COMPOSITIONS AND METHODS FOR MODULATING APOA1 AND ABCA1 EXPRESSION

(71) Applicants: RaNA Therapeutics, Inc., Cambridge, MA (US); The General Hospital Corporation d/b/a Massachusetts General Hospital, Boston, MA (US)

(72) Inventors: Arthur M. Krieg, Cambridge, MA (US); Romesh Subramanian, Framingham, MA (US); James McSwiggen, Arlington, MA (US); Jeannie T. Lee, Boston, MA (US)

(73) Assignees: RaNA Therapeutics, Inc., Cambridge, MA (US); The General Hospital Corporation d/b/a Massachusetts General Hospital, Boston, MA (US)

(21) Appl. No.: 14/401,223

(22) PCT Filed: May 16, 2013
(86) PCT No.: PCT/US2013/041455

§ 371 Date: Nov. 14, 2014

Related U.S. Application Data
(60) Provisional application No. 61/785,778, filed on Mar. 14, 2013.
(60) Provisional application No. 61/647,949, filed on May 16, 2012.

(51) Int. Cl. C12N 15/113; A61K 47/48; A61K 31/7088

(52) U.S. Cl. CPC C12N 15/113; A61K 31/7088; A61K 47/48238; A61K 47/48046; C12N 2310/321; C12N 2310/3231; C12N 2310/346; C12N 2310/315; C12N 2310/351; C12N 2310/3513; C12N 2310/3515

(57) ABSTRACT

Aspects of the invention provide single stranded oligonucleotides for activating or enhancing expression of APOA1 or ABCA1. Further aspects provide compositions and kits comprising single stranded oligonucleotides for activating or enhancing expression of APOA1 or ABCA1. Methods for modulating expression of APOA1 or ABCA1 using the single stranded oligonucleotides are also provided. Further aspects of the invention provide methods for selecting a candidate oligonucleotide for activating or enhancing expression of APOA1 or ABCA1.

### CROSS-REFERENCE TO RELATED APPLICATIONS

[0001] This application claims the benefit under 35 U.S.C. §119(e) of U.S. Provisional Application No. 61/785,778, entitled “COMPOSITIONS AND METHODS FOR MODULATING APOA1 AND ABCA1 EXPRESSION”, filed Mar. 14, 2013 and U.S. Provisional Application No. 61/647,949, entitled “COMPOSITIONS AND METHODS FOR MODULATING APOA1 AND ABCA1 EXPRESSION”, filed May 16, 2012, each of which is incorporated herein by reference in its entirety.

### FIELD OF THE INVENTION

[0002] The invention relates to oligonucleotide based compositions, as well as methods of using oligonucleotide based compositions for treating disease.

### BACKGROUND OF THE INVENTION

[0003] Accumulation of lipids in the blood can cause a variety of conditions and diseases, e.g., dyslipidemia and atherosclerosis. Atherosclerosis in particular is the leading cause of death in industrialized societies, making prevention and treatment a high public health concern. Low-density lipoprotein (LDL) is a major transporter of fat molecules, e.g., cholesterol, in the blood stream that delivers fat molecules to cells. High-density lipoprotein (HDL) is another transporter of fat molecules that moves lipids, e.g. cholesterol, from cells to the liver. High levels of LDL are associated with health problems such as dyslipidemia and atherosclerosis, while HDL is protective against atherosclerosis and is involved in maintenance of cholesterol homeostasis.

[0004] Dyslipidemia generally describes a condition when an abnormal amount of lipids is present in the blood. Hyperlipidemia, which accounts for the majority of dyslipidemias, refers to an abnormally high amount of lipids in the blood. Hyperlipidemia is often associated with hormonal diseases such as diabetes, hypothyroidism, metabolic syndrome, and Cushing syndrome. Examples of common lipids in dyslipidemias include triglycerides like cholesterol and fat. Abnormal amounts lipids or lipoproteins in the blood can lead to atherosclerosis, heart disease, and stroke.

[0005] Atherosclerosic diseases, e.g. coronary artery disease (CAD) and myocardial infarction (MI), involve a thickening of artery walls caused by accumulation of fat in the blood, most commonly cholesterol. This thickening is thought to be the result of chronic inflammation of arteriole walls due to accumulation of LDLs in the vessel walls. LDL molecules can become oxidized once inside vessel walls, resulting in cell damage and recruitment of immune cells like macrophages to absorb the oxidized LDL. Once macrophages internalize oxidized LDL, they become saturated with cholesterol and are referred to as foam cells. Smooth muscle cells are then recruited and form a fibrous region. These processes eventually lead to formation of plaques block arteries and can cause heart attack and stroke. HDL is capable of transporting cholesterol from foam cells to the liver, which aids in inhibition of inflammation and plaque formation.

[0006] APOA1 (apolipoprotein A-I) is the major protein component of high density lipoprotein (HDL) in the blood. HDLs pick up cholesterol from cells by interaction with the cholesterol efflux regulatory protein ABCA1 (ATP-binding cassette transporter A1). The interaction of APOA1 and ABCA1 is important for cholesterol homeostasis and protection against diseases like atherosclerosis through transport of cholesterol from atherosclerotic lesions. Mouse models of atherosclerosis have demonstrated that ApoA1 reduces free cholesterol accumulation in vivo in atherosclerotic lesions.

### SUMMARY OF THE INVENTION

[0007] Aspects of the invention disclosed herein provide methods and compositions that are useful for upregulating APOA1 and/or ABCA1 in cells. In some embodiments, single stranded oligonucleotides are provided that target a PRC2-associated region of an APOA1 gene or an ABCA1 gene (e.g., human APOA1, human ABCA1) and thereby cause upregulation of the gene. In some embodiments, single stranded oligonucleotides are provided that target a PRC2-associated region of the gene encoding APOA1 or ABCA1. In some embodiments, these single stranded oligonucleotides activate or enhance expression of APOA1 or ABCA1 by relieving or preventing PRC2 mediated repression of APOA1 or ABCA1.

[0008] Some aspects of the invention disclosed herein provide methods and compositions that are useful for upregulating APOA1, ABCA1, or both for the treatment and/or prevention of dyslipidemia. Other aspects of the invention disclosed herein provide methods and compositions that are useful for upregulating APOA1, ABCA1, or both for the treatment and/or prevention of atherosclerosis.

[0009] Further aspects of the invention provide methods for selecting oligonucleotides for activating or enhancing expression of APOA1 and/or ABCA1. In some embodiments, methods are provided for selecting a set of oligonucleotides that is enriched in candidates (e.g., compared with a random selection of oligonucleotides) for activating or enhancing expression of APOA1 and/or ABCA1. Accordingly, the methods may be used to establish sets of clinical candidates that are enriched in oligonucleotides that activate or enhance expression of APOA1 and/or ABCA1. Such libraries may be utilized, for example, to identify lead oligonucleotides for developing therapeutics to treat APOA1 and/or ABCA1. Furthermore, in some embodiments, oligonucleotide chemistries are provided that are useful for controlling the pharmacokinetics, biodistribution, bioavailability and/or efficacy of the single stranded oligonucleotides for activating expression of APOA1 and/or ABCA1.

[0010] According to some aspects of the invention single stranded oligonucleotides are provided that have a region of complementarity that is complementarity with (e.g., at least 8 consecutive nucleotides of) a PRC2-associated region of an APOA1 or an ABCA1 gene, e.g., a PRC2-associated region of the nucleotide sequence set forth as SEQ ID NO: 1, 2, 5 or 6. In some embodiments, the oligonucleotide has at least one of the following features: a) a sequence that is 5′X-Y-Z, in which X is any nucleotide and in which X is at the 5′ end of the oligonucleotide, Y is a nucleotide sequence of 6 nucleotides in length that is not a human seed sequence of a microRNA, and Z is a nucleotide sequence of 1 to 23 nucleotides in length; b) a sequence that does not comprise three or more consecutive guanosine nucleotides; c) a sequence that has less than a threshold level of sequence identity with every sequence of nucleotides, of equivalent length to the second nucleotide sequence, that are between 50 kilobases upstream of a 5′-end of an off-target gene and 50 kilobases downstream of a 3′-end of the off-target gene; d) a sequence that is complementary to a PRC2-associated region that encodes an RNA that forms a secondary structure comprising at least two single stranded loops; and e) a sequence that has greater than 60% G-C content. In some embodiments, the single stranded oligonucleotide has at least two of features a), b), c), d), and e), each independently selected. In some embodiments, the single stranded oligonucleotide has at least three of features a), b), c), d), and e), each independently selected. In some embodiments, the single stranded oligonucleotide has at least four of features a), b), c), d), and e), each independently selected. In some embodiments, the single stranded oligonucleotide has each of features a), b), c), d), and e). In certain embodiments, the oligonucleotide has the sequence 5′X-Y-Z, in which the oligonucleotide is 8-50 nucleotides in length.

[0011] According to some aspects of the invention, single stranded oligonucleotides are provided that have a sequence X-Y-Z, in which X is any nucleotide, Y is a nucleotide sequence of 6 nucleotides in length that is not a seed sequence of a human microRNA, and Z is a nucleotide sequence of 1 to 23 nucleotides in length, in which the single stranded oligonucleotide is complementary with a PRC2-associated region of an APOA1 gene or an ABCA1 gene, e.g., a PRC2-associated region of the nucleotide sequence set forth as SEQ ID NO: 1, 2, 5 or 6. In some aspects of the invention, single stranded oligonucleotides are provided that have a sequence 5′-X-Y-Z, in which X is any nucleotide, Y is a nucleotide sequence of 6 nucleotides in length that is not a seed sequence of a human microRNA, and Z is a nucleotide sequence of 1 to 23 nucleotides in length, in which the single stranded oligonucleotide is complementary with at least 8 consecutive nucleotides of a PRC2-associated region of an APOA1 gene or an ABCA1 gene, e.g., a PRC2-associated region of the nucleotide sequence set forth as SEQ ID NO: 1, 2, 5 or 6. In some embodiments, Y is a sequence selected from Table 1. In some embodiments, the PRC2-associated region is a sequence listed in any one of SEQ ID NOS: 9 to 194.

[0012] In some embodiments, the single stranded oligonucleotide comprises a nucleotide sequence as set forth in any one of SEQ ID NOS: 195 to 187501, or a fragment thereof that is at least 8 nucleotides. In some embodiments, the single stranded oligonucleotide comprises a nucleotide sequence as set forth in any one of SEQ ID NOS: 195 to 187501, in which the 5′ end of the nucleotide sequence provided is the 5′ end of the oligonucleotide. In some embodiments, the region of complementarity (e.g., the at least 8 consecutive nucleotides) is also present within the nucleotide sequence set forth as SEQ ID NO: 3, 4, 7 or 8.

[0013] In some embodiments, the single stranded oligonucleotide comprises a nucleotide sequence as set forth in any one of SEQ ID NOS: 195 to 187501. In some embodiments, the single stranded oligonucleotide comprises a fragment of at least 8 nucleotides of a nucleotide sequence as set forth in any one of SEQ ID NOS: 195 to 187501.

[0014] In some embodiments, the PRC2-associated region is a sequence listed in any one of SEQ ID NOS: 9 to 150. In some embodiments, the single stranded oligonucleotide comprises a nucleotide sequence as set forth in any one of SEQ ID NOS: 195 to 120357 or a fragment thereof that is at least 8 nucleotides. In some embodiments, the single stranded oligonucleotide comprises a nucleotide sequence as set forth in any one of SEQ ID NOS: 195 to 120357, wherein the 5′ end of the nucleotide sequence provided in any one of SEQ ID NOS: 195 to 120357 is the 5′ end of the oligonucleotide. In some embodiments, the at least 8 consecutive nucleotides are also present within the nucleotide sequence set forth as SEQ ID NO: 3 or 7.

[0015] In some embodiments, the PRC2-associated region is a sequence listed in any one of SEQ ID NOS: 151 to 194. In some embodiments, the single stranded oligonucleotide comprises a nucleotide sequence as set forth in any one of SEQ ID NOS: 119697 to 187501 or a fragment thereof that is at least 8 nucleotides. In some embodiments, the single stranded oligonucleotide comprises a nucleotide sequence as set forth in any one of SEQ ID NOS: 119697 to 187501, wherein the 5′ end of the nucleotide sequence provided in any one of SEQ ID NOS: 119697 to 187501 is the 5′ end of the oligonucleotide. In some embodiments, the at least 8 consecutive nucleotides are present within the nucleotide sequence set forth as SEQ ID NO: 4 or 8.

[0016] In some embodiments, a single stranded oligonucleotide comprises a nucleotide sequence as set forth in Table 4. In some embodiments, the single stranded oligonucleotide comprises a fragment of at least 8 nucleotides of a nucleotide sequence as set forth in Table 4. In some embodiments, a single stranded oligonucleotide consists of a nucleotide sequence as set forth in Table 4.

[0017] In some embodiments, the single stranded oligonucleotide does not comprise three or more consecutive guanosine nucleotides. In some embodiments, the single stranded oligonucleotide does not comprise four or more consecutive guanosine nucleotides.

[0018] In some embodiments, the single stranded oligonucleotide is 8 to 30 nucleotides in length. In some embodiments, the single stranded oligonucleotide is up to 50 nucleotides in length. In some embodiments, the single stranded oligonucleotide is 8 to 10 nucleotides in length and all but 1, 2, or 3 of the nucleotides of the complementary sequence of the PRC2-associated region are cytosine or guanosine nucleotides.

[0019] In some embodiments, the single stranded oligonucleotide is complementary with at least 8 consecutive nucleotides of a PRC2-associated region of an APOA1 gene or an ABCA1 gene, e.g., a PRC2-associated region of a nucleotide sequence set forth as SEQ ID NO: 1, 2, 5 or 6, in which the nucleotide sequence of the single stranded oligonucleotide comprises one or more of a nucleotide sequence selected from the group consisting of

[0020] (a) (X)Xxxxxx, (X)xXxxxx, (X)xxXxxx, (X)xxxXxx, (X)xxxxXx and (X)xxxxxX,

[0021] (b) (X)XXxxxx, (X)XxXxxx, (X)XxxXxx, (X)XxxxXx, (X)XxxxxX, (X)xXXxxx, (X)xXxXxx, (X)xXxxXx, (X)xXxxxX, (X)xxXXxx, (X)xxXxXx, (X)xxXxxX, (X)xxxXXx, (X)xxxXxX and (X)xxxxXX,

[0022] (c) (X)XXXxxx, (X)xXXXxx, (X)xxXXXx, (X)xxxXXX, (X)XXxXxx, (X)XXxxXx, (X)XXxxxX, (X)xXXxXx, (X)xXXxxX, (X)xxXXxX, (X)XxXXxx, (X)XxxXXx (X)XxxxXX, (X)xXxXXx, (X)xXxxXX, (X)xxXxXX, (X)xXxXxX and (X)XxXxXx,

[0023] (d) (X)xxXXX, (X)xXxXXX, (X)xXXxXX, (X)xXXXxX, (X)xXXXXx, (X)XxxXXXX, (X)XxXxXX, (X)XxXXxX, (X)XxXXx, (X)XXxxXX, (X)XXxXxX, (X)XXxXXx, (X)XXXxxX, (X)XXXxXx, and (X)XXXXxx,

[0024] (e) (X)xXXXXX, (X)XxXXXX, (X)XXxXXX, (X)XXXxXX, (X)XXXXxX and (X)XXXXXx, and

[0025] (f) XXXXXX, XxXXXXX, XXxXXXX, XXXxXXX, XXXXxXX, XXXXXxX and XXXXXXx, wherein “X” denotes a nucleotide analogue, (X) denotes an optional nucleotide analogue, and “x” denotes a DNA or RNA nucleotide unit.

[0026] In some embodiments, at least one nucleotide of the oligonucleotide is a nucleotide analogue. In some embodiments, the at least one nucleotide analogue results in an increase in Tm of the oligonucleotide in a range of 1 to 5° C. compared with an oligonucleotide that does not have the at least one nucleotide analogue.

[0027] In some embodiments, at least one nucleotide of the oligonucleotide comprises a 2′ O-methyl. In some embodiments, each nucleotide of the oligonucleotide comprises a 2′ O-methyl. In some embodiments, the oligonucleotide comprises at least one ribonucleotide, at least one deoxyribonucleotide, or at least one bridged nucleotide. In some embodiments, the bridged nucleotide is a LNA nucleotide, a cEt nucleotide or a ENA modified nucleotide. In some embodiments, each nucleotide of the oligonucleotide is a LNA nucleotide.

[0028] In some embodiments, the nucleotides of the oligonucleotide comprise alternating deoxyribonucleotides and 2′-fluoro-deoxyribonucleotides. In some embodiments, the nucleotides of the oligonucleotide comprise alternating deoxyribonucleotides and 2′-O-methyl nucleotides. In some embodiments, the nucleotides of the oligonucleotide comprise alternating deoxyribonucleotides and ENA nucleotide analogues. In some embodiments, the nucleotides of the oligonucleotide comprise alternating deoxyribonucleotides and LNA nucleotides. In some embodiments, the 5′ nucleotide of the oligonucleotide is a deoxyribonucleotide. In some embodiments, the nucleotides of the oligonucleotide comprise alternating LNA nucleotides and 2′-O-methyl nucleotides. In some embodiments, the 5′ nucleotide of the oligonucleotide is a LNA nucleotide. In some embodiments, the nucleotides of the oligonucleotide comprise deoxyribonucleotides flanked by at least one LNA nucleotide on each of the 5′ and 3′ ends of the deoxyribonucleotides.

[0029] In some embodiments, the single stranded oligonucleotide comprises modified internucleotide linkages (e.g., phosphorothioate internucleotide linkages or other linkages) between at least two, at least three, at least four, at least five or more nucleotides. In some embodiments, the single stranded oligonucleotide comprises modified internucleotide linkages (e.g., phosphorothioate internucleotide linkages or other linkages) between all nucleotides.

[0030] In some embodiments, the nucleotide at the 3′ position of the oligonucleotide has a 3′ hydroxyl group. In some embodiments, the nucleotide at the 3′ position of the oligonucleotide has a 3′ thiophosphate. In some embodiments, the single stranded oligonucleotide has a biotin moiety or other moiety conjugated to its 5′ or 3′ nucleotide. In some embodiments, the single stranded oligonucleotide has cholesterol, Vitamin A, folate, sigma receptor ligands, aptamers, peptides, such as CPP, hydrophobic molecules, such as lipids, ASGPR or dynamic polyconjugates and variants thereof at its 5′ or 3′ end.

[0031] According to some aspects of the invention compositions are provided that comprise any of the oligonucleotides disclosed herein, and a carrier. In some embodiments, compositions are provided that comprise any of the oligonucleotides in a buffered solution. In some embodiments, the oligonucleotide is conjugated to the carrier. In some embodiments, the carrier is a peptide. In some embodiments, the carrier is a steroid. According to some aspects of the invention pharmaceutical compositions are provided that comprise any of the oligonucleotides disclosed herein, and a pharmaceutically acceptable carrier.

[0032] According to other aspects of the invention, kits are provided that comprise a container housing any of the compositions disclosed herein.

[0033] According to some aspects of the invention, methods of increasing expression of APOA1 or ABCA1 in a cell are provided. In some embodiments, the methods involve delivering any one or more of the single stranded oligonucleotides disclosed herein into the cell. In some embodiments, delivery of the single stranded oligonucleotide into the cell results in a level of expression of APOA1 or ABCA1 that is greater (e.g., at least 50% greater) than a level of expression of APOA1 or ABCA1 in a control cell that does not comprise the single stranded oligonucleotide.

[0034] According to some aspects of the invention, methods of increasing levels of APOA1 or ABCA1 in a subject are provided. According to some aspects of the invention, methods of treating a condition (e.g., dyslipidemia, atherosclerosis) associated with decreased levels of APOA1 or ABCA1 in a subject are provided. In some embodiments, the methods involve administering any one or more of the single stranded oligonucleotides disclosed herein to the subject.

### BRIEF DESCRIPTION OF TABLES

[0035] Table 1: Hexamers that are not seed sequences of human miRNAs.

[0036] Table 2: Oligonucleotides made for testing in the lab. RQ (column 3) and RQ SE (column 4) shows the activity of the oligo relative to a control well (usually carrier alone) and the standard error for the triplicate replicates of the experiment. [oligo] is shown in nanomolar for in vitro experiments and in milligrams per kilogram of body weight for in vivo experiments. The sequence of each oligonucleotide, including any modified nucleotides, is shown in Table 4.

[0037] Table 3: A listing of oligonucleotide modifications.

[0038] Table 4: Formatted oligonucleotide sequences made for testing showing nucleotide modifications. The table shows the sequence of the modified nucleotides, where lnaX represents an LNA nucleotide with 3′ phosphorothioate linkage, omeX is a 2′-O-methyl nucleotide, dX is a deoxy nucleotide. An s at the end of a nucleotide code indicates that the nucleotide had a 3′ phosphorothioate linkage. The “-Sup” at the end of the sequence marks the fact that the 3′ end lacks either a phosphate or thiophosphate on the 3′ linkage. The Formatted Sequence column shows the sequence of the oligonucleotide, including modified nucleotides, for the oligonucleotides tested in Table 2.

[0039] Table 5: Cell lines

### DETAILED DESCRIPTION OF CERTAIN EMBODIMENTS OF THE INVENTION

[0040] Aspects of the invention provided herein relate to the discovery of polycomb repressive complex 2 (PRC2)-interacting RNAs. Polycomb repressive complex 2 (PRC2) is a histone methyltransferase and a known epigenetic regulator involved in silencing of genomic regions through methylation of histone H3. Among other functions, PRC2 interacts with long noncoding RNAs (lncRNAs), such as RepA, Xist, and Tsix, to catalyze trimethylation of histone H3-lysine27. PRC2 contains four subunits, Eed, Suz12, RbAp48, and Ezh2. Aspects of the invention relate to the recognition that single stranded oligonucleotides that bind to PRC2-associated regions of RNAs (e.g., lncRNAs) that are expressed from within a genomic region that encompasses or that is in functional proximity to the APOA1 or ABCA1 gene can induce or enhance expression of APOA1 or ABCA1. In some embodiments, this upregulation is believed to result from inhibition of PRC2 mediated repression of APOA1 or ABCA1.

[0041] As used herein, the term “PRC2-associated region” refers to a region of a nucleic acid that comprises or encodes a sequence of nucleotides that interact directly or indirectly with a component of PRC2. A PRC2-associated region may be present in a RNA (e.g., a long non-coding RNA (lncRNA)) that that interacts with a PRC2. A PRC2-associated region may be present in a DNA that encodes an RNA that interacts with PRC2. In some cases, the PRC2-associated region is equivalently referred to as a PRC2-interacting region.

[0042] In some embodiments, a PRC2-associated region is a region of an RNA that crosslinks to a component of PRC2 in response to in situ ultraviolet irradiation of a cell that expresses the RNA, or a region of genomic DNA that encodes that RNA region. In some embodiments, a PRC2-associated region is a region of an RNA that immunoprecipitates with an antibody that targets a component of PRC2, or a region of genomic DNA that encodes that RNA region. In some embodiments, a PRC2-associated region is a region of an RNA that immunoprecipitates with an antibody that binds specifically to SUZ12, EED, EZH2 or RBBP4 (which as noted above are components of PRC2), or a region of genomic DNA that encodes that RNA region.

[0043] In some embodiments, a PRC2-associated region is a region of an RNA that is protected from nucleases (e.g., RNases) in an RNA-immunoprecipitation assay that employs an antibody that targets a component of PRC2, or a region of genomic DNA that encodes that protected RNA region. In some embodiments, a PRC2-associated region is a region of an RNA that is protected from nucleases (e.g., RNases) in an RNA-immunoprecipitation assay that employs an antibody that targets SUZ12, EED, EZH2 or RBBP4, or a region of genomic DNA that encodes that protected RNA region.

[0044] In some embodiments, a PRC2-associated region is a region of an RNA within which occur a relatively high frequency of sequence reads in a sequencing reaction of products of an RNA-immunoprecipitation assay that employs an antibody that targets a component of PRC2, or a region of genomic DNA that encodes that RNA region. In some embodiments, a PRC2-associated region is a region of an RNA within which occur a relatively high frequency of sequence reads in a sequencing reaction of products of an RNA-immunoprecipitation assay that employs an antibody that binds specifically to SUZ12, EED, EZH2 or RBBP4, or a region of genomic DNA that encodes that protected RNA region. In such embodiments, the PRC2-associated region may be referred to as a “peak.”

[0045] In some embodiments, a PRC2-associated region comprises a sequence of 40 to 60 nucleotides that interact with PRC2 complex. In some embodiments, a PRC2-associated region comprises a sequence of 40 to 60 nucleotides that encode an RNA that interacts with PRC2. In some embodiments, a PRC2-associated region comprises a sequence of up to 5 kb in length that comprises a sequence (e.g., of 40 to 60 nucleotides) that interacts with PRC2. In some embodiments, a PRC2-associated region comprises a sequence of up to 5 kb in length within which an RNA is encoded that has a sequence (e.g., of 40 to 60 nucleotides) that is known to interact with PRC2. In some embodiments, a PRC2-associated region comprises a sequence of about 4 kb in length that comprise a sequence (e.g., of 40 to 60 nucleotides) that interacts with PRC2. In some embodiments, a PRC2-associated region comprises a sequence of about 4 kb in length within which an RNA is encoded that includes a sequence (e.g., of 40 to 60 nucleotides) that is known to interact with PRC2. In some embodiments, a PRC2-associated region has a sequence as set forth in any one of SEQ ID NOS: 9 to 194.

[0046] In some embodiments, single stranded oligonucleotides are provided that specifically bind to, or are complementary to, a PRC2-associated region in a genomic region that encompasses or that is in proximity to the APOA1 or ABCA1 gene. In some embodiments, single stranded oligonucleotides are provided that specifically bind to, or are complementary to, a PRC2-associated region that has a sequence as set forth in any one of SEQ ID NOS: 9 to 194. In some embodiments, single stranded oligonucleotides are provided that specifically bind to, or are complementary to, a PRC2-associated region that has a sequence as set forth in any one of SEQ ID NOS: 9 to 194 combined with up to 2 kb, up to 5 kb, or up to 10 kb of flanking sequences from a corresponding genomic region to which these SEQ IDs map (e.g., in a human genome). In some embodiments, single stranded oligonucleotides have a sequence as set forth in any one of SEQ ID NOS: 195 to 187501. In some embodiments, a single stranded oligonucleotide has a sequence as set forth in Table 4.

[0047] Without being bound by a theory of invention, these oligonucleotides are able to interfere with the binding of and function of PRC2, by preventing recruitment of PRC2 to a specific chromosomal locus. For example, a single administration of single stranded oligonucleotides designed to specifically bind a PRC2-associated region lncRNA can stably displace not only the lncRNA, but also the PRC2 that binds to the lncRNA, from binding chromatin. After displacement, the full complement of PRC2 is not recovered for up to 24 hours. Further, lncRNA can recruit PRC2 in a cis fashion, repressing gene expression at or near the specific chromosomal locus from which the lncRNA was transcribed.

[0048] Methods of modulating gene expression are provided, in some embodiments, that may be carried out in vitro, ex vivo, or in vivo. It is understood that any reference to uses of compounds throughout the description contemplates use of the compound in preparation of a pharmaceutical composition or medicament for use in the treatment of condition (e.g., dyslipidemia, atherosclerosis) associated with decreased levels or activity of APOA1 or ABCA1. Thus, as one nonlimiting example, this aspect of the invention includes use of such single stranded oligonucleotides in the preparation of a medicament for use in the treatment of disease, wherein the treatment involves upregulating expression of APOA1 or ABCA1.

[0049] In further aspects of the invention, methods are provided for selecting a candidate oligonucleotide for activating expression of APOA1 or ABCA1. The methods generally involve selecting as a candidate oligonucleotide, a single stranded oligonucleotide comprising a nucleotide sequence that is complementary to a PRC2-associated region (e.g., a nucleotide sequence as set forth in any one of SEQ ID NOS: 9 to 194). In some embodiments, sets of oligonucleotides may be selected that are enriched (e.g., compared with a random selection of oligonucleotides) in oligonucleotides that activate expression of APOA1 or ABCA1.

### Single Stranded Oligonucleotides for Modulating Expression of APOA1 or ABCA1

[0050] In one aspect of the invention, single stranded oligonucleotides complementary to the PRC2-associated regions are provided for modulating expression of APOA1 or ABCA1 in a cell. In some embodiments, expression of APOA1 or ABCA1 is upregulated or increased. In some embodiments, single stranded oligonucleotides complementary to these PRC2-associated regions inhibit the interaction of PRC2 with long RNA transcripts such that gene expression is upregulated or increased. In some embodiments, single stranded oligonucleotides complementary to these PRC2-associated regions inhibit the interaction of PRC2 with long RNA transcripts, resulting in reduced methylation of histone H3 and reduced gene inactivation, such that gene expression is upregulated or increased. In some embodiments, this interaction may be disrupted or inhibited due to a change in the structure of the long RNA that prevents or reduces binding to PRC2. The oligonucleotide may be selected using any of the methods disclosed herein for selecting a candidate oligonucleotide for activating expression of APOA1 or ABCA1.

[0051] The single stranded oligonucleotide may comprise a region of complementarity that is complementary with a PRC2-associated region of a nucleotide sequence set forth in any one of SEQ ID NOs: 9-194. The region of complementarity of the single stranded oligonucleotide may be complementary with at least 6, e.g., at least 7, at least 8, at least 9, at least 10, at least 15 or more consecutive nucleotides of the PRC2-associated region.

[0052] The PRC2-associated region may map to a position in a chromosome between 50 kilobases upstream of a 5′-end of the APOA1 or ABCA1 gene and 50 kilobases downstream of a 3′-end of the APOA1 or ABCA1 gene. The PRC2-associated region may map to a position in a chromosome between 25 kilobases upstream of a 5′-end of the APOA1 or ABCA1 gene and 25 kilobases downstream of a 3′-end of the APOA1 or ABCA1 gene. The PRC2-associated region may map to a position in a chromosome between 12 kilobases upstream of a 5′-end of the APOA1 or ABCA1 gene and 12 kilobases downstream of a 3′-end of the APOA1 or ABCA1 gene. The PRC2-associated region may map to a position in a chromosome between 5 kilobases upstream of a 5′-end of the APOA1 or ABCA1 gene and 12 kilobases downstream of a 3′-end of the APOA1 or ABCA1 gene.

[0053] The genomic position of the selected PRC2-associated region relative to the APOA1 or ABCA1 gene may vary. For example, the PRC2-associated region may be upstream of the 5′ end of the APOA1 or ABCA1 gene. The PRC2-associated region may be downstream of the 3′ end of the APOA1 or ABCA1 gene. The PRC2-associated region may be within an intron of the APOA1 or ABCA1 gene. The PRC2-associated region may be within an exon of the APOA1 or ABCA1 gene. The PRC2-associated region may traverse an intron-exon junction, a 5′-UTR-exon junction or a 3′-UTR-exon junction of the APOA1 or ABCA1 gene.

[0054] The single stranded oligonucleotide may comprise a sequence having the formula X-Y-Z, in which X is any nucleotide, Y is a nucleotide sequence of 6 nucleotides in length that is not a human seed sequence of a microRNA, and Z is a nucleotide sequence of varying length. In some embodiments X is the 5′ nucleotide of the oligonucleotide. In some embodiments, when X is anchored at the 5′ end of the oligonucleotide, the oligonucleotide does not have any nucleotides or nucleotide analogs linked 5′ to X. In some embodiments, other compounds such as peptides or sterols may be linked at the 5′ end in this embodiment as long as they are not nucleotides or nucleotide analogs. In some embodiments, the single stranded oligonucleotide has a sequence 5′X-Y-Z and is 8-50 nucleotides in length. Oligonucleotides that have these sequence characteristics are predicted to avoid the miRNA pathway. Therefore, in some embodiments, oligonucleotides having these sequence characteristics are unlikely to have an unintended consequence of functioning in a cell as a miRNA molecule. The Y sequence may be a nucleotide sequence of 6 nucleotides in length set forth in Table 1.

[0055] The single stranded oligonucleotide may have a sequence that does not contain guanosine nucleotide stretches (e.g., 3 or more, 4 or more, 5 or more, 6 or more consecutive guanosine nucleotides). In some embodiments, oligonucleotides having guanosine nucleotide stretches have increased non-specific binding and/or off-target effects, compared with oligonucleotides that do not have guanosine nucleotide stretches.

[0056] The single stranded oligonucleotide may have a sequence that has less than a threshold level of sequence identity with every sequence of nucleotides, of equivalent length, that map to a genomic position encompassing or in proximity to an off-target gene. For example, an oligonucleotide may be designed to ensure that it does not have a sequence that maps to genomic positions encompassing or in proximity with all known genes (e.g., all known protein coding genes) other than APOA1 or ABCA1. In a similar embodiment, an oligonucleotide may be designed to ensure that it does not have a sequence that maps to any other known PRC2-associated region, particularly PRC2-associated regions that are functionally related to any other known gene (e.g., any other known protein coding gene). In either case, the oligonucleotide is expected to have a reduced likelihood of having off-target effects. The threshold level of sequence identity may be 50%, 60%, 70%, 80%, 85%, 90%, 95%, 99% or 100% sequence identity.

[0057] The single stranded oligonucleotide may have a sequence that is complementary to a PRC2-associated region that encodes an RNA that forms a secondary structure comprising at least two single stranded loops. In has been discovered that, in some embodiments, oligonucleotides that are complementary to a PRC2-associated region that encodes an RNA that forms a secondary structure comprising one or more single stranded loops (e.g., at least two single stranded loops) have a greater likelihood of being active (e.g., of being capable of activating or enhancing expression of a target gene) than a randomly selected oligonucleotide. In some cases, the secondary structure may comprise a double stranded stem between the at least two single stranded loops. Accordingly, the region of complementarity between the oligonucleotide and the PRC2-associated region may be at a location of the PRC2 associated region that encodes at least a portion of at least one of the loops. In some cases, the region of complementarity between the oligonucleotide and the PRC2-associated region may be at a location of the PRC2-associated region that encodes at least a portion of at least two of the loops. In some cases, the region of complementarity between the oligonucleotide and the PRC2-associated region may be at a location of the PRC2 associated region that encodes at least a portion of the double stranded stem. In some embodiments, a PRC2-associated region (e.g., of an lncRNA) is identified (e.g., using RIP-Seq methodology or information derived therefrom). In some embodiments, the predicted secondary structure RNA (e.g., lncRNA) containing the PRC2-associated region is determined using RNA secondary structure prediction algorithms, e.g., RNAfold, mfold. In some embodiments, oligonucleotides are designed to target a region of the RNA that forms a secondary structure comprising one or more single stranded loop (e.g., at least two single stranded loops) structures which may comprise a double stranded stem between the at least two single stranded loops.

[0058] The single stranded oligonucleotide may have a sequence that is has greater than 30% G-C content, greater than 40% G-C content, greater than 50% G-C content, greater than 60% G-C content, greater than 70% G-C content, or greater than 80% G-C content. The single stranded oligonucleotide may have a sequence that has up to 100% G-C content, up to 95% G-C content, up to 90% G-C content, or up to 80% G-C content. In some embodiments in which the oligonucleotide is 8 to 10 nucleotides in length, all but 1, 2, 3, 4, or 5 of the nucleotides of the complementary sequence of the PRC2-associated region are cytosine or guanosine nucleotides. In some embodiments, the sequence of the PRC2-associated region to which the single stranded oligonucleotide is complementary comprises no more than 3 nucleotides selected from adenine and uracil.

[0059] The single stranded oligonucleotide may be complementary to a chromosome of a different species (e.g., a mouse, rat, rabbit, goat, monkey, etc.) at a position that encompasses or that is in proximity to that species' homolog of APOA1 or ABCA1. The single stranded oligonucleotide may be complementary to a human genomic region encompassing or in proximity to the APOA1 or ABCA1 gene and also be complementary to a mouse genomic region encompassing or in proximity to the mouse homolog of APOA1 or ABCA1. For example, the single stranded oligonucleotide may be complementary to a sequence as set forth in SEQ ID NO: 1, 2, 5 or 6, which is a human genomic region encompassing or in proximity to the APOA1 or ABCA1 gene, and also be complementary to a sequence as set forth in SEQ ID NO: 3 or 4, which is a mouse genomic region encompassing or in proximity to the mouse homolog of the APOA1 or ABCA1 gene. Oligonucleotides having these characteristics may be tested in vivo or in vitro for efficacy in multiple species (e.g., human and mouse). This approach also facilitates development of clinical candidates for treating human disease by selecting a species in which an appropriate animal exists for the disease.

[0060] In some embodiments, the region of complementarity of the single stranded oligonucleotide is complementary with at least 8 to 15, 8 to 30, 8 to 40, or 10 to 50, or 5 to 50, or 5 to 40 bases, e.g., 5, 6, 7, 8, 9, 10, 11, 12, 13, 14, 15, 16, 17, 18, 19, 20, 21, 22, 23, 24, 25, 26, 27, 28, 29, 30, 31, 32, 33, 34, 35, 36, 37, 38, 39, 40, 41, 42, 43, 44, 45, 46, 47, 48, 49, or 50 consecutive nucleotides of a PRC2-associated region. In some embodiments, the region of complementarity is complementary with at least 8 consecutive nucleotides of a PRC2-associated region. In some embodiments the sequence of the single stranded oligonucleotide is based on an RNA sequence that binds to PRC2, or a portion thereof, said portion having a length of from 5 to 40 contiguous base pairs, or about 8 to 40 bases, or about 5 to 15, or about 5 to 30, or about 5 to 40 bases, or about 5 to 50 bases.

[0061] Complementary, as the term is used in the art, refers to the capacity for precise pairing between two nucleotides. For example, if a nucleotide at a certain position of an oligonucleotide is capable of hydrogen bonding with a nucleotide at the same position of PRC2-associated region, then the single stranded nucleotide and PRC2-associated region are considered to be complementary to each other at that position. The single stranded nucleotide and PRC2-associated region are complementary to each other when a sufficient number of corresponding positions in each molecule are occupied by nucleotides that can hydrogen bond with each other through their bases. Thus, “complementary” is a term which is used to indicate a sufficient degree of complementarity or precise pairing such that stable and specific binding occurs between the single stranded nucleotide and PRC2-associated region. For example, if a base at one position of a single stranded nucleotide is capable of hydrogen bonding with a base at the corresponding position of a PRC2-associated region, then the bases are considered to be complementary to each other at that position. 100% complementarity is not required.

[0062] The single stranded oligonucleotide may be at least 80% complementary to (optionally one of at least 85%, 90%, 91%, 92%, 93%, 94%, 95%, 96%, 97%, 98%, 99% or 100% complementary to) the consecutive nucleotides of a PRC2-associated region. In some embodiments the single stranded oligonucleotide may contain 1, 2 or 3 base mismatches compared to the portion of the consecutive nucleotides of a PRC2-associated region. In some embodiments the single stranded oligonucleotide may have up to 3 mismatches over 15 bases, or up to 2 mismatches over 10 bases.

[0063] It is understood in the art that a complementary nucleotide sequence need not be 100% complementary to that of its target to be specifically hybridizable. In some embodiments, a complementary nucleic acid sequence for purposes of the present disclosure is specifically hybridizable when binding of the sequence to the target molecule (e.g., lncRNA) interferes with the normal function of the target (e.g., lncRNA) to cause a loss of activity (e.g., inhibiting PRC2-associated repression with consequent up-regulation of gene expression) and there is a sufficient degree of complementarity to avoid non-specific binding of the sequence to non-target sequences under conditions in which avoidance of non-specific binding is desired, e.g., under physiological conditions in the case of in vivo assays or therapeutic treatment, and in the case of in vitro assays, under conditions in which the assays are performed under suitable conditions of stringency.

[0064] In some embodiments, the single stranded oligonucleotide is 7, 8, 9, 10, 11, 12, 13, 14, 15, 16, 17, 18, 19, 20, 21, 22, 23, 24, 25, 26, 27, 28, 29, 30, 35, 40, 45, 50 or more nucleotides in length. In a preferred embodiment, the oligonucleotide is 8 to 30 nucleotides in length.

[0065] In some embodiments, the PRC2-associated region occurs on the same DNA strand as a gene sequence (sense). In some embodiments, the PRC2-associated region occurs on the opposite DNA strand as a gene sequence (anti-sense). Oligonucleotides complementary to a PRC2-associated region can bind either sense or anti-sense sequences. Base pairings may include both canonical Watson-Crick base pairing and non-Watson-Crick base pairing (e.g., Wobble base pairing and Hoogsteen base pairing). It is understood that for complementary base pairings, adenosine-type bases (A) are complementary to thymidine-type bases (T) or uracil-type bases (U), that cytosine-type bases (C) are complementary to guanosine-type bases (G), and that universal bases such as 3-nitropyrrole or 5-nitroindole can hybridize to and are considered complementary to any A, C, U, or T. Inosine (I) has also been considered in the art to be a universal base and is considered complementary to any A, C, U or T.

[0066] In some embodiments, any one or more thymidine (T) nucleotides (or modified nucleotide thereof) or uridine (U) nucleotides (or a modified nucleotide thereof) in a sequence provided herein, including a sequence provided in the sequence listing, may be replaced with any other nucleotide suitable for base pairing (e.g., via a Watson-Crick base pair) with an adenosine nucleotide. In some embodiments, any one or more thymidine (T) nucleotides (or modified nucleotide thereof) or uridine (U) nucleotides (or a modified nucleotide thereof) in a sequence provided herein, including a sequence provided in the sequence listing, may be suitably replaced with a different pyrimidine nucleotide or vice versa. In some embodiments, any one or more thymidine (T) nucleotides (or modified nucleotide thereof) in a sequence provided herein, including a sequence provided in the sequence listing, may be suitably replaced with a uridine (U) nucleotide (or a modified nucleotide thereof) or vice versa.

[0067] In some embodiments, GC content of the single stranded oligonucleotide is preferably between about 30-60%. Contiguous runs of three or more Gs or Cs may not be preferable in some embodiments. Accordingly, in some embodiments, the oligonucleotide does not comprise a stretch of three or more guanosine nucleotides.

[0068] In some embodiments, the single stranded oligonucleotide specifically binds to, or is complementary to an RNA that is encoded in a genome (e.g., a human genome) as a single contiguous transcript (e.g., a non-spliced RNA). In some embodiments, the single stranded oligonucleotide specifically binds to, or is complementary to an RNA that is encoded in a genome (e.g., a human genome), in which the distance in the genome between the 5′end of the coding region of the RNA and the 3′ end of the coding region of the RNA is less than 1 kb, less than 2 kb, less than 3 kb, less than 4 kb, less than 5 kb, less than 7 kb, less than 8 kb, less than 9 kb, less than 10 kb, or less than 20 kb.

[0069] It is to be understood that any oligonucleotide provided herein can be excluded. In some embodiments, a single stranded oligonucleotide is not complementary to SEQ ID NO: 187522. In some embodiments, a single stranded oligonucleotide is not complementary to SEQ ID NO: 187523.

[0070] In some embodiments, a single-stranded oligonucleotide is complementary to a sequence within nucleotides 36 to 3115 or 3159 to 4038 of SEQ ID NO: 80. In some embodiments, a single-stranded oligonucleotide is complementary to a sequence within nucleotides 1 to 160 or 197 to 4056 of SEQ ID NO: 83. In some embodiments, a single-stranded oligonucleotide is complementary to a sequence within nucleotides 1 to 4008 or 4045 to 4046 of SEQ ID NO: 84. In some embodiments, a single-stranded oligonucleotide is complementary to a sequence within nucleotides 1 to 76 or 114 to 4045 of SEQ ID NO: 91. In some embodiments, a single-stranded oligonucleotide is complementary to a sequence within nucleotides 1 to 743 or 781 to 4045 of SEQ ID NO: 92. In some embodiments, a single-stranded oligonucleotide is complementary to a sequence within nucleotides 1 to 253 or 295 to 2316 or 2354 to 4046 of SEQ ID NO: 93. In some embodiments, a single-stranded oligonucleotide is complementary to a sequence within nucleotides 1 to 413 or 455 to 2476 or 2514 to 4047 of SEQ ID NO: 94. In some embodiments, a single-stranded oligonucleotide is complementary to a sequence within nucleotides 1 to 1421 or 1463 to 3484 or 3522 to 4024 of SEQ ID NO: 95. In some embodiments, a single-stranded oligonucleotide is complementary to a sequence within nucleotides 1 to 2821 or 2863 to 4042 of SEQ ID NO: 96. In some embodiments, a single-stranded oligonucleotide is complementary to a sequence within nucleotides 1 to 3646 or 3688 to 4023 of SEQ ID NO: 97. In some embodiments, a single-stranded oligonucleotide is complementary to a sequence within nucleotides 1 to 67 or 111 to 3141 or 3198 to 3428 or 3519 to 4050 of SEQ ID NO: 183. In some embodiments, a single-stranded oligonucleotide is complementary to a sequence within nucleotides 1 to 1199 or 1256 to 1486 or 1577 to 4044 of SEQ ID NO: 184. In some embodiments, a single-stranded oligonucleotide is complementary to a sequence within nucleotides 1 to 419, or 494 to 2471 or 2508 to 4074 of SEQ ID NO: 191. In some embodiments, a single-stranded oligonucleotide is complementary to a sequence within nucleotides 1 to 787 or 824 to 4058 of SEQ ID NO: 192. In some embodiments, a single-stranded oligonucleotide is complementary to a sequence within nucleotides 1 to 3029 or 3067 to 4041 of SEQ ID NO: 193. In some embodiments, a single-stranded oligonucleotide is complementary to a sequence within nucleotides 1 to 2546 or 2584 to 4040 of SEQ ID NO: 194.

[0071] In some embodiments, it has been found that single stranded oligonucleotides disclosed herein may increase expression of mRNA corresponding to the gene by at least about 50% (i.e. 150% of normal or 1.5 fold), or by about 2 fold to about 5 fold. In some embodiments it is contemplated that expression may be increased by at least about 15 fold, 20 fold, 30 fold, 40 fold, 50 fold or 100 fold, or any range between any of the foregoing numbers. It has also been found that increased mRNA expression has been shown to correlate to increased protein expression.

[0072] In some or any of the embodiments of the oligonucleotides described herein, or processes for designing or synthesizing them, the oligonucleotides will upregulate gene expression and may specifically bind or specifically hybridize or be complementary to the PRC2 binding RNA that is transcribed from the same strand as a protein coding reference gene. The oligonucleotide may bind to a region of the PRC2 binding RNA that originates within or overlaps an intron, exon, intron exon junction, 5′ UTR, 3′ UTR, a translation initiation region, or a translation termination region of a protein coding sense strand of a reference gene (refGene).

[0073] In some or any of the embodiments of oligonucleotides described herein, or processes for designing or synthesizing them, the oligonucleotides will upregulate gene expression and may specifically bind or specifically hybridize or be complementary to a PRC2 binding RNA that transcribed from the opposite strand (the antisense strand) of a protein coding reference gene. The oligonucleotide may bind to a region of the PRC2 binding RNA that originates within or overlaps an intron, exon, intron exon junction, 5′ UTR, 3′ UTR, a translation initiation region, or a translation termination region of a protein coding antisense strand of a reference gene

[0074] The oligonucleotides described herein may be modified, e.g., comprise a modified sugar moiety, a modified internucleoside linkage, a modified nucleotide and/or combinations thereof. In addition, the oligonucleotides can exhibit one or more of the following properties: do not induce substantial cleavage or degradation of the target RNA; do not cause substantially complete cleavage or degradation of the target RNA; do not activate the RNAse H pathway; do not activate RISC; do not recruit any Argonaute family protein; are not cleaved by Dicer; do not mediate alternative splicing; are not immune stimulatory; are nuclease resistant; have improved cell uptake compared to unmodified oligonucleotides; are not toxic to cells or mammals; may have improved endosomal exit; do interfere with interaction of lncRNA with PRC2, preferably the Ezh2 subunit but optionally the Suz12, Eed, RbAp46/48 subunits or accessory factors such as Jarid2; do decrease histone H3 lysine27 methylation and/or do upregulate gene expression.

[0075] Oligonucleotides that are designed to interact with RNA to modulate gene expression are a distinct subset of base sequences from those that are designed to bind a DNA target (e.g., are complementary to the underlying genomic DNA sequence from which the RNA is transcribed).

[0076] Any of the oligonucleotides disclosed herein may be linked to one or more other oligonucleotides disclosed herein by a linker, e.g., a cleavable linker.

### Method for Selecting Candidate Oligonucleotides for Activating Expression of APOA1 or ABCA1

[0077] Methods are provided herein for selecting a candidate oligonucleotide for activating or enhancing expression of APOA1 or ABCA1. The target selection methods may generally involve steps for selecting single stranded oligonucleotides having any of the structural and functional characteristics disclosed herein. Typically, the methods involve one or more steps aimed at identifying oligonucleotides that target a PRC2-associated region that is functionally related to APOA1 or ABCA1, for example a PRC2-associated region of a lncRNA that regulates expression of APOA1 or ABCA1 by facilitating (e.g., in a cis-regulatory manner) the recruitment of PRC2 to the APOA1 or ABCA1 gene. Such oligonucleotides are expected to be candidates for activating expression of APOA1 or ABCA1 because of their ability to hybridize with the PRC2-associated region of a nucleic acid (e.g., a lncRNA). In some embodiments, this hybridization event is understood to disrupt interaction of PRC2 with the nucleic acid (e.g., a lncRNA) and as a result disrupt recruitment of PRC2 and its associated co-repressors (e.g., chromatin remodeling factors) to the APOA1 or ABCA1 gene locus.

[0078] Methods of selecting a candidate oligonucleotide may involve selecting a PRC2-associated region (e.g., a nucleotide sequence as set forth in any one of SEQ ID NOS: 9 to 194) that maps to a chromosomal position encompassing or in proximity to the APOA1 or ABCA1 gene (e.g., a chromosomal position having a sequence as set forth in SEQ ID NOs: 9-194). The PRC2-associated region may map to the strand of the chromosome comprising the sense strand of the APOA1 or ABCA1 gene, in which case the candidate oligonucleotide is complementary to the sense strand of the APOA1 or ABCA1 gene (i.e., is antisense to the APOA1 or ABCA1 gene). Alternatively, the PRC2-associated region may map to the strand of the first chromosome comprising the antisense strand of the APOA1 or ABCA1 gene, in which case the oligonucleotide is complementary to the antisense strand (the template strand) of the APOA1 or ABCA1 gene (i.e., is sense to the APOA1 or ABCA1 gene).

[0079] Methods for selecting a set of candidate oligonucleotides that is enriched in oligonucleotides that activate expression of APOA1 or ABCA1 may involve selecting one or more PRC2-associated regions that map to a chromosomal position that encompasses or that is in proximity to the APOA1 or ABCA1 gene and selecting a set of oligonucleotides, in which each oligonucleotide in the set comprises a nucleotide sequence that is complementary with the one or more PRC2-associated regions. As used herein, the phrase, “a set of oligonucleotides that is enriched in oligonucleotides that activate expression of” refers to a set of oligonucleotides that has a greater number of oligonucleotides that activate expression of a target gene (e.g., APOA1 or ABCA1) compared with a random selection of oligonucleotides of the same physicochemical properties (e.g., the same GC content, Tₘ, length etc.) as the enriched set.

[0080] Where the design and/or synthesis of a single stranded oligonucleotide involves design and/or synthesis of a sequence that is complementary to a nucleic acid or PRC2-associated region described by such sequence information, the skilled person is readily able to determine the complementary sequence, e.g., through understanding of Watson Crick base pairing rules which form part of the common general knowledge in the field.

[0081] In some embodiments design and/or synthesis of a single stranded oligonucleotide involves manufacture of an oligonucleotide from starting materials by techniques known to those of skill in the art, where the synthesis may be based on a sequence of a PRC2-associated region, or portion thereof.

[0082] Methods of design and/or synthesis of a single stranded oligonucleotide may involve one or more of the steps of:

[0083] Identifying and/or selecting PRC2-associated region;

[0084] Designing a nucleic acid sequence having a desired degree of sequence identity or complementarity to a PRC2-associated region or a portion thereof;

[0085] Synthesizing a single stranded oligonucleotide to the designed sequence;

[0086] Purifying the synthesized single stranded oligonucleotide; and

[0087] Optionally mixing the synthesized single stranded oligonucleotide with at least one pharmaceutically acceptable diluent, carrier or excipient to form a pharmaceutical composition or medicament.

[0088] Single stranded oligonucleotides so designed and/or synthesized may be useful in method of modulating gene expression as described herein.

[0089] Preferably, single stranded oligonucleotides of the invention are synthesized chemically. Oligonucleotides used to practice this invention can be synthesized in vitro by well-known chemical synthesis techniques.

[0090] Oligonucleotides of the invention can be stabilized against nucleolytic degradation such as by the incorporation of a modification, e.g., a nucleotide modification. For example, nucleic acid sequences of the invention include a phosphorothioate at least the first, second, or third internucleotide linkage at the 5′ or 3′ end of the nucleotide sequence. As another example, the nucleic acid sequence can include a 2′-modified nucleotide, e.g., a 2′-deoxy, 2′-deoxy-2′-fluoro, 2′-O-methyl, 2′-O-methoxyethyl (2′-O-MOE), 2′-O-aminopropyl (2′-O-AP), 2′-O-dimethylaminoethyl (2′-O-DMAOE), 2′-O-dimethylaminopropyl (2′-O-DMAP), 2′-O-dimethylaminoethyloxyethyl (2′-O-DMAEOE), or 2′-O—N-methylacetamido (2′-O-NMA). As another example, the nucleic acid sequence can include at least one 2′-O-methyl-modified nucleotide, and in some embodiments, all of the nucleotides include a 2′-O-methyl modification. In some embodiments, the nucleic acids are “locked,” i.e., comprise nucleic acid analogues in which the ribose ring is “locked” by a methylene bridge connecting the 2′-O atom and the 4′-C atom.

[0091] It is understood that any of the modified chemistries or formats of single stranded oligonucleotides described herein can be combined with each other, and that one, two, three, four, five, or more different types of modifications can be included within the same molecule.

[0092] In some embodiments, the method may further comprise the steps of amplifying the synthesized single stranded oligonucleotide, and/or purifying the single stranded oligonucleotide (or amplified single stranded oligonucleotide), and/or sequencing the single stranded oligonucleotide so obtained.

[0093] As such, the process of preparing a single stranded oligonucleotide may be a process that is for use in the manufacture of a pharmaceutical composition or medicament for use in the treatment of disease, optionally wherein the treatment involves modulating expression of a gene associated with a PRC2-associated region.

[0094] In the methods described above a PRC2-associated region may be, or have been, identified, or obtained, by a method that involves identifying RNA that binds to PRC2.

[0095] Such methods may involve the following steps: providing a sample containing nuclear ribonucleic acids, contacting the sample with an agent that binds specifically to PRC2 or a subunit thereof, allowing complexes to form between the agent and protein in the sample, partitioning the complexes, synthesizing nucleic acid that is complementary to nucleic acid present in the complexes.

[0096] Where the single stranded oligonucleotide is based on a PRC2-associated region, or a portion of such a sequence, it may be based on information about that sequence, e.g., sequence information available in written or electronic form, which may include sequence information contained in publicly available scientific publications or sequence databases.

### Nucleotide Analogues

[0097] In some embodiments, the oligonucleotide may comprise at least one ribonucleotide, at least one deoxyribonucleotide, and/or at least one bridged nucleotide. In some embodiments, the oligonucleotide may comprise a bridged nucleotide, such as a locked nucleic acid (LNA) nucleotide, a constrained ethyl (cEt) nucleotide, or an ethylene bridged nucleic acid (ENA) nucleotide. Examples of such nucleotides are disclosed herein and known in the art. In some embodiments, the oligonucleotide comprises a nucleotide analog disclosed in one of the following United States patent or patent application Publications: U.S. Pat. No. 7,399,845, U.S. Pat. No. 7,741,457, U.S. Pat. No. 8,022,193, U.S. Pat. No. 7,569,686, U.S. Pat. No. 7,335,765, U.S. Pat. No. 7,314,923, U.S. Pat. No. 7,335,765, and U.S. Pat. No. 7,816,333, US 20110009471, the entire contents of each of which are incorporated herein by reference for all purposes. The oligonucleotide may have one or more 2′ O-methyl nucleotides. The oligonucleotide may consist entirely of 2′ O-methyl nucleotides.

[0098] Often the single stranded oligonucleotide has one or more nucleotide analogues. For example, the single stranded oligonucleotide may have at least one nucleotide analogue that results in an increase in Tₘ of the oligonucleotide in a range of 1° C., 2° C., 3° C., 4° C., or 5° C. compared with an oligonucleotide that does not have the at least one nucleotide analogue. The single stranded oligonucleotide may have a plurality of nucleotide analogues that results in a total increase in Tₘ of the oligonucleotide in a range of 2° C., 3° C., 4° C., 5° C., 6° C., 7° C., 8° C., 9° C., 10° C., 15° C., 20° C., 25° C., 30° C., 35° C., 40° C., 45° C. or more compared with an oligonucleotide that does not have the nucleotide analogue.

[0099] The oligonucleotide may be of up to 50 nucleotides in length in which 2 to 10, 2 to 15, 2 to 16, 2 to 17, 2 to 18, 2 to 19, 2 to 20, 2 to 25, 2 to 30, 2 to 40, 2 to 45, or more nucleotides of the oligonucleotide are nucleotide analogues. The oligonucleotide may be of 8 to 30 nucleotides in length in which 2 to 10, 2 to 15, 2 to 16, 2 to 17, 2 to 18, 2 to 19, 2 to 20, 2 to 25, 2 to 30 nucleotides of the oligonucleotide are nucleotide analogues. The oligonucleotide may be of 8 to 15 nucleotides in length in which 2 to 4, 2 to 5, 2 to 6, 2 to 7, 2 to 8, 2 to 9, 2 to 10, 2 to 11, 2 to 12, 2 to 13, 2 to 14 nucleotides of the oligonucleotide are nucleotide analogues. Optionally, the oligonucleotides may have every nucleotide except 1, 2, 3, 4, 5, 6, 7, 8, 9, or 10 nucleotides modified.

[0100] The oligonucleotide may consist entirely of bridged nucleotides (e.g., LNA nucleotides, cEt nucleotides, ENA nucleotides). The oligonucleotide may comprise alternating deoxyribonucleotides and 2′-fluoro-deoxyribonucleotides. The oligonucleotide may comprise alternating deoxyribonucleotides and 2′-O-methyl nucleotides. The oligonucleotide may comprise alternating deoxyribonucleotides and ENA nucleotide analogues. The oligonucleotide may comprise alternating deoxyribonucleotides and LNA nucleotides. The oligonucleotide may comprise alternating LNA nucleotides and 2′-O-methyl nucleotides. The oligonucleotide may have a 5′ nucleotide that is a bridged nucleotide (e.g., a LNA nucleotide, cEt nucleotide, ENA nucleotide). The oligonucleotide may have a 5′ nucleotide that is a deoxyribonucleotide.

[0101] The oligonucleotide may comprise deoxyribonucleotides flanked by at least one bridged nucleotide (e.g., a LNA nucleotide, cEt nucleotide, ENA nucleotide) on each of the 5′ and 3′ ends of the deoxyribonucleotides. The oligonucleotide may comprise deoxyribonucleotides flanked by 1, 2, 3, 4, 5, 6, 7, 8 or more bridged nucleotides (e.g., LNA nucleotides, cEt nucleotides, ENA nucleotides) on each of the 5′ and 3′ ends of the deoxyribonucleotides. The 3′ position of the oligonucleotide may have a 3′ hydroxyl group. The 3′ position of the oligonucleotide may have a 3′ thiophosphate.

[0102] The oligonucleotide may be conjugated with a label. For example, the oligonucleotide may be conjugated with a biotin moiety, cholesterol, Vitamin A, folate, sigma receptor ligands, aptamers, peptides, such as CPP, hydrophobic molecules, such as lipids, ASGPR or dynamic polyconjugates and variants thereof at its 5′ or 3′ end.

[0103] Preferably the single stranded oligonucleotide comprises one or more modifications comprising: a modified sugar moiety, and/or a modified internucleoside linkage, and/or a modified nucleotide and/or combinations thereof. It is not necessary for all positions in a given oligonucleotide to be uniformly modified, and in fact more than one of the modifications described herein may be incorporated in a single oligonucleotide or even at within a single nucleoside within an oligonucleotide.

[0104] In some embodiments, the single stranded oligonucleotides are chimeric oligonucleotides that contain two or more chemically distinct regions, each made up of at least one nucleotide. These oligonucleotides typically contain at least one region of modified nucleotides that confers one or more beneficial properties (such as, for example, increased nuclease resistance, increased uptake into cells, increased binding affinity for the target) and a region that is a substrate for enzymes capable of cleaving RNA:DNA or RNA:RNA hybrids. Chimeric single stranded oligonucleotides of the invention may be formed as composite structures of two or more oligonucleotides, modified oligonucleotides, oligonucleosides and/or oligonucleotide mimetics as described above. Such compounds have also been referred to in the art as hybrids or gapmers. Representative United States patents that teach the preparation of such hybrid structures comprise, but are not limited to, U.S. Pat. Nos. 5,013,830; 5,149,797; 5,220,007; 5,256,775; 5,366,878; 5,403,711; 5,491,133; 5,565,350; 5,623,065; 5,652,355; 5,652,356; and 5,700,922, each of which is herein incorporated by reference.

[0105] In some embodiments, the single stranded oligonucleotide comprises at least one nucleotide modified at the 2′ position of the sugar, most preferably a 2′-O-alkyl, 2′-O-alkyl-O-alkyl or 2′-fluoro-modified nucleotide. In other preferred embodiments, RNA modifications include 2′-fluoro, 2′-amino and 2′ O-methyl modifications on the ribose of pyrimidines, abasic residues or an inverted base at the 3′ end of the RNA. Such modifications are routinely incorporated into oligonucleotides and these oligonucleotides have been shown to have a higher Tm (i.e., higher target binding affinity) than 2′-deoxyoligonucleotides against a given target.

[0106] A number of nucleotide and nucleoside modifications have been shown to make the oligonucleotide into which they are incorporated more resistant to nuclease digestion than the native oligodeoxynucleotide; these modified oligos survive intact for a longer time than unmodified oligonucleotides. Specific examples of modified oligonucleotides include those comprising modified backbones, for example, phosphorothioates, phosphotriesters, methyl phosphonates, short chain alkyl or cycloalkyl intersugar linkages or short chain heteroatomic or heterocyclic intersugar linkages. Most preferred are oligonucleotides with phosphorothioate backbones and those with heteroatom backbones, particularly CH₂—NH—O—CH₂, CH, ˜N(CH₃)˜O˜CH₂ (known as a methylene(methylimino) or MMI backbone, CH₂—O—N(CH₃)—CH₂, CH₂—N(CH₃)—N(CH₃)—CH₂ and O—N(CH₃)— CH₂—CH₂ backbones, wherein the native phosphodiester backbone is represented as O—P—O—CH,); amide backbones (see De Mesmaeker et al. Ace. Chem. Res. 1995, 28:366-374); morpholino backbone structures (see Summerton and Weller, U.S. Pat. No. 5,034,506); peptide nucleic acid (PNA) backbone (wherein the phosphodiester backbone of the oligonucleotide is replaced with a polyamide backbone, the nucleotides being bound directly or indirectly to the aza nitrogen atoms of the polyamide backbone, see Nielsen et al., Science 1991, 254, 1497). Phosphorus-containing linkages include, but are not limited to, phosphorothioates, chiral phosphorothioates, phosphorodithioates, phosphotriesters, aminoalkylphosphotriesters, methyl and other alkyl phosphonates comprising 3′alkylene phosphonates and chiral phosphonates, phosphinates, phosphoramidates comprising 3′-amino phosphoramidate and aminoalkylphosphoramidates, thionophosphoramidates, thionoalkylphosphonates, thionoalkylphosphotriesters, and boranophosphates having normal 3′-5′ linkages, 2′-5′ linked analogs of these, and those having inverted polarity wherein the adjacent pairs of nucleoside units are linked 3′-5′ to 5′-3′ or 2′-5′ to 5′-2′; see U.S. Pat. Nos. 3,687,808; 4,469,863; 4,476,301; 5,023,243; 5,177,196; 5,188,897; 5,264,423; 5,276,019; 5,278,302; 5,286,717; 5,321,131; 5,399,676; 5,405,939; 5,453,496; 5,455, 233; 5,466,677; 5,476,925; 5,519,126; 5,536,821; 5,541,306; 5,550,111; 5,563, 253; 5,571,799; 5,587,361; and 5,625,050.

[0107] Morpholino-based oligomeric compounds are described in Dwaine A. Braasch and David R. Corey, Biochemistry, 2002, 41(14), 4503-4510); Genesis, volume 30, issue 3, 2001; Heasman, J., Dev. Biol., 2002, 243, 209-214; Nasevicius et al., Nat. Genet., 2000, 26, 216-220; Lacerra et al., Proc. Natl. Acad. Sci., 2000, 97, 9591-9596; and U.S. Pat. No. 5,034,506, issued Jul. 23, 1991. In some embodiments, the morpholino-based oligomeric compound is a phosphorodiamidate morpholino oligomer (PMO) (e.g., as described in Iverson, Curr. Opin. Mol. Ther., 3:235-238, 2001; and Wang et al., J. Gene Med., 12:354-364, 2010; the disclosures of which are incorporated herein by reference in their entireties).

[0108] Cyclohexenyl nucleic acid oligonucleotide mimetics are described in Wang et al., J. Am. Chem. Soc., 2000, 122, 8595-8602.

[0109] Modified oligonucleotide backbones that do not include a phosphorus atom therein have backbones that are formed by short chain alkyl or cycloalkyl internucleoside linkages, mixed heteroatom and alkyl or cycloalkyl internucleoside linkages, or one or more short chain heteroatomic or heterocyclic internucleoside linkages. These comprise those having morpholino linkages (formed in part from the sugar portion of a nucleoside); siloxane backbones; sulfide, sulfoxide and sulfone backbones; formacetyl and thioformacetyl backbones; methylene formacetyl and thioformacetyl backbones; alkene containing backbones; sulfamate backbones; methyleneimino and methylenehydrazino backbones; sulfonate and sulfonamide backbones; amide backbones; and others having mixed N, O, S and CH2 component parts; see U.S. Pat. Nos. 5,034,506; 5,166,315; 5,185,444; 5,214,134; 5,216,141; 5,235,033; 5,264,562; 5,264,564; 5,405,938; 5,434,257; 5,466,677; 5,470,967; 5,489,677; 5,541,307; 5,561,225; 5,596,086; 5,602,240; 5,610,289; 5,602,240; 5,608,046; 5,610,289; 5,618,704; 5,623,070; 5,663,312; 5,633,360; 5,677,437; and 5,677,439, each of which is herein incorporated by reference.

[0110] Modified oligonucleotides are also known that include oligonucleotides that are based on or constructed from arabinonucleotide or modified arabinonucleotide residues. Arabinonucleosides are stereoisomers of ribonucleosides, differing only in the configuration at the 2′-position of the sugar ring. In some embodiments, a 2′-arabino modification is 2′-F arabino. In some embodiments, the modified oligonucleotide is 2′-fluoro-D-arabinonucleic acid (FANA) (as described in, for example, Lon et al., Biochem., 41:3457-3467, 2002 and Min et al., Bioorg. Med. Chem. Lett., 12:2651-2654, 2002; the disclosures of which are incorporated herein by reference in their entireties). Similar modifications can also be made at other positions on the sugar, particularly the 3′ position of the sugar on a 3′ terminal nucleoside or in 2′-5′ linked oligonucleotides and the 5′ position of 5′ terminal nucleotide.

[0111] PCT Publication No. WO 99/67378 discloses arabinonucleic acids (ANA) oligomers and their analogues for improved sequence specific inhibition of gene expression via association to complementary messenger RNA.

[0112] Other preferred modifications include ethylene-bridged nucleic acids (ENAs) (e.g., International Patent Publication No. WO 2005/042777, Morita et al., Nucleic Acid Res., Suppl 1:241-242, 2001; Surono et al., Hum. Gene Ther., 15:749-757, 2004; Koizumi, Curr. Opin. Mol. Ther., 8:144-149, 2006 and Horie et al., Nucleic Acids Symp. Ser (Oxf), 49:171-172, 2005; the disclosures of which are incorporated herein by reference in their entireties). Preferred ENAs include, but are not limited to, 2′-O,4′-C-ethylene-bridged nucleic acids.

[0113] Examples of LNAs are described in WO/2008/043753 and include compounds of the following general formula.

[chemical structure]

[0114] where X and Y are independently selected among the groups —O—,

[0115] —S—, —N(H)—, N(R)—, —CH₂— or —CH— (if part of a double bond),

[0116] —CH₂—O—, —CH₂—S—, —CH₂—N(H)—, —CH₂—N(R)—, —CH₂—CH₂— or —CH₂—CH— (if part of a double bond),

[0117] —CH═CH—, where R is selected from hydrogen and C₁₋₄-alkyl; Z and Z* are independently selected among an internucleoside linkage, a terminal group or a protecting group; B constitutes a natural or non-natural nucleotide base moiety; and the asymmetric groups may be found in either orientation.

[0118] Preferably, the LNA used in the oligonucleotides described herein comprises at least one LNA unit according any of the formulas

[chemical structure]

[0119] wherein Y is —O—, —S—, —NH—, or N(R^{H}); Z and Z* are independently selected among an internucleoside linkage, a terminal group or a protecting group; B constitutes a natural or non-natural nucleotide base moiety, and RH is selected from hydrogen and C₁₋₄-alkyl.

[0120] In some embodiments, the Locked Nucleic Acid (LNA) used in the oligonucleotides described herein comprises at least one Locked Nucleic Acid (LNA) unit according any of the formulas shown in Scheme 2 of PCT/DK2006/000512.

[0121] In some embodiments, the LNA used in the oligomer of the invention comprises internucleoside linkages selected from —O—P(O)₂—O—, —O—P(O,S)—O—, —O—P(S)₂—O—, —S—P(O)₂—O—, —S—P(O,S)—O—, —S—P(S)₂—O—, —O—P(O)₂—S—, —O—P(O,S)—S—, —S—P(O)₂—S—, —O—PO(R^{H})—O—, O—PO(OCH₃)—O—, —O—PO(NR^{H})—O—, —O—PO(OCH₂CH₂S—R)—O—, —O—PO(BH₃)—O—, —O—PO(NHR^{H})—O—, —O—P(O)₂—NR^{H}—, —NR^{H}—P(O)₂—O—, —NR^{H}—CO—O—, where R^{H} is selected from hydrogen and C₁₋₄-alkyl.

[0122] Specifically preferred LNA units are shown in scheme 2:

[chemical structure]

[0123] The term “thio-LNA” comprises a locked nucleotide in which at least one of X or Y in the general formula above is selected from S or —CH₂—S—. Thio-LNA can be in both beta-D and alpha-L-configuration.

[0124] The term “amino-LNA” comprises a locked nucleotide in which at least one of X or Y in the general formula above is selected from —N(H)—, N(R)—, CH₂—N(H)—, and —CH₂—N(R)— where R is selected from hydrogen and C₁₋₄-alkyl. Amino-LNA can be in both beta-D and alpha-L-configuration.

[0125] The term “oxy-LNA” comprises a locked nucleotide in which at least one of X or Y in the general formula above represents —O— or —CH₂—O—. Oxy-LNA can be in both beta-D and alpha-L-configuration.

[0126] The term “ena-LNA” comprises a locked nucleotide in which Y in the general formula above is —CH₂—O— (where the oxygen atom of —CH₂—O— is attached to the 2′-position relative to the base B).

[0127] LNAs are described in additional detail herein.

[0128] One or more substituted sugar moieties can also be included, e.g., one of the following at the 2′ position: OH, SH, SCH₃, F, OCN, OCH₃OCH₃, OCH₃O(CH₂)n CH₃, O(CH₂)n NH₂ or O(CH₂)n CH₃ where n is from 1 to about 10; Ci to C10 lower alkyl, alkoxyalkoxy, substituted lower alkyl, alkaryl or aralkyl; Cl; Br; CN; CF₃; OCF₃; O—, S—, or N-alkyl; O-, S-, or N-alkenyl; SOCH₃; SO₂CH₃; ONO₂; NO₂; N₃; NH2; heterocycloalkyl; heterocycloalkaryl; aminoalkylamino; polyalkylamino; substituted silyl; an RNA cleaving group; a reporter group; an intercalator; a group for improving the pharmacokinetic properties of an oligonucleotide; or a group for improving the pharmacodynamic properties of an oligonucleotide and other substituents having similar properties. A preferred modification includes 2′-methoxyethoxy[2′-0-CH₂CH₂OCH₃, also known as 2′-O-(2-methoxyethyl)] (Martin et al, Helv. Chim. Acta, 1995, 78, 486). Other preferred modifications include 2′-methoxy (2′-0-CH₃), 2′-propoxy (2′-OCH₂CH₂CH₃) and 2′-fluoro (2′-F). Similar modifications may also be made at other positions on the oligonucleotide, particularly the 3′ position of the sugar on the 3′ terminal nucleotide and the 5′ position of 5′ terminal nucleotide. Oligonucleotides may also have sugar mimetics such as cyclobutyls in place of the pentofuranosyl group.

[0129] Single stranded oligonucleotides can also include, additionally or alternatively, nucleobase (often referred to in the art simply as “base”) modifications or substitutions. As used herein, “unmodified” or “natural” nucleobases include adenine (A), guanine (G), thymine (T), cytosine (C) and uracil (U). Modified nucleobases include nucleobases found only infrequently or transiently in natural nucleic acids, e.g., hypoxanthine, 6-methyladenine, 5-Me pyrimidines, particularly 5-methylcytosine (also referred to as 5-methyl-2′ deoxycytosine and often referred to in the art as 5-Me-C), 5-hydroxymethylcytosine (HMC), glycosyl HMC and gentobiosyl HMC, isocytosine, pseudoisocytosine, as well as synthetic nucleobases, e.g., 2-aminoadenine, 2-(methylamino)adenine, 2-(imidazolylalkyl)adenine, 2-(aminoalklyamino)adenine or other heterosubstituted alkyladenines, 2-thiouracil, 2-thiothymine, 5-bromouracil, 5-hydroxymethyluracil, 5-propynyluracil, 8-azaguanine, 7-deazaguanine, N6 (6-aminohexyl)adenine, 6-aminopurine, 2-aminopurine, 2-chloro-6-aminopurine and 2,6-diaminopurine or other diaminopurines. See, e.g., Kornberg, “DNA Replication,” W. H. Freeman & Co., San Francisco, 1980, pp 75-77; and Gebeyehu, G., et al. Nucl. Acids Res., 15:4513 (1987)). A “universal” base known in the art, e.g., inosine, can also be included. 5-Me-C substitutions have been shown to increase nucleic acid duplex stability by 0.6-1.2° C. (Sanghvi, in Crooke, and Lebleu, eds., Antisense Research and Applications, CRC Press, Boca Raton, 1993, pp. 276-278) and may be used as base substitutions.

[0130] It is not necessary for all positions in a given oligonucleotide to be uniformly modified, and in fact more than one of the modifications described herein may be incorporated in a single oligonucleotide or even at within a single nucleoside within an oligonucleotide.

[0131] In some embodiments, both a sugar and an internucleoside linkage, i.e., the backbone, of the nucleotide units are replaced with novel groups. The base units are maintained for hybridization with an appropriate nucleic acid target compound. One such oligomeric compound, an oligonucleotide mimetic that has been shown to have excellent hybridization properties, is referred to as a peptide nucleic acid (PNA). In PNA compounds, the sugar-backbone of an oligonucleotide is replaced with an amide containing backbone, for example, an aminoethylglycine backbone. The nucleobases are retained and are bound directly or indirectly to aza nitrogen atoms of the amide portion of the backbone. Representative United States patents that teach the preparation of PNA compounds include, but are not limited to, U.S. Pat. Nos. 5,539,082; 5,714,331; and 5,719,262, each of which is herein incorporated by reference. Further teaching of PNA compounds can be found in Nielsen et al, Science, 1991, 254, 1497-1500.

[0132] Single stranded oligonucleotides can also include one or more nucleobase (often referred to in the art simply as “base”) modifications or substitutions. As used herein, “unmodified” or “natural” nucleobases comprise the purine bases adenine (A) and guanine (G), and the pyrimidine bases thymine (T), cytosine (C) and uracil (U). Modified nucleobases comprise other synthetic and natural nucleobases such as 5-methylcytosine (5-me-C), 5-hydroxymethyl cytosine, xanthine, hypoxanthine, 2-aminoadenine, 6-methyl and other alkyl derivatives of adenine and guanine, 2-propyl and other alkyl derivatives of adenine and guanine, 2-thiouracil, 2-thiothymine and 2-thiocytosine, 5-halouracil and cytosine, 5-propynyl uracil and cytosine, 6-azo uracil, cytosine and thymine, 5-uracil (pseudo-uracil), 4-thiouracil, 8-halo, 8-amino, 8-thiol, 8-thioalkyl, 8-hydroxyl and other 8-substituted adenines and guanines, 5-halo particularly 5-bromo, 5-trifluoromethyl and other 5-substituted uracils and cytosines, 7-methylquanine and 7-methyladenine, 8-azaguanine and 8-azaadenine, 7-deazaguanine and 7-deazaadenine and 3-deazaguanine and 3-deazaadenine.

[0133] Further, nucleobases comprise those disclosed in U.S. Pat. No. 3,687,808, those disclosed in “The Concise Encyclopedia of Polymer Science And Engineering”, pages 858-859, Kroschwitz, ed. John Wiley & Sons, 1990; those disclosed by Englisch et al., Angewandle Chemie, International Edition, 1991, 30, page 613, and those disclosed by Sanghvi, Chapter 15, Antisense Research and Applications,” pages 289-302, Crooke, and Lebleu, eds., CRC Press, 1993. Certain of these nucleobases are particularly useful for increasing the binding affinity of the oligomeric compounds of the invention. These include 5-substituted pyrimidines, 6-azapyrimidines and N-2, N-6 and 0-6 substituted purines, comprising 2-aminopropyladenine, 5-propynyluracil and 5-propynylcytosine. 5-methylcytosine substitutions have been shown to increase nucleic acid duplex stability by 0.6-1.2<0>C (Sanghvi, et al., eds, “Antisense Research and Applications,” CRC Press, Boca Raton, 1993, pp. 276-278) and are presently preferred base substitutions, even more particularly when combined with 2′-O-methoxyethyl sugar modifications. Modified nucleobases are described in U.S. Pat. No. 3,687,808, as well as U.S. Pat. Nos. 4,845,205; 5,130,302; 5,134,066; 5,175, 273; 5, 367,066; 5,432,272; 5,457,187; 5,459,255; 5,484,908; 5,502,177; 5,525,711; 5,552,540; 5,587,469; 5,596,091; 5,614,617; 5,750,692, and 5,681,941, each of which is herein incorporated by reference.

[0134] In some embodiments, the single stranded oligonucleotides are chemically linked to one or more moieties or conjugates that enhance the activity, cellular distribution, or cellular uptake of the oligonucleotide. For example, one or more single stranded oligonucleotides, of the same or different types, can be conjugated to each other; or single stranded oligonucleotides can be conjugated to targeting moieties with enhanced specificity for a cell type or tissue type. Such moieties include, but are not limited to, lipid moieties such as a cholesterol moiety (Letsinger et al., Proc. Natl. Acad. Sci. USA, 1989, 86, 6553-6556), cholic acid (Manoharan et al., Bioorg. Med. Chem. Let., 1994, 4, 1053-1060), a thioether, e.g., hexyl-S— tritylthiol (Manoharan et al, Ann. N. Y. Acad. Sci., 1992, 660, 306-309; Manoharan et al., Bioorg. Med. Chem. Let., 1993, 3, 2765-2770), a thiocholesterol (Oberhauser et al., Nucl. Acids Res., 1992, 20, 533-538), an aliphatic chain, e.g., dodecandiol or undecyl residues (Kabanov et al., FEBS Lett., 1990, 259, 327-330; Svinarchuk et al., Biochimie, 1993, 75, 49-54), a phospholipid, e.g., di-hexadecyl-rac-glycerol or triethylammonium 1,2-di-O-hexadecyl-rac-glycero-3-H-phosphonate (Manoharan et al., Tetrahedron Lett., 1995, 36, 3651-3654; Shea et al., Nucl. Acids Res., 1990, 18, 3777-3783), a polyamine or a polyethylene glycol chain (Mancharan et al., Nucleosides & Nucleotides, 1995, 14, 969-973), or adamantane acetic acid (Manoharan et al., Tetrahedron Lett., 1995, 36, 3651-3654), a palmityl moiety (Mishra et al., Biochim. Biophys. Acta, 1995, 1264, 229-237), or an octadecylamine or hexylamino-carbonyl-t oxycholesterol moiety (Crooke et al., J. Pharmacol. Exp. Ther., 1996, 277, 923-937). See also U.S. Pat. Nos. 4,828,979; 4,948,882; 5,218,105; 5,525,465; 5,541,313; 5,545,730; 5,552,538; 5,578,717, 5,580,731; 5,580,731; 5,591,584; 5,109,124; 5,118,802; 5,138,045; 5,414,077; 5,486,603; 5,512,439; 5,578,718; 5,608,046; 4,587,044; 4,605,735; 4,667,025; 4,762, 779; 4,789,737; 4,824,941; 4,835,263; 4,876,335; 4,904,582; 4,958,013; 5,082,830; 5,112,963; 5,214,136; 5,082,830; 5,112,963; 5,214,136; 5,245,022; 5,254,469; 5,258,506; 5,262,536; 5,272,250; 5,292,873; 5,317,098; 5,371,241, 5,391,723; 5,416,203, 5,451,463; 5,510,475; 5,512,667; 5,514,785; 5,565,552; 5,567,810; 5,574,142; 5,585,481; 5,587,371; 5,595,726; 5,597,696; 5,599,923; 5,599,928 and 5,688,941, each of which is herein incorporated by reference.

[0135] These moieties or conjugates can include conjugate groups covalently bound to functional groups such as primary or secondary hydroxyl groups. Conjugate groups of the invention include intercalators, reporter molecules, polyamines, polyamides, polyethylene glycols, polyethers, groups that enhance the pharmacodynamic properties of oligomers, and groups that enhance the pharmacokinetic properties of oligomers. Typical conjugate groups include cholesterols, lipids, phospholipids, biotin, phenazine, folate, phenanthridine, anthraquinone, acridine, fluoresceins, rhodamines, coumarins, and dyes. Groups that enhance the pharmacodynamic properties, in the context of this invention, include groups that improve uptake, enhance resistance to degradation, and/or strengthen sequence-specific hybridization with the target nucleic acid. Groups that enhance the pharmacokinetic properties, in the context of this invention, include groups that improve uptake, distribution, metabolism or excretion of the compounds of the present invention. Representative conjugate groups are disclosed in International Patent Application No. PCT/US92/09196, filed Oct. 23, 1992, and U.S. Pat. No. 6,287,860, which are incorporated herein by reference. Conjugate moieties include, but are not limited to, lipid moieties such as a cholesterol moiety, cholic acid, a thioether, e.g., hexyl-5-tritylthiol, a thiocholesterol, an aliphatic chain, e.g., dodecandiol or undecyl residues, a phospholipid, e.g., di-hexadecyl-rac-glycerol or triethylammonium 1,2-di-O-hexadecyl-rac-glycero-3-H-phosphonate, a polyamine or a polyethylene glycol chain, or adamantane acetic acid, a palmityl moiety, or an octadecylamine or hexylamino-carbonyl-oxy cholesterol moiety. See, e.g., U.S. Pat. Nos. 4,828,979; 4,948,882; 5,218,105; 5,525,465; 5,541,313; 5,545,730; 5,552,538; 5,578,717, 5,580,731; 5,580,731; 5,591,584; 5,109,124; 5,118,802; 5,138,045; 5,414,077; 5,486,603; 5,512,439; 5,578,718; 5,608,046; 4,587,044; 4,605,735; 4,667,025; 4,762,779; 4,789,737; 4,824,941; 4,835,263; 4,876,335; 4,904,582; 4,958,013; 5,082,830; 5,112,963; 5,214,136; 5,082,830; 5,112,963; 5,214,136; 5,245,022; 5,254,469; 5,258,506; 5,262,536; 5,272,250; 5,292,873; 5,317,098; 5,371,241, 5,391,723; 5,416,203, 5,451,463; 5,510,475; 5,512,667; 5,514,785; 5,565,552; 5,567,810; 5,574,142; 5,585,481; 5,587,371; 5,595,726; 5,597,696; 5,599,923; 5,599,928 and 5,688,941.

[0136] In some embodiments, single stranded oligonucleotide modification include modification of the 5′ or 3′ end of the oligonucleotide. In some embodiments, the 3′ end of the oligonucleotide comprises a hydroxyl group or a thiophosphate. It should be appreciated that additional molecules (e.g. a biotin moiety or a fluorophor) can be conjugated to the 5′ or 3′ end of the single stranded oligonucleotide. In some embodiments, the single stranded oligonucleotide comprises a biotin moiety conjugated to the 5′ nucleotide.

[0137] In some embodiments, the single stranded oligonucleotide comprises locked nucleic acids (LNA), ENA modified nucleotides, 2′-O-methyl nucleotides, or 2′-fluoro-deoxyribonucleotides. In some embodiments, the single stranded oligonucleotide comprises alternating deoxyribonucleotides and 2′-fluoro-deoxyribonucleotides. In some embodiments, the single stranded oligonucleotide comprises alternating deoxyribonucleotides and 2′-O-methyl nucleotides. In some embodiments, the single stranded oligonucleotide comprises alternating deoxyribonucleotides and ENA modified nucleotides. In some embodiments, the single stranded oligonucleotide comprises alternating deoxyribonucleotides and locked nucleic acid nucleotides. In some embodiments, the single stranded oligonucleotide comprises alternating locked nucleic acid nucleotides and 2′-O-methyl nucleotides.

[0138] In some embodiments, the 5′ nucleotide of the oligonucleotide is a deoxyribonucleotide. In some embodiments, the 5′ nucleotide of the oligonucleotide is a locked nucleic acid nucleotide. In some embodiments, the nucleotides of the oligonucleotide comprise deoxyribonucleotides flanked by at least one locked nucleic acid nucleotide on each of the 5′ and 3′ ends of the deoxyribonucleotides. In some embodiments, the nucleotide at the 3′ position of the oligonucleotide has a 3′ hydroxyl group or a 3′ thiophosphate.

[0139] In some embodiments, the single stranded oligonucleotide comprises phosphorothioate internucleotide linkages. In some embodiments, the single stranded oligonucleotide comprises phosphorothioate internucleotide linkages between at least two nucleotides. In some embodiments, the single stranded oligonucleotide comprises phosphorothioate internucleotide linkages between all nucleotides.

[0140] It should be appreciated that the single stranded oligonucleotide can have any combination of modifications as described herein.

[0141] The oligonucleotide may comprise a nucleotide sequence having one or more of the following modification patterns.

[0142] (a) (X)Xxxxxx, (X)xXxxxx, (X)xxXxxx, (X)xxxXxx, (X)xxxxXx and (X)xxxxxX,

[0143] (b) (X)XXxxxx, (X)XxXxxx, (X)XxxXxx, (X)XxxxXx, (X)XxxxxX, (X)xXXxxx, (X)xXxXxx, (X)xXxxXx, (X)xXxxxX, (X)xxXXxx, (X)xxXxXx, (X)xxXxxX, (X)xxxXXx, (X)xxxXxX and (X)xxxxXX,

[0144] (c) (X)XXXxxx, (X)xXXXxx, (X)xxXXXx, (X)xxxXXX, (X)XXxXxx, (X)XXxxXx, (X)XXxxxX, (X)xXXxXx, (X)xXXxxX, (X)xxXXxX, (X)XxXXxx, (X)XxxXXx (X)XxxxXX, (X)xXxXXx, (X)xXxxXX, (X)xxXxXX, (X)xXxXxX and (X)XxXxXx,

[0145] (d) (X)xxXXX, (X)xXxXXX, (X)xXXxXX, (X)xXXXxX, (X)xXXXXx, (X)XxxXXXX, (X)XxXxXX, (X)XxXXxX, (X)XxXXx, (X)XXxxXX, (X)XXxXxX, (X)XXxXXx, (X)XXXxxX, (X)XXXxXx, and (X)XXXXxx,

[0146] (e) (X)xXXXXX, (X)XxXXXX, (X)XXxXXX, (X)XXXxXX, (X)XXXXxX and (X)XXXXXx, and

[0147] (f) XXXXXX, XxXXXXX, XXxXXXX, XXXxXXX, XXXXxXX, XXXXXxX and XXXXXXx, in which “X” denotes a nucleotide analogue, (X) denotes an optional nucleotide analogue, and “x” denotes a DNA or RNA nucleotide unit. Each of the above listed patterns may appear one or more times within an oligonucleotide, alone or in combination with any of the other disclosed modification patterns.

### Methods for Modulating Gene Expression

[0148] In one aspect, the invention relates to methods for modulating gene expression in a cell (e.g., a cell for which APOA1 or ABCA1 levels are reduced) for research purposes (e.g., to study the function of the gene in the cell). In another aspect, the invention relates to methods for modulating gene expression in a cell (e.g., a cell for which APOA1 or ABCA1 levels are reduced) for gene or epigenetic therapy. The cells can be in vitro, ex vivo, or in vivo (e.g., in a subject who has a disease resulting from reduced expression or activity of APOA1 or ABCA1. In some embodiments, methods for modulating gene expression in a cell comprise delivering a single stranded oligonucleotide as described herein. In some embodiments, delivery of the single stranded oligonucleotide to the cell results in a level of expression of gene that is at least 5%, 10%, 20%, 30%, 40%, 50%, 60%, 70%, 80%, 90%, 100%, 200% or more greater than a level of expression of gene in a control cell to which the single stranded oligonucleotide has not been delivered. In certain embodiments, delivery of the single stranded oligonucleotide to the cell results in a level of expression of gene that is at least 50% greater than a level of expression of gene in a control cell to which the single stranded oligonucleotide has not been delivered.

[0149] In another aspect of the invention, methods comprise administering to a subject (e.g. a human) a composition comprising a single stranded oligonucleotide as described herein to increase protein levels in the subject. In some embodiments, the increase in protein levels is at least 5%, 10%, 20%, 30%, 40%, 50%, 60%, 70%, 80%, 90%, 100%, 200%, or more, higher than the amount of a protein in the subject before administering.

[0150] As another example, to increase expression of APOA1 or ABCA1 in a cell, the methods include introducing into the cell a single stranded oligonucleotide that is sufficiently complementary to a PRC2-associated region (e.g., of a long non-coding RNA) that maps to a genomic position encompassing or in proximity to the APOA1 or ABCA1 gene.

[0151] In another aspect of the invention provides methods of treating a condition (e.g., dyslipidemia, atherosclerosis) associated with decreased levels of expression of APOA1 or ABCA1 in a subject, the method comprising administering a single stranded oligonucleotide as described herein.

[0152] A subject can include a non-human mammal, e.g. mouse, rat, guinea pig, rabbit, cat, dog, goat, cow, or horse. In preferred embodiments, a subject is a human. Single stranded oligonucleotides have been employed as therapeutic moieties in the treatment of disease states in animals, including humans. Single stranded oligonucleotides can be useful therapeutic modalities that can be configured to be useful in treatment regimes for the treatment of cells, tissues and animals, especially humans.

[0153] For therapeutics, an animal, preferably a human, suspected of having dyslipidemia or atherosclerosis is treated by administering single stranded oligonucleotide in accordance with this invention. For example, in one non-limiting embodiment, the methods comprise the step of administering to the animal in need of treatment, a therapeutically effective amount of a single stranded oligonucleotide as described herein.

### Formulation, Delivery, and Dosing

[0154] The oligonucleotides described herein can be formulated for administration to a subject for treating a condition (e.g., dyslipidemia, atherosclerosis) associated with decreased levels of APOA1 or ABCA1. It should be understood that the formulations, compositions and methods can be practiced with any of the oligonucleotides disclosed herein.

[0155] The formulations may conveniently be presented in unit dosage form and may be prepared by any methods well known in the art of pharmacy. The amount of active ingredient (e.g., an oligonucleotide or compound of the invention) which can be combined with a carrier material to produce a single dosage form will vary depending upon the host being treated, the particular mode of administration, e.g., intradermal or inhalation. The amount of active ingredient which can be combined with a carrier material to produce a single dosage form will generally be that amount of the compound which produces a therapeutic effect, e.g. tumor regression.

[0156] Pharmaceutical formulations of this invention can be prepared according to any method known to the art for the manufacture of pharmaceuticals. Such formulations can contain sweetening agents, flavoring agents, coloring agents and preserving agents. A formulation can be admixtured with nontoxic pharmaceutically acceptable excipients which are suitable for manufacture. Formulations may comprise one or more diluents, emulsifiers, preservatives, buffers, excipients, etc. and may be provided in such forms as liquids, powders, emulsions, lyophilized powders, sprays, creams, lotions, controlled release formulations, tablets, pills, gels, on patches, in implants, etc.

[0157] A formulated single stranded oligonucleotide composition can assume a variety of states. In some examples, the composition is at least partially crystalline, uniformly crystalline, and/or anhydrous (e.g., less than 80, 50, 30, 20, or 10% water). In another example, the single stranded oligonucleotide is in an aqueous phase, e.g., in a solution that includes water. The aqueous phase or the crystalline compositions can, e.g., be incorporated into a delivery vehicle, e.g., a liposome (particularly for the aqueous phase) or a particle (e.g., a microparticle as can be appropriate for a crystalline composition). Generally, the single stranded oligonucleotide composition is formulated in a manner that is compatible with the intended method of administration.

[0158] In some embodiments, the composition is prepared by at least one of the following methods: spray drying, lyophilization, vacuum drying, evaporation, fluid bed drying, or a combination of these techniques; or sonication with a lipid, freeze-drying, condensation and other self-assembly.

[0159] A single stranded oligonucleotide preparation can be formulated or administered (together or separately) in combination with another agent, e.g., another therapeutic agent or an agent that stabilizes a single stranded oligonucleotide, e.g., a protein that complexes with single stranded oligonucleotide. Still other agents include chelators, e.g., EDTA (e.g., to remove divalent cations such as Mg²⁺), salts, RNAse inhibitors (e.g., a broad specificity RNAse inhibitor such as RNAsin) and so forth.

[0160] In one embodiment, the single stranded oligonucleotide preparation includes another single stranded oligonucleotide, e.g., a second single stranded oligonucleotide that modulates expression of a second gene or a second single stranded oligonucleotide that modulates expression of the first gene. Still other preparation can include at least 3, 5, ten, twenty, fifty, or a hundred or more different single stranded oligonucleotide species. Such single stranded oligonucleotides can mediated gene expression with respect to a similar number of different genes. In one embodiment, the single stranded oligonucleotide preparation includes at least a second therapeutic agent (e.g., an agent other than an oligonucleotide).

### Route of Delivery

[0161] A composition that includes a single stranded oligonucleotide can be delivered to a subject by a variety of routes. Exemplary routes include: intravenous, intradermal, topical, rectal, parenteral, anal, intravaginal, intranasal, pulmonary, ocular. The term “therapeutically effective amount” is the amount of oligonucleotide present in the composition that is needed to provide the desired level of APOA1 or ABCA1 expression in the subject to be treated to give the anticipated physiological response. The term “physiologically effective amount” is that amount delivered to a subject to give the desired palliative or curative effect. The term “pharmaceutically acceptable carrier” means that the carrier can be administered to a subject with no significant adverse toxicological effects to the subject.

[0162] The single stranded oligonucleotide molecules of the invention can be incorporated into pharmaceutical compositions suitable for administration. Such compositions typically include one or more species of single stranded oligonucleotide and a pharmaceutically acceptable carrier. As used herein the language “pharmaceutically acceptable carrier” is intended to include any and all solvents, dispersion media, coatings, antibacterial and antifungal agents, isotonic and absorption delaying agents, and the like, compatible with pharmaceutical administration. The use of such media and agents for pharmaceutically active substances is well known in the art. Except insofar as any conventional media or agent is incompatible with the active compound, use thereof in the compositions is contemplated. Supplementary active compounds can also be incorporated into the compositions.

[0163] The pharmaceutical compositions of the present invention may be administered in a number of ways depending upon whether local or systemic treatment is desired and upon the area to be treated. Administration may be topical (including ophthalmic, vaginal, rectal, intranasal, transdermal), oral or parenteral. Parenteral administration includes intravenous drip, subcutaneous, intraperitoneal or intramuscular injection, or intrathecal or intraventricular administration.

[0164] The route and site of administration may be chosen to enhance targeting. For example, to target muscle cells, intramuscular injection into the muscles of interest would be a logical choice. Lung cells might be targeted by administering the single stranded oligonucleotide in aerosol form. The vascular endothelial cells could be targeted by coating a balloon catheter with the single stranded oligonucleotide and mechanically introducing the oligonucleotide.

[0165] Topical administration refers to the delivery to a subject by contacting the formulation directly to a surface of the subject. The most common form of topical delivery is to the skin, but a composition disclosed herein can also be directly applied to other surfaces of the body, e.g., to the eye, a mucous membrane, to surfaces of a body cavity or to an internal surface. As mentioned above, the most common topical delivery is to the skin. The term encompasses several routes of administration including, but not limited to, topical and transdermal. These modes of administration typically include penetration of the skin's permeability barrier and efficient delivery to the target tissue or stratum. Topical administration can be used as a means to penetrate the epidermis and dermis and ultimately achieve systemic delivery of the composition. Topical administration can also be used as a means to selectively deliver oligonucleotides to the epidermis or dermis of a subject, or to specific strata thereof, or to an underlying tissue.

[0166] Formulations for topical administration may include transdermal patches, ointments, lotions, creams, gels, drops, suppositories, sprays, liquids and powders. Conventional pharmaceutical carriers, aqueous, powder or oily bases, thickeners and the like may be necessary or desirable. Coated condoms, gloves and the like may also be useful.

[0167] Transdermal delivery is a valuable route for the administration of lipid soluble therapeutics. The dermis is more permeable than the epidermis and therefore absorption is much more rapid through abraded, burned or denuded skin. Inflammation and other physiologic conditions that increase blood flow to the skin also enhance transdermal adsorption. Absorption via this route may be enhanced by the use of an oily vehicle (inunction) or through the use of one or more penetration enhancers. Other effective ways to deliver a composition disclosed herein via the transdermal route include hydration of the skin and the use of controlled release topical patches. The transdermal route provides a potentially effective means to deliver a composition disclosed herein for systemic and/or local therapy. In addition, iontophoresis (transfer of ionic solutes through biological membranes under the influence of an electric field), phonophoresis or sonophoresis (use of ultrasound to enhance the absorption of various therapeutic agents across biological membranes, notably the skin and the cornea), and optimization of vehicle characteristics relative to dose position and retention at the site of administration may be useful methods for enhancing the transport of topically applied compositions across skin and mucosal sites.

[0168] Both the oral and nasal membranes offer advantages over other routes of administration. For example, oligonucleotides administered through these membranes may have a rapid onset of action, provide therapeutic plasma levels, avoid first pass effect of hepatic metabolism, and avoid exposure of the oligonucleotides to the hostile gastrointestinal (GI) environment. Additional advantages include easy access to the membrane sites so that the oligonucleotide can be applied, localized and removed easily.

[0169] In oral delivery, compositions can be targeted to a surface of the oral cavity, e.g., to sublingual mucosa which includes the membrane of ventral surface of the tongue and the floor of the mouth or the buccal mucosa which constitutes the lining of the cheek. The sublingual mucosa is relatively permeable thus giving rapid absorption and acceptable bioavailability of many agents. Further, the sublingual mucosa is convenient, acceptable and easily accessible.

[0170] A pharmaceutical composition of single stranded oligonucleotide may also be administered to the buccal cavity of a human being by spraying into the cavity, without inhalation, from a metered dose spray dispenser, a mixed micellar pharmaceutical formulation as described above and a propellant. In one embodiment, the dispenser is first shaken prior to spraying the pharmaceutical formulation and propellant into the buccal cavity.

[0171] Compositions for oral administration include powders or granules, suspensions or solutions in water, syrups, slurries, emulsions, elixirs or non-aqueous media, tablets, capsules, lozenges, or troches. In the case of tablets, carriers that can be used include lactose, sodium citrate and salts of phosphoric acid. Various disintegrants such as starch, and lubricating agents such as magnesium stearate, sodium lauryl sulfate and talc, are commonly used in tablets. For oral administration in capsule form, useful diluents are lactose and high molecular weight polyethylene glycols. When aqueous suspensions are required for oral use, the nucleic acid compositions can be combined with emulsifying and suspending agents. If desired, certain sweetening and/or flavoring agents can be added.

[0172] Parenteral administration includes intravenous drip, subcutaneous, intraperitoneal or intramuscular injection, intrathecal or intraventricular administration. In some embodiments, parental administration involves administration directly to the site of disease (e.g. injection into a tumor).

[0173] Formulations for parenteral administration may include sterile aqueous solutions which may also contain buffers, diluents and other suitable additives. Intraventricular injection may be facilitated by an intraventricular catheter, for example, attached to a reservoir. For intravenous use, the total concentration of solutes should be controlled to render the preparation isotonic.

[0174] Any of the single stranded oligonucleotides described herein can be administered to ocular tissue. For example, the compositions can be applied to the surface of the eye or nearby tissue, e.g., the inside of the eyelid. For ocular administration, ointments or droppable liquids may be delivered by ocular delivery systems known to the art such as applicators or eye droppers. Such compositions can include mucomimetics such as hyaluronic acid, chondroitin sulfate, hydroxypropyl methylcellulose or poly(vinyl alcohol), preservatives such as sorbic acid, EDTA or benzylchronium chloride, and the usual quantities of diluents and/or carriers. The single stranded oligonucleotide can also be administered to the interior of the eye, and can be introduced by a needle or other delivery device which can introduce it to a selected area or structure.

[0175] Pulmonary delivery compositions can be delivered by inhalation by the patient of a dispersion so that the composition, preferably single stranded oligonucleotides, within the dispersion can reach the lung where it can be readily absorbed through the alveolar region directly into blood circulation. Pulmonary delivery can be effective both for systemic delivery and for localized delivery to treat diseases of the lungs.

[0176] Pulmonary delivery can be achieved by different approaches, including the use of nebulized, aerosolized, micellular and dry powder-based formulations. Delivery can be achieved with liquid nebulizers, aerosol-based inhalers, and dry powder dispersion devices. Metered-dose devices are preferred. One of the benefits of using an atomizer or inhaler is that the potential for contamination is minimized because the devices are self-contained. Dry powder dispersion devices, for example, deliver agents that may be readily formulated as dry powders. A single stranded oligonucleotide composition may be stably stored as lyophilized or spray-dried powders by itself or in combination with suitable powder carriers. The delivery of a composition for inhalation can be mediated by a dosing timing element which can include a timer, a dose counter, time measuring device, or a time indicator which when incorporated into the device enables dose tracking, compliance monitoring, and/or dose triggering to a patient during administration of the aerosol medicament.

[0177] The term “powder” means a composition that consists of finely dispersed solid particles that are free flowing and capable of being readily dispersed in an inhalation device and subsequently inhaled by a subject so that the particles reach the lungs to permit penetration into the alveoli. Thus, the powder is said to be “respirable.” Preferably the average particle size is less than about 10 μm in diameter preferably with a relatively uniform spheroidal shape distribution. More preferably the diameter is less than about 7.5 μm and most preferably less than about 5.0 μm. Usually the particle size distribution is between about 0.1 μm and about 5 μm in diameter, particularly about 0.3 μm to about 5 μm.

[0178] The term “dry” means that the composition has a moisture content below about 10% by weight (% w) water, usually below about 5% w and preferably less it than about 3% w. A dry composition can be such that the particles are readily dispersible in an inhalation device to form an aerosol.

[0179] The types of pharmaceutical excipients that are useful as carrier include stabilizers such as human serum albumin (HSA), bulking agents such as carbohydrates, amino acids and polypeptides; pH adjusters or buffers; salts such as sodium chloride; and the like. These carriers may be in a crystalline or amorphous form or may be a mixture of the two.

[0180] Suitable pH adjusters or buffers include organic salts prepared from organic acids and bases, such as sodium citrate, sodium ascorbate, and the like; sodium citrate is preferred. Pulmonary administration of a micellar single stranded oligonucleotide formulation may be achieved through metered dose spray devices with propellants such as tetrafluoroethane, heptafluoroethane, dimethylfluoropropane, tetrafluoropropane, butane, isobutane, dimethyl ether and other non-CFC and CFC propellants.

[0181] Exemplary devices include devices which are introduced into the vasculature, e.g., devices inserted into the lumen of a vascular tissue, or which devices themselves form a part of the vasculature, including stents, catheters, heart valves, and other vascular devices. These devices, e.g., catheters or stents, can be placed in the vasculature of the lung, heart, or leg.

[0182] Other devices include non-vascular devices, e.g., devices implanted in the peritoneum, or in organ or glandular tissue, e.g., artificial organs. The device can release a therapeutic substance in addition to a single stranded oligonucleotide, e.g., a device can release insulin.

[0183] In one embodiment, unit doses or measured doses of a composition that includes single stranded oligonucleotide are dispensed by an implanted device. The device can include a sensor that monitors a parameter within a subject. For example, the device can include pump, e.g., and, optionally, associated electronics.

[0184] Tissue, e.g., cells or organs can be treated with a single stranded oligonucleotide, ex vivo and then administered or implanted in a subject. The tissue can be autologous, allogeneic, or xenogeneic tissue. E.g., tissue can be treated to reduce graft v. host disease. In other embodiments, the tissue is allogeneic and the tissue is treated to treat a disorder characterized by unwanted gene expression in that tissue. E.g., tissue, e.g., hematopoietic cells, e.g., bone marrow hematopoietic cells, can be treated to inhibit unwanted cell proliferation. Introduction of treated tissue, whether autologous or transplant, can be combined with other therapies. In some implementations, the single stranded oligonucleotide treated cells are insulated from other cells, e.g., by a semi-permeable porous barrier that prevents the cells from leaving the implant, but enables molecules from the body to reach the cells and molecules produced by the cells to enter the body. In one embodiment, the porous barrier is formed from alginate.

[0185] In one embodiment, a contraceptive device is coated with or contains a single stranded oligonucleotide. Exemplary devices include condoms, diaphragms, IUD (implantable uterine devices, sponges, vaginal sheaths, and birth control devices.

### Dosage

[0186] In one aspect, the invention features a method of administering a single stranded oligonucleotide (e.g., as a compound or as a component of a composition) to a subject (e.g., a human subject). In one embodiment, the unit dose is between about 10 mg and 25 mg per kg of bodyweight. In one embodiment, the unit dose is between about 1 mg and 100 mg per kg of bodyweight. In one embodiment, the unit dose is between about 0.1 mg and 500 mg per kg of bodyweight. In some embodiments, the unit dose is more than 0.001, 0.005, 0.01, 0.05, 0.1, 0.5, 1, 2, 5, 10, 25, 50 or 100 mg per kg of bodyweight.

[0187] The defined amount can be an amount effective to treat or prevent a disease or disorder, e.g., a disease or disorder associated with the APOA1 or ABCA1. The unit dose, for example, can be administered by injection (e.g., intravenous or intramuscular), an inhaled dose, or a topical application.

[0188] In some embodiments, the unit dose is administered daily. In some embodiments, less frequently than once a day, e.g., less than every 2, 4, 8 or 30 days. In another embodiment, the unit dose is not administered with a frequency (e.g., not a regular frequency). For example, the unit dose may be administered a single time. In some embodiments, the unit dose is administered more than once a day, e.g., once an hour, two hours, four hours, eight hours, twelve hours, etc.

[0189] In one embodiment, a subject is administered an initial dose and one or more maintenance doses of a single stranded oligonucleotide. The maintenance dose or doses are generally lower than the initial dose, e.g., one-half less of the initial dose. A maintenance regimen can include treating the subject with a dose or doses ranging from 0.0001 to 100 mg/kg of body weight per day, e.g., 100, 10, 1, 0.1, 0.01, 0.001, or 0.0001 mg per kg of bodyweight per day. The maintenance doses may be administered no more than once every 1, 5, 10, or 30 days. Further, the treatment regimen may last for a period of time which will vary depending upon the nature of the particular disease, its severity and the overall condition of the patient. In some embodiments the dosage may be delivered no more than once per day, e.g., no more than once per 24, 36, 48, or more hours, e.g., no more than once for every 5 or 8 days. Following treatment, the patient can be monitored for changes in his condition and for alleviation of the symptoms of the disease state. The dosage of the oligonucleotide may either be increased in the event the patient does not respond significantly to current dosage levels, or the dose may be decreased if an alleviation of the symptoms of the disease state is observed, if the disease state has been ablated, or if undesired side-effects are observed.

[0190] The effective dose can be administered in a single dose or in two or more doses, as desired or considered appropriate under the specific circumstances. If desired to facilitate repeated or frequent infusions, implantation of a delivery device, e.g., a pump, semi-permanent stent (e.g., intravenous, intraperitoneal, intracisternal or intracapsular), or reservoir may be advisable.

[0191] In some embodiments, the oligonucleotide pharmaceutical composition includes a plurality of single stranded oligonucleotide species. In another embodiment, the single stranded oligonucleotide species has sequences that are non-overlapping and non-adjacent to another species with respect to a naturally occurring target sequence (e.g., a PRC2-associated region). In another embodiment, the plurality of single stranded oligonucleotide species is specific for different PRC2-associated regions. In another embodiment, the single stranded oligonucleotide is allele specific. In some cases, a patient is treated with a single stranded oligonucleotide in conjunction with other therapeutic modalities.

[0192] Following successful treatment, it may be desirable to have the patient undergo maintenance therapy to prevent the recurrence of the disease state, wherein the compound of the invention is administered in maintenance doses, ranging from 0.0001 mg to 100 mg per kg of body weight.

[0193] The concentration of the single stranded oligonucleotide composition is an amount sufficient to be effective in treating or preventing a disorder or to regulate a physiological condition in humans. The concentration or amount of single stranded oligonucleotide administered will depend on the parameters determined for the agent and the method of administration, e.g. nasal, buccal, pulmonary. For example, nasal formulations may tend to require much lower concentrations of some ingredients in order to avoid irritation or burning of the nasal passages. It is sometimes desirable to dilute an oral formulation up to 10-100 times in order to provide a suitable nasal formulation.

[0194] Certain factors may influence the dosage required to effectively treat a subject, including but not limited to the severity of the disease or disorder, previous treatments, the general health and/or age of the subject, and other diseases present. Moreover, treatment of a subject with a therapeutically effective amount of a single stranded oligonucleotide can include a single treatment or, preferably, can include a series of treatments. It will also be appreciated that the effective dosage of a single stranded oligonucleotide used for treatment may increase or decrease over the course of a particular treatment. For example, the subject can be monitored after administering a single stranded oligonucleotide composition. Based on information from the monitoring, an additional amount of the single stranded oligonucleotide composition can be administered.

[0195] Dosing is dependent on severity and responsiveness of the disease condition to be treated, with the course of treatment lasting from several days to several months, or until a cure is effected or a diminution of disease state is achieved. Optimal dosing schedules can be calculated from measurements of APOA1 or ABCA1 expression levels in the body of the patient. Persons of ordinary skill can easily determine optimum dosages, dosing methodologies and repetition rates. Optimum dosages may vary depending on the relative potency of individual compounds, and can generally be estimated based on EC50s found to be effective in in vitro and in vivo animal models. In some embodiments, the animal models include transgenic animals that express a human APOA1 or ABCA1. In another embodiment, the composition for testing includes a single stranded oligonucleotide that is complementary, at least in an internal region, to a sequence that is conserved between APOA1 or ABCA1 in the animal model and the APOA1 or ABCA1 in a human.

[0196] In one embodiment, the administration of the single stranded oligonucleotide composition is parenteral, e.g. intravenous (e.g., as a bolus or as a diffusible infusion), intradermal, intraperitoneal, intramuscular, intrathecal, intraventricular, intracranial, subcutaneous, transmucosal, buccal, sublingual, endoscopic, rectal, oral, vaginal, topical, pulmonary, intranasal, urethral or ocular. Administration can be provided by the subject or by another person, e.g., a health care provider. The composition can be provided in measured doses or in a dispenser which delivers a metered dose. Selected modes of delivery are discussed in more detail below.

### Kits

[0197] In certain aspects of the invention, kits are provided, comprising a container housing a composition comprising a single stranded oligonucleotide. In some embodiments, the composition is a pharmaceutical composition comprising a single stranded oligonucleotide and a pharmaceutically acceptable carrier. In some embodiments, the individual components of the pharmaceutical composition may be provided in one container. Alternatively, it may be desirable to provide the components of the pharmaceutical composition separately in two or more containers, e.g., one container for single stranded oligonucleotides, and at least another for a carrier compound. The kit may be packaged in a number of different configurations such as one or more containers in a single box. The different components can be combined, e.g., according to instructions provided with the kit. The components can be combined according to a method described herein, e.g., to prepare and administer a pharmaceutical composition. The kit can also include a delivery device.

[0198] The present invention is further illustrated by the following Examples, which in no way should be construed as further limiting. The entire contents of all of the references (including literature references, issued patents, published patent applications, and co-pending patent applications) cited throughout this application are hereby expressly incorporated by reference.

### EXAMPLES

[0199] The invention is further described in the following examples, which do not limit the scope of the invention described in the claims.

### Materials and Methods:

### Real Time PCR

[0200] RNA was harvested from the cells using Promega SV 96 Total RNA Isolation system or Trizol omitting the DNAse step. RNA harvested from cells is normalized so that equal RNA was input to each reverse transcription reaction. Reverse transcriptase reactions were performed using the Superscript II kit and real time PCR performed on cDNA samples using icycler SYBR green chemistry (Biorad). A baseline level of mRNA expression for APOA1 was determined through quantitative PCR as outlined above. A baseline level of mRNA expression for ABCA1 is determined through quantitative PCR as outlined above. Baseline levels were also determined for mRNA of various housekeeping genes which are constitutively expressed. A “control” housekeeping gene with approximately the same level of baseline expression as the target gene was chosen for comparison purposes.

### Cell Culture

[0201] Human hepatocyte Hep3B, human hepatocyte HepG2 cells, mouse hepatoma Hepa1-6 cells, and human renal proximal tubule epithelial cells (RPTEC) were cultured using conditions known in the art (see, e.g. Current Protocols in Cell Biology). Details of the cell lines used in the experiments described herein are provided in Table 5.

TABLE 5
Cell lines

| Cell Line | Source | Species | Gender | Cell Type | Tissue | Status | Culture Conditions |
|---|---|---|---|---|---|---|---|
| hHEP | Celsis | human | F | hepatocytes | liver | primary | DMEM hiGlucose+ |
| primary | | | | | | | |
| Rhesus | Celsis | rhesus | M | hepatocytes | liver | primary | DMEM hiGlucose+ |
| HEP | | | | | | | |
| primary | | | | | | | |

### Oligonucleotide Design

[0202] Oligonucleotides were designed within PRC2-interacting regions in order to upregulate APOA1. The sequence and structure of each oligonucleotide is shown in Table 4. A description of the nucleotide analogs, modifications and intranucleotide linkages used for certain oligonucleotides tested and described is provided in Table 3. SEQ ID NOs: 187502 to 187521 were gapmer control oligos targeting APOA1.

In Vitro Transfection of Cells with Oligonucleotides

[0203] Oligonucleotides were designed within PRC2-interacting regions in order to upregulate APOA1. Cells were seeded into each well of 24-well plates at a density of 25,000 cells per 500 uL and transfections are performed with Lipofectamine and the single stranded oligonucleotides. Control wells contained Lipofectamine alone. At 48 hours post-transfection, approximately 200 uL of cell culture supernatants were stored at −80 C for ELISA. At 48 hours post-transfection, RNA was harvested from the cells and quantitative PCR was carried out as outlined above. The percent induction of target mRNA expression by each oligonucleotide was determined by normalizing mRNA levels in the presence of the oligonucleotide to the mRNA levels in the presence of control (Lipofectamine alone). This was compared side-by-side with the increase in mRNA expression of the “control” housekeeping gene.

[0204] Oligonucleotides are designed within PRC2-interacting regions in order to upregulate ABCA1. Cells are seeded into each well of 24-well plates at a density of 25,000 cells per 500 uL and transfections are performed with Lipofectamine and the single stranded oligonucleotides. Control wells contain Lipofectamine alone. At 48 hours post-transfection, approximately 200 uL of cell culture supernatants are stored at −80 C for ELISA. At 48 hours post-transfection, RNA is harvested from the cells and quantitative PCR is carried out as outlined above. The percent induction of target mRNA expression by each oligonucleotide is determined by normalizing mRNA levels in the presence of the oligonucleotide to the mRNA levels in the presence of control (Lipofectamine alone). This is compared side-by-side with the increase in mRNA expression of the “control” housekeeping gene.

### In Vitro Delivery of Single Stranded Oligonucleotides

[0205] Oligonucleotides are designed as candidates for upregulating ABCA1 expression. The single stranded oligonucleotides are designed to be complementary to a PRC2-interacting region within a sequence as set forth in SEQ ID NO: 5 or 6. The oligonucleotides are tested in at least duplicate. Briefly, cells are transfected in vitro with each of the oligonucleotides as described above. ABCA1 expression in cells following treatment is evaluated by qRT-PCR. Oligonucleotides that upregulate ABCA1 expression are identified.

### Results:

### In Vitro Delivery of Single Stranded Oligonucleotides Upregulate APOA1

[0206] Oligonucleotides were designed as candidates for upregulating APOA1 expression. A total of 70 single stranded oligonucleotides were designed to be complementary to a PRC2-interacting region within a sequence as set forth in SEQ ID NO: 1 or 2. Oligonucleotides were tested in at least duplicate. The sequence and structural features of the oligonucleotides are set forth in Table 4. Briefly, cells were transfected in vitro with the oligonucleotides as described above. APOA1 expression in cells following treatment was evaluated by qRT-PCR. Oligonucleotides that upregulated APOA1 expression were identified. Further details are outlined in Table 2.

### Tables

TABLE 1
Hexamers that are not seed sequences of human miRNAs

AAAAAA, AAAAAG, AAAACA, AAAAGA, AAAAGC, AAAAGG, AAAAUA, AAACAA, AAACAC, AAACAG,
AAACAU, AAACCC, AAACCU, AAACGA, AAACGC, AAACGU, AAACUA, AAACUC, AAACUU, AAAGAU,
AAAGCC, AAAGGA, AAAGGG, AAAGUC, AAAUAC, AAAUAU, AAAUCG, AAAUCU, AAAUGC, AAAUGU,
AAAUUA, AAAUUG, AACAAC, AACAAG, AACAAU, AACACA, AACACG, AACAGA, AACAGC, AACAGG,
AACAUC, AACAUG, AACCAA, AACCAC, AACCAG, AACCAU, AACCCC, AACCCG, AACCGA, AACCGC,
AACCGG, AACCUA, AACCUU, AACGAA, AACGAC, AACGAG, AACGAU, AACGCU, AACGGG, AACGGU,
AACGUA, AACGUC, AACGUG, AACGUU, AACUAU, AACUCA, AACUCC, AACUCG, AACUGA, AACUGC,
AACUGU, AACUUA, AACUUC, AACUUG, AACUUU, AAGAAA, AAGAAG, AAGAAU, AAGACG, AAGAGA,
AAGAGC, AAGAGG, AAGAGU, AAGAUU, AAGCAA, AAGCAC, AAGCAG, AAGCAU, AAGCCA, AAGCCC,
AAGCCG, AAGCCU, AAGCGA, AAGCGG, AAGCGU, AAGCUA, AAGGAA, AAGGAC, AAGGCU, AAGGGC,
AAGGGU, AAGGUU, AAGUAA, AAGUAC, AAGUAU, AAGUCC, AAGUCG, AAGUGA, AAGUGG, AAGUUA,
AAGUUU, AAUAAA, AAUAAC, AAUAAG, AAUAAU, AAUACA, AAUACC, AAUACG, AAUAGA, AAUAGC,
AAUAGG, AAUAGU, AAUAUC, AAUAUU, AAUCAA, AAUCAU, AAUCCA, AAUCCC, AAUCCG, AAUCGA,
AAUCGC, AAUCGU, AAUCUA, AAUCUG, AAUCUU, AAUGAA, AAUGAC, AAUGAG, AAUGAU, AAUGCG,
AAUGCU, AAUGGA, AAUGGU, AAUGUA, AAUGUC, AAUGUG, AAUUAA, AAUUAC, AAUUAG, AAUUCC,
AAUUCG, AAUUGA, AAUUGG, AAUUGU, AAUUUC, AAUUUG, ACAAAA, ACAAAC, ACAAAG, ACAAAU,
ACAACC, ACAACG, ACAACU, ACAAGA, ACAAGC, ACAAGU, ACAAUC, ACAAUG, ACAAUU, ACACAG,
ACACCA, ACACCC, ACACCG, ACACCU, ACACGA, ACACGC, ACACGU, ACACUC, ACACUG, ACACUU,
ACAGAA, ACAGAC, ACAGCC, ACAGCG, ACAGCU, ACAGGG, ACAGUC, ACAGUG, ACAGUU, ACAUAA,
ACAUAC, ACAUCC, ACAUCG, ACAUCU, ACAUGA, ACAUGC, ACAUGU, ACAUUG, ACAUUU, ACCAAA,
ACCAAC, ACCAAG, ACCAAU, ACCACC, ACCACG, ACCAGA, ACCAGU, ACCAUA, ACCAUG, ACCAUU,
ACCCAA, ACCCAC, ACCCCA, ACCCCG, ACCCGA, ACCCGC, ACCCUA, ACCCUC, ACCCUU, ACCGAA,
ACCGAC, ACCGAU, ACCGCA, ACCGCC, ACCGCG, ACCGCU, ACCGGA, ACCGGC, ACCGGU, ACCGUA,
ACCGUC, ACCGUG, ACCGUU, ACCUAA, ACCUAC, ACCUAG, ACCUAU, ACCUCA, ACCUCC, ACCUCG,
ACCUCU, ACCUGA, ACCUGC, ACCUGU, ACCUUA, ACCUUC, ACCUUU, ACGAAA, ACGAAC, ACGAAG,
ACGAAU, ACGACA, ACGACC, ACGACG, ACGACU, ACGAGA, ACGAGC, ACGAGG, ACGAGU, ACGAUA,
ACGAUC, ACGAUG, ACGAUU, ACGCAA, ACGCAG, ACGCAU, ACGCCC, ACGCCG, ACGCCU, ACGCGA,
ACGCGG, ACGCGU, ACGCUA, ACGCUG, ACGCUU, ACGGAA, ACGGAC, ACGGAG, ACGGAU, ACGGCC,
ACGGCG, ACGGCU, ACGGGC, ACGGGG, ACGGGU, ACGGUA, ACGGUC, ACGGUG, ACGGUU, ACGUAA,
ACGUAC, ACGUAU, ACGUCC, ACGUCG, ACGUCU, ACGUGA, ACGUGC, ACGUGG, ACGUGU, ACGUUA,
ACGUUC, ACGUUG, ACGUUU, ACUAAA, ACUAAG, ACUAAU, ACUACA, ACUACC, ACUACG, ACUACU,
ACUAGG, ACUAUC, ACUAUG, ACUAUU, ACUCAU, ACUCCC, ACUCCG, ACUCCU, ACUCGA, ACUCGC,
ACUCGG, ACUCUC, ACUCUU, ACUGAG, ACUGAU, ACUGCC, ACUGCG, ACUGCU, ACUGGG, ACUGGU,
ACUGUC, ACUUAA, ACUUAC, ACUUAU, ACUUCA, ACUUCC, ACUUCG, ACUUCU, ACUUGA, ACUUGC,
ACUUGU, ACUUUA, ACUUUC, ACUUUG, AGAAAA, AGAAAC, AGAAAG, AGAACC, AGAACG, AGAACU,
AGAAGC, AGAAGU, AGAAUA, AGAAUC, AGAAUG, AGAAUU, AGACAA, AGACAC, AGACAU, AGACCA,
AGACCC, AGACCG, AGACCU, AGACGA, AGACGC, AGACGU, AGACUA, AGACUC, AGACUU, AGAGAC,
AGAGAG, AGAGAU, AGAGCC, AGAGCG, AGAGCU, AGAGGC, AGAGGG, AGAGGU, AGAGUA, AGAGUU,
AGAUAC, AGAUAG, AGAUAU, AGAUCC, AGAUCG, AGAUCU, AGAUGA, AGAUGC, AGAUGG, AGAUUA,
AGAUUC, AGAUUG, AGAUUU, AGCAAC, AGCACA, AGCACG, AGCACU, AGCAGA, AGCAUA, AGCAUC,
AGCAUG, AGCCAA, AGCCAU, AGCCCA, AGCCGA, AGCCGC, AGCCGG, AGCCGU, AGCCUA, AGCCUC,
AGCGAA, AGCGAG, AGCGAU, AGCGCA, AGCGCC, AGCGCG, AGCGCU, AGCGGA, AGCGGC, AGCGGU,
AGCGUA, AGCGUC, AGCGUG, AGCGUU, AGCUAA, AGCUAC, AGCUAG, AGCUAU, AGCUCA, AGCUCC,
AGCUCG, AGCUCU, AGCUGA, AGCUGG, AGCUGU, AGCUUC, AGCUUU, AGGAAU, AGGACC, AGGACG,
AGGAGA, AGGAGU, AGGAUA, AGGCAA, AGGCAU, AGGCCG, AGGCGA, AGGCGC, AGGCGG, AGGCUA,
AGGCUC, AGGCUU, AGGGAC, AGGGAU, AGGGGA, AGGGGU, AGGGUA, AGGGUG, AGGUAA,
AGGUAC, AGGUCA, AGGUCC, AGGUCU, AGGUGA, AGGUGC, AGGUGG, AGGUGU, AGGUUC,
AGGUUG, AGUAAA, AGUAAG, AGUAAU, AGUACA, AGUACG, AGUAGC, AGUAGG, AGUAUA, AGUAUC,
AGUAUG, AGUAUU, AGUCAA, AGUCAC, AGUCAG, AGUCAU, AGUCCA, AGUCCG, AGUCCU, AGUCGA,
AGUCGC, AGUCGG, AGUCGU, AGUCUA, AGUCUC, AGUCUG, AGUCUU, AGUGAA, AGUGAC, AGUGCG,
AGUGGG, AGUGUC, AGUUAA, AGUUAC, AGUUAG, AGUUCC, AGUUCG, AGUUGA, AGUUGC,
AGUUGU, AGUUUA, AGUUUC, AGUUUG, AGUUUU, AUAAAC, AUAAAU, AUAACA, AUAACC, AUAACG,
AUAACU, AUAAGA, AUAAGC, AUAAGG, AUAAGU, AUAAUC, AUAAUG, AUAAUU, AUACAC, AUACAG,
AUACAU, AUACCA, AUACCC, AUACCG, AUACGA, AUACGC, AUACGG, AUACGU, AUACUA, AUACUC,
AUACUG, AUACUU, AUAGAA, AUAGAC, AUAGAU, AUAGCA, AUAGCG, AUAGCU, AUAGGA, AUAGGU,
AUAGUA, AUAGUC, AUAGUG, AUAGUU, AUAUAC, AUAUAG, AUAUCC, AUAUCG, AUAUCU, AUAUGA,
AUAUGC, AUAUGG, AUAUGU, AUAUUC, AUAUUG, AUAUUU, AUCAAA, AUCAAC, AUCAAG, AUCAAU,
AUCACA, AUCACC, AUCACG, AUCAGC, AUCAGG, AUCCAA, AUCCAU, AUCCCC, AUCCCG, AUCCGA,
AUCCGC, AUCCGG, AUCCUA, AUCCUC, AUCCUG, AUCGAA, AUCGAC, AUCGAG, AUCGAU, AUCGCA,
AUCGCC, AUCGCG, AUCGCU, AUCGGC, AUCGGG, AUCGGU, AUCGUC, AUCGUG, AUCGUU, AUCUAA,
AUCUAC, AUCUAG, AUCUAU, AUCUCC, AUCUCG, AUCUGU, AUCUUG, AUCUUU, AUGAAA, AUGAAC,
AUGAAG, AUGAAU, AUGACC, AUGACU, AUGAGG, AUGAGU, AUGAUA, AUGAUC, AUGAUU, AUGCAA,
AUGCAG, AUGCCA, AUGCCC, AUGCCG, AUGCGA, AUGCGG, AUGCGU, AUGCUC, AUGCUU, AUGGAC,
AUGGCC, AUGGGA, AUGGGC, AUGGGU, AUGGUC, AUGGUG, AUGUAC, AUGUAU, AUGUCA,
AUGUCC, AUGUCG, AUGUGU, AUGUUA, AUGUUC, AUUAAA, AUUAAC, AUUAAG, AUUAAU, AUUACA,
AUUACC, AUUACG, AUUACU, AUUAGA, AUUAGC, AUUAGG, AUUAGU, AUUAUA, AUUAUC, AUUAUG,
AUUCAC, AUUCCA, AUUCCG, AUUCCU, AUUCGA, AUUCGC, AUUCGG, AUUCGU, AUUCUA, AUUCUC,
AUUCUU, AUUGAA, AUUGAC, AUUGAU, AUUGCC, AUUGCG, AUUGCU, AUUGGA, AUUGGC,
AUUGGG, AUUGGU, AUUGUA, AUUGUC, AUUGUG, AUUGUU, AUUUAA, AUUUAG, AUUUAU,
AUUUCC, AUUUCG, AUUUCU, AUUUGA, AUUUGC, AUUUGU, AUUUUA, AUUUUC, AUUUUG,
AUUUUU, CAAAAG, CAAACA, CAAACC, CAAACG, CAAACU, CAAAGA, CAAAGG, CAAAUA, CAAAUU,
CAACAC, CAACAU, CAACCA, CAACCC, CAACCG, CAACGA, CAACGC, CAACGG, CAACGU, CAACUA,
CAACUC, CAACUG, CAACUU, CAAGAA, CAAGAC, CAAGAU, CAAGCA, CAAGCC, CAAGCG, CAAGCU,
CAAGGA, CAAGGG, CAAGUC, CAAGUG, CAAGUU, CAAUAA, CAAUAC, CAAUAG, CAAUCC, CAAUCG,
CAAUCU, CAAUGA, CAAUGC, CAAUGG, CAAUGU, CAAUUC, CAAUUG, CAAUUU, CACAAU, CACACA,
CACACG, CACACU, CACAGA, CACAGC, CACAGG, CACAUA, CACAUC, CACAUU, CACCAA, CACCAC,
CACCAU, CACCCA, CACCCC, CACCCG, CACCGA, CACCGC, CACCGG, CACCGU, CACCUA, CACCUU,
CACGAA, CACGAC, CACGAG, CACGAU, CACGCA, CACGCC, CACGCU, CACGGA, CACGGC, CACGGG,
CACGGU, CACGUA, CACGUC, CACGUG, CACGUU, CACUAA, CACUAG, CACUAU, CACUCA, CACUCG,
CACUGA, CACUGC, CACUGG, CACUUA, CACUUC, CACUUU, CAGAAA, CAGAAG, CAGAAU, CAGACC,
CAGACG, CAGAGC, CAGAUA, CAGAUC, CAGCCG, CAGCCU, CAGCGA, CAGCGC, CAGCGG, CAGCGU,
CAGCUC, CAGCUU, CAGGAU, CAGGGG, CAGGGU, CAGGUA, CAGGUC, CAGGUU, CAGUAC, CAGUCG,
CAGUUG, CAUAAA, CAUAAC, CAUAAG, CAUAAU, CAUACA, CAUACC, CAUACG, CAUACU, CAUAGA,
CAUAGG, CAUAGU, CAUAUA, CAUAUC, CAUAUG, CAUCAA, CAUCAC, CAUCAG, CAUCAU, CAUCCA,
CAUCCC, CAUCCG, CAUCGA, CAUCGC, CAUCGG, CAUCGU, CAUCUA, CAUCUC, CAUCUG, CAUCUU,
CAUGAA, CAUGAC, CAUGAG, CAUGAU, CAUGCA, CAUGCC, CAUGCG, CAUGCU, CAUGGC, CAUGGG,
CAUGGU, CAUGUA, CAUGUC, CAUGUU, CAUUAA, CAUUAC, CAUUAG, CAUUCA, CAUUCC, CAUUCG,
CAUUCU, CAUUGA, CAUUGG, CAUUUC, CAUUUG, CAUUUU, CCAAAA, CCAAAC, CCAAAG, CCAAAU,
CCAACA, CCAACC, CCAACG, CCAACU, CCAAGA, CCAAGC, CCAAGG, CCAAUC, CCAAUG, CCAAUU,
CCACAA, CCACAC, CCACAG, CCACAU, CCACCA, CCACCC, CCACCG, CCACCU, CCACGA, CCACGC,
CCACGG, CCACGU, CCACUA, CCACUC, CCACUU, CCAGAA, CCAGAC, CCAGAG, CCAGCC, CCAGGU,
CCAGUC, CCAGUU, CCAUAA, CCAUAC, CCAUAG, CCAUAU, CCAUCA, CCAUCC, CCAUCU, CCAUGA,
CCAUGC, CCAUGG, CCAUUC, CCAUUG, CCAUUU, CCCAAC, CCCAAG, CCCAAU, CCCACA, CCCAGA,
CCCAGC, CCCAGU, CCCAUA, CCCAUC, CCCAUG, CCCAUU, CCCCAA, CCCCAG, CCCCAU, CCCCCC,
CCCCCG, CCCCCU, CCCCGA, CCCCGC, CCCCGU, CCCCUA, CCCCUC, CCCGAA, CCCGAC, CCCGAU,
CCCGCA, CCCGCU, CCCGGA, CCCGGC, CCCGUA, CCCGUG, CCCGUU, CCCUAA, CCCUAG, CCCUCA,
CCCUCU, CCCUGC, CCCUUA, CCCUUC, CCCUUU, CCGAAA, CCGAAC, CCGAAU, CCGACA, CCGACC,
CCGACG, CCGACU, CCGAGA, CCGAGG, CCGAGU, CCGAUA, CCGAUC, CCGAUG, CCGAUU, CCGCAA,
CCGCAC, CCGCAG, CCGCAU, CCGCCA, CCGCCC, CCGCCG, CCGCCU, CCGCGA, CCGCGC, CCGCGG,
CCGCGU, CCGCUA, CCGCUC, CCGCUG, CCGCUU, CCGGAA, CCGGAU, CCGGCA, CCGGCC, CCGGCG,
CCGGCU, CCGGGA, CCGGGC, CCGGGG, CCGGGU, CCGGUA, CCGGUC, CCGGUG, CCGUAA, CCGUAG,
CCGUAU, CCGUCA, CCGUCC, CCGUCG, CCGUGA, CCGUGU, CCGUUA, CCGUUC, CCGUUG, CCGUUU,
CCUAAC, CCUAAG, CCUAAU, CCUACA, CCUACC, CCUACG, CCUACU, CCUAGA, CCUAGC, CCUAGG,
CCUAGU, CCUAUA, CCUAUC, CCUAUG, CCUAUU, CCUCAA, CCUCAC, CCUCAG, CCUCAU, CCUCCA,
CCUCCC, CCUCCG, CCUCGA, CCUCGC, CCUCGG, CCUCGU, CCUCUA, CCUCUG, CCUGAC, CCUGAU,
CCUGCA, CCUGGG, CCUGGU, CCUGUU, CCUUAA, CCUUAC, CCUUAG, CCUUAU, CCUUCG, CCUUGA,
CCUUGU, CCUUUA, CCUUUC, CCUUUU, CGAAAA, CGAAAC, CGAAAG, CGAAAU, CGAACA, CGAACC,
CGAACG, CGAACU, CGAAGA, CGAAGC, CGAAGG, CGAAGU, CGAAUA, CGAAUC, CGAAUG, CGAAUU,
CGACAA, CGACAC, CGACAU, CGACCA, CGACCU, CGACGA, CGACGC, CGACGG, CGACGU, CGACUA,
CGACUG, CGACUU, CGAGAA, CGAGAC, CGAGAG, CGAGAU, CGAGCA, CGAGCC, CGAGCG, CGAGCU,
CGAGGC, CGAGGG, CGAGGU, CGAGUA, CGAGUC, CGAGUG, CGAGUU, CGAUAA, CGAUAC, CGAUAG,
CGAUAU, CGAUCA, CGAUCC, CGAUCG, CGAUCU, CGAUGA, CGAUGC, CGAUGG, CGAUGU, CGAUUA,
CGAUUC, CGAUUG, CGAUUU, CGCAAA, CGCAAC, CGCAAG, CGCAAU, CGCACA, CGCACC, CGCACG,
CGCAGA, CGCAGC, CGCAGG, CGCAGU, CGCAUA, CGCAUC, CGCAUG, CGCAUU, CGCCAA, CGCCAC,
CGCCAG, CGCCAU, CGCCCA, CGCCCC, CGCCCG, CGCCGA, CGCCGC, CGCCGG, CGCCGU, CGCCUA,
CGCCUG, CGCCUU, CGCGAA, CGCGAC, CGCGAG, CGCGAU, CGCGCA, CGCGCC, CGCGCG, CGCGCU,
CGCGGA, CGCGGC, CGCGGG, CGCGGU, CGCGUA, CGCGUC, CGCGUG, CGCGUU, CGCUAA, CGCUAC,
CGCUAG, CGCUAU, CGCUCA, CGCUCC, CGCUCG, CGCUCU, CGCUGA, CGCUGC, CGCUGG, CGCUGU,
CGCUUA, CGCUUC, CGCUUG, CGGAAA, CGGAAC, CGGAAG, CGGACA, CGGACC, CGGACG, CGGACU,
CGGAGC, CGGAGG, CGGAGU, CGGAUA, CGGAUU, CGGCAA, CGGCAC, CGGCAG, CGGCCA, CGGCCC,
CGGCCG, CGGCGC, CGGCGG, CGGCGU, CGGCUA, CGGCUC, CGGCUG, CGGCUU, CGGGAA, CGGGAC,
CGGGAG, CGGGAU, CGGGCA, CGGGCC, CGGGCG, CGGGCU, CGGGGU, CGGGUA, CGGGUC, CGGGUG,
CGGUAA, CGGUAC, CGGUAG, CGGUAU, CGGUCA, CGGUCG, CGGUCU, CGGUGA, CGGUGG, CGGUGU,
CGGUUA, CGGUUC, CGGUUG, CGGUUU, CGUAAA, CGUAAC, CGUAAG, CGUAAU, CGUACA, CGUACG,
CGUACU, CGUAGA, CGUAGC, CGUAGG, CGUAGU, CGUAUA, CGUAUC, CGUAUG, CGUAUU, CGUCAA,
CGUCAC, CGUCAG, CGUCAU, CGUCCA, CGUCCC, CGUCCG, CGUCCU, CGUCGA, CGUCGG, CGUCGU,
CGUCUA, CGUCUC, CGUCUG, CGUCUU, CGUGAA, CGUGAC, CGUGAG, CGUGAU, CGUGCC, CGUGCG,
CGUGCU, CGUGGA, CGUGGG, CGUGGU, CGUGUA, CGUGUG, CGUUAA, CGUUAC, CGUUAG,
CGUUAU, CGUUCA, CGUUCC, CGUUCG, CGUUCU, CGUUGA, CGUUGC, CGUUGU, CGUUUA, CGUUUC,
CGUUUU, CUAAAA, CUAAAC, CUAAAU, CUAACA, CUAACC, CUAACG, CUAACU, CUAAGA, CUAAGC,
CUAAGU, CUAAUA, CUAAUC, CUAAUG, CUACAC, CUACAU, CUACCA, CUACCC, CUACCG, CUACCU,
CUACGA, CUACGC, CUACGG, CUACGU, CUACUA, CUACUC, CUACUG, CUAGAA, CUAGAG, CUAGAU,
CUAGCA, CUAGCC, CUAGCG, CUAGCU, CUAGGA, CUAGGG, CUAGGU, CUAGUG, CUAGUU, CUAUAA,
CUAUAG, CUAUAU, CUAUCA, CUAUCC, CUAUCG, CUAUCU, CUAUGA, CUAUGC, CUAUGG, CUAUGU,
CUAUUA, CUAUUG, CUCAAC, CUCAAG, CUCAAU, CUCACC, CUCACG, CUCAGC, CUCAUA, CUCAUC,
CUCAUG, CUCAUU, CUCCAC, CUCCCC, CUCCCG, CUCCGA, CUCCGC, CUCCGG, CUCCUA, CUCCUC,
CUCCUU, CUCGAA, CUCGAC, CUCGAG, CUCGAU, CUCGCA, CUCGCC, CUCGCG, CUCGGG, CUCGGU,
CUCGUA, CUCGUC, CUCGUG, CUCGUU, CUCUAA, CUCUAC, CUCUAU, CUCUCA, CUCUCC, CUCUCU,
CUCUGC, CUCUGU, CUCUUA, CUCUUG, CUGAAG, CUGACC, CUGACG, CUGAGC, CUGAUA, CUGAUC,
CUGCCG, CUGCCU, CUGCGA, CUGCUA, CUGCUU, CUGGAG, CUGGAU, CUGGCG, CUGGGU, CUGUAC,
CUGUCA, CUGUCC, CUGUCG, CUGUGG, CUGUGU, CUGUUA, CUGUUU, CUUAAC, CUUAAG, CUUAAU,
CUUACC, CUUACG, CUUAGA, CUUAGC, CUUAGG, CUUAGU, CUUAUA, CUUAUC, CUUAUG, CUUAUU,
CUUCAG, CUUCAU, CUUCCA, CUUCCC, CUUCCG, CUUCCU, CUUCGA, CUUCGC, CUUCGG, CUUCGU,
CUUCUA, CUUGAC, CUUGAG, CUUGAU, CUUGCA, CUUGCC, CUUGCG, CUUGCU, CUUGGC, CUUGGU,
CUUGUU, CUUUAC, CUUUAG, CUUUAU, CUUUCA, CUUUCG, CUUUCU, CUUUGA, CUUUGC, CUUUGU,
CUUUUA, CUUUUC, CUUUUG, CUUUUU, GAAAAA, GAAAAG, GAAAAU, GAAACC, GAAACG, GAAAGA,
GAAAGC, GAAAGU, GAAAUA, GAAAUC, GAAAUG, GAAAUU, GAACAA, GAACAC, GAACAG, GAACAU,
GAACCA, GAACCC, GAACCG, GAACCU, GAACGA, GAACGC, GAACGG, GAACGU, GAACUA, GAACUG,
GAACUU, GAAGAC, GAAGAG, GAAGCA, GAAGCG, GAAGCU, GAAGUC, GAAUAA, GAAUAC, GAAUAG,
GAAUAU, GAAUCC, GAAUCG, GAAUCU, GAAUGA, GAAUGC, GAAUGU, GAAUUA, GAAUUC, GAAUUU,
GACAAA, GACAAG, GACAAU, GACACC, GACAGA, GACAGG, GACAUA, GACAUG, GACAUU, GACCAA,
GACCAC, GACCAG, GACCCA, GACCCC, GACCCG, GACCGC, GACCGG, GACCGU, GACCUA, GACCUC,
GACCUU, GACGAA, GACGAC, GACGAG, GACGAU, GACGCA, GACGCC, GACGCG, GACGCU, GACGGA,
GACGGC, GACGGG, GACGGU, GACGUA, GACGUC, GACGUG, GACGUU, GACUAA, GACUAC, GACUAG,
GACUAU, GACUCA, GACUCC, GACUCG, GACUGG, GACUGU, GACUUA, GACUUG, GACUUU, GAGAAU,
GAGAGA, GAGAGC, GAGAGG, GAGAUA, GAGAUC, GAGCAA, GAGCAU, GAGCCA, GAGCGA, GAGCGG,
GAGCGU, GAGGGU, GAGGUC, GAGGUG, GAGUAA, GAGUAG, GAGUCC, GAGUUC, GAGUUU,
GAUAAA, GAUAAC, GAUAAG, GAUAAU, GAUACA, GAUACC, GAUACG, GAUACU, GAUAGA, GAUAGC,
GAUAGG, GAUAGU, GAUAUA, GAUCAA, GAUCAC, GAUCAU, GAUCCA, GAUCCC, GAUCCU, GAUCGC,
GAUCGG, GAUCGU, GAUCUA, GAUCUG, GAUCUU, GAUGAA, GAUGAC, GAUGAG, GAUGCA, GAUGCC,
GAUGCG, GAUGCU, GAUGGC, GAUGGG, GAUGGU, GAUGUG, GAUGUU, GAUUAA, GAUUAC,
GAUUAG, GAUUAU, GAUUCA, GAUUCG, GAUUCU, GAUUGA, GAUUGC, GAUUUA, GAUUUC,
GAUUUG, GAUUUU, GCAAAC, GCAAAG, GCAAAU, GCAACA, GCAACC, GCAAGC, GCAAGU, GCAAUA,
GCAAUC, GCAAUG, GCAAUU, GCACAA, GCACAC, GCACAG, GCACCC, GCACCG, GCACCU, GCACGA,
GCACGC, GCACGU, GCACUA, GCACUC, GCACUG, GCACUU, GCAGAU, GCAGCC, GCAGCG, GCAGGC,
GCAGUA, GCAGUC, GCAGUG, GCAGUU, GCAUAA, GCAUAG, GCAUAU, GCAUCG, GCAUCU, GCAUGA,
GCAUGC, GCAUGG, GCAUGU, GCAUUA, GCAUUC, GCAUUG, GCAUUU, GCCAAA, GCCAAC, GCCAAU,
GCCACA, GCCACC, GCCACG, GCCAGA, GCCAGU, GCCAUA, GCCAUC, GCCAUG, GCCAUU, GCCCAA,
GCCCAC, GCCCAG, GCCCCG, GCCCGA, GCCCGG, GCCCGU, GCCGAA, GCCGAC, GCCGAG, GCCGAU,
GCCGCA, GCCGCU, GCCGGA, GCCGGC, GCCGGG, GCCGGU, GCCGUA, GCCGUC, GCCGUG, GCCGUU,
GCCUAA, GCCUAU, GCCUCA, GCCUCC, GCCUCG, GCCUGA, GCCUUA, GCCUUU, GCGAAA, GCGAAC,
GCGAAG, GCGAAU, GCGACC, GCGACG, GCGACU, GCGAGA, GCGAGC, GCGAGG, GCGAGU, GCGAUA,
GCGAUC, GCGAUG, GCGAUU, GCGCAA, GCGCAC, GCGCAG, GCGCAU, GCGCCA, GCGCCC, GCGCCU,
GCGCGA, GCGCGU, GCGCUA, GCGCUC, GCGCUG, GCGCUU, GCGGAA, GCGGAC, GCGGAU, GCGGCA,
GCGGCC, GCGGCU, GCGGGA, GCGGUA, GCGGUC, GCGGUU, GCGUAA, GCGUAC, GCGUAG, GCGUAU,
GCGUCA, GCGUCC, GCGUCG, GCGUCU, GCGUGA, GCGUGC, GCGUGG, GCGUGU, GCGUUA, GCGUUC,
GCGUUG, GCGUUU, GCUAAA, GCUAAC, GCUAAG, GCUAAU, GCUACC, GCUACG, GCUACU, GCUAGA,
GCUAGG, GCUAGU, GCUAUA, GCUAUC, GCUAUU, GCUCAA, GCUCAC, GCUCAG, GCUCAU, GCUCCA,
GCUCCC, GCUCCG, GCUCGA, GCUCGC, GCUCGU, GCUCUA, GCUCUC, GCUCUU, GCUGAA, GCUGAC,
GCUGAU, GCUGCA, GCUGCC, GCUGCG, GCUGCU, GCUGUG, GCUGUU, GCUUAC, GCUUAG, GCUUAU,
GCUUCA, GCUUCG, GCUUGA, GCUUGG, GCUUGU, GCUUUA, GCUUUG, GGAAAG, GGAACA, GGAACC,
GGAACG, GGAACU, GGAAGU, GGAAUA, GGAAUC, GGAAUU, GGACAA, GGACAC, GGACAG, GGACAU,
GGACCG, GGACGA, GGACGC, GGACGU, GGACUA, GGACUC, GGACUU, GGAGAC, GGAGCA, GGAGCG,
GGAGGG, GGAGUA, GGAUAA, GGAUAC, GGAUCA, GGAUCC, GGAUCG, GGAUCU, GGAUGC, GGAUUA,
GGAUUG, GGCAAU, GGCACA, GGCACU, GGCAGA, GGCAUA, GGCAUC, GGCCAC, GGCCAG, GGCCCC,
GGCCGA, GGCCGC, GGCCGU, GGCCUA, GGCCUG, GGCCUU, GGCGAA, GGCGAG, GGCGAU, GGCGCA,
GGCGCU, GGCGGU, GGCGUA, GGCGUC, GGCGUG, GGCGUU, GGCUAA, GGCUAC, GGCUAG, GGCUAU,
GGCUCC, GGCUCG, GGCUGA, GGCUUA, GGCUUC, GGCUUG, GGGAAU, GGGACA, GGGAGA, GGGAGU,
GGGAUA, GGGAUU, GGGCAA, GGGCAC, GGGCAG, GGGCCG, GGGCGG, GGGGCC, GGGGGG,
GGGGGU, GGGGUA, GGGUAC, GGGUAU, GGGUCA, GGGUCC, GGGUCG, GGGUGA, GGGUGC,
GGGUUA, GGGUUG, GGUAAA, GGUAAC, GGUAAG, GGUAAU, GGUACA, GGUACC, GGUACG,
GGUACU, GGUAGC, GGUAGG, GGUAGU, GGUAUA, GGUAUC, GGUAUG, GGUCAA, GGUCAC,
GGUCAG, GGUCAU, GGUCCA, GGUCCG, GGUCCU, GGUCGA, GGUCGC, GGUCGG, GGUCGU, GGUCUC,
GGUCUU, GGUGAA, GGUGAC, GGUGAU, GGUGCA, GGUGCC, GGUGGC, GGUGUA, GGUGUC,
GGUUAA, GGUUAG, GGUUAU, GGUUCA, GGUUCC, GGUUCG, GGUUGC, GGUUUC, GGUUUU,
GUAAAA, GUAAAG, GUAAAU, GUAACC, GUAACG, GUAACU, GUAAGA, GUAAGC, GUAAGG, GUAAGU,
GUAAUA, GUAAUC, GUAAUG, GUAAUU, GUACAA, GUACAC, GUACAG, GUACAU, GUACCA, GUACCC,
GUACCG, GUACCU, GUACGA, GUACGC, GUACGG, GUACGU, GUACUA, GUACUC, GUACUG, GUACUU,
GUAGAA, GUAGAC, GUAGCA, GUAGCC, GUAGCG, GUAGCU, GUAGGA, GUAGGC, GUAGGG,
GUAGGU, GUAGUA, GUAGUC, GUAUAA, GUAUAC, GUAUAG, GUAUAU, GUAUCA, GUAUCG,
GUAUCU, GUAUGA, GUAUGC, GUAUGG, GUAUUA, GUAUUG, GUAUUU, GUCAAA, GUCAAG,
GUCAAU, GUCACA, GUCACC, GUCACG, GUCAGA, GUCAGC, GUCAGG, GUCAUA, GUCAUC, GUCAUG,
GUCCAA, GUCCAC, GUCCAU, GUCCCC, GUCCCU, GUCCGA, GUCCGC, GUCCGG, GUCCGU, GUCCUA,
GUCCUG, GUCCUU, GUCGAA, GUCGAC, GUCGAG, GUCGAU, GUCGCA, GUCGCC, GUCGCG, GUCGCU,
GUCGGA, GUCGGC, GUCGGG, GUCGGU, GUCGUA, GUCGUC, GUCGUU, GUCUAA, GUCUAG, GUCUCA,
GUCUCC, GUCUCG, GUCUGA, GUCUGG, GUCUGU, GUCUUC, GUCUUU, GUGAAA, GUGAAC, GUGAAG,
GUGACC, GUGACG, GUGAGA, GUGAGC, GUGAGU, GUGAUC, GUGAUG, GUGAUU, GUGCAC,
GUGCAU, GUGCCC, GUGCCG, GUGCGA, GUGCGG, GUGCGU, GUGCUA, GUGCUC, GUGCUG,
GUGGAG, GUGGCG, GUGGCU, GUGGGU, GUGGUC, GUGGUG, GUGUAA, GUGUAG, GUGUCG,
GUGUGA, GUGUGC, GUGUGU, GUGUUG, GUGUUU, GUUAAA, GUUAAC, GUUAAG, GUUACA,
GUUACC, GUUACG, GUUACU, GUUAGA, GUUAGC, GUUAGU, GUUAUA, GUUAUC, GUUAUG,
GUUAUU, GUUCAA, GUUCAC, GUUCAG, GUUCCA, GUUCCG, GUUCGA, GUUCGC, GUUCGG, GUUCGU,
GUUCUA, GUUCUG, GUUGAA, GUUGAC, GUUGAG, GUUGAU, GUUGCG, GUUGCU, GUUGGA,
GUUGGC, GUUGGU, GUUGUC, GUUGUG, GUUGUU, GUUUAA, GUUUAC, GUUUAG, GUUUAU,
GUUUCA, GUUUCC, GUUUCU, GUUUGA, GUUUGC, GUUUGG, GUUUGU, GUUUUA, GUUUUC,
GUUUUU, UAAAAA, UAAAAC, UAAAAG, UAAAAU, UAAACA, UAAACC, UAAACG, UAAACU, UAAAGA,
UAAAGG, UAAAGU, UAAAUA, UAAAUC, UAAAUG, UAAAUU, UAACAA, UAACAC, UAACAG, UAACCA,
UAACCC, UAACCG, UAACCU, UAACGA, UAACGC, UAACGG, UAACGU, UAACUA, UAACUG, UAACUU,
UAAGAG, UAAGAU, UAAGCA, UAAGCC, UAAGCG, UAAGCU, UAAGGA, UAAGGC, UAAGGG, UAAGGU,
UAAGUA, UAAGUC, UAAGUG, UAAGUU, UAAUAA, UAAUCA, UAAUCC, UAAUCG, UAAUCU, UAAUGA,
UAAUGG, UAAUGU, UAAUUA, UAAUUC, UAAUUG, UACAAC, UACAAG, UACAAU, UACACC, UACACG,
UACACU, UACAGA, UACAGC, UACAUA, UACAUC, UACAUU, UACCAA, UACCAC, UACCAG, UACCAU,
UACCCC, UACCCG, UACCCU, UACCGA, UACCGC, UACCGG, UACCGU, UACCUA, UACCUG, UACGAA,
UACGAC, UACGAG, UACGAU, UACGCA, UACGCC, UACGCG, UACGCU, UACGGC, UACGGG, UACGGU,
UACGUA, UACGUC, UACGUG, UACGUU, UACUAA, UACUAC, UACUAG, UACUAU, UACUCA, UACUCC,
UACUCG, UACUCU, UACUGA, UACUGC, UACUGG, UACUUA, UACUUG, UACUUU, UAGAAA, UAGAAG,
UAGAAU, UAGACA, UAGACG, UAGAGA, UAGAGC, UAGAGU, UAGAUA, UAGAUC, UAGAUG, UAGCAU,
UAGCCC, UAGCCG, UAGCCU, UAGCGA, UAGCGC, UAGCGU, UAGCUA, UAGCUC, UAGCUG, UAGGAA,
UAGGAU, UAGGCG, UAGGCU, UAGGGU, UAGGUC, UAGGUG, UAGGUU, UAGUAA, UAGUAC,
UAGUAG, UAGUAU, UAGUCA, UAGUCG, UAGUGU, UAGUUA, UAGUUC, UAGUUG, UAGUUU,
UAUAAC, UAUAAG, UAUACU, UAUAGA, UAUAGC, UAUAGG, UAUAGU, UAUAUA, UAUAUC, UAUAUG,
UAUAUU, UAUCAA, UAUCAC, UAUCAU, UAUCCA, UAUCCC, UAUCCG, UAUCCU, UAUCGA, UAUCGC,
UAUCGG, UAUCGU, UAUCUA, UAUCUC, UAUCUG, UAUCUU, UAUGAA, UAUGAC, UAUGAG,
UAUGAU, UAUGCA, UAUGCG, UAUGCU, UAUGGA, UAUGGC, UAUGUC, UAUGUG, UAUGUU,
UAUUAG, UAUUCA, UAUUCC, UAUUCG, UAUUCU, UAUUGA, UAUUGG, UAUUUA, UAUUUC,
UAUUUG, UAUUUU, UCAAAA, UCAAAC, UCAAAG, UCAACC, UCAACU, UCAAGA, UCAAGC, UCAAUA,
UCAAUC, UCAAUG, UCAAUU, UCACCC, UCACCG, UCACCU, UCACGA, UCACGC, UCACGG, UCACGU,
UCACUA, UCACUC, UCACUU, UCAGAA, UCAGAC, UCAGAG, UCAGCG, UCAGCU, UCAGGA, UCAGGC,
UCAGGU, UCAGUC, UCAGUU, UCAUAA, UCAUCA, UCAUCC, UCAUCG, UCAUGC, UCAUGG, UCAUGU,
UCAUUA, UCAUUG, UCCAAA, UCCAAC, UCCAAG, UCCAAU, UCCACA, UCCACC, UCCACG, UCCAGC,
UCCAGG, UCCAUA, UCCAUC, UCCAUU, UCCCAA, UCCCAG, UCCCAU, UCCCCC, UCCCCG, UCCCCU,
UCCCGA, UCCCGC, UCCCGG, UCCCGU, UCCCUA, UCCCUC, UCCGAA, UCCGAC, UCCGAG, UCCGAU,
UCCGCA, UCCGCC, UCCGGA, UCCGGC, UCCGGU, UCCGUA, UCCGUC, UCCGUG, UCCUAA, UCCUCA,
UCCUCG, UCCUCU, UCCUGC, UCCUGU, UCCUUA, UCCUUC, UCCUUU, UCGAAA, UCGAAC, UCGAAG,
UCGAAU, UCGACA, UCGACC, UCGACG, UCGACU, UCGAGA, UCGAGC, UCGAGG, UCGAUA, UCGAUC,
UCGAUG, UCGAUU, UCGCAA, UCGCAC, UCGCAG, UCGCAU, UCGCCA, UCGCCC, UCGCCG, UCGCCU,
UCGCGA, UCGCGC, UCGCGU, UCGCUA, UCGCUC, UCGGAA, UCGGAC, UCGGAG, UCGGAU, UCGGCA,
UCGGCU, UCGGGG, UCGGGU, UCGGUC, UCGGUG, UCGGUU, UCGUAA, UCGUAC, UCGUAG,
UCGUAU, UCGUCA, UCGUCC, UCGUCG, UCGUCU, UCGUGA, UCGUGU, UCGUUA, UCGUUC, UCGUUG,
UCGUUU, UCUAAC, UCUAAG, UCUAAU, UCUACA, UCUACC, UCUACG, UCUACU, UCUAGC, UCUAGG,
UCUAGU, UCUAUA, UCUAUC, UCUAUG, UCUAUU, UCUCAG, UCUCAU, UCUCCG, UCUCGC, UCUCGG,
UCUCGU, UCUCUC, UCUGAA, UCUGAU, UCUGCA, UCUGCG, UCUGCU, UCUGGC, UCUGGU, UCUGUC,
UCUGUG, UCUGUU, UCUUAA, UCUUAC, UCUUAG, UCUUAU, UCUUCA, UCUUCC, UCUUCG, UCUUCU,
UCUUGC, UCUUGG, UCUUGU, UCUUUA, UCUUUC, UCUUUG, UCUUUU, UGAAAA, UGAAAC,
UGAACA, UGAACC, UGAAGG, UGAAUC, UGAAUG, UGACAA, UGACAC, UGACAG, UGACCA, UGACCC,
UGACCG, UGACGA, UGACGC, UGACGG, UGACGU, UGACUA, UGACUC, UGACUU, UGAGAG, UGAGAU,
UGAGCA, UGAGCC, UGAGCU, UGAGGC, UGAGGU, UGAGUA, UGAGUU, UGAUAC, UGAUAG,
UGAUAU, UGAUCA, UGAUCG, UGAUCU, UGAUGA, UGAUGC, UGAUGG, UGAUGU, UGAUUA,
UGAUUC, UGAUUG, UGAUUU, UGCAAC, UGCAAG, UGCACA, UGCACG, UGCAGG, UGCAGU, UGCAUC,
UGCCCA, UGCCCC, UGCCCG, UGCCGA, UGCCGC, UGCCGG, UGCCGU, UGCCUA, UGCCUC, UGCCUG,
UGCCUU, UGCGAA, UGCGAC, UGCGAU, UGCGCC, UGCGCG, UGCGCU, UGCGGC, UGCGGG, UGCGGU,
UGCGUA, UGCGUC, UGCGUG, UGCGUU, UGCUAC, UGCUAU, UGCUCC, UGCUCG, UGCUGC, UGCUGG,
UGCUGU, UGCUUA, UGCUUU, UGGAAC, UGGAAG, UGGAGC, UGGAUC, UGGAUU, UGGCAA,
UGGCAC, UGGCAG, UGGCCG, UGGCCU, UGGCGA, UGGCGC, UGGCGU, UGGCUA, UGGCUC, UGGCUU,
UGGGAA, UGGGCA, UGGGCC, UGGGGC, UGGGUC, UGGUAA, UGGUAG, UGGUAU, UGGUCC,
UGGUCG, UGGUCU, UGGUGA, UGGUGC, UGGUGG, UGGUGU, UGGUUA, UGGUUG, UGUAAA,
UGUAAC, UGUAAG, UGUACC, UGUACG, UGUACU, UGUAGA, UGUAGC, UGUAGU, UGUAUC,
UGUAUU, UGUCAA, UGUCAC, UGUCAG, UGUCAU, UGUCCA, UGUCCC, UGUCCG, UGUCGA, UGUCGC,
UGUCGG, UGUCGU, UGUCUA, UGUCUC, UGUGAC, UGUGAG, UGUGAU, UGUGCA, UGUGGU,
UGUGUA, UGUGUU, UGUUAC, UGUUAG, UGUUAU, UGUUCA, UGUUCC, UGUUCG, UGUUGG,
UGUUGU, UGUUUA, UGUUUC, UGUUUG, UGUUUU, UUAAAA, UUAAAC, UUAAAG, UUAAAU,
UUAACC, UUAACG, UUAACU, UUAAGU, UUAAUA, UUAAUC, UUAAUG, UUAAUU, UUACAA, UUACAC,
UUACAG, UUACAU, UUACCA, UUACCC, UUACCG, UUACCU, UUACGA, UUACGC, UUACGG, UUACGU,
UUACUA, UUACUC, UUACUG, UUACUU, UUAGAA, UUAGAC, UUAGCC, UUAGCG, UUAGCU, UUAGGC,
UUAGGU, UUAGUA, UUAGUC, UUAGUU, UUAUAA, UUAUAC, UUAUAG, UUAUAU, UUAUCC,
UUAUCG, UUAUCU, UUAUGA, UUAUGG, UUAUGU, UUAUUA, UUAUUC, UUAUUG, UUAUUU,
UUCAAC, UUCAAU, UUCACA, UUCACC, UUCACG, UUCACU, UUCAGC, UUCAGG, UUCAGU, UUCAUA,
UUCAUC, UUCAUG, UUCAUU, UUCCAA, UUCCCA, UUCCCG, UUCCGA, UUCCGU, UUCCUU, UUCGAA,
UUCGAC, UUCGAG, UUCGAU, UUCGCA, UUCGCC, UUCGCG, UUCGCU, UUCGGA, UUCGGC, UUCGGG,
UUCGGU, UUCGUA, UUCGUC, UUCGUG, UUCGUU, UUCUAC, UUCUAG, UUCUCA, UUCUCG,
UUCUGG, UUCUUA, UUCUUU, UUGAAA, UUGAAC, UUGAAG, UUGAAU, UUGACC, UUGACG,
UUGACU, UUGAGA, UUGAGC, UUGAGU, UUGAUA, UUGAUC, UUGAUG, UUGAUU, UUGCAA,
UUGCAC, UUGCAG, UUGCAU, UUGCCC, UUGCCG, UUGCGA, UUGCGC, UUGCGG, UUGCGU, UUGCUA,
UUGCUC, UUGCUG, UUGCUU, UUGGAA, UUGGAG, UUGGCC, UUGGCG, UUGGCU, UUGGGC,
UUGGGU, UUGGUA, UUGGUG, UUGUAA, UUGUAC, UUGUCA, UUGUCG, UUGUCU, UUGUGC,
UUGUGG, UUGUUA, UUGUUG, UUGUUU, UUUAAA, UUUAAC, UUUAAG, UUUAAU, UUUACA,
UUUACC, UUUACG, UUUACU, UUUAGA, UUUAGC, UUUAGG, UUUAGU, UUUAUA, UUUAUC,
UUUAUG, UUUAUU, UUUCAU, UUUCCA, UUUCCG, UUUCCU, UUUCGA, UUUCGC, UUUCGG,
UUUCGU, UUUCUA, UUUCUC, UUUCUG, UUUCUU, UUUGAA, UUUGAC, UUUGAG, UUUGAU,
UUUGCC, UUUGCU, UUUGGA, UUUGGC, UUUGGG, UUUGGU, UUUGUA, UUUGUC, UUUGUU,
UUUUAA, UUUUAG, UUUUAU, UUUUCC, UUUUCG, UUUUCU, UUUUGA, UUUUGC, UUUUGG,
UUUUGU, UUUUUA, UUUUUC, UUUUUU

TABLE 2
Oligonucleotides sequences made for testing

| Oligo | | | | | | Assay | |
|---|---|---|---|---|---|---|---|
| Name | Avg RQ | Avg RQ SE | Target | [oligo] | cell line | Type | Note |
| APOA1-01 | 1.72953309 | 0.38593508 | APOA1 | 30 | hHEP | qRTPCR | |
| | | | | | primary | | |
| APOA1-02 | 1.65297164 | 0.26240546 | APOA1 | 30 | hHEP | qRTPCR | |
| | | | | | primary | | |
| APOA1-03 | 1.74397325 | 0.06536137 | APOA1 | 30 | hHEP | qRTPCR | |
| | | | | | primary | | |
| APOA1-04 | 2.0996343 | 0.2876618 | APOA1 | 30 | hHEP | qRTPCR | |
| | | | | | primary | | |
| APOA1-05 | 1.71754382 | 0.15037132 | APOA1 | 30 | hHEP | qRTPCR | |
| | | | | | primary | | |
| APOA1-06 | 2.09435192 | 0.50263098 | APOA1 | 30 | hHEP | qRTPCR | |
| | | | | | primary | | |
| APOA1-07 | 2.35121919 | 0.39782252 | APOA1 | 30 | hHEP | qRTPCR | |
| | | | | | primary | | |
| APOA1-08 | 2.25583899 | 0.45353672 | APOA1 | 30 | hHEP | qRTPCR | |
| | | | | | primary | | |
| APOA1-09 | 1.87408722 | 0.56362016 | APOA1 | 30 | hHEP | qRTPCR | |
| | | | | | primary | | |
| APOA1-10 | 1.88351159 | 1.07415213 | APOA1 | 30 | hHEP | qRTPCR | |
| | | | | | primary | | |
| APOA1-11 | 1.87452852 | 1.15292269 | APOA1 | 30 | hHEP | qRTPCR | |
| | | | | | primary | | |
| APOA1-12 | 1.68704027 | 0.70914192 | APOA1 | 30 | hHEP | qRTPCR | |
| | | | | | primary | | |
| APOA1-13 | 1.16271652 | 0.15392998 | APOA1 | 30 | hHEP | qRTPCR | |
| | | | | | primary | | |
| APOA1-14 | 1.42852588 | 0.27620042 | APOA1 | 30 | hHEP | qRTPCR | |
| | | | | | primary | | |
| APOA1-15 | 1.54852506 | 0.23393251 | APOA1 | 30 | hHEP | qRTPCR | |
| | | | | | primary | | |
| APOA1-16 | 1.69392154 | 0.19855031 | APOA1 | 30 | hHEP | qRTPCR | |
| | | | | | primary | | |
| APOA1-17 | 1.73362922 | 0.06508272 | APOA1 | 30 | hHEP | qRTPCR | |
| | | | | | primary | | |
| APOA1-18 | 1.75581561 | 0.28839206 | APOA1 | 30 | hHEP | qRTPCR | |
| | | | | | primary | | |
| APOA1-19 | 1.75387129 | 0.12968574 | APOA1 | 30 | hHEP | qRTPCR | |
| | | | | | primary | | |
| APOA1-20 | 2.14124283 | 0.26096495 | APOA1 | 30 | hHEP | qRTPCR | |
| | | | | | primary | | |
| APOA1-21 | 2.11610962 | 0.3854349 | APOA1 | 30 | hHEP | qRTPCR | |
| | | | | | primary | | |
| APOA1-22 | 1.90687309 | 0.46088318 | APOA1 | 30 | hHEP | qRTPCR | |
| | | | | | primary | | |
| APOA1-23 | 1.46156108 | 0.50872343 | APOA1 | 30 | hHEP | qRTPCR | |
| | | | | | primary | | |
| APOA1-24 | 1.2343356 | 0.30560655 | APOA1 | 30 | hHEP | qRTPCR | |
| | | | | | primary | | |
| APOA1-25 | 1.21966092 | 0.09432521 | APOA1 | 30 | hHEP | qRTPCR | |
| | | | | | primary | | |
| APOA1-26 | 1.28479929 | 0.26687871 | APOA1 | 30 | hHEP | qRTPCR | |
| | | | | | primary | | |
| APOA1-27 | 1.24643066 | 0.13561291 | APOA1 | 30 | hHEP | qRTPCR | |
| | | | | | primary | | |
| APOA1-28 | 1.47336789 | 0.17895867 | APOA1 | 30 | hHEP | qRTPCR | |
| | | | | | primary | | |
| APOA1-29 | 1.27656602 | 0.14525187 | APOA1 | 30 | hHEP | qRTPCR | |
| | | | | | primary | | |
| APOA1-30 | 1.50764756 | 0.18334138 | APOA1 | 30 | hHEP | qRTPCR | |
| | | | | | primary | | |
| APOA1-31 | 1.65674419 | 0.34639842 | APOA1 | 30 | hHEP | qRTPCR | |
| | | | | | primary | | |
| APOA1-32 | 1.83196248 | 0.20756384 | APOA1 | 30 | hHEP | qRTPCR | |
| | | | | | primary | | |
| APOA1-33 | 1.72607346 | 0.36095721 | APOA1 | 30 | hHEP | qRTPCR | |
| | | | | | primary | | |
| APOA1-34 | 1.58186221 | 0.62302249 | APOA1 | 30 | hHEP | qRTPCR | |
| | | | | | primary | | |
| APOA1-35 | 1.44464989 | 0.58844576 | APOA1 | 30 | hHEP | qRTPCR | |
| | | | | | primary | | |
| APOA1-36 | 1.24362343 | 0.38366142 | APOA1 | 30 | hHEP | qRTPCR | |
| | | | | | primary | | |
| APOA1-37 | 1.15659228 | 0.23594549 | APOA1 | 30 | hHEP | qRTPCR | |
| | | | | | primary | | |
| APOA1-38 | 1.20089332 | 0.08299166 | APOA1 | 30 | hHEP | qRTPCR | |
| | | | | | primary | | |
| APOA1-39 | 1.19682637 | 0.06003989 | APOA1 | 30 | hHEP | qRTPCR | |
| | | | | | primary | | |
| APOA1-40 | 1.43549146 | 0.13903918 | APOA1 | 30 | hHEP | qRTPCR | |
| | | | | | primary | | |
| APOA1-41 | 1.34668295 | 0.12179207 | APOA1 | 30 | hHEP | qRTPCR | |
| | | | | | primary | | |
| APOA1-42 | 1.52166423 | 0.38408035 | APOA1 | 30 | hHEP | qRTPCR | |
| | | | | | primary | | |
| APOA1-43 | 1.33787399 | 0.34543502 | APOA1 | 30 | hHEP | qRTPCR | |
| | | | | | primary | | |
| APOA1-44 | 1.52824997 | 0.19034374 | APOA1 | 30 | hHEP | qRTPCR | |
| | | | | | primary | | |
| APOA1-45 | 1.43901401 | 0.28673717 | APOA1 | 30 | hHEP | qRTPCR | |
| | | | | | primary | | |
| APOA1-46 | 1.5495 | 0.35875889 | APOA1 | 30 | hHEP | qRTPCR | |
| | | | | | primary | | |
| APOA1-47 | 1.43714933 | 0.68563121 | APOA1 | 30 | hHEP | qRTPCR | |
| | | | | | primary | | |
| APOA1-48 | 1.10920683 | 0.37030472 | APOA1 | 30 | hHEP | qRTPCR | |
| | | | | | primary | | |
| APOA1-49 | 0.75144318 | 0.08113415 | APOA1 | 30 | hHEP | qRTPCR | |
| | | | | | primary | | |
| APOA1-50 | 0.70723551 | 0.16220968 | APOA1 | 30 | hHEP | qRTPCR | |
| | | | | | primary | | |
| Untreated | 0.66633377 | 0.0114874 | APOA1 | 0 | hHEP | qRTPCR | |
| | | | | | primary | | |
| RNAiMAx | 1 | 0 | APOA1 | 0 | hHEP | qRTPCR | |
| | | | | | primary | | |
| Untreated | 1 | 0 | APOA1 | 0 | hHEP | qRTPCR | |
| | | | | | primary | | |
| RNAiMAx | 1.50119142 | 0.02564126 | APOA1 | 0 | hHEP | qRTPCR | |
| | | | | | primary | | |
| APOA1-01 | 2.59595768 | 0.58454517 | APOA1 | 30 | hHEP | qRTPCR | |
| | | | | | primary | | |
| APOA1-02 | 2.47836992 | 0.37666392 | APOA1 | 30 | hHEP | qRTPCR | |
| | | | | | primary | | |
| APOA1-03 | 2.61967067 | 0.14150997 | APOA1 | 30 | hHEP | qRTPCR | |
| | | | | | primary | | |
| APOA1-04 | 3.15904416 | 0.48215112 | APOA1 | 30 | hHEP | qRTPCR | |
| | | | | | primary | | |
| APOA1-05 | 2.57463247 | 0.18077739 | APOA1 | 30 | hHEP | qRTPCR | |
| | | | | | primary | | |
| APOA1-06 | 3.14580653 | 0.77234823 | APOA1 | 30 | hHEP | qRTPCR | |
| | | | | | primary | | |
| APOA1-07 | 3.53790063 | 0.64947983 | APOA1 | 30 | hHEP | qRTPCR | |
| | | | | | primary | | |
| APOA1-08 | 3.39573936 | 0.73102183 | APOA1 | 30 | hHEP | qRTPCR | |
| | | | | | primary | | |
| APOA1-09 | 2.82342809 | 0.88688923 | APOA1 | 30 | hHEP | qRTPCR | |
| | | | | | primary | | |
| APOA1-10 | 2.84806778 | 1.65960442 | APOA1 | 30 | hHEP | qRTPCR | |
| | | | | | primary | | |
| APOA1-11 | 2.83446639 | 1.77845013 | APOA1 | 30 | hHEP | qRTPCR | |
| | | | | | primary | | |
| APOA1-12 | 2.54332893 | 1.10144966 | APOA1 | 30 | hHEP | qRTPCR | |
| | | | | | primary | | |
| APOA1-13 | 1.74174066 | 0.20043824 | APOA1 | 30 | hHEP | qRTPCR | |
| | | | | | primary | | |
| APOA1-14 | 2.14172941 | 0.40249982 | APOA1 | 30 | hHEP | qRTPCR | |
| | | | | | primary | | |
| APOA1-15 | 2.32262333 | 0.34115951 | APOA1 | 30 | hHEP | qRTPCR | |
| | | | | | primary | | |
| APOA1-16 | 2.54524123 | 0.32372985 | APOA1 | 30 | hHEP | qRTPCR | |
| | | | | | primary | | |
| APOA1-17 | 2.60379662 | 0.13535426 | APOA1 | 30 | hHEP | qRTPCR | |
| | | | | | primary | | |
| APOA1-18 | 2.63145824 | 0.40644961 | APOA1 | 30 | hHEP | qRTPCR | |
| | | | | | primary | | |
| APOA1-19 | 2.63501621 | 0.22762625 | APOA1 | 30 | hHEP | qRTPCR | |
| | | | | | primary | | |
| APOA1-20 | 3.21881652 | 0.43310927 | APOA1 | 30 | hHEP | qRTPCR | |
| | | | | | primary | | |
| APOA1-21 | 3.17992747 | 0.60559106 | APOA1 | 30 | hHEP | qRTPCR | |
| | | | | | primary | | |
| APOA1-22 | 2.86753905 | 0.72193248 | APOA1 | 30 | hHEP | qRTPCR | |
| | | | | | primary | | |
| APOA1-23 | 2.20339037 | 0.79656635 | APOA1 | 30 | hHEP | qRTPCR | |
| | | | | | primary | | |
| APOA1-24 | 1.85776896 | 0.4831969 | APOA1 | 30 | hHEP | qRTPCR | |
| | | | | | primary | | |
| APOA1-25 | 1.82919045 | 0.11991616 | APOA1 | 30 | hHEP | qRTPCR | |
| | | | | | primary | | |
| APOA1-26 | 1.92498763 | 0.38255281 | APOA1 | 30 | hHEP | qRTPCR | |
| | | | | | primary | | |
| APOA1-27 | 1.872221 | 0.21819787 | APOA1 | 30 | hHEP | qRTPCR | |
| | | | | | primary | | |
| APOA1-28 | 2.20894694 | 0.24572723 | APOA1 | 30 | hHEP | qRTPCR | |
| | | | | | primary | | |
| APOA1-29 | 1.91504651 | 0.20941403 | APOA1 | 30 | hHEP | qRTPCR | |
| | | | | | primary | | |
| APOA1-30 | 2.26166637 | 0.26557529 | APOA1 | 30 | hHEP | qRTPCR | |
| | | | | | primary | | |
| APOA1-31 | 2.48597106 | 0.52038611 | APOA1 | 30 | hHEP | qRTPCR | |
| | | | | | primary | | |
| APOA1-32 | 2.74827717 | 0.29965983 | APOA1 | 30 | hHEP | qRTPCR | |
| | | | | | primary | | |
| APOA1-33 | 2.5916897 | 0.55185035 | APOA1 | 30 | hHEP | qRTPCR | |
| | | | | | primary | | |
| APOA1-34 | 2.37945254 | 0.95946153 | APOA1 | 30 | hHEP | qRTPCR | |
| | | | | | primary | | |
| APOA1-35 | 2.17400395 | 0.90772983 | APOA1 | 30 | hHEP | qRTPCR | |
| | | | | | primary | | |
| APOA1-36 | 1.86809218 | 0.58698475 | APOA1 | 30 | hHEP | qRTPCR | |
| | | | | | primary | | |
| APOA1-37 | 1.73031334 | 0.32102823 | APOA1 | 30 | hHEP | qRTPCR | |
| | | | | | primary | | |
| APOA1-38 | 1.80411848 | 0.14707304 | APOA1 | 30 | hHEP | qRTPCR | |
| | | | | | primary | | |
| APOA1-39 | 1.79600638 | 0.08218318 | APOA1 | 30 | hHEP | qRTPCR | |
| | | | | | primary | | |
| APOA1-40 | 2.15252385 | 0.18449913 | APOA1 | 30 | hHEP | qRTPCR | |
| | | | | | primary | | |
| APOA1-41 | 2.01851463 | 0.1465385 | APOA1 | 30 | hHEP | qRTPCR | |
| | | | | | primary | | |
| APOA1-42 | 2.27706516 | 0.5438083 | APOA1 | 30 | hHEP | qRTPCR | |
| | | | | | primary | | |
| APOA1-43 | 2.00775529 | 0.52159254 | APOA1 | 30 | hHEP | qRTPCR | |
| | | | | | primary | | |
| APOA1-44 | 2.29182403 | 0.2688113 | APOA1 | 30 | hHEP | qRTPCR | |
| | | | | | primary | | |
| APOA1-45 | 2.15520256 | 0.403239 | APOA1 | 30 | hHEP | qRTPCR | |
| | | | | | primary | | |
| APOA1-46 | 2.32745816 | 0.55199343 | APOA1 | 30 | hHEP | qRTPCR | |
| | | | | | primary | | |
| APOA1-47 | 2.16493754 | 1.05770319 | APOA1 | 30 | hHEP | qRTPCR | |
| | | | | | primary | | |
| APOA1-48 | 1.66582169 | 0.56453292 | APOA1 | 30 | hHEP | qRTPCR | |
| | | | | | primary | | |
| APOA1-49 | 1.12820592 | 0.12598572 | APOA1 | 30 | hHEP | qRTPCR | |
| | | | | | primary | | |
| APOA1-50 | 1.0653361 | 0.25668883 | APOA1 | 30 | hHEP | qRTPCR | |
| | | | | | primary | | |
| RNAiMAx | 1 | 0 | APOA1 | 0 | hHEP | qRTPCR | |
| | | | | | primary | | |
| Untreated | 0.68289266 | 0.00979906 | APOA1 | 0 | hHEP | qRTPCR | |
| | | | | | primary | | |
| APOA1-01 | 2.2916217 | 1.04866742 | APOA1 | 30 | hHEP | qRTPCR | |
| | | | | | primary | | |
| APOA1-02 | 1.72987491 | 0.2225552 | APOA1 | 30 | hHEP | qRTPCR | |
| | | | | | primary | | |
| APOA1-03 | 2.07532502 | 0.51531192 | APOA1 | 30 | hHEP | qRTPCR | |
| | | | | | primary | | |
| APOA1-04 | 2.20493747 | 0.62729492 | APOA1 | 30 | hHEP | qRTPCR | |
| | | | | | primary | | |
| APOA1-05 | 2.23394203 | 0.77019317 | APOA1 | 30 | hHEP | qRTPCR | |
| | | | | | primary | | |
| APOA1-06 | 2.00431747 | 0.6758265 | APOA1 | 30 | hHEP | qRTPCR | |
| | | | | | primary | | |
| APOA1-07 | 2.34353775 | 0.728281 | APOA1 | 30 | hHEP | qRTPCR | |
| | | | | | primary | | |
| APOA1-08 | 2.50906043 | 0.83967306 | APOA1 | 30 | hHEP | qRTPCR | |
| | | | | | primary | | |
| APOA1-09 | 2.22312576 | 0.56435323 | APOA1 | 30 | hHEP | qRTPCR | |
| | | | | | primary | | |
| APOA1-10 | 2.22212001 | 0.66321686 | APOA1 | 30 | hHEP | qRTPCR | |
| | | | | | primary | | |
| APOA1-11 | 2.55103454 | 0.72862128 | APOA1 | 30 | hHEP | qRTPCR | |
| | | | | | primary | | |
| APOA1-12 | 2.11781341 | 0.51816795 | APOA1 | 30 | hHEP | qRTPCR | |
| | | | | | primary | | |
| APOA1-13 | 1.98247361 | 0.49365327 | APOA1 | 30 | hHEP | qRTPCR | |
| | | | | | primary | | |
| APOA1-14 | 2.13525177 | 0.72448804 | APOA1 | 30 | hHEP | qRTPCR | |
| | | | | | primary | | |
| APOA1-15 | 2.16024977 | 0.63259782 | APOA1 | 30 | hHEP | qRTPCR | |
| | | | | | primary | | |
| APOA1-16 | 2.45613053 | 0.97134737 | APOA1 | 30 | hHEP | qRTPCR | |
| | | | | | primary | | |
| APOA1-17 | 1.97374054 | 0.6591072 | APOA1 | 30 | hHEP | qRTPCR | |
| | | | | | primary | | |
| APOA1-18 | 1.99859048 | 0.78501085 | APOA1 | 30 | hHEP | qRTPCR | |
| | | | | | primary | | |
| APOA1-19 | 2.19914061 | 0.73852861 | APOA1 | 30 | hHEP | qRTPCR | |
| | | | | | primary | | |
| APOA1-20 | 2.27391127 | 0.74207028 | APOA1 | 30 | hHEP | qRTPCR | |
| | | | | | primary | | |
| APOA1-21 | 2.60875069 | 0.7439227 | APOA1 | 30 | hHEP | qRTPCR | |
| | | | | | primary | | |
| APOA1-22 | 2.31838416 | 1.05386751 | APOA1 | 30 | hHEP | qRTPCR | |
| | | | | | primary | | |
| APOA1-23 | 2.05907172 | 0.83091903 | APOA1 | 30 | hHEP | qRTPCR | |
| | | | | | primary | | |
| APOA1-24 | 2.07785479 | 0.65297826 | APOA1 | 30 | hHEP | qRTPCR | |
| | | | | | primary | | |
| APOA1-25 | 1.87523823 | 0.68172973 | APOA1 | 30 | hHEP | qRTPCR | |
| | | | | | primary | | |
| APOA1-26 | 1.94493143 | 0.71515253 | APOA1 | 30 | hHEP | qRTPCR | |
| | | | | | primary | | |
| APOA1-27 | 1.7604053 | 0.54898253 | APOA1 | 30 | hHEP | qRTPCR | |
| | | | | | primary | | |
| APOA1-28 | 2.02256966 | 0.57674342 | APOA1 | 30 | hHEP | qRTPCR | |
| | | | | | primary | | |
| APOA1-29 | 1.77026775 | 0.59656828 | APOA1 | 30 | hHEP | qRTPCR | |
| | | | | | primary | | |
| APOA1-30 | 2.17762038 | 0.60526676 | APOA1 | 30 | hHEP | qRTPCR | |
| | | | | | primary | | |
| APOA1-31 | 2.06704273 | 0.67575768 | APOA1 | 30 | hHEP | qRTPCR | |
| | | | | | primary | | |
| APOA1-32 | 2.09477161 | 0.65526344 | APOA1 | 30 | hHEP | qRTPCR | |
| | | | | | primary | | |
| APOA1-33 | 2.15990714 | 0.79290909 | APOA1 | 30 | hHEP | qRTPCR | |
| | | | | | primary | | |
| APOA1-34 | 2.00319175 | 0.58818945 | APOA1 | 30 | hHEP | qRTPCR | |
| | | | | | primary | | |
| APOA1-35 | 1.85395321 | 0.67677642 | APOA1 | 30 | hHEP | qRTPCR | |
| | | | | | primary | | |
| APOA1-36 | 1.76089152 | 0.70945074 | APOA1 | 30 | hHEP | qRTPCR | |
| | | | | | primary | | |
| APOA1-37 | 1.71562585 | 0.78114807 | APOA1 | 30 | hHEP | qRTPCR | |
| | | | | | primary | | |
| APOA1-38 | 1.80641212 | 0.8331741 | APOA1 | 30 | hHEP | qRTPCR | |
| | | | | | primary | | |
| APOA1-39 | 1.76542166 | 0.53374263 | APOA1 | 30 | hHEP | qRTPCR | |
| | | | | | primary | | |
| APOA1-40 | 2.15329824 | 0.50965092 | APOA1 | 30 | hHEP | qRTPCR | |
| | | | | | primary | | |
| APOA1-41 | 1.5939654 | 0.54044002 | APOA1 | 30 | hHEP | qRTPCR | |
| | | | | | primary | | |
| APOA1-42 | 1.94378262 | 0.50702954 | APOA1 | 30 | hHEP | qRTPCR | |
| | | | | | primary | | |
| APOA1-43 | 1.79963282 | 0.44705064 | APOA1 | 30 | hHEP | qRTPCR | |
| | | | | | primary | | |
| APOA1-44 | 1.9575475 | 0.7189088 | APOA1 | 30 | hHEP | qRTPCR | |
| | | | | | primary | | |
| APOA1-45 | 1.98531492 | 0.68656113 | APOA1 | 30 | hHEP | qRTPCR | |
| | | | | | primary | | |
| APOA1-46 | 2.03417331 | 0.71255862 | APOA1 | 30 | hHEP | qRTPCR | |
| | | | | | primary | | |
| APOA1-47 | 1.79039551 | 0.71423975 | APOA1 | 30 | hHEP | qRTPCR | |
| | | | | | primary | | |
| APOA1-48 | 1.86791984 | 0.48531732 | APOA1 | 30 | hHEP | qRTPCR | |
| | | | | | primary | | |
| APOA1-49 | 1.40729249 | 0.5376716 | APOA1 | 30 | hHEP | qRTPCR | |
| | | | | | primary | | |
| APOA1-50 | 1.28785038 | 0.72066311 | APOA1 | 30 | hHEP | qRTPCR | |
| | | | | | primary | | |
| RNAiMAX | 1 | 0 | APOA1 | 0 | hHEP | qRTPCR | |
| | | | | | primary | | |
| Untreated | 0.6819422 | 0.0118879 | APOA1 | 0 | hHEP | qRTPCR | |
| | | | | | primary | | |
| APOA1-01 | 2.71830639 | 1.05041684 | APOA1 | 30 | hHEP | qRTPCR | |
| | | | | | primary | | |
| APOA1-02 | 1.88112279 | 0.07528921 | APOA1 | 30 | hHEP | qRTPCR | |
| | | | | | primary | | |
| APOA1-03 | 2.39266721 | 0.31016346 | APOA1 | 30 | hHEP | qRTPCR | |
| | | | | | primary | | |
| APOA1-04 | 2.60733815 | 0.32321736 | APOA1 | 30 | hHEP | qRTPCR | |
| | | | | | primary | | |
| APOA1-05 | 2.70219145 | 0.48168842 | APOA1 | 30 | hHEP | qRTPCR | |
| | | | | | primary | | |
| APOA1-06 | 2.31011895 | 0.63605704 | APOA1 | 30 | hHEP | qRTPCR | |
| | | | | | primary | | |
| APOA1-07 | 2.76702681 | 0.50750456 | APOA1 | 30 | hHEP | qRTPCR | |
| | | | | | primary | | |
| APOA1-08 | 2.92047341 | 0.7414812 | APOA1 | 30 | hHEP | qRTPCR | |
| | | | | | primary | | |
| APOA1-09 | 2.58380646 | 0.29575356 | APOA1 | 30 | hHEP | qRTPCR | |
| | | | | | primary | | |
| APOA1-10 | 2.63329611 | 0.39062455 | APOA1 | 30 | hHEP | qRTPCR | |
| | | | | | primary | | |
| APOA1-11 | 3.02299013 | 0.35792068 | APOA1 | 30 | hHEP | qRTPCR | |
| | | | | | primary | | |
| APOA1-12 | 2.45594349 | 0.24444055 | APOA1 | 30 | hHEP | qRTPCR | |
| | | | | | primary | | |
| APOA1-13 | 2.33019523 | 0.05300335 | APOA1 | 30 | hHEP | qRTPCR | |
| | | | | | primary | | |
| APOA1-14 | 2.63746736 | 0.17510821 | APOA1 | 30 | hHEP | qRTPCR | |
| | | | | | primary | | |
| APOA1-15 | 2.60414983 | 0.09554169 | APOA1 | 30 | hHEP | qRTPCR | |
| | | | | | primary | | |
| APOA1-16 | 3.14275776 | 0.03004565 | APOA1 | 30 | hHEP | qRTPCR | |
| | | | | | primary | | |
| APOA1-17 | 2.40257112 | 0.31614309 | APOA1 | 30 | hHEP | qRTPCR | |
| | | | | | primary | | |
| APOA1-18 | 2.5078604 | 0.38248593 | APOA1 | 30 | hHEP | qRTPCR | |
| | | | | | primary | | |
| APOA1-19 | 2.69342601 | 0.29186053 | APOA1 | 30 | hHEP | qRTPCR | |
| | | | | | primary | | |
| APOA1-20 | 2.74946689 | 0.38411325 | APOA1 | 30 | hHEP | qRTPCR | |
| | | | | | primary | | |
| APOA1-21 | 3.12584682 | 0.16723109 | APOA1 | 30 | hHEP | qRTPCR | |
| | | | | | primary | | |
| APOA1-22 | 2.89075721 | 0.82651217 | APOA1 | 30 | hHEP | qRTPCR | |
| | | | | | primary | | |
| APOA1-23 | 2.62409939 | 0.27905348 | APOA1 | 30 | hHEP | qRTPCR | |
| | | | | | primary | | |
| APOA1-24 | 2.52878662 | 0.17190803 | APOA1 | 30 | hHEP | qRTPCR | |
| | | | | | primary | | |
| APOA1-25 | 2.35726538 | 0.00908916 | APOA1 | 30 | hHEP | qRTPCR | |
| | | | | | primary | | |
| APOA1-26 | 2.44870406 | 0.07618463 | APOA1 | 30 | hHEP | qRTPCR | |
| | | | | | primary | | |
| APOA1-27 | 2.142703 | 0.11669677 | APOA1 | 30 | hHEP | qRTPCR | |
| | | | | | primary | | |
| APOA1-28 | 2.42914069 | 0.0552219 | APOA1 | 30 | hHEP | qRTPCR | |
| | | | | | primary | | |
| APOA1-29 | 2.18753629 | 0.10724495 | APOA1 | 30 | hHEP | qRTPCR | |
| | | | | | primary | | |
| APOA1-30 | 2.57935625 | 0.25562987 | APOA1 | 30 | hHEP | qRTPCR | |
| | | | | | primary | | |
| APOA1-31 | 2.44368853 | 0.5093 | APOA1 | 30 | hHEP | qRTPCR | |
| | | | | | primary | | |
| APOA1-32 | 2.52042432 | 0.31704036 | APOA1 | 30 | hHEP | qRTPCR | |
| | | | | | primary | | |
| APOA1-33 | 2.71709733 | 0.10804851 | APOA1 | 30 | hHEP | qRTPCR | |
| | | | | | primary | | |
| APOA1-34 | 2.38912947 | 0.26852646 | APOA1 | 30 | hHEP | qRTPCR | |
| | | | | | primary | | |
| APOA1-35 | 2.30584024 | 0.2728256 | APOA1 | 30 | hHEP | qRTPCR | |
| | | | | | primary | | |
| APOA1-36 | 2.21806753 | 0.35770213 | APOA1 | 30 | hHEP | qRTPCR | |
| | | | | | primary | | |
| APOA1-37 | 2.2676807 | 0.03154035 | APOA1 | 30 | hHEP | qRTPCR | |
| | | | | | primary | | |
| APOA1-38 | 2.36348973 | 0.33205758 | APOA1 | 30 | hHEP | qRTPCR | |
| | | | | | primary | | |
| APOA1-39 | 2.14209344 | 0.04095004 | APOA1 | 30 | hHEP | qRTPCR | |
| | | | | | primary | | |
| APOA1-40 | 2.49645464 | 0.19064923 | APOA1 | 30 | hHEP | qRTPCR | |
| | | | | | primary | | |
| APOA1-41 | 1.97318223 | 0.08183464 | APOA1 | 30 | hHEP | qRTPCR | |
| | | | | | primary | | |
| APOA1-42 | 2.28402767 | 0.19575069 | APOA1 | 30 | hHEP | qRTPCR | |
| | | | | | primary | | |
| APOA1-43 | 2.11567127 | 0.01185387 | APOA1 | 30 | hHEP | qRTPCR | |
| | | | | | primary | | |
| APOA1-44 | 2.45435172 | 0.18655161 | APOA1 | 30 | hHEP | qRTPCR | |
| | | | | | primary | | |
| APOA1-45 | 2.4596595 | 0.17899977 | APOA1 | 30 | hHEP | qRTPCR | |
| | | | | | primary | | |
| APOA1-46 | 2.53777058 | 0.02791179 | APOA1 | 30 | hHEP | qRTPCR | |
| | | | | | primary | | |
| APOA1-47 | 2.28337183 | 0.19008065 | APOA1 | 30 | hHEP | qRTPCR | |
| | | | | | primary | | |
| APOA1-48 | 2.20236802 | 0.13316374 | APOA1 | 30 | hHEP | qRTPCR | |
| | | | | | primary | | |
| APOA1-49 | 1.67934139 | 0.46000468 | APOA1 | 30 | hHEP | qRTPCR | |
| | | | | | primary | | |
| APOA1-50 | 1.58596593 | 0.71583121 | APOA1 | 30 | hHEP | qRTPCR | |
| | | | | | primary | | |
| RNAiMAX | 1 | 0 | APOA1 | 0 | hHEP | qRTPCR | |
| | | | | | primary | | |
| Untreated | 0.95011044 | 0.12569078 | APOA1 | 0 | hHEP | qRTPCR | |
| | | | | | primary | | |
| APOA1-01 | 1.32009381 | 0.38354504 | APOA1 | 30 | hHEP | qRTPCR | |
| | | | | | primary | | |
| APOA1-02 | 2.25037605 | 0.54340273 | APOA1 | 30 | hHEP | qRTPCR | |
| | | | | | primary | | |
| APOA1-03 | 3.39934478 | 0.78662326 | APOA1 | 30 | hHEP | qRTPCR | |
| | | | | | primary | | |
| APOA1-04 | 3.62748969 | 0.95472458 | APOA1 | 30 | hHEP | qRTPCR | |
| | | | | | primary | | |
| APOA1-05 | 2.1724992 | 0.15444594 | APOA1 | 30 | hHEP | qRTPCR | |
| | | | | | primary | | |
| APOA1-06 | 2.53583922 | 0.93191254 | APOA1 | 30 | hHEP | qRTPCR | |
| | | | | | primary | | |
| APOA1-07 | 1.17214844 | 0.15053091 | APOA1 | 30 | hHEP | qRTPCR | |
| | | | | | primary | | |
| APOA1-08 | 1.08019567 | 0.18819106 | APOA1 | 30 | hHEP | qRTPCR | |
| | | | | | primary | | |
| APOA1-09 | 1.16192946 | 0.40624907 | APOA1 | 30 | hHEP | qRTPCR | |
| | | | | | primary | | |
| APOA1-10 | 2.57620777 | 0.04887442 | APOA1 | 30 | hHEP | qRTPCR | |
| | | | | | primary | | |
| APOA1-11 | 0.98228447 | 0.42158841 | APOA1 | 30 | hHEP | qRTPCR | |
| | | | | | primary | | |
| APOA1-12 | 0.43200047 | 0.01451453 | APOA1 | 30 | hHEP | qRTPCR | |
| | | | | | primary | | |
| APOA1-13 | 1.16861619 | 0.07900628 | APOA1 | 30 | hHEP | qRTPCR | |
| | | | | | primary | | |
| APOA1-14 | 2.70713998 | 0 | APOA1 | 30 | hHEP | qRTPCR | |
| | | | | | primary | | |
| APOA1-15 | 2.20661641 | 0.3310359 | APOA1 | 30 | hHEP | qRTPCR | |
| | | | | | primary | | |
| APOA1-16 | 1.86032992 | 0.06809628 | APOA1 | 30 | hHEP | qRTPCR | |
| | | | | | primary | | |
| APOA1-17 | 1.62199017 | 0.16569278 | APOA1 | 30 | hHEP | qRTPCR | |
| | | | | | primary | | |
| APOA1-18 | 1.52707036 | 0.24816296 | APOA1 | 30 | hHEP | qRTPCR | |
| | | | | | primary | | |
| APOA1-19 | 1.54519288 | 0.50481203 | APOA1 | 30 | hHEP | qRTPCR | |
| | | | | | primary | | |
| APOA1-20 | 1.16494654 | 0.04848346 | APOA1 | 30 | hHEP | qRTPCR | |
| | | | | | primary | | |
| APOA1-21 | 1.34354967 | 0.40059626 | APOA1 | 30 | hHEP | qRTPCR | |
| | | | | | primary | | |
| APOA1-22 | 1.48819118 | 0.57268075 | APOA1 | 30 | hHEP | qRTPCR | |
| | | | | | primary | | |
| APOA1-23 | 1.17727428 | 0.45488447 | APOA1 | 30 | hHEP | qRTPCR | |
| | | | | | primary | | |
| APOA1-24 | 0.62736747 | 0.14589916 | APOA1 | 30 | hHEP | qRTPCR | |
| | | | | | primary | | |
| APOA1-25 | 0.83327169 | 0.15432419 | APOA1 | 30 | hHEP | qRTPCR | |
| | | | | | primary | | |
| APOA1-26 | 1.63793583 | 0.33477148 | APOA1 | 30 | hHEP | qRTPCR | |
| | | | | | primary | | |
| APOA1-27 | 1.02743913 | 0.03348776 | APOA1 | 30 | hHEP | qRTPCR | |
| | | | | | primary | | |
| APOA1-28 | 2.45089415 | 0.12051014 | APOA1 | 30 | hHEP | qRTPCR | |
| | | | | | primary | | |
| APOA1-29 | 1.27616578 | 0.08079063 | APOA1 | 30 | hHEP | qRTPCR | |
| | | | | | primary | | |
| APOA1-30 | 1.80673776 | 0.27965441 | APOA1 | 30 | hHEP | qRTPCR | |
| | | | | | primary | | |
| APOA1-31 | 1.61304315 | 0.46990116 | APOA1 | 30 | hHEP | qRTPCR | |
| | | | | | primary | | |
| APOA1-32 | 1.34512926 | 0.1592741 | APOA1 | 30 | hHEP | qRTPCR | |
| | | | | | primary | | |
| APOA1-33 | 0.91122355 | 0.07179223 | APOA1 | 30 | hHEP | qRTPCR | |
| | | | | | primary | | |
| APOA1-34 | 0.60325839 | 0.19685483 | APOA1 | 30 | hHEP | qRTPCR | |
| | | | | | primary | | |
| APOA1-35 | 0.8561943 | 0.16877563 | APOA1 | 30 | hHEP | qRTPCR | |
| | | | | | primary | | |
| APOA1-36 | 1.04658238 | 0.24588398 | APOA1 | 30 | hHEP | qRTPCR | |
| | | | | | primary | | |
| APOA1-37 | 1.47883856 | 0.63951155 | APOA1 | 30 | hHEP | qRTPCR | |
| | | | | | primary | | |
| APOA1-38 | 2.33897913 | 0.87539932 | APOA1 | 30 | hHEP | qRTPCR | |
| | | | | | primary | | |
| APOA1-39 | 1.81201696 | 0.0349262 | APOA1 | 30 | hHEP | qRTPCR | |
| | | | | | primary | | |
| APOA1-40 | 2.03481861 | 0.36005052 | APOA1 | 30 | hHEP | qRTPCR | |
| | | | | | primary | | |
| APOA1-41 | 1.63450747 | 0.00660703 | APOA1 | 30 | hHEP | qRTPCR | |
| | | | | | primary | | |
| APOA1-42 | 1.25005328 | 0.10406799 | APOA1 | 30 | hHEP | qRTPCR | |
| | | | | | primary | | |
| APOA1-43 | 0.85533162 | 0.23242445 | APOA1 | 30 | hHEP | qRTPCR | |
| | | | | | primary | | |
| APOA1-44 | 1.02476895 | 0.47160076 | APOA1 | 30 | hHEP | qRTPCR | |
| | | | | | primary | | |
| APOA1-45 | 1.23408832 | 0.32581499 | APOA1 | 30 | hHEP | qRTPCR | |
| | | | | | primary | | |
| APOA1-46 | 0.87817882 | 0.37249556 | APOA1 | 30 | hHEP | qRTPCR | |
| | | | | | primary | | |
| APOA1-47 | 0.32501979 | 0.08790894 | APOA1 | 30 | hHEP | qRTPCR | |
| | | | | | primary | | |
| APOA1-48 | 0.70597756 | 0.25663068 | APOA1 | 30 | hHEP | qRTPCR | |
| | | | | | primary | | |
| APOA1-49 | 1.51915549 | 0.61339915 | APOA1 | 30 | hHEP | qRTPCR | |
| | | | | | primary | | |
| APOA1-50 | 1.53949535 | 0.33628602 | APOA1 | 30 | hHEP | qRTPCR | |
| | | | | | primary | | |
| RNAiMAX | 1 | 0 | APOA1 | 0 | hHEP | qRTPCR | |
| | | | | | primary | | |
| Untreated | 1.33575817 | 0.29931193 | APOA1 | 0 | hHEP | qRTPCR | |
| | | | | | primary | | |
| APOA1-01 | 1.68587911 | 0.0162356 | APOA1 | 30 | hHEP | qRTPCR | |
| | | | | | primary | | |
| APOA1-02 | 0.43827897 | 0.02769865 | APOA1 | 30 | hHEP | qRTPCR | |
| | | | | | primary | | |
| APOA1-03 | 1.49739324 | 0.18754426 | APOA1 | 30 | hHEP | qRTPCR | |
| | | | | | primary | | |
| APOA1-04 | 0.25773075 | 0.00376984 | APOA1 | 30 | hHEP | qRTPCR | |
| | | | | | primary | | |
| APOA1-05 | 1.60136848 | 0.11721219 | APOA1 | 30 | hHEP | qRTPCR | |
| | | | | | primary | | |
| APOA1-06 | 1.83378456 | 0.12750393 | APOA1 | 30 | hHEP | qRTPCR | |
| | | | | | primary | | |
| APOA1-07 | 1.86028683 | 0.77173521 | APOA1 | 30 | hHEP | qRTPCR | |
| | | | | | primary | | |
| APOA1-08 | 0.10222146 | 0.00357709 | APOA1 | 30 | hHEP | qRTPCR | |
| | | | | | primary | | |
| APOA1-09 | 1.0334552 | 0.12820525 | APOA1 | 30 | hHEP | qRTPCR | |
| | | | | | primary | | |
| APOA1-10 | 1.66757857 | 0.13398654 | APOA1 | 30 | hHEP | qRTPCR | |
| | | | | | primary | | |
| APOA1-11 | 1.41965478 | 0.00083991 | APOA1 | 30 | hHEP | qRTPCR | |
| | | | | | primary | | |
| APOA1-12 | 1.02497094 | 0.05691061 | APOA1 | 30 | hHEP | qRTPCR | |
| | | | | | primary | | |
| APOA1-13 | 1.97803809 | 0.12451971 | APOA1 | 30 | hHEP | qRTPCR | |
| | | | | | primary | | |
| APOA1-14 | 3.14793112 | 0.39142821 | APOA1 | 30 | hHEP | qRTPCR | |
| | | | | | primary | | |
| APOA1-15 | 0.36604515 | 0.05762825 | APOA1 | 30 | hHEP | qRTPCR | |
| | | | | | primary | | |
| APOA1-16 | 0.71630357 | 0.01972257 | APOA1 | 30 | hHEP | qRTPCR | |
| | | | | | primary | | |
| APOA1-17 | 1.08355437 | 0.46768049 | APOA1 | 30 | hHEP | qRTPCR | |
| | | | | | primary | | |
| APOA1-18 | 0.11935219 | 0.01268216 | APOA1 | 30 | hHEP | qRTPCR | |
| | | | | | primary | | |
| APOA1-19 | 2.97143948 | 0.88668789 | APOA1 | 30 | hHEP | qRTPCR | |
| | | | | | primary | | |
| APOA1-20 | 2.59074612 | 0.99251769 | APOA1 | 30 | hHEP | qRTPCR | |
| | | | | | primary | | |
| APOA1-21 | 3.28621376 | 0.25305198 | APOA1 | 30 | hHEP | qRTPCR | |
| | | | | | primary | | |
| APOA1-22 | 2.16273456 | 0.42130976 | APOA1 | 30 | hHEP | qRTPCR | |
| | | | | | primary | | |
| APOA1-23 | 1.1882136 | 0.14110988 | APOA1 | 30 | hHEP | qRTPCR | |
| | | | | | primary | | |
| APOA1-24 | 1.84047301 | 0.74183983 | APOA1 | 30 | hHEP | qRTPCR | |
| | | | | | primary | | |
| APOA1-25 | 3.98826067 | 2.3920974 | APOA1 | 30 | hHEP | qRTPCR | |
| | | | | | primary | | |
| APOA1-26 | 1.79088474 | 0.11769682 | APOA1 | 30 | hHEP | qRTPCR | |
| | | | | | primary | | |
| APOA1-27 | 3.9325658 | 0.39378198 | APOA1 | 30 | hHEP | qRTPCR | |
| | | | | | primary | | |
| APOA1-28 | 3.99859626 | 2.0037457 | APOA1 | 30 | hHEP | qRTPCR | |
| | | | | | primary | | |
| APOA1-29 | 3.56306045 | 2.28083477 | APOA1 | 30 | hHEP | qRTPCR | |
| | | | | | primary | | |
| APOA1-30 | 3.51956175 | 2.13807035 | APOA1 | 30 | hHEP | qRTPCR | |
| | | | | | primary | | |
| APOA1-31 | 3.04527758 | 0.92972903 | APOA1 | 30 | hHEP | qRTPCR | |
| | | | | | primary | | |
| APOA1-32 | 1.79384301 | 0.55000028 | APOA1 | 30 | hHEP | qRTPCR | |
| | | | | | primary | | |
| APOA1-33 | 1.67003563 | 0.18466426 | APOA1 | 30 | hHEP | qRTPCR | |
| | | | | | primary | | |
| APOA1-34 | 1.41786641 | 0.26654324 | APOA1 | 30 | hHEP | qRTPCR | |
| | | | | | primary | | |
| APOA1-35 | 1.25025304 | 0.04899078 | APOA1 | 30 | hHEP | qRTPCR | |
| | | | | | primary | | |
| APOA1-36 | 2.67168189 | 0.99552937 | APOA1 | 30 | hHEP | qRTPCR | |
| | | | | | primary | | |
| APOA1-37 | 1.23042435 | 0.20690604 | APOA1 | 30 | hHEP | qRTPCR | |
| | | | | | primary | | |
| APOA1-38 | 2.44673273 | 0.10567045 | APOA1 | 30 | hHEP | qRTPCR | |
| | | | | | primary | | |
| APOA1-39 | 2.1161272 | 0.70735331 | APOA1 | 30 | hHEP | qRTPCR | |
| | | | | | primary | | |
| APOA1-40 | 1.66034823 | 0.45438378 | APOA1 | 30 | hHEP | qRTPCR | |
| | | | | | primary | | |
| APOA1-41 | 1.80174664 | 0.34233653 | APOA1 | 30 | hHEP | qRTPCR | |
| | | | | | primary | | |
| APOA1-42 | 1.51766756 | 0.01923899 | APOA1 | 30 | hHEP | qRTPCR | |
| | | | | | primary | | |
| APOA1-43 | 0.66436901 | 0.05026191 | APOA1 | 30 | hHEP | qRTPCR | |
| | | | | | primary | | |
| APOA1-44 | 1.44569277 | 0.20449644 | APOA1 | 30 | hHEP | qRTPCR | |
| | | | | | primary | | |
| APOA1-45 | 0.78009657 | 0.17750165 | APOA1 | 30 | hHEP | qRTPCR | |
| | | | | | primary | | |
| APOA1-46 | 1.41394441 | 0.04735972 | APOA1 | 30 | hHEP | qRTPCR | |
| | | | | | primary | | |
| APOA1-47 | 3.72598276 | 0.76672547 | APOA1 | 30 | hHEP | qRTPCR | |
| | | | | | primary | | |
| APOA1-48 | 1.73746444 | 0.43254675 | APOA1 | 30 | hHEP | qRTPCR | |
| | | | | | primary | | |
| APOA1-49 | 1.75356323 | 0.33192439 | APOA1 | 30 | hHEP | qRTPCR | |
| | | | | | primary | | |
| APOA1-50 | 0.24216743 | 0 | APOA1 | 30 | hHEP | qRTPCR | |
| | | | | | primary | | |
| Untreated | 1 | 0 | APOA1 | 0 | hHEP | qRTPCR | |
| | | | | | primary | | |
| Water | 1.01537814 | 0.10896869 | APOA1 | 0 | hHEP | qRTPCR | |
| | | | | | primary | | |
| APOA1-01 | 1.02026099 | 0.23770184 | APOA1 | 30 | hHEP | qRTPCR | |
| | | | | | primary | | |
| APOA1-02 | 1.23479224 | 0.27193123 | APOA1 | 30 | hHEP | qRTPCR | |
| | | | | | primary | | |
| APOA1-03 | 1.31786233 | 0.32700841 | APOA1 | 30 | hHEP | qRTPCR | |
| | | | | | primary | | |
| APOA1-04 | 1.46771507 | 0.36638066 | APOA1 | 30 | hHEP | qRTPCR | |
| | | | | | primary | | |
| APOA1-05 | 0.85500459 | 0.22458949 | APOA1 | 30 | hHEP | qRTPCR | |
| | | | | | primary | | |
| APOA1-06 | 1.14333129 | 0.27527342 | APOA1 | 30 | hHEP | qRTPCR | |
| | | | | | primary | | |
| APOA1-07 | 0.87181049 | 0.19548773 | APOA1 | 30 | hHEP | qRTPCR | |
| | | | | | primary | | |
| APOA1-08 | 1.11457956 | 0.33005572 | APOA1 | 30 | hHEP | qRTPCR | |
| | | | | | primary | | |
| APOA1-09 | 0.98453165 | 0.27444462 | APOA1 | 30 | hHEP | qRTPCR | |
| | | | | | primary | | |
| APOA1-10 | 1.54890506 | 0.41959256 | APOA1 | 30 | hHEP | qRTPCR | |
| | | | | | primary | | |
| APOA1-11 | 1.09366409 | 0.29936315 | APOA1 | 30 | hHEP | qRTPCR | |
| | | | | | primary | | |
| APOA1-12 | 0.84812918 | 0.26568593 | APOA1 | 30 | hHEP | qRTPCR | |
| | | | | | primary | | |
| APOA1-13 | 0.96763485 | 0.09196502 | APOA1 | 30 | hHEP | qRTPCR | |
| | | | | | primary | | |
| APOA1-14 | 0.91534813 | 0.14234054 | APOA1 | 30 | hHEP | qRTPCR | |
| | | | | | primary | | |
| APOA1-15 | 0.98981044 | 0.14781698 | APOA1 | 30 | hHEP | qRTPCR | |
| | | | | | primary | | |
| APOA1-16 | 1.18031224 | 0.19166608 | APOA1 | 30 | hHEP | qRTPCR | |
| | | | | | primary | | |
| APOA1-17 | 1.2011975 | 0.23687242 | APOA1 | 30 | hHEP | qRTPCR | |
| | | | | | primary | | |
| APOA1-18 | 0.95763778 | 0.17954214 | APOA1 | 30 | hHEP | qRTPCR | |
| | | | | | primary | | |
| APOA1-19 | 1.15415372 | 0.13108297 | APOA1 | 30 | hHEP | qRTPCR | |
| | | | | | primary | | |
| APOA1-20 | 1.19128334 | 0.16094358 | APOA1 | 30 | hHEP | qRTPCR | |
| | | | | | primary | | |
| APOA1-21 | 1.2112898 | 0.17657456 | APOA1 | 30 | hHEP | qRTPCR | |
| | | | | | primary | | |
| APOA1-22 | 1.22266851 | 0.28065423 | APOA1 | 30 | hHEP | qRTPCR | |
| | | | | | primary | | |
| APOA1-23 | 0.98012118 | 0.23036807 | APOA1 | 30 | hHEP | qRTPCR | |
| | | | | | primary | | |
| APOA1-24 | 0.83736437 | 0.20521604 | APOA1 | 30 | hHEP | qRTPCR | |
| | | | | | primary | | |
| APOA1-25 | 0.95809816 | 0.10584968 | APOA1 | 30 | hHEP | qRTPCR | |
| | | | | | primary | | |
| APOA1-26 | 1.18941969 | 0.20322595 | APOA1 | 30 | hHEP | qRTPCR | |
| | | | | | primary | | |
| APOA1-27 | 1.10072235 | 0.16197046 | APOA1 | 30 | hHEP | qRTPCR | |
| | | | | | primary | | |
| APOA1-28 | 1.3894071 | 0.19951892 | APOA1 | 30 | hHEP | qRTPCR | |
| | | | | | primary | | |
| APOA1-29 | 1.0868702 | 0.22594987 | APOA1 | 30 | hHEP | qRTPCR | |
| | | | | | primary | | |
| APOA1-30 | 1.11534776 | 0.07815254 | APOA1 | 30 | hHEP | qRTPCR | |
| | | | | | primary | | |
| APOA1-31 | 1.16043705 | 0.13909264 | APOA1 | 30 | hHEP | qRTPCR | |
| | | | | | primary | | |
| APOA1-32 | 1.01065182 | 0.1572921 | APOA1 | 30 | hHEP | qRTPCR | |
| | | | | | primary | | |
| APOA1-33 | 0.97380861 | 0.17378755 | APOA1 | 30 | hHEP | qRTPCR | |
| | | | | | primary | | |
| APOA1-34 | 1.04250323 | 0.22699154 | APOA1 | 30 | hHEP | qRTPCR | |
| | | | | | primary | | |
| APOA1-35 | 0.84653635 | 0.19125732 | APOA1 | 30 | hHEP | qRTPCR | |
| | | | | | primary | | |
| APOA1-36 | 0.63308695 | 0.18390914 | APOA1 | 30 | hHEP | qRTPCR | |
| | | | | | primary | | |
| APOA1-37 | 0.92051978 | 0.10891757 | APOA1 | 30 | hHEP | qRTPCR | |
| | | | | | primary | | |
| APOA1-38 | 1.50689993 | 0.08644879 | APOA1 | 30 | hHEP | qRTPCR | |
| | | | | | primary | | |
| APOA1-39 | 1.11546265 | 0.07173467 | APOA1 | 30 | hHEP | qRTPCR | |
| | | | | | primary | | |
| APOA1-40 | 1.4013078 | 0.14015501 | APOA1 | 30 | hHEP | qRTPCR | |
| | | | | | primary | | |
| APOA1-41 | 0.95779085 | 0.14727817 | APOA1 | 30 | hHEP | qRTPCR | |
| | | | | | primary | | |
| APOA1-42 | 0.75605983 | 0.1397345 | APOA1 | 30 | hHEP | qRTPCR | |
| | | | | | primary | | |
| APOA1-43 | 0.88158439 | 0.16552727 | APOA1 | 30 | hHEP | qRTPCR | |
| | | | | | primary | | |
| APOA1-44 | 1.0500748 | 0.16534592 | APOA1 | 30 | hHEP | qRTPCR | |
| | | | | | primary | | |
| APOA1-45 | 0.92568934 | 0.15286822 | APOA1 | 30 | hHEP | qRTPCR | |
| | | | | | primary | | |
| APOA1-46 | 0.95304119 | 0.18905573 | APOA1 | 30 | hHEP | qRTPCR | |
| | | | | | primary | | |
| APOA1-47 | 0.72388363 | 0.20625725 | APOA1 | 30 | hHEP | qRTPCR | |
| | | | | | primary | | |
| APOA1-48 | 0.63452037 | 0.15982252 | APOA1 | 30 | hHEP | qRTPCR | |
| | | | | | primary | | |
| APOA1-49 | 0.78381416 | 0.06757521 | APOA1 | 30 | hHEP | qRTPCR | |
| | | | | | primary | | |
| APOA1-50 | 0.71597656 | 0.01591082 | APOA1 | 30 | hHEP | qRTPCR | |
| | | | | | primary | | |
| Untreated | 1 | 0 | APOA1 | 0 | hHEP | qRTPCR | |
| | | | | | primary | | |
| Water | 0.93924665 | 0.02969757 | APOA1 | 0 | hHEP | qRTPCR | |
| | | | | | primary | | |
| APOA1-01 | 0.83095626 | 0.21631389 | APOA1 | 5000 | hHEP | qRTPCR | 7 day |
| | | | | | primary | | gymnotic |
| | | | | | | | delivery |
| APOA1-02 | 0.8876824 | 0.19200961 | APOA1 | 5000 | hHEP | qRTPCR | 7 day |
| | | | | | primary | | gymnotic |
| | | | | | | | delivery |
| APOA1-03 | 0.91613228 | 0.11709133 | APOA1 | 5000 | hHEP | qRTPCR | 7 day |
| | | | | | primary | | gymnotic |
| | | | | | | | delivery |
| APOA1-04 | 0.92907695 | 0.02626855 | APOA1 | 5000 | hHEP | qRTPCR | 7 day |
| | | | | | primary | | gymnotic |
| | | | | | | | delivery |
| APOA1-05 | 0.80985489 | 0.05353296 | APOA1 | 5000 | hHEP | qRTPCR | 7 day |
| | | | | | primary | | gymnotic |
| | | | | | | | delivery |
| APOA1-06 | 0.95266787 | 0.08972678 | APOA1 | 5000 | hHEP | qRTPCR | 7 day |
| | | | | | primary | | gymnotic |
| | | | | | | | delivery |
| APOA1-07 | 1.08043172 | 0.12871318 | APOA1 | 5000 | hHEP | qRTPCR | 7 day |
| | | | | | primary | | gymnotic |
| | | | | | | | delivery |
| APOA1-08 | 0.78747003 | 0.0458151 | APOA1 | 5000 | hHEP | qRTPCR | 7 day |
| | | | | | primary | | gymnotic |
| | | | | | | | delivery |
| APOA1-09 | 0.85571323 | 0.07321611 | APOA1 | 5000 | hHEP | qRTPCR | 7 day |
| | | | | | primary | | gymnotic |
| | | | | | | | delivery |
| APOA1-10 | 1.60088464 | 0.09043729 | APOA1 | 5000 | hHEP | qRTPCR | 7 day |
| | | | | | primary | | gymnotic |
| | | | | | | | delivery |
| APOA1-11 | 1.00761106 | 0.09039756 | APOA1 | 5000 | hHEP | qRTPCR | 7 day |
| | | | | | primary | | gymnotic |
| | | | | | | | delivery |
| APOA1-12 | 0.83920121 | 0.08573001 | APOA1 | 5000 | hHEP | qRTPCR | 7 day |
| | | | | | primary | | gymnotic |
| | | | | | | | delivery |
| APOA1-13 | 0.91072071 | 0.0871394 | APOA1 | 5000 | hHEP | qRTPCR | 7 day |
| | | | | | primary | | gymnotic |
| | | | | | | | delivery |
| APOA1-14 | 0.70265895 | 0.07333552 | APOA1 | 5000 | hHEP | qRTPCR | 7 day |
| | | | | | primary | | gymnotic |
| | | | | | | | delivery |
| APOA1-15 | 0.71547311 | 0.03462638 | APOA1 | 5000 | hHEP | qRTPCR | 7 day |
| | | | | | primary | | gymnotic |
| | | | | | | | delivery |
| APOA1-16 | 0.70817229 | 0.03289699 | APOA1 | 5000 | hHEP | qRTPCR | 7 day |
| | | | | | primary | | gymnotic |
| | | | | | | | delivery |
| APOA1-17 | 0.78238905 | 0.06940852 | APOA1 | 5000 | hHEP | qRTPCR | 7 day |
| | | | | | primary | | gymnotic |
| | | | | | | | delivery |
| APOA1-18 | 0.79371617 | 0.08022504 | APOA1 | 5000 | hHEP | qRTPCR | 7 day |
| | | | | | primary | | gymnotic |
| | | | | | | | delivery |
| APOA1-19 | 0.79141392 | 0.04477798 | APOA1 | 5000 | hHEP | qRTPCR | 7 day |
| | | | | | primary | | gymnotic |
| | | | | | | | delivery |
| APOA1-20 | 0.85801084 | 0.05366667 | APOA1 | 5000 | hHEP | qRTPCR | 7 day |
| | | | | | primary | | gymnotic |
| | | | | | | | delivery |
| APOA1-21 | 0.80035091 | 0.06097814 | APOA1 | 5000 | hHEP | qRTPCR | 7 day |
| | | | | | primary | | gymnotic |
| | | | | | | | delivery |
| APOA1-22 | 0.82658823 | 0.0497681 | APOA1 | 5000 | hHEP | qRTPCR | 7 day |
| | | | | | primary | | gymnotic |
| | | | | | | | delivery |
| APOA1-23 | 0.77149221 | 0.01602221 | APOA1 | 5000 | hHEP | qRTPCR | 7 day |
| | | | | | primary | | gymnotic |
| | | | | | | | delivery |
| APOA1-24 | 0.98566569 | 0.00632856 | APOA1 | 5000 | hHEP | qRTPCR | 7 day |
| | | | | | primary | | gymnotic |
| | | | | | | | delivery |
| APOA1-25 | 1.13280614 | 0.08705471 | APOA1 | 5000 | hHEP | qRTPCR | 7 day |
| | | | | | primary | | gymnotic |
| | | | | | | | delivery |
| APOA1-26 | 0.84009533 | 0.01101489 | APOA1 | 5000 | hHEP | qRTPCR | 7 day |
| | | | | | primary | | gymnotic |
| | | | | | | | delivery |
| APOA1-27 | 0.79598115 | 0.04425806 | APOA1 | 5000 | hHEP | qRTPCR | 7 day |
| | | | | | primary | | gymnotic |
| | | | | | | | delivery |
| APOA1-28 | 0.85431105 | 0.07635182 | APOA1 | 5000 | hHEP | qRTPCR | 7 day |
| | | | | | primary | | gymnotic |
| | | | | | | | delivery |
| APOA1-29 | 0.700423 | 0.05309015 | APOA1 | 5000 | hHEP | qRTPCR | 7 day |
| | | | | | primary | | gymnotic |
| | | | | | | | delivery |
| APOA1-30 | 0.77954825 | 0.08851127 | APOA1 | 5000 | hHEP | qRTPCR | 7 day |
| | | | | | primary | | gymnotic |
| | | | | | | | delivery |
| APOA1-31 | 0.68788289 | 0.04658558 | APOA1 | 5000 | hHEP | qRTPCR | 7 day |
| | | | | | primary | | gymnotic |
| | | | | | | | delivery |
| APOA1-32 | 0.74574816 | 0.06803198 | APOA1 | 5000 | hHEP | qRTPCR | 7 day |
| | | | | | primary | | gymnotic |
| | | | | | | | delivery |
| APOA1-33 | 0.77162977 | 0.05999265 | APOA1 | 5000 | hHEP | qRTPCR | 7 day |
| | | | | | primary | | gymnotic |
| | | | | | | | delivery |
| APOA1-34 | 0.78443584 | 0.05205294 | APOA1 | 5000 | hHEP | qRTPCR | 7 day |
| | | | | | primary | | gymnotic |
| | | | | | | | delivery |
| APOA1-35 | 0.73862198 | 0.02006332 | APOA1 | 5000 | hHEP | qRTPCR | 7 day |
| | | | | | primary | | gymnotic |
| | | | | | | | delivery |
| APOA1-36 | 1.00634215 | 0.06979684 | APOA1 | 5000 | hHEP | qRTPCR | 7 day |
| | | | | | primary | | gymnotic |
| | | | | | | | delivery |
| APOA1-37 | 0.96135879 | 0.07009048 | APOA1 | 5000 | hHEP | qRTPCR | 7 day |
| | | | | | primary | | gymnotic |
| | | | | | | | delivery |
| APOA1-38 | 1.22422459 | 0.04612546 | APOA1 | 5000 | hHEP | qRTPCR | 7 day |
| | | | | | primary | | gymnotic |
| | | | | | | | delivery |
| APOA1-39 | 0.81062907 | 0.02064826 | APOA1 | 5000 | hHEP | qRTPCR | 7 day |
| | | | | | primary | | gymnotic |
| | | | | | | | delivery |
| APOA1-40 | 0.85154085 | 0.04822399 | APOA1 | 5000 | hHEP | qRTPCR | 7 day |
| | | | | | primary | | gymnotic |
| | | | | | | | delivery |
| APOA1-41 | 0.72197439 | 0.0022181 | APOA1 | 5000 | hHEP | qRTPCR | 7 day |
| | | | | | primary | | gymnotic |
| | | | | | | | delivery |
| APOA1-42 | 0.77123213 | 0.00817725 | APOA1 | 5000 | hHEP | qRTPCR | 7 day |
| | | | | | primary | | gymnotic |
| | | | | | | | delivery |
| APOA1-43 | 0.79344641 | 0.02951852 | APOA1 | 5000 | hHEP | qRTPCR | 7 day |
| | | | | | primary | | gymnotic |
| | | | | | | | delivery |
| APOA1-44 | 0.8838882 | 0.07558371 | APOA1 | 5000 | hHEP | qRTPCR | 7 day |
| | | | | | primary | | gymnotic |
| | | | | | | | delivery |
| APOA1-45 | 0.81294197 | 0.05062538 | APOA1 | 5000 | hHEP | qRTPCR | 7 day |
| | | | | | primary | | gymnotic |
| | | | | | | | delivery |
| APOA1-46 | 1.00219897 | 0.0824217 | APOA1 | 5000 | hHEP | qRTPCR | 7 day |
| | | | | | primary | | gymnotic |
| | | | | | | | delivery |
| APOA1-47 | 0.9232121 | 0.05757279 | APOA1 | 5000 | hHEP | qRTPCR | 7 day |
| | | | | | primary | | gymnotic |
| | | | | | | | delivery |
| APOA1-48 | 1.08114015 | 0.10432756 | APOA1 | 5000 | hHEP | qRTPCR | 7 day |
| | | | | | primary | | gymnotic |
| | | | | | | | delivery |
| APOA1-49 | 0.64402362 | 0.07770435 | APOA1 | 5000 | hHEP | qRTPCR | 7 day |
| | | | | | primary | | gymnotic |
| | | | | | | | delivery |
| APOA1-50 | 0.95078973 | 0.06535035 | APOA1 | 5000 | hHEP | qRTPCR | 7 day |
| | | | | | primary | | gymnotic |
| | | | | | | | delivery |
| Untreated | 1 | 0 | APOA1 | 0 | Rhesus | qRTPCR | |
| | | | | | HEP | | |
| | | | | | primary | | |
| RNAiMAx | 0.99884413 | 0.04600691 | APOA1 | 0 | Rhesus | qRTPCR | |
| | | | | | HEP | | |
| | | | | | primary | | |
| APOA1-01 | 1.35610346 | 0.07501137 | APOA1 | 20000 | Rhesus | qRTPCR | 2 day |
| | | | | | HEP | | gymnotic |
| | | | | | primary | | delivery |
| APOA1-02 | 1.29448143 | 0.02309117 | APOA1 | 20000 | Rhesus | qRTPCR | 2 day |
| | | | | | HEP | | gymnotic |
| | | | | | primary | | delivery |
| APOA1-03 | 1.18558583 | 0.00763564 | APOA1 | 20000 | Rhesus | qRTPCR | 2 day |
| | | | | | HEP | | gymnotic |
| | | | | | primary | | delivery |
| APOA1-04 | 1.06642893 | 0.04670327 | APOA1 | 20000 | Rhesus | qRTPCR | 2 day |
| | | | | | HEP | | gymnotic |
| | | | | | primary | | delivery |
| APOA1-05 | 1.64350984 | 0.08563658 | APOA1 | 20000 | Rhesus | qRTPCR | 2 day |
| | | | | | HEP | | gymnotic |
| | | | | | primary | | delivery |
| APOA1-06 | 1.46357903 | 0.04770982 | APOA1 | 20000 | Rhesus | qRTPCR | 2 day |
| | | | | | HEP | | gymnotic |
| | | | | | primary | | delivery |
| APOA1-07 | 1.66732753 | 0.12044051 | APOA1 | 20000 | Rhesus | qRTPCR | 2 day |
| | | | | | HEP | | gymnotic |
| | | | | | primary | | delivery |
| APOA1-08 | 1.42957342 | 0.01249259 | APOA1 | 20000 | Rhesus | qRTPCR | 2 day |
| | | | | | HEP | | gymnotic |
| | | | | | primary | | delivery |
| APOA1-09 | 1.2998451 | 0.08328923 | APOA1 | 20000 | Rhesus | qRTPCR | 2 day |
| | | | | | HEP | | gymnotic |
| | | | | | primary | | delivery |
| APOA1-10 | 1.52501725 | 0.00838624 | APOA1 | 20000 | Rhesus | qRTPCR | 2 day |
| | | | | | HEP | | gymnotic |
| | | | | | primary | | delivery |
| APOA1-11 | 1.20742902 | 0.06257191 | APOA1 | 20000 | Rhesus | qRTPCR | 2 day |
| | | | | | HEP | | gymnotic |
| | | | | | primary | | delivery |
| APOA1-12 | 0.98351911 | 0.05570561 | APOA1 | 20000 | Rhesus | qRTPCR | 2 day |
| | | | | | HEP | | gymnotic |
| | | | | | primary | | delivery |
| APOA1-13 | 1.06420926 | 0.01352089 | APOA1 | 20000 | Rhesus | qRTPCR | 2 day |
| | | | | | HEP | | gymnotic |
| | | | | | primary | | delivery |
| APOA1-14 | 1.47269591 | 0.04762093 | APOA1 | 20000 | Rhesus | qRTPCR | 2 day |
| | | | | | HEP | | gymnotic |
| | | | | | primary | | delivery |
| APOA1-15 | 1.01593181 | 0.0466318 | APOA1 | 20000 | Rhesus | qRTPCR | 2 day |
| | | | | | HEP | | gymnotic |
| | | | | | primary | | delivery |
| APOA1-16 | 1.19895758 | 0.02763229 | APOA1 | 20000 | Rhesus | qRTPCR | 2 day |
| | | | | | HEP | | gymnotic |
| | | | | | primary | | delivery |
| APOA1-17 | 0.88105172 | 0.00782852 | APOA1 | 20000 | Rhesus | qRTPCR | 2 day |
| | | | | | HEP | | gymnotic |
| | | | | | primary | | delivery |
| APOA1-18 | 1.31136627 | 0.0064572 | APOA1 | 20000 | Rhesus | qRTPCR | 2 day |
| | | | | | HEP | | gymnotic |
| | | | | | primary | | delivery |
| APOA1-19 | 1.2056567 | 0.04737777 | APOA1 | 20000 | Rhesus | qRTPCR | 2 day |
| | | | | | HEP | | gymnotic |
| | | | | | primary | | delivery |
| APOA1-20 | 1.26930682 | 0.02753274 | APOA1 | 20000 | Rhesus | qRTPCR | 2 day |
| | | | | | HEP | | gymnotic |
| | | | | | primary | | delivery |
| APOA1-21 | 1.11367534 | 0.03503577 | APOA1 | 20000 | Rhesus | qRTPCR | 2 day |
| | | | | | HEP | | gymnotic |
| | | | | | primary | | delivery |
| APOA1-22 | 1.27338661 | 0.02154267 | APOA1 | 20000 | Rhesus | qRTPCR | 2 day |
| | | | | | HEP | | gymnotic |
| | | | | | primary | | delivery |
| APOA1-23 | 1.19049743 | 0.02027885 | APOA1 | 20000 | Rhesus | qRTPCR | 2 day |
| | | | | | HEP | | gymnotic |
| | | | | | primary | | delivery |
| APOA1-24 | 1.04698621 | 0.03232239 | APOA1 | 20000 | Rhesus | qRTPCR | 2 day |
| | | | | | HEP | | gymnotic |
| | | | | | primary | | delivery |
| APOA1-25 | 1.58660914 | 0.14080533 | APOA1 | 20000 | Rhesus | qRTPCR | 2 day |
| | | | | | HEP | | gymnotic |
| | | | | | primary | | delivery |
| APOA1-26 | 1.86213835 | 0.00018833 | APOA1 | 20000 | Rhesus | qRTPCR | 2 day |
| | | | | | HEP | | gymnotic |
| | | | | | primary | | delivery |
| APOA1-27 | 2.10581693 | 0.15111387 | APOA1 | 20000 | Rhesus | qRTPCR | 2 day |
| | | | | | HEP | | gymnotic |
| | | | | | primary | | delivery |
| APOA1-28 | 1.98055399 | 0.10307062 | APOA1 | 20000 | Rhesus | qRTPCR | 2 day |
| | | | | | HEP | | gymnotic |
| | | | | | primary | | delivery |
| APOA1-29 | 1.40437381 | 0.01257963 | APOA1 | 20000 | Rhesus | qRTPCR | 2 day |
| | | | | | HEP | | gymnotic |
| | | | | | primary | | delivery |
| APOA1-30 | 1.27168734 | 0.02961935 | APOA1 | 20000 | Rhesus | qRTPCR | 2 day |
| | | | | | HEP | | gymnotic |
| | | | | | primary | | delivery |
| APOA1-31 | 1.15992463 | 0.01936407 | APOA1 | 20000 | Rhesus | qRTPCR | 2 day |
| | | | | | HEP | | gymnotic |
| | | | | | primary | | delivery |
| APOA1-32 | 1.16456331 | 0.0570679 | APOA1 | 20000 | Rhesus | qRTPCR | 2 day |
| | | | | | HEP | | gymnotic |
| | | | | | primary | | delivery |
| APOA1-33 | 1.29820188 | 0.04361753 | APOA1 | 20000 | Rhesus | qRTPCR | 2 day |
| | | | | | HEP | | gymnotic |
| | | | | | primary | | delivery |
| APOA1-34 | 1.17343818 | 0.04474002 | APOA1 | 20000 | Rhesus | qRTPCR | 2 day |
| | | | | | HEP | | gymnotic |
| | | | | | primary | | delivery |
| APOA1-35 | 1.68720878 | 0.02672721 | APOA1 | 20000 | Rhesus | qRTPCR | 2 day |
| | | | | | HEP | | gymnotic |
| | | | | | primary | | delivery |
| APOA1-36 | 1.40406933 | 0.05201243 | APOA1 | 20000 | Rhesus | qRTPCR | 2 day |
| | | | | | HEP | | gymnotic |
| | | | | | primary | | delivery |
| APOA1-37 | 1.14577369 | 0.09075636 | APOA1 | 20000 | Rhesus | qRTPCR | 2 day |
| | | | | | HEP | | gymnotic |
| | | | | | primary | | delivery |
| APOA1-38 | 2.12806048 | 0.19015489 | APOA1 | 20000 | Rhesus | qRTPCR | 2 day |
| | | | | | HEP | | gymnotic |
| | | | | | primary | | delivery |
| APOA1-39 | 1.16915349 | 0.00094597 | APOA1 | 20000 | Rhesus | qRTPCR | 2 day |
| | | | | | HEP | | gymnotic |
| | | | | | primary | | delivery |
| APOA1-40 | 1.19907058 | 0.0025586 | APOA1 | 20000 | Rhesus | qRTPCR | 2 day |
| | | | | | HEP | | gymnotic |
| | | | | | primary | | delivery |
| APOA1-41 | 1.24321488 | 0.08979382 | APOA1 | 20000 | Rhesus | qRTPCR | 2 day |
| | | | | | HEP | | gymnotic |
| | | | | | primary | | delivery |
| APOA1-42 | 1.62663135 | 0.05063175 | APOA1 | 20000 | Rhesus | qRTPCR | 2 day |
| | | | | | HEP | | gymnotic |
| | | | | | primary | | delivery |
| APOA1-43 | 1.22838499 | 0.06225601 | APOA1 | 20000 | Rhesus | qRTPCR | 2 day |
| | | | | | HEP | | gymnotic |
| | | | | | primary | | delivery |
| APOA1-44 | 1.18458924 | 0.05844139 | APOA1 | 20000 | Rhesus | qRTPCR | 2 day |
| | | | | | HEP | | gymnotic |
| | | | | | primary | | delivery |
| APOA1-45 | 1.17520364 | 0.04230154 | APOA1 | 20000 | Rhesus | qRTPCR | 2 day |
| | | | | | HEP | | gymnotic |
| | | | | | primary | | delivery |
| APOA1-46 | 0.96264402 | 0.05088288 | APOA1 | 20000 | Rhesus | qRTPCR | 2 day |
| | | | | | HEP | | gymnotic |
| | | | | | primary | | delivery |
| APOA1-47 | 1.1900275 | 0.06951272 | APOA1 | 20000 | Rhesus | qRTPCR | 2 day |
| | | | | | HEP | | gymnotic |
| | | | | | primary | | delivery |
| APOA1-48 | 2.00874599 | 0.07954203 | APOA1 | 20000 | Rhesus | qRTPCR | 2 day |
| | | | | | HEP | | gymnotic |
| | | | | | primary | | delivery |
| APOA1-49 | 1.11355371 | 0.0039948 | APOA1 | 20000 | Rhesus | qRTPCR | 2 day |
| | | | | | HEP | | gymnotic |
| | | | | | primary | | delivery |
| APOA1-50 | 1.08414991 | 0.01243284 | APOA1 | 20000 | Rhesus | qRTPCR | 2 day |
| | | | | | HEP | | gymnotic |
| | | | | | primary | | delivery |
| APOA1-14 | 1 | 0 | APOA1 | 0 | hHEP | qRTPCR | |
| | | | | | primary | | |
| APOA1-14 | 1.08694838 | 0.18251335 | APOA1 | 0.0003 | hHEP | qRTPCR | |
| | | | | | primary | | |
| APOA1-14 | 1.05194003 | 0.15181404 | APOA1 | 0.0016 | hHEP | qRTPCR | |
| | | | | | primary | | |
| APOA1-14 | 1.53925884 | 0.18553087 | APOA1 | 0.008 | hHEP | qRTPCR | |
| | | | | | primary | | |
| APOA1-14 | 1.52047547 | 0.35804358 | APOA1 | 0.04 | hHEP | qRTPCR | |
| | | | | | primary | | |
| APOA1-14 | 1.53104358 | 0.1930136 | APOA1 | 0.2 | hHEP | qRTPCR | |
| | | | | | primary | | |
| APOA1-14 | 2.12099067 | 0.29931038 | APOA1 | 1 | hHEP | qRTPCR | |
| | | | | | primary | | |
| APOA1-14 | 2.25928913 | 0.51423765 | APOA1 | 5 | hHEP | qRTPCR | |
| | | | | | primary | | |
| APOA1-26 | 1 | 0 | APOA1 | 0 | hHEP | qRTPCR | |
| | | | | | primary | | |
| APOA1-26 | 1.08553363 | 0.0767314 | APOA1 | 0.0003 | hHEP | qRTPCR | |
| | | | | | primary | | |
| APOA1-26 | 1.15868135 | 0.08227044 | APOA1 | 0.0016 | hHEP | qRTPCR | |
| | | | | | primary | | |
| APOA1-26 | 1.52412576 | 0.20682262 | APOA1 | 0.008 | hHEP | qRTPCR | |
| | | | | | primary | | |
| APOA1-26 | 1.31825093 | 0.24922943 | APOA1 | 0.04 | hHEP | qRTPCR | |
| | | | | | primary | | |
| APOA1-26 | 1.57248749 | 0.28024257 | APOA1 | 0.2 | hHEP | qRTPCR | |
| | | | | | primary | | |
| APOA1-26 | 1.58728753 | 0.26666262 | APOA1 | 1 | hHEP | qRTPCR | |
| | | | | | primary | | |
| APOA1-26 | 2.55476113 | 0.40031901 | APOA1 | 5 | hHEP | qRTPCR | |
| | | | | | primary | | |
| APOA1-27 | 1 | 0 | APOA1 | 0 | hHEP | qRTPCR | |
| | | | | | primary | | |
| APOA1-27 | 0.98316863 | 0.08604414 | APOA1 | 0.0003 | hHEP | qRTPCR | |
| | | | | | primary | | |
| APOA1-27 | 1.05752462 | 0.08617287 | APOA1 | 0.0016 | hHEP | qRTPCR | |
| | | | | | primary | | |
| APOA1-27 | 1.52615535 | 0.26226753 | APOA1 | 0.008 | hHEP | qRTPCR | |
| | | | | | primary | | |
| APOA1-27 | 1.26027422 | 0.23746766 | APOA1 | 0.04 | hHEP | qRTPCR | |
| | | | | | primary | | |
| APOA1-27 | 1.43678902 | 0.088956 | APOA1 | 0.2 | hHEP | qRTPCR | |
| | | | | | primary | | |
| APOA1-27 | 1.78583681 | 0.23233442 | APOA1 | 1 | hHEP | qRTPCR | |
| | | | | | primary | | |
| APOA1-27 | 2.33077582 | 0.34733247 | APOA1 | 5 | hHEP | qRTPCR | |
| | | | | | primary | | |
| APOA1-28 | 1 | 0 | APOA1 | 0 | hHEP | qRTPCR | |
| | | | | | primary | | |
| APOA1-28 | 0.99808283 | 0.08754604 | APOA1 | 0.0003 | hHEP | qRTPCR | |
| | | | | | primary | | |
| APOA1-28 | 1.09627964 | 0.10546149 | APOA1 | 0.0016 | hHEP | qRTPCR | |
| | | | | | primary | | |
| APOA1-28 | 1.74635808 | 0.2128014 | APOA1 | 0.008 | hHEP | qRTPCR | |
| | | | | | primary | | |
| APOA1-28 | 1.32686535 | 0.30053538 | APOA1 | 0.04 | hHEP | qRTPCR | |
| | | | | | primary | | |
| APOA1-28 | 1.55116686 | 0.2545156 | APOA1 | 0.2 | hHEP | qRTPCR | |
| | | | | | primary | | |
| APOA1-28 | 1.75193166 | 0.29635319 | APOA1 | 1 | hHEP | qRTPCR | |
| | | | | | primary | | |
| APOA1-28 | 2.26556635 | 0.30759034 | APOA1 | 5 | hHEP | qRTPCR | |
| | | | | | primary | | |
| APOA1-38 | 1 | 0 | APOA1 | 0 | hHEP | qRTPCR | |
| | | | | | primary | | |
| APOA1-38 | 0.88492503 | 0.06629437 | APOA1 | 0.0003 | hHEP | qRTPCR | |
| | | | | | primary | | |
| APOA1-38 | 1.05734891 | 0.11363534 | APOA1 | 0.0016 | hHEP | qRTPCR | |
| | | | | | primary | | |
| APOA1-38 | 1.57897899 | 0.28185073 | APOA1 | 0.008 | hHEP | qRTPCR | |
| | | | | | primary | | |
| APOA1-38 | 1.22436431 | 0.28448495 | APOA1 | 0.04 | hHEP | qRTPCR | |
| | | | | | primary | | |
| APOA1-38 | 1.59431372 | 0.28418325 | APOA1 | 0.2 | hHEP | qRTPCR | |
| | | | | | primary | | |
| APOA1-38 | 1.72576685 | 0.24330581 | APOA1 | 1 | hHEP | qRTPCR | |
| | | | | | primary | | |
| APOA1-38 | 1.88788569 | 0.20070977 | APOA1 | 5 | hHEP | qRTPCR | |
| | | | | | primary | | |
| APOA1-42 | 1 | 0 | APOA1 | 0 | hHEP | qRTPCR | |
| | | | | | primary | | |
| APOA1-42 | 1.08101142 | 0.25215396 | APOA1 | 0.0003 | hHEP | qRTPCR | |
| | | | | | primary | | |
| APOA1-42 | 1.04455528 | 0.09799083 | APOA1 | 0.0016 | hHEP | qRTPCR | |
| | | | | | primary | | |
| APOA1-42 | 1.41948528 | 0.12776744 | APOA1 | 0.008 | hHEP | qRTPCR | |
| | | | | | primary | | |
| APOA1-42 | 1.15260293 | 0.20470935 | APOA1 | 0.04 | hHEP | qRTPCR | |
| | | | | | primary | | |
| APOA1-42 | 1.79896507 | 0.27164046 | APOA1 | 0.2 | hHEP | qRTPCR | |
| | | | | | primary | | |
| APOA1-42 | 1.714465 | 0.2708664 | APOA1 | 1 | hHEP | qRTPCR | |
| | | | | | primary | | |
| APOA1-42 | 2.65590093 | 0.665345 | APOA1 | 5 | hHEP | qRTPCR | |
| | | | | | primary | | |
| APOA1-14 | 1 | 0 | APOA1 | 0 | hHEP | qRTPCR | 2 day |
| | | | | | primary | | gymnotic |
| | | | | | | | delivery |
| APOA1-14 | 1.22664385 | 0.08136829 | APOA1 | 0.0013 | hHEP | qRTPCR | 2 day |
| | | | | | primary | | gymnotic |
| | | | | | | | delivery |
| APOA1-14 | 1.20001603 | 0.16149277 | APOA1 | 0.0064 | hHEP | qRTPCR | 2 day |
| | | | | | primary | | gymnotic |
| | | | | | | | delivery |
| APOA1-14 | 1.34241832 | 0.166079 | APOA1 | 0.032 | hHEP | qRTPCR | 2 day |
| | | | | | primary | | gymnotic |
| | | | | | | | delivery |
| APOA1-14 | 1.250667 | 0.13525874 | APOA1 | 0.16 | hHEP | qRTPCR | 2 day |
| | | | | | primary | | gymnotic |
| | | | | | | | delivery |
| APOA1-14 | 1.50787957 | 0.26834293 | APOA1 | 0.8 | hHEP | qRTPCR | 2 day |
| | | | | | primary | | gymnotic |
| | | | | | | | delivery |
| APOA1-14 | 1.62349636 | 0.20814037 | APOA1 | 4 | hHEP | qRTPCR | 2 day |
| | | | | | primary | | gymnotic |
| | | | | | | | delivery |
| APOA1-14 | 3.10508875 | 0.32974659 | APOA1 | 20 | hHEP | qRTPCR | 2 day |
| | | | | | primary | | gymnotic |
| | | | | | | | delivery |
| APOA1-26 | 1 | 0 | APOA1 | 0 | hHEP | qRTPCR | 2 day |
| | | | | | primary | | gymnotic |
| | | | | | | | delivery |
| APOA1-26 | 1.03057865 | 0.1099187 | APOA1 | 0.0013 | hHEP | qRTPCR | 2 day |
| | | | | | primary | | gymnotic |
| | | | | | | | delivery |
| APOA1-26 | 1.15081722 | 0.16409535 | APOA1 | 0.0064 | hHEP | qRTPCR | 2 day |
| | | | | | primary | | gymnotic |
| | | | | | | | delivery |
| APOA1-26 | 1.13969479 | 0.1419007 | APOA1 | 0.032 | hHEP | qRTPCR | 2 day |
| | | | | | primary | | gymnotic |
| | | | | | | | delivery |
| APOA1-26 | 1.12042625 | 0.18319122 | APOA1 | 0.16 | hHEP | qRTPCR | 2 day |
| | | | | | primary | | gymnotic |
| | | | | | | | delivery |
| APOA1-26 | 1.1241745 | 0.1969907 | APOA1 | 0.8 | hHEP | qRTPCR | 2 day |
| | | | | | primary | | gymnotic |
| | | | | | | | delivery |
| APOA1-26 | 1.32298492 | 0.18004037 | APOA1 | 4 | hHEP | qRTPCR | 2 day |
| | | | | | primary | | gymnotic |
| | | | | | | | delivery |
| APOA1-26 | 1.79781279 | 0.34218058 | APOA1 | 20 | hHEP | qRTPCR | 2 day |
| | | | | | primary | | gymnotic |
| | | | | | | | delivery |
| APOA1-27 | 1 | 0 | APOA1 | 0 | hHEP | qRTPCR | 2 day |
| | | | | | primary | | gymnotic |
| | | | | | | | delivery |
| APOA1-27 | 1.1402176 | 0.19965713 | APOA1 | 0.0013 | hHEP | qRTPCR | 2 day |
| | | | | | primary | | gymnotic |
| | | | | | | | delivery |
| APOA1-27 | 1.26675707 | 0.18370679 | APOA1 | 0.0064 | hHEP | qRTPCR | 2 day |
| | | | | | primary | | gymnotic |
| | | | | | | | delivery |
| APOA1-27 | 1.26012213 | 0.1129072 | APOA1 | 0.032 | hHEP | qRTPCR | 2 day |
| | | | | | primary | | gymnotic |
| | | | | | | | delivery |
| APOA1-27 | 1.18290313 | 0.15673768 | APOA1 | 0.16 | hHEP | qRTPCR | 2 day |
| | | | | | primary | | gymnotic |
| | | | | | | | delivery |
| APOA1-27 | 1.3771192 | 0.24095227 | APOA1 | 0.8 | hHEP | qRTPCR | 2 day |
| | | | | | primary | | gymnotic |
| | | | | | | | delivery |
| APOA1-27 | 1.54307506 | 0.27285199 | APOA1 | 4 | hHEP | qRTPCR | 2 day |
| | | | | | primary | | gymnotic |
| | | | | | | | delivery |
| APOA1-27 | 1.98758533 | 0.57279042 | APOA1 | 20 | hHEP | qRTPCR | 2 day |
| | | | | | primary | | gymnotic |
| | | | | | | | delivery |
| APOA1-28 | 1 | 0 | APOA1 | 0 | hHEP | qRTPCR | 2 day |
| | | | | | primary | | gymnotic |
| | | | | | | | delivery |
| APOA1-28 | 1.11908946 | 0.10118137 | APOA1 | 0.0013 | hHEP | qRTPCR | 2 day |
| | | | | | primary | | gymnotic |
| | | | | | | | delivery |
| APOA1-28 | 1.31622532 | 0.24397655 | APOA1 | 0.0064 | hHEP | qRTPCR | 2 day |
| | | | | | primary | | gymnotic |
| | | | | | | | delivery |
| APOA1-28 | 1.29780578 | 0.17961127 | APOA1 | 0.032 | hHEP | qRTPCR | 2 day |
| | | | | | primary | | gymnotic |
| | | | | | | | delivery |
| APOA1-28 | 1.32246936 | 0.18646197 | APOA1 | 0.16 | hHEP | qRTPCR | 2 day |
| | | | | | primary | | gymnotic |
| | | | | | | | delivery |
| APOA1-28 | 1.31539138 | 0.15026478 | APOA1 | 0.8 | hHEP | qRTPCR | 2 day |
| | | | | | primary | | gymnotic |
| | | | | | | | delivery |
| APOA1-28 | 1.38882146 | 0.13582825 | APOA1 | 4 | hHEP | qRTPCR | 2 day |
| | | | | | primary | | gymnotic |
| | | | | | | | delivery |
| APOA1-28 | 1.71414157 | 0.36521339 | APOA1 | 20 | hHEP | qRTPCR | 2 day |
| | | | | | primary | | gymnotic |
| | | | | | | | delivery |
| APOA1-38 | 1 | 0 | APOA1 | 0 | hHEP | qRTPCR | 2 day |
| | | | | | primary | | gymnotic |
| | | | | | | | delivery |
| APOA1-38 | 1.09493393 | 0.16440193 | APOA1 | 0.0013 | hHEP | qRTPCR | 2 day |
| | | | | | primary | | gymnotic |
| | | | | | | | delivery |
| APOA1-38 | 1.21259515 | 0.1811953 | APOA1 | 0.0064 | hHEP | qRTPCR | 2 day |
| | | | | | primary | | gymnotic |
| | | | | | | | delivery |
| APOA1-38 | 1.18730143 | 0.1815182 | APOA1 | 0.032 | hHEP | qRTPCR | 2 day |
| | | | | | primary | | gymnotic |
| | | | | | | | delivery |
| APOA1-38 | 1.20937799 | 0.16112497 | APOA1 | 0.16 | hHEP | qRTPCR | 2 day |
| | | | | | primary | | gymnotic |
| | | | | | | | delivery |
| APOA1-38 | 1.31738897 | 0.17408158 | APOA1 | 0.8 | hHEP | qRTPCR | 2 day |
| | | | | | primary | | gymnotic |
| | | | | | | | delivery |
| APOA1-38 | 1.30481928 | 0.17998918 | APOA1 | 4 | hHEP | qRTPCR | 2 day |
| | | | | | primary | | gymnotic |
| | | | | | | | delivery |
| APOA1-38 | 1.48167673 | 0.22830116 | APOA1 | 20 | hHEP | qRTPCR | 2 day |
| | | | | | primary | | gymnotic |
| | | | | | | | delivery |
| APOA1-42 | 1 | 0 | APOA1 | 0 | hHEP | qRTPCR | 2 day |
| | | | | | primary | | gymnotic |
| | | | | | | | delivery |
| APOA1-42 | 1.07180406 | 0.15995264 | APOA1 | 0.0013 | hHEP | qRTPCR | 2 day |
| | | | | | primary | | gymnotic |
| | | | | | | | delivery |
| APOA1-42 | 1.20060918 | 0.17805838 | APOA1 | 0.0064 | hHEP | qRTPCR | 2 day |
| | | | | | primary | | gymnotic |
| | | | | | | | delivery |
| APOA1-42 | 1.19564064 | 0.19452738 | APOA1 | 0.032 | hHEP | qRTPCR | 2 day |
| | | | | | primary | | gymnotic |
| | | | | | | | delivery |
| APOA1-42 | 1.25800421 | 0.16546956 | APOA1 | 0.16 | hHEP | qRTPCR | 2 day |
| | | | | | primary | | gymnotic |
| | | | | | | | delivery |
| APOA1-42 | 1.37990276 | 0.1382772 | APOA1 | 0.8 | hHEP | qRTPCR | 2 day |
| | | | | | primary | | gymnotic |
| | | | | | | | delivery |
| APOA1-42 | 1.58449876 | 0.27634275 | APOA1 | 4 | hHEP | qRTPCR | 2 day |
| | | | | | primary | | gymnotic |
| | | | | | | | delivery |
| APOA1-42 | 2.47049804 | 0.5427229 | APOA1 | 20 | hHEP | qRTPCR | 2 day |
| | | | | | primary | | gymnotic |
| | | | | | | | delivery |
| APOA1-14 | 1 | 0 | APOA1 | 0 | hHEP | qRTPCR | 2 day |
| | | | | | primary | | gymnotic |
| | | | | | | | delivery |
| APOA1-14 | 1.28982321 | 0.05728385 | APOA1 | 0.0013 | hHEP | qRTPCR | 2 day |
| | | | | | primary | | gymnotic |
| | | | | | | | delivery |
| APOA1-14 | 1.34549175 | 0.04239393 | APOA1 | 0.0064 | hHEP | qRTPCR | 2 day |
| | | | | | primary | | gymnotic |
| | | | | | | | delivery |
| APOA1-14 | 1.23831059 | 0.1267953 | APOA1 | 0.032 | hHEP | qRTPCR | 2 day |
| | | | | | primary | | gymnotic |
| | | | | | | | delivery |
| APOA1-14 | 1.32069205 | 0.09056565 | APOA1 | 0.16 | hHEP | qRTPCR | 2 day |
| | | | | | primary | | gymnotic |
| | | | | | | | delivery |
| APOA1-14 | 1.53271184 | 0.1290343 | APOA1 | 0.8 | hHEP | qRTPCR | 2 day |
| | | | | | primary | | gymnotic |
| | | | | | | | delivery |
| APOA1-14 | 1.62601823 | 0.08363984 | APOA1 | 4 | hHEP | qRTPCR | 2 day |
| | | | | | primary | | gymnotic |
| | | | | | | | delivery |
| APOA1-14 | 2.48171181 | 0.28713262 | APOA1 | 20 | hHEP | qRTPCR | 2 day |
| | | | | | primary | | gymnotic |
| | | | | | | | delivery |
| APOA1-26 | 1 | 0 | APOA1 | 0 | hHEP | qRTPCR | 2 day |
| | | | | | primary | | gymnotic |
| | | | | | | | delivery |
| APOA1-26 | 1.03431614 | 0.05662417 | APOA1 | 0.0013 | hHEP | qRTPCR | 2 day |
| | | | | | primary | | gymnotic |
| | | | | | | | delivery |
| APOA1-26 | 1.19463505 | 0.09180064 | APOA1 | 0.0064 | hHEP | qRTPCR | 2 day |
| | | | | | primary | | gymnotic |
| | | | | | | | delivery |
| APOA1-26 | 1.12434637 | 0.05894831 | APOA1 | 0.032 | hHEP | qRTPCR | 2 day |
| | | | | | primary | | gymnotic |
| | | | | | | | delivery |
| APOA1-26 | 1.19037386 | 0.07353796 | APOA1 | 0.16 | hHEP | qRTPCR | 2 day |
| | | | | | primary | | gymnotic |
| | | | | | | | delivery |
| APOA1-26 | 1.19090382 | 0.06103311 | APOA1 | 0.8 | hHEP | qRTPCR | 2 day |
| | | | | | primary | | gymnotic |
| | | | | | | | delivery |
| APOA1-26 | 1.54145359 | 0.14448417 | APOA1 | 4 | hHEP | qRTPCR | 2 day |
| | | | | | primary | | gymnotic |
| | | | | | | | delivery |
| APOA1-26 | 1.98830673 | 0.15677505 | APOA1 | 20 | hHEP | qRTPCR | 2 day |
| | | | | | primary | | gymnotic |
| | | | | | | | delivery |
| APOA1-27 | 1 | 0 | APOA1 | 0 | hHEP | qRTPCR | 2 day |
| | | | | | primary | | gymnotic |
| | | | | | | | delivery |
| APOA1-27 | 1.08446817 | 0.09323671 | APOA1 | 0.0013 | hHEP | qRTPCR | 2 day |
| | | | | | primary | | gymnotic |
| | | | | | | | delivery |
| APOA1-27 | 1.17896543 | 0.08221723 | APOA1 | 0.0064 | hHEP | qRTPCR | 2 day |
| | | | | | primary | | gymnotic |
| | | | | | | | delivery |
| APOA1-27 | 1.18835793 | 0.09092287 | APOA1 | 0.032 | hHEP | qRTPCR | 2 day |
| | | | | | primary | | gymnotic |
| | | | | | | | delivery |
| APOA1-27 | 1.22087528 | 0.15488819 | APOA1 | 0.16 | hHEP | qRTPCR | 2 day |
| | | | | | primary | | gymnotic |
| | | | | | | | delivery |
| APOA1-27 | 1.29480261 | 0.17391472 | APOA1 | 0.8 | hHEP | qRTPCR | 2 day |
| | | | | | primary | | gymnotic |
| | | | | | | | delivery |
| APOA1-27 | 1.81439782 | 0.17194589 | APOA1 | 4 | hHEP | qRTPCR | 2 day |
| | | | | | primary | | gymnotic |
| | | | | | | | delivery |
| APOA1-27 | 2.13089066 | 0.38625974 | APOA1 | 20 | hHEP | qRTPCR | 2 day |
| | | | | | primary | | gymnotic |
| | | | | | | | delivery |
| APOA1-28 | 1 | 0 | APOA1 | 0 | hHEP | qRTPCR | 2 day |
| | | | | | primary | | gymnotic |
| | | | | | | | delivery |
| APOA1-28 | 1.11273557 | 0.04341545 | APOA1 | 0.0013 | hHEP | qRTPCR | 2 day |
| | | | | | primary | | gymnotic |
| | | | | | | | delivery |
| APOA1-28 | 1.23336596 | 0.11761839 | APOA1 | 0.0064 | hHEP | qRTPCR | 2 day |
| | | | | | primary | | gymnotic |
| | | | | | | | delivery |
| APOA1-28 | 1.31691986 | 0.08728456 | APOA1 | 0.032 | hHEP | qRTPCR | 2 day |
| | | | | | primary | | gymnotic |
| | | | | | | | delivery |
| APOA1-28 | 1.29161178 | 0.11762106 | APOA1 | 0.16 | hHEP | qRTPCR | 2 day |
| | | | | | primary | | gymnotic |
| | | | | | | | delivery |
| APOA1-28 | 1.41606478 | 0.21530244 | APOA1 | 0.8 | hHEP | qRTPCR | 2 day |
| | | | | | primary | | gymnotic |
| | | | | | | | delivery |
| APOA1-28 | 1.96931875 | 0.16623081 | APOA1 | 4 | hHEP | qRTPCR | 2 day |
| | | | | | primary | | gymnotic |
| | | | | | | | delivery |
| APOA1-28 | 2.30778783 | 0.16497488 | APOA1 | 20 | hHEP | qRTPCR | 2 day |
| | | | | | primary | | gymnotic |
| | | | | | | | delivery |
| APOA1-38 | 1 | 0 | APOA1 | 0 | hHEP | qRTPCR | 2 day |
| | | | | | primary | | gymnotic |
| | | | | | | | delivery |
| APOA1-38 | 1.05735 | 0.19977389 | APOA1 | 0.0013 | hHEP | qRTPCR | 2 day |
| | | | | | primary | | gymnotic |
| | | | | | | | delivery |
| APOA1-38 | 1.17022731 | 0.15556619 | APOA1 | 0.0064 | hHEP | qRTPCR | 2 day |
| | | | | | primary | | gymnotic |
| | | | | | | | delivery |
| APOA1-38 | 1.26481706 | 0.18783056 | APOA1 | 0.032 | hHEP | qRTPCR | 2 day |
| | | | | | primary | | gymnotic |
| | | | | | | | delivery |
| APOA1-38 | 1.27521361 | 0.09730602 | APOA1 | 0.16 | hHEP | qRTPCR | 2 day |
| | | | | | primary | | gymnotic |
| | | | | | | | delivery |
| APOA1-38 | 1.36058844 | 0.30876272 | APOA1 | 0.8 | hHEP | qRTPCR | 2 day |
| | | | | | primary | | gymnotic |
| | | | | | | | delivery |
| APOA1-38 | 1.57888871 | 0.20587799 | APOA1 | 4 | hHEP | qRTPCR | 2 day |
| | | | | | primary | | gymnotic |
| | | | | | | | delivery |
| APOA1-38 | 1.80614809 | 0.36361908 | APOA1 | 20 | hHEP | qRTPCR | 2 day |
| | | | | | primary | | gymnotic |
| | | | | | | | delivery |
| APOA1-42 | 1 | 0 | APOA1 | 0 | hHEP | qRTPCR | 2 day |
| | | | | | primary | | gymnotic |
| | | | | | | | delivery |
| APOA1-42 | 1.11366546 | 0.17789828 | APOA1 | 0.0013 | hHEP | qRTPCR | 2 day |
| | | | | | primary | | gymnotic |
| | | | | | | | delivery |
| APOA1-42 | 1.22215537 | 0.11647732 | APOA1 | 0.0064 | hHEP | qRTPCR | 2 day |
| | | | | | primary | | gymnotic |
| | | | | | | | delivery |
| APOA1-42 | 1.24401865 | 0.14212687 | APOA1 | 0.032 | hHEP | qRTPCR | 2 day |
| | | | | | primary | | gymnotic |
| | | | | | | | delivery |
| APOA1-42 | 1.40406236 | 0.12126081 | APOA1 | 0.16 | hHEP | qRTPCR | 2 day |
| | | | | | primary | | gymnotic |
| | | | | | | | delivery |
| APOA1-42 | 1.74777513 | 0.17270537 | APOA1 | 0.8 | hHEP | qRTPCR | 2 day |
| | | | | | primary | | gymnotic |
| | | | | | | | delivery |
| APOA1-42 | 2.23756758 | 0.31858478 | APOA1 | 4 | hHEP | qRTPCR | 2 day |
| | | | | | primary | | gymnotic |
| | | | | | | | delivery |
| APOA1-42 | 3.09552924 | 0.53473194 | APOA1 | 20 | hHEP | qRTPCR | 2 day |
| | | | | | primary | | gymnotic |
| | | | | | | | delivery |
| APOA1-14 | 1 | 0.09626066 | APOA1 | 0 | hHEP | ELISA | Apoa1 |
| | | | | | primary | | protein in |
| | | | | | | | supernatent |
| APOA1-14 | 1.34858968 | 0.05721875 | APOA1 | 4 | hHEP | ELISA | Apoa1 |
| | | | | | primary | | protein in |
| | | | | | | | supernatent |
| APOA1-14 | 1.72994754 | 0.10753775 | APOA1 | 20 | hHEP | ELISA | Apoa1 |
| | | | | | primary | | protein in |
| | | | | | | | supernatent |
| APOA1-26 | 1 | 0.07416862 | APOA1 | 0 | hHEP | ELISA | Apoa1 |
| | | | | | primary | | protein in |
| | | | | | | | supernatent |
| APOA1-26 | 1.5241653 | 0.11911112 | APOA1 | 4 | hHEP | ELISA | Apoa1 |
| | | | | | primary | | protein in |
| | | | | | | | supernatent |
| APOA1-26 | 1.48229434 | 0.09405181 | APOA1 | 20 | hHEP | ELISA | Apoa1 |
| | | | | | primary | | protein in |
| | | | | | | | supernatent |
| APOA1-27 | 1 | 0.08432072 | APOA1 | 0 | hHEP | ELISA | Apoa1 |
| | | | | | primary | | protein in |
| | | | | | | | supernatent |
| APOA1-27 | 1.65637371 | 0.07032466 | APOA1 | 4 | hHEP | ELISA | Apoa1 |
| | | | | | primary | | protein in |
| | | | | | | | supernatent |
| APOA1-27 | 2.23268013 | 0.21512241 | APOA1 | 20 | hHEP | ELISA | Apoa1 |
| | | | | | primary | | protein in |
| | | | | | | | supernatent |
| APOA1-28 | 1 | 0.04689792 | APOA1 | 0 | hHEP | ELISA | Apoa1 |
| | | | | | primary | | protein in |
| | | | | | | | supernatent |
| APOA1-28 | 1.90877233 | 0.13653732 | APOA1 | 4 | hHEP | ELISA | Apoa1 |
| | | | | | primary | | protein in |
| | | | | | | | supernatent |
| APOA1-28 | 2.24666516 | 0.05232185 | APOA1 | 20 | hHEP | ELISA | Apoa1 |
| | | | | | primary | | protein in |
| | | | | | | | supernatent |
| APOA1-38 | 1 | 0.04662436 | APOA1 | 0 | hHEP | ELISA | Apoa1 |
| | | | | | primary | | protein in |
| | | | | | | | supernatent |
| APOA1-38 | 1.79639412 | 0.1346576 | APOA1 | 4 | hHEP | ELISA | Apoa1 |
| | | | | | primary | | protein in |
| | | | | | | | supernatent |
| APOA1-38 | 1.98484153 | 0.07789635 | APOA1 | 20 | hHEP | ELISA | Apoa1 |
| | | | | | primary | | protein in |
| | | | | | | | supernatent |
| APOA1-42 | 1 | 0.0789846 | APOA1 | 0 | hHEP | ELISA | Apoa1 |
| | | | | | primary | | protein in |
| | | | | | | | supernatent |
| APOA1-42 | 1.55336049 | 0.0775668 | APOA1 | 4 | hHEP | ELISA | Apoa1 |
| | | | | | primary | | protein in |
| | | | | | | | supernatent |
| APOA1-42 | 2.32240326 | 0.16792097 | APOA1 | 20 | hHEP | ELISA | Apoa1 |
| | | | | | primary | | protein in |
| | | | | | | | supernatent |

TABLE 3
A listing of oligonucleotide modifications.

| Symbol | Feature Description |
|---|---|
| bio | 5′ biotin |
| dAs | DNA w/3′ thiophosphate |
| dCs | DNA w/3′ thiophosphate |
| dGs | DNA w/3′ thiophosphate |
| dTs | DNA w/3′ thiophosphate |
| dG | DNA |
| d5mCs | deoxy-5-methylcytidine w/3′ thiophosphate |
| enaAs | ENA w/3′ thiophosphate |
| enaCs | ENA w/3′ thiophosphate |
| enaGs | ENA w/3′ thiophosphate |
| enaTs | ENA w/3′ thiophosphate |
| fluAs | 2′-fluoro w/3′ thiophosphate |
| fluCs | 2′-fluoro w/3′ thiophosphate |
| fluGs | 2′-fluoro w/3′ thiophosphate |
| fluUs | 2′-fluoro w/3′ thiophosphate |
| InaAs | LNA w/3′ thiophosphate |
| InaCs | LNA w/3′ thiophosphate |
| InaGs | LNA w/3′ thiophosphate |
| InaTs | LNA w/3′ thiophosphate |
| Symbol | Feature Description |
| omeAs | 2′-OMe w/3′ thiophosphate |
| omeCs | 2′-OMe w/3′ thiophosphate |
| omeGs | 2′-OMe w/3′ thiophosphate |
| omeTs | 2′-OMe w/3′ thiophosphate |
| InaAs-Sup | LNA w/3′ thiophosphate at 3′ terminus |
| InaCs-Sup | LNA w/3′ thiophosphate at 3′ terminus |
| InaGs-Sup | LNA w/3′ thiophosphate at 3′ terminus |
| InaTs-Sup | LNA w/3′ thiophosphate at 3′ terminus |
| InaA-Sup | LNA w/3′ OH at 3′ terminus |
| InaC-Sup | LNA w/3′ OH at 3′ terminus |
| InaG-Sup | LNA w/3′ OH at 3′ terminus |
| InaT-Sup | LNA w/3′ OH at 3′ terminus |
| omeA-Sup | 2′-OMe w/3′ OH at 3′ terminus |
| omeC-Sup | 2′-OMe w/3′ OH at 3′ terminus |
| omeG-Sup | 2′-OMe w/3′ OH at 3′ terminus |
| omeU-Sup | 2′-OMe w/3′ OH at 3′ terminus |
| dAs-Sup | DNA w/3′ thiophosphate at 3′ terminus |
| dCs-Sup | DNA w/3′ thiophosphate at 3′ terminus |
| dGs-Sup | DNA w/3′ thiophosphate at 3′ terminus |
| dTs-Sup | DNA w/3′ thiophosphate at 3′ terminus |
| dA-Sup | DNA w/3′ OH at 3′ terminus |
| dC-Sup | DNA w/3′ OH at 3′ terminus |
| dG-Sup | DNA w/3′ OH at 3′ terminus |
| dT-Sup | DNA w/3′ OH at 3′ terminus |

TABLE 4
Formatted oligonucleotide sequences made for testing in the lab
showing nucleotide modifications.

| Oligo | Base | | |
|---|---|---|---|
| Name | Sequence | Formatted Sequence | SeqID |
| APOA1- | CTAAGAGACAG | InaCs;omeUs;InaAs;omeAs;InaGs;omeAs;InaGs;omeA | 182805 |
| 01 m01 | GTGG | s;InaCs;omeAs;InaGs;omeGs;InaTs;omeGs;InaG-Sup | |
| APOA1- | ACTGAAGCTGG | InaAs;omeCs;InaTs;omeGs;InaAs;omeAs;InaGs;omeCs; | 182846 |
| 02 m01 | AAAG | InaTs;omeGs;InaGs;omeAs;InaAs;omeAs;InaG-Sup | |
| APOA1- | GGATTTGAACC | InaGs;omeGs;InaAs;omeUs;InaTs;omeUs;InaGs;omeA | 183562 |
| 03 m01 | TGCC | s;InaAs;omeCs;InaCs;omeUs;InaGs;omeCs;InaC-Sup | |
| APOA1- | GCAGATAGAA | InaGs;omeCs;InaAs;omeGs;InaAs;omeUs;InaAs;omeG | 184065 |
| 04 m01 | AACCG | s;InaAs;omeAs;InaAs;omeAs;InaCs;omeCs;InaG-Sup | |
| APOA1- | TTTGAAGTGAT | InaTs;omeUs;InaTs;omeGs;InaAs;omeAs;InaGs;omeUs; | 184347 |
| 05 m01 | GGTC | InaGs;omeAs;InaTs;omeGs;InaGs;omeUs;InaC-Sup | |
| APOA1- | CTCTATTTGCCC | InaCs;omeUs;InaCs;omeUs;InaAs;omeUs;InaTs;omeU | 184876 |
| 06 m01 | AGC | s;InaGs;omeCs;InaCs;omeCs;InaAs;omeGs;InaC-Sup | |
| APOA1- | GGATGAAAGCT | InaGs;omeGs;InaAs;omeUs;InaGs;omeAs;InaAs;omeA | 185269 |
| 07 m01 | GCGG | s;InaGs;omeCs;InaTs;omeGs;InaCs;omeGs;InaG-Sup | |
| APOA1- | GATGAAAGCTG | InaGs;omeAs;InaTs;omeGs;InaAs;omeAs;InaAs;omeGs; | 185270 |
| 08 m01 | CGGT | InaCs;omeUs;InaGs;omeCs;InaGs;omeGs;InaT-Sup | |
| APOA1- | TGAAAGCTGCG | InaTs;omeGs;InaAs;omeAs;InaAs;omeGs;InaCs;omeUs; | 185272 |
| 09 m01 | GTGC | InaGs;omeCs;InaGs;omeGs;InaTs;omeGs;InaC-Sup | |
| APOA1- | CGTGCTCTTCCT | InaCs;omeGs;InaTs;omeGs;InaCs;omeUs;InaCs;omeUs; | 185297 |
| 10 m01 | GAC | InaTs;omeCs;InaCs;omeUs;InaGs;omeAs;InaC-Sup | |
| APOA1- | CTCAAAGACAG | InaCs;omeUs;InaCs;omeAs;InaAs;omeAs;InaGs;omeAs; | 185593 |
| 11 m01 | CGGC | InaCs;omeAs;InaGs;omeCs;InaGs;omeGs;InaC-Sup | |
| APOA1- | CAGCGGCAGA | InaCs;omeAs;InaGs;omeCs;InaGs;omeGs;InaCs;omeAs; | 185601 |
| 12 m01 | GACTA | InaGs;omeAs;InaGs;omeAs;InaCs;omeUs;InaA-Sup | |
| APOA1- | AGCGGCAGAG | InaAs;omeGs;InaCs;omeGs;InaGs;omeCs;InaAs;omeG | 185602 |
| 13 m01 | ACTAT | s;InaAs;omeGs;InaAs;omeCs;InaTs;omeAs;InaT-Sup | |
| APOA1- | GCGGCAGAGA | InaGs;omeCs;InaGs;omeGs;InaCs;omeAs;InaGs;omeA | 185603 |
| 14 m01 | CTATG | s;InaGs;omeAs;InaCs;omeUs;InaAs;omeUs;InaG-Sup | |
| APOA1- | GTGTCCCAGTT | InaGs;omeUs;InaGs;omeUs;InaCs;omeCs;InaCs;omeA | 185617 |
| 15 m01 | TGAA | s;InaGs;omeUs;InaTs;omeUs;InaGs;omeAs;InaA-Sup | |
| APOA1- | CAGCTAAAGTA | InaCs;omeAs;InaGs;omeCs;InaTs;omeAs;InaAs;omeAs; | 185650 |
| 16 m01 | AGGA | InaGs;omeUs;InaAs;omeAs;InaGs;omeGs;InaA-Sup | |
| APOA1- | CCCTCCAGCCT | InaCs;omeCs;InaCs;omeUs;InaCs;omeCs;InaAs;omeGs; | 186239 |
| 17 m01 | AAAG | InaCs;omeCs;InaTs;omeAs;InaAs;omeAs;InaG-Sup | |
| APOA1- | ATGAGCAAGG | InaAs;omeUs;InaGs;omeAs;InaGs;omeCs;InaAs;omeA | 186374 |
| 18 m01 | ATCTG | s;InaGs;omeGs;InaAs;omeUs;InaCs;omeUs;InaG-Sup | |
| APOA1- | AAGGTGCAGCC | InaAs;omeAs;InaGs;omeGs;InaTs;omeGs;InaCs;omeAs; | 186404 |
| 19 m01 | CTAC | InaGs;omeCs;InaCs;omeCs;InaTs;omeAs;InaC-Sup | |
| APOA1- | AGGTGCAGCCC | InaAs;omeGs;InaGs;omeUs;InaGs;omeCs;InaAs;omeG | 186405 |
| 20 m01 | TACC | s;InaCs;omeCs;InaCs;omeUs;InaAs;omeCs;InaC-Sup | |
| APOA1- | CCCTACCTGGA | InaCs;omeCs;InaCs;omeUs;InaAs;omeCs;InaCs;omeUs; | 186413 |
| 21 m01 | CGAC | InaGs;omeGs;InaAs;omeCs;InaGs;omeAs;InaC-Sup | |
| APOA1- | CCTACCTGGAC | InaCs;omeCs;InaTs;omeAs;InaCs;omeCs;InaTs;omeGs; | 186414 |
| 22 m01 | GACT | InaGs;omeAs;InaCs;omeGs;InaAs;omeCs;InaT-Sup | |
| APOA1- | CTACCTGGACG | InaCs;omeUs;InaAs;omeCs;InaCs;omeUs;InaGs;omeG | 186415 |
| 23 m01 | ACTT | s;InaAs;omeCs;InaGs;omeAs;InaCs;omeUs;InaT-Sup | |
| APOA1- | ATGGAGCTCTA | InaAs;omeUs;InaGs;omeGs;InaAs;omeGs;InaCs;omeU | 186452 |
| 24 m01 | CCGC | s;InaCs;omeUs;InaAs;omeCs;InaCs;omeGs;InaC-Sup | |
| APOA1- | GAGCTCTACCG | InaGs;omeAs;InaGs;omeCs;InaTs;omeCs;InaTs;omeAs; | 186455 |
| 25 m01 | CCAG | InaCs;omeCs;InaGs;omeCs;InaCs;omeAs;InaG-Sup | |
| APOA1- | AGCTCTACCGC | InaAs;omeGs;InaCs;omeUs;InaCs;omeUs;InaAs;omeCs; | 186456 |
| 26 m01 | CAGA | InaCs;omeGs;InaCs;omeCs;InaAs;omeGs;InaA-Sup | |
| APOA1- | GCTCTACCGCC | InaGs;omeCs;InaTs;omeCs;InaTs;omeAs;InaCs;omeCs; | 186457 |
| 27 m01 | AGAA | InaGs;omeCs;InaCs;omeAs;InaGs;omeAs;InaA-Sup | |
| APOA1- | CTCTACCGCCA | InaCs;omeUs;InaCs;omeUs;InaAs;omeCs;InaCs;omeGs | 186458 |
| 28 m01 | GAAG | InaCs;omeCs;InaAs;omeGs;InaAs;omeAs;InaG-Sup; | |
| APOA1- | TCTACCGCCAG | InaTs;omeCs;InaTs;omeAs;InaCs;omeCs;InaGs;omeCs; | 186459 |
| 29 m01 | AAGG | InaCs;omeAs;InaGs;omeAs;InaAs;omeGs;InaG-Sup | |
| APOA1- | CTACCGCCAGA | InaCs;omeUs;InaAs;omeCs;InaCs;omeGs;InaCs;omeCs; | 186460 |
| 30 m01 | AGGT | InaAs;omeGs;InaAs;omeAs;InaGs;omeGs;InaT-Sup | |
| APOA1- | TACCGCCAGAA | InaTs;omeAs;InaCs;omeCs;InaGs;omeCs;InaCs;omeAs; | 186461 |
| 31 m01 | GGTG | InaGs;omeAs;InaAs;omeGs;InaGs;omeUs;InaG-Sup | |
| APOA1- | ACCGCCAGAAG | InaAs;omeCs;InaCs;omeGs;InaCs;omeCs;InaAs;omeGs; | 186462 |
| 32 m01 | GTGG | InaAs;omeAs;InaGs;omeGs;InaTs;omeGs;InaG-Sup | |
| APOA1- | CCGCCAGAAG | InaCs;omeCs;InaGs;omeCs;InaCs;omeAs;InaGs;omeAs; | 186463 |
| 33 m01 | GTGGA | InaAs;omeGs;InaGs;omeUs;InaGs;omeGs;InaA-Sup | |
| APOA1- | GCGCGCGCCA | InaGs;omeCs;InaGs;omeCs;InaGs;omeCs;InaGs;omeCs; | 186504 |
| 34 m01 | GAAGC | InaCs;omeAs;InaGs;omeAs;InaAs;omeGs;InaC-Sup | |
| APOA1- | GCGCGCCAGA | InaGs;omeCs;InaGs;omeCs;InaGs;omeCs;InaCs;omeAs; | 186506 |
| 35 m01 | AGCTG | InaGs;omeAs;InaAs;omeGs;InaCs;omeUs;InaG-Sup | |
| APOA1- | CGCGCCAGAA | InaCs;omeGs;InaCs;omeGs;InaCs;omeCs;InaAs;omeGs; | 186507 |
| 36 m01 | GCTGC | InaAs;omeAs;InaGs;omeCs;InaTs;omeGs;InaC-Sup | |
| APOA1- | GCGCCAGAAG | InaGs;omeCs;InaGs;omeCs;InaCs;omeAs;InaGs;omeAs; | 186508 |
| 37 m01 | CTGCA | InaAs;omeGs;InaCs;omeUs;InaGs;omeCs;InaA-Sup | |
| APOA1- | CCAGAAGCTGC | InaCs;omeCs;InaAs;omeGs;InaAs;omeAs;InaGs;omeCs; | 186511 |
| 38 m01 | ACGA | InaTs;omeGs;InaCs;omeAs;InaCs;omeGs;InaA-Sup | |
| APOA1- | AGCTGCACGAG | InaAs;omeGs;InaCs;omeUs;InaGs;omeCs;InaAs;omeCs; | 186516 |
| 39 m01 | CTGC | InaGs;omeAs;InaGs;omeCs;InaTs;omeGs;InaC-Sup | |
| APOA1- | CTGCACGAGCT | InaCs;omeUs;InaGs;omeCs;InaAs;omeCs;InaGs;omeAs; | 186518 |
| 40 m01 | GCAA | InaGs;omeCs;InaTs;omeGs;InaCs;omeAs;InaA-Sup | |
| APOA1- | TGCACGAGCTG | InaTs;omeGs;InaCs;omeAs;InaCs;omeGs;InaAs;omeGs; | 186519 |
| 41 m01 | CAAG | InaCs;omeUs;InaGs;omeCs;InaAs;omeAs;InaG-Sup | |
| APOA1- | GAGGAGATGC | InaGs;omeAs;InaGs;omeGs;InaAs;omeGs;InaAs;omeU | 186554 |
| 42 m01 | GCGAC | s;InaGs;omeCs;InaGs;omeCs;InaGs;omeAs;InaC-Sup | |
| APOA1- | CTGTTGTAGCT | InaCs;omeUs;InaGs;omeUs;InaTs;omeGs;InaTs;omeAs; | 115212 |
| 43 m01 | CTGG | InaGs;omeCs;InaTs;omeCs;InaTs;omeGs;InaG-Sup | |
| APOA1- | AAGGTCTCCCA | InaAs;omeAs;InaGs;omeGs;InaTs;omeCs;InaTs;omeCs; | 115624 |
| 44 m01 | ATAG | InaCs;omeCs;InaAs;omeAs;InaTs;omeAs;InaG-Sup | |
| APOA1- | CAAGAAGCTGC | InaCs;omeAs;InaAs;omeGs;InaAs;omeAs;InaGs;omeCs; | 116345 |
| 45 m01 | TATG | InaTs;omeGs;InaCs;omeUs;InaAs;omeUs;InaG-Sup | |
| APOA1- | CTCCCTCTGTCC | InaCs;omeUs;InaCs;omeCs;InaCs;omeUs;InaCs;omeUs; | 117021 |
| 46 m01 | TAC | InaGs;omeUs;InaCs;omeCs;InaTs;omeAs;InaC-Sup | |
| APOA1- | TCCCCAGAACC | InaTs;omeCs;InaCs;omeCs;InaCs;omeAs;InaGs;omeAs; | 117158 |
| 47 m01 | GGCT | InaAs;omeCs;InaCs;omeGs;InaGs;omeCs;InaT-Sup | |
| APOA1- | AGCGTGCAGG | InaAs;omeGs;InaCs;omeGs;InaTs;omeGs;InaCs;omeAs; | 118348 |
| 48 m01 | AGTCC | InaGs;omeGs;InaAs;omeGs;InaTs;omeCs;InaC-Sup | |
| APOA1- | CAGCGTGCAG | InaCs;omeAs;InaGs;omeCs;InaGs;omeUs;InaGs;omeC | 118349 |
| 49 m01 | GAGTC | s;InaAs;omeGs;InaGs;omeAs;InaGs;omeUs;InaC-Sup | |
| APOA1- | AGCAGCGTGCA | InaAs;omeGs;InaCs;omeAs;InaGs;omeCs;InaGs;omeU | 118351 |
| 50 m01 | GGAG | s;InaGs;omeCs;InaAs;omeGs;InaGs;omeAs;InaG-Sup | |
| APOA1- | CTTCTCGCAGT | InaCs;InaTs;InaTs;d5mCs;dTs;d5mCs;dGs;d5mCs;dAs; | 187502 |
| 51 m01 | CTCT | dGs;dTs;d5mCs;InaTs;InaCs;InaT-Sup | |
| APOA1- | CCGCAGCTTTC | InaCs;InaCs;InaGs;d5mCs;dAs;dGs;d5mCs;dTs;dTs;dTs; | 187503 |
| 52 m01 | ATCC | d5mCs;dAs;InaTs;InaCs;InaC-Sup | |
| APOA1- | ACCGCAGCTTT | InaAs;InaCs;InaCs;dGs;d5mCs;dAs;dGs;d5mCs;dTs;dTs; | 187504 |
| 53 m01 | CATC | dTs;d5mCs;InaAs;InaTs;InaC-Sup | |
| APOA1- | CACCGCAGCTT | InaCs;InaAs;InaCs;d5mCs;dGs;d5mCs;dAs;dGs;d5mCs; | 187505 |
| 54 m01 | TCAT | dTs;dTs;dTs; InaCs; InaAs;I naT-Sup | |
| APOA1- | GAAATGCCGA | InaGs;I naAs; InaAs;dAs;dTs;dGs;d5mCs;d5mCs;dGs;dA | 187506 |
| 55 m01 | GCCTG | s;dGs;d5mCs;InaCs;InaTs;InaG-Sup | |
| APOA1- | CTTCACTCGAT | InaCs; InaTs;I naTs;d5mCs;dAs;d5mCs;dTs;d5mCs;dGs; | 187507 |
| 56 m01 | CCCA | dAs;dTs;d5mCs;InaCs;InaCs;InaA-Sup | |
| APOA1- | GTCCTTCACTC | InaGs;I naTs; InaCs;d5mCs;dTs;dTs;d5mCs;dAs;d5mCs; | 187508 |
| 57 m01 | GATC | dTs;d5mCs;dGs;InaAs;InaTs;InaC-Sup | |
| APOA1- | GGTCCTTCACT | InaGs;I naGs;I naTs;d5mCs;d5mCs;dTs;dTs;d5mCs;dAs; | 187509 |
| 58 m01 | CGAT | d5mCs;dTs;d5mCs;InaGs;InaAs;InaT-Sup | |
| APOA1- | GCCGCTGTCTT | InaGs;InaCs;InaCs;dGs;d5mCs;dTs;dGs;dTs;d5mCs;dTs; | 187510 |
| 59 m01 | TGAG | dTs;dTs;InaGs;InaAs;InaG-Sup | |
| APOA1- | CATAGTCTCTG | InaCs; InaAs;I naTs;dAs;dGs;dTs;d5mCs;dTs;d5mCs;dTs; | 187511 |
| 60 m01 | CCGC | dGs;d5mCs;InaCs;InaGs;InaC-Sup | |
| APOA1- | GCGGAGCCTTC | InaGs;InaCs;InaGs;dGs;dAs;dGs;d5mCs;d5mCs;dTs;dT | 187512 |
| 61 m01 | AAAC | s;d5mCs;dAs;InaAs;InaAs;InaC-Sup | |
| APOA1- | AAGTCGTCCAG | InaAs; InaAs;I naGs;dTs;d5mCs;dGs;dTs;d5mCs;d5mCs; | 187513 |
| 62 m01 | GTAG | dAs;dGs;dGs;InaTs;InaAs;InaG-Sup | |
| APOA1- | CTCTTGCAGCT | InaCs; InaTs;I naCs;dTs;dTs;dGs;d5mCs;dAs;dGs;d5mCs; | 187514 |
| 63 m01 | CGTG | dTs;d5mCs;InaGs;InaTs;InaG-Sup | |
| APOA1- | GTCGCGCATCT | InaGs;I naTs; InaCs;dGs;d5mCs;dGs;d5mCs;dAs;dTs;d5 | 187515 |
| 64 m01 | CCTC | mCs;dTs;d5mCs;InaCs;InaTs;InaC-Sup | |
| APOA1- | CAGCGCGTCCA | InaCs;InaAs;InaGs;d5mCs;dGs;d5mCs;dGs;dTs;d5mCs; | 187516 |
| 65 m01 | CATG | d5mCs;dAs;d5mCs;InaAs;InaTs;InaG-Sup | |
| APOA1- | GCTCGTCGCTG | InaGs;InaCs;InaTs;d5mCs;dGs;dTs;d5mCs;dGs;d5mCs; | 187517 |
| 66 m01 | TAGG | dTs;dGs;dTs;InaAs;InaGs;InaG-Sup | |
| APOA1- | CCGCCGTTCTC | InaCs;InaCs;InaGs;d5mCs;d5mCs;dGs;dTs;dTs;d5mCs; | 187518 |
| 67 m01 | CTTG | dTs;d5mCs;d5mCs;InaTs;InaTs;InaG-Sup | |
| APOA1- | CTTGGCGTGGT | InaCs;InaTs;InaTs;dGs;dGs;d5mCs;dGs;dTs;dGs;dGs;d | 187519 |
| 68 m01 | ACTC | Ts;dAs;InaCs;InaTs;InaC-Sup | |
| APOA1- | CAGATGCTCGG | InaCs; InaAs;I naGs;dAs;dTs;dGs;d5mCs;dTs;d5mCs;dG | 187520 |
| 69 m01 | TGGC | s;dGs;dTs;InaGs;InaGs;InaC-Sup | |
| APOA1- | GTGTACTCCTC | InaGs;I naTs; InaGs;dTs;dAs;d5mCs;dTs;d5mCs;d5mCs; | 187521 |
| 70 m01 | GAGA | dTs;d5mCs;dGs;InaAs;InaGs;InaA-Sup | |

### BRIEF DESCRIPTION OF THE SEQUENCE LISTING

| SEQ ID | Chrom | Gene | Chr. Start | Chr. End | Strand |
|---|---|---|---|---|---|
| 1 | chr11 | APOA1 | 116694468 | 116720338 | − |
| 2 | chr11 | APOA1 | 116694468 | 116720338 | + |
| 3 | chr4 | Abca1 | 53031660 | 53184767 | − |
| 4 | chr4 | Abca1 | 53031660 | 53184767 | + |
| 5 | chr9 | ABCA1 | 107531283 | 107702527 | − |
| 6 | chr9 | ABCA1 | 107531283 | 107702527 | + |
| 7 | chr9 | Apoa1 | 46024712 | 46050549 | + |
| 8 | chr9 | Apoa1 | 46024712 | 46050549 | − |
| 9 | chr11 | APOA1 | 116703452 | 116703490 | − |
| 10 | chr11 | APOA1 | 116716006 | 116716043 | − |
| 11 | chr9 | ABCA1 | 107544853 | 107544898 | − |
| 12 | chr9 | ABCA1 | 107545317 | 107545373 | − |
| 13 | chr9 | ABCA1 | 107549175 | 107549221 | − |
| 14 | chr9 | ABCA1 | 107550274 | 107550320 | − |
| 15 | chr9 | ABCA1 | 107550704 | 107550746 | − |
| 16 | chr9 | ABCA1 | 107550769 | 107550815 | − |
| 17 | chr9 | ABCA1 | 107553424 | 107553449 | − |
| 18 | chr9 | ABCA1 | 107555135 | 107555180 | − |
| 19 | chr9 | ABCA1 | 107559478 | 107559514 | − |
| 20 | chr9 | ABCA1 | 107562144 | 107562189 | − |
| 21 | chr9 | ABCA1 | 107562811 | 107562856 | − |
| 22 | chr9 | ABCA1 | 107564383 | 107564429 | − |
| 23 | chr9 | ABCA1 | 107564542 | 107564589 | − |
| 24 | chr9 | ABCA1 | 107565573 | 107565597 | − |
| 25 | chr9 | ABCA1 | 107566955 | 107566997 | − |
| 26 | chr9 | ABCA1 | 107567799 | 107567822 | − |
| 27 | chr9 | ABCA1 | 107568594 | 107568642 | − |
| 28 | chr9 | ABCA1 | 107570966 | 107571012 | − |
| 29 | chr9 | ABCA1 | 107571761 | 107571807 | − |
| 30 | chr9 | ABCA1 | 107572492 | 107572538 | − |
| 31 | chr9 | ABCA1 | 107573100 | 107573151 | − |
| 32 | chr9 | ABCA1 | 107574024 | 107574054 | − |
| 33 | chr9 | ABCA1 | 107574852 | 107574906 | − |
| 34 | chr9 | ABCA1 | 107574906 | 107574968 | − |
| 35 | chr9 | ABCA1 | 107576399 | 107576466 | − |
| 36 | chr9 | ABCA1 | 107576708 | 107576754 | − |
| 37 | chr9 | ABCA1 | 107578270 | 107578349 | − |
| 38 | chr9 | ABCA1 | 107578369 | 107578447 | − |
| 39 | chr9 | ABCA1 | 107582257 | 107582303 | − |
| 40 | chr9 | ABCA1 | 107583704 | 107583756 | − |
| 41 | chr9 | ABCA1 | 107584821 | 107584867 | − |
| 42 | chr9 | ABCA1 | 107590239 | 107590277 | − |
| 43 | chr9 | ABCA1 | 107590789 | 107590834 | − |
| 44 | chr9 | ABCA1 | 107591342 | 107591392 | − |
| 45 | chr9 | ABCA1 | 107593256 | 107593298 | − |
| 46 | chr9 | ABCA1 | 107593396 | 107593433 | − |
| 47 | chr9 | ABCA1 | 107593922 | 107593967 | − |
| 48 | chr9 | ABCA1 | 107594977 | 107595047 | − |
| 49 | chr9 | ABCA1 | 107596375 | 107596423 | − |
| 50 | chr9 | ABCA1 | 107597784 | 107597829 | − |
| 51 | chr9 | ABCA1 | 107597907 | 107597985 | − |
| 52 | chr9 | ABCA1 | 107602215 | 107602260 | − |
| 53 | chr9 | ABCA1 | 107602653 | 107602701 | − |
| 54 | chr9 | ABCA1 | 107613685 | 107613749 | − |
| 55 | chr9 | ABCA1 | 107615130 | 107615165 | − |
| 56 | chr9 | ABCA1 | 107620268 | 107620352 | − |
| 57 | chr9 | ABCA1 | 107620400 | 107620445 | − |
| 58 | chr9 | ABCA1 | 107624149 | 107624175 | − |
| 59 | chr9 | ABCA1 | 107625349 | 107625393 | − |
| 60 | chr9 | ABCA1 | 107632152 | 107632259 | − |
| 61 | chr9 | ABCA1 | 107640145 | 107640188 | − |
| 62 | chr9 | ABCA1 | 107648733 | 107648779 | − |
| 63 | chr9 | ABCA1 | 107651606 | 107651651 | − |
| 64 | chr9 | ABCA1 | 107651838 | 107651884 | − |
| 65 | chr9 | ABCA1 | 107654768 | 107654818 | − |
| 66 | chr9 | ABCA1 | 107656823 | 107656846 | − |
| 67 | chr9 | ABCA1 | 107663411 | 107663449 | − |
| 68 | chr9 | ABCA1 | 107664297 | 107664344 | − |
| 69 | chr9 | ABCA1 | 107666346 | 107666399 | − |
| 70 | chr9 | ABCA1 | 107666418 | 107666515 | − |
| 71 | chr9 | ABCA1 | 107669296 | 107669353 | − |
| 72 | chr9 | ABCA1 | 107669453 | 107669501 | − |
| 73 | chr9 | ABCA1 | 107669654 | 107669754 | − |
| 74 | chr9 | ABCA1 | 107669789 | 107669837 | − |
| 75 | chr9 | ABCA1 | 107688863 | 107688904 | − |
| 76 | chr9 | ABCA1 | 107689641 | 107689696 | − |
| 77 | chr9 | ABCA1 | 107689892 | 107689938 | − |
| 78 | chr9 | ABCA1 | 107690078 | 107690126 | − |
| 79 | chr9 | ABCA1 | 107690345 | 107690386 | − |
| 80 | chr11 | APOA1 | 116701452 | 116705490 | − |
| 81 | chr11 | ABCA1 | 116714006 | 116718043 | − |
| 82 | chr9 | ABCA1 | 107542853 | 107546898 | − |
| 83 | chr9 | ABCA1 | 107543317 | 107547373 | − |
| 84 | chr9 | ABCA1 | 107547175 | 107551221 | − |
| 85 | chr9 | ABCA1 | 107548274 | 107552320 | − |
| 86 | chr9 | ABCA1 | 107548704 | 107552746 | − |
| 87 | chr9 | ABCA1 | 107548769 | 107552815 | − |
| 88 | chr9 | ABCA1 | 107551424 | 107555449 | − |
| 89 | chr9 | ABCA1 | 107553135 | 107557180 | − |
| 90 | chr9 | ABCA1 | 107557478 | 107561514 | − |
| 91 | chr9 | ABCA1 | 107560144 | 107564189 | − |
| 92 | chr9 | ABCA1 | 107560811 | 107564856 | − |
| 93 | chr9 | ABCA1 | 107562383 | 107566429 | − |
| 94 | chr9 | ABCA1 | 107562542 | 107566589 | − |
| 95 | chr9 | ABCA1 | 107563573 | 107567597 | − |
| 96 | chr9 | ABCA1 | 107564955 | 107568997 | − |
| 97 | chr9 | ABCA1 | 107565799 | 107569822 | − |
| 98 | chr9 | ABCA1 | 107566594 | 107570642 | − |
| 99 | chr9 | ABCA1 | 107568966 | 107573012 | − |
| 100 | chr9 | ABCA1 | 107569761 | 107573807 | − |
| 101 | chr9 | ABCA1 | 107570492 | 107574538 | − |
| 102 | chr9 | ABCA1 | 107571100 | 107575151 | − |
| 103 | chr9 | ABCA1 | 107572024 | 107576054 | − |
| 104 | chr9 | ABCA1 | 107572852 | 107576906 | − |
| 105 | chr9 | ABCA1 | 107572906 | 107576968 | − |
| 106 | chr9 | ABCA1 | 107574399 | 107578466 | − |
| 107 | chr9 | ABCA1 | 107574708 | 107578754 | − |
| 108 | chr9 | ABCA1 | 107576270 | 107580349 | − |
| 109 | chr9 | ABCA1 | 107576369 | 107580447 | − |
| 110 | chr9 | ABCA1 | 107580257 | 107584303 | − |
| 111 | chr9 | ABCA1 | 107581704 | 107585756 | − |
| 112 | chr9 | ABCA1 | 107582821 | 107586867 | − |
| 113 | chr9 | ABCA1 | 107588239 | 107592277 | − |
| 114 | chr9 | ABCA1 | 107588789 | 107592834 | − |
| 115 | chr9 | ABCA1 | 107589342 | 107593392 | − |
| 116 | chr9 | ABCA1 | 107591256 | 107595298 | − |
| 117 | chr9 | ABCA1 | 107591396 | 107595433 | − |
| 118 | chr9 | ABCA1 | 107591922 | 107595967 | − |
| 119 | chr9 | ABCA1 | 107592977 | 107597047 | − |
| 120 | chr9 | ABCA1 | 107594375 | 107598423 | − |
| 121 | chr9 | ABCA1 | 107595784 | 107599829 | − |
| 122 | chr9 | ABCA1 | 107595907 | 107599985 | − |
| 123 | chr9 | ABCA1 | 107600215 | 107604260 | − |
| 124 | chr9 | ABCA1 | 107600653 | 107604701 | − |
| 125 | chr9 | ABCA1 | 107611685 | 107615749 | − |
| 126 | chr9 | ABCA1 | 107613130 | 107617165 | − |
| 127 | chr9 | ABCA1 | 107618268 | 107622352 | − |
| 128 | chr9 | ABCA1 | 107618400 | 107622445 | − |
| 129 | chr9 | ABCA1 | 107622149 | 107626175 | − |
| 130 | chr9 | ABCA1 | 107623349 | 107627393 | − |
| 131 | chr9 | ABCA1 | 107630152 | 107634259 | − |
| 132 | chr9 | ABCA1 | 107638145 | 107642188 | − |
| 133 | chr9 | ABCA1 | 107646733 | 107650779 | − |
| 134 | chr9 | ABCA1 | 107649606 | 107653651 | − |
| 135 | chr9 | ABCA1 | 107649838 | 107653884 | − |
| 136 | chr9 | ABCA1 | 107652768 | 107656818 | − |
| 137 | chr9 | ABCA1 | 107654823 | 107658846 | − |
| 138 | chr9 | ABCA1 | 107661411 | 107665449 | − |
| 139 | chr9 | ABCA1 | 107662297 | 107666344 | − |
| 140 | chr9 | ABCA1 | 107664346 | 107668399 | − |
| 141 | chr9 | ABCA1 | 107664418 | 107668515 | − |
| 142 | chr9 | ABCA1 | 107667296 | 107671353 | − |
| 143 | chr9 | ABCA1 | 107667453 | 107671501 | − |
| 144 | chr9 | ABCA1 | 107667654 | 107671754 | − |
| 145 | chr9 | ABCA1 | 107667789 | 107671837 | − |
| 146 | chr9 | ABCA1 | 107686863 | 107690904 | − |
| 147 | chr9 | ABCA1 | 107687641 | 107691696 | − |
| 148 | chr9 | ABCA1 | 107687892 | 107691938 | − |
| 149 | chr9 | ABCA1 | 107688078 | 107692126 | − |
| 150 | chr9 | ABCA1 | 107688345 | 107692386 | − |
| 151 | chr11 | APOA1 | 116707870 | 116707947 | + |
| 152 | chr11 | APOA1 | 116714416 | 116714458 | + |
| 153 | chr11 | APOA1 | 116714536 | 116714578 | + |
| 154 | chr11 | APOA1 | 116714762 | 116714821 | + |
| 155 | chr9 | ABCA1 | 107535234 | 107535273 | + |
| 156 | chr9 | ABCA1 | 107544880 | 107544926 | + |
| 157 | chr9 | ABCA1 | 107547830 | 107547871 | + |
| 158 | chr9 | ABCA1 | 107555512 | 107555554 | + |
| 159 | chr9 | ABCA1 | 107565561 | 107565603 | + |
| 160 | chr9 | ABCA1 | 107573103 | 107573142 | + |
| 161 | chr9 | ABCA1 | 107599184 | 107599234 | + |
| 162 | chr9 | ABCA1 | 107601126 | 107601170 | + |
| 163 | chr9 | ABCA1 | 107607774 | 107607819 | + |
| 164 | chr9 | ABCA1 | 107613720 | 107613783 | + |
| 165 | chr9 | ABCA1 | 107623957 | 107624003 | + |
| 166 | chr9 | ABCA1 | 107630025 | 107630076 | + |
| 167 | chr9 | ABCA1 | 107631197 | 107631265 | + |
| 168 | chr9 | ABCA1 | 107633948 | 107633996 | + |
| 169 | chr9 | ABCA1 | 107648816 | 107648890 | + |
| 170 | chr9 | ABCA1 | 107650500 | 107650558 | + |
| 171 | chr9 | ABCA1 | 107665550 | 107665591 | + |
| 172 | chr9 | ABCA1 | 107666033 | 107666073 | + |
| 173 | chr11 | APOA1 | 116705870 | 116709947 | + |
| 174 | chr11 | APOA1 | 116712416 | 116716458 | + |
| 175 | chr11 | APOA1 | 116712536 | 116716578 | + |
| 176 | chr11 | APOA1 | 116712762 | 116716821 | + |
| 177 | chr9 | ABCA1 | 107533234 | 107537273 | + |
| 178 | chr9 | ABCA1 | 107542880 | 107546926 | + |
| 179 | chr9 | ABCA1 | 107545830 | 107549871 | + |
| 180 | chr9 | ABCA1 | 107553512 | 107557554 | + |
| 181 | chr9 | ABCA1 | 107563561 | 107567603 | + |
| 182 | chr9 | ABCA1 | 107571103 | 107575142 | + |
| 183 | chr9 | ABCA1 | 107597184 | 107601234 | + |
| 184 | chr9 | ABCA1 | 107599126 | 107603170 | + |
| 185 | chr9 | ABCA1 | 107605774 | 107609819 | + |
| 186 | chr9 | ABCA1 | 107611720 | 107615783 | + |
| 187 | chr9 | ABCA1 | 107621957 | 107626003 | + |
| 188 | chr9 | ABCA1 | 107628025 | 107632076 | + |
| 189 | chr9 | ABCA1 | 107629197 | 107633265 | + |
| 190 | chr9 | ABCA1 | 107631948 | 107635996 | + |
| 191 | chr9 | ABCA1 | 107646816 | 107650890 | + |
| 192 | chr9 | ABCA1 | 107648500 | 107652558 | + |
| 193 | chr9 | ABCA1 | 107663550 | 107667591 | + |
| 194 | chr9 | ABCA1 | 107664033 | 107668073 | + |

### Single Strand Oligonucleotides (Antisense Strand of Target Gene)

[0209] SeqID range: 195-120357

[0210] SeqIDs w/o G Runs:

195-211, 225-291, 304-393, 410-413, 426-428, 440-471, 485-805, 819-907, 920-1059, 1074-1087, 1102-1457, 1478-1484, 1506-1575, 1601-1664, 1678-1707, 1738-1747, 1761-1779, 1793-1798, 1847-1864, 1878-1881, 1896-2022, 2048-2069, 2083-2087, 2110-2176, 2191-2193, 2208-2356, 2379-2441, 2456-2475, 2489-2515, 2543-2554, 2568-2631, 2645-2649, 2663-2759, 2774-2782, 2796-2819, 2833-2928, 2942-2999, 3005-3032, 3034-3079, 3093-3111, 3126-3191, 3205-3206, 3252-3340, 3355-3434, 3462-3582, 3596-3638, 3652-3951, 3965-3967, 3989-4002, 4018-4066, 4080-4126, 4141-4341, 4355-4535, 4549-4597, 4612-4626, 4640-4661, 4675-4702, 4715-4832, 4838-4847, 4867-4979, 4993-5124, 5138-5410, 5424-5430, 5445-5508, 5523-5524, 5539-5569, 5583-5585, 5599-5606, 5625-5628, 5643-5960, 5975-6043, 6065-6087, 6102-6245, 6259-6322, 6331-6340, 6363-6407, 6430-6433, 6452-6648, 6662-6898, 6912-6979, 6993-7038, 7052-7060, 7074-7128, 7142-7204, 7218-7224, 7238-7282, 7296-7298, 7312-7340, 7355-7366, 7380-7447, 7461-7490, 7504-7626, 7640-8113, 8127-8184, 8198-8292, 8306-8401, 8415-8450, 8464-8599, 8614-8620, 8634-8972, 8987-9619, 9657-9753, 9767-9775, 9796-9877, 9891-9903, 9917-9945, 9959-10050, 10064-10388, 10390-10449, 10463-10662, 10676-10738, 10759-10762, 10776-10904, 10919-10946, 10960-10982, 10996-11315, 11329-11334, 11348-11357, 11382-11391, 11405-11419, 11445-11471, 11486-11594, 11608-11701, 11715-11746, 11760-11761, 11775-11854, 11869-12122, 12136-12317, 12331-12564, 12578-12829, 12844-13071, 13105-13168, 13183-13193, 13207-13382, 13396-13419, 13434-13449, 13463-13470, 13484-13762, 13776-13973, 13987-14023, 14037-14038, 14052-14213, 14232-14336, 14350-14353, 14367-14407, 14421-14436, 14450-14533, 14558-14607, 14622-14624, 14640-14871, 14886-15023, 15033-15055, 15065-15083, 15096-15166, 15174-15195, 15209-15322, 15337-15354, 15368-15399, 15413-15537, 15552-15577, 15591-15813, 15828-15900, 15914-16035, 16051-16144, 16158-16186, 16211-16535, 16572-16703, 16718-16765, 16780-16868, 16895-17140, 17155-17301, 17315-17404, 17418-17578, 17592-17702, 17716-17777, 17791-18138, 18152-18255, 18269-18320, 18335-18348, 18362-18470, 18484-18583, 18598-18637, 18642-18656, 18671-18696, 18706-18708, 18730-18747, 18761-18775, 18792-18805, 18814-19044, 19058-19229, 19243-19346, 19360-19378, 19392-19516, 19539-19667, 19681-19733, 19748-19971, 19983-20019, 20033-20059, 20071-20191, 20205-20310, 20317-20322, 20344-20521, 20535-20649, 20663-20945, 20954-20956, 20970-20980, 20994-21046, 21051-21097, 21112-21149, 21157-21167, 21189-21231, 21246-21345, 21359-21739, 21766-22118, 22132-22260, 22281-22323, 22337-22403, 22421-23228, 23242-23268, 23293-23358, 23372-23450, 23465-23600, 23603-23733, 23748-23955, 23969-24132, 24143-24179, 24193-24208, 24218-24291, 24307-24310, 24324-24359, 24373-24425, 24439-24467, 24482-24506, 24520-24522, 24536-24554, 24568-24629, 24644-24670, 24684-24781, 24795-24890, 24904-24983, 24997-25037, 25051-25077, 25091-25163, 25177-25483, 25497-25554, 25569-25651, 25676-25778, 25794-25806, 25821-25832, 25846-25990, 26004-26085, 26093-26111, 26119-26156, 26170-26213, 26220-26231, 26244-26288, 26311-26368, 26383-26404, 26419-26585, 26599-26640, 26654-26693, 26708, 26722-26727, 26741-26762, 26777-26871, 26885-27097, 27111-27116, 27130-27277, 27301-27454, 27468-27638, 27652-27717, 27732-27758, 27772-27780, 27794-27833, 27850-27912, 27926-28007, 28021-28201, 28215-28337, 28351-28551, 28565-28595, 28609-28621, 28635-28685, 28699-28724, 28739-28843, 28857-28888, 28902-28920, 28935-28966, 28981-29109, 29135-29202, 29219-29235, 29249-29409, 29425-29437, 29453-29489, 29504-29513, 29527-29532, 29547-29562, 29578-29613, 29627-29682, 29696-29808, 29822-29826, 29840-29889, 29904-29984, 29998-30007, 30022, 30055-30082, 30110-30191, 30205-30316, 30330-30362, 30376-30486, 30501-30541, 30555-30561, 30575-30592, 30606-30665, 30680-30951, 30975-30990, 31004-31045, 31059-31075, 31097-31340, 31362-31384, 31398-31404, 31419-31427, 31441-31474, 31488-31523, 31538-31546, 31560-31579, 31595-31600, 31627-31628, 31644-31658, 31672-31677, 31705-31720, 31734-31824, 31838-31867, 31892-32018, 32033-32084, 32103-32197, 32211-32321, 32335-32550, 32564-32618, 32632-32677, 32691-32728, 32742-32779, 32794, 32809-32834, 32859-32860, 32874-32877, 32891-33000, 33014-33088, 33114-33136, 33166-33205, 33219-33240, 33254-33347, 33362-33409, 33423-33434, 33458, 33496-33551, 33584-33609, 33623-33630, 33669-33710, 33724-33758, 33773-33883, 33897-33935, 33949-33977, 33991-34010, 34025-34075, 34090-34116, 34122-34180, 34185-34218, 34239-34243, 34258-34354, 34368-34390, 34404-34444, 34458-34574, 34608-34815, 34829-34840, 34858-34859, 34873-34893, 34907-34945, 34959-35018, 35032-35090, 35104-35105, 35119-35207, 35221-35225, 35240-35318, 35332-35397, 35418-35433, 35447-35500, 35514-35576, 35596-35645, 35659-35675, 35689-35701, 35715-36037, 36051-36066, 36080-36118, 36133-36178, 36192-36770, 36785-36820, 36834-36869, 36892-37186, 37196-37244, 37250-37258, 37271-37481, 37496-37556, 37579-37690, 37704-37819, 37833-37887, 37901-38242, 38254-38350, 38364, 38373-38463, 38471-38655, 38669-38731, 38746-38865, 38879-38975, 38991-39201, 39215-39253, 39260-39338, 39343-39356, 39379-39605, 39620-40019, 40046-40144, 40158-40380, 40394-40798, 40812-41009, 41023-41051, 41065-41172, 41186-41298, 41313-41485, 41499-41516, 41548-41627, 41639-41856, 41867-41891, 41905-41922, 41930-41958, 41972-42010, 42024-42190, 42204-42268, 42282-42323, 42348-42386, 42400-42503, 42517-42631, 42646-42976, 42990-43295, 43309-43393, 43407-43654, 43668-43766, 43780-43879, 43893-44073, 44087-44099, 44114-44127, 44141-44485, 44499-44741, 44755-44791, 44815-44929, 44943-45073, 45087-45127, 45141-45149, 45163-45168, 45183-45582, 45596-45701, 45715-45817, 45831-45875, 45889-46097, 46111-46120, 46134-46150, 46164-46250, 46264-46731, 46745-46964, 46978-46996, 47010-47348, 47362-47491, 47495-47611, 47622-47637, 47644-47776, 47790-48170, 48184-48524, 48539-48623, 48639-48661, 48675-48683, 48697-48814, 48839-48851, 48865-49108, 49122-49215, 49232-49392, 49401-49420, 49423-49425, 49427-49463, 49486-49498, 49515-49592, 49606-49752, 49766-49767, 49787-49936, 49950-49978, 49992-50069, 50139-50216, 50230-50257, 50271-50318, 50332-50395, 50437-50457, 50471-50487, 50509-50551, 50566-51197, 51223-51231, 51246-51311, 51325-51392, 51416-51434, 51448-51455, 51470-51480, 51494-51741, 51755-51756, 51772-51775, 51789-51880, 51894-51936, 51950-52041, 52049-52076, 52089-52140, 52145-52155, 52169-52196, 52209-52242, 52250-52252, 52266-52271, 52283-52291, 52304-52344, 52359-52487, 52501-52600, 52614-52700, 52746-52807, 52821-52855, 52870-52999, 53022-53088, 53103-53148, 53166-53207, 53221-53427, 53441-53474, 53488-53816, 53831-53940, 53954-53975, 53989-54103, 54118-54218, 54232-54267, 54281-54317, 54331-54845, 54859-54880, 54890-54961, 54973-55025, 55047-55081, 55097-55178, 55192, 55216-55234, 55248-55279, 55293-55313, 55328-55340, 55368-55460, 55474-55527, 55541-55698, 55718-55959, 55973-56101, 56116-56158, 56172-56440, 56454-56532, 56538-56563, 56577-56582, 56596-56737, 56751-56803, 56817-56999, 57013-57259, 57273-57290, 57304-57511, 57525-57647, 57661-57699, 57713-57918, 57932-58044, 58058-58154, 58168-58265, 58280-58347, 58361-58600, 58602-58625, 58639-58773, 58787-58791, 58806-58915, 58935-59176, 59187-59210, 59220-59262, 59276-59305, 59317-59341, 59371-59384, 59398-59525, 59539-59555, 59569-59971, 59986-60373, 60389-60495, 60509-60510, 60524-60540, 60561-60574, 60589-60629, 60644-60847, 60861-60985, 60999-61007, 61032-61352, 61367-61419, 61456-61466, 61480-61496, 61510-61512, 61527-61549, 61563-61602, 61616-61860, 61874-61948, 61967-62008, 62022-62073, 62087-62219, 62233-62311, 62325-62332, 62346-62488, 62502-62565, 62579-62585, 62611-62732, 62746-62848, 62862-63106, 63130-63283, 63297-63313, 63327-63354, 63369-63381, 63396-63464, 63479-63688, 63712-63818, 63838-63886, 63900-64054, 64068-64069, 64083-64123, 64137-64178, 64198-64363, 64384-64481, 64495-64506, 64535-64541, 64556-64770, 64800-64821, 64835-64912, 64926-64935, 64950-65160, 65175-65183, 65197-65330, 65344-65393, 65407-65491, 65505-65527, 65541-65546, 65569-65643, 65657-65729, 65747-65903, 65917-65973, 65987-66110, 66124-66197, 66211-66276, 66290-66679, 66701-66838, 66852-66894, 66911-66979, 66994-67181, 67192-67217, 67220-67245, 67261-67402, 67416-67438, 67452-67461, 67499-67514, 67528-67538, 67552-67581, 67595, 67609-67611, 67636-67677, 67691-67725, 67739-67771, 67786-67793, 67808-67864, 67878-67888, 67902-68088, 68102-68144, 68158-68162, 68183-68206, 68220-68260, 68274-68323, 68337, 68364-68394, 68417-68437, 68463-68590, 68604-68607, 68629-68846, 68861-69004, 69018-69140, 69154-69266, 69281-69286, 69300-69328, 69342-69428, 69442-69458, 69472-69527, 69541-69659, 69674-69688, 69716-69746, 69769-69779, 69793-70099, 70113-70129, 70143-70181, 70195-70213, 70227-70304, 70318-70424, 70438-70624, 70638-70704, 70718-70755, 70774-70796, 70816-70946, 70962-71125, 71139-71159, 71173-71254, 71268-71348, 71362-71386, 71400-71424, 71438-71521, 71535-71572, 71605-71607, 71640-71642, 71656-71719, 71738-71823, 71837, 71852-71874, 71888-71926, 71940-72073, 72087-72222, 72237-72334, 72346-72362, 72376-72425, 72434-72712, 72727-73110, 73124-73207, 73221-73239, 73241-73261, 73268-73307, 73318-73420, 73434-73705, 73719-73881, 73895-73929, 73943-74038, 74052-74177, 74191-74318, 74332-74358, 74372-74415, 74421-74453, 74465-74706, 74721-75089, 75103-75313, 75327-75500, 75514-75775, 75789-76256, 76270-76360, 76374-76662, 76676-76706, 76720-76723, 76737-76842, 76856-76882, 76896-76944, 76959-76984, 77007-77045, 77059-77071, 77085, 77100-77104, 77118-77158, 77172-77263, 77277-77308, 77322-77410, 77424-77612, 77628-77809, 77823-77868, 77892-77971, 77985-78128, 78142-78168, 78182-78349, 78363-78382, 78396-78400, 78427, 78441-78446, 78466-78563, 78577-78765, 78785-78936, 78952-78991, 79005-79417, 79431-79645, 79659-79664, 79683-79704, 79719-79861, 79876-80077, 80081-80106, 80109-80209, 80233-80394, 80410-80424, 80438-80525, 80551-80627, 80641-80812, 80826-80876, 80891-81000, 81014-81345, 81359-81362, 81376-81396, 81419-81454, 81468-81512, 81528-81797, 81816-81884, 81909-82351, 82359-82386, 82397-82827, 82841-82973, 82988-83090, 83104-83443, 83457-83503, 83517-83694, 83699-83726, 83735-83752, 83754-83804, 83818-83885, 83899-83978, 83992-84284, 84298-84375, 84398-84506, 84536-84633, 84647-84747, 84761-84794, 84809, 84824-84840, 84866-84922, 84952-84958, 84972-85068, 85082-85156, 85170-85233, 85248-85286, 85300-85650, 85665-85698, 85711-85820, 85834-85863, 85874-85909, 85912-85930, 85940-85941, 85951-86148, 86162-86189, 86203-86251, 86265-86333, 86348-86376, 86390-86564, 86579-86924, 86938-87021, 87035-87167, 87181-87307, 87321-87341, 87356-87907, 87921-88039, 88054-88211, 88226-88408, 88422-88522, 88536-88540, 88555-88633, 88647-89019, 89033-89290, 89304-89305, 89319-89356, 89370, 89384-89420, 89434-89528, 89543-89987, 90008-90025, 90043-90119, 90133-90160, 90188-90657, 90671-90761, 90775-90841, 90855-90913, 90927-90998, 91011-91021, 91036-91255, 91269-91571, 91586-91601, 91616-91631, 91645-91669, 91683-91722, 91736-91864, 91893-91944, 91958-91976, 91984-92032, 92046-92243, 92257-92271, 92285-92319, 92364-92412, 92426-92474, 92488-92551, 92565-92599, 92627-93394, 93408-93503, 93517-93535, 93549-93699, 93713-93722, 93736-93841, 93873-93960, 93976-94149, 94163-94190, 94204-94292, 94306-94469, 94483-94968, 94982-94992, 95006-95091, 95105-95175, 95180-95211, 95225-95260, 95264-95278, 95292-95452, 95466-95578, 95592-96198, 96213-96307, 96321-96359, 96375-96449, 96463-96503, 96517-96690, 96704-96731, 96745-96786, 96797-97024, 97038-97040, 97054-97298, 97312-97413, 97427-97570, 97596-97709, 97723-97855, 97869-98079, 98093-98138, 98152-98154, 98168-98380, 98394, 98415-98506, 98520-98786, 98802-98833, 98847-98877, 98891-98983, 98997-99019, 99034-99090, 99104-99259, 99274-99363, 99377-99585, 99602-99629, 99643-99647, 99668-99678, 99692-99882, 99896-100005, 100021-100079, 100093-100115, 100129-100530, 100544-100646, 100660-100689, 100703-100862, 100876-100888, 100902-101003, 101017-101140, 101154-101252, 101280-101555, 101576-101728, 101734-101754, 101764-101781, 101793-101836, 101850-101899, 101913-102467, 102481-102620, 102634-102636, 102650-102821, 102835-103080, 103094-103290, 103304-103319, 103334-103608, 103622-103801, 103816-103909, 103923-104155, 104169-104663, 104677-104799, 104813-104816, 104830-105062, 105076-105136, 105152-105184, 105209-105237, 105251-105598, 105612-106307, 106321-106528, 106542-106617, 106640-106644, 106658-106753, 106767-107091, 107107-107135, 107150-107475, 107503-108015, 108029-108054, 108068-108581, 108597-108741, 108762-108952, 108967-108971, 108984-109048, 109059-109080, 109093-109348, 109362-109369, 109383-109384, 109404-109487, 109509-109547, 109562-109659, 109683-109693, 109714-109754, 109768-109781, 109801-109923, 109936-109971, 109986-110087, 110101-110169, 110183-110214, 110242-110456, 110467-110487, 110511-110528, 110541-110592, 110600-110604, 110623-110711, 110736-110779, 110793-110953, 110967-111004, 111019-111062, 111076-111127, 111141-111164, 111178-111313, 111333-111424, 111440-111442, 111465-111518, 111532-111605, 111620-111667, 111681-111688, 111729-111732, 111746-111775, 111790-112135, 112149-112322, 112336-112450, 112464-112482, 112496-112500, 112514-112829, 112847-112856, 112880-112997, 113013-113172, 113187-113238, 113252-113456, 113470-113482, 113516-113739, 113754-113908, 113922-113942, 113964-113995, 114009-114029, 114044-114079, 114101-114116, 114130-114133, 114147-114149, 114173-114214, 114228-114259, 114284-114339, 114353-114713, 114717-114765, 114776-114798, 114820-114982, 115009-115021, 115036-115065, 115084-115093, 115122, 115151-115161, 115175-115275, 115301-115365, 115379-115451, 115465-115532, 115546-115641, 115670-115676, 115698-115900, 115914-115915, 115929-116188, 116211-116263, 116281-116285, 116311-116326, 116340-116425, 116439-116451, 116465-116468, 116482-116563, 116577-116632, 116652-116703, 116731-116749, 116763-116774, 116788-116796, 116825-116840, 116855-116857, 116871-116891, 116906-117139, 117154-117297, 117312-117357, 117406-117535, 117549-117625, 117659-117677, 117691-117763, 117766-117773, 117788-117819, 117827-117854, 117860-117867, 117881-118080, 118094-118146, 118160-118167, 118181-118202, 118216-118393, 118407-118486, 118489-118563, 118577-118693, 118704-118731, 118747-118846, 118860-118919, 118934-118988, 119014-119041, 119048-119090, 119095-119378, 119392-119407, 119421-119448, 119462-119544, 119558-119560, 119596-119600, 119616-119674, 119688-119697, 119699-119715, 119722-119725, 119733-119779, 119787, 119792, 119794-119805, 119809-119823, 119826-119842, 119847-119850, 119852-119855, 119865-119871, 119876, 119878-119909, 119911-119912, 119921-119928, 119931, 119938-119943, 119946-119959, 119961-119972, 119974-119976, 119983-119990, 120004-120019, 120029-120062, 120066-120071, 120073-120101, 120111-120119, 120127-120141, 120144-120145, 120150-120180, 120182-120187, 120191-120231, 120238-120240, 120242-120263, 120270-120316, 120319-120350, 120354-120357

### SeqIDs w/o miR Seeds:

[0211] 195-196, 201-203, 205, 208-209, 214, 216, 218-219, 221-223, 225, 227, 229-235, 238-239, 241-243, 245, 248, 252-253, 255, 260, 262-263, 268, 270-274, 277, 280, 282-283, 287, 290, 294-295, 298-300, 302-303, 305-308, 310, 312-317, 321, 323-331, 333, 337, 340-343, 346-352, 354-355, 358-363, 365, 370-372, 374-383, 385-386, 388, 390-392, 396, 399, 402, 412-413, 418, 420-421, 424-426, 431, 433-438, 441-445, 447, 450, 452-454, 457, 459, 461, 464, 466-468, 472, 475, 481-491, 493, 496, 499, 501, 504-508, 511, 516-518, 523, 527, 529, 533, 542, 544-548, 552-554, 556-560, 562-567, 570, 573-574, 576, 578-581, 583, 591, 593, 597-602, 604-610, 612-617, 621, 624, 626, 628, 630, 634, 636, 642-643, 646, 648-649, 652-654, 656-657, 659, 662-663, 665, 667-668, 670-673, 677-678, 680-683, 687-688, 690, 692, 695-696, 701-703, 705-707, 711-712, 714, 717-719, 724, 727, 729-734, 736, 738, 741-745, 747, 752-753, 755-763, 765-767, 769-771, 774, 777-780, 782, 785, 787, 789, 791, 793-795, 797-798, 800-803, 805-806, 809, 812, 814, 816-818, 821-822, 824-825, 827, 830-831, 833-837, 839-840, 843-844, 846, 848-850, 855-857, 862-868, 872, 877-881, 883-888, 891, 893-894, 896, 898-900, 902, 904-905, 907-908, 911, 913, 921-926, 928-930, 932-933, 936-937, 939, 943, 945, 947-951, 954-955, 958-959, 963-964, 966-980, 982-984, 987-1001, 1003-1012, 1014-1015, 1017-1023, 1027-1028, 1030, 1033, 1035, 1037, 1039-1045, 1049, 1052-1057, 1061, 1065, 1067, 1069-1070, 1072-1073, 1075, 1077, 1079-1080, 1082, 1087, 1091, 1093, 1099-1100, 1103-1104, 1106-1119, 1121-1126, 1131, 1135-1136, 1139-1140, 1142, 1144-1149, 1151-1155, 1159-1160, 1163-1164, 1167, 1174, 1178-1182, 1184, 1187-1196, 1199-1201, 1205-1209, 1211, 1213, 1216, 1222-1225, 1229-1234, 1236, 1238-1240, 1242, 1244-1249, 1251, 1255, 1257, 1260-1262, 1266-1267, 1270-1275, 1278, 1280-1282, 1284-1286, 1288, 1290-1291, 1293-1296, 1298, 1300-1301, 1304, 1306-1308, 1319-1321, 1323-1331, 1338-1341, 1343, 1345-1349, 1353-1355, 1357-1358, 1360, 1364, 1366-1369, 1371-1373, 1375, 1377-1379, 1381-1382, 1384, 1386-1390, 1393, 1397, 1401-1410, 1412-1413, 1415-1419, 1421-1429, 1435, 1437, 1439-1440, 1443-1444, 1447-1453, 1455-1457, 1461, 1463-1465, 1468, 1471-1472, 1474, 1476, 1478-1480, 1482, 1488, 1493, 1500, 1502, 1504, 1508-1509, 1512-1524, 1526, 1528, 1531-1535, 1538, 1540-1542, 1544-1546, 1548, 1550-1552, 1555, 1557-1558, 1560-1561, 1563, 1565, 1568, 1570-1575, 1577, 1582, 1584-1586, 1588, 1592-1593, 1595-1597, 1599-1601, 1603-1612, 1614-1623, 1625-1629, 1631, 1634-1635, 1637-1638, 1641-1642, 1644-1646, 1648, 1651-1656, 1662, 1666, 1668-1670, 1672, 1674, 1676-1680, 1682-1688, 1691, 1694-1695, 1697, 1700-1703, 1705, 1707, 1712-1713, 1715, 1720-1722, 1724, 1727-1729, 1731, 1733-1735, 1737-1740, 1742-1745, 1750-1751, 1753-1755, 1757-1759, 1761, 1763, 1765-1769, 1771, 1774-1777, 1779-1781, 1783, 1785-1786, 1790-1791, 1797-1803, 1805, 1809, 1820, 1822, 1835, 1838-1843, 1846-1849, 1851-1853, 1855-1856, 1858-1864, 1868-1869, 1871-1872, 1874-1875, 1878-1879, 1884, 1886-1888, 1891-1898, 1900-1902, 1904, 1907, 1909-1910, 1912, 1914-1916, 1918, 1920, 1923-1930, 1934-1937, 1939-1945, 1947-1950, 1952, 1955, 1958-1959, 1961, 1967-1968, 1970-1981, 1985, 1988-1990, 1992, 1995-1996, 1999, 2001-2006, 2008-2016, 2018-2020, 2022, 2025-2031, 2033-2034, 2037-2042, 2044-2052, 2054, 2056, 2059-2060, 2064, 2066-2068, 2071-2072, 2074, 2076-2077, 2080-2081, 2084-2089, 2091, 2096, 2098-2100, 2102, 2105-2110, 2112, 2117, 2120, 2122-2126, 2129, 2131, 2133, 2136-2139, 2141-2142, 2145-2150, 2158-2159, 2163, 2165, 2169, 2171-2173, 2175-2176, 2181, 2183-2185, 2187-2190, 2192, 2195, 2197, 2205, 2207, 2211-2215, 2217-2218, 2222-2224, 2226, 2229-2231, 2235-2238, 2240-2243, 2246-2247, 2249-2250, 2253-2264, 2267, 2269-2270, 2273, 2275, 2278, 2280-2283, 2286-2289, 2291-2294, 2296-2298, 2300, 2302, 2304-2308, 2310-2312, 2315, 2317-2319, 2321, 2323-2330, 2332, 2335, 2337-2343, 2345, 2348-2351, 2353-2357, 2364, 2371-2372, 2374, 2376-2378, 2380, 2382, 2386-2389, 2393-2397, 2399-2402, 2404, 2406-2407, 2409-2411, 2413, 2415-2420, 2422, 2425-2433, 2435, 2437-2438, 2441-2443, 2449-2451, 2455-2459, 2463-2465, 2467-2470, 2473-2475, 2477-2478, 2480-2487, 2489-2492, 2495-2501, 2503, 2505-2513, 2515-2516, 2518-2519, 2521-2524, 2526-2533, 2535, 2538-2539, 2542-2544, 2546, 2548-2551, 2553-2555, 2557-2558, 2560-2565, 2568-2570, 2573-2576, 2581-2583, 2585-2586, 2590, 2592-2595, 2599-2600, 2603, 2605-2608, 2610-2611, 2613-2617, 2619, 2622, 2624-2625, 2627-2629, 2639-2640, 2645-2650, 2653, 2656-2662, 2664-2665, 2667-2671, 2674-2677, 2679-2682, 2684-2691, 2696-2697, 2703-2704, 2706, 2708-2709, 2711-2712, 2714-2716, 2720-2722, 2725-2726, 2729, 2731-2734, 2737-2742, 2744-2745, 2747-2751, 2754-2759, 2764, 2766, 2770, 2773-2778, 2782, 2785-2786, 2788-2789, 2791, 2794-2796, 2798-2802, 2804-2806, 2808-2813, 2815-2816, 2818-2821, 2824-2825, 2827-2836, 2840-2843, 2845-2847, 2851, 2853, 2859-2863, 2866-2867, 2869-2870, 2872-2876, 2878-2880, 2882-2884, 2886, 2888-2890, 2892, 2898, 2902, 2907-2908, 2910-2912, 2915, 2917, 2919-2920, 2922-2923, 2927-2931, 2935-2937, 2939-2940, 2942-2945, 2947-2950, 2952-2953, 2956, 2958, 2962-2967, 2969-2976, 2978-2979, 2981-2984, 2986-2988, 2990-2991, 2994-2997, 3005-3006, 3008-3014, 3018-3019, 3021, 3025-3026, 3028-3029, 3031, 3037-3043, 3045, 3050-3055, 3058-3061, 3063-3065, 3067-3068, 3075-3076, 3078-3080, 3083-3087, 3089-3090, 3093, 3095-3097, 3100-3102, 3104, 3106-3110, 3120-3121, 3124-3125, 3127-3134, 3136-3137, 3139, 3141-3142, 3144-3145, 3148-3150, 3153, 3155, 3157-3158, 3160-3170, 3172, 3174-3178, 3180-3181, 3183, 3185-3192, 3194-3195, 3197-3199, 3201, 3204-3206, 3208-3211, 3213, 3220-3221, 3223, 3226-3230, 3237, 3243-3244, 3251, 3253-3256, 3258, 3265, 3268-3271, 3273-3275, 3277, 3280-3282, 3284, 3289-3292, 3294, 3296-3299, 3302, 3304-3305, 3307-3308, 3313-3314, 3316-3318, 3321, 3323-3325, 3327-3328, 3331-3333, 3335-3340, 3342, 3344-3348, 3351-3352, 3354, 3356, 3358, 3360, 3362-3368, 3371, 3374, 3376-3377, 3379-3380, 3383-3386, 3388-3391, 3393, 3396-3397, 3399-3404, 3406, 3411-3412, 3416-3419, 3422-3423, 3428-3435, 3437, 3440, 3442-3445, 3447-3449, 3451, 3453, 3455-3459, 3466-3471, 3474-3478, 3481, 3483-3490, 3492-3493, 3496, 3498-3503, 3506-3507, 3509-3523, 3526-3528, 3530-3535, 3537-3549, 3551, 3553, 3556-3559, 3563-3566, 3568, 3570, 3573-3576, 3578-3581, 3585-3587, 3591, 3593-3594, 3596-3601, 3603, 3605, 3607-3609, 3613-3618, 3620, 3622-3632, 3634, 3636, 3640, 3645-3647, 3649-3658, 3660, 3662, 3664-3667, 3669-3672, 3674-3675, 3677-3678, 3680-3685, 3687, 3693-3697, 3700-3704, 3708-3709, 3711, 3714-3715, 3718-3720, 3722-3724, 3726, 3728-3730, 3732-3734, 3738-3748, 3750-3771, 3773-3775, 3777, 3779-3780, 3786, 3789-3793, 3795-3796, 3800, 3805-3806, 3809-3811, 3817-3819, 3821-3826, 3828-3834, 3836-3840, 3843-3850, 3852, 3856, 3861, 3865-3868, 3871-3878, 3881-3888, 3890, 3892-3896, 3898-3899, 3901-3903, 3905, 3907-3909, 3911-3920, 3922, 3925-3927, 3930, 3932, 3934, 3937-3938, 3940, 3942-3946, 3948-3949, 3951, 3953, 3956, 3960-3961, 3963, 3965-3967, 3969-3970, 3974-3975, 3978, 3980, 3982-3984, 3990, 3992, 3994, 3997, 3999, 4002, 4011-4014, 4016, 4018, 4020, 4023-4024, 4027-4033, 4037-4043, 4045-4059, 4061-4063, 4066, 4070, 4072-4073, 4075-4078, 4081-4083, 4085, 4090, 4092-4101, 4103-4107, 4109-4111, 4113-4114, 4116-4119, 4122-4125, 4128, 4130, 4132-4134, 4136, 4138, 4140-4141, 4143-4148, 4155-4157, 4160-4162, 4164-4165, 4167, 4169-4171, 4175, 4177-4186, 4189, 4191-4195, 4197-4200, 4203-4207, 4210, 4212-4222, 4224, 4226-4227, 4229-4233, 4235-4236, 4239, 4242-4245, 4247, 4251-4258, 4260, 4263-4265, 4268, 4270-4272, 4274-4276, 4278, 4281-4285, 4287, 4289, 4292, 4295-4298, 4300, 4302-4303, 4305-4308, 4310-4317, 4319-4323, 4328-4332, 4334-4335, 4339-4340, 4344, 4349-4352, 4357, 4359, 4363-4369, 4372-4373, 4377, 4379, 4383-4387, 4390-4394, 4396-4400, 4403, 4406-4407, 4409, 4411-4414, 4417-4420, 4422, 4424-4426, 4428, 4430, 4434-4436, 4438, 4441, 4443-4446, 4448-4450, 4452, 4454-4456, 4458, 4461-4471, 4474-4476, 4480-4481, 4483-4484, 4486, 4490-4492, 4494-4495, 4498-4499, 4506, 4512-4513, 4515-4517, 4519-4523, 4525-4530, 4533, 4535, 4537-4538, 4540-4545, 4548-4550, 4553, 4555, 4558-4561, 4563-4564, 4566-4567, 4569, 4571-4572, 4575-4577, 4579, 4582-4585, 4587-4588, 4590, 4593, 4596, 4599, 4601-4602, 4606, 4608, 4610-4611, 4613-4615, 4621-4622, 4624-4626, 4628, 4630-4634, 4636-4637, 4639-4643, 4645-4646, 4649, 4651, 4655-4657, 4660-4663, 4665, 4668-4670, 4673-4674, 4677-4687, 4693-4697, 4700-4701, 4705, 4710-4711, 4717, 4719-4728, 4732-4734, 4737, 4739, 4744-4745, 4748, 4751, 4755-4760, 4762, 4764-4768, 4770, 4773, 4779, 4781, 4783-4784, 4787-4790, 4793, 4795-4796, 4799, 4801-4808, 4812-4815, 4819-4825, 4827-4831, 4835, 4838-4841, 4843, 4846, 4852-4854, 4856-4857, 4859, 4861, 4864-4866, 4869-4871, 4873-4875, 4877, 4879-4881, 4883-4889, 4892, 4895, 4899-4900, 4902, 4904, 4909-4912, 4915-4917, 4919-4926, 4928, 4930, 4932-4935, 4938-4943, 4945-4948, 4950-4951, 4953, 4957-4962, 4964, 4967, 4969, 4971-4974, 4976-4978, 4980, 4983, 4985-4991, 4993-5001, 5003, 5005, 5007-5010, 5012-5015, 5018-5020, 5024, 5027, 5029-5033, 5035-5037, 5039-5040, 5042, 5047-5049, 5051-5053, 5055-5059, 5062-5063, 5065-5066, 5069, 5071-5082, 5084-5088, 5090, 5094, 5096-5099, 5104-5111, 5113-5114, 5117-5118, 5124, 5126-5127, 5129-5139, 5141-5145, 5149-5152, 5154, 5156-5158, 5160, 5164-5165, 5167-5169, 5171-5176, 5178, 5180-5181, 5183, 5185-5186, 5188-5190, 5194-5197, 5202-5215, 5217-5220, 5222, 5224-5228, 5230, 5233-5234, 5236-5246, 5248-5249, 5251-5253, 5255-5257, 5259-5260, 5263-5268, 5270-5276, 5279-5280, 5282, 5284, 5291, 5293-5294, 5296-5304, 5307-5312, 5315, 5317-5320, 5323-5326, 5328-5335, 5337, 5339-5341, 5344-5345, 5347, 5350, 5352, 5354-5355, 5358, 5361, 5363-5365, 5368-5371, 5373-5374, 5376, 5379-5381, 5383-5384, 5386-5387, 5390-5391, 5393-5395, 5397, 5399-5403, 5405, 5408-5412, 5416, 5418, 5420, 5422, 5424-5425, 5428-5431, 5434, 5436-5438, 5440-5442, 5444-5445, 5448-5452, 5461-5463, 5465-5467, 5469-5474, 5478-5486, 5488-5490, 5492, 5494-5502, 5504, 5506, 5512-5516, 5518-5519, 5521, 5524-5526, 5528, 5530-5534, 5537-5538, 5542, 5544, 5546-5548, 5550-5557, 5559-5562, 5565-5566, 5568-5569, 5573-5574, 5576, 5578-5579, 5582-5583, 5585, 5587, 5589-5590, 5592-5593, 5596, 5598-5601, 5603-5605, 5609-5611, 5614, 5618-5623, 5625, 5627, 5629, 5634-5636, 5638, 5640-5641, 5643-5644, 5646, 5650, 5652-5657, 5660-5666, 5670, 5672-5673, 5675-5676, 5678-5680, 5683-5685, 5687-5688, 5690-5691, 5693, 5695, 5698-5700, 5703-5705, 5707-5708, 5712, 5714-5724, 5729-5730, 5732-5733, 5735-5737, 5739-5742, 5746, 5748-5749, 5753-5756, 5758-5759, 5763-5769, 5771-5772, 5774-5775, 5777-5778, 5780-5784, 5786-5791, 5793, 5795-5799, 5801, 5804-5809, 5812-5813, 5816, 5820-5827, 5830, 5832, 5834-5835, 5837-5838, 5840-5841, 5843-5845, 5847-5849, 5855-5856, 5859-5863, 5865, 5868, 5871-5877, 5879-5880, 5884-5885, 5888-5889, 5893-5898, 5900, 5902, 5904-5905, 5907, 5910-5913, 5915-5917, 5919-5924, 5926, 5928-5936, 5938, 5941, 5943-5948, 5950-5951, 5954, 5956, 5958, 5960-5961, 5964, 5966-5973, 5975-5977, 5980-5985, 5988-5998, 6000, 6002-6003, 6005, 6009-6012, 6015, 6021, 6023-6026, 6030-6033, 6039-6040, 6042-6044, 6047, 6049, 6051, 6055-6059, 6061, 6065-6071, 6075, 6078, 6083, 6085-6089, 6091, 6095-6096, 6098, 6100-6102, 6105-6106, 6111, 6113, 6115, 6118-6120, 6122-6123, 6125-6126, 6128, 6130-6132, 6137-6143, 6145, 6148, 6150, 6154, 6156-6157, 6159-6162, 6164, 6166-6168, 6170-6171, 6174, 6176-6184, 6186, 6188-6192, 6200, 6202, 6204-6207, 6209-6212, 6215-6229, 6231-6234, 6237, 6239-6240, 6242-6244, 6246-6247, 6250, 6254, 6256, 6258-6259, 6262, 6265-6268, 6270-6274, 6276-6277, 6279, 6281-6283, 6286, 6292-6294, 6296-6309, 6312, 6314-6315, 6319-6320, 6322, 6329-6330, 6335, 6338-6339, 6341, 6343, 6345, 6347, 6349-6350, 6353, 6356-6360, 6363, 6368-6369, 6371-6379, 6384-6392, 6394-6399, 6402, 6404-6405, 6407, 6409, 6414, 6416-6417, 6419, 6424, 6426-6429, 6431, 6433-6436, 6444, 6448, 6450, 6452-6454, 6457-6458, 6460, 6462-6466, 6472-6484, 6486-6488, 6499-6501, 6504-6510, 6512-6515, 6517, 6519-6529, 6535-6537, 6541-6542, 6544, 6546-6548, 6550-6553, 6555-6556, 6558-6563, 6565, 6567-6570, 6572, 6575, 6577-6579, 6581-6582, 6584, 6586, 6589-6591, 6593, 6595, 6597-6602, 6604-6605, 6608-6609, 6611-6613, 6616-6619, 6623, 6626-6631, 6633, 6637, 6640-6646, 6648-6649, 6653-6655, 6657, 6662-6663, 6666-6667, 6669-6672, 6675, 6680-6682, 6685-6696, 6698, 6700-6704, 6706-6707, 6709, 6712-6714, 6716-6720, 6722, 6725-6731, 6733, 6735-6736, 6744, 6746-6750, 6752-6757, 6759, 6761-6762, 6764-6768, 6770-6771, 6773-6775, 6777-6779, 6781-6788, 6790-6791, 6795-6796, 6799, 6801-6806, 6808-6812, 6814-6815, 6817-6818, 6820, 6823-6828, 6830-6833, 6837, 6839, 6841, 6845-6850, 6853, 6856-6857, 6859-6863, 6865-6867, 6870-6871, 6874-6877, 6882, 6884, 6888-6889, 6891-6892, 6894-6895, 6897-6898, 6901-6905, 6907, 6909-6910, 6912-6918, 6921, 6923-6925, 6927, 6929-6931, 6933, 6935-6938, 6940, 6942-6943, 6946-6947, 6950, 6953-6954, 6956, 6958-6960, 6963, 6966-6971, 6973, 6975-6980, 6982-6983, 6987-6989, 6991-6995, 6998-6999, 7001, 7003-7009, 7011, 7013-7014, 7016-7017, 7019-7021, 7023-7026, 7028-7038, 7048, 7052-7054, 7056-7060, 7063, 7065-7066, 7069-7070, 7072-7080, 7085-7093, 7095-7100, 7102-7111, 7113-7117, 7120-7121, 7125, 7127, 7129-7130, 7136-7138, 7140-7141, 7143, 7145-7147, 7149, 7151-7152, 7156, 7160-7163, 7166-7167, 7170, 7172, 7174, 7176-7186, 7188-7189, 7194-7196, 7198-7201, 7203, 7209-7210, 7212-7213, 7215, 7217-7220, 7222-7224, 7226-7229, 7231-7234, 7236-7240, 7242-7243, 7245-7248, 7250-7253, 7255-7257, 7259-7261, 7263-7264, 7266, 7274, 7276-7277, 7281, 7283, 7285-7287, 7292-7297, 7299, 7301-7302, 7304, 7306, 7310, 7312-7313, 7315-7317, 7319-7322, 7324-7332, 7334-7335, 7349-7358, 7360-7362, 7366-7368, 7370-7373, 7376-7391, 7395-7398, 7400-7406, 7408-7411, 7416, 7419, 7423-7425, 7433, 7435-7440, 7445, 7447-7448, 7450, 7455-7456, 7458-7459, 7461, 7464-7468, 7470-7477, 7480, 7482, 7486, 7488, 7490-7491, 7494-7498, 7500, 7503-7504, 7506, 7508-7509, 7511-7513, 7515-7517, 7519-7521, 7524, 7526-7528, 7530-7534, 7536, 7539-7541, 7543, 7545-7548, 7550, 7552-7554, 7558-7563, 7565, 7569-7572, 7577-7578, 7581-7588, 7592-7593, 7595-7596, 7598, 7601-7604, 7608-7609, 7614-7616, 7618, 7620-7621, 7623, 7625, 7627, 7631-7632, 7635-7637, 7639, 7641-7643, 7645-7647, 7649-7650, 7652-7653, 7655-7658, 7662, 7666, 7668, 7671-7673, 7678, 7683, 7685-7686, 7688-7691, 7693, 7695, 7697, 7701-7702, 7704, 7708-7710, 7712-7716, 7718-7720, 7724-7725, 7727, 7729, 7733, 7736-7737, 7739, 7743-7745, 7748, 7751-7753, 7756, 7758, 7764-7765, 7767, 7769, 7772-7773, 7776, 7778, 7782-7785, 7787-7788, 7793-7799, 7801-7802, 7804-7811, 7813, 7816, 7818-7822, 7824, 7826-7833, 7837-7838, 7840-7841, 7843-7847, 7850, 7852-7854, 7860, 7862-7868, 7870-7874, 7877-7879, 7881-7882, 7885-7886, 7888-7889, 7892-7894, 7896-7906, 7908, 7910, 7913-7915, 7917-7918, 7922, 7924, 7928-7932, 7934-7936, 7938-7941, 7943, 7946, 7948-7950, 7954-7955, 7958, 7960, 7968-7971, 7973, 7976-7980, 7983-7984, 7986, 7988, 7995-7997, 8000-8008, 8010, 8015-8016, 8019-8021, 8023-8027, 8029, 8031-8034, 8036-8039, 8041, 8046-8047, 8049-8050, 8054-8055, 8057-8068, 8072-8074, 8077, 8079-8081, 8083-8086, 8089-8092, 8094-8099, 8101, 8103, 8105-8107, 8109-8116, 8118-8123, 8126, 8128-8134, 8143, 8146, 8148-8152, 8154-8157, 8159-8163, 8166, 8169-8174, 8176-8177, 8181-8182, 8184, 8189-8191, 8193-8202, 8204-8205, 8208, 8211-8215, 8217-8229, 8231-8232, 8235, 8237, 8245-8248, 8250, 8253-8254, 8256-8258, 8262, 8265-8269, 8271-8272, 8275, 8277, 8279, 8281-8282, 8284, 8286-8287, 8289-8295, 8298-8302, 8304-8305, 8308-8313, 8317-8320, 8325-8326, 8328-8330, 8332-8337, 8340-8341, 8343-8344, 8346-8350, 8361-8363, 8368, 8371-8372, 8374, 8376-8379, 8382-8383, 8387, 8389-8390, 8392-8398, 8401-8402, 8405, 8407, 8410, 8413-8416, 8418, 8420, 8422, 8424-8428, 8433, 8437, 8439-8446, 8457, 8463, 8465, 8467-8471, 8475-8479, 8481, 8485, 8487, 8491-8492, 8495-8498, 8500-8501, 8504-8505, 8517-8519, 8521-8526, 8528-8530, 8532-8538, 8540-8542, 8544, 8546, 8548-8552, 8554-8555, 8558, 8560-8563, 8566, 8568, 8570, 8572-8573, 8575, 8577-8579, 8581-8583, 8585-8586, 8590-8592, 8594, 8596, 8599, 8601, 8605, 8608-8610, 8612-8614, 8618-8621, 8624, 8626-8627, 8629-8632, 8635, 8638-8644, 8648, 8650-8655, 8658-8665, 8667-8671, 8673-8675, 8677, 8679, 8685-8688, 8690-8695, 8698, 8700-8704, 8706-8708, 8710-8717, 8719-8721, 8723, 8728, 8732-8736, 8738-8740, 8742, 8745-8746, 8751-8754, 8757-8758, 8760-8761, 8763, 8766-8768, 8771-8777, 8779-8780, 8782-8783, 8785-8786, 8792, 8794-8798, 8800, 8802, 8804, 8807, 8810-8813, 8816-8817, 8819-8824, 8827-8828, 8830, 8834, 8837-8841, 8843, 8845-8846, 8848, 8852-8854, 8856-8860, 8862-8864, 8866, 8868-8874, 8876-8881, 8883-8884, 8886-8887, 8889-8891, 8893-8894, 8896, 8905-8906, 8909-8918, 8920-8923, 8925, 8927-8931, 8933-8934, 8937, 8941-8942, 8944-8945, 8947-8950, 8953-8956, 8961-8969, 8971-8974, 8976, 8978, 8982-8987, 8989-8990, 8993-8995, 8997-8998, 9000, 9002, 9005, 9009-9013, 9015, 9017-9033, 9035, 9039-9040, 9043, 9046-9047, 9050, 9053-9059, 9061-9069, 9071-9080, 9082-9084, 9086, 9090-9091, 9093, 9095, 9097, 9100-9102, 9104-9105, 9109, 9112-9113, 9116, 9120-9121, 9123-9126, 9128-9137, 9139, 9141-9145, 9147, 9149-9151, 9155, 9158-9159, 9161, 9163, 9171-9175, 9177, 9180-9182, 9185-9187, 9191, 9195-9196, 9198, 9200-9201, 9203-9205, 9207-9208, 9210-9212, 9214, 9216, 9218, 9221-9223, 9227, 9229-9232, 9234-9236, 9241, 9243-9244, 9246-9247, 9250-9251, 9253-9258, 9261-9262, 9264-9265, 9270-9271, 9273, 9275, 9278, 9281-9287, 9291, 9294-9298, 9300-9313, 9315-9317, 9319, 9322-9324, 9326-9333, 9335, 9338, 9342, 9345, 9347-9351, 9353-9356, 9358-9360, 9362, 9364, 9366-9369, 9371, 9373, 9376-9381, 9383-9384, 9386-9389, 9391-9393, 9395-9397, 9402-9405, 9412, 9415, 9418-9419, 9422-9423, 9429-9430, 9432, 9434-9435, 9437-9439, 9443-9445, 9448-9452, 9454-9459, 9463-9464, 9466-9467, 9469, 9471-9492, 9494-9495, 9498, 9500, 9502, 9506, 9508, 9510-9511, 9514, 9517-9519, 9523, 9525-9527, 9529, 9532-9536, 9538-9539, 9541-9545, 9547, 9550-9551, 9554-9557, 9559-9562, 9566, 9569-9570, 9573-9575, 9578, 9580-9583, 9585-9587, 9589-9590, 9593-9594, 9596-9597, 9599, 9602, 9604, 9609, 9611-9613, 9617-9618, 9622, 9624-9626, 9628-9629, 9634-9637, 9639-9641, 9644, 9648-9652, 9656, 9659, 9662, 9665, 9672, 9674, 9680, 9684, 9686-9691, 9695-9699, 9701, 9703-9704, 9708-9712, 9714-9718, 9721-9723, 9726, 9729, 9734-9736, 9739-9743, 9746-9748, 9751, 9762, 9766-9770, 9774, 9776, 9782, 9788, 9792-9795, 9797-9799, 9802, 9804, 9806, 9812-9813, 9817-9820, 9824, 9826, 9828-9840, 9842, 9848-9850, 9852-9854, 9857-9859, 9861, 9863, 9865-9867, 9870, 9872-9880, 9882, 9884-9892, 9894-9897, 9901-9902, 9905, 9908-9909, 9912-9914, 9917-9920, 9922, 9928, 9932, 9934-9935, 9937-9938, 9941, 9943-9944, 9946, 9949, 9952, 9955-9958, 9960-9962, 9964-9968, 9971-9973, 9976, 9978, 9981-9982, 9984-9985, 9987-9988, 9990-9991, 9993-9994, 9996-9997, 9999-10004, 10006-10008, 10010, 10012, 10015-10016, 10018-10022, 10024-10025, 10027-10035, 10037, 10039-10041, 10045-10049, 10051, 10059, 10061, 10063, 10065-10066, 10068-10069, 10072, 10074-10077, 10079, 10085-10087, 10089, 10091, 10094-10096, 10098-10099, 10101-10102, 10109, 10112-10121, 10123-10124, 10126, 10130-10137, 10139-10141, 10143, 10148-10151, 10153-10155, 10158-10159, 10161-10168, 10170-10171, 10173-10178, 10182-10185, 10187-10190, 10192-10196, 10198, 10200, 10209-10213, 10215-10217, 10219, 10221, 10225-10230, 10232, 10235, 10237-10247, 10250, 10252-10256, 10259, 10261-10263, 10270-10273, 10275, 10280-10281, 10283-10286, 10288-10291, 10293, 10295-10296, 10299, 10302, 10304, 10306, 10311-10312, 10314-10315, 10317-10321, 10323, 10326, 10328, 10332, 10334, 10336-10342, 10344, 10346-10347, 10349-10350, 10352, 10354, 10359-10361, 10363-10375, 10377, 10379, 10383-10387, 10390-10396, 10398-10405, 10409-10410, 10412-10413, 10416, 10419, 10421-10423, 10425, 10427-10428, 10435-10438, 10441-10445, 10448-10451, 10453-10454, 10457, 10460, 10464-10470, 10472-10478, 10486, 10488-10496, 10498, 10502, 10506-10512, 10514-10516, 10519-10526, 10533-10534, 10538, 10541-10544, 10546-10547, 10549-10553, 10556, 10558-10560, 10562-10563, 10565-10568, 10571, 10573, 10575-10579, 10581, 10583-10585, 10587-10589, 10593-10595, 10597, 10602, 10612-10614, 10616-10617, 10620-10621, 10625-10626, 10628, 10630-10633, 10635-10637, 10639-10640, 10642-10644, 10646, 10648-10651, 10655-10656, 10660-10662, 10665, 10669, 10672, 10674-10677, 10679-10683, 10685, 10687-10692, 10695-10703, 10705-10707, 10710-10714, 10719-10720, 10722, 10724, 10730-10734, 10737, 10741, 10743-10746, 10748, 10750-10751, 10753-10754, 10756-10763, 10766, 10769, 10771-10775, 10777-10779, 10784-10785, 10788-10789, 10792-10794, 10796-10799, 10801, 10805-10806, 10809-10810, 10813, 10815, 10817-10818, 10820-10825, 10827-10830, 10832-10835, 10840, 10842-10845, 10847, 10851, 10854-10857, 10859-10860, 10866-10880, 10882, 10885-10888, 10890-10891, 10894, 10896-10899, 10901-10903, 10908, 10910, 10915, 10919, 10922-10923, 10927-10932, 10934, 10940, 10943-10947, 10949, 10955, 10958-10959, 10961, 10963-10970, 10985, 10987, 10989-10991, 10994-10997, 10999-11000, 11003-11004, 11012-11015, 11018-11020, 11022-11027, 11029-11030, 11034, 11037, 11039-11042, 11045-11046, 11052-11054, 11056-11057, 11061, 11063, 11066, 11068, 11071, 11074, 11077-11078, 11080-11084, 11087, 11089, 11092-11095, 11097, 11100-11101, 11103, 11106-11112, 11114-11116, 11119-11120, 11122, 11126-11129, 11131-11132, 11134, 11136, 11140, 11143-11147, 11149-11153, 11155, 11157, 11160, 11162, 11164, 11166, 11168, 11170, 11172-11174, 11176-11185, 11189-11190, 11192, 11194, 11199-11205, 11207, 11209, 11212, 11214-11223, 11226, 11228-11230, 11232, 11234-11236, 11238, 11240, 11242-11248, 11250-11252, 11254-11255, 11257-11260, 11262-11268, 11274-11275, 11277, 11280, 11286-11292, 11294-11299, 11302-11304, 11307, 11309-11310, 11312-11313, 11315, 11318, 11324-11328, 11330, 11332, 11335, 11337, 11339-11340, 11342-11346, 11349, 11351-11357, 11362, 11367, 11369, 11373-11374, 11377-11378, 11381-11384, 11391, 11398, 11400-11405, 11407, 11410-11412, 11415-11418, 11426-11427, 11429, 11433, 11435-11436, 11438-11441, 11443-11444, 11447, 11449-11458, 11460-11462, 11465, 11467, 11469-11470, 11472, 11474, 11477, 11480-11484, 11488-11493, 11496, 11499-11501, 11503-11509, 11511-11513, 11518-11520, 11523-11524, 11526, 11529, 11531-11532, 11536, 11538, 11541-11542, 11544, 11546, 11548-11549, 11552, 11554-11556, 11558-11563, 11565, 11567, 11569, 11573-11577, 11579-11580, 11582-11586, 11590, 11592-11593, 11595, 11597, 11601-11603, 11607-11610, 11613, 11615, 11618, 11621-11625, 11631, 11633-11634, 11636, 11638-11645, 11649, 11651-11656, 11658-11663, 11668-11673, 11675-11677, 11680-11681, 11685-11686, 11688-11689, 11694, 11697-11699, 11701, 11703, 11707, 11709-11712, 11715-11722, 11724-11725, 11727-11730, 11732-11735, 11737-11740, 11742, 11744-11745, 11749-11750, 11754-11755, 11757-11758, 11762, 11765-11767, 11769-11772, 11774, 11777, 11780-11781, 11787, 11789, 11791-11792, 11795, 11797-11800, 11802-11803, 11805-11806, 11808-11811, 11815-11816, 11820, 11824, 11826, 11828, 11830-11834, 11839, 11841-11849, 11852-11856, 11860-11861, 11865, 11867, 11873-11874, 11876-11877, 11879-11881, 11883, 11885-11889, 11891-11893, 11895-11901, 11904-11906, 11908, 11910-11914, 11916, 11919-11923, 11925, 11928, 11930-11934, 11936, 11938, 11941-11942, 11945-11946, 11948, 11951, 11953-11956, 11959, 11968-11977, 11980, 11982-11985, 11989, 11993-11996, 11998-12000, 12004-12006, 12008-12009, 12011, 12013-12019, 12022-12025, 12027-12030, 12033-12034, 12037, 12040-12045, 12047-12048, 12051, 12053, 12056, 12059-12066, 12068-12070, 12072-12073, 12075-12076, 12078, 12080, 12082-12084, 12087-12091, 12093-12094, 12096-12108, 12111, 12115-12120, 12122-12126, 12128, 12130, 12132, 12134-12141, 12143-12147, 12150, 12153-12156, 12158-12159, 12161, 12163-12170, 12172, 12174, 12176-12180, 12182-12183, 12185, 12189, 12191-12192, 12194-12196, 12198, 12201-12205, 12208-12209, 12212-12220, 12222-12223, 12226, 12228, 12230, 12232-12236, 12238-12242, 12245-12248, 12251, 12253-12258, 12260, 12265-12267, 12271, 12274-12278, 12283, 12286-12288, 12292, 12294-12296, 12299, 12302-12304, 12306, 12308-12309, 12312-12314, 12317, 12321, 12326-12329, 12333-12334, 12336, 12338-12340, 12342, 12344-12347, 12349-12352, 12355-12356, 12359-12362, 12369-12370, 12372-12377, 12380-12381, 12383-12386, 12388-12389, 12392, 12396, 12398-12401, 12403, 12405-12413, 12416-12419, 12421-12425, 12427-12431, 12433, 12437-12441, 12443-12445, 12447-12449, 12452, 12455-12457, 12459-12460, 12462-12464, 12466-12478, 12480, 12482-12484, 12486, 12488-12497, 12501, 12503-12505, 12507-12508, 12510-12511, 12513, 12517, 12520, 12522-12523, 12525-12532, 12534-12540, 12545-12549, 12555-12561, 12563-12567, 12573-12574, 12576, 12579-12580, 12582, 12586-12588, 12593-12596, 12599-12604, 12606, 12610-12611, 12613-12615, 12617-12618, 12621-12623, 12625-12627, 12630-12637, 12641-12645, 12648-12651, 12653-12656, 12658-12660, 12662-12663, 12666-12667, 12672, 12675, 12678, 12681, 12683, 12686-12688, 12690-12691, 12693-12697, 12699-12704, 12706, 12709, 12713-12723, 12725-12730, 12733, 12740-12741, 12743-12751, 12753-12758, 12761-12763, 12765-12766, 12768-12770, 12772, 12780, 12783-12785, 12790-12791, 12793, 12796-12800, 12804-12807, 12809-12826, 12828-12830, 12832, 12835, 12837-12843, 12846-12848, 12850, 12857-12859, 12861, 12864, 12867-12868, 12872-12876, 12878-12881, 12886, 12888, 12890-12902, 12904, 12906-12908, 12915-12916, 12920-12924, 12926, 12928-12929, 12933-12936, 12938, 12940-12945, 12947, 12951-12955, 12958-12959, 12963-12964, 12966-12968, 12976, 12978-12979, 12981-12982, 12984-12986, 12988, 12991-12997, 12999-13001, 13004, 13007-13010, 13012-13015, 13017, 13021, 13024-13027, 13032, 13036-13039, 13041, 13043-13044, 13046-13048, 13050-13054, 13057, 13062-13063, 13066, 13070, 13073, 13082, 13084-13092, 13099, 13101-13105, 13107-13109, 13112, 13119, 13121-13125, 13127-13144, 13147-13148, 13152-13153, 13155-13158, 13176, 13178-13182, 13185-13192, 13194, 13198-13199, 13201, 13205-13207, 13209-13214, 13222-13225, 13227-13230, 13235-13236, 13240, 13243, 13245-13251, 13254-13256, 13258, 13261-13263, 13265-13270, 13272-13279, 13282, 13284-13289, 13291-13292, 13295, 13298-13302, 13304-13312, 13316-13317, 13319, 13321-13323, 13325-13329, 13331-13336, 13338-13344, 13346-13351, 13353-13360, 13362, 13365, 13367, 13370, 13372, 13374-13380, 13382-13384, 13386, 13392-13397, 13400-13401, 13404, 13406-13407, 13409-13410, 13413-13417, 13420, 13427-13428, 13431-13432, 13439-13440, 13442-13451, 13453-13457, 13463, 13467-13469, 13475, 13480-13486, 13488, 13490, 13492, 13494, 13496-13497, 13499, 13501, 13503-13504, 13509, 13514-13517, 13519-13520, 13523-13524, 13527-13531, 13533-13534, 13536-13539, 13544, 13548-13553, 13557-13559, 13561-13567, 13573, 13575-13577, 13581, 13584, 13588-13590, 13592-13595, 13597-13616, 13620-13622, 13626, 13630-13631, 13634-13636, 13638-13644, 13647-13655, 13658, 13660-13662, 13665-13670, 13672-13673, 13675-13679, 13681-13684, 13686-13687, 13689-13690, 13692-13694, 13696, 13698-13705, 13708-13712, 13714-13715, 13719-13721, 13725-13726, 13730, 13734, 13737-13741, 13743-13744, 13747-13752, 13756, 13758-13759, 13762, 13765-13766, 13768-13769, 13774, 13776, 13780-13781, 13783-13794, 13802, 13806-13807, 13809, 13811-13813, 13817-13818, 13820-13821, 13823, 13825-13827, 13831-13832, 13835, 13837-13845, 13847-13849, 13851-13852, 13858, 13860-13861, 13863, 13865-13871, 13873-13874, 13878-13880, 13882, 13886, 13889-13890, 13894, 13896-13909, 13912-13916, 13918-13922, 13924, 13926-13932, 13934-13937, 13939, 13941, 13943-13947, 13949, 13952-13954, 13958-13959, 13963-13964, 13966-13967, 13971, 13973, 13975-13976, 13982-13986, 13992, 13995, 13997-13998, 14000, 14002, 14004, 14006-14008, 14012-14013, 14017, 14022-14024, 14028, 14032-14033, 14035, 14037, 14042-14046, 14050, 14053, 14055, 14057-14058, 14061-14062, 14064, 14066-14073, 14075-14079, 14081-14082, 14084, 14086, 14089-14090, 14092-14098, 14100-14102, 14104-14112, 14115-14116, 14118-14119, 14121-14122, 14125, 14127, 14130-14137, 14139, 14142-14145, 14151-14154, 14156-14161, 14164, 14166, 14168-14170, 14172-14175, 14177, 14180, 14182, 14184, 14188, 14190-14195, 14197-14199, 14201-14205, 14208, 14221-14222, 14224-14230, 14232-14233, 14235-14236, 14239-14243, 14245-14246, 14250, 14252, 14254-14257, 14259-14260, 14262, 14264, 14266, 14269-14286, 14289, 14292-14294, 14298, 14302, 14304, 14306, 14309, 14311, 14313, 14317-14319, 14321-14327, 14332, 14342-14343, 14346-14347, 14350, 14354, 14357-14361, 14363-14373, 14375-14377, 14379-14382, 14385, 14387, 14389-14392, 14395, 14397-14401, 14405-14408, 14411, 14413-14415, 14417-14419, 14422-14423, 14425, 14427-14432, 14434-14435, 14441, 14443, 14448, 14451-14452, 14454-14455, 14457, 14459-14460, 14462-14465, 14467, 14469-14472, 14474, 14477-14481, 14485-14486, 14489, 14493-14496, 14499-14507, 14511-14512, 14514-14515, 14519, 14521-14525, 14527-14528, 14530-14531, 14533-14534, 14536, 14543-14546, 14548-14550, 14553, 14555-14566, 14568, 14571-14581, 14583, 14588, 14591, 14596-14599, 14602, 14607, 14611-14612, 14617-14618, 14620, 14624-14628, 14632-14636, 14638, 14640, 14642, 14644-14650, 14652-14655, 14657-14658, 14665-14666, 14669, 14673-14679, 14681-14689, 14691-14699, 14701-14703, 14706-14708, 14710-14712, 14715, 14717-14725, 14727, 14729-14731, 14733-14736, 14738-14739, 14741-14742, 14746, 14748-14753, 14755-14762, 14765-14771, 14775-14776, 14778-14779, 14783-14791, 14796-14798, 14800-14802, 14804, 14806, 14808, 14810, 14812-14813, 14822-14823, 14826, 14829, 14831-14836, 14840-14842, 14845-14846, 14849-14850, 14852-14854, 14858-14859, 14863, 14866-14868, 14871, 14877-14878, 14881-14882, 14884-14886, 14888, 14891, 14893-14897, 14899-14901, 14903-14905, 14912, 14916-14917, 14919-14922, 14924-14925, 14928, 14931, 14933-14934, 14936-14941, 14943-14944, 14947-14950, 14952-14956, 14958-14960, 14963-14967, 14969-14970, 14973-14976, 14978-14980, 14982-14987, 14989-14990, 14992, 14997-15006, 15008, 15011-15012, 15015, 15019, 15021-15026, 15031-15032, 15034-15036, 15039, 15041-15042, 15045, 15047-15049, 15052-15055, 15057-15059, 15061-15063, 15065-15066, 15068-15071, 15073, 15076, 15078, 15081, 15085-15086, 15089-15092, 15095-15096, 15098-15103, 15105-15106, 15108, 15110-15113, 15115-15119, 15125-15128, 15130, 15132, 15134-15135, 15138-15140, 15143-15148, 15154-15155, 15157, 15160-15164, 15166, 15168, 15171, 15173, 15177-15178, 15180, 15182-15183, 15186-15187, 15189-15191, 15194, 15196-15197, 15199, 15204, 15207-15209, 15214-15215, 15217-15218, 15220-15222, 15224-15225, 15228-15234, 15236-15241, 15243, 15246-15248, 15252-15253, 15255, 15258-15263, 15265, 15268-15269, 15271-15277, 15280-15282, 15284, 15287, 15291-15293, 15296, 15298-15304, 15306-15310, 15312, 15316-15318, 15321, 15323, 15328-15329, 15331-15332, 15336, 15338-15341, 15343-15345, 15348-15351, 15353, 15359-15361, 15363-15369, 15373, 15376-15381, 15383-15384, 15387-15390, 15393, 15395, 15397-15398, 15400-15401, 15405, 15407-15408, 15413-15417, 15419-15420, 15423, 15425-15426, 15429, 15433, 15436-15440, 15442, 15444, 15446, 15450, 15454, 15459, 15461, 15464, 15467-15468, 15470-15477, 15479-15481, 15483-15497, 15501, 15503-15505, 15510, 15513, 15515-15520, 15522-15524, 15526, 15528, 15530, 15532-15534, 15536-15537, 15544-15546, 15548, 15552-15557, 15559-15561, 15563-15565, 15568-15571, 15573-15574, 15576-15581, 15583-15589, 15591-15593, 15595-15597, 15601-15603, 15606-15607, 15609-15612, 15614-15618, 15622-15629, 15631-15632, 15634-15640, 15642-15644, 15647, 15650-15653, 15655-15657, 15662, 15664, 15667-15671, 15673-15674, 15676, 15678, 15680-15684, 15687-15688, 15693-15695, 15697, 15699-15709, 15712-15714, 15716-15718, 15720, 15724-15725, 15727-15728, 15730-15733, 15735-15736, 15744-15750, 15752-15753, 15755-15760, 15762, 15765-15768, 15771-15772, 15774, 15776-15781, 15784, 15786-15787, 15789-15790, 15792, 15795, 15797-15798, 15800-15804, 15806-15808, 15810, 15812-15813, 15821-15823, 15828-15835, 15837-15839, 15843, 15845, 15849, 15851-15858, 15860, 15862-15864, 15867, 15869-15870, 15872-15873, 15876, 15879-15882, 15885-15889, 15891, 15894-15895, 15897-15901, 15904, 15906-15908, 15910-15912, 15914-15918, 15921, 15924, 15928-15932, 15934-15938, 15941, 15946, 15948, 15951-15967, 15971-15977, 15979-15982, 15984-15993, 15995-15997, 16000-16001, 16003-16005, 16007, 16009-16015, 16019-16023, 16027-16033, 16035-16037, 16043-16044, 16048-16050, 16052-16053, 16056-16058, 16060-16063, 16065-16075, 16077-16083, 16085-16086, 16090-16091, 16093-16097, 16099-16100, 16102, 16107-16108, 16110, 16112-16114, 16116-16118, 16120-16121, 16123, 16125, 16127, 16131-16132, 16134-16135, 16139, 16141-16145, 16148-16151, 16153, 16155-16158, 16160, 16162, 16165, 16168, 16173-16174, 16178-16179, 16181, 16183-16184, 16186, 16190-16191, 16193-16197, 16204, 16206, 16212-16213, 16215-16219, 16222-16226, 16228-16230, 16233, 16236-16237, 16239-16241, 16243, 16246-16250, 16252, 16254, 16256, 16262, 16264-16268, 16270, 16272, 16275-16278, 16281-16283, 16286-16287, 16290, 16292, 16294, 16297-16301, 16303, 16306-16307, 16309, 16314, 16316-16319, 16324, 16326-16331, 16333-16334, 16336-16337, 16340-16342, 16344-16345, 16347-16351, 16353, 16355-16358, 16361-16365, 16369, 16371, 16374-16376, 16380-16386, 16388, 16391, 16393-16395, 16397, 16399, 16402-16403, 16405, 16407-16408, 16411-16412, 16414, 16416, 16420-16421, 16423, 16425-16426, 16429-16430, 16432-16438, 16440-16441, 16443, 16445-16448, 16450, 16452-16454, 16459-16461, 16464-16468, 16471-16473, 16475, 16477, 16480-16492, 16495-16497, 16499-16500, 16503-16505, 16511-16512, 16515-16517, 16519-16524, 16527-16528, 16530-16537, 16542-16543, 16545, 16555-16556, 16560-16562, 16568, 16570, 16573-16581, 16588-16593, 16596-16600, 16602, 16604, 16606, 16608, 16610, 16613-16614, 16616, 16618-16622, 16624, 16630-16633, 16635-16637, 16640-16644, 16647, 16651, 16653, 16659-16660, 16664-16670, 16672, 16674-16677, 16679, 16681-16682, 16684, 16686-16690, 16692-16694, 16696-16701, 16703-16704, 16706, 16709, 16711-16713, 16717-16719, 16721, 16723-16725, 16727-16731, 16734-16738, 16740-16741, 16744-16746, 16748-16752, 16755, 16758, 16760-16761, 16765-16767, 16771, 16773-16774, 16776, 16779, 16781-16795, 16797, 16799-16802, 16804, 16807-16809, 16811-16813, 16816-16817, 16819-16820, 16822-16823, 16825, 16830-16832, 16836-16838, 16842-16847, 16851-16860, 16862, 16864, 16866-16867, 16871-16874, 16879, 16886-16889, 16891-16893, 16895, 16897-16898, 16900-16907, 16909, 16911-16912, 16914, 16916-16919, 16921-16930, 16933-16934, 16936, 16938, 16941-16944, 16946, 16949-16950, 16952-16953, 16955-16956, 16960-16965, 16967, 16969-16971, 16975-16976, 16978, 16981, 16983, 16986-16987, 16989-16993, 16995-16996, 16998-17002, 17004-17006, 17008, 17010-17012, 17014-17016, 17019-17020, 17023-17026, 17031-17032, 17035, 17038-17041, 17048, 17050-17061, 17063-17064, 17066-17068, 17071, 17073, 17075, 17078-17079, 17087, 17089-17092, 17096-17098, 17100-17102, 17106-17108, 17110-17113, 17115, 17118-17121, 17123-17129, 17132-17134, 17136-17138, 17140, 17144-17145, 17150, 17152-17155, 17157-17159, 17162, 17164, 17167-17175, 17177-17183, 17185, 17189-17190, 17192-17195, 17200-17208, 17211-17220, 17225-17227, 17229-17231, 17233, 17235-17237, 17239, 17243-17244, 17246-17248, 17250, 17252-17255, 17258-17259, 17264, 17267, 17271-17272, 17275-17276, 17278-17282, 17285, 17288-17290, 17292-17297, 17299-17300, 17303, 17307, 17309-17310, 17313-17314, 17319-17320, 17322, 17325-17328, 17332, 17334-17336, 17338-17341, 17343-17344, 17347-17355, 17359, 17361-17365, 17368, 17370-17373, 17375, 17378-17382, 17385-17388, 17391-17396, 17402-17403, 17405, 17408, 17411, 17420, 17423-17424, 17426, 17429-17433, 17435-17437, 17440-17441, 17446, 17448, 17450, 17452-17466, 17468-17473, 17475, 17477, 17479-17480, 17482-17483, 17486-17487, 17489, 17492, 17494, 17499-17500, 17502-17506, 17508-17511, 17514, 17516-17525, 17527-17530, 17532-17540, 17542-17544, 17546-17550, 17553-17555, 17557-17559, 17561, 17564, 17566-17570, 17575-17576, 17578, 17580, 17582, 17585-17588, 17590-17593, 17595, 17597-17598, 17603-17608, 17610-17611, 17613, 17615, 17617, 17620-17624, 17627-17633, 17636-17637, 17639-17640, 17644-17645, 17648-17655, 17659, 17661, 17664, 17666, 17668-17670, 17676-17678, 17680-17688, 17690, 17692-17693, 17696, 17698, 17700-17702, 17704, 17706-17709, 17714, 17717-17718, 17721, 17723-17726, 17729-17730, 17732-17734, 17736, 17738-17740, 17744-17747, 17752-17753, 17755, 17757-17758, 17760-17761, 17763-17764, 17766, 17768, 17770-17772, 17774-17775, 17782, 17786-17789, 17791-17800, 17805, 17808-17809, 17812-17813, 17822-17830, 17833-17838, 17840-17844, 17848-17854, 17856-17857, 17862, 17866, 17870-17871, 17873-17874, 17876-17883, 17885-17887, 17889-17891, 17894, 17896, 17898, 17900, 17902-17906, 17910-17911, 17913-17914, 17918-17920, 17922-17923, 17925-17926, 17929, 17932-17935, 17938-17939, 17941-17942, 17944-17946, 17949-17954, 17956, 17959, 17961, 17964-17969, 17971, 17974-17980, 17982, 17985-17990, 17993-17996, 18001, 18004-18005, 18007-18027, 18031, 18033-18034, 18037-18038, 18041-18043, 18045-18058, 18060-18062, 18066-18069, 18072, 18074, 18080-18083, 18085-18087, 18090-18096, 18102-18103, 18105-18106, 18108-18110, 18112, 18115, 18117-18124, 18126-18128, 18130-18131, 18134-18136, 18141-18146, 18149-18150, 18152-18154, 18156-18158, 18163-18167, 18170, 18173, 18175-18177, 18179-18180, 18182-18186, 18188-18191, 18193-18195, 18197, 18200-18201, 18203, 18205, 18208-18209, 18211-18213, 18215, 18218, 18220-18222, 18228-18233, 18237, 18239, 18242, 18245-18247, 18249-18250, 18253-18254, 18256-18266, 18268-18270, 18272, 18274-18275, 18277, 18280-18281, 18283-18285, 18291, 18294-18298, 18300-18303, 18305-18308, 18310, 18313, 18315-18316, 18318-18320, 18322, 18324, 18328-18329, 18333-18339, 18342, 18344, 18347-18349, 18351-18352, 18359, 18363-18364, 18366-18369, 18374-18375, 18378-18379, 18381-18387, 18391-18392, 18394, 18399, 18403-18410, 18416-18417, 18419, 18422, 18424-18426, 18428-18431, 18434-18443, 18446, 18448-18453, 18455, 18460-18461, 18463, 18465, 18469-18470, 18476-18483, 18486-18494, 18496-18500, 18502, 18504, 18506-18514, 18516-18518, 18520, 18522, 18524, 18527, 18529, 18531, 18533, 18536, 18539-18542, 18545, 18547-18549, 18552-18560, 18562-18563, 18565-18566, 18568-18574, 18576-18577, 18581-18583, 18587, 18590-18593, 18595-18601, 18603-18607, 18609-18612, 18614-18620, 18622-18623, 18625, 18627, 18630, 18637, 18639-18640, 18642, 18644-18649, 18651-18652, 18654-18656, 18658, 18664, 18666, 18669, 18673, 18679-18685, 18687-18689, 18692, 18696-18702, 18705, 18711-18712, 18715-18720, 18723-18725, 18727, 18729-18730, 18732, 18735-18738, 18741, 18744-18757, 18760, 18763-18764, 18767-18769, 18772-18775, 18777, 18779, 18781, 18783, 18786, 18793, 18797, 18799-18805, 18807, 18809-18816, 18818-18825, 18828-18830, 18832-18834, 18837, 18839-18840, 18847-18855, 18857-18861, 18863-18866, 18869, 18873-18874, 18876, 18878, 18881-18884, 18886-18890, 18895, 18897-18898, 18901-18905, 18908, 18911-18918, 18920, 18922-18923, 18925, 18927, 18930, 18933-18936, 18938-18939, 18941-18951, 18954, 18956, 18959, 18961-18962, 18964-18967, 18969, 18971, 18973-18978, 18980-18986, 18989-18995, 18997-18998, 19000-19002, 19004-19006, 19008, 19010, 19015, 19018, 19020-19025, 19027-19028, 19032-19033, 19036-19037, 19039-19042, 19044, 19050-19052, 19055, 19057, 19059, 19062-19070, 19074-19080, 19084, 19087-19088, 19090-19091, 19095, 19097-19102, 19104, 19106, 19108-19110, 19112, 19114, 19116-19117, 19120-19126, 19128-19129, 19131-19133, 19136, 19138, 19140-19143, 19147, 19152-19154, 19156, 19158-19159, 19163, 19170-19171, 19173-19177, 19179-19189, 19191-19195, 19197-19200, 19203, 19205, 19208, 19210-19213, 19215, 19217-19218, 19220, 19222, 19224-19225, 19227, 19229-19230, 19232, 19234, 19237, 19241-19246, 19250-19251, 19255-19256, 19258-19260, 19262-19269, 19272-19277, 19282, 19284, 19286, 19288-19293, 19295-19299, 19302, 19305-19307, 19309, 19311, 19314-19316, 19318-19320, 19322, 19324-19326, 19328-19334, 19336-19337, 19339, 19341-19345, 19347-19348, 19350, 19352-19354, 19361, 19363-19365, 19367, 19369, 19371-19373, 19375, 19377, 19381, 19386-19389, 19391-19392, 19395-19396, 19401-19402, 19405, 19411-19418, 19420, 19424-19428, 19431, 19433, 19435-19436, 19438-19440, 19446-19448, 19450, 19453-19454, 19458-19460, 19462-19463, 19465-19466, 19469-19475, 19478-19483, 19487, 19489, 19493-19495, 19500-19506, 19508-19509, 19511, 19513-19515, 19525, 19531, 19536-19541, 19545-19546, 19549-19562, 19564-19566, 19568, 19570-19573, 19575, 19578-19579, 19581-19582, 19584, 19586, 19588, 19590-19591, 19593-19600, 19602-19612, 19615-19616, 19621-19630, 19632-19634, 19637-19638, 19640-19655, 19657, 19659, 19661, 19663, 19666-19667, 19670, 19673, 19676-19682, 19684, 19688-19691, 19693-19694, 19696, 19698-19699, 19701-19702, 19704, 19706-19709, 19711-19713, 19717-19721, 19723-19724, 19726-19728, 19730-19731, 19739-19740, 19742-19746, 19749-19751, 19753-19754, 19757, 19759, 19762, 19764, 19766, 19769-19772, 19774-19776, 19784, 19786-19787, 19789-19791, 19793, 19796, 19798, 19801, 19803, 19805, 19807-19815, 19819-19821, 19823, 19825-19828, 19830, 19832-19838, 19840-19847, 19849, 19851-19858, 19861, 19863-19864, 19866-19867, 19869, 19871-19873, 19876-19878, 19880-19882, 19884-19886, 19888, 19890-19895, 19897-19902, 19904-19906, 19909-19910, 19913-19917, 19921, 19923, 19925-19927, 19930-19935, 19937-19939, 19941, 19944-19952, 19955, 19957-19958, 19961, 19963, 19966, 19969, 19976, 19978-19981, 19983, 19987, 19990, 19992-19995, 19997-19998, 20001, 20003-20005, 20007-20012, 20015, 20017-20019, 20022, 20027-20029, 20031-20033, 20037-20038, 20040-20041, 20043-20047, 20052-20053, 20055-20060, 20063-20068, 20071, 20074-20076, 20079, 20081, 20085, 20090, 20093, 20095-20099, 20101-20103, 20105-20107, 20109-20112, 20114, 20117-20119, 20123-20124, 20126-20127, 20131, 20135-20138, 20140-20142, 20145-20146, 20148, 20152-20158, 20165, 20167, 20169-20172, 20175, 20180-20184, 20187, 20190, 20192, 20194, 20196-20197, 20201, 20206, 20209-20211, 20216, 20219, 20221-20226, 20231, 20234, 20236-20240, 20242-20246, 20248, 20253-20255, 20258-20264, 20268-20269, 20271, 20275, 20277-20279, 20288, 20290, 20292, 20296-20297, 20299, 20303, 20306, 20315, 20317-20318, 20320, 20323, 20326, 20329-20330, 20333-20337, 20339-20341, 20345, 20350-20359, 20362-20364, 20369, 20372-20374, 20376, 20378, 20381-20384, 20387-20388, 20395-20399, 20403-20404, 20406-20409, 20411-20415, 20418-20424, 20426, 20428-20432, 20434-20438, 20443, 20445-20448, 20450-20452, 20455-20469, 20471, 20475-20483, 20485-20487, 20489-20521, 20525-20527, 20529-20531, 20533, 20537-20538, 20541, 20543-20546, 20548-20551, 20553, 20556-20569, 20571, 20573-20576, 20578-20582, 20585, 20588-20589, 20592-20596, 20598, 20600, 20602-20604, 20608-20609, 20611-20618, 20620, 20622-20624, 20628-20630, 20632-20634, 20637-20641, 20643-20645, 20647, 20649, 20651, 20654-20657, 20660, 20662, 20665-20666, 20669-20670, 20672-20677, 20680, 20682, 20684-20686, 20688-20692, 20694-20696, 20700-20705, 20708, 20710-20712, 20715, 20717-20718, 20721-20728, 20731, 20733-20739, 20743-20746, 20748-20752, 20754-20762, 20765, 20767-20769, 20773-20774, 20776-20780, 20783, 20786, 20788, 20790, 20792-20793, 20795-20797, 20799-20803, 20805, 20807-20809, 20811-20812, 20814-20815, 20817, 20819-20826, 20829-20830, 20834-20838, 20841-20848, 20851-20859, 20861-20863, 20865, 20867-20873, 20876, 20880-20888, 20890-20896, 20900, 20902-20905, 20908-20912, 20915, 20917, 20919-20920, 20923-20931, 20935, 20939-20944, 20946, 20948-20949, 20951-20952, 20954, 20956-20957, 20961-20966, 20968, 20970-20972, 20974, 20976, 20980-20981, 20984, 20986-20988, 20990-20991, 20993-20994, 20996-20999, 21002, 21005-21008, 21012, 21014, 21018-21019, 21021-21029, 21032, 21034-21037, 21039, 21041-21045, 21047, 21050-21060, 21062, 21064-21069, 21071-21074, 21076-21077, 21080, 21083-21084, 21086, 21088-21092, 21095, 21097, 21099, 21104, 21110-21113, 21119-21120, 21122, 21124, 21127, 21129-21130, 21132, 21134-21138, 21140, 21142, 21144, 21148, 21150-21155, 21157, 21159-21161, 21165, 21167-21169, 21171, 21173-21174, 21177-21180, 21182, 21185-21189, 21193-21201, 21203-21208, 21211, 21213, 21216-21217, 21220-21222, 21224, 21227, 21236-21237, 21239-21243, 21246, 21248-21257, 21259-21260, 21262-21264, 21266-21268, 21271, 21274, 21277-21279, 21281-21283, 21287, 21290-21291, 21293, 21295-21298, 21300-21301, 21305, 21307-21311, 21313, 21315-21319, 21321-21327, 21329-21333, 21335, 21338-21341, 21344, 21346, 21350-21351, 21353-21354, 21357, 21359-21361, 21363-21364, 21366-21367, 21369-21373, 21375-21378, 21381-21386, 21388, 21390-21398, 21400-21402, 21404-21406, 21408-21418, 21421, 21423, 21425-21429, 21431, 21433, 21435, 21437, 21439-21448, 21451-21452, 21454, 21456, 21458-21459, 21462, 21467, 21469-21471, 21473-21475, 21481, 21484-21485, 21488-21489, 21493, 21498, 21500-21506, 21508, 21510, 21513-21520, 21522, 21526-21529, 21531-21532, 21537-21540, 21542, 21545, 21550-21554, 21558-21560, 21563-21575, 21577-21585, 21587-21594, 21597-21600, 21602-21605, 21607, 21610-21616, 21618-21625, 21628, 21630, 21633-21636, 21639-21640, 21642-21645, 21647-21654, 21657, 21659-21662, 21665, 21672-21675, 21677-21679, 21682, 21686, 21689-21690, 21692-21694, 21696, 21698, 21701-21704, 21706-21707, 21709-21713, 21715, 21717, 21719-21720, 21724-21731, 21734-21735, 21738-21739, 21744-21746, 21752, 21758-21759, 21761, 21763-21764, 21766, 21771, 21774-21777, 21780, 21782-21786, 21788-21790, 21793, 21795-21796, 21799, 21802-21807, 21809, 21812-21813, 21816, 21819-21820, 21826, 21828, 21831, 21833, 21836-21839, 21842-21846, 21848-21851, 21853, 21855, 21857-21858, 21864-21868, 21870-21872, 21874-21878, 21880-21881, 21884, 21888-21892, 21894-21895, 21899, 21901, 21903, 21906, 21910-21911, 21913-21914, 21916-21918, 21920, 21923-21925, 21927, 21929-21930, 21933-21935, 21938, 21940-21946, 21949, 21951, 21958, 21961-21962, 21966-21970, 21972-21974, 21977, 21981-21982, 21984-21987, 21994-21995, 22002-22004, 22006, 22010, 22014, 22019, 22021-22022, 22024-22025, 22027-22028, 22030, 22032, 22034-22035, 22038, 22040-22052, 22054-22057, 22062-22065, 22067, 22070-22074, 22076-22077, 22079, 22081, 22083, 22085-22091, 22094, 22096-22101, 22103, 22105-22107, 22111, 22114-22116, 22123-22126, 22129-22131, 22134-22136, 22140-22144, 22148-22151, 22153-22155, 22157-22160, 22164-22169, 22171-22173, 22176, 22179-22183, 22185-22187, 22189-22191, 22193, 22195-22196, 22198-22201, 22203-22204, 22206, 22208-22209, 22214-22215, 22217, 22219, 22225-22235, 22237-22240, 22244-22249, 22251, 22253-22256, 22258, 22260, 22263, 22267-22268, 22272-22273, 22277, 22279-22284, 22289-22290, 22294, 22296, 22298-22301, 22304-22306, 22310, 22312, 22315-22317, 22319-22321, 22323, 22326, 22328, 22332-22334, 22336, 22338-22339, 22350-22353, 22355, 22360, 22363, 22366, 22368-22370, 22377-22378, 22380, 22382-22384, 22387-22388, 22391-22393, 22395-22397, 22399, 22401-22404, 22407, 22410-22411, 22413, 22415, 22417, 22419-22420, 22422-22424, 22426, 22428-22429, 22431-22435, 22437, 22439-22440, 22442-22446, 22448, 22450, 22452-22454, 22457, 22459-22464, 22468, 22472-22474, 22476, 22482, 22484-22485, 22487-22490, 22492-22497, 22499-22504, 22507, 22510-22511, 22513-22517, 22524-22525, 22527-22528, 22530-22531, 22533-22537, 22539, 22541-22543, 22546-22549, 22551-22552, 22554-22557, 22559-22561, 22563-22564, 22566-22573, 22577-22578, 22580-22583, 22585-22587, 22590-22591, 22597-22598, 22600, 22602-22603, 22605, 22612-22619, 22621, 22623-22624, 22626, 22629-22631, 22633-22635, 22637-22640, 22643-22644, 22646-22649, 22651, 22654-22655, 22657-22665, 22667-22674, 22676-22677, 22679-22680, 22682, 22684-22688, 22690-22693, 22699, 22701, 22703-22704, 22707-22711, 22713, 22715, 22717-22721, 22723, 22727-22730, 22732, 22734-22736, 22738, 22740, 22742, 22744, 22748-22753, 22756-22757, 22761-22764, 22767-22768, 22770, 22773, 22777-22782, 22784-22787, 22789, 22791-22796, 22799-22800, 22802-22804, 22810-22811, 22814-22817, 22819-22820, 22822, 22826-22829, 22833, 22837-22838, 22841-22847, 22849, 22852, 22854-22855, 22857, 22859-22860, 22862-22865, 22868-22873, 22875-22876, 22881, 22883, 22885, 22887-22888, 22892-22894, 22896, 22899-22900, 22902-22907, 22909-22912, 22914-22916, 22918-22921, 22924, 22926-22928, 22934, 22936-22939, 22941-22946, 22950-22951, 22953, 22957-22965, 22971-22972, 22975-22976, 22980-22981, 22983-22985, 22987, 22989, 22992-22993, 22995, 22998-23002, 23004-23006, 23008, 23011-23013, 23015, 23018-23024, 23026-23028, 23031-23034, 23036, 23038, 23042-23043, 23045-23047, 23049-23050, 23052-23060, 23063-23064, 23066-23069, 23071, 23075-23076, 23079-23082, 23086-23087, 23089-23090, 23092-23093, 23096-23102, 23104, 23106-23110, 23112-23114, 23117, 23121-23122, 23125-23129, 23133-23136, 23138-23141, 23144-23147, 23149-23153, 23155, 23158, 23160, 23162-23166, 23170, 23172-23174, 23176-23179, 23181, 23183-23184, 23188-23196, 23199-23201, 23203-23207, 23209, 23212-23213, 23216-23217, 23219, 23221, 23224-23226, 23233-23236, 23242, 23245-23248, 23253-23257, 23260-23262, 23266-23269, 23271-23272, 23274-23280, 23282-23283, 23285, 23287, 23290-23295, 23297-23299, 23303, 23312, 23315-23318, 23323, 23332-23333, 23336-23340, 23342-23343, 23345-23346, 23348-23351, 23358, 23362-23364, 23366-23368, 23371-23372, 23374, 23376-23377, 23379-23384, 23388-23391, 23393-23396, 23398, 23406-23412, 23414-23415, 23417-23421, 23423-23431, 23434-23440, 23442, 23444, 23446, 23448, 23450, 23454, 23458, 23461-23463, 23466, 23468-23471, 23473-23479, 23482, 23486-23487, 23490, 23492-23497, 23499-23506, 23508-23511, 23527-23529, 23531-23534, 23536-23537, 23539-23542, 23544, 23546, 23548, 23551-23552, 23556-23557, 23559-23560, 23562-23566, 23568-23570, 23572-23578, 23581-23589, 23592, 23594, 23598, 23600-23602, 23604-23608, 23610-23614, 23616-23617, 23619-23620, 23622-23628, 23630-23632, 23635-23636, 23639, 23641, 23643-23646, 23648, 23651-23652, 23659-23660, 23665, 23668-23673, 23675-23677, 23679-23680, 23683, 23685-23686, 23689-23690, 23692, 23695-23697, 23700-23703, 23706, 23711-23713, 23715-23721, 23723, 23726, 23728-23734, 23739, 23741, 23746, 23749-23750, 23752-23754, 23756-23761, 23763-23771, 23773-23774, 23776-23778, 23780, 23782, 23784-23785, 23788-23790, 23792-23795, 23798-23799, 23803-23804, 23808-23810, 23812-23818, 23820-23821, 23823, 23827-23832, 23834-23835, 23839-23845, 23848, 23850-23856, 23859, 23862-23865, 23868-23869, 23872-23874, 23876, 23878, 23880, 23885-23889, 23891-23895, 23897, 23900-23902, 23904-23912, 23914-23915, 23917-23921, 23923-23924, 23926, 23928-23936, 23938, 23940-23942, 23945-23948, 23953, 23956, 23959, 23962-23968, 23971, 23974-23975, 23978-23982, 23986-23989, 23992, 23994-23995, 23997-24000, 24002-24009, 24013-24015, 24019, 24022-24028, 24032-24033, 24035, 24037-24039, 24041-24043, 24045, 24049-24051, 24053-24055, 24058-24061, 24065-24066, 24068-24070, 24074-24077, 24081, 24084-24087, 24091-24094, 24096, 24100-24101, 24103-24104, 24106-24108, 24110-24114, 24116, 24120-24121, 24126, 24129, 24135-24136, 24138, 24143, 24147-24149, 24151, 24153, 24155-24156, 24161-24162, 24164, 24168, 24170, 24172-24174, 24177, 24187-24189, 24192, 24195, 24197, 24206, 24209, 24211, 24213-24214, 24216-24220, 24222-24223, 24229-24236, 24238-24245, 24250, 24252, 24254-24255, 24258, 24260-24261, 24266-24267, 24270-24274, 24278, 24281, 24284, 24286-24287, 24290-24292, 24297, 24299, 24302, 24307-24310, 24313-24315, 24317-24320, 24326, 24328, 24332-24334, 24336-24337, 24339-24345, 24349, 24351-24353, 24357-24364, 24366, 24370, 24372-24375, 24377-24382, 24384, 24388, 24392-24395, 24397-24405, 24407-24410, 24412, 24415, 24417, 24419-24421, 24423-24428, 24430-24431, 24435, 24437-24438, 24440-24442, 24444-24446, 24453-24456, 24460-24462, 24464-24466, 24473, 24475, 24477-24479, 24483, 24488-24489, 24491-24493, 24495-24496, 24500-24505, 24507, 24514, 24516, 24518, 24520-24522, 24526, 24528-24529, 24535, 24537-24540, 24542-24544, 24546, 24552, 24555, 24558-24559, 24566-24567, 24571-24572, 24574, 24576-24578, 24582-24583, 24585-24587, 24589, 24591-24592, 24594, 24596, 24598-24600, 24602-24603, 24605-24612, 24614, 24616-24617, 24619, 24625-24626, 24628, 24630, 24633-24634, 24639-24641, 24644-24647, 24649-24651, 24654-24655, 24661-24667, 24675-24678, 24682, 24684-24694, 24698, 24701-24702, 24704-24706, 24710-24712, 24715-24716, 24718, 24721, 24726, 24728-24730, 24732-24734, 24736-24737, 24740-24749, 24751-24755, 24758-24759, 24761-24769, 24771-24773, 24776-24780, 24783, 24787, 24789, 24791-24793, 24795, 24798, 24801-24803, 24805-24809, 24811, 24816, 24821-24826, 24832-24833, 24836, 24838-24840, 24842, 24845-24847, 24849-24850, 24852-24853, 24856, 24859, 24861-24862, 24864, 24866, 24868, 24870-24871, 24874, 24876-24885, 24887, 24891, 24893, 24898-24902, 24904-24906, 24910, 24915-24918, 24920-24921, 24923-24925, 24928, 24930, 24934, 24937, 24940, 24942-24944, 24946-24947, 24949, 24951-24953, 24955-24960, 24963-24971, 24973-24984, 24987, 24989-24990, 24993-24994, 24997-24998, 25000, 25002-25005, 25008-25014, 25017-25019, 25023-25028, 25030-25031, 25033, 25038, 25041, 25045, 25047-25051, 25053-25062, 25064, 25066-25074, 25076-25078, 25080, 25082-25083, 25086-25087, 25089, 25091, 25093-25094, 25096-25101, 25103-25104, 25109-25111, 25113, 25115-25117, 25119, 25121-25122, 25129-25132, 25136-25137, 25140, 25142-25143, 25145-25148, 25151-25160, 25162, 25165, 25169, 25172-25173, 25177, 25179-25182, 25187-25192, 25194, 25196, 25199, 25203, 25205-25206, 25209-25212, 25215, 25217-25219, 25221, 25231, 25233, 25235-25239, 25242, 25244, 25246, 25248-25249, 25252-25253, 25257, 25259-25267, 25269-25274, 25276, 25279, 25281, 25283-25288, 25290-25294, 25297, 25299, 25302-25305, 25308-25310, 25313-25320, 25322, 25324-25339, 25341, 25343, 25346, 25348-25353, 25355, 25359-25362, 25364-25365, 25368, 25372-25373, 25376, 25379-25381, 25383-25384, 25386-25387, 25389-25395, 25399-25400, 25404-25406, 25408, 25411, 25413, 25415-25416, 25418-25419, 25422-25424, 25429-25432, 25434-25437, 25440-25444, 25446-25448, 25450-25453, 25455, 25458, 25461-25462, 25464-25466, 25468-25470, 25472-25477, 25480-25481, 25483-25484, 25490-25493, 25498-25500, 25502, 25505, 25507, 25510, 25512, 25514-25516, 25521-25525, 25527-25530, 25532-25536, 25538-25539, 25542-25547, 25549-25554, 25560-25563, 25573, 25575-25584, 25588-25596, 25598-25599, 25605-25606, 25608-25616, 25618, 25622-25624, 25626, 25628-25630, 25632-25633, 25635-25639, 25642-25644, 25646-25648, 25650-25652, 25655-25656, 25658-25659, 25662-25664, 25666-25668, 25674-25683, 25686, 25688, 25690-25694, 25696-25704, 25706-25707, 25709-25712, 25714-25715, 25717-25725, 25728-25731, 25733, 25736-25748, 25750-25752, 25754-25757, 25759-25764, 25766, 25769-25777, 25779, 25782, 25784-25788, 25790, 25792, 25795-25797, 25799-25801, 25803, 25805-25806, 25813-25815, 25818-25820, 25822-25824, 25826-25827, 25830, 25832, 25834, 25836-25837, 25839-25842, 25844, 25848, 25852, 25859-25862, 25864, 25866-25867, 25869-25870, 25872, 25874-25879, 25881-25884, 25889-25891, 25893, 25895, 25897-25901, 25904, 25906-25908, 25910-25911, 25917, 25919-25925, 25927-25928, 25930-25931, 25933, 25936-25940, 25943, 25945, 25949-25950, 25952-25953, 25957-25967, 25970-25973, 25977-25981, 25984-25986, 25988, 25990-25992, 25995-25996, 25999-26003, 26005, 26007-26009, 26013-26019, 26021, 26025-26028, 26034-26035, 26037, 26039, 26042-26044, 26046-26047, 26049, 26051-26053, 26055, 26057, 26059, 26061, 26063, 26067-26069, 26072-26073, 26075-26080, 26082-26084, 26093, 26096-26100, 26102-26105, 26107-26108, 26110-26111, 26113, 26116, 26119, 26121-26122, 26124-26126, 26129, 26133-26138, 26140, 26142-26144, 26150, 26152-26157, 26160-26166, 26171, 26174, 26176-26184, 26187, 26189, 26191, 26193-26196, 26203-26205, 26208-26209, 26211, 26213-26214, 26217, 26221-26226, 26229, 26231-26232, 26235-26236, 26239-26241, 26243-26250, 26252-26255, 26260, 26262-26263, 26265-26267, 26269-26270, 26272-26275, 26277-26284, 26287-26289, 26296-26297, 26300, 26302, 26305, 26307-26308, 26310, 26312-26323, 26327, 26329, 26331-26333, 26336, 26339-26344, 26348, 26354, 26356, 26358-26360, 26362-26370, 26372, 26374-26376, 26378-26380, 26382, 26384, 26388-26389, 26391-26393, 26396-26401, 26403, 26405, 26412-26415, 26418-26419, 26422, 26425, 26431-26442, 26444-26446, 26450-26451, 26453-26455, 26457-26458, 26464, 26466, 26468-26470, 26472, 26475, 26478, 26480-26481, 26484, 26487, 26491, 26494, 26496, 26498, 26500-26502, 26504-26508, 26513-26516, 26518-26526, 26528, 26532-26537, 26539-26543, 26546-26548, 26550-26551, 26553-26555, 26557, 26559-26567, 26569, 26575-26579, 26582, 26584, 26587, 26590-26595, 26597-26600, 26602-26604, 26607-26611, 26613-26614, 26617, 26619-26621, 26625, 26628-26629, 26631-26635, 26637, 26639-26640, 26645, 26650-26651, 26654, 26659, 26661-26665, 26667-26668, 26673-26678, 26680, 26682-26683, 26685-26686, 26690-26693, 26695, 26697-26701, 26704-26705, 26707-26709, 26711-26714, 26717, 26721, 26723-26726, 26730-26731, 26733-26738, 26740-26750, 26752-26753, 26756-26757, 26759, 26770, 26772, 26774, 26777-26778, 26780, 26784-26788, 26791-26792, 26794, 26797-26802, 26804-26815, 26818-26821, 26823, 26828-26830, 26832-26840, 26842-26846, 26851-26854, 26858, 26860, 26863, 26870, 26876, 26878-26879, 26882, 26885-26887, 26889-26890, 26892-26894, 26896-26897, 26899-26903, 26910, 26912, 26915-26917, 26919, 26921-26924, 26927, 26930-26931, 26933, 26935-26936, 26938-26944, 26948, 26952, 26955-26957, 26959-26960, 26967-26968, 26972-26979, 26981-26983, 26985, 26987-26989, 26991-26996, 26998-27001, 27006-27007, 27009-27020, 27026, 27028, 27030, 27032-27033, 27037, 27039-27040, 27042, 27044-27050, 27052, 27054, 27056-27061, 27065-27071, 27074-27086, 27088-27093, 27095-27098, 27103-27108, 27110-27113, 27115, 27121-27122, 27124, 27127, 27130-27131, 27133-27138, 27146, 27148, 27151-27152, 27157-27159, 27163-27164, 27166-27167, 27169, 27171, 27173-27176, 27178-27181, 27186-27188, 27190-27191, 27193-27198, 27200, 27202-27203, 27205-27207, 27211-27214, 27219, 27221-27228, 27231, 27233-27234, 27237, 27239-27243, 27245, 27249-27250, 27252-27256, 27258-27259, 27265, 27268, 27270-27271, 27273-27276, 27281-27283, 27286, 27291-27296, 27302-27305, 27309-27312, 27316, 27318-27319, 27321-27322, 27326-27329, 27332, 27334-27336, 27338-27340, 27344-27349, 27351-27354, 27356-27359, 27361-27364, 27366, 27368, 27370-27371, 27373-27374, 27381-27382, 27386-27387, 27391-27392, 27394-27395, 27397-27400, 27403-27404, 27411-27413, 27420-27425, 27427-27430, 27434-27445, 27448-27451, 27461-27463, 27465-27470, 27472-27473, 27476-27477, 27479-27483, 27487, 27489-27491, 27494-27495, 27497, 27499-27500, 27504, 27507-27514, 27516-27521, 27524-27531, 27533, 27535, 27537, 27540, 27542, 27545-27547, 27549, 27551-27552, 27556-27558, 27560, 27563, 27565, 27567, 27572-27576, 27578-27581, 27585-27586, 27588, 27590-27591, 27594-27595, 27597, 27599-27600, 27603, 27605-27606, 27608-27609, 27611-27617, 27621, 27623-27626, 27628-27632, 27634-27638, 27640, 27642-27645, 27647, 27651-27654, 27656-27658, 27660, 27662-27673, 27676, 27678, 27681-27682, 27684-27688, 27690-27692, 27695-27699, 27701-27703, 27706-27707, 27709-27714, 27716-27717, 27720, 27723-27724, 27728-27732, 27734-27735, 27737, 27739-27744, 27751, 27753-27755, 27758-27762, 27764, 27767, 27769-27770, 27772-27775, 27777, 27779, 27781-27782, 27787-27788, 27790-27793, 27795, 27797, 27799-27801, 27805, 27808-27817, 27819-27833, 27837, 27840, 27848-27849, 27853-27857, 27860, 27864-27866, 27870-27871, 27874, 27876-27877, 27879-27881, 27884-27889, 27891, 27893-27897, 27899-27908, 27912, 27914, 27916, 27919, 27925-27929, 27931-27938, 27940-27955, 27957, 27962-27964, 27968, 27970-27978, 27980, 27985, 27989-27990, 27992, 27995-27996, 28002, 28006, 28009, 28011-28013, 28016-28017, 28021-28023, 28029-28030, 28034-28036, 28038-28039, 28041-28042, 28044, 28046-28047, 28049, 28051-28054, 28058, 28060-28061, 28065, 28068-28071, 28077, 28081-28085, 28087-28088, 28090-28091, 28093, 28095-28097, 28100-28102, 28105-28111, 28114-28116, 28118-28119, 28122-28127, 28131, 28135-28145, 28147, 28149-28152, 28156-28160, 28162-28163, 28165-28167, 28169, 28171, 28175-28179, 28181-28182, 28184-28192, 28200-28202, 28205-28209, 28213-28215, 28217-28222, 28224-28229, 28231-28233, 28235, 28238, 28243-28245, 28248-28249, 28251-28252, 28256, 28259-28264, 28266, 28268, 28272-28273, 28275-28276, 28279-28280, 28283, 28286-28287, 28289-28293, 28295-28296, 28298-28299, 28301, 28304-28305, 28307-28317, 28319-28323, 28329-28333, 28335-28339, 28341, 28344, 28348-28351, 28353, 28356-28357, 28359-28361, 28364-28366, 28368-28371, 28373-28378, 28381, 28383-28388, 28391-28392, 28394-28400, 28402, 28404-28406, 28408-28414, 28416-28424, 28427, 28429-28432, 28434-28436, 28439-28443, 28445-28449, 28454-28458, 28460-28462, 28464-28465, 28470, 28472-28473, 28475, 28477-28485, 28488-28492, 28494-28498, 28500, 28503-28507, 28509-28511, 28514, 28517, 28519-28521, 28523-28527, 28531, 28533-28536, 28538-28540, 28542, 28545-28546, 28550-28552, 28554, 28557-28558, 28560-28565, 28567-28568, 28573, 28575-28579, 28582-28583, 28585-28586, 28588, 28591-28596, 28604-28605, 28607-28613, 28615-28619, 28628-28630, 28632-28634, 28640-28641, 28643-28645, 28649-28651, 28654, 28657, 28659-28662, 28664-28667, 28669, 28672-28676, 28678-28679, 28681, 28683-28684, 28686, 28691, 28693-28695, 28697, 28700-28703, 28705-28707, 28709-28715, 28717-28718, 28721, 28723-28724, 28728, 28732-28736, 28744-28745, 28747, 28749-28752, 28757-28758, 28760, 28763, 28765-28768, 28770-28772, 28774-28776, 28778-28780, 28784, 28786-28789, 28791-28792, 28794-28795, 28797, 28804-28810, 28813-28815, 28817-28820, 28822, 28824-28827, 28829, 28831-28837, 28839-28840, 28842-28844, 28849-28854, 28856-28858, 28861-28862, 28864, 28867-28872, 28874-28876, 28878-28880, 28882, 28884, 28888-28889, 28892, 28898-28903, 28905, 28910, 28912-28915, 28917-28921, 28926, 28928-28930, 28933-28934, 28937-28938, 28940-28942, 28944, 28949-28950, 28952-28958, 28963, 28965-28967, 28973-28974, 28979-28980, 28982, 28984-28986, 28989-28992, 28995, 28997, 29000-29012, 29014-29015, 29017-29018, 29020-29021, 29023-29025, 29031-29040, 29043, 29046-29048, 29051, 29057-29060, 29062, 29065-29067, 29069-29075, 29077, 29079-29082, 29085-29090, 29092-29094, 29096, 29101-29102, 29104-29110, 29114, 29118-29122, 29130-29131, 29134-29135, 29138-29146, 29149, 29152, 29154-29159, 29162-29165, 29169-29171, 29173, 29175-29176, 29178-29179, 29186, 29188-29190, 29192, 29194, 29198-29199, 29201-29204, 29213, 29216-29219, 29222, 29224, 29228, 29232-29234, 29236, 29239, 29242, 29247-29251, 29253-29259, 29262-29265, 29267, 29269-29281, 29283, 29285, 29287, 29289-29293, 29295, 29300, 29303, 29305, 29307, 29309, 29312-29313, 29315-29317, 29320-29321, 29324-29325, 29327-29328, 29330, 29334-29335, 29337-29340, 29345-29348, 29350-29351, 29354, 29356, 29358-29361, 29363, 29365, 29367-29368, 29370-29371, 29373, 29375-29376, 29379-29392, 29394-29405, 29408-29409, 29416-29420, 29423-29424, 29428, 29430-29431, 29434, 29437-29438, 29440, 29445, 29449-29451, 29453-29454, 29461, 29467-29472, 29476-29479, 29493, 29498-29499, 29501-29502, 29504, 29507, 29511-29512, 29515, 29519, 29522-29525, 29534, 29538, 29542, 29544-29549, 29553, 29555-29564, 29569-29571, 29573-29574, 29577-29580, 29583, 29585, 29587-29588, 29591-29595, 29597-29598, 29601-29603, 29607, 29610, 29612-29614, 29617, 29619, 29622-29626, 29631-29633, 29635-29643, 29645-29646, 29652-29659, 29661-29662, 29664-29665, 29667-29668, 29676-29677, 29679, 29681-29684, 29686-29689, 29697-29698, 29700, 29702-29704, 29708, 29710-29713, 29716-29720, 29722-29726, 29728-29739, 29741-29746, 29748-29750, 29754-29755, 29757, 29760-29768, 29770, 29772-29773, 29776-29778, 29781-29784, 29786-29787, 29789-29792, 29794, 29796, 29799-29800, 29804, 29807-29808, 29816, 29819, 29826, 29828, 29830, 29832, 29834-29837, 29841-29842, 29847, 29849-29850, 29853-29854, 29858, 29860-29865, 29869, 29874-29875, 29879, 29881-29884, 29887, 29889, 29893, 29895-29896, 29898-29900, 29904-29908, 29913, 29915, 29918, 29921-29925, 29927-29931, 29933-29934, 29939-29941, 29943-29955, 29958-29962, 29967-29975, 29977-29978, 29982, 29987-29988, 29990-29993, 29998-30001, 30005, 30007, 30011, 30013, 30015, 30017-30018, 30020-30023, 30029, 30031, 30036, 30039-30041, 30045-30046, 30048, 30056-30064, 30066-30067, 30069-30071, 30079-30080, 30090, 30092-30093, 30096, 30099, 30104, 30106, 30110, 30113-30114, 30116-30121, 30125, 30127-30128, 30131-30136, 30138-30144, 30146-30147, 30149-30150, 30153-30156, 30159-30160, 30163-30167, 30173, 30175-30183, 30188-30195, 30199, 30201-30202, 30204-30207, 30210, 30214-30217, 30219-30228, 30230-30231, 30234, 30237, 30239-30240, 30244-30248, 30250-30255, 30261, 30263-30264, 30268-30271, 30275-30277, 30280-30282, 30285-30289, 30291-30296, 30298-30301, 30303, 30308-30309, 30311-30313, 30315, 30318, 30321-30323, 30326, 30328-30334, 30341, 30343-30347, 30350-30354, 30356-30358, 30360-30361, 30363, 30367-30369, 30371-30373, 30375-30376, 30378, 30380-30381, 30386-30388, 30390-30396, 30399-30401, 30404, 30406-30407, 30412, 30414, 30417-30419, 30422-30427, 30429-30431, 30433, 30435-30441, 30443-30451, 30453-30456, 30461-30463, 30465-30467, 30469-30480, 30483-30486, 30495-30506, 30508-30511, 30513-30514, 30516-30517, 30520-30521, 30523, 30525-30526, 30530, 30532-30535, 30549, 30552, 30557-30558, 30561, 30565-30566, 30568-30569, 30573-30574, 30576-30577, 30579-30580, 30584-30586, 30588, 30590-30592, 30595, 30597-30602, 30605, 30609-30610, 30612-30613, 30616, 30618, 30620, 30624-30628, 30630, 30632-30633, 30635-30636, 30638, 30640, 30642-30646, 30648-30649, 30651-30654, 30656-30659, 30662-30665, 30669, 30673-30677, 30679-30680, 30682-30686, 30689-30690, 30694-30695, 30697-30699, 30702-30703, 30707-30708, 30710-30711, 30714-30718, 30720, 30722-30732, 30736, 30738-30742, 30745, 30747-30752, 30754, 30759, 30761, 30763, 30767-30770, 30772, 30776-30778, 30780, 30783-30785, 30787-30789, 30792, 30794, 30796-30800, 30803, 30806-30809, 30811, 30814-30818, 30822-30823, 30826, 30828-30833, 30835, 30837-30843, 30846-30847, 30849, 30851-30852, 30855, 30861-30868, 30871, 30876-30878, 30880, 30882-30883, 30886, 30888-30894, 30897-30901, 30904-30906, 30909-30911, 30918, 30920, 30923, 30926-30927, 30930, 30932, 30934-30937, 30939, 30944, 30946-30947, 30949, 30951-30953, 30955, 30960-30962, 30968, 30972-30974, 30976-30977, 30980, 30982, 30984, 30989, 30991, 30995, 30997-30999, 31003, 31009, 31011-31013, 31015-31016, 31018, 31020, 31023-31027, 31029-31030, 31032, 31034, 31040, 31042, 31044-31045, 31047, 31049, 31051-31055, 31057-31060, 31062-31064, 31068-31072, 31074, 31077, 31081, 31088-31090, 31095-31097, 31099, 31103, 31105, 31108-31110, 31112-31113, 31116-31123, 31125-31126, 31128, 31133-31137, 31139-31141, 31143-31148, 31150-31151, 31153, 31156-31162, 31164, 31167, 31169, 31171-31172, 31174-31176, 31178-31181, 31183, 31186-31187, 31190-31192, 31194, 31197-31204, 31206-31207, 31209, 31211-31218, 31220-31221, 31223-31225, 31229, 31231, 31233-31238, 31240-31241, 31245-31246, 31250, 31254-31255, 31258-31265, 31267-31268, 31270, 31277, 31279-31280, 31284-31286, 31289, 31291-31293, 31296-31299, 31301-31302, 31304-31306, 31310, 31316-31320, 31327, 31329, 31332-31337, 31339-31340, 31342, 31347-31349, 31352-31355, 31358-31359, 31361, 31363, 31365, 31368-31373, 31375-31377, 31380, 31383-31385, 31388, 31390-31397, 31399-31405, 31408-31411, 31413-31414, 31416-31418, 31420, 31422-31428, 31434-31436, 31440-31443, 31445-31447, 31449-31452, 31454-31458, 31461-31464, 31466-31469, 31472-31475, 31483, 31485-31486, 31488, 31490-31491, 31493, 31495-31498, 31500-31503, 31506-31511, 31513, 31517, 31519-31520, 31530, 31532, 31534-31535, 31537, 31540-31541, 31544-31545, 31547-31548, 31550-31552, 31554-31555, 31558, 31561, 31566, 31571-31573, 31578, 31586, 31592, 31594, 31600-31602, 31604, 31606, 31612, 31616, 31619, 31621, 31628, 31630, 31632, 31635-31639, 31641, 31643, 31645-31646, 31648, 31652-31656, 31661, 31663, 31665, 31668-31680, 31686, 31689-31691, 31693, 31696-31698, 31702-31703, 31707-31708, 31710-31717, 31721, 31726, 31731, 31738-31739, 31742-31749, 31754-31756, 31758-31762, 31766-31767, 31769, 31772-31780, 31783-31785, 31787, 31789, 31791-31797, 31801-31816, 31818, 31821-31823, 31825, 31830-31832, 31834-31837, 31839-31840, 31843-31844, 31847, 31853-31855, 31857-31859, 31861-31869, 31871, 31873, 31875, 31877-31879, 31887-31889, 31891, 31893-31894, 31898, 31900, 31902-31906, 31908-31915, 31917-31924, 31926, 31932, 31934-31941, 31944-31946, 31948-31955, 31957-31958, 31960, 31962, 31964-31965, 31967-31972, 31974-31977, 31979, 31981-31989, 31992-31993, 31995, 31997-31998, 32000, 32002-32007, 32009-32010, 32012-32017, 32022-32023, 32025, 32028, 32032-32034, 32037-32038, 32040, 32044-32046, 32051, 32056, 32058, 32060-32061, 32063-32065, 32067-32069, 32071-32072, 32074, 32076-32078, 32081, 32083-32084, 32086-32091, 32093-32094, 32096-32098, 32100-32102, 32105, 32108-32111, 32113-32115, 32117-32118, 32125, 32128, 32132, 32134, 32136-32144, 32146-32147, 32149-32151, 32153-32161, 32163, 32174, 32176, 32178, 32180-32181, 32186-32194, 32197-32200, 32202-32204, 32206-32207, 32210-32214, 32216, 32219-32220, 32222-32223, 32225, 32227, 32229, 32231, 32236-32237, 32241, 32243, 32246-32250, 32254-32255, 32257-32262, 32265-32269, 32275, 32277-32278, 32280-32281, 32283-32287, 32289-32291, 32293-32296, 32298, 32300-32301, 32303-32305, 32307, 32309-32322, 32324-32325, 32327-32333, 32335-32336, 32341-32343, 32347-32348, 32350, 32354, 32356-32358, 32360, 32363-32366, 32368-32371, 32377-32380, 32382-32391, 32394-32395, 32398, 32400-32401, 32404, 32406-32409, 32411-32413, 32417, 32420-32421, 32423-32426, 32428-32432, 32434-32435, 32438, 32440-32441, 32446-32450, 32452, 32454, 32456-32467, 32469-32470, 32472-32473, 32475-32477, 32479-32483, 32486-32488, 32490-32496, 32498, 32502-32503, 32505, 32508-32510, 32512, 32515-32516, 32518-32521, 32524-32525, 32528-32531, 32534, 32536-32541, 32543, 32545, 32547-32552, 32554, 32557-32560, 32563, 32566, 32568, 32570-32572, 32574-32575, 32579, 32581-32583, 32587-32593, 32595-32597, 32599-32600, 32604-32605, 32607-32609, 32611, 32613, 32615, 32618-32619, 32621, 32626-32627, 32631-32633, 32636, 32639-32641, 32643-32646, 32649-32650, 32652, 32655-32656, 32659-32661, 32664-32665, 32667-32670, 32672-32680, 32682-32683, 32685-32686, 32688, 32690-32691, 32698, 32700-32701, 32706-32711, 32713, 32716, 32722-32726, 32735, 32737-32743, 32745, 32747-32748, 32750-32752, 32754-32757, 32759-32760, 32762-32769, 32772-32773, 32776, 32779, 32783-32784, 32787, 32790-32793, 32796, 32798-32799, 32804, 32806-32812, 32814-32815, 32817-32819, 32821-32822, 32824, 32826, 32831-32836, 32838, 32841, 32843, 32846, 32848, 32854, 32860, 32862, 32864, 32866-32868, 32870, 32872, 32875, 32877, 32880, 32885-32886, 32888-32889, 32891-32892, 32894-32898, 32900-32901, 32903, 32905, 32907, 32912-32921, 32925, 32930-32931, 32935, 32938, 32941-32943, 32945, 32948-32954, 32956-32957, 32959-32962, 32964-32968, 32970, 32973-32977, 32980, 32987-32993, 32995, 32997-32998, 33004-33005, 33007, 33010-33015, 33019, 33021, 33023-33024, 33026, 33028, 33030-33031, 33034-33035, 33037-33038, 33040, 33042-33043, 33045-33046, 33049, 33052, 33055-33056, 33058, 33060, 33064-33069, 33072, 33074, 33076, 33078-33079, 33081, 33084-33087, 33090-33092, 33094-33095, 33101, 33108-33113, 33115-33116, 33118, 33123-33124, 33126, 33130-33133, 33135-33136, 33139, 33150, 33161, 33164-33168, 33170, 33173-33179, 33182-33183, 33189, 33191, 33193, 33197, 33199, 33201, 33205, 33210-33211, 33214, 33217, 33219-33228, 33231, 33233, 33240, 33244-33246, 33248-33256, 33259, 33263, 33265, 33268-33272, 33274-33283, 33285-33286, 33288-33292, 33297-33298, 33301-33304, 33306-33307, 33310-33311, 33313-33314, 33317-33318, 33320-33321, 33323, 33326, 33329, 33333, 33338-33342, 33344-33347, 33349, 33351-33353, 33355-33357, 33359-33361, 33363, 33365-33366, 33368, 33370-33371, 33374-33376, 33378, 33381-33384, 33391, 33394, 33400, 33403-33404, 33409, 33411, 33414, 33418, 33420, 33422, 33424, 33432, 33434-33435, 33437, 33450, 33458-33460, 33462, 33464-33468, 33473-33474, 33480, 33488, 33493-33494, 33496-33497, 33503-33508, 33516-33518, 33520-33521, 33523, 33528, 33530-33532, 33537, 33539, 33542-33543, 33545-33550, 33552, 33561, 33563-33566, 33568-33570, 33572-33573, 33575-33576, 33579, 33581, 33585-33589, 33591-33594, 33596-33598, 33604, 33606-33609, 33616, 33622, 33624-33627, 33630, 33637-33639, 33645, 33649-33651, 33655-33662, 33668, 33670-33672, 33674-33676, 33679-33680, 33684-33690, 33692-33693, 33696-33705, 33716, 33718-33722, 33724, 33726-33727, 33730-33731, 33734-33736, 33738, 33740, 33742, 33746-33747, 33750-33751, 33753, 33755-33758, 33760, 33764-33765, 33767-33769, 33775, 33777-33778, 33780, 33782, 33784-33786, 33788-33794, 33796-33797, 33799, 33801-33803, 33805, 33811, 33816-33817, 33819, 33822, 33825, 33827-33829, 33831, 33833, 33835-33836, 33841, 33844-33848, 33850-33851, 33853-33855, 33857-33864, 33866, 33870, 33872, 33874, 33876-33877, 33882-33883, 33888-33889, 33891-33894, 33898, 33900, 33905-33909, 33911, 33914-33915, 33918-33919, 33921, 33923, 33929-33930, 33932-33936, 33941, 33944, 33947-33949, 33951, 33953, 33955-33962, 33964-33967, 33976-33978, 33980-33982, 33984-33988, 33994, 33996-34002, 34004-34005, 34008-34010, 34014-34015, 34017, 34019-34028, 34030-34035, 34037-34040, 34043-34047, 34050, 34053-34058, 34060-34061, 34063, 34065-34067, 34071-34076, 34080-34081, 34085-34087, 34089, 34091-34092, 34094, 34096, 34099-34100, 34104, 34106, 34109-34111, 34113-34114, 34116, 34120-34122, 34124, 34127-34129, 34131-34134, 34136-34140, 34144, 34146, 34148-34149, 34152-34153, 34156, 34158, 34162, 34165-34168, 34170-34172, 34174-34179, 34183, 34185-34186, 34189-34197, 34199, 34201, 34203-34205, 34207-34208, 34210-34217, 34221-34223, 34225-34227, 34238-34240, 34242-34244, 34252, 34256, 34263-34266, 34268, 34270-34278, 34281, 34283-34288, 34290, 34292-34295, 34299-34302, 34304-34307, 34309-34310, 34313-34315, 34317-34319, 34321, 34324, 34327-34331, 34335, 34337-34341, 34344, 34346, 34350, 34353-34354, 34358-34360, 34362-34363, 34365, 34368-34371, 34375-34377, 34385, 34387-34388, 34392, 34395-34400, 34402-34403, 34408-34409, 34411, 34413-34419, 34421-34426, 34433-34434, 34436, 34443-34444, 34446, 34448, 34452-34454, 34456-34458, 34463-34464, 34466-34470, 34472, 34478-34479, 34481-34482, 34484, 34486, 34489, 34492-34494, 34498, 34500, 34502, 34504, 34508-34509, 34511-34517, 34520, 34522, 34524-34526, 34528-34529, 34534-34543, 34545-34546, 34548-34553, 34556-34557, 34560, 34562, 34564-34565, 34567-34569, 34571-34574, 34579, 34588-34589, 34592, 34596, 34598, 34600, 34602-34609, 34611, 34614-34617, 34619, 34621-34626, 34628, 34631-34632, 34635, 34637-34639, 34643, 34645, 34647-34652, 34654, 34658, 34660-34661, 34664-34665, 34668-34672, 34676, 34679-34680, 34682-34687, 34689, 34694, 34697, 34699-34702, 34705-34706, 34708-34714, 34716, 34722-34725, 34730-34731, 34735-34736, 34740, 34743-34744, 34746, 34748-34754, 34757, 34759, 34762-34767, 34769-34771, 34774, 34777, 34779, 34783, 34787-34788, 34790-34791, 34795-34796, 34798, 34800-34802, 34804-34806, 34808-34814, 34816, 34819, 34821-34822, 34825-34826, 34829-34832, 34838, 34840, 34845, 34854-34855, 34857-34858, 34860, 34862-34863, 34866-34872, 34874-34875, 34878, 34880-34886, 34888, 34891-34894, 34903, 34906, 34910, 34912-34916, 34918, 34921-34922, 34924-34925, 34928, 34930-34931, 34938, 34940, 34942, 34944-34945, 34951-34956, 34959, 34962-34964, 34966-34987, 34989-34992, 34995-34997, 34999-35002, 35005-35007, 35013-35015, 35017-35020, 35022, 35025-35026, 35029, 35032-35043, 35046-35049, 35052-35055, 35057, 35059-35062, 35064, 35067, 35069, 35071-35079, 35081-35084, 35086-35087, 35090, 35094, 35098-35104, 35107, 35114-35116, 35119, 35121-35123, 35128-35134, 35136, 35142-35145, 35147-35150, 35155-35158, 35160, 35162, 35164-35165, 35171-35178, 35181-35182, 35185, 35187-35192, 35197, 35203-35204, 35206, 35209, 35213, 35218, 35220-35224, 35226-35227, 35229-35230, 35232-35234, 35236, 35239, 35241-35247, 35252-35254, 35257-35263, 35266, 35269-35272, 35274-35275, 35277, 35281-35285, 35288, 35292-35295, 35297-35299, 35304, 35306-35308, 35312, 35314-35317, 35321, 35325-35326, 35328-35330, 35335, 35337-35340, 35342, 35346-35358, 35361, 35363-35364, 35367-35368, 35370-35371, 35374, 35378-35381, 35384-35391, 35394-35395, 35397-35398, 35403-35406, 35408-35410, 35413, 35415-35417, 35420-35425, 35427, 35430-35434, 35436-35437, 35440-35441, 35444-35446, 35448-35460, 35464, 35467-35468, 35471, 35473-35476, 35478-35485, 35487-35491, 35493-35498, 35500-35501, 35506, 35508-35515, 35518-35521, 35523-35528, 35531-35534, 35536-35537, 35539-35544, 35546-35549, 35551, 35553-35554, 35556-35557, 35559-35561, 35563, 35565, 35567-35570, 35575, 35581, 35588, 35591-35595, 35597-35600, 35602-35603, 35606, 35608-35613, 35615-35625, 35627, 35630, 35632, 35634, 35642-35643, 35645, 35648-35650, 35652-35653, 35655, 35658, 35661-35662, 35664, 35666-35668, 35670, 35673-35675, 35679, 35681, 35683-35685, 35687-35689, 35691, 35693-35701, 35707-35708, 35711-35714, 35716-35721, 35726, 35728-35729, 35731, 35734-35741, 35744-35747, 35749-35750, 35752-35757, 35759, 35761-35763, 35766-35770, 35773, 35775, 35778, 35781-35787, 35790-35792, 35794-35802, 35804-35806, 35808-35809, 35812-35813, 35816-35817, 35824-35826, 35828-35832, 35834-35835, 35837-35838, 35840-35842, 35846-35849, 35853-35857, 35860, 35863, 35865, 35867, 35869, 35871, 35873-35876, 35878-35880, 35882, 35884-35886, 35889, 35891-35897, 35899-35901, 35903-35905, 35907-35912, 35914, 35918-35928, 35930-35933, 35936-35938, 35940-35949, 35951-35955, 35957, 35960-35961, 35963-35965, 35967-35968, 35971-35977, 35979, 35981-35986, 35990, 35992, 35994-35995, 35997-35998, 36000, 36002-36004, 36008, 36010-36019, 36021, 36023-36024, 36027-36030, 36032, 36034, 36036-36038, 36042, 36046-36047, 36050, 36052, 36054, 36056-36057, 36061-36063, 36066-36068, 36070-36076, 36079, 36081-36082, 36084-36087, 36089, 36092, 36095-36096, 36100-36104, 36106-36107, 36109, 36111-36112, 36115, 36119, 36127-36128, 36130, 36132-36136, 36139, 36141-36142, 36144, 36147-36148, 36150-36155, 36160, 36162, 36166, 36168-36169, 36171, 36173-36178, 36180, 36183, 36185, 36188-36189, 36192-36200, 36205, 36207-36208, 36211-36214, 36216-36220, 36222-36224, 36226, 36228, 36230, 36232-36239, 36242, 36245, 36247, 36250-36251, 36253-36255, 36257-36261, 36263-36277, 36279-36280, 36282, 36284, 36286-36290, 36292-36293, 36297, 36300, 36302-36303, 36305, 36310-36311, 36313, 36315-36316, 36318, 36320-36323, 36325, 36330-36337, 36341, 36343-36353, 36361-36366, 36368-36370, 36373-36375, 36379-36381, 36384-36386, 36388, 36392-36393, 36396, 36398-36400, 36403-36410, 36412-36413, 36415, 36417-36421, 36423-36428, 36430, 36432, 36434-36435, 36438, 36440-36447, 36449-36450, 36454-36455, 36461-36462, 36465-36467, 36469-36477, 36479-36482, 36485-36487, 36490-36494, 36498, 36500-36507, 36509, 36512-36513, 36520-36523, 36525-36528, 36530-36536, 36538, 36540-36541, 36543, 36547-36548, 36554, 36557, 36559-36560, 36562-36563, 36566, 36568-36569, 36571, 36573-36574, 36576-36577, 36579, 36583-36584, 36586, 36588-36598, 36600-36602, 36604-36605, 36612-36613, 36615, 36617-36623, 36625, 36630-36631, 36633, 36635-36637, 36641, 36643-36645, 36647, 36656-36658, 36662, 36665-36666, 36668-36669, 36673, 36676-36677, 36679, 36682-36686, 36688-36689, 36691-36697, 36699-36700, 36702-36703, 36705-36711, 36713-36714, 36716-36717, 36719, 36723, 36729-36731, 36733-36741, 36743, 36749-36750, 36753-36754, 36756-36760, 36762-36763, 36765, 36767, 36769, 36781, 36784-36785, 36787-36788, 36790, 36793-36797, 36801, 36803-36805, 36809-36810, 36813, 36815-36821, 36830-36839, 36841-36845, 36847-36849, 36852-36853, 36858-36859, 36866, 36868-36869, 36871-36874, 36876-36879, 36881-36886, 36892, 36894, 36896-36898, 36900-36902, 36905-36906, 36909, 36913-36914, 36917-36919, 36921, 36923, 36925-36935, 36939, 36944-36946, 36948-36953, 36957, 36960-36966, 36969, 36971-36975, 36977, 36982, 36985-36986, 36988-36989, 36991, 36993-36998, 37002-37006, 37008-37009, 37012-37015, 37017-37020, 37022, 37025, 37027, 37030-37036, 37041, 37043-37044, 37047, 37049-37050, 37052, 37054-37055, 37057-37058, 37062-37065, 37068, 37070-37072, 37074-37075, 37077, 37079, 37082-37084, 37086-37088, 37093-37095, 37097-37098, 37101-37102, 37106-37112, 37114-37125, 37127-37129, 37132, 37134, 37136, 37141, 37143, 37145, 37147, 37150-37153, 37155-37156, 37159, 37161, 37164, 37167-37169, 37171, 37176-37182, 37184, 37186-37187, 37191-37213, 37216-37217, 37219, 37222, 37224-37228, 37230-37231, 37233, 37235-37237, 37239, 37242, 37244-37246, 37248-37251, 37253-37254, 37256, 37258-37259, 37262, 37264-37266, 37268, 37270-37271, 37273-37276, 37279, 37282, 37285-37286, 37290-37294, 37300-37301, 37303-37312, 37317, 37320-37321, 37324-37326, 37328, 37330-37351, 37353-37354, 37356-37360, 37362, 37364, 37366, 37368-37371, 37373, 37375, 37377, 37379-37385, 37387-37393, 37396, 37398-37399, 37403-37409, 37411-37412, 37416-37417, 37420, 37422-37426, 37428-37431, 37434-37436, 37439-37440, 37442-37445, 37447-37449, 37451-37458, 37461, 37463-37464, 37466, 37468-37469, 37472-37481, 37485, 37488-37491, 37493-37494, 37496, 37499-37501, 37503, 37505-37511, 37518-37520, 37524-37527, 37529-37534, 37537-37538, 37540, 37542-37548, 37552, 37555, 37557-37558, 37560, 37562-37568, 37570-37571, 37574-37579, 37582, 37584, 37586-37606, 37608-37610, 37612, 37616, 37618-37620, 37622, 37624, 37628-37629, 37631, 37633, 37636-37639, 37646-37649, 37651, 37653-37657, 37659, 37665-37666, 37669-37670, 37675-37677, 37679, 37681, 37683, 37685-37690, 37692, 37695, 37697-37699, 37701, 37706-37709, 37712-37716, 37719-37721, 37727, 37732-37735, 37738, 37740, 37742, 37745-37747, 37749-37750, 37752, 37754-37755, 37759, 37761, 37763, 37769-37772, 37779-37781, 37784, 37786-37792, 37794-37795, 37797, 37799-37801, 37806, 37808-37812, 37814, 37816-37819, 37823-37824, 37826-37827, 37829-37830, 37832-37833, 37835, 37838-37841, 37843, 37846, 37848-37850, 37852, 37854-37855, 37857-37858, 37860-37861, 37865, 37867, 37870, 37874-37881, 37883-37886, 37888, 37893-37894, 37898, 37900, 37902, 37904-37909, 37911-37912, 37916, 37923, 37925, 37928-37929, 37932, 37934, 37936-37939, 37941, 37943-37944, 37946-37948, 37954, 37958-37968, 37970-37972, 37974, 37976-37978, 37980-37983, 37987, 37992, 37994, 37996, 37999-38001, 38003, 38005, 38012, 38016, 38020, 38022-38025, 38027-38028, 38030-38034, 38036, 38038-38053, 38059-38061, 38063, 38065-38067, 38069, 38071-38085, 38087-38093, 38095, 38099, 38101, 38103, 38105, 38108, 38110-38116, 38118-38122, 38125, 38127, 38130-38131, 38134, 38137-38139, 38141, 38143, 38145-38152, 38155-38156, 38160-38161, 38163-38165, 38169, 38172-38180, 38184, 38187-38189, 38191-38192, 38202-38205, 38207, 38211, 38214-38218, 38220, 38223, 38225, 38228-38231, 38233, 38235, 38237, 38239-38241, 38245, 38250-38252, 38254-38258, 38260-38261, 38263-38267, 38269, 38274-38276, 38282-38283, 38287-38290, 38292-38294, 38296, 38298-38299, 38301-38302, 38304, 38307, 38309, 38312-38314, 38316-38317, 38322-38330, 38332-38333, 38335, 38338-38340, 38342-38348, 38350-38352, 38355-38366, 38370-38371, 38373-38374, 38376-38377, 38379-38383, 38385, 38388-38393, 38397, 38399-38401, 38403-38404, 38407-38409, 38411, 38414, 38417-38418, 38421-38426, 38429-38430, 38432, 38436-38437, 38439-38440, 38442-38449, 38451-38455, 38462-38463, 38468-38476, 38478-38481, 38483-38489, 38492-38496, 38498, 38500, 38503, 38505-38508, 38510, 38512-38515, 38518-38519, 38529-38533, 38536, 38539-38542, 38546, 38549-38552, 38554, 38557-38560, 38564, 38566-38568, 38571-38575, 38577, 38579, 38584-38588, 38590, 38594-38600, 38602-38606, 38608, 38613-38614, 38616-38618, 38620-38628, 38631, 38633-38634, 38636, 38638-38639, 38642, 38645, 38647-38648, 38650, 38652, 38654-38655, 38658-38659, 38661, 38663-38677, 38681-38682, 38684, 38688, 38690, 38694, 38696, 38698-38699, 38701-38706, 38709-38710, 38715-38718, 38720, 38723, 38725, 38727-38728, 38735, 38738-38744, 38746, 38750-38754, 38756-38762, 38765-38768, 38770, 38775, 38779, 38782, 38784, 38787-38790, 38792-38797, 38799-38800, 38804-38808, 38812-38813, 38817-38818, 38820, 38824, 38826, 38828-38829, 38831-38832, 38837-38841, 38845, 38847-38853, 38855-38859, 38861-38865, 38867, 38869, 38872-38873, 38876-38880, 38883-38887, 38889-38891, 38897-38899, 38901-38908, 38910-38911, 38913-38918, 38920-38923, 38927-38928, 38931-38932, 38934-38935, 38937-38938, 38940-38944, 38947-38949, 38951, 38953, 38955-38956, 38958-38961, 38964, 38966, 38968-38969, 38973-38977, 38981, 38984, 38986-38989, 38991-38993, 38995-38996, 38998-38999, 39001, 39003, 39005, 39007-39009, 39011-39012, 39014-39023, 39026-39029, 39031, 39033-39038, 39042-39044, 39048-39055, 39059-39063, 39066-39067, 39069-39078, 39081-39082, 39084-39085, 39088-39092, 39094, 39096, 39098-39100, 39104, 39108-39115, 39118-39119, 39121-39122, 39124-39127, 39129, 39131-39136, 39138, 39142, 39144-39147, 39149-39152, 39154-39155, 39159, 39161-39167, 39169, 39171-39174, 39177-39178, 39180-39181, 39185, 39187, 39189-39191, 39193-39195, 39197-39199, 39201-39202, 39206-39208, 39210-39211, 39213, 39216-39217, 39219-39220, 39223-39229, 39232-39233, 39235-39240, 39244, 39248, 39251, 39256, 39258, 39260, 39266-39268, 39270-39272, 39278, 39280-39282, 39285, 39287-39288, 39290-39291, 39294, 39296-39298, 39300-39310, 39314-39316, 39318-39320, 39323, 39325-39326, 39328, 39330, 39334, 39339-39347, 39351, 39354-39361, 39364, 39366-39370, 39372, 39375, 39379, 39382-39383, 39385, 39389-39391, 39393-39395, 39397, 39399-39400, 39402-39403, 39405, 39408, 39410-39411, 39413-39415, 39419, 39421, 39423-39427, 39430-39432, 39434, 39436-39438, 39440-39444, 39446-39452, 39455-39467, 39469-39474, 39476-39477, 39480, 39484, 39486-39488, 39490-39496, 39498-39500, 39503-39510, 39512-39515, 39517-39518, 39520, 39527-39528, 39530-39531, 39533-39536, 39538-39539, 39542-39545, 39548, 39551, 39554, 39557-39564, 39567, 39569-39570, 39574, 39576, 39578, 39580-39582, 39584-39586, 39589-39590, 39593, 39598-39599, 39601-39602, 39605, 39611-39620, 39625-39628, 39630-39633, 39636-39639, 39642-39645, 39647, 39649, 39653, 39655-39662, 39664-39665, 39668-39669, 39671-39676, 39679, 39683-39685, 39689, 39691, 39693, 39695, 39698, 39700-39701, 39703, 39705-39706, 39708-39711, 39713, 39717-39725, 39729-39731, 39733, 39735, 39737-39741, 39743-39744, 39746, 39748, 39757-39764, 39766-39768, 39771-39774, 39776-39780, 39782-39783, 39788-39793, 39795, 39797-39803, 39805-39807, 39810-39811, 39814-39815, 39818, 39822, 39824-39828, 39830-39831, 39833, 39835, 39837-39840, 39842-39858, 39861, 39863-39864, 39867, 39869-39871, 39876-39883, 39885-39889, 39898-39904, 39912, 39915-39918, 39921-39926, 39928-39931, 39935, 39937-39938, 39940-39941, 39943-39947, 39951-39957, 39959, 39961-39967, 39969-39971, 39973, 39976-39977, 39979-39984, 39986-39987, 39989-39990, 39993-39995, 39998-40003, 40005-40006, 40008, 40010-40011, 40013, 40015, 40017-40018, 40021, 40026, 40028-40029, 40032-40033, 40037-40038, 40042-40043, 40045-40047, 40049-40050, 40052-40054, 40056-40059, 40061-40062, 40064, 40066-40068, 40070-40072, 40074-40076, 40078-40080, 40082-40088, 40090-40095, 40097-40098, 40100-40103, 40108-40110, 40113-40115, 40119, 40122-40125, 40128-40131, 40133, 40135, 40137-40141, 40145-40146, 40149, 40152-40153, 40155-40163, 40165-40171, 40174, 40177, 40181-40183, 40185-40186, 40188-40191, 40193-40196, 40199-40201, 40203-40206, 40210-40213, 40218, 40220-40223, 40225, 40227, 40229-40231, 40233-40234, 40236, 40238-40239, 40241-40243, 40245, 40249-40250, 40252-40257, 40263-40265, 40268-40278, 40281-40282, 40284, 40287-40291, 40295-40300, 40302, 40305-40309, 40311, 40314-40316, 40319-40320, 40322-40325, 40327-40331, 40333, 40335-40336, 40340-40353, 40355, 40357-40362, 40366-40372, 40374, 40376, 40378, 40380-40384, 40386, 40388, 40391-40392, 40394-40395, 40398-40403, 40407, 40409, 40411-40417, 40419-40422, 40424-40425, 40427-40431, 40433-40434, 40436-40437, 40443, 40445-40447, 40452-40453, 40457-40460, 40462, 40464-40466, 40468-40469, 40472-40474, 40476-40478, 40480-40484, 40487-40490, 40492-40497, 40499, 40502, 40506, 40509, 40511-40514, 40516, 40518-40519, 40521-40522, 40525-40526, 40529-40531, 40533-40535, 40538, 40542, 40544-40546, 40549-40553, 40560-40562, 40564-40565, 40568, 40571-40572, 40575, 40577-40582, 40584, 40586-40594, 40596, 40599-40601, 40605-40613, 40615, 40617, 40624-40626, 40628, 40630-40631, 40633-40635, 40643-40646, 40649, 40651, 40657-40659, 40661, 40663-40669, 40671, 40674-40680, 40683-40689, 40691, 40693-40696, 40700, 40702-40703, 40705, 40708-40712, 40714-40716, 40718-40721, 40725-40727, 40729-40733, 40736-40737, 40739, 40741, 40743-40746, 40748, 40752, 40755-40762, 40764-40765, 40767, 40771-40773, 40776, 40780, 40783-40785, 40789-40790, 40792, 40795-40797, 40800, 40803, 40806-40807, 40809-40818, 40820-40824, 40826, 40828, 40830-40831, 40833-40834, 40838, 40840-40843, 40846-40851, 40853-40854, 40857, 40859, 40861-40867, 40869-40873, 40875, 40880-40884, 40887, 40889-40898, 40900-40905, 40909-40910, 40912-40924, 40926, 40928, 40935-40939, 40943, 40947-40949, 40951-40961, 40963-40964, 40966-40967, 40970-40971, 40974-40984, 40986-40991, 40993-40996, 40998-41001, 41003-41010, 41013-41015, 41017-41023, 41025-41035, 41037, 41039, 41041, 41044-41049, 41052, 41057, 41059-41061, 41063-41065, 41067-41073, 41076-41078, 41080-41094, 41096-41099, 41101-41102, 41104, 41106-41112, 41114-41115, 41117-41125, 41128-41130, 41132-41133, 41135, 41137, 41140, 41142-41149, 41152, 41163, 41165, 41167-41171, 41176, 41179-41183, 41187-41189, 41191-41192, 41194-41198, 41201, 41205, 41207, 41209, 41214-41215, 41217-41224, 41226, 41230, 41232-41234, 41238-41239, 41241-41244, 41247-41248, 41251-41254, 41257-41258, 41260-41266, 41268, 41271, 41273-41276, 41278, 41280-41281, 41284, 41287-41290, 41293-41299, 41301, 41304-41306, 41308-41309, 41312, 41314, 41316-41318, 41327, 41329-41334, 41338-41340, 41342-41344, 41346, 41348, 41350-41357, 41359-41360, 41362-41365, 41368, 41374-41379, 41382, 41384, 41387, 41389, 41392-41397, 41401, 41403, 41407-41411, 41413-41417, 41420-41421, 41423-41427, 41429-41430, 41432-41436, 41439-41440, 41442-41443, 41445-41448, 41452, 41454-41455, 41457-41460, 41462-41466, 41469, 41472-41474, 41476-41477, 41479-41482, 41484, 41494, 41496-41502, 41504, 41506, 41508-41509, 41512-41514, 41517-41518, 41520-41524, 41526, 41530-41535, 41537-41543, 41545, 41547-41549, 41551, 41553, 41555-41560, 41565, 41568, 41570-41575, 41579-41582, 41584-41586, 41588-41593, 41595, 41597-41598, 41602, 41605-41610, 41615, 41617, 41619-41621, 41623-41627, 41631-41632, 41634, 41636-41641, 41643, 41648-41650, 41653, 41657-41667, 41670, 41673-41674, 41676, 41680-41682, 41685-41688, 41690-41691, 41693-41694, 41696-41708, 41710-41711, 41713-41717, 41720-41722, 41726-41732, 41734-41739, 41741-41742, 41744, 41746, 41748, 41750-41757, 41761, 41763-41765, 41767-41768, 41770, 41774, 41780-41781, 41783-41791, 41794, 41797-41798, 41800-41801, 41803-41805, 41808, 41810-41811, 41813-41816, 41820-41821, 41824, 41827, 41829, 41832, 41834-41835, 41837-41843, 41845, 41849-41850, 41854-41857, 41861-41863, 41865-41866, 41868, 41871-41873, 41875-41877, 41879, 41881-41885, 41887, 41890-41891, 41893-41894, 41897, 41901, 41904-41908, 41911, 41913-41916, 41918, 41920, 41922, 41924-41930, 41932-41935, 41937-41939, 41941-41946, 41948-41951, 41958, 41962-41963, 41965, 41967-41970, 41972, 41974-41976, 41978-41980, 41982-41983, 41987, 41989-41990, 41994, 41996, 42002-42003, 42005-42007, 42009, 42011-42012, 42014, 42016, 42018-42021, 42023-42025, 42028-42032, 42034-42038, 42043-42047, 42049-42050, 42052-42053, 42055, 42059-42060, 42062, 42065, 42070, 42072-42074, 42078-42080, 42082, 42084-42085, 42088, 42090-42101, 42103-42104, 42106-42113, 42115-42117, 42119-42120, 42122-42127, 42129-42130, 42133, 42135, 42137-42140, 42142, 42145, 42148-42155, 42157, 42159-42160, 42162, 42164-42165, 42167, 42169-42170, 42172-42173, 42176-42186, 42188-42190, 42192-42195, 42199-42200, 42205-42206, 42209, 42211-42212, 42215, 42219-42229, 42231-42232, 42234-42235, 42237-42238, 42241-42243, 42246-42250, 42252-42255, 42257-42263, 42267-42272, 42275-42278, 42282, 42284, 42286-42288, 42290-42295, 42297-42307, 42309-42313, 42315, 42318, 42321, 42323, 42325, 42327, 42329-42331, 42333-42334, 42336-42337, 42339, 42341, 42345-42347, 42350, 42352, 42354, 42356-42357, 42360-42361, 42363-42364, 42366-42376, 42379, 42381, 42383-42387, 42392-42394, 42397, 42403, 42405-42406, 42409-42411, 42413-42414, 42416, 42418-42421, 42423-42429, 42431-42437, 42439-42441, 42443, 42445, 42447-42449, 42451-42461, 42464, 42467-42468, 42472-42474, 42476-42478, 42482-42483, 42485, 42488-42497, 42500, 42502, 42504-42505, 42507-42508, 42511, 42516-42519, 42522, 42524-42526, 42528-42529, 42535-42536, 42538, 42540-42541, 42543-42546, 42548-42553, 42556, 42558, 42560-42572, 42575-42580, 42582, 42585, 42587, 42589-42591, 42594-42596, 42598-42601, 42603-42605, 42607, 42609-42614, 42620, 42622-42623, 42626-42630, 42632, 42637, 42640, 42643-42644, 42646-42651, 42654-42661, 42663-42670, 42674-42675, 42677-42678, 42680, 42682-42684, 42686-42691, 42693-42696, 42698-42701, 42703, 42705-42709, 42711, 42715-42720, 42723, 42725, 42727-42728, 42730-42731, 42733, 42737-42738, 42742-42743, 42745-42747, 42749, 42752, 42754-42755, 42757-42760, 42763, 42766, 42770-42772, 42774-42775, 42778-42788, 42791-42793, 42795-42796, 42798, 42803, 42805-42806, 42808-42813, 42817-42818, 42822, 42825-42827, 42830-42831, 42834, 42836, 42839-42840, 42842-42844, 42847, 42849-42857, 42862-42869, 42872, 42874, 42876-42877, 42881, 42883, 42886-42888, 42890-42900, 42902-42906, 42909-42917, 42920, 42924, 42926, 42928-42933, 42935, 42937-42939, 42941-42942, 42945-42947, 42950-42951, 42953-42956, 42958-42964, 42966-42973, 42975-42976, 42980, 42982, 42984-42985, 42987-42990, 42992, 42994-42995, 42997-43003, 43005, 43007, 43009-43010, 43014-43015, 43017-43019, 43021-43029, 43032, 43034-43043, 43047-43048, 43050-43052, 43054-43057, 43059-43061, 43063, 43065-43066, 43068-43070, 43073, 43075, 43077-43079, 43082-43085, 43087, 43089, 43092-43098, 43100, 43102-43103, 43106-43107, 43109-43116, 43120, 43122-43123, 43127-43130, 43132-43135, 43137-43139, 43144, 43146, 43148-43149, 43151-43153, 43156-43157, 43159, 43161, 43164, 43166, 43168-43169, 43176-43177, 43179, 43184, 43188, 43190-43191, 43193-43197, 43199, 43206-43207, 43210-43211, 43214-43220, 43226, 43228-43229, 43232-43235, 43238-43240, 43243, 43245-43247, 43252-43254, 43257-43259, 43261-43262, 43265, 43267-43270, 43272-43273, 43277, 43279-43285, 43287-43288, 43290-43292, 43296, 43298, 43303-43308, 43310, 43312, 43317-43318, 43325, 43329-43330, 43332, 43334-43336, 43341-43342, 43344, 43347-43349, 43351-43354, 43356-43357, 43359-43360, 43362, 43364-43365, 43367-43368, 43370-43375, 43377, 43379-43381, 43384-43388, 43392-43393, 43396, 43398-43399, 43401, 43404-43407, 43410, 43412-43413, 43416, 43419-43424, 43427-43434, 43436-43438, 43441-43453, 43455-43458, 43460-43466, 43468-43470, 43472-43473, 43475-43478, 43480, 43482, 43485-43491, 43493, 43495, 43497-43504, 43506-43507, 43510-43511, 43515-43516, 43518, 43522-43524, 43526, 43528-43529, 43531-43537, 43539, 43543-43544, 43546-43549, 43551, 43553-43555, 43567-43570, 43572-43573, 43575-43577, 43579-43580, 43585-43590, 43592-43593, 43595, 43597, 43599-43600, 43604, 43606, 43608-43609, 43611, 43613, 43615-43616, 43618-43620, 43623-43624, 43626-43627, 43629, 43631, 43637-43639, 43641-43643, 43645, 43647, 43650, 43657, 43659, 43661, 43664-43667, 43669, 43671-43672, 43674-43677, 43679, 43681-43682, 43684, 43687-43688, 43696, 43698, 43700, 43704, 43709, 43711, 43718, 43723-43727, 43729, 43731, 43733-43734, 43736-43737, 43739-43740, 43743, 43745-43749, 43751-43756, 43759-43760, 43763, 43766, 43768, 43772, 43774, 43776, 43778, 43780-43782, 43784-43794, 43798-43801, 43805, 43807-43811, 43818-43819, 43821, 43823, 43827, 43832, 43834, 43841-43846, 43849-43852, 43855-43856, 43858-43859, 43863-43864, 43866, 43868, 43870-43873, 43875-43877, 43879, 43883, 43886, 43890-43895, 43899-43904, 43907, 43909-43911, 43913, 43915, 43917-43918, 43920-43925, 43927, 43929-43934, 43939, 43941-43944, 43947, 43951, 43953, 43956, 43959-43960, 43962-43964, 43966, 43968-43969, 43971, 43976-43978, 43982, 43986-43987, 43989, 43991, 43993, 43995-43999, 44003-44005, 44008-44009, 44011-44016, 44024, 44027, 44030-44031, 44033-44039, 44041-44044, 44046-44049, 44051-44056, 44058-44061, 44064-44065, 44069-44071, 44073-44074, 44080-44083, 44087-44095, 44100-44101, 44103, 44105, 44110, 44113-44115, 44118-44119, 44121-44126, 44129-44131, 44133, 44135-44140, 44142-44144, 44146, 44149, 44151-44156, 44158, 44160-44172, 44174-44177, 44179, 44182-44185, 44187-44188, 44190-44192, 44196-44203, 44205-44207, 44211, 44213, 44215, 44217, 44222-44223, 44226, 44228, 44230, 44232-44236, 44238, 44240-44243, 44245-44259, 44261, 44264-44267, 44269, 44271-44275, 44277, 44279-44282, 44285-44286, 44291-44293, 44296-44297, 44300, 44302, 44306, 44308, 44313-44323, 44325-44331, 44333-44338, 44341-44342, 44344-44345, 44350, 44352-44353, 44356, 44358-44363, 44365-44367, 44369-44370, 44372-44374, 44378-44379, 44384, 44386-44387, 44391, 44393, 44395-44396, 44398-44401, 44403, 44405, 44408-44409, 44411-44414, 44417-44418, 44421-44423, 44425, 44430-44431, 44433-44434, 44437, 44440, 44443-44447, 44449, 44453-44457, 44463-44465, 44469-44481, 44484, 44492, 44494-44495, 44497, 44502-44503, 44505, 44507-44513, 44516, 44518, 44520-44523, 44525-44526, 44528, 44530, 44534, 44537-44538, 44540-44542, 44544-44548, 44550, 44552-44560, 44562, 44564-44565, 44567, 44570-44571, 44573-44574, 44576-44577, 44580, 44582-44588, 44590, 44592-44593, 44596, 44598, 44600, 44603-44605, 44607-44610, 44612, 44615, 44618, 44620-44623, 44625-44629, 44631, 44638-44639, 44642, 44644-44648, 44650, 44655, 44657-44658, 44660-44666, 44672-44679, 44681-44683, 44685, 44690, 44692-44693, 44695-44696, 44699-44700, 44703-44706, 44710, 44712, 44715-44718, 44720, 44722, 44727-44731, 44735, 44737, 44740-44741, 44744, 44747-44749, 44752, 44755-44756, 44758-44765, 44767, 44769-44770, 44774-44775, 44778, 44783-44785, 44787-44789, 44791, 44793, 44796-44800, 44807, 44809-44810, 44812, 44814-44818, 44820, 44823, 44825-44826, 44828-44829, 44831-44835, 44837, 44839, 44841-44847, 44852, 44855-44865, 44867-44870, 44872-44878, 44882, 44884-44885, 44887-44892, 44894-44895, 44898, 44900, 44902-44909, 44912-44916, 44919-44925, 44927, 44929-44933, 44935, 44937, 44939, 44942-44946, 44949-44952, 44955-44956, 44958-44959, 44963-44965, 44968-44979, 44981, 44984-44991, 44994-44996, 44998-45001, 45003, 45005-45006, 45013-45014, 45016, 45018, 45020-45030, 45032, 45039-45040, 45043-45044, 45052, 45054-45060, 45064, 45067, 45070, 45073-45074, 45077, 45079-45085, 45087-45090, 45092-45098, 45100-45101, 45104, 45106-45112, 45114, 45117, 45119, 45124-45125, 45127, 45130, 45133, 45136-45138, 45140-45141, 45143, 45145, 45147-45148, 45151, 45155-45157, 45160-45161, 45163-45170, 45174-45176, 45179-45185, 45187, 45189-45191, 45193-45194, 45197, 45200, 45203, 45205, 45207-45218, 45220-45223, 45226, 45228, 45231-45235, 45237-45241, 45244-45249, 45251-45254, 45256, 45258, 45260, 45264-45265, 45269-45283, 45285-45286, 45288, 45293-45294, 45296, 45299-45302, 45307, 45309-45316, 45319-45320, 45322-45326, 45328, 45330, 45332-45339, 45341, 45343, 45346-45354, 45357, 45359, 45361, 45363, 45365-45367, 45369-45370, 45372-45374, 45377, 45379-45384, 45387-45388, 45394, 45398-45403, 45405-45424, 45427-45429, 45432-45440, 45442-45444, 45446-45453, 45457-45460, 45462-45470, 45472, 45474-45477, 45481-45486, 45489-45492, 45494-45495, 45497-45498, 45501-45502, 45504-45506, 45508, 45510-45521, 45523-45524, 45526-45531, 45533, 45535-45543, 45546-45549, 45551-45556, 45558-45559, 45561-45572, 45574-45579, 45581, 45585, 45589-45590, 45592-45600, 45604, 45606-45608, 45610-45616, 45618-45622, 45626-45631, 45633-45638, 45643-45646, 45648-45653, 45656-45659, 45662, 45664, 45666, 45668, 45670-45671, 45673-45676, 45678, 45681, 45683, 45686, 45688-45693, 45695, 45697-45703, 45710, 45713-45718, 45724-45729, 45731-45738, 45740, 45743-45744, 45748, 45752-45756, 45760, 45762-45766, 45768-45774, 45776-45778, 45780-45782, 45788-45789, 45791, 45793-45798, 45800, 45802-45813, 45817, 45820, 45828-45835, 45837-45839, 45842-45844, 45846, 45848-45849, 45851, 45854-45862, 45864-45868, 45870, 45872-45873, 45875-45876, 45879-45884, 45887, 45891-45893, 45895-45897, 45899, 45901-45903, 45905-45906, 45909-45910, 45913-45914, 45916-45923, 45925-45926, 45929, 45932, 45935-45941, 45944-45951, 45954-45955, 45957-45958, 45960, 45962-45965, 45967, 45970, 45972-45976, 45978-45980, 45982-45984, 45988-45991, 45993-45996, 45998-45999, 46001-46002, 46005, 46008-46010, 46014-46017, 46021, 46024, 46032-46033, 46035-46038, 46040-46047, 46049, 46051, 46053, 46056-46060, 46063-46067, 46071-46078, 46080-46087, 46090-46093, 46103-46105, 46107-46111, 46113-46116, 46119-46121, 46129-46130, 46132-46138, 46141-46143, 46146, 46155-46157, 46160-46161, 46163-46166, 46168, 46172-46176, 46180-46182, 46184-46185, 46189-46192, 46194, 46196, 46199, 46201-46203, 46205, 46207, 46212, 46214-46215, 46218-46219, 46224, 46227-46232, 46235, 46238, 46240-46241, 46244-46247, 46250, 46253, 46256-46260, 46262, 46268-46269, 46271-46272, 46279-46280, 46284, 46287, 46290, 46292-46296, 46298, 46305, 46307-46308, 46312, 46314-46315, 46317-46327, 46331-46332, 46337-46342, 46346, 46350-46356, 46359-46361, 46365-46370, 46373-46382, 46386-46389, 46396, 46398-46399, 46401, 46403-46404, 46406, 46411-46414, 46416, 46418-46420, 46422-46424, 46427, 46429, 46431-46436, 46439-46440, 46443-46447, 46450, 46453-46454, 46457-46458, 46462-46467, 46469-46472, 46475-46479, 46481-46485, 46491-46492, 46494-46507, 46509-46510, 46512, 46515-46518, 46520, 46522-46526, 46528-46534, 46536-46540, 46542, 46544, 46547-46549, 46552-46558, 46560, 46565-46572, 46578-46582, 46589-46594, 46597-46599, 46602-46604, 46606-46607, 46611-46612, 46614, 46618, 46620, 46622-46623, 46625, 46627, 46629-46632, 46634, 46636-46639, 46641-46644, 46646-46649, 46652-46655, 46657-46659, 46661-46663, 46665, 46667-46671, 46676-46678, 46680-46681, 46685, 46687-46689, 46691-46692, 46694-46695, 46697, 46699-46700, 46702-46703, 46705, 46707-46710, 46712, 46714, 46716-46721, 46723-46724, 46726-46731, 46734-46735, 46737-46746, 46748-46749, 46751-46753, 46755, 46758, 46760, 46762, 46765-46771, 46773, 46775-46779, 46782, 46784, 46787-46788, 46792-46795, 46797-46799, 46801, 46803-46805, 46807, 46809-46813, 46815, 46819, 46821-46822, 46826-46829, 46835, 46838-46840, 46842-46844, 46848-46849, 46852-46854, 46857-46858, 46861-46864, 46867, 46869-46873, 46875, 46877-46878, 46881-46882, 46890, 46892-46893, 46895-46899, 46903-46907, 46909, 46911, 46916-46919, 46921-46922, 46924-46928, 46930-46933, 46936-46938, 46941-46944, 46947, 46949-46950, 46952, 46956-46962, 46964, 46967, 46974-46979, 46981, 46983, 46985-46986, 46989, 46992, 46994-46996, 46999-47000, 47003, 47006-47011, 47013-47016, 47018-47026, 47028-47029, 47031-47033, 47036, 47041-47042, 47044, 47047-47048, 47051-47056, 47058, 47062, 47065-47067, 47069-47074, 47077-47078, 47081-47082, 47085-47090, 47092-47097, 47100-47104, 47107-47110, 47112, 47114, 47116-47118, 47120-47121, 47126-47129, 47132-47135, 47137-47138, 47140-47146, 47148, 47150, 47154-47155, 47158-47161, 47164-47166, 47169, 47173-47181, 47183-47189, 47193, 47196-47197, 47199, 47203-47206, 47208-47211, 47213, 47215, 47218, 47223, 47225, 47227, 47229-47230, 47234, 47236-47239, 47241-47242, 47244, 47247-47248, 47254, 47256-47257, 47259, 47261, 47263-47265, 47268-47269, 47272-47273, 47278-47285, 47287, 47289-47290, 47292, 47294, 47296-47302, 47304, 47306, 47309-47317, 47322, 47324, 47326, 47328-47329, 47331-47336, 47338-47344, 47347-47349, 47351-47352, 47356-47357, 47359-47360, 47367-47368, 47370, 47373-47374, 47376, 47382, 47384-47385, 47387, 47390-47398, 47401-47411, 47414-47418, 47420, 47422-47424, 47426-47428, 47431-47434, 47436-47440, 47442-47444, 47446, 47449-47460, 47467, 47473-47474, 47476-47477, 47479, 47481-47483, 47485, 47487, 47489, 47491-47493, 47496-47498, 47500, 47502-47506, 47510, 47512-47514, 47520-47522, 47525, 47528-47532, 47535-47537, 47540, 47542-47543, 47547-47549, 47551, 47553-47556, 47563, 47569, 47572-47575, 47578, 47580, 47582, 47584-47586, 47592-47598, 47600-47603, 47607-47609, 47611-47613, 47616-47617, 47619-47621, 47623-47624, 47626, 47628, 47630-47633, 47635, 47640-47644, 47647-47649, 47651, 47656-47660, 47663, 47665-47666, 47668-47680, 47687, 47691-47692, 47695-47696, 47703, 47705, 47711, 47713, 47715, 47718-47719, 47723, 47727-47728, 47730-47731, 47733-47734, 47736-47745, 47748-47749, 47753-47757, 47759, 47761, 47763, 47765, 47768-47769, 47771, 47774-47775, 47781-47783, 47785, 47787-47789, 47793-47794, 47798-47800, 47803-47804, 47806-47808, 47810, 47812, 47815-47829, 47835-47841, 47843, 47845-47850, 47852-47857, 47859-47860, 47862-47866, 47868-47875, 47877, 47879-47880, 47883-47885, 47887-47888, 47890-47893, 47896-47899, 47902-47909, 47911-47912, 47916, 47920, 47922, 47925, 47928-47929, 47932-47940, 47942, 47945-47947, 47951-47954, 47956-47959, 47961, 47963-47969, 47971-47972, 47974, 47976, 47979-47985, 47991, 47993-47997, 47999-48003, 48005, 48007, 48010-48017, 48020-48026, 48028, 48031-48036, 48039-48040, 48043-48050, 48052, 48054-48056, 48059, 48061-48069, 48071-48072, 48074-48077, 48079-48081, 48083, 48085-48087, 48089-48091, 48093, 48096-48102, 48104-48105, 48107-48112, 48114-48115, 48119-48124, 48127, 48132-48137, 48139-48140, 48142-48146, 48149, 48153-48157, 48160, 48162-48164, 48166, 48168, 48170-48172, 48174-48176, 48178-48179, 48184-48187, 48190, 48192, 48194-48195, 48198-48199, 48202-48204, 48208-48209, 48211, 48213-48223, 48227-48230, 48232-48234, 48236-48237, 48239-48241, 48246-48251, 48254-48259, 48261-48264, 48267-48273, 48276, 48280, 48283, 48286-48290, 48292-48301, 48304-48305, 48308-48315, 48318, 48320-48326, 48328-48329, 48331, 48333-48336, 48338, 48340, 48343, 48347-48358, 48360-48361, 48363, 48365-48366, 48368-48369, 48371-48374, 48376, 48378-48381, 48383-48384, 48387-48389, 48391-48392, 48394, 48397-48398, 48400-48402, 48404-48405, 48407-48408, 48410, 48412-48418, 48421-48425, 48430-48432, 48434, 48436, 48441-48443, 48446-48447, 48449-48450, 48452-48454, 48457, 48460, 48462-48464, 48466-48473, 48475-48479, 48483-48496, 48498-48504, 48506-48511, 48517-48519, 48524-48526, 48528, 48530, 48532-48535, 48538-48541, 48543-48544, 48546-48551, 48553, 48555-48560, 48562-48568, 48570-48575, 48577-48578, 48580-48582, 48584, 48588, 48590, 48593-48594, 48596-48597, 48599-48600, 48602-48603, 48606-48607, 48609-48611, 48614-48617, 48619-48624, 48630-48632, 48634, 48639-48646, 48650, 48653-48655, 48658, 48660-48665, 48667, 48669, 48671, 48675-48676, 48678-48679, 48681, 48683-48684, 48690-48691, 48694-48697, 48703, 48705-48708, 48710-48719, 48722-48723, 48725-48726, 48731-48738, 48742-48743, 48746, 48749, 48753, 48758-48760, 48763-48764, 48767-48768, 48770, 48772, 48774-48775, 48777, 48780-48783, 48785-48786, 48789-48790, 48796-48798, 48800-48801, 48804-48805, 48810-48815, 48818, 48823, 48825, 48828, 48830, 48833-48835, 48838, 48840-48843, 48845-48847, 48851, 48854, 48859-48862, 48865-48867, 48870-48871, 48873-48874, 48877-48881, 48888-48889, 48891, 48897, 48899-48906, 48908, 48910, 48912-48914, 48917, 48920-48921, 48923-48932, 48934-48938, 48941-48942, 48944-48952, 48954-48957, 48959-48961, 48963-48967, 48972-48974, 48977, 48980, 48982, 48984-48991, 48993-48994, 48996-48999, 49001, 49003-49005, 49007, 49009, 49013, 49015-49020, 49027-49034, 49036-49037, 49040, 49043, 49045-49046, 49050, 49054, 49056-49057, 49060, 49067-49069, 49071-49077, 49080-49086, 49088-49090, 49094, 49096, 49099-49101, 49104-49105, 49108-49114, 49116, 49119-49121, 49123, 49125-49126, 49128, 49132, 49134-49135, 49138, 49141-49143, 49146, 49149, 49153, 49156-49157, 49160, 49167-49171, 49173-49182, 49186-49188, 49190, 49195-49202, 49204-49211, 49215, 49227-49233, 49235, 49238-49243, 49245-49247, 49251, 49256, 49258-49260, 49263-49267, 49269, 49271-49273, 49279-49283, 49285-49286, 49289, 49295, 49297-49300, 49302-49305, 49309-49313, 49315, 49317-49320, 49322, 49324-49330, 49332-49337, 49339-49344, 49346-49347, 49349-49351, 49353, 49355, 49357-49358, 49361-49363, 49365-49372, 49375, 49377, 49380-49381, 49383, 49385, 49387-49391, 49404, 49407, 49410-49412, 49414-49417, 49421, 49423-49424, 49426, 49428-49430, 49433-49436, 49438-49439, 49441-49443, 49446, 49450, 49453-49462, 49465, 49467-49470, 49472, 49477, 49479-49481, 49483, 49485-49486, 49488-49490, 49494, 49497, 49499-49501, 49503, 49507-49508, 49510, 49512-49515, 49518-49522, 49524, 49526-49528, 49530, 49532-49541, 49543-49545, 49547, 49550-49552, 49556-49559, 49561-49565, 49568, 49571, 49575, 49578, 49584-49586, 49589-49591, 49594, 49600-49601, 49604-49605, 49608, 49612-49620, 49622-49625, 49627, 49629, 49634, 49636-49642, 49644-49645, 49648-49650, 49652-49655, 49658-49667, 49669-49673, 49676-49679, 49682-49683, 49685, 49687-49688, 49690-49692, 49694, 49696-49698, 49700-49702, 49704-49707, 49709, 49711-49714, 49716, 49720-49721, 49723-49727, 49730-49731, 49733, 49735-49741, 49743, 49746-49747, 49749-49756, 49758-49760, 49762-49768, 49783, 49786-49787, 49790-49791, 49795, 49799-49806, 49809-49813, 49815, 49817-49819, 49821, 49823-49826, 49829, 49831-49834, 49836, 49838-49842, 49844-49845, 49848, 49850-49854, 49856-49859, 49865-49867, 49871-49872, 49874-49878, 49880-49883, 49885-49886, 49893, 49895-49896, 49898-49901, 49904-49908, 49910-49912, 49916, 49918-49922, 49927, 49929, 49934-49937, 49939, 49942, 49944-49955, 49957-49960, 49965-49966, 49968-49969, 49972, 49976, 49978, 49987-49988, 49990, 49994, 49996-49998, 50000, 50002-50003, 50005-50010, 50014, 50017-50019, 50021-50023, 50025-50031, 50034, 50036-50037, 50039-50040, 50043-50049, 50051-50054, 50056-50057, 50059-50060, 50063-50064, 50069, 50077, 50079-50080, 50082, 50090-50094, 50097, 50104, 50106-50107, 50109-50111, 50114, 50116-50121, 50125, 50128, 50131-50136, 50138, 50140-50143, 50145, 50148-50152, 50155-50156, 50162, 50164-50172, 50174, 50177, 50179-50181, 50183-50184, 50186-50190, 50193-50196, 50198-50200, 50202-50203, 50206-50207, 50209, 50216, 50220-50221, 50223-50224, 50228, 50230, 50233-50236, 50238, 50240-50243, 50245, 50247-50248, 50251-50253, 50255-50258, 50260, 50262-50263, 50265, 50267, 50269-50271, 50276-50278, 50280-50286, 50288-50299, 50301, 50303, 50307-50312, 50314, 50316-50318, 50323-50324, 50326-50328, 50330-50332, 50334, 50336-50337, 50344-50345, 50347-50348, 50350-50352, 50355, 50357-50358, 50360, 50363-50365, 50367-50371, 50373-50374, 50376, 50379, 50381, 50384-50385, 50387, 50389, 50391, 50394, 50406-50409, 50415, 50419, 50422, 50424, 50428, 50430, 50432-50433, 50435-50437, 50441, 50447-50448, 50450, 50452-50453, 50456, 50462, 50465, 50469-50479, 50481-50484, 50486-50487, 50490-50491, 50495, 50497-50498, 50501, 50503-50505, 50507, 50510, 50512-50514, 50517-50519, 50521-50523, 50525-50527, 50530-50531, 50533, 50536, 50538, 50541, 50543-50547, 50549, 50551-50553, 50557, 50559-50560, 50564, 50567-50568, 50571, 50581, 50584, 50587, 50589, 50591-50592, 50596-50597, 50601-50604, 50606-50610, 50612-50613, 50615, 50617, 50620, 50622-50625, 50629-50630, 50632-50633, 50636-50639, 50643-50647, 50649-50655, 50657, 50659-50660, 50662-50663, 50665, 50674-50679, 50682-50683, 50685-50686, 50688-50690, 50693, 50700-50701, 50704-50706, 50709, 50712-50720, 50722-50725, 50727, 50729-50731, 50733-50734, 50736, 50738, 50740-50741, 50743-50744, 50746-50753, 50755, 50758, 50761-50762, 50766, 50768-50770, 50772-50778, 50783, 50785-50786, 50788-50791, 50793-50794, 50796, 50798-50810, 50812-50814, 50816-50819, 50823, 50825, 50829-50834, 50840, 50842-50843, 50847-50849, 50851-50858, 50860-50865, 50867-50869, 50871, 50873, 50875-50877, 50880, 50882-50886, 50889-50892, 50894, 50896, 50898-50904, 50906-50910, 50913-50915, 50917-50920, 50922-50924, 50926, 50928-50930, 50933-50945, 50947, 50949-50950, 50954-50958, 50960-50963, 50965-50968, 50971-50972, 50975, 50977-50981, 50983-50984, 50987-50989, 50992, 50994, 50996-50999, 51002-51008, 51010-51013, 51015-51016, 51018, 51020-51025, 51027-51030, 51033-51040, 51043, 51045, 51047-51050, 51052-51053, 51058, 51061, 51063-51065, 51067-51070, 51073-51076, 51083-51084, 51086-51104, 51107-51110, 51112, 51114, 51116-51120, 51122-51137, 51140-51144, 51146-51148, 51150-51151, 51153-51155, 51158, 51160-51162, 51164-51166, 51169, 51171-51172, 51175-51182, 51184-51188, 51190-51191, 51193, 51196-51198, 51200-51201, 51203-51204, 51207, 51209-51211, 51213, 51217-51218, 51221-51222, 51224-51226, 51229-51233, 51239-51241, 51243-51248, 51250-51251, 51255, 51257, 51259-51263, 51267-51273, 51276-51277, 51280-51281, 51283, 51288-51292, 51295, 51297-51299, 51301, 51305, 51307-51309, 51311-51312, 51315-51316, 51318-51319, 51321-51322, 51326, 51328-51330, 51332-51334, 51337-51339, 51341-51342, 51344-51346, 51349, 51351-51352, 51354-51355, 51357-51360, 51362-51364, 51366, 51368-51369, 51373-51375, 51381, 51384-51385, 51388-51389, 51391-51393, 51396-51399, 51401, 51405-51406, 51409, 51412-51414, 51418-51419, 51422-51426, 51428, 51430, 51432-51433, 51438-51441, 51443, 51448-51449, 51457, 51465-51467, 51469, 51475-51476, 51478-51480, 51483-51485, 51487-51490, 51492-51494, 51496-51497, 51499-51503, 51506-51507, 51510, 51513-51515, 51517-51520, 51523, 51526, 51529-51530, 51532-51536, 51540-51542, 51545-51547, 51550-51551, 51556-51559, 51561-51562, 51564, 51566-51567, 51569, 51572-51574, 51577, 51582, 51584, 51587-51588, 51590, 51592-51593, 51595, 51597, 51601, 51604, 51607-51608, 51611, 51616-51617, 51619-51622, 51624, 51626, 51629, 51631-51633, 51635, 51637-51638, 51640-51643, 51645, 51648, 51652-51653, 51655-51658, 51664, 51668-51673, 51679, 51681, 51684-51693, 51695-51696, 51699-51701, 51703-51707, 51709-51713, 51716, 51718-51721, 51723, 51725, 51727, 51730, 51733-51741, 51743, 51745-51747, 51750, 51756, 51758, 51764, 51766-51774, 51776-51779, 51783-51784, 51786-51788, 51791-51792, 51794, 51799-51805, 51807-51810, 51812-51813, 51816-51817, 51820-51822, 51826-51840, 51843, 51846-51848, 51852, 51854-51858, 51860-51861, 51863-51866, 51869-51874, 51876-51880, 51882-51883, 51886, 51889-51895, 51897-51898, 51900, 51906-51913, 51915, 51919-51920, 51922, 51929-51933, 51935-51936, 51940, 51944-51946, 51948-51950, 51952-51953, 51955, 51959-51960, 51963-51966, 51968, 51970, 51974, 51976, 51978-51983, 51985, 51987-51991, 51995-51997, 52000-52001, 52003-52007, 52009, 52013, 52018-52021, 52023, 52025-52026, 52028-52030, 52032-52038, 52040, 52043-52044, 52049, 52051, 52053-52054, 52056-52059, 52061-52062, 52067-52068, 52070-52071, 52073-52074, 52076, 52078-52079, 52083-52094, 52097-52099, 52101, 52104-52107, 52110, 52113-52115, 52117, 52119-52125, 52129, 52132, 52135-52139, 52145-52148, 52154-52155, 52160-52161, 52164, 52166-52167, 52172-52174, 52176, 52178, 52181-52182, 52184-52185, 52188, 52190-52199, 52201, 52203-52205, 52209, 52212, 52215, 52219, 52221, 52223-52227, 52229-52231, 52233-52243, 52250, 52254, 52259, 52261, 52264, 52266-52272, 52277, 52280, 52286-52289, 52291, 52295, 52297, 52301-52303, 52310-52312, 52316-52317, 52319, 52321-52326, 52330, 52333-52334, 52336, 52339-52344, 52346, 52352, 52354-52355, 52357, 52360, 52362-52365, 52367, 52369-52377, 52379, 52382-52383, 52385, 52388, 52390, 52393-52396, 52398, 52400, 52403-52407, 52410-52413, 52415-52416, 52419-52425, 52427-52431, 52435, 52437-52439, 52442-52444, 52446, 52448-52451, 52453-52454, 52456-52470, 52473-52474, 52476, 52478-52479, 52481, 52483-52485, 52487, 52491-52492, 52494-52495, 52497-52499, 52501-52512, 52514-52515, 52517-52519, 52522-52524, 52526-52527, 52529-52531, 52533-52535, 52537-52538, 52540, 52543-52544, 52546, 52549-52551, 52553, 52558-52560, 52562-52564, 52567, 52569, 52573-52578, 52580, 52583-52585, 52588-52589, 52593, 52598, 52600-52601, 52603-52607, 52609-52610, 52612, 52616, 52619, 52621, 52623, 52625-52632, 52635-52644, 52646-52647, 52649, 52652, 52654, 52657-52658, 52660-52662, 52664, 52668, 52672, 52674, 52676, 52678-52679, 52681, 52684-52688, 52691-52693, 52695-52697, 52699, 52711, 52713, 52715, 52718, 52721, 52727, 52729-52730, 52733, 52738-52739, 52742-52744, 52747-52750, 52752-52759, 52762-52766, 52768-52769, 52771-52772, 52774, 52776-52782, 52784-52788, 52790-52795, 52797-52799, 52801-52802, 52805-52808, 52810, 52816-52817, 52820-52821, 52824, 52826-52829, 52831, 52833, 52835, 52837, 52840, 52842, 52845-52846, 52848-52849, 52854, 52861-52866, 52868, 52870, 52873, 52875-52886, 52888, 52890, 52896-52897, 52899-52903, 52905-52909, 52911-52912, 52915, 52917-52918, 52928, 52932, 52934-52943, 52945-52948, 52954, 52956, 52958-52962, 52964-52966, 52969-52973, 52975-52981, 52984, 52989-52994, 52996-53000, 53002, 53007, 53014, 53016-53018, 53022, 53026-53029, 53031-53032, 53034-53035, 53045, 53047-53048, 53051-53057, 53060, 53062, 53064, 53068, 53071, 53073-53074, 53076-53077, 53080, 53084-53086, 53089, 53095-53099, 53103-53104, 53108-53110, 53118, 53121-53123, 53125-53132, 53136-53138, 53140, 53142-53143, 53146-53147, 53149-53151, 53153, 53156, 53158-53164, 53166, 53170, 53173, 53175-53181, 53187, 53189, 53191, 53194-53195, 53197-53205, 53207-53208, 53210, 53215, 53220-53221, 53223-53224, 53226, 53229-53230, 53232-53233, 53236, 53240, 53242-53244, 53246-53249, 53252-53253, 53255, 53258, 53260-53262, 53264, 53266, 53268-53270, 53272-53279, 53281, 53287-53290, 53292, 53294-53295, 53298, 53300, 53302, 53304-53306, 53309-53315, 53319-53320, 53323-53333, 53335-53336, 53338-53340, 53343-53344, 53348, 53355-53364, 53366-53370, 53374-53375, 53378, 53380, 53382-53388, 53390-53391, 53395, 53398, 53400-53408, 53410, 53412-53415, 53417-53420, 53422, 53426-53431, 53433, 53435-53436, 53439-53442, 53444-53446, 53448, 53451, 53455-53457, 53460, 53466, 53468-53470, 53472-53473, 53476, 53479-53481, 53483, 53485-53493, 53496-53499, 53501-53502, 53504-53509, 53512-53517, 53519-53522, 53524, 53526, 53529, 53531-53532, 53534-53535, 53537, 53539-53541, 53544, 53546, 53548-53550, 53552-53557, 53564, 53567, 53569-53570, 53572-53574, 53577-53582, 53587-53588, 53594-53599, 53601-53602, 53605-53607, 53609, 53612-53619, 53621-53622, 53626-53627, 53629, 53634-53636, 53639-53645, 53648-53649, 53654-53661, 53663-53675, 53680, 53682, 53685-53687, 53692, 53695, 53697-53698, 53701, 53703-53705, 53707, 53709, 53713, 53715, 53718-53720, 53723-53724, 53726-53730, 53732, 53744-53747, 53750, 53752, 53754-53756, 53759-53768, 53770-53771, 53773, 53778-53779, 53785-53787, 53790-53792, 53794-53795, 53799-53801, 53804-53810, 53812, 53815, 53820, 53822, 53824-53826, 53830, 53832, 53834, 53836-53838, 53845, 53850-53858, 53860, 53862-53872, 53875-53876, 53878-53879, 53882, 53884-53887, 53890, 53892-53893, 53895, 53898, 53900, 53902-53904, 53906-53907, 53910-53915, 53918, 53923, 53925-53932, 53934-53936, 53938-53941, 53946, 53948, 53950-53952, 53954-53955, 53957-53960, 53962, 53964-53965, 53970-53971, 53973-53974, 53976, 53978, 53980-53990, 53992-53998, 54000-54001, 54005-54009, 54011-54013, 54015-54018, 54026, 54029-54035, 54038, 54043-54047, 54049-54052, 54054, 54056, 54062-54064, 54066-54068, 54071-54073, 54075-54077, 54081, 54083-54087, 54090, 54092-54094, 54096, 54099, 54101-54103, 54108-54111, 54114-54115, 54117, 54119-54122, 54124, 54126-54127, 54129-54130, 54132-54133, 54135-54136, 54145, 54147, 54150, 54152, 54154-54158, 54161, 54163-54164, 54166-54167, 54169-54170, 54172, 54176-54181, 54184-54194, 54196-54197, 54199-54202, 54206-54208, 54210-54211, 54213-54214, 54216, 54218, 54223-54224, 54226, 54228-54230, 54232, 54236-54237, 54239-54240, 54245-54247, 54250, 54252-54259, 54261-54264, 54266-54268, 54272-54275, 54277, 54281-54285, 54289, 54291, 54293, 54295-54298, 54300-54301, 54303-54305, 54307, 54311-54315, 54322, 54324-54325, 54329, 54331-54333, 54337-54340, 54343, 54345-54349, 54351, 54353, 54356, 54358-54359, 54361, 54363-54370, 54372, 54374, 54376-54378, 54381-54383, 54385-54387, 54389, 54392-54394, 54397-54398, 54400-54408, 54410, 54412-54413, 54415-54417, 54419-54420, 54424, 54428-54429, 54431-54435, 54437-54439, 54441-54444, 54446, 54449-54450, 54452, 54454-54455, 54457-54459, 54462, 54465, 54467-54468, 54470-54474, 54476-54477, 54480-54483, 54485-54486, 54491-54498, 54500, 54502, 54506, 54510-54511, 54513-54521, 54523-54526, 54528-54529, 54531, 54533-54540, 54542-54544, 54547-54549, 54551, 54555, 54558-54559, 54561-54562, 54564-54565, 54567-54568, 54570-54571, 54574-54575, 54577, 54580-54581, 54583, 54587, 54589, 54591-54592, 54594-54595, 54598, 54602, 54604, 54606-54607, 54610, 54614-54620, 54622-54624, 54626, 54628, 54636-54637, 54639, 54641-54646, 54651, 54655-54656, 54658, 54660-54661, 54664, 54666-54667, 54669-54671, 54673-54680, 54683-54684, 54686-54691, 54693, 54695-54696, 54699, 54701-54702, 54704-54715, 54717, 54721-54723, 54725-54726, 54729, 54734-54735, 54739-54743, 54748, 54751-54752, 54754, 54757, 54759-54766, 54768, 54772-54773, 54775-54777, 54780-54782, 54784-54785, 54787-54792, 54794-54795, 54799-54805, 54807-54808, 54810-54814, 54818-54819, 54821-54823, 54826-54827, 54829-54830, 54832-54833, 54835-54836, 54838-54839, 54841-54844, 54850-54853, 54855-54856, 54859, 54861-54873, 54876, 54878, 54881-54882, 54884, 54886, 54889-54890, 54894, 54898-54903, 54905-54909, 54914, 54917, 54926-54927, 54929-54930, 54933, 54938, 54940-54943, 54946-54947, 54952-54953, 54955, 54959, 54961-54972, 54974, 54977, 54979-54983, 54985, 54987, 54989-54993, 54995-54999, 55002, 55005-55006, 55008, 55011, 55013, 55015-55017, 55019, 55023-55024, 55027, 55031-55032, 55038-55042, 55044, 55046, 55048, 55050, 55052-55055, 55057-55062, 55066, 55068-55069, 55071-55075, 55077-55080, 55082-55083, 55085, 55087-55088, 55092-55093, 55098-55100, 55103, 55105, 55107-55112, 55114-55119, 55122-55126, 55128-55129, 55131-55135, 55137, 55140-55146, 55148, 55150, 55155-55158, 55160-55161, 55163-55164, 55168-55169, 55174, 55177-55178, 55182-55183, 55185-55187, 55189, 55191, 55194, 55199, 55201, 55211-55213, 55215-55220, 55222-55228, 55230-55235, 55238-55239, 55241-55243, 55245, 55252, 55254, 55256-55258, 55260-55264, 55267-55268, 55271, 55273-55280, 55283-55284, 55289, 55291, 55294-55295, 55297-55299, 55301, 55304-55305, 55308, 55313, 55317-55318, 55320-55322, 55324, 55326, 55331-55335, 55338, 55348-55353, 55355, 55362, 55366, 55369-55372, 55374-55377, 55380, 55382-55383, 55385-55386, 55389-55392, 55394-55395, 55397-55400, 55403-55404, 55406, 55410-55413, 55416-55417, 55419-55420, 55423-55424, 55426-55427, 55429-55431, 55433, 55435-55437, 55441-55442, 55445-55447, 55450, 55455-55458, 55460-55464, 55466-55469, 55471-55480, 55482-55483, 55488-55489, 55491-55493, 55495-55497, 55499-55503, 55505-55511, 55514, 55517-55518, 55522-55523, 55527-55529, 55531-55533, 55535, 55537, 55540, 55542-55543, 55546-55547, 55551-55552, 55554-55559, 55562, 55566, 55568-55573, 55577, 55579-55581, 55583-55587, 55591, 55594, 55605-55607, 55609-55610, 55612-55614, 55616-55617, 55620-55624, 55626, 55628-55629, 55631-55633, 55636-55638, 55640-55646, 55648-55649, 55651, 55654-55656, 55658-55659, 55664, 55667-55673, 55675-55679, 55681-55682, 55684-55689, 55694, 55702, 55706, 55713-55716, 55718-55722, 55725, 55728-55729, 55732, 55734-55736, 55738-55739, 55741, 55743, 55745-55747, 55749-55750, 55752-55755, 55757-55761, 55764-55767, 55770-55772, 55776-55780, 55782, 55786-55796, 55798, 55800, 55802-55804, 55806, 55808-55809, 55811, 55813, 55816-55819, 55822-55824, 55827-55833, 55835, 55837, 55841-55844, 55846-55847, 55849-55850, 55853, 55855-55862, 55866, 55869-55871, 55874-55875, 55878-55883, 55885-55886, 55888-55889, 55891-55893, 55897-55899, 55902-55903, 55905, 55907-55911, 55916, 55918-55920, 55922-55927, 55929, 55931, 55937-55939, 55942-55949, 55951-55952, 55956, 55958-55959, 55963-55966, 55969-55970, 55974-55976, 55978-55985, 55989, 55992, 55994, 55996-55998, 56006, 56008-56015, 56017-56019, 56021, 56023-56025, 56027-56028, 56030-56032, 56034, 56036-56037, 56039, 56041-56043, 56049, 56051-56054, 56057, 56064-56066, 56068, 56070-56077, 56080, 56084-56086, 56088, 56090, 56093, 56096, 56099-56104, 56107, 56109, 56112-56116, 56122-56124, 56127-56129, 56131-56136, 56138, 56140-56141, 56143, 56148, 56150-56156, 56159-56163, 56168-56169, 56172, 56175, 56177-56179, 56182, 56188, 56190-56191, 56193-56197, 56199-56201, 56203-56205, 56211-56213, 56215-56217, 56219, 56221-56224, 56227, 56229, 56233, 56236, 56239-56254, 56256, 56258, 56260-56263, 56265-56269, 56272, 56274-56275, 56277, 56279-56280, 56282, 56284-56299, 56301-56302, 56305-56309, 56311-56314, 56316, 56318-56322, 56325, 56327-56328, 56331-56333, 56335-56336, 56338-56339, 56342-56346, 56349, 56351, 56353-56359, 56361, 56364-56365, 56372-56373, 56375-56380, 56382, 56384, 56388-56397, 56403-56406, 56408, 56410-56416, 56418-56419, 56421, 56424-56425, 56427-56429, 56431-56433, 56435-56438, 56440-56445, 56447-56452, 56455, 56457-56460, 56463-56466, 56468, 56472, 56475, 56478-56479, 56483-56484, 56486, 56488-56496, 56498-56501, 56503-56504, 56506-56507, 56509, 56511, 56513-56514, 56518-56520, 56522, 56525-56526, 56528-56530, 56532, 56536-56537, 56539-56541, 56544-56547, 56549, 56553, 56555-56556, 56558, 56560, 56562-56563, 56571, 56573-56575, 56579-56580, 56594, 56596, 56599-56600, 56602, 56607, 56610-56611, 56613, 56615-56616, 56618-56620, 56623-56627, 56631-56633, 56638-56639, 56641-56645, 56650-56652, 56655-56660, 56664-56667, 56669-56670, 56672-56673, 56675-56678, 56680, 56682-56683, 56685, 56689-56696, 56698-56700, 56702-56704, 56707-56713, 56715-56719, 56721, 56724, 56728-56729, 56733, 56740-56741, 56743-56745, 56747-56748, 56750, 56752-56757, 56759, 56762, 56764, 56766, 56768-56769, 56771-56789, 56791, 56793-56800, 56802-56805, 56808-56809, 56811, 56813-56815, 56818-56820, 56824, 56826-56830, 56832, 56834-56838, 56842-56845, 56847-56848, 56851-56862, 56864-56870, 56872, 56874, 56876, 56879, 56882-56883, 56890, 56892-56894, 56896, 56898, 56900-56906, 56910-56913, 56915-56918, 56922-56923, 56926, 56929, 56936-56938, 56941, 56945, 56948-56950, 56952-56954, 56956-56959, 56963, 56966-56967, 56972, 56975-56976, 56979, 56981-56982, 56984-56986, 56988-56992, 56994-56995, 56998-57000, 57006-57019, 57021-57027, 57030-57032, 57035, 57037, 57041, 57045-57046, 57048-57050, 57052-57055, 57057, 57059-57061, 57063, 57065, 57067, 57069, 57071-57074, 57076, 57078-57079, 57083-57086, 57089-57105, 57107-57109, 57111-57113, 57115-57119, 57121-57122, 57124, 57126-57127, 57133, 57136, 57138-57139, 57146, 57148-57153, 57155-57159, 57161-57162, 57164-57166, 57170-57174, 57176-57177, 57180, 57186-57189, 57194-57196, 57199, 57201-57205, 57207, 57210, 57212-57213, 57215, 57217, 57219, 57221, 57223, 57226-57227, 57229-57230, 57232, 57234-57235, 57237-57258, 57263, 57265, 57270-57275, 57278, 57282-57283, 57286-57288, 57292, 57294, 57297-57299, 57301, 57303, 57307, 57312-57315, 57318-57320, 57322-57324, 57326, 57329-57330, 57332-57333, 57336-57337, 57341, 57344, 57346-57353, 57355-57358, 57360, 57364-57373, 57375, 57377-57383, 57385-57387, 57390-57391, 57393-57397, 57400, 57402-57403, 57406-57407, 57409, 57411-57412, 57414-57415, 57418-57423, 57425-57432, 57434-57435, 57437-57438, 57442, 57444-57453, 57455-57461, 57464, 57466, 57468, 57471-57472, 57474-57479, 57482-57485, 57489-57490, 57494-57495, 57499, 57501-57506, 57508-57511, 57513-57514, 57518-57523, 57525, 57527-57528, 57530-57531, 57536-57537, 57539-57547, 57551-57553, 57555-57557, 57559, 57562, 57565-57567, 57569-57570, 57572-57575, 57577, 57579-57583, 57585-57596, 57600-57603, 57607, 57609, 57611-57630, 57632-57634, 57636, 57639-57640, 57642-57644, 57646-57647, 57651, 57655-57657, 57660, 57662-57665, 57670-57675, 57677-57678, 57681-57685, 57688-57690, 57692-57699, 57704, 57706-57712, 57716-57717, 57719-57720, 57723, 57725-57730, 57732, 57734-57748, 57752-57757, 57763, 57767, 57770, 57776-57780, 57785-57789, 57791, 57793-57795, 57798-57801, 57803, 57805, 57807-57808, 57810-57812, 57814-57827, 57830, 57832, 57834, 57837-57838, 57846-57847, 57851-57859, 57861-57863, 57865-57866, 57868, 57870-57873, 57875-57887, 57890-57891, 57897, 57899, 57901-57917, 57920-57921, 57924-57925, 57928-57935, 57937, 57940, 57944-57945, 57947-57948, 57950-57951, 57955, 57957, 57960-57962, 57965-57968, 57974-57977, 57979-57985, 57988-57989, 57991-57998, 58000, 58002-58006, 58008, 58010-58011, 58013-58016, 58018-58022, 58024-58025, 58027-58029, 58031-58042, 58044-58045, 58048-58049, 58052, 58057-58059, 58061-58063, 58065, 58069-58071, 58076, 58078, 58083-58086, 58090, 58097, 58099, 58101, 58103-58106, 58110, 58112-58113, 58117-58120, 58125-58133, 58136, 58138, 58140-58145, 58147-58148, 58151-58154, 58158, 58160, 58162-58164, 58167, 58170, 58172, 58174-58175, 58177-58178, 58180-58183, 58185-58189, 58191, 58193, 58196-58198, 58205-58209, 58211, 58213-58217, 58219-58222, 58224, 58226-58229, 58231, 58233-58237, 58242-58248, 58250, 58254-58256, 58258-58264, 58271-58272, 58274-58276, 58279-58284, 58286-58289, 58291-58306, 58308-58312, 58314, 58316, 58320-58331, 58335-58336, 58339-58343, 58346, 58349, 58351-58356, 58358, 58366, 58369-58372, 58374-58377, 58385, 58387-58390, 58397-58400, 58404-58405, 58407, 58409, 58411, 58413, 58415, 58417-58427, 58430-58439, 58441, 58443-58444, 58446-58454, 58456-58464, 58466, 58468-58472, 58474, 58477, 58481-58483, 58485, 58488-58499, 58501-58502, 58508, 58510-58512, 58515-58522, 58524-58534, 58537-58539, 58541-58546, 58548-58550, 58553-58555, 58557-58558, 58560-58564, 58569-58575, 58581-58582, 58586-58590, 58598, 58600-58603, 58605-58609, 58611-58617, 58619-58621, 58627-58629, 58631, 58635-58638, 58640-58644, 58646-58647, 58649-58651, 58656-58662, 58664-58665, 58667-58668, 58670, 58672-58677, 58681-58696, 58698, 58700, 58703, 58705-58708, 58710, 58713-58719, 58721, 58723-58728, 58730-58738, 58740-58749, 58751-58752, 58754, 58757-58759, 58762-58763, 58765-58767, 58769, 58771-58772, 58775, 58777, 58780, 58782, 58785-58793, 58795, 58797-58799, 58801-58802, 58805-58812, 58814-58820, 58822-58823, 58826, 58828-58834, 58837-58838, 58840-58842, 58844-58846, 58848-58853, 58859-58862, 58864, 58866, 58870, 58874-58876, 58878-58881, 58883-58886, 58888, 58890-58893, 58895-58896, 58898-58906, 58908, 58912-58916, 58921, 58923-58924, 58926-58928, 58930-58933, 58935-58942, 58944, 58946-58952, 58955-58956, 58958-58960, 58963, 58965-58966, 58968-58972, 58974, 58977-58978, 58980-58981, 58985-58987, 58989, 58991-58994, 58997-59000, 59002-59003, 59005, 59007, 59009, 59011-59013, 59015-59016, 59019, 59021-59022, 59025-59027, 59029-59031, 59034, 59036, 59040-59045, 59047-59049, 59052, 59054-59057, 59059-59062, 59064, 59066, 59070-59071, 59073, 59075, 59078, 59082-59087, 59090-59096, 59098, 59100, 59102-59105, 59107, 59109, 59112-59115, 59119-59120, 59122-59123, 59125, 59131, 59136-59140, 59142, 59145, 59148, 59150, 59153-59156, 59158, 59160, 59162, 59164-59165, 59167-59171, 59173-59177, 59184-59185, 59189-59192, 59194-59199, 59201-59204, 59206-59207, 59209, 59213-59214, 59217-59218, 59221-59225, 59227, 59234, 59236, 59239-59241, 59244-59245, 59251, 59253, 59255, 59259, 59262-59263, 59266-59269, 59271-59272, 59276, 59278, 59281-59290, 59294-59301, 59303, 59306, 59309, 59313-59315, 59317, 59319-59321, 59324, 59326, 59329, 59331-59332, 59334, 59337-59340, 59344-59346, 59349-59350, 59363-59364, 59366, 59368-59372, 59375-59379, 59383, 59387-59399, 59402-59403, 59405-59407, 59409-59410, 59412, 59414-59415, 59419, 59421-59426, 59429, 59431, 59433-59441, 59443, 59445-59446, 59452, 59454, 59456-59459, 59461-59468, 59470, 59472-59493, 59495, 59500, 59502-59508, 59511-59512, 59514-59517, 59521-59522, 59527, 59530-59539, 59543, 59545-59547, 59549-59551, 59553-59555, 59557, 59559-59560, 59562-59567, 59569-59572, 59574-59577, 59579-59581, 59587-59592, 59596-59598, 59601-59608, 59612-59614, 59617, 59619-59620, 59622, 59625-59626, 59628, 59631, 59633, 59635-59637, 59641-59646, 59648, 59650-59656, 59659-59666, 59668-59669, 59671, 59673, 59675, 59678-59681, 59684-59685, 59687-59688, 59690-59691, 59693-59695, 59697-59700, 59702-59706, 59709, 59720-59721, 59724-59725, 59727, 59730, 59732-59733, 59740-59744, 59747-59752, 59754-59760, 59764-59765, 59767-59781, 59785-59787, 59789, 59791, 59793, 59795, 59797-59798, 59800, 59802, 59804-59805, 59807, 59810-59815, 59817, 59819-59820, 59822, 59825-59826, 59829-59833, 59835-59836, 59838-59841, 59846-59848, 59852, 59854-59856, 59858, 59860-59861, 59863, 59865-59866, 59870-59871, 59873, 59875-59878, 59881-59889, 59891-59894, 59896, 59898, 59900-59902, 59904-59908, 59910-59914, 59916-59918, 59920-59924, 59928-59936, 59938-59939, 59944-59945, 59949-59953, 59955-59960, 59964-59972, 59975, 59978-59979, 59982-59988, 59990-59994, 59996-60000, 60003, 60005, 60009-60010, 60018, 60022, 60024-60025, 60029, 60031, 60033, 60037-60043, 60052, 60056, 60058-60059, 60061-60062, 60064, 60067-60071, 60073, 60076, 60079, 60081-60087, 60091-60093, 60095-60100, 60102, 60104-60107, 60117-60121, 60124-60128, 60132-60137, 60140, 60143, 60145, 60148, 60150, 60152, 60154-60161, 60163-60170, 60172, 60177-60178, 60181-60185, 60187-60191, 60196-60197, 60200-60207, 60209-60211, 60213-60214, 60217, 60219-60222, 60226-60228, 60230-60246, 60250, 60252-60254, 60257-60258, 60261-60265, 60267-60268, 60273-60274, 60279-60280, 60282-60283, 60285-60292, 60294-60295, 60297, 60299-60300, 60302-60304, 60308-60312, 60314, 60316-60318, 60320-60325, 60332, 60334, 60336-60338, 60340-60347, 60349-60350, 60353-60357, 60359-60360, 60362-60363, 60367-60369, 60371-60372, 60374, 60380, 60382-60386, 60388-60391, 60394-60395, 60400, 60405, 60407-60411, 60413-60416, 60419-60420, 60423-60425, 60427, 60429-60431, 60433, 60435-60436, 60438-60443, 60445, 60447-60453, 60455-60466, 60469, 60473, 60478-60479, 60485-60486, 60488, 60491-60496, 60502-60505, 60507, 60515, 60517-60518, 60521-60522, 60525, 60529-60530, 60533, 60539, 60544-60551, 60555-60562, 60565, 60568-60570, 60572-60573, 60576, 60578, 60580, 60582-60583, 60585, 60589-60593, 60595, 60600, 60602, 60605-60607, 60609-60619, 60621-60629, 60635-60637, 60639-60640, 60642-60646, 60649, 60653, 60655, 60657-60661, 60663-60664, 60669-60670, 60672-60675, 60677-60680, 60684-60692, 60694-60696, 60699-60700, 60702-60703, 60705, 60707-60709, 60711, 60713-60714, 60718-60726, 60729-60732, 60738, 60740, 60742-60743, 60745-60746, 60748-60749, 60754-60756, 60758-60761, 60765-60777, 60779-60782, 60784, 60787-60788, 60790-60792, 60796-60800, 60803, 60806, 60809, 60811-60812, 60814-60817, 60820-60823, 60825, 60827-60833, 60837, 60841-60847, 60854, 60859-60862, 60864-60869, 60871-60872, 60874-60876, 60878, 60880-60882, 60884-60888, 60891, 60893, 60897, 60900, 60902-60909, 60911, 60914-60916, 60918, 60920-60925, 60930, 60933-60938, 60940, 60942-60943, 60945, 60947, 60953, 60956-60957, 60959-60960, 60964, 60966-60967, 60969, 60971-60975, 60980-60982, 60984-60985, 60993, 60995-60996, 60998, 61000-61001, 61004, 61006-61007, 61009-61011, 61015, 61017-61018, 61020, 61022, 61025-61027, 61029-61031, 61033-61034, 61036-61038, 61040, 61042, 61044, 61046-61050, 61052, 61055-61056, 61059-61062, 61064-61065, 61067-61068, 61073-61077, 61079, 61082-61090, 61092-61094, 61096-61098, 61106-61112, 61114, 61116-61122, 61125-61126, 61128-61129, 61134, 61136, 61138-61139, 61141-61143, 61145-61148, 61150-61155, 61160-61170, 61175, 61177, 61179-61180, 61182-61187, 61191, 61193, 61195-61196, 61198, 61202, 61204-61206, 61208, 61213, 61215-61216, 61218-61219, 61221-61225, 61227, 61231, 61234, 61237, 61239-61240, 61242-61243, 61245, 61248, 61250-61251, 61254-61255, 61257-61258, 61260-61264, 61267-61274, 61276, 61280-61281, 61283-61284, 61288-61291, 61293-61294, 61298-61302, 61304-61305, 61307-61309, 61311-61313, 61315-61319, 61322-61325, 61327, 61329-61335, 61338, 61341-61342, 61344-61346, 61351-61352, 61354, 61356-61359, 61363-61364, 61368-61369, 61374-61375, 61378, 61381, 61384-61386, 61388-61389, 61392-61396, 61401-61410, 61412-61413, 61415, 61423-61426, 61428-61429, 61440, 61447, 61450-61452, 61454-61456, 61458-61461, 61464, 61467, 61471-61474, 61476-61482, 61488-61494, 61496, 61503-61505, 61507-61512, 61514, 61524, 61527, 61529-61534, 61537, 61543, 61545-61549, 61553, 61558, 61560, 61564, 61566-61567, 61569, 61571-61572, 61575-61576, 61578-61579, 61584-61585, 61587, 61590-61593, 61596-61598, 61601, 61608, 61610-61613, 61615, 61617, 61620-61623, 61625-61627, 61631, 61635, 61639, 61641, 61643-61644, 61648, 61650-61654, 61657, 61660-61662, 61665, 61667-61671, 61674-61676, 61678-61679, 61685-61686, 61689-61692, 61694-61697, 61699-61702, 61706-61708, 61710-61714, 61716-61721, 61723, 61725-61726, 61729, 61732, 61734-61748, 61752-61756, 61759-61770, 61772-61774, 61778-61781, 61783-61784, 61787-61788, 61790-61794, 61796-61799, 61801-61803, 61809-61811, 61813, 61816-61817, 61819, 61821-61833, 61837, 61839-61840, 61842-61843, 61846, 61849-61851, 61853, 61860-61862, 61864-61869, 61871-61873, 61875, 61877, 61879-61882, 61884, 61886-61887, 61889-61890, 61894, 61896-61897, 61899-61901, 61903-61905, 61907, 61909-61914, 61916-61918, 61921, 61924-61925, 61927-61928, 61930, 61933-61935, 61937, 61942-61944, 61946-61950, 61952, 61954, 61959-61960, 61962-61963, 61967-61970, 61972, 61974-61975, 61977-61980, 61984, 61986, 61988-61989, 61993, 61999-62001, 62003-62004, 62006, 62008, 62012-62020, 62024, 62026-62031, 62037, 62039-62051, 62056, 62058-62059, 62061, 62066, 62070-62071, 62073-62075, 62077-62079, 62081-62090, 62092-62093, 62095-62101, 62107, 62109-62111, 62113-62119, 62121, 62123-62126, 62128, 62130-62131, 62134, 62137, 62139, 62142-62144, 62146-62150, 62152, 62154-62155, 62159-62166, 62169, 62173, 62175, 62179, 62182-62184, 62186-62191, 62193-62194, 62196, 62198-62200, 62202-62208, 62212-62214, 62217, 62219, 62221, 62225-62227, 62229-62231, 62233-62236, 62238, 62241, 62243-62244, 62246-62247, 62249-62253, 62256-62259, 62261, 62263-62266, 62269-62271, 62274, 62276-62278, 62281, 62283-62285, 62287-62291, 62293, 62295-62301, 62303, 62305-62312, 62316, 62319, 62322-62331, 62338, 62340-62341, 62345, 62348, 62350-62351, 62353-62356, 62359, 62362-62363, 62366-62368, 62370, 62372-62374, 62376-62380, 62382, 62385, 62387, 62389-62393, 62395-62399, 62404, 62406, 62409-62410, 62412, 62414-62418, 62420-62425, 62428, 62430-62433, 62435, 62437-62441, 62443, 62445, 62447-62448, 62450, 62452-62455, 62458, 62462, 62464-62467, 62469-62470, 62472-62481, 62484-62488, 62492-62494, 62498-62505, 62507-62513, 62517, 62519, 62522-62529, 62531-62534, 62537-62544, 62547-62548, 62551-62552, 62554, 62557, 62559-62561, 62564, 62568, 62570, 62572-62575, 62577-62579, 62581, 62590, 62597-62598, 62603-62609, 62611-62615, 62617, 62622-62626, 62628-62631, 62635-62636, 62638, 62640-62643, 62645, 62647, 62652-62656, 62660-62661, 62663-62665, 62667, 62669, 62673-62674, 62679, 62684-62686, 62688-62690, 62694-62695, 62697, 62702-62704, 62708-62711, 62714-62715, 62721-62731, 62737-62738, 62740-62742, 62745-62747, 62749-62751, 62753-62756, 62760-62762, 62764-62765, 62767-62768, 62770-62772, 62775, 62777, 62781-62782, 62784-62786, 62789-62794, 62798-62801, 62803, 62805-62807, 62812-62813, 62816, 62818, 62823-62824, 62826, 62828, 62831, 62834-62836, 62841-62845, 62848-62849, 62851, 62854, 62856-62860, 62862-62872, 62874, 62878, 62881, 62883, 62886, 62888-62890, 62893-62894, 62897-62902, 62904-62908, 62910-62913, 62915-62916, 62918-62920, 62922-62929, 62932-62933, 62935-62936, 62938-62945, 62948-62949, 62952-62956, 62958-62961, 62963-62967, 62969-62973, 62975-62976, 62979, 62981-62983, 62985, 62990-62991, 62993-62995, 62998, 63001-63004, 63007-63009, 63012-63014, 63016-63018, 63020-63021, 63025, 63027-63028, 63030, 63032, 63034, 63036-63038, 63040-63044, 63046-63047, 63049, 63052-63055, 63057-63059, 63061-63065, 63067-63068, 63070, 63072-63076, 63078-63083, 63086, 63088, 63094-63098, 63101-63102, 63104, 63107, 63110-63112, 63114, 63116, 63118, 63122, 63124, 63127, 63129-63131, 63139, 63143, 63145, 63147-63152, 63154-63156, 63159-63160, 63163, 63165-63166, 63168, 63170, 63173-63174, 63177-63181, 63183-63185, 63194, 63196-63203, 63205-63207, 63209, 63212-63213, 63218, 63222-63228, 63230-63231, 63235-63238, 63240-63243, 63246-63247, 63249-63251, 63253, 63255-63259, 63262-63266, 63268-63270, 63272, 63275, 63277, 63281-63283, 63289, 63291-63295, 63297-63299, 63301, 63303-63305, 63307, 63310, 63312, 63318-63323, 63325, 63330, 63332-63336, 63338, 63340-63342, 63345-63346, 63348-63349, 63351, 63354, 63360, 63364, 63366, 63368-63373, 63375, 63379-63380, 63382-63383, 63391-63396, 63398-63399, 63402, 63405, 63407-63411, 63413, 63415, 63418-63421, 63423, 63426-63427, 63432, 63434, 63436, 63438, 63440, 63444-63448, 63451-63456, 63458-63459, 63461, 63464, 63470-63474, 63478-63479, 63481, 63483, 63486, 63488-63489, 63493, 63495, 63499-63500, 63502, 63505, 63510, 63513-63515, 63517, 63522-63524, 63526, 63528-63530, 63532-63533, 63535-63536, 63539-63540, 63543, 63545-63547, 63550, 63553, 63555-63557, 63559-63560, 63564, 63567-63568, 63570-63572, 63574-63577, 63579-63586, 63588-63594, 63596-63600, 63602-63603, 63605, 63607-63611, 63613-63614, 63616, 63618, 63620-63622, 63626-63627, 63629-63630, 63634-63635, 63637-63639, 63643-63644, 63646, 63648-63652, 63654-63663, 63665, 63667-63669, 63672, 63676, 63682, 63685-63689, 63694-63695, 63699, 63701, 63704-63707, 63709, 63711, 63713, 63715-63721, 63723-63727, 63731-63732, 63736-63737, 63739-63742, 63744, 63746-63750, 63752, 63758, 63760-63762, 63764-63767, 63769, 63774, 63777, 63780-63781, 63783-63787, 63789, 63791-63794, 63797, 63799, 63801, 63805-63807, 63810-63812, 63814-63819, 63821, 63825, 63831-63836, 63839-63840, 63842, 63844-63847, 63849-63850, 63853-63854, 63857-63858, 63861-63867, 63869, 63871-63873, 63875-63879, 63881, 63883, 63885-63887, 63889-63890, 63893-63898, 63900, 63902-63903, 63905, 63909-63910, 63913-63915, 63917-63921, 63923-63926, 63929, 63933-63935, 63943, 63945-63947, 63949-63952, 63954-63959, 63968, 63971, 63974-63975, 63977, 63980-63982, 63985-63987, 63989, 63991-63993, 63995, 63998, 64006-64014, 64016, 64019, 64021-64022, 64029, 64034, 64037, 64040-64045, 64048, 64052-64053, 64055-64057, 64059, 64061, 64063-64064, 64066, 64073-64075, 64081-64086, 64089-64091, 64095, 64099-64104, 64106-64107, 64109-64110, 64113-64118, 64120-64122, 64124, 64126, 64130-64137, 64139-64141, 64143-64144, 64149, 64151-64152, 64154-64155, 64157-64158, 64161-64163, 64165-64169, 64171-64176, 64178, 64180, 64185, 64189-64194, 64196-64199, 64201-64204, 64209, 64213-64216, 64219-64223, 64225-64227, 64230, 64232-64236, 64238, 64240-64245, 64248-64251, 64253-64254, 64258, 64260-64261, 64263, 64265-64267, 64271, 64276, 64278-64281, 64283-64284, 64286-64289, 64291-64292, 64294-64299, 64303-64309, 64312-64316, 64318, 64321, 64325-64327, 64329-64332, 64334, 64336-64337, 64339, 64341, 64343-64347, 64349-64352, 64355-64356, 64358-64364, 64367, 64370-64371, 64373, 64376-64378, 64382-64384, 64386, 64388-64392, 64394-64395, 64397-64398, 64400, 64404-64405, 64408-64409, 64411, 64415-64417, 64419, 64421-64425, 64427, 64430, 64433, 64438-64440, 64443-64444, 64447-64448, 64450-64456, 64459, 64462, 64466, 64468-64476, 64478-64481, 64484, 64486-64490, 64492-64493, 64496, 64499-64501, 64503-64511, 64515-64516, 64518, 64521-64523, 64525-64531, 64533, 64535-64537, 64540, 64542, 64547, 64549-64550, 64552-64553, 64556-64562, 64564, 64566, 64570-64572, 64574, 64576-64579, 64581, 64587, 64589-64590, 64597, 64599-64608, 64614-64615, 64617, 64623-64632, 64634-64637, 64640-64642, 64644, 64648-64649, 64653, 64656-64659, 64669, 64675, 64677, 64680-64681, 64684-64687, 64689, 64692-64694, 64696, 64698-64701, 64704, 64712-64713, 64716-64718, 64720-64724, 64726, 64729-64730, 64736-64738, 64741, 64746, 64748, 64751, 64754, 64756-64761, 64764-64769, 64771, 64774, 64776, 64779-64780, 64785-64787, 64789, 64791, 64794-64799, 64804-64809, 64815, 64819, 64822, 64827-64828, 64832, 64836-64837, 64840-64844, 64846-64858, 64860, 64862-64873, 64877-64878, 64881-64882, 64885, 64888, 64890-64891, 64893-64894, 64896-64898, 64900, 64903-64905, 64907-64909, 64911-64913, 64917, 64919-64920, 64923, 64927-64928, 64941-64943, 64945-64947, 64949-64951, 64953-64954, 64958-64960, 64962, 64965-64968, 64970-64977, 64979, 64982-64985, 64987-65002, 65009, 65012, 65015, 65018-65019, 65021-65023, 65025-65026, 65029-65031, 65035-65037, 65039-65041, 65045, 65048, 65051, 65053, 65055, 65057, 65059-65060, 65062-65063, 65065-65068, 65070-65071, 65073-65075, 65077, 65080, 65082, 65084, 65086-65088, 65091, 65093-65094, 65096, 65098-65100, 65102, 65104-65108, 65110-65111, 65113-65115, 65118-65120, 65122, 65126, 65128-65131, 65133-65135, 65137-65141, 65143, 65146-65148, 65155-65156, 65158-65161, 65163-65164, 65166, 65168-65169, 65171, 65176-65177, 65180-65182, 65190, 65197-65200, 65203-65205, 65207-65208, 65211-65212, 65214, 65216, 65221-65225, 65227-65228, 65232-65234, 65237-65239, 65242, 65245, 65247-65248, 65250, 65252, 65254, 65257-65259, 65264, 65267-65269, 65271-65272, 65274-65275, 65279, 65284-65287, 65289-65291, 65293-65300, 65303, 65305-65319, 65326-65328, 65330-65331, 65335, 65337-65343, 65349-65351, 65354, 65356, 65359, 65361, 65365-65366, 65368-65370, 65372, 65375-65376, 65378-65379, 65385, 65387-65389, 65393-65394, 65400, 65402, 65404, 65406-65411, 65413, 65416-65419, 65422-65423, 65425, 65427, 65430-65431, 65433-65440, 65442-65450, 65453, 65456, 65459-65460, 65466, 65468-65472, 65474-65485, 65487-65491, 65494, 65496-65499, 65501, 65505, 65508-65509, 65511, 65515-65516, 65518, 65520, 65522-65525, 65527-65528, 65530-65539, 65541-65542, 65544-65548, 65550-65551, 65553, 65555-65557, 65562-65567, 65570-65572, 65574-65577, 65586, 65590, 65592-65596, 65599, 65603-65608, 65613-65614, 65619, 65624-65626, 65629-65632, 65634, 65636-65639, 65641-65645, 65648-65650, 65652, 65654-65658, 65663, 65667, 65671-65675, 65677-65684, 65686-65689, 65691, 65693-65695, 65698, 65702, 65704, 65707-65708, 65710, 65713, 65718-65720, 65723, 65725, 65730, 65733, 65737-65739, 65744-65746, 65748-65753, 65755, 65757-65758, 65760, 65762, 65764, 65766-65768, 65770-65772, 65774, 65776-65777, 65779, 65781, 65783-65789, 65791-65794, 65796-65799, 65802, 65805-65807, 65809, 65820, 65826, 65828-65830, 65832, 65837, 65839-65843, 65854, 65859-65860, 65862-65863, 65865-65870, 65872-65880, 65882-65884, 65887, 65889-65890, 65892, 65895-65896, 65898, 65900, 65902-65904, 65906-65908, 65910, 65913-65914, 65916-65917, 65919, 65921, 65923, 65927, 65929-65930, 65936-65939, 65943-65944, 65946-65948, 65950-65951, 65953-65954, 65957, 65959-65960, 65962-65964, 65967-65969, 65974, 65976, 65980, 65983-65984, 65989, 65991-65992, 65994-65995, 65999-66000, 66002-66006, 66009-66013, 66015, 66017-66023, 66025-66026, 66028, 66030-66034, 66036-66039, 66041, 66044-66045, 66048-66052, 66054, 66057-66059, 66062-66067, 66069-66070, 66072, 66074, 66077-66079, 66081-66089, 66091, 66093-66094, 66096, 66099, 66103, 66105-66107, 66111, 66113-66115, 66118-66119, 66121, 66123, 66126, 66130-66132, 66137, 66140, 66143-66150, 66154, 66157, 66160-66172, 66176-66177, 66180-66182, 66184, 66186, 66188-66198, 66200, 66206-66208, 66211, 66214-66215, 66217-66220, 66223-66225, 66229, 66235, 66238, 66242-66252, 66254, 66256-66258, 66260, 66266-66270, 66272-66274, 66282-66285, 66287-66288, 66290-66291, 66293-66295, 66297-66299, 66305, 66307-66314, 66319, 66321-66322, 66324, 66330-66336, 66339, 66342-66349, 66351, 66353-66354, 66358, 66364-66366, 66368-66372, 66376, 66378, 66380, 66382-66387, 66389, 66393-66394, 66397-66400, 66402-66404, 66406-66408, 66410, 66412, 66414-66421, 66424-66425, 66430-66432, 66434-66435, 66437-66455, 66457-66459, 66461, 66463-66465, 66468, 66473-66477, 66480-66482, 66484, 66487, 66489-66490, 66493-66502, 66508-66510, 66513-66518, 66523, 66525, 66528, 66530, 66532-66536, 66538, 66540, 66543-66545, 66548-66549, 66556, 66559-66566, 66568-66569, 66572, 66577, 66580-66587, 66589-66592, 66595, 66598-66606, 66609-66612, 66614-66617, 66619-66620, 66622, 66624-66627, 66630, 66632-66640, 66642-66654, 66656-66657, 66659-66666, 66668-66670, 66672, 66674-66675, 66677-66681, 66683, 66685-66688, 66692-66693, 66695-66696, 66698, 66700-66702, 66704-66707, 66709-66711, 66713-66719, 66721, 66723, 66727, 66729, 66732, 66735-66746, 66748, 66750-66756, 66758-66767, 66770-66774, 66778, 66780, 66782-66786, 66788, 66791-66793, 66797-66798, 66803, 66805, 66807-66808, 66810-66812, 66814-66820, 66826-66835, 66837-66838, 66840, 66842, 66844-66845, 66847-66854, 66856-66860, 66866-66868, 66874, 66877-66880, 66882-66887, 66890-66895, 66901-66903, 66905-66907, 66909-66912, 66915-66918, 66924, 66927-66928, 66930-66933, 66936-66942, 66944, 66946, 66948, 66950-66951, 66953, 66955-66957, 66960-66963, 66966, 66968-66970, 66972, 66975-66981, 66986, 66988, 66990-66995, 66998-67000, 67002-67006, 67011-67013, 67017, 67019-67031, 67033-67035, 67039-67043, 67046-67048, 67050, 67052, 67054, 67057, 67059, 67064-67065, 67067-67070, 67072, 67074-67075, 67077, 67082-67085, 67087-67090, 67092-67095, 67098, 67102-67106, 67109, 67111-67112, 67114-67117, 67119-67122, 67124-67127, 67129, 67131, 67133-67134, 67138, 67140, 67143-67144, 67149-67150, 67153, 67155, 67158, 67160, 67162-67163, 67165-67172, 67174-67175, 67177, 67189-67191, 67193-67195, 67198, 67200-67202, 67204, 67207, 67209, 67211-67212, 67214-67217, 67220, 67223-67225, 67227-67229, 67232-67235, 67237-67246, 67249, 67252, 67255, 67257-67262, 67264, 67266-67267, 67272-67275, 67278, 67280, 67282-67284, 67289-67290, 67292-67295, 67297-67299, 67301-67302, 67305, 67308-67309, 67316-67317, 67319, 67322-67328, 67331, 67335, 67337-67342, 67344-67347, 67351-67354, 67357-67358, 67360-67361, 67365-67367, 67371-67372, 67374-67378, 67380-67388, 67390-67393, 67395-67398, 67400, 67402-67403, 67412, 67416-67419, 67423-67428, 67430-67431, 67434-67435, 67437-67438, 67441-67442, 67444-67447, 67449-67450, 67452, 67454, 67459, 67465-67467, 67469-67470, 67473-67474, 67479, 67481, 67488-67490, 67493-67500, 67505, 67507-67508, 67512, 67514-67515, 67517, 67520, 67522-67524, 67526-67528, 67530-67533, 67535, 67545-67547, 67550-67559, 67561-67563, 67568-67569, 67571-67572, 67576-67577, 67579, 67581, 67586, 67591, 67594, 67596-67597, 67599-67601, 67603-67604, 67607-67612, 67614, 67622-67623, 67625-67627, 67629, 67631-67634, 67636-67637, 67640, 67642-67645, 67647-67650, 67653, 67655, 67659, 67661-67670, 67674-67677, 67682-67685, 67687, 67689-67690, 67693, 67695-67696, 67698, 67700-67707, 67709-67710, 67713-67714, 67718, 67720-67721, 67724, 67730, 67734-67737, 67739-67746, 67748-67749, 67752-67753, 67757, 67759-67760, 67763, 67765-67766, 67770, 67778, 67780, 67783, 67787, 67789, 67791-67793, 67797-67798, 67801-67803, 67805-67806, 67813-67814, 67818-67819, 67823, 67826-67830, 67833-67837, 67839-67853, 67856-67858, 67861-67863, 67868, 67870-67872, 67874-67879, 67881, 67884-67887, 67889, 67894, 67897-67900, 67902-67910, 67912, 67922-67928, 67933, 67936, 67942-67947, 67950-67953, 67955, 67957-67960, 67962-67963, 67965-67966, 67971-67973, 67976-67978, 67980, 67984, 67989, 67992, 67994-67995, 67997, 67999-68005, 68008, 68012-68013, 68016, 68024-68028, 68031, 68033-68036, 68038, 68040-68041, 68043, 68045-68051, 68053-68059, 68061-68067, 68069, 68071, 68073-68076, 68078-68079, 68081-68086, 68088-68089, 68091-68092, 68095-68096, 68099-68100, 68103-68104, 68107-68109, 68116-68118, 68120, 68122, 68124-68136, 68140-68142, 68152-68158, 68167-68170, 68177, 68179-68180, 68182, 68185-68188, 68193-68195, 68199-68202, 68204-68207, 68209, 68212-68214, 68217-68219, 68223-68225, 68227, 68229-68230, 68235-68239, 68243-68244, 68246-68251, 68253-68254, 68258-68260, 68266, 68268-68274, 68277, 68279, 68281-68285, 68287-68288, 68291-68293, 68296, 68298-68301, 68303-68308, 68311, 68313, 68315, 68317-68318, 68320-68325, 68331-68334, 68343, 68345-68346, 68348-68349, 68351, 68353, 68355, 68362, 68364-68371, 68373, 68375-68380, 68383-68387, 68389, 68391, 68411-68413, 68415-68429, 68431-68440, 68446-68450, 68454-68457, 68459, 68464, 68469-68470, 68473, 68476, 68480-68482, 68486, 68488, 68490, 68493, 68496-68501, 68503, 68506, 68510-68512, 68514-68516, 68519-68523, 68525-68527, 68530-68531, 68534-68535, 68537, 68539-68542, 68544-68547, 68551, 68557-68569, 68571-68574, 68576, 68578, 68580-68584, 68587-68589, 68591, 68594, 68596-68598, 68603, 68605-68609, 68611-68620, 68623, 68625, 68628, 68631-68633, 68635-68637, 68645, 68648-68649, 68651, 68653-68655, 68657, 68659-68660, 68664-68666, 68668, 68671-68680, 68683-68685, 68688-68691, 68693, 68695-68707, 68710-68714, 68717, 68719-68724, 68727-68733, 68735-68738, 68740-68741, 68743-68744, 68746-68749, 68751, 68753-68755, 68757-68760, 68762, 68764, 68766-68768, 68770-68775, 68778, 68780, 68783, 68787-68792, 68795, 68797-68799, 68801-68802, 68804, 68806, 68809-68811, 68813, 68815-68816, 68818-68819, 68821-68824, 68827-68828, 68830, 68833, 68835-68836, 68838-68840, 68842-68843, 68845-68848, 68853, 68855, 68857-68858, 68861, 68865-68866, 68869-68876, 68879-68881, 68883-68886, 68888-68889, 68891, 68893-68895, 68897-68898, 68901, 68903-68905, 68907, 68909-68910, 68912-68914, 68916-68917, 68919, 68922, 68924-68935, 68937-68939, 68941-68947, 68951-68952, 68955, 68957-68958, 68960-68963, 68966-68967, 68969, 68971-68972, 68974-68975, 68981, 68985-68988, 68990-68994, 68997, 68999-69000, 69003, 69005, 69011-69013, 69015-69020, 69023-69025, 69027, 69029-69030, 69032-69033, 69035, 69037, 69040, 69044, 69046-69047, 69049-69054, 69056, 69059-69062, 69064, 69067-69071, 69073-69081, 69083-69086, 69089-69091, 69094-69099, 69101-69103, 69107, 69112-69115, 69117, 69119-69120, 69122, 69124, 69129, 69131-69141, 69143, 69145, 69147-69153, 69155-69157, 69161, 69165-69167, 69169, 69172, 69175-69177, 69179-69181, 69183-69186, 69188-69191, 69193-69194, 69197-69200, 69204, 69206, 69210-69211, 69213-69215, 69217-69221, 69223-69224, 69226-69227, 69234-69235, 69237-69242, 69244, 69252, 69254-69256, 69261-69267, 69269-69271, 69276-69277, 69280-69286, 69289, 69291-69293, 69295, 69297, 69300-69306, 69308, 69310, 69313, 69315-69316, 69322, 69325, 69328-69330, 69335, 69339, 69343-69346, 69348-69349, 69358, 69360-69362, 69364-69372, 69374-69376, 69378-69381, 69383-69385, 69390-69397, 69399-69404, 69408, 69410-69413, 69415-69416, 69418-69421, 69423-69424, 69427, 69430, 69432-69438, 69440-69445, 69448-69454, 69463-69465, 69467-69469, 69471-69472, 69479, 69482-69484, 69486, 69488, 69491-69496, 69498-69502, 69505-69510, 69513-69521, 69523, 69534-69537, 69543, 69545-69548, 69551-69555, 69557, 69560, 69562, 69564, 69566-69568, 69570-69572, 69575-69580, 69582-69584, 69592-69595, 69600-69602, 69604, 69607, 69609-69619, 69621, 69627-69631, 69638-69639, 69641-69643, 69646, 69648, 69655, 69659, 69663, 69665-69667, 69670, 69672, 69674-69675, 69677, 69679-69680, 69684-69687, 69690, 69699, 69701, 69703, 69707-69709, 69713-69717, 69719-69730, 69732-69733, 69736, 69739, 69741-69744, 69747, 69751, 69754, 69759, 69761-69765, 69767, 69770-69771, 69773-69774, 69777, 69779, 69781-69782, 69784, 69790-69793, 69796-69798, 69800, 69802-69803, 69807-69808, 69810-69811, 69813, 69815-69817, 69823-69824, 69826-69828, 69830-69833, 69836-69841, 69843-69845, 69848-69855, 69859, 69861-69864, 69866, 69868, 69870, 69872-69876, 69878-69879, 69881, 69883, 69885-69886, 69888-69890, 69893-69896, 69899, 69901-69902, 69908, 69910-69914, 69917-69922, 69924, 69926-69931, 69933, 69935-69937, 69940-69954, 69957-69970, 69978, 69980-69981, 69986, 69990, 69992, 69996-70015, 70017, 70019, 70021-70028, 70030, 70034-70043, 70045-70046, 70048, 70050-70053, 70056-70057, 70059-70070, 70072, 70075-70077, 70079, 70081-70082, 70084-70087, 70089-70091, 70094-70095, 70097-70098, 70100, 70103, 70106-70109, 70113, 70115-70121, 70123-70127, 70129-70131, 70136, 70138, 70140-70141, 70143-70146, 70148-70154, 70156, 70158, 70161-70168, 70170, 70174-70175, 70177, 70179, 70181-70183, 70185, 70187, 70190-70193, 70195-70199, 70204-70205, 70210, 70212-70213, 70216-70223, 70225, 70227, 70229-70230, 70232-70233, 70241-70246, 70248-70254, 70256, 70258, 70260, 70263-70266, 70268-70269, 70272, 70274-70275, 70277, 70279-70281, 70284, 70287-70290, 70293-70294, 70296-70302, 70311-70314, 70316-70318, 70320, 70322-70323, 70328-70331, 70333-70336, 70339-70346, 70348, 70350-70352, 70354-70355, 70357-70360, 70362, 70369, 70371-70372, 70374-70375, 70378, 70380-70381, 70383-70384, 70386, 70388-70389, 70391, 70393, 70396-70398, 70400, 70402-70407, 70409-70412, 70415, 70417-70422, 70424, 70430, 70432-70433, 70435, 70437-70441, 70443-70446, 70448, 70451-70452, 70455-70457, 70460, 70462-70464, 70466-70468, 70470-70472, 70474-70476, 70478-70479, 70481-70486, 70488-70489, 70491-70495, 70497-70504, 70508-70513, 70515-70519, 70521-70522, 70524, 70526-70527, 70531-70537, 70543, 70545, 70547, 70549-70550, 70552-70555, 70558-70559, 70561-70562, 70565-70569, 70572-70573, 70575-70582, 70587-70588, 70591, 70593-70595, 70598-70601, 70604, 70607, 70610-70612, 70616-70619, 70624-70628, 70634, 70636, 70638-70647, 70649-70654, 70656, 70658, 70660, 70662, 70666-70667, 70675, 70679, 70681-70685, 70688-70691, 70693, 70696-70697, 70700-70701, 70705-70706, 70716, 70719-70721, 70724-70726, 70728, 70730-70731, 70734-70736, 70739-70740, 70742-70743, 70745, 70747-70754, 70756, 70760, 70764-70773, 70779-70780, 70782-70783, 70786, 70792, 70794-70796, 70799, 70802-70809, 70812, 70814, 70821, 70823-70824, 70826, 70828-70829, 70831, 70838-70839, 70841, 70843, 70845, 70854-70857, 70859, 70861, 70863, 70867, 70872-70873, 70875-70876, 70878-70887, 70889, 70891, 70894-70899, 70901-70913, 70916-70924, 70926-70928, 70932, 70934-70936, 70941, 70944, 70946, 70954, 70957-70959, 70962, 70965, 70967-70971, 70973-70976, 70979, 70981, 70983, 70985, 70988-70990, 70992-70994, 70997-71005, 71008-71010, 71012-71013, 71015, 71022-71024, 71026-71028, 71032-71033, 71035-71037, 71040-71046, 71048-71049, 71052-71053, 71055, 71058-71065, 71067-71071, 71075-71078, 71080-71082, 71086-71090, 71096, 71100, 71103, 71106, 71108, 71110-71113, 71116, 71118, 71122-71124, 71126-71127, 71133-71139, 71141, 71144, 71146-71151, 71153, 71155, 71161-71162, 71164, 71166-71171, 71173, 71175-71176, 71178, 71181, 71183, 71186, 71188, 71192-71194, 71196-71197, 71199-71204, 71208-71212, 71219, 71221, 71225, 71230-71231, 71233-71239, 71241-71244, 71246, 71248, 71250, 71253-71254, 71263-71264, 71266, 71268, 71271, 71273, 71276, 71283-71284, 71287-71293, 71295-71301, 71304-71305, 71307, 71309, 71311, 71314-71315, 71317, 71319-71320, 71322-71325, 71328-71330, 71332-71334, 71336-71337, 71339, 71342, 71344, 71346-71350, 71352-71353, 71357-71361, 71364, 71368-71369, 71374-71375, 71377-71378, 71380, 71383-71386, 71389, 71394, 71398, 71400-71401, 71403-71405, 71410, 71412-71413, 71415, 71417-71423, 71425-71426, 71428-71430, 71432, 71434-71435, 71437-71440, 71444, 71446-71447, 71450-71454, 71457, 71460-71467, 71470, 71472-71474, 71476-71477, 71479, 71481-71488, 71490, 71492-71507, 71510-71511, 71513-71515, 71518, 71520-71521, 71523, 71529, 71531-71535, 71537, 71539-71540, 71542, 71544-71545, 71547-71549, 71553, 71555, 71557, 71559, 71561-71566, 71569, 71571, 71573-71574, 71576-71577, 71584, 71588, 71592, 71595-71596, 71611-71612, 71619, 71622, 71624-71625, 71627-71628, 71630-71631, 71636, 71638, 71640, 71646, 71649-71653, 71659-71662, 71664-71667, 71670, 71672, 71678-71679, 71681-71683, 71685-71688, 71690-71691, 71693-71701, 71705-71708, 71711-71712, 71714, 71716-71719, 71726, 71728, 71732, 71734, 71736, 71740, 71742, 71744-71747, 71749-71750, 71752-71753, 71756-71758, 71760-71763, 71765, 71767-71768, 71770-71771, 71773-71774, 71776, 71778, 71780-71784, 71786-71792, 71795, 71798, 71800, 71802-71806, 71808-71809, 71811, 71815-71819, 71833-71838, 71843, 71845, 71848-71852, 71854-71856, 71858, 71860-71861, 71863-71865, 71867, 71869-71874, 71877, 71882, 71884-71885, 71887, 71889, 71892, 71894-71897, 71900-71901, 71903, 71905-71908, 71910, 71913, 71916-71918, 71922, 71924, 71926-71927, 71929-71934, 71937-71938, 71940-71942, 71945-71947, 71951-71964, 71966, 71968, 71972, 71974-71976, 71978-71982, 71987-71990, 71993, 71995-71998, 72000-72001, 72003-72004, 72006-72010, 72012, 72014-72015, 72017-72018, 72021-72031, 72033-72035, 72038, 72040-72042, 72044-72046, 72048-72049, 72051, 72055-72059, 72061-72063, 72065, 72071-72075, 72077, 72079, 72081-72082, 72085, 72087, 72089-72096, 72101-72102, 72104, 72107-72111, 72113, 72115-72120, 72123-72126, 72128-72131, 72135-72139, 72141-72142, 72144, 72146-72151, 72153, 72155, 72157-72160, 72162-72163, 72166-72167, 72169-72171, 72173-72175, 72179, 72181, 72183-72189, 72191-72192, 72195-72196, 72198-72199, 72201-72207, 72214-72217, 72220-72222, 72225, 72228-72229, 72232, 72234, 72238-72239, 72241, 72243-72244, 72246-72248, 72250, 72255-72260, 72262, 72264, 72266-72267, 72269-72271, 72273-72274, 72282, 72285-72286, 72289-72293, 72295, 72297, 72299, 72302, 72304-72305, 72307, 72309-72310, 72313-72314, 72317-72320, 72324, 72326-72332, 72339-72341, 72343-72346, 72348, 72350-72352, 72354, 72357-72359, 72361-72363, 72365-72374, 72376, 72378, 72380-72391, 72394-72395, 72398-72399, 72402, 72404-72411, 72413, 72415-72416, 72418-72420, 72422, 72424-72425, 72431, 72433-72435, 72438, 72440-72441, 72443, 72446-72447, 72449, 72453-72455, 72458-72459, 72462-72463, 72465, 72468-72469, 72471, 72473, 72475, 72477, 72479, 72485, 72487-72493, 72496-72499, 72502-72503, 72505, 72507-72508, 72511-72513, 72516-72519, 72521-72538, 72540, 72544, 72546-72548, 72553, 72557-72558, 72561, 72563, 72565-72566, 72568, 72570, 72572-72573, 72575, 72577-72579, 72583-72592, 72595, 72598-72604, 72606-72612, 72614-72616, 72618-72623, 72625-72628, 72630, 72632, 72641-72643, 72647-72653, 72656-72657, 72659, 72662-72663, 72665, 72669-72670, 72672, 72674, 72677, 72680-72685, 72687, 72693-72695, 72697, 72699-72700, 72706, 72708-72709, 72711, 72716, 72718, 72720-72721, 72724-72726, 72729, 72731-72734, 72736-72737, 72739, 72748, 72750-72751, 72753, 72755-72759, 72761-72763, 72765-72767, 72771-72773, 72775-72776, 72779, 72781, 72786, 72788, 72791-72796, 72798, 72801-72802, 72807-72811, 72813, 72815, 72817-72820, 72823-72834, 72836, 72838-72845, 72847-72850, 72853, 72861, 72863-72866, 72868, 72873, 72875-72876, 72879-72880, 72882, 72884-72885, 72893, 72895, 72897-72902, 72904-72908, 72910-72914, 72917-72920, 72923, 72928, 72931-72934, 72936, 72939, 72943-72950, 72953, 72955-72958, 72962-72964, 72966, 72968-72971, 72973-72974, 72976-72977, 72979, 72981-72983, 72988-72989, 72994, 72996-72997, 72999-73000, 73002-73003, 73005, 73008-73010, 73013, 73015, 73017, 73027, 73029-73034, 73037-73043, 73045-73048, 73050-73055, 73057, 73059, 73061-73075, 73077, 73080-73081, 73083, 73085, 73089-73090, 73092-73094, 73097-73099, 73101, 73104-73105, 73108-73110, 73115, 73118-73122, 73124, 73127-73130, 73133, 73135, 73138, 73140-73141, 73144-73146, 73148, 73150-73152, 73154-73155, 73157-73158, 73160-73167, 73172-73175, 73177, 73179, 73182-73189, 73191, 73195-73196, 73201-73211, 73213, 73215, 73221, 73225-73227, 73230-73235, 73239, 73241, 73245, 73247, 73249-73251, 73254, 73256-73258, 73260-73262, 73267-73268, 73271, 73273, 73275-73276, 73281-73290, 73293-73294, 73296, 73298-73300, 73303, 73305-73308, 73310, 73312, 73314-73319, 73322, 73326-73327, 73329-73333, 73336, 73338, 73341-73343, 73345, 73347-73352, 73357-73358, 73361, 73363-73366, 73368-73377, 73379-73382, 73384-73385, 73390-73391, 73393-73396, 73398, 73403-73404, 73407-73408, 73410-73415, 73417, 73420, 73422, 73427-73430, 73432, 73434, 73436-73442, 73444-73458, 73460, 73462-73464, 73468-73469, 73474, 73478-73483, 73485-73491, 73499-73502, 73505, 73507, 73509, 73511-73516, 73519-73520, 73523, 73525-73528, 73530-73531, 73533-73538, 73541-73544, 73547-73552, 73556, 73561-73562, 73564-73568, 73570, 73573, 73579-73584, 73588-73589, 73591-73595, 73597-73599, 73602-73603, 73605, 73608-73611, 73613, 73615, 73618-73624, 73627-73631, 73633, 73639-73642, 73646-73649, 73653, 73656-73659, 73661-73666, 73671, 73673, 73678-73681, 73685-73687, 73689, 73692, 73694-73695, 73697, 73699-73701, 73703-73704, 73706, 73710-73712, 73716-73719, 73722-73725, 73727, 73729-73731, 73734, 73737, 73740-73741, 73744-73750, 73752, 73755-73756, 73758, 73760-73763, 73766, 73768-73770, 73772, 73774-73775, 73777, 73781-73783, 73785-73799, 73801-73803, 73806-73807, 73809-73810, 73813-73814, 73819-73820, 73822-73823, 73825-73828, 73833, 73836-73839, 73841-73844, 73846-73848, 73851, 73858, 73860-73864, 73867, 73869, 73871, 73873-73875, 73879-73882, 73885-73887, 73889-73890, 73893-73895, 73897, 73900, 73902, 73910-73911, 73913, 73915, 73918, 73920-73928, 73932-73933, 73937-73944, 73947-73957, 73960, 73962, 73965-73966, 73970-73971, 73975, 73977, 73979, 73982-73985, 73987-73990, 73992, 73994-73995, 73997-73999, 74001, 74004-74006, 74008-74009, 74011-74017, 74022, 74024-74028, 74031-74039, 74041, 74043, 74047, 74050, 74053, 74055, 74060-74062, 74064-74065, 74067-74070, 74072-74074, 74076, 74079-74080, 74082, 74084-74086, 74090-74091, 74094-74095, 74097-74102, 74104-74105, 74108-74113, 74116-74118, 74120-74121, 74123, 74125-74126, 74128, 74132-74133, 74135, 74138, 74140, 74142-74146, 74148-74149, 74152-74159, 74161, 74166, 74169-74170, 74175, 74177-74178, 74181-74182, 74185-74191, 74193, 74196-74200, 74202-74207, 74209, 74211-74212, 74214, 74216-74220, 74223, 74225-74232, 74234-74238, 74240-74241, 74244-74246, 74248-74253, 74255-74266, 74268-74271, 74277, 74280-74281, 74283, 74285, 74289-74292, 74294, 74297, 74299-74300, 74304-74308, 74312-74314, 74316-74322, 74324-74325, 74327, 74329-74337, 74340-74350, 74355-74360, 74364-74366, 74370, 74373, 74376-74378, 74380, 74382-74389, 74391, 74393-74394, 74396-74397, 74400-74402, 74405-74409, 74411-74413, 74415-74416, 74419-74425, 74427-74428, 74430-74433, 74435-74439, 74441-74443, 74450-74451, 74453, 74459-74462, 74465-74466, 74471-74472, 74474, 74477, 74479-74482, 74484, 74487-74488, 74490, 74492-74493, 74495-74499, 74502-74506, 74508-74509, 74512-74514, 74519, 74521-74536, 74538, 74540-74546, 74548-74557, 74560, 74563-74564, 74567, 74569-74574, 74576, 74578, 74580-74582, 74585, 74587-74588, 74590-74596, 74601-74611, 74614-74615, 74617-74618, 74620-74624, 74626, 74628, 74632-74633, 74635-74641, 74643-74649, 74651-74653, 74655-74656, 74660, 74665, 74667, 74670-74673, 74678-74679, 74681, 74684, 74686, 74688-74692, 74694-74695, 74700-74701, 74704-74706, 74708, 74710-74711, 74715-74719, 74721, 74723-74735, 74737-74739, 74742, 74744, 74746, 74749, 74753-74755, 74757, 74759-74761, 74766-74772, 74774-74782, 74789-74791, 74794, 74797-74800, 74802-74812, 74814, 74816-74817, 74819, 74821, 74824, 74827-74831, 74833-74836, 74838-74839, 74841-74843, 74846-74848, 74851-74855, 74857-74861, 74864, 74867-74868, 74871-74872, 74874-74878, 74880, 74885-74886, 74888-74893, 74895-74899, 74901-74916, 74918, 74920-74921, 74923-74925, 74928-74934, 74936, 74940-74944, 74947, 74949, 74951-74960, 74962, 74965, 74967-74968, 74970-74972, 74975-74977, 74979, 74982-74983, 74988-74989, 74993-74994, 74996-75007, 75009-75011, 75013, 75015, 75017-75018, 75020-75021, 75023-75027, 75029, 75032, 75034, 75037-75038, 75042-75046, 75048-75049, 75052, 75055-75059, 75063-75064, 75067-75074, 75076-75077, 75080-75082, 75084, 75086-75088, 75093-75098, 75100-75102, 75104-75109, 75111-75112, 75114-75117, 75119-75121, 75125, 75127, 75129, 75133, 75136-75143, 75146, 75148-75149, 75152-75153, 75155-75156, 75158, 75162-75163, 75165-75169, 75172, 75174, 75177-75183, 75185-75186, 75188-75189, 75191-75193, 75195-75202, 75206, 75208-75209, 75211-75215, 75217-75219, 75221, 75223, 75226, 75228, 75233-75234, 75236, 75238-75240, 75242-75243, 75245-75249, 75254-75260, 75263-75264, 75266-75267, 75270, 75272-75274, 75276, 75279-75280, 75282-75284, 75286-75287, 75290-75303, 75307, 75309-75310, 75312-75314, 75317-75321, 75323-75324, 75326-75327, 75331, 75333, 75337-75338, 75340-75342, 75344-75346, 75348, 75350-75351, 75353-75356, 75358-75359, 75365, 75369-75371, 75373, 75375, 75378-75383, 75386-75388, 75390-75395, 75399, 75403-75404, 75406, 75409-75412, 75414-75415, 75417-75418, 75420, 75423, 75427, 75430, 75432-75433, 75436-75437, 75439, 75443-75444, 75446-75451, 75453-75454, 75456, 75459-75462, 75464-75471, 75473, 75475-75480, 75482, 75484-75488, 75490, 75492-75496, 75498-75502, 75505, 75507-75508, 75510-75516, 75519, 75523-75524, 75528-75534, 75539-75543, 75545, 75547, 75550, 75552-75555, 75557, 75560-75561, 75564, 75567-75569, 75572-75574, 75576-75578, 75580-75583, 75585, 75589, 75591-75594, 75597, 75600-75601, 75607-75610, 75612-75624, 75626, 75628, 75630-75633, 75635-75638, 75640-75644, 75646, 75649-75658, 75660-75667, 75669, 75672, 75675, 75677, 75680, 75682-75683, 75687-75688, 75690, 75692, 75694, 75696, 75698-75699, 75701, 75703, 75708-75717, 75720-75733, 75735-75747, 75750-75751, 75753, 75755, 75757-75767, 75769-75776, 75778, 75782-75785, 75790-75794, 75797-75798, 75801-75806, 75808-75810, 75812-75813, 75815, 75819-75820, 75824, 75827-75831, 75833-75838, 75840-75844, 75846, 75849-75850, 75852-75858, 75860-75861, 75867, 75869-75870, 75872-75875, 75878-75880, 75882-75883, 75887-75889, 75891-75898, 75900-75902, 75904-75905, 75909-75912, 75916-75917, 75919-75921, 75923-75927, 75929-75933, 75935-75938, 75940-75942, 75944-75952, 75957-75961, 75964, 75966-75974, 75977-75984, 75987-75994, 75998-75999, 76001-76002, 76004, 76007, 76009-76010, 76014-76016, 76018, 76020-76022, 76024-76026, 76029-76030, 76032-76046, 76048-76052, 76056, 76058, 76060-76067, 76069, 76072-76075, 76079, 76082-76083, 76085-76088, 76090-76091, 76094-76096, 76098-76100, 76103-76108, 76111, 76114-76119, 76121-76123, 76125, 76128, 76133-76138, 76141-76142, 76144-76146, 76150-76152, 76154-76157, 76159-76164, 76166-76167, 76169, 76171, 76173, 76176-76180, 76183, 76185-76188, 76190-76193, 76196-76201, 76205-76207, 76209, 76211-76213, 76215-76217, 76224-76227, 76230, 76233, 76235-76236, 76240-76242, 76244-76246, 76249, 76251-76253, 76256, 76258, 76262-76263, 76265, 76267-76269, 76271, 76273-76276, 76279-76280, 76283-76284, 76286, 76290-76295, 76297-76309, 76311-76315, 76322-76323, 76325-76327, 76329-76330, 76332, 76334-76338, 76341, 76343, 76345-76361, 76364, 76367-76370, 76374-76379, 76381, 76386, 76388-76401, 76404-76407, 76409, 76412-76413, 76415, 76419-76435, 76438-76441, 76443-76445, 76447-76454, 76457-76460, 76462, 76464-76472, 76474, 76476, 76478, 76480, 76482-76483, 76485-76488, 76490, 76492, 76495, 76497-76498, 76501-76504, 76507, 76509-76510, 76513, 76515, 76517-76519, 76521, 76528-76530, 76534-76535, 76539-76540, 76546, 76548-76550, 76554-76560, 76562-76568, 76570-76572, 76574, 76577, 76582-76584, 76586-76589, 76591, 76593, 76598, 76601-76602, 76607, 76609-76610, 76612-76613, 76617, 76619, 76621, 76625, 76627, 76629-76630, 76634-76641, 76643, 76649, 76651, 76657-76662, 76666-76674, 76677-76678, 76682, 76686, 76688, 76694, 76698, 76700, 76705-76713, 76715, 76718, 76721-76722, 76724-76727, 76729, 76731, 76733, 76736, 76738, 76741-76742, 76744-76747, 76749-76754, 76758-76761, 76763-76770, 76773, 76776-76777, 76782-76784, 76786-76790, 76793, 76795-76797, 76804-76806, 76808, 76810, 76814-76823, 76825, 76828, 76831, 76835, 76837-76839, 76841-76842, 76845, 76848, 76852, 76854-76855, 76857-76859, 76861, 76864-76866, 76870-76872, 76876, 76878-76883, 76889, 76891, 76893, 76896-76901, 76903, 76905, 76909-76921, 76923, 76925-76926, 76928, 76931-76937, 76939, 76941, 76944, 76946, 76950-76951, 76958-76959, 76961-76965, 76970, 76972, 76976, 76985-76986, 76990, 76998, 77000, 77011-77020, 77022, 77025, 77028, 77030-77038, 77042, 77044-77047, 77049-77050, 77054-77056, 77058-77059, 77062-77063, 77065-77068, 77070, 77072, 77074-77079, 77082-77088, 77096, 77098-77099, 77103-77105, 77110, 77112-77115, 77117, 77119-77123, 77127-77128, 77130-77133, 77135-77137, 77139-77141, 77143-77144, 77146-77150, 77152, 77154-77156, 77168-77169, 77171-77174, 77176-77182, 77187, 77189, 77191-77197, 77199-77202, 77207-77208, 77214-77220, 77222-77223, 77227-77228, 77230-77236, 77238-77239, 77241, 77246-77248, 77250, 77254-77257, 77259-77260, 77262, 77266, 77268, 77270, 77272-77274, 77277-77281, 77283-77287, 77290-77292, 77294, 77297-77298, 77300-77301, 77303-77310, 77312, 77314, 77316-77317, 77320-77324, 77327, 77330, 77332-77334, 77337-77338, 77340-77341, 77346-77347, 77350-77353, 77355, 77358-77359, 77361-77362, 77365-77367, 77374, 77376, 77380, 77382, 77385, 77389, 77392-77396, 77398-77401, 77404-77405, 77407-77409, 77413-77415, 77417-77418, 77420, 77422-77423, 77425, 77428, 77430-77451, 77454, 77456-77479, 77481, 77484-77485, 77487, 77493, 77495, 77498, 77500, 77502-77509, 77511, 77513, 77517, 77522, 77524-77528, 77530-77531, 77534, 77536-77542, 77544, 77546-77548, 77550, 77552-77556, 77558, 77560-77570, 77573-77575, 77577, 77579-77581, 77583-77588, 77592-77594, 77596, 77600, 77603-77611, 77614, 77619, 77624-77629, 77631-77651, 77654-77655, 77657, 77663-77667, 77669-77670, 77672-77677, 77679, 77681, 77684, 77687-77689, 77692, 77698-77699, 77701-77705, 77707, 77710, 77713-77714, 77718-77723, 77725, 77728, 77730, 77732, 77734, 77737, 77740-77742, 77744-77748, 77751, 77754-77768, 77770-77774, 77776, 77779, 77781-77782, 77784, 77786, 77788-77789, 77791-77793, 77797-77798, 77800-77803, 77806, 77808-77810, 77816-77817, 77819-77821, 77824, 77826-77827, 77830-77833, 77837, 77839-77840, 77842-77843, 77845, 77847, 77849, 77851-77852, 77855-77856, 77858-77864, 77868-77870, 77872-77873, 77875-77885, 77887-77888, 77890-77891, 77893-77897, 77899, 77901-77902, 77905-77908, 77911-77914, 77916-77918, 77922-77925, 77927, 77930, 77932-77934, 77936-77938, 77942-77943, 77945-77946, 77948-77949, 77951, 77953-77954, 77956-77965, 77968-77970, 77973, 77975-77976, 77978-77987, 77990, 77993-77997, 77999-78003, 78005, 78008, 78011-78013, 78016-78017, 78019, 78021, 78023, 78029-78030, 78034-78049, 78052-78054, 78057-78060, 78062-78072, 78074, 78076-78077, 78079-78081, 78083-78084, 78086, 78089-78093, 78095-78097, 78100, 78103, 78106-78108, 78112-78113, 78115, 78118, 78121, 78123, 78132, 78135-78143, 78147-78148, 78150, 78153-78154, 78158-78159, 78162, 78164, 78166-78172, 78174-78175, 78177, 78179-78182, 78184, 78192, 78196, 78198, 78200, 78203, 78208-78210, 78212-78215, 78217-78225, 78227, 78229-78232, 78234, 78236-78242, 78244-78246, 78248, 78251-78252, 78254, 78256-78257, 78260-78263, 78265-78266, 78269, 78271-78275, 78277-78284, 78286-78291, 78294, 78297, 78299, 78301-78310, 78313-78314, 78317-78322, 78325-78331, 78333, 78338, 78342-78344, 78346-78347, 78349-78351, 78353, 78355-78359, 78361, 78363, 78365-78366, 78370, 78372-78373, 78378-78381, 78383, 78386, 78388, 78390-78395, 78397-78401, 78408-78410, 78412-78414, 78417, 78421, 78423, 78425-78426, 78429-78430, 78433-78439, 78441, 78443-78447, 78450-78451, 78453-78455, 78457-78459, 78461-78464, 78467, 78469, 78471-78473, 78475-78480, 78484, 78486-78489, 78491-78496, 78498, 78500, 78504, 78508-78509, 78511, 78513-78516, 78519-78520, 78524, 78526-78529, 78531-78539, 78545-78548, 78550-78554, 78556, 78558, 78560-78561, 78563, 78565, 78567-78570, 78574-78577, 78579-78580, 78582-78583, 78585-78587, 78589, 78591-78596, 78598, 78602-78605, 78607-78611, 78613-78621, 78624-78625, 78627-78629, 78633, 78635-78636, 78638-78643, 78646-78647, 78649, 78651, 78653-78656, 78659-78661, 78663-78664, 78666-78668, 78670-78673, 78675-78677, 78681, 78684-78685, 78687, 78689-78690, 78692, 78698-78699, 78702, 78704-78706, 78708, 78711-78721, 78723-78725, 78729-78732, 78735-78737, 78741-78744, 78746-78747, 78749, 78751-78752, 78755-78756, 78758-78759, 78761-78762, 78765, 78767, 78775-78776, 78778-78789, 78791-78797, 78799-78801, 78803-78805, 78808, 78810, 78813, 78817-78818, 78820-78822, 78827-78830, 78832-78834, 78836-78838, 78840-78843, 78845-78846, 78849-78852, 78858-78863, 78865, 78867-78868, 78870, 78876, 78879-78885, 78887-78888, 78890, 78893-78895, 78898, 78903-78909, 78912, 78914-78915, 78917, 78919-78920, 78922-78925, 78927-78928, 78930, 78933-78935, 78937, 78940, 78943-78950, 78952-78953, 78955-78959, 78963-78970, 78972, 78976, 78978, 78980, 78982-78984, 78987-78989, 78991-78993, 78995-78996, 78998-79001, 79004-79008, 79010-79011, 79013, 79015, 79018-79020, 79022-79024, 79026, 79028-79030, 79033, 79038-79040, 79042, 79044-79045, 79047-79050, 79052, 79054, 79056, 79058-79062, 79064-79068, 79070, 79073-79074, 79076, 79078-79081, 79084-79085, 79087-79092, 79094, 79096, 79098-79099, 79101, 79104, 79112-79114, 79116-79118, 79122-79123, 79125, 79128, 79130-79134, 79136-79137, 79139-79145, 79151, 79153-79154, 79156, 79160-79161, 79164-79167, 79170, 79173-79174, 79177-79178, 79180-79182, 79190, 79192-79194, 79197, 79199-79201, 79203-79209, 79211-79212, 79215, 79217, 79219-79221, 79223-79232, 79234-79235, 79237-79241, 79248-79249, 79251-79255, 79257, 79264, 79266-79268, 79270, 79272-79273, 79275, 79277-79280, 79282, 79286, 79288-79290, 79300-79302, 79304-79307, 79309-79318, 79322-79332, 79334, 79339-79341, 79343-79345, 79347, 79349-79356, 79358-79365, 79367-79370, 79372-79373, 79375-79382, 79384-79385, 79388, 79390-79395, 79397, 79400-79402, 79404-79405, 79407-79410, 79412, 79415-79418, 79420, 79422, 79424-79428, 79430, 79432, 79434-79436, 79438, 79441-79444, 79449-79450, 79454-79456, 79460-79463, 79466-79468, 79472, 79474, 79476-79480, 79486-79489, 79492, 79499-79501, 79503-79504, 79506, 79510-79511, 79513, 79515-79516, 79518-79520, 79522, 79525-79529, 79531, 79533-79534, 79536, 79539, 79541, 79544-79545, 79547-79550, 79552, 79556-79562, 79566-79567, 79571, 79573-79576, 79580-79581, 79583, 79586-79590, 79592-79597, 79599-79601, 79603-79608, 79610, 79615, 79618, 79620, 79622, 79624-79625, 79627-79629, 79632-79635, 79638-79641, 79643, 79649, 79651-79653, 79656-79661, 79667-79669, 79671, 79675-79677, 79679, 79681, 79683-79685, 79687-79692, 79694-79695, 79697, 79700, 79702, 79711-79713, 79717, 79721-79727, 79729-79736, 79738-79741, 79743, 79745-79746, 79748, 79750-79752, 79754-79759, 79761, 79764-79765, 79768, 79771-79772, 79774-79777, 79781-79782, 79784-79786, 79790, 79792, 79794-79798, 79800-79809, 79811-79815, 79817, 79819-79821, 79823, 79826-79831, 79836, 79838-79846, 79849-79852, 79857, 79859-79860, 79862-79863, 79865, 79867-79870, 79873, 79876-79877, 79879, 79883-79885, 79887, 79890, 79892, 79901-79904, 79906-79908, 79910-79912, 79914, 79916-79917, 79921-79927, 79930-79931, 79935, 79937, 79939, 79942, 79944-79946, 79948-79953, 79955-79956, 79960-79964, 79969-79973, 79976-79977, 79987-79989, 79991-79993, 79995-80004, 80006-80012, 80014-80024, 80026, 80029-80031, 80033-80034, 80037, 80039, 80041-80042, 80044, 80046, 80048, 80051-80052, 80054, 80056, 80058, 80061, 80063-80065, 80067-80069, 80071, 80075, 80077, 80079-80083, 80085-80089, 80091-80093, 80096, 80098-80099, 80101, 80104, 80109, 80111-80112, 80115, 80118, 80125-80126, 80128-80129, 80131-80134, 80139, 80142-80145, 80148-80161, 80164-80165, 80168-80169, 80171-80181, 80183-80184, 80186, 80191-80192, 80194, 80196-80198, 80200-80204, 80206-80208, 80212, 80215-80218, 80224, 80226-80229, 80231-80235, 80239, 80241-80245, 80253, 80255-80256, 80260-80263, 80266-80270, 80272, 80275-80283, 80287, 80291-80295, 80297-80300, 80302-80305, 80307-80311, 80313-80318, 80321-80322, 80324, 80327, 80329, 80333, 80335, 80338-80340, 80343, 80345-80347, 80350, 80352-80360, 80363-80368, 80371, 80373, 80375, 80379, 80382, 80386-80395, 80401-80404, 80406, 80410, 80412-80413, 80415-80416, 80422, 80425-80426, 80430, 80433-80436, 80439, 80442-80443, 80448-80449, 80451, 80453, 80456-80457, 80462-80463, 80465, 80469, 80472-80473, 80475, 80478, 80484-80485, 80488-80489, 80492, 80494, 80497-80502, 80504-80505, 80507, 80509-80511, 80513-80523, 80525, 80527, 80531-80532, 80534-80535, 80542-80543, 80545-80546, 80548, 80551-80554, 80560, 80563-80567, 80569-80574, 80576, 80579, 80582, 80585-80586, 80589-80592, 80596-80597, 80599, 80601, 80604-80611, 80613-80614, 80616-80618, 80621-80622, 80625, 80627-80628, 80630, 80634, 80637-80641, 80643-80644, 80647, 80649, 80654, 80656, 80664-80665, 80667, 80669-80677, 80679, 80681-80697, 80699, 80704-80706, 80712, 80715-80717, 80720-80724, 80726-80731, 80733, 80735-80738, 80742-80743, 80745, 80749-80752, 80758-80759, 80761-80764, 80771, 80773, 80775-80779, 80781-80782, 80785-80787, 80791, 80794, 80798-80799, 80803, 80805-80806, 80810-80811, 80814-80815, 80818, 80820-80823, 80830, 80832-80839, 80841-80842, 80844-80846, 80849, 80852-80855, 80857, 80861-80876, 80878, 80882-80883, 80886, 80888, 80893-80895, 80897, 80899, 80903, 80907, 80909, 80911, 80913, 80916-80919, 80921-80927, 80930-80936, 80938-80943, 80947-80953, 80955, 80961-80962, 80964-80965, 80967, 80970-80971, 80977-80979, 80982-80983, 80985-80986, 80988-80995, 80997, 80999-81001, 81005-81009, 81011-81013, 81018-81019, 81021, 81023-81024, 81027, 81030-81050, 81053-81055, 81061, 81064, 81066-81070, 81072-81080, 81082-81089, 81092, 81095, 81100-81106, 81108-81113, 81115, 81120-81121, 81123-81124, 81126, 81128-81132, 81134-81144, 81146-81150, 81153-81156, 81158-81159, 81161, 81163-81164, 81166, 81168, 81170-81171, 81175, 81180, 81184-81186, 81188, 81190, 81193-81195, 81199-81200, 81203, 81205-81207, 81209-81216, 81218-81219, 81222-81224, 81226-81231, 81234-81235, 81238-81239, 81241-81242, 81244, 81247-81249, 81252, 81254-81258, 81260-81265, 81267, 81269-81273, 81275-81280, 81283-81284, 81286, 81288-81290, 81295, 81297-81299, 81304, 81306-81311, 81315-81319, 81321, 81323-81329, 81331-81336, 81345, 81350-81352, 81355-81356, 81359, 81362-81363, 81369, 81374, 81376, 81378-81380, 81383-81384, 81386, 81388, 81390-81393, 81402, 81404-81405, 81411, 81413-81416, 81418-81419, 81421-81427, 81432, 81434-81438, 81440, 81442, 81445, 81447, 81449, 81452, 81454, 81458, 81461-81463, 81467-81469, 81474-81477, 81480-81482, 81484-81493, 81497, 81499-81501, 81508-81510, 81513-81514, 81523, 81526, 81528-81529, 81533, 81542, 81544, 81546, 81548, 81551-81552, 81554-81555, 81557, 81563, 81565-81567, 81570-81573, 81579, 81582-81583, 81586-81588, 81590-81591, 81593, 81595, 81597-81602, 81605-81612, 81615, 81617, 81619-81620, 81622-81625, 81629-81630, 81632-81640, 81642, 81644, 81646-81650, 81652, 81659-81661, 81663, 81665-81666, 81668, 81670, 81672-81677, 81679-81680, 81682, 81684-81687, 81689, 81692-81694, 81697-81699, 81701-81703, 81705, 81708, 81711, 81713, 81718-81719, 81721-81722, 81724-81727, 81729, 81731-81733, 81735-81736, 81738-81739, 81742-81745, 81747, 81751-81752, 81755, 81757-81761, 81763-81766, 81768-81769, 81771-81773, 81776-81777, 81780-81784, 81786-81789, 81792, 81796-81798, 81807-81809, 81811, 81818-81821, 81823-81833, 81835-81843, 81845-81848, 81853-81854, 81857, 81859-81863, 81868-81870, 81872-81878, 81882, 81884-81890, 81892, 81895-81897, 81901-81903, 81905-81912, 81914, 81917, 81919-81922, 81924, 81926-81927, 81932, 81938, 81942-81943, 81945-81948, 81950-81952, 81956, 81959-81962, 81964-81967, 81970-81975, 81977-81981, 81984, 81989, 81994-81995, 81997-81998, 82001-82003, 82005, 82007, 82011, 82013-82015, 82017-82021, 82024-82025, 82027-82033, 82035, 82038-82040, 82042-82043, 82045-82048, 82050-82051, 82053, 82055-82061, 82064-82066, 82069, 82074-82077, 82079-82081, 82083-82087, 82090, 82094, 82100-82110, 82112-82113, 82116, 82122-82123, 82126-82128, 82130-82136, 82138-82141, 82143-82145, 82148, 82152, 82154-82155, 82157, 82159-82160, 82162-82165, 82167, 82169-82171, 82174-82176, 82178-82179, 82181, 82186, 82188-82189, 82192-82196, 82199-82204, 82206, 82209-82216, 82221-82229, 82234, 82236, 82240-82242, 82245-82249, 82251, 82258-82266, 82268-82272, 82274-82275, 82277, 82279-82281, 82283-82284, 82286, 82288, 82290, 82292, 82294, 82296-82297, 82299-82302, 82304, 82307-82311, 82313-82316, 82319, 82322-82323, 82325-82327, 82329, 82333, 82335-82336, 82340-82350, 82352, 82355, 82358-82359, 82361, 82363-82365, 82367, 82371-82373, 82376, 82382, 82384, 82386-82388, 82390-82391, 82393, 82396-82397, 82399-82401, 82403-82405, 82407, 82409, 82413, 82415-82418, 82420-82428, 82431, 82434-82440, 82442-82445, 82447-82448, 82451, 82453-82454, 82456, 82458, 82461, 82465-82466, 82468-82475, 82477-82478, 82482-82483, 82485-82488, 82490-82497, 82499, 82501-82517, 82519, 82521-82525, 82527-82532, 82537, 82539, 82541-82543, 82545, 82548, 82550-82559, 82562-82568, 82571-82572, 82574, 82577-82578, 82581, 82583-82588, 82590-82591, 82593-82598, 82600-82606, 82608, 82610, 82612, 82614-82617, 82619-82623, 82625-82628, 82630-82635, 82637, 82640-82643, 82645-82646, 82648-82652, 82655-82658, 82661, 82663-82671, 82673-82677, 82679-82682, 82684-82689, 82691, 82697, 82700-82703, 82706, 82708-82709, 82713-82716, 82720-82722, 82724, 82726, 82728-82729, 82733-82735, 82737, 82739-82741, 82744-82745, 82749-82751, 82753-82754, 82756-82757, 82759-82766, 82769, 82771-82776, 82778, 82780-82782, 82784, 82789, 82791-82792, 82794-82795, 82798, 82800-82801, 82803-82807, 82809-82812, 82814, 82816-82828, 82830-82834, 82836-82841, 82845-82848, 82851-82858, 82861-82867, 82869-82870, 82874, 82876, 82878-82879, 82882, 82886, 82889-82896, 82898, 82900-82901, 82903-82905, 82908-82917, 82919, 82921, 82924, 82926-82934, 82936, 82938, 82940-82944, 82946-82957, 82961-82971, 82976, 82978, 82981, 82983-82984, 82988-82996, 82998-83001, 83003-83007, 83009-83014, 83017-83026, 83028-83029, 83031-83033, 83040, 83043-83045, 83049, 83051-83056, 83060-83061, 83064-83067, 83069-83072, 83074-83081, 83083-83087, 83090-83092, 83095-83107, 83109-83113, 83116-83118, 83121, 83124-83127, 83129-83130, 83133-83135, 83137, 83139-83140, 83142, 83144, 83146, 83149, 83151-83156, 83162, 83167-83169, 83171-83172, 83174-83175, 83177, 83179-83197, 83203, 83206-83212, 83214-83216, 83218, 83220-83221, 83224, 83226-83229, 83231-83238, 83240-83244, 83246, 83248-83250, 83252, 83254-83257, 83259, 83261-83262, 83264-83266, 83268-83269, 83271, 83273-83275, 83278-83281, 83283-83295, 83297, 83299, 83301, 83303, 83305-83307, 83310-83312, 83314, 83316-83319, 83321, 83323-83325, 83328-83329, 83333-83335, 83337, 83340, 83342, 83344, 83346-83349, 83351-83352, 83354, 83359, 83361, 83363, 83365-83367, 83369, 83371, 83376-83377, 83380, 83382, 83384-83385, 83387, 83389-83393, 83395-83399, 83401-83402, 83404-83405, 83407, 83412, 83414-83416, 83421, 83424, 83426-83428, 83431-83432, 83434-83435, 83438, 83440-83443, 83446, 83450, 83452-83453, 83455, 83458, 83461, 83463-83464, 83467, 83469, 83471-83472, 83474-83476, 83478-83481, 83484-83488, 83490, 83492, 83495-83499, 83502, 83506-83512, 83514, 83516-83518, 83521-83528, 83531, 83535-83547, 83549-83550, 83553, 83556-83559, 83561-83562, 83564-83567, 83569-83573, 83580, 83582-83586, 83588, 83590-83596, 83598-83607, 83611-83612, 83614, 83616-83617, 83623-83625, 83627, 83630, 83635-83640, 83643-83645, 83648-83649, 83651-83652, 83654-83655, 83657-83658, 83661-83662, 83664, 83666-83668, 83670, 83672-83673, 83679, 83681-83684, 83686-83687, 83689, 83692, 83694, 83696, 83699-83700, 83702, 83704-83706, 83709, 83711-83714, 83716-83717, 83719, 83721-83722, 83726-83727, 83730-83732, 83735-83740, 83742, 83744-83750, 83752, 83756-83757, 83760-83761, 83763-83764, 83766, 83768-83769, 83771, 83774-83775, 83781-83782, 83784, 83786, 83796-83797, 83799, 83802-83803, 83806, 83809-83832, 83834, 83836-83838, 83842-83849, 83854-83857, 83860-83869, 83872, 83874-83875, 83878-83881, 83883-83887, 83889, 83893, 83898-83900, 83904-83906, 83908-83912, 83914-83915, 83917-83925, 83927-83929, 83932-83933, 83939-83940, 83943-83944, 83951-83954, 83956-83957, 83961, 83963-83964, 83966-83968, 83971-83973, 83975, 83977-83978, 83980, 83982-83983, 83987, 83989-83990, 83993, 83995, 83999-84000, 84002-84004, 84006-84008, 84010, 84012-84017, 84019-84020, 84022-84025, 84027, 84029, 84034, 84036-84037, 84039-84048, 84050-84052, 84055-84057, 84059-84063, 84065-84066, 84068-84070, 84072-84078, 84080-84082, 84084-84085, 84087, 84090, 84096, 84098, 84100, 84102-84103, 84105-84108, 84110, 84115, 84118, 84120, 84122-84123, 84127-84132, 84134, 84136-84140, 84142-84147, 84149-84155, 84157, 84164-84168, 84171-84178, 84180-84181, 84185-84188, 84190, 84192, 84194-84195, 84197, 84199, 84201-84206, 84208-84215, 84217, 84219-84220, 84223-84224, 84226-84228, 84230-84239, 84241, 84244-84246, 84248, 84252, 84254-84258, 84260, 84262-84263, 84265-84266, 84269, 84273-84275, 84280-84281, 84285, 84289-84290, 84292-84297, 84299-84304, 84306, 84308, 84313-84314, 84317-84318, 84321-84326, 84328-84334, 84337, 84339, 84344-84346, 84349, 84351-84352, 84354, 84358, 84362-84364, 84366-84378, 84381, 84383, 84389, 84391, 84394, 84399, 84401, 84405-84409, 84411-84412, 84414-84416, 84422, 84425-84426, 84428-84431, 84434-84436, 84438, 84440-84443, 84446, 84451-84452, 84454-84457, 84459-84461, 84463, 84465, 84467, 84469-84471, 84473-84474, 84476, 84480, 84485-84488, 84491, 84496-84497, 84500-84504, 84506-84507, 84514-84515, 84519, 84521-84523, 84525, 84527-84531, 84533-84534, 84537-84542, 84544-84546, 84548, 84551-84554, 84556, 84558, 84560, 84563-84566, 84568-84569, 84571-84572, 84576-84584, 84587-84591, 84593-84599, 84602-84608, 84610, 84613-84614, 84616-84617, 84619-84620, 84625, 84627-84630, 84632-84633, 84635, 84637, 84641-84643, 84645, 84648-84650, 84653, 84656, 84660-84661, 84663, 84665-84666, 84668, 84674-84676, 84678-84681, 84684, 84686, 84689, 84691-84692, 84695-84697, 84702-84705, 84707, 84709, 84711-84712, 84715-84718, 84720-84721, 84723-84724, 84726-84730, 84732-84734, 84737-84738, 84740-84743, 84746, 84748, 84750, 84752-84754, 84761, 84763-84764, 84772, 84774-84776, 84778, 84780-84782, 84785-84786, 84789, 84793-84794, 84809-84811, 84813-84814, 84816, 84818-84821, 84823-84826, 84829, 84835-84837, 84841, 84843, 84847-84849, 84851-84853, 84858-84859, 84861-84870, 84872-84879, 84882-84883, 84885, 84887-84892, 84895-84897, 84899, 84902-84906, 84908, 84911-84913, 84915, 84918-84919, 84922-84923, 84925, 84927, 84932, 84939, 84943-84944, 84946-84950, 84952, 84956, 84958, 84961-84962, 84965-84967, 84970, 84972-84979, 84983, 84986-84988, 84990, 84992, 84994-84997, 85000, 85005, 85007-85011, 85013-85015, 85017, 85020-85021, 85027-85030, 85035-85040, 85042-85043, 85045, 85047-85048, 85050, 85053, 85055-85056, 85058-85061, 85067, 85077-85079, 85083-85085, 85088-85091, 85093-85094, 85096-85099, 85103-85106, 85108-85109, 85112-85121, 85123, 85125-85129, 85131-85137, 85139, 85143, 85145-85147, 85149-85151, 85154-85157, 85161, 85164-85166, 85168-85169, 85171-85172, 85174-85175, 85177, 85179-85180, 85184-85185, 85187-85191, 85194-85195, 85198-85199, 85202-85203, 85205-85206, 85211-85212, 85215, 85222-85223, 85225-85227, 85231-85235, 85239, 85241, 85245-85246, 85249, 85251-85254, 85256, 85259-85260, 85262-85265, 85269-85271, 85273-85274, 85276-85280, 85282-85286, 85294-85297, 85300-85302, 85304-85305, 85307-85310, 85316, 85320-85321, 85323-85327, 85331-85337, 85339, 85341, 85344-85353, 85355-85357, 85359-85362, 85364-85365, 85367-85371, 85374, 85376-85377, 85381-85382, 85384-85386, 85388-85397, 85399-85406, 85408-85414, 85416-85419, 85421, 85423, 85429-85430, 85432-85436, 85438-85442, 85444-85446, 85450, 85452-85457, 85462-85464, 85466, 85470, 85473, 85475-85479, 85482, 85485, 85490-85492, 85494, 85496, 85500, 85503-85505, 85507, 85509-85511, 85513, 85515-85523, 85527, 85529, 85531-85532, 85534-85536, 85538, 85540-85541, 85544-85550, 85552-85564, 85566-85572, 85574-85576, 85578-85583, 85585, 85589, 85592, 85598-85603, 85605-85606, 85608, 85611-85612, 85614-85616, 85618, 85623-85632, 85634, 85636-85637, 85640, 85643-85649, 85651, 85654-85660, 85663-85672, 85676-85677, 85679-85684, 85688, 85690, 85692, 85696, 85698, 85701-85702, 85705, 85708-85709, 85712, 85715-85716, 85718, 85720, 85722-85730, 85733-85735, 85737, 85743, 85746, 85748-85750, 85752-85753, 85758, 85760-85766, 85768-85771, 85773, 85780-85785, 85787, 85789-85791, 85795, 85797-85803, 85805-85806, 85808-85814, 85817-85822, 85826, 85828-85829, 85832, 85834, 85836, 85838-85840, 85842, 85845-85850, 85853, 85855, 85857, 85860, 85863, 85866-85869, 85872, 85875-85879, 85881-85883, 85885-85888, 85892-85897, 85899-85901, 85903, 85907, 85909-85913, 85915, 85918-85919, 85921, 85923-85926, 85930-85931, 85934, 85936-85937, 85939-85941, 85944-85946, 85949-85951, 85955, 85962-85964, 85966, 85972-85974, 85976, 85978-85980, 85984, 85987, 85989, 85991, 85994-85995, 85997-86001, 86003-86007, 86010-86016, 86018-86022, 86024-86025, 86028-86034, 86036, 86038-86039, 86042, 86046, 86048-86051, 86053-86054, 86059-86064, 86066, 86069-86071, 86073, 86075-86085, 86089, 86094, 86097, 86100, 86102-86104, 86106, 86108-86113, 86116-86119, 86122-86123, 86125, 86128-86129, 86131, 86137-86138, 86140, 86145, 86147-86148, 86151-86152, 86157-86158, 86160-86162, 86165-86166, 86168-86172, 86177, 86179, 86183-86189, 86193-86195, 86197, 86199-86206, 86208, 86210-86211, 86214-86217, 86221-86222, 86226, 86230, 86232-86234, 86237-86238, 86240-86242, 86245-86246, 86248-86250, 86255-86256, 86259-86262, 86264, 86269, 86272, 86275, 86278, 86280, 86282, 86284-86289, 86291-86292, 86294-86297, 86299-86300, 86302, 86305, 86307, 86309-86317, 86322, 86324-86329, 86335, 86340-86345, 86347-86349, 86351-86352, 86355-86367, 86370-86371, 86373, 86375-86377, 86383, 86386, 86392, 86394, 86397-86399, 86402, 86405-86406, 86408-86409, 86411-86412, 86414-86416, 86418-86420, 86423-86424, 86426-86428, 86435, 86437-86441, 86443, 86446-86447, 86449-86450, 86453-86456, 86464-86466, 86469-86471, 86473-86476, 86478-86480, 86483, 86486-86493, 86497, 86499-86501, 86503-86504, 86507-86508, 86510, 86513, 86515-86516, 86518, 86520-86521, 86523, 86531-86532, 86534, 86537, 86541, 86545, 86547, 86549-86551, 86555-86559, 86561, 86564, 86566, 86570-86572, 86574-86576, 86578, 86580-86582, 86585, 86588, 86590-86593, 86595-86598, 86600, 86602-86607, 86610-86612, 86614, 86617-86618, 86620-86624, 86629, 86631-86637, 86641-86642, 86645-86646, 86648-86654, 86656-86664, 86666-86668, 86670, 86673, 86675-86679, 86681-86683, 86687, 86690-86691, 86694-86696, 86698-86702, 86707-86708, 86710, 86715-86719, 86721-86722, 86724-86728, 86730, 86732, 86734, 86736-86737, 86740-86743, 86745, 86751, 86754-86755, 86757, 86759, 86761-86763, 86765-86778, 86782, 86785-86786, 86788-86789, 86793-86794, 86796, 86798-86801, 86803, 86805-86811, 86813, 86815-86816, 86818-86821, 86823-86824, 86827-86834, 86836-86841, 86844-86846, 86848, 86852, 86854, 86858, 86861-86862, 86864, 86867, 86869, 86871-86872, 86874-86875, 86878, 86880-86881, 86883, 86885-86887, 86890, 86893-86897, 86899-86901, 86903-86907, 86909-86913, 86915-86916, 86920, 86922-86925, 86930-86932, 86935, 86937, 86940-86942, 86945-86946, 86948, 86950-86956, 86958-86961, 86963, 86966-86969, 86971, 86979-86980, 86982, 86984-86990, 86992-86993, 86995-86996, 87000-87004, 87006, 87011-87019, 87021, 87024, 87028-87032, 87035, 87038-87040, 87043-87044, 87046-87047, 87050-87053, 87057, 87059, 87061-87065, 87067-87070, 87072-87073, 87075-87077, 87080, 87083-87088, 87091-87092, 87096, 87099-87105, 87107-87109, 87111-87113, 87116, 87118, 87120-87123, 87125-87126, 87128-87133, 87135-87145, 87147, 87149-87150, 87153-87155, 87161, 87164-87165, 87168, 87170-87171, 87173, 87176, 87178, 87181-87182, 87185-87187, 87191-87196, 87198-87201, 87203-87204, 87206-87207, 87209, 87213, 87215, 87217, 87219-87230, 87235, 87238-87240, 87242, 87244-87245, 87247-87248, 87250-87251, 87253-87254, 87257-87258, 87260, 87262, 87265-87268, 87270-87271, 87273, 87279-87280, 87284-87285, 87288-87289, 87291-87292, 87295, 87297-87300, 87304-87305, 87311-87313, 87315, 87318-87322, 87324-87328, 87330, 87332, 87334, 87336-87340, 87345-87346, 87348, 87350-87351, 87353-87354, 87356-87359, 87361-87363, 87365, 87368-87370, 87374-87375, 87377-87378, 87380-87381, 87384-87385, 87387-87392, 87395-87397, 87399, 87401-87403, 87406-87410, 87414, 87418-87420, 87426, 87428-87429, 87431-87435, 87441, 87443-87444, 87447-87453, 87455-87458, 87460, 87462-87465, 87467, 87469-87470, 87473, 87475-87476, 87481-87482, 87485-87491, 87496-87497, 87499, 87501-87504, 87509-87515, 87521, 87523-87526, 87531-87533, 87535, 87537-87541, 87543-87551, 87553, 87555-87561, 87563-87566, 87568, 87571-87572, 87574, 87577, 87581-87584, 87587, 87589, 87595, 87597-87599, 87601-87610, 87612-87619, 87621, 87623-87626, 87628-87632, 87635, 87638-87640, 87642, 87644-87647, 87649-87654, 87657, 87659-87660, 87662-87668, 87670-87674, 87676-87681, 87683-87684, 87686, 87688-87689, 87692, 87694-87701, 87706, 87708-87713, 87716-87721, 87723-87724, 87729-87730, 87732, 87734-87742, 87744-87745, 87747-87755, 87757-87758, 87761-87762, 87765-87769, 87771, 87773, 87776, 87778, 87780-87785, 87787, 87789, 87793, 87795-87800, 87803-87806, 87808-87811, 87815, 87818, 87820-87822, 87825-87829, 87833-87836, 87838, 87841, 87846-87847, 87850-87851, 87854-87855, 87857-87860, 87862, 87865-87872, 87875, 87877, 87879-87881, 87884, 87886-87891, 87893-87895, 87897-87898, 87901-87904, 87906-87908, 87913-87914, 87921, 87924-87925, 87928-87931, 87933-87935, 87937, 87939, 87941, 87943-87951, 87956, 87961-87973, 87976-87979, 87983-87984, 87986-87987, 87989-87990, 87993-87997, 87999, 88003-88005, 88007-88011, 88013-88015, 88017, 88020-88021, 88023, 88025-88027, 88029-88030, 88033-88038, 88040, 88045, 88048, 88050, 88052, 88054-88066, 88068, 88072, 88074-88082, 88085-88088, 88096, 88099-88101, 88103-88118, 88120-88123, 88127-88129, 88131-88134, 88136-88141, 88143-88145, 88151-88157, 88159-88165, 88167, 88171-88173, 88175-88177, 88180, 88182-88184, 88187-88189, 88191, 88193, 88196-88197, 88199, 88201-88203, 88205, 88208-88209, 88211-88212, 88217, 88221, 88224-88227, 88230, 88232, 88234, 88237, 88240-88243, 88245, 88247-88249, 88251, 88255-88259, 88261, 88263, 88265-88266, 88268, 88270, 88276-88278, 88280, 88282-88288, 88293-88294, 88296-88297, 88303-88305, 88307-88308, 88310, 88313-88317, 88319, 88321, 88323-88324, 88326, 88328-88331, 88335-88337, 88339, 88341-88348, 88350-88353, 88355, 88357, 88359, 88362-88364, 88366, 88368-88371, 88373-88377, 88379-88380, 88382-88383, 88385-88386, 88388-88389, 88391-88397, 88400-88402, 88404, 88406, 88408-88410, 88412, 88414, 88416-88423, 88426, 88428-88429, 88432-88434, 88436-88442, 88444, 88447-88452, 88454-88457, 88460, 88464-88465, 88467-88469, 88472-88474, 88476, 88478, 88481-88486, 88488, 88490-88495, 88497-88500, 88503, 88505, 88508-88509, 88520-88522, 88529, 88531-88541, 88544, 88550-88551, 88553-88555, 88557-88561, 88563-88566, 88569, 88572, 88575, 88577-88579, 88581-88582, 88584-88585, 88587-88588, 88592-88593, 88595, 88597-88598, 88603, 88605, 88607, 88610-88611, 88613, 88615-88616, 88618-88620, 88622, 88625-88627, 88629, 88631-88634, 88643, 88647-88652, 88654-88656, 88658-88659, 88661-88662, 88668-88673, 88675, 88677-88684, 88686-88687, 88689, 88695-88696, 88698-88700, 88702-88703, 88706, 88709-88710, 88712-88714, 88717-88718, 88720-88722, 88727, 88729-88733, 88735-88737, 88740-88742, 88744-88746, 88748-88758, 88762, 88765, 88768, 88772-88775, 88777-88781, 88783, 88786, 88788-88790, 88792, 88797-88799, 88801-88806, 88808-88823, 88825-88826, 88828, 88830-88831, 88835-88837, 88839, 88841, 88844-88847, 88849-88851, 88854-88860, 88862-88870, 88872-88873, 88875-88881, 88883-88885, 88887, 88889, 88891-88892, 88894, 88896-88900, 88902, 88904, 88906-88907, 88909-88910, 88912-88922, 88924-88928, 88930-88931, 88934, 88940-88943, 88946-88947, 88949, 88951, 88953-88955, 88958-88959, 88961-88966, 88969, 88971, 88973, 88975-88978, 88980, 88983-88984, 88986, 88988, 88993-88994, 88997-89004, 89006-89008, 89010, 89012-89016, 89019-89020, 89022, 89025, 89027-89029, 89031, 89034-89035, 89037-89039, 89042-89047, 89049-89050, 89053, 89056-89061, 89063, 89065, 89068-89070, 89072, 89076, 89078-89080, 89083, 89085-89088, 89093, 89098, 89103, 89106, 89110-89111, 89113, 89115-89118, 89120, 89123, 89127, 89129-89130, 89133-89134, 89136, 89143-89146, 89149-89150, 89152-89154, 89156, 89158, 89160-89161, 89164, 89167-89170, 89177-89179, 89181, 89183-89185, 89189-89190, 89193, 89195-89197, 89202, 89204-89205, 89207-89208, 89212, 89214-89219, 89221-89226, 89228-89230, 89232-89234, 89236-89238, 89245-89252, 89254-89258, 89260-89264, 89268-89269, 89271-89273, 89275-89276, 89281-89285, 89287, 89289-89290, 89292, 89296, 89299-89301, 89303-89305, 89307, 89310, 89312-89315, 89317-89320, 89322-89326, 89328-89330, 89333-89339, 89342-89346, 89349-89352, 89358, 89362-89366, 89368-89371, 89373, 89376, 89378-89390, 89393, 89395, 89397-89399, 89401, 89403, 89405, 89407-89410, 89412-89413, 89416-89417, 89420-89421, 89424, 89427-89430, 89432, 89435, 89437, 89439, 89441-89445, 89447, 89449-89450, 89454-89456, 89461-89465, 89470, 89472, 89474-89479, 89482, 89484-89485, 89487, 89489-89490, 89492-89495, 89497-89498, 89501-89502, 89504-89507, 89510, 89512-89514, 89518-89521, 89523-89529, 89534, 89536-89538, 89540, 89542, 89544, 89546, 89549-89550, 89552-89553, 89556, 89558-89562, 89564, 89566-89567, 89569, 89571-89573, 89576-89579, 89582-89583, 89585, 89589, 89591-89593, 89595-89598, 89603-89607, 89609-89613, 89615-89618, 89620, 89622-89623, 89625, 89627, 89632-89634, 89637, 89639-89642, 89644, 89646-89647, 89650-89651, 89653-89658, 89660, 89666-89668, 89670-89675, 89678-89679, 89681-89682, 89684-89687, 89691-89694, 89696-89697, 89699-89700, 89702-89704, 89706, 89708-89712, 89717, 89719, 89722-89725, 89727-89728, 89730-89731, 89734-89735, 89737, 89739-89740, 89743, 89747, 89749-89753, 89755-89758, 89762-89763, 89765, 89771, 89773, 89775, 89777, 89781-89782, 89785, 89787-89788, 89790, 89793-89800, 89803, 89807-89814, 89817-89820, 89822-89823, 89827-89828, 89832-89833, 89835, 89838-89845, 89847, 89852-89856, 89859-89860, 89863-89865, 89868, 89871, 89873, 89876, 89878, 89880, 89882, 89885, 89887-89889, 89891, 89894-89897, 89899, 89902-89911, 89913, 89918-89928, 89930, 89933-89935, 89938-89940, 89943, 89945-89947, 89949-89953, 89961-89966, 89969, 89971, 89975, 89977-89982, 89984-89988, 89990, 89993-89995, 89998-90000, 90002-90003, 90005-90007, 90009, 90017-90018, 90021, 90023, 90025-90028, 90030, 90036, 90041, 90043, 90048-90049, 90052, 90054-90055, 90058-90061, 90064-90068, 90070, 90072-90075, 90077, 90079-90082, 90085-90086, 90088-90099, 90101, 90103, 90105-90109, 90111, 90113-90116, 90118, 90124, 90127-90129, 90131, 90133-90136, 90141-90143, 90147, 90149-90154, 90156-90158, 90160-90161, 90166, 90168-90170, 90173, 90175, 90187, 90190, 90192, 90196-90197, 90200, 90202-90203, 90205-90206, 90208-90210, 90213-90215, 90218-90220, 90223-90233, 90236, 90238, 90240, 90242, 90245, 90247, 90249-90251, 90253, 90255-90261, 90265, 90267, 90269, 90271, 90273-90276, 90279-90283, 90286-90290, 90293-90295, 90297-90307, 90309-90321, 90323-90327, 90330-90335, 90337-90343, 90345-90349, 90352-90353, 90360-90363, 90366, 90368-90370, 90374, 90376-90379, 90382-90385, 90387, 90389-90392, 90394-90397, 90399-90402, 90406, 90408, 90410-90412, 90415, 90417-90421, 90424, 90426-90427, 90429-90431, 90433-90437, 90439-90440, 90448, 90450, 90453, 90455-90458, 90461-90464, 90466-90468, 90470-90473, 90477, 90480-90483, 90487-90488, 90490-90493, 90495, 90500-90502, 90504-90505, 90507-90508, 90511, 90513-90518, 90520, 90523-90526, 90528-90529, 90532, 90534-90537, 90540-90542, 90544-90545, 90547-90549, 90551-90556, 90558-90559, 90561-90562, 90566, 90569-90572, 90574-90578, 90580-90588, 90590-90599, 90601-90606, 90608-90618, 90620, 90623-90629, 90632, 90637, 90639-90640, 90644-90647, 90651-90654, 90656-90658, 90661-90662, 90664-90669, 90671, 90675, 90679, 90681, 90684-90688, 90691, 90693-90694, 90696, 90699-90701, 90704, 90706-90707, 90709-90710, 90712-90713, 90715-90716, 90718-90721, 90724, 90727-90728, 90730, 90733-90734, 90736-90737, 90739-90742, 90745-90749, 90751, 90754-90760, 90762-90764, 90768, 90775-90782, 90784, 90786, 90790-90792, 90794-90797, 90802, 90807, 90809, 90812-90813, 90815, 90818, 90823, 90825-90827, 90829, 90831-90832, 90836-90838, 90840, 90845, 90848-90849, 90854, 90859-90863, 90866-90870, 90872-90873, 90875, 90877, 90880-90881, 90883-90885, 90887-90889, 90893, 90900-90905, 90908, 90910-90912, 90915-90916, 90918-90920, 90922, 90928-90929, 90936, 90938, 90940, 90943, 90945-90948, 90950, 90952, 90954-90956, 90959-90961, 90963, 90967, 90970-90971, 90974-90975, 90977-90987, 90989, 90991-90993, 90995-90996, 90998-90999, 91001, 91009-91011, 91014-91017, 91020-91022, 91028-91029, 91032, 91035, 91037, 91039-91040, 91042, 91046-91047, 91049, 91052-91059, 91061-91063, 91065-91069, 91071, 91074-91076, 91078, 91081-91087, 91090-91091, 91094-91095, 91097-91098, 91103-91116, 91118-91119, 91123-91126, 91130-91131, 91133-91134, 91142, 91148-91149, 91151-91154, 91156-91158, 91160, 91162-91164, 91166-91168, 91170, 91172-91173, 91176-91177, 91179, 91181-91185, 91187-91188, 91190-91191, 91194-91197, 91201, 91203-91205, 91208, 91211-91217, 91219, 91225-91226, 91228, 91234-91235, 91239, 91242, 91244-91245, 91249, 91251-91252, 91255, 91262-91263, 91267, 91269-91272, 91275, 91279-91280, 91282-91285, 91290-91292, 91295-91297, 91299-91300, 91308-91315, 91321, 91324-91325, 91327-91334, 91338-91343, 91345-91346, 91348-91350, 91352-91360, 91362-91365, 91367-91380, 91388, 91396, 91398-91403, 91405-91411, 91413-91417, 91419-91421, 91425, 91433-91435, 91437-91443, 91445-91449, 91451-91454, 91456-91459, 91461-91462, 91464, 91466-91467, 91469-91470, 91472-91473, 91475-91476, 91478-91479, 91481-91486, 91488, 91491, 91493-91496, 91499-91506, 91508, 91512, 91514-91516, 91518-91520, 91522-91529, 91531, 91533, 91535, 91537, 91540-91542, 91545-91547, 91549, 91551, 91553, 91555-91556, 91558-91572, 91574, 91579-91582, 91584-91586, 91588-91589, 91592-91593, 91595, 91598-91599, 91601-91602, 91605, 91607-91612, 91614-91618, 91620, 91622-91626, 91629, 91631, 91634, 91636-91638, 91640-91641, 91646-91647, 91655-91656, 91658, 91664-91665, 91667-91669, 91671-91673, 91675, 91677, 91681-91687, 91691-91704, 91706, 91709, 91713, 91715-91716, 91718, 91720-91722, 91725, 91729-91742, 91744, 91747, 91750-91752, 91760, 91762-91769, 91772-91779, 91781, 91787, 91791, 91795-91799, 91801, 91803-91807, 91810-91813, 91816-91824, 91826, 91830, 91832, 91836-91839, 91842-91843, 91845, 91847-91850, 91852-91854, 91859-91860, 91862-91865, 91868, 91870-91872, 91876-91878, 91880, 91882, 91885, 91887-91889, 91891, 91894, 91896-91897, 91899, 91901-91904, 91907, 91911-91912, 91914, 91917-91922, 91929, 91931, 91937-91939, 91943-91944, 91948, 91951, 91954-91957, 91959, 91965-91976, 91978-91979, 91981, 91984, 91988, 91990, 91992, 91995, 91997-92001, 92003-92013, 92016-92018, 92020-92029, 92031-92036, 92038, 92041-92044, 92046-92047, 92049-92051, 92053, 92055-92062, 92064, 92066-92068, 92071, 92075-92078, 92080-92082, 92085, 92087, 92090-92098, 92100-92101, 92103, 92106-92107, 92109-92113, 92119-92120, 92122-92126, 92128, 92134-92136, 92138, 92144-92147, 92152, 92155-92156, 92158-92167, 92169, 92171, 92175, 92177-92179, 92182-92183, 92186, 92188-92189, 92191, 92193-92196, 92198-92200, 92202, 92208-92209, 92211-92214, 92216-92222, 92227-92239, 92242-92246, 92248-92249, 92253-92259, 92263-92266, 92269-92270, 92273, 92275, 92277, 92279-92280, 92283, 92285, 92288, 92290-92296, 92299-92300, 92302-92307, 92311-92313, 92315, 92318, 92320, 92322-92324, 92326-92328, 92333, 92339-92342, 92351, 92354, 92359-92364, 92367, 92369-92372, 92374-92375, 92380-92384, 92386, 92390-92395, 92397-92400, 92402-92403, 92406-92409, 92415, 92419-92420, 92426, 92430, 92432-92435, 92440, 92442-92448, 92450-92451, 92453, 92456-92458, 92461, 92465, 92467-92469, 92473, 92475, 92480, 92482, 92484-92487, 92489-92491, 92495-92497, 92499, 92501-92503, 92508-92509, 92511, 92513, 92516-92517, 92520-92522, 92524, 92527-92530, 92539-92544, 92548-92555, 92557-92558, 92563, 92565-92566, 92568-92571, 92573-92574, 92578, 92580, 92582-92589, 92594-92595, 92597-92600, 92609, 92612-92613, 92616, 92618-92619, 92622-92623, 92629, 92631, 92636-92642, 92646-92648, 92650-92651, 92653-92656, 92659, 92662, 92665-92666, 92670, 92672, 92674, 92677-92679, 92681-92683, 92685, 92687, 92689, 92692-92694, 92696-92699, 92701-92704, 92706-92708, 92710-92712, 92716-92717, 92721, 92725, 92727-92735, 92737-92739, 92742, 92744, 92746, 92748-92755, 92760, 92762-92763, 92765, 92772, 92776-92777, 92780-92786, 92788, 92797-92799, 92801-92805, 92810-92811, 92813, 92815, 92818-92819, 92821, 92823-92831, 92837, 92839, 92843-92845, 92847-92852, 92854-92856, 92859-92864, 92866-92868, 92870-92879, 92882, 92885, 92888, 92890, 92892, 92894-92895, 92897-92898, 92900-92903, 92905, 92908-92915, 92917, 92920-92925, 92928, 92930-92931, 92934-92936, 92938, 92944-92950, 92955, 92959-92961, 92963-92974, 92980-92985, 92987-92989, 92992-92996, 92998-92999, 93001-93002, 93006-93013, 93016-93017, 93019-93026, 93030-93031, 93033, 93035-93036, 93038-93040, 93044-93049, 93051-93052, 93055-93056, 93059-93062, 93066, 93068, 93070, 93072-93077, 93079-93080, 93082-93083, 93085-93088, 93090-93091, 93093-93097, 93099-93100, 93102-93107, 93109-93112, 93114, 93118-93129, 93131-93132, 93134-93135, 93137, 93139-93140, 93142, 93144-93147, 93149-93151, 93153, 93155, 93158, 93160-93163, 93165-93170, 93173, 93175-93177, 93179, 93183, 93185-93188, 93190, 93192-93196, 93198-93201, 93205-93210, 93212-93225, 93227, 93230-93241, 93245, 93247, 93250, 93253, 93256-93258, 93261-93263, 93265-93269, 93271, 93274-93282, 93289-93290, 93292-93296, 93300-93316, 93318-93321, 93323, 93327, 93329, 93331, 93333-93346, 93348, 93350-93358, 93360, 93364-93368, 93372-93376, 93379, 93381-93389, 93391-93392, 93397, 93399, 93401-93402, 93404-93406, 93408, 93410-93412, 93414-93416, 93418-93420, 93425-93426, 93428-93430, 93433-93435, 93437-93440, 93443-93444, 93446-93447, 93449-93451, 93453-93460, 93465, 93468-93473, 93475-93478, 93480-93487, 93491-93492, 93494-93496, 93498-93504, 93507-93508, 93510, 93512, 93515-93516, 93518, 93520, 93524-93528, 93533-93536, 93538, 93540, 93543, 93545-93553, 93555-93557, 93561, 93563-93565, 93568-93570, 93572, 93574-93578, 93581-93586, 93589, 93593, 93595-93601, 93604-93607, 93610-93611, 93613-93615, 93619-93622, 93624, 93627-93633, 93635-93637, 93639-93643, 93645, 93647, 93650-93654, 93656, 93664-93668, 93672, 93675, 93678-93679, 93682-93685, 93687-93690, 93694-93696, 93698-93700, 93707, 93709-93710, 93713-93717, 93719-93720, 93722, 93726-93733, 93735, 93737, 93739-93745, 93747-93749, 93751-93755, 93757, 93760, 93769-93771, 93775, 93777-93783, 93786-93790, 93792-93795, 93798-93800, 93802-93809, 93812, 93814-93815, 93817-93820, 93822, 93827, 93831-93833, 93835-93842, 93844-93846, 93848, 93855, 93862-93864, 93867, 93869, 93872-93873, 93875, 93877-93878, 93881-93883, 93885-93888, 93890, 93893-93894, 93896-93900, 93902-93906, 93909, 93911-93912, 93914-93921, 93924-93925, 93928-93930, 93932-93935, 93939-93946, 93950-93957, 93959-93960, 93968, 93970-93972, 93975-93976, 93979, 93981, 93983-93985, 93987-93990, 93992, 93996, 93999, 94002-94006, 94008, 94010-94012, 94014-94016, 94019-94020, 94022, 94024-94025, 94028-94029, 94032-94033, 94036, 94038-94039, 94041-94045, 94047-94052, 94054, 94056-94057, 94059, 94062-94063, 94067-94069, 94071-94077, 94079-94083, 94085-94092, 94095-94102, 94104, 94106-94110, 94112-94114, 94116, 94118-94119, 94123, 94125, 94129-94132, 94134-94135, 94140-94142, 94144, 94147-94149, 94151, 94153, 94155, 94157-94158, 94160-94161, 94165-94166, 94168-94169, 94171-94172, 94174, 94176-94181, 94184-94186, 94189-94191, 94193, 94195-94201, 94203, 94206-94213, 94216-94218, 94220-94222, 94224-94226, 94228, 94230, 94232-94239, 94241-94244, 94248-94249, 94251-94253, 94256, 94258-94260, 94262-94263, 94266-94267, 94271-94273, 94275-94276, 94279-94281, 94284-94285, 94287, 94289, 94292-94293, 94295-94296, 94299-94305, 94307-94313, 94316, 94320-94326, 94328-94334, 94336-94338, 94341-94349, 94351, 94353-94357, 94359, 94362, 94365-94369, 94371-94375, 94377, 94379, 94381-94382, 94384-94386, 94388-94389, 94391-94395, 94397, 94399-94403, 94407, 94410-94412, 94416-94417, 94419-94424, 94428-94429, 94431, 94433-94435, 94439, 94443-94445, 94448-94453, 94456, 94458-94459, 94461, 94463-94470, 94474, 94476, 94478-94481, 94485, 94487-94488, 94492-94493, 94495, 94498-94501, 94504-94505, 94507-94510, 94512, 94515-94516, 94518, 94521, 94523-94525, 94527, 94530-94533, 94535, 94537-94539, 94541-94544, 94546, 94548-94549, 94551-94552, 94555-94557, 94559-94560, 94562-94566, 94569-94575, 94578, 94581, 94584-94586, 94588-94589, 94591, 94593, 94596, 94598, 94600, 94602-94604, 94606-94607, 94609-94610, 94613-94622, 94624, 94627-94628, 94630, 94633-94634, 94636-94637, 94639-94640, 94642-94648, 94652, 94654-94659, 94661-94662, 94664-94666, 94668-94670, 94673, 94675, 94677, 94679, 94681-94682, 94684, 94686-94687, 94690-94695, 94697, 94701-94702, 94705-94707, 94709-94710, 94712, 94714, 94716-94717, 94719, 94722, 94724, 94729-94730, 94732, 94738-94744, 94746-94748, 94751-94760, 94762-94769, 94771-94773, 94776-94778, 94780-94782, 94785-94792, 94794, 94796-94797, 94799, 94801, 94814, 94816-94817, 94819-94824, 94827-94832, 94836-94837, 94839, 94843-94851, 94853, 94856-94857, 94859, 94861-94862, 94865, 94867-94869, 94872-94873, 94875, 94877-94879, 94881-94883, 94885, 94887-94889, 94891-94892, 94895, 94897-94898, 94900, 94904, 94908-94909, 94911-94912, 94916-94920, 94922-94924, 94926, 94928, 94938-94939, 94941-94945, 94948, 94952-94958, 94961-94963, 94965-94971, 94974, 94976-94977, 94979, 94982-94984, 94986-94991, 94996-94997, 94999-95002, 95004-95020, 95022, 95024-95025, 95027, 95029-95030, 95033, 95036-95038, 95040-95041, 95043, 95045-95056, 95061, 95063-95064, 95066-95069, 95071, 95073-95080, 95082, 95084, 95087, 95089-95091, 95093, 95095-95096, 95098-95101, 95104, 95106, 95109-95110, 95113, 95115, 95118, 95122-95123, 95125, 95127-95130, 95132-95136, 95138-95143, 95145-95150, 95154-95159, 95164, 95166, 95169, 95173, 95175-95177, 95182-95183, 95185, 95187-95189, 95191, 95193-95197, 95199-95201, 95203-95207, 95210, 95216-95217, 95219-95220, 95223-95231, 95233-95234, 95236, 95238-95240, 95242-95246, 95248, 95252, 95254, 95259-95260, 95264-95267, 95269, 95272-95278, 95280-95281, 95285-95292, 95302, 95309-95313, 95316, 95319-95322, 95325, 95327-95332, 95334-95337, 95339-95343, 95345-95348, 95351, 95353, 95355-95358, 95360-95363, 95365-95367, 95370-95373, 95375, 95378, 95380, 95382-95383, 95385, 95387-95399, 95401-95403, 95406-95412, 95414-95417, 95419-95420, 95423, 95425, 95427-95431, 95433, 95435-95436, 95439-95440, 95443-95444, 95448-95449, 95451-95453, 95456-95459, 95462, 95464, 95467-95474, 95477, 95480-95484, 95486, 95488, 95493-95495, 95497-95501, 95505-95506, 95508-95510, 95512, 95514-95517, 95519-95520, 95523-95524, 95528, 95530-95531, 95533, 95535-95539, 95541-95546, 95550-95553, 95555-95560, 95565, 95570-95576, 95582, 95584-95589, 95591-95594, 95596, 95598-95604, 95606-95612, 95614-95616, 95618-95619, 95621-95624, 95627-95628, 95630-95637, 95639-95640, 95642, 95649, 95653-95656, 95658-95660, 95662-95664, 95667-95669, 95673-95674, 95676-95677, 95679-95690, 95692-95693, 95695-95697, 95701, 95703-95708, 95710-95711, 95713, 95716-95718, 95720-95724, 95728, 95730-95738, 95740-95744, 95747-95750, 95753, 95755-95756, 95763, 95765-95766, 95768-95770, 95772-95773, 95777, 95780-95785, 95787-95790, 95793, 95795, 95798-95801, 95804, 95806-95808, 95811-95815, 95819, 95821, 95823-95824, 95826, 95828-95830, 95832-95836, 95838-95839, 95841-95842, 95844, 95846-95848, 95850-95851, 95853-95856, 95859-95864, 95866-95868, 95871-95874, 95876-95878, 95885, 95887-95890, 95894, 95896-95897, 95899-95906, 95908-95910, 95912-95916, 95918-95920, 95922-95926, 95928, 95931-95935, 95942-95946, 95948-95949, 95951, 95956-95964, 95966, 95968, 95971-95974, 95976-95988, 95995-96002, 96008, 96010, 96012, 96014-96017, 96019-96021, 96026-96032, 96034-96039, 96041-96043, 96046-96047, 96057-96060, 96062-96063, 96065, 96067-96070, 96072-96074, 96079-96080, 96084-96085, 96088-96089, 96091-96093, 96099, 96101-96102, 96104, 96106-96108, 96110-96115, 96117-96119, 96121-96128, 96130-96135, 96142-96146, 96149-96151, 96153-96154, 96156, 96161, 96163-96164, 96166-96174, 96176-96177, 96183-96184, 96187, 96192, 96197-96200, 96206, 96210, 96214-96215, 96217-96218, 96221-96225, 96227-96228, 96230-96231, 96233-96234, 96236-96237, 96240-96244, 96248-96252, 96256-96263, 96266-96270, 96274, 96276, 96279, 96281-96282, 96284-96285, 96287-96296, 96299-96301, 96303, 96305-96307, 96310, 96312-96313, 96316, 96318-96320, 96322-96324, 96327, 96329-96330, 96332-96336, 96338-96339, 96342-96344, 96346-96348, 96351-96352, 96355-96359, 96361, 96367, 96369-96370, 96372-96374, 96376-96378, 96380-96383, 96385-96388, 96390-96392, 96394-96396, 96398-96407, 96409, 96411-96415, 96418-96422, 96424, 96429, 96433-96436, 96438-96439, 96441-96443, 96445-96446, 96449-96452, 96454, 96456, 96458, 96460, 96464-96466, 96468-96469, 96471, 96473, 96483, 96485-96486, 96488-96491, 96494-96499, 96502-96505, 96508-96511, 96513-96515, 96517, 96519-96521, 96524-96530, 96532, 96536-96548, 96552-96555, 96557-96559, 96561-96562, 96564, 96567, 96570-96571, 96574-96580, 96587-96589, 96591-96592, 96594, 96596, 96599-96602, 96604-96605, 96607, 96610-96614, 96616-96617, 96619-96624, 96631-96633, 96635, 96637-96638, 96640, 96642-96647, 96650-96652, 96656, 96658, 96662-96678, 96680-96682, 96685-96688, 96690, 96693, 96698-96699, 96703-96704, 96706-96707, 96709-96712, 96714-96716, 96720, 96722-96725, 96729, 96731, 96733-96734, 96738, 96740-96741, 96743, 96745, 96747, 96751-96754, 96757-96758, 96760, 96762-96764, 96768-96772, 96776-96781, 96784, 96787-96790, 96792, 96796, 96799-96804, 96806-96811, 96813-96814, 96816-96822, 96824, 96826-96829, 96833-96835, 96838, 96842, 96845, 96847-96849, 96851-96860, 96862-96863, 96865, 96867-96873, 96875, 96879-96884, 96886-96895, 96898-96899, 96901-96903, 96906-96907, 96909-96910, 96912, 96915, 96917, 96919, 96921-96923, 96925, 96927-96931, 96933-96946, 96948-96949, 96953, 96956-96959, 96961-96962, 96964, 96966, 96968, 96974, 96976-96977, 96979, 96981, 96983-96988, 96992-96996, 96998-97002, 97004-97011, 97013-97015, 97019-97022, 97024-97029, 97032-97033, 97036-97038, 97040, 97043, 97045-97046, 97053-97056, 97058, 97060, 97062, 97064, 97067-97068, 97070-97073, 97076-97077, 97079-97080, 97086-97087, 97091-97105, 97107-97109, 97112-97113, 97115, 97117-97118, 97121-97124, 97126-97128, 97130-97133, 97135-97136, 97139, 97141, 97143, 97146, 97148, 97151, 97154-97158, 97160-97161, 97169-97171, 97173-97174, 97176-97184, 97188, 97190-97192, 97198-97199, 97202-97209, 97211, 97213-97215, 97218, 97222-97227, 97230-97235, 97237, 97239-97240, 97242-97244, 97246-97249, 97251, 97255-97259, 97261-97263, 97269-97283, 97288-97291, 97293-97296, 97302, 97304-97307, 97309-97312, 97314-97316, 97318, 97323, 97326-97332, 97334-97335, 97339, 97344-97351, 97354-97355, 97357-97358, 97361-97362, 97371, 97373-97377, 97380-97386, 97389, 97392-97393, 97395, 97397-97402, 97406-97409, 97411, 97413-97415, 97417, 97420, 97423-97424, 97428-97430, 97432-97436, 97438-97441, 97443, 97445, 97447-97448, 97450, 97452-97453, 97458, 97460-97461, 97465-97468, 97470-97471, 97473-97476, 97479, 97481, 97484-97490, 97494-97496, 97498, 97504-97506, 97508, 97512, 97515-97522, 97527-97528, 97532, 97535-97538, 97541, 97544, 97547, 97551-97553, 97556-97557, 97559-97560, 97562, 97565-97568, 97570, 97576, 97578, 97580-97582, 97588-97589, 97591-97593, 97595-97598, 97600-97602, 97605, 97607-97614, 97616-97627, 97631-97634, 97637, 97639-97642, 97651, 97654-97656, 97660-97661, 97664-97667, 97669, 97673-97675, 97677-97681, 97683, 97685, 97688, 97690, 97692-97694, 97696, 97699, 97701-97707, 97709, 97716-97720, 97723, 97725-97726, 97728, 97730, 97733-97735, 97737-97746, 97748, 97750, 97753, 97756-97759, 97761-97768, 97772-97778, 97782-97785, 97789-97790, 97792-97793, 97798, 97800, 97802-97807, 97809-97810, 97812, 97815-97816, 97818, 97824-97825, 97827, 97829-97830, 97833-97834, 97836-97838, 97840-97841, 97843-97848, 97850-97851, 97853, 97856, 97859, 97864, 97866, 97871-97872, 97874-97877, 97881-97882, 97884, 97887, 97890, 97894-97897, 97899-97904, 97906, 97908, 97910-97911, 97913, 97915-97917, 97921-97926, 97928-97932, 97934-97936, 97938, 97940, 97942, 97949-97953, 97955-97957, 97960, 97963-97964, 97966-97971, 97973, 97975-97984, 97986, 97989-97995, 97999, 98002-98003, 98005-98009, 98012, 98014, 98016, 98018, 98021-98026, 98028-98031, 98035-98038, 98040-98042, 98044-98047, 98049, 98054-98057, 98059-98061, 98063, 98065, 98067, 98069-98070, 98072, 98074-98077, 98079, 98086-98087, 98089, 98091-98092, 98094, 98097-98100, 98102-98103, 98105-98108, 98112, 98114-98116, 98119-98120, 98126-98130, 98132, 98134, 98137-98138, 98140, 98142-98146, 98149, 98151-98155, 98163-98166, 98168-98172, 98175, 98179, 98181, 98184-98190, 98192-98193, 98195, 98198, 98205, 98209, 98211-98214, 98216-98218, 98220-98225, 98227-98228, 98230-98232, 98235-98244, 98250-98258, 98260, 98262, 98264, 98266-98270, 98272, 98277-98278, 98280, 98282-98283, 98286-98287, 98289-98291, 98293, 98295-98298, 98303-98305, 98308-98309, 98312-98317, 98319, 98326-98327, 98329-98331, 98333, 98336-98345, 98349, 98352, 98356-98357, 98359-98360, 98362-98363, 98366, 98368, 98370-98371, 98373, 98375-98376, 98386-98388, 98390-98392, 98394-98395, 98397, 98403, 98408, 98411-98414, 98421, 98423, 98425-98426, 98428, 98430-98431, 98433-98436, 98438-98440, 98442-98443, 98445-98447, 98449, 98451, 98455-98458, 98460-98461, 98463, 98465-98467, 98472, 98474-98476, 98478-98480, 98482-98485, 98488-98489, 98491, 98493, 98495, 98497-98498, 98500, 98502-98504, 98506-98507, 98509, 98512-98514, 98516-98517, 98519, 98521, 98523-98528, 98530-98531, 98533, 98535-98537, 98539, 98544, 98547-98549, 98551-98553, 98557-98558, 98560-98572, 98574-98576, 98580-98584, 98586, 98588-98591, 98595-98600, 98602-98603, 98607-98614, 98616-98617, 98619-98622, 98626-98628, 98630-98633, 98637-98640, 98642, 98648-98653, 98655-98662, 98672-98673, 98675-98676, 98678, 98680-98683, 98688-98692, 98695, 98697-98698, 98700-98702, 98704-98707, 98709, 98713-98714, 98717-98719, 98722, 98725-98726, 98729-98732, 98734-98737, 98739, 98741-98746, 98748-98749, 98752-98755, 98757-98758, 98766-98767, 98770, 98772, 98775, 98777-98784, 98786, 98796-98798, 98800, 98803, 98806-98810, 98812-98817, 98819-98820, 98822-98825, 98827, 98829, 98831-98832, 98835, 98838-98839, 98844, 98846, 98850-98855, 98858-98861, 98864-98865, 98867, 98869, 98872, 98874-98877, 98882, 98884, 98886-98888, 98890, 98896, 98898, 98905, 98907, 98909-98910, 98912-98918, 98921-98927, 98930-98932, 98934, 98936, 98941-98942, 98945-98947, 98951, 98954-98956, 98958-98959, 98962-98969, 98971, 98973-98975, 98978-98983, 98989, 98992-98993, 98995-98997, 98999, 99001-99006, 99009-99011, 99015-99019, 99021, 99029-99030, 99032-99039, 99041-99047, 99049-99058, 99060-99064, 99066-99067, 99069-99080, 99082-99089, 99091, 99094-99095, 99097-99099, 99102-99107, 99110-99112, 99114-99120, 99122-99127, 99129, 99131-99141, 99145-99147, 99149-99150, 99152-99158, 99160-99166, 99170, 99172-99173, 99176-99178, 99181-99182, 99184-99185, 99187, 99189-99193, 99195-99196, 99198-99202, 99204-99205, 99207-99208, 99211-99215, 99217-99224, 99229-99230, 99232-99234, 99238-99255, 99257, 99259-99261, 99265, 99267-99273, 99277, 99279, 99281-99288, 99290-99292, 99294-99295, 99297-99299, 99301, 99303-99308, 99310, 99314-99321, 99323-99324, 99327-99328, 99330-99331, 99333-99338, 99340-99341, 99343, 99345-99349, 99351-99352, 99357-99359, 99362, 99369, 99371-99373, 99375-99377, 99381-99383, 99385-99390, 99394-99399, 99401-99402, 99405, 99410, 99412-99414, 99418-99419, 99426-99434, 99438-99441, 99443-99444, 99446, 99449, 99451-99452, 99456-99458, 99460-99464, 99466, 99470, 99474-99478, 99480-99482, 99484-99487, 99490-99493, 99495-99500, 99503-99507, 99509-99516, 99519-99526, 99529-99530, 99534-99537, 99539-99551, 99554, 99556-99567, 99569-99571, 99574-99578, 99582-99585, 99594-99601, 99603, 99605-99607, 99609-99610, 99612-99620, 99624-99625, 99627-99628, 99630, 99633, 99635-99638, 99643-99644, 99646-99648, 99652, 99654, 99657-99665, 99667-99668, 99670-99671, 99673-99680, 99684, 99686-99687, 99689, 99692, 99694-99695, 99697, 99700-99702, 99704, 99706-99711, 99713-99718, 99723, 99725-99729, 99731-99732, 99734-99742, 99744-99747, 99749-99750, 99757, 99759-99760, 99763-99772, 99774-99775, 99777, 99780, 99782-99785, 99788-99795, 99799, 99801-99802, 99804-99805, 99809, 99811-99816, 99820-99822, 99824-99828, 99830-99833, 99835-99849, 99852, 99854, 99857, 99859-99860, 99863-99864, 99866-99867, 99870-99874, 99876-99878, 99880-99881, 99883, 99887-99896, 99898, 99902, 99904-99913, 99915, 99920-99924, 99927-99931, 99933, 99936-99937, 99940-99941, 99945-99947, 99949-99953, 99955, 99957, 99959, 99961-99965, 99970-99974, 99976-99977, 99980-99990, 99992-99996, 99998-100006, 100012-100015, 100018, 100020, 100022-100023, 100025-100031, 100033, 100036-100037, 100040-100045, 100048-100057, 100059-100060, 100064-100065, 100069-100071, 100073-100074, 100076-100077, 100082, 100085-100087, 100094, 100096-100098, 100100-100106, 100109, 100111, 100113-100114, 100116, 100120-100121, 100124, 100126-100127, 100131-100133, 100139-100140, 100142-100147, 100149-100150, 100152-100153, 100158-100164, 100167, 100170-100172, 100174-100177, 100179-100188, 100191-100192, 100194-100206, 100208-100213, 100215-100216, 100218-100219, 100221, 100223, 100225-100226, 100228-100229, 100231-100232, 100238, 100240, 100242-100243, 100246-100252, 100254-100259, 100261, 100263-100266, 100269, 100271, 100276, 100280-100282, 100284, 100288, 100290-100292, 100294-100299, 100301-100305, 100307-100314, 100316-100317, 100319, 100321-100322, 100324, 100326-100331, 100335-100337, 100340, 100345-100349, 100351-100357, 100360-100362, 100367-100371, 100373-100374, 100376, 100378, 100383, 100386-100394, 100398-100404, 100406, 100410-100412, 100414-100415, 100418-100419, 100422-100423, 100426, 100428-100431, 100433, 100435, 100438-100439, 100441, 100444, 100446-100451, 100453-100455, 100457-100467, 100471-100474, 100476, 100478-100480, 100483-100486, 100488-100489, 100491-100492, 100495, 100497-100503, 100505, 100507, 100509-100513, 100519, 100521-100523, 100526, 100529, 100536, 100538-100539, 100541-100543, 100551-100554, 100557, 100559-100560, 100562-100567, 100569-100570, 100572, 100574-100575, 100577-100580, 100583-100585, 100587-100588, 100591-100592, 100595-100596, 100598, 100600, 100605-100611, 100617-100618, 100621-100627, 100630-100633, 100636, 100638, 100640-100642, 100644, 100647, 100651-100663, 100665, 100667, 100671, 100673-100675, 100677-100680, 100682, 100684-100688, 100691, 100696, 100700, 100702-100703, 100706, 100711-100716, 100720-100721, 100724-100725, 100727, 100729-100732, 100734, 100741, 100743-100745, 100747-100749, 100751-100753, 100755, 100757-100760, 100762-100767, 100770-100771, 100776, 100778-100782, 100785-100786, 100788, 100791-100801, 100803-100809, 100814, 100816, 100819-100823, 100825, 100830-100831, 100835-100841, 100843, 100845-100848, 100852, 100854, 100860, 100862, 100864, 100866-100875, 100879, 100881-100886, 100888-100889, 100891, 100897-100898, 100901-100902, 100904-100905, 100908-100913, 100915-100917, 100920-100922, 100926, 100928, 100934, 100937, 100939, 100941-100944, 100946-100947, 100953, 100955, 100959, 100961, 100963-100964, 100967-100969, 100971-100975, 100978, 100980-100991, 100993-100995, 100997, 101003, 101005, 101007, 101009-101018, 101021-101022, 101027, 101030, 101032, 101034-101043, 101045-101046, 101051, 101053-101056, 101058, 101061-101065, 101069-101072, 101074-101076, 101078-101086, 101088, 101090, 101092, 101095, 101097, 101102, 101106-101110, 101118-101120, 101125-101129, 101132, 101135-101136, 101140, 101142, 101149-101151, 101153, 101157-101158, 101162, 101165-101167, 101169-101172, 101174, 101176-101177, 101180-101181, 101183, 101188, 101190-101193, 101198-101199, 101202, 101204-101205, 101207, 101212, 101215-101216, 101218, 101220-101221, 101223-101232, 101234, 101242, 101244-101245, 101247-101250, 101257-101261, 101264-101266, 101268, 101270, 101272-101275, 101280-101282, 101285-101286, 101288-101289, 101292-101293, 101295-101296, 101300-101303, 101306-101308, 101312-101314, 101316-101317, 101320, 101323-101334, 101336-101338, 101340-101348, 101352-101354, 101356, 101358-101363, 101366-101368, 101372-101373, 101376, 101378-101379, 101382, 101384-101386, 101388-101389, 101391-101393, 101395, 101397-101400, 101402, 101406-101407, 101410-101412, 101416, 101419, 101422-101425, 101428-101434, 101436-101437, 101439, 101441-101445, 101447, 101449, 101451-101458, 101468, 101470-101473, 101476-101477, 101482-101485, 101487-101489, 101491-101494, 101498-101506, 101508-101510, 101512-101513, 101515, 101517-101519, 101521, 101523-101525, 101527, 101529-101533, 101535, 101537, 101540, 101542-101545, 101547-101554, 101560-101562, 101567-101574, 101577-101584, 101586-101587, 101589, 101591-101594, 101597-101603, 101605, 101610-101615, 101617-101618, 101620-101622, 101624, 101626-101627, 101631, 101633-101640, 101642-101646, 101649, 101654-101655, 101657-101668, 101670-101671, 101673, 101675-101677, 101679, 101684, 101687-101690, 101692, 101694-101695, 101699, 101701-101702, 101706-101710, 101712, 101715, 101717-101719, 101721, 101725-101726, 101728-101729, 101732-101741, 101743-101744, 101747, 101750-101751, 101753-101754, 101760, 101762-101769, 101771-101775, 101777-101782, 101785, 101790-101794, 101796-101798, 101804, 101806-101808, 101811-101812, 101814-101818, 101822, 101824, 101826-101830, 101833-101835, 101843, 101845, 101847, 101850-101852, 101855-101859, 101861-101862, 101864-101865, 101867, 101869-101870, 101872-101881, 101883, 101885-101890, 101892-101894, 101896-101897, 101904, 101909, 101911, 101913, 101915, 101917, 101921-101922, 101926-101931, 101933, 101935-101940, 101942-101949, 101951-101952, 101956-101957, 101961-101964, 101966-101969, 101971-101972, 101975, 101981-101985, 101987, 101989, 101991-102003, 102005-102006, 102008-102014, 102016-102017, 102019-102024, 102026-102031, 102034, 102036, 102038, 102040-102048, 102050-102053, 102055-102058, 102061-102062, 102067, 102069, 102071, 102074-102076, 102078, 102080-102082, 102084-102085, 102087-102090, 102092, 102094-102107, 102109-102111, 102113-102114, 102117, 102119-102120, 102123-102124, 102127, 102129-102130, 102132, 102134-102138, 102140, 102143-102145, 102148-102149, 102151, 102154-102160, 102163-102164, 102166-102175, 102177-102181, 102183, 102185, 102188-102190, 102192-102194, 102196-102197, 102200, 102202-102215, 102219, 102221-102227, 102230, 102233-102238, 102241-102242, 102244-102247, 102250-102253, 102257, 102259-102261, 102263, 102266-102268, 102271-102274, 102276, 102278, 102280-102281, 102283-102288, 102290-102292, 102294-102296, 102299, 102301-102304, 102306, 102309, 102311, 102315-102317, 102321-102326, 102328-102331, 102333, 102336, 102338, 102343-102346, 102348, 102351-102353, 102355-102360, 102362-102363, 102366-102368, 102375, 102377-102380, 102384-102385, 102389-102391, 102393, 102395-102396, 102398-102400, 102402-102412, 102414-102415, 102417-102420, 102422, 102428-102430, 102432, 102435-102439, 102441-102444, 102447-102448, 102450, 102452, 102454-102458, 102460, 102463-102465, 102467-102468, 102471-102483, 102486, 102490, 102492-102496, 102501-102506, 102508-102509, 102513-102514, 102516-102520, 102523-102533, 102536-102537, 102539, 102542, 102544-102558, 102563, 102565-102586, 102588-102591, 102593-102594, 102596, 102601-102604, 102606, 102609-102612, 102614-102615, 102619-102620, 102623, 102629-102630, 102632-102634, 102636, 102639-102640, 102642-102645, 102648-102649, 102653-102655, 102662, 102664-102672, 102674, 102679-102687, 102689, 102691-102692, 102695-102696, 102698, 102700-102705, 102709, 102713-102719, 102723, 102725, 102727-102730, 102732, 102735-102736, 102739, 102741, 102743-102744, 102751, 102753-102754, 102759, 102761-102765, 102769-102771, 102773, 102776-102781, 102783-102785, 102788-102789, 102791, 102794, 102796-102802, 102805-102809, 102812, 102815, 102818-102820, 102822, 102826, 102828, 102832-102833, 102835-102838, 102841-102842, 102844-102845, 102848-102855, 102857, 102860-102862, 102864-102874, 102878, 102883, 102885-102887, 102889-102892, 102894-102898, 102900-102906, 102911-102912, 102915-102926, 102928-102930, 102932-102933, 102935-102936, 102942-102944, 102948-102955, 102958-102959, 102961-102974, 102976, 102979-102983, 102986, 102988-102996, 102999, 103002-103005, 103007, 103011-103012, 103016, 103018-103019, 103022, 103027-103031, 103037-103041, 103043-103046, 103048, 103053-103057, 103060, 103062-103064, 103067-103071, 103073, 103075-103076, 103079-103084, 103088-103090, 103093-103095, 103097, 103102, 103105-103108, 103110-103113, 103118-103121, 103123-103125, 103127-103134, 103136, 103138-103139, 103144, 103146-103149, 103152, 103154, 103156-103158, 103160-103163, 103165, 103169-103173, 103175, 103177-103181, 103183-103184, 103186-103191, 103194-103197, 103199-103201, 103203-103208, 103210-103212, 103214-103216, 103218-103220, 103223-103227, 103231-103232, 103234-103239, 103242-103243, 103245-103248, 103250-103255, 103258, 103260-103263, 103266, 103270, 103272, 103274-103277, 103281-103282, 103284-103285, 103288-103290, 103294-103297, 103299-103300, 103303-103313, 103325, 103327-103328, 103330, 103332, 103334, 103336-103339, 103341-103345, 103347-103351, 103353-103355, 103357-103359, 103362-103363, 103365-103367, 103370-103372, 103376-103379, 103381-103383, 103385-103386, 103388-103390, 103393, 103395, 103397-103401, 103403, 103405-103410, 103414-103415, 103419-103420, 103422-103423, 103425, 103428, 103430-103433, 103435-103436, 103438-103440, 103442, 103444-103446, 103448-103450, 103452-103453, 103455, 103458-103472, 103474, 103476, 103479-103483, 103485, 103488, 103491, 103493-103494, 103496-103497, 103499-103513, 103515-103517, 103519, 103522, 103525-103526, 103528-103530, 103532-103536, 103540-103543, 103548, 103552-103555, 103557, 103559, 103561-103563, 103566-103567, 103569-103570, 103574-103575, 103577, 103579-103589, 103591, 103593, 103595-103596, 103598, 103600-103603, 103605, 103607, 103609, 103613, 103615, 103617-103621, 103623-103624, 103627-103629, 103631, 103634, 103636-103644, 103646, 103648, 103651-103652, 103654, 103656, 103658-103659, 103662-103665, 103667-103677, 103679-103681, 103684-103686, 103688-103693, 103695-103696, 103699-103700, 103704-103705, 103708, 103713-103720, 103722-103725, 103729-103733, 103737, 103740-103744, 103746-103747, 103749-103750, 103753-103759, 103761, 103763-103770, 103774-103778, 103782-103786, 103788, 103791, 103793-103795, 103798-103800, 103802, 103804, 103808-103813, 103816-103820, 103824-103827, 103831-103835, 103837-103839, 103841-103845, 103850-103853, 103856-103862, 103864-103878, 103880, 103883-103887, 103889-103893, 103896-103897, 103899, 103903, 103906-103911, 103913-103915, 103919-103920, 103922, 103924-103926, 103929-103930, 103933-103937, 103940, 103942, 103944-103945, 103947-103951, 103955, 103957-103959, 103962-103969, 103973, 103975-103976, 103978, 103982-103984, 103986-103987, 103989-103999, 104002-104005, 104009-104012, 104014-104017, 104019, 104022-104025, 104027, 104029, 104031, 104033, 104036-104037, 104039-104042, 104044-104054, 104056-104057, 104063, 104066-104067, 104072, 104076, 104080, 104082, 104084, 104086-104098, 104100, 104102, 104104, 104106-104107, 104109-104111, 104113-104116, 104118-104129, 104131-104132, 104134-104137, 104140-104141, 104146, 104148, 104153, 104155-104157, 104159-104160, 104166, 104169-104179, 104182, 104184-104189, 104192-104197, 104199-104206, 104208-104210, 104213-104219, 104221-104229, 104232, 104235, 104237-104238, 104241-104245, 104247-104248, 104250-104251, 104253, 104255-104257, 104259-104264, 104266-104267, 104269, 104271-104273, 104277-104279, 104283-104285, 104287-104290, 104297-104298, 104300-104301, 104303-104305, 104308-104309, 104313, 104316-104317, 104319-104321, 104324-104326, 104328-104345, 104347, 104352-104353, 104356-104368, 104370-104377, 104381-104384, 104386, 104388-104390, 104392-104393, 104395-104396, 104398-104399, 104401-104403, 104406, 104408-104411, 104413, 104415-104418, 104423, 104427, 104429, 104431, 104433-104437, 104439-104456, 104460, 104463-104464, 104466-104468, 104470, 104472, 104475, 104477-104482, 104484-104485, 104488, 104490-104492, 104494-104495, 104498-104502, 104504-104513, 104515-104516, 104518-104520, 104522-104529, 104531, 104533-104535, 104537-104541, 104543, 104549-104553, 104555-104556, 104560-104562, 104564-104565, 104568-104574, 104576-104581, 104584-104587, 104589-104590, 104592, 104597-104598, 104600-104602, 104605, 104607-104608, 104610-104612, 104614-104620, 104624-104629, 104632-104633, 104635-104637, 104639-104640, 104642-104646, 104648-104651, 104654, 104656-104659, 104661, 104663-104664, 104668-104671, 104673-104674, 104676-104679, 104681-104682, 104684, 104688-104689, 104691, 104693, 104695-104700, 104702-104717, 104719, 104722, 104724, 104726, 104728-104729, 104732-104734, 104736-104738, 104740, 104742, 104744-104745, 104747, 104751-104760, 104763-104767, 104770-104772, 104776-104783, 104788, 104790-104794, 104797-104800, 104804, 104807-104808, 104810, 104812-104814, 104816, 104819, 104822-104823, 104825-104827, 104830-104835, 104837-104844, 104846, 104848-104849, 104853, 104855-104856, 104858, 104864-104867, 104869-104873, 104875, 104877-104880, 104882, 104884, 104886-104891, 104893, 104896, 104899-104903, 104905-104907, 104909, 104911-104913, 104915, 104917-104918, 104920-104926, 104928, 104930, 104932, 104936-104951, 104953, 104958-104960, 104962-104967, 104969-104970, 104973-104975, 104977, 104979-104982, 104985-104986, 104988-104995, 104997-105003, 105006-105007, 105009, 105011, 105013, 105015, 105020, 105022-105023, 105025, 105028-105029, 105032-105034, 105038, 105041-105043, 105045, 105047-105048, 105050-105051, 105053-105060, 105062-105067, 105069-105073, 105075, 105077, 105080, 105083-105085, 105087, 105091-105092, 105095-105096, 105101-105107, 105109, 105111, 105113, 105115-105118, 105121-105127, 105129-105131, 105133-105137, 105143, 105145, 105147-105148, 105151, 105153-105156, 105158, 105162-105166, 105170-105171, 105173-105174, 105176, 105178-105181, 105184-105187, 105191, 105193-105196, 105198-105199, 105201-105202, 105204, 105206-105214, 105217, 105219-105220, 105223, 105225-105226, 105228-105232, 105234-105237, 105243-105245, 105248, 105250, 105256-105262, 105266-105268, 105270, 105272-105273, 105275-105279, 105281, 105292-105293, 105296-105297, 105300-105302, 105304-105305, 105307, 105309, 105311-105320, 105322-105323, 105325-105326, 105329-105330, 105332-105336, 105338-105340, 105342-105350, 105353-105376, 105381, 105384-105386, 105389-105392, 105394, 105396, 105400, 105402-105404, 105406, 105409-105414, 105417-105418, 105420-105421, 105423-105425, 105428, 105430-105431, 105435, 105437, 105439-105443, 105445, 105448-105458, 105460-105466, 105468-105469, 105471-105473, 105476-105477, 105481-105483, 105485-105488, 105491-105492, 105494-105495, 105498, 105500, 105502-105503, 105506-105508, 105510-105513, 105519, 105522-105523, 105525-105531, 105533, 105536-105538, 105540-105542, 105544, 105546-105551, 105553-105556, 105561-105564, 105566-105578, 105580, 105584-105596, 105598-105599, 105603, 105605-105614, 105621, 105623-105627, 105630, 105638-105646, 105648-105651, 105653, 105656-105672, 105674-105676, 105681-105684, 105686-105690, 105692-105696, 105698-105703, 105705, 105708-105709, 105711-105721, 105723-105725, 105727-105729, 105731-105740, 105748, 105751-105752, 105754-105755, 105759-105761, 105763, 105767, 105770, 105772-105773, 105775, 105777-105779, 105781-105783, 105785-105787, 105789, 105791-105795, 105798-105800, 105803, 105805-105806, 105808, 105810, 105812-105813, 105815-105816, 105818-105821, 105824, 105827, 105829-105830, 105832, 105834-105838, 105840-105844, 105846-105847, 105849, 105851-105852, 105854-105857, 105859-105862, 105867, 105869-105871, 105874-105881, 105884-105887, 105889-105891, 105895-105896, 105899-105904, 105907, 105909, 105911, 105914, 105918, 105920, 105923-105924, 105929-105934, 105937, 105939, 105941, 105943-105944, 105947-105953, 105956-105957, 105961-105971, 105975-105979, 105983, 105985, 105988-105990, 105992, 105995-105997, 105999-106000, 106002, 106007-106021, 106024-106031, 106036, 106039-106040, 106042-106043, 106047-106048, 106052-106056, 106058, 106061-106063, 106065, 106067, 106069-106072, 106075, 106078, 106081-106086, 106089-106093, 106095-106098, 106100-106102, 106105, 106107-106114, 106116, 106118-106126, 106128-106132, 106134-106137, 106139, 106142-106148, 106150-106152, 106156, 106158-106162, 106164-106174, 106176-106182, 106184, 106186, 106188, 106191-106192, 106194-106201, 106203-106204, 106206, 106210, 106212, 106214-106217, 106221-106223, 106231, 106233-106235, 106237-106242, 106245-106249, 106251-106252, 106255-106257, 106267, 106270-106275, 106277, 106279-106290, 106292-106295, 106298-106307, 106309, 106311, 106313-106318, 106320, 106322-106329, 106332-106335, 106337, 106339-106341, 106343-106344, 106347-106354, 106356-106357, 106360-106362, 106364, 106366-106370, 106372-106390, 106392-106394, 106396-106397, 106399, 106406-106412, 106415-106417, 106419, 106421-106424, 106426-106427, 106431-106435, 106437-106442, 106444-106445, 106447-106450, 106452, 106454-106455, 106461-106462, 106464, 106467-106468, 106471-106476, 106478-106482, 106484-106495, 106502-106503, 106506, 106509, 106512-106517, 106521, 106525-106529, 106531-106534, 106536-106539, 106543, 106545-106548, 106553, 106555, 106557-106558, 106560, 106562-106567, 106569, 106572-106580, 106582, 106585-106586, 106590-106592, 106594-106600, 106602-106603, 106606, 106609, 106611, 106615-106621, 106623-106625, 106627-106628, 106630, 106632-106634, 106639-106641, 106643-106645, 106648, 106653-106657, 106659-106664, 106667-106670, 106673-106677, 106680-106681, 106684-106685, 106687-106692, 106695-106698, 106701, 106703-106705, 106708-106710, 106715, 106717-106722, 106724-106727, 106729-106731, 106733-106740, 106742-106743, 106745-106746, 106748-106754, 106756, 106759-106765, 106767-106786, 106788-106791, 106796-106797, 106799-106802, 106805-106806, 106809, 106811-106812, 106815, 106819-106827, 106832, 106834-106836, 106838-106839, 106841, 106844-106845, 106847-106848, 106850, 106852-106854, 106857-106861, 106863-106866, 106868, 106870-106871, 106873, 106876-106878, 106884-106886, 106890-106891, 106893-106896, 106898-106906, 106909, 106911-106914, 106916, 106919-106921, 106925, 106927-106944, 106948-106953, 106956-106960, 106962, 106964, 106967-106969, 106972-106979, 106981-106982, 106985, 106988-106992, 106994, 106999, 107001-107005, 107007-107008, 107010-107013, 107015, 107017, 107020, 107023, 107025-107026, 107028-107030, 107032-107047, 107049, 107051, 107053-107057, 107059, 107061, 107064-107065, 107068-107069, 107072-107077, 107079-107080, 107083-107084, 107086, 107088-107091, 107095, 107098-107103, 107105, 107108-107109, 107111-107112, 107115, 107117-107126, 107129, 107133, 107135-107147, 107149-107156, 107158-107171, 107173, 107175, 107177, 107180, 107183-107184, 107190-107193, 107197, 107199-107205, 107208, 107211, 107213-107226, 107228-107232, 107234-107238, 107240-107251, 107254-107260, 107262-107278, 107280-107283, 107286-107288, 107291-107297, 107300-107310, 107312-107316, 107318-107319, 107321-107323, 107326-107327, 107329-107333, 107335, 107339, 107341-107344, 107346-107347, 107350, 107354, 107358-107361, 107363, 107366-107372, 107374-107377, 107379-107381, 107383, 107386, 107389, 107391, 107393, 107398-107399, 107401-107409, 107411-107415, 107417-107419, 107421, 107427-107428, 107432, 107434-107439, 107441-107446, 107448, 107450-107451, 107454-107456, 107458, 107460, 107462, 107464, 107466-107470, 107473-107477, 107482-107484, 107486-107487, 107490, 107495, 107497, 107500-107505, 107511-107518, 107521, 107523-107526, 107528, 107531, 107533-107537, 107539, 107541, 107545-107550, 107553-107555, 107557, 107559, 107562, 107565-107566, 107569-107580, 107582-107586, 107588, 107591, 107597-107598, 107601, 107603-107607, 107609, 107613-107617, 107619-107638, 107643, 107645, 107647, 107651, 107653-107655, 107662, 107664-107672, 107674-107675, 107680, 107683-107684, 107686, 107688-107690, 107692-107693, 107695, 107697-107698, 107700-107701, 107703-107705, 107708-107712, 107715-107718, 107720, 107723-107726, 107728-107730, 107732, 107735-107739, 107741-107743, 107746-107773, 107775, 107778, 107780, 107782-107785, 107787, 107789-107792, 107794-107795, 107800, 107804-107808, 107810-107814, 107816-107821, 107824-107827, 107829, 107832-107841, 107845-107848, 107850-107851, 107853-107854, 107856-107859, 107861, 107868-107870, 107872, 107874, 107880, 107882-107885, 107890-107903, 107906, 107908-107910, 107914, 107916, 107918, 107920-107923, 107929-107931, 107934-107936, 107939, 107944, 107946-107953, 107956, 107959, 107961, 107963-107967, 107969, 107972-107973, 107976-107979, 107983-107984, 107986, 107988-107989, 107994-107997, 107999, 108001-108005, 108007, 108009, 108013-108014, 108016-108020, 108022-108029, 108031, 108035-108036, 108038-108039, 108041-108055, 108058, 108061-108062, 108064, 108066-108068, 108070, 108073, 108075-108077, 108082, 108084-108087, 108094-108096, 108099, 108101-108102, 108104-108108, 108111, 108113-108115, 108121-108124, 108127-108128, 108130, 108132-108136, 108138-108140, 108142-108145, 108147-108148, 108150-108159, 108161-108162, 108167, 108170-108178, 108181, 108183-108190, 108192-108198, 108200-108205, 108207-108213, 108215-108219, 108221, 108223-108224, 108226-108231, 108233, 108235, 108239-108242, 108244-108245, 108247-108249, 108251, 108253, 108255-108256, 108258, 108262-108263, 108265, 108267-108272, 108274-108285, 108288, 108290-108297, 108299-108303, 108305-108306, 108308-108316, 108318-108319, 108321, 108323-108328, 108330, 108334-108340, 108342-108350, 108353-108363, 108365-108371, 108373-108380, 108383-108384, 108386-108391, 108393-108394, 108396, 108398-108401, 108405, 108407-108413, 108415-108422, 108425-108429, 108432-108438, 108442-108449, 108451-108456, 108458, 108461-108463, 108465-108467, 108469, 108471-108473, 108476-108479, 108482-108483, 108485, 108488-108489, 108492-108493, 108495-108508, 108510, 108512-108519, 108521-108523, 108526, 108528-108530, 108536-108537, 108539-108545, 108547, 108549, 108551, 108555-108556, 108558-108562, 108564-108569, 108571-108577, 108579-108581, 108588-108589, 108591-108592, 108594, 108598, 108600, 108602-108603, 108605, 108607-108622, 108624, 108626-108627, 108629, 108631-108635, 108637-108639, 108643, 108645-108646, 108648-108656, 108659, 108664-108669, 108671-108674, 108676, 108678-108680, 108682-108687, 108689, 108692-108697, 108700, 108702-108703, 108705, 108708, 108710-108713, 108716-108719, 108724, 108726-108728, 108731-108733, 108737-108740, 108747-108748, 108753-108754, 108757-108762, 108766-108771, 108773-108774, 108776, 108779-108780, 108784-108785, 108787-108791, 108793-108794, 108796, 108798-108804, 108806-108809, 108811-108812, 108814-108821, 108824-108825, 108829, 108831, 108833-108836, 108838-108839, 108841-108847, 108849, 108851-108853, 108855-108856, 108858-108861, 108864-108865, 108867-108868, 108870-108873, 108875-108876, 108878-108882, 108884-108885, 108887-108889, 108891-108892, 108894-108896, 108898-108902, 108904, 108906-108912, 108914-108919, 108921-108922, 108927, 108929, 108932, 108935, 108939-108941, 108944-108950, 108956-108957, 108962, 108965, 108967, 108970-108971, 108975, 108977-108982, 108986-108991, 108994-108997, 109000, 109003-109004, 109007, 109009-109010, 109013, 109016, 109019, 109021, 109023, 109025-109026, 109030-109031, 109033-109039, 109041-109042, 109044, 109047-109049, 109054-109057, 109062-109063, 109065, 109068-109069, 109072-109073, 109075-109080, 109084-109085, 109088-109089, 109091-109093, 109095-109096, 109100, 109102, 109104, 109107, 109109-109110, 109113-109115, 109117-109119, 109124-109125, 109129, 109131-109140, 109142-109143, 109146, 109149-109150, 109152-109154, 109157-109161, 109163, 109167-109172, 109174, 109177-109178, 109180, 109182, 109185-109187, 109190, 109192-109194, 109196-109218, 109220-109223, 109225-109226, 109228-109229, 109233-109235, 109237, 109241, 109243-109246, 109248-109253, 109255, 109257-109264, 109267-109268, 109271, 109274-109276, 109278-109280, 109282, 109284-109285, 109287, 109289-109293, 109296, 109298, 109300-109302, 109304-109305, 109308-109309, 109312-109314, 109316-109320, 109322, 109328-109331, 109333-109335, 109338-109339, 109347-109348, 109353-109355, 109357-109361, 109363-109364, 109368-109369, 109375-109378, 109380, 109382, 109384, 109388, 109390, 109393, 109395, 109399, 109401-109405, 109407-109410, 109412, 109417, 109419, 109433-109436, 109438-109448, 109450-109454, 109456-109468, 109470-109472, 109474, 109476, 109478, 109483, 109485, 109489-109491, 109493-109498, 109500, 109502-109505, 109509-109511, 109513-109521, 109523-109525, 109531-109533, 109536-109537, 109542-109547, 109549, 109553, 109557, 109560, 109562-109565, 109567, 109570-109571, 109573, 109576, 109584, 109587-109588, 109590-109592, 109594, 109597, 109599-109603, 109605-109608, 109610-109614, 109618, 109621, 109625, 109627-109629, 109632-109635, 109638-109641, 109644-109645, 109647, 109649-109650, 109652, 109654, 109657-109661, 109663, 109665-109669, 109674-109677, 109680, 109682-109684, 109686, 109688-109691, 109694, 109696, 109698, 109700, 109705, 109707, 109712, 109714-109717, 109719-109724, 109727-109728, 109731-109732, 109734, 109736-109749, 109751-109754, 109760, 109768, 109770-109773, 109775-109776, 109778-109779, 109786-109787, 109795, 109800-109804, 109806-109808, 109811-109812, 109814, 109816-109818, 109820-109825, 109827-109830, 109832, 109835-109840, 109842, 109846, 109850, 109853-109855, 109857-109858, 109860, 109863-109865, 109868-109874, 109878-109884, 109886, 109888-109896, 109898-109900, 109902, 109906-109908, 109911-109912, 109915, 109921, 109930, 109932-109934, 109938-109939, 109943-109944, 109946-109949, 109951-109954, 109956-109957, 109961, 109963, 109966-109968, 109977, 109979, 109981, 109983, 109985, 109987, 109991-109992, 109994-109995, 109998, 110001, 110003, 110006-110009, 110011-110012, 110014, 110016-110022, 110024-110027, 110029, 110031-110035, 110037-110038, 110040-110041, 110044-110046, 110049, 110051-110052, 110054, 110057-110063, 110066, 110068-110071, 110073-110075, 110077-110079, 110081-110082, 110085-110086, 110088-110091, 110094-110097, 110099, 110101-110102, 110105-110106, 110108-110110, 110112, 110114-110115, 110117-110121, 110123-110127, 110129-110131, 110133, 110136-110137, 110139, 110141, 110143, 110145-110149, 110151, 110153-110155, 110157-110159, 110162, 110164-110165, 110168-110170, 110174, 110177, 110179, 110182-110191, 110195-110197, 110202, 110206-110211, 110214-110215, 110217, 110221-110225, 110227-110228, 110232, 110234-110238, 110240-110247, 110249, 110251-110252, 110254, 110257, 110259-110261, 110263-110268, 110270-110274, 110278-110281, 110284-110288, 110292, 110294, 110298, 110302-110307, 110310, 110312-110313, 110317-110321, 110323-110325, 110329, 110331-110332, 110336-110341, 110344-110345, 110349, 110351-110352, 110356-110357, 110359-110363, 110366-110367, 110371-110377, 110380-110394, 110396, 110400-110402, 110407, 110411-110412, 110414, 110416, 110418-110421, 110425, 110427, 110429, 110431-110432, 110434-110435, 110437-110438, 110440-110441, 110443, 110445, 110447, 110449, 110452-110453, 110455, 110457, 110462-110463, 110467, 110471, 110473-110479, 110481-110482, 110484, 110486, 110490, 110492-110498, 110500-110505, 110507, 110510-110513, 110515-110519, 110524-110529, 110534-110538, 110541-110545, 110547-110548, 110550-110556, 110558-110563, 110568, 110573-110578, 110581, 110587, 110590, 110596, 110598-110599, 110603-110604, 110606-110607, 110614-110615, 110618-110619, 110623-110624, 110626-110629, 110631-110639, 110641, 110643, 110645-110646, 110649-110650, 110653-110658, 110661, 110665-110668, 110670-110671, 110673-110675, 110680, 110682-110683, 110688-110689, 110693, 110695-110696, 110699-110700, 110702-110703, 110705, 110708-110711, 110715, 110718-110719, 110722, 110730-110737, 110741-110746, 110748, 110750, 110752-110753, 110755, 110757-110761, 110764, 110766-110768, 110778-110779, 110781, 110783, 110787, 110790, 110793-110795, 110797-110798, 110800, 110803, 110805-110807, 110809, 110811-110814, 110818-110822, 110824, 110827-110828, 110834-110835, 110838-110845, 110848-110850, 110852-110853, 110856, 110859-110860, 110862, 110867-110869, 110871-110872, 110876-110878, 110880-110883, 110885-110887, 110890, 110892-110894, 110898, 110900, 110902-110904, 110906-110914, 110917-110924, 110926, 110930-110934, 110936-110938, 110941, 110943-110944, 110946-110947, 110949-110950, 110952-110953, 110962-110963, 110965, 110967-110971, 110974, 110977, 110982-110983, 110985, 110987-110989, 110996-111002, 111005-111006, 111008-111012, 111014, 111018-111020, 111023-111029, 111033-111034, 111036-111043, 111046-111047, 111049, 111051-111055, 111058-111064, 111069-111070, 111074, 111078, 111081-111086, 111089-111095, 111097-111102, 111104, 111109, 111111, 111113, 111116-111118, 111121-111122, 111125, 111127-111130, 111135-111138, 111140-111141, 111145, 111148, 111151-111155, 111157, 111160-111164, 111166, 111169, 111172-111173, 111176, 111178-111179, 111181-111182, 111184, 111186-111189, 111192, 111194-111196, 111198, 111200-111204, 111210-111211, 111217-111221, 111223, 111225, 111229-111230, 111232-111235, 111238-111241, 111244-111246, 111249-111252, 111255-111269, 111273-111276, 111278-111279, 111282, 111285-111293, 111296-111297, 111299-111301, 111304-111305, 111307-111312, 111316, 111321, 111323-111330, 111333-111334, 111336, 111338, 111342-111344, 111349, 111353, 111356-111362, 111364, 111372-111374, 111376-111378, 111380-111381, 111383-111387, 111390, 111392-111398, 111400, 111403, 111405, 111409-111411, 111413-111414, 111420-111424, 111426, 111431, 111434, 111436, 111438, 111440-111442, 111449, 111451-111452, 111458, 111460, 111462, 111464-111472, 111475-111476, 111478-111480, 111483, 111485, 111487, 111490, 111492-111494, 111497-111499, 111501-111502, 111506, 111508-111510, 111512-111513, 111515-111516, 111518, 111520, 111522, 111524, 111526-111528, 111531-111532, 111534-111536, 111539, 111544, 111546-111553, 111555, 111558, 111563-111564, 111569-111570, 111572, 111574-111578, 111580, 111584, 111587-111590, 111592, 111594-111595, 111597-111600, 111603, 111607, 111609-111613, 111615, 111618, 111622-111623, 111626-111627, 111630, 111635, 111639-111648, 111650-111655, 111657-111658, 111660, 111663-111664, 111666, 111668-111671, 111674, 111677, 111681-111684, 111693-111697, 111701-111704, 111707, 111714, 111716-111717, 111719-111721, 111723, 111727, 111729, 111731-111733, 111736-111737, 111741-111742, 111745, 111747-111750, 111754-111755, 111760-111765, 111767-111768, 111771-111773, 111779, 111781-111786, 111791, 111795, 111798-111800, 111803, 111805-111811, 111813-111820, 111823, 111826, 111828-111829, 111831, 111834, 111836-111839, 111841-111842, 111844, 111846-111847, 111852-111853, 111855-111856, 111858, 111861, 111863-111866, 111868, 111870-111875, 111877, 111880-111881, 111883-111887, 111889-111897, 111899-111902, 111909, 111911, 111913-111915, 111917-111918, 111920, 111922-111923, 111925, 111928, 111930, 111934-111936, 111938-111939, 111942-111944, 111946-111951, 111954-111956, 111958-111965, 111968-111969, 111972-111974, 111977, 111979-111980, 111982-111986, 111988, 111990-111992, 111994, 111997, 111999, 112001-112002, 112004, 112006, 112008-112010, 112014-112015, 112017, 112019-112020, 112022-112026, 112028, 112034-112038, 112040-112042, 112044, 112046-112047, 112052, 112054-112058, 112061-112062, 112069-112070, 112072-112073, 112075-112077, 112079-112085, 112093-112095, 112097, 112102-112108, 112113-112118, 112121-112124, 112126, 112128-112133, 112139-112155, 112159-112173, 112175, 112179-112183, 112185, 112187-112188, 112190-112193, 112195-112198, 112204-112214, 112216-112218, 112222-112225, 112229, 112231-112234, 112237, 112244-112252, 112255, 112257-112259, 112261, 112267-112269, 112271, 112275-112276, 112278, 112282, 112284, 112286-112291, 112294, 112298-112299, 112301-112305, 112308, 112310, 112312-112314, 112318-112322, 112326-112328, 112330-112331, 112333, 112336-112345, 112347-112350, 112352-112353, 112355-112356, 112358-112360, 112363, 112365-112366, 112369, 112372, 112374-112387, 112389, 112394-112395, 112397, 112400-112401, 112405-112407, 112413, 112416, 112420, 112422, 112424, 112426-112430, 112432, 112434-112435, 112437-112440, 112442-112444, 112446-112450, 112454, 112456, 112459-112464, 112466-112472, 112474-112476, 112478, 112480-112484, 112486-112487, 112491-112492, 112494, 112497, 112500, 112504-112509, 112511, 112513, 112515-112516, 112520, 112522-112523, 112528, 112530-112531, 112533-112539, 112542-112543, 112545-112547, 112550-112551, 112555-112557, 112559, 112561-112562, 112564, 112566-112567, 112569-112570, 112572, 112577, 112579-112582, 112584-112587, 112589, 112591-112592, 112595, 112597-112598, 112600-112603, 112606-112616, 112618, 112620-112624, 112626, 112630-112631, 112638, 112640-112643, 112646, 112648-112653, 112655-112656, 112660-112667, 112671, 112673, 112675-112676, 112678, 112680-112682, 112684, 112687-112688, 112690, 112693-112695, 112697, 112699-112700, 112702, 112704-112705, 112708-112713, 112715-112716, 112718-112719, 112726-112727, 112729-112731, 112733-112736, 112738-112740, 112742-112748, 112752-112753, 112755-112756, 112758-112768, 112770-112774, 112776, 112779-112783, 112786-112787, 112789-112800, 112806, 112808, 112811, 112814-112818, 112820, 112831, 112834, 112838-112839, 112841-112842, 112845-112847, 112849, 112853, 112856, 112858-112861, 112870, 112873, 112875-112876, 112878, 112880-112881, 112883-112885, 112887, 112889, 112891-112903, 112907, 112910, 112916, 112919, 112923, 112925-112926, 112928, 112935-112936, 112938, 112942-112944, 112946, 112948, 112950-112951, 112953-112959, 112961-112964, 112969-112971, 112973-112979, 112981-112983, 112987-112992, 112996-112998, 113001, 113005-113007, 113010, 113012-113015, 113017-113018, 113020, 113022-113024, 113027-113029, 113031, 113035-113036, 113038-113040, 113042, 113044-113049, 113051-113054, 113056-113058, 113061-113062, 113064-113074, 113076-113078, 113080, 113082-113085, 113088, 113090, 113092-113095, 113097-113101, 113104-113107, 113110, 113112-113116, 113118, 113121, 113123, 113127-113131, 113133, 113135, 113138, 113140-113142, 113145, 113147-113148, 113150-113151, 113153, 113155-113161, 113163-113165, 113168, 113171, 113176, 113178-113179, 113181-113184, 113187-113189, 113191, 113193-113200, 113202, 113205, 113207, 113209, 113213, 113219, 113222, 113224-113225, 113229, 113231-113232, 113234-113237, 113242, 113244, 113246-113247, 113249-113251, 113253, 113256-113260, 113262-113268, 113270-113272, 113274-113275, 113277-113281, 113284, 113287, 113294-113296, 113298-113306, 113309-113312, 113314, 113319-113321, 113323, 113325, 113331, 113333, 113335, 113338, 113340-113341, 113343, 113345, 113347, 113349, 113352, 113354, 113356, 113359, 113361-113362, 113364, 113369, 113371, 113374, 113380, 113382, 113386-113391, 113393, 113395, 113397, 113399-113403, 113405, 113407, 113410, 113412, 113415-113416, 113419-113420, 113422-113425, 113427, 113433-113434, 113437-113442, 113444, 113446, 113449, 113451, 113454-113456, 113465-113468, 113470, 113474, 113481-113482, 113488, 113491, 113494-113498, 113502, 113508-113509, 113511-113518, 113520-113527, 113529-113539, 113542-113546, 113549, 113551, 113553-113554, 113556, 113559-113560, 113562-113566, 113568, 113570-113577, 113579-113586, 113590-113597, 113602, 113604-113608, 113611-113617, 113619-113624, 113626, 113628-113634, 113637-113638, 113640, 113645-113647, 113649-113650, 113652-113654, 113656-113657, 113660-113662, 113664-113671, 113673-113674, 113677-113679, 113682-113683, 113686-113689, 113691, 113693-113694, 113696-113698, 113700-113701, 113703-113708, 113710, 113712-113714, 113717, 113720-113726, 113729, 113732, 113736, 113738, 113740, 113745, 113747-113749, 113751, 113753-113756, 113759-113763, 113765-113772, 113775, 113777-113778, 113781-113784, 113787-113788, 113790, 113792, 113796-113797, 113799-113806, 113808-113810, 113813, 113815-113817, 113819, 113825, 113831-113833, 113838-113842, 113844-113845, 113847-113850, 113853-113855, 113857, 113859, 113863-113864, 113871-113873, 113875-113879, 113881-113884, 113886-113887, 113893, 113895, 113901, 113904-113905, 113911-113926, 113929-113931, 113933-113934, 113936-113939, 113941-113942, 113945, 113947-113950, 113953, 113955, 113958-113961, 113964, 113966-113967, 113970-113972, 113976-113977, 113980, 113982-113985, 113987, 113991-113995, 113997-114005, 114008-114009, 114012-114015, 114017-114020, 114024-114025, 114027-114030, 114035-114036, 114038-114040, 114044-114045, 114047, 114053, 114059-114060, 114063, 114066, 114069, 114071-114072, 114078, 114080-114083, 114085-114088, 114090, 114092, 114094, 114096-114097, 114100-114104, 114109-114110, 114112-114116, 114120, 114122-114125, 114129-114132, 114134-114135, 114137-114138, 114140-114141, 114147-114148, 114155-114156, 114160, 114162, 114164, 114166, 114168, 114171-114173, 114176-114183, 114185, 114188-114190, 114192, 114194-114195, 114198, 114200, 114203-114210, 114212-114213, 114220-114223, 114225-114228, 114232, 114234-114236, 114238-114242, 114244-114251, 114254-114260, 114268-114269, 114275-114277, 114280-114281, 114283-114289, 114292, 114294, 114297-114299, 114301, 114303-114305, 114307, 114309, 114311-114313, 114315, 114318-114326, 114329-114330, 114335, 114337-114338, 114340-114344, 114346, 114348-114350, 114352-114354, 114356-114358, 114360-114362, 114365, 114368, 114371, 114373-114383, 114386, 114388-114389, 114391, 114393-114394, 114396-114398, 114400-114401, 114405-114420, 114422, 114425, 114428-114429, 114431, 114433-114436, 114438, 114440-114442, 114445, 114447, 114450-114457, 114459, 114461, 114463-114464, 114466-114467, 114469, 114471-114473, 114475-114476, 114478-114479, 114481-114483, 114485, 114487-114490, 114494-114495, 114499-114502, 114507-114513, 114515-114519, 114521-114522, 114526, 114529, 114531-114532, 114534, 114536-114537, 114539-114546, 114549-114561, 114565, 114567-114568, 114571-114575, 114577, 114580-114581, 114583-114584, 114587-114591, 114599-114603, 114605, 114609-114613, 114617-114619, 114623-114630, 114632, 114634, 114636-114639, 114641-114644, 114646-114651, 114653, 114656, 114658-114662, 114666-114670, 114673, 114675-114676, 114678-114679, 114682-114683, 114685-114686, 114690-114694, 114698-114707, 114711, 114713-114715, 114717-114719, 114721-114723, 114725, 114727-114733, 114736, 114739, 114741-114743, 114748-114751, 114755-114757, 114759-114761, 114763, 114765-114766, 114769-114771, 114774-114779, 114781-114782, 114785-114792, 114794-114797, 114799-114808, 114812-114816, 114818, 114821, 114825, 114827-114831, 114833-114840, 114842-114846, 114848, 114850-114853, 114855-114856, 114862, 114864-114872, 114880, 114885, 114887-114888, 114890-114894, 114896, 114900, 114902-114916, 114918, 114920-114921, 114923-114926, 114936-114940, 114942, 114947, 114949-114950, 114952-114953, 114955, 114959-114960, 114962, 114965-114966, 114968-114972, 114974-114975, 114978-114982, 114990-114996, 114998, 115000, 115003, 115005, 115010-115014, 115016, 115019, 115021-115023, 115027-115028, 115030-115032, 115034-115036, 115041-115043, 115046, 115049-115053, 115055-115057, 115059-115062, 115070-115071, 115073-115079, 115084-115085, 115091-115092, 115095, 115101-115102, 115106, 115108, 115110, 115112, 115114, 115116-115125, 115128, 115134, 115136-115138, 115142-115143, 115147, 115149-115154, 115156-115162, 115164-115176, 115178, 115180-115188, 115190-115191, 115193, 115196, 115198, 115206-115209, 115212, 115214-115215, 115217, 115220-115221, 115232-115235, 115237-115238, 115241, 115243-115244, 115246, 115248-115250, 115253-115255, 115257-115258, 115260-115261, 115265-115266, 115269-115273, 115276, 115283-115284, 115288, 115294, 115298, 115301-115302, 115304, 115307-115308, 115310-115311, 115313-115315, 115321, 115325, 115331, 115334-115339, 115342, 115344, 115351, 115354-115355, 115357-115366, 115368, 115372, 115375, 115377-115383, 115385-115386, 115388, 115390-115393, 115395, 115397, 115399-115400, 115402-115403, 115407-115410, 115412-115413, 115421, 115423, 115425-115427, 115429, 115432-115437, 115439-115440, 115442-115445, 115447-115452, 115458, 115461-115464, 115469-115470, 115473, 115475-115476, 115478, 115482, 115484-115485, 115488-115489, 115493-115496, 115498-115499, 115503-115504, 115509, 115511, 115515, 115517-115519, 115521, 115524-115525, 115527, 115529, 115531-115533, 115537-115545, 115547-115548, 115550, 115553, 115556-115559, 115561, 115564-115566, 115568-115576, 115580-115590, 115594-115595, 115600, 115602-115604, 115607-115608, 115612, 115615-115616, 115618-115619, 115622-115624, 115629-115634, 115636-115637, 115639-115641, 115648, 115651, 115662-115663, 115668, 115670, 115672, 115674, 115676, 115689-115690, 115693-115694, 115696-115701, 115703, 115705-115708, 115710-115714, 115717-115724, 115726-115728, 115730-115737, 115739-115740, 115742, 115746-115749, 115751-115752, 115754-115755, 115757-115770, 115772, 115774, 115776-115779, 115781-115789, 115792-115801, 115803-115804, 115806-115807, 115810, 115812-115814, 115816-115817, 115821, 115823-115825, 115827-115828, 115830, 115832-115836, 115838, 115840-115843, 115849-115852, 115854, 115856-115865, 115867-115868, 115870-115873, 115876-115879, 115881-115884, 115886-115890, 115892-115893, 115895, 115897, 115899-115900, 115904-115905, 115908-115909, 115911, 115922-115928, 115930-115935, 115937, 115940-115945, 115947, 115951, 115953-115954, 115957-115962, 115965-115966, 115969-115970, 115972, 115974, 115978, 115981-115988, 115990, 115992, 115994, 115998-116000, 116002, 116004, 116006-116012, 116014-116021, 116028-116031, 116035, 116038-116042, 116044-116045, 116047, 116049, 116053-116062, 116065-116066, 116068-116070, 116072-116073, 116076-116077, 116079, 116081-116083, 116085-116094, 116096-116104, 116106-116107, 116111-116113, 116115-116117, 116122, 116124, 116126, 116128-116132, 116134, 116136-116137, 116139-116140, 116143-116144, 116146, 116148-116149, 116152, 116154, 116156, 116158-116159, 116162-116166, 116169, 116171-116172, 116175, 116177-116179, 116181-116183, 116185, 116187-116188, 116195, 116197, 116200, 116203-116207, 116209-116210, 116213-116216, 116218-116221, 116223-116226, 116229, 116236, 116238, 116240, 116244-116250, 116253-116254, 116256-116258, 116262-116266, 116271, 116273-116274, 116276, 116279, 116283-116287, 116289-116290, 116292, 116294-116297, 116300, 116303, 116307-116312, 116316, 116320-116323, 116325-116328, 116331, 116334-116336, 116338-116340, 116343-116349, 116353, 116358-116359, 116361-116362, 116364-116365, 116367, 116370, 116372-116373, 116375, 116378, 116380, 116382-116384, 116386, 116393-116395, 116397, 116399, 116402-116405, 116407, 116409-116410, 116412, 116417-116420, 116422, 116426-116428, 116430-116433, 116436-116442, 116449, 116451, 116457, 116460, 116462-116463, 116466-116472, 116476, 116478, 116480-116481, 116485-116486, 116488-116492, 116494-116496, 116498, 116500-116505, 116507-116519, 116524, 116526-116527, 116530, 116533-116535, 116537-116544, 116546-116552, 116561, 116563, 116565, 116569-116570, 116572-116573, 116582-116585, 116587-116588, 116590-116595, 116599-116600, 116602-116606, 116609, 116617, 116619-116624, 116626-116629, 116631-116634, 116636, 116644-116647, 116649, 116653, 116656, 116658, 116661-116662, 116665-116666, 116671, 116674-116679, 116682, 116684, 116689, 116691, 116693, 116696-116697, 116699-116702, 116705-116707, 116713-116714, 116716-116718, 116722, 116727-116733, 116735-116736, 116739, 116741-116745, 116748-116749, 116752-116759, 116763-116764, 116769-116773, 116781-116786, 116789, 116791, 116793, 116795, 116798, 116804-116806, 116810, 116812, 116814-116815, 116818, 116823, 116827-116828, 116831, 116833, 116835, 116837-116838, 116841, 116847-116848, 116850, 116852-116857, 116861, 116864, 116866-116867, 116871, 116876-116878, 116880, 116884-116892, 116896, 116899, 116903, 116905-116907, 116910, 116912-116915, 116917-116918, 116923, 116927, 116929-116932, 116934, 116936-116939, 116941-116943, 116946-116947, 116949, 116951-116956, 116958-116964, 116966-116971, 116975-116976, 116979, 116982-116983, 116985, 116987-116989, 116991-116993, 116996-116997, 116999-117000, 117002, 117008, 117010-117012, 117014, 117016-117021, 117023-117027, 117031-117033, 117035, 117038-117041, 117043-117050, 117052, 117054, 117056-117062, 117064-117065, 117068, 117070-117071, 117073, 117075-117076, 117078, 117081, 117084-117087, 117089-117095, 117097, 117101, 117103, 117106-117107, 117109-117110, 117114-117115, 117117, 117119, 117121-117124, 117127-117134, 117137-117140, 117142, 117145, 117147, 117149-117154, 117156-117158, 117160, 117163-117168, 117171-117176, 117178, 117181, 117183, 117186, 117188, 117190-117191, 117195-117200, 117205, 117208, 117212, 117214-117215, 117217-117219, 117224, 117227-117230, 117232-117234, 117236, 117238-117239, 117241-117244, 117246, 117249-117251, 117253, 117256, 117259, 117262-117263, 117265-117267, 117270, 117272, 117274, 117276-117277, 117281, 117285-117286, 117288, 117290-117293, 117297-117298, 117300, 117306, 117309-117310, 117312, 117315-117319, 117329-117333, 117335-117337, 117341-117346, 117348-117349, 117351, 117355, 117365, 117367-117368, 117372, 117374-117375, 117384, 117392, 117394, 117399-117407, 117409-117411, 117413, 117415-117416, 117419, 117421, 117423-117424, 117426, 117428-117431, 117433-117437, 117440, 117443, 117445-117448, 117450-117454, 117457-117458, 117460-117461, 117463-117465, 117468-117469, 117471, 117473-117474, 117476, 117478-117481, 117483, 117486, 117489, 117492, 117498-117499, 117503-117507, 117509, 117511, 117514-117516, 117518-117521, 117524-117526, 117528-117529, 117531-117532, 117534-117536, 117539, 117541-117542, 117544, 117546-117547, 117550-117551, 117553, 117556, 117564-117574, 117582-117591, 117594-117596, 117598, 117600-117603, 117605, 117607, 117610-117611, 117613-117614, 117616-117617, 117619-117620, 117622, 117624-117625, 117630-117631, 117633, 117636, 117643, 117646, 117649-117651, 117654-117657, 117659-117662, 117666-117669, 117671, 117673, 117675-117677, 117680, 117687, 117689-117690, 117692-117694, 117696, 117698-117700, 117702-117704, 117711-117713, 117715, 117717-117718, 117720, 117724-117725, 117727-117739, 117741, 117748, 117750-117751, 117755-117756, 117758, 117761, 117764, 117766, 117768, 117772-117774, 117777-117778, 117781-117783, 117786, 117789-117791, 117793, 117797-117798, 117800, 117802-117804, 117806, 117808-117810, 117812, 117814-117815, 117817, 117819-117821, 117824, 117827-117833, 117835-117837, 117840-117842, 117846, 117852, 117854-117861, 117864-117868, 117871, 117873-117874, 117876-117877, 117879, 117881-117882, 117885-117886, 117891, 117893-117894, 117897-117899, 117903, 117908, 117910-117921, 117924-117925, 117930-117943, 117945, 117948, 117950-117956, 117959-117960, 117962-117968, 117971, 117973-117974, 117978-118002, 118006-118013, 118015-118026, 118028, 118030-118032, 118036-118040, 118045-118048, 118050-118058, 118060-118062, 118064, 118066, 118069-118081, 118085-118086, 118088-118089, 118091, 118095, 118097, 118099-118100, 118103-118107, 118110-118111, 118113-118115, 118117, 118119, 118122-118124, 118132-118134, 118136, 118139-118140, 118142-118143, 118145-118146, 118148-118151, 118153-118154, 118156, 118160-118165, 118167-118168, 118172-118173, 118176-118177, 118179, 118181, 118184-118185, 118187-118189, 118191-118193, 118197, 118203, 118210-118216, 118219-118221, 118223, 118228, 118233-118236, 118238-118240, 118242-118246, 118248, 118250, 118256, 118259-118260, 118262-118264, 118267, 118269-118271, 118273-118277, 118285, 118287-118294, 118296-118297, 118299, 118301-118302, 118304, 118307-118318, 118320, 118323, 118327-118328, 118332-118333, 118335, 118337, 118340, 118342, 118348-118351, 118354-118358, 118361-118362, 118365-118366, 118368-118372, 118374-118380, 118382-118386, 118388-118390, 118392-118393, 118395, 118397, 118400-118411, 118414, 118417-118419, 118421-118422, 118426-118429, 118431, 118433, 118435-118437, 118442, 118444-118445, 118447, 118449, 118451, 118455, 118460, 118462-118463, 118466-118469, 118471-118476, 118478, 118480, 118483-118487, 118490-118494, 118497, 118502-118503, 118506-118508, 118510-118511, 118513-118524, 118526, 118528-118529, 118531, 118534, 118536-118540, 118543-118546, 118552, 118554-118555, 118557-118563, 118568, 118571-118575, 118577-118580, 118582-118587, 118589, 118591, 118593, 118595-118600, 118602, 118604, 118606-118607, 118609-118615, 118618-118620, 118623, 118626-118628, 118630-118631, 118633-118645, 118647, 118651, 118653, 118655-118656, 118659-118662, 118664, 118667-118668, 118670, 118673-118675, 118678, 118683-118684, 118687-118692, 118694, 118699-118700, 118702-118719, 118722-118723, 118725-118726, 118728-118730, 118737-118740, 118742-118744, 118746, 118748, 118750-118752, 118755, 118758-118761, 118763, 118768, 118774-118781, 118784-118787, 118789-118794, 118796, 118798, 118801-118802, 118804-118813, 118815-118816, 118818-118820, 118823-118826, 118829-118830, 118832-118833, 118840-118841, 118843-118844, 118846-118847, 118852, 118854-118855, 118857-118858, 118860-118861, 118863-118865, 118867, 118871-118873, 118875, 118877-118878, 118880, 118882-118889, 118894-118898, 118905, 118909, 118912-118913, 118915-118920, 118925-118926, 118931-118940, 118942-118952, 118954-118955, 118957-118959, 118962-118964, 118967, 118970-118971, 118973-118974, 118978-118981, 118983, 118985-118989, 118994-118995, 119000, 119009-119010, 119012, 119014, 119016-119017, 119019-119024, 119026, 119031-119033, 119035, 119037-119038, 119040, 119042, 119045, 119048-119050, 119052-119054, 119056, 119059-119060, 119063-119064, 119067-119078, 119080-119082, 119088, 119090-119097, 119099, 119103, 119105, 119107, 119109, 119112, 119116-119117, 119121, 119124-119130, 119132, 119136-119137, 119139, 119141, 119147, 119150-119151, 119154-119155, 119159-119165, 119167-119170, 119174-119175, 119179-119180, 119182-119184, 119186, 119188-119191, 119197-119201, 119203-119204, 119208-119214, 119216, 119218, 119220, 119223, 119225-119227, 119229-119231, 119233-119239, 119242-119245, 119247, 119251-119258, 119260, 119266-119269, 119271-119278, 119281-119297, 119299-119300, 119302, 119304-119312, 119318, 119322-119326, 119328-119331, 119334-119337, 119342, 119344-119345, 119349-119356, 119359-119363, 119366, 119369, 119371, 119373-119378, 119381-119384, 119388-119389, 119391, 119393-119395, 119397, 119399-119408, 119411-119413, 119415-119419, 119422-119423, 119425-119427, 119429, 119431, 119433-119436, 119438-119441, 119443-119445, 119448, 119452, 119454-119458, 119460, 119462-119464, 119467-119469, 119471-119475, 119477-119478, 119483-119484, 119486, 119489-119491, 119493-119496, 119498, 119500, 119503, 119505-119506, 119510-119511, 119513-119516, 119518, 119520, 119524-119530, 119536, 119538, 119540-119543, 119545-119546, 119548-119549, 119555, 119559, 119561, 119565-119566, 119570, 119578-119580, 119582-119583, 119585-119587, 119590, 119593-119594, 119597, 119603, 119607, 119611, 119613-119621, 119625-119627, 119629-119630, 119633-119640, 119642-119645, 119647-119648, 119651-119654, 119669, 119671-119672, 119679, 119683, 119685-119686, 119688, 119690-119691, 119698, 119700, 119702-119706, 119711, 119713-119715, 119718-119719, 119723, 119727-119728, 119731-119732, 119735, 119737-119740, 119742, 119750, 119752-119754, 119756, 119761-119765, 119767, 119774, 119776, 119780, 119782-119786, 119788-119789, 119791, 119793-119808, 119810, 119812-119813, 119818-119819, 119821, 119825-119826, 119829-119831, 119833, 119835-119836, 119840-119841, 119846-119849, 119851-119856, 119859-119860, 119863, 119865, 119867-119869, 119874-119876, 119879, 119881-119882, 119889-119896, 119898, 119901-119902, 119904-119905, 119907, 119911-119912, 119919, 119921-119924, 119926-119928, 119930-119931, 119933-119934, 119938-119941, 119943, 119946, 119949, 119953, 119958-119959, 119963-119964, 119968, 119970-119975, 119979-119980, 119983, 119986-119987, 119990, 119995-119999, 120002, 120005-120010, 120015, 120018, 120022-120029, 120033-120034, 120036, 120042-120054, 120056-120059, 120062, 120069, 120076, 120078, 120081, 120083, 120085-120089, 120092, 120094-120098, 120101, 120103, 120107-120109, 120111-120112, 120114, 120116, 120118-120119, 120125-120127, 120129-120130, 120132, 120134-120135, 120138-120140, 120143-120147, 120151-120159, 120161, 120163-120165, 120167-120168, 120170-120173, 120178-120181, 120185-120187, 120191-120193, 120198-120199, 120202, 120204-120206, 120209-120211, 120213-120216, 120218-120220, 120222-120223, 120227, 120239-120242, 120245, 120248-120254, 120256-120257, 120259, 120261-120263, 120265-120266, 120269-120270, 120272-120274, 120279-120286, 120291, 120295, 120297, 120299, 120301, 120306, 120308, 120310-120314, 120316, 120319-120321, 120323-120324, 120326, 120328-120333, 120337-120341, 120347-120348, 120350, 120352-120357

### Single Strand Oligonucleotides (Sense Strand of Target Gene)

[0212] SeqID range: 119697-187501

### SeqIDs w/o G Runs:

[0213] 119697, 119699-119715, 119722-119725, 119733-119779, 119787, 119792, 119794-119805, 119809-119823, 119826-119842, 119847-119850, 119852-119855, 119865-119871, 119876, 119878-119909, 119911-119912, 119921-119928, 119931, 119938-119943, 119946-119959, 119961-119972, 119974-119976, 119983-119990, 120004-120019, 120029-120062, 120066-120071, 120073-120101, 120111-120119, 120127-120141, 120144-120145, 120150-120180, 120182-120187, 120191-120231, 120238-120240, 120242-120263, 120270-120316, 120319-120350, 120354-120472, 120486-120806, 120820-120821, 120835-121063, 121077-121146, 121160-121169, 121183-121184, 121206-121293, 121310-121355, 121369-121420, 121434-121454, 121468-121662, 121671-121677, 121683-121727, 121731-121818, 121832-121883, 121898-121920, 121934-122093, 122107-122110, 122124-122183, 122197-122315, 122329-122335, 122364-122430, 122444-122445, 122462-122482, 122517-122532, 122546-122604, 122618-122733, 122747-122765, 122779-122790, 122804-122832, 122846-122912, 122926-122939, 122953-123008, 123031-123261, 123284-123763, 123777-123972, 123987-124009, 124023-124203, 124218-124272, 124286-124496, 124510-124525, 124554-124594, 124608-124624, 124655-124697, 124716-124767, 124779-124794, 124808-124888, 124902-124943, 124957-125068, 125082-125179, 125194-125286, 125300-125318, 125332-125402, 125416-125418, 125432-125517, 125531-125542, 125556-125657, 125671-125698, 125712-125736, 125750-125994, 126008-126017, 126031-126052, 126066-126515, 126529-126655, 126683-126725, 126752-126846, 126867-127037, 127051, 127074-127317, 127331-127425, 127440-127473, 127487-127739, 127749-127858, 127872-128002, 128016-128089, 128104-128109, 128123-128131, 128145-128224, 128239-128258, 128272-128303, 128318-128345, 128359-128391, 128405-128431, 128445-128579, 128593-128618, 128632-128640, 128655-128814, 128835-128862, 128874-128960, 128975-129035, 129049-129056, 129070-129219, 129234-129396, 129411-129455, 129469, 129485-129630, 129642-129681, 129686-129691, 129705-129775, 129789-129843, 129857-129992, 130020-130062, 130076-130155, 130157-130181, 130196-130252, 130267-130358, 130388-130395, 130409-130612, 130626-130834, 130870-130871, 130892-131098, 131112-131117, 131131-131300, 131315-131356, 131370-131405, 131420-131592, 131606-131669, 131683-131945, 131959-132031, 132045-132292, 132306-132403, 132418-132422, 132438-132442, 132456-132463, 132477-132510, 132524-132607, 132621-132651, 132665-132700, 132715-132732, 132746-132765, 132780-133227, 133242-133249, 133263-133340, 133357-133397, 133413-133465, 133479-133525, 133544-133631, 133645-133779, 133793-133812, 133826-134124, 134138-134143, 134157, 134171-134537, 134551-134563, 134578-134587, 134607-134724, 134748-134782, 134796-135032, 135046-135093, 135107-135282, 135296-135590, 135598-135681, 135695, 135712-136380, 136394-136568, 136582-136586, 136600-136870, 136884-136889, 136903-136939, 136953-136964, 136977-136991, 136997-137048, 137073-137078, 137100-137112, 137126-137131, 137150-137176, 137190-137205, 137229-137244, 137258-137262, 137277-137345, 137360-137577, 137591-137660, 137674-137774, 137788-137936, 137951-138068, 138082-138252, 138266-138323, 138337-138366, 138380-138394, 138408-138478, 138492-138588, 138602, 138616-138646, 138660-138699, 138713-138866, 138880-138888, 138914-139025, 139039-139074, 139089-139116, 139135-139149, 139160-139178, 139182-139284, 139303-139332, 139346-139684, 139698-139739, 139753-139791, 139805-139864, 139883-139966, 139980-140035, 140049-140102, 140116-140160, 140174-140198, 140212-140273, 140282-140300, 140315-140338, 140351-140392, 140407-140506, 140511-140647, 140661-140721, 140736-140925, 140939-141025, 141040-141128, 141142-141157, 141171-141174, 141188-141476, 141490-141505, 141519-141598, 141634-141640, 141654-141744, 141759-141846, 141879-141968, 141983-142022, 142037-142058, 142072-142106, 142120-142253, 142278-142324, 142338-142718, 142732-143203, 143217-143252, 143277-143315, 143329-143336, 143351-143386, 143401-143424, 143438-143480, 143492-143499, 143514-143549, 143575-143598, 143612-143650, 143664-143671, 143685-143822, 143837-143847, 143862-143918, 143936-144116, 144130-144354, 144369-144551, 144565-144573, 144584-144706, 144714-144721, 144729-145420, 145434-145486, 145500-145501, 145516-145556, 145571-145656, 145671-145679, 145693-145719, 145747-145866, 145880-146177, 146191-146214, 146237-147083, 147097-147475, 147489-147593, 147607-147972, 147986-148067, 148081-148208, 148224-148271, 148286-148585, 148599-148688, 148716-148752, 148766-148852, 148879-148886, 148900-149163, 149177-149257, 149271-149340, 149354-149431, 149445-149497, 149512-149555, 149569-149600, 149615-149672, 149686-149736, 149750-149970, 150002-150363, 150402-150499, 150513-150928, 150942-151189, 151203-151220, 151234-151277, 151292-151527, 151541-151626, 151640-151677, 151691-151735, 151749-151786, 151796-151844, 151854-151919, 151933-151942, 151956-152026, 152030-152173, 152191-152413, 152428-152597, 152611-152700, 152716-152805, 152819-152824, 152838-152859, 152880-152881, 152922-153034, 153048-153097, 153111-153209, 153225-153241, 153255-153348, 153362-153466, 153480-153518, 153532-153557, 153572-153593, 153607-153617, 153631-153702, 153716-153748, 153762-153836, 153858-153869, 153885-153911, 153925-154026, 154041-154046, 154060-154210, 154224-154338, 154352-154369, 154391-154396, 154410, 154424-154452, 154480-154492, 154507-154541, 154555-154623, 154637-154656, 154674-154713, 154735-154741, 154755-154758, 154785-154876, 154886-154900, 154906-154937, 154951-154953, 154967-154979, 154986-155233, 155247-155248, 155262-155394, 155412-155559, 155574-155586, 155600-155625, 155640-155722, 155736-156020, 156034-156086, 156100-156257, 156273-156324, 156338-156435, 156449-156512, 156526-156561, 156576-156580, 156594-156636, 156650-156682, 156696-156898, 156920, 156934-156990, 157004-157149, 157165-157185, 157206-157472, 157486-157558, 157572-157649, 157663-157704, 157720-157730, 157744-157988, 158002-158167, 158181-158190, 158204-158359, 158373-158405, 158419-158863, 158877-158987, 159007-159073, 159087-159090, 159094-159183, 159196-159205, 159208-159211, 159225-159428, 159442-159470, 159489-159507, 159532-159815, 159831-159894, 159908-160112, 160126, 160142-160159, 160182-160205, 160219-160302, 160317-160345, 160359-160481, 160504-160512, 160522-160527, 160538-160562, 160567-160682, 160696-160769, 160783-160900, 160914-160949, 160965-160993, 161008-161021, 161035-161076, 161091-161226, 161240-161252, 161267-161337, 161351-161416, 161430-161435, 161456-161510, 161526-161568, 161582-161590, 161604-161685, 161699-161749, 161763-161843, 161870-162012, 162026-162058, 162072-162180, 162194-162195, 162209-162381, 162399-162435, 162444-162501, 162504-162553, 162564-162586, 162610-162648, 162653-162660, 162664-162682, 162686-162770, 162784-162835, 162849-163053, 163067-163159, 163173-163520, 163541-163716, 163730-163747, 163761-163803, 163817-163868, 163882-163923, 163937-164117, 164131-164146, 164161-164163, 164177-164268, 164283-164352, 164366-164470, 164484-164542, 164556-164611, 164625-164666, 164681-164697, 164721-164738, 164753-164835, 164849-164856, 164870-164873, 164889-164928, 164942-165114, 165128-165272, 165286-165549, 165563-165850, 165864-165914, 165928-166012, 166026-166180, 166194-166240, 166257-166272, 166282-166308, 166320-166340, 166354-166448, 166462-166699, 166713-166753, 166767-166834, 166848-167315, 167330-167362, 167376, 167390-167939, 167953-168010, 168024-168051, 168065-168114, 168128-168249, 168263-168291, 168305-168311, 168323-168346, 168360-168461, 168486-168499, 168522-168552, 168566-168611, 168625-168853, 168867-168982, 168996-169072, 169086-169237, 169259-169273, 169282-169285, 169289-169328, 169351-169425, 169439-169449, 169466-169811, 169826-169893, 169907-169973, 169988-170084, 170098-170127, 170142-170470, 170484-170486, 170500-170531, 170554-170612, 170627-170635, 170655-170671, 170685-171226, 171240-171276, 171290-171309, 171323-171618, 171633-172339, 172353-172872, 172886-173122, 173136-173149, 173164-173224, 173239-173404, 173419-173484, 173506-173510, 173537-173615, 173629-173835, 173850-174672, 174686-175348, 175362-175601, 175626-175812, 175826-176096, 176110-176314, 176328-176427, 176441-176615, 176629-176638, 176652-176946, 176960-177034, 177048-177086, 177101-177110, 177131-177144, 177165-177203, 177217-177546, 177560-177638, 177652-177827, 177841-178238, 178252-178333, 178347-178395, 178410-178477, 178491-179042, 179055-179069, 179075-179091, 179106-179317, 179331-179530, 179544-179567, 179582-179665, 179679-179726, 179740-179841, 179855-179971, 179994-180096, 180112-180237, 180251-180352, 180378-180449, 180463-180841, 180855-180866, 180880-180902, 180916-181243, 181275-181335, 181349-181403, 181417-181437, 181451-181537, 181551-181585, 181600-181609, 181625-181736, 181750-182161, 182175-182203, 182222-182275, 182289-182307, 182321-182326, 182340-182355, 182369-182375, 182389-182473, 182492-182527, 182543-182668, 182685-182702, 182718-182755, 182774-182882, 182896-182907, 182918-182976, 182990-183135, 183149-183157, 183171-183197, 183221-183232, 183242-183274, 183301-183322, 183325-183341, 183355-183414, 183429-183461, 183475-183508, 183523-183536, 183550-183677, 183691-183702, 183716-183739, 183753-183789, 183803-183841, 183856-183922, 183947-184014, 184029-184186, 184211-184253, 184267-184273, 184288-184363, 184377-184473, 184499-184517, 184531-184550, 184565-184573, 184614-184634, 184650-184734, 184767-184772, 184786-184882, 184896-184943, 184968-185108, 185130-185173, 185198-185299, 185313-185320, 185334, 185351-185373, 185387-185466, 185480-185487, 185501-185539, 185553-185630, 185644-185660, 185695, 185709-185748, 185762-185784, 185798, 185812-185834, 185848-185936, 185950-185990, 186004-186017, 186031-186081, 186096, 186117-186168, 186182-186188, 186210-186254, 186268-186320, 186334-186345, 186359-186489, 186503-186537, 186551-186888, 186902-186909, 186968-186974, 186988-187024, 187038-187076, 187090-187170, 187185-187205, 187232, 187255-187302, 187343, 187376-187501

### SeqIDs w/o miR Seeds:

[0214] 119698, 119700, 119702-119706, 119711, 119713-119715, 119718-119719, 119723, 119727-119728, 119731-119732, 119735, 119737-119740, 119742, 119750, 119752-119754, 119756, 119761-119765, 119767, 119774, 119776, 119780, 119782-119786, 119788-119789, 119791, 119793-119808, 119810, 119812-119813, 119818-119819, 119821, 119825-119826, 119829-119831, 119833, 119835-119836, 119840-119841, 119846-119849, 119851-119856, 119859-119860, 119863, 119865, 119867-119869, 119874-119876, 119879, 119881-119882, 119889-119896, 119898, 119901-119902, 119904-119905, 119907, 119911-119912, 119919, 119921-119924, 119926-119928, 119930-119931, 119933-119934, 119938-119941, 119943, 119946, 119949, 119953, 119958-119959, 119963-119964, 119968, 119970-119975, 119979-119980, 119983, 119986-119987, 119990, 119995-119999, 120002, 120005-120010, 120015, 120018, 120022-120029, 120033-120034, 120036, 120042-120054, 120056-120059, 120062, 120069, 120076, 120078, 120081, 120083, 120085-120089, 120092, 120094-120098, 120101, 120103, 120107-120109, 120111-120112, 120114, 120116, 120118-120119, 120125-120127, 120129-120130, 120132, 120134-120135, 120138-120140, 120143-120147, 120151-120159, 120161, 120163-120165, 120167-120168, 120170-120173, 120178-120181, 120185-120187, 120191-120193, 120198-120199, 120202, 120204-120206, 120209-120211, 120213-120216, 120218-120220, 120222-120223, 120227, 120239-120242, 120245, 120248-120254, 120256-120257, 120259, 120261-120263, 120265-120266, 120269-120270, 120272-120274, 120279-120286, 120291, 120295, 120297, 120299, 120301, 120306, 120308, 120310-120314, 120316, 120319-120321, 120323-120324, 120326, 120328-120333, 120337-120341, 120347-120348, 120350, 120352-120357, 120359-120360, 120362, 120364, 120367-120368, 120370-120371, 120373-120379, 120381, 120383, 120387, 120390, 120395-120396, 120403-120404, 120408-120409, 120412-120419, 120421, 120424-120429, 120432, 120435, 120437, 120445, 120447-120450, 120452, 120454-120456, 120458, 120461-120463, 120466-120467, 120469-120472, 120474-120479, 120481, 120486, 120488-120494, 120496, 120499-120500, 120504-120507, 120509-120510, 120515, 120517-120518, 120522, 120526-120528, 120531-120533, 120536-120543, 120545-120552, 120554-120555, 120557-120558, 120560-120563, 120567-120568, 120573-120575, 120578, 120580-120581, 120583, 120586-120587, 120589-120591, 120593-120596, 120598-120599, 120601-120603, 120605-120606, 120611, 120614, 120618-120619, 120621-120622, 120625-120626, 120628-120632, 120635-120637, 120639, 120642, 120644-120648, 120651-120652, 120654, 120656, 120658-120665, 120667-120676, 120678, 120682, 120685-120690, 120693-120701, 120705-120717, 120720-120722, 120724-120728, 120730-120731, 120735-120738, 120744-120748, 120750, 120752-120753, 120755, 120757, 120759-120760, 120764-120768, 120771, 120773-120775, 120779, 120781-120784, 120786-120789, 120792-120793, 120795-120804, 120806-120809, 120811-120814, 120816, 120821, 120824, 120826, 120828-120832, 120835, 120837, 120840-120844, 120846-120848, 120855, 120858, 120862, 120867-120868, 120871-120872, 120874, 120876, 120879-120880, 120884, 120887-120892, 120895-120904, 120907, 120909-120910, 120912, 120914-120918, 120921-120928, 120932-120940, 120942-120943, 120949, 120951, 120953-120954, 120956, 120959, 120961-120967, 120970, 120972, 120976, 120978, 120980-120983, 120986-120988, 120990, 120992-120998, 121001, 121003, 121006-121008, 121010, 121013-121017, 121019-121027, 121029-121039, 121041-121043, 121045, 121048-121049, 121052-121054, 121056-121061, 121075-121080, 121082, 121085-121086, 121088, 121090, 121092, 121098, 121101, 121103, 121105-121109, 121111-121112, 121114, 121116, 121121, 121123-121124, 121126-121127, 121129-121130, 121132-121134, 121136-121140, 121142-121143, 121147-121149, 121151, 121153, 121160-121161, 121163-121164, 121170-121174, 121176-121180, 121182-121186, 121188, 121193-121194, 121197-121198, 121204-121207, 121209-121215, 121217-121220, 121222, 121226-121227, 121229-121235, 121238, 121240-121242, 121246-121248, 121251-121257, 121259, 121261-121263, 121265, 121267, 121270, 121272-121274, 121281, 121283, 121286, 121288-121295, 121297-121302, 121308-121309, 121311, 121313-121314, 121316-121319, 121321-121322, 121327, 121330-121333, 121338-121342, 121346-121348, 121350-121353, 121356, 121358, 121360, 121362-121365, 121371-121383, 121385, 121388-121395, 121400-121401, 121408-121409, 121411, 121413, 121416-121423, 121428-121430, 121433-121434, 121436-121444, 121446, 121449, 121451, 121453, 121455-121464, 121466, 121468, 121472, 121474-121480, 121483-121486, 121489, 121491-121495, 121497-121500, 121502-121506, 121508-121511, 121513-121518, 121522-121526, 121528-121530, 121532, 121536-121542, 121545-121548, 121553-121555, 121557, 121562-121576, 121579-121580, 121582-121584, 121588, 121593-121597, 121599-121608, 121610, 121612, 121617-121618, 121623-121632, 121634, 121637, 121641, 121643-121645, 121647, 121654-121663, 121671-121672, 121678-121679, 121682-121683, 121685-121695, 121697-121699, 121701-121703, 121705-121710, 121713-121714, 121716-121719, 121722, 121724, 121729-121734, 121736-121743, 121745-121750, 121755-121762, 121765, 121767-121770, 121772, 121775-121778, 121781, 121783-121784, 121787-121789, 121793-121796, 121798, 121801, 121804-121805, 121807-121812, 121816-121819, 121821, 121825-121826, 121831-121840, 121842, 121844, 121848, 121851-121854, 121856, 121858, 121866-121867, 121869, 121871-121872, 121874-121875, 121878, 121880-121884, 121890-121892, 121894, 121899, 121901-121913, 121915-121918, 121921-121925, 121932, 121935, 121940-121941, 121943, 121945-121949, 121951-121952, 121954-121956, 121961-121963, 121965-121967, 121969-121971, 121973, 121976-121982, 121985, 121987-121988, 121992-121993, 121995-121996, 122000-122002, 122004-122006, 122008, 122010-122012, 122015, 122017, 122019-122020, 122022-122029, 122031-122032, 122034-122036, 122039-122043, 122046, 122049-122056, 122058-122061, 122063, 122065-122067, 122072, 122074-122080, 122082, 122084-122087, 122089-122091, 122093-122095, 122098-122099, 122101, 122103, 122105-122109, 122112-122113, 122115, 122125, 122128-122129, 122131-122134, 122136-122137, 122139-122143, 122145, 122148-122150, 122152, 122154-122155, 122157, 122159-122161, 122165, 122167-122169, 122171-122176, 122179-122185, 122187, 122190-122192, 122199-122202, 122206, 122208, 122210, 122212-122218, 122221-122222, 122224, 122226-122227, 122229, 122234-122240, 122242-122243, 122247-122250, 122253-122254, 122258, 122260-122269, 122271-122272, 122274, 122276-122281, 122283, 122286-122294, 122296, 122299-122300, 122302-122304, 122306, 122309, 122311-122318, 122321, 122323, 122328-122331, 122334-122335, 122337-122343, 122347, 122349, 122351-122352, 122356, 122363-122365, 122367, 122369-122377, 122379-122382, 122384, 122387, 122389-122394, 122396-122398, 122405-122406, 122408-122409, 122411-122414, 122417-122418, 122421, 122423, 122425-122429, 122433-122435, 122438, 122440, 122443-122445, 122448, 122452-122453, 122458, 122464-122467, 122469-122477, 122479-122480, 122483, 122485-122488, 122495-122496, 122498-122499, 122504, 122508, 122512, 122518, 122521, 122523-122529, 122532-122533, 122536, 122538-122541, 122543-122549, 122553-122555, 122557, 122559, 122561-122567, 122569, 122571-122572, 122577, 122579, 122582-122589, 122592-122593, 122597, 122601-122605, 122607, 122610, 122613, 122617-122618, 122620-122622, 122624, 122626, 122630-122631, 122634-122635, 122637, 122639-122643, 122645-122646, 122648, 122652, 122654, 122656, 122658-122661, 122663-122664, 122668, 122671-122674, 122676, 122678-122679, 122681, 122683-122686, 122688, 122694-122705, 122710-122711, 122714-122716, 122719-122720, 122722-122734, 122737, 122747, 122749-122750, 122755, 122757-122758, 122761-122766, 122769-122773, 122775, 122778, 122784-122789, 122794, 122796-122798, 122800, 122802-122804, 122807, 122809-122810, 122812-122813, 122819, 122823, 122825-122828, 122830-122832, 122834-122837, 122839-122842, 122845-122853, 122855-122859, 122863, 122865-122868, 122870-122872, 122874-122876, 122879, 122882, 122886-122888, 122893-122898, 122902-122914, 122916, 122921-122922, 122926, 122928-122944, 122947-122949, 122953, 122955-122957, 122959-122971, 122974, 122977, 122979, 122982-122984, 122986-122987, 122989, 122992-122993, 122996-122997, 122999, 123001, 123003-123004, 123007, 123009-123010, 123012-123014, 123017, 123019, 123022, 123024, 123033, 123035, 123038, 123043-123044, 123047-123048, 123054, 123056-123057, 123060-123063, 123065-123070, 123072-123076, 123078-123079, 123081-123084, 123088, 123090-123091, 123093, 123095-123096, 123098-123102, 123104-123108, 123110-123113, 123117-123119, 123121-123122, 123125-123128, 123131, 123134, 123136-123143, 123145-123147, 123149, 123152-123154, 123156, 123159-123160, 123163, 123166-123181, 123186, 123188-123189, 123191-123194, 123196, 123199, 123201-123202, 123206, 123209-123210, 123217-123221, 123223-123224, 123228, 123231-123233, 123236, 123240-123244, 123248-123251, 123254-123258, 123262, 123264-123265, 123268-123271, 123274-123279, 123281, 123283-123285, 123287-123288, 123291, 123293-123296, 123298-123299, 123301, 123303-123304, 123306-123309, 123311-123312, 123315-123316, 123320-123324, 123326-123327, 123330-123331, 123333, 123335, 123338, 123341-123344, 123348, 123350-123351, 123355, 123357-123359, 123362-123363, 123367-123371, 123373-123380, 123382-123393, 123395-123399, 123402-123406, 123408-123411, 123413-123414, 123416, 123418, 123420-123423, 123427-123428, 123431-123432, 123434-123438, 123440-123444, 123446, 123449-123453, 123455-123456, 123459-123462, 123464-123470, 123472-123476, 123479-123480, 123482-123483, 123485-123491, 123496, 123498-123500, 123503, 123506, 123512-123518, 123520-123521, 123525-123529, 123531, 123534-123535, 123537-123540, 123542-123544, 123547, 123553-123554, 123556-123557, 123559-123564, 123567-123568, 123570-123574, 123576-123580, 123582, 123584, 123586-123587, 123589, 123591, 123593-123597, 123599-123602, 123604-123605, 123608-123611, 123614-123624, 123626-123628, 123630, 123632-123634, 123637, 123639, 123641, 123645, 123647-123655, 123657, 123659, 123662-123665, 123667-123675, 123677-123678, 123682-123684, 123686-123690, 123692-123697, 123699, 123701, 123703-123704, 123706-123707, 123709-123710, 123712-123713, 123715, 123717-123724, 123728-123729, 123732-123737, 123739-123740, 123743-123746, 123748-123749, 123751, 123753-123758, 123761-123763, 123767-123770, 123773, 123777-123780, 123782-123786, 123788, 123792-123793, 123795-123797, 123799-123801, 123803, 123805-123807, 123809-123813, 123815, 123817-123821, 123825-123841, 123843-123851, 123853-123856, 123858, 123862-123863, 123865, 123867-123869, 123871-123872, 123874, 123879-123884, 123888-123889, 123891-123893, 123895, 123898-123901, 123903-123905, 123909-123911, 123913-123916, 123920, 123923, 123925, 123927, 123929-123930, 123932-123934, 123936-123939, 123941-123943, 123946-123947, 123951-123952, 123954, 123956, 123958, 123960-123962, 123964-123965, 123968-123976, 123978, 123986-123987, 123989, 123993, 123999-124002, 124006, 124010-124012, 124016-124018, 124020, 124023, 124027-124032, 124035-124038, 124041-124052, 124054-124063, 124065-124067, 124071-124073, 124075, 124078, 124081, 124083, 124086-124089, 124091-124092, 124094, 124096-124097, 124099, 124101-124103, 124105-124106, 124108-124113, 124115, 124117, 124119, 124124, 124126-124127, 124129, 124132-124134, 124136-124139, 124141-124144, 124146, 124148, 124151, 124153-124155, 124158, 124160-124172, 124174, 124177-124179, 124181-124184, 124186-124188, 124191-124197, 124199-124200, 124202-124203, 124205, 124208-124211, 124217-124222, 124224-124226, 124229-124232, 124235-124239, 124241-124244, 124246, 124248, 124251-124257, 124259-124260, 124262-124263, 124265-124267, 124269, 124274-124276, 124278, 124280-124282, 124285-124286, 124291, 124295, 124297-124300, 124304-124306, 124308-124310, 124313, 124316-124318, 124321-124323, 124325, 124327-124330, 124334-124340, 124344, 124347, 124351-124353, 124355, 124357, 124360-124364, 124366-124368, 124370-124371, 124375-124377, 124382-124389, 124392-124395, 124399-124403, 124405-124406, 124409, 124411-124415, 124420, 124422-124428, 124430, 124432-124437, 124439, 124441-124444, 124446-124449, 124452-124453, 124456, 124458, 124460-124474, 124476-124486, 124488-124490, 124495, 124498-124500, 124502, 124504, 124509, 124512, 124515, 124518, 124521-124526, 124528, 124530, 124534, 124538, 124541, 124543, 124545-124548, 124551, 124554-124562, 124564-124568, 124572-124576, 124579, 124581-124582, 124585, 124588-124590, 124592-124593, 124597-124599, 124603, 124605, 124610, 124612, 124615, 124617, 124619-124620, 124622-124623, 124625-124630, 124633, 124640, 124642-124643, 124645, 124652, 124654-124655, 124657-124659, 124662-124664, 124666-124667, 124669, 124671-124676, 124678-124679, 124681, 124684, 124688-124689, 124692, 124695, 124697-124699, 124701, 124704, 124713-124714, 124716-124718, 124721, 124723-124729, 124731-124732, 124738, 124740-124744, 124747, 124749-124757, 124759, 124762-124766, 124768, 124774-124776, 124779-124780, 124782-124791, 124793, 124795, 124797-124799, 124801-124803, 124805-124806, 124808-124812, 124814-124816, 124819-124820, 124822-124828, 124831-124832, 124834-124835, 124837, 124841-124842, 124845, 124847-124848, 124850-124852, 124854-124858, 124860-124861, 124863-124868, 124871, 124873, 124875-124876, 124888, 124890, 124892, 124894-124898, 124902, 124904, 124906-124908, 124910-124916, 124918-124921, 124923-124928, 124930-124931, 124933-124934, 124936-124939, 124941, 124943-124944, 124947-124949, 124953, 124955, 124957-124958, 124960-124961, 124963-124965, 124967, 124969-124972, 124979-124982, 124985-124989, 124991-124992, 124994-124995, 124999-125001, 125004, 125006-125008, 125011, 125013-125014, 125016, 125020-125022, 125026-125030, 125032-125036, 125039-125041, 125043, 125046, 125048, 125052-125057, 125060, 125062-125064, 125066, 125070-125071, 125073, 125078, 125081-125086, 125089-125090, 125094-125096, 125098, 125100-125101, 125103-125112, 125117-125119, 125121-125123, 125125-125133, 125137-125151, 125153-125157, 125159, 125166, 125169-125177, 125183-125184, 125187-125188, 125195, 125197-125200, 125202, 125204, 125206-125209, 125212-125215, 125217, 125219-125220, 125227-125232, 125234-125238, 125241-125242, 125244-125251, 125253, 125257, 125259, 125261-125263, 125265-125266, 125268-125275, 125279, 125282, 125286, 125289, 125291-125294, 125303-125306, 125310-125311, 125314, 125316-125317, 125324, 125327-125328, 125330, 125332, 125335-125336, 125338-125342, 125345-125347, 125352-125353, 125355-125358, 125360, 125362-125363, 125365, 125367, 125369-125370, 125372, 125374, 125376, 125379-125383, 125385, 125387-125390, 125392, 125396-125402, 125405, 125407-125408, 125413, 125416, 125418, 125423, 125426-125428, 125430-125431, 125436-125437, 125439, 125442, 125447, 125449-125453, 125456, 125465, 125470-125471, 125473-125476, 125478-125479, 125482, 125484-125486, 125489-125490, 125495-125496, 125498, 125503, 125505-125506, 125517, 125521, 125527, 125529, 125531-125533, 125535, 125537-125540, 125542-125544, 125551, 125555, 125557-125562, 125565, 125568, 125571, 125573-125584, 125587-125588, 125590, 125593, 125595-125603, 125605, 125608, 125612-125615, 125617-125621, 125623-125629, 125631, 125633, 125637-125645, 125648-125652, 125654-125655, 125658-125664, 125666, 125671, 125673, 125675-125676, 125679, 125682-125686, 125691, 125693-125694, 125696-125697, 125699-125702, 125704-125705, 125711-125712, 125715-125718, 125720, 125723, 125725-125726, 125728-125729, 125734-125735, 125737-125738, 125743-125744, 125748, 125750-125751, 125754, 125756, 125760, 125763-125777, 125779-125780, 125784-125786, 125788-125790, 125793, 125795-125796, 125798-125800, 125802-125804, 125806-125807, 125814-125816, 125821-125825, 125830-125837, 125841-125842, 125844, 125849, 125851-125853, 125855-125859, 125861, 125864-125865, 125870, 125872-125874, 125877, 125879-125880, 125882, 125886, 125888, 125891-125892, 125896, 125899-125901, 125903-125907, 125909-125910, 125913-125914, 125916-125917, 125919-125921, 125925-125926, 125928-125933, 125935-125936, 125938-125940, 125942, 125944, 125946, 125948-125954, 125956-125963, 125965-125968, 125970-125972, 125974, 125979, 125985, 125990-125991, 125995-125998, 126001, 126008, 126011, 126013, 126016-126018, 126020-126026, 126030-126036, 126039-126040, 126042-126049, 126051-126052, 126054, 126058-126059, 126061, 126063, 126067-126068, 126070-126071, 126073, 126076-126080, 126082, 126084-126085, 126088-126090, 126093-126096, 126098-126100, 126102, 126104, 126107-126110, 126112-126113, 126115-126117, 126119, 126122-126123, 126126, 126129, 126131, 126135, 126137-126139, 126142-126143, 126145-126146, 126148, 126151, 126153, 126155-126158, 126161-126166, 126168-126169, 126171-126175, 126180-126182, 126185-126188, 126192-126193, 126195-126196, 126199-126206, 126208, 126211-126215, 126217-126227, 126229-126232, 126234-126235, 126238-126244, 126246, 126248-126257, 126259-126260, 126262-126263, 126265-126266, 126268, 126271-126272, 126276-126279, 126281, 126283-126286, 126289-126294, 126296-126300, 126304, 126306, 126311-126314, 126316, 126318, 126320-126321, 126324, 126326, 126329, 126331, 126334-126343, 126345-126347, 126349-126350, 126355-126357, 126360-126363, 126365-126368, 126370-126371, 126373, 126375-126376, 126378-126382, 126384, 126388-126409, 126411, 126413, 126415, 126417-126419, 126421, 126423, 126427, 126429, 126432-126438, 126440, 126442-126451, 126453-126458, 126460-126464, 126466, 126469-126482, 126490-126496, 126498-126501, 126504-126506, 126513-126517, 126519-126522, 126525, 126528-126531, 126533, 126536-126537, 126539-126540, 126542-126543, 126547-126562, 126569-126571, 126573, 126575-126594, 126598-126605, 126607, 126609-126612, 126614, 126616, 126622, 126625, 126627-126629, 126635-126637, 126640, 126642, 126644-126646, 126649, 126652, 126654-126658, 126661-126663, 126678-126679, 126684-126687, 126689, 126691-126692, 126697, 126699, 126702, 126704-126705, 126707-126710, 126713-126714, 126717-126719, 126721, 126723, 126726-126728, 126730-126733, 126736, 126739-126741, 126743-126746, 126751, 126753-126756, 126758-126759, 126761, 126763-126764, 126768-126769, 126773-126779, 126782-126784, 126786-126791, 126794-126795, 126798, 126800-126806, 126808, 126810-126814, 126816-126820, 126822-126823, 126826-126829, 126831-126834, 126841-126842, 126844, 126848-126849, 126851, 126855, 126858, 126860, 126866-126878, 126880-126884, 126886-126890, 126892, 126894, 126897-126905, 126909, 126914-126917, 126919-126920, 126923, 126926-126928, 126930-126935, 126937, 126939-126943, 126945-126946, 126950, 126952, 126954-126955, 126957, 126959, 126961-126965, 126970-126974, 126976, 126978, 126980, 126982, 126984, 126987-126988, 126990-126997, 126999, 127001-127005, 127010-127019, 127022, 127024-127025, 127027-127032, 127034-127036, 127038-127041, 127043-127045, 127048, 127050, 127055-127056, 127058, 127060, 127062, 127064-127065, 127067-127068, 127072, 127074-127075, 127077, 127079, 127086-127089, 127091-127093, 127096-127098, 127103-127110, 127112-127114, 127116, 127118-127119, 127122-127123, 127125, 127127-127128, 127131, 127136, 127139, 127142, 127144, 127146-127154, 127160, 127163, 127165-127172, 127174-127179, 127181, 127185, 127188-127189, 127191-127194, 127196-127197, 127199-127200, 127202-127203, 127210-127213, 127215-127217, 127221-127226, 127230-127240, 127242-127243, 127245-127246, 127248-127252, 127254-127262, 127264-127265, 127267-127277, 127280-127288, 127290-127291, 127293, 127295, 127298, 127301-127303, 127306, 127309, 127311, 127314-127322, 127326-127327, 127329, 127331-127334, 127337, 127339-127342, 127344-127345, 127347-127351, 127354-127367, 127372-127376, 127378-127382, 127384, 127386, 127389, 127391-127397, 127404, 127406-127407, 127410, 127412-127413, 127416-127420, 127422, 127424, 127426, 127428-127431, 127440-127445, 127447, 127449-127451, 127453-127454, 127456-127457, 127462, 127465-127467, 127469-127470, 127472, 127474, 127476-127481, 127483-127484, 127486-127487, 127489, 127491-127492, 127494-127507, 127509, 127511, 127513-127514, 127518-127519, 127524, 127526, 127528-127531, 127534, 127538-127541, 127546, 127548, 127551, 127554, 127556, 127560-127566, 127568-127569, 127571-127574, 127576, 127580-127581, 127583-127588, 127590-127597, 127600-127602, 127604-127616, 127618-127621, 127623-127629, 127633-127637, 127640, 127642, 127648-127649, 127657-127658, 127660-127662, 127664-127666, 127668, 127670, 127672-127675, 127680-127681, 127683, 127685-127689, 127695-127696, 127698-127699, 127703-127706, 127708, 127710-127711, 127713-127716, 127721-127723, 127731-127740, 127743-127745, 127748, 127750-127751, 127754, 127756, 127759-127762, 127764-127768, 127771-127773, 127775-127776, 127781, 127783-127784, 127786, 127788-127796, 127799, 127801, 127803, 127805-127816, 127818-127823, 127825-127826, 127829-127831, 127834-127838, 127840-127844, 127846, 127849-127860, 127862, 127864, 127866, 127869, 127872-127876, 127878-127879, 127882-127883, 127886, 127889, 127891-127894, 127897-127899, 127901, 127903-127906, 127908-127909, 127912, 127915-127916, 127918-127919, 127923, 127926-127932, 127934-127935, 127937-127940, 127943-127944, 127948-127950, 127952, 127955, 127958, 127961-127965, 127967-127968, 127971-127973, 127976, 127981-127983, 127985, 127988, 127990-127991, 127995-127996, 127998, 128000-128001, 128004-128007, 128012-128016, 128020-128022, 128024, 128026, 128029, 128031, 128035-128036, 128038-128041, 128043, 128045-128047, 128049, 128051, 128053-128057, 128060-128063, 128065, 128068-128069, 128071-128072, 128074-128075, 128077, 128079, 128081-128086, 128088, 128090-128091, 128093-128095, 128098, 128102-128104, 128106-128112, 128114-128115, 128119, 128122-128123, 128125-128126, 128129-128131, 128134, 128136, 128138, 128140, 128142-128147, 128149, 128153-128155, 128158, 128161, 128163, 128165-128166, 128169-128170, 128178-128182, 128184, 128187-128192, 128194, 128196-128197, 128199-128201, 128203, 128205, 128208, 128213, 128216, 128218-128219, 128227-128230, 128233, 128235, 128237, 128239-128247, 128249-128252, 128254-128257, 128259-128261, 128263, 128265, 128268, 128270, 128272-128279, 128281, 128288-128291, 128293-128294, 128300-128301, 128303-128304, 128306-128307, 128309, 128312, 128315, 128317, 128319-128324, 128327-128331, 128333, 128335, 128337-128340, 128342, 128344-128345, 128352-128353, 128357, 128360-128365, 128367-128373, 128375-128381, 128385-128387, 128390, 128392, 128394-128395, 128400-128402, 128404, 128407-128409, 128411, 128414-128415, 128419-128421, 128423-128424, 128426-128427, 128429-128430, 128435-128438, 128440-128441, 128445, 128449, 128452, 128455, 128457, 128459-128460, 128462, 128464-128466, 128470-128477, 128479-128481, 128484, 128486, 128488-128494, 128496-128497, 128499, 128501, 128511-128515, 128517, 128519-128521, 128523, 128525-128532, 128534-128536, 128539, 128541-128544, 128546, 128549-128553, 128555, 128557-128559, 128561-128563, 128565-128566, 128568-128571, 128574-128576, 128578, 128581-128583, 128585-128586, 128588, 128594, 128597-128602, 128604-128606, 128608, 128615, 128620, 128623, 128626, 128629-128630, 128632, 128634, 128637, 128640-128644, 128647-128648, 128652, 128657-128661, 128663, 128666-128667, 128669, 128679, 128683-128684, 128686, 128688, 128690-128691, 128693-128694, 128696-128699, 128701-128702, 128705-128709, 128712, 128714-128717, 128723-128724, 128727-128728, 128735-128737, 128739-128741, 128745, 128747, 128751-128763, 128765, 128768, 128770-128774, 128776-128777, 128780, 128783-128784, 128786-128793, 128795-128797, 128799-128800, 128802, 128804, 128806-128808, 128811-128812, 128816, 128820-128821, 128824-128825, 128827-128828, 128833-128841, 128843-128847, 128849, 128852, 128855-128860, 128864-128866, 128871, 128874, 128879, 128884-128892, 128896-128899, 128902-128903, 128905-128906, 128912, 128914-128917, 128919-128921, 128926, 128928, 128930-128938, 128940-128943, 128950-128951, 128953-128956, 128960, 128964, 128966-128969, 128973-128975, 128978-128979, 128981, 128983, 128990-128992, 128994-129003, 129010, 129013, 129015-129020, 129022-129028, 129030-129031, 129034-129036, 129038-129041, 129045, 129047-129049, 129051-129053, 129057, 129059-129062, 129064, 129069-129072, 129074-129078, 129080-129081, 129083-129085, 129087-129092, 129096, 129098-129099, 129102-129105, 129107-129116, 129119-129122, 129124, 129130-129133, 129135-129138, 129140, 129142-129143, 129145, 129147-129153, 129155-129157, 129159-129162, 129164-129167, 129169, 129172-129180, 129182-129184, 129186-129189, 129191-129194, 129196-129198, 129200, 129203, 129205, 129207, 129211, 129216-129217, 129219-129221, 129225, 129227-129228, 129231, 129234, 129236-129237, 129239-129248, 129251, 129253-129255, 129257-129259, 129262, 129264-129265, 129267-129271, 129275, 129278-129279, 129281-129283, 129285-129286, 129288-129289, 129291, 129293, 129296-129297, 129302, 129304-129313, 129317, 129319-129324, 129327-129328, 129330-129332, 129336-129337, 129344-129347, 129349-129352, 129355-129356, 129364-129367, 129370, 129373-129375, 129377, 129380-129382, 129384-129386, 129388, 129394, 129397, 129400-129403, 129405, 129407, 129411-129414, 129416-129417, 129419, 129421-129424, 129426-129440, 129443, 129445-129446, 129452-129454, 129456-129458, 129461-129462, 129464, 129470-129471, 129477-129478, 129481, 129485-129490, 129492-129494, 129496-129499, 129501, 129505-129506, 129508-129511, 129513, 129515-129516, 129522-129527, 129529, 129531, 129533-129539, 129541-129559, 129561-129563, 129565, 129567, 129571-129572, 129574-129580, 129582-129583, 129589, 129593-129594, 129596, 129600, 129602-129609, 129616-129617, 129619-129623, 129625-129628, 129631, 129633, 129636-129637, 129641-129642, 129644, 129652-129659, 129661, 129663-129667, 129669, 129671-129672, 129675-129682, 129685, 129687-129692, 129694-129696, 129698, 129701-129702, 129705-129706, 129708, 129710-129713, 129715, 129719, 129721-129725, 129727-129731, 129733-129734, 129736-129740, 129742, 129744-129750, 129752-129755, 129757, 129759-129762, 129764-129765, 129767-129773, 129775, 129777, 129779-129783, 129788, 129790-129791, 129793-129794, 129796-129797, 129799-129807, 129810, 129813-129815, 129817, 129820, 129829-129833, 129835, 129839-129840, 129842, 129844, 129847-129849, 129854, 129856-129860, 129863-129866, 129869, 129871, 129873-129874, 129876-129880, 129882-129884, 129889-129894, 129897-129900, 129903-129915, 129917, 129920, 129923, 129925-129927, 129929-129930, 129932, 129934-129936, 129940, 129946, 129949, 129951, 129957-129961, 129963-129964, 129966, 129969, 129973, 129975, 129977-129982, 129985-129986, 129988-129990, 129993, 129995-129997, 130006, 130016, 130020-130025, 130027-130028, 130030, 130035-130036, 130038-130039, 130041, 130043, 130046, 130048-130049, 130051, 130053, 130056-130058, 130060, 130063-130065, 130067-130070, 130075-130080, 130083-130085, 130092-130111, 130114, 130117, 130122-130131, 130133, 130136-130142, 130145-130148, 130154-130155, 130158-130159, 130162, 130166-130169, 130171-130174, 130176, 130178-130179, 130181-130182, 130184, 130186, 130188, 130191-130192, 130194-130197, 130200, 130203-130205, 130212-130213, 130215, 130219, 130221, 130223-130225, 130232, 130234-130238, 130240-130243, 130245-130247, 130249-130253, 130255, 130258, 130261, 130267, 130269-130270, 130272-130273, 130275, 130277-130284, 130287, 130289-130294, 130296-130297, 130300-130301, 130303-130310, 130312-130316, 130319, 130321-130323, 130328-130329, 130334-130337, 130340-130344, 130346, 130348, 130350-130351, 130354, 130357-130358, 130360, 130364-130365, 130367, 130373-130375, 130388, 130392, 130394, 130396, 130399-130401, 130403-130404, 130408, 130412, 130415, 130417, 130419-130420, 130422, 130424, 130427-130431, 130434, 130436-130439, 130444-130449, 130453-130457, 130462, 130465-130466, 130468-130471, 130477-130480, 130483-130485, 130489-130491, 130493-130494, 130497, 130499-130500, 130504-130505, 130509-130511, 130513-130515, 130517-130520, 130522, 130525-130526, 130528-130530, 130532-130535, 130537-130538, 130540-130542, 130544-130545, 130552-130553, 130555, 130557, 130560-130561, 130563, 130567-130574, 130576, 130578-130579, 130581-130587, 130589-130590, 130592, 130594, 130596, 130599-130605, 130609, 130612-130613, 130615-130620, 130624, 130626-130628, 130630, 130632-130633, 130635-130637, 130639, 130641, 130644, 130647, 130651-130660, 130664, 130668, 130671-130676, 130678-130684, 130686-130691, 130693, 130695-130696, 130698-130704, 130711, 130713-130714, 130717, 130719, 130721-130725, 130728-130729, 130731-130737, 130739, 130742-130749, 130751-130753, 130755-130757, 130759-130760, 130763-130767, 130769, 130772, 130774-130785, 130787-130792, 130794, 130796-130799, 130801-130802, 130809, 130811-130813, 130815, 130817-130820, 130822, 130824-130836, 130838-130840, 130842, 130846, 130849-130850, 130853, 130860-130861, 130864, 130872-130875, 130879, 130883, 130892-130893, 130895-130899, 130902-130903, 130907-130908, 130912-130913, 130915-130917, 130920-130923, 130925, 130927, 130929-130931, 130933-130934, 130938-130942, 130947-130954, 130957, 130959-130962, 130964-130969, 130971-130973, 130975-130977, 130980, 130982-130988, 130990-130998, 131000-131001, 131003, 131005-131006, 131009-131010, 131012-131015, 131019, 131023-131027, 131029-131032, 131035-131036, 131038-131040, 131043-131045, 131047, 131050, 131052-131055, 131058, 131060, 131063, 131065-131068, 131071-131072, 131075, 131077-131078, 131080-131082, 131087-131092, 131095-131102, 131105-131106, 131108, 131111, 131113, 131115-131116, 131118, 131120, 131122-131124, 131126, 131129, 131131-131132, 131135, 131137-131150, 131152, 131155, 131159-131167, 131169-131170, 131172, 131174-131175, 131177-131178, 131186, 131188-131189, 131192, 131197-131201, 131204-131207, 131210, 131214-131216, 131218, 131221-131222, 131224, 131226, 131229-131230, 131232-131236, 131238, 131240, 131242-131256, 131258-131260, 131262-131268, 131270-131271, 131273, 131275, 131279, 131282-131287, 131290-131293, 131297-131299, 131302-131304, 131306, 131310, 131313, 131315-131321, 131323, 131326, 131328-131331, 131334-131336, 131338-131346, 131351, 131353, 131355-131356, 131358-131363, 131365-131367, 131369-131372, 131375-131376, 131378-131379, 131381-131391, 131393-131398, 131401, 131403-131412, 131414-131416, 131420, 131423-131426, 131428, 131430-131434, 131436, 131438-131442, 131445, 131448-131450, 131452-131455, 131457-131458, 131461, 131463, 131466-131477, 131480-131481, 131483, 131486-131494, 131497-131500, 131502-131503, 131505-131506, 131508-131510, 131512, 131516, 131519, 131521-131528, 131530-131531, 131533-131545, 131547-131554, 131556-131557, 131559-131565, 131570-131571, 131574-131578, 131582-131584, 131586-131588, 131590-131592, 131596-131602, 131605-131606, 131609, 131613-131615, 131617, 131619-131624, 131627, 131629-131633, 131638-131640, 131643, 131645, 131648-131649, 131655-131663, 131665, 131667, 131669-131674, 131679-131680, 131682-131684, 131686-131687, 131691-131702, 131704, 131707, 131711-131712, 131714-131719, 131721, 131726-131727, 131729-131730, 131732, 131735-131736, 131738-131740, 131742, 131745-131748, 131750-131751, 131753-131760, 131762-131764, 131767, 131769-131770, 131772-131774, 131776, 131779-131783, 131785, 131788-131790, 131792-131800, 131802-131809, 131812-131815, 131818, 131821-131825, 131828-131836, 131839-131846, 131848-131851, 131853-131855, 131857, 131859, 131863-131864, 131867-131868, 131870, 131872-131873, 131875-131877, 131881, 131883-131884, 131886-131888, 131890, 131895-131896, 131899-131903, 131905-131910, 131912-131913, 131915-131919, 131921-131928, 131930-131931, 131933-131935, 131937, 131939, 131947, 131949, 131951-131952, 131960-131961, 131964, 131967-131968, 131970-131974, 131979-131980, 131982, 131984-131985, 131989-131991, 131993-131997, 132001, 132004-132005, 132007, 132009, 132011-132015, 132018, 132022-132025, 132028, 132031-132035, 132042, 132044-132046, 132049-132050, 132053-132055, 132058-132059, 132061-132062, 132065-132074, 132076-132077, 132080-132081, 132083, 132085, 132089-132095, 132098-132099, 132101-132103, 132105, 132107-132113, 132117, 132120-132125, 132127-132129, 132131-132132, 132134-132135, 132139-132140, 132143-132146, 132148, 132151-132153, 132156-132157, 132159-132166, 132168-132170, 132175, 132177, 132180, 132182-132186, 132188-132192, 132195-132196, 132199, 132202, 132204-132211, 132215-132219, 132221-132222, 132224, 132226-132228, 132230-132233, 132235, 132238-132241, 132243-132246, 132248, 132250-132251, 132253-132254, 132259-132266, 132268, 132271, 132273-132275, 132277, 132280, 132282-132291, 132297, 132299, 132301-132308, 132310-132314, 132318-132319, 132321, 132324-132327, 132329-132330, 132332-132338, 132343-132344, 132346-132347, 132350, 132352-132353, 132359-132360, 132363, 132367, 132370, 132372, 132374-132377, 132384-132385, 132389-132393, 132398, 132400, 132403-132404, 132408-132410, 132418, 132421-132422, 132425, 132427, 132429, 132431, 132437, 132439-132445, 132447-132448, 132450, 132452, 132455-132457, 132459-132461, 132463-132464, 132466, 132468-132472, 132474, 132476, 132478-132479, 132485-132488, 132495-132497, 132499, 132501-132502, 132505, 132507-132508, 132512-132513, 132516-132517, 132519-132520, 132524, 132526-132527, 132530-132533, 132536-132540, 132544-132546, 132548, 132550, 132553-132555, 132559-132560, 132562-132564, 132568, 132570-132573, 132576-132578, 132580, 132583, 132585-132588, 132590, 132594-132595, 132597, 132599, 132604, 132607-132608, 132610, 132618, 132621, 132623-132626, 132630-132631, 132635, 132637-132639, 132641, 132644, 132647-132651, 132654-132655, 132657, 132665, 132668-132669, 132671, 132673, 132676, 132678-132680, 132682-132686, 132688, 132690-132692, 132694-132697, 132699, 132703-132705, 132709, 132711, 132713-132718, 132721-132726, 132728-132732, 132736-132737, 132739, 132743, 132748, 132751-132752, 132755, 132758-132764, 132767-132773, 132776, 132778-132779, 132781, 132783-132784, 132786-132790, 132795-132807, 132809-132813, 132815-132818, 132820-132822, 132827, 132829-132834, 132836, 132838-132839, 132841-132846, 132849-132854, 132856, 132859, 132861-132863, 132865, 132869, 132872, 132875-132877, 132879-132880, 132882-132887, 132893, 132895-132908, 132910-132911, 132913-132917, 132919-132921, 132923, 132925, 132927-132932, 132934, 132937, 132940, 132944-132952, 132957-132962, 132971-132976, 132985, 132989-132992, 132994-132997, 133002-133005, 133008-133009, 133011, 133014-133017, 133019, 133021, 133024, 133027, 133030-133031, 133033, 133035-133036, 133041-133045, 133047, 133049, 133051-133053, 133055, 133059, 133062-133064, 133066, 133068-133070, 133072, 133074-133076, 133078, 133082, 133084-133085, 133088, 133092, 133094, 133098-133099, 133101, 133104-133106, 133110, 133112-133114, 133116, 133118, 133120-133121, 133124-133132, 133134, 133137-133138, 133140, 133142-133143, 133146, 133150, 133152-133158, 133160-133169, 133171-133172, 133174, 133177, 133180, 133182-133183, 133186-133192, 133194-133196, 133200, 133202, 133204-133210, 133212, 133215-133218, 133220-133225, 133227-133232, 133234, 133239, 133243-133245, 133247, 133249-133255, 133261-133265, 133268, 133271-133280, 133282-133284, 133287-133288, 133290-133291, 133297, 133299-133300, 133303-133306, 133309, 133311-133314, 133316-133326, 133329-133331, 133333-133337, 133339-133341, 133343-133347, 133355-133356, 133358-133362, 133367, 133371, 133376, 133378, 133380-133383, 133385, 133387-133389, 133391-133392, 133394, 133397, 133400-133404, 133415-133423, 133425-133431, 133433-133435, 133439, 133441, 133443, 133449, 133451, 133455, 133457-133458, 133460, 133462, 133468-133469, 133472-133475, 133477, 133479-133480, 133484, 133486, 133488-133492, 133494, 133498, 133500-133504, 133507-133509, 133511, 133515-133518, 133520-133521, 133523-133529, 133531-133532, 133534-133535, 133541-133542, 133544-133551, 133553-133557, 133563-133571, 133573-133574, 133577-133579, 133582, 133584-133585, 133591, 133596-133599, 133603-133604, 133606-133608, 133611-133613, 133616, 133618-133623, 133625, 133628, 133631, 133634-133641, 133643-133645, 133649-133650, 133652-133655, 133658-133660, 133662-133666, 133668-133669, 133671, 133673-133674, 133676, 133678-133684, 133686, 133690-133699, 133701-133702, 133705, 133708-133709, 133711-133713, 133716, 133719, 133722, 133725, 133727, 133729-133730, 133733, 133736, 133738-133743, 133745, 133747-133748, 133750, 133752, 133756, 133758, 133762, 133764-133765, 133767, 133769-133771, 133775, 133779, 133783-133787, 133793-133801, 133803-133809, 133811, 133814-133816, 133819-133820, 133823, 133825-133826, 133828, 133830, 133832, 133834-133836, 133838, 133840-133842, 133844-133856, 133858-133861, 133863-133875, 133877-133880, 133883, 133886-133888, 133890, 133893-133899, 133901, 133903, 133905-133906, 133908, 133910-133911, 133913-133915, 133918-133919, 133923-133924, 133927, 133929, 133932-133935, 133937-133938, 133940-133942, 133944, 133946-133947, 133949, 133951-133953, 133959-133966, 133968-133979, 133982-133985, 133988-133991, 133993-133994, 133997-134003, 134007, 134012, 134016, 134018-134020, 134022-134027, 134030-134032, 134035-134038, 134042-134049, 134055, 134060, 134063-134067, 134069-134074, 134077-134079, 134081, 134083, 134087-134091, 134093, 134095, 134097-134100, 134102-134103, 134111, 134114, 134116, 134121, 134123, 134126, 134128-134129, 134134, 134136, 134138-134139, 134141-134146, 134150, 134152-134154, 134157-134161, 134164-134167, 134170, 134173-134178, 134181-134182, 134184-134185, 134187-134189, 134191-134192, 134195-134196, 134202-134203, 134205-134209, 134211-134212, 134214, 134219-134220, 134222, 134224, 134227-134229, 134231, 134233, 134244, 134246, 134248-134253, 134255, 134257-134258, 134260-134261, 134264, 134269-134272, 134276-134280, 134282-134285, 134287-134297, 134299, 134304, 134307-134308, 134310-134318, 134320-134321, 134323, 134325-134331, 134333, 134335-134336, 134338, 134341-134343, 134345, 134351, 134355-134356, 134358-134360, 134365-134366, 134368, 134370-134371, 134373-134376, 134378-134379, 134381-134388, 134390, 134393, 134395-134396, 134398, 134404-134413, 134415, 134420, 134424-134428, 134433, 134435-134438, 134445-134446, 134448-134458, 134464-134467, 134469, 134472, 134475-134476, 134478-134482, 134485-134490, 134492-134503, 134505-134510, 134512, 134519, 134525-134528, 134530, 134532-134534, 134536, 134538-134539, 134542, 134553, 134557-134559, 134561-134562, 134567-134570, 134573-134574, 134576-134583, 134586, 134588, 134593-134594, 134600, 134606-134607, 134610, 134612-134613, 134615-134620, 134623, 134625, 134628, 134632-134639, 134641-134642, 134644-134646, 134648-134649, 134651, 134653-134658, 134660-134663, 134669, 134673-134674, 134676-134679, 134683, 134686, 134688-134691, 134693-134696, 134699-134702, 134705-134706, 134708, 134712, 134715, 134717-134720, 134723-134725, 134727, 134729-134730, 134732, 134739, 134741, 134743, 134746-134749, 134752, 134755-134756, 134758-134759, 134761-134765, 134768-134770, 134772, 134775-134778, 134780-134783, 134785, 134789-134792, 134798, 134802, 134804-134805, 134807-134808, 134811, 134815-134816, 134819, 134822-134823, 134826, 134829-134830, 134832, 134834-134836, 134838, 134842-134843, 134846-134847, 134850-134859, 134861-134864, 134866, 134868-134869, 134872-134874, 134876-134877, 134879, 134881, 134883-134884, 134886, 134888, 134890, 134892, 134895, 134897, 134901-134903, 134905-134906, 134908, 134913-134919, 134923, 134927-134929, 134931, 134934, 134936-134937, 134939-134940, 134943, 134946-134948, 134953-134954, 134956, 134960, 134962-134967, 134972-134975, 134977-134981, 134983-134985, 134987, 134989-134990, 134992, 134995, 134997-135000, 135004, 135006-135009, 135011, 135014-135018, 135020-135021, 135023, 135026-135028, 135030, 135033, 135042-135044, 135047-135049, 135051-135053, 135056-135057, 135060, 135064, 135067, 135069-135074, 135076, 135079, 135085-135086, 135091, 135094-135097, 135099, 135103, 135107, 135110, 135112-135118, 135120-135121, 135124, 135126-135129, 135131-135134, 135136, 135139-135144, 135146-135153, 135157-135165, 135167-135169, 135171-135174, 135178-135188, 135190-135198, 135200-135209, 135214-135219, 135221, 135223, 135225, 135228, 135234-135237, 135243, 135245-135246, 135248, 135250, 135255-135258, 135261-135267, 135269, 135271, 135274-135278, 135280-135282, 135285, 135287-135290, 135294, 135296-135297, 135301, 135303, 135305-135306, 135308-135309, 135315, 135320-135321, 135323, 135325-135329, 135333, 135338, 135341, 135346, 135348-135353, 135355-135361, 135364-135365, 135368, 135370-135371, 135374-135378, 135380, 135383, 135385, 135388, 135390-135394, 135397-135402, 135404, 135408-135409, 135411, 135413-135414, 135416-135420, 135422-135424, 135427, 135432, 135434-135435, 135438-135448, 135452-135457, 135459, 135463, 135465-135467, 135471-135472, 135475, 135480-135481, 135483-135490, 135492-135509, 135513, 135518-135522, 135524-135525, 135533-135535, 135537, 135539-135540, 135543-135547, 135549-135551, 135553-135556, 135558-135560, 135562, 135564-135571, 135573, 135577, 135581, 135583-135584, 135586-135590, 135592-135594, 135597-135599, 135601-135607, 135609-135622, 135624-135628, 135630, 135632-135634, 135638, 135640-135642, 135644, 135649-135650, 135653-135658, 135661-135667, 135669-135676, 135681-135682, 135684, 135686-135689, 135693, 135696-135701, 135703, 135711-135712, 135714-135718, 135720-135723, 135725-135728, 135730, 135732, 135734, 135736-135738, 135742, 135746-135747, 135750, 135752-135753, 135755, 135757-135758, 135761, 135763, 135767-135769, 135775-135778, 135780, 135783, 135785, 135791, 135793, 135795-135801, 135803-135805, 135810-135811, 135813, 135815-135818, 135820, 135823, 135825-135831, 135833, 135835, 135837-135840, 135842, 135844-135845, 135847, 135850, 135852, 135857-135859, 135861-135864, 135866-135869, 135871-135874, 135876-135879, 135882, 135885, 135887-135899, 135901-135907, 135910-135911, 135914-135919, 135921-135926, 135928-135930, 135932-135933, 135936-135937, 135939-135942, 135945, 135947-135948, 135950, 135959, 135968-135971, 135973, 135975-135983, 135985-135990, 135992, 135994-135995, 135997-136008, 136013-136015, 136018, 136021-136022, 136024, 136030-136034, 136037-136038, 136041, 136043-136046, 136054-136058, 136060-136061, 136063, 136065-136082, 136084, 136086, 136088-136093, 136095-136099, 136104, 136106-136111, 136113-136114, 136116-136118, 136120-136126, 136128-136140, 136145, 136147-136149, 136152, 136154, 136156-136161, 136165, 136169-136170, 136172, 136174, 136176, 136178, 136185-136188, 136191, 136193-136195, 136197-136198, 136202-136203, 136206, 136208-136212, 136214-136216, 136218-136220, 136222-136225, 136228, 136231, 136234-136235, 136238, 136241-136243, 136245, 136247-136248, 136251-136252, 136256, 136258-136261, 136264-136267, 136269-136272, 136274-136277, 136279-136280, 136283-136285, 136288-136289, 136294, 136296-136297, 136299, 136301, 136304, 136307, 136309-136313, 136315, 136317-136318, 136320-136327, 136329-136338, 136340-136341, 136344, 136348, 136350, 136353-136354, 136359-136360, 136363, 136365, 136368, 136370-136371, 136374-136376, 136378-136380, 136383-136388, 136390-136392, 136394-136397, 136399-136400, 136406-136410, 136413, 136415-136423, 136426, 136430-136439, 136441-136442, 136445-136446, 136448, 136450-136456, 136459, 136461-136468, 136470, 136474-136476, 136478-136479, 136481-136484, 136486-136487, 136490-136495, 136497, 136501-136509, 136511, 136513, 136517, 136519, 136521-136523, 136526-136527, 136529, 136535, 136538, 136540, 136543-136547, 136549, 136553-136554, 136557, 136559-136560, 136562, 136564-136565, 136567-136568, 136570, 136572-136575, 136581-136586, 136588, 136590, 136595-136596, 136600-136601, 136604, 136607, 136610-136612, 136619, 136622-136626, 136628, 136632-136636, 136640, 136644-136647, 136649-136650, 136652, 136654-136656, 136658-136662, 136665-136668, 136670, 136674, 136677, 136681-136682, 136685, 136687-136689, 136691, 136695-136696, 136699-136700, 136702-136708, 136712, 136714, 136718, 136720, 136722-136727, 136729-136732, 136735-136744, 136746-136748, 136750, 136752, 136754, 136756, 136758, 136760, 136762-136767, 136770-136782, 136784-136785, 136787, 136789, 136791, 136793-136799, 136802-136805, 136811-136812, 136814-136817, 136826-136829, 136831, 136834, 136836, 136838-136839, 136841-136846, 136849, 136858-136860, 136862-136869, 136871, 136873-136874, 136876, 136878, 136887-136888, 136891-136892, 136894-136895, 136898-136899, 136901-136902, 136910, 136912-136919, 136922, 136925-136927, 136936-136937, 136940-136942, 136945, 136947, 136949-136953, 136955-136957, 136959, 136962-136963, 136966, 136969, 136971-136974, 136977-136978, 136980-136983, 136985, 136987-136991, 136993, 137001, 137004-137007, 137011-137013, 137015, 137018, 137020-137031, 137034, 137036-137038, 137041, 137043-137050, 137053-137056, 137061-137066, 137071-137072, 137074-137076, 137078-137080, 137082-137087, 137089-137091, 137100, 137102-137103, 137106, 137108-137110, 137112-137114, 137116, 137118-137120, 137123, 137125, 137127-137129, 137131, 137133-137134, 137138, 137140-137142, 137145-137151, 137153, 137156, 137159-137160, 137162-137172, 137176-137177, 137180, 137182-137186, 137193-137200, 137203, 137205, 137207-137208, 137214-137216, 137222, 137229, 137231-137232, 137234, 137238, 137245-137246, 137248-137254, 137258, 137260-137263, 137265-137266, 137271, 137274, 137276-137279, 137282, 137289, 137291, 137293-137294, 137297, 137299, 137301-137302, 137304, 137306, 137309-137314, 137316, 137318-137319, 137321-137324, 137328, 137330-137332, 137334-137339, 137341, 137348-137350, 137353, 137356, 137358, 137362, 137366, 137371, 137375-137379, 137382, 137384-137385, 137391-137394, 137396-137398, 137401-137402, 137404-137405, 137407-137408, 137411-137418, 137421-137422, 137424, 137426, 137429-137433, 137436, 137438-137440, 137444, 137447, 137449-137451, 137455-137456, 137461, 137465-137466, 137468, 137470-137472, 137475, 137477-137478, 137480, 137482, 137484, 137486, 137488-137491, 137493-137494, 137496-137506, 137508-137509, 137511, 137513-137514, 137516, 137518-137523, 137525, 137527, 137530-137532, 137534, 137536, 137538-137548, 137551, 137553-137558, 137560-137563, 137566, 137568, 137570, 137572, 137576, 137580-137586, 137588-137589, 137591-137592, 137594-137597, 137600-137602, 137604-137609, 137612, 137614-137616, 137618-137622, 137625, 137627-137629, 137631-137643, 137645-137650, 137652-137653, 137655, 137657-137660, 137662, 137664, 137666-137668, 137670, 137673-137674, 137681, 137683-137684, 137687-137688, 137690, 137692-137693, 137695-137703, 137705-137711, 137713, 137715-137717, 137722-137723, 137730, 137733-137739, 137741, 137745-137750, 137752-137753, 137755-137757, 137759, 137761, 137764, 137766, 137768, 137771, 137774-137778, 137785, 137788, 137790, 137793-137794, 137796-137804, 137806-137807, 137809-137810, 137816, 137818-137820, 137822, 137824-137833, 137836-137838, 137841-137845, 137848-137852, 137854-137856, 137858-137860, 137862, 137865-137867, 137870, 137872-137877, 137879-137881, 137883-137884, 137887-137895, 137897-137900, 137902-137904, 137908-137911, 137913-137915, 137917-137919, 137922-137927, 137929-137930, 137935, 137937, 137939-137942, 137945, 137947-137948, 137950-137951, 137956, 137958, 137960, 137963-137965, 137969-137974, 137977-137985, 137987-137990, 137992-137995, 137998, 138000, 138002-138004, 138006-138007, 138009, 138011-138012, 138014, 138017-138019, 138021, 138024-138027, 138029-138030, 138035-138036, 138038-138044, 138049-138051, 138054-138056, 138060, 138062-138065, 138067-138069, 138072, 138083-138086, 138094-138105, 138108-138109, 138112, 138115-138117, 138119-138120, 138122-138129, 138131-138138, 138140-138141, 138143, 138145, 138148, 138150-138153, 138155-138159, 138162-138163, 138167-138169, 138172-138176, 138181, 138183-138184, 138187, 138189-138194, 138198, 138200-138201, 138203-138206, 138208-138211, 138214-138215, 138217-138218, 138220, 138222, 138225-138229, 138232-138233, 138236, 138238, 138240-138246, 138257, 138268, 138272-138273, 138276-138280, 138282, 138284-138285, 138287, 138289, 138293-138303, 138306, 138308-138309, 138311-138312, 138314-138315, 138317-138318, 138321-138323, 138327, 138332-138333, 138335, 138337-138338, 138343, 138347-138349, 138353-138354, 138357, 138359-138361, 138364, 138366, 138368-138370, 138373-138374, 138382-138383, 138386-138387, 138390-138391, 138393-138396, 138399-138400, 138402, 138407, 138409, 138411-138420, 138422, 138425-138431, 138433, 138435-138437, 138439-138443, 138446, 138448-138452, 138454-138456, 138459, 138461-138463, 138465-138469, 138471-138472, 138475-138479, 138481-138486, 138489, 138491-138492, 138494-138496, 138498-138499, 138501, 138503-138509, 138511-138513, 138519-138520, 138522, 138524-138526, 138531, 138534, 138536-138540, 138544-138552, 138554-138556, 138558-138560, 138563, 138565-138566, 138569-138573, 138576, 138578-138582, 138584-138587, 138589-138592, 138595, 138597, 138601-138604, 138607-138610, 138614, 138617, 138619-138626, 138628, 138632-138635, 138639, 138641-138642, 138646, 138650-138652, 138654, 138659-138660, 138662-138663, 138667-138671, 138674-138677, 138680-138689, 138691, 138695-138696, 138701-138702, 138704-138705, 138709, 138712, 138714-138717, 138720-138723, 138725-138728, 138731-138732, 138734-138739, 138741-138744, 138747-138751, 138754, 138760, 138762, 138765-138766, 138769, 138774-138781, 138783-138789, 138794, 138797, 138801, 138805-138812, 138814-138816, 138818-138820, 138822, 138824, 138826-138830, 138836, 138838, 138842, 138844-138846, 138848, 138851-138854, 138856-138859, 138864-138869, 138871, 138873, 138878-138882, 138885-138886, 138889-138891, 138893, 138904, 138911-138912, 138914-138915, 138918-138920, 138922-138924, 138927-138930, 138932, 138934, 138936, 138939-138943, 138945-138948, 138950-138952, 138955-138956, 138958-138962, 138965, 138967-138968, 138972-138983, 138986-138988, 138990, 138992-138993, 138995-138998, 139000, 139002, 139004-139010, 139013, 139016-139019, 139021, 139024-139025, 139029, 139031, 139033, 139036, 139038-139040, 139045-139046, 139048-139051, 139054-139055, 139058-139060, 139062-139067, 139069-139070, 139073-139076, 139083, 139087, 139091, 139094, 139096-139098, 139100, 139102-139103, 139105, 139112-139113, 139115, 139119, 139122, 139124, 139131, 139133, 139135-139137, 139139, 139143-139146, 139148-139149, 139152-139153, 139156-139157, 139159-139168, 139172-139174, 139176-139179, 139186, 139192-139193, 139195, 139197-139200, 139206, 139210, 139212-139213, 139217-139219, 139221-139222, 139224-139228, 139235, 139237-139241, 139243-139244, 139247, 139249-139254, 139258-139260, 139263-139264, 139266-139275, 139279, 139281-139282, 139285, 139290-139291, 139295, 139299, 139301-139302, 139304-139305, 139307, 139310, 139312, 139314, 139316-139319, 139322, 139324, 139328-139329, 139331-139337, 139339-139344, 139346, 139349-139351, 139353, 139355-139356, 139359, 139361, 139363-139368, 139370-139375, 139377, 139380, 139383-139384, 139387, 139389, 139391-139392, 139396-139398, 139400, 139402, 139404-139407, 139409-139410, 139415, 139417-139419, 139421-139422, 139425-139430, 139432-139433, 139440, 139443-139444, 139454-139455, 139457-139458, 139460-139473, 139475, 139477, 139479-139482, 139484-139487, 139489, 139492, 139496-139498, 139500-139501, 139503, 139505-139513, 139516-139517, 139519-139520, 139522-139523, 139525, 139527, 139529, 139531-139537, 139543, 139546-139547, 139551-139554, 139556-139559, 139561, 139564-139567, 139569-139576, 139579, 139583-139585, 139587-139589, 139591-139592, 139594-139596, 139598-139604, 139606-139609, 139611-139615, 139617-139621, 139623, 139625, 139627, 139629, 139631-139633, 139636-139637, 139639-139642, 139644-139648, 139650-139652, 139654, 139656, 139658-139659, 139662-139668, 139671, 139673, 139677-139687, 139694, 139697, 139700, 139703-139706, 139709, 139712, 139714-139718, 139721, 139723, 139727, 139729-139730, 139733, 139737-139740, 139742-139743, 139752-139753, 139755, 139757-139758, 139761-139762, 139765-139767, 139772-139775, 139777-139778, 139780-139781, 139783-139785, 139789-139790, 139792, 139794-139795, 139799-139800, 139804-139805, 139807-139808, 139810-139812, 139814-139822, 139827-139830, 139834-139835, 139837, 139839, 139841-139842, 139844-139848, 139850, 139852, 139856, 139858, 139860, 139862-139866, 139868-139871, 139875, 139878, 139885, 139887-139891, 139893-139894, 139896-139900, 139902-139907, 139910, 139912-139913, 139915-139916, 139918, 139920, 139922, 139924-139925, 139931-139932, 139935, 139938-139939, 139942, 139944-139945, 139947, 139950, 139956-139957, 139959-139963, 139968-139976, 139979, 139983, 139986-139990, 139992, 139994, 139996-140005, 140007-140010, 140012, 140014, 140017, 140021-140023, 140026-140028, 140030-140034, 140038, 140040, 140042, 140044, 140046-140058, 140060-140063, 140065-140071, 140073-140075, 140077-140079, 140081-140083, 140086, 140089, 140093, 140095-140101, 140103, 140105, 140107-140109, 140111-140112, 140114-140122, 140125, 140132, 140134-140135, 140137-140138, 140140-140142, 140145-140146, 140152-140153, 140156, 140159-140167, 140169-140171, 140173, 140175-140177, 140179-140180, 140184-140185, 140187-140189, 140193-140194, 140196-140199, 140202-140203, 140205-140208, 140215-140218, 140223-140227, 140229, 140231-140233, 140236-140238, 140242-140243, 140246-140250, 140252, 140254-140258, 140260-140261, 140263, 140265, 140269, 140272-140273, 140276, 140279, 140281-140287, 140289-140293, 140295-140296, 140298-140300, 140302-140303, 140305-140309, 140316-140319, 140321, 140323-140324, 140326-140327, 140329, 140332-140333, 140335-140336, 140340, 140343, 140345, 140352, 140354-140358, 140360, 140362-140364, 140367-140368, 140371, 140373, 140377-140379, 140383-140386, 140388-140389, 140391-140392, 140398, 140401, 140403-140404, 140407, 140411-140415, 140418-140421, 140423, 140425, 140427, 140429-140430, 140435, 140437-140441, 140443-140444, 140446-140450, 140452-140457, 140459-140467, 140471-140474, 140477, 140479-140480, 140483-140486, 140488-140490, 140492, 140496, 140499, 140501-140506, 140508-140511, 140515-140519, 140522, 140524-140527, 140529, 140534-140535, 140541-140542, 140544-140552, 140556-140559, 140562, 140566-140567, 140571, 140573, 140576, 140578-140579, 140581, 140583-140588, 140591-140592, 140594, 140596-140607, 140609, 140612-140615, 140618-140621, 140623-140624, 140626, 140629, 140631, 140633, 140636-140640, 140643-140648, 140650-140651, 140653, 140656-140657, 140660-140661, 140666-140670, 140672, 140674, 140677-140678, 140680-140681, 140683-140693, 140697, 140699, 140701, 140703-140704, 140706, 140708-140711, 140714-140718, 140722, 140724-140725, 140727-140728, 140730, 140732, 140735-140739, 140742, 140745-140748, 140751-140756, 140761, 140765-140767, 140769, 140772, 140774, 140776-140788, 140790-140791, 140801-140802, 140805-140810, 140814-140817, 140819-140821, 140823, 140825, 140827-140829, 140831, 140833, 140836-140841, 140844-140846, 140848-140860, 140863-140864, 140868-140869, 140871-140873, 140875-140878, 140881, 140885, 140887, 140889, 140891-140893, 140896-140898, 140900, 140903, 140905, 140908-140919, 140923, 140925-140926, 140930, 140933-140935, 140939-140941, 140944-140945, 140947-140949, 140951, 140954-140957, 140959, 140964-140965, 140967, 140969, 140971-140972, 140974-140978, 140980-140982, 140984-140985, 140987-140989, 140991, 140993, 140997-141000, 141002-141003, 141005-141012, 141014-141020, 141023, 141025-141030, 141032-141034, 141039, 141042-141049, 141055-141060, 141067-141071, 141075, 141078-141081, 141085-141088, 141091, 141094, 141096-141103, 141105-141110, 141112, 141114-141116, 141118-141120, 141122-141129, 141134, 141136, 141141-141145, 141147-141149, 141152-141157, 141159, 141161-141162, 141164, 141166, 141170-141171, 141173, 141176-141177, 141179-141181, 141183-141185, 141187, 141190, 141193, 141195, 141199-141200, 141205-141206, 141210-141211, 141218, 141221-141225, 141228-141232, 141234-141237, 141240-141241, 141246-141251, 141253, 141255-141256, 141258, 141261, 141263-141266, 141269, 141271, 141273-141275, 141278, 141282, 141287-141289, 141291-141295, 141299-141300, 141302, 141304-141305, 141307, 141309-141310, 141312-141314, 141317, 141319-141321, 141325, 141327, 141330-141332, 141334, 141339-141342, 141344-141346, 141348-141350, 141352-141359, 141365-141366, 141368-141369, 141371, 141373, 141375-141377, 141381, 141383-141386, 141388-141390, 141393-141396, 141399, 141401-141403, 141407-141408, 141410-141411, 141413, 141415-141417, 141419-141420, 141427-141429, 141431-141433, 141435-141438, 141440, 141442, 141444-141447, 141449, 141451-141453, 141455, 141460, 141464-141467, 141471-141473, 141476, 141478, 141483-141484, 141487, 141489-141493, 141497-141499, 141501-141505, 141508-141512, 141515-141516, 141520, 141522, 141528-141531, 141533, 141535, 141538-141543, 141546, 141548-141549, 141551, 141553-141554, 141556-141558, 141560-141561, 141565-141568, 141571-141573, 141575-141577, 141580, 141584, 141586-141590, 141593-141599, 141601, 141603, 141606, 141614, 141617, 141623, 141625-141626, 141632, 141634-141638, 141640, 141642-141645, 141648-141650, 141655-141657, 141659, 141661-141665, 141669, 141671, 141673, 141675-141677, 141682-141684, 141687-141689, 141692-141695, 141698-141700, 141702, 141704-141706, 141708-141710, 141712-141713, 141715-141718, 141720, 141723, 141725-141727, 141729, 141731-141737, 141740-141742, 141745-141753, 141759-141764, 141766-141767, 141769, 141773-141774, 141776, 141778, 141781-141785, 141791-141792, 141797-141804, 141808-141810, 141816, 141819, 141821-141822, 141824, 141826, 141828, 141830, 141833-141835, 141838, 141841-141846, 141849, 141851, 141853-141854, 141859-141860, 141862, 141868-141869, 141871, 141875-141882, 141884-141885, 141887-141889, 141891-141894, 141896, 141898-141900, 141902-141909, 141911-141912, 141914, 141916-141917, 141919-141922, 141925-141926, 141928-141929, 141931-141933, 141935-141940, 141942, 141946-141949, 141951, 141954-141957, 141959, 141963-141965, 141969, 141971, 141975, 141979, 141982-141991, 141993, 141997, 142001-142003, 142005-142012, 142014-142016, 142018, 142020-142027, 142030-142031, 142036-142045, 142047, 142049-142050, 142052-142054, 142056-142058, 142060, 142063-142066, 142072-142077, 142079-142083, 142085-142090, 142092-142096, 142098-142101, 142103, 142106-142112, 142116, 142119-142120, 142122, 142124, 142128, 142130, 142134, 142136, 142138-142144, 142152, 142156, 142159-142162, 142164, 142166-142169, 142171-142175, 142177-142178, 142180-142182, 142187-142197, 142199-142200, 142204-142211, 142214, 142216-142217, 142219, 142221-142232, 142234-142235, 142239-142240, 142244-142246, 142248-142257, 142259-142263, 142265, 142267-142272, 142274, 142281-142282, 142284, 142287-142288, 142291-142294, 142297-142298, 142300-142303, 142305-142306, 142308, 142310, 142313-142321, 142323, 142325, 142327-142332, 142334-142335, 142338-142339, 142341, 142343-142344, 142347-142349, 142351-142353, 142356, 142359-142364, 142370-142371, 142375, 142378-142380, 142383, 142386-142390, 142393-142394, 142397-142398, 142400-142402, 142404-142408, 142411-142418, 142420-142425, 142427-142429, 142431-142441, 142443-142444, 142449, 142451-142457, 142459-142461, 142464, 142467-142469, 142472-142476, 142478-142479, 142481, 142484, 142486-142488, 142490, 142492-142495, 142498, 142501-142512, 142514-142519, 142521-142522, 142528, 142532-142533, 142535-142538, 142540-142554, 142556-142560, 142563-142566, 142568, 142570-142571, 142573, 142575-142579, 142581-142582, 142584-142585, 142587-142612, 142614-142621, 142623-142625, 142627-142628, 142630, 142632-142634, 142636, 142638-142645, 142648-142651, 142653-142654, 142656-142658, 142661-142663, 142665, 142668-142669, 142671-142674, 142680-142687, 142689-142692, 142694-142696, 142698, 142701, 142704-142708, 142710-142715, 142718, 142720-142724, 142728, 142732-142734, 142736-142738, 142740-142748, 142750-142751, 142755-142763, 142766-142767, 142769-142772, 142774, 142776-142780, 142782-142789, 142791-142794, 142796, 142799, 142802, 142804, 142806-142808, 142810, 142812-142814, 142816, 142818-142820, 142823-142825, 142831-142832, 142834-142836, 142838-142841, 142843, 142845-142851, 142855, 142857-142864, 142866-142872, 142874-142875, 142878-142879, 142881-142888, 142890-142891, 142893-142895, 142898-142900, 142903-142904, 142906-142907, 142917-142918, 142920, 142923-142925, 142927, 142929-142930, 142932, 142934-142935, 142937-142942, 142944-142946, 142948-142951, 142956-142957, 142959, 142961, 142963, 142965, 142967-142973, 142975-142981, 142983-142989, 142994-142995, 143000-143001, 143003, 143007, 143009-143011, 143013, 143015-143024, 143026-143036, 143039-143042, 143044, 143046-143052, 143055-143058, 143062-143071, 143074-143075, 143077, 143079, 143081-143082, 143085, 143087, 143089-143095, 143100, 143102-143103, 143105, 143107, 143110-143112, 143114-143115, 143122, 143124, 143126-143133, 143139-143142, 143144-143147, 143149, 143151, 143153, 143157-143158, 143160, 143162, 143164, 143167-143171, 143173-143174, 143176, 143179-143184, 143188-143191, 143199-143202, 143206, 143210, 143219-143224, 143227, 143229, 143233-143234, 143237, 143241, 143243, 143245-143251, 143253-143254, 143257, 143259, 143269, 143275-143279, 143281, 143286, 143288, 143297-143304, 143306, 143312, 143314-143316, 143318, 143320, 143323, 143325, 143329-143330, 143332-143334, 143336, 143339, 143342, 143344-143345, 143348, 143351, 143353, 143355-143357, 143360-143361, 143363-143365, 143367, 143370, 143372-143374, 143379, 143383-143385, 143387-143395, 143401-143402, 143405, 143408, 143410, 143415-143417, 143422-143427, 143431-143433, 143436-143438, 143440-143443, 143445-143447, 143449-143451, 143459-143460, 143462-143469, 143472-143474, 143476-143477, 143480, 143482-143483, 143486-143487, 143492-143493, 143499-143500, 143504, 143506-143507, 143510, 143513-143515, 143517-143522, 143524-143525, 143527-143533, 143535-143536, 143539-143540, 143543, 143546-143557, 143562, 143564-143571, 143573, 143578, 143580-143585, 143588-143595, 143599, 143604, 143606, 143609-143610, 143612-143613, 143617-143621, 143624, 143629-143635, 143637, 143639-143646, 143650, 143654, 143656-143658, 143663-143671, 143673, 143675-143680, 143685-143687, 143689-143692, 143694-143701, 143705, 143710, 143712-143720, 143722-143723, 143726, 143728-143731, 143733-143734, 143738, 143740-143743, 143745, 143749-143751, 143755, 143758-143761, 143764-143766, 143769, 143772-143773, 143775-143777, 143781, 143783-143784, 143792-143793, 143796-143797, 143801-143804, 143807-143811, 143814-143817, 143819-143820, 143822-143826, 143829, 143835-143837, 143841-143843, 143845-143855, 143859, 143862-143868, 143870-143874, 143876, 143878-143882, 143884-143886, 143888, 143892-143893, 143895, 143897-143898, 143900, 143902-143903, 143905-143909, 143911-143912, 143914-143918, 143920, 143923-143924, 143926-143928, 143937, 143939-143942, 143944-143945, 143947-143950, 143954-143957, 143959-143961, 143963-143965, 143967-143969, 143971-143972, 143974, 143978-143980, 143983, 143985, 143987, 143989, 143992-143997, 143999, 144001-144007, 144009, 144012-144013, 144015-144016, 144018-144020, 144022-144024, 144026-144032, 144034-144036, 144038, 144041-144046, 144048-144050, 144053-144056, 144058-144060, 144062, 144064, 144066-144076, 144079-144083, 144085-144097, 144099-144106, 144108-144110, 144113, 144115, 144117, 144119-144121, 144126, 144128-144129, 144132-144134, 144139-144144, 144146-144149, 144152, 144157, 144159, 144161, 144163-144165, 144168-144169, 144171-144172, 144174-144180, 144182, 144184, 144187-144201, 144203-144204, 144209, 144211-144213, 144215-144217, 144219, 144221, 144223-144224, 144226, 144228-144229, 144232, 144234-144236, 144239, 144241, 144243, 144245-144248, 144250-144252, 144256-144257, 144259-144264, 144267-144272, 144274, 144276, 144281, 144283, 144286-144287, 144289, 144291, 144293, 144295-144296, 144301-144302, 144307, 144311-144318, 144320-144330, 144333, 144336-144342, 144348, 144351-144352, 144354, 144356-144358, 144360, 144367-144368, 144370, 144373-144377, 144381-144382, 144384, 144386, 144388-144392, 144395-144399, 144401-144403, 144405-144407, 144409-144410, 144413, 144417, 144421-144423, 144426-144427, 144429-144439, 144441-144445, 144447-144448, 144450, 144454, 144456, 144458, 144460, 144462-144463, 144465, 144467, 144470-144478, 144480-144485, 144487-144493, 144495-144497, 144499, 144501-144504, 144506, 144508-144512, 144514, 144516-144525, 144528-144531, 144535-144539, 144542-144543, 144545, 144549, 144551, 144553, 144561, 144565, 144567-144571, 144574-144577, 144579, 144582, 144585-144586, 144589, 144593, 144596, 144598, 144600, 144603, 144605, 144608-144612, 144614, 144618-144619, 144624, 144627, 144629-144631, 144633, 144635-144640, 144642, 144644-144648, 144650-144651, 144654-144658, 144660-144662, 144664-144668, 144670-144677, 144679, 144681, 144683, 144685-144686, 144688-144689, 144692-144701, 144705, 144707-144708, 144714, 144717, 144721, 144725-144727, 144730-144732, 144734, 144736-144738, 144742-144745, 144747, 144749-144750, 144754, 144756, 144758, 144760, 144762-144765, 144767-144768, 144770-144775, 144778-144784, 144786-144787, 144789, 144791-144792, 144795-144798, 144800, 144802, 144804-144806, 144809, 144811, 144813, 144815-144817, 144820, 144822, 144825-144830, 144832-144833, 144835-144837, 144839-144840, 144842-144848, 144851-144858, 144860-144861, 144863-144864, 144866, 144868-144869, 144871-144872, 144875-144877, 144879, 144882-144887, 144889, 144893, 144895-144900, 144902-144908, 144910, 144912-144914, 144916-144920, 144922-144923, 144925-144926, 144928-144929, 144931, 144933-144937, 144940-144942, 144944-144945, 144947-144949, 144952-144954, 144956-144961, 144963-144965, 144967-144968, 144970, 144973-144976, 144979-144981, 144983, 144985-144990, 144996-145000, 145002, 145004-145005, 145007-145008, 145010-145013, 145018-145020, 145022-145025, 145027-145030, 145034-145038, 145040, 145046-145048, 145050, 145052-145053, 145055, 145058, 145060-145061, 145064-145069, 145071-145072, 145074, 145076-145089, 145091-145095, 145099-145100, 145102-145104, 145107-145109, 145112-145114, 145116-145126, 145129-145131, 145133-145135, 145138-145139, 145141, 145143, 145145-145146, 145149-145150, 145152-145158, 145161-145164, 145166-145170, 145172-145173, 145175, 145177-145178, 145182-145186, 145191-145199, 145201-145202, 145204-145212, 145215-145224, 145226, 145228, 145230, 145232-145235, 145237-145239, 145241-145243, 145249-145251, 145253-145259, 145261-145262, 145265-145266, 145268, 145270, 145272-145275, 145277, 145280-145284, 145287, 145289-145292, 145294-145298, 145301, 145305, 145307-145313, 145315-145322, 145324, 145327-145329, 145332, 145335, 145339-145348, 145352-145353, 145355-145361, 145363, 145365-145369, 145371, 145374-145375, 145378-145384, 145388-145392, 145394-145399, 145404-145407, 145409, 145413-145416, 145418-145421, 145423-145430, 145434-145435, 145438-145441, 145444, 145448-145451, 145453, 145457-145463, 145467, 145470, 145472, 145474-145475, 145477, 145479, 145481, 145483-145493, 145495, 145501-145505, 145511-145512, 145516, 145519-145520, 145522-145523, 145525, 145527-145532, 145534, 145538-145545, 145556-145557, 145562, 145565, 145571-145574, 145576-145577, 145579-145584, 145586-145592, 145597-145600, 145603, 145606, 145609-145610, 145612, 145614, 145616-145617, 145619-145623, 145627-145641, 145644-145651, 145653-145654, 145657, 145665, 145670-145675, 145678, 145681-145686, 145689, 145693, 145695-145705, 145707-145710, 145712-145717, 145719, 145721, 145724-145725, 145727-145728, 145732-145738, 145745, 145751, 145754, 145756-145759, 145761-145762, 145764-145772, 145774-145779, 145781-145783, 145785, 145787-145793, 145796-145797, 145799-145800, 145802, 145805-145810, 145812-145833, 145835-145836, 145839-145840, 145842, 145844-145847, 145851-145853, 145855-145862, 145864-145867, 145869-145870, 145873, 145876, 145880-145883, 145885-145889, 145891-145894, 145896-145897, 145899, 145906-145916, 145918-145920, 145924, 145927-145935, 145937-145939, 145942, 145945-145946, 145948-145953, 145955, 145957, 145959-145962, 145964, 145966, 145968-145969, 145971-145972, 145974, 145976, 145979-145981, 145983, 145985-145986, 145989-145994, 145996, 145998-146004, 146006, 146009, 146011-146012, 146019-146030, 146032-146034, 146036, 146038-146039, 146042-146051, 146053-146054, 146057, 146059-146063, 146065, 146067-146068, 146070-146072, 146075-146076, 146080-146082, 146084, 146086, 146088-146089, 146091, 146093-146094, 146096, 146098-146102, 146104-146106, 146108-146109, 146111-146112, 146114-146120, 146122-146125, 146130, 146132-146135, 146137, 146140-146143, 146145, 146147-146150, 146152-146153, 146155-146157, 146159, 146162, 146165-146166, 146168-146169, 146175-146176, 146178-146184, 146186, 146189, 146192-146201, 146203, 146205, 146207-146208, 146214, 146219-146221, 146226, 146228-146230, 146236, 146240, 146242-146244, 146248-146250, 146252-146255, 146258-146259, 146261-146263, 146265-146270, 146272, 146274, 146278-146281, 146285-146289, 146291-146292, 146294-146301, 146306, 146308-146316, 146318-146319, 146322, 146324-146326, 146332-146334, 146336-146337, 146339, 146345, 146347, 146349-146351, 146353-146354, 146357-146366, 146368-146371, 146374, 146378, 146381-146382, 146384-146385, 146387-146388, 146390, 146394-146397, 146399, 146401-146402, 146404-146408, 146410, 146418-146419, 146421-146425, 146427, 146429-146433, 146436, 146438, 146441-146443, 146447-146451, 146454-146461, 146463, 146466-146469, 146471, 146473-146475, 146478-146479, 146481, 146483, 146486, 146488, 146492, 146494, 146498-146500, 146502-146503, 146505-146507, 146509-146514, 146516, 146518, 146520-146524, 146526-146527, 146532, 146534-146539, 146541, 146543, 146549-146552, 146554-146557, 146559-146562, 146564-146565, 146567-146574, 146576-146577, 146579-146582, 146584-146585, 146587-146592, 146596, 146599, 146601-146603, 146611-146614, 146616-146620, 146622, 146624, 146626-146627, 146629-146632, 146634-146636, 146638, 146640-146641, 146644-146645, 146648-146651, 146655-146665, 146669, 146671-146672, 146676, 146678, 146681-146682, 146684-146685, 146688, 146690-146691, 146693-146699, 146701, 146703-146704, 146706-146710, 146712-146716, 146719-146720, 146726, 146728, 146730, 146733, 146735-146736, 146739-146742, 146745, 146747, 146751-146763, 146766-146767, 146769-146771, 146773-146774, 146780-146781, 146785-146792, 146797, 146800, 146802-146806, 146808, 146811, 146813, 146816, 146818-146822, 146826-146827, 146829, 146831-146832, 146834, 146837-146839, 146842, 146844, 146846-146849, 146853, 146855-146859, 146862-146865, 146868-146870, 146872-146874, 146876, 146880-146892, 146894-146899, 146902-146904, 146906, 146908-146910, 146915-146919, 146921, 146923-146928, 146935-146939, 146941, 146943, 146946, 146948, 146950-146952, 146954-146957, 146962, 146964-146971, 146973-146977, 146981, 146983, 146985-146986, 146988-146989, 146991, 146993-146996, 146998-147005, 147007-147012, 147014-147020, 147022, 147025-147027, 147029-147032, 147034-147046, 147049, 147051-147056, 147058-147063, 147065-147066, 147069-147075, 147078-147082, 147086, 147089-147090, 147092, 147094, 147096-147099, 147101-147107, 147109, 147111, 147114-147117, 147120, 147123-147128, 147130-147132, 147134-147137, 147139-147140, 147142-147145, 147147-147157, 147160, 147162, 147166-147168, 147171-147182, 147185, 147187-147188, 147191, 147194-147196, 147199-147202, 147205, 147208-147215, 147218-147229, 147232-147235, 147237, 147240, 147242, 147244-147248, 147250, 147252, 147254-147257, 147259, 147261-147265, 147267, 147269-147270, 147273-147279, 147281-147282, 147284-147285, 147289, 147292-147298, 147300-147306, 147308-147312, 147314-147318, 147320, 147323-147325, 147327, 147329-147334, 147336-147338, 147340-147351, 147353-147354, 147356-147357, 147359-147360, 147363-147365, 147368-147376, 147378, 147382-147384, 147386, 147388, 147391-147404, 147406-147407, 147413, 147416-147420, 147423-147429, 147433, 147435-147437, 147440-147441, 147444, 147449, 147453-147455, 147458, 147460-147461, 147463, 147466-147467, 147469, 147471-147474, 147477-147479, 147481, 147483, 147488, 147492, 147496, 147503-147506, 147508-147509, 147514-147515, 147517, 147521, 147523-147524, 147530-147533, 147535-147536, 147538-147539, 147546-147547, 147552-147555, 147557-147558, 147560-147561, 147568-147570, 147572, 147576-147588, 147590-147592, 147594-147595, 147597-147598, 147602-147603, 147610, 147612, 147614-147617, 147619, 147623, 147626-147632, 147634-147635, 147638, 147640-147642, 147644-147647, 147650, 147652-147669, 147671, 147673-147674, 147677-147682, 147684-147685, 147687-147690, 147692-147694, 147698-147700, 147702, 147704, 147706-147707, 147709-147711, 147713-147715, 147719-147726, 147728, 147734-147743, 147745-147748, 147754-147764, 147766-147769, 147771-147774, 147776-147780, 147783-147793, 147795, 147798, 147800-147802, 147804-147806, 147809, 147815-147816, 147818, 147820-147822, 147825-147829, 147831-147834, 147836, 147839-147840, 147845-147849, 147853-147854, 147856, 147858-147859, 147864-147866, 147869-147870, 147878-147879, 147881, 147884-147885, 147887-147893, 147895, 147898-147900, 147903-147904, 147906-147908, 147911-147913, 147916-147924, 147927-147929, 147931-147933, 147935, 147938, 147943-147944, 147950, 147952, 147954, 147956-147959, 147961, 147963-147964, 147970, 147972-147980, 147982-147983, 147985-147986, 147988, 147990-147992, 147995-148003, 148006-148009, 148011-148018, 148020-148025, 148027-148032, 148034-148035, 148038, 148040-148042, 148044-148048, 148051, 148053-148057, 148061-148063, 148065, 148067-148069, 148071, 148074, 148076, 148080, 148085, 148088-148089, 148091-148093, 148096-148097, 148099, 148101, 148103-148107, 148112-148114, 148116-148118, 148121, 148125-148129, 148132-148139, 148143-148145, 148147-148150, 148153, 148155-148157, 148161-148169, 148171, 148174-148176, 148181-148184, 148187-148188, 148190-148191, 148193-148195, 148197-148198, 148201-148205, 148208, 148210, 148212-148214, 148218, 148227, 148229, 148233-148236, 148238-148242, 148244-148246, 148248-148254, 148256-148258, 148261-148264, 148267-148268, 148270, 148272-148274, 148276-148277, 148279, 148286-148293, 148295, 148297-148298, 148300, 148302-148306, 148308-148319, 148321-148322, 148328-148332, 148335-148345, 148347-148350, 148354, 148357-148367, 148370-148374, 148376-148379, 148384-148386, 148388, 148391-148394, 148399-148401, 148403-148405, 148409-148419, 148421-148424, 148426-148433, 148435, 148437-148439, 148442, 148444-148447, 148449-148450, 148452-148453, 148458, 148460-148461, 148464-148465, 148467, 148469-148470, 148473, 148476-148479, 148482, 148486-148487, 148492-148493, 148495-148496, 148498-148499, 148502-148514, 148516, 148519-148523, 148525-148526, 148528, 148530, 148532-148534, 148537-148539, 148541-148553, 148555, 148562-148566, 148568-148571, 148577, 148579-148584, 148586, 148589-148590, 148592-148595, 148598, 148600-148605, 148608, 148612, 148615, 148617, 148622-148624, 148626-148628, 148631, 148634-148643, 148646, 148648-148653, 148656, 148661-148670, 148672-148676, 148681, 148684-148685, 148687, 148692-148695, 148697, 148705-148706, 148708, 148710, 148714, 148716-148719, 148723-148724, 148726, 148729, 148732, 148734-148735, 148737, 148739-148752, 148754-148756, 148760-148761, 148768-148775, 148778-148781, 148784-148786, 148788, 148791-148792, 148794, 148796-148797, 148800-148801, 148804-148810, 148812-148816, 148820-148826, 148829-148830, 148832, 148834, 148836-148840, 148842-148846, 148848, 148851-148852, 148854, 148856, 148859, 148862, 148866, 148869, 148871-148875, 148882-148884, 148886-148887, 148889-148892, 148896, 148900-148901, 148903, 148905-148908, 148910-148914, 148917-148920, 148922-148923, 148925, 148928, 148935, 148938-148949, 148953-148963, 148966-148969, 148972-148973, 148977-148983, 148985-148988, 148990-148991, 148993, 148995-148996, 148998-149000, 149006, 149008-149009, 149012, 149015-149020, 149024, 149026-149033, 149035-149036, 149038, 149042-149047, 149049, 149051, 149053, 149056, 149058, 149061-149063, 149067, 149069-149070, 149072, 149076-149080, 149083-149085, 149089-149090, 149093-149094, 149098-149099, 149101-149105, 149108, 149110, 149112-149113, 149117-149119, 149122, 149124-149131, 149134-149141, 149143-149144, 149146, 149149-149155, 149157-149159, 149161, 149163-149166, 149168-149170, 149173, 149175, 149182-149189, 149193, 149195-149200, 149202, 149205, 149207-149213, 149218-149219, 149222-149224, 149226-149227, 149230-149237, 149240-149242, 149244-149245, 149247, 149249, 149251, 149254-149255, 149258-149259, 149261-149266, 149269, 149272, 149274-149276, 149279-149280, 149287-149288, 149291-149293, 149295-149300, 149302, 149306, 149308, 149310-149313, 149315-149318, 149326-149333, 149335-149336, 149338-149340, 149342, 149344, 149349-149351, 149353-149358, 149360-149369, 149371, 149373, 149375-149376, 149378, 149381-149383, 149385-149386, 149390-149392, 149395, 149397, 149399, 149401, 149404-149405, 149407-149409, 149412, 149414-149424, 149426, 149428-149431, 149433-149435, 149440, 149443, 149445, 149450, 149453-149454, 149456-149458, 149461-149462, 149464, 149467-149470, 149472-149473, 149477-149482, 149486-149494, 149496-149500, 149504, 149507, 149511-149512, 149514-149516, 149518, 149520, 149523, 149528, 149535, 149539-149544, 149548-149557, 149560-149561, 149566, 149568-149572, 149576, 149578, 149580, 149583, 149586-149590, 149592, 149596, 149600, 149602-149606, 149609, 149611, 149614-149616, 149618-149633, 149635-149638, 149640-149641, 149647-149648, 149650, 149653, 149655-149656, 149658-149659, 149661-149666, 149673, 149675-149676, 149679, 149681-149682, 149685-149686, 149690-149692, 149694-149696, 149698, 149700-149701, 149703-149707, 149709-149711, 149713-149714, 149716-149720, 149722-149723, 149728, 149730, 149732-149734, 149736-149737, 149739-149741, 149743-149744, 149748-149750, 149752, 149754, 149757-149773, 149775-149777, 149780, 149782-149788, 149792, 149794-149799, 149801-149804, 149806, 149809-149810, 149812-149814, 149818-149822, 149827, 149829, 149831-149832, 149834-149837, 149840-149844, 149846-149849, 149851-149854, 149858-149861, 149863, 149867-149868, 149870-149872, 149875, 149877, 149881-149882, 149884, 149886, 149890, 149893-149897, 149900, 149906-149910, 149912-149914, 149918-149923, 149926-149932, 149936-149937, 149939, 149941-149946, 149948, 149950-149955, 149961-149962, 149965-149971, 149973-149974, 149977, 149979, 149981, 149983, 149985-149987, 149989-149990, 149994, 150001-150003, 150008-150009, 150011, 150013, 150015-150016, 150018-150020, 150022, 150024-150028, 150032, 150036-150038, 150040, 150043, 150045-150046, 150049, 150052, 150054-150055, 150059-150062, 150065-150069, 150077-150078, 150081, 150083-150087, 150089, 150091-150093, 150095, 150097-150098, 150101-150102, 150104-150105, 150107, 150109, 150112, 150114-150115, 150117-150119, 150122-150128, 150134-150136, 150138-150147, 150149, 150151, 150154-150158, 150160-150162, 150164-150165, 150168-150171, 150174, 150177-150178, 150180-150181, 150183, 150185, 150187-150190, 150193-150194, 150197-150202, 150204, 150208, 150210-150211, 150213-150216, 150218-150225, 150227, 150229-150230, 150234-150236, 150238-150239, 150241-150242, 150245-150246, 150250, 150252-150255, 150257-150258, 150263, 150266, 150268-150276, 150278-150280, 150282-150284, 150291, 150293-150294, 150296, 150298-150299, 150304-150305, 150307-150309, 150311, 150313, 150315-150319, 150325, 150327-150330, 150332-150336, 150340-150349, 150351, 150353, 150355-150357, 150359-150360, 150363-150364, 150367-150371, 150379, 150386-150387, 150389-150392, 150394, 150396, 150398-150407, 150409-150411, 150413-150414, 150416-150418, 150421-150422, 150424, 150427, 150429-150431, 150435-150437, 150439, 150441, 150443, 150448-150451, 150453, 150455-150457, 150460-150461, 150464-150465, 150468-150470, 150474-150477, 150480, 150482, 150484, 150486-150487, 150489, 150492-150493, 150495-150497, 150499-150502, 150504, 150512-150514, 150516-150518, 150520, 150522-150534, 150536-150543, 150546, 150548, 150553-150562, 150564, 150566, 150568-150571, 150573-150577, 150579-150580, 150583-150584, 150586-150587, 150589, 150594-150596, 150598, 150601-150602, 150606, 150608-150610, 150613, 150616-150622, 150624-150627, 150630, 150632-150635, 150637, 150639-150642, 150644-150647, 150649-150655, 150657, 150659-150661, 150663-150664, 150666, 150669-150671, 150673-150674, 150676, 150678, 150681-150686, 150688-150689, 150691-150692, 150694, 150697, 150701-150702, 150704-150706, 150709-150719, 150721-150723, 150725-150727, 150729, 150732, 150734-150736, 150738-150740, 150742-150745, 150747, 150749-150759, 150765, 150767-150771, 150773-150774, 150776-150778, 150780, 150783-150785, 150787-150788, 150790-150792, 150794-150796, 150798-150802, 150805-150807, 150810-150811, 150813-150815, 150817, 150819, 150821-150823, 150827-150831, 150833, 150836-150837, 150839-150840, 150842, 150847, 150850, 150854-150855, 150858-150859, 150862, 150865, 150867-150870, 150873-150879, 150881, 150883-150885, 150887, 150891-150892, 150894-150895, 150898-150905, 150907-150909, 150911-150912, 150914-150915, 150917-150921, 150923, 150925-150926, 150928-150930, 150933-150934, 150943-150948, 150950-150954, 150956-150960, 150962-150963, 150965, 150967-150968, 150972-150974, 150977-150980, 150984, 150987, 150989-150991, 150993-150995, 150997-150999, 151001, 151003, 151005, 151007, 151009-151011, 151013-151014, 151016, 151018-151020, 151024, 151027, 151030-151034, 151036, 151038-151039, 151042, 151047-151051, 151054, 151056-151057, 151059-151062, 151065-151068, 151070-151072, 151076-151084, 151086-151087, 151091, 151095-151097, 151100, 151102-151110, 151116, 151118-151122, 151124-151134, 151136, 151138, 151149-151151, 151154-151155, 151160, 151163-151164, 151167-151171, 151174, 151176-151177, 151180-151186, 151188-151192, 151194-151195, 151197, 151203-151207, 151209-151214, 151217-151220, 151224, 151231, 151233-151242, 151245, 151247-151251, 151260, 151264-151269, 151271, 151273-151274, 151277-151284, 151287-151288, 151291-151297, 151301-151310, 151312-151313, 151316, 151318, 151322-151324, 151327, 151329, 151331-151333, 151339, 151344, 151346, 151348-151357, 151359-151361, 151363-151364, 151367-151368, 151370-151377, 151379, 151385, 151387-151390, 151393-151395, 151400, 151402-151403, 151405-151411, 151413-151424, 151426-151427, 151429-151432, 151436, 151438, 151440, 151442, 151445, 151447, 151450-151452, 151454-151460, 151462, 151464-151468, 151470, 151473-151474, 151476, 151478-151479, 151481-151482, 151484, 151487-151491, 151493-151502, 151506, 151510-151511, 151513-151515, 151518-151519, 151521-151523, 151525-151532, 151534, 151540, 151543-151544, 151546-151552, 151557, 151559-151560, 151562-151566, 151568, 151573-151579, 151583-151586, 151588-151594, 151596-151597, 151601, 151607-151608, 151611-151612, 151614-151620, 151622, 151624-151629, 151634, 151637, 151639-151642, 151645, 151649-151655, 151657, 151660-151665, 151667-151676, 151678-151680, 151682-151684, 151686-151687, 151690-151691, 151693-151695, 151697-151699, 151704-151705, 151707-151711, 151713-151716, 151719, 151723-151728, 151730, 151732-151737, 151739-151744, 151747, 151750-151756, 151759-151760, 151763, 151767-151768, 151770-151773, 151775, 151778, 151781-151783, 151785-151790, 151792, 151795-151799, 151801-151805, 151808-151813, 151816-151819, 151825-151828, 151831-151833, 151835-151836, 151838-151846, 151848-151850, 151853-151854, 151856, 151860-151861, 151863-151865, 151867, 151871, 151874-151875, 151878, 151880, 151885-151887, 151890, 151895-151901, 151904-151905, 151907-151908, 151912, 151915-151916, 151918-151925, 151927-151928, 151931, 151935, 151938-151939, 151941-151945, 151948-151950, 151952-151953, 151956-151957, 151962, 151965, 151967, 151970-151976, 151978-151980, 151982-151989, 151991-151992, 151995-151998, 152000-152002, 152004-152005, 152007-152009, 152012-152013, 152015, 152017, 152021-152025, 152028-152030, 152032, 152034, 152036-152041, 152045, 152047-152048, 152051-152053, 152056-152057, 152059-152061, 152063, 152065-152066, 152070-152071, 152073-152075, 152077-152078, 152081, 152084, 152086, 152091-152092, 152094-152095, 152097-152098, 152100-152104, 152106, 152109, 152111, 152113-152118, 152121-152122, 152125-152137, 152141-152143, 152145-152152, 152155, 152164, 152166, 152171, 152174-152176, 152182-152183, 152186, 152190-152191, 152193, 152197-152199, 152201-152203, 152205-152206, 152208-152213, 152217, 152221-152223, 152226-152228, 152230-152233, 152236-152238, 152240-152242, 152244-152253, 152256-152259, 152261, 152264, 152266-152267, 152269-152272, 152274-152279, 152281, 152284-152294, 152296-152297, 152299, 152301, 152303-152308, 152312-152313, 152315-152318, 152320, 152324-152329, 152331-152332, 152334-152337, 152339-152341, 152343-152349, 152351, 152353, 152355-152357, 152359, 152361-152363, 152370-152376, 152378, 152380, 152385, 152387-152397, 152399, 152401-152406, 152409, 152415, 152418-152419, 152421, 152427-152428, 152430-152432, 152434-152435, 152438, 152441-152442, 152445, 152447-152449, 152451-152452, 152454-152455, 152459, 152461-152468, 152470-152471, 152476-152482, 152484-152486, 152489-152492, 152494-152495, 152497-152502, 152504-152505, 152507-152508, 152511, 152514-152516, 152519-152521, 152523-152525, 152527-152528, 152532-152543, 152547-152549, 152551-152552, 152556-152558, 152561, 152563, 152566, 152569-152574, 152576-152578, 152583-152584, 152587, 152590-152591, 152594-152599, 152601-152604, 152608, 152613-152616, 152620, 152622-152624, 152626-152627, 152629, 152631, 152636, 152639-152640, 152648-152653, 152656, 152659, 152661-152664, 152667, 152669, 152672-152674, 152676-152680, 152682-152684, 152686, 152688-152689, 152691-152696, 152698, 152700, 152702-152704, 152706-152707, 152709, 152714, 152718, 152721-152722, 152724, 152729-152730, 152732-152734, 152736, 152738, 152740, 152742, 152745-152756, 152758-152762, 152764, 152766, 152768, 152772-152774, 152776-152779, 152783-152785, 152788, 152790-152792, 152794, 152796-152798, 152800-152802, 152805, 152807-152809, 152811, 152813, 152818, 152821-152824, 152826-152830, 152833-152834, 152837-152842, 152844, 152847-152856, 152858, 152860, 152862-152865, 152867, 152874, 152883, 152886-152890, 152895, 152897-152898, 152900-152903, 152906, 152908-152913, 152916, 152925-152931, 152933-152936, 152938-152939, 152941-152942, 152951, 152954-152960, 152962, 152964-152965, 152968, 152973-152976, 152980, 152982-152983, 152985-152986, 152989-152990, 152992-152999, 153001-153003, 153005, 153007, 153011-153012, 153018-153020, 153022-153023, 153026-153030, 153038, 153040, 153050, 153052, 153054, 153059-153062, 153064-153065, 153071-153072, 153074-153076, 153083-153085, 153087, 153089-153091, 153093, 153095-153096, 153099, 153101, 153104-153105, 153107-153109, 153111, 153114, 153116-153118, 153120, 153122-153123, 153127, 153129-153132, 153141, 153143-153149, 153151, 153154-153155, 153157, 153159-153166, 153169, 153171-153173, 153176-153177, 153179, 153181, 153183-153185, 153190, 153192, 153194, 153196-153198, 153200-153203, 153205-153206, 153208-153217, 153225-153226, 153228, 153232-153236, 153238-153241, 153243, 153246-153247, 153249-153250, 153253, 153256-153258, 153260, 153262, 153266-153268, 153270-153272, 153278-153283, 153288-153289, 153291-153297, 153299-153300, 153302-153303, 153309, 153311-153312, 153314-153316, 153319-153320, 153322-153328, 153330, 153332-153333, 153336, 153338-153341, 153343, 153349-153350, 153352, 153364, 153366-153370, 153372, 153374, 153376, 153380-153387, 153390-153393, 153395-153397, 153399, 153401-153408, 153410-153412, 153415, 153418-153420, 153423-153425, 153430, 153433-153435, 153438-153441, 153447, 153452-153458, 153460, 153462-153464, 153466-153467, 153469-153470, 153480, 153483-153484, 153486-153487, 153489, 153491-153496, 153498-153499, 153501-153502, 153505, 153508-153510, 153513-153520, 153522-153525, 153530-153532, 153535, 153537, 153540-153542, 153544-153545, 153547, 153550, 153552-153557, 153560, 153564, 153566, 153568, 153572-153573, 153577-153578, 153580, 153586-153587, 153589, 153591-153592, 153595, 153597, 153599, 153602, 153604-153609, 153612, 153617-153619, 153621-153627, 153630-153631, 153635-153636, 153639-153640, 153644, 153647, 153649-153651, 153654, 153657-153663, 153665-153666, 153668-153669, 153671-153672, 153675, 153677-153678, 153681, 153687-153690, 153693-153694, 153696, 153698-153700, 153702-153703, 153705, 153707-153708, 153712, 153715, 153718, 153720-153721, 153723, 153725-153726, 153728, 153730-153733, 153735-153737, 153739-153741, 153743-153748, 153751-153754, 153768-153777, 153780, 153783-153786, 153788-153790, 153793-153796, 153800, 153807-153810, 153814-153815, 153817-153819, 153821-153824, 153826-153841, 153843, 153845-153846, 153848, 153850-153851, 153854, 153857-153860, 153862-153863, 153866, 153868-153878, 153884-153885, 153887-153892, 153894, 153896-153899, 153904-153905, 153907, 153912-153913, 153916, 153918-153919, 153929, 153932-153935, 153940-153942, 153944, 153946-153947, 153949-153951, 153953-153954, 153956-153958, 153960, 153962-153970, 153974-153976, 153978-153984, 153986, 153989-153993, 153996-153997, 153999, 154001-154003, 154005-154007, 154010-154013, 154016-154025, 154027, 154029-154032, 154034-154035, 154040, 154044, 154048, 154051-154052, 154055-154056, 154058-154060, 154062-154071, 154073-154078, 154080-154085, 154089, 154092-154093, 154096-154098, 154100-154101, 154106-154107, 154110, 154112-154113, 154115, 154117, 154119, 154123, 154125-154130, 154132-154139, 154141-154142, 154144, 154147-154148, 154150-154153, 154155-154160, 154162-154163, 154165, 154167-154169, 154171, 154176-154181, 154193, 154196-154197, 154199-154200, 154205, 154208, 154210-154216, 154218, 154221-154222, 154224, 154229-154231, 154234, 154237-154239, 154242-154244, 154247-154256, 154258-154261, 154263-154264, 154268, 154270-154272, 154274, 154276-154282, 154284-154285, 154287-154289, 154293-154294, 154296-154299, 154301-154304, 154306-154307, 154310, 154312-154313, 154315-154317, 154319, 154321-154324, 154329-154330, 154332-154335, 154337-154346, 154349, 154352, 154355, 154361-154362, 154365-154367, 154369, 154371, 154374, 154376-154377, 154380, 154382-154383, 154392, 154395, 154398, 154402, 154404-154407, 154410-154411, 154413, 154417, 154419, 154421, 154423-154425, 154429, 154432-154435, 154437, 154442, 154444-154451, 154453, 154455, 154457, 154460-154461, 154463, 154467, 154471, 154474, 154476, 154478, 154484, 154486-154495, 154498, 154500-154501, 154510-154511, 154514-154516, 154519, 154525-154527, 154529, 154532, 154534-154537, 154542, 154545, 154548, 154559, 154561-154562, 154565, 154568, 154574, 154577-154580, 154584, 154587-154588, 154590, 154592-154594, 154597, 154599, 154601-154602, 154606-154610, 154615-154616, 154624-154625, 154627, 154629-154632, 154638-154639, 154641-154643, 154646, 154648, 154651-154652, 154654-154664, 154666, 154670, 154675-154681, 154683-154684, 154689-154690, 154693-154694, 154698-154704, 154706-154708, 154711, 154713, 154717, 154722-154724, 154728, 154731, 154736, 154741, 154744, 154747-154749, 154753, 154756-154759, 154762, 154766, 154768, 154776-154780, 154784-154785, 154787, 154790-154796, 154798-154807, 154812-154813, 154815-154816, 154818, 154821-154823, 154826-154831, 154833-154834, 154837-154841, 154847-154848, 154851-154852, 154854-154863, 154865, 154868, 154870-154877, 154879, 154881, 154883, 154887-154888, 154890, 154892-154898, 154901, 154903-154906, 154908, 154913, 154915, 154917, 154919, 154926-154929, 154931-154934, 154937, 154941, 154945-154947, 154949, 154951-154953, 154955, 154957-154958, 154960-154962, 154964, 154971-154973, 154976, 154978, 154981-154982, 154987, 154989-154991, 154993-154997, 154999-155003, 155005-155006, 155008-155009, 155011, 155013-155014, 155016-155017, 155019, 155023-155034, 155036-155037, 155039-155044, 155046, 155049, 155051-155055, 155057, 155062-155064, 155068, 155070-155076, 155078-155079, 155081-155083, 155086-155090, 155092, 155099, 155101-155107, 155109-155110, 155112, 155114, 155118-155119, 155121, 155126-155127, 155129-155135, 155137-155138, 155140, 155142-155144, 155146-155148, 155151, 155157-155160, 155162-155165, 155167-155171, 155173-155174, 155176-155181, 155184, 155187-155192, 155194-155195, 155197-155198, 155202-155207, 155211-155213, 155216-155219, 155222, 155224-155226, 155229-155230, 155232-155236, 155242, 155251, 155253, 155255-155258, 155260-155262, 155264-155266, 155268, 155270-155272, 155276, 155284-155286, 155288, 155290-155291, 155294-155295, 155298, 155300-155301, 155303, 155309-155312, 155314, 155319-155321, 155325-155326, 155328, 155330, 155332, 155335-155337, 155339-155341, 155344-155348, 155350, 155354-155356, 155358-155360, 155364, 155366, 155368, 155370-155387, 155389, 155391, 155395, 155397-155404, 155412, 155415, 155417, 155420-155421, 155423-155427, 155430-155431, 155438-155439, 155441-155444, 155447, 155449, 155452-155455, 155457, 155459-155460, 155463-155467, 155469, 155471, 155473, 155476-155482, 155485-155487, 155490-155493, 155495-155497, 155500, 155502, 155504-155506, 155509, 155512-155516, 155518, 155520, 155522-155523, 155525-155526, 155529, 155531-155536, 155538, 155542-155544, 155547-155552, 155554, 155556-155557, 155559-155560, 155563-155565, 155572-155574, 155576-155577, 155580, 155583-155587, 155590-155593, 155595-155596, 155598, 155600-155609, 155611, 155613, 155617-155618, 155620-155624, 155627-155632, 155637, 155639-155641, 155644, 155646-155652, 155656-155661, 155663, 155667, 155669-155670, 155673-155691, 155695, 155699, 155701-155702, 155704-155708, 155710-155712, 155717-155722, 155727, 155729, 155732, 155735, 155737, 155739, 155741-155742, 155744, 155746-155751, 155753-155755, 155757, 155759, 155761-155765, 155768-155771, 155774-155775, 155778, 155780-155781, 155784-155785, 155791, 155793-155800, 155802-155812, 155818, 155820-155824, 155826-155829, 155831, 155835, 155837-155847, 155849-155859, 155861-155864, 155866-155867, 155870-155871, 155873, 155879, 155881-155888, 155890-155893, 155895-155896, 155899, 155902-155905, 155910-155912, 155914, 155916-155917, 155920-155936, 155939, 155941-155944, 155947-155949, 155952-155953, 155956-155958, 155961, 155964-155968, 155970-155971, 155973-155974, 155976, 155979-155981, 155984, 155987, 155992, 155996-156001, 156003-156007, 156010-156011, 156018, 156020-156021, 156023, 156025-156028, 156030-156032, 156034-156039, 156041-156042, 156044-156046, 156049, 156051-156053, 156055, 156057-156061, 156063, 156065, 156067-156072, 156074, 156076-156090, 156092, 156096-156098, 156100-156101, 156104-156109, 156111, 156113-156114, 156117-156118, 156120-156123, 156125, 156127-156129, 156131, 156133-156139, 156141-156143, 156146-156149, 156152-156155, 156157-156160, 156163-156170, 156172-156175, 156177, 156180, 156183, 156185-156191, 156194-156197, 156199, 156202-156208, 156210-156215, 156218-156223, 156225-156227, 156229, 156232, 156235-156237, 156239, 156242-156245, 156247, 156249, 156251-156253, 156256, 156259-156263, 156265-156266, 156273, 156276-156285, 156287, 156289-156290, 156292-156311, 156315-156319, 156321, 156327, 156329-156330, 156332-156334, 156336-156344, 156347, 156349-156351, 156353, 156355-156356, 156358, 156360, 156363-156369, 156373, 156380, 156382, 156385, 156387-156390, 156393, 156395-156396, 156402, 156404-156405, 156408, 156411-156413, 156415-156416, 156421-156431, 156437-156441, 156443-156445, 156447, 156449, 156451-156459, 156462, 156464, 156466-156467, 156469-156472, 156474-156476, 156479-156485, 156488, 156490-156491, 156494, 156497-156501, 156503-156507, 156509, 156511-156512, 156515-156519, 156522, 156526, 156529-156530, 156534-156535, 156537-156542, 156546-156550, 156553, 156556, 156560-156561, 156563, 156566-156567, 156570, 156575-156579, 156581, 156583, 156585, 156589-156590, 156592-156596, 156598, 156600, 156602, 156604-156607, 156610-156611, 156613-156615, 156618, 156621, 156623-156624, 156627, 156629, 156631-156632, 156634-156635, 156639, 156641-156643, 156646, 156649, 156651-156654, 156657-156661, 156663-156664, 156666-156672, 156674, 156676-156681, 156692, 156698, 156700, 156702, 156708, 156714-156716, 156722-156724, 156726-156728, 156730-156733, 156735, 156737-156738, 156740-156745, 156747-156749, 156752-156758, 156763, 156765-156766, 156771, 156773-156774, 156778-156782, 156784-156785, 156787, 156789-156790, 156792, 156795-156796, 156801-156802, 156806-156808, 156810, 156813-156818, 156821-156822, 156824-156826, 156828-156829, 156831-156832, 156835-156838, 156842, 156846-156847, 156849-156850, 156853, 156856-156859, 156864-156865, 156867, 156869-156870, 156872, 156878-156879, 156882-156884, 156886, 156888-156889, 156891-156894, 156896-156898, 156901, 156903, 156905-156908, 156914, 156923-156924, 156926-156929, 156931-156932, 156934-156938, 156943-156946, 156948-156953, 156955-156957, 156959, 156961-156969, 156971, 156974, 156976-156980, 156982, 156985, 156987-156988, 156990-156991, 156994-156996, 157000, 157003-157008, 157010-157011, 157014-157015, 157021-157029, 157032, 157035, 157037-157038, 157042, 157045, 157047-157049, 157051, 157053-157058, 157060, 157063-157064, 157066-157067, 157070, 157072, 157074, 157076, 157078-157084, 157089-157095, 157106, 157108-157115, 157118-157120, 157123-157132, 157134, 157136, 157138-157141, 157143-157151, 157153, 157158, 157161-157162, 157164-157173, 157175, 157177, 157179-157183, 157186, 157188-157194, 157200-157201, 157207-157208, 157210, 157212-157213, 157215-157219, 157221-157222, 157224-157226, 157231-157233, 157235, 157237, 157239-157242, 157244-157245, 157247-157249, 157253-157255, 157257, 157263-157270, 157273-157274, 157278-157279, 157282-157284, 157287-157288, 157292-157297, 157300-157301, 157308-157309, 157312, 157316-157318, 157320-157322, 157325, 157328-157330, 157333-157335, 157337, 157339-157340, 157343-157345, 157347-157348, 157351-157354, 157356, 157358-157359, 157363-157368, 157371-157374, 157377-157378, 157380, 157382-157388, 157390-157393, 157395, 157397-157400, 157402-157403, 157405, 157408-157409, 157416-157417, 157419-157427, 157429-157430, 157433-157438, 157440, 157442, 157444-157445, 157447, 157449-157450, 157453-157463, 157469-157473, 157477-157478, 157480-157481, 157484-157488, 157490-157494, 157497-157501, 157503-157504, 157506-157507, 157510, 157512, 157514-157522, 157524, 157527, 157530-157532, 157534-157535, 157538-157540, 157543-157544, 157547, 157549-157553, 157555, 157558-157561, 157563-157565, 157567, 157572-157574, 157579, 157581, 157583-157586, 157590-157593, 157595, 157597, 157599, 157601-157607, 157611, 157614, 157617, 157619-157620, 157622-157625, 157627-157630, 157632-157635, 157637-157642, 157644-157648, 157652-157657, 157659-157660, 157662, 157664-157668, 157677, 157679-157680, 157682-157685, 157687-157688, 157693-157699, 157701-157702, 157704, 157706, 157709, 157711-157713, 157719-157721, 157723, 157726, 157732-157733, 157736-157739, 157744-157745, 157747, 157749-157757, 157760, 157762, 157764, 157766, 157768-157769, 157773-157775, 157781-157784, 157789-157793, 157796-157810, 157812, 157814-157815, 157817-157818, 157820-157822, 157824-157827, 157830-157846, 157848, 157850-157852, 157854, 157857, 157859, 157865-157866, 157868-157874, 157876-157879, 157882-157884, 157888-157891, 157893-157897, 157900-157901, 157904, 157911-157917, 157919, 157921, 157924, 157926-157936, 157938-157940, 157942-157943, 157945-157946, 157948-157949, 157951, 157954-157958, 157960-157962, 157965-157968, 157970, 157972, 157975, 157979-157980, 157982, 157984, 157986, 157988-157989, 157994-157997, 157999-158006, 158009, 158011, 158013-158016, 158018-158021, 158023-158024, 158026-158034, 158036-158043, 158045, 158049-158057, 158059-158060, 158063, 158066-158070, 158072-158077, 158082, 158084, 158086, 158088, 158090-158091, 158094, 158097-158100, 158104-158110, 158112-158118, 158120, 158122-158123, 158125-158133, 158135-158137, 158139-158141, 158143-158144, 158149, 158152-158155, 158157-158159, 158163, 158165-158174, 158176, 158180-158182, 158186-158187, 158190-158193, 158195, 158198, 158200, 158206-158208, 158210-158214, 158216-158217, 158219, 158221, 158223-158225, 158227-158232, 158234-158236, 158241-158243, 158245, 158251-158254, 158257, 158259, 158261-158262, 158264, 158267-158270, 158273-158275, 158278, 158280-158281, 158283-158290, 158292, 158295-158302, 158305-158312, 158314-158321, 158323, 158328-158330, 158333-158340, 158342-158345, 158349-158351, 158353-158356, 158365, 158368, 158370, 158372-158373, 158379-158380, 158383-158385, 158387-158389, 158391, 158394-158395, 158398-158401, 158404, 158410-158414, 158416, 158419-158423, 158427-158428, 158433, 158436-158437, 158439-158449, 158456-158461, 158463-158469, 158471, 158473-158474, 158478, 158480, 158484-158486, 158492, 158496-158502, 158504-158505, 158508-158509, 158511-158512, 158515, 158517-158518, 158520-158524, 158528-158530, 158532-158535, 158537, 158539-158545, 158550-158554, 158557, 158559-158561, 158563, 158566, 158569, 158571-158573, 158575-158580, 158582-158583, 158585, 158587-158588, 158590-158593, 158597-158599, 158601-158604, 158606-158607, 158609-158612, 158614-158620, 158622-158623, 158625-158629, 158631-158633, 158639-158642, 158644-158646, 158648-158650, 158655, 158658-158661, 158663, 158665-158666, 158668-158670, 158672-158684, 158686-158690, 158692-158704, 158707-158710, 158712-158713, 158715-158725, 158727-158729, 158731-158733, 158735-158739, 158741-158750, 158752-158753, 158756-158758, 158765-158772, 158777, 158779-158782, 158784-158785, 158787-158791, 158793, 158795, 158797-158806, 158808, 158810, 158812-158817, 158821-158823, 158827-158829, 158833-158836, 158838-158840, 158842, 158844-158847, 158849-158850, 158853-158858, 158860, 158862-158866, 158869-158872, 158874-158876, 158878-158882, 158884, 158887, 158889, 158893-158896, 158899-158907, 158909-158914, 158916-158918, 158922, 158925-158926, 158928, 158930-158937, 158940-158944, 158951-158954, 158956-158958, 158962, 158965-158966, 158968-158970, 158972-158980, 158982-158988, 158990, 158994, 158996, 158998, 159007-159010, 159013, 159015, 159017, 159023-159024, 159027-159028, 159032-159035, 159037, 159040-159041, 159043, 159049-159050, 159052-159057, 159059-159061, 159063-159064, 159066-159067, 159070, 159075, 159079, 159081, 159083, 159085-159087, 159089, 159093-159099, 159101, 159107-159115, 159117, 159119-159126, 159128, 159131, 159133-159135, 159138-159141, 159144-159145, 159149-159155, 159162, 159164-159165, 159167, 159169-159172, 159175-159176, 159179-159181, 159183-159185, 159187-159190, 159198-159200, 159202-159203, 159209, 159211, 159214, 159216-159219, 159225-159228, 159231, 159233-159237, 159240-159241, 159245-159246, 159248, 159250-159258, 159265-159266, 159269-159271, 159273-159275, 159277, 159279, 159281, 159283, 159286-159287, 159289-159290, 159292-159293, 159295-159299, 159301-159307, 159309-159313, 159317-159320, 159322, 159328-159334, 159337-159345, 159347-159351, 159353, 159355-159357, 159359-159362, 159367, 159369, 159371-159372, 159375, 159379, 159381-159385, 159388-159389, 159392-159393, 159396-159397, 159399, 159402-159404, 159407-159410, 159412-159416, 159418, 159420-159423, 159425-159431, 159434, 159436, 159439, 159441-159442, 159445-159446, 159449-159463, 159466-159471, 159475-159479, 159485-159493, 159495, 159497-159499, 159504-159505, 159508, 159510-159511, 159514, 159523, 159526, 159533, 159536-159542, 159544-159546, 159548-159552, 159554-159555, 159558, 159562-159563, 159565-159566, 159568, 159574-159575, 159578, 159580-159591, 159593-159596, 159598-159600, 159602, 159604, 159606-159607, 159609-159610, 159613, 159616-159617, 159619-159624, 159626-159627, 159630-159631, 159633-159635, 159638-159641, 159643-159644, 159649, 159651-159652, 159654, 159656-159657, 159659-159660, 159664-159666, 159668-159669, 159671, 159673-159675, 159677, 159680-159681, 159683-159684, 159690-159691, 159693, 159695-159706, 159708, 159710-159712, 159714-159719, 159721, 159723, 159726-159727, 159729, 159735-159739, 159742-159743, 159745-159746, 159748-159749, 159751-159758, 159760-159761, 159763, 159766, 159768-159773, 159776, 159778-159781, 159783-159785, 159790-159796, 159799-159802, 159805-159806, 159808-159812, 159818, 159820, 159822, 159824, 159831-159832, 159834, 159836, 159839-159848, 159850-159851, 159854, 159856, 159858-159862, 159864, 159866-159869, 159871-159872, 159877-159879, 159881, 159883-159885, 159889-159893, 159895-159896, 159898-159903, 159905, 159908, 159912-159914, 159917, 159919-159930, 159935, 159937, 159940, 159944-159945, 159948, 159950, 159952, 159955-159962, 159964-159966, 159968, 159970, 159972, 159974, 159976, 159978-159979, 159981-159982, 159984, 159987-159989, 159993-159994, 159996-160000, 160002, 160004-160010, 160012-160017, 160019, 160021-160025, 160027-160032, 160034-160035, 160037-160047, 160049-160053, 160055, 160057, 160061-160063, 160067-160068, 160070-160084, 160086-160087, 160092-160100, 160102-160105, 160108-160109, 160111, 160113, 160118, 160122, 160124-160129, 160132, 160134-160135, 160141-160142, 160146-160148, 160150-160151, 160153-160154, 160156-160164, 160168, 160174, 160179, 160183, 160186-160187, 160196-160197, 160200-160202, 160205-160206, 160209-160210, 160217, 160219-160220, 160225-160228, 160230, 160232-160234, 160239-160240, 160242, 160244, 160246-160248, 160250, 160252, 160254, 160256-160261, 160263-160266, 160269, 160271, 160273, 160276-160278, 160282-160290, 160292-160301, 160303, 160306, 160308-160309, 160316-160319, 160321-160322, 160324, 160328-160329, 160331-160333, 160335, 160339, 160341-160343, 160345-160347, 160353-160356, 160359-160360, 160362, 160364, 160370-160372, 160374-160376, 160378-160386, 160388-160389, 160391-160393, 160395-160402, 160404-160406, 160410-160419, 160421-160428, 160430-160432, 160436, 160438-160439, 160442-160450, 160453, 160455-160457, 160461, 160468-160469, 160472-160477, 160485, 160488, 160493-160496, 160498, 160504-160505, 160507-160509, 160512, 160514, 160516-160518, 160520-160523, 160526-160527, 160529, 160531-160534, 160541-160542, 160544, 160547-160548, 160551-160554, 160556-160557, 160560, 160562-160564, 160567, 160569-160575, 160577, 160579-160581, 160584, 160586-160588, 160590-160598, 160600-160602, 160604-160608, 160611, 160613-160620, 160622, 160624-160631, 160633, 160636-160640, 160642, 160647-160655, 160659-160662, 160664-160666, 160670, 160672, 160677-160679, 160681, 160683-160688, 160690, 160692-160693, 160696-160701, 160703, 160708, 160713, 160720-160722, 160725-160726, 160729-160733, 160736-160737, 160740-160744, 160748-160749, 160751-160752, 160754-160755, 160757, 160759, 160761, 160766, 160770-160771, 160773-160779, 160781-160787, 160789-160792, 160794-160795, 160797-160800, 160802-160807, 160809, 160811, 160817-160818, 160820-160828, 160830-160831, 160833, 160835-160837, 160839-160843, 160845-160846, 160854, 160856-160862, 160864-160866, 160868-160871, 160873-160884, 160887-160888, 160892, 160896-160897, 160901-160904, 160906-160907, 160910, 160912-160913, 160915-160923, 160926-160929, 160931-160934, 160938-160943, 160945, 160947-160955, 160959, 160968-160970, 160972-160973, 160977-160980, 160984, 160987-160991, 160994-160998, 161006-161007, 161009-161015, 161017-161018, 161022, 161024-161025, 161027, 161029, 161031, 161033-161034, 161037-161039, 161047, 161055-161059, 161061, 161068-161072, 161076-161077, 161080-161086, 161089-161093, 161096, 161099-161102, 161105-161108, 161111, 161114-161120, 161122-161127, 161130-161131, 161133-161135, 161137-161138, 161140, 161142-161143, 161145, 161152-161155, 161159, 161163, 161165, 161168, 161170, 161175, 161177, 161180-161194, 161196-161200, 161202-161203, 161207, 161209-161210, 161214-161215, 161217-161218, 161220, 161223-161224, 161229-161230, 161232-161235, 161237-161238, 161240, 161246-161249, 161253, 161255-161257, 161259, 161263, 161266-161268, 161270-161272, 161274-161275, 161277-161281, 161285-161286, 161288, 161290, 161293-161294, 161297, 161300-161301, 161303-161304, 161306-161307, 161310-161312, 161314-161315, 161317-161318, 161320, 161322-161323, 161325-161333, 161336, 161338, 161340-161341, 161344, 161346, 161348, 161351-161356, 161359-161360, 161362-161363, 161370, 161372-161373, 161375-161377, 161379-161383, 161387, 161389-161390, 161394-161395, 161397, 161399, 161403-161405, 161408-161410, 161413-161417, 161420-161421, 161424, 161426, 161429, 161431-161433, 161436, 161438-161440, 161443, 161449-161450, 161454-161458, 161460-161463, 161469, 161472, 161474-161475, 161477-161479, 161481-161485, 161487, 161492, 161495, 161497-161507, 161510-161515, 161517-161518, 161520, 161523, 161526-161527, 161529, 161531-161533, 161535, 161537-161544, 161546-161551, 161553-161558, 161560-161561, 161563, 161565-161570, 161574-161578, 161581, 161585, 161587, 161593-161594, 161601, 161603, 161608, 161610-161615, 161618, 161620, 161622-161623, 161627, 161629, 161632, 161634-161636, 161639, 161641-161642, 161644, 161649-161650, 161652, 161658-161659, 161662-161665, 161668, 161671-161677, 161679-161681, 161687, 161689, 161695, 161698, 161700, 161703, 161705-161706, 161709-161715, 161717-161720, 161723, 161726, 161728-161730, 161733-161740, 161742-161744, 161746, 161748-161753, 161757-161759, 161761, 161763-161764, 161770-161775, 161777-161779, 161781-161784, 161786, 161788-161789, 161791-161795, 161797, 161799-161804, 161806-161810, 161812-161820, 161822, 161824, 161826-161828, 161830-161831, 161833-161834, 161837, 161839-161842, 161845, 161848, 161851, 161854, 161856, 161858-161860, 161862-161866, 161868, 161871-161872, 161874-161876, 161878-161880, 161883-161885, 161887, 161889-161893, 161900, 161902-161914, 161921, 161923, 161930-161933, 161938-161939, 161941-161946, 161949-161957, 161962-161966, 161968, 161970, 161972, 161975-161980, 161982-161984, 161988, 161992-161993, 161996, 161998, 162000-162003, 162007-162008, 162010-162012, 162017, 162020, 162022, 162025-162035, 162039, 162043-162047, 162051-162053, 162057-162058, 162061-162062, 162068, 162071, 162073, 162077-162078, 162081-162082, 162084-162092, 162095-162099, 162101-162106, 162108-162109, 162111-162113, 162115-162117, 162119-162122, 162124-162125, 162127, 162130-162131, 162134-162135, 162137, 162139-162141, 162147, 162153, 162156-162168, 162170-162173, 162177-162179, 162182-162185, 162190-162191, 162194-162195, 162197-162199, 162201, 162203, 162207, 162209-162212, 162214-162216, 162219, 162221, 162223, 162226, 162228-162231, 162234, 162236-162239, 162244, 162247-162251, 162253, 162256, 162258, 162261, 162263-162264, 162266-162267, 162270, 162272-162274, 162277, 162279-162280, 162282-162284, 162286, 162290, 162292-162304, 162306-162307, 162309-162311, 162315, 162319-162323, 162325-162328, 162330-162339, 162344, 162346-162351, 162354-162355, 162357, 162360, 162363, 162365, 162368, 162375-162377, 162379, 162382, 162384, 162390-162392, 162394-162396, 162399, 162401-162402, 162407-162408, 162410-162411, 162413-162414, 162416-162418, 162421-162426, 162428-162433, 162435, 162437-162439, 162443-162448, 162450-162453, 162456-162457, 162459, 162461-162463, 162470-162471, 162474-162476, 162480, 162484-162485, 162487-162488, 162490-162499, 162501-162502, 162504, 162506-162507, 162509-162510, 162515-162516, 162520, 162522, 162524-162525, 162527-162533, 162535, 162538, 162540, 162542-162548, 162551-162554, 162556, 162558, 162565, 162567-162572, 162574-162576, 162578-162584, 162586-162587, 162591-162593, 162596-162602, 162604, 162607-162608, 162610, 162613-162615, 162619, 162621-162623, 162629, 162632, 162634, 162636-162638, 162640-162641, 162644-162648, 162650, 162653-162657, 162659, 162661, 162666, 162669, 162671, 162673-162675, 162677-162684, 162688-162689, 162691-162693, 162696-162697, 162699, 162704, 162707-162709, 162711-162713, 162717-162720, 162722, 162725-162727, 162729-162740, 162743, 162747, 162750, 162754-162756, 162758, 162760-162761, 162763, 162766, 162770, 162773-162776, 162778-162780, 162784-162785, 162787-162795, 162800-162801, 162804, 162808-162820, 162822-162823, 162826, 162828, 162830, 162833-162840, 162843, 162850, 162856-162857, 162860-162863, 162866-162867, 162870, 162872-162874, 162876, 162879-162885, 162887-162888, 162890-162891, 162893-162895, 162899-162911, 162914-162916, 162918, 162921, 162923-162925, 162927-162929, 162931-162942, 162944-162946, 162949-162952, 162954-162955, 162959, 162963-162976, 162979-162981, 162983, 162986, 162989-162993, 162996-162998, 163000-163001, 163003, 163006-163007, 163009, 163013-163018, 163020, 163024-163028, 163030-163032, 163034-163036, 163039-163040, 163042-163043, 163045-163046, 163048, 163057, 163059, 163061, 163066-163067, 163069-163072, 163075, 163077, 163079, 163081-163087, 163093-163097, 163100-163101, 163109-163111, 163116, 163120, 163122-163123, 163127-163135, 163137-163138, 163140-163143, 163145-163146, 163148-163154, 163156, 163162-163163, 163166, 163168, 163170-163171, 163173-163180, 163182, 163184-163189, 163191-163203, 163206-163210, 163212-163214, 163216-163221, 163223-163224, 163227-163230, 163234-163238, 163241, 163244, 163246-163249, 163256-163260, 163264, 163267-163273, 163275-163278, 163280-163281, 163284-163285, 163287, 163289, 163291-163292, 163294, 163296, 163298, 163305-163309, 163311-163322, 163324, 163327-163332, 163335, 163337-163338, 163342-163343, 163345-163351, 163353-163354, 163356-163357, 163359, 163362-163366, 163368, 163370-163371, 163373, 163375-163377, 163379-163380, 163384, 163386-163401, 163403-163408, 163410-163417, 163419-163422, 163424-163428, 163430, 163435-163437, 163439, 163441, 163443, 163446, 163448, 163450, 163452, 163454-163469, 163471-163472, 163475-163476, 163479, 163481-163487, 163489-163491, 163494, 163496-163501, 163508-163511, 163513-163515, 163517-163522, 163524-163525, 163533-163536, 163541-163548, 163550-163556, 163560, 163564-163567, 163571-163572, 163574-163576, 163583, 163586, 163589-163592, 163594, 163597-163598, 163600-163601, 163606, 163612-163613, 163615-163619, 163621-163624, 163629-163630, 163632-163634, 163637-163638, 163641-163642, 163646, 163649-163650, 163652-163654, 163660-163666, 163668-163670, 163672-163673, 163675-163678, 163682-163683, 163685-163693, 163695, 163698-163700, 163703, 163707-163708, 163711-163718, 163721, 163723-163725, 163730-163734, 163736-163742, 163744, 163747, 163749-163750, 163755-163757, 163760, 163762, 163765, 163767, 163771-163773, 163775-163779, 163781-163783, 163786, 163790-163795, 163797-163798, 163800, 163803-163804, 163807-163809, 163812-163813, 163817, 163819, 163821-163823, 163827-163831, 163834-163835, 163837-163838, 163844-163848, 163850, 163853-163855, 163859, 163862, 163864-163868, 163873, 163876, 163878, 163880, 163882, 163884-163894, 163899, 163903-163904, 163908-163917, 163919-163923, 163925-163929, 163931, 163936, 163940-163941, 163944, 163946-163948, 163950-163952, 163954-163958, 163960-163962, 163964, 163966-163975, 163977, 163979, 163986, 163989, 163991-163997, 164001-164003, 164005-164010, 164012-164013, 164015, 164017, 164019, 164021-164022, 164025, 164027, 164029-164030, 164032-164037, 164040-164052, 164054-164060, 164062, 164064-164068, 164070-164076, 164078-164084, 164086-164094, 164096, 164099-164100, 164102-164106, 164108-164109, 164111, 164113, 164117-164122, 164127, 164131, 164133-164138, 164140-164141, 164145, 164147, 164149-164151, 164153-164155, 164162, 164164, 164166-164167, 164169-164170, 164173, 164176, 164180-164182, 164184, 164186-164187, 164189, 164192-164198, 164200-164201, 164203-164205, 164208, 164210, 164212-164213, 164218-164220, 164223, 164225-164238, 164245-164261, 164263, 164265-164267, 164270-164272, 164277, 164279, 164282-164284, 164287-164288, 164291-164292, 164297, 164299-164300, 164302-164304, 164306-164310, 164313, 164315-164320, 164322-164323, 164325-164329, 164331-164333, 164335-164337, 164339-164340, 164342-164343, 164347, 164351-164353, 164355-164359, 164362-164367, 164369-164370, 164372-164382, 164386-164387, 164389-164390, 164394-164395, 164397-164409, 164411, 164413-164414, 164416-164417, 164419-164421, 164423-164424, 164426-164428, 164431-164432, 164435-164438, 164440, 164442-164449, 164452-164457, 164461, 164464, 164469, 164471-164486, 164488-164489, 164492-164495, 164497-164498, 164500, 164505, 164507-164508, 164511, 164513-164514, 164516, 164518-164520, 164522, 164524-164525, 164527-164535, 164537-164543, 164545, 164547-164552, 164554-164555, 164557-164558, 164561-164565, 164568-164576, 164581-164586, 164589, 164591-164593, 164595-164596, 164598-164599, 164602, 164607, 164609-164610, 164612-164614, 164621, 164625-164627, 164630-164631, 164633-164635, 164637, 164639, 164641, 164643-164645, 164650-164653, 164655, 164659-164660, 164663, 164665, 164669, 164671-164675, 164677, 164679, 164681-164685, 164688-164689, 164694-164695, 164697, 164701-164705, 164710-164711, 164713-164715, 164720-164725, 164727, 164730-164741, 164743, 164749, 164753-164754, 164760-164761, 164763, 164765-164769, 164774, 164776-164777, 164779, 164783-164786, 164789-164791, 164793-164799, 164803, 164805, 164807, 164809-164810, 164812, 164814-164821, 164823-164825, 164827, 164829-164831, 164835, 164838, 164840, 164842, 164845, 164847-164849, 164851, 164859, 164861-164865, 164871, 164873-164874, 164878-164881, 164885, 164887-164888, 164890, 164892-164895, 164897-164898, 164903, 164906, 164908-164909, 164911-164912, 164914, 164917, 164919, 164922-164923, 164925-164929, 164932, 164934-164935, 164939, 164941, 164943-164949, 164953-164954, 164956, 164959, 164962, 164964-164965, 164967, 164970, 164975, 164977, 164980, 164982, 164985-164987, 164989-164993, 164998-165005, 165007-165008, 165014-165020, 165023, 165027-165028, 165030, 165032-165038, 165042-165044, 165046, 165048-165052, 165054-165061, 165064, 165066-165069, 165071, 165073, 165076-165079, 165081, 165083, 165086-165091, 165093-165095, 165097, 165099-165101, 165103-165105, 165109-165111, 165116, 165118, 165120, 165122, 165124-165125, 165127-165128, 165132, 165136-165138, 165140, 165143-165148, 165150, 165155-165161, 165165-165166, 165168-165171, 165173, 165175-165176, 165178, 165180, 165183-165189, 165192, 165194-165197, 165199, 165201-165202, 165205, 165208-165210, 165212-165218, 165220, 165222-165225, 165227-165231, 165234-165242, 165245-165246, 165249-165251, 165254, 165258, 165260-165263, 165265, 165267-165272, 165274-165277, 165279-165282, 165286, 165288-165289, 165291, 165293-165294, 165296, 165299-165301, 165303-165308, 165311-165314, 165316-165317, 165319, 165321-165325, 165327-165336, 165338-165339, 165341-165344, 165350, 165352, 165354-165355, 165357-165358, 165361-165362, 165364-165366, 165368-165370, 165373-165375, 165377-165381, 165384, 165386, 165388-165390, 165392-165393, 165395-165401, 165403-165412, 165415-165418, 165420-165425, 165427-165429, 165431-165436, 165438-165441, 165443-165444, 165446-165450, 165452-165457, 165459-165460, 165462, 165465-165470, 165472-165475, 165479-165480, 165482, 165487-165489, 165491-165496, 165498, 165500, 165502-165521, 165523-165524, 165526-165529, 165531-165532, 165535-165539, 165541-165542, 165544, 165549-165550, 165552-165553, 165555, 165557-165559, 165564-165566, 165574-165575, 165578-165582, 165587-165590, 165593-165595, 165598, 165600-165602, 165604-165605, 165607-165609, 165611-165614, 165616, 165618, 165622-165625, 165627, 165629, 165631-165638, 165641, 165643-165644, 165646-165652, 165654-165656, 165660-165661, 165663-165665, 165668-165676, 165678-165680, 165683-165687, 165689, 165691, 165693-165695, 165698-165699, 165701-165709, 165712, 165714-165715, 165718, 165720, 165722, 165724-165738, 165741, 165744-165747, 165751, 165753, 165755-165759, 165762-165765, 165768-165771, 165773-165782, 165784-165786, 165788-165790, 165792, 165795, 165798-165800, 165802, 165804-165812, 165814-165816, 165818-165819, 165821, 165823-165825, 165827-165828, 165830-165833, 165835-165836, 165838, 165840-165841, 165843-165844, 165846, 165849-165853, 165855-165858, 165860, 165862-165867, 165869-165872, 165874, 165876-165879, 165883-165884, 165891, 165893, 165897-165901, 165903-165905, 165907-165908, 165911, 165913-165914, 165916-165920, 165922, 165926, 165928-165929, 165931-165932, 165934-165935, 165938, 165941-165942, 165944, 165946-165954, 165957-165971, 165974, 165976-165979, 165981-165985, 165988, 165991-165994, 165998, 166003-166004, 166007, 166009-166010, 166012, 166015-166016, 166018-166021, 166023, 166026-166028, 166034, 166036, 166039, 166041-166044, 166047, 166049-166055, 166057-166060, 166062-166065, 166067-166068, 166070-166072, 166074-166079, 166081, 166083, 166085-166089, 166092-166094, 166096-166098, 166100-166105, 166107-166118, 166120-166122, 166124-166127, 166130, 166133, 166135-166140, 166142-166144, 166150-166154, 166157, 166161, 166166, 166168, 166170, 166172-166182, 166185-166189, 166191, 166201-166205, 166207, 166209-166215, 166219, 166222-166227, 166229-166230, 166232-166234, 166236-166237, 166240-166244, 166246-166249, 166257-166258, 166262-166267, 166269, 166271, 166273, 166279-166286, 166288, 166291-166292, 166294-166296, 166299-166302, 166304, 166306-166314, 166317, 166319-166323, 166328, 166330-166332, 166334-166336, 166338, 166340-166346, 166355-166356, 166358-166361, 166364-166371, 166373-166374, 166380-166381, 166384, 166386-166387, 166392, 166395-166402, 166406, 166410, 166413-166420, 166422-166425, 166427, 166429-166432, 166434-166442, 166444-166445, 166448-166449, 166451-166455, 166457, 166462-166468, 166471, 166473, 166477, 166479-166488, 166490, 166492-166493, 166495-166499, 166502-166508, 166511-166514, 166516, 166518, 166521, 166525-166529, 166532, 166535-166539, 166542-166543, 166545-166550, 166552-166554, 166557-166559, 166561-166563, 166566-166568, 166571, 166574-166580, 166583-166586, 166589, 166591, 166593, 166595-166600, 166602-166604, 166606-166613, 166615, 166617-166619, 166623, 166625, 166632, 166634-166639, 166641-166643, 166646-166647, 166649-166651, 166655-166656, 166658, 166660, 166662-166667, 166669-166672, 166674-166676, 166678, 166681, 166683-166685, 166687-166694, 166696-166698, 166700, 166704, 166707-166708, 166710, 166712, 166714, 166721-166723, 166725-166731, 166733, 166738, 166740, 166742-166745, 166747, 166749-166758, 166760-166762, 166764, 166768-166769, 166771, 166773, 166775-166776, 166778, 166780, 166783-166786, 166788-166789, 166791-166792, 166794-166795, 166797-166801, 166803, 166807-166815, 166819-166827, 166829-166831, 166833, 166835, 166838-166845, 166847-166850, 166857-166858, 166860, 166864-166882, 166885-166893, 166895-166900, 166903, 166905, 166907-166910, 166913, 166916-166917, 166920, 166922-166924, 166926, 166930-166933, 166935-166936, 166939-166946, 166950, 166952-166953, 166955-166960, 166963-166966, 166968-166971, 166973-166975, 166978-166988, 166990, 166992, 166994, 166996-167000, 167002-167003, 167008, 167011-167015, 167017-167020, 167022-167024, 167027, 167029-167030, 167033-167047, 167049-167050, 167052, 167054-167059, 167062-167064, 167066-167068, 167071-167076, 167078, 167080-167086, 167088, 167091-167092, 167094-167098, 167100, 167102-167106, 167108-167109, 167111, 167113-167120, 167122-167128, 167130, 167132-167134, 167138-167139, 167143, 167145-167151, 167155-167156, 167158, 167160-167164, 167167-167169, 167171-167173, 167178, 167181, 167183-167186, 167188-167189, 167191-167192, 167195-167211, 167214-167215, 167217-167218, 167222-167223, 167225-167226, 167229-167240, 167242, 167244-167245, 167247, 167250, 167253-167256, 167258, 167260-167261, 167263-167264, 167267, 167269, 167272-167274, 167276, 167278, 167280-167281, 167283-167288, 167293, 167295, 167299, 167301-167303, 167305, 167308-167311, 167314-167319, 167321, 167324, 167326, 167328, 167330, 167341-167342, 167344-167347, 167349-167350, 167352-167365, 167368, 167370, 167372, 167375, 167378-167379, 167384, 167390, 167392-167399, 167401-167403, 167408-167411, 167413-167419, 167422-167429, 167432-167448, 167450, 167452-167453, 167455-167464, 167468, 167470-167473, 167477-167478, 167480, 167482, 167484-167486, 167489, 167492-167495, 167497, 167499, 167503, 167505-167512, 167515-167516, 167518-167520, 167522-167524, 167527, 167529-167531, 167533-167538, 167542-167543, 167545-167547, 167549-167550, 167555-167559, 167561, 167563, 167568, 167570, 167572-167573, 167575-167577, 167579, 167582-167592, 167597-167600, 167602-167603, 167605, 167607-167608, 167610-167611, 167613-167629, 167631, 167634-167635, 167637-167641, 167643-167649, 167651, 167653-167655, 167657-167667, 167669-167671, 167673-167679, 167681-167682, 167684-167685, 167687, 167689-167693, 167696-167698, 167701, 167703, 167705-167706, 167708, 167710-167714, 167716-167717, 167719-167725, 167727-167728, 167730-167736, 167738-167741, 167744-167748, 167751, 167753, 167758-167759, 167761, 167765-167766, 167768-167778, 167781-167785, 167787, 167789-167791, 167795-167797, 167800-167801, 167803, 167805-167806, 167808, 167810-167812, 167814, 167816, 167819-167821, 167823-167826, 167828-167834, 167836-167838, 167844-167846, 167849, 167851, 167853-167854, 167856-167857, 167859, 167861-167865, 167868, 167870-167872, 167874, 167876-167878, 167880-167884, 167889-167894, 167896-167897, 167899, 167902, 167904, 167908, 167910, 167915-167918, 167920-167922, 167924, 167926-167927, 167929-167933, 167935-167936, 167939-167940, 167942-167946, 167948, 167951, 167953-167954, 167958, 167960, 167964, 167969-167975, 167977-167987, 167990-167992, 167994-167996, 167999-168000, 168002-168005, 168007, 168009-168012, 168015-168016, 168018-168019, 168024, 168026, 168028, 168031-168035, 168039-168040, 168044-168047, 168052-168053, 168056-168059, 168065-168068, 168070-168074, 168076-168078, 168082-168083, 168087, 168092, 168095-168100, 168102, 168105-168108, 168112, 168114, 168116, 168118, 168120-168122, 168124-168126, 168128, 168130-168131, 168133-168138, 168140-168141, 168145-168149, 168151-168156, 168167-168171, 168173, 168175, 168177-168178, 168180-168182, 168184, 168186-168195, 168197, 168199-168204, 168210-168211, 168213, 168219, 168221, 168223-168225, 168227, 168229-168232, 168234-168238, 168240-168243, 168247-168248, 168250-168252, 168255, 168259, 168263, 168265-168266, 168269, 168277-168281, 168284-168286, 168288, 168290, 168294-168303, 168305, 168307-168308, 168310-168311, 168313, 168315-168316, 168323-168324, 168326, 168328-168330, 168333, 168336, 168339-168347, 168349, 168351-168359, 168361-168362, 168364, 168370-168375, 168377, 168379, 168381, 168383-168388, 168390-168392, 168395, 168399, 168403-168406, 168410, 168412, 168414-168416, 168418-168419, 168421-168434, 168436-168437, 168439-168441, 168443, 168446, 168448-168449, 168453-168455, 168457-168459, 168461-168469, 168474, 168481, 168483-168485, 168487, 168490-168493, 168495-168498, 168500-168502, 168504-168505, 168509, 168512, 168514-168515, 168518, 168521-168523, 168526, 168528-168536, 168538-168545, 168547, 168550-168553, 168555, 168557-168559, 168561-168562, 168566-168572, 168574, 168576-168577, 168579, 168581-168583, 168586-168588, 168592-168593, 168595-168598, 168601, 168603-168607, 168609-168617, 168621, 168623-168629, 168631, 168633, 168636, 168638, 168641, 168645-168646, 168648, 168650, 168653-168657, 168659, 168662-168666, 168668-168671, 168677, 168683, 168686-168688, 168690, 168693, 168695, 168697-168706, 168711, 168713-168716, 168719-168720, 168722, 168724-168726, 168728-168731, 168733-168735, 168737, 168742, 168745, 168748-168749, 168753, 168755, 168758, 168761-168762, 168764, 168767-168769, 168772, 168776-168777, 168779, 168781, 168783, 168785-168788, 168790-168792, 168794, 168796-168800, 168802-168809, 168811, 168813, 168816, 168818, 168820-168825, 168828-168831, 168833-168837, 168840, 168842-168844, 168846-168848, 168851-168852, 168854-168855, 168857, 168859-168860, 168863-168864, 168870, 168873, 168875, 168878-168883, 168885, 168887-168889, 168891-168892, 168894-168903, 168905, 168909, 168911-168913, 168915-168918, 168921, 168924-168927, 168931, 168933, 168935-168937, 168940-168948, 168950-168951, 168954-168957, 168959-168962, 168964-168965, 168967-168973, 168975, 168977, 168980, 168982-168983, 168985, 168988-168991, 168994, 168997, 169000-169001, 169003-169006, 169008-169011, 169013-169018, 169020-169021, 169023, 169025, 169027-169028, 169030-169032, 169035-169036, 169041-169043, 169045-169052, 169054, 169057, 169059-169061, 169063, 169065-169066, 169070-169071, 169073-169082, 169085, 169089, 169091-169093, 169095-169097, 169099-169102, 169104-169108, 169110, 169112, 169114-169121, 169123, 169125, 169127-169129, 169132, 169134-169138, 169140-169145, 169147, 169149, 169151-169154, 169157-169158, 169160, 169162-169163, 169168-169177, 169179-169180, 169182-169183, 169186-169187, 169190-169191, 169193-169199, 169201-169205, 169207, 169212-169213, 169216-169219, 169221, 169225-169226, 169229-169231, 169234-169235, 169237-169242, 169246, 169248, 169259-169267, 169270, 169272, 169274-169275, 169277-169280, 169282-169285, 169291, 169300, 169303-169305, 169307-169311, 169313, 169315-169317, 169321, 169323-169325, 169327, 169333-169334, 169336-169345, 169348, 169351-169354, 169356-169357, 169361, 169363, 169365, 169368-169370, 169373-169374, 169376-169379, 169382, 169385, 169387-169388, 169391-169398, 169401, 169403, 169409-169410, 169412, 169414-169417, 169419, 169422-169425, 169429-169430, 169437-169439, 169442, 169445, 169447-169453, 169458, 169466-169469, 169473, 169475, 169477-169483, 169485-169490, 169492-169494, 169496-169498, 169504-169505, 169507-169508, 169510-169511, 169513, 169516-169517, 169520, 169522, 169524-169525, 169527, 169529-169537, 169539-169544, 169546-169548, 169552-169553, 169560-169563, 169565, 169567, 169569-169572, 169574-169576, 169579, 169582, 169584-169587, 169593, 169595, 169597-169598, 169600-169601, 169605-169608, 169610, 169613-169615, 169617-169618, 169620-169621, 169623-169625, 169630, 169632-169636, 169639, 169642-169647, 169649-169658, 169660-169661, 169663, 169666-169668, 169672, 169674-169678, 169682-169685, 169687-169689, 169692, 169694-169695, 169698-169702, 169704-169706, 169708-169710, 169713-169715, 169717-169721, 169723, 169727, 169732-169734, 169746-169749, 169751-169753, 169757, 169761-169770, 169774, 169777, 169781-169782, 169784-169786, 169788, 169790-169792, 169794-169795, 169797, 169799, 169801-169803, 169807-169808, 169810-169812, 169814, 169816, 169818-169822, 169825-169826, 169828-169829, 169832, 169834-169837, 169839, 169843-169844, 169849-169851, 169853-169855, 169857, 169859, 169862-169863, 169868, 169873-169876, 169878, 169882-169884, 169886-169888, 169890-169893, 169896-169900, 169904, 169908-169909, 169911-169912, 169914, 169920-169922, 169925-169935, 169937, 169939-169941, 169943, 169945-169946, 169948, 169950-169951, 169954-169956, 169958, 169960-169964, 169966-169967, 169969, 169973-169974, 169976, 169978, 169980, 169982-169983, 169992-169993, 169995-169996, 169998-170005, 170009, 170013-170014, 170016, 170018-170019, 170021, 170024-170026, 170028, 170031-170033, 170035, 170037, 170039-170046, 170048-170052, 170056-170060, 170063-170064, 170066, 170069-170071, 170073-170075, 170077-170079, 170081-170086, 170088-170089, 170091-170092, 170094, 170098-170100, 170103, 170107-170114, 170116-170117, 170119, 170122, 170124-170125, 170127, 170129-170136, 170140-170141, 170143-170145, 170147, 170149-170152, 170155-170158, 170161-170165, 170167-170169, 170171, 170174-170178, 170180-170187, 170191-170195, 170198-170200, 170204, 170206-170207, 170209-170210, 170212, 170214-170227, 170229-170234, 170238, 170242-170243, 170246-170247, 170249-170250, 170252-170254, 170256, 170259-170264, 170266-170268, 170271-170276, 170280, 170284-170285, 170287, 170290-170293, 170301-170305, 170309-170312, 170314-170318, 170320-170321, 170324-170329, 170331, 170334-170338, 170340, 170342-170343, 170345-170346, 170350, 170352, 170356, 170360, 170366, 170370, 170372-170375, 170377, 170379-170382, 170384-170385, 170389-170392, 170394-170398, 170400-170403, 170406-170411, 170413-170417, 170419-170420, 170422-170423, 170425-170431, 170435-170437, 170439-170440, 170442-170444, 170446-170447, 170450-170452, 170454-170455, 170457, 170459, 170464-170469, 170472, 170476-170477, 170480, 170483, 170485-170486, 170489, 170495, 170497, 170501-170502, 170504, 170507-170508, 170510-170511, 170513-170516, 170518-170519, 170521, 170524, 170526-170529, 170531-170542, 170546, 170549-170550, 170552-170555, 170558-170562, 170566, 170568-170570, 170572-170574, 170576-170579, 170581, 170583-170586, 170588, 170590-170595, 170597, 170599-170600, 170603, 170605-170606, 170609-170610, 170612-170615, 170617-170618, 170620, 170627, 170629-170631, 170634, 170637-170638, 170641, 170649-170651, 170653-170658, 170660-170661, 170663, 170665-170666, 170668-170672, 170676-170680, 170686, 170692-170693, 170695-170699, 170702, 170704, 170707-170708, 170713, 170715-170716, 170718, 170720, 170723-170727, 170730-170732, 170735-170737, 170740, 170742-170746, 170750, 170754, 170759-170760, 170763-170768, 170770, 170773, 170775-170777, 170779-170785, 170788-170790, 170793-170798, 170800, 170806, 170809-170814, 170816-170818, 170822, 170825-170831, 170833-170838, 170840-170844, 170846-170847, 170849-170850, 170852-170856, 170859, 170861-170862, 170867, 170869, 170871, 170874, 170876-170877, 170880-170885, 170888-170889, 170894-170896, 170898-170899, 170901-170902, 170907-170908, 170910-170913, 170918-170919, 170921-170924, 170926, 170929-170930, 170932, 170936-170938, 170940-170953, 170956-170961, 170963, 170965-170966, 170970, 170972-170973, 170975-170978, 170984, 170986, 170988-170990, 170992, 170994-170996, 170998-171002, 171004-171007, 171009, 171012-171013, 171015, 171018, 171021, 171023-171036, 171040, 171042, 171046-171047, 171049-171060, 171065-171073, 171075-171076, 171078-171084, 171086-171088, 171094-171095, 171097, 171100-171104, 171107, 171109-171110, 171112, 171115-171127, 171130-171137, 171141-171143, 171145-171147, 171150-171157, 171159, 171165, 171167-171172, 171174-171178, 171181-171182, 171186-171188, 171190-171192, 171194-171198, 171200-171201, 171204, 171206-171207, 171209, 171214, 171219-171220, 171226, 171228-171229, 171231, 171233-171235, 171237, 171240-171241, 171243-171254, 171257-171259, 171261-171263, 171265, 171268-171272, 171274-171278, 171280-171286, 171288-171290, 171293-171294, 171296-171297, 171299-171306, 171308, 171310, 171312, 171314, 171317-171318, 171324-171327, 171329, 171331, 171334, 171336-171337, 171340-171344, 171346, 171348-171349, 171351-171353, 171356-171359, 171362-171368, 171372, 171374-171377, 171379, 171381, 171386, 171388-171394, 171396-171397, 171399, 171401-171403, 171405-171407, 171410-171416, 171418-171423, 171427, 171429, 171431-171432, 171436, 171439-171440, 171442-171443, 171445, 171449, 171451-171452, 171456-171457, 171460-171467, 171469-171470, 171475, 171477-171479, 171483-171485, 171487, 171489-171490, 171492-171496, 171498, 171500, 171502-171505, 171509, 171511-171516, 171518-171520, 171523-171524, 171526, 171528-171537, 171539-171540, 171544, 171546-171547, 171549-171556, 171558-171559, 171561, 171564-171566, 171568-171572, 171575-171577, 171579, 171582, 171584-171588, 171593-171596, 171599-171601, 171603-171605, 171607-171608, 171610-171611, 171613-171614, 171617-171621, 171623-171627, 171632, 171636, 171640, 171642-171647, 171649-171650, 171652, 171654, 171656-171660, 171662-171665, 171668-171669, 171672-171673, 171675-171678, 171681-171688, 171690-171691, 171694-171700, 171702, 171705-171709, 171712, 171714-171715, 171719-171720, 171725-171735, 171737-171746, 171750-171757, 171760, 171762, 171764-171766, 171768, 171771-171772, 171775, 171777-171780, 171782-171786, 171790-171792, 171794-171802, 171804-171808, 171811-171813, 171815-171827, 171830-171838, 171842-171844, 171846-171851, 171853-171856, 171863, 171865-171866, 171869-171874, 171876, 171878-171880, 171882-171883, 171887-171889, 171891, 171894, 171897-171905, 171907-171916, 171918-171920, 171923-171924, 171926, 171929-171931, 171933-171937, 171941, 171945-171947, 171949, 171951-171952, 171956-171958, 171960, 171962, 171964-171965, 171967-171972, 171974-171975, 171977-171978, 171980-171981, 171983, 171985, 171987, 171989-171992, 171994-172007, 172009-172011, 172013-172018, 172020, 172022-172025, 172027, 172030-172031, 172033, 172035-172036, 172045-172046, 172048-172055, 172059-172063, 172067-172068, 172073, 172075-172077, 172079-172083, 172086-172087, 172089-172091, 172095, 172097-172102, 172104-172106, 172109-172112, 172115-172117, 172119-172120, 172123, 172126-172127, 172129-172132, 172134-172135, 172137-172147, 172149-172150, 172152-172155, 172157-172163, 172166, 172169-172170, 172172-172174, 172176-172183, 172185-172189, 172192-172194, 172196-172203, 172205, 172207-172210, 172212-172216, 172218-172222, 172224, 172226-172227, 172229, 172232-172233, 172235-172240, 172243-172244, 172246-172248, 172250-172251, 172253-172257, 172263-172265, 172270-172271, 172273, 172279, 172284-172293, 172295-172300, 172303-172304, 172306, 172309-172310, 172313, 172315-172316, 172318-172320, 172323-172324, 172326, 172330-172332, 172335-172336, 172338-172339, 172341-172346, 172348, 172351-172354, 172356-172357, 172359-172361, 172364-172368, 172370, 172372-172376, 172382, 172384-172385, 172390-172396, 172399-172402, 172404, 172406-172410, 172413-172416, 172419-172425, 172427-172430, 172433-172437, 172440-172441, 172443-172444, 172446-172449, 172451-172458, 172460, 172462-172463, 172466, 172469-172470, 172474-172476, 172478-172480, 172482-172485, 172487-172490, 172494, 172496, 172498, 172500-172505, 172508, 172510-172513, 172515-172518, 172523-172524, 172526, 172528, 172531, 172533, 172535-172537, 172543-172550, 172552-172558, 172561-172569, 172571-172579, 172581, 172584, 172586-172587, 172589, 172594-172595, 172597, 172600-172618, 172620-172624, 172627, 172630-172633, 172636, 172639-172640, 172643-172645, 172647-172653, 172655-172656, 172658, 172661-172662, 172664-172666, 172668-172675, 172677-172682, 172684-172690, 172693-172700, 172703, 172706, 172710-172712, 172714-172717, 172719-172720, 172723-172724, 172726, 172728-172731, 172735, 172738-172741, 172744-172745, 172747-172750, 172752-172758, 172761-172763, 172765, 172767-172769, 172771-172775, 172779-172781, 172785-172787, 172789-172791, 172793-172795, 172798, 172801-172804, 172806-172812, 172814-172816, 172818, 172820-172824, 172826, 172828, 172830, 172832, 172834-172836, 172838, 172840-172842, 172844-172847, 172851, 172853, 172855-172871, 172875, 172879-172880, 172882, 172885-172888, 172890-172891, 172893, 172895, 172897-172898, 172902-172906, 172911-172912, 172916, 172921, 172925-172929, 172932-172934, 172936, 172941, 172944-172947, 172949-172956, 172958, 172961-172962, 172964-172973, 172976-172977, 172979-172984, 172989-172991, 172995-173007, 173009-173012, 173015-173017, 173019-173021, 173023, 173027, 173029-173032, 173034-173036, 173038, 173040, 173042, 173047-173050, 173053-173054, 173057, 173059, 173061, 173066-173067, 173069, 173071, 173073, 173076, 173078, 173080-173081, 173083, 173086, 173088-173090, 173092, 173096-173098, 173100-173101, 173103-173105, 173107-173109, 173111, 173114, 173117-173123, 173128-173129, 173132, 173134-173137, 173141-173144, 173146-173151, 173158, 173160, 173163, 173165, 173167-173169, 173171, 173173-173181, 173184, 173187-173200, 173205, 173207-173208, 173212-173217, 173219-173220, 173222-173223, 173225, 173228-173231, 173235, 173239-173240, 173242-173243, 173245-173248, 173250, 173252-173253, 173255-173256, 173258-173260, 173262-173263, 173265-173268, 173270-173273, 173275-173276, 173278-173280, 173282, 173284-173288, 173290-173291, 173293-173294, 173296, 173298, 173300, 173302-173304, 173308-173309, 173312, 173315-173319, 173321, 173323-173327, 173329, 173333-173334, 173336-173346, 173348, 173351, 173354-173356, 173358, 173360-173363, 173365, 173367-173368, 173370-173372, 173375, 173378-173381, 173383-173384, 173387-173398, 173400-173404, 173407-173412, 173415, 173419-173421, 173425-173426, 173431-173432, 173436-173437, 173440, 173443-173454, 173456-173461, 173464-173465, 173468-173471, 173473, 173476-173479, 173481-173482, 173485, 173488-173493, 173495, 173504, 173506-173507, 173512-173516, 173518, 173521, 173523, 173525, 173527-173529, 173534, 173536-173543, 173545, 173547, 173549, 173551, 173554, 173556, 173558-173566, 173569-173571, 173573-173582, 173584, 173588-173589, 173591-173598, 173601-173604, 173608, 173610, 173612-173613, 173615-173617, 173620, 173622-173623, 173627, 173630-173638, 173640-173644, 173646, 173649-173652, 173654-173655, 173657-173658, 173660, 173662, 173665-173666, 173668-173670, 173672-173675, 173677-173679, 173681, 173683, 173686-173691, 173694-173696, 173698-173707, 173709, 173711, 173714, 173718-173722, 173724-173725, 173727, 173736, 173738, 173740, 173744-173751, 173753-173760, 173762, 173765, 173769-173777, 173779, 173782-173783, 173786-173794, 173798-173802, 173805-173816, 173818, 173820-173825, 173827, 173829, 173831-173832, 173834-173837, 173840-173841, 173843, 173845, 173851, 173853-173854, 173856, 173858, 173860-173864, 173866, 173868, 173873-173874, 173877, 173879-173886, 173889, 173891, 173894-173901, 173903, 173905, 173907, 173909, 173912-173913, 173915-173918, 173920-173928, 173930, 173932-173933, 173936-173946, 173948-173952, 173954-173956, 173958, 173960-173963, 173965-173968, 173970, 173972-173975, 173977-173978, 173982-173984, 173987-173991, 173994-173995, 174000-174015, 174017-174020, 174023-174032, 174035-174042, 174044-174049, 174051-174057, 174059, 174062-174069, 174071, 174074, 174076-174082, 174084-174086, 174093-174095, 174102-174105, 174110-174111, 174114, 174119-174120, 174123-174125, 174136, 174138, 174141-174146, 174148, 174151, 174156-174158, 174162-174163, 174166-174172, 174174, 174177-174179, 174184-174185, 174188, 174190-174191, 174194, 174196-174199, 174201, 174203-174205, 174207, 174211-174215, 174217-174219, 174221-174222, 174225-174227, 174229-174231, 174233, 174235-174236, 174243, 174245, 174247, 174249, 174251-174263, 174265-174266, 174274, 174276, 174278-174279, 174281, 174283-174284, 174286-174288, 174291-174294, 174296-174304, 174307-174317, 174319-174320, 174325-174326, 174328-174329, 174334-174336, 174339-174345, 174348-174350, 174354-174355, 174359-174361, 174363-174364, 174367-174369, 174372-174373, 174375-174378, 174385-174389, 174392-174395, 174397, 174399-174400, 174402-174405, 174407, 174409, 174411, 174413-174416, 174418-174431, 174437, 174439-174440, 174442-174443, 174446-174449, 174452, 174456, 174458-174459, 174461-174462, 174465, 174467-174468, 174472-174473, 174478-174479, 174482, 174486, 174488-174492, 174495, 174497-174498, 174500-174502, 174504, 174506-174511, 174513-174515, 174518-174519, 174521-174524, 174526-174528, 174531-174533, 174535-174536, 174538-174546, 174549, 174551-174552, 174554, 174556-174558, 174561-174564, 174566, 174570-174576, 174578, 174580, 174582-174583, 174585-174586, 174589-174590, 174592, 174596-174600, 174602-174604, 174608, 174613-174614, 174616-174619, 174621-174623, 174625, 174628, 174630-174635, 174638, 174640-174641, 174646, 174648-174653, 174655-174661, 174663, 174665-174667, 174670, 174673-174680, 174684, 174686-174693, 174695-174713, 174715-174719, 174721-174722, 174724-174730, 174732-174735, 174737, 174741-174745, 174749, 174751-174756, 174758-174760, 174763-174764, 174766-174774, 174776-174780, 174782-174783, 174785-174786, 174788-174795, 174798, 174801-174803, 174806-174807, 174809-174811, 174813-174815, 174817-174823, 174825, 174827-174832, 174834, 174836, 174840-174847, 174850, 174852, 174855-174861, 174863-174889, 174891-174894, 174896, 174898-174905, 174907-174909, 174912-174913, 174916-174917, 174919-174923, 174925-174927, 174929-174930, 174934-174936, 174938, 174940, 174942-174952, 174954-174961, 174963-174964, 174966, 174968-174974, 174976, 174978-174979, 174982, 174984, 174986-174999, 175001-175002, 175005-175012, 175014, 175017, 175019, 175022-175024, 175026-175033, 175035-175041, 175043-175047, 175049-175053, 175055, 175058-175059, 175061-175063, 175067, 175070-175071, 175073, 175075-175079, 175081, 175084-175085, 175088-175090, 175092-175094, 175099-175112, 175114-175116, 175118-175119, 175121-175123, 175128, 175130-175134, 175137, 175139-175141, 175143-175149, 175151-175153, 175158-175159, 175162-175165, 175167, 175170-175173, 175177-175180, 175182, 175185-175187, 175189, 175191-175192, 175194, 175196, 175198-175199, 175201, 175204-175205, 175207-175214, 175216-175217, 175219-175223, 175227-175228, 175230, 175233, 175236-175238, 175240, 175242-175244, 175246-175247, 175251, 175254-175259, 175261, 175264, 175269, 175272-175274, 175276, 175279-175284, 175287, 175291, 175293-175294, 175296-175303, 175307-175313, 175315, 175317-175328, 175330, 175332-175333, 175338, 175340, 175342-175343, 175345-175348, 175350-175351, 175353, 175355-175356, 175360, 175362-175364, 175366-175367, 175369-175370, 175373, 175376-175377, 175380, 175383, 175386-175388, 175390-175391, 175393, 175397, 175399, 175401-175404, 175406-175407, 175410, 175412-175413, 175415-175417, 175420, 175424-175426, 175429-175431, 175433, 175436-175445, 175448, 175450-175452, 175456-175457, 175461-175467, 175470, 175480, 175482, 175484-175485, 175488, 175490-175492, 175494, 175496-175498, 175501-175503, 175505-175506, 175512, 175514-175515, 175517-175518, 175520-175524, 175526, 175530-175531, 175533-175534, 175536, 175539-175542, 175544, 175546-175548, 175551, 175553-175557, 175560, 175563-175564, 175566, 175568-175573, 175575, 175577-175579, 175582-175584, 175586-175589, 175591-175594, 175596-175598, 175600-175603, 175605-175606, 175614-175617, 175619-175622, 175625-175630, 175632-175633, 175636-175637, 175641, 175643-175651, 175653, 175656, 175658-175661, 175663-175664, 175666-175671, 175675-175679, 175681-175682, 175687, 175689, 175691-175693, 175695, 175697, 175699, 175704-175707, 175709, 175712-175713, 175716-175718, 175720-175725, 175728-175729, 175731-175732, 175734, 175736-175745, 175748-175749, 175751, 175755-175756, 175758-175759, 175762-175764, 175767-175773, 175775-175777, 175779-175785, 175788-175791, 175793, 175795-175798, 175800-175806, 175808-175815, 175819, 175821, 175823, 175825, 175828-175829, 175831, 175833, 175835-175836, 175842-175844, 175847-175857, 175865, 175867-175871, 175873-175875, 175877-175880, 175882-175884, 175886, 175888-175889, 175891-175892, 175894-175899, 175902, 175904, 175907-175910, 175912-175913, 175917-175918, 175922-175924, 175926-175936, 175938-175939, 175942-175947, 175949-175963, 175965-175967, 175969-175972, 175975-175976, 175979-175986, 175990-175994, 175998-175999, 176001-176003, 176005-176006, 176009-176010, 176012-176015, 176017, 176019, 176021, 176024-176030, 176032-176034, 176036-176043, 176045-176047, 176049-176057, 176059-176060, 176062, 176065-176066, 176068-176069, 176071-176079, 176081-176086, 176089-176094, 176096, 176098-176104, 176106, 176109, 176111-176112, 176114, 176118-176119, 176122-176126, 176128-176130, 176133-176134, 176137-176145, 176147-176148, 176150-176151, 176153-176154, 176156-176159, 176161-176162, 176164-176166, 176168-176170, 176172-176182, 176186-176187, 176190-176196, 176198-176201, 176204-176209, 176212-176215, 176217, 176220-176221, 176223, 176225, 176227-176228, 176230, 176234-176236, 176238-176240, 176243, 176245-176250, 176252-176253, 176255-176260, 176262-176264, 176266, 176270, 176272-176274, 176280, 176282, 176284-176287, 176291-176294, 176298, 176301-176303, 176305-176308, 176310, 176312, 176315-176316, 176319-176321, 176324, 176326, 176329-176330, 176334, 176336, 176338, 176340-176342, 176344-176350, 176354-176357, 176361-176364, 176366-176368, 176371-176373, 176375-176382, 176384-176387, 176389-176403, 176406-176411, 176414-176416, 176418-176419, 176421-176425, 176429-176430, 176432-176437, 176442-176443, 176445-176449, 176451-176452, 176454-176456, 176460, 176462, 176464, 176466-176467, 176469, 176471-176473, 176478-176480, 176483-176490, 176494-176495, 176497-176499, 176501-176503, 176505, 176507, 176510-176514, 176516-176518, 176520, 176522-176524, 176526, 176528-176530, 176534-176535, 176537, 176539-176541, 176543-176544, 176546-176550, 176552-176553, 176559, 176561-176562, 176564-176569, 176574-176583, 176587-176589, 176591, 176593, 176595-176598, 176601-176602, 176604, 176607, 176610, 176612, 176614, 176617-176624, 176628-176629, 176631-176633, 176635-176637, 176641, 176643-176646, 176650, 176654-176662, 176664-176668, 176672-176674, 176677-176678, 176680, 176682, 176684-176685, 176687-176691, 176693, 176695-176696, 176698-176699, 176701-176702, 176704-176708, 176710-176711, 176714-176717, 176720-176725, 176727-176730, 176732-176735, 176737-176738, 176740-176743, 176748, 176750-176751, 176753, 176756-176757, 176762-176763, 176767-176768, 176770, 176773-176774, 176776-176781, 176783, 176786-176788, 176791-176797, 176799-176800, 176802-176805, 176807, 176813-176816, 176818-176820, 176822, 176824-176826, 176833-176834, 176837, 176839-176844, 176846-176847, 176849-176851, 176854-176860, 176862-176864, 176866-176869, 176871, 176874, 176877, 176879, 176882-176883, 176885, 176887-176889, 176891-176892, 176894, 176897-176902, 176906-176909, 176913-176921, 176923, 176925-176928, 176930-176933, 176936-176939, 176942-176949, 176951-176952, 176954, 176957, 176959-176961, 176969-176974, 176976, 176978-176981, 176983-176989, 176993, 176996-176998, 177000, 177007-177008, 177010-177011, 177015-177016, 177018-177022, 177024, 177026-177028, 177031, 177034-177038, 177040-177041, 177043, 177045, 177049-177052, 177054, 177056-177057, 177060-177062, 177064-177071, 177074-177075, 177077, 177080, 177084-177085, 177088-177089, 177091, 177093-177095, 177102, 177104-177107, 177109-177110, 177112, 177118-177120, 177126, 177129, 177131, 177135-177143, 177146-177154, 177156-177160, 177164, 177166-177167, 177169, 177171-177172, 177178-177183, 177185-177189, 177191, 177193-177194, 177198, 177200-177201, 177204-177207, 177210, 177212-177213, 177217-177225, 177228, 177230, 177232-177233, 177235, 177237, 177240-177255, 177257-177259, 177261, 177263, 177266-177271, 177273-177274, 177276-177278, 177280, 177282-177283, 177286-177287, 177291-177299, 177301-177304, 177306-177308, 177310, 177312-177314, 177316, 177321-177322, 177325-177328, 177330, 177332-177334, 177339-177342, 177344-177346, 177348-177356, 177358-177362, 177365-177367, 177369, 177371-177372, 177374-177377, 177381-177383, 177386, 177388-177389, 177393, 177395-177396, 177399, 177401, 177403, 177406-177413, 177415-177421, 177425-177430, 177432-177449, 177451-177452, 177457, 177459, 177462-177466, 177468-177469, 177472, 177474, 177477-177478, 177480, 177482-177484, 177486-177488, 177490-177493, 177496-177499, 177505-177506, 177509, 177512-177513, 177521-177522, 177524-177528, 177530, 177532, 177534-177535, 177538-177544, 177546-177550, 177553, 177555-177557, 177560-177564, 177566-177567, 177569, 177571-177572, 177577, 177580, 177582-177586, 177588-177590, 177593, 177595, 177600, 177602, 177605-177606, 177608-177611, 177613, 177615, 177617-177618, 177620-177623, 177625-177628, 177631, 177633-177634, 177636-177639, 177641, 177643-177646, 177650, 177653-177654, 177656, 177658-177660, 177663-177664, 177667, 177669-177671, 177673, 177675-177676, 177678, 177682-177689, 177691-177694, 177696-177697, 177699-177702, 177705, 177707-177708, 177710-177716, 177719-177730, 177733-177735, 177740-177746, 177749-177750, 177752, 177754-177759, 177761-177766, 177768-177769, 177771-177772, 177774-177782, 177785-177786, 177789, 177792-177803, 177805-177809, 177811-177817, 177820-177824, 177826-177827, 177830, 177832-177834, 177836-177837, 177839-177840, 177842-177846, 177848-177850, 177852-177857, 177859-177860, 177862, 177864-177867, 177869, 177871, 177873-177879, 177882, 177887-177892, 177894, 177897-177899, 177901-177904, 177908, 177911-177925, 177928, 177931-177937, 177942-177944, 177946-177951, 177954-177958, 177960, 177962-177965, 177967-177969, 177971-177973, 177975, 177979-177980, 177983-177984, 177989, 177991-177995, 177997-178005, 178007, 178009-178010, 178014-178018, 178021, 178023, 178025-178029, 178031-178033, 178035-178037, 178039-178047, 178052-178055, 178058-178060, 178062-178067, 178072, 178074-178077, 178079-178084, 178086-178087, 178090, 178092, 178095-178097, 178099-178106, 178109-178110, 178112, 178114-178126, 178128, 178132-178135, 178138, 178140-178141, 178144-178145, 178147, 178149-178150, 178153-178157, 178159-178160, 178163, 178165-178168, 178170, 178172, 178175-178176, 178179-178185, 178187-178188, 178190, 178192-178197, 178199-178209, 178212-178213, 178217, 178219-178224, 178226, 178229-178230, 178233-178237, 178239-178244, 178246-178248, 178252, 178255, 178258-178259, 178261-178262, 178264, 178267, 178272-178273, 178281, 178283, 178286-178296, 178298-178299, 178301, 178303-178305, 178308, 178311-178316, 178318, 178321-178322, 178324-178330, 178332, 178335, 178346-178350, 178352-178356, 178359-178362, 178364, 178366-178368, 178372-178373, 178375, 178377-178379, 178381-178383, 178385-178387, 178389, 178393, 178395, 178398, 178400-178402, 178404, 178406, 178408, 178410-178420, 178422-178436, 178438-178439, 178441, 178447, 178451-178454, 178456-178459, 178461-178463, 178465, 178467-178470, 178473, 178477-178485, 178487, 178489, 178492-178495, 178497, 178500-178501, 178503, 178506-178517, 178519-178521, 178523-178530, 178535-178545, 178547-178549, 178551-178553, 178556, 178558-178561, 178564-178572, 178576-178578, 178581-178583, 178585-178587, 178589, 178592-178593, 178598, 178600, 178602-178604, 178606-178610, 178615, 178617-178618, 178622, 178624-178630, 178632, 178637, 178639, 178643-178644, 178647-178652, 178654, 178656, 178658-178662, 178664-178665, 178668-178669, 178676-178681, 178683-178684, 178687, 178689, 178692, 178694, 178696, 178698-178699, 178701, 178703, 178705, 178707-178714, 178716-178718, 178722-178735, 178737-178745, 178747-178750, 178752, 178757-178758, 178760-178761, 178763-178764, 178766-178768, 178770-178776, 178779-178783, 178785-178793, 178796, 178799, 178801-178803, 178807, 178809-178810, 178812-178813, 178815, 178817-178820, 178822-178824, 178826-178835, 178837-178843, 178846-178850, 178852-178856, 178861-178862, 178864-178865, 178868-178869, 178871, 178874-178879, 178881, 178883-178885, 178887-178889, 178891-178895, 178897, 178899-178900, 178902, 178905-178907, 178910-178911, 178914-178915, 178918-178919, 178923, 178925-178926, 178928, 178930-178932, 178934-178936, 178938-178944, 178946, 178948-178953, 178955-178956, 178959-178961, 178963, 178965-178969, 178971-178975, 178978-178979, 178981-178986, 178988-178989, 178991-178992, 178994, 179000, 179004-179005, 179007, 179009, 179011-179012, 179014, 179018-179024, 179026, 179028-179029, 179031, 179034, 179039, 179041-179043, 179045-179046, 179050, 179052, 179055-179058, 179060-179063, 179066, 179068, 179071-179072, 179075-179076, 179078-179080, 179082-179083, 179085-179088, 179090-179093, 179096-179097, 179099-179100, 179105-179106, 179108-179109, 179111-179119, 179123, 179125, 179127-179129, 179132, 179134, 179136, 179139-179140, 179142-179144, 179147, 179149-179153, 179155, 179157-179158, 179162-179165, 179167, 179171, 179173-179174, 179176-179180, 179182-179186, 179188, 179191-179192, 179194, 179197, 179199-179206, 179210, 179212-179217, 179220, 179222, 179226, 179228, 179230, 179234-179236, 179238-179239, 179242-179243, 179245, 179247, 179249-179257, 179260-179263, 179265-179273, 179275-179285, 179287-179299, 179301-179310, 179312-179315, 179317-179318, 179320-179326, 179333, 179335, 179338-179340, 179343-179348, 179352, 179354, 179358-179360, 179364-179365, 179368-179369, 179373-179376, 179378, 179380-179381, 179383-179390, 179393, 179398-179400, 179404-179406, 179408-179416, 179419-179425, 179429, 179431, 179437-179443, 179445-179448, 179451, 179453-179455, 179457-179459, 179462-179464, 179467, 179472, 179478-179480, 179482-179485, 179488, 179490-179492, 179494-179500, 179502, 179506-179515, 179517, 179519, 179522, 179525-179526, 179530-179531, 179536-179538, 179544-179547, 179549-179553, 179555-179557, 179562-179564, 179566, 179568-179571, 179574, 179582-179595, 179599, 179601-179604, 179607, 179609-179610, 179612-179613, 179615-179616, 179618-179619, 179623, 179628, 179630-179632, 179634, 179638-179640, 179646, 179652-179653, 179655-179658, 179660-179662, 179665-179667, 179669-179671, 179674, 179680, 179683, 179686, 179688, 179690, 179693, 179695-179697, 179699, 179701, 179703, 179705-179707, 179711-179713, 179715, 179717-179724, 179727-179728, 179730, 179732, 179739-179740, 179742-179743, 179745-179747, 179749-179751, 179753, 179755-179764, 179766, 179768-179773, 179775, 179778-179786, 179789-179792, 179796-179797, 179802-179803, 179805, 179807, 179809, 179812-179817, 179823-179830, 179832-179834, 179836, 179838, 179841, 179844-179847, 179849, 179852, 179855-179860, 179862-179863, 179865-179867, 179869-179871, 179873-179874, 179876-179878, 179882-179887, 179890-179896, 179900-179903, 179905-179906, 179910, 179913-179917, 179919-179920, 179922-179926, 179928, 179930-179932, 179934-179935, 179937-179938, 179941-179943, 179946, 179948-179949, 179952-179954, 179956, 179959, 179961-179963, 179965-179968, 179970-179972, 179976-179981, 179985, 179989-179992, 179995-179996, 179999, 180001, 180003-180006, 180008, 180012-180017, 180019, 180021-180022, 180024-180028, 180031, 180033-180037, 180043, 180046, 180048-180049, 180052-180053, 180059-180065, 180069, 180071, 180073-180082, 180085-180087, 180091-180093, 180095-180098, 180100-180105, 180108, 180112, 180115-180117, 180119-180121, 180123-180127, 180129-180133, 180135, 180137-180140, 180142-180143, 180146, 180148, 180150-180151, 180153-180169, 180171-180191, 180193-180197, 180199-180202, 180204-180205, 180208, 180210, 180212, 180214, 180217, 180219, 180221-180222, 180224-180226, 180228, 180230, 180232, 180235, 180238-180240, 180243-180244, 180250, 180252, 180254, 180256, 180258, 180260-180264, 180268-180271, 180275, 180281, 180283, 180285, 180287-180292, 180294-180295, 180298, 180300-180301, 180303, 180305, 180308, 180311, 180313, 180315, 180317-180319, 180321-180323, 180325-180326, 180329-180331, 180333-180334, 180336-180338, 180343-180344, 180346-180350, 180353, 180355, 180357, 180359-180361, 180364, 180366-180368, 180374-180383, 180386-180387, 180389-180392, 180394-180397, 180399-180400, 180402, 180404, 180408, 180410, 180412-180415, 180417, 180420-180423, 180426-180430, 180435-180437, 180439-180440, 180443-180455, 180457, 180462-180463, 180465-180469, 180472-180476, 180479-180481, 180483, 180485-180486, 180488, 180490-180491, 180494, 180497-180500, 180502-180508, 180510, 180513-180515, 180519, 180523-180527, 180534-180540, 180544-180545, 180548-180549, 180551, 180554, 180559-180560, 180562-180569, 180572, 180574-180577, 180579-180583, 180587-180589, 180591, 180593-180601, 180603-180604, 180606-180609, 180615-180616, 180620, 180622-180623, 180626-180630, 180632, 180634, 180636-180637, 180640, 180644-180650, 180652, 180654, 180660-180661, 180663-180667, 180669, 180676, 180678-180684, 180686-180687, 180689-180691, 180694-180701, 180703-180707, 180709-180712, 180714-180715, 180717-180718, 180720-180723, 180726-180729, 180732, 180734-180738, 180742-180744, 180746, 180749, 180751, 180753-180756, 180758-180759, 180762-180764, 180766, 180778-180782, 180785-180787, 180801, 180805, 180807, 180809, 180814, 180816, 180818, 180820-180823, 180825-180826, 180828-180829, 180832-180833, 180835, 180837-180838, 180842-180847, 180849-180850, 180856-180857, 180861, 180863, 180868-180869, 180872, 180876, 180881, 180883-180884, 180887-180889, 180891-180895, 180897, 180899-180900, 180903-180904, 180910-180912, 180914-180921, 180926, 180928-180937, 180939, 180942-180945, 180947-180948, 180950-180952, 180954-180960, 180962-180969, 180973-180975, 180980, 180982-180986, 180988, 180990, 180992, 180995, 180997-181002, 181004, 181006, 181008, 181011-181018, 181020, 181022-181029, 181031, 181036-181037, 181040-181046, 181049-181050, 181053, 181056, 181058, 181060-181063, 181066-181067, 181069, 181071-181075, 181077-181083, 181085-181086, 181088, 181091-181102, 181104, 181106, 181108-181109, 181111-181114, 181117-181126, 181128-181130, 181132, 181136, 181139, 181141-181142, 181145-181148, 181152-181155, 181157-181159, 181164-181170, 181172-181173, 181178, 181181-181186, 181188-181193, 181196-181198, 181201, 181203-181214, 181218-181221, 181223-181230, 181232-181234, 181238-181240, 181244, 181247, 181257, 181260-181265, 181269, 181271, 181273-181278, 181280-181281, 181285-181288, 181290, 181293, 181295-181298, 181300-181305, 181307-181308, 181310, 181312, 181314-181319, 181322, 181324, 181326-181327, 181329-181330, 181332-181343, 181346, 181348, 181350, 181352, 181354, 181356, 181360-181363, 181366, 181368-181370, 181372-181374, 181377, 181379, 181382-181388, 181390, 181395-181397, 181399-181402, 181408-181409, 181411, 181414-181421, 181424-181426, 181429-181430, 181432, 181434, 181436-181437, 181440-181442, 181444, 181447-181448, 181450-181452, 181454-181457, 181460-181461, 181463, 181467-181468, 181473, 181476-181482, 181485, 181488-181489, 181492-181494, 181502-181506, 181508-181509, 181513-181515, 181521-181522, 181526, 181528, 181533, 181536-181537, 181541-181544, 181546, 181552, 181554-181555, 181557-181558, 181560, 181562-181564, 181567-181570, 181572, 181574-181576, 181578-181579, 181581-181583, 181585-181586, 181588, 181591-181593, 181598-181600, 181602-181605, 181607-181609, 181614-181616, 181624-181636, 181639, 181641-181644, 181647-181648, 181651-181658, 181660, 181662-181666, 181668-181673, 181675-181678, 181681-181682, 181685-181687, 181690, 181696-181706, 181709-181711, 181713, 181715, 181717-181718, 181720-181728, 181731, 181734-181735, 181742, 181744, 181746, 181748, 181750, 181753, 181761, 181763, 181765, 181770-181771, 181773, 181776, 181779-181781, 181783-181785, 181787, 181791-181792, 181794, 181796-181798, 181800-181801, 181803, 181805, 181808-181814, 181816-181818, 181820-181825, 181827-181832, 181835-181839, 181841-181846, 181848-181849, 181851, 181853-181855, 181857-181860, 181864-181865, 181867, 181869-181870, 181872-181873, 181875-181884, 181886-181892, 181894-181898, 181900, 181903, 181905-181907, 181909, 181913-181919, 181921-181927, 181929-181946, 181948-181953, 181956-181957, 181959, 181961-181966, 181969-181978, 181981, 181983, 181987, 181989-181990, 181992, 181994, 181996-181998, 182000-182001, 182004-182010, 182013-182014, 182016-182022, 182025-182026, 182028-182033, 182036, 182038, 182041-182044, 182046-182048, 182050-182054, 182056, 182058, 182060-182062, 182064-182066, 182068, 182071, 182079, 182082-182083, 182085-182087, 182089-182092, 182098-182099, 182101, 182103, 182105, 182109-182113, 182115-182120, 182122-182123, 182125-182128, 182133-182134, 182138-182140, 182144-182148, 182150-182151, 182155-182156, 182158-182161, 182163-182164, 182166-182169, 182176, 182178-182179, 182186, 182193, 182196-182201, 182204, 182208-182210, 182212-182214, 182222-182225, 182228, 182230-182233, 182236-182237, 182239-182247, 182253-182254, 182256, 182258, 182265, 182267, 182269, 182271, 182273-182274, 182277, 182280-182281, 182286-182287, 182289-182290, 182292, 182294-182295, 182298-182300, 182303, 182310-182314, 182321, 182323-182327, 182329-182334, 182339, 182341, 182343, 182349-182354, 182356-182357, 182359, 182361, 182364-182365, 182367-182370, 182372-182375, 182377-182379, 182381-182382, 182384, 182392-182393, 182395-182396, 182398-182399, 182401, 182407, 182409-182410, 182420-182421, 182423-182424, 182426, 182428-182434, 182437-182447, 182449-182450, 182453, 182455, 182457, 182460-182463, 182465-182471, 182473-182474, 182476-182477, 182479-182480, 182482, 182486, 182489, 182491, 182497-182498, 182500, 182502-182506, 182511-182513, 182515, 182520-182523, 182525, 182527, 182531-182536, 182539, 182544-182546, 182549, 182553-182558, 182560, 182562-182566, 182569-182570, 182577-182580, 182584, 182589-182594, 182598-182599, 182604-182605, 182608, 182610, 182612, 182614-182616, 182619, 182625, 182628, 182630-182631, 182635-182637, 182643, 182646, 182650-182652, 182659-182662, 182664-182668, 182671, 182673-182674, 182676, 182678-182679, 182681-182692, 182694-182703, 182705-182706, 182708-182710, 182714, 182720-182721, 182723-182725, 182728-182736, 182739-182745, 182748-182749, 182751, 182753, 182758, 182761-182765, 182770-182771, 182775-182780, 182786-182791, 182793, 182796, 182798-182799, 182801-182807, 182810, 182813, 182816, 182818-182819, 182823-182827, 182829-182832, 182835-182837, 182841, 182843-182844, 182846, 182848, 182850, 182854-182855, 182861-182862, 182866-182867, 182869-182870, 182872-182874, 182877, 182882-182884, 182886-182887, 182891, 182895-182896, 182898-182905, 182909-182913, 182915, 182921-182923, 182925-182926, 182930, 182935, 182941, 182944, 182950, 182952-182956, 182959-182960, 182962-182963, 182969, 182973-182974, 182977-182981, 182987-182988, 182990-182991, 182995, 182999, 183001-183002, 183007, 183009-183012, 183015, 183017, 183019, 183021-183024, 183028-183036, 183040, 183045, 183048, 183051-183053, 183058-183059, 183061, 183064-183066, 183068, 183070-183071, 183073, 183075-183078, 183080, 183084, 183086, 183090-183091, 183093-183094, 183096-183100, 183103, 183107, 183109, 183111-183112, 183115-183116, 183118, 183121-183123, 183125-183131, 183136-183139, 183141-183143, 183147, 183149-183150, 183152, 183154-183156, 183159-183162, 183166, 183171-183172, 183174-183175, 183178-183180, 183182, 183187-183190, 183192-183193, 183199, 183201-183204, 183207, 183210, 183214-183215, 183217, 183219, 183222, 183224-183231, 183233, 183239, 183243-183247, 183252-183262, 183265-183269, 183272, 183274, 183276-183281, 183284-183286, 183290, 183292-183293, 183295, 183302-183303, 183305-183313, 183315-183316, 183318, 183322, 183327-183331, 183334, 183336-183337, 183339-183346, 183348, 183351, 183354, 183357, 183360-183361, 183363-183368, 183374-183375, 183379, 183381-183384, 183386-183392, 183394, 183396-183401, 183403, 183406, 183412, 183416, 183418-183421, 183423, 183428-183435, 183439, 183442, 183445-183448, 183453-183455, 183458, 183462-183465, 183467, 183475-183477, 183480-183481, 183484-183485, 183487-183489, 183491, 183493-183495, 183497, 183499-183500, 183504-183506, 183509-183510, 183512-183514, 183524-183527, 183529-183532, 183534-183536, 183538-183542, 183544, 183546, 183548-183551, 183557, 183560, 183562-183567, 183569, 183571, 183573-183574, 183576, 183578-183581, 183584-183587, 183589, 183592-183597, 183599-183601, 183604-183608, 183610, 183615-183616, 183619-183621, 183626, 183629-183631, 183633-183638, 183640, 183642, 183646-183649, 183651, 183653-183654, 183656-183658, 183661, 183665-183667, 183669, 183672, 183675-183679, 183681, 183684, 183689, 183691-183694, 183698, 183703-183705, 183708-183709, 183711-183721, 183727-183728, 183730, 183732, 183734-183735, 183737-183739, 183742, 183744, 183747-183749, 183753-183759, 183762-183763, 183765-183768, 183770-183771, 183773-183774, 183776-183777, 183783-183785, 183787-183788, 183790, 183792-183794, 183796, 183800-183801, 183803, 183806, 183808-183813, 183816, 183818, 183820-183823, 183825, 183829-183831, 183833-183835, 183837-183839, 183841-183845, 183849-183850, 183854, 183856-183857, 183862, 183867-183868, 183870-183872, 183875, 183877, 183880, 183882-183884, 183886, 183889, 183891, 183893-183894, 183896, 183899, 183903-183904, 183907-183908, 183911-183915, 183918, 183924-183925, 183927, 183930, 183938-183939, 183941, 183946, 183949, 183951, 183954, 183957-183959, 183961-183962, 183964-183967, 183969-183972, 183974-183976, 183979-183981, 183983-183987, 183989-183991, 183994-183996, 183999-184006, 184008-184010, 184012, 184019-184021, 184024, 184026, 184029-184030, 184032-184033, 184035-184037, 184041, 184043, 184046-184048, 184050-184053, 184055-184060, 184062, 184064-184070, 184074, 184076-184077, 184079, 184083, 184085-184087, 184089-184091, 184093, 184095-184103, 184105-184109, 184111-184112, 184115, 184122, 184124, 184135-184137, 184139, 184141, 184145-184146, 184148, 184151-184154, 184157, 184162-184167, 184169-184175, 184177-184182, 184186, 184189-184190, 184192, 184199, 184201-184207, 184210, 184213-184216, 184219, 184221-184222, 184225, 184227, 184231-184238, 184240-184241, 184244-184246, 184249, 184251-184256, 184258, 184260-184262, 184265, 184267-184273, 184275-184280, 184282, 184287-184288, 184290-184292, 184299-184301, 184304-184305, 184311, 184313-184315, 184318, 184321-184324, 184326-184328, 184330-184331, 184333-184334, 184336-184337, 184339-184343, 184345-184347, 184350, 184352-184355, 184357, 184363, 184365-184369, 184373, 184376-184378, 184380-184382, 184386, 184388-184391, 184394-184401, 184403-184404, 184406-184408, 184411-184415, 184420, 184422, 184425-184431, 184433-184436, 184442, 184447-184448, 184450-184452, 184454-184455, 184457-184458, 184461-184473, 184475-184476, 184478, 184480-184481, 184487, 184489-184494, 184499-184500, 184502-184505, 184507, 184509, 184511, 184513-184514, 184517-184522, 184524-184526, 184532-184534, 184536, 184539-184542, 184545, 184548, 184552, 184555, 184558, 184565-184566, 184568, 184570, 184572-184573, 184576-184579, 184581, 184589-184591, 184594, 184608, 184610, 184612, 184615-184616, 184621, 184623-184624, 184633-184634, 184636, 184639, 184641-184642, 184653, 184655-184656, 184658, 184661-184663, 184665, 184669, 184671, 184674-184675, 184677-184682, 184684-184687, 184689-184692, 184695-184698, 184702-184705, 184707-184711, 184713-184716, 184719, 184722-184724, 184726-184730, 184732-184733, 184735, 184737-184739, 184743, 184745, 184751, 184755-184756, 184766-184772, 184774-184775, 184778-184779, 184782-184784, 184787, 184789-184790, 184792-184795, 184798, 184803, 184805, 184807-184810, 184812-184814, 184816-184817, 184823, 184826-184827, 184829, 184831-184835, 184838, 184843-184844, 184847, 184851-184855, 184857, 184860-184870, 184872, 184875-184876, 184878-184885, 184889, 184893-184896, 184899, 184901-184903, 184905, 184908, 184910, 184914-184919, 184921-184922, 184924-184927, 184929, 184935, 184937-184938, 184942-184943, 184948-184949, 184951-184952, 184955, 184957-184958, 184967-184969, 184974-184977, 184979-184981, 184983-184988, 184996, 185001-185006, 185008, 185014-185015, 185017, 185020-185021, 185023, 185028-185032, 185034-185035, 185039, 185042-185043, 185051, 185053-185058, 185061-185063, 185068-185069, 185072-185074, 185076, 185080, 185082-185085, 185087-185088, 185090-185093, 185096-185101, 185104, 185107-185109, 185111, 185115, 185117-185119, 185123, 185126, 185128-185132, 185135-185140, 185144-185148, 185150-185151, 185154, 185157, 185162-185164, 185166, 185173, 185176-185179, 185182, 185190, 185192-185193, 185197, 185201, 185204-185205, 185208-185209, 185215-185217, 185220-185221, 185223, 185233, 185237, 185241, 185243, 185245-185248, 185250-185251, 185255-185257, 185261, 185263-185266, 185269-185270, 185272, 185276, 185278, 185282, 185284, 185287, 185290-185294, 185296-185297, 185299, 185301-185302, 185305-185310, 185312-185316, 185318-185329, 185334-185339, 185342-185344, 185352-185353, 185357-185358, 185360-185361, 185363-185367, 185373, 185375, 185377, 185384, 185386, 185389, 185397, 185399-185402, 185406, 185410, 185412-185414, 185416, 185418-185419, 185423, 185425-185426, 185428-185430, 185433-185444, 185449-185450, 185453-185454, 185457-185462, 185464, 185467-185473, 185476-185477, 185479-185480, 185482-185484, 185486, 185490, 185492-185494, 185501, 185506-185507, 185510, 185513-185518, 185520, 185526, 185528-185533, 185535-185536, 185538-185540, 185542, 185552, 185554, 185556, 185558-185559, 185562-185563, 185570, 185575-185576, 185578-185582, 185586, 185589, 185591, 185593-185594, 185599-185604, 185607, 185609-185614, 185617, 185619-185621, 185623-185626, 185629-185633, 185635-185636, 185641, 185645-185648, 185650-185651, 185653, 185655-185660, 185662, 185664-185666, 185673, 185675, 185683-185685, 185687-185688, 185694, 185697, 185700, 185703, 185711-185712, 185715-185716, 185719, 185721-185722, 185725, 185728-185734, 185736-185737, 185739-185743, 185745-185747, 185749, 185751-185752, 185754, 185756, 185761, 185764-185766, 185769-185772, 185774, 185784, 185794, 185797, 185799, 185802, 185808, 185810-185812, 185814-185815, 185817, 185819, 185821-185825, 185827-185828, 185831-185834, 185836-185839, 185841, 185848, 185850-185863, 185865, 185868-185869, 185871-185874, 185876-185877, 185882, 185884-185885, 185889-185891, 185894-185896, 185900-185901, 185906, 185910, 185912, 185914-185916, 185918, 185920-185923, 185926, 185929, 185932-185934, 185939, 185942, 185944, 185953-185957, 185960, 185963, 185965-185968, 185970-185972, 185974, 185978-185987, 185989-185994, 185999-186000, 186004, 186006-186008, 186010-186011, 186016-186024, 186026, 186028-186032, 186038-186039, 186041-186042, 186044-186045, 186047-186048, 186050-186059, 186061-186062, 186064, 186066-186067, 186071-186075, 186077, 186083, 186085-186086, 186088-186091, 186096-186100, 186103, 186112-186113, 186117-186119, 186121, 186123-186125, 186131-186133, 186138-186140, 186143, 186147, 186150, 186154, 186156-186158, 186160-186165, 186168-186169, 186171-186174, 186182, 186184-186185, 186189-186192, 186194, 186202-186204, 186212, 186214, 186218-186222, 186224-186225, 186229, 186231-186232, 186235, 186237, 186239, 186242-186245, 186251, 186253, 186255-186256, 186258, 186260-186261, 186263, 186266-186267, 186269-186274, 186276-186283, 186285-186286, 186290-186291, 186294, 186296-186305, 186315-186318, 186323, 186325, 186327-186328, 186332-186336, 186343-186345, 186347, 186351, 186354, 186358-186359, 186362, 186368, 186371-186372, 186374-186375, 186378, 186381-186382, 186385, 186392-186394, 186401, 186404-186405, 186408, 186413-186415, 186420-186423, 186425-186426, 186429-186430, 186433-186434, 186436, 186439, 186446, 186449, 186452, 186455, 186457-186466, 186470, 186472-186473, 186476-186480, 186482, 186484-186486, 186489, 186491-186492, 186494-186495, 186497-186498, 186504, 186507-186513, 186516, 186518-186522, 186525, 186527, 186530, 186533-186534, 186536, 186538-186539, 186541-186542, 186545-186546, 186550, 186554, 186557-186558, 186560-186563, 186565-186568, 186570, 186572, 186575-186576, 186578, 186585-186586, 186588-186591, 186594-186601, 186603, 186606, 186608-186609, 186611, 186613-186615, 186617-186621, 186624, 186626-186628, 186631-186639, 186641-186642, 186646, 186648-186649, 186651, 186653, 186655-186656, 186658, 186660, 186662, 186665-186666, 186668-186669, 186672, 186674-186676, 186678, 186681-186685, 186688-186692, 186694, 186696, 186700-186703, 186706-186710, 186713-186714, 186716-186718, 186720, 186722-186727, 186735-186737, 186741-186747, 186750, 186752-186755, 186757-186758, 186760, 186764, 186768-186769, 186771-186773, 186775-186777, 186779, 186782-186783, 186785-186786, 186792-186797, 186799, 186803, 186806-186809, 186812-186813, 186816-186817, 186819-186821, 186823-186825, 186827-186829, 186831-186833, 186835, 186837-186838, 186840, 186845, 186847, 186849-186850, 186853-186854, 186856-186857, 186859-186860, 186862-186863, 186865, 186867-186869, 186871, 186874, 186878-186893, 186896-186897, 186899, 186902-186903, 186906-186907, 186910-186918, 186921, 186923-186926, 186929, 186933, 186935, 186937-186938, 186942-186943, 186945-186947, 186949, 186957, 186959-186960, 186965, 186967-186968, 186971-186972, 186978-186979, 186985, 186987, 186989-186990, 186992, 186994-186997, 186999, 187003, 187006-187010, 187012, 187014-187019, 187022, 187026-187029, 187031-187032, 187039-187040, 187042, 187044-187048, 187050-187051, 187054, 187057, 187060, 187064-187066, 187073-187081, 187088-187090, 187093, 187096, 187099-187103, 187109-187110, 187112-187113, 187118-187120, 187122-187123, 187125-187126, 187128-187129, 187131-187136, 187138, 187142, 187144, 187146-187147, 187149-187152, 187154-187161, 187165, 187167, 187169-187171, 187179, 187185, 187188-187190, 187195, 187197, 187200, 187208, 187211, 187213, 187216, 187218, 187225-187228, 187230-187240, 187250-187251, 187254, 187257-187258, 187260-187262, 187264-187266, 187268, 187270, 187272, 187275-187281, 187283-187284, 187294, 187296-187304, 187306-187310, 187315, 187317-187318, 187321-187325, 187330, 187332, 187335-187336, 187343, 187346, 187351-187352, 187355-187356, 187358, 187364-187365, 187367, 187370, 187372-187375, 187377-187378, 187380-187382, 187384, 187386-187389, 187391, 187394-187396, 187398-187399, 187404, 187409-187416, 187418, 187422, 187426, 187428, 187430, 187434-187437, 187439, 187441-187444, 187447-187451, 187453, 187455, 187464-187465, 187468, 187470-187474, 187476, 187480, 187482-187485, 187487-187492, 187494-187500

[0215] The foregoing written specification is considered to be sufficient to enable one skilled in the art to practice the invention. The present invention is not to be limited in scope by examples provided, since the examples are intended as a single illustration of one aspect of the invention and other functionally equivalent embodiments are within the scope of the invention. Various modifications of the invention in addition to those shown and described herein will become apparent to those skilled in the art from the foregoing description and fall within the scope of the appended claims. The advantages and objects of the invention are not necessarily encompassed by each embodiment of the invention.

The application's sequence listing, which the Patent Office published only in electronic form, follows.

SEQUENCE LISTING (187523 sequences)

SEQ ID NO: 1 - DNA, 25870 bp, Homo sapiens
ctgaaagctccgagagtaattctcatgtgcatttaggtttgggaatagatcactgttaattcaacagagaaatgaaagaagagaaggttcggtggggtccagccatgccctgttacgtggaattttttccctaagggtgtggtcccctcccctacagctcgtcttttggagggctggtccaggctcctctaagccatgacgccggctgaggatcagcggttggtgtacatgatctcctcagccttgcccattgtcccttgcaagacatttcttggatgggagtttccagtgctgggagaagttccgccccactgactctattctgctgtgtctcctcagagcctgtcatagggaactgcatggatagaagttctccaggacaagcagtggagctgccggatcacaatgggctcgggtacccagcacgcccctccgtccatgagcaccacaggccccgggccctccagagacaccacacgatccagaacagcgacgatgcttatgtatgttggtcccacctgctgcacagaggtggatcctcccagtcccagccttgaaacagagtatagtgatgtggggtagcctctcttggccgctctcctcagtcagcattcagcctttctggaaacggtggggagcatttctttttttttcttttttgagatggagtctcactctgtcgcccaggcgggaggacagtggcgcgatatcagctcactgcaacttctacctccccagttcaagtgacttttgtgcctcagcttcctgagtagctgggactacaggtgcctgccaccacacctggctaatttttgtatttttagtaggcatggggttttaccatgttggctaggctggtctcgaattcctgagctcaggcaattcgcctaccttaagagcattttctttgagtcaccctaacagaccaaaccttaattcaagtagaatctatgctccaaattttagaccaaagaatcagaaatagttgccatctgttccctgtagttttggttattaaacctcttctcagtctaaactcaggccccagcaaatgagcccataggcttctggttatttttcagcagctacattgagcttactcagatcaggggagctggtgggcctcagcaaagttttgttttcctagggtggtgctagtctagtagctagccacatgtggctattcaaatctaaaccaattaaaattaaaaacaatttaaaattcagttcctcagtcacaccagttacactttattttttattattattattttttgagacagagtcttgctctgtcacccaggttggagtgcagtggcgcaatctcggctcactgcaagctccgcctcccgggttcacgccattctcctgcctcaacctcccgagtagctgggactacaggcgcccgccacccttttttgtatttttagtagagctaaatttttttagcccagctaatttttcgtatttttagtagagacggggtttcaccgtgttagccaggatggtctcgatctcctgacctcatgatccaccagcctcagcctcccaaagtgctgggattacaggcatgagccaccgtgcccagcccagtcacactttaagtgctcagtagccacttgtggctactggttaccatattggacaggacagagaacatttccatcactgcagagtgtgactggacggtgctgtcctaagacaaagtcccagtggagatggggataggtcagaaacctggttttagaaggccatgtaggtatcaagatgtcaccaccagctgagatttgccacatccgccccaccctcagcccccccactgggcagagccaagcagcttcccacactgtcgctgtggagcaccccctttgggtggtgctttagaggaaggagtctggagtggggccccgggctgtcttttgcctgggctccttcagaaggaccagctgtctctaggggttgcctgagagtggtgtcttgtgtgcttatttcttctcttaactgttttctgcaggtacagctggataacttgccaggaatgagtctcgtggctgggaaagcacttagctctgcccggatgtcggatgcagttctcagtcagtcttcgctcatgggcagccagcagtttcaggatggggaaaatgagggtgaggagccttatgcatggggcactccagagaagttcctggaggggcctccctccatcttccgtaactgctcctctcttcgtaggaagagctcatggggaggtagagccacagcatcccacaggttctggacacagcccctttccccactggtcttccctgagtgtgggtgtgtaaaggaggtgtggcttctggccagatggcacagggctctcccattcctgtctctcatctctgtgatgatatgccttcaatcactttttccagttctgcttagagggcatcaggtcctaatggcacatttctacctcttcttggagccagtcaagggagggtgtcataacaaataataggcgtaggccttgggcggggcaggtctgccaccagtcccaaggctgtccttttcaggctctgcaggtgaggcacttggctttctggaccccgagatcctcatctgtaaagtggcaaaaacgatagagcctttatcctacattgtgccctgagggctggctggcttagtgagtatcaagtgcttagcacagtgtctggaagacagacagtgcccaggaatgggtgcctgcaggcagtaaaattattctccctttcactctttaagaggtgatcctttctgaaggagtcctctatcttctctcacactacagtagttgatcttacctaaggatgggaaagggtaaaggaaaagggaaaaaagcagaacaggtagaggagaatataggaagaatcttggcccccgcccatcgtcactcaacaccttgagggcctgctgtgagctagaattcagggctgggagtcaggctgtgggatgctcgacaggttgccttcaattcctcctctctctcccccttgctctcctagtcccccagttccctgccaacctcatacgttctttttggtcttgcagaatgtggggcaagcctgggaggtcatgagcacccagacctgagtgatggcagccagcatttaaactcctcttgctatccatctacgtgtattacagacattctgctcagctacaagcaccccgaagtctccttcagcatggagcaggcaggcgtgtaacaagaaacagagagtgagtgtcaccctggccagagccaaaccagccctgtggcccagtgcctgctcccaatcccatcaggagcttcagcccatgtgttgtggtggccagtgcagtcgacagtaccacgcctcccctcgtggccttcacagtttcttgcttttcattaacgacgctgctagttttagggcgcgaggtaggggtgggggtgtgcagaagaaatgctaaacacagtctcttggttcggttatgggaataagacacaagactcgccgtgtgttacaggtgctctagccttcatagcgacagaagtgagctacggctccagaggatgcaggtgacctccggtcagcataatgaggaaaggaggaagtccttaaactcagtcctaaaagacaaaacctggcaggaaaatatgtccagccatattttttaaggccatacagaagcaagtggcaggatattccagattagggaaatgtgtgatgagaggcccatggtagaaagaatggggaaattggcttgtttggctggagtaatgcaaagagtacacagcaggcaccattggttgtatctggaaaatccttgacagaagaggcctgatgaaagggaagccacttggcaaatccacatcagagcctcagtatggcaagctacctgaacacctgagggaaagtaaacccgttgcattttttaaaaggttttaaatggaatatttgagcctttctcttttcaaactaattctcctctgtgtctgctttattccaggttttgtgtacagcttgggaatgaaaaggttgattgtaaacccacagtatctagcagcgttgtgccaaattgcccttgtgtttctctccacccaaaatatcacagctgctttcctcacatttggttcatccgtgtgctgttcttttgggttctgagagggttttgccatgtttgcttgtatgaccaagtcaccaaggaaataaacaggaaggaaatccatgttctccatcttttgtgaaagtatatttgagttggtggttttttgttttgtttgggggtttgtgttttgttttgtttttggtatgttttcttccagaggtgatatactttcttttttttcttcctttcttttttttctttcgttccttttttgaaacaggagagcaaagcagttagagttcagaggccagcggcctcagggccactccctccctagccttcatcagcagagcaccctccatccccctgcattgctcttctgtgaaagcaaatactaaaggatgccatcctctggaatcctaatggcaggcaaagggagagaggaagggtgacggcttctggcacttagaaaacaaaaagaacaaaaaaagagaaacccccaagcctggaacgcagagaggtctttactgctgggatccacggaaaacatgtctgtcctagccaagatcatatgaagagtttggcacggaggctgagaatgacctggcatagatggtttgccagttaggatgtctcaatttgagcctttgcttttggtggataactcagctcccctcttgtaacctggaaagttggttgcctttatcatcctgctggttttatccatggactgaacacccaacagcagtgcactatgctttctatggcatctttcattctcattttatattgtgctataaaaaggattgtttctccatatatatattatatatgtgtgtatatatataatataatatatgtgtatatatatattatatatataatatataatataatatattatatatatattatatatataatatatatataaaatatatatatatatgctctcctctttcagcctctttgtcacagggaagaagtgtaggaggttgccttgggccctgcctctctcctaacctcctcttccccactgggtaccctcagcccctatattttaattcttgatcatgtagaaattgtttttggtaaatgttgatattattgttattatcattattaataaataaagagaaaaggaatttttgtttaaatgagaaatgtttaaccagattctgttctatttgaattgtgacttgcaccttttgttcaaagtatttcctttaggcattgtaattgtgaacagctcttacttgtgccagtgacagatgcagtggtctcctttccccagttgaagcagtgcatacgcagtagctattatttgtgttatctttatttctcttcattgttagaaaccaaagtcttctctgctggctggggctgagagagggtctgggttatctccttctgatcttcaaaacaagagagagaccttgaatacactgactcttccaccctttttttttctgggaaaggagagcaagaggtcccgagtcccctcctagtctttcatcctgaatttgcacagaggaaagcgggtgcccggcatggccatcctgatgttgctggcgggatccccatgcaccttgtccttctccactgatactggcagctcggctcctggacccaagatcccttgagtggaattctgcagtgcaagagcccttcgtgggagctgtcccatgtttccatggtccccagtctcccctccacttggtggggtcaccaactactcaccagaagggggcttaccaagaaagccctaaaaagctgttgacttatctgcgcttgttccaactcttatgcccccaacctgccctaccaccaccacgcgctcagcctgatgtgtttacatggtactgtatgtatgggagagcagactgcaccctccagcaacaacagatgaaagccagtgagcctactaaccgtgccatcttgcaaactacactttaaaaaaaactcattgctttgtattgtagtaaccaatatgtgcagtatacgttgaatgtatatgaacatactttcctatttctgttctttgaaaatgtcagaaatatttttttctttctcattttatgttgaactaaaaaggattaaaaaaaaaatctccagactcaagttgctaagaccttttgtcctgccttttgtccttccttttgtgaggcacttacttacaacttggttacttagttggacagcaggaagttgtgtagataggagcctgattgtgttcttaggctgatagattatttgcctgtggtttggagtctagttggaagaagcctcaggtaggtgggagctggagcagtggaggctggagaggtctcccaggctaagggtggggctttgagtgacttaagaaactcgcattctctagaagcctgaactctgcttcacactgtgtccctgggcacccagctcggactctgccctgtcagaagggagcatttgaatttgctgggccaggtggaaaacagcttccttgaaagggcacttttgaagagtacagggaaggatccttaaagagtggacacaggctggacccttcatgacgtgacccccattggccgagtgaaaggatagccaaataagtatttggaaagaaagggaggggcctggcatggctcacgcctgtaaatccagcacttctggaggccgatgggggtggatcatctgaggtcaggagtttgagaccagcctggccaatgtggcaaaaccccgtgtctactaaaaatacaaaaattagccaggtgtggtggcaggtgcctgtagtccctgctactcaggaggctgagacaggagaatggcttgaacccaggaggcagaggttactgcagcaagccaagattgcaccactgcactctagcctgggtgacagcgggatactacatctcaaaaaaaaaaaaaaagcggagcgggggtggaattttcctatagttttctcctttatcccacacctgaactccaaagggcagggtagagtttccagcaagtttccaggcatggctaagagacaggtggttgaaggtcttctatgaagaaagcttactgaagctggaaagaccatctgagttcacagaaggaagaatgagaggagggaatttagaaagccttccaagctgggcatggtggcgtgcgcctgtaatcccagctgctcaggaggctgaggcaggagaattaggtaaacccaggagttggagtccaacctgggcaacatagcaagacccccacctctacaaaaaataaccaggcttggtggcacatgcctgtagtcccagctgctcaggaggctgaggctgaaggatcatgtgagcctaggagtttgaggctgcagtgagctgtgatcgcaccactgcactcctgcaaagagaaaagaaagatttcaagtccatgagggcggctagaaagttgctgtagggccatttagattagagaagaaaagagccttctcaagaagggccttctggccgggcgcggtggctcacgcctgtaatcccagcactttgggaggccgaggcgggtggatcacgaggtcaggagatcgagaccatcccggctaaaacggtgaaaccccgtctctactaaaaatacaaaaaattagccgggcgtagtggcgggcgcctgtagtcccagctacttgggaggctgaggcaggagaatggcgtgaacccgggaggcggagcttgcagtgagccgagatcccgccactgcactccagcctgggcgacagagcgagactccgtctcaaaaaaaaaaaaaaaaaaaagaagggccttctaaaactcctctgagtctgtatacgctgtcatgcaagactaggtgagtctctagaatcaaacagtgataatacccagatgccttccagcaaattgtagcacctgttgcaataggtgccactccctcctaaaatcagccagggtgcctttggaccagaggtagggtgagcttttgtaggaagcagggcactggctcctggatacagactggagagcttagctccagaaaacaggagccatgttgacagaaaaccgtgctctacacagttttctttctgactttgtgccagcccccaccccaccccaactgcaaagatcaagaactcagagggctactgtgcttccctcctgctgatcaaagatgagctctgtcctggccttagtcttttccaagcaggagggcaggagagaatcttgcatagctggctacggtgccccacccaagggtctaacttggggctctatcacaaaagctgcagcaaaattgccaaaagtaggaactactgggggtgggggtcctgtctcccctgctcagtcaccacctcccctccctaactctcattctggctcataccacgtgctcccagaagaaacgttctgagcaggggctggtatgagactgcctcccctcccaggacccactcctccctatgaccaggctggtgaccctccctctagggtgccagtgccattcactgagcagatgtttggcaggtgtctgttatgtgccagacctagcaggggacagagtcctcccgatacagatggaccagtatgtttggacataaattgtgaaaggagttgctaatctttctgtgcaaaatccactcttgcggtcaccgccaacactcctacacatgtcagggcatccagggccaggacttggtaaccctgttcaggagcagtcgctctggagactcccaagacgagggaaagaaatgggtggaaacaggggcctacactgtgggccccgcagccaccaaacagtccaacccgtggccactgagtgccttgaacaatgcctggctggaccctgagtctgagtgtgtcatcaacccagtttgttattgtcgttgttgttgttatgtatttttccatcagctctgtccagaaagacctccttcctttccaaaatattagtaaagggggcttagactagtttaagccaaataccttgcaataaaatggagtagccaccctggtgaataagtatatttagaaaaggaaactgcctgcttggtaagatgctgttcaacagcaccccctatcctgatgcctcgcagtccctgagccaggaaactgagaagtccctgatcagactgcaaaggctgcaggctccgcaagggtgcaaggccaccctcaaagaactagaagccaggcctcccgattcccacccctgccagcgctaaatagtaaccgctgaaggatgcagggcagctgtgagctgcagttttcccacaggcaaaaatcacaagggtaaaatctggcctccagccttatagggatattctaagttgtgaaagtgctttggccacaaagaactgcgcaaatgttaaatactaggtttagccataacaatcattttagtaacaaaccaaagagaagggtgaaacactggcaagtatcttggagtccaaccagtaagcttctgagattcccccatgtgctgactgggacaaactctaccccccaaaagaaaagacgctctcttggcccgagacacctgtgagctgtcccagcaggggaccagccaccttcccactttctaaagctacagacagctgggatggtcaagtaggcagcccaggctgatggctcaccaaggccacctccctgtctacacagtcccatagacatctggggccacttcagtcctagaaaagatgttccatatctcagcaactgcaagtcaaggacaagcagagagatgtgggactgctgccttcatgcctgctgcagaagctgaggtctcagatctgataaagcaagtgtagtgggaataagggaatacattaccagaaactgggattctagaaaacagaatagttactgtttactaagtgctaggtacctttctaacagttttgcatatatgttcaaagttcatgcttaaaacgatacaaatttattatcttacagttatggaggacagaagtccaaaatgggtcatactgggctaaaatcatggtggcagcagagctgtgctcctggaggctgcagggaaaaatcctttgccttctccagcttctagggaagggttgctcatgtccctcagctcatggcccccttccagcagtcacgagtctgatctccactgccatcctcacatctctttctctgactctgaggccactgcctccctcttgtataattaaggacccctgtgatgacaatgggcccacctggagaatccaggccaaccaccccatctccaggtccttaatcacactagcaaaatctttttttgccatggaaggtagcaaagccacaggttccagggatgaggctgtggacatctttggggagcgttattctgcttgccacacagtaacccctgccataactcagggcgatggcatattctatcattatcttcaatcagaaactgatgtgtggggaggtgatgtatcataactcatccagggtcaggcagctggatttgaacctgcctgacccttagatttgaggttttctggctccagaatcttctctgaagtgaaaggcatgaggccgaccactccctgatctggtaaacagagatgtcagcctggtttctagtgttagggagtttcctggagtgatggtacagggtacatttctgccctgcatcccaagtccagagactgggttctaggtccagcctttcttctaactccctgagagatgacagcctctgggcaaagtccctctgtgctcttcagtctcttcatctgtgagatggtggcatggggagaggctggagtgatgtcacagttcctctcagcctgcatcacaggctctaggactcaggtcctatcagtaacctgctgggggaggtctgggccttccaggagaaacctgacaagatggtgctgcaaacaccaacggacacacagcactttacattcacaggctgtctcaggggcctccaacaaccctgaccattcttgccccattttgcagatagaaaaccgaggctcagagagattatataacttgcccacgatcttcctccagcaagatggaggccaagtgaaatgagaaagcaggtctcctgccacttcctttgcccagaggtcttctccccacaccagggcttcccaagggctgagatccagtcacacctgtgcgtgatcaaatataagtgtgaacaatgcaaagggagacgtcttcaatctaaggggcttcaattctgtaatgtaattctgagattatgcccttttttgttaaagcctttcctttttgaagtgatggtcactgtagatggtgagggttttttggaggcggacaatatctttacatgacaaaattaaaagttggcagctccgaattgatctctggagtgttttgaaatgcaagaggtctccgaaacctcagtctgggagccacggagggctctcccctctccccaggtttaccagtttgggaggcttggagagaggcctggaggacctgctggggactaaagaagagcactggtgggaggacagggcgggggaagggggaggggagtgaagtagtctccctggaatgctggtggtgggggaggcagtctccttggtggaggagtcccagcgtccctcccctcccctcctctgccaacacaatggacaatggcaactgcccacacactcccatggaggggaaggggatgagtgcagggaaccccgaccccacccgggagacctgcaagcctgcagacactcccctcccgcccccactgaacccttgacccctgccctgcagcccccgcagcttgctgtttgcccactctatttgcccagccccagggacagagctgatccttgaactcttaagttccacattgccaggaccagtgagcagcaacagggccggggctgggcttatcagcctcccagcccagaccctggctgcagacataaataggccctgcaagagctggctgcttagagactgcgagaaggaggtgcgtcctgctgcctgccccggtcactctggctccccagctcaaggttcaggccttgccccaggccgggcctctgggtacctgaggtcttctcccgctctgtgcccttctcctcacctggctgcaatgagtgggggagcacggggcttctgcatgctgaaggcaccccactcagccaggcccttcttctcctccaggtcccccacggcccttcaggatgaaagctgcggtgctgaccttggccgtgctcttcctgacgggtaggtgtcccctaacctagggagccaaccatcggggggctttctccctaaatccccgtggcccaccctcctgggcagaggcagcaggtttctcactggccccctctcccccacctccaagcttggcctttcggctcagatctcagcccacagctggcctgatctgggtctcccctcccaccctcagggagccaggctcggcatttctggcagcaagatgaacccccccagagcccctgggatcgagtgaaggacctggccactgtgtacgtggatgtgctcaaagacagcggcagagactatgtgtcccagtttgaaggctccgccttgggaaaacagctaaagtaaggacccagcctggggttgagggcaggggtagggggcagaggcctgtgggatgatgttgaagccagactggccgagtcctcacctaatatctgatgagctgggccccacagatggtctggatggagaaactggaatgggatctccaggcagggtcacagcccatgtcccctgcaaaggacagaccagggctgcccgatgcgtgatcacagagccacattgtgcctgcaagtgtagcaagcccctttcccttcttcaccacctcctctgctcctgcccagcaagactgtgggctgtcttcggagaggagaatgcgctggaggcatagaagcgaggtccttcaagggcccactttggagaccaacgtaactgggcactagtcccagctctgtctcctttttagctcctctctgtgcctcggtccagctgcacaacggggcatggcctggcggggcaggggtgttggttgagagtgtactggaaatgctaggccactgcacctccgcggacaggtgtcacccagggctcacccctgataggctggggcgctgggaggccagccctcaacccttctgtctcaccctccagcctaaagctccttgacaactgggacagcgtgacctccaccttcagcaagctgcgcgaacagctcggccctgtgacccaggagttctgggataacctggaaaaggagacagagggcctgaggcaggagatgagcaaggatctggaggaggtgaaggccaaggtgcagccctacctggacgacttccagaagaagtggcaggaggagatggagctctaccgccagaaggtggagccgctgcgcgcagagctccaagagggcgcgcgccagaagctgcacgagctgcaagagaagctgagcccactgggcgaggagatgcgcgaccgcgcgcgcgcccatgtggacgcgctgcgcacgcatctggccccctacagcgacgagctgcgccagcgcttggccgcgcgccttgaggctctcaaggagaacggcggcgccagactggccgagtaccacgccaaggccaccgagcatctgagcacgctcagcgagaaggccaagcccgcgctcgaggacctccgccaaggcctgctgcccgtgctggagagcttcaaggtcagcttcctgagcgctctcgaggagtacactaagaagctcaacacccagtgaggcgcccgccgccgccccccttcccggtgctcagaataaacgtttccaaagtgggaagcagcttctttcttttgggagaatagaggggggtgcggggacatccgggggagcccgggtggggcctttggccctggagcagggacttcctgccggatctcaacaactccgtgcccagactggacgtcttagggccaagatcgacgttggaggacctgctggacgcctggctgcttacgagtgagggagtagagtctgccttagcaaggctcaagtagaaaggaagtcacagcggaccaggcaaagccacagacaatccaaggccaggtgccctgaaaggggctcaaacaaggcctgcagccctgtctgaggcgggccaggaaacagggttgctttagctgggagcagtgggttccccgtccccagaggtgtgtccgtatagagccttctccagcccagccgctgtcagcggggcgggacggagcggggcggcctcagggagccagccactgggattggggtttggtcccgggtgcaagtgaagcgcttggagtttgcgcctgtcctcctttactaattcaaaaacctctcaaacagacacttcccttttcttctcacaaggccagtatccccctcccactactcccatcccgcccagaaacagccgcggcttcctcaggcacagcagtggaagccagtcctccaccccctgcggctccatgccatgccaccccctctttctgccagccctggcagaagctggcctgagtaagaaaattcaccaccacctcttgcaggtacatttttatttccaagatgctctcatatctgtgctctcactgcatcctcccttccccacatcctggctagattgccatcagacgcagagcatggatgaggacactgaagcctggacctgtgacgtcgcttgcccagtgaacagcaggatgggctaggccgcgctttttagaccctgcacccctggccatccatgattattgaaaagagtgcgcgggtcgggtgcggtggctcaagcctgtaatcccagcactttgggaggctgaggtgggcgtatcacttcaggccaggagtttgagaccagcctggccaatatggtgaaaccctgtctctactaaaaatacaaaaaaaatcagctgggcatggtggcttgcacccgtaatcccagctactaggaaggctgaggcaggagaatcgcttgaacctgggaggcagaggtcacagtgagccgaaatcatgccactgcactccagcctgggcgacggagcaagactccagctaaaaaaaaaaaaaaaaaaaaaagagtgtgtggcctggcactcaagttcacatgggtgtgcaggcatgcctgtgtattctcacatgacctccctgctcacggtccctccttgcactcatgtctgaatgtccccgcgtgcacgcacatggcttcacagatctgggcagtgccttccctaccctctctctgcagggccttttgccccctcatgcaggcccctggataatcggccccatccccatgtccccatctccagtgtatcttagctaccctaggtaaaggagtgggctttttagttcctaaccttccagagctacaacagcagtcatccagccaggtctgggtgggaacattttctagatacgggtgctgagatctctcagcccagagagaagccctggggaattttcagagagaaagcagtctccaggtggggctggatgtactgatgccactgagatctgtaaaggagtccctaacacctgacataggagtgacaaaactgttttctgcaccaactgagcagaatacacgcagctgacctgggctcaaggtctggccctgccacgtgctggctctgtgatgctggccaagtgccttcgcctctccgggccacagttttttgatctgaagagtggagccctactcaagccatctgcagctctcgggctctctgacctgacatctttcgggtggtggggacacaaaggaagcagcctctattgggagaccttgtgcttctttttggtcccaggacactgccccccaccactccagtccgggtcccaagggcccagtcagctcaactgtaatcatgacaacattgatcaagcatctttacgtgcaggtgctgtgccaaacggttcgaacgctctctcatttcaatctcacggcaaacctacggtggagggggtacggttgtatccactttacatgtaagaaactgaggctgatatcaagtggtggagccaagaatagtgcctcgttgcatcttactccaacctctagcccatccggcctcctcccttcacgtgcgcctaagagggctagggggcctggataggggaggtcagctccacagttttgagtaaacacacacagtctcaactctgatgacaacttaagtgccaggcatagtggctggcatggggcacacactcaagtcatgttgtgcagcacctaacagtttatcaaagtatcagcaaacttattgtcctgtttgaccttccgcacaaagctgtcaaggaaggcagggtacggagggtgattcctaccttagagatgaagaaactgaggcccagagactgcccagctaccagaaggtggatagagcgctggcctccatgcctgcctgacctggagtctgtccagtgcccacccacagaacagcctcggccctttcccatgcccagacacagatggcacacttgcgacggcccactcatagcagcttcttgtccagctttattgggaggccagcatgcctggaggggggccaggcatgaggtggggtaggagagcactgagaatactgtcccttttaagcaacctacaggggcagccctggagattgcaggacccaaggagctcgcaggatggataggcaggtggacttggggtattgaggtctcaggcagccacggctgaagttggtctgacctcagggtccaaatcccagaactcagagaacttgtccttaacggtgctccagtagtctttcagggaactgaagccatcggtcacccagcccctaaatcagtcaggggaagcaacagagcagggcatgagaactcctctgtaggcaaccatgggacccacacccatgtccccactggacgacaccagtcaggaccacaccaccctctcaacttcactggacgacagccctgagacctcaggcaggaatcccccacagctgccaccctgggagaagagatatccttgcaggaaccccagcacaagtcaaaccctgccatctccaggtcacctcagatgtttatgcccctgggcctgaggcacaaagtgacagggtggggagatgtgaaaggtcaaggctgtcattgttttctgtgcaaacagcaccgcctggagttgcacaacctggtggctctgagcagggtaggacagagggaggcagcctctcatttggaaagtcattggaggattgattagttgtgtgatctggggcaggtcacctaatcgctctgagcctcaattttctcatctgcaaagtgagaaaataacacctaccccaaagccggttctggggactaagaatgtttatgaacacctctgctatgccagctaatgccagtcagggtgaggtggagaagggagtaggggagaggagagtactgatgggcaggggcaggatgggagaggaaggacacacttctgctcacactggccccaggtcttagaacaaagcagaagcactcacgggcttgaattgggtcaggtggggcctcccaaggcaaacccctagcccaggggtccccaacccccaagtcatagataggtactggtccatggactgttaggagccgggctgcacagcacgaagtgagtggtgggtgagtgagcaataccgcctgagctccgcctcctgtcagatcaagtggccttacattctcataggagtgtgaaccctattgtgaactgcacatgccagggatctaggtggagggctccttatgagaatctaatgcctgatgatctgaggtggaacagcttcatcccaaaaccatccccgctggcccatggaaaaattgtccaccacaaaactggtccctggtgccaaaaaggctgaggaccactgctctagccagaccttcagaaaaggaaaatggggccaggcgcagtggctcatgcctgtaatcccagcactttgggaggccgaggcaggaggatcccctgaggtcaggaattcaagaccaacctggccaacatggtgaaaccccatctctgctaaaaatacaaaaattagctgggtgtggtggcgcgtgcctgtaatcccagctacttgggaggctgaggcaggagaatgggttgaacccgggagacggaggttgcagtgagccgagatggcaccactgcactccagcctaggtgacagagggagactccattaaaaaaaaaagaagaagaaagaaagagagaaaggaagagagggaaagaaagaaaaaggaaagaaagaaagaaagagaaagaaaggaaagaaagaaagaaaggaaagaaagaaaggaaagaaagaaaggaaagaaagaaagaaagaaagaaagaaagaaagaaagaaagaaagaaagaaagaaagaaagaaagaaatagaaagagaaagaaagggaaaggaaaggaaaatggaaatgagggctaaaacggcacgccctaggactgctccggggagaaaggagggacctgggaggaatgcagtctcaactctgtcatctctcccgcagcagcctgacaaaggccctgtgaggaaagaggaggctgaagaggcacaggcccaggggaggctggagcacctccattccattgttgggatctcaccagggcaggggcgggtgggaatggaggcagctggcaggggggatggggagggaggccagcgggtgtacctggcctgctgggccacctgggactcctgcacgctgctcagtgcatccttggcggtcttggtggcgtgcttcatgtaaccctgcatgaagctgagaagggaggcatcctcggcctctgaagctcctgaggaaagagcagggctgagtggggtggatcggcctctggacgagccctgggctcctgcttgaccacccattgggactgggatccccaagttgcctccaccctgcccccagcccagtcccaccaagtgcttacgggcagaggccaggagcgccaggagggcaacaacaaggagtacccggggctgcatggcacctctgttcctgcaaggaagtgtcctgtgaggggcaccccaggtccccatgcctctggacccctccctggggaggtggcgtggcccctaaggtagaaccttagctgggtctgccagaaggagtaggggccggctccctgctaatacgggctctcagaagggggactggtgaggggcgagggatcgaggcccaaagggaggtgggtgggatggagcagaaaacccaccagactgaacatcaaggcacctgcggtctggactgatctccgtccagtccagccaacatgctgtgtgtctttgggtgatttctggccctctccaggcctcagtttccctgtctggggtaggactgggctgtctaaggcttcctccagccctaagcctgaagaatgaggggggaacctgcacttggagccacttccagccccaccccctgtgtagctttgggcaagtgacacccctcccgggcctccatgttcttcaggttatgatgaggggtggggggcacccgtccagctccgaggcttccttagctctagcaagtgcttctccaggcttgctggctgggctgggcagggagctcctcttgcccctcttcatcctcctcccctcctctttcccctccccagagggcattacctggagcagctgcctctagggatgaactgagcagacaggcaggagggttctgacctgttttatatcatctccagggcagcaggcactgaggacccagggcgctgggcaaaggtcacctgctgaccagtggagatgagggcctgaggcagggtgtccagatgcagcaagcgggcgggagagttgggaaatccctaggagactgagtccacgctgctgtcccgccagccctgcagcccagatgagctcaggaactgggggtgggcctggggagccctcattccttcctagctgactggctccccagggagaggctggtgagaggggaaatggcttggacataggccaggggcctcgggcccatctcagcctttcacactggaatttcaggcccctccctccaccagccccaagccctgaacacagcctggagtagaggggtgaggggcttcttcagacttgagaacaagtgggtggcttgggctggggggtgtttggagtaaaggcacagaagaccaggcatcagtggctccggcaaggcctggttacagggctgagctctcacagcccctcccagcacctccatctctgggtttcaatccaggcaggcgagtgctgctcacccagcagccccccacccgcccccaccctgtgtgccccccgctgcctcccccttagtgtagggcaggggttggtggagaagggccaaggccgctcagagcccgaggcctttgcccctccctccaccaggctccctattttgccctctggacccactgataacatcccctgggggaggagctggtctcatgtctggggccctccccagcccccaccaggactgattctctcgttcaccttcctgggttcctcagtggggctgggggaagagcagccctcactgccccctggctgtgggagcaactgggaggaacaaggtctggtgaggagagggcacagaggagttctgcggggagtcggtggtccaggaggggccgctgacccttctcggggctgagatgtcccctgggcccacagtgaagccgcagcagggatggcaggatgagggcgcctgtcttccagatgctgacaccttggagccaggacatcttaggcttaaatgatgcctttggcacgtaataggacccaggtcacagagataacatctcagagcctcaattttctgaggataaaatggggctggaatactgattgcccagagtggtgctgaaaaggaaatgagatagagaagtacaaagcagcgggtccatggagggactcacacctccctctccctcctaacgctgtgcccttcccagacagcagagtctgcaggcagaaggagcctctaacataaaaaatagagctctggcagcaagctgtcctctcagaagtaactaacaccacagtatgaaatcagaggcctgagaaagtggcccggctctgccctcagaattctttatcggtgggtgagacttggaattcctctattagcgatccattcctggctgggcacagtggctcatgcctgtaatcccagcactttgggaggctgggacggacggatatctgaggccaggagttcgagaccagcctgggcaacatggcgaaacccagtctctactaaaaatacaaaaaattagccgagcatggtgatgcacgcctgtagtcccagctactcaggaggctgaggcacgagaattgcttgaaccccggaggtggaggttgcagtgagcagagatcgcaccattgcactccagtgacagagctagacttggtctaaaaaagagagagagagagagagagagagattcattcctttgacttaagactttgttttctgttaaaatgcaaatagaaccctgtgaagtagacgttaagtccattttataggttagaaacctaaggctctaagggctccaagtgcacagcccattagtagtaaggctgggaaccttaatccaggtcttcacacaccccaggcaaataccagacggcttagagcactgagacccctatagaggcatcagtcacacgcccagaacaaacctgtctcaagtctcctgcagactttggtggtggggtagaaggtgaagaagtggtcactggaggatttggtattggggatgccctttcctcttctgctgcggcctgctccatagccccagaggcaaaggcacagtggggacccagatccaggcaggggcaggcaacaaggtctatgggcccgggtgtgctagaatgggctggcggggtcccgtggccccagaccctccaagcctttccatctctgcagagggtctggaggagcctggcctctctctcccgcatggcaacggacccagggaggtcaggacatgtgggtagagagacctggcagggtgctgagctagatgtagcacacctccaggaagcctggtaccttgtctccttccaagggcttggtacctgagaatacctgtggcccctcaccaacagtccaacctgcaccccggcaggggatctcttggtggccagcctgcgctgcccctctctcccatcatggctcccctgggatgaagactgctccagggagaagccagtggtagatgggaggaagaggggatttgaccatccggggccaaaaatggtcctctggggttgggctgtttcaccttgtgtccaggtgaggtttagtacatgagcccccatgctccatgcccttcccaccaggctgggctgggcagccctgattcagacctgttggccagaggcccttgttcatcacacatcatcatgccggaagttcctcctagtatctcacccagctccctcctatggcaacaggagctgtccttcagttctgcccgggggagggccccttgaagcatacgtgaggcacatgtccgtgtgacctgcctgtccctggctggatctgagttgtctgctcctgactctgacctctggactgacccctggtttgatccctgtgtggttggccaggaggggtggctgtagctaatgctgagctatcagcctcattgcctcaccaatcattaagtctgcctgttgcacagataaggagaggcttggagaggcgatgtctccctcgagatcacacaggcctttcatgcccactaagatggacgtccctgactcacaggaccaggcctggctggaaggcagtctgctcttcccatcagctacttgcaccctctaagactgagcacagggggctctcattctctccctgctccccaaaacaaatccatctacagattgatgcaaaacgtaccctcagactttgggaagtaaatacattcattaacaggtcacgtccccgccacgttgaaaggcagcaggtcccctcgcgagcgtgggtgcacgcatgggctgtgccagtcccttggttcttagtgatttgcacacttctgtgaatccacacacactctggtggatgctctcggacatgctcaaatggtgcaggcgctcccagcatgggtgcacccaggcgggcgggtgagacagaagcgcctctggacctctcacatgctagtggcaccggctgctaggactgtaagtcctggaggtcaaactgcggctgaggtgtcattcgtgactcagtctcctcctcccctctggcctggggaagggacaggggcactgagtactgacctttgctcccgctgcaagctggactgtgcctgattcaggagcagggttgggaccgatgggttccagggaggtgagccttgcaggagtaagacgtggctaacatttagtgatcacttttcctatgtgccagacattgttgcaagcactataagatcatctcagtgaatcctcacagcctaggaggcaggtacaatggttatgtctcaccaaggtaactgaggctcagagaggttatgagacttgcccaaggacacacaggcagtacgtgttggagcctggatgccaagccagggagtggactccagcatctgaccccaacaatcacggagagatggcacaggctgcatcaaaaaggaggcagcatggtagcgtggggaccactacagggcagtggggacccagcagaaggggtgccagagtcaggaggtcatttgactgcctttgaccctaggaaacattaagccacttctggaaactgaaaaaatgaacacaaagcaaattagagttagtacaattgtggtctactctgatggcgttcatttttacaaataaatgtagctcactgttgtcaggcactgcactcaccgacaggagccaatagtgcaacgtgcctggatgtcacctcatagtcactaggagtggtgtggtccggcagagggacccatgctgacgtggtgtgtcaccttctcagtggatgtttgtgtgtgattatgcatgcagcctcatttagagatccaatagacatctaagtagaagacctcctgggcaccaccaccattgccctccatcccccaatgggaggtcccctgagagcctcaggtcccaagattctgctcaagccagctgctcctgcccagggagtgtggctggggggcaagaagggcaggagtcaggcctcaggctggtcccacccatcaccctgcctctggcccacctggcgcccctcagagggctgagtctcactctgccactctcactagaggagggagcactctgctaccctccctgctttgctccaaatcaggaacacagtatgattattatacagtatgattattataataacagcaactatttttcagagcttactctgtgccaggagctctataggcagccctctgtatccttggtttctgtgtccatggattcaaccaaccttggattgaaaataattttttaggccgggcgtggtggctcacgcctgtaatctcagcactttgggaggttgaggcgggcggatcacgaggtcaggagatcgagaccatcctggctaacacggcgaaaccccatctctactaaaaatacaaaaaaaaaaaaaaaaattagccgggcgtggtggcgggcgcctatggtcccagctacttgggaggctgaggcaggagaatggcgtgaacccgggaggcagagcttgcagtgagccgagatcgtgccactgcactccagcctgggtgacagagcaagactccatctcaaaaaaaaaaaaaaaaaaaaaaatatatatatatatatatatatatttttttttttaaattgcatctgtgggccgggtgcagtggctcatgcctgtaagcccagcattttaggaggcagagattggaggatcacttaaggccaggagttggagaccagcctgagcaacatagcgacaccccatctccattaaaaacaatgttttaaaaaaattgcatctgggcagggcgcagtggctcacgcctataagcccagcactttgggaggcccacatgggaggattgcttgaggccaggagttggagaccagcctgagcaacatggtgaaaccccgtctctgctgtaaatacacaaattagctgggcgtggtggtgggtgcctgtaatcccagctactcaggaggctgaggcaggagaatcacttgaacctggggggcagagattgcagtgagctaagatcgtgccactgcactccagcctgggtgacagagtaagactccatctcaaaaaaaaaaaaaattgcacctgtactaaacatatacagacttttttggtgattacctcctaaacaatacagtataacaaccattcacacagcatttccgtcgtattaggtattataagtaatctagagatttaaagtatgtgggaggctgtgcttaggttatatgcaaatactatgccattttatatcaaggacttgaacatccatggattttggtatctgcagagggtcctggaatcaatttcccatggagactgagagatgaccgtactacccacttcgcaagcaatgtcttctttaatgtactgaaccatcccattgttcagaggagaaactgaagctcagggctttgaataactagaccaaggaggcacagcatgggagtgggacatgaagcactctacaattaaccctttcaggacaaggccctgtctcccacacccatctgcccaaaggctctccagggccccctcctcttgggtgtaccttgacaagagacctagattttagctcactatgctgtctgcagtcctggatggtcccactccagtgtctggtgctctg

SEQ ID NO: 2 - DNA, 25870 bp, Homo sapiens
cagagcaccagacactggagtgggaccatccaggactgcagacagcatagtgagctaaaatctaggtctcttgtcaaggtacacccaagaggagggggccctggagagcctttgggcagatgggtgtgggagacagggccttgtcctgaaagggttaattgtagagtgcttcatgtcccactcccatgctgtgcctccttggtctagttattcaaagccctgagcttcagtttctcctctgaacaatgggatggttcagtacattaaagaagacattgcttgcgaagtgggtagtacggtcatctctcagtctccatgggaaattgattccaggaccctctgcagataccaaaatccatggatgttcaagtccttgatataaaatggcatagtatttgcatataacctaagcacagcctcccacatactttaaatctctagattacttataatacctaatacgacggaaatgctgtgtgaatggttgttatactgtattgtttaggaggtaatcaccaaaaaagtctgtatatgtttagtacaggtgcaattttttttttttttgagatggagtcttactctgtcacccaggctggagtgcagtggcacgatcttagctcactgcaatctctgccccccaggttcaagtgattctcctgcctcagcctcctgagtagctgggattacaggcacccaccaccacgcccagctaatttgtgtatttacagcagagacggggtttcaccatgttgctcaggctggtctccaactcctggcctcaagcaatcctcccatgtgggcctcccaaagtgctgggcttataggcgtgagccactgcgccctgcccagatgcaatttttttaaaacattgtttttaatggagatggggtgtcgctatgttgctcaggctggtctccaactcctggccttaagtgatcctccaatctctgcctcctaaaatgctgggcttacaggcatgagccactgcacccggcccacagatgcaatttaaaaaaaaaaatatatatatatatatatatatatttttttttttttttttttttttgagatggagtcttgctctgtcacccaggctggagtgcagtggcacgatctcggctcactgcaagctctgcctcccgggttcacgccattctcctgcctcagcctcccaagtagctgggaccataggcgcccgccaccacgcccggctaatttttttttttttttttgtatttttagtagagatggggtttcgccgtgttagccaggatggtctcgatctcctgacctcgtgatccgcccgcctcaacctcccaaagtgctgagattacaggcgtgagccaccacgcccggcctaaaaaattattttcaatccaaggttggttgaatccatggacacagaaaccaaggatacagagggctgcctatagagctcctggcacagagtaagctctgaaaaatagttgctgttattataataatcatactgtataataatcatactgtgttcctgatttggagcaaagcagggagggtagcagagtgctccctcctctagtgagagtggcagagtgagactcagccctctgaggggcgccaggtgggccagaggcagggtgatgggtgggaccagcctgaggcctgactcctgcccttcttgccccccagccacactccctgggcaggagcagctggcttgagcagaatcttgggacctgaggctctcaggggacctcccattgggggatggagggcaatggtggtggtgcccaggaggtcttctacttagatgtctattggatctctaaatgaggctgcatgcataatcacacacaaacatccactgagaaggtgacacaccacgtcagcatgggtccctctgccggaccacaccactcctagtgactatgaggtgacatccaggcacgttgcactattggctcctgtcggtgagtgcagtgcctgacaacagtgagctacatttatttgtaaaaatgaacgccatcagagtagaccacaattgtactaactctaatttgctttgtgttcattttttcagtttccagaagtggcttaatgtttcctagggtcaaaggcagtcaaatgacctcctgactctggcaccccttctgctgggtccccactgccctgtagtggtccccacgctaccatgctgcctcctttttgatgcagcctgtgccatctctccgtgattgttggggtcagatgctggagtccactccctggcttggcatccaggctccaacacgtactgcctgtgtgtccttgggcaagtctcataacctctctgagcctcagttaccttggtgagacataaccattgtacctgcctcctaggctgtgaggattcactgagatgatcttatagtgcttgcaacaatgtctggcacataggaaaagtgatcactaaatgttagccacgtcttactcctgcaaggctcacctccctggaacccatcggtcccaaccctgctcctgaatcaggcacagtccagcttgcagcgggagcaaaggtcagtactcagtgcccctgtcccttccccaggccagaggggaggaggagactgagtcacgaatgacacctcagccgcagtttgacctccaggacttacagtcctagcagccggtgccactagcatgtgagaggtccagaggcgcttctgtctcacccgcccgcctgggtgcacccatgctgggagcgcctgcaccatttgagcatgtccgagagcatccaccagagtgtgtgtggattcacagaagtgtgcaaatcactaagaaccaagggactggcacagcccatgcgtgcacccacgctcgcgaggggacctgctgcctttcaacgtggcggggacgtgacctgttaatgaatgtatttacttcccaaagtctgagggtacgttttgcatcaatctgtagatggatttgttttggggagcagggagagaatgagagccccctgtgctcagtcttagagggtgcaagtagctgatgggaagagcagactgccttccagccaggcctggtcctgtgagtcagggacgtccatcttagtgggcatgaaaggcctgtgtgatctcgagggagacatcgcctctccaagcctctccttatctgtgcaacaggcagacttaatgattggtgaggcaatgaggctgatagctcagcattagctacagccacccctcctggccaaccacacagggatcaaaccaggggtcagtccagaggtcagagtcaggagcagacaactcagatccagccagggacaggcaggtcacacggacatgtgcctcacgtatgcttcaaggggccctcccccgggcagaactgaaggacagctcctgttgccataggagggagctgggtgagatactaggaggaacttccggcatgatgatgtgtgatgaacaagggcctctggccaacaggtctgaatcagggctgcccagcccagcctggtgggaagggcatggagcatgggggctcatgtactaaacctcacctggacacaaggtgaaacagcccaaccccagaggaccatttttggccccggatggtcaaatcccctcttcctcccatctaccactggcttctccctggagcagtcttcatcccaggggagccatgatgggagagaggggcagcgcaggctggccaccaagagatcccctgccggggtgcaggttggactgttggtgaggggccacaggtattctcaggtaccaagcccttggaaggagacaaggtaccaggcttcctggaggtgtgctacatctagctcagcaccctgccaggtctctctacccacatgtcctgacctccctgggtccgttgccatgcgggagagagaggccaggctcctccagaccctctgcagagatggaaaggcttggagggtctggggccacgggaccccgccagcccattctagcacacccgggcccatagaccttgttgcctgcccctgcctggatctgggtccccactgtgcctttgcctctggggctatggagcaggccgcagcagaagaggaaagggcatccccaataccaaatcctccagtgaccacttcttcaccttctaccccaccaccaaagtctgcaggagacttgagacaggtttgttctgggcgtgtgactgatgcctctataggggtctcagtgctctaagccgtctggtatttgcctggggtgtgtgaagacctggattaaggttcccagccttactactaatgggctgtgcacttggagcccttagagccttaggtttctaacctataaaatggacttaacgtctacttcacagggttctatttgcattttaacagaaaacaaagtcttaagtcaaaggaatgaatctctctctctctctctctctctcttttttagaccaagtctagctctgtcactggagtgcaatggtgcgatctctgctcactgcaacctccacctccggggttcaagcaattctcgtgcctcagcctcctgagtagctgggactacaggcgtgcatcaccatgctcggctaattttttgtatttttagtagagactgggtttcgccatgttgcccaggctggtctcgaactcctggcctcagatatccgtccgtcccagcctcccaaagtgctgggattacaggcatgagccactgtgcccagccaggaatggatcgctaatagaggaattccaagtctcacccaccgataaagaattctgagggcagagccgggccactttctcaggcctctgatttcatactgtggtgttagttacttctgagaggacagcttgctgccagagctctattttttatgttagaggctccttctgcctgcagactctgctgtctgggaagggcacagcgttaggagggagagggaggtgtgagtccctccatggacccgctgctttgtacttctctatctcatttccttttcagcaccactctgggcaatcagtattccagccccattttatcctcagaaaattgaggctctgagatgttatctctgtgacctgggtcctattacgtgccaaaggcatcatttaagcctaagatgtcctggctccaaggtgtcagcatctggaagacaggcgccctcatcctgccatccctgctgcggcttcactgtgggcccaggggacatctcagccccgagaagggtcagcggcccctcctggaccaccgactccccgcagaactcctctgtgccctctcctcaccagaccttgttcctcccagttgctcccacagccagggggcagtgagggctgctcttcccccagccccactgaggaacccaggaaggtgaacgagagaatcagtcctggtgggggctggggagggccccagacatgagaccagctcctcccccaggggatgttatcagtgggtccagagggcaaaatagggagcctggtggagggaggggcaaaggcctcgggctctgagcggccttggcccttctccaccaacccctgccctacactaagggggaggcagcggggggcacacagggtgggggcgggtggggggctgctgggtgagcagcactcgcctgcctggattgaaacccagagatggaggtgctgggaggggctgtgagagctcagccctgtaaccaggccttgccggagccactgatgcctggtcttctgtgcctttactccaaacaccccccagcccaagccacccacttgttctcaagtctgaagaagcccctcacccctctactccaggctgtgttcagggcttggggctggtggagggaggggcctgaaattccagtgtgaaaggctgagatgggcccgaggcccctggcctatgtccaagccatttcccctctcaccagcctctccctggggagccagtcagctaggaaggaatgagggctccccaggcccacccccagttcctgagctcatctgggctgcagggctggcgggacagcagcgtggactcagtctcctagggatttcccaactctcccgcccgcttgctgcatctggacaccctgcctcaggccctcatctccactggtcagcaggtgacctttgcccagcgccctgggtcctcagtgcctgctgccctggagatgatataaaacaggtcagaaccctcctgcctgtctgctcagttcatccctagaggcagctgctccaggtaatgccctctggggaggggaaagaggaggggaggaggatgaagaggggcaagaggagctccctgcccagcccagccagcaagcctggagaagcacttgctagagctaaggaagcctcggagctggacgggtgccccccacccctcatcataacctgaagaacatggaggcccgggaggggtgtcacttgcccaaagctacacagggggtggggctggaagtggctccaagtgcaggttcccccctcattcttcaggcttagggctggaggaagccttagacagcccagtcctaccccagacagggaaactgaggcctggagagggccagaaatcacccaaagacacacagcatgttggctggactggacggagatcagtccagaccgcaggtgccttgatgttcagtctggtgggttttctgctccatcccacccacctccctttgggcctcgatccctcgcccctcaccagtcccccttctgagagcccgtattagcagggagccggcccctactccttctggcagacccagctaaggttctaccttaggggccacgccacctccccagggaggggtccagaggcatggggacctggggtgcccctcacaggacacttccttgcaggaacagaggtgccatgcagccccgggtactccttgttgttgccctcctggcgctcctggcctctgcccgtaagcacttggtgggactgggctgggggcagggtggaggcaacttggggatcccagtcccaatgggtggtcaagcaggagcccagggctcgtccagaggccgatccaccccactcagccctgctctttcctcaggagcttcagaggccgaggatgcctcccttctcagcttcatgcagggttacatgaagcacgccaccaagaccgccaaggatgcactgagcagcgtgcaggagtcccaggtggcccagcaggccaggtacacccgctggcctccctccccatcccccctgccagctgcctccattcccacccgcccctgccctggtgagatcccaacaatggaatggaggtgctccagcctcccctgggcctgtgcctcttcagcctcctctttcctcacagggcctttgtcaggctgctgcgggagagatgacagagttgagactgcattcctcccaggtccctcctttctccccggagcagtcctagggcgtgccgttttagccctcatttccattttcctttcctttccctttctttctctttctatttctttctttctttctttctttctttctttctttctttctttctttctttctttctttctttctttcctttctttctttcctttctttctttcctttctttctttctttcctttctttctctttctttctttctttcctttttctttctttccctctcttcctttctctctttctttcttcttcttttttttttaatggagtctccctctgtcacctaggctggagtgcagtggtgccatctcggctcactgcaacctccgtctcccgggttcaacccattctcctgcctcagcctcccaagtagctgggattacaggcacgcgccaccacacccagctaatttttgtatttttagcagagatggggtttcaccatgttggccaggttggtcttgaattcctgacctcaggggatcctcctgcctcggcctcccaaagtgctgggattacaggcatgagccactgcgcctggccccattttccttttctgaaggtctggctagagcagtggtcctcagcctttttggcaccagggaccagttttgtggtggacaatttttccatgggccagcggggatggttttgggatgaagctgttccacctcagatcatcaggcattagattctcataaggagccctccacctagatccctggcatgtgcagttcacaatagggttcacactcctatgagaatgtaaggccacttgatctgacaggaggcggagctcaggcggtattgctcactcacccaccactcacttcgtgctgtgcagcccggctcctaacagtccatggaccagtacctatctatgacttgggggttggggacccctgggctaggggtttgccttgggaggccccacctgacccaattcaagcccgtgagtgcttctgctttgttctaagacctggggccagtgtgagcagaagtgtgtccttcctctcccatcctgcccctgcccatcagtactctcctctcccctactcccttctccacctcaccctgactggcattagctggcatagcagaggtgttcataaacattcttagtccccagaaccggctttggggtaggtgttattttctcactttgcagatgagaaaattgaggctcagagcgattaggtgacctgccccagatcacacaactaatcaatcctccaatgactttccaaatgagaggctgcctccctctgtcctaccctgctcagagccaccaggttgtgcaactccaggcggtgctgtttgcacagaaaacaatgacagccttgacctttcacatctccccaccctgtcactttgtgcctcaggcccaggggcataaacatctgaggtgacctggagatggcagggtttgacttgtgctggggttcctgcaaggatatctcttctcccagggtggcagctgtgggggattcctgcctgaggtctcagggctgtcgtccagtgaagttgagagggtggtgtggtcctgactggtgtcgtccagtggggacatgggtgtgggtcccatggttgcctacagaggagttctcatgccctgctctgttgcttcccctgactgatttaggggctgggtgaccgatggcttcagttccctgaaagactactggagcaccgttaaggacaagttctctgagttctgggatttggaccctgaggtcagaccaacttcagccgtggctgcctgagacctcaataccccaagtccacctgcctatccatcctgcgagctccttgggtcctgcaatctccagggctgcccctgtaggttgcttaaaagggacagtattctcagtgctctcctaccccacctcatgcctggcccccctccaggcatgctggcctcccaataaagctggacaagaagctgctatgagtgggccgtcgcaagtgtgccatctgtgtctgggcatgggaaagggccgaggctgttctgtgggtgggcactggacagactccaggtcaggcaggcatggaggccagcgctctatccaccttctggtagctgggcagtctctgggcctcagtttcttcatctctaaggtaggaatcaccctccgtaccctgccttccttgacagctttgtgcggaaggtcaaacaggacaataagtttgctgatactttgataaactgttaggtgctgcacaacatgacttgagtgtgtgccccatgccagccactatgcctggcacttaagttgtcatcagagttgagactgtgtgtgtttactcaaaactgtggagctgacctcccctatccaggccccctagccctcttaggcgcacgtgaagggaggaggccggatgggctagaggttggagtaagatgcaacgaggcactattcttggctccaccacttgatatcagcctcagtttcttacatgtaaagtggatacaaccgtaccccctccaccgtaggtttgccgtgagattgaaatgagagagcgttcgaaccgtttggcacagcacctgcacgtaaagatgcttgatcaatgttgtcatgattacagttgagctgactgggcccttgggacccggactggagtggtggggggcagtgtcctgggaccaaaaagaagcacaaggtctcccaatagaggctgcttcctttgtgtccccaccacccgaaagatgtcaggtcagagagcccgagagctgcagatggcttgagtagggctccactcttcagatcaaaaaactgtggcccggagaggcgaaggcacttggccagcatcacagagccagcacgtggcagggccagaccttgagcccaggtcagctgcgtgtattctgctcagttggtgcagaaaacagttttgtcactcctatgtcaggtgttagggactcctttacagatctcagtggcatcagtacatccagccccacctggagactgctttctctctgaaaattccccagggcttctctctgggctgagagatctcagcacccgtatctagaaaatgttcccacccagacctggctggatgactgctgttgtagctctggaaggttaggaactaaaaagcccactcctttacctagggtagctaagatacactggagatggggacatggggatggggccgattatccaggggcctgcatgagggggcaaaaggccctgcagagagagggtagggaaggcactgcccagatctgtgaagccatgtgcgtgcacgcggggacattcagacatgagtgcaaggagggaccgtgagcagggaggtcatgtgagaatacacaggcatgcctgcacacccatgtgaacttgagtgccaggccacacactcttttttttttttttttttttttagctggagtcttgctccgtcgcccaggctggagtgcagtggcatgatttcggctcactgtgacctctgcctcccaggttcaagcgattctcctgcctcagccttcctagtagctgggattacgggtgcaagccaccatgcccagctgattttttttgtatttttagtagagacagggtttcaccatattggccaggctggtctcaaactcctggcctgaagtgatacgcccacctcagcctcccaaagtgctgggattacaggcttgagccaccgcacccgacccgcgcactcttttcaataatcatggatggccaggggtgcagggtctaaaaagcgcggcctagcccatcctgctgttcactgggcaagcgacgtcacaggtccaggcttcagtgtcctcatccatgctctgcgtctgatggcaatctagccaggatgtggggaagggaggatgcagtgagagcacagatatgagagcatcttggaaataaaaatgtacctgcaagaggtggtggtgaattttcttactcaggccagcttctgccagggctggcagaaagagggggtggcatggcatggagccgcagggggtggaggactggcttccactgctgtgcctgaggaagccgcggctgtttctgggcgggatgggagtagtgggagggggatactggccttgtgagaagaaaagggaagtgtctgtttgagaggtttttgaattagtaaaggaggacaggcgcaaactccaagcgcttcacttgcacccgggaccaaaccccaatcccagtggctggctccctgaggccgccccgctccgtcccgccccgctgacagcggctgggctggagaaggctctatacggacacacctctggggacggggaacccactgctcccagctaaagcaaccctgtttcctggcccgcctcagacagggctgcaggccttgtttgagcccctttcagggcacctggccttggattgtctgtggctttgcctggtccgctgtgacttcctttctacttgagccttgctaaggcagactctactccctcactcgtaagcagccaggcgtccagcaggtcctccaacgtcgatcttggccctaagacgtccagtctgggcacggagttgttgagatccggcaggaagtccctgctccagggccaaaggccccacccgggctcccccggatgtccccgcacccccctctattctcccaaaagaaagaagctgcttcccactttggaaacgtttattctgagcaccgggaaggggggcggcggcgggcgcctcactgggtgttgagcttcttagtgtactcctcgagagcgctcaggaagctgaccttgaagctctccagcacgggcagcaggccttggcggaggtcctcgagcgcgggcttggccttctcgctgagcgtgctcagatgctcggtggccttggcgtggtactcggccagtctggcgccgccgttctccttgagagcctcaaggcgcgcggccaagcgctggcgcagctcgtcgctgtagggggccagatgcgtgcgcagcgcgtccacatgggcgcgcgcgcggtcgcgcatctcctcgcccagtgggctcagcttctcttgcagctcgtgcagcttctggcgcgcgccctcttggagctctgcgcgcagcggctccaccttctggcggtagagctccatctcctcctgccacttcttctggaagtcgtccaggtagggctgcaccttggccttcacctcctccagatccttgctcatctcctgcctcaggccctctgtctccttttccaggttatcccagaactcctgggtcacagggccgagctgttcgcgcagcttgctgaaggtggaggtcacgctgtcccagttgtcaaggagctttaggctggagggtgagacagaagggttgagggctggcctcccagcgccccagcctatcaggggtgagccctgggtgacacctgtccgcggaggtgcagtggcctagcatttccagtacactctcaaccaacacccctgccccgccaggccatgccccgttgtgcagctggaccgaggcacagagaggagctaaaaaggagacagagctgggactagtgcccagttacgttggtctccaaagtgggcccttgaaggacctcgcttctatgcctccagcgcattctcctctccgaagacagcccacagtcttgctgggcaggagcagaggaggtggtgaagaagggaaaggggcttgctacacttgcaggcacaatgtggctctgtgatcacgcatcgggcagccctggtctgtcctttgcaggggacatgggctgtgaccctgcctggagatcccattccagtttctccatccagaccatctgtggggcccagctcatcagatattaggtgaggactcggccagtctggcttcaacatcatcccacaggcctctgccccctacccctgccctcaaccccaggctgggtccttactttagctgttttcccaaggcggagccttcaaactgggacacatagtctctgccgctgtctttgagcacatccacgtacacagtggccaggtccttcactcgatcccaggggctctgggggggttcatcttgctgccagaaatgccgagcctggctccctgagggtgggaggggagacccagatcaggccagctgtgggctgagatctgagccgaaaggccaagcttggaggtgggggagagggggccagtgagaaacctgctgcctctgcccaggagggtgggccacggggatttagggagaaagccccccgatggttggctccctaggttaggggacacctacccgtcaggaagagcacggccaaggtcagcaccgcagctttcatcctgaagggccgtgggggacctggaggagaagaagggcctggctgagtggggtgccttcagcatgcagaagccccgtgctcccccactcattgcagccaggtgaggagaagggcacagagcgggagaagacctcaggtacccagaggcccggcctggggcaaggcctgaaccttgagctggggagccagagtgaccggggcaggcagcaggacgcacctccttctcgcagtctctaagcagccagctcttgcagggcctatttatgtctgcagccagggtctgggctgggaggctgataagcccagccccggccctgttgctgctcactggtcctggcaatgtggaacttaagagttcaaggatcagctctgtccctggggctgggcaaatagagtgggcaaacagcaagctgcgggggctgcagggcaggggtcaagggttcagtgggggcgggaggggagtgtctgcaggcttgcaggtctcccgggtggggtcggggttccctgcactcatccccttcccctccatgggagtgtgtgggcagttgccattgtccattgtgttggcagaggaggggaggggagggacgctgggactcctccaccaaggagactgcctcccccaccaccagcattccagggagactacttcactcccctcccccttcccccgccctgtcctcccaccagtgctcttctttagtccccagcaggtcctccaggcctctctccaagcctcccaaactggtaaacctggggagaggggagagccctccgtggctcccagactgaggtttcggagacctcttgcatttcaaaacactccagagatcaattcggagctgccaacttttaattttgtcatgtaaagatattgtccgcctccaaaaaaccctcaccatctacagtgaccatcacttcaaaaaggaaaggctttaacaaaaaagggcataatctcagaattacattacagaattgaagccccttagattgaagacgtctccctttgcattgttcacacttatatttgatcacgcacaggtgtgactggatctcagcccttgggaagccctggtgtggggagaagacctctgggcaaaggaagtggcaggagacctgctttctcatttcacttggcctccatcttgctggaggaagatcgtgggcaagttatataatctctctgagcctcggttttctatctgcaaaatggggcaagaatggtcagggttgttggaggcccctgagacagcctgtgaatgtaaagtgctgtgtgtccgttggtgtttgcagcaccatcttgtcaggtttctcctggaaggcccagacctcccccagcaggttactgataggacctgagtcctagagcctgtgatgcaggctgagaggaactgtgacatcactccagcctctccccatgccaccatctcacagatgaagagactgaagagcacagagggactttgcccagaggctgtcatctctcagggagttagaagaaaggctggacctagaacccagtctctggacttgggatgcagggcagaaatgtaccctgtaccatcactccaggaaactccctaacactagaaaccaggctgacatctctgtttaccagatcagggagtggtcggcctcatgcctttcacttcagagaagattctggagccagaaaacctcaaatctaagggtcaggcaggttcaaatccagctgcctgaccctggatgagttatgatacatcacctccccacacatcagtttctgattgaagataatgatagaatatgccatcgccctgagttatggcaggggttactgtgtggcaagcagaataacgctccccaaagatgtccacagcctcatccctggaacctgtggctttgctaccttccatggcaaaaaaagattttgctagtgtgattaaggacctggagatggggtggttggcctggattctccaggtgggcccattgtcatcacaggggtccttaattatacaagagggaggcagtggcctcagagtcagagaaagagatgtgaggatggcagtggagatcagactcgtgactgctggaagggggccatgagctgagggacatgagcaacccttccctagaagctggagaaggcaaaggatttttccctgcagcctccaggagcacagctctgctgccaccatgattttagcccagtatgacccattttggacttctgtcctccataactgtaagataataaatttgtatcgttttaagcatgaactttgaacatatatgcaaaactgttagaaaggtacctagcacttagtaaacagtaactattctgttttctagaatcccagtttctggtaatgtattcccttattcccactacacttgctttatcagatctgagacctcagcttctgcagcaggcatgaaggcagcagtcccacatctctctgcttgtccttgacttgcagttgctgagatatggaacatcttttctaggactgaagtggccccagatgtctatgggactgtgtagacagggaggtggccttggtgagccatcagcctgggctgcctacttgaccatcccagctgtctgtagctttagaaagtgggaaggtggctggtcccctgctgggacagctcacaggtgtctcgggccaagagagcgtcttttcttttggggggtagagtttgtcccagtcagcacatgggggaatctcagaagcttactggttggactccaagatacttgccagtgtttcacccttctctttggtttgttactaaaatgattgttatggctaaacctagtatttaacatttgcgcagttctttgtggccaaagcactttcacaacttagaatatccctataaggctggaggccagattttacccttgtgatttttgcctgtgggaaaactgcagctcacagctgccctgcatccttcagcggttactatttagcgctggcaggggtgggaatcgggaggcctggcttctagttctttgagggtggccttgcacccttgcggagcctgcagcctttgcagtctgatcagggacttctcagtttcctggctcagggactgcgaggcatcaggatagggggtgctgttgaacagcatcttaccaagcaggcagtttccttttctaaatatacttattcaccagggtggctactccattttattgcaaggtatttggcttaaactagtctaagccccctttactaatattttggaaaggaaggaggtctttctggacagagctgatggaaaaatacataacaacaacaacgacaataacaaactgggttgatgacacactcagactcagggtccagccaggcattgttcaaggcactcagtggccacgggttggactgtttggtggctgcggggcccacagtgtaggcccctgtttccacccatttctttccctcgtcttgggagtctccagagcgactgctcctgaacagggttaccaagtcctggccctggatgccctgacatgtgtaggagtgttggcggtgaccgcaagagtggattttgcacagaaagattagcaactcctttcacaatttatgtccaaacatactggtccatctgtatcgggaggactctgtcccctgctaggtctggcacataacagacacctgccaaacatctgctcagtgaatggcactggcaccctagagggagggtcaccagcctggtcatagggaggagtgggtcctgggaggggaggcagtctcataccagcccctgctcagaacgtttcttctgggagcacgtggtatgagccagaatgagagttagggaggggaggtggtgactgagcaggggagacaggacccccacccccagtagttcctacttttggcaattttgctgcagcttttgtgatagagccccaagttagacccttgggtggggcaccgtagccagctatgcaagattctctcctgccctcctgcttggaaaagactaaggccaggacagagctcatctttgatcagcaggagggaagcacagtagccctctgagttcttgatctttgcagttggggtggggtgggggctggcacaaagtcagaaagaaaactgtgtagagcacggttttctgtcaacatggctcctgttttctggagctaagctctccagtctgtatccaggagccagtgccctgcttcctacaaaagctcaccctacctctggtccaaaggcaccctggctgattttaggagggagtggcacctattgcaacaggtgctacaatttgctggaaggcatctgggtattatcactgtttgattctagagactcacctagtcttgcatgacagcgtatacagactcagaggagttttagaaggcccttcttttttttttttttttttttgagacggagtctcgctctgtcgcccaggctggagtgcagtggcgggatctcggctcactgcaagctccgcctcccgggttcacgccattctcctgcctcagcctcccaagtagctgggactacaggcgcccgccactacgcccggctaattttttgtatttttagtagagacggggtttcaccgttttagccgggatggtctcgatctcctgacctcgtgatccacccgcctcggcctcccaaagtgctgggattacaggcgtgagccaccgcgcccggccagaaggcccttcttgagaaggctcttttcttctctaatctaaatggccctacagcaactttctagccgccctcatggacttgaaatctttcttttctctttgcaggagtgcagtggtgcgatcacagctcactgcagcctcaaactcctaggctcacatgatccttcagcctcagcctcctgagcagctgggactacaggcatgtgccaccaagcctggttattttttgtagaggtgggggtcttgctatgttgcccaggttggactccaactcctgggtttacctaattctcctgcctcagcctcctgagcagctgggattacaggcgcacgccaccatgcccagcttggaaggctttctaaattccctcctctcattcttccttctgtgaactcagatggtctttccagcttcagtaagctttcttcatagaagaccttcaaccacctgtctcttagccatgcctggaaacttgctggaaactctaccctgccctttggagttcaggtgtgggataaaggagaaaactataggaaaattccacccccgctccgctttttttttttttttgagatgtagtatcccgctgtcacccaggctagagtgcagtggtgcaatcttggcttgctgcagtaacctctgcctcctgggttcaagccattctcctgtctcagcctcctgagtagcagggactacaggcacctgccaccacacctggctaatttttgtatttttagtagacacggggttttgccacattggccaggctggtctcaaactcctgacctcagatgatccacccccatcggcctccagaagtgctggatttacaggcgtgagccatgccaggcccctccctttctttccaaatacttatttggctatcctttcactcggccaatgggggtcacgtcatgaagggtccagcctgtgtccactctttaaggatccttccctgtactcttcaaaagtgccctttcaaggaagctgttttccacctggcccagcaaattcaaatgctcccttctgacagggcagagtccgagctgggtgcccagggacacagtgtgaagcagagttcaggcttctagagaatgcgagtttcttaagtcactcaaagccccacccttagcctgggagacctctccagcctccactgctccagctcccacctacctgaggcttcttccaactagactccaaaccacaggcaaataatctatcagcctaagaacacaatcaggctcctatctacacaacttcctgctgtccaactaagtaaccaagttgtaagtaagtgcctcacaaaaggaaggacaaaaggcaggacaaaaggtcttagcaacttgagtctggagattttttttttaatcctttttagttcaacataaaatgagaaagaaaaaaatatttctgacattttcaaagaacagaaataggaaagtatgttcatatacattcaacgtatactgcacatattggttactacaatacaaagcaatgagttttttttaaagtgtagtttgcaagatggcacggttagtaggctcactggctttcatctgttgttgctggagggtgcagtctgctctcccatacatacagtaccatgtaaacacatcaggctgagcgcgtggtggtggtagggcaggttgggggcataagagttggaacaagcgcagataagtcaacagctttttagggctttcttggtaagcccccttctggtgagtagttggtgaccccaccaagtggaggggagactggggaccatggaaacatgggacagctcccacgaagggctcttgcactgcagaattccactcaagggatcttgggtccaggagccgagctgccagtatcagtggagaaggacaaggtgcatggggatcccgccagcaacatcaggatggccatgccgggcacccgctttcctctgtgcaaattcaggatgaaagactaggaggggactcgggacctcttgctctcctttcccagaaaaaaaaagggtggaagagtcagtgtattcaaggtctctctcttgttttgaagatcagaaggagataacccagaccctctctcagccccagccagcagagaagactttggtttctaacaatgaagagaaataaagataacacaaataatagctactgcgtatgcactgcttcaactggggaaaggagaccactgcatctgtcactggcacaagtaagagctgttcacaattacaatgcctaaaggaaatactttgaacaaaaggtgcaagtcacaattcaaatagaacagaatctggttaaacatttctcatttaaacaaaaattccttttctctttatttattaataatgataataacaataatatcaacatttaccaaaaacaatttctacatgatcaagaattaaaatataggggctgagggtacccagtggggaagaggaggttaggagagaggcagggcccaaggcaacctcctacacttcttccctgtgacaaagaggctgaaagaggagagcatatatatatatattttatatatatattatatatataatatatatataatatattatattatatattatatatataatatatatatacacatatattatattatatatatacacacatatataatatatatatggagaaacaatcctttttatagcacaatataaaatgagaatgaaagatgccatagaaagcatagtgcactgctgttgggtgttcagtccatggataaaaccagcaggatgataaaggcaaccaactttccaggttacaagaggggagctgagttatccaccaaaagcaaaggctcaaattgagacatcctaactggcaaaccatctatgccaggtcattctcagcctccgtgccaaactcttcatatgatcttggctaggacagacatgttttccgtggatcccagcagtaaagacctctctgcgttccaggcttgggggtttctctttttttgttctttttgttttctaagtgccagaagccgtcacccttcctctctccctttgcctgccattaggattccagaggatggcatcctttagtatttgctttcacagaagagcaatgcagggggatggagggtgctctgctgatgaaggctagggagggagtggccctgaggccgctggcctctgaactctaactgctttgctctcctgtttcaaaaaaggaacgaaagaaaaaaaagaaaggaagaaaaaaaagaaagtatatcacctctggaagaaaacataccaaaaacaaaacaaaacacaaacccccaaacaaaacaaaaaaccaccaactcaaatatactttcacaaaagatggagaacatggatttccttcctgtttatttccttggtgacttggtcatacaagcaaacatggcaaaaccctctcagaacccaaaagaacagcacacggatgaaccaaatgtgaggaaagcagctgtgatattttgggtggagagaaacacaagggcaatttggcacaacgctgctagatactgtgggtttacaatcaaccttttcattcccaagctgtacacaaaacctggaataaagcagacacagaggagaattagtttgaaaagagaaaggctcaaatattccatttaaaaccttttaaaaaatgcaacgggtttactttccctcaggtgttcaggtagcttgccatactgaggctctgatgtggatttgccaagtggcttccctttcatcaggcctcttctgtcaaggattttccagatacaaccaatggtgcctgctgtgtactctttgcattactccagccaaacaagccaatttccccattctttctaccatgggcctctcatcacacatttccctaatctggaatatcctgccacttgcttctgtatggccttaaaaaatatggctggacatattttcctgccaggttttgtcttttaggactgagtttaaggacttcctcctttcctcattatgctgaccggaggtcacctgcatcctctggagccgtagctcacttctgtcgctatgaaggctagagcacctgtaacacacggcgagtcttgtgtcttattcccataaccgaaccaagagactgtgtttagcatttcttctgcacacccccacccctacctcgcgccctaaaactagcagcgtcgttaatgaaaagcaagaaactgtgaaggccacgaggggaggcgtggtactgtcgactgcactggccaccacaacacatgggctgaagctcctgatgggattgggagcaggcactgggccacagggctggtttggctctggccagggtgacactcactctctgtttcttgttacacgcctgcctgctccatgctgaaggagacttcggggtgcttgtagctgagcagaatgtctgtaatacacgtagatggatagcaagaggagtttaaatgctggctgccatcactcaggtctgggtgctcatgacctcccaggcttgccccacattctgcaagaccaaaaagaacgtatgaggttggcagggaactgggggactaggagagcaagggggagagagaggaggaattgaaggcaacctgtcgagcatcccacagcctgactcccagccctgaattctagctcacagcaggccctcaaggtgttgagtgacgatgggcgggggccaagattcttcctatattctcctctacctgttctgcttttttcccttttcctttaccctttcccatccttaggtaagatcaactactgtagtgtgagagaagatagaggactccttcagaaaggatcacctcttaaagagtgaaagggagaataattttactgcctgcaggcacccattcctgggcactgtctgtcttccagacactgtgctaagcacttgatactcactaagccagccagccctcagggcacaatgtaggataaaggctctatcgtttttgccactttacagatgaggatctcggggtccagaaagccaagtgcctcacctgcagagcctgaaaaggacagccttgggactggtggcagacctgccccgcccaaggcctacgcctattatttgttatgacaccctcccttgactggctccaagaagaggtagaaatgtgccattaggacctgatgccctctaagcagaactggaaaaagtgattgaaggcatatcatcacagagatgagagacaggaatgggagagccctgtgccatctggccagaagccacacctcctttacacacccacactcagggaagaccagtggggaaaggggctgtgtccagaacctgtgggatgctgtggctctacctccccatgagctcttcctacgaagagaggagcagttacggaagatggagggaggcccctccaggaacttctctggagtgccccatgcataaggctcctcaccctcattttccccatcctgaaactgctggctgcccatgagcgaagactgactgagaactgcatccgacatccgggcagagctaagtgctttcccagccacgagactcattcctggcaagttatccagctgtacctgcagaaaacagttaagagaagaaataagcacacaagacaccactctcaggcaacccctagagacagctggtccttctgaaggagcccaggcaaaagacagcccggggccccactccagactccttcctctaaagcaccacccaaagggggtgctccacagcgacagtgtgggaagctgcttggctctgcccagtgggggggctgagggtggggcggatgtggcaaatctcagctggtggtgacatcttgatacctacatggccttctaaaaccaggtttctgacctatccccatctccactgggactttgtcttaggacagcaccgtccagtcacactctgcagtgatggaaatgttctctgtcctgtccaatatggtaaccagtagccacaagtggctactgagcacttaaagtgtgactgggctgggcacggtggctcatgcctgtaatcccagcactttgggaggctgaggctggtggatcatgaggtcaggagatcgagaccatcctggctaacacggtgaaaccccgtctctactaaaaatacgaaaaattagctgggctaaaaaaatttagctctactaaaaatacaaaaaagggtggcgggcgcctgtagtcccagctactcgggaggttgaggcaggagaatggcgtgaacccgggaggcggagcttgcagtgagccgagattgcgccactgcactccaacctgggtgacagagcaagactctgtctcaaaaaataataataataaaaaataaagtgtaactggtgtgactgaggaactgaattttaaattgtttttaattttaattggtttagatttgaatagccacatgtggctagctactagactagcaccaccctaggaaaacaaaactttgctgaggcccaccagctcccctgatctgagtaagctcaatgtagctgctgaaaaataaccagaagcctatgggctcatttgctggggcctgagtttagactgagaagaggtttaataaccaaaactacagggaacagatggcaactatttctgattctttggtctaaaatttggagcatagattctacttgaattaaggtttggtctgttagggtgactcaaagaaaatgctcttaaggtaggcgaattgcctgagctcaggaattcgagaccagcctagccaacatggtaaaaccccatgcctactaaaaatacaaaaattagccaggtgtggtggcaggcacctgtagtcccagctactcaggaagctgaggcacaaaagtcacttgaactggggaggtagaagttgcagtgagctgatatcgcgccactgtcctcccgcctgggcgacagagtgagactccatctcaaaaaagaaaaaaaaagaaatgctccccaccgtttccagaaaggctgaatgctgactgaggagagcggccaagagaggctaccccacatcactatactctgtttcaaggctgggactgggaggatccacctctgtgcagcaggtgggaccaacatacataagcatcgtcgctgttctggatcgtgtggtgtctctggagggcccggggcctgtggtgctcatggacggaggggcgtgctgggtacccgagcccattgtgatccggcagctccactgcttgtcctggagaacttctatccatgcagttccctatgacaggctctgaggagacacagcagaatagagtcagtggggcggaacttctcccagcactggaaactcccatccaagaaatgtcttgcaagggacaatgggcaaggctgaggagatcatgtacaccaaccgctgatcctcagccggcgtcatggcttagaggagcctggaccagccctccaaaagacgagctgtaggggaggggaccacacccttagggaaaaaattccacgtaacagggcatggctggaccccaccgaaccttctcttctttcatttctctgttgaattaacagtgatctattcccaaacctaaatgcacatgagaattactctcggagctttcag

SEQ ID NO: 3 - DNA, 153107 bp, Mus musculus
ggacattctacaattctcagagatcagtgccttgctcagccatcctcagagaagcttccttctgcagcaggtgggaacaaatacagagagtcacagtcagataataaatatgcagagagtgagagactttggaacacagggccctactctgaatgcctctatcaagcccctcccctcggggctcagggaaccgtacagaagagttggcagaaagaatgtaagagctggagaggatgggagacactaagaaaacaaggatctccaattcaacaggattaaagtctcacagagactgaggcagtatacacaggagtatatggtatacaccagatgaggtcctagagatgacaagagaaatggacacaagccctgccccccaacccagaagcaatctctgactgatgaccactagccaatgaaaatttagtttactccaagagagtctaaatggggagacaaactactcttaaaggtcggttgcctgcccagcagtagatgctgatggaaaacaaactcaacagcattgatggcggtttcatgcctcataacatcagggcttttctcattttaaatctttatttttattcttttctctctttttaccttacaggtaatatatactgttgggtatatattatgacttccaatttggtgtttttatggaattacggaatgcacaaacaagtgggtctctgtgtctgtatttatttcttgggccatttcccttcagttatgtcctatttaagtgtgttttcttttattttatcttcatcttccttccttttttccttccttccttccttccttccttccttcctcccttcctcccttcctcccttccttccttccttccttctctccttcctcccttagctgcctggtggggaggtagggaagatctgggatgagtagagtgtagggaaaccacaatcagactatgtatgaaaaaattatatttaataaaaaaataaagctgggcgtggtggcgcacgcctttaatcccagcacttgggaggcaaaggcaggcagatttctgaattcgagggaggacagcccggtctccaaagttagttctaggacagccagggcaacacagagaaaccctgtctcgaaaaacaaaacaaaaaaataaataaaaaataaaggtaagagtactagagtaggaaaaaatgttgtctactgaactgcttagcaatcctatttttcaaaaaatattttaagtaatcttttgagtatgtgtgccaagattagaccatgtttgcattttcatgaatatgtgaaatgagacacaaacggcagggtgtgccctcaaggtgtgatgtgtatttaaaaagaggaacagaaatttgcatttgtttgcatagaaaaaaatccatgatatattatacagaaaaaaaaattagcttacccaagaggatatatatagagcatggattttaaaatgagaatgttcccaagtgtgtacattttattctaggaaaaactctgaagaaatgaataccagagactaacagaagtcctctctggataggggcctagagatgatggctaactctccctcctccccctcctccctatcttcccctcctccctccttcctcttctccccctgatccccctctcccttctcctctccctccctctcttctccccttcttctattagtccttttattttatacctttgttatagtctgaacatttgactatgaacactagtactgcacatatttaaattttacttctgcttggtaagatgactcagttgataacagtacttgcttccaagcctggtgctctgagtttgagccttgggactcatagtggaagaagagatctgacttccagaattgtcctctgacctgcacacacacacacacacagacacatgcccctccccatgcaaacaataaaataagaaaatttgaaaagaaaaccacagagttttatcttcagttttataagactcatgtgcttttaaatcttgagttttagtctatgttaaaaatttcccaagtcaaaatagatttatttaaatgtcacgccactctaaaaatgtttttgtctgaatactacaaaacatcactgtagctacacactccagtactactgagtcaaactttattgtttcttgtttagctaactttgtgccttttaatatgtgtgggttataaacccattataagtatatttttaagtatttgcctttgatatacaagatgcaagttcttgggttgggaaaaatagctaccaaatgcttatgtggtaacaaatcaaatattgtacccttattaaatacaaagtggaattttctgcattgagtgattgagagaatcacatgcaagcctgtttcttacccaatttggaaattatacctggataaattgatggttggcttaaaaacaacttcttttcaagcatccatttaaaaaattaaattactgtgactctggagttactgtatttttatgacacactggtcatttctcagaacaccagatgataaattccctgcagaacaatgattagcatatcgcatggtttctccagtcactgcaaatgctctcactgtgttacactgaggggtcactcagggatgctttggcttcccagctgcccacagggtttcctgattattgcctctccaccttcatttcacccccacctccctaccccacctccccaccccacccctcccctccccaacccccatgcagcacagtgctgttcttcatcttgcatcttttgtttgtcttcagggttcaggccaataaacaaagtgacttagatcaaactttgagctcttacaggtttggatgtgttctttggtccccgaaaaagacggttgcttctggctctcttgacacctccctgctgattttactagacctttgatgctggtgaaggtagagatttttgaagatctgcctattgtggctttatgactcaagttgggtacagtaccaagcataagcctgtgcctctaaaactcaagctggcatcactgagactcagggctctgtggaatctccaaggaaagaagagaacctgattattaatacagtaatcaaaattaacttgtaaagtaggattctcagctagatttaactctaccaaaatttaggttaagtcactacctaccatactcacaagctcccagaatgttctcagagtggaaaatattctgctgaccgccatcttgctaccacttcctattctactccctaagggcttctagtctaagggactacccatcaggaagtctgtatataggtccagtatgtgggtacgtggctcactaagtactgacttagagaccctttgggaatgtagaaagaacatctccatcaagagagctcttgttggctccagcccttgttgatcgtactatcagattttctacctttttcaacagaaacgatagagacttttgggtgacattcccatttgtgttgactatttcaaataacatttcaacacccttcagcccaaaccctgtgctaaagaagccgaatgtagtcaggggacccttagcattcaagtgctgattggaactaaactgttgtaccatcaggaggcataacaaaggggttctgccgtcagggtcagtatggcattcgttcctaagagtgacagggtatgtggggtttagtggggccagtctttagccatattgctttgtaaaagctataagacaatgagtcactaaaaatatggtcaaccgcctaacctctctagatctctagctccccaaagctttatacaggcagtgttgacagtgtgtgtgtgtgtgtgtgtgtgtgtgtgcatctcaaagagaaatgctaacagataagtatgtgagtgactaacaaaatcataacagtcacacttcatactgattcatttcattataaatagcattaaaaaaaatccatacatagaaatattagaaagagccacatttaatacatctttatgaatattgaggaataccacattgtattttaagatggtaataatgttaaaggagctttgtggaaccatttttttgaacaacacaaattccaaatggtcccaacaatttacatgaccaactcataaatacccagagtggatgagtaagatatagtctatgaatatgaggggaaaaaaatcagaagaccagattaaggaaagaaagaaggcttaaatatactgggctttcttttaaaaaatgatttatttacttatttgcttaatgtgtgttggtgttttgcctgcatgtatgtctgtgtaagggtgttgggctctctggaattacagacagttgtgagctgctgtgtaggttctaggaattgaatctgactgctctggaagagcagttactactcttaaccctggagtcatctctctcgcctttgggattttcatttggctgagagaggtctaggattaagtcaaaatttctatatacttcgacaacccataaacccatccactgaagatgcctagcagccttaactatccttgtcgtctcagatttccctgctcgttgtcagtgcttacaacatacatgccaataaaatatgcgaggacaactgtttttatgtggcaagttgcaggtttttttttaatgcagttgtaaatgccctcttcatactgacaaacggcttttcatggtgtttttttcctaactaaaaattttacacacttattccagaaaaactgaaaactacagatatgtgtgaaaatattactcagtcttaccacccacagaaaactgctggtaatgtctaggtagggatttttatagtgttttctatgcaaatatattcaatgaaaaaaaaccctgtaaatatattaaaaatcttctaaatacgaatcacatatgcacagaacgatagctttgttttttcaactaatatttaccatgaacgattccctgtttgagttatctttgaaaacataacttttaatgtcttatggctgtgtaatatgaacttaaccgaggctctttagaatctttatgcagttaggcaattaaatggttttgaaatgttcactcttatcagcaataaaggaaaaatatcattgagcatgtcctgagtcatacctaatttttaattcattaattgtttcttttggtgtgcgcatgtgtagaagccagaggagaatgttgggtgtcttgctccatccctctctacctttttttttttttgagatatgccccacccaccctccactctctacccacccctaaccctggccactcctagctttttatgtgggtgctgggaagtacactcagattctcatgatcgagcagcaggtacttgtcccatctctccagccccttcattggactttttatgtttttttttatgacaaatttttttcccgtaaattagtgggtctgagtcctcgatggtagatgaatgatgatcaccttgcattgcagggtcatgtatcacagcattattataccactttcccctttcctctgacctacttttcttagacatcttaagtctagactcctccattttgctttcttttctcatttagacaccatgacaaggctgtctagccccaacattaaacagactccttgcggagtggaggtgggtgagggaaccagtcaaatgttgctcatgtgagatcagcattagctgatctccaaggcaggaccagaagagtggagtatattgccttctgatacgaagtctggaccagctgaaaacaagactcggattttactgggcagcccaactcttcagaaccctggccccagagggagaaatgggagggagcacagtgcagttggatatttggtccttaaatattgtgaatattatgtccaaacagctgttgagagtccatgtagggtccacaaggaagcgtccaaaataactgtgaggacaccaaatgccagcctttggaaagagtggtccccagggtccacaaagacaaaggggaaagagacttgtttctttagaagactagaagatgggatcgggaaacttttgtaggatttatcttttagtaactatttgtgcgtgtgtgtgtgtgcacgtgcgtgtgtgtgtgtgtgtgtgtgtgcgcgtgcgtgtgtgcgtgtgcgtgcgtgtgcgtgcgttcgtgcgtgtgtgtgtgtgtgcgcgcgtgtgtgtgcgtgcgtgcgtgtgtgtgtgtgtgtgtgtgtgtgtgtgtgtgcgtgcgtgcgtgcgtgtgtgtgtgtgtgtgtgcgtgcgtgtgtgcgtgtgcgtgcgtgtgcgtgcgttcgtgcgtgtgtgtgtgtgtgcgcgcgcgcgcgcgtgtgtgtgcgtgcgtgcgtgtgtgtgtgtgtgtgtgcgtgcgtgcgtgcgtgtgtgcgtgcgtgcgcgtgtgtgcgtgcgtgcgtgcgtgcgtgcgtgcgtgcgtgtgtgtgtgtgtgtgtgtgtgtgtgttacagagaaggacagcccttggcaaaggcataaaaccactccctattccctagatcactgccaggaatgtggattcctcagtgtcaggaaaggactccgaataggggaagatgtagacccatagcttctgctgcaataaaggttaggcttcctttaatccccaattgttttcttcacacatgaggctgctcatgtgtaagtgccatttgtgaatctattgggaagcatgttggtagatttgagtttggagtaaattttatttataatttggatattttaaaggtctcctccttatctactcttaatgctgcatctgataacctcgtttgtattccagagtaacggtcataggacagctgaggtgaagatgatagaagggttttaaaacccagggaagcagatgattcagtctgtgagacagcagcaggcagctgtaagagcagaaggagaagatgaagcagtagaagatggagcagtagaagatggagcaggagaggatggagcaggagaggatggagcaggagaggatggagcaggagaggatggagcaggagaggatggagcaggaagcaggagatcatcagctgttacgggctcaaaacaaacaaaaaaacccaacaacagcaaaaacaaaaaacaaacaaacaaatgcttcctaggtctccctaagggagttggagtgtaattcttttgttgtttttgtttgtttgtttggttggttggttgtttgtttggtttttgcaagctgaggacatatgaagtctggggtgaggctggagtgctgcacagggtgattactattgctgtgggtgacttagttacctcctgctccctctcctccccaagtgaacaattttcctctaggaaggataaataggaagaggaaggagcagcgtttcaatacagaagaccacatttcaggcttgaaatagacagtggagatggagaagaaccaaaacctttaaaaggtttgtaggcggtacctctggcctggccgtgatgttctttcaaatgagaagagaacgatgaagacaaagataaaagtgttaagcaagactgtgatttcccagagtagatgacagggtgatgatgttgttaagaaggcaaaaggggaatacttaaggtgaagatgataaatttggggttctcatttttgagggagaatgtcttcctaacttcgtgctgataaatgttaacaagtggcgttcctttttccttccttccttccttccttccttccttccttccttccttccttccctccctccctccctccctccctccctccctccctccctccctccctccctccctccctccctccctcccttctttctttctttctttctttctttctttctttctttctttctgacagggtttctctgtatagccctggcctggaactcaactttgtagaccaggctggccttgaactcagaaatcctcctgcctctgcctcccaagggctggggtcaaaggtgtgcaccaccacgcccagctaacaagtggctttcttaaggaaaacaaaaacaaagtcaaagctacaaataaaaaaggaaaatcaagtgagcaaactctgatttattatttctaataatataaatataaatcttcttaacactgacaatttcagattagccctatggatgccaattgctgagtgtgtgtgtgtgtgtgtgtgtgtgtgagagagagagagagagagagagagagagagagagagagagagagagtgagagagagagaatttggacagaacagcctgggcatttagtagagagtttaatgaaaaacaagaaagagacaattgaaactttcctgtaatgtcttgtaatgttaaagaaagggtaatttggaggaggcagattggacctgtagctttaaggaacagtatatctcactttctgcctgatgctcagaatatatctacttacaaattggaataactggttgaccataacaaaaacctgcaaatatatgtttctcaaggccaggatagaaacagtgttgtacctcgcttgggtgttaatacaatttacaatagtacagaaagaatcacattggtccactcaaaagaaatcacactgcattcagagtctacgtggtttagagcctgttccacctataaagggtggcacactgaattttctcatttgatcactgatagcttgaggatttttccccctgggtacggaattaagctgattaaaacttgaactgtaagtcttttcatctctcttcattaaaggtgatttaccaattaggggagggagatgtgtgcctgtatgtgctcatgagcatgtgcctgtgcgtgtgcgtgtgtgtgtgtgtacaggtgtgcatgcatgtatgtatgtgtgcctgtgtgtgtgtgaatgtgtatgtgtgtgtatgtacatttcaaagctagcgatcaacatcaggagtcttcaatttctcttcgctttatttatttacttattatttacttatttattacgtcacagtctctcattgatgctgctagactggctggcgagctgactccattcatctcctatctctagctcttagatgctgggattgctggtatactacacctggcttttcacatgggttctggggatgtaaactcaggatttcatgcttgcatggtaactcctttatcgattgagatctctctctagtcttctttttgaatttttgagttatatctcattctctaatgttctaagcagtaggtttttttatgatttggttgtgagcctagccgttaacagctgagccatctctccagctgctagtaggttttctcaatcactacaaatttattttgaaaaatcattttgtttatttttttttttagaaaattttcattgcctttctgtagtgtcctatttttttcagctgcagggggccaaatagtaggtatctcgggcaagaaacacgtgtagtgaatatcttttgttaaaaaaaaaaaccaacaacaaaaacttctctcttttaaggaaggtgtttgtagactgtagactggctcctagatatgcatttaaactatcctctaaacactgactttcagggaatcttgatttaaaagccttcatgggatgataaaattgagcttcttgtatctctatgacctctctagcaaggtcagtagagccatagttgcctgaaggtcaagtctgtaattagaagatcccagggtcagctcagaatagaacctcaagcaacccagggtatgtttatggaatccactacttcagagcaacagtaacaaagataggcctttccactcaggtagaaagggcttcctaggacaaggttgggggtttgggtgaaggtgttatacatcagaagacatggaagggaaagctctctggagcatgctcaggaacaaactaaccaggggtactcaaaggatggagaaattcctgctttgaaatttctttctttcttaagtgtgatatcatctaagttctaactgttgaaatccagtagttgtgtcatgaggtgctgtcctgatggcaggtcatgtcacttggtgtcaacaggtgtaacctggatgaagcatttggcctctgtaggtgtcgaagggtagagatttacaacatgcatacacatactgccaacactgcagtgtatttgtgcatttattgcagtgagagttgaataggggcagattcctaaccctacagggcttcctagttaaacactgcaagttggatttcagggtcattgccttcatatagtgaggattccaggatgctctgcccggggcttctttcttcccaccctttcttctttctctgcctcctaactacctgatttgggtagcacttacatgtcacctacgctcttttagagaaacccaagaagttagcttttatttttagggtaaaaaagagagagatttatttatgtacatgagtgttttacttatgtgcacatgtgtgcaccacgtacacacctggtgcttatggaggccagaagactgtgtcagctctcctgtaactggagttacagatggttgtaaagcagcaagtggatgctgggaacagaatttagtaggagtactcttgggaaccaaattcttcaaagtacaaaaagaatgtgtgtgtgtgtgtgtgtgtgtgtgtgtattttaggtgctaggagatatgggggaaatgagggaagctgcataaagacttaatctcctaaaatcatgcaaagaacgatcctttccccttaggcgttttcctttgtacacagatggtcacacatattattttaaattctttgccagtgctggacttttaaaagtctggcataggaaatggtttatagggtatggatgtcactagagattggcactgatgttcagtcagtaggattctggtgttggcactcttcttccgaggacttcaaaagttccaacgaaattcattttcagaaaactctgaggcagagagaacgttctctcttgagagacaggaagcaagggccaaggatgtagctctcagctggctgaatgcttgcctgctatgcaagaggctgggttccatctctccgcactgtacaaatgtgggtgtggtactctgttcctgtaattttaggccttgggaggcaagaggattaggaattcaaggttattgagtttatgagcagactacatgagactctgtctcaattaaaacaaataaaatagaggcagaaaaactttatctaactttggtcgtttgacatcatcaaaacccactcttgtgaccacagctgccccttgtggcttataggtacctattactagtggagtgtgtgtgtgtgtgtgtgtgtgtgtgtgtagaaggtgcagactaggtccctggaaggtgtgtgtgtgtgtgtgtgtgtgtgtgtgtgtgtgtgtgtgtgtgtgtagaaggtgcagactaggtccctggaaggtagagatcttctcttcaaaatcaatgtaaaggtttgaggcagacaccaaaataggctgatattcactgtccattccacatcccttcccccaatctaggacttttaaaggaagaaaaggaagagaccgaaaatggttggcatctgggggtggggtggggtggggagttttccttcccaagttgggggctgagcaaactaacaaaaggagaggggggagagtgggagtaagggagagcgggagggagagaggaagagggcatacacacacaaacaaaacaaacaaaactcaaaaagcaacacccacaaaaccccaaacaattgcagaaagaggagtttagagaacgagcttttcccctttcctcctctgccgggaatgtggagtccctggctcagcgcaagtccggagtttcccgtttcccgaaggctagcaggtcagggccagggctacagaaagcgggccccacaaagctctcaccatgcgcccccagtgcccgctgcggcggcgcactgtcgccggtttaaggggcgggccatgtctccacgtgctttctgctgagtgactgaactacataaacagaggccgggaagggggcgggggaaagagggagagaacagcgtttgaccggtagtaaccccggcgctcggcacagccgaatctataaaaggaactagtcgcggcaaaaaccagtaattccgagggcgagcgagcgggccgggaccggcagagcccacttctctccgcggcgcagcgcaaagctgggcagggggcgccgcgggacccgcgcaaccacagccggcttggggagctgctctgctccctgtttccccccacttttttcttcccctttctggaagggtttgtgcaggggtagggaaaacagactcaaacagcaaagtggaaaacaggtaagaggttcttcagtgacttgggcattttgtttcggggccaaggaagcgttgggaagctctccgttttggggacactggggggactcgaactcccatgtaccttacttctggggatgcaaatagtacaggggaggcataaacagggaaagaatgttctgggacgggccctgtcgaccctgggactcagaactgccgcactcgggtctcccggaatcggagaccagcgagagcatctccggcgtcggagactcgcctcttgggcgcagtgtgagccaaggttcccggacgtcctcggggtacagccagtggggtagggagaagggaatcctctacaaagggtctccttttgtctggcgcggggtaggccgtcgcccacaagtgtcacatctgagtcctcactccattatttaactggtttgtgttggcctctgacttggaggttctcttcccgggactgggactgcatgtccttgtttccaaagaactctagtaggaagtgtcctaaacggggtcttttatgttactgctgcttgagttctctgggctttgttcgactccggggtcctgcccacaggcttcctgcgctctggagggctgcagtccctggcgcaaagtgggagaccacttttgttccttctaaagacagaaaacttaagagagtctgcagaaacccgaaactggggtgcccaatccaccctcatcttactgctttttgctagtcttcccttggggagacttcgggctgagcaccgattgggaagctggggctaggttgtgcagccgaatgaccgcaagtaaccccatcgggcagcacagaactcgcagctcgggtgctgggccgggctccgccgccagggggtgggggctgggcggcctgcgggtggcccctggagactggcccgcagcgcctcctggccgggtagcctaggtatggcctggtgcggagtgagagtctctagtccttttgcttcactgtgaatctggtcaaaactggtgtttccaaactgggaggaaacccgaggccaagaaagccagtctatgttttcatgttgttgtttttttcttttttgtttttgttttttgtttgtttgtttgtttcctgactcccagaccgttgctcaatgaggttcttggggatgttggctgatgacaaccttgtggataggtgcctgttttggtttctgcacttacctctggaaaagagagaaatacttattaaactgtttgcttttttttttttttttgactttgtgtgtttgtttgggaaaactaagtgtcactagaaataattagtttgccccatttgctgcaatggtatcaccattccaaaacaaaacaagaatttacttcgacatccttccaaggaagtgggcagaataaatgtacaataaaggacagataaacaaaaggaacacttctggcttaagatgtaggcccccggtagagtctaccttgtacaagaccttgggttctagcaccaccaaccacagaagcaaagcaaaacaaaacagcacaaaccttccttgaagagaattggtacaccactttctttctgtggctcagccctcacctcccacagcacacacctgacacatgcctgcaggctcgaaagcacacccttacctcttagtcataattcggaaccctgacccaagtattgatactctacaagacataaatgccaattaaaaaggagttgtttatcatcaccacttttctttcagcccatttttaatattctaatgcacacataaggacaacgtattgctgttcccattgttgaaaaacacttcccccacatcaaaggaggtatagacaagcatagagaatatttgagtggatagtatatcaatatataaataataaagataaattacagtttctattgtaagcatgtcttttcctcagcgctatcacaagtcattaaaatagggcttttttttttttaaagaaaggtgtgatgcacagaattgattattatctatgtggtaacaagttgaatctgagggttgagggaaggaaattttcagcaacataatgctcatagtaccattttggagcaaaaattgctaccatagaataagtcatgggtctccttgtgaaagtcactggggttctggaggggtcactggtggtgacttgggtatttgtgacgggtgtcttcccgaagatgagtattttaaatccagccccctaaagtattttttattagcacccaaaggcaggcctgttgtggcccttggatgcatcttgatttggaatgtgtgcgtggttgatgggagaccgtgaattagtctggaattggaaagggtgactggggctgattggttttctacctctcttcatggaaaccccaatgcaaacactatttaaaaaaaaaaaaagaatgatacttagcaactcagctatgtgctaccttacctatgtggagaggagctgggacttttagtatttttttttctttaggcatcgtttttttcctctcataaatcagtgtccttatgtgggctgcatatgtagtgactgaaaatagatctttgcttttttaaaaaaaatatactttttagtttctaagatagttaaatggacacttctttaaactcttaaattagggacttcctggatttttagaaaatatatatgtgtatagctttggccgttcttaaaacattcaagtataaatatatttttatatatggtctggatgttaaataaataatgaaattataatgtaactatggtcaattattctggcattaaattttaaaagattggtcgtaatacttgttgatttacttgcattgggagaaggtccgctttaaaaatattggagacagctttacacacggaagagaaagcacctggaataccaattatagacgtgtttgtgtcttaatagacgcttacctggtgctgttcccggtgttactcagacgctgagtttatcttcaagccaaacttgtttattgtaactacaggttaagaaggcgggaggctatctggtccttggctctccattttccaagaggctgatttgagatttgaattcacttcccaaagtctctaactgtccagattaggggagacagtggtacaatttcagatgccgtgaaagggaatttgccgtgtattcatttgctgtcatttttactggaaacttatgatctgtatcatattcccatatttgctctggggtagtcggtcaaattctcttctggaagagaccttggctgcaactcggtgcaaacaaacaaacaacaacaacaaaacccaggcagtaacatttgctcagttctcatttaaaaacaaagccaaaacttggttttaaatgagtgtgatcctcttgcctcagctaattaattgtgaatagtgtgtgacctcagagtagtttgctacagattatggggccaggtggcataaagtccgagtgaacgtctcagacatgaaatggtttctgcaggcaggtcttaagctacaccatactctgtcaaacacgaatggcccaaaagcagcttgtctaggattatcgttgactgtggggaacatcacatttgtgggggttttttttttgaagatttttaaaatttattattatatgtaagtacactgtagctgtcttcagacagcccagaagagggaatcagattttattacagttgattgtgacctaccatgtagttactgggatttgaactcaggacctttggaagagcagtcagtgctcttaaccgctgagccatctctccagcccatgtttgttttctaaaacaatgagactttgcaaacttgaagacctggcagaaagaatgttaccctcctcacaagtctcctgcacccccaactccctcccattctgcacttccatgcagaatatgatctgagccccgtgctcacgtatgtcatgcacttaggtttcaaaagagaggtctttgacccttgcgcgtaatctgtctctctaatacggaaattgacaaataccagtcagctaaggggctggatgctgctcgcttcctgtgttttaaaactactccaacaaataagacattctcagcaaagtgttagagactgatacggccacggacgtcattaatgcatcttggtgcgtgtttaaatgatttaggctagatgactcaagtagacgaatagtcctgctcacccagttccatttccctttttgaggcagctgcagggatttgagacaatagtctgcgatgccccatttaaatattttgagttgttcattaatgtgctcttatggataagcgtgagataactccttatgtgatttagaggttcagacactttaagaagtacagaagcctcttctgtgttatttctggctttcacagttttggggtgtgtgccttaaaatctagagtgtttttgtgtgtcatttccaaaaacttgggggccacgcaggagtaaggaatggtaccagtctaggtgtctgtcgacaggtaaatggatgataaaggaagctcttgtcctctctgaggagctacaaacctgctaactaggccaggctctactcctgaaggtcccactacctcctgattacaacacctttaacacatgggccttgagaatacattcaagatccccagttcagcaacatttctcttgctgcctcctccaggacgcttttctttgaaagtgttagggaaactcactcccctggactcctggtagcacgttgatactgatccccagagtgactgctgttcaccctttccatccatccgtgtatgaggaagtggatgaaccgttttatatgttgggagtaggggcagtcctattgtttcttttgctgactggattatatttatttctatggcttctgggtacattaagccctggcagaattttttaaaaagccattattaaacttttaattattagatttacttattttatgttgattcatttatgccttgcatgtatgtctgtataacgtgtacctgcttggtccctgcagaggtcagaagaggaccttgcattctgtggatttggagtttatggatggttgttaccaactgtgctgtcactccagcctctttttgttttaaacatcatctattctagtctcttcataataaagaaccatgcctttgttttgtgtcccaaagccgtaagatttcttgtctaaatccactccctgagcagtcattaattggaaattaaattcttattctttttcttccttgatcctggatggcttctcttcttgcagaatacagagttataatgccctttagaatagtaaagagaaatcgtgtacattaaatagacatggaattcttaaatcctggcctgctctcatttatttgttgtctctgttggcccagtttgaattgtaaggggctttttcaactggaactcttcttgctttcccaaagacaaagtgtcctttagctttaagttcaaacaagaaggaacattttcacagaactcctggatgctaagtaagggtctgcgaggtgatgttttctttatgcaaaagtataaaattctgatactaattctggttggtgttgtgattcgcggcaggtgtatttcttttttataaacttgtgaatgatggtgttagttgtagtgggaccttgaatttagaatacagccagcctttggtcggcttgtgtttattcagttatcagtcttatggggatttgcaaatttaactggactggctgccatttctcccctttgcagtgcaggctacacttcacgtgatcagaaggcgagcggctctcccctgctgaggagagaagagtgagcagagcctgcagagcccaacaggccactctgtcctcaaacagagctccatttggggacactggctatcacctgatgtagccacttagtacagtgttgcttggagactggggtgtgcgactttttaaatggcaccataaaatctgtcttttttttttaaatgaggctaccaacgttccacccagtagatgagtccactttcccctgaatacttttcacttgctactctgagtatttgatttgtggaatcttaataacagagtcacttttaaagaaaggaatgcatagaattttgataacactggactcatctgacatgaattttctttttgcaggatcctcccaacccccaaataacggttttcttgttgtcaatactaaaaaaataaaaagtggacacacccttaagttttttgtttttcagaaccagttgtggtcttattcctctttttctcctcctctagttaggtagccagcaaagtggcttgtttgtctttttgtggagaaggtgtcagactggagggaaggactcgggcctttgggactgatggcagctgaatgacgttctcacatacctggttagttggcgcttgctgtgttgcagaactggcatgttagggacacagggcatctgcttggcctgcttccggagctggctggtgaaagggcaatctggagaagggtcctgataccagtcacctgatctctaagctggccctggacaagagctccattatgtgaaaatgaaggcagtaaattgttgaggtagaaaagctgtgtgcagatattgaaagggttccttaagtctttgacttgaacctgtgggcttagagcattgggttcctgagcagtgctgactgttttatagtttgggatgagtccccggaacccccccccccccccccccccccgaagatgtccttttcagctggtatgttcacatgagtctattgtttgctttgtaacacagctggaaatggtgccttggcttcgggtcctttaaacaacttactcagcagggtgcacttgctaagccagcaaccagggaagagtttaggtagatgggaaaagaggtgcaggatggaagcccagacttctaagatgattgatttagaagtcgaatgaaatgagacagaggcagctttaggacccaagcacaacttgttggaaagcagccgtgggctacagaaaacagctgaatgacaggacaatgtggagagaggagagaccccagaaggggattttatggtaaacccttggtatcctgaagggcttgctaccagagatacccaggtaagtttcgcttctctcagtagtctgggctcaggagagagtgccgtgctctggaaaggccatggaaggaaatggtactctctctgtagaccaagtgaggagagagattccgttaattgtctgctcactctcagccccaccctggatggaagcttcactccgtgaagtgggtaacactcatttcaataacagtgcatccagtacttctcttgttccaggaactagataaatgttttatagacactattagccctgtttgatgcagaggacgcagggcgtcagaatctttagggttccagagtcgatgaatagtctctgtgccatccataccttagcatccttcagcgatgtgagccacataccatggttgttgctaatatgccactggaccacagctcccaagatgttcttggaaagtcttcttagaacaacaggcggtattatccagtcaagtttgtctgcaaatcagggcttgcaggtagcttgcaggtagatcagggtaaaggatgctctgggcccctgccaaagtacatctttactccagcgttttgaccgcagttgaagactttttatgtttctcccttgcgacaagtcagtcatgagggtagtttggttcctacagtcagagaaggttcatttctttgtgtgcctcatccccctgaccagggaaaaagcaaatgcttgtattatttgctaaattcttcctttgaagtttgctctgtgtttgtttagtggaaatcagtgagaggtgagggggtgatcttttaacattcggttagaattttcccctaattttactctagagggacaaggatttcggttcggtacagatctgctttcagaaaagccaggcttttaagcattttaaaagaagtccagaggccatttgtgtagctgatagcaactctggaactctgagggcggtaaataggatcattgactgtctaactatcagagagagacttgatgggagtagcttttgactttcaggatctcttgtagaatagaattgtcaacaacagcaggaattgcttaagatgagcaattgcttctcaaaggctagttacagatcggcacaacattcatgcctttctcacatccgctattggttttcctttttattttttaatttcatagctcttgttttgaaaatgaagctatgcacaaagaattttgtcttggaagttggctacgtgttccaggttggggaaaaaaatgtatgcagctgtttataatctcgctgttacgaataaggatgtacgtttgatgcatttggcattttgagccctgctgcctccccagttctaattgttgggcacaatagcatccacagcttctatcgttttagttgggtggttcttagctcagcctcttcttaaacagtgacaggatcagttcatttgaggttgatttttgtcttgaagacctcttgccctctttgatgtttacacatttcagtgttaagaaatgcagtgttaagaatattatctttaggtagtgacatcatttctggggtgcctgtttgttgatttgagtaagggagcatttaagggaccactaacgaggatggctttggggtagtgagcctaagactagaggccaggaaggctaatcaagacagtcagcttagcttcaggcatggattaagctggtgggtcagctttggagaaattataggatgtctcacaatccctcccattccacagcagcctacctgtgaaatcatggatgcagtgagcctgtgccagccaggtctcctggcctttagtaacctcattaggcttctccctgaacgtgactactgatccagagacataggctccgagaggctattagagaacaggccttttctatagcaagcatactctgttgggcttacaggtttcattcttgatatttcaggaccttgcacaaccctctggggatgaggccggagcctcatctggtcttgcttttgcatcactatctcatgaatatgcaatcagttgagctcagcacctttgcatatcggctacagttggacctatttccccgctttgtagtttaactgcctcgccatttagcagtatgaaacaccgcagatacacgcagttttcaattgcccgtttttacctcccctaagaaaaggaaatctacagacagctgttattaagacatgcctccagctatggtcagaaatttcaccttgcatctggtttctgctaactgaaaatctgttgtcttaagaaagcagagcttacacatatgcatagagagacacatatatttatttattgaaagttctggagaatggctgtcatatacccattgctgtttgaaaatgagaattagttgctgggtgcacatgctaagtttctgaactattttgatggcaccgaggagagaacgcattcagaagactaagtggactcaagagagactcaaaggcatgtgactgttctcaaaaagttgcagccgggcgtggtggcacacacctttaatcccagcactcgggaggcagaggcaggcggatttctgagttcgaggccagcctggtctacagagtgagttccaggacagccagggctacacagagaaaccctgtctcgaaaaaccaaaaaaaaaaaaaaaaaaaaaagtacagctgtcatatggaacacagacttggagctcccacccctttcctgtccagaaagaccaacttctcagttctagtgagacatgacacttatgtggtctctgcttgaggacttttgctgttgggaaacaggcactgtctaaggaattgccagtcatgggttgaatgactcttctctcgtggagcctaacactggaatcatgcttgtattctttcaggaaggaacatgacaagtccacccttctgtccccaaacagcaagggtttctagtaacagtgtggccatgcacacactttgtctcctgcatctctctctctttcacacgaacacgcacacgcactctctctgtgtgtatctttggctgtcctgaagcttgtactgtagaccaggctggctttgaacttagagatcgatctgcctgcctctgccttctaagtgctgggattaaaggtgtgtgccaccactgcccggccctgtcctacatttctgtcaacagactaagtgcttccgggttgaggtagtctgaggaagacgtacttgctgaccaagggggataaattctttgactttacctttattgtgtttcttccttctgtttccagtaggtctcttgcctcttctctcatctctctttgagatacatttgtcaagttcaaaatgtcaaaatgacctggtcaggaagagagtggtaggcagagctctaagtggttagcaccatcatttcccttcccaagtttcctatgagcttctcccttcctctccctctctgtgtgtgtgtgtgtgttttcttttgctactgtcagagtctgtctgcctggctttccagtttgctttagcgatgtgtaaaaagaatgtataatgctggctggtgagcagcctatagttggcccatcttctcacttcttccttctagagatggttcattggagggaacctcctctcatgtggccatttcccatttttctctgctaaagtgagccccacccccatccctgagaataggatctatgcctctcttactctccactgagtcctaagggtctggagcatcacatcactggtgataggctcccactagatatgtgttgtggttaatgggagcctggcagagttggggatgaggatgtttggccgaattactaagtaatgatttcatattgacctactagaccccctctccgggaatcctaccataatcaggccttatagtatgcaacccttaggtttaaagcatagttgtactcttggggtatgctaggtattataatagctttagagactgtttggtgttaggtttgttgatgtatgatttacattctctaaaatttacccttctaaagtatacagttgggcttttcacagatgtacacaatggtgtaaatggtgtaactccaaccaccttcccaatattgagtcatacatgctcctctgtggacttttctcctctcacttataacctttgacgaccagtggtttggctccaagctttctcatttcattttttttcatagtgcttagtacaacttagatattatatagctgcctcctgtgtctgctctatttctctgtgcgtacagctgttgagatttgtgtgtgttgttgcatgtgtcaatgctgggtacatttttattgctcagtaatactcccagttttgtttattcacttgttgatggacattcggttgtttcagctggcttttctgaataaggtccctgtaaacatttgcatatgtctttgtgtgggcttttgctttcacttcttttgggtaaaatggggtgagacgatcagatcatttcataactgaatgtatagctttataaaaagctatcacatttttccaaagtggctcttgcgacttatgttcctgaagtcagtgtattgagtttgattatatccacagacttactcatgctttagctttaggtttaatgtgtgtgtgtaatgatatctcattgtgtttttaatttgcatttccctataagtactcgtgtgagcatgtttgcatattcaggatggttatgtttttagcagtctttcgtcttctgtggactctataaaacttccaaatgccagtggcgtttgaagtaaaaattgctaaacaaattggtggaagattagagcagtcacttcgtccagatctgtcttgcacaaatcaaggttgggatgtggaaatgactagattgataagggagactaatggtgagagtcagagaaattgctcggaggaattgaacatgaagcttggcagagagccaattccatgaccccagtggtttggggaggtctacgtggtccttggctaaacctgctgtttatgcaaagtagacttagattcacttaagcttcccaggatgcctgaggactcaccagggaagctttgcagtcctttgtgactctcttgagcttgctgtggaagcagctgaacacagggctccctccctggggacaaattgcctgaatcagttagttaatcaagcttgagaaatcagttaccacaggcccaagaatgccatcacccttgaattctgagaccctgtttttcatagctatcttttaaaaaacataattgaggccatatctcctaagtgctcccaacaagccggtattgatttatttgtttgccggagataacagagatggagggccaggaatcctgttgtcccacctcagaaggggacagaccgggtagggaaagtactgcagaaaacctgctcattcagacgttggtagagagaggtgatcaggaaggattcctgagcagccccatggaggcccaaacttgtggaggaactaggcaggctcacagatctggagaaagggttgttctgggaaaaggaacaggacagtgtagtccaaggcctaagagagagtgagtgcagcttgtccctagggggagtcctccagggcatggccaaggaggtgaaaggaggtgttccttgctgaaggcccaccagggaagttgaggaaaccttggggaggactccatccagggtggcaggaagctgttgaagggtagacaagtaccatgtgtagatatttgattttagtcaaataggggtgctcttgtgtccaagggaggagaatggggcaagcctggagccaaggaggccaatttggagttgctactctagtcacgtaggatcaagagaacggttcttgatgggtgaagtttctaaagtgggctcgcttccagccagtgtctggaaattcatgcaggggcaggagcaagcgtgttatacttcagaacattgagaaatccagcgcacagaactgcctttccccttgtgctgttggaggtttgtttgttcacttccttgggaaactgatgtggaaatgtcccattggcttttgttacctgggtagaaggtatttccaatcactttgggaggaacattgccctcagcatggatctctatgttcagagatgggggtatgggtgagaattatgcaggtgtccaggaggaggggtgggctgcaacgtcaccgtcacttgtttccgttttcacacccagagaagaacttttcctctagtctcatgacatttgtgctgtgtccctggggagcctggaatctgaaactagttgcagagactcagaaactcatcaacttctaggaaaatgtcctccaagaaaatccagtttttcgtctcatcccaagggcgctctgcagggctgcgctctcttctctcatgagcacggtgtggggctctgtctctatttgcccctgaacatctctgctcaggagtcaggaaacaattccagatatggatttggccccagagagtgaccctaaggtattcagagcttgtccttcctacttcattcaccccacccctcactttcagaaacaagaatgtcctctttagataagcagccgcgcagctgagggtgcgggtgggacctggggacctgggtttctttgttatttgcattatgcctagcactgcattctgaatttatttctatcacctcatttaatactataaaataccagacaagggagatactactgccccctgtcggaatgaggaacttgctgctcagagccgataagataaatcttgtcctaggatcacagttgggcatctgggagctagtgccttccaggcttcattctgaggctttgtttcccttttgttgcagcacattgattgtatttcagcctttcttctattttacggtgggctcggagaaaatttctgtaccctataagtcagctaagtgatttctggagagtggctttaactgaagaaaaactcggttaataattctttaatattttaagtgccacttaaaaacaattttttcacctccctgtcagtgttctgagtccagttggcatctctcaacagggaaccgctagccaaatggtactgactaggtcttcctcttgctattggcctaagtcatcttatttttgcagtaaggagctgtgggtagcctgtgccctttctggatttgctgagcaacaataaagaagactctagggtttgactaccataggatttccggtttattacatcactaataaatgagctagaattagccgctctcgggcacccattgttctggacatgttgatttttgttttctttttccttctttcctagacatttttaatcttagttctcttgtatcagggaacaaaagggtatcacagggacttaaaatcctatcaaaaacctcccacgcgttgttcaagatcatgggcttgatgggtgaagtttttggttttgtctcttagcatttcaccctgatatttcacctttgcacaacagaaggctactagacgccacagtcactgggagtcatttcatagcttcataggtttctgctgagggtttgtgactagcaaccattgcatggtcctgactttaataatccacgtgtccctcctcctcctggcacttttcaatttccccttaatccttagcttgctttagctgaagtctttggaagtttctcagcattgaataaatacagctgggtagtgggtaataaggccactgggtaaggaagacacaggctgttgtacgacctccttgtgaaaatctctcagatggtgaacggtccccccagggagacctttgagacatctgtgtaggagtgaagcggccatgtgttcaggtgtaggtagagcaagtccagaagtgtgctccatatgtcccaactgtaggagcctcctgcgttcacagatgccctgctgggatcaggccttggcaggctctctcctctgtgggatactgttttctttccacagagacacaacacaagctttgtccatatcacaagagagccaggtgtccgtggcactgctctggtgcttacgcatagtcgtctaagacagtcctcagccttccacctggggaaactgcgtcgcaaatgatgccgtttatcacttgaagggctcagctttgtctgtagcgaaatgttagagaatatcactagtcactccagggatcagggagaatttataagtgctgctgatgggtcttgggagaaaacatatattcatagggaaggcaggctggcctctcgggctcttggatggcacgtctgatctttgttttggccagggaaagttactttctcattcttaaaataatctcagtggtgctcatatgatgagaaccatcgattgcgtctgaccagctgccagcctatagccagcaagcctgccccggaagctctgtctgctggagattctgggggttggcagtccaggactcatgaccttttgacaagccaccagggtgtcagaggtgtctggtgagagggctggagcagcaactcttctccggcatagggctttgaagcagtgattgacagatctctctctctctctctctctctctctctctctctctctctctctctctctcgttttatctttcagttaatgaccagccacagagtcacagctctgtgctctggctgctccctccagggctctcgagccgcagacgcaggtcgctgtgggtgccggctgtggtgacatggcttgttggcctcagttaaggctgctgctgtggaagaatctgacatttcgaaggagacaaacagtaagctgtgggcttctctgtggggttcttgcttgcttgctccatggggcctgggctggggatcggagagggagggaagagcgtgctcttggttttcacatggtggtaattgaatgagtctggttcttgtggacacaggactgtgtggctctgatgtgaacccatgacttagcatggagggaaggtgatcagtcaggaagaagtaatagcttgggcttgcgctggtttctgggcatggtctctcacctctgcaacctggcagaaaatgaccccactccccatcactccattatctcctttcactaaattcctggtagctacttggagccacccacgagcactctctgtaggccccagtgtttttgtaaagtgaagtactgaagcaggtcttagaggtgtgcctggagatctcagcactcagccttcctcagctttgacagcagcctggactcttatagtaatgagacttgccatgtctgaggaggtctctaagccgcccacttcccatgtgggccagtctttctttgaataatccagtaggccccaccattacttggtaggtgaatgttgttttcctttggaagactgtgaaggctgtagggcaaggtgagctccctgaggcttaggccagccttccatgtggcgcctttatctgtgaccactgtgaatcttctcatcctgccctctcagtttagctacgtgtctctgaagctcacttctaaacttggttcctgtcctgcactttttgttggaccaccaacctgcatctccatttggctatcttaatgaagttcaacctgtctataatcaaaggtctttgaaagtcaaagacctttagtgaaccctgaagggagtttaactgtttctcaaagtagactagtacttggagatcttctatgcgagaacaaacatcccgaggtactcttttgttcaccgatgtttttattataaaatgacttaactatgtaagtaaaagtagatttaaaccctgatgataaaaccataggccccatacagatttataaatcaaggcaaatgaaactgaagaaagacatcgcaattcatattattaccttagttgtagtgagaaaactgactttgtttagctgaaatacaatatttcagttgccacgtgaaatatggtggtagatgatacaacggtggccattttgagtttggccagtctatattactctgtgctgatgatttagttcttcacccatgtttctacttgggcagcatcttttgataccatttgggtttccttttgtctaatcccatcaataggctggcatggtcatactttgcatacactaataaacctgaccgttgatggcttgtggcacaagttatgctaatgtaagtaaattcacataggtgtgccagaatttgttcagatgatcattgaaatggaaacacagaaagtttaaaatcttcatggagaacccaggtataatcctttgaatgttcatgtgaatacacacacacacatacacacacaaacacacacacacacacacacacacacacacacacatgagacagggcagggaaagagggagggagggacagagagagtgagagagagagagagagagagagagagattgattccagtttttcaagagtttttgattaacttttaatgttacaaatgaggaacttgaattcaaggtcactagtgagagagcaatgactagaatctatgtgtccattgtcattagtaataatgacaaaatataatgcacattgttatttataataaaagaggataattagaatgtgcttctatgagctaggcacataatgtgttatttatatatttgttttataattgctgtagataaactacagggccttgcacatgctagaccagagctctaccagtgaaccaaacagccaacaaagtgggttattgtaccagctgttcttaaaccccatgaggtagttctctttatggtacagataacagatttgatgtacagagaggttcaggagtttcccagaggtctgcattgctagcgtttggttgctgatagtctgacgccaacagttacatgttagactctgttaaacgaatagctgctgtgttagactgccatttagttattggtcttttcaagaccagtgacttagtcagggtttctattcctgcacaaacatcatgaccaagaagcaagttggggaggaaagggtttattcagcttacacttccatattgctgttcatcaccaaggaagtcaggactggaactcaagtaggtcaggaagcaggagctgatgcagaggccatggagggatattccttactggcttgcttcccctggcttgctcagcctactctcttatagaccccaagattaccagcccagagatggtcctgcccacaaggggcctttcccccttgatcactaattgagaaaatgccttacagttggatctcatggaggcatttcctcaactgaagctcctttctctgtgataactccagctgtgtcaagttgacacaaaactaggcagtacaaccaagtttcagatatcctggaactcaccatataactaaggctgcctttgaactcctgatccttctgacttccccttcctagtgccatgtgggattacaggtgtataccaccatacccagacttacatcacttttaatggtataatttttaaaaaatcaacaaattttgacatttctgacttttctcttacctacctcctgtacctcagagtcattcctaggtcctgatggtcctaagtctgttacattttcctctttatgtcagtgtcctgcctggtgggaaattgtctctgctttgatgggcgcgttcatgagtcacagaaagaaacatcactttagcaatgaaaagtgggtctcaagagagcctgctccaaataccagattttacagatggggaaactgaggcacaaggagtcgatgagactctctagatcagtcaagaagaagctgatatggggccagaggcttgagccctcctcactccggttctcaatgttggttccctttcccaatcttttgtagccacatggtagcaccaagcttgagcggaggaggaggtgctcgggtatggattcttgtgcgcagacaagaaggaggcaggagcagactgtccaggaacacaaaatgagggctagggttatctcctctgagcaggtcttcattggatttgatcttgctgcttcttgctcagtgctgtattttcattatgcttacgagtttaaaattactaggattggaaagataggcagatttagtcgaacacagcttactgaggagttcctgttgaagtggaaagtagggacacagaccttggacacaggtggcctttgtaggatacatcactgcttaccagcttgtctgagtcatctcccttcctgattgctaaagtaaatccattttgagaaatcagaaagaaacgcagttgatttccagtcacagatactttatgagcagagcaggtgctgccaagatctggcctgcctcttgtacagttgttggagctgaggctctctgatggacacaggctcaatcccgaagtaacgtcagaacctatctcctgacatccttacaggccaggcctttaaaagttgacttggctttatcctcagctactgctgagaaggtgtcactcctgtctaatcatctagttgtgtgtgtgtgtgtgttttttttttaagggatgagaacctgtgtgagcctttggcactttcttagctcacagagtaagcccattatgaagggggaagagattgaagccccttgatagccacagattttggacattcactgcatgatcccttggtcctgagagcatctgtacccatggcccagaacctaggacagaacctggtacttacaacatgtgtaacaagaatttgcctgatgagtggtgaatgtgttgctggtctgttatttgaaggtcttggagcagctaggggaattagaaagaatatgcagaagcccggagctgaggaacgccagccacaggcagcactgctcttgtgcccttgtctgtagaggactcttatggaccctcgctgtcctctcattgtgcagactcatggggtacatcaatcagagtgagttttccagtgtatctcttgggcaaagaatacattgaattgagttgcaaaagggtccaaagctcagtttgggtccaaagtaccagtcaactagtgtgtgggcagcagttatcctatgcaaacagcatttgggacaggaaagggggtggacttcaggatatcaggtcttcctctggctttggcctggatccagaggccaaggtctccatgaaacagaagtgacaacgtgaggtggccaaatggactcttttgtctttgcctttaaaggaaacagcaaattctaactcttaagtaacttaaaggactactgttgggacagtctggaatgaacgcgaaaacagttaggactcctgctttccaagtggttagagatggtcacagtgtgtgggaactccacttccctttcctgttcccaattccagggacgtgccttcctgtccttagtcctagctcagtaaccttggtcatggttctcattccagactggtcagccctgagcctcagtgttttctagagctttgatttccacttctagagatgaagaaagctagaacaagaccctgtttgctgtttcactgagataaatgtctgctgcgcattcattccttgtgggagactgtgctgggtgtgtagtgataaagcagactgtcctcagtggagcatagagtttattgagggaagacgatataacatgttatcagcacacaagtaaacataccattacaacatccagagtgtgaggagtaaactggtgaaccgtgatagtcaggctttagtaggtattcatggcattcaagcccagaaccccagaatggtagcagtggtgttagcatgctaagatcaggggcacagacctcagaggcactgtattttgggctgagagaacagaaagaagccaggtgtgttggctcactgaatgaagagtgtggctgaagatgagttggaaggatagaccatccagttaaggacagttgagtttaattttatatctgaaaggagccctttgggtaggcacagcatggctaaaaccgctcatcctctgggtcttgatagtggagtggtgggaacgccaggaagccaggaagcgtttgtcattctgtacatacactcaccccacctaatgcactgcgctccttagcattgcttgccttgaatgttctcatatttgtgaataatctttctagtgaggagttccgatgtgaggctgcacttgagtacttcaaaggtacttttatatctaccatttcattttcacagtaattctgtgcaatctgtttcgtcaacgaagaacacattattggtaagttagtaagagagatgtggggtcttctggttgtcagtctattgtggagtgatgtcagtagcatcctagagagctgtatgtgaggctgacagtgcaggtctgtaagctcaaaccctattggcaacacttagtttgcacctagtgtttgctgtttcgaatgaaatcttctgagggttttatgcatacagccatttcttactttgttgtgttggctccttagcccaggagctcaggagcaggtatactgggtcaaagtgacatgacccttgaagtgtgtgaccagatgtcctttcaaaagatagtaccagttttcacagtcattctgagggttctgaatggttttgcatcgggctgtagggtactgggagataggcctggtttataagttgtccttccctccggctttggactgatttagttttaagatttcactttgggttttgcacacatgatgaagcctgtgtcattggggacaggtcaagtcgaatctgtatcttcatatcacaccactccgtgtctgtacactttgtaagacagtaattcctttcctacttatttttgggacatttataaaactttgtccatatagggaaatattttggagtcttccattgggggatttgacaagtgttggttgctgtataacttttctcattgctgagtaattcctcaaacacctgacaagaagctgcttacagaaggagtggcttattttgactcgaagtttgaagggacagcctggcacagtgaggacagtatcagagtgggagctcgagatggctggtcacataatatctgcaccagggagctgcaggggatgaatgtctttccccctttttttttcagtttggaatcccagtccctgggggtgatgatgcccacgtttagagttgatctcttccttgctcagttaaaacttttagaaatatcctctcagatacacttaaaagtgtgccttgttaatctcctccttttttggtgggggtttcaagataaggttttaaactcgtagagattcacctgcccctgcctcccaagtgctggtatatgctactaccacccagctcctccattttccttaattcagtcaagttaacagtgggtagtaaccatagagttagttacctggtattaccggagcacacaagtcttcctttggtgaacagtgttcatcagagcagtctgatgtctggggaactggttctactgtgtttcttagattagcgaccatgctgcagacagaaagcatgtttccctccccttttccttggtgtctgttctctctgattatttgtctctgcttgatcaaactccagcatctctagctcagtgtaagaagcaatcattttgtctttcaaaccttcaatattttttgcttgctttggtttttttgttgttgttgttttttgttttttggtttttttttttttttttttttttttttttttttttttttttttttttttttttgactactgttattcagaagatcttttcccggggccaaattttattccattgatctttcagtgttctttaaacacagcccttgaaccacgccaaccttgaaataataaggataaatcttgaaggtaagatcaccgctgctgtctataggcaaggaagcgaagtgcactcgtgcagtgactggggtatggtgtattagcttctgcaaccaggagcaaaagttaaatgtgactatccatggggacatggggagtgtgtgcggctcagcaccaccctgaatgaaaacgcaaaaatggtttggtgcttaagactctcaaccctggtgacggcagagctgctgagcttggttttatgctgcatcgtttacaggaagcagcatttgttccttagaaatttacagcggcagctcacaactgagggcacggccccttccccatcctgggacttagaggtagagggcaggggtgttgctgctaaacccaacatagtttgtagtagaatcccgaacaactagctatctgccagggccaatgttgtctagctgagaagtcctcctgcgggagtgcttgttccgaatcctcaggttagaggtgaagagttaggagaaggggatgcacaatgtgctctggtgttccctagagcagccatgactttgataacaatcacttcttgaaaacaacattttctaccattgccactatatggtgagaagatacagagttggtgtagctatgaaggactttcaagagttttcagtaggagcttctaacagtacaagcaacatctttgtccctaggctgtttattcatgccttatgcttaggaaaaatggtgaggttagagacgaggagaagtctgactttgatgagtggatctgaaatagtgtgcctggagaagtcaagtttagtttctagaaggaggggatgtggcaatacctagaacgttctgagcttgggagtgggtttgatgtttagagacaaaaatagttttggaggcacagggtaaagaagcataattaaatcgaatctcccatgagctctgtgattttggtggtgtgaatattgtgtgcagagtcttcgtacatacatacatacatacatacatattagtgctcagctcagtagaagctttgaaaggtcaggagtctacacggtctacgtggtgagagaaaggggctaaaggaaattggtgaccttagtgccgaagagaagcatcccttaagctagattggctttgaatctaaactctttcacataccagttccttgggcaatttattaatcagccccagtttcctcgtatgtaaagtgagtattacagtaatgatcctaatttggatgtctgactataaaaaacatctatgaagtgtgtgtgtgtgtgtgtgtgtgtgttgtggtgtgagttgactatcatgactgtcactgttggtttacttcatatctcttttcctgatctggttacaaattctgccttcacctcctgagtggtctaaggtttcttctggtgctttgctgccagagctgtgggtaccatccgactgttctttcagtggatgaacctattctgaccacatgctgctttgtggtgctaagtgtggggctacagaggtgtcctgaacacaaggcttgctttactgggtcggatatgtgatgaggtagaaggcatgtgtctctagcatagcactgtgagaggcagcctggtgggtactgcacagatttagacattaagattggggttccaatggctcataatttttctggtcctccaatcatcatttataaaaatagtactattgcagcctttgtgagcgaactgttgggaacaagaggcacacaaatcactaagtgtctatagatgttcagtattcgctataacggctacctgtctgcagggtgttagtttatcttgtgtctgtggaacctgtagacatttttagtccatgctgcgtagggagattttatttgtttcctaccggagatgcttgtctttgtcaaatagaatttcatgtgacctctggaatcaagtacagctggctgccggtcttggctctgctctgactagtgctgtggctggccgttccttaagcagtagacttttcagtataaaatgggaagaataatggttccatgcccacaatgatgttctgaggattaatggaagtcaactgtgtaaaatgagcccagtacatatggagctctccctaaatggtagctccgatttatcctgttagttgaaatagtggcttcggagtgtcaagatgaatgacttcctgtatattctctgttcagttttatacttttcaggcttcattattctgtaattcatcacagccatgtcattatagaaagctttatttctatgtttgcttagcaatgtgtgcgagtggttttataaagatgcaggcttagaatgtattgggttctgtgtcctgtgttcttggatagtgaaagctgggtttcataaatgttgctgtaataaccaagtaatctattattgcccattagatgtatgcttatgtaaccatttttcctttgttgtgtgattgagttatttgtttacaacactttacagttatagcacttcaaatcatgtatacggcttttggggattgagttgttttcttatttagtttgctccttcggatgaattctcaggaggatgacagttgttcaaaggggtaaatgtgccttttgaatgcatattgccaaacttctttcccagaggggtcagccgatttttgtttctgtctttctgattttgaaagcttcagttcactctcttacccaatatatgcttaccgtgtcatgcttagcccttaaccatgttgcggatttgctgagaacacagtaacagaagggagagcctcatatgtaaacacagctcttgtgccacaggctgataaaggcacagcatacctggatctcagaggaagggctccagccttactggtagagaagttattttcagtgttcaggaaatccaggctgtgttctctggtagaaagtcatccccgactcctgcccctgagcagtttacagaggtgtaagggacaataaaaattgtatggtgtcatggtttgcaatccgtgcccatcaccctctcccaaaggagtagtaaatctattttctatgaaggaaaagagaagaggctgagtgttgtttgcaaacgtagaggttttgttccttctttgggattatttacagacatctttagtaagattcgtcttttcttccctggtccttgccattttctcttttaatgtgctctttgtataaactactctttatagtttgtggtagtaggggttcacgaaccgaaggaagtataaaaacttcatgtttttgttctggaacatgcatagctactatcttgtttcagttcctccctgaagatcccaaaatgagcttgatgtaaagtcataccaaagttcttagaaaattcaaagttccttatttaaactaggaaaaacaaacatggttaaaaaaacaaacaaaaaacaaaacaaaacaaaacaaaaagcccaaatgcccctaatactctaaagtaccagttacccagagagagtttacttctgatctcgtcatagaagggggaataccaagagaccatgacagatcgcaattaataagactgtactctacaatgaaatgtgtccctgttgagatagatgttaattaagagtgctatgtgggagccagtgactgaagcagatcatctcgggcttgggggagatgtgagagaggaactgtttaggtttgtgggaatgtgagcacaggaggacttcctagctcaggcagaaagaagcatggctgagtcttgaaacctgggtagaagggagccttaaagacacaggtgtggaatgggatgttacaggataccacccacaattcaatgcacttcaagtttggagagtgaagggagtcagaagtgccagaagtcagtcaattgctgaattgctctgtgggtttctcagtccagtagtagctggctaccatgttatcatttaaaattcacgatcttgtgttttattttctgttcagtgtcagctgttactggaagtggcctggcctctctttatcttcctgatcctgatctctgtacgcctgagctacccaccctacgaacaacatgagtgtgagtatctgtggaccacgcctgagtctcagtgatggctagcaaaatccagagtgaagatgctctcaactgaatctttacaaagttgctgtcttcaggagaatgccacaaatagcttgaacagaaaatctggcctttactatttttttggttagggcatgaacttgagatatttgtagtcccagttaaataatgatgatagtaatgataataatcttaacggttttttaatcatgataataaaatagccttagagtcagaaagtgacggctacaaatcaccctacagtagtgtttcaaatgccagtgtccagttccctggtgttgtccttttgcttgcattgtcttttaatctcatggttaaaaatcatggaccatgtattggaacccatactttctaaatcaagtatgcatatatgtctgtgtgggggtatatgcacatgagtaggtgcctgagaagaccagaggtgttagaacccctggagatggagttacaggtaattgtgagctatctgatatgagttctgggaacccacctcaggtcctctgcaagagtactttgtgggcttaaccactgagctaccttctcagcttttagagcatatgcagcctttgtgtacaacatctcagtttgactcctgtaacatttcattttgttctcaacaatcttgtatagtagactttgctatcctttgctctgatttcctggtagctaaattggggctcacacacctataatgacttgcccaaatttacatttctagtagaggtggaatacagttcaggctgcttgtctcgctcactcatgtgatttgaaggcagtcttgacagtgagcgctgagatacagtagtggctagaaactgacacatagtgtgtcaccatgagcaagtgattttagcttctctataaaagagagcagcaaaacctaatttgcactgttgctgtcggaatgaccattttacggtctggctgtgctcggtggatggctggagcaacagtttagaaaggcccaaagaattagcatttgtgtaggagtttttgttgggaccaaagctttctgtcccacacacttgtcttaccactcaccagctccaacaggccccttgacttagaagattgtgttctttcaagacagccctgaggccacagtcaccttttgattgcgttttttggtcaccttcccctttcttacatagcatgtaacggcaggcattgacataccagtttgctaataggcatcctatatattcaggtcacacacccagatgcctcagatacattcccttggacatggctttctgatttcgtcagaacagcggagcagaaagctaaggtgaagcctgcagatatatgtatgcctctacgctgggaacaaaggactagtatgaaattcttctctgtaaatctttgtagttcaggtcagagtcctcaaggtcctcatgagtcctctgactttttgatgtccattgcattatttgactggggtcctggacacccagtgtctaactgtccaccatggtgtttctatttgcccagaggatgggctgcagcgtccaaggaagggtctttgtttgcccaggggaaggaaaggttgaaatgtcttcaccgtctttgcctttgacctacactctcccgttcttagggctactatctctacaagttgtaagaggagaatcctgctaactcttcactgatggaggagcagcagctcgttaggcaaggggctttgtttggttttccttgaactgttaacagggagataaagagattagctgagtaaacaattcaacaggccagagtccctacagggactgcccatggggaccagatcttgtcacacccttccatgtggcctctggttggaatagggatagaagttttaaaagagtgaaaggttccccgtactgatatataatgtgaggtgcatctcagcctttgggttagttttggggagtgtctattagcatatttacttgaaaaaaaatgaagagaaactgtctttggaggaaggtgggagttgtgagatggaaagagagcattcagttccctatggacaggggtagcacattacacaacagtgcactaaacaataccacacttcacagtagtgacctacacaataccacactacacagtagtgacctacacaataccacactacacagtagtgcactatacaataccacactacacaatcgtgtactacacaattccacactacacaacagtgcactatacaataccacattacacagtagtgacctacacaataccacactacacaatagtgcattatacaataacatgctatacaatagtgcactacacaatgccacactacacagtagcgcactacacaataccacaatacacagtagtgcactacaccacagtgcacaataatgcactacacaatactacactacacaatggcacactgtacaatagtgcactacacaataccacactacacaatggcacacttcacaatggcacactacacaatggcacacttcacagtggcacactacacaatggcacactacacaataccacactacacaatggcacactacacaatggcacactacacaatgctgcactacatgatgccttagaagttctaattggacaattcatgagcatttaccttgtgctgggccctctgtaaaagtgctcggccttctaagccagcctgggctacagagtgaaactttgtctcataaaaatacaaatagaatcacaagctgctctactgataagagttcctgtgacacctcttgcacagcaatcagcattttacaggtgggaaaacaaggcgctggagatcgacttggaggttggcttggctgtgctatgcacatggcagggacagagctgtaaatctccatcggtttgtctccaaactctgcgaagatacaagcaagtcattgcctggagccatggttcttcatgctcgccagatcttcagatagccctgagcatatgacgagagccagagccaatacctttttgcctcaacacgaacaggcccttggaataacatttatcttgattcccataagcaatatttgtaaatccttgctacaaacctacccgtgcttttaaaggctctgacctcagccagacataccggttattgtttgtaagaaacgactagatgtagggaaaagggtgaggagttgcctggtggatgtggcctcattttatcgatgagtgaggaagggacaggaaaaccaagatagcttggcagttggcttctgtctcatgtgagcatgcttttgaggtgctgttagtggacccttgggctgttggaggaagtgaagctgacaaacttttgctggatgaaggcaggtacaggtggagtcttgagaagagtgaggtgatggtgaaggctaccgctggaagggagaggcatgggctgggatcctggagatgaagtttctatccccagccatgtgcatctctgagttcttcatcagcggcagtatgaaggagctatattaggtcactgtccaggtccttctgtgtctcttggagatgaggctcatggtagggattgagcaaatggcgacttgctgcttgccaagtggttggtgtccatggtctgatagaccccatttattacattcccgaggttggtatcatgaatcccaatctacagatgatgccaaatagaaccatggtcacctttacttgatgtcaaattcccacctgtcttctaggacatggggaggggctggagagatggctcagcacttaagagcactctggctgcatgctcttccggaggacctgagttcagttcccagcatccacagagtggctcacaacatctgtaacttcagtttcagcggagtttacagacctcttttggcctccatggatactaggcaggcatgcacatggtgcacatatgtgcatcaagcagaacactcacataaataacattgataagtctgggacatggtgaatgagacagacagatgtgagaggcttgtgttaaaatcacttcacaggtctaatgtcttctctgcgtttccttctcgatttcaataggccactttccgaataaagccatgccgtctgcaggaaccctcccctgggtacaggggattatctgtaatgccaacaacccctgcttccgttatccaactcccggcgaggctcccggtgttgttggaaactttaacaagtccatgtaagtaccagatcgggttttctttcccaaacttgccagttaatacttatcctttccttcttggagaggtttgcatgagaagtctgcagaatgaatgaagggggaattgccaccaggatttaagaccgtgggatttaggagtcactgtgattatgggatcgaaagctgtctactcagtcagtgctctgggagactgagcaagctccatctgatctactcactcagatctctgctgtccctttgaagtggacacttctaggagccagagccactgcgcaggaagggtctgggttctccagcagctcagagcccaaggcaggagtgtcctgtcctctgctctcaggtcattgctctgacccctgaaatgactgcagtgtctctgctgttgacttgtctttctgtccctgagtgggagctgcccgagagcatgatggtgcttccttagtgtctgtgttcctggctcagatgctgggatgctggatataaaatgctccttccagacgagatgttgaggatcccccagatgtgcaaagtcacagagttagagcagaccagggactgtaggatgtgctgctggttggagatggtgctgcggttgggacaagcagggccacattgcataaccaaaatgttaaaaacatgtcagactgttggtatacaaatgcatacgatcaattgaaaattcattactggatatgcattcctgttatatgtgttcctaatgcatccttttaataaatgaaaatgtattatgaatcgctaagcatgtcttgggataaaggcattgggcttattatggccagtagcgcacacacatacacacacacacacacacacacacacacacacacacacacacacacgcacgctcttactcgtttgtgcatctacttgtgagctccccctggaggatggagtaatagctagggagtaggggaggccaggctggggagagacagctggcctaacccaagccatttctacttcttcttattccctttgcagcgtgtctcgcctgttctcagacgctcagaggcttcttctgtacagccaaagagataccagcattaaggacatgcacaaggtcctgagaatgttacggcagatcaagcatcccaactcaagtaagcaaagcccttccactcatgcatccgggagtgaacatttccctgcccgtgtgtcccagggctcgctctctagcttgtccctgactgtggcttttcttcagtggctggatgattggtcttctctgtgggaagcattgggaacaaagctagagaagctggttgccccagacagcgactggggatgcagaccccagcaggaatggcacaggcttgctttgccattaaggccagctggagcagaaattgttgccaagggcatttttgagctacccataggatttccatggatagacagattatagatatttctgtgcctatgagagcagttagagttctaatttgatcatgggtaagtaaaagttaggcacttatttctaataggaaactcattcttcgccctcagaactagccatttggataagccagacaaggcatttgaattctgatcttgaaacagtgaaatctttacctcagatttgctaagtagctaggcagttagttcctggcatgccactgaggaagtgtctggggaacatacaatttgctgaccgagactttggctacagagattgtgacagtcccctgggcagtaagcctgccagcgcgggtgggggaagaggcagtgtttgatgttcactggaacaggcgagaacggtggtatccatagtgatgatcaagaagtgatccacaagcctccggaaagtgctgctgtctaaactgcaccagtgaggaagtactcctctcgtgatgggccaacagtgatcactgctccaggaaagtctttttacccagtttgacatttgaagagagagtagactggtctagcctttgcagaaaggcctccctcctagttcgtgaggggagcagtggtgtaaagttcccagcacccacctcgggtggcttacaactgcctgaaatgccaactccggggagtctgctggcctcttctggcctccaagggcactgcacttacatgcgcgcgcgcgcgcgcacacacacacacacacacacacacacacacacacacacacacacacacttcttaataagaggcactgtcatggtggactctgactgatgaggtgtgacttcagtgcagaggtgtggcgtactctggttcctgagtcccctgtaaggagctcgaagctgcactgtacctggctgtgtactgagatcgtttgctgctgtttcccttccctggaggactctggtcaaggccaggcatttctgtgatggagagcctctgttaggttgccatgcagcagaactgagttatttcttctaccaccaggaaactgggtagcacagacaaaaagtgccggtggtaccacgtgactttgtgaataagttaccaggtcccttagaggttatctcttgttattgaaaatgggtacagtaacagacccacccagagtcaaaccagtatttgacacgtaagtaacatttaatgaatatgagccatgattatttttctaaaagattcttttttgatctatcagttttgttttatgggtatgaatatttcgcctgcatgtttatgtgtacactgtgtgtgttcctggcgtgcatgagaccagaagagggcatgagaatccctgcaactggcgttccaggtagtgggagcttccatggaagtgttagaaatagaatctgggctctctgtaaaagcatccagtgctgtccatagccaagataggattattttcaagtctggacatctcagacaaaacattcaatgtttctgagacctaatttcctgaattaattataatagtattatattattatgcacagtataatgagatattattacatcattaatatgataattcctaaggtacaaagtctgacacagggttggcccatagtagatgctttgttaacagaagccagtgctgtcttcattgtttcatgtctgaccatctgaccttgttcttctgcttcttcatttgtggggctggcaaaatggacctggcggaatttccagttcttagtggaggctgccctagagagcagggtgcttttattgtccgagcaactggagtcctgaagtgggatggaggaaagaaagggcagggtgtgcccagccctgctgaggggagctctctcccagtgcctccttcacccttgcagctagttctgttctgtttcaacttgcttttctgtgctgagcatcaagcccaggaacttgtccaagctactcaagtacttagccactgaactacatctccaggcccagctggtctttgactttctgttatttttctttgtttatcttacaacagaaagccaggccacagttgtagaggaagcatgaaaaaaaatgctgcctccttctctaggaagtgggaactttttgctgattttgaaaaacaccccaccagtctgacttggaggctggcggtgtcatggtcgatccctgtacctcatcctctcatgaggtagctcatgttgggtgttgagagctcaagctgtcaggtagtatttgccaccgtcttgtagagaattagtctgattccgtgtccgtcaaaaatccaggatcaatttttgtgcctgtttctggagtcttatttttttccggtctgtttgtcatctactcctcttgcgcaatgcttttcctcccaacttctgcctctcggtgtgtttatgtcattccagaagtttaccagaaattacaaaagtattctagcagacaggagaaggggacttctgcctgtctgcgtgctgtatttctgtccacacgtctgagattgcaagaggcttttcaaggtcttgtcatccagttcactcatggcccattgtacaaccaactcaaactgcaggtctcgtgaatatgcagaactgcaggtgacttctcctttctctaactgtaccgctggctttttgagctaagcagactttacctatctcttctaattcatatcattaaatcccgtctatccccttagccgctcgagattctgattttactatgattcttcagctactacactctgctctctgtcacgtaggggttcagtgactctcttgctatcccagatattgatcagcatgagaacaaagtttgagattggtactggctacctactcctttggatgggactgctcaggatcttagaaagctacttgcctctgtggtcatggctggagccactgggtcctgctatgagatctatttggagactcatcttgttctttgcctctgctaatgccattggactggccacaggaactctgtaggcacaggagtctactcaagcactcttgtcttgcctcaaggtttcctgggctacgacattgctttggtcagaaactgtttaatctctgtgtggattcatgcactggcttcttgagttattcagtcttgtgccaaccctgctctcccaggtgctgagactcagggtgaggggttcttcttagagggaacctgatactgaaagtggaggtgacttccctccaaccctggcttcctgattcatgtttctagaaagatccatcttctactgtttcaataatagtccagcttcaaaaatgaagtcatggattgctcctctatcactgaagcatcctgaggggagaagcaggggtgaagccttacagatgcgcctcccccagttttcatgtcactggaactttggggtcactttattggttttcatttttctctctaagccagagtattaccaataggttgagtggtggctaagtcagtttggggagttagtgtgtgaaagcattccctctttcctaccatgcacccatgctcaaaggcagtataaacgtcagctacattctcagaaactgcagaaaaggtgacatgtctagactgtgaccctgtgacatgtaaactgatttctgacaggacacaaacgacaacctttgattctgactcacatgaaaatgtgcctgattgcttaaatggatgttgggaagatgaagttcatgaaggtattgtttcatgtggctgtggtgaaatgctggagagtagttggtcagtgcctgaggaaggttggcaaatgctggtgtaggggagacttgaagctgcgtcaagactgatttggcaacaaatttaggttcttgctctcacctttggtgaactcttgattcttcctggccctcttgcttgttagaaatttggacatgaactacatttgtggatcattaagcattcagtgaggtgctacacctacgggtttccagcagtgagcatgagcacatgggtgacacatatataagtcaaaaatgcattgctctcctcacgttccagggtgtttggcctttgacaatttgttcatgttgtctgggctgcaagtttcattgtcttgacttttgagatccggttaaacgacttgatgatgcttcatcttagagtttggcttggtccttgggtggggacacctgtgagacagtggtttgtgttacccaccaggccatagcctgttcagggcatgaagtgacggtgacggtggttgtactctgagcagccgcgtggtagcagcatggtaaccctgagagcatctttagagaatgcgcagtgaaagcaagtctagtagctgccctttcgcctcatgtaatattgtcaagcgaaagctctggacagcatcagagcaagcataggtaagtgcagaaccgcttccctcgtgtaaaacaggccccactaaatcagtcttgagtttctttcacaaaatctacctcccacaattccgctggatatgctaatctgagttcagaggaataacaagtactgcaaaggtccatattcactctcatggccctctttgaggttttccccccgcccacagtggggattagctgtgtgtttacccacatatatgtatttttaaaacctgaaaaggttaggttcttttttaaatagttgtttttgaagacagcaggcactgcctgaattccaggcactagggctggggaggatgcccccggccatcagggaggaccattcccccacagcctcctctttgtccctgtccttcggcttaccacatctgcttctctgggcccaggtcttggtgactctggccttttccccaggggtggggagaggaggagcctcaaagcagtccttcccagtggcttgtccccacagtcagaggacatggtgactggtcttttgctgttggctgtaccctcactgctggttaatgatagtcagcgaacatgctcatggctgcttcttgtgagcctgtctgctcagggatctgccttctcctagtgtctgcttctgtcccatcctccatggatgcaagttactgtgtccccagggcttcctactggcgtgaagtcgggacgtgtttctttaagctgtgtctgaggattctggcttttctagggtagaacatcctcacagtctaagacattctcttcctctccccctccacttcccccctcctttcctcctcttccccacccccacccccatcttaacagtcagctaaacccttgtctagttagtgagtcccccagaggcttacttaatctagggacaatccctccggtttgtgtgggtcctgtagaagttctgcattctttacagctgtggcatgacccgagtgctgtggctagggctatcggttctgtggtgtggctggatgccagatagctgatctcttgtgtgcatgggactcagccaagatcctagctcctagttcttagttcttagctctctgggtgtctggctctgtcccaagtgacagccacattgatacactttaagtcctgaagcccagaaggtactttagggactgcagacgactatttttctggtcctttgtgtttgggtcaggaaaggttgctggggcggttgagggatgggctgtacctgtgtgtgcctgtgctccacagcccatggaagtgacaccctccatgagagctgtgctctttcaagtcgggcactgtccaccccacatggttttctgttgcagcctatgttctcttctgcttccattagtacagactatggacagttgataacccctacccctgccccatctctggttcaggggcttttcagatgttttctctccagggtgcagatgccctctagctctgaaaacttttccgagaaagaaccagggtgaatcttgggctctggactggattatgtgtctaggttgttgaggttgagaggggaggagatccagggcagtgttgtgtatgctgagttatgtctgcttgtctctgtctctttagctaggtgttgtgttgaggcaatggcgtggctggcttggcctttccattgtggcttggacccaggttatctgtgcctttccatctgcaagccaagggttttcagttagggaaaatggccgtgccattttgcctgtctgttgatactgacaagtcctgataagacataaactccaggagccagggtggttgtggtgataaggcaaggaacttggctgaggcaggggttggagaacaggtgttgatgaacagtgaataacttttaaatatcccctgaacgtgagagtcaggatggctgggttcaagcctggcttctgtagttggtcagttatacccatgcctaaccatgtaacattcctgtgcctcactttcctcaagaggtgacaatgctagcacctccccagggatgggactcctcaaggaaatgagccaataggaacaaggccttcccataccaacctgatacacaggaagtgtgagatctcttccttccttcactgtgtttgcagttacgggaggaaggccatttctctttgtgcacatgaaattcagagaggctaagtaccttgcctgagaaaccaccattggcaacggctggcaagagtagaatttcagtctttcatactttgtcgctgttacatcctagggagagctgcccttgacacctacgaggtccccacacacagacaggctggggtgaggaggatgagagagcttctgtcagctttccttcccttttaggctacgcgtccaagcttcctgcgtagcagacactaggggacttttcccggaggcctagctctaaagaccatctcgtgactcacagctacttctcccttttgcctgaaattctgccctttgtttcatcagagcagttgctcaagttgggtttacagccccgaactctagtcttctgtcctcatacctgacacccatgtgtcatcttgttgtgagatctgatgacgcgtgtcagcatgtcattaaaattgagaagcctgtaaaaatcttcgggtgattgtaattcatgtcctgtgtgtgcttgtcaaaagttttgacttgagattttagagttttatagtttgaaacctttcatctccctgaacatttccccagacctgtcaaagcccggctgtgccccagagcctgggctgttggttgccatccagggcagaggcctggctctagccaaagcagtgccccagtgcactgttgaaatattgcttgagctaaatcaaaccaaaggtcaactttacccagacaagcatagaaaatacaattgcattcaattacagaaagccatgttagctcacaatatcaggctgctttttaaaaagcttgacttgtgaccaccagacaacagtgtcacatgtctcctgcctttcctgtatgagattcgtttaccctgtgggtggcagagagcagcttgggcatagagtttggttctccctgaaagctttgtgcttcaagcccgcccacctcagttgcacggaagtcccaaaagacagtgttcaattgactctgtctacagacaaggttggacagggtagcaacgccattttgcattaaaagatatcccccaatagtataaattcattgtacatcgtttcatgtcatataaggatttgctcacataggtatgctctgtatgtttggtcccgtgtcatataagggtgtattcacataaataggtattgtatgtttggtcctatgttatgtaagggtacattcataggtgtgcattgtattgtcctatgccataaaggacatactaaacataggtatgtatgcattgtatgtttggtcccatgtcatgtaaggccatacttacataggtttattctacatgttaaagatgctcctcacataccctctcctctcctctgctcaaccctcctttggcattattccttctgtgttcctagacaatttgcttctattttctgttctatgtatttatatgaaacctaggacccataagtgagagaaaagcatagagtatctctctttctgagactaacttaatttgattaataggattatctctgactatatgtattatctcaaaaaagccatagctttgttctctatggctgaaaagtatttctcctctttctctgtggttggaccccctagattggttctctaacttagctgttacgaacagagcttcagtgagcattgatgtgcctgtgtttgagtggaactttatatttttagtggactactgaatttggttctttgaagcagcattagtggatcagtactatccccattttattgatgagaaaactgagtctgaaaaggttgtatctgttgctcagtgctatggagttgtaacttaggttcaggtctgtgtggctcaaagttccacatctctccaccacaccatatgcccacgttgcctcacttcattgtggggaagcatggttgacatcaccagcttttgattctggagagtaacacaattcacttagttgctaacagagtggaaagaactagagttttgaaatcaaagttgctgggttgacatttgcctttggtttgttttgtgaccttgagccagatactcccttctgacatctttcctgggttggaaaaatgagaataatagcaatacctttcttggaagctggttttagagatcctggaaattgatctgtgtaatgtgcctgaggctttgcaaatatgagtcgtgtttcctgcctcaaagtgccaccacgtcctgctacgtttattaatcttagacattagaagaaatgaggcaatgtgtgcaggatgcataccgagaggtctcccctaactgcctgcaaagagtcccacctaagtccctcacttgcacggtcatcttcctttccttctcttgttccctgtttgtctgtccctgcctttctctctctgtctgtttgtctttgtgtctctgactctttctctctgtgtctctctctctctgtgtctctgtctctgtgacccagtctctgtctctgtctttctctcaggaggccagaagttgatgtcagggctctactcacctgtttagctaatttagctaccaagcatgctctagggaatcctgtgttccccccccccccccatatcccctgagctgcctcaccaacccctgttccgtgggttttccaagttcccaggaactggttgtaatccttcatcctgttgtgtctggtctcaatcagttagagacaaagtcatagcttagaaccgggtggcttaaactctcccatctcccatgcctcctgtctctgccaccttctcttggattcagtttttcctgtttctaattagtttcttcctattgttgccctttcctgcttttctccttccatcttccaagtatcccctttgctttgcatcgctcaggtgttcacaaaaggctctctacaaagtatggggggtttgtttgtttaccagctgtcttcttgttttttcctcatatgggcttcctgagttttgtttctccttaggttcagaactcatttggaccagtgttagcacctcagtattccctctcattttcctccagctatctcagccaacctgctgtctcaggccccacctgctggccagtgagagccacagccctcaatggctcctccttaccacccagactcttgctagatgactcaagctctcatcccagagggttctagcagcttccctcttgttaggaaggcatgcttatttgtttaatccattctagcttccataagaaaatacccaaggctcagtaattttacctgatagaaatggtttctaagaatcccagacgtccaagttctgttgtgggctaccgtctcctggagggctcttttgactcttaacttggtagaagagacagaagaatgagcccacccctcaaggtctttaaaaagaagatttatattgttttatgagtgtttgctttcatctatgtatatgtgtgtgtgtgtgtctcttcaatctttttaaaaagcgctttcataaaaatcgtaagctcgtctgagaggactctctctgatgactgatttcctgggaggcctccagtttcccagcattcttctcctgtcagccagtggctgccttagagcatggatctggggaaaggtgtttccttcctgctgtcatctcaattgtgactgattctcaatagcacacagggctgctctgttcttactggatgcccacaatctcttggatagcaagggccgggattatgtcatacgataccccttttgtccctgcctttgggaagcactaactaggttttttccccttttatccttagcactggtactgtgatacagtagacatttaactgatgcaccaaataatttaaacagcatacagtgtctaaagttgtacaatttctgttggtctaaagacgaggttttggcagcaaacggttcagggtgtatagccacgaatagtcaggtctcttgggaactggtcatctaattgccatgacgattttatcagcatgtattttgactatatttagtctccagtttatattttcttgtgcactgtaagccatgcttggtgttattagtgctttcggaacccagaaacttggagggcctgaaaagtgacttccaatgtccacagaagtagaacattctgtaatggaaatgtgacccaggttcattagactccaattagcacttcttctgtgctgttgagaaagccttcactgcagggcaagaaaattctccggggccccgtgaccaccatggaggtctcaaggcatgtgtgcccacagtctggctcaccctcgtccacgctcacaggttccccagggcatatccacccagctactattccttctctccagagcaccccacaaagtcttctggagacatctcacaggcccagcaccacaaaatgaaccaaagcaacagatacccgaagttgggcatgatggtgtgtttataatggcagcttgtggaggtggaagtaggagaatgaggaattggaagccgtgagactcagaaaggaactaagtaaccaaccaactaataaacaggtgtgattatttccagcccctttgtagctgaaaatattccaaagtcttgtttataagactaatcaaataggctaaatagaaccacaagactgtcatccagccccccacccccaagtctttgctcatttgaccagccagggctaggagacctcaaccccacctctactccaccctgctgctgcctagggggtccatttaagaagggtatgcaggctggggctgctggcaaggcttctttctctgcttctccttttccccatttctctcctccacccacgtctcaagctgttgatggctgtggttccttttgtatagagcacaagactgcagagaacttgaaacttaagctggggcttagagagggcactgaccgagagtaaccccagtggctgctgccagggttttcctcctctgccttcctctgttgtttccctcgccctcctccttcctcctcctcttcctcctcctctgctcctgggttccagcaggcaggtgggagagcgaacgcttccatgaccaggaagaccccccccccccccccccccagagttaggcttctctctaacttctatctgcctgtgctgtttccttagcttggctgtagtgacttgacccagatgaatagcaagaaacccaggattgtgtctcactctgtcccagcccacagatgcatctcatctgtttgctctttttagacaccagccttttattttgttttccctctctcctcccctttgccctgcttcactgtgcccaaagctccagggacatggcaggcggctggctgcctctccggccaatcaggaagctgggctccgcagatcagatactttcgtccagcaatgagagaactcctttggccctttgttgactacagctttctggcttccctgatgttcacattctaactgggaccacaccttctcatgtaaacactcccaactaaccagctctgggtcttcagtgagtgagtggtgtgtgtgtgtgtgtgtgtgtgtgtgtatgtgtctgtgtgtgtgtattgtgtgtactcgttttagagggcagacatcagtattgaatttaggatctctcactgaacaaggagctcactgatttggatacaccaactggccagcaagccttgagcctttgtccatctccccagcactgagggcatggatggttcatgacttttgaccttgatgttgggggtgaatactcagttccttgcgcttgcccagtaggtgttttattgagtgagccatcttcctagctccagtctcttgttcatactcttaatcattgcattctacatcaacttatgaatgttactatttccatattcttttaaaaacattattacactttattttgtatgtgtgtgaggtgggctgggtgtgaagggacaggacagcttgtggaagtcatcccacgtgtgtctcatggactgagattggggtgccaggcttggtggcaggtactgttcttgctaaaccttcttgttggccccaactccatttgatgtctaagaaactgaggttaagagagaacaaagaaaggggccaagtgaggttcatggtcacacaggcaggaagtgtttgagttcagcctctctgataagagtctctggtgctggatcaattggatctgtgttcctctcagaaacatggaaaagagtttttcagagaactttttccccaaccacacattccacagataataaaaaccaggtccccgtcaattcatttggttagggttaactgagtgactgtctttcccacgaagcgttctttgtcttacctagaataacttgtctgttactggtcatctacttgtgtctagtctcacagtttccagaagatatgatcctttcattgatgctctataaaattttaggtttatttatttttatttttccctgtgtctccatattcctttctcctctctctctttcttttttgcagtactggggattgaacctggggcttctacatgttagaaaaacactctacccttgacctatatccctacctgtctccccacccacatattttggtgagatgagttgttgagttgctgaagctggctttgtactgtaatcctcctgcctcagagccccagatagctgggatataacaggcctgtgctactaggcctggcttttattaatttttttcatgaagttctgaataggcacttgagtgagctttgacctttcctttaccttgtagcaggtagaaaaataaaagcaaaatagttttatctcactcagacaaatctataatacattcataaatatatgtgcccacacatgtgcacactcagacacatcttatggggccacgagtttggcatctcagtgttcttgtcaaagtcacctctctcttactatctattttgaacacagcagctcagctgatgagagaagctgtccttggacatgatcagattagaagatctgtatggagcatgtaactcggcacgggaattcccatggctggcatgtacctttctcatgtaaggctcacagtaggtccagaaaggtggatgctcttgtcatttcctttgggtttgttttcttacttatttactttttctttctggtactgggaatggaactcagaacttcatgcctgctgggtaagttcacaaaccactgagacatacccacagcctttctctcactacgttgcctggaactcatattgtggaccaaggagaccttgactttgtgatcctcctgtttcagcctcccgaatagctggggttacaagtgtggaccactgcatcaagctctgtgtcatcatctcattaactcagcttccctctgctttattcctgctgtgcttccagctgttgtttacctgatgcggcttgtcacttggggcatgaaaccaagtaggcggcttagggataccgtagccatcttgacccagtctgcttcacattcgtgtcctgattggtctgtccccttcctactgccagatgaatttacctcttcaaaattggtcatttctcaggtcatatcagctcattttacattcatgcatttgtattcatctatccatcatccatctgtgcatccatccatccatccatccacccacccacccatctatctacccatccatccatccatccacccatccatccatctacccatccatccatccatccatcattcatccatctagccatccatccatccatccatccacctacccagccatctgtccagccagccagctatccatccatctatccatccatccatccatccatccatccatccatccatccatccagtggcttcacccaagattactagctgtatcagtcatctggcttggttcattctttgcactctcctacacagctagctgcatacagaagacagaaaccagcaaggacaaagccattgtggtctgtcttcatatcacttcttttttctttcccccctttcctctcctatacctcaaatctgtgataaccaagaaaatccctagagggaagatctgtgttcttattttttcctgcacattgctctatagtgcagtaagactgccattttagtgacaattaatatattaccatttaataaacatttgtccctagccagttgctaattgctcaagtgtatgaatacgtctcttatccccaggactttaaggtatagtggcatcttatggccacacagctaatttatagcaagaaacagcattacattttgggctttatggtcctaaacttctttttgcctgcatagttttgttttgaggcttggacttcctgtgtaagcacgggtgtggaacttactccgtagcccaggctggcctctaatttgcagtttactgcctctgcctcctgactactgacattacagatatgcaccaccacatcaaacttggttagatttttttttctttttttaattctcaagacccaattcttgtccttcacagttctggttcattgtgctggggggtgtggcctgggctttgggattttttaaaattcccaagtgggcctagcagcctccaaggttaagagccatcataccacacacctttgtcttcctgtgtgtgtatgtactgcagctgtcagcggtgataggacagcagcagataatgtgtgcatatccacgtgaccagactgcaagttgtttgtagccaaggctctatggccttcctgcatcatccccacccagcatctgccacattatgttcatgcactgccaagggctgttggctgtttaaccagcttctttggtttctgtgtctcatccagaggataggcagttggtgtttgatcacatccagctgtttatctgcagcgtctgttgacataacggaagcatcatataaacatgctaagtacatttgctggtctccagagtgttgctgggtgacctaggtcctttcagagtgcagtctgggtcaaacctcccacacttctgctgccctgaaggaaggagctgttctgaagttcctacgtaggatgctgtgtactgctgtggctttgctcaggaggaatttgtgttcaactggctgatctgagtgttaggtcatagatttattctgttctatcaaggttcacagagctctcttttgatcctcatttttataggtaaggccatggaagtttaagtaggtcaaataaacttagaaatacatggatacagagcccagaatttggtttcccagtatgaggtgtgtgtgtgtgtgtgtgtgtgtgtgtgtagagcattgctcatattgaaaaaagtgctctattgaatgatctattctccacctcttcttttgagatttatgtacatacacaaacttaagtattgtgtgtttgtgtgtgtgtgtatacatacacacatacataactaatttataagcatgcctgccttttcacctcaagctttggctgaagcctctctgcctgtcttccttccttctccttaccccccaccatggggatgctgggatgttctagatgttgttgtctttgaaaagacacttgtggtcagggttcttatttcctcctgggctatagcctagagatttgatgctcttgccctccttggtctcttcctggacccactaatctcaaagatccttctgaagtctttctggtcacctcatctagcattcagtcaggtgtcattgctggagcagtaattttgtaccaggctttgttccaggtatttggaacactaagataaaagacctattctgcatttttataagttagagttgaatgcaggctatacttaagtaaaataacatttcataatatatggcttccagacccgctgtattggaaatgtggaggctgcttattaaaatggagatttgtgggtggtctaccttagaacccctggttgtaatctgaaggaatagacacccagaaactagtttttgtgtgcctcttaagtgaatcttaggtgttctgtgggtatggcaactcaaagaattgagttcagtggtagcagtgtggggtcttgtacgatggaaacaccaggcagatgacagatggctgagtgctgatttcaaggagggacattgacaggcctcagatcagctgtggcatagtatgaggaaccctaggataaaactatagatgagttgaggagaatcactgttttatcagctccgttcaaaattactgaagtttgctccatgctgaagatgcctgggtcatttgtatctattaagaatctgcttggactgtttgtctctacgaagggagacccttttagatcccaagagaaacggtttcatcagtgcacactgcagtcttgttttcagatggaacccctcttcgggtaattgatttgagtttgtaaagtttgccctctagtggtcagccacttggtcccagatgagcttggttttgtttttgttttgggggggtggtggtgttggtttgttttaatttcaaaaaagaattcgggttattagaagtttaaaggggtaaggaagaagaaagatgaaatagtcaataaaataaggcaggaaaatggttggtgtttcaggcaggcaccactcagcatctgctcagaatcctcttgctttacagatgatggggcccaaggctcagaaaggtgctaaagaaatgaaattcaagtggtactatcatacctagcctccagccagagactgacgttctgaattcttggccagtgctcttttctatttcatgccactggagtgaagccttttttcgatgtactcggagagcttattgtttaatgggagttggtacttggagagcttattgtttaatgggagtcggaatgaaagcctttagcagtcactgcatttagtaaagcaaagggtgggatttcaaacatacgtttacatatttttctcagtgtttggaggaactggactttatagttctgaaatcccaggttttgttctgaaaccaagaagagaccatgtctatttaaacacctcgatatgctcacaggactcccctgtgattcttggaagtgtggtcccaggcaggcaacatcagcaccacctgggagcttgttagacatgcagctgctgcagccagagctggcagaagcagatgctctgagactgctgtccagccggctagctgaggcaacccatcaagcgattctggttcacagaaatgttagcgagccattgcctgctgatctgggagattagcccctgtggcttgtggaaataaggcactcagtattttcagtgctagctacgtgaggcggcactgaggagtcaggagcagcagggctcatgtcacaaacctcaggtaggatggatgagatcatttaaaagggttggtttttcaattggcaacaaggaaagaccatgtgtgtaacaacaccactgtgctgttggactgtgggagcccacactgagtgtggctcaacatgtcatcagaaagcaatcttttcatgtctctgccagcgagacggagctcctgaaactcacttctcggtgtatgtaagccagaagcctgtggtcacccatccgtttaaaatgaagcaatcaatattctattctccaccttccccatagcggttgagtctttttttttttttttgagttattaactgtaaacaaacacaattttccaatagatttgaagctccaggattttctggtggacaatgaaacattctctggattcctgcagcacaatttgtcccttccaagatctactgtggacagcctgctgcaggcgaatgttggtctccagaaggtaagctactaccttcagctaaatcagtggggcctcactattaccctgttgggggccctggaaagaaagaaagaaaaaccctggcctttgaaaaagctgtgaaggaaatggtcaggcttcagaagtttagtttcatctcatttgactcgtgactctggttgtcacagacgaaccctacagtgagtggggtgtgtcacccagcatcagggccagtatgctgaaaggaagttgatttctgtgtctgtcctttggcattgtaatgactcccccctaaaggggttatattttctgttaaggtgaattaagaagctttttttttttttaaatgttgttctgaaataagagccagagacgtagattcttaaactggaatctatcacaaaagattaaatgaagcacttactgctttttaaagacagggaagctgcataaagagacttctgatcaacttttaagtgtatgtaatattagtgtttacataggctttgcatcttagggtcctagagaacttcttcgccatcatttatttttgtaccactcctgggcagagtgcatggctatatgttgttcccccgaaagctttttcttcactttattctctggcagaaaggagaattgaccccatgtacagcctttcggctctatactggcttgactttacagtaagcagaagtcatgggcggggctgatgattgaagagggctttgcttcacatggctgaaaattttccaagttagaaaaaagaaaatgtgcttactgcatgctcttatgaaactgggaaaatatgtcttgtgtttaccaattgtgtggctgggaggtgggccagaggcagcagactttcgaaatcatttcatttagcataatttccattgccccctgccaatttcatatctgttgcatgccatcagtttaaactaagaggcatccagggaaggtctttgcatggtaatttgagtttcagtgtcttaggggttcttcaccacagcatggtgacaaggacttatggcaggagcaagcttggagtgtacttgagtatctggcagtcagtgacaggcgagtggacgacatggtggcgcagattcccttcactgtttgcgaaactgcatgggagttgagaggctttggtttcgccccttgcgatgctctacaggtttctgtgaccagaatggactgcgttcagttaagctgatagaggggttggtaatattgtaataagccatccattcaacaaatactgttctagggttatagacacaggtacgagccttgtaaaccaaggcagccccatattattgcagaggtctctctctgctggacagtgagactcaggtatgaaaaagcactacttatttaaacctaggaagggtagctaggtaggagcgtatggccaaagagagtttcctggggtttgctatgaagaacaggtgaggatgacgtagaagtactttacagttgagttgatagaggcccacttttccgtattcttcttgggggcaagtaaaacaaaacactcacaattgtgatgttccttaaacatagctttatgcatttgtcaagtatctaaacctacagattcacggtataattgtttccatgaggcagcctaatttcagcgtccaatatcaatacatttctggaagagttagcataaccttcctctcatagttccaggggtttagactctgggtttccattagctgagtcatgtgttccagtcgcgttgagaaaaagacttgccttaaggatttcccggtgctattgggacaagagagtgggatgcattgagtcagcatgcagtgttggaacatggctgactgtgtccgattcatcccaaggttctttcctccatgggtgactgcagtagtgctttgcttcagctcttccaagatgtactgaggttacactccccccaaagtgtctgggagccagccttccatcctgataattttttcacagctctgtttacatccaacccttccaggtatttttgcaaggctaccaattacatttggccagtctgtgtaacggatcaaaattagaagaaattattcagcttggtgatgcggaagtttctgccctctgtggtctaccgaggaagaagctcgatgcagccgagagagtactgcgctacaacatggacatcctgaagccagttgtggtgagtgctgaaggtttgagaatgagaaatcttttcctggactgcacatcttgtttttgtagaaacttgggcctggctggaacttggtgatataatttagcccagtcatactctgggtgttctttcaaatttcagtccatttcccaagggtgacttggagaagaatgttctgggtgtggcagagtccaggctcaaggtctctggtgctggtttcaaccagaaaagatccatctttcatgtttttttaaaaaaatatatttctgaggaagagtccatttgaagaaagaccgccctccccccggccaggtttaagaaaatgtcttgaaatgattaatggggaaatggctacttattagtgtttttaaaaccagtagaagagggagattgtgttagataataaaacattgggattgggtaagaccacataaaaataattagctcaaacaatgacaaaaatgtattagaaagacatacaaaacaaaccataaccgaggaatgcaagtgagccctcgtgtattgattatcagggttggttatagaaattctgcaatagagatctgtgagttttctgagatctttgtcaaaatgactccagtagcatctgcagtagccagcactctgcttttctgtgtaccagggagagctgttgtgtcagtaggttctctgaagacatgtgttcttcattataccaagatgatgctgtaatcatgtcaaactctgtgaagctggctttcagtaagggaaccatacattcctatgcggtcctaagacggtcagtttccatcagcattccaagcctagatcatgtgggttttagaaacatctcagagtagactctctgaactgacccgggagaagttcttatacatgtttcaactctgcagctgttgtgggaagaatagggggtggccaaatgacaagcttcttctaggtgcttttgtggagtgcacacatgccaatttttgtgcccagcctaatgttttctcactcctaaagtaattcattatgtttcaggtttttaaagctaccaagtgcttgctttggtggcctgtgagtccattggttattgcctttatcactgtagtttcaagtgagatgtatttctttattggagatgtttgtagtgctctgagcaatagcactgcatagttagataagtgtactgctgccaatctctgcgcttgacgttttgtgagacacaaagggtcaaggtccttacaaatgtcgtgaaaggtgtgatatgaaattgtgtttggggactgctttgcccacttatcactataagatacagaggtaaacacttagccttcaagtttaggaaatatgagttatttaagaagagacagtaattgattctggtgcccatttatttgatttcattcccgtttaatcattgaacacctgtagtgtttacagcccaataaatcctttctcctgcagagtatctgaactgctttctttttccttttttcttttttctttttggttttttgagacagggtttctctgtatagccctggctgtcctggaactcactttgtagaccaggctggcctcgaactcagaaatctgcctgcctctgcctcccgagtgctgggattaaaggtgtgcgccaccactgcctggcagagtaccaccatggccctcatcatctgtctgttaacagctcagatttcgacttgaaaatcttcccctttgggagggtttccaacaccaaggaactatacctttaaaccagtcagccatgtgacatcccgtcctgttgtggccttgtagattagtaggttcaatttagatggcttcagtgtaccccctgcatgtctcctgggtgtagagagtggaattctgcttctgccccttcgcttctgctgggaaccgtcgctcataaagtcagaacatgggggctcttgaagacgatagtgagtgatcaggattgtgctatgtgaaaatgttttggaagctgcctctgggatgggatgtctttcaaacattctgtgatgttacttactgaattaagcagtgctttaattggaatactgggactggtgcttggtttataataagcacactttttctcttgctactctgatgaaattttaatttgtcacggtcagtgtgtgtgtgtgtgtgtgtgtgtgtgtgtgtgtatgtgacttgtgctgaatcgtgctgatggacagttaattgtgccaagaactttgaggacaacagccagatgcgtgacccaattagcatgggagaagactgttctgttaatgtgccatttctgtaacaaaaagggctcatcataagagacatgttttgaaatattttccacttgtattgttattattttaggtgtgggtatttccccatttttcagccaaaaatattgtgactttctcctggttctcctctaggtggttagggtaatagcgtctggataacatggggcagtgtggcagagttagaagaccatgatttgaggtcaatgagatctgggttcaaacattggctcagctttttatagatgtcattgacttaggaaaacaaaatcttagattctacaagcctccatttccttttattttatatagagataatatagtttatcatttattatgattatttgtttttaatatctctatgtagatatatcaagaggccggtgcatactagatgctcaacaagtagaagctgatagtttaattgacataaataataaaaattgcatgttaaaaacagttgctggtaaggcagatgtttcattttgtagttcagtgttaagaagcagaagcagaataaacaaagcaatcctggagaatatattcagtgcataatgatatttttttttgtctagatctggacataaaccccaaacaaaactcaccaactacacaccaacctccagactaactcacttgctgaacagtgctgtacgtcagaattgttctaggaaccctacttagttgaggttctcaaaaaggtgtttttccagttagtacaagggtagattgattgatggaaccctgtctgtctctaggataaatataacggaggtcatggacatgctggtaatcctgaatattcactgtgtattgttaagaccgggatgtaaaggaaaaataaaaggtggaggcagtacatttaaggacttctttccaggttctggggtgaagtgatacttgccctagatagattggggctctggtcccgtctcactgtcgtctcagtagtgtgggaatggtgtctgaatcttgaggttggaaggaaggaccacagatttgtctcatgtcagcaacaccttggatatagctcgcatgactacgcttattaggtcatcttgacctctaagaataccatctgcctaaaagggagaatcctgtctctatggaatgaagaactctcttcaaatgtcttgtgtttcatgctatgtgttcctaccacggcagaatttggttcttatattagggggcctgtggtttctggaagaccagaaacctcacagctgggctgtctgccctccaaggcgcaaatgagtaatgggcgaatggagttaccttatctggaagatctgggcttgttcttaatttctgtagacaaacactcaaaaggacatatggggcttgatattatcttctgcttggtgaccttttcttcatttgctctgtgtgtgtgtgtgtgtgtgtgtgtgtgtgtgtgtgtgtgtgtgtatgtgtacgcgcgcgcacatgtgcccgcacaggcatgcgtacatatttgtatgaaggtgggtacatgtgtatgtgtgtaggcatacatatgtgtgcatgtaggtcagaaatagatgctgggagtcattcttctgcactttattcagtgaagaagggtcggcatgacttgtctcattagacatcttgctttgggggggccctcatctctcccttccaaggctggggttacaggcaggctgccatgcccacatgatatctgtgtgggttctgggatctgacctctggttctcatgcttctgtcatgagcacttttaaccactgagccattgactcagctctgcttaggatttttaagggttcagtactttagcatgtcacacgccgaccttgcttgcagcatttatttatttattgtaggcttttgtagaggagaatttttatgtaggtttttgtagggaggaattgttgcttgtaagacttgaacatttgtggaaagtttttcatgaactggctttaccgtctagctgcttgcacggtatgcctttgtctctaagccacggtggctcttatcatttggtatgtggtgcagtgacaagctgtgacgatttactctcaggccgtgtgctcatctgtacaaactgagggataaattggtgaatatcgtagtgttttgctaacatgactgctcaactctgcccaaacacgtgtgtcttaattatactatgtttgctctggagaaatgctgtggcttttaaggtaaaggcttgtttttgttttcttctaaattatgctaataagtgtattgaactatatttagaagcaccataaacatgaaacattttaaggtatgaaacacatttaatataaaactaaatatttaacttatttttatatgttaatgcctcctttagacatgaggttaatcattccccattttaataaaaatattaaaatgttcctcaaaggaaagctttattgtcatggaaatattagactccgttgggttgggtacattccaagtgggatggccataaatatcatggaaatattagagactgattgattaggataattcttgcctgtggtacattgctgacttgttttcagtttaaagctgtttttttccctccaaattttattttttattttattttgtgcgtatgggtgttttatgtttatgtcttcatgtggaccatgcgcatgcctggtgccataaaggccagaaaagggcattggatcccctgggactggggttacccaggcttgtgagttgccatgtaggtattgggacccaaacccagcatgagaacctctggatgaacagcaagtgctctgaatcatcactcaggccttgcgttgaaagcttattaatccttaatctagggcaagaggagtgcagagctggagttatacctgctttgggaagtcattcagggaaaggtgttttttgttgtccttatgatagcatcttcatagatggtccaggtcggccttgatcttgtgatcctcatacttcacagctgaatgtcgggattatagaccactggcacaatgcacaacttaaaagaggagtcggacacgtgccagagatcattgtgtaaaatgcatttacaaagaggcacacaaaattctatttagaggcctaaacaatggatgttaataaaaatagggaatgctgctaaaagaaaacatggtttgtgcagagtctcgaggggaacaggaagagaatgagatgtttaggggaatagggtgggttggatgtactgatagaggggacattgacgggaggagcagagatgggatgtgatgctggggaagaggacgaagtctatccaggcggacttgtgtgattcatgacagagcactaaatgtcattcagaccaagggcagccatggcaggttccagtggttcgtgacttgaggaggggcatgtaagacaacacttctagggatttgcttagcttctgaggcaggattacactggcttagttcttccctctaagatgtgtctccttccctttatgcttttcttctgaaaacatctactgagatatgctaacaaatatgcatggccctgtattgattaaaataccagctcagtattcagccaagtggagacttctaggttgtcgacctttaaagcgtttcaatctttcacagcataactattaagccagtgaggagagacacaatcctctgctggaggatggggacagaatagcctttgtcatttggggccttttaggaaatactgttctgataccgtgtatacatgttacagaaaatgggtggaagtctttgagtaataaggtaagagtttgtattctatgatattacagtacttagttatgttctaaatatatcagacaatgcacggattcctgttgagctaaatacagaaggtacagtccttaactaagtatttttttcctctttactctgtgcaggaaaatacttttcttcctgtgggcaatagggacttaatttgaattcacagtcaagagaatgtttttagtcaggacaaaaacaggaattctgagctgtgccttactgagcatgttaagttcatcggcagagttttgcggagcagtgttgtggcaagctctgtcttggccgatgaggtgcgagcaggagggcacagtgagttgccggtgtggatggcattccgtgttcaagtttcacggcctcagttattcctgagctatgatgccaccaacgacatctctgtatcctgtaagatctagcaatattcaaagacatgagctgcctttaagatgtgacatgcgctctcttcttcatgtctacaaagccacccttccccctttattgtagttgtattgcattaaagagaaaattggaaaacatgtcaaacgtgtgtgtgtgtgtgtgtgtgtgtgtgtgtgtgtgtgtgtgtgtatatatatatacccagaatgacagaaacaacccctgtgggctgctgtcctcactcggccatctttactgcagattgtagtcacaaattaaaccatcatagatatcacactattacctctgtaaccctgcctgttgcccagcggcaaccccaattctggagttgcatgtttttgaacattacatgaacatatttaaacaccgtcaacagcagcacttggtatgggcttgcgtgggttcacattgtgtactcgtgtttgctgagctgcccctgtgctttctgggaagccccatggattggagatcaagcatcgtcaatgcatttgtaactggtttctattacacgatagctggtattccgctttatactaaagatgtaaaaaaatccattattctagtctttgacttaatgttttaggtcatttatagccataaatcatttgatgcacactttttacatttaaaatatacatccacattctcatttttggttgaatccattttttttaatattttgtttaaaagtcttctgagctcaagttcacaattgtattttctaatattctctccaatttgttttaaactttcctatttctttcagctctgtaatctaccaagactttatttgtaaataatgaggtaagacggaaaacctgactatctagctgagccaggagtagttctgaatagcttatctttttactgtcggtttgaagcattatattctgctgatgccaccagcaacatctttggattctgtaagatccaagttaaaaaaagaaaaaagtgcagtgaggcctggagcaaaaagtgtctggataatccaagctggagattggctgatgccgaatttgaattgtgtgcatatatcttagctctgttatgtcagtctgtgcctcgcacataagtttgtatcaactgcaggtcgccgatattgttaaagtatactgaacatctatttacaagttattttaaaactacaccttatctgtttgtgtgtggcactgccttgctgtggcacatgtgtggaggtcagaggtcacttttgtgcacatcagtcctctccttccaccatggatgtcagattcaggtcgagcacacttggcaggaggcaccttcctcatctcaccagccctgaccttcacggtgacattgactgctataccatattacacatggatggtttagccaataagaggctaagaccccaatacctcagttaagccaacagacttagacttttgaccatcaaatcatcgcataagacattgcttatcaaagctcccgtattcatagtagaggtccttgtgcttgcataaaaggctagttacactcaaaggggtgcaaggttcataccagcagtttttgaattgtagaaaaacaaggagaataagcttactctaaactgtctaaattaaaaaccaaattgagggctggtcactacttaggaagatgcaaattttttcagatggagaagctatataggacggagtgctcactatattaacagggtagactatctcaggcatttggtgtcttgtagacctgcctggcacagggcaaggcacagaggcaggatggttgtcctcctgagcactgggaggctacttttaaggaagggaagaaatgggagatgaaagtgtttttcctcctgaaacttaccgagtggcagactctgctcaaagcacttggtaggcatcttgcagtcagtgtttatgaaactctgtgatgcactgagcactgccgctctgcagtggaatagctgaggttatggaggtacggagtgggggtggcagtggcggctgggggggtgggaggagttgtcttgccttgggttctgtaggcttcaaaagagaaatgcatccacctacatttctgactccggaaattttgttttgtccttatttatttttgatttataatcttgaatcataaattaattcaaaatcaatagtggtgggccatgctaaacacaaaactagtttacctcctgcccttctaattgggacctcttcgttggtgagcatttccctgactgagggaaatcaccggttcagcttctgctgtgccgtgctgatcgatcttcagttaagtagtgaactgggagagagaaagtgagagctgagcaccccactgtttctgctcctgagtctcctctggaaggaacagcctttgtagtgatctgtgagttatatcacaggcctccccaagtatagcatctatgggttgaccataggtccctcagaggaatgtgagtgtggaagctctggaatttggctcttactcacaggctttcccaggagaagccatgtgtccagcagctctagttctctcctaagcagatgtccttagaaatgtgcatacaggactgcgccagccactgagaccgtgatgttcataactcaatattctgcatttggaactcactttaaagaacacatcccactcaggatgatattttctagttccatccatttgcctcagaattccatgagttcatcgtttttaatagctgagtagtactccattgtgtaaatgtaccacattttctttatccatccctgtgttgagggacatctgggttctttccagcttctggctattataaataaggctgctatgaacatagtggagcatgtgtccttgttatatgttggagaatattttgggtatatgctcaggagtggtataactgggtcctcaggtactatgtccagttttctgaggaaccaccagactgatttccagagtggttgtactagcttgctatcccaccagcaatggagtagtgctcttctttctccacatctttgccagcatctgctgttacatgagtttttgatcttggccattctgactggtgtgaggtagaatctcagagttgctttgatttgcattaacccaatcacaaaagaacacacatggtatacactcactgatacatggatattagcccaaaagctcggaacacccaaggtacaattcacagaccacatgatgctcaagaaggaaaaccaaagtgcaggtgctttggtccttcttagaaagggaaacaaaatactcatgggagcaaatatgaagacaaagtgtggagcagatactgaaggaaaggccatccagagactgccccacctggggattcatcccatatacagtcaccaatcccagacgctattgtggatgccaagaaatgcttgctgaatggaccctgatatagctgtctcctgagaggccctgccagagccttacaaatacagaggcagaagctcacagccagctattggactgagtatgtggtcctcaatggaggagttagagaatggactgaaggagctgaaggggttttcaaccccacaggaagaacaacaatatcaatcaaccagaccccccagagctcccagggactaaaccaccaaccaaagagtacacatggctccagctgcatatgtagcagatgatggccttgtcagtcatcaatggaagaagaggtccttggtcctatgaaggctcgatagatgcgccagtgtaggggaatcaagggcggggaggtgggagtgggtgggtgggtggaggaacacccacataaaagcagggggaggggggaggagctagggggtttctgggataggggaaaccgggaaaggggataacatttgaaatgcaaataaagaaaatatccaataataataaaaaagaacatacaaatagaaaacatctccgaggctgttccttatgttagtcctgttcacttttagcactctctgttccagtctcgcagcaatctttgacatgataattgctgtcaaaacggtctaaaattctcaaggtattagataaactactgaataaaacaaaacagaacctgtgaaaacactaggaaaagctgcctttcccctggagactttcttccttatccttcctaattgtgggactgaagttgaaattccttctacagcaattctggttacacagcctgtggggttttgtctcagctgccccccgccccgactttctattgtaatttatctttcctttgggtctaattaattattttctcttgtttactgtgcagctaggttatgtattatgttaattagtatatacaaggtgatgactaacactagacataaaaacagtgttctatgttacatctccagtatttaaaaatggtgaaaatctactgactcaacagaacaaaaggagaattgttctcttgctttggttattattgaattttgtcttttcctactttattgattgactgattgattgtgaaccatcacacactcttttctcaggccatgcctataaacaaatgtcttgtagaactgtagatagatagagttgggactttcaggttagaattttattgaacacacgtgcacacacgtgcatggacacacacacacacacacacacacacacacacacacacaagcctgtgcctacttgtgtgtaccacataagatacttgtatatgttgtctattcactagcctttgaatttgcactcctgaaaccatcatgaagaagaaatccttatctgaagaaaagaaacacacagacatgcagttagagtaattatccagtgttctttattttggctagaagtttcttaaatttaatctttattaggaattgttttgatttatttattttctatgtagagattttaagcctgcatttgagctcatacactaagatttttttctccttctctctagacaaaactaaattccacatctcatctcccgacccagcatctggctgaagccaccacagtgttgcttgacagcttggggggcctggcccaagaggtaagtggtatttttttaagccacagtggacagactaatcactgtcatttctttagttctgagttctgacaacagggtccttgtactttgaatatcacctgctgcgtcaaactaaattttagaagcacaagtaatttaaaaatgaatcaggtttgatctccattggagaggaagaaactaaaatacatcaatgttgcagagataattagtgcctcagaaccccatgtttagtctagacctttctctgtgagctccttctgcccctgtgtacatttgtgaagagaactgtctctcgatctacctcctaccctgtgcactgactctgtttgacagcagcttcttcatgttgcttcttcaacagcaaggccaccattcagccattgcatcagaattcacctctgctagccaacaggaacgctgtggctttcctcgccctgctttttgccttgggaaatctggtctctgaggctcagcattgggaattcggttcctagtgagtgctgagctgatttggccgttaggtctacatgttgtcccatgtgacagagtgaaccttgatcacagttcaccttgcctgtggatcccaccactgtctgtcccattggccatgggtagaactcaaggcaggctacagtgctcaggacactggaatacaggaatccatggggggaaagtttctcagacttggcccatcctgattttttaactgagtctttagctcattttccatgcttgtatcatcttttttcccttctgaatatcaaaaaagttaccttgtttcctgacaataaaagtatttcacgttcatcagtgaacaagcagtgcacctggaaagtttagaaaatcctgagaccaagcacaacacctcctccctcccaccctccctccctctctccctcccttccttccttccttccttccatttattgtaactctgctcagccatctttgacagaggggctttgctctcatactcctccccttaggagccgactttgtcagcctgttattggttcctctgttagggagggtgagtgacctttggataggccaagaaactggaccagttggggttctgccaaagggcagaaagagaaagtccatctgtttccataaggccttgtgcgttgacagtgctctggagagtcccctccttgtctcattttctgctgctcattcctggagaaagccaagtgggtgtagtagtggccgggtggttgagtggtggggtagtacctgtaaattcagggtttgtggcagcaagtttctcttctatcattgtacctgcttttattctgggctaaaacaaaataattgcaaagcccttgatgtgccctgtggctgaatgggtggaaacctctagcagtgtactgtgtacatttttcttaactgtctcttggaacctgcttactcctgttcccacatcagtggtgggcaaccacttctcccaataggtcaccctcaagccgctttggtcatgtctctctcagtgctttctctgagtaacaataaagaaatgcatttttagaaaggtccatgtttagaaagaaacttagttgctatgttcaaaggctaactgttgacaggaaaacacaagatatcatagatggattgtggctgtttgatttcatatgactggctcatcctcagggtccagtgaagcaccttttattgtgcccatttcacagatggcactggggcacagaaaagtctttgcccacagtcttgtagagagttaattggtcgcatggtcaggtgcttggccttgccagctattccagctctgcagtgagcacagtcacctcgccaccatcatttagcccacggaagggtggaagtcagaaataaaccagtccagctgatgatgtgaccgcaggcatctgtgcagtgaagaaaaaataaaccatgtaagggatgtagaaagagggatgagatgccattttaaaagagcagagtgagttgactccaaagacagtggtgctctattcctagagaagttaggacactgcacaggaagggcagcagataccagtcacaggaaccgtgtgcttgagagcgtacacttaaggtccatgaaggaagccagaggagttaaaagagggtgtttagtgtggcttcatgtttgcaaatgactacactcttgctgttggactgaggaagaggctggatcgagaataaggagggtgggggcattgcaacaaatggagactgcatggccctggtccatttgcttaccttcagtgcaaccactcttcttggcctggaagatgaatggttaccctcccctgtgagccaagggcaagtcacagagaatgtgtccagtgagagctatgatgaaggagagtgggcaggaattctctcctcaagcaggtgctagggggagccaccagatgggaatagcaagggataataagatactgcaggtcccagcaccacaggtggagggaagaaggccttggctaatcaccagagggctttaaggtgatgctagctagacacagtatgttctgcaacactgcttttaggttaagagaataaagtgtttgcttctctcttgtcccatcctttgcttgtccctttgtcccctctcctttctctttccaccctgacaccagctgttcagcacaaagagctggagcgacatgcggcaggaggtgatgtttctgaccaacgtgaacagctccagctcctccacccagatctaccaggcagtgtcccgcatcgtgtgtggtcacccagagggtgggggcctgaagatcaagtccctcaactggtacgaggataacaactacaaagccctctttggagggaataacaccgaggaagacgtggacaccttctatgacaattctacaagtgagttgactatgcagaccaaagccatgtcctcattccgatcaatctcaggtctggctcagcctgtgtcaccccgtccctgtgtcctcattccgagctcaggtctggctcagcctgtgtcactcagaccccatgctttcctttattctgtgtagtagcaaaggttgtcctctctgtttgctcttatgacattgctcctcaagtacagagtccttgataagtgaatctctctcagttctgtgaatggaggggcctgatctctctcaggtgtttagtaacaatacccaaaagatgaataagtgattgatagctagtctttccagttcttttcatatgtgggctctaaaagaaaaaaaaagctacacaaagcagggaagaaaagaggttgctgggggcagtagagggatgagatgagatgtgttggttagaatgcaaagttcacttgtgcaaaaatgcataccgctggagagcaaatggataaggtagcaagggtgtggtaacactgtgttatatctgtaagctttgtaaggaagttcatattgatgttactgcacagactcagtgggcatctacatgaagtgatggagatattaactagcttgactgggttgtgttaatcacatcatagcggatacgtgtatcggaacatcagtctgtataaaatacgtatcatttttgttgttcattaatacctgagtaaagccagaaaacctcctaaaaatgatgagatattttaattttatattattttaattattacatttaattatcataattgttataaattagcatattattataaaagagaataattataaaatagtataatcattataattatcactataattattattatattactgtgaggcaagctttacaataaacatctaaaagggggtaatggtaataatagcaattacaacagctacaggaaaacctaacattaaagcaaaatttcctatgcataatgcattctgtttaaattacctatttgattcttacagaaaccctgcaaggaaggttctggaacctcaaatttcataggcccagaggttaagtgtcttggttaaagttgcatttctaggtaatccccaagagctgggattcaagtctaagtcctcttggctttttgaggtgaactacctcattaatggtggcatgcttgcactgtcacactcacacattcagctgcctgtttgttttgcattctgggtgttaaagagacctgtaactctatatctagtcaccaccctcgggcagttttctgtggaagtgtgtctgtcctgcacctggtcatatgtagcatttgtccagcgctacaggtctaacaatggcatctttgccttgaatacaccacaaagctaagccattcctgatttccaaccgcaggcaagaagtgagacagcttcatgtgtggctgtaacacagcctgtgccctctggggctcagcactctagcactttacaagttgctttagaagcctgaagaagatggtaatgtaggcagttttatgaaaccagctcttcttccccagcctgcagatcaatccaaggacatctcttgcttatacaacagatataattgagggcttgtttccttaggaaaatattccagccttggagataggacacaacgatagagtgcttgcatacccctagtgaggccatgggtcatttctagtatgccccacccccaactcattaccttttttatcattattttatcacctgtgtatcaagcagctcagagacgttgtgtggtatccaagcaaagcccgttctgtcctcttgaactttggatatttcagtttttaatttttgttaaatataaacattagttgtggtaggatctattaattactaaggacagacttggctttttcctcttcaaacaaaagtgtaaatgcagtcttccagcttccccaggaagaatcctgcttgtgtccagtgaaaagcactgtgagggctggcatgagggtgtggagctagagttgggatggcatgtgtagtcaaaagcttccttcagatcagctcagatgtgagtctgagagaggcctgattctttcgagcactgaggaaagacctcactggaaataccccatctaattctcatcacagctctgacaagtggatgttacgaactttccaactttcattctatagcagcgcaaactgaggctcacataaggaggttatccgctgcatgactgataggtgatgtgggagggggatttgcaccctggactggctgcatggctcccaaaccttctaagttcctgttggcaactgaccatgatatagacgtgaatgtctgtcctccgtcttctttgtagctccttattgcaatgatttgatgaagaacttggagtctagtcctctttctcgaattatttggaaggcactcaagccactgcttgttggaaagattctctatacacctgacacaccagctacaaggcaggtcatggctgaggtaagctgtccaggcttaggactccgtccccaaaatctccccagaattaggggtaggaagtgaacgcagcttcaggtagtgtatgttgaatatactcttggccatgatggggcttttaaatagtcaaaaacaaaacaaaacaaatccacatgtaatcttgggctccatatccccagccttgagtatttgaactatgtctgtagcaggggtttcttgaggaagggaaggactgagcagaggtttctgtaatgagtggtgttttttagggaatcttggaatgttcattgcctctgcctctcttctatttgtatgaatcccgattccctacctgactgtaggtgaacaagacctttcaggagttggctgtgttccatgacctggagggcatgtgggaagaactcagcccccaaatttggaccttcatggagaacagccaagagatggaccttgtccgggtgagtgactctcttctcggatttgcttgcttgatctagaaaagatttctggacatcttcccagaaatccctgagatcacagttctgtaagttaaagcaactgagatcagctgaagccacacagccaccacttctgtagaagcaaaggccttagtgcagtgatagccctgggaatgccagcatcgctgtccatcatggtccagtagcagttttgcacaaaacccagtgaggatcagaaattggagtcttgcaaagaaatggcacaaaacccagggaagatcagaaattggtgcttgcaggacactagagtattttcatttggtctccagtcactaagataggcacagtatcttctttagcctgccatgtctcagaaggaggtttgggaacagaagcgtgatctggcatgcggacaggtcagggatactggttctccaggcacagagagagtacagcatcgcagccactgctgtggaggggaggaaattgcccttaacatatagggggcacttgaaagggaagcatgctccagacacaaccaggttcaaagagagagagagagagagagcagtctggaatgcagtgtctgtcgcctttgcatcaacagaaaagccatttaaccacttcctctgggcctcagtctcagtcaggatcattagacaaagtcttattgccatggcgaggaagtccacttccttttatttcttctgccattaagaagcaagggaggatttttgccaggttactggaattgaatctctgtgccctgagggttgctgggtttttagaggctgcacttctttgggagtttaggggtgctctaggtcctcttgggggacaggttactgatcaaagagcatctggagatgaaggaaccagagcctcctttgatacagccgtgctgttacacctgtgcagaatgcttaacttggagccttggtacacacgggacgtgagtgagaaaaccaagagcaacagtcttatgcattcacggcgagtcttatgcattcacggcgagtcgtggcgcaagttggcactggcggtgcattgtgtgcacgctactctttcttttctgagggattcgtgggatgctctcacaggacacactgcagtgtggaccctaggcctgctttccttgccatccatattatctacctcttgggattgttctgtgtttgacagtaaagggattttgaattgggcatatgtagatatttccttacacttttttttaaattaggtattttcttcatttacatttccaatgctaccctgatagtcccccactcccacttcttggccccggcgttcccctgtactgaggcatataaagtttgcaagaccaatgagcctctctttccactattggccgactaggccatcttttgctacatatgcagctagagacacgagctccgggggggtcactggttagttcataatgttgttccacctataaggttgcagacccctttagctccttgggtactttctctagctcctccattgggggccctgtgatccatccaatagctgactgtgagcatccacttctgtgtttgctaggccctggcatagtctcacaagagacagctatatcagggtcctttcagcaaaatcttgctagtgtgtgcaatggtgtcagcgtttggggactgattatgggatggatcctcgggtatggcagtttctagatagtccatccttttgtctcagctccaatctttgtctctgtaactccttccatgggtgttttgttcccaattctaagaaggagcaaaatgtctacactttcgtcttcgttcttcttgagtttcatgtgttttgcaaattgtatcttgtatcttgagtattccaagtttctgggctaatatccacttatcagtgagtacatatcatgtatgtactcactttttaaaaacacacttttttaaaaacaacatcaacaacaacaaaacaaaaagcagtgtctcgcggtgtagttcagacttgtctgcaactcactatatgccccagatgacctcaaattcatggccatcctcctgcttcagcttcccccagagctggaattccagataccaaccactgtgcctgggcttccctgttcttagatcaagggtttactttggaggctgcagttgttcatcgggtcttggttcttaagggacaagtccttacaaacatgtggtggcgttcactagggatgcatatgtaggggaatcttgagagtgtaacagaagtgaagtagcctggaaggaaaggcctgggaggctgtaaggatccttatatttagagggggagagcagatggttttaagcaagtggagatgttgatgcggtattctagaagaaagatgggtgcaaggctgagacggacctcaacagagattgaataggtgagtggcaagggctgagtgcagaagaggaggcgtggcagcagcttaaggtagacaggcaagaagaggatggtacaggagagccctgacttttacctggacaggcagggggtagcgagagaccaacagaatgatggctcctggggtctgttatacagaggctgattggcatggggttaatggtaaggaattgccaccctgtcagtggaaactagggaatctctatcctagcatcatacagcaacaattttaaagaagtcatcatgggagagaaagcgttattactgaaataactgttattgcaagtaatttggaatagactagatggtatacagtaaaggagtagttaatgaaattgtaggagatacactctgtaaaatcatcatgttatcattaaaataacagaaagccacggggttggggggaacttgcaaggttagtgaaaagaagactgatgaaggaagtcatagggttttggagatcttgctcagtagagcaaggacctccccctcccactaggaactggaaaaggagcatagcagctgtgtttccattttgcccagtcagcagtggcctcattttcctggcagtgcatcagtgtagacttttgccccagtccccctgggcaggctggttgaggaccagaatagcttacctttccacattgacaggtgatggcaggtcttcttttcttcatcatgatcccatgtcctggagttaggaaagacgatcttttatttgtattaaccaggagtattacttccttgaactaagcattaaaagtggactcagtctagagacaaggttttaatttgacatcaccagaccctatctcaaaagagagggtggtacaatgcaatgtgtattatgctgccgaaagctccttagctaccttaatatccccgaagttccattttcctgtttgtgaggtggacagtaccaaagtcacacccttggagcgttgtgtcagttctgatgcctatagatccctcagcaccctactgtcactgttgttagagttaaaacaattaacctgggctgtctggtacagtgggaaacctgtgaacttcgaagtcagaggtctgactttgtgtctcagcttatcacttagccttggccaacatcagccatgagaaacttcaatctttgtcagatgtgctctttaccatgacacttgatgatcactgttcgcatgttcttcctggaatggcagacgctgttagacagcagaggcaatgaccagttttgggaacagaagttggatggattagattggactgcccaagacatcatggcgtttctggccaagaacccagaagatgttcagtccccaaatggctctgtgtatacctggagagaagctttcaatgagaccaaccaggcaatccagacgatatctcgattcatggaggtaagggtctgctgtacacaccctttagcaaaggctagaggctttttccctttgagctgttgcaataaagatgcaggcagaaggagagcttagaatgaatgtgcagtgtcatgtacagctgtatcctgcaggcctggtgagcaagataaacaccagatgaatagcctaacgagcacataagcttacttctagatttgcttcagattgactccagcgtttctgtcctttatcttctagcttttcctgttttgaaattctagatcctaatgataataaactgctttgttataaaggcattatttatgaaacttatctaatctaatttgggactgataaaacttttaaatctttaatcctaaaaaatgatggaaaggaaaaaagctgactagattttttttcttatctgatttttagttgcttagttgctgtgactcgacactgctaagacatgttgctaagagaatagaaattgctaagagaataattccctcgcacaaagcaatacaagtaactttgagtatttcactcaaacctcagttctgaaacctggaaaactactttagagatggataggccgtgcagattaagaattctggcagctagttcctgcctctcaaaggaggctgagttctggctactgcttgtctttctggtctccagtgttctaatgaggcttccttctgtctgtcagtgtgtcaacctgaacaagctggaacccattccgacagaagtcaggctcatcaacaagtccatggagctgctggacgagaggaagttctgggctggcatcgtgttcacaggcatcactccagatagtgtggagctgccccatcatgtaaagtacaagatccggatggacattgacaacgtggagagaactaataagatcaaggatgggtaagatgaaacccggtctcgcaaagctccagaatgtaacttgggtgacttttatgactggtggtactttattaaggaatgtcaacaacaaagcagccgtggcacaacttcagtaaagttccattgccggggactgttattccaaggctataaattattactctttcctttttcacatttctgtttaaaagactaaaggacttaaaagtcaggaaaaagaaaggaaagccactaggagtcttcttgctagccatacgtattttcacaagaagaggcaaataactgataagtaagttgcagtatgttcatcaggtgcaatattattcaccagtaaagggaaaagaaaaatatacccagaaggagtgttttcattgattatttctatccaagaatttatgtacttgtcagctgtgataagaatgggagatagaaaaataggaggagtggcctaggaggtgtaggggaaccttgggtaattggattttttcggggtgtgttttgtatgagtgtttcatcacctgatgtttgatttcaggtactgggaccctggtcctcgggctgacccttttgaagatatgcgctatgtctggggcggcttcgcctacttgcaggatgtggtggaacaggccatcatcagagtgctgacgggatctgagaagaaaacgggtgtctacgtgcaacagatgccctacccctgttatgttgatgacatgtgagtgtaccaacaagccaacatctcccttagataaccaggtccttggagagagtgcgtgtatgtgcgtgtttttcactggttgagagcgaaagcaagtcaataggacatcctagagatactgacctttagcggaagaccaagttggattctgcccccgccctttgtgtttagtacttagtagagtaacttatatttatcttaatattaccctatccatttcctagctattaaagagagcccctgaaaaaattttgcacggccataccctcgaaacccaggtttcatctctgtccactgctaatgaaacctttggtcatttgagagttcagtgggcctttcataagcgaccctgatgaggtttgtcctccagtgtgcaaggccttggatcggtgccgggctcacacttttcatttttcccatgccttttctctgtgcctccagttttctgcgggtcatgagccggtcaatgcccctcttcatgactctagcctggatctactctgtcgctgtgatcatcaagagcattgtgtatgagaaggaggctcggctgaaggagaccatgcggatcatgggtctggacaatggcatcctctggtttagctggtttgttagcagcctcatccctctgcttgtgagcgctggcctgctggtggtcatcttgaaggtgaggtggactcactcactcttcttgacaaggaactcttgagtggcctgataacatagcgaagggggtaaagggatctctgtgtcctgtgtgcttccctccattctgaattgaggaaagccagagaggggtaaggacttgctccagtcagcccactgggatagttagcagctaagtagctagaacccagggctccttcacaaatttacatgcaccacactggtactgggtgggggttatttccaagattgtaaatgcaacaaccagaaagtcagatgctattaaaggtttggctctctggaggaagaggctgaggcatattttggaatatggatatttattagggattagtatgatgggtggagcgctgggtcatgcagagggagaagttgagccatgattcaacagcccagtgggatgttctggagaacatacagcttgtccaagaatttccctcatagtcactggacgggggctcatgggactcaccagggaaagggtgttccagggcctgttggctctcctagctatgacaacagaggtcctaacatctggatgtcttttacctatagtcaagtaagcccccctcttcccctgcttgccttaaagttgagtctgggcagtgaggtttttgcctcatacacaaatctgctcttaagcgtttttgcttcaatagttacttcatacaaagatgcatcttataaaagttagtgttttctaagaaagcaagagagcaaagcaggagaatctaacatttgtcctaatagcagctactatatattacatatgagcgctcactgatgccaggcaccggtcagaggacatgctgtgaactccgtcagcggagccttcctacaataacccattgagtgctcagggaaagtcagagcctcactaaaatacccagggacggcagaatcaagatttattggcatgttgttctgaaacaaactcttttctcatgctctggtatccgagggcaaggacctaagccttgtgacaagggtagggatcctgtggccagtgtgtgggaacggactaagtcagccgggtgttgacagggcctggttcagtgtccacagtgactaccgatgagctcagagctcagaacttgggatgagaggatgaatccacagaacttgggatgaatgaagactctgtgtttaccaggggaaagttcaggttgcctggcctttttcctaggcttttggagagaaaggatgcgtaggctgttgtctcacacgacttttttcttagaggcaatagttgtccttagacaaggagaagccaaattccttgctctctgtgagagacggagaacaaaattatccactaagatcaagtcgaaagtcctggactttgtccttaaccataattctgccgtgatttttcatgcatagtctctccagtaagttatttcacatgggcttcatgtcctcatcagaaagtcaagcacaagggtttccctgcgttagctctgaaagaattatatgtcaaaaccagcattaagatcacgtatgtgagccgccgggcttgccaaggctacacgtttatccagactcttcctctccagttaggaaacctgctgccctatagtgaccccagcgtggtgttcgtcttcctgtctgtgtttgccatggtgaccatcctacagtgcttcctcattagcacgctcttctcccgtgccaacctggcagcagcctgtgggggcatcatctacttcacgctgtacctgccctatgtgctgtgcgtagcctggcaggactatgtgggcttctccatcaagatctttgctgtaagtaactctgatctctctgcagaggttgtagtcctggtgcccctccacctccccagggtgttggataatcctgtctcccctctggctaagttgtttctcctttgcccctagagtaaatactaggttggatttggtttttgtcagagatcatcagattgtgccttgaactggttggagataaatgacattcagaaatggatctagtttaggcagtaggtaccatgtccaccccttaacttctagctctttggccataaaagctcacagcaaggtcatgtccatggacagcttgagaccacaaatggttcattcttgtcccttgtctttcttttatccattgtgttgtttgacttgggaaatattttccagactgaaaaaaaccaaacatgacttaccctcccacaaatccctgaccaggacattttagtcttttgtgaaatgtaggtgtgtagtctttaagcaagtgagaataccaataaaggccactcactatctgccctgctgggtcactgataacgatattaggctctcaggatgctccaagtgctgaaagcttgagtctcctagatatgatgccttaaagcggcttctctgatcctgaatattcaatgactgatcagtgaaaaaagtccttgatgaatgtcagctggacggggggaacaggatcgttgagccttgtaatgtcttgggaagcatacagttctaaggtctcacctgctctcgtgcatacatttctgaaacgtgtctgcataatgagtgcttataaatgaaatcattttctatgctgcaagtgagtccgcttctccaaagggactctaggagaatatttacgtgccttataattgatgtaatttgcaaagtcaaacttctcaaggtggaatttacatcagaagagaaaaatgagagaggcaaggatgtagaccagttccttttgcctctttctctcagagcctgctgtctcctgtggcttttggattcggctgtgagtatttcgcccttttcgaggagcaaggtatcggggtccaatgggacaatctctttgagagcccggtggaggaggacggcttcaatctcaccactgcagtgtccatgatgctctttgacacctttctctatggcgtgatgacatggtacatcgaagccgtctttccaggtaccccaggcttccatactgctttggctgactgaggggcagagcaactttcggcctgtaggttcttcctttctttgtgttgcagttgctgaaggacgagggagcgccctgggaattggcttgggcttttagcttatgaaaaacaaatagtctaaggaaaggcacttgtgttgaaagcatgcatgttactggcattgtgctacacatctcttgagcccagtgtgccaggtgctgagcaaagtactttatacagactctggttcggaaggttactctgggctgtttgctaaggtaaacagtttctaaaagagagagctaactgagagtttgagggacttgcctaaggtcatgggtctgttaagtgtcagtgcttggagatgacctcagctgggctatactgggtcagagtctggcaggttcctctcagtactgactgggttcttaggactatgtctccagaagaggaagccctaggagaccatctgtctcttaactacaggttataagtaatataatatattgggtcttagcccttgcctattgcttaagggaaattagtattcaccaaaaattaattttgatgctttcttacccttctttgccaagtacaacagaacaggaaccctctttaggatacatttctgtctgagatcagattttaggggaggactcattttcaccctctgaatctcctccaaggaaacccatttgaaatgttttttaaacccgtatctgaacttcctccattgaccatgcaatttgcatgtatattctgagattcaaactcttgagtccttattttttggggtaagtgaccttggatagggctacttgtccttcagtttgctcatctctaaaatgaggttgctgttaccacctggggagttgttggaaagctgtggagaggtgcagaatatatgatctgcccagtagatttcagcaaaagttagccgtctccctccagcctattcctttctcatagggttggtcaaggagaaagaggatttggctagacaatgtcagaaatgctcagattgcaccagcttgggtcatacctgtgttatttgtgctttgctttcaggacagtatggaattcccaggccctggtattttccttgtaccaagtcatactggtttggtgaggaaattgatgagaagagccaccctggttccagccagaagggagtgtcagaaagtaagtaccacttaccagcactctcccacacctaatgctgctgtggccctgccagagcagggcatgcctcctacatctaacgtgatcccaaaaccacaaccacggtagaaaaaccccatgcagtccaccctctccaaatgcacttcttccattgccgtcgcatgcacttaagggaaccctatctggctcctgaggaacagttctaggaaagtatgttttgatcagtgtaaccatctttttcccatcttggataattgtgctattctgtgaatccaagaggaataactacagttagccatcactgtgggcctcatctctctgcctgccttgctggggtggtctatgccagggaatctgtacgtgaatgccagggggctgttatagatgcagcttgtgcttcgtaacttcccatcctttcttacacagggcactaatcccctcttagctcctgactggaggtagaggtgcccctgttcttcccagggtttctgtttgtgtctttgttcttggtgtggcttccttctctattgtcagtggttcactttcttcctgtgaggtcagtagacctgcttccttcctacatggtccatagtctgctacctcctacattgtcagagctgcttcccctctacactgtcaataggcctgcttcctccttatgctgtcagggtctctcttatttgcccttcctcagatcttcagtggttagcttttggtacaccctggtgtggatagcaggcaatttttaaaattttattttatttctttatttattcactttacatcccactcactgccctcctcttgatcaccccctccccctccctttttcctctgagcacatgagagcatctctgagtatcctcccaccctggcacttcaagtctctacgaggctaggtgcctcctctctcactgaggccagacaaggctgcccagggagtagaacatatcccatgtacagtaaacagcttttggaatagcctccatgccagttgtttggtacccacatgaaggccaaattatttttgtttgtttgtttgtttgttttggtgagtccttttctcacttggtataattcttttgatttccactcaaattgtgatatatttaattcattttttccttaatgagtagtattgcacagtatggacatccatgatacttttagatatgtttttaaaatggctgttggcatactgtattttaattgtttgtgcagcctttcttcatcaaaagactaatgtggttttttttataagttcattgctactgtcagctcacgtgttccaaggggcttaaaatatttcatcttgtgtttgtctacaacattaaaggttgagcatagacagaaactagttctaaaagtctaagcatagacttttgtatttgtgtactctacggatcagggcagtgtttcctgtgggatcatctctgtctcctttcttttgtcacagtctgcatggaagaggaacccactcatctgaggctgggggtgtccattcagaacctggtgaaggtttaccgagatggcatgaaggttgctgtggatggcttggcgctcaacttttacgaaggccagattacctccttcctgggccacaatggagcagggaagaccaccaccatgtaagaagagggtgtgactctcccaagatctacctcaggaaatccccacttagaaacatagacctaaggaaattgaattggtcgcttggctaagagtggagcatgatgggaaggaatgtgtcaatcacgagaatgctttctgaggtctagattttgctaggtcttttcctttagtcttttccttttgatgagctttcccatgcaatactcagaattcctcagctttcttggaatcttgaggtttctgaacttgttggttcagaaatttgaagcatgagactagaaagaaagatcaaacaagctagaggaaaaaggacagtcccccaaaaaaatctatctccaagcagaggagagaaggcctggacagctctctccctctgccttcccagggacctgtgaggacagaggaagggctatagaatatcatagtttgcttgtggtttgtagtgtggtccctctgccattccagaggttgatcttctcggggtgacaggctttcttcttcaacataaaaccagtgtgttatgaacatgactgagatactcagaaattctgttatgcaacacactcatttctttcttttaacagtacgttcttgtttgttcatttttctgtacaagatgttaggcatacaaaatatgttttgaggagtacatcctggtgcaaattaagagtgtcatttttttttcagatgctcttagcaaactcctcttcctaagacataggcttatgcttacccactcactaaaacaaatggcctctgctccatgggcatctgttagattggattggagtagattagattagaaaggaaagaatcatgttaagtggtgtgatctgttctccttgcccaggctctgcagccctgaatagtgaggctgggtcctcctgattcttgagtctgttattcttgtcctcaggtcaatactgactgggctgtttcccccaacttctggcacggcctacatcctggggaaggacattcgctcggagatgagctccatccggcagaacctgggagtctgtccccagcataatgtgctgtttgacatgtgagtagcagaagtgcacagagaggagcaccacccccactcccacacttcccacccccaacccctcaaccccctctgggacctgggagtcctggtggtatgagtagagtattactagagaatttcccttttttgggtatggagtggtagtaggtctttcctttcctgacacacaatgacaagttgccttttaatttcagggaaaaaaggtgaagttggtgtattggctgatgggatttagaaagccatgttctctgttactggattggagggtgtttatttgtttgttttgttttatttttagctcagccatcttcctgatgcattcctccttgctctagtttgtttttggttgctgtgataaaacaatgaccaaaagcaacctggagaagaagaggtttatttaattttataattctttggtcacagaccatcactgaaggaactcagggcaggaacctagaggctggagctgaagcagagacaacagaggaatggtgcttagagccttgccctccatggctaacttaacttactttcttatacagcccagaatcacctgcctagggaatggtgccacccacagtgggctaggccctcccacattagcctctaatcaagaacatgctccacagacatgtctataggacaatatggtagaggcagttcctcaattgagggtccttcttcctgagtgactctagtttctgtgtagactaaccagcgtattcattaaggcatggtacaagaacctcaaaagagagttggcacaatggccctgtgttctctgctcaagtttgctcccacccaggttgtcccaccagcaagttggatcctaaaggagccctggtagtagagcagaggaaggcctgagctctctggtggaggaacaaagaatgtcctgagccctctgactgcaggcaaagcctttctttccactttgtaggttttaaggtccctttttctaaattcaatggcttggacctcccttactttagaacttgagacccattgaggttcattcacattagtgaatgctgagctaacatggtcacaaaaaaaactgaatggagaacctggaatttaaagttttaacggcctggtgtcttgtgatcaggcctgttgggtatatccttatatatgcaccattcattaccatgaattctcccttctggttgccttttttttttaaagaaattgagtgctttttaaaggcaagaacggtgtggaagagaggaaaactgtgccaaggtacatccatcctactgggccccgagctgacctgcccctctttcccccaggctgactgtcgaagagcacatctggttctatgcgcgcctaaaggggctctcagagaagcacgtgaaagcagagatggagcagatggccctggatgttggcttacccccgagcaagctgaaaagcaaaacgagtcagctctcaggtgagccccggacaccttcctttccttccttctccagacaagcacctagagttcaagcctggatgtttggtgacagaatcctaaccctcttatgtctccagatgggtacttccagtcatctctcaccacgccttacccccacttaccatttgaggatgtgtcttgctctgtcttgtaggtgggatgcagagaaagctgtctgtggccttggccttcgtgggtggatccaaggttgtcattctggacgagcccacagccggggtggacccgtactctcgcaggggaatatgggaactcctgctaaaataccggcaaggtacatgctgttacttatttccagtcatgacccagggtagagaagggctcgtgggaattgtggctgattgtgttagttgcttctcaagaaaagttgggagcctccttgaagctccgtttctgtcctgctgtgcaagattcttgtttgtttgtttgtcttgggtttttttttttttttccgagacagggtttctctgtatagccctggctgtcctggaactcactttgtagaccaggctggcctcgaactcagaaatctgcctgcctctgcctcccgagtgctgggattaaaggcgtgcgccaccacacctggctttgcaagattcttaagacgtatacttcattatttaagggcctactagaagagcagaaagggtataagcatacacatacatattgtagttagaccatgtccttgttcatgttggccatgactaatgggaatgtctgtaaacttcttagcacacttgacggagcaggatcccaaataaatactgctctcctttttgtgacaattgtaaactgccatccccccaagccttgccatcctggggtcacatctatggaggttaaagacctccccatgtctttctcatatgtgacatctttgccgtttgtgccactttgatcagtgagaactgacaagtcccaccgtcccgtctccttgtctccttgtgtttgtgcctggcaggccgcaccattattttgtctacacaccacatggacgaagctgacatccttggggacagaattgccatcatttcccatgggaagctgtgttgtgtgggctcctccctgtttttgaaaaaccagttgggaacgggttactatctgaccctggttaagaaagatgtggaatcgtccctcagttcctgcagaaacagtagcagcaccgtgtcttgtctgaaaaaggtgagcagccatcttggggctgggctggtgtggggatgaggcagccagggcttgtttccatagatggcttgcacgttggcgccccacgctgctaagattaaggcaacattcccctcgctttgtgggcctgttgcagtacatcatggttcctgtgtggaaggccaggagacctctgctcccgccacactagttctagcccagcccctttatattccctctgcaagtgccctgggttatggagacaagccctttgagggctttatcctagcaaagaaaagagaacttgccaagaggtaagagtagccttgctacaggatgccccgccattcctacctgctgccttaaatcttactggtcttgactttgaaactatgaaacaccaaatatttactagatattgattttaaaccctcccatccccttatgacctgtgggtttagaaaaaaaaataatgttaacagtacatttttggtctgtttatatattttatattttccaagtgtagagcaacctagggaagacaggattatgtttataatctcagatgaagggagtgaggcttgtaggaactgtagcatattcaaggtctcccagcaaggacataaaagcgaggaccagaatcctggatctggtttgttatgtgtttcttacatgctacatgtttgagatgtgtttgtgtggtcagtcacagcaggccacctacctaccctgtctcctacctgatttgaactcatatccatttattttcctgttaactggagccgaggcctcattcaagtgtggtctgaagtgtagcatagcagcctcagttgggaattcattacacacatgatgacttgggcccccgttcagacctactggatccatctctgcatgttaataaggtgcctgagtaactgaatgcatattcacatcgaggaagctttcaattagctaagtgttcaggtaaatcccacgcggggacagttggcaaatgaccagtggcagcattgatctgtggccacagttctgttgacattcagtttgctgacttctctcaccctggtcagtgaggccgtccatatggagcacactcatggcagcagtggtctctgaagccatggctgccagcggcacacttcccagggaaagctttctgctctagttttatgccgtagaacttcctggatgctctgtccatcaaaggtggtggtggcggctatgcccggtttgacccctgacccgttctcacctccttctttgtcatcaggaggacagtgtttctcagagcagttctgatgctggcctgggcagcgaccatgaaagtgacacgctgaccatcggtaaggattctggggtttcttattcaggtggtgcctgggctccccgcagctgggcagagtggaggcagaggaggagaggtgcagaggctggtggcgctgactcaaggtttgctgctgggctgggctgggctgggtggccgtgggagtggatgtagcctggtggtggcttggcctaacacttgctggggagcatggggcttggtcttggggctgggagggcaggattccagagaacagatgtgactggaagtctggggaataccttggggggcgggggagtggatttagccagatgctggatgagatgtagaaggccaagccagttggaagggagttgaactccacatctaagaatggtgagagcccaggagattagggagaacatttcaatttccctcgagcagtgcctatgagagactagtaccaccagtggcatatggaataaaaatatagagctgactgtcccaacagctggctttttccaggaaggtttctgcttccacaaactgtttgattagtcatctcctgaggtaaatcatggatagcctcatctgaaagttgacagaagggcagggtcttatatgctttctaaactcattctgttgaagagtcctggtacagacacattagacacaagacacccatccatcacacacctagtgactatcagtgggcttaggttttgtgacgtaagaatgagttaagagacagtctttgccctcctgctagagacgaataagccaatgggtttggcatcttaggacgtacggtatatacggggtgcttctgagctgttgggaaagggagaagcaagctggccctttctgtggagtctgtgatgactgaacaccttcccactctggtccctgcagatgtctctgctatctccaacctcatcaggaagcacgtgtctgaagcccggctggtggaggacattgggcacgagctgacctatgtgctgccgtacgaagccgcgaaggagggagcctttgtggaactcttccatgagattgatgaccggctctcagacctgggcatctccagttatggcatctcggagaccaccctggaagaagtaagctcaacaatcccaaggccagagaggccacttagcctggcaacaagatggcaatagagttggttactggaagtttaaggcattcgcatctgggtaatgttagcccaagttaaacaatgtaagagcgtaggtagtgggagacagcagtgtgttggagtgttaggattgctccctggagtgaatagtgttgtggccgggtgacaacactcacacatagtaaatgactgatagttatgaccagtcgactggagccaggtgctgaacttgatgagtttggtgtttttgttttgtttgtttgagatgaaacttgacgaacagcatttctcccatcctttgcattcttccaaatcatcccttacacttctccttgctcaccttcaaactttggcctcgtttattttattatcattattatcattccaagtagcagtatctgtattttatttaagatttatttaatctattattattatttaatctgttattactattggtattttatttgtttaagatttacttatttgagtacactgtagttgtcttcagacacaccagaagagggcatctgatctcattacagatggttgtgaaccaccatgtggttgctgggaattgaaccaggctctctgtcagtgctcttaaatgtctgaataatctctccagcccctgtgttttattttttttaaataatatttttacttattatttgagactatattccagaatattaatggtcttttttcagttccttccagatccctcatccttacctctctacctacccaacttcatattttctcttttaaaaagacaaaataagttcatgggatctatttgtgttggtggactgctcctgggtgtggggtgtggcctggagtgtggtcagtgtatctgtgtcactccattggtggcctttgttttttaaatattgaaggctcattaatgatcacagcaggatgagaattaataatgatgttgatttaagattatgaatcagaggtttggggcttcaaagcccaggtaactttcctatgtagcaatgcttctctttagagatacaacatcacaagccttcaggcctgggacggctgtaaacattgtctgccttggctggttcccagggtagattgtgcagtagagtcatctgtgatgacagtagagatcctaaagctcctgtcttgcgcctttgagttgggatttctgtagacatgactttttgagcttctgtcacatgcttcctacagagtggtctgtaggcgggcttggaaatcagtgacttcattcagatgtccgtctactataatatttatttctagtgataagaagctcatttcctcgtcgtttgtcttgcatgagtgatcccagtgctgtcctgctcaaaggtctgggagcacagacctgagaaaagtgacttgcctcgttctctgtagggtcagcatgaatttcatctacacacataatgtactggtttgtttttgaaagagttgcctggactgatagctgtcacacgtgaggagatgttttctgccccaaacagcttctctaaaattctgataaaattcttgttgataaatgcagcctctaccttcttatcttaagagcctaacgtgggattccataacctaatctgggaagtgataacttctttcataaaacaagtgctcacttatattgtatcctgctttaatttctcagatattcctcaaagtggctgaagagagcggggtggatgctgagacctcaggtaacctgtctgagagggctgcacactgggtaggctttctgttggctgttggagctaaccccctttgcattggtctgattcaatcccattgttagtgtatgggtttgctctgggaaggtttgctgtcttacaaataaataaaccataggattccttccttttccatttagatggtactttgccagcaagacgaaacagacgggccttcggggacaagcagagctgtctgcacccatttacggaagatgatgctgttgatcccaatgactctgacatagacccaggttcgcacgggcaggatctctgttctgttgtttgaacttgagtttgtcttttatgtgtttcttagctatctctttgatcgcctttggttaagatcacagattctaacaggttccaaagaaaagtggaaaagatgagagagccccttttccaatgtggcatgtctggtcagacatgaagaaaccctcccttatcacatcatctaatagaaggttttctcagatgggtatgagaagatgacccatccatgctctgaagctgtttatattgtcatctctgtagggtaccagtttcttgcacacctaagtgcttaagtgttgaatgaaagtgtattgaatgggtgtttgattttgaaggaataaaagaggaagttgtgttctttgacatgtatattttttaatgactgtgcccatatgtggttgagacggagaagggcagtatgaaatgaaacgaattcgtagacttgtctaagtgcctcagttagcagtcattagtttcagacaaggatttctagacaacttttggtgaggacagaaaattacctgcttttatgagtctgcctttttgtacttacttcatgtttcattgtcaggacttagatgttttaaatgtgttcactttttaccatgcatataaaagatagaagactaataaccatcatgtgccagcctacgtgaattccagttcatggaattgggcacagcttgcttctgttatttgtgtgcacatctttgcttgtcctgagggatcttcattctctgtgctcatcagatgttgagaaatataactttgagttgaaagttgagtttttcaagaaacctgtttactcctgtgaggtactggaggcttcaaaccccagcttccaagatgactactgaagctagtagaggaaagagtagagtcgtacagagacaggtgacactgattatagccaaccctccatttgtgctgcttacagaatccagggagaccgacctgctcagtgggatggacggcaaaggctcctaccagctgaagggctggaaactcacccagcaacagtttgtggcccttttgtggaagaggctgctgattgccagacggagccggaagggtttctttgctcaggtgaggtgtgctgggctctgccttcttggactggtgaagacaggctaggactgtggtcaagatagagatgctgggccagtatgccagtgatttccctgggcttcaaattcttcatctgaaaatgagcggggatgtgtggctgttagggggatgaaacgaatttatttagaatggactttgacattacttggggaggtggctataatttagaggagatcatggcagggacacagtttagacaaaccagttgggaaaattcaactctcataacatgagagtcgccatgctgagttgtgcttggcagtgtacttattattagaaacatggtgggtatgtttttctcttaattgacgagagcgagagagctaggaatggaacaggcccattgattcccccatatcacagtttgcatgctgacttatcagttaaagacagctataaagttacttcattctacaaaatgaagaattatagagaacacgtccatgaagccctccctgcagcccacctgggcaacactaactcagagcatgagcatgaagcctgcagatctggatttggaatctggttcagtgaatcactggctgacttccctcagatccatgatgctctagtttgtgaatggtgataatgatactaacaccaccaataactacgaaataggatattaagggggctgattctcactacagtactttccagtggaattattcatccagtgataattttctatattgaaatataggaatattaaaatcagagtgattgtttggattcttatggctctggggatggaatcccagggtgtgtgagctctctactaccaagttacacctgcagccagggttaccattgaatcactgaagtttttaaagggtaaatttctcagaaaggaaggaagagatcccttagctgacccatacattatgttgttttcagagaagggatataggaaatttggggaatttcaaggaaagatttagataattatgcttttcgcagtgctcataggagagatgctggctgctgctgcttctggcgggggagttggtgtcatgttctcagtcctcagatttactgatgtcacataggacccctgcaagtggagatggaaccaggattcagtctcctggctcccagtccagggctgttcagccttctacctgagtctatgatccaggctggtttttcctcagtctttggaggggagaaaggattgagcctaaagagtcagtcactctgactctttactctgtgacattcccagcttttgcctctgttaggtgaccatagcctctgtctttgtgctgttagcatccggaaatgccttgggagaaaggggcttaattttcagtctcctttctcttcaagctgccagaaataccttggtagaactcagccccaggccttgcctgtattcctcattcctgtgttgctaggctatggggctggctagactttcaggggcttgctcttcaggcttctaaaaacgtgtcctattgtctcttccctctccaatgcctgtttatagattgtcctgccagctgtctttgtttgcattgccctggtcttcagcctgattgtgccaccctttggcaagtaccccagcctggaacttcagccctggatgtataatgagcagtatacatttgtcaggtatgtttgtcctttgtgcctcagggcagagagggttgaaacagaccaacagtgtttcgtatactgagagccaaggagtcagaatccacaattctacagtgggatgggtcttgtcatgatggttcaggctcctatacaagccaatactgtagcaaagaacaatagtaaacgatactgggaaatacaggtgaatctctgctgggcatttccccttgtattgttaggctcttgtcaggtatgctttaattcactaatcagtaaatctttcaggttaggatgttagctaagtgtgcatcttcaggcaagaatgcccctattccatactgatcctgttaaaaatcagaagataggggacttttgagaccttgtttagtacaggttttcttcagttctgatgcacgggtaggtctgtagatgggagaaagtggcagtaatatagagggacgttttaaaaactctgtgtgaatgtgtgtgtaggatatgtatagatcatatatagattgtttattagcctctattgctctagctcactttcatctcctataggtaaaagttcgttcgatccctttctagccaatgacctagcattgcccatggctacagatcatgacattggtttgtgctctaggcccattatttcttggactttttaattgtgcataccaataatcaataaaatcttcctgtctgttcttggaatatcctagctgtcagtgtcaagtggtaattatcaaagtagttttgaaatactgatcttcaatgatttttgtatgtgtgtgtgtgtgtgtgtgtgtgtatatgcacaccttcacatgtaatctctgcacatgcttcattggggacactgtatgtcaccctgatggcagatgtttgaagctccttgcaggtggcttttgtatataatttattttagtcttagaagcccattcctcagaaaacacttagcagagcgttttctgtaggaacttttcctgcctccaagtcctggtttggatgagcgactgacctggatgtctctcttgtatctctagtaatgatgctcccgaggacatgggcacccaggaactcctgaatgctctgaccaaagatccaggctttgggacccgctgtatggaaggaaacccaatcccgtgagtgacacttcagccttgagctgccttctcatgacggccgccgggttttctttctggtggtattgcctgtttcattgtgaccactgtcaggtttttttttttttttcagtcaatttttattttaaaaagccagaggataaccaaatcaatttaggaacaaataaactcttctagcaccctgtacaccaaatcattaccaacatttgtttactctgctgtatgttgattttaaatcacagtgttcacttactgaccaaatgctctccccttctctccttgaccccagctcccatacttgcgtgccatagtagactggtgtgaagtttgcatctttgcgtatcagtttctttaaccaacagagatgacatactgattgcatttttataacaacagagactttttttgtacagttgcatattttcatcaggactagttttaaaaagtaggtaaataaactcggtgatatgcccagttgactctctatgtactgaagaagcaagtcattgggacactgtggttaaaccagtggagaggtgaggtgcagtgaactggagctagaagacttagcttcaagtttgcaggtccagagagaatttatgcctgaggtccatatgcacgggcagtgcgagatagctaaggaactgtggagaatgatagagaagcacaaaaaggaacatttgaatcccaaacggcaaaggtgaagatggccagtctgtgtcagagcactgaatccgatggctatgtttataaaaaacctagcagatttggagatgaatatttctgtgtatttgtcagtttttaattattatttacttaattacttttctattgctgtgataaaacaccatggccaaggcagcttatagagggaaggactttgtgggggaggggggagaattacagttccagtgggctaggagtccatgagcctcattgtgaggagcatggctgcaggcagagggatatgctgaggcagcagcagagagctcacatcctgatccacaaacaggaaacagaatcttttgaatggcatgagtcttttcagatctcagagtctgctcccagtgacacacctcctccaacacagccacactacctgatccttcccaaacagttctaccaactggggatcaagtattcagatatcagcctttgggacggttcaaaccaccacagtatcagatgatgtgttagacaatgttctgtccctgagaaaatcaacttatgaggagcagaggtttattggtgacttgtggtgtcagagcttttggttcatagctaattggctgtgttgtttggggcccctttggggtccctagttaggtagagcatcgtggtagggatcatgtgcttccctacaatataatagctgcttatatcatagatgccaagccagggagcaaaagaagaggaagaaggcttgaggttctatgatttcctttgagtgtgtgtccccagagacatatcttacttctcttaggtcctgcgacttacatacaggctctgtcagcacccaggaacaccacaatctagggatcaagcctttagcatttgagcctttggaaaatattgaagactcaaaccatagtaggtagttactaaatatccttagtacttactagaaggacacagcttctccttaacttcaccaaaaagttaagattccatgtgaaggttttgtaggaaaggaggatgaggtaagatgataatctgggtagctgggtcctttgttggtaagctgaattgtatggattcggggattgattccagcaaaggccagatctataggagagagaactgagccgacagctggcctgcagagataaaagaaatgtccatgacatcagaaagtatgtgtgctgtctgtgcaccatggatgctctgctggaagcagtctgaaaggcagagcctcaccccaccatctcagactgaaattcaaattttaggttcctggggatcattaggatagagaattctgactaagttgctttttcaagtggtctttagtttgtctcagcctgttgtcttttaaaggtcttaggtatgagtttcataagggtaaatattttagggaagaggctttaaagagaaaatgaggaattatttgcgtaaaaagcacttgtgtgcatatttataaacacacacacatgtgcacagacctgaggtgtaaaggttgtgtccctagtttaaattgtggaatcttgaaaattggaaatatggaagagaggctagaaatgagacatcattttatactcttattttatcagtagggataaatgaaccctgagattgcaagggacttgtgattcgcaccaaacagtcagggccctgcgttgtctctgaggatgctggtagacaacctcccctttcatacagtgaccattcccactccactcagctcaagtctctgctcattatagaacatcatttggatcttgccattctccacaagactttgaacatgctgagcctaagatacaagctcctaaccatgactctgtcatggagctcctcccctcttccctcctcattgtctgagagctcatctcataaccttcttgttttcatcaaacacatacactcatttctttgcagagcctttgtatctgactgcccacgggtgctgcctggcatgttcattctccactgttcttttaaaattaatttatgtttgtgtgtgtgtgtgtgtgtgtgtgtgtgtgtgtgtgtgtatgcatgtcatgatacacatgaagaggtcagagtataacaagatcgagagattgaatccagttttggctataggtacatttatgtaccaaggcatctctccagcccattatctcaattctttaactagctgatagtttttatgttttggttgaagctgactcaaaggtctgctttctccatgtaccttcctgttgtgtttgctttatctggggttatgtaagattggatttgttgacttgtagtccctgaagaatccatgaagtcagagagtttgcattgctttctccagactcccaaagatgcagaacactgtgcagcccatagtggactcttctgtgtgtcgtgtcagcaaactggttagctgggttgagcagagctctgcgtgaccatctggagcctgttcacgtcctattttcctgggttttctgtgattcccagcttccacaggcttctgtgagagcaaacataatgaagtcaagctgtttttcaaatggtaggactaggcacatgggtcctttctaaagagcaaacctgagctctaagagcatcaaggaaagacaggcccctttcaggagagtctagaacatttgctatctccttttacagagataccccttgcttggctggggaggaggactggaccatcagccccgtcccccagagcatcgtggacctcttccagaatggaaactggaccatgaagaacccctcacctgcgtgccagtgtagcagtgacaaaatcaagaagatgctgcctgtgtgtcccccaggggcaggggggctgccacctcctcaggtgagtccctgtcggcatgactgagaagttggctcagggtaggacctgggagcctctgtgtggcagcaagaatgagtgacatgtgaagtcactcttgatctctcttgagaaaagtgagtgggttttgagagaggcgagtgagctacattgtgccagtgcctgtcacagagcatctgtaggcacagcttcctttcctggtgctgccacagtgggagctgctggccctgttaactctttgggcctgtgttttcacttcagagtaaatgggccacaaagcttaggtgtatctcatcaactctgacattctctgggctctgaggtttggagggagatctgagtctgtgtgtgtgtgtgtgtgtgtgtgtgtgtgtgtgtgtgtgtgtgtgtgtgtggtgttttgtttttgtttgtttgtttcccctgaaaatttcaggacagtagtctaggttggagggtggggacagggaacttttagtggatgtgaaaacttaaggaagtcatgcttgtcactttaaaatcatctggcccactcaccaacatgactcgaaagtatagaagaattcattgggcagtttatgatgctcttccttaagtattcaggtgatgtggagaatcccatctagatattcaagtgaatactttcctggagataattttggcttggtatgagcgagggacaagtgccaatggtcttggtggtgactggctgaggttcttgcgtaggccctggggtcctattgtttttgtctgttttctgccctgattcttacctgtatgatacgtgagcttggtttctatgtgatgacagagaaaacagaaaaccgcagacatccttcagaatctgacaggaagaaatatttcagattacctggtgaagacgtacgtgcagatcatagcaaagaggtatcgtcctgttgaaacctggcttgctgcagatgtagacttgagcggtagggaaatggacaatcatggctctgtgggaaatttagcacttgatatcagttagacaagatgatacgggggcttgtgagccttgaaagttcagcttagagaacgaggctgcctgctttaggctgaaaataagtgacaaatgtggactcagatttgaattctgacccattagtctcataacatcttcgcttatatgaattttaatttttattttacatttgatgttagtgttgcactcttaagttcgtggtgaggggtaagagagatgatacgagcaaaagcctgtagatcctctttcctgtatggctccataaacaaggtcagggtagacacagtagcctttctttcatatggagcctttaaagagacttgtaaattcctgggacatggtcatatagtgaccaatatttagtcagtgtgcagagaatatgtttcctttccataagtatggtcaggtgtccggtccataatgtttgaactaactttaaatgacaaggatataatagaataagaataggccatgcatttctcagagctgtaatgttgccacatgagagtcacaataaacagcatttagttcagtaatatctgggatggtaatgcatttatttgtgtgtctgtttgttttagacagggtctctgggtctgtaaggcatttatttatttgtctgtttacttaagacagggtctcactacattagtcctggctgtcctggaattctctctatatagattagggtggcctcagactcatagagtttcatctgcctctgcctcttgagtgcagtgctgagcgtaaaggcatgtaccaccatgcctgcatgtaaggtgggtttttacattggcttaatttactatgtgattctcattagagtaaggtttctaagacagcagacaggacatgctgagagtggccttccttacatgcatgcaactctacagcactggtcataggcctagttaaagaagtgcccgtttctatgctttgtcctcaagtaaatgattactgttgcctcgtcactatgacctctgctttctagatctgatttttggtttgtcttttctctctgcagcttaaagaataagatctgggtgaacgagtttcggtaagtcagtcccttctccccattctccctgagtcacgtcaggtctcaggagaatgatttagatgtagggctcttgaatcaagacagagttacaggtttggggactgttgccttgtgcacactcttgggtgtcacctcaccttgagggggactggggtgctgcagaccaacacaccaaggcacggttatagtagactcactgtggaatttgtgtaactcattcttcactccggaggcccctgaaatatttgatacagtgatttccttgaggaatttcagaaatcactcatgggcctcttgagacttaagaaagtaaaatgtcatgaaggaaaaaaaaacctatcctagctgtattttcccccagacagattcccaagtgtgcccagggactcaaggaaaacctttcaggcctttcatatgatgtgaggtcttggtggaaaggaaagacatcaaaagcatttgtttccaccctgtttccactgatttttccctactggattttgaaggagcagttgagagtagggaaggaagcattcttgaagtcatgagtggcccatgtggctgttccaaagacctcaaaggttttattctcaaatttccattttccaccctgccttttctccaggggtcaggtccctggagctctgagcagagcagtcataggcttacttaatgccagggaagatcacctgtctgtgatccctccctggttttcaagactgcccatcttcctgtcttcccgcctatagcatgggtgcctatcattagctctaggccttccctactgggcagcaattttgagaattaagatagctagatttcaccaggggaggcaacatgtacctatcttagccaaacgttggttctagtttgaaaaagaggtggctctccgagaaccttgtacactgtgctatctgctgccgtgagtaatggcttgggtatggcttttaatggcgagcctttcttttaggtatggcgggttttccctgggtgtcagtaattctcaagcacttcctccgagccatgaagttaatgatgctatcaagcaaatgaagaaactcctgaagctgaccaaggtacagcatccgtccagacacgggtcagaaaagtgggtctggggcctaagccacagcagcagcggtcgccatcttggtccgggacccgccgaacttaggaaattagtctgaacaggtgagagggtgcgccagagaacctgacagcttctggaacaggcggaagcacaaaggcgctgaggcagcaccctgtgtgggccggggacagccggccaccttccggaccagaggacaggtgcccgcccggctggggaggcgacctaagccacagcagcagcggtcgccatcttggtccgggacccgccgaacttaggaaattagtctgaacaggtgagagggtgcgccagagaacctgacagcttctggaacaggcggaagcacagaggcgctgaggcagcaccctttgtgggccggggacagccggccaccgtccggaccggaggacaggtgcccgcccggctggggaggcggcctaagccacagcagcagcggtcgccatcttggtccgagacccgccgaacttaggaaattagtctgaacaggtgagagggtgcgccagagaacctgacagcctctggaacaggcggaagcacagaggggctgaggcagcaccctgtgtgggccggggacagccggccaccttccggaccggaggacaggtgcccgcccggctggggaggcgacctaagccacagcagcagcggtcgccatcttggtccgggacccgccgaacttaggaaattagtctgaacaggtgagagggtgcgccagagaacctgacagcttctggaacaggcggaagcacagaggcgctgaggcagcaccctgtgtgggccggggacagccggccaccttccggaccagaggacaggtgcccacccggctggggaggcggcctaagccacagcagcagcggtcgccatcttggtccgggacccgccgaacttaggaaattagtctgaacaggtgagagggtgcgccagagaacctgacagcttctggaacaggcagaagcacagaggcgctgaggcagcaccctgtgtgggccggggacagccgaccaccttccggaccagaggacaggtgcccgcccggctggggaggcgacctaagccacagcagcagcggtcgccatcttggtcccgggactccaaggaacttaggaatttagtatgcttaggtgagagtctgtaccacctgggaactgccaaagcaacacagtgtctgagaaaggtcctgttttgggccttcttcttcggccaggaggaggtccaaatacaagatatctgcgcaccttcgctgtaagagagcttgccaacagagagtgctctgagcactgaaactcagaggagagaatctgtctcccaggtctgctgatagacggtaacagaatcaccagaagaacaatctctaaacagagtcaactataactactaactccagagattaccagatggcgaaaggtaaacggaggaatcttactaacaggaaccaagaccactcaccatcaccagaacccagcacacccacttcgcccagtccagggaaccccaacacacctgagaacctagacctagatttaaaagcatatctcatgatgatggtagaggacatcaagaaggactttaataaatcacttaaagaaatacaggagaacactgctaaagagttacaagtccttaaagaaaaacaggaaaacacaatcaaacaggtagaagtccttacagaaaaagaggaaaaaacatacaaacaggtgatggaaatgaacaaaaccatactggacctaaaaagggaagtagacacaataaagaaaactcaaagcgaggcaacactagagatagaaaccctaggaaagaaatctggaaccatagatttgagcatcagcaacagaatacaagagatggaagagagaatctcaggtgcagaagattccatagagaacatcggcacaacaatcaaagaaaatggaaaatgcaaaaagatcctaactcaaaatatccaggaaatccaggacacaataagaagaccaaacgtacggataataggagtggatgagaatgaagattttcaactcaaaggtccagcaaacatcttcaacaaaattattgaagaaaacttcccaaatctaaagaatgagatgcatatgaacatacaagaagcctacagaactccaaatagactggaccagaaaagaaattcctcccgacacataataatcagaacatcaaatgcactaaataaagatagaatactaaaagcagtaagggaaaaaggtcaagtaacatataaaggcaagcctatcagaattacaccagatttttcaccagagactatgaaagccagaagagcctggacagatgttatacagacactaagagaacacaaactgcagcccaggctactatacccagccaaactctcaattatcatagagggagaaaccaaagtattccacgacaaaaccaaattcacgcattatctctccacgaatccagcccttcaaaggataataacagaaaaaaaccaatacaagaacgggaacaacgccctagaaaaaacaagaaggtaatccctcaacaaacctaaaagaagacagccacaagaacagaatgccacctttaacaactaaaataacaggaagcaacaattacttttccttaatatctcttaacatcaatggtctcaactcgccaataaaaagacatagactaacaaactggctacacaaacaagacccaacattttgctgcttacaggaaactcatctcagagaaaaagatagacactacctcagaatgaaaggctggaaaacaattttccaagcaaatggtatgaagaaacaagcaggagtagccatcctaatatctgataagattgacttccaacccaaagtcatcaaaaaagacaaggagggacacttcattctcatcaaaggtaaaatcctccaagaggaactctcaattctgaatatctatgctccaaatacaagagcagccacattcactaaagaaactttagtaaagctcaaagcacacattgcgcctcacacaataatagtgggagacttcaacacaccactttcaccaatggacagatcatggaaacagaaactaaacagggacacactgaaactaacagaagtgatgaaacaaatggatctgacagatatctacagaacattttaccctaaaacaaaaggatataccttcttctcagcacctcatggtaccttctccaaaattgaccacataataggtcacaaatcaggcctcaacagattcaaaaatattgaaattgtcccatgtatcctatcagatcaccatgcactaaggctgatcttcaataacaaaataaataacagaaagccaacattcacatggaaactgaacaacactcttctcaatgataccttggtcaaggaaggaataaagaaagaaattaaagactttttagagtttaatgaaaatgaagccacaacgtacccaaacctttgggacacaatgaaagcatttctaagagggaaactcatagctatgagtgccttcaagaaaaaacgggagagagcacatactagcagcttgacaacacatctaaaagctctagaaaaaaaggaagcaaattcacccaagaggagtagacggcaggaaataatcaaactcaggggtgaaatcaaccaagtggaaacaagaagaactattcaaagaattaaccaaacgaggagttggttctttgagaaaatcaacaagatagataaacccttagctagactcactaaagggcacagggacaaaatcctaattaacaaaatcagaaatgaaaagggagacataacaacagatcctgaagaaatccaaaacaccatcagatccttctacaaaaggctatactcaacaaaactggaaaacctggacgaaatggacaaatttctggacagataccaggtaccaaagttgaatcaggatcaagttgaccttctaaacagtcccatatcccctaaagaaatagaagcagttattaatagtctcccagccaaaaaaagcccaggaccagacgggtttagtgcagagttctatcagaccttcaaagaagatctaactccagttctgcacaaactttttcacaagatagaagtagaaggtattctacccaactcattttatgaagccactattactctgatacctaaaccacagaaagatccaacaaagatagagaacttcagaccaatttctcttatgaacatcgatgcaaaaatccttaataaaattctcgctaaccgaatccaagaacacattaaagcaatcatccatcctgaccaagtaggttttattccagggatgcagggatggtttaatatacgaaaatccatcaatgtaatccattatataaacaaactcaaagacaaaaaccacatgatcatctcgttagatgcagaaaaagcatttgacaagatccaacacccattcatgataaaagttctggaaagatcaggaattcaaggccaatacctaaacatgataaaagcaatctacagcaaaccagtagccaacatcaaagtaaatggagagaagctggaagcaatcccactaaaatcagggactagacaaggctgcccactttctccctaccttttcaacatagtacttgaagtattagccagagcaattcgacaacaaaaggagatcaaggggatacaaattggaaaagaggaagtcaaaatatcactttttgcagatgatatgatagtatatataagtgaccctaaaaattccaacagagaactcctaaacctgataaacagcttcggtgaagtagctggatataaaattaactcaaacaagtcaatggcctttctctacacaaagaataaacaggctgagaaagaaattagggaaacaacacccttctcaatagccacaaataatataaaatatctcggcgtgactctaacgaaggaagtgaaagatctgtatgataaaaacttcaagtccctgaagaaagaaattaaagaagatctcagaagatggaaagatctcccatgctcatggattggcaggaccaacattgtaaaaatggctatcttgccaaaagcaatctacagattcaatgcaatccccattaaaattccaactcaattcttcaacgaattagaaggagcaatttgcaaattcatctggaataacaaaaaaccgaggatagcaaaaactcttctcaaggataaaagaacctctggtggaatcaccatgcctgacctaaagctttactacagagcaattgtgataaaaactgcatggtactggtatagagacagacaagtggaccaatggaatagaattgaagacccagaaatgaacccacacacctatggtcacttgatcttcgacaagggagccaaaaccatccagtggaagaaagacagcattttcaacaattggtgctggcacaactggttgttatcatgtagaagaatgcgaatcgatccatacttatctccttgtactaaggtcaaatctaagtggatcaaggaacttcacataaaaccagagacactgaaacttatagaggagaaagtggggaaaagccttgaagatatgggcacaggggaaaaattcctgaacagaacagcaatggcttgtgctgtaagatcgagaattgacaaatgggacctaatgaaactccaaagtttctgcaaggcaaaagacactgtctataagacaaaaagaccaccaacagactgggaaaggatctttacctatcctaaatcagataggggactaatatccaacatatataaagaactcaagaaggtggacctcagaaaatcaaataacccccttaaaaaatggggctcagaactgaacaaagaattctcacctgaggaataccgaatggcagagaagcacctgaaaaaatgttcaacatccttaatcatcagggaaatgcaaatcaaaacaaccctgagattccacctcacaccagtgagaatggctaagatcaaaaattcaggtgacagcagatgctggcgaggatgtggagaaagaggaacactcctccattgttggtgggattgcaggcttgtacaaccactctggaaatcagtctggcggttcctcagaaaattggacatagtactaccggaggatccagcaatacctctcctgggcatatatccagaagaagccccaactggtaagaaggacacatgctccactatgttcatagcagccttatttataatagccagaaactggaaagaacccagatgcccctcaacagaggaatggatacagaaaatgtggtacatctacacaatggagtactactcagctattaaaaagaatgaatttatgaaattcctagccaaatggatggacctggagagcatcatcctgagtgaggtaacacaatcacaaaggaactcacacaatatgtactcactgataagtggatactagcccaaaacctaggatacccacgatataagatacaatttcctaaacacatgaaactcaagaaaaatgaagactgaagtgtggacactatgcccctccttagaagtgggaacaaaacacccatggaaggagttacagaaacaaagtttggagctgagatgaaaggatggaccatgtagagactgccatatccagggatccaccccataatcagcatccaaacgctgacaccattgcatatactagcaagattttatcgaaaggacccagatgtagctgtctcttgtgagactatgccggggcctagcaaacacagaagtggatgctcacagtcagctaatggatggatcacagggctcccaatggaggagctagagaaagtacccaaggagctaaagggatcttcaaccctataggtggaacaacattatgaactaaccagtacccctgagctcttgactctagctgcatatgtatcaaaagatggcctagtcggccatcactggaaagagaggcccattggacacgcagactttgtgtgccccggtacaggggaacgccagggccaaagggggggagtgggtgggtaggggagtgggggtgggtgggtaagggggacttttggtatagcattggaaatgtaaatgagctaaatacctaataaaaaatggaaaaaaaaaataaaataaagtcatggtaaaaatgaaaaaaaaaaaaaaaaaaaaagaaaagtgggtctggaattgctggcacacaggtgtagtgatactagtctgaacaggtttgtatacaaagcagttcagataaaccagactactcatacccaacacacacacacacacacacacacacacacacacacacacacacgaacatacgtttctgaaagtgtaagtcaaaaatgaactcagagattaaaagctcttacaaaagccaagctgctaagttagctagtgggcaaaataaattgaatttcaaacagtttcctaaaacagccattggctagacaggaaatgggaaaaatgagttcattcactttccatgttggttggctgggctttaagagcagctaaggccatatttatttctccctatctcaggttgcccaagttgaaatggtcaggtgatgtggactctggggttttgcacagtagtcatgggcctagggcgcttaagccgtaggatgcatctgcatgacctatgggttttagttcttgggatgatgccaagagactctgaagaatcttggaaatttaatttactttcacttatgagtataggtggctagcctgcgtgcatgtttttatactacgtgtgtggtctggtacccacagaggccagaagcgtatatttgctcccttgagactagagttacagatgcttgtgagcccccatgtgggcgctgggaatcgaaccttggttttctggaagagcagactgtcctcttcacctctaatccatctctagctccaaattcttgggattatttgtgtatttatgtatttgtgtgtgtgatttaggttatgtgtgtgtgtgtgtgtgtgtgtgtgtgtgtgcgcgtttgtgagagagagagagagagagcgcgattttttcccatgacttgtgacttcatggcaacattagtacggtggattctagtgacttggtgctcaggaactacatatgcattggctttagatttaatttcagtgactgaagaggaagttgtcttggttgatacagggctgtctcattgcttgctgtcaccccttgtgtgtgtgaacagacacctgaggcaggattctgttgtttacaggacagctccgcagatcgcttcctcagcagcctgggaaggttcatggcagggctggatacgaaaaacaatgtcaaggtacacccctgcctgtgttctgccagcttcttgctaaacaataatcccgtgttccttgaaatcttacgggcaagtaactagggacattcgtggtagaaaagggcaaactgttagtcttaccagtgacatgattcagcatagttagtgactaagagaatgtgttttgccaccagacgtaacttgtaaactgctgtggtctttgccttaagctacctgacctgtttaagtatccgtttcctgtgcagcaggaaggcggcaaccatggctgcctctcactcgatgtgggtaactagttaaaagtgtaaaggtcttcacctagtccctcggccagtggttggtggatcctgaatctataatgcttttgtttggtgtgtcactaagtttctgaagtttccatgcacgttttgtgcatatacgcttacttcttgaagaacagtttggcagtattaccttgagtttggtctgttttacttcaggtgtggttcaataacaagggctggcatgctatcagttcgttcctgaatgtcatcaacaatgccattctccgggccaacctgcagaagggagagaacccgagccagtatggaatcactgctttcaaccaccccttgaacctcactaaacagcagctctcagaggtggctctgtaagtgtgtctaaagggatgggcgtgaagaccttagggtgaccgagcaccaggggaaaagaccgcaaagctggttgtaacagctagtaataattatgttgtatgagcctgagttgatccagactctgggcagaaaatgattggtttatgcactgactggcaatctttcttgacttgaagaaggaagaccagatatgtgaaaatcatcacattgataaactcacatgtagggaattaaaattgttagtgaaatccaagagtaattactacttcatttgcttgaaaatgaggtttttaaattcagtgaaacatgcatttaatagtttctttcttgaaacatgtgtatgcatgtgtggcacacacacacacatgcatgtgtatactcctgtacatgtctgcaaattttaaagtcttggaataaaagaatctggatttaactttggtgtctaagctttataggtatgtaatattagatgaggtaatttgtatacatttcgtcagccagcacccagcacagagttaataatcagtatattagatcccctcttggatatgtggggaatggcactttactataaactactgtagaatattaatgttgatcatcaggatctttacaagacgttgtataatgggctttttgtacatattagatggtgttagactgatatgtaatatgtgtgtgtatgtgtaatttttttatgtcttagcctgatatatgtatcctgttgctttccacttacttatagtatagtcatatgattaacttgtatgactaacttccagattagatttctttcttgtttgaaatagtttccaagccacaccttctttgtatatgggagtttacaactcactactctaagatcagaaactggagacaaatgaccgctattaggccacacctatactttgttctgtagtttcattatgggagtagacccattttaatattttccaaatcagttttaggtttgagttgttgttgttttaacgttacttgaaaataattagatggacccctgagataaaatgtttggcgactggggttttgttccagctgtgccttggttgtccttatgtctagctaattatataccatgtccccagctgcatcaaaggttcctctgatctttactgtctcttcccttctaggatgaccacctctgtcgacgtcctcgtgtctatctgtgtcatctttgcgatgtcctttgtccctgccagctttgttgtgttcctgatccaggagcgtgtgagcaaagccaagcatcttcagttcatcagcggcgtgaagcctgtcatctactggctgtccaattttgtctgggatatggtgaggacacaggaccttctatctctgtgtgaatctcaatggggactgtgaaggcatggggctaaggaaaaacagcctgccactaaccccgggaagtatcccacttagtgtaaaccagtgtaaaataggaaaaaggagagcccgctggatggccccaggacaccaaacataatgttagccttaaaatgtaattgcacaccatgggaccatctgaccaccgtgactacaattattaccaacgattaccttactctctagaccacagttcactatcaaaggcaatcgggataggaagtcaagcagggctggaacctgaacagggagctactgcagaggccatggaggcatgctgctcactggcttgctcctagtggtaccaaggaccagccttggcttggagaggggttctgaggaaggagtgtctgggagtggtgaaaacaaaggactccaagctctgctagagacagctttccaagctgctttctctctgttctgcattctttctctctgatctgctttctctggagatcgatcttcagacaacacacacactctctagacagctgtttcttgctattctctgctgagacagtcctttcttactattctaaaaagttctctggacaatgcatcgcttgcagatcataagcccagtcttttattttatatatcaatccagtcatttgctccacgttcccttttgattatcctaggaatcagtgacccagccctttgattcttaggagacagcaacccacatgtccttttaacattggattcagagatttgcctacctttgttaagcacaaaggataagctagctgggtgggatccggtccactgaccctgtcccaggagcacgtgttcccatcaaggcccatgtcggaccagcaccatggcttgctcagccttctttcttatagagcccaagaccactaacctatggttggtgccaccagacttgggctgggccctctcctatcagtcactaattaagaaaattctatacagccagaacttatggctgcattttctcaatttagttccctcctctcagattactctagcttgtgtcaagttgacataaatctagccagaattccctttaaaaattagactacaattagacttcataaaaacccaagccagaacttctaacttatctgatgtgttttaacttagagtcagggtgttttttttgtttgtttgtttatttgttgttgttctgggttttttgttttgttttgttttgttttgttttgttttgtttttgccttactaaggaagccatttgccactgaaaactccagcatcttgtctgcccattgtcgtttatctgttttgtatcaactatactgcattgttttcgtttggatcaatatgaacgacttcatagaaccatgaaggtccaattattggcaactatacgcccttatggccgtcattaattcagagcagatctaactctttgcccaataaacgtttcccccagacgtttaaaggcaactctcagtaaagaaacttctctcgaagacgagatggtatctgagagcacccgggttctctaagacactgtacagagatgcgtgatgatgacggagataatgaaattgcatatgctaatcaagacaagctctaagacctgccagtctcctgatctgaccactccatctatcaatattcctttccaaaagcaaagccctgaattaactctgagttcaggctgtggtctgaatggttccgagtctagaaaaagctaatctttatctaaagttgccctgccttatttctacttggtaatgaaactgaaacctatttcctgtgaactgttaatcagggtcttgttcattctgtgctaatgcgcagaatcaacttgtttgaacctaatcattttttttaaactgctattaaaactggatcttgtcagcatttctttgctttcttttatcttgacgtagcaatccattcatttaaaatccgctgagtgcttactgcgtgtttgatggtgtcttgctgtgctaggcagaggtcattcagagatggaagagtgagtccttgacctcagggacatcacttggactctgtgaacttctgaccctccctgcctaagagcctgcagtctgctgcaagcatgtggctattggagtcgttgataaacacattaagcagggtgggactgagaccttctgaagctacaattcttttacagtctgccaatccactatcacctccattccatgcatgtgctgcccccctccacctctctgccagctatgaattttcataattgtccctgggtcaagtctttatttcttcattttaatgcttgaagcactgtcaggacagactgtaaaattattcccggtgtgatgaaacaattttgacattcatgttatgagtgcttatctcacaagtagattacatgtgggattgaatgcgggcagaccataatatagcattaatgatgaaacagacgcaatcatctctgggtagaataatggaaactcatttgcctcctgtgaaattgaaatgactctgcctgagaatccatccttcagtaagtttactgagcgtgacaccttggctgagctctgggaaagacagaaagggcatgcagtttataaaatcagccaagggtaaaatgcttgtcaaactgtattgtccggaattttgattaatagtttatgtggcttcattaattcaaagttattctccaacatctgtatctgtcctttcttgtgggatggtggtgaagacttggggtttgttgtatatctgacttaggggccaacttttattttctcttttagtgcaattatgtggtccctgctacactggtcattatcatcttcatctgcttccagcagaagtcctatgtgtcctctaccaacctgcccgttctagcccttctgctcttgctgtatgggtaaggcaactctgagtggagctctccccccaggggacaaggcatatggtacccggtgctagagggagggcagaaggcgccagtggatgcttacgtttgtgtctcaccaggtggtcgatcactcctctcatgtatccagcatcctttgtgttcaagatccccagcaccgcctatgtggttctcaccagtgtgaacctcttcatcggcatcaatggcagtgtggccactttcgtactggagctgtttacaaacaatgtaagtgtcccattgggcagagcatgtcccattggctggcactctgggttcaagagagtggcagttgtctccaaccttactccacttgcctgtaacatccacaccactgacctctctgcttttgcaagctgtgtccatacatataactctctctctgtcctgctgtgccttgtatttctctggtcaagtctttctggttcctttattttttcatacttctttctccttcagtgttgctttggaaaagactgtgttcattctcttctggcttgctttcctatttaggcagcatttctgggcgatgccgttcatcttcaggcctttaccatcattgcaggttttcatttttatctctcagatccatgctttgattgtctcttggatctctgttctccagttctcacagcctattggatgactccatttaagtcatttataggtaccaacactagacacattgtctttcccactagaacctattggtcctcttgccatctctgtttacttggtgacatctctgcagtttctcatacctctcttggacccatccatttgtgttgcggtttatatatgattcatctgaattctcccagtttcaaatctcataaacaagactctctgtggcccttgctcagcacatagtgccttgttggctatatattactgtatcccctcccaatgctttaaaatttcagctgagttttcccttaaaccactatactcctgtaggtctgtcttgaaatgcccttcatttgtcatgggacctgagagtgtctccataccctttaagatttaagtctaatatgaagctttcctcatctgcccagtaagatataagctttcttttctctggaccatcagagccctcagttcttccttcagtgcagtgtaagcatcctccaggctctggctcagcacaaccagcaagtaacaactttgctggatcttttctatttttattatatgtgcattggtgccttgcctgcacatattatatgtactccatgtgcctgtagtgcacacagggcccacacgaaggcgttggatcccctggagctagagttatagccacctgtgagccatcctgtagatgctggggaccaaaccctggtcctctctaaccactgagtcatatctctagctccaggggcttgatatttaacaaaccttgtcttatggggtcataatacattctgatgtaattgagaagatggctttgaaattccaacagcatgctgaaactcggatgttcacctagataggagtgagttgctttaaaaatgctaagccaatgtttcattgtggatttgtgtctggttaaaagttaccaggcttagaggtttgtttgctttcaaacactatcgctgcagagttcctgaggaaaatcccgccgctgttcactggtatctgcatccacaggtccaggacgtcagatgctttgcttcaagtccatattttagactttgatagaattgtaatgtagactgtaagtgatgtgtgtctctccctctccctccctctccttctcatctgcagaagctcaatgacatcaatgacatcctgaagtctgtgtttcttatcttcccacatttttgcctggggcgagggctcatcgacatggtgaagaaccaggccatggccgatgccctggagaggtttggtgagtaaggcagtgggaagcttcgatggcggtgtgacagttttgtaggcatcggcactctgattgctgctttagaagggggactgggtgcaggccatctgtcctcccaactgtcatgggccaatgccaacacagctgctctgtctgtcatgagtcccaccatataggtgtgtattcgtgcctctgatagcactgagataaatggcgggtgtgggggggggggttgtaaacaagaaaatcctagcatttgtttgagataaattcctaagctcactactggtgagcttgtcaaatcactggaaaaatcaagccacagctttggcaagtaggtgaggctggagattaaagagagagagagagagagagagagagagagagagagagagagagagagagagagataccctttgattctactaagaaaacctgggcctgcaggtgtgctcatatattgtgttttatgccttctctaaagagataatttattgaatctttttttctacttttataatggttaaaatatctctgtccattatgtgactattattcatttgctgattaattgagttaattaatgctacttaacaaacatagaagaggaacattttcagtttagtgatacagaggagacatgaagaattaagggatattatcctaaaaccatctaacttaagtcactaggttacattagatactgtagaaatagacatcttttgaatgcattttctaatacccatactttctgaccccccccccaaattatccaggattattggtcaacccaaacttgaattgtttgggtttgggtgggggcatgtctcattaaaaaggaaatcttatcaatcctaatgaacttacagatctaaaagctaattgactccgaaattctgacctgataccaggttgtattatagttttccaaatgaaatctcaaagtagacacctatgttactcctttttcttcttgtcatgagtcatgtttctagaaaaattgtgtgaaactgaccccccaaatgaggaaatcctttcttcctttcctcactttccttcccctccctccctccctccctccctctcttcctcccatccttccttttttttaatatgaaggaagtcctttaatatttcaagtgtgaaaaaaaaaaacgaaattttacgttaagctagcctttaaggtttagcataatattaactaatttaaatgaaaaagcatacaaacaacaaagtcacgcacagaatctcatctcagaaacaggaagtagggccatgatttctgatgcccgcccctctgaccagattatgtctgcattgtgtctcacaggggagaaccgcttcgtctctccgctctcttgggacttggtaggacggaacctttttgccatggccgtggaaggggtggtgttcttcctcattactgttctgatccagtacagatttttcatcaggcccaggtgagctttatctgagaactgttccagggacgtgatgggtgcagagaggactcacgagtcctgggtgggctgaactcgcccagttaaagggattttcccagccgtgagcatgctctgtccacccacgaagtgatggcgcggggccttgataaagtgctttagaagcttgaattttcccttggaaaagagctgaaaagattgacttttcttaaacactctttctcccaagacctgtaaaggcgaagcttcctcctttgaatgacgaggatgaggatgtgaggcgggagagacagaggattctggacggtggcggacagaatgacatcctagagatcaaggaactgaccaaggtgggcagcgactgtggaccccacagcttctcttctgttttctgcattttatctcctcactagctttctgctgaattgcttcattcatgacaacaaaacaaaacccggtgcttccccaaatgtgcctctacacaaagctttgtcagttttacttaaactacaccacggagacttcttaattaaaaaacaaaatcctactgggaatacttctgtaatgcagttcccactcttcagatttatttattgaacatacttgcattcgtgttagtgattaaaacactctaacattgtatgtcgagacaaagtgcagagaacaaatagttgattttgattttcatggctcaaagatcctctctacctccgttgctcagagagacaatctgcttcgaccctttctgaataccacgaccctcacattttagtttatggtgattgaaacattttattatagattccaacctacataatttaattttaaaatatatcactgtcttttaaggaaaaaagactcaggaataaaaagtttcagggtcagggaaaggctactcattgcggagacagagaaaggttcttggcacatctgtgtgtggtgcagccatccgatgagttctgttctgtggggagtgtggctttcagagccccttcctccacagttggctgggagagcccagagcctccaaggtgcatgatctctgtgtttccttggttgcagatctataggaggaagcggaagcctgcagtcgacaggatctgcatcggcatccctcccggagaggtaaatgcactgcgctcctgttgtgttttgtctctattaattccgaccctagctaccaaaccaaacaacagtgtcctgtaactatggaaaatggcttttcaaggcttctgtttttgtgtctgtgagaagcgatcagtcgtggagagaatgagaacctcttgtgtcagaacagaacaggtttggacgctctcaggcagtgtcagaaaacattcacatctagattacgccttgggggatccattcagggatgaatttcaagtagggtaaaatgtagattttctcctttcacgtattttttggacttcttttatgttcttagggtggatggtaggtatgcattttgaccatttggcttttttattgctctttatagatagaccttggtctcaacttgatgattcagtctttataaaaaagacccacaaacaacatggctcatacataaactctctcctctctccttctctccttccccatctcctctctgtcatacacacacacacacacacacacacacacacacacacagagagagagagagaggcaggcatacatgctctcatgatatctgaatatggaactcattggtacttaagagtgaagctctgggctccatggtgaagcacacccaggcccagggggctggttcgctaggccattcagactaagatttgggagtttgttcctgccgctcacctagtctcgcttttcagtgctttggactcctgggagttaacggagctgggaagtcaacaactttcaagatgctgactggagacacccctgtgaccagaggggatgcgttccttaacaaaaacaggtgggcaaagaagcagcctgtatttgctgccgaggttttctttctccagccttaagaaataaatgtacagttattttctgactatcttattactatagcttgtaaaagcattgaagtttcttgagttcaaaacctcttaaaatcatgtccaagttcactacctggaaataagcctgatttttacattttctttcagtttccctcttatttatccataatttacatacatatatatataatttccttgatctgagagaatagatctgtgatttttagtcaattcattgaattacatgatcacagccaagttctagagctatcccttggctccgatctgttatgcatctatatgtgccataacagagcacagctctatatagactttgagtctatattataaatagttttataatgaagattttacaatgggttacatattctaaaatctagaaactctaccaagtaaatatgtttatttgatcaattcattataaatgttgggcactaattagtttctctattcgctgtttaaatatgtccttgtagataatttctgttatttcctcagaaaattccctacatggtaaaagggcatatacctgttaaagtgccctctgtaaagtgtgtaacaattgataaagacaccattaagccatttactaatctttgtggataaagctatgtatcagagacctgttaggtggtattttcaatgtagtacatatatacagacacagaggtacacatacacctaatgaattaaaatggcacccacctactgttactacttgtagtttaccctaatagttcatacactagtgtgcatcatgccatttaaaaattgctggctgtgacctactaaatttatttcacaacctagtaatgggagattgctcacagttcagaaacattgactagagatagtcaatattattgtagagtcagaggcataatgaactcatccatcttctcctgtctcttactgacttatttttcagtagcaatctacaggagccttaaaagaatagaaattctgggaatagtgatgactccctagtctgtctagtaccaagctcctggaacatgtagagagacaataaccgtccatcctaaggtttatctcagctactgattacataactgacttggataatgtagctgtgagagagagccaggcacaatgtccatgggtaccttagttttaagtcttgagaaggctaacccaagaatactaaataagcagaaaggactgtacctatatgtcaagttcatggctatctggaggtgactgaaaggcatccatcagactggaatatgaatgtcacaatttttagataatagcaactattagtttgacaggctttttagaacctagaggttgcccctacggatttaagtaaaattatttatatgtgtattttttcctgttaacatattagaagatctataattaattaaatagaggaataagtggcagtctgcattgtatatttggtggaataagaacgtttggaacatgaatgttccaaatcagtaaatggggagcagaaggcagcaagaacccaggcccagcatttctgggacttacgtggtactgcatggtcttaaggaagactagagtatagagacacttgttacatatgaccagctcacagagtcagatttgcagtggaaacttaatgttgaagttccagattggtgtgactgagtctgttggcaaagcccatattgcagttgtatagactcattttgatgctggaccaagcatgcagggctgagacaggaccctactgatagaaagagttgacatcctagggacagaaaggttggtcctctgaatagaagccggtgtatatttgttctatacaagcatatatttttaagaactgtcaagccagattgtctcctcagaatatctctaaacacttaaaacctgactggtcctgtcttccttacagcatcttatcaaatatccatgaagtacaccagaacatgggctactgccctcagtttgacgccatcacagagctgctgacgggaagagagcatgtggagttctttgccctcctgaggggagtcccagaaaaggaagttggcaaggtattgtaggaaccaggaaagcagactgtcttttgacacctatatattgaataccttcttcatacatgacatcaacctgagactgtctctttactcacactgcagtctctgcactgacttcaggggaagggaggcatgcacaggctagagggcgggggcagggagtgcaggtcccactacataagtcccctctccctcctgtgagtcctcagaggtagctgagacttgagtccgattcaatgaaagaactttcctacattgtgtgtaagaaagcatggtgacaatactcagccagacaaaaatcaaaacgctttttaatctctctaggttggtgaatgggcaattcgcaaactgggcctggtaaagtatggagaaaaatatgccagtaactacagtggcggcaacaaacgaaagctctccacagccatggctttgattggcggacctcctgtggtgtttctggtgagtgtgagaggggtgtgagtgagtggagggtggaaattgttcttctgtcttgaatagacatcatggcttatctgaagtcacatgtaggcctttgcgtacttggcatggtgatagcaagtccatctgctggtccagagcaggcttctccctcacagtttctccctcacagcttctccctcacagcttctccctcacagcttctccctcacagcttctccctcacagcttctccctcacagcttctccctcacagcttctccctcacagcttctccctcacaggcttctccctcacagcacgctgggtggctcggctgtacctttacaggctcctgagtagacaagctccactcatcttgtttccttgccttagataatccctacaaacatggctgaaggtgaaggtgctatttgaatagtctcaggaatattcttcatgactctatgttgttcatcctccaaaggtagaagtgaggacatggcttctagatggacatagtagccacagatgaccatagtagccactgcatcatagttgctcccatacagatgaataaaaaccagaccagactgggcagtggtccttgatcctcattttgtagagaacactgggagtatgggaagaagccttgggttgaagctttaatttttattgaccatgtggatatgaaatttctctatgattagcaaatgtaatagaacaaggagaaaaatatgatgtaagtttcactgctctgacttcaaaaataattttggacaaaaagttttggggtttttgttttgctgttgttgttgttttgctataaggtttcactatgtagccctgggtggcctaaaacttcctatgtggactaggctgactttgagctcatagaaatccacatgtctcaccccacccccactctgggaaacccggcatgatcattagcattgaaaaaaaattgtcttgggctggagagatggctcagtggttaagagcactgactgctcttctggagaccctgagttcaattcccagaaatcacatggtggctcacaaccttctgtattctgtaatggggtctgatgccctcttctacagtgtactcacatatataaaatagataaataaatccttttaaaaaattgtccttgacattttttttccagcaaataaacttgttttattctaattataggatgaaccaaccacaggcatggaccctaaagcccggagattcttgtggaattgtgccctaagcattgtcaaggaggggagatctgtagtccttacatctcataggtctgtactgtacaatcttggcttctgtagggtgctattatatctggtcattttataaaaatgaaaaaaacaaagacaaagactgaaacagctatcacctggaattattccatctagagataactattaccatttgtctgtatctactccagggtttttcttatgcaaagatataagcacttaagtattttacaaacaaaaatttaattataacataggtactgaaaacaaaatttcaagtcatataattgaggtgtgccatcatgtctcgcagctgcattgtcatttgtaaagatctaccctaatttatgcaactgttcttcctgtaaacatttgaattatttttccctttttacaactgtatggcacatgacagaaaagatctattatttctgtttcatggcaaggtcctaggataatgggggtctgtttcattgaaaggccaggtttcatagtgatactctgatgcttataggagcatctgtttgaaaggaaaacctcattctgtttccccacagtatggaagaatgtgaagctctttgtacaaggatggccataatggtcaatggaaggttcaggtgccttggcagtgtccaacatctgaaaaacaggtaacggggaccatttctttgggatagcacatactgaagtcattggggtttttgttttgttttgtgtttttatgtatttatgtatgtatttatttatttatttgatgtgtgtttgcatgatagcttaaaataaaaacagaagagtataggaaaaagaacacaggctctaaagcctaaatgggcagtattccatttgcctttgccctgtactggctggctgtgcgatttgtaggcaggttactcagcatctctgggagtcagtttctgagactattccgaatttagttatataagtgaaacttaataattcacttgtgatgttatgataacaaggacacactgtggaggtaacacaaagaggtttatatccttaccctgccgtaactgggcgttaactcaaggacatggacaggtgactaaattccttgggcttctgtttgtctctatgtcagacttcctaggtccacattgaggttttaatggaatctcgtattcaaggctgtgagctaggtaccatacacagctaggtattcggtagataaaactggttctttctcagaaactgctccgtgggtctgatgtttttcttggtacaagttggggttttcagaattgagtatcctcttgagtagtttgctacgaatgccccatttgtgtgtgtgtttgggtttttgctttcaggtttggagatggttatacaatagttgtacgaatagcaggctccaaccctgacctgaagcctgtccaggagttctttggacttgcgtttccgggaagtgtcctaaaagagaaacatcgaaacatgcttcagtaccagcttccatcctccttgtcatctctagccaggatattcagcatcctctcccagagcaaaaagcgactccacatagaagactactctgtctctcagacaacacttgaccaagtaagctttcagtgaaaagtacatttagctacaggcttgggatgcctgctcctttctccccaccatcagcttgagagaacttcagcctgtgctttgattccattcctgctattactgcctatattatacagatttctgtgggcacatgcaaaacgttgatgctttctactatatataaattgtgactgtagtaacagtagtcacaataactaccattgattacctgtcatgagtcaggcattttgccagaagcattctctcttctttttttccttttttcttatcattttttattagatattttcttcatttacatttcaaatgctatcccgaaagactttatctcttctacataacaagatatcctgtagcagtaatctgtgaaactgctctgaggtcctagctgatgatcacatttctcgccacccacgagagttctctggatcctcgaaataaaagacacaaacacccgagttaattttaatatgccctcactgcacaaggctgggcttctccctgacttcatgtggctaacccactctcccctctgatattccagagttatcaccttttaaaatctatattttatctctactgccccagacacacctgggggattggcctggggatgctttcctgactgccccatggctggataatttctgtcctgcagctcttagatctgacctctctgcttccccatcacggtcatggtgattctgaccctcctccttcccttagtcctttgtccaggaaatctaaaattcccacctccatctccctgcccagccattggctgttagtaactttattggccaattaaaaactaactggggacagggaccttcagcaattggacgtgtatattcctgtgtgattgtgggagccaaattaagacaatgcatgagaaccaatccccagcaatataccagacagagcttggcagttagtaggtatccagcaagtattttttcatttcctcttaattaatcctagatatgctaaagtggatgattgataaatgggtggtttaaatagttagtgatgtgggtgatgtagaaaaggatttcaatgcattctgtgcttctcgagagctctccctttcatgggggatttctccttcaagtacttactcaattctgtgttctcctaatctcaacacaaggaaaaatgccaccataaataaaatgcagctacaacaacaaaagattcagtgcagaggccttcatgaccgtctgtcttccttttgccaggtatttgtgaactttgccaaggaccaaagtgatgatgaccacttaaaggacctgtcactgcacaaaaaccagacagttgtggatgtggccgttctcacatcctttttgcaggatgagaaagtgaaagaaagttatgtatgaagaatcccgttcacacagggtgaatgaaaggaaggaagagcgaggtcttcctttgcactgtgtcaagtgttctagaagaaagcgtcctgcgtttctgtggagaagaacaaactggatactgtactgacactattcaatgcaatgcacttcaatgcaacgagaacacaattccattacaggggcagtgcctttgtagcctatgtcttgtatggctctctagtgaaaatgacttgaagttagttcattaccttatacagatgtgaaactctggtgtggaaccaagcagactctgggtttggattcatactttttttgttcctgtgtattctcactaggattgcaacaacagtctatcaaatagtcatggccagtgataatcaaagtcaaaggcacacacatcctcgtccattaagccattaagccatgctgaaccacaaaacaggtttcccggtgacacatccattgctggcaatgagtgtgccagagttactagtgccaagttgctcagaaagtctgaagcactgagtgtgtcacaaacacttttgtgaaaaccgccctactgtcggttgacatcattaaatatcaggtgacaaaaacggtgccacatgtgactaaatccccattttccttctctctttgatgagctgctgttgtggctgtcttgtacaaaatgtgcatctctctaacccaggtacttggttctcttgttcagtgttgcccatgcccctgtcatggcttgccatagcatctttctgagactttttcaaatacattagatcctcctaagcagcaaagattagcagccaaactgctggggctgcaagcggctcagttcagggtgtggcatgaaagatccagtgcatttacacgtggcaggtctgggttggtttgtgctgactgtctcctaacacaagatgggtacactacaccttgagatccttcattatttaacagaaatctagttctttctaactgtttgaattaacctagaaaatgaaagggtggcatttcattttgacaaaaatgtttgcattgttagtattatttggaattttaagttttatcaatgcttctggaagcttagaactgtacacgtgtgatgtcagtcacatagaggaatgtgcccggactgcctcatgcctttattttccttggtaaatttgaagatagaatgtctgactagcgcagtgaccagaaaacaatgtggtagtcaacatctcaggccatattttaagatcctgtagagcactattcatttcaggttgcagatggagtatttttgaaacatcattactatgtagatgcttggataggagtgagggggagctagcagatttcctgtgccatttattcagctgattgatgtacagatgtaggtttattttgtaaaatccactgaaagaatatggccacacccttgcctacttgatagcatcaatacagaagccaagaaggaccactaagtaaccccctcttcccagggagagcagctagcttgaaatctctcggatacaatcgatgcgtctgacctttgggatcctcaccatatgggcaaacaatgggctttgcaggatgagagacacccacttaaacctctgacgatctcgaatggttcatctcttccgtcattaaccagtcatggaaaacaatcaacaaactctgccacgtgaaatattttttcagacttttctaacccaagcttaatttgttttcatctgcaagcaacgtggaaaaaaatagttatttcaccagtgctcaatgtcatccgtcttcatacaaaacaaaaatatgagtaagttcctgtattgggcaaagttcaagtgagcttttgctatccttatttaacttcttctaaaaatttggaagaataagatttcagatctatttcaaattatgtttatataatgttatgtaattcattgcttgaaaggaaaaatgacaagtttgatactaatgtcaacataggtttctaaaatgataaggaaagtgtgtttccagtagttattggcataccattcattttagatatcaaagataccgaaatcaaagaagcatgtctttatttttcaaaaacaaacttccgttggctttctcagtccattatcaccatgtacagcccttagaaaaatccttgttttaattactcagatttttgaggccacaaaacaacaacaaaagtaaggcaccatttttgaaaacaaaatcaattgagtgtagatttaaaatcttttctgaagctagagacaatctgtagctattatgttaccttttacactatctgaagagcaatcttcaactttcctgtttaaacgtaattattttagaaagttaaaaatcaatcctatcttcaaataagaatttcttagattccctatggagatgtgcattgtgagttgagaaattctcaagtgcaaacacttctggtttactttaaaaaaaaatagtggaaaacttactaactgtgaatatgagaaagacaaaagaaagtgagtcctctcgctagatatacctagcataattcattatgaaacaaacaaacctcaaactactgtattttggtgtctgtaccgcaagcatatgcctcatgactataaatgttacatacatcatttgctctctgtatagtaggcattgacttaaagggattgtttgttgtcttctcatggttgtatatatcaggtaaaattgttccaaagagccatgtgttatgtaatggggaaccactttgatactgaattactaatttgtactttcattactatttgctggtaatagtgtaacgccacagtaatactgttctgattcaaaactgttgcatccctttttgtagaacatttatatttccataaggattcggtatgttcttttccctcctgccctaggatgaagctggttttgtgctttttctttatcattggccctcattccaagcactttatgctgtctgtaatggatctatttttgcactggaatatctgagatttgcaaaactagacaaaagtttcagagcagatttctaagttaaatcgttttcattaaaagaaaaaaaaactgaaaaaaattgtattgtgaataactttatatgacgtgtttttttaaaagcttgtttctatgttatgagtcacaaaataaagctgtgacagtcctgctggtctacacaaagttccttttgtgcatccgtagcaccacctgctgtttaagtgttataaggccagagaggaagctgctctcatcgctggtgcaagtgtcagggaaagttcaaatgttctgaagaatggactcggggtgctacttcaaaatgaaagaagcttgtgtcctttctgatgcctttgacatttatagtgactgagtagccactataaatgaggggtcagaagctttatagatggagtactggttgctaatcactaagctgaagaggaggcagtataagtaggcttccgtaatgaggacagagctagctttgtggaagctacagaaaggtaactttgggtgcttagtcaaccaaagctacaaggacacagcatcatatgcatcgctgggggcgagggcaatggtcaccaggcccaaggagtagacatttgggaaaaagatatgatgggggaggcactggggttcgtttccacctttctctgcttccagaattcagtgctaggctaagtagtgtacacacaagcagggctctgttgagacagtgaagatgtgtatggcttatcagcctcagagaaaaaaatacatactgaaccttgtaactcaaaaagccccagttggtcctgggtctatagtgactgcttcagaatggctgggacaatgtgcagtaagtggtccttatccagggcacaggtcagaactttgtatgcaggttcttggcttttgagtaggcctagaagcctatctgctacacaactgtatcttctagagttctataagactttaatgaaataatgcaaccatgcctgtgaaaattcataattgagagtaaaaaaaaaaagtatcataaaaggttagttaacccagatgaaaatacaagttacccacaaatcttgaccaaaatattgattaaagccctctctaacgctccagattagaaacccactctgggccatatggatagtgctatagcatgtattaagtttcaaaaaacaggggagaaaattagcaactattttcaacttgccagatactggtaacctaccctatgcagggggagtcaagacattttacacgttgaataaatgatacctcagagaaatttgcctcaagatacaaagctaattaaacaacaaatggtgcttcctttgaagttaggtgtcagttaaacttgtccttggtaaatgcactaagcattgttatgtattaatttggcaaatatttactgagctttgaatgccggccatccatcctgattcaggggatgttatatcgaatgaaatcaaatttatctttaatgatgcattggtgaagggcaaatgacagtggacaagctttgaagaacagaaaacactgtgggtgatgagttaacagtggggaggagtcagaaacagcctgtctgaggagagacacttaagctcagttctgaacaaaatgagcaggggcggcagtggatggtgggcttcgagaacacaccttaaacatggagtataaaaaacacaattgggaaaatgcttggctgccaaggaagaagaatccaatctctcttggtcagggagtgggggatggaatcaggatcttgctgcctcgttgagttgtctttcattgttaggatagtgaagaacctggaggttttccacagagtaacgggcatggcgagcatggtgggcgtggcctgatctaatccctgtttcagagaatgtggtctttgatgggaagaaagggcagtagaagagggtgaggggacagtgaagaggtcagggaggaaggatgtcagtcagaatctaattcagagccagtagcatttgctcacaggccataggtaggggtccaggaaaagaaaaataaaaaatggcttctagtttgtgaactagacagagatgcctatgttgaagcatgtggcagttggtattcagtcgagagctcaggggcaatgatggaaagtaaaaatggtcacgttaacagcacaacacacacacactacacacacacacacacaccccaacacagttgttttgattttttaagtcatgggactggatgagcttacttacctgaagagaatgaacgttttagcctgagatttagaagttaccaaaggaaactgggagggaatgggcagtaggaaggagaagaggcacaaacgtgtcaaacactagaatgtgctcctgggagacagaatgctacttaggtctgaaaactgccaagtgagcaaggtcactgtgtgaatgaccattggacttcataagacggtggttcctggagaggctcttacagtcagtggactgacaggacaaatgagaggtaaggaggaggaatagtgaatgtcattgactctccaggccactgtgctctgaaggcaacagacagagctagattgcttgcttgtagataccagttgggattctccttttcctttctggctgtttttaatcctttagccatgtatactgccaggagcctttttttccaccagactcccttaccacacttggtctcacttcttcccttacctcagggtcttgggccaattagttgaaactaaagaaatcaaaccccatattcctggaacaacttgcttctttttacgaagatgagttgagagagacctttccaagtaacagagtttatgaagaaagtctctctaatgagtctttggcttctttgaacacgttacaggttcatactcctttaatgactgaaagtactacaacttcagtttccacagtagttaagtgtccaggctttactcagtagattagcaattgatgctgggaataaagtccagcctgtgagtctgcaaacaccaattttcttatcttttggaagttatttagtggaggacagattagactcaataggtcgtatatctgtttctcttcctagaaatacaattgctgtgtttttatagtctagaaagtcatctcagagccaataggcaaaggttgttcttgatcacactcaaggtgagaatgtttcctttgtccttcactgtgtctctcatagatcctttgcaaagaggtgacaaggaaccttcaataattcattgataatagaggacaagatgaagtatgaagcaatgatgtgctatttttaatgcgaaaatgattgtattcatctatattctgttgtcaaaatagggtggaaagagaagggaagagagggagagggagagagattaatttagctcacaacttttcaactttggaggttgaaaattgaagaacaggtggtgttcatggaagatggcatcatggtgctagcatgtgcaagatggagaggtcacacagcaacatagagaaatacaaagagatccaggagttataaacaatttgaatgtagtgaactgttccccacatacatgtttgaatacatggtccctagctgatggtactgtttggggtaacattaaaactttgaggaccatagcaaggatccactttctgtccaggtcttgtttcataatctacccagatatgaggaactctagctgtatattcccacctccatgaattgttatgcctcccctaccatgagggactgtacaacttaaaaccatgaactaaaataaacccttccttccttgtgtctgtcaggtgtctggacatagcgatgaacaaagtaaccaatataactcaatttcaagagaaccaacatgggtcccaagaatattacattaaccctttccaaaactggtaccaccaaagacctaactaaccacttgccactgggccccatatctcaaaggtcccatcatcactgtaaggatcaaactccagcacatgaatctttgggagagggtgtcacatgcaagctaaatctaagatatagcacacctcatatgtgaatacaatcaataagtgcttgctaatgacttaccagatgccaggcactgattggtgatactgcagtgattcaaacaaacccccatgatatcatggattttagtttctagtggaagaatacaataaaatcacatataactaaaatagtaaaatgtttgttatgctaataagtggcatgatgtcaactgcgtagcctaaacaacatttatttcttaccactctggaggttgggaaatctgagatgaggatgctaacatgacgacaactagcaattaggtttgaatgcatacctcattggttaactcacatggtagagatatggagagaatacttataaagaacactcattctaagagctcatccccttacataaacccaattacctcaagtgctgatttgaataagaacggccccagaggcttatatatttgaaagcttggtcaccagagagtggtattctttgaaaggattagtgtgtcactaggggtgggctttgatgtttcaagggcccattccaatctttcttgctgctgcctgcagatcttgatgtagaactcagttccttctccagcaccatgtgtgcctccctatgtgccaccgtgcttcccaccgtgataacaatggactaaacctctgaaactataagccagacccaattaaatgttgtcttttataagacttgccttggtcatggtgtctgttcacagcagtaaaaccctaactaagaagttggtaccaggagtgaggtatcactgtgataggcctgaccatgtttttgtttggacttttgatttggaaagcattggaatactttaagtggggcttaatgggctatcctactaagaatatggaagactttgttgctgagaattctacatcttcatctaaaggctgctagtggaagactggcttccaggaagctaggatgagggccttaaagcccacacccatagtaacacacctactccaacagggccacaccttctaattatgccactccctgggctgagcatatacaaacaatctcagaagggttgctgtggtcacggtgtcttttcacagcaatagaacactaagatacatcataaggtctccacctctaaatatcattacattcgcattttgaagggggaaaattaattccatagaaaacagggattttgactttaaatggggctgtctgggacggctgaatcaagctcttggataaagatcccaataaagtgtggagatgatccaagaaaatccatgtctagggacaaagatcctaggcaggggaaatagactttatggcaagacaataagtcaaagaagaaaagctggtaagacacctgaagccaagagagtggaatgacactaaagaacataacagggggacagatcatgtaatgggcttgcaggccacactgaccctaagggagacaggaagctatcagagacatgagggagtagagaagtgaattagtgtggttcgtgttttatattcttctggttgctgtgttgaaaatagattaggatgatggcaggtcagtgaagagctgtcattttaaatccaaataatgatgaactcaaaccataatggcggctgcaggaatgtgaagcaatcaaattctggacttttgggatttaatgataggtatgtaatggggtaatgacctgaaaaaatggacaggaaaggaggtgtcattcactgagatgggacttcccagtaaagactaagggtttagctttcaacaagtgtgctgtgaagtttctaatatattcaggtggagatgctaagactggcagttacgtaaggctgaattctagagaatgcatatatactttaggaccgtctgaatacaggtgccagatgaagacgtatgactgagacataatccaggaagtgggtgcaggatagaaaaaaagtctagggagtcagttctggagtgtgacatcattggagatgaaggagacaagatagagaccccaaagctaagtaaagaagactaagaagatggtgtttgtgggaatgaaataaaatctagaacaaaatctagaaaaaaaaatctggaacaaaaaacaggttaactgctaggaaatcttctaaaatgagagctggaaagtgagtttggtgagagctgtttggcttgtggggtactgagtcattaagagagaactaattagaggctggacttacgacccttcttttgtgttactacagggcaggatgattttgttttttaaagatggaataatcatatttgtacgctgagaaggactgagaactggaaaaagtagcttcaggagacagaatgttctgtggctatttcctccagtaggagtggacaagctggtcttccccagctgcagagtaggagaaaaagtagggcatggggacctgcctgcaggcagtgacagggagtgtcagtctgcactcgattctgattactttcatttgcttgcttgttttcagaaaggaagaaggttcaacaagagagaatgaagaggaggagcaagtcctgaggacaatctaagggaatggaaggaaatcaagttgcaaacgatctatgctactatgtgaacctgtgcatattagctatattcttcttcaaccctcttgcaaggcacatctctgttaagttccgtagaaagtgaaaatgcagttggagctaaatacaagtaaggtatatatgatctaaacgaagcaaataagtatatgatttagattaaggagaacgggtaggataatgcctagtgtatccatcaaaaagatcaaaatgtcagctcttaacttttactttgctaagtaacggtcaaagaagattgatgctcaaaaagttaacggagcaaaaacacttttggtaatgttttatattgagctgagtttggcagcagccactggcacctgagggaccttgtagcttgagactcatagaagctccgaggagagacacagtggcagaaggagagtgaagatcctgcagtatctccagaacaactttgaaaaaggcaagtcatatgggaagatgcttttaaagagcagagccccatctagtgaagtatggcatctgggcagtcatgagatcacagacaaagaacacgtcatcgctgagtagggctaagctgcaggtgctgctgcagtctgtgccgcttgccctgatgtggggaggagaggcagcgctgccagcagccatataggtgagcctgtgcagcagccagcaccaagagcagagtgttgtgcattggcctggaatctctcatctctgccccagttccaagggtcacgctgactctagataacggcaggatatctgagaggaatcgcagctagagtccagtatttatggtgcttcagaaactgaaaccttgaacgagaccaatgactcgttgcagttaagtatttgtatacaaagctgtttgggtgggaaaaaaaatagtgtaacacactgcagtctgcagtgtcacttcggtgattaaatgtgccacggagaggtgggaaagatgactgagctgagtgacatgatatggagaggcagagctagagacactgtggctgtggtgacaagtgtggaagcgaagctgtagcggacctgggaagaggccattgctgagtagggctgacagcgtgatgtgtagcagctttgagcttgtgcccactctgccccagaatgtgctgcccagtcatatgactgccctggctctgggcagtgacagatatctgagatggagaattctggattctgcttcattttctggattgggcctctttgaaaggccttcatggtctgcgctgttgctggaaactggagaccacattggtgctcatggtccatgctgctgccagggccatgttgatattcatggtttgtgttacaataggacaccatgcttgtgtccatgatctgtgaccactcctttccgctaaaagaaaagaaaagaaacagtatagagaggaagccattaaagagtccttgaaaattgtgatagggatgatgaagtatatagctcttcagagctcacggagcagaggaggagggaggcctctggtctctttaagggcctggccactcttagcttgatcatgctctgtatcaggctccatactatttgtttttcttttctcctgtctttggggagggcacaagggtgggagggtagacctgggaggaatgggacgtaagtgtgatcaggatgcactgtgtgaaattctcaaataaccaagaaaaacataatgtttaaaaaaacattgtataaatgaaagctaaatttttaattaaatgaaaaaaatgttcattatgtgcatttgggcttttaacaattaaaaaattcattgtatacattcattgcatatggtattatactaaggaagttttcacacaagcacacattgtacagtgagttatgttccctccatcaaacctctctctccgtttcaccacctctactcccctctgttaccatagacatagttttgtttttactttcattttatatagacatacgtgattttctgtgcatagaaaatctagggaccacatctgagggacacatacttgtcgttctgagacttgcatatatctgaaatgtgtatgtgaagcacataccaagctacagctgtgtcacataaatgtgacaacgttctgagggctgcccaaagagtgcccgaagagtgcctcgatggatgcgacagtccacagcctgccttcctgagcagcatctcacaatgctgacagctgagacagcagtggtacagaagctcgccctcagagccagcaagcatgctattccactgtgtacttaacagcgacgaagctgccacactgtcatgatgtcattactccatgtaatacaggaaaagctccagaaaaagaagagataaatatagaagactcacttgataaaaaatcagaatgaatgtgaaggcttttattaggtcagagatttccattttctcattgaaataaataagtgtctcataatatttatgagtaattcaaggtaaagttaaaagtagtacaagcaattaaaaacaaacacactaagaccgtattatacaccaagtctcaaggatatattattttccaattttgacttaataatgaatgtgaaaccataattaatacttttctaaagtataaagacaaatactagatttaatatttctataaatcccacttattatcacaaagaaaggattactggtaaaaaatagttttaaatttcaggaaaaatgaacatgataaaaaggcagacattgtatttatttaatttacagatactttgagggaaaaaaattcaaaatcatgtttgaatacaagacttagtcataaaaatctcagaaggcaagatattgtgaaacaatgaagtaccagggcacggagtaacaatgctttctgatatccagtagttatgaaaatgaacagaaacatttcctgaactactcgtagtaaatgactcaggtagccttcaagatgcagaggtcacagtgtaatagctcagcccgtccttcagacaatgaactgggcgactccatcttggagacaggaagtgcccgctgtggatacagctcacctctgtgatgggatgctctgggctgggtaggaaactacttcagtggtgaaaatgatgttggaatcaggaacgtattctgctgggactctaggtaactgacactctcccgaactggaaagacatgttagaagacaatgaagttctcagcggaatcaaatttattctaaaaataattcaagcctaatcaatcagctcaccagcagccaccactctagggtcctcgtgagaccagtgtctcccagctgctcggctgtctgcactctcgttccaccacagaacatgaactgcagaagtagatcataagttagctgtaattttcctcataataataggcatttctttcatttttgagattatattatatccattctcccttccttttcttcctgccataccctcccacacaacctccttgctctctttcaaattcatgccctctttttttattgttgtctgcatacaagttcatgtggtacgtgtgtatatgtgtactatattctagatacaatctttcttgttttaagatttatttatttattttatgtacaccatcattgtcttcagacacatgagaagagggcatcggatcccattacagatggttgtgagccaccatgtggttgctgggatttgaactcaggacctctggaagaacagtcagtgttcttaactactgagccatctctccaggccctagatacaatcacacagcaggtaatttttataaatgtatatctatattttcatttacaaacaatacctttactccaatattatttttctgaaataaatcatgagatgtttagaaaaatgatgaaaagaattaaaattttttaaaaaactcttccagtttctaaacaactgttatcctgtgaaatagctccaaaaggtattagcaatcacaataaaaaataagatacaaatcagtgttttcatacctaacaattaggaaaaaacactcaaaattaaaatcaatgttaaaaaaaaaaaccaaaaaaccaagaaacacaggcaatcaccaacacccatcaattacagtctcacagaaatagacagctgttacctctgttgagggctccatattcggtgtggaaaacaccaactagtgtagagtagccaagctccacatgggcatttactgcccttttaaatgcattaccccacagagctgggccgccaggcttcatctgaaaggtagccagttcatagactcctagaattgatagaatcaaataactaagtaattactcaacagttactctttagtcaatttgctttgtttgactcttgggagtgggaagttactatgtatataatatatatgtacacagacagacagacacatacacacccacagacacacacagacatagacacagacacacacacatgatctgcttaaagggtcatcctcctggagcagtgattgaggaaatggccaaccaacgactgacccaacttgagccaccccatcggagagggagagagcctacatctgacactattaatgatattctgctatagttgcagacagggacgtaacataactgtctcctgagaggcttcatgcaacagctgcagggacccacagccaaacattaggaagagctcatagagtcatatggaactgggttccccaacaactggagccaggaccatctctgactcagactctgttgcctgcttttgcatccctcttccctagctgggctgccttttctggcttgagtgggagaggatgcacttggttctgatgtgacttgatgtgccagggcgggttggtaccagggggtgggcgagctccctttctcctcagagaggggaaggatagaatggaagactaggggtgggaggatgggactgggatgagagggaggggggctgatactgggatgtcaagtatataaataaataatgaaaataaagggtcatctgcagatacagttttatgcagatgcatttgttaattctttgcattatttttccttgtttttatgttgagacgttcttatctatgtttaaggttaaccttattaactgaggggtaacaaaagctatattacattaaatagttttaatctgggaactttatcaatgtaccagatattgatactttatcacaaaataggattttaagctgcgtaggtctataaggaaagaaataagtatctcccaatcttatattttttcccccttcttttcaactctgagaggggagatactattctttgtgtaatttcctcctttgagagtctattcctaacaagaatagcaaggaaacagttggcctgaagtcatatctgacttccagggaaaagaagctcagcatagggttttagtgttcttaaatatccaagtattgtttgagaggcttttgttgttgttttttaacctctagtcagaaatataaagcagaaataagaaactggaggataagtagatctgatagaaaaagaacaaggccatgaaagaattatgaaaaatgtagaagaagaaaataacattgaagcctagtgagagggctcagtgtgtaaaaatgcttgttgccaagcctgacagagctcagttcttggaaaacatacaaagttgggaaggaaccaacttcc

SEQ ID NO: 4 - DNA, 153107 bp, Mus musculus
ggaagttggttccttcccaactttgtatgttttccaagaactgagctctgtcaggcttggcaacaagcatttttacacactgagccctctcactaggcttcaatgttattttcttcttctacatttttcataattctttcatggccttgttctttttctatcagatctacttatcctccagtttcttatttctgctttatatttctgactagaggttaaaaaacaacaacaaaagcctctcaaacaatacttggatatttaagaacactaaaaccctatgctgagcttcttttccctggaagtcagatatgacttcaggccaactgtttccttgctattcttgttaggaatagactctcaaaggaggaaattacacaaagaatagtatctcccctctcagagttgaaaagaagggggaaaaaatataagattgggagatacttatttctttccttatagacctacgcagcttaaaatcctattttgtgataaagtatcaatatctggtacattgataaagttcccagattaaaactatttaatgtaatatagcttttgttacccctcagttaataaggttaaccttaaacatagataagaacgtctcaacataaaaacaaggaaaaataatgcaaagaattaacaaatgcatctgcataaaactgtatctgcagatgaccctttattttcattatttatttatatacttgacatcccagtatcagcccccctccctctcatcccagtcccatcctcccacccctagtcttccattctatccttcccctctctgaggagaaagggagctcgcccaccccctggtaccaacccgccctggcacatcaagtcacatcagaaccaagtgcatcctctcccactcaagccagaaaaggcagcccagctagggaagagggatgcaaaagcaggcaacagagtctgagtcagagatggtcctggctccagttgttggggaacccagttccatatgactctatgagctcttcctaatgtttggctgtgggtccctgcagctgttgcatgaagcctctcaggagacagttatgttacgtccctgtctgcaactatagcagaatatcattaatagtgtcagatgtaggctctctccctctccgatggggtggctcaagttgggtcagtcgttggttggccatttcctcaatcactgctccaggaggatgaccctttaagcagatcatgtgtgtgtgtctgtgtctatgtctgtgtgtgtctgtgggtgtgtatgtgtctgtctgtctgtgtacatatatattatatacatagtaacttcccactcccaagagtcaaacaaagcaaattgactaaagagtaactgttgagtaattacttagttatttgattctatcaattctaggagtctatgaactggctacctttcagatgaagcctggcggcccagctctgtggggtaatgcatttaaaagggcagtaaatgcccatgtggagcttggctactctacactagttggtgttttccacaccgaatatggagccctcaacagaggtaacagctgtctatttctgtgagactgtaattgatgggtgttggtgattgcctgtgtttcttggttttttggtttttttttttaacattgattttaattttgagtgttttttcctaattgttaggtatgaaaacactgatttgtatcttattttttattgtgattgctaataccttttggagctatttcacaggataacagttgtttagaaactggaagagttttttaaaaaattttaattcttttcatcatttttctaaacatctcatgatttatttcagaaaaataatattggagtaaaggtattgtttgtaaatgaaaatatagatatacatttataaaaattacctgctgtgtgattgtatctagggcctggagagatggctcagtagttaagaacactgactgttcttccagaggtcctgagttcaaatcccagcaaccacatggtggctcacaaccatctgtaatgggatccgatgccctcttctcatgtgtctgaagacaatgatggtgtacataaaataaataaataaatcttaaaacaagaaagattgtatctagaatatagtacacatatacacacgtaccacatgaacttgtatgcagacaacaataaaaaaagagggcatgaatttgaaagagagcaaggaggttgtgtgggagggtatggcaggaagaaaaggaagggagaatggatataatataatctcaaaaatgaaagaaatgcctattattatgaggaaaattacagctaacttatgatctacttctgcagttcatgttctgtggtggaacgagagtgcagacagccgagcagctgggagacactggtctcacgaggaccctagagtggtggctgctggtgagctgattgattaggcttgaattatttttagaataaatttgattccgctgagaacttcattgtcttctaacatgtctttccagttcgggagagtgtcagttacctagagtcccagcagaatacgttcctgattccaacatcattttcaccactgaagtagtttcctacccagcccagagcatcccatcacagaggtgagctgtatccacagcgggcacttcctgtctccaagatggagtcgcccagttcattgtctgaaggacgggctgagctattacactgtgacctctgcatcttgaaggctacctgagtcatttactacgagtagttcaggaaatgtttctgttcattttcataactactggatatcagaaagcattgttactccgtgccctggtacttcattgtttcacaatatcttgccttctgagatttttatgactaagtcttgtattcaaacatgattttgaatttttttccctcaaagtatctgtaaattaaataaatacaatgtctgcctttttatcatgttcatttttcctgaaatttaaaactattttttaccagtaatcctttctttgtgataataagtgggatttatagaaatattaaatctagtatttgtctttatactttagaaaagtattaattatggtttcacattcattattaagtcaaaattggaaaataatatatccttgagacttggtgtataatacggtcttagtgtgtttgtttttaattgcttgtactacttttaactttaccttgaattactcataaatattatgagacacttatttatttcaatgagaaaatggaaatctctgacctaataaaagccttcacattcattctgattttttatcaagtgagtcttctatatttatctcttctttttctggagcttttcctgtattacatggagtaatgacatcatgacagtgtggcagcttcgtcgctgttaagtacacagtggaatagcatgcttgctggctctgagggcgagcttctgtaccactgctgtctcagctgtcagcattgtgagatgctgctcaggaaggcaggctgtggactgtcgcatccatcgaggcactcttcgggcactctttgggcagccctcagaacgttgtcacatttatgtgacacagctgtagcttggtatgtgcttcacatacacatttcagatatatgcaagtctcagaacgacaagtatgtgtccctcagatgtggtccctagattttctatgcacagaaaatcacgtatgtctatataaaatgaaagtaaaaacaaaactatgtctatggtaacagaggggagtagaggtggtgaaacggagagagaggtttgatggagggaacataactcactgtacaatgtgtgcttgtgtgaaaacttccttagtataataccatatgcaatgaatgtatacaatgaattttttaattgttaaaagcccaaatgcacataatgaacatttttttcatttaattaaaaatttagctttcatttatacaatgtttttttaaacattatgtttttcttggttatttgagaatttcacacagtgcatcctgatcacacttacgtcccattcctcccaggtctaccctcccacccttgtgccctccccaaagacaggagaaaagaaaaacaaatagtatggagcctgatacagagcatgatcaagctaagagtggccaggcccttaaagagaccagaggcctccctcctcctctgctccgtgagctctgaagagctatatacttcatcatccctatcacaattttcaaggactctttaatggcttcctctctatactgtttcttttcttttcttttagcggaaaggagtggtcacagatcatggacacaagcatggtgtcctattgtaacacaaaccatgaatatcaacatggccctggcagcagcatggaccatgagcaccaatgtggtctccagtttccagcaacagcgcagaccatgaaggcctttcaaagaggcccaatccagaaaatgaagcagaatccagaattctccatctcagatatctgtcactgcccagagccagggcagtcatatgactgggcagcacattctggggcagagtgggcacaagctcaaagctgctacacatcacgctgtcagccctactcagcaatggcctcttcccaggtccgctacagcttcgcttccacacttgtcaccacagccacagtgtctctagctctgcctctccatatcatgtcactcagctcagtcatctttcccacctctccgtggcacatttaatcaccgaagtgacactgcagactgcagtgtgttacactattttttttcccacccaaacagctttgtatacaaatacttaactgcaacgagtcattggtctcgttcaaggtttcagtttctgaagcaccataaatactggactctagctgcgattcctctcagatatcctgccgttatctagagtcagcgtgacccttggaactggggcagagatgagagattccaggccaatgcacaacactctgctcttggtgctggctgctgcacaggctcacctatatggctgctggcagcgctgcctctcctccccacatcagggcaagcggcacagactgcagcagcacctgcagcttagccctactcagcgatgacgtgttctttgtctgtgatctcatgactgcccagatgccatacttcactagatggggctctgctctttaaaagcatcttcccatatgacttgcctttttcaaagttgttctggagatactgcaggatcttcactctccttctgccactgtgtctctcctcggagcttctatgagtctcaagctacaaggtccctcaggtgccagtggctgctgccaaactcagctcaatataaaacattaccaaaagtgtttttgctccgttaactttttgagcatcaatcttctttgaccgttacttagcaaagtaaaagttaagagctgacattttgatctttttgatggatacactaggcattatcctacccgttctccttaatctaaatcatatacttatttgcttcgtttagatcatatataccttacttgtatttagctccaactgcattttcactttctacggaacttaacagagatgtgccttgcaagagggttgaagaagaatatagctaatatgcacaggttcacatagtagcatagatcgtttgcaacttgatttccttccattcccttagattgtcctcaggacttgctcctcctcttcattctctcttgttgaaccttcttcctttctgaaaacaagcaagcaaatgaaagtaatcagaatcgagtgcagactgacactccctgtcactgcctgcaggcaggtccccatgccctactttttctcctactctgcagctggggaagaccagcttgtccactcctactggaggaaatagccacagaacattctgtctcctgaagctactttttccagttctcagtccttctcagcgtacaaatatgattattccatctttaaaaaacaaaatcatcctgccctgtagtaacacaaaagaagggtcgtaagtccagcctctaattagttctctcttaatgactcagtaccccacaagccaaacagctctcaccaaactcactttccagctctcattttagaagatttcctagcagttaacctgttttttgttccagatttttttttctagattttgttctagattttatttcattcccacaaacaccatcttcttagtcttctttacttagctttggggtctctatcttgtctccttcatctccaatgatgtcacactccagaactgactccctagactttttttctatcctgcacccacttcctggattatgtctcagtcatacgtcttcatctggcacctgtattcagacggtcctaaagtatatatgcattctctagaattcagccttacgtaactgccagtcttagcatctccacctgaatatattagaaacttcacagcacacttgttgaaagctaaacccttagtctttactgggaagtcccatctcagtgaatgacacctcctttcctgtccattttttcaggtcattaccccattacatacctatcattaaatcccaaaagtccagaatttgattgcttcacattcctgcagccgccattatggtttgagttcatcattatttggatttaaaatgacagctcttcactgacctgccatcatcctaatctattttcaacacagcaaccagaagaatataaaacacgaaccacactaattcacttctctactccctcatgtctctgatagcttcctgtctcccttagggtcagtgtggcctgcaagcccattacatgatctgtccccctgttatgttctttagtgtcattccactctcttggcttcaggtgtcttaccagcttttcttctttgacttattgtcttgccataaagtctatttcccctgcctaggatctttgtccctagacatggattttcttggatcatctccacactttattgggatctttatccaagagcttgattcagccgtcccagacagccccatttaaagtcaaaatccctgttttctatggaattaattttcccccttcaaaatgcgaatgtaatgatatttagaggtggagaccttatgatgtatcttagtgttctattgctgtgaaaagacaccgtgaccacagcaacccttctgagattgtttgtatatgctcagcccagggagtggcataattagaaggtgtggccctgttggagtaggtgtgttactatgggtgtgggctttaaggccctcatcctagcttcctggaagccagtcttccactagcagcctttagatgaagatgtagaattctcagcaacaaagtcttccatattcttagtaggatagcccattaagccccacttaaagtattccaatgctttccaaatcaaaagtccaaacaaaaacatggtcaggcctatcacagtgatacctcactcctggtaccaacttcttagttagggttttactgctgtgaacagacaccatgaccaaggcaagtcttataaaagacaacatttaattgggtctggcttatagtttcagaggtttagtccattgttatcacggtgggaagcacggtggcacatagggaggcacacatggtgctggagaaggaactgagttctacatcaagatctgcaggcagcagcaagaaagattggaatgggcccttgaaacatcaaagcccacccctagtgacacactaatcctttcaaagaataccactctctggtgaccaagctttcaaatatataagcctctggggccgttcttattcaaatcagcacttgaggtaattgggtttatgtaaggggatgagctcttagaatgagtgttctttataagtattctctccatatctctaccatgtgagttaaccaatgaggtatgcattcaaacctaattgctagttgtcgtcatgttagcatcctcatctcagatttcccaacctccagagtggtaagaaataaatgttgtttaggctacgcagttgacatcatgccacttattagcataacaaacattttactattttagttatatgtgattttattgtattcttccactagaaactaaaatccatgatatcatgggggtttgtttgaatcactgcagtatcaccaatcagtgcctggcatctggtaagtcattagcaagcacttattgattgtattcacatatgaggtgtgctatatcttagatttagcttgcatgtgacaccctctcccaaagattcatgtgctggagtttgatccttacagtgatgatgggacctttgagatatggggcccagtggcaagtggttagttaggtctttggtggtaccagttttggaaagggttaatgtaatattcttgggacccatgttggttctcttgaaattgagttatattggttactttgttcatcgctatgtccagacacctgacagacacaaggaaggaagggtttattttagttcatggttttaagttgtacagtccctcatggtaggggaggcataacaattcatggaggtgggaatatacagctagagttcctcatatctgggtagattatgaaacaagacctggacagaaagtggatccttgctatggtcctcaaagttttaatgttaccccaaacagtaccatcagctagggaccatgtattcaaacatgtatgtggggaacagttcactacattcaaattgtttataactcctggatctctttgtatttctctatgttgctgtgtgacctctccatcttgcacatgctagcaccatgatgccatcttccatgaacaccacctgttcttcaattttcaacctccaaagttgaaaagttgtgagctaaattaatctctctccctctccctctcttcccttctctttccaccctattttgacaacagaatatagatgaatacaatcattttcgcattaaaaatagcacatcattgcttcatacttcatcttgtcctctattatcaatgaattattgaaggttccttgtcacctctttgcaaaggatctatgagagacacagtgaaggacaaaggaaacattctcaccttgagtgtgatcaagaacaacctttgcctattggctctgagatgactttctagactataaaaacacagcaattgtatttctaggaagagaaacagatatacgacctattgagtctaatctgtcctccactaaataacttccaaaagataagaaaattggtgtttgcagactcacaggctggactttattcccagcatcaattgctaatctactgagtaaagcctggacacttaactactgtggaaactgaagttgtagtactttcagtcattaaaggagtatgaacctgtaacgtgttcaaagaagccaaagactcattagagagactttcttcataaactctgttacttggaaaggtctctctcaactcatcttcgtaaaaagaagcaagttgttccaggaatatggggtttgatttctttagtttcaactaattggcccaagaccctgaggtaagggaagaagtgagaccaagtgtggtaagggagtctggtggaaaaaaaggctcctggcagtatacatggctaaaggattaaaaacagccagaaaggaaaaggagaatcccaactggtatctacaagcaagcaatctagctctgtctgttgccttcagagcacagtggcctggagagtcaatgacattcactattcctcctccttacctctcatttgtcctgtcagtccactgactgtaagagcctctccaggaaccaccgtcttatgaagtccaatggtcattcacacagtgaccttgctcacttggcagttttcagacctaagtagcattctgtctcccaggagcacattctagtgtttgacacgtttgtgcctcttctccttcctactgcccattccctcccagtttcctttggtaacttctaaatctcaggctaaaacgttcattctcttcaggtaagtaagctcatccagtcccatgacttaaaaaatcaaaacaactgtgttggggtgtgtgtgtgtgtgtgtagtgtgtgtgtgttgtgctgttaacgtgaccatttttactttccatcattgcccctgagctctcgactgaataccaactgccacatgcttcaacataggcatctctgtctagttcacaaactagaagccattttttatttttcttttcctggacccctacctatggcctgtgagcaaatgctactggctctgaattagattctgactgacatccttcctccctgacctcttcactgtcccctcaccctcttctactgccctttcttcccatcaaagaccacattctctgaaacagggattagatcaggccacgcccaccatgctcgccatgcccgttactctgtggaaaacctccaggttcttcactatcctaacaatgaaagacaactcaacgaggcagcaagatcctgattccatcccccactccctgaccaagagagattggattcttcttccttggcagccaagcattttcccaattgtgttttttatactccatgtttaaggtgtgttctcgaagcccaccatccactgccgcccctgctcattttgttcagaactgagcttaagtgtctctcctcagacaggctgtttctgactcctccccactgttaactcatcacccacagtgttttctgttcttcaaagcttgtccactgtcatttgcccttcaccaatgcatcattaaagataaatttgatttcattcgatataacatcccctgaatcaggatggatggccggcattcaaagctcagtaaatatttgccaaattaatacataacaatgcttagtgcatttaccaaggacaagtttaactgacacctaacttcaaaggaagcaccatttgttgtttaattagctttgtatcttgaggcaaatttctctgaggtatcatttattcaacgtgtaaaatgtcttgactccccctgcatagggtaggttaccagtatctggcaagttgaaaatagttgctaattttctcccctgttttttgaaacttaatacatgctatagcactatccatatggcccagagtgggtttctaatctggagcgttagagagggctttaatcaatattttggtcaagatttgtgggtaacttgtattttcatctgggttaactaaccttttatgatactttttttttttactctcaattatgaattttcacaggcatggttgcattatttcattaaagtcttatagaactctagaagatacagttgtgtagcagataggcttctaggcctactcaaaagccaagaacctgcatacaaagttctgacctgtgccctggataaggaccacttactgcacattgtcccagccattctgaagcagtcactatagacccaggaccaactggggctttttgagttacaaggttcagtatgtatttttttctctgaggctgataagccatacacatcttcactgtctcaacagagccctgcttgtgtgtacactacttagcctagcactgaattctggaagcagagaaaggtggaaacgaaccccagtgcctcccccatcatatctttttcccaaatgtctactccttgggcctggtgaccattgccctcgcccccagcgatgcatatgatgctgtgtccttgtagctttggttgactaagcacccaaagttacctttctgtagcttccacaaagctagctctgtcctcattacggaagcctacttatactgcctcctcttcagcttagtgattagcaaccagtactccatctataaagcttctgacccctcatttatagtggctactcagtcactataaatgtcaaaggcatcagaaaggacacaagcttctttcattttgaagtagcaccccgagtccattcttcagaacatttgaactttccctgacacttgcaccagcgatgagagcagcttcctctctggccttataacacttaaacagcaggtggtgctacggatgcacaaaaggaactttgtgtagaccagcaggactgtcacagctttattttgtgactcataacatagaaacaagcttttaaaaaaacacgtcatataaagttattcacaatacaatttttttcagtttttttttcttttaatgaaaacgatttaacttagaaatctgctctgaaacttttgtctagttttgcaaatctcagatattccagtgcaaaaatagatccattacagacagcataaagtgcttggaatgagggccaatgataaagaaaaagcacaaaaccagcttcatcctagggcaggagggaaaagaacataccgaatccttatggaaatataaatgttctacaaaaagggatgcaacagttttgaatcagaacagtattactgtggcgttacactattaccagcaaatagtaatgaaagtacaaattagtaattcagtatcaaagtggttccccattacataacacatggctctttggaacaattttacctgatatatacaaccatgagaagacaacaaacaatccctttaagtcaatgcctactatacagagagcaaatgatgtatgtaacatttatagtcatgaggcatatgcttgcggtacagacaccaaaatacagtagtttgaggtttgtttgtttcataatgaattatgctaggtatatctagcgagaggactcactttcttttgtctttctcatattcacagttagtaagttttccactatttttttttaaagtaaaccagaagtgtttgcacttgagaatttctcaactcacaatgcacatctccatagggaatctaagaaattcttatttgaagataggattgatttttaactttctaaaataattacgtttaaacaggaaagttgaagattgctcttcagatagtgtaaaaggtaacataatagctacagattgtctctagcttcagaaaagattttaaatctacactcaattgattttgttttcaaaaatggtgccttacttttgttgttgttttgtggcctcaaaaatctgagtaattaaaacaaggatttttctaagggctgtacatggtgataatggactgagaaagccaacggaagtttgtttttgaaaaataaagacatgcttctttgatttcggtatctttgatatctaaaatgaatggtatgccaataactactggaaacacactttccttatcattttagaaacctatgttgacattagtatcaaacttgtcatttttcctttcaagcaatgaattacataacattatataaacataatttgaaatagatctgaaatcttattcttccaaatttttagaagaagttaaataaggatagcaaaagctcacttgaactttgcccaatacaggaacttactcatatttttgttttgtatgaagacggatgacattgagcactggtgaaataactatttttttccacgttgcttgcagatgaaaacaaattaagcttgggttagaaaagtctgaaaaaatatttcacgtggcagagtttgttgattgttttccatgactggttaatgacggaagagatgaaccattcgagatcgtcagaggtttaagtgggtgtctctcatcctgcaaagcccattgtttgcccatatggtgaggatcccaaaggtcagacgcatcgattgtatccgagagatttcaagctagctgctctccctgggaagagggggttacttagtggtccttcttggcttctgtattgatgctatcaagtaggcaagggtgtggccatattctttcagtggattttacaaaataaacctacatctgtacatcaatcagctgaataaatggcacaggaaatctgctagctccccctcactcctatccaagcatctacatagtaatgatgtttcaaaaatactccatctgcaacctgaaatgaatagtgctctacaggatcttaaaatatggcctgagatgttgactaccacattgttttctggtcactgcgctagtcagacattctatcttcaaatttaccaaggaaaataaaggcatgaggcagtccgggcacattcctctatgtgactgacatcacacgtgtacagttctaagcttccagaagcattgataaaacttaaaattccaaataatactaacaatgcaaacatttttgtcaaaatgaaatgccaccctttcattttctaggttaattcaaacagttagaaagaactagatttctgttaaataatgaaggatctcaaggtgtagtgtacccatcttgtgttaggagacagtcagcacaaaccaacccagacctgccacgtgtaaatgcactggatctttcatgccacaccctgaactgagccgcttgcagccccagcagtttggctgctaatctttgctgcttaggaggatctaatgtatttgaaaaagtctcagaaagatgctatggcaagccatgacaggggcatgggcaacactgaacaagagaaccaagtacctgggttagagagatgcacattttgtacaagacagccacaacagcagctcatcaaagagagaaggaaaatggggatttagtcacatgtggcaccgtttttgtcacctgatatttaatgatgtcaaccgacagtagggcggttttcacaaaagtgtttgtgacacactcagtgcttcagactttctgagcaacttggcactagtaactctggcacactcattgccagcaatggatgtgtcaccgggaaacctgttttgtggttcagcatggcttaatggcttaatggacgaggatgtgtgtgcctttgactttgattatcactggccatgactatttgatagactgttgttgcaatcctagtgagaatacacaggaacaaaaaaagtatgaatccaaacccagagtctgcttggttccacaccagagtttcacatctgtataaggtaatgaactaacttcaagtcattttcactagagagccatacaagacataggctacaaaggcactgcccctgtaatggaattgtgttctcgttgcattgaagtgcattgcattgaatagtgtcagtacagtatccagtttgttcttctccacagaaacgcaggacgctttcttctagaacacttgacacagtgcaaaggaagacctcgctcttccttcctttcattcaccctgtgtgaacgggattcttcatacataactttctttcactttctcatcctgcaaaaaggatgtgagaacggccacatccacaactgtctggtttttgtgcagtgacaggtcctttaagtggtcatcatcactttggtccttggcaaagttcacaaatacctggcaaaaggaagacagacggtcatgaaggcctctgcactgaatcttttgttgttgtagctgcattttatttatggtggcatttttccttgtgttgagattaggagaacacagaattgagtaagtacttgaaggagaaatcccccatgaaagggagagctctcgagaagcacagaatgcattgaaatccttttctacatcacccacatcactaactatttaaaccacccatttatcaatcatccactttagcatatctaggattaattaagaggaaatgaaaaaatacttgctggatacctactaactgccaagctctgtctggtatattgctggggattggttctcatgcattgtcttaatttggctcccacaatcacacaggaatatacacgtccaattgctgaaggtccctgtccccagttagtttttaattggccaataaagttactaacagccaatggctgggcagggagatggaggtgggaattttagatttcctggacaaaggactaagggaaggaggagggtcagaatcaccatgaccgtgatggggaagcagagaggtcagatctaagagctgcaggacagaaattatccagccatggggcagtcaggaaagcatccccaggccaatcccccaggtgtgtctggggcagtagagataaaatatagattttaaaaggtgataactctggaatatcagaggggagagtgggttagccacatgaagtcagggagaagcccagccttgtgcagtgagggcatattaaaattaactcgggtgtttgtgtcttttatttcgaggatccagagaactctcgtgggtggcgagaaatgtgatcatcagctaggacctcagagcagtttcacagattactgctacaggatatcttgttatgtagaagagataaagtctttcgggatagcatttgaaatgtaaatgaagaaaatatctaataaaaaatgataagaaaaaaggaaaaaaagaagagagaatgcttctggcaaaatgcctgactcatgacaggtaatcaatggtagttattgtgactactgttactacagtcacaatttatatatagtagaaagcatcaacgttttgcatgtgcccacagaaatctgtataatataggcagtaatagcaggaatggaatcaaagcacaggctgaagttctctcaagctgatggtggggagaaaggagcaggcatcccaagcctgtagctaaatgtacttttcactgaaagcttacttggtcaagtgttgtctgagagacagagtagtcttctatgtggagtcgctttttgctctgggagaggatgctgaatatcctggctagagatgacaaggaggatggaagctggtactgaagcatgtttcgatgtttctcttttaggacacttcccggaaacgcaagtccaaagaactcctggacaggcttcaggtcagggttggagcctgctattcgtacaactattgtataaccatctccaaacctgaaagcaaaaacccaaacacacacacaaatggggcattcgtagcaaactactcaagaggatactcaattctgaaaaccccaacttgtaccaagaaaaacatcagacccacggagcagtttctgagaaagaaccagttttatctaccgaatacctagctgtgtatggtacctagctcacagccttgaatacgagattccattaaaacctcaatgtggacctaggaagtctgacatagagacaaacagaagcccaaggaatttagtcacctgtccatgtccttgagttaacgcccagttacggcagggtaaggatataaacctctttgtgttacctccacagtgtgtccttgttatcataacatcacaagtgaattattaagtttcacttatataactaaattcggaatagtctcagaaactgactcccagagatgctgagtaacctgcctacaaatcgcacagccagccagtacagggcaaaggcaaatggaatactgcccatttaggctttagagcctgtgttctttttcctatactcttctgtttttattttaagctatcatgcaaacacacatcaaataaataaataaatacatacataaatacataaaaacacaaaacaaaacaaaaaccccaatgacttcagtatgtgctatcccaaagaaatggtccccgttacctgtttttcagatgttggacactgccaaggcacctgaaccttccattgaccattatggccatccttgtacaaagagcttcacattcttccatactgtggggaaacagaatgaggttttcctttcaaacagatgctcctataagcatcagagtatcactatgaaacctggcctttcaatgaaacagacccccattatcctaggaccttgccatgaaacagaaataatagatcttttctgtcatgtgccatacagttgtaaaaagggaaaaataattcaaatgtttacaggaagaacagttgcataaattagggtagatctttacaaatgacaatgcagctgcgagacatgatggcacacctcaattatatgacttgaaattttgttttcagtacctatgttataattaaatttttgtttgtaaaatacttaagtgcttatatctttgcataagaaaaaccctggagtagatacagacaaatggtaatagttatctctagatggaataattccaggtgatagctgtttcagtctttgtctttgtttttttcatttttataaaatgaccagatataatagcaccctacagaagccaagattgtacagtacagacctatgagatgtaaggactacagatctcccctccttgacaatgcttagggcacaattccacaagaatctccgggctttagggtccatgcctgtggttggttcatcctataattagaataaaacaagtttatttgctggaaaaaaaatgtcaaggacaattttttaaaaggatttatttatctattttatatatgtgagtacactgtagaagagggcatcagaccccattacagaatacagaaggttgtgagccaccatgtgatttctgggaattgaactcagggtctccagaagagcagtcagtgctcttaaccactgagccatctctccagcccaagacaattttttttcaatgctaatgatcatgccgggtttcccagagtgggggtggggtgagacatgtggatttctatgagctcaaagtcagcctagtccacataggaagttttaggccacccagggctacatagtgaaaccttatagcaaaacaacaacaacagcaaaacaaaaaccccaaaactttttgtccaaaattatttttgaagtcagagcagtgaaacttacatcatatttttctccttgttctattacatttgctaatcatagagaaatttcatatccacatggtcaataaaaattaaagcttcaacccaaggcttcttcccatactcccagtgttctctacaaaatgaggatcaaggaccactgcccagtctggtctggtttttattcatctgtatgggagcaactatgatgcagtggctactatggtcatctgtggctactatgtccatctagaagccatgtcctcacttctacctttggaggatgaacaacatagagtcatgaagaatattcctgagactattcaaatagcaccttcaccttcagccatgtttgtagggattatctaaggcaaggaaacaagatgagtggagcttgtctactcaggagcctgtaaaggtacagccgagccacccagcgtgctgtgagggagaagcctgtgagggagaagctgtgagggagaagctgtgagggagaagctgtgagggagaagctgtgagggagaagctgtgagggagaagctgtgagggagaagctgtgagggagaagctgtgagggagaaactgtgagggagaagcctgctctggaccagcagatggacttgctatcaccatgccaagtacgcaaaggcctacatgtgacttcagataagccatgatgtctattcaagacagaagaacaatttccaccctccactcactcacacccctctcacactcaccagaaacaccacaggaggtccgccaatcaaagccatggctgtggagagctttcgtttgttgccgccactgtagttactggcatatttttctccatactttaccaggcccagtttgcgaattgcccattcaccaacctagagagattaaaaagcgttttgatttttgtctggctgagtattgtcaccatgctttcttacacacaatgtaggaaagttctttcattgaatcggactcaagtctcagctacctctgaggactcacaggagggagaggggacttatgtagtgggacctgcactccctgcccccgccctctagcctgtgcatgcctcccttcccctgaagtcagtgcagagactgcagtgtgagtaaagagacagtctcaggttgatgtcatgtatgaagaaggtattcaatatataggtgtcaaaagacagtctgctttcctggttcctacaataccttgccaacttccttttctgggactcccctcaggagggcaaagaactccacatgctctcttcccgtcagcagctctgtgatggcgtcaaactgagggcagtagcccatgttctggtgtacttcatggatatttgataagatgctgtaaggaagacaggaccagtcaggttttaagtgtttagagatattctgaggagacaatctggcttgacagttcttaaaaatatatgcttgtatagaacaaatatacaccggcttctattcagaggaccaacctttctgtccctaggatgtcaactctttctatcagtagggtcctgtctcagccctgcatgcttggtccagcatcaaaatgagtctatacaactgcaatatgggctttgccaacagactcagtcacaccaatctggaacttcaacattaagtttccactgcaaatctgactctgtgagctggtcatatgtaacaagtgtctctatactctagtcttccttaagaccatgcagtaccacgtaagtcccagaaatgctgggcctgggttcttgctgccttctgctccccatttactgatttggaacattcatgttccaaacgttcttattccaccaaatatacaatgcagactgccacttattcctctatttaattaattatagatcttctaatatgttaacaggaaaaaatacacatataaataattttacttaaatccgtaggggcaacctctaggttctaaaaagcctgtcaaactaatagttgctattatctaaaaattgtgacattcatattccagtctgatggatgcctttcagtcacctccagatagccatgaacttgacatataggtacagtcctttctgcttatttagtattcttgggttagccttctcaagacttaaaactaaggtacccatggacattgtgcctggctctctctcacagctacattatccaagtcagttatgtaatcagtagctgagataaaccttaggatggacggttattgtctctctacatgttccaggagcttggtactagacagactagggagtcatcactattcccagaatttctattcttttaaggctcctgtagattgctactgaaaaataagtcagtaagagacaggagaagatggatgagttcattatgcctctgactctacaataatattgactatctctagtcaatgtttctgaactgtgagcaatctcccattactaggttgtgaaataaatttagtaggtcacagccagcaatttttaaatggcatgatgcacactagtgtatgaactattagggtaaactacaagtagtaacagtaggtgggtgccattttaattcattaggtgtatgtgtacctctgtgtctgtatatatgtactacattgaaaataccacctaacaggtctctgatacatagctttatccacaaagattagtaaatggcttaatggtgtctttatcaattgttacacactttacagagggcactttaacaggtatatgcccttttaccatgtagggaattttctgaggaaataacagaaattatctacaaggacatatttaaacagcgaatagagaaactaattagtgcccaacatttataatgaattgatcaaataaacatatttacttggtagagtttctagattttagaatatgtaacccattgtaaaatcttcattataaaactatttataatatagactcaaagtctatatagagctgtgctctgttatggcacatatagatgcataacagatcggagccaagggatagctctagaacttggctgtgatcatgtaattcaatgaattgactaaaaatcacagatctattctctcagatcaaggaaattatatatatatgtatgtaaattatggataaataagagggaaactgaaagaaaatgtaaaaatcaggcttatttccaggtagtgaacttggacatgattttaagaggttttgaactcaagaaacttcaatgcttttacaagctatagtaataagatagtcagaaaataactgtacatttatttcttaaggctggagaaagaaaacctcggcagcaaatacaggctgcttctttgcccacctgtttttgttaaggaacgcatcccctctggtcacaggggtgtctccagtcagcatcttgaaagttgttgacttcccagctccgttaactcccaggagtccaaagcactgaaaagcgagactaggtgagcggcaggaacaaactcccaaatcttagtctgaatggcctagcgaaccagccccctgggcctgggtgtgcttcaccatggagcccagagcttcactcttaagtaccaatgagttccatattcagatatcatgagagcatgtatgcctgcctctctctctctctctgtgtgtgtgtgtgtgtgtgtgtgtgtgtgtgtgtgtatgacagagaggagatggggaaggagagaaggagagaggagagagtttatgtatgagccatgttgtttgtgggtcttttttataaagactgaatcatcaagttgagaccaaggtctatctataaagagcaataaaaaagccaaatggtcaaaatgcatacctaccatccaccctaagaacataaaagaagtccaaaaaatacgtgaaaggagaaaatctacattttaccctacttgaaattcatccctgaatggatcccccaaggcgtaatctagatgtgaatgttttctgacactgcctgagagcgtccaaacctgttctgttctgacacaagaggttctcattctctccacgactgatcgcttctcacagacacaaaaacagaagccttgaaaagccattttccatagttacaggacactgttgtttggtttggtagctagggtcggaattaatagagacaaaacacaacaggagcgcagtgcatttacctctccgggagggatgccgatgcagatcctgtcgactgcaggcttccgcttcctcctatagatctgcaaccaaggaaacacagagatcatgcaccttggaggctctgggctctcccagccaactgtggaggaaggggctctgaaagccacactccccacagaacagaactcatcggatggctgcaccacacacagatgtgccaagaacctttctctgtctccgcaatgagtagcctttccctgaccctgaaactttttattcctgagtcttttttccttaaaagacagtgatatattttaaaattaaattatgtaggttggaatctataataaaatgtttcaatcaccataaactaaaatgtgagggtcgtggtattcagaaagggtcgaagcagattgtctctctgagcaacggaggtagagaggatctttgagccatgaaaatcaaaatcaactatttgttctctgcactttgtctcgacatacaatgttagagtgttttaatcactaacacgaatgcaagtatgttcaataaataaatctgaagagtgggaactgcattacagaagtattcccagtaggattttgttttttaattaagaagtctccgtggtgtagtttaagtaaaactgacaaagctttgtgtagaggcacatttggggaagcaccgggttttgttttgttgtcatgaatgaagcaattcagcagaaagctagtgaggagataaaatgcagaaaacagaagagaagctgtggggtccacagtcgctgcccaccttggtcagttccttgatctctaggatgtcattctgtccgccaccgtccagaatcctctgtctctcccgcctcacatcctcatcctcgtcattcaaaggaggaagcttcgcctttacaggtcttgggagaaagagtgtttaagaaaagtcaatcttttcagctcttttccaagggaaaattcaagcttctaaagcactttatcaaggccccgcgccatcacttcgtgggtggacagagcatgctcacggctgggaaaatccctttaactgggcgagttcagcccacccaggactcgtgagtcctctctgcacccatcacgtccctggaacagttctcagataaagctcacctgggcctgatgaaaaatctgtactggatcagaacagtaatgaggaagaacaccaccccttccacggccatggcaaaaaggttccgtcctaccaagtcccaagagagcggagagacgaagcggttctcccctgtgagacacaatgcagacataatctggtcagaggggcgggcatcagaaatcatggccctacttcctgtttctgagatgagattctgtgcgtgactttgttgtttgtatgctttttcatttaaattagttaatattatgctaaaccttaaaggctagcttaacgtaaaatttcgtttttttttttcacacttgaaatattaaaggacttccttcatattaaaaaaaaggaaggatgggaggaagagagggagggagggagggagggaggggaaggaaagtgaggaaaggaagaaaggatttcctcatttggggggtcagtttcacacaatttttctagaaacatgactcatgacaagaagaaaaaggagtaacataggtgtctactttgagatttcatttggaaaactataatacaacctggtatcaggtcagaatttcggagtcaattagcttttagatctgtaagttcattaggattgataagatttcctttttaatgagacatgcccccacccaaacccaaacaattcaagtttgggttgaccaataatcctggataatttggggggggggtcagaaagtatgggtattagaaaatgcattcaaaagatgtctatttctacagtatctaatgtaacctagtgacttaagttagatggttttaggataatatcccttaattcttcatgtctcctctgtatcactaaactgaaaatgttcctcttctatgtttgttaagtagcattaattaactcaattaatcagcaaatgaataatagtcacataatggacagagatattttaaccattataaaagtagaaaaaaagattcaataaattatctctttagagaaggcataaaacacaatatatgagcacacctgcaggcccaggttttcttagtagaatcaaagggtatctctctctctctctctctctctctctctctctctctctctctctctctctctctttaatctccagcctcacctacttgccaaagctgtggcttgatttttccagtgatttgacaagctcaccagtagtgagcttaggaatttatctcaaacaaatgctaggattttcttgtttacaacccccccccccacacccgccatttatctcagtgctatcagaggcacgaatacacacctatatggtgggactcatgacagacagagcagctgtgttggcattggcccatgacagttgggaggacagatggcctgcacccagtcccccttctaaagcagcaatcagagtgccgatgcctacaaaactgtcacaccgccatcgaagcttcccactgccttactcaccaaacctctccagggcatcggccatggcctggttcttcaccatgtcgatgagccctcgccccaggcaaaaatgtgggaagataagaaacacagacttcaggatgtcattgatgtcattgagcttctgcagatgagaaggagagggagggagagggagagacacacatcacttacagtctacattacaattctatcaaagtctaaaatatggacttgaagcaaagcatctgacgtcctggacctgtggatgcagataccagtgaacagcggcgggattttcctcaggaactctgcagcgatagtgtttgaaagcaaacaaacctctaagcctggtaacttttaaccagacacaaatccacaatgaaacattggcttagcatttttaaagcaactcactcctatctaggtgaacatccgagtttcagcatgctgttggaatttcaaagccatcttctcaattacatcagaatgtattatgaccccataagacaaggtttgttaaatatcaagcccctggagctagagatatgactcagtggttagagaggaccagggtttggtccccagcatctacaggatggctcacaggtggctataactctagctccaggggatccaacgccttcgtgtgggccctgtgtgcactacaggcacatggagtacatataatatgtgcaggcaaggcaccaatgcacatataataaaaatagaaaagatccagcaaagttgttacttgctggttgtgctgagccagagcctggaggatgcttacactgcactgaaggaagaactgagggctctgatggtccagagaaaagaaagcttatatcttactgggcagatgaggaaagcttcatattagacttaaatcttaaagggtatggagacactctcaggtcccatgacaaatgaagggcatttcaagacagacctacaggagtatagtggtttaagggaaaactcagctgaaattttaaagcattgggaggggatacagtaatatatagccaacaaggcactatgtgctgagcaagggccacagagagtcttgtttatgagatttgaaactgggagaattcagatgaatcatatataaaccgcaacacaaatggatgggtccaagagaggtatgagaaactgcagagatgtcaccaagtaaacagagatggcaagaggaccaataggttctagtgggaaagacaatgtgtctagtgttggtacctataaatgacttaaatggagtcatccaataggctgtgagaactggagaacagagatccaagagacaatcaaagcatggatctgagagataaaaatgaaaacctgcaatgatggtaaaggcctgaagatgaacggcatcgcccagaaatgctgcctaaataggaaagcaagccagaagagaatgaacacagtcttttccaaagcaacactgaaggagaaagaagtatgaaaaaataaaggaaccagaaagacttgaccagagaaatacaaggcacagcaggacagagagagagttatatgtatggacacagcttgcaaaagcagagaggtcagtggtgtggatgttacaggcaagtggagtaaggttggagacaactgccactctcttgaacccagagtgccagccaatgggacatgctctgcccaatgggacacttacattgtttgtaaacagctccagtacgaaagtggccacactgccattgatgccgatgaagaggttcacactggtgagaaccacataggcggtgctggggatcttgaacacaaaggatgctggatacatgagaggagtgatcgaccacctggtgagacacaaacgtaagcatccactggcgccttctgccctccctctagcaccgggtaccatatgccttgtcccctggggggagagctccactcagagttgccttacccatacagcaagagcagaagggctagaacgggcaggttggtagaggacacataggacttctgctggaagcagatgaagatgataatgaccagtgtagcagggaccacataattgcactaaaagagaaaataaaagttggcccctaagtcagatatacaacaaaccccaagtcttcaccaccatcccacaagaaaggacagatacagatgttggagaataactttgaattaatgaagccacataaactattaatcaaaattccggacaatacagtttgacaagcattttacccttggctgattttataaactgcatgccctttctgtctttcccagagctcagccaaggtgtcacgctcagtaaacttactgaaggatggattctcaggcagagtcatttcaatttcacaggaggcaaatgagtttccattattctacccagagatgattgcgtctgtttcatcattaatgctatattatggtctgcccgcattcaatcccacatgtaatctacttgtgagataagcactcataacatgaatgtcaaaattgtttcatcacaccgggaataattttacagtctgtcctgacagtgcttcaagcattaaaatgaagaaataaagacttgacccagggacaattatgaaaattcatagctggcagagaggtggaggggggcagcacatgcatggaatggaggtgatagtggattggcagactgtaaaagaattgtagcttcagaaggtctcagtcccaccctgcttaatgtgtttatcaacgactccaatagccacatgcttgcagcagactgcaggctcttaggcagggagggtcagaagttcacagagtccaagtgatgtccctgaggtcaaggactcactcttccatctctgaatgacctctgcctagcacagcaagacaccatcaaacacgcagtaagcactcagcggattttaaatgaatggattgctacgtcaagataaaagaaagcaaagaaatgctgacaagatccagttttaatagcagtttaaaaaaaatgattaggttcaaacaagttgattctgcgcattagcacagaatgaacaagaccctgattaacagttcacaggaaataggtttcagtttcattaccaagtagaaataaggcagggcaactttagataaagattagctttttctagactcggaaccattcagaccacagcctgaactcagagttaattcagggctttgcttttggaaaggaatattgatagatggagtggtcagatcaggagactggcaggtcttagagcttgtcttgattagcatatgcaatttcattatctccgtcatcatcacgcatctctgtacagtgtcttagagaacccgggtgctctcagataccatctcgtcttcgagagaagtttctttactgagagttgcctttaaacgtctgggggaaacgtttattgggcaaagagttagatctgctctgaattaatgacggccataagggcgtatagttgccaataattggaccttcatggttctatgaagtcgttcatattgatccaaacgaaaacaatgcagtatagttgatacaaaacagataaacgacaatgggcagacaagatgctggagttttcagtggcaaatggcttccttagtaaggcaaaaacaaaacaaaacaaaacaaaacaaaacaaaacaaaaaacccagaacaacaacaaataaacaaacaaacaaaaaaaacaccctgactctaagttaaaacacatcagataagttagaagttctggcttgggtttttatgaagtctaattgtagtctaatttttaaagggaattctggctagatttatgtcaacttgacacaagctagagtaatctgagaggagggaactaaattgagaaaatgcagccataagttctggctgtatagaattttcttaattagtgactgataggagagggcccagcccaagtctggtggcaccaaccataggttagtggtcttgggctctataagaaagaaggctgagcaagccatggtgctggtccgacatgggccttgatgggaacacgtgctcctgggacagggtcagtggaccggatcccacccagctagcttatcctttgtgcttaacaaaggtaggcaaatctctgaatccaatgttaaaaggacatgtgggttgctgtctcctaagaatcaaagggctgggtcactgattcctaggataatcaaaagggaacgtggagcaaatgactggattgatatataaaataaaagactgggcttatgatctgcaagcgatgcattgtccagagaactttttagaatagtaagaaaggactgtctcagcagagaatagcaagaaacagctgtctagagagtgtgtgtgttgtctgaagatcgatctccagagaaagcagatcagagagaaagaatgcagaacagagagaaagcagcttggaaagctgtctctagcagagcttggagtcctttgttttcaccactcccagacactccttcctcagaacccctctccaagccaaggctggtccttggtaccactaggagcaagccagtgagcagcatgcctccatggcctctgcagtagctccctgttcaggttccagccctgcttgacttcctatcccgattgcctttgatagtgaactgtggtctagagagtaaggtaatcgttggtaataattgtagtcacggtggtcagatggtcccatggtgtgcaattacattttaaggctaacattatgtttggtgtcctggggccatccagcgggctctcctttttcctattttacactggtttacactaagtgggatacttcccggggttagtggcaggctgtttttccttagccccatgccttcacagtccccattgagattcacacagagatagaaggtcctgtgtcctcaccatatcccagacaaaattggacagccagtagatgacaggcttcacgccgctgatgaactgaagatgcttggctttgctcacacgctcctggatcaggaacacaacaaagctggcagggacaaaggacatcgcaaagatgacacagatagacacgaggacgtcgacagaggtggtcatcctagaagggaagagacagtaaagatcagaggaacctttgatgcagctggggacatggtatataattagctagacataaggacaaccaaggcacagctggaacaaaaccccagtcgccaaacattttatctcaggggtccatctaattattttcaagtaacgttaaaacaacaacaactcaaacctaaaactgatttggaaaatattaaaatgggtctactcccataatgaaactacagaacaaagtataggtgtggcctaatagcggtcatttgtctccagtttctgatcttagagtagtgagttgtaaactcccatatacaaagaaggtgtggcttggaaactatttcaaacaagaaagaaatctaatctggaagttagtcatacaagttaatcatatgactatactataagtaagtggaaagcaacaggatacatatatcaggctaagacataaaaaaattacacatacacacacatattacatatcagtctaacaccatctaatatgtacaaaaagcccattatacaacgtcttgtaaagatcctgatgatcaacattaatattctacagtagtttatagtaaagtgccattccccacatatccaagaggggatctaatatactgattattaactctgtgctgggtgctggctgacgaaatgtatacaaattacctcatctaatattacatacctataaagcttagacaccaaagttaaatccagattcttttattccaagactttaaaatttgcagacatgtacaggagtatacacatgcatgtgtgtgtgtgtgccacacatgcatacacatgtttcaagaaagaaactattaaatgcatgtttcactgaatttaaaaacctcattttcaagcaaatgaagtagtaattactcttggatttcactaacaattttaattccctacatgtgagtttatcaatgtgatgattttcacatatctggtcttccttcttcaagtcaagaaagattgccagtcagtgcataaaccaatcattttctgcccagagtctggatcaactcaggctcatacaacataattattactagctgttacaaccagctttgcggtcttttcccctggtgctcggtcaccctaaggtcttcacgcccatccctttagacacacttacagagccacctctgagagctgctgtttagtgaggttcaaggggtggttgaaagcagtgattccatactggctcgggttctctcccttctgcaggttggcccggagaatggcattgttgatgacattcaggaacgaactgatagcatgccagcccttgttattgaaccacacctgaagtaaaacagaccaaactcaaggtaatactgccaaactgttcttcaagaagtaagcgtatatgcacaaaacgtgcatggaaacttcagaaacttagtgacacaccaaacaaaagcattatagattcaggatccaccaaccactggccgagggactaggtgaagacctttacacttttaactagttacccacatcgagtgagaggcagccatggttgccgccttcctgctgcacaggaaacggatacttaaacaggtcaggtagcttaaggcaaagaccacagcagtttacaagttacgtctggtggcaaaacacattctcttagtcactaactatgctgaatcatgtcactggtaagactaacagtttgcccttttctaccacgaatgtccctagttacttgcccgtaagatttcaaggaacacgggattattgtttagcaagaagctggcagaacacaggcaggggtgtaccttgacattgtttttcgtatccagccctgccatgaaccttcccaggctgctgaggaagcgatctgcggagctgtcctgtaaacaacagaatcctgcctcaggtgtctgttcacacacacaaggggtgacagcaagcaatgagacagccctgtatcaaccaagacaacttcctcttcagtcactgaaattaaatctaaagccaatgcatatgtagttcctgagcaccaagtcactagaatccaccgtactaatgttgccatgaagtcacaagtcatgggaaaaaatcgcgctctctctctctctctctcacaaacgcgcacacacacacacacacacacacacacacacataacctaaatcacacacacaaatacataaatacacaaataatcccaagaatttggagctagagatggattagaggtgaagaggacagtctgctcttccagaaaaccaaggttcgattcccagcgcccacatgggggctcacaagcatctgtaactctagtctcaagggagcaaatatacgcttctggcctctgtgggtaccagaccacacacgtagtataaaaacatgcacgcaggctagccacctatactcataagtgaaagtaaattaaatttccaagattcttcagagtctcttggcatcatcccaagaactaaaacccataggtcatgcagatgcatcctacggcttaagcgccctaggcccatgactactgtgcaaaaccccagagtccacatcacctgaccatttcaacttgggcaacctgagatagggagaaataaatatggccttagctgctcttaaagcccagccaaccaacatggaaagtgaatgaactcatttttcccatttcctgtctagccaatggctgttttaggaaactgtttgaaattcaatttattttgcccactagctaacttagcagcttggcttttgtaagagcttttaatctctgagttcatttttgacttacactttcagaaacgtatgttcgtgtgtgtgtgtgtgtgtgtgtgtgtgtgtgtgtgtgtgtgtgttgggtatgagtagtctggtttatctgaactgctttgtatacaaacctgttcagactagtatcactacacctgtgtgccagcaattccagacccacttttctttttttttttttttttttttcatttttaccatgactttattttattttttttttccattttttattaggtatttagctcatttacatttccaatgctataccaaaagtcccccttacccacccacccccactcccctacccacccactccccccctttggccctggcgttcccctgtaccggggcacacaaagtctgcgtgtccaatgggcctctctttccagtgatggccgactaggccatcttttgatacatatgcagctagagtcaagagctcaggggtactggttagttcataatgttgttccacctatagggttgaagatccctttagctccttgggtactttctctagctcctccattgggagccctgtgatccatccattagctgactgtgagcatccacttctgtgtttgctaggccccggcatagtctcacaagagacagctacatctgggtcctttcgataaaatcttgctagtatatgcaatggtgtcagcgtttggatgctgattatggggtggatccctggatatggcagtctctacatggtccatcctttcatctcagctccaaactttgtttctgtaactccttccatgggtgttttgttcccacttctaaggaggggcatagtgtccacacttcagtcttcatttttcttgagtttcatgtgtttaggaaattgtatcttatatcgtgggtatcctaggttttgggctagtatccacttatcagtgagtacatattgtgtgagttcctttgtgattgtgttacctcactcaggatgatgctctccaggtccatccatttggctaggaatttcataaattcattctttttaatagctgagtagtactccattgtgtagatgtaccacattttctgtatccattcctctgttgaggggcatctgggttctttccagtttctggctattataaataaggctgctatgaacatagtggagcatgtgtccttcttaccagttggggcttcttctggatatatgcccaggagaggtattgctggatcctccggtagtactatgtccaattttctgaggaaccgccagactgatttccagagtggttgtacaagcctgcaatcccaccaacaatggaggagtgttcctctttctccacatcctcgccagcatctgctgtcacctgaatttttgatcttagccattctcactggtgtgaggtggaatctcagggttgttttgatttgcatttccctgatgattaaggatgttgaacattttttcaggtgcttctctgccattcggtattcctcaggtgagaattctttgttcagttctgagccccattttttaagggggttatttgattttctgaggtccaccttcttgagttctttatatatgttggatattagtcccctatctgatttaggataggtaaagatcctttcccagtctgttggtggtctttttgtcttatagacagtgtcttttgccttgcagaaactttggagtttcattaggtcccatttgtcaattctcgatcttacagcacaagccattgctgttctgttcaggaatttttcccctgtgcccatatcttcaaggcttttccccactttctcctctataagtttcagtgtctctggttttatgtgaagttccttgatccacttagatttgaccttagtacaaggagataagtatggatcgattcgcattcttctacatgataacaaccagttgtgccagcaccaattgttgaaaatgctgtctttcttccactggatggttttggctcccttgtcgaagatcaagtgaccataggtgtgtgggttcatttctgggtcttcaattctattccattggtccacttgtctgtctctataccagtaccatgcagtttttatcacaattgctctgtagtaaagctttaggtcaggcatggtgattccaccagaggttcttttatccttgagaagagtttttgctatcctcggttttttgttattccagatgaatttgcaaattgctccttctaattcgttgaagaattgagttggaattttaatggggattgcattgaatctgtagattgcttttggcaagatagccatttttacaatgttggtcctgccaatccatgagcatgggagatctttccatcttctgagatcttctttaatttctttcttcagggacttgaagtttttatcatacagatctttcacttccttcgttagagtcacgccgagatattttatattatttgtggctattgagaagggtgttgtttccctaatttctttctcagcctgtttattctttgtgtagagaaaggccattgacttgtttgagttaattttatatccagctacttcaccgaagctgtttatcaggtttaggagttctctgttggaatttttagggtcacttatatatactatcatatcatctgcaaaaagtgatattttgacttcctcttttccaatttgtatccccttgatctccttttgttgtcgaattgctctggctaatacttcaagtactatgttgaaaaggtagggagaaagtgggcagccttgtctagtccctgattttagtgggattgcttccagcttctctccatttactttgatgttggctactggtttgctgtagattgcttttatcatgtttaggtattggccttgaattcctgatctttccagaacttttatcatgaatgggtgttggatcttgtcaaatgctttttctgcatctaacgagatgatcatgtggtttttgtctttgagtttgtttatataatggattacattgatggattttcgtatattaaaccatccctgcatccctggaataaaacctacttggtcaggatggatgattgctttaatgtgttcttggattcggttagcgagaattttattaaggatttttgcatcgatgttcataagagaaattggtctgaagttctctatctttgttggatctttctgtggtttaggtatcagagtaatagtggcttcataaaatgagttgggtagaataccttctacttctatcttgtgaaaaagtttgtgcagaactggagttagatcttctttgaaggtctgatagaactctgcactaaacccgtctggtcctgggctttttttggctgggagactattaataactgcttctatttctttaggggatatgggactgtttagaaggtcaacttgatcctgattcaactttggtacctggtatctgtccagaaatttgtccatttcgtccaggttttccagttttgttgagtatagccttttgtagaaggatctgatggtgttttggatttcttcaggatctgttgttatgtctcccttttcatttctgattttgttaattaggattttgtccctgtgccctttagtgagtctagctaagggtttatctatcttgttgattttctcaaagaaccaactcctcgtttggttaattctttgaatagttcttcttgtttccacttggttgatttcacccctgagtttgattatttcctgccgtctactcctcttgggtgaatttgcttcctttttttctagagcttttagatgtgttgtcaagctgctagtatgtgctctctcccgttttttcttgaaggcactcatagctatgagtttccctcttagaaatgctttcattgtgtcccaaaggtttgggtacgttgtggcttcattttcattaaactctaaaaagtctttaatttctttctttattccttccttgaccaaggtatcattgagaagagtgttgttcagtttccatgtgaatgttggctttctgttatttattttgttattgaagatcagccttagtgcatggtgatctgataggatacatgggacaatttcaatatttttgaatctgttgaggcctgatttgtgacctattatgtggtcaattttggagaaggtaccatgaggtgctgagaagaaggtatatccttttgttttagggtaaaatgttctgtagatatctgtcagatccatttgtttcatcacttctgttagtttcagtgtgtccctgtttagtttctgtttccatgatctgtccattggtgaaagtggtgtgttgaagtctcccactattattgtgtgaggcgcaatgtgtgctttgagctttactaaagtttctttagtgaatgtggctgctcttgtatttggagcatagatattcagaattgagagttcctcttggaggattttacctttgatgagaatgaagtgtccctccttgtcttttttgatgactttgggttggaagtcaatcttatcagatattaggatggctactcctgcttgtttcttcataccatttgcttggaaaattgttttccagcctttcattctgaggtagtgtctatctttttctctgagatgagtttcctgtaagcagcaaaatgttgggtcttgtttgtgtagccagtttgttagtctatgtctttttattggcgagttgagaccattgatgttaagagatattaaggaaaagtaattgttgcttcctgttattttagttgttaaaggtggcattctgttcttgtggctgtcttcttttaggtttgttgagggattaccttcttgttttttctagggcgttgttcccgttcttgtattggtttttttctgttattatcctttgaagggctggattcgtggagagataatgcgtgaatttggttttgtcgtggaatactttggtttctccctctatgataattgagagtttggctgggtatagtagcctgggctgcagtttgtgttctcttagtgtctgtataacatctgtccaggctcttctggctttcatagtctctggtgaaaaatctggtgtaattctgataggcttgcctttatatgttacttgacctttttcccttactgcttttagtattctatctttatttagtgcatttgatgttctgattattatgtgtcgggaggaatttcttttctggtccagtctatttggagttctgtaggcttcttgtatgttcatatgcatctcattctttagatttgggaagttttcttcaataattttgttgaagatgtttgctggacctttgagttgaaaatcttcattctcatccactcctattatccgtacgtttggtcttcttattgtgtcctggatttcctggatattttgagttaggatctttttgcattttccattttctttgattgttgtgccgatgttctctatggaatcttctgcacctgagattctctcttccatctcttgtattctgttgctgatgctcaaatctatggttccagatttctttcctagggtttctatctctagtgttgcctcgctttgagttttctttattgtgtctacttccctttttaggtccagtatggttttgttcatttccatcacctgtttgtatgttttttcctctttttctgtaaggacttctacctgtttgattgtgttttcctgtttttctttaaggacttgtaactctttagcagtgttctcctgtatttctttaagtgatttattaaagtccttcttgatgtcctctaccatcatcatgagatatgcttttaaatctaggtctaggttctcaggtgtgttggggttccctggactgggcgaagtgggtgtgctgggttctggtgatggtgagtggtcttggttcctgttagtaagattcctccgtttacctttcgccatctggtaatctctggagttagtagttatagttgactctgtttagagattgttcttctggtgattctgttaccgtctatcagcagacctgggagacagattctctcctctgagtttcagtgctcagagcactctctgttggcaagctctcttacagcgaaggtgcgcagatatcttgtatttggacctcctcctggccgaagaagaaggcccaaaacaggacctttctcagacactgtgttgctttggcagttcccaggtggtacagactctcacctaagcatactaaattcctaagttccttggagtcccgggaccaagatggcgaccgctgctgctgtggcttaggtcgcctccccagccgggcgggcacctgtcctctggtccggaaggtggtcggctgtccccggcccacacagggtgctgcctcagcgcctctgtgcttctgcctgttccagaagctgtcaggttctctggcgcaccctctcacctgttcagactaatttcctaagttcggcgggtcccggaccaagatggcgaccgctgctgctgtggcttaggccgcctccccagccgggtgggcacctgtcctctggtccggaaggtggccggctgtccccggcccacacagggtgctgcctcagcgcctctgtgcttccgcctgttccagaagctgtcaggttctctggcgcaccctctcacctgttcagactaatttcctaagttcggcgggtcccggaccaagatggcgaccgctgctgctgtggcttaggtcgcctccccagccgggcgggcacctgtcctccggtccggaaggtggccggctgtccccggcccacacagggtgctgcctcagcccctctgtgcttccgcctgttccagaggctgtcaggttctctggcgcaccctctcacctgttcagactaatttcctaagttcggcgggtctcggaccaagatggcgaccgctgctgctgtggcttaggccgcctccccagccgggcgggcacctgtcctccggtccggacggtggccggctgtccccggcccacaaagggtgctgcctcagcgcctctgtgcttccgcctgttccagaagctgtcaggttctctggcgcaccctctcacctgttcagactaatttcctaagttcggcgggtcccggaccaagatggcgaccgctgctgctgtggcttaggtcgcctccccagccgggcgggcacctgtcctctggtccggaaggtggccggctgtccccggcccacacagggtgctgcctcagcgcctttgtgcttccgcctgttccagaagctgtcaggttctctggcgcaccctctcacctgttcagactaatttcctaagttcggcgggtcccggaccaagatggcgaccgctgctgctgtggcttaggccccagacccacttttctgacccgtgtctggacggatgctgtaccttggtcagcttcaggagtttcttcatttgcttgatagcatcattaacttcatggctcggaggaagtgcttgagaattactgacacccagggaaaacccgccatacctaaaagaaaggctcgccattaaaagccatacccaagccattactcacggcagcagatagcacagtgtacaaggttctcggagagccacctctttttcaaactagaaccaacgtttggctaagataggtacatgttgcctcccctggtgaaatctagctatcttaattctcaaaattgctgcccagtagggaaggcctagagctaatgataggcacccatgctataggcgggaagacaggaagatgggcagtcttgaaaaccagggagggatcacagacaggtgatcttccctggcattaagtaagcctatgactgctctgctcagagctccagggacctgacccctggagaaaaggcagggtggaaaatggaaatttgagaataaaacctttgaggtctttggaacagccacatgggccactcatgacttcaagaatgcttccttccctactctcaactgctccttcaaaatccagtagggaaaaatcagtggaaacagggtggaaacaaatgcttttgatgtctttcctttccaccaagacctcacatcatatgaaaggcctgaaaggttttccttgagtccctgggcacacttgggaatctgtctgggggaaaatacagctaggataggtttttttttccttcatgacattttactttcttaagtctcaagaggcccatgagtgatttctgaaattcctcaaggaaatcactgtatcaaatatttcaggggcctccggagtgaagaatgagttacacaaattccacagtgagtctactataaccgtgccttggtgtgttggtctgcagcaccccagtccccctcaaggtgaggtgacacccaagagtgtgcacaaggcaacagtccccaaacctgtaactctgtcttgattcaagagccctacatctaaatcattctcctgagacctgacgtgactcagggagaatggggagaagggactgacttaccgaaactcgttcacccagatcttattctttaagctgcagagagaaaagacaaaccaaaaatcagatctagaaagcagaggtcatagtgacgaggcaacagtaatcatttacttgaggacaaagcatagaaacgggcacttctttaactaggcctatgaccagtgctgtagagttgcatgcatgtaaggaaggccactctcagcatgtcctgtctgctgtcttagaaaccttactctaatgagaatcacatagtaaattaagccaatgtaaaaacccaccttacatgcaggcatggtggtacatgcctttacgctcagcactgcactcaagaggcagaggcagatgaaactctatgagtctgaggccaccctaatctatatagagagaattccaggacagccaggactaatgtagtgagaccctgtcttaagtaaacagacaaataaataaatgccttacagacccagagaccctgtctaaaacaaacagacacacaaataaatgcattaccatcccagatattactgaactaaatgctgtttattgtgactctcatgtggcaacattacagctctgagaaatgcatggcctattcttattctattatatccttgtcatttaaagttagttcaaacattatggaccggacacctgaccatacttatggaaaggaaacatattctctgcacactgactaaatattggtcactatatgaccatgtcccaggaatttacaagtctctttaaaggctccatatgaaagaaaggctactgtgtctaccctgaccttgtttatggagccatacaggaaagaggatctacaggcttttgctcgtatcatctctcttacccctcaccacgaacttaagagtgcaacactaacatcaaatgtaaaataaaaattaaaattcatataagcgaagatgttatgagactaatgggtcagaattcaaatctgagtccacatttgtcacttattttcagcctaaagcaggcagcctcgttctctaagctgaactttcaaggctcacaagcccccgtatcatcttgtctaactgatatcaagtgctaaatttcccacagagccatgattgtccatttccctaccgctcaagtctacatctgcagcaagccaggtttcaacaggacgatacctctttgctatgatctgcacgtacgtcttcaccaggtaatctgaaatatttcttcctgtcagattctgaaggatgtctgcggttttctgttttctctgtcatcacatagaaaccaagctcacgtatcatacaggtaagaatcagggcagaaaacagacaaaaacaataggaccccagggcctacgcaagaacctcagccagtcaccaccaagaccattggcacttgtccctcgctcataccaagccaaaattatctccaggaaagtattcacttgaatatctagatgggattctccacatcacctgaatacttaaggaagagcatcataaactgcccaatgaattcttctatactttcgagtcatgttggtgagtgggccagatgattttaaagtgacaagcatgacttccttaagttttcacatccactaaaagttccctgtccccaccctccaacctagactactgtcctgaaattttcaggggaaacaaacaaacaaaaacaaaacaccacacacacacacacacacacacacacacacacacacacacacacacacacagactcagatctccctccaaacctcagagcccagagaatgtcagagttgatgagatacacctaagctttgtggcccatttactctgaagtgaaaacacaggcccaaagagttaacagggccagcagctcccactgtggcagcaccaggaaaggaagctgtgcctacagatgctctgtgacaggcactggcacaatgtagctcactcgcctctctcaaaacccactcacttttctcaagagagatcaagagtgacttcacatgtcactcattcttgctgccacacagaggctcccaggtcctaccctgagccaacttctcagtcatgccgacagggactcacctgaggaggtggcagcccccctgcccctgggggacacacaggcagcatcttcttgattttgtcactgctacactggcacgcaggtgaggggttcttcatggtccagtttccattctggaagaggtccacgatgctctgggggacggggctgatggtccagtcctcctccccagccaagcaaggggtatctctgtaaaaggagatagcaaatgttctagactctcctgaaaggggcctgtctttccttgatgctcttagagctcaggtttgctctttagaaaggacccatgtgcctagtcctaccatttgaaaaacagcttgacttcattatgtttgctctcacagaagcctgtggaagctgggaatcacagaaaacccaggaaaataggacgtgaacaggctccagatggtcacgcagagctctgctcaacccagctaaccagtttgctgacacgacacacagaagagtccactatgggctgcacagtgttctgcatctttgggagtctggagaaagcaatgcaaactctctgacttcatggattcttcagggactacaagtcaacaaatccaatcttacataaccccagataaagcaaacacaacaggaaggtacatggagaaagcagacctttgagtcagcttcaaccaaaacataaaaactatcagctagttaaagaattgagataatgggctggagagatgccttggtacataaatgtacctatagccaaaactggattcaatctctcgatcttgttatactctgacctcttcatgtgtatcatgacatgcatacacacacacacacacacacacacacacacacacacacaaacataaattaattttaaaagaacagtggagaatgaacatgccaggcagcacccgtgggcagtcagatacaaaggctctgcaaagaaatgagtgtatgtgtttgatgaaaacaagaaggttatgagatgagctctcagacaatgaggagggaagaggggaggagctccatgacagagtcatggttaggagcttgtatcttaggctcagcatgttcaaagtcttgtggagaatggcaagatccaaatgatgttctataatgagcagagacttgagctgagtggagtgggaatggtcactgtatgaaaggggaggttgtctaccagcatcctcagagacaacgcagggccctgactgtttggtgcgaatcacaagtcccttgcaatctcagggttcatttatccctactgataaaataagagtataaaatgatgtctcatttctagcctctcttccatatttccaattttcaagattccacaatttaaactagggacacaacctttacacctcaggtctgtgcacatgtgtgtgtgtttataaatatgcacacaagtgctttttacgcaaataattcctcattttctctttaaagcctcttccctaaaatatttacccttatgaaactcatacctaagacctttaaaagacaacaggctgagacaaactaaagaccacttgaaaaagcaacttagtcagaattctctatcctaatgatccccaggaacctaaaatttgaatttcagtctgagatggtggggtgaggctctgcctttcagactgcttccagcagagcatccatggtgcacagacagcacacatactttctgatgtcatggacatttcttttatctctgcaggccagctgtcggctcagttctctctcctatagatctggcctttgctggaatcaatccccgaatccatacaattcagcttaccaacaaaggacccagctacccagattatcatcttacctcatcctcctttcctacaaaaccttcacatggaatcttaactttttggtgaagttaaggagaagctgtgtccttctagtaagtactaaggatatttagtaactacctactatggtttgagtcttcaatattttccaaaggctcaaatgctaaaggcttgatccctagattgtggtgttcctgggtgctgacagagcctgtatgtaagtcgcaggacctaagagaagtaagatatgtctctggggacacacactcaaaggaaatcatagaacctcaagccttcttcctcttcttttgctccctggcttggcatctatgatataagcagctattatattgtagggaagcacatgatccctaccacgatgctctacctaactagggaccccaaaggggccccaaacaacacagccaattagctatgaaccaaaagctctgacaccacaagtcaccaataaacctctgctcctcataagttgattttctcagggacagaacattgtctaacacatcatctgatactgtggtggtttgaaccgtcccaaaggctgatatctgaatacttgatccccagttggtagaactgtttgggaaggatcaggtagtgtggctgtgttggaggaggtgtgtcactgggagcagactctgagatctgaaaagactcatgccattcaaaagattctgtttcctgtttgtggatcaggatgtgagctctctgctgctgcctcagcatatccctctgcctgcagccatgctcctcacaatgaggctcatggactcctagcccactggaactgtaattctcccccctcccccacaaagtccttccctctataagctgccttggccatggtgttttatcacagcaatagaaaagtaattaagtaaataataattaaaaactgacaaatacacagaaatattcatctccaaatctgctaggttttttataaacatagccatcggattcagtgctctgacacagactggccatcttcacctttgccgtttgggattcaaatgttcctttttgtgcttctctatcattctccacagttccttagctatctcgcactgcccgtgcatatggacctcaggcataaattctctctggacctgcaaacttgaagctaagtcttctagctccagttcactgcacctcacctctccactggtttaaccacagtgtcccaatgacttgcttcttcagtacatagagagtcaactgggcatatcaccgagtttatttacctactttttaaaactagtcctgatgaaaatatgcaactgtacaaaaaaagtctctgttgttataaaaatgcaatcagtatgtcatctctgttggttaaagaaactgatacgcaaagatgcaaacttcacaccagtctactatggcacgcaagtatgggagctggggtcaaggagagaaggggagagcatttggtcagtaagtgaacactgtgatttaaaatcaacatacagcagagtaaacaaatgttggtaatgatttggtgtacagggtgctagaagagtttatttgttcctaaattgatttggttatcctctggctttttaaaataaaaattgactgaaaaaaaaaaaaaaacctgacagtggtcacaatgaaacaggcaataccaccagaaagaaaacccggcggccgtcatgagaaggcagctcaaggctgaagtgtcactcacgggattgggtttccttccatacagcgggtcccaaagcctggatctttggtcagagcattcaggagttcctgggtgcccatgtcctcgggagcatcattactagagatacaagagagacatccaggtcagtcgctcatccaaaccaggacttggaggcaggaaaagttcctacagaaaacgctctgctaagtgttttctgaggaatgggcttctaagactaaaataaattatatacaaaagccacctgcaaggagcttcaaacatctgccatcagggtgacatacagtgtccccaatgaagcatgtgcagagattacatgtgaaggtgtgcatatacacacacacacacacacacacacatacaaaaatcattgaagatcagtatttcaaaactactttgataattaccacttgacactgacagctaggatattccaagaacagacaggaagattttattgattattggtatgcacaattaaaaagtccaagaaataatgggcctagagcacaaaccaatgtcatgatctgtagccatgggcaatgctaggtcattggctagaaagggatcgaacgaacttttacctataggagatgaaagtgagctagagcaatagaggctaataaacaatctatatatgatctatacatatcctacacacacattcacacagagtttttaaaacgtccctctatattactgccactttctcccatctacagacctacccgtgcatcagaactgaagaaaacctgtactaaacaaggtctcaaaagtcccctatcttctgatttttaacaggatcagtatggaataggggcattcttgcctgaagatgcacacttagctaacatcctaacctgaaagatttactgattagtgaattaaagcatacctgacaagagcctaacaatacaaggggaaatgcccagcagagattcacctgtatttcccagtatcgtttactattgttctttgctacagtattggcttgtataggagcctgaaccatcatgacaagacccatcccactgtagaattgtggattctgactccttggctctcagtatacgaaacactgttggtctgtttcaaccctctctgccctgaggcacaaaggacaaacatacctgacaaatgtatactgctcattatacatccagggctgaagttccaggctggggtacttgccaaagggtggcacaatcaggctgaagaccagggcaatgcaaacaaagacagctggcaggacaatctataaacaggcattggagagggaagagacaataggacacgtttttagaagcctgaagagcaagcccctgaaagtctagccagccccatagcctagcaacacaggaatgaggaatacaggcaaggcctggggctgagttctaccaaggtatttctggcagcttgaagagaaaggagactgaaaattaagcccctttctcccaaggcatttccggatgctaacagcacaaagacagaggctatggtcacctaacagaggcaaaagctgggaatgtcacagagtaaagagtcagagtgactgactctttaggctcaatcctttctcccctccaaagactgaggaaaaaccagcctggatcatagactcaggtagaaggctgaacagccctggactgggagccaggagactgaatcctggttccatctccacttgcaggggtcctatgtgacatcagtaaatctgaggactgagaacatgacaccaactcccccgccagaagcagcagcagccagcatctctcctatgagcactgcgaaaagcataattatctaaatctttccttgaaattccccaaatttcctatatcccttctctgaaaacaacataatgtatgggtcagctaagggatctcttccttcctttctgagaaatttaccctttaaaaacttcagtgattcaatggtaaccctggctgcaggtgtaacttggtagtagagagctcacacaccctgggattccatccccagagccataagaatccaaacaatcactctgattttaatattcctatatttcaatatagaaaattatcactggatgaataattccactggaaagtactgtagtgagaatcagcccccttaatatcctatttcgtagttattggtggtgttagtatcattatcaccattcacaaactagagcatcatggatctgagggaagtcagccagtgattcactgaaccagattccaaatccagatctgcaggcttcatgctcatgctctgagttagtgttgcccaggtgggctgcagggagggcttcatggacgtgttctctataattcttcattttgtagaatgaagtaactttatagctgtctttaactgataagtcagcatgcaaactgtgatatgggggaatcaatgggcctgttccattcctagctctctcgctctcgtcaattaagagaaaaacatacccaccatgtttctaataataagtacactgccaagcacaactcagcatggcgactctcatgttatgagagttgaattttcccaactggtttgtctaaactgtgtccctgccatgatctcctctaaattatagccacctccccaagtaatgtcaaagtccattctaaataaattcgtttcatccccctaacagccacacatccccgctcattttcagatgaagaatttgaagcccagggaaatcactggcatactggcccagcatctctatcttgaccacagtcctagcctgtcttcaccagtccaagaaggcagagcccagcacacctcacctgagcaaagaaacccttccggctccgtctggcaatcagcagcctcttccacaaaagggccacaaactgttgctgggtgagtttccagcccttcagctggtaggagcctttgccgtccatcccactgagcaggtcggtctccctggattctgtaagcagcacaaatggagggttggctataatcagtgtcacctgtctctgtacgactctactctttcctctactagcttcagtagtcatcttggaagctggggtttgaagcctccagtacctcacaggagtaaacaggtttcttgaaaaactcaactttcaactcaaagttatatttctcaacatctgatgagcacagagaatgaagatccctcaggacaagcaaagatgtgcacacaaataacagaagcaagctgtgcccaattccatgaactggaattcacgtaggctggcacatgatggttattagtcttctatcttttatatgcatggtaaaaagtgaacacatttaaaacatctaagtcctgacaatgaaacatgaagtaagtacaaaaaggcagactcataaaagcaggtaattttctgtcctcaccaaaagttgtctagaaatccttgtctgaaactaatgactgctaactgaggcacttagacaagtctacgaattcgtttcatttcatactgcccttctccgtctcaaccacatatgggcacagtcattaaaaaatatacatgtcaaagaacacaacttcctcttttattccttcaaaatcaaacacccattcaatacactttcattcaacacttaagcacttaggtgtgcaagaaactggtaccctacagagatgacaatataaacagcttcagagcatggatgggtcatcttctcatacccatctgagaaaaccttctattagatgatgtgataagggagggtttcttcatgtctgaccagacatgccacattggaaaaggggctctctcatcttttccacttttctttggaacctgttagaatctgtgatcttaaccaaaggcgatcaaagagatagctaagaaacacataaaagacaaactcaagttcaaacaacagaacagagatcctgcccgtgcgaacctgggtctatgtcagagtcattgggatcaacagcatcatcttccgtaaatgggtgcagacagctctgcttgtccccgaaggcccgtctgtttcgtcttgctggcaaagtaccatctaaatggaaaaggaaggaatcctatggtttatttatttgtaagacagcaaaccttcccagagcaaacccatacactaacaatgggattgaatcagaccaatgcaaagggggttagctccaacagccaacagaaagcctacccagtgtgcagccctctcagacaggttacctgaggtctcagcatccaccccgctctcttcagccactttgaggaatatctgagaaattaaagcaggatacaatataagtgagcacttgttttatgaaagaagttatcacttcccagattaggttatggaatcccacgttaggctcttaagataagaaggtagaggctgcatttatcaacaagaattttatcagaattttagagaagctgtttggggcagaaaacatctcctcacgtgtgacagctatcagtccaggcaactctttcaaaaacaaaccagtacattatgtgtgtagatgaaattcatgctgaccctacagagaacgaggcaagtcacttttctcaggtctgtgctcccagacctttgagcaggacagcactgggatcactcatgcaagacaaacgacgaggaaatgagcttcttatcactagaaataaatattatagtagacggacatctgaatgaagtcactgatttccaagcccgcctacagaccactctgtaggaagcatgtgacagaagctcaaaaagtcatgtctacagaaatcccaactcaaaggcgcaagacaggagctttaggatctctactgtcatcacagatgactctactgcacaatctaccctgggaaccagccaaggcagacaatgtttacagccgtcccaggcctgaaggcttgtgatgttgtatctctaaagagaagcattgctacataggaaagttacctgggctttgaagccccaaacctctgattcataatcttaaatcaacatcattattaattctcatcctgctgtgatcattaatgagccttcaatatttaaaaaacaaaggccaccaatggagtgacacagatacactgaccacactccaggccacaccccacacccaggagcagtccaccaacacaaatagatcccatgaacttattttgtctttttaaaagagaaaatatgaagttgggtaggtagagaggtaaggatgagggatctggaaggaactgaaaaaagaccattaatattctggaatatagtctcaaataataagtaaaaatattatttaaaaaaaataaaacacaggggctggagagattattcagacatttaagagcactgacagagagcctggttcaattcccagcaaccacatggtggttcacaaccatctgtaatgagatcagatgccctcttctggtgtgtctgaagacaactacagtgtactcaaataagtaaatcttaaacaaataaaataccaatagtaataacagattaaataataataatagattaaataaatcttaaataaaatacagatactgctacttggaatgataataatgataataaaataaacgaggccaaagtttgaaggtgagcaaggagaagtgtaagggatgatttggaagaatgcaaaggatgggagaaatgctgttcgtcaagtttcatctcaaacaaacaaaacaaaaacaccaaactcatcaagttcagcacctggctccagtcgactggtcataactatcagtcatttactatgtgtgagtgttgtcacccggccacaacactattcactccagggagcaatcctaacactccaacacactgctgtctcccactacctacgctcttacattgtttaacttgggctaacattacccagatgcgaatgccttaaacttccagtaaccaactctattgccatcttgttgccaggctaagtggcctctctggccttgggattgttgagcttacttcttccagggtggtctccgagatgccataactggagatgcccaggtctgagagccggtcatcaatctcatggaagagttccacaaaggctccctccttcgcggcttcgtacggcagcacataggtcagctcgtgcccaatgtcctccaccagccgggcttcagacacgtgcttcctgatgaggttggagatagcagagacatctgcagggaccagagtgggaaggtgttcagtcatcacagactccacagaaagggccagcttgcttctccctttcccaacagctcagaagcaccccgtatataccgtacgtcctaagatgccaaacccattggcttattcgtctctagcaggagggcaaagactgtctcttaactcattcttacgtcacaaaacctaagcccactgatagtcactaggtgtgtgatggatgggtgtcttgtgtctaatgtgtctgtaccaggactcttcaacagaatgagtttagaaagcatataagaccctgcccttctgtcaactttcagatgaggctatccatgatttacctcaggagatgactaatcaaacagtttgtggaagcagaaaccttcctggaaaaagccagctgttgggacagtcagctctatatttttattccatatgccactggtggtactagtctctcataggcactgctcgagggaaattgaaatgttctccctaatctcctgggctctcaccattcttagatgtggagttcaactcccttccaactggcttggccttctacatctcatccagcatctggctaaatccactcccccgccccccaaggtattccccagacttccagtcacatctgttctctggaatcctgccctcccagccccaagaccaagccccatgctccccagcaagtgttaggccaagccaccaccaggctacatccactcccacggccacccagcccagcccagcccagcagcaaaccttgagtcagcgccaccagcctctgcacctctcctcctctgcctccactctgcccagctgcggggagcccaggcaccacctgaataagaaaccccagaatccttaccgatggtcagcgtgtcactttcatggtcgctgcccaggccagcatcagaactgctctgagaaacactgtcctcctgatgacaaagaaggaggtgagaacgggtcaggggtcaaaccgggcatagccgccaccaccacctttgatggacagagcatccaggaagttctacggcataaaactagagcagaaagctttccctgggaagtgtgccgctggcagccatggcttcagagaccactgctgccatgagtgtgctccatatggacggcctcactgaccagggtgagagaagtcagcaaactgaatgtcaacagaactgtggccacagatcaatgctgccactggtcatttgccaactgtccccgcgtgggatttacctgaacacttagctaattgaaagcttcctcgatgtgaatatgcattcagttactcaggcaccttattaacatgcagagatggatccagtaggtctgaacgggggcccaagtcatcatgtgtgtaatgaattcccaactgaggctgctatgctacacttcagaccacacttgaatgaggcctcggctccagttaacaggaaaataaatggatatgagttcaaatcaggtaggagacagggtaggtaggtggcctgctgtgactgaccacacaaacacatctcaaacatgtagcatgtaagaaacacataacaaaccagatccaggattctggtcctcgcttttatgtccttgctgggagaccttgaatatgctacagttcctacaagcctcactcccttcatctgagattataaacataatcctgtcttccctaggttgctctacacttggaaaatataaaatatataaacagaccaaaaatgtactgttaacattatttttttttctaaacccacaggtcataaggggatgggagggtttaaaatcaatatctagtaaatatttggtgtttcatagtttcaaagtcaagaccagtaagatttaaggcagcaggtaggaatggcggggcatcctgtagcaaggctactcttacctcttggcaagttctcttttctttgctaggataaagccctcaaagggcttgtctccataacccagggcacttgcagagggaatataaaggggctgggctagaactagtgtggcgggagcagaggtctcctggccttccacacaggaaccatgatgtactgcaacaggcccacaaagcgaggggaatgttgccttaatcttagcagcgtggggcgccaacgtgcaagccatctatggaaacaagccctggctgcctcatccccacaccagcccagccccaagatggctgctcacctttttcagacaagacacggtgctgctactgtttctgcaggaactgagggacgattccacatctttcttaaccagggtcagatagtaacccgttcccaactggtttttcaaaaacagggaggagcccacacaacacagcttcccatgggaaatgatggcaattctgtccccaaggatgtcagcttcgtccatgtggtgtgtagacaaaataatggtgcggcctgccaggcacaaacacaaggagacaaggagacgggacggtgggacttgtcagttctcactgatcaaagtggcacaaacggcaaagatgtcacatatgagaaagacatggggaggtctttaacctccatagatgtgaccccaggatggcaaggcttggggggatggcagtttacaattgtcacaaaaaggagagcagtatttatttgggatcctgctccgtcaagtgtgctaagaagtttacagacattcccattagtcatggccaacatgaacaaggacatggtctaactacaatatgtatgtgtatgcttataccctttctgctcttctagtaggcccttaaataatgaagtatacgtcttaagaatcttgcaaagccaggtgtggtggcgcacgcctttaatcccagcactcgggaggcagaggcaggcagatttctgagttcgaggccagcctggtctacaaagtgagttccaggacagccagggctatacagagaaaccctgtctcggaaaaaaaaaaaaaaacccaagacaaacaaacaaacaagaatcttgcacagcaggacagaaacggagcttcaaggaggctcccaacttttcttgagaagcaactaacacaatcagccacaattcccacgagcccttctctaccctgggtcatgactggaaataagtaacagcatgtaccttgccggtattttagcaggagttcccatattcccctgcgagagtacgggtccaccccggctgtgggctcgtccagaatgacaaccttggatccacccacgaaggccaaggccacagacagctttctctgcatcccacctacaagacagagcaagacacatcctcaaatggtaagtgggggtaaggcgtggtgagagatgactggaagtacccatctggagacataagagggttaggattctgtcaccaaacatccaggcttgaactctaggtgcttgtctggagaaggaaggaaaggaaggtgtccggggctcacctgagagctgactcgttttgcttttcagcttgctcgggggtaagccaacatccagggccatctgctccatctctgctttcacgtgcttctctgagagcccctttaggcgcgcatagaaccagatgtgctcttcgacagtcagcctgggggaaagaggggcaggtcagctcggggcccagtaggatggatgtaccttggcacagttttcctctcttccacaccgttcttgcctttaaaaagcactcaatttctttaaaaaaaaaaggcaaccagaagggagaattcatggtaatgaatggtgcatatataaggatatacccaacaggcctgatcacaagacaccaggccgttaaaactttaaattccaggttctccattcagttttttttgtgaccatgttagctcagcattcactaatgtgaatgaacctcaatgggtctcaagttctaaagtaagggaggtccaagccattgaatttagaaaaagggaccttaaaacctacaaagtggaaagaaaggctttgcctgcagtcagagggctcaggacattctttgttcctccaccagagagctcaggccttcctctgctctactaccagggctcctttaggatccaacttgctggtgggacaacctgggtgggagcaaacttgagcagagaacacagggccattgtgccaactctcttttgaggttcttgtaccatgccttaatgaatacgctggttagtctacacagaaactagagtcactcaggaagaaggaccctcaattgaggaactgcctctaccatattgtcctatagacatgtctgtggagcatgttcttgattagaggctaatgtgggagggcctagcccactgtgggtggcaccattccctaggcaggtgattctgggctgtataagaaagtaagttaagttagccatggagggcaaggctctaagcaccattcctctgttgtctctgcttcagctccagcctctaggttcctgccctgagttccttcagtgatggtctgtgaccaaagaattataaaattaaataaacctcttcttctccaggttgcttttggtcattgttttatcacagcaaccaaaaacaaactagagcaaggaggaatgcatcaggaagatggctgagctaaaaataaaacaaaacaaacaaataaacaccctccaatccagtaacagagaacatggctttctaaatcccatcagccaatacaccaacttcaccttttttccctgaaattaaaaggcaacttgtcattgtgtgtcaggaaaggaaagacctactaccactccatacccaaaaaagggaaattctctagtaatactctactcataccaccaggactcccaggtcccagagggggttgaggggttgggggtgggaagtgtgggagtgggggtggtgctcctctctgtgcacttctgctactcacatgtcaaacagcacattatgctggggacagactcccaggttctgccggatggagctcatctccgagcgaatgtccttccccaggatgtaggccgtgccagaagttgggggaaacagcccagtcagtattgacctgaggacaagaataacagactcaagaatcaggaggacccagcctcactattcagggctgcagagcctgggcaaggagaacagatcacaccacttaacatgattctttcctttctaatctaatctactccaatccaatctaacagatgcccatggagcagaggccatttgttttagtgagtgggtaagcataagcctatgtcttaggaagaggagtttgctaagagcatctgaaaaaaaaatgacactcttaatttgcaccaggatgtactcctcaaaacatattttgtatgcctaacatcttgtacagaaaaatgaacaaacaagaacgtactgttaaaagaaagaaatgagtgtgttgcataacagaatttctgagtatctcagtcatgttcataacacactggttttatgttgaagaagaaagcctgtcaccccgagaagatcaacctctggaatggcagagggaccacactacaaaccacaagcaaactatgatattctatagcccttcctctgtcctcacaggtccctgggaaggcagagggagagagctgtccaggccttctctcctctgcttggagatagatttttttgggggactgtcctttttcctctagcttgtttgatctttctttctagtctcatgcttcaaatttctgaaccaacaagttcagaaacctcaagattccaagaaagctgaggaattctgagtattgcatgggaaagctcatcaaaaggaaaagactaaaggaaaagacctagcaaaatctagacctcagaaagcattctcgtgattgacacattccttcccatcatgctccactcttagccaagcgaccaattcaatttccttaggtctatgtttctaagtggggatttcctgaggtagatcttgggagagtcacaccctcttcttacatggtggtggtcttccctgctccattgtggcccaggaaggaggtaatctggccttcgtaaaagttgagcgccaagccatccacagcaaccttcatgccatctcggtaaaccttcaccaggttctgaatggacacccccagcctcagatgagtgggttcctcttccatgcagactgtgacaaaagaaaggagacagagatgatcccacaggaaacactgccctgatccgtagagtacacaaatacaaaagtctatgcttagacttttagaactagtttctgtctatgctcaacctttaatgttgtagacaaacacaagatgaaatattttaagccccttggaacacgtgagctgacagtagcaatgaacttataaaaaaaaccacattagtcttttgatgaagaaaggctgcacaaacaattaaaatacagtatgccaacagccattttaaaaacatatctaaaagtatcatggatgtccatactgtgcaatactactcattaaggaaaaaatgaattaaatatatcacaatttgagtggaaatcaaaagaattataccaagtgagaaaaggactcaccaaaacaaacaaacaaacaaacaaaaataatttggccttcatgtgggtaccaaacaactggcatggaggctattccaaaagctgtttactgtacatgggatatgttctactccctgggcagccttgtctggcctcagtgagagaggaggcacctagcctcgtagagacttgaagtgccagggtgggaggatactcagagatgctctcatgtgctcagaggaaaaagggagggggagggggtgatcaagaggagggcagtgagtgggatgtaaagtgaataaataaagaaataaaataaaattttaaaaattgcctgctatccacaccagggtgtaccaaaagctaaccactgaagatctgaggaagggcaaataagagagaccctgacagcataaggaggaagcaggcctattgacagtgtagaggggaagcagctctgacaatgtaggaggtagcagactatggaccatgtaggaaggaagcaggtctactgacctcacaggaagaaagtgaaccactgacaatagagaaggaagccacaccaagaacaaagacacaaacagaaaccctgggaagaacaggggcacctctacctccagtcaggagctaagaggggattagtgccctgtgtaagaaaggatgggaagttacgaagcacaagctgcatctataacagccccctggcattcacgtacagattccctggcatagaccaccccagcaaggcaggcagagagatgaggcccacagtgatggctaactgtagttattcctcttggattcacagaatagcacaattatccaagatgggaaaaagatggttacactgatcaaaacatactttcctagaactgttcctcaggagccagatagggttcccttaagtgcatgcgacggcaatggaagaagtgcatttggagagggtggactgcatggggtttttctaccgtggttgtggttttgggatcacgttagatgtaggaggcatgccctgctctggcagggccacagcagcattaggtgtgggagagtgctggtaagtggtacttactttctgacactcccttctggctggaaccagggtggctcttctcatcaatttcctcaccaaaccagtatgacttggtacaaggaaaataccagggcctgggaattccatactgtcctgaaagcaaagcacaaataacacaggtatgacccaagctggtgcaatctgagcatttctgacattgtctagccaaatcctctttctccttgaccaaccctatgagaaaggaataggctggagggagacggctaacttttgctgaaatctactgggcagatcatatattctgcacctctccacagctttccaacaactccccaggtggtaacagcaacctcattttagagatgagcaaactgaaggacaagtagccctatccaaggtcacttaccccaaaaaataaggactcaagagtttgaatctcagaatatacatgcaaattgcatggtcaatggaggaagttcagatacgggtttaaaaaacatttcaaatgggtttccttggaggagattcagagggtgaaaatgagtcctcccctaaaatctgatctcagacagaaatgtatcctaaagagggttcctgttctgttgtacttggcaaagaagggtaagaaagcatcaaaattaatttttggtgaatactaatttcccttaagcaataggcaagggctaagacccaatatattatattacttataacctgtagttaagagacagatggtctcctagggcttcctcttctggagacatagtcctaagaacccagtcagtactgagaggaacctgccagactctgacccagtatagcccagctgaggtcatctccaagcactgacacttaacagacccatgaccttaggcaagtccctcaaactctcagttagctctctcttttagaaactgtttaccttagcaaacagcccagagtaaccttccgaaccagagtctgtataaagtactttgctcagcacctggcacactgggctcaagagatgtgtagcacaatgccagtaacatgcatgctttcaacacaagtgcctttccttagactatttgtttttcataagctaaaagcccaagccaattcccagggcgctccctcgtccttcagcaactgcaacacaaagaaaggaagaacctacaggccgaaagttgctctgcccctcagtcagccaaagcagtatggaagcctggggtacctggaaagacggcttcgatgtaccatgtcatcacgccatagagaaaggtgtcaaagagcatcatggacactgcagtggtgagattgaagccgtcctcctccaccgggctctcaaagagattgtcccattggaccccgataccttgctcctcgaaaagggcgaaatactcacagccgaatccaaaagccacaggagacagcaggctctgagagaaagaggcaaaaggaactggtctacatccttgcctctctcatttttctcttctgatgtaaattccaccttgagaagtttgactttgcaaattacatcaattataaggcacgtaaatattctcctagagtccctttggagaagcggactcacttgcagcatagaaaatgatttcatttataagcactcattatgcagacacgtttcagaaatgtatgcacgagagcaggtgagaccttagaactgtatgcttcccaagacattacaaggctcaacgatcctgttccccccgtccagctgacattcatcaaggacttttttcactgatcagtcattgaatattcaggatcagagaagccgctttaaggcatcatatctaggagactcaagctttcagcacttggagcatcctgagagcctaatatcgttatcagtgacccagcagggcagatagtgagtggcctttattggtattctcacttgcttaaagactacacacctacatttcacaaaagactaaaatgtcctggtcagggatttgtgggagggtaagtcatgtttggtttttttcagtctggaaaatatttcccaagtcaaacaacacaatggataaaagaaagacaagggacaagaatgaaccatttgtggtctcaagctgtccatggacatgaccttgctgtgagcttttatggccaaagagctagaagttaaggggtggacatggtacctactgcctaaactagatccatttctgaatgtcatttatctccaaccagttcaaggcacaatctgatgatctctgacaaaaaccaaatccaacctagtatttactctaggggcaaaggagaaacaacttagccagaggggagacaggattatccaacaccctggggaggtggaggggcaccaggactacaacctctgcagagagatcagagttacttacagcaaagatcttgatggagaagcccacatagtcctgccaggctacgcacagcacatagggcaggtacagcgtgaagtagatgatgcccccacaggctgctgccaggttggcacgggagaagagcgtgctaatgaggaagcactgtaggatggtcaccatggcaaacacagacaggaagacgaacaccacgctggggtcactatagggcagcaggtttcctaactggagaggaagagtctggataaacgtgtagccttggcaagcccggcggctcacatacgtgatcttaatgctggttttgacatataattctttcagagctaacgcagggaaacccttgtgcttgactttctgatgaggacatgaagcccatgtgaaataacttactggagagactatgcatgaaaaatcacggcagaattatggttaaggacaaagtccaggactttcgacttgatcttagtggataattttgttctccgtctctcacagagagcaaggaatttggcttctccttgtctaaggacaactattgcctctaagaaaaaagtcgtgtgagacaacagcctacgcatcctttctctccaaaagcctaggaaaaaggccaggcaacctgaactttcccctggtaaacacagagtcttcattcatcccaagttctgtggattcatcctctcatcccaagttctgagctctgagctcatcggtagtcactgtggacactgaaccaggccctgtcaacacccggctgacttagtccgttcccacacactggccacaggatccctacccttgtcacaaggcttaggtccttgccctcggataccagagcatgagaaaagagtttgtttcagaacaacatgccaataaatcttgattctgccgtccctgggtattttagtgaggctctgactttccctgagcactcaatgggttattgtaggaaggctccgctgacggagttcacagcatgtcctctgaccggtgcctggcatcagtgagcgctcatatgtaatatatagtagctgctattaggacaaatgttagattctcctgctttgctctcttgctttcttagaaaacactaacttttataagatgcatctttgtatgaagtaactattgaagcaaaaacgcttaagagcagatttgtgtatgaggcaaaaacctcactgcccagactcaactttaaggcaagcaggggaagaggggggcttacttgactataggtaaaagacatccagatgttaggacctctgttgtcatagctaggagagccaacaggccctggaacaccctttccctggtgagtcccatgagcccccgtccagtgactatgagggaaattcttggacaagctgtatgttctccagaacatcccactgggctgttgaatcatggctcaacttctccctctgcatgacccagcgctccacccatcatactaatccctaataaatatccatattccaaaatatgcctcagcctcttcctccagagagccaaacctttaatagcatctgactttctggttgttgcatttacaatcttggaaataacccccacccagtaccagtgtggtgcatgtaaatttgtgaaggagccctgggttctagctacttagctgctaactatcccagtgggctgactggagcaagtccttacccctctctggctttcctcaattcagaatggagggaagcacacaggacacagagatccctttacccccttcgctatgttatcaggccactcaagagttccttgtcaagaagagtgagtgagtccacctcaccttcaagatgaccaccagcaggccagcgctcacaagcagagggatgaggctgctaacaaaccagctaaaccagaggatgccattgtccagacccatgatccgcatggtctccttcagccgagcctccttctcatacacaatgctcttgatgatcacagcgacagagtagatccaggctagagtcatgaagaggggcattgaccggctcatgacccgcagaaaactggaggcacagagaaaaggcatgggaaaaatgaaaagtgtgagcccggcaccgatccaaggccttgcacactggaggacaaacctcatcagggtcgcttatgaaaggcccactgaactctcaaatgaccaaaggtttcattagcagtggacagagatgaaacctgggtttcgagggtatggccgtgcaaaattttttcaggggctctctttaatagctaggaaatggatagggtaatattaagataaatataagttactctactaagtactaaacacaaagggcgggggcagaatccaacttggtcttccgctaaaggtcagtatctctaggatgtcctattgacttgctttcgctctcaaccagtgaaaaacacgcacatacacgcactctctccaaggacctggttatctaagggagatgttggcttgttggtacactcacatgtcatcaacataacaggggtagggcatctgttgcacgtagacacccgttttcttctcagatcccgtcagcactctgatgatggcctgttccaccacatcctgcaagtaggcgaagccgccccagacatagcgcatatcttcaaaagggtcagcccgaggaccagggtcccagtacctgaaatcaaacatcaggtgatgaaacactcatacaaaacacaccccgaaaaaatccaattacccaaggttcccctacacctcctaggccactcctcctatttttctatctcccattcttatcacagctgacaagtacataaattcttggatagaaataatcaatgaaaacactccttctgggtatatttttcttttccctttactggtgaataatattgcacctgatgaacatactgcaacttacttatcagttatttgcctcttcttgtgaaaatacgtatggctagcaagaagactcctagtggctttcctttctttttcctgacttttaagtcctttagtcttttaaacagaaatgtgaaaaaggaaagagtaataatttatagccttggaataacagtccccggcaatggaactttactgaagttgtgccacggctgctttgttgttgacattccttaataaagtaccaccagtcataaaagtcacccaagttacattctggagctttgcgagaccgggtttcatcttacccatccttgatcttattagttctctccacgttgtcaatgtccatccggatcttgtactttacatgatggggcagctccacactatctggagtgatgcctgtgaacacgatgccagcccagaacttcctctcgtccagcagctccatggacttgttgatgagcctgacttctgtcggaatgggttccagcttgttcaggttgacacactgacagacagaaggaagcctcattagaacactggagaccagaaagacaagcagtagccagaactcagcctcctttgagaggcaggaactagctgccagaattcttaatctgcacggcctatccatctctaaagtagttttccaggtttcagaactgaggtttgagtgaaatactcaaagttacttgtattgctttgtgcgagggaattattctcttagcaatttctattctcttagcaacatgtcttagcagtgtcgagtcacagcaactaagcaactaaaaatcagataagaaaaaaaatctagtcagcttttttcctttccatcattttttaggattaaagatttaaaagttttatcagtcccaaattagattagataagtttcataaataatgcctttataacaaagcagtttattatcattaggatctagaatttcaaaacaggaaaagctagaagataaaggacagaaacgctggagtcaatctgaagcaaatctagaagtaagcttatgtgctcgttaggctattcatctggtgtttatcttgctcaccaggcctgcaggatacagctgtacatgacactgcacattcattctaagctctccttctgcctgcatctttattgcaacagctcaaagggaaaaagcctctagcctttgctaaagggtgtgtacagcagacccttacctccatgaatcgagatatcgtctggattgcctggttggtctcattgaaagcttctctccaggtatacacagagccatttggggactgaacatcttctgggttcttggccagaaacgccatgatgtcttgggcagtccaatctaatccatccaacttctgttcccaaaactggtcattgcctctgctgtctaacagcgtctgccattccaggaagaacatgcgaacagtgatcatcaagtgtcatggtaaagagcacatctgacaaagattgaagtttctcatggctgatgttggccaaggctaagtgataagctgagacacaaagtcagacctctgacttcgaagttcacaggtttcccactgtaccagacagcccaggttaattgttttaactctaacaacagtgacagtagggtgctgagggatctataggcatcagaactgacacaacgctccaagggtgtgactttggtactgtccacctcacaaacaggaaaatggaacttcggggatattaaggtagctaaggagctttcggcagcataatacacattgcattgtaccaccctctcttttgagatagggtctggtgatgtcaaattaaaaccttgtctctagactgagtccacttttaatgcttagttcaaggaagtaatactcctggttaatacaaataaaagatcgtctttcctaactccaggacatgggatcatgatgaagaaaagaagacctgccatcacctgtcaatgtggaaaggtaagctattctggtcctcaaccagcctgcccagggggactggggcaaaagtctacactgatgcactgccaggaaaatgaggccactgctgactgggcaaaatggaaacacagctgctatgctccttttccagttcctagtgggagggggaggtccttgctctactgagcaagatctccaaaaccctatgacttccttcatcagtcttcttttcactaaccttgcaagttccccccaaccccgtggctttctgttattttaatgataacatgatgattttacagagtgtatctcctacaatttcattaactactcctttactgtataccatctagtctattccaaattacttgcaataacagttatttcagtaataacgctttctctcccatgatgacttctttaaaattgttgctgtatgatgctaggatagagattccctagtttccactgacagggtggcaattccttaccattaaccccatgccaatcagcctctgtataacagaccccaggagccatcattctgttggtctctcgctaccccctgcctgtccaggtaaaagtcagggctctcctgtaccatcctcttcttgcctgtctaccttaagctgctgccacgcctcctcttctgcactcagcccttgccactcacctattcaatctctgttgaggtccgtctcagccttgcacccatctttcttctagaataccgcatcaacatctccacttgcttaaaaccatctgctctccccctctaaatataaggatccttacagcctcccaggcctttccttccaggctacttcacttctgttacactctcaagattcccctacatatgcatccctagtgaacgccaccacatgtttgtaaggacttgtcccttaagaaccaagacccgatgaacaactgcagcctccaaagtaaacccttgatctaagaacagggaagcccaggcacagtggttggtatctggaattccagctctgggggaagctgaagcaggaggatggccatgaatttgaggtcatctggggcatatagtgagttgcagacaagtctgaactacaccgcgagacactgctttttgttttgttgttgttgatgttgtttttaaaaaagtgtgtttttaaaaagtgagtacatacatgatatgtactcactgataagtggatattagcccagaaacttggaatactcaagatacaagatacaatttgcaaaacacatgaaactcaagaagaacgaagacgaaagtgtagacattttgctccttcttagaattgggaacaaaacacccatggaaggagttacagagacaaagattggagctgagacaaaaggatggactatctagaaactgccatacccgaggatccatcccataatcagtccccaaacgctgacaccattgcacacactagcaagattttgctgaaaggaccctgatatagctgtctcttgtgagactatgccagggcctagcaaacacagaagtggatgctcacagtcagctattggatggatcacagggcccccaatggaggagctagagaaagtacccaaggagctaaaggggtctgcaaccttataggtggaacaacattatgaactaaccagtgacccccccggagctcgtgtctctagctgcatatgtagcaaaagatggcctagtcggccaatagtggaaagagaggctcattggtcttgcaaactttatatgcctcagtacaggggaacgccggggccaagaagtgggagtgggggactatcagggtagcattggaaatgtaaatgaagaaaatacctaatttaaaaaaaagtgtaaggaaatatctacatatgcccaattcaaaatccctttactgtcaaacacagaacaatcccaagaggtagataatatggatggcaaggaaagcaggcctagggtccacactgcagtgtgtcctgtgagagcatcccacgaatccctcagaaaagaaagagtagcgtgcacacaatgcaccgccagtgccaacttgcgccacgactcgccgtgaatgcataagactcgccgtgaatgcataagactgttgctcttggttttctcactcacgtcccgtgtgtaccaaggctccaagttaagcattctgcacaggtgtaacagcacggctgtatcaaaggaggctctggttccttcatctccagatgctctttgatcagtaacctgtcccccaagaggacctagagcacccctaaactcccaaagaagtgcagcctctaaaaacccagcaaccctcagggcacagagattcaattccagtaacctggcaaaaatcctcccttgcttcttaatggcagaagaaataaaaggaagtggacttcctcgccatggcaataagactttgtctaatgatcctgactgagactgaggcccagaggaagtggttaaatggcttttctgttgatgcaaaggcgacagacactgcattccagactgctctctctctctctctctctttgaacctggttgtgtctggagcatgcttccctttcaagtgccccctatatgttaagggcaatttcctcccctccacagcagtggctgcgatgctgtactctctctgtgcctggagaaccagtatccctgacctgtccgcatgccagatcacgcttctgttcccaaacctccttctgagacatggcaggctaaagaagatactgtgcctatcttagtgactggagaccaaatgaaaatactctagtgtcctgcaagcaccaatttctgatcttccctgggttttgtgccatttctttgcaagactccaatttctgatcctcactgggttttgtgcaaaactgctactggaccatgatggacagcgatgctggcattcccagggctatcactgcactaaggcctttgcttctacagaagtggtggctgtgtggcttcagctgatctcagttgctttaacttacagaactgtgatctcagggatttctgggaagatgtccagaaatcttttctagatcaagcaagcaaatccgagaagagagtcactcacccggacaaggtccatctcttggctgttctccatgaaggtccaaatttgggggctgagttcttcccacatgccctccaggtcatggaacacagccaactcctgaaaggtcttgttcacctacagtcaggtagggaatcgggattcatacaaatagaagagaggcagaggcaatgaacattccaagattccctaaaaaacaccactcattacagaaacctctgctcagtccttcccttcctcaagaaacccctgctacagacatagttcaaatactcaaggctggggatatggagcccaagattacatgtggatttgttttgttttgtttttgactatttaaaagccccatcatggccaagagtatattcaacatacactacctgaagctgcgttcacttcctacccctaattctggggagattttggggacggagtcctaagcctggacagcttacctcagccatgacctgccttgtagctggtgtgtcaggtgtatagagaatctttccaacaagcagtggcttgagtgccttccaaataattcgagaaagaggactagactccaagttcttcatcaaatcattgcaataaggagctacaaagaagacggaggacagacattcacgtctatatcatggtcagttgccaacaggaacttagaaggtttgggagccatgcagccagtccagggtgcaaatccccctcccacatcacctatcagtcatgcagcggataacctccttatgtgagcctcagtttgcgctgctatagaatgaaagttggaaagttcgtaacatccacttgtcagagctgtgatgagaattagatggggtatttccagtgaggtctttcctcagtgctcgaaagaatcaggcctctctcagactcacatctgagctgatctgaaggaagcttttgactacacatgccatcccaactctagctccacaccctcatgccagccctcacagtgcttttcactggacacaagcaggattcttcctggggaagctggaagactgcatttacacttttgtttgaagaggaaaaagccaagtctgtccttagtaattaatagatcctaccacaactaatgtttatatttaacaaaaattaaaaactgaaatatccaaagttcaagaggacagaacgggctttgcttggataccacacaacgtctctgagctgcttgatacacaggtgataaaataatgataaaaaaggtaatgagttgggggtggggcatactagaaatgacccatggcctcactaggggtatgcaagcactctatcgttgtgtcctatctccaaggctggaatattttcctaaggaaacaagccctcaattatatctgttgtataagcaagagatgtccttggattgatctgcaggctggggaagaagagctggtttcataaaactgcctacattaccatcttcttcaggcttctaaagcaacttgtaaagtgctagagtgctgagccccagagggcacaggctgtgttacagccacacatgaagctgtctcacttcttgcctgcggttggaaatcaggaatggcttagctttgtggtgtattcaaggcaaagatgccattgttagacctgtagcgctggacaaatgctacatatgaccaggtgcaggacagacacacttccacagaaaactgcccgagggtggtgactagatatagagttacaggtctctttaacacccagaatgcaaaacaaacaggcagctgaatgtgtgagtgtgacagtgcaagcatgccaccattaatgaggtagttcacctcaaaaagccaagaggacttagacttgaatcccagctcttggggattacctagaaatgcaactttaaccaagacacttaacctctgggcctatgaaatttgaggttccagaaccttccttgcagggtttctgtaagaatcaaataggtaatttaaacagaatgcattatgcataggaaattttgctttaatgttaggttttcctgtagctgttgtaattgctattattaccattacccccttttagatgtttattgtaaagcttgcctcacagtaatataataataattatagtgataattataatgattatactattttataattattctcttttataataatatgctaatttataacaattatgataattaaatgtaataattaaaataatataaaattaaaatatctcatcatttttaggaggttttctggctttactcaggtattaatgaacaacaaaaatgatacgtattttatacagactgatgttccgatacacgtatccgctatgatgtgattaacacaacccagtcaagctagttaatatctccatcacttcatgtagatgcccactgagtctgtgcagtaacatcaatatgaacttccttacaaagcttacagatataacacagtgttaccacacccttgctaccttatccatttgctctccagcggtatgcatttttgcacaagtgaactttgcattctaaccaacacatctcatctcatccctctactgcccccagcaacctcttttcttccctgctttgtgtagctttttttttcttttagagcccacatatgaaaagaactggaaagactagctatcaatcacttattcatcttttgggtattgttactaaacacctgagagagatcaggcccctccattcacagaactgagagagattcacttatcaaggactctgtacttgaggagcaatgtcataagagcaaacagagaggacaacctttgctactacacagaataaaggaaagcatggggtctgagtgacacaggctgagccagacctgagctcggaatgaggacacagggacggggtgacacaggctgagccagacctgagattgatcggaatgaggacatggctttggtctgcatagtcaactcacttgtagaattgtcatagaaggtgtccacgtcttcctcggtgttattccctccaaagagggctttgtagttgttatcctcgtaccagttgagggacttgatcttcaggcccccaccctctgggtgaccacacacgatgcgggacactgcctggtagatctgggtggaggagctggagctgttcacgttggtcagaaacatcacctcctgccgcatgtcgctccagctctttgtgctgaacagctggtgtcagggtggaaagagaaaggagaggggacaaagggacaagcaaaggatgggacaagagagaagcaaacactttattctcttaacctaaaagcagtgttgcagaacatactgtgtctagctagcatcaccttaaagccctctggtgattagccaaggccttcttccctccacctgtggtgctgggacctgcagtatcttattatcccttgctattcccatctggtggctccccctagcacctgcttgaggagagaattcctgcccactctccttcatcatagctctcactggacacattctctgtgacttgcccttggctcacaggggagggtaaccattcatcttccaggccaagaagagtggttgcactgaaggtaagcaaatggaccagggccatgcagtctccatttgttgcaatgcccccaccctccttattctcgatccagcctcttcctcagtccaacagcaagagtgtagtcatttgcaaacatgaagccacactaaacaccctcttttaactcctctggcttccttcatggaccttaagtgtacgctctcaagcacacggttcctgtgactggtatctgctgcccttcctgtgcagtgtcctaacttctctaggaatagagcaccactgtctttggagtcaactcactctgctcttttaaaatggcatctcatccctctttctacatcccttacatggtttattttttcttcactgcacagatgcctgcggtcacatcatcagctggactggtttatttctgacttccacccttccgtgggctaaatgatggtggcgaggtgactgtgctcactgcagagctggaatagctggcaaggccaagcacctgaccatgcgaccaattaactctctacaagactgtgggcaaagacttttctgtgccccagtgccatctgtgaaatgggcacaataaaaggtgcttcactggaccctgaggatgagccagtcatatgaaatcaaacagccacaatccatctatgatatcttgtgttttcctgtcaacagttagcctttgaacatagcaactaagtttctttctaaacatggacctttctaaaaatgcatttctttattgttactcagagaaagcactgagagagacatgaccaaagcggcttgagggtgacctattgggagaagtggttgcccaccactgatgtgggaacaggagtaagcaggttccaagagacagttaagaaaaatgtacacagtacactgctagaggtttccacccattcagccacagggcacatcaagggctttgcaattattttgttttagcccagaataaaagcaggtacaatgatagaagagaaacttgctgccacaaaccctgaatttacaggtactaccccaccactcaaccacccggccactactacacccacttggctttctccaggaatgagcagcagaaaatgagacaaggaggggactctccagagcactgtcaacgcacaaggccttatggaaacagatggactttctctttctgccctttggcagaaccccaactggtccagtttcttggcctatccaaaggtcactcaccctccctaacagaggaaccaataacaggctgacaaagtcggctcctaaggggaggagtatgagagcaaagcccctctgtcaaagatggctgagcagagttacaataaatggaaggaaggaaggaaggaagggagggagagagggagggagggtgggagggaggaggtgttgtgcttggtctcaggattttctaaactttccaggtgcactgcttgttcactgatgaacgtgaaatacttttattgtcaggaaacaaggtaacttttttgatattcagaagggaaaaaagatgatacaagcatggaaaatgagctaaagactcagttaaaaaatcaggatgggccaagtctgagaaactttccccccatggattcctgtattccagtgtcctgagcactgtagcctgccttgagttctacccatggccaatgggacagacagtggtgggatccacaggcaaggtgaactgtgatcaaggttcactctgtcacatgggacaacatgtagacctaacggccaaatcagctcagcactcactaggaaccgaattcccaatgctgagcctcagagaccagatttcccaaggcaaaaagcagggcgaggaaagccacagcgttcctgttggctagcagaggtgaattctgatgcaatggctgaatggtggccttgctgttgaagaagcaacatgaagaagctgctgtcaaacagagtcagtgcacagggtaggaggtagatcgagagacagttctcttcacaaatgtacacaggggcagaaggagctcacagagaaaggtctagactaaacatggggttctgaggcactaattatctctgcaacattgatgtattttagtttcttcctctccaatggagatcaaacctgattcatttttaaattacttgtgcttctaaaatttagtttgacgcagcaggtgatattcaaagtacaaggaccctgttgtcagaactcagaactaaagaaatgacagtgattagtctgtccactgtggcttaaaaaaataccacttacctcttgggccaggccccccaagctgtcaagcaacactgtggtggcttcagccagatgctgggtcgggagatgagatgtggaatttagttttgtctagagagaaggagaaaaaaatcttagtgtatgagctcaaatgcaggcttaaaatctctacatagaaaataaataaatcaaaacaattcctaataaagattaaatttaagaaacttctagccaaaataaagaacactggataattactctaactgcatgtctgtgtgtttcttttcttcagataaggatttcttcttcatgatggtttcaggagtgcaaattcaaaggctagtgaatagacaacatatacaagtatcttatgtggtacacacaagtaggcacaggcttgtgtgtgtgtgtgtgtgtgtgtgtgtgtgtgtgtgtgtccatgcacgtgtgtgcacgtgtgttcaataaaattctaacctgaaagtcccaactctatctatctacagttctacaagacatttgtttataggcatggcctgagaaaagagtgtgtgatggttcacaatcaatcagtcaatcaataaagtaggaaaagacaaaattcaataataaccaaagcaagagaacaattctccttttgttctgttgagtcagtagattttcaccatttttaaatactggagatgtaacatagaacactgtttttatgtctagtgttagtcatcaccttgtatatactaattaacataatacataacctagctgcacagtaaacaagagaaaataattaattagacccaaaggaaagataaattacaatagaaagtcggggcggggggcagctgagacaaaaccccacaggctgtgtaaccagaattgctgtagaaggaatttcaacttcagtcccacaattaggaaggataaggaagaaagtctccaggggaaaggcagcttttcctagtgttttcacaggttctgttttgttttattcagtagtttatctaataccttgagaattttagaccgttttgacagcaattatcatgtcaaagattgctgcgagactggaacagagagtgctaaaagtgaacaggactaacataaggaacagcctcggagatgttttctatttgtatgttcttttttattattattggatattttctttatttgcatttcaaatgttatcccctttcccggtttcccctatcccagaaaccccctagctcctcccccctccccctgcttttatgtgggtgttcctccacccacccacccactcccacctccccgcccttgattcccctacactggcgcatctatcgagccttcataggaccaaggacctcttcttccattgatgactgacaaggccatcatctgctacatatgcagctggagccatgtgtactctttggttggtggtttagtccctgggagctctggggggtctggttgattgatattgttgttcttcctgtggggttgaaaaccccttcagctccttcagtccattctctaactcctccattgaggaccacatactcagtccaatagctggctgtgagcttctgcctctgtatttgtaaggctctggcagggcctctcaggagacagctatatcagggtccattcagcaagcatttcttggcatccacaatagcgtctgggattggtgactgtatatgggatgaatccccaggtggggcagtctctggatggcctttccttcagtatctgctccacactttgtcttcatatttgctcccatgagtattttgtttccctttctaagaaggaccaaagcacctgcactttggttttccttcttgagcatcatgtggtctgtgaattgtaccttgggtgttccgagcttttgggctaatatccatgtatcagtgagtgtataccatgtgtgttcttttgtgattgggttaatgcaaatcaaagcaactctgagattctacctcacaccagtcagaatggccaagatcaaaaactcatgtaacagcagatgctggcaaagatgtggagaaagaagagcactactccattgctggtgggatagcaagctagtacaaccactctggaaatcagtctggtggttcctcagaaaactggacatagtacctgaggacccagttataccactcctgagcatatacccaaaatattctccaacatataacaaggacacatgctccactatgttcatagcagccttatttataatagccagaagctggaaagaacccagatgtccctcaacacagggatggataaagaaaatgtggtacatttacacaatggagtactactcagctattaaaaacgatgaactcatggaattctgaggcaaatggatggaactagaaaatatcatcctgagtgggatgtgttctttaaagtgagttccaaatgcagaatattgagttatgaacatcacggtctcagtggctggcgcagtcctgtatgcacatttctaaggacatctgcttaggagagaactagagctgctggacacatggcttctcctgggaaagcctgtgagtaagagccaaattccagagcttccacactcacattcctctgagggacctatggtcaacccatagatgctatacttggggaggcctgtgatataactcacagatcactacaaaggctgttccttccagaggagactcaggagcagaaacagtggggtgctcagctctcactttctctctcccagttcactacttaactgaagatcgatcagcacggcacagcagaagctgaaccggtgatttccctcagtcagggaaatgctcaccaacgaagaggtcccaattagaagggcaggaggtaaactagttttgtgtttagcatggcccaccactattgattttgaattaatttatgattcaagattataaatcaaaaataaataaggacaaaacaaaatttccggagtcagaaatgtaggtggatgcatttctcttttgaagcctacagaacccaaggcaagacaactcctcccacccccccagccgccactgccacccccactccgtacctccataacctcagctattccactgcagagcggcagtgctcagtgcatcacagagtttcataaacactgactgcaagatgcctaccaagtgctttgagcagagtctgccactcggtaagtttcaggaggaaaaacactttcatctcccatttcttcccttccttaaaagtagcctcccagtgctcaggaggacaaccatcctgcctctgtgccttgccctgtgccaggcaggtctacaagacaccaaatgcctgagatagtctaccctgttaatatagtgagcactccgtcctatatagcttctccatctgaaaaaatttgcatcttcctaagtagtgaccagccctcaatttggtttttaatttagacagtttagagtaagcttattctccttgtttttctacaattcaaaaactgctggtatgaaccttgcacccctttgagtgtaactagccttttatgcaagcacaaggacctctactatgaatacgggagctttgataagcaatgtcttatgcgatgatttgatggtcaaaagtctaagtctgttggcttaactgaggtattggggtcttagcctcttattggctaaaccatccatgtgtaatatggtatagcagtcaatgtcaccgtgaaggtcagggctggtgagatgaggaaggtgcctcctgccaagtgtgctcgacctgaatctgacatccatggtggaaggagaggactgatgtgcacaaaagtgacctctgacctccacacatgtgccacagcaaggcagtgccacacacaaacagataaggtgtagttttaaaataacttgtaaatagatgttcagtatactttaacaatatcggcgacctgcagttgatacaaacttatgtgcgaggcacagactgacataacagagctaagatatatgcacacaattcaaattcggcatcagccaatctccagcttggattatccagacactttttgctccaggcctcactgcacttttttctttttttaacttggatcttacagaatccaaagatgttgctggtggcatcagcagaatataatgcttcaaaccgacagtaaaaagataagctattcagaactactcctggctcagctagatagtcaggttttccgtcttacctcattatttacaaataaagtcttggtagattacagagctgaaagaaataggaaagtttaaaacaaattggagagaatattagaaaatacaattgtgaacttgagctcagaagacttttaaacaaaatattaaaaaaaatggattcaaccaaaaatgagaatgtggatgtatattttaaatgtaaaaagtgtgcatcaaatgatttatggctataaatgacctaaaacattaagtcaaagactagaataatggatttttttacatctttagtataaagcggaataccagctatcgtgtaatagaaaccagttacaaatgcattgacgatgcttgatctccaatccatggggcttcccagaaagcacaggggcagctcagcaaacacgagtacacaatgtgaacccacgcaagcccataccaagtgctgctgttgacggtgtttaaatatgttcatgtaatgttcaaaaacatgcaactccagaattggggttgccgctgggcaacaggcagggttacagaggtaatagtgtgatatctatgatggtttaatttgtgactacaatctgcagtaaagatggccgagtgaggacagcagcccacaggggttgtttctgtcattctgggtatatatatatacacacacacacacacacacacacacacacacacacacacacacgtttgacatgttttccaattttctctttaatgcaatacaactacaataaagggggaagggtggctttgtagacatgaagaagagagcgcatgtcacatcttaaaggcagctcatgtctttgaatattgctagatcttacaggatacagagatgtcgttggtggcatcatagctcaggaataactgaggccgtgaaacttgaacacggaatgccatccacaccggcaactcactgtgccctcctgctcgcacctcatcggccaagacagagcttgccacaacactgctccgcaaaactctgccgatgaacttaacatgctcagtaaggcacagctcagaattcctgtttttgtcctgactaaaaacattctcttgactgtgaattcaaattaagtccctattgcccacaggaagaaaagtattttcctgcacagagtaaagaggaaaaaaatacttagttaaggactgtaccttctgtatttagctcaacaggaatccgtgcattgtctgatatatttagaacataactaagtactgtaatatcatagaatacaaactcttaccttattactcaaagacttccacccattttctgtaacatgtatacacggtatcagaacagtatttcctaaaaggccccaaatgacaaaggctattctgtccccatcctccagcagaggattgtgtctctcctcactggcttaatagttatgctgtgaaagattgaaacgctttaaaggtcgacaacctagaagtctccacttggctgaatactgagctggtattttaatcaatacagggccatgcatatttgttagcatatctcagtagatgttttcagaagaaaagcataaagggaaggagacacatcttagagggaagaactaagccagtgtaatcctgcctcagaagctaagcaaatccctagaagtgttgtcttacatgcccctcctcaagtcacgaaccactggaacctgccatggctgcccttggtctgaatgacatttagtgctctgtcatgaatcacacaagtccgcctggatagacttcgtcctcttccccagcatcacatcccatctctgctcctcccgtcaatgtcccctctatcagtacatccaacccaccctattcccctaaacatctcattctcttcctgttcccctcgagactctgcacaaaccatgttttcttttagcagcattccctatttttattaacatccattgtttaggcctctaaatagaattttgtgtgcctctttgtaaatgcattttacacaatgatctctggcacgtgtccgactcctcttttaagttgtgcattgtgccagtggtctataatcccgacattcagctgtgaagtatgaggatcacaagatcaaggccgacctggaccatctatgaagatgctatcataaggacaacaaaaaacacctttccctgaatgacttcccaaagcaggtataactccagctctgcactcctcttgccctagattaaggattaataagctttcaacgcaaggcctgagtgatgattcagagcacttgctgttcatccagaggttctcatgctgggtttgggtcccaatacctacatggcaactcacaagcctgggtaaccccagtcccaggggatccaatgcccttttctggcctttatggcaccaggcatgcgcatggtccacatgaagacataaacataaaacacccatacgcacaaaataaaataaaaaataaaatttggagggaaaaaaacagctttaaactgaaaacaagtcagcaatgtaccacaggcaagaattatcctaatcaatcagtctctaatatttccatgatatttatggccatcccacttggaatgtacccaacccaacggagtctaatatttccatgacaataaagctttcctttgaggaacattttaatatttttattaaaatggggaatgattaacctcatgtctaaaggaggcattaacatataaaaataagttaaatatttagttttatattaaatgtgtttcataccttaaaatgtttcatgtttatggtgcttctaaatatagttcaatacacttattagcataatttagaagaaaacaaaaacaagcctttaccttaaaagccacagcatttctccagagcaaacatagtataattaagacacacgtgtttgggcagagttgagcagtcatgttagcaaaacactacgatattcaccaatttatccctcagtttgtacagatgagcacacggcctgagagtaaatcgtcacagcttgtcactgcaccacataccaaatgataagagccaccgtggcttagagacaaaggcataccgtgcaagcagctagacggtaaagccagttcatgaaaaactttccacaaatgttcaagtcttacaagcaacaattcctccctacaaaaacctacataaaaattctcctctacaaaagcctacaataaataaataaatgctgcaagcaaggtcggcgtgtgacatgctaaagtactgaacccttaaaaatcctaagcagagctgagtcaatggctcagtggttaaaagtgctcatgacagaagcatgagaaccagaggtcagatcccagaacccacacagatatcatgtgggcatggcagcctgcctgtaaccccagccttggaagggagagatgagggcccccccaaagcaagatgtctaatgagacaagtcatgccgacccttcttcactgaataaagtgcagaagaatgactcccagcatctatttctgacctacatgcacacatatgtatgcctacacacatacacatgtacccaccttcatacaaatatgtacgcatgcctgtgcgggcacatgtgcgcgcgcgtacacatacacacacacacacacacacacacacacacacacacacacacacagagcaaatgaagaaaaggtcaccaagcagaagataatatcaagccccatatgtccttttgagtgtttgtctacagaaattaagaacaagcccagatcttccagataaggtaactccattcgcccattactcatttgcgccttggagggcagacagcccagctgtgaggtttctggtcttccagaaaccacaggccccctaatataagaaccaaattctgccgtggtaggaacacatagcatgaaacacaagacatttgaagagagttcttcattccatagagacaggattctcccttttaggcagatggtattcttagaggtcaagatgacctaataagcgtagtcatgcgagctatatccaaggtgttgctgacatgagacaaatctgtggtccttccttccaacctcaagattcagacaccattcccacactactgagacgacagtgagacgggaccagagccccaatctatctagggcaagtatcacttcaccccagaacctggaaagaagtccttaaatgtactgcctccaccttttatttttcctttacatcccggtcttaacaatacacagtgaatattcaggattaccagcatgtccatgacctccgttatatttatcctagagacagacagggttccatcaatcaatctacccttgtactaactggaaaaacacctttttgagaacctcaactaagtagggttcctagaacaattctgacgtacagcactgttcagcaagtgagttagtctggaggttggtgtgtagttggtgagttttgtttggggtttatgtccagatctagacaaaaaaaaatatcattatgcactgaatatattctccaggattgctttgtttattctgcttctgcttcttaacactgaactacaaaatgaaacatctgccttaccagcaactgtttttaacatgcaatttttattatttatgtcaattaaactatcagcttctacttgttgagcatctagtatgcaccggcctcttgatatatctacatagagatattaaaaacaaataatcataataaatgataaactatattatctctatataaaataaaaggaaatggaggcttgtagaatctaagattttgttttcctaagtcaatgacatctataaaaagctgagccaatgtttgaacccagatctcattgacctcaaatcatggtcttctaactctgccacactgccccatgttatccagacgctattaccctaaccacctagaggagaaccaggagaaagtcacaatatttttggctgaaaaatggggaaatacccacacctaaaataataacaatacaagtggaaaatatttcaaaacatgtctcttatgatgagccctttttgttacagaaatggcacattaacagaacagtcttctcccatgctaattgggtcacgcatctggctgttgtcctcaaagttcttggcacaattaactgtccatcagcacgattcagcacaagtcacatacacacacacacacacacacacacacacacacactgaccgtgacaaattaaaatttcatcagagtagcaagagaaaaagtgtgcttattataaaccaagcaccagtcccagtattccaattaaagcactgcttaattcagtaagtaacatcacagaatgtttgaaagacatcccatcccagaggcagcttccaaaacattttcacatagcacaatcctgatcactcactatcgtcttcaagagcccccatgttctgactttatgagcgacggttcccagcagaagcgaaggggcagaagcagaattccactctctacacccaggagacatgcagggggtacactgaagccatctaaattgaacctactaatctacaaggccacaacaggacgggatgtcacatggctgactggtttaaaggtatagttccttggtgttggaaaccctcccaaaggggaagattttcaagtcgaaatctgagctgttaacagacagatgatgagggccatggtggtactctgccaggcagtggtggcgcacacctttaatcccagcactcgggaggcagaggcaggcagatttctgagttcgaggccagcctggtctacaaagtgagttccaggacagccagggctatacagagaaaccctgtctcaaaaaaccaaaaagaaaaaagaaaaaaggaaaaagaaagcagttcagatactctgcaggagaaaggatttattgggctgtaaacactacaggtgttcaatgattaaacgggaatgaaatcaaataaatgggcaccagaatcaattactgtctcttcttaaataactcatatttcctaaacttgaaggctaagtgtttacctctgtatcttatagtgataagtgggcaaagcagtccccaaacacaatttcatatcacacctttcacgacatttgtaaggaccttgaccctttgtgtctcacaaaacgtcaagcgcagagattggcagcagtacacttatctaactatgcagtgctattgctcagagcactacaaacatctccaataaagaaatacatctcacttgaaactacagtgataaaggcaataaccaatggactcacaggccaccaaagcaagcacttggtagctttaaaaacctgaaacataatgaattactttaggagtgagaaaacattaggctgggcacaaaaattggcatgtgtgcactccacaaaagcacctagaagaagcttgtcatttggccaccccctattcttcccacaacagctgcagagttgaaacatgtataagaacttctcccgggtcagttcagagagtctactctgagatgtttctaaaacccacatgatctaggcttggaatgctgatggaaactgaccgtcttaggaccgcataggaatgtatggttcccttactgaaagccagcttcacagagtttgacatgattacagcatcatcttggtataatgaagaacacatgtcttcagagaacctactgacacaacagctctccctggtacacagaaaagcagagtgctggctactgcagatgctactggagtcattttgacaaagatctcagaaaactcacagatctctattgcagaatttctataaccaaccctgataatcaatacacgagggctcacttgcattcctcggttatggtttgttttgtatgtctttctaatacatttttgtcattgtttgagctaattatttttatgtggtcttacccaatcccaatgttttattatctaacacaatctccctcttctactggttttaaaaacactaataagtagccatttccccattaatcatttcaagacattttcttaaacctggccggggggagggcggtctttcttcaaatggactcttcctcagaaatatatttttttaaaaaaacatgaaagatggatcttttctggttgaaaccagcaccagagaccttgagcctggactctgccacacccagaacattcttctccaagtcacccttgggaaatggactgaaatttgaaagaacacccagagtatgactgggctaaattatatcaccaagttccagccaggcccaagtttctacaaaaacaagatgtgcagtccaggaaaagatttctcattctcaaaccttcagcactcaccacaactggcttcaggatgtccatgttgtagcgcagtactctctcggctgcatcgagcttcttcctcggtagaccacagagggcagaaacttccgcatcaccaagctgaataatttcttctaattttgatccgttacacagactggccaaatgtaattggtagccttgcaaaaatacctggaagggttggatgtaaacagagctgtgaaaaaattatcaggatggaaggctggctcccagacactttggggggagtgtaacctcagtacatcttggaagagctgaagcaaagcactactgcagtcacccatggaggaaagaaccttgggatgaatcggacacagtcagccatgttccaacactgcatgctgactcaatgcatcccactctcttgtcccaatagcaccgggaaatccttaaggcaagtctttttctcaacgcgactggaacacatgactcagctaatggaaacccagagtctaaacccctggaactatgagaggaaggttatgctaactcttccagaaatgtattgatattggacgctgaaattaggctgcctcatggaaacaattataccgtgaatctgtaggtttagatacttgacaaatgcataaagctatgtttaaggaacatcacaattgtgagtgttttgttttacttgcccccaagaagaatacggaaaagtgggcctctatcaactcaactgtaaagtacttctacgtcatcctcacctgttcttcatagcaaaccccaggaaactctctttggccatacgctcctacctagctacccttcctaggtttaaataagtagtgctttttcatacctgagtctcactgtccagcagagagagacctctgcaataatatggggctgccttggtttacaaggctcgtacctgtgtctataaccctagaacagtatttgttgaatggatggcttattacaatattaccaacccctctatcagcttaactgaacgcagtccattctggtcacagaaacctgtagagcatcgcaaggggcgaaaccaaagcctctcaactcccatgcagtttcgcaaacagtgaagggaatctgcgccaccatgtcgtccactcgcctgtcactgactgccagatactcaagtacactccaagcttgctcctgccataagtccttgtcaccatgctgtggtgaagaacccctaagacactgaaactcaaattaccatgcaaagaccttccctggatgcctcttagtttaaactgatggcatgcaacagatatgaaattggcagggggcaatggaaattatgctaaatgaaatgatttcgaaagtctgctgcctctggcccacctcccagccacacaattggtaaacacaagacatattttcccagtttcataagagcatgcagtaagcacattttcttttttctaacttggaaaattttcagccatgtgaagcaaagccctcttcaatcatcagccccgcccatgacttctgcttactgtaaagtcaagccagtatagagccgaaaggctgtacatggggtcaattctcctttctgccagagaataaagtgaagaaaaagctttcgggggaacaacatatagccatgcactctgcccaggagtggtacaaaaataaatgatggcgaagaagttctctaggaccctaagatgcaaagcctatgtaaacactaatattacatacacttaaaagttgatcagaagtctctttatgcagcttccctgtctttaaaaagcagtaagtgcttcatttaatcttttgtgatagattccagtttaagaatctacgtctctggctcttatttcagaacaacatttaaaaaaaaaaaaagcttcttaattcaccttaacagaaaatataacccctttaggggggagtcattacaatgccaaaggacagacacagaaatcaacttcctttcagcatactggccctgatgctgggtgacacaccccactcactgtagggttcgtctgtgacaaccagagtcacgagtcaaatgagatgaaactaaacttctgaagcctgaccatttccttcacagctttttcaaaggccagggtttttctttctttctttccagggcccccaacagggtaatagtgaggccccactgatttagctgaaggtagtagcttaccttctggagaccaacattcgcctgcagcaggctgtccacagtagatcttggaagggacaaattgtgctgcaggaatccagagaatgtttcattgtccaccagaaaatcctggagcttcaaatctattggaaaattgtgtttgtttacagttaataactcaaaaaaaaaaaaaaagactcaaccgctatggggaaggtggagaatagaatattgattgcttcattttaaacggatgggtgaccacaggcttctggcttacatacaccgagaagtgagtttcaggagctccgtctcgctggcagagacatgaaaagattgctttctgatgacatgttgagccacactcagtgtgggctcccacagtccaacagcacagtggtgttgttacacacatggtctttccttgttgccaattgaaaaaccaacccttttaaatgatctcatccatcctacctgaggtttgtgacatgagccctgctgctcctgactcctcagtgccgcctcacgtagctagcactgaaaatactgagtgccttatttccacaagccacaggggctaatctcccagatcagcaggcaatggctcgctaacatttctgtgaaccagaatcgcttgatgggttgcctcagctagccggctggacagcagtctcagagcatctgcttctgccagctctggctgcagcagctgcatgtctaacaagctcccaggtggtgctgatgttgcctgcctgggaccacacttccaagaatcacaggggagtcctgtgagcatatcgaggtgtttaaatagacatggtctcttcttggtttcagaacaaaacctgggatttcagaactataaagtccagttcctccaaacactgagaaaaatatgtaaacgtatgtttgaaatcccaccctttgctttactaaatgcagtgactgctaaaggctttcattccgactcccattaaacaataagctctccaagtaccaactcccattaaacaataagctctccgagtacatcgaaaaaaggcttcactccagtggcatgaaatagaaaagagcactggccaagaattcagaacgtcagtctctggctggaggctaggtatgatagtaccacttgaatttcatttctttagcacctttctgagccttgggccccatcatctgtaaagcaagaggattctgagcagatgctgagtggtgcctgcctgaaacaccaaccattttcctgccttattttattgactatttcatctttcttcttccttacccctttaaacttctaataacccgaattcttttttgaaattaaaacaaaccaacaccaccacccccccaaaacaaaaacaaaaccaagctcatctgggaccaagtggctgaccactagagggcaaactttacaaactcaaatcaattacccgaagaggggttccatctgaaaacaagactgcagtgtgcactgatgaaaccgtttctcttgggatctaaaagggtctcccttcgtagagacaaacagtccaagcagattcttaatagatacaaatgacccaggcatcttcagcatggagcaaacttcagtaattttgaacggagctgataaaacagtgattctcctcaactcatctatagttttatcctagggttcctcatactatgccacagctgatctgaggcctgtcaatgtccctccttgaaatcagcactcagccatctgtcatctgcctggtgtttccatcgtacaagaccccacactgctaccactgaactcaattctttgagttgccatacccacagaacacctaagattcacttaagaggcacacaaaaactagtttctgggtgtctattccttcagattacaaccaggggttctaaggtagaccacccacaaatctccattttaataagcagcctccacatttccaatacagcgggtctggaagccatatattatgaaatgttattttacttaagtatagcctgcattcaactctaacttataaaaatgcagaataggtcttttatcttagtgttccaaatacctggaacaaagcctggtacaaaattactgctccagcaatgacacctgactgaatgctagatgaggtgaccagaaagacttcagaaggatctttgagattagtgggtccaggaagagaccaaggagggcaagagcatcaaatctctaggctatagcccaggaggaaataagaaccctgaccacaagtgtcttttcaaagacaacaacatctagaacatcccagcatccccatggtggggggtaaggagaaggaaggaagacaggcagagaggcttcagccaaagcttgaggtgaaaaggcaggcatgcttataaattagttatgtatgtgtgtatgtatacacacacacacaaacacacaatacttaagtttgtgtatgtacataaatctcaaaagaagaggtggagaatagatcattcaatagagcacttttttcaatatgagcaatgctctacacacacacacacacacacacacacacacctcatactgggaaaccaaattctgggctctgtatccatgtatttctaagtttatttgacctacttaaacttccatggccttacctataaaaatgaggatcaaaagagagctctgtgaaccttgatagaacagaataaatctatgacctaacactcagatcagccagttgaacacaaattcctcctgagcaaagccacagcagtacacagcatcctacgtaggaacttcagaacagctccttccttcagggcagcagaagtgtgggaggtttgacccagactgcactctgaaaggacctaggtcacccagcaacactctggagaccagcaaatgtacttagcatgtttatatgatgcttccgttatgtcaacagacgctgcagataaacagctggatgtgatcaaacaccaactgcctatcctctggatgagacacagaaaccaaagaagctggttaaacagccaacagcccttggcagtgcatgaacataatgtggcagatgctgggtggggatgatgcaggaaggccatagagccttggctacaaacaacttgcagtctggtcacgtggatatgcacacattatctgctgctgtcctatcaccgctgacagctgcagtacatacacacacaggaagacaaaggtgtgtggtatgatggctcttaaccttggaggctgctaggcccacttgggaattttaaaaaatcccaaagcccaggccacaccccccagcacaatgaaccagaactgtgaaggacaagaattgggtcttgagaattaaaaaaagaaaaaaaaatctaaccaagtttgatgtggtggtgcatatctgtaatgtcagtagtcaggaggcagaggcagtaaactgcaaattagaggccagcctgggctacggagtaagttccacacccgtgcttacacaggaagtccaagcctcaaaacaaaactatgcaggcaaaaagaagtttaggaccataaagcccaaaatgtaatgctgtttcttgctataaattagctgtgtggccataagatgccactataccttaaagtcctggggataagagacgtattcatacacttgagcaattagcaactggctagggacaaatgtttattaaatggtaatatattaattgtcactaaaatggcagtcttactgcactatagagcaatgtgcaggaaaaaataagaacacagatcttccctctagggattttcttggttatcacagatttgaggtataggagaggaaaggggggaaagaaaaaagaagtgatatgaagacagaccacaatggctttgtccttgctggtttctgtcttctgtatgcagctagctgtgtaggagagtgcaaagaatgaaccaagccagatgactgatacagctagtaatcttgggtgaagccactggatggatggatggatggatggatggatggatggatggatggatagatggatggatagctggctggctggacagatggctgggtaggtggatggatggatggatggatggctagatggatgaatgatggatggatggatggatgggtagatggatggatgggtggatggatggatggatgggtagatagatgggtgggtgggtggatggatggatggatggatgcacagatggatgatggatagatgaatacaaatgcatgaatgtaaaatgagctgatatgacctgagaaatgaccaattttgaagaggtaaattcatctggcagtaggaaggggacagaccaatcaggacacgaatgtgaagcagactgggtcaagatggctacggtatccctaagccgcctacttggtttcatgccccaagtgacaagccgcatcaggtaaacaacagctggaagcacagcaggaataaagcagagggaagctgagttaatgagatgatgacacagagcttgatgcagtggtccacacttgtaaccccagctattcgggaggctgaaacaggaggatcacaaagtcaaggtctccttggtccacaatatgagttccaggcaacgtagtgagagaaaggctgtgggtatgtctcagtggtttgtgaacttacccagcaggcatgaagttctgagttccattcccagtaccagaaagaaaaagtaaataagtaagaaaacaaacccaaaggaaatgacaagagcatccacctttctggacctactgtgagccttacatgagaaaggtacatgccagccatgggaattcccgtgccgagttacatgctccatacagatcttctaatctgatcatgtccaaggacagcttctctcatcagctgagctgctgtgttcaaaatagatagtaagagagaggtgactttgacaagaacactgagatgccaaactcgtggccccataagatgtgtctgagtgtgcacatgtgtgggcacatatatttatgaatgtattatagatttgtctgagtgagataaaactattttgcttttatttttctacctgctacaaggtaaaggaaaggtcaaagctcactcaagtgcctattcagaacttcatgaaaaaaattaataaaagccaggcctagtagcacaggcctgttatatcccagctatctggggctctgaggcaggaggattacagtacaaagccagcttcagcaactcaacaactcatctcaccaaaatatgtgggtggggagacaggtagggatataggtcaagggtagagtgtttttctaacatgtagaagccccaggttcaatccccagtactgcaaaaaagaaagagagagaggagaaaggaatatggagacacagggaaaaataaaaataaataaacctaaaattttatagagcatcaatgaaaggatcatatcttctggaaactgtgagactagacacaagtagatgaccagtaacagacaagttattctaggtaagacaaagaacgcttcgtgggaaagacagtcactcagttaaccctaaccaaatgaattgacggggacctggtttttattatctgtggaatgtgtggttggggaaaaagttctctgaaaaactcttttccatgtttctgagaggaacacagatccaattgatccagcaccagagactcttatcagagaggctgaactcaaacacttcctgcctgtgtgaccatgaacctcacttggcccctttctttgttctctcttaacctcagtttcttagacatcaaatggagttggggccaacaagaaggtttagcaagaacagtacctgccaccaagcctggcaccccaatctcagtccatgagacacacgtgggatgacttccacaagctgtcctgtcccttcacacccagcccacctcacacacatacaaaataaagtgtaataatgtttttaaaagaatatggaaatagtaacattcataagttgatgtagaatgcaatgattaagagtatgaacaagagactggagctaggaagatggctcactcaataaaacacctactgggcaagcgcaaggaactgagtattcacccccaacatcaaggtcaaaagtcatgaaccatccatgccctcagtgctggggagatggacaaaggctcaaggcttgctggccagttggtgtatccaaatcagtgagctccttgttcagtgagagatcctaaattcaatactgatgtctgccctctaaaacgagtacacacaatacacacacacagacacatacacacacacacacacacacacacacaccactcactcactgaagacccagagctggttagttgggagtgtttacatgagaaggtgtggtcccagttagaatgtgaacatcagggaagccagaaagctgtagtcaacaaagggccaaaggagttctctcattgctggacgaaagtatctgatctgcggagcccagcttcctgattggccggagaggcagccagccgcctgccatgtccctggagctttgggcacagtgaagcagggcaaaggggaggagagagggaaaacaaaataaaaggctggtgtctaaaaagagcaaacagatgagatgcatctgtgggctgggacagagtgagacacaatcctgggtttcttgctattcatctgggtcaagtcactacagccaagctaaggaaacagcacaggcagatagaagttagagagaagcctaactctggggggggggggggggggggtcttcctggtcatggaagcgttcgctctcccacctgcctgctggaacccaggagcagaggaggaggaagaggaggaggaaggaggagggcgagggaaacaacagaggaaggcagaggaggaaaaccctggcagcagccactggggttactctcggtcagtgccctctctaagccccagcttaagtttcaagttctctgcagtcttgtgctctatacaaaaggaaccacagccatcaacagcttgagacgtgggtggaggagagaaatggggaaaaggagaagcagagaaagaagccttgccagcagccccagcctgcatacccttcttaaatggaccccctaggcagcagcagggtggagtagaggtggggttgaggtctcctagccctggctggtcaaatgagcaaagacttgggggtggggggctggatgacagtcttgtggttctatttagcctatttgattagtcttataaacaagactttggaatattttcagctacaaaggggctggaaataatcacacctgtttattagttggttggttacttagttcctttctgagtctcacggcttccaattcctcattctcctacttccacctccacaagctgccattataaacacaccatcatgcccaacttcgggtatctgttgctttggttcattttgtggtgctgggcctgtgagatgtctccagaagactttgtggggtgctctggagagaaggaatagtagctgggtggatatgccctggggaacctgtgagcgtggacgagggtgagccagactgtgggcacacatgccttgagacctccatggtggtcacggggccccggagaattttcttgccctgcagtgaaggctttctcaacagcacagaagaagtgctaattggagtctaatgaacctgggtcacatttccattacagaatgttctacttctgtggacattggaagtcacttttcaggccctccaagtttctgggttccgaaagcactaataacaccaagcatggcttacagtgcacaagaaaatataaactggagactaaatatagtcaaaatacatgctgataaaatcgtcatggcaattagatgaccagttcccaagagacctgactattcgtggctatacaccctgaaccgtttgctgccaaaacctcgtctttagaccaacagaaattgtacaactttagacactgtatgctgtttaaattatttggtgcatcagttaaatgtctactgtatcacagtaccagtgctaaggataaaaggggaaaaaacctagttagtgcttcccaaaggcagggacaaaaggggtatcgtatgacataatcccggcccttgctatccaagagattgtgggcatccagtaagaacagagcagccctgtgtgctattgagaatcagtcacaattgagatgacagcaggaaggaaacacctttccccagatccatgctctaaggcagccactggctgacaggagaagaatgctgggaaactggaggcctcccaggaaatcagtcatcagagagagtcctctcagacgagcttacgatttttatgaaagcgctttttaaaaagattgaagagacacacacacacacatatacatagatgaaagcaaacactcataaaacaatataaatcttctttttaaagaccttgaggggtgggctcattcttctgtctcttctaccaagttaagagtcaaaagagccctccaggagacggtagcccacaacagaacttggacgtctgggattcttagaaaccatttctatcaggtaaaattactgagccttgggtattttcttatggaagctagaatggattaaacaaataagcatgccttcctaacaagagggaagctgctagaaccctctgggatgagagcttgagtcatctagcaagagtctgggtggtaaggaggagccattgagggctgtggctctcactggccagcaggtggggcctgagacagcaggttggctgagatagctggaggaaaatgagagggaatactgaggtgctaacactggtccaaatgagttctgaacctaaggagaaacaaaactcaggaagcccatatgaggaaaaaacaagaagacagctggtaaacaaacaaaccccccatactttgtagagagccttttgtgaacacctgagcgatgcaaagcaaaggggatacttggaagatggaaggagaaaagcaggaaagggcaacaataggaagaaactaattagaaacaggaaaaactgaatccaagagaaggtggcagagacaggaggcatgggagatgggagagtttaagccacccggttctaagctatgactttgtctctaactgattgagaccagacacaacaggatgaaggattacaaccagttcctgggaacttggaaaacccacggaacaggggttggtgaggcagctcaggggatatggggggggggggggaacacaggattccctagagcatgcttggtagctaaattagctaaacaggtgagtagagccctgacatcaacttctggcctcctgagagaaagacagagacagagactgggtcacagagacagagacacagagagagagagacacagagagaaagagtcagagacacaaagacaaacagacagagagagaaaggcagggacagacaaacagggaacaagagaaggaaaggaagatgaccgtgcaagtgagggacttaggtgggactctttgcaggcagttaggggagacctctcggtatgcatcctgcacacattgcctcatttcttctaatgtctaagattaataaacgtagcaggacgtggtggcactttgaggcaggaaacacgactcatatttgcaaagcctcaggcacattacacagatcaatttccaggatctctaaaaccagcttccaagaaaggtattgctattattctcatttttccaacccaggaaagatgtcagaagggagtatctggctcaaggtcacaaaacaaaccaaaggcaaatgtcaacccagcaactttgatttcaaaactctagttctttccactctgttagcaactaagtgaattgtgttactctccagaatcaaaagctggtgatgtcaaccatgcttccccacaatgaagtgaggcaacgtgggcatatggtgtggtggagagatgtggaactttgagccacacagacctgaacctaagttacaactccatagcactgagcaacagatacaaccttttcagactcagttttctcatcaataaaatggggatagtactgatccactaatgctgcttcaaagaaccaaattcagtagtccactaaaaatataaagttccactcaaacacaggcacatcaatgctcactgaagctctgttcgtaacagctaagttagagaaccaatctagggggtccaaccacagagaaagaggagaaatacttttcagccatagagaacaaagctatggcttttttgagataatacatatagtcagagataatcctattaatcaaattaagttagtctcagaaagagagatactctatgcttttctctcacttatgggtcctaggtttcatataaatacatagaacagaaaatagaagcaaattgtctaggaacacagaaggaataatgccaaaggagggttgagcagaggagaggagagggtatgtgaggagcatctttaacatgtagaataaacctatgtaagtatggccttacatgacatgggaccaaacatacaatgcatacatacctatgtttagtatgtcctttatggcataggacaatacaatgcacacctatgaatgtacccttacataacataggaccaaacatacaatacctatttatgtgaatacacccttatatgacacgggaccaaacatacagagcatacctatgtgagcaaatccttatatgacatgaaacgatgtacaatgaatttatactattgggggatatcttttaatgcaaaatggcgttgctaccctgtccaaccttgtctgtagacagagtcaattgaacactgtcttttgggacttccgtgcaactgaggtgggcgggcttgaagcacaaagctttcagggagaaccaaactctatgcccaagctgctctctgccacccacagggtaaacgaatctcatacaggaaaggcaggagacatgtgacactgttgtctggtggtcacaagtcaagctttttaaaaagcagcctgatattgtgagctaacatggctttctgtaattgaatgcaattgtattttctatgcttgtctgggtaaagttgacctttggtttgatttagctcaagcaatatttcaacagtgcactggggcactgctttggctagagccaggcctctgccctggatggcaaccaacagcccaggctctggggcacagccgggctttgacaggtctggggaaatgttcagggagatgaaaggtttcaaactataaaactctaaaatctcaagtcaaaacttttgacaagcacacacaggacatgaattacaatcacccgaagatttttacaggcttctcaattttaatgacatgctgacacgcgtcatcagatctcacaacaagatgacacatgggtgtcaggtatgaggacagaagactagagttcggggctgtaaacccaacttgagcaactgctctgatgaaacaaagggcagaatttcaggcaaaagggagaagtagctgtgagtcacgagatggtctttagagctaggcctccgggaaaagtcccctagtgtctgctacgcaggaagcttggacgcgtagcctaaaagggaaggaaagctgacagaagctctctcatcctcctcaccccagcctgtctgtgtgtggggacctcgtaggtgtcaagggcagctctccctaggatgtaacagcgacaaagtatgaaagactgaaattctactcttgccagccgttgccaatggtggtttctcaggcaaggtacttagcctctctgaatttcatgtgcacaaagagaaatggccttcctcccgtaactgcaaacacagtgaaggaaggaagagatctcacacttcctgtgtatcaggttggtatgggaaggccttgttcctattggctcatttccttgaggagtcccatccctggggaggtgctagcattgtcacctcttgaggaaagtgaggcacaggaatgttacatggttaggcatgggtataactgaccaactacagaagccaggcttgaacccagccatcctgactctcacgttcaggggatatttaaaagttattcactgttcatcaacacctgttctccaacccctgcctcagccaagttccttgccttatcaccacaaccaccctggctcctggagtttatgtcttatcaggacttgtcagtatcaacagacaggcaaaatggcacggccattttccctaactgaaaacccttggcttgcagatggaaaggcacagataacctgggtccaagccacaatggaaaggccaagccagccacgccattgcctcaacacaacacctagctaaagagacagagacaagcagacataactcagcatacacaacactgccctggatctcctcccctctcaacctcaacaacctagacacataatccagtccagagcccaagattcaccctggttctttctcggaaaagttttcagagctagagggcatctgcaccctggagagaaaacatctgaaaagcccctgaaccagagatggggcaggggtaggggttatcaactgtccatagtctgtactaatggaagcagaagagaacataggctgcaacagaaaaccatgtggggtggacagtgcccgacttgaaagagcacagctctcatggagggtgtcacttccatgggctgtggagcacaggcacacacaggtacagcccatccctcaaccgccccagcaacctttcctgacccaaacacaaaggaccagaaaaatagtcgtctgcagtccctaaagtaccttctgggcttcaggacttaaagtgtatcaatgtggctgtcacttgggacagagccagacacccagagagctaagaactaagaactaggagctaggatcttggctgagtcccatgcacacaagagatcagctatctggcatccagccacaccacagaaccgatagccctagccacagcactcgggtcatgccacagctgtaaagaatgcagaacttctacaggacccacacaaaccggagggattgtccctagattaagtaagcctctgggggactcactaactagacaagggtttagctgactgttaagatgggggtgggggtggggaagaggaggaaaggaggggggaagtggagggggagaggaagagaatgtcttagactgtgaggatgttctaccctagaaaagccagaatcctcagacacagcttaaagaaacacgtcccgacttcacgccagtaggaagccctggggacacagtaacttgcatccatggaggatgggacagaagcagacactaggagaaggcagatccctgagcagacaggctcacaagaagcagccatgagcatgttcgctgactatcattaaccagcagtgagggtacagccaacagcaaaagaccagtcaccatgtcctctgactgtggggacaagccactgggaaggactgctttgaggctcctcctctccccacccctggggaaaaggccagagtcaccaagacctgggcccagagaagcagatgtggtaagccgaaggacagggacaaagaggaggctgtgggggaatggtcctccctgatggccgggggcatcctccccagccctagtgcctggaattcaggcagtgcctgctgtcttcaaaaacaactatttaaaaaagaacctaaccttttcaggttttaaaaatacatatatgtgggtaaacacacagctaatccccactgtgggcggggggaaaacctcaaagagggccatgagagtgaatatggacctttgcagtacttgttattcctctgaactcagattagcatatccagcggaattgtgggaggtagattttgtgaaagaaactcaagactgatttagtggggcctgttttacacgagggaagcggttctgcacttacctatgcttgctctgatgctgtccagagctttcgcttgacaatattacatgaggcgaaagggcagctactagacttgctttcactgcgcattctctaaagatgctctcagggttaccatgctgctaccacgcggctgctcagagtacaaccaccgtcaccgtcacttcatgccctgaacaggctatggcctggtgggtaacacaaaccactgtctcacaggtgtccccacccaaggaccaagccaaactctaagatgaagcatcatcaagtcgtttaaccggatctcaaaagtcaagacaatgaaacttgcagcccagacaacatgaacaaattgtcaaaggccaaacaccctggaacgtgaggagagcaatgcatttttgacttatatatgtgtcacccatgtgctcatgctcactgctggaaacccgtaggtgtagcacctcactgaatgcttaatgatccacaaatgtagttcatgtccaaatttctaacaagcaagagggccaggaagaatcaagagttcaccaaaggtgagagcaagaacctaaatttgttgccaaatcagtcttgacgcagcttcaagtctcccctacaccagcatttgccaaccttcctcaggcactgaccaactactctccagcatttcaccacagccacatgaaacaataccttcatgaacttcatcttcccaacatccatttaagcaatcaggcacattttcatgtgagtcagaatcaaaggttgtcgtttgtgtcctgtcagaaatcagtttacatgtcacagggtcacagtctagacatgtcaccttttctgcagtttctgagaatgtagctgacgtttatactgcctttgagcatgggtgcatggtaggaaagagggaatgctttcacacactaactccccaaactgacttagccaccactcaacctattggtaatactctggcttagagagaaaaatgaaaaccaataaagtgaccccaaagttccagtgacatgaaaactgggggaggcgcatctgtaaggcttcacccctgcttctcccctcaggatgcttcagtgatagaggagcaatccatgacttcatttttgaagctggactattattgaaacagtagaagatggatctttctagaaacatgaatcaggaagccagggttggagggaagtcacctccactttcagtatcaggttccctctaagaagaacccctcaccctgagtctcagcacctgggagagcagggttggcacaagactgaataactcaagaagccagtgcatgaatccacacagagattaaacagtttctgaccaaagcaatgtcgtagcccaggaaaccttgaggcaagacaagagtgcttgagtagactcctgtgcctacagagttcctgtggccagtccaatggcattagcagaggcaaagaacaagatgagtctccaaatagatctcatagcaggacccagtggctccagccatgaccacagaggcaagtagctttctaagatcctgagcagtcccatccaaaggagtaggtagccagtaccaatctcaaactttgttctcatgctgatcaatatctgggatagcaagagagtcactgaacccctacgtgacagagagcagagtgtagtagctgaagaatcatagtaaaatcagaatctcgagcggctaaggggatagacgggatttaatgatatgaattagaagagataggtaaagtctgcttagctcaaaaagccagcggtacagttagagaaaggagaagtcacctgcagttctgcatattcacgagacctgcagtttgagttggttgtacaatgggccatgagtgaactggatgacaagaccttgaaaagcctcttgcaatctcagacgtgtggacagaaatacagcacgcagacaggcagaagtccccttctcctgtctgctagaatacttttgtaatttctggtaaacttctggaatgacataaacacaccgagaggcagaagttgggaggaaaagcattgcgcaagaggagtagatgacaaacagaccggaaaaaaataagactccagaaacaggcacaaaaattgatcctggatttttgacggacacggaatcagactaattctctacaagacggtggcaaatactacctgacagcttgagctctcaacacccaacatgagctacctcatgagaggatgaggtacagggatcgaccatgacaccgccagcctccaagtcagactggtggggtgtttttcaaaatcagcaaaaagttcccacttcctagagaaggaggcagcattttttttcatgcttcctctacaactgtggcctggctttctgttgtaagataaacaaagaaaaataacagaaagtcaaagaccagctgggcctggagatgtagttcagtggctaagtacttgagtagcttggacaagttcctgggcttgatgctcagcacagaaaagcaagttgaaacagaacagaactagctgcaagggtgaaggaggcactgggagagagctcccctcagcagggctgggcacaccctgccctttctttcctccatcccacttcaggactccagttgctcggacaataaaagcaccctgctctctagggcagcctccactaagaactggaaattccgccaggtccattttgccagccccacaaatgaagaagcagaagaacaaggtcagatggtcagacatgaaacaatgaagacagcactggcttctgttaacaaagcatctactatgggccaaccctgtgtcagactttgtaccttaggaattatcatattaatgatgtaataatatctcattatactgtgcataataatataatactattataattaattcaggaaattaggtctcagaaacattgaatgttttgtctgagatgtccagacttgaaaataatcctatcttggctatggacagcactggatgcttttacagagagcccagattctatttctaacacttccatggaagctcccactacctggaacgccagttgcagggattctcatgccctcttctggtctcatgcacgccaggaacacacacagtgtacacataaacatgcaggcgaaatattcatacccataaaacaaaactgatagatcaaaaaagaatcttttagaaaaataatcatggctcatattcattaaatgttacttacgtgtcaaatactggtttgactctgggtgggtctgttactgtacccattttcaataacaagagataacctctaagggacctggtaacttattcacaaagtcacgtggtaccaccggcactttttgtctgtgctacccagtttcctggtggtagaagaaataactcagttctgctgcatggcaacctaacagaggctctccatcacagaaatgcctggccttgaccagagtcctccagggaagggaaacagcagcaaacgatctcagtacacagccaggtacagtgcagcttcgagctccttacaggggactcaggaaccagagtacgccacacctctgcactgaagtcacacctcatcagtcagagtccaccatgacagtgcctcttattaagaagtgtgtgtgtgtgtgtgtgtgtgtgtgtgtgtgtgtgtgtgtgtgtgtgcgcgcgcgcgcgcgcatgtaagtgcagtgcccttggaggccagaagaggccagcagactccccggagttggcatttcaggcagttgtaagccacccgaggtgggtgctgggaactttacaccactgctcccctcacgaactaggagggaggcctttctgcaaaggctagaccagtctactctctcttcaaatgtcaaactgggtaaaaagactttcctggagcagtgatcactgttggcccatcacgagaggagtacttcctcactggtgcagtttagacagcagcactttccggaggcttgtggatcacttcttgatcatcactatggataccaccgttctcgcctgttccagtgaacatcaaacactgcctcttcccccacccgcgctggcaggcttactgcccaggggactgtcacaatctctgtagccaaagtctcggtcagcaaattgtatgttccccagacacttcctcagtggcatgccaggaactaactgcctagctacttagcaaatctgaggtaaagatttcactgtttcaagatcagaattcaaatgccttgtctggcttatccaaatggctagttctgagggcgaagaatgagtttcctattagaaataagtgcctaacttttacttacccatgatcaaattagaactctaactgctctcataggcacagaaatatctataatctgtctatccatggaaatcctatgggtagctcaaaaatgcccttggcaacaatttctgctccagctggccttaatggcaaagcaagcctgtgccattcctgctggggtctgcatccccagtcgctgtctggggcaaccagcttctctagctttgttcccaatgcttcccacagagaagaccaatcatccagccactgaagaaaagccacagtcagggacaagctagagagcgagccctgggacacacgggcagggaaatgttcactcccggatgcatgagtggaagggctttgcttacttgagttgggatgcttgatctgccgtaacattctcaggaccttgtgcatgtccttaatgctggtatctctttggctgtacagaagaagcctctgagcgtctgagaacaggcgagacacgctgcaaagggaataagaagaagtagaaatggcttgggttaggccagctgtctctccccagcctggcctcccctactccctagctattactccatcctccagggggagctcacaagtagatgcacaaacgagtaagagcgtgcgtgtgtgtgtgtgtgtgtgtgtgtgtgtgtgtgtgtgtgtgtgtgtatgtgtgtgcgctactggccataataagcccaatgcctttatcccaagacatgcttagcgattcataatacattttcatttattaaaaggatgcattaggaacacatataacaggaatgcatatccagtaatgaattttcaattgatcgtatgcatttgtataccaacagtctgacatgtttttaacattttggttatgcaatgtggccctgcttgtcccaaccgcagcaccatctccaaccagcagcacatcctacagtccctggtctgctctaactctgtgactttgcacatctgggggatcctcaacatctcgtctggaaggagcattttatatccagcatcccagcatctgagccaggaacacagacactaaggaagcaccatcatgctctcgggcagctcccactcagggacagaaagacaagtcaacagcagagacactgcagtcatttcaggggtcagagcaatgacctgagagcagaggacaggacactcctgccttgggctctgagctgctggagaacccagacccttcctgcgcagtggctctggctcctagaagtgtccacttcaaagggacagcagagatctgagtgagtagatcagatggagcttgctcagtctcccagagcactgactgagtagacagctttcgatcccataatcacagtgactcctaaatcccacggtcttaaatcctggtggcaattcccccttcattcattctgcagacttctcatgcaaacctctccaagaaggaaaggataagtattaactggcaagtttgggaaagaaaacccgatctggtacttacatggacttgttaaagtttccaacaacaccgggagcctcgccgggagttggataacggaagcaggggttgttggcattacagataatcccctgtacccaggggagggttcctgcagacggcatggctttattcggaaagtggcctattgaaatcgagaaggaaacgcagagaagacattagacctgtgaagtgattttaacacaagcctctcacatctgtctgtctcattcaccatgtcccagacttatcaatgttatttatgtgagtgttctgcttgatgcacatatgtgcaccatgtgcatgcctgcctagtatccatggaggccaaaagaggtctgtaaactccgctgaaactgaagttacagatgttgtgagccactctgtggatgctgggaactgaactcaggtcctccggaagagcatgcagccagagtgctcttaagtgctgagccatctctccagcccctccccatgtcctagaagacaggtgggaatttgacatcaagtaaaggtgaccatggttctatttggcatcatctgtagattgggattcatgataccaacctcgggaatgtaataaatggggtctatcagaccatggacaccaaccacttggcaagcagcaagtcgccatttgctcaatccctaccatgagcctcatctccaagagacacagaaggacctggacagtgacctaatatagctccttcatactgccgctgatgaagaactcagagatgcacatggctggggatagaaacttcatctccaggatcccagcccatgcctctcccttccagcggtagccttcaccatcacctcactcttctcaagactccacctgtacctgccttcatccagcaaaagtttgtcagcttcacttcctccaacagcccaagggtccactaacagcacctcaaaagcatgctcacatgagacagaagccaactgccaagctatcttggttttcctgtcccttcctcactcatcgataaaatgaggccacatccaccaggcaactcctcacccttttccctacatctagtcgtttcttacaaacaataaccggtatgtctggctgaggtcagagcctttaaaagcacgggtaggtttgtagcaaggatttacaaatattgcttatgggaatcaagataaatgttattccaagggcctgttcgtgttgaggcaaaaaggtattggctctggctctcgtcatatgctcagggctatctgaagatctggcgagcatgaagaaccatggctccaggcaatgacttgcttgtatcttcgcagagtttggagacaaaccgatggagatttacagctctgtccctgccatgtgcatagcacagccaagccaacctccaagtcgatctccagcgccttgttttcccacctgtaaaatgctgattgctgtgcaagaggtgtcacaggaactcttatcagtagagcagcttgtgattctatttgtatttttatgagacaaagtttcactctgtagcccaggctggcttagaaggccgagcacttttacagagggcccagcacaaggtaaatgctcatgaattgtccaattagaacttctaaggcatcatgtagtgcagcattgtgtagtgtgccattgtgtagtgtgccattgtgtagtgtggtattgtgtagtgtgccattgtgtagtgtgccactgtgaagtgtgccattgtgtagtgtgccattgtgaagtgtgccattgtgtagtgtggtattgtgtagtgcactattgtacagtgtgccattgtgtagtgtagtattgtgtagtgcattattgtgcactgtggtgtagtgcactactgtgtattgtggtattgtgtagtgcgctactgtgtagtgtggcattgtgtagtgcactattgtatagcatgttattgtataatgcactattgtgtagtgtggtattgtgtaggtcactactgtgtaatgtggtattgtatagtgcactgttgtgtagtgtggaattgtgtagtacacgattgtgtagtgtggtattgtatagtgcactactgtgtagtgtggtattgtgtaggtcactactgtgtagtgtggtattgtgtaggtcactactgtgaagtgtggtattgtttagtgcactgttgtgtaatgtgctacccctgtccatagggaactgaatgctctctttccatctcacaactcccaccttcctccaaagacagtttctcttcattttttttcaagtaaatatgctaatagacactccccaaaactaacccaaaggctgagatgcacctcacattatatatcagtacggggaacctttcactcttttaaaacttctatccctattccaaccagaggccacatggaagggtgtgacaagatctggtccccatgggcagtccctgtagggactctggcctgttgaattgtttactcagctaatctctttatctccctgttaacagttcaaggaaaaccaaacaaagccccttgcctaacgagctgctgctcctccatcagtgaagagttagcaggattctcctcttacaacttgtagagatagtagccctaagaacgggagagtgtaggtcaaaggcaaagacggtgaagacatttcaacctttccttcccctgggcaaacaaagacccttccttggacgctgcagcccatcctctgggcaaatagaaacaccatggtggacagttagacactgggtgtccaggaccccagtcaaataatgcaatggacatcaaaaagtcagaggactcatgaggaccttgaggactctgacctgaactacaaagatttacagagaagaatttcatactagtcctttgttcccagcgtagaggcatacatatatctgcaggcttcaccttagctttctgctccgctgttctgacgaaatcagaaagccatgtccaagggaatgtatctgaggcatctgggtgtgtgacctgaatatataggatgcctattagcaaactggtatgtcaatgcctgccgttacatgctatgtaagaaaggggaaggtgaccaaaaaacgcaatcaaaaggtgactgtggcctcagggctgtcttgaaagaacacaatcttctaagtcaaggggcctgttggagctggtgagtggtaagacaagtgtgtgggacagaaagctttggtcccaacaaaaactcctacacaaatgctaattctttgggcctttctaaactgttgctccagccatccaccgagcacagccagaccgtaaaatggtcattccgacagcaacagtgcaaattaggttttgctgctctcttttatagagaagctaaaatcacttgctcatggtgacacactatgtgtcagtttctagccactactgtatctcagcgctcactgtcaagactgccttcaaatcacatgagtgagcgagacaagcagcctgaactgtattccacctctactagaaatgtaaatttgggcaagtcattataggtgtgtgagccccaatttagctaccaggaaatcagagcaaaggatagcaaagtctactatacaagattgttgagaacaaaatgaaatgttacaggagtcaaactgagatgttgtacacaaaggctgcatatgctctaaaagctgagaaggtagctcagtggttaagcccacaaagtactcttgcagaggacctgaggtgggttcccagaactcatatcagatagctcacaattacctgtaactccatctccaggggttctaacacctctggtcttctcaggcacctactcatgtgcatatacccccacacagacatatatgcatacttgatttagaaagtatgggttccaatacatggtccatgatttttaaccatgagattaaaagacaatgcaagcaaaaggacaacaccagggaactggacactggcatttgaaacactactgtagggtgatttgtagccgtcactttctgactctaaggctattttattatcatgattaaaaaaccgttaagattattatcattactatcatcattatttaactgggactacaaatatctcaagttcatgccctaaccaaaaaaatagtaaaggccagattttctgttcaagctatttgtggcattctcctgaagacagcaactttgtaaagattcagttgagagcatcttcactctggattttgctagccatcactgagactcaggcgtggtccacagatactcacactcatgttgttcgtagggtgggtagctcaggcgtacagagatcaggatcaggaagataaagagaggccaggccacttccagtaacagctgacactgaacagaaaataaaacacaagatcgtgaattttaaatgataacatggtagccagctactactggactgagaaacccacagagcaattcagcaattgactgacttctggcacttctgactcccttcactctccaaacttgaagtgcattgaattgtgggtggtatcctgtaacatcccattccacacctgtgtctttaaggctcccttctacccaggtttcaagactcagccatgcttctttctgcctgagctaggaagtcctcctgtgctcacattcccacaaacctaaacagttcctctctcacatctcccccaagcccgagatgatctgcttcagtcactggctcccacatagcactcttaattaacatctatctcaacagggacacatttcattgtagagtacagtcttattaattgcgatctgtcatggtctcttggtattcccccttctatgacgagatcagaagtaaactctctctgggtaactggtactttagagtattaggggcatttgggctttttgttttgttttgttttgttttttgtttgtttttttaaccatgtttgtttttcctagtttaaataaggaactttgaattttctaagaactttggtatgactttacatcaagctcattttgggatcttcagggaggaactgaaacaagatagtagctatgcatgttccagaacaaaaacatgaagtttttatacttccttcggttcgtgaacccctactaccacaaactataaagagtagtttatacaaagagcacattaaaagagaaaatggcaaggaccagggaagaaaagacgaatcttactaaagatgtctgtaaataatcccaaagaaggaacaaaacctctacgtttgcaaacaacactcagcctcttctcttttccttcatagaaaatagatttactactcctttgggagagggtgatgggcacggattgcaaaccatgacaccatacaatttttattgtcccttacacctctgtaaactgctcaggggcaggagtcggggatgactttctaccagagaacacagcctggatttcctgaacactgaaaataacttctctaccagtaaggctggagcccttcctctgagatccaggtatgctgtgcctttatcagcctgtggcacaagagctgtgtttacatatgaggctctcccttctgttactgtgttctcagcaaatccgcaacatggttaagggctaagcatgacacggtaagcatatattgggtaagagagtgaactgaagctttcaaaatcagaaagacagaaacaaaaatcggctgacccctctgggaaagaagtttggcaatatgcattcaaaaggcacatttacccctttgaacaactgtcatcctcctgagaattcatccgaaggagcaaactaaataagaaaacaactcaatccccaaaagccgtatacatgatttgaagtgctataactgtaaagtgttgtaaacaaataactcaatcacacaacaaaggaaaaatggttacataagcatacatctaatgggcaataatagattacttggttattacagcaacatttatgaaacccagctttcactatccaagaacacaggacacagaacccaatacattctaagcctgcatctttataaaaccactcgcacacattgctaagcaaacatagaaataaagctttctataatgacatggctgtgatgaattacagaataatgaagcctgaaaagtataaaactgaacagagaatatacaggaagtcattcatcttgacactccgaagccactatttcaactaacaggataaatcggagctaccatttagggagagctccatatgtactgggctcattttacacagttgacttccattaatcctcagaacatcattgtgggcatggaaccattattcttcccattttatactgaaaagtctactgcttaaggaacggccagccacagcactagtcagagcagagccaagaccggcagccagctgtacttgattccagaggtcacatgaaattctatttgacaaagacaagcatctccggtaggaaacaaataaaatctccctacgcagcatggactaaaaatgtctacaggttccacagacacaagataaactaacaccctgcagacaggtagccgttatagcgaatactgaacatctatagacacttagtgatttgtgtgcctcttgttcccaacagttcgctcacaaaggctgcaatagtactatttttataaatgatgattggaggaccagaaaaattatgagccattggaaccccaatcttaatgtctaaatctgtgcagtacccaccaggctgcctctcacagtgctatgctagagacacatgccttctacctcatcacatatccgacccagtaaagcaagccttgtgttcaggacacctctgtagccccacacttagcaccacaaagcagcatgtggtcagaataggttcatccactgaaagaacagtcggatggtacccacagctctggcagcaaagcaccagaagaaaccttagaccactcaggaggtgaaggcagaatttgtaaccagatcaggaaaagagatatgaagtaaaccaacagtgacagtcatgatagtcaactcacaccacaacacacacacacacacacacacacacttcatagatgttttttatagtcagacatccaaattaggatcattactgtaatactcactttacatacgaggaaactggggctgattaataaattgcccaaggaactggtatgtgaaagagtttagattcaaagccaatctagcttaagggatgcttctcttcggcactaaggtcaccaatttcctttagcccctttctctcaccacgtagaccgtgtagactcctgacctttcaaagcttctactgagctgagcactaatatgtatgtatgtatgtatgtatgtacgaagactctgcacacaatattcacaccaccaaaatcacagagctcatgggagattcgatttaattatgcttctttaccctgtgcctccaaaactatttttgtctctaaacatcaaacccactcccaagctcagaacgttctaggtattgccacatcccctccttctagaaactaaacttgacttctccaggcacactatttcagatccactcatcaaagtcagacttctcctcgtctctaacctcaccatttttcctaagcataaggcatgaataaacagcctagggacaaagatgttgcttgtactgttagaagctcctactgaaaactcttgaaagtccttcatagctacaccaactctgtatcttctcaccatatagtggcaatggtagaaaatgttgttttcaagaagtgattgttatcaaagtcatggctgctctagggaacaccagagcacattgtgcatccccttctcctaactcttcacctctaacctgaggattcggaacaagcactcccgcaggaggacttctcagctagacaacattggccctggcagatagctagttgttcgggattctactacaaactatgttgggtttagcagcaacacccctgccctctacctctaagtcccaggatggggaaggggccgtgccctcagttgtgagctgccgctgtaaatttctaaggaacaaatgctgcttcctgtaaacgatgcagcataaaaccaagctcagcagctctgccgtcaccagggttgagagtcttaagcaccaaaccatttttgcgttttcattcagggtggtgctgagccgcacacactccccatgtccccatggatagtcacatttaacttttgctcctggttgcagaagctaatacaccataccccagtcactgcacgagtgcacttcgcttccttgcctatagacagcagcggtgatcttaccttcaagatttatccttattatttcaaggttggcgtggttcaagggctgtgtttaaagaacactgaaagatcaatggaataaaatttggccccgggaaaagatcttctgaataacagtagtcaaaaaaaaaaaaaaaaaaaaaaaaaaaaaaaaaaaaaaaaaaaaaaaaaaaaaccaaaaaacaaaaaacaacaacaacaaaaaaaccaaagcaagcaaaaaatattgaaggtttgaaagacaaaatgattgcttcttacactgagctagagatgctggagtttgatcaagcagagacaaataatcagagagaacagacaccaaggaaaaggggagggaaacatgctttctgtctgcagcatggtcgctaatctaagaaacacagtagaaccagttccccagacatcagactgctctgatgaacactgttcaccaaaggaagacttgtgtgctccggtaataccaggtaactaactctatggttactacccactgttaacttgactgaattaaggaaaatggaggagctgggtggtagtagcatataccagcacttgggaggcaggggcaggtgaatctctacgagtttaaaaccttatcttgaaacccccaccaaaaaaggaggagattaacaaggcacacttttaagtgtatctgagaggatatttctaaaagttttaactgagcaaggaagagatcaactctaaacgtgggcatcatcacccccagggactgggattccaaactgaaaaaaaaagggggaaagacattcatcccctgcagctccctggtgcagatattatgtgaccagccatctcgagctcccactctgatactgtcctcactgtgccaggctgtcccttcaaacttcgagtcaaaataagccactccttctgtaagcagcttcttgtcaggtgtttgaggaattactcagcaatgagaaaagttatacagcaaccaacacttgtcaaatcccccaatggaagactccaaaatatttccctatatggacaaagttttataaatgtcccaaaaataagtaggaaaggaattactgtcttacaaagtgtacagacacggagtggtgtgatatgaagatacagattcgacttgacctgtccccaatgacacaggcttcatcatgtgtgcaaaacccaaagtgaaatcttaaaactaaatcagtccaaagccggagggaaggacaacttataaaccaggcctatctcccagtaccctacagcccgatgcaaaaccattcagaaccctcagaatgactgtgaaaactggtactatcttttgaaaggacatctggtcacacacttcaagggtcatgtcactttgacccagtatacctgctcctgagctcctgggctaaggagccaacacaacaaagtaagaaatggctgtatgcataaaaccctcagaagatttcattcgaaacagcaaacactaggtgcaaactaagtgttgccaatagggtttgagcttacagacctgcactgtcagcctcacatacagctctctaggatgctactgacatcactccacaatagactgacaaccagaagaccccacatctctcttactaacttaccaataatgtgttcttcgttgacgaaacagattgcacagaattactgtgaaaatgaaatggtagatataaaagtacctttgaagtactcaagtgcagcctcacatcggaactcctcactagaaagattattcacaaatatgagaacattcaaggcaagcaatgctaaggagcgcagtgcattaggtggggtgagtgtatgtacagaatgacaaacgcttcctggcttcctggcgttcccaccactccactatcaagacccagaggatgagcggttttagccatgctgtgcctacccaaagggctcctttcagatataaaattaaactcaactgtccttaactggatggtctatccttccaactcatcttcagccacactcttcattcagtgagccaacacacctggcttctttctgttctctcagcccaaaatacagtgcctctgaggtctgtgcccctgatcttagcatgctaacaccactgctaccattctggggttctgggcttgaatgccatgaatacctactaaagcctgactatcacggttcaccagtttactcctcacactctggatgttgtaatggtatgtttacttgtgtgctgataacatgttatatcgtcttccctcaataaactctatgctccactgaggacagtctgctttatcactacacacccagcacagtctcccacaaggaatgaatgcgcagcagacatttatctcagtgaaacagcaaacagggtcttgttctagctttcttcatctctagaagtggaaatcaaagctctagaaaacactgaggctcagggctgaccagtctggaatgagaaccatgaccaaggttactgagctaggactaaggacaggaaggcacgtccctggaattgggaacaggaaagggaagtggagttcccacacactgtgaccatctctaaccacttggaaagcaggagtcctaactgttttcgcgttcattccagactgtcccaacagtagtcctttaagttacttaagagttagaatttgctgtttcctttaaaggcaaagacaaaagagtccatttggccacctcacgttgtcacttctgtttcatggagaccttggcctctggatccaggccaaagccagaggaagacctgatatcctgaagtccaccccctttcctgtcccaaatgctgtttgcataggataactgctgcccacacactagttgactggtactttggacccaaactgagctttggacccttttgcaactcaattcaatgtattctttgcccaagagatacactggaaaactcactctgattgatgtaccccatgagtctgcacaatgagaggacagcgagggtccataagagtcctctacagacaagggcacaagagcagtgctgcctgtggctggcgttcctcagctccgggcttctgcatattctttctaattcccctagctgctccaagaccttcaaataacagaccagcaacacattcaccactcatcaggcaaattcttgttacacatgttgtaagtaccaggttctgtcctaggttctgggccatgggtacagatgctctcaggaccaagggatcatgcagtgaatgtccaaaatctgtggctatcaaggggcttcaatctcttcccccttcataatgggcttactctgtgagctaagaaagtgccaaaggctcacacaggttctcatcccttaaaaaaaaaacacacacacacacacaactagatgattagacaggagtgacaccttctcagcagtagctgaggataaagccaagtcaacttttaaaggcctggcctgtaaggatgtcaggagataggttctgacgttacttcgggattgagcctgtgtccatcagagagcctcagctccaacaactgtacaagaggcaggccagatcttggcagcacctgctctgctcataaagtatctgtgactggaaatcaactgcgtttctttctgatttctcaaaatggatttactttagcaatcaggaagggagatgactcagacaagctggtaagcagtgatgtatcctacaaaggccacctgtgtccaaggtctgtgtccctactttccacttcaacaggaactcctcagtaagctgtgttcgactaaatctgcctatctttccaatcctagtaattttaaactcgtaagcataatgaaaatacagcactgagcaagaagcagcaagatcaaatccaatgaagacctgctcagaggagataaccctagccctcattttgtgttcctggacagtctgctcctgcctccttcttgtctgcgcacaagaatccatacccgagcacctcctcctccgctcaagcttggtgctaccatgtggctacaaaagattgggaaagggaaccaacattgagaaccggagtgaggagggctcaagcctctggccccatatcagcttcttcttgactgatctagagagtctcatcgactccttgtgcctcagtttccccatctgtaaaatctggtatttggagcaggctctcttgagacccacttttcattgctaaagtgatgtttctttctgtgactcatgaacgcgcccatcaaagcagagacaatttcccaccaggcaggacactgacataaagaggaaaatgtaacagacttaggaccatcaggacctaggaatgactctgaggtacaggaggtaggtaagagaaaagtcagaaatgtcaaaatttgttgattttttaaaaattataccattaaaagtgatgtaagtctgggtatggtggtatacacctgtaatcccacatggcactaggaaggggaagtcagaaggatcaggagttcaaaggcagccttagttatatggtgagttccaggatatctgaaacttggttgtactgcctagttttgtgtcaacttgacacagctggagttatcacagagaaaggagcttcagttgaggaaatgcctccatgagatccaactgtaaggcattttctcaattagtgatcaagggggaaaggccccttgtgggcaggaccatctctgggctggtaatcttggggtctataagagagtaggctgagcaagccaggggaagcaagccagtaaggaatatccctccatggcctctgcatcagctcctgcttcctgacctacttgagttccagtcctgacttccttggtgatgaacagcaatatggaagtgtaagctgaataaaccctttcctccccaacttgcttcttggtcatgatgtttgtgcaggaatagaaaccctgactaagtcactggtcttgaaaagaccaataactaaatggcagtctaacacagcagctattcgtttaacagagtctaacatgtaactgttggcgtcagactatcagcaaccaaacgctagcaatgcagacctctgggaaactcctgaacctctctgtacatcaaatctgttatctgtaccataaagagaactacctcatggggtttaagaacagctggtacaataacccactttgttggctgtttggttcactggtagagctctggtctagcatgtgcaaggccctgtagtttatctacagcaattataaaacaaatatataaataacacattatgtgcctagctcatagaagcacattctaattatcctcttttattataaataacaatgtgcattatattttgtcattattactaatgacaatggacacatagattctagtcattgctctctcactagtgaccttgaattcaagttcctcatttgtaacattaaaagttaatcaaaaactcttgaaaaactggaatcaatctctctctctctctctctctctctctcactctctctgtccctccctccctctttccctgccctgtctcatgtgtgtgtgtgtgtgtgtgtgtgtgtgtgtgtgtttgtgtgtgtatgtgtgtgtgtgtattcacatgaacattcaaaggattatacctgggttctccatgaagattttaaactttctgtgtttccatttcaatgatcatctgaacaaattctggcacacctatgtgaatttacttacattagcataacttgtgccacaagccatcaacggtcaggtttattagtgtatgcaaagtatgaccatgccagcctattgatgggattagacaaaaggaaacccaaatggtatcaaaagatgctgcccaagtagaaacatgggtgaagaactaaatcatcagcacagagtaatatagactggccaaactcaaaatggccaccgttgtatcatctaccaccatatttcacgtggcaactgaaatattgtatttcagctaaacaaagtcagttttctcactacaactaaggtaataatatgaattgcgatgtctttcttcagtttcatttgccttgatttataaatctgtatggggcctatggttttatcatcagggtttaaatctacttttacttacatagttaagtcattttataataaaaacatcggtgaacaaaagagtacctcgggatgtttgttctcgcatagaagatctccaagtactagtctactttgagaaacagttaaactcccttcagggttcactaaaggtctttgactttcaaagacctttgattatagacaggttgaacttcattaagatagccaaatggagatgcaggttggtggtccaacaaaaagtgcaggacaggaaccaagtttagaagtgagcttcagagacacgtagctaaactgagagggcaggatgagaagattcacagtggtcacagataaaggcgccacatggaaggctggcctaagcctcagggagctcaccttgccctacagccttcacagtcttccaaaggaaaacaacattcacctaccaagtaatggtggggcctactggattattcaaagaaagactggcccacatgggaagtgggcggcttagagacctcctcagacatggcaagtctcattactataagagtccaggctgctgtcaaagctgaggaaggctgagtgctgagatctccaggcacacctctaagacctgcttcagtacttcactttacaaaaacactggggcctacagagagtgctcgtgggtggctccaagtagctaccaggaatttagtgaaaggagataatggagtgatggggagtggggtcattttctgccaggttgcagaggtgagagaccatgcccagaaaccagcgcaagcccaagctattacttcttcctgactgatcaccttccctccatgctaagtcatgggttcacatcagagccacacagtcctgtgtccacaagaaccagactcattcaattaccaccatgtgaaaaccaagagcacgctcttccctccctctccgatccccagcccaggccccatggagcaagcaagcaagaaccccacagagaagcccacagcttactgtttgtctccttcgaaatgtcagattcttccacagcagcagccttaactgaggccaacaagccatgtcaccacagccggcacccacagcgacctgcgtctgcggctcgagagccctggagggagcagccagagcacagagctgtgactctgtggctggtcattaactgaaagataaaacgagagagagagagagagagagagagagagagagagagagagagagagagagatctgtcaatcactgcttcaaagccctatgccggagaagagttgctgctccagccctctcaccagacacctctgacaccctggtggcttgtcaaaaggtcatgagtcctggactgccaacccccagaatctccagcagacagagcttccggggcaggcttgctggctataggctggcagctggtcagacgcaatcgatggttctcatcatatgagcaccactgagattattttaagaatgagaaagtaactttccctggccaaaacaaagatcagacgtgccatccaagagcccgagaggccagcctgccttccctatgaatatatgttttctcccaagacccatcagcagcacttataaattctccctgatccctggagtgactagtgatattctctaacatttcgctacagacaaagctgagcccttcaagtgataaacggcatcatttgcgacgcagtttccccaggtggaaggctgaggactgtcttagacgactatgcgtaagcaccagagcagtgccacggacacctggctctcttgtgatatggacaaagcttgtgttgtgtctctgtggaaagaaaacagtatcccacagaggagagagcctgccaaggcctgatcccagcagggcatctgtgaacgcaggaggctcctacagttgggacatatggagcacacttctggacttgctctacctacacctgaacacatggccgcttcactcctacacagatgtctcaaaggtctccctggggggaccgttcaccatctgagagattttcacaaggaggtcgtacaacagcctgtgtcttccttacccagtggccttattacccactacccagctgtatttattcaatgctgagaaacttccaaagacttcagctaaagcaagctaaggattaaggggaaattgaaaagtgccaggaggaggagggacacgtggattattaaagtcaggaccatgcaatggttgctagtcacaaaccctcagcagaaacctatgaagctatgaaatgactcccagtgactgtggcgtctagtagccttctgttgtgcaaaggtgaaatatcagggtgaaatgctaagagacaaaaccaaaaacttcacccatcaagcccatgatcttgaacaacgcgtgggaggtttttgataggattttaagtccctgtgatacccttttgttccctgatacaagagaactaagattaaaaatgtctaggaaagaaggaaaaagaaaacaaaaatcaacatgtccagaacaatgggtgcccgagagcggctaattctagctcatttattagtgatgtaataaaccggaaatcctatggtagtcaaaccctagagtcttctttattgttgctcagcaaatccagaaagggcacaggctacccacagctccttactgcaaaaataagatgacttaggccaatagcaagaggaagacctagtcagtaccatttggctagcggttccctgttgagagatgccaactggactcagaacactgacagggaggtgaaaaaattgtttttaagtggcacttaaaatattaaagaattattaaccgagtttttcttcagttaaagccactctccagaaatcacttagctgacttatagggtacagaaattttctccgagcccaccgtaaaatagaagaaaggctgaaatacaatcaatgtgctgcaacaaaagggaaacaaagcctcagaatgaagcctggaaggcactagctcccagatgcccaactgtgatcctaggacaagatttatcttatcggctctgagcagcaagttcctcattccgacagggggcagtagtatctcccttgtctggtattttatagtattaaatgaggtgatagaaataaattcagaatgcagtgctaggcataatgcaaataacaaagaaacccaggtccccaggtcccacccgcaccctcagctgcgcggctgcttatctaaagaggacattcttgtttctgaaagtgaggggtggggtgaatgaagtaggaaggacaagctctgaataccttagggtcactctctggggccaaatccatatctggaattgtttcctgactcctgagcagagatgttcaggggcaaatagagacagagccccacaccgtgctcatgagagaagagagcgcagccctgcagagcgcccttgggatgagacgaaaaactggattttcttggaggacattttcctagaagttgatgagtttctgagtctctgcaactagtttcagattccaggctccccagggacacagcacaaatgtcatgagactagaggaaaagttcttctctgggtgtgaaaacggaaacaagtgacggtgacgttgcagcccacccctcctcctggacacctgcataattctcacccatacccccatctctgaacatagagatccatgctgagggcaatgttcctcccaaagtgattggaaataccttctacccaggtaacaaaagccaatgggacatttccacatcagtttcccaaggaagtgaacaaacaaacctccaacagcacaaggggaaaggcagttctgtgcgctggatttctcaatgttctgaagtataacacgcttgctcctgcccctgcatgaatttccagacactggctggaagcgagcccactttagaaacttcacccatcaagaaccgttctcttgatcctacgtgactagagtagcaactccaaattggcctccttggctccaggcttgccccattctcctcccttggacacaagagcacccctatttgactaaaatcaaatatctacacatggtacttgtctacccttcaacagcttcctgccaccctggatggagtcctccccaaggtttcctcaacttccctggtgggccttcagcaaggaacacctcctttcacctccttggccatgccctggaggactccccctagggacaagctgcactcactctctcttaggccttggactacactgtcctgttccttttcccagaacaaccctttctccagatctgtgagcctgcctagttcctccacaagtttgggcctccatggggctgctcaggaatccttcctgatcacctctctctaccaacgtctgaatgagcaggttttctgcagtactttccctacccggtctgtccccttctgaggtgggacaacaggattcctggccctccatctctgttatctccggcaaacaaataaatcaataccggcttgttgggagcacttaggagatatggcctcaattatgttttttaaaagatagctatgaaaaacagggtctcagaattcaagggtgatggcattcttgggcctgtggtaactgatttctcaagcttgattaactaactgattcaggcaatttgtccccagggagggagccctgtgttcagctgcttccacagcaagctcaagagagtcacaaaggactgcaaagcttccctggtgagtcctcaggcatcctgggaagcttaagtgaatctaagtctactttgcataaacagcaggtttagccaaggaccacgtagacctccccaaaccactggggtcatggaattggctctctgccaagcttcatgttcaattcctccgagcaatttctctgactctcaccattagtctcccttatcaatctagtcatttccacatcccaaccttgatttgtgcaagacagatctggacgaagtgactgctctaatcttccaccaatttgtttagcaatttttacttcaaacgccactggcatttggaagttttatagagtccacagaagacgaaagactgctaaaaacataaccatcctgaatatgcaaacatgctcacacgagtacttatagggaaatgcaaattaaaaacacaatgagatatcattacacacacacattaaacctaaagctaaagcatgagtaagtctgtggatataatcaaactcaatacactgacttcaggaacataagtcgcaagagccactttggaaaaatgtgatagctttttataaagctatacattcagttatgaaatgatctgatcgtctcaccccattttacccaaaagaagtgaaagcaaaagcccacacaaagacatatgcaaatgtttacagggaccttattcagaaaagccagctgaaacaaccgaatgtccatcaacaagtgaataaacaaaactgggagtattactgagcaataaaaatgtacccagcattgacacatgcaacaacacacacaaatctcaacagctgtacgcacagagaaatagagcagacacaggaggcagctatataatatctaagttgtactaagcactatgaaaaaaaatgaaatgagaaagcttggagccaaaccactggtcgtcaaaggttataagtgagaggagaaaagtccacagaggagcatgtatgactcaatattgggaaggtggttggagttacaccatttacaccattgtgtacatctgtgaaaagcccaactgtatactttagaagggtaaattttagagaatgtaaatcatacatcaacaaacctaacaccaaacagtctctaaagctattataatacctagcataccccaagagtacaactatgctttaaacctaagggttgcatactataaggcctgattatggtaggattcccggagagggggtctagtaggtcaatatgaaatcattacttagtaattcggccaaacatcctcatccccaactctgccaggctcccattaaccacaacacatatctagtgggagcctatcaccagtgatgtgatgctccagacccttaggactcagtggagagtaagagaggcatagatcctattctcagggatgggggtggggctcactttagcagagaaaaatgggaaatggccacatgagaggaggttccctccaatgaaccatctctagaaggaagaagtgagaagatgggccaactataggctgctcaccagccagcattatacattctttttacacatcgctaaagcaaactggaaagccaggcagacagactctgacagtagcaaaagaaaacacacacacacacacagagagggagaggaagggagaagctcataggaaacttgggaagggaaatgatggtgctaaccacttagagctctgcctaccactctcttcctgaccaggtcattttgacattttgaacttgacaaatgtatctcaaagagagatgagagaagaggcaagagacctactggaaacagaaggaagaaacacaataaaggtaaagtcaaagaatttatcccccttggtcagcaagtacgtcttcctcagactacctcaacccggaagcacttagtctgttgacagaaatgtaggacagggccgggcagtggtggcacacacctttaatcccagcacttagaaggcagaggcaggcagatcgatctctaagttcaaagccagcctggtctacagtacaagcttcaggacagccaaagatacacacagagagagtgcgtgtgcgtgttcgtgtgaaagagagagagatgcaggagacaaagtgtgtgcatggccacactgttactagaaacccttgctgtttggggacagaagggtggacttgtcatgttccttcctgaaagaatacaagcatgattccagtgttaggctccacgagagaagagtcattcaacccatgactggcaattccttagacagtgcctgtttcccaacagcaaaagtcctcaagcagagaccacataagtgtcatgtctcactagaactgagaagttggtctttctggacaggaaaggggtgggagctccaagtctgtgttccatatgacagctgtacttttttttttttttttttttttggtttttcgagacagggtttctctgtgtagccctggctgtcctggaactcactctgtagaccaggctggcctcgaactcagaaatccgcctgcctctgcctcccgagtgctgggattaaaggtgtgtgccaccacgcccggctgcaactttttgagaacagtcacatgcctttgagtctctcttgagtccacttagtcttctgaatgcgttctctcctcggtgccatcaaaatagttcagaaacttagcatgtgcacccagcaactaattctcattttcaaacagcaatgggtatatgacagccattctccagaactttcaataaataaatatatgtgtctctctatgcatatgtgtaagctctgctttcttaagacaacagattttcagttagcagaaaccagatgcaaggtgaaatttctgaccatagctggaggcatgtcttaataacagctgtctgtagatttccttttcttaggggaggtaaaaacgggcaattgaaaactgcgtgtatctgcggtgtttcatactgctaaatggcgaggcagttaaactacaaagcggggaaataggtccaactgtagccgatatgcaaaggtgctgagctcaactgattgcatattcatgagatagtgatgcaaaagcaagaccagatgaggctccggcctcatccccagagggttgtgcaaggtcctgaaatatcaagaatgaaacctgtaagcccaacagagtatgcttgctatagaaaaggcctgttctctaatagcctctcggagcctatgtctctggatcagtagtcacgttcagggagaagcctaatgaggttactaaaggccaggagacctggctggcacaggctcactgcatccatgatttcacaggtaggctgctgtggaatgggagggattgtgagacatcctataatttctccaaagctgacccaccagcttaatccatgcctgaagctaagctgactgtcttgattagccttcctggcctctagtcttaggctcactaccccaaagccatcctcgttagtggtcccttaaatgctcccttactcaaatcaacaaacaggcaccccagaaatgatgtcactacctaaagataatattcttaacactgcatttcttaacactgaaatgtgtaaacatcaaagagggcaagaggtcttcaagacaaaaatcaacctcaaatgaactgatcctgtcactgtttaagaagaggctgagctaagaaccacccaactaaaacgatagaagctgtggatgctattgtgcccaacaattagaactggggaggcagcagggctcaaaatgccaaatgcatcaaacgtacatccttattcgtaacagcgagattataaacagctgcatacatttttttccccaacctggaacacgtagccaacttccaagacaaaattctttgtgcatagcttcattttcaaaacaagagctatgaaattaaaaaataaaaaggaaaaccaatagcggatgtgagaaaggcatgaatgttgtgccgatctgtaactagcctttgagaagcaattgctcatcttaagcaattcctgctgttgttgacaattctattctacaagagatcctgaaagtcaaaagctactcccatcaagtctctctctgatagttagacagtcaatgatcctatttaccgccctcagagttccagagttgctatcagctacacaaatggcctctggacttcttttaaaatgcttaaaagcctggcttttctgaaagcagatctgtaccgaaccgaaatccttgtccctctagagtaaaattaggggaaaattctaaccgaatgttaaaagatcaccccctcacctctcactgatttccactaaacaaacacagagcaaacttcaaaggaagaatttagcaaataatacaagcatttgctttttccctggtcagggggatgaggcacacaaagaaatgaaccttctctgactgtaggaaccaaactaccctcatgactgacttgtcgcaagggagaaacataaaaagtcttcaactgcggtcaaaacgctggagtaaagatgtactttggcaggggcccagagcatcctttaccctgatctacctgcaagctacctgcaagccctgatttgcagacaaacttgactggataataccgcctgttgttctaagaagactttccaagaacatcttgggagctgtggtccagtggcatattagcaacaaccatggtatgtggctcacatcgctgaaggatgctaaggtatggatggcacagagactattcatcgactctggaaccctaaagattctgacgccctgcgtcctctgcatcaaacagggctaatagtgtctataaaacatttatctagttcctggaacaagagaagtactggatgcactgttattgaaatgagtgttacccacttcacggagtgaagcttccatccagggtggggctgagagtgagcagacaattaacggaatctctctcctcacttggtctacagagagagtaccatttccttccatggcctttccagagcacggcactctctcctgagcccagactactgagagaagcgaaacttacctgggtatctctggtagcaagcccttcaggataccaagggtttaccataaaatccccttctggggtctctcctctctccacattgtcctgtcattcagctgttttctgtagcccacggctgctttccaacaagttgtgcttgggtcctaaagctgcctctgtctcatttcattcgacttctaaatcaatcatcttagaagtctgggcttccatcctgcacctcttttcccatctacctaaactcttccctggttgctggcttagcaagtgcaccctgctgagtaagttgtttaaaggacccgaagccaaggcaccatttccagctgtgttacaaagcaaacaatagactcatgtgaacataccagctgaaaaggacatcttcgggggggggggggggggggggggttccggggactcatcccaaactataaaacagtcagcactgctcaggaacccaatgctctaagcccacaggttcaagtcaaagacttaaggaaccctttcaatatctgcacacagcttttctacctcaacaatttactgccttcattttcacataatggagctcttgtccagggccagcttagagatcaggtgactggtatcaggacccttctccagattgccctttcaccagccagctccggaagcaggccaagcagatgccctgtgtccctaacatgccagttctgcaacacagcaagcgccaactaaccaggtatgtgagaacgtcattcagctgccatcagtcccaaaggcccgagtccttccctccagtctgacaccttctccacaaaaagacaaacaagccactttgctggctacctaactagaggaggagaaaaagaggaataagaccacaactggttctgaaaaacaaaaaacttaagggtgtgtccactttttatttttttagtattgacaacaagaaaaccgttatttgggggttgggaggatcctgcaaaaagaaaattcatgtcagatgagtccagtgttatcaaaattctatgcattcctttctttaaaagtgactctgttattaagattccacaaatcaaatactcagagtagcaagtgaaaagtattcaggggaaagtggactcatctactgggtggaacgttggtagcctcatttaaaaaaaaaagacagattttatggtgccatttaaaaagtcgcacaccccagtctccaagcaacactgtactaagtggctacatcaggtgatagccagtgtccccaaatggagctctgtttgaggacagagtggcctgttgggctctgcaggctctgctcactcttctctcctcagcaggggagagccgctcgccttctgatcacgtgaagtgtagcctgcactgcaaaggggagaaatggcagccagtccagttaaatttgcaaatccccataagactgataactgaataaacacaagccgaccaaaggctggctgtattctaaattcaaggtcccactacaactaacaccatcattcacaagtttataaaaaagaaatacacctgccgcgaatcacaacaccaaccagaattagtatcagaattttatacttttgcataaagaaaacatcacctcgcagacccttacttagcatccaggagttctgtgaaaatgttccttcttgtttgaacttaaagctaaaggacactttgtctttgggaaagcaagaagagttccagttgaaaaagccccttacaattcaaactgggccaacagagacaacaaataaatgagagcaggccaggatttaagaattccatgtctatttaatgtacacgatttctctttactattctaaagggcattataactctgtattctgcaagaagagaagccatccaggatcaaggaagaaaaagaataagaatttaatttccaattaatgactgctcagggagtggatttagacaagaaatcttacggctttgggacacaaaacaaaggcatggttctttattatgaagagactagaatagatgatgtttaaaacaaaaagaggctggagtgacagcacagttggtaacaaccatccataaactccaaatccacagaatgcaaggtcctcttctgacctctgcagggaccaagcaggtacacgttatacagacatacatgcaaggcataaatgaatcaacataaaataagtaaatctaataattaaaagtttaataatggctttttaaaaaattctgccagggcttaatgtacccagaagccatagaaataaatataatccagtcagcaaaagaaacaataggactgcccctactcccaacatataaaacggttcatccacttcctcatacacggatggatggaaagggtgaacagcagtcactctggggatcagtatcaacgtgctaccaggagtccaggggagtgagtttccctaacactttcaaagaaaagcgtcctggaggaggcagcaagagaaatgttgctgaactggggatcttgaatgtattctcaaggcccatgtgttaaaggtgttgtaatcaggaggtagtgggaccttcaggagtagagcctggcctagttagcaggtttgtagctcctcagagaggacaagagcttcctttatcatccatttacctgtcgacagacacctagactggtaccattccttactcctgcgtggcccccaagtttttggaaatgacacacaaaaacactctagattttaaggcacacaccccaaaactgtgaaagccagaaataacacagaagaggcttctgtacttcttaaagtgtctgaacctctaaatcacataaggagttatctcacgcttatccataagagcacattaatgaacaactcaaaatatttaaatggggcatcgcagactattgtctcaaatccctgcagctgcctcaaaaagggaaatggaactgggtgagcaggactattcgtctacttgagtcatctagcctaaatcatttaaacacgcaccaagatgcattaatgacgtccgtggccgtatcagtctctaacactttgctgagaatgtcttatttgttggagtagttttaaaacacaggaagcgagcagcatccagccccttagctgactggtatttgtcaatttccgtattagagagacagattacgcgcaagggtcaaagacctctcttttgaaacctaagtgcatgacatacgtgagcacggggctcagatcatattctgcatggaagtgcagaatgggagggagttgggggtgcaggagacttgtgaggagggtaacattctttctgccaggtcttcaagtttgcaaagtctcattgttttagaaaacaaacatgggctggagagatggctcagcggttaagagcactgactgctcttccaaaggtcctgagttcaaatcccagtaactacatggtaggtcacaatcaactgtaataaaatctgattccctcttctgggctgtctgaagacagctacagtgtacttacatataataataaattttaaaaatcttcaaaaaaaaaacccccacaaatgtgatgttccccacagtcaacgataatcctagacaagctgcttttgggccattcgtgtttgacagagtatggtgtagcttaagacctgcctgcagaaaccatttcatgtctgagacgttcactcggactttatgccacctggccccataatctgtagcaaactactctgaggtcacacactattcacaattaattagctgaggcaagaggatcacactcatttaaaaccaagttttggctttgtttttaaatgagaactgagcaaatgttactgcctgggttttgttgttgttgtttgtttgtttgcaccgagttgcagccaaggtctcttccagaagagaatttgaccgactaccccagagcaaatatgggaatatgatacagatcataagtttccagtaaaaatgacagcaaatgaatacacggcaaattccctttcacggcatctgaaattgtaccactgtctcccctaatctggacagttagagactttgggaagtgaattcaaatctcaaatcagcctcttggaaaatggagagccaaggaccagatagcctcccgccttcttaacctgtagttacaataaacaagtttggcttgaagataaactcagcgtctgagtaacaccgggaacagcaccaggtaagcgtctattaagacacaaacacgtctataattggtattccaggtgctttctcttccgtgtgtaaagctgtctccaatatttttaaagcggaccttctcccaatgcaagtaaatcaacaagtattacgaccaatcttttaaaatttaatgccagaataattgaccatagttacattataatttcattatttatttaacatccagaccatatataaaaatatatttatacttgaatgttttaagaacggccaaagctatacacatatatattttctaaaaatccaggaagtccctaatttaagagtttaaagaagtgtccatttaactatcttagaaactaaaaagtatattttttttaaaaaagcaaagatctattttcagtcactacatatgcagcccacataaggacactgatttatgagaggaaaaaaacgatgcctaaagaaaaaaaaatactaaaagtcccagctcctctccacataggtaaggtagcacatagctgagttgctaagtatcattctttttttttttttaaatagtgtttgcattggggtttccatgaagagaggtagaaaaccaatcagccccagtcaccctttccaattccagactaattcacggtctcccatcaaccacgcacacattccaaatcaagatgcatccaagggccacaacaggcctgcctttgggtgctaataaaaaatactttagggggctggatttaaaatactcatcttcgggaagacacccgtcacaaatacccaagtcaccaccagtgacccctccagaaccccagtgactttcacaaggagacccatgacttattctatggtagcaatttttgctccaaaatggtactatgagcattatgttgctgaaaatttccttccctcaaccctcagattcaacttgttaccacatagataataatcaattctgtgcatcacacctttctttaaaaaaaaaaaagccctattttaatgacttgtgatagcgctgaggaaaagacatgcttacaatagaaactgtaatttatctttattatttatatattgatatactatccactcaaatattctctatgcttgtctatacctcctttgatgtgggggaagtgtttttcaacaatgggaacagcaatacgttgtccttatgtgtgcattagaatattaaaaatgggctgaaagaaaagtggtgatgataaacaactcctttttaattggcatttatgtcttgtagagtatcaatacttgggtcagggttccgaattatgactaagaggtaagggtgtgctttcgagcctgcaggcatgtgtcaggtgtgtgctgtgggaggtgagggctgagccacagaaagaaagtggtgtaccaattctcttcaaggaaggtttgtgctgttttgttttgctttgcttctgtggttggtggtgctagaacccaaggtcttgtacaaggtagactctaccgggggcctacatcttaagccagaagtgttccttttgtttatctgtcctttattgtacatttattctgcccacttccttggaaggatgtcgaagtaaattcttgttttgttttggaatggtgataccattgcagcaaatggggcaaactaattatttctagtgacacttagttttcccaaacaaacacacaaagtcaaaaaaaaaaaaaaaagcaaacagtttaataagtatttctctcttttccagaggtaagtgcagaaaccaaaacaggcacctatccacaaggttgtcatcagccaacatccccaagaacctcattgagcaacggtctgggagtcaggaaacaaacaaacaaacaaaaaacaaaaacaaaaaagaaaaaaacaacaacatgaaaacatagactggctttcttggcctcgggtttcctcccagtttggaaacaccagttttgaccagattcacagtgaagcaaaaggactagagactctcactccgcaccaggccatacctaggctacccggccaggaggcgctgcgggccagtctccaggggccacccgcaggccgcccagcccccaccccctggcggcggagcccggcccagcacccgagctgcgagttctgtgctgcccgatggggttacttgcggtcattcggctgcacaacctagccccagcttcccaatcggtgctcagcccgaagtctccccaagggaagactagcaaaaagcagtaagatgagggtggattgggcaccccagtttcgggtttctgcagactctcttaagttttctgtctttagaaggaacaaaagtggtctcccactttgcgccagggactgcagccctccagagcgcaggaagcctgtgggcaggaccccggagtcgaacaaagcccagagaactcaagcagcagtaacataaaagaccccgtttaggacacttcctactagagttctttggaaacaaggacatgcagtcccagtcccgggaagagaacctccaagtcagaggccaacacaaaccagttaaataatggagtgaggactcagatgtgacacttgtgggcgacggcctaccccgcgccagacaaaaggagaccctttgtagaggattcccttctccctaccccactggctgtaccccgaggacgtccgggaaccttggctcacactgcgcccaagaggcgagtctccgacgccggagatgctctcgctggtctccgattccgggagacccgagtgcggcagttctgagtcccagggtcgacagggcccgtcccagaacattctttccctgtttatgcctcccctgtactatttgcatccccagaagtaaggtacatgggagttcgagtccccccagtgtccccaaaacggagagcttcccaacgcttccttggccccgaaacaaaatgcccaagtcactgaagaacctcttacctgttttccactttgctgtttgagtctgttttccctacccctgcacaaacccttccagaaaggggaagaaaaaagtggggggaaacagggagcagagcagctccccaagccggctgtggttgcgcgggtcccgcggcgccccctgcccagctttgcgctgcgccgcggagagaagtgggctctgccggtcccggcccgctcgctcgccctcggaattactggtttttgccgcgactagttccttttatagattcggctgtgccgagcgccggggttactaccggtcaaacgctgttctctccctctttcccccgcccccttcccggcctctgtttatgtagttcagtcactcagcagaaagcacgtggagacatggcccgccccttaaaccggcgacagtgcgccgccgcagcgggcactgggggcgcatggtgagagctttgtggggcccgctttctgtagccctggccctgacctgctagccttcgggaaacgggaaactccggacttgcgctgagccagggactccacattcccggcagaggaggaaaggggaaaagctcgttctctaaactcctctttctgcaattgtttggggttttgtgggtgttgctttttgagttttgtttgttttgtttgtgtgtgtatgccctcttcctctctccctcccgctctcccttactcccactctcccccctctccttttgttagtttgctcagcccccaacttgggaaggaaaactccccaccccaccccacccccagatgccaaccattttcggtctcttccttttcttcctttaaaagtcctagattgggggaagggatgtggaatggacagtgaatatcagcctattttggtgtctgcctcaaacctttacattgattttgaagagaagatctctaccttccagggacctagtctgcaccttctacacacacacacacacacacacacacacacacacacacacacacacaccttccagggacctagtctgcaccttctacacacacacacacacacacacacacacactccactagtaataggtacctataagccacaaggggcagctgtggtcacaagagtgggttttgatgatgtcaaacgaccaaagttagataaagtttttctgcctctattttatttgttttaattgagacagagtctcatgtagtctgctcataaactcaataaccttgaattcctaatcctcttgcctcccaaggcctaaaattacaggaacagagtaccacacccacatttgtacagtgcggagagatggaacccagcctcttgcatagcaggcaagcattcagccagctgagagctacatccttggcccttgcttcctgtctctcaagagagaacgttctctctgcctcagagttttctgaaaatgaatttcgttggaacttttgaagtcctcggaagaagagtgccaacaccagaatcctactgactgaacatcagtgccaatctctagtgacatccataccctataaaccatttcctatgccagacttttaaaagtccagcactggcaaagaatttaaaataatatgtgtgaccatctgtgtacaaaggaaaacgcctaaggggaaaggatcgttctttgcatgattttaggagattaagtctttatgcagcttccctcatttcccccatatctcctagcacctaaaatacacacacacacacacacacacacacacattctttttgtactttgaagaatttggttcccaagagtactcctactaaattctgttcccagcatccacttgctgctttacaaccatctgtaactccagttacaggagagctgacacagtcttctggcctccataagcaccaggtgtgtacgtggtgcacacatgtgcacataagtaaaacactcatgtacataaataaatctctctcttttttaccctaaaaataaaagctaacttcttgggtttctctaaaagagcgtaggtgacatgtaagtgctacccaaatcaggtagttaggaggcagagaaagaagaaagggtgggaagaaagaagccccgggcagagcatcctggaatcctcactatatgaaggcaatgaccctgaaatccaacttgcagtgtttaactaggaagccctgtagggttaggaatctgcccctattcaactctcactgcaataaatgcacaaatacactgcagtgttggcagtatgtgtatgcatgttgtaaatctctacccttcgacacctacagaggccaaatgcttcatccaggttacacctgttgacaccaagtgacatgacctgccatcaggacagcacctcatgacacaactactggatttcaacagttagaacttagatgatatcacacttaagaaagaaagaaatttcaaagcaggaatttctccatcctttgagtacccctggttagtttgttcctgagcatgctccagagagctttcccttccatgtcttctgatgtataacaccttcacccaaacccccaaccttgtcctaggaagccctttctacctgagtggaaaggcctatctttgttactgttgctctgaagtagtggattccataaacataccctgggttgcttgaggttctattctgagctgaccctgggatcttctaattacagacttgaccttcaggcaactatggctctactgaccttgctagagaggtcatagagatacaagaagctcaattttatcatcccatgaaggcttttaaatcaagattccctgaaagtcagtgtttagaggatagtttaaatgcatatctaggagccagtctacagtctacaaacaccttccttaaaagagagaagtttttgttgttggtttttttttttaacaaaagatattcactacacgtgtttcttgcccgagatacctactatttggccccctgcagctgaaaaaaataggacactacagaaaggcaatgaaaattttctaaaaaaaaaaataaacaaaatgatttttcaaaataaatttgtagtgattgagaaaacctactagcagctggagagatggctcagctgttaacggctaggctcacaaccaaatcataaaaaaacctactgcttagaacattagagaatgagatataactcaaaaattcaaaaagaagactagagagagatctcaatcgataaaggagttaccatgcaagcatgaaatcctgagtttacatccccagaacccatgtgaaaagccaggtgtagtataccagcaatcccagcatctaagagctagagataggagatgaatggagtcagctcgccagccagtctagcagcatcaatgagagactgtgacgtaataaataagtaaataataagtaaataaataaagcgaagagaaattgaagactcctgatgttgatcgctagctttgaaatgtacatacacacacatacacattcacacacacacaggcacacatacatacatgcatgcacacctgtacacacacacacacgcacacgcacaggcacatgctcatgagcacatacaggcacacatctccctcccctaattggtaaatcacctttaatgaagagagatgaaaagacttacagttcaagttttaatcagcttaattccgtacccagggggaaaaatcctcaagctatcagtgatcaaatgagaaaattcagtgtgccaccctttataggtggaacaggctctaaaccacgtagactctgaatgcagtgtgatttcttttgagtggaccaatgtgattctttctgtactattgtaaattgtattaacacccaagcgaggtacaacactgtttctatcctggccttgagaaacatatatttgcaggtttttgttatggtcaaccagttattccaatttgtaagtagatatattctgagcatcaggcagaaagtgagatatactgttccttaaagctacaggtccaatctgcctcctccaaattaccctttctttaacattacaagacattacaggaaagtttcaattgtctctttcttgtttttcattaaactctctactaaatgcccaggctgttctgtccaaattctctctctctcactctctctctctctctctctctctctctctctctctctctctctctcacacacacacacacacacacacacactcagcaattggcatccatagggctaatctgaaattgtcagtgttaagaagatttatatttatattattagaaataataaatcagagtttgctcacttgattttccttttttatttgtagctttgactttgtttttgttttccttaagaaagccacttgttagctgggcgtggtggtgcacacctttgaccccagcccttgggaggcagaggcaggaggatttctgagttcaaggccagcctggtctacaaagttgagttccaggccagggctatacagagaaaccctgtcagaaagaaagaaagaaagaaagaaagaaagaaagaaagaaagaagggagggagggagggagggagggagggagggagggagggagggagggagggagggagggagggagggagggaaggaaggaaggaaggaaggaaggaaggaaggaaggaaggaaggaaaaaggaacgccacttgttaacatttatcagcacgaagttaggaagacattctccctcaaaaatgagaaccccaaatttatcatcttcaccttaagtattccccttttgccttcttaacaacatcatcaccctgtcatctactctgggaaatcacagtcttgcttaacacttttatctttgtcttcatcgttctcttctcatttgaaagaacatcacggccaggccagaggtaccgcctacaaaccttttaaaggttttggttcttctccatctccactgtctatttcaagcctgaaatgtggtcttctgtattgaaacgctgctccttcctcttcctatttatccttcctagaggaaaattgttcacttggggaggagagggagcaggaggtaactaagtcacccacagcaatagtaatcaccctgtgcagcactccagcctcaccccagacttcatatgtcctcagcttgcaaaaaccaaacaaacaaccaaccaaccaaacaaacaaacaaaaacaacaaaagaattacactccaactcccttagggagacctaggaagcatttgtttgtttgttttttgtttttgctgttgttgggtttttttgtttgttttgagcccgtaacagctgatgatctcctgcttcctgctccatcctctcctgctccatcctctcctgctccatcctctcctgctccatcctctcctgctccatcctctcctgctccatcttctactgctccatcttctactgcttcatcttctccttctgctcttacagctgcctgctgctgtctcacagactgaatcatctgcttccctgggttttaaaacccttctatcatcttcacctcagctgtcctatgaccgttactctggaatacaaacgaggttatcagatgcagcattaagagtagataaggaggagacctttaaaatatccaaattataaataaaatttactccaaactcaaatctaccaacatgcttcccaatagattcacaaatggcacttacacatgagcagcctcatgtgtgaagaaaacaattggggattaaaggaagcctaacctttattgcagcagaagctatgggtctacatcttcccctattcggagtcctttcctgacactgaggaatccacattcctggcagtgatctagggaatagggagtggttttatgcctttgccaagggctgtccttctctgtaacacacacacacacacacacacacacacgcacgcacgcacgcacgcacgcacgcacgcacacacgcgcacgcacgcacacacgcacgcacgcacgcacacacacacacacacacgcacgcacgcacacacacgcgcgcgcgcgcgcacacacacacacacgcacgaacgcacgcacacgcacgcacacgcacacacgcacgcacacacacacacacacacgcacgcacgcacgcacacacacacacacacacacacacacacacacgcacgcacgcacacacacgcgcgcacacacacacacacgcacgaacgcacgcacacgcacgcacacgcacacacgcacgcgcacacacacacacacacacacacgcacgtgcacacacacacacgcacaaatagttactaaaagataaatcctacaaaagtttcccgatcccatcttctagtcttctaaagaaacaagtctctttcccctttgtctttgtggaccctggggaccactctttccaaaggctggcatttggtgtcctcacagttattttggacgcttccttgtggaccctacatggactctcaacagctgtttggacataatattcacaatatttaaggaccaaatatccaactgcactgtgctccctcccatttctccctctggggccagggttctgaagagttgggctgcccagtaaaatccgagtcttgttttcagctggtccagacttcgtatcagaaggcaatatactccactcttctggtcctgccttggagatcagctaatgctgatctcacatgagcaacatttgactggttccctcacccacctccactccgcaaggagtctgtttaatgttggggctagacagccttgtcatggtgtctaaatgagaaaagaaagcaaaatggaggagtctagacttaagatgtctaagaaaagtaggtcagaggaaaggggaaagtggtataataatgctgtgatacatgaccctgcaatgcaaggtgatcatcattcatctaccatcgaggactcagacccactaatttacgggaaaaaaatttgtcataaaaaaaaacataaaaagtccaatgaaggggctggagagatgggacaagtacctgctgctcgatcatgagaatctgagtgtacttcccagcacccacataaaaagctaggagtggccagggttaggggtgggtagagagtggagggtgggtggggcatatctcaaaaaaaaaaaaaggtagagagggatggagcaagacacccaacattctcctctggcttctacacatgcgcacaccaaaagaaacaattaatgaattaaaaattaggtatgactcaggacatgctcaatgatatttttcctttattgctgataagagtgaacatttcaaaaccatttaattgcctaactgcataaagattctaaagagcctcggttaagttcatattacacagccataagacattaaaagttatgttttcaaagataactcaaacagggaatcgttcatggtaaatattagttgaaaaaacaaagctatcgttctgtgcatatgtgattcgtatttagaagatttttaatatatttacagggttttttttcattgaatatatttgcatagaaaacactataaaaatccctacctagacattaccagcagttttctgtgggtggtaagactgagtaatattttcacacatatctgtagttttcagtttttctggaataagtgtgtaaaatttttagttaggaaaaaaacaccatgaaaagccgtttgtcagtatgaagagggcatttacaactgcattaaaaaaaaacctgcaacttgccacataaaaacagttgtcctcgcatattttattggcatgtatgttgtaagcactgacaacgagcagggaaatctgagacgacaaggatagttaaggctgctaggcatcttcagtggatgggtttatgggttgtcgaagtatatagaaattttgacttaatcctagacctctctcagccaaatgaaaatcccaaaggcgagagagatgactccagggttaagagtagtaactgctcttccagagcagtcagattcaattcctagaacctacacagcagctcacaactgtctgtaattccagagagcccaacacccttacacagacatacatgcaggcaaaacaccaacacacattaagcaaataagtaaataaatcattttttaaaagaaagcccagtatatttaagccttctttctttccttaatctggtcttctgatttttttcccctcatattcatagactatatcttactcatccactctgggtatttatgagttggtcatgtaaattgttgggaccatttggaatttgtgttgttcaaaaaaatggttccacaaagctcctttaacattattaccatcttaaaatacaatgtggtattcctcaatattcataaagatgtattaaatgtggctctttctaatatttctatgtatggattttttttaatgctatttataatgaaatgaatcagtatgaagtgtgactgttatgattttgttagtcactcacatacttatctgttagcatttctctttgagatgcacacacacacacacacacacacacacactgtcaacactgcctgtataaagctttggggagctagagatctagagaggttaggcggttgaccatatttttagtgactcattgtcttatagcttttacaaagcaatatggctaaagactggccccactaaaccccacataccctgtcactcttaggaacgaatgccatactgaccctgacggcagaacccctttgttatgcctcctgatggtacaacagtttagttccaatcagcacttgaatgctaagggtcccctgactacattcggcttctttagcacagggtttgggctgaagggtgttgaaatgttatttgaaatagtcaacacaaatgggaatgtcacccaaaagtctctatcgtttctgttgaaaaaggtagaaaatctgatagtacgatcaacaagggctggagccaacaagagctctcttgatggagatgttctttctacattcccaaagggtctctaagtcagtacttagtgagccacgtacccacatactggacctatatacagacttcctgatgggtagtcccttagactagaagcccttagggagtagaataggaagtggtagcaagatggcggtcagcagaatattttccactctgagaacattctgggagcttgtgagtatggtaggtagtgacttaacctaaattttggtagagttaaatctagctgagaatcctactttacaagttaattttgattactgtattaataatcaggttctcttctttccttggagattccacagagccctgagtctcagtgatgccagcttgagttttagaggcacaggcttatgcttggtactgtacccaacttgagtcataaagccacaataggcagatcttcaaaaatctctaccttcaccagcatcaaaggtctagtaaaatcagcagggaggtgtcaagagagccagaagcaaccgtctttttcggggaccaaagaacacatccaaacctgtaagagctcaaagtttgatctaagtcactttgtttattggcctgaaccctgaagacaaacaaaagatgcaagatgaagaacagcactgtgctgcatgggggttggggaggggaggggtggggtggggaggtggggtagggaggtgggggtgaaatgaaggtggagaggcaataatcaggaaaccctgtgggcagctgggaagccaaagcatccctgagtgacccctcagtgtaacacagtgagagcatttgcagtgactggagaaaccatgcgatatgctaatcattgttctgcagggaatttatcatctggtgttctgagaaatgaccagtgtgtcataaaaatacagtaactccagagtcacagtaatttaattttttaaatggatgcttgaaaagaagttgtttttaagccaaccatcaatttatccaggtataatttccaaattgggtaagaaacaggcttgcatgtgattctctcaatcactcaatgcagaaaattccactttgtatttaataagggtacaatatttgatttgttaccacataagcatttggtagctatttttcccaacccaagaacttgcatcttgtatatcaaaggcaaatacttaaaaatatacttataatgggtttataacccacacatattaaaaggcacaaagttagctaaacaagaaacaataaagtttgactcagtagtactggagtgtgtagctacagtgatgttttgtagtattcagacaaaaacatttttagagtggcgtgacatttaaataaatctattttgacttgggaaatttttaacatagactaaaactcaagatttaaaagcacatgagtcttataaaactgaagataaaactctgtggttttcttttcaaattttcttattttattgtttgcatggggaggggcatgtgtctgtgtgtgtgtgtgtgtgcaggtcagaggacaattctggaagtcagatctcttcttccactatgagtcccaaggctcaaactcagagcaccaggcttggaagcaagtactgttatcaactgagtcatcttaccaagcagaagtaaaatttaaatatgtgcagtactagtgttcatagtcaaatgttcagactataacaaaggtataaaataaaaggactaatagaagaaggggagaagagagggagggagaggagaagggagagggggatcagggggagaagaggaaggagggaggaggggaagatagggaggagggggaggagggagagttagccatcatctctaggcccctatccagagaggacttctgttagtctctggtattcatttcttcagagtttttcctagaataaaatgtacacacttgggaacattctcattttaaaatccatgctctatatatatcctcttgggtaagctaatttttttttctgtataatatatcatggatttttttctatgcaaacaaatgcaaatttctgttcctctttttaaatacacatcacaccttgagggcacaccctgccgtttgtgtctcatttcacatattcatgaaaatgcaaacatggtctaatcttggcacacatactcaaaagattacttaaaatattttttgaaaaataggattgctaagcagttcagtagacaacattttttcctactctagtactcttacctttattttttatttatttttttgttttgtttttcgagacagggtttctctgtgttgccctggctgtcctagaactaactttggagaccgggctgtcctccctcgaattcagaaatctgcctgcctttgcctcccaagtgctgggattaaaggcgtgcgccaccacgcccagctttatttttttattaaatataattttttcatacatagtctgattgtggtttccctacactctactcatcccagatcttccctacctccccaccaggcagctaagggaggaaggagagaaggaaggaaggaaggaagggaggaagggaggaagggaggaaggaaggaaggaaggaaggaaggaaggaaaaaaggaaggaagatgaagataaaataaaagaaaacacacttaaataggacataactgaagggaaatggcccaagaaataaatacagacacagagacccacttgtttgtgcattccgtaattccataaaaacaccaaattggaagtcataatatatacccaacagtatatattacctgtaaggtaaaaagagagaaaagaataaaaataaagatttaaaatgagaaaagccctgatgttatgaggcatgaaaccgccatcaatgctgttgagtttgttttccatcagcatctactgctgggcaggcaaccgacctttaagagtagtttgtctccccatttagactctcttggagtaaactaaattttcattggctagtggtcatcagtcagagattgcttctgggttggggggcagggcttgtgtccatttctcttgtcatctctaggacctcatctggtgtataccatatactcctgtgtatactgcctcagtctctgtgagactttaatcctgttgaattggagatccttgttttcttagtgtctcccatcctctccagctcttacattctttctgccaactcttctgtacggttccctgagccccgaggggaggggcttgatagaggcattcagagtagggccctgtgttccaaagtctctcactctctgcatatttattatctgactgtgactctctgtatttgttcccacctgctgcagaaggaagcttctctgaggatggctgagcaaggcactgatctctgagaattgtagaatgtcc

SEQ ID NO: 5 - DNA, 171244 bp, Homo sapiens
ccatctaaagagagcttttcagtactagctgattgttgttgtgtggaaatacgtcttgtatggtgagatcttccaccttttcaacagaaatgagaaacacaaacatttctgtgtgacacttccaaacttgttggctatttctgtttttctttttttctttctttctttcttttttttttttgaggcagagttttgctctcgttgcccaggctggagtgcaatgacgtgatcttggctcgccgcaacctctgcctcctggattcaagcgattctcctgcctcagcctcccaagtagctgagacatgtgccgccatgcctgactcattttgtatttttagtagagacggggtttctccatgttggtcaggctggtctcgaactcctgacctcaggtgatccatctgcctaggcctctcaaagtgcagggattatgggtgtgagccactgcgcccggccctagttggttatttcaaacaaaatactaacactcttcagcccaaaccatgtgtcagagagctgggtgtggccagtgggcccctggtgtgcaactagtcttcagtgatgctactgtatgctagtgacagcacaactgaccactgaaaatatggtgcacgatggtgaacagattggatttcccgtatctctagaaccccagggctttgaggcaattctgatagatggagggggagcgagagagagaaagaggagggagaggtatcacatgaaagagatactggactttctgctaataaatgggtgggtatttgggtgagtagataggaaattaaaaagaaatatgagagatgggcgtggtggcttgtgcctgtaatcccagtgacttgggaggctgaggtgggagtattgtttgagaccaggagtttgagatcagtctgggcagcatagtgagaccccgtccctaaacataaaattttaaaaaatcagctaagcgtggtggtgcgtgcctgtaatcccagctacttaggaggctgaggcaggaggatcccttgagcccaggagttagaggctgcagtgagctatgattgtgccattttacactagcctgggtgagaaagcaagactcccacatctgagacagagagagaggagagaggcagaccatatttgaactccaggctggtgaataattcatactgattaatttaattgaaaatatttatttaaaatttgcagatcggagttttggaaaggttacatttattaaattattgttggactatgaggaacacattgttgcttggaataatatttaattatgatgatgatgatgatgataataaatgacaataataaacaactatcatttattgagcacataccatataccaggcccagtaccaagcagttcacatatattatacatctaatacccagagcaactctataaggcagctctatatgttgcttccatttgaaagatgaataaactgaggtacagagatgtgaagtaacatgctgatggacacccagatatgatctgcagataagaaggataagtcagaagatcagataagcagaaaggtttaaacacacaggactttcatttagtagtaaactcttatgattggtctaaaattctattttcttttacagtttacctactcatcaaatctgtcttaactatttttgtctctccaaattctcttctgttctttgttactatgtacacatgcttttaaaatatgttaggatttgctgtttccatgtgttaatttcttgtttgcctttcttcatttataaactctttcctcctactaattattgacaaactctatttttctttttttttttgaaaaactctatttttcatatcatttttctaaatttaaaaatagcatataaggctgggcatggtggctcacacctgtaatcccagcactttgggaggctgaggcgggtggatcacctgaggttgggagtttgagaccagcctggccaacatggtgaaaccctgtctcaactaaaattacaaaaaaaaaaagttagccgggcatggtgatgggcacctgtagtcccagctactcaggagattgaggcaggagaatcgcttgaacccgggaggtggaggttgcagtgagccgagatggggccactgcattccaacctgggcaacagagtgagaccctgtctcaaaaaataaagtatatatatatatatatatataaatatttacgtgtgtgtgtgtgtgtgtgtgtgtgtgtgtgtatacatatatatagcatgtgtttattttataaattttgtaaaatacagacatatatgaaaaaattacctataatcttaccatccacaggtgattgctgttagcacctatctgggattttttttttcttttttctttttcttttttttttttttttgcagtcttttctaggcacatatattcaatgaaaaaggttatcaatatagtaacagttattttttattgaatgttaaccatacacataaatatagctttgctttttttttcaattcgcatttaccatgagcagtttcctatatcacaactctttgaaaacattattttcacctttcatggctatataacattctatcatgtgaatttatcaatgtgtattttagaattgttatcagatgattaagcatttttaaaatgttcactcatcaataaaatagtgacaacattcttgaacataagttttttttaccatactatcggatatttccttagtataaattcctccaagtaaaattagtgggccaaaggctttttttttttgaggcggagtttcgctctcgttgcccaggctggagtgcaatggtgtgatctcggttcaccacaacctcctcctcccaggttcaagcaattctcctgcctcagcctcctgagtagctgggattacaggcatgcactaccatgcctggctaattttgtagttttagtagagacagggtttctccatgttggtcaggctggtctcaaactcctgacctcaggtgatctgcatgcctcggcctcccaaagtgctgggattacaggcatgagccactggtcctggaccaaagcctcttgatacattttgctaaactatcagaatgttgggcctctttgcaccctactaacaccctcagtttttatgagtatgattacattattttccctcttttccccaacctcctattctattttccttagataccttaagactgcacccccaacttagctttctgttctcattcaggcagtgtgtccagggcttccaatcccagtggtgagtaggcagatgtgggggcttcctgttgaactctgttaggtaattgagccactcaaggggaaaccagctttggggtccgctctgtggcaagcccaggactctatgaatggagctcattcctcactaatttacacaccaggacaagtagccagctaagaaattgctctaatttcactggacgtcagtcaccagaagaatggagatacagaaggaaaataaaaggcctgctcccacagtggggtcatagcacatctccacatttaacctttgacaaggcaaaagtatttcttctgtccagacaattccagaagtcataaggaatactgggcaaggatgggtcaaaacaacacagactattgagggcaacaaaggaaaaaccatgcactcctgaagaaatcgttcccaaaatgctgaaagagaaagaggattgtctctctagaagtctaatagaaaacagtatctggaacatttcctaggattttttttttttctaatgacttactctcttattaatatgtcagagaaaagaaaagctcctggctaagaaataaaacagtccctcatcccagaaatcacagccaggaatatggattcttaagtgtcaaaaaagtactctgaataaggaaagaaacgcagatgcactacttctattataataagcgcttgatttcttttaatcccctgagtccaattattttcttggcaaatttaagggtactgactgcttctgtgaatctattgttacacttgataatggatctgagttgggggtaatatttgcctatcaatttggatacttaaaaatctctctctctttcttcatataccctctatctcacaactttccatttaatgagggaagtgaatttcttttttctgcccctctttcctactgcttctagaataaaagcataacaggacgacaggagtggagatgagaggaagcatttccaagcaatgggaaagtatgatgagagtcgtgagttggtagaatgggggtgagtaaggggtggggtgtggatggatggaagaggatggaggaggaagcaggtcatatgatcaggcttcaaaggccttccaatatcttgttttcagaggctttgtaggtcttcttacagaactttgagggtatttttcctttgtgagcaaaggagaaccatagtaaattttgagggatgggctgggcgcggtggctcacgcctgtaatcccagcactgtggcaggcagaggcaggtggatcatttgaggtcaggagttcgagaccagcctggccaaaatggtgaaaccccgtctctactgaaaaaacaaaaagttagttggatgtggttgcatgtgcctataactccagctactcgggcagctgaggcagcagacttgctggaacccgggaggcagatgttgcaatgagttgagattgtgccactgcactccagtctgggagacagagtgagactccatctcaaaaaaaaagaaatttttttttttggagggagaaaatatatgattagattgtttttgtgttggtttgcttgtttgtttttttccccaagcaaaaaatcactttactgcaatagggaagacaaataggaaggggaagaaactagagacaggaacagcagtttggaggttctgcaatacagaagcccagatgtttggcttggacttagacactgggaatgaaaaataaatgatgaattaaaaaaataaaatatttgggaggtatacttgacctgaccttggtgctttttcaaatgagaagagaaagatagagacagatgaaaaagttaagcaaggatgactatgatttcccatagtgaatgtctggatgatgatatcattaaatgaaaatttttaaaaaggcagatggtagaaggagatttgaaggaaagacaagaaatttgtttgttttggatttacttgtagaatgacctgcaaaattttgtcctaataaatgttaacaagtggctttccatacaaaaaccaaaccaaacaaaaccctgatgtaaaccaaaaataaaattctgaggccccccttcaccatctgaatgaacttcctcctctgcaagggcactcttaaaatttaacatgaaagactggttcaggtcatgacgggaagtgggggtcggacaggcctcattatgcctctctggcattaacatcaacacagaccttaagtctgttaagaagcatttacaatctattctctctgaagcctgctacctgaaggcttcctctgcacactgagaactttggtctccacaatcctttatcttaagccagacatttcctttctattgatcccaggtctttagataaactcaaccaattgtcaaccagaaaaattttaaatctatctataacctagaagcccccacttcaagttgccctgcctttttgaactgaaccaatgtatttcttaaacttatttgattgaagtctcatatctccctaaaaaccaagctgcaccccaaccaccttgggtgcatgttcttaggatctcctgagggctgtctcctgagggccaagatcactcatatttggctcaccataaatctctaaatattttacagagttttactcttttcatcgacactgatttatattggatttccaatggtgtaatattcatgccgttggccgatttcaagctagctggtagagatatgcaaacaaacaaacaaacaaaaagagatatgcaaaaacaactcttgtgagcttgtgtgctggctccaacacaccatgctgctggatattctaccaggcagcatagggcgcacggtgggtgagcctggcaaggagacaagagctggaggtacagggcttaaatgaagccaagggcgtgaataatattgatgaggagagcaagtagaaatgaaaagagaaaaccagtattaggagatctataaagaaacaatagtcagaaaaagagtggttaaagaggcagaagaatcagaagagaaccagattcatgaaataaaagagaggaatcagtttcaggaaggaaagtgtggtcagtagtgtcaaataccagagactgaatagcctaaggatttaaaagaggtcaacagcaccaccaattaagcggtttttctgagcttaagatatttttctttatttttctatgttaaaaatattttataaagaaaaagaaaaaaagagatcacatttgcccccccaacccgtccctggcctctctctctctaaggaagtcgttaatgaatttgggcagaatagattcagagctgtgagagtgaaaatttgactgcagtgggtgaggtgttaataaaagggagggggtagagatgaaatctttccagcagtttggctcttaaggggatagcttgaaggaaagagggttggaagggtggtttttaaaaagaattatcactcactaatcaactagaaatccagtggaatatgcagtacttgtctgtaatccagcaggctaacttttttttttttttttttttgagacggagtctcgctctgtcacccaggctggagtgcagtggcatgatcttggcttaccgcaacctctgcctcccagttcaagcaattctcttgcctcagcctcccaagtagctggaactacaggcatgcaccaccatgcatggctaaattttttttgaatttttagtagagatgagtttcaccatgttggtcaggctggtctcaaattcctgacctcaagtgatcacccgcctcaacctcccaaagtgctgggattacaggccagagccacagtgcccagccaaggctaacctcttgatcccaatgacaaacagaacaaacatcttactcaagtccagaagcaataataattttgaatcttgcttgcatgtcaacaggagccacattaatacagaagaggatcacattggtccaattaaattgaattgattgagagcctctgcaatacacggtctactgcacaaataatgatggttcctggtacatttttatttgaccattgattgctcgatttgtttctgtgtctaactgtgtattggaattaagctgactcaatttgaactgcaggtccttttatccctcttattttttatttatttatttattttattttaaggcatttctcactctccagaaaatctctaagatttcagctattaggcatttgtctttttttttttttttttttttttttttgagactgagtcttgctgggttgcccaggctggaatgcagtgtcacaatctcggctcatcacaacctccacctccctgattcaagtgattctcctgcctcagactcccgagtagctgtgactataggtgcaaaccaccacgcccagctaatttttgtatttttagtagagacaggttttcactatgttggccaagctggtctcaaactcctaacctcaagtgatctgcccgccttggcctcccaaagtgctgggattataggcatgagccaccgtgccccaccaggtcttcttaatcataacaaattcatcttaaaacatcattttaaaatatattattttttattcttcattgacttcctgcattactctattttttcagagtttctagcaaccagtatcattggtattttaaacaatgtgtacatgtacatttatgcagatgagttaacatatatcaaagcaacctccaaacaatgccatttaggtaatctccaatttaaaagcctcaatagaatgataagattgagcttttctgtagttccatgacctccagcagagtctgcaaggccacagctgcctgaaggttgattctgtaattagaagatgccagggtcatctcagaatagaacctcaagccacccaggctacatttacagaatcagcctctccagaaaaacagcaacaaaggagggccttcctatgtatttggaaggagtcacctagaggagggacttggggttttggtgttggtgtggggggcagggatgggatggggagggggaagcttattgaaatatactaaaagacaaaccaacctaagggctggagggaagaaaattcacacttgtaagcttcttttttaaggggcatctcttaggctctagcttttgagattcagtatatatatatttttgagtcttgctctgctggagtgcagtggtgtgatctgggctcactgcaagttctgcctctcaggttcacaccattcttctgcctcagcctcccgagcagctgggactacaggcgcctgccaccatgcccagctaattttttgtatttttagtagagacggggtttcaccctgttagccaggatggtctcgatctcctgatctcatgatccgcccgcctcggcctcccaaaatgctgggattacaggcgtgagccaccgcgcccggcccagtatttttgttttatgaagatattacatttgtaaagtatgagcttggtgtcagcaaacttatatccctgtgtacaaactggccgaatcacttagccactttgggccaaatcacttagctcttctaacagtaagaaatcaacaagaaaaataaacatttcaaacattacaatgtgttcatgtattcactgtgggggatgaccagattctcgaaaccacaggttgttcttagtgaaacaagtttgggttggggccatagacttgtgtatttagaatcaatggctgttctctctctgggactttgatttttttcttgggctcatcccctttttgtagtatcttatctttgtcttatttgtataggacttaactgttcccattcccttattagagcaatctaagtgattaccttcataccttttggaattatatgcttcaaaattccaaaaagaatgattttgggctgggcacagtggctcacacctataattccagcactttgagaggctgaggtggatcgcctgaggtcaggagtttgagaccaacctggccaacatagtgaaaccccgtctctactaaaaaatataaaaaattagccgggcatggtggcaggtgcctgtaatctcagctactcgggaggtggaggttgcaatgagcccagatcgcaccattgcactccagcctgggcaacaaaaggtgaaactccatctcaattaaaaaaaaaataatgattttggtggtcgacttcaaataggtaggagaagaaggagagaggagatggagggtcagggagatctaattactctctaaaatcatgctaggaaagataacaccttttaataacactctctgcttttataacatcattctgccaaggagctcaaaggtttcaacaaagttcactttcagaaaacccctttgaggaagacagaatatacatcttctctccattttaaagatgaagaaacaggccgggcacaatggctaatgcctgtaatcccagcactttgggaggctgaggccagaggatcgcttgagctccagagtttgagaccagcctggataacatggcaaaaccctgtctctacaaaaaaaatacgaaaattagatgggtgtggtggcatgcacctgtggtcccagctacttgggaggctaaggtgggaggatcgcttgagcccagggagtcaagtctacactgagccatgattggatcactgcactccagcctgggtagacagagcaagaccctgtctcaaaaaaaagaaatgaaagagaaagaaagaaagaggagaggagaggagatgaggggaggggaggggaggagggagggggggaggaaggaaggaaggaaggaaggaaaaaaagatgaaaaaagaaaaaaacaagatgaaacagaggcagaaagactttacgtaaattgctcatcatgtggttgtcaagtttgaccccaaaacccaatttattgaccaaggttattctttgactgaggcaagggggtccgctctcctgggccttgggctttagaaagctcatctctggcctttctgagatccatccctttctttttatttttcttgacacggagtcttgctctgtcactcaggctggagtgcagtggcatgatctcgactcactgtaacctctgcctcccgggttcaagcgattctcctgcctcagcctcctgagataacaggcgctcgccaccacatctggctaatttttgtatttttagtaaagactgggtttcatcatgttggccaggttggtttcgaactcctgacctgaggtgagctgcccaccttggcctcccaaagtgctgggattacaggcatgagccactgcgcccagctcagatccatccctttctaagggcaaacagtccatggtgcaaaggggccatgccacccagagttatgagtacctgggactccagaattccttgcctggtggcctccacatgcacttccagggcctgcttgggcctcttctatgggtctgtcctgagtgttgatagaaccactgatgtgagtacctgggcttgagccgtggcctggagatcctgttgactgtagcatggagggggcttgtgcagctgaatgtctgtatgcaggtggtgggagttctggaatatgatggagctggaggtgggaagagaagtaggcttggggcagctctctcatgccacctcattctggccaaaactcaggtcaaactgtgaagagtctaaatgtgaatctgcccttcaaggtggctacaaaggtatctttgtcaaggtaggagaccttgtggcctccacgtgcacttccagggcctgcttgggcctcttctacgggtctgtcctgagtcttctatgaatctgcccttcagggcagattcatatttagactcttcacagtttgacctgagttttggccagaataaggtgacatttagtttgttggcttgatggatgacttaaatatttagacatatggtgtgtaggcctgcattcctactcttgcctttttttttgcccctccagtgttttgggtagttttgctcccctacagccaaaggcaaacagataagttggaggtctggagtggctacataattttacacgactgcaattctctggctgcacttcacaaatgtatacaaactaaatacaagtcctgtgtttttatcacagggaggctgatcaatataatgaaattaaaagggggctggtccatattgttctgtgtttttgtttgtttgtttctttttttgtttttgtggcctccttcctctcaatttatgaagagaagcagtaagatgttcctctcgggtcctctgagggacctggggagctcaggctgggaatctccaaggcagtaggtcgcctatcaaaaatcaaagtccaggtttgtggggggaaaacaaaagcagcccattacccagaggactgtccgccttcccctcaccccagcctaggcctttgaaaggaaacaaaagacaagacaaaatgattggcgtcctgagggagattcagcctagagctctctctcccccaatccctccctccggctgaggaaactaacaaaggaaaaaaaaattgcggaaagcaggatttagaggaagcaaattccactggtgcccttggctgccgggaacgtggactagagagtctgcggcgcagccccgagcccagcgcttcccgcgcgtcttaggccggcgggcccgggcgggggaaggggacgcagaccgcggaccctaagacacctgctgtaccctccacccccaccccacccacctccccccaactccctagatgtgtcgtgggcggctgaacgtcgcccgtttaaggggcgggccccggctccacgtgctttctgctgagtgactgaactacataaacagaggccgggaacggggcggggaggagggagagcacaggctttgaccgatagtaacctctgcgctcggtgcagccgaatctataaaaggaactagtcccggcaaaaaccccgtaattgcgagcgagagtgagtggggccgggacccgcagagccgagccgacccttctctcccgggctgcggcagggcagggcggggagctccgcgcaccaacagagccggttctcagggcgctttgctccttgttttttccccggttctgttttctccccttctccggaaggcttgtcaaggggtaggagaaagagacgcaaacacaaaagtggaaaacaggtaagaggctctccagtgacttacttgggcgttattgttttgtttcgaggccaaggaggcttcgggaagtgctcggtttcggggactttgatccggagccccacatccccaccacttgcaactcagatgggaccggaggcggtgttaaatggggagacgatgtcctagtacgagctctggtgaccccaggactctgcgctgctgcgcttggggcttgcccgacggtggagaccggggagcatctctgggcgtggagacccgggcgcagtaccccgggctcagaggggtcgggggttcccgggcgtgctgagggcgctgctgccgggtggggagagctgcaggtccggcaccgagcgctgctttgttcggagggccctgagctggctagaaacccttctggttgcaggtcggccagtacctacggagacaaatgccagcactgagtcttcactcggttcttaagaagctggtctgttctgacctgggaattggctatatgctccccgggactggagcggcacagtcccggactgtgaatccgggaactcgagttggaggtgtcccaaacggtccgtggtgctattgctcactagaggccttgggtctttgtttgacctgaggggtagggaggtcctgcctacagtctccgtgcgctcagctgagctggtgtccctggcgcagagcgcggacgagttttgtttccttttctttttcttttttttctttcctttaagtctcggtctgtcgcccaggctggagtgcaatggaacgatctccgctcactgcaacctccgcctcccgggttcaagcgattctcctgcctcagcctcctgagtagctgggattacaggcgcgtcaccacatccagctaatttttgtatttttagtagagacggggtttcaacttgttggccaggctggtctcgaaccctcgacctcaggtgatccaccggcctcggcctccccaagtgctgggattataggcgtgagccaccgcgcgcggccgagttttgtttcttttaaaaacaagacttaggagagcctgcggagacccggaggtggggtgcccaatcctccctctcccacgttccctgcagccccatcttccagaccgttgctgctggtctctcggggcagcttctgcctgggcgcagatggggaagctgggccgaggtggtgccgtggaatgaccgggagtaaccccggcgggcggcgcagaactcggagctccgccgcggggctgggctgggctctgccgtgagggtgggggtgctgggcgcgcgggctgcggtggcccccggagactggcccgcagcgcctcctggccggaggacctaggaatcggccggctctactaggtgtctttgctcgcggttccgactgtgaatccggtgaagaccggtggttgcagacggggaggaactatgaggttgaggcgaaagcccgttttgtttttttttttttgtttttttggtttttttttttgttagcgtgtttgccaactcccaggccattggtaaagcaggaaggttcttggggcggcggacggtgccagggttatgtgtaggtgcctctttaggtatatcttttatcaaaaagaagcaaagaaataagattaaaaataaacaaagaaaaaagttgtctggcactggcagtaattggcctgcctttgcagcactgataccattagcttttaaaatccgacttttcattgacacttcaagaagagaatgggtagtatatacacattcatctcatagtggacaaatttcatatttaaaaaaaccttctgggtactgaaatcagcaagtcacttgccctccatggccgaatccctgcttcccacgaagagaacctcacaaaaatttcccccaagttaaagagtggaattttcttgatttttttttcttttttttttaacggccgtagtttagaacccagacttaaattatgatcttcttttcaaacaaaacttaaagtccttaagttttcatctccccttttatttcaacctattcttctcatacctaccacaaaaataatggaggctttctgttgagaaactttccgtttctgttgagagtatcattctcttgagaaactttctcctaaatcagagaaagtatggaagcatggaaagtattcctgagtagaacctctacagatattacaatatttttcaaatacaaagtttccattgtcagcctgtttcccaagtgcttccacaaaccattaaataattccacaaaccattaaaataattaatgctagggaattttaggaaaacattggtttacaatcagaaggaccggggaagtgggtcttcagccttcacgatgactacaagccatttaagggactagaattgctactgttgtcagagcaatttaggagtctgtatttgagcacccgcatagtgttccagaatgacatatctgactgtaacctggacacgtgtgatatgttgtctcccctgcagatgagcatttgaaatctcaaccctcgtatttctacgagtgcaggcctataatggaccctgggcacattttttttttttttgagatgcagtctcgctctgtttcccaggctggagtgcagtggcacgatatggctcactgcaacctccacctcctgggttcaagagattctcctgcctcagcctcctgagtagctgggactataggcgcacgccaccatgcctggctagtttttgcattttcagtagagacagagtttcaccatgttggccaggatggtctcgatttcctgacctcttgatccacccgcctcggcctcccaaagtgctgggattacaggcgtgaggcaccgcgcccgacccctggacacattttgacttagaacatattttcggtttgtgtgagacagtgcattagtgcaggattggaaaagagtgatcaggaattgattgttttcaaggattggttccttctgctcaaggaagtcccattgtaaacataaaaaaatgaatgaaactgaagaagttcagtgacttagctttttattatcttctgtagtacttacctttttggagaggagttggttgggatatttttccatttaaattttttttttaaagggatcttctctcccgtaagccgggatacttaagctatatatgtagtggctacaaattaaggtcttcactgttttcatttttagctgctagaataagtgaacattaccttagatagactcttctaattatgaagatatctagatgtctagaaaatatcaaaatgcatgtggtttttgcatttctaaaatacttttaaaaccaaatactttttcttttttttttttttctgagatggagtcttgctcttttgcctaggctggagcgcagtagaatgatcttggctcactgcaacttccgcctctcaggttcaggtgattctcctgcctcaacctcctgagtagctgggattacaggtgcgtgccaccacacccggctagtttttgtgtttttagtagggacagggtttcaccatgttggccaggctggtctcaagctcctgacctcaagtgatctgccagcctcagcctcccaaagtgctgggattacaggcatgagccaccacacctggcctcaaatacatttttttaagtatccagatattaaataaataataccattatagtagttgttatggtcatttactctagcatcaaatgttaaaagatcattctgaacacttgttttgtttatgctgagagaaggcctactccaaaaaatgcaaccatcttcgtatctgcatgtggatacaaccatgaatggccaaagttattgcagtgttgaatagacacttatatagcactgtgtggcaagtactgtttgaaatgtttttcacgtgtttattcattgtatttattttgagatagggtcttgctctgttgcacagggtggagtgcagctgcacagacaaggctcactgcaacctcagcctcctgcgctcacgtgatcctcatacatcagcctcttaaggagctggggccacaggcacgcaccactgctcctggctaaatttttacaattttttgtaaagacaaggtctcactatcttgctcagactggtcttgaactcctgggctcaagtgatcctcccacatcagcctcccaaagtgctgggattacaggcataagccactgtgcaggtcatcaaatgctaattgaattttcacaacaaaaccatttattgtccctagtttacaagattaagtaaatgagaagctaatttttctctggctatataccttgcaagaggcagagctaagacttgaacccagccagagttctttaactccagcactaacatttcagctgctgcaaccagggagcttttcaaggatgatcaccacattctctacattcatctgctataatccttatcagaatctacagcctgtatcatattttccttgttgctgtgagtgggtcagccaaattctctttaacttgaaaccttggttgcgtagggattgcaacatcctggaaagaatagaataaaatttactcaactcaattttttacttggttcataatgaaaactatactattgcttcagtcagatgtttgcgaatagctgtgtgatctcaaaatgttttcctatgtgatctatagaaaatggaatgatagagtattaggctgtaagggcctaagaaacaaaggaaaaagagaagtgaactgttagtttagttgtaaaacctaactttggtgaattgtaaaaatttgttataatacaatatgattcttgcttgtcctgtccttgatgaagttgtggaccttttgaaataagctatttctctgttactgctgttactgtttagaaatcaaatttagttttttcttaagatatacgtatttttggaagataaacacagtttcaaagtctgccttgttggctgggtgcactggctcattgttgtattcccagcactttgggaggccaaagcaggaggatcacttgaggtcaggagttcaagaccagcctggcaaatatggtgaaaccccgtctctactaacaatacaaaaattagctgggcgtggtggtgggtgcttgtaatcccagctactgggattgggaggctgaagtagaagaattgcttgaacctgggaggcggaggttgcactgagtcgagatcgtgccactttactccaacctgggcgacagagtgagactccgtcttgaaaaaaaatgtctgccttgtaaaagtgaaataggatgagaaagtgcctttcttattaattggtgtaatgaattagaaataaactctttgaagacacctcttggtaaaaatagttacatttactgttgatttatggtatgttggatatgtttttaagttttccgtgtaataactcagttcattctcatgagtgaaataggtgcttttattgtctttatagatgggaaactgaggtataggcaggctaggtacattattatggagttcgtaagtagtggagctgaagtcgcatcccagacagtttggcttccgtgagtttaccaatctcatggtaaagactttgtcagactatcaaagttttgacaaatgaaatattagcaaaaggccaaaagggattctctattttcatttgagtatcttcacctgaaaatagttgcctgaataagtagcctgcatagaaaggtacattttagaaatacttgaggccagagaatgaaaagcttacataaaattgatttccggtggggccttcagttactctccattctacgaagaccacaaatagcattcaggcaaagagcatttattccaacaatggaggagcactggatttggttcctaaaacaaaataaagtttgaaatcctgtctttcccatgttgaaaacaaagttggtacaaaaccctttagcttttgcaaacctcctttaagacccgatttaaatgcttccctcctcatgaagctcttctggatccactccttcccatcactaagttgaaagtaagatccccttctctttacttccattagacttggattacagcactctttgtatcatgtatttaattctgttttttaattacagttaacatttatttgtcttcctcttgagtgtatgcttctctagaggaaggtctttgattcattctcccctggccttaattcatcccacttaatatggaaaaaatttaataaatgctgacttgaataagtccaacaaggagaatgggaagctcatgtttgcttcctgtcttctaaaagactacttaagataacagggtaatcacagaaaagcattagaaatagagttatatgagaaacaactgtagttaaggctaggtttatgttagactgagaaattttagtgcatacttaagttatttaggccaggttactttttgtagaacaaacatttcagtttcgctcagtttcatttccgtttctgaggcagctgtgatttaagaaaatgctctagtctgtggcattccatattcaagtactttgagttgtatattaatttatttttgttaataagagtgacatgactcactaagtaatttagagatttaaacacttttttaaaaaacagtaacttcatatgcattggatctattcttctataaagtcttttcttggggggtgtttgtttaaaattccccggtgttttctctgccaaatccaacttccaagaagcatttggaagtcaaaacattttatctggttagtcttaaagtccagatattttgtgatagctggtatttagtttatgatatttcccaggaagaactttttagtagttgaaccatttatgaaagacttccttgaagctaccttagagagttgatttagttcttctaaataagtaaatagaatattagtattaggacatcttggagtatagatgcaaatattggtgaaaaagaacatggatatcagagtcaaattaatgtagattggaattctggttattactaatggatatctgacattaggcaagttgctgatcactctttgcctcagtttcatcatctgtaaaataggtatttgtgtttgtgtataatgtgaaccgtataatataatgcttggcctatagtgaaatttattcatacgagtgttttcagtgattttaaaagcttgctttaggccgggcgcgatggcttctgcctataattccagcactttgggaggccaaggtgggcggatcatgaggtcaggagttcgagaccagcctgaccagcatggtgaaaccccgtctctactaaaaatacaaaaattagctgggcgtggtggtgcaagcctgtaatcccagctactcaggaggcttaggcagaagaatcgcttgaacccaggaggcagagattgcagtgagccgagatggtgccactgcacagagcgagactccatctcaaaaaaacaaaacaaaacaaaacaaaaatcttgctttatagtttacttccacatcaaattgtctttatcccatgttacttgcattgatatcccagacatgaaaagaaaaaaagatgataacaatgacagttattaaattaggttccactcttattctagatcaccaattcatattactattcagacttggaacattaaattttagttaaactttttttcaaatatgcatataattgtcagtggttactatattttggggaagagattgttgacttctttgaagaaagatacggattttctcttcagaaaaaatacacatgggctcatataatccaaattttatgtgtaattacagggtgttcatgaatgcccacaaatccattaagccatgtgaccttggacaagtcattttacttttctgttttttaggttgttggtctgtaaaatgatactacttgacttttaaagagcccttcaagctcttatgtcctctaaccccaggtctgtattcagaagaaggggtggtcctttaattagagccatctagagatctgaggaacatgctgggcattagtgtaacataccatgtggattttgagaggtaaagaaaaaataaccagggaatgcctcagagcattcctgatcagatcgatgacagaagaaaggaatgagagggaggagaggaagctgttgaaatttcctatttacctgctttgagtgaatgaagatttgaatcatagaaccagaaggggttctcatctgaaatgcaaaggaaggaggagttggtttaattcaataagtttcagttgagtaaacatgatttagtgagatactgttcttgcttctgactcaccatttggaaaatctctctaaaataaaattggactctccatctcggacatcattttgggtgtaggttttgcttttttttttgagatggagtctcgttatgttgcccaggctggagtgcagtggcgcaatctcggctcactgcaacttccgcctcccagattcaagcagttctcctgcctcaacctcctgagtagctgggactacaggcgtatgccaccatgtccggctaatttttgtatttttttaatagagacggggttttactatggtggctaggctggtctttaactcctgaccttgtgatctgcccaccttggcttcccagagtgctgggattacagatgtgagccacagtgcccggcctaagttttacttcttataatggactcctgttaagccaataggtgatgaaaggaaaccataaccaactcttcaggctcattcatccttcaagaatagcatgctagtacccatcctaggaggagaattggactatacctcatgaggatagtttgaagtatctcagaagaccctcactgggggtaggtcggtaagacacaaagctttctaaagcactgtaccaaatttgttgtttgagagatcataacaaattagaagtggaaagaagaaggagtaaaaggaagaagaggtttctggccaggagcagggagggggaaggagctgctaggaagatgtttggttgtcatatccctgttcacccttgctttgcaaaattcttgtaggatgccaggttgggagtaattgtttttcacaagagtcaaaccacgcttgttttcttgaagaagcaagtctttggagggtggtggcttgaaatctgttggatctggtatttaggtgatacactttgacataaaggcaacactgatgcaagcagcagctttccttggaaaggcagggagaaagtgaaggcccagactgatgagcttacactgacctgcagacccttctccattcccaggcatgtttggtggcagagtttaccttagttggggttaggctgttgtctggtactgtgagagagaaggaagaagaagatatgatattaacaacaacaatacatatttatatttgaaaattaaatgcactaatacacctatagtgctattaaacaaatttatttgttcagcaaatgtttgttaaacaccatgtactgtggaaagtactaggtgctggacagaggtcaaaagacttttaagaatctgccaccattaatgatctctttctgcttggcattcaaggctctttgaaataagactgtgacccactttgatagttttgtcctggattataagacacatgctcgaaggaactatagctggttttctcaccagactgattaacatatagtatggtttggtacctgttaaatgagtctctctctacaggttttcatcttctactttaagaaccccttcctggcattgtttggctcctcattgttctggaatctcatgtccatctcatgtatttgccttggttcacacttgatcttctgctcatattcctcacctactgaaattttacccatcaaccagaccgtgggtgatggaacacagcatgggctagttcttcttatatatgatctcatttaattttcactggaactctgagataggtagcatttcagcccactcaagttgactcaaatttttgtaatcatcaatatattttaaaataactttatatttgacctgtaattggaaaaccaatatgagttatcataaatgaaaggtaattttaaaaataattaggatgaagacaaattatttttctcacagtctatgtataagataaactattggttcccaaaggccccagctgacaatgagacttctcttactttgttgaaaagggaattagcaagcattaaagaggtgtcaaaaagaagactaaacaaaagcttactcctttttttttttgagacgagtcttgctctgttgcccaggctggagtgcagtggcaccacctcggctcactgcaacctcttcctcctgggttcaagcgattctcctgcctcagcctccctagtagctgggattacaggtgcatgccaccacacccggctaatttttgtatttttagcagagatggggttcgtcatgttggccaggctggtctccaactcctgacctcaggtgatccacccacctcggcctcccaaagtgctagaatcacaggtgtgagccgccgcacccggccgcttactccttaatgtactaagaatgttatatataggctgaagaagtgctgaaaagaaccatattttctcatgatgtggttcaatgtttaatactgtgcttgttcatctcctaaaatcctctgaatatcacttaaattcatcctgtgtaactctcccacatttggggaaatactgagcttgcctattattatattagccccatatttcagatgatgcacctgagccgaggagaagttaaataacttgttcatggttccatatttggctaatggcagagccagggattcaaactcttgtctctctgactcccaggtttgtgcttttcccacttggctgaatttctcatgctacctcctccataacacctttcctagaacttttaaggaatgcttcccctgttctctcatagcattttaatgtaagttgccaaagtgtcccagtttgcacccctaccagcaatgtgggagaaaatagcaacatatttttgatgttggggtctagtgttacggtttcttctgctctttgggatgtatattccatggctactgaatacccaagtcccaaacagttttcttagactcagaaggtcatccacttcagcttcttcatcaaaaagacatattttctggctgggcacggtggctcacacctgtaatcacagcactttgggaggtggaggcaggagaattgcttgaacccaggaggctgaagttgcagtgagcccagatcgtgccactgccctccagcctgggtgacagagcgaaactctgtgtcaagaaacaaaaaaaaggacttgttttctgttccattacccacagtggtagaatggcgtgctaaatttattctccagctgccattaactgcaaattaaaatcttagtctcttgcctctttaatccaggcttcttcatactataccagaatttaggataactattacagtgccctttataggagagaaagaagaaattgtgtctgtagatgtctgttcctttcagcttaaaatggacactgaaatgttaaatattggactggcctcatttatttctcctgtctgttggtccaatttgaatcttaaggcgtctttcaactggaattttttgtttctctcaactaaaaattgttctttgtaagtttgaatcagaacaaaatcctgaatgttgagggtttcctaaaggctgtttctttatgcaaaagcctgaaacccgatgttgatgttggctgcttaaaattaactgtgaatcaaggcagggtttttatttttattttttttttactttaatgattgtgttaattatagtgaaaaccttgagttcacgagaaagaaagcctttggtcaagtattgtttattaagttgtcagtcttgttgcaggatttgcaaatttagtggaattagtgccatttttcagtttacaattccagtcacatttcacatgatcagagcatggctttcttctctgtggagcaaatagagggctgtctgacacttggttccagtggcttccattaagcagagtggatatgtccctggagtctgcagagaagggcatggcactctgaccccagatggcactccgttttgggacattgtccaattctagttcatagcatatgtgaccaacaccagctctcacctgatgtaaacacttagcgcgttgttgcttgggggattggattgtgtgaatttttcaaaactacagttgacagaaggaggctaccaaaaatgaaacccaataattccatttttgggaattattcccacttttgttccatttttcccactttgttctttggcacacagaatgtttgatttgtgaaaatcttaataacagtagttttttctataaggaacactcagaatcttgataatattggaataatacagatccttttgtaggatcctctcagacctcatataatagagttcatgtagtcaatatttaaagaaaaacacccttaagtttttgtttttcagaatcacaagtaagtggatttaaacttgtgatcttattcccctttcttctcttaatttagtgaggcagccagcgagagggtttgttttggttattctaaagaaggagtttgcttgtaagttttggagggcaagacttagactctgtgtctctgtgcttgccctggaactttgattaaattgtcactaaccgagttagctggccctcgccgggctgcagaaatagaagtgtcttgcacacatgacatatgactgtctcaagagctggctggtgaaaggacgttctggagaaggctgccgatactgtatgaactagaactggacaagagcctggagattggataactcagtttggcgcaagtaaagggaataaaagtgttaaggtggcaaaattgtatccaggtgtttataggctccctgagttcctgacttgagcctatctatgggtttagagttcaaggctctttaccagtgctgacaatcttatactctaggttgaacctccggggaaggtgcccttgcttgatggcatgtttaccaggggttctagagcctcaatcacagattctctctagctcacatgaagttaatgaaaatgaatgtgcttccctacaaattagagaggctttgaggaaaaatcagattaaatgcactcctgcttgaacttatgtttcttagaacacagctggaaattttgtcacacaaacctttactttcagtgacatttcttgactggtttgttactgtagtgaatctgctttaactatcttttcttatcgctgaggttttacttccattctacatgtgattgtggagcgctgcgtcattgtgggttcagtgtagtggagagtaggaagatggtgagacacagtagcttgttgcacattgcttaatttatcagggatcactgatgagttagtacactagagaagattgtaggtagagctgaaaagatggaggaattataaggctcagatttctctctttttttttttttttaagatggagtttcactcttgttgtccaggctggaattcaatggcatgatctcggctcactgcaacctctgcctcccgggttcaagtgagacttgatggtctcacttgatggtttcctggctcagcctcctgagtagctgagattacaggcacccactaccatgcccagctacttttttgtatttttagtggagatggggttttatcatgttgaccaggctggtctcgaacttctgacctcaggtgatcacctgcctcagcctcccaaagtgcagggattacaggcatgagccactgcgtctggccaaggctcagatttctaatagagatttctaatggacatagaggctggaggaaatgggatggacaggaaaactgagtcaggtgccaaaaacttgtagggggccgggtgcggtggctcacgcctgtaatcccagcactttgggaggctgaggcgggtggatcacgaggtcaggagatcgagaccatcctggctaacacggcgaaaccccgtctctactaaaaatacaaaaaattagccgggcgtgttggcaggcggctgtcggtagtcccagctactcgggaggctgaggcaggagaatggcgtgaagccgggaggcggagcttgcagtgagccgagatcgcgccactgcactccagcctgggcgacagagccagactccatctaaataaataaatagataaataaataaaataaaataaaaacttgtagggaggtggcagtgtgctatggaggataggtgcaacctctgtgagaatgtagagaaaatagtataagtgagtggtgaggacccccaagagggggttttatagtaaaacaatggtcagaagtggcaacaggataccgtataatgctttcacctctaccaatgcactgggtactggagagcgctccagtttgctctggaaaggccctttctgtggacaaagaatacagaaaagagattcctttaataaaccacccactctgtgtcccacccttgatgaatacttcactgtgaaattgccagaattaatcatggtaatagctactgtacacttactttgttccaggaactggataaatgttttacatacattatcagttctattttttggagaagatacaggggctcagagtccctagggttccagagctggtgagtagcagagtcaggattcaaacccagctttctctgactctaaaacctcctttcttcctgctgaaacaattaactcaagacaacaaaggagttaaggatttggggagttttctgcatggtagaatagacccaaaggaaaagaaagaaagacagtgactaagatttgggtttgtctgccccaccaaatgctttgagcactttcataaatataaatccttcaggttgggagaaggttgaacatctgaagacactgattcttcagagatgtaatccaaacaaagtgatctttggtgatatggtcactaaaccatttatcccaaaattctcttggaaaaccgtcctataacagcagggaacattatccagccaagtttttctgcaaataaagggttgctgatagaggcttgcctgcttgtgtttctgtagctcagggtgtttatgaattcactaatcccttcccttcagatcccttttattctggtgttatgattgtgactgaaaaaaattgattttttttctatgacatagaatgttgaaaggttgatttcttttctagaggaaagattctttttttctatgtgctacataccccccgaccagggaaaaggcaaatagtggtattgtttgctgaagtcttcctttgaaggttgcttggtgtttgcttagtggaaatcagcaggggaagagaggctatctctaacattttgttagagtttcttcgtagttctatagtgatgaaacaaggacttggggtacaggacagatctgctttcagaaatcctggctcttgtgaggtttagaagccctgagaccatttagctggtggcaacgggaatgttgagggtgataaataggatctttggttgtccaagtatcagtgacatgatatagatggagttaaacctttaggatctccttatttatttgtttgtttatttttgagacagggtcttgcactgtagcccaggttggagtatggtggcatgatcataactcactgcagcctcaaactcctgggctcaagcgatcctgctgcctcagcctcccaaggtgttaggattacaggcatgagccgccacacccggtcaggatctcctgtaaaattatattgttgacaacatgaagaattatgcttctcaaaagctagttatagatttgtacaatattcatagatttcttgtttcagtttttacaaattcatagcccttattttgaaaattagctattagcaataattttgtctaggaaattggatgtgtattcaagtgaaagaaggaagtacagttacctattatcttattgtaactaacaatcaagtaagtgtgatgcatttggtactttaaaaactgcacccaagttacagattattggaattaataaaattcactggatctatatatttttaaacggacagtgtgatagcagaacctcttatagaatgatagaattcctctggaatgattggataacttcatttcatccttgacttttaccttggaggatttcttaccccttttggcttctcaaatttgactattaaaatgttgcctttaaaaataggaacacagtttcaggggggagtaccagcccatgacccttctgcaaggccccctaactcaaggtagtttccctggaactgtggtttatggaatgtttcaggagtgtgaggaggtataatttaaggctgtcctagcaaggatacccttaaggatagagggcccagtagcatctggaggccagaaaagttaaactgaggcagtcagattagcttcaggctcaattaagctgatgggtcagcctgggagaaattgcaggatgactctcaatatcccctcccacccccacagcagccacgatctgtctgtctttaatcatgggtgcagtgaacctgttctttccaggtgtcttggccttcagtaaccttgttaggcttgtccctgaacgtggctaccgatccaaagacacatgatcagagaggcaattagagaacagaccttttccaaagcaagcatgttctgttgggcttagaagtttcatgtcctaatattataggaccctgtgcatctctctggagatgaggcacatgagtcatatctgtgattcttgcttttgtgtcaacatctcatgaataggcaatcagagctttggcaccaatgtattttcagttcatatctgatgtagttaaatccacctcctgctttgtagtttactggcaagctgtttttgatataagacatctagaacactgtaaatatataacatttttatttgtctattatacctcaattacgaaaaagacatctagaagcaacctcatcaagagagatactgaggccgggcatggtagctcacacttgcaatcccattactttgggaggctgaggcaggtagatcacttgaggtcaagagtttgaaaccagcctggccaacatgttgaaaccctgtctctattaaaaatacaaaaaagttagctgggcttggtggtgggcacctgtaatcccagctactccggaggctgaggcaggagaatcacttgaacctgggaggcagaggttgcagtgagctgagatcacaccactgcactccaacctgggcaccagagtgagattacatctaaaaaataaaataaagtaataaaaaagagagatattgatagctgttgttggaaatttcaacttccatctcacttctggtaactttttggaagtttgttgaacaaagtggaatacacgcacatacacacacacacatactctcttgtttgtttaaggtttaatgaaatagctgtcatataatcactgtttttgaaagaggagaattagttgctatctgtacattttgggtatgtgaactatttggatagaactctgagaaatgcattcagaacaacaaacaaaatcataggagaaatagctaagtgggaaggggcatataagagttgttgaaaaagttatttcttgagaaaccagctctaatgctaggcaagtcacttgctttgggggaggcctcagcttctctgtctataagattgcagcaggggtgtagtgggaatgagtcttcaacattccaagagattttatctactaatacgacagtcaaatggagcatgactttgtggaagcctctcctcttccacccagaggggccaatttctctgtcccagtgagatgttgacacttgtatgatccctgcttggagacttccctcttctggaacctgccctggctcaggcatgagggctgactgtcacccttcgataggagcccagcactaaagctcatgtgttggcagtgttcttgcgggaaggaaaaagaccagccagcccatttgttactgcacaagcaaacagcttctggtagctgtacagatacatgcactttctttcctcactgtgtttccatagacagatttagtgctgtagaagagtagagggcagtcacgggaaggagttcctgtttttcttttggctatgccaaatggggaaaaatcctcctatcttgtctttttagtgtcatcctctctccccttttcttcttctttataattctcatctctcatctctcctggaaatgtgcatgtcaagttcaaaagggcacaatgttttggtgaggaagaggtgggagaacacgtgccaggtgctaactagggtcatcatttcccccttcacagccagcttcctgtgaatgtgtgtgtgtgtgtgtgtgtgtgtgtgtgtgtgtgtgtgtgtgtgtatttcttttgccagcatcactgaatctgtctgctgtctggtattccaggttttggtttagggaaaagtaaaagtaattttataatcccagctgtcatttaagccacccctttgtgggtagcatatggtccactctctcagttcattgtcctaaagatgcttcatcagaaaggaataacttccaccccgttactctctgtccccttactctgctttatttttcttcgtcaatcctaccaccaccacccactgtttgaacaacccactattatttgtctgtttcccatccctggtagaataggagccccatgaatgaaggaactttgcttctgttgttcaccactgaatctctaaggtatggaacacacctggcatgtgataggcactcgataaatatttgttgtggctcatgggcaccttgcagagttaaggctgcagttgtttgtggaatttataagtggtaatgaatatttatctactattcctcttccaaggcgatcacacaataatcaggctttacactatccagttcttaggtcttccaagttatgacttgtgaggtatgttaattatgataatagaaggcagtttatttggttcagatttattgatgtgtaatttaccacagtaagacttcccctttacaaaagtatgatgagttttgacaaatggatacacatgtgtatctaccactgccatgctccttttcagtctgtcgtcccctccacccatgaccactggtcaccactgcagtgatttctgtccccttcatttcaccttttccagaatgtcatataaatggaatcatgcagtatgtagttttttgtgtctggcttatttttcttagcattaggcttttgggattcatccaggttgtcgcatgtaacagtagcttattcctttttatggctgagtaagtgtcccagttttatttatatatttatttatgaggaggtgtctcactctgtcacccaggctggagtgcggtagcgcgatctcagctcactgcaacctccgcctcccaggttcaagcaattctcctgcctcctgagtagctgggattacaggcacccaccgccacgcccaactaatttttatatttttagtagagatggggtttcaccatgttggccaggctgatctcaaactcttgacctcaggtgatccgcccacctctggctcccaaagtgctaggattacaggcatgagccactgtgcccagccccagttttatttattcaccagttgatggtcttttcgacaactaattgtttccagtttttggctattctgtataaggcttctataaatattcacaaatacctaggatgggatgactgggtcatataatagtactgtataaccttagcagaaactgtcaaactattttccaaagtggctcttccattttacaattccacagtgtattgagtcccagtgtctccatacacatgctagcacttttaatatttaatttagtgggtatgtaatgatatctcattgtggttttaatttgcatttctctgcagctaatgatgagtgtttctgcttatttgggaaggttttaatttagcagtctgttgtattctgtagatattaataacttcaaaatatcagtggcatttgcagttaaaatttccttaaaaaattggccaaaggtttccagcagtcacttctgccatgcccaaactgtatgaaacaaggctgaggtgtggagattgtcacattttggcaaggagtgatccacttgggtgactgatgagacccagagagcgtacgcctcgggcttgagggtgaggacgggcgggaagtcgactgcatggccctgctggccttgggaggctgcccagtccttagctaaagctggcagttatgggaaacagacttagattctattacgtttttcaggatgtcccaggagtcacctgggaagctcagcagtcctttgtgactttcaagcatatggtagaagctgctgaacacagagctccctctttggggataatttgcccaaatcatttaatcaggcttgagaaatgagttaccacaggtccaggagtgctgccacccttgaattctgacaccctatttctcctatccgtctcttaattaattaagcagacatccccaagtgcttacgacaagccaggacccttttgcatactaaggaaaacagggatgaaggaaacagaaatggtctctgctctgactcagaaggtagaaatcctctttcccagccaagtcttcctagggagcacgtaggaagggctctgaacccacgtgtcagttgcaggggaggatatcaggaaaggacattgaagaagtggagacctaagtttgagacctaggcattagccaggctagcagtgcttgaaaaagtgtcttaggacaagagaactcaccagtgaagtcccagtggtaggagagcgtgcagcatattctgagcctgtatacacatctccagggcattgcttagcaggtggggagtggcaagagagtaggctggagtcacagaagggaggccaggtagaccttggtgagcactggactctatgttcaggtgctgaggagctggcaaaaggttttaagtcggggagaggcatgttcagatatttggtctagctgagtaactttgggtgctctgtgacaaatggttgggagaccagtgaggtggcagttgcggtcatctaggagcaggatcagagtggcctattgactgggatgactgtgaagtgggatcctttccagccagtaactggaaatgtgtatgagggcagaagtgagtgtactgcatttgaaacattgagaaatctagtacatagtactgtctcttttatatcttttttttttttttttttgattttggtttgtttgttcactaacttggaaaactgatgtggaaatgtccctttggcttcagttacctgagcagaaggggccgggcattgccaaactctcctcttaggacagaattgctcccagtattgatcattgtgttctgagttgggggagcaaattgtgcaggaggccaggtcagtgccaaggtgggtgggaggaattggagcaggaagcttgcctaagtgtgcccagcaaagccacggtagaactttctactgtggctctatgctacttcttagcaaccttctccatgtgcttcctggagagtccttggagtcagaacctttttcttgaaacccagacactttacttccaagaaaatgctgtccaagaaaactcatccttcccttcttctcatgaacgttgtgtagaggtgtgtcttctcttcctttgagcttttccactcagggtttaggggaggtgatattctatatttgggtttggctctgggtactgcaacactaggctattaagatttcatccttactgctttgcccctcctatctttccagaaacccacaatggatttgctagaaataatggaacgtcctgtttggacaggatataaccatttctcagctagaggatattgttggaatgaagaaagataaatggggagaagggaactcacattgctttggcacttaaattaagccatgtactgtgttgggaaattatttatattatctcgttgaatccacagtagaacacagttgaacaccatacaaggtaagtattgtcatccttattttaccatgaggaaattgatgcttagagagcataaagccttggccaggggcacatagttgggaagccggggctaattcatgcctgggctctttctgatagttttccttttttaattgtcccctcctcattgttaccttggggatttcaagagattcatgtagcttctaaatcaacgaactgattcctggagagcagcttctgtatgagaaaaatctagctaattatttatttcagtgtctctggaatgcaagctctgtcctgagccacttagaaaacaatttgggatgacaagcatgtgtctcacaatgctgctctggttgccagtgctgtgctgccagttgtcatctttgaacaaactgatgcagtgctggtttaactcttcctctttttggagtaagaaactttggaggcctgtgtccttctagaagtttgctgagcaaatggtaaggaaaagaaataggtcctaaggcttgactatttcagagaatttcttgatttattggactgtcaatgaatgaattggaatacatagtggtaggctgtcttttcttctcagacactgcaatttcctccaatctcttgacttttctagaagttttaatccaagtccttgttgggtggtagataaaagggtattgttctactagagactgaccttggcatggagatctcatttggactcacagatttctagtctagcgcttggttttgtatccatacctcgctactgcattcttagttccttctgctccttgttcctcatgcccagtgtcccaccctacccttgcccctactcctctagaggccacagtgattcactgagccatttcataagcacagctaggagagttcatggctaccaagtgccagcagggccgaattttcacctgtgtgtcctcccttccatttttcatcttctgccccctccccagctttaactttaatataactacttgggactattccagcattaaataagggtaactgctggatgggtggctgggatacacagaatgtagtatcccttgttcacgagaagaccttcttgccctagcatggcaaacagtcctccaaggaggcacctgtgacacccaacggagtaggggggcggtgtgttcaggtgcaggtggaacaaggccagaagtgtgcatatgtgctgaccatgggagcttgtttgtcggtttcacagttgatgccctgagcctgccatagcagacttgtttctccatgggatgctgttttctttccagagacacagcgctagggttgtcctcattacctgagagccaggtgtcggtagcattttcttggtgtttactcacactcatctaaggcacgttgtggttttccagattaggaaactgctttattgatggtgctttttttttttttttttgagacagagtctcgctctgtcgccatgctggagtgtagtggcacaatcttggctcactgcacctccgcctgccaggttcagcgattctcctgcctcagcctcccaagtagctgggactacaggtgcctgccaccatgcccagctaatttttgtatttttagtagagacggggtttcaccgtattggctaggatggtctcgatttcttgacctcgtgatccgcctgcctcggcctcccaaagtgctgggattataggcttgagccaccacgcctggccgatggtgctttttatcatttgaaggactcagttgtataacccactgaaaattagtatgtaaggaagttcagggaatagtataagtcactccaggcttgaggcaaaatttacaaatgctgctgactttgtatgtaaggggaggcattttcttagaaaagagaggtaggtctctgggattccagtatgccatttccatcctcagtgtttttggccacctgagagaggtctattttcagaaatgcattcttcattcccagatgataacatctatagaactaaaatgattaggaccataacacgtagctcctagcctgctgtcggaacacctcccgagtccctctttgtgggtgaacccagaggctgggagctggtgactcatgatccattgagaagcagtcatgatgcagagctgtgtgttggaggtctcagctgagagggctggattagcagtcctcattggtgtatggctttgcagcaataactgatggctgtttcccctcctgctttatctttcagttaatgaccagccacggcgtccctgctgtgagctctggccgctgccttccagggctcccgagccacacgctgggggtgctggctgagggaacatggcttgttggcctcagctgaggttgctgctgtggaagaacctcactttcagaagaagacaaacagtaagcttgggtttttcagcagcggggggttctctcattttttctttgtggttttgagttggggattggaggagggagggagggaaggaagctgtgttggttttcacacagggattgatggaatctggctcttatggacacaggactgtgtggtccggatatggcatgtggcttatcatagagggcagatttgcagccaggtagaaatagtagctttggtttgtgctactgcccaggcatgagttctgatccctaggacctggctccgaatcgcccctgagcaccccactttttccttttgctgcagccctgggagccacctggctctccaaaagcccctaatgggcccctgtatttctggaagctgtgggtgaagtgagttagtggccccactcttagagatcaatactgggtatcttggtgtcaatctggattctttccttcaggcctggaggaatataataactgagacttgttttatttctgcagagggttctaagccattcacttcccagatgggccaataatgctttgagtaatctggagatcatctttaatgcgcaggtgaatggaactcttccacagagggatgtgagggctgtagagcagagtgaactccctgaaactcagacgtcagctctttgtctctctatctctgaacacccttccttagagatcccatctctaggatgcatttctctgtagttagtttctaagtctcttgttcctgttctgcctttatttttttttcctggattctaagccagtatccccacttggctgtcttaatgtagcttaacatgtctgtaatcaaaatgatcatctttctgagattcaaagggctataagggactttggagagaatttcattcagttttcctcaaactagaataatgcttgcactgtctgtaaaagaacaaaagtgtcaaagcatccttttgttcactaaatttccttttttattatagtgttacttaaatattaggaagtaaaagtaggtataaacttcttataggctgttattatacaactatatgacccatacatatttacaaattaagtgcagccaaaattgcaaaatcaataccattcaaattaataccttaaatgtggtgaggcagctgttgttcaactgaaaccaaattataagttgcatggcagtaaatgctatcatgctgatcattttgagtttggccagtctatattatcatgtgctaatgattgaattctccacccatttttctacttgtatgaccttaatttgatggcacctgttccatcctcatgagtttgctacaattatactggtgccaacacaatcataaacacaaatataaacttgggctttgaaatcttgtgccagaacttggctttaaagtaagcatttaaaaaatccatatgtgtttattagactttgtttagatgactgttgaaatgaaaacaaagtgtttaaaatcctcttagagaacttaaatataatccctcagcaatatgtatacagatcttcctttgagaaaaactgattgtgttcagcctctcatgttacaaatggggaacctgaattctgaggtctctagtgagagaacagggactggaatctgtggatcctatctgttttaataataattgtaaagtataatagataatattatattaataaaataaaagcaaacacttagaatgagcttccatgtgtgaggcactaactgattaggcattattaactagatttattccttttaaggccccgcgatgtactgttatttccacatgttgtagctggggaacgtgctactcagagaggttaagtaacttgtctgaggtccacaccactaacaaggagcacaggtagggttcaaatccagataatctgactttggagctggcactctaactcaatgtgcctaatcgcttttcagtggtgtcattattttgcctattctccatctgagaatattgaagtttctgactccttccttgcctttctccctgcctcccgtggttatccccaggtcttggtgttccagtcctctatgtccgtccttactcttattcctttgctacagtgtgatccagggctcctgccccttcttatcctggtagagggggcccacttgctgggaaattgtctccgccatggtttatccatgttgtgtgtccattagtgagtagtgggaagaatcatatcatgttggcaatgaaaggggggctatggctctggggtagtctagtctgaacctcttattttacggatgagaaagctgaggtacaaagcagggaagggatttcttgaggtcacccagccagcaactgagctgcaaccagaagctgagatccccaggactagggccgagcctcattctgtcccatcacagtgacttttcttccctcctccaaactatttttattttttatttttttgcagctgcttagcagcttgaagttagaagaaagggcagggaaaaggttttccgtgcttagccagggaaggaatcctgcaacaggatgtggggttgggtcattcaaattgggccagactccactggtcttgttgcttcttgcttggtattgcagatgggtttaaaagtgttaggattagagagataggcaggtttagccaaaggcagtttgtagccttgtggcagagttctttttaaagaaggaagtgggatgcaacaccctgacacaaaggggcttaagttgttataccactgcctgctaacctgttttccttaactctcttcctgatttctaaaggaagtatattttgctgaatcagaaagaaaagtgatttatttcaggttgctgatgcttagattgttagagttggaaagatctggcttgcatcttgtacagctgacagaactggggctcaggggggcacaggtgcccagagttggtcagtcaggaaagtagcaccagaaccagtctcctggtggccctacagttgcagacccttttttgctttgctctctgtgtatactaaagcttctatgtctctgaatctcaagttctgactggtagctactttccaatccacctggcttagatttctagattatattgtttagacgtcagaacctcttaagggttttggggccacttgttagctcacatagtgagaaccagccctgcccattaggtaggggaagaagttagcagtccatgatagctgttgcctgcagcgtatggatgttcattgcacagttcctgtctcctgagatcctggagtgtatacgcttggcctcagagcccagcacagagcctggcccttgggacatgcttagtaagtatttactgaatgagtgggaaatgtcttaaggcccattagtttgcaggtcttgaggaggctcccttgcactaggaagaatagaaagcatacataaagcctgtgtgctgccgccaggaagactagaaacgctatgttcagcctggagctgaatggtataccccagagcaaccctgttgaaaggcagtgcttgccttttcattctgtgtcctggtttgctggtaactcctgggtcccctgcctctcctgtacccccattgtgcagactgaggggggaccatcagccagggttagttttccgctgtttctgttaggcaaagaataaattgaattgagttgtgaaagttgggtgcaaagctcagtttgggtccaaagtaacagttaacttgtgtgggtggcaggtattcagtacaaacagggctggggacaggaaggggaagagaacttcagagctttcacgatcctcatctggttttaggctgatccagaggccaaggtccccatggaacaaactggacaaagtgagggtggccacatggcctcttttcttttgcctttattattaattttctcaaatagatctgactagtcatgtggctgggaaaatagttaattgtgatttttttttttttaaactgagtctcactctattgcccaggctggagtgcagtggtatgatctcagctcgccgcaacctctgcctcccgggatcaagcaattgtcatgcctcagcctcccgggtagctgggattatgggcacacagcaccacgcctggctaatttttgtatttttagtagagacatggttttagcatgttggccaggctggtcttgaactcctgacctcaagtgatccacccacctcagccttccaatctgctgggattacaggcatgagccactgcacccagccagagtaccactatttgggcattctttaatgaaaaagaatgaactatccaaaaattaaaactcctcatttatgagcttttagagaattttacagagtagatggaaactctctgcatcctttccccacttctagtttcacctgacacatttcttccctgtccttactcctgggccggcagcagtggtcatgattccaatcccagcttggccaccatctgcctcagtggcctaggaaaactcctttctccagagctttagttttctcttctacggaatgaagaaagttaaaacaaatagacatttattgtttcatttggataaatatctattaagcatctattacttgtggtatggttagctgggtatatagtggtgaagcagctgggcatgagtactgctttcgtagagcttacagttcagtgaggccagcagatgtgaaacatatcatcacacaaataaaaatataactatcaactgtgatgaggattatgaaggaaaaaatccggcaaactatggtactggtgttagatactagcaggtgtgggtagggatttcatttagattgacaggttgtcacattaaagctgagagccctgaagttcaagcaatggttagccaggcaaagatcagaggcttagagatagggaaatccattccaggcagagagactgggggtgcctgtcccctaggtcagggaacagaagaaagccagtggcactggtggagtgaataagactggcgggggatgagttggtagtagacatgaccagatcatttagggccaattctcctggggaaggagaatttaatttaatatttatttatttatttatttatttatttatttatttatttatttatttttcaagacggagtctagttctgtcgcccaggctggagtgcagtggagcaatctcggctcactgcaacttttgcctcctggtttcaagcgattctcctgcctcagcctcctagtagctgggattacagacgcccaccaccatgcccagctaatttttgtatttttatagagatgcggtttcaccatattggccaggctggtctgaaactcctgaccttgtgatcctcctacctcggcttcccaaagtgctgggattacaggcgtgacccacagtgccccctgagaatttaattttattttatgtgcaagaggattccctgaggtagtcaggccacattgtctggtgactcttgggatagagggaacttgaatgacaaaggcccaagaaagcaattgtaatcattacatatacatggaccattttatgctgttttcttctttcatttaacattatttagtgtgcgtgttcacatatttctaaatcatcttctgatttagaataatgatttctgatgtgtaggctgtgttttatagttttgaaagtaatactttgatatccattactttcttgattctcacagcaattctgaggtgtatgcgttgcaatttctgtttcacagatgaagagagtattgttaataagttaatggccgggcatggtggctcacacctataattccagcactttgggagaccaaggtgggcggatcacttgaggccaggaatttgagaccagcctggtcaatgtggtgacacccatctctactaaaaatacaaaaattagccaggcgtggtagcacttgcctgtaatcccagctatttgggagggtgaggcaggagaatttgcttgaacctggcaggtggaagttgcagtgagccaagattgcaccactgtactcctgcctgggtgacagagcgagactctgtctcaaaaaataaaaagttgctaagaggagggctgggatcttttggctccaaatctactgtgggatgatgcctttgacattcctgatagctgtgcagtaatccattaacacagtttttataagttcaaaccctgttgccaacatttagattgttccatgtgtgctgttacaaataaattactataaagattctatacatttaatcttttattatttttgtattatttctgtaggccaaaatctgaggaacaggattactaggttgaagggaaatggcccttgaagtgtctgatcagatgtctttccagaggatccaaccaatttaaatagccaccatcaatgcatgagactttgtagttcagggaaggcaggcctggttttaaaaatcatttcccctctctagcatttttctgatgtgatccttaagatttcactttagttttcccaggtctcattggcatgtatgctgttagggatgggtctaaaattaatttttcttcacattcatatcatgtcatcccagtgattatttaataaataatcacttgattaaatagtgattccttttctagttatttttgggacatttattaaaacctggatatggtggctcatgcctgtattcccagcactttgggaggctgaggtggggggattgcttgagactaggagttcaacaccagcctgggcagcatagcaagactccatctctataaaaataaggaaattagtcaggcatggtggtacttgcctggagtcccagctacttggaaggctgaggtaggagaattgcttgagtccaggtggtcaaggctgcagtgagctatgaccatactactgtactccagcctgggcaacagagtgaaactctgtctgaaaaaaaaaaaaaaaaaaaaaaaaaaaaaaaaaaaaagatgtgtagggagcaattttggagttattcatttggtcatttgatatgtagttttagttttggtgctgatagagcccagaatgtaccctgaatttgatgaacattctgatatatgggggagctcattgtcccccacttacctttttgcctctcagaatatcttttgatatttttatctgttttttccccattgaatgttattaccttatcaagctcaaaaaagtaccctatcgctattttaagttcagttgtgttaaatctataaattagcttgggaaatttggatattaaatgaactcatgaagaagcagagtttagctctccttaattctcatcttcctttatttatcctactacagttctgtggttttcttttatgtaagaagcacatgtttggctaagttaatgcctaggtttttttgtttatgtgtccattctcactgtggatagtattctcttttccccacattatattaatttaactggttttcagagactaatagcaatgctattatttaggagaatttaccttggttctgattaacttacccatacttgcaaatcatttgcagctttttagttaactttgtgagttctcttagatttacgaccatgccagaaacagaaaggatattttcatctcttcctttctgatgtttattcttcttgtttcctttttttatcccccattatattctcaagaatctctcaatactaagaaatagcgacttcatttttcagcgcggagtgcattattttggctaccatgattcagaagcctcttgcctaaggcccaattttattctgctagttttctctgttctttgtacatggcccttgcgctgccctaaccttgaattaacgtggctaaatctcaagaatttaagagcaccgtgactgtgtcctcaggctagggagggaaatgggttcacagagtgactggattgtggtctatgaacttcggcagccagcagcaaaagtcaggcatgaataatcaagtggacagtgaacatctgtagtgtgggagatgttggcataactatgaatgatgattcaagagtggtttgatgcatattgaataacatgatgataagtactagactctgtgctaagccttctatgtgaaatacatttaattctcataataactctagagcagtggttctcgaccggggccggttatccccctaccccaccccaccctcacccttccaccagggacataacatctggagatatttttggttgtcacaatcctgggaatgtatgtgctgatatttagaggttgaggtcagggatgctgctgaacttcgtagaattcataggagagtctctcacaacacctatctggccccaaatgtcagtagggtcactatcaagaaaatctgctctagcagtgcctgctcatattatccccatgttgaaatagcaagatgggaagtgcaaagtggtgcttcggtactcttggagcagctttgactttggtgagaaacgccttttaaaaacaatgtttcttcccatcttcccaccccatggggaggtgtggggttgggtgggtaggcaccaaagcaagatttagaagagttttctgtaggaatttataatggtaaaggatcaacttcatttccaagctatttatgagggtttatgtttaggaaaagtgctaagcttagagaaggaggagaaatctgattttattaatgagtgtagccataatggcatatcctggcagaagtcaactttggtttctagagggaggctattatgaaaagaaatacctggaacattcccctgggtttggaaggtgagttctaggttcaatgatgggaagaattttagaggtccaagataaaagggcaaagattaaattttgtctctcatgagttctctggctcaggtggtgtgaactttgcagacagtctctttaattcactcatacatgctagtctcccagctcagcaagggctttgagagagcaggtgtctgtatgctctggtaagtgaaggcaaagtgcataaggaggttggggtccataatggcgaagagaaggagcccttcagtcagagtggctttgaatcttggctctgccatttgccaatcttggaccattgggcagtgtattaactctttgaatctcagcttcctcttctgtaaaatgtgtataacaagagtactaattggattgtttgatgattaaatgagttaatgtgtataaagcactcacaaccctggtacatagtaagacctttcattattattatcatcatcaattttttttaacctcttttcctgatctgcttacactcaccagcttcagctgctccaaatggcttgtaagattttttgtttgccctttgctgtcagttgccatggggaagatccattcatttttttcagtcaaccaacatattttgagcatctgctgccctacaggatcctagatatgggggctgcagagatatccaggaacataagccttgattaattgggtcagatcagtgctcagcagggctggcaagtgctaggtttcttttaagtggcatatcttaaaaggtatatgtcctaaacatagctttgtgatggcagcatgatgggtacaaaagcacacacttaagtgtcagtagatctgggttcaaacattggtgcagtttcttatggctcgtaacttgttcaaacctcagtttcttcacttctaaaacggtaatgatacaacctacctcacagggttattatgaattaaatactggagatgagatacacaaaacgtcttgagtacacagtagctgcccaatattggctgtaagtattataaatctacaagctgtgaattaattttacctctctggatcctgttgatatttctagaccattccacctagtggggccatttcctacctgagtcacccgtggtgtcaaatagaatgtcatgtggcctcctgagttgggtagaattggctgctcatctcaaccccgctactgactatctctgtgatttacccttcctccagccttagccttgctacatataaaatcaagacaataatgtttcctatctcacagggttgtcctgaggattaaattaagtaattaatataaaatgtgccttgtacatattgggccctaaataaacagtagctactatttatccttaaagtacaaatggtagtttcagagcttcaaggctgatggctatttatcttactcatactctttgtttagcttcatttttttcccctaatttcattagtattttcttttctttttttttttttttttttttttttttttttgaggtgaagtctcactctgttgcccaggctggagtgcaatggagcgatcttggctcaccccaacctctgtctcctgggttcaaacagttctcctgcctcagcctcccgagtagctgggattacaggctcccgccaccatgcccagctatttttttgtattttcagtagagatggggtttcacccttttgaccaggctggtcttgaactcctgacctcatgatcaacccacctcagcctcccaaagtgctgggattacaggtgtgagccaccacgcccggcctcataagtattttctaaatttatttacagtcatgccatttaaaaggaaagttgtattcctgtctttgttaatatttataagtgattttattcagctacaagcttggaatggcatataattttgtattctgcttttttcacttaatattacatggctaatgatttctgtgtttcataaacattattctgatgatggcatgatatattgttgagtacatgtaccataattgaatcatttccctattgctatgcaattaagttgtttccaatattttgcaattataatgtttcaatgaatgaataactttatgcatatagctttttgatatcttaagttcagtttcctaggatgaatttccaggaatagtaattgggcaaatgggataaacatgactcttgaatacgtattgttaacattgctttcccaaagggctcaactgatttatatttccgtgttcattatcttttaaaccagctcatttactcaccaaacatttttaaagccattatcatgtggtaggcttagtaagaagaaagtgaccctaagggagaagcttatatataaatagggtccctggtgtaccaagtgctgatacagacacaaagtacctggggaaattgagatgagggagtcctggctcagctgggagaaaagttcattttcatagagtcatggttttgttctttggcagaaagaaaattgctttcttccccacccccacccccagctttattgaggtataattgacaaataaaaattgtatatctttaagatatgcaatgtgatatatatgtatatctcaacttaaaaaataagctacagaataaaaaggtgtttgctattaaaaaaaaagaaaaggctgaatgtcattcccaagcttggaaatttgagtatgttgcctctttgggattatttacagaaatattagcaagaccagccccatctttggtcttgagtactccactgtcagcatgctttcttccagagagggatccatttgcctttatttttcattctgttgtgccgtctatgcaaactattcttgatagttttatggtaacagtgtttttttgttccatgagataatttatacatgctcattgtggaaaatttagaaaagacaggaaagtattaaaaacatcacttttttttttttttttttttttttttttttaagagacagagtcttgctctgtcgcccaggccggagtgcagtggcgtgatctcagctcacagcaacctccgcttcccaggtttaagtgattctcctgcctcagcctcccaagtagctgggagtacaggcatgcaccaccacgcccggctaattttgtatttttagtagagatggggtttcaccatgttggccaggctggtctcaaactcctgacctcaggtgatccgcctgccttggcctcgcaaagttctgggattataggcaggagccactgcgccagccacacctacgttcttatcatcctagtacatccactgtcattatcttgctgtatttccttctgcccagtctcactctgatcatgcagtggcgtgatcatgcagtgatctcggctcactgcaacctaggccttctgggttcgagtgattctcctgccttagcctcctgggttcaagtgattctcttgccttggcctcccaagtagctgggattacaggcatacacccccatgcccatctaatttttgtatttttagtagacacagcgtttcactaaaattttgtatttttagtagagatggggtttcaccatgttggccaggctggtctccaactcctgacctcaggtgatccgcctgccttggcctcacaaagtgattacaggcatgagccactgcatccatcgccaaaaagattttttaaaagagtttaatgtagaaccatatcaaaggtctttggaaataaaaaacagttttttaaaaatatcagaaataaaacaacaaataaataaataaataaaaacacccaaaacaatctgaagcacgagcacctagcagaaaggttcaattatgatctattcatagagtggaatatcaagtagacattacaggacatgttttaagattatattttatgtcatgggaaatgctctcccagtatgatgttaaatgaaaaaacagaatacaaaagtatatatgctgcatagtctcaatattgtagagaaaaaatattatttatgtatgcatgaaaaaagacaaaagatgttaacagagatccattgttacttcagtttactagggattgtctctgggaggtaggattaaggtgatttatatttacctttttaaacttttctgtatttttttattttcaaattttccataaaaatataaggacttgaagatcaagaaaaaatttctgctttggctcagtgcagtggctcacgcctgtaatcccagcagtttgggagccctaggggagaggatcacttgaacccaagagtttgacgttccagtgagctatgatctccggatcgtaccgcctggacgatggagcaagaccctgtctcaaaaaaaaaaatctttgctttttttttttgtttgtttttgagacggagtctctctctgttgccccagctggagtacagtggcacaatctcagctcaccgcaacctctgcctcctgggttcaagcgattctcttgcctcagcctcccaagtacctgggattccatgcacccaccactatgcccagctacttttttgtattttcagtagagacagggtttcaccatgttggccaggctggtctcgaattcctgacctcagctgatccaccggccttggcctcccaaagtgctgggattacaggcatgagccactgtgcccagcccaatcttttgctttttttaaaaaaagaagacaaaaagggattttataccagtattatcttggctgtgtgactctgaagccacagttgtaagttataattactctgaaacacaaggccctgtgactcttttgggctctttggtgtttatcttgattacaacgttggaatatagaaatgaaaggaatgggagaggtgatagacttcaggcagtgtaactagttgtctgaacactactggctcaattatattgtgtctagtgatttccatcttgtccgtctgctaatttatcgcctggtaactcactgaggcagggttttcctttggagaaacctcattgttttaaccagtgtatcatgcttgtttagaagttcaatgatctttttaactcatcggagaagatgatgaccagacctggacagatggggaaggactttgcactctctctttacagtcctgagtgcacacaggtcaatatggaactatgtgtgaattttcattgtctttgagagccctcttctctgccccatagggagcagctttgtgtgcaattagaggagcaagggttgtgtgtatttagcacagcaggttggcctggtcctctcctctcaacatagtcaccacatacctggcactatgctaaggctgggaatgcagacagatgggtgcctgctttcagagtgctcaatgtgctgaggaagccagcaacagaaacagatgatttcaggagctccaggaaaatgctacaggaggagtgtgcctgggttactggagtagcacaggaggagggcttctagctcaggctgagattttagtaaaggaaattatgccacgatgaatcctgaagaatgaatagaagtgaaccagataaagcacgataggaagcatcttcccttacctaagggaagacacagaggtatatggaatggtatgttaaaaggttgggactccaaacagttctgttaaagcttagagagtggtgggagagactggagaagttgattaattagtaaatgaagttgtctgtggatttcccagatcccagtggcattggatatccatattatttttaaatttacagtgttctatcttatttcccactcagtgtcagctgctgctggaagtggcctggcctctatttatcttcctgatcctgatctctgttcggctgagctacccaccctatgaacaacatgaatgtaagtaactgtggatgttgcctgagactcaccaatggcagggaaaatccaggcaattaacgtgggctaaattggacttttccaaagatgctgtctttgggaaacatcacacatgctttggatcagaaaacctaggcttctaatttgttgataaggcatgaactcaggagactgttttcagtcctagtgaatggtgataattgtaattataacagtagacaacatctcttttacacattttaaatcatgaaaatagaataaccttactgataattttagaaagtggtgattaaaagcacatttaagataatgccttaacacctagtcttttccatatgcatgatgtcttaatcacacattgcaaatcatggaacacagaattttaagcagcatttgtgtagaacttctcagttttactaatattattttattttattctcataacaaccttgaatagaactcagatcatctgtcaatcatgtattttgataacagcctttacagtgagcatagaaaatacagtagtggctaacaacacaggctccagatgtcaggttatctgggtatgaattctggtgtcagcattcactaagcatatgaccttggacaagtgatttaagtttcttttaaacagagaatagtaatacctacctcatattattattgtcagtgtatcatcttacaatcacagtctttctcttagggctgggctcagtgggtggattgacactgcagaaatggccagatctaaaggatcaacatttacgtagctgggaaatgtagctgggacttcagtttcactgccctagtgatttttcctaccactaagcagctcagtccatacccctacgagacccacaagcttatgagatactgttcttccaggaaagcagtggggccagggccaccttttaattgtgtttcttggcctggtcccatctttctcacaatatatagcaacagttatttacttgctgattttctaatgcacatcacacatagtcatattaaacacacacacacacacacacacacacacacacccctcaagaaacattttctgagacgtgatttcctgatttcatcaaaaaagaaaagagcgggccaggcacagtgggaagtcaaggtgggtggatcacttgaggtcaggagtttgaaaccagcctggccaacacggtggaacctcgtctctactaaaaatacaaaaattagccaggcgtggtggcgcacacctgtaatcccagctactggggaggctgaggcaggagaattgcttcaacctgcgaggctgaggttgcagtgagccgagattgcgccattgcactccagcctgggcaacagagtgagactctgtctcaaaaaaaaaaaaaaaaaaaaaagcataaactgaaatttatatgcaatttatatgcctgtgagataattctgttttctcttttggaaccccaaagagatttttttgattgatgagcaaatacattttagattttatttaagcattatgccaagcaccactgaagtataagtttcaagggcaaactcagttttttcatctactagacgaatgattttctggaatgattacaagcaggcaagatggtgtagtggaaatagcaaatgtcttcggcatcagacaagttggggtttgtttgtatcctgcctctgcccttcaccgaggttgtgatcttgggcagattgttgagttttaacctagattcctctgactccagatcataaattttcagaaaagttctgaaattcttgtatatactgatggtaaatgagacttttccttacatctatgcacttctttgtttgtttgttttgagatggtcttgctctgttgcccagactggagtgcagtagtgcaatctccgctcactacaatgtctgcctcccaggttccagtgagcctcctgcctcagcctcccaaatagctgagactacaggcatgtgccaccacgtccggctaatttttgtatttttagtagagacagggttttgccatgttgaccacactggtctcgaactcctggcctcaggtgattcgcccgcctcagcctcccaaagtgctgggattacaggcatgagccaccatgcccggccatatccatgcacttcttgcaaccttaccttcttttctcatcaccctccagggacctagttggaagagcagagttaaaagttaaggtgaaacttggagaggtgtcttgtccctaggaacaaaggactggtttgaaattctctgtaaatcttccccagttcaaaccagagttatcaaggtcttaaaaacttccctgggtcctgagagcccattatattatttacttgtcttcctgtacacccactgcctagtcctgatcctacttttgtttgcaaataggatggggcacaacgtacaaggaagggcctttgccacccctgctaagggataacctgaaataccttcaccatcactgccctgtgctgcttttcacctatgccagtctgtctacagtgccagtgtctcctggcattgaaaggggagaatcttttggtcctttgagtatttggttgggttacataaatctccctgaatgaagagcagctgacttaggcaaggggccttgtttggttttccttgaactattaacaggaagatagggagattaactgtgtaaatgttcaataggccagagtccctgcagagggtggccacagtgatcagatcttatcacatccttgctttgggtgttgcctctctggttggagtatggatagaaaagaaagaaagaccctatattgaaatgcaaagtgcagcaagtcctgactttggattaacttctcagcccatttgcatgaaaataaaaagatgaataaaacaaggttcccactttggagggaggtggtagctgtgagatggaaggagtgttcctgctgggcaacagcagagtaagtgctggggtagattcactcccacagtgcctggaaaatcctcataggctcatttgttgagtctttgtcctacaccaggcactctgcaaaaacgctttgcctgcaaggtctcatgcgatgctcaccacagctctgtgaagttaattgtacttttatcaccattttacagatgagaaaactgagggtatggggtcaatgacttggctaaagtcactgcttagcaagctgcagggactggatgtgaattccaattggtttgactccaaagcctgtgaagctacttgttcttcaccacctagagctgtggttcttgataactgtgaactcttttggggtcacaaatagccctgagaatatgatagaagcaggagctctggcctttctgtccatacctgaacaggtccttgggttaagagcccctcgtccagggcctattaatcttgatcctcataagcagcatccatgtattacggccgcaaaccaaactgtgccagaccgaatcctaggaccaagcccaaatatgtcccatcatccttttggtaagaagctcattgtaagaaagaaagaggagagcaagaggatgacctagtgcatggggcctcattgttttaattagtgacaaaacaacaataataacaacaaaacccccgaagcttcacagatgacatcagaccccaagcctgtgtgtttttcaggtgcccttgaggagctttgtagctggcagaggaggtgaaactgacaaatgtttggcagatggaggagagtaccagaggggtttgagatgagctaaattccaatctaaccgcaggtgtgaggaagaggcttggattgggaccatggagatgggggttctactcccagtcacgccagctgactttgcgagtgttctttgtcagtcactttatcttattttatttatttttatttttttgaaatggagtttcgctcttgtcgcccaggctggagtgaaatggcgcgatcttggctcactgcaacctccccctcctgagttcaagcgattctcctgcctcagcctccagagtacctgggattacaggcgcctgccaccaagcccatcgaatttttgtatgcttagtagagacagggtttcgccatgttggccagggtggtcttgaactcctgacctcaggtgatccgcccaccttggcctcccaaagtgctgggattacaggcgcgagccactgtgcccagcccacttcatcttaccgtagttacctccttagagtatgaaaaaataggcttagggcatccccaagtcccctctatgtctgagagctgaggctggctgtcaaagaggaactaaggatgccagggactttctgcttaggacccctctcatcacttctccaacgctggtatcatgaaccccattctacagatgatgtccactagattaagaatggcatgtgaggccaagtttccacctgagagtcagttttattcagaagagacaggtctctgggatgtggggaatgggacggacagacttggcatgaagcattgtataaatggagcctcaaaatcgcttcagggaattaatgtttctccctgtgtttttctactcctcgatttcaacaggccattttccaaataaagccatgccctctgcaggaacacttccttgggttcaggggattatctgtaatgccaacaacccctgtttccgttacccgactcctggggaggctcccggagttgttggaaactttaacaaatccatgtaagtatcagatcaggttttctttccaaacttgtcagttaatccttttccttcctttcttgtcctctggagaattttgaatggctggatttaagtgaagttgtttttgtaaatgcttgtgtgatagagtctgcagaatgagggaagggagaattttggagaatttggggtatttggggtatccatcacctcgagtatttatcatttctgtatgttgtgaacatttcaagtcctgtctgctagctattttggaatatactatatgttgttaatgatatcatgcagcagacgtgcatctgaatgggctggctctaggagctagagggtaggggctggcacaaagatgcatgctggaagggtccttgcccataagaagctgacagccaaggctaggggagttctgtcttctctgcatcaggtcacctctctcacctctgtcactgccccatcagactacaatgtctgcaggtctttctcccctgagtgtgagctccctgagcaaagcaggatgctgccccttccctttgtattcctggctcctggcttcagtgcctggacataagtatgggcataataagtgtcccccaaatgagacattgaggattcttcaaatgcacaggaccgtgatgtgagttaggacggagtaaggacgatgggatgtggctcaggacaatcctgaggaagctgcagctgcggcacgcagggccacactgtcatgttcatggaccctagactggctttgtagcctccatgggccccttccatacacaaatattaaaaattatatttcatgactgcattggtataaagatgaatataatccagaccagattcatgattattcatacatttttagtgtattaacttttaattctgcttttaaaataaattaaaacattctaatatgcccttaagagtatcccaggcccaggccactgagcctactgtggttcatggataagttggccctgggggcatgtgtgtgcatgcatgtgtgtgcacatgcatgatgagccgggccttgaagggtggtaagatttgggtgtgtagaccaatggagaaaggcatttggggcagtgatgatgggtgggggagggaacatggtgatgaatggagctgggtgtggggagccatgggagtgggttagggccagcctgtggaggacctgggagccaggctgagttctatgcacttggcagtcacttctgtaaagcagcagaggcagttggcctagctaaagcctttcgccttttcttgcaccctttacagtgtggctcgcctgttctcagatgctcggaggcttcttttatacagccagaaagacaccagcatgaaggacatgcgcaaagttctgagaacattacagcagatcaagaaatccagctcaagtaagtaaaaaccttctctgcatccgtttataattggaaattgacctgcaccagggaaagagagtagcccaggtgtctggggcttgttcccattagatcttccccaaggggtttttctccttggtggctggcctgtggggcccctctccaggaggcattggtgaagaaactaggggagctggttgccacagacagtgatgtactaatcttctctgggaagacagaagaaaagtccccagggaagaatactacagacttggccttagggacagctaggggtgcagattgctgccaactgcattttttctgaagttggccatatggttgcagtgaatggatttatagacagagtatttctgtgcatataagagcaattacagttgtaagttgatatggataagtgaaagttaagcacttctttctaaaaagagaatgcaattcattttcccctaatcatttcaattagtctgatgggcatttgaacttgttgtctttaaaaagtgaaatctttacctctgatctggtaagtatccaggcaatttcttgtgtgccacccaggaggtatctggggagtgggcattttctgactgaggcattggctgccatagcatcagagcagccttccaggcagtggcctggcaaggggacagaggctggtgggagcagctggctgagtgcagccagtaatggcatgtgcatggtctgtagagaatgtagaagcaataatgaagccgataaaagctggtctgcattttattattatcatgcgccggtggttctaaacaatgtcagtgataaattactcctccccatcatggaccaatggctgccactgctccagggaagtgctttttattccgtttggtgtttagggagggatggagttggctggcctttgctgaaaggcctaccagtttgttttctatttggcaaaagaagaaatgataaagttctagagtttaaaccagactcagatttgagtttttttttttttttttttttttttttttaaggctacagaactgtgctttccttgggcagtaaaagaggcaatgggcaatgtgggacctgatgacaaagggaagcaaagctgtcttaggggtggcatggaggaggtgctgcttcacagcagagagaggtatggctgtgcttggagtgtccacttagacaactcctggctgtgcagccaggccatcgagatgctgtttccttgacctgcaggtcctggtcttgcacatggatgtttcttctggtgcaggagacagaaaggtagcaacaacccctgatcaaagcctcagtccttccttatttactggagagcccctgctgattgaccagaggcacagctggggatatttcctttacctctgtagcaagagacagcgtggtgcagaggaaagtgctagcatacattaccctgtggctgcatgactttgtgaataggttagttagcaccctttcagccacttcttcttacctgttaatgagataaaacatgtaattgcttaaaaacagtatttggcacataggaagcacttagtgaatatgaattatgattttttttggagtggtgacatctcaaccaagccatttaacccctcagccttactttcctcaactataaaatagcagctaacttgaaatgtaaactataaaacctaatgtagtatctggcacatagtagattcccaataaatgagagccagtattctttctaagacagtgatgcatttctgagcacctggccttgttcttctgccttgcaatttatgcagcagttgaaatagactggctgatgggggtaagttgtcaagcagactttctgatcttagtggaggagactgccttaaaacaacactaatttcctttttcttttcttttcttttcttttaagacagagcctcgctctgtcaccaggctggagtgcagtggcgcagtcttggctcactgcagcctctgcctcctgggttcaagcgattctcctgcctcagcctcctgagtagctgggactataggcatgctccaccatgcccaactaatttttgtatttttagtagagatgagatttcaccatgttggccaggatggtctcgatctcctaacctcgtgatctgcccgcctaggccttccaaagtgctgggattacaggcatgagccaccatgcctggccttctttgagaagctggagacatgagttaagtggtgaagaagccaaatctgtatctaaaaaccctacagtagtgtgcagagctctgaggagagaaggtcccttagattttgagtgtattattatgtcagtgcttgttttacatctctctgttcacgcagtatgtccccttttctgccttgcagctgtttcttaaattctttctttctttgcttgtcttgcagcacaaaacaggcttcagtatagggggaaatgcacagaaacactgccttttcctacaggaaatcagtaactttttactgattttgtttttatttacttattttatttgtttaaatttatttttagttttttttttttttagagacagggtctctttctgttacccaggctagagtgcagtggtgcccttagagctcactgagctcactgcagcctcgaattcctgggctcaagtgatcctcctgccttagcctcccgaagggctgggatgacaggcatgagccactgcacctggccaactttttgctgattgcgaatagcactcttgtcaatttcggagagaagctgagactggcatatgtcagtatggatccccacttagagacctgtgtttatctgcactgacaccccatcacagcatgatgagcttggccctcctgtgctgtctctcccagggctgggaggatccttgaagctgatctggtttggagctttgtcctcattcacctcctttaccacacacccaccttcccagggcggggatctaccactcactaagtagcccattctgggtgttgacagctctaattgttagaaaatattcaccaccctgttatgctttctagagaacaagtctaattctgttttccttgaaatagtcgaagacagctctcatgtttttctttccctgttttcccaaagtccatgattttttaggcaaaatggcctcctttcctcttatggaatgtttttcctccccatttctgcctctcctctggttgtgtttcagtatgtctgtgtgcttcttgaagtttactggaaattatgaaagtattctggcacagaggaggaagggatttttgcctcccttgttctgagtgctacatttccgttaatgcagtctgagattgtattaggcattttggcattcacgtcaccttgttgactcatattccatgtgcactcaaacaaaattgtgattattttaaataggcagaattgcaagttacgtgttctccatttctttgttgtattgttggctttttgaactaaagggaaaaatgtcttttttctgttttacatgtttagattccctatgctatcctatcctcccaaaaccattttagattctgattttgccatgtattatatctgatactcctttctcgtcatctagagatgtgataaacaactctctttggcctcattccagtcatcgataactgtgggacaaagacttgaagcttggatcagtccagtggagactaaccacccctgtagacccttttttcctcaactataaaatagcagctaacttgaaatgtaaactataaaacctaatgtagtatctggcacatagtagattcccaataaatgagagccagtattcttctaagacagtgatgcatttctgagcacctggccttgttcttctgccttgcaatttatgcagcagttgaaatagactggctgatgggggtaagttgtcaagcagactttctgatcttagtggaggagactgccttaaaacaccactaatttcctttttcttttcttttctttcttttttttttttaagacagagcctcgctctgtcaccaggctggagtgcagtggcgcaatcttggctcactgcagcctctgcctcctgggttcaagtgattcttgattctgtagacactaccactcaggcctatattgtaatcagtgctgggccactgggctcctgcttctgtgatccagttgggaagtttatcttgttcttcccttcagcttgcatctgctaaattcgctggactatacacaggtgatttgtagatatggggatctctactcaaatactctcatgatttccttggctagagcatcattttatttccacttattggaagagaccttagagaccagttagttcatttatagataaattagttgattctgtcattcaacccttatatattgagcgtctcctatatgcgaatcactgttctaagtgccgagacacagaggtgtccaaaacaaatatggcccctctccatatggaatttctattctagagaagaatctgacccagaagggggaagtgactgtcccaagtctacacaaccacagaagggatattctgggaataaatcacggctaaacccccctgctgctccaggcagttctccttctacagtgctctattgtgctgttttaataatctttcaactgggaagaactcccatttcaggaattaagccgtggacaaatcttttaattatccttgaaatcatcctaataagaaatccaaggaggaagtcttacagggtgcctcacccacttttctcatcactggaactttttagacattttattattttcttcctaaaccagagtacaggcacacaagttgagtggtgtggtggctaaattaattaatgtttgcaaggcagtgtgagaagcattcattcatcttaaatacctatggtgactgcaactcagatgtaaaaattggataaatcctcagaaaccctagggaaagtgacatgtctgtattttgtctctgtgagatacagactggcagagataagtgtttctctgggtgagttttgtgtggtatctgggatgattttaggcagtacgtggatgagaacttttaattttaacccacatccaattgcaatttcatggaaattattgcttaggaggatgttcaacaggaaaaatataattaaagttaattcaaaagaaacattttctgtgaatatggtaaaacttgtgagagtagtttgtaaatgattgaagattggaaaacattggtataagagtgagtgtggggttttgtattaagattcattttgggaagaaatccatgctgcatccctcatgaagtgtgaactttgggcatgtgttgattctttctggcccagagtttacctgaagattagctgccctgagggtcactgagcattaaattagatgatgtctgtggatgactgatagtgaagctcatagcccacagttgacacataataaattcgagttgctttgcttccccttctgttcctggctgactgtttggcctttgccacttgttcggcctctctgggccttaagtttctttgccttgaaattggaactttctttggtgaaacaaccagaaaatgcttcagcccagaaacttggtcagtacttggatgggggatcacctgggactacccaaggatgtgggctgtctgctagactatagccccttgagggcaaggtgggcgccttgctcatggttccatcctaagccccagcacagtagtgggtgcatggtgagccattagtgaatctttgtggaatgaaggtgggagaaaataaaatacctgtacttcacagggtattgtgagggtcaagtaaaagtgctttaaaaaattgtattatatagtttattcccttgtgttagcccaggtcaacagagcctacgaataataatgatgacagaagttcttcaaaaagtcttggccttctttctttcacaaaattgccccccagagctttctggaagggcagccatgaacccagaggcctaaagtagatttactgggaagctaaaaatatttactttatttttcatagctcctttcaaggtcctctctgggggtcttagcaatatgtttacacagtggtatgtttttgtaaggtttgcaaaagtaagattttttaaaaatactatcttgttttaaaaagagagccccctaccaacttgtgtcagcctcaggcccccacctgcatctgctcctgccagggcatggtggggcaagaagcactgctccccttccaaagcttccttccttgccctggagtcatcctcactccccactccaagccacctgccatcgctgtgccccctctctggtgaatctggcattcttaggtgggctgagaagcagactggcccaagctaaggcctttctgatggggttgttgctgctgagaatcatgactgggtgggagaaggaggtgaccctttgctgtcttatttttactgtgtatttccttttcagctacttaaaatgtattgcttagtgatacctaatgggttcattagcctgcttcctactgaacatttccgctcaggcatccacttggtcccaaggcctgctcctctcccatattctgaaatctggactacagactctcattcaactccaggttgcactgtggacacagtcccctcttgagcaggtacctccttgcagtggttgggacgtcctacttggctcatagttgggaagtgcatatgctggagctgaagcctcttgccttcccgggatagggcgtcctcacatcccctctgagaagttccccagcttccctctgttccccgtttccacacttagcgaggctcttgtccactgctacatcccccatagccagtccctcagccttgccattgcttatgctggtctggaaacaattcctagacttgtggggcatctggggaagttctccatctttttttagctggcatgacccaagtggtgtgggcagggctgtggattctatggtgtggctggaagccaggtagcctctctctactgtacatggaactcagcaacttctgagtcaagcaagatcttagctctgcaggtgtcttgccctgtccaaagttatggccacaccagtaccttttaactctagaagcccagtaagtgttttgtgggaccgcaaagatcattttctagacctgctgaatatgcctagaacgggtagggatggctttcacgctgttcctagggctgacaagtcacacgtttctgggggtacatacacaccgcggtccctgtgaatggcactctccatgagaactgtgatgatttgagttgaatagtgcacagcctacatggttctctgccatggcctggagttccttatcttgccttctccagtgaggactagggctgcaactggcctactttggctcctgacttgggggattctgaaataccttttttttttaaggttgtggagctctctgaagcttataaggattttgccaggaaaagataagaaatatctttgggcattttgtcactgtgctggagatgaaccctttggaggacatatcaccttgttgaggtcaaggggcggaaagggacaggactggcagagagatccggggcagcagcctgccatcccgactgagtatggagtttctctctcccttcagctgcacttttgtgtggagtcagtggctcagctgccacttcccttatgttcatggcatgaatctggcttgttaggcctttcttttttttttttttttttgagatggagtctcactctgttgcccaggatggagtgcatggagtgtagtggtgtgatctcggctcactgcgaccaccgcctcctggattcaagcgattctcctgcctcagcctcctgagaagctgggattacaggcgcatgccacaacaccctgctaattttttaatttttatttatttattttttttcaaggcagaagaatttttcttagtacagaacaaaatggaatctcctatgtctacttctttctacacagacacagcaacaatctgatttctctatcttttccccacatttcccccttttctattcgacaaaactgccattgtcatcatggcccattctcaatgagctgctgggtacacctcccagatggggcggcggccgggtagaggggctcctcacttcccagaaggggcggccgggcagaggcgccccccacctcccggacggggcggctggccgggcgggggctgccccccacctccctcccggacggggtggctggccgggcgggggctggcccccacctccctcccggacggggcggctggccgggcgggggctgccccccacctccctcccggacggggcggctggctgccctgctaatttttgtattttcagtagagatggggttttaccatgttggtcaggctggtctcgaactcctgacctgttgatccacctgcctcagcctcccaaagtgttgagattacaggcatgagccactgcgcccggctctgtttttttgtttgtttgtttgtttttgtttttgttttgagacggagtcttactctgttgcccaggctggagtgagtggagcggcacgatcttggttcactgcaacctctgcctcccgggttcaaacaattcttcctgcctcagcctcccgaatagctgggattacaggcacttaccaccaggcctggctaatttttgtattttttagtagagacggggttttgccatgttggccatttgaactcctgaccatctttgaactcctgaccatgtttgccatgttgaactcttgacttcaggtgcgttggcctcccaaagtgctgggattacaggtgtgagccaccatgcccagcctgtttggcctttctgatatggctctgactaatctttttggaaattagtccccagggttatactggattttacttagggaaaagggtcatgcctctctggctgtcagatttactgatagtactaaggactcagtggggtggacctttgattctggtttgatttttgaaaatcaaaaagacgtgagctccagggagcagggtggctttggtgacatggcaagatagttggctgtggcagggagttgagggaagtgggtagaaaattaacatcttgtaaatattccctgggaaatataccttcgtgttaagagaacagacttggcagccagatggcctaggttcaaatcttggcttgatgcttatcagctgtgtaaccttggataattccatacatctctgtgcctcagtttcctcaaatggaataacaatagtacctccctcaggactattgtggcaaattaatggacgaataaggggaagcacttagtacagtgcctggcccagcataggtaccaggcttgttcttaagctcactgcatttttacaatcatcataaaatgcaggggatacacacatgaaggagccgaagttcagagaggccaagtaacttgcctaagaaagcacagctggcaaggggcagtaataggaccagaattccagtttctcgtgctctgttgttgttatatcctaaagagagcagctctgagtagccagaagcttccctaaagtcacaggacatggggcatgggctggctgggatgagaaaggagacaagagggcttctgaaagaaatgccagattcactccacttcctggcttcaggcaccgatggaatgtttcccaaggcccatctagaaagaacatcctgtgactcacagccacttctcattttctgtctgaaccccctcacccattcaggcagctgctaaagttgaggttacagcctcagactatattttctgtccttgtggaaccccagtgtgtcatcttgttgggagatctggtgatacatgtgtcaacattatgtcatcaaaatggaaattctttgaaatctttaggtgattgcaattcacgttctgtatgtatgcacttgtcaaaagttttgatttgaggccttagaattttatatttggaaacctttccactaccatgagttttcccagacctgtcaaagccaggctgcatctcagaaaccaggtctttgatttccatccagggcaagggcctgggcccagctgggctgtaagcaggtgggggtggggagcaacgctgcactgcaatgttgaaatattacttgaactaaatcaaatcaaagatcagctttactcagacaagaatagaaaacacaattgcattcgattacagaatagtgtgtatccccacaaatatcagactgcctttaaaaagttttgaattgttaacatcaagaacagtgttgcgtgtctcctgcttttccagcataaggtttatttattctgtgggtggcaaagagcaatttgggagtccagtttgtttctcattgaaagctttcccatttctggtcctcttgtcactgttgcattgaggcaccaaaaggcaatctcagtgcgacactattcaacagactaagttgcaccggataatgataccattttacatttttcatatattattacattgaaggcttcaaacagcactagcaggggcaaattggtattattatctccatttcattgatgaggaaaccgaggctcgaaagggtaatgtctgttgtccaagattaaagagtaaagttgtacgttgaatcggggtctgactcctaggcttagcattttctccccacactatgctgccatgttgcttattccaacattaggaagcataggtgccatccccagcttttgaggccaatatcacgatgaagcatttttaaaacatctcattaaattgctgatatagtggaaagaaccaaagctttgcagtcaaagctgtttgggttcaaatttaccacttgtttgttctatgaccctgagcaagatattctccagatctgtttcctcatttgaaaaatgggaataataatacgtttctttataggctgttcttaaagattctggaaaataatgctaatagtgtgcctaatgcttggtaaatatgagtcacttttctgtgcccacaaagcactactatgtcccttaataaattttgttaattttaaaagttagaaaaaaattaaactatttatacattgtgtatgttaattcttccctagaccagccttaggaagaatctcatccccaacttgtaaactcatctttttccgttctttttgtgcctggacttctcagggccctgcaggctgattctagtcccatgttgtgtggtgtttgaagtgtctggtcccttttttcagtgagagaccagctcatccttgggaactgaatgcctcaaactctcttttctttttctctcttccccttctgtttgatgtagtctttcctgtttctggactctgtttcttcatacttcctatctcttaccttcttttcactccttttgtcttccagctgtcctctctcatttttctgcctctctggtcttcaggtagagttttcatctcagctatcttcttgctttttctgatgttggttctttgtttcttcttctcattctgttcaggtccaaaattcatttgggtcaatgttatgtcttagtgttatcttccatttccttctgagcttcaaagccaggctgactgtgcccttccacgccctggccagtgtgaccaggacatcctttccctctggggctgcactggctctttgggggaattgttaccattcagggtcttcaaccctcattctagggacttccagtaacttctcccaccttccctcttctcagtaagacatgggtattgtcttattctgtttctgctgctagaagaaaattctcgagactgagtaatttatacacaatagaaatttacttctcacagttctggaggctgggaaatccaaaatcaaggtgttggcaggtttggtgtctggtgagggctgctctctgcttctaagatggtgccttgttgctgcatccttaggaggggacaaacgccatttcctcaactggcagaagggactgaagcctctccctcaagcccttttataggggtcctcattgtcaggcctctaagcccaagccaagccatcgcatcccctgtgacttgcacatatacgcccagatggcctgaagtaactgaagaatcacaaaagaagtgaaaaggccctgcctcgccttaactgatgacgttccaccattgtgatttgttcctgccccaccttaactgagtgattaaccctgtgaatttccttctcctggctcagaagctcccccactgagcaccttgtgaccccctgcccctgcccaccagagaacaaccccctttgactgtaattttccattaccttcccaaatcctataaaacggccccacccctatctccctttgctgactctcttttcggactcagcccacctgcagccaggtgaaaaaaacagctttattgctcacacaaagcctgtttggtggtctcttcacacagacgcacatgaaactcatggtatctgtgaggggccctaatgctattggtgagggcactgctcacataacttaatcaccccttaaaggccctgcctcttaatactgtcacattggtgatgaagtttcaatgtatgaactttgaggggggacacgttcaaatcatagcaggtgtgctattgccttactagcaaagtaatctgggggaagatgagtaatgtctcgttccacccctgattccagtgctgactgattctggagtggcagagagggttggaggctcaccgctctgctcacccgaccctctggccatctcctcttagaatgcaagggcagggattttgttacacagcgcctcttttgttataggctagctcctgccttcaaggagcactgagaaaaatattatccctttgaaccacaacactagtattttgggtactgtagccattcagaagtttgttgaactaatacaagtttatattatttgtaaaatactagaaggaatgtgtggttcctaaagttatggtattcccattggttgaaagagaagactctggcttcctaatgccttggaaggttcagggagcataagcctaaatatcctggtttctcttgggaattcttcacagcttgtcatctatgactttatccacatttattttgaacatgtttaattttcagcttgtattttctcaaggagtatgtgtgagtcagcattcagagtacttaacacacttagtgtcattagtgataacttaacccacacgtataggaagctagacctccatttacagaaaaatggaggctcagagagcctaactgactttcccaaggccacataactggaaaattctggaactgagttttttcaggtatgtcttggtatccctcggtgagccttctctgtagagaaggaagtgtctcctgggttggaaagcccaggccgggatgaacagcatgggtgtccttaggctgtgtgtaccacacacccctggcctactctcccctgctctaaggagtcacctgaaggagcagctgcatcaccccgcctcaccccttctcctcagcacccaacaaccaggtcttcccagagagtgctcagctattggtgaagcaggcatcgtctattcttcaagaagacagcagagcatcaggaaaacaaaacaccaaaaaaataccataaagacactggagtgtatttgttaccagcccttgtataacagagaagtatttcaaggtcttatttgtaaggctggacaagctcaggctgattaaaaccacgagttagaatttgtctcccgctcccaggccctgctcagttgacagctcctagcaggctgggaggccccaccccacccccaccccaggggtccattgaagaagaccatctgggcctgggatgctgatgtgattttccctacttctccttttttttcatttgcctcctccacccacttctaaagcagctgattgctctggttccttttcatgttgagcaaaagagaagacagatcttgaaacctgagctggggactggagggcactgaccgagagtaaccccgtctggctcagctcagctcagcaaagggctttcctcctccgccttcctgagctgctctccctcctctcctttcctccttctttcccagcctcccccaagctccttcacccctctcttccctctcctccctcctcccaccttccttgtcctctatgctcagagaactgaaggaacactgaatggcctggaaagcaggacctcgcccccaccccgcgtcatacccctccgcctgcacgtgcaaatgtgttcctcagcttggtcccagaggcctggacctgggtcccagaggtcccagctggttccccggcttggtcccagaggcctggatgtgtggcaagaagctgagggttctgcttcgtttcttccagcccacaaacacacatgtcacctgttttttgttctttttcctttcctttgccccactttacagaagctcttggctaattggtaggtcactgtttgctcctccaggcaaaaccaaggaggctgagctcagcaggtcaagtattttggtctgtattgaagagactgtggtgggagagccctcttgaccttctgctggatagtgactttctcttctgctggcagcagtagcccagctccgcatcctgtgacagaggtcataccttccagttacccgagcgaacacttggagcaagtcagctttttcccctgaaacagcacgttcacgttcttgatctttggtttgcacaacaacctgtgaatgttattagccccgttttttttgtttgtttgttttttgagacagagtgtcgctcttgttgcccaggctggattgcaatggcgtgatctcggctcactgcaacctctgcctccaagcaattctcctgcctcagcttcctgagtagctgggattacaggcatgcgccaccacacccggctaattttgtatttttagtagagacggggtttcttcatgttggtcaggctggtctcgaacttccgacctcagttgatccacccgtcttggcctcccaaagtgctgtattagccccattttatatccaaggaaactgaggcttagggagatttaaataggggggaaagtatagcttcatgattacacagtcaggaaatggcagagctgactcttgaattcagaccctgtgatgctgtatccagtgctgattttgttttgccctgtgttcctttcagtgtcaggtaagaagacctcagagatcatcttctccaacccacacattttactgattataaaatccaggtccgcattaactcattggccaaagttaagtggctaaatgactctcctgttcaggaagtattccctgtcttgtgtggaatgattggtctttcgtccaggtcatcttccacctatatccatccttgcagtgactggtggatatgatcattcctggtgattccctgtaaaatactagatttatttattctttcataaagttatgagtagacaaatcagtcagcttcaacctttcctttaccttatagatagtatcagcagaaagaactcaataattctgtcttaggaactcagccaggctaatatgtattataatacacacatacatatgcacacacatacacacatgtgcataccttagatcacaaattcaacatctcaacttagccgccaaagccacttctgtgtcttgtctattctgaatatgctttaaggttaaattagccatgaatctgttcagatcagtcattcctgaaaatgatgatgatattagccatcctttaccgggcaccttactcagtgcccggcattatactaggtctgcaggtacatttgctcatttaacacctagctcagtccaatgaggtggatgccattgtcatctccattttatcatttaatcaactcagccttcctctctcctgttccccactctgcttctagctgccactcacctgactctcctcttgatctgggctgacgtggctgagtgggtttagcagaactcttgtgtcctctttacttggtttgtttcaagttcatgtcctgcttcatcttttccctaactcactgcaaggtgaattttcttctctgcaatcggcaattccccaaatcacatcaggtcattaatttattcactcatttgtattcattcattcattagttcatccatccatctattcattcattcatccaatttactgagtgcctcctctgtgccaggcactgctggctttggaattaaaaaccctggccctcaaggaatttctattcttctgggagcaggatatttacatgggtgactgcagcttgatctgtgtggtactagtggaaaacataggatgttgggcacaaaagagtcacaaaacgccgggcgcggtggctcatgcctctaatcctagcactttgggaggccaaggcgagtggatcacctgaggtcaggagttcaagaccagcctggccaacatgatgaaaccccaactctactaaaaatacaaaaaggaataatagctgggcgtgatggcgggtgcctgtaatcccaacaactcgggaggctgaggcaggagaattgcttgaacctggggctttggaggttgcaatgagccaagagcgggccacttcactccagcctgggtgaaagggtgaaactctgtattaaaaaaaaaaaaagtcacaaaaaagggctggccacctaacccagcttgaggatgggaaggccagggcaggcttcctggaggaggtgactcatgggccatgtcatgaggatggggtaagaggagaaggtatgtttcagacatctggctttcttaatattcttggctttccacccattttcctgccagcaacataggggagaagactgagaccagcagatacaaagccactgtactctgtcctcaccccctccttttttctccccttcctactacccagatctgaggttttgagaaatctcttctctaattatctgcttgttcattcatttgttgagaatctactatgtgcatagcattatgaccacaaaatgtcctggtcgttgtcatcatgagaggtcttaccccttcctctccagccacttctagggatttttgactctgtccttttccagaacttggctccagtctggttgctcgccatgaagcacttacagataaacctcatcttgggccagtgcttccatttactgtctccttttggcttgcttatccttccttctgccttcttgaattgatttgcctctttatctcccctttcagccttgaaagttcctcgaaggcagggactgtgtccccatcttttctataaatggcattgttgtacattggtaaagttgagtgaaaaaatctttttgataatcacaaattattaccatatattgagcacctaccatgatgagtatctctgatcttcatatctttgaaatgtggatactattaccttcacttaattggtaagaaaatttgtgctcagggaggtaaagtcactttctcacagtcacacagctatttcacaggagagtgcagtatcaaatttaggtttttctggtcccaaaccctgatgtttcccccacatcattgtttctcagacttggctgcaatcacctgaaaaattttattaaattctttttttttttttttttgagacagagtctcgctctgtcacccaggctggagtgcaatggtgccatctctgctcagtgcaaccactgcctcccacgttcaagtgatcctcctgcttcagcctcccaagtagctgggattacaggcacccaccaccacactcagctaattttgatatgtttagtagagactgggtttcaccaggctgatctcaaactcctgacctcaagtgatctgcccacctcacccagccaggttttattaaattctgatgcctgggtcttaccctagcagttctcattagttgctccatggtgtggcctgggctttgggatttttgtgaagcccccagctgagtctaacgggcagtcatgtttgagaaccagtatactacaccatgttgccttcctgttttcacacaggttggtgctagtgtgtgagtctaagcctacatgggtggatatccacgtgatcaggctgcaagttctttgtagtggaggatctttggccctccctgctgcttcccaacccagcgaacctaccacaccatgcacgtgcacagccaagggttgttgactgtttaatcagtctctgggttcttatgtctcatccgggggattcactgataggaggctggagcttgatcacatccagatgttctcatcttcagagcctgttaacataacagaagtcttataaacatgctgagcacactcactggtctggagagtgttgcaggatgacctaggcccattgcaggggtggcctgggtcgccctcccacacttctgccaccctgcttgggaaggagggagctgttttgaagttccctggtgcaatatgatgtattgctctggctctgctcaggaggaagctatggcccacctagtcagtgagggttagctaatacgtgtattctgtttctgttgaggtttcacagaggccttttttgacccttcattttatagataaggcagtggaggcacaactacatgaaatgactcgacaaataaatggatttagaacccaggtttctgactcccagggtggtgctttttccatggttgtacagtgattaatgtctaccttttcacaccagtcctcaactgaagacaccagcttacaccttccttcctgtttctcccaagaacagaaagtgaccccggatgtcgctttctgttcctgggaaggcagttccagtggttagaagtcctgttcactcctggggtgtggcctggggatggtcctgacatccctgggctcttcctggacctggccagctaaaaggaaatctcctatgatggtactcagatacttttggaaccttgtcagccctaatcccatctcctagtgtttagtattcagctacccttcactgggcagtaattctgtgccaggcctgatctgggcattggtggtactaagaacgcatattccctatcctataggcatagtctggtagagacaacatgcaagtaaaacaatgttccttaaactgtggttccacacctccctcccccaacattaaaagtgtaagggatgcttattcaaatgtagatttgtaggctctgcactctagacccactatttcagaatctctggggactgggcccaagaaactgcattttcgcatgctccctaaatgaagcttaggtgctctgaggtttgacaactgcagtagagagcctaatgctaacagtgtagagtcacatgtgatgggaagcatcaggtaggtagcagtttgcaggagcactgattctgagggacactaactgggcctaagaacagctactggctgtcatgaggaataactaggagctagccatagaggggtagcagtgaatcatttctctagcgatgtaaatcttgctcaatttattctgtctatataactcaatattactgaagtttgcctaaagcagaatacacctggatcatacagcatttatgagagactggctgggctgtcaggccctcctgttactttatctctgcatgtgaccctcttagctccgcggattaactcctgtcctcattaagcctcacactgtagccccattttcagatcaaacctgtttctcttctggtaaatgatttcagtttgcaaagtttgccctctagaggttgcttagtgcctggccatgtgggctcagttcatgtggtcctgatgagctggttttatctttattacaaagaagttaggctgttaggagagtgggttggaaggagaagaggtagacagccaaatgagatgagtcagggaaaactatactgtttcggagtcatagggctcctaccaagcatctggtcagaaacctctcattttggagatcaagaaattgaggttcagaaagatgacatgaggtacgcagggacgccaccagacacagcctccaactctagaaactaaaattctggattcttagtgctgctttttctgttttgttgcactggattgaagccttttctaactgtactcagagggcctattatttagggagattccgtatgaaatcctttagcaatcaaatcatttaatagggctgatggtttaaatatatgttaatgtgttttcctaaagcctggcagacctgggttttggagctttgtatcacatgttttatgtttggaatgaaaatgagaccatgtctgtgaaggcactttgatatgcgtaatgcactctgccagtgtttgtcaaaacatggtccccaggtcagcagcatcagcatcacctgtaagtgattctccagtcgcatcccagggccgctgtatcagaaactctgggggtgggggtgggggtgggggtgggggtgggggtgggggtgggggtgggggccggcccggcccggcccggcccggcccggcccggcccggcccggcccggcccggcccggcccggcccggcagtctgcattttaacaagctctccaggtgattctgatgcatacttaagtttgagaaccattgcttgttttgcattaaacaggagattagtctctgcagcttgtgggaataaagctttaaatctctccaattttagctctgtgaaaaggcagtggggagacaggaatgaacggactagtgccacaaagctcaggtggggtgggtgagatcatttagaagagaaagaccgggcatggtggctcacgcctgtactgtcagcactttgggaggccaaggcaggttggatcacaaggtcaggagtttgagaccagcctgcctatcatggtgaaaccctgtctgtactaaagataaaaaaaaaaaaatttgccagtcatggtgatgcatacctgtaatcccagctactcgggaggctgaggcaggagaatctcttgaacccgggaggcgggggttgcagtgagctgagattccaccattgcactccaacctaggtgacagggtgagactccgtctcaaaataaaaaaaaaaaaagaaaaggaaaggctgtgtgtgtgtgtatgtgtgtgtgtgtgtgtgtgtgtgtgtaacagcaccatcacactgtttgagttgaggagcacatgctgagtgtggctcaacatgttaccagaaagcaatattttcatgcctctcctgatatggcgatgctcccctatctcattcctgtgtgtgtttagccaggcaactgttgatcatcaatattatgataacgtttctccactgtcccattgtgcccactttttttttttttttgagttacttactaaataaaaataaaacactatttctcaatagacttgaagcttcaagatttcctggtggacaatgaaaccttctctgggttcctgtatcacaacctctctctcccaaagtctactgtggacaagatgctgagggctgatgtcattctccacaaggtaagctgatgcctccagcttcctcagtagggctgatggcaattacgttgtgcagctactggaaagaaatgaataaacccttgtccttgtaatggtggtgaaggggagggaggtagtttgaatacaacttcacttaattttacttccctattcaggcaggaattgccaaaccatccaggagtggaatatgcaacctggcgtcatgggccagctggttaaaataaaattgatttctggcttatcacttggcatttgtgatgatttcctcctacaagggatacattttaagttgagttaaacttaaaaaatattcacagttctgaggcaataaccgtggttaagggttattgatctggaggagctctgtctaaaaaattgaggacaggagactttagacaagggtgtatttggagacttttaagaattttataaaataagggctggacgcagtggcactgagttgagaactgttgcttgctttgcattaaataggagatcagtccctgcagcttgtgggaataaggctttaaatctctccaattttagctctgtgagatggcactggggaaacagaaatgaacggactagtgtcacaaagctcaggtgggatggacgagatcacttcaaaggtctgtaatcccacgtctataatcccagcactttgggaggccaaggcgggaaaatcacttgaggtcaggagttcgagaccatcctggccaacatggcaaagcctgtctctactaaaaatatgaaaattagctcagcgtggtggcatgctcctgtagtcccagctactcgtgaggctgagacaggagaatcgtttgaacctgggaggcggaggttgcagtgagccaatatcacgccattgcactccagcctggctgacagagtgagactccatctcaaaaaaaaaaaaaaaaaaagaattttataaaatcaggaaataatattagtgtttatgttgaattttaactttagaatcatagaaaacttcctctggcatcattattagacagctcttgtgcagtgggtagcaccagacccagcttgcatggttattgatttttcagagacactttttgagcttattctctggcagaaaggggaactgcttcctcccctatctcgtgtctgcatactagcttgtctttacaagaagcagaagtagtggaaatgtttattcttgaaaataagctttttgcttcacatgatctagaatttttaaaattagaaaaatgtgcttactgcgtgcccttctgaaactaggaaaatatgccttgtgtttaccaattgtgtggttaggagatgggccaaaggcatcaggcttttgaaagtagttgcatttagcataatttccattgccccctgccaatttcatatctgtcacatctaatcagtttaaaataaggggcatcctaagcatggagatggtccttggatggtccttggagtttctgtattttcagtattcttttttttgagcatacaagacatttattgaaaaattcttgggatcaatacttgtgtaaggaaaggaaagggaacaaagcatgattgggcagaggcagaagatgacatcaacaaaggccctccgttgtcagtattctttttttttttttttttttgagttggagtctcgctctgtcacccaggctggagtgcagtggcgtgatctcagctcactacaacctctgcctcccaggttcaagtgattctctgcttcagcctcctgagtagctgggattacaggcatgcaccaccacacctggctaattgttgtatttttagtagagacggggtttcaccatgttggttggccagactggtcttgaactcctgacctcaggtgatccgtctgccttggcctcccaaagtgttggaattacagacatgacccactgcacccggcctgttgtcagtattcttaaacatagacactaactgtaggctgacagcctagcagcaaggaccagttaaagaaatgagtagaactgaagtgtgcttgagtatctctggcagtcagcaaaaacttaatgggaatcatggtaggccaaatgttctgcagtatttcaaaagctgcatgggttttgagaggcttttggtccatcactcaccttaggttgttctacaagcacatcagcctgccccaatttaaacagggcagttagtaatggtgtaataaagagtctgcattgttcattccttcaacaaatactggctataatgtttcagcactgtggatgcaaagtgagcaggataaacaggctcttctttcaaagcttgtggtccactggaccacgtatgaagtagaatagtttaggtccagaaaggcaattaagtaaaatatgaccaagaagaggctctctagtgggtttggtataaagaaaagataagaatgatttagaattggcctatcaatgagataagaggcctggctttctggcactctgctctagggcaagtaaaatggagaattccaaattctgaaattgttagaacatagttctgtgtcttagttaaatatctacacttacagataaatagcataaatgctttctccccatatttcagcccagtcctacttaaagacaacataaattgcaaaatagtgaggatgttgttcatctaataaaagtggttccaggaattcagactctggattcctgtttgccaaatcatgtgtcccactcttaagaaaacgagttggactctggatttttctttgcaagagggacaagagtgtgggagatactgagttaatgcaacttgcaggttttaagtgtcctgtcattgtgccttgtgctttgatacattctgagtttcagtaaagagacctgatgcattggactgttgcaatggaacctgttttaagatcttcaaagctgtattgatatgaagttctccaaaagacttcaaggacccagcttccaatcttcataatcctcttgtgcttgtctctctttgcatgaaatgcttccaggtatttttgcaaggctaccagttacatttgacaagtctgtgcaatggatcaaaatcagaagagatgattcaacttggtgaccaagaagtttctgagctttgtggcctaccaagggagaaactggctgcagcagagcgagtacttcgttccaacatggacatcctgaagccaatcctggtgagtagacttgctcactggagaaacttcaagcactaatgctttcggaatgtgaggcttttccttggacagcatgactttgttttgtagaaaagtacggctggctgggagtttgtgatataatttagttcagtggtattctaagtgttcttagtgttctttcagacttttgggccatctcccaaagggtgaatgggaagaataagctgggtgtggctgagtttaagccaaaagttttttgtgcttgtttcaatcagagaagacctgctttttcatgtttttactattataatactaagcaagagctcatttgaaaacagagttcttcatatttaaaaaaaaaaagtcttgaaaccattgatgggaagatggatatctatttatgtttaaaaacccatcataaagatgacattgtgggctgtcacagttggaaggccctggaattagatgagaccacactatttagcttacttagtaataacattgcaaagaaaaattccgacgaagttttttcagcctaggaatcaatagttcagagaagcactctatgagaatacccattcattcttaaccaaaaaatactggtgagcctgagcagtttggtcatcagagtgttttatatagttccagaacaaatatgtctctaggtgttctgagagctctggtgaaattcctctcgctaccccaaacatcatcatttaatatccaggattctggttttctactcaccagatagattctcttaaaaccagggaaagattcctggaggaaggatgtatctggaaagagatgttccttattataataaaatgaaattgtaatactcttggattttgtgcagcacgaattctttatagagagttggtcctcccagagaattaagaatactcagtttctggaccctgttcccagatcataccctagaatgtgaccttagaaacacacttcaggattcatacctttgattgaccatcaaaaagtttttgtatcggccaggtgtggtggctcacgcctgtaatcccaccactttcggatgccacggcgggcagatcacgtgaggtcagcagtttgagaccagcctggccaacatggtgaaaccctgtctctacaaaaatacaaaaaatagccgggcgtgatggtgggcacctgtaattccagctactcgggaggctgaggcaggaggatcgcttgagcctaggaggtggaggctgcagtgagctgagatctgtctcactctgttgcccaggctggagtgcagtggcgcgatctcgactcactgcaacctccgcctctcaggcttaagtgattctcatgcctcagcctccgagtacctgggactacaggcacctgccaccacgcccagctattttttgtatttttagtagacatagggtttcactatgttgcccagctggtctcgaactcctgagctcaagtgatctgcccacctcggcctcccaaagtgttgggattaaaggcatgagtcaccgtgcctggtcccatgttataattttaaagtaaggtatatttctctacagggatctttgcaaccctaagtaactggcctaaaaagttagagaagctgacttgtgcagacatttgcagcctgttggtcttttttgtgctgtgaatcatagagggtgaaaggttattatgaatggtacaaaactttgttacaaaaccattttcttggactgttttgggctgcttcactgcatgacaaatgctcaccctttcagctggaatgattgaaattttggaaaagatgggtgtttttagaagacattgtaatttgttccggtgctgtgcccattcattccatttcacttctgtttactcattaaacacctattgtgtacacaacccggtaaaatccctccactcacacaatgcctgaattatactcatagtagaatgactgtttagccctcatcatctgataattaacagctcaggtttcaacctgacagtatctctctgggaggattagcagcgtgacagagtgcagggaaatgcaccttcagaaccgtcagctacactgtgtcccatcctgctgtgttgtggttgtgccttgtggatgcgttggtttatgaccaggtattgattaaggtggctactaccaggtgctttctgcatatctcgggtttgtggagcactcaggttctgcttctgcccctctgctgttaccaagagacctctcttcaaaatggggctcttgagttagagtagaatgagtgatcaggattgttttgtgtaaagatgatttctgaggaaggctttaggatgaaatgacttccaaacattttgaaatgtgactcttacttattgaattaagcagggccttaattggaatgctgggactgatacttgatttgcattaagcagcctttttctattgctgcttggttgaaatttcaacatttgtgatggtagatggatgtgacatgtgatgacattgcacatgggcagttaactgtgccaagaagtgcagcagtagcagcaaccggagatgcaaagcccaacatgatggggagagaaactcttctttcaatatgtgcttctgtaccaaaagtggaatttcacgagagacatattttgaaacatttctccttttgtgtgtgcgtgagtgtttccctgtttccagccaagggtattgtgagtttctcctgggcctccttcagaatctgggtgctctggaaagcagtgttttggcaacatggggaaagtatggcagtgtgggagggtcagctgggtctgggtttgaatattgcatttgaatattttaccagcattgatgtcggataaattatttagtccctgtaagcctcagttttctcttcttctacatacacataatatatttgactctttgttgtgattattggttacacatatgaagagcctggtgtggggcctggcacacaataggtgctcaataaatagaagttgataatttaattgacatgagtagtagaaattatgtccttgaaaacaattgcgtcaagatagaagttttcagccaggcacagtggctcacatctgttgtaatcccagcatattgtgggggccgaggcggatgaatcacttgaggccaggagttcaagaccagcctggccaacgtggtgaaatcccctctctactaaaaatacacatatttgccaggcaggcgtggtggcgcacacctgtaatcccagctactgaagaggctgaggcacaagaatcgcttgaacccaggaggtggaagttgcagtgagctgagatcactccactgcattccagccagcgtgacagagtgagactctgtctcagaaaaagaaaaaaaagatagaagttttcttctgtagatcagtgttagaactcataccaagcgaagtggtcctggtgagtatttcagtgaaaaactgcattcttgctcagatattgtcaagacttttcacccaaagattcttatttatgtctcagtccgtaccttgtgtgaaaattaatactggatgtcagaacgctgttgtgtttttaaagttccctggggttaagagcagtttccattaggtgttctctgctttttacttaaaaatcttactcatgcattgagcaatatttattcagttcttattatgtgtcaggtattttctaggagctggactcaactcaaaagatatccttttgatgagaacaaaggtgggtggatatatgaaatattatctgtgggataaatgcacttagtcatgagggagacttgttatggagtgcgctcattgtatttgtactgttgagttaacaacttctaggaggagctcagggccacctggcaggggcttcttttgtcttgctgctcagcaaggtgtattttgctgtagagtgtgctgggcaggtgaacttttcttaactttctcttgggtccttcctaaagcagcatgtacctttcccagagcgaggagagggccaccttcctgtctcacagaaacctccaatctgttttggactgcaggaaggagccatagtagtggaccagcaaattttggcccgagagattgatttgcttccgattgtactttttttttttattgctactataacaagtcaccaaatacttagcagtttataaccacatacatttattatttcataaggccagaagccaggatacagtagagctcacctaggtctacttcttagaggctcacagggctgatatcaaggtgtttgtggggctgtgtttttttgggggggctctgaagatgaatctgctttggagctcatccaggatatcagatgaattcagtcccgtgcagttgtaggactgaagtccatttccttgctggctgtcagcaggggctggtttttgctcctaaaggttgccatcattccttcttatgcttttcatgtgactcctctcccacaagtgggttgagtatctctcacactttaaacctctgacgcctcctgtcacatctgtctccagtcagagaaagttctttacttttaagggctcaggtgtttagtttgggcccattcacataatccaggataatctccttattttgaggttcataactttaattacatctacacagtgcatttgctatgaaatgtgcatattcacagactccaggaatagggtgtggacatctttgcaggggatattcagtctgctgtagctttcttgattggaaggaatagtttatcatatatttgaagtgttccctcagtgcctttggcttttgttgacccctctgcagctctctgctttttcttgcccatatttggaaagtgactctaaagcataataagcatcacctattagggtttttaatgtacaaaccaaacagaggtgactttgggaggagaacatctctgaactaggtatgagacattcatcgaaaaaaatccatcaagtgtttattgtatgtctgctttataccagcactgttctaggcactgaagttcgaccaccaacaaggcagttgtgatgcacttggagctttcattctgatgggcattgagatccaggctgaaggctgagtctgggaatttgaggaattctttgtaggtcctgggtctacagagtgagagctgtcctcgttccagtttcactgatgacctctcgaccagctccctcacagcagtctttgccaacacagacactgtgggctgtagtgggaggaatgtggggttgaatgagctaggtttgggctctgtccttgactcaccattgcctcagtgatgtgaaaatggtgtctgatccttaaggttggaagtccaggcatgcagatttatctccatctcaataacgtggggaaaaaaaagaagtggtttttgtggaaccagtggttccactgtccacgtgtcttccagtgtgcctagcacattcccaccaagtggatcttggttcatgagggaaagaagggaaagtgagggtgccccgaggctcccagaagacaagtaatgtcacagctgagctgtgtacagatcgaagaagcagatggataaggagtgaacaaagtcatccttgtcttgaggggtctttatttagcttcttcttgactcttagacaaggacccagaatacagatggggcttgttgttaccttcagcctcatggctttttagggctagatacttcagcttgttacatgcagtccttaaagcgtctgtgtgggtttttgcaggagagaacacttgctcgtgttctcctgtctggaacccggacattgttggaaagtatcagattttgtttggctttgtgtgatttgactgcccacctgtttacttgctttctcccagcaagcagccgcaatccccatgggttggtaatgggtggaatgacacactgtgtagatttactcttcagactctatgttcacctcattcttatgggaaaagaagagcactagctggtagatatagcagtgtgttaatatgactgctcaactccatttacacagacattttcaccttagttatactatttcttcattaaatattgttgccagatctaagatacaggtttaattttttcctctgaattatgtggtagtagatgtatttaactatgtttagaaacagcaaaaaatgaagcgtttgaatgcgttaaacacatctaatttgaaagttaatatttaggttgttgatttattttttaaaagattagaatattccttagaaatgtagtcttataatttcgtatttcaataaaaaatattaaaatgtttcccagaggaaatctttactgtcatagaaatcaccagaaagagatagcaattactcctgggtggtgatagtctttgatttgtggtttacttgttttcagtttgaactaaaacatactaatcccagcctgagttggattttgcatatggtcaaagtgaagtagagatttttgtctactttatgaagatatttaaaggacatttgaaatgtttcaatgaacacattgtaacatgcattcccaggaggaaaacaaaattgtgtattgtgttgaaaatactattccaatatatgtatacccacgtctcattttgtcatagaattcctgaaaaatttagatgtagatgagatttttataagttgaaaatattttcagttgcattttaattgcacagatgtgttttctacttctatttggctgtgactcctaatgcattgtaatattatcttccagtgttcatttcgtgtagtgataatggattaacaaatgcattcattcatttagtaaacatttactgagccctaatcagtgccatgctctggcccagggaggtagtcatgtgcaaggtccagccctctctgtttcattcctggttggggaatgggtgggacagaccaggaaaggagcagctgccgtatagagcaggagacgctctgctgggtgtgatacagtccctgatggggcctcctactgcagtctttccagtcaggaaggaaacatcctctaagtggggacctaaagaatggatgtcagccaggtaaagaacagggagtagaatgttccaggtagaggacatagtatatgcattggtccagagaggagagggaagagaaggtggcatttaggggaactgtacctgattgagatagttcagcatggagcagatatagctgtggggagtttgatgggagaaggaacgatgagacgtgatgcctgcagaggtgggcaaaggtcggctgaggcaggtctttcttcacgagccatgtgaggatatagggccttatcctcagagtaaagggagccattaaaggctccacaggctgagtgacttgatgaggtgaatacgaaacagagcatttctgtgaatgtgaatggcctttggagcagaactaagttcatgaggatggaaagaatataatgaagccatctcttagacccagaaagaatggggcacaacagcctttatctttctggggccaatgtcacagaatgccatgcttttaggaaacatggtatgttgtgattaacacattttgcagaagtgggtgggagcttttgaataataacagtaagcatttgtgcattcttcctgtaatgacattacagttatgatctgaaaatattgagtcatacatgaattcctgttatcttaactcagaaaatatagtccctcactaaaggttttattttccttctttttcccatttcctttacttcgtataagaaagtcacttgtctcctgggtgcaatggagacctatgtgagttcatagccaagagaatgtttttggttagaaaaataatagtaggaattccaagctgtgaattttttactgaagctctttggaaataggatttggcaagttttgtctgccttcgtcaagtaagcatgagcaggagagcacagttaatagcaggtgcagacacatgattctcagaccgtattttgtgttctagtttcaaggcatgaattctttcctggggttaattttattcaaggaagttatctgtctgttagatctgatatgtgctcaggccaacatagattctttacccttcctttcttcctgctcacctgtccttcctcttttatcttttcattgaattaaaaagaaaattatgaaatagtttcaacatgaaaaaaggtacagagaataacataaagaacactcctggctgggtgtggtggctcacgcctgcaatcccagcactttgggagtctgaggcagccagatcactggaggtcaggagttggagaccagcttggccaacatggtgaaacactgcctctactgaaaatacaagaattagccaggcatggtggcgtgcacttgtaatcccagctacgtgagagactgaggcaggagaattgcttgaacccaggagggggaggttgcagtgagctgagatcacaccactgcactctagcctgggtgacagagtgagactccgtcttcaaacaaacaaacaaacaaaaagaacactcctgtaccatcatccatcattttgccgtgctgactccaggttctatttaagaaataaaacattacaggtacagctgatgccacctctgtttccctagctcattcttcagagataactcttgtcttgcagttggatgttttaatcctctatatcatgtatacttacattctatgtataacaatatttggtactggcctaaatgtgttcacattgtataagtgtgcatattggcctgccacttcatttggaattatgttcttgagatttatcaatgttgatacatgtggaatctggttaatttttgccatagtattctatttttatactaaacttttaaaaatccatgcttctagtctttggcttattttttcaggttatggtatgttttggatgcacagaaaagtaaaattaagtcatgagcaaaatatctggataatccaagctttaaacttgatgtagaatttgaatcatgtgtgttttgttaaccctgtgatgtcaatccatgcctgattgtgtaactccaaccaatattcctttgaaaatggaaatttgtttatattgactacagattgccaatattattagtaaatgctgagcacttaatctcgaataaagaactagtttaaaaatgattctaacaatggcattgactgttctaccttattactcatgggtgggttcagccaatgtttctgttggagaccaaaaccaaaaacagtcaaattaaacaagcagtcaaacccaacatacagactactgataagaaggtcatatcataagatatggcattgaatttgtgtctgctaatgtaaaaatctgatgcccacagcaaacttaataaggacctatgtttacatccatgctcaattacattcctgggttaaacagtcatgctttaggccctgctgtgtgcctggagttttgctgaagtgtggggcttttaagagaaggagaataagcttgctccagagttaagaaatttaaactaaaagtcctaaagatgttggaaaaactattgcccttgaagatgtaaattcattaagttggagaagaccttttatacaaacaacagacccattcactgatttgtacccttcaggagacagatgaccggtaatggtgacaatgggtgaatgttgggtttggggtttttagaaacatctgcacttggtgactactgtatctaattggtgtgacaaacctggcaccccatgtgtttggcaccatcttgggtcctactcagggccaggtgaaccgagtggcctcttcactgcttcagagtctgaagcagattgtagtatgcggaccagacacagaatataccaccaagcacgttggcgcaaagcatactgggaagggaggctttgtgaacatggtgctggttctcaaacctcagtgctcaaaagagtctcctgaggattcctggatcacactcttaaacttctcattcagtaggtgttagctggttgagaatctgcatttttttttttttttctgagaccgagtctcactctgatgcccaggctggagtgtattggcgccatcttggctcactgcaacctctgcctcccaggttcaagcaattttcctgcctcagcctctctagtagctgggattacaagcacatgccaccatgcctggctaatttttgtacttttagtagagagggggtttcgccgtgttggccaggctcgtcttgaactcctgacctcaggtgatccacccactttggcttcccaaagtgttgagattacaggtgtgagccaccatgcccagcctgaatctgcatatttaacaagcaccacaggtgattctgatacagtagctccccaaacctcacagtgttagtgaatcccagtcatttacaattctgccatgattttggtcatattcaagtgcagctggtagcatttttagttaatatattttttaaattaagtcacttcttttggataattaaatttaattacaagggaagctataccactgctgtaaaaacatcacctgctttaaagagaaggtacataatgaatatacattaagataaagatgtatatgtgtgtgtgtgtgcacatataagtatacacatacctaccatagggattgagttttccttcaggtttttcaactgaaatgtcaactttgaggccagttaatatgtgtaagatatatgtgtgtatgtatgtctatacatatagacatatacgtaaaaacatacatggatgcatatagtatatctatacacaacctattatgcatatcatgtatatttcatccacttagtattatcttttattttgccgtttggcaaatgctcagtaaaagaaaagggttagaaggggagaaaggcattttatcccaagccttcaggaatcaggatgaggatgtcttcaccttgtggtggggagtaattatacaattagagacagcacattggagtgtggctgatatgctgtgtgatgatagctctagctctctgcctagcagaggaaggacatttcaatagaagaaaaagtttaagaccttgccgagaaacagagaaaggatgtttgtctttttaagaagttgaaaaccctgtttgcagacaaaagccctccagttttggcagtaaactttcatgcaagggaagaaaaaggcaggggatgacattgttgacaattgtgaggaattaccatgtgccaggcactgtgcgaggggctttgtacatatcctctagttttagtgcttataaaaactctgtgatatgtgcacagcattttaaactttgctgcatagtcgagaaaatggaaggatggggaatttgagtcatttgcccagggttctatagctaccccaggttcccatgactggagaattggggcacagggtggcgggggagagtgagtgacaagaatcctaacaatcttatttccattgagtccttataaaagaagtggattaactaccacgtttttaagtttttcttaaatttaggttatgtggatctggcgtttcttgttttgtcctgggtttgttttgtttttgctatgctgtcttgaacatctgtcatcttgtaggcctaacggtaaacacaaaaacactttacctcctatagctttcaattaagatctctcagtttgtgtttgtaatagttttccaggcaagttctccctaggttcggcttctagtgtgttaacctttagttataaagtgaacccaaagagagaaagtagaaacaaaacacctcacctgtttttgctcatgaattactctctatggaaggaacaatcatgaacacctctgcgtatcacagaggcctatctgagtctgacgtttaagggagaccgcgtaggtccctttgaggactgtgaatgtgggagtcctgggactctggtgaagaacccgttccagaagagatgaatgagctggacaagttctttcatagaacctttaggcaggttttcttagaaatgcacattgaggattatgcttggatattgtgatgatcagaatgatactcaatcccttctgcatttggaattctctttgaaagaaaacatcccaggcagctatttctcagagatagtgagtcccagccacttctagacattttcttgtgtagtctacattataatttcacagcagtctctgatatgacaaatgtcaaaatagcccaaccttctctaaacttcagagatgtctgatatgatattgaataaaacaatgctcatagaaacatcaagaaaggtggattttccctggatacttttttcctgcttgacaaataacagtgaagaaactgatctcacgtctttttctctttggaagcctgaacactcagaacccaacttgaggctcctcagctatagcaattctgacttcacagtctgtaaattattgttcttttttttctttagcttatgctttctgccctaatttatcttttccctgttctaatgaattattgtcctatatctgctgtgcagttaggtgacatataacagcaattaaatatatgaattggtacatataaagatttgactaaaactcgatgtaaaaataagtgttctacattcaatttccagtgttagaaacagtgctgacttgaacagagtgacagaattccatctttccctatttttgacagctttaaactttatattttcttcctttcttgtgagccgtcattaacttgtttctcaaagccattcccgtattacccatcttgcagacgcagacagatttgggaatttgcggtcagagttgtattggacacatccccccagcccacatgagatccttttaatctattgcatattaactagttttaagtacaatattcctacttcatttaaaaccattaatcaaagaatgagtttgaaaatgaacaaaatgcaaacttacagttagaaataattgtagtgtctttagttttggttaggagtcggtttcttgtttgttaaactcaagattgtgaacagttttaattcacttgtttatttccaatagagatttcaggtttacatttgaattcagaaacaaagttttctttctcattacagagaacactaaactctacatctcccttcccgagcaaggagctggctgaagccacaaaaacattgctgcatagtcttgggactctggcccaggaggtaagttgtgtctttccagtaccaggaagcggatcatccactgtatcagtattttcattcctgagtctggcaagaggtccttttgagttgaatatcacatgggatgtaatatcaattttcaaagtataagtgatgtaaacaataatgttttgatttccttattttagaaatgaagaaacctaaaactcatagatgtctcagagctaattggttagtggctaacagctggatatctagtttagaaccttctccattttttctttttgcccctaggtaatcatacatttgtaaagaggagaattatctctgccactgcccatgcactgcttttgtctgaccagcaatttctccatattgcttcttcagtagcaaggccaatcattttaccaacacacatgcttgctaactaacaggaataacgtggtacccctaattcagccctttcccttgaaagcatctggcttctgaggttcaactatgggaatatggtctcttaatgaacattaagttgagtttgccttttaggtccacatgttgacaaatgtatcagagtaatctctgtcctaggatcagagggcctgtaggcacttgcaaaagcagttagctctgactcccagccagtgcacactccacctttctgactcccagccttgtctcaaattaggcttggaagcgaggaactgtctggtgtcccccagcataggaagctgagccagggggcagtgctcacaaacaatacagactttaacgtgtaggatattggaaaataataatttgtggggaaattgtctcagacttggtccacccttatttttagctgcttctctaatccgtttttctttttttggtgcttgtatctaacctacccattttttggtgcttgcatcattttttcaaatatcaaaaacgaactttatgttttctaacaatgaaagtattgcatgttcattgtggaaaatgctgaagacttggaaaatacaaaaatgctgagatcaaacactattgatacgttagtgtatttcttcctgtcctgttctactttctttctttgaattctgctcacgtgtttctgactgatgaggtctgacttttgggttccttttccagaggagaagccttctttcagcttgccatttgttaccctggttatgaaggctggtaaccttttttactaggtagagaagctggaccaactggggttcttccagggggagaatgagaaagagaaactgttttgcaagtccgtagctatttctctagggccctgttagctgacattgacatgccttgcattgctctgcagatcccctcgcagccctctgtcccttgttcatttctggccttagagaaagcaaagcagggtctgtaacaggggaggctgcctctaaactcagggtttggttacagctgttttcacttacatcactggccctggttttttttttttttctggcattaaaaaaaaaaattggaagcaggtgatgttcccattgctgatgtggtggaaactctccaagtgaacaatatacgtttttcttggcagctgtttcttgtgccctgcttgctcctggtccaggacaagcaaggaccatctgcctctttcaatagaacacctccagatccctttgatcaaaagttactcattgtctgacttgctatttctgtgagataaatgggagaagatcaataaatgcacttgtttgtccagtcagcgtgtggaaagttgataattttgaccaaagcacaacccttgaaaggaaaagaaaaagggagtgaatgtcttctgagaagctgcctaggttcagacagtgtcacccatttccctgtatgctccacatgacaaacctgagtgggtctcatcatgtccattttgcagatggcaccaaggctcagaaaggttaggcaacttttccagtcacccaatgagttaattgacaaaactgggattcaaacccagaactgttggattccaaagcctgtgttgttgcctgcttcgtgaaaaactccagtagcgactggaatagaaaggagaaccttccaagaaagaaaatacgcactagcagaacctggaaattgggaggaaatgaggacttgaggaataagatgaatgaaagctgacctgagtttcacatctgggtgatgggaagggaggacagggaggcagcatctcagatgtccacccagcaccgaccagctgcctggcattgctaggtgttgaggactcagcagtgaacacgctaacttctctgctttcttggggcacgtatagggtgagagacagaaacaaacaggtcagtgtacaatgccacaggagggatatatgcagtgaagaaaaagcagggtaaggggcatagagcatgagaaggtgctttttttaaagggggtgattaggaaagctctctctaaggtgacagttggacctgaaggagatgatagcatgtctgtggtgagggaaggaaactccgaacaggaagaatggcagatacaaagacattgatgctagagcatgcctaaggaatgtgtttaaggaccagggaaagtgagcaagtggtggggggaggagaggagctcagagcaggaggaggtgagtgccatacaggcctggcaagactttggattcctgctgggtgagatgagaatccagcggagggcttgagggaggggacatgatgtgatctagagtttagactgtttacactctggttgttgggttgagaagagactgggatgggggaaagggaggacaaaggacattgtgctggattgagaaagcagtaagtcagtttcattcattcactcaaccgatgatgttcaaataccaccatcatccgtgggctaaaggatgaagagccatccctccctgagagtcaggaagcacttcccagataaagtttggagtgtgagctgaggtgtaggagaaagagtaagagtttacccctgaaacgggtgctgggaagagtcaatagtttggaataactcaataatttatggtgcttctttagaaagatttgctggctttatgtgggaagaaatttttttttttgattggggagtggtgggttggtggtgaggctgcctgtggaaagagaagtgagtgttttgactcactgttatttaaaaatctctagggctgttccaataagcaacaaaaggcaaaatggcctggttctctgtcccctttctgtctgtatgcctcgtacaggttatgaaaagaaaaagttgggaaaagctgtccacctcacctaattgtgttcttgtggagtgtgctagatgccccctctctggagaaaaaaaatccttgtggcctctgacccacctctggagagcctagttcccttctggaggcagaaggcaaagcttaggacctagagagtgctggaccacgccactcacaggaaccagcaggctgtgaggttgaaagctaggcatatggagctttccaggctgggtgcagggcctcgtggcccttcccctcccctctgtgctctatagctcagtcttcccaggcggtgtgaacacgcagtgacatttccaggaatacagggatttattaatgatttcttgtgaaatgtttggaaatacaaagtactctataaatatttcataatagcattggggctgagaactccacaaagtgccggaatacatttgcatgtaagacagaacgctgcctgggtcattgatgcctgttgagtggcagtcacagacactgcctagggtttctgactcacgctgttgggactgttctatgcagggcaccctcttgtgtggcataggatttgtgcctcaccacacactgttgtagctttgctgtcttgatgatgagtagagggcagtgtccaggccatggtataagcatctactgccccccagggttaccaaaaccaagccaagttgtgtctcagcgagctccgtgaagcatggagaagttgagtactcagagacatgacgtgacttttcaaaggctgtaagctgacgagggacatagctagggttcagacttgagtttttctttttctttttctttttcttttttttttaagactgagtcttgcttttgtcgcccaggctggattgcagtggtgcttggctcactgcaacctctgcctcccgggttcaagcaattctcctgcctcagcctccccagtagctgggattacaggcacctgccaccatgcctggccaacatttttgtatttttttagtagagatggggtttcaccatgttggccaggctggtcttgaactcctgacctcaggtgatccacccgcctcgacctcccaaagtactgggattacaggtgtgagccactgcacccggcccagactcgagtttttcatcttaatgctttttcattgcctgacactttactgagaccaagatagggaacttcacatacagtaccttttctcccaaggcggaagagggctgttcaatttctacactagagttcggggagttttagaaatgagtcagttatcgaggatgagagcagttcctgataggctcaaccacaatgagatgtagctgttcagagaaagcattcttttatctataaactggaagataatcccggtgaaacgaagcccagccccaggggcttcactaactccaggctgtgcttctcaaactttagtgagcataggaatcacctgggcatcttgtgaagctgtagatttgaattctgcaggtcggcagaggggtctcagaatccgcatttccaacaatgtctccagtaatgctgatgctgctcgtccctggaccacagattgggtagccaggttctggcaagctcatcccaaggctttgagatgacatcagacaaaatatgttctgggacatggcttttgagaggtcaagaaaataagatgtttctttctcttctcatccccaacccttgcactgcccttttctcccttcccctaccctcctttctgtccccatccctgacgccagctgttcagcatgagaagctggagtgacatgcgacaggaggtgatgtttctgaccaatgtgaacagctccagctcctccacccaaatctaccaggctgtgtctcgtattgtctgcgggcatcccgagggaggggggctgaagatcaagtctctcaactggtatgaggacaacaactacaaagccctctttggaggcaatggcactgaggaagatgctgaaaccttctatgacaactctacaagtgagtgtccatgcagaccccagccctgtccccaaccccatccctcccttagttctggccttggcctgtgtcatctcctccctctgtagcagcgttagatgtctacatgcccatttgcccaccagactgagctcttcctagaggagagaggcttctcttgaatagctacctgtccccagttctctgaatgcagcctggcacatctcaggtgcacagtagtgtttatcaatggaatgaatgattgacagccaaccttctggttttctgggggatgtggaagggtggcttccagggtgatcaagaatgagataatggcagaaggacaaatcctgcaagatctcacttatatatggaatatatgtaaggtagaaagtgtcagtttcacatgatgaataagttcctgggatcttgatgtacatcgtgatgactatagttagtaacactgtatagtatacttgaaatttgctaagagagtagatccgaagtgttcacactacacaaaaaaggcaactatgaggtgatggatttattaacagcttgattgtggtgatccttttacaaagtatacatatattaaaacatcacattgtataccttaaatatatacaatttttatttgtcagttgtaactcaaaaaagctagaaaagcatttttaaaaaggatgatgtactggtcttaatattaccattgagataagctttataataacataaaaagaaataacagtaatgataatagcaacaacaacaacaacaaagaactaacatttaagtagaatttcttgtgcactgtgcattctgtttaagttatctcattttaccctcatgataaccctgcagggaagattctttaaccccacatttcataggctcagagaggttaagtgccttggttagagccacatcagagttaatccacaagagccaggattcaagcccaaatctgcctggatctgtgctctctaagataactgttagtggtggcgtgtgtgttctcacactcagacatttgatctgccctttgtttcccattcttagctgcaaggcagtgttaaagaaccctgtgtctccatatccactccccacacttaagcacttttgtgggcccgtgtgccgtatgcctcgtggcagcagggatccaatgtcacagttttaggcagtggcatccttttccttgaaaacttgatgcaggggaacctttctccatttccaaccacaggtgtgtctttcagacactgagtgaggcaggttttgtactttattgtaacacaagaaccttttcttctctggagtaaagcactccagacattcgcaagttgctttacaagccttaaaaggatggtattgtaggcaactttaattaaatcccatctcctcctctcccccagcttgcaagttgacccaaggaagccttcatttccatgacagacttaattgtgagggcatcctcattaaaaaaaaaaaaattctattatctttccagcatatagaagatacttggtatctaaaaatccctgaaaaacttagaatgaatttttaaaaatcagggatcctgctggataaccaaacccatttgtctgttacaacttttgtatttgggtttttgttaagtgtacatatactagtttgtgttaattaaagagaatttttttttttttttttgagagggagtctcgctccgttgcccaggctggagtgcagtggcgccatctcggctcactgcaagctccgcctcccgggttcacgccattctcctgcctcagcctcctgagtagctggaactgcaggtgcccgccaccatgcccagctaattttttttttttttgtattttgagtagagacggggtttcactgtgttagccaggatggtctcgatctcctgacctcgtgatccgcctgtctcggcctcccaaagtgctgggattacaggcgtgaaccactgcgccctgttgagaatttttttttttttttttgggagacagagtttcgctcttgttgcccgggctagagtgcagtgacacaatctcggctcactgcaacctctgcctcctgggttcaagcgattctcctgcctcagcctcatgcgtcaccacgcccagctaattttgtatttttagtagagacagggtttctccatgttggtcaggctggtctcgaactcccaacctcaggtggttcgcccgccttggcctcccaaagtgctgggattgcaggcatgagccactgcgcccagccccaaattttggtttttgcttgaaaactgaggtctgaattcagccttctggttgcccctcaagagtcagtttaaatgttggtcatgttagttgtcagtgaaaacaatggtgaggctggcatgagagtgtgaatctggatgggagggcttgtgcttcatgaaaacatttttccagatcagctcagtcgtgagttatccgtcattgacgttataataagctctgattatttatcaagcatcattctttatagatatctcagtttaatctgagataatcttctccacatctctccacatagatgttatgaattttacttttacagaggagccaactgaggctcagataagttacttattatatgactagtagtggtagagctggggtttcaactaagaactctctggctccaaagcccttgtaagtttctatcagtatatgaccatgcatatgagcatttgtctctcctcttcttcatagctccttactgcaatgatttgatgaagaatttggagtctagtcctctttcccgcattatctggaaagctctgaagccgctgctcgttgggaagatcctgtatacacctgacactccagccacaaggcaggtcatggctgaggtaagctgcccccagcccaagactccctccccagaatctccccagaactgggggcaaaaaactcaaggtagcttcagaggtgtgcgctaagtatactcacggctcttctggaattcccagagtgaaaacctcaagtctgatgcagaccagagctgggccagctccccagtcgtgggtatagaatcatagttacaagcaggcatttcttggggatggggaggactggcacagggctgctgtgatggggtatcttttcagggaggagccaaacgctcattgtctgtgcttctcctcctttttctgcggtccctggctccccacctgactccaggtgaacaagaccttccaggaactggctgtgttccatgatctggaaggcatgtgggaggaactcagccccaagatctggaccttcatggagaacagccaagaaatggaccttgtccgggtgagtgtccctcccattattaccatgtgcctgcttgatactggagaggtgagtttctggtcactttcccaggtgtgagtgaggtgagaattctttcagtttatctagctgggggaatgtagtgagcatagctaaagtcacagggcaccacctctccagaagtacaggccatggtgcagagataacgctgtgcatatcagcatccatgccactcacggtcaaatagcagttttctgcaaaacttagtgagggctggtgtttggaagtggagttgagtaattgcagtaccctattttcctttttggctgcagcctctcagccagccacagcatctccctgtgtcttggtaggttttggaaagaagtgtgggagcaaaagcatgatgttacatgtagactggcctgagatactcattctcagggcactgtgtgaatgatgagctgctgttactgtgtggaggggaaatgcacttagtgcttcagagccacttgaaagggataagtgctctagagacaattgggttcaaatgtggagcaggctgagcaagaacagaatgtctcctttgcctgagcctgagtgctgttaatcacatcttcctgccttgggctgagttagagaatcattagactatttcctgtttccatggtgagggaggcctcttccttttgtctctgctccccttaagaagcaggtgaggattttgccaggtttcttgttttgaaccttattgactttaagggcggctgggttttagagactgtacctacctagggggaacacttccgaagtttaggactattccctgatccgctgggaggcaggttactgaggaagtccctttaaaaacaaaggagtttatactgagaaaagcataaacagtgatttgtatggattcacactgactaatatagctcatgccattaaagtggggtctcttctctaaaggagggttatatgatctagccccgtagacctaagtgtggtttcagacctgttcttcctggtcctctccttggaatccatatttctactagttggactttttctgtttgtctggctctcagaggattataggaggccctgtgaagtgactcagtgaattttgatttgtgggcaagtagatggttccctagtctgaaattgactttgccttaggtgcttcaattcttcataagctcccagttcttaaaggacaagatccttgtaaacatggcaatggcattcattaggaatctagctgggaaaatccagtgtgtatgcttggaaatgagggatctggggctggagagaaaggcatgggcatgccttggagggacttgtgtgtcaagctgaggacctttactttaagctctaggggaccaggcaaggggagatgtagatacgttactctgatggggtggatgaattgaagaaggatgaggcaagaatgaaggcagagaccagggaggaggctctccaagtggccaaggcataaagcaagaaatgaggcctggtgactgcttagtggcagagcagtgaaagagagggaggcatcaaagtgagtctcgatttctagctgggtgggtggtagcgatgtccagtaggccagtggctactgaggtctgcagtggaggagggtggttgggctggagacagatgatgagggagtcatcagcctgtgggtggaagaaaagggaacctcttccaactgttttctttgcttcttccctctctttctctttttttttttttttggacagagtcttgctctgtcacccaggctgaaatgcagtggcatgatcttggctcaccacagcctccgcctcctgggttcaagcaattctcctgtctcagcctccagagtagctgggattacaggcacatatcactgtgcccggctaatttttgtattttcagtggagatgggatttcaccatgttggtcgggctggaatgaactcctgacctcaagtgatccacctgcctcagcctcccaaagtgttgggattacaggcatgagccaccgcgcccggcctttcttccctctcttaaagagtgtttatttaattccacaaacatgagcttgtcaccccctgtagcctggcatctcctacacgaggtgatggctgaggcttctgcttctgctggggtagctctgatctttctgctttctctggcactgtctacccatgttgcctcaccccacaggtcccagggcacctctctcgggcaagtcttggaaccctctgacactgatttgctctcttttctgagctgcttttagccacccatcctcgggacctgttttctctctgcctccacccctgcgggcagtcttaggtctcctgcccctcacgagcaccccagagaggccacgtgctcagtgatctcagtgggcgcatctttctagtcttgctattctttttggccatgttgttcagaaaccatactgggcagggccgacttcaccctaaaggctgcgtctcttcactctgcttttgtttgttccaaataaagtggcttcagaattgctaaccctagcctctgtgaacttgtgaggtacaattttgtgtctgttatgttaacaaaaatacatacataccttcctggtgatggtataaattgctattctctattggaaagcaatttggaatgaaaatttaaagaaccattttaaaatatgctatcctgcgtacctccattccacccacccccagggatgtagcctactgaaataattttaaagaagtcaccatatgagagaaaatgttattgctatattgttattgtgagaaattggaaatagactaaatgttcagcactataggaataattaatgaaattacatatactctatacaatcattatgctgccattgaaataataaatacaaaggcgcaaggggggaaaagcttataatgttagtgaaactaagactgatttttttataaagcagcagttttcagacccttggagactccaattcggtagaaccagagcttcatcttctctgtcgaagctgtgacaggagttgcaaatgcctctcctttttgctgagtttgcagctgctgtttttccggcagcacatctgtgcaggcctctgcctcggcccctctggatctgctgattgagcagcggattgatctgtccttctctttcgtgttgacccatgtgaggaaccaactggcaagggaacaagaaatggaaataggcctcctttgcatcatgacctgtacatcctgcaattggaaaagattgtactttagttggtttaaccagcagcattatttttctaaactaagcagtaagaaggaattaggttttatgtgggatcaacagactgggtctcaaaagaggaaggtgatagaacacagtggggagggggaggtgcactagaaacagagggcctatgctttcattctggctttgctacttaatagctgtgtgacccaatcttagagacttaacctctctgaacttccattttctcatgtataaaatgggaaatattaaaggatactcactgggctggtggcttgtgcctgtaatcccagcacttggggaggttgaggtgggaggatcacttgagcccaggtgttcaagaccagcccaggcaacatggcaagactctgtctctatgaaaaaattaaaaattagccaggtgtggtggtgtgcacctgtagtcttagctacttggtaggctgagatgggaggatcacttgggcttgggaggtcaaggctgcggtgagctgtgattccatcactgcactccagcccgggcggcagagcgagacactgaatccaaacgacaacaacaacaaaaggcaaaaaaataaaagtgccctctttatggagttgtgtaaggtgaagcatatacactattcaacatagtaactatataaaggaagtattgttgttgttactgtagttaataccattaagtgagatgtttcgtatagtggaaagcacatggactctgaattcagactggtctgactttgagtctcagctccacatctagtaatactatgaccaagccctggttaaaatcatgtttttttttcttcagcctcagtcttctcacatataaaatagggacactgtcatttacctcagttttctgtgaggataaaacaacgacagtgtatatgcaagtattttgtaaattttgtagtgctcctcaagatttagttggtgtttactacttgtactttctcactggaatggcagatgctgttggacagcagggacaatgaccacttttgggaacagcagttggatggcttagattggacagcccaagacatcgtggcgtttttggccaagcacccagaggatgtccagtccagtaatggttctgtgtacacctggagagaagctttcaacgagactaaccaggcaatccggaccatatctcgcttcatggaggtgaatctgttgctgggatcatttagaaaagacttaacggcttctttctctgagacgttacaataaggttcaggcaggaggcaagtttagaaataatgtatagtctcatttacaaaactatccctcaagcctaacacaggatttgataacaaaaggcacttaataaatgttagttgagtggttgaatgagtaaataaactctagctttagtaaattaactctagcttattctatataggctcaagagaatatttctacccattttcttctaggttttcctatctcagtgactaatggtagcaaagcattcccttaaaaaggcattatttgtgaaacttatctaaaatcgaattcgggtccaattaaatttttgaaattttatattaaaaattatattagtagggatgggtaagaggtgttttggtctggttggttggttagttgctatgactcagaattgctaagaaaacagaaaagtaagataagatcattgttttaacctcttttcctccacaaaatcaataaataacatatccctaaattactcttagaatttctcttaaattgcagtgaaaaaccaaaatccttcattcttggttgaaggttggaaaactacgttagagaggattagagagagaggatgagcaatcgtgtagtcagcccttgcctcctagtgtaggatttgtctcagccactgcttgttgtcctggctgccaacgttctcatgaaggctgttcttctatcagtgtgtcaacctgaacaagctagaacccatagcaacagaagtctggctcatcaacaagtccatggagctgctggatgagaggaagttctgggctggtattgtgttcactggaattactccaggcagcattgagctgccccatcatgtcaagtacaagatccgaatggacattgacaatgtggagaggacaaataaaatcaaggatgggtaagtggaatcccatcacaccagcctggtcttggggaggtccagagcacctattatattaggacaagaggtactttattttaactaaaaatttggtagaaatttcaacaacaacaaaaaaactcaacttggtgtcatgattttggtgaaattggtacatgacttgctggaaggtttttcataggtcataaaataacagtatcttttgatttagcatttctactcaagggaattaattccaggaattttggtggcaggcacctgtaatcccagctactcgggaggctgaggcaggagaattgcttgaacccaggaggcagaggttgcagtgagctaagatcgcatcattgcactcccgcctgggcaataagagtgaaactccatctcaaaaaaaaaaaaagatacaaaaatagaaaaaggggcttggtaagggtagtagggttttgggcaatttttttttttttttttttttattgtatggttctaaaggaatggttgattacctgtggtttggttttaggtactgggaccctggtcctcgagctgacccctttgaggacatgcggtacgtctgggggggcttcgcctacttgcaggatgtggtggagcaggcaatcatcagggtgctgacgggcaccgagaagaaaactggtgtctatatgcaacagatgccctatccctgttacgttgatgacatgtaagttacctgcaagccactgtttttaaccagtttatactgtgccagatgggggtgtatatatgtgtgtgcatgtgcatgcatgtgtgaatgatctggaaataagatgccagatgtaagttgtcaacagttgcagccacatgacagacatagatatatgtgcacacactagtaaacctctttccttctcatccatggttgccacttttatctttttatttttatttttttttttgagatggagtctcgctctgacgcccaggctggagtgcagtggctcgatctcggctcactgcaacctttgcctcccgggttcaagctattctcctgcctcagcctccacagtagctgggactacaggctcatgctgccacgcccggctgactttttgtattttagtagagacgaggtttcaccatgttacccaggctagacttcaactcctgagctcaggcaatccaccctccttggcctcccaaagtgctgggattacaggtgtgagccactgcacccagcccaccactttaattttttacactctacccttttggtcaaaatttgctcaatctgcaagcttaaaatgtgtcatgacaaacacatgcaagcacatactcacacatagatgcagaaacagcgtctaaacttataaaagcacagtttatgtaaatgtgtgcacttcttctccctaggtggtaaaccacatttcaaaacaacccaaataaaactgaacaaagcttcttcctcttagactttttagaaaatctttcagtgctgagtcactaagctgccaagttctcattgtgggaactatgcctttggatgtaatgatttcttctaagacaatgggcggaggtgtagttattgcagacatctgaaatatgtaatgtttcttccagattctggaaattctcttattctctgtggttggtggtggtggtgggatgtgtgtgtgtgtgtgtgtgtgtgtgtgtgtgtgtgtgtagggatcaggatgcgggaggagctgggttctgcttgtattggttctctgttttgcattgaatagtgtgtttccttgtatggctatctatagcttttcaaggtcaccagaaattatcctgtttttcaccttctaaacaattagctggaatttttcaaaggaagacttttacaaagacccctaagctaaggtttactctagaaaggatgtcttaagacagggcacaggagttcagaggcattaagagctggtgcctgttgtcatgtagtgagtatgtgcctacatggtaaagctttgacgtgaacctcaagttcagggtccaaaatctgtgtgcctttttactttgcacatctgcattttctattctagcttggaatctgaaacattgacaagagctgcctgaaatgtatgtctgtggtgtgattagagttacgataagcaagtcaatagtgagatgaccttggagatgttgaacttttgtgagagaatgagttgtttttttgttttggtttttagtactttaacataatctacctttagtttaagtatcgctcacagttacctagttactgaagcaagcccccaaagaaatttggtttggcaacactttgttagcctcgtttttctctctacattgcattgctcgtgaagcattggatcatacgtacatttcagagtctagagggcctgtccttctgtggcccagatgtggtgctccctctagcatgcaggctcagaggccttggcccatcaccctggctcacgtgtgtctttctttctccccttgtccttccttggggcctccagctttctgcgggtgatgagccggtcaatgcccctcttcatgacgctggcctggatttactcagtggctgtgatcatcaagggcatcgtgtatgagaaggaggcacggctgaaagagaccatgcggatcatgggcctggacaacagcatcctctggtttagctggttcattagtagcctcattcctcttcttgtgagcgctggcctgctagtggtcatcctgaaggtaaggcagcctcactcgctcttccctgccaggaaactccgaaatagctcaacacgggctaagggaggagaagaagaaaaaaaatccaagcctctggtagagaaggggtcatacctgtcatttcctgcaatttcatccatttatagttggggaaagtgaggcccagagaggggcagtgacttgcccaaggtcaacccagccgggtagcagctaagtaggatgagagtgcagggttcatgctttccagataaccacatgctcaactgtgccatgctgtctcattggtagtggttcatggcagcatctgaaagctatttattttcttagatatattgggtggcgattcttcctaagtttctaagaacaataatcagaaggatatatattgttgcaggttagactgtctggaagcagaggctgaaatagagtttgatgtatgggtatttatgagggctcaatacctatggaagagatatggaagatgcaggattgggcagagggaggagttgaactgtgatatagggccaaccccgtggggcactctagagaatatgcagcttgttggagttgttcttcatcgagctgaaacatccagccctttgtgctcccccaaggcctccctcctgacaccacctacctcagccctctcaatcaatcactggatgtgggctgccctgggaaggtcgtgccccagggcctacatggctctctgctgctgtgacaaacccagagttgctgatgcctgaggccgtctactgacagctgggcaacaaggcttccctgaatggggactctgggcagtgcagttttgtgtctgaaccatacattaatatatttatatccgaattttctttctctgcaagcatttcatataaagacacatcaggtaaaaataaatgtttttgaagcaaaaggagtacaaagagataagaactaactaatttaatactagttaccatctgttacaaatagttcctactgattgccaaggactgtttaaacacatcacatgggcttcttcttctatcctcactaacccttttaacagacaaggaaatgaggctcaggaaggtcaaggactttattgaggttccacagtaggatacagttcttgctaaaagcaacccctccctcatgctctgttatctaactgcaaggggaaggtcagtggcagaggtagtggtcccatggttggtgcataagagctgctctgagacaactgcatgctggtgggtcctgcagacatgtacccatcagccggagataggctcaaaatatccacaagagtttggatgattgtgggaatgcagaatccatggtgatcaagagggaaagtcaagttgcctggccattttccttggcttttagacagaaaagttacgtgggatattatctcccacagctcttctgtggtgccaccagtcatagtccttatataaggagaaaccagttgaaattacctattgaagaaacaaagagcaaactcgcccactgaaatgcgtagaaagccctggactctgttgtattcataactctgccattatttttctgcgtagttttgggtaagtcacttatcttctttaggatggtaatgatcagttgcctcatcagaaagatgaacagcattacgcctctgcattgtctctaacatgagtaggaataaaccctgtcttttttctgtagatcatacaagtgagtgcttgggattgttgaggcagcacatttgatgtgtctcttccttcccagttaggaaacctgctgccctacagtgatcccagcgtggtgtttgtcttcctgtccgtgtttgctgtggtgacaatcctgcagtgcttcctgattagcacactcttctccagagccaacctggcagcagcctgtgggggcatcatctacttcacgctgtacctgccctacgtcctgtgtgtggcatggcaggactacgtgggcttcacactcaagatcttcgctgtgagtacctctggcctttcttcagtggctgtaggcatttgaccttcctttggagtccctgaataaaagcagcaagttgagaacagaagatgattgtcttttccaatgggacatgaaccttagctctagattctaagctctttaagggtaagggcaagcattgtgttttattaaattgtttacctttagtcttctcagtgaatcctggttgaattgaattgaatggaatttttccgagagccagactgcatcttgaactgggctggggataaatggcattgaggaatggcttcaggcaacagatgccatctctgccctttatctcccagctctgttggctatgttaagctcatgacaaagccaaggccacaaatagaactgaaaactcttgatgtcagagatgacctctcttgtcttccttgtgtccagtatggtgttttgcttgagtaatgttttctgaactaagcacaactgaggagcaggtgcctcatcccacaaattcctgacttggacacttccttccctcgtacagagcagggggatatcttggagagtgtgtgagcccctacaagtgcaagttgtcagatgtccccaggtcacttatcaggaaagctaagagtgactcataggatgctcctgttgcctcagtctgggcttcataggcatcagcagccccaaacaggcacctctgatcctgagccatccttggctgagcagggagcctcagaagactgtgggtatgcgcatgtgtgtgggggaacaggattgctgagccttggggcatctttggaaacataaagttttaaaagttttatgcttcactgtatatgcatttctgaaatgtttgtatataatgagtggttacaaatggaatcattttatatgttacttggtagcccaccactcccctaaagggactctataggtaaatactacttctgcaccttatgattgatccattttgcaaattcaaatttctccaggtataatttacactagaagagatagaaaaatgagactgaccaggaaatggataggtgactttgcctgtttctcacagagcctgctgtctcctgtggcttttgggtttggctgtgagtactttgccctttttgaggagcagggcattggagtgcagtgggacaacctgtttgagagtcctgtggaggaagatggcttcaatctcaccacttcggtctccatgatgctgtttgacaccttcctctatggggtgatgacctggtacattgaggctgtctttccaggtacactgctttgggcatctgtttggaaaatatgacttctagctgatgtcctttctttgtgctagaatctctgcagtgcatgggcttccctgggaagtggtttgggctatagatctatagtaaacagatagtccaaggacaggcagctgatgctgaaagtacaattgtcactacttgtacagcacttgtttcttgaaaactgtgtgccaggcagcatgcaaaatgttttatacacattgcttcatttaattctcacaaggctactctgaagtagttactataataaccagcaattttcaaatgagagaactgtgactcaaagacgttaagtaaccagctttggtcacacaactgttaaatgttggtacgtggaggtgaatccacttcggttacactgggtcaataagcccaggcgaatcctcccaatgctcacccaattctgtatttctgtgtcctcagagggggtacaactaggagaggttctgtttcctgagtacaggttgttaataattaaatatactagctctaaggcctgcctgtgatttaattagcattcaataaaaattcatgttgaatttttctttagtacttctttcttaatataatacatcttcttgaccaagtccaagaggaacctgcgttggacagttttcatatgagatcaaattctgagagagcaagatttaaccctttttggttcaccttctgatcctcccctaaggaggtatacatgaaatatttattactcctgcctgaacttctttcattgaatatgcaattttgcagcatgcagattctggatttaaattctgagtcttaacttactggctgagggaccttggataggctccttatccctcagtttcctcatctctaaaatggggatggcacctgccccgtgggttgttggaaggacttacagaggtgcagaatgtacgttgtacatagcaggtttcagcaaatgttagctccctctttccccacatccattcaaatctgttccttctccaaaggatgtgtcaaggaggaaatggacctggctgggaaaccctcagaatactgggatgatgctgagcttggctcatacctgtgctttgctttcaggccagtacggaattcccaggccctggtattttccttgcaccaagtcctactggtttggcgaggaaagtgatgagaagagccaccctggttccaaccagaagagaatatcagaaagtaagtgctgttgacctcctgctctttctttaacctagtgctgctgcctctgctaactgttgggggcaagcgatgtctcctgcctttctaaaagactgtgaaaccactccaggggcagagaaatcacatgcagtgtccctttccaaatcctcccatgccatttatgtccaatgctgttgacctattgggagttcacggtctcgatccctgagggacattttctttgttgtcttggcttctagaagagtatcttttacttgccccctcccaaacacacatttcatggtctcctaacaagctagaagaaagaggtaaagacaagcgtgattgtggaaccatagcctcgctgcctgcctgtgacatggtgacctgtgtatcagcctgtgtgggctgagaccaagtggctaccacagagctcagcctatgcttcataatgtaatcattacccagatccctaatcctctcttggctcttaactgcagacagagatgtccacagctcatcaaaggctctgccttctgggttctttgtgcttagagtggcttcctaaatatttaataggtcccttttctgccagtctcttctgtgcccatcccctgattgcccttggtaaaagtatgatgccccttagtgtagcacgcttgcctgctgttcctaatcatcttctcctacctcctctttacacctagctcctgtttcagtcacctagaaatgctcacagtcgctggaatatgtcatgttcttccacacctccatgcctttgtaggtactgtttgctctcacaggagaactttctctctaacttgcctatcttctcaactcctcctttctctccaagatctagttccggatcccctcccctgagcatccctccttggttctcaggtagtcagtcactctctgccctgaacttccatggcacgtgaaagaaaatctttttattttaaaacaattacagactcacaagaagtaatacaaattacatgagggggttcccttaaacctttcatccagtttccccaatggtagcagcatgtgtaactgtagaatagtatcaaaaccatgaaattgacataggtacaattcacaaaccttcttcagatttcactagctttatgtgcgctcatttgtgtgtgtgtgtgcgtatttagttctatgcaattttatcatgtgtgaattcatgtaattactagctcagtcaagctgcagaaatatctcattgtcacaaagctccttcatgctaccccttaatggccacagccacctcccttcttcctcagttcctgacacctgtcaaccactaatgcgttcctcgtttttacagttttattatttctagaatgttacataaatggaaccatacagtaggtatccttttgatactggctttttttttttttcactcagcagtattcccttagatctatccaagttgtgtgtgtcaacagttcattcctcttcactgctgagtagtgttccctgggaggggtgtatcacagttccatggcatttttagatgtattttttaaacagctttcagcatcctctattttaattgttcatcaagtcctttttcccaatagactctgaatgctcctttatcatcgtattcccatcaccaacatcagtacccaaataggccctaaataaacatttatagcctcctgcctgcctgagaaaccagggtggacatggagagaaggcacttctgaaagttcaagcgcagtgccctgtgtccttacactccactcctcagtgctttctgtgggttcatttctgtcttctctcctgtcacagtctgcatggaggaggaacccacccacttgaagctgggcgtgtccattcagaacctggtaaaagtctaccgagatgggatgaaggtggctgtcgatggcctggcactgaatttttatgagggccagatcacctccttcctgggccacaatggagcggggaagacgaccaccatgtaagaagagggtgtggttcccgcagaatcagccacaggagggttctgcagtagagttagaaatttataccttaggaaaccatgctgatccctgggccaagggaaggagcacatgaggagttgccgaatgtgaacatgttatctaatcatgagtgtctttccacgtgctagtttgctagatgttatttcttcagcctaaaacaagctggggcctcagatgacctttcccatgtagttcacagaattctgcagtggtcttggaacctgcagccacgaaaagatagattacatatgttggagggagttggtaattcccaggaactctgtctctaagcagatgtgagaagcacctgtgagacgcaatcaagctgggcagctggcttgattgccttccctgcgacctcaaggaccttacagtgggtagtatcaggaggggtcaggggctgtaaagcaccagcgttagcctcagtggcttccagcacgattcctcaaccattctaaccattccaaagggtatatctttggggggtgacattcttttcctgttttctttttaatctttttttaaaacatagaattaatatattatgagcttttcagaagatttttaaaaggcagtcagaaatcctactacctaacacaaaaattgtttttatctttgaataatatgttcttgtttgtccattttccatgcatgcgatgttaggcatacaaaatacattttttaaagaatactttcattgcagattggaaacttcgtttaaaaaatgctcatactaaaattggcatttctaacccataggcccacttgtagttatttaccgaagcaaaaggacagctttgctttgtgtgggtctggtagggttcattagaaaggaatgggggcggtgggagggttggtgttctgttctctctgcagactgaatggagcatctagagttaagggtaggtcaaccctgacttctgtacttctaaatttttgtcctcaggtcaatcctgaccgggttgttccccccgacctcgggcaccgcctacatcctgggaaaagacattcgctctgagatgagcaccatccggcagaacctgggggtctgtccccagcataacgtgctgtttgacatgtgagtaccagcagcacgttaagaataggccttttctggatgtgtgtgtgtcatgccatcatgggaggagtgggacttaagcattttactttgctgtgtttttgttttttctttttttcttttttatttttttgagatggagtctcgctctgtagccaggctggactgtagtggcgcgatctcggctcactgcaaccttggcctcccaggttcaagcgattctcctgcctcagcctcccgagtagctgggactctaggcacacaccaccatgcccagctaatttttgtgtttttagtagagacggggtttcaccatgttggccaggatggtctcaatgtcttgacctcgtgatccgcccacctcggtctcccaaagtgctgggaacacaggcatgagccactgtgtctggccacattttactttctttgaatatggcaggctcacctccgtgaacaccttgagacctagttgttctttgattttaggagaagtgggaggtgaatggttgagctgtagaggtgacatcagcccagccagtggatgggggcttgggaaacattgcttcccattattgtcatgctggagggccctttagcccatcctctcccccgccaccctccttattgaggcctggagcagacttcccagacctggtagtgcttcagggccctggtatgatggacctatatttgctgcttaagacatttgctcccactcaggttgtcccatcagccataaggcccccagggagcccgtgtgatggagcagagagagacctgagctctgcaatcttgggcaaggcttttcccttatgtttcttcttatctaaagtgaacagctggggctcatgtgctccctcctcatctaaagtgaacacatggggctcatgtgcagggtcctccccgctttcagagcctgaggtcccctgaggctcaggaaggctgctccaggtgagtgccgagctgacttcttggtggacgtgctgtggggacagcccattaaagaccacatcttggggccctgaaattgaaagttgtaactgcctggtgcatggtggccaggcctgctggaaacaggttggaagcgatctgtcacctttcactttgatttcctgagcagctcatgtggttgctcactgttgttctaccttgaatcttgaagattatttttcagaaattgataaagttattttaaaaagcacggggagagaaaaatatgcccattctcatctgttctgggccaggggacactgtattctggggtatccagtagggcccagagctgacctgcctccctgtccccaggctgactgtcgaagaacacatctggttctatgcccgcttgaaagggctctctgagaagcacgtgaaggcggagatggagcagatggccctggatgttggtttgccatcaagcaagctgaaaagcaaaacaagccagctgtcaggtgcggcccagagctaccttccctatccctctcccctcctcctccggctacacacatgcggaggaaaatcagcactgccccagggtcccaggctgggtgcggttggtaacagaaacttgtccctggctgtgcccctaggtcctctgccttcactcactgtctggggctggtcctggagtttgtcttgctctgtttttttgtaggtggaatgcagagaaagctatctgtggccttggcctttgtcgggggatctaaggttgtcattctggatgaacccacagctggtgtggacccttactcccgcaggggaatatgggagctgctgctgaaataccgacaaggtgcctgatgtgtatttattctgagtaaatggactgagagagagcggggggcttttgagaagtgtggctgtatctcatggctaggcttctgtgaagccatgggatactcttctgttatcacagaagagataaagggcattgagactgagattcctgagaggagatgctgtgtctttattcatctttttgtccccaacatggtgcactaaatttatggttagttgaaagggtggatgcttaaatgaatggaagcggagaggggcaggaagacgattgggctctctggttagagatctgatgtggtacagtatgaggagcacaggcaggcttggagccaactctggctggccctgagacattgggaaagtcacaacttgcctcaccttctttgccgataataatagtggtgcttacctcatagaggattaaattaaatgagaatgcacacaaaccacctagcacaatgcctggcatatagcaagttcccaaataaaatgctactgttcttacctctgtgaggatgtggtacctatatatacaaagctttgccattctaggggtcatagccatacagggtgaaaggtggcttccaggtctcttccagtgcttacccctgctaatatctctctagtccctgtcactgtgacaaatcagaactgagaggcctcacctgtcccacatccttgtgtttgtgcctggcaggccgcaccattattctctctacacaccacatggatgaagcggacgtcctgggggacaggattgccatcatctcccatgggaagctgtgctgtgtgggctcctccctgtttctgaagaaccagctgggaacaggctactacctgaccttggtcaagaaagatgtggaatcctccctcagttcctgcagaaacagtagtagcactgtgtcatacctgaaaaaggtgagctgcagtcttggtgctgggctggtgttgggtctgggcagccaggacttgctggctgtgaatgatttctccatctccaccccttttgccatgttgaaaccaccatctccctgctctgttgcccctttgaaatcatatcatacttaaggcatggaaagctaaggggccctctgctcccattgtgctagttctgttgaatcccgttttccttttcctatgaggcacagagagtgatggagaaggtccttagaggacattattatgtcaaagaaaagagacttgtcaagaggtaagagccttggctacaaatgacctggtgttcctgctcattacttttcaatctcattgaccttaacttttaaactataaaacagccaatatttattaggcactgatttcatgccagagacactctgggcatgaaagaaagtaatgataatagttaattttatatagcgttgttaccatttacaaccttttttttttttttaacctctatcatctcaattaaagtgcagagagaccctgggaagaaggtaactatatttattatcccagatgagggaagtgaggcttgtagggaattggtagctgattcaaggtcacccagcaggtaaataacagtggtgggaccagacccaattaccaggtatgttttcctctgtaccgcagtacatgcctgagatttatttgtgtgttgaagccagtggtacctaatgtatttacatcccaacctgaaactcctatccacttatttaccttttaatgagcctcttaactcaagtgcagtctgaggaccagcagcatcaggatcacttgggaacttgttagaaattcagcaacctgggcccagctcagacctaccgaatcagaatctgtgcattttaacaaggttcttgagtggttgaacacacattaaagcatgagaagcattgaactagacatgtagccaggtaaaggccttgcctgagatggttggcaaaggcctcattgcagcattcattggcaggccacagttcttttggcagctctgcttcctgacctttcaccctcaggaagcgaggctgttcacacggcacacacatgccagacagggtcctctgaagccacggctgccagtgcatgtgtcccagggaaagctttttcctttagttctcacacaacagagcttcttggaagccctccccggcgaaggtgctggtggctctgccttgctccgtccctgacccgttctcacctccttctttgccatcaggaggacagtgtttctcagagcagttctgatgctggcctgggcagcgaccatgagagtgacacgctgaccatcggtaaggactctggggtttcttattcaggtggtgcctgagcttcccccagctgggcagagtggaggcagaggaggagaggtgcagaggctggtggcgctgactcaaggtttgctgctgggctggggctgggtggctgcgggtgtgggagcagcttggtggcgggttggcctaatgcttgctggggtgcctggggctcggtttgggagctagcagggcagtgtcccagagagctgagatgattggggtttggggaatcccttaggggagtggacactgaataccagggatgaggagctgagggccaagccaggagggtgggatttgagcttagtacataagaagagtgagagcccaggagatgaggaacagccttccagatttttcttgggtagcgtgtgtaggaggccagtgtcaccagtagcatatgtggaacagaagtcttgacccttgctatctctgcctagtcctaatggctggcttttcccaggaaggcttctgcttccatggactgttagattaaccctttatttaggtaaatgagggaacctactttataagcataggaaagggtgaagaatcttttaagattcctttactcaagttttcttttgaagaatcccagagcttaggcaatagacaccagactttgagcctcagttatccattcacccatccacccacccacccacccatccttccatcctcccatcctcccattcacccatccacccatccagctgtccacccattctacactgagtacctataatgtgcctggctttggtgatacaaaggtgaataagacatagtcctttcctttgcccccaaccctcagaccagagatgaacatgtggaatgacctaaacacctggaacaggtgtggtgtatgagcggcaggcctctgatgagagggtgggggatggccagccctcactccgaagcccctctgagttgattgagccatctttgcattctggtccctgcagatgtctctgctatctccaacctcatcaggaagcatgtgtctgaagcccggctggtggaagacatagggcatgagctgacctatgtgctgccatatgaagctgctaaggagggagcctttgtggaactctttcatgagattgatgaccggctctcagacctgggcatttctagttatggcatctcagagacgaccctggaagaagtaagttaagtggctgactgtcggaatatatagcaaggccaaatgtcctaaggccagaccagtagcctgcattgggagcaggattatcatggagttagtcattgagtttttaggtcatcgacatctgattaatgttggccccagtgagccatttaagatggtagtgggagatagcaggaaagaagtgttttcctctgtaccacagtacatgcctgagatttgtgtgttgaaaccagtggtacctaacacatttacatcccaaccttaaactcctatgcacttatttaccctttaatgagcctctttacttaagtacagtgtgaggaacagcggcatcaggatcacttgggaacttgttagaaattcagcaacttgggcccagctcagacctactgaatcagaatcaggagcaattctctggtgtgactgtgtcacagccaggtatcaactggattctcatacataggaaatgacaaacgtttatggatggatagtctacttgtgccaggtgctgagatttgttttttgttttttgatttttttttaatcactgtgacctcatttaattctcaaaaaaagatgaaaaaatgaacactcaggaatgctgacatgagattcagaatcaggggtttggggcttcaaagtccatcctctctttatccatgtaatgcctccccttagagatacaacatcacagaccttgaaggctgaaggggatataaaagctgtctggccaagtggtctccaagcttgacagtgcagcagaatcacctggggatattattaaaaataaacatactaaggtttggcttcagggcctgtgaatcagaatttctggaggtgaggccttgaagtctgtatttctattgcatactttggacacagtggtctatagactagagtttggaaatgattgcgctcattcagattctcttctgatgtttgaattgctgccatcatatttctagtgctctatttcctcctgctcattctgtcttggataacttatcatagtactagcctactcaaagatttagagccacagtcctgaaagaagccacttgactcattccctgtaggttcagaataaatttcttctgcgcagtgtctgtcatagctttttttaaatttttttttatttttgatgagactggagttttgctcttattgcccaagctggagtgcagtggtgcgattttggctcactgcaacctccacctcccaggttcaagcgattctcctgcctcagcctcccaagtagctgagattacaagcatgtgctaccacgcccagctaattttgtatttttagtagagatgggttttatccatgttggtcaggctggtctcgagctccagacctcaggtgatctgcccgcctcggcctcccaaagtgctgggattataggcctgagccacagcgctcagccataactttaatttgaaaatgattgtctagcttgatagctctcaccactgaggaaatgttctctggcaaaaacggcttctctcccaggtaactctgagaaagtgttattaagaaatgtggcttctactttctctgtcttacggggctaacatgccactcagtaatataataatcgtggcagtggtgactactctcgtaatgttggtgcttataatgttctcatctctctcattttccagatattcctcaaggtggccgaagagagtggggtggatgctgagacctcaggtaactgccttgagggagaatggcacacttaagatagtgccttctgctggctttctcagtgcacgagtattgttcctttccctttgaattgttctattgcattctcatttgtagagtgtaggtttgttgcagatggggaaggtttgttttgttgtaaataaaataaagtatgggattctttccttgtgccttcagatggtaccttgccagcaagacgaaacaggcgggccttcggggacaagcagagctgtcttcgcccgttcactgaagatgatgctgctgatccaaatgattctgacatagacccaggtctgttagggcaagatcaaacagtgtcctactgtttgaatgtgaaattctctctcatgctctcacctgttttctttggatggcctttagccaaggtgatagatccctacagagtccaaagagaagtgaggaaatggtaaaagccacttgttctttgcagcatcgtgcatgtgatcaaacctgaaagagcctatccatatcacttcctttaaagacataaagatggtgcctcaatcctctgaacccatgtatttattatcttttctgcggggtcctagtttcttgtatacattaggtgtttaattgttgaacaaatattcattcgagtagatgagtgattttgaaagagtcagaaaggggaatttgctgttagagttaattgtaccctaagacttagatatttgaggctgggcatggtggctcatgccagtaatcccagcgctttgagaggctgaggtgggtagatcacctgaggtcaggagtttgagaccagtctgaccaacaaggtgaaaccccgtctctactaaatacaaaaaattagccgagtgtggtggcacatgcctgtcatcccagctacttgggaggctgaggcaggagaatcgcttgaacccaggaggcagaggttgcagtcagccacggttgcgccattgcactccagactgggcaacaagagtgaaaactccatctcaaaaaagaaaaaaaaagaattagatattttggatgagtgtgtctttgtgtgtttaactgagatggagaggagagctaagacatcaaacaaatattgttaagatgtaaaagcacatcagttaggtatcattagtttaggacaaggatttctagaaaatttttaggaacagaaaactttccagttctctcacccctgctcaaagagtgtatggctcttacattatatataactgcctgacttcatacagtatcagtacttagatcatttgaaatgtgtccacgttttaccaaaatataatagggtgagaagctgagatgctaattgccattgtgtattctcaaatatgtcaagctacgtacatggcctgtttcatagagtagtctataagaaattgatgacttgattcatccgaatggctggctgtaacacctggttacgcatgaacacctcttttcagttgtctcaagacacctttcttttctgtacttatcagacaaggactgaaaggcagagactgctactgttagacattttgagtcaagcttttccttggacatagctttgtcatgaaagccctttacttctgagaaacttctagcttcagacacatgccttcaagatagttgttgaagacaccagaagaaggagcatggcaatgccgaaaacacctaagataataggtgaccttcagtgttggcttcttgcagaatccagagagacagacttgctcagtgggatggatggcaaagggtcctaccaggtgaaaggctggaaacttacacagcaacagtttgtggcccttttgtggaagagactgctaattgccagacggagtcggaaaggattttttgctcaggtgagacgtgctgttttcgccagagactctggcttcatgggtgggctgcaggctctgtgaccagtgaaggcaggatagcatcctggtcaagatatggatgccggagccagatttatctgtatttcaatcccagttctattccttgccagttgtgtatccgctggcaagttacttctctatgcctcaatctcctcatctgtaaaatggggataataatattacctgcaatacagggttgttacgaaaataaaaatgaataggtgcttagaatggggcctgacattagtaagtgcttagttttgtgtgtgtatatgttatttttattttggaggagaacataaaaaggacaaagtgtagaaaaactggttgggtgtattcagctgtcataacatgagagttgttatgcccagatgcacttgacatgtgaatttattagaaacatgatttttctctgagttgatgtttaactcaaactgatagaaaagataggtcagaatatagttggccaacagagaagacttgttagactattgtctgcatgtcagtgtttgcatgctaacttgcttagttagaaaggttaaattttttcactctataaaatcaagaaatatagagaaaaggtctgcagagagtctttcatttgatgatgtggatattgttaagagcgggagtttggagcatacagagctcaagttgaatcctgactttgctacttattggctatatgaccttgggcaagctgcttagtctctctgatcctcagttacctttgtttgttgatgatgaccattgataacacaaccataaataatgacaacatagagatagttctcattatagtagttgttatacagaattattcactcaatgttaattttctgcattgaaatcccagaacattagaattgggggcattatttgaatctttaaggttataaggaatacatttctcagcaataaatggaaggagttttgggttaacttataaagtatacccaagtcatttttttttcagagaagatatggtagaaagtcttaggaggttgaagaaggaattggatatttattctttctgagactatcatgggagataatgactatggttgtccatgattggagccgttgctgtagagttggttttattatagtgtaggatttgaatgggccatgtgttctcagacctcagattaaaatgagaaaactgaggccagtggggagcgtgacttcacatgggtacacttgtgctagagacagaaccaggattcaggacttctggctcctggtcctgggttcatggcccaatgtagtctttctcagtcttcaggaggaggaagggcaggacccagtgttctgagtcaccctgaatgtgagcactatttacttcgtgaacttcttggcttagtgcctctgccaggtggccataacctctggccttgtgttgccagagaaaaggtttagttttcaggctccattgcttcccagctgccaagaatgccttggtgcagcacagtcataggccctgcattcctcattgccgtgctggttggtcggggaggtgggctggactcgtagggatttgccccttggccttgtttctaacacttgccgtttcctgctgtccccctgccccctccactgcctgggtaaagattgtcttgccagctgtgtttgtctgcattgcccttgtgttcagcctgatcgtgccaccctttggcaagtaccccagcctggaacttcagccctggatgtacaacgaacagtacacatttgtcaggtatgtttgtcttctacatcccaggagggggtaagattcgagcagaccaaagatgtttacgagggccaagggaatggacttcagaattacacggtggaatgaattttactgctgcggctcaggtccctgtataagctaatactgcatgcatagaacagcagcgaactaaccctgaataataggccagtcttctgttgagcctttcagcctctctcctcttcatcctactgttgtcaggaacagccacatgtgttttaggtgaaataatccacccttgcaaaaatccatgattaagttataaaatatttggatttgtggagctgtgttttaattctgtaactgagtcacagggcacactgtcaaagcatagaacctccagagacttgttttctgcaaagtataattcatgtaattattatctattctgttatatttgggatgttaggtagtgtttgttctttagataaaaatatcccccactctgtaacaatacattaaatcaaagaaaaggacaaaggatttttctgggtcttgttagcaggagctttcttcagtcctgaaagatttgtagacctgtagatgggggaactgtgtcagtgatacaaaagggaagcatttaaaaaaaaaaaagtatatatatatatatatatatatatatgtaatgtgaattggcctctttttctctaagcccacattttcttcttacatagttcaggtttactttattttttcctttccggctgctgaccctgtattgcccgtagttgtggaacatagcatgtgtttgtgacctgtgcctgttatttttgtgctttctagttgtgcatgcaaagagtacaaagttttcttgccctttcttggaaaatcctgcttgtctgtgccaaagggataattgtgaaagcacttttgaaatacttaatgagttgattttcttcaaattaaaaaaaatatataaatgtatatgtgtatgtacatgtgtgtacacatacacacctttatacatacagcccatttaaaacaagctccactttggagtgctctacgtcaccctgatgccgaatacagggccagagtctgagatccttctgggtggtttctgtgttttgttcatttctgttttaagagcctgtcacagagaaatgcttcctaaaatgtttaatttataaaaacatttttatctctcgattactggttttaatgaattactaagctggctgcctctcatgtacccacagcaatgatgctcctgaggacacgggaaccctggaactcttaaacgccctcaccaaagaccctggcttcgggacccgctgtatggaaggaaacccaatcccgtgagtgccactttagccataagcaggcttcttgtgcttgttgcctggtttgatttctaatatgctgcatttatcaactgcatgccacattgtgaccgccagcatttgccctttgaattattattatgttttatttacaaaaagcgaaggtagtaaccgaactaaattatctaggaacaaacgtttggagagtcttctaacaccgtgcaaagcacgtcattacagacatttgtttactgatttagaaccttaatatttaatttaaatagcactttacacttactgatgaaatgcttttcctttctttctctcccagcccctgtacttaagtgcttcaataggctctcattatatatgatttttaggttttgcttatcagcttcttcgcttttataatctgaaaagatggcatatgaatttttataaaaagggacactttcttcttctcaaattgtatatttttattgtactttccttcaaaacccccttttaaaaagtaagcagtggataaataaattcagtgaagcatccatatgacccttaagtgagtgtaggggaagggaggtcaccagatcactgtgagtgaagatggtggagaggtgaggatcttatgaggccgtgctcaaggctggtagaggtgggttagtgtttccaggtttaggcagaatctcagctgaggtcatgaaacaacagtgatctctgaaaaattatggcaaggtgggaaggtgctggagaattggagagggggcaaacttgactttcaagtttcaatgggaagataggtgactctgcacaccacagaacagtgagcatgataacctgtttatacaaggttctagagcagatttctaaatggatagctactgtgtgcttgtttgttcttaattagtattggatagttactaaatacttgttagtacttagtacataatgggtggtaaatcctagcagctaatattggttcccaaataaccagatgacaaggatagagaaggacacagacacggcctatctggatttcatggtgcctttgattttccacatgaaggttgtgtagggaagatagaagcatgagatgagatgataatatagttatctggattcatcactggccagctgaaccatatgaactcatggattgatgctagcttaggaaggctctgtaggagccagaactgggctgagagccagcccatagagacaaaagaggcccggccctgacatcagagggttcaaacatgatgtctgagccccacctacagtctgccggaggtggttggaaggaagagcctttatccttacaattcttactgaaattcaaatttttaggttttgcaaaaaaatggtggacctgaaggaaatttgacaggagcatgtctcagctgtatttaaatttgtctcagccaatccccttttgaatgttcagagtgtaagcttcaggagggcagcgcgtcttagtgtgacttttctggtcagttcaggtgctttaaggagacaattagagatcaatctggaaaacttcatttgaatttttaatacataagaaaacaataagaaatagttaaaaatatatatttataatatatatatgtgtgtgtgtgtgtgtgtgtgtgtgtgtgtatatatatatattttatttatttatttttttttgagatggagtctcgctctgttgcccaggctggagtgcagtggctcaatcttggctcactgccacctctgcctcccaggttcaagtgattctcctacctcagcctcctgagtagctgggattacaagcatgtgccaccacactggctaatttttctaattttagtagagatggagtttcaccatgttggacaggatggtcttgaactcctgacttagtgatccacccgccttcgcctcccaaagttctgggattacaggcatgagccatcgtgcctggcaattatatttaatatttaataataaggaaataattgctgtaactttactttaaattgtggaattctgaaactggaagggaactggaaatgacttgttgaatcaaatcattttaaacttttattttgccagtggaaaaaataagcccccaaaagagcaggggacctgctgatgtcccacagtaattcagagctggagatgaggttgaaggctttgtgtcttatctccagggaaaatttgtagacagcgtagctctttatgtgacgagcattctcaccccagtcatcccccaattctctactcatttgagaacataaattggatcttgccagtctctactcatttttcagcacatcgagcataagatccagactctttcccaggcctctctcatctggctcctctcctcctcctttatcattactcttcttcgtagcttatcctactccagccatgctgtcttcctattattcctaaaaaatagaaatgcatttcttcctagggcctttgtacctgcacttgccatcgcttttgctcagaatgttctttttgccaagcttttgcccagcttgttctccatcattgttatgttttggctgaaatgtcttctcttagtaggttcattctccccagtcactgtctttttattttgctttattttgggccatctaaggttatcttattagtgtatttgttgttcgtctcctccatgggcatacacctccatgaaggcaggtattttcaccttaggccctcgaatatactggacagcatctggcacgtagtagatgctcaacgaatgtttgttgtgtgagcaaatggttggttgattggattgaactgagttcagtatgtaaatatttagggcctctttgcattctattttacttatgtataaaatgatacataatgatgatataaatgatgtcacagtgtacaaggctgttgtgggatcaagcaatcaaatgagatcatgcttgtcttttccaaatggtgagggaatagatgcatgtttgtggttgttacggaatgatcctgtgctcctgaggcaacagaaaggccaggccatctctggtaatcctactcttgctgtcttccctttgcagagacacgccctgccaggcaggggaggaagagtggaccactgccccagttccccagaccatcatggacctcttccagaatgggaactggacaatgcagaacccttcacctgcatgccagtgtagcagcgacaaaatcaagaagatgctgcctgtgtgtcccccaggggcaggggggctgcctcctccacaagtgagtcactttcagggggtgattgggcagaaggggtgcaggatgggctggtagcttccgcttggaagcaggaatgagtgagatatcatgttgggagggtctgtttcagtcttttttgttttttgtttttttttctgaggcggagtcttgctctgtcgcccaggctggagtgctgtggcatgatcttgcctcactgcaacctccacctcccaggttcaagcgattctcctgcctcagcctcctgagtagctgggattacaggcacgcaccaccatgtctggctaatttttgtgtttttagtagagatagggtttcgccgtgttggctaggctggtctggaattcctgacctcaggtgatccacccgcctcggcctcccaaagtgctgggattacaggcgtgagccactacgcccagccctgtttcagtctttaactcgcttcttgtcataagaaaaagcatgtgagttttgaggggagaaggtttggaccacactgtgcccatgcctgtcccacagcagtaaagtcacaggacagactgtggcaggcctggcttccaatcttggctctgcaacaaatgagctggtagcctttgacaggcctgggcctgtttcttcacctctgaattagggaggctggaccagaaaactcctgtggatcttgtcaactctggtattcttagagactctgtttgggaaggagtcctgagccattttttttttcttgagaatttcaggaagaggagtgcttatgatagctctctgctgcttttatcagcaaccaaattgcaggatgaggacaagcaattctaaatgagtacaggaactaaaagaaggcttggttaccactcttgaaaataatagctagtccaggtgcggggtggctcacacctgtaatctcagtattttgggatgccgaggtggactgatcacctaaggtcaggagttcgaaaccagcttggccaatgtggcgaaaccctgtctctactaaaaattcaaaaattagccaggcatggtggcacatgcctgtaatcccagttacttgggaggctgaagcaggagaattgcttgaacctgggaggtggaggtcgcagggagccaaaattgcgccactgtactccagcctgagcaacacagcaaaactccatatcaaaaaataaaatgaataaaataacagctaatctagtcatcagtataactccagtgaacagaagatttattaggcatagtgaatgatggtgcttcctaaaaatctcttgactacaaagaatctcatttcaatgtttattgtttagatgttcagaataaattcttgggaaagaccttggcttggtgtaagtgaattaccagtgccgagggcagggtgaaccaagtctcagtgctggttgactgagggcagtgtctgggacctgtagtcaggtttccggtcacactgtggacatggtcactgttgtccttgatttgttttctgtttcaattcttgtctataaagacccgtatgcttggttttcatgtgatgacagagaaaacaaaacactgcagatatccttcaggacctgacaggaagaaacatttcggattatctggtgaagacgtatgtgcagatcatagccaaaaggtgactttttactaaacttggcccctgccgtattattactaattagaggaattaaagacctacaaataacagactgaaacagtgggggaaatgccagattatggcctgattctgtctattggaagtttaggatattatcccaaactagaaaagatgacgagagggactgtgaacattcagttgtcagcttcaaggctgaggcagcctggtctagaatgaaaatagaaatggattcaacgtcaaattttgccacttagtagcaacttgaccaggtaactggttatccttttaaagccttagtttatctaaattgtgatattaatgttgctcttataagtttgtcatgaggactaaattaaatggtgtacatagagtgccttgggtactctctgatgggggactccatgataatttgtggtctcatggagggagctctgggaaggtttaggagcctgccttggctctgcagccttgggagagccttctagcttcccaggacatggcagcctagtgttgaatgcttggctcagcaaatgtttgttctcgtttccttcccatcaacttggtcagttggggtctttcagttaggagtatctcagtgactttaaatggcatgggcatgctggagtgatagtgaccatgagtttctaagaaagaagcataatttctccatatgtcatccacaattgaaatattattgttaattgaaaaagcttctaggccaggcacggtggctcatgcctgtaatcccagcactttaggaggccaaggcgggtggatcacttgaggtcaggagtttgagaccagcctggccaacatggggaaaccctgtctctactaaaaatacaaaataagctgggcgtggtggtgcgtgcctgtaatcccagctacttgggaggctgaggcaggagaattgcttgaatctgggaggcggaggttgcagtgagctgagttcatgccattgcattccagcctgggcaacaagagcgaaaccatctcccaaaagaaaaaaaaaagaaagaaaaagcttctagtttggttacatcttggtctataaggtggtttgtaaattggtttaacccaaggcctggttctcatataagtaatagggtatttatgatggagagaaggctggaagaggcctgaacacaggcttcttttctctagcacaaccctacaaggccagctgattctagggttatttctgtccgttccttatatcctcaggtggatatttactccttttgcatcattaggaataggctcagtgctttctttgaactgattttttgtttctttgtctctgcagcttaaagaacaagatctgggtgaatgagtttaggtaagttgctgtctttctggcacgtttagctcagggggaggatggtgttgtaggtgtcttggattgaagaaagccttggggattgtttgtcactcacacacttgtgggtgccatctcactgtgaggaggacagaagccctgtgaacatgtggagcacacaggggcacagacagatttagattaggcctgctttatagagtttctgcctagagcatcatggctcagtgcccagcagcccctccagaggcctctgaaatatttgatatactgatttccttgaggagaatcagaaatctcctgcaggtgtctagggatttcaagtaagtagtgttgtgaggggaatacctacttgtactttccccccaaaccagattcccgaggcttcttaaggactcaaggacaatttctaggcatttagcacgggactaaaaaggtcttagaggaaataagaagcgccaaaaccatctctttgcactgtatttcaacccatttgtccttctgggttttgaaggaacaggtgggactggggacagaagagttcttgaagccagtttgtccatcatggaaaatgagataggtgatgtggctacgtcagggggcccgaaggctccttgttactgatttccgtcttttctctctgccttttccccaagggccaggacccctggatctctgggcagagcagacgcaggcccctataatagccctcatgctagaaaggagccggagcctgtgtataaggccagcgcagcctactctggacagtgcagggttcccactctcccaactccccatctgcttgcctccagacccacattcacacacgagccactgggttggaggagcatctgtgagatgaaacaccattctttcctcaatgtctcagctatctaactgtgtgtgtaatcaggccaggtcctccctgctgggcagaaaccatgggagttaagagattgccaacatttattagaggaagctgacgtgtaacttctctgaggcaaaatttagccctcctttgaacaggaatttgactcagtgaaccttgtacacactcgcactgagtctgctgctgatgatactgtgcaccccactgtctgggttttaatgtcaggctgttcttttaggtatggcggcttttccctgggtgtcagtaatactcaagcacttcctccgagtcaagaagttaatgatgccatcaaacaaatgaagaaacacctaaagctggccaaggtaaaatatctatcgtaagatgtatcagaaaaatgggcatgtagctgctgggatataggagtagttggcaggttaaacggatcacctggcagctcattgttctgaatatgttggcatacagagccgtctttggcatttagcgatttgagccagacaaaactgaattacttagttgtacgtttaaaagtgtaggtcaaaaacaaatccagaggccaggagctgtggctcatgcctgtaatcctagcactttgggaggccgaagcgggtggatcacttgaggtcaggagttcgagaccagcctggcctacatgacaaaaccccgtatctactaaaaatacaaaaaaattagctgggcttggtggcacacacctgtaatcccagctacttgggaggctgaggcaggagaattgcttgaaccctgtaggaagaggttgtagtgagccaagatcgcaccgttgcactccagcctgggcaacaagagcaaaactccatctcaaaaaacaaattaaatccagagatttaaaagctctcagaggctgggcgcggtggcttacacctgttatcccagcattttgggatgccgaggcgggcaaagcacaaggtcaggagtttgagaccagcctggccaacatagtgaaaccctgtctctgctaaaaacatagaaaaattagccgggcatggtggcgtgcgcctgtaatcccagctactcgggaggctgaggtgagagaattacttgaacccgggaggcggaggttgcagtgagcccagattgcaccactgcactccagcctgggcgacagagcaagactccatctcaaaaaaagctctcagaacaaccaggtttacaaatttggtcagttggtaaataaactgggtttcaaacatactttgctgaaacaatcactgactaaataggaaatgaatcttttttttttttaagctggcaagctggtctgtaggacctgataagtactcacttcatttctctgtgtctcaggtttcccatttttaggtgagaattaaggggctctgataaaacagaccctaggattgtggacagcagtgatagtcctagagtccacaagtctgcttttgagtgatgggcccatgtatctggcacatctgcaggcagagcgtggttctggctcttcagatgatgccggtggagcactttgaggagtcctcaccccaccgtgataaccagacattaaaatcttggggctttgcatcccaggatttctctgtgattccttctagacttgtggcatcatggcagcatcactgctgtagatttctagtcacttggttctcaggagccgtttatttaatggcttcacatttaatttcagtgaacaaggtagtggcattgctcttcacagggccgtcctgttgtccacaggttccagattgactgttgccccttatctatgtgaacagtcacaactgaggcaggtttctgttgtttacaggacagttctgcagatcgatttctcaacagcttgggaagatttatgacaggactggacaccaaaaataatgtcaaggtaaaccgctgtctttgttctagtagctttttgatgaacaataatccttatgtttcctggagtactttcaactcatggtaaagttggcaggggcattcacaacagaaaagagcaaactattaactttaccagtgaggcagtacggtgtagtgtagtgattcagagaatttgctttgccaccagacataccaggtaaccttgactaagttacttaacctatctaaacctcagttccctcatctgtgaaatggagacagtaatcatagctatttccaaactgttgtgagaattcaatgagttaaaggtataaggtcctcaccacagcgcctgcccacatagtcagtgatcactatgtcctgaacactgtaattacttcgccatattctctgatcatagtgttttgccttggtatgtgactagaatttctttctgaggtttatgggcatggttggtgggtatgcacctgcctgcaggagcccggtttgggggcattaccttgtacctggtatgttttctttcaggtgtggttcaataacaagggctggcatgcaatcagctctttcctgaatgtcatcaacaatgccattctccgggccaacctgcaaaagggagagaaccctagccattatggaattactgctttcaatcatcccctgaatctcaccaagcagcagctctcagaggtggctctgtaagtgtggctgtgtctgtatagatggagtggggcaagggagagggttatggagaaggggagaaaaatgtgaatctcattgtaggggaacagctgcagagaccgttatattatgataaatctggattgatccaggctctgggcagaagtgataagtttacgaattggctggttgggcttcttgaactgcagaagagaaaatgacactgatatgtaaaaatcgtaacatttagtgaattcatataaagtgagttcaaaaattgttaattaaattataatttaattataagtgtttaatcagtttgatttgtttaaaaaccactgttttaaatttggtggaatatgtttttattagcttgtatctttaattcctaaattaagctgtgtgtgtgtgtgtgtgtgtgtgtgtgtgtgtgtgtgtgtgaagtttaaagccaggatgagctagtttaaagtatgcagcctttggagtcatacagatctgggtttgaatctggtctctaaactttatagatgtatgatattaaatgaggcagttcatgtaaattgccaagcccagcactcagcacagagttgatatttcacacacattagatacctttcctgtatgtggagcatggcagttcctgtttctgctttactcctacaggatactaatataggacactaggatctttataccaagaccccatgtaatgggcttatgagaccattcttcttataaaaatctgacagaatttttgtatgtgttagatcaataggctgcatactgttattttcaagttgatttacagccagaaatattaatttatttgagtagttacagagtaatatttctgctctcatttagttttcaagccccactagtcctttgtgtgtgaaaatttacaacttactgctcttacaaggtcatgaacagtggaccaaagtgaatgccattaaccactctgacttccttcattagttttattgtgacagtggactcttttgacctcagtaataccagtttggcatttacattgtcatatttttagacttaaaaatgatcatcttaaccctgaataaaatgtgtctggtgaacagatgtttttccttgggctgtgcctcagatatctctgtgtgtgtgtacgtgtgtgtttgtctgtgtgtccatgtcctcactgattgagccctaactgcatcaaagacccctcagattttcacacgctttttctctccaggatgaccacatcagtggatgtccttgtgtccatctgtgtcatctttgcaatgtccttcgtcccagccagctttgtcgtattcctgatccaggagcgggtcagcaaagcaaaacacctgcagttcatcagtggagtgaagcctgtcatctactggctctctaattttgtctgggatatggtaaggacacaggcctgctgtatctttctgatgtctgtcagggccatggattgatatggataagaaagaaagagctctggctatcatcaggaaatgttccagctactctaaagatgtatgaaaaagaaatagccagaggcaggtgatcactttcatgacaccaaacacagcattgggtaccagagttcatgtcacaccagagggaaaattctgtacacaatgatgaaaattaataccactaccacttaagttcctatgtgacaactttcccaagaatcagagagatacaagtcaaaactccaagtcaatgcctctaacttctctgatgggttttaacctccagagtcagaatgttctttgccttactaggaaagccatctgtcatttgaaaactctgtacattttatcagcagcttatccatccattgcaaatatgtttttgtgccagccacaatatattgcttctatttggaccaatatgggggatttgaaggaattctgaagttctaattatatttcaactctactttacaatatctccctgaaatatatctccctgtaacttctattaattataagctacacagagcaaatctaattcttctcccaccgaacaagtccctggatatttaaaaataactctcatactctcatttaacctgagtattacccagataagatgatatatgagaatacaccttgtaacctccgaagcactgtacaaatgtgagcaatgatggtggagatgatgatgagatctttgctgtttataccaagccccttagactgtgtcactcttctgatccggttgtccttgtatggccatgctgtatattgtgaatgtccgttttcaaaagcaaagccaagaattaaccttgtgttcaggctgtggtctgaatggttatgggtccagagggagttgatctttagctcacacttctattactgcagcacaaagattttgcattttggaaggagcaccgtcttactggcaacttagtggtaaaccaaaacctccatttcacacaaatgattgtgaaattcgggtctccttcattctatacaaattcatttgatttttttgaaactaaactttatatttatccatattaaattacatgggttttatttttgttttatcttgattcagtaattactcctttcagtaaacacagactgagtgctgtgtgtctgacttatgccaggcataggtgattcagagatgaaaggtcaagtccctgaacccatctcttgtcttcctgggtattatctgtccctccctgctttagagctcctgaaatttgctagaagcatgtcttcatctaagttgttgataaacacatcaagtaggattggactgaggcagagccctgtagtctgaagctgcagttcttctagcggctgacaagccccactatcacttccctgctggtgctttgctctgccagctgtgaattctcataattgtcctatcgtcaagtctttatttctgcattttactgcttgatacactgtcaggacagactttaaaattattctcagtgcgatgaaacaattctgacattcatgttatgagcagttacctcataaatagattacatgtgagattgaacttgggcagactataatatagcattaatgacgaaacagacacagtcatcttcgggaagaagaatagaggcttatttgctgcctgtgaaattaaaattactctgactgggaatccatcgttcagtaagtttactgagtgtgacaccttggcttgactgttggaaagacagaaagggcatgtagtttataaaatcagccaaggggaaaatgcttgtcaaaatgtattgtcgggtattttgattaatagtttatgtggcttcattaattcagagttactctccaatatgtttatctgccctttcttgtctgataatggtgaaaacttgtgtgatgcattgtatatttgatttaggggtgaactggatgtctttgttttcacttttagtgcaattacgttgtccctgccacactggtcattatcatcttcatctgcttccagcagaagtcctatgtgtcctccaccaatctgcctgtgctagcccttctacttttgctgtatgggtaagtcacctctgagtgagggagctgcacagtggataaggcatttggtgcccagtgtcagaaggagggcagggactctcagtagacacttatctttttgtgtctcaacaggtggtcaatcacacctctcatgtacccagcctcctttgtgttcaagatccccagcacagcctatgtggtgctcaccagcgtgaacctcttcattggcattaatggcagcgtggccacctttgtgctggagctgttcaccgacaatgtgagtcatgcagagagaacactcctgctgggatgagcatctctgggagccagaggacagtgtttaattgtgatcttattccacttgtcagtggtattgacactgctgactgccttgtcctgtcttcagagtctgtcttccctgagaaggcaaagcacctttctttcttgctgtgccttacattttgctggtcaagcctttcagtttcttttgacagttttttttacttctttcttttttcaatgttgctcttaccaagagtagctcctctgccttccactttacacatgagagctgggcgacgccattcagtcctaaggcttttaccatcacctctcttggtgtttttattgtcatctctaagatcaatgcctttagccttgatcataaccttgaactctaatctcaaattctcacttgcctagtggattgctccatttagatagtatatagataccccaacctggatatgtcctagttttctttccccttggaacttaatgcttttcttgccatccctgtcacactcagtggcactaccatccactcggttgcccaagctggctcttagagttatcctagatgcttgctttgctgttgcagatttcccacattcaactggttatgttgtcagttcttccaggtatggacctctaaaataaggcttcctctccattccggttgtcattgcctttgtccaaacacagcacacaaggccttttacagttgcacaactcttcctgtccatacccaccacaccctttcccagctgtaagcttcagatgagttgcctccaaccaccatgctcctgtaggcctggcttgaaatgcccttcttctgtcacagggtctggtagtatatcccttgcccttcaagatttagctaaaatgtgaagctttccttacctgctgggaggtgttctctcttttctctgtgctctcagagtccttagtccatgcctccagtacaacgtacatccacttacatggtaatttcctgtttacatacttttcctactcggagtggagtctgtttcttaataattttgcctctcccatgccctagcacagtgcatccagcgtatagccccttattcagttggtagatatttggccactgttgccttgtgggatcataagttctgatgtatttgagaagaatttctaaaattctgacaaaatcctgaaactcaaatattgacccagacatgagcaatttgcttttcaaatgctaagggatttttaatggatttgctttaattaaatctagcctgtttctaagctttattcattatttctccatactcagagcatttctccagattttctaaagaatagaattttattgctacatatcatcagctatgcctgctgctatttaattggtatctgaattaaaaggtctggtttgtccctagagaatcaaattttttcttcactcccatatttcagaacttgatacatttttaggataaaccatgaatgacacccgtttcttctccctcaccctcccttccctcccattttttttttttttttttagaagctgaataatatcaatgatatcctgaagtccgtgttcttgatcttcccacatttttgcctgggacgagggctcatcgacatggtgaaaaaccaggcaatggctgatgccctggaaaggtttggtgagtgaagcagtggctgtaggatgctttaatggagatggcactctgcataggccttggtaccctgaactttgttttggaaagaagcaggtgactaagcacaggatgttcccccacccccatgcccagtgacagggctcatgccaacacagctggttgtggcatgggttttgtgacacaaccatttgtctgtgtctctgatagcattgagaaaagtgaaagggcagttttgaaggtaaggaaaatagtggcatttgcttggatccactggctcatgccactgtctgggttggttagaagcactggaaaagtcaaaccataactttgagaattaggtgatcagggaatcagaaggaaagatgcaaactttggctcttttaggcgaatcatgtgcctgcagatgaggtcatttattatcttttacacagtctataaaattataatgtattacatctttttctacctttagaatggttaaaaatatttctccggtagccatatgattattattcatccattagataatatagtcaaatgggccatgttatttactgttcatagaagaggggctttttgcaacttgggctacaaaggagatatgtaaggaatttaaggaatggttacatggaactagatttaattgaatctagtggtttaattgattcactaggatatatgctactgaaaggggaatctgcttaaagtgctttctgatatttattattactaaaacttagaatttattaaaaatactgactgtgaaaattacttgggtcgtttgcctttttaaaaggatttttggcatgtctcattaaaaaaagaaatactagatatcttcagtgaagttacaaatcgaatacacattggctctgaaattctgattgatactgggtcataaaaagttttcccaaatcagacttggaaagtgatcactctcttgttactcttttttccttgtcatgggtgatagccatttgtgtttattggaagatcggtgaattttaaggaacataggcccaaatttgaggaagggccatggtttttgatccctccattctgaccggatctctgcattgtgtctactaggggagaatcgctttgtgtcaccattatcttgggacttggtgggacgaaacctcttcgccatggccgtggaaggggtggtgttcttcctcattactgttctgatccagtacagattcttcatcaggcccaggtgagctttttcttagaacccgtggagcacctggttgagggtcacagaggaggcgcacagggaaacactcaccaatgggggttgcattgaactgaactcaaaatatgtgataaaactgattttcctgatgtgggcatcccgcagccccctccctgcccatcctggagactgtggcaagtaggttttataatactacgttagagactgaatctttgtcctgaaaaatagtttgaaaggttcatttttcttgttttttcccccaagacctgtaaatgcaaagctatctcctctgaatgatgaagatgaagatgtgaggcgggaaagacagagaattcttgatggtggaggccagaatgacatcttagaaatcaaggagttgacgaaggtgagagagtacaggttacaatagctcatcttcagtttttttcagctttatgtgctgtaacccagcagtttgctgacttgcttaataaaagggcatgtgttcccaaaatgtacatctataccaaggttctgtcaattttattttaaaaacaccatggagacttcttaaagaattcttactgagaattcttttgtgatatgaattcccattctcgaatacattggttttatatgcttacatttatgtgttagttattaaaacatactaatattgtatatctagtcaaaactgaggtagagagaataaatggttgattttgagtttgagtttcatagtccaaaaagctgatatattgcctgtgttcaagagggtctatatcagccctctagatgccagcatctccaaattttacttttttggaatctgtacagtatttgcaatatttttattacaaatttctactctgtggaatttaatttttaaaatacctgcaatacatatatatgttgaatagatgaaaaattatgtagataataatgaatgatacggttctaaaaagacaggttaaaaagtaagttcacttttattttgagcttcagaatcattcagaagccagtcgccacaaacgcagaccaaggctcttggcacatcaaatatgcctatggcttagggttattgacaagtcttatgttgcagtgtatgtggtttatagtcctgccttccacagttgcttgggagagctgtgagtcactgaggcttatgaatgtttacattttgtttgttgcagatatatagaaggaagcggaagcctgctgttgacaggatttgcgtgggcattcctcctggtgaggtaaagacactttgtctatattgcgtttgtccctattagttcagactatctctacccaatcaagcaacgatgctcgttaagaggtaaaagtggattttaaaggcttctgtatttatgccaggatggagcaattagtcatcgagaagagagggaccctgtatgtcaagagaatgatttcagagaatccaatacaatttaagaaaaagcatggggctgggcgcagtgattcactcctgtaatcccagcactttgggaggccgaggtgggcggatcacgaggtcaggagattgagaccatcctggccaacatggtgaaaccccatctctactataaatacaaaaattagctgggcatagtagtgcattcctgtagtcccagctactcgggaggctgaggcaggagaattgcttgaacctaggagggggaggttgcccagattgcgctgctgcactccagcctggtgacagagtgagactcatgtcaacaacaaaaacagaaaaagcacgcacatctaaaacatgcttttgtgatccatttgggatggtgatgacattcaaatagttttttaaaaatagattttctcctttctggtttccgtttgtgttcttttatgcccttttgccagagtaggtggtgcaatttggctagctggctttcattactgtttttcacacattaactttggcctcaacttgacaactcaaataatatttataaatacagccacacttaaaatggtcccattatgaaatacatatttaaatatctatacgatgtgttaaaaccaagaaaatatttgattcttctctgatatttaagaattgaaggtttgaggtagttacgtgttaggggcatttatattcatgtttttagagtttgcttatacaacttaatctttccttttcagtgctttgggctcctgggagttaatggggctggaaaatcatcaactttcaagatgttaacaggagataccactgttaccagaggagatgctttccttaacaaaaataggtgagaaaagaagtggcttgtattttgctgcaaagactttgtttttaatttatttaaagaaataggttgttatttttgattacagtggtatttttagagttcataaaaatgttgaaatatagtaaagggtaaagaagcacataaaatcatccatgatttcaatatctagagataatcacaatttacatttcctttcagtctcattctcttcttttaacagctttattcaggtataatttacatacaatataatttgcttgttttttaagagtataatttagtgatttttggtaaattgagagttttgcaaccatcaccacaatccagttttagaacttttccatcaccccacatctgtcttatatacacatataaatgtgccatacaattgagatcatactgtatgtagaatttaaaattagtttttattgttaatgagtgtattatgaatatttcccagtgggttacatttcctaagatgtggaattttacattgctacataaaatccccctatgtacatgtacctataatttatttaataaattccttataaatgttggacacattagtttccatttttcactatgtaaatatgtccctgtatacatcttttattatttcctcaggaacaattcctacaaagtaaattgccctctctaaagagcatacaaattgactgagccaccgttaggccattttctgagactgcacaggtcacaaagcaatctgatctttgggaatacagctacattttataggcttcttagataatgttactctaagtactttaaatatgtggggcttctctgggcttttttttttttgagacggagtttcactcttactgcccaggctggagagcaatggcgcgaccttggctcactgcaacctccgcctcccaggttcaagcgattctcctgcctcagcctcctgagtagctgagattacaggtgcccgccacaatgcctgcctaatttttttgtattttcagtagagatggggtttcaccatgttggccagactggtctcgagctcctgacctcaggtgatccacctgcctcagcctcccaaagttctgggattacaggcatgagccactgcgcccggcttctctggacttattatgtggagagatagtacaaggcagtggctttcagagttttttgaccatgaccgttgtgggaaatacattttatatctcaacctagtatgtacacacagacatgtagacacatgtataacctaaagtttcataaagcagtacctactgttactaattgtagtgcactctgctatttcttattctaccttatactgcgtcattaaaaaagtgctggtcatgacccactaaatttatttcccaaaccactaatgaacaatgactcacaatttgaacacactggacagggggatagccaataaaattgaaaagagcaaggaaattaatgtattcatgatctcctctcctgtctcttacatttttgcagtagcaatgtaaaggaatcctaagagaacagacattctgggaatagcaggcctagcgctgcacaactgctttcctaggcttgctcctagtaccaagctcctgacgcatatagcagtggcagtaataaccagcccatagtaaggtttgtcacagggactggttgtaagaactgatttggttggtatagctgtgagggcctggcacggtgtccacgtgtgcctcaatcctaattctgaaaaaggctgaccctgggggtgctaattagatacacagagaggaatgaatgctgccagaaggccaagttcatggcaatgccgctgtggctgaggtgcagtcatcagtctggaacgtgaacactgaacttctctcacatgtgattcttcacttgactggcttcatagaaccccaaagccaccccaccaccacataaattgtgtctctaggttctgtgttgctcacactcaaaatttctgggccttctcatttggtgcatgtgaatggtgcatatgagtgaagtctaggatggggccttagcgttaaagccctggggtagtgtgactgagattgttggtaaagaatgtgcagtggttggcatgacctcagaaattctgaaatgggactgcacctgcagactgaagtgttcagagagccagggaggtgcaaggactggggagggtagaggcaggaaccctgcctgccaggaagagctagcatcctgggggcagaaaggctgtgctttcaagtagcagcagatgtattggtatctttgtaatggagaagcatactttacaggaacattaggccagattgtctaaccagagtatctctacctgcttaaaatctaagtagttttcttgtcctttgcagtatcttatcaaacatccatgaagtacatcagaacatgggctactgccctcagtttgatgccatcacagagctgttgactgggagagaacacgtggagttctttgcccttttgagaggagtcccagagaaagaagttggcaaggtactgtgggcacctgaaagccagcctgtctcctttggcatcctgacaatatataccttatggcttttccacacgcattgacttcaggctgtttttcctcatgaatgcagcagcacaaaatgctggttctttgtatctgctttcagggtggaaacctgtaacggtggtggggcagggctgggtgggcagagagggagtgctgctcccaccacacgagtcccttctccctgctttggctcctcaccagttgtcaggttatgattatagaatctagtcctactcagtgaaagaactttcatacatgtatgtgtaggacagcatgataaaattcccaagccagaccaaagtcaaggtgctttttatcactgtaggttggtgagtgggcgattcggaaactgggcctcgtgaagtatggagaaaaatatgctggtaactatagtggaggcaacaaacgcaagctctctacagccatggctttgatcggcgggcctcctgtggtgtttctggtgagtataactgtggatggaaaactgttgttctggcctgagtggaaaacatgactgttcaaaagtcctatatgtccagggctgttgtatgattggcttgtcttcccccagggacagcagagcaaccttggaaaagcagagggaagcttctcccttggcacacactggggtggctgtaccatgcctgcagatgctcccaaatagaggcactccaagcactttgtttcttagcgtgattgaggctggatatgtgatttgatctttctctggaacattctttctaatcatctttgtgttcattccctgaaaatgaagagtgtggacacagctttaaaatccccaaggtagcaactaggtcatagttccttacacacggatagatgaaaaacagatcagactgggaagtggcccttgaccttttttcttctgtagataagagcattgatgttattacgggaagaagcctttgaggcttttatgtattccacctcggtctggaatttgtttctgtaaggctaacagttgcaatatactagggtaatctgagtgagctggaattaaaaaaaaaaaggaatttcaccccaatcttatactgacttcaatagaggtttcagacaaaaagttgttttgtatatacttatcagtcatgaaaagataattacaactaaatggcctttttccttccctatttatttggagaaatttaattacataaaaaagtactcagaatatttgagtttcctgcatcaataagacatttataataatgaccttgtttacaaatgaatttgaaagttactctaattctttgattcatcaagaaataactagaatggcaagttaaaatttaagctgtttcaaagatgcttctgcatttaaaaacaaatttatctttgattttttttccccccagcaaataagacttattttattctaattacaggatgaacccaccacaggcatggatcccaaagcccggcggttcttgtggaattgtgccctaagtgttgtcaaggaggggagatcagtagtgcttacatctcataggtccgtagtaaagtcttgggttcctcactgtgggatgttttaactttccaagtagaatatgcgatcattttgtaaaaattagaaaatacagaaaagcaaagagtaaaacaattattacctgaaattatatatgcatattcttacaaaaatgcaagcccagtataaatactgctctttttcacttaatatattgtaaacattattccaagtcagtgcatttaggtgtcatttcttatagctggatagtattccattaggatatactcttatttaactattcccccttttgtagacatttggattatttccaacttgttcacaattgtaaacaccactacactgaacagcatcatccctatatccacatgtacttgtaacagaatacaattccctaggaagctggaatgctggaagtcatggtgatgttctcatggttacagagaatctctctaaaactaaaacctctttctgttttaccgcagtatggaagaatgtgaagctctttgcactaggatggcaatcatggtcaatggaaggttcaggtgccttggcagtgtccagcatctaaaaaataggtaataaagataatttctttgggatagtgcctagtgagaaggcttgatatttattcttttgtgagtatataaatggtgcctctaacataaagggaaataaaactgagcaaaacagtatagtggaaagaatgagggctttgaagtccgaactgcattcaaattctgtctttaccatttactggttctgtgactcttgggcaagtgacttaactactgtaagagttagtttccctggaagatctacctcctagctttgtgctatagatgaaatgaaaaaaatttacatgtgccagtactggtgagagcgcaagctttggagtcaaacacaaatgggtttgcatcctggccctaccaattatgagctctgagccatgggcaagtgactaactccctgggcctcagtttctctgtaacatctgtcagacttcatgggtccaggtgaggattaaaggagatcatgtatttacagcacatggcatggtgcttcacataaaataagtatttagtaaatgataactggttccttctctcagaaacttatttctgggcctgccaggggccgccctttttcatggcacaagttgggttcccagggttcagtattcttttaaatagttttctggagatcctccatttgggtattttttcctgctttcaggtttggagatggttatacaatagttgtacgaatagcagggtccaacccggacctgaagcctgtccaggatttctttggacttgcatttcctggaagtgttctaaaagagaaacaccggaacatgctacaataccagcttccatcttcattatcttctctggccaggatattcagcatcctctcccagagcaaaaagcgactccacatagaagactactctgtttctcagacaacacttgaccaagtaagctttgagtgtcaaaacagatttacttctcagggtgtggattcctgccccgacactcccgcccataggtccaagagcagtttgtatcttgaattggtgcttgaattcctgatctactattcctagctatgctttttactaaacctctctgaacctgaaaagggagatgatgcctatgtactctataggattattgtgagaatttactgtaataataaccataaaaactaccatttagtgagcacctaccatgggccaggcattttacttggtgcctaatcctatttaaattagataaaaaagtaccaaataggtcctgacacttaagaagtactcagtaaatattttcttccctcttccctttaatcaagaccgtatgtgccaaagtaaatggatgactgagcagttggtgatgtaggggtggggggcgatatagaaagtcagtttttggccgggcgtggtggctcatgcctgtaatcccagcactttgggaggctgaggagcaggcagatcatgaggtcaggagatccagataatcctggccaacagggtgaaaccccgtctctactaaaaatacaaaaattagctgggcatggtggtgcgcacttgtagtcccagctacttgcgaggctgaggcaggagaattgctcgaacccaggaggtggaggttacagtgagccaaggtctcgccactgcactccagcctggggacagagcaagaccccatttcaaggggggaaaaaaagtctatttttaagttgttattgcttttttcaagtattcttccctccttcacacacagttttctagttaatccatttatgtaattctgtatgctcctacttgacctaatttcaacatctggaaaaatagaactagaataaagaatgagcaagttgagtggtatttataaaggtccatcttaatcttttaacaggtatttgtgaactttgccaaggaccaaagtgatgatgaccacttaaaagacctctcattacacaaaaaccagacagtagtggacgttgcagttctcacatcttttctacaggatgagaaagtgaaagaaagctatgtatgaagaatcctgttcatacggggtggctgaaagtaaagaggaactagactttcctttgcaccatgtgaagtgttgtggagaaaagagccagaagttgatgtgggaagaagtaaactggatactgtactgatactattcaatgcaatgcaattcaatgcaatgaaaacaaaattccattacaggggcagtgcctttgtagcctatgtcttgtatggctctcaagtgaaagacttgaatttagttttttacctatacctatgtgaaactctattatggaacccaatggacatatgggtttgaactcacacttttttttttttttttgttcctgtgtattctcattggggttgcaacaataattcatcaagtaatcatggccagcgattattgatcaaaatcaaaaggtaatgcacatcctcattcactaagccatgccatgcccaggagactggtttcccggtgacacatccattgctggcaatgagtgtgccagagttattagtgccaagtttttcagaaagtttgaagcaccatggtgtgtcatgctcacttttgtgaaagctgctctgctcagagtctatcaacattgaatatcagttgacagaatggtgccatgcgtggctaacatcctgctttgattccctctgataagctgttctggtggcagtaacatgcaacaaaaatgtgggtgtctccaggcacgggaaacttggttccattgttatattgtcctatgcttcgagccatgggtctacagggtcatccttatgagactcttaaatatacttagatcctggtaagaggcaaagaatcaacagccaaactgctggggctgcaagctgctgaagccagggcatgggattaaagagattgtgcgttcaaacctagggaagcctgtgcccatttgtcctgactgtctgctaacatggtacactgcatctcaagatgtttatctgacacaagtgtattatttctggctttttgaattaatctagaaaatgaaaagatggagttgtattttgacaaaaatgtttgtactttttaatgttatttggaattttaagttctatcagtgacttctgaatccttagaatggcctctttgtagaaccctgtggtatagaggagtatggccactgccccactatttttattttcttatgtaagtttgcatatcagtcatgactagtgcctagaaagcaatgtgatggtcaggatctcatgacattatatttgagtttctttcagatcatttaggatactcttaatctcacttcatcaatcaaatattttttgagtgtatgctgtagctgaaagagtatgtacgtacgtataagactagagagatattaagtctcagtacacttcctgtgccatgttattcagctcactggtttacaaatataggttgtcttgtggttgtaggagcccactgtaacaatactgggcagcctttttttttttttttttaattgcaacaatgcaaaagccaagaaagtataagggtcacaagtctaaacaatgaattcttcaacagggaaaacagctagcttgaaaacttgctgaaaaacacaacttgtgtttatggcatttagtaccttcaaataattggctttgcagatattggataccccattaaatctgacagtctcaaatttttcatctcttcaatcactagtcaagaaaaatataaaaacaacaaatacttccatatggagcatttttcagagttttctaacccagtcttatttttctagtcagtaaacatttgtaaaaatactgtttcactaatacttactgttaactgtcttgagagaaaagaaaaatatgagagaactattgtttggggaagttcaagtgatctttcaatatcattactaacttcttccactttttccagaatttgaatattaacgctaaaggtgtaagacttcagatttcaaattaatctttctatattttttaaatttacagaatattatataacccactgctgaaaaagaaaaaaatgattgttttagaagttaaagtcaatattgattttaaatataagtaatgaaggcatatttccaataactagtgatatggcatcgttgcattttacagtatcttcaaaaatacagaatttatagaataatttctcctcatttaatatttttcaaaatcaaagttatggtttcctcattttactaaaatcgtattctaattcttcattatagtaaatctatgagcaactccttacttcggttcctctgatttcaaggccatattttaaaaaatcaaaaggcactgtgaactattttgaagaaaacacaacattttaatacagattgaaaggacctcttctgaagctagaaacaatctatagttatacatcttcattaatactgtgttaccttttaaaatagtaattttttacattttcctgtgtaaacctaattgtggtagaaatttttaccaactctatactcaatcaagcaaaatttctgtatattccctgtggaatgtacctatgtgagtttcagaaattctcaaaatacgtgttcaaaaatttctgcttttgcatctttgggacacctcagaaaacttattaacaactgtgaatatgagaaatacagaagaaaataataagccctctatacataaatgcccagcacaattcattgttaaaaaacaaccaaacctcacactactgtatttcattatctgtactgaaagcaaatgctttgtgactattaaatgttgcacatcattcattcactgtatagtaatcattgactaaagccatttgtctgtgttttcttcttgtggttgtatatatcaggtaaaatattttccaaagagccatgtgtcatgtaatactgaaccactttgatattgagacattaatttgtacccttgttattatctactagtaataatgtaatactgtagaaatattgctctaattcttttcaaaattgttgcatcccccttagaatgtttctatttccataaggatttaggtatgctattatcccttcttataccctaagatgaagctgtttttgtgctctttgttcatcattggccctcattccaagcactttacgctgtctgtaatgggatctatttttgcactggaatatctgagaattgcaaaactagacaaaagtttcacaacagatttctaagttaaatcattttcattaaaaggaaaaaagaaaaaaaattttgtatgtcaataactttatatgaagtattaaaatgcatatttctatgttgtaatataatgagtcacaaaataaagctgtgacagttctgttggtctacagaaatttacttttgtgcatttgtggcaccacctactgttgaagggttataaagccattagaaaagtagaggggaagtgatttggatcaaaaggaaaaactttagaaaagattcaaatgttcccttaatcataaaagagaactgaggggactacttgaaaataaaaggttgttttgtattttcatgttggttaagatactgagtaactggtattaagtgttagaggtttttagataaatattctgcttaatgattatgaagctgcactgagatttctgaaaatgctctgtagctgagcttatttaataaatgttcacttggtataggggaagctacaaaggcagccttcagtgtccttttgtttattcaaccaaaaatataaggacacaatgtagcagttatactgggaaggtgctgggggtggtggcaatggtgagcaggaaggcgaagtagatatggaaacagaaatgatactaatatcggtgattccttccttttttcctgtaataagtgctgtgcagacaacatatgagcagtgctgataaatgtaaatgtatttttcatagctcattaagaatcagtttcagaaagagatgtctgcttattttgctacttgaagaatccctgtcaaacagtccttttgaggaagtacaagaggctgtctctatttgtgacctcaggaatggctgtgacagtgtcgtgagcagtccttttcctgtggcacagatctgaactttgtgtgcagaaaaatcttggcttcaagtgagccaagatgccccctgagcatcagcatcacaacttcatcctcctatcttgaagttcatgttatagtgactttaatgaaatcatagaacactgtttcttcgtgaacaatgacgagggagaggaaaaaactttattgaaaaataaaaaggcaggtaatttagatgaaaatatgttacccatgaggttttgtttttgctttttgtttttgtttttgagaaacagaatctcgctctgtcgtccaggctggagtgcagcggcatgatcttggctcactgcaacctccgcctcccgggttcaagcgattctcctcagcttcccaagtagctggtactacaggcatgcgccaccacaaccagctaatttttgtatttttagtagagatggggtttcactatacgttggccaggctggtctcaaactcctgacctaaggtgatccttctgccttgggctcccaaagtgctgggattacaggcatgagccaccttgcctggccctacccatgagccttgactaaaacattcttctatctgtagaaaagcccaaaagaacttttccagattcaaaaaacttggcactttgtaatggtaatgtttacattaagtaaaaaaaaaaaaaaaacccacttagcttcagttttcaagtgtttactgtgttgtcatgcacttcatttaattctcaacacctgccctatgaggtaaaaagtaccattttacatatgagtaaattacagctcagtggataagaaactcgtccaaaggtacaggttcagtcaagtggcagagggttctttttgttgaagttaggtatcagttaaaattgaccttgtaaaatcacatcagcatcaatatacattaatttaacaaatatttattgaactttactgtatgccagatacttctctaggtactagggggtacaatgtagaagaaaatagaattcctgctctaatgaatttatatttcagtggtgaaagatgatgtgtggacaaacacatctaatgtattttgacagcaatgggtgctaagaagaaaataagacatggtaattggataacaatggagagaagtcagagatggccttttctgaggagtgacatgctcagaatcgaataaaaagagcaggagcagcctttcaaggtgggtgcgaaggatattcccggaagaaagaataagtgttgcaaaagccccagtgggaaaaagcttggcaagctgaggtggtaaaagagctatctgtactaatgtctcttgtactgagttagcaaggacaagagtggcagggggtggaactggagagatagcagggaccacatctcacaggatctcgccagcctttttaaggtatttggattttattgttagtgcaacaaggagccactggagagttttaaacagtagtggtgtgacctactgtttcagaaagaacactggctactatgggaagaaaggacagtaggaagactaatagataatggtggattgaactaagatggtagcaacagatagggagctatggtaatgttcagtatccactttggagatagatccagcaggacttgctgacagactgcatgtaagggctgagggaaagagagctagcaaggtgacttctagtttgtgacctgaactaggtagatggttgtgttaaaaatgcagtgggtatttcagtctgaagctcaggggcaatgatggaaaataagataaatgtgtgcaagttggctgggcgtggtggtgcacgcctataatcacagcactttgggaggccgagacgggtggatcacttgaggtcaggcgtttgcgaccagcctaacatggtgaaaccccatctctaataaatacaaaaaaattagctgggcatggtggtgcatgcctgtaatccaagctacttgggaggctgagacaagagaatcgcttgcacctgggaggcggaggtttcagtgagctgagatcgcaccattgcactccagcctgggcaacaagagcgaaactccatctaaaaaaaaaagtgtgcaagttattggtacgtatatatttaagcctcgggactgaatgagattacctagagagaatgaagatagggaacattcttgagcctgagatcctataacatttagaagagaagctagccagggaaattgagagggactggccagtgagagagagtaaaatctgaagagtataatgccatatgttgaagctcagagaattattgtttcaggaaggcagaagttgtcaattatgtccaacattgctgagaagatgagtaaggaatgtaaatgagtaaaggcaggaatggctattgaatttgttaagacagaggtccttggtgaccttcctaagagtcatttcagcatgacaaggatgcagacctaactggaatagattttcagggaagactgagaggcaaggaaggggagactgcaaatatatgcaaatctatatttttgctttgaagggaaacagaaaacaggacaacagctggtttacagaacttttatttggattctttccttgtctgttaataatataggctgcacctgggcatcatcgtgcccttcctttttgattctgctgttttgcttttaatcctacaggcatttcttctggcaggagccttgtacacactctgggtggttcatgaccaccacggacttgccctttcaaggcagaagcctgtgattcaaaaacttccattccttccaatcgactattataaaactcattttgtctagtgcccatactcctttaccttaggatcctgggccaactgtcactaaagaaaacaaaccatttcctcctcctgggggaatgtgcttctttcaagaaggtgcttagagaatagacattctaggtgacagcagttatgaaagaggtgtctctaatgaacctaacacttcttccaacatactccaggttcaccctcctttgaagacagaaagtactacaacttcagttgccaccctagtcaggttcataggatttactcagtaggttaagagatggtgctgagaatgaagtccagagtttgagtctacaagtggcatttgcttctcctttgggacttctgtggcagggtgtggaaccaaatcagattggttgcatatctgtttctcttcctgaaaatacaattcaaataccttcatagtctgtgacagcaacttataaccaacagacaatggtattatttttatttattgatggcactcccccatagccagaacttctactgagtcattcatcgtgtattccaggaatactttccaaatggagtagtgaggcacttccaataacagttatgtaatctgttaacagtggctcaaaatgacatgtgaaggaatgatgtacttcttttttcagactcacagatctcatatgttaattcagtcaacaagtacttagggcttatcacatgccaggcacaggtaatatgacaataatgaaaacaaaaacccttgctgtcatagaattcggtttctagtgggaagagacatacattaacaaatcatatataagtaaaacattaattatggtgataacagaaaaagaaagcaggggagagggatagtgtcttagttcaggttgctgtaacaagagtaccatagacagggtggcttaaacaacaaacatttctttctcacagatctagtggctgggaagtctaagaccagggtgccagcatgaagaagttctggtgaaggcttacattctggtttcctcacagtgagggctcttcacgcccttataaatgcactaattctattacccacatgacctcatctaaaactaactcacaaaggccaaacctcctatgttgagattaaggcttcaacataggaattttggggggacaaaaacattcagtctctagcagataggggccactgtgggaggggattacaatcttaaatagggttgtcagggaaggcttcatgagggcaaagacctgaggaggcatggaaatgatccacgcagatgcatgtctggggaagagcattccaggcagaggcagtgggaatggaccctcaggtaagagcatgtttagcaagttcagagaaaagcctcttaggtcaggtctggagcgagagtggaaaatgtaacaggacagatcatgtaaagacttgtagaccacagttagaggcttggacaataactctgaggatgacatgaaggtattgggagggggtgttgagcagaggagtgatatgatctggtttatattttagattattctgactgctatgttgaaaatagggttgagagcagaggggaagggcagcacaccagttaagaccacttcccaaaaatccagatgatgatgggcttgaaccaggagagttgctatagggatgtgaagcaatcaaattctagatatttgggacctgctgacaggtacataatggtgtatgagagaaaaggcagtgtgagaatgactctgaagtctgtggcctgagcaaaacagaaacctggagttgccaatagctgagataaagtttctggttaaagatcaagagctcagttttggacaagaggggtgtgagatttctaatagacattcaggtggaggtgtggggaacacacctggatgtgatgagcctggaattcaaattcacatgtgtgaatttgaaaaaagattcagaaaagaggtgtggactggaggagctatccacacacagatagcatttgaagccacaagactgggggtgatgacgcagggagtaagtataaatagaaaagagaagtggtccaaggactcagtccttacatcagaggtcaaagagacaagatggagactaggagatatgaaggcttgtgcagtgagtgtttcggagaaacgaagaaacttcccagaagaaaggagaggtcaactgctaacaagtcaagtgaaatgagaactgggaaatgagttgacaagagcaatttggctggcgtgatcagagaatgtttaagagataatgtgagggaagaaaatggaggcaggaagtatgaactactcttttgagtcatattgtaaaggaaaaaaatggggtgattttactcttttttttttttaaagataggaaaaaaaagtatatttatatgctgaggagaagaatccagttgaaggggaatactgtggcttcaggagacaggaaaactgcctaagccacatccttcagcaagtgagtgttcaagtggagggtttgtctttgcttggggcacgggcggttcatccacagtgaaaggagagaaggcagggcatgtggggttggctgtagaaagcgggcagacggggtgggaacttatgaagactcttctgattgttattttctctgttaagtaaaaggaaaggtcattggctaagaatgaagatggacgcgcaggtgctgggagtcatcgaagagaatgaaagaatgaataaaatagagaaaaatacaatgctattatataaacctatacatttaaattactttcctcttcaaattagaccccctggaaggcaaatctctgtcatgttaagttttaggaaaagtcataatctacttggagctaagtatgaagaataaggtatatgatttaaaccacataattctatttttgcttaaaccggggaagcctttaaggtaacgtagagtgtacccattaaaaaagataaaaatgtcagcttccccttccctttaaatatagtaaggctcaaaggtaattgatgttcataaccctaaggtactataacagtctgaagcaaaatattaaatgtcttctgtagtattttagttaacttttaattttattggtaatttatgtgtagttaaccacatacttgtgcctcaactatttcacataaatgtgagatgtcttaggcctctttgaactctgcatggaaaagaatgctgaggaggtatgtctgtttaagctgccactgcctgcctctcataaataatatctcacattgcataatagcccagataaactgcagatcgcttagagcctgataaatgagaggaaactgtacagtttgttttccaaattgcccttggacagctaattcacaatttactattttatagctgtaagattttaaaaatataaaataacatagctgtaaatacagattatcagaagatagtctgtaaaaatgtaaatataatatagctgtaaatatacactatcggaagtaccaaatctagttttagtaggtagaggcatcaagtaaaatggaaatgaaagatgtttcaaggaaaactccaggacatctgtggcagtactaaagaaaccttccttctcaggttcccagcatgctattttattgatgtaacaacattttcaataaagttggtaaattatcactatattactgtcttatagcaacatagcaagagctttagagatcatataagtataaaatgtgaatttaaaaaaacaatgaatatgcaggatttttattagggcaagcgtttccataaccataaatatttctttaaaacaaataaatgtcccaagatctctgttagtgatccaaactaagtagaaattagtaaaattaattataaatgaacaatttcagcatataaaccaacaagtcttttctagatttttaacactgtgacccaattgcattattttccaagttagaatgactaataatcaatgaatgtaaaagcaataattaatacagatgacattgtacttttccacagtaaagaaataaacaatctaatatttttataaatcccattttatatcacaaaataacctttactaagcaaatttttttaaaatctcaggaactatagacatgatgaaaagatagatattttatataaataattcaaaaatactgtcaggcaaggaaatgtaaaatccttatttgagtaaaagaaaatgctataaagcaatgagttatcaaaatacagaagaggtattctaaaacaaatgaaaaaccaagatgatgaaatagtgacaactacttctaatgtgtaacagatactgaaatgccaaggtgaaagtgaactgaattatttcttaaagcagtggagaatatgtaactttcaaaaatgcaagaagcacagcaaattaactaattaacttaccacctccttcaaataaaagcgagaacctcttgggagaatttaagcaccattagcagacacatcttagagcagttaatgaaatgttttgtatttcagtagaaaactatttcaatggtgaaaatgatgcaggaatcagaagcatattctgctgagaaactaggtagttgacactttcccgaactggaaaaacatttcataagaaggcatacagttattggttgaatcacatttgttctaaaaataattcgtgcttagtgaaacagcttaccagccgccacaactctgggatcctcatgggacttatgtctcccagctgcacgactatctgcactctcattccaccaaagaacatgaactgcagaaataaaccacaagtagtttctgaaatatatggcaatagcaaataagaaatattgaaaaagtgaatcagaaatgttgtcttattctttaaatcaaaatcaaaaggtaaaactaaatatgttagttataagatttcagagggatcagaaatttggaagataaatttataagttaaactggaaacataaggctgaagagagaatgcaaagaaacacagcttaaggcacaattaagactagacccgagtttaatgacttcctactatgttttattttttaaaaaaagcagattataaaaaattgtttactgtagaaaatttaggtgatacaaagaaaaaataaaagttagtataatcttaactgcctagataaacctttatcaacatatggtgtgtttcctttaaaaaaaattagtaaaccaaattagggtcttagtgtatattatacttagtaacagattttttaaaatgctgcaacaatgtgagaattttctatgtcaatgatattaattttgaatgacaaagacaccaaaaacaatcatgataaaaacaaaaattgacaaatggtatctaattacacttaagagcttctgcacagcaaaaaaaaaaacaaaaaaaaaactgtcaacagagtaaacagacaacctccagaatgggagaaaatttttgcaaactacgcatctgacaaaggcctaatatccagcctctataaggaacttaaacaagtttataagagaaaaaaagaatcccattaaaaagtaggtaaagggcatgaatagtcacttttctaaagaagacatatatgagaccaacaaacttatgagaaaatgctcaatatcactgatcattagagaatgcaaatataaaccacaattagataccatctcacaccagtcagaatgcctgttactaaaaagtcaaaaaataacagatgctggtgaggttgtgaaaaaaagggaacacttacaccctgttggtgggagtgtaaattagttcaaccattatggaaagcagtatggtgattcctcaaagagctaaaagcagaactgccattcgacccaacaatcccattactggatatatacccagagaaatataaatcattttaccataaagacatgtgcacgtgaatgttcactgcagcactattcacaatagcaaaaacttggaatcttttcatgaaaacctatatgcccaccaacaacagattggataaagaaaatgtggtacatacacaccatggaataccatgcagccataaaaaagaaccagattataacttttgtgggaacatggatgtagctagaggctattatcctcagcaaaccaacagaggaaaagaaaaccagataccacatgttctcacttataaacgggagctaaatgatgagaatttatgaacacaaagaaggaaacaacagacactggggtctacttgagaatggaagatgggaggagggagaggattagaaaagataacaattgggtactgggcttaatacctgagtgattaaataatctgtacaacaaacccccatgacatgggtttacctaagtaacaaatcttcacatgtaccccgtgaacctaaaataaaagttaaaaaacaaacaccagttcagcatttgaaaaaggctccataaagtattaacattctaaaaaaataagatgtaaaataagatgcttatagattttttcaatcctataaacaacaaactctaaaaatttggagataaaaattaaaacaggtaccaaaatgaaaaagagagacgaactgatctaatacacatggcaacttcatagaacaaatggacaactgtacctctgttgagttctccatattctgtgtggaaaacaccaactacttttgtgtagcctaaattgacatgggcattaattgctctttcaaatgcatcaccccacagagctggcccaccaggtttcatctgaaaaacagctagttcatagactcctagaatagggagaaaaataattatttcacagaagacattcaaacaatttctaaccaggttttcctgatttcattagaaggctaaccaatgaagttagaggataatccatgtatacatacatatgcagtcacatttattgattctctgcattatttttctttgcttttatgtttagaaagtctttgtccatgtttaagggtcagttgttaaaattaatcataaagaaaataaagaaaaaggactggaagctatatataaactacactctgaaatatttttaatctataaaatttgtcaggaaaacagatactgagaatgtataatgaagcagaattttcaagctgcctgtctacactttttaaaaaagaaatgcataagagaagtactttctgatatcctacatttccttctccttttcaattttgagaggaaataactttttcctttgtataattttctccggtaggattctatttctagttgacccaaagtcatgtctgagcctttaaggaaaaaaagaaaaccctcaaggagatggttttattcttcctaaatatccaggtaaatgcttaaaaaccattctaccttctggccagaagtataagatgggtggagagaaagaaactagaggacaaggtagattggacaagaaaaaggaaagaaatacaaagttactaaagaattatgaacaacatagaggaagggaactattaataagacttgacactgagaagtcaactgttttacttagtgctgaaagttaaggggagttttaagtacattagaatccaaacaagacttttcaaatctcttataatctaaaataaaatacaaagttgagtttatgggagacataaaatgaaatttaaattagtttatgcttttcgaatctgacctctgtttaaaattagatagaggtaattatttcctttagtgagcaagaagtgaaatcaggaagaagacaaatcttttcaaactgagaaacaagaaagaggaagacacaaaagttaaactacaataatgtagcttagcagtgtaagttaattcattcccccaaaacagtcagtttacaagcaaagatgtacttaatgatttaagattagctgactttgtggaaaaaatacttttatatttaaaagtttatacattttaaaactgtgacaaaatttcatgaactacgactcatctacctacacctgttttcctagctcccaagccccactttttcacctgtattgaccatgtcaacttttgttaggcatccgttagatttcaatatggaaaaatacttcattttttgttttaaggataagcaatgtttaaggataagctcaatgttttaaggataagcaaagagctctagaactctaattctcttttttttttttttttttgagacggagtctcgctctgtcgcccaggctggagtgcagtggcgagatctcggctcactggaagctccgccttctgggttcacgccattcccctgcctcagcctccctagtagctgggactacaggcatgcaccaccacacccagctaatttttgtatttttggtagagatggggcttcactacgttgaccaggcggatcttgaattcttgacctcaagtgattcgcccgcctcggccttccaaagtgctgagattataggcgtgagccaccgcgcccagtctctaattcatttttatctccagactcatcatatattattatataaaacaaagaattatatatttttttcctatagaactttactctttataactttaggtctttagtattttactcattaaaactcatagtctaagagggaagaactcaccttcttttggaggcttttc

SEQ ID NO: 6 - DNA, 171244 bp, Homo sapiens
gaaaagcctccaaaagaaggtgagttcttccctcttagactatgagttttaatgagtaaaatactaaagacctaaagttataaagagtaaagttctataggaaaaaaatatataattctttgttttatataataatatatgatgagtctggagataaaaatgaattagagactgggcgcggtggctcacgcctataatctcagcactttggaaggccgaggcgggcgaatcacttgaggtcaagaattcaagatccgcctggtcaacgtagtgaagccccatctctaccaaaaatacaaaaattagctgggtgtggtggtgcatgcctgtagtcccagctactagggaggctgaggcaggggaatggcgtgaacccagaaggcggagcttccagtgagccgagatctcgccactgcactccagcctgggcgacagagcgagactccgtctcaaaaaaaaaaaaaaaaaagagaattagagttctagagctctttgcttatccttaaaacattgagcttatccttaaacattgcttatccttaaaacaaaaaatgaagtatttttccatattgaaatctaacggatgcctaacaaaagttgacatggtcaatacaggtgaaaaagtggggcttgggagctaggaaaacaggtgtaggtagatgagtcgtagttcatgaaattttgtcacagttttaaaatgtataaacttttaaatataaaagtattttttccacaaagtcagctaatcttaaatcattaagtacatctttgcttgtaaactgactgttttgggggaatgaattaacttacactgctaagctacattattgtagtttaacttttgtgtcttcctctttcttgtttctcagtttgaaaagatttgtcttcttcctgatttcacttcttgctcactaaaggaaataattacctctatctaattttaaacagaggtcagattcgaaaagcataaactaatttaaatttcattttatgtctcccataaactcaactttgtattttattttagattataagagatttgaaaagtcttgtttggattctaatgtacttaaaactccccttaactttcagcactaagtaaaacagttgacttctcagtgtcaagtcttattaatagttcccttcctctatgttgttcataattctttagtaactttgtatttctttcctttttcttgtccaatctaccttgtcctctagtttctttctctccacccatcttatacttctggccagaaggtagaatggtttttaagcatttacctggatatttaggaagaataaaaccatctccttgagggttttctttttttccttaaaggctcagacatgactttgggtcaactagaaatagaatcctaccggagaaaattatacaaaggaaaaagttatttcctctcaaaattgaaaaggagaaggaaatgtaggatatcagaaagtacttctcttatgcatttcttttttaaaaagtgtagacaggcagcttgaaaattctgcttcattatacattctcagtatctgttttcctgacaaattttatagattaaaaatatttcagagtgtagtttatatatagcttccagtcctttttctttattttctttatgattaattttaacaactgacccttaaacatggacaaagactttctaaacataaaagcaaagaaaaataatgcagagaatcaataaatgtgactgcatatgtatgtatacatggattatcctctaacttcattggttagccttctaatgaaatcaggaaaacctggttagaaattgtttgaatgtcttctgtgaaataattatttttctccctattctaggagtctatgaactagctgtttttcagatgaaacctggtgggccagctctgtggggtgatgcatttgaaagagcaattaatgcccatgtcaatttaggctacacaaaagtagttggtgttttccacacagaatatggagaactcaacagaggtacagttgtccatttgttctatgaagttgccatgtgtattagatcagttcgtctctctttttcattttggtacctgttttaatttttatctccaaatttttagagtttgttgtttataggattgaaaaaatctataagcatcttattttacatcttatttttttagaatgttaatactttatggagcctttttcaaatgctgaactggtgtttgttttttaacttttattttaggttcacggggtacatgtgaagatttgttacttaggtaaacccatgtcatgggggtttgttgtacagattatttaatcactcaggtattaagcccagtacccaattgttatcttttctaatcctctccctcctcccatcttccattctcaagtagaccccagtgtctgttgtttccttctttgtgttcataaattctcatcatttagctcccgtttataagtgagaacatgtggtatctggttttcttttcctctgttggtttgctgaggataatagcctctagctacatccatgttcccacaaaagttataatctggttcttttttatggctgcatggtattccatggtgtgtatgtaccacattttctttatccaatctgttgttggtgggcatataggttttcatgaaaagattccaagtttttgctattgtgaatagtgctgcagtgaacattcacgtgcacatgtctttatggtaaaatgatttatatttctctgggtatatatccagtaatgggattgttgggtcgaatggcagttctgcttttagctctttgaggaatcaccatactgctttccataatggttgaactaatttacactcccaccaacagggtgtaagtgttccctttttttcacaacctcaccagcatctgttattttttgactttttagtaacaggcattctgactggtgtgagatggtatctaattgtggtttatatttgcattctctaatgatcagtgatattgagcattttctcataagtttgttggtctcatatatgtcttctttagaaaagtgactattcatgccctttacctactttttaatgggattctttttttctcttataaacttgtttaagttccttatagaggctggatattaggcctttgtcagatgcgtagtttgcaaaaattttctcccattctggaggttgtctgtttactctgttgacagttttttttttgtttttttttttgctgtgcagaagctcttaagtgtaattagataccatttgtcaatttttgtttttatcatgattgtttttggtgtctttgtcattcaaaattaatatcattgacatagaaaattctcacattgttgcagcattttaaaaaatctgttactaagtataatatacactaagaccctaatttggtttactaattttttttaaaggaaacacaccatatgttgataaaggtttatctaggcagttaagattatactaacttttattttttctttgtatcacctaaattttctacagtaaacaattttttataatctgctttttttaaaaaataaaacatagtaggaagtcattaaactcgggtctagtcttaattgtgccttaagctgtgtttctttgcattctctcttcagccttatgtttccagtttaacttataaatttatcttccaaatttctgatccctctgaaatcttataactaacatatttagttttaccttttgattttgatttaaagaataagacaacatttctgattcactttttcaatatttcttatttgctattgccatatatttcagaaactacttgtggtttatttctgcagttcatgttctttggtggaatgagagtgcagatagtcgtgcagctgggagacataagtcccatgaggatcccagagttgtggcggctggtaagctgtttcactaagcacgaattatttttagaacaaatgtgattcaaccaataactgtatgccttcttatgaaatgtttttccagttcgggaaagtgtcaactacctagtttctcagcagaatatgcttctgattcctgcatcattttcaccattgaaatagttttctactgaaatacaaaacatttcattaactgctctaagatgtgtctgctaatggtgcttaaattctcccaagaggttctcgcttttatttgaaggaggtggtaagttaattagttaatttgctgtgcttcttgcatttttgaaagttacatattctccactgctttaagaaataattcagttcactttcaccttggcatttcagtatctgttacacattagaagtagttgtcactatttcatcatcttggtttttcatttgttttagaatacctcttctgtattttgataactcattgctttatagcattttcttttactcaaataaggattttacatttccttgcctgacagtatttttgaattatttatataaaatatctatcttttcatcatgtctatagttcctgagattttaaaaaaatttgcttagtaaaggttattttgtgatataaaatgggatttataaaaatattagattgtttatttctttactgtggaaaagtacaatgtcatctgtattaattattgcttttacattcattgattattagtcattctaacttggaaaataatgcaattgggtcacagtgttaaaaatctagaaaagacttgttggtttatatgctgaaattgttcatttataattaattttactaatttctacttagtttggatcactaacagagatcttgggacatttatttgttttaaagaaatatttatggttatggaaacgcttgccctaataaaaatcctgcatattcattgtttttttaaattcacattttatacttatatgatctctaaagctcttgctatgttgctataagacagtaatatagtgataatttaccaactttattgaaaatgttgttacatcaataaaatagcatgctgggaacctgagaaggaaggtttctttagtactgccacagatgtcctggagttttccttgaaacatctttcatttccattttacttgatgcctctacctactaaaactagatttggtacttccgatagtgtatatttacagctatattatatttacatttttacagactatcttctgataatctgtatttacagctatgttattttatatttttaaaatcttacagctataaaatagtaaattgtgaattagctgtccaagggcaatttggaaaacaaactgtacagtttcctctcatttatcaggctctaagcgatctgcagtttatctgggctattatgcaatgtgagatattatttatgagaggcaggcagtggcagcttaaacagacatacctcctcagcattcttttccatgcagagttcaaagaggcctaagacatctcacatttatgtgaaatagttgaggcacaagtatgtggttaactacacataaattaccaataaaattaaaagttaactaaaatactacagaagacatttaatattttgcttcagactgttatagtaccttagggttatgaacatcaattacctttgagccttactatatttaaagggaaggggaagctgacatttttatcttttttaatgggtacactctacgttaccttaaaggcttccccggtttaagcaaaaatagaattatgtggtttaaatcatataccttattcttcatacttagctccaagtagattatgacttttcctaaaacttaacatgacagagatttgccttccagggggtctaatttgaagaggaaagtaatttaaatgtataggtttatataatagcattgtatttttctctattttattcattctttcattctcttcgatgactcccagcacctgcgcgtccatcttcattcttagccaatgacctttccttttacttaacagagaaaataacaatcagaagagtcttcataagttcccaccccgtctgcccgctttctacagccaaccccacatgccctgccttctctcctttcactgtggatgaaccgcccgtgccccaagcaaagacaaaccctccacttgaacactcacttgctgaaggatgtggcttaggcagttttcctgtctcctgaagccacagtattccccttcaactggattcttctcctcagcatataaatatacttttttttcctatctttaaaaaaaaaaaagagtaaaatcaccccatttttttcctttacaatatgactcaaaagagtagttcatacttcctgcctccattttcttccctcacattatctcttaaacattctctgatcacgccagccaaattgctcttgtcaactcatttcccagttctcatttcacttgacttgttagcagttgacctctcctttcttctgggaagtttcttcgtttctccgaaacactcactgcacaagccttcatatctcctagtctccatcttgtctctttgacctctgatgtaaggactgagtccttggaccacttctcttttctatttatacttactccctgcgtcatcacccccagtcttgtggcttcaaatgctatctgtgtgtggatagctcctccagtccacacctcttttctgaatcttttttcaaattcacacatgtgaatttgaattccaggctcatcacatccaggtgtgttccccacacctccacctgaatgtctattagaaatctcacacccctcttgtccaaaactgagctcttgatctttaaccagaaactttatctcagctattggcaactccaggtttctgttttgctcaggccacagacttcagagtcattctcacactgccttttctctcatacaccattatgtacctgtcagcaggtcccaaatatctagaatttgattgcttcacatccctatagcaactctcctggttcaagcccatcatcatctggatttttgggaagtggtcttaactggtgtgctgcccttcccctctgctctcaaccctattttcaacatagcagtcagaataatctaaaatataaaccagatcatatcactcctctgctcaacaccccctcccaataccttcatgtcatcctcagagttattgtccaagcctctaactgtggtctacaagtctttacatgatctgtcctgttacattttccactctcgctccagacctgacctaagaggcttttctctgaacttgctaaacatgctcttacctgagggtccattcccactgcctctgcctggaatgctcttccccagacatgcatctgcgtggatcatttccatgcctcctcaggtctttgccctcatgaagccttccctgacaaccctatttaagattgtaatcccctcccacagtggcccctatctgctagagactgaatgtttttgtccccccaaaattcctatgttgaagccttaatctcaacataggaggtttggcctttgtgagttagttttagatgaggtcatgtgggtaatagaattagtgcatttataagggcgtgaagagccctcactgtgaggaaaccagaatgtaagccttcaccagaacttcttcatgctggcaccctggtcttagacttcccagccactagatctgtgagaaagaaatgtttgttgtttaagccaccctgtctatggtactcttgttacagcaacctgaactaagacactatccctctcccctgctttctttttctgttatcaccataattaatgttttacttatatatgatttgttaatgtatgtctcttcccactagaaaccgaattctatgacagcaagggtttttgttttcattattgtcatattacctgtgcctggcatgtgataagccctaagtacttgttgactgaattaacatatgagatctgtgagtctgaaaaaagaagtacatcattccttcacatgtcattttgagccactgttaacagattacataactgttattggaagtgcctcactactccatttggaaagtattcctggaatacacgatgaatgactcagtagaagttctggctatgggggagtgccatcaataaataaaaataataccattgtctgttggttataagttgctgtcacagactatgaaggtatttgaattgtattttcaggaagagaaacagatatgcaaccaatctgatttggttccacaccctgccacagaagtcccaaaggagaagcaaatgccacttgtagactcaaactctggacttcattctcagcaccatctcttaacctactgagtaaatcctatgaacctgactagggtggcaactgaagttgtagtactttctgtcttcaaaggagggtgaacctggagtatgttggaagaagtgttaggttcattagagacacctctttcataactgctgtcacctagaatgtctattctctaagcaccttcttgaaagaagcacattcccccaggaggaggaaatggtttgttttctttagtgacagttggcccaggatcctaaggtaaaggagtatgggcactagacaaaatgagttttataatagtcgattggaaggaatggaagtttttgaatcacaggcttctgccttgaaagggcaagtccgtggtggtcatgaaccacccagagtgtgtacaaggctcctgccagaagaaatgcctgtaggattaaaagcaaaacagcagaatcaaaaaggaagggcacgatgatgcccaggtgcagcctatattattaacagacaaggaaagaatccaaataaaagttctgtaaaccagctgttgtcctgttttctgtttcccttcaaagcaaaaatatagatttgcatatatttgcagtctccccttccttgcctctcagtcttccctgaaaatctattccagttaggtctgcatccttgtcatgctgaaatgactcttaggaaggtcaccaaggacctctgtcttaacaaattcaatagccattcctgcctttactcatttacattccttactcatcttctcagcaatgttggacataattgacaacttctgccttcctgaaacaataattctctgagcttcaacatatggcattatactcttcagattttactctctctcactggccagtccctctcaatttccctggctagcttctcttctaaatgttataggatctcaggctcaagaatgttccctatcttcattctctctaggtaatctcattcagtcccgaggcttaaatatatacgtaccaataacttgcacacttttttttttagatggagtttcgctcttgttgcccaggctggagtgcaatggtgcgatctcagctcactgaaacctccgcctcccaggtgcaagcgattctcttgtctcagcctcccaagtagcttggattacaggcatgcaccaccatgcccagctaatttttttgtatttattagagatggggtttcaccatgttaggctggtcgcaaacgcctgacctcaagtgatccacccgtctcggcctcccaaagtgctgtgattataggcgtgcaccaccacgcccagccaacttgcacacatttatcttattttccatcattgcccctgagcttcagactgaaatacccactgcatttttaacacaaccatctacctagttcaggtcacaaactagaagtcaccttgctagctctctttccctcagcccttacatgcagtctgtcagcaagtcctgctggatctatctccaaagtggatactgaacattaccatagctccctatctgttgctaccatcttagttcaatccaccattatctattagtcttcctactgtcctttcttcccatagtagccagtgttctttctgaaacagtaggtcacaccactactgtttaaaactctccagtggctccttgttgcactaacaataaaatccaaataccttaaaaaggctggcgagatcctgtgagatgtggtccctgctatctctccagttccaccccctgccactcttgtccttgctaactcagtacaagagacattagtacagatagctcttttaccacctcagcttgccaagctttttcccactggggcttttgcaacacttattctttcttccgggaatatccttcgcacccaccttgaaaggctgctcctgctctttttattcgattctgagcatgtcactcctcagaaaaggccatctctgacttctctccattgttatccaattaccatgtcttattttcttcttagcacccattgctgtcaaaatacattagatgtgtttgtccacacatcatctttcaccactgaaatataaattcattagagcaggaattctattttcttctacattgtaccccctagtacctagagaagtatctggcatacagtaaagttcaataaatatttgttaaattaatgtatattgatgctgatgtgattttacaaggtcaattttaactgatacctaacttcaacaaaaagaaccctctgccacttgactgaacctgtacctttggacgagtttcttatccactgagctgtaatttactcatatgtaaaatggtactttttacctcatagggcaggtgttgagaattaaatgaagtgcatgacaacacagtaaacacttgaaaactgaagctaagtgggttttttttttttttttacttaatgtaaacattaccattacaaagtgccaagttttttgaatctggaaaagttcttttgggcttttctacagatagaagaatgttttagtcaaggctcatgggtagggccaggcaaggtggctcatgcctgtaatcccagcactttgggagcccaaggcagaaggatcaccttaggtcaggagtttgagaccagcctggccaacgtatagtgaaaccccatctctactaaaaatacaaaaattagctggttgtggtggcgcatgcctgtagtaccagctacttgggaagctgaggagaatcgcttgaacccgggaggcggaggttgcagtgagccaagatcatgccgctgcactccagcctggacgacagagcgagattctgtttctcaaaaacaaaaacaaaaagcaaaaacaaaacctcatgggtaacatattttcatctaaattacctgcctttttatttttcaataaagttttttcctctccctcgtcattgttcacgaagaaacagtgttctatgatttcattaaagtcactataacatgaacttcaagataggaggatgaagttgtgatgctgatgctcagggggcatcttggctcacttgaagccaagatttttctgcacacaaagttcagatctgtgccacaggaaaaggactgctcacgacactgtcacagccattcctgaggtcacaaatagagacagcctcttgtacttcctcaaaaggactgtttgacagggattcttcaagtagcaaaataagcagacatctctttctgaaactgattcttaatgagctatgaaaaatacatttacatttatcagcactgctcatatgttgtctgcacagcacttattacaggaaaaaaggaaggaatcaccgatattagtatcatttctgtttccatatctacttcgccttcctgctcaccattgccaccacccccagcaccttcccagtataactgctacattgtgtccttatatttttggttgaataaacaaaaggacactgaaggctgcctttgtagcttcccctataccaagtgaacatttattaaataagctcagctacagagcattttcagaaatctcagtgcagcttcataatcattaagcagaatatttatctaaaaacctctaacacttaataccagttactcagtatcttaaccaacatgaaaatacaaaacaaccttttattttcaagtagtcccctcagttctcttttatgattaagggaacatttgaatcttttctaaagtttttccttttgatccaaatcacttcccctctacttttctaatggctttataacccttcaacagtaggtggtgccacaaatgcacaaaagtaaatttctgtagaccaacagaactgtcacagctttattttgtgactcattatattacaacatagaaatatgcattttaatacttcatataaagttattgacatacaaaattttttttcttttttccttttaatgaaaatgatttaacttagaaatctgttgtgaaacttttgtctagttttgcaattctcagatattccagtgcaaaaatagatcccattacagacagcgtaaagtgcttggaatgagggccaatgatgaacaaagagcacaaaaacagcttcatcttagggtataagaagggataatagcatacctaaatccttatggaaatagaaacattctaagggggatgcaacaattttgaaaagaattagagcaatatttctacagtattacattattactagtagataataacaagggtacaaattaatgtctcaatatcaaagtggttcagtattacatgacacatggctctttggaaaatattttacctgatatatacaaccacaagaagaaaacacagacaaatggctttagtcaatgattactatacagtgaatgaatgatgtgcaacatttaatagtcacaaagcatttgctttcagtacagataatgaaatacagtagtgtgaggtttggttgttttttaacaatgaattgtgctgggcatttatgtatagagggcttattattttcttctgtatttctcatattcacagttgttaataagttttctgaggtgtcccaaagatgcaaaagcagaaatttttgaacacgtattttgagaatttctgaaactcacataggtacattccacagggaatatacagaaattttgcttgattgagtatagagttggtaaaaatttctaccacaattaggtttacacaggaaaatgtaaaaaattactattttaaaaggtaacacagtattaatgaagatgtataactatagattgtttctagcttcagaagaggtcctttcaatctgtattaaaatgttgtgttttcttcaaaatagttcacagtgccttttgattttttaaaatatggccttgaaatcagaggaaccgaagtaaggagttgctcatagatttactataatgaagaattagaatacgattttagtaaaatgaggaaaccataactttgattttgaaaaatattaaatgaggagaaattattctataaattctgtatttttgaagatactgtaaaatgcaacgatgccatatcactagttattggaaatatgccttcattacttatatttaaaatcaatattgactttaacttctaaaacaatcatttttttctttttcagcagtgggttatataatattctgtaaatttaaaaaatatagaaagattaatttgaaatctgaagtcttacacctttagcgttaatattcaaattctggaaaaagtggaagaagttagtaatgatattgaaagatcacttgaacttccccaaacaatagttctctcatatttttcttttctctcaagacagttaacagtaagtattagtgaaacagtatttttacaaatgtttactgactagaaaaataagactgggttagaaaactctgaaaaatgctccatatggaagtatttgttgtttttatatttttcttgactagtgattgaagagatgaaaaatttgagactgtcagatttaatggggtatccaatatctgcaaagccaattatttgaaggtactaaatgccataaacacaagttgtgtttttcagcaagttttcaagctagctgttttccctgttgaagaattcattgtttagacttgtgacccttatactttcttggcttttgcattgttgcaattaaaaaaaaaaaaaaaaaggctgcccagtattgttacagtgggctcctacaaccacaagacaacctatatttgtaaaccagtgagctgaataacatggcacaggaagtgtactgagacttaatatctctctagtcttatacgtacgtacatactctttcagctacagcatacactcaaaaaatatttgattgatgaagtgagattaagagtatcctaaatgatctgaaagaaactcaaatataatgtcatgagatcctgaccatcacattgctttctaggcactagtcatgactgatatgcaaacttacataagaaaataaaaatagtggggcagtggccatactcctctataccacagggttctacaaagaggccattctaaggattcagaagtcactgatagaacttaaaattccaaataacattaaaaagtacaaacatttttgtcaaaatacaactccatcttttcattttctagattaattcaaaaagccagaaataatacacttgtgtcagataaacatcttgagatgcagtgtaccatgttagcagacagtcaggacaaatgggcacaggcttccctaggtttgaacgcacaatctctttaatcccatgccctggcttcagcagcttgcagccccagcagtttggctgttgattctttgcctcttaccaggatctaagtatatttaagagtctcataaggatgaccctgtagacccatggctcgaagcataggacaatataacaatggaaccaagtttcccgtgcctggagacacccacatttttgttgcatgttactgccaccagaacagcttatcagagggaatcaaagcaggatgttagccacgcatggcaccattctgtcaactgatattcaatgttgatagactctgagcagagcagctttcacaaaagtgagcatgacacaccatggtgcttcaaactttctgaaaaacttggcactaataactctggcacactcattgccagcaatggatgtgtcaccgggaaaccagtctcctgggcatggcatggcttagtgaatgaggatgtgcattaccttttgattttgatcaataatcgctggccatgattacttgatgaattattgttgcaaccccaatgagaatacacaggaacaaaaaaaaaaaaaaaagtgtgagttcaaacccatatgtccattgggttccataatagagtttcacataggtataggtaaaaaactaaattcaagtctttcacttgagagccatacaagacataggctacaaaggcactgcccctgtaatggaattttgttttcattgcattgaattgcattgcattgaatagtatcagtacagtatccagtttacttcttcccacatcaacttctggctcttttctccacaacacttcacatggtgcaaaggaaagtctagttcctctttactttcagccaccccgtatgaacaggattcttcatacatagctttctttcactttctcatcctgtagaaaagatgtgagaactgcaacgtccactactgtctggtttttgtgtaatgagaggtcttttaagtggtcatcatcactttggtccttggcaaagttcacaaatacctgttaaaagattaagatggacctttataaataccactcaacttgctcattctttattctagttctatttttccagatgttgaaattaggtcaagtaggagcatacagaattacataaatggattaactagaaaactgtgtgtgaaggagggaagaatacttgaaaaaagcaataacaacttaaaaatagactttttttccccccttgaaatggggtcttgctctgtccccaggctggagtgcagtggcgagaccttggctcactgtaacctccacctcctgggttcgagcaattctcctgcctcagcctcgcaagtagctgggactacaagtgcgcaccaccatgcccagctaatttttgtatttttagtagagacggggtttcaccctgttggccaggattatctggatctcctgacctcatgatctgcctgctcctcagcctcccaaagtgctgggattacaggcatgagccaccacgcccggccaaaaactgactttctatatcgccccccacccctacatcaccaactgctcagtcatccatttactttggcacatacggtcttgattaaagggaagagggaagaaaatatttactgagtacttcttaagtgtcaggacctatttggtacttttttatctaatttaaataggattaggcaccaagtaaaatgcctggcccatggtaggtgctcactaaatggtagtttttatggttattattacagtaaattctcacaataatcctatagagtacataggcatcatctcccttttcaggttcagagaggtttagtaaaaagcatagctaggaatagtagatcaggaattcaagcaccaattcaagatacaaactgctcttggacctatgggcgggagtgtcggggcaggaatccacaccctgagaagtaaatctgttttgacactcaaagcttacttggtcaagtgttgtctgagaaacagagtagtcttctatgtggagtcgctttttgctctgggagaggatgctgaatatcctggccagagaagataatgaagatggaagctggtattgtagcatgttccggtgtttctcttttagaacacttccaggaaatgcaagtccaaagaaatcctggacaggcttcaggtccgggttggaccctgctattcgtacaactattgtataaccatctccaaacctgaaagcaggaaaaaatacccaaatggaggatctccagaaaactatttaaaagaatactgaaccctgggaacccaacttgtgccatgaaaaagggcggcccctggcaggcccagaaataagtttctgagagaaggaaccagttatcatttactaaatacttattttatgtgaagcaccatgccatgtgctgtaaatacatgatctcctttaatcctcacctggacccatgaagtctgacagatgttacagagaaactgaggcccagggagttagtcacttgcccatggctcagagctcataattggtagggccaggatgcaaacccatttgtgtttgactccaaagcttgcgctctcaccagtactggcacatgtaaatttttttcatttcatctatagcacaaagctaggaggtagatcttccagggaaactaactcttacagtagttaagtcacttgcccaagagtcacagaaccagtaaatggtaaagacagaatttgaatgcagttcggacttcaaagccctcattctttccactatactgttttgctcagttttatttccctttatgttagaggcaccatttatatactcacaaaagaataaatatcaagccttctcactaggcactatcccaaagaaattatctttattacctattttttagatgctggacactgccaaggcacctgaaccttccattgaccatgattgccatcctagtgcaaagagcttcacattcttccatactgcggtaaaacagaaagaggttttagttttagagagattctctgtaaccatgagaacatcaccatgacttccagcattccagcttcctagggaattgtattctgttacaagtacatgtggatatagggatgatgctgttcagtgtagtggtgtttacaattgtgaacaagttggaaataatccaaatgtctacaaaagggggaatagttaaataagagtatatcctaatggaatactatccagctataagaaatgacacctaaatgcactgacttggaataatgtttacaatatattaagtgaaaaagagcagtatttatactgggcttgcatttttgtaagaatatgcatatataatttcaggtaataattgttttactctttgcttttctgtattttctaatttttacaaaatgatcgcatattctacttggaaagttaaaacatcccacagtgaggaacccaagactttactacggacctatgagatgtaagcactactgatctcccctccttgacaacacttagggcacaattccacaagaaccgccgggctttgggatccatgcctgtggtgggttcatcctgtaattagaataaaataagtcttatttgctggggggaaaaaaaatcaaagataaatttgtttttaaatgcagaagcatctttgaaacagcttaaattttaacttgccattctagttatttcttgatgaatcaaagaattagagtaactttcaaattcatttgtaaacaaggtcattattataaatgtcttattgatgcaggaaactcaaatattctgagtacttttttatgtaattaaatttctccaaataaatagggaaggaaaaaggccatttagttgtaattatcttttcatgactgataagtatatacaaaacaactttttgtctgaaacctctattgaagtcagtataagattggggtgaaattcctttttttttttaattccagctcactcagattaccctagtatattgcaactgttagccttacagaaacaaattccagaccgaggtggaatacataaaagcctcaaaggcttcttcccgtaataacatcaatgctcttatctacagaagaaaaaaggtcaagggccacttcccagtctgatctgtttttcatctatccgtgtgtaaggaactatgacctagttgctaccttggggattttaaagctgtgtccacactcttcattttcagggaatgaacacaaagatgattagaaagaatgttccagagaaagatcaaatcacatatccagcctcaatcacgctaagaaacaaagtgcttggagtgcctctatttgggagcatctgcaggcatggtacagccaccccagtgtgtgccaagggagaagcttccctctgcttttccaaggttgctctgctgtccctgggggaagacaagccaatcatacaacagccctggacatataggacttttgaacagtcatgttttccactcaggccagaacaacagttttccatccacagttatactcaccagaaacaccacaggaggcccgccgatcaaagccatggctgtagagagcttgcgtttgttgcctccactatagttaccagcatatttttctccatacttcacgaggcccagtttccgaatcgcccactcaccaacctacagtgataaaaagcaccttgactttggtctggcttgggaattttatcatgctgtcctacacatacatgtatgaaagttctttcactgagtaggactagattctataatcataacctgacaactggtgaggagccaaagcagggagaagggactcgtgtggtgggagcagcactccctctctgcccacccagccctgccccaccaccgttacaggtttccaccctgaaagcagatacaaagaaccagcattttgtgctgctgcattcatgaggaaaaacagcctgaagtcaatgcgtgtggaaaagccataaggtatatattgtcaggatgccaaaggagacaggctggctttcaggtgcccacagtaccttgccaacttctttctctgggactcctctcaaaagggcaaagaactccacgtgttctctcccagtcaacagctctgtgatggcatcaaactgagggcagtagcccatgttctgatgtacttcatggatgtttgataagatactgcaaaggacaagaaaactacttagattttaagcaggtagagatactctggttagacaatctggcctaatgttcctgtaaagtatgcttctccattacaaagataccaatacatctgctgctacttgaaagcacagcctttctgcccccaggatgctagctcttcctggcaggcagggttcctgcctctaccctccccagtccttgcacctccctggctctctgaacacttcagtctgcaggtgcagtcccatttcagaatttctgaggtcatgccaaccactgcacattctttaccaacaatctcagtcacactaccccagggctttaacgctaaggccccatcctagacttcactcatatgcaccattcacatgcaccaaatgagaaggcccagaaattttgagtgtgagcaacacagaacctagagacacaatttatgtggtggtggggtggctttggggttctatgaagccagtcaagtgaagaatcacatgtgagagaagttcagtgttcacgttccagactgatgactgcacctcagccacagcggcattgccatgaacttggccttctggcagcattcattcctctctgtgtatctaattagcacccccagggtcagcctttttcagaattaggattgaggcacacgtggacaccgtgccaggccctcacagctataccaaccaaatcagttcttacaaccagtccctgtgacaaaccttactatgggctggttattactgccactgctatatgcgtcaggagcttggtactaggagcaagcctaggaaagcagttgtgcagcgctaggcctgctattcccagaatgtctgttctcttaggattcctttacattgctactgcaaaaatgtaagagacaggagaggagatcatgaatacattaatttccttgctcttttcaattttattggctatccccctgtccagtgtgttcaaattgtgagtcattgttcattagtggtttgggaaataaatttagtgggtcatgaccagcacttttttaatgacgcagtataaggtagaataagaaatagcagagtgcactacaattagtaacagtaggtactgctttatgaaactttaggttatacatgtgtctacatgtctgtgtgtacatactaggttgagatataaaatgtatttcccacaacggtcatggtcaaaaaactctgaaagccactgccttgtactatctctccacataataagtccagagaagccgggcgcagtggctcatgcctgtaatcccagaactttgggaggctgaggcaggtggatcacctgaggtcaggagctcgagaccagtctggccaacatggtgaaaccccatctctactgaaaatacaaaaaaattaggcaggcattgtggcgggcacctgtaatctcagctactcaggaggctgaggcaggagaatcgcttgaacctgggaggcggaggttgcagtgagccaaggtcgcgccattgctctccagcctgggcagtaagagtgaaactccgtctcaaaaaaaaaaaagcccagagaagccccacatatttaaagtacttagagtaacattatctaagaagcctataaaatgtagctgtattcccaaagatcagattgctttgtgacctgtgcagtctcagaaaatggcctaacggtggctcagtcaatttgtatgctctttagagagggcaatttactttgtaggaattgttcctgaggaaataataaaagatgtatacagggacatatttacatagtgaaaaatggaaactaatgtgtccaacatttataaggaatttattaaataaattataggtacatgtacatagggggattttatgtagcaatgtaaaattccacatcttaggaaatgtaacccactgggaaatattcataatacactcattaacaataaaaactaattttaaattctacatacagtatgatctcaattgtatggcacatttatatgtgtatataagacagatgtggggtgatggaaaagttctaaaactggattgtggtgatggttgcaaaactctcaatttaccaaaaatcactaaattatactcttaaaaaacaagcaaattatattgtatgtaaattatacctgaataaagctgttaaaagaagagaatgagactgaaaggaaatgtaaattgtgattatctctagatattgaaatcatggatgattttatgtgcttctttaccctttactatatttcaacatttttatgaactctaaaaataccactgtaatcaaaaataacaacctatttctttaaataaattaaaaacaaagtctttgcagcaaaatacaagccacttcttttctcacctatttttgttaaggaaagcatctcctctggtaacagtggtatctcctgttaacatcttgaaagttgatgattttccagccccattaactcccaggagcccaaagcactgaaaaggaaagattaagttgtataagcaaactctaaaaacatgaatataaatgcccctaacacgtaactacctcaaaccttcaattcttaaatatcagagaagaatcaaatattttcttggttttaacacatcgtatagatatttaaatatgtatttcataatgggaccattttaagtgtggctgtatttataaatattatttgagttgtcaagttgaggccaaagttaatgtgtgaaaaacagtaatgaaagccagctagccaaattgcaccacctactctggcaaaagggcataaaagaacacaaacggaaaccagaaaggagaaaatctatttttaaaaaactatttgaatgtcatcaccatcccaaatggatcacaaaagcatgttttagatgtgcgtgctttttctgtttttgttgttgacatgagtctcactctgtcaccaggctggagtgcagcagcgcaatctgggcaacctccccctcctaggttcaagcaattctcctgcctcagcctcccgagtagctgggactacaggaatgcactactatgcccagctaatttttgtatttatagtagagatggggtttcaccatgttggccaggatggtctcaatctcctgacctcgtgatccgcccacctcggcctcccaaagtgctgggattacaggagtgaatcactgcgcccagccccatgctttttcttaaattgtattggattctctgaaatcattctcttgacatacagggtccctctcttctcgatgactaattgctccatcctggcataaatacagaagcctttaaaatccacttttacctcttaacgagcatcgttgcttgattgggtagagatagtctgaactaatagggacaaacgcaatatagacaaagtgtctttacctcaccaggaggaatgcccacgcaaatcctgtcaacagcaggcttccgcttccttctatatatctgcaacaaacaaaatgtaaacattcataagcctcagtgactcacagctctcccaagcaactgtggaaggcaggactataaaccacatacactgcaacataagacttgtcaataaccctaagccataggcatatttgatgtgccaagagccttggtctgcgtttgtggcgactggcttctgaatgattctgaagctcaaaataaaagtgaacttactttttaacctgtctttttagaaccgtatcattcattattatctacataatttttcatctattcaacatatatatgtattgcaggtattttaaaaattaaattccacagagtagaaatttgtaataaaaatattgcaaatactgtacagattccaaaaaagtaaaatttggagatgctggcatctagagggctgatatagaccctcttgaacacaggcaatatatcagctttttggactatgaaactcaaactcaaaatcaaccatttattctctctacctcagttttgactagatatacaatattagtatgttttaataactaacacataaatgtaagcatataaaaccaatgtattcgagaatgggaattcatatcacaaaagaattctcagtaagaattctttaagaagtctccatggtgtttttaaaataaaattgacagaaccttggtatagatgtacattttgggaacacatgcccttttattaagcaagtcagcaaactgctgggttacagcacataaagctgaaaaaaactgaagatgagctattgtaacctgtactctctcaccttcgtcaactccttgatttctaagatgtcattctggcctccaccatcaagaattctctgtctttcccgcctcacatcttcatcttcatcattcagaggagatagctttgcatttacaggtcttgggggaaaaaacaagaaaaatgaacctttcaaactatttttcaggacaaagattcagtctctaacgtagtattataaaacctacttgccacagtctccaggatgggcagggagggggctgcgggatgcccacatcaggaaaatcagttttatcacatattttgagttcagttcaatgcaacccccattggtgagtgtttccctgtgcgcctcctctgtgaccctcaaccaggtgctccacgggttctaagaaaaagctcacctgggcctgatgaagaatctgtactggatcagaacagtaatgaggaagaacaccaccccttccacggccatggcgaagaggtttcgtcccaccaagtcccaagataatggtgacacaaagcgattctcccctagtagacacaatgcagagatccggtcagaatggagggatcaaaaaccatggcccttcctcaaatttgggcctatgttccttaaaattcaccgatcttccaataaacacaaatggctatcacccatgacaaggaaaaaagagtaacaagagagtgatcactttccaagtctgatttgggaaaactttttatgacccagtatcaatcagaatttcagagccaatgtgtattcgatttgtaacttcactgaagatatctagtatttctttttttaatgagacatgccaaaaatccttttaaaaaggcaaacgacccaagtaattttcacagtcagtatttttaataaattctaagttttagtaataataaatatcagaaagcactttaagcagattcccctttcagtagcatatatcctagtgaatcaattaaaccactagattcaattaaatctagttccatgtaaccattccttaaattccttacatatctcctttgtagcccaagttgcaaaaagcccctcttctatgaacagtaaataacatggcccatttgactatattatctaatggatgaataataatcatatggctaccggagaaatatttttaaccattctaaaggtagaaaaagatgtaatacattataattttatagactgtgtaaaagataataaatgacctcatctgcaggcacatgattcgcctaaaagagccaaagtttgcatctttccttctgattccctgatcacctaattctcaaagttatggtttgacttttccagtgcttctaaccaacccagacagtggcatgagccagtggatccaagcaaatgccactattttccttaccttcaaaactgccctttcacttttctcaatgctatcagagacacagacaaatggttgtgtcacaaaacccatgccacaaccagctgtgttggcatgagccctgtcactgggcatgggggtgggggaacatcctgtgcttagtcacctgcttctttccaaaacaaagttcagggtaccaaggcctatgcagagtgccatctccattaaagcatcctacagccactgcttcactcaccaaacctttccagggcatcagccattgcctggtttttcaccatgtcgatgagccctcgtcccaggcaaaaatgtgggaagatcaagaacacggacttcaggatatcattgatattattcagcttctaaaaaaaaaaaaaaaaaatgggagggaagggagggtgagggagaagaaacgggtgtcattcatggtttatcctaaaaatgtatcaagttctgaaatatgggagtgaagaaaaaatttgattctctagggacaaaccagaccttttaattcagataccaattaaatagcagcaggcatagctgatgatatgtagcaataaaattctattctttagaaaatctggagaaatgctctgagtatggagaaataatgaataaagcttagaaacaggctagatttaattaaagcaaatccattaaaaatcccttagcatttgaaaagcaaattgctcatgtctgggtcaatatttgagtttcaggattttgtcagaattttagaaattcttctcaaatacatcagaacttatgatcccacaaggcaacagtggccaaatatctaccaactgaataaggggctatacgctggatgcactgtgctagggcatgggagaggcaaaattattaagaaacagactccactccgagtaggaaaagtatgtaaacaggaaattaccatgtaagtggatgtacgttgtactggaggcatggactaaggactctgagagcacagagaaaagagagaacacctcccagcaggtaaggaaagcttcacattttagctaaatcttgaagggcaagggatatactaccagaccctgtgacagaagaagggcatttcaagccaggcctacaggagcatggtggttggaggcaactcatctgaagcttacagctgggaaagggtgtggtgggtatggacaggaagagttgtgcaactgtaaaaggccttgtgtgctgtgtttggacaaaggcaatgacaaccggaatggagaggaagccttattttagaggtccatacctggaagaactgacaacataaccagttgaatgtgggaaatctgcaacagcaaagcaagcatctaggataactctaagagccagcttgggcaaccgagtggatggtagtgccactgagtgtgacagggatggcaagaaaagcattaagttccaaggggaaagaaaactaggacatatccaggttggggtatctatatactatctaaatggagcaatccactaggcaagtgagaatttgagattagagttcaaggttatgatcaaggctaaaggcattgatcttagagatgacaataaaaacaccaagagaggtgatggtaaaagccttaggactgaatggcgtcgcccagctctcatgtgtaaagtggaaggcagaggagctactcttggtaagagcaacattgaaaaaagaaagaagtaaaaaaaactgtcaaaagaaactgaaaggcttgaccagcaaaatgtaaggcacagcaagaaagaaaggtgctttgccttctcagggaagacagactctgaagacaggacaaggcagtcagcagtgtcaataccactgacaagtggaataagatcacaattaaacactgtcctctggctcccagagatgctcatcccagcaggagtgttctctctgcatgactcacattgtcggtgaacagctccagcacaaaggtggccacgctgccattaatgccaatgaagaggttcacgctggtgagcaccacataggctgtgctggggatcttgaacacaaaggaggctgggtacatgagaggtgtgattgaccacctgttgagacacaaaaagataagtgtctactgagagtccctgccctccttctgacactgggcaccaaatgccttatccactgtgcagctccctcactcagaggtgacttacccatacagcaaaagtagaagggctagcacaggcagattggtggaggacacataggacttctgctggaagcagatgaagatgataatgaccagtgtggcagggacaacgtaattgcactaaaagtgaaaacaaagacatccagttcacccctaaatcaaatatacaatgcatcacacaagttttcaccattatcagacaagaaagggcagataaacatattggagagtaactctgaattaatgaagccacataaactattaatcaaaatacccgacaatacattttgacaagcattttccccttggctgattttataaactacatgccctttctgtctttccaacagtcaagccaaggtgtcacactcagtaaacttactgaacgatggattcccagtcagagtaattttaatttcacaggcagcaaataagcctctattcttcttcccgaagatgactgtgtctgtttcgtcattaatgctatattatagtctgcccaagttcaatctcacatgtaatctatttatgaggtaactgctcataacatgaatgtcagaattgtttcatcgcactgagaataattttaaagtctgtcctgacagtgtatcaagcagtaaaatgcagaaataaagacttgacgataggacaattatgagaattcacagctggcagagcaaagcaccagcagggaagtgatagtggggcttgtcagccgctagaagaactgcagcttcagactacagggctctgcctcagtccaatcctacttgatgtgtttatcaacaacttagatgaagacatgcttctagcaaatttcaggagctctaaagcagggagggacagataatacccaggaagacaagagatgggttcagggacttgacctttcatctctgaatcacctatgcctggcataagtcagacacacagcactcagtctgtgtttactgaaaggagtaattactgaatcaagataaaacaaaaataaaacccatgtaatttaatatggataaatataaagtttagtttcaaaaaaatcaaatgaatttgtatagaatgaaggagacccgaatttcacaatcatttgtgtgaaatggaggttttggtttaccactaagttgccagtaagacggtgctccttccaaaatgcaaaatctttgtgctgcagtaatagaagtgtgagctaaagatcaactccctctggacccataaccattcagaccacagcctgaacacaaggttaattcttggctttgcttttgaaaacggacattcacaatatacagcatggccatacaaggacaaccggatcagaagagtgacacagtctaaggggcttggtataaacagcaaagatctcatcatcatctccaccatcattgctcacatttgtacagtgcttcggaggttacaaggtgtattctcatatatcatcttatctgggtaatactcaggttaaatgagagtatgagagttatttttaaatatccagggacttgttcggtgggagaagaattagatttgctctgtgtagcttataattaatagaagttacagggagatatatttcagggagatattgtaaagtagagttgaaatataattagaacttcagaattccttcaaatcccccatattggtccaaatagaagcaatatattgtggctggcacaaaaacatatttgcaatggatggataagctgctgataaaatgtacagagttttcaaatgacagatggctttcctagtaaggcaaagaacattctgactctggaggttaaaacccatcagagaagttagaggcattgacttggagttttgacttgtatctctctgattcttgggaaagttgtcacataggaacttaagtggtagtggtattaattttcatcattgtgtacagaattttccctctggtgtgacatgaactctggtacccaatgctgtgtttggtgtcatgaaagtgatcacctgcctctggctatttctttttcatacatctttagagtagctggaacatttcctgatgatagccagagctctttctttcttatccatatcaatccatggccctgacagacatcagaaagatacagcaggcctgtgtccttaccatatcccagacaaaattagagagccagtagatgacaggcttcactccactgatgaactgcaggtgttttgctttgctgacccgctcctggatcaggaatacgacaaagctggctgggacgaaggacattgcaaagatgacacagatggacacaaggacatccactgatgtggtcatcctggagagaaaaagcgtgtgaaaatctgaggggtctttgatgcagttagggctcaatcagtgaggacatggacacacagacaaacacacacgtacacacacacagagatatctgaggcacagcccaaggaaaaacatctgttcaccagacacattttattcagggttaagatgatcatttttaagtctaaaaatatgacaatgtaaatgccaaactggtattactgaggtcaaaagagtccactgtcacaataaaactaatgaaggaagtcagagtggttaatggcattcactttggtccactgttcatgaccttgtaagagcagtaagttgtaaattttcacacacaaaggactagtggggcttgaaaactaaatgagagcagaaatattactctgtaactactcaaataaattaatatttctggctgtaaatcaacttgaaaataacagtatgcagcctattgatctaacacatacaaaaattctgtcagatttttataagaagaatggtctcataagcccattacatggggtcttggtataaagatcctagtgtcctatattagtatcctgtaggagtaaagcagaaacaggaactgccatgctccacatacaggaaaggtatctaatgtgtgtgaaatatcaactctgtgctgagtgctgggcttggcaatttacatgaactgcctcatttaatatcatacatctataaagtttagagaccagattcaaacccagatctgtatgactccaaaggctgcatactttaaactagctcatcctggctttaaacttcacacacacacacacacacacacacacacacacacacacacagcttaatttaggaattaaagatacaagctaataaaaacatattccaccaaatttaaaacagtggtttttaaacaaatcaaactgattaaacacttataattaaattataatttaattaacaatttttgaactcactttatatgaattcactaaatgttacgatttttacatatcagtgtcattttctcttctgcagttcaagaagcccaaccagccaattcgtaaacttatcacttctgcccagagcctggatcaatccagatttatcataatataacggtctctgcagctgttcccctacaatgagattcacatttttctccccttctccataaccctctcccttgccccactccatctatacagacacagccacacttacagagccacctctgagagctgctgcttggtgagattcaggggatgattgaaagcagtaattccataatggctagggttctctcccttttgcaggttggcccggagaatggcattgttgatgacattcaggaaagagctgattgcatgccagcccttgttattgaaccacacctgaaagaaaacataccaggtacaaggtaatgcccccaaaccgggctcctgcaggcaggtgcatacccaccaaccatgcccataaacctcagaaagaaattctagtcacataccaaggcaaaacactatgatcagagaatatggcgaagtaattacagtgttcaggacatagtgatcactgactatgtgggcaggcgctgtggtgaggaccttatacctttaactcattgaattctcacaacagtttggaaatagctatgattactgtctccatttcacagatgagggaactgaggtttagataggttaagtaacttagtcaaggttacctggtatgtctggtggcaaagcaaattctctgaatcactacactacaccgtactgcctcactggtaaagttaatagtttgctcttttctgttgtgaatgcccctgccaactttaccatgagttgaaagtactccaggaaacataaggattattgttcatcaaaaagctactagaacaaagacagcggtttaccttgacattatttttggtgtccagtcctgtcataaatcttcccaagctgttgagaaatcgatctgcagaactgtcctgtaaacaacagaaacctgcctcagttgtgactgttcacatagataaggggcaacagtcaatctggaacctgtggacaacaggacggccctgtgaagagcaatgccactaccttgttcactgaaattaaatgtgaagccattaaataaacggctcctgagaaccaagtgactagaaatctacagcagtgatgctgccatgatgccacaagtctagaaggaatcacagagaaatcctgggatgcaaagccccaagattttaatgtctggttatcacggtggggtgaggactcctcaaagtgctccaccggcatcatctgaagagccagaaccacgctctgcctgcagatgtgccagatacatgggcccatcactcaaaagcagacttgtggactctaggactatcactgctgtccacaatcctagggtctgttttatcagagccccttaattctcacctaaaaatgggaaacctgagacacagagaaatgaagtgagtacttatcaggtcctacagaccagcttgccagcttaaaaaaaaaaaagattcatttcctatttagtcagtgattgtttcagcaaagtatgtttgaaacccagtttatttaccaactgaccaaatttgtaaacctggttgttctgagagctttttttgagatggagtcttgctctgtcgcccaggctggagtgcagtggtgcaatctgggctcactgcaacctccgcctcccgggttcaagtaattctctcacctcagcctcccgagtagctgggattacaggcgcacgccaccatgcccggctaatttttctatgtttttagcagagacagggtttcactatgttggccaggctggtctcaaactcctgaccttgtgctttgcccgcctcggcatcccaaaatgctgggataacaggtgtaagccaccgcgcccagcctctgagagcttttaaatctctggatttaatttgttttttgagatggagttttgctcttgttgcccaggctggagtgcaacggtgcgatcttggctcactacaacctcttcctacagggttcaagcaattctcctgcctcagcctcccaagtagctgggattacaggtgtgtgccaccaagcccagctaatttttttgtatttttagtagatacggggttttgtcatgtaggccaggctggtctcgaactcctgacctcaagtgatccacccgcttcggcctcccaaagtgctaggattacaggcatgagccacagctcctggcctctggatttgtttttgacctacacttttaaacgtacaactaagtaattcagttttgtctggctcaaatcgctaaatgccaaagacggctctgtatgccaacatattcagaacaatgagctgccaggtgatccgtttaacctgccaactactcctatatcccagcagctacatgcccatttttctgatacatcttacgatagatattttaccttggccagctttaggtgtttcttcatttgtttgatggcatcattaacttcttgactcggaggaagtgcttgagtattactgacacccagggaaaagccgccatacctaaaagaacagcctgacattaaaacccagacagtggggtgcacagtatcatcagcagcagactcagtgcgagtgtgtacaaggttcactgagtcaaattcctgttcaaaggagggctaaattttgcctcagagaagttacacgtcagcttcctctaataaatgttggcaatctcttaactcccatggtttctgcccagcagggaggacctggcctgattacacacacagttagatagctgagacattgaggaaagaatggtgtttcatctcacagatgctcctccaacccagtggctcgtgtgtgaatgtgggtctggaggcaagcagatggggagttgggagagtgggaaccctgcactgtccagagtaggctgcgctggccttatacacaggctccggctcctttctagcatgagggctattataggggcctgcgtctgctctgcccagagatccaggggtcctggcccttggggaaaaggcagagagaaaagacggaaatcagtaacaaggagccttcgggccccctgacgtagccacatcacctatctcattttccatgatggacaaactggcttcaagaactcttctgtccccagtcccacctgttccttcaaaacccagaaggacaaatgggttgaaatacagtgcaaagagatggttttggcgcttcttatttcctctaagacctttttagtcccgtgctaaatgcctagaaattgtccttgagtccttaagaagcctcgggaatctggtttggggggaaagtacaagtaggtattcccctcacaacactacttacttgaaatccctagacacctgcaggagatttctgattctcctcaaggaaatcagtatatcaaatatttcagaggcctctggaggggctgctgggcactgagccatgatgctctaggcagaaactctataaagcaggcctaatctaaatctgtctgtgcccctgtgtgctccacatgttcacagggcttctgtcctcctcacagtgagatggcacccacaagtgtgtgagtgacaaacaatccccaaggctttcttcaatccaagacacctacaacaccatcctccccctgagctaaacgtgccagaaagacagcaacttacctaaactcattcacccagatcttgttctttaagctgcagagacaaagaaacaaaaaatcagttcaaagaaagcactgagcctattcctaatgatgcaaaaggagtaaatatccacctgaggatataaggaacggacagaaataaccctagaatcagctggccttgtagggttgtgctagagaaaagaagcctgtgttcaggcctcttccagccttctctccatcataaataccctattacttatatgagaaccaggccttgggttaaaccaatttacaaaccaccttatagaccaagatgtaaccaaactagaagctttttctttcttttttttttcttttgggagatggtttcgctcttgttgcccaggctggaatgcaatggcatgaactcagctcactgcaacctccgcctcccagattcaagcaattctcctgcctcagcctcccaagtagctgggattacaggcacgcaccaccacgcccagcttattttgtatttttagtagagacagggtttccccatgttggccaggctggtctcaaactcctgacctcaagtgatccacccgccttggcctcctaaagtgctgggattacaggcatgagccaccgtgcctggcctagaagctttttcaattaacaataatatttcaattgtggatgacatatggagaaattatgcttctttcttagaaactcatggtcactatcactccagcatgcccatgccatttaaagtcactgagatactcctaactgaaagaccccaactgaccaagttgatgggaaggaaacgagaacaaacatttgctgagccaagcattcaacactaggctgccatgtcctgggaagctagaaggctctcccaaggctgcagagccaaggcaggctcctaaaccttcccagagctccctccatgagaccacaaattatcatggagtcccccatcagagagtacccaaggcactctatgtacaccatttaatttagtcctcatgacaaacttataagagcaacattaatatcacaatttagataaactaaggctttaaaaggataaccagttacctggtcaagttgctactaagtggcaaaatttgacgttgaatccatttctattttcattctagaccaggctgcctcagccttgaagctgacaactgaatgttcacagtccctctcgtcatcttttctagtttgggataatatcctaaacttccaatagacagaatcaggccataatctggcatttcccccactgtttcagtctgttatttgtaggtctttaattcctctaattagtaataatacggcaggggccaagtttagtaaaaagtcaccttttggctatgatctgcacatacgtcttcaccagataatccgaaatgtttcttcctgtcaggtcctgaaggatatctgcagtgttttgttttctctgtcatcacatgaaaaccaagcatacgggtctttatagacaagaattgaaacagaaaacaaatcaaggacaacagtgaccatgtccacagtgtgaccggaaacctgactacaggtcccagacactgccctcagtcaaccagcactgagacttggttcaccctgccctcggcactggtaattcacttacaccaagccaaggtctttcccaagaatttattctgaacatctaaacaataaacattgaaatgagattctttgtagtcaagagatttttaggaagcaccatcattcactatgcctaataaatcttctgttcactggagttatactgatgactagattagctgttattttattcattttattttttgatatggagttttgctgtgttgctcaggctggagtacagtggcgcaattttggctccctgcgacctccacctcccaggttcaagcaattctcctgcttcagcctcccaagtaactgggattacaggcatgtgccaccatgcctggctaatttttgaatttttagtagagacagggtttcgccacattggccaagctggtttcgaactcctgaccttaggtgatcagtccacctcggcatcccaaaatactgagattacaggtgtgagccaccccgcacctggactagctattattttcaagagtggtaaccaagccttcttttagttcctgtactcatttagaattgcttgtcctcatcctgcaatttggttgctgataaaagcagcagagagctatcataagcactcctcttcctgaaattctcaagaaaaaaaaaatggctcaggactccttcccaaacagagtctctaagaataccagagttgacaagatccacaggagttttctggtccagcctccctaattcagaggtgaagaaacaggcccaggcctgtcaaaggctaccagctcatttgttgcagagccaagattggaagccaggcctgccacagtctgtcctgtgactttactgctgtgggacaggcatgggcacagtgtggtccaaaccttctcccctcaaaactcacatgctttttcttatgacaagaagcgagttaaagactgaaacagggctgggcgtagtggctcacgcctgtaatcccagcactttgggaggccgaggcgggtggatcacctgaggtcaggaattccagaccagcctagccaacacggcgaaaccctatctctactaaaaacacaaaaattagccagacatggtggtgcgtgcctgtaatcccagctactcaggaggctgaggcaggagaatcgcttgaacctgggaggtggaggttgcagtgaggcaagatcatgccacagcactccagcctgggcgacagagcaagactccgcctcagaaaaaaaaacaaaaaacaaaaaagactgaaacagaccctcccaacatgatatctcactcattcctgcttccaagcggaagctaccagcccatcctgcaccccttctgcccaatcaccccctgaaagtgactcacttgtggaggaggcagcccccctgcccctgggggacacacaggcagcatcttcttgattttgtcgctgctacactggcatgcaggtgaagggttctgcattgtccagttcccattctggaagaggtccatgatggtctggggaactggggcagtggtccactcttcctcccctgcctggcagggcgtgtctctgcaaagggaagacagcaagagtaggattaccagagatggcctggcctttctgttgcctcaggagcacaggatcattccgtaacaaccacaaacatgcatctattccctcaccatttggaaaagacaagcatgatctcatttgattgcttgatcccacaacagccttgtacactgtgacatcatttatatcatcattatgtatcattttatacataagtaaaatagaatgcaaagaggccctaaatatttacatactgaactcagttcaatccaatcaaccaaccatttgctcacacaacaaacattcgttgagcatctactacgtgccagatgctgtccagtatattcgagggcctaaggtgaaaatacctgccttcatggaggtgtatgcccatggaggagacgaacaacaaatacactaataagataaccttagatggcccaaaataaagcaaaataaaaagacagtgactggggagaatgaacctactaagagaagacatttcagccaaaacataacaatgatggagaacaagctgggcaaaagcttggcaaaaagaacattctgagcaaaagcgatggcaagtgcaggtacaaaggccctaggaagaaatgcatttctattttttaggaataataggaagacagcatggctggagtaggataagctacgaagaagagtaatgataaaggaggaggagaggagccagatgagagaggcctgggaaagagtctggatcttatgctcgatgtgctgaaaaatgagtagagactggcaagatccaatttatgttctcaaatgagtagagaattgggggatgactggggtgagaatgctcgtcacataaagagctacgctgtctacaaattttccctggagataagacacaaagccttcaacctcatctccagctctgaattactgtgggacatcagcaggtcccctgctcttttgggggcttattttttccactggcaaaataaaagtttaaaatgatttgattcaacaagtcatttccagttcccttccagtttcagaattccacaatttaaagtaaagttacagcaattatttccttattattaaatattaaatataattgccaggcacgatggctcatgcctgtaatcccagaactttgggaggcgaaggcgggtggatcactaagtcaggagttcaagaccatcctgtccaacatggtgaaactccatctctactaaaattagaaaaattagccagtgtggtggcacatgcttgtaatcccagctactcaggaggctgaggtaggagaatcacttgaacctgggaggcagaggtggcagtgagccaagattgagccactgcactccagcctgggcaacagagcgagactccatctcaaaaaaaaataaataaataaaatatatatatatacacacacacacacacacacacacacacacatatatatattataaatatatatttttaactatttcttattgttttcttatgtattaaaaattcaaatgaagttttccagattgatctctaattgtctccttaaagcacctgaactgaccagaaaagtcacactaagacgcgctgccctcctgaagcttacactctgaacattcaaaaggggattggctgagacaaatttaaatacagctgagacatgctcctgtcaaatttccttcaggtccaccatttttttgcaaaacctaaaaatttgaatttcagtaagaattgtaaggataaaggctcttccttccaaccacctccggcagactgtaggtggggctcagacatcatgtttgaaccctctgatgtcagggccgggcctcttttgtctctatgggctggctctcagcccagttctggctcctacagagccttcctaagctagcatcaatccatgagttcatatggttcagctggccagtgatgaatccagataactatattatcatctcatctcatgcttctatcttccctacacaaccttcatgtggaaaatcaaaggcaccatgaaatccagataggccgtgtctgtgtccttctctatccttgtcatctggttatttgggaaccaatattagctgctaggatttaccacccattatgtactaagtactaacaagtatttagtaactatccaatactaattaagaacaaacaagcacacagtagctatccatttagaaatctgctctagaaccttgtataaacaggttatcatgctcactgttctgtggtgtgcagagtcacctatcttcccattgaaacttgaaagtcaagtttgccccctctccaattctccagcaccttcccaccttgccataatttttcagagatcactgttgtttcatgacctcagctgagattctgcctaaacctggaaacactaacccacctctaccagccttgagcacggcctcataagatcctcacctctccaccatcttcactcacagtgatctggtgacctcccttcccctacactcacttaagggtcatatggatgcttcactgaatttatttatccactgcttactttttaaaagggggttttgaaggaaagtacaataaaaatatacaatttgagaagaagaaagtgtccctttttataaaaattcatatgccatcttttcagattataaaagcgaagaagctgataagcaaaacctaaaaatcatatataatgagagcctattgaagcacttaagtacaggggctgggagagaaagaaaggaaaagcatttcatcagtaagtgtaaagtgctatttaaattaaatattaaggttctaaatcagtaaacaaatgtctgtaatgacgtgctttgcacggtgttagaagactctccaaacgtttgttcctagataatttagttcggttactaccttcgctttttgtaaataaaacataataataattcaaagggcaaatgctggcggtcacaatgtggcatgcagttgataaatgcagcatattagaaatcaaaccaggcaacaagcacaagaagcctgcttatggctaaagtggcactcacgggattgggtttccttccatacagcgggtcccgaagccagggtctttggtgagggcgtttaagagttccagggttcccgtgtcctcaggagcatcattgctgtgggtacatgagaggcagccagcttagtaattcattaaaaccagtaatcgagagataaaaatgtttttataaattaaacattttaggaagcatttctctgtgacaggctcttaaaacagaaatgaacaaaacacagaaaccacccagaaggatctcagactctggccctgtattcggcatcagggtgacgtagagcactccaaagtggagcttgttttaaatgggctgtatgtataaaggtgtgtatgtgtacacacatgtacatacacatatacatttatatattttttttaatttgaagaaaatcaactcattaagtatttcaaaagtgctttcacaattatccctttggcacagacaagcaggattttccaagaaagggcaagaaaactttgtactctttgcatgcacaactagaaagcacaaaaataacaggcacaggtcacaaacacatgctatgttccacaactacgggcaatacagggtcagcagccggaaaggaaaaaataaagtaaacctgaactatgtaagaagaaaatgtgggcttagagaaaaagaggccaattcacattacatatatatatatatatatatatatatacttttttttttttaaatgcttcccttttgtatcactgacacagttcccccatctacaggtctacaaatctttcaggactgaagaaagctcctgctaacaagacccagaaaaatcctttgtccttttctttgatttaatgtattgttacagagtgggggatatttttatctaaagaacaaacactacctaacatcccaaatataacagaatagataataattacatgaattatactttgcagaaaacaagtctctggaggttctatgctttgacagtgtgccctgtgactcagttacagaattaaaacacagctccacaaatccaaatattttataacttaatcatggatttttgcaagggtggattatttcacctaaaacacatgtggctgttcctgacaacagtaggatgaagaggagagaggctgaaaggctcaacagaagactggcctattattcagggttagttcgctgctgttctatgcatgcagtattagcttatacagggacctgagccgcagcagtaaaattcattccaccgtgtaattctgaagtccattcccttggccctcgtaaacatctttggtctgctcgaatcttaccccctcctgggatgtagaagacaaacatacctgacaaatgtgtactgttcgttgtacatccagggctgaagttccaggctggggtacttgccaaagggtggcacgatcaggctgaacacaagggcaatgcagacaaacacagctggcaagacaatctttacccaggcagtggagggggcagggggacagcaggaaacggcaagtgttagaaacaaggccaaggggcaaatccctacgagtccagcccacctccccgaccaaccagcacggcaatgaggaatgcagggcctatgactgtgctgcaccaaggcattcttggcagctgggaagcaatggagcctgaaaactaaaccttttctctggcaacacaaggccagaggttatggccacctggcagaggcactaagccaagaagttcacgaagtaaatagtgctcacattcagggtgactcagaacactgggtcctgcccttcctcctcctgaagactgagaaagactacattgggccatgaacccaggaccaggagccagaagtcctgaatcctggttctgtctctagcacaagtgtacccatgtgaagtcacgctccccactggcctcagttttctcattttaatctgaggtctgagaacacatggcccattcaaatcctacactataataaaaccaactctacagcaacggctccaatcatggacaaccatagtcattatctcccatgatagtctcagaaagaataaatatccaattccttcttcaacctcctaagactttctaccatatcttctctgaaaaaaaaatgacttgggtatactttataagttaacccaaaactccttccatttattgctgagaaatgtattccttataaccttaaagattcaaataatgcccccaattctaatgttctgggatttcaatgcagaaaattaacattgagtgaataattctgtataacaactactataatgagaactatctctatgttgtcattatttatggttgtgttatcaatggtcatcatcaacaaacaaaggtaactgaggatcagagagactaagcagcttgcccaaggtcatatagccaataagtagcaaagtcaggattcaacttgagctctgtatgctccaaactcccgctcttaacaatatccacatcatcaaatgaaagactctctgcagaccttttctctatatttcttgattttatagagtgaaaaaatttaacctttctaactaagcaagttagcatgcaaacactgacatgcagacaatagtctaacaagtcttctctgttggccaactatattctgacctatcttttctatcagtttgagttaaacatcaactcagagaaaaatcatgtttctaataaattcacatgtcaagtgcatctgggcataacaactctcatgttatgacagctgaatacacccaaccagtttttctacactttgtcctttttatgttctcctccaaaataaaaataacatatacacacacaaaactaagcacttactaatgtcaggccccattctaagcacctattcatttttattttcgtaacaaccctgtattgcaggtaatattattatccccattttacagatgaggagattgaggcatagagaagtaacttgccagcggatacacaactggcaaggaatagaactgggattgaaatacagataaatctggctccggcatccatatcttgaccaggatgctatcctgccttcactggtcacagagcctgcagcccacccatgaagccagagtctctggcgaaaacagcacgtctcacctgagcaaaaaatcctttccgactccgtctggcaattagcagtctcttccacaaaagggccacaaactgttgctgtgtaagtttccagcctttcacctggtaggaccctttgccatccatcccactgagcaagtctgtctctctggattctgcaagaagccaacactgaaggtcacctattatcttaggtgttttcggcattgccatgctccttcttctggtgtcttcaacaactatcttgaaggcatgtgtctgaagctagaagtttctcagaagtaaagggctttcatgacaaagctatgtccaaggaaaagcttgactcaaaatgtctaacagtagcagtctctgcctttcagtccttgtctgataagtacagaaaagaaaggtgtcttgagacaactgaaaagaggtgttcatgcgtaaccaggtgttacagccagccattcggatgaatcaagtcatcaatttcttatagactactctatgaaacaggccatgtacgtagcttgacatatttgagaatacacaatggcaattagcatctcagcttctcaccctattatattttggtaaaacgtggacacatttcaaatgatctaagtactgatactgtatgaagtcaggcagttatatataatgtaagagccatacactctttgagcaggggtgagagaactggaaagttttctgttcctaaaaattttctagaaatccttgtcctaaactaatgatacctaactgatgtgcttttacatcttaacaatatttgtttgatgtcttagctctcctctccatctcagttaaacacacaaagacacactcatccaaaatatctaattctttttttttcttttttgagatggagttttcactcttgttgcccagtctggagtgcaatggcgcaaccgtggctgactgcaacctctgcctcctgggttcaagcgattctcctgcctcagcctcccaagtagctgggatgacaggcatgtgccaccacactcggctaattttttgtatttagtagagacggggtttcaccttgttggtcagactggtctcaaactcctgacctcaggtgatctacccacctcagcctctcaaagcgctgggattactggcatgagccaccatgcccagcctcaaatatctaagtcttagggtacaattaactctaacagcaaattcccctttctgactctttcaaaatcactcatctactcgaatgaatatttgttcaacaattaaacacctaatgtatacaagaaactaggaccccgcagaaaagataataaatacatgggttcagaggattgaggcaccatctttatgtctttaaaggaagtgatatggataggctctttcaggtttgatcacatgcacgatgctgcaaagaacaagtggcttttaccatttcctcacttctctttggactctgtagggatctatcaccttggctaaaggccatccaaagaaaacaggtgagagcatgagagagaatttcacattcaaacagtaggacactgtttgatcttgccctaacagacctgggtctatgtcagaatcatttggatcagcagcatcatcttcagtgaacgggcgaagacagctctgcttgtccccgaaggcccgcctgtttcgtcttgctggcaaggtaccatctgaaggcacaaggaaagaatcccatactttattttatttacaacaaaacaaaccttccccatctgcaacaaacctacactctacaaatgagaatgcaatagaacaattcaaagggaaaggaacaatactcgtgcactgagaaagccagcagaaggcactatcttaagtgtgccattctccctcaaggcagttacctgaggtctcagcatccaccccactctcttcggccaccttgaggaatatctggaaaatgagagagatgagaacattataagcaccaacattacgagagtagtcaccactgccacgattattatattactgagtggcatgttagccccgtaagacagagaaagtagaagccacatttcttaataacactttctcagagttacctgggagagaagccgtttttgccagagaacatttcctcagtggtgagagctatcaagctagacaatcattttcaaattaaagttatggctgagcgctgtggctcaggcctataatcccagcactttgggaggccgaggcgggcagatcacctgaggtctggagctcgagaccagcctgaccaacatggataaaacccatctctactaaaaatacaaaattagctgggcgtggtagcacatgcttgtaatctcagctacttgggaggctgaggcaggagaatcgcttgaacctgggaggtggaggttgcagtgagccaaaatcgcaccactgcactccagcttgggcaataagagcaaaactccagtctcatcaaaaataaaaaaaaatttaaaaaaagctatgacagacactgcgcagaagaaatttattctgaacctacagggaatgagtcaagtggcttctttcaggactgtggctctaaatctttgagtaggctagtactatgataagttatccaagacagaatgagcaggaggaaatagagcactagaaatatgatggcagcaattcaaacatcagaagagaatctgaatgagcgcaatcatttccaaactctagtctatagaccactgtgtccaaagtatgcaatagaaatacagacttcaaggcctcacctccagaaattctgattcacaggccctgaagccaaaccttagtatgtttatttttaataatatccccaggtgattctgctgcactgtcaagcttggagaccacttggccagacagcttttatatccccttcagccttcaaggtctgtgatgttgtatctctaaggggaggcattacatggataaagagaggatggactttgaagccccaaacccctgattctgaatctcatgtcagcattcctgagtgttcattttttcatctttttttgagaattaaatgaggtcacagtgattaaaaaaaaatcaaaaaacaaaaaacaaatctcagcacctggcacaagtagactatccatccataaacgtttgtcatttcctatgtatgagaatccagttgatacctggctgtgacacagtcacaccagagaattgctcctgattctgattcagtaggtctgagctgggcccaagttgctgaatttctaacaagttcccaagtgatcctgatgccgctgttcctcacactgtacttaagtaaagaggctcattaaagggtaaataagtgcataggagtttaaggttgggatgtaaatgtgttaggtaccactggtttcaacacacaaatctcaggcatgtactgtggtacagaggaaaacacttctttcctgctatctcccactaccatcttaaatggctcactggggccaacattaatcagatgtcgatgacctaaaaactcaatgactaactccatgataatcctgctcccaatgcaggctactggtctggccttaggacatttggccttgctatatattccgacagtcagccacttaacttacttcttccagggtcgtctctgagatgccataactagaaatgcccaggtctgagagccggtcatcaatctcatgaaagagttccacaaaggctccctccttagcagcttcatatggcagcacataggtcagctcatgccctatgtcttccaccagccgggcttcagacacatgcttcctgatgaggttggagatagcagagacatctgcagggaccagaatgcaaagatggctcaatcaactcagaggggcttcggagtgagggctggccatcccccaccctctcatcagaggcctgccgctcatacaccacacctgttccaggtgtttaggtcattccacatgttcatctctggtctgagggttgggggcaaaggaaaggactatgtcttattcacctttgtatcaccaaagccaggcacattataggtactcagtgtagaatgggtggacagctggatgggtggatgggtgaatgggaggatgggaggatggaaggatgggtgggtgggtgggtggatgggtgaatggataactgaggctcaaagtctggtgtctattgcctaagctctgggattcttcaaaagaaaacttgagtaaaggaatcttaaaagattcttcaccctttcctatgcttataaagtaggttccctcatttacctaaataaagggttaatctaacagtccatggaagcagaagccttcctgggaaaagccagccattaggactaggcagagatagcaagggtcaagacttctgttccacatatgctactggtgacactggcctcctacacacgctacccaagaaaaatctggaaggctgttcctcatctcctgggctctcactcttcttatgtactaagctcaaatcccaccctcctggcttggccctcagctcctcatccctggtattcagtgtccactcccctaagggattccccaaaccccaatcatctcagctctctgggacactgccctgctagctcccaaaccgagccccaggcaccccagcaagcattaggccaacccgccaccaagctgctcccacacccgcagccacccagccccagcccagcagcaaaccttgagtcagcgccaccagcctctgcacctctcctcctctgcctccactctgcccagctgggggaagctcaggcaccacctgaataagaaaccccagagtccttaccgatggtcagcgtgtcactctcatggtcgctgcccaggccagcatcagaactgctctgagaaacactgtcctcctgatggcaaagaaggaggtgagaacgggtcagggacggagcaaggcagagccaccagcaccttcgccggggagggcttccaagaagctctgttgtgtgagaactaaaggaaaaagctttccctgggacacatgcactggcagccgtggcttcagaggaccctgtctggcatgtgtgtgccgtgtgaacagcctcgcttcctgagggtgaaaggtcaggaagcagagctgccaaaagaactgtggcctgccaatgaatgctgcaatgaggcctttgccaaccatctcaggcaaggcctttacctggctacatgtctagttcaatgcttctcatgctttaatgtgtgttcaaccactcaagaaccttgttaaaatgcacagattctgattcggtaggtctgagctgggcccaggttgctgaatttctaacaagttcccaagtgatcctgatgctgctggtcctcagactgcacttgagttaagaggctcattaaaaggtaaataagtggataggagtttcaggttgggatgtaaatacattaggtaccactggcttcaacacacaaataaatctcaggcatgtactgcggtacagaggaaaacatacctggtaattgggtctggtcccaccactgttatttacctgctgggtgaccttgaatcagctaccaattccctacaagcctcacttccctcatctgggataataaatatagttaccttcttcccagggtctctctgcactttaattgagatgatagaggttaaaaaaaaaaaaaaggttgtaaatggtaacaacgctatataaaattaactattatcattactttctttcatgcccagagtgtctctggcatgaaatcagtgcctaataaatattggctgttttatagtttaaaagttaaggtcaatgagattgaaaagtaatgagcaggaacaccaggtcatttgtagccaaggctcttacctcttgacaagtctcttttctttgacataataatgtcctctaaggaccttctccatcactctctgtgcctcataggaaaaggaaaacgggattcaacagaactagcacaatgggagcagagggccccttagctttccatgccttaagtatgatatgatttcaaaggggcaacagagcagggagatggtggtttcaacatggcaaaaggggtggagatggagaaatcattcacagccagcaagtcctggctgcccagacccaacaccagcccagcaccaagactgcagctcacctttttcaggtatgacacagtgctactactgtttctgcaggaactgagggaggattccacatctttcttgaccaaggtcaggtagtagcctgttcccagctggttcttcagaaacagggaggagcccacacagcacagcttcccatgggagatgatggcaatcctgtcccccaggacgtccgcttcatccatgtggtgtgtagagagaataatggtgcggcctgccaggcacaaacacaaggatgtgggacaggtgaggcctctcagttctgatttgtcacagtgacagggactagagagatattagcaggggtaagcactggaagagacctggaagccacctttcaccctgtatggctatgacccctagaatggcaaagctttgtatatataggtaccacatcctcacagaggtaagaacagtagcattttatttgggaacttgctatatgccaggcattgtgctaggtggtttgtgtgcattctcatttaatttaatcctctatgaggtaagcaccactattattatcggcaaagaaggtgaggcaagttgtgactttcccaatgtctcagggccagccagagttggctccaagcctgcctgtgctcctcatactgtaccacatcagatctctaaccagagagcccaatcgtcttcctgcccctctccgcttccattcatttaagcatccaccctttcaactaaccataaatttagtgcaccatgttggggacaaaaagatgaataaagacacagcatctcctctcaggaatctcagtctcaatgccctttatctcttctgtgataacagaagagtatcccatggcttcacagaagcctagccatgagatacagccacacttctcaaaagccccccgctctctctcagtccatttactcagaataaatacacatcaggcaccttgtcggtatttcagcagcagctcccatattcccctgcgggagtaagggtccacaccagctgtgggttcatccagaatgacaaccttagatcccccgacaaaggccaaggccacagatagctttctctgcattccacctacaaaaaaacagagcaagacaaactccaggaccagccccagacagtgagtgaaggcagaggacctaggggcacagccagggacaagtttctgttaccaaccgcacccagcctgggaccctggggcagtgctgattttcctccgcatgtgtgtagccggaggaggaggggagagggatagggaaggtagctctgggccgcacctgacagctggcttgttttgcttttcagcttgcttgatggcaaaccaacatccagggccatctgctccatctccgccttcacgtgcttctcagagagccctttcaagcgggcatagaaccagatgtgttcttcgacagtcagcctggggacagggaggcaggtcagctctgggccctactggataccccagaatacagtgtcccctggcccagaacagatgagaatgggcatatttttctctccccgtgctttttaaaataactttatcaatttctgaaaaataatcttcaagattcaaggtagaacaacagtgagcaaccacatgagctgctcaggaaatcaaagtgaaaggtgacagatcgcttccaacctgtttccagcaggcctggccaccatgcaccaggcagttacaactttcaatttcagggccccaagatgtggtctttaatgggctgtccccacagcacgtccaccaagaagtcagctcggcactcacctggagcagccttcctgagcctcaggggacctcaggctctgaaagcggggaggaccctgcacatgagccccatgtgttcactttagatgaggagggagcacatgagccccagctgttcactttagataagaagaaacataagggaaaagccttgcccaagattgcagagctcaggtctctctctgctccatcacacgggctccctgggggccttatggctgatgggacaacctgagtgggagcaaatgtcttaagcagcaaatataggtccatcataccagggccctgaagcactaccaggtctgggaagtctgctccaggcctcaataaggagggtggcgggggagaggatgggctaaagggccctccagcatgacaataatgggaagcaatgtttcccaagcccccatccactggctgggctgatgtcacctctacagctcaaccattcacctcccacttctcctaaaatcaaagaacaactaggtctcaaggtgttcacggaggtgagcctgccatattcaaagaaagtaaaatgtggccagacacagtggctcatgcctgtgttcccagcactttgggagaccgaggtgggcggatcacgaggtcaagacattgagaccatcctggccaacatggtgaaaccccgtctctactaaaaacacaaaaattagctgggcatggtggtgtgtgcctagagtcccagctactcgggaggctgaggcaggagaatcgcttgaacctgggaggccaaggttgcagtgagccgagatcgcgccactacagtccagcctggctacagagcgagactccatctcaaaaaaataaaaaagaaaaaaagaaaaaacaaaaacacagcaaagtaaaatgcttaagtcccactcctcccatgatggcatgacacacacacatccagaaaaggcctattcttaacgtgctgctggtactcacatgtcaaacagcacgttatgctggggacagacccccaggttctgccggatggtgctcatctcagagcgaatgtcttttcccaggatgtaggcggtgcccgaggtcggggggaacaacccggtcaggattgacctgaggacaaaaatttagaagtacagaagtcagggttgacctacccttaactctagatgctccattcagtctgcagagagaacagaacaccaaccctcccaccgcccccattcctttctaatgaaccctaccagacccacacaaagcaaagctgtccttttgcttcggtaaataactacaagtgggcctatgggttagaaatgccaattttagtatgagcattttttaaacgaagtttccaatctgcaatgaaagtattctttaaaaaatgtattttgtatgcctaacatcgcatgcatggaaaatggacaaacaagaacatattattcaaagataaaaacaatttttgtgttaggtagtaggatttctgactgccttttaaaaatcttctgaaaagctcataatatattaattctatgttttaaaaaaagattaaaaagaaaacaggaaaagaatgtcaccccccaaagatataccctttggaatggttagaatggttgaggaatcgtgctggaagccactgaggctaacgctggtgctttacagcccctgacccctcctgatactacccactgtaaggtccttgaggtcgcagggaaggcaatcaagccagctgcccagcttgattgcgtctcacaggtgcttctcacatctgcttagagacagagttcctgggaattaccaactccctccaacatatgtaatctatcttttcgtggctgcaggttccaagaccactgcagaattctgtgaactacatgggaaaggtcatctgaggccccagcttgttttaggctgaagaaataacatctagcaaactagcacgtggaaagacactcatgattagataacatgttcacattcggcaactcctcatgtgctccttcccttggcccagggatcagcatggtttcctaaggtataaatttctaactctactgcagaaccctcctgtggctgattctgcgggaaccacaccctcttcttacatggtggtcgtcttccccgctccattgtggcccaggaaggaggtgatctggccctcataaaaattcagtgccaggccatcgacagccaccttcatcccatctcggtagacttttaccaggttctgaatggacacgcccagcttcaagtgggtgggttcctcctccatgcagactgtgacaggagagaagacagaaatgaacccacagaaagcactgaggagtggagtgtaaggacacagggcactgcgcttgaactttcagaagtgccttctctccatgtccaccctggtttctcaggcaggcaggaggctataaatgtttatttagggcctatttgggtactgatgttggtgatgggaatacgatgataaaggagcattcagagtctattgggaaaaaggacttgatgaacaattaaaatagaggatgctgaaagctgtttaaaaaatacatctaaaaatgccatggaactgtgatacacccctcccagggaacactactcagcagtgaagaggaatgaactgttgacacacacaacttggatagatctaagggaatactgctgagtgaaaaaaaaaaaaagccagtatcaaaaggatacctactgtatggttccatttatgtaacattctagaaataataaaactgtaaaaacgaggaacgcattagtggttgacaggtgtcaggaactgaggaagaagggaggtggctgtggccattaaggggtagcatgaaggagctttgtgacaatgagatatttctgcagcttgactgagctagtaattacatgaattcacacatgataaaattgcatagaactaaatacgcacacacacacacaaatgagcgcacataaagctagtgaaatctgaagaaggtttgtgaattgtacctatgtcaatttcatggttttgatactattctacagttacacatgctgctaccattggggaaactggatgaaaggtttaagggaaccccctcatgtaatttgtattacttcttgtgagtctgtaattgttttaaaataaaaagattttctttcacgtgccatggaagttcagggcagagagtgactgactacctgagaaccaaggagggatgctcaggggaggggatccggaactagatcttggagagaaaggaggagttgagaagataggcaagttagagagaaagttctcctgtgagagcaaacagtacctacaaaggcatggaggtgtggaagaacatgacatattccagcgactgtgagcatttctaggtgactgaaacaggagctaggtgtaaagaggaggtaggagaagatgattaggaacagcaggcaagcgtgctacactaaggggcatcatacttttaccaagggcaatcaggggatgggcacagaagagactggcagaaaagggacctattaaatatttaggaagccactctaagcacaaagaacccagaaggcagagcctttgatgagctgtggacatctctgtctgcagttaagagccaagagaggattagggatctgggtaatgattacattatgaagcataggctgagctctgtggtagccacttggtctcagcccacacaggctgatacacaggtcaccatgtcacaggcaggcagcgaggctatggttccacaatcacgcttgtctttacctctttcttctagcttgttaggagaccatgaaatgtgtgtttgggagggggcaagtaaaagatactcttctagaagccaagacaacaaagaaaatgtccctcagggatcgagaccgtgaactcccaataggtcaacagcattggacataaatggcatgggaggatttggaaagggacactgcatgtgatttctctgcccctggagtggtttcacagtcttttagaaaggcaggagacatcgcttgcccccaacagttagcagaggcagcagcactaggttaaagaaagagcaggaggtcaacagcacttactttctgatattctcttctggttggaaccagggtggctcttctcatcactttcctcgccaaaccagtaggacttggtgcaaggaaaataccagggcctgggaattccgtactggcctgaaagcaaagcacaggtatgagccaagctcagcatcatcccagtattctgagggtttcccagccaggtccatttcctccttgacacatcctttggagaaggaacagatttgaatggatgtggggaaagagggagctaacatttgctgaaacctgctatgtacaacgtacattctgcacctctgtaagtccttccaacaacccacggggcaggtgccatccccattttagagatgaggaaactgagggataaggagcctatccaaggtccctcagccagtaagttaagactcagaatttaaatccagaatctgcatgctgcaaaattgcatattcaatgaaagaagttcaggcaggagtaataaatatttcatgtatacctccttaggggaggatcagaaggtgaaccaaaaagggttaaatcttgctctctcagaatttgatctcatatgaaaactgtccaacgcaggttcctcttggacttggtcaagaagatgtattatattaagaaagaagtactaaagaaaaattcaacatgaatttttattgaatgctaattaaatcacaggcaggccttagagctagtatatttaattattaacaacctgtactcaggaaacagaacctctcctagttgtaccccctctgaggacacagaaatacagaattgggtgagcattgggaggattcgcctgggcttattgacccagtgtaaccgaagtggattcacctccacgtaccaacatttaacagttgtgtgaccaaagctggttacttaacgtctttgagtcacagttctctcatttgaaaattgctggttattatagtaactacttcagagtagccttgtgagaattaaatgaagcaatgtgtataaaacattttgcatgctgcctggcacacagttttcaagaaacaagtgctgtacaagtagtgacaattgtactttcagcatcagctgcctgtccttggactatctgtttactatagatctatagcccaaaccacttcccagggaagcccatgcactgcagagattctagcacaaagaaaggacatcagctagaagtcatattttccaaacagatgcccaaagcagtgtacctggaaagacagcctcaatgtaccaggtcatcaccccatagaggaaggtgtcaaacagcatcatggagaccgaagtggtgagattgaagccatcttcctccacaggactctcaaacaggttgtcccactgcactccaatgccctgctcctcaaaaagggcaaagtactcacagccaaacccaaaagccacaggagacagcaggctctgtgagaaacaggcaaagtcacctatccatttcctggtcagtctcatttttctatctcttctagtgtaaattatacctggagaaatttgaatttgcaaaatggatcaatcataaggtgcagaagtagtatttacctatagagtccctttaggggagtggtgggctaccaagtaacatataaaatgattccatttgtaaccactcattatatacaaacatttcagaaatgcatatacagtgaagcataaaacttttaaaactttatgtttccaaagatgccccaaggctcagcaatcctgttcccccacacacatgcgcatacccacagtcttctgaggctccctgctcagccaaggatggctcaggatcagaggtgcctgtttggggctgctgatgcctatgaagcccagactgaggcaacaggagcatcctatgagtcactcttagctttcctgataagtgacctggggacatctgacaacttgcacttgtaggggctcacacactctccaagatatccccctgctctgtacgagggaaggaagtgtccaagtcaggaatttgtgggatgaggcacctgctcctcagttgtgcttagttcagaaaacattactcaagcaaaacaccatactggacacaaggaagacaagagaggtcatctctgacatcaagagttttcagttctatttgtggccttggctttgtcatgagcttaacatagccaacagagctgggagataaagggcagagatggcatctgttgcctgaagccattcctcaatgccatttatccccagcccagttcaagatgcagtctggctctcggaaaaattccattcaattcaattcaaccaggattcactgagaagactaaaggtaaacaatttaataaaacacaatgcttgcccttacccttaaagagcttagaatctagagctaaggttcatgtcccattggaaaagacaatcatcttctgttctcaacttgctgcttttattcagggactccaaaggaaggtcaaatgcctacagccactgaagaaaggccagaggtactcacagcgaagatcttgagtgtgaagcccacgtagtcctgccatgccacacacaggacgtagggcaggtacagcgtgaagtagatgatgcccccacaggctgctgccaggttggctctggagaagagtgtgctaatcaggaagcactgcaggattgtcaccacagcaaacacggacaggaagacaaacaccacgctgggatcactgtagggcagcaggtttcctaactgggaaggaagagacacatcaaatgtgctgcctcaacaatcccaagcactcacttgtatgatctacagaaaaaagacagggtttattcctactcatgttagagacaatgcagaggcgtaatgctgttcatctttctgatgaggcaactgatcattaccatcctaaagaagataagtgacttacccaaaactacgcagaaaaataatggcagagttatgaatacaacagagtccagggctttctacgcatttcagtgggcgagtttgctctttgtttcttcaataggtaatttcaactggtttctccttatataaggactatgactggtggcaccacagaagagctgtgggagataatatcccacgtaacttttctgtctaaaagccaaggaaaatggccaggcaacttgactttccctcttgatcaccatggattctgcattcccacaatcatccaaactcttgtggatattttgagcctatctccggctgatgggtacatgtctgcaggacccaccagcatgcagttgtctcagagcagctcttatgcaccaaccatgggaccactacctctgccactgaccttccccttgcagttagataacagagcatgagggaggggttgcttttagcaagaactgtatcctactgtggaacctcaataaagtccttgaccttcctgagcctcatttccttgtctgttaaaagggttagtgaggatagaagaagaagcccatgtgatgtgtttaaacagtccttggcaatcagtaggaactatttgtaacagatggtaactagtattaaattagttagttcttatctctttgtactccttttgcttcaaaaacatttatttttacctgatgtgtctttatatgaaatgcttgcagagaaagaaaattcggatataaatatattaatgtatggttcagacacaaaactgcactgcccagagtccccattcagggaagccttgttgcccagctgtcagtagacggcctcaggcatcagcaactctgggtttgtcacagcagcagagagccatgtaggccctggggcacgaccttcccagggcagcccacatccagtgattgattgagagggctgaggtaggtggtgtcaggagggaggccttgggggagcacaaagggctggatgtttcagctcgatgaagaacaactccaacaagctgcatattctctagagtgccccacggggttggccctatatcacagttcaactcctccctctgcccaatcctgcatcttccatatctcttccataggtattgagccctcataaatacccatacatcaaactctatttcagcctctgcttccagacagtctaacctgcaacaatatatatccttctgattattgttcttagaaacttaggaagaatcgccacccaatatatctaagaaaataaatagctttcagatgctgccatgaaccactaccaatgagacagcatggcacagttgagcatgtggttatctggaaagcatgaaccctgcactctcatcctacttagctgctacccggctgggttgaccttgggcaagtcactgcccctctctgggcctcactttccccaactataaatggatgaaattgcaggaaatgacaggtatgaccccttctctaccagaggcttggattttttttcttcttctcctcccttagcccgtgttgagctatttcggagtttcctggcagggaagagcgagtgaggctgccttaccttcaggatgaccactagcaggccagcgctcacaagaagaggaatgaggctactaatgaaccagctaaaccagaggatgctgttgtccaggcccatgatccgcatggtctctttcagccgtgcctccttctcatacacgatgcccttgatgatcacagccactgagtaaatccaggccagcgtcatgaagaggggcattgaccggctcatcacccgcagaaagctggaggccccaaggaaggacaaggggagaaagaaagacacacgtgagccagggtgatgggccaaggcctctgagcctgcatgctagagggagcaccacatctgggccacagaaggacaggccctctagactctgaaatgtacgtatgatccaatgcttcacgagcaatgcaatgtagagagaaaaacgaggctaacaaagtgttgccaaaccaaatttctttgggggcttgcttcagtaactaggtaactgtgagcgatacttaaactaaaggtagattatgttaaagtactaaaaaccaaaacaaaaaaacaactcattctctcacaaaagttcaacatctccaaggtcatctcactattgacttgcttatcgtaactctaatcacaccacagacatacatttcaggcagctcttgtcaatgtttcagattccaagctagaatagaaaatgcagatgtgcaaagtaaaaaggcacacagattttggaccctgaacttgaggttcacgtcaaagctttaccatgtaggcacatactcactacatgacaacaggcaccagctcttaatgcctctgaactcctgtgccctgtcttaagacatcctttctagagtaaaccttagcttaggggtctttgtaaaagtcttcctttgaaaaattccagctaattgtttagaaggtgaaaaacaggataatttctggtgaccttgaaaagctatagatagccatacaaggaaacacactattcaatgcaaaacagagaaccaatacaagcagaacccagctcctcccgcatcctgatccctacacacacacacacacacacacacacacacacacacacatcccaccaccaccaccaaccacagagaataagagaatttccagaatctggaagaaacattacatatttcagatgtctgcaataactacacctccgcccattgtcttagaagaaatcattacatccaaaggcatagttcccacaatgagaacttggcagcttagtgactcagcactgaaagattttctaaaaagtctaagaggaagaagctttgttcagttttatttgggttgttttgaaatgtggtttaccacctagggagaagaagtgcacacatttacataaactgtgcttttataagtttagacgctgtttctgcatctatgtgtgagtatgtgcttgcatgtgtttgtcatgacacattttaagcttgcagattgagcaaattttgaccaaaagggtagagtgtaaaaaattaaagtggtgggctgggtgcagtggctcacacctgtaatcccagcactttgggaggccaaggagggtggattgcctgagctcaggagttgaagtctagcctgggtaacatggtgaaacctcgtctctactaaaatacaaaaagtcagccgggcgtggcagcatgagcctgtagtcccagctactgtggaggctgaggcaggagaatagcttgaacccgggaggcaaaggttgcagtgagccgagatcgagccactgcactccagcctgggcgtcagagcgagactccatctcaaaaaaaaaaataaaaataaaaagataaaagtggcaaccatggatgagaaggaaagaggtttactagtgtgtgcacatatatctatgtctgtcatgtggctgcaactgttgacaacttacatctggcatcttatttccagatcattcacacatgcatgcacatgcacacacatatatacacccccatctggcacagtataaactggttaaaaacagtggcttgcaggtaacttacatgtcatcaacgtaacagggatagggcatctgttgcatatagacaccagttttcttctcggtgcccgtcagcaccctgatgattgcctgctccaccacatcctgcaagtaggcgaagcccccccagacgtaccgcatgtcctcaaaggggtcagctcgaggaccagggtcccagtacctaaaaccaaaccacaggtaatcaaccattcctttagaaccatacaataaaaaaaaaaaaaaaaaaaaattgcccaaaaccctactacccttaccaagcccctttttctatttttgtatctttttttttttttgagatggagtttcactcttattgcccaggcgggagtgcaatgatgcgatcttagctcactgcaacctctgcctcctgggttcaagcaattctcctgcctcagcctcccgagtagctgggattacaggtgcctgccaccaaaattcctggaattaattcccttgagtagaaatgctaaatcaaaagatactgttattttatgacctatgaaaaaccttccagcaagtcatgtaccaatttcaccaaaatcatgacaccaagttgagtttttttgttgttgttgaaatttctaccaaatttttagttaaaataaagtacctcttgtcctaatataataggtgctctggacctccccaagaccaggctggtgtgatgggattccacttacccatccttgattttatttgtcctctccacattgtcaatgtccattcggatcttgtacttgacatgatggggcagctcaatgctgcctggagtaattccagtgaacacaataccagcccagaacttcctctcatccagcagctccatggacttgttgatgagccagacttctgttgctatgggttctagcttgttcaggttgacacactgatagaagaacagccttcatgagaacgttggcagccaggacaacaagcagtggctgagacaaatcctacactaggaggcaagggctgactacacgattgctcatcctctctctctaatcctctctaacgtagttttccaaccttcaaccaagaatgaaggattttggtttttcactgcaatttaagagaaattctaagagtaatttagggatatgttatttattgattttgtggaggaaaagaggttaaaacaatgatcttatcttacttttctgttttcttagcaattctgagtcatagcaactaaccaaccaaccagaccaaaacacctcttacccatccctactaatataatttttaatataaaatttcaaaaatttaattggacccgaattcgattttagataagtttcacaaataatgcctttttaagggaatgctttgctaccattagtcactgagataggaaaacctagaagaaaatgggtagaaatattctcttgagcctatatagaataagctagagttaatttactaaagctagagtttatttactcattcaaccactcaactaacatttattaagtgccttttgttatcaaatcctgtgttaggcttgagggatagttttgtaaatgagactatacattatttctaaacttgcctcctgcctgaaccttattgtaacgtctcagagaaagaagccgttaagtcttttctaaatgatcccagcaacagattcacctccatgaagcgagatatggtccggattgcctggttagtctcgttgaaagcttctctccaggtgtacacagaaccattactggactggacatcctctgggtgcttggccaaaaacgccacgatgtcttgggctgtccaatctaagccatccaactgctgttcccaaaagtggtcattgtccctgctgtccaacagcatctgccattccagtgagaaagtacaagtagtaaacaccaactaaatcttgaggagcactacaaaatttacaaaatacttgcatatacactgtcgttgttttatcctcacagaaaactgaggtaaatgacagtgtccctattttatatgtgagaagactgaggctgaagaaaaaaaaacatgattttaaccagggcttggtcatagtattactagatgtggagctgagactcaaagtcagaccagtctgaattcagagtccatgtgctttccactatacgaaacatctcacttaatggtattaactacagtaacaacaacaatacttcctttatatagttactatgttgaatagtgtatatgcttcaccttacacaactccataaagagggcacttttatttttttgccttttgttgttgttgtcgtttggattcagtgtctcgctctgccgcccgggctggagtgcagtgatggaatcacagctcaccgcagccttgacctcccaagcccaagtgatcctcccatctcagcctaccaagtagctaagactacaggtgcacaccaccacacctggctaatttttaattttttcatagagacagagtcttgccatgttgcctgggctggtcttgaacacctgggctcaagtgatcctcccacctcaacctccccaagtgctgggattacaggcacaagccaccagcccagtgagtatcctttaatatttcccattttatacatgagaaaatggaagttcagagaggttaagtctctaagattgggtcacacagctattaagtagcaaagccagaatgaaagcataggccctctgtttctagtgcacctccccctccccactgtgttctatcaccttcctcttttgagacccagtctgttgatcccacataaaacctaattccttcttactgcttagtttagaaaaataatgctgctggttaaaccaactaaagtacaatcttttccaattgcaggatgtacaggtcatgatgcaaaggaggcctatttccatttcttgttcccttgccagttggttcctcacatgggtcaacacgaaagagaaggacagatcaatccgctgctcaatcagcagatccagaggggccgaggcagaggcctgcacagatgtgctgccggaaaaacagcagctgcaaactcagcaaaaaggagaggcatttgcaactcctgtcacagcttcgacagagaagatgaagctctggttctaccgaattggagtctccaagggtctgaaaactgctgctttataaaaaaatcagtcttagtttcactaacattataagcttttccccccttgcgcctttgtatttattatttcaatggcagcataatgattgtatagagtatatgtaatttcattaattattcctatagtgctgaacatttagtctatttccaatttctcacaataacaatatagcaataacattttctctcatatggtgacttctttaaaattatttcagtaggctacatccctgggggtgggtggaatggaggtacgcaggatagcatattttaaaatggttctttaaattttcattccaaattgctttccaatagagaatagcaatttataccatcaccaggaaggtatgtatgtatttttgttaacataacagacacaaaattgtacctcacaagttcacagaggctagggttagcaattctgaagccactttatttggaacaaacaaaagcagagtgaagagacgcagcctttagggtgaagtcggccctgcccagtatggtttctgaacaacatggccaaaaagaatagcaagactagaaagatgcgcccactgagatcactgagcacgtggcctctctggggtgctcgtgaggggcaggagacctaagactgcccgcaggggtggaggcagagagaaaacaggtcccgaggatgggtggctaaaagcagctcagaaaagagagcaaatcagtgtcagagggttccaagacttgcccgagagaggtgccctgggacctgtggggtgaggcaacatgggtagacagtgccagagaaagcagaaagatcagagctaccccagcagaagcagaagcctcagccatcacctcgtgtaggagatgccaggctacagggggtgacaagctcatgtttgtggaattaaataaacactctttaagagagggaagaaaggccgggcgcggtggctcatgcctgtaatcccaacactttgggaggctgaggcaggtggatcacttgaggtcaggagttcattccagcccgaccaacatggtgaaatcccatctccactgaaaatacaaaaattagccgggcacagtgatatgtgcctgtaatcccagctactctggaggctgagacaggagaattgcttgaacccaggaggcggaggctgtggtgagccaagatcatgccactgcatttcagcctgggtgacagagcaagactctgtccaaaaaaaaaaaaaaagagaaagagagggaagaagcaaagaaaacagttggaagaggttcccttttcttccacccacaggctgatgactccctcatcatctgtctccagcccaaccaccctcctccactgcagacctcagtagccactggcctactggacatcgctaccacccacccagctagaaatcgagactcactttgatgcctccctctctttcactgctctgccactaagcagtcaccaggcctcatttcttgctttatgccttggccacttggagagcctcctccctggtctctgccttcattcttgcctcatccttcttcaattcatccaccccatcagagtaacgtatctacatctccccttgcctggtcccctagagcttaaagtaaaggtcctcagcttgacacacaagtccctccaaggcatgcccatgcctttctctccagccccagatccctcatttccaagcatacacactggattttcccagctagattcctaatgaatgccattgccatgtttacaaggatcttgtcctttaagaactgggagcttatgaagaattgaagcacctaaggcaaagtcaatttcagactagggaaccatctacttgcccacaaatcaaaattcactgagtcacttcacagggcctcctataatcctctgagagccagacaaacagaaaaagtccaactagtagaaatatggattccaaggagaggaccaggaagaacaggtctgaaaccacacttaggtctacggggctagatcatataaccctcctttagagaagagaccccactttaatggcatgagctatattagtcagtgtgaatccatacaaatcactgtttatgcttttctcagtataaactcctttgtttttaaagggacttcctcagtaacctgcctcccagcggatcagggaatagtcctaaacttcggaagtgttccccctaggtaggtacagtctctaaaacccagccgcccttaaagtcaataaggttcaaaacaagaaacctggcaaaatcctcacctgcttcttaaggggagcagagacaaaaggaagaggcctccctcaccatggaaacaggaaatagtctaatgattctctaactcagcccaaggcaggaagatgtgattaacagcactcaggctcaggcaaaggagacattctgttcttgctcagcctgctccacatttgaacccaattgtctctagagcacttatccctttcaagtggctctgaagcactaagtgcatttcccctccacacagtaacagcagctcatcattcacacagtgccctgagaatgagtatctcaggccagtctacatgtaacatcatgcttttgctcccacacttctttccaaaacctaccaagacacagggagatgctgtggctggctgagaggctgcagccaaaaaggaaaatagggtactgcaattactcaactccacttccaaacaccagccctcactaagttttgcagaaaactgctatttgaccgtgagtggcatggatgctgatatgcacagcgttatctctgcaccatggcctgtacttctggagaggtggtgccctgtgactttagctatgctcactacattcccccagctagataaactgaaagaattctcacctcactcacacctgggaaagtgaccagaaactcacctctccagtatcaagcaggcacatggtaataatgggagggacactcacccggacaaggtccatttcttggctgttctccatgaaggtccagatcttggggctgagttcctcccacatgccttccagatcatggaacacagccagttcctggaaggtcttgttcacctggagtcaggtggggagccagggaccgcagaaaaaggaggagaagcacagacaatgagcgtttggctcctccctgaaaagataccccatcacagcagccctgtgccagtcctccccatccccaagaaatgcctgcttgtaactatgattctatacccacgactggggagctggcccagctctggtctgcatcagacttgaggttttcactctgggaattccagaagagccgtgagtatacttagcgcacacctctgaagctaccttgagttttttgcccccagttctggggagattctggggagggagtcttgggctgggggcagcttacctcagccatgacctgccttgtggctggagtgtcaggtgtatacaggatcttcccaacgagcagcggcttcagagctttccagataatgcgggaaagaggactagactccaaattcttcatcaaatcattgcagtaaggagctatgaagaagaggagagacaaatgctcatatgcatggtcatatactgatagaaacttacaagggctttggagccagagagttcttagttgaaaccccagctctaccactactagtcatataataagtaacttatctgagcctcagttggctcctctgtaaaagtaaaattcataacatctatgtggagagatgtggagaagattatctcagattaaactgagatatctataaagaatgatgcttgataaataatcagagcttattataacgtcaatgacggataactcacgactgagctgatctggaaaaatgttttcatgaagcacaagccctcccatccagattcacactctcatgccagcctcaccattgttttcactgacaactaacatgaccaacatttaaactgactcttgaggggcaaccagaaggctgaattcagacctcagttttcaagcaaaaaccaaaatttggggctgggcgcagtggctcatgcctgcaatcccagcactttgggaggccaaggcgggcgaaccacctgaggttgggagttcgagaccagcctgaccaacatggagaaaccctgtctctactaaaaatacaaaattagctgggcgtggtgacgcatgaggctgaggcaggagaatcgcttgaacccaggaggcagaggttgcagtgagccgagattgtgtcactgcactctagcccgggcaacaagagcgaaactctgtctcccaaaaaaaaaaaaaaaaattctcaacagggcgcagtggttcacgcctgtaatcccagcactttgggaggccgagacaggcggatcacgaggtcaggagatcgagaccatcctggctaacacagtgaaaccccgtctctactcaaaatacaaaaaaaaaaaaaattagctgggcatggtggcgggcacctgcagttccagctactcaggaggctgaggcaggagaatggcgtgaacccgggaggcggagcttgcagtgagccgagatggcgccactgcactccagcctgggcaacggagcgagactccctctcaaaaaaaaaaaaaaaaattctctttaattaacacaaactagtatatgtacacttaacaaaaacccaaatacaaaagttgtaacagacaaatgggtttggttatccagcaggatccctgatttttaaaaattcattctaagtttttcagggatttttagataccaagtatcttctatatgctggaaagataatagaatttttttttttttaatgaggatgccctcacaattaagtctgtcatggaaatgaaggcttccttgggtcaacttgcaagctgggggagaggaggagatgggatttaattaaagttgcctacaataccatccttttaaggcttgtaaagcaacttgcgaatgtctggagtgctttactccagagaagaaaaggttcttgtgttacaataaagtacaaaacctgcctcactcagtgtctgaaagacacacctgtggttggaaatggagaaaggttcccctgcatcaagttttcaaggaaaaggatgccactgcctaaaactgtgacattggatccctgctgccacgaggcatacggcacacgggcccacaaaagtgcttaagtgtggggagtggatatggagacacagggttctttaacactgccttgcagctaagaatgggaaacaaagggcagatcaaatgtctgagtgtgagaacacacacgccaccactaacagttatcttagagagcacagatccaggcagatttgggcttgaatcctggctcttgtggattaactctgatgtggctctaaccaaggcacttaacctctctgagcctatgaaatgtggggttaaagaatcttccctgcagggttatcatgagggtaaaatgagataacttaaacagaatgcacagtgcacaagaaattctacttaaatgttagttctttgttgttgttgttgttgctattatcattactgttatttctttttatgttattataaagcttatctcaatggtaatattaagaccagtacatcatcctttttaaaaatgcttttctagcttttttgagttacaactgacaaataaaaattgtatatatttaaggtatacaatgtgatgttttaatatatgtatactttgtaaaaggatcaccacaatcaagctgttaataaatccatcacctcatagttgccttttttgtgtagtgtgaacacttcggatctactctcttagcaaatttcaagtatactatacagtgttactaactatagtcatcacgatgtacatcaagatcccaggaacttattcatcatgtgaaactgacactttctaccttacatatattccatatataagtgagatcttgcaggatttgtccttctgccattatctcattcttgatcaccctggaagccacccttccacatcccccagaaaaccagaaggttggctgtcaatcattcattccattgataaacactactgtgcacctgagatgtgccaggctgcattcagagaactggggacaggtagctattcaagagaagcctctctcctctaggaagagctcagtctggtgggcaaatgggcatgtagacatctaacgctgctacagagggaggagatgacacaggccaaggccagaactaagggagggatggggttggggacagggctggggtctgcatggacactcacttgtagagttgtcatagaaggtttcagcatcttcctcagtgccattgcctccaaagagggctttgtagttgttgtcctcataccagttgagagacttgatcttcagcccccctccctcgggatgcccgcagacaatacgagacacagcctggtagatttgggtggaggagctggagctgttcacattggtcagaaacatcacctcctgtcgcatgtcactccagcttctcatgctgaacagctggcgtcagggatggggacagaaaggagggtaggggaagggagaaaagggcagtgcaagggttggggatgagaagagaaagaaacatcttattttcttgacctctcaaaagccatgtcccagaacatattttgtctgatgtcatctcaaagccttgggatgagcttgccagaacctggctacccaatctgtggtccagggacgagcagcatcagcattactggagacattgttggaaatgcggattctgagacccctctgccgacctgcagaattcaaatctacagcttcacaagatgcccaggtgattcctatgctcactaaagtttgagaagcacagcctggagttagtgaagcccctggggctgggcttcgtttcaccgggattatcttccagtttatagataaaagaatgctttctctgaacagctacatctcattgtggttgagcctatcaggaactgctctcatcctcgataactgactcatttctaaaactccccgaactctagtgtagaaattgaacagccctcttccgccttgggagaaaaggtactgtatgtgaagttccctatcttggtctcagtaaagtgtcaggcaatgaaaaagcattaagatgaaaaactcgagtctgggccgggtgcagtggctcacacctgtaatcccagtactttgggaggtcgaggcgggtggatcacctgaggtcaggagttcaagaccagcctggccaacatggtgaaaccccatctctactaaaaaaatacaaaaatgttggccaggcatggtggcaggtgcctgtaatcccagctactggggaggctgaggcaggagaattgcttgaacccgggaggcagaggttgcagtgagccaagcaccactgcaatccagcctgggcgacaaaagcaagactcagtcttaaaaaaaaaagaaaaagaaaaagaaaaagaaaaactcaagtctgaaccctagctatgtccctcgtcagcttacagcctttgaaaagtcacgtcatgtctctgagtactcaacttctccatgcttcacggagctcgctgagacacaacttggcttggttttggtaaccctggggggcagtagatgcttataccatggcctggacactgccctctactcatcatcaagacagcaaagctacaacagtgtgtggtgaggcacaaatcctatgccacacaagagggtgccctgcatagaacagtcccaacagcgtgagtcagaaaccctaggcagtgtctgtgactgccactcaacaggcatcaatgacccaggcagcgttctgtcttacatgcaaatgtattccggcactttgtggagttctcagccccaatgctattatgaaatatttatagagtactttgtatttccaaacatttcacaagaaatcattaataaatccctgtattcctggaaatgtcactgcgtgttcacaccgcctgggaagactgagctatagagcacagaggggaggggaagggccacgaggccctgcacccagcctggaaagctccatatgcctagctttcaacctcacagcctgctggttcctgtgagtggcgtggtccagcactctctaggtcctaagctttgccttctgcctccagaagggaactaggctctccagaggtgggtcagaggccacaaggattttttttctccagagagggggcatctagcacactccacaagaacacaattaggtgaggtggacagcttttcccaactttttcttttcataacctgtacgaggcatacagacagaaaggggacagagaaccaggccattttgccttttgttgcttattggaacagccctagagatttttaaataacagtgagtcaaaacactcacttctctttccacaggcagcctcaccaccaacccaccactccccaatcaaaaaaaaaaatttcttcccacataaagccagcaaatctttctaaagaagcaccataaattattgagttattccaaactattgactcttcccagcacccgtttcaggggtaaactcttactctttctcctacacctcagctcacactccaaactttatctgggaagtgcttcctgactctcagggagggatggctcttcatcctttagcccacggatgatggtggtatttgaacatcatcggttgagtgaatgaatgaaactgacttactgctttctcaatccagcacaatgtcctttgtcctccctttcccccatcccagtctcttctcaacccaacaaccagagtgtaaacagtctaaactctagatcacatcatgtcccctccctcaagccctccgctggattctcatctcacccagcaggaatccaaagtcttgccaggcctgtatggcactcacctcctcctgctctgagctcctctcctccccccaccacttgctcactttccctggtccttaaacacattccttaggcatgctctagcatcaatgtctttgtatctgccattcttcctgttcggagtttccttccctcaccacagacatgctatcatctccttcaggtccaactgtcaccttagagagagctttcctaatcaccccctttaaaaaaagcaccttctcatgctctatgccccttaccctgctttttcttcactgcatatatccctcctgtggcattgtacactgacctgtttgtttctgtctctcaccctatacgtgccccaagaaagcagagaagttagcgtgttcactgctgagtcctcaacacctagcaatgccaggcagctggtcggtgctgggtggacatctgagatgctgcctccctgtcctcccttcccatcacccagatgtgaaactcaggtcagctttcattcatcttattcctcaagtcctcatttcctcccaatttccaggttctgctagtgcgtattttctttcttggaaggttctcctttctattccagtcgctactggagtttttcacgaagcaggcaacaacacaggctttggaatccaacagttctgggtttgaatcccagttttgtcaattaactcattgggtgactggaaaagttgcctaacctttctgagccttggtgccatctgcaaaatggacatgatgagacccactcaggtttgtcatgtggagcatacagggaaatgggtgacactgtctgaacctaggcagcttctcagaagacattcactccctttttcttttcctttcaagggttgtgctttggtcaaaattatcaactttccacacgctgactggacaaacaagtgcatttattgatcttctcccatttatctcacagaaatagcaagtcagacaatgagtaacttttgatcaaagggatctggaggtgttctattgaaagaggcagatggtccttgcttgtcctggaccaggagcaagcagggcacaagaaacagctgccaagaaaaacgtatattgttcacttggagagtttccaccacatcagcaatgggaacatcacctgcttccaatttttttttttaatgccagaaaaaaaaaaaaaaccagggccagtgatgtaagtgaaaacagctgtaaccaaaccctgagtttagaggcagcctcccctgttacagaccctgctttgctttctctaaggccagaaatgaacaagggacagagggctgcgaggggatctgcagagcaatgcaaggcatgtcaatgtcagctaacagggccctagagaaatagctacggacttgcaaaacagtttctctttctcattctccccctggaagaaccccagttggtccagcttctctacctagtaaaaaaggttaccagccttcataaccagggtaacaaatggcaagctgaaagaaggcttctcctctggaaaaggaacccaaaagtcagacctcatcagtcagaaacacgtgagcagaattcaaagaaagaaagtagaacaggacaggaagaaatacactaacgtatcaatagtgtttgatctcagcatttttgtattttccaagtcttcagcattttccacaatgaacatgcaatactttcattgttagaaaacataaagttcgtttttgatatttgaaaaaatgatgcaagcaccaaaaaatgggtaggttagatacaagcaccaaaaaaagaaaaacggattagagaagcagctaaaaataagggtggaccaagtctgagacaatttccccacaaattattattttccaatatcctacacgttaaagtctgtattgtttgtgagcactgccccctggctcagcttcctatgctgggggacaccagacagttcctcgcttccaagcctaatttgagacaaggctgggagtcagaaaggtggagtgtgcactggctgggagtcagagctaactgcttttgcaagtgcctacaggccctctgatcctaggacagagattactctgatacatttgtcaacatgtggacctaaaaggcaaactcaacttaatgttcattaagagaccatattcccatagttgaacctcagaagccagatgctttcaagggaaagggctgaattaggggtaccacgttattcctgttagttagcaagcatgtgtgttggtaaaatgattggccttgctactgaagaagcaatatggagaaattgctggtcagacaaaagcagtgcatgggcagtggcagagataattctcctctttacaaatgtatgattacctaggggcaaaaagaaaaaatggagaaggttctaaactagatatccagctgttagccactaaccaattagctctgagacatctatgagttttaggtttcttcatttctaaaataaggaaatcaaaacattattgtttacatcacttatactttgaaaattgatattacatcccatgtgatattcaactcaaaaggacctcttgccagactcaggaatgaaaatactgatacagtggatgatccgcttcctggtactggaaagacacaacttacctcctgggccagagtcccaagactatgcagcaatgtttttgtggcttcagccagctccttgctcgggaagggagatgtagagtttagtgttctctgtaatgagaaagaaaactttgtttctgaattcaaatgtaaacctgaaatctctattggaaataaacaagtgaattaaaactgttcacaatcttgagtttaacaaacaagaaaccgactcctaaccaaaactaaagacactacaattatttctaactgtaagtttgcattttgttcattttcaaactcattctttgattaatggttttaaatgaagtaggaatattgtacttaaaactagttaatatgcaatagattaaaaggatctcatgtgggctggggggatgtgtccaatacaactctgaccgcaaattcccaaatctgtctgcgtctgcaagatgggtaatacgggaatggctttgagaaacaagttaatgacggctcacaagaaaggaagaaaatataaagtttaaagctgtcaaaaatagggaaagatggaattctgtcactctgttcaagtcagcactgtttctaacactggaaattgaatgtagaacacttatttttacatcgagttttagtcaaatctttatatgtaccaattcatatatttaattgctgttatatgtcacctaactgcacagcagatataggacaataattcattagaacagggaaaagataaattagggcagaaagcataagctaaagaaaaaaaagaacaataatttacagactgtgaagtcagaattgctatagctgaggagcctcaagttgggttctgagtgttcaggcttccaaagagaaaaagacgtgagatcagtttcttcactgttatttgtcaagcaggaaaaaagtatccagggaaaatccacctttcttgatgtttctatgagcattgttttattcaatatcatatcagacatctctgaagtttagagaaggttgggctattttgacatttgtcatatcagagactgctgtgaaattataatgtagactacacaagaaaatgtctagaagtggctgggactcactatctctgagaaatagctgcctgggatgttttctttcaaagagaattccaaatgcagaagggattgagtatcattctgatcatcacaatatccaagcataatcctcaatgtgcatttctaagaaaacctgcctaaaggttctatgaaagaacttgtccagctcattcatctcttctggaacgggttcttcaccagagtcccaggactcccacattcacagtcctcaaagggacctacgcggtctcccttaaacgtcagactcagataggcctctgtgatacgcagaggtgttcatgattgttccttccatagagagtaattcatgagcaaaaacaggtgaggtgttttgtttctactttctctctttgggttcactttataactaaaggttaacacactagaagccgaacctagggagaacttgcctggaaaactattacaaacacaaactgagagatcttaattgaaagctataggaggtaaagtgtttttgtgtttaccgttaggcctacaagatgacagatgttcaagacagcatagcaaaaacaaaacaaacccaggacaaaacaagaaacgccagatccacataacctaaatttaagaaaaacttaaaaacgtggtagttaatccacttcttttataaggactcaatggaaataagattgttaggattcttgtcactcactctcccccgccaccctgtgccccaattctccagtcatgggaacctggggtagctatagaaccctgggcaaatgactcaaattccccatccttccattttctcgactatgcagcaaagtttaaaatgctgtgcacatatcacagagtttttataagcactaaaactagaggatatgtacaaagcccctcgcacagtgcctggcacatggtaattcctcacaattgtcaacaatgtcatcccctgcctttttcttcccttgcatgaaagtttactgccaaaactggagggcttttgtctgcaaacagggttttcaacttcttaaaaagacaaacatcctttctctgtttctcggcaaggtcttaaactttttcttctattgaaatgtccttcctctgctaggcagagagctagagctatcatcacacagcatatcagccacactccaatgtgctgtctctaattgtataattactccccaccacaaggtgaagacatcctcatcctgattcctgaaggcttgggataaaatgcctttctccccttctaacccttttcttttactgagcatttgccaaacggcaaaataaaagataatactaagtggatgaaatatacatgatatgcataataggttgtgtatagatatactatatgcatccatgtatgtttttacgtatatgtctatatgtatagacatacatacacacatatatcttacacatattaactggcctcaaagttgacatttcagttgaaaaacctgaaggaaaactcaatccctatggtaggtatgtgtatacttatatgtgcacacacacacacatatacatctttatcttaatgtatattcattatgtaccttctctttaaagcaggtgatgtttttacagcagtggtatagcttcccttgtaattaaatttaattatccaaaagaagtgacttaatttaaaaaatatattaactaaaaatgctaccagctgcacttgaatatgaccaaaatcatggcagaattgtaaatgactgggattcactaacactgtgaggtttggggagctactgtatcagaatcacctgtggtgcttgttaaatatgcagattcaggctgggcatggtggctcacacctgtaatctcaacactttgggaagccaaagtgggtggatcacctgaggtcaggagttcaagacgagcctggccaacacggcgaaaccccctctctactaaaagtacaaaaattagccaggcatggtggcatgtgcttgtaatcccagctactagagaggctgaggcaggaaaattgcttgaacctgggaggcagaggttgcagtgagccaagatggcgccaatacactccagcctgggcatcagagtgagactcggtctcagaaaaaaaaaaaaaaatgcagattctcaaccagctaacacctactgaatgagaagtttaagagtgtgatccaggaatcctcaggagactcttttgagcactgaggtttgagaaccagcaccatgttcacaaagcctcccttcccagtatgctttgcgccaacgtgcttggtggtatattctgtgtctggtccgcatactacaatctgcttcagactctgaagcagtgaagaggccactcggttcacctggccctgagtaggacccaagatggtgccaaacacatggggtgccaggtttgtcacaccaattagatacagtagtcaccaagtgcagatgtttctaaaaaccccaaacccaacattcacccattgtcaccattaccggtcatctgtctcctgaagggtacaaatcagtgaatgggtctgttgtttgtataaaaggtcttctccaacttaatgaatttacatcttcaagggcaatagtttttccaacatctttaggacttttagtttaaatttcttaactctggagcaagcttattctccttctcttaaaagccccacacttcagcaaaactccaggcacacagcagggcctaaagcatgactgtttaacccaggaatgtaattgagcatggatgtaaacataggtccttattaagtttgctgtgggcatcagatttttacattagcagacacaaattcaatgccatatcttatgatatgaccttcttatcagtagtctgtatgttgggtttgactgcttgtttaatttgactgtttttggttttggtctccaacagaaacattggctgaacccacccatgagtaataaggtagaacagtcaatgccattgttagaatcatttttaaactagttctttattcgagattaagtgctcagcatttactaataatattggcaatctgtagtcaatataaacaaatttccattttcaaaggaatattggttggagttacacaatcaggcatggattgacatcacagggttaacaaaacacacatgattcaaattctacatcaagtttaaagcttggattatccagatattttgctcatgacttaattttacttttctgtgcatccaaaacataccataacctgaaaaaataagccaaagactagaagcatggatttttaaaagtttagtataaaaatagaatactatggcaaaaattaaccagattccacatgtatcaacattgataaatctcaagaacataattccaaatgaagtggcaggccaatatgcacacttatacaatgtgaacacatttaggccagtaccaaatattgttatacatagaatgtaagtatacatgatatagaggattaaaacatccaactgcaagacaagagttatctctgaagaatgagctagggaaacagaggtggcatcagctgtacctgtaatgttttatttcttaaatagaacctggagtcagcacggcaaaatgatggatgatggtacaggagtgttctttttgtttgtttgtttgtttgaagacggagtctcactctgtcacccaggctagagtgcagtggtgtgatctcagctcactgcaacctccccctcctgggttcaagcaattctcctgcctcagtctctcacgtagctgggattacaagtgcacgccaccatgcctggctaattcttgtattttcagtagaggcagtgtttcaccatgttggccaagctggtctccaactcctgacctccagtgatctggctgcctcagactcccaaagtgctgggattgcaggcgtgagccaccacacccagccaggagtgttctttatgttattctctgtaccttttttcatgttgaaactatttcataattttctttttaattcaatgaaaagataaaagaggaaggacaggtgagcaggaagaaaggaagggtaaagaatctatgttggcctgagcacatatcagatctaacagacagataacttccttgaataaaattaaccccaggaaagaattcatgccttgaaactagaacacaaaatacggtctgagaatcatgtgtctgcacctgctattaactgtgctctcctgctcatgcttacttgacgaaggcagacaaaacttgccaaatcctatttccaaagagcttcagtaaaaaattcacagcttggaattcctactattatttttctaaccaaaaacattctcttggctatgaactcacataggtctccattgcacccaggagacaagtgactttcttatacgaagtaaaggaaatgggaaaaagaaggaaaataaaacctttagtgagggactatattttctgagttaagataacaggaattcatgtatgactcaatattttcagatcataactgtaatgtcattacaggaagaatgcacaaatgcttactgttattattcaaaagctcccacccacttctgcaaaatgtgttaatcacaacataccatgtttcctaaaagcatggcattctgtgacattggccccagaaagataaaggctgttgtgccccattctttctgggtctaagagatggcttcattatattctttccatcctcatgaacttagttctgctccaaaggccattcacattcacagaaatgctctgtttcgtattcacctcatcaagtcactcagcctgtggagcctttaatggctccctttactctgaggataaggccctatatcctcacatggctcgtgaagaaagacctgcctcagccgacctttgcccacctctgcaggcatcacgtctcatcgttccttctcccatcaaactccccacagctatatctgctccatgctgaactatctcaatcaggtacagttcccctaaatgccaccttctcttccctctcctctctggaccaatgcatatactatgtcctctacctggaacattctactccctgttctttacctggctgacatccattctttaggtccccacttagaggatgtttccttcctgactggaaagactgcagtaggaggccccatcagggactgtatcacacccagcagagcgtctcctgctctatacggcagctgctcctttcctggtctgtcccacccattccccaaccaggaatgaaacagagagggctggaccttgcacatgactacctccctgggccagagcatggcactgattagggctcagtaaatgtttactaaatgaatgaatgcatttgttaatccattatcactacacgaaatgaacactggaagataatattacaatgcattaggagtcacagccaaatagaagtagaaaacacatctgtgcaattaaaatgcaactgaaaatattttcaacttataaaaatctcatctacatctaaatttttcaggaattctatgacaaaatgagacgtgggtatacatatattggaatagtattttcaacacaatacacaattttgttttcctcctgggaatgcatgttacaatgtgttcattgaaacatttcaaatgtcctttaaatatcttcataaagtagacaaaaatctctacttcactttgaccatatgcaaaatccaactcaggctgggattagtatgttttagttcaaactgaaaacaagtaaaccacaaatcaaagactatcaccacccaggagtaattgctatctctttctggtgatttctatgacagtaaagatttcctctgggaaacattttaatattttttattgaaatacgaaattataagactacatttctaaggaatattctaatcttttaaaaaataaatcaacaacctaaatattaactttcaaattagatgtgtttaacgcattcaaacgcttcattttttgctgtttctaaacatagttaaatacatctactaccacataattcagaggaaaaaattaaacctgtatcttagatctggcaacaatatttaatgaagaaatagtataactaaggtgaaaatgtctgtgtaaatggagttgagcagtcatattaacacactgctatatctaccagctagtgctcttcttttcccataagaatgaggtgaacatagagtctgaagagtaaatctacacagtgtgtcattccacccattaccaacccatggggattgcggctgcttgctgggagaaagcaagtaaacaggtgggcagtcaaatcacacaaagccaaacaaaatctgatactttccaacaatgtccgggttccagacaggagaacacgagcaagtgttctctcctgcaaaaacccacacagacgctttaaggactgcatgtaacaagctgaagtatctagccctaaaaagccatgaggctgaaggtaacaacaagccccatctgtattctgggtccttgtctaagagtcaagaagaagctaaataaagacccctcaagacaaggatgactttgttcactccttatccatctgcttcttcgatctgtacacagctcagctgtgacattacttgtcttctgggagcctcggggcaccctcactttcccttctttccctcatgaaccaagatccacttggtgggaatgtgctaggcacactggaagacacgtggacagtggaaccactggttccacaaaaaccacttcttttttttccccacgttattgagatggagataaatctgcatgcctggacttccaaccttaaggatcagacaccattttcacatcactgaggcaatggtgagtcaaggacagagcccaaacctagctcattcaaccccacattcctcccactacagcccacagtgtctgtgttggcaaagactgctgtgagggagctggtcgagaggtcatcagtgaaactggaacgaggacagctctcactctgtagacccaggacctacaaagaattcctcaaattcccagactcagccttcagcctggatctcaatgcccatcagaatgaaagctccaagtgcatcacaactgccttgttggtggtcgaacttcagtgcctagaacagtgctggtataaagcagacatacaataaacacttgatggatttttttcgatgaatgtctcatacctagttcagagatgttctcctcccaaagtcacctctgtttggtttgtacattaaaaaccctaataggtgatgcttattatgctttagagtcactttccaaatatgggcaagaaaaagcagagagctgcagaggggtcaacaaaagccaaaggcactgagggaacacttcaaatatatgataaactattccttccaatcaagaaagctacagcagactgaatatcccctgcaaagatgtccacaccctattcctggagtctgtgaatatgcacatttcatagcaaatgcactgtgtagatgtaattaaagttatgaacctcaaaataaggagattatcctggattatgtgaatgggcccaaactaaacacctgagcccttaaaagtaaagaactttctctgactggagacagatgtgacaggaggcgtcagaggtttaaagtgtgagagatactcaacccacttgtgggagaggagtcacatgaaaagcataagaaggaatgatggcaacctttaggagcaaaaaccagcccctgctgacagccagcaaggaaatggacttcagtcctacaactgcacgggactgaattcatctgatatcctggatgagctccaaagcagattcatcttcagagcccccccaaaaaaacacagccccacaaacaccttgatatcagccctgtgagcctctaagaagtagacctaggtgagctctactgtatcctggcttctggccttatgaaataataaatgtatgtggttataaactgctaagtatttggtgacttgttatagtagcaataaaaaaaaaaagtacaatcggaagcaaatcaatctctcgggccaaaatttgctggtccactactatggctccttcctgcagtccaaaacagattggaggtttctgtgagacaggaaggtggccctctcctcgctctgggaaaggtacatgctgctttaggaaggacccaagagaaagttaagaaaagttcacctgcccagcacactctacagcaaaatacaccttgctgagcagcaagacaaaagaagcccctgccaggtggccctgagctcctcctagaagttgttaactcaacagtacaaatacaatgagcgcactccataacaagtctccctcatgactaagtgcatttatcccacagataatatttcatatatccacccacctttgttctcatcaaaaggatatcttttgagttgagtccagctcctagaaaatacctgacacataataagaactgaataaatattgctcaatgcatgagtaagatttttaagtaaaaagcagagaacacctaatggaaactgctcttaaccccagggaactttaaaaacacaacagcgttctgacatccagtattaattttcacacaaggtacggactgagacataaataagaatctttgggtgaaaagtcttgacaatatctgagcaagaatgcagtttttcactgaaatactcaccaggaccacttcgcttggtatgagttctaacactgatctacagaagaaaacttctatcttttttttctttttctgagacagagtctcactctgtcacgctggctggaatgcagtggagtgatctcagctcactgcaacttccacctcctgggttcaagcgattcttgtgcctcagcctcttcagtagctgggattacaggtgtgcgccaccacgcctgcctggcaaatatgtgtatttttagtagagaggggatttcaccacgttggccaggctggtcttgaactcctggcctcaagtgattcatccgcctcggcccccacaatatgctgggattacaacagatgtgagccactgtgcctggctgaaaacttctatcttgacgcaattgttttcaaggacataatttctactactcatgtcaattaaattatcaacttctatttattgagcacctattgtgtgccaggccccacaccaggctcttcatatgtgtaaccaataatcacaacaaagagtcaaatatattatgtgtatgtagaagaagagaaaactgaggcttacagggactaaataatttatccgacatcaatgctggtaaaatattcaaatgcaatattcaaacccagacccagctgaccctcccacactgccatactttccccatgttgccaaaacactgctttccagagcacccagattctgaaggaggcccaggagaaactcacaatacccttggctggaaacagggaaacactcacgcacacacaaaaggagaaatgtttcaaaatatgtctctcgtgaaattccacttttggtacagaagcacatattgaaagaagagtttctctccccatcatgttgggctttgcatctccggttgctgctactgctgcacttcttggcacagttaactgcccatgtgcaatgtcatcacatgtcacatccatctaccatcacaaatgttgaaatttcaaccaagcagcaatagaaaaaggctgcttaatgcaaatcaagtatcagtcccagcattccaattaaggccctgcttaattcaataagtaagagtcacatttcaaaatgtttggaagtcatttcatcctaaagccttcctcagaaatcatctttacacaaaacaatcctgatcactcattctactctaactcaagagccccattttgaagagaggtctcttggtaacagcagaggggcagaagcagaacctgagtgctccacaaacccgagatatgcagaaagcacctggtagtagccaccttaatcaatacctggtcataaaccaacgcatccacaaggcacaaccacaacacagcaggatgggacacagtgtagctgacggttctgaaggtgcatttccctgcactctgtcacgctgctaatcctcccagagagatactgtcaggttgaaacctgagctgttaattatcagatgatgagggctaaacagtcattctactatgagtataattcaggcattgtgtgagtggagggattttaccgggttgtgtacacaataggtgtttaatgagtaaacagaagtgaaatggaatgaatgggcacagcaccggaacaaattacaatgtcttctaaaaacacccatcttttccaaaatttcaatcattccagctgaaagggtgagcatttgtcatgcagtgaagcagcccaaaacagtccaagaaaatggttttgtaacaaagttttgtaccattcataataacctttcaccctctatgattcacagcacaaaaaagaccaacaggctgcaaatgtctgcacaagtcagcttctctaactttttaggccagttacttagggttgcaaagatccctgtagagaaatataccttactttaaaattataacatgggaccaggcacggtgactcatgcctttaatcccaacactttgggaggccgaggtgggcagatcacttgagctcaggagttcgagaccagctgggcaacatagtgaaaccctatgtctactaaaaatacaaaaaatagctgggcgtggtggcaggtgcctgtagtcccaggtactcggaggctgaggcatgagaatcacttaagcctgagaggcggaggttgcagtgagtcgagatcgcgccactgcactccagcctgggcaacagagtgagacagatctcagctcactgcagcctccacctcctaggctcaagcgatcctcctgcctcagcctcccgagtagctggaattacaggtgcccaccatcacgcccggctattttttgtatttttgtagagacagggtttcaccatgttggccaggctggtctcaaactgctgacctcacgtgatctgcccgccgtggcatccgaaagtggtgggattacaggcgtgagccaccacacctggccgatacaaaaactttttgatggtcaatcaaaggtatgaatcctgaagtgtgtttctaaggtcacattctagggtatgatctgggaacagggtccagaaactgagtattcttaattctctgggaggaccaactctctataaagaattcgtgctgcacaaaatccaagagtattacaatttcattttattataataaggaacatctctttccagatacatccttcctccaggaatctttccctggttttaagagaatctatctggtgagtagaaaaccagaatcctggatattaaatgatgatgtttggggtagcgagaggaatttcaccagagctctcagaacacctagagacatatttgttctggaactatataaaacactctgatgaccaaactgctcaggctcaccagtattttttggttaagaatgaatgggtattctcatagagtgcttctctgaactattgattcctaggctgaaaaaacttcgtcggaatttttctttgcaatgttattactaagtaagctaaatagtgtggtctcatctaattccagggccttccaactgtgacagcccacaatgtcatctttatgatgggtttttaaacataaatagatatccatcttcccatcaatggtttcaagactttttttttttaaatatgaagaactctgttttcaaatgagctcttgcttagtattataatagtaaaaacatgaaaaagcaggtcttctctgattgaaacaagcacaaaaaacttttggcttaaactcagccacacccagcttattcttcccattcaccctttgggagatggcccaaaagtctgaaagaacactaagaacacttagaataccactgaactaaattatatcacaaactcccagccagccgtacttttctacaaaacaaagtcatgctgtccaaggaaaagcctcacattccgaaagcattagtgcttgaagtttctccagtgagcaagtctactcaccaggattggcttcaggatgtccatgttggaacgaagtactcgctctgctgcagccagtttctcccttggtaggccacaaagctcagaaacttcttggtcaccaagttgaatcatctcttctgattttgatccattgcacagacttgtcaaatgtaactggtagccttgcaaaaatacctggaagcatttcatgcaaagagagacaagcacaagaggattatgaagattggaagctgggtccttgaagtcttttggagaacttcatatcaatacagctttgaagatcttaaaacaggttccattgcaacagtccaatgcatcaggtctctttactgaaactcagaatgtatcaaagcacaaggcacaatgacaggacacttaaaacctgcaagttgcattaactcagtatctcccacactcttgtccctcttgcaaagaaaaatccagagtccaactcgttttcttaagagtgggacacatgatttggcaaacaggaatccagagtctgaattcctggaaccacttttattagatgaacaacatcctcactattttgcaatttatgttgtctttaagtaggactgggctgaaatatggggagaaagcatttatgctatttatctgtaagtgtagatatttaactaagacacagaactatgttctaacaatttcagaatttggaattctccattttacttgccctagagcagagtgccagaaagccaggcctcttatctcattgataggccaattctaaatcattcttatcttttctttataccaaacccactagagagcctcttcttggtcatattttacttaattgcctttctggacctaaactattctacttcatacgtggtccagtggaccacaagctttgaaagaagagcctgtttatcctgctcactttgcatccacagtgctgaaacattatagccagtatttgttgaaggaatgaacaatgcagactctttattacaccattactaactgccctgtttaaattggggcaggctgatgtgcttgtagaacaacctaaggtgagtgatggaccaaaagcctctcaaaacccatgcagcttttgaaatactgcagaacatttggcctaccatgattcccattaagtttttgctgactgccagagatactcaagcacacttcagttctactcatttctttaactggtccttgctgctaggctgtcagcctacagttagtgtctatgtttaagaatactgacaacaggccgggtgcagtgggtcatgtctgtaattccaacactttgggaggccaaggcagacggatcacctgaggtcaggagttcaagaccagtctggccaaccaacatggtgaaaccccgtctctactaaaaatacaacaattagccaggtgtggtggtgcatgcctgtaatcccagctactcaggaggctgaagcagagaatcacttgaacctgggaggcagaggttgtagtgagctgagatcacgccactgcactccagcctgggtgacagagcgagactccaactcaaaaaaaaaaaaaaaaaaagaatactgacaacggagggcctttgttgatgtcatcttctgcctctgcccaatcatgctttgttccctttcctttccttacacaagtattgatcccaagaatttttcaataaatgtcttgtatgctcaaaaaaaagaatactgaaaatacagaaactccaaggaccatccaaggaccatctccatgcttaggatgccccttattttaaactgattagatgtgacagatatgaaattggcagggggcaatggaaattatgctaaatgcaactactttcaaaagcctgatgcctttggcccatctcctaaccacacaattggtaaacacaaggcatattttcctagtttcagaagggcacgcagtaagcacatttttctaattttaaaaattctagatcatgtgaagcaaaaagcttattttcaagaataaacatttccactacttctgcttcttgtaaagacaagctagtatgcagacacgagataggggaggaagcagttcccctttctgccagagaataagctcaaaaagtgtctctgaaaaatcaataaccatgcaagctgggtctggtgctacccactgcacaagagctgtctaataatgatgccagaggaagttttctatgattctaaagttaaaattcaacataaacactaatattatttcctgattttataaaattctttttttttttttttttttgagatggagtctcactctgtcagccaggctggagtgcaatggcgtgatattggctcactgcaacctccgcctcccaggttcaaacgattctcctgtctcagcctcacgagtagctgggactacaggagcatgccaccacgctgagctaattttcatatttttagtagagacaggctttgccatgttggccaggatggtctcgaactcctgacctcaagtgattttcccgccttggcctcccaaagtgctgggattatagacgtgggattacagacctttgaagtgatctcgtccatcccacctgagctttgtgacactagtccgttcatttctgtttccccagtgccatctcacagagctaaaattggagagatttaaagccttattcccacaagctgcagggactgatctcctatttaatgcaaagcaagcaacagttctcaactcagtgccactgcgtccagcccttattttataaaattcttaaaagtctccaaatacacccttgtctaaagtctcctgtcctcaattttttagacagagctcctccagatcaataacccttaaccacggttattgcctcagaactgtgaatattttttaagtttaactcaacttaaaatgtatcccttgtaggaggaaatcatcacaaatgccaagtgataagccagaaatcaattttattttaaccagctggcccatgacgccaggttgcatattccactcctggatggtttggcaattcctgcctgaatagggaagtaaaattaagtgaagttgtattcaaactacctccctccccttcaccaccattacaaggacaagggtttattcatttctttccagtagctgcacaacgtaattgccatcagccctactgaggaagctggaggcatcagcttaccttgtggagaatgacatcagccctcagcatcttgtccacagtagactttgggagagagaggttgtgatacaggaacccagagaaggtttcattgtccaccaggaaatcttgaagcttcaagtctattgagaaatagtgttttatttttatttagtaagtaactcaaaaaaaaaaaaaaagtgggcacaatgggacagtggagaaacgttatcataatattgatgatcaacagttgcctggctaaacacacacaggaatgagataggggagcatcgccatatcaggagaggcatgaaaatattgctttctggtaacatgttgagccacactcagcatgtgctcctcaactcaaacagtgtgatggtgctgttacacacacacacacacacacacacacatacacacacacacagcctttccttttctttttttttttttattttgagacggagtctcaccctgtcacctaggttggagtgcaatggtggaatctcagctcactgcaacccccgcctcccgggttcaagagattctcctgcctcagcctcccgagtagctgggattacaggtatgcatcaccatgactggcaaatttttttttttttatctttagtacagacagggtttcaccatgataggcaggctggtctcaaactcctgaccttgtgatccaacctgccttggcctcccaaagtgctgacagtacaggcgtgagccaccatgcccggtctttctcttctaaatgatctcacccaccccacctgagctttgtggcactagtccgttcattcctgtctccccactgccttttcacagagctaaaattggagagatttaaagctttattcccacaagctgcagagactaatctcctgtttaatgcaaaacaagcaatggttctcaaacttaagtatgcatcagaatcacctggagagcttgttaaaatgcagactgccgggccgggccgggccgggccgggccgggccgggccgggccgggccgggccgggccgggccgggccggcccccacccccacccccacccccacccccacccccacccccacccccacccccagagtttctgatacagcggccctgggatgcgactggagaatcacttacaggtgatgctgatgctgctgacctggggaccatgttttgacaaacactggcagagtgcattacgcatatcaaagtgccttcacagacatggtctcattttcattccaaacataaaacatgtgatacaaagctccaaaacccaggtctgccaggctttaggaaaacacattaacatatatttaaaccatcagccctattaaatgatttgattgctaaaggatttcatacggaatctccctaaataataggccctctgagtacagttagaaaaggcttcaatccagtgcaacaaaacagaaaaagcagcactaagaatccagaattttagtttctagagttggaggctgtgtctggtggcgtccctgcgtacctcatgtcatctttctgaacctcaatttcttgatctccaaaatgagaggtttctgaccagatgcttggtaggagccctatgactccgaaacagtatagttttccctgactcatctcatttggctgtctacctcttctccttccaacccactctcctaacagcctaacttctttgtaataaagataaaaccagctcatcaggaccacatgaactgagcccacatggccaggcactaagcaacctctagagggcaaactttgcaaactgaaatcatttaccagaagagaaacaggtttgatctgaaaatggggctacagtgtgaggcttaatgaggacaggagttaatccgcggagctaagagggtcacatgcagagataaagtaacaggagggcctgacagcccagccagtctctcataaatgctgtatgatccaggtgtattctgctttaggcaaacttcagtaatattgagttatatagacagaataaattgagcaagatttacatcgctagagaaatgattcactgctacccctctatggctagctcctagttattcctcatgacagccagtagctgttcttaggcccagttagtgtccctcagaatcagtgctcctgcaaactgctacctacctgatgcttcccatcacatgtgactctacactgttagcattaggctctctactgcagttgtcaaacctcagagcacctaagcttcatttagggagcatgcgaaaatgcagtttcttgggcccagtccccagagattctgaaatagtgggtctagagtgcagagcctacaaatctacatttgaataagcatcccttacacttttaatgttgggggagggaggtgtggaaccacagtttaaggaacattgttttacttgcatgttgtctctaccagactatgcctataggatagggaatatgcgttcttagtaccaccaatgcccagatcaggcctggcacagaattactgcccagtgaagggtagctgaatactaaacactaggagatgggattagggctgacaaggttccaaaagtatctgagtaccatcataggagatttccttttagctggccaggtccaggaagagcccagggatgtcaggaccatccccaggccacaccccaggagtgaacaggacttctaaccactggaactgccttcccaggaacagaaagcgacatccggggtcactttctgttcttgggagaaacaggaaggaaggtgtaagctggtgtcttcagttgaggactggtgtgaaaaggtagacattaatcactgtacaaccatggaaaaagcaccaccctgggagtcagaaacctgggttctaaatccatttatttgtcgagtcatttcatgtagttgtgcctccactgccttatctataaaatgaagggtcaaaaaaggcctctgtgaaacctcaacagaaacagaatacacgtattagctaaccctcactgactaggtgggccatagcttcctcctgagcagagccagagcaatacatcatattgcaccagggaacttcaaaacagctccctccttcccaagcagggtggcagaagtgtgggagggcgacccaggccacccctgcaatgggcctaggtcatcctgcaacactctccagaccagtgagtgtgctcagcatgtttataagacttctgttatgttaacaggctctgaagatgagaacatctggatgtgatcaagctccagcctcctatcagtgaatcccccggatgagacataagaacccagagactgattaaacagtcaacaacccttggctgtgcacgtgcatggtgtggtaggttcgctgggttgggaagcagcagggagggccaaagatcctccactacaaagaacttgcagcctgatcacgtggatatccacccatgtaggcttagactcacacactagcaccaacctgtgtgaaaacaggaaggcaacatggtgtagtatactggttctcaaacatgactgcccgttagactcagctgggggcttcacaaaaatcccaaagcccaggccacaccatggagcaactaatgagaactgctagggtaagacccaggcatcagaatttaataaaacctggctgggtgaggtgggcagatcacttgaggtcaggagtttgagatcagcctggtgaaacccagtctctactaaacatatcaaaattagctgagtgtggtggtgggtgcctgtaatcccagctacttgggaggctgaagcaggaggatcacttgaacgtgggaggcagtggttgcactgagcagagatggcaccattgcactccagcctgggtgacagagcgagactctgtctcaaaaaaaaaaaaaaaaagaatttaataaaatttttcaggtgattgcagccaagtctgagaaacaatgatgtgggggaaacatcagggtttgggaccagaaaaacctaaatttgatactgcactctcctgtgaaatagctgtgtgactgtgagaaagtgactttacctccctgagcacaaattttcttaccaattaagtgaaggtaatagtatccacatttcaaagatatgaagatcagagatactcatcatggtaggtgctcaatatatggtaataatttgtgattatcaaaaagattttttcactcaactttaccaatgtacaacaatgccatttatagaaaagatggggacacagtccctgccttcgaggaactttcaaggctgaaaggggagataaagaggcaaatcaattcaagaaggcagaaggaaggataagcaagccaaaaggagacagtaaatggaagcactggcccaagatgaggtttatctgtaagtgcttcatggcgagcaaccagactggagccaagttctggaaaaggacagagtcaaaaatccctagaagtggctggagaggaaggggtaagacctctcatgatgacaacgaccaggacattttgtggtcataatgctatgcacatagtagattctcaacaaatgaatgaacaagcagataattagagaagagatttctcaaaacctcagatctgggtagtaggaaggggagaaaaaaggagggggtgaggacagagtacagtggctttgtatctgctggtctcagtcttctcccctatgttgctggcaggaaaatgggtggaaagccaagaatattaagaaagccagatgtctgaaacataccttctcctcttaccccatcctcatgacatggcccatgagtcacctcctccaggaagcctgccctggccttcccatcctcaagctgggttaggtggccagcccttttttgtgactttttttttttttaatacagagtttcaccctttcacccaggctggagtgaagtggcccgctcttggctcattgcaacctccaaagccccaggttcaagcaattctcctgcctcagcctcccgagttgttgggattacaggcacccgccatcacgcccagctattattcctttttgtatttttagtagagttggggtttcatcatgttggccaggctggtcttgaactcctgacctcaggtgatccactcgccttggcctcccaaagtgctaggattagaggcatgagccaccgcgcccggcgttttgtgactcttttgtgcccaacatcctatgttttccactagtaccacacagatcaagctgcagtcacccatgtaaatatcctgctcccagaagaatagaaattccttgagggccagggtttttaattccaaagccagcagtgcctggcacagaggaggcactcagtaaattggatgaatgaatgaatagatggatggatgaactaatgaatgaatgaatacaaatgagtgaataaattaatgacctgatgtgatttggggaattgccgattgcagagaagaaaattcaccttgcagtgagttagggaaaagatgaagcaggacatgaacttgaaacaaaccaagtaaagaggacacaagagttctgctaaacccactcagccacgtcagcccagatcaagaggagagtcaggtgagtggcagctagaagcagagtggggaacaggagagaggaaggctgagttgattaaatgataaaatggagatgacaatggcatccacctcattggactgagctaggtgttaaatgagcaaatgtacctgcagacctagtataatgccgggcactgagtaaggtgcccggtaaaggatggctaatatcatcatcattttcaggaatgactgatctgaacagattcatggctaatttaaccttaaagcatattcagaatagacaagacacagaagtggctttggcggctaagttgagatgttgaatttgtgatctaaggtatgcacatgtgtgtatgtgtgtgcatatgtatgtgtgtattataatacatattagcctggctgagttcctaagacagaattattgagttctttctgctgatactatctataaggtaaaggaaaggttgaagctgactgatttgtctactcataactttatgaaagaataaataaatctagtattttacagggaatcaccaggaatgatcatatccaccagtcactgcaaggatggatataggtggaagatgacctggacgaaagaccaatcattccacacaagacagggaatacttcctgaacaggagagtcatttagccacttaactttggccaatgagttaatgcggacctggattttataatcagtaaaatgtgtgggttggagaagatgatctctgaggtcttcttacctgacactgaaaggaacacagggcaaaacaaaatcagcactggatacagcatcacagggtctgaattcaagagtcagctctgccatttcctgactgtgtaatcatgaagctatactttcccccctatttaaatctccctaagcctcagtttccttggatataaaatggggctaatacagcactttgggaggccaagacgggtggatcaactgaggtcggaagttcgagaccagcctgaccaacatgaagaaaccccgtctctactaaaaatacaaaattagccgggtgtggtggcgcatgcctgtaatcccagctactcaggaagctgaggcaggagaattgcttggaggcagaggttgcagtgagccgagatcacgccattgcaatccagcctgggcaacaagagcgacactctgtctcaaaaaacaaacaaacaaaaaaaacggggctaataacattcacaggttgttgtgcaaaccaaagatcaagaacgtgaacgtgctgtttcaggggaaaaagctgacttgctccaagtgttcgctcgggtaactggaaggtatgacctctgtcacaggatgcggagctgggctactgctgccagcagaagagaaagtcactatccagcagaaggtcaagagggctctcccaccacagtctcttcaatacagaccaaaatacttgacctgctgagctcagcctccttggttttgcctggaggagcaaacagtgacctaccaattagccaagagcttctgtaaagtggggcaaaggaaaggaaaaagaacaaaaaacaggtgacatgtgtgtttgtgggctggaagaaacgaagcagaaccctcagcttcttgccacacatccaggcctctgggaccaagccggggaaccagctgggacctctgggacccaggtccaggcctctgggaccaagctgaggaacacatttgcacgtgcaggcggaggggtatgacgcggggtgggggcgaggtcctgctttccaggccattcagtgttccttcagttctctgagcatagaggacaaggaaggtgggaggagggaggagagggaagagaggggtgaaggagcttgggggaggctgggaaagaaggaggaaaggagaggagggagagcagctcaggaaggcggaggaggaaagccctttgctgagctgagctgagccagacggggttactctcggtcagtgccctccagtccccagctcaggtttcaagatctgtcttctcttttgctcaacatgaaaaggaaccagagcaatcagctgctttagaagtgggtggaggaggcaaatgaaaaaaaaggagaagtagggaaaatcacatcagcatcccaggcccagatggtcttcttcaatggacccctggggtgggggtggggtggggcctcccagcctgctaggagctgtcaactgagcagggcctgggagcgggagacaaattctaactcgtggttttaatcagcctgagcttgtccagccttacaaataagaccttgaaatacttctctgttatacaagggctggtaacaaatacactccagtgtctttatggtatttttttggtgttttgttttcctgatgctctgctgtcttcttgaagaatagacgatgcctgcttcaccaatagctgagcactctctgggaagacctggttgttgggtgctgaggagaaggggtgaggcggggtgatgcagctgctccttcaggtgactccttagagcaggggagagtaggccaggggtgtgtggtacacacagcctaaggacacccatgctgttcatcccggcctgggctttccaacccaggagacacttccttctctacagagaaggctcaccgagggataccaagacatacctgaaaaaactcagttccagaattttccagttatgtggccttgggaaagtcagttaggctctctgagcctccatttttctgtaaatggaggtctagcttcctatacgtgtgggttaagttatcactaatgacactaagtgtgttaagtactctgaatgctgactcacacatactccttgagaaaatacaagctgaaaattaaacatgttcaaaataaatgtggataaagtcatagatgacaagctgtgaagaattcccaagagaaaccaggatatttaggcttatgctccctgaaccttccaaggcattaggaagccagagtcttctctttcaaccaatgggaataccataactttaggaaccacacattccttctagtattttacaaataatataaacttgtattagttcaacaaacttctgaatggctacagtacccaaaatactagtgttgtggttcaaagggataatatttttctcagtgctccttgaaggcaggagctagcctataacaaaagaggcgctgtgtaacaaaatccctgcccttgcattctaagaggagatggccagagggtcgggtgagcagagcggtgagcctccaaccctctctgccactccagaatcagtcagcactggaatcaggggtggaacgagacattactcatcttcccccagattactttgctagtaaggcaatagcacacctgctatgatttgaacgtgtcccccctcaaagttcatacattgaaacttcatcaccaatgtgacagtattaagaggcagggcctttaaggggtgattaagttatgtgagcagtgccctcaccaatagcattagggcccctcacagataccatgagtttcatgtgcgtctgtgtgaagagaccaccaaacaggctttgtgtgagcaataaagctgtttttttcacctggctgcaggtgggctgagtccgaaaagagagtcagcaaagggagataggggtggggccgttttataggatttgggaaggtaatggaaaattacagtcaaagggggttgttctctggtgggcaggggcagggggtcacaaggtgctcagtgggggagcttctgagccaggagaaggaaattcacagggttaatcactcagttaaggtggggcaggaacaaatcacaatggtggaacgtcatcagttaaggcgaggcagggccttttcacttcttttgtgattcttcagttacttcaggccatctgggcgtatatgtgcaagtcacaggggatgcgatggcttggcttgggcttagaggcctgacaatgaggacccctataaaagggcttgagggagaggcttcagtcccttctgccagttgaggaaatggcgtttgtcccctcctaaggatgcagcaacaaggcaccatcttagaagcagagagcagccctcaccagacaccaaacctgccaacaccttgattttggatttcccagcctccagaactgtgagaagtaaatttctattgtgtataaattactcagtctcgagaattttcttctagcagcagaaacagaataagacaatacccatgtcttactgagaagagggaaggtgggagaagttactggaagtccctagaatgagggttgaagaccctgaatggtaacaattcccccaaagagccagtgcagccccagagggaaaggatgtcctggtcacactggccagggcgtggaagggcacagtcagcctggctttgaagctcagaaggaaatggaagataacactaagacataacattgacccaaatgaattttggacctgaacagaatgagaagaagaaacaaagaaccaacatcagaaaaagcaagaagatagctgagatgaaaactctacctgaagaccagagaggcagaaaaatgagagaggacagctggaagacaaaaggagtgaaaagaaggtaagagataggaagtatgaagaaacagagtccagaaacaggaaagactacatcaaacagaaggggaagagagaaaaagaaaagagagtttgaggcattcagttcccaaggatgagctggtctctcactgaaaaaagggaccagacacttcaaacaccacacaacatgggactagaatcagcctgcagggccctgagaagtccaggcacaaaaagaacggaaaaagatgagtttacaagttggggatgagattcttcctaaggctggtctagggaagaattaacatacacaatgtataaatagtttaatttttttctaacttttaaaattaacaaaatttattaagggacatagtagtgctttgtgggcacagaaaagtgactcatatttaccaagcattaggcacactattagcattattttccagaatctttaagaacagcctataaagaaacgtattattattcccatttttcaaatgaggaaacagatctggagaatatcttgctcagggtcatagaacaaacaagtggtaaatttgaacccaaacagctttgactgcaaagctttggttctttccactatatcagcaatttaatgagatgttttaaaaatgcttcatcgtgatattggcctcaaaagctggggatggcacctatgcttcctaatgttggaataagcaacatggcagcatagtgtggggagaaaatgctaagcctaggagtcagaccccgattcaacgtacaactttactctttaatcttggacaacagacattaccctttcgagcctcggtttcctcatcaatgaaatggagataataataccaatttgcccctgctagtgctgtttgaagccttcaatgtaataatatatgaaaaatgtaaaatggtatcattatccggtgcaacttagtctgttgaatagtgtcgcactgagattgccttttggtgcctcaatgcaacagtgacaagaggaccagaaatgggaaagctttcaatgagaaacaaactggactcccaaattgctctttgccacccacagaataaataaaccttatgctggaaaagcaggagacacgcaacactgttcttgatgttaacaattcaaaactttttaaaggcagtctgatatttgtggggatacacactattctgtaatcgaatgcaattgtgttttctattcttgtctgagtaaagctgatctttgatttgatttagttcaagtaatatttcaacattgcagtgcagcgttgctccccacccccacctgcttacagcccagctgggcccaggcccttgccctggatggaaatcaaagacctggtttctgagatgcagcctggctttgacaggtctgggaaaactcatggtagtggaaaggtttccaaatataaaattctaaggcctcaaatcaaaacttttgacaagtgcatacatacagaacgtgaattgcaatcacctaaagatttcaaagaatttccattttgatgacataatgttgacacatgtatcaccagatctcccaacaagatgacacactggggttccacaaggacagaaaatatagtctgaggctgtaacctcaactttagcagctgcctgaatgggtgagggggttcagacagaaaatgagaagtggctgtgagtcacaggatgttctttctagatgggccttgggaaacattccatcggtgcctgaagccaggaagtggagtgaatctggcatttctttcagaagccctcttgtctcctttctcatcccagccagcccatgccccatgtcctgtgactttagggaagcttctggctactcagagctgctctctttaggatataacaacaacagagcacgagaaactggaattctggtcctattactgccccttgccagctgtgctttcttaggcaagttacttggcctctctgaacttcggctccttcatgtgtgtatcccctgcattttatgatgattgtaaaaatgcagtgagcttaagaacaagcctggtacctatgctgggccaggcactgtactaagtgcttccccttattcgtccattaatttgccacaatagtcctgagggaggtactattgttattccatttgaggaaactgaggcacagagatgtatggaattatccaaggttacacagctgataagcatcaagccaagatttgaacctaggccatctggctgccaagtctgttctcttaacacgaaggtatatttcccagggaatatttacaagatgttaattttctacccacttccctcaactccctgccacagccaactatcttgccatgtcaccaaagccaccctgctccctggagctcacgtctttttgattttcaaaaatcaaaccagaatcaaaggtccaccccactgagtccttagtactatcagtaaatctgacagccagagaggcatgacccttttccctaagtaaaatccagtataaccctggggactaatttccaaaaagattagtcagagccatatcagaaaggccaaacaggctgggcatggtggctcacacctgtaatcccagcactttgggaggccaacgcacctgaagtcaagagttcaacatggcaaacatggtcaggagttcaaagatggtcaggagttcaaatggccaacatggcaaaaccccgtctctactaaaaaatacaaaaattagccaggcctggtggtaagtgcctgtaatcccagctattcgggaggctgaggcaggaagaattgtttgaacccgggaggcagaggttgcagtgaaccaagatcgtgccgctccactcactccagcctgggcaacagagtaagactccgtctcaaaacaaaaacaaaaacaaacaaacaaacaaaaaaacagagccgggcgcagtggctcatgcctgtaatctcaacactttgggaggctgaggcaggtggatcaacaggtcaggagttcgagaccagcctgaccaacatggtaaaaccccatctctactgaaaatacaaaaattagcagggcagccagccgccccgtccgggagggaggtggggggcagcccccgcccggccagccgccccgtccgggagggaggtgggggccagcccccgcccggccagccaccccgtccgggagggaggtggggggcagcccccgcccggccagccgccccgtccgggaggtggggggcgcctctgcccggccgccccttctgggaagtgaggagcccctctacccggccgccgccccatctgggaggtgtacccagcagctcattgagaatgggccatgatgacaatggcagttttgtcgaatagaaaagggggaaatgtggggaaaagatagagaaatcagattgttgctgtgtctgtgtagaaagaagtagacataggagattccattttgttctgtactaagaaaaattcttctgccttgaaaaaaaataaataaataaaaattaaaaaattagcagggtgttgtggcatgcgcctgtaatcccagcttctcaggaggctgaggcaggagaatcgcttgaatccaggaggcggtggtcgcagtgagccgagatcacaccactacactccatgcactccatcctgggcaacagagtgagactccatctcaaaaaaaaaaaaaaaaaagaaaggcctaacaagccagattcatgccatgaacataagggaagtggcagctgagccactgactccacacaaaagtgcagctgaagggagagagaaactccatactcagtcgggatggcaggctgctgccccggatctctctgccagtcctgtccctttccgccccttgacctcaacaaggtgatatgtcctccaaagggttcatctccagcacagtgacaaaatgcccaaagatatttcttatcttttcctggcaaaatccttataagcttcagagagctccacaaccttaaaaaaaaaaggtatttcagaatcccccaagtcaggagccaaagtaggccagttgcagccctagtcctcactggagaaggcaagataaggaactccaggccatggcagagaaccatgtaggctgtgcactattcaactcaaatcatcacagttctcatggagagtgccattcacagggaccgcggtgtgtatgtacccccagaaacgtgtgacttgtcagccctaggaacagcgtgaaagccatccctacccgttctaggcatattcagcaggtctagaaaatgatctttgcggtcccacaaaacacttactgggcttctagagttaaaaggtactggtgtggccataactttggacagggcaagacacctgcagagctaagatcttgcttgactcagaagttgctgagttccatgtacagtagagagaggctacctggcttccagccacaccatagaatccacagccctgcccacaccacttgggtcatgccagctaaaaaaagatggagaacttccccagatgccccacaagtctaggaattgtttccagaccagcataagcaatggcaaggctgagggactggctatgggggatgtagcagtggacaagagcctcgctaagtgtggaaacggggaacagagggaagctggggaacttctcagaggggatgtgaggacgccctatcccgggaaggcaagaggcttcagctccagcatatgcacttcccaactatgagccaagtaggacgtcccaaccactgcaaggaggtacctgctcaagaggggactgtgtccacagtgcaacctggagttgaatgagagtctgtagtccagatttcagaatatgggagaggagcaggccttgggaccaagtggatgcctgagcggaaatgttcagtaggaagcaggctaatgaacccattaggtatcactaagcaatacattttaagtagctgaaaaggaaatacacagtaaaaataagacagcaaagggtcacctccttctcccacccagtcatgattctcagcagcaacaaccccatcagaaaggccttagcttgggccagtctgcttctcagcccacctaagaatgccagattcaccagagagggggcacagcgatggcaggtggcttggagtggggagtgaggatgactccagggcaaggaaggaagctttggaaggggagcagtgcttcttgccccaccatgccctggcaggagcagatgcaggtgggggcctgaggctgacacaagttggtagggggctctctttttaaaacaagatagtatttttaaaaaatcttacttttgcaaaccttacaaaaacataccactgtgtaaacatattgctaagacccccagagaggaccttgaaaggagctatgaaaaataaagtaaatatttttagcttcccagtaaatctactttaggcctctgggttcatggctgcccttccagaaagctctggggggcaattttgtgaaagaaagaaggccaagactttttgaagaacttctgtcatcattattattcgtaggctctgttgacctgggctaacacaagggaataaactatataatacaattttttaaagcacttttacttgaccctcacaataccctgtgaagtacaggtattttattttctcccaccttcattccacaaagattcactaatggctcaccatgcacccactactgtgctggggcttaggatggaaccatgagcaaggcgcccaccttgccctcaaggggctatagtctagcagacagcccacatccttgggtagtcccaggtgatcccccatccaagtactgaccaagtttctgggctgaagcattttctggttgtttcaccaaagaaagttccaatttcaaggcaaagaaacttaaggcccagagaggccgaacaagtggcaaaggccaaacagtcagccaggaacagaaggggaagcaaagcaactcgaatttattatgtgtcaactgtgggctatgagcttcactatcagtcatccacagacatcatctaatttaatgctcagtgaccctcagggcagctaatcttcaggtaaactctgggccagaaagaatcaacacatgcccaaagttcacacttcatgagggatgcagcatggatttcttcccaaaatgaatcttaatacaaaaccccacactcactcttataccaatgttttccaatcttcaatcatttacaaactactctcacaagttttaccatattcacagaaaatgtttcttttgaattaactttaattatatttttcctgttgaacatcctcctaagcaataatttccatgaaattgcaattggatgtgggttaaaattaaaagttctcatccacgtactgcctaaaatcatcccagataccacacaaaactcacccagagaaacacttatctctgccagtctgtatctcacagagacaaaatacagacatgtcactttccctagggtttctgaggatttatccaatttttacatctgagttgcagtcaccataggtatttaagatgaatgaatgcttctcacactgccttgcaaacattaattaatttagccaccacaccactcaacttgtgtgcctgtactctggtttaggaagaaaataataaaatgtctaaaaagttccagtgatgagaaaagtgggtgaggcaccctgtaagacttcctccttggatttcttattaggatgatttcaaggataattaaaagatttgtccacggcttaattcctgaaatgggagttcttcccagttgaaagattattaaaacagcacaatagagcactgtagaaggagaactgcctggagcagcaggggggtttagccgtgatttattcccagaatatcccttctgtggttgtgtagacttgggacagtcacttcccccttctgggtcagattcttctctagaatagaaattccatatggagaggggccatatttgttttggacacctctgtgtctcggcacttagaacagtgattcgcatataggagacgctcaatatataagggttgaatgacagaatcaactaatttatctataaatgaactaactggtctctaaggtctcttccaataagtggaaataaaatgatgctctagccaaggaaatcatgagagtatttgagtagagatccccatatctacaaatcacctgtgtatagtccagcgaatttagcagatgcaagctgaagggaagaacaagataaacttcccaactggatcacagaagcaggagcccagtggcccagcactgattacaatataggcctgagtggtagtgtctacagaatcaagaatcacttgaacccaggaggcagaggctgcagtgagccaagattgcgccactgcactccagcctggtgacagagcgaggctctgtcttaaaaaaaaaaaagaaagaaaagaaaagaaaaaggaaattagtggtgttttaaggcagtctcctccactaagatcagaaagtctgcttgacaacttacccccatcagccagtctatttcaactgctgcataaattgcaaggcagaagaacaaggccaggtgctcagaaatgcatcactgtcttagaagaatactggctctcatttattgggaatctactatgtgccagatactacattaggttttatagtttacatttcaagttagctgctattttatagttgaggaaaaaagggtctacaggggtggttagtctccactggactgatccaagcttcaagtctttgtcccacagttatcgatgactggaatgaggccaaagagagttgtttatcacatctctagatgacgagaaaggagtatcagatataatacatggcaaaatcagaatctaaaatggttttgggaggataggatagcatagggaatctaaacatgtaaaacagaaaaaagacatttttccctttagttcaaaaagccaacaatacaacaaagaaatggagaacacgtaacttgcaattctgcctatttaaaataatcacaattttgtttgagtgcacatggaatatgagtcaacaaggtgacgtgaatgccaaaatgcctaatacaatctcagactgcattaacggaaatgtagcactcagaacaagggaggcaaaaatcccttcctcctctgtgccagaatactttcataatttccagtaaacttcaagaagcacacagacatactgaaacacaaccagaggagaggcagaaatggggaggaaaaacattccataagaggaaaggaggccattttgcctaaaaaatcatggactttgggaaaacagggaaagaaaaacatgagagctgtcttcgactatttcaaggaaaacagaattagacttgttctctagaaagcataacagggtggtgaatattttctaacaattagagctgtcaacacccagaatgggctacttagtgagtggtagatccccgccctgggaaggtgggtgtgtggtaaaggaggtgaatgaggacaaagctccaaaccagatcagcttcaaggatcctcccagccctgggagagacagcacaggagggccaagctcatcatgctgtgatggggtgtcagtgcagataaacacaggtctctaagtggggatccatactgacatatgccagtctcagcttctctccgaaattgacaagagtgctattcgcaatcagcaaaaagttggccaggtgcagtggctcatgcctgtcatcccagcccttcgggaggctaaggcaggaggatcacttgagcccaggaattcgaggctgcagtgagctcagtgagctctaagggcaccactgcactctagcctgggtaacagaaagagaccctgtctctaaaaaaaaaaaaaactaaaaataaatttaaacaaataaaataagtaaataaaaacaaaatcagtaaaaagttactgatttcctgtaggaaaaggcagtgtttctgtgcatttccccctatactgaagcctgttttgtgctgcaagacaagcaaagaaagaaagaatttaagaaacagctgcaaggcagaaaaggggacatactgcgtgaacagagagatgtaaaacaagcactgacataataatacactcaaaatctaagggaccttctctcctcagagctctgcacactactgtagggtttttagatacagatttggcttcttcaccacttaactcatgtctccagcttctcaaagaaggccaggcatggtggctcatgcctgtaatcccagcactttggaaggcctaggcgggcagatcacgaggttaggagatcgagaccatcctggccaacatggtgaaatctcatctctactaaaaatacaaaaattagttgggcatggtggagcatgcctatagtcccagctactcaggaggctgaggcaggagaatcgcttgaacccaggaggcagaggctgcagtgagccaagactgcgccactgcactccagcctggtgacagagcgaggctctgtcttaaaagaaaagaaaagaaaagaaaaaggaaattagtgttgttttaaggcagtctcctccactaagatcagaaagtctgcttgacaacttacccccatcagccagtctatttcaactgctgcataaattgcaaggcagaagaacaaggccaggtgctcagaaatgcatcactgtcttagaaagaatactggctctcatttattgggaatctactatgtgccagatactacattaggttttatagtttacatttcaagttagctgctattttatagttgaggaaagtaaggctgaggggttaaatggcttggttgagatgtcaccactccaaaaaaaatcataattcatattcactaagtgcttcctatgtgccaaatactgtttttaagcaattacatgttttatctcattaacaggtaagaagaagtggctgaaagggtgctaactaacctattcacaaagtcatgcagccacagggtaatgtatgctagcactttcctctgcaccacgctgtctcttgctacagaggtaaaggaaatatccccagctgtgcctctggtcaatcagcaggggctctccagtaaataaggaaggactgaggctttgatcaggggttgttgctacctttctgtctcctgcaccagaagaaacatccatgtgcaagaccaggacctgcaggtcaaggaaacagcatctcgatggcctggctgcacagccaggagttgtctaagtggacactccaagcacagccatacctctctctgctgtgaagcagcacctcctccatgccacccctaagacagctttgcttccctttgtcatcaggtcccacattgcccattgcctcttttactgcccaaggaaagcacagttctgtagccttaaaaaaaaaaaaaaaaaaaaaaaaaaaaactcaaatctgagtctggtttaaactctagaactttatcatttcttcttttgccaaatagaaaacaaactggtaggcctttcagcaaaggccagccaactccatccctccctaaacaccaaacggaataaaaagcacttccctggagcagtggcagccattggtccatgatggggaggagtaatttatcactgacattgtttagaaccaccggcgcatgataataataaaatgcagaccagcttttatcggcttcattattgcttctacattctctacagaccatgcacatgccattactggctgcactcagccagctgctcccaccagcctctgtccccttgccaggccactgcctggaaggctgctctgatgctatggcagccaatgcctcagtcagaaaatgcccactccccagatacctcctgggtggcacacaagaaattgcctggatacttaccagatcagaggtaaagatttcactttttaaagacaacaagttcaaatgcccatcagactaattgaaatgattaggggaaaatgaattgcattctctttttagaaagaagtgcttaactttcacttatccatatcaacttacaactgtaattgctcttatatgcacagaaatactctgtctataaatccattcactgcaaccatatggccaacttcagaaaaaatgcagttggcagcaatctgcacccctagctgtccctaaggccaagtctgtagtattcttccctggggacttttcttctgtcttcccagagaagattagtacatcactgtctgtggcaaccagctcccctagtttcttcaccaatgcctcctggagaggggccccacaggccagccaccaaggagaaaaaccccttggggaagatctaatgggaacaagccccagacacctgggctactctctttccctggtgcaggtcaatttccaattataaacggatgcagagaaggtttttacttacttgagctggatttcttgatctgctgtaatgttctcagaactttgcgcatgtccttcatgctggtgtctttctggctgtataaaagaagcctccgagcatctgagaacaggcgagccacactgtaaagggtgcaagaaaaggcgaaaggctttagctaggccaactgcctctgctgctttacagaagtgactgccaagtgcatagaactcagcctggctcccaggtcctccacaggctggccctaacccactcccatggctccccacacccagctccattcatcaccatgttccctcccccacccatcatcactgccccaaatgcctttctccattggtctacacacccaaatcttaccacccttcaaggcccggctcatcatgcatgtgcacacacatgcatgcacacacatgcccccagggccaacttatccatgaaccacagtaggctcagtggcctgggcctgggatactcttaagggcatattagaatgttttaatttattttaaaagcagaattaaaagttaatacactaaaaatgtatgaataatcatgaatctggtctggattatattcatctttataccaatgcagtcatgaaatataatttttaatatttgtgtatggaaggggcccatggaggctacaaagccagtctagggtccatgaacatgacagtgtggccctgcgtgccgcagctgcagcttcctcaggattgtcctgagccacatcccatcgtccttactccgtcctaactcacatcacggtcctgtgcatttgaagaatcctcaatgtctcatttgggggacacttattatgcccatacttatgtccaggcactgaagccaggagccaggaatacaaagggaaggggcagcatcctgctttgctcagggagctcacactcaggggagaaagacctgcagacattgtagtctgatggggcagtgacagaggtgagagaggtgacctgatgcagagaagacagaactcccctagccttggctgtcagcttcttatgggcaaggacccttccagcatgcatctttgtgccagcccctaccctctagctcctagagccagcccattcagatgcacgtctgctgcatgatatcattaacaacatatagtatattccaaaatagctagcagacaggacttgaaatgttcacaacatacagaaatgataaatactcgaggtgatggataccccaaataccccaaattctccaaaattctcccttccctcattctgcagactctatcacacaagcatttacaaaaacaacttcacttaaatccagccattcaaaattctccagaggacaagaaaggaaggaaaaggattaactgacaagtttggaaagaaaacctgatctgatacttacatggatttgttaaagtttccaacaactccgggagcctccccaggagtcgggtaacggaaacaggggttgttggcattacagataatcccctgaacccaaggaagtgttcctgcagagggcatggctttatttggaaaatggcctgttgaaatcgaggagtagaaaaacacagggagaaacattaattccctgaagcgattttgaggctccatttatacaatgcttcatgccaagtctgtccgtcccattccccacatcccagagacctgtctcttctgaataaaactgactctcaggtggaaacttggcctcacatgccattcttaatctagtggacatcatctgtagaatggggttcatgataccagcgttggagaagtgatgagaggggtcctaagcagaaagtccctggcatccttagttcctctttgacagccagcctcagctctcagacatagaggggacttggggatgccctaagcctattttttcatactctaaggaggtaactacggtaagatgaagtgggctgggcacagtggctcgcgcctgtaatcccagcactttgggaggccaaggtgggcggatcacctgaggtcaggagttcaagaccaccctggccaacatggcgaaaccctgtctctactaagcatacaaaaattcgatgggcttggtggcaggcgcctgtaatcccaggtactctggaggctgaggcaggagaatcgcttgaactcaggagggggaggttgcagtgagccaagatcgcgccatttcactccagcctgggcgacaagagcgaaactccatttcaaaaaaataaaaataaataaaataagataaagtgactgacaaagaacactcgcaaagtcagctggcgtgactgggagtagaacccccatctccatggtcccaatccaagcctcttcctcacacctgcggttagattggaatttagctcatctcaaacccctctggtactctcctccatctgccaaacatttgtcagtttcacctcctctgccagctacaaagctcctcaagggcacctgaaaaacacacaggcttggggtctgatgtcatctgtgaagcttcgggggttttgttgttattattgttgttttgtcactaattaaaacaatgaggccccatgcactaggtcatcctcttgctctcctctttctttcttacaatgagcttcttaccaaaaggatgatgggacatatttgggcttggtcctaggattcggtctggcacagtttggtttgcggccgtaatacatggatgctgcttatgaggatcaagattaataggccctggacgaggggctcttaacccaaggacctgttcaggtatggacagaaaggccagagctcctgcttctatcatattctcagggctatttgtgaccccaaaagagttcacagttatcaagaaccacagctctaggtggtgaagaacaagtagcttcacaggctttggagtcaaaccaattggaattcacatccagtccctgcagcttgctaagcagtgactttagccaagtcattgaccccataccctcagttttctcatctgtaaaatggtgataaaagtacaattaacttcacagagctgtggtgagcatcgcatgagaccttgcaggcaaagcgtttttgcagagtgcctggtgtaggacaaagactcaacaaatgagcctatgaggattttccaggcactgtgggagtgaatctaccccagcacttactctgctgttgcccagcaggaacactccttccatctcacagctaccacctccctccaaagtgggaaccttgttttattcatctttttattttcatgcaaatgggctgagaagttaatccaaagtcaggacttgctgcactttgcatttcaatatagggtctttctttcttttctatccatactccaaccagagaggcaacacccaaagcaaggatgtgataagatctgatcactgtggccaccctctgcagggactctggcctattgaacatttacacagttaatctccctatcttcctgttaatagttcaaggaaaaccaaacaaggccccttgcctaagtcagctgctcttcattcagggagatttatgtaacccaaccaaatactcaaaggaccaaaagattctcccctttcaatgccaggagacactggcactgtagacagactggcataggtgaaaagcagcacagggcagtgatggtgaaggtatttcaggttatcccttagcaggggtggcaaaggcccttccttgtacgttgtgccccatcctatttgcaaacaaaagtaggatcaggactaggcagtgggtgtacaggaagacaagtaaataatataatgggctctcaggacccagggaagtttttaagaccttgataactctggtttgaactggggaagatttacagagaatttcaaaccagtcctttgttcctagggacaagacacctctccaagtttcaccttaacttttaactctgctcttccaactaggtccctggagggtgatgagaaaagaaggtaaggttgcaagaagtgcatggatatggccgggcatggtggctcatgcctgtaatcccagcactttgggaggctgaggcgggcgaatcacctgaggccaggagttcgagaccagtgtggtcaacatggcaaaaccctgtctctactaaaaatacaaaaattagccggacgtggtggcacatgcctgtagtctcagctatttgggaggctgaggcaggaggctcactggaacctgggaggcagacattgtagtgagcggagattgcactactgcactccagtctgggcaacagagcaagaccatctcaaaacaaacaaacaaagaagtgcatagatgtaaggaaaagtctcatttaccatcagtatatacaagaatttcagaacttttctgaaaatttatgatctggagtcagaggaatctaggttaaaactcaacaatctgcccaagatcacaacctcggtgaagggcagaggcaggatacaaacaaaccccaacttgtctgatgccgaagacatttgctatttccactacaccatcttgcctgcttgtaatcattccagaaaatcattcgtctagtagatgaaaaaactgagtttgcccttgaaacttatacttcagtggtgcttggcataatgcttaaataaaatctaaaatgtatttgctcatcaatcaaaaaaatctctttggggttccaaaagagaaaacagaattatctcacaggcatataaattgcatataaatttcagtttatgcttttttttttttttttttttttgagacagagtctcactctgttgcccaggctggagtgcaatggcgcaatctcggctcactgcaacctcagcctcgcaggttgaagcaattctcctgcctcagcctccccagtagctgggattacaggtgtgcgccaccacgcctggctaatttttgtatttttagtagagacgaggttccaccgtgttggccaggctggtttcaaactcctgacctcaagtgatccacccaccttgacttcccactgtgcctggcccgctcttttcttttttgatgaaatcaggaaatcacgtctcagaaaatgtttcttgaggggtgtgtgtgtgtgtgtgtgtgtgtgtgtgtgtttaatatgactatgtgtgatgtgcattagaaaatcagcaagtaaataactgttgctatatattgtgagaaagatgggaccaggccaagaaacacaattaaaaggtggccctggccccactgctttcctggaagaacagtatctcataagcttgtgggtctcgtaggggtatggactgagctgcttagtggtaggaaaaatcactagggcagtgaaactgaagtcccagctacatttcccagctacgtaaatgttgatcctttagatctggccatttctgcagtgtcaatccacccactgagcccagccctaagagaaagactgtgattgtaagatgatacactgacaataataatatgaggtaggtattactattctctgtttaaaagaaacttaaatcacttgtccaaggtcatatgcttagtgaatgctgacaccagaattcatacccagataacctgacatctggagcctgtgttgttagccactactgtattttctatgctcactgtaaaggctgttatcaaaatacatgattgacagatgatctgagttctattcaaggttgttatgagaataaaataaaataatattagtaaaactgagaagttctacacaaatgctgcttaaaattctgtgttccatgatttgcaatgtgtgattaagacatcatgcatatggaaaagactaggtgttaaggcattatcttaaatgtgcttttaatcaccactttctaaaattatcagtaaggttattctattttcatgatttaaaatgtgtaaaagagatgttgtctactgttataattacaattatcaccattcactaggactgaaaacagtctcctgagttcatgccttatcaacaaattagaagcctaggttttctgatccaaagcatgtgtgatgtttcccaaagacagcatctttggaaaagtccaatttagcccacgttaattgcctggattttccctgccattggtgagtctcaggcaacatccacagttacttacattcatgttgttcatagggtgggtagctcagccgaacagagatcaggatcaggaagataaatagaggccaggccacttccagcagcagctgacactgagtgggaaataagatagaacactgtaaatttaaaaataatatggatatccaatgccactgggatctgggaaatccacagacaacttcatttactaattaatcaacttctccagtctctcccaccactctctaagctttaacagaactgtttggagtcccaaccttttaacataccattccatatacctctgtgtcttcccttaggtaagggaagatgcttcctatcgtgctttatctggttcacttctattcattcttcaggattcatcgtggcataatttcctttactaaaatctcagcctgagctagaagccctcctcctgtgctactccagtaacccaggcacactcctcctgtagcattttcctggagctcctgaaatcatctgtttctgttgctggcttcctcagcacattgagcactctgaaagcaggcacccatctgtctgcattcccagccttagcatagtgccaggtatgtggtgactatgttgagaggagaggaccaggccaacctgctgtgctaaatacacacaacccttgctcctctaattgcacacaaagctgctccctatggggcagagaagagggctctcaaagacaatgaaaattcacacatagttccatattgacctgtgtgcactcaggactgtaaagagagagtgcaaagtccttccccatctgtccaggtctggtcatcatcttctccgatgagttaaaaagatcattgaacttctaaacaagcatgatacactggttaaaacaatgaggtttctccaaaggaaaaccctgcctcagtgagttaccaggcgataaattagcagacggacaagatggaaatcactagacacaatataattgagccagtagtgttcagacaactagttacactgcctgaagtctatcacctctcccattcctttcatttctatattccaacgttgtaatcaagataaacaccaaagagcccaaaagagtcacagggccttgtgtttcagagtaattataacttacaactgtggcttcagagtcacacagccaagataatactggtataaaatccctttttgtcttctttttttaaaaaaagcaaaagattgggctgggcacagtggctcatgcctgtaatcccagcactttgggaggccaaggccggtggatcagctgaggtcaggaattcgagaccagcctggccaacatggtgaaaccctgtctctactgaaaatacaaaaaagtagctgggcatagtggtgggtgcatggaatcccaggtacttgggaggctgaggcaagagaatcgcttgaacccaggaggcagaggttgcggtgagctgagattgtgccactgtactccagctggggcaacagagagagactccgtctcaaaaacaaacaaaaaaaaaaagcaaagatttttttttttgagacagggtcttgctccatcgtccaggcggtacgatccggagatcatagctcactggaacgtcaaactcttgggttcaagtgatcctctcccctagggctcccaaactgctgggattacaggcgtgagccactgcactgagccaaagcagaaattttttcttgatcttcaagtccttatatttttatggaaaatttgaaaataaaaaaatacagaaaagtttaaaaaggtaaatataaatcaccttaatcctacctcccagagacaatccctagtaaactgaagtaacaatggatctctgttaacatcttttgtcttttttcatgcatacataaataatattttttctctacaatattgagactatgcagcatatatacttttgtattctgttttttcatttaacatcatactgggagagcatttcccatgacataaaatataatcttaaaacatgtcctgtaatgtctacttgatattccactctatgaatagatcataattgaacctttctgctaggtgctcgtgcttcagattgttttgggtgtttttatttatttatttatttgttgttttatttctgatatttttaaaaaactgttttttatttccaaagacctttgatatggttctacattaaactcttttaaaaaatctttttggcgatggatgcagtggctcatgcctgtaatcactttgtgaggccaaggcaggcggatcacctgaggtcaggagttggagaccagcctggccaacatggtgaaaccccatctctactaaaaatacaaaattttagtgaaacgctgtgtctactaaaaatacaaaaattagatgggcatgggggtgtatgcctgtaatcccagctacttgggaggccaaggcaagagaatcacttgaacccaggaggctaaggcaggagaatcactcgaacccagaaggcctaggttgcagtgagccgagatcactgcatgatcacgccactgcatgatcagagtgagactgggcagaaggaaatacagcaagataatgacagtggatgtactaggatgataagaacgtaggtgtggctggcgcagtggctcctgcctataatcccagaactttgcgaggccaaggcaggcggatcacctgaggtcaggagtttgagaccagcctggccaacatggtgaaaccccatctctactaaaaatacaaaattagccgggcgtggtggtgcatgcctgtactcccagctacttgggaggctgaggcaggagaatcacttaaacctgggaagcggaggttgctgtgagctgagatcacgccactgcactccggcctgggcgacagagcaagactctgtctcttaaaaaaaaaaaaaaaaaaaaaaaaaaaaaagtgatgtttttaatactttcctgtcttttctaaattttccacaatgagcatgtataaattatctcatggaacaaaaaaacactgttaccataaaactatcaagaatagtttgcatagacggcacaacagaatgaaaaataaaggcaaatggatccctctctggaagaaagcatgctgacagtggagtactcaagaccaaagatggggctggtcttgctaatatttctgtaaataatcccaaagaggcaacatactcaaatttccaagcttgggaatgacattcagccttttctttttttttaatagcaaacacctttttattctgtagcttattttttaagttgagatatacatatatatcacattgcatatcttaaagatatacaatttttatttgtcaattatacctcaataaagctgggggtgggggtggggaagaaagcaattttctttctgccaaagaacaaaaccatgactctatgaaaatgaacttttctcccagctgagccaggactccctcatctcaatttccccaggtactttgtgtctgtatcagcacttggtacaccagggaccctatttatatataagcttctcccttagggtcactttcttcttactaagcctaccacatgataatggctttaaaaatgtttggtgagtaaatgagctggtttaaaagataatgaacacggaaatataaatcagttgagccctttgggaaagcaatgttaacaatacgtattcaagagtcatgtttatcccatttgcccaattactattcctggaaattcatcctaggaaactgaacttaagatatcaaaaagctatatgcataaagttattcattcattgaaacattataattgcaaaatattggaaacaacttaattgcatagcaatagggaaatgattcaattatggtacatgtactcaacaatatatcatgccatcatcagaataatgtttatgaaacacagaaatcattagccatgtaatattaagtgaaaaaagcagaatacaaaattatatgccattccaagcttgtagctgaataaaatcacttataaatattaacaaagacaggaatacaactttccttttaaatggcatgactgtaaataaatttagaaaatacttatgaggccgggcgtggtggctcacacctgtaatcccagcactttgggaggctgaggtgggttgatcatgaggtcaggagttcaagaccagcctggtcaaaagggtgaaaccccatctctactgaaaatacaaaaaaatagctgggcatggtggcgggagcctgtaatcccagctactcgggaggctgaggcaggagaactgtttgaacccaggagacagaggttggggtgagccaagatcgctccattgcactccagcctgggcaacagagtgagacttcacctcaaaaaaaaaaaaaaaaaaaaaaaaaaaaaaagaaaagaaaatactaatgaaattaggggaaaaaaatgaagctaaacaaagagtatgagtaagataaatagccatcagccttgaagctctgaaactaccatttgtactttaaggataaatagtagctactgtttatttagggcccaatatgtacaaggcacattttatattaattacttaatttaatcctcaggacaaccctgtgagataggaaacattattgtcttgattttatatgtagcaaggctaaggctggaggaagggtaaatcacagagatagtcagtagcggggttgagatgagcagccaattctacccaactcaggaggccacatgacattctatttgacaccacgggtgactcaggtaggaaatggccccactaggtggaatggtctagaaatatcaacaggatccagagaggtaaaattaattcacagcttgtagatttataatacttacagccaatattgggcagctactgtgtactcaagacgttttgtgtatctcatctccagtatttaattcataataaccctgtgaggtaggttgtatcattaccgttttagaagtgaagaaactgaggtttgaacaagttacgagccataagaaactgcaccaatgtttgaacccagatctactgacacttaagtgtgtgcttttgtacccatcatgctgccatcacaaagctatgtttaggacatataccttttaagatatgccacttaaaagaaacctagcacttgccagccctgctgagcactgatctgacccaattaatcaaggcttatgttcctggatatctctgcagcccccatatctaggatcctgtagggcagcagatgctcaaaatatgttggttgactgaaaaaaatgaatggatcttccccatggcaactgacagcaaagggcaaacaaaaaatcttacaagccatttggagcagctgaagctggtgagtgtaagcagatcaggaaaagaggttaaaaaaaattgatgatgataataataatgaaaggtcttactatgtaccagggttgtgagtgctttatacacattaactcatttaatcatcaaacaatccaattagtactcttgttatacacattttacagaagaggaagctgagattcaaagagttaatacactgcccaatggtccaagattggcaaatggcagagccaagattcaaagccactctgactgaagggctccttctcttcgccattatggaccccaacctccttatgcactttgccttcacttaccagagcatacagacacctgctctctcaaagcccttgctgagctgggagactagcatgtatgagtgaattaaagagactgtctgcaaagttcacaccacctgagccagagaactcatgagagacaaaatttaatctttgcccttttatcttggacctctaaaattcttcccatcattgaacctagaactcaccttccaaacccaggggaatgttccaggtatttcttttcataatagcctccctctagaaaccaaagttgacttctgccaggatatgccattatggctacactcattaataaaatcagatttctcctccttctctaagcttagcacttttcctaaacataaaccctcataaatagcttggaaatgaagttgatcctttaccattataaattcctacagaaaactcttctaaatcttgctttggtgcctacccacccaaccccacacctccccatggggtgggaagatgggaagaaacattgtttttaaaaggcgtttctcaccaaagtcaaagctgctccaagagtaccgaagcaccactttgcacttcccatcttgctatttcaacatggggataatatgagcaggcactgctagagcagattttcttgatagtgaccctactgacatttggggccagataggtgttgtgagagactctcctatgaattctacgaagttcagcagcatccctgacctcaacctctaaatatcagcacatacattcccaggattgtgacaaccaaaaatatctccagatgttatgtccctggtggaagggtgagggtggggtggggtagggggataaccggccccggtcgagaaccactgctctagagttattatgagaattaaatgtatttcacatagaaggcttagcacagagtctagtacttatcatcatgttattcaatatgcatcaaaccactcttgaatcatcattcatagttatgccaacatctcccacactacagatgttcactgtccacttgattattcatgcctgacttttgctgctggctgccgaagttcatagaccacaatccagtcactctgtgaacccatttccctccctagcctgaggacacagtcacggtgctcttaaattcttgagatttagccacgttaattcaaggttagggcagcgcaagggccatgtacaaagaacagagaaaactagcagaataaaattgggccttaggcaagaggcttctgaatcatggtagccaaaataatgcactccgcgctgaaaaatgaagtcgctatttcttagtattgagagattcttgagaatataatgggggataaaaaaaggaaacaagaagaataaacatcagaaaggaagagatgaaaatatcctttctgtttctggcatggtcgtaaatctaagagaactcacaaagttaactaaaaagctgcaaatgatttgcaagtatgggtaagttaatcagaaccaaggtaaattctcctaaataatagcattgctattagtctctgaaaaccagttaaattaatataatgtggggaaaagagaatactatccacagtgagaatggacacataaacaaaaaaacctaggcattaacttagccaaacatgtgcttcttacataaaagaaaaccacagaactgtagtaggataaataaaggaagatgagaattaaggagagctaaactctgcttcttcatgagttcatttaatatccaaatttcccaagctaatttatagatttaacacaactgaacttaaaatagcgatagggtacttttttgagcttgataaggtaataacattcaatggggaaaaaacagataaaaatatcaaaagatattctgagaggcaaaaaggtaagtgggggacaatgagctcccccatatatcagaatgttcatcaaattcagggtacattctgggctctatcagcaccaaaactaaaactacatatcaaatgaccaaatgaataactccaaaattgctccctacacatctttttttttttttttttttttttttttttttttttttcagacagagtttcactctgttgcccaggctggagtacagtagtatggtcatagctcactgcagccttgaccacctggactcaagcaattctcctacctcagccttccaagtagctgggactccaggcaagtaccaccatgcctgactaatttccttatttttatagagatggagtcttgctatgctgcccaggctggtgttgaactcctagtctcaagcaatccccccacctcagcctcccaaagtgctgggaatacaggcatgagccaccatatccaggttttaataaatgtcccaaaaataactagaaaaggaatcactatttaatcaagtgattatttattaaataatcactgggatgacatgatatgaatgtgaagaaaaattaattttagacccatccctaacagcatacatgccaatgagacctgggaaaactaaagtgaaatcttaaggatcacatcagaaaaatgctagagaggggaaatgatttttaaaaccaggcctgccttccctgaactacaaagtctcatgcattgatggtggctatttaaattggttggatcctctggaaagacatctgatcagacacttcaagggccatttcccttcaacctagtaatcctgttcctcagattttggcctacagaaataatacaaaaataataaaagattaaatgtatagaatctttatagtaatttatttgtaacagcacacatggaacaatctaaatgttggcaacagggtttgaacttataaaaactgtgttaatggattactgcacagctatcaggaatgtcaaaggcatcatcccacagtagatttggagccaaaagatcccagccctcctcttagcaactttttattttttgagacagagtctcgctctgtcacccaggcaggagtacagtggtgcaatcttggctcactgcaacttccacctgccaggttcaagcaaattctcctgcctcaccctcccaaatagctgggattacaggcaagtgctaccacgcctggctaatttttgtatttttagtagagatgggtgtcaccacattgaccaggctggtctcaaattcctggcctcaagtgatccgcccaccttggtctcccaaagtgctggaattataggtgtgagccaccatgcccggccattaacttattaacaatactctcttcatctgtgaaacagaaattgcaacgcatacacctcagaattgctgtgagaatcaagaaagtaatggatatcaaagtattactttcaaaactataaaacacagcctacacatcagaaatcattattctaaatcagaagatgatttagaaatatgtgaacacgcacactaaataatgttaaatgaaagaagaaaacagcataaaatggtccatgtatatgtaatgattacaattgctttcttgggcctttgtcattcaagttccctctatcccaagagtcaccagacaatgtggcctgactacctcagggaatcctcttgcacataaaataaaattaaattctcagggggcactgtgggtcacgcctgtaatcccagcactttgggaagccgaggtaggaggatcacaaggtcaggagtttcagaccagcctggccaatatggtgaaaccgcatctctataaaaatacaaaaattagctgggcatggtggtgggcgtctgtaatcccagctactaggaggctgaggcaggagaatcgcttgaaaccaggaggcaaaagttgcagtgagccgagattgctccactgcactccagcctgggcgacagaactagactccgtcttgaaaaataaataaataaataaataaataaataaataaataaataaataaatattaaattaaattctccttccccaggagaattggccctaaatgatctggtcatgtctactaccaactcatcccccgccagtcttattcactccaccagtgccactggctttcttctgttccctgacctaggggacaggcacccccagtctctctgcctggaatggatttccctatctctaagcctctgatctttgcctggctaaccattgcttgaacttcagggctctcagctttaatgtgacaacctgtcaatctaaatgaaatccctacccacacctgctagtatctaacaccagtaccatagtttgccggattttttccttcataatcctcatcacagttgatagttatatttttatttgtgtgatgatatgtttcacatctgctggcctcactgaactgtaagctctacgaaagcagtactcatgcccagctgcttcaccactatatacccagctaaccataccacaagtaatagatgcttaatagatatttatccaaatgaaacaataaatgtctatttgttttaactttcttcattccgtagaagagaaaactaaagctctggagaaaggagttttcctaggccactgaggcagatggtggccaagctgggattggaatcatgaccactgctgccggcccaggagtaaggacagggaagaaatgtgtcaggtgaaactagaagtggggaaaggatgcagagagtttccatctactctgtaaaattctctaaaagctcataaatgaggagttttaatttttggatagttcattctttttcattaaagaatgcccaaatagtggtactctggctgggtgcagtggctcatgcctgtaatcccagcagattggaaggctgaggtgggtggatcacttgaggtcaggagttcaagaccagcctggccaacatgctaaaaccatgtctctactaaaaatacaaaaattagccaggcgtggtgctgtgtgcccataatcccagctacccgggaggctgaggcatgacaattgcttgatcccgggaggcagaggttgcggcgagctgagatcataccactgcactccagcctgggcaatagagtgagactcagtttaaaaaaaaaaaaatcacaattaactattttcccagccacatgactagtcagatctatttgagaaaattaataataaaggcaaaagaaaagaggccatgtggccaccctcactttgtccagtttgttccatggggaccttggcctctggatcagcctaaaaccagatgaggatcgtgaaagctctgaagttctcttccccttcctgtccccagccctgtttgtactgaatacctgccacccacacaagttaactgttactttggacccaaactgagctttgcacccaactttcacaactcaattcaatttattctttgcctaacagaaacagcggaaaactaaccctggctgatggtcccccctcagtctgcacaatgggggtacaggagaggcaggggacccaggagttaccagcaaaccaggacacagaatgaaaaggcaagcactgcctttcaacagggttgctctggggtataccattcagctccaggctgaacatagcgtttctagtcttcctggcggcagcacacaggctttatgtatgctttctattcttcctagtgcaagggagcctcctcaagacctgcaaactaatgggccttaagacatttcccactcattcagtaaatacttactaagcatgtcccaagggccaggctctgtgctgggctctgaggccaagcgtatacactccaggatctcaggagacaggaactgtgcaatgaacatccatacgctgcaggcaacagctatcatggactgctaacttcttcccctacctaatgggcagggctggttctcactatgtgagctaacaagtggccccaaaacccttaagaggttctgacgtctaaacaatataatctagaaatctaagccaggtggattggaaagtagctaccagtcagaacttgagattcagagacatagaagctttagtatacacagagagcaaagcaaaaaagggtctgcaactgtagggccaccaggagactggttctggtgctactttcctgactgaccaactctgggcacctgtgcccccctgagccccagttctgtcagctgtacaagatgcaagccagatctttccaactctaacaatctaagcatcagcaacctgaaataaatcacttttctttctgattcagcaaaatatacttcctttagaaatcaggaagagagttaaggaaaacaggttagcaggcagtggtataacaacttaagcccctttgtgtcagggtgttgcatcccacttccttctttaaaaagaactctgccacaaggctacaaactgcctttggctaaacctgcctatctctctaatcctaacacttttaaacccatctgcaataccaagcaagaagcaacaagaccagtggagtctggcccaatttgaatgacccaaccccacatcctgttgcaggattccttccctggctaagcacggaaaaccttttccctgccctttcttctaacttcaagctgctaagcagctgcaaaaaaataaaaaataaaaatagtttggaggagggaagaaaagtcactgtgatgggacagaatgaggctcggccctagtcctggggatctcagcttctggttgcagctcagttgctggctgggtgacctcaagaaatcccttccctgctttgtacctcagctttctcatccgtaaaataagaggttcagactagactaccccagagccatagcccccctttcattgccaacatgatatgattcttcccactactcactaatggacacacaacatggataaaccatggcggagacaatttcccagcaagtgggccccctctaccaggataagaaggggcaggagccctggatcacactgtagcaaaggaataagagtaaggacggacatagaggactggaacaccaagacctggggataaccacgggaggcagggagaaaggcaaggaaggagtcagaaacttcaatattctcagatggagaataggcaaaataatgacaccactgaaaagcgattaggcacattgagttagagtgccagctccaaagtcagattatctggatttgaaccctacctgtgctccttgttagtggtgtggacctcagacaagttacttaacctctctgagtagcacgttccccagctacaacatgtggaaataacagtacatcgcggggccttaaaaggaataaatctagttaataatgcctaatcagttagtgcctcacacatggaagctcattctaagtgtttgcttttattttattaatataatattatctattatactttacaattattattaaaacagataggatccacagattccagtccctgttctctcactagagacctcagaattcaggttccccatttgtaacatgagaggctgaacacaatcagtttttctcaaaggaagatctgtatacatattgctgagggattatatttaagttctctaagaggattttaaacactttgttttcatttcaacagtcatctaaacaaagtctaataaacacatatggattttttaaatgcttactttaaagccaagttctggcacaagatttcaaagcccaagtttatatttgtgtttatgattgtgttggcaccagtataattgtagcaaactcatgaggatggaacaggtgccatcaaattaaggtcatacaagtagaaaaatgggtggagaattcaatcattagcacatgataatatagactggccaaactcaaaatgatcagcatgatagcatttactgccatgcaacttataatttggtttcagttgaacaacagctgcctcaccacatttaaggtattaatttgaatggtattgattttgcaattttggctgcacttaatttgtaaatatgtatgggtcatatagttgtataataacagcctataagaagtttatacctacttttacttcctaatatttaagtaacactataataaaaaaggaaatttagtgaacaaaaggatgctttgacacttttgttcttttacagacagtgcaagcattattctagtttgaggaaaactgaatgaaattctctccaaagtcccttatagccctttgaatctcagaaagatgatcattttgattacagacatgttaagctacattaagacagccaagtggggatactggcttagaatccaggaaaaaaaaataaaggcagaacaggaacaagagacttagaaactaactacagagaaatgcatcctagagatgggatctctaaggaagggtgttcagagatagagagacaaagagctgacgtctgagtttcagggagttcactctgctctacagccctcacatccctctgtggaagagttccattcacctgcgcattaaagatgatctccagattactcaaagcattattggcccatctgggaagtgaatggcttagaaccctctgcagaaataaaacaagtctcagttattatattcctccaggcctgaaggaaagaatccagattgacaccaagatacccagtattgatctctaagagtggggccactaactcacttcacccacagcttccagaaatacaggggcccattaggggcttttggagagccaggtggctcccagggctgcagcaaaaggaaaaagtggggtgctcaggggcgattcggagccaggtcctagggatcagaactcatgcctgggcagtagcacaaaccaaagctactatttctacctggctgcaaatctgccctctatgataagccacatgccatatccggaccacacagtcctgtgtccataagagccagattccatcaatccctgtgtgaaaaccaacacagcttccttccctccctccctcctccaatccccaactcaaaaccacaaagaaaaaatgagagaaccccccgctgctgaaaaacccaagcttactgtttgtcttcttctgaaagtgaggttcttccacagcagcaacctcagctgaggccaacaagccatgttccctcagccagcacccccagcgtgtggctcgggagccctggaaggcagcggccagagctcacagcagggacgccgtggctggtcattaactgaaagataaagcaggaggggaaacagccatcagttattgctgcaaagccatacaccaatgaggactgctaatccagccctctcagctgagacctccaacacacagctctgcatcatgactgcttctcaatggatcatgagtcaccagctcccagcctctgggttcacccacaaagagggactcgggaggtgttccgacagcaggctaggagctacgtgttatggtcctaatcattttagttctatagatgttatcatctgggaatgaagaatgcatttctgaaaatagacctctctcaggtggccaaaaacactgaggatggaaatggcatactggaatcccagagacctacctctcttttctaagaaaatgcctccccttacatacaaagtcagcagcatttgtaaattttgcctcaagcctggagtgacttatactattccctgaacttccttacatactaattttcagtgggttatacaactgagtccttcaaatgataaaaagcaccatcggccaggcgtggtggctcaagcctataatcccagcactttgggaggccgaggcaggcggatcacgaggtcaagaaatcgagaccatcctagccaatacggtgaaaccccgtctctactaaaaatacaaaaattagctgggcatggtggcaggcacctgtagtcccagctacttgggaggctgaggcaggagaatcgctgaacctggcaggcggaggtgcagtgagccaagattgtgccactacactccagcatggcgacagagcgagactctgtctcaaaaaaaaaaaaaaaaagcaccatcaataaagcagtttcctaatctggaaaaccacaacgtgccttagatgagtgtgagtaaacaccaagaaaatgctaccgacacctggctctcaggtaatgaggacaaccctagcgctgtgtctctggaaagaaaacagcatcccatggagaaacaagtctgctatggcaggctcagggcatcaactgtgaaaccgacaaacaagctcccatggtcagcacatatgcacacttctggccttgttccacctgcacctgaacacaccgcccccctactccgttgggtgtcacaggtgcctccttggaggactgtttgccatgctagggcaagaaggtcttctcgtgaacaagggatactacattctgtgtatcccagccacccatccagcagttacccttatttaatgctggaatagtcccaagtagttatattaaagttaaagctggggagggggcagaagatgaaaaatggaagggaggacacacaggtgaaaattcggccctgctggcacttggtagccatgaactctcctagctgtgcttatgaaatggctcagtgaatcactgtggcctctagaggagtaggggcaagggtagggtgggacactgggcatgaggaacaaggagcagaaggaactaagaatgcagtagcgaggtatggatacaaaaccaagcgctagactagaaatctgtgagtccaaatgagatctccatgccaaggtcagtctctagtagaacaatacccttttatctaccacccaacaaggacttggattaaaacttctagaaaagtcaagagattggaggaaattgcagtgtctgagaagaaaagacagcctaccactatgtattccaattcattcattgacagtccaataaatcaagaaattctctgaaatagtcaagccttaggacctatttcttttccttaccatttgctcagcaaacttctagaaggacacaggcctccaaagtttcttactccaaaaagaggaagagttaaaccagcactgcatcagtttgttcaaagatgacaactggcagcacagcactggcaaccagagcagcattgtgagacacatgcttgtcatcccaaattgttttctaagtggctcaggacagagcttgcattccagagacactgaaataaataattagctagatttttctcatacagaagctgctctccaggaatcagttcgttgatttagaagctacatgaatctcttgaaatccccaaggtaacaatgaggaggggacaattaaaaaaggaaaactatcagaaagagcccaggcatgaattagccccggcttcccaactatgtgcccctggccaaggctttatgctctctaagcatcaatttcctcatggtaaaataaggatgacaatacttaccttgtatggtgttcaactgtgttctactgtggattcaacgagataatataaataatttcccaacacagtacatggcttaatttaagtgccaaagcaatgtgagttcccttctccccatttatctttcttcattccaacaatatcctctagctgagaaatggttatatcctgtccaaacaggacgttccattatttctagcaaatccattgtgggtttctggaaagataggaggggcaaagcagtaaggatgaaatcttaatagcctagtgttgcagtacccagagccaaacccaaatatagaatatcacctcccctaaaccctgagtggaaaagctcaaaggaagagaagacacacctctacacaacgttcatgagaagaagggaaggatgagttttcttggacagcattttcttggaagtaaagtgtctgggtttcaagaaaaaggttctgactccaaggactctccaggaagcacatggagaaggttgctaagaagtagcatagagccacagtagaaagttctaccgtggctttgctgggcacacttaggcaagcttcctgctccaattcctcccacccaccttggcactgacctggcctcctgcacaatttgctcccccaactcagaacacaatgatcaatactgggagcaattctgtcctaagaggagagtttggcaatgcccggccccttctgctcaggtaactgaagccaaagggacatttccacatcagttttccaagttagtgaacaaacaaaccaaaatcaaaaaaaaaaaaaaaaaagatataaaagagacagtactatgtactagatttctcaatgtttcaaatgcagtacactcacttctgccctcatacacatttccagttactggctggaaaggatcccacttcacagtcatcccagtcaataggccactctgatcctgctcctagatgaccgcaactgccacctcactggtctcccaaccatttgtcacagagcacccaaagttactcagctagaccaaatatctgaacatgcctctccccgacttaaaaccttttgccagctcctcagcacctgaacatagagtccagtgctcaccaaggtctacctggcctcccttctgtgactccagcctactctcttgccactccccacctgctaagcaatgccctggagatgtgtatacaggctcagaatatgctgcacgctctcctaccactgggacttcactggtgagttctcttgtcctaagacactttttcaagcactgctagcctggctaatgcctaggtctcaaacttaggtctccacttcttcaatgtcctttcctgatatcctcccctgcaactgacacgtgggttcagagcccttcctacgtgctccctaggaagacttggctgggaaagaggatttctaccttctgagtcagagcagagaccatttctgtttccttcatccctgttttccttagtatgcaaaagggtcctggcttgtcgtaagcacttggggatgtctgcttaattaattaagagacggataggagaaatagggtgtcagaattcaagggtggcagcactcctggacctgtggtaactcatttctcaagcctgattaaatgatttgggcaaattatccccaaagagggagctctgtgttcagcagcttctaccatatgcttgaaagtcacaaaggactgctgagcttcccaggtgactcctgggacatcctgaaaaacgtaatagaatctaagtctgtttcccataactgccagctttagctaaggactgggcagcctcccaaggccagcagggccatgcagtcgacttcccgcccgtcctcaccctcaagcccgaggcgtacgctctctgggtctcatcagtcacccaagtggatcactccttgccaaaatgtgacaatctccacacctcagccttgtttcatacagtttgggcatggcagaagtgactgctggaaacctttggccaattttttaaggaaattttaactgcaaatgccactgatattttgaagttattaatatctacagaatacaacagactgctaaattaaaaccttcccaaataagcagaaacactcatcattagctgcagagaaatgcaaattaaaaccacaatgagatatcattacatacccactaaattaaatattaaaagtgctagcatgtgtatggagacactgggactcaatacactgtggaattgtaaaatggaagagccactttggaaaatagtttgacagtttctgctaaggttatacagtactattatatgacccagtcatcccatcctaggtatttgtgaatatttatagaagccttatacagaatagccaaaaactggaaacaattagttgtcgaaaagaccatcaactggtgaataaataaaactggggctgggcacagtggctcatgcctgtaatcctagcactttgggagccagaggtgggcggatcacctgaggtcaagagtttgagatcagcctggccaacatggtgaaaccccatctctactaaaaatataaaaattagttgggcgtggcggtgggtgcctgtaatcccagctactcaggaggcaggagaattgcttgaacctgggaggcggaggttgcagtgagctgagatcgcgctaccgcactccagcctgggtgacagagtgagacacctcctcataaataaatatataaataaaactgggacacttactcagccataaaaaggaataagctactgttacatgcgacaacctggatgaatcccaaaagcctaatgctaagaaaaataagccagacacaaaaaactacatactgcatgattccatttatatgacattctggaaaaggtgaaatgaaggggacagaaatcactgcagtggtgaccagtggtcatgggtggaggggacgacagactgaaaaggagcatggcagtggtagatacacatgtgtatccatttgtcaaaactcatcatacttttgtaaaggggaagtcttactgtggtaaattacacatcaataaatctgaaccaaataaactgccttctattatcataattaacatacctcacaagtcataacttggaagacctaagaactggatagtgtaaagcctgattattgtgtgatcgccttggaagaggaatagtagataaatattcattaccacttataaattccacaaacaactgcagccttaactctgcaaggtgcccatgagccacaacaaatatttatcgagtgcctatcacatgccaggtgtgttccataccttagagattcagtggtgaacaacagaagcaaagttccttcattcatggggctcctattctaccagggatgggaaacagacaaataatagtgggttgttcaaacagtgggtggtggtggtaggattgacgaagaaaaataaagcagagtaaggggacagagagtaacggggtggaagttattcctttctgatgaagcatctttaggacaatgaactgagagagtggaccatatgctacccacaaaggggtggcttaaatgacagctgggattataaaattacttttacttttccctaaaccaaaacctggaataccagacagcagacagattcagtgatgctggcaaaagaaatacacacacacacacacacacacacacacacacacacacacacacacattcacaggaagctggctgtgaagggggaaatgatgaccctagttagcacctggcacgtgttctcccacctcttcctcaccaaaacattgtgcccttttgaacttgacatgcacatttccaggagagatgagagatgagaattataaagaagaagaaaaggggagagaggatgacactaaaaagacaagataggaggatttttccccatttggcatagccaaaagaaaaacaggaactccttcccgtgactgccctctactcttctacagcactaaatctgtctatggaaacacagtgaggaaagaaagtgcatgtatctgtacagctaccagaagctgtttgcttgtgcagtaacaaatgggctggctggtctttttccttcccgcaagaacactgccaacacatgagctttagtgctgggctcctatcgaagggtgacagtcagccctcatgcctgagccagggcaggttccagaagagggaagtctccaagcagggatcatacaagtgtcaacatctcactgggacagagaaattggcccctctgggtggaagaggagaggcttccacaaagtcatgctccatttgactgtcgtattagtagataaaatctcttggaatgttgaagactcattcccactacacccctgctgcaatcttatagacagagaagctgaggcctcccccaaagcaagtgacttgcctagcattagagctggtttctcaagaaataactttttcaacaactcttatatgccccttcccacttagctatttctcctatgattttgtttgttgttctgaatgcatttctcagagttctatccaaatagttcacatacccaaaatgtacagatagcaactaattctcctctttcaaaaacagtgattatatgacagctatttcattaaaccttaaacaaacaagagagtatgtgtgtgtgtgtatgtgcgtgtattccactttgttcaacaaacttccaaaaagttaccagaagtgagatggaagttgaaatttccaacaacagctatcaatatctctcttttttattactttattttattttttagatgtaatctcactctggtgcccaggttggagtgcagtggtgtgatctcagctcactgcaacctctgcctcccaggttcaagtgattctcctgcctcagcctccggagtagctgggattacaggtgcccaccaccaagcccagctaacttttttgtatttttaatagagacagggtttcaacatgttggccaggctggtttcaaactcttgacctcaagtgatctacctgcctcagcctcccaaagtaatgggattgcaagtgtgagctaccatgcccggcctcagtatctctcttgatgaggttgcttctagatgtctttttcgtaattgaggtataatagacaaataaaaatgttatatatttacagtgttctagatgtcttatatcaaaaacagcttgccagtaaactacaaagcaggaggtggatttaactacatcagatatgaactgaaaatacattggtgccaaagctctgattgcctattcatgagatgttgacacaaaagcaagaatcacagatatgactcatgtgcctcatctccagagagatgcacagggtcctataatattaggacatgaaacttctaagcccaacagaacatgcttgctttggaaaaggtctgttctctaattgcctctctgatcatgtgtctttggatcggtagccacgttcagggacaagcctaacaaggttactgaaggccaagacacctggaaagaacaggttcactgcacccatgattaaagacagacagatcgtggctgctgtgggggtgggaggggatattgagagtcatcctgcaatttctcccaggctgacccatcagcttaattgagcctgaagctaatctgactgcctcagtttaacttttctggcctccagatgctactgggccctctatccttaagggtatccttgctaggacagccttaaattatacctcctcacactcctgaaacattccataaaccacagttccagggaaactaccttgagttagggggccttgcagaagggtcatgggctggtactcccccctgaaactgtgttcctatttttaaaggcaacattttaatagtcaaatttgagaagccaaaaggggtaagaaatcctccaaggtaaaagtcaaggatgaaatgaagttatccaatcattccagaggaattctatcattctataagaggttctgctatcacactgtccgtttaaaaatatatagatccagtgaattttattaattccaataatctgtaacttgggtgcagtttttaaagtaccaaatgcatcacacttacttgattgttagttacaataagataataggtaactgtacttccttctttcacttgaatacacatccaatttcctagacaaaattattgctaatagctaattttcaaaataagggctatgaatttgtaaaaactgaaacaagaaatctatgaatattgtacaaatctataactagcttttgagaagcataattcttcatgttgtcaacaatataattttacaggagatcctgaccgggtgtggcggctcatgcctgtaatcctaacaccttgggaggctgaggcagcaggatcgcttgagcccaggagtttgaggctgcagtgagttatgatcatgccaccatactccaacctgggctacagtgcaagaccctgtctcaaaaataaacaaacaaataaataaggagatcctaaaggtttaactccatctatatcatgtcactgatacttggacaaccaaagatcctatttatcaccctcaacattcccgttgccaccagctaaatggtctcagggcttctaaacctcacaagagccaggatttctgaaagcagatctgtcctgtaccccaagtccttgtttcatcactatagaactacgaagaaactctaacaaaatgttagagatagcctctcttcccctgctgatttccactaagcaaacaccaagcaaccttcaaaggaagacttcagcaaacaataccactatttgccttttccctggtcggggggtatgtagcacatagaaaaaaagaatctttcctctagaaaagaaatcaacctttcaacattctatgtcatagaaaaaaaatcaatttttttcagtcacaatcataacaccagaataaaagggatctgaagggaagggattagtgaattcataaacaccctgagctacagaaacacaagcaggcaagcctctatcagcaaccctttatttgcagaaaaacttggctggataatgttccctgctgttataggacggttttccaagagaattttgggataaatggtttagtgaccatatcaccaaagatcactttgtttggattacatctctgaagaatcagtgtcttcagatgttcaaccttctcccaacctgaaggatttatatttatgaaagtgctcaaagcatttggtggggcagacaaacccaaatcttagtcactgtctttctttcttttcctttgggtctattctaccatgcagaaaactccccaaatccttaactcctttgttgtcttgagttaattgtttcagcaggaagaaaggaggttttagagtcagagaaagctgggtttgaatcctgactctgctactcaccagctctggaaccctagggactctgagcccctgtatcttctccaaaaaatagaactgataatgtatgtaaaacatttatccagttcctggaacaaagtaagtgtacagtagctattaccatgattaattctggcaatttcacagtgaagtattcatcaagggtgggacacagagtgggtggtttattaaaggaatctcttttctgtattctttgtccacagaaagggcctttccagagcaaactggagcgctctccagtacccagtgcattggtagaggtgaaagcattatacggtatcctgttgccacttctgaccattgttttactataaaaccccctcttgggggtcctcaccactcacttatactattttctctacattctcacagaggttgcacctatcctccatagcacactgccacctccctacaagtttttattttattttatttatttatctatttatttatttagatggagtctggctctgtcgcccaggctggagtgcagtggcgcgatctcggctcactgcaagctccgcctcccggcttcacgccattctcctgcctcagcctcccgagtagctgggactaccgacagccgcctgccaacacgcccggctaattttttgtatttttagtagagacggggtttcgccgtgttagccaggatggtctcgatctcctgacctcgtgatccacccgcctcagcctcccaaagtgctgggattacaggcgtgagccaccgcacccggccccctacaagtttttggcacctgactcagttttcctgtccatcccatttcctccagcctctatgtccattagaaatctctattagaaatctgagccttggccagacgcagtggctcatgcctgtaatccctgcactttgggaggctgaggcaggtgatcacctgaggtcagaagttcgagaccagcctggtcaacatgataaaaccccatctccactaaaaatacaaaaaagtagctgggcatggtagtgggtgcctgtaatctcagctactcaggaggctgagccaggaaaccatcaagtgagaccatcaagtctcacttgaacccgggaggcagaggttgcagtgagccgagatcatgccattgaattccagcctggacaacaagagtgaaactccatcttaaaaaaaaaaaaaaagagagaaatctgagccttataattcctccatcttttcagctctacctacaatcttctctagtgtactaactcatcagtgatccctgataaattaagcaatgtgcaacaagctactgtgtctcaccatcttcctactctccactacactgaacccacaatgacgcagcgctccacaatcacatgtagaatggaagtaaaacctcagcgataagaaaagatagttaaagcagattcactacagtaacaaaccagtcaagaaatgtcactgaaagtaaaggtttgtgtgacaaaatttccagctgtgttctaagaaacataagttcaagcaggagtgcatttaatctgatttttcctcaaagcctctctaatttgtagggaagcacattcattttcattaacttcatgtgagctagagagaatctgtgattgaggctctagaacccctggtaaacatgccatcaagcaagggcaccttccccggaggttcaacctagagtataagattgtcagcactggtaaagagccttgaactctaaacccatagataggctcaagtcaggaactcagggagcctataaacacctggatacaattttgccaccttaacacttttattccctttacttgcgccaaactgagttatccaatctccaggctcttgtccagttctagttcatacagtatcggcagccttctccagaacgtcctttcaccagccagctcttgagacagtcatatgtcatgtgtgcaagacacttctatttctgcagcccggcgagggccagctaactcggttagtgacaatttaatcaaagttccagggcaagcacagagacacagagtctaagtcttgccctccaaaacttacaagcaaactccttctttagaataaccaaaacaaaccctctcgctggctgcctcactaaattaagagaagaaaggggaataagatcacaagtttaaatccacttacttgtgattctgaaaaacaaaaacttaagggtgtttttctttaaatattgactacatgaactctattatatgaggtctgagaggatcctacaaaaggatctgtattattccaatattatcaagattctgagtgttccttatagaaaaaactactgttattaagattttcacaaatcaaacattctgtgtgccaaagaacaaagtgggaaaaatggaacaaaagtgggaataattcccaaaaatggaattattgggtttcatttttggtagcctccttctgtcaactgtagttttgaaaaattcacacaatccaatcccccaagcaacaacgcgctaagtgtttacatcaggtgagagctggtgttggtcacatatgctatgaactagaattggacaatgtcccaaaacggagtgccatctggggtcagagtgccatgcccttctctgcagactccagggacatatccactctgcttaatggaagccactggaaccaagtgtcagacagccctctatttgctccacagagaagaaagccatgctctgatcatgtgaaatgtgactggaattgtaaactgaaaaatggcactaattccactaaatttgcaaatcctgcaacaagactgacaacttaataaacaatacttgaccaaaggctttctttctcgtgaactcaaggttttcactataattaacacaatcattaaagtaaaaaaaaaataaaaataaaaaccctgccttgattcacagttaattttaagcagccaacatcaacatcgggtttcaggcttttgcataaagaaacagcctttaggaaaccctcaacattcaggattttgttctgattcaaacttacaaagaacaatttttagttgagagaaacaaaaaattccagttgaaagacgccttaagattcaaattggaccaacagacaggagaaataaatgaggccagtccaatatttaacatttcagtgtccattttaagctgaaaggaacagacatctacagacacaatttcttctttctctcctataaagggcactgtaatagttatcctaaattctggtatagtatgaagaagcctggattaaagaggcaagagactaagattttaatttgcagttaatggcagctggagaataaatttagcacgccattctaccactgtgggtaatggaacagaaaacaagtccttttttttgtttcttgacacagagtttcgctctgtcacccaggctggagggcagtggcacgatctgggctcactgcaacttcagcctcctgggttcaagcaattctcctgcctccacctcccaaagtgctgtgattacaggtgtgagccaccgtgcccagccagaaaatatgtctttttgatgaagaagctgaagtggatgaccttctgagtctaagaaaactgtttgggacttgggtattcagtagccatggaatatacatcccaaagagcagaagaaaccgtaacactagaccccaacatcaaaaatatgttgctattttctcccacattgctggtaggggtgcaaactgggacactttggcaacttacattaaaatgctatgagagaacaggggaagcattccttaaaagttctaggaaaggtgttatggaggaggtagcatgagaaattcagccaagtgggaaaagcacaaacctgggagtcagagagacaagagtttgaatccctggctctgccattagccaaatatggaaccatgaacaagttatttaacttctcctcggctcaggtgcatcatctgaaatatggggctaatataataataggcaagctcagtatttccccaaatgtgggagagttacacaggatgaatttaagtgatattcagaggattttaggagatgaacaagcacagtattaaacattgaaccacatcatgagaaaatatggttcttttcagcacttcttcagcctatatataacattcttagtacattaaggagtaagcggccgggtgcggcggctcacacctgtgattctagcactttgggaggccgaggtgggtggatcacctgaggtcaggagttggagaccagcctggccaacatgacgaaccccatctctgctaaaaatacaaaaattagccgggtgtggtggcatgcacctgtaatcccagctactagggaggctgaggcaggagaatcgcttgaacccaggaggaagaggttgcagtgagccgaggtggtgccactgcactccagcctgggcaacagagcaagactcgtctcaaaaaaaaaaaggagtaagcttttgtttagtcttctttttgacacctctttaatgcttgctaattcccttttcaacaaagtaagagaagtctcattgtcagctggggcctttgggaaccaatagtttatcttatacatagactgtgagaaaaataatttgtcttcatcctaattatttttaaaattacctttcatttatgataactcatattggttttccaattacaggtcaaatataaagttattttaaaatatattgatgattacaaaaatttgagtcaacttgagtgggctgaaatgctacctatctcagagttccagtgaaaattaaatgagatcatatataagaagaactagcccatgctgtgttccatcacccacggtctggttgatgggtaaaatttcagtaggtgaggaatatgagcagaagatcaagtgtgaaccaaggcaaatacatgagatggacatgagattccagaacaatgaggagccaaacaatgccaggaaggggttcttaaagtagaagatgaaaacctgtagagagagactcatttaacaggtaccaaaccatactatatgttaatcagtctggtgagaaaaccagctatagttccttcgagcatgtgtcttataatccaggacaaaactatcaaagtgggtcacagtcttatttcaaagagccttgaatgccaagcagaaagagatcattaatggtggcagattcttaaaagtcttttgacctctgtccagcacctagtactttccacagtacatggtgtttaacaaacatttgctgaacaaataaatttgtttaatagcactataggtgtattagtgcatttaattttcaaatataaatatgtattgttgttgttaatatcatatcttcttcttccttctctctcacagtaccagacaacagcctaaccccaactaaggtaaactctgccaccaaacatgcctgggaatggagaagggtctgcaggtcagtgtaagctcatcagtctgggccttcactttctccctgcctttccaaggaaagctgctgcttgcatcagtgttgcctttatgtcaaagtgtatcacctaaataccagatccaacagatttcaagccaccaccctccaaagacttgcttcttcaagaaaacaagcgtggtttgactcttgtgaaaaacaattactcccaacctggcatcctacaagaattttgcaaagcaagggtgaacagggatatgacaaccaaacatcttcctagcagctccttccccctccctgctcctggccagaaacctcttcttccttttactccttcttctttccacttctaatttgttatgatctctcaaacaacaaatttggtacagtgctttagaaagctttgtgtcttaccgacctacccccagtgagggtcttctgagatacttcaaactatcctcatgaggtatagtccaattctcctcctaggatgggtactagcatgctattcttgaaggatgaatgagcctgaagagttggttatggtttcctttcatcacctattggcttaacaggagtccattataagaagtaaaacttaggccgggcactgtggctcacatctgtaatcccagcactctgggaagccaaggtgggcagatcacaaggtcaggagttaaagaccagcctagccaccatagtaaaaccccgtctctattaaaaaaatacaaaaattagccggacatggtggcatacgcctgtagtcccagctactcaggaggttgaggcaggagaactgcttgaatctgggaggcggaagttgcagtgagccgagattgcgccactgcactccagcctgggcaacataacgagactccatctcaaaaaaaaaagcaaaacctacacccaaaatgatgtccgagatggagagtccaattttattttagagagattttccaaatggtgagtcagaagcaagaacagtatctcactaaatcatgtttactcaactgaaacttattgaattaaaccaactcctccttcctttgcatttcagatgagaaccccttctggttctatgattcaaatcttcattcactcaaagcaggtaaataggaaatttcaacagcttcctctcctccctctcattcctttcttctgtcatcgatctgatcaggaatgctctgaggcattccctggttattttttctttacctctcaaaatccacatggtatgttacactaatgcccagcatgttcctcagatctctagatggctctaattaaaggaccaccccttcttctgaatacagacctggggttagaggacataagagcttgaagggctctttaaaagtcaagtagtatcattttacagaccaacaacctaaaaaacagaaaagtaaaatgacttgtccaaggtcacatggcttaatggatttgtgggcattcatgaacaccctgtaattacacataaaatttggattatatgagcccatgtgtattttttctgaagagaaaatccgtatctttcttcaaagaagtcaacaatctcttccccaaaatatagtaaccactgacaattatatgcatatttgaaaaaaagtttaactaaaatttaatgttccaagtctgaatagtaatatgaattggtgatctagaataagagtggaacctaatttaataactgtcattgttatcatctttttttcttttcatgtctgggatatcaatgcaagtaacatgggataaagacaatttgatgtggaagtaaactataaagcaagatttttgttttgttttgttttgtttttttgagatggagtctcgctctgtgcagtggcaccatctcggctcactgcaatctctgcctcctgggttcaagcgattcttctgcctaagcctcctgagtagctgggattacaggcttgcaccaccacgcccagctaatttttgtatttttagtagagacggggtttcaccatgctggtcaggctggtctcgaactcctgacctcatgatccgcccaccttggcctcccaaagtgctggaattataggcagaagccatcgcgcccggcctaaagcaagcttttaaaatcactgaaaacactcgtatgaataaatttcactataggccaagcattatattatacggttcacattatacacaaacacaaatacctattttacagatgatgaaactgaggcaaagagtgatcagcaacttgcctaatgtcagatatccattagtaataaccagaattccaatctacattaatttgactctgatatccatgttctttttcaccaatatttgcatctatactccaagatgtcctaatactaatattctatttacttatttagaagaactaaatcaactctctaaggtagcttcaaggaagtctttcataaatggttcaactactaaaaagttcttcctgggaaatatcataaactaaataccagctatcacaaaatatctggactttaagactaaccagataaaatgttttgacttccaaatgcttcttggaagttggatttggcagagaaaacaccggggaattttaaacaaacaccccccaagaaaagactttatagaagaatagatccaatgcatatgaagttactgttttttaaaaaagtgtttaaatctctaaattacttagtgagtcatgtcactcttattaacaaaaataaattaatatacaactcaaagtacttgaatatggaatgccacagactagagcattttcttaaatcacagctgcctcagaaacggaaatgaaactgagcgaaactgaaatgtttgttctacaaaaagtaacctggcctaaataacttaagtatgcactaaaatttctcagtctaacataaacctagccttaactacagttgtttctcatataactctatttctaatgcttttctgtgattaccctgttatcttaagtagtcttttagaagacaggaagcaaacatgagcttcccattctccttgttggacttattcaagtcagcatttattaaattttttccatattaagtgggatgaattaaggccaggggagaatgaatcaaagaccttcctctagagaagcatacactcaagaggaagacaaataaatgttaactgtaattaaaaaacagaattaaatacatgatacaaagagtgctgtaatccaagtctaatggaagtaaagagaaggggatcttactttcaacttagtgatgggaaggagtggatccagaagagcttcatgaggagggaagcatttaaatcgggtcttaaaggaggtttgcaaaagctaaagggttttgtaccaactttgttttcaacatgggaaagacaggatttcaaactttattttgttttaggaaccaaatccagtgctcctccattgttggaataaatgctctttgcctgaatgctatttgtggtcttcgtagaatggagagtaactgaaggccccaccggaaatcaattttatgtaagcttttcattctctggcctcaagtatttctaaaatgtacctttctatgcaggctacttattcaggcaactattttcaggtgaagatactcaaatgaaaatagagaatcccttttggccttttgctaatatttcatttgtcaaaactttgatagtctgacaaagtctttaccatgagattggtaaactcacggaagccaaactgtctgggatgcgacttcagctccactacttacgaactccataataatgtacctagcctgcctatacctcagtttcccatctataaagacaataaaagcacctatttcactcatgagaatgaactgagttattacacggaaaacttaaaaacatatccaacataccataaatcaacagtaaatgtaactatttttaccaagaggtgtcttcaaagagtttatttctaattcattacaccaattaataagaaaggcactttctcatcctatttcacttttacaaggcagacattttttttcaagacggagtctcactctgtcgcccaggttggagtaaagtggcacgatctcgactcagtgcaacctccgcctcccaggttcaagcaattcttctacttcagcctcccaatcccagtagctgggattacaagcacccaccaccacgcccagctaatttttgtattgttagtagagacggggtttcaccatatttgccaggctggtcttgaactcctgacctcaagtgatcctcctgctttggcctcccaaagtgctgggaatacaacaatgagccagtgcacccagccaacaaggcagactttgaaactgtgtttatcttccaaaaatacgtatatcttaagaaaaaactaaatttgatttctaaacagtaacagcagtaacagagaaatagcttatttcaaaaggtccacaacttcatcaaggacaggacaagcaagaatcatattgtattataacaaatttttacaattcaccaaagttaggttttacaactaaactaacagttcacttctctttttcctttgtttcttaggcccttacagcctaatactctatcattccattttctatagatcacataggaaaacattttgagatcacacagctattcgcaaacatctgactgaagcaatagtatagttttcattatgaaccaagtaaaaaattgagttgagtaaattttattctattctttccaggatgttgcaatccctacgcaaccaaggtttcaagttaaagagaatttggctgacccactcacagcaacaaggaaaatatgatacaggctgtagattctgataaggattatagcagatgaatgtagagaatgtggtgatcatccttgaaaagctccctggttgcagcagctgaaatgttagtgctggagttaaagaactctggctgggttcaagtcttagctctgcctcttgcaaggtatatagccagagaaaaattagcttctcatttacttaatcttgtaaactagggacaataaatggttttgttgtgaaaattcaattagcatttgatgacctgcacagtggcttatgcctgtaatcccagcactttgggaggctgatgtgggaggatcacttgagcccaggagttcaagaccagtctgagcaagatagtgagaccttgtctttacaaaaaattgtaaaaatttagccaggagcagtggtgcgtgcctgtggccccagctccttaagaggctgatgtatgaggatcacgtgagcgcaggaggctgaggttgcagtgagccttgtctgtgcagctgcactccaccctgtgcaacagagcaagaccctatctcaaaataaatacaatgaataaacacgtgaaaaacatttcaaacagtacttgccacacagtgctatataagtgtctattcaacactgcaataactttggccattcatggttgtatccacatgcagatacgaagatggttgcattttttggagtaggccttctctcagcataaacaaaacaagtgttcagaatgatcttttaacatttgatgctagagtaaatgaccataacaactactataatggtattatttatttaatatctggatacttaaaaaaatgtatttgaggccaggtgtggtggctcatgcctgtaatcccagcactttgggaggctgaggctggcagatcacttgaggtcaggagcttgagaccagcctggccaacatggtgaaaccctgtccctactaaaaacacaaaaactagccgggtgtggtggcacgcacctgtaatcccagctactcaggaggttgaggcaggagaatcacctgaacctgagaggcggaagttgcagtgagccaagatcattctactgcgctccagcctaggcaaaagagcaagactccatctcagaaaaaaaaaaaaaagaaaaagtatttggttttaaaagtattttagaaatgcaaaaaccacatgcattttgatattttctagacatctagatatcttcataattagaagagtctatctaaggtaatgttcacttattctagcagctaaaaatgaaaacagtgaagaccttaatttgtagccactacatatatagcttaagtatcccggcttacgggagagaagatccctttaaaaaaaaaatttaaatggaaaaatatcccaaccaactcctctccaaaaaggtaagtactacagaagataataaaaagctaagtcactgaacttcttcagtttcattcatttttttatgtttacaatgggacttccttgagcagaaggaaccaatccttgaaaacaatcaattcctgatcactcttttccaatcctgcactaatgcactgtctcacacaaaccgaaaatatgttctaagtcaaaatgtgtccaggggtcgggcgcggtgcctcacgcctgtaatcccagcactttgggaggccgaggcgggtggatcaagaggtcaggaaatcgagaccatcctggccaacatggtgaaactctgtctctactgaaaatgcaaaaactagccaggcatggtggcgtgcgcctatagtcccagctactcaggaggctgaggcaggagaatctcttgaacccaggaggtggaggttgcagtgagccatatcgtgccactgcactccagcctgggaaacagagcgagactgcatctcaaaaaaaaaaaaaatgtgcccagggtccattataggcctgcactcgtagaaatacgagggttgagatttcaaatgctcatctgcaggggagacaacatatcacacgtgtccaggttacagtcagatatgtcattctggaacactatgcgggtgctcaaatacagactcctaaattgctctgacaacagtagcaattctagtcccttaaatggcttgtagtcatcgtgaaggctgaagacccacttccccggtccttctgattgtaaaccaatgttttcctaaaattccctagcattaattattttaatggtttgtggaattatttaatggtttgtggaagcacttgggaaacaggctgacaatggaaactttgtatttgaaaaatattgtaatatctgtagaggttctactcaggaatactttccatgcttccatactttctctgatttaggagaaagtttctcaagagaatgatactctcaacagaaacggaaagtttctcaacagaaagcctccattatttttgtggtaggtatgagaagaataggttgaaataaaaggggagatgaaaacttaaggactttaagttttgtttgaaaagaagatcataatttaagtctgggttctaaactacggccgttaaaaaaaaaagaaaaaaaaatcaagaaaattccactctttaacttgggggaaatttttgtgaggttctcttcgtgggaagcagggattcggccatggagggcaagtgacttgctgatttcagtacccagaaggtttttttaaatatgaaatttgtccactatgagatgaatgtgtatatactacccattctcttcttgaagtgtcaatgaaaagtcggattttaaaagctaatggtatcagtgctgcaaaggcaggccaattactgccagtgccagacaacttttttctttgtttatttttaatcttatttctttgcttctttttgataaaagatatacctaaagaggcacctacacataaccctggcaccgtccgccgccccaagaaccttcctgctttaccaatggcctgggagttggcaaacacgctaacaaaaaaaaaaaccaaaaaaacaaaaaaaaaaaaacaaaacgggctttcgcctcaacctcatagttcctccccgtctgcaaccaccggtcttcaccggattcacagtcggaaccgcgagcaaagacacctagtagagccggccgattcctaggtcctccggccaggaggcgctgcgggccagtctccgggggccaccgcagcccgcgcgcccagcacccccaccctcacggcagagcccagcccagccccgcggcggagctccgagttctgcgccgcccgccggggttactcccggtcattccacggcaccacctcggcccagcttccccatctgcgcccaggcagaagctgccccgagagaccagcagcaacggtctggaagatggggctgcagggaacgtgggagagggaggattgggcaccccacctccgggtctccgcaggctctcctaagtcttgtttttaaaagaaacaaaactcggccgcgcgcggtggctcacgcctataatcccagcacttggggaggccgaggccggtggatcacctgaggtcgagggttcgagaccagcctggccaacaagttgaaaccccgtctctactaaaaatacaaaaattagctggatgtggtgacgcgcctgtaatcccagctactcaggaggctgaggcaggagaatcgcttgaacccgggaggcggaggttgcagtgagcggagatcgttccattgcactccagcctgggcgacagaccgagacttaaaggaaagaaaaaaaagaaaaagaaaaggaaacaaaactcgtccgcgctctgcgccagggacaccagctcagctgagcgcacggagactgtaggcaggacctccctacccctcaggtcaaacaaagacccaaggcctctagtgagcaatagcaccacggaccgtttgggacacctccaactcgagttcccggattcacagtccgggactgtgccgctccagtcccggggagcatatagccaattcccaggtcagaacagaccagcttcttaagaaccgagtgaagactcagtgctggcatttgtctccgtaggtactggccgacctgcaaccagaagggtttctagccagctcagggccctccgaacaaagcagcgctcggtgccggacctgcagctctccccacccggcagcagcgccctcagcacgcccgggaacccccgacccctctgagcccggggtactgcgcccgggtctccacgcccagagatgctccccggtctccaccgtcgggcaagccccaagcgcagcagcgcagagtcctggggtcaccagagctcgtactaggacatcgtctccccatttaacaccgcctccggtcccatctgagttgcaagtggtggggatgtggggctccggatcaaagtccccgaaaccgagcacttcccgaagcctccttggcctcgaaacaaaacaataacgcccaagtaagtcactggagagcctcttacctgttttccacttttgtgtttgcgtctctttctcctaccccttgacaagccttccggagaaggggagaaaacagaaccggggaaaaaacaaggagcaaagcgccctgagaaccggctctgttggtgcgcggagctccccgccctgccctgccgcagcccgggagagaagggtcggctcggctctgcgggtcccggccccactcactctcgctcgcaattacggggtttttgccgggactagttccttttatagattcggctgcaccgagcgcagaggttactatcggtcaaagcctgtgctctccctcctccccgccccgttcccggcctctgtttatgtagttcagtcactcagcagaaagcacgtggagccggggcccgccccttaaacgggcgacgttcagccgcccacgacacatctagggagttggggggaggtgggtggggtgggggtggagggtacagcaggtgtcttagggtccgcggtctgcgtccccttcccccgcccgggcccgccggcctaagacgcgcgggaagcgctgggctcggggctgcgccgcagactctctagtccacgttcccggcagccaagggcaccagtggaatttgcttcctctaaatcctgctttccgcaatttttttttcctttgttagtttcctcagccggagggagggattgggggagagagagctctaggctgaatctccctcaggacgccaatcattttgtcttgtcttttgtttcctttcaaaggcctaggctggggtgaggggaaggcggacagtcctctgggtaatgggctgcttttgttttccccccacaaacctggactttgatttttgataggcgacctactgccttggagattcccagcctgagctccccaggtccctcagaggacccgagaggaacatcttactgcttctcttcataaattgagaggaaggaggccacaaaaacaaaaaaagaaacaaacaaacaaaaacacagaacaatatggaccagcccccttttaatttcattatattgatcagcctccctgtgataaaaacacaggacttgtatttagtttgtatacatttgtgaagtgcagccagagaattgcagtcgtgtaaaattatgtagccactccagacctccaacttatctgtttgcctttggctgtaggggagcaaaactacccaaaacactggaggggcaaaaaaaaaggcaagagtaggaatgcaggcctacacaccatatgtctaaatatttaagtcatccatcaagccaacaaactaaatgtcaccttattctggccaaaactcaggtcaaactgtgaagagtctaaatatgaatctgccctgaagggcagattcatagaagactcaggacagacccgtagaagaggcccaagcaggccctggaagtgcacgtggaggccacaaggtctcctaccttgacaaagatacctttgtagccaccttgaagggcagattcacatttagactcttcacagtttgacctgagttttggccagaatgaggtggcatgagagagctgccccaagcctacttctcttcccacctccagctccatcatattccagaactcccaccacctgcatacagacattcagctgcacaagccccctccatgctacagtcaacaggatctccaggccacggctcaagcccaggtactcacatcagtggttctatcaacactcaggacagacccatagaagaggcccaagcaggccctggaagtgcatgtggaggccaccaggcaaggaattctggagtcccaggtactcataactctgggtggcatggcccctttgcaccatggactgtttgcccttagaaagggatggatctgagctgggcgcagtggctcatgcctgtaatcccagcactttgggaggccaaggtgggcagctcacctcaggtcaggagttcgaaaccaacctggccaacatgatgaaacccagtctttactaaaaatacaaaaattagccagatgtggtggcgagcgcctgttatctcaggaggctgaggcaggagaatcgcttgaacccgggaggcagaggttacagtgagtcgagatcatgccactgcactccagcctgagtgacagagcaagactccgtgtcaagaaaaataaaaagaaagggatggatctcagaaaggccagagatgagctttctaaagcccaaggcccaggagagcggacccccttgcctcagtcaaagaataaccttggtcaataaattgggttttggggtcaaacttgacaaccacatgatgagcaatttacgtaaagtctttctgcctctgtttcatcttgtttttttcttttttcatctttttttccttccttccttccttccttcctccccccctccctcctcccctcccctcccctcatctcctctcctctcctctttctttctttctctttcatttcttttttttgagacagggtcttgctctgtctacccaggctggagtgcagtgatccaatcatggctcagtgtagacttgactccctgggctcaagcgatcctcccaccttagcctcccaagtagctgggaccacaggtgcatgccaccacacccatctaattttcgtattttttttgtagagacagggttttgccatgttatccaggctggtctcaaactctggagctcaagcgatcctctggcctcagcctcccaaagtgctgggattacaggcattagccattgtgcccggcctgtttcttcatctttaaaatggagagaagatgtatattctgtcttcctcaaaggggttttctgaaagtgaactttgttgaaacctttgagctccttggcagaatgatgttataaaagcagagagtgttattaaaaggtgttatctttcctagcatgattttagagagtaattagatctccctgaccctccatctcctctctccttcttctcctacctatttgaagtcgaccaccaaaatcattattttttttttaattgagatggagtttcaccttttgttgcccaggctggagtgcaatggtgcgatctgggctcattgcaacctccacctcccgagtagctgagattacaggcacctgccaccatgcccggctaattttttatattttttagtagagacggggtttcactatgttggccaggttggtctcaaactcctgacctcaggcgatccacctcagcctctcaaagtgctggaattataggtgtgagccactgtgcccagcccaaaatcattctttttggaattttgaagcatataattccaaaaggtatgaaggtaatcacttagattgctctaataagggaatgggaacagttaagtcctatacaaataagacaaagataagatactacaaaaaggggatgagcccaagaaaaaaatcaaagtcccagagagagaacagccattgattctaaatacacaagtctatggccccaacccaaacttgtttcactaagaacaacctgtggtttcgagaatctggtcatcccccacagtgaatacatgaacacattgtaatgtttgaaatgtttatttttcttgttgatttcttactgttagaagagctaagtgatttggcccaaagtggctaagtgattcggccagtttgtacacagggatataagtttgctgacaccaagctcatactttacaaatgtaatatcttcataaaacaaaaatactgggccgggcgcggtggctcacgcctgtaatcccagcattttgggaggccgaggcgggcggatcatgagatcaggagatcgagaccatcctggctaacagggtgaaaccccgtctctactaaaaatacaaaaaattagctgggcatggtggcaggcgcctgtagtcccagctgctcgggaggctgaggcagaagaatggtgtgaacctgagaggcagaacttgcagtgagcccagatcacaccactgcactccagcagagcaagactcaaaaatatatatatactgaatctcaaaagctagagcctaagagatgccccttaaaaaagaagcttacaagtgtgaattttcttccctccagcccttaggttggtttgtcttttagtatatttcaataagcttccccctccccatcccatccctgccccccacaccaacaccaaaaccccaagtccctcctctaggtgactccttccaaatacataggaaggccctcctttgttgctgtttttctggagaggctgattctgtaaatgtagcctgggtggcttgaggttctattctgagatgaccctggcatcttctaattacagaatcaaccttcaggcagctgtggccttgcagactctgctggaggtcatggaactacagaaaagctcaatcttatcattctattgaggcttttaaattggagattacctaaatggcattgtttggaggttgctttgatatatgttaactcatctgcataaatgtacatgtacacattgtttaaaataccaatgatactggttgctagaaactctgaaaaaatagagtaatgcaggaagtcaatgaagaataaaaaataatatattttaaaatgatgttttaagatgaatttgttatgattaagaagacctggtggggcacggtggctcatgcctataatcccagcactttgggaggccaaggcgggcagatcacttgaggttaggagtttgagaccagcttggccaacatagtgaaaacctgtctctactaaaaatacaaaaattagctgggcgtggtggtttgcacctatagtcacagctactcgggagtctgaggcaggagaatcacttgaatcagggaggtggaggttgtgatgagccgagattgtgacactgcattccagcctgggcaacccagcaagactcagtctcaaaaaaaaaaaaaaaaaaaaaaaaaaagacaaatgcctaatagctgaaatcttagagattttctggagagtgagaaatgccttaaaataaaataaataaataaataaaaaataagagggataaaaggacctgcagttcaaattgagtcagcttaattccaatacacagttagacacagaaacaaatcgagcaatcaatggtcaaataaaaatgtaccaggaaccatcattatttgtgcagtagaccgtgtattgcagaggctctcaatcaattcaatttaattggaccaatgtgatcctcttctgtattaatgtggctcctgttgacatgcaagcaagattcaaaattattattgcttctggacttgagtaagatgtttgttctgtttgtcattgggatcaagaggttagccttggctgggcactgtggctctggcctgtaatcccagcactttgggaggttgaggcgggtgatcacttgaggtcaggaatttgagaccagcctgaccaacatggtgaaactcatctctactaaaaattcaaaaaaaatttagccatgcatggtggtgcatgcctgtagttccagctacttgggaggctgaggcaagagaattgcttgaactgggaggcagaggttgcggtaagccaagatcatgccactgcactccagcctgggtgacagagcgagactccgtctcaaaaaaaaaaaaaaaaaaaagttagcctgctggattacagacaagtactgcatattccactggatttctagttgattagtgagtgataattctttttaaaaaccacccttccaaccctctttccttcaagctatccccttaagagccaaactgctggaaagatttcatctctaccccctcccttttattaacacctcacccactgcagtcaaattttcactctcacagctctgaatctattctgcccaaattcattaacgacttccttagagagagagaggccagggacgggttgggggggcaaatgtgatctctttttttctttttctttataaaatatttttaacatagaaaaataaagaaaaatatcttaagctcagaaaaaccgcttaattggtggtgctgttgacctcttttaaatccttaggctattcagtctctggtatttgacactactgaccacactttccttcctgaaactgattcctctcttttatttcatgaatctggttctcttctgattcttctgcctctttaaccactctttttctgactattgtttctttatagatctcctaatactggttttctcttttcatttctacttgctctcctcatcaatattattcacgcccttggcttcatttaagccctgtacctccagctcttgtctccttgccaggctcacccaccgtgcgccctatgctgcctggtagaatatccagcagcatggtgtgttggagccagcacacaagctcacaagagttgtttttgcatatctctttttgtttgtttgtttgtttgcatatctctaccagctagcttgaaatcggccaacggcatgaatattacaccattggaaatccaatataaatcagtgtcgatgaaaagagtaaaactctgtaaaatatttagagatttatggtgagccaaatatgagtgatcttggccctcaggagacagccctcaggagatcctaagaacatgcacccaaggtggttggggtgcagcttggtttttagggagatatgagacttcaatcaaataagtttaagaaatacattggttcagttcaaaaaggcagggcaacttgaagtgggggcttctaggttatagatagatttaaaatttttctggttgacaattggttgagtttatctaaagacctgggatcaatagaaaggaaatgtctggcttaagataaaggattgtggagaccaaagttctcagtgtgcagaggaagccttcaggtagcaggcttcagagagaatagattgtaaatgcttcttaacagacttaaggtctgtgttgatgttaatgccagagaggcataatgaggcctgtccgacccccacttcccgtcatgacctgaaccagtctttcatgttaaattttaagagtgcccttgcagaggaggaagttcattcagatggtgaaggggggcctcagaattttatttttggtttacatcagggttttgtttggtttggtttttgtatggaaagccacttgttaacatttattaggacaaaattttgcaggtcattctacaagtaaatccaaaacaaacaaatttcttgtctttccttcaaatctccttctaccatctgcctttttaaaaattttcatttaatgatatcatcatccagacattcactatgggaaatcatagtcatccttgcttaactttttcatctgtctctatctttctcttctcatttgaaaaagcaccaaggtcaggtcaagtatacctcccaaatattttatttttttaattcatcatttatttttcattcccagtgtctaagtccaagccaaacatctgggcttctgtattgcagaacctccaaactgctgttcctgtctctagtttcttccccttcctatttgtcttccctattgcagtaaagtgattttttgcttggggaaaaaaacaaacaagcaaaccaacacaaaaacaatctaatcatatattttctccctccaaaaaaaaaaatttctttttttttgagatggagtctcactctgtctcccagactggagtgcagtggcacaatctcaactcattgcaacatctgcctcccgggttccagcaagtctgctgcctcagctgcccgagtagctggagttataggcacatgcaaccacatccaactaactttttgttttttcagtagagacggggtttcaccattttggccaggctggtctcgaactcctgacctcaaatgatccacctgcctctgcctgccacagtgctgggattacaggcgtgagccaccgcgcccagcccatccctcaaaatttactatggttctcctttgctcacaaaggaaaaataccctcaaagttctgtaagaagacctacaaagcctctgaaaacaagatattggaaggcctttgaagcctgatcatatgacctgcttcctcctccatcctcttccatccatccacaccccaccccttactcacccccattctaccaactcacgactctcatcatactttcccattgcttggaaatgcttcctctcatctccactcctgtcgtcctgttatgcttttattctagaagcagtaggaaagaggggcagaaaaaagaaattcacttccctcattaaatggaaagttgtgagatagagggtatatgaagaaagagagagagatttttaagtatccaaattgataggcaaatattacccccaactcagatccattatcaagtgtaacaatagattcacagaagcagtcagtacccttaaatttgccaagaaaataattggactcaggggattaaaagaaatcaagcgcttattataatagaagtagtgcatctgcgtttctttccttattcagagtacttttttgacacttaagaatccatattcctggctgtgatttctgggatgagggactgttttatttcttagccaggagcttttcttttctctgacatattaataagagagtaagtcattagaaaaaaaaaaaatcctaggaaatgttccagatactgttttctattagacttctagagagacaatcctctttctctttcagcattttgggaacgatttcttcaggagtgcatggtttttcctttgttgccctcaatagtctgtgttgttttgacccatccttgcccagtattccttatgacttctggaattgtctggacagaagaaatacttttgccttgtcaaaggttaaatgtggagatgtgctatgaccccactgtgggagcaggccttttattttccttctgtatctccattcttctggtgactgacgtccagtgaaattagagcaatttcttagctggctacttgtcctggtgtgtaaattagtgaggaatgagctccattcatagagtcctgggcttgccacagagcggaccccaaagctggtttccccttgagtggctcaattacctaacagagttcaacaggaagcccccacatctgcctactcaccactgggattggaagccctggacacactgcctgaatgagaacagaaagctaagttgggggtgcagtcttaaggtatctaaggaaaatagaataggaggttggggaaaagagggaaaataatgtaatcatactcataaaaactgagggtgttagtagggtgcaaagaggcccaacattctgatagtttagcaaaatgtatcaagaggctttggtccaggaccagtggctcatgcctgtaatcccagcactttgggaggccgaggcatgcagatcacctgaggtcaggagtttgagaccagcctgaccaacatggagaaaccctgtctctactaaaactacaaaattagccaggcatggtagtgcatgcctgtaatcccagctactcaggaggctgaggcaggagaattgcttgaacctgggaggaggaggttgtggtgaaccgagatcacaccattgcactccagcctgggcaacgagagcgaaactccgcctcaaaaaaaaaaagcctttggcccactaattttacttggaggaatttatactaaggaaatatccgatagtatggtaaaaaaaacttatgttcaagaatgttgtcactattttattgatgagtgaacattttaaaaatgcttaatcatctgataacaattctaaaatacacattgataaattcacatgatagaatgttatatagccatgaaaggtgaaaataatgttttcaaagagttgtgatataggaaactgctcatggtaaatgcgaattgaaaaaaaaagcaaagctatatttatgtgtatggttaacattcaataaaaaataactgttactatattgataacctttttcattgaatatatgtgcctagaaaagactgcaaaaaaaaaaaaaaaagaaaaagaaaaaagaaaaaaaaaatcccagataggtgctaacagcaatcacctgtggatggtaagattataggtaattttttcatatatgtctgtattttacaaaatttataaaataaacacatgctatatatatgtatacacacacacacacacacacacacacacacacgtaaatatttatatatatatatatatatatactttattttttgagacagggtctcactctgttgcccaggttggaatgcagtggccccatctcggctcactgcaacctccacctcccgggttcaagcgattctcctgcctcaatctcctgagtagctgggactacaggtgcccatcaccatgcccggctaactttttttttttgtaattttagttgagacagggtttcaccatgttggccaggctggtctcaaactcccaacctcaggtgatccacccgcctcagcctcccaaagtgctgggattacaggtgtgagccaccatgcccagccttatatgctatttttaaatttagaaaaatgatatgaaaaatagagtttttcaaaaaaaaaaagaaaaatagagtttgtcaataattagtaggaggaaagagtttataaatgaagaaaggcaaacaagaaattaacacatggaaacagcaaatcctaacatattttaaaagcatgtgtacatagtaacaaagaacagaagagaatttggagagacaaaaatagttaagacagatttgatgagtaggtaaactgtaaaagaaaatagaattttagaccaatcataagagtttactactaaatgaaagtcctgtgtgtttaaacctttctgcttatctgatcttctgacttatccttcttatctgcagatcatatctgggtgtccatcagcatgttacttcacatctctgtacctcagtttattcatctttcaaatggaagcaacatatagagctgccttatagagttgctctgggtattagatgtataatatatgtgaactgcttggtactgggcctggtatatggtatgtgctcaataaatgatagttgtttattattgtcatttattatcatcatcatcatcatcataattaaatattattccaagcaacaatgtgttcctcatagtccaacaataatttaataaatgtaacctttccaaaactccgatctgcaaattttaaataaatattttcaattaaattaatcagtatgaattattcaccagcctggagttcaaatatggtctgcctctctcctctctctctgtctcagatgtgggagtcttgctttctcacccaggctagtgtaaaatggcacaatcatagctcactgcagcctctaactcctgggctcaagggatcctcctgcctcagcctcctaagtagctgggattacaggcacgcaccaccacgcttagctgattttttaaaattttatgtttagggacggggtctcactatgctgcccagactgatctcaaactcctggtctcaaacaatactcccacctcagcctcccaagtcactgggattacaggcacaagccaccacgcccatctctcatatttctttttaatttcctatctactcacccaaatacccacccatttattagcagaaagtccagtatctctttcatgtgatacctctccctcctctttctctctctcgctccccctccatctatcagaattgcctcaaagccctggggttctagagatacgggaaatccaatctgttcaccatcgtgcaccatattttcagtggtcagttgtgctgtcactagcatacagtagcatcactgaagactagttgcacaccaggggcccactggccacacccagctctctgacacatggtttgggctgaagagtgttagtattttgtttgaaataaccaactagggccgggcgcagtggctcacacccataatccctgcactttgagaggcctaggcagatggatcacctgaggtcaggagttcgagaccagcctgaccaacatggagaaaccccgtctctactaaaaatacaaaatgagtcaggcatggcggcacatgtctcagctacttgggaggctgaggcaggagaatcgcttgaatccaggaggcagaggttgcggcgagccaagatcacgtcattgcactccagcctgggcaacgagagcaaaactctgcctcaaaaaaaaaaaagaaagaaagaaagaaaaaaagaaaaacagaaatagccaacaagtttggaagtgtcacacagaaatgtttgtgtttctcatttctgttgaaaaggtggaagatctcaccatacaagacgtatttccacacaacaacaatcagctagtactgaaaagctctctttagatgg

SEQ ID NO: 7 - DNA, 25837 bp, Mus musculus
ttgtgttctgttctctccttctactctgttggtcccagggatgaaactcaggcttagggtaagcacctttactcgctgagccatcctgtcactcccaaaagggagaaggagggagggagtgtgtgtgtgtgtgtgtgtgtgtgtgcgcgcgcgcgctcaggacagttgaggggagtcagttctcttctcccacctatgggccctagggattgaactcaggtcatcagacttgatggcagatgcgtttatggctgaatcatctcagcggccccaccctaacttccctttatcaagctttgcctcctaaaagttccattatatcttcttagcgccacatactgatgaccaagtctcaacatgggagcctttaggcaacagccaagatcctcacagggccctctctaacccttcccaggttcctctctagcccttcccagcacagcttctgagtgggagacacttcattttcctctactgcggggggtcttgtgatgcttaaggctcaaacatggtcctacactctctaggcaaacattccactgcagagctgtgacctcagccctggatctggtttataatctcatttgcttctttcagaccaaaggctgctaccctggtaactaaaaattgggtaacttacttgtttattgtcctgctctgtctatcagcagcctgtggggtaggctccagaggcacaggtccagaaagatccgccacctcgctcaagttcccttccacctcctcaggaagcaatgaagctagaatcaagctgagtcttcccaccccggcggtgcctgtggcacctttgccacctccacctgacagagaagtgagccctcagctgggcactcaggagagctggtcaagtgatagcctcttgtgacctgaggcctgggaacatcactcaggaaagcagacaggagggcacagaagggaagtggagcccacaagacctttgaaaagcctgggtgggagcttagatttggagaaacctcattttcaggtctaaaaaaaaaaatccaaaaggggagaaagagaatttaacagacaggaaaacacatggggggagagtgctggtctggaagagggagtggggtggaaatatcaagattctgttagtgaagagaggcgcttgccatctgctcctgattgatcacaggccttaaagtctcggcccaaggtcagaggtggcagagagtaaacccccatgacctgagtttgagccttagaaagggaagagaaagccaactcctgaaagttgtccctcacctccacatacatgccataactccacatacatgccatagcgcgtgtgtacccatgtacacagctaacaattgtttaaatgttttcaatctctaaacaagggatggaaacagagcactacatatatacaacacatgcaccacatataccacatgtgtacacatgtactcatttgcatgtactgtgacatgcacacatatgcatatattttaaaagtaggagctgggcgtggtagtgcacacctttaatcccagcactcgggaggcagaggcaggtggatttctgagttcgaggccagcctggtctacaaagtgagctccaggacagccagggctatacagagaaaccctgtctcgaaaaaaccaaaaaaaaaaaaaaagtaggaacgggattttttttaaagtgtggcctttatagggaagtaactaggggtggttagaaaatgatctaggcaagagatactgtcccttgactggaagcaggcagtctgggggctgaggtgtccaccactgaacgagcggactctttagacttagccgctgtggggccgggaagaaggaattaagcatgactccaggaacttacacctcaaagattgggggaagggaggcggtgccaaacaagggctcttaaaggagtagcaggcttctggggaagttaatgagtttgaaatttaacgtaagtgttacatactagtaagataaccaagaaaaaaagttggatctatggatctggaaccaaaaaaaaaaaaaaaggatttcagtaactccgtttacatttagtgtgtgtgtgcgtgtgcatgtgcgtgtgtgtgtgtgtgtgtgtgtgtacatgtgtgtgcacatatgtatgagtatgtgtgtgtgtgtgatcatttctcttactaggcgggttctgaggatacaactcaggtcatcaagcctgatgacaagtgcctctcttcactgaacatctggctcattccatccactgcagtacatgagcagtgtggctgaagccatggacctagatgatgtcaaaatgggcatggggagtgaggtcaggcacagctgtgtgcaagcacttatgaaaggtgaaggagccataggcagcaccagcagtggccgtgggacagtgggagagacctgggatggcactaaggcagaggccaaggccatggatacaggccagaagcccctcatctctagagctctccatgagctcaatcaggagctgagcacaagctaagccagcagagtgatggggaaagaagaagatgggtatggcccagctcacaccccataggtggatttttccttctagggtaaggagtgtcttaaacccctatttgctgtaggatttgatgttgttaggctggccccagctcctctaacacccatgccagctgactgagcattggcatttgggcaaatgtggtccctcccctctcactcattgtgtcttacaaggggctacatgggagttggcgtcacctgtcacctggagaagctctgggcctgctcaccctgctactcttgctctgtctcctagagtctgtcctagggaactgcctggaaagaagttctcctggacaagcaatggagctgccggatcacaacggccttgggtacccagtacggcccttagtcagtgagcacctcaggtcccggacgctccagagacaccacacgatccagaacagcgacgatgcctatgtatgttggcccctcctgctgcttagaggtgggatggtgccatctcaacctgaaagcagagtgtccccttctgccgccatctcctcagtccagccctctgcaagctgtggagaccttttttttttctttgactccccataacagaccagcattaacaggagagtcttgcggccatatgttagacttaggaatcaaatgatctgacatccagggtcttgacctctcccagaaatctaaatccaggcttcaatatatgaaccctcaatttttggtccattcctggcaactgttttgctttctttggctttcttaagagttgacctgtcagagcaagtcttgtcaactgggacacacccagccatggtagcacctgtatgccttcaggcaaccatttgtggctgttcaaatgtaaatgtgtttaagttacacaaaattagaaatttagttctgcggtagtaaataacagttacacttcacacacacagcagtcaccatgttacatgggcacttgagaacagaactgttagacctcactgtctatagatgggttggggagggacaggggtcccctgagagtgacacactgtctgtcactcattgctgctggttccactctacaggtacagctggataccttgccaggaatgagcctggtggcaggcaaggcgctgagctctgcccggatgtcagatgcagttcttagtcagtcttcactcatgggcagccaacagtttcaggatgaggaagatgaaggtaaggccttgcccatgggcaccccggggcagtcttctgtggaaattgttcactggctgaggtgctacgcacatgtgcacacgttaggggctctggcttctgtcagcacagggacatcacagtccaagttcagtgctggagcaggatgtaccttcaacaatagccctctttcagcttctccttagagggcttcatatccttgtagaacatttatttctatgtctttgtagagccagggtgggagaccatgatagagcctggagacggacaggttcaccctttctaaggtccacaggcaaagcctaggaagtcttcatcccaagtcttcacctgtgaggacatcaagagagcagtgcccatgtcctggcttgggtcctaaggatgctggcctcctgaggtttattagtgtttattagtgtgatgctcaagagaaagtggcctggcctggctcctatagcactcactacagttatcctgccccctaaccacaagaaaaggctcttgaagggtttttcatcttcacccccatatgtcagttgctcatgagggtggcgaaaggaaggggcaggtggtcaggaagggtccctaacatctgaagggcctgctgtggcctgagtcagagctggactcaggctgggttgctagacaagacctccccagcctcctctctcctgtcccacttgctcccccacctccacctcacatgttctttttggtcttgcagaatgtggggtgagcctgggccacgagcatccaggcctgggtgatggcagccagcatctcaactcctctcgctatccagctacgtgtgttacagacatcatgctcagccacaagcacccagaggtctccttcagcatggagcaagccggcgtgtagcaagatatggaaagtgagtgccaccctgctcaggcccaggcagccctggggcccagtgccagcccctcatagcctcaatgtgttcattccttgtgtggtaccccactaaacttgagcgacactctttttgtgcaaccttccccgtctgcctgtttcttcattaagtactgtgttagttttgaggtgggctgaggactttaatttagggaagaggtacatggcccacctcatgttatagatgctatggctttaatgagatccaagctacagttgcagaggccagaggccaatgacctttggccagctctctaaagctagtctttacactccatcctgaagagtgaaacccaaccagaaaagggaaaaagagcagatccagtcaggctccttcactggtggtttttattgtttggttttggcattttggtgctaagcatagaacccagggccgtgtaagccccagccccagcctcaaccccagccccagccccagctggactttttagggggtaaacccatgctgaaaagacagaaggctcaccggccctgttggcctagcagaggtcacatggatggtgagtactagtggctctatctctacagagacagaacaacttgaggaaggtaaagccacaggcagaggcatggcagagcctcagtgtggcaagactcatacagtgacaccaagaaaagacttcactgagagcctgcatgcctgtggctcactgacagagcagggcatggacacatagggccctgagtcccagccctagtaccattagaaagggtggggagaaagggtgaagtcatgtccctctccttcaaggtgttcttgtctgcttcgtaggttcgagtacagctccaggaggaggctgagtctagaccaatagaccaacagtgtccaacagcgccgcaccgctcctccgtctgtgtctccaccacaacagtgcagctccttcccctacactaggcaccagtaggccggcgcttgggttgcgagggacatttgccatgtttgcttgtatgaccaaggcaccaaggaaataaacaggaaatcagtgtcctccatctttcatgagccagcatctggtgtgcttgagttgagttctgctgttaggaggtttgcttgtgttttgttttggaaattttcctttggagataacttattctctttgccttgcccacccctacccccttgagcatattcccccccccctctcgttttcacctaccatttctgaggtagatgaaccagaggttagtattcaggggctgaacctcaggaccctcccttccacagcctgtctcagaccagactctctccctctgccccggtctaccaggaacaaatgctagaccggagcttggtggccaagaaaaggagaggagggggcagtggcccctgcctttggagattggaacagaagaaaaaactgagcctgggatctggcagaatctcctgctggcctctactagaatcctatctggcccagcagaattccatcagatcccagcacaggccggatggcctggtgctgaaggtttgccatccagaatagctcagtgtaggcccctctggtgtgtggtccagttcccctccagtcaccaactggttccccctcatgagtgaacacccaggagtggtgcactgtgctgtttgtgtgatctccattcttattctctactgcgttgtaaaaagggccgttggtccatttgtgtgcacacgtatgagtgtgtacatgcccttccctgcggcctctttgtcacagacaagaattggaggctgtactgggtctcttaaccttctcctctccccagcatcctcggcccctatattttaattcttgatcatgtaggaattgtttttgataaatgttgatattattgttattattgttattattaataaagacaaaaaggattttgtttatttgtttaaaagagaaatgtttaaccagattctgtgctgttgaactgtggcttgcaacttctgtttgaagtgttttccttggctttggcatcgtgagccactctcctgtgccagcagcggatgcagtggcctcccttccccagccgaagcagcacataggcagtggctactgtccttgtcacttcctttctctctgcagtcagaaaccaaagtctggggccaaacgaggccggcccggcttctcttctggtcttcaaaaccagagagggatggtccctgctctgactcccagccctcatttctgagagccaggggccaccaacctctgagtatgcacagaagaaagccgctgcctgccatggcatctggacattaccagcagggtccctagccattttatccttccgcaccaaccctgaaagcttgcctctttgaacaaatccattgtctcttgaatggatttgttttcaatgtgagagcttggctggggacctgtttcgtggtcccatgtcctccaatttcccctccacttcaggtgtcactaattactagccagaagatgtctgactcccaagaaagcttgacaagccattgtcagcttccaagctcagtccagctctgatactccagccccgccctgctgctccccacgctcagcctgacctgtttacgtggtactggattgatggaagagcaggcaccaccctccagagccacccagacgaaagccagtgagcctattaaccgtgccatcttgcgaactattttcaagatcaccattgctttatattgtagtaaccaatatgcgcagtatatgttgaatgtatatgaatctactttgctatttctgttctttgaaaatgtaagaagtatttttcctttctcatttctgttgatctaaaaatgataataataataataatctccagattcaagttgctaagagcttttgtccttgtttgtgtgggacatctacaacttagtgacttggttggactgtaggaggttgtggaaataaaaacctgattatgtactaacgctgatatgttgtttgccttacggttcagagtctaattgagagaatcacatggggtaggggcagaggtgacccaggtgtctggagaagtccccagacttagggtggggcttggagcagcacattctcaccttgccttttggcctctgaacctggcaaatcagactcacactgtgtccaggcatccgtgtggactctaacccctcagaagggacacatttgtgtttgcagagttgggtgggaaaaggattccttggggtcctcagaaggagagccttgcattgaccctggctggaacctttatgaggtggcctccctcagctgtaggacagaagggcttttggtactgtttcccaatgtctgttcctggattccaggtggagggcagaatttccaacagggccccaggctctgctgaaagagctgaagtcacacgagaaaaaagatcaatgatctggggaatacggagatttgtagaaagagtgacagaggctggaaggatggctcagtggttaagagcaccaacttcctgcaactcacaccacacagaactccaattccaaggacccgacatgcttcccaggctcctgtgtacagataacatacactcatacagatagaaaactctttaggcagggagaggcgcatataagaaagcctttgaggctagaattgcaatgaaactgctcagagtggaaggtgccttctcagcccctggaggtcttgaaggtgtacgcaccgcacagaggtgagctggctttggaaccagtgatgggccctaaggactcccaaaaggtcaggacacctttcactgatgctgtgtctgcaaagtttttggctagaggtcgggtaggtacccagaggcagccagattgactctgggatctgaacctggacatctctgccctccaagaaggaaagaaagacttcctgactttgtactggagccaggccccacccacttaaccacggagactttagtctcctgagcaggaggcaggaacatcattcagagctgatgacagtgtccttccaaacaggaatcactggggatccagtctgcttagggagaccctccccagccctggctccccattcctgctagcactaccccttgttgggtacatattcccagaaggggctggcaccattgaaggcctgcgcctttctgtgaccctttgccagtctgagaagctttggtgtatcaatgttattcatttagtaaatgtttggtgtctctggtgccagtcccactaaaggacagagtccttgcactgccctgtgcaggtgatctgtgctgagacagaagttgtgaaatgggctacattcgctgctgctgaagctaccagcactcccgggatcccaggccagcacttgctggtccaatccaggagtcactttggaggttcccaagatgagggggtgaagggtagtgagagaaatgccaatgataggcactatcttcactccctggtcacccaacacctctaacagcagccaacctgtctcaatctgtgatgagcccatttgactcttgatctgtccagaaagacttcctgttcagaacagtaagtagctatttagactagtttaaaccaaatgtctcctgataaagtaagtcactagcaagtaagtatggggtgtgggggagggagcatggagcatacacctataaccttagcatagaaagccaaggcaggaggattaccacaagtttgagaccagcctggactatataccaagacaggagcacacttattgctcagtcaggttgtcccagagtcgtctaccgtgatgtcatggattccagtccccaagccatgtccctggagagagtacaaaggctttggaagtgaagaaatcaccatcagagaactagaggccggacccgatccctagccccttgggcactgtctcaaagctggggggcaagaatgttcttagcatctctgagctgccgttttttctgacaggcaaactaccaagggggtgaacatggcgtccagccttacaggggtgtctcaagtttactttaaatgagttgcggagcaaatgttaggttcaattaggattagccagcacggtttcagtaacgagccagaaagaaagataggactgtgggaagcatcctggaaaccaacagacacccccacccccaccccacccccaaaagacctaaaaaactactcctgtggaggccacctccctctgagtgctcccacagccctcgggggctggtttcaacctggaaaagatgtcctgcatcacagcacctgcaagccagacacctgccttaccccatttttgctgccagcaactggggtcacaggctatggcctagtaacagaatgtgttcgtggcagtgacctcaggagtctgggatgcagaacacttgccatttgctgttggtcacctttcagcagttttgcttgaaatgtgttcagacttcacagacaacacaacacaaataaaactctggagttcagaagctcaaatcatggctaaaagcatgggattgtcagagtgatattctgtctgaaaactctttcattcagagaaaacctgcattttctcttctctcttccagcacccatggatgggtagccgaaacccgcttggctcatctgcacactcagattgcttggtctctatttctgttctcaagtttctccatggttttggcccttctgcctcctctagcatattgagagacccttgtgattactgtgccctctggatatcccaggctacccttgagttcaagtcccctaatcacatttgccatgttagacaccacgcacaggttcctggacttagtaagtgcacacacatcttttccattttgcttcccatacagtgactgggatcataaggaagctgtggcatgctctgtcattatctttccttagcagataagagacccagggacggagaggttatgtaacctgtccgggtcacctggagaataagttgcagatcccagaaccaaggttctctctggttgcaaagcctcctgggatgggagcagcctggaatcccagccactccctgaactggtagacagattccaagctggtttctagggagttggggagtttcctagggagatgggcagagtacattcctgccctgggtcccaaatgcagagacctgggcgcaaggtccatccttgcctctaaggctgagagataaaggacacagcaaattccttccactctcaacaggcccttatctagaaggaagttcatggtagaacctcaaatagatggtctcaaaagttcctcttagcttgaaaactcactttccataatgggattttagagatgatctgtggtttttgtttgtttgtttgttttgttttgttttgttttgtttttagatattctcatatagcccaggctgacttcaaacttgctatatgggcaaggctgtggttttgaactctcaaccctctgaccttccaagtgcaaaaactggccaccgtactcagcccactctacacagctacccagctctcccatcctggcaagtgagcctaggccctcaccactctgggaagacatatcgtcactgaactacatgaccccttttagtggtcatggtatatggtgaggttttctctggaagggaggctgaataacagcatctacacataacaaaaacattggcaactggggctggagagatggctcagcggtttaagaccactagctgctcttccagaggtcctgagttcaattcccagaaaccatatggtggctcacaaccatctgtaaaggaatctgattccatcttctggtgtgtctgaagacagagcgctcatgtacctaagataaggaagaaaggaagggagggaaggagggagggagacaaggaaggagctaacaactccatgttggcctctgtcatttcttctgaagcatcagaggggtcttcatcctcagcttggggatatgagcctgtctgcatctcactcaggctgacacctcagttgtttttggatttagggttgggaggctggctaaacatgtggcatctggaaagacaaatccccaaacctgggggaccagggtgaggtgaaagggggaaccccttggaaagcaaaaaaaaaactttggggtggggctgtgagtgaaggagcccacaattcctccctccctcccttgttccaggctcagagggcactagcaacacagaggagtccaggagtgggctccatgagactatcttgaagaagacatacacctcgggatggtgcaactgccttacccctggggacccctggagtctgcagccaccccctgctgcccccacctgaacccttgatcccagctcggcagcccccgcagtttcctgtttgcccactctgtttgcccagcctcaggaacagagctgatccttgaactctaagttccacatcgccagcaaaagtaagcagtggcagggccaggctgagcttatcagtctcccagcccagcccctgcccacacacatatatagaccagggaagaagagctggacacccagactgtcggagagctccggggaggtaagtgctgctacctgccttcggtggctctggctccatagcgcctcccagttgatgctccactgtccaaatcaataccgtggatatctcgcacctttagccattctagccaatgcttccatgggcttgaattgtgtgtggagcctttccatgacaatgcctcccttcagcccagccctcctcctccttcttcttcttcaggtcacccacacccttcaggatgaaagctgtggtgctggccgtggctctggtcttcctgacaggtaggtgcctcttgacctgcgtgggactaccttcctgggcacagagaacagaattcccactgttctcttccctgactccgagtctaacctaacatgggtctcccctccatccccagggagccaggcttggcacgtatggcagcaagatgaaccccagtcccaatgggacaaagtgaaggatttcgctaatgtgtatgtggatgcggtcaaagacagcggcagagactatgtgtcccagtttgaatcctcctccttgggccaacagctgaagtaaggaaagacctagcgtggggcctggagcaggtcaagggctgcccatccagggtgggcagagagaccagtgagaagatgctggaactgagctggctagcccttcacgggctttcctaccagctgggcaccatggcaggttccagtggaggactagggatgggattcatctggctgttgggtaaccacagcccctcattcagcctatgagtgccaaatcccttttccttggtaacccccagtactggtcagacagcacccaaaacaaaacaaaacaaaacaaaaaacaaaaaacgggactggccttgtaaccagcaccgaccacatctgtgttcttggtgccttccgccatgtgtacagaggaatgtaaagggaaggcagtgagttagagggttgcatgttcggggaaactaggaccatagcaactgcacattaggggacaggtggcacccagctatcatgtgcatggatctgcagaccaggggcagcgcatgatgcctgggctcgtctctcagccgctctcttccccctctagcctgaatctcctggaaaactgggacactctgggttcaaccgttagtcagctgcaggaacggctgggcccattgactcgggacttctgggataacctggagaaagaaacagattgggtgagacaggagatgaacaaggacctagaggaagtgaaacagaaggtgcagccctacctggacgaattccagaagaaatggaaagaggatgtggagctctaccgccagaaggtggcgcctctgggcgccgagctgcaggagagcgcgcgccagaagctgcaggagctgcaagggagactgtcccctgtggctgaggaatttcgcgaccgcatgcgcacacacgtagactctctgcgcacacagctagcgccccacagcgaacagatgcgcgagagcctggcccagcgcctggctgagctcaagagcaaccctaccttgaacgagtaccacaccagggccaaaacccacctgaagacacttggcgagaaagccagacctgcgctggaggacctgcgccatagtctgatgcccatgctggagacgcttaagacccaagtccagagtgtgatcgacaaggccagcgagactctgactgcccagtgaggtgcccgcttccactccccacccccgcattggctttcttacaataaacctttccaaaatggaatagcttctttctttgggggacatagggcgggcgctaaggggacatcaagggacgtgagaacatggtgccgcactggggattcctttgtacgcgactactcagctcttaacgctcactcaagctgggcacctggctggttcagggtatgagacagaatcccttcctaagaaggctccaagggaaatggatggccaggcaaagcaacaaggaaccccaaaagggccccacagaggctcagaacactagtgctgtaaaccaggatgagagtgtctggcaataggactggctttgagaccgctggtttcttgtgctagccgagtttccaggtggggtccagagggtgcaggacgggagcctcttccactccctagagccaggattccttcaggagccaggaagattggagttattgggtgggtgctaataaaaagcctggagctgaacccgatctcggtaaacaattccctttgatctttccctccggtgcacccacacagtgtgctgaaagggtcaaggctgcagctactctacctgacagttggatacaaaaacaaacaaacaaacaaacacccctctccatgatgctggtgaccacacatttactagagaggccttcatatccatctctaaatcctgaaggatggcctttaagtccacaccagttggggaagctgagctgggaggtctgaagttagtcactgcagaaaaggtgggtcaggatgtgccgttccattttaaaacaaaacaaaaacaaaacaaacaaacaaaaaaaccccttttattacatggggctggtaaggtggcttatcaggtagaggcactttcggaagtctgagaacctgagttcagtgcttagaagacacacacacacacacacaccccacaaatataaataaaggtatataaaatatttaaatttttattagacttatttagtgtgtgtgtgtgtgtgagtgtgtgtgtgtgtgagtgtgtgtgtgtgtgttttcacgtgccacagaacatgtgtggagattagaggacaatttgcaggtatctgttctcttttccaccatataggtcccaaagatcaaaaactcaggtcaccaggattagtgtagcgagcgtctctactagctaagccatcttgccagttcttgtttgtatttatctactagctaagccatcttgccagtccttgtttgtatttattttatttggagacagtgtctccactagcccaggctagactcagatgagctctgatctttctgccccatctcccaagtgctgggggtttcaaggatggtccaccactgttactctgtgctgagacaaacccagagctctgtgcatgcaaggcaagccctctaccacctgagctgcctgccaagcccagactgttcattgtatagacttgcccgctatggagtgtaaccaagcactcatgttcacagggttgaggatgtctgcagaagcactctcacaccaacagccttcctctcatctgcccctcttcatgcctgtgttggtatgcaggtggtctccatccatccccggtgtatcttcatgagcccctggctgaaggggtgagtttttaaatccacaatcatgcagagccacagcagacattaaaccaggtttgggtaggaaagtttcccggtgtggacaatgagacttctggctcttggtggacaggaagagaaacccctattggatttccagagagaacatagtccagtctgctggctgtgccaatgcagtctggaaaggagcttccaacacctggcagaggcttttccggtgccagcaacgtggaaaatggaaagctggccctgcagtgtgttttctcctgatccggggcagccactggcactctctgaacattagtcttttactctataatgtgcaagacctgttttgtgacactgggtctctttgaagtgagtgtttgggggtggcaggaacttagcaagcagcccttttgggattctgaggacactgggtctccattccagtctagaaggtcacctagtttagctatcacagtgaggactgtttacaaggggtgtgcgcatgcggcacctcatgcttttagacactaccatttcatttctacaacaaaccttcaggggaggggcaggtcctacccactttattcataagaaatggaagccgctacactgcagtggggttgagacttatccgaccaccctcccaatctgcctccttcctttccgcctgtttaaaggggccaggcagcctgggctgtgcaaaccagctgcacggggttggtgatcatatctgaccttaagcctggagatgacataagactgctagctagacagatactacactccagccacgtcgtccacgttgtcctgcccttgacaggtttatcacagattgtaactgcaaatctgtcgttacctgatttgatctttcccattaagtcaagcagggaagcggagttagtcccacgtacaaaggaagaagcaccccagagaccactaaagaggtggatgacctacagccccaggtccaccccttcaacaggcctagctcatccccatgcccagacgtccaggcacatgggacacccactaacagcagcttcttatccagctttattagggacagcatgtttaggtgagatctagggaggggtgaagacatgagaacatactttccccttaaagcaaccttcaggggccacctggcaggcctggaggggggcagcaggatggaggaacaggcacatctgcaacacagaagtctcacgactcaatagctggagttggttggtcctcagggttagaatcccagaagccggtgaacttgtcagtaaacttgctccagtagcctttcagggatctgaagtgattgtccatccagcccctggaggttaaagcagtaagaggcatccataggagagagggagagagagagagagggagagagagagagagagagagagagagagagagagagagagagagaggtgtgtgtgtgtgtgtgtgtgtgtgtgtgtgtgtgtgtgtgtgtgtgtgagaaaagctcccccgtgggcagctagacccaggactgcacgcagggctccactggctctctcagccaccagcaccaccttgcctatcacaccccaaaatcacctgcagctacctaagaaaccccaccttcatcaaggttggatcagaacctcagtgccttccatccaatctcctttcaggccggaggcaccaagcaccggggagctggatactaaggtcagctacaatgcagctgcctgtataggccatacaaatcactcccttgaggtaccccatccctggctctaagtgggtgaggcagaggcagggccagtctctcatttgaaacattactgaatgacttctaagctgtgtgatctaggccaggttatctaactctttatcatcagcaaaaccgagtatctaatatcctccccacagcctgttctggggatagagactgtcaacatcttttgctacataggcaactaaactatcaaatgtcagccaaagccattggccagggggtgatatttcatagtgggcaagatgcctacctcagactgagcccagggatagaaacagggcagactcccaccctctaacccccaacttcccacctcacttcccaccactaccccctgcatacaggcagaaaccagagcaggtaggcctcccatcgtgtgcgcaggacccagaggagaaaacctgcagcgaggctaaatgcccctcaggctgctctgaggaaaagcagagaagataggagaaggctgcttgccctgcctgtcatcttggtcacagtaccgaaaggcctcatgagggaccagaggctcgggcaggtcccaggccctggtaaacttggtggaccacagtctctgtgctagggtctcagcaccagggcatgagaggagaagacacaggaaaggaggccagtgtgcctacctggccaccacagctatatcggactcctgcacgctacttagcgcatcctggaccgtcttggaggcttgttccatgtagccctgtacagagcccagcagcaaggatccctctacctcttcagctcctgcgagagagcagagttgggccacgccagccctcagctcctgcccagccaccacttctcagggcagggccccctgaccagctcccactgaaacccagccccactcccaccatcttacgggcagatgccaggagagccaagagggccacagtgaggagcgtccggggctgcatggcacctacgtacctgtgggaaagcatctcgtgagaaggtactgtggatctgccacatctaggtcctccccttgagaatgccatgactcctgggtcatgaatcccaagcctttctcccactgatattagatagagaactacagtagacccagccccccaagtggggtggaaggtggagtatagaaatactctgcagaacgggacatctactctaatatgctgagaaacaataggtttcttttcctcgctaggactcagttttttcagtcctgggtaggcatggataccaaaggcttctaatagctcagagcaagctaaacaagggacagcatgacccaattgcaggcagctctgccactacccagtgcaaggcttttggcccatagcctccctttccccagcttctagccccccccacaccaggaacccaagggtggagaccatgagtcccaagccttctgtgggctagatggctgggtggtgagagcttctccctccagctctttgtttcttcccttccttcctctcctccccaggggcattacctggagtagctagctgcttctagggataaaactgagcaggcaagcggggagggctgtgacctgttttatattggctccaggatgggacagcgggcacagaaggcccagtgagctgggcaaaggtcacctgctgagcagtccagaccagagcctgaggcaggaaggccatgcagccatctgccagaggagttgagaaatccctctgagattgcccatgcttttcacggccacctccgccaccaagggatcagctaccggctcacctagatgaggtcggtgagacaggaaaagacaggggacaagccttggacctcaggcctgctttacagcctagagccagtgacaggctccttcacagaagccacctgaaagccttccagtagaatggaatggggaatctgtggtgccactgtggagcaacggaggaagtggggtgggagggggcagagtgaaggttacatgcccccacactgacctccacctgtgatcccaacagtctcctctgccgtagctgggcagggattagtgagagaaggacaaaggtcacatggaacccaaggccttgcccctccccaactcctccacaggcctcctcttgccctctggacctatcgttagtaatcctgagataggagcagggcccatggctgggtgatatctgacccctacatgagccctatctatgagaacctgcaagcagcaaggtatagacagggcattcacaaagaaggtgaggatgaaggaggcgctctggggcaactaagatagtcccctgagctagtactgagacccacagcctagacagcaacagaggacatcatcttctggatgcagactttggagccaagaaatcctaggtttagggttttttttggttggttggttggttggttgattttttttttctgagacaaggtttctctgtgtggccctggctgtcctggaactcactcttgtagacaaggttggctttgaactcagaaatctgcttgcctctgcctcctgagtgctaggattataggcatgagccactacctgccaaaatcctaggtttaaatgctacattcgggactagagaaataggccaattggacaaaatgctcgtcttgtaagtaggaagaccatagttcaatccccaaaccccatggacagcataagtgcagtagtgtccacttgtaatcccaagcactggggacagggagataggtagcaggccaggagttgatgtcccaccagcctagcttcttcagtgagccccagataccactgagagactctgtctcataaggcaaggtaaacagctcttgaaaaatgatacctgagccaggcagtggtggcgcatgcctttaatcccagcacttgggaggcagaggcaggtggatttctgagttcgaggccagcttgggctacagagtgagttccaggatagccagggctacacagagaaaccctgtctcaaaaaaccgaaaaagaaaaaaaaagtagaaagtagaaaaatgatacctgaaactgacctgtggcccccacagttgtgcacatcacacatgcctattgacctgcacaaacgcctaagcaactgacgcctttgaggctgacatgtagggtctgtggtcagaagttaacgggatgggacactgacttcccagcgtgtggagaaacacacagcagctggcccagggaaggactcagtttccctacctcccaaacactgacagcccagccagagacagcaggcagtttccatgcagaaacagggcttgctgcaggcagcaacctctctgaatgaaatctcagcctgagaggagcctggctttcccctcagaactcttaatctctgtctttggctgagacacgaagctcatctatcagaaatacattcttttgatataagactgttgtctggggtagctgtgatagtgtttgcttaaaagaccagcactcaggaaaatagtgttagaggtcagcctggactaaataatgtgactgtctcagaacaactcaaaacagtttgtttcctgttaaaatgtaagttgtccgaattatgtagcttagacattactaactccgtttatggctaaaaaccaaaggcccagtggggtagagactgctcaacacatgccacccagcagtggagaagctgggtctcagcacctgagctggtcctcagcacccatttatacccaagcttcctctgagaaaagtccctggcgaagctgagagggaacaaaggtggtaccagggcggggcactgtgtgtcgtggtggagggagatgccatgttcttttttcttctcagcctgtttcttgttcctaggcaaagggcacagcagggatcagatcccaatctggggtgtgatatcaagtctttggccctgagaatgatttaacaggctgactgggtcattgtccattggtagggagggtctgggaagcctgtcacctcccctgtatgtagaacatggtcactgaatcaagaaaagtcaaaagatgccaatagagagtcccagccatgcgatacttagctgcacagaaaacttaggtgtatgaatcccacagagtggttggcaggcaggtgataccttggaacctgggctctgggacttagtcccttccaaaaacccttgtaccctctcagccataggagccttatggtggcctcttggtggctttctggcctagggtcctctggggaaaggacagtgttcttgacttacagacccagtcccatggaggaaggtagcagtgggggggggggggagtttcttaatttcttttcctgttgctatgatacaatatcccgacgaaaacaaagtgaggagttatcctggctcacacatggggagccatggtggcaggaacacgaagtagccagtcacatcacgtttacaactaaaagcaaagagccatgcaaagccagtcctcagctcggctcgctttcttcattttgtgtggtctgggatccttcatccaacaacccccccccaccccctcaggtgattccagattctgtcaaattgacagttaaaactaatcaccacactgtggaagatgtcttgaacatttgggctgagaacagccctcaggagtggcttgccagccctcctctgtttggctaacagcaggttgggtggatgagagccccagggctctacttggatcctataggcagatggatggtgcacagctaccaatcagccttactagccatgagctccgtgtgagcacaggcagagactgagggtcagacagagacgtgagttgccaagaccacttgaccctctgtgcccgaggctggcataaggtggtctgctctttttccccagaagctgacacatagggttctcattttgcctcaccctctatgcaaatcaccagcagatgcatatgaagtatgccccagtcttggagaagtcaatatgatgatttatgacgcgccaggaggcaatacaacctccctgtaggggctggtgcatacgtgagtgctagccacacatgtgtgtacgatgacccagtctcttagctcagagccaacttctgaacccctggacaactcagatatctatgcatatctgacagcccgtcactggaaaccacccttgaacaaacttaggtaacacaggtcttctcagagagggtatgagtgggcaagcacctctggacctgtcccacgctgctggcacttgagagactcagtctgcaggttcaggaggtggaactgtagctgagatgtcctacgtgactcatcccccatcagttctgacctttgggcacagcacaggctggaccaggcatgattaggtaaagcaagatgaggaccaatgggtcaatggtacacagagagaaaccgtacatagctaatattcaacgaggaacctaaggggagccagactatctcacagaatcttcacaacgaagactcatccaagaccacacagcacagactgtgtgggatccacgtgcaaacacagggagtcgactccagagcctgaactcagaaaacattgaaagaccaccaagatgactcagtgaacaaagtcacccagcctgatgacatcagttaaaaccctagaacccaaatggtaggatgagagaacaaacctctccagttctcatctgacctctatacatgtattgtgatgtatacatactcacccctaccaaatattagtaaataaataacattatcactatcatcattatttttgtttgttttgttttgttttgttttgttttgttttgttttgttttgttttgagacagggtttctctatgtagccctagcttcctggaactcactttgtagactatgctgtccttgaactcacaaagatccaccaatctccacctcgtgtgtgctgggattaaaggcatgtgccatcacacctggcataaattaattttcttaaactcactaagcatggctgtgctaggaaggaatgagctcggggaagctcgagccctgtggggagccatgcagtgcagtggggcccagcagaggagcacaggtatccagctgtcttcagtcccatgagacaagctaatctggacacattttaaaaaatggatggcaacacagcaaatcagactgggcacaatcgtggtctattctaatggctgtcatttcacaaatgctgtcttgtggatggcagtcaatgggacagtatgatggatgccctcatctagtccctggtgtggtccactgaggctccacactgaccacagcctggcatcttgcctgtggatatctgctgcaattgtatgtgtggacacatgtggagtctcagtaggagacctcaaaaaactcactttccacagcagtgtctgtcaccttctgtggggggggggggggtgggaagagagagagagggagagagggagagagagagggagagagagagaggagtcactctgcatggctcttgcatatggctgagaacagtggggcagcaatcaagccttagccagccctgctctctcactgttgcctctagcccacttggtgaccctctgagggaaagggtggctctccctctgccactgtcaggagaggatcaggttctctccttccttcctgtgctgatgcacacagaaaatcattgtcattaatttcagcccttactctgggctaagctccctgcagccatctcacaagtaccacctaatttaatgtaacaaactacacattgttcaaaagagaaacttgaagcttcatgataactggacggaggtgagccagcttgacagtcatgagatacaaagcccactatgattaactcctttgatcctgggttctgatcctctcctgaccaagggtatcacagacacctcaactgaggctcactgtctgctgcagccctatgccatctctgggcctggtaccatctctgtagctgatgttctgagacaaagttcaggttggtggcagctgtcagactggtggctgtctcactggggtggaaagaggagacctggaccttgttctctcagactggcacagacccagggctgccaaccgggcctctggggcctcagttctgttcagggactcccctagactcccaggctcattcctcctgaagtttctggctatccttcccagcctcttggacagggtggagccaactcaagaagactgcttccctctgctgcctgtgtgctgtcagcttccacgttgtcttagggccactaaagtccaagaggcctcctgggagtgtgtcaccttccaacgtggagtcacactggggaggaggcggggagagagggctggaggggctttaaatgagtggctggccttgcctgcagtcaatctgcacagggacacaggtacaccgtttcttctgactccgggaaacatccagtgtagccgaaactgtcccagcccagtgaggagcccaggatgttcctgaaggctgcggtgctgaccctggccctggtggccatcaccggtgagtagacactgcacctgggaggcagcaagaaaagccagctctagaactggcggacagctcggggtggccttgtatttgcccagcagctcataggagaacaggcctttgttctccctggcacttgtgctccctgggttatcccagggatggggcaatggtttgggttatccaaactccaacattatccagctcagagctgaggcagaggggccaggagagagatgatcctcataaagttgccttctgctctctctctgcccaggcacccgggctgaggtcacttcggaccaggtggccaatgtggtgtgggattactttacccagctaagcaacaatgccaaggaggctgtagaacagtttcagaagacggatgtcactcagcagctcaggtaagtgcgatcagtctacaaggcgaggcttgaagcccatagctgacctcagaggtgggacactggctcctggagttcttctgttctcactaaaggagtcttgcctccctggacctagattgtccctgtaaacaggaaagctggacccagggatccatccctatagttccttcctatctgcatgtgctagagtttggtaaatagccaaatcccatcacaaactcttagcaggaagaggaaagagacgtgtcctgtaaggacatgaggttctgggcaaacaggggaaggagggctggtattttgggggacccactgagcacatgcaaggacatcagaccctgtgccactggaagacatgtgttgcacaatgtgaccctgggaggggagtgatgccaaagtccagccccattctttatccacaggtaaggaaagcaaacttctcaagtcacatggtgggcagataaggatgcagaggctcagcagaagccttgcagataaaactccaaagtcaaactaatcctaggagatttcctgaaagcatgacctaccccaggggagggtcaaagggacaagacggaggtctctgttcccatggacacactcctgacctaagcaggtgtatagagctgagtgttctacaagcgtatctaatggtgcttccttgtctccatcctttccctgaagtaccctcttccaggacaaacttggggatgctagtacgtatgctgatggggtgcacaacaagctggtgccctttgtcgtacagctgagtgggcatctagcccaggaaactgagagggtgaaggaagagatcaagaaggagctggaggacctacgtgaccgcatgatgccccatgccaacaaagtaaccc

SEQ ID NO: 8 - DNA, 25837 bp, Mus musculus
gggttactttgttggcatggggcatcatgcggtcacgtaggtcctccagctccttcttgatctcttccttcaccctctcagtttcctgggctagatgcccactcagctgtacgacaaagggcaccagcttgttgtgcaccccatcagcatacgtactagcatccccaagtttgtcctggaagagggtacttcagggaaaggatggagacaaggaagcaccattagatacgcttgtagaacactcagctctatacacctgcttaggtcaggagtgtgtccatgggaacagagacctccgtcttgtccctttgaccctcccctggggtaggtcatgctttcaggaaatctcctaggattagtttgactttggagttttatctgcaaggcttctgctgagcctctgcatccttatctgcccaccatgtgacttgagaagtttgctttccttacctgtggataaagaatggggctggactttggcatcactcccctcccagggtcacattgtgcaacacatgtcttccagtggcacagggtctgatgtccttgcatgtgctcagtgggtcccccaaaataccagccctccttcccctgtttgcccagaacctcatgtccttacaggacacgtctctttcctcttcctgctaagagtttgtgatgggatttggctatttaccaaactctagcacatgcagataggaaggaactatagggatggatccctgggtccagctttcctgtttacagggacaatctaggtccagggaggcaagactcctttagtgagaacagaagaactccaggagccagtgtcccacctctgaggtcagctatgggcttcaagcctcgccttgtagactgatcgcacttacctgagctgctgagtgacatccgtcttctgaaactgttctacagcctccttggcattgttgcttagctgggtaaagtaatcccacaccacattggccacctggtccgaagtgacctcagcccgggtgcctgggcagagagagagcagaaggcaactttatgaggatcatctctctcctggcccctctgcctcagctctgagctggataatgttggagtttggataacccaaaccattgccccatccctgggataacccagggagcacaagtgccagggagaacaaaggcctgttctcctatgagctgctgggcaaatacaaggccaccccgagctgtccgccagttctagagctggcttttcttgctgcctcccaggtgcagtgtctactcaccggtgatggccaccagggccagggtcagcaccgcagccttcaggaacatcctgggctcctcactgggctgggacagtttcggctacactggatgtttcccggagtcagaagaaacggtgtacctgtgtccctgtgcagattgactgcaggcaaggccagccactcatttaaagcccctccagccctctctccccgcctcctccccagtgtgactccacgttggaaggtgacacactcccaggaggcctcttggactttagtggccctaagacaacgtggaagctgacagcacacaggcagcagagggaagcagtcttcttgagttggctccaccctgtccaagaggctgggaaggatagccagaaacttcaggaggaatgagcctgggagtctaggggagtccctgaacagaactgaggccccagaggcccggttggcagccctgggtctgtgccagtctgagagaacaaggtccaggtctcctctttccaccccagtgagacagccaccagtctgacagctgccaccaacctgaactttgtctcagaacatcagctacagagatggtaccaggcccagagatggcatagggctgcagcagacagtgagcctcagttgaggtgtctgtgatacccttggtcaggagaggatcagaacccaggatcaaaggagttaatcatagtgggctttgtatctcatgactgtcaagctggctcacctccgtccagttatcatgaagcttcaagtttctcttttgaacaatgtgtagtttgttacattaaattaggtggtacttgtgagatggctgcagggagcttagcccagagtaagggctgaaattaatgacaatgattttctgtgtgcatcagcacaggaaggaaggagagaacctgatcctctcctgacagtggcagagggagagccaccctttccctcagagggtcaccaagtgggctagaggcaacagtgagagagcagggctggctaaggcttgattgctgccccactgttctcagccatatgcaagagccatgcagagtgactcctctctctctctccctctctctctccctctctccctctctctctcttcccaccccccccccccccacagaaggtgacagacactgctgtggaaagtgagttttttgaggtctcctactgagactccacatgtgtccacacatacaattgcagcagatatccacaggcaagatgccaggctgtggtcagtgtggagcctcagtggaccacaccagggactagatgagggcatccatcatactgtcccattgactgccatccacaagacagcatttgtgaaatgacagccattagaatagaccacgattgtgcccagtctgatttgctgtgttgccatccattttttaaaatgtgtccagattagcttgtctcatgggactgaagacagctggatacctgtgctcctctgctgggccccactgcactgcatggctccccacagggctcgagcttccccgagctcattccttcctagcacagccatgcttagtgagtttaagaaaattaatttatgccaggtgtgatggcacatgcctttaatcccagcacacacgaggtggagattggtggatctttgtgagttcaaggacagcatagtctacaaagtgagttccaggaagctagggctacatagagaaaccctgtctcaaaacaaaacaaaacaaaacaaaacaaaacaaaacaaaacaaaacaaacaaaaataatgatgatagtgataatgttatttatttactaatatttggtaggggtgagtatgtatacatcacaatacatgtatagaggtcagatgagaactggagaggtttgttctctcatcctaccatttgggttctagggttttaactgatgtcatcaggctgggtgactttgttcactgagtcatcttggtggtctttcaatgttttctgagttcaggctctggagtcgactccctgtgtttgcacgtggatcccacacagtctgtgctgtgtggtcttggatgagtcttcgttgtgaagattctgtgagatagtctggctccccttaggttcctcgttgaatattagctatgtacggtttctctctgtgtaccattgacccattggtcctcatcttgctttacctaatcatgcctggtccagcctgtgctgtgcccaaaggtcagaactgatgggggatgagtcacgtaggacatctcagctacagttccacctcctgaacctgcagactgagtctctcaagtgccagcagcgtgggacaggtccagaggtgcttgcccactcataccctctctgagaagacctgtgttacctaagtttgttcaagggtggtttccagtgacgggctgtcagatatgcatagatatctgagttgtccaggggttcagaagttggctctgagctaagagactgggtcatcgtacacacatgtgtggctagcactcacgtatgcaccagcccctacagggaggttgtattgcctcctggcgcgtcataaatcatcatattgacttctccaagactggggcatacttcatatgcatctgctggtgatttgcatagagggtgaggcaaaatgagaaccctatgtgtcagcttctggggaaaaagagcagaccaccttatgccagcctcgggcacagagggtcaagtggtcttggcaactcacgtctctgtctgaccctcagtctctgcctgtgctcacacggagctcatggctagtaaggctgattggtagctgtgcaccatccatctgcctataggatccaagtagagccctggggctctcatccacccaacctgctgttagccaaacagaggagggctggcaagccactcctgagggctgttctcagcccaaatgttcaagacatcttccacagtgtggtgattagttttaactgtcaatttgacagaatctggaatcacctgagggggtgggggggggttgttggatgaaggatcccagaccacacaaaatgaagaaagcgagccgagctgaggactggctttgcatggctctttgcttttagttgtaaacgtgatgtgactggctacttcgtgttcctgccaccatggctccccatgtgtgagccaggataactcctcactttgttttcgtcgggatattgtatcatagcaacaggaaaagaaattaagaaactcccccccccccccactgctaccttcctccatgggactgggtctgtaagtcaagaacactgtcctttccccagaggaccctaggccagaaagccaccaagaggccaccataaggctcctatggctgagagggtacaagggtttttggaagggactaagtcccagagcccaggttccaaggtatcacctgcctgccaaccactctgtgggattcatacacctaagttttctgtgcagctaagtatcgcatggctgggactctctattggcatcttttgacttttcttgattcagtgaccatgttctacatacaggggaggtgacaggcttcccagaccctccctaccaatggacaatgacccagtcagcctgttaaatcattctcagggccaaagacttgatatcacaccccagattgggatctgatccctgctgtgccctttgcctaggaacaagaaacaggctgagaagaaaaaagaacatggcatctccctccaccacgacacacagtgccccgccctggtaccacctttgttccctctcagcttcgccagggacttttctcagaggaagcttgggtataaatgggtgctgaggaccagctcaggtgctgagacccagcttctccactgctgggtggcatgtgttgagcagtctctaccccactgggcctttggtttttagccataaacggagttagtaatgtctaagctacataattcggacaacttacattttaacaggaaacaaactgttttgagttgttctgagacagtcacattatttagtccaggctgacctctaacactattttcctgagtgctggtcttttaagcaaacactatcacagctaccccagacaacagtcttatatcaaaagaatgtatttctgatagatgagcttcgtgtctcagccaaagacagagattaagagttctgaggggaaagccaggctcctctcaggctgagatttcattcagagaggttgctgcctgcagcaagccctgtttctgcatggaaactgcctgctgtctctggctgggctgtcagtgtttgggaggtagggaaactgagtccttccctgggccagctgctgtgtgtttctccacacgctgggaagtcagtgtcccatcccgttaacttctgaccacagaccctacatgtcagcctcaaaggcgtcagttgcttaggcgtttgtgcaggtcaataggcatgtgtgatgtgcacaactgtgggggccacaggtcagtttcaggtatcatttttctactttctactttttttttctttttcggttttttgagacagggtttctctgtgtagccctggctatcctggaactcactctgtagcccaagctggcctcgaactcagaaatccacctgcctctgcctcccaagtgctgggattaaaggcatgcgccaccactgcctggctcaggtatcatttttcaagagctgtttaccttgccttatgagacagagtctctcagtggtatctggggctcactgaagaagctaggctggtgggacatcaactcctggcctgctacctatctccctgtccccagtgcttgggattacaagtggacactactgcacttatgctgtccatggggtttggggattgaactatggtcttcctacttacaagacgagcattttgtccaattggcctatttctctagtcccgaatgtagcatttaaacctaggattttggcaggtagtggctcatgcctataatcctagcactcaggaggcagaggcaagcagatttctgagttcaaagccaaccttgtctacaagagtgagttccaggacagccagggccacacagagaaaccttgtctcagaaaaaaaaaatcaaccaaccaaccaaccaaccaaaaaaaaccctaaacctaggatttcttggctccaaagtctgcatccagaagatgatgtcctctgttgctgtctaggctgtgggtctcagtactagctcaggggactatcttagttgccccagagcgcctccttcatcctcaccttctttgtgaatgccctgtctataccttgctgcttgcaggttctcatagatagggctcatgtaggggtcagatatcacccagccatgggccctgctcctatctcaggattactaacgataggtccagagggcaagaggaggcctgtggaggagttggggaggggcaaggccttgggttccatgtgacctttgtccttctctcactaatccctgcccagctacggcagaggagactgttgggatcacaggtggaggtcagtgtgggggcatgtaaccttcactctgccccctcccaccccacttcctccgttgctccacagtggcaccacagattccccattccattctactggaaggctttcaggtggcttctgtgaaggagcctgtcactggctctaggctgtaaagcaggcctgaggtccaaggcttgtcccctgtcttttcctgtctcaccgacctcatctaggtgagccggtagctgatcccttggtggcggaggtggccgtgaaaagcatgggcaatctcagagggatttctcaactcctctggcagatggctgcatggccttcctgcctcaggctctggtctggactgctcagcaggtgacctttgcccagctcactgggccttctgtgcccgctgtcccatcctggagccaatataaaacaggtcacagccctccccgcttgcctgctcagttttatccctagaagcagctagctactccaggtaatgcccctggggaggagaggaaggaagggaagaaacaaagagctggagggagaagctctcaccacccagccatctagcccacagaaggcttgggactcatggtctccacccttgggttcctggtgtggggggggctagaagctggggaaagggaggctatgggccaaaagccttgcactgggtagtggcagagctgcctgcaattgggtcatgctgtcccttgtttagcttgctctgagctattagaagcctttggtatccatgcctacccaggactgaaaaaactgagtcctagcgaggaaaagaaacctattgtttctcagcatattagagtagatgtcccgttctgcagagtatttctatactccaccttccaccccacttggggggctgggtctactgtagttctctatctaatatcagtgggagaaaggcttgggattcatgacccaggagtcatggcattctcaaggggaggacctagatgtggcagatccacagtaccttctcacgagatgctttcccacaggtacgtaggtgccatgcagccccggacgctcctcactgtggccctcttggctctcctggcatctgcccgtaagatggtgggagtggggctgggtttcagtgggagctggtcagggggccctgccctgagaagtggtggctgggcaggagctgagggctggcgtggcccaactctgctctctcgcaggagctgaagaggtagagggatccttgctgctgggctctgtacagggctacatggaacaagcctccaagacggtccaggatgcgctaagtagcgtgcaggagtccgatatagctgtggtggccaggtaggcacactggcctcctttcctgtgtcttctcctctcatgccctggtgctgagaccctagcacagagactgtggtccaccaagtttaccagggcctgggacctgcccgagcctctggtccctcatgaggcctttcggtactgtgaccaagatgacaggcagggcaagcagccttctcctatcttctctgcttttcctcagagcagcctgaggggcatttagcctcgctgcaggttttctcctctgggtcctgcgcacacgatgggaggcctacctgctctggtttctgcctgtatgcagggggtagtggtgggaagtgaggtgggaagttgggggttagagggtgggagtctgccctgtttctatccctgggctcagtctgaggtaggcatcttgcccactatgaaatatcaccccctggccaatggctttggctgacatttgatagtttagttgcctatgtagcaaaagatgttgacagtctctatccccagaacaggctgtggggaggatattagatactcggttttgctgatgataaagagttagataacctggcctagatcacacagcttagaagtcattcagtaatgtttcaaatgagagactggccctgcctctgcctcacccacttagagccagggatggggtacctcaagggagtgatttgtatggcctatacaggcagctgcattgtagctgaccttagtatccagctccccggtgcttggtgcctccggcctgaaaggagattggatggaaggcactgaggttctgatccaaccttgatgaaggtggggtttcttaggtagctgcaggtgattttggggtgtgataggcaaggtggtgctggtggctgagagagccagtggagccctgcgtgcagtcctgggtctagctgcccacgggggagcttttctcacacacacacacacacacacacacacacacacacacacacacacacacctctctctctctctctctctctctctctctctctctctctctctctccctctctctctctctccctctctcctatggatgcctcttactgctttaacctccaggggctggatggacaatcacttcagatccctgaaaggctactggagcaagtttactgacaagttcaccggcttctgggattctaaccctgaggaccaaccaactccagctattgagtcgtgagacttctgtgttgcagatgtgcctgttcctccatcctgctgcccccctccaggcctgccaggtggcccctgaaggttgctttaaggggaaagtatgttctcatgtcttcacccctccctagatctcacctaaacatgctgtccctaataaagctggataagaagctgctgttagtgggtgtcccatgtgcctggacgtctgggcatggggatgagctaggcctgttgaaggggtggacctggggctgtaggtcatccacctctttagtggtctctggggtgcttcttcctttgtacgtgggactaactccgcttccctgcttgacttaatgggaaagatcaaatcaggtaacgacagatttgcagttacaatctgtgataaacctgtcaagggcaggacaacgtggacgacgtggctggagtgtagtatctgtctagctagcagtcttatgtcatctccaggcttaaggtcagatatgatcaccaaccccgtgcagctggtttgcacagcccaggctgcctggcccctttaaacaggcggaaaggaaggaggcagattgggagggtggtcggataagtctcaaccccactgcagtgtagcggcttccatttcttatgaataaagtgggtaggacctgcccctcccctgaaggtttgttgtagaaatgaaatggtagtgtctaaaagcatgaggtgccgcatgcgcacaccccttgtaaacagtcctcactgtgatagctaaactaggtgaccttctagactggaatggagacccagtgtcctcagaatcccaaaagggctgcttgctaagttcctgccacccccaaacactcacttcaaagagacccagtgtcacaaaacaggtcttgcacattatagagtaaaagactaatgttcagagagtgccagtggctgccccggatcaggagaaaacacactgcagggccagctttccattttccacgttgctggcaccggaaaagcctctgccaggtgttggaagctcctttccagactgcattggcacagccagcagactggactatgttctctctggaaatccaataggggtttctcttcctgtccaccaagagccagaagtctcattgtccacaccgggaaactttcctacccaaacctggtttaatgtctgctgtggctctgcatgattgtggatttaaaaactcaccccttcagccaggggctcatgaagatacaccggggatggatggagaccacctgcataccaacacaggcatgaagaggggcagatgagaggaaggctgttggtgtgagagtgcttctgcagacatcctcaaccctgtgaacatgagtgcttggttacactccatagcgggcaagtctatacaatgaacagtctgggcttggcaggcagctcaggtggtagagggcttgccttgcatgcacagagctctgggtttgtctcagcacagagtaacagtggtggaccatccttgaaacccccagcacttgggagatggggcagaaagatcagagctcatctgagtctagcctgggctagtggagacactgtctccaaataaaataaatacaaacaaggactggcaagatggcttagctagtagataaatacaaacaagaactggcaagatggcttagctagtagagacgctcgctacactaatcctggtgacctgagtttttgatctttgggacctatatggtggaaaagagaacagatacctgcaaattgtcctctaatctccacacatgttctgtggcacgtgaaaacacacacacacacactcacacacacacacactcacacacacacacacactaaataagtctaataaaaatttaaatattttatatacctttatttatatttgtggggtgtgtgtgtgtgtgtgtgtcttctaagcactgaactcaggttctcagacttccgaaagtgcctctacctgataagccaccttaccagccccatgtaataaaaggggtttttttgtttgtttgttttgtttttgttttgttttaaaatggaacggcacatcctgacccaccttttctgcagtgactaacttcagacctcccagctcagcttccccaactggtgtggacttaaaggccatccttcaggatttagagatggatatgaaggcctctctagtaaatgtgtggtcaccagcatcatggagaggggtgtttgtttgtttgtttgtttttgtatccaactgtcaggtagagtagctgcagccttgaccctttcagcacactgtgtgggtgcaccggagggaaagatcaaagggaattgtttaccgagatcgggttcagctccaggctttttattagcacccacccaataactccaatcttcctggctcctgaaggaatcctggctctagggagtggaagaggctcccgtcctgcaccctctggaccccacctggaaactcggctagcacaagaaaccagcggtctcaaagccagtcctattgccagacactctcatcctggtttacagcactagtgttctgagcctctgtggggcccttttggggttccttgttgctttgcctggccatccatttcccttggagccttcttaggaagggattctgtctcataccctgaaccagccaggtgcccagcttgagtgagcgttaagagctgagtagtcgcgtacaaaggaatccccagtgcggcaccatgttctcacgtcccttgatgtccccttagcgcccgccctatgtcccccaaagaaagaagctattccattttggaaaggtttattgtaagaaagccaatgcgggggtggggagtggaagcgggcacctcactgggcagtcagagtctcgctggccttgtcgatcacactctggacttgggtcttaagcgtctccagcatgggcatcagactatggcgcaggtcctccagcgcaggtctggctttctcgccaagtgtcttcaggtgggttttggccctggtgtggtactcgttcaaggtagggttgctcttgagctcagccaggcgctgggccaggctctcgcgcatctgttcgctgtggggcgctagctgtgtgcgcagagagtctacgtgtgtgcgcatgcggtcgcgaaattcctcagccacaggggacagtctcccttgcagctcctgcagcttctggcgcgcgctctcctgcagctcggcgcccagaggcgccaccttctggcggtagagctccacatcctctttccatttcttctggaattcgtccaggtagggctgcaccttctgtttcacttcctctaggtccttgttcatctcctgtctcacccaatctgtttctttctccaggttatcccagaagtcccgagtcaatgggcccagccgttcctgcagctgactaacggttgaacccagagtgtcccagttttccaggagattcaggctagagggggaagagagcggctgagagacgagcccaggcatcatgcgctgcccctggtctgcagatccatgcacatgatagctgggtgccacctgtcccctaatgtgcagttgctatggtcctagtttccccgaacatgcaaccctctaactcactgccttccctttacattcctctgtacacatggcggaaggcaccaagaacacagatgtggtcggtgctggttacaaggccagtcccgttttttgttttttgttttgttttgttttgttttgggtgctgtctgaccagtactgggggttaccaaggaaaagggatttggcactcataggctgaatgaggggctgtggttacccaacagccagatgaatcccatccctagtcctccactggaacctgccatggtgcccagctggtaggaaagcccgtgaagggctagccagctcagttccagcatcttctcactggtctctctgcccaccctggatgggcagcccttgacctgctccaggccccacgctaggtctttccttacttcagctgttggcccaaggaggaggattcaaactgggacacatagtctctgccgctgtctttgaccgcatccacatacacattagcgaaatccttcactttgtcccattgggactggggttcatcttgctgccatacgtgccaagcctggctccctggggatggaggggagacccatgttaggttagactcggagtcagggaagagaacagtgggaattctgttctctgtgcccaggaaggtagtcccacgcaggtcaagaggcacctacctgtcaggaagaccagagccacggccagcaccacagctttcatcctgaagggtgtgggtgacctgaagaagaagaaggaggaggagggctgggctgaagggaggcattgtcatggaaaggctccacacacaattcaagcccatggaagcattggctagaatggctaaaggtgcgagatatccacggtattgatttggacagtggagcatcaactgggaggcgctatggagccagagccaccgaaggcaggtagcagcacttacctccccggagctctccgacagtctgggtgtccagctcttcttccctggtctatatatgtgtgtgggcaggggctgggctgggagactgataagctcagcctggccctgccactgcttacttttgctggcgatgtggaacttagagttcaaggatcagctctgttcctgaggctgggcaaacagagtgggcaaacaggaaactgcgggggctgccgagctgggatcaagggttcaggtgggggcagcagggggtggctgcagactccaggggtccccaggggtaaggcagttgcaccatcccgaggtgtatgtcttcttcaagatagtctcatggagcccactcctggactcctctgtgttgctagtgccctctgagcctggaacaagggagggagggaggaattgtgggctccttcactcacagccccaccccaaagttttttttttgctttccaaggggttccccctttcacctcaccctggtcccccaggtttggggatttgtctttccagatgccacatgtttagccagcctcccaaccctaaatccaaaaacaactgaggtgtcagcctgagtgagatgcagacaggctcatatccccaagctgaggatgaagacccctctgatgcttcagaagaaatgacagaggccaacatggagttgttagctccttccttgtctccctccctccttccctcccttcctttcttccttatcttaggtacatgagcgctctgtcttcagacacaccagaagatggaatcagattcctttacagatggttgtgagccaccatatggtttctgggaattgaactcaggacctctggaagagcagctagtggtcttaaaccgctgagccatctctccagccccagttgccaatgtttttgttatgtgtagatgctgttattcagcctcccttccagagaaaacctcaccatataccatgaccactaaaaggggtcatgtagttcagtgacgatatgtcttcccagagtggtgagggcctaggctcacttgccaggatgggagagctgggtagctgtgtagagtgggctgagtacggtggccagtttttgcacttggaaggtcagagggttgagagttcaaaaccacagccttgcccatatagcaagtttgaagtcagcctgggctatatgagaatatctaaaaacaaaacaaaacaaaacaaaacaaacaaacaaacaaaaaccacagatcatctctaaaatcccattatggaaagtgagttttcaagctaagaggaacttttgagaccatctatttgaggttctaccatgaacttccttctagataagggcctgttgagagtggaaggaatttgctgtgtcctttatctctcagccttagaggcaaggatggaccttgcgcccaggtctctgcatttgggacccagggcaggaatgtactctgcccatctccctaggaaactccccaactccctagaaaccagcttggaatctgtctaccagttcagggagtggctgggattccaggctgctcccatcccaggaggctttgcaaccagagagaaccttggttctgggatctgcaacttattctccaggtgacccggacaggttacataacctctccgtccctgggtctcttatctgctaaggaaagataatgacagagcatgccacagcttccttatgatcccagtcactgtatgggaagcaaaatggaaaagatgtgtgtgcacttactaagtccaggaacctgtgcgtggtgtctaacatggcaaatgtgattaggggacttgaactcaagggtagcctgggatatccagagggcacagtaatcacaagggtctctcaatatgctagaggaggcagaagggccaaaaccatggagaaacttgagaacagaaatagagaccaagcaatctgagtgtgcagatgagccaagcgggtttcggctacccatccatgggtgctggaagagagaagagaaaatgcaggttttctctgaatgaaagagttttcagacagaatatcactctgacaatcccatgcttttagccatgatttgagcttctgaactccagagttttatttgtgttgtgttgtctgtgaagtctgaacacatttcaagcaaaactgctgaaaggtgaccaacagcaaatggcaagtgttctgcatcccagactcctgaggtcactgccacgaacacattctgttactaggccatagcctgtgaccccagttgctggcagcaaaaatggggtaaggcaggtgtctggcttgcaggtgctgtgatgcaggacatcttttccaggttgaaaccagcccccgagggctgtgggagcactcagagggaggtggcctccacaggagtagttttttaggtcttttgggggtggggtgggggtgggggtgtctgttggtttccaggatgcttcccacagtcctatctttctttctggctcgttactgaaaccgtgctggctaatcctaattgaacctaacatttgctccgcaactcatttaaagtaaacttgagacacccctgtaaggctggacgccatgttcacccccttggtagtttgcctgtcagaaaaaacggcagctcagagatgctaagaacattcttgccccccagctttgagacagtgcccaaggggctagggatcgggtccggcctctagttctctgatggtgatttcttcacttccaaagcctttgtactctctccagggacatggcttggggactggaatccatgacatcacggtagacgactctgggacaacctgactgagcaataagtgtgctcctgtcttggtatatagtccaggctggtctcaaacttgtggtaatcctcctgccttggctttctatgctaaggttataggtgtatgctccatgctccctcccccacaccccatacttacttgctagtgacttactttatcaggagacatttggtttaaactagtctaaatagctacttactgttctgaacaggaagtctttctggacagatcaagagtcaaatgggctcatcacagattgagacaggttggctgctgttagaggtgttgggtgaccagggagtgaagatagtgcctatcattggcatttctctcactacccttcaccccctcatcttgggaacctccaaagtgactcctggattggaccagcaagtgctggcctgggatcccgggagtgctggtagcttcagcagcagcgaatgtagcccatttcacaacttctgtctcagcacagatcacctgcacagggcagtgcaaggactctgtcctttagtgggactggcaccagagacaccaaacatttactaaatgaataacattgatacaccaaagcttctcagactggcaaagggtcacagaaaggcgcaggccttcaatggtgccagccccttctgggaatatgtacccaacaaggggtagtgctagcaggaatggggagccagggctggggagggtctccctaagcagactggatccccagtgattcctgtttggaaggacactgtcatcagctctgaatgatgttcctgcctcctgctcaggagactaaagtctccgtggttaagtgggtggggcctggctccagtacaaagtcaggaagtctttctttccttcttggagggcagagatgtccaggttcagatcccagagtcaatctggctgcctctgggtacctacccgacctctagccaaaaactttgcagacacagcatcagtgaaaggtgtcctgaccttttgggagtccttagggcccatcactggttccaaagccagctcacctctgtgcggtgcgtacaccttcaagacctccaggggctgagaaggcaccttccactctgagcagtttcattgcaattctagcctcaaaggctttcttatatgcgcctctccctgcctaaagagttttctatctgtatgagtgtatgttatctgtacacaggagcctgggaagcatgtcgggtccttggaattggagttctgtgtggtgtgagttgcaggaagttggtgctcttaaccactgagccatccttccagcctctgtcactctttctacaaatctccgtattccccagatcattgatcttttttctcgtgtgacttcagctctttcagcagagcctggggccctgttggaaattctgccctccacctggaatccaggaacagacattgggaaacagtaccaaaagcccttctgtcctacagctgagggaggccacctcataaaggttccagccagggtcaatgcaaggctctccttctgaggaccccaaggaatccttttcccacccaactctgcaaacacaaatgtgtcccttctgaggggttagagtccacacggatgcctggacacagtgtgagtctgatttgccaggttcagaggccaaaaggcaaggtgagaatgtgctgctccaagccccaccctaagtctggggacttctccagacacctgggtcacctctgcccctaccccatgtgattctctcaattagactctgaaccgtaaggcaaacaacatatcagcgttagtacataatcaggtttttatttccacaacctcctacagtccaaccaagtcactaagttgtagatgtcccacacaaacaaggacaaaagctcttagcaacttgaatctggagattattattattattatcatttttagatcaacagaaatgagaaaggaaaaatacttcttacattttcaaagaacagaaatagcaaagtagattcatatacattcaacatatactgcgcatattggttactacaatataaagcaatggtgatcttgaaaatagttcgcaagatggcacggttaataggctcactggctttcgtctgggtggctctggagggtggtgcctgctcttccatcaatccagtaccacgtaaacaggtcaggctgagcgtggggagcagcagggcggggctggagtatcagagctggactgagcttggaagctgacaatggcttgtcaagctttcttgggagtcagacatcttctggctagtaattagtgacacctgaagtggaggggaaattggaggacatgggaccacgaaacaggtccccagccaagctctcacattgaaaacaaatccattcaagagacaatggatttgttcaaagaggcaagctttcagggttggtgcggaaggataaaatggctagggaccctgctggtaatgtccagatgccatggcaggcagcggctttcttctgtgcatactcagaggttggtggcccctggctctcagaaatgagggctgggagtcagagcagggaccatccctctctggttttgaagaccagaagagaagccgggccggcctcgtttggccccagactttggtttctgactgcagagagaaaggaagtgacaaggacagtagccactgcctatgtgctgcttcggctggggaagggaggccactgcatccgctgctggcacaggagagtggctcacgatgccaaagccaaggaaaacacttcaaacagaagttgcaagccacagttcaacagcacagaatctggttaaacatttctcttttaaacaaataaacaaaatcctttttgtctttattaataataacaataataacaataatatcaacatttatcaaaaacaattcctacatgatcaagaattaaaatataggggccgaggatgctggggagaggagaaggttaagagacccagtacagcctccaattcttgtctgtgacaaagaggccgcagggaagggcatgtacacactcatacgtgtgcacacaaatggaccaacggccctttttacaacgcagtagagaataagaatggagatcacacaaacagcacagtgcaccactcctgggtgttcactcatgagggggaaccagttggtgactggaggggaactggaccacacaccagaggggcctacactgagctattctggatggcaaaccttcagcaccaggccatccggcctgtgctgggatctgatggaattctgctgggccagataggattctagtagaggccagcaggagattctgccagatcccaggctcagttttttcttctgttccaatctccaaaggcaggggccactgccccctcctctccttttcttggccaccaagctccggtctagcatttgttcctggtagaccggggcagagggagagagtctggtctgagacaggctgtggaagggagggtcctgaggttcagcccctgaatactaacctctggttcatctacctcagaaatggtaggtgaaaacgagaggggggggggaatatgctcaagggggtaggggtgggcaaggcaaagagaataagttatctccaaaggaaaatttccaaaacaaaacacaagcaaacctcctaacagcagaactcaactcaagcacaccagatgctggctcatgaaagatggaggacactgatttcctgtttatttccttggtgccttggtcatacaagcaaacatggcaaatgtccctcgcaacccaagcgccggcctactggtgcctagtgtaggggaaggagctgcactgttgtggtggagacacagacggaggagcggtgcggcgctgttggacactgttggtctattggtctagactcagcctcctcctggagctgtactcgaacctacgaagcagacaagaacaccttgaaggagagggacatgacttcaccctttctccccaccctttctaatggtactagggctgggactcagggccctatgtgtccatgccctgctctgtcagtgagccacaggcatgcaggctctcagtgaagtcttttcttggtgtcactgtatgagtcttgccacactgaggctctgccatgcctctgcctgtggctttaccttcctcaagttgttctgtctctgtagagatagagccactagtactcaccatccatgtgacctctgctaggccaacagggccggtgagccttctgtcttttcagcatgggtttaccccctaaaaagtccagctggggctggggctggggttgaggctggggctggggcttacacggccctgggttctatgcttagcaccaaaatgccaaaaccaaacaataaaaaccaccagtgaaggagcctgactggatctgctctttttcccttttctggttgggtttcactcttcaggatggagtgtaaagactagctttagagagctggccaaaggtcattggcctctggcctctgcaactgtagcttggatctcattaaagccatagcatctataacatgaggtgggccatgtacctcttccctaaattaaagtcctcagcccacctcaaaactaacacagtacttaatgaagaaacaggcagacggggaaggttgcacaaaaagagtgtcgctcaagtttagtggggtaccacacaaggaatgaacacattgaggctatgaggggctggcactgggccccagggctgcctgggcctgagcagggtggcactcactttccatatcttgctacacgccggcttgctccatgctgaaggagacctctgggtgcttgtggctgagcatgatgtctgtaacacacgtagctggatagcgagaggagttgagatgctggctgccatcacccaggcctggatgctcgtggcccaggctcaccccacattctgcaagaccaaaaagaacatgtgaggtggaggtgggggagcaagtgggacaggagagaggaggctggggaggtcttgtctagcaacccagcctgagtccagctctgactcaggccacagcaggcccttcagatgttagggacccttcctgaccacctgccccttcctttcgccaccctcatgagcaactgacatatgggggtgaagatgaaaaacccttcaagagccttttcttgtggttagggggcaggataactgtagtgagtgctataggagccaggccaggccactttctcttgagcatcacactaataaacactaataaacctcaggaggccagcatccttaggacccaagccaggacatgggcactgctctcttgatgtcctcacaggtgaagacttgggatgaagacttcctaggctttgcctgtggaccttagaaagggtgaacctgtccgtctccaggctctatcatggtctcccaccctggctctacaaagacatagaaataaatgttctacaaggatatgaagccctctaaggagaagctgaaagagggctattgttgaaggtacatcctgctccagcactgaacttggactgtgatgtccctgtgctgacagaagccagagcccctaacgtgtgcacatgtgcgtagcacctcagccagtgaacaatttccacagaagactgccccggggtgcccatgggcaaggccttaccttcatcttcctcatcctgaaactgttggctgcccatgagtgaagactgactaagaactgcatctgacatccgggcagagctcagcgccttgcctgccaccaggctcattcctggcaaggtatccagctgtacctgtagagtggaaccagcagcaatgagtgacagacagtgtgtcactctcaggggacccctgtccctccccaacccatctatagacagtgaggtctaacagttctgttctcaagtgcccatgtaacatggtgactgctgtgtgtgtgaagtgtaactgttatttactaccgcagaactaaatttctaattttgtgtaacttaaacacatttacatttgaacagccacaaatggttgcctgaaggcatacaggtgctaccatggctgggtgtgtcccagttgacaagacttgctctgacaggtcaactcttaagaaagccaaagaaagcaaaacagttgccaggaatggaccaaaaattgagggttcatatattgaagcctggatttagatttctgggagaggtcaagaccctggatgtcagatcatttgattcctaagtctaacatatggccgcaagactctcctgttaatgctggtctgttatggggagtcaaagaaaaaaaaaaggtctccacagcttgcagagggctggactgaggagatggcggcagaaggggacactctgctttcaggttgagatggcaccatcccacctctaagcagcaggaggggccaacatacataggcatcgtcgctgttctggatcgtgtggtgtctctggagcgtccgggacctgaggtgctcactgactaagggccgtactgggtacccaaggccgttgtgatccggcagctccattgcttgtccaggagaacttctttccaggcagttccctaggacagactctaggagacagagcaagagtagcagggtgagcaggcccagagcttctccaggtgacaggtgacgccaactcccatgtagccccttgtaagacacaatgagtgagaggggagggaccacatttgcccaaatgccaatgctcagtcagctggcatgggtgttagaggagctggggccagcctaacaacatcaaatcctacagcaaataggggtttaagacactccttaccctagaaggaaaaatccacctatggggtgtgagctgggccatacccatcttcttctttccccatcactctgctggcttagcttgtgctcagctcctgattgagctcatggagagctctagagatgaggggcttctggcctgtatccatggccttggcctctgccttagtgccatcccaggtctctcccactgtcccacggccactgctggtgctgcctatggctccttcacctttcataagtgcttgcacacagctgtgcctgacctcactccccatgcccattttgacatcatctaggtccatggcttcagccacactgctcatgtactgcagtggatggaatgagccagatgttcagtgaagagaggcacttgtcatcaggcttgatgacctgagttgtatcctcagaacccgcctagtaagagaaatgatcacacacacacacatactcatacatatgtgcacacacatgtacacacacacacacacacacacacgcacatgcacacgcacacacacactaaatgtaaacggagttactgaaatcctttttttttttttttggttccagatccatagatccaactttttttcttggttatcttactagtatgtaacacttacgttaaatttcaaactcattaacttccccagaagcctgctactcctttaagagcccttgtttggcaccgcctcccttcccccaatctttgaggtgtaagttcctggagtcatgcttaattccttcttcccggccccacagcggctaagtctaaagagtccgctcgttcagtggtggacacctcagcccccagactgcctgcttccagtcaagggacagtatctcttgcctagatcattttctaaccacccctagttacttccctataaaggccacactttaaaaaaaatcccgttcctactttttttttttttttggttttttcgagacagggtttctctgtatagccctggctgtcctggagctcactttgtagaccaggctggcctcgaactcagaaatccacctgcctctgcctcccgagtgctgggattaaaggtgtgcactaccacgcccagctcctacttttaaaatatatgcatatgtgtgcatgtcacagtacatgcaaatgagtacatgtgtacacatgtggtatatgtggtgcatgtgttgtatatatgtagtgctctgtttccatcccttgtttagagattgaaaacatttaaacaattgttagctgtgtacatgggtacacacgcgctatggcatgtatgtggagttatggcatgtatgtggaggtgagggacaactttcaggagttggctttctcttccctttctaaggctcaaactcaggtcatgggggtttactctctgccacctctgaccttgggccgagactttaaggcctgtgatcaatcaggagcagatggcaagcgcctctcttcactaacagaatcttgatatttccaccccactccctcttccagaccagcactctccccccatgtgttttcctgtctgttaaattctctttctccccttttggatttttttttttagacctgaaaatgaggtttctccaaatctaagctcccacccaggcttttcaaaggtcttgtgggctccacttcccttctgtgccctcctgtctgctttcctgagtgatgttcccaggcctcaggtcacaagaggctatcacttgaccagctctcctgagtgcccagctgagggctcacttctctgtcaggtggaggtggcaaaggtgccacaggcaccgccggggtgggaagactcagcttgattctagcttcattgcttcctgaggaggtggaagggaacttgagcgaggtggcggatctttctggacctgtgcctctggagcctaccccacaggctgctgatagacagagcaggacaataaacaagtaagttacccaatttttagttaccagggtagcagcctttggtctgaaagaagcaaatgagattataaaccagatccagggctgaggtcacagctctgcagtggaatgtttgcctagagagtgtaggaccatgtttgagccttaagcatcacaagaccccccgcagtagaggaaaatgaagtgtctcccactcagaagctgtgctgggaagggctagagaggaacctgggaagggttagagagggccctgtgaggatcttggctgttgcctaaaggctcccatgttgagacttggtcatcagtatgtggcgctaagaagatataatggaacttttaggaggcaaagcttgataaagggaagttagggtggggccgctgagatgattcagccataaacgcatctgccatcaagtctgatgacctgagttcaatccctagggcccataggtgggagaagagaactgactcccctcaactgtcctgagcgcgcgcgcgcacacacacacacacacacacacacactccctccctccttctcccttttgggagtgacaggatggctcagcgagtaaaggtgcttaccctaagcctgagtttcatccctgggaccaacagagtagaaggagagaacagaacacaa

SEQ ID NO: 9 - DNA, 38 bp, Homo sapiens
tcacccagcccctaaatcagtcaggggaagcaacagag

SEQ ID NO: 10 - DNA, 37 bp, Homo sapiens
atgttttcttccagaggtgatatactttctttttttt

SEQ ID NO: 11 - DNA, 45 bp, Homo sapiens
aatacttccatatggagcatttttcagagttttctaacccagtct

SEQ ID NO: 12 - DNA, 56 bp, Homo sapiens
attatatttgagtttctttcagatcatttaggatactcttaatctcacttcatcaa

SEQ ID NO: 13 - DNA, 46 bp, Homo sapiens
cggttcttgtggaattgtgccctaagtgttgtcaaggaggggagat

SEQ ID NO: 14 - DNA, 46 bp, Homo sapiens
attcggaaactgggcctcgtgaagtatggagaaaaatatgctggta

SEQ ID NO: 15 - DNA, 42 bp, Homo sapiens
tgcccttttgagaggagtcccagagaaagaagttggcaaggt

SEQ ID NO: 16 - DNA, 46 bp, Homo sapiens
catgggctactgccctcagtttgatgccatcacagagctgttgact

SEQ ID NO: 17 - DNA, 25 bp, Homo sapiens
tatacgatgtgttaaaaccaagaaa

SEQ ID NO: 18 - DNA, 45 bp, Homo sapiens
aatgcaaagctatctcctctgaatgatgaagatgaagatgtgagg

SEQ ID NO: 19 - DNA, 36 bp, Homo sapiens
gtgtctgacttatgccaggcataggtgattcagaga

SEQ ID NO: 20 - DNA, 45 bp, Homo sapiens
gcaaaagggagagaaccctagccattatggaattactgctttcaa

SEQ ID NO: 21 - DNA, 45 bp, Homo sapiens
gcagatcgatttctcaacagcttgggaagatttatgacaggactg

SEQ ID NO: 22 - DNA, 46 bp, Homo sapiens
tttccctgggtgtcagtaatactcaagcacttcctccgagtcaaga

SEQ ID NO: 23 - DNA, 47 bp, Homo sapiens
gctgacgtgtaacttctctgaggcaaaatttagccctcctttgaaca

SEQ ID NO: 24 - DNA, 24 bp, Homo sapiens
cttaaagaacaagatctgggtgaa

SEQ ID NO: 25 - DNA, 42 bp, Homo sapiens
aacaaaacactgcagatatccttcaggacctgacaggaagaa

SEQ ID NO: 26 - DNA, 23 bp, Homo sapiens
gtcctgagccattttttttttct

SEQ ID NO: 27 - DNA, 48 bp, Homo sapiens
cttccagaatgggaactggacaatgcagaacccttcacctgcatgcca

SEQ ID NO: 28 - DNA, 46 bp, Homo sapiens
aattggagagggggcaaacttgactttcaagtttcaatgggaagat

SEQ ID NO: 29 - DNA, 46 bp, Homo sapiens
taaacgccctcaccaaagaccctggcttcgggacccgctgtatgga

SEQ ID NO: 30 - DNA, 46 bp, Homo sapiens
agctttcttcagtcctgaaagatttgtagacctgtagatgggggaa

SEQ ID NO: 31 - DNA, 51 bp, Homo sapiens
ccaccctttggcaagtaccccagcctggaacttcagccctggatgtacaac

SEQ ID NO: 32 - DNA, 30 bp, Homo sapiens
accataaataatgacaacatagagatagtt

SEQ ID NO: 33 - DNA, 54 bp, Homo sapiens
gtggaagagactgctaattgccagacggagtcggaaaggattttttgctcaggt

SEQ ID NO: 34 - DNA, 62 bp, Homo sapiens
ggcaaagggtcctaccaggtgaaaggctggaaacttacacagcaacagtttgtggccctttt

SEQ ID NO: 35 - DNA, 67 bp, Homo sapiens
gcagagctgtcttcgcccgttcactgaagatgatgctgctgatccaaatgattctgacatagaccca

SEQ ID NO: 36 - DNA, 46 bp, Homo sapiens
attcctcaaggtggccgaagagagtggggtggatgctgagacctca

SEQ ID NO: 37 - DNA, 79 bp, Homo sapiens
ggagcaggattatcatggagttagtcattgagtttttaggtcatcgacatctgattaatgttggccccagtgagccatt

SEQ ID NO: 38 - DNA, 78 bp, Homo sapiens
atctcagagacgaccctggaagaagtaagttaagtggctgactgtcggaatatatagcaaggccaaatgtcctaaggc

SEQ ID NO: 39 - DNA, 46 bp, Homo sapiens
tctctgagaagcacgtgaaggcggagatggagcagatggccctgga

SEQ ID NO: 40 - DNA, 52 bp, Homo sapiens
tcgggcaccgcctacatcctgggaaaagacattcgctctgagatgagcacca

SEQ ID NO: 41 - DNA, 46 bp, Homo sapiens
aggtggctgtcgatggcctggcactgaatttttatgagggccagat

SEQ ID NO: 42 - DNA, 38 bp, Homo sapiens
caaagagataagaactaactaatttaatactagttacc

SEQ ID NO: 43 - DNA, 45 bp, Homo sapiens
aacaataatcagaaggatatatattgttgcaggttagactgtctg

SEQ ID NO: 44 - DNA, 50 bp, Homo sapiens
gcccctcttcatgacgctggcctggatttactcagtggctgtgatcatca

SEQ ID NO: 45 - DNA, 42 bp, Homo sapiens
ggagcaggcaatcatcagggtgctgacgggcaccgagaagaa

SEQ ID NO: 46 - DNA, 37 bp, Homo sapiens
tttattgtatggttctaaaggaatggttgattacctg

SEQ ID NO: 47 - DNA, 45 bp, Homo sapiens
catgtcaagtacaagatccgaatggacattgacaatgtggagagg

SEQ ID NO: 48 - DNA, 70 bp, Homo sapiens
gttggacagcagggacaatgaccacttttgggaacagcagttggatggcttagattggacagcccaagac

SEQ ID NO: 49 - DNA, 48 bp, Homo sapiens
aatcattatgctgccattgaaataataaatacaaaggcgcaagggggg

SEQ ID NO: 50 - DNA, 45 bp, Homo sapiens
ggcagagaccagggaggaggctctccaagtggccaaggcataaag

SEQ ID NO: 51 - DNA, 78 bp, Homo sapiens
ctggggctggagagaaaggcatgggcatgccttggagggacttgtgtgtcaagctgaggacctttactttaagctcta

SEQ ID NO: 52 - DNA, 45 bp, Homo sapiens
aagaatgagataatggcagaaggacaaatcctgcaagatctcact

SEQ ID NO: 53 - DNA, 48 bp, Homo sapiens
tctcgtattgtctgcgggcatcccgagggaggggggctgaagatcaag

SEQ ID NO: 54 - DNA, 64 bp, Homo sapiens
ggaactgtacctgattgagatagttcagcatggagcagatatagctgtggggagtttgatggga

SEQ ID NO: 55 - DNA, 35 bp, Homo sapiens
gtccttaaagcgtctgtgtgggtttttgcaggaga

SEQ ID NO: 56 - DNA, 84 bp, Homo sapiens
agaccacactatttagcttacttagtaataacattgcaaagaaaaattccgacgaagttttttcagcctaggaatcaatagttc

SEQ ID NO: 57 - DNA, 45 bp, Homo sapiens
ttgatgggaagatggatatctatttatgtttaaaaacccatcata

SEQ ID NO: 58 - DNA, 26 bp, Homo sapiens
ttatgataacgtttctccactgtccc

SEQ ID NO: 59 - DNA, 44 bp, Homo sapiens
agtgctgctttttctgttttgttgcactggattgaagccttttc

SEQ ID NO: 60 - DNA, 107 bp, Homo sapiens
gagtatgtgtgagtcagcattcagagtacttaacacacttagtgtcattagtgataacttaacccacacgtataggaagctagacctccatttacagaaaaatggag

SEQ ID NO: 61 - DNA, 43 bp, Homo sapiens
gtgaatatggtaaaacttgtgagagtagtttgtaaatgattga

SEQ ID NO: 62 - DNA, 46 bp, Homo sapiens
gccttgtttggttttccttgaactattaacaggaagatagggagat

SEQ ID NO: 63 - DNA, 45 bp, Homo sapiens
atgttaaaaggttgggactccaaacagttctgttaaagcttagag

SEQ ID NO: 64 - DNA, 46 bp, Homo sapiens
gaagccagcaacagaaacagatgatttcaggagctccaggaaaatg

SEQ ID NO: 65 - DNA, 50 bp, Homo sapiens
agtacctggggaaattgagatgagggagtcctggctcagctgggagaaaa

SEQ ID NO: 66 - DNA, 23 bp, Homo sapiens
ttctgtaaaatgtgtataacaag

SEQ ID NO: 67 - DNA, 38 bp, Homo sapiens
agaagaaagggcagggaaaaggttttccgtgcttagcc

SEQ ID NO: 68 - DNA, 47 bp, Homo sapiens
ggggaacctgaattctgaggtctctagtgagagaacagggactggaa

SEQ ID NO: 69 - DNA, 53 bp, Homo sapiens
tctgggattccagtatgccatttccatcctcagtgtttttggccacctgagag

SEQ ID NO: 70 - DNA, 97 bp, Homo sapiens
gtatgtaaggaagttcagggaatagtataagtcactccaggcttgaggcaaaatttacaaatgctgctgactttgtatgtaaggggaggcattttct

SEQ ID NO: 71 - DNA, 57 bp, Homo sapiens
gtgagcactggactctatgttcaggtgctgaggagctggcaaaaggttttaagtcgg

SEQ ID NO: 72 - DNA, 48 bp, Homo sapiens
acaagagaactcaccagtgaagtcccagtggtaggagagcgtgcagca

SEQ ID NO: 73 - DNA, 100 bp, Homo sapiens
ttacgacaagccaggacccttttgcatactaaggaaaacagggatgaaggaaacagaaatggtctctgctctgactcagaaggtagaaatcctctttccc

SEQ ID NO: 74 - DNA, 48 bp, Homo sapiens
ccaggagtgctgccacccttgaattctgacaccctatttctcctatcc

SEQ ID NO: 75 - DNA, 41 bp, Homo sapiens
gcagcgcctcctggccggaggacctaggaatcggccggctc

SEQ ID NO: 76 - DNA, 55 bp, Homo sapiens
acagtcccggactgtgaatccgggaactcgagttggaggtgtcccaaacggtccg

SEQ ID NO: 77 - DNA, 46 bp, Homo sapiens
ctcagaggggtcgggggttcccgggcgtgctgagggcgctgctgcc

SEQ ID NO: 78 - DNA, 48 bp, Homo sapiens
gatccggagccccacatccccaccacttgcaactcagatgggaccgga

SEQ ID NO: 79 - DNA, 41 bp, Homo sapiens
cccttctctcccgggctgcggcagggcagggcggggagctc

SEQ ID NO: 80 - DNA, 4038 bp, Homo sapiens
ctgtaatcccagcactttgggaggctgaggtgggcgtatcacttcaggccaggagtttgagaccagcctggccaatatggtgaaaccctgtctctactaaaaatacaaaaaaaatcagctgggcatggtggcttgcacccgtaatcccagctactaggaaggctgaggcaggagaatcgcttgaacctgggaggcagaggtcacagtgagccgaaatcatgccactgcactccagcctgggcgacggagcaagactccagctaaaaaaaaaaaaaaaaaaaaaagagtgtgtggcctggcactcaagttcacatgggtgtgcaggcatgcctgtgtattctcacatgacctccctgctcacggtccctccttgcactcatgtctgaatgtccccgcgtgcacgcacatggcttcacagatctgggcagtgccttccctaccctctctctgcagggccttttgccccctcatgcaggcccctggataatcggccccatccccatgtccccatctccagtgtatcttagctaccctaggtaaaggagtgggctttttagttcctaaccttccagagctacaacagcagtcatccagccaggtctgggtgggaacattttctagatacgggtgctgagatctctcagcccagagagaagccctggggaattttcagagagaaagcagtctccaggtggggctggatgtactgatgccactgagatctgtaaaggagtccctaacacctgacataggagtgacaaaactgttttctgcaccaactgagcagaatacacgcagctgacctgggctcaaggtctggccctgccacgtgctggctctgtgatgctggccaagtgccttcgcctctccgggccacagttttttgatctgaagagtggagccctactcaagccatctgcagctctcgggctctctgacctgacatctttcgggtggtggggacacaaaggaagcagcctctattgggagaccttgtgcttctttttggtcccaggacactgccccccaccactccagtccgggtcccaagggcccagtcagctcaactgtaatcatgacaacattgatcaagcatctttacgtgcaggtgctgtgccaaacggttcgaacgctctctcatttcaatctcacggcaaacctacggtggagggggtacggttgtatccactttacatgtaagaaactgaggctgatatcaagtggtggagccaagaatagtgcctcgttgcatcttactccaacctctagcccatccggcctcctcccttcacgtgcgcctaagagggctagggggcctggataggggaggtcagctccacagttttgagtaaacacacacagtctcaactctgatgacaacttaagtgccaggcatagtggctggcatggggcacacactcaagtcatgttgtgcagcacctaacagtttatcaaagtatcagcaaacttattgtcctgtttgaccttccgcacaaagctgtcaaggaaggcagggtacggagggtgattcctaccttagagatgaagaaactgaggcccagagactgcccagctaccagaaggtggatagagcgctggcctccatgcctgcctgacctggagtctgtccagtgcccacccacagaacagcctcggccctttcccatgcccagacacagatggcacacttgcgacggcccactcatagcagcttcttgtccagctttattgggaggccagcatgcctggaggggggccaggcatgaggtggggtaggagagcactgagaatactgtcccttttaagcaacctacaggggcagccctggagattgcaggacccaaggagctcgcaggatggataggcaggtggacttggggtattgaggtctcaggcagccacggctgaagttggtctgacctcagggtccaaatcccagaactcagagaacttgtccttaacggtgctccagtagtctttcagggaactgaagccatcggtcacccagcccctaaatcagtcaggggaagcaacagagcagggcatgagaactcctctgtaggcaaccatgggacccacacccatgtccccactggacgacaccagtcaggaccacaccaccctctcaacttcactggacgacagccctgagacctcaggcaggaatcccccacagctgccaccctgggagaagagatatccttgcaggaaccccagcacaagtcaaaccctgccatctccaggtcacctcagatgtttatgcccctgggcctgaggcacaaagtgacagggtggggagatgtgaaaggtcaaggctgtcattgttttctgtgcaaacagcaccgcctggagttgcacaacctggtggctctgagcagggtaggacagagggaggcagcctctcatttggaaagtcattggaggattgattagttgtgtgatctggggcaggtcacctaatcgctctgagcctcaattttctcatctgcaaagtgagaaaataacacctaccccaaagccggttctggggactaagaatgtttatgaacacctctgctatgccagctaatgccagtcagggtgaggtggagaagggagtaggggagaggagagtactgatgggcaggggcaggatgggagaggaaggacacacttctgctcacactggccccaggtcttagaacaaagcagaagcactcacgggcttgaattgggtcaggtggggcctcccaaggcaaacccctagcccaggggtccccaacccccaagtcatagataggtactggtccatggactgttaggagccgggctgcacagcacgaagtgagtggtgggtgagtgagcaataccgcctgagctccgcctcctgtcagatcaagtggccttacattctcataggagtgtgaaccctattgtgaactgcacatgccagggatctaggtggagggctccttatgagaatctaatgcctgatgatctgaggtggaacagcttcatcccaaaaccatccccgctggcccatggaaaaattgtccaccacaaaactggtccctggtgccaaaaaggctgaggaccactgctctagccagaccttcagaaaaggaaaatggggccaggcgcagtggctcatgcctgtaatcccagcactttgggaggccgaggcaggaggatcccctgaggtcaggaattcaagaccaacctggccaacatggtgaaaccccatctctgctaaaaatacaaaaattagctgggtgtggtggcgcgtgcctgtaatcccagctacttgggaggctgaggcaggagaatgggttgaacccgggagacggaggttgcagtgagccgagatggcaccactgcactccagcctaggtgacagagggagactccattaaaaaaaaaagaagaagaaagaaagagagaaaggaagagagggaaagaaagaaaaaggaaagaaagaaagaaagagaaagaaaggaaagaaagaaagaaaggaaagaaagaaaggaaagaaagaaaggaaagaaagaaagaaagaaagaaagaaagaaagaaagaaagaaagaaagaaagaaagaaagaaagaaatagaaagagaaagaaagggaaaggaaaggaaaatggaaatgagggctaaaacggcacgccctaggactgctccggggagaaaggagggacctgggaggaatgcagtctcaactctgtcatctctcccgcagcagcctgacaaaggccctgtgaggaaagaggaggctgaagaggcacaggcccaggggaggctggagcacctccattccattgttgggatctcaccagggcaggggcgggtgggaatggaggcagctggcaggggggatggggagggaggccagcgggtgtacctggcctgctgggccacctgggactcctgcacgctgctcagtgcatccttggcggtcttggtggcgtgcttcatgtaaccctgcatgaagctgagaagggaggcatcctcggcctctgaagctcctgaggaaagagcagggctgagtggggtggatcggc

SEQ ID NO: 81 - DNA, 4037 bp, Homo sapiens
actggtcttccctgagtgtgggtgtgtaaaggaggtgtggcttctggccagatggcacagggctctcccattcctgtctctcatctctgtgatgatatgccttcaatcactttttccagttctgcttagagggcatcaggtcctaatggcacatttctacctcttcttggagccagtcaagggagggtgtcataacaaataataggcgtaggccttgggcggggcaggtctgccaccagtcccaaggctgtccttttcaggctctgcaggtgaggcacttggctttctggaccccgagatcctcatctgtaaagtggcaaaaacgatagagcctttatcctacattgtgccctgagggctggctggcttagtgagtatcaagtgcttagcacagtgtctggaagacagacagtgcccaggaatgggtgcctgcaggcagtaaaattattctccctttcactctttaagaggtgatcctttctgaaggagtcctctatcttctctcacactacagtagttgatcttacctaaggatgggaaagggtaaaggaaaagggaaaaaagcagaacaggtagaggagaatataggaagaatcttggcccccgcccatcgtcactcaacaccttgagggcctgctgtgagctagaattcagggctgggagtcaggctgtgggatgctcgacaggttgccttcaattcctcctctctctcccccttgctctcctagtcccccagttccctgccaacctcatacgttctttttggtcttgcagaatgtggggcaagcctgggaggtcatgagcacccagacctgagtgatggcagccagcatttaaactcctcttgctatccatctacgtgtattacagacattctgctcagctacaagcaccccgaagtctccttcagcatggagcaggcaggcgtgtaacaagaaacagagagtgagtgtcaccctggccagagccaaaccagccctgtggcccagtgcctgctcccaatcccatcaggagcttcagcccatgtgttgtggtggccagtgcagtcgacagtaccacgcctcccctcgtggccttcacagtttcttgcttttcattaacgacgctgctagttttagggcgcgaggtaggggtgggggtgtgcagaagaaatgctaaacacagtctcttggttcggttatgggaataagacacaagactcgccgtgtgttacaggtgctctagccttcatagcgacagaagtgagctacggctccagaggatgcaggtgacctccggtcagcataatgaggaaaggaggaagtccttaaactcagtcctaaaagacaaaacctggcaggaaaatatgtccagccatattttttaaggccatacagaagcaagtggcaggatattccagattagggaaatgtgtgatgagaggcccatggtagaaagaatggggaaattggcttgtttggctggagtaatgcaaagagtacacagcaggcaccattggttgtatctggaaaatccttgacagaagaggcctgatgaaagggaagccacttggcaaatccacatcagagcctcagtatggcaagctacctgaacacctgagggaaagtaaacccgttgcattttttaaaaggttttaaatggaatatttgagcctttctcttttcaaactaattctcctctgtgtctgctttattccaggttttgtgtacagcttgggaatgaaaaggttgattgtaaacccacagtatctagcagcgttgtgccaaattgcccttgtgtttctctccacccaaaatatcacagctgctttcctcacatttggttcatccgtgtgctgttcttttgggttctgagagggttttgccatgtttgcttgtatgaccaagtcaccaaggaaataaacaggaaggaaatccatgttctccatcttttgtgaaagtatatttgagttggtggttttttgttttgtttgggggtttgtgttttgttttgtttttggtatgttttcttccagaggtgatatactttcttttttttcttcctttcttttttttctttcgttccttttttgaaacaggagagcaaagcagttagagttcagaggccagcggcctcagggccactccctccctagccttcatcagcagagcaccctccatccccctgcattgctcttctgtgaaagcaaatactaaaggatgccatcctctggaatcctaatggcaggcaaagggagagaggaagggtgacggcttctggcacttagaaaacaaaaagaacaaaaaaagagaaacccccaagcctggaacgcagagaggtctttactgctgggatccacggaaaacatgtctgtcctagccaagatcatatgaagagtttggcacggaggctgagaatgacctggcatagatggtttgccagttaggatgtctcaatttgagcctttgcttttggtggataactcagctcccctcttgtaacctggaaagttggttgcctttatcatcctgctggttttatccatggactgaacacccaacagcagtgcactatgctttctatggcatctttcattctcattttatattgtgctataaaaaggattgtttctccatatatatattatatatgtgtgtatatatataatataatatatgtgtatatatatattatatatataatatataatataatatattatatatatattatatatataatatatatataaaatatatatatatatgctctcctctttcagcctctttgtcacagggaagaagtgtaggaggttgccttgggccctgcctctctcctaacctcctcttccccactgggtaccctcagcccctatattttaattcttgatcatgtagaaattgtttttggtaaatgttgatattattgttattatcattattaataaataaagagaaaaggaatttttgtttaaatgagaaatgtttaaccagattctgttctatttgaattgtgacttgcaccttttgttcaaagtatttcctttaggcattgtaattgtgaacagctcttacttgtgccagtgacagatgcagtggtctcctttccccagttgaagcagtgcatacgcagtagctattatttgtgttatctttatttctcttcattgttagaaaccaaagtcttctctgctggctggggctgagagagggtctgggttatctccttctgatcttcaaaacaagagagagaccttgaatacactgactcttccaccctttttttttctgggaaaggagagcaagaggtcccgagtcccctcctagtctttcatcctgaatttgcacagaggaaagcgggtgcccggcatggccatcctgatgttgctggcgggatccccatgcaccttgtccttctccactgatactggcagctcggctcctggacccaagatcccttgagtggaattctgcagtgcaagagcccttcgtgggagctgtcccatgtttccatggtccccagtctcccctccacttggtggggtcaccaactactcaccagaagggggcttaccaagaaagccctaaaaagctgttgacttatctgcgcttgttccaactcttatgcccccaacctgccctaccaccaccacgcgctcagcctgatgtgtttacatggtactgtatgtatgggagagcagactgcaccctccagcaacaacagatgaaagccagtgagcctactaaccgtgccatcttgcaaactacactttaaaaaaaactcattgctttgtattgtagtaaccaatatgtgcagtatacgttgaatgtatatgaacatactttcctatttctgttctttgaaaatgtcagaaatatttttttctttctcattttatgttgaactaaaaaggattaaaaaaaaaatctccagactcaagttgctaagaccttttgtcctgccttttgtccttccttttgtgaggcacttacttacaacttggttacttagttggacagcaggaagttgtgtagataggagcctgattgtgttcttag

SEQ ID NO: 82 - DNA, 4045 bp, Homo sapiens
aagtattcttccctccttcacacacagttttctagttaatccatttatgtaattctgtatgctcctacttgacctaatttcaacatctggaaaaatagaactagaataaagaatgagcaagttgagtggtatttataaaggtccatcttaatcttttaacaggtatttgtgaactttgccaaggaccaaagtgatgatgaccacttaaaagacctctcattacacaaaaaccagacagtagtggacgttgcagttctcacatcttttctacaggatgagaaagtgaaagaaagctatgtatgaagaatcctgttcatacggggtggctgaaagtaaagaggaactagactttcctttgcaccatgtgaagtgttgtggagaaaagagccagaagttgatgtgggaagaagtaaactggatactgtactgatactattcaatgcaatgcaattcaatgcaatgaaaacaaaattccattacaggggcagtgcctttgtagcctatgtcttgtatggctctcaagtgaaagacttgaatttagttttttacctatacctatgtgaaactctattatggaacccaatggacatatgggtttgaactcacacttttttttttttttttgttcctgtgtattctcattggggttgcaacaataattcatcaagtaatcatggccagcgattattgatcaaaatcaaaaggtaatgcacatcctcattcactaagccatgccatgcccaggagactggtttcccggtgacacatccattgctggcaatgagtgtgccagagttattagtgccaagtttttcagaaagtttgaagcaccatggtgtgtcatgctcacttttgtgaaagctgctctgctcagagtctatcaacattgaatatcagttgacagaatggtgccatgcgtggctaacatcctgctttgattccctctgataagctgttctggtggcagtaacatgcaacaaaaatgtgggtgtctccaggcacgggaaacttggttccattgttatattgtcctatgcttcgagccatgggtctacagggtcatccttatgagactcttaaatatacttagatcctggtaagaggcaaagaatcaacagccaaactgctggggctgcaagctgctgaagccagggcatgggattaaagagattgtgcgttcaaacctagggaagcctgtgcccatttgtcctgactgtctgctaacatggtacactgcatctcaagatgtttatctgacacaagtgtattatttctggctttttgaattaatctagaaaatgaaaagatggagttgtattttgacaaaaatgtttgtactttttaatgttatttggaattttaagttctatcagtgacttctgaatccttagaatggcctctttgtagaaccctgtggtatagaggagtatggccactgccccactatttttattttcttatgtaagtttgcatatcagtcatgactagtgcctagaaagcaatgtgatggtcaggatctcatgacattatatttgagtttctttcagatcatttaggatactcttaatctcacttcatcaatcaaatattttttgagtgtatgctgtagctgaaagagtatgtacgtacgtataagactagagagatattaagtctcagtacacttcctgtgccatgttattcagctcactggtttacaaatataggttgtcttgtggttgtaggagcccactgtaacaatactgggcagcctttttttttttttttttaattgcaacaatgcaaaagccaagaaagtataagggtcacaagtctaaacaatgaattcttcaacagggaaaacagctagcttgaaaacttgctgaaaaacacaacttgtgtttatggcatttagtaccttcaaataattggctttgcagatattggataccccattaaatctgacagtctcaaatttttcatctcttcaatcactagtcaagaaaaatataaaaacaacaaatacttccatatggagcatttttcagagttttctaacccagtcttatttttctagtcagtaaacatttgtaaaaatactgtttcactaatacttactgttaactgtcttgagagaaaagaaaaatatgagagaactattgtttggggaagttcaagtgatctttcaatatcattactaacttcttccactttttccagaatttgaatattaacgctaaaggtgtaagacttcagatttcaaattaatctttctatattttttaaatttacagaatattatataacccactgctgaaaaagaaaaaaatgattgttttagaagttaaagtcaatattgattttaaatataagtaatgaaggcatatttccaataactagtgatatggcatcgttgcattttacagtatcttcaaaaatacagaatttatagaataatttctcctcatttaatatttttcaaaatcaaagttatggtttcctcattttactaaaatcgtattctaattcttcattatagtaaatctatgagcaactccttacttcggttcctctgatttcaaggccatattttaaaaaatcaaaaggcactgtgaactattttgaagaaaacacaacattttaatacagattgaaaggacctcttctgaagctagaaacaatctatagttatacatcttcattaatactgtgttaccttttaaaatagtaattttttacattttcctgtgtaaacctaattgtggtagaaatttttaccaactctatactcaatcaagcaaaatttctgtatattccctgtggaatgtacctatgtgagtttcagaaattctcaaaatacgtgttcaaaaatttctgcttttgcatctttgggacacctcagaaaacttattaacaactgtgaatatgagaaatacagaagaaaataataagccctctatacataaatgcccagcacaattcattgttaaaaaacaaccaaacctcacactactgtatttcattatctgtactgaaagcaaatgctttgtgactattaaatgttgcacatcattcattcactgtatagtaatcattgactaaagccatttgtctgtgttttcttcttgtggttgtatatatcaggtaaaatattttccaaagagccatgtgtcatgtaatactgaaccactttgatattgagacattaatttgtacccttgttattatctactagtaataatgtaatactgtagaaatattgctctaattcttttcaaaattgttgcatcccccttagaatgtttctatttccataaggatttaggtatgctattatcccttcttataccctaagatgaagctgtttttgtgctctttgttcatcattggccctcattccaagcactttacgctgtctgtaatgggatctatttttgcactggaatatctgagaattgcaaaactagacaaaagtttcacaacagatttctaagttaaatcattttcattaaaaggaaaaaagaaaaaaaattttgtatgtcaataactttatatgaagtattaaaatgcatatttctatgttgtaatataatgagtcacaaaataaagctgtgacagttctgttggtctacagaaatttacttttgtgcatttgtggcaccacctactgttgaagggttataaagccattagaaaagtagaggggaagtgatttggatcaaaaggaaaaactttagaaaagattcaaatgttcccttaatcataaaagagaactgaggggactacttgaaaataaaaggttgttttgtattttcatgttggttaagatactgagtaactggtattaagtgttagaggtttttagataaatattctgcttaatgattatgaagctgcactgagatttctgaaaatgctctgtagctgagcttatttaataaatgttcacttggtataggggaagctacaaaggcagccttcagtgtccttttgtttattcaaccaaaaatataaggacacaatgtagcagttatactgggaaggtgctgggggtggtggcaatggt

SEQ ID NO: 83 - DNA, 4056 bp, Homo sapiens
aagtaccaaataggtcctgacacttaagaagtactcagtaaatattttcttccctcttccctttaatcaagaccgtatgtgccaaagtaaatggatgactgagcagttggtgatgtaggggtggggggcgatatagaaagtcagtttttggccgggcgtggtggctcatgcctgtaatcccagcactttgggaggctgaggagcaggcagatcatgaggtcaggagatccagataatcctggccaacagggtgaaaccccgtctctactaaaaatacaaaaattagctgggcatggtggtgcgcacttgtagtcccagctacttgcgaggctgaggcaggagaattgctcgaacccaggaggtggaggttacagtgagccaaggtctcgccactgcactccagcctggggacagagcaagaccccatttcaaggggggaaaaaaagtctatttttaagttgttattgcttttttcaagtattcttccctccttcacacacagttttctagttaatccatttatgtaattctgtatgctcctacttgacctaatttcaacatctggaaaaatagaactagaataaagaatgagcaagttgagtggtatttataaaggtccatcttaatcttttaacaggtatttgtgaactttgccaaggaccaaagtgatgatgaccacttaaaagacctctcattacacaaaaaccagacagtagtggacgttgcagttctcacatcttttctacaggatgagaaagtgaaagaaagctatgtatgaagaatcctgttcatacggggtggctgaaagtaaagaggaactagactttcctttgcaccatgtgaagtgttgtggagaaaagagccagaagttgatgtgggaagaagtaaactggatactgtactgatactattcaatgcaatgcaattcaatgcaatgaaaacaaaattccattacaggggcagtgcctttgtagcctatgtcttgtatggctctcaagtgaaagacttgaatttagttttttacctatacctatgtgaaactctattatggaacccaatggacatatgggtttgaactcacacttttttttttttttttgttcctgtgtattctcattggggttgcaacaataattcatcaagtaatcatggccagcgattattgatcaaaatcaaaaggtaatgcacatcctcattcactaagccatgccatgcccaggagactggtttcccggtgacacatccattgctggcaatgagtgtgccagagttattagtgccaagtttttcagaaagtttgaagcaccatggtgtgtcatgctcacttttgtgaaagctgctctgctcagagtctatcaacattgaatatcagttgacagaatggtgccatgcgtggctaacatcctgctttgattccctctgataagctgttctggtggcagtaacatgcaacaaaaatgtgggtgtctccaggcacgggaaacttggttccattgttatattgtcctatgcttcgagccatgggtctacagggtcatccttatgagactcttaaatatacttagatcctggtaagaggcaaagaatcaacagccaaactgctggggctgcaagctgctgaagccagggcatgggattaaagagattgtgcgttcaaacctagggaagcctgtgcccatttgtcctgactgtctgctaacatggtacactgcatctcaagatgtttatctgacacaagtgtattatttctggctttttgaattaatctagaaaatgaaaagatggagttgtattttgacaaaaatgtttgtactttttaatgttatttggaattttaagttctatcagtgacttctgaatccttagaatggcctctttgtagaaccctgtggtatagaggagtatggccactgccccactatttttattttcttatgtaagtttgcatatcagtcatgactagtgcctagaaagcaatgtgatggtcaggatctcatgacattatatttgagtttctttcagatcatttaggatactcttaatctcacttcatcaatcaaatattttttgagtgtatgctgtagctgaaagagtatgtacgtacgtataagactagagagatattaagtctcagtacacttcctgtgccatgttattcagctcactggtttacaaatataggttgtcttgtggttgtaggagcccactgtaacaatactgggcagcctttttttttttttttttaattgcaacaatgcaaaagccaagaaagtataagggtcacaagtctaaacaatgaattcttcaacagggaaaacagctagcttgaaaacttgctgaaaaacacaacttgtgtttatggcatttagtaccttcaaataattggctttgcagatattggataccccattaaatctgacagtctcaaatttttcatctcttcaatcactagtcaagaaaaatataaaaacaacaaatacttccatatggagcatttttcagagttttctaacccagtcttatttttctagtcagtaaacatttgtaaaaatactgtttcactaatacttactgttaactgtcttgagagaaaagaaaaatatgagagaactattgtttggggaagttcaagtgatctttcaatatcattactaacttcttccactttttccagaatttgaatattaacgctaaaggtgtaagacttcagatttcaaattaatctttctatattttttaaatttacagaatattatataacccactgctgaaaaagaaaaaaatgattgttttagaagttaaagtcaatattgattttaaatataagtaatgaaggcatatttccaataactagtgatatggcatcgttgcattttacagtatcttcaaaaatacagaatttatagaataatttctcctcatttaatatttttcaaaatcaaagttatggtttcctcattttactaaaatcgtattctaattcttcattatagtaaatctatgagcaactccttacttcggttcctctgatttcaaggccatattttaaaaaatcaaaaggcactgtgaactattttgaagaaaacacaacattttaatacagattgaaaggacctcttctgaagctagaaacaatctatagttatacatcttcattaatactgtgttaccttttaaaatagtaattttttacattttcctgtgtaaacctaattgtggtagaaatttttaccaactctatactcaatcaagcaaaatttctgtatattccctgtggaatgtacctatgtgagtttcagaaattctcaaaatacgtgttcaaaaatttctgcttttgcatctttgggacacctcagaaaacttattaacaactgtgaatatgagaaatacagaagaaaataataagccctctatacataaatgcccagcacaattcattgttaaaaaacaaccaaacctcacactactgtatttcattatctgtactgaaagcaaatgctttgtgactattaaatgttgcacatcattcattcactgtatagtaatcattgactaaagccatttgtctgtgttttcttcttgtggttgtatatatcaggtaaaatattttccaaagagccatgtgtcatgtaatactgaaccactttgatattgagacattaatttgtacccttgttattatctactagtaataatgtaatactgtagaaatattgctctaattcttttcaaaattgttgcatcccccttagaatgtttctatttccataaggatttaggtatgctattatcccttcttataccctaagatgaagctgtttttgtgctctttgttcatcattggccctcattccaagcactttacgctgtctgtaatgggatctatttttgcactggaatatctgagaattgcaaaactagacaaaagtttcacaacagatttctaagttaaatcattttcattaaaaggaaaaaagaaaaaaaattttgtatgtcaataactttatatgaagtattaaaatgcatatttctatgttgtaatataatgagtcacaa

SEQ ID NO: 84 - DNA, 4046 bp, Homo sapiens
tgaatggtgcatatgagtgaagtctaggatggggccttagcgttaaagccctggggtagtgtgactgagattgttggtaaagaatgtgcagtggttggcatgacctcagaaattctgaaatgggactgcacctgcagactgaagtgttcagagagccagggaggtgcaaggactggggagggtagaggcaggaaccctgcctgccaggaagagctagcatcctgggggcagaaaggctgtgctttcaagtagcagcagatgtattggtatctttgtaatggagaagcatactttacaggaacattaggccagattgtctaaccagagtatctctacctgcttaaaatctaagtagttttcttgtcctttgcagtatcttatcaaacatccatgaagtacatcagaacatgggctactgccctcagtttgatgccatcacagagctgttgactgggagagaacacgtggagttctttgcccttttgagaggagtcccagagaaagaagttggcaaggtactgtgggcacctgaaagccagcctgtctcctttggcatcctgacaatatataccttatggcttttccacacgcattgacttcaggctgtttttcctcatgaatgcagcagcacaaaatgctggttctttgtatctgctttcagggtggaaacctgtaacggtggtggggcagggctgggtgggcagagagggagtgctgctcccaccacacgagtcccttctccctgctttggctcctcaccagttgtcaggttatgattatagaatctagtcctactcagtgaaagaactttcatacatgtatgtgtaggacagcatgataaaattcccaagccagaccaaagtcaaggtgctttttatcactgtaggttggtgagtgggcgattcggaaactgggcctcgtgaagtatggagaaaaatatgctggtaactatagtggaggcaacaaacgcaagctctctacagccatggctttgatcggcgggcctcctgtggtgtttctggtgagtataactgtggatggaaaactgttgttctggcctgagtggaaaacatgactgttcaaaagtcctatatgtccagggctgttgtatgattggcttgtcttcccccagggacagcagagcaaccttggaaaagcagagggaagcttctcccttggcacacactggggtggctgtaccatgcctgcagatgctcccaaatagaggcactccaagcactttgtttcttagcgtgattgaggctggatatgtgatttgatctttctctggaacattctttctaatcatctttgtgttcattccctgaaaatgaagagtgtggacacagctttaaaatccccaaggtagcaactaggtcatagttccttacacacggatagatgaaaaacagatcagactgggaagtggcccttgaccttttttcttctgtagataagagcattgatgttattacgggaagaagcctttgaggcttttatgtattccacctcggtctggaatttgtttctgtaaggctaacagttgcaatatactagggtaatctgagtgagctggaattaaaaaaaaaaaggaatttcaccccaatcttatactgacttcaatagaggtttcagacaaaaagttgttttgtatatacttatcagtcatgaaaagataattacaactaaatggcctttttccttccctatttatttggagaaatttaattacataaaaaagtactcagaatatttgagtttcctgcatcaataagacatttataataatgaccttgtttacaaatgaatttgaaagttactctaattctttgattcatcaagaaataactagaatggcaagttaaaatttaagctgtttcaaagatgcttctgcatttaaaaacaaatttatctttgattttttttccccccagcaaataagacttattttattctaattacaggatgaacccaccacaggcatggatcccaaagcccggcggttcttgtggaattgtgccctaagtgttgtcaaggaggggagatcagtagtgcttacatctcataggtccgtagtaaagtcttgggttcctcactgtgggatgttttaactttccaagtagaatatgcgatcattttgtaaaaattagaaaatacagaaaagcaaagagtaaaacaattattacctgaaattatatatgcatattcttacaaaaatgcaagcccagtataaatactgctctttttcacttaatatattgtaaacattattccaagtcagtgcatttaggtgtcatttcttatagctggatagtattccattaggatatactcttatttaactattcccccttttgtagacatttggattatttccaacttgttcacaattgtaaacaccactacactgaacagcatcatccctatatccacatgtacttgtaacagaatacaattccctaggaagctggaatgctggaagtcatggtgatgttctcatggttacagagaatctctctaaaactaaaacctctttctgttttaccgcagtatggaagaatgtgaagctctttgcactaggatggcaatcatggtcaatggaaggttcaggtgccttggcagtgtccagcatctaaaaaataggtaataaagataatttctttgggatagtgcctagtgagaaggcttgatatttattcttttgtgagtatataaatggtgcctctaacataaagggaaataaaactgagcaaaacagtatagtggaaagaatgagggctttgaagtccgaactgcattcaaattctgtctttaccatttactggttctgtgactcttgggcaagtgacttaactactgtaagagttagtttccctggaagatctacctcctagctttgtgctatagatgaaatgaaaaaaatttacatgtgccagtactggtgagagcgcaagctttggagtcaaacacaaatgggtttgcatcctggccctaccaattatgagctctgagccatgggcaagtgactaactccctgggcctcagtttctctgtaacatctgtcagacttcatgggtccaggtgaggattaaaggagatcatgtatttacagcacatggcatggtgcttcacataaaataagtatttagtaaatgataactggttccttctctcagaaacttatttctgggcctgccaggggccgccctttttcatggcacaagttgggttcccagggttcagtattcttttaaatagttttctggagatcctccatttgggtattttttcctgctttcaggtttggagatggttatacaatagttgtacgaatagcagggtccaacccggacctgaagcctgtccaggatttctttggacttgcatttcctggaagtgttctaaaagagaaacaccggaacatgctacaataccagcttccatcttcattatcttctctggccaggatattcagcatcctctcccagagcaaaaagcgactccacatagaagactactctgtttctcagacaacacttgaccaagtaagctttgagtgtcaaaacagatttacttctcagggtgtggattcctgccccgacactcccgcccataggtccaagagcagtttgtatcttgaattggtgcttgaattcctgatctactattcctagctatgctttttactaaacctctctgaacctgaaaagggagatgatgcctatgtactctataggattattgtgagaatttactgtaataataaccataaaaactaccatttagtgagcacctaccatgggccaggcattttacttggtgcctaatcctatttaaattagataaaaaagtaccaaataggtcctgacacttaagaagtactcagtaaatattttcttccctcttccctttaatcaagaccgtatgtgccaaagtaaatggatgactgagcagttggtgatgtaggggtggggggcgatatagaaagtcagtttttggccgggcgtggtggctcatgcctgtaatcccagcactttgggaggctg

SEQ ID NO: 85 - DNA, 4046 bp, Homo sapiens
actgcaacctccgcctcccaggttcaagcgattctcctgcctcagcctcctgagtagctgagattacaggtgcccgccacaatgcctgcctaatttttttgtattttcagtagagatggggtttcaccatgttggccagactggtctcgagctcctgacctcaggtgatccacctgcctcagcctcccaaagttctgggattacaggcatgagccactgcgcccggcttctctggacttattatgtggagagatagtacaaggcagtggctttcagagttttttgaccatgaccgttgtgggaaatacattttatatctcaacctagtatgtacacacagacatgtagacacatgtataacctaaagtttcataaagcagtacctactgttactaattgtagtgcactctgctatttcttattctaccttatactgcgtcattaaaaaagtgctggtcatgacccactaaatttatttcccaaaccactaatgaacaatgactcacaatttgaacacactggacagggggatagccaataaaattgaaaagagcaaggaaattaatgtattcatgatctcctctcctgtctcttacatttttgcagtagcaatgtaaaggaatcctaagagaacagacattctgggaatagcaggcctagcgctgcacaactgctttcctaggcttgctcctagtaccaagctcctgacgcatatagcagtggcagtaataaccagcccatagtaaggtttgtcacagggactggttgtaagaactgatttggttggtatagctgtgagggcctggcacggtgtccacgtgtgcctcaatcctaattctgaaaaaggctgaccctgggggtgctaattagatacacagagaggaatgaatgctgccagaaggccaagttcatggcaatgccgctgtggctgaggtgcagtcatcagtctggaacgtgaacactgaacttctctcacatgtgattcttcacttgactggcttcatagaaccccaaagccaccccaccaccacataaattgtgtctctaggttctgtgttgctcacactcaaaatttctgggccttctcatttggtgcatgtgaatggtgcatatgagtgaagtctaggatggggccttagcgttaaagccctggggtagtgtgactgagattgttggtaaagaatgtgcagtggttggcatgacctcagaaattctgaaatgggactgcacctgcagactgaagtgttcagagagccagggaggtgcaaggactggggagggtagaggcaggaaccctgcctgccaggaagagctagcatcctgggggcagaaaggctgtgctttcaagtagcagcagatgtattggtatctttgtaatggagaagcatactttacaggaacattaggccagattgtctaaccagagtatctctacctgcttaaaatctaagtagttttcttgtcctttgcagtatcttatcaaacatccatgaagtacatcagaacatgggctactgccctcagtttgatgccatcacagagctgttgactgggagagaacacgtggagttctttgcccttttgagaggagtcccagagaaagaagttggcaaggtactgtgggcacctgaaagccagcctgtctcctttggcatcctgacaatatataccttatggcttttccacacgcattgacttcaggctgtttttcctcatgaatgcagcagcacaaaatgctggttctttgtatctgctttcagggtggaaacctgtaacggtggtggggcagggctgggtgggcagagagggagtgctgctcccaccacacgagtcccttctccctgctttggctcctcaccagttgtcaggttatgattatagaatctagtcctactcagtgaaagaactttcatacatgtatgtgtaggacagcatgataaaattcccaagccagaccaaagtcaaggtgctttttatcactgtaggttggtgagtgggcgattcggaaactgggcctcgtgaagtatggagaaaaatatgctggtaactatagtggaggcaacaaacgcaagctctctacagccatggctttgatcggcgggcctcctgtggtgtttctggtgagtataactgtggatggaaaactgttgttctggcctgagtggaaaacatgactgttcaaaagtcctatatgtccagggctgttgtatgattggcttgtcttcccccagggacagcagagcaaccttggaaaagcagagggaagcttctcccttggcacacactggggtggctgtaccatgcctgcagatgctcccaaatagaggcactccaagcactttgtttcttagcgtgattgaggctggatatgtgatttgatctttctctggaacattctttctaatcatctttgtgttcattccctgaaaatgaagagtgtggacacagctttaaaatccccaaggtagcaactaggtcatagttccttacacacggatagatgaaaaacagatcagactgggaagtggcccttgaccttttttcttctgtagataagagcattgatgttattacgggaagaagcctttgaggcttttatgtattccacctcggtctggaatttgtttctgtaaggctaacagttgcaatatactagggtaatctgagtgagctggaattaaaaaaaaaaaggaatttcaccccaatcttatactgacttcaatagaggtttcagacaaaaagttgttttgtatatacttatcagtcatgaaaagataattacaactaaatggcctttttccttccctatttatttggagaaatttaattacataaaaaagtactcagaatatttgagtttcctgcatcaataagacatttataataatgaccttgtttacaaatgaatttgaaagttactctaattctttgattcatcaagaaataactagaatggcaagttaaaatttaagctgtttcaaagatgcttctgcatttaaaaacaaatttatctttgattttttttccccccagcaaataagacttattttattctaattacaggatgaacccaccacaggcatggatcccaaagcccggcggttcttgtggaattgtgccctaagtgttgtcaaggaggggagatcagtagtgcttacatctcataggtccgtagtaaagtcttgggttcctcactgtgggatgttttaactttccaagtagaatatgcgatcattttgtaaaaattagaaaatacagaaaagcaaagagtaaaacaattattacctgaaattatatatgcatattcttacaaaaatgcaagcccagtataaatactgctctttttcacttaatatattgtaaacattattccaagtcagtgcatttaggtgtcatttcttatagctggatagtattccattaggatatactcttatttaactattcccccttttgtagacatttggattatttccaacttgttcacaattgtaaacaccactacactgaacagcatcatccctatatccacatgtacttgtaacagaatacaattccctaggaagctggaatgctggaagtcatggtgatgttctcatggttacagagaatctctctaaaactaaaacctctttctgttttaccgcagtatggaagaatgtgaagctctttgcactaggatggcaatcatggtcaatggaaggttcaggtgccttggcagtgtccagcatctaaaaaataggtaataaagataatttctttgggatagtgcctagtgagaaggcttgatatttattcttttgtgagtatataaatggtgcctctaacataaagggaaataaaactgagcaaaacagtatagtggaaagaatgagggctttgaagtccgaactgcattcaaattctgtctttaccatttactggttctgtgactcttgggcaagtgacttaactactgtaagagttagtttccctggaagatctacctcctagctttgtgctatagatgaaatgaaaaaaatttacatgtgccagtactggtgaga

SEQ ID NO: 86 - DNA, 4042 bp, Homo sapiens
ccagtgggttacatttcctaagatgtggaattttacattgctacataaaatccccctatgtacatgtacctataatttatttaataaattccttataaatgttggacacattagtttccatttttcactatgtaaatatgtccctgtatacatcttttattatttcctcaggaacaattcctacaaagtaaattgccctctctaaagagcatacaaattgactgagccaccgttaggccattttctgagactgcacaggtcacaaagcaatctgatctttgggaatacagctacattttataggcttcttagataatgttactctaagtactttaaatatgtggggcttctctgggcttttttttttttgagacggagtttcactcttactgcccaggctggagagcaatggcgcgaccttggctcactgcaacctccgcctcccaggttcaagcgattctcctgcctcagcctcctgagtagctgagattacaggtgcccgccacaatgcctgcctaatttttttgtattttcagtagagatggggtttcaccatgttggccagactggtctcgagctcctgacctcaggtgatccacctgcctcagcctcccaaagttctgggattacaggcatgagccactgcgcccggcttctctggacttattatgtggagagatagtacaaggcagtggctttcagagttttttgaccatgaccgttgtgggaaatacattttatatctcaacctagtatgtacacacagacatgtagacacatgtataacctaaagtttcataaagcagtacctactgttactaattgtagtgcactctgctatttcttattctaccttatactgcgtcattaaaaaagtgctggtcatgacccactaaatttatttcccaaaccactaatgaacaatgactcacaatttgaacacactggacagggggatagccaataaaattgaaaagagcaaggaaattaatgtattcatgatctcctctcctgtctcttacatttttgcagtagcaatgtaaaggaatcctaagagaacagacattctgggaatagcaggcctagcgctgcacaactgctttcctaggcttgctcctagtaccaagctcctgacgcatatagcagtggcagtaataaccagcccatagtaaggtttgtcacagggactggttgtaagaactgatttggttggtatagctgtgagggcctggcacggtgtccacgtgtgcctcaatcctaattctgaaaaaggctgaccctgggggtgctaattagatacacagagaggaatgaatgctgccagaaggccaagttcatggcaatgccgctgtggctgaggtgcagtcatcagtctggaacgtgaacactgaacttctctcacatgtgattcttcacttgactggcttcatagaaccccaaagccaccccaccaccacataaattgtgtctctaggttctgtgttgctcacactcaaaatttctgggccttctcatttggtgcatgtgaatggtgcatatgagtgaagtctaggatggggccttagcgttaaagccctggggtagtgtgactgagattgttggtaaagaatgtgcagtggttggcatgacctcagaaattctgaaatgggactgcacctgcagactgaagtgttcagagagccagggaggtgcaaggactggggagggtagaggcaggaaccctgcctgccaggaagagctagcatcctgggggcagaaaggctgtgctttcaagtagcagcagatgtattggtatctttgtaatggagaagcatactttacaggaacattaggccagattgtctaaccagagtatctctacctgcttaaaatctaagtagttttcttgtcctttgcagtatcttatcaaacatccatgaagtacatcagaacatgggctactgccctcagtttgatgccatcacagagctgttgactgggagagaacacgtggagttctttgcccttttgagaggagtcccagagaaagaagttggcaaggtactgtgggcacctgaaagccagcctgtctcctttggcatcctgacaatatataccttatggcttttccacacgcattgacttcaggctgtttttcctcatgaatgcagcagcacaaaatgctggttctttgtatctgctttcagggtggaaacctgtaacggtggtggggcagggctgggtgggcagagagggagtgctgctcccaccacacgagtcccttctccctgctttggctcctcaccagttgtcaggttatgattatagaatctagtcctactcagtgaaagaactttcatacatgtatgtgtaggacagcatgataaaattcccaagccagaccaaagtcaaggtgctttttatcactgtaggttggtgagtgggcgattcggaaactgggcctcgtgaagtatggagaaaaatatgctggtaactatagtggaggcaacaaacgcaagctctctacagccatggctttgatcggcgggcctcctgtggtgtttctggtgagtataactgtggatggaaaactgttgttctggcctgagtggaaaacatgactgttcaaaagtcctatatgtccagggctgttgtatgattggcttgtcttcccccagggacagcagagcaaccttggaaaagcagagggaagcttctcccttggcacacactggggtggctgtaccatgcctgcagatgctcccaaatagaggcactccaagcactttgtttcttagcgtgattgaggctggatatgtgatttgatctttctctggaacattctttctaatcatctttgtgttcattccctgaaaatgaagagtgtggacacagctttaaaatccccaaggtagcaactaggtcatagttccttacacacggatagatgaaaaacagatcagactgggaagtggcccttgaccttttttcttctgtagataagagcattgatgttattacgggaagaagcctttgaggcttttatgtattccacctcggtctggaatttgtttctgtaaggctaacagttgcaatatactagggtaatctgagtgagctggaattaaaaaaaaaaaggaatttcaccccaatcttatactgacttcaatagaggtttcagacaaaaagttgttttgtatatacttatcagtcatgaaaagataattacaactaaatggcctttttccttccctatttatttggagaaatttaattacataaaaaagtactcagaatatttgagtttcctgcatcaataagacatttataataatgaccttgtttacaaatgaatttgaaagttactctaattctttgattcatcaagaaataactagaatggcaagttaaaatttaagctgtttcaaagatgcttctgcatttaaaaacaaatttatctttgattttttttccccccagcaaataagacttattttattctaattacaggatgaacccaccacaggcatggatcccaaagcccggcggttcttgtggaattgtgccctaagtgttgtcaaggaggggagatcagtagtgcttacatctcataggtccgtagtaaagtcttgggttcctcactgtgggatgttttaactttccaagtagaatatgcgatcattttgtaaaaattagaaaatacagaaaagcaaagagtaaaacaattattacctgaaattatatatgcatattcttacaaaaatgcaagcccagtataaatactgctctttttcacttaatatattgtaaacattattccaagtcagtgcatttaggtgtcatttcttatagctggatagtattccattaggatatactcttatttaactattcccccttttgtagacatttggattatttccaacttgttcacaattgtaaacaccactacactgaacagcatcatccctatatccacatgtacttgtaacagaatacaattccctaggaagctggaatgctggaagtcatggtgatgttctcatggttacagagaatctct

SEQ ID NO: 87 - DNA, 4046 bp, Homo sapiens
attgagatcatactgtatgtagaatttaaaattagtttttattgttaatgagtgtattatgaatatttcccagtgggttacatttcctaagatgtggaattttacattgctacataaaatccccctatgtacatgtacctataatttatttaataaattccttataaatgttggacacattagtttccatttttcactatgtaaatatgtccctgtatacatcttttattatttcctcaggaacaattcctacaaagtaaattgccctctctaaagagcatacaaattgactgagccaccgttaggccattttctgagactgcacaggtcacaaagcaatctgatctttgggaatacagctacattttataggcttcttagataatgttactctaagtactttaaatatgtggggcttctctgggcttttttttttttgagacggagtttcactcttactgcccaggctggagagcaatggcgcgaccttggctcactgcaacctccgcctcccaggttcaagcgattctcctgcctcagcctcctgagtagctgagattacaggtgcccgccacaatgcctgcctaatttttttgtattttcagtagagatggggtttcaccatgttggccagactggtctcgagctcctgacctcaggtgatccacctgcctcagcctcccaaagttctgggattacaggcatgagccactgcgcccggcttctctggacttattatgtggagagatagtacaaggcagtggctttcagagttttttgaccatgaccgttgtgggaaatacattttatatctcaacctagtatgtacacacagacatgtagacacatgtataacctaaagtttcataaagcagtacctactgttactaattgtagtgcactctgctatttcttattctaccttatactgcgtcattaaaaaagtgctggtcatgacccactaaatttatttcccaaaccactaatgaacaatgactcacaatttgaacacactggacagggggatagccaataaaattgaaaagagcaaggaaattaatgtattcatgatctcctctcctgtctcttacatttttgcagtagcaatgtaaaggaatcctaagagaacagacattctgggaatagcaggcctagcgctgcacaactgctttcctaggcttgctcctagtaccaagctcctgacgcatatagcagtggcagtaataaccagcccatagtaaggtttgtcacagggactggttgtaagaactgatttggttggtatagctgtgagggcctggcacggtgtccacgtgtgcctcaatcctaattctgaaaaaggctgaccctgggggtgctaattagatacacagagaggaatgaatgctgccagaaggccaagttcatggcaatgccgctgtggctgaggtgcagtcatcagtctggaacgtgaacactgaacttctctcacatgtgattcttcacttgactggcttcatagaaccccaaagccaccccaccaccacataaattgtgtctctaggttctgtgttgctcacactcaaaatttctgggccttctcatttggtgcatgtgaatggtgcatatgagtgaagtctaggatggggccttagcgttaaagccctggggtagtgtgactgagattgttggtaaagaatgtgcagtggttggcatgacctcagaaattctgaaatgggactgcacctgcagactgaagtgttcagagagccagggaggtgcaaggactggggagggtagaggcaggaaccctgcctgccaggaagagctagcatcctgggggcagaaaggctgtgctttcaagtagcagcagatgtattggtatctttgtaatggagaagcatactttacaggaacattaggccagattgtctaaccagagtatctctacctgcttaaaatctaagtagttttcttgtcctttgcagtatcttatcaaacatccatgaagtacatcagaacatgggctactgccctcagtttgatgccatcacagagctgttgactgggagagaacacgtggagttctttgcccttttgagaggagtcccagagaaagaagttggcaaggtactgtgggcacctgaaagccagcctgtctcctttggcatcctgacaatatataccttatggcttttccacacgcattgacttcaggctgtttttcctcatgaatgcagcagcacaaaatgctggttctttgtatctgctttcagggtggaaacctgtaacggtggtggggcagggctgggtgggcagagagggagtgctgctcccaccacacgagtcccttctccctgctttggctcctcaccagttgtcaggttatgattatagaatctagtcctactcagtgaaagaactttcatacatgtatgtgtaggacagcatgataaaattcccaagccagaccaaagtcaaggtgctttttatcactgtaggttggtgagtgggcgattcggaaactgggcctcgtgaagtatggagaaaaatatgctggtaactatagtggaggcaacaaacgcaagctctctacagccatggctttgatcggcgggcctcctgtggtgtttctggtgagtataactgtggatggaaaactgttgttctggcctgagtggaaaacatgactgttcaaaagtcctatatgtccagggctgttgtatgattggcttgtcttcccccagggacagcagagcaaccttggaaaagcagagggaagcttctcccttggcacacactggggtggctgtaccatgcctgcagatgctcccaaatagaggcactccaagcactttgtttcttagcgtgattgaggctggatatgtgatttgatctttctctggaacattctttctaatcatctttgtgttcattccctgaaaatgaagagtgtggacacagctttaaaatccccaaggtagcaactaggtcatagttccttacacacggatagatgaaaaacagatcagactgggaagtggcccttgaccttttttcttctgtagataagagcattgatgttattacgggaagaagcctttgaggcttttatgtattccacctcggtctggaatttgtttctgtaaggctaacagttgcaatatactagggtaatctgagtgagctggaattaaaaaaaaaaaggaatttcaccccaatcttatactgacttcaatagaggtttcagacaaaaagttgttttgtatatacttatcagtcatgaaaagataattacaactaaatggcctttttccttccctatttatttggagaaatttaattacataaaaaagtactcagaatatttgagtttcctgcatcaataagacatttataataatgaccttgtttacaaatgaatttgaaagttactctaattctttgattcatcaagaaataactagaatggcaagttaaaatttaagctgtttcaaagatgcttctgcatttaaaaacaaatttatctttgattttttttccccccagcaaataagacttattttattctaattacaggatgaacccaccacaggcatggatcccaaagcccggcggttcttgtggaattgtgccctaagtgttgtcaaggaggggagatcagtagtgcttacatctcataggtccgtagtaaagtcttgggttcctcactgtgggatgttttaactttccaagtagaatatgcgatcattttgtaaaaattagaaaatacagaaaagcaaagagtaaaacaattattacctgaaattatatatgcatattcttacaaaaatgcaagcccagtataaatactgctctttttcacttaatatattgtaaacattattccaagtcagtgcatttaggtgtcatttcttatagctggatagtattccattaggatatactcttatttaactattcccccttttgtagacatttggattatttccaacttgttcacaattgtaaacaccactacactgaacagcatcatccctatatccacatgtacttgtaacagaata

SEQ ID NO: 88 - DNA, 4025 bp, Homo sapiens
gagctttttcttagaacccgtggagcacctggttgagggtcacagaggaggcgcacagggaaacactcaccaatgggggttgcattgaactgaactcaaaatatgtgataaaactgattttcctgatgtgggcatcccgcagccccctccctgcccatcctggagactgtggcaagtaggttttataatactacgttagagactgaatctttgtcctgaaaaatagtttgaaaggttcatttttcttgttttttcccccaagacctgtaaatgcaaagctatctcctctgaatgatgaagatgaagatgtgaggcgggaaagacagagaattcttgatggtggaggccagaatgacatcttagaaatcaaggagttgacgaaggtgagagagtacaggttacaatagctcatcttcagtttttttcagctttatgtgctgtaacccagcagtttgctgacttgcttaataaaagggcatgtgttcccaaaatgtacatctataccaaggttctgtcaattttattttaaaaacaccatggagacttcttaaagaattcttactgagaattcttttgtgatatgaattcccattctcgaatacattggttttatatgcttacatttatgtgttagttattaaaacatactaatattgtatatctagtcaaaactgaggtagagagaataaatggttgattttgagtttgagtttcatagtccaaaaagctgatatattgcctgtgttcaagagggtctatatcagccctctagatgccagcatctccaaattttacttttttggaatctgtacagtatttgcaatatttttattacaaatttctactctgtggaatttaatttttaaaatacctgcaatacatatatatgttgaatagatgaaaaattatgtagataataatgaatgatacggttctaaaaagacaggttaaaaagtaagttcacttttattttgagcttcagaatcattcagaagccagtcgccacaaacgcagaccaaggctcttggcacatcaaatatgcctatggcttagggttattgacaagtcttatgttgcagtgtatgtggtttatagtcctgccttccacagttgcttgggagagctgtgagtcactgaggcttatgaatgtttacattttgtttgttgcagatatatagaaggaagcggaagcctgctgttgacaggatttgcgtgggcattcctcctggtgaggtaaagacactttgtctatattgcgtttgtccctattagttcagactatctctacccaatcaagcaacgatgctcgttaagaggtaaaagtggattttaaaggcttctgtatttatgccaggatggagcaattagtcatcgagaagagagggaccctgtatgtcaagagaatgatttcagagaatccaatacaatttaagaaaaagcatggggctgggcgcagtgattcactcctgtaatcccagcactttgggaggccgaggtgggcggatcacgaggtcaggagattgagaccatcctggccaacatggtgaaaccccatctctactataaatacaaaaattagctgggcatagtagtgcattcctgtagtcccagctactcgggaggctgaggcaggagaattgcttgaacctaggagggggaggttgcccagattgcgctgctgcactccagcctggtgacagagtgagactcatgtcaacaacaaaaacagaaaaagcacgcacatctaaaacatgcttttgtgatccatttgggatggtgatgacattcaaatagttttttaaaaatagattttctcctttctggtttccgtttgtgttcttttatgcccttttgccagagtaggtggtgcaatttggctagctggctttcattactgtttttcacacattaactttggcctcaacttgacaactcaaataatatttataaatacagccacacttaaaatggtcccattatgaaatacatatttaaatatctatacgatgtgttaaaaccaagaaaatatttgattcttctctgatatttaagaattgaaggtttgaggtagttacgtgttaggggcatttatattcatgtttttagagtttgcttatacaacttaatctttccttttcagtgctttgggctcctgggagttaatggggctggaaaatcatcaactttcaagatgttaacaggagataccactgttaccagaggagatgctttccttaacaaaaataggtgagaaaagaagtggcttgtattttgctgcaaagactttgtttttaatttatttaaagaaataggttgttatttttgattacagtggtatttttagagttcataaaaatgttgaaatatagtaaagggtaaagaagcacataaaatcatccatgatttcaatatctagagataatcacaatttacatttcctttcagtctcattctcttcttttaacagctttattcaggtataatttacatacaatataatttgcttgttttttaagagtataatttagtgatttttggtaaattgagagttttgcaaccatcaccacaatccagttttagaacttttccatcaccccacatctgtcttatatacacatataaatgtgccatacaattgagatcatactgtatgtagaatttaaaattagtttttattgttaatgagtgtattatgaatatttcccagtgggttacatttcctaagatgtggaattttacattgctacataaaatccccctatgtacatgtacctataatttatttaataaattccttataaatgttggacacattagtttccatttttcactatgtaaatatgtccctgtatacatcttttattatttcctcaggaacaattcctacaaagtaaattgccctctctaaagagcatacaaattgactgagccaccgttaggccattttctgagactgcacaggtcacaaagcaatctgatctttgggaatacagctacattttataggcttcttagataatgttactctaagtactttaaatatgtggggcttctctgggcttttttttttttgagacggagtttcactcttactgcccaggctggagagcaatggcgcgaccttggctcactgcaacctccgcctcccaggttcaagcgattctcctgcctcagcctcctgagtagctgagattacaggtgcccgccacaatgcctgcctaatttttttgtattttcagtagagatggggtttcaccatgttggccagactggtctcgagctcctgacctcaggtgatccacctgcctcagcctcccaaagttctgggattacaggcatgagccactgcgcccggcttctctggacttattatgtggagagatagtacaaggcagtggctttcagagttttttgaccatgaccgttgtgggaaatacattttatatctcaacctagtatgtacacacagacatgtagacacatgtataacctaaagtttcataaagcagtacctactgttactaattgtagtgcactctgctatttcttattctaccttatactgcgtcattaaaaaagtgctggtcatgacccactaaatttatttcccaaaccactaatgaacaatgactcacaatttgaacacactggacagggggatagccaataaaattgaaaagagcaaggaaattaatgtattcatgatctcctctcctgtctcttacatttttgcagtagcaatgtaaaggaatcctaagagaacagacattctgggaatagcaggcctagcgctgcacaactgctttcctaggcttgctcctagtaccaagctcctgacgcatatagcagtggcagtaataaccagcccatagtaaggtttgtcacagggactggttgtaagaactgatttggttggtatagctgtgagggcctggcacggtgtccacgtgtgcctcaatcctaattctgaaaaaggctgaccctgggggtgctaattagatacacagagaggaatgaatgctgcc

SEQ ID NO: 89 - DNA, 4045 bp, Homo sapiens
agaagaatttctaaaattctgacaaaatcctgaaactcaaatattgacccagacatgagcaatttgcttttcaaatgctaagggatttttaatggatttgctttaattaaatctagcctgtttctaagctttattcattatttctccatactcagagcatttctccagattttctaaagaatagaattttattgctacatatcatcagctatgcctgctgctatttaattggtatctgaattaaaaggtctggtttgtccctagagaatcaaattttttcttcactcccatatttcagaacttgatacatttttaggataaaccatgaatgacacccgtttcttctccctcaccctcccttccctcccattttttttttttttttttagaagctgaataatatcaatgatatcctgaagtccgtgttcttgatcttcccacatttttgcctgggacgagggctcatcgacatggtgaaaaaccaggcaatggctgatgccctggaaaggtttggtgagtgaagcagtggctgtaggatgctttaatggagatggcactctgcataggccttggtaccctgaactttgttttggaaagaagcaggtgactaagcacaggatgttcccccacccccatgcccagtgacagggctcatgccaacacagctggttgtggcatgggttttgtgacacaaccatttgtctgtgtctctgatagcattgagaaaagtgaaagggcagttttgaaggtaaggaaaatagtggcatttgcttggatccactggctcatgccactgtctgggttggttagaagcactggaaaagtcaaaccataactttgagaattaggtgatcagggaatcagaaggaaagatgcaaactttggctcttttaggcgaatcatgtgcctgcagatgaggtcatttattatcttttacacagtctataaaattataatgtattacatctttttctacctttagaatggttaaaaatatttctccggtagccatatgattattattcatccattagataatatagtcaaatgggccatgttatttactgttcatagaagaggggctttttgcaacttgggctacaaaggagatatgtaaggaatttaaggaatggttacatggaactagatttaattgaatctagtggtttaattgattcactaggatatatgctactgaaaggggaatctgcttaaagtgctttctgatatttattattactaaaacttagaatttattaaaaatactgactgtgaaaattacttgggtcgtttgcctttttaaaaggatttttggcatgtctcattaaaaaaagaaatactagatatcttcagtgaagttacaaatcgaatacacattggctctgaaattctgattgatactgggtcataaaaagttttcccaaatcagacttggaaagtgatcactctcttgttactcttttttccttgtcatgggtgatagccatttgtgtttattggaagatcggtgaattttaaggaacataggcccaaatttgaggaagggccatggtttttgatccctccattctgaccggatctctgcattgtgtctactaggggagaatcgctttgtgtcaccattatcttgggacttggtgggacgaaacctcttcgccatggccgtggaaggggtggtgttcttcctcattactgttctgatccagtacagattcttcatcaggcccaggtgagctttttcttagaacccgtggagcacctggttgagggtcacagaggaggcgcacagggaaacactcaccaatgggggttgcattgaactgaactcaaaatatgtgataaaactgattttcctgatgtgggcatcccgcagccccctccctgcccatcctggagactgtggcaagtaggttttataatactacgttagagactgaatctttgtcctgaaaaatagtttgaaaggttcatttttcttgttttttcccccaagacctgtaaatgcaaagctatctcctctgaatgatgaagatgaagatgtgaggcgggaaagacagagaattcttgatggtggaggccagaatgacatcttagaaatcaaggagttgacgaaggtgagagagtacaggttacaatagctcatcttcagtttttttcagctttatgtgctgtaacccagcagtttgctgacttgcttaataaaagggcatgtgttcccaaaatgtacatctataccaaggttctgtcaattttattttaaaaacaccatggagacttcttaaagaattcttactgagaattcttttgtgatatgaattcccattctcgaatacattggttttatatgcttacatttatgtgttagttattaaaacatactaatattgtatatctagtcaaaactgaggtagagagaataaatggttgattttgagtttgagtttcatagtccaaaaagctgatatattgcctgtgttcaagagggtctatatcagccctctagatgccagcatctccaaattttacttttttggaatctgtacagtatttgcaatatttttattacaaatttctactctgtggaatttaatttttaaaatacctgcaatacatatatatgttgaatagatgaaaaattatgtagataataatgaatgatacggttctaaaaagacaggttaaaaagtaagttcacttttattttgagcttcagaatcattcagaagccagtcgccacaaacgcagaccaaggctcttggcacatcaaatatgcctatggcttagggttattgacaagtcttatgttgcagtgtatgtggtttatagtcctgccttccacagttgcttgggagagctgtgagtcactgaggcttatgaatgtttacattttgtttgttgcagatatatagaaggaagcggaagcctgctgttgacaggatttgcgtgggcattcctcctggtgaggtaaagacactttgtctatattgcgtttgtccctattagttcagactatctctacccaatcaagcaacgatgctcgttaagaggtaaaagtggattttaaaggcttctgtatttatgccaggatggagcaattagtcatcgagaagagagggaccctgtatgtcaagagaatgatttcagagaatccaatacaatttaagaaaaagcatggggctgggcgcagtgattcactcctgtaatcccagcactttgggaggccgaggtgggcggatcacgaggtcaggagattgagaccatcctggccaacatggtgaaaccccatctctactataaatacaaaaattagctgggcatagtagtgcattcctgtagtcccagctactcgggaggctgaggcaggagaattgcttgaacctaggagggggaggttgcccagattgcgctgctgcactccagcctggtgacagagtgagactcatgtcaacaacaaaaacagaaaaagcacgcacatctaaaacatgcttttgtgatccatttgggatggtgatgacattcaaatagttttttaaaaatagattttctcctttctggtttccgtttgtgttcttttatgcccttttgccagagtaggtggtgcaatttggctagctggctttcattactgtttttcacacattaactttggcctcaacttgacaactcaaataatatttataaatacagccacacttaaaatggtcccattatgaaatacatatttaaatatctatacgatgtgttaaaaccaagaaaatatttgattcttctctgatatttaagaattgaaggtttgaggtagttacgtgttaggggcatttatattcatgtttttagagtttgcttatacaacttaatctttccttttcagtgctttgggctcctgggagttaatggggctggaaaatcatcaactttcaagatgttaacaggagataccactgttaccagaggagatgctttccttaacaaaaataggtgagaaaagaagtggcttgtattttgctgcaaagactttgtttttaatttatttaaagaaataggt

SEQ ID NO: 90 - DNA, 4036 bp, Homo sapiens
acacattagatacctttcctgtatgtggagcatggcagttcctgtttctgctttactcctacaggatactaatataggacactaggatctttataccaagaccccatgtaatgggcttatgagaccattcttcttataaaaatctgacagaatttttgtatgtgttagatcaataggctgcatactgttattttcaagttgatttacagccagaaatattaatttatttgagtagttacagagtaatatttctgctctcatttagttttcaagccccactagtcctttgtgtgtgaaaatttacaacttactgctcttacaaggtcatgaacagtggaccaaagtgaatgccattaaccactctgacttccttcattagttttattgtgacagtggactcttttgacctcagtaataccagtttggcatttacattgtcatatttttagacttaaaaatgatcatcttaaccctgaataaaatgtgtctggtgaacagatgtttttccttgggctgtgcctcagatatctctgtgtgtgtgtacgtgtgtgtttgtctgtgtgtccatgtcctcactgattgagccctaactgcatcaaagacccctcagattttcacacgctttttctctccaggatgaccacatcagtggatgtccttgtgtccatctgtgtcatctttgcaatgtccttcgtcccagccagctttgtcgtattcctgatccaggagcgggtcagcaaagcaaaacacctgcagttcatcagtggagtgaagcctgtcatctactggctctctaattttgtctgggatatggtaaggacacaggcctgctgtatctttctgatgtctgtcagggccatggattgatatggataagaaagaaagagctctggctatcatcaggaaatgttccagctactctaaagatgtatgaaaaagaaatagccagaggcaggtgatcactttcatgacaccaaacacagcattgggtaccagagttcatgtcacaccagagggaaaattctgtacacaatgatgaaaattaataccactaccacttaagttcctatgtgacaactttcccaagaatcagagagatacaagtcaaaactccaagtcaatgcctctaacttctctgatgggttttaacctccagagtcagaatgttctttgccttactaggaaagccatctgtcatttgaaaactctgtacattttatcagcagcttatccatccattgcaaatatgtttttgtgccagccacaatatattgcttctatttggaccaatatgggggatttgaaggaattctgaagttctaattatatttcaactctactttacaatatctccctgaaatatatctccctgtaacttctattaattataagctacacagagcaaatctaattcttctcccaccgaacaagtccctggatatttaaaaataactctcatactctcatttaacctgagtattacccagataagatgatatatgagaatacaccttgtaacctccgaagcactgtacaaatgtgagcaatgatggtggagatgatgatgagatctttgctgtttataccaagccccttagactgtgtcactcttctgatccggttgtccttgtatggccatgctgtatattgtgaatgtccgttttcaaaagcaaagccaagaattaaccttgtgttcaggctgtggtctgaatggttatgggtccagagggagttgatctttagctcacacttctattactgcagcacaaagattttgcattttggaaggagcaccgtcttactggcaacttagtggtaaaccaaaacctccatttcacacaaatgattgtgaaattcgggtctccttcattctatacaaattcatttgatttttttgaaactaaactttatatttatccatattaaattacatgggttttatttttgttttatcttgattcagtaattactcctttcagtaaacacagactgagtgctgtgtgtctgacttatgccaggcataggtgattcagagatgaaaggtcaagtccctgaacccatctcttgtcttcctgggtattatctgtccctccctgctttagagctcctgaaatttgctagaagcatgtcttcatctaagttgttgataaacacatcaagtaggattggactgaggcagagccctgtagtctgaagctgcagttcttctagcggctgacaagccccactatcacttccctgctggtgctttgctctgccagctgtgaattctcataattgtcctatcgtcaagtctttatttctgcattttactgcttgatacactgtcaggacagactttaaaattattctcagtgcgatgaaacaattctgacattcatgttatgagcagttacctcataaatagattacatgtgagattgaacttgggcagactataatatagcattaatgacgaaacagacacagtcatcttcgggaagaagaatagaggcttatttgctgcctgtgaaattaaaattactctgactgggaatccatcgttcagtaagtttactgagtgtgacaccttggcttgactgttggaaagacagaaagggcatgtagtttataaaatcagccaaggggaaaatgcttgtcaaaatgtattgtcgggtattttgattaatagtttatgtggcttcattaattcagagttactctccaatatgtttatctgccctttcttgtctgataatggtgaaaacttgtgtgatgcattgtatatttgatttaggggtgaactggatgtctttgttttcacttttagtgcaattacgttgtccctgccacactggtcattatcatcttcatctgcttccagcagaagtcctatgtgtcctccaccaatctgcctgtgctagcccttctacttttgctgtatgggtaagtcacctctgagtgagggagctgcacagtggataaggcatttggtgcccagtgtcagaaggagggcagggactctcagtagacacttatctttttgtgtctcaacaggtggtcaatcacacctctcatgtacccagcctcctttgtgttcaagatccccagcacagcctatgtggtgctcaccagcgtgaacctcttcattggcattaatggcagcgtggccacctttgtgctggagctgttcaccgacaatgtgagtcatgcagagagaacactcctgctgggatgagcatctctgggagccagaggacagtgtttaattgtgatcttattccacttgtcagtggtattgacactgctgactgccttgtcctgtcttcagagtctgtcttccctgagaaggcaaagcacctttctttcttgctgtgccttacattttgctggtcaagcctttcagtttcttttgacagttttttttacttctttcttttttcaatgttgctcttaccaagagtagctcctctgccttccactttacacatgagagctgggcgacgccattcagtcctaaggcttttaccatcacctctcttggtgtttttattgtcatctctaagatcaatgcctttagccttgatcataaccttgaactctaatctcaaattctcacttgcctagtggattgctccatttagatagtatatagataccccaacctggatatgtcctagttttctttccccttggaacttaatgcttttcttgccatccctgtcacactcagtggcactaccatccactcggttgcccaagctggctcttagagttatcctagatgcttgctttgctgttgcagatttcccacattcaactggttatgttgtcagttcttccaggtatggacctctaaaataaggcttcctctccattccggttgtcattgcctttgtccaaacacagcacacaaggccttttacagttgcacaactcttcctgtccatacccaccacaccctttcccagctgtaagcttcagatgagttgcctccaaccaccatgctcctgtaggcctggcttgaaatgcccttcttctgtcacagggtctggta

SEQ ID NO: 91 - DNA, 4045 bp, Homo sapiens
tgagccagacaaaactgaattacttagttgtacgtttaaaagtgtaggtcaaaaacaaatccagaggccaggagctgtggctcatgcctgtaatcctagcactttgggaggccgaagcgggtggatcacttgaggtcaggagttcgagaccagcctggcctacatgacaaaaccccgtatctactaaaaatacaaaaaaattagctgggcttggtggcacacacctgtaatcccagctacttgggaggctgaggcaggagaattgcttgaaccctgtaggaagaggttgtagtgagccaagatcgcaccgttgcactccagcctgggcaacaagagcaaaactccatctcaaaaaacaaattaaatccagagatttaaaagctctcagaggctgggcgcggtggcttacacctgttatcccagcattttgggatgccgaggcgggcaaagcacaaggtcaggagtttgagaccagcctggccaacatagtgaaaccctgtctctgctaaaaacatagaaaaattagccgggcatggtggcgtgcgcctgtaatcccagctactcgggaggctgaggtgagagaattacttgaacccgggaggcggaggttgcagtgagcccagattgcaccactgcactccagcctgggcgacagagcaagactccatctcaaaaaaagctctcagaacaaccaggtttacaaatttggtcagttggtaaataaactgggtttcaaacatactttgctgaaacaatcactgactaaataggaaatgaatcttttttttttttaagctggcaagctggtctgtaggacctgataagtactcacttcatttctctgtgtctcaggtttcccatttttaggtgagaattaaggggctctgataaaacagaccctaggattgtggacagcagtgatagtcctagagtccacaagtctgcttttgagtgatgggcccatgtatctggcacatctgcaggcagagcgtggttctggctcttcagatgatgccggtggagcactttgaggagtcctcaccccaccgtgataaccagacattaaaatcttggggctttgcatcccaggatttctctgtgattccttctagacttgtggcatcatggcagcatcactgctgtagatttctagtcacttggttctcaggagccgtttatttaatggcttcacatttaatttcagtgaacaaggtagtggcattgctcttcacagggccgtcctgttgtccacaggttccagattgactgttgccccttatctatgtgaacagtcacaactgaggcaggtttctgttgtttacaggacagttctgcagatcgatttctcaacagcttgggaagatttatgacaggactggacaccaaaaataatgtcaaggtaaaccgctgtctttgttctagtagctttttgatgaacaataatccttatgtttcctggagtactttcaactcatggtaaagttggcaggggcattcacaacagaaaagagcaaactattaactttaccagtgaggcagtacggtgtagtgtagtgattcagagaatttgctttgccaccagacataccaggtaaccttgactaagttacttaacctatctaaacctcagttccctcatctgtgaaatggagacagtaatcatagctatttccaaactgttgtgagaattcaatgagttaaaggtataaggtcctcaccacagcgcctgcccacatagtcagtgatcactatgtcctgaacactgtaattacttcgccatattctctgatcatagtgttttgccttggtatgtgactagaatttctttctgaggtttatgggcatggttggtgggtatgcacctgcctgcaggagcccggtttgggggcattaccttgtacctggtatgttttctttcaggtgtggttcaataacaagggctggcatgcaatcagctctttcctgaatgtcatcaacaatgccattctccgggccaacctgcaaaagggagagaaccctagccattatggaattactgctttcaatcatcccctgaatctcaccaagcagcagctctcagaggtggctctgtaagtgtggctgtgtctgtatagatggagtggggcaagggagagggttatggagaaggggagaaaaatgtgaatctcattgtaggggaacagctgcagagaccgttatattatgataaatctggattgatccaggctctgggcagaagtgataagtttacgaattggctggttgggcttcttgaactgcagaagagaaaatgacactgatatgtaaaaatcgtaacatttagtgaattcatataaagtgagttcaaaaattgttaattaaattataatttaattataagtgtttaatcagtttgatttgtttaaaaaccactgttttaaatttggtggaatatgtttttattagcttgtatctttaattcctaaattaagctgtgtgtgtgtgtgtgtgtgtgtgtgtgtgtgtgtgtgtgtgaagtttaaagccaggatgagctagtttaaagtatgcagcctttggagtcatacagatctgggtttgaatctggtctctaaactttatagatgtatgatattaaatgaggcagttcatgtaaattgccaagcccagcactcagcacagagttgatatttcacacacattagatacctttcctgtatgtggagcatggcagttcctgtttctgctttactcctacaggatactaatataggacactaggatctttataccaagaccccatgtaatgggcttatgagaccattcttcttataaaaatctgacagaatttttgtatgtgttagatcaataggctgcatactgttattttcaagttgatttacagccagaaatattaatttatttgagtagttacagagtaatatttctgctctcatttagttttcaagccccactagtcctttgtgtgtgaaaatttacaacttactgctcttacaaggtcatgaacagtggaccaaagtgaatgccattaaccactctgacttccttcattagttttattgtgacagtggactcttttgacctcagtaataccagtttggcatttacattgtcatatttttagacttaaaaatgatcatcttaaccctgaataaaatgtgtctggtgaacagatgtttttccttgggctgtgcctcagatatctctgtgtgtgtgtacgtgtgtgtttgtctgtgtgtccatgtcctcactgattgagccctaactgcatcaaagacccctcagattttcacacgctttttctctccaggatgaccacatcagtggatgtccttgtgtccatctgtgtcatctttgcaatgtccttcgtcccagccagctttgtcgtattcctgatccaggagcgggtcagcaaagcaaaacacctgcagttcatcagtggagtgaagcctgtcatctactggctctctaattttgtctgggatatggtaaggacacaggcctgctgtatctttctgatgtctgtcagggccatggattgatatggataagaaagaaagagctctggctatcatcaggaaatgttccagctactctaaagatgtatgaaaaagaaatagccagaggcaggtgatcactttcatgacaccaaacacagcattgggtaccagagttcatgtcacaccagagggaaaattctgtacacaatgatgaaaattaataccactaccacttaagttcctatgtgacaactttcccaagaatcagagagatacaagtcaaaactccaagtcaatgcctctaacttctctgatgggttttaacctccagagtcagaatgttctttgccttactaggaaagccatctgtcatttgaaaactctgtacattttatcagcagcttatccatccattgcaaatatgtttttgtgccagccacaatatattgcttctatttggaccaatatgggggatttgaaggaattctgaagttctaattatatttcaactctactttacaatatctccctgaaatatatctccc

SEQ ID NO: 92 - DNA, 4045 bp, Homo sapiens
catgctagaaaggagccggagcctgtgtataaggccagcgcagcctactctggacagtgcagggttcccactctcccaactccccatctgcttgcctccagacccacattcacacacgagccactgggttggaggagcatctgtgagatgaaacaccattctttcctcaatgtctcagctatctaactgtgtgtgtaatcaggccaggtcctccctgctgggcagaaaccatgggagttaagagattgccaacatttattagaggaagctgacgtgtaacttctctgaggcaaaatttagccctcctttgaacaggaatttgactcagtgaaccttgtacacactcgcactgagtctgctgctgatgatactgtgcaccccactgtctgggttttaatgtcaggctgttcttttaggtatggcggcttttccctgggtgtcagtaatactcaagcacttcctccgagtcaagaagttaatgatgccatcaaacaaatgaagaaacacctaaagctggccaaggtaaaatatctatcgtaagatgtatcagaaaaatgggcatgtagctgctgggatataggagtagttggcaggttaaacggatcacctggcagctcattgttctgaatatgttggcatacagagccgtctttggcatttagcgatttgagccagacaaaactgaattacttagttgtacgtttaaaagtgtaggtcaaaaacaaatccagaggccaggagctgtggctcatgcctgtaatcctagcactttgggaggccgaagcgggtggatcacttgaggtcaggagttcgagaccagcctggcctacatgacaaaaccccgtatctactaaaaatacaaaaaaattagctgggcttggtggcacacacctgtaatcccagctacttgggaggctgaggcaggagaattgcttgaaccctgtaggaagaggttgtagtgagccaagatcgcaccgttgcactccagcctgggcaacaagagcaaaactccatctcaaaaaacaaattaaatccagagatttaaaagctctcagaggctgggcgcggtggcttacacctgttatcccagcattttgggatgccgaggcgggcaaagcacaaggtcaggagtttgagaccagcctggccaacatagtgaaaccctgtctctgctaaaaacatagaaaaattagccgggcatggtggcgtgcgcctgtaatcccagctactcgggaggctgaggtgagagaattacttgaacccgggaggcggaggttgcagtgagcccagattgcaccactgcactccagcctgggcgacagagcaagactccatctcaaaaaaagctctcagaacaaccaggtttacaaatttggtcagttggtaaataaactgggtttcaaacatactttgctgaaacaatcactgactaaataggaaatgaatcttttttttttttaagctggcaagctggtctgtaggacctgataagtactcacttcatttctctgtgtctcaggtttcccatttttaggtgagaattaaggggctctgataaaacagaccctaggattgtggacagcagtgatagtcctagagtccacaagtctgcttttgagtgatgggcccatgtatctggcacatctgcaggcagagcgtggttctggctcttcagatgatgccggtggagcactttgaggagtcctcaccccaccgtgataaccagacattaaaatcttggggctttgcatcccaggatttctctgtgattccttctagacttgtggcatcatggcagcatcactgctgtagatttctagtcacttggttctcaggagccgtttatttaatggcttcacatttaatttcagtgaacaaggtagtggcattgctcttcacagggccgtcctgttgtccacaggttccagattgactgttgccccttatctatgtgaacagtcacaactgaggcaggtttctgttgtttacaggacagttctgcagatcgatttctcaacagcttgggaagatttatgacaggactggacaccaaaaataatgtcaaggtaaaccgctgtctttgttctagtagctttttgatgaacaataatccttatgtttcctggagtactttcaactcatggtaaagttggcaggggcattcacaacagaaaagagcaaactattaactttaccagtgaggcagtacggtgtagtgtagtgattcagagaatttgctttgccaccagacataccaggtaaccttgactaagttacttaacctatctaaacctcagttccctcatctgtgaaatggagacagtaatcatagctatttccaaactgttgtgagaattcaatgagttaaaggtataaggtcctcaccacagcgcctgcccacatagtcagtgatcactatgtcctgaacactgtaattacttcgccatattctctgatcatagtgttttgccttggtatgtgactagaatttctttctgaggtttatgggcatggttggtgggtatgcacctgcctgcaggagcccggtttgggggcattaccttgtacctggtatgttttctttcaggtgtggttcaataacaagggctggcatgcaatcagctctttcctgaatgtcatcaacaatgccattctccgggccaacctgcaaaagggagagaaccctagccattatggaattactgctttcaatcatcccctgaatctcaccaagcagcagctctcagaggtggctctgtaagtgtggctgtgtctgtatagatggagtggggcaagggagagggttatggagaaggggagaaaaatgtgaatctcattgtaggggaacagctgcagagaccgttatattatgataaatctggattgatccaggctctgggcagaagtgataagtttacgaattggctggttgggcttcttgaactgcagaagagaaaatgacactgatatgtaaaaatcgtaacatttagtgaattcatataaagtgagttcaaaaattgttaattaaattataatttaattataagtgtttaatcagtttgatttgtttaaaaaccactgttttaaatttggtggaatatgtttttattagcttgtatctttaattcctaaattaagctgtgtgtgtgtgtgtgtgtgtgtgtgtgtgtgtgtgtgtgtgaagtttaaagccaggatgagctagtttaaagtatgcagcctttggagtcatacagatctgggtttgaatctggtctctaaactttatagatgtatgatattaaatgaggcagttcatgtaaattgccaagcccagcactcagcacagagttgatatttcacacacattagatacctttcctgtatgtggagcatggcagttcctgtttctgctttactcctacaggatactaatataggacactaggatctttataccaagaccccatgtaatgggcttatgagaccattcttcttataaaaatctgacagaatttttgtatgtgttagatcaataggctgcatactgttattttcaagttgatttacagccagaaatattaatttatttgagtagttacagagtaatatttctgctctcatttagttttcaagccccactagtcctttgtgtgtgaaaatttacaacttactgctcttacaaggtcatgaacagtggaccaaagtgaatgccattaaccactctgacttccttcattagttttattgtgacagtggactcttttgacctcagtaataccagtttggcatttacattgtcatatttttagacttaaaaatgatcatcttaaccctgaataaaatgtgtctggtgaacagatgtttttccttgggctgtgcctcagatatctctgtgtgtgtgtacgtgtgtgtttgtctgtgtgtccatgtcctcactgattgagccctaactgcatcaaagacccctcagattttcacacgctttttctctccaggatgaccacatcagtggatgtccttgtgtccatctgtgtcatctttgcaatgtccttcgtcccagcca

SEQ ID NO: 93 - DNA, 4046 bp, Homo sapiens
gagccttctagcttcccaggacatggcagcctagtgttgaatgcttggctcagcaaatgtttgttctcgtttccttcccatcaacttggtcagttggggtctttcagttaggagtatctcagtgactttaaatggcatgggcatgctggagtgatagtgaccatgagtttctaagaaagaagcataatttctccatatgtcatccacaattgaaatattattgttaattgaaaaagcttctaggccaggcacggtggctcatgcctgtaatcccagcactttaggaggccaaggcgggtggatcacttgaggtcaggagtttgagaccagcctggccaacatggggaaaccctgtctctactaaaaatacaaaataagctgggcgtggtggtgcgtgcctgtaatcccagctacttgggaggctgaggcaggagaattgcttgaatctgggaggcggaggttgcagtgagctgagttcatgccattgcattccagcctgggcaacaagagcgaaaccatctcccaaaagaaaaaaaaaagaaagaaaaagcttctagtttggttacatcttggtctataaggtggtttgtaaattggtttaacccaaggcctggttctcatataagtaatagggtatttatgatggagagaaggctggaagaggcctgaacacaggcttcttttctctagcacaaccctacaaggccagctgattctagggttatttctgtccgttccttatatcctcaggtggatatttactccttttgcatcattaggaataggctcagtgctttctttgaactgattttttgtttctttgtctctgcagcttaaagaacaagatctgggtgaatgagtttaggtaagttgctgtctttctggcacgtttagctcagggggaggatggtgttgtaggtgtcttggattgaagaaagccttggggattgtttgtcactcacacacttgtgggtgccatctcactgtgaggaggacagaagccctgtgaacatgtggagcacacaggggcacagacagatttagattaggcctgctttatagagtttctgcctagagcatcatggctcagtgcccagcagcccctccagaggcctctgaaatatttgatatactgatttccttgaggagaatcagaaatctcctgcaggtgtctagggatttcaagtaagtagtgttgtgaggggaatacctacttgtactttccccccaaaccagattcccgaggcttcttaaggactcaaggacaatttctaggcatttagcacgggactaaaaaggtcttagaggaaataagaagcgccaaaaccatctctttgcactgtatttcaacccatttgtccttctgggttttgaaggaacaggtgggactggggacagaagagttcttgaagccagtttgtccatcatggaaaatgagataggtgatgtggctacgtcagggggcccgaaggctccttgttactgatttccgtcttttctctctgccttttccccaagggccaggacccctggatctctgggcagagcagacgcaggcccctataatagccctcatgctagaaaggagccggagcctgtgtataaggccagcgcagcctactctggacagtgcagggttcccactctcccaactccccatctgcttgcctccagacccacattcacacacgagccactgggttggaggagcatctgtgagatgaaacaccattctttcctcaatgtctcagctatctaactgtgtgtgtaatcaggccaggtcctccctgctgggcagaaaccatgggagttaagagattgccaacatttattagaggaagctgacgtgtaacttctctgaggcaaaatttagccctcctttgaacaggaatttgactcagtgaaccttgtacacactcgcactgagtctgctgctgatgatactgtgcaccccactgtctgggttttaatgtcaggctgttcttttaggtatggcggcttttccctgggtgtcagtaatactcaagcacttcctccgagtcaagaagttaatgatgccatcaaacaaatgaagaaacacctaaagctggccaaggtaaaatatctatcgtaagatgtatcagaaaaatgggcatgtagctgctgggatataggagtagttggcaggttaaacggatcacctggcagctcattgttctgaatatgttggcatacagagccgtctttggcatttagcgatttgagccagacaaaactgaattacttagttgtacgtttaaaagtgtaggtcaaaaacaaatccagaggccaggagctgtggctcatgcctgtaatcctagcactttgggaggccgaagcgggtggatcacttgaggtcaggagttcgagaccagcctggcctacatgacaaaaccccgtatctactaaaaatacaaaaaaattagctgggcttggtggcacacacctgtaatcccagctacttgggaggctgaggcaggagaattgcttgaaccctgtaggaagaggttgtagtgagccaagatcgcaccgttgcactccagcctgggcaacaagagcaaaactccatctcaaaaaacaaattaaatccagagatttaaaagctctcagaggctgggcgcggtggcttacacctgttatcccagcattttgggatgccgaggcgggcaaagcacaaggtcaggagtttgagaccagcctggccaacatagtgaaaccctgtctctgctaaaaacatagaaaaattagccgggcatggtggcgtgcgcctgtaatcccagctactcgggaggctgaggtgagagaattacttgaacccgggaggcggaggttgcagtgagcccagattgcaccactgcactccagcctgggcgacagagcaagactccatctcaaaaaaagctctcagaacaaccaggtttacaaatttggtcagttggtaaataaactgggtttcaaacatactttgctgaaacaatcactgactaaataggaaatgaatcttttttttttttaagctggcaagctggtctgtaggacctgataagtactcacttcatttctctgtgtctcaggtttcccatttttaggtgagaattaaggggctctgataaaacagaccctaggattgtggacagcagtgatagtcctagagtccacaagtctgcttttgagtgatgggcccatgtatctggcacatctgcaggcagagcgtggttctggctcttcagatgatgccggtggagcactttgaggagtcctcaccccaccgtgataaccagacattaaaatcttggggctttgcatcccaggatttctctgtgattccttctagacttgtggcatcatggcagcatcactgctgtagatttctagtcacttggttctcaggagccgtttatttaatggcttcacatttaatttcagtgaacaaggtagtggcattgctcttcacagggccgtcctgttgtccacaggttccagattgactgttgccccttatctatgtgaacagtcacaactgaggcaggtttctgttgtttacaggacagttctgcagatcgatttctcaacagcttgggaagatttatgacaggactggacaccaaaaataatgtcaaggtaaaccgctgtctttgttctagtagctttttgatgaacaataatccttatgtttcctggagtactttcaactcatggtaaagttggcaggggcattcacaacagaaaagagcaaactattaactttaccagtgaggcagtacggtgtagtgtagtgattcagagaatttgctttgccaccagacataccaggtaaccttgactaagttacttaacctatctaaacctcagttccctcatctgtgaaatggagacagtaatcatagctatttccaaactgttgtgagaattcaatgagttaaaggtataaggtcctcaccacagcgcctgcccacatagtcagtgatcactatgtcctgaacactgtaattacttcgccatattctctgatcatagtgttttgcctt

SEQ ID NO: 94 - DNA, 4047 bp, Homo sapiens
attaatgttgctcttataagtttgtcatgaggactaaattaaatggtgtacatagagtgccttgggtactctctgatgggggactccatgataatttgtggtctcatggagggagctctgggaaggtttaggagcctgccttggctctgcagccttgggagagccttctagcttcccaggacatggcagcctagtgttgaatgcttggctcagcaaatgtttgttctcgtttccttcccatcaacttggtcagttggggtctttcagttaggagtatctcagtgactttaaatggcatgggcatgctggagtgatagtgaccatgagtttctaagaaagaagcataatttctccatatgtcatccacaattgaaatattattgttaattgaaaaagcttctaggccaggcacggtggctcatgcctgtaatcccagcactttaggaggccaaggcgggtggatcacttgaggtcaggagtttgagaccagcctggccaacatggggaaaccctgtctctactaaaaatacaaaataagctgggcgtggtggtgcgtgcctgtaatcccagctacttgggaggctgaggcaggagaattgcttgaatctgggaggcggaggttgcagtgagctgagttcatgccattgcattccagcctgggcaacaagagcgaaaccatctcccaaaagaaaaaaaaaagaaagaaaaagcttctagtttggttacatcttggtctataaggtggtttgtaaattggtttaacccaaggcctggttctcatataagtaatagggtatttatgatggagagaaggctggaagaggcctgaacacaggcttcttttctctagcacaaccctacaaggccagctgattctagggttatttctgtccgttccttatatcctcaggtggatatttactccttttgcatcattaggaataggctcagtgctttctttgaactgattttttgtttctttgtctctgcagcttaaagaacaagatctgggtgaatgagtttaggtaagttgctgtctttctggcacgtttagctcagggggaggatggtgttgtaggtgtcttggattgaagaaagccttggggattgtttgtcactcacacacttgtgggtgccatctcactgtgaggaggacagaagccctgtgaacatgtggagcacacaggggcacagacagatttagattaggcctgctttatagagtttctgcctagagcatcatggctcagtgcccagcagcccctccagaggcctctgaaatatttgatatactgatttccttgaggagaatcagaaatctcctgcaggtgtctagggatttcaagtaagtagtgttgtgaggggaatacctacttgtactttccccccaaaccagattcccgaggcttcttaaggactcaaggacaatttctaggcatttagcacgggactaaaaaggtcttagaggaaataagaagcgccaaaaccatctctttgcactgtatttcaacccatttgtccttctgggttttgaaggaacaggtgggactggggacagaagagttcttgaagccagtttgtccatcatggaaaatgagataggtgatgtggctacgtcagggggcccgaaggctccttgttactgatttccgtcttttctctctgccttttccccaagggccaggacccctggatctctgggcagagcagacgcaggcccctataatagccctcatgctagaaaggagccggagcctgtgtataaggccagcgcagcctactctggacagtgcagggttcccactctcccaactccccatctgcttgcctccagacccacattcacacacgagccactgggttggaggagcatctgtgagatgaaacaccattctttcctcaatgtctcagctatctaactgtgtgtgtaatcaggccaggtcctccctgctgggcagaaaccatgggagttaagagattgccaacatttattagaggaagctgacgtgtaacttctctgaggcaaaatttagccctcctttgaacaggaatttgactcagtgaaccttgtacacactcgcactgagtctgctgctgatgatactgtgcaccccactgtctgggttttaatgtcaggctgttcttttaggtatggcggcttttccctgggtgtcagtaatactcaagcacttcctccgagtcaagaagttaatgatgccatcaaacaaatgaagaaacacctaaagctggccaaggtaaaatatctatcgtaagatgtatcagaaaaatgggcatgtagctgctgggatataggagtagttggcaggttaaacggatcacctggcagctcattgttctgaatatgttggcatacagagccgtctttggcatttagcgatttgagccagacaaaactgaattacttagttgtacgtttaaaagtgtaggtcaaaaacaaatccagaggccaggagctgtggctcatgcctgtaatcctagcactttgggaggccgaagcgggtggatcacttgaggtcaggagttcgagaccagcctggcctacatgacaaaaccccgtatctactaaaaatacaaaaaaattagctgggcttggtggcacacacctgtaatcccagctacttgggaggctgaggcaggagaattgcttgaaccctgtaggaagaggttgtagtgagccaagatcgcaccgttgcactccagcctgggcaacaagagcaaaactccatctcaaaaaacaaattaaatccagagatttaaaagctctcagaggctgggcgcggtggcttacacctgttatcccagcattttgggatgccgaggcgggcaaagcacaaggtcaggagtttgagaccagcctggccaacatagtgaaaccctgtctctgctaaaaacatagaaaaattagccgggcatggtggcgtgcgcctgtaatcccagctactcgggaggctgaggtgagagaattacttgaacccgggaggcggaggttgcagtgagcccagattgcaccactgcactccagcctgggcgacagagcaagactccatctcaaaaaaagctctcagaacaaccaggtttacaaatttggtcagttggtaaataaactgggtttcaaacatactttgctgaaacaatcactgactaaataggaaatgaatcttttttttttttaagctggcaagctggtctgtaggacctgataagtactcacttcatttctctgtgtctcaggtttcccatttttaggtgagaattaaggggctctgataaaacagaccctaggattgtggacagcagtgatagtcctagagtccacaagtctgcttttgagtgatgggcccatgtatctggcacatctgcaggcagagcgtggttctggctcttcagatgatgccggtggagcactttgaggagtcctcaccccaccgtgataaccagacattaaaatcttggggctttgcatcccaggatttctctgtgattccttctagacttgtggcatcatggcagcatcactgctgtagatttctagtcacttggttctcaggagccgtttatttaatggcttcacatttaatttcagtgaacaaggtagtggcattgctcttcacagggccgtcctgttgtccacaggttccagattgactgttgccccttatctatgtgaacagtcacaactgaggcaggtttctgttgtttacaggacagttctgcagatcgatttctcaacagcttgggaagatttatgacaggactggacaccaaaaataatgtcaaggtaaaccgctgtctttgttctagtagctttttgatgaacaataatccttatgtttcctggagtactttcaactcatggtaaagttggcaggggcattcacaacagaaaagagcaaactattaactttaccagtgaggcagtacggtgtagtgtagtgattcagagaatttgctttgccaccagacataccaggtaaccttgactaagttacttaacctatctaaacctcagttccctcatctgtgaaa

SEQ ID NO: 95 - DNA, 4024 bp, Homo sapiens
gatcacctaaggtcaggagttcgaaaccagcttggccaatgtggcgaaaccctgtctctactaaaaattcaaaaattagccaggcatggtggcacatgcctgtaatcccagttacttgggaggctgaagcaggagaattgcttgaacctgggaggtggaggtcgcagggagccaaaattgcgccactgtactccagcctgagcaacacagcaaaactccatatcaaaaaataaaatgaataaaataacagctaatctagtcatcagtataactccagtgaacagaagatttattaggcatagtgaatgatggtgcttcctaaaaatctcttgactacaaagaatctcatttcaatgtttattgtttagatgttcagaataaattcttgggaaagaccttggcttggtgtaagtgaattaccagtgccgagggcagggtgaaccaagtctcagtgctggttgactgagggcagtgtctgggacctgtagtcaggtttccggtcacactgtggacatggtcactgttgtccttgatttgttttctgtttcaattcttgtctataaagacccgtatgcttggttttcatgtgatgacagagaaaacaaaacactgcagatatccttcaggacctgacaggaagaaacatttcggattatctggtgaagacgtatgtgcagatcatagccaaaaggtgactttttactaaacttggcccctgccgtattattactaattagaggaattaaagacctacaaataacagactgaaacagtgggggaaatgccagattatggcctgattctgtctattggaagtttaggatattatcccaaactagaaaagatgacgagagggactgtgaacattcagttgtcagcttcaaggctgaggcagcctggtctagaatgaaaatagaaatggattcaacgtcaaattttgccacttagtagcaacttgaccaggtaactggttatccttttaaagccttagtttatctaaattgtgatattaatgttgctcttataagtttgtcatgaggactaaattaaatggtgtacatagagtgccttgggtactctctgatgggggactccatgataatttgtggtctcatggagggagctctgggaaggtttaggagcctgccttggctctgcagccttgggagagccttctagcttcccaggacatggcagcctagtgttgaatgcttggctcagcaaatgtttgttctcgtttccttcccatcaacttggtcagttggggtctttcagttaggagtatctcagtgactttaaatggcatgggcatgctggagtgatagtgaccatgagtttctaagaaagaagcataatttctccatatgtcatccacaattgaaatattattgttaattgaaaaagcttctaggccaggcacggtggctcatgcctgtaatcccagcactttaggaggccaaggcgggtggatcacttgaggtcaggagtttgagaccagcctggccaacatggggaaaccctgtctctactaaaaatacaaaataagctgggcgtggtggtgcgtgcctgtaatcccagctacttgggaggctgaggcaggagaattgcttgaatctgggaggcggaggttgcagtgagctgagttcatgccattgcattccagcctgggcaacaagagcgaaaccatctcccaaaagaaaaaaaaaagaaagaaaaagcttctagtttggttacatcttggtctataaggtggtttgtaaattggtttaacccaaggcctggttctcatataagtaatagggtatttatgatggagagaaggctggaagaggcctgaacacaggcttcttttctctagcacaaccctacaaggccagctgattctagggttatttctgtccgttccttatatcctcaggtggatatttactccttttgcatcattaggaataggctcagtgctttctttgaactgattttttgtttctttgtctctgcagcttaaagaacaagatctgggtgaatgagtttaggtaagttgctgtctttctggcacgtttagctcagggggaggatggtgttgtaggtgtcttggattgaagaaagccttggggattgtttgtcactcacacacttgtgggtgccatctcactgtgaggaggacagaagccctgtgaacatgtggagcacacaggggcacagacagatttagattaggcctgctttatagagtttctgcctagagcatcatggctcagtgcccagcagcccctccagaggcctctgaaatatttgatatactgatttccttgaggagaatcagaaatctcctgcaggtgtctagggatttcaagtaagtagtgttgtgaggggaatacctacttgtactttccccccaaaccagattcccgaggcttcttaaggactcaaggacaatttctaggcatttagcacgggactaaaaaggtcttagaggaaataagaagcgccaaaaccatctctttgcactgtatttcaacccatttgtccttctgggttttgaaggaacaggtgggactggggacagaagagttcttgaagccagtttgtccatcatggaaaatgagataggtgatgtggctacgtcagggggcccgaaggctccttgttactgatttccgtcttttctctctgccttttccccaagggccaggacccctggatctctgggcagagcagacgcaggcccctataatagccctcatgctagaaaggagccggagcctgtgtataaggccagcgcagcctactctggacagtgcagggttcccactctcccaactccccatctgcttgcctccagacccacattcacacacgagccactgggttggaggagcatctgtgagatgaaacaccattctttcctcaatgtctcagctatctaactgtgtgtgtaatcaggccaggtcctccctgctgggcagaaaccatgggagttaagagattgccaacatttattagaggaagctgacgtgtaacttctctgaggcaaaatttagccctcctttgaacaggaatttgactcagtgaaccttgtacacactcgcactgagtctgctgctgatgatactgtgcaccccactgtctgggttttaatgtcaggctgttcttttaggtatggcggcttttccctgggtgtcagtaatactcaagcacttcctccgagtcaagaagttaatgatgccatcaaacaaatgaagaaacacctaaagctggccaaggtaaaatatctatcgtaagatgtatcagaaaaatgggcatgtagctgctgggatataggagtagttggcaggttaaacggatcacctggcagctcattgttctgaatatgttggcatacagagccgtctttggcatttagcgatttgagccagacaaaactgaattacttagttgtacgtttaaaagtgtaggtcaaaaacaaatccagaggccaggagctgtggctcatgcctgtaatcctagcactttgggaggccgaagcgggtggatcacttgaggtcaggagttcgagaccagcctggcctacatgacaaaaccccgtatctactaaaaatacaaaaaaattagctgggcttggtggcacacacctgtaatcccagctacttgggaggctgaggcaggagaattgcttgaaccctgtaggaagaggttgtagtgagccaagatcgcaccgttgcactccagcctgggcaacaagagcaaaactccatctcaaaaaacaaattaaatccagagatttaaaagctctcagaggctgggcgcggtggcttacacctgttatcccagcattttgggatgccgaggcgggcaaagcacaaggtcaggagtttgagaccagcctggccaacatagtgaaaccctgtctctgctaaaaacatagaaaaattagccgggcatggtggcgtgcgcctgtaatcccagctactcgggaggctgaggtgagagaattacttgaacccgggaggcggaggttgcagtg

SEQ ID NO: 96 - DNA, 4042 bp, Homo sapiens
ggttggttgattggattgaactgagttcagtatgtaaatatttagggcctctttgcattctattttacttatgtataaaatgatacataatgatgatataaatgatgtcacagtgtacaaggctgttgtgggatcaagcaatcaaatgagatcatgcttgtcttttccaaatggtgagggaatagatgcatgtttgtggttgttacggaatgatcctgtgctcctgaggcaacagaaaggccaggccatctctggtaatcctactcttgctgtcttccctttgcagagacacgccctgccaggcaggggaggaagagtggaccactgccccagttccccagaccatcatggacctcttccagaatgggaactggacaatgcagaacccttcacctgcatgccagtgtagcagcgacaaaatcaagaagatgctgcctgtgtgtcccccaggggcaggggggctgcctcctccacaagtgagtcactttcagggggtgattgggcagaaggggtgcaggatgggctggtagcttccgcttggaagcaggaatgagtgagatatcatgttgggagggtctgtttcagtcttttttgttttttgtttttttttctgaggcggagtcttgctctgtcgcccaggctggagtgctgtggcatgatcttgcctcactgcaacctccacctcccaggttcaagcgattctcctgcctcagcctcctgagtagctgggattacaggcacgcaccaccatgtctggctaatttttgtgtttttagtagagatagggtttcgccgtgttggctaggctggtctggaattcctgacctcaggtgatccacccgcctcggcctcccaaagtgctgggattacaggcgtgagccactacgcccagccctgtttcagtctttaactcgcttcttgtcataagaaaaagcatgtgagttttgaggggagaaggtttggaccacactgtgcccatgcctgtcccacagcagtaaagtcacaggacagactgtggcaggcctggcttccaatcttggctctgcaacaaatgagctggtagcctttgacaggcctgggcctgtttcttcacctctgaattagggaggctggaccagaaaactcctgtggatcttgtcaactctggtattcttagagactctgtttgggaaggagtcctgagccattttttttttcttgagaatttcaggaagaggagtgcttatgatagctctctgctgcttttatcagcaaccaaattgcaggatgaggacaagcaattctaaatgagtacaggaactaaaagaaggcttggttaccactcttgaaaataatagctagtccaggtgcggggtggctcacacctgtaatctcagtattttgggatgccgaggtggactgatcacctaaggtcaggagttcgaaaccagcttggccaatgtggcgaaaccctgtctctactaaaaattcaaaaattagccaggcatggtggcacatgcctgtaatcccagttacttgggaggctgaagcaggagaattgcttgaacctgggaggtggaggtcgcagggagccaaaattgcgccactgtactccagcctgagcaacacagcaaaactccatatcaaaaaataaaatgaataaaataacagctaatctagtcatcagtataactccagtgaacagaagatttattaggcatagtgaatgatggtgcttcctaaaaatctcttgactacaaagaatctcatttcaatgtttattgtttagatgttcagaataaattcttgggaaagaccttggcttggtgtaagtgaattaccagtgccgagggcagggtgaaccaagtctcagtgctggttgactgagggcagtgtctgggacctgtagtcaggtttccggtcacactgtggacatggtcactgttgtccttgatttgttttctgtttcaattcttgtctataaagacccgtatgcttggttttcatgtgatgacagagaaaacaaaacactgcagatatccttcaggacctgacaggaagaaacatttcggattatctggtgaagacgtatgtgcagatcatagccaaaaggtgactttttactaaacttggcccctgccgtattattactaattagaggaattaaagacctacaaataacagactgaaacagtgggggaaatgccagattatggcctgattctgtctattggaagtttaggatattatcccaaactagaaaagatgacgagagggactgtgaacattcagttgtcagcttcaaggctgaggcagcctggtctagaatgaaaatagaaatggattcaacgtcaaattttgccacttagtagcaacttgaccaggtaactggttatccttttaaagccttagtttatctaaattgtgatattaatgttgctcttataagtttgtcatgaggactaaattaaatggtgtacatagagtgccttgggtactctctgatgggggactccatgataatttgtggtctcatggagggagctctgggaaggtttaggagcctgccttggctctgcagccttgggagagccttctagcttcccaggacatggcagcctagtgttgaatgcttggctcagcaaatgtttgttctcgtttccttcccatcaacttggtcagttggggtctttcagttaggagtatctcagtgactttaaatggcatgggcatgctggagtgatagtgaccatgagtttctaagaaagaagcataatttctccatatgtcatccacaattgaaatattattgttaattgaaaaagcttctaggccaggcacggtggctcatgcctgtaatcccagcactttaggaggccaaggcgggtggatcacttgaggtcaggagtttgagaccagcctggccaacatggggaaaccctgtctctactaaaaatacaaaataagctgggcgtggtggtgcgtgcctgtaatcccagctacttgggaggctgaggcaggagaattgcttgaatctgggaggcggaggttgcagtgagctgagttcatgccattgcattccagcctgggcaacaagagcgaaaccatctcccaaaagaaaaaaaaaagaaagaaaaagcttctagtttggttacatcttggtctataaggtggtttgtaaattggtttaacccaaggcctggttctcatataagtaatagggtatttatgatggagagaaggctggaagaggcctgaacacaggcttcttttctctagcacaaccctacaaggccagctgattctagggttatttctgtccgttccttatatcctcaggtggatatttactccttttgcatcattaggaataggctcagtgctttctttgaactgattttttgtttctttgtctctgcagcttaaagaacaagatctgggtgaatgagtttaggtaagttgctgtctttctggcacgtttagctcagggggaggatggtgttgtaggtgtcttggattgaagaaagccttggggattgtttgtcactcacacacttgtgggtgccatctcactgtgaggaggacagaagccctgtgaacatgtggagcacacaggggcacagacagatttagattaggcctgctttatagagtttctgcctagagcatcatggctcagtgcccagcagcccctccagaggcctctgaaatatttgatatactgatttccttgaggagaatcagaaatctcctgcaggtgtctagggatttcaagtaagtagtgttgtgaggggaatacctacttgtactttccccccaaaccagattcccgaggcttcttaaggactcaaggacaatttctaggcatttagcacgggactaaaaaggtcttagaggaaataagaagcgccaaaaccatctctttgcactgtatttcaacccatttgtccttctgggttttgaaggaacaggtgggactggggacagaagagttcttgaagccagtttgtccatcatggaaaatgagataggtgatgtggctacgtcagggggcccgaaggct

SEQ ID NO: 97 - DNA, 4023 bp, Homo sapiens
gcctggcaattatatttaatatttaataataaggaaataattgctgtaactttactttaaattgtggaattctgaaactggaagggaactggaaatgacttgttgaatcaaatcattttaaacttttattttgccagtggaaaaaataagcccccaaaagagcaggggacctgctgatgtcccacagtaattcagagctggagatgaggttgaaggctttgtgtcttatctccagggaaaatttgtagacagcgtagctctttatgtgacgagcattctcaccccagtcatcccccaattctctactcatttgagaacataaattggatcttgccagtctctactcatttttcagcacatcgagcataagatccagactctttcccaggcctctctcatctggctcctctcctcctcctttatcattactcttcttcgtagcttatcctactccagccatgctgtcttcctattattcctaaaaaatagaaatgcatttcttcctagggcctttgtacctgcacttgccatcgcttttgctcagaatgttctttttgccaagcttttgcccagcttgttctccatcattgttatgttttggctgaaatgtcttctcttagtaggttcattctccccagtcactgtctttttattttgctttattttgggccatctaaggttatcttattagtgtatttgttgttcgtctcctccatgggcatacacctccatgaaggcaggtattttcaccttaggccctcgaatatactggacagcatctggcacgtagtagatgctcaacgaatgtttgttgtgtgagcaaatggttggttgattggattgaactgagttcagtatgtaaatatttagggcctctttgcattctattttacttatgtataaaatgatacataatgatgatataaatgatgtcacagtgtacaaggctgttgtgggatcaagcaatcaaatgagatcatgcttgtcttttccaaatggtgagggaatagatgcatgtttgtggttgttacggaatgatcctgtgctcctgaggcaacagaaaggccaggccatctctggtaatcctactcttgctgtcttccctttgcagagacacgccctgccaggcaggggaggaagagtggaccactgccccagttccccagaccatcatggacctcttccagaatgggaactggacaatgcagaacccttcacctgcatgccagtgtagcagcgacaaaatcaagaagatgctgcctgtgtgtcccccaggggcaggggggctgcctcctccacaagtgagtcactttcagggggtgattgggcagaaggggtgcaggatgggctggtagcttccgcttggaagcaggaatgagtgagatatcatgttgggagggtctgtttcagtcttttttgttttttgtttttttttctgaggcggagtcttgctctgtcgcccaggctggagtgctgtggcatgatcttgcctcactgcaacctccacctcccaggttcaagcgattctcctgcctcagcctcctgagtagctgggattacaggcacgcaccaccatgtctggctaatttttgtgtttttagtagagatagggtttcgccgtgttggctaggctggtctggaattcctgacctcaggtgatccacccgcctcggcctcccaaagtgctgggattacaggcgtgagccactacgcccagccctgtttcagtctttaactcgcttcttgtcataagaaaaagcatgtgagttttgaggggagaaggtttggaccacactgtgcccatgcctgtcccacagcagtaaagtcacaggacagactgtggcaggcctggcttccaatcttggctctgcaacaaatgagctggtagcctttgacaggcctgggcctgtttcttcacctctgaattagggaggctggaccagaaaactcctgtggatcttgtcaactctggtattcttagagactctgtttgggaaggagtcctgagccattttttttttcttgagaatttcaggaagaggagtgcttatgatagctctctgctgcttttatcagcaaccaaattgcaggatgaggacaagcaattctaaatgagtacaggaactaaaagaaggcttggttaccactcttgaaaataatagctagtccaggtgcggggtggctcacacctgtaatctcagtattttgggatgccgaggtggactgatcacctaaggtcaggagttcgaaaccagcttggccaatgtggcgaaaccctgtctctactaaaaattcaaaaattagccaggcatggtggcacatgcctgtaatcccagttacttgggaggctgaagcaggagaattgcttgaacctgggaggtggaggtcgcagggagccaaaattgcgccactgtactccagcctgagcaacacagcaaaactccatatcaaaaaataaaatgaataaaataacagctaatctagtcatcagtataactccagtgaacagaagatttattaggcatagtgaatgatggtgcttcctaaaaatctcttgactacaaagaatctcatttcaatgtttattgtttagatgttcagaataaattcttgggaaagaccttggcttggtgtaagtgaattaccagtgccgagggcagggtgaaccaagtctcagtgctggttgactgagggcagtgtctgggacctgtagtcaggtttccggtcacactgtggacatggtcactgttgtccttgatttgttttctgtttcaattcttgtctataaagacccgtatgcttggttttcatgtgatgacagagaaaacaaaacactgcagatatccttcaggacctgacaggaagaaacatttcggattatctggtgaagacgtatgtgcagatcatagccaaaaggtgactttttactaaacttggcccctgccgtattattactaattagaggaattaaagacctacaaataacagactgaaacagtgggggaaatgccagattatggcctgattctgtctattggaagtttaggatattatcccaaactagaaaagatgacgagagggactgtgaacattcagttgtcagcttcaaggctgaggcagcctggtctagaatgaaaatagaaatggattcaacgtcaaattttgccacttagtagcaacttgaccaggtaactggttatccttttaaagccttagtttatctaaattgtgatattaatgttgctcttataagtttgtcatgaggactaaattaaatggtgtacatagagtgccttgggtactctctgatgggggactccatgataatttgtggtctcatggagggagctctgggaaggtttaggagcctgccttggctctgcagccttgggagagccttctagcttcccaggacatggcagcctagtgttgaatgcttggctcagcaaatgtttgttctcgtttccttcccatcaacttggtcagttggggtctttcagttaggagtatctcagtgactttaaatggcatgggcatgctggagtgatagtgaccatgagtttctaagaaagaagcataatttctccatatgtcatccacaattgaaatattattgttaattgaaaaagcttctaggccaggcacggtggctcatgcctgtaatcccagcactttaggaggccaaggcgggtggatcacttgaggtcaggagtttgagaccagcctggccaacatggggaaaccctgtctctactaaaaatacaaaataagctgggcgtggtggtgcgtgcctgtaatcccagctacttgggaggctgaggcaggagaattgcttgaatctgggaggcggaggttgcagtgagctgagttcatgccattgcattccagcctgggcaacaagagcgaaaccatctcccaaaagaaaaaaaaaagaaagaaaaagcttctagtttggttacatcttggtctataaggtggtttgtaaattggtttaacccaaggcctggttctcatataagtaat

SEQ ID NO: 98 - DNA, 4048 bp, Homo sapiens
atcactggccagctgaaccatatgaactcatggattgatgctagcttaggaaggctctgtaggagccagaactgggctgagagccagcccatagagacaaaagaggcccggccctgacatcagagggttcaaacatgatgtctgagccccacctacagtctgccggaggtggttggaaggaagagcctttatccttacaattcttactgaaattcaaatttttaggttttgcaaaaaaatggtggacctgaaggaaatttgacaggagcatgtctcagctgtatttaaatttgtctcagccaatccccttttgaatgttcagagtgtaagcttcaggagggcagcgcgtcttagtgtgacttttctggtcagttcaggtgctttaaggagacaattagagatcaatctggaaaacttcatttgaatttttaatacataagaaaacaataagaaatagttaaaaatatatatttataatatatatatgtgtgtgtgtgtgtgtgtgtgtgtgtgtgtatatatatatattttatttatttatttttttttgagatggagtctcgctctgttgcccaggctggagtgcagtggctcaatcttggctcactgccacctctgcctcccaggttcaagtgattctcctacctcagcctcctgagtagctgggattacaagcatgtgccaccacactggctaatttttctaattttagtagagatggagtttcaccatgttggacaggatggtcttgaactcctgacttagtgatccacccgccttcgcctcccaaagttctgggattacaggcatgagccatcgtgcctggcaattatatttaatatttaataataaggaaataattgctgtaactttactttaaattgtggaattctgaaactggaagggaactggaaatgacttgttgaatcaaatcattttaaacttttattttgccagtggaaaaaataagcccccaaaagagcaggggacctgctgatgtcccacagtaattcagagctggagatgaggttgaaggctttgtgtcttatctccagggaaaatttgtagacagcgtagctctttatgtgacgagcattctcaccccagtcatcccccaattctctactcatttgagaacataaattggatcttgccagtctctactcatttttcagcacatcgagcataagatccagactctttcccaggcctctctcatctggctcctctcctcctcctttatcattactcttcttcgtagcttatcctactccagccatgctgtcttcctattattcctaaaaaatagaaatgcatttcttcctagggcctttgtacctgcacttgccatcgcttttgctcagaatgttctttttgccaagcttttgcccagcttgttctccatcattgttatgttttggctgaaatgtcttctcttagtaggttcattctccccagtcactgtctttttattttgctttattttgggccatctaaggttatcttattagtgtatttgttgttcgtctcctccatgggcatacacctccatgaaggcaggtattttcaccttaggccctcgaatatactggacagcatctggcacgtagtagatgctcaacgaatgtttgttgtgtgagcaaatggttggttgattggattgaactgagttcagtatgtaaatatttagggcctctttgcattctattttacttatgtataaaatgatacataatgatgatataaatgatgtcacagtgtacaaggctgttgtgggatcaagcaatcaaatgagatcatgcttgtcttttccaaatggtgagggaatagatgcatgtttgtggttgttacggaatgatcctgtgctcctgaggcaacagaaaggccaggccatctctggtaatcctactcttgctgtcttccctttgcagagacacgccctgccaggcaggggaggaagagtggaccactgccccagttccccagaccatcatggacctcttccagaatgggaactggacaatgcagaacccttcacctgcatgccagtgtagcagcgacaaaatcaagaagatgctgcctgtgtgtcccccaggggcaggggggctgcctcctccacaagtgagtcactttcagggggtgattgggcagaaggggtgcaggatgggctggtagcttccgcttggaagcaggaatgagtgagatatcatgttgggagggtctgtttcagtcttttttgttttttgtttttttttctgaggcggagtcttgctctgtcgcccaggctggagtgctgtggcatgatcttgcctcactgcaacctccacctcccaggttcaagcgattctcctgcctcagcctcctgagtagctgggattacaggcacgcaccaccatgtctggctaatttttgtgtttttagtagagatagggtttcgccgtgttggctaggctggtctggaattcctgacctcaggtgatccacccgcctcggcctcccaaagtgctgggattacaggcgtgagccactacgcccagccctgtttcagtctttaactcgcttcttgtcataagaaaaagcatgtgagttttgaggggagaaggtttggaccacactgtgcccatgcctgtcccacagcagtaaagtcacaggacagactgtggcaggcctggcttccaatcttggctctgcaacaaatgagctggtagcctttgacaggcctgggcctgtttcttcacctctgaattagggaggctggaccagaaaactcctgtggatcttgtcaactctggtattcttagagactctgtttgggaaggagtcctgagccattttttttttcttgagaatttcaggaagaggagtgcttatgatagctctctgctgcttttatcagcaaccaaattgcaggatgaggacaagcaattctaaatgagtacaggaactaaaagaaggcttggttaccactcttgaaaataatagctagtccaggtgcggggtggctcacacctgtaatctcagtattttgggatgccgaggtggactgatcacctaaggtcaggagttcgaaaccagcttggccaatgtggcgaaaccctgtctctactaaaaattcaaaaattagccaggcatggtggcacatgcctgtaatcccagttacttgggaggctgaagcaggagaattgcttgaacctgggaggtggaggtcgcagggagccaaaattgcgccactgtactccagcctgagcaacacagcaaaactccatatcaaaaaataaaatgaataaaataacagctaatctagtcatcagtataactccagtgaacagaagatttattaggcatagtgaatgatggtgcttcctaaaaatctcttgactacaaagaatctcatttcaatgtttattgtttagatgttcagaataaattcttgggaaagaccttggcttggtgtaagtgaattaccagtgccgagggcagggtgaaccaagtctcagtgctggttgactgagggcagtgtctgggacctgtagtcaggtttccggtcacactgtggacatggtcactgttgtccttgatttgttttctgtttcaattcttgtctataaagacccgtatgcttggttttcatgtgatgacagagaaaacaaaacactgcagatatccttcaggacctgacaggaagaaacatttcggattatctggtgaagacgtatgtgcagatcatagccaaaaggtgactttttactaaacttggcccctgccgtattattactaattagaggaattaaagacctacaaataacagactgaaacagtgggggaaatgccagattatggcctgattctgtctattggaagtttaggatattatcccaaactagaaaagatgacgagagggactgtgaacattcagttgtcagcttcaaggctgaggcagcctggtctagaatgaaaatagaaatggattcaacgtcaaattttgccacttagtagcaacttgaccaggtaactggttatccttttaaagccttagtttatctaaatt

SEQ ID NO: 99 - DNA, 4046 bp, Homo sapiens
agggaatggacttcagaattacacggtggaatgaattttactgctgcggctcaggtccctgtataagctaatactgcatgcatagaacagcagcgaactaaccctgaataataggccagtcttctgttgagcctttcagcctctctcctcttcatcctactgttgtcaggaacagccacatgtgttttaggtgaaataatccacccttgcaaaaatccatgattaagttataaaatatttggatttgtggagctgtgttttaattctgtaactgagtcacagggcacactgtcaaagcatagaacctccagagacttgttttctgcaaagtataattcatgtaattattatctattctgttatatttgggatgttaggtagtgtttgttctttagataaaaatatcccccactctgtaacaatacattaaatcaaagaaaaggacaaaggatttttctgggtcttgttagcaggagctttcttcagtcctgaaagatttgtagacctgtagatgggggaactgtgtcagtgatacaaaagggaagcatttaaaaaaaaaaaagtatatatatatatatatatatatatatgtaatgtgaattggcctctttttctctaagcccacattttcttcttacatagttcaggtttactttattttttcctttccggctgctgaccctgtattgcccgtagttgtggaacatagcatgtgtttgtgacctgtgcctgttatttttgtgctttctagttgtgcatgcaaagagtacaaagttttcttgccctttcttggaaaatcctgcttgtctgtgccaaagggataattgtgaaagcacttttgaaatacttaatgagttgattttcttcaaattaaaaaaaatatataaatgtatatgtgtatgtacatgtgtgtacacatacacacctttatacatacagcccatttaaaacaagctccactttggagtgctctacgtcaccctgatgccgaatacagggccagagtctgagatccttctgggtggtttctgtgttttgttcatttctgttttaagagcctgtcacagagaaatgcttcctaaaatgtttaatttataaaaacatttttatctctcgattactggttttaatgaattactaagctggctgcctctcatgtacccacagcaatgatgctcctgaggacacgggaaccctggaactcttaaacgccctcaccaaagaccctggcttcgggacccgctgtatggaaggaaacccaatcccgtgagtgccactttagccataagcaggcttcttgtgcttgttgcctggtttgatttctaatatgctgcatttatcaactgcatgccacattgtgaccgccagcatttgccctttgaattattattatgttttatttacaaaaagcgaaggtagtaaccgaactaaattatctaggaacaaacgtttggagagtcttctaacaccgtgcaaagcacgtcattacagacatttgtttactgatttagaaccttaatatttaatttaaatagcactttacacttactgatgaaatgcttttcctttctttctctcccagcccctgtacttaagtgcttcaataggctctcattatatatgatttttaggttttgcttatcagcttcttcgcttttataatctgaaaagatggcatatgaatttttataaaaagggacactttcttcttctcaaattgtatatttttattgtactttccttcaaaacccccttttaaaaagtaagcagtggataaataaattcagtgaagcatccatatgacccttaagtgagtgtaggggaagggaggtcaccagatcactgtgagtgaagatggtggagaggtgaggatcttatgaggccgtgctcaaggctggtagaggtgggttagtgtttccaggtttaggcagaatctcagctgaggtcatgaaacaacagtgatctctgaaaaattatggcaaggtgggaaggtgctggagaattggagagggggcaaacttgactttcaagtttcaatgggaagataggtgactctgcacaccacagaacagtgagcatgataacctgtttatacaaggttctagagcagatttctaaatggatagctactgtgtgcttgtttgttcttaattagtattggatagttactaaatacttgttagtacttagtacataatgggtggtaaatcctagcagctaatattggttcccaaataaccagatgacaaggatagagaaggacacagacacggcctatctggatttcatggtgcctttgattttccacatgaaggttgtgtagggaagatagaagcatgagatgagatgataatatagttatctggattcatcactggccagctgaaccatatgaactcatggattgatgctagcttaggaaggctctgtaggagccagaactgggctgagagccagcccatagagacaaaagaggcccggccctgacatcagagggttcaaacatgatgtctgagccccacctacagtctgccggaggtggttggaaggaagagcctttatccttacaattcttactgaaattcaaatttttaggttttgcaaaaaaatggtggacctgaaggaaatttgacaggagcatgtctcagctgtatttaaatttgtctcagccaatccccttttgaatgttcagagtgtaagcttcaggagggcagcgcgtcttagtgtgacttttctggtcagttcaggtgctttaaggagacaattagagatcaatctggaaaacttcatttgaatttttaatacataagaaaacaataagaaatagttaaaaatatatatttataatatatatatgtgtgtgtgtgtgtgtgtgtgtgtgtgtgtatatatatatattttatttatttatttttttttgagatggagtctcgctctgttgcccaggctggagtgcagtggctcaatcttggctcactgccacctctgcctcccaggttcaagtgattctcctacctcagcctcctgagtagctgggattacaagcatgtgccaccacactggctaatttttctaattttagtagagatggagtttcaccatgttggacaggatggtcttgaactcctgacttagtgatccacccgccttcgcctcccaaagttctgggattacaggcatgagccatcgtgcctggcaattatatttaatatttaataataaggaaataattgctgtaactttactttaaattgtggaattctgaaactggaagggaactggaaatgacttgttgaatcaaatcattttaaacttttattttgccagtggaaaaaataagcccccaaaagagcaggggacctgctgatgtcccacagtaattcagagctggagatgaggttgaaggctttgtgtcttatctccagggaaaatttgtagacagcgtagctctttatgtgacgagcattctcaccccagtcatcccccaattctctactcatttgagaacataaattggatcttgccagtctctactcatttttcagcacatcgagcataagatccagactctttcccaggcctctctcatctggctcctctcctcctcctttatcattactcttcttcgtagcttatcctactccagccatgctgtcttcctattattcctaaaaaatagaaatgcatttcttcctagggcctttgtacctgcacttgccatcgcttttgctcagaatgttctttttgccaagcttttgcccagcttgttctccatcattgttatgttttggctgaaatgtcttctcttagtaggttcattctccccagtcactgtctttttattttgctttattttgggccatctaaggttatcttattagtgtatttgttgttcgtctcctccatgggcatacacctccatgaaggcaggtattttcaccttaggccctcgaatatactggacagcatctggcacgtagtagatgctcaacgaatgtttgttgtgtgagcaaatggttggttgattggattgaactgagttcagt

SEQ ID NO: 100 - DNA, 4046 bp, Homo sapiens
agaaggaattggatatttattctttctgagactatcatgggagataatgactatggttgtccatgattggagccgttgctgtagagttggttttattatagtgtaggatttgaatgggccatgtgttctcagacctcagattaaaatgagaaaactgaggccagtggggagcgtgacttcacatgggtacacttgtgctagagacagaaccaggattcaggacttctggctcctggtcctgggttcatggcccaatgtagtctttctcagtcttcaggaggaggaagggcaggacccagtgttctgagtcaccctgaatgtgagcactatttacttcgtgaacttcttggcttagtgcctctgccaggtggccataacctctggccttgtgttgccagagaaaaggtttagttttcaggctccattgcttcccagctgccaagaatgccttggtgcagcacagtcataggccctgcattcctcattgccgtgctggttggtcggggaggtgggctggactcgtagggatttgccccttggccttgtttctaacacttgccgtttcctgctgtccccctgccccctccactgcctgggtaaagattgtcttgccagctgtgtttgtctgcattgcccttgtgttcagcctgatcgtgccaccctttggcaagtaccccagcctggaacttcagccctggatgtacaacgaacagtacacatttgtcaggtatgtttgtcttctacatcccaggagggggtaagattcgagcagaccaaagatgtttacgagggccaagggaatggacttcagaattacacggtggaatgaattttactgctgcggctcaggtccctgtataagctaatactgcatgcatagaacagcagcgaactaaccctgaataataggccagtcttctgttgagcctttcagcctctctcctcttcatcctactgttgtcaggaacagccacatgtgttttaggtgaaataatccacccttgcaaaaatccatgattaagttataaaatatttggatttgtggagctgtgttttaattctgtaactgagtcacagggcacactgtcaaagcatagaacctccagagacttgttttctgcaaagtataattcatgtaattattatctattctgttatatttgggatgttaggtagtgtttgttctttagataaaaatatcccccactctgtaacaatacattaaatcaaagaaaaggacaaaggatttttctgggtcttgttagcaggagctttcttcagtcctgaaagatttgtagacctgtagatgggggaactgtgtcagtgatacaaaagggaagcatttaaaaaaaaaaaagtatatatatatatatatatatatatatgtaatgtgaattggcctctttttctctaagcccacattttcttcttacatagttcaggtttactttattttttcctttccggctgctgaccctgtattgcccgtagttgtggaacatagcatgtgtttgtgacctgtgcctgttatttttgtgctttctagttgtgcatgcaaagagtacaaagttttcttgccctttcttggaaaatcctgcttgtctgtgccaaagggataattgtgaaagcacttttgaaatacttaatgagttgattttcttcaaattaaaaaaaatatataaatgtatatgtgtatgtacatgtgtgtacacatacacacctttatacatacagcccatttaaaacaagctccactttggagtgctctacgtcaccctgatgccgaatacagggccagagtctgagatccttctgggtggtttctgtgttttgttcatttctgttttaagagcctgtcacagagaaatgcttcctaaaatgtttaatttataaaaacatttttatctctcgattactggttttaatgaattactaagctggctgcctctcatgtacccacagcaatgatgctcctgaggacacgggaaccctggaactcttaaacgccctcaccaaagaccctggcttcgggacccgctgtatggaaggaaacccaatcccgtgagtgccactttagccataagcaggcttcttgtgcttgttgcctggtttgatttctaatatgctgcatttatcaactgcatgccacattgtgaccgccagcatttgccctttgaattattattatgttttatttacaaaaagcgaaggtagtaaccgaactaaattatctaggaacaaacgtttggagagtcttctaacaccgtgcaaagcacgtcattacagacatttgtttactgatttagaaccttaatatttaatttaaatagcactttacacttactgatgaaatgcttttcctttctttctctcccagcccctgtacttaagtgcttcaataggctctcattatatatgatttttaggttttgcttatcagcttcttcgcttttataatctgaaaagatggcatatgaatttttataaaaagggacactttcttcttctcaaattgtatatttttattgtactttccttcaaaacccccttttaaaaagtaagcagtggataaataaattcagtgaagcatccatatgacccttaagtgagtgtaggggaagggaggtcaccagatcactgtgagtgaagatggtggagaggtgaggatcttatgaggccgtgctcaaggctggtagaggtgggttagtgtttccaggtttaggcagaatctcagctgaggtcatgaaacaacagtgatctctgaaaaattatggcaaggtgggaaggtgctggagaattggagagggggcaaacttgactttcaagtttcaatgggaagataggtgactctgcacaccacagaacagtgagcatgataacctgtttatacaaggttctagagcagatttctaaatggatagctactgtgtgcttgtttgttcttaattagtattggatagttactaaatacttgttagtacttagtacataatgggtggtaaatcctagcagctaatattggttcccaaataaccagatgacaaggatagagaaggacacagacacggcctatctggatttcatggtgcctttgattttccacatgaaggttgtgtagggaagatagaagcatgagatgagatgataatatagttatctggattcatcactggccagctgaaccatatgaactcatggattgatgctagcttaggaaggctctgtaggagccagaactgggctgagagccagcccatagagacaaaagaggcccggccctgacatcagagggttcaaacatgatgtctgagccccacctacagtctgccggaggtggttggaaggaagagcctttatccttacaattcttactgaaattcaaatttttaggttttgcaaaaaaatggtggacctgaaggaaatttgacaggagcatgtctcagctgtatttaaatttgtctcagccaatccccttttgaatgttcagagtgtaagcttcaggagggcagcgcgtcttagtgtgacttttctggtcagttcaggtgctttaaggagacaattagagatcaatctggaaaacttcatttgaatttttaatacataagaaaacaataagaaatagttaaaaatatatatttataatatatatatgtgtgtgtgtgtgtgtgtgtgtgtgtgtgtatatatatatattttatttatttatttttttttgagatggagtctcgctctgttgcccaggctggagtgcagtggctcaatcttggctcactgccacctctgcctcccaggttcaagtgattctcctacctcagcctcctgagtagctgggattacaagcatgtgccaccacactggctaatttttctaattttagtagagatggagtttcaccatgttggacaggatggtcttgaactcctgacttagtgatccacccgccttcgcctcccaaagttctgggattacaggcatgagccatcgtgcctggcaattatatttaatatttaataataaggaaataattgctgtaactttactttaaa

SEQ ID NO: 101 - DNA, 4046 bp, Homo sapiens
atttttattttggaggagaacataaaaaggacaaagtgtagaaaaactggttgggtgtattcagctgtcataacatgagagttgttatgcccagatgcacttgacatgtgaatttattagaaacatgatttttctctgagttgatgtttaactcaaactgatagaaaagataggtcagaatatagttggccaacagagaagacttgttagactattgtctgcatgtcagtgtttgcatgctaacttgcttagttagaaaggttaaattttttcactctataaaatcaagaaatatagagaaaaggtctgcagagagtctttcatttgatgatgtggatattgttaagagcgggagtttggagcatacagagctcaagttgaatcctgactttgctacttattggctatatgaccttgggcaagctgcttagtctctctgatcctcagttacctttgtttgttgatgatgaccattgataacacaaccataaataatgacaacatagagatagttctcattatagtagttgttatacagaattattcactcaatgttaattttctgcattgaaatcccagaacattagaattgggggcattatttgaatctttaaggttataaggaatacatttctcagcaataaatggaaggagttttgggttaacttataaagtatacccaagtcatttttttttcagagaagatatggtagaaagtcttaggaggttgaagaaggaattggatatttattctttctgagactatcatgggagataatgactatggttgtccatgattggagccgttgctgtagagttggttttattatagtgtaggatttgaatgggccatgtgttctcagacctcagattaaaatgagaaaactgaggccagtggggagcgtgacttcacatgggtacacttgtgctagagacagaaccaggattcaggacttctggctcctggtcctgggttcatggcccaatgtagtctttctcagtcttcaggaggaggaagggcaggacccagtgttctgagtcaccctgaatgtgagcactatttacttcgtgaacttcttggcttagtgcctctgccaggtggccataacctctggccttgtgttgccagagaaaaggtttagttttcaggctccattgcttcccagctgccaagaatgccttggtgcagcacagtcataggccctgcattcctcattgccgtgctggttggtcggggaggtgggctggactcgtagggatttgccccttggccttgtttctaacacttgccgtttcctgctgtccccctgccccctccactgcctgggtaaagattgtcttgccagctgtgtttgtctgcattgcccttgtgttcagcctgatcgtgccaccctttggcaagtaccccagcctggaacttcagccctggatgtacaacgaacagtacacatttgtcaggtatgtttgtcttctacatcccaggagggggtaagattcgagcagaccaaagatgtttacgagggccaagggaatggacttcagaattacacggtggaatgaattttactgctgcggctcaggtccctgtataagctaatactgcatgcatagaacagcagcgaactaaccctgaataataggccagtcttctgttgagcctttcagcctctctcctcttcatcctactgttgtcaggaacagccacatgtgttttaggtgaaataatccacccttgcaaaaatccatgattaagttataaaatatttggatttgtggagctgtgttttaattctgtaactgagtcacagggcacactgtcaaagcatagaacctccagagacttgttttctgcaaagtataattcatgtaattattatctattctgttatatttgggatgttaggtagtgtttgttctttagataaaaatatcccccactctgtaacaatacattaaatcaaagaaaaggacaaaggatttttctgggtcttgttagcaggagctttcttcagtcctgaaagatttgtagacctgtagatgggggaactgtgtcagtgatacaaaagggaagcatttaaaaaaaaaaaagtatatatatatatatatatatatatatgtaatgtgaattggcctctttttctctaagcccacattttcttcttacatagttcaggtttactttattttttcctttccggctgctgaccctgtattgcccgtagttgtggaacatagcatgtgtttgtgacctgtgcctgttatttttgtgctttctagttgtgcatgcaaagagtacaaagttttcttgccctttcttggaaaatcctgcttgtctgtgccaaagggataattgtgaaagcacttttgaaatacttaatgagttgattttcttcaaattaaaaaaaatatataaatgtatatgtgtatgtacatgtgtgtacacatacacacctttatacatacagcccatttaaaacaagctccactttggagtgctctacgtcaccctgatgccgaatacagggccagagtctgagatccttctgggtggtttctgtgttttgttcatttctgttttaagagcctgtcacagagaaatgcttcctaaaatgtttaatttataaaaacatttttatctctcgattactggttttaatgaattactaagctggctgcctctcatgtacccacagcaatgatgctcctgaggacacgggaaccctggaactcttaaacgccctcaccaaagaccctggcttcgggacccgctgtatggaaggaaacccaatcccgtgagtgccactttagccataagcaggcttcttgtgcttgttgcctggtttgatttctaatatgctgcatttatcaactgcatgccacattgtgaccgccagcatttgccctttgaattattattatgttttatttacaaaaagcgaaggtagtaaccgaactaaattatctaggaacaaacgtttggagagtcttctaacaccgtgcaaagcacgtcattacagacatttgtttactgatttagaaccttaatatttaatttaaatagcactttacacttactgatgaaatgcttttcctttctttctctcccagcccctgtacttaagtgcttcaataggctctcattatatatgatttttaggttttgcttatcagcttcttcgcttttataatctgaaaagatggcatatgaatttttataaaaagggacactttcttcttctcaaattgtatatttttattgtactttccttcaaaacccccttttaaaaagtaagcagtggataaataaattcagtgaagcatccatatgacccttaagtgagtgtaggggaagggaggtcaccagatcactgtgagtgaagatggtggagaggtgaggatcttatgaggccgtgctcaaggctggtagaggtgggttagtgtttccaggtttaggcagaatctcagctgaggtcatgaaacaacagtgatctctgaaaaattatggcaaggtgggaaggtgctggagaattggagagggggcaaacttgactttcaagtttcaatgggaagataggtgactctgcacaccacagaacagtgagcatgataacctgtttatacaaggttctagagcagatttctaaatggatagctactgtgtgcttgtttgttcttaattagtattggatagttactaaatacttgttagtacttagtacataatgggtggtaaatcctagcagctaatattggttcccaaataaccagatgacaaggatagagaaggacacagacacggcctatctggatttcatggtgcctttgattttccacatgaaggttgtgtagggaagatagaagcatgagatgagatgataatatagttatctggattcatcactggccagctgaaccatatgaactcatggattgatgctagcttaggaaggctctgtaggagccagaactgggctgagagccagcccatagagacaaaagaggcccggccctgacatcagagggttcaaacatgatgtctgagcccc

SEQ ID NO: 102 - DNA, 4051 bp, Homo sapiens
ctttgtcatgaaagccctttacttctgagaaacttctagcttcagacacatgccttcaagatagttgttgaagacaccagaagaaggagcatggcaatgccgaaaacacctaagataataggtgaccttcagtgttggcttcttgcagaatccagagagacagacttgctcagtgggatggatggcaaagggtcctaccaggtgaaaggctggaaacttacacagcaacagtttgtggcccttttgtggaagagactgctaattgccagacggagtcggaaaggattttttgctcaggtgagacgtgctgttttcgccagagactctggcttcatgggtgggctgcaggctctgtgaccagtgaaggcaggatagcatcctggtcaagatatggatgccggagccagatttatctgtatttcaatcccagttctattccttgccagttgtgtatccgctggcaagttacttctctatgcctcaatctcctcatctgtaaaatggggataataatattacctgcaatacagggttgttacgaaaataaaaatgaataggtgcttagaatggggcctgacattagtaagtgcttagttttgtgtgtgtatatgttatttttattttggaggagaacataaaaaggacaaagtgtagaaaaactggttgggtgtattcagctgtcataacatgagagttgttatgcccagatgcacttgacatgtgaatttattagaaacatgatttttctctgagttgatgtttaactcaaactgatagaaaagataggtcagaatatagttggccaacagagaagacttgttagactattgtctgcatgtcagtgtttgcatgctaacttgcttagttagaaaggttaaattttttcactctataaaatcaagaaatatagagaaaaggtctgcagagagtctttcatttgatgatgtggatattgttaagagcgggagtttggagcatacagagctcaagttgaatcctgactttgctacttattggctatatgaccttgggcaagctgcttagtctctctgatcctcagttacctttgtttgttgatgatgaccattgataacacaaccataaataatgacaacatagagatagttctcattatagtagttgttatacagaattattcactcaatgttaattttctgcattgaaatcccagaacattagaattgggggcattatttgaatctttaaggttataaggaatacatttctcagcaataaatggaaggagttttgggttaacttataaagtatacccaagtcatttttttttcagagaagatatggtagaaagtcttaggaggttgaagaaggaattggatatttattctttctgagactatcatgggagataatgactatggttgtccatgattggagccgttgctgtagagttggttttattatagtgtaggatttgaatgggccatgtgttctcagacctcagattaaaatgagaaaactgaggccagtggggagcgtgacttcacatgggtacacttgtgctagagacagaaccaggattcaggacttctggctcctggtcctgggttcatggcccaatgtagtctttctcagtcttcaggaggaggaagggcaggacccagtgttctgagtcaccctgaatgtgagcactatttacttcgtgaacttcttggcttagtgcctctgccaggtggccataacctctggccttgtgttgccagagaaaaggtttagttttcaggctccattgcttcccagctgccaagaatgccttggtgcagcacagtcataggccctgcattcctcattgccgtgctggttggtcggggaggtgggctggactcgtagggatttgccccttggccttgtttctaacacttgccgtttcctgctgtccccctgccccctccactgcctgggtaaagattgtcttgccagctgtgtttgtctgcattgcccttgtgttcagcctgatcgtgccaccctttggcaagtaccccagcctggaacttcagccctggatgtacaacgaacagtacacatttgtcaggtatgtttgtcttctacatcccaggagggggtaagattcgagcagaccaaagatgtttacgagggccaagggaatggacttcagaattacacggtggaatgaattttactgctgcggctcaggtccctgtataagctaatactgcatgcatagaacagcagcgaactaaccctgaataataggccagtcttctgttgagcctttcagcctctctcctcttcatcctactgttgtcaggaacagccacatgtgttttaggtgaaataatccacccttgcaaaaatccatgattaagttataaaatatttggatttgtggagctgtgttttaattctgtaactgagtcacagggcacactgtcaaagcatagaacctccagagacttgttttctgcaaagtataattcatgtaattattatctattctgttatatttgggatgttaggtagtgtttgttctttagataaaaatatcccccactctgtaacaatacattaaatcaaagaaaaggacaaaggatttttctgggtcttgttagcaggagctttcttcagtcctgaaagatttgtagacctgtagatgggggaactgtgtcagtgatacaaaagggaagcatttaaaaaaaaaaaagtatatatatatatatatatatatatatgtaatgtgaattggcctctttttctctaagcccacattttcttcttacatagttcaggtttactttattttttcctttccggctgctgaccctgtattgcccgtagttgtggaacatagcatgtgtttgtgacctgtgcctgttatttttgtgctttctagttgtgcatgcaaagagtacaaagttttcttgccctttcttggaaaatcctgcttgtctgtgccaaagggataattgtgaaagcacttttgaaatacttaatgagttgattttcttcaaattaaaaaaaatatataaatgtatatgtgtatgtacatgtgtgtacacatacacacctttatacatacagcccatttaaaacaagctccactttggagtgctctacgtcaccctgatgccgaatacagggccagagtctgagatccttctgggtggtttctgtgttttgttcatttctgttttaagagcctgtcacagagaaatgcttcctaaaatgtttaatttataaaaacatttttatctctcgattactggttttaatgaattactaagctggctgcctctcatgtacccacagcaatgatgctcctgaggacacgggaaccctggaactcttaaacgccctcaccaaagaccctggcttcgggacccgctgtatggaaggaaacccaatcccgtgagtgccactttagccataagcaggcttcttgtgcttgttgcctggtttgatttctaatatgctgcatttatcaactgcatgccacattgtgaccgccagcatttgccctttgaattattattatgttttatttacaaaaagcgaaggtagtaaccgaactaaattatctaggaacaaacgtttggagagtcttctaacaccgtgcaaagcacgtcattacagacatttgtttactgatttagaaccttaatatttaatttaaatagcactttacacttactgatgaaatgcttttcctttctttctctcccagcccctgtacttaagtgcttcaataggctctcattatatatgatttttaggttttgcttatcagcttcttcgcttttataatctgaaaagatggcatatgaatttttataaaaagggacactttcttcttctcaaattgtatatttttattgtactttccttcaaaacccccttttaaaaagtaagcagtggataaataaattcagtgaagcatccatatgacccttaagtgagtgtaggggaagggaggtcaccagatcactgtgagtgaagatggtggagaggtgaggatcttatgaggccgtgctcaaggctggtagaggtgggttag

SEQ ID NO: 103 - DNA, 4030 bp, Homo sapiens
aagagtcagaaaggggaatttgctgttagagttaattgtaccctaagacttagatatttgaggctgggcatggtggctcatgccagtaatcccagcgctttgagaggctgaggtgggtagatcacctgaggtcaggagtttgagaccagtctgaccaacaaggtgaaaccccgtctctactaaatacaaaaaattagccgagtgtggtggcacatgcctgtcatcccagctacttgggaggctgaggcaggagaatcgcttgaacccaggaggcagaggttgcagtcagccacggttgcgccattgcactccagactgggcaacaagagtgaaaactccatctcaaaaaagaaaaaaaaagaattagatattttggatgagtgtgtctttgtgtgtttaactgagatggagaggagagctaagacatcaaacaaatattgttaagatgtaaaagcacatcagttaggtatcattagtttaggacaaggatttctagaaaatttttaggaacagaaaactttccagttctctcacccctgctcaaagagtgtatggctcttacattatatataactgcctgacttcatacagtatcagtacttagatcatttgaaatgtgtccacgttttaccaaaatataatagggtgagaagctgagatgctaattgccattgtgtattctcaaatatgtcaagctacgtacatggcctgtttcatagagtagtctataagaaattgatgacttgattcatccgaatggctggctgtaacacctggttacgcatgaacacctcttttcagttgtctcaagacacctttcttttctgtacttatcagacaaggactgaaaggcagagactgctactgttagacattttgagtcaagcttttccttggacatagctttgtcatgaaagccctttacttctgagaaacttctagcttcagacacatgccttcaagatagttgttgaagacaccagaagaaggagcatggcaatgccgaaaacacctaagataataggtgaccttcagtgttggcttcttgcagaatccagagagacagacttgctcagtgggatggatggcaaagggtcctaccaggtgaaaggctggaaacttacacagcaacagtttgtggcccttttgtggaagagactgctaattgccagacggagtcggaaaggattttttgctcaggtgagacgtgctgttttcgccagagactctggcttcatgggtgggctgcaggctctgtgaccagtgaaggcaggatagcatcctggtcaagatatggatgccggagccagatttatctgtatttcaatcccagttctattccttgccagttgtgtatccgctggcaagttacttctctatgcctcaatctcctcatctgtaaaatggggataataatattacctgcaatacagggttgttacgaaaataaaaatgaataggtgcttagaatggggcctgacattagtaagtgcttagttttgtgtgtgtatatgttatttttattttggaggagaacataaaaaggacaaagtgtagaaaaactggttgggtgtattcagctgtcataacatgagagttgttatgcccagatgcacttgacatgtgaatttattagaaacatgatttttctctgagttgatgtttaactcaaactgatagaaaagataggtcagaatatagttggccaacagagaagacttgttagactattgtctgcatgtcagtgtttgcatgctaacttgcttagttagaaaggttaaattttttcactctataaaatcaagaaatatagagaaaaggtctgcagagagtctttcatttgatgatgtggatattgttaagagcgggagtttggagcatacagagctcaagttgaatcctgactttgctacttattggctatatgaccttgggcaagctgcttagtctctctgatcctcagttacctttgtttgttgatgatgaccattgataacacaaccataaataatgacaacatagagatagttctcattatagtagttgttatacagaattattcactcaatgttaattttctgcattgaaatcccagaacattagaattgggggcattatttgaatctttaaggttataaggaatacatttctcagcaataaatggaaggagttttgggttaacttataaagtatacccaagtcatttttttttcagagaagatatggtagaaagtcttaggaggttgaagaaggaattggatatttattctttctgagactatcatgggagataatgactatggttgtccatgattggagccgttgctgtagagttggttttattatagtgtaggatttgaatgggccatgtgttctcagacctcagattaaaatgagaaaactgaggccagtggggagcgtgacttcacatgggtacacttgtgctagagacagaaccaggattcaggacttctggctcctggtcctgggttcatggcccaatgtagtctttctcagtcttcaggaggaggaagggcaggacccagtgttctgagtcaccctgaatgtgagcactatttacttcgtgaacttcttggcttagtgcctctgccaggtggccataacctctggccttgtgttgccagagaaaaggtttagttttcaggctccattgcttcccagctgccaagaatgccttggtgcagcacagtcataggccctgcattcctcattgccgtgctggttggtcggggaggtgggctggactcgtagggatttgccccttggccttgtttctaacacttgccgtttcctgctgtccccctgccccctccactgcctgggtaaagattgtcttgccagctgtgtttgtctgcattgcccttgtgttcagcctgatcgtgccaccctttggcaagtaccccagcctggaacttcagccctggatgtacaacgaacagtacacatttgtcaggtatgtttgtcttctacatcccaggagggggtaagattcgagcagaccaaagatgtttacgagggccaagggaatggacttcagaattacacggtggaatgaattttactgctgcggctcaggtccctgtataagctaatactgcatgcatagaacagcagcgaactaaccctgaataataggccagtcttctgttgagcctttcagcctctctcctcttcatcctactgttgtcaggaacagccacatgtgttttaggtgaaataatccacccttgcaaaaatccatgattaagttataaaatatttggatttgtggagctgtgttttaattctgtaactgagtcacagggcacactgtcaaagcatagaacctccagagacttgttttctgcaaagtataattcatgtaattattatctattctgttatatttgggatgttaggtagtgtttgttctttagataaaaatatcccccactctgtaacaatacattaaatcaaagaaaaggacaaaggatttttctgggtcttgttagcaggagctttcttcagtcctgaaagatttgtagacctgtagatgggggaactgtgtcagtgatacaaaagggaagcatttaaaaaaaaaaaagtatatatatatatatatatatatatatgtaatgtgaattggcctctttttctctaagcccacattttcttcttacatagttcaggtttactttattttttcctttccggctgctgaccctgtattgcccgtagttgtggaacatagcatgtgtttgtgacctgtgcctgttatttttgtgctttctagttgtgcatgcaaagagtacaaagttttcttgccctttcttggaaaatcctgcttgtctgtgccaaagggataattgtgaaagcacttttgaaatacttaatgagttgattttcttcaaattaaaaaaaatatataaatgtatatgtgtatgtacatgtgtgtacacatacacacctttatacatacagcccatttaaaacaagctccactttggagtgctctacgtcaccctgatgc

SEQ ID NO: 104 - DNA, 4054 bp, Homo sapiens
aactctgagaaagtgttattaagaaatgtggcttctactttctctgtcttacggggctaacatgccactcagtaatataataatcgtggcagtggtgactactctcgtaatgttggtgcttataatgttctcatctctctcattttccagatattcctcaaggtggccgaagagagtggggtggatgctgagacctcaggtaactgccttgagggagaatggcacacttaagatagtgccttctgctggctttctcagtgcacgagtattgttcctttccctttgaattgttctattgcattctcatttgtagagtgtaggtttgttgcagatggggaaggtttgttttgttgtaaataaaataaagtatgggattctttccttgtgccttcagatggtaccttgccagcaagacgaaacaggcgggccttcggggacaagcagagctgtcttcgcccgttcactgaagatgatgctgctgatccaaatgattctgacatagacccaggtctgttagggcaagatcaaacagtgtcctactgtttgaatgtgaaattctctctcatgctctcacctgttttctttggatggcctttagccaaggtgatagatccctacagagtccaaagagaagtgaggaaatggtaaaagccacttgttctttgcagcatcgtgcatgtgatcaaacctgaaagagcctatccatatcacttcctttaaagacataaagatggtgcctcaatcctctgaacccatgtatttattatcttttctgcggggtcctagtttcttgtatacattaggtgtttaattgttgaacaaatattcattcgagtagatgagtgattttgaaagagtcagaaaggggaatttgctgttagagttaattgtaccctaagacttagatatttgaggctgggcatggtggctcatgccagtaatcccagcgctttgagaggctgaggtgggtagatcacctgaggtcaggagtttgagaccagtctgaccaacaaggtgaaaccccgtctctactaaatacaaaaaattagccgagtgtggtggcacatgcctgtcatcccagctacttgggaggctgaggcaggagaatcgcttgaacccaggaggcagaggttgcagtcagccacggttgcgccattgcactccagactgggcaacaagagtgaaaactccatctcaaaaaagaaaaaaaaagaattagatattttggatgagtgtgtctttgtgtgtttaactgagatggagaggagagctaagacatcaaacaaatattgttaagatgtaaaagcacatcagttaggtatcattagtttaggacaaggatttctagaaaatttttaggaacagaaaactttccagttctctcacccctgctcaaagagtgtatggctcttacattatatataactgcctgacttcatacagtatcagtacttagatcatttgaaatgtgtccacgttttaccaaaatataatagggtgagaagctgagatgctaattgccattgtgtattctcaaatatgtcaagctacgtacatggcctgtttcatagagtagtctataagaaattgatgacttgattcatccgaatggctggctgtaacacctggttacgcatgaacacctcttttcagttgtctcaagacacctttcttttctgtacttatcagacaaggactgaaaggcagagactgctactgttagacattttgagtcaagcttttccttggacatagctttgtcatgaaagccctttacttctgagaaacttctagcttcagacacatgccttcaagatagttgttgaagacaccagaagaaggagcatggcaatgccgaaaacacctaagataataggtgaccttcagtgttggcttcttgcagaatccagagagacagacttgctcagtgggatggatggcaaagggtcctaccaggtgaaaggctggaaacttacacagcaacagtttgtggcccttttgtggaagagactgctaattgccagacggagtcggaaaggattttttgctcaggtgagacgtgctgttttcgccagagactctggcttcatgggtgggctgcaggctctgtgaccagtgaaggcaggatagcatcctggtcaagatatggatgccggagccagatttatctgtatttcaatcccagttctattccttgccagttgtgtatccgctggcaagttacttctctatgcctcaatctcctcatctgtaaaatggggataataatattacctgcaatacagggttgttacgaaaataaaaatgaataggtgcttagaatggggcctgacattagtaagtgcttagttttgtgtgtgtatatgttatttttattttggaggagaacataaaaaggacaaagtgtagaaaaactggttgggtgtattcagctgtcataacatgagagttgttatgcccagatgcacttgacatgtgaatttattagaaacatgatttttctctgagttgatgtttaactcaaactgatagaaaagataggtcagaatatagttggccaacagagaagacttgttagactattgtctgcatgtcagtgtttgcatgctaacttgcttagttagaaaggttaaattttttcactctataaaatcaagaaatatagagaaaaggtctgcagagagtctttcatttgatgatgtggatattgttaagagcgggagtttggagcatacagagctcaagttgaatcctgactttgctacttattggctatatgaccttgggcaagctgcttagtctctctgatcctcagttacctttgtttgttgatgatgaccattgataacacaaccataaataatgacaacatagagatagttctcattatagtagttgttatacagaattattcactcaatgttaattttctgcattgaaatcccagaacattagaattgggggcattatttgaatctttaaggttataaggaatacatttctcagcaataaatggaaggagttttgggttaacttataaagtatacccaagtcatttttttttcagagaagatatggtagaaagtcttaggaggttgaagaaggaattggatatttattctttctgagactatcatgggagataatgactatggttgtccatgattggagccgttgctgtagagttggttttattatagtgtaggatttgaatgggccatgtgttctcagacctcagattaaaatgagaaaactgaggccagtggggagcgtgacttcacatgggtacacttgtgctagagacagaaccaggattcaggacttctggctcctggtcctgggttcatggcccaatgtagtctttctcagtcttcaggaggaggaagggcaggacccagtgttctgagtcaccctgaatgtgagcactatttacttcgtgaacttcttggcttagtgcctctgccaggtggccataacctctggccttgtgttgccagagaaaaggtttagttttcaggctccattgcttcccagctgccaagaatgccttggtgcagcacagtcataggccctgcattcctcattgccgtgctggttggtcggggaggtgggctggactcgtagggatttgccccttggccttgtttctaacacttgccgtttcctgctgtccccctgccccctccactgcctgggtaaagattgtcttgccagctgtgtttgtctgcattgcccttgtgttcagcctgatcgtgccaccctttggcaagtaccccagcctggaacttcagccctggatgtacaacgaacagtacacatttgtcaggtatgtttgtcttctacatcccaggagggggtaagattcgagcagaccaaagatgtttacgagggccaagggaatggacttcagaattacacggtggaatgaattttactgctgcggctcaggtccctgtataagctaatactgcatgcatagaacagcagcgaactaaccctgaataataggccagtcttctgttgagcctttcagcctctctcctcttcatcctac

SEQ ID NO: 105 - DNA, 4062 bp, Homo sapiens
tagcttgatagctctcaccactgaggaaatgttctctggcaaaaacggcttctctcccaggtaactctgagaaagtgttattaagaaatgtggcttctactttctctgtcttacggggctaacatgccactcagtaatataataatcgtggcagtggtgactactctcgtaatgttggtgcttataatgttctcatctctctcattttccagatattcctcaaggtggccgaagagagtggggtggatgctgagacctcaggtaactgccttgagggagaatggcacacttaagatagtgccttctgctggctttctcagtgcacgagtattgttcctttccctttgaattgttctattgcattctcatttgtagagtgtaggtttgttgcagatggggaaggtttgttttgttgtaaataaaataaagtatgggattctttccttgtgccttcagatggtaccttgccagcaagacgaaacaggcgggccttcggggacaagcagagctgtcttcgcccgttcactgaagatgatgctgctgatccaaatgattctgacatagacccaggtctgttagggcaagatcaaacagtgtcctactgtttgaatgtgaaattctctctcatgctctcacctgttttctttggatggcctttagccaaggtgatagatccctacagagtccaaagagaagtgaggaaatggtaaaagccacttgttctttgcagcatcgtgcatgtgatcaaacctgaaagagcctatccatatcacttcctttaaagacataaagatggtgcctcaatcctctgaacccatgtatttattatcttttctgcggggtcctagtttcttgtatacattaggtgtttaattgttgaacaaatattcattcgagtagatgagtgattttgaaagagtcagaaaggggaatttgctgttagagttaattgtaccctaagacttagatatttgaggctgggcatggtggctcatgccagtaatcccagcgctttgagaggctgaggtgggtagatcacctgaggtcaggagtttgagaccagtctgaccaacaaggtgaaaccccgtctctactaaatacaaaaaattagccgagtgtggtggcacatgcctgtcatcccagctacttgggaggctgaggcaggagaatcgcttgaacccaggaggcagaggttgcagtcagccacggttgcgccattgcactccagactgggcaacaagagtgaaaactccatctcaaaaaagaaaaaaaaagaattagatattttggatgagtgtgtctttgtgtgtttaactgagatggagaggagagctaagacatcaaacaaatattgttaagatgtaaaagcacatcagttaggtatcattagtttaggacaaggatttctagaaaatttttaggaacagaaaactttccagttctctcacccctgctcaaagagtgtatggctcttacattatatataactgcctgacttcatacagtatcagtacttagatcatttgaaatgtgtccacgttttaccaaaatataatagggtgagaagctgagatgctaattgccattgtgtattctcaaatatgtcaagctacgtacatggcctgtttcatagagtagtctataagaaattgatgacttgattcatccgaatggctggctgtaacacctggttacgcatgaacacctcttttcagttgtctcaagacacctttcttttctgtacttatcagacaaggactgaaaggcagagactgctactgttagacattttgagtcaagcttttccttggacatagctttgtcatgaaagccctttacttctgagaaacttctagcttcagacacatgccttcaagatagttgttgaagacaccagaagaaggagcatggcaatgccgaaaacacctaagataataggtgaccttcagtgttggcttcttgcagaatccagagagacagacttgctcagtgggatggatggcaaagggtcctaccaggtgaaaggctggaaacttacacagcaacagtttgtggcccttttgtggaagagactgctaattgccagacggagtcggaaaggattttttgctcaggtgagacgtgctgttttcgccagagactctggcttcatgggtgggctgcaggctctgtgaccagtgaaggcaggatagcatcctggtcaagatatggatgccggagccagatttatctgtatttcaatcccagttctattccttgccagttgtgtatccgctggcaagttacttctctatgcctcaatctcctcatctgtaaaatggggataataatattacctgcaatacagggttgttacgaaaataaaaatgaataggtgcttagaatggggcctgacattagtaagtgcttagttttgtgtgtgtatatgttatttttattttggaggagaacataaaaaggacaaagtgtagaaaaactggttgggtgtattcagctgtcataacatgagagttgttatgcccagatgcacttgacatgtgaatttattagaaacatgatttttctctgagttgatgtttaactcaaactgatagaaaagataggtcagaatatagttggccaacagagaagacttgttagactattgtctgcatgtcagtgtttgcatgctaacttgcttagttagaaaggttaaattttttcactctataaaatcaagaaatatagagaaaaggtctgcagagagtctttcatttgatgatgtggatattgttaagagcgggagtttggagcatacagagctcaagttgaatcctgactttgctacttattggctatatgaccttgggcaagctgcttagtctctctgatcctcagttacctttgtttgttgatgatgaccattgataacacaaccataaataatgacaacatagagatagttctcattatagtagttgttatacagaattattcactcaatgttaattttctgcattgaaatcccagaacattagaattgggggcattatttgaatctttaaggttataaggaatacatttctcagcaataaatggaaggagttttgggttaacttataaagtatacccaagtcatttttttttcagagaagatatggtagaaagtcttaggaggttgaagaaggaattggatatttattctttctgagactatcatgggagataatgactatggttgtccatgattggagccgttgctgtagagttggttttattatagtgtaggatttgaatgggccatgtgttctcagacctcagattaaaatgagaaaactgaggccagtggggagcgtgacttcacatgggtacacttgtgctagagacagaaccaggattcaggacttctggctcctggtcctgggttcatggcccaatgtagtctttctcagtcttcaggaggaggaagggcaggacccagtgttctgagtcaccctgaatgtgagcactatttacttcgtgaacttcttggcttagtgcctctgccaggtggccataacctctggccttgtgttgccagagaaaaggtttagttttcaggctccattgcttcccagctgccaagaatgccttggtgcagcacagtcataggccctgcattcctcattgccgtgctggttggtcggggaggtgggctggactcgtagggatttgccccttggccttgtttctaacacttgccgtttcctgctgtccccctgccccctccactgcctgggtaaagattgtcttgccagctgtgtttgtctgcattgcccttgtgttcagcctgatcgtgccaccctttggcaagtaccccagcctggaacttcagccctggatgtacaacgaacagtacacatttgtcaggtatgtttgtcttctacatcccaggagggggtaagattcgagcagaccaaagatgtttacgagggccaagggaatggacttcagaattacacggtggaatgaattttactgctgcggctcaggtccctgtataagctaatactgcatgcatagaacagcagcgaactaaccctg

SEQ ID NO: 106 - DNA, 4067 bp, Homo sapiens
gggcatttctagttatggcatctcagagacgaccctggaagaagtaagttaagtggctgactgtcggaatatatagcaaggccaaatgtcctaaggccagaccagtagcctgcattgggagcaggattatcatggagttagtcattgagtttttaggtcatcgacatctgattaatgttggccccagtgagccatttaagatggtagtgggagatagcaggaaagaagtgttttcctctgtaccacagtacatgcctgagatttgtgtgttgaaaccagtggtacctaacacatttacatcccaaccttaaactcctatgcacttatttaccctttaatgagcctctttacttaagtacagtgtgaggaacagcggcatcaggatcacttgggaacttgttagaaattcagcaacttgggcccagctcagacctactgaatcagaatcaggagcaattctctggtgtgactgtgtcacagccaggtatcaactggattctcatacataggaaatgacaaacgtttatggatggatagtctacttgtgccaggtgctgagatttgttttttgttttttgatttttttttaatcactgtgacctcatttaattctcaaaaaaagatgaaaaaatgaacactcaggaatgctgacatgagattcagaatcaggggtttggggcttcaaagtccatcctctctttatccatgtaatgcctccccttagagatacaacatcacagaccttgaaggctgaaggggatataaaagctgtctggccaagtggtctccaagcttgacagtgcagcagaatcacctggggatattattaaaaataaacatactaaggtttggcttcagggcctgtgaatcagaatttctggaggtgaggccttgaagtctgtatttctattgcatactttggacacagtggtctatagactagagtttggaaatgattgcgctcattcagattctcttctgatgtttgaattgctgccatcatatttctagtgctctatttcctcctgctcattctgtcttggataacttatcatagtactagcctactcaaagatttagagccacagtcctgaaagaagccacttgactcattccctgtaggttcagaataaatttcttctgcgcagtgtctgtcatagctttttttaaatttttttttatttttgatgagactggagttttgctcttattgcccaagctggagtgcagtggtgcgattttggctcactgcaacctccacctcccaggttcaagcgattctcctgcctcagcctcccaagtagctgagattacaagcatgtgctaccacgcccagctaattttgtatttttagtagagatgggttttatccatgttggtcaggctggtctcgagctccagacctcaggtgatctgcccgcctcggcctcccaaagtgctgggattataggcctgagccacagcgctcagccataactttaatttgaaaatgattgtctagcttgatagctctcaccactgaggaaatgttctctggcaaaaacggcttctctcccaggtaactctgagaaagtgttattaagaaatgtggcttctactttctctgtcttacggggctaacatgccactcagtaatataataatcgtggcagtggtgactactctcgtaatgttggtgcttataatgttctcatctctctcattttccagatattcctcaaggtggccgaagagagtggggtggatgctgagacctcaggtaactgccttgagggagaatggcacacttaagatagtgccttctgctggctttctcagtgcacgagtattgttcctttccctttgaattgttctattgcattctcatttgtagagtgtaggtttgttgcagatggggaaggtttgttttgttgtaaataaaataaagtatgggattctttccttgtgccttcagatggtaccttgccagcaagacgaaacaggcgggccttcggggacaagcagagctgtcttcgcccgttcactgaagatgatgctgctgatccaaatgattctgacatagacccaggtctgttagggcaagatcaaacagtgtcctactgtttgaatgtgaaattctctctcatgctctcacctgttttctttggatggcctttagccaaggtgatagatccctacagagtccaaagagaagtgaggaaatggtaaaagccacttgttctttgcagcatcgtgcatgtgatcaaacctgaaagagcctatccatatcacttcctttaaagacataaagatggtgcctcaatcctctgaacccatgtatttattatcttttctgcggggtcctagtttcttgtatacattaggtgtttaattgttgaacaaatattcattcgagtagatgagtgattttgaaagagtcagaaaggggaatttgctgttagagttaattgtaccctaagacttagatatttgaggctgggcatggtggctcatgccagtaatcccagcgctttgagaggctgaggtgggtagatcacctgaggtcaggagtttgagaccagtctgaccaacaaggtgaaaccccgtctctactaaatacaaaaaattagccgagtgtggtggcacatgcctgtcatcccagctacttgggaggctgaggcaggagaatcgcttgaacccaggaggcagaggttgcagtcagccacggttgcgccattgcactccagactgggcaacaagagtgaaaactccatctcaaaaaagaaaaaaaaagaattagatattttggatgagtgtgtctttgtgtgtttaactgagatggagaggagagctaagacatcaaacaaatattgttaagatgtaaaagcacatcagttaggtatcattagtttaggacaaggatttctagaaaatttttaggaacagaaaactttccagttctctcacccctgctcaaagagtgtatggctcttacattatatataactgcctgacttcatacagtatcagtacttagatcatttgaaatgtgtccacgttttaccaaaatataatagggtgagaagctgagatgctaattgccattgtgtattctcaaatatgtcaagctacgtacatggcctgtttcatagagtagtctataagaaattgatgacttgattcatccgaatggctggctgtaacacctggttacgcatgaacacctcttttcagttgtctcaagacacctttcttttctgtacttatcagacaaggactgaaaggcagagactgctactgttagacattttgagtcaagcttttccttggacatagctttgtcatgaaagccctttacttctgagaaacttctagcttcagacacatgccttcaagatagttgttgaagacaccagaagaaggagcatggcaatgccgaaaacacctaagataataggtgaccttcagtgttggcttcttgcagaatccagagagacagacttgctcagtgggatggatggcaaagggtcctaccaggtgaaaggctggaaacttacacagcaacagtttgtggcccttttgtggaagagactgctaattgccagacggagtcggaaaggattttttgctcaggtgagacgtgctgttttcgccagagactctggcttcatgggtgggctgcaggctctgtgaccagtgaaggcaggatagcatcctggtcaagatatggatgccggagccagatttatctgtatttcaatcccagttctattccttgccagttgtgtatccgctggcaagttacttctctatgcctcaatctcctcatctgtaaaatggggataataatattacctgcaatacagggttgttacgaaaataaaaatgaataggtgcttagaatggggcctgacattagtaagtgcttagttttgtgtgtgtatatgttatttttattttggaggagaacataaaaaggacaaagtgtagaaaaactggttgggtgtattcagctgtcataacatgagagttgttatgcccagatgcacttgacatgtgaatttattagaaacatgatttttctctga

SEQ ID NO: 107 - DNA, 4046 bp, Homo sapiens
acctaaacacctggaacaggtgtggtgtatgagcggcaggcctctgatgagagggtgggggatggccagccctcactccgaagcccctctgagttgattgagccatctttgcattctggtccctgcagatgtctctgctatctccaacctcatcaggaagcatgtgtctgaagcccggctggtggaagacatagggcatgagctgacctatgtgctgccatatgaagctgctaaggagggagcctttgtggaactctttcatgagattgatgaccggctctcagacctgggcatttctagttatggcatctcagagacgaccctggaagaagtaagttaagtggctgactgtcggaatatatagcaaggccaaatgtcctaaggccagaccagtagcctgcattgggagcaggattatcatggagttagtcattgagtttttaggtcatcgacatctgattaatgttggccccagtgagccatttaagatggtagtgggagatagcaggaaagaagtgttttcctctgtaccacagtacatgcctgagatttgtgtgttgaaaccagtggtacctaacacatttacatcccaaccttaaactcctatgcacttatttaccctttaatgagcctctttacttaagtacagtgtgaggaacagcggcatcaggatcacttgggaacttgttagaaattcagcaacttgggcccagctcagacctactgaatcagaatcaggagcaattctctggtgtgactgtgtcacagccaggtatcaactggattctcatacataggaaatgacaaacgtttatggatggatagtctacttgtgccaggtgctgagatttgttttttgttttttgatttttttttaatcactgtgacctcatttaattctcaaaaaaagatgaaaaaatgaacactcaggaatgctgacatgagattcagaatcaggggtttggggcttcaaagtccatcctctctttatccatgtaatgcctccccttagagatacaacatcacagaccttgaaggctgaaggggatataaaagctgtctggccaagtggtctccaagcttgacagtgcagcagaatcacctggggatattattaaaaataaacatactaaggtttggcttcagggcctgtgaatcagaatttctggaggtgaggccttgaagtctgtatttctattgcatactttggacacagtggtctatagactagagtttggaaatgattgcgctcattcagattctcttctgatgtttgaattgctgccatcatatttctagtgctctatttcctcctgctcattctgtcttggataacttatcatagtactagcctactcaaagatttagagccacagtcctgaaagaagccacttgactcattccctgtaggttcagaataaatttcttctgcgcagtgtctgtcatagctttttttaaatttttttttatttttgatgagactggagttttgctcttattgcccaagctggagtgcagtggtgcgattttggctcactgcaacctccacctcccaggttcaagcgattctcctgcctcagcctcccaagtagctgagattacaagcatgtgctaccacgcccagctaattttgtatttttagtagagatgggttttatccatgttggtcaggctggtctcgagctccagacctcaggtgatctgcccgcctcggcctcccaaagtgctgggattataggcctgagccacagcgctcagccataactttaatttgaaaatgattgtctagcttgatagctctcaccactgaggaaatgttctctggcaaaaacggcttctctcccaggtaactctgagaaagtgttattaagaaatgtggcttctactttctctgtcttacggggctaacatgccactcagtaatataataatcgtggcagtggtgactactctcgtaatgttggtgcttataatgttctcatctctctcattttccagatattcctcaaggtggccgaagagagtggggtggatgctgagacctcaggtaactgccttgagggagaatggcacacttaagatagtgccttctgctggctttctcagtgcacgagtattgttcctttccctttgaattgttctattgcattctcatttgtagagtgtaggtttgttgcagatggggaaggtttgttttgttgtaaataaaataaagtatgggattctttccttgtgccttcagatggtaccttgccagcaagacgaaacaggcgggccttcggggacaagcagagctgtcttcgcccgttcactgaagatgatgctgctgatccaaatgattctgacatagacccaggtctgttagggcaagatcaaacagtgtcctactgtttgaatgtgaaattctctctcatgctctcacctgttttctttggatggcctttagccaaggtgatagatccctacagagtccaaagagaagtgaggaaatggtaaaagccacttgttctttgcagcatcgtgcatgtgatcaaacctgaaagagcctatccatatcacttcctttaaagacataaagatggtgcctcaatcctctgaacccatgtatttattatcttttctgcggggtcctagtttcttgtatacattaggtgtttaattgttgaacaaatattcattcgagtagatgagtgattttgaaagagtcagaaaggggaatttgctgttagagttaattgtaccctaagacttagatatttgaggctgggcatggtggctcatgccagtaatcccagcgctttgagaggctgaggtgggtagatcacctgaggtcaggagtttgagaccagtctgaccaacaaggtgaaaccccgtctctactaaatacaaaaaattagccgagtgtggtggcacatgcctgtcatcccagctacttgggaggctgaggcaggagaatcgcttgaacccaggaggcagaggttgcagtcagccacggttgcgccattgcactccagactgggcaacaagagtgaaaactccatctcaaaaaagaaaaaaaaagaattagatattttggatgagtgtgtctttgtgtgtttaactgagatggagaggagagctaagacatcaaacaaatattgttaagatgtaaaagcacatcagttaggtatcattagtttaggacaaggatttctagaaaatttttaggaacagaaaactttccagttctctcacccctgctcaaagagtgtatggctcttacattatatataactgcctgacttcatacagtatcagtacttagatcatttgaaatgtgtccacgttttaccaaaatataatagggtgagaagctgagatgctaattgccattgtgtattctcaaatatgtcaagctacgtacatggcctgtttcatagagtagtctataagaaattgatgacttgattcatccgaatggctggctgtaacacctggttacgcatgaacacctcttttcagttgtctcaagacacctttcttttctgtacttatcagacaaggactgaaaggcagagactgctactgttagacattttgagtcaagcttttccttggacatagctttgtcatgaaagccctttacttctgagaaacttctagcttcagacacatgccttcaagatagttgttgaagacaccagaagaaggagcatggcaatgccgaaaacacctaagataataggtgaccttcagtgttggcttcttgcagaatccagagagacagacttgctcagtgggatggatggcaaagggtcctaccaggtgaaaggctggaaacttacacagcaacagtttgtggcccttttgtggaagagactgctaattgccagacggagtcggaaaggattttttgctcaggtgagacgtgctgttttcgccagagactctggcttcatgggtgggctgcaggctctgtgaccagtgaaggcaggatagcatcctggtcaagatatggatgccggagccagatttatctgtatttcaatcccagttctattccttgc

SEQ ID NO: 108 - DNA, 4079 bp, Homo sapiens
ctgattcaaggtcacccagcaggtaaataacagtggtgggaccagacccaattaccaggtatgttttcctctgtaccgcagtacatgcctgagatttatttgtgtgttgaagccagtggtacctaatgtatttacatcccaacctgaaactcctatccacttatttaccttttaatgagcctcttaactcaagtgcagtctgaggaccagcagcatcaggatcacttgggaacttgttagaaattcagcaacctgggcccagctcagacctaccgaatcagaatctgtgcattttaacaaggttcttgagtggttgaacacacattaaagcatgagaagcattgaactagacatgtagccaggtaaaggccttgcctgagatggttggcaaaggcctcattgcagcattcattggcaggccacagttcttttggcagctctgcttcctgacctttcaccctcaggaagcgaggctgttcacacggcacacacatgccagacagggtcctctgaagccacggctgccagtgcatgtgtcccagggaaagctttttcctttagttctcacacaacagagcttcttggaagccctccccggcgaaggtgctggtggctctgccttgctccgtccctgacccgttctcacctccttctttgccatcaggaggacagtgtttctcagagcagttctgatgctggcctgggcagcgaccatgagagtgacacgctgaccatcggtaaggactctggggtttcttattcaggtggtgcctgagcttcccccagctgggcagagtggaggcagaggaggagaggtgcagaggctggtggcgctgactcaaggtttgctgctgggctggggctgggtggctgcgggtgtgggagcagcttggtggcgggttggcctaatgcttgctggggtgcctggggctcggtttgggagctagcagggcagtgtcccagagagctgagatgattggggtttggggaatcccttaggggagtggacactgaataccagggatgaggagctgagggccaagccaggagggtgggatttgagcttagtacataagaagagtgagagcccaggagatgaggaacagccttccagatttttcttgggtagcgtgtgtaggaggccagtgtcaccagtagcatatgtggaacagaagtcttgacccttgctatctctgcctagtcctaatggctggcttttcccaggaaggcttctgcttccatggactgttagattaaccctttatttaggtaaatgagggaacctactttataagcataggaaagggtgaagaatcttttaagattcctttactcaagttttcttttgaagaatcccagagcttaggcaatagacaccagactttgagcctcagttatccattcacccatccacccacccacccacccatccttccatcctcccatcctcccattcacccatccacccatccagctgtccacccattctacactgagtacctataatgtgcctggctttggtgatacaaaggtgaataagacatagtcctttcctttgcccccaaccctcagaccagagatgaacatgtggaatgacctaaacacctggaacaggtgtggtgtatgagcggcaggcctctgatgagagggtgggggatggccagccctcactccgaagcccctctgagttgattgagccatctttgcattctggtccctgcagatgtctctgctatctccaacctcatcaggaagcatgtgtctgaagcccggctggtggaagacatagggcatgagctgacctatgtgctgccatatgaagctgctaaggagggagcctttgtggaactctttcatgagattgatgaccggctctcagacctgggcatttctagttatggcatctcagagacgaccctggaagaagtaagttaagtggctgactgtcggaatatatagcaaggccaaatgtcctaaggccagaccagtagcctgcattgggagcaggattatcatggagttagtcattgagtttttaggtcatcgacatctgattaatgttggccccagtgagccatttaagatggtagtgggagatagcaggaaagaagtgttttcctctgtaccacagtacatgcctgagatttgtgtgttgaaaccagtggtacctaacacatttacatcccaaccttaaactcctatgcacttatttaccctttaatgagcctctttacttaagtacagtgtgaggaacagcggcatcaggatcacttgggaacttgttagaaattcagcaacttgggcccagctcagacctactgaatcagaatcaggagcaattctctggtgtgactgtgtcacagccaggtatcaactggattctcatacataggaaatgacaaacgtttatggatggatagtctacttgtgccaggtgctgagatttgttttttgttttttgatttttttttaatcactgtgacctcatttaattctcaaaaaaagatgaaaaaatgaacactcaggaatgctgacatgagattcagaatcaggggtttggggcttcaaagtccatcctctctttatccatgtaatgcctccccttagagatacaacatcacagaccttgaaggctgaaggggatataaaagctgtctggccaagtggtctccaagcttgacagtgcagcagaatcacctggggatattattaaaaataaacatactaaggtttggcttcagggcctgtgaatcagaatttctggaggtgaggccttgaagtctgtatttctattgcatactttggacacagtggtctatagactagagtttggaaatgattgcgctcattcagattctcttctgatgtttgaattgctgccatcatatttctagtgctctatttcctcctgctcattctgtcttggataacttatcatagtactagcctactcaaagatttagagccacagtcctgaaagaagccacttgactcattccctgtaggttcagaataaatttcttctgcgcagtgtctgtcatagctttttttaaatttttttttatttttgatgagactggagttttgctcttattgcccaagctggagtgcagtggtgcgattttggctcactgcaacctccacctcccaggttcaagcgattctcctgcctcagcctcccaagtagctgagattacaagcatgtgctaccacgcccagctaattttgtatttttagtagagatgggttttatccatgttggtcaggctggtctcgagctccagacctcaggtgatctgcccgcctcggcctcccaaagtgctgggattataggcctgagccacagcgctcagccataactttaatttgaaaatgattgtctagcttgatagctctcaccactgaggaaatgttctctggcaaaaacggcttctctcccaggtaactctgagaaagtgttattaagaaatgtggcttctactttctctgtcttacggggctaacatgccactcagtaatataataatcgtggcagtggtgactactctcgtaatgttggtgcttataatgttctcatctctctcattttccagatattcctcaaggtggccgaagagagtggggtggatgctgagacctcaggtaactgccttgagggagaatggcacacttaagatagtgccttctgctggctttctcagtgcacgagtattgttcctttccctttgaattgttctattgcattctcatttgtagagtgtaggtttgttgcagatggggaaggtttgttttgttgtaaataaaataaagtatgggattctttccttgtgccttcagatggtaccttgccagcaagacgaaacaggcgggccttcggggacaagcagagctgtcttcgcccgttcactgaagatgatgctgctgatccaaatgattctgacatagacccaggtctgttagggcaagatcaaacagtgtcctactgtttgaatgtgaaattctctctcatgctctcacctgttttctttggatggcctttagccaaggtgatagatccctacagagtccaaagagaagtg

SEQ ID NO: 109 - DNA, 4078 bp, Homo sapiens
ctctatcatctcaattaaagtgcagagagaccctgggaagaaggtaactatatttattatcccagatgagggaagtgaggcttgtagggaattggtagctgattcaaggtcacccagcaggtaaataacagtggtgggaccagacccaattaccaggtatgttttcctctgtaccgcagtacatgcctgagatttatttgtgtgttgaagccagtggtacctaatgtatttacatcccaacctgaaactcctatccacttatttaccttttaatgagcctcttaactcaagtgcagtctgaggaccagcagcatcaggatcacttgggaacttgttagaaattcagcaacctgggcccagctcagacctaccgaatcagaatctgtgcattttaacaaggttcttgagtggttgaacacacattaaagcatgagaagcattgaactagacatgtagccaggtaaaggccttgcctgagatggttggcaaaggcctcattgcagcattcattggcaggccacagttcttttggcagctctgcttcctgacctttcaccctcaggaagcgaggctgttcacacggcacacacatgccagacagggtcctctgaagccacggctgccagtgcatgtgtcccagggaaagctttttcctttagttctcacacaacagagcttcttggaagccctccccggcgaaggtgctggtggctctgccttgctccgtccctgacccgttctcacctccttctttgccatcaggaggacagtgtttctcagagcagttctgatgctggcctgggcagcgaccatgagagtgacacgctgaccatcggtaaggactctggggtttcttattcaggtggtgcctgagcttcccccagctgggcagagtggaggcagaggaggagaggtgcagaggctggtggcgctgactcaaggtttgctgctgggctggggctgggtggctgcgggtgtgggagcagcttggtggcgggttggcctaatgcttgctggggtgcctggggctcggtttgggagctagcagggcagtgtcccagagagctgagatgattggggtttggggaatcccttaggggagtggacactgaataccagggatgaggagctgagggccaagccaggagggtgggatttgagcttagtacataagaagagtgagagcccaggagatgaggaacagccttccagatttttcttgggtagcgtgtgtaggaggccagtgtcaccagtagcatatgtggaacagaagtcttgacccttgctatctctgcctagtcctaatggctggcttttcccaggaaggcttctgcttccatggactgttagattaaccctttatttaggtaaatgagggaacctactttataagcataggaaagggtgaagaatcttttaagattcctttactcaagttttcttttgaagaatcccagagcttaggcaatagacaccagactttgagcctcagttatccattcacccatccacccacccacccacccatccttccatcctcccatcctcccattcacccatccacccatccagctgtccacccattctacactgagtacctataatgtgcctggctttggtgatacaaaggtgaataagacatagtcctttcctttgcccccaaccctcagaccagagatgaacatgtggaatgacctaaacacctggaacaggtgtggtgtatgagcggcaggcctctgatgagagggtgggggatggccagccctcactccgaagcccctctgagttgattgagccatctttgcattctggtccctgcagatgtctctgctatctccaacctcatcaggaagcatgtgtctgaagcccggctggtggaagacatagggcatgagctgacctatgtgctgccatatgaagctgctaaggagggagcctttgtggaactctttcatgagattgatgaccggctctcagacctgggcatttctagttatggcatctcagagacgaccctggaagaagtaagttaagtggctgactgtcggaatatatagcaaggccaaatgtcctaaggccagaccagtagcctgcattgggagcaggattatcatggagttagtcattgagtttttaggtcatcgacatctgattaatgttggccccagtgagccatttaagatggtagtgggagatagcaggaaagaagtgttttcctctgtaccacagtacatgcctgagatttgtgtgttgaaaccagtggtacctaacacatttacatcccaaccttaaactcctatgcacttatttaccctttaatgagcctctttacttaagtacagtgtgaggaacagcggcatcaggatcacttgggaacttgttagaaattcagcaacttgggcccagctcagacctactgaatcagaatcaggagcaattctctggtgtgactgtgtcacagccaggtatcaactggattctcatacataggaaatgacaaacgtttatggatggatagtctacttgtgccaggtgctgagatttgttttttgttttttgatttttttttaatcactgtgacctcatttaattctcaaaaaaagatgaaaaaatgaacactcaggaatgctgacatgagattcagaatcaggggtttggggcttcaaagtccatcctctctttatccatgtaatgcctccccttagagatacaacatcacagaccttgaaggctgaaggggatataaaagctgtctggccaagtggtctccaagcttgacagtgcagcagaatcacctggggatattattaaaaataaacatactaaggtttggcttcagggcctgtgaatcagaatttctggaggtgaggccttgaagtctgtatttctattgcatactttggacacagtggtctatagactagagtttggaaatgattgcgctcattcagattctcttctgatgtttgaattgctgccatcatatttctagtgctctatttcctcctgctcattctgtcttggataacttatcatagtactagcctactcaaagatttagagccacagtcctgaaagaagccacttgactcattccctgtaggttcagaataaatttcttctgcgcagtgtctgtcatagctttttttaaatttttttttatttttgatgagactggagttttgctcttattgcccaagctggagtgcagtggtgcgattttggctcactgcaacctccacctcccaggttcaagcgattctcctgcctcagcctcccaagtagctgagattacaagcatgtgctaccacgcccagctaattttgtatttttagtagagatgggttttatccatgttggtcaggctggtctcgagctccagacctcaggtgatctgcccgcctcggcctcccaaagtgctgggattataggcctgagccacagcgctcagccataactttaatttgaaaatgattgtctagcttgatagctctcaccactgaggaaatgttctctggcaaaaacggcttctctcccaggtaactctgagaaagtgttattaagaaatgtggcttctactttctctgtcttacggggctaacatgccactcagtaatataataatcgtggcagtggtgactactctcgtaatgttggtgcttataatgttctcatctctctcattttccagatattcctcaaggtggccgaagagagtggggtggatgctgagacctcaggtaactgccttgagggagaatggcacacttaagatagtgccttctgctggctttctcagtgcacgagtattgttcctttccctttgaattgttctattgcattctcatttgtagagtgtaggtttgttgcagatggggaaggtttgttttgttgtaaataaaataaagtatgggattctttccttgtgccttcagatggtaccttgccagcaagacgaaacaggcgggccttcggggacaagcagagctgtcttcgcccgttcactgaagatgatgctgctgatccaaatgattctgacatagacccaggtctgttagggcaagatcaaacagtgtcc

SEQ ID NO: 110 - DNA, 4046 bp, Homo sapiens
ttccagcacgattcctcaaccattctaaccattccaaagggtatatctttggggggtgacattcttttcctgttttctttttaatctttttttaaaacatagaattaatatattatgagcttttcagaagatttttaaaaggcagtcagaaatcctactacctaacacaaaaattgtttttatctttgaataatatgttcttgtttgtccattttccatgcatgcgatgttaggcatacaaaatacattttttaaagaatactttcattgcagattggaaacttcgtttaaaaaatgctcatactaaaattggcatttctaacccataggcccacttgtagttatttaccgaagcaaaaggacagctttgctttgtgtgggtctggtagggttcattagaaaggaatgggggcggtgggagggttggtgttctgttctctctgcagactgaatggagcatctagagttaagggtaggtcaaccctgacttctgtacttctaaatttttgtcctcaggtcaatcctgaccgggttgttccccccgacctcgggcaccgcctacatcctgggaaaagacattcgctctgagatgagcaccatccggcagaacctgggggtctgtccccagcataacgtgctgtttgacatgtgagtaccagcagcacgttaagaataggccttttctggatgtgtgtgtgtcatgccatcatgggaggagtgggacttaagcattttactttgctgtgtttttgttttttctttttttcttttttatttttttgagatggagtctcgctctgtagccaggctggactgtagtggcgcgatctcggctcactgcaaccttggcctcccaggttcaagcgattctcctgcctcagcctcccgagtagctgggactctaggcacacaccaccatgcccagctaatttttgtgtttttagtagagacggggtttcaccatgttggccaggatggtctcaatgtcttgacctcgtgatccgcccacctcggtctcccaaagtgctgggaacacaggcatgagccactgtgtctggccacattttactttctttgaatatggcaggctcacctccgtgaacaccttgagacctagttgttctttgattttaggagaagtgggaggtgaatggttgagctgtagaggtgacatcagcccagccagtggatgggggcttgggaaacattgcttcccattattgtcatgctggagggccctttagcccatcctctcccccgccaccctccttattgaggcctggagcagacttcccagacctggtagtgcttcagggccctggtatgatggacctatatttgctgcttaagacatttgctcccactcaggttgtcccatcagccataaggcccccagggagcccgtgtgatggagcagagagagacctgagctctgcaatcttgggcaaggcttttcccttatgtttcttcttatctaaagtgaacagctggggctcatgtgctccctcctcatctaaagtgaacacatggggctcatgtgcagggtcctccccgctttcagagcctgaggtcccctgaggctcaggaaggctgctccaggtgagtgccgagctgacttcttggtggacgtgctgtggggacagcccattaaagaccacatcttggggccctgaaattgaaagttgtaactgcctggtgcatggtggccaggcctgctggaaacaggttggaagcgatctgtcacctttcactttgatttcctgagcagctcatgtggttgctcactgttgttctaccttgaatcttgaagattatttttcagaaattgataaagttattttaaaaagcacggggagagaaaaatatgcccattctcatctgttctgggccaggggacactgtattctggggtatccagtagggcccagagctgacctgcctccctgtccccaggctgactgtcgaagaacacatctggttctatgcccgcttgaaagggctctctgagaagcacgtgaaggcggagatggagcagatggccctggatgttggtttgccatcaagcaagctgaaaagcaaaacaagccagctgtcaggtgcggcccagagctaccttccctatccctctcccctcctcctccggctacacacatgcggaggaaaatcagcactgccccagggtcccaggctgggtgcggttggtaacagaaacttgtccctggctgtgcccctaggtcctctgccttcactcactgtctggggctggtcctggagtttgtcttgctctgtttttttgtaggtggaatgcagagaaagctatctgtggccttggcctttgtcgggggatctaaggttgtcattctggatgaacccacagctggtgtggacccttactcccgcaggggaatatgggagctgctgctgaaataccgacaaggtgcctgatgtgtatttattctgagtaaatggactgagagagagcggggggcttttgagaagtgtggctgtatctcatggctaggcttctgtgaagccatgggatactcttctgttatcacagaagagataaagggcattgagactgagattcctgagaggagatgctgtgtctttattcatctttttgtccccaacatggtgcactaaatttatggttagttgaaagggtggatgcttaaatgaatggaagcggagaggggcaggaagacgattgggctctctggttagagatctgatgtggtacagtatgaggagcacaggcaggcttggagccaactctggctggccctgagacattgggaaagtcacaacttgcctcaccttctttgccgataataatagtggtgcttacctcatagaggattaaattaaatgagaatgcacacaaaccacctagcacaatgcctggcatatagcaagttcccaaataaaatgctactgttcttacctctgtgaggatgtggtacctatatatacaaagctttgccattctaggggtcatagccatacagggtgaaaggtggcttccaggtctcttccagtgcttacccctgctaatatctctctagtccctgtcactgtgacaaatcagaactgagaggcctcacctgtcccacatccttgtgtttgtgcctggcaggccgcaccattattctctctacacaccacatggatgaagcggacgtcctgggggacaggattgccatcatctcccatgggaagctgtgctgtgtgggctcctccctgtttctgaagaaccagctgggaacaggctactacctgaccttggtcaagaaagatgtggaatcctccctcagttcctgcagaaacagtagtagcactgtgtcatacctgaaaaaggtgagctgcagtcttggtgctgggctggtgttgggtctgggcagccaggacttgctggctgtgaatgatttctccatctccaccccttttgccatgttgaaaccaccatctccctgctctgttgcccctttgaaatcatatcatacttaaggcatggaaagctaaggggccctctgctcccattgtgctagttctgttgaatcccgttttccttttcctatgaggcacagagagtgatggagaaggtccttagaggacattattatgtcaaagaaaagagacttgtcaagaggtaagagccttggctacaaatgacctggtgttcctgctcattacttttcaatctcattgaccttaacttttaaactataaaacagccaatatttattaggcactgatttcatgccagagacactctgggcatgaaagaaagtaatgataatagttaattttatatagcgttgttaccatttacaaccttttttttttttttaacctctatcatctcaattaaagtgcagagagaccctgggaagaaggtaactatatttattatcccagatgagggaagtgaggcttgtagggaattggtagctgattcaaggtcacccagcaggtaaataacagtggtgggaccagacccaattaccaggtatgttttcctctgtaccgcagtacatgcctga

SEQ ID NO: 111 - DNA, 4052 bp, Homo sapiens
gggttcccttaaacctttcatccagtttccccaatggtagcagcatgtgtaactgtagaatagtatcaaaaccatgaaattgacataggtacaattcacaaaccttcttcagatttcactagctttatgtgcgctcatttgtgtgtgtgtgtgcgtatttagttctatgcaattttatcatgtgtgaattcatgtaattactagctcagtcaagctgcagaaatatctcattgtcacaaagctccttcatgctaccccttaatggccacagccacctcccttcttcctcagttcctgacacctgtcaaccactaatgcgttcctcgtttttacagttttattatttctagaatgttacataaatggaaccatacagtaggtatccttttgatactggctttttttttttttcactcagcagtattcccttagatctatccaagttgtgtgtgtcaacagttcattcctcttcactgctgagtagtgttccctgggaggggtgtatcacagttccatggcatttttagatgtattttttaaacagctttcagcatcctctattttaattgttcatcaagtcctttttcccaatagactctgaatgctcctttatcatcgtattcccatcaccaacatcagtacccaaataggccctaaataaacatttatagcctcctgcctgcctgagaaaccagggtggacatggagagaaggcacttctgaaagttcaagcgcagtgccctgtgtccttacactccactcctcagtgctttctgtgggttcatttctgtcttctctcctgtcacagtctgcatggaggaggaacccacccacttgaagctgggcgtgtccattcagaacctggtaaaagtctaccgagatgggatgaaggtggctgtcgatggcctggcactgaatttttatgagggccagatcacctccttcctgggccacaatggagcggggaagacgaccaccatgtaagaagagggtgtggttcccgcagaatcagccacaggagggttctgcagtagagttagaaatttataccttaggaaaccatgctgatccctgggccaagggaaggagcacatgaggagttgccgaatgtgaacatgttatctaatcatgagtgtctttccacgtgctagtttgctagatgttatttcttcagcctaaaacaagctggggcctcagatgacctttcccatgtagttcacagaattctgcagtggtcttggaacctgcagccacgaaaagatagattacatatgttggagggagttggtaattcccaggaactctgtctctaagcagatgtgagaagcacctgtgagacgcaatcaagctgggcagctggcttgattgccttccctgcgacctcaaggaccttacagtgggtagtatcaggaggggtcaggggctgtaaagcaccagcgttagcctcagtggcttccagcacgattcctcaaccattctaaccattccaaagggtatatctttggggggtgacattcttttcctgttttctttttaatctttttttaaaacatagaattaatatattatgagcttttcagaagatttttaaaaggcagtcagaaatcctactacctaacacaaaaattgtttttatctttgaataatatgttcttgtttgtccattttccatgcatgcgatgttaggcatacaaaatacattttttaaagaatactttcattgcagattggaaacttcgtttaaaaaatgctcatactaaaattggcatttctaacccataggcccacttgtagttatttaccgaagcaaaaggacagctttgctttgtgtgggtctggtagggttcattagaaaggaatgggggcggtgggagggttggtgttctgttctctctgcagactgaatggagcatctagagttaagggtaggtcaaccctgacttctgtacttctaaatttttgtcctcaggtcaatcctgaccgggttgttccccccgacctcgggcaccgcctacatcctgggaaaagacattcgctctgagatgagcaccatccggcagaacctgggggtctgtccccagcataacgtgctgtttgacatgtgagtaccagcagcacgttaagaataggccttttctggatgtgtgtgtgtcatgccatcatgggaggagtgggacttaagcattttactttgctgtgtttttgttttttctttttttcttttttatttttttgagatggagtctcgctctgtagccaggctggactgtagtggcgcgatctcggctcactgcaaccttggcctcccaggttcaagcgattctcctgcctcagcctcccgagtagctgggactctaggcacacaccaccatgcccagctaatttttgtgtttttagtagagacggggtttcaccatgttggccaggatggtctcaatgtcttgacctcgtgatccgcccacctcggtctcccaaagtgctgggaacacaggcatgagccactgtgtctggccacattttactttctttgaatatggcaggctcacctccgtgaacaccttgagacctagttgttctttgattttaggagaagtgggaggtgaatggttgagctgtagaggtgacatcagcccagccagtggatgggggcttgggaaacattgcttcccattattgtcatgctggagggccctttagcccatcctctcccccgccaccctccttattgaggcctggagcagacttcccagacctggtagtgcttcagggccctggtatgatggacctatatttgctgcttaagacatttgctcccactcaggttgtcccatcagccataaggcccccagggagcccgtgtgatggagcagagagagacctgagctctgcaatcttgggcaaggcttttcccttatgtttcttcttatctaaagtgaacagctggggctcatgtgctccctcctcatctaaagtgaacacatggggctcatgtgcagggtcctccccgctttcagagcctgaggtcccctgaggctcaggaaggctgctccaggtgagtgccgagctgacttcttggtggacgtgctgtggggacagcccattaaagaccacatcttggggccctgaaattgaaagttgtaactgcctggtgcatggtggccaggcctgctggaaacaggttggaagcgatctgtcacctttcactttgatttcctgagcagctcatgtggttgctcactgttgttctaccttgaatcttgaagattatttttcagaaattgataaagttattttaaaaagcacggggagagaaaaatatgcccattctcatctgttctgggccaggggacactgtattctggggtatccagtagggcccagagctgacctgcctccctgtccccaggctgactgtcgaagaacacatctggttctatgcccgcttgaaagggctctctgagaagcacgtgaaggcggagatggagcagatggccctggatgttggtttgccatcaagcaagctgaaaagcaaaacaagccagctgtcaggtgcggcccagagctaccttccctatccctctcccctcctcctccggctacacacatgcggaggaaaatcagcactgccccagggtcccaggctgggtgcggttggtaacagaaacttgtccctggctgtgcccctaggtcctctgccttcactcactgtctggggctggtcctggagtttgtcttgctctgtttttttgtaggtggaatgcagagaaagctatctgtggccttggcctttgtcgggggatctaaggttgtcattctggatgaacccacagctggtgtggacccttactcccgcaggggaatatgggagctgctgctgaaataccgacaaggtgcctgatgtgtatttattctgagtaaatggactgagagagagcggggggcttttgagaagtgtggctgtatctcatggctaggcttctgtgaagccatgggatactcttctgttatcacagaagagataaagggcattgagactgagattcctgagagga

SEQ ID NO: 112 - DNA, 4046 bp, Homo sapiens
gctttcaggccagtacggaattcccaggccctggtattttccttgcaccaagtcctactggtttggcgaggaaagtgatgagaagagccaccctggttccaaccagaagagaatatcagaaagtaagtgctgttgacctcctgctctttctttaacctagtgctgctgcctctgctaactgttgggggcaagcgatgtctcctgcctttctaaaagactgtgaaaccactccaggggcagagaaatcacatgcagtgtccctttccaaatcctcccatgccatttatgtccaatgctgttgacctattgggagttcacggtctcgatccctgagggacattttctttgttgtcttggcttctagaagagtatcttttacttgccccctcccaaacacacatttcatggtctcctaacaagctagaagaaagaggtaaagacaagcgtgattgtggaaccatagcctcgctgcctgcctgtgacatggtgacctgtgtatcagcctgtgtgggctgagaccaagtggctaccacagagctcagcctatgcttcataatgtaatcattacccagatccctaatcctctcttggctcttaactgcagacagagatgtccacagctcatcaaaggctctgccttctgggttctttgtgcttagagtggcttcctaaatatttaataggtcccttttctgccagtctcttctgtgcccatcccctgattgcccttggtaaaagtatgatgccccttagtgtagcacgcttgcctgctgttcctaatcatcttctcctacctcctctttacacctagctcctgtttcagtcacctagaaatgctcacagtcgctggaatatgtcatgttcttccacacctccatgcctttgtaggtactgtttgctctcacaggagaactttctctctaacttgcctatcttctcaactcctcctttctctccaagatctagttccggatcccctcccctgagcatccctccttggttctcaggtagtcagtcactctctgccctgaacttccatggcacgtgaaagaaaatctttttattttaaaacaattacagactcacaagaagtaatacaaattacatgagggggttcccttaaacctttcatccagtttccccaatggtagcagcatgtgtaactgtagaatagtatcaaaaccatgaaattgacataggtacaattcacaaaccttcttcagatttcactagctttatgtgcgctcatttgtgtgtgtgtgtgcgtatttagttctatgcaattttatcatgtgtgaattcatgtaattactagctcagtcaagctgcagaaatatctcattgtcacaaagctccttcatgctaccccttaatggccacagccacctcccttcttcctcagttcctgacacctgtcaaccactaatgcgttcctcgtttttacagttttattatttctagaatgttacataaatggaaccatacagtaggtatccttttgatactggctttttttttttttcactcagcagtattcccttagatctatccaagttgtgtgtgtcaacagttcattcctcttcactgctgagtagtgttccctgggaggggtgtatcacagttccatggcatttttagatgtattttttaaacagctttcagcatcctctattttaattgttcatcaagtcctttttcccaatagactctgaatgctcctttatcatcgtattcccatcaccaacatcagtacccaaataggccctaaataaacatttatagcctcctgcctgcctgagaaaccagggtggacatggagagaaggcacttctgaaagttcaagcgcagtgccctgtgtccttacactccactcctcagtgctttctgtgggttcatttctgtcttctctcctgtcacagtctgcatggaggaggaacccacccacttgaagctgggcgtgtccattcagaacctggtaaaagtctaccgagatgggatgaaggtggctgtcgatggcctggcactgaatttttatgagggccagatcacctccttcctgggccacaatggagcggggaagacgaccaccatgtaagaagagggtgtggttcccgcagaatcagccacaggagggttctgcagtagagttagaaatttataccttaggaaaccatgctgatccctgggccaagggaaggagcacatgaggagttgccgaatgtgaacatgttatctaatcatgagtgtctttccacgtgctagtttgctagatgttatttcttcagcctaaaacaagctggggcctcagatgacctttcccatgtagttcacagaattctgcagtggtcttggaacctgcagccacgaaaagatagattacatatgttggagggagttggtaattcccaggaactctgtctctaagcagatgtgagaagcacctgtgagacgcaatcaagctgggcagctggcttgattgccttccctgcgacctcaaggaccttacagtgggtagtatcaggaggggtcaggggctgtaaagcaccagcgttagcctcagtggcttccagcacgattcctcaaccattctaaccattccaaagggtatatctttggggggtgacattcttttcctgttttctttttaatctttttttaaaacatagaattaatatattatgagcttttcagaagatttttaaaaggcagtcagaaatcctactacctaacacaaaaattgtttttatctttgaataatatgttcttgtttgtccattttccatgcatgcgatgttaggcatacaaaatacattttttaaagaatactttcattgcagattggaaacttcgtttaaaaaatgctcatactaaaattggcatttctaacccataggcccacttgtagttatttaccgaagcaaaaggacagctttgctttgtgtgggtctggtagggttcattagaaaggaatgggggcggtgggagggttggtgttctgttctctctgcagactgaatggagcatctagagttaagggtaggtcaaccctgacttctgtacttctaaatttttgtcctcaggtcaatcctgaccgggttgttccccccgacctcgggcaccgcctacatcctgggaaaagacattcgctctgagatgagcaccatccggcagaacctgggggtctgtccccagcataacgtgctgtttgacatgtgagtaccagcagcacgttaagaataggccttttctggatgtgtgtgtgtcatgccatcatgggaggagtgggacttaagcattttactttgctgtgtttttgttttttctttttttcttttttatttttttgagatggagtctcgctctgtagccaggctggactgtagtggcgcgatctcggctcactgcaaccttggcctcccaggttcaagcgattctcctgcctcagcctcccgagtagctgggactctaggcacacaccaccatgcccagctaatttttgtgtttttagtagagacggggtttcaccatgttggccaggatggtctcaatgtcttgacctcgtgatccgcccacctcggtctcccaaagtgctgggaacacaggcatgagccactgtgtctggccacattttactttctttgaatatggcaggctcacctccgtgaacaccttgagacctagttgttctttgattttaggagaagtgggaggtgaatggttgagctgtagaggtgacatcagcccagccagtggatgggggcttgggaaacattgcttcccattattgtcatgctggagggccctttagcccatcctctcccccgccaccctccttattgaggcctggagcagacttcccagacctggtagtgcttcagggccctggtatgatggacctatatttgctgcttaagacatttgctcccactcaggttgtcccatcagccataaggcccccagggagcccgtgtgatggagcagagagagacctgagctctgcaatcttgggcaaggcttttcccttatgtttcttcttatctaaagtg

SEQ ID NO: 113 - DNA, 4038 bp, Homo sapiens
tggtggtggtgggatgtgtgtgtgtgtgtgtgtgtgtgtgtgtgtgtgtgtgtagggatcaggatgcgggaggagctgggttctgcttgtattggttctctgttttgcattgaatagtgtgtttccttgtatggctatctatagcttttcaaggtcaccagaaattatcctgtttttcaccttctaaacaattagctggaatttttcaaaggaagacttttacaaagacccctaagctaaggtttactctagaaaggatgtcttaagacagggcacaggagttcagaggcattaagagctggtgcctgttgtcatgtagtgagtatgtgcctacatggtaaagctttgacgtgaacctcaagttcagggtccaaaatctgtgtgcctttttactttgcacatctgcattttctattctagcttggaatctgaaacattgacaagagctgcctgaaatgtatgtctgtggtgtgattagagttacgataagcaagtcaatagtgagatgaccttggagatgttgaacttttgtgagagaatgagttgtttttttgttttggtttttagtactttaacataatctacctttagtttaagtatcgctcacagttacctagttactgaagcaagcccccaaagaaatttggtttggcaacactttgttagcctcgtttttctctctacattgcattgctcgtgaagcattggatcatacgtacatttcagagtctagagggcctgtccttctgtggcccagatgtggtgctccctctagcatgcaggctcagaggccttggcccatcaccctggctcacgtgtgtctttctttctccccttgtccttccttggggcctccagctttctgcgggtgatgagccggtcaatgcccctcttcatgacgctggcctggatttactcagtggctgtgatcatcaagggcatcgtgtatgagaaggaggcacggctgaaagagaccatgcggatcatgggcctggacaacagcatcctctggtttagctggttcattagtagcctcattcctcttcttgtgagcgctggcctgctagtggtcatcctgaaggtaaggcagcctcactcgctcttccctgccaggaaactccgaaatagctcaacacgggctaagggaggagaagaagaaaaaaaatccaagcctctggtagagaaggggtcatacctgtcatttcctgcaatttcatccatttatagttggggaaagtgaggcccagagaggggcagtgacttgcccaaggtcaacccagccgggtagcagctaagtaggatgagagtgcagggttcatgctttccagataaccacatgctcaactgtgccatgctgtctcattggtagtggttcatggcagcatctgaaagctatttattttcttagatatattgggtggcgattcttcctaagtttctaagaacaataatcagaaggatatatattgttgcaggttagactgtctggaagcagaggctgaaatagagtttgatgtatgggtatttatgagggctcaatacctatggaagagatatggaagatgcaggattgggcagagggaggagttgaactgtgatatagggccaaccccgtggggcactctagagaatatgcagcttgttggagttgttcttcatcgagctgaaacatccagccctttgtgctcccccaaggcctccctcctgacaccacctacctcagccctctcaatcaatcactggatgtgggctgccctgggaaggtcgtgccccagggcctacatggctctctgctgctgtgacaaacccagagttgctgatgcctgaggccgtctactgacagctgggcaacaaggcttccctgaatggggactctgggcagtgcagttttgtgtctgaaccatacattaatatatttatatccgaattttctttctctgcaagcatttcatataaagacacatcaggtaaaaataaatgtttttgaagcaaaaggagtacaaagagataagaactaactaatttaatactagttaccatctgttacaaatagttcctactgattgccaaggactgtttaaacacatcacatgggcttcttcttctatcctcactaacccttttaacagacaaggaaatgaggctcaggaaggtcaaggactttattgaggttccacagtaggatacagttcttgctaaaagcaacccctccctcatgctctgttatctaactgcaaggggaaggtcagtggcagaggtagtggtcccatggttggtgcataagagctgctctgagacaactgcatgctggtgggtcctgcagacatgtacccatcagccggagataggctcaaaatatccacaagagtttggatgattgtgggaatgcagaatccatggtgatcaagagggaaagtcaagttgcctggccattttccttggcttttagacagaaaagttacgtgggatattatctcccacagctcttctgtggtgccaccagtcatagtccttatataaggagaaaccagttgaaattacctattgaagaaacaaagagcaaactcgcccactgaaatgcgtagaaagccctggactctgttgtattcataactctgccattatttttctgcgtagttttgggtaagtcacttatcttctttaggatggtaatgatcagttgcctcatcagaaagatgaacagcattacgcctctgcattgtctctaacatgagtaggaataaaccctgtcttttttctgtagatcatacaagtgagtgcttgggattgttgaggcagcacatttgatgtgtctcttccttcccagttaggaaacctgctgccctacagtgatcccagcgtggtgtttgtcttcctgtccgtgtttgctgtggtgacaatcctgcagtgcttcctgattagcacactcttctccagagccaacctggcagcagcctgtgggggcatcatctacttcacgctgtacctgccctacgtcctgtgtgtggcatggcaggactacgtgggcttcacactcaagatcttcgctgtgagtacctctggcctttcttcagtggctgtaggcatttgaccttcctttggagtccctgaataaaagcagcaagttgagaacagaagatgattgtcttttccaatgggacatgaaccttagctctagattctaagctctttaagggtaagggcaagcattgtgttttattaaattgtttacctttagtcttctcagtgaatcctggttgaattgaattgaatggaatttttccgagagccagactgcatcttgaactgggctggggataaatggcattgaggaatggcttcaggcaacagatgccatctctgccctttatctcccagctctgttggctatgttaagctcatgacaaagccaaggccacaaatagaactgaaaactcttgatgtcagagatgacctctcttgtcttccttgtgtccagtatggtgttttgcttgagtaatgttttctgaactaagcacaactgaggagcaggtgcctcatcccacaaattcctgacttggacacttccttccctcgtacagagcagggggatatcttggagagtgtgtgagcccctacaagtgcaagttgtcagatgtccccaggtcacttatcaggaaagctaagagtgactcataggatgctcctgttgcctcagtctgggcttcataggcatcagcagccccaaacaggcacctctgatcctgagccatccttggctgagcagggagcctcagaagactgtgggtatgcgcatgtgtgtgggggaacaggattgctgagccttggggcatctttggaaacataaagttttaaaagttttatgcttcactgtatatgcatttctgaaatgtttgtatataatgagtggttacaaatggaatcattttatatgttacttggtagcccaccactcccctaaagggactctataggtaaatactacttctgcaccttatgattgatccattttgcaaattcaaatttctccaggtataa

SEQ ID NO: 114 - DNA, 4045 bp, Homo sapiens
cacgcccggctgactttttgtattttagtagagacgaggtttcaccatgttacccaggctagacttcaactcctgagctcaggcaatccaccctccttggcctcccaaagtgctgggattacaggtgtgagccactgcacccagcccaccactttaattttttacactctacccttttggtcaaaatttgctcaatctgcaagcttaaaatgtgtcatgacaaacacatgcaagcacatactcacacatagatgcagaaacagcgtctaaacttataaaagcacagtttatgtaaatgtgtgcacttcttctccctaggtggtaaaccacatttcaaaacaacccaaataaaactgaacaaagcttcttcctcttagactttttagaaaatctttcagtgctgagtcactaagctgccaagttctcattgtgggaactatgcctttggatgtaatgatttcttctaagacaatgggcggaggtgtagttattgcagacatctgaaatatgtaatgtttcttccagattctggaaattctcttattctctgtggttggtggtggtggtgggatgtgtgtgtgtgtgtgtgtgtgtgtgtgtgtgtgtgtgtagggatcaggatgcgggaggagctgggttctgcttgtattggttctctgttttgcattgaatagtgtgtttccttgtatggctatctatagcttttcaaggtcaccagaaattatcctgtttttcaccttctaaacaattagctggaatttttcaaaggaagacttttacaaagacccctaagctaaggtttactctagaaaggatgtcttaagacagggcacaggagttcagaggcattaagagctggtgcctgttgtcatgtagtgagtatgtgcctacatggtaaagctttgacgtgaacctcaagttcagggtccaaaatctgtgtgcctttttactttgcacatctgcattttctattctagcttggaatctgaaacattgacaagagctgcctgaaatgtatgtctgtggtgtgattagagttacgataagcaagtcaatagtgagatgaccttggagatgttgaacttttgtgagagaatgagttgtttttttgttttggtttttagtactttaacataatctacctttagtttaagtatcgctcacagttacctagttactgaagcaagcccccaaagaaatttggtttggcaacactttgttagcctcgtttttctctctacattgcattgctcgtgaagcattggatcatacgtacatttcagagtctagagggcctgtccttctgtggcccagatgtggtgctccctctagcatgcaggctcagaggccttggcccatcaccctggctcacgtgtgtctttctttctccccttgtccttccttggggcctccagctttctgcgggtgatgagccggtcaatgcccctcttcatgacgctggcctggatttactcagtggctgtgatcatcaagggcatcgtgtatgagaaggaggcacggctgaaagagaccatgcggatcatgggcctggacaacagcatcctctggtttagctggttcattagtagcctcattcctcttcttgtgagcgctggcctgctagtggtcatcctgaaggtaaggcagcctcactcgctcttccctgccaggaaactccgaaatagctcaacacgggctaagggaggagaagaagaaaaaaaatccaagcctctggtagagaaggggtcatacctgtcatttcctgcaatttcatccatttatagttggggaaagtgaggcccagagaggggcagtgacttgcccaaggtcaacccagccgggtagcagctaagtaggatgagagtgcagggttcatgctttccagataaccacatgctcaactgtgccatgctgtctcattggtagtggttcatggcagcatctgaaagctatttattttcttagatatattgggtggcgattcttcctaagtttctaagaacaataatcagaaggatatatattgttgcaggttagactgtctggaagcagaggctgaaatagagtttgatgtatgggtatttatgagggctcaatacctatggaagagatatggaagatgcaggattgggcagagggaggagttgaactgtgatatagggccaaccccgtggggcactctagagaatatgcagcttgttggagttgttcttcatcgagctgaaacatccagccctttgtgctcccccaaggcctccctcctgacaccacctacctcagccctctcaatcaatcactggatgtgggctgccctgggaaggtcgtgccccagggcctacatggctctctgctgctgtgacaaacccagagttgctgatgcctgaggccgtctactgacagctgggcaacaaggcttccctgaatggggactctgggcagtgcagttttgtgtctgaaccatacattaatatatttatatccgaattttctttctctgcaagcatttcatataaagacacatcaggtaaaaataaatgtttttgaagcaaaaggagtacaaagagataagaactaactaatttaatactagttaccatctgttacaaatagttcctactgattgccaaggactgtttaaacacatcacatgggcttcttcttctatcctcactaacccttttaacagacaaggaaatgaggctcaggaaggtcaaggactttattgaggttccacagtaggatacagttcttgctaaaagcaacccctccctcatgctctgttatctaactgcaaggggaaggtcagtggcagaggtagtggtcccatggttggtgcataagagctgctctgagacaactgcatgctggtgggtcctgcagacatgtacccatcagccggagataggctcaaaatatccacaagagtttggatgattgtgggaatgcagaatccatggtgatcaagagggaaagtcaagttgcctggccattttccttggcttttagacagaaaagttacgtgggatattatctcccacagctcttctgtggtgccaccagtcatagtccttatataaggagaaaccagttgaaattacctattgaagaaacaaagagcaaactcgcccactgaaatgcgtagaaagccctggactctgttgtattcataactctgccattatttttctgcgtagttttgggtaagtcacttatcttctttaggatggtaatgatcagttgcctcatcagaaagatgaacagcattacgcctctgcattgtctctaacatgagtaggaataaaccctgtcttttttctgtagatcatacaagtgagtgcttgggattgttgaggcagcacatttgatgtgtctcttccttcccagttaggaaacctgctgccctacagtgatcccagcgtggtgtttgtcttcctgtccgtgtttgctgtggtgacaatcctgcagtgcttcctgattagcacactcttctccagagccaacctggcagcagcctgtgggggcatcatctacttcacgctgtacctgccctacgtcctgtgtgtggcatggcaggactacgtgggcttcacactcaagatcttcgctgtgagtacctctggcctttcttcagtggctgtaggcatttgaccttcctttggagtccctgaataaaagcagcaagttgagaacagaagatgattgtcttttccaatgggacatgaaccttagctctagattctaagctctttaagggtaagggcaagcattgtgttttattaaattgtttacctttagtcttctcagtgaatcctggttgaattgaattgaatggaatttttccgagagccagactgcatcttgaactgggctggggataaatggcattgaggaatggcttcaggcaacagatgccatctctgccctttatctcccagctctgttggctatgttaagctcatgacaaagccaaggccacaaatagaactgaaaactcttgatgtcagagatgacctctcttgtcttccttgtgtccagtatggtgttt

SEQ ID NO: 115 - DNA, 4050 bp, Homo sapiens
ttggttttaggtactgggaccctggtcctcgagctgacccctttgaggacatgcggtacgtctgggggggcttcgcctacttgcaggatgtggtggagcaggcaatcatcagggtgctgacgggcaccgagaagaaaactggtgtctatatgcaacagatgccctatccctgttacgttgatgacatgtaagttacctgcaagccactgtttttaaccagtttatactgtgccagatgggggtgtatatatgtgtgtgcatgtgcatgcatgtgtgaatgatctggaaataagatgccagatgtaagttgtcaacagttgcagccacatgacagacatagatatatgtgcacacactagtaaacctctttccttctcatccatggttgccacttttatctttttatttttatttttttttttgagatggagtctcgctctgacgcccaggctggagtgcagtggctcgatctcggctcactgcaacctttgcctcccgggttcaagctattctcctgcctcagcctccacagtagctgggactacaggctcatgctgccacgcccggctgactttttgtattttagtagagacgaggtttcaccatgttacccaggctagacttcaactcctgagctcaggcaatccaccctccttggcctcccaaagtgctgggattacaggtgtgagccactgcacccagcccaccactttaattttttacactctacccttttggtcaaaatttgctcaatctgcaagcttaaaatgtgtcatgacaaacacatgcaagcacatactcacacatagatgcagaaacagcgtctaaacttataaaagcacagtttatgtaaatgtgtgcacttcttctccctaggtggtaaaccacatttcaaaacaacccaaataaaactgaacaaagcttcttcctcttagactttttagaaaatctttcagtgctgagtcactaagctgccaagttctcattgtgggaactatgcctttggatgtaatgatttcttctaagacaatgggcggaggtgtagttattgcagacatctgaaatatgtaatgtttcttccagattctggaaattctcttattctctgtggttggtggtggtggtgggatgtgtgtgtgtgtgtgtgtgtgtgtgtgtgtgtgtgtgtagggatcaggatgcgggaggagctgggttctgcttgtattggttctctgttttgcattgaatagtgtgtttccttgtatggctatctatagcttttcaaggtcaccagaaattatcctgtttttcaccttctaaacaattagctggaatttttcaaaggaagacttttacaaagacccctaagctaaggtttactctagaaaggatgtcttaagacagggcacaggagttcagaggcattaagagctggtgcctgttgtcatgtagtgagtatgtgcctacatggtaaagctttgacgtgaacctcaagttcagggtccaaaatctgtgtgcctttttactttgcacatctgcattttctattctagcttggaatctgaaacattgacaagagctgcctgaaatgtatgtctgtggtgtgattagagttacgataagcaagtcaatagtgagatgaccttggagatgttgaacttttgtgagagaatgagttgtttttttgttttggtttttagtactttaacataatctacctttagtttaagtatcgctcacagttacctagttactgaagcaagcccccaaagaaatttggtttggcaacactttgttagcctcgtttttctctctacattgcattgctcgtgaagcattggatcatacgtacatttcagagtctagagggcctgtccttctgtggcccagatgtggtgctccctctagcatgcaggctcagaggccttggcccatcaccctggctcacgtgtgtctttctttctccccttgtccttccttggggcctccagctttctgcgggtgatgagccggtcaatgcccctcttcatgacgctggcctggatttactcagtggctgtgatcatcaagggcatcgtgtatgagaaggaggcacggctgaaagagaccatgcggatcatgggcctggacaacagcatcctctggtttagctggttcattagtagcctcattcctcttcttgtgagcgctggcctgctagtggtcatcctgaaggtaaggcagcctcactcgctcttccctgccaggaaactccgaaatagctcaacacgggctaagggaggagaagaagaaaaaaaatccaagcctctggtagagaaggggtcatacctgtcatttcctgcaatttcatccatttatagttggggaaagtgaggcccagagaggggcagtgacttgcccaaggtcaacccagccgggtagcagctaagtaggatgagagtgcagggttcatgctttccagataaccacatgctcaactgtgccatgctgtctcattggtagtggttcatggcagcatctgaaagctatttattttcttagatatattgggtggcgattcttcctaagtttctaagaacaataatcagaaggatatatattgttgcaggttagactgtctggaagcagaggctgaaatagagtttgatgtatgggtatttatgagggctcaatacctatggaagagatatggaagatgcaggattgggcagagggaggagttgaactgtgatatagggccaaccccgtggggcactctagagaatatgcagcttgttggagttgttcttcatcgagctgaaacatccagccctttgtgctcccccaaggcctccctcctgacaccacctacctcagccctctcaatcaatcactggatgtgggctgccctgggaaggtcgtgccccagggcctacatggctctctgctgctgtgacaaacccagagttgctgatgcctgaggccgtctactgacagctgggcaacaaggcttccctgaatggggactctgggcagtgcagttttgtgtctgaaccatacattaatatatttatatccgaattttctttctctgcaagcatttcatataaagacacatcaggtaaaaataaatgtttttgaagcaaaaggagtacaaagagataagaactaactaatttaatactagttaccatctgttacaaatagttcctactgattgccaaggactgtttaaacacatcacatgggcttcttcttctatcctcactaacccttttaacagacaaggaaatgaggctcaggaaggtcaaggactttattgaggttccacagtaggatacagttcttgctaaaagcaacccctccctcatgctctgttatctaactgcaaggggaaggtcagtggcagaggtagtggtcccatggttggtgcataagagctgctctgagacaactgcatgctggtgggtcctgcagacatgtacccatcagccggagataggctcaaaatatccacaagagtttggatgattgtgggaatgcagaatccatggtgatcaagagggaaagtcaagttgcctggccattttccttggcttttagacagaaaagttacgtgggatattatctcccacagctcttctgtggtgccaccagtcatagtccttatataaggagaaaccagttgaaattacctattgaagaaacaaagagcaaactcgcccactgaaatgcgtagaaagccctggactctgttgtattcataactctgccattatttttctgcgtagttttgggtaagtcacttatcttctttaggatggtaatgatcagttgcctcatcagaaagatgaacagcattacgcctctgcattgtctctaacatgagtaggaataaaccctgtcttttttctgtagatcatacaagtgagtgcttgggattgttgaggcagcacatttgatgtgtctcttccttcccagttaggaaacctgctgccctacagtgatcccagcgtggtgtttgtcttcctgtccgtgtttgctgtggtgacaatcctgcagtgcttcctgattagcacactcttctcc

SEQ ID NO: 116 - DNA, 4042 bp, Homo sapiens
agactggtctgactttgagtctcagctccacatctagtaatactatgaccaagccctggttaaaatcatgtttttttttcttcagcctcagtcttctcacatataaaatagggacactgtcatttacctcagttttctgtgaggataaaacaacgacagtgtatatgcaagtattttgtaaattttgtagtgctcctcaagatttagttggtgtttactacttgtactttctcactggaatggcagatgctgttggacagcagggacaatgaccacttttgggaacagcagttggatggcttagattggacagcccaagacatcgtggcgtttttggccaagcacccagaggatgtccagtccagtaatggttctgtgtacacctggagagaagctttcaacgagactaaccaggcaatccggaccatatctcgcttcatggaggtgaatctgttgctgggatcatttagaaaagacttaacggcttctttctctgagacgttacaataaggttcaggcaggaggcaagtttagaaataatgtatagtctcatttacaaaactatccctcaagcctaacacaggatttgataacaaaaggcacttaataaatgttagttgagtggttgaatgagtaaataaactctagctttagtaaattaactctagcttattctatataggctcaagagaatatttctacccattttcttctaggttttcctatctcagtgactaatggtagcaaagcattcccttaaaaaggcattatttgtgaaacttatctaaaatcgaattcgggtccaattaaatttttgaaattttatattaaaaattatattagtagggatgggtaagaggtgttttggtctggttggttggttagttgctatgactcagaattgctaagaaaacagaaaagtaagataagatcattgttttaacctcttttcctccacaaaatcaataaataacatatccctaaattactcttagaatttctcttaaattgcagtgaaaaaccaaaatccttcattcttggttgaaggttggaaaactacgttagagaggattagagagagaggatgagcaatcgtgtagtcagcccttgcctcctagtgtaggatttgtctcagccactgcttgttgtcctggctgccaacgttctcatgaaggctgttcttctatcagtgtgtcaacctgaacaagctagaacccatagcaacagaagtctggctcatcaacaagtccatggagctgctggatgagaggaagttctgggctggtattgtgttcactggaattactccaggcagcattgagctgccccatcatgtcaagtacaagatccgaatggacattgacaatgtggagaggacaaataaaatcaaggatgggtaagtggaatcccatcacaccagcctggtcttggggaggtccagagcacctattatattaggacaagaggtactttattttaactaaaaatttggtagaaatttcaacaacaacaaaaaaactcaacttggtgtcatgattttggtgaaattggtacatgacttgctggaaggtttttcataggtcataaaataacagtatcttttgatttagcatttctactcaagggaattaattccaggaattttggtggcaggcacctgtaatcccagctactcgggaggctgaggcaggagaattgcttgaacccaggaggcagaggttgcagtgagctaagatcgcatcattgcactcccgcctgggcaataagagtgaaactccatctcaaaaaaaaaaaaagatacaaaaatagaaaaaggggcttggtaagggtagtagggttttgggcaatttttttttttttttttttttattgtatggttctaaaggaatggttgattacctgtggtttggttttaggtactgggaccctggtcctcgagctgacccctttgaggacatgcggtacgtctgggggggcttcgcctacttgcaggatgtggtggagcaggcaatcatcagggtgctgacgggcaccgagaagaaaactggtgtctatatgcaacagatgccctatccctgttacgttgatgacatgtaagttacctgcaagccactgtttttaaccagtttatactgtgccagatgggggtgtatatatgtgtgtgcatgtgcatgcatgtgtgaatgatctggaaataagatgccagatgtaagttgtcaacagttgcagccacatgacagacatagatatatgtgcacacactagtaaacctctttccttctcatccatggttgccacttttatctttttatttttatttttttttttgagatggagtctcgctctgacgcccaggctggagtgcagtggctcgatctcggctcactgcaacctttgcctcccgggttcaagctattctcctgcctcagcctccacagtagctgggactacaggctcatgctgccacgcccggctgactttttgtattttagtagagacgaggtttcaccatgttacccaggctagacttcaactcctgagctcaggcaatccaccctccttggcctcccaaagtgctgggattacaggtgtgagccactgcacccagcccaccactttaattttttacactctacccttttggtcaaaatttgctcaatctgcaagcttaaaatgtgtcatgacaaacacatgcaagcacatactcacacatagatgcagaaacagcgtctaaacttataaaagcacagtttatgtaaatgtgtgcacttcttctccctaggtggtaaaccacatttcaaaacaacccaaataaaactgaacaaagcttcttcctcttagactttttagaaaatctttcagtgctgagtcactaagctgccaagttctcattgtgggaactatgcctttggatgtaatgatttcttctaagacaatgggcggaggtgtagttattgcagacatctgaaatatgtaatgtttcttccagattctggaaattctcttattctctgtggttggtggtggtggtgggatgtgtgtgtgtgtgtgtgtgtgtgtgtgtgtgtgtgtgtagggatcaggatgcgggaggagctgggttctgcttgtattggttctctgttttgcattgaatagtgtgtttccttgtatggctatctatagcttttcaaggtcaccagaaattatcctgtttttcaccttctaaacaattagctggaatttttcaaaggaagacttttacaaagacccctaagctaaggtttactctagaaaggatgtcttaagacagggcacaggagttcagaggcattaagagctggtgcctgttgtcatgtagtgagtatgtgcctacatggtaaagctttgacgtgaacctcaagttcagggtccaaaatctgtgtgcctttttactttgcacatctgcattttctattctagcttggaatctgaaacattgacaagagctgcctgaaatgtatgtctgtggtgtgattagagttacgataagcaagtcaatagtgagatgaccttggagatgttgaacttttgtgagagaatgagttgtttttttgttttggtttttagtactttaacataatctacctttagtttaagtatcgctcacagttacctagttactgaagcaagcccccaaagaaatttggtttggcaacactttgttagcctcgtttttctctctacattgcattgctcgtgaagcattggatcatacgtacatttcagagtctagagggcctgtccttctgtggcccagatgtggtgctccctctagcatgcaggctcagaggccttggcccatcaccctggctcacgtgtgtctttctttctccccttgtccttccttggggcctccagctttctgcgggtgatgagccggtcaatgcccctcttcatgacgctggcctggatttactcagtggctgtgatcatcaagggcatcgtgtatgagaaggaggcacggctgaaagagaccatgcggatcatgggcctggacaacagcatcctctggtttagctgg

SEQ ID NO: 117 - DNA, 4037 bp, Homo sapiens
atggagttgtgtaaggtgaagcatatacactattcaacatagtaactatataaaggaagtattgttgttgttactgtagttaataccattaagtgagatgtttcgtatagtggaaagcacatggactctgaattcagactggtctgactttgagtctcagctccacatctagtaatactatgaccaagccctggttaaaatcatgtttttttttcttcagcctcagtcttctcacatataaaatagggacactgtcatttacctcagttttctgtgaggataaaacaacgacagtgtatatgcaagtattttgtaaattttgtagtgctcctcaagatttagttggtgtttactacttgtactttctcactggaatggcagatgctgttggacagcagggacaatgaccacttttgggaacagcagttggatggcttagattggacagcccaagacatcgtggcgtttttggccaagcacccagaggatgtccagtccagtaatggttctgtgtacacctggagagaagctttcaacgagactaaccaggcaatccggaccatatctcgcttcatggaggtgaatctgttgctgggatcatttagaaaagacttaacggcttctttctctgagacgttacaataaggttcaggcaggaggcaagtttagaaataatgtatagtctcatttacaaaactatccctcaagcctaacacaggatttgataacaaaaggcacttaataaatgttagttgagtggttgaatgagtaaataaactctagctttagtaaattaactctagcttattctatataggctcaagagaatatttctacccattttcttctaggttttcctatctcagtgactaatggtagcaaagcattcccttaaaaaggcattatttgtgaaacttatctaaaatcgaattcgggtccaattaaatttttgaaattttatattaaaaattatattagtagggatgggtaagaggtgttttggtctggttggttggttagttgctatgactcagaattgctaagaaaacagaaaagtaagataagatcattgttttaacctcttttcctccacaaaatcaataaataacatatccctaaattactcttagaatttctcttaaattgcagtgaaaaaccaaaatccttcattcttggttgaaggttggaaaactacgttagagaggattagagagagaggatgagcaatcgtgtagtcagcccttgcctcctagtgtaggatttgtctcagccactgcttgttgtcctggctgccaacgttctcatgaaggctgttcttctatcagtgtgtcaacctgaacaagctagaacccatagcaacagaagtctggctcatcaacaagtccatggagctgctggatgagaggaagttctgggctggtattgtgttcactggaattactccaggcagcattgagctgccccatcatgtcaagtacaagatccgaatggacattgacaatgtggagaggacaaataaaatcaaggatgggtaagtggaatcccatcacaccagcctggtcttggggaggtccagagcacctattatattaggacaagaggtactttattttaactaaaaatttggtagaaatttcaacaacaacaaaaaaactcaacttggtgtcatgattttggtgaaattggtacatgacttgctggaaggtttttcataggtcataaaataacagtatcttttgatttagcatttctactcaagggaattaattccaggaattttggtggcaggcacctgtaatcccagctactcgggaggctgaggcaggagaattgcttgaacccaggaggcagaggttgcagtgagctaagatcgcatcattgcactcccgcctgggcaataagagtgaaactccatctcaaaaaaaaaaaaagatacaaaaatagaaaaaggggcttggtaagggtagtagggttttgggcaatttttttttttttttttttttattgtatggttctaaaggaatggttgattacctgtggtttggttttaggtactgggaccctggtcctcgagctgacccctttgaggacatgcggtacgtctgggggggcttcgcctacttgcaggatgtggtggagcaggcaatcatcagggtgctgacgggcaccgagaagaaaactggtgtctatatgcaacagatgccctatccctgttacgttgatgacatgtaagttacctgcaagccactgtttttaaccagtttatactgtgccagatgggggtgtatatatgtgtgtgcatgtgcatgcatgtgtgaatgatctggaaataagatgccagatgtaagttgtcaacagttgcagccacatgacagacatagatatatgtgcacacactagtaaacctctttccttctcatccatggttgccacttttatctttttatttttatttttttttttgagatggagtctcgctctgacgcccaggctggagtgcagtggctcgatctcggctcactgcaacctttgcctcccgggttcaagctattctcctgcctcagcctccacagtagctgggactacaggctcatgctgccacgcccggctgactttttgtattttagtagagacgaggtttcaccatgttacccaggctagacttcaactcctgagctcaggcaatccaccctccttggcctcccaaagtgctgggattacaggtgtgagccactgcacccagcccaccactttaattttttacactctacccttttggtcaaaatttgctcaatctgcaagcttaaaatgtgtcatgacaaacacatgcaagcacatactcacacatagatgcagaaacagcgtctaaacttataaaagcacagtttatgtaaatgtgtgcacttcttctccctaggtggtaaaccacatttcaaaacaacccaaataaaactgaacaaagcttcttcctcttagactttttagaaaatctttcagtgctgagtcactaagctgccaagttctcattgtgggaactatgcctttggatgtaatgatttcttctaagacaatgggcggaggtgtagttattgcagacatctgaaatatgtaatgtttcttccagattctggaaattctcttattctctgtggttggtggtggtggtgggatgtgtgtgtgtgtgtgtgtgtgtgtgtgtgtgtgtgtgtagggatcaggatgcgggaggagctgggttctgcttgtattggttctctgttttgcattgaatagtgtgtttccttgtatggctatctatagcttttcaaggtcaccagaaattatcctgtttttcaccttctaaacaattagctggaatttttcaaaggaagacttttacaaagacccctaagctaaggtttactctagaaaggatgtcttaagacagggcacaggagttcagaggcattaagagctggtgcctgttgtcatgtagtgagtatgtgcctacatggtaaagctttgacgtgaacctcaagttcagggtccaaaatctgtgtgcctttttactttgcacatctgcattttctattctagcttggaatctgaaacattgacaagagctgcctgaaatgtatgtctgtggtgtgattagagttacgataagcaagtcaatagtgagatgaccttggagatgttgaacttttgtgagagaatgagttgtttttttgttttggtttttagtactttaacataatctacctttagtttaagtatcgctcacagttacctagttactgaagcaagcccccaaagaaatttggtttggcaacactttgttagcctcgtttttctctctacattgcattgctcgtgaagcattggatcatacgtacatttcagagtctagagggcctgtccttctgtggcccagatgtggtgctccctctagcatgcaggctcagaggccttggcccatcaccctggctcacgtgtgtctttctttctccccttgtccttccttggggcctccagctttctgcgggtgatgagccggt

SEQ ID NO: 118 - DNA, 4045 bp, Homo sapiens
ttaggttttatgtgggatcaacagactgggtctcaaaagaggaaggtgatagaacacagtggggagggggaggtgcactagaaacagagggcctatgctttcattctggctttgctacttaatagctgtgtgacccaatcttagagacttaacctctctgaacttccattttctcatgtataaaatgggaaatattaaaggatactcactgggctggtggcttgtgcctgtaatcccagcacttggggaggttgaggtgggaggatcacttgagcccaggtgttcaagaccagcccaggcaacatggcaagactctgtctctatgaaaaaattaaaaattagccaggtgtggtggtgtgcacctgtagtcttagctacttggtaggctgagatgggaggatcacttgggcttgggaggtcaaggctgcggtgagctgtgattccatcactgcactccagcccgggcggcagagcgagacactgaatccaaacgacaacaacaacaaaaggcaaaaaaataaaagtgccctctttatggagttgtgtaaggtgaagcatatacactattcaacatagtaactatataaaggaagtattgttgttgttactgtagttaataccattaagtgagatgtttcgtatagtggaaagcacatggactctgaattcagactggtctgactttgagtctcagctccacatctagtaatactatgaccaagccctggttaaaatcatgtttttttttcttcagcctcagtcttctcacatataaaatagggacactgtcatttacctcagttttctgtgaggataaaacaacgacagtgtatatgcaagtattttgtaaattttgtagtgctcctcaagatttagttggtgtttactacttgtactttctcactggaatggcagatgctgttggacagcagggacaatgaccacttttgggaacagcagttggatggcttagattggacagcccaagacatcgtggcgtttttggccaagcacccagaggatgtccagtccagtaatggttctgtgtacacctggagagaagctttcaacgagactaaccaggcaatccggaccatatctcgcttcatggaggtgaatctgttgctgggatcatttagaaaagacttaacggcttctttctctgagacgttacaataaggttcaggcaggaggcaagtttagaaataatgtatagtctcatttacaaaactatccctcaagcctaacacaggatttgataacaaaaggcacttaataaatgttagttgagtggttgaatgagtaaataaactctagctttagtaaattaactctagcttattctatataggctcaagagaatatttctacccattttcttctaggttttcctatctcagtgactaatggtagcaaagcattcccttaaaaaggcattatttgtgaaacttatctaaaatcgaattcgggtccaattaaatttttgaaattttatattaaaaattatattagtagggatgggtaagaggtgttttggtctggttggttggttagttgctatgactcagaattgctaagaaaacagaaaagtaagataagatcattgttttaacctcttttcctccacaaaatcaataaataacatatccctaaattactcttagaatttctcttaaattgcagtgaaaaaccaaaatccttcattcttggttgaaggttggaaaactacgttagagaggattagagagagaggatgagcaatcgtgtagtcagcccttgcctcctagtgtaggatttgtctcagccactgcttgttgtcctggctgccaacgttctcatgaaggctgttcttctatcagtgtgtcaacctgaacaagctagaacccatagcaacagaagtctggctcatcaacaagtccatggagctgctggatgagaggaagttctgggctggtattgtgttcactggaattactccaggcagcattgagctgccccatcatgtcaagtacaagatccgaatggacattgacaatgtggagaggacaaataaaatcaaggatgggtaagtggaatcccatcacaccagcctggtcttggggaggtccagagcacctattatattaggacaagaggtactttattttaactaaaaatttggtagaaatttcaacaacaacaaaaaaactcaacttggtgtcatgattttggtgaaattggtacatgacttgctggaaggtttttcataggtcataaaataacagtatcttttgatttagcatttctactcaagggaattaattccaggaattttggtggcaggcacctgtaatcccagctactcgggaggctgaggcaggagaattgcttgaacccaggaggcagaggttgcagtgagctaagatcgcatcattgcactcccgcctgggcaataagagtgaaactccatctcaaaaaaaaaaaaagatacaaaaatagaaaaaggggcttggtaagggtagtagggttttgggcaatttttttttttttttttttttattgtatggttctaaaggaatggttgattacctgtggtttggttttaggtactgggaccctggtcctcgagctgacccctttgaggacatgcggtacgtctgggggggcttcgcctacttgcaggatgtggtggagcaggcaatcatcagggtgctgacgggcaccgagaagaaaactggtgtctatatgcaacagatgccctatccctgttacgttgatgacatgtaagttacctgcaagccactgtttttaaccagtttatactgtgccagatgggggtgtatatatgtgtgtgcatgtgcatgcatgtgtgaatgatctggaaataagatgccagatgtaagttgtcaacagttgcagccacatgacagacatagatatatgtgcacacactagtaaacctctttccttctcatccatggttgccacttttatctttttatttttatttttttttttgagatggagtctcgctctgacgcccaggctggagtgcagtggctcgatctcggctcactgcaacctttgcctcccgggttcaagctattctcctgcctcagcctccacagtagctgggactacaggctcatgctgccacgcccggctgactttttgtattttagtagagacgaggtttcaccatgttacccaggctagacttcaactcctgagctcaggcaatccaccctccttggcctcccaaagtgctgggattacaggtgtgagccactgcacccagcccaccactttaattttttacactctacccttttggtcaaaatttgctcaatctgcaagcttaaaatgtgtcatgacaaacacatgcaagcacatactcacacatagatgcagaaacagcgtctaaacttataaaagcacagtttatgtaaatgtgtgcacttcttctccctaggtggtaaaccacatttcaaaacaacccaaataaaactgaacaaagcttcttcctcttagactttttagaaaatctttcagtgctgagtcactaagctgccaagttctcattgtgggaactatgcctttggatgtaatgatttcttctaagacaatgggcggaggtgtagttattgcagacatctgaaatatgtaatgtttcttccagattctggaaattctcttattctctgtggttggtggtggtggtgggatgtgtgtgtgtgtgtgtgtgtgtgtgtgtgtgtgtgtgtagggatcaggatgcgggaggagctgggttctgcttgtattggttctctgttttgcattgaatagtgtgtttccttgtatggctatctatagcttttcaaggtcaccagaaattatcctgtttttcaccttctaaacaattagctggaatttttcaaaggaagacttttacaaagacccctaagctaaggtttactctagaaaggatgtcttaagacagggcacaggagttcagaggcattaagagctggtgcctgttgtcatgtagtgagtatgtgcctacatggtaaagctttgacgtgaa

SEQ ID NO: 119 - DNA, 4070 bp, Homo sapiens
cttggaaccctctgacactgatttgctctcttttctgagctgcttttagccacccatcctcgggacctgttttctctctgcctccacccctgcgggcagtcttaggtctcctgcccctcacgagcaccccagagaggccacgtgctcagtgatctcagtgggcgcatctttctagtcttgctattctttttggccatgttgttcagaaaccatactgggcagggccgacttcaccctaaaggctgcgtctcttcactctgcttttgtttgttccaaataaagtggcttcagaattgctaaccctagcctctgtgaacttgtgaggtacaattttgtgtctgttatgttaacaaaaatacatacataccttcctggtgatggtataaattgctattctctattggaaagcaatttggaatgaaaatttaaagaaccattttaaaatatgctatcctgcgtacctccattccacccacccccagggatgtagcctactgaaataattttaaagaagtcaccatatgagagaaaatgttattgctatattgttattgtgagaaattggaaatagactaaatgttcagcactataggaataattaatgaaattacatatactctatacaatcattatgctgccattgaaataataaatacaaaggcgcaaggggggaaaagcttataatgttagtgaaactaagactgatttttttataaagcagcagttttcagacccttggagactccaattcggtagaaccagagcttcatcttctctgtcgaagctgtgacaggagttgcaaatgcctctcctttttgctgagtttgcagctgctgtttttccggcagcacatctgtgcaggcctctgcctcggcccctctggatctgctgattgagcagcggattgatctgtccttctctttcgtgttgacccatgtgaggaaccaactggcaagggaacaagaaatggaaataggcctcctttgcatcatgacctgtacatcctgcaattggaaaagattgtactttagttggtttaaccagcagcattatttttctaaactaagcagtaagaaggaattaggttttatgtgggatcaacagactgggtctcaaaagaggaaggtgatagaacacagtggggagggggaggtgcactagaaacagagggcctatgctttcattctggctttgctacttaatagctgtgtgacccaatcttagagacttaacctctctgaacttccattttctcatgtataaaatgggaaatattaaaggatactcactgggctggtggcttgtgcctgtaatcccagcacttggggaggttgaggtgggaggatcacttgagcccaggtgttcaagaccagcccaggcaacatggcaagactctgtctctatgaaaaaattaaaaattagccaggtgtggtggtgtgcacctgtagtcttagctacttggtaggctgagatgggaggatcacttgggcttgggaggtcaaggctgcggtgagctgtgattccatcactgcactccagcccgggcggcagagcgagacactgaatccaaacgacaacaacaacaaaaggcaaaaaaataaaagtgccctctttatggagttgtgtaaggtgaagcatatacactattcaacatagtaactatataaaggaagtattgttgttgttactgtagttaataccattaagtgagatgtttcgtatagtggaaagcacatggactctgaattcagactggtctgactttgagtctcagctccacatctagtaatactatgaccaagccctggttaaaatcatgtttttttttcttcagcctcagtcttctcacatataaaatagggacactgtcatttacctcagttttctgtgaggataaaacaacgacagtgtatatgcaagtattttgtaaattttgtagtgctcctcaagatttagttggtgtttactacttgtactttctcactggaatggcagatgctgttggacagcagggacaatgaccacttttgggaacagcagttggatggcttagattggacagcccaagacatcgtggcgtttttggccaagcacccagaggatgtccagtccagtaatggttctgtgtacacctggagagaagctttcaacgagactaaccaggcaatccggaccatatctcgcttcatggaggtgaatctgttgctgggatcatttagaaaagacttaacggcttctttctctgagacgttacaataaggttcaggcaggaggcaagtttagaaataatgtatagtctcatttacaaaactatccctcaagcctaacacaggatttgataacaaaaggcacttaataaatgttagttgagtggttgaatgagtaaataaactctagctttagtaaattaactctagcttattctatataggctcaagagaatatttctacccattttcttctaggttttcctatctcagtgactaatggtagcaaagcattcccttaaaaaggcattatttgtgaaacttatctaaaatcgaattcgggtccaattaaatttttgaaattttatattaaaaattatattagtagggatgggtaagaggtgttttggtctggttggttggttagttgctatgactcagaattgctaagaaaacagaaaagtaagataagatcattgttttaacctcttttcctccacaaaatcaataaataacatatccctaaattactcttagaatttctcttaaattgcagtgaaaaaccaaaatccttcattcttggttgaaggttggaaaactacgttagagaggattagagagagaggatgagcaatcgtgtagtcagcccttgcctcctagtgtaggatttgtctcagccactgcttgttgtcctggctgccaacgttctcatgaaggctgttcttctatcagtgtgtcaacctgaacaagctagaacccatagcaacagaagtctggctcatcaacaagtccatggagctgctggatgagaggaagttctgggctggtattgtgttcactggaattactccaggcagcattgagctgccccatcatgtcaagtacaagatccgaatggacattgacaatgtggagaggacaaataaaatcaaggatgggtaagtggaatcccatcacaccagcctggtcttggggaggtccagagcacctattatattaggacaagaggtactttattttaactaaaaatttggtagaaatttcaacaacaacaaaaaaactcaacttggtgtcatgattttggtgaaattggtacatgacttgctggaaggtttttcataggtcataaaataacagtatcttttgatttagcatttctactcaagggaattaattccaggaattttggtggcaggcacctgtaatcccagctactcgggaggctgaggcaggagaattgcttgaacccaggaggcagaggttgcagtgagctaagatcgcatcattgcactcccgcctgggcaataagagtgaaactccatctcaaaaaaaaaaaaagatacaaaaatagaaaaaggggcttggtaagggtagtagggttttgggcaatttttttttttttttttttttattgtatggttctaaaggaatggttgattacctgtggtttggttttaggtactgggaccctggtcctcgagctgacccctttgaggacatgcggtacgtctgggggggcttcgcctacttgcaggatgtggtggagcaggcaatcatcagggtgctgacgggcaccgagaagaaaactggtgtctatatgcaacagatgccctatccctgttacgttgatgacatgtaagttacctgcaagccactgtttttaaccagtttatactgtgccagatgggggtgtatatatgtgtgtgcatgtgcatgcatgtgtgaatgatctggaaataagatgccagatgtaagttgtcaacagttgcagccacatgacagacatagatatatgtgcacacactagtaaacctctttccttctcatccatggttgccacttttatctttttatttttatttt

SEQ ID NO: 120 - DNA, 4048 bp, Homo sapiens
ctttaaaaacaaaggagtttatactgagaaaagcataaacagtgatttgtatggattcacactgactaatatagctcatgccattaaagtggggtctcttctctaaaggagggttatatgatctagccccgtagacctaagtgtggtttcagacctgttcttcctggtcctctccttggaatccatatttctactagttggactttttctgtttgtctggctctcagaggattataggaggccctgtgaagtgactcagtgaattttgatttgtgggcaagtagatggttccctagtctgaaattgactttgccttaggtgcttcaattcttcataagctcccagttcttaaaggacaagatccttgtaaacatggcaatggcattcattaggaatctagctgggaaaatccagtgtgtatgcttggaaatgagggatctggggctggagagaaaggcatgggcatgccttggagggacttgtgtgtcaagctgaggacctttactttaagctctaggggaccaggcaaggggagatgtagatacgttactctgatggggtggatgaattgaagaaggatgaggcaagaatgaaggcagagaccagggaggaggctctccaagtggccaaggcataaagcaagaaatgaggcctggtgactgcttagtggcagagcagtgaaagagagggaggcatcaaagtgagtctcgatttctagctgggtgggtggtagcgatgtccagtaggccagtggctactgaggtctgcagtggaggagggtggttgggctggagacagatgatgagggagtcatcagcctgtgggtggaagaaaagggaacctcttccaactgttttctttgcttcttccctctctttctctttttttttttttttggacagagtcttgctctgtcacccaggctgaaatgcagtggcatgatcttggctcaccacagcctccgcctcctgggttcaagcaattctcctgtctcagcctccagagtagctgggattacaggcacatatcactgtgcccggctaatttttgtattttcagtggagatgggatttcaccatgttggtcgggctggaatgaactcctgacctcaagtgatccacctgcctcagcctcccaaagtgttgggattacaggcatgagccaccgcgcccggcctttcttccctctcttaaagagtgtttatttaattccacaaacatgagcttgtcaccccctgtagcctggcatctcctacacgaggtgatggctgaggcttctgcttctgctggggtagctctgatctttctgctttctctggcactgtctacccatgttgcctcaccccacaggtcccagggcacctctctcgggcaagtcttggaaccctctgacactgatttgctctcttttctgagctgcttttagccacccatcctcgggacctgttttctctctgcctccacccctgcgggcagtcttaggtctcctgcccctcacgagcaccccagagaggccacgtgctcagtgatctcagtgggcgcatctttctagtcttgctattctttttggccatgttgttcagaaaccatactgggcagggccgacttcaccctaaaggctgcgtctcttcactctgcttttgtttgttccaaataaagtggcttcagaattgctaaccctagcctctgtgaacttgtgaggtacaattttgtgtctgttatgttaacaaaaatacatacataccttcctggtgatggtataaattgctattctctattggaaagcaatttggaatgaaaatttaaagaaccattttaaaatatgctatcctgcgtacctccattccacccacccccagggatgtagcctactgaaataattttaaagaagtcaccatatgagagaaaatgttattgctatattgttattgtgagaaattggaaatagactaaatgttcagcactataggaataattaatgaaattacatatactctatacaatcattatgctgccattgaaataataaatacaaaggcgcaaggggggaaaagcttataatgttagtgaaactaagactgatttttttataaagcagcagttttcagacccttggagactccaattcggtagaaccagagcttcatcttctctgtcgaagctgtgacaggagttgcaaatgcctctcctttttgctgagtttgcagctgctgtttttccggcagcacatctgtgcaggcctctgcctcggcccctctggatctgctgattgagcagcggattgatctgtccttctctttcgtgttgacccatgtgaggaaccaactggcaagggaacaagaaatggaaataggcctcctttgcatcatgacctgtacatcctgcaattggaaaagattgtactttagttggtttaaccagcagcattatttttctaaactaagcagtaagaaggaattaggttttatgtgggatcaacagactgggtctcaaaagaggaaggtgatagaacacagtggggagggggaggtgcactagaaacagagggcctatgctttcattctggctttgctacttaatagctgtgtgacccaatcttagagacttaacctctctgaacttccattttctcatgtataaaatgggaaatattaaaggatactcactgggctggtggcttgtgcctgtaatcccagcacttggggaggttgaggtgggaggatcacttgagcccaggtgttcaagaccagcccaggcaacatggcaagactctgtctctatgaaaaaattaaaaattagccaggtgtggtggtgtgcacctgtagtcttagctacttggtaggctgagatgggaggatcacttgggcttgggaggtcaaggctgcggtgagctgtgattccatcactgcactccagcccgggcggcagagcgagacactgaatccaaacgacaacaacaacaaaaggcaaaaaaataaaagtgccctctttatggagttgtgtaaggtgaagcatatacactattcaacatagtaactatataaaggaagtattgttgttgttactgtagttaataccattaagtgagatgtttcgtatagtggaaagcacatggactctgaattcagactggtctgactttgagtctcagctccacatctagtaatactatgaccaagccctggttaaaatcatgtttttttttcttcagcctcagtcttctcacatataaaatagggacactgtcatttacctcagttttctgtgaggataaaacaacgacagtgtatatgcaagtattttgtaaattttgtagtgctcctcaagatttagttggtgtttactacttgtactttctcactggaatggcagatgctgttggacagcagggacaatgaccacttttgggaacagcagttggatggcttagattggacagcccaagacatcgtggcgtttttggccaagcacccagaggatgtccagtccagtaatggttctgtgtacacctggagagaagctttcaacgagactaaccaggcaatccggaccatatctcgcttcatggaggtgaatctgttgctgggatcatttagaaaagacttaacggcttctttctctgagacgttacaataaggttcaggcaggaggcaagtttagaaataatgtatagtctcatttacaaaactatccctcaagcctaacacaggatttgataacaaaaggcacttaataaatgttagttgagtggttgaatgagtaaataaactctagctttagtaaattaactctagcttattctatataggctcaagagaatatttctacccattttcttctaggttttcctatctcagtgactaatggtagcaaagcattcccttaaaaaggcattatttgtgaaacttatctaaaatcgaattcgggtccaattaaatttttgaaattttatattaaaaattatattagtagggatgggtaagaggtgttttggtctggttggttggttagttgctatgactcagaattgctaagaaaacagaaaagta

SEQ ID NO: 121 - DNA, 4045 bp, Homo sapiens
gatgaagaatttggagtctagtcctctttcccgcattatctggaaagctctgaagccgctgctcgttgggaagatcctgtatacacctgacactccagccacaaggcaggtcatggctgaggtaagctgcccccagcccaagactccctccccagaatctccccagaactgggggcaaaaaactcaaggtagcttcagaggtgtgcgctaagtatactcacggctcttctggaattcccagagtgaaaacctcaagtctgatgcagaccagagctgggccagctccccagtcgtgggtatagaatcatagttacaagcaggcatttcttggggatggggaggactggcacagggctgctgtgatggggtatcttttcagggaggagccaaacgctcattgtctgtgcttctcctcctttttctgcggtccctggctccccacctgactccaggtgaacaagaccttccaggaactggctgtgttccatgatctggaaggcatgtgggaggaactcagccccaagatctggaccttcatggagaacagccaagaaatggaccttgtccgggtgagtgtccctcccattattaccatgtgcctgcttgatactggagaggtgagtttctggtcactttcccaggtgtgagtgaggtgagaattctttcagtttatctagctgggggaatgtagtgagcatagctaaagtcacagggcaccacctctccagaagtacaggccatggtgcagagataacgctgtgcatatcagcatccatgccactcacggtcaaatagcagttttctgcaaaacttagtgagggctggtgtttggaagtggagttgagtaattgcagtaccctattttcctttttggctgcagcctctcagccagccacagcatctccctgtgtcttggtaggttttggaaagaagtgtgggagcaaaagcatgatgttacatgtagactggcctgagatactcattctcagggcactgtgtgaatgatgagctgctgttactgtgtggaggggaaatgcacttagtgcttcagagccacttgaaagggataagtgctctagagacaattgggttcaaatgtggagcaggctgagcaagaacagaatgtctcctttgcctgagcctgagtgctgttaatcacatcttcctgccttgggctgagttagagaatcattagactatttcctgtttccatggtgagggaggcctcttccttttgtctctgctccccttaagaagcaggtgaggattttgccaggtttcttgttttgaaccttattgactttaagggcggctgggttttagagactgtacctacctagggggaacacttccgaagtttaggactattccctgatccgctgggaggcaggttactgaggaagtccctttaaaaacaaaggagtttatactgagaaaagcataaacagtgatttgtatggattcacactgactaatatagctcatgccattaaagtggggtctcttctctaaaggagggttatatgatctagccccgtagacctaagtgtggtttcagacctgttcttcctggtcctctccttggaatccatatttctactagttggactttttctgtttgtctggctctcagaggattataggaggccctgtgaagtgactcagtgaattttgatttgtgggcaagtagatggttccctagtctgaaattgactttgccttaggtgcttcaattcttcataagctcccagttcttaaaggacaagatccttgtaaacatggcaatggcattcattaggaatctagctgggaaaatccagtgtgtatgcttggaaatgagggatctggggctggagagaaaggcatgggcatgccttggagggacttgtgtgtcaagctgaggacctttactttaagctctaggggaccaggcaaggggagatgtagatacgttactctgatggggtggatgaattgaagaaggatgaggcaagaatgaaggcagagaccagggaggaggctctccaagtggccaaggcataaagcaagaaatgaggcctggtgactgcttagtggcagagcagtgaaagagagggaggcatcaaagtgagtctcgatttctagctgggtgggtggtagcgatgtccagtaggccagtggctactgaggtctgcagtggaggagggtggttgggctggagacagatgatgagggagtcatcagcctgtgggtggaagaaaagggaacctcttccaactgttttctttgcttcttccctctctttctctttttttttttttttggacagagtcttgctctgtcacccaggctgaaatgcagtggcatgatcttggctcaccacagcctccgcctcctgggttcaagcaattctcctgtctcagcctccagagtagctgggattacaggcacatatcactgtgcccggctaatttttgtattttcagtggagatgggatttcaccatgttggtcgggctggaatgaactcctgacctcaagtgatccacctgcctcagcctcccaaagtgttgggattacaggcatgagccaccgcgcccggcctttcttccctctcttaaagagtgtttatttaattccacaaacatgagcttgtcaccccctgtagcctggcatctcctacacgaggtgatggctgaggcttctgcttctgctggggtagctctgatctttctgctttctctggcactgtctacccatgttgcctcaccccacaggtcccagggcacctctctcgggcaagtcttggaaccctctgacactgatttgctctcttttctgagctgcttttagccacccatcctcgggacctgttttctctctgcctccacccctgcgggcagtcttaggtctcctgcccctcacgagcaccccagagaggccacgtgctcagtgatctcagtgggcgcatctttctagtcttgctattctttttggccatgttgttcagaaaccatactgggcagggccgacttcaccctaaaggctgcgtctcttcactctgcttttgtttgttccaaataaagtggcttcagaattgctaaccctagcctctgtgaacttgtgaggtacaattttgtgtctgttatgttaacaaaaatacatacataccttcctggtgatggtataaattgctattctctattggaaagcaatttggaatgaaaatttaaagaaccattttaaaatatgctatcctgcgtacctccattccacccacccccagggatgtagcctactgaaataattttaaagaagtcaccatatgagagaaaatgttattgctatattgttattgtgagaaattggaaatagactaaatgttcagcactataggaataattaatgaaattacatatactctatacaatcattatgctgccattgaaataataaatacaaaggcgcaaggggggaaaagcttataatgttagtgaaactaagactgatttttttataaagcagcagttttcagacccttggagactccaattcggtagaaccagagcttcatcttctctgtcgaagctgtgacaggagttgcaaatgcctctcctttttgctgagtttgcagctgctgtttttccggcagcacatctgtgcaggcctctgcctcggcccctctggatctgctgattgagcagcggattgatctgtccttctctttcgtgttgacccatgtgaggaaccaactggcaagggaacaagaaatggaaataggcctcctttgcatcatgacctgtacatcctgcaattggaaaagattgtactttagttggtttaaccagcagcattatttttctaaactaagcagtaagaaggaattaggttttatgtgggatcaacagactgggtctcaaaagaggaaggtgatagaacacagtggggagggggaggtgcactagaaacagagggcctatgctttcattctggctttgctacttaatagctgtgtgacccaatcttagagacttaacctctctgaacttccattttctcatgtataa

SEQ ID NO: 122 - DNA, 4078 bp, Homo sapiens
agataagttacttattatatgactagtagtggtagagctggggtttcaactaagaactctctggctccaaagcccttgtaagtttctatcagtatatgaccatgcatatgagcatttgtctctcctcttcttcatagctccttactgcaatgatttgatgaagaatttggagtctagtcctctttcccgcattatctggaaagctctgaagccgctgctcgttgggaagatcctgtatacacctgacactccagccacaaggcaggtcatggctgaggtaagctgcccccagcccaagactccctccccagaatctccccagaactgggggcaaaaaactcaaggtagcttcagaggtgtgcgctaagtatactcacggctcttctggaattcccagagtgaaaacctcaagtctgatgcagaccagagctgggccagctccccagtcgtgggtatagaatcatagttacaagcaggcatttcttggggatggggaggactggcacagggctgctgtgatggggtatcttttcagggaggagccaaacgctcattgtctgtgcttctcctcctttttctgcggtccctggctccccacctgactccaggtgaacaagaccttccaggaactggctgtgttccatgatctggaaggcatgtgggaggaactcagccccaagatctggaccttcatggagaacagccaagaaatggaccttgtccgggtgagtgtccctcccattattaccatgtgcctgcttgatactggagaggtgagtttctggtcactttcccaggtgtgagtgaggtgagaattctttcagtttatctagctgggggaatgtagtgagcatagctaaagtcacagggcaccacctctccagaagtacaggccatggtgcagagataacgctgtgcatatcagcatccatgccactcacggtcaaatagcagttttctgcaaaacttagtgagggctggtgtttggaagtggagttgagtaattgcagtaccctattttcctttttggctgcagcctctcagccagccacagcatctccctgtgtcttggtaggttttggaaagaagtgtgggagcaaaagcatgatgttacatgtagactggcctgagatactcattctcagggcactgtgtgaatgatgagctgctgttactgtgtggaggggaaatgcacttagtgcttcagagccacttgaaagggataagtgctctagagacaattgggttcaaatgtggagcaggctgagcaagaacagaatgtctcctttgcctgagcctgagtgctgttaatcacatcttcctgccttgggctgagttagagaatcattagactatttcctgtttccatggtgagggaggcctcttccttttgtctctgctccccttaagaagcaggtgaggattttgccaggtttcttgttttgaaccttattgactttaagggcggctgggttttagagactgtacctacctagggggaacacttccgaagtttaggactattccctgatccgctgggaggcaggttactgaggaagtccctttaaaaacaaaggagtttatactgagaaaagcataaacagtgatttgtatggattcacactgactaatatagctcatgccattaaagtggggtctcttctctaaaggagggttatatgatctagccccgtagacctaagtgtggtttcagacctgttcttcctggtcctctccttggaatccatatttctactagttggactttttctgtttgtctggctctcagaggattataggaggccctgtgaagtgactcagtgaattttgatttgtgggcaagtagatggttccctagtctgaaattgactttgccttaggtgcttcaattcttcataagctcccagttcttaaaggacaagatccttgtaaacatggcaatggcattcattaggaatctagctgggaaaatccagtgtgtatgcttggaaatgagggatctggggctggagagaaaggcatgggcatgccttggagggacttgtgtgtcaagctgaggacctttactttaagctctaggggaccaggcaaggggagatgtagatacgttactctgatggggtggatgaattgaagaaggatgaggcaagaatgaaggcagagaccagggaggaggctctccaagtggccaaggcataaagcaagaaatgaggcctggtgactgcttagtggcagagcagtgaaagagagggaggcatcaaagtgagtctcgatttctagctgggtgggtggtagcgatgtccagtaggccagtggctactgaggtctgcagtggaggagggtggttgggctggagacagatgatgagggagtcatcagcctgtgggtggaagaaaagggaacctcttccaactgttttctttgcttcttccctctctttctctttttttttttttttggacagagtcttgctctgtcacccaggctgaaatgcagtggcatgatcttggctcaccacagcctccgcctcctgggttcaagcaattctcctgtctcagcctccagagtagctgggattacaggcacatatcactgtgcccggctaatttttgtattttcagtggagatgggatttcaccatgttggtcgggctggaatgaactcctgacctcaagtgatccacctgcctcagcctcccaaagtgttgggattacaggcatgagccaccgcgcccggcctttcttccctctcttaaagagtgtttatttaattccacaaacatgagcttgtcaccccctgtagcctggcatctcctacacgaggtgatggctgaggcttctgcttctgctggggtagctctgatctttctgctttctctggcactgtctacccatgttgcctcaccccacaggtcccagggcacctctctcgggcaagtcttggaaccctctgacactgatttgctctcttttctgagctgcttttagccacccatcctcgggacctgttttctctctgcctccacccctgcgggcagtcttaggtctcctgcccctcacgagcaccccagagaggccacgtgctcagtgatctcagtgggcgcatctttctagtcttgctattctttttggccatgttgttcagaaaccatactgggcagggccgacttcaccctaaaggctgcgtctcttcactctgcttttgtttgttccaaataaagtggcttcagaattgctaaccctagcctctgtgaacttgtgaggtacaattttgtgtctgttatgttaacaaaaatacatacataccttcctggtgatggtataaattgctattctctattggaaagcaatttggaatgaaaatttaaagaaccattttaaaatatgctatcctgcgtacctccattccacccacccccagggatgtagcctactgaaataattttaaagaagtcaccatatgagagaaaatgttattgctatattgttattgtgagaaattggaaatagactaaatgttcagcactataggaataattaatgaaattacatatactctatacaatcattatgctgccattgaaataataaatacaaaggcgcaaggggggaaaagcttataatgttagtgaaactaagactgatttttttataaagcagcagttttcagacccttggagactccaattcggtagaaccagagcttcatcttctctgtcgaagctgtgacaggagttgcaaatgcctctcctttttgctgagtttgcagctgctgtttttccggcagcacatctgtgcaggcctctgcctcggcccctctggatctgctgattgagcagcggattgatctgtccttctctttcgtgttgacccatgtgaggaaccaactggcaagggaacaagaaatggaaataggcctcctttgcatcatgacctgtacatcctgcaattggaaaagattgtactttagttggtttaaccagcagcattatttttctaaactaagcagtaagaaggaattaggttttatgtgggatcaacagactgggtctcaaaagaggaaggtgatagaacacagt

SEQ ID NO: 123 - DNA, 4045 bp, Homo sapiens
tcttcccaggcggtgtgaacacgcagtgacatttccaggaatacagggatttattaatgatttcttgtgaaatgtttggaaatacaaagtactctataaatatttcataatagcattggggctgagaactccacaaagtgccggaatacatttgcatgtaagacagaacgctgcctgggtcattgatgcctgttgagtggcagtcacagacactgcctagggtttctgactcacgctgttgggactgttctatgcagggcaccctcttgtgtggcataggatttgtgcctcaccacacactgttgtagctttgctgtcttgatgatgagtagagggcagtgtccaggccatggtataagcatctactgccccccagggttaccaaaaccaagccaagttgtgtctcagcgagctccgtgaagcatggagaagttgagtactcagagacatgacgtgacttttcaaaggctgtaagctgacgagggacatagctagggttcagacttgagtttttctttttctttttctttttcttttttttttaagactgagtcttgcttttgtcgcccaggctggattgcagtggtgcttggctcactgcaacctctgcctcccgggttcaagcaattctcctgcctcagcctccccagtagctgggattacaggcacctgccaccatgcctggccaacatttttgtatttttttagtagagatggggtttcaccatgttggccaggctggtcttgaactcctgacctcaggtgatccacccgcctcgacctcccaaagtactgggattacaggtgtgagccactgcacccggcccagactcgagtttttcatcttaatgctttttcattgcctgacactttactgagaccaagatagggaacttcacatacagtaccttttctcccaaggcggaagagggctgttcaatttctacactagagttcggggagttttagaaatgagtcagttatcgaggatgagagcagttcctgataggctcaaccacaatgagatgtagctgttcagagaaagcattcttttatctataaactggaagataatcccggtgaaacgaagcccagccccaggggcttcactaactccaggctgtgcttctcaaactttagtgagcataggaatcacctgggcatcttgtgaagctgtagatttgaattctgcaggtcggcagaggggtctcagaatccgcatttccaacaatgtctccagtaatgctgatgctgctcgtccctggaccacagattgggtagccaggttctggcaagctcatcccaaggctttgagatgacatcagacaaaatatgttctgggacatggcttttgagaggtcaagaaaataagatgtttctttctcttctcatccccaacccttgcactgcccttttctcccttcccctaccctcctttctgtccccatccctgacgccagctgttcagcatgagaagctggagtgacatgcgacaggaggtgatgtttctgaccaatgtgaacagctccagctcctccacccaaatctaccaggctgtgtctcgtattgtctgcgggcatcccgagggaggggggctgaagatcaagtctctcaactggtatgaggacaacaactacaaagccctctttggaggcaatggcactgaggaagatgctgaaaccttctatgacaactctacaagtgagtgtccatgcagaccccagccctgtccccaaccccatccctcccttagttctggccttggcctgtgtcatctcctccctctgtagcagcgttagatgtctacatgcccatttgcccaccagactgagctcttcctagaggagagaggcttctcttgaatagctacctgtccccagttctctgaatgcagcctggcacatctcaggtgcacagtagtgtttatcaatggaatgaatgattgacagccaaccttctggttttctgggggatgtggaagggtggcttccagggtgatcaagaatgagataatggcagaaggacaaatcctgcaagatctcacttatatatggaatatatgtaaggtagaaagtgtcagtttcacatgatgaataagttcctgggatcttgatgtacatcgtgatgactatagttagtaacactgtatagtatacttgaaatttgctaagagagtagatccgaagtgttcacactacacaaaaaaggcaactatgaggtgatggatttattaacagcttgattgtggtgatccttttacaaagtatacatatattaaaacatcacattgtataccttaaatatatacaatttttatttgtcagttgtaactcaaaaaagctagaaaagcatttttaaaaaggatgatgtactggtcttaatattaccattgagataagctttataataacataaaaagaaataacagtaatgataatagcaacaacaacaacaacaaagaactaacatttaagtagaatttcttgtgcactgtgcattctgtttaagttatctcattttaccctcatgataaccctgcagggaagattctttaaccccacatttcataggctcagagaggttaagtgccttggttagagccacatcagagttaatccacaagagccaggattcaagcccaaatctgcctggatctgtgctctctaagataactgttagtggtggcgtgtgtgttctcacactcagacatttgatctgccctttgtttcccattcttagctgcaaggcagtgttaaagaaccctgtgtctccatatccactccccacacttaagcacttttgtgggcccgtgtgccgtatgcctcgtggcagcagggatccaatgtcacagttttaggcagtggcatccttttccttgaaaacttgatgcaggggaacctttctccatttccaaccacaggtgtgtctttcagacactgagtgaggcaggttttgtactttattgtaacacaagaaccttttcttctctggagtaaagcactccagacattcgcaagttgctttacaagccttaaaaggatggtattgtaggcaactttaattaaatcccatctcctcctctcccccagcttgcaagttgacccaaggaagccttcatttccatgacagacttaattgtgagggcatcctcattaaaaaaaaaaaaattctattatctttccagcatatagaagatacttggtatctaaaaatccctgaaaaacttagaatgaatttttaaaaatcagggatcctgctggataaccaaacccatttgtctgttacaacttttgtatttgggtttttgttaagtgtacatatactagtttgtgttaattaaagagaatttttttttttttttttgagagggagtctcgctccgttgcccaggctggagtgcagtggcgccatctcggctcactgcaagctccgcctcccgggttcacgccattctcctgcctcagcctcctgagtagctggaactgcaggtgcccgccaccatgcccagctaattttttttttttttgtattttgagtagagacggggtttcactgtgttagccaggatggtctcgatctcctgacctcgtgatccgcctgtctcggcctcccaaagtgctgggattacaggcgtgaaccactgcgccctgttgagaatttttttttttttttttgggagacagagtttcgctcttgttgcccgggctagagtgcagtgacacaatctcggctcactgcaacctctgcctcctgggttcaagcgattctcctgcctcagcctcatgcgtcaccacgcccagctaattttgtatttttagtagagacagggtttctccatgttggtcaggctggtctcgaactcccaacctcaggtggttcgcccgccttggcctcccaaagtgctgggattgcaggcatgagccactgcgcccagccccaaattttggtttttgcttgaaaactgaggtctgaattcagccttctggttgcccctcaagagtcagtttaaatgttggtcatgttagttgtcagtgaaaacaatggt

SEQ ID NO: 124 - DNA, 4048 bp, Homo sapiens
tgggttggtggtgaggctgcctgtggaaagagaagtgagtgttttgactcactgttatttaaaaatctctagggctgttccaataagcaacaaaaggcaaaatggcctggttctctgtcccctttctgtctgtatgcctcgtacaggttatgaaaagaaaaagttgggaaaagctgtccacctcacctaattgtgttcttgtggagtgtgctagatgccccctctctggagaaaaaaaatccttgtggcctctgacccacctctggagagcctagttcccttctggaggcagaaggcaaagcttaggacctagagagtgctggaccacgccactcacaggaaccagcaggctgtgaggttgaaagctaggcatatggagctttccaggctgggtgcagggcctcgtggcccttcccctcccctctgtgctctatagctcagtcttcccaggcggtgtgaacacgcagtgacatttccaggaatacagggatttattaatgatttcttgtgaaatgtttggaaatacaaagtactctataaatatttcataatagcattggggctgagaactccacaaagtgccggaatacatttgcatgtaagacagaacgctgcctgggtcattgatgcctgttgagtggcagtcacagacactgcctagggtttctgactcacgctgttgggactgttctatgcagggcaccctcttgtgtggcataggatttgtgcctcaccacacactgttgtagctttgctgtcttgatgatgagtagagggcagtgtccaggccatggtataagcatctactgccccccagggttaccaaaaccaagccaagttgtgtctcagcgagctccgtgaagcatggagaagttgagtactcagagacatgacgtgacttttcaaaggctgtaagctgacgagggacatagctagggttcagacttgagtttttctttttctttttctttttcttttttttttaagactgagtcttgcttttgtcgcccaggctggattgcagtggtgcttggctcactgcaacctctgcctcccgggttcaagcaattctcctgcctcagcctccccagtagctgggattacaggcacctgccaccatgcctggccaacatttttgtatttttttagtagagatggggtttcaccatgttggccaggctggtcttgaactcctgacctcaggtgatccacccgcctcgacctcccaaagtactgggattacaggtgtgagccactgcacccggcccagactcgagtttttcatcttaatgctttttcattgcctgacactttactgagaccaagatagggaacttcacatacagtaccttttctcccaaggcggaagagggctgttcaatttctacactagagttcggggagttttagaaatgagtcagttatcgaggatgagagcagttcctgataggctcaaccacaatgagatgtagctgttcagagaaagcattcttttatctataaactggaagataatcccggtgaaacgaagcccagccccaggggcttcactaactccaggctgtgcttctcaaactttagtgagcataggaatcacctgggcatcttgtgaagctgtagatttgaattctgcaggtcggcagaggggtctcagaatccgcatttccaacaatgtctccagtaatgctgatgctgctcgtccctggaccacagattgggtagccaggttctggcaagctcatcccaaggctttgagatgacatcagacaaaatatgttctgggacatggcttttgagaggtcaagaaaataagatgtttctttctcttctcatccccaacccttgcactgcccttttctcccttcccctaccctcctttctgtccccatccctgacgccagctgttcagcatgagaagctggagtgacatgcgacaggaggtgatgtttctgaccaatgtgaacagctccagctcctccacccaaatctaccaggctgtgtctcgtattgtctgcgggcatcccgagggaggggggctgaagatcaagtctctcaactggtatgaggacaacaactacaaagccctctttggaggcaatggcactgaggaagatgctgaaaccttctatgacaactctacaagtgagtgtccatgcagaccccagccctgtccccaaccccatccctcccttagttctggccttggcctgtgtcatctcctccctctgtagcagcgttagatgtctacatgcccatttgcccaccagactgagctcttcctagaggagagaggcttctcttgaatagctacctgtccccagttctctgaatgcagcctggcacatctcaggtgcacagtagtgtttatcaatggaatgaatgattgacagccaaccttctggttttctgggggatgtggaagggtggcttccagggtgatcaagaatgagataatggcagaaggacaaatcctgcaagatctcacttatatatggaatatatgtaaggtagaaagtgtcagtttcacatgatgaataagttcctgggatcttgatgtacatcgtgatgactatagttagtaacactgtatagtatacttgaaatttgctaagagagtagatccgaagtgttcacactacacaaaaaaggcaactatgaggtgatggatttattaacagcttgattgtggtgatccttttacaaagtatacatatattaaaacatcacattgtataccttaaatatatacaatttttatttgtcagttgtaactcaaaaaagctagaaaagcatttttaaaaaggatgatgtactggtcttaatattaccattgagataagctttataataacataaaaagaaataacagtaatgataatagcaacaacaacaacaacaaagaactaacatttaagtagaatttcttgtgcactgtgcattctgtttaagttatctcattttaccctcatgataaccctgcagggaagattctttaaccccacatttcataggctcagagaggttaagtgccttggttagagccacatcagagttaatccacaagagccaggattcaagcccaaatctgcctggatctgtgctctctaagataactgttagtggtggcgtgtgtgttctcacactcagacatttgatctgccctttgtttcccattcttagctgcaaggcagtgttaaagaaccctgtgtctccatatccactccccacacttaagcacttttgtgggcccgtgtgccgtatgcctcgtggcagcagggatccaatgtcacagttttaggcagtggcatccttttccttgaaaacttgatgcaggggaacctttctccatttccaaccacaggtgtgtctttcagacactgagtgaggcaggttttgtactttattgtaacacaagaaccttttcttctctggagtaaagcactccagacattcgcaagttgctttacaagccttaaaaggatggtattgtaggcaactttaattaaatcccatctcctcctctcccccagcttgcaagttgacccaaggaagccttcatttccatgacagacttaattgtgagggcatcctcattaaaaaaaaaaaaattctattatctttccagcatatagaagatacttggtatctaaaaatccctgaaaaacttagaatgaatttttaaaaatcagggatcctgctggataaccaaacccatttgtctgttacaacttttgtatttgggtttttgttaagtgtacatatactagtttgtgttaattaaagagaatttttttttttttttttgagagggagtctcgctccgttgcccaggctggagtgcagtggcgccatctcggctcactgcaagctccgcctcccgggttcacgccattctcctgcctcagcctcctgagtagctggaactgcaggtgcccgccaccatgcccagctaattttttttttttttgtattttgagtagagacggggtttcactgtgttagccaggatggtctcgatctcctgacctcgtgatccgcctgtctcggc

SEQ ID NO: 125 - DNA, 4064 bp, Homo sapiens
ctgggtctacagagtgagagctgtcctcgttccagtttcactgatgacctctcgaccagctccctcacagcagtctttgccaacacagacactgtgggctgtagtgggaggaatgtggggttgaatgagctaggtttgggctctgtccttgactcaccattgcctcagtgatgtgaaaatggtgtctgatccttaaggttggaagtccaggcatgcagatttatctccatctcaataacgtggggaaaaaaaagaagtggtttttgtggaaccagtggttccactgtccacgtgtcttccagtgtgcctagcacattcccaccaagtggatcttggttcatgagggaaagaagggaaagtgagggtgccccgaggctcccagaagacaagtaatgtcacagctgagctgtgtacagatcgaagaagcagatggataaggagtgaacaaagtcatccttgtcttgaggggtctttatttagcttcttcttgactcttagacaaggacccagaatacagatggggcttgttgttaccttcagcctcatggctttttagggctagatacttcagcttgttacatgcagtccttaaagcgtctgtgtgggtttttgcaggagagaacacttgctcgtgttctcctgtctggaacccggacattgttggaaagtatcagattttgtttggctttgtgtgatttgactgcccacctgtttacttgctttctcccagcaagcagccgcaatccccatgggttggtaatgggtggaatgacacactgtgtagatttactcttcagactctatgttcacctcattcttatgggaaaagaagagcactagctggtagatatagcagtgtgttaatatgactgctcaactccatttacacagacattttcaccttagttatactatttcttcattaaatattgttgccagatctaagatacaggtttaattttttcctctgaattatgtggtagtagatgtatttaactatgtttagaaacagcaaaaaatgaagcgtttgaatgcgttaaacacatctaatttgaaagttaatatttaggttgttgatttattttttaaaagattagaatattccttagaaatgtagtcttataatttcgtatttcaataaaaaatattaaaatgtttcccagaggaaatctttactgtcatagaaatcaccagaaagagatagcaattactcctgggtggtgatagtctttgatttgtggtttacttgttttcagtttgaactaaaacatactaatcccagcctgagttggattttgcatatggtcaaagtgaagtagagatttttgtctactttatgaagatatttaaaggacatttgaaatgtttcaatgaacacattgtaacatgcattcccaggaggaaaacaaaattgtgtattgtgttgaaaatactattccaatatatgtatacccacgtctcattttgtcatagaattcctgaaaaatttagatgtagatgagatttttataagttgaaaatattttcagttgcattttaattgcacagatgtgttttctacttctatttggctgtgactcctaatgcattgtaatattatcttccagtgttcatttcgtgtagtgataatggattaacaaatgcattcattcatttagtaaacatttactgagccctaatcagtgccatgctctggcccagggaggtagtcatgtgcaaggtccagccctctctgtttcattcctggttggggaatgggtgggacagaccaggaaaggagcagctgccgtatagagcaggagacgctctgctgggtgtgatacagtccctgatggggcctcctactgcagtctttccagtcaggaaggaaacatcctctaagtggggacctaaagaatggatgtcagccaggtaaagaacagggagtagaatgttccaggtagaggacatagtatatgcattggtccagagaggagagggaagagaaggtggcatttaggggaactgtacctgattgagatagttcagcatggagcagatatagctgtggggagtttgatgggagaaggaacgatgagacgtgatgcctgcagaggtgggcaaaggtcggctgaggcaggtctttcttcacgagccatgtgaggatatagggccttatcctcagagtaaagggagccattaaaggctccacaggctgagtgacttgatgaggtgaatacgaaacagagcatttctgtgaatgtgaatggcctttggagcagaactaagttcatgaggatggaaagaatataatgaagccatctcttagacccagaaagaatggggcacaacagcctttatctttctggggccaatgtcacagaatgccatgcttttaggaaacatggtatgttgtgattaacacattttgcagaagtgggtgggagcttttgaataataacagtaagcatttgtgcattcttcctgtaatgacattacagttatgatctgaaaatattgagtcatacatgaattcctgttatcttaactcagaaaatatagtccctcactaaaggttttattttccttctttttcccatttcctttacttcgtataagaaagtcacttgtctcctgggtgcaatggagacctatgtgagttcatagccaagagaatgtttttggttagaaaaataatagtaggaattccaagctgtgaattttttactgaagctctttggaaataggatttggcaagttttgtctgccttcgtcaagtaagcatgagcaggagagcacagttaatagcaggtgcagacacatgattctcagaccgtattttgtgttctagtttcaaggcatgaattctttcctggggttaattttattcaaggaagttatctgtctgttagatctgatatgtgctcaggccaacatagattctttacccttcctttcttcctgctcacctgtccttcctcttttatcttttcattgaattaaaaagaaaattatgaaatagtttcaacatgaaaaaaggtacagagaataacataaagaacactcctggctgggtgtggtggctcacgcctgcaatcccagcactttgggagtctgaggcagccagatcactggaggtcaggagttggagaccagcttggccaacatggtgaaacactgcctctactgaaaatacaagaattagccaggcatggtggcgtgcacttgtaatcccagctacgtgagagactgaggcaggagaattgcttgaacccaggagggggaggttgcagtgagctgagatcacaccactgcactctagcctgggtgacagagtgagactccgtcttcaaacaaacaaacaaacaaaaagaacactcctgtaccatcatccatcattttgccgtgctgactccaggttctatttaagaaataaaacattacaggtacagctgatgccacctctgtttccctagctcattcttcagagataactcttgtcttgcagttggatgttttaatcctctatatcatgtatacttacattctatgtataacaatatttggtactggcctaaatgtgttcacattgtataagtgtgcatattggcctgccacttcatttggaattatgttcttgagatttatcaatgttgatacatgtggaatctggttaatttttgccatagtattctatttttatactaaacttttaaaaatccatgcttctagtctttggcttattttttcaggttatggtatgttttggatgcacagaaaagtaaaattaagtcatgagcaaaatatctggataatccaagctttaaacttgatgtagaatttgaatcatgtgtgttttgttaaccctgtgatgtcaatccatgcctgattgtgtaactccaaccaatattcctttgaaaatggaaatttgtttatattgactacagattgccaatattattagtaaatgctgagcacttaatctcgaataaagaactagtttaaaaatgattctaacaatggcattgactgttctaccttattactcatgggtgggttcagccaatgtttctgttggagaccaa

SEQ ID NO: 126 - DNA, 4035 bp, Homo sapiens
ctggactcaactcaaaagatatccttttgatgagaacaaaggtgggtggatatatgaaatattatctgtgggataaatgcacttagtcatgagggagacttgttatggagtgcgctcattgtatttgtactgttgagttaacaacttctaggaggagctcagggccacctggcaggggcttcttttgtcttgctgctcagcaaggtgtattttgctgtagagtgtgctgggcaggtgaacttttcttaactttctcttgggtccttcctaaagcagcatgtacctttcccagagcgaggagagggccaccttcctgtctcacagaaacctccaatctgttttggactgcaggaaggagccatagtagtggaccagcaaattttggcccgagagattgatttgcttccgattgtactttttttttttattgctactataacaagtcaccaaatacttagcagtttataaccacatacatttattatttcataaggccagaagccaggatacagtagagctcacctaggtctacttcttagaggctcacagggctgatatcaaggtgtttgtggggctgtgtttttttgggggggctctgaagatgaatctgctttggagctcatccaggatatcagatgaattcagtcccgtgcagttgtaggactgaagtccatttccttgctggctgtcagcaggggctggtttttgctcctaaaggttgccatcattccttcttatgcttttcatgtgactcctctcccacaagtgggttgagtatctctcacactttaaacctctgacgcctcctgtcacatctgtctccagtcagagaaagttctttacttttaagggctcaggtgtttagtttgggcccattcacataatccaggataatctccttattttgaggttcataactttaattacatctacacagtgcatttgctatgaaatgtgcatattcacagactccaggaatagggtgtggacatctttgcaggggatattcagtctgctgtagctttcttgattggaaggaatagtttatcatatatttgaagtgttccctcagtgcctttggcttttgttgacccctctgcagctctctgctttttcttgcccatatttggaaagtgactctaaagcataataagcatcacctattagggtttttaatgtacaaaccaaacagaggtgactttgggaggagaacatctctgaactaggtatgagacattcatcgaaaaaaatccatcaagtgtttattgtatgtctgctttataccagcactgttctaggcactgaagttcgaccaccaacaaggcagttgtgatgcacttggagctttcattctgatgggcattgagatccaggctgaaggctgagtctgggaatttgaggaattctttgtaggtcctgggtctacagagtgagagctgtcctcgttccagtttcactgatgacctctcgaccagctccctcacagcagtctttgccaacacagacactgtgggctgtagtgggaggaatgtggggttgaatgagctaggtttgggctctgtccttgactcaccattgcctcagtgatgtgaaaatggtgtctgatccttaaggttggaagtccaggcatgcagatttatctccatctcaataacgtggggaaaaaaaagaagtggtttttgtggaaccagtggttccactgtccacgtgtcttccagtgtgcctagcacattcccaccaagtggatcttggttcatgagggaaagaagggaaagtgagggtgccccgaggctcccagaagacaagtaatgtcacagctgagctgtgtacagatcgaagaagcagatggataaggagtgaacaaagtcatccttgtcttgaggggtctttatttagcttcttcttgactcttagacaaggacccagaatacagatggggcttgttgttaccttcagcctcatggctttttagggctagatacttcagcttgttacatgcagtccttaaagcgtctgtgtgggtttttgcaggagagaacacttgctcgtgttctcctgtctggaacccggacattgttggaaagtatcagattttgtttggctttgtgtgatttgactgcccacctgtttacttgctttctcccagcaagcagccgcaatccccatgggttggtaatgggtggaatgacacactgtgtagatttactcttcagactctatgttcacctcattcttatgggaaaagaagagcactagctggtagatatagcagtgtgttaatatgactgctcaactccatttacacagacattttcaccttagttatactatttcttcattaaatattgttgccagatctaagatacaggtttaattttttcctctgaattatgtggtagtagatgtatttaactatgtttagaaacagcaaaaaatgaagcgtttgaatgcgttaaacacatctaatttgaaagttaatatttaggttgttgatttattttttaaaagattagaatattccttagaaatgtagtcttataatttcgtatttcaataaaaaatattaaaatgtttcccagaggaaatctttactgtcatagaaatcaccagaaagagatagcaattactcctgggtggtgatagtctttgatttgtggtttacttgttttcagtttgaactaaaacatactaatcccagcctgagttggattttgcatatggtcaaagtgaagtagagatttttgtctactttatgaagatatttaaaggacatttgaaatgtttcaatgaacacattgtaacatgcattcccaggaggaaaacaaaattgtgtattgtgttgaaaatactattccaatatatgtatacccacgtctcattttgtcatagaattcctgaaaaatttagatgtagatgagatttttataagttgaaaatattttcagttgcattttaattgcacagatgtgttttctacttctatttggctgtgactcctaatgcattgtaatattatcttccagtgttcatttcgtgtagtgataatggattaacaaatgcattcattcatttagtaaacatttactgagccctaatcagtgccatgctctggcccagggaggtagtcatgtgcaaggtccagccctctctgtttcattcctggttggggaatgggtgggacagaccaggaaaggagcagctgccgtatagagcaggagacgctctgctgggtgtgatacagtccctgatggggcctcctactgcagtctttccagtcaggaaggaaacatcctctaagtggggacctaaagaatggatgtcagccaggtaaagaacagggagtagaatgttccaggtagaggacatagtatatgcattggtccagagaggagagggaagagaaggtggcatttaggggaactgtacctgattgagatagttcagcatggagcagatatagctgtggggagtttgatgggagaaggaacgatgagacgtgatgcctgcagaggtgggcaaaggtcggctgaggcaggtctttcttcacgagccatgtgaggatatagggccttatcctcagagtaaagggagccattaaaggctccacaggctgagtgacttgatgaggtgaatacgaaacagagcatttctgtgaatgtgaatggcctttggagcagaactaagttcatgaggatggaaagaatataatgaagccatctcttagacccagaaagaatggggcacaacagcctttatctttctggggccaatgtcacagaatgccatgcttttaggaaacatggtatgttgtgattaacacattttgcagaagtgggtgggagcttttgaataataacagtaagcatttgtgcattcttcctgtaatgacattacagttatgatctgaaaatattgagtcatacatgaattcctgttatcttaactcagaaaatatagtccctcactaaaggttttattttccttctttttcccatttcctttacttcgtataagaaagtcacttgtctcctgggt

SEQ ID NO: 127 - DNA, 4084 bp, Homo sapiens
ttttttttttttttttttgagttggagtctcgctctgtcacccaggctggagtgcagtggcgtgatctcagctcactacaacctctgcctcccaggttcaagtgattctctgcttcagcctcctgagtagctgggattacaggcatgcaccaccacacctggctaattgttgtatttttagtagagacggggtttcaccatgttggttggccagactggtcttgaactcctgacctcaggtgatccgtctgccttggcctcccaaagtgttggaattacagacatgacccactgcacccggcctgttgtcagtattcttaaacatagacactaactgtaggctgacagcctagcagcaaggaccagttaaagaaatgagtagaactgaagtgtgcttgagtatctctggcagtcagcaaaaacttaatgggaatcatggtaggccaaatgttctgcagtatttcaaaagctgcatgggttttgagaggcttttggtccatcactcaccttaggttgttctacaagcacatcagcctgccccaatttaaacagggcagttagtaatggtgtaataaagagtctgcattgttcattccttcaacaaatactggctataatgtttcagcactgtggatgcaaagtgagcaggataaacaggctcttctttcaaagcttgtggtccactggaccacgtatgaagtagaatagtttaggtccagaaaggcaattaagtaaaatatgaccaagaagaggctctctagtgggtttggtataaagaaaagataagaatgatttagaattggcctatcaatgagataagaggcctggctttctggcactctgctctagggcaagtaaaatggagaattccaaattctgaaattgttagaacatagttctgtgtcttagttaaatatctacacttacagataaatagcataaatgctttctccccatatttcagcccagtcctacttaaagacaacataaattgcaaaatagtgaggatgttgttcatctaataaaagtggttccaggaattcagactctggattcctgtttgccaaatcatgtgtcccactcttaagaaaacgagttggactctggatttttctttgcaagagggacaagagtgtgggagatactgagttaatgcaacttgcaggttttaagtgtcctgtcattgtgccttgtgctttgatacattctgagtttcagtaaagagacctgatgcattggactgttgcaatggaacctgttttaagatcttcaaagctgtattgatatgaagttctccaaaagacttcaaggacccagcttccaatcttcataatcctcttgtgcttgtctctctttgcatgaaatgcttccaggtatttttgcaaggctaccagttacatttgacaagtctgtgcaatggatcaaaatcagaagagatgattcaacttggtgaccaagaagtttctgagctttgtggcctaccaagggagaaactggctgcagcagagcgagtacttcgttccaacatggacatcctgaagccaatcctggtgagtagacttgctcactggagaaacttcaagcactaatgctttcggaatgtgaggcttttccttggacagcatgactttgttttgtagaaaagtacggctggctgggagtttgtgatataatttagttcagtggtattctaagtgttcttagtgttctttcagacttttgggccatctcccaaagggtgaatgggaagaataagctgggtgtggctgagtttaagccaaaagttttttgtgcttgtttcaatcagagaagacctgctttttcatgtttttactattataatactaagcaagagctcatttgaaaacagagttcttcatatttaaaaaaaaaaagtcttgaaaccattgatgggaagatggatatctatttatgtttaaaaacccatcataaagatgacattgtgggctgtcacagttggaaggccctggaattagatgagaccacactatttagcttacttagtaataacattgcaaagaaaaattccgacgaagttttttcagcctaggaatcaatagttcagagaagcactctatgagaatacccattcattcttaaccaaaaaatactggtgagcctgagcagtttggtcatcagagtgttttatatagttccagaacaaatatgtctctaggtgttctgagagctctggtgaaattcctctcgctaccccaaacatcatcatttaatatccaggattctggttttctactcaccagatagattctcttaaaaccagggaaagattcctggaggaaggatgtatctggaaagagatgttccttattataataaaatgaaattgtaatactcttggattttgtgcagcacgaattctttatagagagttggtcctcccagagaattaagaatactcagtttctggaccctgttcccagatcataccctagaatgtgaccttagaaacacacttcaggattcatacctttgattgaccatcaaaaagtttttgtatcggccaggtgtggtggctcacgcctgtaatcccaccactttcggatgccacggcgggcagatcacgtgaggtcagcagtttgagaccagcctggccaacatggtgaaaccctgtctctacaaaaatacaaaaaatagccgggcgtgatggtgggcacctgtaattccagctactcgggaggctgaggcaggaggatcgcttgagcctaggaggtggaggctgcagtgagctgagatctgtctcactctgttgcccaggctggagtgcagtggcgcgatctcgactcactgcaacctccgcctctcaggcttaagtgattctcatgcctcagcctccgagtacctgggactacaggcacctgccaccacgcccagctattttttgtatttttagtagacatagggtttcactatgttgcccagctggtctcgaactcctgagctcaagtgatctgcccacctcggcctcccaaagtgttgggattaaaggcatgagtcaccgtgcctggtcccatgttataattttaaagtaaggtatatttctctacagggatctttgcaaccctaagtaactggcctaaaaagttagagaagctgacttgtgcagacatttgcagcctgttggtcttttttgtgctgtgaatcatagagggtgaaaggttattatgaatggtacaaaactttgttacaaaaccattttcttggactgttttgggctgcttcactgcatgacaaatgctcaccctttcagctggaatgattgaaattttggaaaagatgggtgtttttagaagacattgtaatttgttccggtgctgtgcccattcattccatttcacttctgtttactcattaaacacctattgtgtacacaacccggtaaaatccctccactcacacaatgcctgaattatactcatagtagaatgactgtttagccctcatcatctgataattaacagctcaggtttcaacctgacagtatctctctgggaggattagcagcgtgacagagtgcagggaaatgcaccttcagaaccgtcagctacactgtgtcccatcctgctgtgttgtggttgtgccttgtggatgcgttggtttatgaccaggtattgattaaggtggctactaccaggtgctttctgcatatctcgggtttgtggagcactcaggttctgcttctgcccctctgctgttaccaagagacctctcttcaaaatggggctcttgagttagagtagaatgagtgatcaggattgttttgtgtaaagatgatttctgaggaaggctttaggatgaaatgacttccaaacattttgaaatgtgactcttacttattgaattaagcagggccttaattggaatgctgggactgatacttgatttgcattaagcagcctttttctattgctgcttggttgaaatttcaacatttgtgatggtagatggatgtgacatgtgatgacattgcacatgggcagttaactgtgccaagaagtgcagcagtagcagcaaccggagatgcaaagcccaacatgatggggag

SEQ ID NO: 128 - DNA, 4045 bp, Homo sapiens
tcaatacttgtgtaaggaaaggaaagggaacaaagcatgattgggcagaggcagaagatgacatcaacaaaggccctccgttgtcagtattctttttttttttttttttttgagttggagtctcgctctgtcacccaggctggagtgcagtggcgtgatctcagctcactacaacctctgcctcccaggttcaagtgattctctgcttcagcctcctgagtagctgggattacaggcatgcaccaccacacctggctaattgttgtatttttagtagagacggggtttcaccatgttggttggccagactggtcttgaactcctgacctcaggtgatccgtctgccttggcctcccaaagtgttggaattacagacatgacccactgcacccggcctgttgtcagtattcttaaacatagacactaactgtaggctgacagcctagcagcaaggaccagttaaagaaatgagtagaactgaagtgtgcttgagtatctctggcagtcagcaaaaacttaatgggaatcatggtaggccaaatgttctgcagtatttcaaaagctgcatgggttttgagaggcttttggtccatcactcaccttaggttgttctacaagcacatcagcctgccccaatttaaacagggcagttagtaatggtgtaataaagagtctgcattgttcattccttcaacaaatactggctataatgtttcagcactgtggatgcaaagtgagcaggataaacaggctcttctttcaaagcttgtggtccactggaccacgtatgaagtagaatagtttaggtccagaaaggcaattaagtaaaatatgaccaagaagaggctctctagtgggtttggtataaagaaaagataagaatgatttagaattggcctatcaatgagataagaggcctggctttctggcactctgctctagggcaagtaaaatggagaattccaaattctgaaattgttagaacatagttctgtgtcttagttaaatatctacacttacagataaatagcataaatgctttctccccatatttcagcccagtcctacttaaagacaacataaattgcaaaatagtgaggatgttgttcatctaataaaagtggttccaggaattcagactctggattcctgtttgccaaatcatgtgtcccactcttaagaaaacgagttggactctggatttttctttgcaagagggacaagagtgtgggagatactgagttaatgcaacttgcaggttttaagtgtcctgtcattgtgccttgtgctttgatacattctgagtttcagtaaagagacctgatgcattggactgttgcaatggaacctgttttaagatcttcaaagctgtattgatatgaagttctccaaaagacttcaaggacccagcttccaatcttcataatcctcttgtgcttgtctctctttgcatgaaatgcttccaggtatttttgcaaggctaccagttacatttgacaagtctgtgcaatggatcaaaatcagaagagatgattcaacttggtgaccaagaagtttctgagctttgtggcctaccaagggagaaactggctgcagcagagcgagtacttcgttccaacatggacatcctgaagccaatcctggtgagtagacttgctcactggagaaacttcaagcactaatgctttcggaatgtgaggcttttccttggacagcatgactttgttttgtagaaaagtacggctggctgggagtttgtgatataatttagttcagtggtattctaagtgttcttagtgttctttcagacttttgggccatctcccaaagggtgaatgggaagaataagctgggtgtggctgagtttaagccaaaagttttttgtgcttgtttcaatcagagaagacctgctttttcatgtttttactattataatactaagcaagagctcatttgaaaacagagttcttcatatttaaaaaaaaaaagtcttgaaaccattgatgggaagatggatatctatttatgtttaaaaacccatcataaagatgacattgtgggctgtcacagttggaaggccctggaattagatgagaccacactatttagcttacttagtaataacattgcaaagaaaaattccgacgaagttttttcagcctaggaatcaatagttcagagaagcactctatgagaatacccattcattcttaaccaaaaaatactggtgagcctgagcagtttggtcatcagagtgttttatatagttccagaacaaatatgtctctaggtgttctgagagctctggtgaaattcctctcgctaccccaaacatcatcatttaatatccaggattctggttttctactcaccagatagattctcttaaaaccagggaaagattcctggaggaaggatgtatctggaaagagatgttccttattataataaaatgaaattgtaatactcttggattttgtgcagcacgaattctttatagagagttggtcctcccagagaattaagaatactcagtttctggaccctgttcccagatcataccctagaatgtgaccttagaaacacacttcaggattcatacctttgattgaccatcaaaaagtttttgtatcggccaggtgtggtggctcacgcctgtaatcccaccactttcggatgccacggcgggcagatcacgtgaggtcagcagtttgagaccagcctggccaacatggtgaaaccctgtctctacaaaaatacaaaaaatagccgggcgtgatggtgggcacctgtaattccagctactcgggaggctgaggcaggaggatcgcttgagcctaggaggtggaggctgcagtgagctgagatctgtctcactctgttgcccaggctggagtgcagtggcgcgatctcgactcactgcaacctccgcctctcaggcttaagtgattctcatgcctcagcctccgagtacctgggactacaggcacctgccaccacgcccagctattttttgtatttttagtagacatagggtttcactatgttgcccagctggtctcgaactcctgagctcaagtgatctgcccacctcggcctcccaaagtgttgggattaaaggcatgagtcaccgtgcctggtcccatgttataattttaaagtaaggtatatttctctacagggatctttgcaaccctaagtaactggcctaaaaagttagagaagctgacttgtgcagacatttgcagcctgttggtcttttttgtgctgtgaatcatagagggtgaaaggttattatgaatggtacaaaactttgttacaaaaccattttcttggactgttttgggctgcttcactgcatgacaaatgctcaccctttcagctggaatgattgaaattttggaaaagatgggtgtttttagaagacattgtaatttgttccggtgctgtgcccattcattccatttcacttctgtttactcattaaacacctattgtgtacacaacccggtaaaatccctccactcacacaatgcctgaattatactcatagtagaatgactgtttagccctcatcatctgataattaacagctcaggtttcaacctgacagtatctctctgggaggattagcagcgtgacagagtgcagggaaatgcaccttcagaaccgtcagctacactgtgtcccatcctgctgtgttgtggttgtgccttgtggatgcgttggtttatgaccaggtattgattaaggtggctactaccaggtgctttctgcatatctcgggtttgtggagcactcaggttctgcttctgcccctctgctgttaccaagagacctctcttcaaaatggggctcttgagttagagtagaatgagtgatcaggattgttttgtgtaaagatgatttctgaggaaggctttaggatgaaatgacttccaaacattttgaaatgtgactcttacttattgaattaagcagggccttaattggaatgctgggactgatacttgatttgcattaagcagcctttttctattgctgc

SEQ ID NO: 129 - DNA, 4026 bp, Homo sapiens
atgaagcttaggtgctctgaggtttgacaactgcagtagagagcctaatgctaacagtgtagagtcacatgtgatgggaagcatcaggtaggtagcagtttgcaggagcactgattctgagggacactaactgggcctaagaacagctactggctgtcatgaggaataactaggagctagccatagaggggtagcagtgaatcatttctctagcgatgtaaatcttgctcaatttattctgtctatataactcaatattactgaagtttgcctaaagcagaatacacctggatcatacagcatttatgagagactggctgggctgtcaggccctcctgttactttatctctgcatgtgaccctcttagctccgcggattaactcctgtcctcattaagcctcacactgtagccccattttcagatcaaacctgtttctcttctggtaaatgatttcagtttgcaaagtttgccctctagaggttgcttagtgcctggccatgtgggctcagttcatgtggtcctgatgagctggttttatctttattacaaagaagttaggctgttaggagagtgggttggaaggagaagaggtagacagccaaatgagatgagtcagggaaaactatactgtttcggagtcatagggctcctaccaagcatctggtcagaaacctctcattttggagatcaagaaattgaggttcagaaagatgacatgaggtacgcagggacgccaccagacacagcctccaactctagaaactaaaattctggattcttagtgctgctttttctgttttgttgcactggattgaagccttttctaactgtactcagagggcctattatttagggagattccgtatgaaatcctttagcaatcaaatcatttaatagggctgatggtttaaatatatgttaatgtgttttcctaaagcctggcagacctgggttttggagctttgtatcacatgttttatgtttggaatgaaaatgagaccatgtctgtgaaggcactttgatatgcgtaatgcactctgccagtgtttgtcaaaacatggtccccaggtcagcagcatcagcatcacctgtaagtgattctccagtcgcatcccagggccgctgtatcagaaactctgggggtgggggtgggggtgggggtgggggtgggggtgggggtgggggtgggggccggcccggcccggcccggcccggcccggcccggcccggcccggcccggcccggcccggcccggcccggcagtctgcattttaacaagctctccaggtgattctgatgcatacttaagtttgagaaccattgcttgttttgcattaaacaggagattagtctctgcagcttgtgggaataaagctttaaatctctccaattttagctctgtgaaaaggcagtggggagacaggaatgaacggactagtgccacaaagctcaggtggggtgggtgagatcatttagaagagaaagaccgggcatggtggctcacgcctgtactgtcagcactttgggaggccaaggcaggttggatcacaaggtcaggagtttgagaccagcctgcctatcatggtgaaaccctgtctgtactaaagataaaaaaaaaaaaatttgccagtcatggtgatgcatacctgtaatcccagctactcgggaggctgaggcaggagaatctcttgaacccgggaggcgggggttgcagtgagctgagattccaccattgcactccaacctaggtgacagggtgagactccgtctcaaaataaaaaaaaaaaaagaaaaggaaaggctgtgtgtgtgtgtatgtgtgtgtgtgtgtgtgtgtgtgtgtaacagcaccatcacactgtttgagttgaggagcacatgctgagtgtggctcaacatgttaccagaaagcaatattttcatgcctctcctgatatggcgatgctcccctatctcattcctgtgtgtgtttagccaggcaactgttgatcatcaatattatgataacgtttctccactgtcccattgtgcccactttttttttttttttgagttacttactaaataaaaataaaacactatttctcaatagacttgaagcttcaagatttcctggtggacaatgaaaccttctctgggttcctgtatcacaacctctctctcccaaagtctactgtggacaagatgctgagggctgatgtcattctccacaaggtaagctgatgcctccagcttcctcagtagggctgatggcaattacgttgtgcagctactggaaagaaatgaataaacccttgtccttgtaatggtggtgaaggggagggaggtagtttgaatacaacttcacttaattttacttccctattcaggcaggaattgccaaaccatccaggagtggaatatgcaacctggcgtcatgggccagctggttaaaataaaattgatttctggcttatcacttggcatttgtgatgatttcctcctacaagggatacattttaagttgagttaaacttaaaaaatattcacagttctgaggcaataaccgtggttaagggttattgatctggaggagctctgtctaaaaaattgaggacaggagactttagacaagggtgtatttggagacttttaagaattttataaaataagggctggacgcagtggcactgagttgagaactgttgcttgctttgcattaaataggagatcagtccctgcagcttgtgggaataaggctttaaatctctccaattttagctctgtgagatggcactggggaaacagaaatgaacggactagtgtcacaaagctcaggtgggatggacgagatcacttcaaaggtctgtaatcccacgtctataatcccagcactttgggaggccaaggcgggaaaatcacttgaggtcaggagttcgagaccatcctggccaacatggcaaagcctgtctctactaaaaatatgaaaattagctcagcgtggtggcatgctcctgtagtcccagctactcgtgaggctgagacaggagaatcgtttgaacctgggaggcggaggttgcagtgagccaatatcacgccattgcactccagcctggctgacagagtgagactccatctcaaaaaaaaaaaaaaaaaaagaattttataaaatcaggaaataatattagtgtttatgttgaattttaactttagaatcatagaaaacttcctctggcatcattattagacagctcttgtgcagtgggtagcaccagacccagcttgcatggttattgatttttcagagacactttttgagcttattctctggcagaaaggggaactgcttcctcccctatctcgtgtctgcatactagcttgtctttacaagaagcagaagtagtggaaatgtttattcttgaaaataagctttttgcttcacatgatctagaatttttaaaattagaaaaatgtgcttactgcgtgcccttctgaaactaggaaaatatgccttgtgtttaccaattgtgtggttaggagatgggccaaaggcatcaggcttttgaaagtagttgcatttagcataatttccattgccccctgccaatttcatatctgtcacatctaatcagtttaaaataaggggcatcctaagcatggagatggtccttggatggtccttggagtttctgtattttcagtattcttttttttgagcatacaagacatttattgaaaaattcttgggatcaatacttgtgtaaggaaaggaaagggaacaaagcatgattgggcagaggcagaagatgacatcaacaaaggccctccgttgtcagtattctttttttttttttttttttgagttggagtctcgctctgtcacccaggctggagtgcagtggcgtgatctcagctcactacaacctctgcctcccaggttcaagtgattctctgcttcagcctcctgagtagctgggattacaggcatgcaccaccacacctggctaattgttgtatttttagtagagacggggtttcaccatgt

SEQ ID NO: 130 - DNA, 4044 bp, Homo sapiens
ttggtgctagtgtgtgagtctaagcctacatgggtggatatccacgtgatcaggctgcaagttctttgtagtggaggatctttggccctccctgctgcttcccaacccagcgaacctaccacaccatgcacgtgcacagccaagggttgttgactgtttaatcagtctctgggttcttatgtctcatccgggggattcactgataggaggctggagcttgatcacatccagatgttctcatcttcagagcctgttaacataacagaagtcttataaacatgctgagcacactcactggtctggagagtgttgcaggatgacctaggcccattgcaggggtggcctgggtcgccctcccacacttctgccaccctgcttgggaaggagggagctgttttgaagttccctggtgcaatatgatgtattgctctggctctgctcaggaggaagctatggcccacctagtcagtgagggttagctaatacgtgtattctgtttctgttgaggtttcacagaggccttttttgacccttcattttatagataaggcagtggaggcacaactacatgaaatgactcgacaaataaatggatttagaacccaggtttctgactcccagggtggtgctttttccatggttgtacagtgattaatgtctaccttttcacaccagtcctcaactgaagacaccagcttacaccttccttcctgtttctcccaagaacagaaagtgaccccggatgtcgctttctgttcctgggaaggcagttccagtggttagaagtcctgttcactcctggggtgtggcctggggatggtcctgacatccctgggctcttcctggacctggccagctaaaaggaaatctcctatgatggtactcagatacttttggaaccttgtcagccctaatcccatctcctagtgtttagtattcagctacccttcactgggcagtaattctgtgccaggcctgatctgggcattggtggtactaagaacgcatattccctatcctataggcatagtctggtagagacaacatgcaagtaaaacaatgttccttaaactgtggttccacacctccctcccccaacattaaaagtgtaagggatgcttattcaaatgtagatttgtaggctctgcactctagacccactatttcagaatctctggggactgggcccaagaaactgcattttcgcatgctccctaaatgaagcttaggtgctctgaggtttgacaactgcagtagagagcctaatgctaacagtgtagagtcacatgtgatgggaagcatcaggtaggtagcagtttgcaggagcactgattctgagggacactaactgggcctaagaacagctactggctgtcatgaggaataactaggagctagccatagaggggtagcagtgaatcatttctctagcgatgtaaatcttgctcaatttattctgtctatataactcaatattactgaagtttgcctaaagcagaatacacctggatcatacagcatttatgagagactggctgggctgtcaggccctcctgttactttatctctgcatgtgaccctcttagctccgcggattaactcctgtcctcattaagcctcacactgtagccccattttcagatcaaacctgtttctcttctggtaaatgatttcagtttgcaaagtttgccctctagaggttgcttagtgcctggccatgtgggctcagttcatgtggtcctgatgagctggttttatctttattacaaagaagttaggctgttaggagagtgggttggaaggagaagaggtagacagccaaatgagatgagtcagggaaaactatactgtttcggagtcatagggctcctaccaagcatctggtcagaaacctctcattttggagatcaagaaattgaggttcagaaagatgacatgaggtacgcagggacgccaccagacacagcctccaactctagaaactaaaattctggattcttagtgctgctttttctgttttgttgcactggattgaagccttttctaactgtactcagagggcctattatttagggagattccgtatgaaatcctttagcaatcaaatcatttaatagggctgatggtttaaatatatgttaatgtgttttcctaaagcctggcagacctgggttttggagctttgtatcacatgttttatgtttggaatgaaaatgagaccatgtctgtgaaggcactttgatatgcgtaatgcactctgccagtgtttgtcaaaacatggtccccaggtcagcagcatcagcatcacctgtaagtgattctccagtcgcatcccagggccgctgtatcagaaactctgggggtgggggtgggggtgggggtgggggtgggggtgggggtgggggtgggggccggcccggcccggcccggcccggcccggcccggcccggcccggcccggcccggcccggcccggcccggcagtctgcattttaacaagctctccaggtgattctgatgcatacttaagtttgagaaccattgcttgttttgcattaaacaggagattagtctctgcagcttgtgggaataaagctttaaatctctccaattttagctctgtgaaaaggcagtggggagacaggaatgaacggactagtgccacaaagctcaggtggggtgggtgagatcatttagaagagaaagaccgggcatggtggctcacgcctgtactgtcagcactttgggaggccaaggcaggttggatcacaaggtcaggagtttgagaccagcctgcctatcatggtgaaaccctgtctgtactaaagataaaaaaaaaaaaatttgccagtcatggtgatgcatacctgtaatcccagctactcgggaggctgaggcaggagaatctcttgaacccgggaggcgggggttgcagtgagctgagattccaccattgcactccaacctaggtgacagggtgagactccgtctcaaaataaaaaaaaaaaaagaaaaggaaaggctgtgtgtgtgtgtatgtgtgtgtgtgtgtgtgtgtgtgtgtaacagcaccatcacactgtttgagttgaggagcacatgctgagtgtggctcaacatgttaccagaaagcaatattttcatgcctctcctgatatggcgatgctcccctatctcattcctgtgtgtgtttagccaggcaactgttgatcatcaatattatgataacgtttctccactgtcccattgtgcccactttttttttttttttgagttacttactaaataaaaataaaacactatttctcaatagacttgaagcttcaagatttcctggtggacaatgaaaccttctctgggttcctgtatcacaacctctctctcccaaagtctactgtggacaagatgctgagggctgatgtcattctccacaaggtaagctgatgcctccagcttcctcagtagggctgatggcaattacgttgtgcagctactggaaagaaatgaataaacccttgtccttgtaatggtggtgaaggggagggaggtagtttgaatacaacttcacttaattttacttccctattcaggcaggaattgccaaaccatccaggagtggaatatgcaacctggcgtcatgggccagctggttaaaataaaattgatttctggcttatcacttggcatttgtgatgatttcctcctacaagggatacattttaagttgagttaaacttaaaaaatattcacagttctgaggcaataaccgtggttaagggttattgatctggaggagctctgtctaaaaaattgaggacaggagactttagacaagggtgtatttggagacttttaagaattttataaaataagggctggacgcagtggcactgagttgagaactgttgcttgctttgcattaaataggagatcagtccctgcagcttgtgggaataaggctttaaatctctccaattttagctctgtgagatggcactggggaaacagaaatgaacggactagtgtcacaaagctcaggtgggat

SEQ ID NO: 131 - DNA, 4107 bp, Homo sapiens
ccaacttgtaaactcatctttttccgttctttttgtgcctggacttctcagggccctgcaggctgattctagtcccatgttgtgtggtgtttgaagtgtctggtcccttttttcagtgagagaccagctcatccttgggaactgaatgcctcaaactctcttttctttttctctcttccccttctgtttgatgtagtctttcctgtttctggactctgtttcttcatacttcctatctcttaccttcttttcactccttttgtcttccagctgtcctctctcatttttctgcctctctggtcttcaggtagagttttcatctcagctatcttcttgctttttctgatgttggttctttgtttcttcttctcattctgttcaggtccaaaattcatttgggtcaatgttatgtcttagtgttatcttccatttccttctgagcttcaaagccaggctgactgtgcccttccacgccctggccagtgtgaccaggacatcctttccctctggggctgcactggctctttgggggaattgttaccattcagggtcttcaaccctcattctagggacttccagtaacttctcccaccttccctcttctcagtaagacatgggtattgtcttattctgtttctgctgctagaagaaaattctcgagactgagtaatttatacacaatagaaatttacttctcacagttctggaggctgggaaatccaaaatcaaggtgttggcaggtttggtgtctggtgagggctgctctctgcttctaagatggtgccttgttgctgcatccttaggaggggacaaacgccatttcctcaactggcagaagggactgaagcctctccctcaagcccttttataggggtcctcattgtcaggcctctaagcccaagccaagccatcgcatcccctgtgacttgcacatatacgcccagatggcctgaagtaactgaagaatcacaaaagaagtgaaaaggccctgcctcgccttaactgatgacgttccaccattgtgatttgttcctgccccaccttaactgagtgattaaccctgtgaatttccttctcctggctcagaagctcccccactgagcaccttgtgaccccctgcccctgcccaccagagaacaaccccctttgactgtaattttccattaccttcccaaatcctataaaacggccccacccctatctccctttgctgactctcttttcggactcagcccacctgcagccaggtgaaaaaaacagctttattgctcacacaaagcctgtttggtggtctcttcacacagacgcacatgaaactcatggtatctgtgaggggccctaatgctattggtgagggcactgctcacataacttaatcaccccttaaaggccctgcctcttaatactgtcacattggtgatgaagtttcaatgtatgaactttgaggggggacacgttcaaatcatagcaggtgtgctattgccttactagcaaagtaatctgggggaagatgagtaatgtctcgttccacccctgattccagtgctgactgattctggagtggcagagagggttggaggctcaccgctctgctcacccgaccctctggccatctcctcttagaatgcaagggcagggattttgttacacagcgcctcttttgttataggctagctcctgccttcaaggagcactgagaaaaatattatccctttgaaccacaacactagtattttgggtactgtagccattcagaagtttgttgaactaatacaagtttatattatttgtaaaatactagaaggaatgtgtggttcctaaagttatggtattcccattggttgaaagagaagactctggcttcctaatgccttggaaggttcagggagcataagcctaaatatcctggtttctcttgggaattcttcacagcttgtcatctatgactttatccacatttattttgaacatgtttaattttcagcttgtattttctcaaggagtatgtgtgagtcagcattcagagtacttaacacacttagtgtcattagtgataacttaacccacacgtataggaagctagacctccatttacagaaaaatggaggctcagagagcctaactgactttcccaaggccacataactggaaaattctggaactgagttttttcaggtatgtcttggtatccctcggtgagccttctctgtagagaaggaagtgtctcctgggttggaaagcccaggccgggatgaacagcatgggtgtccttaggctgtgtgtaccacacacccctggcctactctcccctgctctaaggagtcacctgaaggagcagctgcatcaccccgcctcaccccttctcctcagcacccaacaaccaggtcttcccagagagtgctcagctattggtgaagcaggcatcgtctattcttcaagaagacagcagagcatcaggaaaacaaaacaccaaaaaaataccataaagacactggagtgtatttgttaccagcccttgtataacagagaagtatttcaaggtcttatttgtaaggctggacaagctcaggctgattaaaaccacgagttagaatttgtctcccgctcccaggccctgctcagttgacagctcctagcaggctgggaggccccaccccacccccaccccaggggtccattgaagaagaccatctgggcctgggatgctgatgtgattttccctacttctccttttttttcatttgcctcctccacccacttctaaagcagctgattgctctggttccttttcatgttgagcaaaagagaagacagatcttgaaacctgagctggggactggagggcactgaccgagagtaaccccgtctggctcagctcagctcagcaaagggctttcctcctccgccttcctgagctgctctccctcctctcctttcctccttctttcccagcctcccccaagctccttcacccctctcttccctctcctccctcctcccaccttccttgtcctctatgctcagagaactgaaggaacactgaatggcctggaaagcaggacctcgcccccaccccgcgtcatacccctccgcctgcacgtgcaaatgtgttcctcagcttggtcccagaggcctggacctgggtcccagaggtcccagctggttccccggcttggtcccagaggcctggatgtgtggcaagaagctgagggttctgcttcgtttcttccagcccacaaacacacatgtcacctgttttttgttctttttcctttcctttgccccactttacagaagctcttggctaattggtaggtcactgtttgctcctccaggcaaaaccaaggaggctgagctcagcaggtcaagtattttggtctgtattgaagagactgtggtgggagagccctcttgaccttctgctggatagtgactttctcttctgctggcagcagtagcccagctccgcatcctgtgacagaggtcataccttccagttacccgagcgaacacttggagcaagtcagctttttcccctgaaacagcacgttcacgttcttgatctttggtttgcacaacaacctgtgaatgttattagccccgttttttttgtttgtttgttttttgagacagagtgtcgctcttgttgcccaggctggattgcaatggcgtgatctcggctcactgcaacctctgcctccaagcaattctcctgcctcagcttcctgagtagctgggattacaggcatgcgccaccacacccggctaattttgtatttttagtagagacggggtttcttcatgttggtcaggctggtctcgaacttccgacctcagttgatccacccgtcttggcctcccaaagtgctgtattagccccattttatatccaaggaaactgaggcttagggagatttaaataggggggaaagtatagcttcatgattacacagtcaggaaatggcagagctgactcttgaattcagaccctgtgatgctgtatccagtgctgattttgttttgccctgtgttcctttcagtgtcaggtaagaagacctcagagatcatcttctccaacccacacattttactgattataaaatccag

SEQ ID NO: 132 - DNA, 4043 bp, Homo sapiens
ggaatgtttttcctccccatttctgcctctcctctggttgtgtttcagtatgtctgtgtgcttcttgaagtttactggaaattatgaaagtattctggcacagaggaggaagggatttttgcctcccttgttctgagtgctacatttccgttaatgcagtctgagattgtattaggcattttggcattcacgtcaccttgttgactcatattccatgtgcactcaaacaaaattgtgattattttaaataggcagaattgcaagttacgtgttctccatttctttgttgtattgttggctttttgaactaaagggaaaaatgtcttttttctgttttacatgtttagattccctatgctatcctatcctcccaaaaccattttagattctgattttgccatgtattatatctgatactcctttctcgtcatctagagatgtgataaacaactctctttggcctcattccagtcatcgataactgtgggacaaagacttgaagcttggatcagtccagtggagactaaccacccctgtagacccttttttcctcaactataaaatagcagctaacttgaaatgtaaactataaaacctaatgtagtatctggcacatagtagattcccaataaatgagagccagtattcttctaagacagtgatgcatttctgagcacctggccttgttcttctgccttgcaatttatgcagcagttgaaatagactggctgatgggggtaagttgtcaagcagactttctgatcttagtggaggagactgccttaaaacaccactaatttcctttttcttttcttttctttcttttttttttttaagacagagcctcgctctgtcaccaggctggagtgcagtggcgcaatcttggctcactgcagcctctgcctcctgggttcaagtgattcttgattctgtagacactaccactcaggcctatattgtaatcagtgctgggccactgggctcctgcttctgtgatccagttgggaagtttatcttgttcttcccttcagcttgcatctgctaaattcgctggactatacacaggtgatttgtagatatggggatctctactcaaatactctcatgatttccttggctagagcatcattttatttccacttattggaagagaccttagagaccagttagttcatttatagataaattagttgattctgtcattcaacccttatatattgagcgtctcctatatgcgaatcactgttctaagtgccgagacacagaggtgtccaaaacaaatatggcccctctccatatggaatttctattctagagaagaatctgacccagaagggggaagtgactgtcccaagtctacacaaccacagaagggatattctgggaataaatcacggctaaacccccctgctgctccaggcagttctccttctacagtgctctattgtgctgttttaataatctttcaactgggaagaactcccatttcaggaattaagccgtggacaaatcttttaattatccttgaaatcatcctaataagaaatccaaggaggaagtcttacagggtgcctcacccacttttctcatcactggaactttttagacattttattattttcttcctaaaccagagtacaggcacacaagttgagtggtgtggtggctaaattaattaatgtttgcaaggcagtgtgagaagcattcattcatcttaaatacctatggtgactgcaactcagatgtaaaaattggataaatcctcagaaaccctagggaaagtgacatgtctgtattttgtctctgtgagatacagactggcagagataagtgtttctctgggtgagttttgtgtggtatctgggatgattttaggcagtacgtggatgagaacttttaattttaacccacatccaattgcaatttcatggaaattattgcttaggaggatgttcaacaggaaaaatataattaaagttaattcaaaagaaacattttctgtgaatatggtaaaacttgtgagagtagtttgtaaatgattgaagattggaaaacattggtataagagtgagtgtggggttttgtattaagattcattttgggaagaaatccatgctgcatccctcatgaagtgtgaactttgggcatgtgttgattctttctggcccagagtttacctgaagattagctgccctgagggtcactgagcattaaattagatgatgtctgtggatgactgatagtgaagctcatagcccacagttgacacataataaattcgagttgctttgcttccccttctgttcctggctgactgtttggcctttgccacttgttcggcctctctgggccttaagtttctttgccttgaaattggaactttctttggtgaaacaaccagaaaatgcttcagcccagaaacttggtcagtacttggatgggggatcacctgggactacccaaggatgtgggctgtctgctagactatagccccttgagggcaaggtgggcgccttgctcatggttccatcctaagccccagcacagtagtgggtgcatggtgagccattagtgaatctttgtggaatgaaggtgggagaaaataaaatacctgtacttcacagggtattgtgagggtcaagtaaaagtgctttaaaaaattgtattatatagtttattcccttgtgttagcccaggtcaacagagcctacgaataataatgatgacagaagttcttcaaaaagtcttggccttctttctttcacaaaattgccccccagagctttctggaagggcagccatgaacccagaggcctaaagtagatttactgggaagctaaaaatatttactttatttttcatagctcctttcaaggtcctctctgggggtcttagcaatatgtttacacagtggtatgtttttgtaaggtttgcaaaagtaagattttttaaaaatactatcttgttttaaaaagagagccccctaccaacttgtgtcagcctcaggcccccacctgcatctgctcctgccagggcatggtggggcaagaagcactgctccccttccaaagcttccttccttgccctggagtcatcctcactccccactccaagccacctgccatcgctgtgccccctctctggtgaatctggcattcttaggtgggctgagaagcagactggcccaagctaaggcctttctgatggggttgttgctgctgagaatcatgactgggtgggagaaggaggtgaccctttgctgtcttatttttactgtgtatttccttttcagctacttaaaatgtattgcttagtgatacctaatgggttcattagcctgcttcctactgaacatttccgctcaggcatccacttggtcccaaggcctgctcctctcccatattctgaaatctggactacagactctcattcaactccaggttgcactgtggacacagtcccctcttgagcaggtacctccttgcagtggttgggacgtcctacttggctcatagttgggaagtgcatatgctggagctgaagcctcttgccttcccgggatagggcgtcctcacatcccctctgagaagttccccagcttccctctgttccccgtttccacacttagcgaggctcttgtccactgctacatcccccatagccagtccctcagccttgccattgcttatgctggtctggaaacaattcctagacttgtggggcatctggggaagttctccatctttttttagctggcatgacccaagtggtgtgggcagggctgtggattctatggtgtggctggaagccaggtagcctctctctactgtacatggaactcagcaacttctgagtcaagcaagatcttagctctgcaggtgtcttgccctgtccaaagttatggccacaccagtaccttttaactctagaagcccagtaagtgttttgtgggaccgcaaagatcattttctagacctgctgaatatgcctagaacgggtagggatggctttcacgctgttcctagggctgacaagtcacacgt

SEQ ID NO: 133 - DNA, 4046 bp, Homo sapiens
tggacaagtgatttaagtttcttttaaacagagaatagtaatacctacctcatattattattgtcagtgtatcatcttacaatcacagtctttctcttagggctgggctcagtgggtggattgacactgcagaaatggccagatctaaaggatcaacatttacgtagctgggaaatgtagctgggacttcagtttcactgccctagtgatttttcctaccactaagcagctcagtccatacccctacgagacccacaagcttatgagatactgttcttccaggaaagcagtggggccagggccaccttttaattgtgtttcttggcctggtcccatctttctcacaatatatagcaacagttatttacttgctgattttctaatgcacatcacacatagtcatattaaacacacacacacacacacacacacacacacacccctcaagaaacattttctgagacgtgatttcctgatttcatcaaaaaagaaaagagcgggccaggcacagtgggaagtcaaggtgggtggatcacttgaggtcaggagtttgaaaccagcctggccaacacggtggaacctcgtctctactaaaaatacaaaaattagccaggcgtggtggcgcacacctgtaatcccagctactggggaggctgaggcaggagaattgcttcaacctgcgaggctgaggttgcagtgagccgagattgcgccattgcactccagcctgggcaacagagtgagactctgtctcaaaaaaaaaaaaaaaaaaaaaagcataaactgaaatttatatgcaatttatatgcctgtgagataattctgttttctcttttggaaccccaaagagatttttttgattgatgagcaaatacattttagattttatttaagcattatgccaagcaccactgaagtataagtttcaagggcaaactcagttttttcatctactagacgaatgattttctggaatgattacaagcaggcaagatggtgtagtggaaatagcaaatgtcttcggcatcagacaagttggggtttgtttgtatcctgcctctgcccttcaccgaggttgtgatcttgggcagattgttgagttttaacctagattcctctgactccagatcataaattttcagaaaagttctgaaattcttgtatatactgatggtaaatgagacttttccttacatctatgcacttctttgtttgtttgttttgagatggtcttgctctgttgcccagactggagtgcagtagtgcaatctccgctcactacaatgtctgcctcccaggttccagtgagcctcctgcctcagcctcccaaatagctgagactacaggcatgtgccaccacgtccggctaatttttgtatttttagtagagacagggttttgccatgttgaccacactggtctcgaactcctggcctcaggtgattcgcccgcctcagcctcccaaagtgctgggattacaggcatgagccaccatgcccggccatatccatgcacttcttgcaaccttaccttcttttctcatcaccctccagggacctagttggaagagcagagttaaaagttaaggtgaaacttggagaggtgtcttgtccctaggaacaaaggactggtttgaaattctctgtaaatcttccccagttcaaaccagagttatcaaggtcttaaaaacttccctgggtcctgagagcccattatattatttacttgtcttcctgtacacccactgcctagtcctgatcctacttttgtttgcaaataggatggggcacaacgtacaaggaagggcctttgccacccctgctaagggataacctgaaataccttcaccatcactgccctgtgctgcttttcacctatgccagtctgtctacagtgccagtgtctcctggcattgaaaggggagaatcttttggtcctttgagtatttggttgggttacataaatctccctgaatgaagagcagctgacttaggcaaggggccttgtttggttttccttgaactattaacaggaagatagggagattaactgtgtaaatgttcaataggccagagtccctgcagagggtggccacagtgatcagatcttatcacatccttgctttgggtgttgcctctctggttggagtatggatagaaaagaaagaaagaccctatattgaaatgcaaagtgcagcaagtcctgactttggattaacttctcagcccatttgcatgaaaataaaaagatgaataaaacaaggttcccactttggagggaggtggtagctgtgagatggaaggagtgttcctgctgggcaacagcagagtaagtgctggggtagattcactcccacagtgcctggaaaatcctcataggctcatttgttgagtctttgtcctacaccaggcactctgcaaaaacgctttgcctgcaaggtctcatgcgatgctcaccacagctctgtgaagttaattgtacttttatcaccattttacagatgagaaaactgagggtatggggtcaatgacttggctaaagtcactgcttagcaagctgcagggactggatgtgaattccaattggtttgactccaaagcctgtgaagctacttgttcttcaccacctagagctgtggttcttgataactgtgaactcttttggggtcacaaatagccctgagaatatgatagaagcaggagctctggcctttctgtccatacctgaacaggtccttgggttaagagcccctcgtccagggcctattaatcttgatcctcataagcagcatccatgtattacggccgcaaaccaaactgtgccagaccgaatcctaggaccaagcccaaatatgtcccatcatccttttggtaagaagctcattgtaagaaagaaagaggagagcaagaggatgacctagtgcatggggcctcattgttttaattagtgacaaaacaacaataataacaacaaaacccccgaagcttcacagatgacatcagaccccaagcctgtgtgtttttcaggtgcccttgaggagctttgtagctggcagaggaggtgaaactgacaaatgtttggcagatggaggagagtaccagaggggtttgagatgagctaaattccaatctaaccgcaggtgtgaggaagaggcttggattgggaccatggagatgggggttctactcccagtcacgccagctgactttgcgagtgttctttgtcagtcactttatcttattttatttatttttatttttttgaaatggagtttcgctcttgtcgcccaggctggagtgaaatggcgcgatcttggctcactgcaacctccccctcctgagttcaagcgattctcctgcctcagcctccagagtacctgggattacaggcgcctgccaccaagcccatcgaatttttgtatgcttagtagagacagggtttcgccatgttggccagggtggtcttgaactcctgacctcaggtgatccgcccaccttggcctcccaaagtgctgggattacaggcgcgagccactgtgcccagcccacttcatcttaccgtagttacctccttagagtatgaaaaaataggcttagggcatccccaagtcccctctatgtctgagagctgaggctggctgtcaaagaggaactaaggatgccagggactttctgcttaggacccctctcatcacttctccaacgctggtatcatgaaccccattctacagatgatgtccactagattaagaatggcatgtgaggccaagtttccacctgagagtcagttttattcagaagagacaggtctctgggatgtggggaatgggacggacagacttggcatgaagcattgtataaatggagcctcaaaatcgcttcagggaattaatgtttctccctgtgtttttctactcctcgatttcaacaggccattttccaaataaagccatgccctctgcaggaacacttccttgggttcaggggattatctgtaatgccaacaacccctgtttccgttacccgactcctggggaggctcccgga

SEQ ID NO: 134 - DNA, 4045 bp, Homo sapiens
ccaggctggtctccaactcctgacctcaggtgatccgcctgccttggcctcacaaagtgattacaggcatgagccactgcatccatcgccaaaaagattttttaaaagagtttaatgtagaaccatatcaaaggtctttggaaataaaaaacagttttttaaaaatatcagaaataaaacaacaaataaataaataaataaaaacacccaaaacaatctgaagcacgagcacctagcagaaaggttcaattatgatctattcatagagtggaatatcaagtagacattacaggacatgttttaagattatattttatgtcatgggaaatgctctcccagtatgatgttaaatgaaaaaacagaatacaaaagtatatatgctgcatagtctcaatattgtagagaaaaaatattatttatgtatgcatgaaaaaagacaaaagatgttaacagagatccattgttacttcagtttactagggattgtctctgggaggtaggattaaggtgatttatatttacctttttaaacttttctgtatttttttattttcaaattttccataaaaatataaggacttgaagatcaagaaaaaatttctgctttggctcagtgcagtggctcacgcctgtaatcccagcagtttgggagccctaggggagaggatcacttgaacccaagagtttgacgttccagtgagctatgatctccggatcgtaccgcctggacgatggagcaagaccctgtctcaaaaaaaaaaatctttgctttttttttttgtttgtttttgagacggagtctctctctgttgccccagctggagtacagtggcacaatctcagctcaccgcaacctctgcctcctgggttcaagcgattctcttgcctcagcctcccaagtacctgggattccatgcacccaccactatgcccagctacttttttgtattttcagtagagacagggtttcaccatgttggccaggctggtctcgaattcctgacctcagctgatccaccggccttggcctcccaaagtgctgggattacaggcatgagccactgtgcccagcccaatcttttgctttttttaaaaaaagaagacaaaaagggattttataccagtattatcttggctgtgtgactctgaagccacagttgtaagttataattactctgaaacacaaggccctgtgactcttttgggctctttggtgtttatcttgattacaacgttggaatatagaaatgaaaggaatgggagaggtgatagacttcaggcagtgtaactagttgtctgaacactactggctcaattatattgtgtctagtgatttccatcttgtccgtctgctaatttatcgcctggtaactcactgaggcagggttttcctttggagaaacctcattgttttaaccagtgtatcatgcttgtttagaagttcaatgatctttttaactcatcggagaagatgatgaccagacctggacagatggggaaggactttgcactctctctttacagtcctgagtgcacacaggtcaatatggaactatgtgtgaattttcattgtctttgagagccctcttctctgccccatagggagcagctttgtgtgcaattagaggagcaagggttgtgtgtatttagcacagcaggttggcctggtcctctcctctcaacatagtcaccacatacctggcactatgctaaggctgggaatgcagacagatgggtgcctgctttcagagtgctcaatgtgctgaggaagccagcaacagaaacagatgatttcaggagctccaggaaaatgctacaggaggagtgtgcctgggttactggagtagcacaggaggagggcttctagctcaggctgagattttagtaaaggaaattatgccacgatgaatcctgaagaatgaatagaagtgaaccagataaagcacgataggaagcatcttcccttacctaagggaagacacagaggtatatggaatggtatgttaaaaggttgggactccaaacagttctgttaaagcttagagagtggtgggagagactggagaagttgattaattagtaaatgaagttgtctgtggatttcccagatcccagtggcattggatatccatattatttttaaatttacagtgttctatcttatttcccactcagtgtcagctgctgctggaagtggcctggcctctatttatcttcctgatcctgatctctgttcggctgagctacccaccctatgaacaacatgaatgtaagtaactgtggatgttgcctgagactcaccaatggcagggaaaatccaggcaattaacgtgggctaaattggacttttccaaagatgctgtctttgggaaacatcacacatgctttggatcagaaaacctaggcttctaatttgttgataaggcatgaactcaggagactgttttcagtcctagtgaatggtgataattgtaattataacagtagacaacatctcttttacacattttaaatcatgaaaatagaataaccttactgataattttagaaagtggtgattaaaagcacatttaagataatgccttaacacctagtcttttccatatgcatgatgtcttaatcacacattgcaaatcatggaacacagaattttaagcagcatttgtgtagaacttctcagttttactaatattattttattttattctcataacaaccttgaatagaactcagatcatctgtcaatcatgtattttgataacagcctttacagtgagcatagaaaatacagtagtggctaacaacacaggctccagatgtcaggttatctgggtatgaattctggtgtcagcattcactaagcatatgaccttggacaagtgatttaagtttcttttaaacagagaatagtaatacctacctcatattattattgtcagtgtatcatcttacaatcacagtctttctcttagggctgggctcagtgggtggattgacactgcagaaatggccagatctaaaggatcaacatttacgtagctgggaaatgtagctgggacttcagtttcactgccctagtgatttttcctaccactaagcagctcagtccatacccctacgagacccacaagcttatgagatactgttcttccaggaaagcagtggggccagggccaccttttaattgtgtttcttggcctggtcccatctttctcacaatatatagcaacagttatttacttgctgattttctaatgcacatcacacatagtcatattaaacacacacacacacacacacacacacacacacccctcaagaaacattttctgagacgtgatttcctgatttcatcaaaaaagaaaagagcgggccaggcacagtgggaagtcaaggtgggtggatcacttgaggtcaggagtttgaaaccagcctggccaacacggtggaacctcgtctctactaaaaatacaaaaattagccaggcgtggtggcgcacacctgtaatcccagctactggggaggctgaggcaggagaattgcttcaacctgcgaggctgaggttgcagtgagccgagattgcgccattgcactccagcctgggcaacagagtgagactctgtctcaaaaaaaaaaaaaaaaaaaaaagcataaactgaaatttatatgcaatttatatgcctgtgagataattctgttttctcttttggaaccccaaagagatttttttgattgatgagcaaatacattttagattttatttaagcattatgccaagcaccactgaagtataagtttcaagggcaaactcagttttttcatctactagacgaatgattttctggaatgattacaagcaggcaagatggtgtagtggaaatagcaaatgtcttcggcatcagacaagttggggtttgtttgtatcctgcctctgcccttcaccgaggttgtgatcttgggcagattgttgagttttaacctagattcctctgactccagatcataaattttcagaaaagttctgaaattcttgtatatactgatg

SEQ ID NO: 135 - DNA, 4046 bp, Homo sapiens
gcagtggcgtgatcatgcagtgatctcggctcactgcaacctaggccttctgggttcgagtgattctcctgccttagcctcctgggttcaagtgattctcttgccttggcctcccaagtagctgggattacaggcatacacccccatgcccatctaatttttgtatttttagtagacacagcgtttcactaaaattttgtatttttagtagagatggggtttcaccatgttggccaggctggtctccaactcctgacctcaggtgatccgcctgccttggcctcacaaagtgattacaggcatgagccactgcatccatcgccaaaaagattttttaaaagagtttaatgtagaaccatatcaaaggtctttggaaataaaaaacagttttttaaaaatatcagaaataaaacaacaaataaataaataaataaaaacacccaaaacaatctgaagcacgagcacctagcagaaaggttcaattatgatctattcatagagtggaatatcaagtagacattacaggacatgttttaagattatattttatgtcatgggaaatgctctcccagtatgatgttaaatgaaaaaacagaatacaaaagtatatatgctgcatagtctcaatattgtagagaaaaaatattatttatgtatgcatgaaaaaagacaaaagatgttaacagagatccattgttacttcagtttactagggattgtctctgggaggtaggattaaggtgatttatatttacctttttaaacttttctgtatttttttattttcaaattttccataaaaatataaggacttgaagatcaagaaaaaatttctgctttggctcagtgcagtggctcacgcctgtaatcccagcagtttgggagccctaggggagaggatcacttgaacccaagagtttgacgttccagtgagctatgatctccggatcgtaccgcctggacgatggagcaagaccctgtctcaaaaaaaaaaatctttgctttttttttttgtttgtttttgagacggagtctctctctgttgccccagctggagtacagtggcacaatctcagctcaccgcaacctctgcctcctgggttcaagcgattctcttgcctcagcctcccaagtacctgggattccatgcacccaccactatgcccagctacttttttgtattttcagtagagacagggtttcaccatgttggccaggctggtctcgaattcctgacctcagctgatccaccggccttggcctcccaaagtgctgggattacaggcatgagccactgtgcccagcccaatcttttgctttttttaaaaaaagaagacaaaaagggattttataccagtattatcttggctgtgtgactctgaagccacagttgtaagttataattactctgaaacacaaggccctgtgactcttttgggctctttggtgtttatcttgattacaacgttggaatatagaaatgaaaggaatgggagaggtgatagacttcaggcagtgtaactagttgtctgaacactactggctcaattatattgtgtctagtgatttccatcttgtccgtctgctaatttatcgcctggtaactcactgaggcagggttttcctttggagaaacctcattgttttaaccagtgtatcatgcttgtttagaagttcaatgatctttttaactcatcggagaagatgatgaccagacctggacagatggggaaggactttgcactctctctttacagtcctgagtgcacacaggtcaatatggaactatgtgtgaattttcattgtctttgagagccctcttctctgccccatagggagcagctttgtgtgcaattagaggagcaagggttgtgtgtatttagcacagcaggttggcctggtcctctcctctcaacatagtcaccacatacctggcactatgctaaggctgggaatgcagacagatgggtgcctgctttcagagtgctcaatgtgctgaggaagccagcaacagaaacagatgatttcaggagctccaggaaaatgctacaggaggagtgtgcctgggttactggagtagcacaggaggagggcttctagctcaggctgagattttagtaaaggaaattatgccacgatgaatcctgaagaatgaatagaagtgaaccagataaagcacgataggaagcatcttcccttacctaagggaagacacagaggtatatggaatggtatgttaaaaggttgggactccaaacagttctgttaaagcttagagagtggtgggagagactggagaagttgattaattagtaaatgaagttgtctgtggatttcccagatcccagtggcattggatatccatattatttttaaatttacagtgttctatcttatttcccactcagtgtcagctgctgctggaagtggcctggcctctatttatcttcctgatcctgatctctgttcggctgagctacccaccctatgaacaacatgaatgtaagtaactgtggatgttgcctgagactcaccaatggcagggaaaatccaggcaattaacgtgggctaaattggacttttccaaagatgctgtctttgggaaacatcacacatgctttggatcagaaaacctaggcttctaatttgttgataaggcatgaactcaggagactgttttcagtcctagtgaatggtgataattgtaattataacagtagacaacatctcttttacacattttaaatcatgaaaatagaataaccttactgataattttagaaagtggtgattaaaagcacatttaagataatgccttaacacctagtcttttccatatgcatgatgtcttaatcacacattgcaaatcatggaacacagaattttaagcagcatttgtgtagaacttctcagttttactaatattattttattttattctcataacaaccttgaatagaactcagatcatctgtcaatcatgtattttgataacagcctttacagtgagcatagaaaatacagtagtggctaacaacacaggctccagatgtcaggttatctgggtatgaattctggtgtcagcattcactaagcatatgaccttggacaagtgatttaagtttcttttaaacagagaatagtaatacctacctcatattattattgtcagtgtatcatcttacaatcacagtctttctcttagggctgggctcagtgggtggattgacactgcagaaatggccagatctaaaggatcaacatttacgtagctgggaaatgtagctgggacttcagtttcactgccctagtgatttttcctaccactaagcagctcagtccatacccctacgagacccacaagcttatgagatactgttcttccaggaaagcagtggggccagggccaccttttaattgtgtttcttggcctggtcccatctttctcacaatatatagcaacagttatttacttgctgattttctaatgcacatcacacatagtcatattaaacacacacacacacacacacacacacacacacccctcaagaaacattttctgagacgtgatttcctgatttcatcaaaaaagaaaagagcgggccaggcacagtgggaagtcaaggtgggtggatcacttgaggtcaggagtttgaaaccagcctggccaacacggtggaacctcgtctctactaaaaatacaaaaattagccaggcgtggtggcgcacacctgtaatcccagctactggggaggctgaggcaggagaattgcttcaacctgcgaggctgaggttgcagtgagccgagattgcgccattgcactccagcctgggcaacagagtgagactctgtctcaaaaaaaaaaaaaaaaaaaaaagcataaactgaaatttatatgcaatttatatgcctgtgagataattctgttttctcttttggaaccccaaagagatttttttgattgatgagcaaatacattttagattttatttaagcattatgccaagcaccactgaagtataagtttcaagggcaaactcag

SEQ ID NO: 136 - DNA, 4050 bp, Homo sapiens
taattggattgtttgatgattaaatgagttaatgtgtataaagcactcacaaccctggtacatagtaagacctttcattattattatcatcatcaattttttttaacctcttttcctgatctgcttacactcaccagcttcagctgctccaaatggcttgtaagattttttgtttgccctttgctgtcagttgccatggggaagatccattcatttttttcagtcaaccaacatattttgagcatctgctgccctacaggatcctagatatgggggctgcagagatatccaggaacataagccttgattaattgggtcagatcagtgctcagcagggctggcaagtgctaggtttcttttaagtggcatatcttaaaaggtatatgtcctaaacatagctttgtgatggcagcatgatgggtacaaaagcacacacttaagtgtcagtagatctgggttcaaacattggtgcagtttcttatggctcgtaacttgttcaaacctcagtttcttcacttctaaaacggtaatgatacaacctacctcacagggttattatgaattaaatactggagatgagatacacaaaacgtcttgagtacacagtagctgcccaatattggctgtaagtattataaatctacaagctgtgaattaattttacctctctggatcctgttgatatttctagaccattccacctagtggggccatttcctacctgagtcacccgtggtgtcaaatagaatgtcatgtggcctcctgagttgggtagaattggctgctcatctcaaccccgctactgactatctctgtgatttacccttcctccagccttagccttgctacatataaaatcaagacaataatgtttcctatctcacagggttgtcctgaggattaaattaagtaattaatataaaatgtgccttgtacatattgggccctaaataaacagtagctactatttatccttaaagtacaaatggtagtttcagagcttcaaggctgatggctatttatcttactcatactctttgtttagcttcatttttttcccctaatttcattagtattttcttttctttttttttttttttttttttttttttttttgaggtgaagtctcactctgttgcccaggctggagtgcaatggagcgatcttggctcaccccaacctctgtctcctgggttcaaacagttctcctgcctcagcctcccgagtagctgggattacaggctcccgccaccatgcccagctatttttttgtattttcagtagagatggggtttcacccttttgaccaggctggtcttgaactcctgacctcatgatcaacccacctcagcctcccaaagtgctgggattacaggtgtgagccaccacgcccggcctcataagtattttctaaatttatttacagtcatgccatttaaaaggaaagttgtattcctgtctttgttaatatttataagtgattttattcagctacaagcttggaatggcatataattttgtattctgcttttttcacttaatattacatggctaatgatttctgtgtttcataaacattattctgatgatggcatgatatattgttgagtacatgtaccataattgaatcatttccctattgctatgcaattaagttgtttccaatattttgcaattataatgtttcaatgaatgaataactttatgcatatagctttttgatatcttaagttcagtttcctaggatgaatttccaggaatagtaattgggcaaatgggataaacatgactcttgaatacgtattgttaacattgctttcccaaagggctcaactgatttatatttccgtgttcattatcttttaaaccagctcatttactcaccaaacatttttaaagccattatcatgtggtaggcttagtaagaagaaagtgaccctaagggagaagcttatatataaatagggtccctggtgtaccaagtgctgatacagacacaaagtacctggggaaattgagatgagggagtcctggctcagctgggagaaaagttcattttcatagagtcatggttttgttctttggcagaaagaaaattgctttcttccccacccccacccccagctttattgaggtataattgacaaataaaaattgtatatctttaagatatgcaatgtgatatatatgtatatctcaacttaaaaaataagctacagaataaaaaggtgtttgctattaaaaaaaaagaaaaggctgaatgtcattcccaagcttggaaatttgagtatgttgcctctttgggattatttacagaaatattagcaagaccagccccatctttggtcttgagtactccactgtcagcatgctttcttccagagagggatccatttgcctttatttttcattctgttgtgccgtctatgcaaactattcttgatagttttatggtaacagtgtttttttgttccatgagataatttatacatgctcattgtggaaaatttagaaaagacaggaaagtattaaaaacatcacttttttttttttttttttttttttttttttaagagacagagtcttgctctgtcgcccaggccggagtgcagtggcgtgatctcagctcacagcaacctccgcttcccaggtttaagtgattctcctgcctcagcctcccaagtagctgggagtacaggcatgcaccaccacgcccggctaattttgtatttttagtagagatggggtttcaccatgttggccaggctggtctcaaactcctgacctcaggtgatccgcctgccttggcctcgcaaagttctgggattataggcaggagccactgcgccagccacacctacgttcttatcatcctagtacatccactgtcattatcttgctgtatttccttctgcccagtctcactctgatcatgcagtggcgtgatcatgcagtgatctcggctcactgcaacctaggccttctgggttcgagtgattctcctgccttagcctcctgggttcaagtgattctcttgccttggcctcccaagtagctgggattacaggcatacacccccatgcccatctaatttttgtatttttagtagacacagcgtttcactaaaattttgtatttttagtagagatggggtttcaccatgttggccaggctggtctccaactcctgacctcaggtgatccgcctgccttggcctcacaaagtgattacaggcatgagccactgcatccatcgccaaaaagattttttaaaagagtttaatgtagaaccatatcaaaggtctttggaaataaaaaacagttttttaaaaatatcagaaataaaacaacaaataaataaataaataaaaacacccaaaacaatctgaagcacgagcacctagcagaaaggttcaattatgatctattcatagagtggaatatcaagtagacattacaggacatgttttaagattatattttatgtcatgggaaatgctctcccagtatgatgttaaatgaaaaaacagaatacaaaagtatatatgctgcatagtctcaatattgtagagaaaaaatattatttatgtatgcatgaaaaaagacaaaagatgttaacagagatccattgttacttcagtttactagggattgtctctgggaggtaggattaaggtgatttatatttacctttttaaacttttctgtatttttttattttcaaattttccataaaaatataaggacttgaagatcaagaaaaaatttctgctttggctcagtgcagtggctcacgcctgtaatcccagcagtttgggagccctaggggagaggatcacttgaacccaagagtttgacgttccagtgagctatgatctccggatcgtaccgcctggacgatggagcaagaccctgtctcaaaaaaaaaaatctttgctttttttttttgtttgtttttgagacggagtctctctctgttgccccagctggagtacagtggcacaatctcagctcaccgcaacctctgcctcctgggttcaagcgattctct

SEQ ID NO: 137 - DNA, 4023 bp, Homo sapiens
gcctctcagaatatcttttgatatttttatctgttttttccccattgaatgttattaccttatcaagctcaaaaaagtaccctatcgctattttaagttcagttgtgttaaatctataaattagcttgggaaatttggatattaaatgaactcatgaagaagcagagtttagctctccttaattctcatcttcctttatttatcctactacagttctgtggttttcttttatgtaagaagcacatgtttggctaagttaatgcctaggtttttttgtttatgtgtccattctcactgtggatagtattctcttttccccacattatattaatttaactggttttcagagactaatagcaatgctattatttaggagaatttaccttggttctgattaacttacccatacttgcaaatcatttgcagctttttagttaactttgtgagttctcttagatttacgaccatgccagaaacagaaaggatattttcatctcttcctttctgatgtttattcttcttgtttcctttttttatcccccattatattctcaagaatctctcaatactaagaaatagcgacttcatttttcagcgcggagtgcattattttggctaccatgattcagaagcctcttgcctaaggcccaattttattctgctagttttctctgttctttgtacatggcccttgcgctgccctaaccttgaattaacgtggctaaatctcaagaatttaagagcaccgtgactgtgtcctcaggctagggagggaaatgggttcacagagtgactggattgtggtctatgaacttcggcagccagcagcaaaagtcaggcatgaataatcaagtggacagtgaacatctgtagtgtgggagatgttggcataactatgaatgatgattcaagagtggtttgatgcatattgaataacatgatgataagtactagactctgtgctaagccttctatgtgaaatacatttaattctcataataactctagagcagtggttctcgaccggggccggttatccccctaccccaccccaccctcacccttccaccagggacataacatctggagatatttttggttgtcacaatcctgggaatgtatgtgctgatatttagaggttgaggtcagggatgctgctgaacttcgtagaattcataggagagtctctcacaacacctatctggccccaaatgtcagtagggtcactatcaagaaaatctgctctagcagtgcctgctcatattatccccatgttgaaatagcaagatgggaagtgcaaagtggtgcttcggtactcttggagcagctttgactttggtgagaaacgccttttaaaaacaatgtttcttcccatcttcccaccccatggggaggtgtggggttgggtgggtaggcaccaaagcaagatttagaagagttttctgtaggaatttataatggtaaaggatcaacttcatttccaagctatttatgagggtttatgtttaggaaaagtgctaagcttagagaaggaggagaaatctgattttattaatgagtgtagccataatggcatatcctggcagaagtcaactttggtttctagagggaggctattatgaaaagaaatacctggaacattcccctgggtttggaaggtgagttctaggttcaatgatgggaagaattttagaggtccaagataaaagggcaaagattaaattttgtctctcatgagttctctggctcaggtggtgtgaactttgcagacagtctctttaattcactcatacatgctagtctcccagctcagcaagggctttgagagagcaggtgtctgtatgctctggtaagtgaaggcaaagtgcataaggaggttggggtccataatggcgaagagaaggagcccttcagtcagagtggctttgaatcttggctctgccatttgccaatcttggaccattgggcagtgtattaactctttgaatctcagcttcctcttctgtaaaatgtgtataacaagagtactaattggattgtttgatgattaaatgagttaatgtgtataaagcactcacaaccctggtacatagtaagacctttcattattattatcatcatcaattttttttaacctcttttcctgatctgcttacactcaccagcttcagctgctccaaatggcttgtaagattttttgtttgccctttgctgtcagttgccatggggaagatccattcatttttttcagtcaaccaacatattttgagcatctgctgccctacaggatcctagatatgggggctgcagagatatccaggaacataagccttgattaattgggtcagatcagtgctcagcagggctggcaagtgctaggtttcttttaagtggcatatcttaaaaggtatatgtcctaaacatagctttgtgatggcagcatgatgggtacaaaagcacacacttaagtgtcagtagatctgggttcaaacattggtgcagtttcttatggctcgtaacttgttcaaacctcagtttcttcacttctaaaacggtaatgatacaacctacctcacagggttattatgaattaaatactggagatgagatacacaaaacgtcttgagtacacagtagctgcccaatattggctgtaagtattataaatctacaagctgtgaattaattttacctctctggatcctgttgatatttctagaccattccacctagtggggccatttcctacctgagtcacccgtggtgtcaaatagaatgtcatgtggcctcctgagttgggtagaattggctgctcatctcaaccccgctactgactatctctgtgatttacccttcctccagccttagccttgctacatataaaatcaagacaataatgtttcctatctcacagggttgtcctgaggattaaattaagtaattaatataaaatgtgccttgtacatattgggccctaaataaacagtagctactatttatccttaaagtacaaatggtagtttcagagcttcaaggctgatggctatttatcttactcatactctttgtttagcttcatttttttcccctaatttcattagtattttcttttctttttttttttttttttttttttttttttttgaggtgaagtctcactctgttgcccaggctggagtgcaatggagcgatcttggctcaccccaacctctgtctcctgggttcaaacagttctcctgcctcagcctcccgagtagctgggattacaggctcccgccaccatgcccagctatttttttgtattttcagtagagatggggtttcacccttttgaccaggctggtcttgaactcctgacctcatgatcaacccacctcagcctcccaaagtgctgggattacaggtgtgagccaccacgcccggcctcataagtattttctaaatttatttacagtcatgccatttaaaaggaaagttgtattcctgtctttgttaatatttataagtgattttattcagctacaagcttggaatggcatataattttgtattctgcttttttcacttaatattacatggctaatgatttctgtgtttcataaacattattctgatgatggcatgatatattgttgagtacatgtaccataattgaatcatttccctattgctatgcaattaagttgtttccaatattttgcaattataatgtttcaatgaatgaataactttatgcatatagctttttgatatcttaagttcagtttcctaggatgaatttccaggaatagtaattgggcaaatgggataaacatgactcttgaatacgtattgttaacattgctttcccaaagggctcaactgatttatatttccgtgttcattatcttttaaaccagctcatttactcaccaaacatttttaaagccattatcatgtggtaggcttagtaagaagaaagtgaccctaagggagaagcttatatataaatagggtccctggtgtaccaagtgctgatacaga

SEQ ID NO: 138 - DNA, 4038 bp, Homo sapiens
ggcctggaggaatataataactgagacttgttttatttctgcagagggttctaagccattcacttcccagatgggccaataatgctttgagtaatctggagatcatctttaatgcgcaggtgaatggaactcttccacagagggatgtgagggctgtagagcagagtgaactccctgaaactcagacgtcagctctttgtctctctatctctgaacacccttccttagagatcccatctctaggatgcatttctctgtagttagtttctaagtctcttgttcctgttctgcctttatttttttttcctggattctaagccagtatccccacttggctgtcttaatgtagcttaacatgtctgtaatcaaaatgatcatctttctgagattcaaagggctataagggactttggagagaatttcattcagttttcctcaaactagaataatgcttgcactgtctgtaaaagaacaaaagtgtcaaagcatccttttgttcactaaatttccttttttattatagtgttacttaaatattaggaagtaaaagtaggtataaacttcttataggctgttattatacaactatatgacccatacatatttacaaattaagtgcagccaaaattgcaaaatcaataccattcaaattaataccttaaatgtggtgaggcagctgttgttcaactgaaaccaaattataagttgcatggcagtaaatgctatcatgctgatcattttgagtttggccagtctatattatcatgtgctaatgattgaattctccacccatttttctacttgtatgaccttaatttgatggcacctgttccatcctcatgagtttgctacaattatactggtgccaacacaatcataaacacaaatataaacttgggctttgaaatcttgtgccagaacttggctttaaagtaagcatttaaaaaatccatatgtgtttattagactttgtttagatgactgttgaaatgaaaacaaagtgtttaaaatcctcttagagaacttaaatataatccctcagcaatatgtatacagatcttcctttgagaaaaactgattgtgttcagcctctcatgttacaaatggggaacctgaattctgaggtctctagtgagagaacagggactggaatctgtggatcctatctgttttaataataattgtaaagtataatagataatattatattaataaaataaaagcaaacacttagaatgagcttccatgtgtgaggcactaactgattaggcattattaactagatttattccttttaaggccccgcgatgtactgttatttccacatgttgtagctggggaacgtgctactcagagaggttaagtaacttgtctgaggtccacaccactaacaaggagcacaggtagggttcaaatccagataatctgactttggagctggcactctaactcaatgtgcctaatcgcttttcagtggtgtcattattttgcctattctccatctgagaatattgaagtttctgactccttccttgcctttctccctgcctcccgtggttatccccaggtcttggtgttccagtcctctatgtccgtccttactcttattcctttgctacagtgtgatccagggctcctgccccttcttatcctggtagagggggcccacttgctgggaaattgtctccgccatggtttatccatgttgtgtgtccattagtgagtagtgggaagaatcatatcatgttggcaatgaaaggggggctatggctctggggtagtctagtctgaacctcttattttacggatgagaaagctgaggtacaaagcagggaagggatttcttgaggtcacccagccagcaactgagctgcaaccagaagctgagatccccaggactagggccgagcctcattctgtcccatcacagtgacttttcttccctcctccaaactatttttattttttatttttttgcagctgcttagcagcttgaagttagaagaaagggcagggaaaaggttttccgtgcttagccagggaaggaatcctgcaacaggatgtggggttgggtcattcaaattgggccagactccactggtcttgttgcttcttgcttggtattgcagatgggtttaaaagtgttaggattagagagataggcaggtttagccaaaggcagtttgtagccttgtggcagagttctttttaaagaaggaagtgggatgcaacaccctgacacaaaggggcttaagttgttataccactgcctgctaacctgttttccttaactctcttcctgatttctaaaggaagtatattttgctgaatcagaaagaaaagtgatttatttcaggttgctgatgcttagattgttagagttggaaagatctggcttgcatcttgtacagctgacagaactggggctcaggggggcacaggtgcccagagttggtcagtcaggaaagtagcaccagaaccagtctcctggtggccctacagttgcagacccttttttgctttgctctctgtgtatactaaagcttctatgtctctgaatctcaagttctgactggtagctactttccaatccacctggcttagatttctagattatattgtttagacgtcagaacctcttaagggttttggggccacttgttagctcacatagtgagaaccagccctgcccattaggtaggggaagaagttagcagtccatgatagctgttgcctgcagcgtatggatgttcattgcacagttcctgtctcctgagatcctggagtgtatacgcttggcctcagagcccagcacagagcctggcccttgggacatgcttagtaagtatttactgaatgagtgggaaatgtcttaaggcccattagtttgcaggtcttgaggaggctcccttgcactaggaagaatagaaagcatacataaagcctgtgtgctgccgccaggaagactagaaacgctatgttcagcctggagctgaatggtataccccagagcaaccctgttgaaaggcagtgcttgccttttcattctgtgtcctggtttgctggtaactcctgggtcccctgcctctcctgtacccccattgtgcagactgaggggggaccatcagccagggttagttttccgctgtttctgttaggcaaagaataaattgaattgagttgtgaaagttgggtgcaaagctcagtttgggtccaaagtaacagttaacttgtgtgggtggcaggtattcagtacaaacagggctggggacaggaaggggaagagaacttcagagctttcacgatcctcatctggttttaggctgatccagaggccaaggtccccatggaacaaactggacaaagtgagggtggccacatggcctcttttcttttgcctttattattaattttctcaaatagatctgactagtcatgtggctgggaaaatagttaattgtgatttttttttttttaaactgagtctcactctattgcccaggctggagtgcagtggtatgatctcagctcgccgcaacctctgcctcccgggatcaagcaattgtcatgcctcagcctcccgggtagctgggattatgggcacacagcaccacgcctggctaatttttgtatttttagtagagacatggttttagcatgttggccaggctggtcttgaactcctgacctcaagtgatccacccacctcagccttccaatctgctgggattacaggcatgagccactgcacccagccagagtaccactatttgggcattctttaatgaaaaagaatgaactatccaaaaattaaaactcctcatttatgagcttttagagaattttacagagtagatggaaactctctgcatcctttccccacttctagtttcacctgacacatttcttccctgtccttactcctgggccggcagcagtggtcatgattccaatcccagcttggccaccatctgcctcagtggcctaggaaaactcctttctccagagctttagttttctcttctacggaatgaagaa

SEQ ID NO: 139 - DNA, 4047 bp, Homo sapiens
gtctattttcagaaatgcattcttcattcccagatgataacatctatagaactaaaatgattaggaccataacacgtagctcctagcctgctgtcggaacacctcccgagtccctctttgtgggtgaacccagaggctgggagctggtgactcatgatccattgagaagcagtcatgatgcagagctgtgtgttggaggtctcagctgagagggctggattagcagtcctcattggtgtatggctttgcagcaataactgatggctgtttcccctcctgctttatctttcagttaatgaccagccacggcgtccctgctgtgagctctggccgctgccttccagggctcccgagccacacgctgggggtgctggctgagggaacatggcttgttggcctcagctgaggttgctgctgtggaagaacctcactttcagaagaagacaaacagtaagcttgggtttttcagcagcggggggttctctcattttttctttgtggttttgagttggggattggaggagggagggagggaaggaagctgtgttggttttcacacagggattgatggaatctggctcttatggacacaggactgtgtggtccggatatggcatgtggcttatcatagagggcagatttgcagccaggtagaaatagtagctttggtttgtgctactgcccaggcatgagttctgatccctaggacctggctccgaatcgcccctgagcaccccactttttccttttgctgcagccctgggagccacctggctctccaaaagcccctaatgggcccctgtatttctggaagctgtgggtgaagtgagttagtggccccactcttagagatcaatactgggtatcttggtgtcaatctggattctttccttcaggcctggaggaatataataactgagacttgttttatttctgcagagggttctaagccattcacttcccagatgggccaataatgctttgagtaatctggagatcatctttaatgcgcaggtgaatggaactcttccacagagggatgtgagggctgtagagcagagtgaactccctgaaactcagacgtcagctctttgtctctctatctctgaacacccttccttagagatcccatctctaggatgcatttctctgtagttagtttctaagtctcttgttcctgttctgcctttatttttttttcctggattctaagccagtatccccacttggctgtcttaatgtagcttaacatgtctgtaatcaaaatgatcatctttctgagattcaaagggctataagggactttggagagaatttcattcagttttcctcaaactagaataatgcttgcactgtctgtaaaagaacaaaagtgtcaaagcatccttttgttcactaaatttccttttttattatagtgttacttaaatattaggaagtaaaagtaggtataaacttcttataggctgttattatacaactatatgacccatacatatttacaaattaagtgcagccaaaattgcaaaatcaataccattcaaattaataccttaaatgtggtgaggcagctgttgttcaactgaaaccaaattataagttgcatggcagtaaatgctatcatgctgatcattttgagtttggccagtctatattatcatgtgctaatgattgaattctccacccatttttctacttgtatgaccttaatttgatggcacctgttccatcctcatgagtttgctacaattatactggtgccaacacaatcataaacacaaatataaacttgggctttgaaatcttgtgccagaacttggctttaaagtaagcatttaaaaaatccatatgtgtttattagactttgtttagatgactgttgaaatgaaaacaaagtgtttaaaatcctcttagagaacttaaatataatccctcagcaatatgtatacagatcttcctttgagaaaaactgattgtgttcagcctctcatgttacaaatggggaacctgaattctgaggtctctagtgagagaacagggactggaatctgtggatcctatctgttttaataataattgtaaagtataatagataatattatattaataaaataaaagcaaacacttagaatgagcttccatgtgtgaggcactaactgattaggcattattaactagatttattccttttaaggccccgcgatgtactgttatttccacatgttgtagctggggaacgtgctactcagagaggttaagtaacttgtctgaggtccacaccactaacaaggagcacaggtagggttcaaatccagataatctgactttggagctggcactctaactcaatgtgcctaatcgcttttcagtggtgtcattattttgcctattctccatctgagaatattgaagtttctgactccttccttgcctttctccctgcctcccgtggttatccccaggtcttggtgttccagtcctctatgtccgtccttactcttattcctttgctacagtgtgatccagggctcctgccccttcttatcctggtagagggggcccacttgctgggaaattgtctccgccatggtttatccatgttgtgtgtccattagtgagtagtgggaagaatcatatcatgttggcaatgaaaggggggctatggctctggggtagtctagtctgaacctcttattttacggatgagaaagctgaggtacaaagcagggaagggatttcttgaggtcacccagccagcaactgagctgcaaccagaagctgagatccccaggactagggccgagcctcattctgtcccatcacagtgacttttcttccctcctccaaactatttttattttttatttttttgcagctgcttagcagcttgaagttagaagaaagggcagggaaaaggttttccgtgcttagccagggaaggaatcctgcaacaggatgtggggttgggtcattcaaattgggccagactccactggtcttgttgcttcttgcttggtattgcagatgggtttaaaagtgttaggattagagagataggcaggtttagccaaaggcagtttgtagccttgtggcagagttctttttaaagaaggaagtgggatgcaacaccctgacacaaaggggcttaagttgttataccactgcctgctaacctgttttccttaactctcttcctgatttctaaaggaagtatattttgctgaatcagaaagaaaagtgatttatttcaggttgctgatgcttagattgttagagttggaaagatctggcttgcatcttgtacagctgacagaactggggctcaggggggcacaggtgcccagagttggtcagtcaggaaagtagcaccagaaccagtctcctggtggccctacagttgcagacccttttttgctttgctctctgtgtatactaaagcttctatgtctctgaatctcaagttctgactggtagctactttccaatccacctggcttagatttctagattatattgtttagacgtcagaacctcttaagggttttggggccacttgttagctcacatagtgagaaccagccctgcccattaggtaggggaagaagttagcagtccatgatagctgttgcctgcagcgtatggatgttcattgcacagttcctgtctcctgagatcctggagtgtatacgcttggcctcagagcccagcacagagcctggcccttgggacatgcttagtaagtatttactgaatgagtgggaaatgtcttaaggcccattagtttgcaggtcttgaggaggctcccttgcactaggaagaatagaaagcatacataaagcctgtgtgctgccgccaggaagactagaaacgctatgttcagcctggagctgaatggtataccccagagcaaccctgttgaaaggcagtgcttgccttttcattctgtgtcctggtttgctggtaactcctgggtcccctgcctctcctgtacccccattgtgcagactgaggggggaccatcagccagggttagttttccgctgtttc

SEQ ID NO: 140 - DNA, 4053 bp, Homo sapiens
ttggaatgaagaaagataaatggggagaagggaactcacattgctttggcacttaaattaagccatgtactgtgttgggaaattatttatattatctcgttgaatccacagtagaacacagttgaacaccatacaaggtaagtattgtcatccttattttaccatgaggaaattgatgcttagagagcataaagccttggccaggggcacatagttgggaagccggggctaattcatgcctgggctctttctgatagttttccttttttaattgtcccctcctcattgttaccttggggatttcaagagattcatgtagcttctaaatcaacgaactgattcctggagagcagcttctgtatgagaaaaatctagctaattatttatttcagtgtctctggaatgcaagctctgtcctgagccacttagaaaacaatttgggatgacaagcatgtgtctcacaatgctgctctggttgccagtgctgtgctgccagttgtcatctttgaacaaactgatgcagtgctggtttaactcttcctctttttggagtaagaaactttggaggcctgtgtccttctagaagtttgctgagcaaatggtaaggaaaagaaataggtcctaaggcttgactatttcagagaatttcttgatttattggactgtcaatgaatgaattggaatacatagtggtaggctgtcttttcttctcagacactgcaatttcctccaatctcttgacttttctagaagttttaatccaagtccttgttgggtggtagataaaagggtattgttctactagagactgaccttggcatggagatctcatttggactcacagatttctagtctagcgcttggttttgtatccatacctcgctactgcattcttagttccttctgctccttgttcctcatgcccagtgtcccaccctacccttgcccctactcctctagaggccacagtgattcactgagccatttcataagcacagctaggagagttcatggctaccaagtgccagcagggccgaattttcacctgtgtgtcctcccttccatttttcatcttctgccccctccccagctttaactttaatataactacttgggactattccagcattaaataagggtaactgctggatgggtggctgggatacacagaatgtagtatcccttgttcacgagaagaccttcttgccctagcatggcaaacagtcctccaaggaggcacctgtgacacccaacggagtaggggggcggtgtgttcaggtgcaggtggaacaaggccagaagtgtgcatatgtgctgaccatgggagcttgtttgtcggtttcacagttgatgccctgagcctgccatagcagacttgtttctccatgggatgctgttttctttccagagacacagcgctagggttgtcctcattacctgagagccaggtgtcggtagcattttcttggtgtttactcacactcatctaaggcacgttgtggttttccagattaggaaactgctttattgatggtgctttttttttttttttttgagacagagtctcgctctgtcgccatgctggagtgtagtggcacaatcttggctcactgcacctccgcctgccaggttcagcgattctcctgcctcagcctcccaagtagctgggactacaggtgcctgccaccatgcccagctaatttttgtatttttagtagagacggggtttcaccgtattggctaggatggtctcgatttcttgacctcgtgatccgcctgcctcggcctcccaaagtgctgggattataggcttgagccaccacgcctggccgatggtgctttttatcatttgaaggactcagttgtataacccactgaaaattagtatgtaaggaagttcagggaatagtataagtcactccaggcttgaggcaaaatttacaaatgctgctgactttgtatgtaaggggaggcattttcttagaaaagagaggtaggtctctgggattccagtatgccatttccatcctcagtgtttttggccacctgagagaggtctattttcagaaatgcattcttcattcccagatgataacatctatagaactaaaatgattaggaccataacacgtagctcctagcctgctgtcggaacacctcccgagtccctctttgtgggtgaacccagaggctgggagctggtgactcatgatccattgagaagcagtcatgatgcagagctgtgtgttggaggtctcagctgagagggctggattagcagtcctcattggtgtatggctttgcagcaataactgatggctgtttcccctcctgctttatctttcagttaatgaccagccacggcgtccctgctgtgagctctggccgctgccttccagggctcccgagccacacgctgggggtgctggctgagggaacatggcttgttggcctcagctgaggttgctgctgtggaagaacctcactttcagaagaagacaaacagtaagcttgggtttttcagcagcggggggttctctcattttttctttgtggttttgagttggggattggaggagggagggagggaaggaagctgtgttggttttcacacagggattgatggaatctggctcttatggacacaggactgtgtggtccggatatggcatgtggcttatcatagagggcagatttgcagccaggtagaaatagtagctttggtttgtgctactgcccaggcatgagttctgatccctaggacctggctccgaatcgcccctgagcaccccactttttccttttgctgcagccctgggagccacctggctctccaaaagcccctaatgggcccctgtatttctggaagctgtgggtgaagtgagttagtggccccactcttagagatcaatactgggtatcttggtgtcaatctggattctttccttcaggcctggaggaatataataactgagacttgttttatttctgcagagggttctaagccattcacttcccagatgggccaataatgctttgagtaatctggagatcatctttaatgcgcaggtgaatggaactcttccacagagggatgtgagggctgtagagcagagtgaactccctgaaactcagacgtcagctctttgtctctctatctctgaacacccttccttagagatcccatctctaggatgcatttctctgtagttagtttctaagtctcttgttcctgttctgcctttatttttttttcctggattctaagccagtatccccacttggctgtcttaatgtagcttaacatgtctgtaatcaaaatgatcatctttctgagattcaaagggctataagggactttggagagaatttcattcagttttcctcaaactagaataatgcttgcactgtctgtaaaagaacaaaagtgtcaaagcatccttttgttcactaaatttccttttttattatagtgttacttaaatattaggaagtaaaagtaggtataaacttcttataggctgttattatacaactatatgacccatacatatttacaaattaagtgcagccaaaattgcaaaatcaataccattcaaattaataccttaaatgtggtgaggcagctgttgttcaactgaaaccaaattataagttgcatggcagtaaatgctatcatgctgatcattttgagtttggccagtctatattatcatgtgctaatgattgaattctccacccatttttctacttgtatgaccttaatttgatggcacctgttccatcctcatgagtttgctacaattatactggtgccaacacaatcataaacacaaatataaacttgggctttgaaatcttgtgccagaacttggctttaaagtaagcatttaaaaaatccatatgtgtttattagactttgtttagatgactgttgaaatgaaaacaaagtgtttaaaatcctcttagagaacttaaatataatccctcagcaatatgtatacagatcttcctttgagaaaaactgattgtgttcagcctctcatgttacaa

SEQ ID NO: 141 - DNA, 4097 bp, Homo sapiens
ttcatccttactgctttgcccctcctatctttccagaaacccacaatggatttgctagaaataatggaacgtcctgtttggacaggatataaccatttctcagctagaggatattgttggaatgaagaaagataaatggggagaagggaactcacattgctttggcacttaaattaagccatgtactgtgttgggaaattatttatattatctcgttgaatccacagtagaacacagttgaacaccatacaaggtaagtattgtcatccttattttaccatgaggaaattgatgcttagagagcataaagccttggccaggggcacatagttgggaagccggggctaattcatgcctgggctctttctgatagttttccttttttaattgtcccctcctcattgttaccttggggatttcaagagattcatgtagcttctaaatcaacgaactgattcctggagagcagcttctgtatgagaaaaatctagctaattatttatttcagtgtctctggaatgcaagctctgtcctgagccacttagaaaacaatttgggatgacaagcatgtgtctcacaatgctgctctggttgccagtgctgtgctgccagttgtcatctttgaacaaactgatgcagtgctggtttaactcttcctctttttggagtaagaaactttggaggcctgtgtccttctagaagtttgctgagcaaatggtaaggaaaagaaataggtcctaaggcttgactatttcagagaatttcttgatttattggactgtcaatgaatgaattggaatacatagtggtaggctgtcttttcttctcagacactgcaatttcctccaatctcttgacttttctagaagttttaatccaagtccttgttgggtggtagataaaagggtattgttctactagagactgaccttggcatggagatctcatttggactcacagatttctagtctagcgcttggttttgtatccatacctcgctactgcattcttagttccttctgctccttgttcctcatgcccagtgtcccaccctacccttgcccctactcctctagaggccacagtgattcactgagccatttcataagcacagctaggagagttcatggctaccaagtgccagcagggccgaattttcacctgtgtgtcctcccttccatttttcatcttctgccccctccccagctttaactttaatataactacttgggactattccagcattaaataagggtaactgctggatgggtggctgggatacacagaatgtagtatcccttgttcacgagaagaccttcttgccctagcatggcaaacagtcctccaaggaggcacctgtgacacccaacggagtaggggggcggtgtgttcaggtgcaggtggaacaaggccagaagtgtgcatatgtgctgaccatgggagcttgtttgtcggtttcacagttgatgccctgagcctgccatagcagacttgtttctccatgggatgctgttttctttccagagacacagcgctagggttgtcctcattacctgagagccaggtgtcggtagcattttcttggtgtttactcacactcatctaaggcacgttgtggttttccagattaggaaactgctttattgatggtgctttttttttttttttttgagacagagtctcgctctgtcgccatgctggagtgtagtggcacaatcttggctcactgcacctccgcctgccaggttcagcgattctcctgcctcagcctcccaagtagctgggactacaggtgcctgccaccatgcccagctaatttttgtatttttagtagagacggggtttcaccgtattggctaggatggtctcgatttcttgacctcgtgatccgcctgcctcggcctcccaaagtgctgggattataggcttgagccaccacgcctggccgatggtgctttttatcatttgaaggactcagttgtataacccactgaaaattagtatgtaaggaagttcagggaatagtataagtcactccaggcttgaggcaaaatttacaaatgctgctgactttgtatgtaaggggaggcattttcttagaaaagagaggtaggtctctgggattccagtatgccatttccatcctcagtgtttttggccacctgagagaggtctattttcagaaatgcattcttcattcccagatgataacatctatagaactaaaatgattaggaccataacacgtagctcctagcctgctgtcggaacacctcccgagtccctctttgtgggtgaacccagaggctgggagctggtgactcatgatccattgagaagcagtcatgatgcagagctgtgtgttggaggtctcagctgagagggctggattagcagtcctcattggtgtatggctttgcagcaataactgatggctgtttcccctcctgctttatctttcagttaatgaccagccacggcgtccctgctgtgagctctggccgctgccttccagggctcccgagccacacgctgggggtgctggctgagggaacatggcttgttggcctcagctgaggttgctgctgtggaagaacctcactttcagaagaagacaaacagtaagcttgggtttttcagcagcggggggttctctcattttttctttgtggttttgagttggggattggaggagggagggagggaaggaagctgtgttggttttcacacagggattgatggaatctggctcttatggacacaggactgtgtggtccggatatggcatgtggcttatcatagagggcagatttgcagccaggtagaaatagtagctttggtttgtgctactgcccaggcatgagttctgatccctaggacctggctccgaatcgcccctgagcaccccactttttccttttgctgcagccctgggagccacctggctctccaaaagcccctaatgggcccctgtatttctggaagctgtgggtgaagtgagttagtggccccactcttagagatcaatactgggtatcttggtgtcaatctggattctttccttcaggcctggaggaatataataactgagacttgttttatttctgcagagggttctaagccattcacttcccagatgggccaataatgctttgagtaatctggagatcatctttaatgcgcaggtgaatggaactcttccacagagggatgtgagggctgtagagcagagtgaactccctgaaactcagacgtcagctctttgtctctctatctctgaacacccttccttagagatcccatctctaggatgcatttctctgtagttagtttctaagtctcttgttcctgttctgcctttatttttttttcctggattctaagccagtatccccacttggctgtcttaatgtagcttaacatgtctgtaatcaaaatgatcatctttctgagattcaaagggctataagggactttggagagaatttcattcagttttcctcaaactagaataatgcttgcactgtctgtaaaagaacaaaagtgtcaaagcatccttttgttcactaaatttccttttttattatagtgttacttaaatattaggaagtaaaagtaggtataaacttcttataggctgttattatacaactatatgacccatacatatttacaaattaagtgcagccaaaattgcaaaatcaataccattcaaattaataccttaaatgtggtgaggcagctgttgttcaactgaaaccaaattataagttgcatggcagtaaatgctatcatgctgatcattttgagtttggccagtctatattatcatgtgctaatgattgaattctccacccatttttctacttgtatgaccttaatttgatggcacctgttccatcctcatgagtttgctacaattatactggtgccaacacaatcataaacacaaatataaacttgggctttgaaatcttgtgccagaacttggctttaaagtaagcatttaaaaaatccatatgtgtttattagactttgtttagatgactgttgaaatgaaaacaaagtgtttaaaatcctcttagagaacttaaata

SEQ ID NO: 142 - DNA, 4057 bp, Homo sapiens
gtcttccaagttatgacttgtgaggtatgttaattatgataatagaaggcagtttatttggttcagatttattgatgtgtaatttaccacagtaagacttcccctttacaaaagtatgatgagttttgacaaatggatacacatgtgtatctaccactgccatgctccttttcagtctgtcgtcccctccacccatgaccactggtcaccactgcagtgatttctgtccccttcatttcaccttttccagaatgtcatataaatggaatcatgcagtatgtagttttttgtgtctggcttatttttcttagcattaggcttttgggattcatccaggttgtcgcatgtaacagtagcttattcctttttatggctgagtaagtgtcccagttttatttatatatttatttatgaggaggtgtctcactctgtcacccaggctggagtgcggtagcgcgatctcagctcactgcaacctccgcctcccaggttcaagcaattctcctgcctcctgagtagctgggattacaggcacccaccgccacgcccaactaatttttatatttttagtagagatggggtttcaccatgttggccaggctgatctcaaactcttgacctcaggtgatccgcccacctctggctcccaaagtgctaggattacaggcatgagccactgtgcccagccccagttttatttattcaccagttgatggtcttttcgacaactaattgtttccagtttttggctattctgtataaggcttctataaatattcacaaatacctaggatgggatgactgggtcatataatagtactgtataaccttagcagaaactgtcaaactattttccaaagtggctcttccattttacaattccacagtgtattgagtcccagtgtctccatacacatgctagcacttttaatatttaatttagtgggtatgtaatgatatctcattgtggttttaatttgcatttctctgcagctaatgatgagtgtttctgcttatttgggaaggttttaatttagcagtctgttgtattctgtagatattaataacttcaaaatatcagtggcatttgcagttaaaatttccttaaaaaattggccaaaggtttccagcagtcacttctgccatgcccaaactgtatgaaacaaggctgaggtgtggagattgtcacattttggcaaggagtgatccacttgggtgactgatgagacccagagagcgtacgcctcgggcttgagggtgaggacgggcgggaagtcgactgcatggccctgctggccttgggaggctgcccagtccttagctaaagctggcagttatgggaaacagacttagattctattacgtttttcaggatgtcccaggagtcacctgggaagctcagcagtcctttgtgactttcaagcatatggtagaagctgctgaacacagagctccctctttggggataatttgcccaaatcatttaatcaggcttgagaaatgagttaccacaggtccaggagtgctgccacccttgaattctgacaccctatttctcctatccgtctcttaattaattaagcagacatccccaagtgcttacgacaagccaggacccttttgcatactaaggaaaacagggatgaaggaaacagaaatggtctctgctctgactcagaaggtagaaatcctctttcccagccaagtcttcctagggagcacgtaggaagggctctgaacccacgtgtcagttgcaggggaggatatcaggaaaggacattgaagaagtggagacctaagtttgagacctaggcattagccaggctagcagtgcttgaaaaagtgtcttaggacaagagaactcaccagtgaagtcccagtggtaggagagcgtgcagcatattctgagcctgtatacacatctccagggcattgcttagcaggtggggagtggcaagagagtaggctggagtcacagaagggaggccaggtagaccttggtgagcactggactctatgttcaggtgctgaggagctggcaaaaggttttaagtcggggagaggcatgttcagatatttggtctagctgagtaactttgggtgctctgtgacaaatggttgggagaccagtgaggtggcagttgcggtcatctaggagcaggatcagagtggcctattgactgggatgactgtgaagtgggatcctttccagccagtaactggaaatgtgtatgagggcagaagtgagtgtactgcatttgaaacattgagaaatctagtacatagtactgtctcttttatatcttttttttttttttttttgattttggtttgtttgttcactaacttggaaaactgatgtggaaatgtccctttggcttcagttacctgagcagaaggggccgggcattgccaaactctcctcttaggacagaattgctcccagtattgatcattgtgttctgagttgggggagcaaattgtgcaggaggccaggtcagtgccaaggtgggtgggaggaattggagcaggaagcttgcctaagtgtgcccagcaaagccacggtagaactttctactgtggctctatgctacttcttagcaaccttctccatgtgcttcctggagagtccttggagtcagaacctttttcttgaaacccagacactttacttccaagaaaatgctgtccaagaaaactcatccttcccttcttctcatgaacgttgtgtagaggtgtgtcttctcttcctttgagcttttccactcagggtttaggggaggtgatattctatatttgggtttggctctgggtactgcaacactaggctattaagatttcatccttactgctttgcccctcctatctttccagaaacccacaatggatttgctagaaataatggaacgtcctgtttggacaggatataaccatttctcagctagaggatattgttggaatgaagaaagataaatggggagaagggaactcacattgctttggcacttaaattaagccatgtactgtgttgggaaattatttatattatctcgttgaatccacagtagaacacagttgaacaccatacaaggtaagtattgtcatccttattttaccatgaggaaattgatgcttagagagcataaagccttggccaggggcacatagttgggaagccggggctaattcatgcctgggctctttctgatagttttccttttttaattgtcccctcctcattgttaccttggggatttcaagagattcatgtagcttctaaatcaacgaactgattcctggagagcagcttctgtatgagaaaaatctagctaattatttatttcagtgtctctggaatgcaagctctgtcctgagccacttagaaaacaatttgggatgacaagcatgtgtctcacaatgctgctctggttgccagtgctgtgctgccagttgtcatctttgaacaaactgatgcagtgctggtttaactcttcctctttttggagtaagaaactttggaggcctgtgtccttctagaagtttgctgagcaaatggtaaggaaaagaaataggtcctaaggcttgactatttcagagaatttcttgatttattggactgtcaatgaatgaattggaatacatagtggtaggctgtcttttcttctcagacactgcaatttcctccaatctcttgacttttctagaagttttaatccaagtccttgttgggtggtagataaaagggtattgttctactagagactgaccttggcatggagatctcatttggactcacagatttctagtctagcgcttggttttgtatccatacctcgctactgcattcttagttccttctgctccttgttcctcatgcccagtgtcccaccctacccttgcccctactcctctagaggccacagtgattcactgagccatttcataagcacagctaggagagttcatggctaccaagtgccagcagggccgaattttcacctgtgtgtcctcccttccatttttcatcttctgccccctccccagctttaactttaat

SEQ ID NO: 143 - DNA, 4048 bp, Homo sapiens
gataaatatttgttgtggctcatgggcaccttgcagagttaaggctgcagttgtttgtggaatttataagtggtaatgaatatttatctactattcctcttccaaggcgatcacacaataatcaggctttacactatccagttcttaggtcttccaagttatgacttgtgaggtatgttaattatgataatagaaggcagtttatttggttcagatttattgatgtgtaatttaccacagtaagacttcccctttacaaaagtatgatgagttttgacaaatggatacacatgtgtatctaccactgccatgctccttttcagtctgtcgtcccctccacccatgaccactggtcaccactgcagtgatttctgtccccttcatttcaccttttccagaatgtcatataaatggaatcatgcagtatgtagttttttgtgtctggcttatttttcttagcattaggcttttgggattcatccaggttgtcgcatgtaacagtagcttattcctttttatggctgagtaagtgtcccagttttatttatatatttatttatgaggaggtgtctcactctgtcacccaggctggagtgcggtagcgcgatctcagctcactgcaacctccgcctcccaggttcaagcaattctcctgcctcctgagtagctgggattacaggcacccaccgccacgcccaactaatttttatatttttagtagagatggggtttcaccatgttggccaggctgatctcaaactcttgacctcaggtgatccgcccacctctggctcccaaagtgctaggattacaggcatgagccactgtgcccagccccagttttatttattcaccagttgatggtcttttcgacaactaattgtttccagtttttggctattctgtataaggcttctataaatattcacaaatacctaggatgggatgactgggtcatataatagtactgtataaccttagcagaaactgtcaaactattttccaaagtggctcttccattttacaattccacagtgtattgagtcccagtgtctccatacacatgctagcacttttaatatttaatttagtgggtatgtaatgatatctcattgtggttttaatttgcatttctctgcagctaatgatgagtgtttctgcttatttgggaaggttttaatttagcagtctgttgtattctgtagatattaataacttcaaaatatcagtggcatttgcagttaaaatttccttaaaaaattggccaaaggtttccagcagtcacttctgccatgcccaaactgtatgaaacaaggctgaggtgtggagattgtcacattttggcaaggagtgatccacttgggtgactgatgagacccagagagcgtacgcctcgggcttgagggtgaggacgggcgggaagtcgactgcatggccctgctggccttgggaggctgcccagtccttagctaaagctggcagttatgggaaacagacttagattctattacgtttttcaggatgtcccaggagtcacctgggaagctcagcagtcctttgtgactttcaagcatatggtagaagctgctgaacacagagctccctctttggggataatttgcccaaatcatttaatcaggcttgagaaatgagttaccacaggtccaggagtgctgccacccttgaattctgacaccctatttctcctatccgtctcttaattaattaagcagacatccccaagtgcttacgacaagccaggacccttttgcatactaaggaaaacagggatgaaggaaacagaaatggtctctgctctgactcagaaggtagaaatcctctttcccagccaagtcttcctagggagcacgtaggaagggctctgaacccacgtgtcagttgcaggggaggatatcaggaaaggacattgaagaagtggagacctaagtttgagacctaggcattagccaggctagcagtgcttgaaaaagtgtcttaggacaagagaactcaccagtgaagtcccagtggtaggagagcgtgcagcatattctgagcctgtatacacatctccagggcattgcttagcaggtggggagtggcaagagagtaggctggagtcacagaagggaggccaggtagaccttggtgagcactggactctatgttcaggtgctgaggagctggcaaaaggttttaagtcggggagaggcatgttcagatatttggtctagctgagtaactttgggtgctctgtgacaaatggttgggagaccagtgaggtggcagttgcggtcatctaggagcaggatcagagtggcctattgactgggatgactgtgaagtgggatcctttccagccagtaactggaaatgtgtatgagggcagaagtgagtgtactgcatttgaaacattgagaaatctagtacatagtactgtctcttttatatcttttttttttttttttttgattttggtttgtttgttcactaacttggaaaactgatgtggaaatgtccctttggcttcagttacctgagcagaaggggccgggcattgccaaactctcctcttaggacagaattgctcccagtattgatcattgtgttctgagttgggggagcaaattgtgcaggaggccaggtcagtgccaaggtgggtgggaggaattggagcaggaagcttgcctaagtgtgcccagcaaagccacggtagaactttctactgtggctctatgctacttcttagcaaccttctccatgtgcttcctggagagtccttggagtcagaacctttttcttgaaacccagacactttacttccaagaaaatgctgtccaagaaaactcatccttcccttcttctcatgaacgttgtgtagaggtgtgtcttctcttcctttgagcttttccactcagggtttaggggaggtgatattctatatttgggtttggctctgggtactgcaacactaggctattaagatttcatccttactgctttgcccctcctatctttccagaaacccacaatggatttgctagaaataatggaacgtcctgtttggacaggatataaccatttctcagctagaggatattgttggaatgaagaaagataaatggggagaagggaactcacattgctttggcacttaaattaagccatgtactgtgttgggaaattatttatattatctcgttgaatccacagtagaacacagttgaacaccatacaaggtaagtattgtcatccttattttaccatgaggaaattgatgcttagagagcataaagccttggccaggggcacatagttgggaagccggggctaattcatgcctgggctctttctgatagttttccttttttaattgtcccctcctcattgttaccttggggatttcaagagattcatgtagcttctaaatcaacgaactgattcctggagagcagcttctgtatgagaaaaatctagctaattatttatttcagtgtctctggaatgcaagctctgtcctgagccacttagaaaacaatttgggatgacaagcatgtgtctcacaatgctgctctggttgccagtgctgtgctgccagttgtcatctttgaacaaactgatgcagtgctggtttaactcttcctctttttggagtaagaaactttggaggcctgtgtccttctagaagtttgctgagcaaatggtaaggaaaagaaataggtcctaaggcttgactatttcagagaatttcttgatttattggactgtcaatgaatgaattggaatacatagtggtaggctgtcttttcttctcagacactgcaatttcctccaatctcttgacttttctagaagttttaatccaagtccttgttgggtggtagataaaagggtattgttctactagagactgaccttggcatggagatctcatttggactcacagatttctagtctagcgcttggttttgtatccatacctcgctactgcattcttagttccttctgctccttgttcctcatgcccagtgtcccaccctacccttgc

SEQ ID NO: 144 - DNA, 4100 bp, Homo sapiens
tctcagttcattgtcctaaagatgcttcatcagaaaggaataacttccaccccgttactctctgtccccttactctgctttatttttcttcgtcaatcctaccaccaccacccactgtttgaacaacccactattatttgtctgtttcccatccctggtagaataggagccccatgaatgaaggaactttgcttctgttgttcaccactgaatctctaaggtatggaacacacctggcatgtgataggcactcgataaatatttgttgtggctcatgggcaccttgcagagttaaggctgcagttgtttgtggaatttataagtggtaatgaatatttatctactattcctcttccaaggcgatcacacaataatcaggctttacactatccagttcttaggtcttccaagttatgacttgtgaggtatgttaattatgataatagaaggcagtttatttggttcagatttattgatgtgtaatttaccacagtaagacttcccctttacaaaagtatgatgagttttgacaaatggatacacatgtgtatctaccactgccatgctccttttcagtctgtcgtcccctccacccatgaccactggtcaccactgcagtgatttctgtccccttcatttcaccttttccagaatgtcatataaatggaatcatgcagtatgtagttttttgtgtctggcttatttttcttagcattaggcttttgggattcatccaggttgtcgcatgtaacagtagcttattcctttttatggctgagtaagtgtcccagttttatttatatatttatttatgaggaggtgtctcactctgtcacccaggctggagtgcggtagcgcgatctcagctcactgcaacctccgcctcccaggttcaagcaattctcctgcctcctgagtagctgggattacaggcacccaccgccacgcccaactaatttttatatttttagtagagatggggtttcaccatgttggccaggctgatctcaaactcttgacctcaggtgatccgcccacctctggctcccaaagtgctaggattacaggcatgagccactgtgcccagccccagttttatttattcaccagttgatggtcttttcgacaactaattgtttccagtttttggctattctgtataaggcttctataaatattcacaaatacctaggatgggatgactgggtcatataatagtactgtataaccttagcagaaactgtcaaactattttccaaagtggctcttccattttacaattccacagtgtattgagtcccagtgtctccatacacatgctagcacttttaatatttaatttagtgggtatgtaatgatatctcattgtggttttaatttgcatttctctgcagctaatgatgagtgtttctgcttatttgggaaggttttaatttagcagtctgttgtattctgtagatattaataacttcaaaatatcagtggcatttgcagttaaaatttccttaaaaaattggccaaaggtttccagcagtcacttctgccatgcccaaactgtatgaaacaaggctgaggtgtggagattgtcacattttggcaaggagtgatccacttgggtgactgatgagacccagagagcgtacgcctcgggcttgagggtgaggacgggcgggaagtcgactgcatggccctgctggccttgggaggctgcccagtccttagctaaagctggcagttatgggaaacagacttagattctattacgtttttcaggatgtcccaggagtcacctgggaagctcagcagtcctttgtgactttcaagcatatggtagaagctgctgaacacagagctccctctttggggataatttgcccaaatcatttaatcaggcttgagaaatgagttaccacaggtccaggagtgctgccacccttgaattctgacaccctatttctcctatccgtctcttaattaattaagcagacatccccaagtgcttacgacaagccaggacccttttgcatactaaggaaaacagggatgaaggaaacagaaatggtctctgctctgactcagaaggtagaaatcctctttcccagccaagtcttcctagggagcacgtaggaagggctctgaacccacgtgtcagttgcaggggaggatatcaggaaaggacattgaagaagtggagacctaagtttgagacctaggcattagccaggctagcagtgcttgaaaaagtgtcttaggacaagagaactcaccagtgaagtcccagtggtaggagagcgtgcagcatattctgagcctgtatacacatctccagggcattgcttagcaggtggggagtggcaagagagtaggctggagtcacagaagggaggccaggtagaccttggtgagcactggactctatgttcaggtgctgaggagctggcaaaaggttttaagtcggggagaggcatgttcagatatttggtctagctgagtaactttgggtgctctgtgacaaatggttgggagaccagtgaggtggcagttgcggtcatctaggagcaggatcagagtggcctattgactgggatgactgtgaagtgggatcctttccagccagtaactggaaatgtgtatgagggcagaagtgagtgtactgcatttgaaacattgagaaatctagtacatagtactgtctcttttatatcttttttttttttttttttgattttggtttgtttgttcactaacttggaaaactgatgtggaaatgtccctttggcttcagttacctgagcagaaggggccgggcattgccaaactctcctcttaggacagaattgctcccagtattgatcattgtgttctgagttgggggagcaaattgtgcaggaggccaggtcagtgccaaggtgggtgggaggaattggagcaggaagcttgcctaagtgtgcccagcaaagccacggtagaactttctactgtggctctatgctacttcttagcaaccttctccatgtgcttcctggagagtccttggagtcagaacctttttcttgaaacccagacactttacttccaagaaaatgctgtccaagaaaactcatccttcccttcttctcatgaacgttgtgtagaggtgtgtcttctcttcctttgagcttttccactcagggtttaggggaggtgatattctatatttgggtttggctctgggtactgcaacactaggctattaagatttcatccttactgctttgcccctcctatctttccagaaacccacaatggatttgctagaaataatggaacgtcctgtttggacaggatataaccatttctcagctagaggatattgttggaatgaagaaagataaatggggagaagggaactcacattgctttggcacttaaattaagccatgtactgtgttgggaaattatttatattatctcgttgaatccacagtagaacacagttgaacaccatacaaggtaagtattgtcatccttattttaccatgaggaaattgatgcttagagagcataaagccttggccaggggcacatagttgggaagccggggctaattcatgcctgggctctttctgatagttttccttttttaattgtcccctcctcattgttaccttggggatttcaagagattcatgtagcttctaaatcaacgaactgattcctggagagcagcttctgtatgagaaaaatctagctaattatttatttcagtgtctctggaatgcaagctctgtcctgagccacttagaaaacaatttgggatgacaagcatgtgtctcacaatgctgctctggttgccagtgctgtgctgccagttgtcatctttgaacaaactgatgcagtgctggtttaactcttcctctttttggagtaagaaactttggaggcctgtgtccttctagaagtttgctgagcaaatggtaaggaaaagaaataggtcctaaggcttgactatttcagagaatttcttgatttattggactgtcaatgaatgaattggaatacatagtggtaggctgtcttttcttctcagacactgcaatttcctccaatctcttgacttt

SEQ ID NO: 145 - DNA, 4048 bp, Homo sapiens
ttggtttagggaaaagtaaaagtaattttataatcccagctgtcatttaagccacccctttgtgggtagcatatggtccactctctcagttcattgtcctaaagatgcttcatcagaaaggaataacttccaccccgttactctctgtccccttactctgctttatttttcttcgtcaatcctaccaccaccacccactgtttgaacaacccactattatttgtctgtttcccatccctggtagaataggagccccatgaatgaaggaactttgcttctgttgttcaccactgaatctctaaggtatggaacacacctggcatgtgataggcactcgataaatatttgttgtggctcatgggcaccttgcagagttaaggctgcagttgtttgtggaatttataagtggtaatgaatatttatctactattcctcttccaaggcgatcacacaataatcaggctttacactatccagttcttaggtcttccaagttatgacttgtgaggtatgttaattatgataatagaaggcagtttatttggttcagatttattgatgtgtaatttaccacagtaagacttcccctttacaaaagtatgatgagttttgacaaatggatacacatgtgtatctaccactgccatgctccttttcagtctgtcgtcccctccacccatgaccactggtcaccactgcagtgatttctgtccccttcatttcaccttttccagaatgtcatataaatggaatcatgcagtatgtagttttttgtgtctggcttatttttcttagcattaggcttttgggattcatccaggttgtcgcatgtaacagtagcttattcctttttatggctgagtaagtgtcccagttttatttatatatttatttatgaggaggtgtctcactctgtcacccaggctggagtgcggtagcgcgatctcagctcactgcaacctccgcctcccaggttcaagcaattctcctgcctcctgagtagctgggattacaggcacccaccgccacgcccaactaatttttatatttttagtagagatggggtttcaccatgttggccaggctgatctcaaactcttgacctcaggtgatccgcccacctctggctcccaaagtgctaggattacaggcatgagccactgtgcccagccccagttttatttattcaccagttgatggtcttttcgacaactaattgtttccagtttttggctattctgtataaggcttctataaatattcacaaatacctaggatgggatgactgggtcatataatagtactgtataaccttagcagaaactgtcaaactattttccaaagtggctcttccattttacaattccacagtgtattgagtcccagtgtctccatacacatgctagcacttttaatatttaatttagtgggtatgtaatgatatctcattgtggttttaatttgcatttctctgcagctaatgatgagtgtttctgcttatttgggaaggttttaatttagcagtctgttgtattctgtagatattaataacttcaaaatatcagtggcatttgcagttaaaatttccttaaaaaattggccaaaggtttccagcagtcacttctgccatgcccaaactgtatgaaacaaggctgaggtgtggagattgtcacattttggcaaggagtgatccacttgggtgactgatgagacccagagagcgtacgcctcgggcttgagggtgaggacgggcgggaagtcgactgcatggccctgctggccttgggaggctgcccagtccttagctaaagctggcagttatgggaaacagacttagattctattacgtttttcaggatgtcccaggagtcacctgggaagctcagcagtcctttgtgactttcaagcatatggtagaagctgctgaacacagagctccctctttggggataatttgcccaaatcatttaatcaggcttgagaaatgagttaccacaggtccaggagtgctgccacccttgaattctgacaccctatttctcctatccgtctcttaattaattaagcagacatccccaagtgcttacgacaagccaggacccttttgcatactaaggaaaacagggatgaaggaaacagaaatggtctctgctctgactcagaaggtagaaatcctctttcccagccaagtcttcctagggagcacgtaggaagggctctgaacccacgtgtcagttgcaggggaggatatcaggaaaggacattgaagaagtggagacctaagtttgagacctaggcattagccaggctagcagtgcttgaaaaagtgtcttaggacaagagaactcaccagtgaagtcccagtggtaggagagcgtgcagcatattctgagcctgtatacacatctccagggcattgcttagcaggtggggagtggcaagagagtaggctggagtcacagaagggaggccaggtagaccttggtgagcactggactctatgttcaggtgctgaggagctggcaaaaggttttaagtcggggagaggcatgttcagatatttggtctagctgagtaactttgggtgctctgtgacaaatggttgggagaccagtgaggtggcagttgcggtcatctaggagcaggatcagagtggcctattgactgggatgactgtgaagtgggatcctttccagccagtaactggaaatgtgtatgagggcagaagtgagtgtactgcatttgaaacattgagaaatctagtacatagtactgtctcttttatatcttttttttttttttttttgattttggtttgtttgttcactaacttggaaaactgatgtggaaatgtccctttggcttcagttacctgagcagaaggggccgggcattgccaaactctcctcttaggacagaattgctcccagtattgatcattgtgttctgagttgggggagcaaattgtgcaggaggccaggtcagtgccaaggtgggtgggaggaattggagcaggaagcttgcctaagtgtgcccagcaaagccacggtagaactttctactgtggctctatgctacttcttagcaaccttctccatgtgcttcctggagagtccttggagtcagaacctttttcttgaaacccagacactttacttccaagaaaatgctgtccaagaaaactcatccttcccttcttctcatgaacgttgtgtagaggtgtgtcttctcttcctttgagcttttccactcagggtttaggggaggtgatattctatatttgggtttggctctgggtactgcaacactaggctattaagatttcatccttactgctttgcccctcctatctttccagaaacccacaatggatttgctagaaataatggaacgtcctgtttggacaggatataaccatttctcagctagaggatattgttggaatgaagaaagataaatggggagaagggaactcacattgctttggcacttaaattaagccatgtactgtgttgggaaattatttatattatctcgttgaatccacagtagaacacagttgaacaccatacaaggtaagtattgtcatccttattttaccatgaggaaattgatgcttagagagcataaagccttggccaggggcacatagttgggaagccggggctaattcatgcctgggctctttctgatagttttccttttttaattgtcccctcctcattgttaccttggggatttcaagagattcatgtagcttctaaatcaacgaactgattcctggagagcagcttctgtatgagaaaaatctagctaattatttatttcagtgtctctggaatgcaagctctgtcctgagccacttagaaaacaatttgggatgacaagcatgtgtctcacaatgctgctctggttgccagtgctgtgctgccagttgtcatctttgaacaaactgatgcagtgctggtttaactcttcctctttttggagtaagaaactttggaggcctgtgtccttctagaagtttgctgagcaaatggtaaggaaa

SEQ ID NO: 146 - DNA, 4041 bp, Homo sapiens
ctctctcccccaatccctccctccggctgaggaaactaacaaaggaaaaaaaaattgcggaaagcaggatttagaggaagcaaattccactggtgcccttggctgccgggaacgtggactagagagtctgcggcgcagccccgagcccagcgcttcccgcgcgtcttaggccggcgggcccgggcgggggaaggggacgcagaccgcggaccctaagacacctgctgtaccctccacccccaccccacccacctccccccaactccctagatgtgtcgtgggcggctgaacgtcgcccgtttaaggggcgggccccggctccacgtgctttctgctgagtgactgaactacataaacagaggccgggaacggggcggggaggagggagagcacaggctttgaccgatagtaacctctgcgctcggtgcagccgaatctataaaaggaactagtcccggcaaaaaccccgtaattgcgagcgagagtgagtggggccgggacccgcagagccgagccgacccttctctcccgggctgcggcagggcagggcggggagctccgcgcaccaacagagccggttctcagggcgctttgctccttgttttttccccggttctgttttctccccttctccggaaggcttgtcaaggggtaggagaaagagacgcaaacacaaaagtggaaaacaggtaagaggctctccagtgacttacttgggcgttattgttttgtttcgaggccaaggaggcttcgggaagtgctcggtttcggggactttgatccggagccccacatccccaccacttgcaactcagatgggaccggaggcggtgttaaatggggagacgatgtcctagtacgagctctggtgaccccaggactctgcgctgctgcgcttggggcttgcccgacggtggagaccggggagcatctctgggcgtggagacccgggcgcagtaccccgggctcagaggggtcgggggttcccgggcgtgctgagggcgctgctgccgggtggggagagctgcaggtccggcaccgagcgctgctttgttcggagggccctgagctggctagaaacccttctggttgcaggtcggccagtacctacggagacaaatgccagcactgagtcttcactcggttcttaagaagctggtctgttctgacctgggaattggctatatgctccccgggactggagcggcacagtcccggactgtgaatccgggaactcgagttggaggtgtcccaaacggtccgtggtgctattgctcactagaggccttgggtctttgtttgacctgaggggtagggaggtcctgcctacagtctccgtgcgctcagctgagctggtgtccctggcgcagagcgcggacgagttttgtttccttttctttttcttttttttctttcctttaagtctcggtctgtcgcccaggctggagtgcaatggaacgatctccgctcactgcaacctccgcctcccgggttcaagcgattctcctgcctcagcctcctgagtagctgggattacaggcgcgtcaccacatccagctaatttttgtatttttagtagagacggggtttcaacttgttggccaggctggtctcgaaccctcgacctcaggtgatccaccggcctcggcctccccaagtgctgggattataggcgtgagccaccgcgcgcggccgagttttgtttcttttaaaaacaagacttaggagagcctgcggagacccggaggtggggtgcccaatcctccctctcccacgttccctgcagccccatcttccagaccgttgctgctggtctctcggggcagcttctgcctgggcgcagatggggaagctgggccgaggtggtgccgtggaatgaccgggagtaaccccggcgggcggcgcagaactcggagctccgccgcggggctgggctgggctctgccgtgagggtgggggtgctgggcgcgcgggctgcggtggcccccggagactggcccgcagcgcctcctggccggaggacctaggaatcggccggctctactaggtgtctttgctcgcggttccgactgtgaatccggtgaagaccggtggttgcagacggggaggaactatgaggttgaggcgaaagcccgttttgtttttttttttttgtttttttggtttttttttttgttagcgtgtttgccaactcccaggccattggtaaagcaggaaggttcttggggcggcggacggtgccagggttatgtgtaggtgcctctttaggtatatcttttatcaaaaagaagcaaagaaataagattaaaaataaacaaagaaaaaagttgtctggcactggcagtaattggcctgcctttgcagcactgataccattagcttttaaaatccgacttttcattgacacttcaagaagagaatgggtagtatatacacattcatctcatagtggacaaatttcatatttaaaaaaaccttctgggtactgaaatcagcaagtcacttgccctccatggccgaatccctgcttcccacgaagagaacctcacaaaaatttcccccaagttaaagagtggaattttcttgatttttttttcttttttttttaacggccgtagtttagaacccagacttaaattatgatcttcttttcaaacaaaacttaaagtccttaagttttcatctccccttttatttcaacctattcttctcatacctaccacaaaaataatggaggctttctgttgagaaactttccgtttctgttgagagtatcattctcttgagaaactttctcctaaatcagagaaagtatggaagcatggaaagtattcctgagtagaacctctacagatattacaatatttttcaaatacaaagtttccattgtcagcctgtttcccaagtgcttccacaaaccattaaataattccacaaaccattaaaataattaatgctagggaattttaggaaaacattggtttacaatcagaaggaccggggaagtgggtcttcagccttcacgatgactacaagccatttaagggactagaattgctactgttgtcagagcaatttaggagtctgtatttgagcacccgcatagtgttccagaatgacatatctgactgtaacctggacacgtgtgatatgttgtctcccctgcagatgagcatttgaaatctcaaccctcgtatttctacgagtgcaggcctataatggaccctgggcacattttttttttttttgagatgcagtctcgctctgtttcccaggctggagtgcagtggcacgatatggctcactgcaacctccacctcctgggttcaagagattctcctgcctcagcctcctgagtagctgggactataggcgcacgccaccatgcctggctagtttttgcattttcagtagagacagagtttcaccatgttggccaggatggtctcgatttcctgacctcttgatccacccgcctcggcctcccaaagtgctgggattacaggcgtgaggcaccgcgcccgacccctggacacattttgacttagaacatattttcggtttgtgtgagacagtgcattagtgcaggattggaaaagagtgatcaggaattgattgttttcaaggattggttccttctgctcaaggaagtcccattgtaaacataaaaaaatgaatgaaactgaagaagttcagtgacttagctttttattatcttctgtagtacttacctttttggagaggagttggttgggatatttttccatttaaattttttttttaaagggatcttctctcccgtaagccgggatacttaagctatatatgtagtggctacaaattaaggtcttcactgttttcatttttagctgctagaataagtgaacattaccttagatagactcttctaattatgaagatatctagatgtctagaaaatatcaaaatgcatgtggtttttgcatttctaaaatacttttaaaaccaaatactttttcttttttttttttttctgagatggagtcttgctcttttgcctag

SEQ ID NO: 147 - DNA, 4055 bp, Homo sapiens
tgaatctgcccttcaaggtggctacaaaggtatctttgtcaaggtaggagaccttgtggcctccacgtgcacttccagggcctgcttgggcctcttctacgggtctgtcctgagtcttctatgaatctgcccttcagggcagattcatatttagactcttcacagtttgacctgagttttggccagaataaggtgacatttagtttgttggcttgatggatgacttaaatatttagacatatggtgtgtaggcctgcattcctactcttgcctttttttttgcccctccagtgttttgggtagttttgctcccctacagccaaaggcaaacagataagttggaggtctggagtggctacataattttacacgactgcaattctctggctgcacttcacaaatgtatacaaactaaatacaagtcctgtgtttttatcacagggaggctgatcaatataatgaaattaaaagggggctggtccatattgttctgtgtttttgtttgtttgtttctttttttgtttttgtggcctccttcctctcaatttatgaagagaagcagtaagatgttcctctcgggtcctctgagggacctggggagctcaggctgggaatctccaaggcagtaggtcgcctatcaaaaatcaaagtccaggtttgtggggggaaaacaaaagcagcccattacccagaggactgtccgccttcccctcaccccagcctaggcctttgaaaggaaacaaaagacaagacaaaatgattggcgtcctgagggagattcagcctagagctctctctcccccaatccctccctccggctgaggaaactaacaaaggaaaaaaaaattgcggaaagcaggatttagaggaagcaaattccactggtgcccttggctgccgggaacgtggactagagagtctgcggcgcagccccgagcccagcgcttcccgcgcgtcttaggccggcgggcccgggcgggggaaggggacgcagaccgcggaccctaagacacctgctgtaccctccacccccaccccacccacctccccccaactccctagatgtgtcgtgggcggctgaacgtcgcccgtttaaggggcgggccccggctccacgtgctttctgctgagtgactgaactacataaacagaggccgggaacggggcggggaggagggagagcacaggctttgaccgatagtaacctctgcgctcggtgcagccgaatctataaaaggaactagtcccggcaaaaaccccgtaattgcgagcgagagtgagtggggccgggacccgcagagccgagccgacccttctctcccgggctgcggcagggcagggcggggagctccgcgcaccaacagagccggttctcagggcgctttgctccttgttttttccccggttctgttttctccccttctccggaaggcttgtcaaggggtaggagaaagagacgcaaacacaaaagtggaaaacaggtaagaggctctccagtgacttacttgggcgttattgttttgtttcgaggccaaggaggcttcgggaagtgctcggtttcggggactttgatccggagccccacatccccaccacttgcaactcagatgggaccggaggcggtgttaaatggggagacgatgtcctagtacgagctctggtgaccccaggactctgcgctgctgcgcttggggcttgcccgacggtggagaccggggagcatctctgggcgtggagacccgggcgcagtaccccgggctcagaggggtcgggggttcccgggcgtgctgagggcgctgctgccgggtggggagagctgcaggtccggcaccgagcgctgctttgttcggagggccctgagctggctagaaacccttctggttgcaggtcggccagtacctacggagacaaatgccagcactgagtcttcactcggttcttaagaagctggtctgttctgacctgggaattggctatatgctccccgggactggagcggcacagtcccggactgtgaatccgggaactcgagttggaggtgtcccaaacggtccgtggtgctattgctcactagaggccttgggtctttgtttgacctgaggggtagggaggtcctgcctacagtctccgtgcgctcagctgagctggtgtccctggcgcagagcgcggacgagttttgtttccttttctttttcttttttttctttcctttaagtctcggtctgtcgcccaggctggagtgcaatggaacgatctccgctcactgcaacctccgcctcccgggttcaagcgattctcctgcctcagcctcctgagtagctgggattacaggcgcgtcaccacatccagctaatttttgtatttttagtagagacggggtttcaacttgttggccaggctggtctcgaaccctcgacctcaggtgatccaccggcctcggcctccccaagtgctgggattataggcgtgagccaccgcgcgcggccgagttttgtttcttttaaaaacaagacttaggagagcctgcggagacccggaggtggggtgcccaatcctccctctcccacgttccctgcagccccatcttccagaccgttgctgctggtctctcggggcagcttctgcctgggcgcagatggggaagctgggccgaggtggtgccgtggaatgaccgggagtaaccccggcgggcggcgcagaactcggagctccgccgcggggctgggctgggctctgccgtgagggtgggggtgctgggcgcgcgggctgcggtggcccccggagactggcccgcagcgcctcctggccggaggacctaggaatcggccggctctactaggtgtctttgctcgcggttccgactgtgaatccggtgaagaccggtggttgcagacggggaggaactatgaggttgaggcgaaagcccgttttgtttttttttttttgtttttttggtttttttttttgttagcgtgtttgccaactcccaggccattggtaaagcaggaaggttcttggggcggcggacggtgccagggttatgtgtaggtgcctctttaggtatatcttttatcaaaaagaagcaaagaaataagattaaaaataaacaaagaaaaaagttgtctggcactggcagtaattggcctgcctttgcagcactgataccattagcttttaaaatccgacttttcattgacacttcaagaagagaatgggtagtatatacacattcatctcatagtggacaaatttcatatttaaaaaaaccttctgggtactgaaatcagcaagtcacttgccctccatggccgaatccctgcttcccacgaagagaacctcacaaaaatttcccccaagttaaagagtggaattttcttgatttttttttcttttttttttaacggccgtagtttagaacccagacttaaattatgatcttcttttcaaacaaaacttaaagtccttaagttttcatctccccttttatttcaacctattcttctcatacctaccacaaaaataatggaggctttctgttgagaaactttccgtttctgttgagagtatcattctcttgagaaactttctcctaaatcagagaaagtatggaagcatggaaagtattcctgagtagaacctctacagatattacaatatttttcaaatacaaagtttccattgtcagcctgtttcccaagtgcttccacaaaccattaaataattccacaaaccattaaaataattaatgctagggaattttaggaaaacattggtttacaatcagaaggaccggggaagtgggtcttcagccttcacgatgactacaagccatttaagggactagaattgctactgttgtcagagcaatttaggagtctgtatttgagcacccgcatagtgttccagaatgacatatctgactgtaacctggacacgtgtgatatgttgtctcccctgcagatgagcatttgaaatctcaaccctcgtatttctacgagtgcaggcctataatggaccctgggcacattttttttttttttgagatgcagtctcgc

SEQ ID NO: 148 - DNA, 4046 bp, Homo sapiens
tatgggtctgtcctgagtgttgatagaaccactgatgtgagtacctgggcttgagccgtggcctggagatcctgttgactgtagcatggagggggcttgtgcagctgaatgtctgtatgcaggtggtgggagttctggaatatgatggagctggaggtgggaagagaagtaggcttggggcagctctctcatgccacctcattctggccaaaactcaggtcaaactgtgaagagtctaaatgtgaatctgcccttcaaggtggctacaaaggtatctttgtcaaggtaggagaccttgtggcctccacgtgcacttccagggcctgcttgggcctcttctacgggtctgtcctgagtcttctatgaatctgcccttcagggcagattcatatttagactcttcacagtttgacctgagttttggccagaataaggtgacatttagtttgttggcttgatggatgacttaaatatttagacatatggtgtgtaggcctgcattcctactcttgcctttttttttgcccctccagtgttttgggtagttttgctcccctacagccaaaggcaaacagataagttggaggtctggagtggctacataattttacacgactgcaattctctggctgcacttcacaaatgtatacaaactaaatacaagtcctgtgtttttatcacagggaggctgatcaatataatgaaattaaaagggggctggtccatattgttctgtgtttttgtttgtttgtttctttttttgtttttgtggcctccttcctctcaatttatgaagagaagcagtaagatgttcctctcgggtcctctgagggacctggggagctcaggctgggaatctccaaggcagtaggtcgcctatcaaaaatcaaagtccaggtttgtggggggaaaacaaaagcagcccattacccagaggactgtccgccttcccctcaccccagcctaggcctttgaaaggaaacaaaagacaagacaaaatgattggcgtcctgagggagattcagcctagagctctctctcccccaatccctccctccggctgaggaaactaacaaaggaaaaaaaaattgcggaaagcaggatttagaggaagcaaattccactggtgcccttggctgccgggaacgtggactagagagtctgcggcgcagccccgagcccagcgcttcccgcgcgtcttaggccggcgggcccgggcgggggaaggggacgcagaccgcggaccctaagacacctgctgtaccctccacccccaccccacccacctccccccaactccctagatgtgtcgtgggcggctgaacgtcgcccgtttaaggggcgggccccggctccacgtgctttctgctgagtgactgaactacataaacagaggccgggaacggggcggggaggagggagagcacaggctttgaccgatagtaacctctgcgctcggtgcagccgaatctataaaaggaactagtcccggcaaaaaccccgtaattgcgagcgagagtgagtggggccgggacccgcagagccgagccgacccttctctcccgggctgcggcagggcagggcggggagctccgcgcaccaacagagccggttctcagggcgctttgctccttgttttttccccggttctgttttctccccttctccggaaggcttgtcaaggggtaggagaaagagacgcaaacacaaaagtggaaaacaggtaagaggctctccagtgacttacttgggcgttattgttttgtttcgaggccaaggaggcttcgggaagtgctcggtttcggggactttgatccggagccccacatccccaccacttgcaactcagatgggaccggaggcggtgttaaatggggagacgatgtcctagtacgagctctggtgaccccaggactctgcgctgctgcgcttggggcttgcccgacggtggagaccggggagcatctctgggcgtggagacccgggcgcagtaccccgggctcagaggggtcgggggttcccgggcgtgctgagggcgctgctgccgggtggggagagctgcaggtccggcaccgagcgctgctttgttcggagggccctgagctggctagaaacccttctggttgcaggtcggccagtacctacggagacaaatgccagcactgagtcttcactcggttcttaagaagctggtctgttctgacctgggaattggctatatgctccccgggactggagcggcacagtcccggactgtgaatccgggaactcgagttggaggtgtcccaaacggtccgtggtgctattgctcactagaggccttgggtctttgtttgacctgaggggtagggaggtcctgcctacagtctccgtgcgctcagctgagctggtgtccctggcgcagagcgcggacgagttttgtttccttttctttttcttttttttctttcctttaagtctcggtctgtcgcccaggctggagtgcaatggaacgatctccgctcactgcaacctccgcctcccgggttcaagcgattctcctgcctcagcctcctgagtagctgggattacaggcgcgtcaccacatccagctaatttttgtatttttagtagagacggggtttcaacttgttggccaggctggtctcgaaccctcgacctcaggtgatccaccggcctcggcctccccaagtgctgggattataggcgtgagccaccgcgcgcggccgagttttgtttcttttaaaaacaagacttaggagagcctgcggagacccggaggtggggtgcccaatcctccctctcccacgttccctgcagccccatcttccagaccgttgctgctggtctctcggggcagcttctgcctgggcgcagatggggaagctgggccgaggtggtgccgtggaatgaccgggagtaaccccggcgggcggcgcagaactcggagctccgccgcggggctgggctgggctctgccgtgagggtgggggtgctgggcgcgcgggctgcggtggcccccggagactggcccgcagcgcctcctggccggaggacctaggaatcggccggctctactaggtgtctttgctcgcggttccgactgtgaatccggtgaagaccggtggttgcagacggggaggaactatgaggttgaggcgaaagcccgttttgtttttttttttttgtttttttggtttttttttttgttagcgtgtttgccaactcccaggccattggtaaagcaggaaggttcttggggcggcggacggtgccagggttatgtgtaggtgcctctttaggtatatcttttatcaaaaagaagcaaagaaataagattaaaaataaacaaagaaaaaagttgtctggcactggcagtaattggcctgcctttgcagcactgataccattagcttttaaaatccgacttttcattgacacttcaagaagagaatgggtagtatatacacattcatctcatagtggacaaatttcatatttaaaaaaaccttctgggtactgaaatcagcaagtcacttgccctccatggccgaatccctgcttcccacgaagagaacctcacaaaaatttcccccaagttaaagagtggaattttcttgatttttttttcttttttttttaacggccgtagtttagaacccagacttaaattatgatcttcttttcaaacaaaacttaaagtccttaagttttcatctccccttttatttcaacctattcttctcatacctaccacaaaaataatggaggctttctgttgagaaactttccgtttctgttgagagtatcattctcttgagaaactttctcctaaatcagagaaagtatggaagcatggaaagtattcctgagtagaacctctacagatattacaatatttttcaaatacaaagtttccattgtcagcctgtttcccaagtgcttccacaaaccattaaataattccacaaaccattaaaataattaatgctagggaattttaggaaaacattggtttacaatcagaaggaccggggaagtgggtc

SEQ ID NO: 149 - DNA, 4048 bp, Homo sapiens
ttggcctcccaaagtgctgggattacaggcatgagccactgcgcccagctcagatccatccctttctaagggcaaacagtccatggtgcaaaggggccatgccacccagagttatgagtacctgggactccagaattccttgcctggtggcctccacatgcacttccagggcctgcttgggcctcttctatgggtctgtcctgagtgttgatagaaccactgatgtgagtacctgggcttgagccgtggcctggagatcctgttgactgtagcatggagggggcttgtgcagctgaatgtctgtatgcaggtggtgggagttctggaatatgatggagctggaggtgggaagagaagtaggcttggggcagctctctcatgccacctcattctggccaaaactcaggtcaaactgtgaagagtctaaatgtgaatctgcccttcaaggtggctacaaaggtatctttgtcaaggtaggagaccttgtggcctccacgtgcacttccagggcctgcttgggcctcttctacgggtctgtcctgagtcttctatgaatctgcccttcagggcagattcatatttagactcttcacagtttgacctgagttttggccagaataaggtgacatttagtttgttggcttgatggatgacttaaatatttagacatatggtgtgtaggcctgcattcctactcttgcctttttttttgcccctccagtgttttgggtagttttgctcccctacagccaaaggcaaacagataagttggaggtctggagtggctacataattttacacgactgcaattctctggctgcacttcacaaatgtatacaaactaaatacaagtcctgtgtttttatcacagggaggctgatcaatataatgaaattaaaagggggctggtccatattgttctgtgtttttgtttgtttgtttctttttttgtttttgtggcctccttcctctcaatttatgaagagaagcagtaagatgttcctctcgggtcctctgagggacctggggagctcaggctgggaatctccaaggcagtaggtcgcctatcaaaaatcaaagtccaggtttgtggggggaaaacaaaagcagcccattacccagaggactgtccgccttcccctcaccccagcctaggcctttgaaaggaaacaaaagacaagacaaaatgattggcgtcctgagggagattcagcctagagctctctctcccccaatccctccctccggctgaggaaactaacaaaggaaaaaaaaattgcggaaagcaggatttagaggaagcaaattccactggtgcccttggctgccgggaacgtggactagagagtctgcggcgcagccccgagcccagcgcttcccgcgcgtcttaggccggcgggcccgggcgggggaaggggacgcagaccgcggaccctaagacacctgctgtaccctccacccccaccccacccacctccccccaactccctagatgtgtcgtgggcggctgaacgtcgcccgtttaaggggcgggccccggctccacgtgctttctgctgagtgactgaactacataaacagaggccgggaacggggcggggaggagggagagcacaggctttgaccgatagtaacctctgcgctcggtgcagccgaatctataaaaggaactagtcccggcaaaaaccccgtaattgcgagcgagagtgagtggggccgggacccgcagagccgagccgacccttctctcccgggctgcggcagggcagggcggggagctccgcgcaccaacagagccggttctcagggcgctttgctccttgttttttccccggttctgttttctccccttctccggaaggcttgtcaaggggtaggagaaagagacgcaaacacaaaagtggaaaacaggtaagaggctctccagtgacttacttgggcgttattgttttgtttcgaggccaaggaggcttcgggaagtgctcggtttcggggactttgatccggagccccacatccccaccacttgcaactcagatgggaccggaggcggtgttaaatggggagacgatgtcctagtacgagctctggtgaccccaggactctgcgctgctgcgcttggggcttgcccgacggtggagaccggggagcatctctgggcgtggagacccgggcgcagtaccccgggctcagaggggtcgggggttcccgggcgtgctgagggcgctgctgccgggtggggagagctgcaggtccggcaccgagcgctgctttgttcggagggccctgagctggctagaaacccttctggttgcaggtcggccagtacctacggagacaaatgccagcactgagtcttcactcggttcttaagaagctggtctgttctgacctgggaattggctatatgctccccgggactggagcggcacagtcccggactgtgaatccgggaactcgagttggaggtgtcccaaacggtccgtggtgctattgctcactagaggccttgggtctttgtttgacctgaggggtagggaggtcctgcctacagtctccgtgcgctcagctgagctggtgtccctggcgcagagcgcggacgagttttgtttccttttctttttcttttttttctttcctttaagtctcggtctgtcgcccaggctggagtgcaatggaacgatctccgctcactgcaacctccgcctcccgggttcaagcgattctcctgcctcagcctcctgagtagctgggattacaggcgcgtcaccacatccagctaatttttgtatttttagtagagacggggtttcaacttgttggccaggctggtctcgaaccctcgacctcaggtgatccaccggcctcggcctccccaagtgctgggattataggcgtgagccaccgcgcgcggccgagttttgtttcttttaaaaacaagacttaggagagcctgcggagacccggaggtggggtgcccaatcctccctctcccacgttccctgcagccccatcttccagaccgttgctgctggtctctcggggcagcttctgcctgggcgcagatggggaagctgggccgaggtggtgccgtggaatgaccgggagtaaccccggcgggcggcgcagaactcggagctccgccgcggggctgggctgggctctgccgtgagggtgggggtgctgggcgcgcgggctgcggtggcccccggagactggcccgcagcgcctcctggccggaggacctaggaatcggccggctctactaggtgtctttgctcgcggttccgactgtgaatccggtgaagaccggtggttgcagacggggaggaactatgaggttgaggcgaaagcccgttttgtttttttttttttgtttttttggtttttttttttgttagcgtgtttgccaactcccaggccattggtaaagcaggaaggttcttggggcggcggacggtgccagggttatgtgtaggtgcctctttaggtatatcttttatcaaaaagaagcaaagaaataagattaaaaataaacaaagaaaaaagttgtctggcactggcagtaattggcctgcctttgcagcactgataccattagcttttaaaatccgacttttcattgacacttcaagaagagaatgggtagtatatacacattcatctcatagtggacaaatttcatatttaaaaaaaccttctgggtactgaaatcagcaagtcacttgccctccatggccgaatccctgcttcccacgaagagaacctcacaaaaatttcccccaagttaaagagtggaattttcttgatttttttttcttttttttttaacggccgtagtttagaacccagacttaaattatgatcttcttttcaaacaaaacttaaagtccttaagttttcatctccccttttatttcaacctattcttctcatacctaccacaaaaataatggaggctttctgttgagaaactttccgtttctgttgagagtatcattctcttgagaaactttctcctaaatcagagaaagtatggaagcatgga

SEQ ID NO: 150 - DNA, 4041 bp, Homo sapiens
ctttctgagatccatccctttctttttatttttcttgacacggagtcttgctctgtcactcaggctggagtgcagtggcatgatctcgactcactgtaacctctgcctcccgggttcaagcgattctcctgcctcagcctcctgagataacaggcgctcgccaccacatctggctaatttttgtatttttagtaaagactgggtttcatcatgttggccaggttggtttcgaactcctgacctgaggtgagctgcccaccttggcctcccaaagtgctgggattacaggcatgagccactgcgcccagctcagatccatccctttctaagggcaaacagtccatggtgcaaaggggccatgccacccagagttatgagtacctgggactccagaattccttgcctggtggcctccacatgcacttccagggcctgcttgggcctcttctatgggtctgtcctgagtgttgatagaaccactgatgtgagtacctgggcttgagccgtggcctggagatcctgttgactgtagcatggagggggcttgtgcagctgaatgtctgtatgcaggtggtgggagttctggaatatgatggagctggaggtgggaagagaagtaggcttggggcagctctctcatgccacctcattctggccaaaactcaggtcaaactgtgaagagtctaaatgtgaatctgcccttcaaggtggctacaaaggtatctttgtcaaggtaggagaccttgtggcctccacgtgcacttccagggcctgcttgggcctcttctacgggtctgtcctgagtcttctatgaatctgcccttcagggcagattcatatttagactcttcacagtttgacctgagttttggccagaataaggtgacatttagtttgttggcttgatggatgacttaaatatttagacatatggtgtgtaggcctgcattcctactcttgcctttttttttgcccctccagtgttttgggtagttttgctcccctacagccaaaggcaaacagataagttggaggtctggagtggctacataattttacacgactgcaattctctggctgcacttcacaaatgtatacaaactaaatacaagtcctgtgtttttatcacagggaggctgatcaatataatgaaattaaaagggggctggtccatattgttctgtgtttttgtttgtttgtttctttttttgtttttgtggcctccttcctctcaatttatgaagagaagcagtaagatgttcctctcgggtcctctgagggacctggggagctcaggctgggaatctccaaggcagtaggtcgcctatcaaaaatcaaagtccaggtttgtggggggaaaacaaaagcagcccattacccagaggactgtccgccttcccctcaccccagcctaggcctttgaaaggaaacaaaagacaagacaaaatgattggcgtcctgagggagattcagcctagagctctctctcccccaatccctccctccggctgaggaaactaacaaaggaaaaaaaaattgcggaaagcaggatttagaggaagcaaattccactggtgcccttggctgccgggaacgtggactagagagtctgcggcgcagccccgagcccagcgcttcccgcgcgtcttaggccggcgggcccgggcgggggaaggggacgcagaccgcggaccctaagacacctgctgtaccctccacccccaccccacccacctccccccaactccctagatgtgtcgtgggcggctgaacgtcgcccgtttaaggggcgggccccggctccacgtgctttctgctgagtgactgaactacataaacagaggccgggaacggggcggggaggagggagagcacaggctttgaccgatagtaacctctgcgctcggtgcagccgaatctataaaaggaactagtcccggcaaaaaccccgtaattgcgagcgagagtgagtggggccgggacccgcagagccgagccgacccttctctcccgggctgcggcagggcagggcggggagctccgcgcaccaacagagccggttctcagggcgctttgctccttgttttttccccggttctgttttctccccttctccggaaggcttgtcaaggggtaggagaaagagacgcaaacacaaaagtggaaaacaggtaagaggctctccagtgacttacttgggcgttattgttttgtttcgaggccaaggaggcttcgggaagtgctcggtttcggggactttgatccggagccccacatccccaccacttgcaactcagatgggaccggaggcggtgttaaatggggagacgatgtcctagtacgagctctggtgaccccaggactctgcgctgctgcgcttggggcttgcccgacggtggagaccggggagcatctctgggcgtggagacccgggcgcagtaccccgggctcagaggggtcgggggttcccgggcgtgctgagggcgctgctgccgggtggggagagctgcaggtccggcaccgagcgctgctttgttcggagggccctgagctggctagaaacccttctggttgcaggtcggccagtacctacggagacaaatgccagcactgagtcttcactcggttcttaagaagctggtctgttctgacctgggaattggctatatgctccccgggactggagcggcacagtcccggactgtgaatccgggaactcgagttggaggtgtcccaaacggtccgtggtgctattgctcactagaggccttgggtctttgtttgacctgaggggtagggaggtcctgcctacagtctccgtgcgctcagctgagctggtgtccctggcgcagagcgcggacgagttttgtttccttttctttttcttttttttctttcctttaagtctcggtctgtcgcccaggctggagtgcaatggaacgatctccgctcactgcaacctccgcctcccgggttcaagcgattctcctgcctcagcctcctgagtagctgggattacaggcgcgtcaccacatccagctaatttttgtatttttagtagagacggggtttcaacttgttggccaggctggtctcgaaccctcgacctcaggtgatccaccggcctcggcctccccaagtgctgggattataggcgtgagccaccgcgcgcggccgagttttgtttcttttaaaaacaagacttaggagagcctgcggagacccggaggtggggtgcccaatcctccctctcccacgttccctgcagccccatcttccagaccgttgctgctggtctctcggggcagcttctgcctgggcgcagatggggaagctgggccgaggtggtgccgtggaatgaccgggagtaaccccggcgggcggcgcagaactcggagctccgccgcggggctgggctgggctctgccgtgagggtgggggtgctgggcgcgcgggctgcggtggcccccggagactggcccgcagcgcctcctggccggaggacctaggaatcggccggctctactaggtgtctttgctcgcggttccgactgtgaatccggtgaagaccggtggttgcagacggggaggaactatgaggttgaggcgaaagcccgttttgtttttttttttttgtttttttggtttttttttttgttagcgtgtttgccaactcccaggccattggtaaagcaggaaggttcttggggcggcggacggtgccagggttatgtgtaggtgcctctttaggtatatcttttatcaaaaagaagcaaagaaataagattaaaaataaacaaagaaaaaagttgtctggcactggcagtaattggcctgcctttgcagcactgataccattagcttttaaaatccgacttttcattgacacttcaagaagagaatgggtagtatatacacattcatctcatagtggacaaatttcatatttaaaaaaaccttctgggtactgaaatcagcaagtcacttgccctccatggccgaatccctgcttcccacgaagagaacctcacaaaaatttcc

SEQ ID NO: 151 - DNA, 77 bp, Homo sapiens
tccctgagggtgggaggggagacccagatcaggccagctgtgggctgagatctgagccgaaaggccaagcttggagg

SEQ ID NO: 152 - DNA, 42 bp, Homo sapiens
tggtggtagggcaggttgggggcataagagttggaacaagcg

SEQ ID NO: 153 - DNA, 42 bp, Homo sapiens
gggagactggggaccatggaaacatgggacagctcccacgaa

SEQ ID NO: 154 - DNA, 59 bp, Homo sapiens
gctctcctttcccagaaaaaaaaagggtggaagagtcagtgtattcaaggtctctctct

SEQ ID NO: 155 - DNA, 39 bp, Homo sapiens
ttcaaccaataactgtatgccttcttatgaaatgttttt

SEQ ID NO: 156 - DNA, 46 bp, Homo sapiens
gctccatatggaagtatttgttgtttttatatttttcttgactagt

SEQ ID NO: 157 - DNA, 41 bp, Homo sapiens
ggaaatgcaagtccaaagaaatcctggacaggcttcaggtc

SEQ ID NO: 158 - DNA, 42 bp, Homo sapiens
ccacggccatggcgaagaggtttcgtcccaccaagtcccaag

SEQ ID NO: 159 - DNA, 42 bp, Homo sapiens
tacctaaactcattcacccagatcttgttctttaagctgcag

SEQ ID NO: 160 - DNA, 39 bp, Homo sapiens
gtacatccagggctgaagttccaggctggggtacttgcc

SEQ ID NO: 161 - DNA, 50 bp, Homo sapiens
acacctgggaaagtgaccagaaactcacctctccagtatcaagcaggcac

SEQ ID NO: 162 - DNA, 44 bp, Homo sapiens
taagtctgtcatggaaatgaaggcttccttgggtcaacttgcaa

SEQ ID NO: 163 - DNA, 45 bp, Homo sapiens
caagactatgcagcaatgtttttgtggcttcagccagctccttgc

SEQ ID NO: 164 - DNA, 63 bp, Homo sapiens
gctgaactatctcaatcaggtacagttcccctaaatgccaccttctcttccctctcctctctg

SEQ ID NO: 165 - DNA, 46 bp, Homo sapiens
accttgtggagaatgacatcagccctcagcatcttgtccacagtag

SEQ ID NO: 166 - DNA, 51 bp, Homo sapiens
tgcaaggatggatataggtggaagatgacctggacgaaagaccaatcattc

SEQ ID NO: 167 - DNA, 68 bp, Homo sapiens
gtcctgctttccaggccattcagtgttccttcagttctctgagcatagaggacaaggaaggtgggagg

SEQ ID NO: 168 - DNA, 48 bp, Homo sapiens
ctacctgaagaccagagaggcagaaaaatgagagaggacagctggaag

SEQ ID NO: 169 - DNA, 74 bp, Homo sapiens
ttatgtaacccaaccaaatactcaaaggaccaaaagattctcccctttcaatgccaggagacactggcactgta

SEQ ID NO: 170 - DNA, 58 bp, Homo sapiens
gaagaacagtatctcataagcttgtgggtctcgtaggggtatggactgagctgcttag

SEQ ID NO: 171 - DNA, 41 bp, Homo sapiens
cattaggggcttttggagagccaggtggctcccagggctgc

SEQ ID NO: 172 - DNA, 40 bp, Homo sapiens
cgccgtggctggtcattaactgaaagataaagcaggaggg

SEQ ID NO: 173 - DNA, 4077 bp, Homo sapiens
gggcgggatgggagtagtgggagggggatactggccttgtgagaagaaaagggaagtgtctgtttgagaggtttttgaattagtaaaggaggacaggcgcaaactccaagcgcttcacttgcacccgggaccaaaccccaatcccagtggctggctccctgaggccgccccgctccgtcccgccccgctgacagcggctgggctggagaaggctctatacggacacacctctggggacggggaacccactgctcccagctaaagcaaccctgtttcctggcccgcctcagacagggctgcaggccttgtttgagcccctttcagggcacctggccttggattgtctgtggctttgcctggtccgctgtgacttcctttctacttgagccttgctaaggcagactctactccctcactcgtaagcagccaggcgtccagcaggtcctccaacgtcgatcttggccctaagacgtccagtctgggcacggagttgttgagatccggcaggaagtccctgctccagggccaaaggccccacccgggctcccccggatgtccccgcacccccctctattctcccaaaagaaagaagctgcttcccactttggaaacgtttattctgagcaccgggaaggggggcggcggcgggcgcctcactgggtgttgagcttcttagtgtactcctcgagagcgctcaggaagctgaccttgaagctctccagcacgggcagcaggccttggcggaggtcctcgagcgcgggcttggccttctcgctgagcgtgctcagatgctcggtggccttggcgtggtactcggccagtctggcgccgccgttctccttgagagcctcaaggcgcgcggccaagcgctggcgcagctcgtcgctgtagggggccagatgcgtgcgcagcgcgtccacatgggcgcgcgcgcggtcgcgcatctcctcgcccagtgggctcagcttctcttgcagctcgtgcagcttctggcgcgcgccctcttggagctctgcgcgcagcggctccaccttctggcggtagagctccatctcctcctgccacttcttctggaagtcgtccaggtagggctgcaccttggccttcacctcctccagatccttgctcatctcctgcctcaggccctctgtctccttttccaggttatcccagaactcctgggtcacagggccgagctgttcgcgcagcttgctgaaggtggaggtcacgctgtcccagttgtcaaggagctttaggctggagggtgagacagaagggttgagggctggcctcccagcgccccagcctatcaggggtgagccctgggtgacacctgtccgcggaggtgcagtggcctagcatttccagtacactctcaaccaacacccctgccccgccaggccatgccccgttgtgcagctggaccgaggcacagagaggagctaaaaaggagacagagctgggactagtgcccagttacgttggtctccaaagtgggcccttgaaggacctcgcttctatgcctccagcgcattctcctctccgaagacagcccacagtcttgctgggcaggagcagaggaggtggtgaagaagggaaaggggcttgctacacttgcaggcacaatgtggctctgtgatcacgcatcgggcagccctggtctgtcctttgcaggggacatgggctgtgaccctgcctggagatcccattccagtttctccatccagaccatctgtggggcccagctcatcagatattaggtgaggactcggccagtctggcttcaacatcatcccacaggcctctgccccctacccctgccctcaaccccaggctgggtccttactttagctgttttcccaaggcggagccttcaaactgggacacatagtctctgccgctgtctttgagcacatccacgtacacagtggccaggtccttcactcgatcccaggggctctgggggggttcatcttgctgccagaaatgccgagcctggctccctgagggtgggaggggagacccagatcaggccagctgtgggctgagatctgagccgaaaggccaagcttggaggtgggggagagggggccagtgagaaacctgctgcctctgcccaggagggtgggccacggggatttagggagaaagccccccgatggttggctccctaggttaggggacacctacccgtcaggaagagcacggccaaggtcagcaccgcagctttcatcctgaagggccgtgggggacctggaggagaagaagggcctggctgagtggggtgccttcagcatgcagaagccccgtgctcccccactcattgcagccaggtgaggagaagggcacagagcgggagaagacctcaggtacccagaggcccggcctggggcaaggcctgaaccttgagctggggagccagagtgaccggggcaggcagcaggacgcacctccttctcgcagtctctaagcagccagctcttgcagggcctatttatgtctgcagccagggtctgggctgggaggctgataagcccagccccggccctgttgctgctcactggtcctggcaatgtggaacttaagagttcaaggatcagctctgtccctggggctgggcaaatagagtgggcaaacagcaagctgcgggggctgcagggcaggggtcaagggttcagtgggggcgggaggggagtgtctgcaggcttgcaggtctcccgggtggggtcggggttccctgcactcatccccttcccctccatgggagtgtgtgggcagttgccattgtccattgtgttggcagaggaggggaggggagggacgctgggactcctccaccaaggagactgcctcccccaccaccagcattccagggagactacttcactcccctcccccttcccccgccctgtcctcccaccagtgctcttctttagtccccagcaggtcctccaggcctctctccaagcctcccaaactggtaaacctggggagaggggagagccctccgtggctcccagactgaggtttcggagacctcttgcatttcaaaacactccagagatcaattcggagctgccaacttttaattttgtcatgtaaagatattgtccgcctccaaaaaaccctcaccatctacagtgaccatcacttcaaaaaggaaaggctttaacaaaaaagggcataatctcagaattacattacagaattgaagccccttagattgaagacgtctccctttgcattgttcacacttatatttgatcacgcacaggtgtgactggatctcagcccttgggaagccctggtgtggggagaagacctctgggcaaaggaagtggcaggagacctgctttctcatttcacttggcctccatcttgctggaggaagatcgtgggcaagttatataatctctctgagcctcggttttctatctgcaaaatggggcaagaatggtcagggttgttggaggcccctgagacagcctgtgaatgtaaagtgctgtgtgtccgttggtgtttgcagcaccatcttgtcaggtttctcctggaaggcccagacctcccccagcaggttactgataggacctgagtcctagagcctgtgatgcaggctgagaggaactgtgacatcactccagcctctccccatgccaccatctcacagatgaagagactgaagagcacagagggactttgcccagaggctgtcatctctcagggagttagaagaaaggctggacctagaacccagtctctggacttgggatgcagggcagaaatgtaccctgtaccatcactccaggaaactccctaacactagaaaccaggctgacatctctgtttaccagatcagggagtggtcggcctcatgcctttcacttcagagaagattctggagccagaaaacctcaaatctaagggtcaggcaggttcaaatccagctgcctgaccctggatgagttatgatacatcacctccccacacatcagtttctgattgaagataatgatagaatatgccatcgccctgagttatggcaggggttactgtgtggcaagcagaataacgctcccc

SEQ ID NO: 174 - DNA, 4042 bp, Homo sapiens
agactcacctagtcttgcatgacagcgtatacagactcagaggagttttagaaggcccttcttttttttttttttttttttgagacggagtctcgctctgtcgcccaggctggagtgcagtggcgggatctcggctcactgcaagctccgcctcccgggttcacgccattctcctgcctcagcctcccaagtagctgggactacaggcgcccgccactacgcccggctaattttttgtatttttagtagagacggggtttcaccgttttagccgggatggtctcgatctcctgacctcgtgatccacccgcctcggcctcccaaagtgctgggattacaggcgtgagccaccgcgcccggccagaaggcccttcttgagaaggctcttttcttctctaatctaaatggccctacagcaactttctagccgccctcatggacttgaaatctttcttttctctttgcaggagtgcagtggtgcgatcacagctcactgcagcctcaaactcctaggctcacatgatccttcagcctcagcctcctgagcagctgggactacaggcatgtgccaccaagcctggttattttttgtagaggtgggggtcttgctatgttgcccaggttggactccaactcctgggtttacctaattctcctgcctcagcctcctgagcagctgggattacaggcgcacgccaccatgcccagcttggaaggctttctaaattccctcctctcattcttccttctgtgaactcagatggtctttccagcttcagtaagctttcttcatagaagaccttcaaccacctgtctcttagccatgcctggaaacttgctggaaactctaccctgccctttggagttcaggtgtgggataaaggagaaaactataggaaaattccacccccgctccgctttttttttttttttgagatgtagtatcccgctgtcacccaggctagagtgcagtggtgcaatcttggcttgctgcagtaacctctgcctcctgggttcaagccattctcctgtctcagcctcctgagtagcagggactacaggcacctgccaccacacctggctaatttttgtatttttagtagacacggggttttgccacattggccaggctggtctcaaactcctgacctcagatgatccacccccatcggcctccagaagtgctggatttacaggcgtgagccatgccaggcccctccctttctttccaaatacttatttggctatcctttcactcggccaatgggggtcacgtcatgaagggtccagcctgtgtccactctttaaggatccttccctgtactcttcaaaagtgccctttcaaggaagctgttttccacctggcccagcaaattcaaatgctcccttctgacagggcagagtccgagctgggtgcccagggacacagtgtgaagcagagttcaggcttctagagaatgcgagtttcttaagtcactcaaagccccacccttagcctgggagacctctccagcctccactgctccagctcccacctacctgaggcttcttccaactagactccaaaccacaggcaaataatctatcagcctaagaacacaatcaggctcctatctacacaacttcctgctgtccaactaagtaaccaagttgtaagtaagtgcctcacaaaaggaaggacaaaaggcaggacaaaaggtcttagcaacttgagtctggagattttttttttaatcctttttagttcaacataaaatgagaaagaaaaaaatatttctgacattttcaaagaacagaaataggaaagtatgttcatatacattcaacgtatactgcacatattggttactacaatacaaagcaatgagttttttttaaagtgtagtttgcaagatggcacggttagtaggctcactggctttcatctgttgttgctggagggtgcagtctgctctcccatacatacagtaccatgtaaacacatcaggctgagcgcgtggtggtggtagggcaggttgggggcataagagttggaacaagcgcagataagtcaacagctttttagggctttcttggtaagcccccttctggtgagtagttggtgaccccaccaagtggaggggagactggggaccatggaaacatgggacagctcccacgaagggctcttgcactgcagaattccactcaagggatcttgggtccaggagccgagctgccagtatcagtggagaaggacaaggtgcatggggatcccgccagcaacatcaggatggccatgccgggcacccgctttcctctgtgcaaattcaggatgaaagactaggaggggactcgggacctcttgctctcctttcccagaaaaaaaaagggtggaagagtcagtgtattcaaggtctctctcttgttttgaagatcagaaggagataacccagaccctctctcagccccagccagcagagaagactttggtttctaacaatgaagagaaataaagataacacaaataatagctactgcgtatgcactgcttcaactggggaaaggagaccactgcatctgtcactggcacaagtaagagctgttcacaattacaatgcctaaaggaaatactttgaacaaaaggtgcaagtcacaattcaaatagaacagaatctggttaaacatttctcatttaaacaaaaattccttttctctttatttattaataatgataataacaataatatcaacatttaccaaaaacaatttctacatgatcaagaattaaaatataggggctgagggtacccagtggggaagaggaggttaggagagaggcagggcccaaggcaacctcctacacttcttccctgtgacaaagaggctgaaagaggagagcatatatatatatattttatatatatattatatatataatatatatataatatattatattatatattatatatataatatatatatacacatatattatattatatatatacacacatatataatatatatatggagaaacaatcctttttatagcacaatataaaatgagaatgaaagatgccatagaaagcatagtgcactgctgttgggtgttcagtccatggataaaaccagcaggatgataaaggcaaccaactttccaggttacaagaggggagctgagttatccaccaaaagcaaaggctcaaattgagacatcctaactggcaaaccatctatgccaggtcattctcagcctccgtgccaaactcttcatatgatcttggctaggacagacatgttttccgtggatcccagcagtaaagacctctctgcgttccaggcttgggggtttctctttttttgttctttttgttttctaagtgccagaagccgtcacccttcctctctccctttgcctgccattaggattccagaggatggcatcctttagtatttgctttcacagaagagcaatgcagggggatggagggtgctctgctgatgaaggctagggagggagtggccctgaggccgctggcctctgaactctaactgctttgctctcctgtttcaaaaaaggaacgaaagaaaaaaaagaaaggaagaaaaaaaagaaagtatatcacctctggaagaaaacataccaaaaacaaaacaaaacacaaacccccaaacaaaacaaaaaaccaccaactcaaatatactttcacaaaagatggagaacatggatttccttcctgtttatttccttggtgacttggtcatacaagcaaacatggcaaaaccctctcagaacccaaaagaacagcacacggatgaaccaaatgtgaggaaagcagctgtgatattttgggtggagagaaacacaagggcaatttggcacaacgctgctagatactgtgggtttacaatcaaccttttcattcccaagctgtacacaaaacctggaataaagcagacacagaggagaattagtttgaaaagagaaaggctcaaatattccatttaaaaccttttaaaaaatgcaacgggtttactttccctcaggtgttcaggt

SEQ ID NO: 175 - DNA, 4042 bp, Homo sapiens
tggcgggatctcggctcactgcaagctccgcctcccgggttcacgccattctcctgcctcagcctcccaagtagctgggactacaggcgcccgccactacgcccggctaattttttgtatttttagtagagacggggtttcaccgttttagccgggatggtctcgatctcctgacctcgtgatccacccgcctcggcctcccaaagtgctgggattacaggcgtgagccaccgcgcccggccagaaggcccttcttgagaaggctcttttcttctctaatctaaatggccctacagcaactttctagccgccctcatggacttgaaatctttcttttctctttgcaggagtgcagtggtgcgatcacagctcactgcagcctcaaactcctaggctcacatgatccttcagcctcagcctcctgagcagctgggactacaggcatgtgccaccaagcctggttattttttgtagaggtgggggtcttgctatgttgcccaggttggactccaactcctgggtttacctaattctcctgcctcagcctcctgagcagctgggattacaggcgcacgccaccatgcccagcttggaaggctttctaaattccctcctctcattcttccttctgtgaactcagatggtctttccagcttcagtaagctttcttcatagaagaccttcaaccacctgtctcttagccatgcctggaaacttgctggaaactctaccctgccctttggagttcaggtgtgggataaaggagaaaactataggaaaattccacccccgctccgctttttttttttttttgagatgtagtatcccgctgtcacccaggctagagtgcagtggtgcaatcttggcttgctgcagtaacctctgcctcctgggttcaagccattctcctgtctcagcctcctgagtagcagggactacaggcacctgccaccacacctggctaatttttgtatttttagtagacacggggttttgccacattggccaggctggtctcaaactcctgacctcagatgatccacccccatcggcctccagaagtgctggatttacaggcgtgagccatgccaggcccctccctttctttccaaatacttatttggctatcctttcactcggccaatgggggtcacgtcatgaagggtccagcctgtgtccactctttaaggatccttccctgtactcttcaaaagtgccctttcaaggaagctgttttccacctggcccagcaaattcaaatgctcccttctgacagggcagagtccgagctgggtgcccagggacacagtgtgaagcagagttcaggcttctagagaatgcgagtttcttaagtcactcaaagccccacccttagcctgggagacctctccagcctccactgctccagctcccacctacctgaggcttcttccaactagactccaaaccacaggcaaataatctatcagcctaagaacacaatcaggctcctatctacacaacttcctgctgtccaactaagtaaccaagttgtaagtaagtgcctcacaaaaggaaggacaaaaggcaggacaaaaggtcttagcaacttgagtctggagattttttttttaatcctttttagttcaacataaaatgagaaagaaaaaaatatttctgacattttcaaagaacagaaataggaaagtatgttcatatacattcaacgtatactgcacatattggttactacaatacaaagcaatgagttttttttaaagtgtagtttgcaagatggcacggttagtaggctcactggctttcatctgttgttgctggagggtgcagtctgctctcccatacatacagtaccatgtaaacacatcaggctgagcgcgtggtggtggtagggcaggttgggggcataagagttggaacaagcgcagataagtcaacagctttttagggctttcttggtaagcccccttctggtgagtagttggtgaccccaccaagtggaggggagactggggaccatggaaacatgggacagctcccacgaagggctcttgcactgcagaattccactcaagggatcttgggtccaggagccgagctgccagtatcagtggagaaggacaaggtgcatggggatcccgccagcaacatcaggatggccatgccgggcacccgctttcctctgtgcaaattcaggatgaaagactaggaggggactcgggacctcttgctctcctttcccagaaaaaaaaagggtggaagagtcagtgtattcaaggtctctctcttgttttgaagatcagaaggagataacccagaccctctctcagccccagccagcagagaagactttggtttctaacaatgaagagaaataaagataacacaaataatagctactgcgtatgcactgcttcaactggggaaaggagaccactgcatctgtcactggcacaagtaagagctgttcacaattacaatgcctaaaggaaatactttgaacaaaaggtgcaagtcacaattcaaatagaacagaatctggttaaacatttctcatttaaacaaaaattccttttctctttatttattaataatgataataacaataatatcaacatttaccaaaaacaatttctacatgatcaagaattaaaatataggggctgagggtacccagtggggaagaggaggttaggagagaggcagggcccaaggcaacctcctacacttcttccctgtgacaaagaggctgaaagaggagagcatatatatatatattttatatatatattatatatataatatatatataatatattatattatatattatatatataatatatatatacacatatattatattatatatatacacacatatataatatatatatggagaaacaatcctttttatagcacaatataaaatgagaatgaaagatgccatagaaagcatagtgcactgctgttgggtgttcagtccatggataaaaccagcaggatgataaaggcaaccaactttccaggttacaagaggggagctgagttatccaccaaaagcaaaggctcaaattgagacatcctaactggcaaaccatctatgccaggtcattctcagcctccgtgccaaactcttcatatgatcttggctaggacagacatgttttccgtggatcccagcagtaaagacctctctgcgttccaggcttgggggtttctctttttttgttctttttgttttctaagtgccagaagccgtcacccttcctctctccctttgcctgccattaggattccagaggatggcatcctttagtatttgctttcacagaagagcaatgcagggggatggagggtgctctgctgatgaaggctagggagggagtggccctgaggccgctggcctctgaactctaactgctttgctctcctgtttcaaaaaaggaacgaaagaaaaaaaagaaaggaagaaaaaaaagaaagtatatcacctctggaagaaaacataccaaaaacaaaacaaaacacaaacccccaaacaaaacaaaaaaccaccaactcaaatatactttcacaaaagatggagaacatggatttccttcctgtttatttccttggtgacttggtcatacaagcaaacatggcaaaaccctctcagaacccaaaagaacagcacacggatgaaccaaatgtgaggaaagcagctgtgatattttgggtggagagaaacacaagggcaatttggcacaacgctgctagatactgtgggtttacaatcaaccttttcattcccaagctgtacacaaaacctggaataaagcagacacagaggagaattagtttgaaaagagaaaggctcaaatattccatttaaaaccttttaaaaaatgcaacgggtttactttccctcaggtgttcaggtagcttgccatactgaggctctgatgtggatttgccaagtggcttccctttcatcaggcctcttctgtcaaggattttccagatacaaccaatggtgcctgctgtgtactctttgcattac

SEQ ID NO: 176 - DNA, 4059 bp, Homo sapiens
gccaccgcgcccggccagaaggcccttcttgagaaggctcttttcttctctaatctaaatggccctacagcaactttctagccgccctcatggacttgaaatctttcttttctctttgcaggagtgcagtggtgcgatcacagctcactgcagcctcaaactcctaggctcacatgatccttcagcctcagcctcctgagcagctgggactacaggcatgtgccaccaagcctggttattttttgtagaggtgggggtcttgctatgttgcccaggttggactccaactcctgggtttacctaattctcctgcctcagcctcctgagcagctgggattacaggcgcacgccaccatgcccagcttggaaggctttctaaattccctcctctcattcttccttctgtgaactcagatggtctttccagcttcagtaagctttcttcatagaagaccttcaaccacctgtctcttagccatgcctggaaacttgctggaaactctaccctgccctttggagttcaggtgtgggataaaggagaaaactataggaaaattccacccccgctccgctttttttttttttttgagatgtagtatcccgctgtcacccaggctagagtgcagtggtgcaatcttggcttgctgcagtaacctctgcctcctgggttcaagccattctcctgtctcagcctcctgagtagcagggactacaggcacctgccaccacacctggctaatttttgtatttttagtagacacggggttttgccacattggccaggctggtctcaaactcctgacctcagatgatccacccccatcggcctccagaagtgctggatttacaggcgtgagccatgccaggcccctccctttctttccaaatacttatttggctatcctttcactcggccaatgggggtcacgtcatgaagggtccagcctgtgtccactctttaaggatccttccctgtactcttcaaaagtgccctttcaaggaagctgttttccacctggcccagcaaattcaaatgctcccttctgacagggcagagtccgagctgggtgcccagggacacagtgtgaagcagagttcaggcttctagagaatgcgagtttcttaagtcactcaaagccccacccttagcctgggagacctctccagcctccactgctccagctcccacctacctgaggcttcttccaactagactccaaaccacaggcaaataatctatcagcctaagaacacaatcaggctcctatctacacaacttcctgctgtccaactaagtaaccaagttgtaagtaagtgcctcacaaaaggaaggacaaaaggcaggacaaaaggtcttagcaacttgagtctggagattttttttttaatcctttttagttcaacataaaatgagaaagaaaaaaatatttctgacattttcaaagaacagaaataggaaagtatgttcatatacattcaacgtatactgcacatattggttactacaatacaaagcaatgagttttttttaaagtgtagtttgcaagatggcacggttagtaggctcactggctttcatctgttgttgctggagggtgcagtctgctctcccatacatacagtaccatgtaaacacatcaggctgagcgcgtggtggtggtagggcaggttgggggcataagagttggaacaagcgcagataagtcaacagctttttagggctttcttggtaagcccccttctggtgagtagttggtgaccccaccaagtggaggggagactggggaccatggaaacatgggacagctcccacgaagggctcttgcactgcagaattccactcaagggatcttgggtccaggagccgagctgccagtatcagtggagaaggacaaggtgcatggggatcccgccagcaacatcaggatggccatgccgggcacccgctttcctctgtgcaaattcaggatgaaagactaggaggggactcgggacctcttgctctcctttcccagaaaaaaaaagggtggaagagtcagtgtattcaaggtctctctcttgttttgaagatcagaaggagataacccagaccctctctcagccccagccagcagagaagactttggtttctaacaatgaagagaaataaagataacacaaataatagctactgcgtatgcactgcttcaactggggaaaggagaccactgcatctgtcactggcacaagtaagagctgttcacaattacaatgcctaaaggaaatactttgaacaaaaggtgcaagtcacaattcaaatagaacagaatctggttaaacatttctcatttaaacaaaaattccttttctctttatttattaataatgataataacaataatatcaacatttaccaaaaacaatttctacatgatcaagaattaaaatataggggctgagggtacccagtggggaagaggaggttaggagagaggcagggcccaaggcaacctcctacacttcttccctgtgacaaagaggctgaaagaggagagcatatatatatatattttatatatatattatatatataatatatatataatatattatattatatattatatatataatatatatatacacatatattatattatatatatacacacatatataatatatatatggagaaacaatcctttttatagcacaatataaaatgagaatgaaagatgccatagaaagcatagtgcactgctgttgggtgttcagtccatggataaaaccagcaggatgataaaggcaaccaactttccaggttacaagaggggagctgagttatccaccaaaagcaaaggctcaaattgagacatcctaactggcaaaccatctatgccaggtcattctcagcctccgtgccaaactcttcatatgatcttggctaggacagacatgttttccgtggatcccagcagtaaagacctctctgcgttccaggcttgggggtttctctttttttgttctttttgttttctaagtgccagaagccgtcacccttcctctctccctttgcctgccattaggattccagaggatggcatcctttagtatttgctttcacagaagagcaatgcagggggatggagggtgctctgctgatgaaggctagggagggagtggccctgaggccgctggcctctgaactctaactgctttgctctcctgtttcaaaaaaggaacgaaagaaaaaaaagaaaggaagaaaaaaaagaaagtatatcacctctggaagaaaacataccaaaaacaaaacaaaacacaaacccccaaacaaaacaaaaaaccaccaactcaaatatactttcacaaaagatggagaacatggatttccttcctgtttatttccttggtgacttggtcatacaagcaaacatggcaaaaccctctcagaacccaaaagaacagcacacggatgaaccaaatgtgaggaaagcagctgtgatattttgggtggagagaaacacaagggcaatttggcacaacgctgctagatactgtgggtttacaatcaaccttttcattcccaagctgtacacaaaacctggaataaagcagacacagaggagaattagtttgaaaagagaaaggctcaaatattccatttaaaaccttttaaaaaatgcaacgggtttactttccctcaggtgttcaggtagcttgccatactgaggctctgatgtggatttgccaagtggcttccctttcatcaggcctcttctgtcaaggattttccagatacaaccaatggtgcctgctgtgtactctttgcattactccagccaaacaagccaatttccccattctttctaccatgggcctctcatcacacatttccctaatctggaatatcctgccacttgcttctgtatggccttaaaaaatatggctggacatattttcctgccaggttttgtcttttaggactgagtttaaggacttcctcctttcctcattatgctgaccggaggtcacctgcatcctctggagccgtagctcacttctgtcgctatgaaggct

SEQ ID NO: 177 - DNA, 4039 bp, Homo sapiens
aagtagttggtgttttccacacagaatatggagaactcaacagaggtacagttgtccatttgttctatgaagttgccatgtgtattagatcagttcgtctctctttttcattttggtacctgttttaatttttatctccaaatttttagagtttgttgtttataggattgaaaaaatctataagcatcttattttacatcttatttttttagaatgttaatactttatggagcctttttcaaatgctgaactggtgtttgttttttaacttttattttaggttcacggggtacatgtgaagatttgttacttaggtaaacccatgtcatgggggtttgttgtacagattatttaatcactcaggtattaagcccagtacccaattgttatcttttctaatcctctccctcctcccatcttccattctcaagtagaccccagtgtctgttgtttccttctttgtgttcataaattctcatcatttagctcccgtttataagtgagaacatgtggtatctggttttcttttcctctgttggtttgctgaggataatagcctctagctacatccatgttcccacaaaagttataatctggttcttttttatggctgcatggtattccatggtgtgtatgtaccacattttctttatccaatctgttgttggtgggcatataggttttcatgaaaagattccaagtttttgctattgtgaatagtgctgcagtgaacattcacgtgcacatgtctttatggtaaaatgatttatatttctctgggtatatatccagtaatgggattgttgggtcgaatggcagttctgcttttagctctttgaggaatcaccatactgctttccataatggttgaactaatttacactcccaccaacagggtgtaagtgttccctttttttcacaacctcaccagcatctgttattttttgactttttagtaacaggcattctgactggtgtgagatggtatctaattgtggtttatatttgcattctctaatgatcagtgatattgagcattttctcataagtttgttggtctcatatatgtcttctttagaaaagtgactattcatgccctttacctactttttaatgggattctttttttctcttataaacttgtttaagttccttatagaggctggatattaggcctttgtcagatgcgtagtttgcaaaaattttctcccattctggaggttgtctgtttactctgttgacagttttttttttgtttttttttttgctgtgcagaagctcttaagtgtaattagataccatttgtcaatttttgtttttatcatgattgtttttggtgtctttgtcattcaaaattaatatcattgacatagaaaattctcacattgttgcagcattttaaaaaatctgttactaagtataatatacactaagaccctaatttggtttactaattttttttaaaggaaacacaccatatgttgataaaggtttatctaggcagttaagattatactaacttttattttttctttgtatcacctaaattttctacagtaaacaattttttataatctgctttttttaaaaaataaaacatagtaggaagtcattaaactcgggtctagtcttaattgtgccttaagctgtgtttctttgcattctctcttcagccttatgtttccagtttaacttataaatttatcttccaaatttctgatccctctgaaatcttataactaacatatttagttttaccttttgattttgatttaaagaataagacaacatttctgattcactttttcaatatttcttatttgctattgccatatatttcagaaactacttgtggtttatttctgcagttcatgttctttggtggaatgagagtgcagatagtcgtgcagctgggagacataagtcccatgaggatcccagagttgtggcggctggtaagctgtttcactaagcacgaattatttttagaacaaatgtgattcaaccaataactgtatgccttcttatgaaatgtttttccagttcgggaaagtgtcaactacctagtttctcagcagaatatgcttctgattcctgcatcattttcaccattgaaatagttttctactgaaatacaaaacatttcattaactgctctaagatgtgtctgctaatggtgcttaaattctcccaagaggttctcgcttttatttgaaggaggtggtaagttaattagttaatttgctgtgcttcttgcatttttgaaagttacatattctccactgctttaagaaataattcagttcactttcaccttggcatttcagtatctgttacacattagaagtagttgtcactatttcatcatcttggtttttcatttgttttagaatacctcttctgtattttgataactcattgctttatagcattttcttttactcaaataaggattttacatttccttgcctgacagtatttttgaattatttatataaaatatctatcttttcatcatgtctatagttcctgagattttaaaaaaatttgcttagtaaaggttattttgtgatataaaatgggatttataaaaatattagattgtttatttctttactgtggaaaagtacaatgtcatctgtattaattattgcttttacattcattgattattagtcattctaacttggaaaataatgcaattgggtcacagtgttaaaaatctagaaaagacttgttggtttatatgctgaaattgttcatttataattaattttactaatttctacttagtttggatcactaacagagatcttgggacatttatttgttttaaagaaatatttatggttatggaaacgcttgccctaataaaaatcctgcatattcattgtttttttaaattcacattttatacttatatgatctctaaagctcttgctatgttgctataagacagtaatatagtgataatttaccaactttattgaaaatgttgttacatcaataaaatagcatgctgggaacctgagaaggaaggtttctttagtactgccacagatgtcctggagttttccttgaaacatctttcatttccattttacttgatgcctctacctactaaaactagatttggtacttccgatagtgtatatttacagctatattatatttacatttttacagactatcttctgataatctgtatttacagctatgttattttatatttttaaaatcttacagctataaaatagtaaattgtgaattagctgtccaagggcaatttggaaaacaaactgtacagtttcctctcatttatcaggctctaagcgatctgcagtttatctgggctattatgcaatgtgagatattatttatgagaggcaggcagtggcagcttaaacagacatacctcctcagcattcttttccatgcagagttcaaagaggcctaagacatctcacatttatgtgaaatagttgaggcacaagtatgtggttaactacacataaattaccaataaaattaaaagttaactaaaatactacagaagacatttaatattttgcttcagactgttatagtaccttagggttatgaacatcaattacctttgagccttactatatttaaagggaaggggaagctgacatttttatcttttttaatgggtacactctacgttaccttaaaggcttccccggtttaagcaaaaatagaattatgtggtttaaatcatataccttattcttcatacttagctccaagtagattatgacttttcctaaaacttaacatgacagagatttgccttccagggggtctaatttgaagaggaaagtaatttaaatgtataggtttatataatagcattgtatttttctctattttattcattctttcattctcttcgatgactcccagcacctgcgcgtccatcttcattcttagccaatgacctttccttttacttaacagagaaaataacaatcagaagagtcttcataagttcccaccccgtctgcccgctttctac

SEQ ID NO: 178 - DNA, 4046 bp, Homo sapiens
ccagtataactgctacattgtgtccttatatttttggttgaataaacaaaaggacactgaaggctgcctttgtagcttcccctataccaagtgaacatttattaaataagctcagctacagagcattttcagaaatctcagtgcagcttcataatcattaagcagaatatttatctaaaaacctctaacacttaataccagttactcagtatcttaaccaacatgaaaatacaaaacaaccttttattttcaagtagtcccctcagttctcttttatgattaagggaacatttgaatcttttctaaagtttttccttttgatccaaatcacttcccctctacttttctaatggctttataacccttcaacagtaggtggtgccacaaatgcacaaaagtaaatttctgtagaccaacagaactgtcacagctttattttgtgactcattatattacaacatagaaatatgcattttaatacttcatataaagttattgacatacaaaattttttttcttttttccttttaatgaaaatgatttaacttagaaatctgttgtgaaacttttgtctagttttgcaattctcagatattccagtgcaaaaatagatcccattacagacagcgtaaagtgcttggaatgagggccaatgatgaacaaagagcacaaaaacagcttcatcttagggtataagaagggataatagcatacctaaatccttatggaaatagaaacattctaagggggatgcaacaattttgaaaagaattagagcaatatttctacagtattacattattactagtagataataacaagggtacaaattaatgtctcaatatcaaagtggttcagtattacatgacacatggctctttggaaaatattttacctgatatatacaaccacaagaagaaaacacagacaaatggctttagtcaatgattactatacagtgaatgaatgatgtgcaacatttaatagtcacaaagcatttgctttcagtacagataatgaaatacagtagtgtgaggtttggttgttttttaacaatgaattgtgctgggcatttatgtatagagggcttattattttcttctgtatttctcatattcacagttgttaataagttttctgaggtgtcccaaagatgcaaaagcagaaatttttgaacacgtattttgagaatttctgaaactcacataggtacattccacagggaatatacagaaattttgcttgattgagtatagagttggtaaaaatttctaccacaattaggtttacacaggaaaatgtaaaaaattactattttaaaaggtaacacagtattaatgaagatgtataactatagattgtttctagcttcagaagaggtcctttcaatctgtattaaaatgttgtgttttcttcaaaatagttcacagtgccttttgattttttaaaatatggccttgaaatcagaggaaccgaagtaaggagttgctcatagatttactataatgaagaattagaatacgattttagtaaaatgaggaaaccataactttgattttgaaaaatattaaatgaggagaaattattctataaattctgtatttttgaagatactgtaaaatgcaacgatgccatatcactagttattggaaatatgccttcattacttatatttaaaatcaatattgactttaacttctaaaacaatcatttttttctttttcagcagtgggttatataatattctgtaaatttaaaaaatatagaaagattaatttgaaatctgaagtcttacacctttagcgttaatattcaaattctggaaaaagtggaagaagttagtaatgatattgaaagatcacttgaacttccccaaacaatagttctctcatatttttcttttctctcaagacagttaacagtaagtattagtgaaacagtatttttacaaatgtttactgactagaaaaataagactgggttagaaaactctgaaaaatgctccatatggaagtatttgttgtttttatatttttcttgactagtgattgaagagatgaaaaatttgagactgtcagatttaatggggtatccaatatctgcaaagccaattatttgaaggtactaaatgccataaacacaagttgtgtttttcagcaagttttcaagctagctgttttccctgttgaagaattcattgtttagacttgtgacccttatactttcttggcttttgcattgttgcaattaaaaaaaaaaaaaaaaaggctgcccagtattgttacagtgggctcctacaaccacaagacaacctatatttgtaaaccagtgagctgaataacatggcacaggaagtgtactgagacttaatatctctctagtcttatacgtacgtacatactctttcagctacagcatacactcaaaaaatatttgattgatgaagtgagattaagagtatcctaaatgatctgaaagaaactcaaatataatgtcatgagatcctgaccatcacattgctttctaggcactagtcatgactgatatgcaaacttacataagaaaataaaaatagtggggcagtggccatactcctctataccacagggttctacaaagaggccattctaaggattcagaagtcactgatagaacttaaaattccaaataacattaaaaagtacaaacatttttgtcaaaatacaactccatcttttcattttctagattaattcaaaaagccagaaataatacacttgtgtcagataaacatcttgagatgcagtgtaccatgttagcagacagtcaggacaaatgggcacaggcttccctaggtttgaacgcacaatctctttaatcccatgccctggcttcagcagcttgcagccccagcagtttggctgttgattctttgcctcttaccaggatctaagtatatttaagagtctcataaggatgaccctgtagacccatggctcgaagcataggacaatataacaatggaaccaagtttcccgtgcctggagacacccacatttttgttgcatgttactgccaccagaacagcttatcagagggaatcaaagcaggatgttagccacgcatggcaccattctgtcaactgatattcaatgttgatagactctgagcagagcagctttcacaaaagtgagcatgacacaccatggtgcttcaaactttctgaaaaacttggcactaataactctggcacactcattgccagcaatggatgtgtcaccgggaaaccagtctcctgggcatggcatggcttagtgaatgaggatgtgcattaccttttgattttgatcaataatcgctggccatgattacttgatgaattattgttgcaaccccaatgagaatacacaggaacaaaaaaaaaaaaaaaagtgtgagttcaaacccatatgtccattgggttccataatagagtttcacataggtataggtaaaaaactaaattcaagtctttcacttgagagccatacaagacataggctacaaaggcactgcccctgtaatggaattttgttttcattgcattgaattgcattgcattgaatagtatcagtacagtatccagtttacttcttcccacatcaacttctggctcttttctccacaacacttcacatggtgcaaaggaaagtctagttcctctttactttcagccaccccgtatgaacaggattcttcatacatagctttctttcactttctcatcctgtagaaaagatgtgagaactgcaacgtccactactgtctggtttttgtgtaatgagaggtcttttaagtggtcatcatcactttggtccttggcaaagttcacaaatacctgttaaaagattaagatggacctttataaataccactcaacttgctcattctttattctagttctatttttccagatgttgaaattaggtcaagtaggagcatacagaattacataaatggattaactagaaaactgtgtgtgaaggagggaagaatacttgaaaaaagcaataacaacttaaaaatag

SEQ ID NO: 179 - DNA, 4041 bp, Homo sapiens
taaggatgaccctgtagacccatggctcgaagcataggacaatataacaatggaaccaagtttcccgtgcctggagacacccacatttttgttgcatgttactgccaccagaacagcttatcagagggaatcaaagcaggatgttagccacgcatggcaccattctgtcaactgatattcaatgttgatagactctgagcagagcagctttcacaaaagtgagcatgacacaccatggtgcttcaaactttctgaaaaacttggcactaataactctggcacactcattgccagcaatggatgtgtcaccgggaaaccagtctcctgggcatggcatggcttagtgaatgaggatgtgcattaccttttgattttgatcaataatcgctggccatgattacttgatgaattattgttgcaaccccaatgagaatacacaggaacaaaaaaaaaaaaaaaagtgtgagttcaaacccatatgtccattgggttccataatagagtttcacataggtataggtaaaaaactaaattcaagtctttcacttgagagccatacaagacataggctacaaaggcactgcccctgtaatggaattttgttttcattgcattgaattgcattgcattgaatagtatcagtacagtatccagtttacttcttcccacatcaacttctggctcttttctccacaacacttcacatggtgcaaaggaaagtctagttcctctttactttcagccaccccgtatgaacaggattcttcatacatagctttctttcactttctcatcctgtagaaaagatgtgagaactgcaacgtccactactgtctggtttttgtgtaatgagaggtcttttaagtggtcatcatcactttggtccttggcaaagttcacaaatacctgttaaaagattaagatggacctttataaataccactcaacttgctcattctttattctagttctatttttccagatgttgaaattaggtcaagtaggagcatacagaattacataaatggattaactagaaaactgtgtgtgaaggagggaagaatacttgaaaaaagcaataacaacttaaaaatagactttttttccccccttgaaatggggtcttgctctgtccccaggctggagtgcagtggcgagaccttggctcactgtaacctccacctcctgggttcgagcaattctcctgcctcagcctcgcaagtagctgggactacaagtgcgcaccaccatgcccagctaatttttgtatttttagtagagacggggtttcaccctgttggccaggattatctggatctcctgacctcatgatctgcctgctcctcagcctcccaaagtgctgggattacaggcatgagccaccacgcccggccaaaaactgactttctatatcgccccccacccctacatcaccaactgctcagtcatccatttactttggcacatacggtcttgattaaagggaagagggaagaaaatatttactgagtacttcttaagtgtcaggacctatttggtacttttttatctaatttaaataggattaggcaccaagtaaaatgcctggcccatggtaggtgctcactaaatggtagtttttatggttattattacagtaaattctcacaataatcctatagagtacataggcatcatctcccttttcaggttcagagaggtttagtaaaaagcatagctaggaatagtagatcaggaattcaagcaccaattcaagatacaaactgctcttggacctatgggcgggagtgtcggggcaggaatccacaccctgagaagtaaatctgttttgacactcaaagcttacttggtcaagtgttgtctgagaaacagagtagtcttctatgtggagtcgctttttgctctgggagaggatgctgaatatcctggccagagaagataatgaagatggaagctggtattgtagcatgttccggtgtttctcttttagaacacttccaggaaatgcaagtccaaagaaatcctggacaggcttcaggtccgggttggaccctgctattcgtacaactattgtataaccatctccaaacctgaaagcaggaaaaaatacccaaatggaggatctccagaaaactatttaaaagaatactgaaccctgggaacccaacttgtgccatgaaaaagggcggcccctggcaggcccagaaataagtttctgagagaaggaaccagttatcatttactaaatacttattttatgtgaagcaccatgccatgtgctgtaaatacatgatctcctttaatcctcacctggacccatgaagtctgacagatgttacagagaaactgaggcccagggagttagtcacttgcccatggctcagagctcataattggtagggccaggatgcaaacccatttgtgtttgactccaaagcttgcgctctcaccagtactggcacatgtaaatttttttcatttcatctatagcacaaagctaggaggtagatcttccagggaaactaactcttacagtagttaagtcacttgcccaagagtcacagaaccagtaaatggtaaagacagaatttgaatgcagttcggacttcaaagccctcattctttccactatactgttttgctcagttttatttccctttatgttagaggcaccatttatatactcacaaaagaataaatatcaagccttctcactaggcactatcccaaagaaattatctttattacctattttttagatgctggacactgccaaggcacctgaaccttccattgaccatgattgccatcctagtgcaaagagcttcacattcttccatactgcggtaaaacagaaagaggttttagttttagagagattctctgtaaccatgagaacatcaccatgacttccagcattccagcttcctagggaattgtattctgttacaagtacatgtggatatagggatgatgctgttcagtgtagtggtgtttacaattgtgaacaagttggaaataatccaaatgtctacaaaagggggaatagttaaataagagtatatcctaatggaatactatccagctataagaaatgacacctaaatgcactgacttggaataatgtttacaatatattaagtgaaaaagagcagtatttatactgggcttgcatttttgtaagaatatgcatatataatttcaggtaataattgttttactctttgcttttctgtattttctaatttttacaaaatgatcgcatattctacttggaaagttaaaacatcccacagtgaggaacccaagactttactacggacctatgagatgtaagcactactgatctcccctccttgacaacacttagggcacaattccacaagaaccgccgggctttgggatccatgcctgtggtgggttcatcctgtaattagaataaaataagtcttatttgctggggggaaaaaaaatcaaagataaatttgtttttaaatgcagaagcatctttgaaacagcttaaattttaacttgccattctagttatttcttgatgaatcaaagaattagagtaactttcaaattcatttgtaaacaaggtcattattataaatgtcttattgatgcaggaaactcaaatattctgagtacttttttatgtaattaaatttctccaaataaatagggaaggaaaaaggccatttagttgtaattatcttttcatgactgataagtatatacaaaacaactttttgtctgaaacctctattgaagtcagtataagattggggtgaaattcctttttttttttaattccagctcactcagattaccctagtatattgcaactgttagccttacagaaacaaattccagaccgaggtggaatacataaaagcctcaaaggcttcttcccgtaataacatcaatgctcttatctacagaagaaaaaaggtcaagggccacttcccagtctgatctgtttttcatctatccgtgtgtaaggaactatgacctagttgctaccttggggattttaaa

SEQ ID NO: 180 - DNA, 4042 bp, Homo sapiens
ttgagttgtcaagttgaggccaaagttaatgtgtgaaaaacagtaatgaaagccagctagccaaattgcaccacctactctggcaaaagggcataaaagaacacaaacggaaaccagaaaggagaaaatctatttttaaaaaactatttgaatgtcatcaccatcccaaatggatcacaaaagcatgttttagatgtgcgtgctttttctgtttttgttgttgacatgagtctcactctgtcaccaggctggagtgcagcagcgcaatctgggcaacctccccctcctaggttcaagcaattctcctgcctcagcctcccgagtagctgggactacaggaatgcactactatgcccagctaatttttgtatttatagtagagatggggtttcaccatgttggccaggatggtctcaatctcctgacctcgtgatccgcccacctcggcctcccaaagtgctgggattacaggagtgaatcactgcgcccagccccatgctttttcttaaattgtattggattctctgaaatcattctcttgacatacagggtccctctcttctcgatgactaattgctccatcctggcataaatacagaagcctttaaaatccacttttacctcttaacgagcatcgttgcttgattgggtagagatagtctgaactaatagggacaaacgcaatatagacaaagtgtctttacctcaccaggaggaatgcccacgcaaatcctgtcaacagcaggcttccgcttccttctatatatctgcaacaaacaaaatgtaaacattcataagcctcagtgactcacagctctcccaagcaactgtggaaggcaggactataaaccacatacactgcaacataagacttgtcaataaccctaagccataggcatatttgatgtgccaagagccttggtctgcgtttgtggcgactggcttctgaatgattctgaagctcaaaataaaagtgaacttactttttaacctgtctttttagaaccgtatcattcattattatctacataatttttcatctattcaacatatatatgtattgcaggtattttaaaaattaaattccacagagtagaaatttgtaataaaaatattgcaaatactgtacagattccaaaaaagtaaaatttggagatgctggcatctagagggctgatatagaccctcttgaacacaggcaatatatcagctttttggactatgaaactcaaactcaaaatcaaccatttattctctctacctcagttttgactagatatacaatattagtatgttttaataactaacacataaatgtaagcatataaaaccaatgtattcgagaatgggaattcatatcacaaaagaattctcagtaagaattctttaagaagtctccatggtgtttttaaaataaaattgacagaaccttggtatagatgtacattttgggaacacatgcccttttattaagcaagtcagcaaactgctgggttacagcacataaagctgaaaaaaactgaagatgagctattgtaacctgtactctctcaccttcgtcaactccttgatttctaagatgtcattctggcctccaccatcaagaattctctgtctttcccgcctcacatcttcatcttcatcattcagaggagatagctttgcatttacaggtcttgggggaaaaaacaagaaaaatgaacctttcaaactatttttcaggacaaagattcagtctctaacgtagtattataaaacctacttgccacagtctccaggatgggcagggagggggctgcgggatgcccacatcaggaaaatcagttttatcacatattttgagttcagttcaatgcaacccccattggtgagtgtttccctgtgcgcctcctctgtgaccctcaaccaggtgctccacgggttctaagaaaaagctcacctgggcctgatgaagaatctgtactggatcagaacagtaatgaggaagaacaccaccccttccacggccatggcgaagaggtttcgtcccaccaagtcccaagataatggtgacacaaagcgattctcccctagtagacacaatgcagagatccggtcagaatggagggatcaaaaaccatggcccttcctcaaatttgggcctatgttccttaaaattcaccgatcttccaataaacacaaatggctatcacccatgacaaggaaaaaagagtaacaagagagtgatcactttccaagtctgatttgggaaaactttttatgacccagtatcaatcagaatttcagagccaatgtgtattcgatttgtaacttcactgaagatatctagtatttctttttttaatgagacatgccaaaaatccttttaaaaaggcaaacgacccaagtaattttcacagtcagtatttttaataaattctaagttttagtaataataaatatcagaaagcactttaagcagattcccctttcagtagcatatatcctagtgaatcaattaaaccactagattcaattaaatctagttccatgtaaccattccttaaattccttacatatctcctttgtagcccaagttgcaaaaagcccctcttctatgaacagtaaataacatggcccatttgactatattatctaatggatgaataataatcatatggctaccggagaaatatttttaaccattctaaaggtagaaaaagatgtaatacattataattttatagactgtgtaaaagataataaatgacctcatctgcaggcacatgattcgcctaaaagagccaaagtttgcatctttccttctgattccctgatcacctaattctcaaagttatggtttgacttttccagtgcttctaaccaacccagacagtggcatgagccagtggatccaagcaaatgccactattttccttaccttcaaaactgccctttcacttttctcaatgctatcagagacacagacaaatggttgtgtcacaaaacccatgccacaaccagctgtgttggcatgagccctgtcactgggcatgggggtgggggaacatcctgtgcttagtcacctgcttctttccaaaacaaagttcagggtaccaaggcctatgcagagtgccatctccattaaagcatcctacagccactgcttcactcaccaaacctttccagggcatcagccattgcctggtttttcaccatgtcgatgagccctcgtcccaggcaaaaatgtgggaagatcaagaacacggacttcaggatatcattgatattattcagcttctaaaaaaaaaaaaaaaaaatgggagggaagggagggtgagggagaagaaacgggtgtcattcatggtttatcctaaaaatgtatcaagttctgaaatatgggagtgaagaaaaaatttgattctctagggacaaaccagaccttttaattcagataccaattaaatagcagcaggcatagctgatgatatgtagcaataaaattctattctttagaaaatctggagaaatgctctgagtatggagaaataatgaataaagcttagaaacaggctagatttaattaaagcaaatccattaaaaatcccttagcatttgaaaagcaaattgctcatgtctgggtcaatatttgagtttcaggattttgtcagaattttagaaattcttctcaaatacatcagaacttatgatcccacaaggcaacagtggccaaatatctaccaactgaataaggggctatacgctggatgcactgtgctagggcatgggagaggcaaaattattaagaaacagactccactccgagtaggaaaagtatgtaaacaggaaattaccatgtaagtggatgtacgttgtactggaggcatggactaaggactctgagagcacagagaaaagagagaacacctcccagcaggtaaggaaagcttcacattttagctaaatcttgaagggcaagggatatactaccagaccctgtgacagaagaagggcatttcaagccaggcctacaggagcatggtggttggaggcaactcatctg

SEQ ID NO: 181 - DNA, 4042 bp, Homo sapiens
gcaatctgggctcactgcaacctccgcctcccgggttcaagtaattctctcacctcagcctcccgagtagctgggattacaggcgcacgccaccatgcccggctaatttttctatgtttttagcagagacagggtttcactatgttggccaggctggtctcaaactcctgaccttgtgctttgcccgcctcggcatcccaaaatgctgggataacaggtgtaagccaccgcgcccagcctctgagagcttttaaatctctggatttaatttgttttttgagatggagttttgctcttgttgcccaggctggagtgcaacggtgcgatcttggctcactacaacctcttcctacagggttcaagcaattctcctgcctcagcctcccaagtagctgggattacaggtgtgtgccaccaagcccagctaatttttttgtatttttagtagatacggggttttgtcatgtaggccaggctggtctcgaactcctgacctcaagtgatccacccgcttcggcctcccaaagtgctaggattacaggcatgagccacagctcctggcctctggatttgtttttgacctacacttttaaacgtacaactaagtaattcagttttgtctggctcaaatcgctaaatgccaaagacggctctgtatgccaacatattcagaacaatgagctgccaggtgatccgtttaacctgccaactactcctatatcccagcagctacatgcccatttttctgatacatcttacgatagatattttaccttggccagctttaggtgtttcttcatttgtttgatggcatcattaacttcttgactcggaggaagtgcttgagtattactgacacccagggaaaagccgccatacctaaaagaacagcctgacattaaaacccagacagtggggtgcacagtatcatcagcagcagactcagtgcgagtgtgtacaaggttcactgagtcaaattcctgttcaaaggagggctaaattttgcctcagagaagttacacgtcagcttcctctaataaatgttggcaatctcttaactcccatggtttctgcccagcagggaggacctggcctgattacacacacagttagatagctgagacattgaggaaagaatggtgtttcatctcacagatgctcctccaacccagtggctcgtgtgtgaatgtgggtctggaggcaagcagatggggagttgggagagtgggaaccctgcactgtccagagtaggctgcgctggccttatacacaggctccggctcctttctagcatgagggctattataggggcctgcgtctgctctgcccagagatccaggggtcctggcccttggggaaaaggcagagagaaaagacggaaatcagtaacaaggagccttcgggccccctgacgtagccacatcacctatctcattttccatgatggacaaactggcttcaagaactcttctgtccccagtcccacctgttccttcaaaacccagaaggacaaatgggttgaaatacagtgcaaagagatggttttggcgcttcttatttcctctaagacctttttagtcccgtgctaaatgcctagaaattgtccttgagtccttaagaagcctcgggaatctggtttggggggaaagtacaagtaggtattcccctcacaacactacttacttgaaatccctagacacctgcaggagatttctgattctcctcaaggaaatcagtatatcaaatatttcagaggcctctggaggggctgctgggcactgagccatgatgctctaggcagaaactctataaagcaggcctaatctaaatctgtctgtgcccctgtgtgctccacatgttcacagggcttctgtcctcctcacagtgagatggcacccacaagtgtgtgagtgacaaacaatccccaaggctttcttcaatccaagacacctacaacaccatcctccccctgagctaaacgtgccagaaagacagcaacttacctaaactcattcacccagatcttgttctttaagctgcagagacaaagaaacaaaaaatcagttcaaagaaagcactgagcctattcctaatgatgcaaaaggagtaaatatccacctgaggatataaggaacggacagaaataaccctagaatcagctggccttgtagggttgtgctagagaaaagaagcctgtgttcaggcctcttccagccttctctccatcataaataccctattacttatatgagaaccaggccttgggttaaaccaatttacaaaccaccttatagaccaagatgtaaccaaactagaagctttttctttcttttttttttcttttgggagatggtttcgctcttgttgcccaggctggaatgcaatggcatgaactcagctcactgcaacctccgcctcccagattcaagcaattctcctgcctcagcctcccaagtagctgggattacaggcacgcaccaccacgcccagcttattttgtatttttagtagagacagggtttccccatgttggccaggctggtctcaaactcctgacctcaagtgatccacccgccttggcctcctaaagtgctgggattacaggcatgagccaccgtgcctggcctagaagctttttcaattaacaataatatttcaattgtggatgacatatggagaaattatgcttctttcttagaaactcatggtcactatcactccagcatgcccatgccatttaaagtcactgagatactcctaactgaaagaccccaactgaccaagttgatgggaaggaaacgagaacaaacatttgctgagccaagcattcaacactaggctgccatgtcctgggaagctagaaggctctcccaaggctgcagagccaaggcaggctcctaaaccttcccagagctccctccatgagaccacaaattatcatggagtcccccatcagagagtacccaaggcactctatgtacaccatttaatttagtcctcatgacaaacttataagagcaacattaatatcacaatttagataaactaaggctttaaaaggataaccagttacctggtcaagttgctactaagtggcaaaatttgacgttgaatccatttctattttcattctagaccaggctgcctcagccttgaagctgacaactgaatgttcacagtccctctcgtcatcttttctagtttgggataatatcctaaacttccaatagacagaatcaggccataatctggcatttcccccactgtttcagtctgttatttgtaggtctttaattcctctaattagtaataatacggcaggggccaagtttagtaaaaagtcaccttttggctatgatctgcacatacgtcttcaccagataatccgaaatgtttcttcctgtcaggtcctgaaggatatctgcagtgttttgttttctctgtcatcacatgaaaaccaagcatacgggtctttatagacaagaattgaaacagaaaacaaatcaaggacaacagtgaccatgtccacagtgtgaccggaaacctgactacaggtcccagacactgccctcagtcaaccagcactgagacttggttcaccctgccctcggcactggtaattcacttacaccaagccaaggtctttcccaagaatttattctgaacatctaaacaataaacattgaaatgagattctttgtagtcaagagatttttaggaagcaccatcattcactatgcctaataaatcttctgttcactggagttatactgatgactagattagctgttattttattcattttattttttgatatggagttttgctgtgttgctcaggctggagtacagtggcgcaattttggctccctgcgacctccacctcccaggttcaagcaattctcctgcttcagcctcccaagtaactgggattacaggcatgtgccaccatgcctggctaatttttgaatttttagtagagacagggtttcgccacattggccaagctggtttcgaactcctgaccttaggtgatcagtcca

SEQ ID NO: 182 - DNA, 4039 bp, Homo sapiens
acccacctctaccagccttgagcacggcctcataagatcctcacctctccaccatcttcactcacagtgatctggtgacctcccttcccctacactcacttaagggtcatatggatgcttcactgaatttatttatccactgcttactttttaaaagggggttttgaaggaaagtacaataaaaatatacaatttgagaagaagaaagtgtccctttttataaaaattcatatgccatcttttcagattataaaagcgaagaagctgataagcaaaacctaaaaatcatatataatgagagcctattgaagcacttaagtacaggggctgggagagaaagaaaggaaaagcatttcatcagtaagtgtaaagtgctatttaaattaaatattaaggttctaaatcagtaaacaaatgtctgtaatgacgtgctttgcacggtgttagaagactctccaaacgtttgttcctagataatttagttcggttactaccttcgctttttgtaaataaaacataataataattcaaagggcaaatgctggcggtcacaatgtggcatgcagttgataaatgcagcatattagaaatcaaaccaggcaacaagcacaagaagcctgcttatggctaaagtggcactcacgggattgggtttccttccatacagcgggtcccgaagccagggtctttggtgagggcgtttaagagttccagggttcccgtgtcctcaggagcatcattgctgtgggtacatgagaggcagccagcttagtaattcattaaaaccagtaatcgagagataaaaatgtttttataaattaaacattttaggaagcatttctctgtgacaggctcttaaaacagaaatgaacaaaacacagaaaccacccagaaggatctcagactctggccctgtattcggcatcagggtgacgtagagcactccaaagtggagcttgttttaaatgggctgtatgtataaaggtgtgtatgtgtacacacatgtacatacacatatacatttatatattttttttaatttgaagaaaatcaactcattaagtatttcaaaagtgctttcacaattatccctttggcacagacaagcaggattttccaagaaagggcaagaaaactttgtactctttgcatgcacaactagaaagcacaaaaataacaggcacaggtcacaaacacatgctatgttccacaactacgggcaatacagggtcagcagccggaaaggaaaaaataaagtaaacctgaactatgtaagaagaaaatgtgggcttagagaaaaagaggccaattcacattacatatatatatatatatatatatatatacttttttttttttaaatgcttcccttttgtatcactgacacagttcccccatctacaggtctacaaatctttcaggactgaagaaagctcctgctaacaagacccagaaaaatcctttgtccttttctttgatttaatgtattgttacagagtgggggatatttttatctaaagaacaaacactacctaacatcccaaatataacagaatagataataattacatgaattatactttgcagaaaacaagtctctggaggttctatgctttgacagtgtgccctgtgactcagttacagaattaaaacacagctccacaaatccaaatattttataacttaatcatggatttttgcaagggtggattatttcacctaaaacacatgtggctgttcctgacaacagtaggatgaagaggagagaggctgaaaggctcaacagaagactggcctattattcagggttagttcgctgctgttctatgcatgcagtattagcttatacagggacctgagccgcagcagtaaaattcattccaccgtgtaattctgaagtccattcccttggccctcgtaaacatctttggtctgctcgaatcttaccccctcctgggatgtagaagacaaacatacctgacaaatgtgtactgttcgttgtacatccagggctgaagttccaggctggggtacttgccaaagggtggcacgatcaggctgaacacaagggcaatgcagacaaacacagctggcaagacaatctttacccaggcagtggagggggcagggggacagcaggaaacggcaagtgttagaaacaaggccaaggggcaaatccctacgagtccagcccacctccccgaccaaccagcacggcaatgaggaatgcagggcctatgactgtgctgcaccaaggcattcttggcagctgggaagcaatggagcctgaaaactaaaccttttctctggcaacacaaggccagaggttatggccacctggcagaggcactaagccaagaagttcacgaagtaaatagtgctcacattcagggtgactcagaacactgggtcctgcccttcctcctcctgaagactgagaaagactacattgggccatgaacccaggaccaggagccagaagtcctgaatcctggttctgtctctagcacaagtgtacccatgtgaagtcacgctccccactggcctcagttttctcattttaatctgaggtctgagaacacatggcccattcaaatcctacactataataaaaccaactctacagcaacggctccaatcatggacaaccatagtcattatctcccatgatagtctcagaaagaataaatatccaattccttcttcaacctcctaagactttctaccatatcttctctgaaaaaaaaatgacttgggtatactttataagttaacccaaaactccttccatttattgctgagaaatgtattccttataaccttaaagattcaaataatgcccccaattctaatgttctgggatttcaatgcagaaaattaacattgagtgaataattctgtataacaactactataatgagaactatctctatgttgtcattatttatggttgtgttatcaatggtcatcatcaacaaacaaaggtaactgaggatcagagagactaagcagcttgcccaaggtcatatagccaataagtagcaaagtcaggattcaacttgagctctgtatgctccaaactcccgctcttaacaatatccacatcatcaaatgaaagactctctgcagaccttttctctatatttcttgattttatagagtgaaaaaatttaacctttctaactaagcaagttagcatgcaaacactgacatgcagacaatagtctaacaagtcttctctgttggccaactatattctgacctatcttttctatcagtttgagttaaacatcaactcagagaaaaatcatgtttctaataaattcacatgtcaagtgcatctgggcataacaactctcatgttatgacagctgaatacacccaaccagtttttctacactttgtcctttttatgttctcctccaaaataaaaataacatatacacacacaaaactaagcacttactaatgtcaggccccattctaagcacctattcatttttattttcgtaacaaccctgtattgcaggtaatattattatccccattttacagatgaggagattgaggcatagagaagtaacttgccagcggatacacaactggcaaggaatagaactgggattgaaatacagataaatctggctccggcatccatatcttgaccaggatgctatcctgccttcactggtcacagagcctgcagcccacccatgaagccagagtctctggcgaaaacagcacgtctcacctgagcaaaaaatcctttccgactccgtctggcaattagcagtctcttccacaaaagggccacaaactgttgctgtgtaagtttccagcctttcacctggtaggaccctttgccatccatcccactgagcaagtctgtctctctggattctgcaagaagccaacactgaaggtcacctattatcttaggtgttttcggcattgccatgctccttcttctggtgtcttcaacaactatcttgaaggcatgtgtctgaagctagaagtttctcagaagtaaagggctttc

SEQ ID NO: 183 - DNA, 4050 bp, Homo sapiens
tacagggggtgacaagctcatgtttgtggaattaaataaacactctttaagagagggaagaaaggccgggcgcggtggctcatgcctgtaatcccaacactttgggaggctgaggcaggtggatcacttgaggtcaggagttcattccagcccgaccaacatggtgaaatcccatctccactgaaaatacaaaaattagccgggcacagtgatatgtgcctgtaatcccagctactctggaggctgagacaggagaattgcttgaacccaggaggcggaggctgtggtgagccaagatcatgccactgcatttcagcctgggtgacagagcaagactctgtccaaaaaaaaaaaaaaagagaaagagagggaagaagcaaagaaaacagttggaagaggttcccttttcttccacccacaggctgatgactccctcatcatctgtctccagcccaaccaccctcctccactgcagacctcagtagccactggcctactggacatcgctaccacccacccagctagaaatcgagactcactttgatgcctccctctctttcactgctctgccactaagcagtcaccaggcctcatttcttgctttatgccttggccacttggagagcctcctccctggtctctgccttcattcttgcctcatccttcttcaattcatccaccccatcagagtaacgtatctacatctccccttgcctggtcccctagagcttaaagtaaaggtcctcagcttgacacacaagtccctccaaggcatgcccatgcctttctctccagccccagatccctcatttccaagcatacacactggattttcccagctagattcctaatgaatgccattgccatgtttacaaggatcttgtcctttaagaactgggagcttatgaagaattgaagcacctaaggcaaagtcaatttcagactagggaaccatctacttgcccacaaatcaaaattcactgagtcacttcacagggcctcctataatcctctgagagccagacaaacagaaaaagtccaactagtagaaatatggattccaaggagaggaccaggaagaacaggtctgaaaccacacttaggtctacggggctagatcatataaccctcctttagagaagagaccccactttaatggcatgagctatattagtcagtgtgaatccatacaaatcactgtttatgcttttctcagtataaactcctttgtttttaaagggacttcctcagtaacctgcctcccagcggatcagggaatagtcctaaacttcggaagtgttccccctaggtaggtacagtctctaaaacccagccgcccttaaagtcaataaggttcaaaacaagaaacctggcaaaatcctcacctgcttcttaaggggagcagagacaaaaggaagaggcctccctcaccatggaaacaggaaatagtctaatgattctctaactcagcccaaggcaggaagatgtgattaacagcactcaggctcaggcaaaggagacattctgttcttgctcagcctgctccacatttgaacccaattgtctctagagcacttatccctttcaagtggctctgaagcactaagtgcatttcccctccacacagtaacagcagctcatcattcacacagtgccctgagaatgagtatctcaggccagtctacatgtaacatcatgcttttgctcccacacttctttccaaaacctaccaagacacagggagatgctgtggctggctgagaggctgcagccaaaaaggaaaatagggtactgcaattactcaactccacttccaaacaccagccctcactaagttttgcagaaaactgctatttgaccgtgagtggcatggatgctgatatgcacagcgttatctctgcaccatggcctgtacttctggagaggtggtgccctgtgactttagctatgctcactacattcccccagctagataaactgaaagaattctcacctcactcacacctgggaaagtgaccagaaactcacctctccagtatcaagcaggcacatggtaataatgggagggacactcacccggacaaggtccatttcttggctgttctccatgaaggtccagatcttggggctgagttcctcccacatgccttccagatcatggaacacagccagttcctggaaggtcttgttcacctggagtcaggtggggagccagggaccgcagaaaaaggaggagaagcacagacaatgagcgtttggctcctccctgaaaagataccccatcacagcagccctgtgccagtcctccccatccccaagaaatgcctgcttgtaactatgattctatacccacgactggggagctggcccagctctggtctgcatcagacttgaggttttcactctgggaattccagaagagccgtgagtatacttagcgcacacctctgaagctaccttgagttttttgcccccagttctggggagattctggggagggagtcttgggctgggggcagcttacctcagccatgacctgccttgtggctggagtgtcaggtgtatacaggatcttcccaacgagcagcggcttcagagctttccagataatgcgggaaagaggactagactccaaattcttcatcaaatcattgcagtaaggagctatgaagaagaggagagacaaatgctcatatgcatggtcatatactgatagaaacttacaagggctttggagccagagagttcttagttgaaaccccagctctaccactactagtcatataataagtaacttatctgagcctcagttggctcctctgtaaaagtaaaattcataacatctatgtggagagatgtggagaagattatctcagattaaactgagatatctataaagaatgatgcttgataaataatcagagcttattataacgtcaatgacggataactcacgactgagctgatctggaaaaatgttttcatgaagcacaagccctcccatccagattcacactctcatgccagcctcaccattgttttcactgacaactaacatgaccaacatttaaactgactcttgaggggcaaccagaaggctgaattcagacctcagttttcaagcaaaaaccaaaatttggggctgggcgcagtggctcatgcctgcaatcccagcactttgggaggccaaggcgggcgaaccacctgaggttgggagttcgagaccagcctgaccaacatggagaaaccctgtctctactaaaaatacaaaattagctgggcgtggtgacgcatgaggctgaggcaggagaatcgcttgaacccaggaggcagaggttgcagtgagccgagattgtgtcactgcactctagcccgggcaacaagagcgaaactctgtctcccaaaaaaaaaaaaaaaaattctcaacagggcgcagtggttcacgcctgtaatcccagcactttgggaggccgagacaggcggatcacgaggtcaggagatcgagaccatcctggctaacacagtgaaaccccgtctctactcaaaatacaaaaaaaaaaaaaattagctgggcatggtggcgggcacctgcagttccagctactcaggaggctgaggcaggagaatggcgtgaacccgggaggcggagcttgcagtgagccgagatggcgccactgcactccagcctgggcaacggagcgagactccctctcaaaaaaaaaaaaaaaaattctctttaattaacacaaactagtatatgtacacttaacaaaaacccaaatacaaaagttgtaacagacaaatgggtttggttatccagcaggatccctgatttttaaaaattcattctaagtttttcagggatttttagataccaagtatcttctatatgctggaaagataatagaatttttttttttttaatgaggatgccctcacaattaagtctgtcatggaaatgaaggcttccttgggtcaacttgcaagctgggggagaggaggagatgggatttaattaaagttgcctacaataccatccttttaaggctt

SEQ ID NO: 184 - DNA, 4044 bp, Homo sapiens
tagctatgctcactacattcccccagctagataaactgaaagaattctcacctcactcacacctgggaaagtgaccagaaactcacctctccagtatcaagcaggcacatggtaataatgggagggacactcacccggacaaggtccatttcttggctgttctccatgaaggtccagatcttggggctgagttcctcccacatgccttccagatcatggaacacagccagttcctggaaggtcttgttcacctggagtcaggtggggagccagggaccgcagaaaaaggaggagaagcacagacaatgagcgtttggctcctccctgaaaagataccccatcacagcagccctgtgccagtcctccccatccccaagaaatgcctgcttgtaactatgattctatacccacgactggggagctggcccagctctggtctgcatcagacttgaggttttcactctgggaattccagaagagccgtgagtatacttagcgcacacctctgaagctaccttgagttttttgcccccagttctggggagattctggggagggagtcttgggctgggggcagcttacctcagccatgacctgccttgtggctggagtgtcaggtgtatacaggatcttcccaacgagcagcggcttcagagctttccagataatgcgggaaagaggactagactccaaattcttcatcaaatcattgcagtaaggagctatgaagaagaggagagacaaatgctcatatgcatggtcatatactgatagaaacttacaagggctttggagccagagagttcttagttgaaaccccagctctaccactactagtcatataataagtaacttatctgagcctcagttggctcctctgtaaaagtaaaattcataacatctatgtggagagatgtggagaagattatctcagattaaactgagatatctataaagaatgatgcttgataaataatcagagcttattataacgtcaatgacggataactcacgactgagctgatctggaaaaatgttttcatgaagcacaagccctcccatccagattcacactctcatgccagcctcaccattgttttcactgacaactaacatgaccaacatttaaactgactcttgaggggcaaccagaaggctgaattcagacctcagttttcaagcaaaaaccaaaatttggggctgggcgcagtggctcatgcctgcaatcccagcactttgggaggccaaggcgggcgaaccacctgaggttgggagttcgagaccagcctgaccaacatggagaaaccctgtctctactaaaaatacaaaattagctgggcgtggtgacgcatgaggctgaggcaggagaatcgcttgaacccaggaggcagaggttgcagtgagccgagattgtgtcactgcactctagcccgggcaacaagagcgaaactctgtctcccaaaaaaaaaaaaaaaaattctcaacagggcgcagtggttcacgcctgtaatcccagcactttgggaggccgagacaggcggatcacgaggtcaggagatcgagaccatcctggctaacacagtgaaaccccgtctctactcaaaatacaaaaaaaaaaaaaattagctgggcatggtggcgggcacctgcagttccagctactcaggaggctgaggcaggagaatggcgtgaacccgggaggcggagcttgcagtgagccgagatggcgccactgcactccagcctgggcaacggagcgagactccctctcaaaaaaaaaaaaaaaaattctctttaattaacacaaactagtatatgtacacttaacaaaaacccaaatacaaaagttgtaacagacaaatgggtttggttatccagcaggatccctgatttttaaaaattcattctaagtttttcagggatttttagataccaagtatcttctatatgctggaaagataatagaatttttttttttttaatgaggatgccctcacaattaagtctgtcatggaaatgaaggcttccttgggtcaacttgcaagctgggggagaggaggagatgggatttaattaaagttgcctacaataccatccttttaaggcttgtaaagcaacttgcgaatgtctggagtgctttactccagagaagaaaaggttcttgtgttacaataaagtacaaaacctgcctcactcagtgtctgaaagacacacctgtggttggaaatggagaaaggttcccctgcatcaagttttcaaggaaaaggatgccactgcctaaaactgtgacattggatccctgctgccacgaggcatacggcacacgggcccacaaaagtgcttaagtgtggggagtggatatggagacacagggttctttaacactgccttgcagctaagaatgggaaacaaagggcagatcaaatgtctgagtgtgagaacacacacgccaccactaacagttatcttagagagcacagatccaggcagatttgggcttgaatcctggctcttgtggattaactctgatgtggctctaaccaaggcacttaacctctctgagcctatgaaatgtggggttaaagaatcttccctgcagggttatcatgagggtaaaatgagataacttaaacagaatgcacagtgcacaagaaattctacttaaatgttagttctttgttgttgttgttgttgctattatcattactgttatttctttttatgttattataaagcttatctcaatggtaatattaagaccagtacatcatcctttttaaaaatgcttttctagcttttttgagttacaactgacaaataaaaattgtatatatttaaggtatacaatgtgatgttttaatatatgtatactttgtaaaaggatcaccacaatcaagctgttaataaatccatcacctcatagttgccttttttgtgtagtgtgaacacttcggatctactctcttagcaaatttcaagtatactatacagtgttactaactatagtcatcacgatgtacatcaagatcccaggaacttattcatcatgtgaaactgacactttctaccttacatatattccatatataagtgagatcttgcaggatttgtccttctgccattatctcattcttgatcaccctggaagccacccttccacatcccccagaaaaccagaaggttggctgtcaatcattcattccattgataaacactactgtgcacctgagatgtgccaggctgcattcagagaactggggacaggtagctattcaagagaagcctctctcctctaggaagagctcagtctggtgggcaaatgggcatgtagacatctaacgctgctacagagggaggagatgacacaggccaaggccagaactaagggagggatggggttggggacagggctggggtctgcatggacactcacttgtagagttgtcatagaaggtttcagcatcttcctcagtgccattgcctccaaagagggctttgtagttgttgtcctcataccagttgagagacttgatcttcagcccccctccctcgggatgcccgcagacaatacgagacacagcctggtagatttgggtggaggagctggagctgttcacattggtcagaaacatcacctcctgtcgcatgtcactccagcttctcatgctgaacagctggcgtcagggatggggacagaaaggagggtaggggaagggagaaaagggcagtgcaagggttggggatgagaagagaaagaaacatcttattttcttgacctctcaaaagccatgtcccagaacatattttgtctgatgtcatctcaaagccttgggatgagcttgccagaacctggctacccaatctgtggtccagggacgagcagcatcagcattactggagacattgttggaaatgcggattctgagacccctctgccgacctgcagaattcaaatctacagcttcacaagatgcccaggtgattcctatgctcactaaagtttgagaagcacagcctggagttagtgaagcccctggggctggg

SEQ ID NO: 185 - DNA, 4045 bp, Homo sapiens
aacacaggctttggaatccaacagttctgggtttgaatcccagttttgtcaattaactcattgggtgactggaaaagttgcctaacctttctgagccttggtgccatctgcaaaatggacatgatgagacccactcaggtttgtcatgtggagcatacagggaaatgggtgacactgtctgaacctaggcagcttctcagaagacattcactccctttttcttttcctttcaagggttgtgctttggtcaaaattatcaactttccacacgctgactggacaaacaagtgcatttattgatcttctcccatttatctcacagaaatagcaagtcagacaatgagtaacttttgatcaaagggatctggaggtgttctattgaaagaggcagatggtccttgcttgtcctggaccaggagcaagcagggcacaagaaacagctgccaagaaaaacgtatattgttcacttggagagtttccaccacatcagcaatgggaacatcacctgcttccaatttttttttttaatgccagaaaaaaaaaaaaaaccagggccagtgatgtaagtgaaaacagctgtaaccaaaccctgagtttagaggcagcctcccctgttacagaccctgctttgctttctctaaggccagaaatgaacaagggacagagggctgcgaggggatctgcagagcaatgcaaggcatgtcaatgtcagctaacagggccctagagaaatagctacggacttgcaaaacagtttctctttctcattctccccctggaagaaccccagttggtccagcttctctacctagtaaaaaaggttaccagccttcataaccagggtaacaaatggcaagctgaaagaaggcttctcctctggaaaaggaacccaaaagtcagacctcatcagtcagaaacacgtgagcagaattcaaagaaagaaagtagaacaggacaggaagaaatacactaacgtatcaatagtgtttgatctcagcatttttgtattttccaagtcttcagcattttccacaatgaacatgcaatactttcattgttagaaaacataaagttcgtttttgatatttgaaaaaatgatgcaagcaccaaaaaatgggtaggttagatacaagcaccaaaaaaagaaaaacggattagagaagcagctaaaaataagggtggaccaagtctgagacaatttccccacaaattattattttccaatatcctacacgttaaagtctgtattgtttgtgagcactgccccctggctcagcttcctatgctgggggacaccagacagttcctcgcttccaagcctaatttgagacaaggctgggagtcagaaaggtggagtgtgcactggctgggagtcagagctaactgcttttgcaagtgcctacaggccctctgatcctaggacagagattactctgatacatttgtcaacatgtggacctaaaaggcaaactcaacttaatgttcattaagagaccatattcccatagttgaacctcagaagccagatgctttcaagggaaagggctgaattaggggtaccacgttattcctgttagttagcaagcatgtgtgttggtaaaatgattggccttgctactgaagaagcaatatggagaaattgctggtcagacaaaagcagtgcatgggcagtggcagagataattctcctctttacaaatgtatgattacctaggggcaaaaagaaaaaatggagaaggttctaaactagatatccagctgttagccactaaccaattagctctgagacatctatgagttttaggtttcttcatttctaaaataaggaaatcaaaacattattgtttacatcacttatactttgaaaattgatattacatcccatgtgatattcaactcaaaaggacctcttgccagactcaggaatgaaaatactgatacagtggatgatccgcttcctggtactggaaagacacaacttacctcctgggccagagtcccaagactatgcagcaatgtttttgtggcttcagccagctccttgctcgggaagggagatgtagagtttagtgttctctgtaatgagaaagaaaactttgtttctgaattcaaatgtaaacctgaaatctctattggaaataaacaagtgaattaaaactgttcacaatcttgagtttaacaaacaagaaaccgactcctaaccaaaactaaagacactacaattatttctaactgtaagtttgcattttgttcattttcaaactcattctttgattaatggttttaaatgaagtaggaatattgtacttaaaactagttaatatgcaatagattaaaaggatctcatgtgggctggggggatgtgtccaatacaactctgaccgcaaattcccaaatctgtctgcgtctgcaagatgggtaatacgggaatggctttgagaaacaagttaatgacggctcacaagaaaggaagaaaatataaagtttaaagctgtcaaaaatagggaaagatggaattctgtcactctgttcaagtcagcactgtttctaacactggaaattgaatgtagaacacttatttttacatcgagttttagtcaaatctttatatgtaccaattcatatatttaattgctgttatatgtcacctaactgcacagcagatataggacaataattcattagaacagggaaaagataaattagggcagaaagcataagctaaagaaaaaaaagaacaataatttacagactgtgaagtcagaattgctatagctgaggagcctcaagttgggttctgagtgttcaggcttccaaagagaaaaagacgtgagatcagtttcttcactgttatttgtcaagcaggaaaaaagtatccagggaaaatccacctttcttgatgtttctatgagcattgttttattcaatatcatatcagacatctctgaagtttagagaaggttgggctattttgacatttgtcatatcagagactgctgtgaaattataatgtagactacacaagaaaatgtctagaagtggctgggactcactatctctgagaaatagctgcctgggatgttttctttcaaagagaattccaaatgcagaagggattgagtatcattctgatcatcacaatatccaagcataatcctcaatgtgcatttctaagaaaacctgcctaaaggttctatgaaagaacttgtccagctcattcatctcttctggaacgggttcttcaccagagtcccaggactcccacattcacagtcctcaaagggacctacgcggtctcccttaaacgtcagactcagataggcctctgtgatacgcagaggtgttcatgattgttccttccatagagagtaattcatgagcaaaaacaggtgaggtgttttgtttctactttctctctttgggttcactttataactaaaggttaacacactagaagccgaacctagggagaacttgcctggaaaactattacaaacacaaactgagagatcttaattgaaagctataggaggtaaagtgtttttgtgtttaccgttaggcctacaagatgacagatgttcaagacagcatagcaaaaacaaaacaaacccaggacaaaacaagaaacgccagatccacataacctaaatttaagaaaaacttaaaaacgtggtagttaatccacttcttttataaggactcaatggaaataagattgttaggattcttgtcactcactctcccccgccaccctgtgccccaattctccagtcatgggaacctggggtagctatagaaccctgggcaaatgactcaaattccccatccttccattttctcgactatgcagcaaagtttaaaatgctgtgcacatatcacagagtttttataagcactaaaactagaggatatgtacaaagcccctcgcacagtgcctggcacatggtaattcctcacaattgtcaacaatgtcatcccctgcctttttcttcccttgcatgaaagtttactgccaaaactggagggcttttgtctgcaaacaggg

SEQ ID NO: 186 - DNA, 4063 bp, Homo sapiens
atgagtaataaggtagaacagtcaatgccattgttagaatcatttttaaactagttctttattcgagattaagtgctcagcatttactaataatattggcaatctgtagtcaatataaacaaatttccattttcaaaggaatattggttggagttacacaatcaggcatggattgacatcacagggttaacaaaacacacatgattcaaattctacatcaagtttaaagcttggattatccagatattttgctcatgacttaattttacttttctgtgcatccaaaacataccataacctgaaaaaataagccaaagactagaagcatggatttttaaaagtttagtataaaaatagaatactatggcaaaaattaaccagattccacatgtatcaacattgataaatctcaagaacataattccaaatgaagtggcaggccaatatgcacacttatacaatgtgaacacatttaggccagtaccaaatattgttatacatagaatgtaagtatacatgatatagaggattaaaacatccaactgcaagacaagagttatctctgaagaatgagctagggaaacagaggtggcatcagctgtacctgtaatgttttatttcttaaatagaacctggagtcagcacggcaaaatgatggatgatggtacaggagtgttctttttgtttgtttgtttgtttgaagacggagtctcactctgtcacccaggctagagtgcagtggtgtgatctcagctcactgcaacctccccctcctgggttcaagcaattctcctgcctcagtctctcacgtagctgggattacaagtgcacgccaccatgcctggctaattcttgtattttcagtagaggcagtgtttcaccatgttggccaagctggtctccaactcctgacctccagtgatctggctgcctcagactcccaaagtgctgggattgcaggcgtgagccaccacacccagccaggagtgttctttatgttattctctgtaccttttttcatgttgaaactatttcataattttctttttaattcaatgaaaagataaaagaggaaggacaggtgagcaggaagaaaggaagggtaaagaatctatgttggcctgagcacatatcagatctaacagacagataacttccttgaataaaattaaccccaggaaagaattcatgccttgaaactagaacacaaaatacggtctgagaatcatgtgtctgcacctgctattaactgtgctctcctgctcatgcttacttgacgaaggcagacaaaacttgccaaatcctatttccaaagagcttcagtaaaaaattcacagcttggaattcctactattatttttctaaccaaaaacattctcttggctatgaactcacataggtctccattgcacccaggagacaagtgactttcttatacgaagtaaaggaaatgggaaaaagaaggaaaataaaacctttagtgagggactatattttctgagttaagataacaggaattcatgtatgactcaatattttcagatcataactgtaatgtcattacaggaagaatgcacaaatgcttactgttattattcaaaagctcccacccacttctgcaaaatgtgttaatcacaacataccatgtttcctaaaagcatggcattctgtgacattggccccagaaagataaaggctgttgtgccccattctttctgggtctaagagatggcttcattatattctttccatcctcatgaacttagttctgctccaaaggccattcacattcacagaaatgctctgtttcgtattcacctcatcaagtcactcagcctgtggagcctttaatggctccctttactctgaggataaggccctatatcctcacatggctcgtgaagaaagacctgcctcagccgacctttgcccacctctgcaggcatcacgtctcatcgttccttctcccatcaaactccccacagctatatctgctccatgctgaactatctcaatcaggtacagttcccctaaatgccaccttctcttccctctcctctctggaccaatgcatatactatgtcctctacctggaacattctactccctgttctttacctggctgacatccattctttaggtccccacttagaggatgtttccttcctgactggaaagactgcagtaggaggccccatcagggactgtatcacacccagcagagcgtctcctgctctatacggcagctgctcctttcctggtctgtcccacccattccccaaccaggaatgaaacagagagggctggaccttgcacatgactacctccctgggccagagcatggcactgattagggctcagtaaatgtttactaaatgaatgaatgcatttgttaatccattatcactacacgaaatgaacactggaagataatattacaatgcattaggagtcacagccaaatagaagtagaaaacacatctgtgcaattaaaatgcaactgaaaatattttcaacttataaaaatctcatctacatctaaatttttcaggaattctatgacaaaatgagacgtgggtatacatatattggaatagtattttcaacacaatacacaattttgttttcctcctgggaatgcatgttacaatgtgttcattgaaacatttcaaatgtcctttaaatatcttcataaagtagacaaaaatctctacttcactttgaccatatgcaaaatccaactcaggctgggattagtatgttttagttcaaactgaaaacaagtaaaccacaaatcaaagactatcaccacccaggagtaattgctatctctttctggtgatttctatgacagtaaagatttcctctgggaaacattttaatattttttattgaaatacgaaattataagactacatttctaaggaatattctaatcttttaaaaaataaatcaacaacctaaatattaactttcaaattagatgtgtttaacgcattcaaacgcttcattttttgctgtttctaaacatagttaaatacatctactaccacataattcagaggaaaaaattaaacctgtatcttagatctggcaacaatatttaatgaagaaatagtataactaaggtgaaaatgtctgtgtaaatggagttgagcagtcatattaacacactgctatatctaccagctagtgctcttcttttcccataagaatgaggtgaacatagagtctgaagagtaaatctacacagtgtgtcattccacccattaccaacccatggggattgcggctgcttgctgggagaaagcaagtaaacaggtgggcagtcaaatcacacaaagccaaacaaaatctgatactttccaacaatgtccgggttccagacaggagaacacgagcaagtgttctctcctgcaaaaacccacacagacgctttaaggactgcatgtaacaagctgaagtatctagccctaaaaagccatgaggctgaaggtaacaacaagccccatctgtattctgggtccttgtctaagagtcaagaagaagctaaataaagacccctcaagacaaggatgactttgttcactccttatccatctgcttcttcgatctgtacacagctcagctgtgacattacttgtcttctgggagcctcggggcaccctcactttcccttctttccctcatgaaccaagatccacttggtgggaatgtgctaggcacactggaagacacgtggacagtggaaccactggttccacaaaaaccacttcttttttttccccacgttattgagatggagataaatctgcatgcctggacttccaaccttaaggatcagacaccattttcacatcactgaggcaatggtgagtcaaggacagagcccaaacctagctcattcaaccccacattcctcccactacagcccacagtgtctgtgttggcaaagactgctgtgagggagctggtcgagaggtcatcagtgaaactggaacgaggacagctctcactctgtagacccaggacctacaaagaattcctcaaattcccagactca

SEQ ID NO: 187 - DNA, 4046 bp, Homo sapiens
gcacacttcagttctactcatttctttaactggtccttgctgctaggctgtcagcctacagttagtgtctatgtttaagaatactgacaacaggccgggtgcagtgggtcatgtctgtaattccaacactttgggaggccaaggcagacggatcacctgaggtcaggagttcaagaccagtctggccaaccaacatggtgaaaccccgtctctactaaaaatacaacaattagccaggtgtggtggtgcatgcctgtaatcccagctactcaggaggctgaagcagagaatcacttgaacctgggaggcagaggttgtagtgagctgagatcacgccactgcactccagcctgggtgacagagcgagactccaactcaaaaaaaaaaaaaaaaaaagaatactgacaacggagggcctttgttgatgtcatcttctgcctctgcccaatcatgctttgttccctttcctttccttacacaagtattgatcccaagaatttttcaataaatgtcttgtatgctcaaaaaaaagaatactgaaaatacagaaactccaaggaccatccaaggaccatctccatgcttaggatgccccttattttaaactgattagatgtgacagatatgaaattggcagggggcaatggaaattatgctaaatgcaactactttcaaaagcctgatgcctttggcccatctcctaaccacacaattggtaaacacaaggcatattttcctagtttcagaagggcacgcagtaagcacatttttctaattttaaaaattctagatcatgtgaagcaaaaagcttattttcaagaataaacatttccactacttctgcttcttgtaaagacaagctagtatgcagacacgagataggggaggaagcagttcccctttctgccagagaataagctcaaaaagtgtctctgaaaaatcaataaccatgcaagctgggtctggtgctacccactgcacaagagctgtctaataatgatgccagaggaagttttctatgattctaaagttaaaattcaacataaacactaatattatttcctgattttataaaattctttttttttttttttttttgagatggagtctcactctgtcagccaggctggagtgcaatggcgtgatattggctcactgcaacctccgcctcccaggttcaaacgattctcctgtctcagcctcacgagtagctgggactacaggagcatgccaccacgctgagctaattttcatatttttagtagagacaggctttgccatgttggccaggatggtctcgaactcctgacctcaagtgattttcccgccttggcctcccaaagtgctgggattatagacgtgggattacagacctttgaagtgatctcgtccatcccacctgagctttgtgacactagtccgttcatttctgtttccccagtgccatctcacagagctaaaattggagagatttaaagccttattcccacaagctgcagggactgatctcctatttaatgcaaagcaagcaacagttctcaactcagtgccactgcgtccagcccttattttataaaattcttaaaagtctccaaatacacccttgtctaaagtctcctgtcctcaattttttagacagagctcctccagatcaataacccttaaccacggttattgcctcagaactgtgaatattttttaagtttaactcaacttaaaatgtatcccttgtaggaggaaatcatcacaaatgccaagtgataagccagaaatcaattttattttaaccagctggcccatgacgccaggttgcatattccactcctggatggtttggcaattcctgcctgaatagggaagtaaaattaagtgaagttgtattcaaactacctccctccccttcaccaccattacaaggacaagggtttattcatttctttccagtagctgcacaacgtaattgccatcagccctactgaggaagctggaggcatcagcttaccttgtggagaatgacatcagccctcagcatcttgtccacagtagactttgggagagagaggttgtgatacaggaacccagagaaggtttcattgtccaccaggaaatcttgaagcttcaagtctattgagaaatagtgttttatttttatttagtaagtaactcaaaaaaaaaaaaaaagtgggcacaatgggacagtggagaaacgttatcataatattgatgatcaacagttgcctggctaaacacacacaggaatgagataggggagcatcgccatatcaggagaggcatgaaaatattgctttctggtaacatgttgagccacactcagcatgtgctcctcaactcaaacagtgtgatggtgctgttacacacacacacacacacacacacacatacacacacacacagcctttccttttctttttttttttttattttgagacggagtctcaccctgtcacctaggttggagtgcaatggtggaatctcagctcactgcaacccccgcctcccgggttcaagagattctcctgcctcagcctcccgagtagctgggattacaggtatgcatcaccatgactggcaaatttttttttttttatctttagtacagacagggtttcaccatgataggcaggctggtctcaaactcctgaccttgtgatccaacctgccttggcctcccaaagtgctgacagtacaggcgtgagccaccatgcccggtctttctcttctaaatgatctcacccaccccacctgagctttgtggcactagtccgttcattcctgtctccccactgccttttcacagagctaaaattggagagatttaaagctttattcccacaagctgcagagactaatctcctgtttaatgcaaaacaagcaatggttctcaaacttaagtatgcatcagaatcacctggagagcttgttaaaatgcagactgccgggccgggccgggccgggccgggccgggccgggccgggccgggccgggccgggccgggccgggccggcccccacccccacccccacccccacccccacccccacccccacccccacccccagagtttctgatacagcggccctgggatgcgactggagaatcacttacaggtgatgctgatgctgctgacctggggaccatgttttgacaaacactggcagagtgcattacgcatatcaaagtgccttcacagacatggtctcattttcattccaaacataaaacatgtgatacaaagctccaaaacccaggtctgccaggctttaggaaaacacattaacatatatttaaaccatcagccctattaaatgatttgattgctaaaggatttcatacggaatctccctaaataataggccctctgagtacagttagaaaaggcttcaatccagtgcaacaaaacagaaaaagcagcactaagaatccagaattttagtttctagagttggaggctgtgtctggtggcgtccctgcgtacctcatgtcatctttctgaacctcaatttcttgatctccaaaatgagaggtttctgaccagatgcttggtaggagccctatgactccgaaacagtatagttttccctgactcatctcatttggctgtctacctcttctccttccaacccactctcctaacagcctaacttctttgtaataaagataaaaccagctcatcaggaccacatgaactgagcccacatggccaggcactaagcaacctctagagggcaaactttgcaaactgaaatcatttaccagaagagaaacaggtttgatctgaaaatggggctacagtgtgaggcttaatgaggacaggagttaatccgcggagctaagagggtcacatgcagagataaagtaacaggagggcctgacagcccagccagtctctcataaatgctgtatgatccaggtgtattctgctttaggcaaacttcagtaatattgagttatatagacagaataaattgagcaagatttacatcgctagagaaatgattcactgctacccctctatggctagctcc

SEQ ID NO: 188 - DNA, 4051 bp, Homo sapiens
gaagatcagagatactcatcatggtaggtgctcaatatatggtaataatttgtgattatcaaaaagattttttcactcaactttaccaatgtacaacaatgccatttatagaaaagatggggacacagtccctgccttcgaggaactttcaaggctgaaaggggagataaagaggcaaatcaattcaagaaggcagaaggaaggataagcaagccaaaaggagacagtaaatggaagcactggcccaagatgaggtttatctgtaagtgcttcatggcgagcaaccagactggagccaagttctggaaaaggacagagtcaaaaatccctagaagtggctggagaggaaggggtaagacctctcatgatgacaacgaccaggacattttgtggtcataatgctatgcacatagtagattctcaacaaatgaatgaacaagcagataattagagaagagatttctcaaaacctcagatctgggtagtaggaaggggagaaaaaaggagggggtgaggacagagtacagtggctttgtatctgctggtctcagtcttctcccctatgttgctggcaggaaaatgggtggaaagccaagaatattaagaaagccagatgtctgaaacataccttctcctcttaccccatcctcatgacatggcccatgagtcacctcctccaggaagcctgccctggccttcccatcctcaagctgggttaggtggccagcccttttttgtgactttttttttttttaatacagagtttcaccctttcacccaggctggagtgaagtggcccgctcttggctcattgcaacctccaaagccccaggttcaagcaattctcctgcctcagcctcccgagttgttgggattacaggcacccgccatcacgcccagctattattcctttttgtatttttagtagagttggggtttcatcatgttggccaggctggtcttgaactcctgacctcaggtgatccactcgccttggcctcccaaagtgctaggattagaggcatgagccaccgcgcccggcgttttgtgactcttttgtgcccaacatcctatgttttccactagtaccacacagatcaagctgcagtcacccatgtaaatatcctgctcccagaagaatagaaattccttgagggccagggtttttaattccaaagccagcagtgcctggcacagaggaggcactcagtaaattggatgaatgaatgaatagatggatggatgaactaatgaatgaatgaatacaaatgagtgaataaattaatgacctgatgtgatttggggaattgccgattgcagagaagaaaattcaccttgcagtgagttagggaaaagatgaagcaggacatgaacttgaaacaaaccaagtaaagaggacacaagagttctgctaaacccactcagccacgtcagcccagatcaagaggagagtcaggtgagtggcagctagaagcagagtggggaacaggagagaggaaggctgagttgattaaatgataaaatggagatgacaatggcatccacctcattggactgagctaggtgttaaatgagcaaatgtacctgcagacctagtataatgccgggcactgagtaaggtgcccggtaaaggatggctaatatcatcatcattttcaggaatgactgatctgaacagattcatggctaatttaaccttaaagcatattcagaatagacaagacacagaagtggctttggcggctaagttgagatgttgaatttgtgatctaaggtatgcacatgtgtgtatgtgtgtgcatatgtatgtgtgtattataatacatattagcctggctgagttcctaagacagaattattgagttctttctgctgatactatctataaggtaaaggaaaggttgaagctgactgatttgtctactcataactttatgaaagaataaataaatctagtattttacagggaatcaccaggaatgatcatatccaccagtcactgcaaggatggatataggtggaagatgacctggacgaaagaccaatcattccacacaagacagggaatacttcctgaacaggagagtcatttagccacttaactttggccaatgagttaatgcggacctggattttataatcagtaaaatgtgtgggttggagaagatgatctctgaggtcttcttacctgacactgaaaggaacacagggcaaaacaaaatcagcactggatacagcatcacagggtctgaattcaagagtcagctctgccatttcctgactgtgtaatcatgaagctatactttcccccctatttaaatctccctaagcctcagtttccttggatataaaatggggctaatacagcactttgggaggccaagacgggtggatcaactgaggtcggaagttcgagaccagcctgaccaacatgaagaaaccccgtctctactaaaaatacaaaattagccgggtgtggtggcgcatgcctgtaatcccagctactcaggaagctgaggcaggagaattgcttggaggcagaggttgcagtgagccgagatcacgccattgcaatccagcctgggcaacaagagcgacactctgtctcaaaaaacaaacaaacaaaaaaaacggggctaataacattcacaggttgttgtgcaaaccaaagatcaagaacgtgaacgtgctgtttcaggggaaaaagctgacttgctccaagtgttcgctcgggtaactggaaggtatgacctctgtcacaggatgcggagctgggctactgctgccagcagaagagaaagtcactatccagcagaaggtcaagagggctctcccaccacagtctcttcaatacagaccaaaatacttgacctgctgagctcagcctccttggttttgcctggaggagcaaacagtgacctaccaattagccaagagcttctgtaaagtggggcaaaggaaaggaaaaagaacaaaaaacaggtgacatgtgtgtttgtgggctggaagaaacgaagcagaaccctcagcttcttgccacacatccaggcctctgggaccaagccggggaaccagctgggacctctgggacccaggtccaggcctctgggaccaagctgaggaacacatttgcacgtgcaggcggaggggtatgacgcggggtgggggcgaggtcctgctttccaggccattcagtgttccttcagttctctgagcatagaggacaaggaaggtgggaggagggaggagagggaagagaggggtgaaggagcttgggggaggctgggaaagaaggaggaaaggagaggagggagagcagctcaggaaggcggaggaggaaagccctttgctgagctgagctgagccagacggggttactctcggtcagtgccctccagtccccagctcaggtttcaagatctgtcttctcttttgctcaacatgaaaaggaaccagagcaatcagctgctttagaagtgggtggaggaggcaaatgaaaaaaaaggagaagtagggaaaatcacatcagcatcccaggcccagatggtcttcttcaatggacccctggggtgggggtggggtggggcctcccagcctgctaggagctgtcaactgagcagggcctgggagcgggagacaaattctaactcgtggttttaatcagcctgagcttgtccagccttacaaataagaccttgaaatacttctctgttatacaagggctggtaacaaatacactccagtgtctttatggtatttttttggtgttttgttttcctgatgctctgctgtcttcttgaagaatagacgatgcctgcttcaccaatagctgagcactctctgggaagacctggttgttgggtgctgaggagaaggggtgaggcggggtgatgcagctgctccttcaggtgactccttagagcaggggagagtaggccaggggtgtgtggtacacacagcctaaggacacccatgctgttcatcccggcctgggctttccaacccaggagacacttccttctctacagagaaggctcaccgagggatacca

SEQ ID NO: 189 - DNA, 4068 bp, Homo sapiens
ccaaagccagcagtgcctggcacagaggaggcactcagtaaattggatgaatgaatgaatagatggatggatgaactaatgaatgaatgaatacaaatgagtgaataaattaatgacctgatgtgatttggggaattgccgattgcagagaagaaaattcaccttgcagtgagttagggaaaagatgaagcaggacatgaacttgaaacaaaccaagtaaagaggacacaagagttctgctaaacccactcagccacgtcagcccagatcaagaggagagtcaggtgagtggcagctagaagcagagtggggaacaggagagaggaaggctgagttgattaaatgataaaatggagatgacaatggcatccacctcattggactgagctaggtgttaaatgagcaaatgtacctgcagacctagtataatgccgggcactgagtaaggtgcccggtaaaggatggctaatatcatcatcattttcaggaatgactgatctgaacagattcatggctaatttaaccttaaagcatattcagaatagacaagacacagaagtggctttggcggctaagttgagatgttgaatttgtgatctaaggtatgcacatgtgtgtatgtgtgtgcatatgtatgtgtgtattataatacatattagcctggctgagttcctaagacagaattattgagttctttctgctgatactatctataaggtaaaggaaaggttgaagctgactgatttgtctactcataactttatgaaagaataaataaatctagtattttacagggaatcaccaggaatgatcatatccaccagtcactgcaaggatggatataggtggaagatgacctggacgaaagaccaatcattccacacaagacagggaatacttcctgaacaggagagtcatttagccacttaactttggccaatgagttaatgcggacctggattttataatcagtaaaatgtgtgggttggagaagatgatctctgaggtcttcttacctgacactgaaaggaacacagggcaaaacaaaatcagcactggatacagcatcacagggtctgaattcaagagtcagctctgccatttcctgactgtgtaatcatgaagctatactttcccccctatttaaatctccctaagcctcagtttccttggatataaaatggggctaatacagcactttgggaggccaagacgggtggatcaactgaggtcggaagttcgagaccagcctgaccaacatgaagaaaccccgtctctactaaaaatacaaaattagccgggtgtggtggcgcatgcctgtaatcccagctactcaggaagctgaggcaggagaattgcttggaggcagaggttgcagtgagccgagatcacgccattgcaatccagcctgggcaacaagagcgacactctgtctcaaaaaacaaacaaacaaaaaaaacggggctaataacattcacaggttgttgtgcaaaccaaagatcaagaacgtgaacgtgctgtttcaggggaaaaagctgacttgctccaagtgttcgctcgggtaactggaaggtatgacctctgtcacaggatgcggagctgggctactgctgccagcagaagagaaagtcactatccagcagaaggtcaagagggctctcccaccacagtctcttcaatacagaccaaaatacttgacctgctgagctcagcctccttggttttgcctggaggagcaaacagtgacctaccaattagccaagagcttctgtaaagtggggcaaaggaaaggaaaaagaacaaaaaacaggtgacatgtgtgtttgtgggctggaagaaacgaagcagaaccctcagcttcttgccacacatccaggcctctgggaccaagccggggaaccagctgggacctctgggacccaggtccaggcctctgggaccaagctgaggaacacatttgcacgtgcaggcggaggggtatgacgcggggtgggggcgaggtcctgctttccaggccattcagtgttccttcagttctctgagcatagaggacaaggaaggtgggaggagggaggagagggaagagaggggtgaaggagcttgggggaggctgggaaagaaggaggaaaggagaggagggagagcagctcaggaaggcggaggaggaaagccctttgctgagctgagctgagccagacggggttactctcggtcagtgccctccagtccccagctcaggtttcaagatctgtcttctcttttgctcaacatgaaaaggaaccagagcaatcagctgctttagaagtgggtggaggaggcaaatgaaaaaaaaggagaagtagggaaaatcacatcagcatcccaggcccagatggtcttcttcaatggacccctggggtgggggtggggtggggcctcccagcctgctaggagctgtcaactgagcagggcctgggagcgggagacaaattctaactcgtggttttaatcagcctgagcttgtccagccttacaaataagaccttgaaatacttctctgttatacaagggctggtaacaaatacactccagtgtctttatggtatttttttggtgttttgttttcctgatgctctgctgtcttcttgaagaatagacgatgcctgcttcaccaatagctgagcactctctgggaagacctggttgttgggtgctgaggagaaggggtgaggcggggtgatgcagctgctccttcaggtgactccttagagcaggggagagtaggccaggggtgtgtggtacacacagcctaaggacacccatgctgttcatcccggcctgggctttccaacccaggagacacttccttctctacagagaaggctcaccgagggataccaagacatacctgaaaaaactcagttccagaattttccagttatgtggccttgggaaagtcagttaggctctctgagcctccatttttctgtaaatggaggtctagcttcctatacgtgtgggttaagttatcactaatgacactaagtgtgttaagtactctgaatgctgactcacacatactccttgagaaaatacaagctgaaaattaaacatgttcaaaataaatgtggataaagtcatagatgacaagctgtgaagaattcccaagagaaaccaggatatttaggcttatgctccctgaaccttccaaggcattaggaagccagagtcttctctttcaaccaatgggaataccataactttaggaaccacacattccttctagtattttacaaataatataaacttgtattagttcaacaaacttctgaatggctacagtacccaaaatactagtgttgtggttcaaagggataatatttttctcagtgctccttgaaggcaggagctagcctataacaaaagaggcgctgtgtaacaaaatccctgcccttgcattctaagaggagatggccagagggtcgggtgagcagagcggtgagcctccaaccctctctgccactccagaatcagtcagcactggaatcaggggtggaacgagacattactcatcttcccccagattactttgctagtaaggcaatagcacacctgctatgatttgaacgtgtcccccctcaaagttcatacattgaaacttcatcaccaatgtgacagtattaagaggcagggcctttaaggggtgattaagttatgtgagcagtgccctcaccaatagcattagggcccctcacagataccatgagtttcatgtgcgtctgtgtgaagagaccaccaaacaggctttgtgtgagcaataaagctgtttttttcacctggctgcaggtgggctgagtccgaaaagagagtcagcaaagggagataggggtggggccgttttataggatttgggaaggtaatggaaaattacagtcaaagggggttgttctctggtgggcaggggcagggggtcacaaggtgctcagtgggggagcttctgagccaggagaaggaaattcacagggttaatcactcagttaaggtggggcaggaacaaatcacaatggtggaacgtcatcagttaaggcg

SEQ ID NO: 190 - DNA, 4048 bp, Homo sapiens
aggggagagtaggccaggggtgtgtggtacacacagcctaaggacacccatgctgttcatcccggcctgggctttccaacccaggagacacttccttctctacagagaaggctcaccgagggataccaagacatacctgaaaaaactcagttccagaattttccagttatgtggccttgggaaagtcagttaggctctctgagcctccatttttctgtaaatggaggtctagcttcctatacgtgtgggttaagttatcactaatgacactaagtgtgttaagtactctgaatgctgactcacacatactccttgagaaaatacaagctgaaaattaaacatgttcaaaataaatgtggataaagtcatagatgacaagctgtgaagaattcccaagagaaaccaggatatttaggcttatgctccctgaaccttccaaggcattaggaagccagagtcttctctttcaaccaatgggaataccataactttaggaaccacacattccttctagtattttacaaataatataaacttgtattagttcaacaaacttctgaatggctacagtacccaaaatactagtgttgtggttcaaagggataatatttttctcagtgctccttgaaggcaggagctagcctataacaaaagaggcgctgtgtaacaaaatccctgcccttgcattctaagaggagatggccagagggtcgggtgagcagagcggtgagcctccaaccctctctgccactccagaatcagtcagcactggaatcaggggtggaacgagacattactcatcttcccccagattactttgctagtaaggcaatagcacacctgctatgatttgaacgtgtcccccctcaaagttcatacattgaaacttcatcaccaatgtgacagtattaagaggcagggcctttaaggggtgattaagttatgtgagcagtgccctcaccaatagcattagggcccctcacagataccatgagtttcatgtgcgtctgtgtgaagagaccaccaaacaggctttgtgtgagcaataaagctgtttttttcacctggctgcaggtgggctgagtccgaaaagagagtcagcaaagggagataggggtggggccgttttataggatttgggaaggtaatggaaaattacagtcaaagggggttgttctctggtgggcaggggcagggggtcacaaggtgctcagtgggggagcttctgagccaggagaaggaaattcacagggttaatcactcagttaaggtggggcaggaacaaatcacaatggtggaacgtcatcagttaaggcgaggcagggccttttcacttcttttgtgattcttcagttacttcaggccatctgggcgtatatgtgcaagtcacaggggatgcgatggcttggcttgggcttagaggcctgacaatgaggacccctataaaagggcttgagggagaggcttcagtcccttctgccagttgaggaaatggcgtttgtcccctcctaaggatgcagcaacaaggcaccatcttagaagcagagagcagccctcaccagacaccaaacctgccaacaccttgattttggatttcccagcctccagaactgtgagaagtaaatttctattgtgtataaattactcagtctcgagaattttcttctagcagcagaaacagaataagacaatacccatgtcttactgagaagagggaaggtgggagaagttactggaagtccctagaatgagggttgaagaccctgaatggtaacaattcccccaaagagccagtgcagccccagagggaaaggatgtcctggtcacactggccagggcgtggaagggcacagtcagcctggctttgaagctcagaaggaaatggaagataacactaagacataacattgacccaaatgaattttggacctgaacagaatgagaagaagaaacaaagaaccaacatcagaaaaagcaagaagatagctgagatgaaaactctacctgaagaccagagaggcagaaaaatgagagaggacagctggaagacaaaaggagtgaaaagaaggtaagagataggaagtatgaagaaacagagtccagaaacaggaaagactacatcaaacagaaggggaagagagaaaaagaaaagagagtttgaggcattcagttcccaaggatgagctggtctctcactgaaaaaagggaccagacacttcaaacaccacacaacatgggactagaatcagcctgcagggccctgagaagtccaggcacaaaaagaacggaaaaagatgagtttacaagttggggatgagattcttcctaaggctggtctagggaagaattaacatacacaatgtataaatagtttaatttttttctaacttttaaaattaacaaaatttattaagggacatagtagtgctttgtgggcacagaaaagtgactcatatttaccaagcattaggcacactattagcattattttccagaatctttaagaacagcctataaagaaacgtattattattcccatttttcaaatgaggaaacagatctggagaatatcttgctcagggtcatagaacaaacaagtggtaaatttgaacccaaacagctttgactgcaaagctttggttctttccactatatcagcaatttaatgagatgttttaaaaatgcttcatcgtgatattggcctcaaaagctggggatggcacctatgcttcctaatgttggaataagcaacatggcagcatagtgtggggagaaaatgctaagcctaggagtcagaccccgattcaacgtacaactttactctttaatcttggacaacagacattaccctttcgagcctcggtttcctcatcaatgaaatggagataataataccaatttgcccctgctagtgctgtttgaagccttcaatgtaataatatatgaaaaatgtaaaatggtatcattatccggtgcaacttagtctgttgaatagtgtcgcactgagattgccttttggtgcctcaatgcaacagtgacaagaggaccagaaatgggaaagctttcaatgagaaacaaactggactcccaaattgctctttgccacccacagaataaataaaccttatgctggaaaagcaggagacacgcaacactgttcttgatgttaacaattcaaaactttttaaaggcagtctgatatttgtggggatacacactattctgtaatcgaatgcaattgtgttttctattcttgtctgagtaaagctgatctttgatttgatttagttcaagtaatatttcaacattgcagtgcagcgttgctccccacccccacctgcttacagcccagctgggcccaggcccttgccctggatggaaatcaaagacctggtttctgagatgcagcctggctttgacaggtctgggaaaactcatggtagtggaaaggtttccaaatataaaattctaaggcctcaaatcaaaacttttgacaagtgcatacatacagaacgtgaattgcaatcacctaaagatttcaaagaatttccattttgatgacataatgttgacacatgtatcaccagatctcccaacaagatgacacactggggttccacaaggacagaaaatatagtctgaggctgtaacctcaactttagcagctgcctgaatgggtgagggggttcagacagaaaatgagaagtggctgtgagtcacaggatgttctttctagatgggccttgggaaacattccatcggtgcctgaagccaggaagtggagtgaatctggcatttctttcagaagccctcttgtctcctttctcatcccagccagcccatgccccatgtcctgtgactttagggaagcttctggctactcagagctgctctctttaggatataacaacaacagagcacgagaaactggaattctggtcctattactgccccttgccagctgtgctttcttaggcaagttacttggcctctctgaacttcggctccttcatgtgtgtatcccctgcattttatgatgattgtaaaa

SEQ ID NO: 191 - DNA, 4074 bp, Homo sapiens
ctgcagagggcatggctttatttggaaaatggcctgttgaaatcgaggagtagaaaaacacagggagaaacattaattccctgaagcgattttgaggctccatttatacaatgcttcatgccaagtctgtccgtcccattccccacatcccagagacctgtctcttctgaataaaactgactctcaggtggaaacttggcctcacatgccattcttaatctagtggacatcatctgtagaatggggttcatgataccagcgttggagaagtgatgagaggggtcctaagcagaaagtccctggcatccttagttcctctttgacagccagcctcagctctcagacatagaggggacttggggatgccctaagcctattttttcatactctaaggaggtaactacggtaagatgaagtgggctgggcacagtggctcgcgcctgtaatcccagcactttgggaggccaaggtgggcggatcacctgaggtcaggagttcaagaccaccctggccaacatggcgaaaccctgtctctactaagcatacaaaaattcgatgggcttggtggcaggcgcctgtaatcccaggtactctggaggctgaggcaggagaatcgcttgaactcaggagggggaggttgcagtgagccaagatcgcgccatttcactccagcctgggcgacaagagcgaaactccatttcaaaaaaataaaaataaataaaataagataaagtgactgacaaagaacactcgcaaagtcagctggcgtgactgggagtagaacccccatctccatggtcccaatccaagcctcttcctcacacctgcggttagattggaatttagctcatctcaaacccctctggtactctcctccatctgccaaacatttgtcagtttcacctcctctgccagctacaaagctcctcaagggcacctgaaaaacacacaggcttggggtctgatgtcatctgtgaagcttcgggggttttgttgttattattgttgttttgtcactaattaaaacaatgaggccccatgcactaggtcatcctcttgctctcctctttctttcttacaatgagcttcttaccaaaaggatgatgggacatatttgggcttggtcctaggattcggtctggcacagtttggtttgcggccgtaatacatggatgctgcttatgaggatcaagattaataggccctggacgaggggctcttaacccaaggacctgttcaggtatggacagaaaggccagagctcctgcttctatcatattctcagggctatttgtgaccccaaaagagttcacagttatcaagaaccacagctctaggtggtgaagaacaagtagcttcacaggctttggagtcaaaccaattggaattcacatccagtccctgcagcttgctaagcagtgactttagccaagtcattgaccccataccctcagttttctcatctgtaaaatggtgataaaagtacaattaacttcacagagctgtggtgagcatcgcatgagaccttgcaggcaaagcgtttttgcagagtgcctggtgtaggacaaagactcaacaaatgagcctatgaggattttccaggcactgtgggagtgaatctaccccagcacttactctgctgttgcccagcaggaacactccttccatctcacagctaccacctccctccaaagtgggaaccttgttttattcatctttttattttcatgcaaatgggctgagaagttaatccaaagtcaggacttgctgcactttgcatttcaatatagggtctttctttcttttctatccatactccaaccagagaggcaacacccaaagcaaggatgtgataagatctgatcactgtggccaccctctgcagggactctggcctattgaacatttacacagttaatctccctatcttcctgttaatagttcaaggaaaaccaaacaaggccccttgcctaagtcagctgctcttcattcagggagatttatgtaacccaaccaaatactcaaaggaccaaaagattctcccctttcaatgccaggagacactggcactgtagacagactggcataggtgaaaagcagcacagggcagtgatggtgaaggtatttcaggttatcccttagcaggggtggcaaaggcccttccttgtacgttgtgccccatcctatttgcaaacaaaagtaggatcaggactaggcagtgggtgtacaggaagacaagtaaataatataatgggctctcaggacccagggaagtttttaagaccttgataactctggtttgaactggggaagatttacagagaatttcaaaccagtcctttgttcctagggacaagacacctctccaagtttcaccttaacttttaactctgctcttccaactaggtccctggagggtgatgagaaaagaaggtaaggttgcaagaagtgcatggatatggccgggcatggtggctcatgcctgtaatcccagcactttgggaggctgaggcgggcgaatcacctgaggccaggagttcgagaccagtgtggtcaacatggcaaaaccctgtctctactaaaaatacaaaaattagccggacgtggtggcacatgcctgtagtctcagctatttgggaggctgaggcaggaggctcactggaacctgggaggcagacattgtagtgagcggagattgcactactgcactccagtctgggcaacagagcaagaccatctcaaaacaaacaaacaaagaagtgcatagatgtaaggaaaagtctcatttaccatcagtatatacaagaatttcagaacttttctgaaaatttatgatctggagtcagaggaatctaggttaaaactcaacaatctgcccaagatcacaacctcggtgaagggcagaggcaggatacaaacaaaccccaacttgtctgatgccgaagacatttgctatttccactacaccatcttgcctgcttgtaatcattccagaaaatcattcgtctagtagatgaaaaaactgagtttgcccttgaaacttatacttcagtggtgcttggcataatgcttaaataaaatctaaaatgtatttgctcatcaatcaaaaaaatctctttggggttccaaaagagaaaacagaattatctcacaggcatataaattgcatataaatttcagtttatgcttttttttttttttttttttttgagacagagtctcactctgttgcccaggctggagtgcaatggcgcaatctcggctcactgcaacctcagcctcgcaggttgaagcaattctcctgcctcagcctccccagtagctgggattacaggtgtgcgccaccacgcctggctaatttttgtatttttagtagagacgaggttccaccgtgttggccaggctggtttcaaactcctgacctcaagtgatccacccaccttgacttcccactgtgcctggcccgctcttttcttttttgatgaaatcaggaaatcacgtctcagaaaatgtttcttgaggggtgtgtgtgtgtgtgtgtgtgtgtgtgtgtgtttaatatgactatgtgtgatgtgcattagaaaatcagcaagtaaataactgttgctatatattgtgagaaagatgggaccaggccaagaaacacaattaaaaggtggccctggccccactgctttcctggaagaacagtatctcataagcttgtgggtctcgtaggggtatggactgagctgcttagtggtaggaaaaatcactagggcagtgaaactgaagtcccagctacatttcccagctacgtaaatgttgatcctttagatctggccatttctgcagtgtcaatccacccactgagcccagccctaagagaaagactgtgattgtaagatgatacactgacaataataatatgaggtaggtattactattctctgtttaaaagaaacttaaatcacttgtccaaggtcatatgcttagtgaatgctgacaccagaattcatacccagataacctgacatctggagcctgtgttgttagccactactgtattttctatgctcactgtaaaggctg

SEQ ID NO: 192 - DNA, 4058 bp, Homo sapiens
ccctccaaagtgggaaccttgttttattcatctttttattttcatgcaaatgggctgagaagttaatccaaagtcaggacttgctgcactttgcatttcaatatagggtctttctttcttttctatccatactccaaccagagaggcaacacccaaagcaaggatgtgataagatctgatcactgtggccaccctctgcagggactctggcctattgaacatttacacagttaatctccctatcttcctgttaatagttcaaggaaaaccaaacaaggccccttgcctaagtcagctgctcttcattcagggagatttatgtaacccaaccaaatactcaaaggaccaaaagattctcccctttcaatgccaggagacactggcactgtagacagactggcataggtgaaaagcagcacagggcagtgatggtgaaggtatttcaggttatcccttagcaggggtggcaaaggcccttccttgtacgttgtgccccatcctatttgcaaacaaaagtaggatcaggactaggcagtgggtgtacaggaagacaagtaaataatataatgggctctcaggacccagggaagtttttaagaccttgataactctggtttgaactggggaagatttacagagaatttcaaaccagtcctttgttcctagggacaagacacctctccaagtttcaccttaacttttaactctgctcttccaactaggtccctggagggtgatgagaaaagaaggtaaggttgcaagaagtgcatggatatggccgggcatggtggctcatgcctgtaatcccagcactttgggaggctgaggcgggcgaatcacctgaggccaggagttcgagaccagtgtggtcaacatggcaaaaccctgtctctactaaaaatacaaaaattagccggacgtggtggcacatgcctgtagtctcagctatttgggaggctgaggcaggaggctcactggaacctgggaggcagacattgtagtgagcggagattgcactactgcactccagtctgggcaacagagcaagaccatctcaaaacaaacaaacaaagaagtgcatagatgtaaggaaaagtctcatttaccatcagtatatacaagaatttcagaacttttctgaaaatttatgatctggagtcagaggaatctaggttaaaactcaacaatctgcccaagatcacaacctcggtgaagggcagaggcaggatacaaacaaaccccaacttgtctgatgccgaagacatttgctatttccactacaccatcttgcctgcttgtaatcattccagaaaatcattcgtctagtagatgaaaaaactgagtttgcccttgaaacttatacttcagtggtgcttggcataatgcttaaataaaatctaaaatgtatttgctcatcaatcaaaaaaatctctttggggttccaaaagagaaaacagaattatctcacaggcatataaattgcatataaatttcagtttatgcttttttttttttttttttttttgagacagagtctcactctgttgcccaggctggagtgcaatggcgcaatctcggctcactgcaacctcagcctcgcaggttgaagcaattctcctgcctcagcctccccagtagctgggattacaggtgtgcgccaccacgcctggctaatttttgtatttttagtagagacgaggttccaccgtgttggccaggctggtttcaaactcctgacctcaagtgatccacccaccttgacttcccactgtgcctggcccgctcttttcttttttgatgaaatcaggaaatcacgtctcagaaaatgtttcttgaggggtgtgtgtgtgtgtgtgtgtgtgtgtgtgtgtttaatatgactatgtgtgatgtgcattagaaaatcagcaagtaaataactgttgctatatattgtgagaaagatgggaccaggccaagaaacacaattaaaaggtggccctggccccactgctttcctggaagaacagtatctcataagcttgtgggtctcgtaggggtatggactgagctgcttagtggtaggaaaaatcactagggcagtgaaactgaagtcccagctacatttcccagctacgtaaatgttgatcctttagatctggccatttctgcagtgtcaatccacccactgagcccagccctaagagaaagactgtgattgtaagatgatacactgacaataataatatgaggtaggtattactattctctgtttaaaagaaacttaaatcacttgtccaaggtcatatgcttagtgaatgctgacaccagaattcatacccagataacctgacatctggagcctgtgttgttagccactactgtattttctatgctcactgtaaaggctgttatcaaaatacatgattgacagatgatctgagttctattcaaggttgttatgagaataaaataaaataatattagtaaaactgagaagttctacacaaatgctgcttaaaattctgtgttccatgatttgcaatgtgtgattaagacatcatgcatatggaaaagactaggtgttaaggcattatcttaaatgtgcttttaatcaccactttctaaaattatcagtaaggttattctattttcatgatttaaaatgtgtaaaagagatgttgtctactgttataattacaattatcaccattcactaggactgaaaacagtctcctgagttcatgccttatcaacaaattagaagcctaggttttctgatccaaagcatgtgtgatgtttcccaaagacagcatctttggaaaagtccaatttagcccacgttaattgcctggattttccctgccattggtgagtctcaggcaacatccacagttacttacattcatgttgttcatagggtgggtagctcagccgaacagagatcaggatcaggaagataaatagaggccaggccacttccagcagcagctgacactgagtgggaaataagatagaacactgtaaatttaaaaataatatggatatccaatgccactgggatctgggaaatccacagacaacttcatttactaattaatcaacttctccagtctctcccaccactctctaagctttaacagaactgtttggagtcccaaccttttaacataccattccatatacctctgtgtcttcccttaggtaagggaagatgcttcctatcgtgctttatctggttcacttctattcattcttcaggattcatcgtggcataatttcctttactaaaatctcagcctgagctagaagccctcctcctgtgctactccagtaacccaggcacactcctcctgtagcattttcctggagctcctgaaatcatctgtttctgttgctggcttcctcagcacattgagcactctgaaagcaggcacccatctgtctgcattcccagccttagcatagtgccaggtatgtggtgactatgttgagaggagaggaccaggccaacctgctgtgctaaatacacacaacccttgctcctctaattgcacacaaagctgctccctatggggcagagaagagggctctcaaagacaatgaaaattcacacatagttccatattgacctgtgtgcactcaggactgtaaagagagagtgcaaagtccttccccatctgtccaggtctggtcatcatcttctccgatgagttaaaaagatcattgaacttctaaacaagcatgatacactggttaaaacaatgaggtttctccaaaggaaaaccctgcctcagtgagttaccaggcgataaattagcagacggacaagatggaaatcactagacacaatataattgagccagtagtgttcagacaactagttacactgcctgaagtctatcacctctcccattcctttcatttctatattccaacgttgtaatcaagataaacaccaaagagcccaaaagagtcacagggccttgtgtttcagagtaattataacttacaactgtggcttcagagtcacacagccaagataatactggtataaaatccctttttgtcttcttttt

SEQ ID NO: 193 - DNA, 4041 bp, Homo sapiens
gtcctggggatctcagcttctggttgcagctcagttgctggctgggtgacctcaagaaatcccttccctgctttgtacctcagctttctcatccgtaaaataagaggttcagactagactaccccagagccatagcccccctttcattgccaacatgatatgattcttcccactactcactaatggacacacaacatggataaaccatggcggagacaatttcccagcaagtgggccccctctaccaggataagaaggggcaggagccctggatcacactgtagcaaaggaataagagtaaggacggacatagaggactggaacaccaagacctggggataaccacgggaggcagggagaaaggcaaggaaggagtcagaaacttcaatattctcagatggagaataggcaaaataatgacaccactgaaaagcgattaggcacattgagttagagtgccagctccaaagtcagattatctggatttgaaccctacctgtgctccttgttagtggtgtggacctcagacaagttacttaacctctctgagtagcacgttccccagctacaacatgtggaaataacagtacatcgcggggccttaaaaggaataaatctagttaataatgcctaatcagttagtgcctcacacatggaagctcattctaagtgtttgcttttattttattaatataatattatctattatactttacaattattattaaaacagataggatccacagattccagtccctgttctctcactagagacctcagaattcaggttccccatttgtaacatgagaggctgaacacaatcagtttttctcaaaggaagatctgtatacatattgctgagggattatatttaagttctctaagaggattttaaacactttgttttcatttcaacagtcatctaaacaaagtctaataaacacatatggattttttaaatgcttactttaaagccaagttctggcacaagatttcaaagcccaagtttatatttgtgtttatgattgtgttggcaccagtataattgtagcaaactcatgaggatggaacaggtgccatcaaattaaggtcatacaagtagaaaaatgggtggagaattcaatcattagcacatgataatatagactggccaaactcaaaatgatcagcatgatagcatttactgccatgcaacttataatttggtttcagttgaacaacagctgcctcaccacatttaaggtattaatttgaatggtattgattttgcaattttggctgcacttaatttgtaaatatgtatgggtcatatagttgtataataacagcctataagaagtttatacctacttttacttcctaatatttaagtaacactataataaaaaaggaaatttagtgaacaaaaggatgctttgacacttttgttcttttacagacagtgcaagcattattctagtttgaggaaaactgaatgaaattctctccaaagtcccttatagccctttgaatctcagaaagatgatcattttgattacagacatgttaagctacattaagacagccaagtggggatactggcttagaatccaggaaaaaaaaataaaggcagaacaggaacaagagacttagaaactaactacagagaaatgcatcctagagatgggatctctaaggaagggtgttcagagatagagagacaaagagctgacgtctgagtttcagggagttcactctgctctacagccctcacatccctctgtggaagagttccattcacctgcgcattaaagatgatctccagattactcaaagcattattggcccatctgggaagtgaatggcttagaaccctctgcagaaataaaacaagtctcagttattatattcctccaggcctgaaggaaagaatccagattgacaccaagatacccagtattgatctctaagagtggggccactaactcacttcacccacagcttccagaaatacaggggcccattaggggcttttggagagccaggtggctcccagggctgcagcaaaaggaaaaagtggggtgctcaggggcgattcggagccaggtcctagggatcagaactcatgcctgggcagtagcacaaaccaaagctactatttctacctggctgcaaatctgccctctatgataagccacatgccatatccggaccacacagtcctgtgtccataagagccagattccatcaatccctgtgtgaaaaccaacacagcttccttccctccctccctcctccaatccccaactcaaaaccacaaagaaaaaatgagagaaccccccgctgctgaaaaacccaagcttactgtttgtcttcttctgaaagtgaggttcttccacagcagcaacctcagctgaggccaacaagccatgttccctcagccagcacccccagcgtgtggctcgggagccctggaaggcagcggccagagctcacagcagggacgccgtggctggtcattaactgaaagataaagcaggaggggaaacagccatcagttattgctgcaaagccatacaccaatgaggactgctaatccagccctctcagctgagacctccaacacacagctctgcatcatgactgcttctcaatggatcatgagtcaccagctcccagcctctgggttcacccacaaagagggactcgggaggtgttccgacagcaggctaggagctacgtgttatggtcctaatcattttagttctatagatgttatcatctgggaatgaagaatgcatttctgaaaatagacctctctcaggtggccaaaaacactgaggatggaaatggcatactggaatcccagagacctacctctcttttctaagaaaatgcctccccttacatacaaagtcagcagcatttgtaaattttgcctcaagcctggagtgacttatactattccctgaacttccttacatactaattttcagtgggttatacaactgagtccttcaaatgataaaaagcaccatcggccaggcgtggtggctcaagcctataatcccagcactttgggaggccgaggcaggcggatcacgaggtcaagaaatcgagaccatcctagccaatacggtgaaaccccgtctctactaaaaatacaaaaattagctgggcatggtggcaggcacctgtagtcccagctacttgggaggctgaggcaggagaatcgctgaacctggcaggcggaggtgcagtgagccaagattgtgccactacactccagcatggcgacagagcgagactctgtctcaaaaaaaaaaaaaaaaagcaccatcaataaagcagtttcctaatctggaaaaccacaacgtgccttagatgagtgtgagtaaacaccaagaaaatgctaccgacacctggctctcaggtaatgaggacaaccctagcgctgtgtctctggaaagaaaacagcatcccatggagaaacaagtctgctatggcaggctcagggcatcaactgtgaaaccgacaaacaagctcccatggtcagcacatatgcacacttctggccttgttccacctgcacctgaacacaccgcccccctactccgttgggtgtcacaggtgcctccttggaggactgtttgccatgctagggcaagaaggtcttctcgtgaacaagggatactacattctgtgtatcccagccacccatccagcagttacccttatttaatgctggaatagtcccaagtagttatattaaagttaaagctggggagggggcagaagatgaaaaatggaagggaggacacacaggtgaaaattcggccctgctggcacttggtagccatgaactctcctagctgtgcttatgaaatggctcagtgaatcactgtggcctctagaggagtaggggcaagggtagggtgggacactgggcatgaggaacaaggagcagaaggaactaagaatgcagtagcgaggtatggatacaaaaccaagcgctagactagaaatctgtgagtccaaatgagatctccatgccaaggtcag

SEQ ID NO: 194 - DNA, 4040 bp, Homo sapiens
atttgaaccctacctgtgctccttgttagtggtgtggacctcagacaagttacttaacctctctgagtagcacgttccccagctacaacatgtggaaataacagtacatcgcggggccttaaaaggaataaatctagttaataatgcctaatcagttagtgcctcacacatggaagctcattctaagtgtttgcttttattttattaatataatattatctattatactttacaattattattaaaacagataggatccacagattccagtccctgttctctcactagagacctcagaattcaggttccccatttgtaacatgagaggctgaacacaatcagtttttctcaaaggaagatctgtatacatattgctgagggattatatttaagttctctaagaggattttaaacactttgttttcatttcaacagtcatctaaacaaagtctaataaacacatatggattttttaaatgcttactttaaagccaagttctggcacaagatttcaaagcccaagtttatatttgtgtttatgattgtgttggcaccagtataattgtagcaaactcatgaggatggaacaggtgccatcaaattaaggtcatacaagtagaaaaatgggtggagaattcaatcattagcacatgataatatagactggccaaactcaaaatgatcagcatgatagcatttactgccatgcaacttataatttggtttcagttgaacaacagctgcctcaccacatttaaggtattaatttgaatggtattgattttgcaattttggctgcacttaatttgtaaatatgtatgggtcatatagttgtataataacagcctataagaagtttatacctacttttacttcctaatatttaagtaacactataataaaaaaggaaatttagtgaacaaaaggatgctttgacacttttgttcttttacagacagtgcaagcattattctagtttgaggaaaactgaatgaaattctctccaaagtcccttatagccctttgaatctcagaaagatgatcattttgattacagacatgttaagctacattaagacagccaagtggggatactggcttagaatccaggaaaaaaaaataaaggcagaacaggaacaagagacttagaaactaactacagagaaatgcatcctagagatgggatctctaaggaagggtgttcagagatagagagacaaagagctgacgtctgagtttcagggagttcactctgctctacagccctcacatccctctgtggaagagttccattcacctgcgcattaaagatgatctccagattactcaaagcattattggcccatctgggaagtgaatggcttagaaccctctgcagaaataaaacaagtctcagttattatattcctccaggcctgaaggaaagaatccagattgacaccaagatacccagtattgatctctaagagtggggccactaactcacttcacccacagcttccagaaatacaggggcccattaggggcttttggagagccaggtggctcccagggctgcagcaaaaggaaaaagtggggtgctcaggggcgattcggagccaggtcctagggatcagaactcatgcctgggcagtagcacaaaccaaagctactatttctacctggctgcaaatctgccctctatgataagccacatgccatatccggaccacacagtcctgtgtccataagagccagattccatcaatccctgtgtgaaaaccaacacagcttccttccctccctccctcctccaatccccaactcaaaaccacaaagaaaaaatgagagaaccccccgctgctgaaaaacccaagcttactgtttgtcttcttctgaaagtgaggttcttccacagcagcaacctcagctgaggccaacaagccatgttccctcagccagcacccccagcgtgtggctcgggagccctggaaggcagcggccagagctcacagcagggacgccgtggctggtcattaactgaaagataaagcaggaggggaaacagccatcagttattgctgcaaagccatacaccaatgaggactgctaatccagccctctcagctgagacctccaacacacagctctgcatcatgactgcttctcaatggatcatgagtcaccagctcccagcctctgggttcacccacaaagagggactcgggaggtgttccgacagcaggctaggagctacgtgttatggtcctaatcattttagttctatagatgttatcatctgggaatgaagaatgcatttctgaaaatagacctctctcaggtggccaaaaacactgaggatggaaatggcatactggaatcccagagacctacctctcttttctaagaaaatgcctccccttacatacaaagtcagcagcatttgtaaattttgcctcaagcctggagtgacttatactattccctgaacttccttacatactaattttcagtgggttatacaactgagtccttcaaatgataaaaagcaccatcggccaggcgtggtggctcaagcctataatcccagcactttgggaggccgaggcaggcggatcacgaggtcaagaaatcgagaccatcctagccaatacggtgaaaccccgtctctactaaaaatacaaaaattagctgggcatggtggcaggcacctgtagtcccagctacttgggaggctgaggcaggagaatcgctgaacctggcaggcggaggtgcagtgagccaagattgtgccactacactccagcatggcgacagagcgagactctgtctcaaaaaaaaaaaaaaaaagcaccatcaataaagcagtttcctaatctggaaaaccacaacgtgccttagatgagtgtgagtaaacaccaagaaaatgctaccgacacctggctctcaggtaatgaggacaaccctagcgctgtgtctctggaaagaaaacagcatcccatggagaaacaagtctgctatggcaggctcagggcatcaactgtgaaaccgacaaacaagctcccatggtcagcacatatgcacacttctggccttgttccacctgcacctgaacacaccgcccccctactccgttgggtgtcacaggtgcctccttggaggactgtttgccatgctagggcaagaaggtcttctcgtgaacaagggatactacattctgtgtatcccagccacccatccagcagttacccttatttaatgctggaatagtcccaagtagttatattaaagttaaagctggggagggggcagaagatgaaaaatggaagggaggacacacaggtgaaaattcggccctgctggcacttggtagccatgaactctcctagctgtgcttatgaaatggctcagtgaatcactgtggcctctagaggagtaggggcaagggtagggtgggacactgggcatgaggaacaaggagcagaaggaactaagaatgcagtagcgaggtatggatacaaaaccaagcgctagactagaaatctgtgagtccaaatgagatctccatgccaaggtcagtctctagtagaacaatacccttttatctaccacccaacaaggacttggattaaaacttctagaaaagtcaagagattggaggaaattgcagtgtctgagaagaaaagacagcctaccactatgtattccaattcattcattgacagtccaataaatcaagaaattctctgaaatagtcaagccttaggacctatttcttttccttaccatttgctcagcaaacttctagaaggacacaggcctccaaagtttcttactccaaaaagaggaagagttaaaccagcactgcatcagtttgttcaaagatgacaactggcagcacagcactggcaaccagagcagcattgtgagacacatgcttgtcatcccaaattgttttctaagtggctcaggacagagcttgcattccagagacactgaaataaataattagctagatttttctcatacagaagctgctctccaggaatcagttcgttgat

SEQ ID NO: 195 - DNA, 15 bp, Homo sapiens
ggccagagatgagct

SEQ ID NO: 196 - DNA, 15 bp, Homo sapiens
aggccagagatgagc

SEQ ID NO: 197 - DNA, 15 bp, Homo sapiens
aaggccagagatgag

SEQ ID NO: 198 - DNA, 15 bp, Homo sapiens
aaaggccagagatga

SEQ ID NO: 199 - DNA, 15 bp, Homo sapiens
gaaaggccagagatg

SEQ ID NO: 200 - DNA, 15 bp, Homo sapiens
agaaaggccagagat

SEQ ID NO: 201 - DNA, 15 bp, Homo sapiens
cagaaaggccagaga

SEQ ID NO: 202 - DNA, 15 bp, Homo sapiens
tcagaaaggccagag

SEQ ID NO: 203 - DNA, 15 bp, Homo sapiens
ctcagaaaggccaga

SEQ ID NO: 204 - DNA, 15 bp, Homo sapiens
tctcagaaaggccag

SEQ ID NO: 205 - DNA, 15 bp, Homo sapiens
atctcagaaaggcca

SEQ ID NO: 206 - DNA, 15 bp, Homo sapiens
gatctcagaaaggcc

SEQ ID NO: 207 - DNA, 15 bp, Homo sapiens
ggatctcagaaaggc

SEQ ID NO: 208 - DNA, 15 bp, Homo sapiens
tggatctcagaaagg

SEQ ID NO: 209 - DNA, 15 bp, Homo sapiens
atggatctcagaaag

SEQ ID NO: 210 - DNA, 15 bp, Homo sapiens
gatggatctcagaaa

SEQ ID NO: 211 - DNA, 15 bp, Homo sapiens
ggatggatctcagaa

SEQ ID NO: 212 - DNA, 15 bp, Homo sapiens
gggatggatctcaga

SEQ ID NO: 213 - DNA, 15 bp, Homo sapiens
agggatggatctcag

SEQ ID NO: 214 - DNA, 15 bp, Homo sapiens
aagggatggatctca

SEQ ID NO: 215 - DNA, 15 bp, Homo sapiens
aaagggatggatctc

SEQ ID NO: 216 - DNA, 15 bp, Homo sapiens
gaaagggatggatct

SEQ ID NO: 217 - DNA, 15 bp, Homo sapiens
agaaagggatggatc

SEQ ID NO: 218 - DNA, 15 bp, Homo sapiens
aagaaagggatggat

SEQ ID NO: 219 - DNA, 15 bp, Homo sapiens
aaagaaagggatgga

SEQ ID NO: 220 - DNA, 15 bp, Homo sapiens
aaaagaaagggatgg

SEQ ID NO: 221 - DNA, 15 bp, Homo sapiens
aaaaagaaagggatg

SEQ ID NO: 222 - DNA, 15 bp, Homo sapiens
taaaaagaaagggat

SEQ ID NO: 223 - DNA, 15 bp, Homo sapiens
ataaaaagaaaggga

SEQ ID NO: 224 - DNA, 15 bp, Homo sapiens
aataaaaagaaaggg

SEQ ID NO: 225 - DNA, 15 bp, Homo sapiens
aaataaaaagaaagg

SEQ ID NO: 226 - DNA, 15 bp, Homo sapiens
aaaataaaaagaaag

SEQ ID NO: 227 - DNA, 15 bp, Homo sapiens
aaaaataaaaagaaa

SEQ ID NO: 228 - DNA, 15 bp, Homo sapiens
gaaaaataaaaagaa

SEQ ID NO: 229 - DNA, 15 bp, Homo sapiens
agaaaaataaaaaga

SEQ ID NO: 230 - DNA, 15 bp, Homo sapiens
aagaaaaataaaaag

SEQ ID NO: 231 - DNA, 15 bp, Homo sapiens
caagaaaaataaaaa

SEQ ID NO: 232 - DNA, 15 bp, Homo sapiens
tcaagaaaaataaaa

SEQ ID NO: 233 - DNA, 15 bp, Homo sapiens
gtcaagaaaaataaa

SEQ ID NO: 234 - DNA, 15 bp, Homo sapiens
tgtcaagaaaaataa

SEQ ID NO: 235 - DNA, 15 bp, Homo sapiens
gtgtcaagaaaaata

SEQ ID NO: 236 - DNA, 15 bp, Homo sapiens
cgtgtcaagaaaaat

SEQ ID NO: 237 - DNA, 15 bp, Homo sapiens
ccgtgtcaagaaaaa

SEQ ID NO: 238 - DNA, 15 bp, Homo sapiens
tccgtgtcaagaaaa

SEQ ID NO: 239 - DNA, 15 bp, Homo sapiens
ctccgtgtcaagaaa

SEQ ID NO: 240 - DNA, 15 bp, Homo sapiens
actccgtgtcaagaa

SEQ ID NO: 241 - DNA, 15 bp, Homo sapiens
gactccgtgtcaaga

SEQ ID NO: 242 - DNA, 15 bp, Homo sapiens
agactccgtgtcaag

SEQ ID NO: 243 - DNA, 15 bp, Homo sapiens
aagactccgtgtcaa

SEQ ID NO: 244 - DNA, 15 bp, Homo sapiens
caagactccgtgtca

SEQ ID NO: 245 - DNA, 15 bp, Homo sapiens
gcaagactccgtgtc

SEQ ID NO: 246 - DNA, 15 bp, Homo sapiens
agcaagactccgtgt

SEQ ID NO: 247 - DNA, 15 bp, Homo sapiens
gagcaagactccgtg

SEQ ID NO: 248 - DNA, 15 bp, Homo sapiens
agagcaagactccgt

SEQ ID NO: 249 - DNA, 15 bp, Homo sapiens
cagagcaagactccg

SEQ ID NO: 250 - DNA, 15 bp, Homo sapiens
acagagcaagactcc

SEQ ID NO: 251 - DNA, 15 bp, Homo sapiens
gacagagcaagactc

SEQ ID NO: 252 - DNA, 15 bp, Homo sapiens
tgacagagcaagact

SEQ ID NO: 253 - DNA, 15 bp, Homo sapiens
gtgacagagcaagac

SEQ ID NO: 254 - DNA, 15 bp, Homo sapiens
agtgacagagcaaga

SEQ ID NO: 255 - DNA, 15 bp, Homo sapiens
gagtgacagagcaag

SEQ ID NO: 256 - DNA, 15 bp, Homo sapiens
tgagtgacagagcaa

SEQ ID NO: 257 - DNA, 15 bp, Homo sapiens
ctgagtgacagagca

SEQ ID NO: 258 - DNA, 15 bp, Homo sapiens
cctgagtgacagagc

SEQ ID NO: 259 - DNA, 15 bp, Homo sapiens
gcctgagtgacagag

SEQ ID NO: 260 - DNA, 15 bp, Homo sapiens
agcctgagtgacaga

SEQ ID NO: 261 - DNA, 15 bp, Homo sapiens
cagcctgagtgacag

SEQ ID NO: 262 - DNA, 15 bp, Homo sapiens
ccagcctgagtgaca

SEQ ID NO: 263 - DNA, 15 bp, Homo sapiens
tccagcctgagtgac

SEQ ID NO: 264 - DNA, 15 bp, Homo sapiens
ctccagcctgagtga

SEQ ID NO: 265 - DNA, 15 bp, Homo sapiens
actccagcctgagtg

SEQ ID NO: 266 - DNA, 15 bp, Homo sapiens
cactccagcctgagt

SEQ ID NO: 267 - DNA, 15 bp, Homo sapiens
gcactccagcctgag

SEQ ID NO: 268 - DNA, 15 bp, Homo sapiens
tgcactccagcctga

SEQ ID NO: 269 - DNA, 15 bp, Homo sapiens
gagatcatgccactg

SEQ ID NO: 270 - DNA, 15 bp, Homo sapiens
cgagatcatgccact

SEQ ID NO: 271 - DNA, 15 bp, Homo sapiens
tcgagatcatgccac

SEQ ID NO: 272 - DNA, 15 bp, Homo sapiens
gtcgagatcatgcca

SEQ ID NO: 273 - DNA, 15 bp, Homo sapiens
agtcgagatcatgcc

SEQ ID NO: 274 - DNA, 15 bp, Homo sapiens
gagtcgagatcatgc

SEQ ID NO: 275 - DNA, 15 bp, Homo sapiens
tgagtcgagatcatg

SEQ ID NO: 276 - DNA, 15 bp, Homo sapiens
gtgagtcgagatcat

SEQ ID NO: 277 - DNA, 15 bp, Homo sapiens
agtgagtcgagatca

SEQ ID NO: 278 - DNA, 15 bp, Homo sapiens
cagtgagtcgagatc

SEQ ID NO: 279 - DNA, 15 bp, Homo sapiens
acagtgagtcgagat

SEQ ID NO: 280 - DNA, 15 bp, Homo sapiens
tacagtgagtcgaga

SEQ ID NO: 281 - DNA, 15 bp, Homo sapiens
ttacagtgagtcgag

SEQ ID NO: 282 - DNA, 15 bp, Homo sapiens
gttacagtgagtcga

SEQ ID NO: 283 - DNA, 15 bp, Homo sapiens
ggttacagtgagtcg

SEQ ID NO: 284 - DNA, 15 bp, Homo sapiens
aggttacagtgagtc

SEQ ID NO: 285 - DNA, 15 bp, Homo sapiens
gaggttacagtgagt

SEQ ID NO: 286 - DNA, 15 bp, Homo sapiens
agaggttacagtgag

SEQ ID NO: 287 - DNA, 15 bp, Homo sapiens
cagaggttacagtga

SEQ ID NO: 288 - DNA, 15 bp, Homo sapiens
gcagaggttacagtg

SEQ ID NO: 289 - DNA, 15 bp, Homo sapiens
ggcagaggttacagt

SEQ ID NO: 290 - DNA, 15 bp, Homo sapiens
aggcagaggttacag

SEQ ID NO: 291 - DNA, 15 bp, Homo sapiens
gaggcagaggttaca

SEQ ID NO: 292 - DNA, 15 bp, Homo sapiens
gggaggcagaggtta

SEQ ID NO: 293 - DNA, 15 bp, Homo sapiens
cgggaggcagaggtt

SEQ ID NO: 294 - DNA, 15 bp, Homo sapiens
ccgggaggcagaggt

SEQ ID NO: 295 - DNA, 15 bp, Homo sapiens
cccgggaggcagagg

SEQ ID NO: 296 - DNA, 15 bp, Homo sapiens
acccgggaggcagag

SEQ ID NO: 297 - DNA, 15 bp, Homo sapiens
aacccgggaggcaga

SEQ ID NO: 298 - DNA, 15 bp, Homo sapiens
gaacccgggaggcag

SEQ ID NO: 299 - DNA, 15 bp, Homo sapiens
tgaacccgggaggca

SEQ ID NO: 300 - DNA, 15 bp, Homo sapiens
cttgaacccgggagg

SEQ ID NO: 301 - DNA, 15 bp, Homo sapiens
gcttgaacccgggag

SEQ ID NO: 302 - DNA, 15 bp, Homo sapiens
cgcttgaacccggga

SEQ ID NO: 303 - DNA, 15 bp, Homo sapiens
tcgcttgaacccggg

SEQ ID NO: 304 - DNA, 15 bp, Homo sapiens
atcgcttgaacccgg

SEQ ID NO: 305 - DNA, 15 bp, Homo sapiens
aatcgcttgaacccg

SEQ ID NO: 306 - DNA, 15 bp, Homo sapiens
gaatcgcttgaaccc

SEQ ID NO: 307 - DNA, 15 bp, Homo sapiens
agaatcgcttgaacc

SEQ ID NO: 308 - DNA, 15 bp, Homo sapiens
gagaatcgcttgaac

SEQ ID NO: 309 - DNA, 15 bp, Homo sapiens
tctcaggaggctgag

SEQ ID NO: 310 - DNA, 15 bp, Homo sapiens
atctcaggaggctga

SEQ ID NO: 311 - DNA, 15 bp, Homo sapiens
tatctcaggaggctg

SEQ ID NO: 312 - DNA, 15 bp, Homo sapiens
ttatctcaggaggct

SEQ ID NO: 313 - DNA, 15 bp, Homo sapiens
gttatctcaggaggc

SEQ ID NO: 314 - DNA, 15 bp, Homo sapiens
tgttatctcaggagg

SEQ ID NO: 315 - DNA, 15 bp, Homo sapiens
ctgttatctcaggag

SEQ ID NO: 316 - DNA, 15 bp, Homo sapiens
cctgttatctcagga

SEQ ID NO: 317 - DNA, 15 bp, Homo sapiens
gcctgttatctcagg

SEQ ID NO: 318 - DNA, 15 bp, Homo sapiens
cgcctgttatctcag

SEQ ID NO: 319 - DNA, 15 bp, Homo sapiens
gcgcctgttatctca

SEQ ID NO: 320 - DNA, 15 bp, Homo sapiens
agcgcctgttatctc

SEQ ID NO: 321 - DNA, 15 bp, Homo sapiens
gagcgcctgttatct

SEQ ID NO: 322 - DNA, 15 bp, Homo sapiens
cgagcgcctgttatc

SEQ ID NO: 323 - DNA, 15 bp, Homo sapiens
gcgagcgcctgttat

SEQ ID NO: 324 - DNA, 15 bp, Homo sapiens
ggcgagcgcctgtta

SEQ ID NO: 325 - DNA, 15 bp, Homo sapiens
tggcgagcgcctgtt

SEQ ID NO: 326 - DNA, 15 bp, Homo sapiens
gtggcgagcgcctgt

SEQ ID NO: 327 - DNA, 15 bp, Homo sapiens
ggtggcgagcgcctg

SEQ ID NO: 328 - DNA, 15 bp, Homo sapiens
tggtggcgagcgcct

SEQ ID NO: 329 - DNA, 15 bp, Homo sapiens
gtggtggcgagcgcc

SEQ ID NO: 330 - DNA, 15 bp, Homo sapiens
tgtggtggcgagcgc

SEQ ID NO: 331 - DNA, 15 bp, Homo sapiens
atgtggtggcgagcg

SEQ ID NO: 332 - DNA, 15 bp, Homo sapiens
gatgtggtggcgagc

SEQ ID NO: 333 - DNA, 15 bp, Homo sapiens
agatgtggtggcgag

SEQ ID NO: 334 - DNA, 15 bp, Homo sapiens
cagatgtggtggcga

SEQ ID NO: 335 - DNA, 15 bp, Homo sapiens
ccagatgtggtggcg

SEQ ID NO: 336 - DNA, 15 bp, Homo sapiens
gccagatgtggtggc

SEQ ID NO: 337 - DNA, 15 bp, Homo sapiens
agccagatgtggtgg

SEQ ID NO: 338 - DNA, 15 bp, Homo sapiens
tagccagatgtggtg

SEQ ID NO: 339 - DNA, 15 bp, Homo sapiens
ttagccagatgtggt

SEQ ID NO: 340 - DNA, 15 bp, Homo sapiens
attagccagatgtgg

SEQ ID NO: 341 - DNA, 15 bp, Homo sapiens
aattagccagatgtg

SEQ ID NO: 342 - DNA, 15 bp, Homo sapiens
aaattagccagatgt

SEQ ID NO: 343 - DNA, 15 bp, Homo sapiens
aaaattagccagatg

SEQ ID NO: 344 - DNA, 15 bp, Homo sapiens
aaaaattagccagat

SEQ ID NO: 345 - DNA, 15 bp, Homo sapiens
caaaaattagccaga

SEQ ID NO: 346 - DNA, 15 bp, Homo sapiens
ttactaaaaatacaa

SEQ ID NO: 347 - DNA, 15 bp, Homo sapiens
tttactaaaaataca

SEQ ID NO: 348 - DNA, 15 bp, Homo sapiens
ctttactaaaaatac

SEQ ID NO: 349 - DNA, 15 bp, Homo sapiens
tctttactaaaaata

SEQ ID NO: 350 - DNA, 15 bp, Homo sapiens
gtctttactaaaaat

SEQ ID NO: 351 - DNA, 15 bp, Homo sapiens
agtctttactaaaaa

SEQ ID NO: 352 - DNA, 15 bp, Homo sapiens
cagtctttactaaaa

SEQ ID NO: 353 - DNA, 15 bp, Homo sapiens
ccagtctttactaaa

SEQ ID NO: 354 - DNA, 15 bp, Homo sapiens
cccagtctttactaa

SEQ ID NO: 355 - DNA, 15 bp, Homo sapiens
acccagtctttacta

SEQ ID NO: 356 - DNA, 15 bp, Homo sapiens
aacccagtctttact

SEQ ID NO: 357 - DNA, 15 bp, Homo sapiens
aaacccagtctttac

SEQ ID NO: 358 - DNA, 15 bp, Homo sapiens
gaaacccagtcttta

SEQ ID NO: 359 - DNA, 15 bp, Homo sapiens
tgaaacccagtcttt

SEQ ID NO: 360 - DNA, 15 bp, Homo sapiens
atgaaacccagtctt

SEQ ID NO: 361 - DNA, 15 bp, Homo sapiens
gatgaaacccagtct

SEQ ID NO: 362 - DNA, 15 bp, Homo sapiens
tgatgaaacccagtc

SEQ ID NO: 363 - DNA, 15 bp, Homo sapiens
atgatgaaacccagt

SEQ ID NO: 364 - DNA, 15 bp, Homo sapiens
catgatgaaacccag

SEQ ID NO: 365 - DNA, 15 bp, Homo sapiens
acatgatgaaaccca

SEQ ID NO: 366 - DNA, 15 bp, Homo sapiens
acctggccaacatga

SEQ ID NO: 367 - DNA, 15 bp, Homo sapiens
aacctggccaacatg

SEQ ID NO: 368 - DNA, 15 bp, Homo sapiens
caacctggccaacat

SEQ ID NO: 369 - DNA, 15 bp, Homo sapiens
ccaacctggccaaca

SEQ ID NO: 370 - DNA, 15 bp, Homo sapiens
accaacctggccaac

SEQ ID NO: 371 - DNA, 15 bp, Homo sapiens
aaccaacctggccaa

SEQ ID NO: 372 - DNA, 15 bp, Homo sapiens
aaaccaacctggcca

SEQ ID NO: 373 - DNA, 15 bp, Homo sapiens
gaaaccaacctggcc

SEQ ID NO: 374 - DNA, 15 bp, Homo sapiens
cgaaaccaacctggc

SEQ ID NO: 375 - DNA, 15 bp, Homo sapiens
tcgaaaccaacctgg

SEQ ID NO: 376 - DNA, 15 bp, Homo sapiens
ttcgaaaccaacctg

SEQ ID NO: 377 - DNA, 15 bp, Homo sapiens
gttcgaaaccaacct

SEQ ID NO: 378 - DNA, 15 bp, Homo sapiens
agttcgaaaccaacc

SEQ ID NO: 379 - DNA, 15 bp, Homo sapiens
gagttcgaaaccaac

SEQ ID NO: 380 - DNA, 15 bp, Homo sapiens
ggagttcgaaaccaa

SEQ ID NO: 381 - DNA, 15 bp, Homo sapiens
caggtcaggagttcg

SEQ ID NO: 382 - DNA, 15 bp, Homo sapiens
tcaggtcaggagttc

SEQ ID NO: 383 - DNA, 15 bp, Homo sapiens
ctcaggtcaggagtt

SEQ ID NO: 384 - DNA, 15 bp, Homo sapiens
cctcaggtcaggagt

SEQ ID NO: 385 - DNA, 15 bp, Homo sapiens
acctcaggtcaggag

SEQ ID NO: 386 - DNA, 15 bp, Homo sapiens
cacctcaggtcagga

SEQ ID NO: 387 - DNA, 15 bp, Homo sapiens
tcacctcaggtcagg

SEQ ID NO: 388 - DNA, 15 bp, Homo sapiens
ctcacctcaggtcag

SEQ ID NO: 389 - DNA, 15 bp, Homo sapiens
gctcacctcaggtca

SEQ ID NO: 390 - DNA, 15 bp, Homo sapiens
agctcacctcaggtc

SEQ ID NO: 391 - DNA, 15 bp, Homo sapiens
cagctcacctcaggt

SEQ ID NO: 392 - DNA, 15 bp, Homo sapiens
gcagctcacctcagg

SEQ ID NO: 393 - DNA, 15 bp, Homo sapiens
ggcagctcacctcag

SEQ ID NO: 394 - DNA, 15 bp, Homo sapiens
gggcagctcacctca

SEQ ID NO: 395 - DNA, 15 bp, Homo sapiens
tgggcagctcacctc

SEQ ID NO: 396 - DNA, 15 bp, Homo sapiens
gtgggcagctcacct

SEQ ID NO: 397 - DNA, 15 bp, Homo sapiens
ggtgggcagctcacc

SEQ ID NO: 398 - DNA, 15 bp, Homo sapiens
aggtgggcagctcac

SEQ ID NO: 399 - DNA, 15 bp, Homo sapiens
aaggtgggcagctca

SEQ ID NO: 400 - DNA, 15 bp, Homo sapiens
caaggtgggcagctc

SEQ ID NO: 401 - DNA, 15 bp, Homo sapiens
ccaaggtgggcagct

SEQ ID NO: 402 - DNA, 15 bp, Homo sapiens
gccaaggtgggcagc

SEQ ID NO: 403 - DNA, 15 bp, Homo sapiens
ggccaaggtgggcag

SEQ ID NO: 404 - DNA, 15 bp, Homo sapiens
aggccaaggtgggca

SEQ ID NO: 405 - DNA, 15 bp, Homo sapiens
gaggccaaggtgggc

SEQ ID NO: 406 - DNA, 15 bp, Homo sapiens
ggaggccaaggtggg

SEQ ID NO: 407 - DNA, 15 bp, Homo sapiens
gggaggccaaggtgg

SEQ ID NO: 408 - DNA, 15 bp, Homo sapiens
tgggaggccaaggtg

SEQ ID NO: 409 - DNA, 15 bp, Homo sapiens
ttgggaggccaaggt

SEQ ID NO: 410 - DNA, 15 bp, Homo sapiens
gcagtggctcatgcc

SEQ ID NO: 411 - DNA, 15 bp, Homo sapiens
cgcagtggctcatgc

SEQ ID NO: 412 - DNA, 15 bp, Homo sapiens
gcgcagtggctcatg

SEQ ID NO: 413 - DNA, 15 bp, Homo sapiens
ggcgcagtggctcat

SEQ ID NO: 414 - DNA, 15 bp, Homo sapiens
tgggcgcagtggctc

SEQ ID NO: 415 - DNA, 15 bp, Homo sapiens
ctgggcgcagtggct

SEQ ID NO: 416 - DNA, 15 bp, Homo sapiens
gctgggcgcagtggc

SEQ ID NO: 417 - DNA, 15 bp, Homo sapiens
agctgggcgcagtgg

SEQ ID NO: 418 - DNA, 15 bp, Homo sapiens
gagctgggcgcagtg

SEQ ID NO: 419 - DNA, 15 bp, Homo sapiens
tgagctgggcgcagt

SEQ ID NO: 420 - DNA, 15 bp, Homo sapiens
ctgagctgggcgcag

SEQ ID NO: 421 - DNA, 15 bp, Homo sapiens
tctgagctgggcgca

SEQ ID NO: 422 - DNA, 15 bp, Homo sapiens
atctgagctgggcgc

SEQ ID NO: 423 - DNA, 15 bp, Homo sapiens
gatctgagctgggcg

SEQ ID NO: 424 - DNA, 15 bp, Homo sapiens
ggatctgagctgggc

SEQ ID NO: 425 - DNA, 15 bp, Homo sapiens
tggatctgagctggg

SEQ ID NO: 426 - DNA, 15 bp, Homo sapiens
atggatctgagctgg

SEQ ID NO: 427 - DNA, 15 bp, Homo sapiens
gatggatctgagctg

SEQ ID NO: 428 - DNA, 15 bp, Homo sapiens
ggatggatctgagct

SEQ ID NO: 429 - DNA, 15 bp, Homo sapiens
gggatggatctgagc

SEQ ID NO: 430 - DNA, 15 bp, Homo sapiens
agggatggatctgag

SEQ ID NO: 431 - DNA, 15 bp, Homo sapiens
aagggatggatctga

SEQ ID NO: 432 - DNA, 15 bp, Homo sapiens
aaagggatggatctg

SEQ ID NO: 433 - DNA, 15 bp, Homo sapiens
tagaaagggatggat

SEQ ID NO: 434 - DNA, 15 bp, Homo sapiens
ttagaaagggatgga

SEQ ID NO: 435 - DNA, 15 bp, Homo sapiens
cttagaaagggatgg

SEQ ID NO: 436 - DNA, 15 bp, Homo sapiens
ccttagaaagggatg

SEQ ID NO: 437 - DNA, 15 bp, Homo sapiens
cccttagaaagggat

SEQ ID NO: 438 - DNA, 15 bp, Homo sapiens
gcccttagaaaggga

SEQ ID NO: 439 - DNA, 15 bp, Homo sapiens
tgcccttagaaaggg

SEQ ID NO: 440 - DNA, 15 bp, Homo sapiens
ttgcccttagaaagg

SEQ ID NO: 441 - DNA, 15 bp, Homo sapiens
tttgcccttagaaag

SEQ ID NO: 442 - DNA, 15 bp, Homo sapiens
gtttgcccttagaaa

SEQ ID NO: 443 - DNA, 15 bp, Homo sapiens
tgtttgcccttagaa

SEQ ID NO: 444 - DNA, 15 bp, Homo sapiens
ctgtttgcccttaga

SEQ ID NO: 445 - DNA, 15 bp, Homo sapiens
actgtttgcccttag

SEQ ID NO: 446 - DNA, 15 bp, Homo sapiens
gactgtttgccctta

SEQ ID NO: 447 - DNA, 15 bp, Homo sapiens
ggactgtttgccctt

SEQ ID NO: 448 - DNA, 15 bp, Homo sapiens
tggactgtttgccct

SEQ ID NO: 449 - DNA, 15 bp, Homo sapiens
atggactgtttgccc

SEQ ID NO: 450 - DNA, 15 bp, Homo sapiens
catggactgtttgcc

SEQ ID NO: 451 - DNA, 15 bp, Homo sapiens
ccatggactgtttgc

SEQ ID NO: 452 - DNA, 15 bp, Homo sapiens
accatggactgtttg

SEQ ID NO: 453 - DNA, 15 bp, Homo sapiens
caccatggactgttt

SEQ ID NO: 454 - DNA, 15 bp, Homo sapiens
gcaccatggactgtt

SEQ ID NO: 455 - DNA, 15 bp, Homo sapiens
tgcaccatggactgt

SEQ ID NO: 456 - DNA, 15 bp, Homo sapiens
ttgcaccatggactg

SEQ ID NO: 457 - DNA, 15 bp, Homo sapiens
tttgcaccatggact

SEQ ID NO: 458 - DNA, 15 bp, Homo sapiens
ctttgcaccatggac

SEQ ID NO: 459 - DNA, 15 bp, Homo sapiens
cctttgcaccatgga

SEQ ID NO: 460 - DNA, 15 bp, Homo sapiens
ccctttgcaccatgg

SEQ ID NO: 461 - DNA, 15 bp, Homo sapiens
cccctttgcaccatg

SEQ ID NO: 462 - DNA, 15 bp, Homo sapiens
gcccctttgcaccat

SEQ ID NO: 463 - DNA, 15 bp, Homo sapiens
ggcccctttgcacca

SEQ ID NO: 464 - DNA, 15 bp, Homo sapiens
tggcccctttgcacc

SEQ ID NO: 465 - DNA, 15 bp, Homo sapiens
atggcccctttgcac

SEQ ID NO: 466 - DNA, 15 bp, Homo sapiens
catggcccctttgca

SEQ ID NO: 467 - DNA, 15 bp, Homo sapiens
gcatggcccctttgc

SEQ ID NO: 468 - DNA, 15 bp, Homo sapiens
ggcatggcccctttg

SEQ ID NO: 469 - DNA, 15 bp, Homo sapiens
tggcatggccccttt

SEQ ID NO: 470 - DNA, 15 bp, Homo sapiens
gtggcatggcccctt

SEQ ID NO: 471 - DNA, 15 bp, Homo sapiens
ggtggcatggcccct

SEQ ID NO: 472 - DNA, 15 bp, Homo sapiens
gggtggcatggcccc

SEQ ID NO: 473 - DNA, 15 bp, Homo sapiens
tgggtggcatggccc

SEQ ID NO: 474 - DNA, 15 bp, Homo sapiens
ctgggtggcatggcc

SEQ ID NO: 475 - DNA, 15 bp, Homo sapiens
tctgggtggcatggc

SEQ ID NO: 476 - DNA, 15 bp, Homo sapiens
ctctgggtggcatgg

SEQ ID NO: 477 - DNA, 15 bp, Homo sapiens
actctgggtggcatg

SEQ ID NO: 478 - DNA, 15 bp, Homo sapiens
aactctgggtggcat

SEQ ID NO: 479 - DNA, 15 bp, Homo sapiens
taactctgggtggca

SEQ ID NO: 480 - DNA, 15 bp, Homo sapiens
ataactctgggtggc

SEQ ID NO: 481 - DNA, 15 bp, Homo sapiens
cataactctgggtgg

SEQ ID NO: 482 - DNA, 15 bp, Homo sapiens
tcataactctgggtg

SEQ ID NO: 483 - DNA, 15 bp, Homo sapiens
ctcataactctgggt

SEQ ID NO: 484 - DNA, 15 bp, Homo sapiens
actcataactctggg

SEQ ID NO: 485 - DNA, 15 bp, Homo sapiens
tactcataactctgg

SEQ ID NO: 486 - DNA, 15 bp, Homo sapiens
gtactcataactctg

SEQ ID NO: 487 - DNA, 15 bp, Homo sapiens
ggtactcataactct

SEQ ID NO: 488 - DNA, 15 bp, Homo sapiens
aggtactcataactc

SEQ ID NO: 489 - DNA, 15 bp, Homo sapiens
caggtactcataact

SEQ ID NO: 490 - DNA, 15 bp, Homo sapiens
ccaggtactcataac

SEQ ID NO: 491 - DNA, 15 bp, Homo sapiens
cccaggtactcataa

SEQ ID NO: 492 - DNA, 15 bp, Homo sapiens
tcccaggtactcata

SEQ ID NO: 493 - DNA, 15 bp, Homo sapiens
gtcccaggtactcat

SEQ ID NO: 494 - DNA, 15 bp, Homo sapiens
agtcccaggtactca

SEQ ID NO: 495 - DNA, 15 bp, Homo sapiens
gagtcccaggtactc

SEQ ID NO: 496 - DNA, 15 bp, Homo sapiens
ggagtcccaggtact

SEQ ID NO: 497 - DNA, 15 bp, Homo sapiens
tggagtcccaggtac

SEQ ID NO: 498 - DNA, 15 bp, Homo sapiens
ctggagtcccaggta

SEQ ID NO: 499 - DNA, 15 bp, Homo sapiens
tctggagtcccaggt

SEQ ID NO: 500 - DNA, 15 bp, Homo sapiens
ttctggagtcccagg

SEQ ID NO: 501 - DNA, 15 bp, Homo sapiens
attctggagtcccag

SEQ ID NO: 502 - DNA, 15 bp, Homo sapiens
aattctggagtccca

SEQ ID NO: 503 - DNA, 15 bp, Homo sapiens
gaattctggagtccc

SEQ ID NO: 504 - DNA, 15 bp, Homo sapiens
ggaattctggagtcc

SEQ ID NO: 505 - DNA, 15 bp, Homo sapiens
aggaattctggagtc

SEQ ID NO: 506 - DNA, 15 bp, Homo sapiens
aaggaattctggagt

SEQ ID NO: 507 - DNA, 15 bp, Homo sapiens
caaggaattctggag

SEQ ID NO: 508 - DNA, 15 bp, Homo sapiens
gcaaggaattctgga

SEQ ID NO: 509 - DNA, 15 bp, Homo sapiens
ggcaaggaattctgg

SEQ ID NO: 510 - DNA, 15 bp, Homo sapiens
aggcaaggaattctg

SEQ ID NO: 511 - DNA, 15 bp, Homo sapiens
caggcaaggaattct

SEQ ID NO: 512 - DNA, 15 bp, Homo sapiens
ccaggcaaggaattc

SEQ ID NO: 513 - DNA, 15 bp, Homo sapiens
accaggcaaggaatt

SEQ ID NO: 514 - DNA, 15 bp, Homo sapiens
caccaggcaaggaat

SEQ ID NO: 515 - DNA, 15 bp, Homo sapiens
ccaccaggcaaggaa

SEQ ID NO: 516 - DNA, 15 bp, Homo sapiens
gccaccaggcaagga

SEQ ID NO: 517 - DNA, 15 bp, Homo sapiens
ggccaccaggcaagg

SEQ ID NO: 518 - DNA, 15 bp, Homo sapiens
aggccaccaggcaag

SEQ ID NO: 519 - DNA, 15 bp, Homo sapiens
gaggccaccaggcaa

SEQ ID NO: 520 - DNA, 15 bp, Homo sapiens
ggaggccaccaggca

SEQ ID NO: 521 - DNA, 15 bp, Homo sapiens
tggaggccaccaggc

SEQ ID NO: 522 - DNA, 15 bp, Homo sapiens
gtggaggccaccagg

SEQ ID NO: 523 - DNA, 15 bp, Homo sapiens
tgtggaggccaccag

SEQ ID NO: 524 - DNA, 15 bp, Homo sapiens
atgtggaggccacca

SEQ ID NO: 525 - DNA, 15 bp, Homo sapiens
catgtggaggccacc

SEQ ID NO: 526 - DNA, 15 bp, Homo sapiens
gcatgtggaggccac

SEQ ID NO: 527 - DNA, 15 bp, Homo sapiens
tgcatgtggaggcca

SEQ ID NO: 528 - DNA, 15 bp, Homo sapiens
gtgcatgtggaggcc

SEQ ID NO: 529 - DNA, 15 bp, Homo sapiens
agtgcatgtggaggc

SEQ ID NO: 530 - DNA, 15 bp, Homo sapiens
aagtgcatgtggagg

SEQ ID NO: 531 - DNA, 15 bp, Homo sapiens
gaagtgcatgtggag

SEQ ID NO: 532 - DNA, 15 bp, Homo sapiens
ggaagtgcatgtgga

SEQ ID NO: 533 - DNA, 15 bp, Homo sapiens
tggaagtgcatgtgg

SEQ ID NO: 534 - DNA, 15 bp, Homo sapiens
ctggaagtgcatgtg

SEQ ID NO: 535 - DNA, 15 bp, Homo sapiens
cctggaagtgcatgt

SEQ ID NO: 536 - DNA, 15 bp, Homo sapiens
ccctggaagtgcatg

SEQ ID NO: 537 - DNA, 15 bp, Homo sapiens
gccctggaagtgcat

SEQ ID NO: 538 - DNA, 15 bp, Homo sapiens
ggccctggaagtgca

SEQ ID NO: 539 - DNA, 15 bp, Homo sapiens
aggccctggaagtgc

SEQ ID NO: 540 - DNA, 15 bp, Homo sapiens
caggccctggaagtg

SEQ ID NO: 541 - DNA, 15 bp, Homo sapiens
gcaggccctggaagt

SEQ ID NO: 542 - DNA, 15 bp, Homo sapiens
agcaggccctggaag

SEQ ID NO: 543 - DNA, 15 bp, Homo sapiens
aagcaggccctggaa

SEQ ID NO: 544 - DNA, 15 bp, Homo sapiens
caagcaggccctgga

SEQ ID NO: 545 - DNA, 15 bp, Homo sapiens
ccaagcaggccctgg

SEQ ID NO: 546 - DNA, 15 bp, Homo sapiens
cccaagcaggccctg

SEQ ID NO: 547 - DNA, 15 bp, Homo sapiens
gcccaagcaggccct

SEQ ID NO: 548 - DNA, 15 bp, Homo sapiens
ggcccaagcaggccc

SEQ ID NO: 549 - DNA, 15 bp, Homo sapiens
aggcccaagcaggcc

SEQ ID NO: 550 - DNA, 15 bp, Homo sapiens
gaggcccaagcaggc

SEQ ID NO: 551 - DNA, 15 bp, Homo sapiens
agaggcccaagcagg

SEQ ID NO: 552 - DNA, 15 bp, Homo sapiens
aagaggcccaagcag

SEQ ID NO: 553 - DNA, 15 bp, Homo sapiens
gaagaggcccaagca

SEQ ID NO: 554 - DNA, 15 bp, Homo sapiens
agaagaggcccaagc

SEQ ID NO: 555 - DNA, 15 bp, Homo sapiens
tagaagaggcccaag

SEQ ID NO: 556 - DNA, 15 bp, Homo sapiens
atagaagaggcccaa

SEQ ID NO: 557 - DNA, 15 bp, Homo sapiens
catagaagaggccca

SEQ ID NO: 558 - DNA, 15 bp, Homo sapiens
ccatagaagaggccc

SEQ ID NO: 559 - DNA, 15 bp, Homo sapiens
cccatagaagaggcc

SEQ ID NO: 560 - DNA, 15 bp, Homo sapiens
acccatagaagaggc

SEQ ID NO: 561 - DNA, 15 bp, Homo sapiens
gacccatagaagagg

SEQ ID NO: 562 - DNA, 15 bp, Homo sapiens
agacccatagaagag

SEQ ID NO: 563 - DNA, 15 bp, Homo sapiens
cagacccatagaaga

SEQ ID NO: 564 - DNA, 15 bp, Homo sapiens
acagacccatagaag

SEQ ID NO: 565 - DNA, 15 bp, Homo sapiens
gacagacccatagaa

SEQ ID NO: 566 - DNA, 15 bp, Homo sapiens
ggacagacccataga

SEQ ID NO: 567 - DNA, 15 bp, Homo sapiens
aggacagacccatag

SEQ ID NO: 568 - DNA, 15 bp, Homo sapiens
caggacagacccata

SEQ ID NO: 569 - DNA, 15 bp, Homo sapiens
tcaggacagacccat

SEQ ID NO: 570 - DNA, 15 bp, Homo sapiens
ctcaggacagaccca

SEQ ID NO: 571 - DNA, 15 bp, Homo sapiens
actcaggacagaccc

SEQ ID NO: 572 - DNA, 15 bp, Homo sapiens
cactcaggacagacc

SEQ ID NO: 573 - DNA, 15 bp, Homo sapiens
acactcaggacagac

SEQ ID NO: 574 - DNA, 15 bp, Homo sapiens
aacactcaggacaga

SEQ ID NO: 575 - DNA, 15 bp, Homo sapiens
caacactcaggacag

SEQ ID NO: 576 - DNA, 15 bp, Homo sapiens
tcaacactcaggaca

SEQ ID NO: 577 - DNA, 15 bp, Homo sapiens
atcaacactcaggac

SEQ ID NO: 578 - DNA, 15 bp, Homo sapiens
tatcaacactcagga

SEQ ID NO: 579 - DNA, 15 bp, Homo sapiens
ctatcaacactcagg

SEQ ID NO: 580 - DNA, 15 bp, Homo sapiens
tctatcaacactcag

SEQ ID NO: 581 - DNA, 15 bp, Homo sapiens
ttctatcaacactca

SEQ ID NO: 582 - DNA, 15 bp, Homo sapiens
gttctatcaacactc

SEQ ID NO: 583 - DNA, 15 bp, Homo sapiens
ggttctatcaacact

SEQ ID NO: 584 - DNA, 15 bp, Homo sapiens
tggttctatcaacac

SEQ ID NO: 585 - DNA, 15 bp, Homo sapiens
gtggttctatcaaca

SEQ ID NO: 586 - DNA, 15 bp, Homo sapiens
agtggttctatcaac

SEQ ID NO: 587 - DNA, 15 bp, Homo sapiens
cagtggttctatcaa

SEQ ID NO: 588 - DNA, 15 bp, Homo sapiens
tcagtggttctatca

SEQ ID NO: 589 - DNA, 15 bp, Homo sapiens
atcagtggttctatc

SEQ ID NO: 590 - DNA, 15 bp, Homo sapiens
catcagtggttctat

SEQ ID NO: 591 - DNA, 15 bp, Homo sapiens
acatcagtggttcta

SEQ ID NO: 592 - DNA, 15 bp, Homo sapiens
cacatcagtggttct

SEQ ID NO: 593 - DNA, 15 bp, Homo sapiens
tcacatcagtggttc

SEQ ID NO: 594 - DNA, 15 bp, Homo sapiens
ctcacatcagtggtt

SEQ ID NO: 595 - DNA, 15 bp, Homo sapiens
actcacatcagtggt

SEQ ID NO: 596 - DNA, 15 bp, Homo sapiens
tactcacatcagtgg

SEQ ID NO: 597 - DNA, 15 bp, Homo sapiens
gtactcacatcagtg

SEQ ID NO: 598 - DNA, 15 bp, Homo sapiens
ggtactcacatcagt

SEQ ID NO: 599 - DNA, 15 bp, Homo sapiens
aggtactcacatcag

SEQ ID NO: 600 - DNA, 15 bp, Homo sapiens
caggtactcacatca

SEQ ID NO: 601 - DNA, 15 bp, Homo sapiens
ccaggtactcacatc

SEQ ID NO: 602 - DNA, 15 bp, Homo sapiens
cccaggtactcacat

SEQ ID NO: 603 - DNA, 15 bp, Homo sapiens
gcccaggtactcaca

SEQ ID NO: 604 - DNA, 15 bp, Homo sapiens
agcccaggtactcac

SEQ ID NO: 605 - DNA, 15 bp, Homo sapiens
aagcccaggtactca

SEQ ID NO: 606 - DNA, 15 bp, Homo sapiens
caagcccaggtactc

SEQ ID NO: 607 - DNA, 15 bp, Homo sapiens
tcaagcccaggtact

SEQ ID NO: 608 - DNA, 15 bp, Homo sapiens
ctcaagcccaggtac

SEQ ID NO: 609 - DNA, 15 bp, Homo sapiens
gctcaagcccaggta

SEQ ID NO: 610 - DNA, 15 bp, Homo sapiens
ggctcaagcccaggt

SEQ ID NO: 611 - DNA, 15 bp, Homo sapiens
cggctcaagcccagg

SEQ ID NO: 612 - DNA, 15 bp, Homo sapiens
acggctcaagcccag

SEQ ID NO: 613 - DNA, 15 bp, Homo sapiens
cacggctcaagccca

SEQ ID NO: 614 - DNA, 15 bp, Homo sapiens
ccacggctcaagccc

SEQ ID NO: 615 - DNA, 15 bp, Homo sapiens
gccacggctcaagcc

SEQ ID NO: 616 - DNA, 15 bp, Homo sapiens
ggccacggctcaagc

SEQ ID NO: 617 - DNA, 15 bp, Homo sapiens
aggccacggctcaag

SEQ ID NO: 618 - DNA, 15 bp, Homo sapiens
caggccacggctcaa

SEQ ID NO: 619 - DNA, 15 bp, Homo sapiens
ccaggccacggctca

SEQ ID NO: 620 - DNA, 15 bp, Homo sapiens
tccaggccacggctc

SEQ ID NO: 621 - DNA, 15 bp, Homo sapiens
ctccaggccacggct

SEQ ID NO: 622 - DNA, 15 bp, Homo sapiens
tctccaggccacggc

SEQ ID NO: 623 - DNA, 15 bp, Homo sapiens
atctccaggccacgg

SEQ ID NO: 624 - DNA, 15 bp, Homo sapiens
gatctccaggccacg

SEQ ID NO: 625 - DNA, 15 bp, Homo sapiens
ggatctccaggccac

SEQ ID NO: 626 - DNA, 15 bp, Homo sapiens
aggatctccaggcca

SEQ ID NO: 627 - DNA, 15 bp, Homo sapiens
caggatctccaggcc

SEQ ID NO: 628 - DNA, 15 bp, Homo sapiens
acaggatctccaggc

SEQ ID NO: 629 - DNA, 15 bp, Homo sapiens
aacaggatctccagg

SEQ ID NO: 630 - DNA, 15 bp, Homo sapiens
caacaggatctccag

SEQ ID NO: 631 - DNA, 15 bp, Homo sapiens
tcaacaggatctcca

SEQ ID NO: 632 - DNA, 15 bp, Homo sapiens
gtcaacaggatctcc

SEQ ID NO: 633 - DNA, 15 bp, Homo sapiens
agtcaacaggatctc

SEQ ID NO: 634 - DNA, 15 bp, Homo sapiens
cagtcaacaggatct

SEQ ID NO: 635 - DNA, 15 bp, Homo sapiens
acagtcaacaggatc

SEQ ID NO: 636 - DNA, 15 bp, Homo sapiens
tacagtcaacaggat

SEQ ID NO: 637 - DNA, 15 bp, Homo sapiens
ctacagtcaacagga

SEQ ID NO: 638 - DNA, 15 bp, Homo sapiens
gctacagtcaacagg

SEQ ID NO: 639 - DNA, 15 bp, Homo sapiens
tgctacagtcaacag

SEQ ID NO: 640 - DNA, 15 bp, Homo sapiens
atgctacagtcaaca

SEQ ID NO: 641 - DNA, 15 bp, Homo sapiens
catgctacagtcaac

SEQ ID NO: 642 - DNA, 15 bp, Homo sapiens
ccatgctacagtcaa

SEQ ID NO: 643 - DNA, 15 bp, Homo sapiens
tccatgctacagtca

SEQ ID NO: 644 - DNA, 15 bp, Homo sapiens
ctccatgctacagtc

SEQ ID NO: 645 - DNA, 15 bp, Homo sapiens
cctccatgctacagt

SEQ ID NO: 646 - DNA, 15 bp, Homo sapiens
ccctccatgctacag

SEQ ID NO: 647 - DNA, 15 bp, Homo sapiens
cccctccatgctaca

SEQ ID NO: 648 - DNA, 15 bp, Homo sapiens
ccccctccatgctac

SEQ ID NO: 649 - DNA, 15 bp, Homo sapiens
gccccctccatgcta

SEQ ID NO: 650 - DNA, 15 bp, Homo sapiens
agccccctccatgct

SEQ ID NO: 651 - DNA, 15 bp, Homo sapiens
aagccccctccatgc

SEQ ID NO: 652 - DNA, 15 bp, Homo sapiens
caagccccctccatg

SEQ ID NO: 653 - DNA, 15 bp, Homo sapiens
acaagccccctccat

SEQ ID NO: 654 - DNA, 15 bp, Homo sapiens
cacaagccccctcca

SEQ ID NO: 655 - DNA, 15 bp, Homo sapiens
gcacaagccccctcc

SEQ ID NO: 656 - DNA, 15 bp, Homo sapiens
tgcacaagccccctc

SEQ ID NO: 657 - DNA, 15 bp, Homo sapiens
ctgcacaagccccct

SEQ ID NO: 658 - DNA, 15 bp, Homo sapiens
gctgcacaagccccc

SEQ ID NO: 659 - DNA, 15 bp, Homo sapiens
agctgcacaagcccc

SEQ ID NO: 660 - DNA, 15 bp, Homo sapiens
cagctgcacaagccc

SEQ ID NO: 661 - DNA, 15 bp, Homo sapiens
tcagctgcacaagcc

SEQ ID NO: 662 - DNA, 15 bp, Homo sapiens
ttcagctgcacaagc

SEQ ID NO: 663 - DNA, 15 bp, Homo sapiens
attcagctgcacaag

SEQ ID NO: 664 - DNA, 15 bp, Homo sapiens
cattcagctgcacaa

SEQ ID NO: 665 - DNA, 15 bp, Homo sapiens
acattcagctgcaca

SEQ ID NO: 666 - DNA, 15 bp, Homo sapiens
gacattcagctgcac

SEQ ID NO: 667 - DNA, 15 bp, Homo sapiens
agacattcagctgca

SEQ ID NO: 668 - DNA, 15 bp, Homo sapiens
cagacattcagctgc

SEQ ID NO: 669 - DNA, 15 bp, Homo sapiens
acagacattcagctg

SEQ ID NO: 670 - DNA, 15 bp, Homo sapiens
tacagacattcagct

SEQ ID NO: 671 - DNA, 15 bp, Homo sapiens
atacagacattcagc

SEQ ID NO: 672 - DNA, 15 bp, Homo sapiens
catacagacattcag

SEQ ID NO: 673 - DNA, 15 bp, Homo sapiens
gcatacagacattca

SEQ ID NO: 674 - DNA, 15 bp, Homo sapiens
tgcatacagacattc

SEQ ID NO: 675 - DNA, 15 bp, Homo sapiens
ctgcatacagacatt

SEQ ID NO: 676 - DNA, 15 bp, Homo sapiens
cctgcatacagacat

SEQ ID NO: 677 - DNA, 15 bp, Homo sapiens
acctgcatacagaca

SEQ ID NO: 678 - DNA, 15 bp, Homo sapiens
cacctgcatacagac

SEQ ID NO: 679 - DNA, 15 bp, Homo sapiens
ccacctgcatacaga

SEQ ID NO: 680 - DNA, 15 bp, Homo sapiens
accacctgcatacag

SEQ ID NO: 681 - DNA, 15 bp, Homo sapiens
caccacctgcataca

SEQ ID NO: 682 - DNA, 15 bp, Homo sapiens
ccaccacctgcatac

SEQ ID NO: 683 - DNA, 15 bp, Homo sapiens
cccaccacctgcata

SEQ ID NO: 684 - DNA, 15 bp, Homo sapiens
tcccaccacctgcat

SEQ ID NO: 685 - DNA, 15 bp, Homo sapiens
ctcccaccacctgca

SEQ ID NO: 686 - DNA, 15 bp, Homo sapiens
actcccaccacctgc

SEQ ID NO: 687 - DNA, 15 bp, Homo sapiens
aactcccaccacctg

SEQ ID NO: 688 - DNA, 15 bp, Homo sapiens
gaactcccaccacct

SEQ ID NO: 689 - DNA, 15 bp, Homo sapiens
agaactcccaccacc

SEQ ID NO: 690 - DNA, 15 bp, Homo sapiens
cagaactcccaccac

SEQ ID NO: 691 - DNA, 15 bp, Homo sapiens
ccagaactcccacca

SEQ ID NO: 692 - DNA, 15 bp, Homo sapiens
tccagaactcccacc

SEQ ID NO: 693 - DNA, 15 bp, Homo sapiens
ttccagaactcccac

SEQ ID NO: 694 - DNA, 15 bp, Homo sapiens
attccagaactccca

SEQ ID NO: 695 - DNA, 15 bp, Homo sapiens
tattccagaactccc

SEQ ID NO: 696 - DNA, 15 bp, Homo sapiens
atattccagaactcc

SEQ ID NO: 697 - DNA, 15 bp, Homo sapiens
catattccagaactc

SEQ ID NO: 698 - DNA, 15 bp, Homo sapiens
tcatattccagaact

SEQ ID NO: 699 - DNA, 15 bp, Homo sapiens
atcatattccagaac

SEQ ID NO: 700 - DNA, 15 bp, Homo sapiens
catcatattccagaa

SEQ ID NO: 701 - DNA, 15 bp, Homo sapiens
ccatcatattccaga

SEQ ID NO: 702 - DNA, 15 bp, Homo sapiens
tccatcatattccag

SEQ ID NO: 703 - DNA, 15 bp, Homo sapiens
ctccatcatattcca

SEQ ID NO: 704 - DNA, 15 bp, Homo sapiens
gctccatcatattcc

SEQ ID NO: 705 - DNA, 15 bp, Homo sapiens
agctccatcatattc

SEQ ID NO: 706 - DNA, 15 bp, Homo sapiens
cagctccatcatatt

SEQ ID NO: 707 - DNA, 15 bp, Homo sapiens
ccagctccatcatat

SEQ ID NO: 708 - DNA, 15 bp, Homo sapiens
tccagctccatcata

SEQ ID NO: 709 - DNA, 15 bp, Homo sapiens
ctccagctccatcat

SEQ ID NO: 710 - DNA, 15 bp, Homo sapiens
cctccagctccatca

SEQ ID NO: 711 - DNA, 15 bp, Homo sapiens
acctccagctccatc

SEQ ID NO: 712 - DNA, 15 bp, Homo sapiens
cacctccagctccat

SEQ ID NO: 713 - DNA, 15 bp, Homo sapiens
ccacctccagctcca

SEQ ID NO: 714 - DNA, 15 bp, Homo sapiens
cccacctccagctcc

SEQ ID NO: 715 - DNA, 15 bp, Homo sapiens
tcccacctccagctc

SEQ ID NO: 716 - DNA, 15 bp, Homo sapiens
ttcccacctccagct

SEQ ID NO: 717 - DNA, 15 bp, Homo sapiens
cttcccacctccagc

SEQ ID NO: 718 - DNA, 15 bp, Homo sapiens
tcttcccacctccag

SEQ ID NO: 719 - DNA, 15 bp, Homo sapiens
ctcttcccacctcca

SEQ ID NO: 720 - DNA, 15 bp, Homo sapiens
tctcttcccacctcc

SEQ ID NO: 721 - DNA, 15 bp, Homo sapiens
ttctcttcccacctc

SEQ ID NO: 722 - DNA, 15 bp, Homo sapiens
cttctcttcccacct

SEQ ID NO: 723 - DNA, 15 bp, Homo sapiens
acttctcttcccacc

SEQ ID NO: 724 - DNA, 15 bp, Homo sapiens
tacttctcttcccac

SEQ ID NO: 725 - DNA, 15 bp, Homo sapiens
ctacttctcttccca

SEQ ID NO: 726 - DNA, 15 bp, Homo sapiens
cctacttctcttccc

SEQ ID NO: 727 - DNA, 15 bp, Homo sapiens
gcctacttctcttcc

SEQ ID NO: 728 - DNA, 15 bp, Homo sapiens
agcctacttctcttc

SEQ ID NO: 729 - DNA, 15 bp, Homo sapiens
aagcctacttctctt

SEQ ID NO: 730 - DNA, 15 bp, Homo sapiens
caagcctacttctct

SEQ ID NO: 731 - DNA, 15 bp, Homo sapiens
ccaagcctacttctc

SEQ ID NO: 732 - DNA, 15 bp, Homo sapiens
cccaagcctacttct

SEQ ID NO: 733 - DNA, 15 bp, Homo sapiens
ccccaagcctacttc

SEQ ID NO: 734 - DNA, 15 bp, Homo sapiens
gccccaagcctactt

SEQ ID NO: 735 - DNA, 15 bp, Homo sapiens
tgccccaagcctact

SEQ ID NO: 736 - DNA, 15 bp, Homo sapiens
ctgccccaagcctac

SEQ ID NO: 737 - DNA, 15 bp, Homo sapiens
gctgccccaagccta

SEQ ID NO: 738 - DNA, 15 bp, Homo sapiens
agctgccccaagcct

SEQ ID NO: 739 - DNA, 15 bp, Homo sapiens
gagctgccccaagcc

SEQ ID NO: 740 - DNA, 15 bp, Homo sapiens
agagctgccccaagc

SEQ ID NO: 741 - DNA, 15 bp, Homo sapiens
gagagctgccccaag

SEQ ID NO: 742 - DNA, 15 bp, Homo sapiens
agagagctgccccaa

SEQ ID NO: 743 - DNA, 15 bp, Homo sapiens
gagagagctgcccca

SEQ ID NO: 744 - DNA, 15 bp, Homo sapiens
tgagagagctgcccc

SEQ ID NO: 745 - DNA, 15 bp, Homo sapiens
atgagagagctgccc

SEQ ID NO: 746 - DNA, 15 bp, Homo sapiens
catgagagagctgcc

SEQ ID NO: 747 - DNA, 15 bp, Homo sapiens
gcatgagagagctgc

SEQ ID NO: 748 - DNA, 15 bp, Homo sapiens
ggcatgagagagctg

SEQ ID NO: 749 - DNA, 15 bp, Homo sapiens
tggcatgagagagct

SEQ ID NO: 750 - DNA, 15 bp, Homo sapiens
gtggcatgagagagc

SEQ ID NO: 751 - DNA, 15 bp, Homo sapiens
ggtggcatgagagag

SEQ ID NO: 752 - DNA, 15 bp, Homo sapiens
aggtggcatgagaga

SEQ ID NO: 753 - DNA, 15 bp, Homo sapiens
gaggtggcatgagag

SEQ ID NO: 754 - DNA, 15 bp, Homo sapiens
tgaggtggcatgaga

SEQ ID NO: 755 - DNA, 15 bp, Homo sapiens
atgaggtggcatgag

SEQ ID NO: 756 - DNA, 15 bp, Homo sapiens
aatgaggtggcatga

SEQ ID NO: 757 - DNA, 15 bp, Homo sapiens
gaatgaggtggcatg

SEQ ID NO: 758 - DNA, 15 bp, Homo sapiens
agaatgaggtggcat

SEQ ID NO: 759 - DNA, 15 bp, Homo sapiens
cagaatgaggtggca

SEQ ID NO: 760 - DNA, 15 bp, Homo sapiens
ccagaatgaggtggc

SEQ ID NO: 761 - DNA, 15 bp, Homo sapiens
gccagaatgaggtgg

SEQ ID NO: 762 - DNA, 15 bp, Homo sapiens
ggccagaatgaggtg

SEQ ID NO: 763 - DNA, 15 bp, Homo sapiens
tggccagaatgaggt

SEQ ID NO: 764 - DNA, 15 bp, Homo sapiens
ttggccagaatgagg

SEQ ID NO: 765 - DNA, 15 bp, Homo sapiens
tttggccagaatgag

SEQ ID NO: 766 - DNA, 15 bp, Homo sapiens
ttttggccagaatga

SEQ ID NO: 767 - DNA, 15 bp, Homo sapiens
gttttggccagaatg

SEQ ID NO: 768 - DNA, 15 bp, Homo sapiens
agttttggccagaat

SEQ ID NO: 769 - DNA, 15 bp, Homo sapiens
gagttttggccagaa

SEQ ID NO: 770 - DNA, 15 bp, Homo sapiens
tgagttttggccaga

SEQ ID NO: 771 - DNA, 15 bp, Homo sapiens
ctgagttttggccag

SEQ ID NO: 772 - DNA, 15 bp, Homo sapiens
cctgagttttggcca

SEQ ID NO: 773 - DNA, 15 bp, Homo sapiens
acctgagttttggcc

SEQ ID NO: 774 - DNA, 15 bp, Homo sapiens
gacctgagttttggc

SEQ ID NO: 775 - DNA, 15 bp, Homo sapiens
tgacctgagttttgg

SEQ ID NO: 776 - DNA, 15 bp, Homo sapiens
ttgacctgagttttg

SEQ ID NO: 777 - DNA, 15 bp, Homo sapiens
tttgacctgagtttt

SEQ ID NO: 778 - DNA, 15 bp, Homo sapiens
gtttgacctgagttt

SEQ ID NO: 779 - DNA, 15 bp, Homo sapiens
agtttgacctgagtt

SEQ ID NO: 780 - DNA, 15 bp, Homo sapiens
cagtttgacctgagt

SEQ ID NO: 781 - DNA, 15 bp, Homo sapiens
acagtttgacctgag

SEQ ID NO: 782 - DNA, 15 bp, Homo sapiens
cacagtttgacctga

SEQ ID NO: 783 - DNA, 15 bp, Homo sapiens
tcacagtttgacctg

SEQ ID NO: 784 - DNA, 15 bp, Homo sapiens
ttcacagtttgacct

SEQ ID NO: 785 - DNA, 15 bp, Homo sapiens
cttcacagtttgacc

SEQ ID NO: 786 - DNA, 15 bp, Homo sapiens
tcttcacagtttgac

SEQ ID NO: 787 - DNA, 15 bp, Homo sapiens
ctcttcacagtttga

SEQ ID NO: 788 - DNA, 15 bp, Homo sapiens
actcttcacagtttg

SEQ ID NO: 789 - DNA, 15 bp, Homo sapiens
gactcttcacagttt

SEQ ID NO: 790 - DNA, 15 bp, Homo sapiens
agactcttcacagtt

SEQ ID NO: 791 - DNA, 15 bp, Homo sapiens
tagactcttcacagt

SEQ ID NO: 792 - DNA, 15 bp, Homo sapiens
ttagactcttcacag

SEQ ID NO: 793 - DNA, 15 bp, Homo sapiens
tttagactcttcaca

SEQ ID NO: 794 - DNA, 15 bp, Homo sapiens
atttagactcttcac

SEQ ID NO: 795 - DNA, 15 bp, Homo sapiens
catttagactcttca

SEQ ID NO: 796 - DNA, 15 bp, Homo sapiens
acatttagactcttc

SEQ ID NO: 797 - DNA, 15 bp, Homo sapiens
cacatttagactctt

SEQ ID NO: 798 - DNA, 15 bp, Homo sapiens
tcacatttagactct

SEQ ID NO: 799 - DNA, 15 bp, Homo sapiens
ttcacatttagactc

SEQ ID NO: 800 - DNA, 15 bp, Homo sapiens
attcacatttagact

SEQ ID NO: 801 - DNA, 15 bp, Homo sapiens
gattcacatttagac

SEQ ID NO: 802 - DNA, 15 bp, Homo sapiens
agattcacatttaga

SEQ ID NO: 803 - DNA, 15 bp, Homo sapiens
cagattcacatttag

SEQ ID NO: 804 - DNA, 15 bp, Homo sapiens
gcagattcacattta

SEQ ID NO: 805 - DNA, 15 bp, Homo sapiens
ggcagattcacattt

SEQ ID NO: 806 - DNA, 15 bp, Homo sapiens
gggcagattcacatt

SEQ ID NO: 807 - DNA, 15 bp, Homo sapiens
agggcagattcacat

SEQ ID NO: 808 - DNA, 15 bp, Homo sapiens
aagggcagattcaca

SEQ ID NO: 809 - DNA, 15 bp, Homo sapiens
gaagggcagattcac

SEQ ID NO: 810 - DNA, 15 bp, Homo sapiens
tgaagggcagattca

SEQ ID NO: 811 - DNA, 15 bp, Homo sapiens
ttgaagggcagattc

SEQ ID NO: 812 - DNA, 15 bp, Homo sapiens
cttgaagggcagatt

SEQ ID NO: 813 - DNA, 15 bp, Homo sapiens
ccttgaagggcagat

SEQ ID NO: 814 - DNA, 15 bp, Homo sapiens
accttgaagggcaga

SEQ ID NO: 815 - DNA, 15 bp, Homo sapiens
caccttgaagggcag

SEQ ID NO: 816 - DNA, 15 bp, Homo sapiens
ccaccttgaagggca

SEQ ID NO: 817 - DNA, 15 bp, Homo sapiens
gccaccttgaagggc

SEQ ID NO: 818 - DNA, 15 bp, Homo sapiens
agccaccttgaaggg

SEQ ID NO: 819 - DNA, 15 bp, Homo sapiens
tagccaccttgaagg

SEQ ID NO: 820 - DNA, 15 bp, Homo sapiens
gtagccaccttgaag

SEQ ID NO: 821 - DNA, 15 bp, Homo sapiens
tgtagccaccttgaa

SEQ ID NO: 822 - DNA, 15 bp, Homo sapiens
ttgtagccaccttga

SEQ ID NO: 823 - DNA, 15 bp, Homo sapiens
tttgtagccaccttg

SEQ ID NO: 824 - DNA, 15 bp, Homo sapiens
ctttgtagccacctt

SEQ ID NO: 825 - DNA, 15 bp, Homo sapiens
cctttgtagccacct

SEQ ID NO: 826 - DNA, 15 bp, Homo sapiens
acctttgtagccacc

SEQ ID NO: 827 - DNA, 15 bp, Homo sapiens
tacctttgtagccac

SEQ ID NO: 828 - DNA, 15 bp, Homo sapiens
atacctttgtagcca

SEQ ID NO: 829 - DNA, 15 bp, Homo sapiens
gatacctttgtagcc

SEQ ID NO: 830 - DNA, 15 bp, Homo sapiens
agatacctttgtagc

SEQ ID NO: 831 - DNA, 15 bp, Homo sapiens
aagatacctttgtag

SEQ ID NO: 832 - DNA, 15 bp, Homo sapiens
aaagatacctttgta

SEQ ID NO: 833 - DNA, 15 bp, Homo sapiens
caaagatacctttgt

SEQ ID NO: 834 - DNA, 15 bp, Homo sapiens
acaaagatacctttg

SEQ ID NO: 835 - DNA, 15 bp, Homo sapiens
gacaaagataccttt

SEQ ID NO: 836 - DNA, 15 bp, Homo sapiens
tgacaaagatacctt

SEQ ID NO: 837 - DNA, 15 bp, Homo sapiens
ttgacaaagatacct

SEQ ID NO: 838 - DNA, 15 bp, Homo sapiens
cttgacaaagatacc

SEQ ID NO: 839 - DNA, 15 bp, Homo sapiens
ccttgacaaagatac

SEQ ID NO: 840 - DNA, 15 bp, Homo sapiens
accttgacaaagata

SEQ ID NO: 841 - DNA, 15 bp, Homo sapiens
taccttgacaaagat

SEQ ID NO: 842 - DNA, 15 bp, Homo sapiens
ctaccttgacaaaga

SEQ ID NO: 843 - DNA, 15 bp, Homo sapiens
cctaccttgacaaag

SEQ ID NO: 844 - DNA, 15 bp, Homo sapiens
tcctaccttgacaaa

SEQ ID NO: 845 - DNA, 15 bp, Homo sapiens
ctcctaccttgacaa

SEQ ID NO: 846 - DNA, 15 bp, Homo sapiens
tctcctaccttgaca

SEQ ID NO: 847 - DNA, 15 bp, Homo sapiens
gtctcctaccttgac

SEQ ID NO: 848 - DNA, 15 bp, Homo sapiens
ggtctcctaccttga

SEQ ID NO: 849 - DNA, 15 bp, Homo sapiens
aggtctcctaccttg

SEQ ID NO: 850 - DNA, 15 bp, Homo sapiens
aaggtctcctacctt

SEQ ID NO: 851 - DNA, 15 bp, Homo sapiens
caaggtctcctacct

SEQ ID NO: 852 - DNA, 15 bp, Homo sapiens
acaaggtctcctacc

SEQ ID NO: 853 - DNA, 15 bp, Homo sapiens
cacaaggtctcctac

SEQ ID NO: 854 - DNA, 15 bp, Homo sapiens
ccacaaggtctccta

SEQ ID NO: 855 - DNA, 15 bp, Homo sapiens
gccacaaggtctcct

SEQ ID NO: 856 - DNA, 15 bp, Homo sapiens
ggccacaaggtctcc

SEQ ID NO: 857 - DNA, 15 bp, Homo sapiens
aggccacaaggtctc

SEQ ID NO: 858 - DNA, 15 bp, Homo sapiens
gaggccacaaggtct

SEQ ID NO: 859 - DNA, 15 bp, Homo sapiens
ggaggccacaaggtc

SEQ ID NO: 860 - DNA, 15 bp, Homo sapiens
tggaggccacaaggt

SEQ ID NO: 861 - DNA, 15 bp, Homo sapiens
gtggaggccacaagg

SEQ ID NO: 862 - DNA, 15 bp, Homo sapiens
cgtggaggccacaag

SEQ ID NO: 863 - DNA, 15 bp, Homo sapiens
acgtggaggccacaa

SEQ ID NO: 864 - DNA, 15 bp, Homo sapiens
cacgtggaggccaca

SEQ ID NO: 865 - DNA, 15 bp, Homo sapiens
gcacgtggaggccac

SEQ ID NO: 866 - DNA, 15 bp, Homo sapiens
tgcacgtggaggcca

SEQ ID NO: 867 - DNA, 15 bp, Homo sapiens
gtgcacgtggaggcc

SEQ ID NO: 868 - DNA, 15 bp, Homo sapiens
agtgcacgtggaggc

SEQ ID NO: 869 - DNA, 15 bp, Homo sapiens
aagtgcacgtggagg

SEQ ID NO: 870 - DNA, 15 bp, Homo sapiens
gaagtgcacgtggag

SEQ ID NO: 871 - DNA, 15 bp, Homo sapiens
ggaagtgcacgtgga

SEQ ID NO: 872 - DNA, 15 bp, Homo sapiens
tggaagtgcacgtgg

SEQ ID NO: 873 - DNA, 15 bp, Homo sapiens
ctggaagtgcacgtg

SEQ ID NO: 874 - DNA, 15 bp, Homo sapiens
cctggaagtgcacgt

SEQ ID NO: 875 - DNA, 15 bp, Homo sapiens
ccctggaagtgcacg

SEQ ID NO: 876 - DNA, 15 bp, Homo sapiens
gccctggaagtgcac

SEQ ID NO: 877 - DNA, 15 bp, Homo sapiens
gtagaagaggcccaa

SEQ ID NO: 878 - DNA, 15 bp, Homo sapiens
cgtagaagaggccca

SEQ ID NO: 879 - DNA, 15 bp, Homo sapiens
ccgtagaagaggccc

SEQ ID NO: 880 - DNA, 15 bp, Homo sapiens
cccgtagaagaggcc

SEQ ID NO: 881 - DNA, 15 bp, Homo sapiens
acccgtagaagaggc

SEQ ID NO: 882 - DNA, 15 bp, Homo sapiens
gacccgtagaagagg

SEQ ID NO: 883 - DNA, 15 bp, Homo sapiens
agacccgtagaagag

SEQ ID NO: 884 - DNA, 15 bp, Homo sapiens
cagacccgtagaaga

SEQ ID NO: 885 - DNA, 15 bp, Homo sapiens
acagacccgtagaag

SEQ ID NO: 886 - DNA, 15 bp, Homo sapiens
gacagacccgtagaa

SEQ ID NO: 887 - DNA, 15 bp, Homo sapiens
ggacagacccgtaga

SEQ ID NO: 888 - DNA, 15 bp, Homo sapiens
aggacagacccgtag

SEQ ID NO: 889 - DNA, 15 bp, Homo sapiens
caggacagacccgta

SEQ ID NO: 890 - DNA, 15 bp, Homo sapiens
tcaggacagacccgt

SEQ ID NO: 891 - DNA, 15 bp, Homo sapiens
ctcaggacagacccg

SEQ ID NO: 892 - DNA, 15 bp, Homo sapiens
gactcaggacagacc

SEQ ID NO: 893 - DNA, 15 bp, Homo sapiens
agactcaggacagac

SEQ ID NO: 894 - DNA, 15 bp, Homo sapiens
aagactcaggacaga

SEQ ID NO: 895 - DNA, 15 bp, Homo sapiens
gaagactcaggacag

SEQ ID NO: 896 - DNA, 15 bp, Homo sapiens
agaagactcaggaca

SEQ ID NO: 897 - DNA, 15 bp, Homo sapiens
tagaagactcaggac

SEQ ID NO: 898 - DNA, 15 bp, Homo sapiens
atagaagactcagga

SEQ ID NO: 899 - DNA, 15 bp, Homo sapiens
catagaagactcagg

SEQ ID NO: 900 - DNA, 15 bp, Homo sapiens
tcatagaagactcag

SEQ ID NO: 901 - DNA, 15 bp, Homo sapiens
ttcatagaagactca

SEQ ID NO: 902 - DNA, 15 bp, Homo sapiens
attcatagaagactc

SEQ ID NO: 903 - DNA, 15 bp, Homo sapiens
gattcatagaagact

SEQ ID NO: 904 - DNA, 15 bp, Homo sapiens
agattcatagaagac

SEQ ID NO: 905 - DNA, 15 bp, Homo sapiens
cagattcatagaaga

SEQ ID NO: 906 - DNA, 15 bp, Homo sapiens
gcagattcatagaag

SEQ ID NO: 907 - DNA, 15 bp, Homo sapiens
ggcagattcatagaa

SEQ ID NO: 908 - DNA, 15 bp, Homo sapiens
gggcagattcataga

SEQ ID NO: 909 - DNA, 15 bp, Homo sapiens
agggcagattcatag

SEQ ID NO: 910 - DNA, 15 bp, Homo sapiens
aagggcagattcata

SEQ ID NO: 911 - DNA, 15 bp, Homo sapiens
gaagggcagattcat

SEQ ID NO: 912 - DNA, 15 bp, Homo sapiens
ctgaagggcagattc

SEQ ID NO: 913 - DNA, 15 bp, Homo sapiens
cctgaagggcagatt

SEQ ID NO: 914 - DNA, 15 bp, Homo sapiens
ccctgaagggcagat

SEQ ID NO: 915 - DNA, 15 bp, Homo sapiens
gccctgaagggcaga

SEQ ID NO: 916 - DNA, 15 bp, Homo sapiens
tgccctgaagggcag

SEQ ID NO: 917 - DNA, 15 bp, Homo sapiens
ctgccctgaagggca

SEQ ID NO: 918 - DNA, 15 bp, Homo sapiens
tctgccctgaagggc

SEQ ID NO: 919 - DNA, 15 bp, Homo sapiens
atctgccctgaaggg

SEQ ID NO: 920 - DNA, 15 bp, Homo sapiens
aatctgccctgaagg

SEQ ID NO: 921 - DNA, 15 bp, Homo sapiens
gaatctgccctgaag

SEQ ID NO: 922 - DNA, 15 bp, Homo sapiens
tgaatctgccctgaa

SEQ ID NO: 923 - DNA, 15 bp, Homo sapiens
atgaatctgccctga

SEQ ID NO: 924 - DNA, 15 bp, Homo sapiens
tatgaatctgccctg

SEQ ID NO: 925 - DNA, 15 bp, Homo sapiens
atatgaatctgccct

SEQ ID NO: 926 - DNA, 15 bp, Homo sapiens
aatatgaatctgccc

SEQ ID NO: 927 - DNA, 15 bp, Homo sapiens
aaatatgaatctgcc

SEQ ID NO: 928 - DNA, 15 bp, Homo sapiens
taaatatgaatctgc

SEQ ID NO: 929 - DNA, 15 bp, Homo sapiens
ctaaatatgaatctg

SEQ ID NO: 930 - DNA, 15 bp, Homo sapiens
tctaaatatgaatct

SEQ ID NO: 931 - DNA, 15 bp, Homo sapiens
gtctaaatatgaatc

SEQ ID NO: 932 - DNA, 15 bp, Homo sapiens
agtctaaatatgaat

SEQ ID NO: 933 - DNA, 15 bp, Homo sapiens
gagtctaaatatgaa

SEQ ID NO: 934 - DNA, 15 bp, Homo sapiens
agagtctaaatatga

SEQ ID NO: 935 - DNA, 15 bp, Homo sapiens
aagagtctaaatatg

SEQ ID NO: 936 - DNA, 15 bp, Homo sapiens
gaagagtctaaatat

SEQ ID NO: 937 - DNA, 15 bp, Homo sapiens
tgaagagtctaaata

SEQ ID NO: 938 - DNA, 15 bp, Homo sapiens
gtgaagagtctaaat

SEQ ID NO: 939 - DNA, 15 bp, Homo sapiens
tgtgaagagtctaaa

SEQ ID NO: 940 - DNA, 15 bp, Homo sapiens
ctgtgaagagtctaa

SEQ ID NO: 941 - DNA, 15 bp, Homo sapiens
actgtgaagagtcta

SEQ ID NO: 942 - DNA, 15 bp, Homo sapiens
aactgtgaagagtct

SEQ ID NO: 943 - DNA, 15 bp, Homo sapiens
aaactgtgaagagtc

SEQ ID NO: 944 - DNA, 15 bp, Homo sapiens
caaactgtgaagagt

SEQ ID NO: 945 - DNA, 15 bp, Homo sapiens
tcaaactgtgaagag

SEQ ID NO: 946 - DNA, 15 bp, Homo sapiens
gtcaaactgtgaaga

SEQ ID NO: 947 - DNA, 15 bp, Homo sapiens
ggtcaaactgtgaag

SEQ ID NO: 948 - DNA, 15 bp, Homo sapiens
aggtcaaactgtgaa

SEQ ID NO: 949 - DNA, 15 bp, Homo sapiens
caggtcaaactgtga

SEQ ID NO: 950 - DNA, 15 bp, Homo sapiens
tcaggtcaaactgtg

SEQ ID NO: 951 - DNA, 15 bp, Homo sapiens
ctcaggtcaaactgt

SEQ ID NO: 952 - DNA, 15 bp, Homo sapiens
actcaggtcaaactg

SEQ ID NO: 953 - DNA, 15 bp, Homo sapiens
aactcaggtcaaact

SEQ ID NO: 954 - DNA, 15 bp, Homo sapiens
aaactcaggtcaaac

SEQ ID NO: 955 - DNA, 15 bp, Homo sapiens
aaaactcaggtcaaa

SEQ ID NO: 956 - DNA, 15 bp, Homo sapiens
caaaactcaggtcaa

SEQ ID NO: 957 - DNA, 15 bp, Homo sapiens
ccaaaactcaggtca

SEQ ID NO: 958 - DNA, 15 bp, Homo sapiens
gccaaaactcaggtc

SEQ ID NO: 959 - DNA, 15 bp, Homo sapiens
ggccaaaactcaggt

SEQ ID NO: 960 - DNA, 15 bp, Homo sapiens
tggccaaaactcagg

SEQ ID NO: 961 - DNA, 15 bp, Homo sapiens
ctggccaaaactcag

SEQ ID NO: 962 - DNA, 15 bp, Homo sapiens
tctggccaaaactca

SEQ ID NO: 963 - DNA, 15 bp, Homo sapiens
ttctggccaaaactc

SEQ ID NO: 964 - DNA, 15 bp, Homo sapiens
attctggccaaaact

SEQ ID NO: 965 - DNA, 15 bp, Homo sapiens
tattctggccaaaac

SEQ ID NO: 966 - DNA, 15 bp, Homo sapiens
ttattctggccaaaa

SEQ ID NO: 967 - DNA, 15 bp, Homo sapiens
cttattctggccaaa

SEQ ID NO: 968 - DNA, 15 bp, Homo sapiens
ccttattctggccaa

SEQ ID NO: 969 - DNA, 15 bp, Homo sapiens
accttattctggcca

SEQ ID NO: 970 - DNA, 15 bp, Homo sapiens
caccttattctggcc

SEQ ID NO: 971 - DNA, 15 bp, Homo sapiens
tcaccttattctggc

SEQ ID NO: 972 - DNA, 15 bp, Homo sapiens
gtcaccttattctgg

SEQ ID NO: 973 - DNA, 15 bp, Homo sapiens
tgtcaccttattctg

SEQ ID NO: 974 - DNA, 15 bp, Homo sapiens
atgtcaccttattct

SEQ ID NO: 975 - DNA, 15 bp, Homo sapiens
aatgtcaccttattc

SEQ ID NO: 976 - DNA, 15 bp, Homo sapiens
aaatgtcaccttatt

SEQ ID NO: 977 - DNA, 15 bp, Homo sapiens
taaatgtcaccttat

SEQ ID NO: 978 - DNA, 15 bp, Homo sapiens
ctaaatgtcacctta

SEQ ID NO: 979 - DNA, 15 bp, Homo sapiens
actaaatgtcacctt

SEQ ID NO: 980 - DNA, 15 bp, Homo sapiens
aactaaatgtcacct

SEQ ID NO: 981 - DNA, 15 bp, Homo sapiens
aaactaaatgtcacc

SEQ ID NO: 982 - DNA, 15 bp, Homo sapiens
caaactaaatgtcac

SEQ ID NO: 983 - DNA, 15 bp, Homo sapiens
acaaactaaatgtca

SEQ ID NO: 984 - DNA, 15 bp, Homo sapiens
aacaaactaaatgtc

SEQ ID NO: 985 - DNA, 15 bp, Homo sapiens
caacaaactaaatgt

SEQ ID NO: 986 - DNA, 15 bp, Homo sapiens
ccaacaaactaaatg

SEQ ID NO: 987 - DNA, 15 bp, Homo sapiens
gccaacaaactaaat

SEQ ID NO: 988 - DNA, 15 bp, Homo sapiens
agccaacaaactaaa

SEQ ID NO: 989 - DNA, 15 bp, Homo sapiens
aagccaacaaactaa

SEQ ID NO: 990 - DNA, 15 bp, Homo sapiens
caagccaacaaacta

SEQ ID NO: 991 - DNA, 15 bp, Homo sapiens
tcaagccaacaaact

SEQ ID NO: 992 - DNA, 15 bp, Homo sapiens
atcaagccaacaaac

SEQ ID NO: 993 - DNA, 15 bp, Homo sapiens
catcaagccaacaaa

SEQ ID NO: 994 - DNA, 15 bp, Homo sapiens
ccatcaagccaacaa

SEQ ID NO: 995 - DNA, 15 bp, Homo sapiens
tccatcaagccaaca

SEQ ID NO: 996 - DNA, 15 bp, Homo sapiens
atccatcaagccaac

SEQ ID NO: 997 - DNA, 15 bp, Homo sapiens
catccatcaagccaa

SEQ ID NO: 998 - DNA, 15 bp, Homo sapiens
tcatccatcaagcca

SEQ ID NO: 999 - DNA, 15 bp, Homo sapiens
gtcatccatcaagcc

SEQ ID NO: 1000 - DNA, 15 bp, Homo sapiens
agtcatccatcaagc

SEQ ID NO: 1001 - DNA, 15 bp, Homo sapiens
aagtcatccatcaag

SEQ ID NO: 1002 - DNA, 15 bp, Homo sapiens
taagtcatccatcaa

SEQ ID NO: 1003 - DNA, 15 bp, Homo sapiens
ttaagtcatccatca

SEQ ID NO: 1004 - DNA, 15 bp, Homo sapiens
tttaagtcatccatc

SEQ ID NO: 1005 - DNA, 15 bp, Homo sapiens
atttaagtcatccat

SEQ ID NO: 1006 - DNA, 15 bp, Homo sapiens
tatttaagtcatcca

SEQ ID NO: 1007 - DNA, 15 bp, Homo sapiens
atatttaagtcatcc

SEQ ID NO: 1008 - DNA, 15 bp, Homo sapiens
aatatttaagtcatc

SEQ ID NO: 1009 - DNA, 15 bp, Homo sapiens
aaatatttaagtcat

SEQ ID NO: 1010 - DNA, 15 bp, Homo sapiens
taaatatttaagtca

SEQ ID NO: 1011 - DNA, 15 bp, Homo sapiens
ctaaatatttaagtc

SEQ ID NO: 1012 - DNA, 15 bp, Homo sapiens
tctaaatatttaagt

SEQ ID NO: 1013 - DNA, 15 bp, Homo sapiens
gtctaaatatttaag

SEQ ID NO: 1014 - DNA, 15 bp, Homo sapiens
tgtctaaatatttaa

SEQ ID NO: 1015 - DNA, 15 bp, Homo sapiens
atgtctaaatattta

SEQ ID NO: 1016 - DNA, 15 bp, Homo sapiens
tatgtctaaatattt

SEQ ID NO: 1017 - DNA, 15 bp, Homo sapiens
atatgtctaaatatt

SEQ ID NO: 1018 - DNA, 15 bp, Homo sapiens
catatgtctaaatat

SEQ ID NO: 1019 - DNA, 15 bp, Homo sapiens
ccatatgtctaaata

SEQ ID NO: 1020 - DNA, 15 bp, Homo sapiens
accatatgtctaaat

SEQ ID NO: 1021 - DNA, 15 bp, Homo sapiens
caccatatgtctaaa

SEQ ID NO: 1022 - DNA, 15 bp, Homo sapiens
acaccatatgtctaa

SEQ ID NO: 1023 - DNA, 15 bp, Homo sapiens
cacaccatatgtcta

SEQ ID NO: 1024 - DNA, 15 bp, Homo sapiens
acacaccatatgtct

SEQ ID NO: 1025 - DNA, 15 bp, Homo sapiens
tacacaccatatgtc

SEQ ID NO: 1026 - DNA, 15 bp, Homo sapiens
ctacacaccatatgt

SEQ ID NO: 1027 - DNA, 15 bp, Homo sapiens
cctacacaccatatg

SEQ ID NO: 1028 - DNA, 15 bp, Homo sapiens
gcctacacaccatat

SEQ ID NO: 1029 - DNA, 15 bp, Homo sapiens
ggcctacacaccata

SEQ ID NO: 1030 - DNA, 15 bp, Homo sapiens
aggcctacacaccat

SEQ ID NO: 1031 - DNA, 15 bp, Homo sapiens
caggcctacacacca

SEQ ID NO: 1032 - DNA, 15 bp, Homo sapiens
gcaggcctacacacc

SEQ ID NO: 1033 - DNA, 15 bp, Homo sapiens
tgcaggcctacacac

SEQ ID NO: 1034 - DNA, 15 bp, Homo sapiens
atgcaggcctacaca

SEQ ID NO: 1035 - DNA, 15 bp, Homo sapiens
aatgcaggcctacac

SEQ ID NO: 1036 - DNA, 15 bp, Homo sapiens
gaatgcaggcctaca

SEQ ID NO: 1037 - DNA, 15 bp, Homo sapiens
ggaatgcaggcctac

SEQ ID NO: 1038 - DNA, 15 bp, Homo sapiens
aggaatgcaggccta

SEQ ID NO: 1039 - DNA, 15 bp, Homo sapiens
taggaatgcaggcct

SEQ ID NO: 1040 - DNA, 15 bp, Homo sapiens
gtaggaatgcaggcc

SEQ ID NO: 1041 - DNA, 15 bp, Homo sapiens
agtaggaatgcaggc

SEQ ID NO: 1042 - DNA, 15 bp, Homo sapiens
gagtaggaatgcagg

SEQ ID NO: 1043 - DNA, 15 bp, Homo sapiens
agagtaggaatgcag

SEQ ID NO: 1044 - DNA, 15 bp, Homo sapiens
aagagtaggaatgca

SEQ ID NO: 1045 - DNA, 15 bp, Homo sapiens
caagagtaggaatgc

SEQ ID NO: 1046 - DNA, 15 bp, Homo sapiens
gcaagagtaggaatg

SEQ ID NO: 1047 - DNA, 15 bp, Homo sapiens
ggcaagagtaggaat

SEQ ID NO: 1048 - DNA, 15 bp, Homo sapiens
aggcaagagtaggaa

SEQ ID NO: 1049 - DNA, 15 bp, Homo sapiens
aaggcaagagtagga

SEQ ID NO: 1050 - DNA, 15 bp, Homo sapiens
aaaggcaagagtagg

SEQ ID NO: 1051 - DNA, 15 bp, Homo sapiens
aaaaggcaagagtag

SEQ ID NO: 1052 - DNA, 15 bp, Homo sapiens
aaaaaggcaagagta

SEQ ID NO: 1053 - DNA, 15 bp, Homo sapiens
aaaaaaggcaagagt

SEQ ID NO: 1054 - DNA, 15 bp, Homo sapiens
aaaaaaaggcaagag

SEQ ID NO: 1055 - DNA, 15 bp, Homo sapiens
aaaaaaaaggcaaga

SEQ ID NO: 1056 - DNA, 15 bp, Homo sapiens
aaaaaaaaaggcaag

SEQ ID NO: 1057 - DNA, 15 bp, Homo sapiens
caaaaaaaaaggcaa

SEQ ID NO: 1058 - DNA, 15 bp, Homo sapiens
gcaaaaaaaaaggca

SEQ ID NO: 1059 - DNA, 15 bp, Homo sapiens
ggcaaaaaaaaaggc

SEQ ID NO: 1060 - DNA, 15 bp, Homo sapiens
gggcaaaaaaaaagg

SEQ ID NO: 1061 - DNA, 15 bp, Homo sapiens
ggggcaaaaaaaaag

SEQ ID NO: 1062 - DNA, 15 bp, Homo sapiens
aggggcaaaaaaaaa

SEQ ID NO: 1063 - DNA, 15 bp, Homo sapiens
gaggggcaaaaaaaa

SEQ ID NO: 1064 - DNA, 15 bp, Homo sapiens
ggaggggcaaaaaaa

SEQ ID NO: 1065 - DNA, 15 bp, Homo sapiens
tggaggggcaaaaaa

SEQ ID NO: 1066 - DNA, 15 bp, Homo sapiens
ctggaggggcaaaaa

SEQ ID NO: 1067 - DNA, 15 bp, Homo sapiens
actggaggggcaaaa

SEQ ID NO: 1068 - DNA, 15 bp, Homo sapiens
cactggaggggcaaa

SEQ ID NO: 1069 - DNA, 15 bp, Homo sapiens
acactggaggggcaa

SEQ ID NO: 1070 - DNA, 15 bp, Homo sapiens
aacactggaggggca

SEQ ID NO: 1071 - DNA, 15 bp, Homo sapiens
aaacactggaggggc

SEQ ID NO: 1072 - DNA, 15 bp, Homo sapiens
aaaacactggagggg

SEQ ID NO: 1073 - DNA, 15 bp, Homo sapiens
caaaacactggaggg

SEQ ID NO: 1074 - DNA, 15 bp, Homo sapiens
ccaaaacactggagg

SEQ ID NO: 1075 - DNA, 15 bp, Homo sapiens
cccaaaacactggag

SEQ ID NO: 1076 - DNA, 15 bp, Homo sapiens
acccaaaacactgga

SEQ ID NO: 1077 - DNA, 15 bp, Homo sapiens
tacccaaaacactgg

SEQ ID NO: 1078 - DNA, 15 bp, Homo sapiens
ctacccaaaacactg

SEQ ID NO: 1079 - DNA, 15 bp, Homo sapiens
actacccaaaacact

SEQ ID NO: 1080 - DNA, 15 bp, Homo sapiens
aactacccaaaacac

SEQ ID NO: 1081 - DNA, 15 bp, Homo sapiens
aaactacccaaaaca

SEQ ID NO: 1082 - DNA, 15 bp, Homo sapiens
aaaactacccaaaac

SEQ ID NO: 1083 - DNA, 15 bp, Homo sapiens
caaaactacccaaaa

SEQ ID NO: 1084 - DNA, 15 bp, Homo sapiens
gcaaaactacccaaa

SEQ ID NO: 1085 - DNA, 15 bp, Homo sapiens
agcaaaactacccaa

SEQ ID NO: 1086 - DNA, 15 bp, Homo sapiens
gagcaaaactaccca

SEQ ID NO: 1087 - DNA, 15 bp, Homo sapiens
ggagcaaaactaccc

SEQ ID NO: 1088 - DNA, 15 bp, Homo sapiens
gggagcaaaactacc

SEQ ID NO: 1089 - DNA, 15 bp, Homo sapiens
ggggagcaaaactac

SEQ ID NO: 1090 - DNA, 15 bp, Homo sapiens
aggggagcaaaacta

SEQ ID NO: 1091 - DNA, 15 bp, Homo sapiens
taggggagcaaaact

SEQ ID NO: 1092 - DNA, 15 bp, Homo sapiens
gtaggggagcaaaac

SEQ ID NO: 1093 - DNA, 15 bp, Homo sapiens
tgtaggggagcaaaa

SEQ ID NO: 1094 - DNA, 15 bp, Homo sapiens
ctgtaggggagcaaa

SEQ ID NO: 1095 - DNA, 15 bp, Homo sapiens
gctgtaggggagcaa

SEQ ID NO: 1096 - DNA, 15 bp, Homo sapiens
ggctgtaggggagca

SEQ ID NO: 1097 - DNA, 15 bp, Homo sapiens
tggctgtaggggagc

SEQ ID NO: 1098 - DNA, 15 bp, Homo sapiens
ttggctgtaggggag

SEQ ID NO: 1099 - DNA, 15 bp, Homo sapiens
tttggctgtagggga

SEQ ID NO: 1100 - DNA, 15 bp, Homo sapiens
ctttggctgtagggg

SEQ ID NO: 1101 - DNA, 15 bp, Homo sapiens
cctttggctgtaggg

SEQ ID NO: 1102 - DNA, 15 bp, Homo sapiens
gcctttggctgtagg

SEQ ID NO: 1103 - DNA, 15 bp, Homo sapiens
tgcctttggctgtag

SEQ ID NO: 1104 - DNA, 15 bp, Homo sapiens
ttgcctttggctgta

SEQ ID NO: 1105 - DNA, 15 bp, Homo sapiens
tttgcctttggctgt

SEQ ID NO: 1106 - DNA, 15 bp, Homo sapiens
gtttgcctttggctg

SEQ ID NO: 1107 - DNA, 15 bp, Homo sapiens
tgtttgcctttggct

SEQ ID NO: 1108 - DNA, 15 bp, Homo sapiens
ctgtttgcctttggc

SEQ ID NO: 1109 - DNA, 15 bp, Homo sapiens
tctgtttgcctttgg

SEQ ID NO: 1110 - DNA, 15 bp, Homo sapiens
atctgtttgcctttg

SEQ ID NO: 1111 - DNA, 15 bp, Homo sapiens
tatctgtttgccttt

SEQ ID NO: 1112 - DNA, 15 bp, Homo sapiens
ttatctgtttgcctt

SEQ ID NO: 1113 - DNA, 15 bp, Homo sapiens
cttatctgtttgcct

SEQ ID NO: 1114 - DNA, 15 bp, Homo sapiens
acttatctgtttgcc

SEQ ID NO: 1115 - DNA, 15 bp, Homo sapiens
aacttatctgtttgc

SEQ ID NO: 1116 - DNA, 15 bp, Homo sapiens
caacttatctgtttg

SEQ ID NO: 1117 - DNA, 15 bp, Homo sapiens
ccaacttatctgttt

SEQ ID NO: 1118 - DNA, 15 bp, Homo sapiens
tccaacttatctgtt

SEQ ID NO: 1119 - DNA, 15 bp, Homo sapiens
ctccaacttatctgt

SEQ ID NO: 1120 - DNA, 15 bp, Homo sapiens
cctccaacttatctg

SEQ ID NO: 1121 - DNA, 15 bp, Homo sapiens
acctccaacttatct

SEQ ID NO: 1122 - DNA, 15 bp, Homo sapiens
gacctccaacttatc

SEQ ID NO: 1123 - DNA, 15 bp, Homo sapiens
agacctccaacttat

SEQ ID NO: 1124 - DNA, 15 bp, Homo sapiens
cagacctccaactta

SEQ ID NO: 1125 - DNA, 15 bp, Homo sapiens
ccagacctccaactt

SEQ ID NO: 1126 - DNA, 15 bp, Homo sapiens
tccagacctccaact

SEQ ID NO: 1127 - DNA, 15 bp, Homo sapiens
ctccagacctccaac

SEQ ID NO: 1128 - DNA, 15 bp, Homo sapiens
actccagacctccaa

SEQ ID NO: 1129 - DNA, 15 bp, Homo sapiens
cactccagacctcca

SEQ ID NO: 1130 - DNA, 15 bp, Homo sapiens
ccactccagacctcc

SEQ ID NO: 1131 - DNA, 15 bp, Homo sapiens
gccactccagacctc

SEQ ID NO: 1132 - DNA, 15 bp, Homo sapiens
agccactccagacct

SEQ ID NO: 1133 - DNA, 15 bp, Homo sapiens
tagccactccagacc

SEQ ID NO: 1134 - DNA, 15 bp, Homo sapiens
gtagccactccagac

SEQ ID NO: 1135 - DNA, 15 bp, Homo sapiens
tgtagccactccaga

SEQ ID NO: 1136 - DNA, 15 bp, Homo sapiens
atgtagccactccag

SEQ ID NO: 1137 - DNA, 15 bp, Homo sapiens
tatgtagccactcca

SEQ ID NO: 1138 - DNA, 15 bp, Homo sapiens
ttatgtagccactcc

SEQ ID NO: 1139 - DNA, 15 bp, Homo sapiens
attatgtagccactc

SEQ ID NO: 1140 - DNA, 15 bp, Homo sapiens
aattatgtagccact

SEQ ID NO: 1141 - DNA, 15 bp, Homo sapiens
aaattatgtagccac

SEQ ID NO: 1142 - DNA, 15 bp, Homo sapiens
aaaattatgtagcca

SEQ ID NO: 1143 - DNA, 15 bp, Homo sapiens
taaaattatgtagcc

SEQ ID NO: 1144 - DNA, 15 bp, Homo sapiens
gtaaaattatgtagc

SEQ ID NO: 1145 - DNA, 15 bp, Homo sapiens
tgtaaaattatgtag

SEQ ID NO: 1146 - DNA, 15 bp, Homo sapiens
gtgtaaaattatgta

SEQ ID NO: 1147 - DNA, 15 bp, Homo sapiens
cgtgtaaaattatgt

SEQ ID NO: 1148 - DNA, 15 bp, Homo sapiens
tcgtgtaaaattatg

SEQ ID NO: 1149 - DNA, 15 bp, Homo sapiens
gtcgtgtaaaattat

SEQ ID NO: 1150 - DNA, 15 bp, Homo sapiens
agtcgtgtaaaatta

SEQ ID NO: 1151 - DNA, 15 bp, Homo sapiens
cagtcgtgtaaaatt

SEQ ID NO: 1152 - DNA, 15 bp, Homo sapiens
gcagtcgtgtaaaat

SEQ ID NO: 1153 - DNA, 15 bp, Homo sapiens
tgcagtcgtgtaaaa

SEQ ID NO: 1154 - DNA, 15 bp, Homo sapiens
ttgcagtcgtgtaaa

SEQ ID NO: 1155 - DNA, 15 bp, Homo sapiens
attgcagtcgtgtaa

SEQ ID NO: 1156 - DNA, 15 bp, Homo sapiens
aattgcagtcgtgta

SEQ ID NO: 1157 - DNA, 15 bp, Homo sapiens
gaattgcagtcgtgt

SEQ ID NO: 1158 - DNA, 15 bp, Homo sapiens
agaattgcagtcgtg

SEQ ID NO: 1159 - DNA, 15 bp, Homo sapiens
gagaattgcagtcgt

SEQ ID NO: 1160 - DNA, 15 bp, Homo sapiens
agagaattgcagtcg

SEQ ID NO: 1161 - DNA, 15 bp, Homo sapiens
cagagaattgcagtc

SEQ ID NO: 1162 - DNA, 15 bp, Homo sapiens
ccagagaattgcagt

SEQ ID NO: 1163 - DNA, 15 bp, Homo sapiens
gccagagaattgcag

SEQ ID NO: 1164 - DNA, 15 bp, Homo sapiens
agccagagaattgca

SEQ ID NO: 1165 - DNA, 15 bp, Homo sapiens
cagccagagaattgc

SEQ ID NO: 1166 - DNA, 15 bp, Homo sapiens
gcagccagagaattg

SEQ ID NO: 1167 - DNA, 15 bp, Homo sapiens
tgcagccagagaatt

SEQ ID NO: 1168 - DNA, 15 bp, Homo sapiens
gtgcagccagagaat

SEQ ID NO: 1169 - DNA, 15 bp, Homo sapiens
agtgcagccagagaa

SEQ ID NO: 1170 - DNA, 15 bp, Homo sapiens
aagtgcagccagaga

SEQ ID NO: 1171 - DNA, 15 bp, Homo sapiens
gaagtgcagccagag

SEQ ID NO: 1172 - DNA, 15 bp, Homo sapiens
tgaagtgcagccaga

SEQ ID NO: 1173 - DNA, 15 bp, Homo sapiens
gtgaagtgcagccag

SEQ ID NO: 1174 - DNA, 15 bp, Homo sapiens
tgtgaagtgcagcca

SEQ ID NO: 1175 - DNA, 15 bp, Homo sapiens
ttgtgaagtgcagcc

SEQ ID NO: 1176 - DNA, 15 bp, Homo sapiens
tttgtgaagtgcagc

SEQ ID NO: 1177 - DNA, 15 bp, Homo sapiens
atttgtgaagtgcag

SEQ ID NO: 1178 - DNA, 15 bp, Homo sapiens
catttgtgaagtgca

SEQ ID NO: 1179 - DNA, 15 bp, Homo sapiens
acatttgtgaagtgc

SEQ ID NO: 1180 - DNA, 15 bp, Homo sapiens
tacatttgtgaagtg

SEQ ID NO: 1181 - DNA, 15 bp, Homo sapiens
atacatttgtgaagt

SEQ ID NO: 1182 - DNA, 15 bp, Homo sapiens
tatacatttgtgaag

SEQ ID NO: 1183 - DNA, 15 bp, Homo sapiens
gtatacatttgtgaa

SEQ ID NO: 1184 - DNA, 15 bp, Homo sapiens
tgtatacatttgtga

SEQ ID NO: 1185 - DNA, 15 bp, Homo sapiens
ttgtatacatttgtg

SEQ ID NO: 1186 - DNA, 15 bp, Homo sapiens
tttgtatacatttgt

SEQ ID NO: 1187 - DNA, 15 bp, Homo sapiens
gtttgtatacatttg

SEQ ID NO: 1188 - DNA, 15 bp, Homo sapiens
agtttgtatacattt

SEQ ID NO: 1189 - DNA, 15 bp, Homo sapiens
tagtttgtatacatt

SEQ ID NO: 1190 - DNA, 15 bp, Homo sapiens
ttagtttgtatacat

SEQ ID NO: 1191 - DNA, 15 bp, Homo sapiens
tttagtttgtataca

SEQ ID NO: 1192 - DNA, 15 bp, Homo sapiens
atttagtttgtatac

SEQ ID NO: 1193 - DNA, 15 bp, Homo sapiens
tatttagtttgtata

SEQ ID NO: 1194 - DNA, 15 bp, Homo sapiens
gtatttagtttgtat

SEQ ID NO: 1195 - DNA, 15 bp, Homo sapiens
tgtatttagtttgta

SEQ ID NO: 1196 - DNA, 15 bp, Homo sapiens
ttgtatttagtttgt

SEQ ID NO: 1197 - DNA, 15 bp, Homo sapiens
cttgtatttagtttg

SEQ ID NO: 1198 - DNA, 15 bp, Homo sapiens
acttgtatttagttt

SEQ ID NO: 1199 - DNA, 15 bp, Homo sapiens
gacttgtatttagtt

SEQ ID NO: 1200 - DNA, 15 bp, Homo sapiens
ggacttgtatttagt

SEQ ID NO: 1201 - DNA, 15 bp, Homo sapiens
aggacttgtatttag

SEQ ID NO: 1202 - DNA, 15 bp, Homo sapiens
caggacttgtattta

SEQ ID NO: 1203 - DNA, 15 bp, Homo sapiens
acaggacttgtattt

SEQ ID NO: 1204 - DNA, 15 bp, Homo sapiens
cacaggacttgtatt

SEQ ID NO: 1205 - DNA, 15 bp, Homo sapiens
acacaggacttgtat

SEQ ID NO: 1206 - DNA, 15 bp, Homo sapiens
aacacaggacttgta

SEQ ID NO: 1207 - DNA, 15 bp, Homo sapiens
aaacacaggacttgt

SEQ ID NO: 1208 - DNA, 15 bp, Homo sapiens
aaaacacaggacttg

SEQ ID NO: 1209 - DNA, 15 bp, Homo sapiens
aaaaacacaggactt

SEQ ID NO: 1210 - DNA, 15 bp, Homo sapiens
taaaaacacaggact

SEQ ID NO: 1211 - DNA, 15 bp, Homo sapiens
ataaaaacacaggac

SEQ ID NO: 1212 - DNA, 15 bp, Homo sapiens
gataaaaacacagga

SEQ ID NO: 1213 - DNA, 15 bp, Homo sapiens
tgataaaaacacagg

SEQ ID NO: 1214 - DNA, 15 bp, Homo sapiens
gtgataaaaacacag

SEQ ID NO: 1215 - DNA, 15 bp, Homo sapiens
tgtgataaaaacaca

SEQ ID NO: 1216 - DNA, 15 bp, Homo sapiens
ctgtgataaaaacac

SEQ ID NO: 1217 - DNA, 15 bp, Homo sapiens
cctgtgataaaaaca

SEQ ID NO: 1218 - DNA, 15 bp, Homo sapiens
ccctgtgataaaaac

SEQ ID NO: 1219 - DNA, 15 bp, Homo sapiens
tccctgtgataaaaa

SEQ ID NO: 1220 - DNA, 15 bp, Homo sapiens
ctccctgtgataaaa

SEQ ID NO: 1221 - DNA, 15 bp, Homo sapiens
cctccctgtgataaa

SEQ ID NO: 1222 - DNA, 15 bp, Homo sapiens
gcctccctgtgataa

SEQ ID NO: 1223 - DNA, 15 bp, Homo sapiens
agcctccctgtgata

SEQ ID NO: 1224 - DNA, 15 bp, Homo sapiens
cagcctccctgtgat

SEQ ID NO: 1225 - DNA, 15 bp, Homo sapiens
tcagcctccctgtga

SEQ ID NO: 1226 - DNA, 15 bp, Homo sapiens
atcagcctccctgtg

SEQ ID NO: 1227 - DNA, 15 bp, Homo sapiens
gatcagcctccctgt

SEQ ID NO: 1228 - DNA, 15 bp, Homo sapiens
tgatcagcctccctg

SEQ ID NO: 1229 - DNA, 15 bp, Homo sapiens
ttgatcagcctccct

SEQ ID NO: 1230 - DNA, 15 bp, Homo sapiens
attgatcagcctccc

SEQ ID NO: 1231 - DNA, 15 bp, Homo sapiens
tattgatcagcctcc

SEQ ID NO: 1232 - DNA, 15 bp, Homo sapiens
atattgatcagcctc

SEQ ID NO: 1233 - DNA, 15 bp, Homo sapiens
tatattgatcagcct

SEQ ID NO: 1234 - DNA, 15 bp, Homo sapiens
ttatattgatcagcc

SEQ ID NO: 1235 - DNA, 15 bp, Homo sapiens
attatattgatcagc

SEQ ID NO: 1236 - DNA, 15 bp, Homo sapiens
cattatattgatcag

SEQ ID NO: 1237 - DNA, 15 bp, Homo sapiens
tcattatattgatca

SEQ ID NO: 1238 - DNA, 15 bp, Homo sapiens
ttcattatattgatc

SEQ ID NO: 1239 - DNA, 15 bp, Homo sapiens
tttcattatattgat

SEQ ID NO: 1240 - DNA, 15 bp, Homo sapiens
atttcattatattga

SEQ ID NO: 1241 - DNA, 15 bp, Homo sapiens
aatttcattatattg

SEQ ID NO: 1242 - DNA, 15 bp, Homo sapiens
taatttcattatatt

SEQ ID NO: 1243 - DNA, 15 bp, Homo sapiens
ttaatttcattatat

SEQ ID NO: 1244 - DNA, 15 bp, Homo sapiens
tttaatttcattata

SEQ ID NO: 1245 - DNA, 15 bp, Homo sapiens
ttttaatttcattat

SEQ ID NO: 1246 - DNA, 15 bp, Homo sapiens
cttttaatttcatta

SEQ ID NO: 1247 - DNA, 15 bp, Homo sapiens
ccttttaatttcatt

SEQ ID NO: 1248 - DNA, 15 bp, Homo sapiens
cccttttaatttcat

SEQ ID NO: 1249 - DNA, 15 bp, Homo sapiens
ccccttttaatttca

SEQ ID NO: 1250 - DNA, 15 bp, Homo sapiens
cccccttttaatttc

SEQ ID NO: 1251 - DNA, 15 bp, Homo sapiens
gcccccttttaattt

SEQ ID NO: 1252 - DNA, 15 bp, Homo sapiens
agcccccttttaatt

SEQ ID NO: 1253 - DNA, 15 bp, Homo sapiens
cagcccccttttaat

SEQ ID NO: 1254 - DNA, 15 bp, Homo sapiens
ccagcccccttttaa

SEQ ID NO: 1255 - DNA, 15 bp, Homo sapiens
accagccccctttta

SEQ ID NO: 1256 - DNA, 15 bp, Homo sapiens
gaccagccccctttt

SEQ ID NO: 1257 - DNA, 15 bp, Homo sapiens
ggaccagcccccttt

SEQ ID NO: 1258 - DNA, 15 bp, Homo sapiens
tggaccagccccctt

SEQ ID NO: 1259 - DNA, 15 bp, Homo sapiens
atggaccagccccct

SEQ ID NO: 1260 - DNA, 15 bp, Homo sapiens
tatggaccagccccc

SEQ ID NO: 1261 - DNA, 15 bp, Homo sapiens
atatggaccagcccc

SEQ ID NO: 1262 - DNA, 15 bp, Homo sapiens
aatatggaccagccc

SEQ ID NO: 1263 - DNA, 15 bp, Homo sapiens
caatatggaccagcc

SEQ ID NO: 1264 - DNA, 15 bp, Homo sapiens
acaatatggaccagc

SEQ ID NO: 1265 - DNA, 15 bp, Homo sapiens
aacaatatggaccag

SEQ ID NO: 1266 - DNA, 15 bp, Homo sapiens
gaacaatatggacca

SEQ ID NO: 1267 - DNA, 15 bp, Homo sapiens
agaacaatatggacc

SEQ ID NO: 1268 - DNA, 15 bp, Homo sapiens
cagaacaatatggac

SEQ ID NO: 1269 - DNA, 15 bp, Homo sapiens
acagaacaatatgga

SEQ ID NO: 1270 - DNA, 15 bp, Homo sapiens
cacagaacaatatgg

SEQ ID NO: 1271 - DNA, 15 bp, Homo sapiens
acacagaacaatatg

SEQ ID NO: 1272 - DNA, 15 bp, Homo sapiens
aacacagaacaatat

SEQ ID NO: 1273 - DNA, 15 bp, Homo sapiens
aaacacagaacaata

SEQ ID NO: 1274 - DNA, 15 bp, Homo sapiens
aaaacacagaacaat

SEQ ID NO: 1275 - DNA, 15 bp, Homo sapiens
aaaaacacagaacaa

SEQ ID NO: 1276 - DNA, 15 bp, Homo sapiens
caaaaacacagaaca

SEQ ID NO: 1277 - DNA, 15 bp, Homo sapiens
acaaaaacacagaac

SEQ ID NO: 1278 - DNA, 15 bp, Homo sapiens
aacaaaaacacagaa

SEQ ID NO: 1279 - DNA, 15 bp, Homo sapiens
aaacaaaaacacaga

SEQ ID NO: 1280 - DNA, 15 bp, Homo sapiens
caaacaaaaacacag

SEQ ID NO: 1281 - DNA, 15 bp, Homo sapiens
acaaacaaaaacaca

SEQ ID NO: 1282 - DNA, 15 bp, Homo sapiens
aacaaacaaaaacac

SEQ ID NO: 1283 - DNA, 15 bp, Homo sapiens
aaacaaacaaaaaca

SEQ ID NO: 1284 - DNA, 15 bp, Homo sapiens
caaacaaacaaaaac

SEQ ID NO: 1285 - DNA, 15 bp, Homo sapiens
acaaacaaacaaaaa

SEQ ID NO: 1286 - DNA, 15 bp, Homo sapiens
aacaaacaaacaaaa

SEQ ID NO: 1287 - DNA, 15 bp, Homo sapiens
aaacaaacaaacaaa

SEQ ID NO: 1288 - DNA, 15 bp, Homo sapiens
gaaacaaacaaacaa

SEQ ID NO: 1289 - DNA, 15 bp, Homo sapiens
agaaacaaacaaaca

SEQ ID NO: 1290 - DNA, 15 bp, Homo sapiens
aagaaacaaacaaac

SEQ ID NO: 1291 - DNA, 15 bp, Homo sapiens
aaagaaacaaacaaa

SEQ ID NO: 1292 - DNA, 15 bp, Homo sapiens
aaaagaaacaaacaa

SEQ ID NO: 1293 - DNA, 15 bp, Homo sapiens
aaaaagaaacaaaca

SEQ ID NO: 1294 - DNA, 15 bp, Homo sapiens
aaaaaagaaacaaac

SEQ ID NO: 1295 - DNA, 15 bp, Homo sapiens
aaaaaaagaaacaaa

SEQ ID NO: 1296 - DNA, 15 bp, Homo sapiens
caaaaaaagaaacaa

SEQ ID NO: 1297 - DNA, 15 bp, Homo sapiens
acaaaaaaagaaaca

SEQ ID NO: 1298 - DNA, 15 bp, Homo sapiens
aacaaaaaaagaaac

SEQ ID NO: 1299 - DNA, 15 bp, Homo sapiens
aaacaaaaaaagaaa

SEQ ID NO: 1300 - DNA, 15 bp, Homo sapiens
aaaacaaaaaaagaa

SEQ ID NO: 1301 - DNA, 15 bp, Homo sapiens
aaaaacaaaaaaaga

SEQ ID NO: 1302 - DNA, 15 bp, Homo sapiens
caaaaacaaaaaaag

SEQ ID NO: 1303 - DNA, 15 bp, Homo sapiens
acaaaaacaaaaaaa

SEQ ID NO: 1304 - DNA, 15 bp, Homo sapiens
cacaaaaacaaaaaa

SEQ ID NO: 1305 - DNA, 15 bp, Homo sapiens
ccacaaaaacaaaaa

SEQ ID NO: 1306 - DNA, 15 bp, Homo sapiens
gccacaaaaacaaaa

SEQ ID NO: 1307 - DNA, 15 bp, Homo sapiens
ggccacaaaaacaaa

SEQ ID NO: 1308 - DNA, 15 bp, Homo sapiens
aggccacaaaaacaa

SEQ ID NO: 1309 - DNA, 15 bp, Homo sapiens
gaggccacaaaaaca

SEQ ID NO: 1310 - DNA, 15 bp, Homo sapiens
ggaggccacaaaaac

SEQ ID NO: 1311 - DNA, 15 bp, Homo sapiens
aggaggccacaaaaa

SEQ ID NO: 1312 - DNA, 15 bp, Homo sapiens
aaggaggccacaaaa

SEQ ID NO: 1313 - DNA, 15 bp, Homo sapiens
gaaggaggccacaaa

SEQ ID NO: 1314 - DNA, 15 bp, Homo sapiens
ggaaggaggccacaa

SEQ ID NO: 1315 - DNA, 15 bp, Homo sapiens
aggaaggaggccaca

SEQ ID NO: 1316 - DNA, 15 bp, Homo sapiens
gaggaaggaggccac

SEQ ID NO: 1317 - DNA, 15 bp, Homo sapiens
agaggaaggaggcca

SEQ ID NO: 1318 - DNA, 15 bp, Homo sapiens
gagaggaaggaggcc

SEQ ID NO: 1319 - DNA, 15 bp, Homo sapiens
tgagaggaaggaggc

SEQ ID NO: 1320 - DNA, 15 bp, Homo sapiens
ttgagaggaaggagg

SEQ ID NO: 1321 - DNA, 15 bp, Homo sapiens
attgagaggaaggag

SEQ ID NO: 1322 - DNA, 15 bp, Homo sapiens
aattgagaggaagga

SEQ ID NO: 1323 - DNA, 15 bp, Homo sapiens
aaattgagaggaagg

SEQ ID NO: 1324 - DNA, 15 bp, Homo sapiens
taaattgagaggaag

SEQ ID NO: 1325 - DNA, 15 bp, Homo sapiens
ataaattgagaggaa

SEQ ID NO: 1326 - DNA, 15 bp, Homo sapiens
cataaattgagagga

SEQ ID NO: 1327 - DNA, 15 bp, Homo sapiens
tcataaattgagagg

SEQ ID NO: 1328 - DNA, 15 bp, Homo sapiens
ttcataaattgagag

SEQ ID NO: 1329 - DNA, 15 bp, Homo sapiens
cttcataaattgaga

SEQ ID NO: 1330 - DNA, 15 bp, Homo sapiens
tcttcataaattgag

SEQ ID NO: 1331 - DNA, 15 bp, Homo sapiens
ctcttcataaattga

SEQ ID NO: 1332 - DNA, 15 bp, Homo sapiens
tctcttcataaattg

SEQ ID NO: 1333 - DNA, 15 bp, Homo sapiens
ttctcttcataaatt

SEQ ID NO: 1334 - DNA, 15 bp, Homo sapiens
cttctcttcataaat

SEQ ID NO: 1335 - DNA, 15 bp, Homo sapiens
gcttctcttcataaa

SEQ ID NO: 1336 - DNA, 15 bp, Homo sapiens
tgcttctcttcataa

SEQ ID NO: 1337 - DNA, 15 bp, Homo sapiens
ctgcttctcttcata

SEQ ID NO: 1338 - DNA, 15 bp, Homo sapiens
actgcttctcttcat

SEQ ID NO: 1339 - DNA, 15 bp, Homo sapiens
tactgcttctcttca

SEQ ID NO: 1340 - DNA, 15 bp, Homo sapiens
ttactgcttctcttc

SEQ ID NO: 1341 - DNA, 15 bp, Homo sapiens
cttactgcttctctt

SEQ ID NO: 1342 - DNA, 15 bp, Homo sapiens
tcttactgcttctct

SEQ ID NO: 1343 - DNA, 15 bp, Homo sapiens
atcttactgcttctc

SEQ ID NO: 1344 - DNA, 15 bp, Homo sapiens
catcttactgcttct

SEQ ID NO: 1345 - DNA, 15 bp, Homo sapiens
acatcttactgcttc

SEQ ID NO: 1346 - DNA, 15 bp, Homo sapiens
aacatcttactgctt

SEQ ID NO: 1347 - DNA, 15 bp, Homo sapiens
gaacatcttactgct

SEQ ID NO: 1348 - DNA, 15 bp, Homo sapiens
ggaacatcttactgc

SEQ ID NO: 1349 - DNA, 15 bp, Homo sapiens
aggaacatcttactg

SEQ ID NO: 1350 - DNA, 15 bp, Homo sapiens
gaggaacatcttact

SEQ ID NO: 1351 - DNA, 15 bp, Homo sapiens
agaggaacatcttac

SEQ ID NO: 1352 - DNA, 15 bp, Homo sapiens
gagaggaacatctta

SEQ ID NO: 1353 - DNA, 15 bp, Homo sapiens
cgagaggaacatctt

SEQ ID NO: 1354 - DNA, 15 bp, Homo sapiens
ccgagaggaacatct

SEQ ID NO: 1355 - DNA, 15 bp, Homo sapiens
cccgagaggaacatc

SEQ ID NO: 1356 - DNA, 15 bp, Homo sapiens
acccgagaggaacat

SEQ ID NO: 1357 - DNA, 15 bp, Homo sapiens
gacccgagaggaaca

SEQ ID NO: 1358 - DNA, 15 bp, Homo sapiens
ggacccgagaggaac

SEQ ID NO: 1359 - DNA, 15 bp, Homo sapiens
aggacccgagaggaa

SEQ ID NO: 1360 - DNA, 15 bp, Homo sapiens
gaggacccgagagga

SEQ ID NO: 1361 - DNA, 15 bp, Homo sapiens
agaggacccgagagg

SEQ ID NO: 1362 - DNA, 15 bp, Homo sapiens
cagaggacccgagag

SEQ ID NO: 1363 - DNA, 15 bp, Homo sapiens
tcagaggacccgaga

SEQ ID NO: 1364 - DNA, 15 bp, Homo sapiens
ctcagaggacccgag

SEQ ID NO: 1365 - DNA, 15 bp, Homo sapiens
cctcagaggacccga

SEQ ID NO: 1366 - DNA, 15 bp, Homo sapiens
ccctcagaggacccg

SEQ ID NO: 1367 - DNA, 15 bp, Homo sapiens
tccctcagaggaccc

SEQ ID NO: 1368 - DNA, 15 bp, Homo sapiens
gtccctcagaggacc

SEQ ID NO: 1369 - DNA, 15 bp, Homo sapiens
ggtccctcagaggac

SEQ ID NO: 1370 - DNA, 15 bp, Homo sapiens
aggtccctcagagga

SEQ ID NO: 1371 - DNA, 15 bp, Homo sapiens
caggtccctcagagg

SEQ ID NO: 1372 - DNA, 15 bp, Homo sapiens
ccaggtccctcagag

SEQ ID NO: 1373 - DNA, 15 bp, Homo sapiens
cccaggtccctcaga

SEQ ID NO: 1374 - DNA, 15 bp, Homo sapiens
ccccaggtccctcag

SEQ ID NO: 1375 - DNA, 15 bp, Homo sapiens
tccccaggtccctca

SEQ ID NO: 1376 - DNA, 15 bp, Homo sapiens
ctccccaggtccctc

SEQ ID NO: 1377 - DNA, 15 bp, Homo sapiens
gctccccaggtccct

SEQ ID NO: 1378 - DNA, 15 bp, Homo sapiens
agctccccaggtccc

SEQ ID NO: 1379 - DNA, 15 bp, Homo sapiens
gagctccccaggtcc

SEQ ID NO: 1380 - DNA, 15 bp, Homo sapiens
tgagctccccaggtc

SEQ ID NO: 1381 - DNA, 15 bp, Homo sapiens
ctgagctccccaggt

SEQ ID NO: 1382 - DNA, 15 bp, Homo sapiens
cctgagctccccagg

SEQ ID NO: 1383 - DNA, 15 bp, Homo sapiens
gcctgagctccccag

SEQ ID NO: 1384 - DNA, 15 bp, Homo sapiens
agcctgagctcccca

SEQ ID NO: 1385 - DNA, 15 bp, Homo sapiens
cagcctgagctcccc

SEQ ID NO: 1386 - DNA, 15 bp, Homo sapiens
ccagcctgagctccc

SEQ ID NO: 1387 - DNA, 15 bp, Homo sapiens
cccagcctgagctcc

SEQ ID NO: 1388 - DNA, 15 bp, Homo sapiens
tcccagcctgagctc

SEQ ID NO: 1389 - DNA, 15 bp, Homo sapiens
ttcccagcctgagct

SEQ ID NO: 1390 - DNA, 15 bp, Homo sapiens
attcccagcctgagc

SEQ ID NO: 1391 - DNA, 15 bp, Homo sapiens
gattcccagcctgag

SEQ ID NO: 1392 - DNA, 15 bp, Homo sapiens
agattcccagcctga

SEQ ID NO: 1393 - DNA, 15 bp, Homo sapiens
gagattcccagcctg

SEQ ID NO: 1394 - DNA, 15 bp, Homo sapiens
ggagattcccagcct

SEQ ID NO: 1395 - DNA, 15 bp, Homo sapiens
tggagattcccagcc

SEQ ID NO: 1396 - DNA, 15 bp, Homo sapiens
ttggagattcccagc

SEQ ID NO: 1397 - DNA, 15 bp, Homo sapiens
cttggagattcccag

SEQ ID NO: 1398 - DNA, 15 bp, Homo sapiens
ccttggagattccca

SEQ ID NO: 1399 - DNA, 15 bp, Homo sapiens
gccttggagattccc

SEQ ID NO: 1400 - DNA, 15 bp, Homo sapiens
tgccttggagattcc

SEQ ID NO: 1401 - DNA, 15 bp, Homo sapiens
ctgccttggagattc

SEQ ID NO: 1402 - DNA, 15 bp, Homo sapiens
actgccttggagatt

SEQ ID NO: 1403 - DNA, 15 bp, Homo sapiens
tactgccttggagat

SEQ ID NO: 1404 - DNA, 15 bp, Homo sapiens
ctactgccttggaga

SEQ ID NO: 1405 - DNA, 15 bp, Homo sapiens
cctactgccttggag

SEQ ID NO: 1406 - DNA, 15 bp, Homo sapiens
acctactgccttgga

SEQ ID NO: 1407 - DNA, 15 bp, Homo sapiens
gacctactgccttgg

SEQ ID NO: 1408 - DNA, 15 bp, Homo sapiens
cgacctactgccttg

SEQ ID NO: 1409 - DNA, 15 bp, Homo sapiens
gcgacctactgcctt

SEQ ID NO: 1410 - DNA, 15 bp, Homo sapiens
ggcgacctactgcct

SEQ ID NO: 1411 - DNA, 15 bp, Homo sapiens
aggcgacctactgcc

SEQ ID NO: 1412 - DNA, 15 bp, Homo sapiens
taggcgacctactgc

SEQ ID NO: 1413 - DNA, 15 bp, Homo sapiens
ataggcgacctactg

SEQ ID NO: 1414 - DNA, 15 bp, Homo sapiens
gataggcgacctact

SEQ ID NO: 1415 - DNA, 15 bp, Homo sapiens
tgataggcgacctac

SEQ ID NO: 1416 - DNA, 15 bp, Homo sapiens
ttgataggcgaccta

SEQ ID NO: 1417 - DNA, 15 bp, Homo sapiens
tttgataggcgacct

SEQ ID NO: 1418 - DNA, 15 bp, Homo sapiens
ttttgataggcgacc

SEQ ID NO: 1419 - DNA, 15 bp, Homo sapiens
tttttgataggcgac

SEQ ID NO: 1420 - DNA, 15 bp, Homo sapiens
atttttgataggcga

SEQ ID NO: 1421 - DNA, 15 bp, Homo sapiens
gatttttgataggcg

SEQ ID NO: 1422 - DNA, 15 bp, Homo sapiens
tgatttttgataggc

SEQ ID NO: 1423 - DNA, 15 bp, Homo sapiens
ttgatttttgatagg

SEQ ID NO: 1424 - DNA, 15 bp, Homo sapiens
tttgatttttgatag

SEQ ID NO: 1425 - DNA, 15 bp, Homo sapiens
ctttgatttttgata

SEQ ID NO: 1426 - DNA, 15 bp, Homo sapiens
actttgatttttgat

SEQ ID NO: 1427 - DNA, 15 bp, Homo sapiens
gactttgatttttga

SEQ ID NO: 1428 - DNA, 15 bp, Homo sapiens
ggactttgatttttg

SEQ ID NO: 1429 - DNA, 15 bp, Homo sapiens
tggactttgattttt

SEQ ID NO: 1430 - DNA, 15 bp, Homo sapiens
ctggactttgatttt

SEQ ID NO: 1431 - DNA, 15 bp, Homo sapiens
cctggactttgattt

SEQ ID NO: 1432 - DNA, 15 bp, Homo sapiens
acctggactttgatt

SEQ ID NO: 1433 - DNA, 15 bp, Homo sapiens
aacctggactttgat

SEQ ID NO: 1434 - DNA, 15 bp, Homo sapiens
aaacctggactttga

SEQ ID NO: 1435 - DNA, 15 bp, Homo sapiens
caaacctggactttg

SEQ ID NO: 1436 - DNA, 15 bp, Homo sapiens
acaaacctggacttt

SEQ ID NO: 1437 - DNA, 15 bp, Homo sapiens
cacaaacctggactt

SEQ ID NO: 1438 - DNA, 15 bp, Homo sapiens
ccacaaacctggact

SEQ ID NO: 1439 - DNA, 15 bp, Homo sapiens
cccacaaacctggac

SEQ ID NO: 1440 - DNA, 15 bp, Homo sapiens
ccccacaaacctgga

SEQ ID NO: 1441 - DNA, 15 bp, Homo sapiens
cccccacaaacctgg

SEQ ID NO: 1442 - DNA, 15 bp, Homo sapiens
ccccccacaaacctg

SEQ ID NO: 1443 - DNA, 15 bp, Homo sapiens
tccccccacaaacct

SEQ ID NO: 1444 - DNA, 15 bp, Homo sapiens
ttccccccacaaacc

SEQ ID NO: 1445 - DNA, 15 bp, Homo sapiens
tttccccccacaaac

SEQ ID NO: 1446 - DNA, 15 bp, Homo sapiens
ttttccccccacaaa

SEQ ID NO: 1447 - DNA, 15 bp, Homo sapiens
gttttccccccacaa

SEQ ID NO: 1448 - DNA, 15 bp, Homo sapiens
tgttttccccccaca

SEQ ID NO: 1449 - DNA, 15 bp, Homo sapiens
ttgttttccccccac

SEQ ID NO: 1450 - DNA, 15 bp, Homo sapiens
tttgttttcccccca

SEQ ID NO: 1451 - DNA, 15 bp, Homo sapiens
ttttgttttcccccc

SEQ ID NO: 1452 - DNA, 15 bp, Homo sapiens
cttttgttttccccc

SEQ ID NO: 1453 - DNA, 15 bp, Homo sapiens
gcttttgttttcccc

SEQ ID NO: 1454 - DNA, 15 bp, Homo sapiens
tgcttttgttttccc

SEQ ID NO: 1455 - DNA, 15 bp, Homo sapiens
ctgcttttgttttcc

SEQ ID NO: 1456 - DNA, 15 bp, Homo sapiens
gctgcttttgttttc

SEQ ID NO: 1457 - DNA, 15 bp, Homo sapiens
ggctgcttttgtttt

SEQ ID NO: 1458 - DNA, 15 bp, Homo sapiens
gggctgcttttgttt

SEQ ID NO: 1459 - DNA, 15 bp, Homo sapiens
tgggctgcttttgtt

SEQ ID NO: 1460 - DNA, 15 bp, Homo sapiens
atgggctgcttttgt

SEQ ID NO: 1461 - DNA, 15 bp, Homo sapiens
aatgggctgcttttg

SEQ ID NO: 1462 - DNA, 15 bp, Homo sapiens
taatgggctgctttt

SEQ ID NO: 1463 - DNA, 15 bp, Homo sapiens
gtaatgggctgcttt

SEQ ID NO: 1464 - DNA, 15 bp, Homo sapiens
ggtaatgggctgctt

SEQ ID NO: 1465 - DNA, 15 bp, Homo sapiens
gggtaatgggctgct

SEQ ID NO: 1466 - DNA, 15 bp, Homo sapiens
tgggtaatgggctgc

SEQ ID NO: 1467 - DNA, 15 bp, Homo sapiens
ctgggtaatgggctg

SEQ ID NO: 1468 - DNA, 15 bp, Homo sapiens
tctgggtaatgggct

SEQ ID NO: 1469 - DNA, 15 bp, Homo sapiens
ctctgggtaatgggc

SEQ ID NO: 1470 - DNA, 15 bp, Homo sapiens
cctctgggtaatggg

SEQ ID NO: 1471 - DNA, 15 bp, Homo sapiens
tcctctgggtaatgg

SEQ ID NO: 1472 - DNA, 15 bp, Homo sapiens
gtcctctgggtaatg

SEQ ID NO: 1473 - DNA, 15 bp, Homo sapiens
agtcctctgggtaat

SEQ ID NO: 1474 - DNA, 15 bp, Homo sapiens
cagtcctctgggtaa

SEQ ID NO: 1475 - DNA, 15 bp, Homo sapiens
acagtcctctgggta

SEQ ID NO: 1476 - DNA, 15 bp, Homo sapiens
gacagtcctctgggt

SEQ ID NO: 1477 - DNA, 15 bp, Homo sapiens
ggacagtcctctggg

SEQ ID NO: 1478 - DNA, 15 bp, Homo sapiens
cggacagtcctctgg

SEQ ID NO: 1479 - DNA, 15 bp, Homo sapiens
gcggacagtcctctg

SEQ ID NO: 1480 - DNA, 15 bp, Homo sapiens
ggcggacagtcctct

SEQ ID NO: 1481 - DNA, 15 bp, Homo sapiens
aggcggacagtcctc

SEQ ID NO: 1482 - DNA, 15 bp, Homo sapiens
aaggcggacagtcct

SEQ ID NO: 1483 - DNA, 15 bp, Homo sapiens
gaaggcggacagtcc

SEQ ID NO: 1484 - DNA, 15 bp, Homo sapiens
ggaaggcggacagtc

SEQ ID NO: 1485 - DNA, 15 bp, Homo sapiens
gggaaggcggacagt

SEQ ID NO: 1486 - DNA, 15 bp, Homo sapiens
ggggaaggcggacag

SEQ ID NO: 1487 - DNA, 15 bp, Homo sapiens
aggggaaggcggaca

SEQ ID NO: 1488 - DNA, 15 bp, Homo sapiens
gaggggaaggcggac

SEQ ID NO: 1489 - DNA, 15 bp, Homo sapiens
tgaggggaaggcgga

SEQ ID NO: 1490 - DNA, 15 bp, Homo sapiens
gtgaggggaaggcgg

SEQ ID NO: 1491 - DNA, 15 bp, Homo sapiens
ggtgaggggaaggcg

SEQ ID NO: 1492 - DNA, 15 bp, Homo sapiens
gggtgaggggaaggc

SEQ ID NO: 1493 - DNA, 15 bp, Homo sapiens
ggggtgaggggaagg

SEQ ID NO: 1494 - DNA, 15 bp, Homo sapiens
tggggtgaggggaag

SEQ ID NO: 1495 - DNA, 15 bp, Homo sapiens
ctggggtgaggggaa

SEQ ID NO: 1496 - DNA, 15 bp, Homo sapiens
gctggggtgagggga

SEQ ID NO: 1497 - DNA, 15 bp, Homo sapiens
ggctggggtgagggg

SEQ ID NO: 1498 - DNA, 15 bp, Homo sapiens
aggctggggtgaggg

SEQ ID NO: 1499 - DNA, 15 bp, Homo sapiens
taggctggggtgagg

SEQ ID NO: 1500 - DNA, 15 bp, Homo sapiens
ctaggctggggtgag

SEQ ID NO: 1501 - DNA, 15 bp, Homo sapiens
cctaggctggggtga

SEQ ID NO: 1502 - DNA, 15 bp, Homo sapiens
gcctaggctggggtg

SEQ ID NO: 1503 - DNA, 15 bp, Homo sapiens
ggcctaggctggggt

SEQ ID NO: 1504 - DNA, 15 bp, Homo sapiens
aggcctaggctgggg

SEQ ID NO: 1505 - DNA, 15 bp, Homo sapiens
aaggcctaggctggg

SEQ ID NO: 1506 - DNA, 15 bp, Homo sapiens
aaaggcctaggctgg

SEQ ID NO: 1507 - DNA, 15 bp, Homo sapiens
caaaggcctaggctg

SEQ ID NO: 1508 - DNA, 15 bp, Homo sapiens
tcaaaggcctaggct

SEQ ID NO: 1509 - DNA, 15 bp, Homo sapiens
ttcaaaggcctaggc

SEQ ID NO: 1510 - DNA, 15 bp, Homo sapiens
tttcaaaggcctagg

SEQ ID NO: 1511 - DNA, 15 bp, Homo sapiens
ctttcaaaggcctag

SEQ ID NO: 1512 - DNA, 15 bp, Homo sapiens
cctttcaaaggccta

SEQ ID NO: 1513 - DNA, 15 bp, Homo sapiens
tcctttcaaaggcct

SEQ ID NO: 1514 - DNA, 15 bp, Homo sapiens
ttcctttcaaaggcc

SEQ ID NO: 1515 - DNA, 15 bp, Homo sapiens
tttcctttcaaaggc

SEQ ID NO: 1516 - DNA, 15 bp, Homo sapiens
gtttcctttcaaagg

SEQ ID NO: 1517 - DNA, 15 bp, Homo sapiens
tgtttcctttcaaag

SEQ ID NO: 1518 - DNA, 15 bp, Homo sapiens
ttgtttcctttcaaa

SEQ ID NO: 1519 - DNA, 15 bp, Homo sapiens
tttgtttcctttcaa

SEQ ID NO: 1520 - DNA, 15 bp, Homo sapiens
ttttgtttcctttca

SEQ ID NO: 1521 - DNA, 15 bp, Homo sapiens
cttttgtttcctttc

SEQ ID NO: 1522 - DNA, 15 bp, Homo sapiens
tcttttgtttccttt

SEQ ID NO: 1523 - DNA, 15 bp, Homo sapiens
gtcttttgtttcctt

SEQ ID NO: 1524 - DNA, 15 bp, Homo sapiens
tgtcttttgtttcct

SEQ ID NO: 1525 - DNA, 15 bp, Homo sapiens
ttgtcttttgtttcc

SEQ ID NO: 1526 - DNA, 15 bp, Homo sapiens
cttgtcttttgtttc

SEQ ID NO: 1527 - DNA, 15 bp, Homo sapiens
tcttgtcttttgttt

SEQ ID NO: 1528 - DNA, 15 bp, Homo sapiens
gtcttgtcttttgtt

SEQ ID NO: 1529 - DNA, 15 bp, Homo sapiens
tgtcttgtcttttgt

SEQ ID NO: 1530 - DNA, 15 bp, Homo sapiens
ttgtcttgtcttttg

SEQ ID NO: 1531 - DNA, 15 bp, Homo sapiens
tttgtcttgtctttt

SEQ ID NO: 1532 - DNA, 15 bp, Homo sapiens
ttttgtcttgtcttt

SEQ ID NO: 1533 - DNA, 15 bp, Homo sapiens
attttgtcttgtctt

SEQ ID NO: 1534 - DNA, 15 bp, Homo sapiens
cattttgtcttgtct

SEQ ID NO: 1535 - DNA, 15 bp, Homo sapiens
tcattttgtcttgtc

SEQ ID NO: 1536 - DNA, 15 bp, Homo sapiens
atcattttgtcttgt

SEQ ID NO: 1537 - DNA, 15 bp, Homo sapiens
aatcattttgtcttg

SEQ ID NO: 1538 - DNA, 15 bp, Homo sapiens
caatcattttgtctt

SEQ ID NO: 1539 - DNA, 15 bp, Homo sapiens
ccaatcattttgtct

SEQ ID NO: 1540 - DNA, 15 bp, Homo sapiens
gccaatcattttgtc

SEQ ID NO: 1541 - DNA, 15 bp, Homo sapiens
cgccaatcattttgt

SEQ ID NO: 1542 - DNA, 15 bp, Homo sapiens
acgccaatcattttg

SEQ ID NO: 1543 - DNA, 15 bp, Homo sapiens
gacgccaatcatttt

SEQ ID NO: 1544 - DNA, 15 bp, Homo sapiens
ggacgccaatcattt

SEQ ID NO: 1545 - DNA, 15 bp, Homo sapiens
aggacgccaatcatt

SEQ ID NO: 1546 - DNA, 15 bp, Homo sapiens
caggacgccaatcat

SEQ ID NO: 1547 - DNA, 15 bp, Homo sapiens
tcaggacgccaatca

SEQ ID NO: 1548 - DNA, 15 bp, Homo sapiens
ctcaggacgccaatc

SEQ ID NO: 1549 - DNA, 15 bp, Homo sapiens
cctcaggacgccaat

SEQ ID NO: 1550 - DNA, 15 bp, Homo sapiens
ccctcaggacgccaa

SEQ ID NO: 1551 - DNA, 15 bp, Homo sapiens
tccctcaggacgcca

SEQ ID NO: 1552 - DNA, 15 bp, Homo sapiens
ctccctcaggacgcc

SEQ ID NO: 1553 - DNA, 15 bp, Homo sapiens
tctccctcaggacgc

SEQ ID NO: 1554 - DNA, 15 bp, Homo sapiens
atctccctcaggacg

SEQ ID NO: 1555 - DNA, 15 bp, Homo sapiens
aatctccctcaggac

SEQ ID NO: 1556 - DNA, 15 bp, Homo sapiens
gaatctccctcagga

SEQ ID NO: 1557 - DNA, 15 bp, Homo sapiens
tgaatctccctcagg

SEQ ID NO: 1558 - DNA, 15 bp, Homo sapiens
ctgaatctccctcag

SEQ ID NO: 1559 - DNA, 15 bp, Homo sapiens
gctgaatctccctca

SEQ ID NO: 1560 - DNA, 15 bp, Homo sapiens
ggctgaatctccctc

SEQ ID NO: 1561 - DNA, 15 bp, Homo sapiens
aggctgaatctccct

SEQ ID NO: 1562 - DNA, 15 bp, Homo sapiens
taggctgaatctccc

SEQ ID NO: 1563 - DNA, 15 bp, Homo sapiens
ctaggctgaatctcc

SEQ ID NO: 1564 - DNA, 15 bp, Homo sapiens
tctaggctgaatctc

SEQ ID NO: 1565 - DNA, 15 bp, Homo sapiens
ctctaggctgaatct

SEQ ID NO: 1566 - DNA, 15 bp, Homo sapiens
gctctaggctgaatc

SEQ ID NO: 1567 - DNA, 15 bp, Homo sapiens
agctctaggctgaat

SEQ ID NO: 1568 - DNA, 15 bp, Homo sapiens
gagctctaggctgaa

SEQ ID NO: 1569 - DNA, 15 bp, Homo sapiens
agagctctaggctga

SEQ ID NO: 1570 - DNA, 15 bp, Homo sapiens
gagagctctaggctg

SEQ ID NO: 1571 - DNA, 15 bp, Homo sapiens
agagagctctaggct

SEQ ID NO: 1572 - DNA, 15 bp, Homo sapiens
gagagagctctaggc

SEQ ID NO: 1573 - DNA, 15 bp, Homo sapiens
agagagagctctagg

SEQ ID NO: 1574 - DNA, 15 bp, Homo sapiens
gagagagagctctag

SEQ ID NO: 1575 - DNA, 15 bp, Homo sapiens
ggagagagagctcta

SEQ ID NO: 1576 - DNA, 15 bp, Homo sapiens
gggagagagagctct

SEQ ID NO: 1577 - DNA, 15 bp, Homo sapiens
ggggagagagagctc

SEQ ID NO: 1578 - DNA, 15 bp, Homo sapiens
gggggagagagagct

SEQ ID NO: 1579 - DNA, 15 bp, Homo sapiens
tgggggagagagagc

SEQ ID NO: 1580 - DNA, 15 bp, Homo sapiens
ttgggggagagagag

SEQ ID NO: 1581 - DNA, 15 bp, Homo sapiens
attgggggagagaga

SEQ ID NO: 1582 - DNA, 15 bp, Homo sapiens
gattgggggagagag

SEQ ID NO: 1583 - DNA, 15 bp, Homo sapiens
ggattgggggagaga

SEQ ID NO: 1584 - DNA, 15 bp, Homo sapiens
gggattgggggagag

SEQ ID NO: 1585 - DNA, 15 bp, Homo sapiens
agggattgggggaga

SEQ ID NO: 1586 - DNA, 15 bp, Homo sapiens
gagggattgggggag

SEQ ID NO: 1587 - DNA, 15 bp, Homo sapiens
ggagggattggggga

SEQ ID NO: 1588 - DNA, 15 bp, Homo sapiens
gggagggattggggg

SEQ ID NO: 1589 - DNA, 15 bp, Homo sapiens
agggagggattgggg

SEQ ID NO: 1590 - DNA, 15 bp, Homo sapiens
gagggagggattggg

SEQ ID NO: 1591 - DNA, 15 bp, Homo sapiens
ggagggagggattgg

SEQ ID NO: 1592 - DNA, 15 bp, Homo sapiens
cggagggagggattg

SEQ ID NO: 1593 - DNA, 15 bp, Homo sapiens
ccggagggagggatt

SEQ ID NO: 1594 - DNA, 15 bp, Homo sapiens
gccggagggagggat

SEQ ID NO: 1595 - DNA, 15 bp, Homo sapiens
agccggagggaggga

SEQ ID NO: 1596 - DNA, 15 bp, Homo sapiens
cagccggagggaggg

SEQ ID NO: 1597 - DNA, 15 bp, Homo sapiens
tcagccggagggagg

SEQ ID NO: 1598 - DNA, 15 bp, Homo sapiens
ctcagccggagggag

SEQ ID NO: 1599 - DNA, 15 bp, Homo sapiens
cctcagccggaggga

SEQ ID NO: 1600 - DNA, 15 bp, Homo sapiens
tcctcagccggaggg

SEQ ID NO: 1601 - DNA, 15 bp, Homo sapiens
ttcctcagccggagg

SEQ ID NO: 1602 - DNA, 15 bp, Homo sapiens
tttcctcagccggag

SEQ ID NO: 1603 - DNA, 15 bp, Homo sapiens
gtttcctcagccgga

SEQ ID NO: 1604 - DNA, 15 bp, Homo sapiens
agtttcctcagccgg

SEQ ID NO: 1605 - DNA, 15 bp, Homo sapiens
tagtttcctcagccg

SEQ ID NO: 1606 - DNA, 15 bp, Homo sapiens
ttagtttcctcagcc

SEQ ID NO: 1607 - DNA, 15 bp, Homo sapiens
gttagtttcctcagc

SEQ ID NO: 1608 - DNA, 15 bp, Homo sapiens
tgttagtttcctcag

SEQ ID NO: 1609 - DNA, 15 bp, Homo sapiens
ttgttagtttcctca

SEQ ID NO: 1610 - DNA, 15 bp, Homo sapiens
tttgttagtttcctc

SEQ ID NO: 1611 - DNA, 15 bp, Homo sapiens
ctttgttagtttcct

SEQ ID NO: 1612 - DNA, 15 bp, Homo sapiens
cctttgttagtttcc

SEQ ID NO: 1613 - DNA, 15 bp, Homo sapiens
tcctttgttagtttc

SEQ ID NO: 1614 - DNA, 15 bp, Homo sapiens
ttcctttgttagttt

SEQ ID NO: 1615 - DNA, 15 bp, Homo sapiens
tttcctttgttagtt

SEQ ID NO: 1616 - DNA, 15 bp, Homo sapiens
ttttcctttgttagt

SEQ ID NO: 1617 - DNA, 15 bp, Homo sapiens
tttttcctttgttag

SEQ ID NO: 1618 - DNA, 15 bp, Homo sapiens
ttttttcctttgtta

SEQ ID NO: 1619 - DNA, 15 bp, Homo sapiens
tttttttcctttgtt

SEQ ID NO: 1620 - DNA, 15 bp, Homo sapiens
ttttttttcctttgt

SEQ ID NO: 1621 - DNA, 15 bp, Homo sapiens
tttttttttcctttg

SEQ ID NO: 1622 - DNA, 15 bp, Homo sapiens
atttttttttccttt

SEQ ID NO: 1623 - DNA, 15 bp, Homo sapiens
aatttttttttcctt

SEQ ID NO: 1624 - DNA, 15 bp, Homo sapiens
caatttttttttcct

SEQ ID NO: 1625 - DNA, 15 bp, Homo sapiens
gcaatttttttttcc

SEQ ID NO: 1626 - DNA, 15 bp, Homo sapiens
cgcaatttttttttc

SEQ ID NO: 1627 - DNA, 15 bp, Homo sapiens
ccgcaattttttttt

SEQ ID NO: 1628 - DNA, 15 bp, Homo sapiens
tccgcaatttttttt

SEQ ID NO: 1629 - DNA, 15 bp, Homo sapiens
ttccgcaattttttt

SEQ ID NO: 1630 - DNA, 15 bp, Homo sapiens
tttccgcaatttttt

SEQ ID NO: 1631 - DNA, 15 bp, Homo sapiens
ctttccgcaattttt

SEQ ID NO: 1632 - DNA, 15 bp, Homo sapiens
gctttccgcaatttt

SEQ ID NO: 1633 - DNA, 15 bp, Homo sapiens
tgctttccgcaattt

SEQ ID NO: 1634 - DNA, 15 bp, Homo sapiens
ctgctttccgcaatt

SEQ ID NO: 1635 - DNA, 15 bp, Homo sapiens
cctgctttccgcaat

SEQ ID NO: 1636 - DNA, 15 bp, Homo sapiens
tcctgctttccgcaa

SEQ ID NO: 1637 - DNA, 15 bp, Homo sapiens
atcctgctttccgca

SEQ ID NO: 1638 - DNA, 15 bp, Homo sapiens
aatcctgctttccgc

SEQ ID NO: 1639 - DNA, 15 bp, Homo sapiens
aaatcctgctttccg

SEQ ID NO: 1640 - DNA, 15 bp, Homo sapiens
taaatcctgctttcc

SEQ ID NO: 1641 - DNA, 15 bp, Homo sapiens
ctaaatcctgctttc

SEQ ID NO: 1642 - DNA, 15 bp, Homo sapiens
tctaaatcctgcttt

SEQ ID NO: 1643 - DNA, 15 bp, Homo sapiens
ctctaaatcctgctt

SEQ ID NO: 1644 - DNA, 15 bp, Homo sapiens
cctctaaatcctgct

SEQ ID NO: 1645 - DNA, 15 bp, Homo sapiens
tcctctaaatcctgc

SEQ ID NO: 1646 - DNA, 15 bp, Homo sapiens
ttcctctaaatcctg

SEQ ID NO: 1647 - DNA, 15 bp, Homo sapiens
cttcctctaaatcct

SEQ ID NO: 1648 - DNA, 15 bp, Homo sapiens
gcttcctctaaatcc

SEQ ID NO: 1649 - DNA, 15 bp, Homo sapiens
tgcttcctctaaatc

SEQ ID NO: 1650 - DNA, 15 bp, Homo sapiens
ttgcttcctctaaat

SEQ ID NO: 1651 - DNA, 15 bp, Homo sapiens
tttgcttcctctaaa

SEQ ID NO: 1652 - DNA, 15 bp, Homo sapiens
atttgcttcctctaa

SEQ ID NO: 1653 - DNA, 15 bp, Homo sapiens
aatttgcttcctcta

SEQ ID NO: 1654 - DNA, 15 bp, Homo sapiens
gaatttgcttcctct

SEQ ID NO: 1655 - DNA, 15 bp, Homo sapiens
ggaatttgcttcctc

SEQ ID NO: 1656 - DNA, 15 bp, Homo sapiens
tggaatttgcttcct

SEQ ID NO: 1657 - DNA, 15 bp, Homo sapiens
gtggaatttgcttcc

SEQ ID NO: 1658 - DNA, 15 bp, Homo sapiens
agtggaatttgcttc

SEQ ID NO: 1659 - DNA, 15 bp, Homo sapiens
cagtggaatttgctt

SEQ ID NO: 1660 - DNA, 15 bp, Homo sapiens
ccagtggaatttgct

SEQ ID NO: 1661 - DNA, 15 bp, Homo sapiens
accagtggaatttgc

SEQ ID NO: 1662 - DNA, 15 bp, Homo sapiens
caccagtggaatttg

SEQ ID NO: 1663 - DNA, 15 bp, Homo sapiens
gcaccagtggaattt

SEQ ID NO: 1664 - DNA, 15 bp, Homo sapiens
ggcaccagtggaatt

SEQ ID NO: 1665 - DNA, 15 bp, Homo sapiens
gggcaccagtggaat

SEQ ID NO: 1666 - DNA, 15 bp, Homo sapiens
agggcaccagtggaa

SEQ ID NO: 1667 - DNA, 15 bp, Homo sapiens
aagggcaccagtgga

SEQ ID NO: 1668 - DNA, 15 bp, Homo sapiens
caagggcaccagtgg

SEQ ID NO: 1669 - DNA, 15 bp, Homo sapiens
ccaagggcaccagtg

SEQ ID NO: 1670 - DNA, 15 bp, Homo sapiens
gccaagggcaccagt

SEQ ID NO: 1671 - DNA, 15 bp, Homo sapiens
agccaagggcaccag

SEQ ID NO: 1672 - DNA, 15 bp, Homo sapiens
cagccaagggcacca

SEQ ID NO: 1673 - DNA, 15 bp, Homo sapiens
gcagccaagggcacc

SEQ ID NO: 1674 - DNA, 15 bp, Homo sapiens
ggcagccaagggcac

SEQ ID NO: 1675 - DNA, 15 bp, Homo sapiens
cggcagccaagggca

SEQ ID NO: 1676 - DNA, 15 bp, Homo sapiens
ccggcagccaagggc

SEQ ID NO: 1677 - DNA, 15 bp, Homo sapiens
cccggcagccaaggg

SEQ ID NO: 1678 - DNA, 15 bp, Homo sapiens
tcccggcagccaagg

SEQ ID NO: 1679 - DNA, 15 bp, Homo sapiens
ttcccggcagccaag

SEQ ID NO: 1680 - DNA, 15 bp, Homo sapiens
gttcccggcagccaa

SEQ ID NO: 1681 - DNA, 15 bp, Homo sapiens
cgttcccggcagcca

SEQ ID NO: 1682 - DNA, 15 bp, Homo sapiens
acgttcccggcagcc

SEQ ID NO: 1683 - DNA, 15 bp, Homo sapiens
cacgttcccggcagc

SEQ ID NO: 1684 - DNA, 15 bp, Homo sapiens
ccacgttcccggcag

SEQ ID NO: 1685 - DNA, 15 bp, Homo sapiens
tccacgttcccggca

SEQ ID NO: 1686 - DNA, 15 bp, Homo sapiens
gtccacgttcccggc

SEQ ID NO: 1687 - DNA, 15 bp, Homo sapiens
agtccacgttcccgg

SEQ ID NO: 1688 - DNA, 15 bp, Homo sapiens
tagtccacgttcccg

SEQ ID NO: 1689 - DNA, 15 bp, Homo sapiens
ctagtccacgttccc

SEQ ID NO: 1690 - DNA, 15 bp, Homo sapiens
tctagtccacgttcc

SEQ ID NO: 1691 - DNA, 15 bp, Homo sapiens
ctctagtccacgttc

SEQ ID NO: 1692 - DNA, 15 bp, Homo sapiens
tctctagtccacgtt

SEQ ID NO: 1693 - DNA, 15 bp, Homo sapiens
ctctctagtccacgt

SEQ ID NO: 1694 - DNA, 15 bp, Homo sapiens
actctctagtccacg

SEQ ID NO: 1695 - DNA, 15 bp, Homo sapiens
gactctctagtccac

SEQ ID NO: 1696 - DNA, 15 bp, Homo sapiens
agactctctagtcca

SEQ ID NO: 1697 - DNA, 15 bp, Homo sapiens
cagactctctagtcc

SEQ ID NO: 1698 - DNA, 15 bp, Homo sapiens
gcagactctctagtc

SEQ ID NO: 1699 - DNA, 15 bp, Homo sapiens
cgcagactctctagt

SEQ ID NO: 1700 - DNA, 15 bp, Homo sapiens
ccgcagactctctag

SEQ ID NO: 1701 - DNA, 15 bp, Homo sapiens
gccgcagactctcta

SEQ ID NO: 1702 - DNA, 15 bp, Homo sapiens
cgccgcagactctct

SEQ ID NO: 1703 - DNA, 15 bp, Homo sapiens
gcgccgcagactctc

SEQ ID NO: 1704 - DNA, 15 bp, Homo sapiens
tgcgccgcagactct

SEQ ID NO: 1705 - DNA, 15 bp, Homo sapiens
ctgcgccgcagactc

SEQ ID NO: 1706 - DNA, 15 bp, Homo sapiens
gctgcgccgcagact

SEQ ID NO: 1707 - DNA, 15 bp, Homo sapiens
ggctgcgccgcagac

SEQ ID NO: 1708 - DNA, 15 bp, Homo sapiens
gggctgcgccgcaga

SEQ ID NO: 1709 - DNA, 15 bp, Homo sapiens
ggggctgcgccgcag

SEQ ID NO: 1710 - DNA, 15 bp, Homo sapiens
cggggctgcgccgca

SEQ ID NO: 1711 - DNA, 15 bp, Homo sapiens
tcggggctgcgccgc

SEQ ID NO: 1712 - DNA, 15 bp, Homo sapiens
ctcggggctgcgccg

SEQ ID NO: 1713 - DNA, 15 bp, Homo sapiens
gctcggggctgcgcc

SEQ ID NO: 1714 - DNA, 15 bp, Homo sapiens
ggctcggggctgcgc

SEQ ID NO: 1715 - DNA, 15 bp, Homo sapiens
gggctcggggctgcg

SEQ ID NO: 1716 - DNA, 15 bp, Homo sapiens
tgggctcggggctgc

SEQ ID NO: 1717 - DNA, 15 bp, Homo sapiens
ctgggctcggggctg

SEQ ID NO: 1718 - DNA, 15 bp, Homo sapiens
gctgggctcggggct

SEQ ID NO: 1719 - DNA, 15 bp, Homo sapiens
cgctgggctcggggc

SEQ ID NO: 1720 - DNA, 15 bp, Homo sapiens
gcgctgggctcgggg

SEQ ID NO: 1721 - DNA, 15 bp, Homo sapiens
agcgctgggctcggg

SEQ ID NO: 1722 - DNA, 15 bp, Homo sapiens
aagcgctgggctcgg

SEQ ID NO: 1723 - DNA, 15 bp, Homo sapiens
gaagcgctgggctcg

SEQ ID NO: 1724 - DNA, 15 bp, Homo sapiens
ggaagcgctgggctc

SEQ ID NO: 1725 - DNA, 15 bp, Homo sapiens
gggaagcgctgggct

SEQ ID NO: 1726 - DNA, 15 bp, Homo sapiens
cgggaagcgctgggc

SEQ ID NO: 1727 - DNA, 15 bp, Homo sapiens
gcgggaagcgctggg

SEQ ID NO: 1728 - DNA, 15 bp, Homo sapiens
cgcgggaagcgctgg

SEQ ID NO: 1729 - DNA, 15 bp, Homo sapiens
gcgcgggaagcgctg

SEQ ID NO: 1730 - DNA, 15 bp, Homo sapiens
cgcgcgggaagcgct

SEQ ID NO: 1731 - DNA, 15 bp, Homo sapiens
acgcgcgggaagcgc

SEQ ID NO: 1732 - DNA, 15 bp, Homo sapiens
gacgcgcgggaagcg

SEQ ID NO: 1733 - DNA, 15 bp, Homo sapiens
agacgcgcgggaagc

SEQ ID NO: 1734 - DNA, 15 bp, Homo sapiens
aagacgcgcgggaag

SEQ ID NO: 1735 - DNA, 15 bp, Homo sapiens
taagacgcgcgggaa

SEQ ID NO: 1736 - DNA, 15 bp, Homo sapiens
ctaagacgcgcggga

SEQ ID NO: 1737 - DNA, 15 bp, Homo sapiens
cctaagacgcgcggg

SEQ ID NO: 1738 - DNA, 15 bp, Homo sapiens
gcctaagacgcgcgg

SEQ ID NO: 1739 - DNA, 15 bp, Homo sapiens
ggcctaagacgcgcg

SEQ ID NO: 1740 - DNA, 15 bp, Homo sapiens
cggcctaagacgcgc

SEQ ID NO: 1741 - DNA, 15 bp, Homo sapiens
ccggcctaagacgcg

SEQ ID NO: 1742 - DNA, 15 bp, Homo sapiens
gccggcctaagacgc

SEQ ID NO: 1743 - DNA, 15 bp, Homo sapiens
cgccggcctaagacg

SEQ ID NO: 1744 - DNA, 15 bp, Homo sapiens
ccgccggcctaagac

SEQ ID NO: 1745 - DNA, 15 bp, Homo sapiens
cccgccggcctaaga

SEQ ID NO: 1746 - DNA, 15 bp, Homo sapiens
gcccgccggcctaag

SEQ ID NO: 1747 - DNA, 15 bp, Homo sapiens
ggcccgccggcctaa

SEQ ID NO: 1748 - DNA, 15 bp, Homo sapiens
gggcccgccggccta

SEQ ID NO: 1749 - DNA, 15 bp, Homo sapiens
cgggcccgccggcct

SEQ ID NO: 1750 - DNA, 15 bp, Homo sapiens
ccgggcccgccggcc

SEQ ID NO: 1751 - DNA, 15 bp, Homo sapiens
cccgggcccgccggc

SEQ ID NO: 1752 - DNA, 15 bp, Homo sapiens
gcccgggcccgccgg

SEQ ID NO: 1753 - DNA, 15 bp, Homo sapiens
cgcccgggcccgccg

SEQ ID NO: 1754 - DNA, 15 bp, Homo sapiens
ccgcccgggcccgcc

SEQ ID NO: 1755 - DNA, 15 bp, Homo sapiens
cccgcccgggcccgc

SEQ ID NO: 1756 - DNA, 15 bp, Homo sapiens
ccccgcccgggcccg

SEQ ID NO: 1757 - DNA, 15 bp, Homo sapiens
cccccgcccgggccc

SEQ ID NO: 1758 - DNA, 15 bp, Homo sapiens
tcccccgcccgggcc

SEQ ID NO: 1759 - DNA, 15 bp, Homo sapiens
ttcccccgcccgggc

SEQ ID NO: 1760 - DNA, 15 bp, Homo sapiens
cttcccccgcccggg

SEQ ID NO: 1761 - DNA, 15 bp, Homo sapiens
ccttcccccgcccgg

SEQ ID NO: 1762 - DNA, 15 bp, Homo sapiens
cccttcccccgcccg

SEQ ID NO: 1763 - DNA, 15 bp, Homo sapiens
ccccttcccccgccc

SEQ ID NO: 1764 - DNA, 15 bp, Homo sapiens
tccccttcccccgcc

SEQ ID NO: 1765 - DNA, 15 bp, Homo sapiens
gtccccttcccccgc

SEQ ID NO: 1766 - DNA, 15 bp, Homo sapiens
cgtccccttcccccg

SEQ ID NO: 1767 - DNA, 15 bp, Homo sapiens
gcgtccccttccccc

SEQ ID NO: 1768 - DNA, 15 bp, Homo sapiens
tgcgtccccttcccc

SEQ ID NO: 1769 - DNA, 15 bp, Homo sapiens
ctgcgtccccttccc

SEQ ID NO: 1770 - DNA, 15 bp, Homo sapiens
tctgcgtccccttcc

SEQ ID NO: 1771 - DNA, 15 bp, Homo sapiens
gtctgcgtccccttc

SEQ ID NO: 1772 - DNA, 15 bp, Homo sapiens
ggtctgcgtcccctt

SEQ ID NO: 1773 - DNA, 15 bp, Homo sapiens
cggtctgcgtcccct

SEQ ID NO: 1774 - DNA, 15 bp, Homo sapiens
gcggtctgcgtcccc

SEQ ID NO: 1775 - DNA, 15 bp, Homo sapiens
cgcggtctgcgtccc

SEQ ID NO: 1776 - DNA, 15 bp, Homo sapiens
ccgcggtctgcgtcc

SEQ ID NO: 1777 - DNA, 15 bp, Homo sapiens
tccgcggtctgcgtc

SEQ ID NO: 1778 - DNA, 15 bp, Homo sapiens
gtccgcggtctgcgt

SEQ ID NO: 1779 - DNA, 15 bp, Homo sapiens
ggtccgcggtctgcg

SEQ ID NO: 1780 - DNA, 15 bp, Homo sapiens
gggtccgcggtctgc

SEQ ID NO: 1781 - DNA, 15 bp, Homo sapiens
agggtccgcggtctg

SEQ ID NO: 1782 - DNA, 15 bp, Homo sapiens
tagggtccgcggtct

SEQ ID NO: 1783 - DNA, 15 bp, Homo sapiens
ttagggtccgcggtc

SEQ ID NO: 1784 - DNA, 15 bp, Homo sapiens
cttagggtccgcggt

SEQ ID NO: 1785 - DNA, 15 bp, Homo sapiens
tcttagggtccgcgg

SEQ ID NO: 1786 - DNA, 15 bp, Homo sapiens
gtcttagggtccgcg

SEQ ID NO: 1787 - DNA, 15 bp, Homo sapiens
tgtcttagggtccgc

SEQ ID NO: 1788 - DNA, 15 bp, Homo sapiens
gtgtcttagggtccg

SEQ ID NO: 1789 - DNA, 15 bp, Homo sapiens
ggtgtcttagggtcc

SEQ ID NO: 1790 - DNA, 15 bp, Homo sapiens
aggtgtcttagggtc

SEQ ID NO: 1791 - DNA, 15 bp, Homo sapiens
caggtgtcttagggt

SEQ ID NO: 1792 - DNA, 15 bp, Homo sapiens
gcaggtgtcttaggg

SEQ ID NO: 1793 - DNA, 15 bp, Homo sapiens
agcaggtgtcttagg

SEQ ID NO: 1794 - DNA, 15 bp, Homo sapiens
cagcaggtgtcttag

SEQ ID NO: 1795 - DNA, 15 bp, Homo sapiens
acagcaggtgtctta

SEQ ID NO: 1796 - DNA, 15 bp, Homo sapiens
tacagcaggtgtctt

SEQ ID NO: 1797 - DNA, 15 bp, Homo sapiens
gtacagcaggtgtct

SEQ ID NO: 1798 - DNA, 15 bp, Homo sapiens
ggtacagcaggtgtc

SEQ ID NO: 1799 - DNA, 15 bp, Homo sapiens
gggtacagcaggtgt

SEQ ID NO: 1800 - DNA, 15 bp, Homo sapiens
agggtacagcaggtg

SEQ ID NO: 1801 - DNA, 15 bp, Homo sapiens
gagggtacagcaggt

SEQ ID NO: 1802 - DNA, 15 bp, Homo sapiens
ggagggtacagcagg

SEQ ID NO: 1803 - DNA, 15 bp, Homo sapiens
tggagggtacagcag

SEQ ID NO: 1804 - DNA, 15 bp, Homo sapiens
gtggagggtacagca

SEQ ID NO: 1805 - DNA, 15 bp, Homo sapiens
ggtggagggtacagc

SEQ ID NO: 1806 - DNA, 15 bp, Homo sapiens
gggtggagggtacag

SEQ ID NO: 1807 - DNA, 15 bp, Homo sapiens
ggggtggagggtaca

SEQ ID NO: 1808 - DNA, 15 bp, Homo sapiens
gggggtggagggtac

SEQ ID NO: 1809 - DNA, 15 bp, Homo sapiens
tgggggtggagggta

SEQ ID NO: 1810 - DNA, 15 bp, Homo sapiens
gtgggggtggagggt

SEQ ID NO: 1811 - DNA, 15 bp, Homo sapiens
ggtgggggtggaggg

SEQ ID NO: 1812 - DNA, 15 bp, Homo sapiens
gggtgggggtggagg

SEQ ID NO: 1813 - DNA, 15 bp, Homo sapiens
ggggtgggggtggag

SEQ ID NO: 1814 - DNA, 15 bp, Homo sapiens
tggggtgggggtgga

SEQ ID NO: 1815 - DNA, 15 bp, Homo sapiens
gtggggtgggggtgg

SEQ ID NO: 1816 - DNA, 15 bp, Homo sapiens
ggtggggtgggggtg

SEQ ID NO: 1817 - DNA, 15 bp, Homo sapiens
gggtggggtgggggt

SEQ ID NO: 1818 - DNA, 15 bp, Homo sapiens
tgggtggggtggggg

SEQ ID NO: 1819 - DNA, 15 bp, Homo sapiens
gtgggtggggtgggg

SEQ ID NO: 1820 - DNA, 15 bp, Homo sapiens
ggtgggtggggtggg

SEQ ID NO: 1821 - DNA, 15 bp, Homo sapiens
aggtgggtggggtgg

SEQ ID NO: 1822 - DNA, 15 bp, Homo sapiens
gaggtgggtggggtg

SEQ ID NO: 1823 - DNA, 15 bp, Homo sapiens
ggaggtgggtggggt

SEQ ID NO: 1824 - DNA, 15 bp, Homo sapiens
gggaggtgggtgggg

SEQ ID NO: 1825 - DNA, 15 bp, Homo sapiens
ggggaggtgggtggg

SEQ ID NO: 1826 - DNA, 15 bp, Homo sapiens
gggggaggtgggtgg

SEQ ID NO: 1827 - DNA, 15 bp, Homo sapiens
ggggggaggtgggtg

SEQ ID NO: 1828 - DNA, 15 bp, Homo sapiens
tggggggaggtgggt

SEQ ID NO: 1829 - DNA, 15 bp, Homo sapiens
ttggggggaggtggg

SEQ ID NO: 1830 - DNA, 15 bp, Homo sapiens
gttggggggaggtgg

SEQ ID NO: 1831 - DNA, 15 bp, Homo sapiens
agttggggggaggtg

SEQ ID NO: 1832 - DNA, 15 bp, Homo sapiens
gagttggggggaggt

SEQ ID NO: 1833 - DNA, 15 bp, Homo sapiens
ggagttggggggagg

SEQ ID NO: 1834 - DNA, 15 bp, Homo sapiens
gggagttggggggag

SEQ ID NO: 1835 - DNA, 15 bp, Homo sapiens
agggagttgggggga

SEQ ID NO: 1836 - DNA, 15 bp, Homo sapiens
tagggagttgggggg

SEQ ID NO: 1837 - DNA, 15 bp, Homo sapiens
ctagggagttggggg

SEQ ID NO: 1838 - DNA, 15 bp, Homo sapiens
tctagggagttgggg

SEQ ID NO: 1839 - DNA, 15 bp, Homo sapiens
atctagggagttggg

SEQ ID NO: 1840 - DNA, 15 bp, Homo sapiens
catctagggagttgg

SEQ ID NO: 1841 - DNA, 15 bp, Homo sapiens
acatctagggagttg

SEQ ID NO: 1842 - DNA, 15 bp, Homo sapiens
cacatctagggagtt

SEQ ID NO: 1843 - DNA, 15 bp, Homo sapiens
acacatctagggagt

SEQ ID NO: 1844 - DNA, 15 bp, Homo sapiens
gacacatctagggag

SEQ ID NO: 1845 - DNA, 15 bp, Homo sapiens
cgacacatctaggga

SEQ ID NO: 1846 - DNA, 15 bp, Homo sapiens
acgacacatctaggg

SEQ ID NO: 1847 - DNA, 15 bp, Homo sapiens
cacgacacatctagg

SEQ ID NO: 1848 - DNA, 15 bp, Homo sapiens
ccacgacacatctag

SEQ ID NO: 1849 - DNA, 15 bp, Homo sapiens
cccacgacacatcta

SEQ ID NO: 1850 - DNA, 15 bp, Homo sapiens
gcccacgacacatct

SEQ ID NO: 1851 - DNA, 15 bp, Homo sapiens
cgcccacgacacatc

SEQ ID NO: 1852 - DNA, 15 bp, Homo sapiens
ccgcccacgacacat

SEQ ID NO: 1853 - DNA, 15 bp, Homo sapiens
gccgcccacgacaca

SEQ ID NO: 1854 - DNA, 15 bp, Homo sapiens
agccgcccacgacac

SEQ ID NO: 1855 - DNA, 15 bp, Homo sapiens
cagccgcccacgaca

SEQ ID NO: 1856 - DNA, 15 bp, Homo sapiens
tcagccgcccacgac

SEQ ID NO: 1857 - DNA, 15 bp, Homo sapiens
ttcagccgcccacga

SEQ ID NO: 1858 - DNA, 15 bp, Homo sapiens
gttcagccgcccacg

SEQ ID NO: 1859 - DNA, 15 bp, Homo sapiens
cgttcagccgcccac

SEQ ID NO: 1860 - DNA, 15 bp, Homo sapiens
acgttcagccgccca

SEQ ID NO: 1861 - DNA, 15 bp, Homo sapiens
gacgttcagccgccc

SEQ ID NO: 1862 - DNA, 15 bp, Homo sapiens
cgacgttcagccgcc

SEQ ID NO: 1863 - DNA, 15 bp, Homo sapiens
gcgacgttcagccgc

SEQ ID NO: 1864 - DNA, 15 bp, Homo sapiens
ggcgacgttcagccg

SEQ ID NO: 1865 - DNA, 15 bp, Homo sapiens
gggcgacgttcagcc

SEQ ID NO: 1866 - DNA, 15 bp, Homo sapiens
cgggcgacgttcagc

SEQ ID NO: 1867 - DNA, 15 bp, Homo sapiens
acgggcgacgttcag

SEQ ID NO: 1868 - DNA, 15 bp, Homo sapiens
aacgggcgacgttca

SEQ ID NO: 1869 - DNA, 15 bp, Homo sapiens
aaacgggcgacgttc

SEQ ID NO: 1870 - DNA, 15 bp, Homo sapiens
taaacgggcgacgtt

SEQ ID NO: 1871 - DNA, 15 bp, Homo sapiens
ttaaacgggcgacgt

SEQ ID NO: 1872 - DNA, 15 bp, Homo sapiens
cttaaacgggcgacg

SEQ ID NO: 1873 - DNA, 15 bp, Homo sapiens
ccttaaacgggcgac

SEQ ID NO: 1874 - DNA, 15 bp, Homo sapiens
cccttaaacgggcga

SEQ ID NO: 1875 - DNA, 15 bp, Homo sapiens
ccccttaaacgggcg

SEQ ID NO: 1876 - DNA, 15 bp, Homo sapiens
gccccttaaacgggc

SEQ ID NO: 1877 - DNA, 15 bp, Homo sapiens
cgccccttaaacggg

SEQ ID NO: 1878 - DNA, 15 bp, Homo sapiens
ccgccccttaaacgg

SEQ ID NO: 1879 - DNA, 15 bp, Homo sapiens
cccgccccttaaacg

SEQ ID NO: 1880 - DNA, 15 bp, Homo sapiens
gcccgccccttaaac

SEQ ID NO: 1881 - DNA, 15 bp, Homo sapiens
ggcccgccccttaaa

SEQ ID NO: 1882 - DNA, 15 bp, Homo sapiens
gggcccgccccttaa

SEQ ID NO: 1883 - DNA, 15 bp, Homo sapiens
ggggcccgcccctta

SEQ ID NO: 1884 - DNA, 15 bp, Homo sapiens
cggggcccgcccctt

SEQ ID NO: 1885 - DNA, 15 bp, Homo sapiens
ccggggcccgcccct

SEQ ID NO: 1886 - DNA, 15 bp, Homo sapiens
gccggggcccgcccc

SEQ ID NO: 1887 - DNA, 15 bp, Homo sapiens
agccggggcccgccc

SEQ ID NO: 1888 - DNA, 15 bp, Homo sapiens
gagccggggcccgcc

SEQ ID NO: 1889 - DNA, 15 bp, Homo sapiens
ggagccggggcccgc

SEQ ID NO: 1890 - DNA, 15 bp, Homo sapiens
tggagccggggcccg

SEQ ID NO: 1891 - DNA, 15 bp, Homo sapiens
gtggagccggggccc

SEQ ID NO: 1892 - DNA, 15 bp, Homo sapiens
cgtggagccggggcc

SEQ ID NO: 1893 - DNA, 15 bp, Homo sapiens
acgtggagccggggc

SEQ ID NO: 1894 - DNA, 15 bp, Homo sapiens
cacgtggagccgggg

SEQ ID NO: 1895 - DNA, 15 bp, Homo sapiens
gcacgtggagccggg

SEQ ID NO: 1896 - DNA, 15 bp, Homo sapiens
agcacgtggagccgg

SEQ ID NO: 1897 - DNA, 15 bp, Homo sapiens
aagcacgtggagccg

SEQ ID NO: 1898 - DNA, 15 bp, Homo sapiens
aaagcacgtggagcc

SEQ ID NO: 1899 - DNA, 15 bp, Homo sapiens
gaaagcacgtggagc

SEQ ID NO: 1900 - DNA, 15 bp, Homo sapiens
agaaagcacgtggag

SEQ ID NO: 1901 - DNA, 15 bp, Homo sapiens
cagaaagcacgtgga

SEQ ID NO: 1902 - DNA, 15 bp, Homo sapiens
gcagaaagcacgtgg

SEQ ID NO: 1903 - DNA, 15 bp, Homo sapiens
agcagaaagcacgtg

SEQ ID NO: 1904 - DNA, 15 bp, Homo sapiens
cagcagaaagcacgt

SEQ ID NO: 1905 - DNA, 15 bp, Homo sapiens
tcagcagaaagcacg

SEQ ID NO: 1906 - DNA, 15 bp, Homo sapiens
ctcagcagaaagcac

SEQ ID NO: 1907 - DNA, 15 bp, Homo sapiens
actcagcagaaagca

SEQ ID NO: 1908 - DNA, 15 bp, Homo sapiens
cactcagcagaaagc

SEQ ID NO: 1909 - DNA, 15 bp, Homo sapiens
tcactcagcagaaag

SEQ ID NO: 1910 - DNA, 15 bp, Homo sapiens
gtcactcagcagaaa

SEQ ID NO: 1911 - DNA, 15 bp, Homo sapiens
agtcactcagcagaa

SEQ ID NO: 1912 - DNA, 15 bp, Homo sapiens
cagtcactcagcaga

SEQ ID NO: 1913 - DNA, 15 bp, Homo sapiens
tcagtcactcagcag

SEQ ID NO: 1914 - DNA, 15 bp, Homo sapiens
ttcagtcactcagca

SEQ ID NO: 1915 - DNA, 15 bp, Homo sapiens
gttcagtcactcagc

SEQ ID NO: 1916 - DNA, 15 bp, Homo sapiens
agttcagtcactcag

SEQ ID NO: 1917 - DNA, 15 bp, Homo sapiens
tagttcagtcactca

SEQ ID NO: 1918 - DNA, 15 bp, Homo sapiens
gtagttcagtcactc

SEQ ID NO: 1919 - DNA, 15 bp, Homo sapiens
tgtagttcagtcact

SEQ ID NO: 1920 - DNA, 15 bp, Homo sapiens
atgtagttcagtcac

SEQ ID NO: 1921 - DNA, 15 bp, Homo sapiens
tatgtagttcagtca

SEQ ID NO: 1922 - DNA, 15 bp, Homo sapiens
ttatgtagttcagtc

SEQ ID NO: 1923 - DNA, 15 bp, Homo sapiens
tttatgtagttcagt

SEQ ID NO: 1924 - DNA, 15 bp, Homo sapiens
gtttatgtagttcag

SEQ ID NO: 1925 - DNA, 15 bp, Homo sapiens
tgtttatgtagttca

SEQ ID NO: 1926 - DNA, 15 bp, Homo sapiens
ctgtttatgtagttc

SEQ ID NO: 1927 - DNA, 15 bp, Homo sapiens
tctgtttatgtagtt

SEQ ID NO: 1928 - DNA, 15 bp, Homo sapiens
ctctgtttatgtagt

SEQ ID NO: 1929 - DNA, 15 bp, Homo sapiens
cctctgtttatgtag

SEQ ID NO: 1930 - DNA, 15 bp, Homo sapiens
gcctctgtttatgta

SEQ ID NO: 1931 - DNA, 15 bp, Homo sapiens
ggcctctgtttatgt

SEQ ID NO: 1932 - DNA, 15 bp, Homo sapiens
cggcctctgtttatg

SEQ ID NO: 1933 - DNA, 15 bp, Homo sapiens
ccggcctctgtttat

SEQ ID NO: 1934 - DNA, 15 bp, Homo sapiens
cccggcctctgttta

SEQ ID NO: 1935 - DNA, 15 bp, Homo sapiens
tcccggcctctgttt

SEQ ID NO: 1936 - DNA, 15 bp, Homo sapiens
ttcccggcctctgtt

SEQ ID NO: 1937 - DNA, 15 bp, Homo sapiens
gttcccggcctctgt

SEQ ID NO: 1938 - DNA, 15 bp, Homo sapiens
cgttcccggcctctg

SEQ ID NO: 1939 - DNA, 15 bp, Homo sapiens
ccgttcccggcctct

SEQ ID NO: 1940 - DNA, 15 bp, Homo sapiens
cccgttcccggcctc

SEQ ID NO: 1941 - DNA, 15 bp, Homo sapiens
ccccgttcccggcct

SEQ ID NO: 1942 - DNA, 15 bp, Homo sapiens
gccccgttcccggcc

SEQ ID NO: 1943 - DNA, 15 bp, Homo sapiens
cgccccgttcccggc

SEQ ID NO: 1944 - DNA, 15 bp, Homo sapiens
ccgccccgttcccgg

SEQ ID NO: 1945 - DNA, 15 bp, Homo sapiens
cccgccccgttcccg

SEQ ID NO: 1946 - DNA, 15 bp, Homo sapiens
ccccgccccgttccc

SEQ ID NO: 1947 - DNA, 15 bp, Homo sapiens
tccccgccccgttcc

SEQ ID NO: 1948 - DNA, 15 bp, Homo sapiens
ctccccgccccgttc

SEQ ID NO: 1949 - DNA, 15 bp, Homo sapiens
cctccccgccccgtt

SEQ ID NO: 1950 - DNA, 15 bp, Homo sapiens
tcctccccgccccgt

SEQ ID NO: 1951 - DNA, 15 bp, Homo sapiens
ctcctccccgccccg

SEQ ID NO: 1952 - DNA, 15 bp, Homo sapiens
cctcctccccgcccc

SEQ ID NO: 1953 - DNA, 15 bp, Homo sapiens
ccctcctccccgccc

SEQ ID NO: 1954 - DNA, 15 bp, Homo sapiens
tccctcctccccgcc

SEQ ID NO: 1955 - DNA, 15 bp, Homo sapiens
ctccctcctccccgc

SEQ ID NO: 1956 - DNA, 15 bp, Homo sapiens
tctccctcctccccg

SEQ ID NO: 1957 - DNA, 15 bp, Homo sapiens
ctctccctcctcccc

SEQ ID NO: 1958 - DNA, 15 bp, Homo sapiens
gctctccctcctccc

SEQ ID NO: 1959 - DNA, 15 bp, Homo sapiens
tgctctccctcctcc

SEQ ID NO: 1960 - DNA, 15 bp, Homo sapiens
gtgctctccctcctc

SEQ ID NO: 1961 - DNA, 15 bp, Homo sapiens
tgtgctctccctcct

SEQ ID NO: 1962 - DNA, 15 bp, Homo sapiens
ctgtgctctccctcc

SEQ ID NO: 1963 - DNA, 15 bp, Homo sapiens
cctgtgctctccctc

SEQ ID NO: 1964 - DNA, 15 bp, Homo sapiens
gcctgtgctctccct

SEQ ID NO: 1965 - DNA, 15 bp, Homo sapiens
agcctgtgctctccc

SEQ ID NO: 1966 - DNA, 15 bp, Homo sapiens
aagcctgtgctctcc

SEQ ID NO: 1967 - DNA, 15 bp, Homo sapiens
aaagcctgtgctctc

SEQ ID NO: 1968 - DNA, 15 bp, Homo sapiens
caaagcctgtgctct

SEQ ID NO: 1969 - DNA, 15 bp, Homo sapiens
tcaaagcctgtgctc

SEQ ID NO: 1970 - DNA, 15 bp, Homo sapiens
gtcaaagcctgtgct

SEQ ID NO: 1971 - DNA, 15 bp, Homo sapiens
ggtcaaagcctgtgc

SEQ ID NO: 1972 - DNA, 15 bp, Homo sapiens
cggtcaaagcctgtg

SEQ ID NO: 1973 - DNA, 15 bp, Homo sapiens
tcggtcaaagcctgt

SEQ ID NO: 1974 - DNA, 15 bp, Homo sapiens
atcggtcaaagcctg

SEQ ID NO: 1975 - DNA, 15 bp, Homo sapiens
tatcggtcaaagcct

SEQ ID NO: 1976 - DNA, 15 bp, Homo sapiens
ctatcggtcaaagcc

SEQ ID NO: 1977 - DNA, 15 bp, Homo sapiens
actatcggtcaaagc

SEQ ID NO: 1978 - DNA, 15 bp, Homo sapiens
tactatcggtcaaag

SEQ ID NO: 1979 - DNA, 15 bp, Homo sapiens
ttactatcggtcaaa

SEQ ID NO: 1980 - DNA, 15 bp, Homo sapiens
gttactatcggtcaa

SEQ ID NO: 1981 - DNA, 15 bp, Homo sapiens
ggttactatcggtca

SEQ ID NO: 1982 - DNA, 15 bp, Homo sapiens
aggttactatcggtc

SEQ ID NO: 1983 - DNA, 15 bp, Homo sapiens
gaggttactatcggt

SEQ ID NO: 1984 - DNA, 15 bp, Homo sapiens
agaggttactatcgg

SEQ ID NO: 1985 - DNA, 15 bp, Homo sapiens
cagaggttactatcg

SEQ ID NO: 1986 - DNA, 15 bp, Homo sapiens
gcagaggttactatc

SEQ ID NO: 1987 - DNA, 15 bp, Homo sapiens
cgcagaggttactat

SEQ ID NO: 1988 - DNA, 15 bp, Homo sapiens
gcgcagaggttacta

SEQ ID NO: 1989 - DNA, 15 bp, Homo sapiens
agcgcagaggttact

SEQ ID NO: 1990 - DNA, 15 bp, Homo sapiens
gagcgcagaggttac

SEQ ID NO: 1991 - DNA, 15 bp, Homo sapiens
cgagcgcagaggtta

SEQ ID NO: 1992 - DNA, 15 bp, Homo sapiens
ccgagcgcagaggtt

SEQ ID NO: 1993 - DNA, 15 bp, Homo sapiens
accgagcgcagaggt

SEQ ID NO: 1994 - DNA, 15 bp, Homo sapiens
caccgagcgcagagg

SEQ ID NO: 1995 - DNA, 15 bp, Homo sapiens
gcaccgagcgcagag

SEQ ID NO: 1996 - DNA, 15 bp, Homo sapiens
tgcaccgagcgcaga

SEQ ID NO: 1997 - DNA, 15 bp, Homo sapiens
ctgcaccgagcgcag

SEQ ID NO: 1998 - DNA, 15 bp, Homo sapiens
gctgcaccgagcgca

SEQ ID NO: 1999 - DNA, 15 bp, Homo sapiens
ggctgcaccgagcgc

SEQ ID NO: 2000 - DNA, 15 bp, Homo sapiens
cggctgcaccgagcg

SEQ ID NO: 2001 - DNA, 15 bp, Homo sapiens
tcggctgcaccgagc

SEQ ID NO: 2002 - DNA, 15 bp, Homo sapiens
ttcggctgcaccgag

SEQ ID NO: 2003 - DNA, 15 bp, Homo sapiens
attcggctgcaccga

SEQ ID NO: 2004 - DNA, 15 bp, Homo sapiens
gattcggctgcaccg

SEQ ID NO: 2005 - DNA, 15 bp, Homo sapiens
agattcggctgcacc

SEQ ID NO: 2006 - DNA, 15 bp, Homo sapiens
tagattcggctgcac

SEQ ID NO: 2007 - DNA, 15 bp, Homo sapiens
atagattcggctgca

SEQ ID NO: 2008 - DNA, 15 bp, Homo sapiens
tatagattcggctgc

SEQ ID NO: 2009 - DNA, 15 bp, Homo sapiens
ttatagattcggctg

SEQ ID NO: 2010 - DNA, 15 bp, Homo sapiens
tttatagattcggct

SEQ ID NO: 2011 - DNA, 15 bp, Homo sapiens
ttttatagattcggc

SEQ ID NO: 2012 - DNA, 15 bp, Homo sapiens
cttttatagattcgg

SEQ ID NO: 2013 - DNA, 15 bp, Homo sapiens
ccttttatagattcg

SEQ ID NO: 2014 - DNA, 15 bp, Homo sapiens
tccttttatagattc

SEQ ID NO: 2015 - DNA, 15 bp, Homo sapiens
ttccttttatagatt

SEQ ID NO: 2016 - DNA, 15 bp, Homo sapiens
gttccttttatagat

SEQ ID NO: 2017 - DNA, 15 bp, Homo sapiens
agttccttttataga

SEQ ID NO: 2018 - DNA, 15 bp, Homo sapiens
tagttccttttatag

SEQ ID NO: 2019 - DNA, 15 bp, Homo sapiens
ctagttccttttata

SEQ ID NO: 2020 - DNA, 15 bp, Homo sapiens
actagttccttttat

SEQ ID NO: 2021 - DNA, 15 bp, Homo sapiens
gactagttcctttta

SEQ ID NO: 2022 - DNA, 15 bp, Homo sapiens
ggactagttcctttt

SEQ ID NO: 2023 - DNA, 15 bp, Homo sapiens
gggactagttccttt

SEQ ID NO: 2024 - DNA, 15 bp, Homo sapiens
cgggactagttcctt

SEQ ID NO: 2025 - DNA, 15 bp, Homo sapiens
ccgggactagttcct

SEQ ID NO: 2026 - DNA, 15 bp, Homo sapiens
gccgggactagttcc

SEQ ID NO: 2027 - DNA, 15 bp, Homo sapiens
tgccgggactagttc

SEQ ID NO: 2028 - DNA, 15 bp, Homo sapiens
ttgccgggactagtt

SEQ ID NO: 2029 - DNA, 15 bp, Homo sapiens
tttgccgggactagt

SEQ ID NO: 2030 - DNA, 15 bp, Homo sapiens
ttttgccgggactag

SEQ ID NO: 2031 - DNA, 15 bp, Homo sapiens
tttttgccgggacta

SEQ ID NO: 2032 - DNA, 15 bp, Homo sapiens
gtttttgccgggact

SEQ ID NO: 2033 - DNA, 15 bp, Homo sapiens
ggtttttgccgggac

SEQ ID NO: 2034 - DNA, 15 bp, Homo sapiens
gggtttttgccggga

SEQ ID NO: 2035 - DNA, 15 bp, Homo sapiens
ggggtttttgccggg

SEQ ID NO: 2036 - DNA, 15 bp, Homo sapiens
cggggtttttgccgg

SEQ ID NO: 2037 - DNA, 15 bp, Homo sapiens
acggggtttttgccg

SEQ ID NO: 2038 - DNA, 15 bp, Homo sapiens
tacggggtttttgcc

SEQ ID NO: 2039 - DNA, 15 bp, Homo sapiens
ttacggggtttttgc

SEQ ID NO: 2040 - DNA, 15 bp, Homo sapiens
attacggggtttttg

SEQ ID NO: 2041 - DNA, 15 bp, Homo sapiens
aattacggggttttt

SEQ ID NO: 2042 - DNA, 15 bp, Homo sapiens
caattacggggtttt

SEQ ID NO: 2043 - DNA, 15 bp, Homo sapiens
gcaattacggggttt

SEQ ID NO: 2044 - DNA, 15 bp, Homo sapiens
cgcaattacggggtt

SEQ ID NO: 2045 - DNA, 15 bp, Homo sapiens
tcgcaattacggggt

SEQ ID NO: 2046 - DNA, 15 bp, Homo sapiens
ctcgcaattacgggg

SEQ ID NO: 2047 - DNA, 15 bp, Homo sapiens
gctcgcaattacggg

SEQ ID NO: 2048 - DNA, 15 bp, Homo sapiens
cgctcgcaattacgg

SEQ ID NO: 2049 - DNA, 15 bp, Homo sapiens
tcgctcgcaattacg

SEQ ID NO: 2050 - DNA, 15 bp, Homo sapiens
ctcgctcgcaattac

SEQ ID NO: 2051 - DNA, 15 bp, Homo sapiens
tctcgctcgcaatta

SEQ ID NO: 2052 - DNA, 15 bp, Homo sapiens
ctctcgctcgcaatt

SEQ ID NO: 2053 - DNA, 15 bp, Homo sapiens
actctcgctcgcaat

SEQ ID NO: 2054 - DNA, 15 bp, Homo sapiens
cactctcgctcgcaa

SEQ ID NO: 2055 - DNA, 15 bp, Homo sapiens
tcactctcgctcgca

SEQ ID NO: 2056 - DNA, 15 bp, Homo sapiens
ctcactctcgctcgc

SEQ ID NO: 2057 - DNA, 15 bp, Homo sapiens
actcactctcgctcg

SEQ ID NO: 2058 - DNA, 15 bp, Homo sapiens
cactcactctcgctc

SEQ ID NO: 2059 - DNA, 15 bp, Homo sapiens
ccactcactctcgct

SEQ ID NO: 2060 - DNA, 15 bp, Homo sapiens
cccactcactctcgc

SEQ ID NO: 2061 - DNA, 15 bp, Homo sapiens
ccccactcactctcg

SEQ ID NO: 2062 - DNA, 15 bp, Homo sapiens
gccccactcactctc

SEQ ID NO: 2063 - DNA, 15 bp, Homo sapiens
ggccccactcactct

SEQ ID NO: 2064 - DNA, 15 bp, Homo sapiens
cggccccactcactc

SEQ ID NO: 2065 - DNA, 15 bp, Homo sapiens
ccggccccactcact

SEQ ID NO: 2066 - DNA, 15 bp, Homo sapiens
cccggccccactcac

SEQ ID NO: 2067 - DNA, 15 bp, Homo sapiens
tcccggccccactca

SEQ ID NO: 2068 - DNA, 15 bp, Homo sapiens
gtcccggccccactc

SEQ ID NO: 2069 - DNA, 15 bp, Homo sapiens
ggtcccggccccact

SEQ ID NO: 2070 - DNA, 15 bp, Homo sapiens
gggtcccggccccac

SEQ ID NO: 2071 - DNA, 15 bp, Homo sapiens
cgggtcccggcccca

SEQ ID NO: 2072 - DNA, 15 bp, Homo sapiens
gcgggtcccggcccc

SEQ ID NO: 2073 - DNA, 15 bp, Homo sapiens
tgcgggtcccggccc

SEQ ID NO: 2074 - DNA, 15 bp, Homo sapiens
ctgcgggtcccggcc

SEQ ID NO: 2075 - DNA, 15 bp, Homo sapiens
tctgcgggtcccggc

SEQ ID NO: 2076 - DNA, 15 bp, Homo sapiens
ctctgcgggtcccgg

SEQ ID NO: 2077 - DNA, 15 bp, Homo sapiens
gctctgcgggtcccg

SEQ ID NO: 2078 - DNA, 15 bp, Homo sapiens
ggctctgcgggtccc

SEQ ID NO: 2079 - DNA, 15 bp, Homo sapiens
cggctctgcgggtcc

SEQ ID NO: 2080 - DNA, 15 bp, Homo sapiens
tcggctctgcgggtc

SEQ ID NO: 2081 - DNA, 15 bp, Homo sapiens
ctcggctctgcgggt

SEQ ID NO: 2082 - DNA, 15 bp, Homo sapiens
gctcggctctgcggg

SEQ ID NO: 2083 - DNA, 15 bp, Homo sapiens
ggctcggctctgcgg

SEQ ID NO: 2084 - DNA, 15 bp, Homo sapiens
cggctcggctctgcg

SEQ ID NO: 2085 - DNA, 15 bp, Homo sapiens
tcggctcggctctgc

SEQ ID NO: 2086 - DNA, 15 bp, Homo sapiens
gtcggctcggctctg

SEQ ID NO: 2087 - DNA, 15 bp, Homo sapiens
ggtcggctcggctct

SEQ ID NO: 2088 - DNA, 15 bp, Homo sapiens
gggtcggctcggctc

SEQ ID NO: 2089 - DNA, 15 bp, Homo sapiens
agggtcggctcggct

SEQ ID NO: 2090 - DNA, 15 bp, Homo sapiens
aagggtcggctcggc

SEQ ID NO: 2091 - DNA, 15 bp, Homo sapiens
gaagggtcggctcgg

SEQ ID NO: 2092 - DNA, 15 bp, Homo sapiens
agaagggtcggctcg

SEQ ID NO: 2093 - DNA, 15 bp, Homo sapiens
gagaagggtcggctc

SEQ ID NO: 2094 - DNA, 15 bp, Homo sapiens
agagaagggtcggct

SEQ ID NO: 2095 - DNA, 15 bp, Homo sapiens
gagagaagggtcggc

SEQ ID NO: 2096 - DNA, 15 bp, Homo sapiens
ggagagaagggtcgg

SEQ ID NO: 2097 - DNA, 15 bp, Homo sapiens
gggagagaagggtcg

SEQ ID NO: 2098 - DNA, 15 bp, Homo sapiens
cgggagagaagggtc

SEQ ID NO: 2099 - DNA, 15 bp, Homo sapiens
ccgggagagaagggt

SEQ ID NO: 2100 - DNA, 15 bp, Homo sapiens
cccgggagagaaggg

SEQ ID NO: 2101 - DNA, 15 bp, Homo sapiens
gcccgggagagaagg

SEQ ID NO: 2102 - DNA, 15 bp, Homo sapiens
agcccgggagagaag

SEQ ID NO: 2103 - DNA, 15 bp, Homo sapiens
cagcccgggagagaa

SEQ ID NO: 2104 - DNA, 15 bp, Homo sapiens
gcagcccgggagaga

SEQ ID NO: 2105 - DNA, 15 bp, Homo sapiens
cgcagcccgggagag

SEQ ID NO: 2106 - DNA, 15 bp, Homo sapiens
ccgcagcccgggaga

SEQ ID NO: 2107 - DNA, 15 bp, Homo sapiens
gccgcagcccgggag

SEQ ID NO: 2108 - DNA, 15 bp, Homo sapiens
tgccgcagcccggga

SEQ ID NO: 2109 - DNA, 15 bp, Homo sapiens
ctgccgcagcccggg

SEQ ID NO: 2110 - DNA, 15 bp, Homo sapiens
cctgccgcagcccgg

SEQ ID NO: 2111 - DNA, 15 bp, Homo sapiens
ccctgccgcagcccg

SEQ ID NO: 2112 - DNA, 15 bp, Homo sapiens
gccctgccgcagccc

SEQ ID NO: 2113 - DNA, 15 bp, Homo sapiens
tgccctgccgcagcc

SEQ ID NO: 2114 - DNA, 15 bp, Homo sapiens
ctgccctgccgcagc

SEQ ID NO: 2115 - DNA, 15 bp, Homo sapiens
cctgccctgccgcag

SEQ ID NO: 2116 - DNA, 15 bp, Homo sapiens
ccctgccctgccgca

SEQ ID NO: 2117 - DNA, 15 bp, Homo sapiens
gccctgccctgccgc

SEQ ID NO: 2118 - DNA, 15 bp, Homo sapiens
cgccctgccctgccg

SEQ ID NO: 2119 - DNA, 15 bp, Homo sapiens
ccgccctgccctgcc

SEQ ID NO: 2120 - DNA, 15 bp, Homo sapiens
cccgccctgccctgc

SEQ ID NO: 2121 - DNA, 15 bp, Homo sapiens
ccccgccctgccctg

SEQ ID NO: 2122 - DNA, 15 bp, Homo sapiens
tccccgccctgccct

SEQ ID NO: 2123 - DNA, 15 bp, Homo sapiens
ctccccgccctgccc

SEQ ID NO: 2124 - DNA, 15 bp, Homo sapiens
gctccccgccctgcc

SEQ ID NO: 2125 - DNA, 15 bp, Homo sapiens
agctccccgccctgc

SEQ ID NO: 2126 - DNA, 15 bp, Homo sapiens
gagctccccgccctg

SEQ ID NO: 2127 - DNA, 15 bp, Homo sapiens
ggagctccccgccct

SEQ ID NO: 2128 - DNA, 15 bp, Homo sapiens
cggagctccccgccc

SEQ ID NO: 2129 - DNA, 15 bp, Homo sapiens
gcggagctccccgcc

SEQ ID NO: 2130 - DNA, 15 bp, Homo sapiens
cgcggagctccccgc

SEQ ID NO: 2131 - DNA, 15 bp, Homo sapiens
gcgcggagctccccg

SEQ ID NO: 2132 - DNA, 15 bp, Homo sapiens
tgcgcggagctcccc

SEQ ID NO: 2133 - DNA, 15 bp, Homo sapiens
gtgcgcggagctccc

SEQ ID NO: 2134 - DNA, 15 bp, Homo sapiens
ggtgcgcggagctcc

SEQ ID NO: 2135 - DNA, 15 bp, Homo sapiens
tggtgcgcggagctc

SEQ ID NO: 2136 - DNA, 15 bp, Homo sapiens
ttggtgcgcggagct

SEQ ID NO: 2137 - DNA, 15 bp, Homo sapiens
gttggtgcgcggagc

SEQ ID NO: 2138 - DNA, 15 bp, Homo sapiens
tgttggtgcgcggag

SEQ ID NO: 2139 - DNA, 15 bp, Homo sapiens
ctgttggtgcgcgga

SEQ ID NO: 2140 - DNA, 15 bp, Homo sapiens
tctgttggtgcgcgg

SEQ ID NO: 2141 - DNA, 15 bp, Homo sapiens
ctctgttggtgcgcg

SEQ ID NO: 2142 - DNA, 15 bp, Homo sapiens
gctctgttggtgcgc

SEQ ID NO: 2143 - DNA, 15 bp, Homo sapiens
ggctctgttggtgcg

SEQ ID NO: 2144 - DNA, 15 bp, Homo sapiens
cggctctgttggtgc

SEQ ID NO: 2145 - DNA, 15 bp, Homo sapiens
ccggctctgttggtg

SEQ ID NO: 2146 - DNA, 15 bp, Homo sapiens
accggctctgttggt

SEQ ID NO: 2147 - DNA, 15 bp, Homo sapiens
aaccggctctgttgg

SEQ ID NO: 2148 - DNA, 15 bp, Homo sapiens
gaaccggctctgttg

SEQ ID NO: 2149 - DNA, 15 bp, Homo sapiens
agaaccggctctgtt

SEQ ID NO: 2150 - DNA, 15 bp, Homo sapiens
gagaaccggctctgt

SEQ ID NO: 2151 - DNA, 15 bp, Homo sapiens
tgagaaccggctctg

SEQ ID NO: 2152 - DNA, 15 bp, Homo sapiens
ctgagaaccggctct

SEQ ID NO: 2153 - DNA, 15 bp, Homo sapiens
cctgagaaccggctc

SEQ ID NO: 2154 - DNA, 15 bp, Homo sapiens
ccctgagaaccggct

SEQ ID NO: 2155 - DNA, 15 bp, Homo sapiens
gccctgagaaccggc

SEQ ID NO: 2156 - DNA, 15 bp, Homo sapiens
cgccctgagaaccgg

SEQ ID NO: 2157 - DNA, 15 bp, Homo sapiens
gcgccctgagaaccg

SEQ ID NO: 2158 - DNA, 15 bp, Homo sapiens
agcgccctgagaacc

SEQ ID NO: 2159 - DNA, 15 bp, Homo sapiens
aagcgccctgagaac

SEQ ID NO: 2160 - DNA, 15 bp, Homo sapiens
aaagcgccctgagaa

SEQ ID NO: 2161 - DNA, 15 bp, Homo sapiens
caaagcgccctgaga

SEQ ID NO: 2162 - DNA, 15 bp, Homo sapiens
gcaaagcgccctgag

SEQ ID NO: 2163 - DNA, 15 bp, Homo sapiens
agcaaagcgccctga

SEQ ID NO: 2164 - DNA, 15 bp, Homo sapiens
gagcaaagcgccctg

SEQ ID NO: 2165 - DNA, 15 bp, Homo sapiens
ggagcaaagcgccct

SEQ ID NO: 2166 - DNA, 15 bp, Homo sapiens
aggagcaaagcgccc

SEQ ID NO: 2167 - DNA, 15 bp, Homo sapiens
aaggagcaaagcgcc

SEQ ID NO: 2168 - DNA, 15 bp, Homo sapiens
caaggagcaaagcgc

SEQ ID NO: 2169 - DNA, 15 bp, Homo sapiens
acaaggagcaaagcg

SEQ ID NO: 2170 - DNA, 15 bp, Homo sapiens
aacaaggagcaaagc

SEQ ID NO: 2171 - DNA, 15 bp, Homo sapiens
aaacaaggagcaaag

SEQ ID NO: 2172 - DNA, 15 bp, Homo sapiens
aaaacaaggagcaaa

SEQ ID NO: 2173 - DNA, 15 bp, Homo sapiens
aaaaacaaggagcaa

SEQ ID NO: 2174 - DNA, 15 bp, Homo sapiens
aaaaaacaaggagca

SEQ ID NO: 2175 - DNA, 15 bp, Homo sapiens
gaaaaaacaaggagc

SEQ ID NO: 2176 - DNA, 15 bp, Homo sapiens
ggaaaaaacaaggag

SEQ ID NO: 2177 - DNA, 15 bp, Homo sapiens
gggaaaaaacaagga

SEQ ID NO: 2178 - DNA, 15 bp, Homo sapiens
ggggaaaaaacaagg

SEQ ID NO: 2179 - DNA, 15 bp, Homo sapiens
cggggaaaaaacaag

SEQ ID NO: 2180 - DNA, 15 bp, Homo sapiens
ccggggaaaaaacaa

SEQ ID NO: 2181 - DNA, 15 bp, Homo sapiens
accggggaaaaaaca

SEQ ID NO: 2182 - DNA, 15 bp, Homo sapiens
aaccggggaaaaaac

SEQ ID NO: 2183 - DNA, 15 bp, Homo sapiens
gaaccggggaaaaaa

SEQ ID NO: 2184 - DNA, 15 bp, Homo sapiens
agaaccggggaaaaa

SEQ ID NO: 2185 - DNA, 15 bp, Homo sapiens
cagaaccggggaaaa

SEQ ID NO: 2186 - DNA, 15 bp, Homo sapiens
acagaaccggggaaa

SEQ ID NO: 2187 - DNA, 15 bp, Homo sapiens
aacagaaccggggaa

SEQ ID NO: 2188 - DNA, 15 bp, Homo sapiens
aaacagaaccgggga

SEQ ID NO: 2189 - DNA, 15 bp, Homo sapiens
aaaacagaaccgggg

SEQ ID NO: 2190 - DNA, 15 bp, Homo sapiens
gaaaacagaaccggg

SEQ ID NO: 2191 - DNA, 15 bp, Homo sapiens
agaaaacagaaccgg

SEQ ID NO: 2192 - DNA, 15 bp, Homo sapiens
gagaaaacagaaccg

SEQ ID NO: 2193 - DNA, 15 bp, Homo sapiens
ggagaaaacagaacc

SEQ ID NO: 2194 - DNA, 15 bp, Homo sapiens
gggagaaaacagaac

SEQ ID NO: 2195 - DNA, 15 bp, Homo sapiens
ggggagaaaacagaa

SEQ ID NO: 2196 - DNA, 15 bp, Homo sapiens
aggggagaaaacaga

SEQ ID NO: 2197 - DNA, 15 bp, Homo sapiens
aaggggagaaaacag

SEQ ID NO: 2198 - DNA, 15 bp, Homo sapiens
gaaggggagaaaaca

SEQ ID NO: 2199 - DNA, 15 bp, Homo sapiens
agaaggggagaaaac

SEQ ID NO: 2200 - DNA, 15 bp, Homo sapiens
gagaaggggagaaaa

SEQ ID NO: 2201 - DNA, 15 bp, Homo sapiens
ggagaaggggagaaa

SEQ ID NO: 2202 - DNA, 15 bp, Homo sapiens
cggagaaggggagaa

SEQ ID NO: 2203 - DNA, 15 bp, Homo sapiens
ccggagaaggggaga

SEQ ID NO: 2204 - DNA, 15 bp, Homo sapiens
tccggagaaggggag

SEQ ID NO: 2205 - DNA, 15 bp, Homo sapiens
ttccggagaagggga

SEQ ID NO: 2206 - DNA, 15 bp, Homo sapiens
cttccggagaagggg

SEQ ID NO: 2207 - DNA, 15 bp, Homo sapiens
ccttccggagaaggg

SEQ ID NO: 2208 - DNA, 15 bp, Homo sapiens
gccttccggagaagg

SEQ ID NO: 2209 - DNA, 15 bp, Homo sapiens
agccttccggagaag

SEQ ID NO: 2210 - DNA, 15 bp, Homo sapiens
aagccttccggagaa

SEQ ID NO: 2211 - DNA, 15 bp, Homo sapiens
caagccttccggaga

SEQ ID NO: 2212 - DNA, 15 bp, Homo sapiens
acaagccttccggag

SEQ ID NO: 2213 - DNA, 15 bp, Homo sapiens
gacaagccttccgga

SEQ ID NO: 2214 - DNA, 15 bp, Homo sapiens
tgacaagccttccgg

SEQ ID NO: 2215 - DNA, 15 bp, Homo sapiens
ttgacaagccttccg

SEQ ID NO: 2216 - DNA, 15 bp, Homo sapiens
cttgacaagccttcc

SEQ ID NO: 2217 - DNA, 15 bp, Homo sapiens
ccttgacaagccttc

SEQ ID NO: 2218 - DNA, 15 bp, Homo sapiens
cccttgacaagcctt

SEQ ID NO: 2219 - DNA, 15 bp, Homo sapiens
ccccttgacaagcct

SEQ ID NO: 2220 - DNA, 15 bp, Homo sapiens
accccttgacaagcc

SEQ ID NO: 2221 - DNA, 15 bp, Homo sapiens
taccccttgacaagc

SEQ ID NO: 2222 - DNA, 15 bp, Homo sapiens
ctaccccttgacaag

SEQ ID NO: 2223 - DNA, 15 bp, Homo sapiens
cctaccccttgacaa

SEQ ID NO: 2224 - DNA, 15 bp, Homo sapiens
tcctaccccttgaca

SEQ ID NO: 2225 - DNA, 15 bp, Homo sapiens
ctcctaccccttgac

SEQ ID NO: 2226 - DNA, 15 bp, Homo sapiens
tctcctaccccttga

SEQ ID NO: 2227 - DNA, 15 bp, Homo sapiens
ttctcctaccccttg

SEQ ID NO: 2228 - DNA, 15 bp, Homo sapiens
tttctcctacccctt

SEQ ID NO: 2229 - DNA, 15 bp, Homo sapiens
ctttctcctacccct

SEQ ID NO: 2230 - DNA, 15 bp, Homo sapiens
tctttctcctacccc

SEQ ID NO: 2231 - DNA, 15 bp, Homo sapiens
ctctttctcctaccc

SEQ ID NO: 2232 - DNA, 15 bp, Homo sapiens
tctctttctcctacc

SEQ ID NO: 2233 - DNA, 15 bp, Homo sapiens
gtctctttctcctac

SEQ ID NO: 2234 - DNA, 15 bp, Homo sapiens
cgtctctttctccta

SEQ ID NO: 2235 - DNA, 15 bp, Homo sapiens
gcgtctctttctcct

SEQ ID NO: 2236 - DNA, 15 bp, Homo sapiens
tgcgtctctttctcc

SEQ ID NO: 2237 - DNA, 15 bp, Homo sapiens
ttgcgtctctttctc

SEQ ID NO: 2238 - DNA, 15 bp, Homo sapiens
tttgcgtctctttct

SEQ ID NO: 2239 - DNA, 15 bp, Homo sapiens
gtttgcgtctctttc

SEQ ID NO: 2240 - DNA, 15 bp, Homo sapiens
tgtttgcgtctcttt

SEQ ID NO: 2241 - DNA, 15 bp, Homo sapiens
gtgtttgcgtctctt

SEQ ID NO: 2242 - DNA, 15 bp, Homo sapiens
tgtgtttgcgtctct

SEQ ID NO: 2243 - DNA, 15 bp, Homo sapiens
ttgtgtttgcgtctc

SEQ ID NO: 2244 - DNA, 15 bp, Homo sapiens
tttgtgtttgcgtct

SEQ ID NO: 2245 - DNA, 15 bp, Homo sapiens
ttttgtgtttgcgtc

SEQ ID NO: 2246 - DNA, 15 bp, Homo sapiens
cttttgtgtttgcgt

SEQ ID NO: 2247 - DNA, 15 bp, Homo sapiens
acttttgtgtttgcg

SEQ ID NO: 2248 - DNA, 15 bp, Homo sapiens
cacttttgtgtttgc

SEQ ID NO: 2249 - DNA, 15 bp, Homo sapiens
ccacttttgtgtttg

SEQ ID NO: 2250 - DNA, 15 bp, Homo sapiens
tccacttttgtgttt

SEQ ID NO: 2251 - DNA, 15 bp, Homo sapiens
ttccacttttgtgtt

SEQ ID NO: 2252 - DNA, 15 bp, Homo sapiens
tttccacttttgtgt

SEQ ID NO: 2253 - DNA, 15 bp, Homo sapiens
ttttccacttttgtg

SEQ ID NO: 2254 - DNA, 15 bp, Homo sapiens
gttttccacttttgt

SEQ ID NO: 2255 - DNA, 15 bp, Homo sapiens
tgttttccacttttg

SEQ ID NO: 2256 - DNA, 15 bp, Homo sapiens
ctgttttccactttt

SEQ ID NO: 2257 - DNA, 15 bp, Homo sapiens
cctgttttccacttt

SEQ ID NO: 2258 - DNA, 15 bp, Homo sapiens
acctgttttccactt

SEQ ID NO: 2259 - DNA, 15 bp, Homo sapiens
tacctgttttccact

SEQ ID NO: 2260 - DNA, 15 bp, Homo sapiens
ttacctgttttccac

SEQ ID NO: 2261 - DNA, 15 bp, Homo sapiens
cttacctgttttcca

SEQ ID NO: 2262 - DNA, 15 bp, Homo sapiens
tcttacctgttttcc

SEQ ID NO: 2263 - DNA, 15 bp, Homo sapiens
ctcttacctgttttc

SEQ ID NO: 2264 - DNA, 15 bp, Homo sapiens
cctcttacctgtttt

SEQ ID NO: 2265 - DNA, 15 bp, Homo sapiens
gcctcttacctgttt

SEQ ID NO: 2266 - DNA, 15 bp, Homo sapiens
agcctcttacctgtt

SEQ ID NO: 2267 - DNA, 15 bp, Homo sapiens
gagcctcttacctgt

SEQ ID NO: 2268 - DNA, 15 bp, Homo sapiens
agagcctcttacctg

SEQ ID NO: 2269 - DNA, 15 bp, Homo sapiens
gagagcctcttacct

SEQ ID NO: 2270 - DNA, 15 bp, Homo sapiens
ggagagcctcttacc

SEQ ID NO: 2271 - DNA, 15 bp, Homo sapiens
tggagagcctcttac

SEQ ID NO: 2272 - DNA, 15 bp, Homo sapiens
ctggagagcctctta

SEQ ID NO: 2273 - DNA, 15 bp, Homo sapiens
actggagagcctctt

SEQ ID NO: 2274 - DNA, 15 bp, Homo sapiens
cactggagagcctct

SEQ ID NO: 2275 - DNA, 15 bp, Homo sapiens
tcactggagagcctc

SEQ ID NO: 2276 - DNA, 15 bp, Homo sapiens
gtcactggagagcct

SEQ ID NO: 2277 - DNA, 15 bp, Homo sapiens
agtcactggagagcc

SEQ ID NO: 2278 - DNA, 15 bp, Homo sapiens
aagtcactggagagc

SEQ ID NO: 2279 - DNA, 15 bp, Homo sapiens
taagtcactggagag

SEQ ID NO: 2280 - DNA, 15 bp, Homo sapiens
gtaagtcactggaga

SEQ ID NO: 2281 - DNA, 15 bp, Homo sapiens
agtaagtcactggag

SEQ ID NO: 2282 - DNA, 15 bp, Homo sapiens
aagtaagtcactgga

SEQ ID NO: 2283 - DNA, 15 bp, Homo sapiens
caagtaagtcactgg

SEQ ID NO: 2284 - DNA, 15 bp, Homo sapiens
ccaagtaagtcactg

SEQ ID NO: 2285 - DNA, 15 bp, Homo sapiens
cccaagtaagtcact

SEQ ID NO: 2286 - DNA, 15 bp, Homo sapiens
gcccaagtaagtcac

SEQ ID NO: 2287 - DNA, 15 bp, Homo sapiens
cgcccaagtaagtca

SEQ ID NO: 2288 - DNA, 15 bp, Homo sapiens
acgcccaagtaagtc

SEQ ID NO: 2289 - DNA, 15 bp, Homo sapiens
aacgcccaagtaagt

SEQ ID NO: 2290 - DNA, 15 bp, Homo sapiens
taacgcccaagtaag

SEQ ID NO: 2291 - DNA, 15 bp, Homo sapiens
ataacgcccaagtaa

SEQ ID NO: 2292 - DNA, 15 bp, Homo sapiens
aataacgcccaagta

SEQ ID NO: 2293 - DNA, 15 bp, Homo sapiens
caataacgcccaagt

SEQ ID NO: 2294 - DNA, 15 bp, Homo sapiens
acaataacgcccaag

SEQ ID NO: 2295 - DNA, 15 bp, Homo sapiens
aacaataacgcccaa

SEQ ID NO: 2296 - DNA, 15 bp, Homo sapiens
aaacaataacgccca

SEQ ID NO: 2297 - DNA, 15 bp, Homo sapiens
aaaacaataacgccc

SEQ ID NO: 2298 - DNA, 15 bp, Homo sapiens
caaaacaataacgcc

SEQ ID NO: 2299 - DNA, 15 bp, Homo sapiens
acaaaacaataacgc

SEQ ID NO: 2300 - DNA, 15 bp, Homo sapiens
aacaaaacaataacg

SEQ ID NO: 2301 - DNA, 15 bp, Homo sapiens
aaacaaaacaataac

SEQ ID NO: 2302 - DNA, 15 bp, Homo sapiens
gaaacaaaacaataa

SEQ ID NO: 2303 - DNA, 15 bp, Homo sapiens
cgaaacaaaacaata

SEQ ID NO: 2304 - DNA, 15 bp, Homo sapiens
tcgaaacaaaacaat

SEQ ID NO: 2305 - DNA, 15 bp, Homo sapiens
ctcgaaacaaaacaa

SEQ ID NO: 2306 - DNA, 15 bp, Homo sapiens
cctcgaaacaaaaca

SEQ ID NO: 2307 - DNA, 15 bp, Homo sapiens
gcctcgaaacaaaac

SEQ ID NO: 2308 - DNA, 15 bp, Homo sapiens
ggcctcgaaacaaaa

SEQ ID NO: 2309 - DNA, 15 bp, Homo sapiens
tggcctcgaaacaaa

SEQ ID NO: 2310 - DNA, 15 bp, Homo sapiens
ttggcctcgaaacaa

SEQ ID NO: 2311 - DNA, 15 bp, Homo sapiens
cttggcctcgaaaca

SEQ ID NO: 2312 - DNA, 15 bp, Homo sapiens
ccttggcctcgaaac

SEQ ID NO: 2313 - DNA, 15 bp, Homo sapiens
tccttggcctcgaaa

SEQ ID NO: 2314 - DNA, 15 bp, Homo sapiens
ctccttggcctcgaa

SEQ ID NO: 2315 - DNA, 15 bp, Homo sapiens
cctccttggcctcga

SEQ ID NO: 2316 - DNA, 15 bp, Homo sapiens
gcctccttggcctcg

SEQ ID NO: 2317 - DNA, 15 bp, Homo sapiens
agcctccttggcctc

SEQ ID NO: 2318 - DNA, 15 bp, Homo sapiens
aagcctccttggcct

SEQ ID NO: 2319 - DNA, 15 bp, Homo sapiens
gaagcctccttggcc

SEQ ID NO: 2320 - DNA, 15 bp, Homo sapiens
cgaagcctccttggc

SEQ ID NO: 2321 - DNA, 15 bp, Homo sapiens
ccgaagcctccttgg

SEQ ID NO: 2322 - DNA, 15 bp, Homo sapiens
cccgaagcctccttg

SEQ ID NO: 2323 - DNA, 15 bp, Homo sapiens
tcccgaagcctcctt

SEQ ID NO: 2324 - DNA, 15 bp, Homo sapiens
ttcccgaagcctcct

SEQ ID NO: 2325 - DNA, 15 bp, Homo sapiens
cttcccgaagcctcc

SEQ ID NO: 2326 - DNA, 15 bp, Homo sapiens
acttcccgaagcctc

SEQ ID NO: 2327 - DNA, 15 bp, Homo sapiens
cacttcccgaagcct

SEQ ID NO: 2328 - DNA, 15 bp, Homo sapiens
gcacttcccgaagcc

SEQ ID NO: 2329 - DNA, 15 bp, Homo sapiens
agcacttcccgaagc

SEQ ID NO: 2330 - DNA, 15 bp, Homo sapiens
gagcacttcccgaag

SEQ ID NO: 2331 - DNA, 15 bp, Homo sapiens
cgagcacttcccgaa

SEQ ID NO: 2332 - DNA, 15 bp, Homo sapiens
ccgagcacttcccga

SEQ ID NO: 2333 - DNA, 15 bp, Homo sapiens
accgagcacttcccg

SEQ ID NO: 2334 - DNA, 15 bp, Homo sapiens
aaccgagcacttccc

SEQ ID NO: 2335 - DNA, 15 bp, Homo sapiens
aaaccgagcacttcc

SEQ ID NO: 2336 - DNA, 15 bp, Homo sapiens
gaaaccgagcacttc

SEQ ID NO: 2337 - DNA, 15 bp, Homo sapiens
cgaaaccgagcactt

SEQ ID NO: 2338 - DNA, 15 bp, Homo sapiens
ccgaaaccgagcact

SEQ ID NO: 2339 - DNA, 15 bp, Homo sapiens
cccgaaaccgagcac

SEQ ID NO: 2340 - DNA, 15 bp, Homo sapiens
ccccgaaaccgagca

SEQ ID NO: 2341 - DNA, 15 bp, Homo sapiens
tccccgaaaccgagc

SEQ ID NO: 2342 - DNA, 15 bp, Homo sapiens
gtccccgaaaccgag

SEQ ID NO: 2343 - DNA, 15 bp, Homo sapiens
agtccccgaaaccga

SEQ ID NO: 2344 - DNA, 15 bp, Homo sapiens
aagtccccgaaaccg

SEQ ID NO: 2345 - DNA, 15 bp, Homo sapiens
aaagtccccgaaacc

SEQ ID NO: 2346 - DNA, 15 bp, Homo sapiens
caaagtccccgaaac

SEQ ID NO: 2347 - DNA, 15 bp, Homo sapiens
tcaaagtccccgaaa

SEQ ID NO: 2348 - DNA, 15 bp, Homo sapiens
atcaaagtccccgaa

SEQ ID NO: 2349 - DNA, 15 bp, Homo sapiens
gatcaaagtccccga

SEQ ID NO: 2350 - DNA, 15 bp, Homo sapiens
ggatcaaagtccccg

SEQ ID NO: 2351 - DNA, 15 bp, Homo sapiens
cggatcaaagtcccc

SEQ ID NO: 2352 - DNA, 15 bp, Homo sapiens
ccggatcaaagtccc

SEQ ID NO: 2353 - DNA, 15 bp, Homo sapiens
tccggatcaaagtcc

SEQ ID NO: 2354 - DNA, 15 bp, Homo sapiens
ctccggatcaaagtc

SEQ ID NO: 2355 - DNA, 15 bp, Homo sapiens
gctccggatcaaagt

SEQ ID NO: 2356 - DNA, 15 bp, Homo sapiens
ggctccggatcaaag

SEQ ID NO: 2357 - DNA, 15 bp, Homo sapiens
gggctccggatcaaa

SEQ ID NO: 2358 - DNA, 15 bp, Homo sapiens
ggggctccggatcaa

SEQ ID NO: 2359 - DNA, 15 bp, Homo sapiens
tggggctccggatca

SEQ ID NO: 2360 - DNA, 15 bp, Homo sapiens
gtggggctccggatc

SEQ ID NO: 2361 - DNA, 15 bp, Homo sapiens
tgtggggctccggat

SEQ ID NO: 2362 - DNA, 15 bp, Homo sapiens
atgtggggctccgga

SEQ ID NO: 2363 - DNA, 15 bp, Homo sapiens
gatgtggggctccgg

SEQ ID NO: 2364 - DNA, 15 bp, Homo sapiens
ggatgtggggctccg

SEQ ID NO: 2365 - DNA, 15 bp, Homo sapiens
gggatgtggggctcc

SEQ ID NO: 2366 - DNA, 15 bp, Homo sapiens
ggggatgtggggctc

SEQ ID NO: 2367 - DNA, 15 bp, Homo sapiens
tggggatgtggggct

SEQ ID NO: 2368 - DNA, 15 bp, Homo sapiens
gtggggatgtggggc

SEQ ID NO: 2369 - DNA, 15 bp, Homo sapiens
ggtggggatgtgggg

SEQ ID NO: 2370 - DNA, 15 bp, Homo sapiens
tggtggggatgtggg

SEQ ID NO: 2371 - DNA, 15 bp, Homo sapiens
gtggtggggatgtgg

SEQ ID NO: 2372 - DNA, 15 bp, Homo sapiens
agtggtggggatgtg

SEQ ID NO: 2373 - DNA, 15 bp, Homo sapiens
aagtggtggggatgt

SEQ ID NO: 2374 - DNA, 15 bp, Homo sapiens
caagtggtggggatg

SEQ ID NO: 2375 - DNA, 15 bp, Homo sapiens
gcaagtggtggggat

SEQ ID NO: 2376 - DNA, 15 bp, Homo sapiens
tgcaagtggtgggga

SEQ ID NO: 2377 - DNA, 15 bp, Homo sapiens
ttgcaagtggtgggg

SEQ ID NO: 2378 - DNA, 15 bp, Homo sapiens
gttgcaagtggtggg

SEQ ID NO: 2379 - DNA, 15 bp, Homo sapiens
agttgcaagtggtgg

SEQ ID NO: 2380 - DNA, 15 bp, Homo sapiens
gagttgcaagtggtg

SEQ ID NO: 2381 - DNA, 15 bp, Homo sapiens
tgagttgcaagtggt

SEQ ID NO: 2382 - DNA, 15 bp, Homo sapiens
ctgagttgcaagtgg

SEQ ID NO: 2383 - DNA, 15 bp, Homo sapiens
tctgagttgcaagtg

SEQ ID NO: 2384 - DNA, 15 bp, Homo sapiens
atctgagttgcaagt

SEQ ID NO: 2385 - DNA, 15 bp, Homo sapiens
catctgagttgcaag

SEQ ID NO: 2386 - DNA, 15 bp, Homo sapiens
ccatctgagttgcaa

SEQ ID NO: 2387 - DNA, 15 bp, Homo sapiens
cccatctgagttgca

SEQ ID NO: 2388 - DNA, 15 bp, Homo sapiens
tcccatctgagttgc

SEQ ID NO: 2389 - DNA, 15 bp, Homo sapiens
gtcccatctgagttg

SEQ ID NO: 2390 - DNA, 15 bp, Homo sapiens
ggtcccatctgagtt

SEQ ID NO: 2391 - DNA, 15 bp, Homo sapiens
cggtcccatctgagt

SEQ ID NO: 2392 - DNA, 15 bp, Homo sapiens
ccggtcccatctgag

SEQ ID NO: 2393 - DNA, 15 bp, Homo sapiens
tccggtcccatctga

SEQ ID NO: 2394 - DNA, 15 bp, Homo sapiens
ctccggtcccatctg

SEQ ID NO: 2395 - DNA, 15 bp, Homo sapiens
cctccggtcccatct

SEQ ID NO: 2396 - DNA, 15 bp, Homo sapiens
gcctccggtcccatc

SEQ ID NO: 2397 - DNA, 15 bp, Homo sapiens
cgcctccggtcccat

SEQ ID NO: 2398 - DNA, 15 bp, Homo sapiens
ccgcctccggtccca

SEQ ID NO: 2399 - DNA, 15 bp, Homo sapiens
accgcctccggtccc

SEQ ID NO: 2400 - DNA, 15 bp, Homo sapiens
caccgcctccggtcc

SEQ ID NO: 2401 - DNA, 15 bp, Homo sapiens
acaccgcctccggtc

SEQ ID NO: 2402 - DNA, 15 bp, Homo sapiens
aacaccgcctccggt

SEQ ID NO: 2403 - DNA, 15 bp, Homo sapiens
taacaccgcctccgg

SEQ ID NO: 2404 - DNA, 15 bp, Homo sapiens
ttaacaccgcctccg

SEQ ID NO: 2405 - DNA, 15 bp, Homo sapiens
tttaacaccgcctcc

SEQ ID NO: 2406 - DNA, 15 bp, Homo sapiens
atttaacaccgcctc

SEQ ID NO: 2407 - DNA, 15 bp, Homo sapiens
catttaacaccgcct

SEQ ID NO: 2408 - DNA, 15 bp, Homo sapiens
ccatttaacaccgcc

SEQ ID NO: 2409 - DNA, 15 bp, Homo sapiens
cccatttaacaccgc

SEQ ID NO: 2410 - DNA, 15 bp, Homo sapiens
ccccatttaacaccg

SEQ ID NO: 2411 - DNA, 15 bp, Homo sapiens
tccccatttaacacc

SEQ ID NO: 2412 - DNA, 15 bp, Homo sapiens
ctccccatttaacac

SEQ ID NO: 2413 - DNA, 15 bp, Homo sapiens
tctccccatttaaca

SEQ ID NO: 2414 - DNA, 15 bp, Homo sapiens
gtctccccatttaac

SEQ ID NO: 2415 - DNA, 15 bp, Homo sapiens
cgtctccccatttaa

SEQ ID NO: 2416 - DNA, 15 bp, Homo sapiens
tcgtctccccattta

SEQ ID NO: 2417 - DNA, 15 bp, Homo sapiens
atcgtctccccattt

SEQ ID NO: 2418 - DNA, 15 bp, Homo sapiens
catcgtctccccatt

SEQ ID NO: 2419 - DNA, 15 bp, Homo sapiens
acatcgtctccccat

SEQ ID NO: 2420 - DNA, 15 bp, Homo sapiens
gacatcgtctcccca

SEQ ID NO: 2421 - DNA, 15 bp, Homo sapiens
ggacatcgtctcccc

SEQ ID NO: 2422 - DNA, 15 bp, Homo sapiens
aggacatcgtctccc

SEQ ID NO: 2423 - DNA, 15 bp, Homo sapiens
taggacatcgtctcc

SEQ ID NO: 2424 - DNA, 15 bp, Homo sapiens
ctaggacatcgtctc

SEQ ID NO: 2425 - DNA, 15 bp, Homo sapiens
actaggacatcgtct

SEQ ID NO: 2426 - DNA, 15 bp, Homo sapiens
tactaggacatcgtc

SEQ ID NO: 2427 - DNA, 15 bp, Homo sapiens
gtactaggacatcgt

SEQ ID NO: 2428 - DNA, 15 bp, Homo sapiens
cgtactaggacatcg

SEQ ID NO: 2429 - DNA, 15 bp, Homo sapiens
tcgtactaggacatc

SEQ ID NO: 2430 - DNA, 15 bp, Homo sapiens
ctcgtactaggacat

SEQ ID NO: 2431 - DNA, 15 bp, Homo sapiens
gctcgtactaggaca

SEQ ID NO: 2432 - DNA, 15 bp, Homo sapiens
agctcgtactaggac

SEQ ID NO: 2433 - DNA, 15 bp, Homo sapiens
gagctcgtactagga

SEQ ID NO: 2434 - DNA, 15 bp, Homo sapiens
agagctcgtactagg

SEQ ID NO: 2435 - DNA, 15 bp, Homo sapiens
cagagctcgtactag

SEQ ID NO: 2436 - DNA, 15 bp, Homo sapiens
ccagagctcgtacta

SEQ ID NO: 2437 - DNA, 15 bp, Homo sapiens
accagagctcgtact

SEQ ID NO: 2438 - DNA, 15 bp, Homo sapiens
caccagagctcgtac

SEQ ID NO: 2439 - DNA, 15 bp, Homo sapiens
tcaccagagctcgta

SEQ ID NO: 2440 - DNA, 15 bp, Homo sapiens
gtcaccagagctcgt

SEQ ID NO: 2441 - DNA, 15 bp, Homo sapiens
ggtcaccagagctcg

SEQ ID NO: 2442 - DNA, 15 bp, Homo sapiens
gggtcaccagagctc

SEQ ID NO: 2443 - DNA, 15 bp, Homo sapiens
ggggtcaccagagct

SEQ ID NO: 2444 - DNA, 15 bp, Homo sapiens
tggggtcaccagagc

SEQ ID NO: 2445 - DNA, 15 bp, Homo sapiens
ctggggtcaccagag

SEQ ID NO: 2446 - DNA, 15 bp, Homo sapiens
cctggggtcaccaga

SEQ ID NO: 2447 - DNA, 15 bp, Homo sapiens
tcctggggtcaccag

SEQ ID NO: 2448 - DNA, 15 bp, Homo sapiens
gtcctggggtcacca

SEQ ID NO: 2449 - DNA, 15 bp, Homo sapiens
agtcctggggtcacc

SEQ ID NO: 2450 - DNA, 15 bp, Homo sapiens
gagtcctggggtcac

SEQ ID NO: 2451 - DNA, 15 bp, Homo sapiens
agagtcctggggtca

SEQ ID NO: 2452 - DNA, 15 bp, Homo sapiens
cagagtcctggggtc

SEQ ID NO: 2453 - DNA, 15 bp, Homo sapiens
gcagagtcctggggt

SEQ ID NO: 2454 - DNA, 15 bp, Homo sapiens
cgcagagtcctgggg

SEQ ID NO: 2455 - DNA, 15 bp, Homo sapiens
gcgcagagtcctggg

SEQ ID NO: 2456 - DNA, 15 bp, Homo sapiens
agcgcagagtcctgg

SEQ ID NO: 2457 - DNA, 15 bp, Homo sapiens
cagcgcagagtcctg

SEQ ID NO: 2458 - DNA, 15 bp, Homo sapiens
gcagcgcagagtcct

SEQ ID NO: 2459 - DNA, 15 bp, Homo sapiens
agcagcgcagagtcc

SEQ ID NO: 2460 - DNA, 15 bp, Homo sapiens
cagcagcgcagagtc

SEQ ID NO: 2461 - DNA, 15 bp, Homo sapiens
gcagcagcgcagagt

SEQ ID NO: 2462 - DNA, 15 bp, Homo sapiens
cgcagcagcgcagag

SEQ ID NO: 2463 - DNA, 15 bp, Homo sapiens
gcgcagcagcgcaga

SEQ ID NO: 2464 - DNA, 15 bp, Homo sapiens
agcgcagcagcgcag

SEQ ID NO: 2465 - DNA, 15 bp, Homo sapiens
aagcgcagcagcgca

SEQ ID NO: 2466 - DNA, 15 bp, Homo sapiens
caagcgcagcagcgc

SEQ ID NO: 2467 - DNA, 15 bp, Homo sapiens
ccaagcgcagcagcg

SEQ ID NO: 2468 - DNA, 15 bp, Homo sapiens
cccaagcgcagcagc

SEQ ID NO: 2469 - DNA, 15 bp, Homo sapiens
ccccaagcgcagcag

SEQ ID NO: 2470 - DNA, 15 bp, Homo sapiens
gccccaagcgcagca

SEQ ID NO: 2471 - DNA, 15 bp, Homo sapiens
agccccaagcgcagc

SEQ ID NO: 2472 - DNA, 15 bp, Homo sapiens
aagccccaagcgcag

SEQ ID NO: 2473 - DNA, 15 bp, Homo sapiens
caagccccaagcgca

SEQ ID NO: 2474 - DNA, 15 bp, Homo sapiens
gcaagccccaagcgc

SEQ ID NO: 2475 - DNA, 15 bp, Homo sapiens
ggcaagccccaagcg

SEQ ID NO: 2476 - DNA, 15 bp, Homo sapiens
gggcaagccccaagc

SEQ ID NO: 2477 - DNA, 15 bp, Homo sapiens
cgggcaagccccaag

SEQ ID NO: 2478 - DNA, 15 bp, Homo sapiens
tcgggcaagccccaa

SEQ ID NO: 2479 - DNA, 15 bp, Homo sapiens
gtcgggcaagcccca

SEQ ID NO: 2480 - DNA, 15 bp, Homo sapiens
cgtcgggcaagcccc

SEQ ID NO: 2481 - DNA, 15 bp, Homo sapiens
ccgtcgggcaagccc

SEQ ID NO: 2482 - DNA, 15 bp, Homo sapiens
accgtcgggcaagcc

SEQ ID NO: 2483 - DNA, 15 bp, Homo sapiens
caccgtcgggcaagc

SEQ ID NO: 2484 - DNA, 15 bp, Homo sapiens
ccaccgtcgggcaag

SEQ ID NO: 2485 - DNA, 15 bp, Homo sapiens
tccaccgtcgggcaa

SEQ ID NO: 2486 - DNA, 15 bp, Homo sapiens
ctccaccgtcgggca

SEQ ID NO: 2487 - DNA, 15 bp, Homo sapiens
tctccaccgtcgggc

SEQ ID NO: 2488 - DNA, 15 bp, Homo sapiens
gtctccaccgtcggg

SEQ ID NO: 2489 - DNA, 15 bp, Homo sapiens
ggtctccaccgtcgg

SEQ ID NO: 2490 - DNA, 15 bp, Homo sapiens
cggtctccaccgtcg

SEQ ID NO: 2491 - DNA, 15 bp, Homo sapiens
ccggtctccaccgtc

SEQ ID NO: 2492 - DNA, 15 bp, Homo sapiens
cccggtctccaccgt

SEQ ID NO: 2493 - DNA, 15 bp, Homo sapiens
ccccggtctccaccg

SEQ ID NO: 2494 - DNA, 15 bp, Homo sapiens
tccccggtctccacc

SEQ ID NO: 2495 - DNA, 15 bp, Homo sapiens
ctccccggtctccac

SEQ ID NO: 2496 - DNA, 15 bp, Homo sapiens
gctccccggtctcca

SEQ ID NO: 2497 - DNA, 15 bp, Homo sapiens
tgctccccggtctcc

SEQ ID NO: 2498 - DNA, 15 bp, Homo sapiens
atgctccccggtctc

SEQ ID NO: 2499 - DNA, 15 bp, Homo sapiens
gatgctccccggtct

SEQ ID NO: 2500 - DNA, 15 bp, Homo sapiens
agatgctccccggtc

SEQ ID NO: 2501 - DNA, 15 bp, Homo sapiens
gagatgctccccggt

SEQ ID NO: 2502 - DNA, 15 bp, Homo sapiens
agagatgctccccgg

SEQ ID NO: 2503 - DNA, 15 bp, Homo sapiens
cagagatgctccccg

SEQ ID NO: 2504 - DNA, 15 bp, Homo sapiens
ccagagatgctcccc

SEQ ID NO: 2505 - DNA, 15 bp, Homo sapiens
cccagagatgctccc

SEQ ID NO: 2506 - DNA, 15 bp, Homo sapiens
gcccagagatgctcc

SEQ ID NO: 2507 - DNA, 15 bp, Homo sapiens
cgcccagagatgctc

SEQ ID NO: 2508 - DNA, 15 bp, Homo sapiens
acgcccagagatgct

SEQ ID NO: 2509 - DNA, 15 bp, Homo sapiens
cacgcccagagatgc

SEQ ID NO: 2510 - DNA, 15 bp, Homo sapiens
ccacgcccagagatg

SEQ ID NO: 2511 - DNA, 15 bp, Homo sapiens
tccacgcccagagat

SEQ ID NO: 2512 - DNA, 15 bp, Homo sapiens
ctccacgcccagaga

SEQ ID NO: 2513 - DNA, 15 bp, Homo sapiens
tctccacgcccagag

SEQ ID NO: 2514 - DNA, 15 bp, Homo sapiens
gtctccacgcccaga

SEQ ID NO: 2515 - DNA, 15 bp, Homo sapiens
ggtctccacgcccag

SEQ ID NO: 2516 - DNA, 15 bp, Homo sapiens
gggtctccacgccca

SEQ ID NO: 2517 - DNA, 15 bp, Homo sapiens
cgggtctccacgccc

SEQ ID NO: 2518 - DNA, 15 bp, Homo sapiens
ccgggtctccacgcc

SEQ ID NO: 2519 - DNA, 15 bp, Homo sapiens
cccgggtctccacgc

SEQ ID NO: 2520 - DNA, 15 bp, Homo sapiens
gcccgggtctccacg

SEQ ID NO: 2521 - DNA, 15 bp, Homo sapiens
cgcccgggtctccac

SEQ ID NO: 2522 - DNA, 15 bp, Homo sapiens
gcgcccgggtctcca

SEQ ID NO: 2523 - DNA, 15 bp, Homo sapiens
tgcgcccgggtctcc

SEQ ID NO: 2524 - DNA, 15 bp, Homo sapiens
ctgcgcccgggtctc

SEQ ID NO: 2525 - DNA, 15 bp, Homo sapiens
actgcgcccgggtct

SEQ ID NO: 2526 - DNA, 15 bp, Homo sapiens
tactgcgcccgggtc

SEQ ID NO: 2527 - DNA, 15 bp, Homo sapiens
gtactgcgcccgggt

SEQ ID NO: 2528 - DNA, 15 bp, Homo sapiens
ggtactgcgcccggg

SEQ ID NO: 2529 - DNA, 15 bp, Homo sapiens
gggtactgcgcccgg

SEQ ID NO: 2530 - DNA, 15 bp, Homo sapiens
ggggtactgcgcccg

SEQ ID NO: 2531 - DNA, 15 bp, Homo sapiens
cggggtactgcgccc

SEQ ID NO: 2532 - DNA, 15 bp, Homo sapiens
ccggggtactgcgcc

SEQ ID NO: 2533 - DNA, 15 bp, Homo sapiens
cccggggtactgcgc

SEQ ID NO: 2534 - DNA, 15 bp, Homo sapiens
gcccggggtactgcg

SEQ ID NO: 2535 - DNA, 15 bp, Homo sapiens
agcccggggtactgc

SEQ ID NO: 2536 - DNA, 15 bp, Homo sapiens
gagcccggggtactg

SEQ ID NO: 2537 - DNA, 15 bp, Homo sapiens
tgagcccggggtact

SEQ ID NO: 2538 - DNA, 15 bp, Homo sapiens
ctgagcccggggtac

SEQ ID NO: 2539 - DNA, 15 bp, Homo sapiens
tctgagcccggggta

SEQ ID NO: 2540 - DNA, 15 bp, Homo sapiens
ctctgagcccggggt

SEQ ID NO: 2541 - DNA, 15 bp, Homo sapiens
cctctgagcccgggg

SEQ ID NO: 2542 - DNA, 15 bp, Homo sapiens
ccctctgagcccggg

SEQ ID NO: 2543 - DNA, 15 bp, Homo sapiens
cccctctgagcccgg

SEQ ID NO: 2544 - DNA, 15 bp, Homo sapiens
acccctctgagcccg

SEQ ID NO: 2545 - DNA, 15 bp, Homo sapiens
gacccctctgagccc

SEQ ID NO: 2546 - DNA, 15 bp, Homo sapiens
cgacccctctgagcc

SEQ ID NO: 2547 - DNA, 15 bp, Homo sapiens
ccgacccctctgagc

SEQ ID NO: 2548 - DNA, 15 bp, Homo sapiens
cccgacccctctgag

SEQ ID NO: 2549 - DNA, 15 bp, Homo sapiens
ccccgacccctctga

SEQ ID NO: 2550 - DNA, 15 bp, Homo sapiens
cccccgacccctctg

SEQ ID NO: 2551 - DNA, 15 bp, Homo sapiens
acccccgacccctct

SEQ ID NO: 2552 - DNA, 15 bp, Homo sapiens
aacccccgacccctc

SEQ ID NO: 2553 - DNA, 15 bp, Homo sapiens
gaacccccgacccct

SEQ ID NO: 2554 - DNA, 15 bp, Homo sapiens
ggaacccccgacccc

SEQ ID NO: 2555 - DNA, 15 bp, Homo sapiens
gggaacccccgaccc

SEQ ID NO: 2556 - DNA, 15 bp, Homo sapiens
cgggaacccccgacc

SEQ ID NO: 2557 - DNA, 15 bp, Homo sapiens
ccgggaacccccgac

SEQ ID NO: 2558 - DNA, 15 bp, Homo sapiens
cccgggaacccccga

SEQ ID NO: 2559 - DNA, 15 bp, Homo sapiens
gcccgggaacccccg

SEQ ID NO: 2560 - DNA, 15 bp, Homo sapiens
cgcccgggaaccccc

SEQ ID NO: 2561 - DNA, 15 bp, Homo sapiens
acgcccgggaacccc

SEQ ID NO: 2562 - DNA, 15 bp, Homo sapiens
cacgcccgggaaccc

SEQ ID NO: 2563 - DNA, 15 bp, Homo sapiens
gcacgcccgggaacc

SEQ ID NO: 2564 - DNA, 15 bp, Homo sapiens
agcacgcccgggaac

SEQ ID NO: 2565 - DNA, 15 bp, Homo sapiens
cagcacgcccgggaa

SEQ ID NO: 2566 - DNA, 15 bp, Homo sapiens
tcagcacgcccggga

SEQ ID NO: 2567 - DNA, 15 bp, Homo sapiens
ctcagcacgcccggg

SEQ ID NO: 2568 - DNA, 15 bp, Homo sapiens
cctcagcacgcccgg

SEQ ID NO: 2569 - DNA, 15 bp, Homo sapiens
ccctcagcacgcccg

SEQ ID NO: 2570 - DNA, 15 bp, Homo sapiens
gccctcagcacgccc

SEQ ID NO: 2571 - DNA, 15 bp, Homo sapiens
cgccctcagcacgcc

SEQ ID NO: 2572 - DNA, 15 bp, Homo sapiens
gcgccctcagcacgc

SEQ ID NO: 2573 - DNA, 15 bp, Homo sapiens
agcgccctcagcacg

SEQ ID NO: 2574 - DNA, 15 bp, Homo sapiens
cagcgccctcagcac

SEQ ID NO: 2575 - DNA, 15 bp, Homo sapiens
gcagcgccctcagca

SEQ ID NO: 2576 - DNA, 15 bp, Homo sapiens
agcagcgccctcagc

SEQ ID NO: 2577 - DNA, 15 bp, Homo sapiens
cagcagcgccctcag

SEQ ID NO: 2578 - DNA, 15 bp, Homo sapiens
gcagcagcgccctca

SEQ ID NO: 2579 - DNA, 15 bp, Homo sapiens
ggcagcagcgccctc

SEQ ID NO: 2580 - DNA, 15 bp, Homo sapiens
cggcagcagcgccct

SEQ ID NO: 2581 - DNA, 15 bp, Homo sapiens
ccggcagcagcgccc

SEQ ID NO: 2582 - DNA, 15 bp, Homo sapiens
cccggcagcagcgcc

SEQ ID NO: 2583 - DNA, 15 bp, Homo sapiens
acccggcagcagcgc

SEQ ID NO: 2584 - DNA, 15 bp, Homo sapiens
cacccggcagcagcg

SEQ ID NO: 2585 - DNA, 15 bp, Homo sapiens
ccacccggcagcagc

SEQ ID NO: 2586 - DNA, 15 bp, Homo sapiens
cccacccggcagcag

SEQ ID NO: 2587 - DNA, 15 bp, Homo sapiens
ccccacccggcagca

SEQ ID NO: 2588 - DNA, 15 bp, Homo sapiens
tccccacccggcagc

SEQ ID NO: 2589 - DNA, 15 bp, Homo sapiens
ctccccacccggcag

SEQ ID NO: 2590 - DNA, 15 bp, Homo sapiens
tctccccacccggca

SEQ ID NO: 2591 - DNA, 15 bp, Homo sapiens
ctctccccacccggc

SEQ ID NO: 2592 - DNA, 15 bp, Homo sapiens
gctctccccacccgg

SEQ ID NO: 2593 - DNA, 15 bp, Homo sapiens
agctctccccacccg

SEQ ID NO: 2594 - DNA, 15 bp, Homo sapiens
cagctctccccaccc

SEQ ID NO: 2595 - DNA, 15 bp, Homo sapiens
gcagctctccccacc

SEQ ID NO: 2596 - DNA, 15 bp, Homo sapiens
tgcagctctccccac

SEQ ID NO: 2597 - DNA, 15 bp, Homo sapiens
ctgcagctctcccca

SEQ ID NO: 2598 - DNA, 15 bp, Homo sapiens
cctgcagctctcccc

SEQ ID NO: 2599 - DNA, 15 bp, Homo sapiens
acctgcagctctccc

SEQ ID NO: 2600 - DNA, 15 bp, Homo sapiens
gacctgcagctctcc

SEQ ID NO: 2601 - DNA, 15 bp, Homo sapiens
ggacctgcagctctc

SEQ ID NO: 2602 - DNA, 15 bp, Homo sapiens
cggacctgcagctct

SEQ ID NO: 2603 - DNA, 15 bp, Homo sapiens
ccggacctgcagctc

SEQ ID NO: 2604 - DNA, 15 bp, Homo sapiens
gccggacctgcagct

SEQ ID NO: 2605 - DNA, 15 bp, Homo sapiens
tgccggacctgcagc

SEQ ID NO: 2606 - DNA, 15 bp, Homo sapiens
gtgccggacctgcag

SEQ ID NO: 2607 - DNA, 15 bp, Homo sapiens
ggtgccggacctgca

SEQ ID NO: 2608 - DNA, 15 bp, Homo sapiens
cggtgccggacctgc

SEQ ID NO: 2609 - DNA, 15 bp, Homo sapiens
tcggtgccggacctg

SEQ ID NO: 2610 - DNA, 15 bp, Homo sapiens
ctcggtgccggacct

SEQ ID NO: 2611 - DNA, 15 bp, Homo sapiens
gctcggtgccggacc

SEQ ID NO: 2612 - DNA, 15 bp, Homo sapiens
cgctcggtgccggac

SEQ ID NO: 2613 - DNA, 15 bp, Homo sapiens
gcgctcggtgccgga

SEQ ID NO: 2614 - DNA, 15 bp, Homo sapiens
agcgctcggtgccgg

SEQ ID NO: 2615 - DNA, 15 bp, Homo sapiens
cagcgctcggtgccg

SEQ ID NO: 2616 - DNA, 15 bp, Homo sapiens
gcagcgctcggtgcc

SEQ ID NO: 2617 - DNA, 15 bp, Homo sapiens
agcagcgctcggtgc

SEQ ID NO: 2618 - DNA, 15 bp, Homo sapiens
aagcagcgctcggtg

SEQ ID NO: 2619 - DNA, 15 bp, Homo sapiens
aaagcagcgctcggt

SEQ ID NO: 2620 - DNA, 15 bp, Homo sapiens
caaagcagcgctcgg

SEQ ID NO: 2621 - DNA, 15 bp, Homo sapiens
acaaagcagcgctcg

SEQ ID NO: 2622 - DNA, 15 bp, Homo sapiens
aacaaagcagcgctc

SEQ ID NO: 2623 - DNA, 15 bp, Homo sapiens
gaacaaagcagcgct

SEQ ID NO: 2624 - DNA, 15 bp, Homo sapiens
cgaacaaagcagcgc

SEQ ID NO: 2625 - DNA, 15 bp, Homo sapiens
ccgaacaaagcagcg

SEQ ID NO: 2626 - DNA, 15 bp, Homo sapiens
tccgaacaaagcagc

SEQ ID NO: 2627 - DNA, 15 bp, Homo sapiens
ctccgaacaaagcag

SEQ ID NO: 2628 - DNA, 15 bp, Homo sapiens
cctccgaacaaagca

SEQ ID NO: 2629 - DNA, 15 bp, Homo sapiens
ccctccgaacaaagc

SEQ ID NO: 2630 - DNA, 15 bp, Homo sapiens
gccctccgaacaaag

SEQ ID NO: 2631 - DNA, 15 bp, Homo sapiens
ggccctccgaacaaa

SEQ ID NO: 2632 - DNA, 15 bp, Homo sapiens
gggccctccgaacaa

SEQ ID NO: 2633 - DNA, 15 bp, Homo sapiens
agggccctccgaaca

SEQ ID NO: 2634 - DNA, 15 bp, Homo sapiens
cagggccctccgaac

SEQ ID NO: 2635 - DNA, 15 bp, Homo sapiens
tcagggccctccgaa

SEQ ID NO: 2636 - DNA, 15 bp, Homo sapiens
ctcagggccctccga

SEQ ID NO: 2637 - DNA, 15 bp, Homo sapiens
gctcagggccctccg

SEQ ID NO: 2638 - DNA, 15 bp, Homo sapiens
agctcagggccctcc

SEQ ID NO: 2639 - DNA, 15 bp, Homo sapiens
cagctcagggccctc

SEQ ID NO: 2640 - DNA, 15 bp, Homo sapiens
ccagctcagggccct

SEQ ID NO: 2641 - DNA, 15 bp, Homo sapiens
gccagctcagggccc

SEQ ID NO: 2642 - DNA, 15 bp, Homo sapiens
agccagctcagggcc

SEQ ID NO: 2643 - DNA, 15 bp, Homo sapiens
tagccagctcagggc

SEQ ID NO: 2644 - DNA, 15 bp, Homo sapiens
ctagccagctcaggg

SEQ ID NO: 2645 - DNA, 15 bp, Homo sapiens
tctagccagctcagg

SEQ ID NO: 2646 - DNA, 15 bp, Homo sapiens
ttctagccagctcag

SEQ ID NO: 2647 - DNA, 15 bp, Homo sapiens
tttctagccagctca

SEQ ID NO: 2648 - DNA, 15 bp, Homo sapiens
gtttctagccagctc

SEQ ID NO: 2649 - DNA, 15 bp, Homo sapiens
ggtttctagccagct

SEQ ID NO: 2650 - DNA, 15 bp, Homo sapiens
gggtttctagccagc

SEQ ID NO: 2651 - DNA, 15 bp, Homo sapiens
agggtttctagccag

SEQ ID NO: 2652 - DNA, 15 bp, Homo sapiens
aagggtttctagcca

SEQ ID NO: 2653 - DNA, 15 bp, Homo sapiens
gaagggtttctagcc

SEQ ID NO: 2654 - DNA, 15 bp, Homo sapiens
agaagggtttctagc

SEQ ID NO: 2655 - DNA, 15 bp, Homo sapiens
cagaagggtttctag

SEQ ID NO: 2656 - DNA, 15 bp, Homo sapiens
ccagaagggtttcta

SEQ ID NO: 2657 - DNA, 15 bp, Homo sapiens
accagaagggtttct

SEQ ID NO: 2658 - DNA, 15 bp, Homo sapiens
aaccagaagggtttc

SEQ ID NO: 2659 - DNA, 15 bp, Homo sapiens
caaccagaagggttt

SEQ ID NO: 2660 - DNA, 15 bp, Homo sapiens
gcaaccagaagggtt

SEQ ID NO: 2661 - DNA, 15 bp, Homo sapiens
tgcaaccagaagggt

SEQ ID NO: 2662 - DNA, 15 bp, Homo sapiens
ctgcaaccagaaggg

SEQ ID NO: 2663 - DNA, 15 bp, Homo sapiens
cctgcaaccagaagg

SEQ ID NO: 2664 - DNA, 15 bp, Homo sapiens
acctgcaaccagaag

SEQ ID NO: 2665 - DNA, 15 bp, Homo sapiens
gacctgcaaccagaa

SEQ ID NO: 2666 - DNA, 15 bp, Homo sapiens
cgacctgcaaccaga

SEQ ID NO: 2667 - DNA, 15 bp, Homo sapiens
ccgacctgcaaccag

SEQ ID NO: 2668 - DNA, 15 bp, Homo sapiens
gccgacctgcaacca

SEQ ID NO: 2669 - DNA, 15 bp, Homo sapiens
ggccgacctgcaacc

SEQ ID NO: 2670 - DNA, 15 bp, Homo sapiens
tggccgacctgcaac

SEQ ID NO: 2671 - DNA, 15 bp, Homo sapiens
ctggccgacctgcaa

SEQ ID NO: 2672 - DNA, 15 bp, Homo sapiens
actggccgacctgca

SEQ ID NO: 2673 - DNA, 15 bp, Homo sapiens
tactggccgacctgc

SEQ ID NO: 2674 - DNA, 15 bp, Homo sapiens
gtactggccgacctg

SEQ ID NO: 2675 - DNA, 15 bp, Homo sapiens
ggtactggccgacct

SEQ ID NO: 2676 - DNA, 15 bp, Homo sapiens
aggtactggccgacc

SEQ ID NO: 2677 - DNA, 15 bp, Homo sapiens
taggtactggccgac

SEQ ID NO: 2678 - DNA, 15 bp, Homo sapiens
gtaggtactggccga

SEQ ID NO: 2679 - DNA, 15 bp, Homo sapiens
cgtaggtactggccg

SEQ ID NO: 2680 - DNA, 15 bp, Homo sapiens
ccgtaggtactggcc

SEQ ID NO: 2681 - DNA, 15 bp, Homo sapiens
tccgtaggtactggc

SEQ ID NO: 2682 - DNA, 15 bp, Homo sapiens
ctccgtaggtactgg

SEQ ID NO: 2683 - DNA, 15 bp, Homo sapiens
tctccgtaggtactg

SEQ ID NO: 2684 - DNA, 15 bp, Homo sapiens
gtctccgtaggtact

SEQ ID NO: 2685 - DNA, 15 bp, Homo sapiens
tgtctccgtaggtac

SEQ ID NO: 2686 - DNA, 15 bp, Homo sapiens
ttgtctccgtaggta

SEQ ID NO: 2687 - DNA, 15 bp, Homo sapiens
tttgtctccgtaggt

SEQ ID NO: 2688 - DNA, 15 bp, Homo sapiens
atttgtctccgtagg

SEQ ID NO: 2689 - DNA, 15 bp, Homo sapiens
catttgtctccgtag

SEQ ID NO: 2690 - DNA, 15 bp, Homo sapiens
gcatttgtctccgta

SEQ ID NO: 2691 - DNA, 15 bp, Homo sapiens
ggcatttgtctccgt

SEQ ID NO: 2692 - DNA, 15 bp, Homo sapiens
tggcatttgtctccg

SEQ ID NO: 2693 - DNA, 15 bp, Homo sapiens
ctggcatttgtctcc

SEQ ID NO: 2694 - DNA, 15 bp, Homo sapiens
gctggcatttgtctc

SEQ ID NO: 2695 - DNA, 15 bp, Homo sapiens
tgctggcatttgtct

SEQ ID NO: 2696 - DNA, 15 bp, Homo sapiens
gtgctggcatttgtc

SEQ ID NO: 2697 - DNA, 15 bp, Homo sapiens
agtgctggcatttgt

SEQ ID NO: 2698 - DNA, 15 bp, Homo sapiens
cagtgctggcatttg

SEQ ID NO: 2699 - DNA, 15 bp, Homo sapiens
tcagtgctggcattt

SEQ ID NO: 2700 - DNA, 15 bp, Homo sapiens
ctcagtgctggcatt

SEQ ID NO: 2701 - DNA, 15 bp, Homo sapiens
actcagtgctggcat

SEQ ID NO: 2702 - DNA, 15 bp, Homo sapiens
gactcagtgctggca

SEQ ID NO: 2703 - DNA, 15 bp, Homo sapiens
agactcagtgctggc

SEQ ID NO: 2704 - DNA, 15 bp, Homo sapiens
aagactcagtgctgg

SEQ ID NO: 2705 - DNA, 15 bp, Homo sapiens
gaagactcagtgctg

SEQ ID NO: 2706 - DNA, 15 bp, Homo sapiens
tgaagactcagtgct

SEQ ID NO: 2707 - DNA, 15 bp, Homo sapiens
gtgaagactcagtgc

SEQ ID NO: 2708 - DNA, 15 bp, Homo sapiens
agtgaagactcagtg

SEQ ID NO: 2709 - DNA, 15 bp, Homo sapiens
gagtgaagactcagt

SEQ ID NO: 2710 - DNA, 15 bp, Homo sapiens
cgagtgaagactcag

SEQ ID NO: 2711 - DNA, 15 bp, Homo sapiens
ccgagtgaagactca

SEQ ID NO: 2712 - DNA, 15 bp, Homo sapiens
accgagtgaagactc

SEQ ID NO: 2713 - DNA, 15 bp, Homo sapiens
aaccgagtgaagact

SEQ ID NO: 2714 - DNA, 15 bp, Homo sapiens
gaaccgagtgaagac

SEQ ID NO: 2715 - DNA, 15 bp, Homo sapiens
agaaccgagtgaaga

SEQ ID NO: 2716 - DNA, 15 bp, Homo sapiens
aagaaccgagtgaag

SEQ ID NO: 2717 - DNA, 15 bp, Homo sapiens
taagaaccgagtgaa

SEQ ID NO: 2718 - DNA, 15 bp, Homo sapiens
ttaagaaccgagtga

SEQ ID NO: 2719 - DNA, 15 bp, Homo sapiens
cttaagaaccgagtg

SEQ ID NO: 2720 - DNA, 15 bp, Homo sapiens
tcttaagaaccgagt

SEQ ID NO: 2721 - DNA, 15 bp, Homo sapiens
ttcttaagaaccgag

SEQ ID NO: 2722 - DNA, 15 bp, Homo sapiens
cttcttaagaaccga

SEQ ID NO: 2723 - DNA, 15 bp, Homo sapiens
gcttcttaagaaccg

SEQ ID NO: 2724 - DNA, 15 bp, Homo sapiens
agcttcttaagaacc

SEQ ID NO: 2725 - DNA, 15 bp, Homo sapiens
cagcttcttaagaac

SEQ ID NO: 2726 - DNA, 15 bp, Homo sapiens
ccagcttcttaagaa

SEQ ID NO: 2727 - DNA, 15 bp, Homo sapiens
accagcttcttaaga

SEQ ID NO: 2728 - DNA, 15 bp, Homo sapiens
gaccagcttcttaag

SEQ ID NO: 2729 - DNA, 15 bp, Homo sapiens
agaccagcttcttaa

SEQ ID NO: 2730 - DNA, 15 bp, Homo sapiens
cagaccagcttctta

SEQ ID NO: 2731 - DNA, 15 bp, Homo sapiens
acagaccagcttctt

SEQ ID NO: 2732 - DNA, 15 bp, Homo sapiens
aacagaccagcttct

SEQ ID NO: 2733 - DNA, 15 bp, Homo sapiens
gaacagaccagcttc

SEQ ID NO: 2734 - DNA, 15 bp, Homo sapiens
agaacagaccagctt

SEQ ID NO: 2735 - DNA, 15 bp, Homo sapiens
cagaacagaccagct

SEQ ID NO: 2736 - DNA, 15 bp, Homo sapiens
tcagaacagaccagc

SEQ ID NO: 2737 - DNA, 15 bp, Homo sapiens
gtcagaacagaccag

SEQ ID NO: 2738 - DNA, 15 bp, Homo sapiens
ggtcagaacagacca

SEQ ID NO: 2739 - DNA, 15 bp, Homo sapiens
aggtcagaacagacc

SEQ ID NO: 2740 - DNA, 15 bp, Homo sapiens
caggtcagaacagac

SEQ ID NO: 2741 - DNA, 15 bp, Homo sapiens
ccaggtcagaacaga

SEQ ID NO: 2742 - DNA, 15 bp, Homo sapiens
cccaggtcagaacag

SEQ ID NO: 2743 - DNA, 15 bp, Homo sapiens
tcccaggtcagaaca

SEQ ID NO: 2744 - DNA, 15 bp, Homo sapiens
ttcccaggtcagaac

SEQ ID NO: 2745 - DNA, 15 bp, Homo sapiens
attcccaggtcagaa

SEQ ID NO: 2746 - DNA, 15 bp, Homo sapiens
aattcccaggtcaga

SEQ ID NO: 2747 - DNA, 15 bp, Homo sapiens
caattcccaggtcag

SEQ ID NO: 2748 - DNA, 15 bp, Homo sapiens
ccaattcccaggtca

SEQ ID NO: 2749 - DNA, 15 bp, Homo sapiens
gccaattcccaggtc

SEQ ID NO: 2750 - DNA, 15 bp, Homo sapiens
agccaattcccaggt

SEQ ID NO: 2751 - DNA, 15 bp, Homo sapiens
tagccaattcccagg

SEQ ID NO: 2752 - DNA, 15 bp, Homo sapiens
atagccaattcccag

SEQ ID NO: 2753 - DNA, 15 bp, Homo sapiens
tatagccaattccca

SEQ ID NO: 2754 - DNA, 15 bp, Homo sapiens
atatagccaattccc

SEQ ID NO: 2755 - DNA, 15 bp, Homo sapiens
catatagccaattcc

SEQ ID NO: 2756 - DNA, 15 bp, Homo sapiens
gcatatagccaattc

SEQ ID NO: 2757 - DNA, 15 bp, Homo sapiens
agcatatagccaatt

SEQ ID NO: 2758 - DNA, 15 bp, Homo sapiens
gagcatatagccaat

SEQ ID NO: 2759 - DNA, 15 bp, Homo sapiens
ggagcatatagccaa

SEQ ID NO: 2760 - DNA, 15 bp, Homo sapiens
gggagcatatagcca

SEQ ID NO: 2761 - DNA, 15 bp, Homo sapiens
ggggagcatatagcc

SEQ ID NO: 2762 - DNA, 15 bp, Homo sapiens
cggggagcatatagc

SEQ ID NO: 2763 - DNA, 15 bp, Homo sapiens
ccggggagcatatag

SEQ ID NO: 2764 - DNA, 15 bp, Homo sapiens
cccggggagcatata

SEQ ID NO: 2765 - DNA, 15 bp, Homo sapiens
tcccggggagcatat

SEQ ID NO: 2766 - DNA, 15 bp, Homo sapiens
gtcccggggagcata

SEQ ID NO: 2767 - DNA, 15 bp, Homo sapiens
agtcccggggagcat

SEQ ID NO: 2768 - DNA, 15 bp, Homo sapiens
cagtcccggggagca

SEQ ID NO: 2769 - DNA, 15 bp, Homo sapiens
ccagtcccggggagc

SEQ ID NO: 2770 - DNA, 15 bp, Homo sapiens
tccagtcccggggag

SEQ ID NO: 2771 - DNA, 15 bp, Homo sapiens
ctccagtcccgggga

SEQ ID NO: 2772 - DNA, 15 bp, Homo sapiens
gctccagtcccgggg

SEQ ID NO: 2773 - DNA, 15 bp, Homo sapiens
cgctccagtcccggg

SEQ ID NO: 2774 - DNA, 15 bp, Homo sapiens
ccgctccagtcccgg

SEQ ID NO: 2775 - DNA, 15 bp, Homo sapiens
gccgctccagtcccg

SEQ ID NO: 2776 - DNA, 15 bp, Homo sapiens
tgccgctccagtccc

SEQ ID NO: 2777 - DNA, 15 bp, Homo sapiens
gtgccgctccagtcc

SEQ ID NO: 2778 - DNA, 15 bp, Homo sapiens
tgtgccgctccagtc

SEQ ID NO: 2779 - DNA, 15 bp, Homo sapiens
ctgtgccgctccagt

SEQ ID NO: 2780 - DNA, 15 bp, Homo sapiens
actgtgccgctccag

SEQ ID NO: 2781 - DNA, 15 bp, Homo sapiens
gactgtgccgctcca

SEQ ID NO: 2782 - DNA, 15 bp, Homo sapiens
ggactgtgccgctcc

SEQ ID NO: 2783 - DNA, 15 bp, Homo sapiens
gggactgtgccgctc

SEQ ID NO: 2784 - DNA, 15 bp, Homo sapiens
cgggactgtgccgct

SEQ ID NO: 2785 - DNA, 15 bp, Homo sapiens
ccgggactgtgccgc

SEQ ID NO: 2786 - DNA, 15 bp, Homo sapiens
tccgggactgtgccg

SEQ ID NO: 2787 - DNA, 15 bp, Homo sapiens
gtccgggactgtgcc

SEQ ID NO: 2788 - DNA, 15 bp, Homo sapiens
agtccgggactgtgc

SEQ ID NO: 2789 - DNA, 15 bp, Homo sapiens
cagtccgggactgtg

SEQ ID NO: 2790 - DNA, 15 bp, Homo sapiens
acagtccgggactgt

SEQ ID NO: 2791 - DNA, 15 bp, Homo sapiens
cacagtccgggactg

SEQ ID NO: 2792 - DNA, 15 bp, Homo sapiens
tcacagtccgggact

SEQ ID NO: 2793 - DNA, 15 bp, Homo sapiens
ttcacagtccgggac

SEQ ID NO: 2794 - DNA, 15 bp, Homo sapiens
attcacagtccggga

SEQ ID NO: 2795 - DNA, 15 bp, Homo sapiens
gattcacagtccggg

SEQ ID NO: 2796 - DNA, 15 bp, Homo sapiens
ggattcacagtccgg

SEQ ID NO: 2797 - DNA, 15 bp, Homo sapiens
cggattcacagtccg

SEQ ID NO: 2798 - DNA, 15 bp, Homo sapiens
ccggattcacagtcc

SEQ ID NO: 2799 - DNA, 15 bp, Homo sapiens
cccggattcacagtc

SEQ ID NO: 2800 - DNA, 15 bp, Homo sapiens
tcccggattcacagt

SEQ ID NO: 2801 - DNA, 15 bp, Homo sapiens
ttcccggattcacag

SEQ ID NO: 2802 - DNA, 15 bp, Homo sapiens
gttcccggattcaca

SEQ ID NO: 2803 - DNA, 15 bp, Homo sapiens
agttcccggattcac

SEQ ID NO: 2804 - DNA, 15 bp, Homo sapiens
gagttcccggattca

SEQ ID NO: 2805 - DNA, 15 bp, Homo sapiens
cgagttcccggattc

SEQ ID NO: 2806 - DNA, 15 bp, Homo sapiens
tcgagttcccggatt

SEQ ID NO: 2807 - DNA, 15 bp, Homo sapiens
ctcgagttcccggat

SEQ ID NO: 2808 - DNA, 15 bp, Homo sapiens
actcgagttcccgga

SEQ ID NO: 2809 - DNA, 15 bp, Homo sapiens
aactcgagttcccgg

SEQ ID NO: 2810 - DNA, 15 bp, Homo sapiens
caactcgagttcccg

SEQ ID NO: 2811 - DNA, 15 bp, Homo sapiens
ccaactcgagttccc

SEQ ID NO: 2812 - DNA, 15 bp, Homo sapiens
tccaactcgagttcc

SEQ ID NO: 2813 - DNA, 15 bp, Homo sapiens
ctccaactcgagttc

SEQ ID NO: 2814 - DNA, 15 bp, Homo sapiens
cctccaactcgagtt

SEQ ID NO: 2815 - DNA, 15 bp, Homo sapiens
acctccaactcgagt

SEQ ID NO: 2816 - DNA, 15 bp, Homo sapiens
cacctccaactcgag

SEQ ID NO: 2817 - DNA, 15 bp, Homo sapiens
acacctccaactcga

SEQ ID NO: 2818 - DNA, 15 bp, Homo sapiens
gacacctccaactcg

SEQ ID NO: 2819 - DNA, 15 bp, Homo sapiens
ggacacctccaactc

SEQ ID NO: 2820 - DNA, 15 bp, Homo sapiens
gggacacctccaact

SEQ ID NO: 2821 - DNA, 15 bp, Homo sapiens
tgggacacctccaac

SEQ ID NO: 2822 - DNA, 15 bp, Homo sapiens
ttgggacacctccaa

SEQ ID NO: 2823 - DNA, 15 bp, Homo sapiens
tttgggacacctcca

SEQ ID NO: 2824 - DNA, 15 bp, Homo sapiens
gtttgggacacctcc

SEQ ID NO: 2825 - DNA, 15 bp, Homo sapiens
cgtttgggacacctc

SEQ ID NO: 2826 - DNA, 15 bp, Homo sapiens
ccgtttgggacacct

SEQ ID NO: 2827 - DNA, 15 bp, Homo sapiens
accgtttgggacacc

SEQ ID NO: 2828 - DNA, 15 bp, Homo sapiens
gaccgtttgggacac

SEQ ID NO: 2829 - DNA, 15 bp, Homo sapiens
ggaccgtttgggaca

SEQ ID NO: 2830 - DNA, 15 bp, Homo sapiens
cggaccgtttgggac

SEQ ID NO: 2831 - DNA, 15 bp, Homo sapiens
acggaccgtttggga

SEQ ID NO: 2832 - DNA, 15 bp, Homo sapiens
cacggaccgtttggg

SEQ ID NO: 2833 - DNA, 15 bp, Homo sapiens
ccacggaccgtttgg

SEQ ID NO: 2834 - DNA, 15 bp, Homo sapiens
accacggaccgtttg

SEQ ID NO: 2835 - DNA, 15 bp, Homo sapiens
caccacggaccgttt

SEQ ID NO: 2836 - DNA, 15 bp, Homo sapiens
gcaccacggaccgtt

SEQ ID NO: 2837 - DNA, 15 bp, Homo sapiens
agcaccacggaccgt

SEQ ID NO: 2838 - DNA, 15 bp, Homo sapiens
tagcaccacggaccg

SEQ ID NO: 2839 - DNA, 15 bp, Homo sapiens
atagcaccacggacc

SEQ ID NO: 2840 - DNA, 15 bp, Homo sapiens
aatagcaccacggac

SEQ ID NO: 2841 - DNA, 15 bp, Homo sapiens
caatagcaccacgga

SEQ ID NO: 2842 - DNA, 15 bp, Homo sapiens
gcaatagcaccacgg

SEQ ID NO: 2843 - DNA, 15 bp, Homo sapiens
agcaatagcaccacg

SEQ ID NO: 2844 - DNA, 15 bp, Homo sapiens
gagcaatagcaccac

SEQ ID NO: 2845 - DNA, 15 bp, Homo sapiens
tgagcaatagcacca

SEQ ID NO: 2846 - DNA, 15 bp, Homo sapiens
gtgagcaatagcacc

SEQ ID NO: 2847 - DNA, 15 bp, Homo sapiens
agtgagcaatagcac

SEQ ID NO: 2848 - DNA, 15 bp, Homo sapiens
tagtgagcaatagca

SEQ ID NO: 2849 - DNA, 15 bp, Homo sapiens
ctagtgagcaatagc

SEQ ID NO: 2850 - DNA, 15 bp, Homo sapiens
tctagtgagcaatag

SEQ ID NO: 2851 - DNA, 15 bp, Homo sapiens
ctctagtgagcaata

SEQ ID NO: 2852 - DNA, 15 bp, Homo sapiens
cctctagtgagcaat

SEQ ID NO: 2853 - DNA, 15 bp, Homo sapiens
gcctctagtgagcaa

SEQ ID NO: 2854 - DNA, 15 bp, Homo sapiens
ggcctctagtgagca

SEQ ID NO: 2855 - DNA, 15 bp, Homo sapiens
aggcctctagtgagc

SEQ ID NO: 2856 - DNA, 15 bp, Homo sapiens
aaggcctctagtgag

SEQ ID NO: 2857 - DNA, 15 bp, Homo sapiens
caaggcctctagtga

SEQ ID NO: 2858 - DNA, 15 bp, Homo sapiens
ccaaggcctctagtg

SEQ ID NO: 2859 - DNA, 15 bp, Homo sapiens
cccaaggcctctagt

SEQ ID NO: 2860 - DNA, 15 bp, Homo sapiens
acccaaggcctctag

SEQ ID NO: 2861 - DNA, 15 bp, Homo sapiens
gacccaaggcctcta

SEQ ID NO: 2862 - DNA, 15 bp, Homo sapiens
agacccaaggcctct

SEQ ID NO: 2863 - DNA, 15 bp, Homo sapiens
aagacccaaggcctc

SEQ ID NO: 2864 - DNA, 15 bp, Homo sapiens
aaagacccaaggcct

SEQ ID NO: 2865 - DNA, 15 bp, Homo sapiens
caaagacccaaggcc

SEQ ID NO: 2866 - DNA, 15 bp, Homo sapiens
acaaagacccaaggc

SEQ ID NO: 2867 - DNA, 15 bp, Homo sapiens
aacaaagacccaagg

SEQ ID NO: 2868 - DNA, 15 bp, Homo sapiens
aaacaaagacccaag

SEQ ID NO: 2869 - DNA, 15 bp, Homo sapiens
caaacaaagacccaa

SEQ ID NO: 2870 - DNA, 15 bp, Homo sapiens
tcaaacaaagaccca

SEQ ID NO: 2871 - DNA, 15 bp, Homo sapiens
gtcaaacaaagaccc

SEQ ID NO: 2872 - DNA, 15 bp, Homo sapiens
ggtcaaacaaagacc

SEQ ID NO: 2873 - DNA, 15 bp, Homo sapiens
aggtcaaacaaagac

SEQ ID NO: 2874 - DNA, 15 bp, Homo sapiens
caggtcaaacaaaga

SEQ ID NO: 2875 - DNA, 15 bp, Homo sapiens
tcaggtcaaacaaag

SEQ ID NO: 2876 - DNA, 15 bp, Homo sapiens
ctcaggtcaaacaaa

SEQ ID NO: 2877 - DNA, 15 bp, Homo sapiens
cctcaggtcaaacaa

SEQ ID NO: 2878 - DNA, 15 bp, Homo sapiens
ccctcaggtcaaaca

SEQ ID NO: 2879 - DNA, 15 bp, Homo sapiens
cccctcaggtcaaac

SEQ ID NO: 2880 - DNA, 15 bp, Homo sapiens
acccctcaggtcaaa

SEQ ID NO: 2881 - DNA, 15 bp, Homo sapiens
tacccctcaggtcaa

SEQ ID NO: 2882 - DNA, 15 bp, Homo sapiens
ctacccctcaggtca

SEQ ID NO: 2883 - DNA, 15 bp, Homo sapiens
cctacccctcaggtc

SEQ ID NO: 2884 - DNA, 15 bp, Homo sapiens
ccctacccctcaggt

SEQ ID NO: 2885 - DNA, 15 bp, Homo sapiens
tccctacccctcagg

SEQ ID NO: 2886 - DNA, 15 bp, Homo sapiens
ctccctacccctcag

SEQ ID NO: 2887 - DNA, 15 bp, Homo sapiens
cctccctacccctca

SEQ ID NO: 2888 - DNA, 15 bp, Homo sapiens
acctccctacccctc

SEQ ID NO: 2889 - DNA, 15 bp, Homo sapiens
gacctccctacccct

SEQ ID NO: 2890 - DNA, 15 bp, Homo sapiens
ggacctccctacccc

SEQ ID NO: 2891 - DNA, 15 bp, Homo sapiens
aggacctccctaccc

SEQ ID NO: 2892 - DNA, 15 bp, Homo sapiens
caggacctccctacc

SEQ ID NO: 2893 - DNA, 15 bp, Homo sapiens
gcaggacctccctac

SEQ ID NO: 2894 - DNA, 15 bp, Homo sapiens
ggcaggacctcccta

SEQ ID NO: 2895 - DNA, 15 bp, Homo sapiens
aggcaggacctccct

SEQ ID NO: 2896 - DNA, 15 bp, Homo sapiens
taggcaggacctccc

SEQ ID NO: 2897 - DNA, 15 bp, Homo sapiens
gtaggcaggacctcc

SEQ ID NO: 2898 - DNA, 15 bp, Homo sapiens
tgtaggcaggacctc

SEQ ID NO: 2899 - DNA, 15 bp, Homo sapiens
ctgtaggcaggacct

SEQ ID NO: 2900 - DNA, 15 bp, Homo sapiens
actgtaggcaggacc

SEQ ID NO: 2901 - DNA, 15 bp, Homo sapiens
gactgtaggcaggac

SEQ ID NO: 2902 - DNA, 15 bp, Homo sapiens
agactgtaggcagga

SEQ ID NO: 2903 - DNA, 15 bp, Homo sapiens
gagactgtaggcagg

SEQ ID NO: 2904 - DNA, 15 bp, Homo sapiens
ggagactgtaggcag

SEQ ID NO: 2905 - DNA, 15 bp, Homo sapiens
cggagactgtaggca

SEQ ID NO: 2906 - DNA, 15 bp, Homo sapiens
acggagactgtaggc

SEQ ID NO: 2907 - DNA, 15 bp, Homo sapiens
cacggagactgtagg

SEQ ID NO: 2908 - DNA, 15 bp, Homo sapiens
gcacggagactgtag

SEQ ID NO: 2909 - DNA, 15 bp, Homo sapiens
cgcacggagactgta

SEQ ID NO: 2910 - DNA, 15 bp, Homo sapiens
gcgcacggagactgt

SEQ ID NO: 2911 - DNA, 15 bp, Homo sapiens
agcgcacggagactg

SEQ ID NO: 2912 - DNA, 15 bp, Homo sapiens
gagcgcacggagact

SEQ ID NO: 2913 - DNA, 15 bp, Homo sapiens
tgagcgcacggagac

SEQ ID NO: 2914 - DNA, 15 bp, Homo sapiens
ctgagcgcacggaga

SEQ ID NO: 2915 - DNA, 15 bp, Homo sapiens
gctgagcgcacggag

SEQ ID NO: 2916 - DNA, 15 bp, Homo sapiens
agctgagcgcacgga

SEQ ID NO: 2917 - DNA, 15 bp, Homo sapiens
cagctgagcgcacgg

SEQ ID NO: 2918 - DNA, 15 bp, Homo sapiens
tcagctgagcgcacg

SEQ ID NO: 2919 - DNA, 15 bp, Homo sapiens
ctcagctgagcgcac

SEQ ID NO: 2920 - DNA, 15 bp, Homo sapiens
gctcagctgagcgca

SEQ ID NO: 2921 - DNA, 15 bp, Homo sapiens
agctcagctgagcgc

SEQ ID NO: 2922 - DNA, 15 bp, Homo sapiens
cagctcagctgagcg

SEQ ID NO: 2923 - DNA, 15 bp, Homo sapiens
ccagctcagctgagc

SEQ ID NO: 2924 - DNA, 15 bp, Homo sapiens
accagctcagctgag

SEQ ID NO: 2925 - DNA, 15 bp, Homo sapiens
caccagctcagctga

SEQ ID NO: 2926 - DNA, 15 bp, Homo sapiens
acaccagctcagctg

SEQ ID NO: 2927 - DNA, 15 bp, Homo sapiens
gacaccagctcagct

SEQ ID NO: 2928 - DNA, 15 bp, Homo sapiens
ggacaccagctcagc

SEQ ID NO: 2929 - DNA, 15 bp, Homo sapiens
gggacaccagctcag

SEQ ID NO: 2930 - DNA, 15 bp, Homo sapiens
agggacaccagctca

SEQ ID NO: 2931 - DNA, 15 bp, Homo sapiens
cagggacaccagctc

SEQ ID NO: 2932 - DNA, 15 bp, Homo sapiens
ccagggacaccagct

SEQ ID NO: 2933 - DNA, 15 bp, Homo sapiens
gccagggacaccagc

SEQ ID NO: 2934 - DNA, 15 bp, Homo sapiens
cgccagggacaccag

SEQ ID NO: 2935 - DNA, 15 bp, Homo sapiens
gcgccagggacacca

SEQ ID NO: 2936 - DNA, 15 bp, Homo sapiens
tgcgccagggacacc

SEQ ID NO: 2937 - DNA, 15 bp, Homo sapiens
ctgcgccagggacac

SEQ ID NO: 2938 - DNA, 15 bp, Homo sapiens
tctgcgccagggaca

SEQ ID NO: 2939 - DNA, 15 bp, Homo sapiens
ctctgcgccagggac

SEQ ID NO: 2940 - DNA, 15 bp, Homo sapiens
gctctgcgccaggga

SEQ ID NO: 2941 - DNA, 15 bp, Homo sapiens
cgctctgcgccaggg

SEQ ID NO: 2942 - DNA, 15 bp, Homo sapiens
gcgctctgcgccagg

SEQ ID NO: 2943 - DNA, 15 bp, Homo sapiens
cgcgctctgcgccag

SEQ ID NO: 2944 - DNA, 15 bp, Homo sapiens
ccgcgctctgcgcca

SEQ ID NO: 2945 - DNA, 15 bp, Homo sapiens
tccgcgctctgcgcc

SEQ ID NO: 2946 - DNA, 15 bp, Homo sapiens
gtccgcgctctgcgc

SEQ ID NO: 2947 - DNA, 15 bp, Homo sapiens
cgtccgcgctctgcg

SEQ ID NO: 2948 - DNA, 15 bp, Homo sapiens
tcgtccgcgctctgc

SEQ ID NO: 2949 - DNA, 15 bp, Homo sapiens
ctcgtccgcgctctg

SEQ ID NO: 2950 - DNA, 15 bp, Homo sapiens
actcgtccgcgctct

SEQ ID NO: 2951 - DNA, 15 bp, Homo sapiens
aactcgtccgcgctc

SEQ ID NO: 2952 - DNA, 15 bp, Homo sapiens
aaactcgtccgcgct

SEQ ID NO: 2953 - DNA, 15 bp, Homo sapiens
aaaactcgtccgcgc

SEQ ID NO: 2954 - DNA, 15 bp, Homo sapiens
caaaactcgtccgcg

SEQ ID NO: 2955 - DNA, 15 bp, Homo sapiens
acaaaactcgtccgc

SEQ ID NO: 2956 - DNA, 15 bp, Homo sapiens
aacaaaactcgtccg

SEQ ID NO: 2957 - DNA, 15 bp, Homo sapiens
aaacaaaactcgtcc

SEQ ID NO: 2958 - DNA, 15 bp, Homo sapiens
gaaacaaaactcgtc

SEQ ID NO: 2959 - DNA, 15 bp, Homo sapiens
ggaaacaaaactcgt

SEQ ID NO: 2960 - DNA, 15 bp, Homo sapiens
aggaaacaaaactcg

SEQ ID NO: 2961 - DNA, 15 bp, Homo sapiens
aaggaaacaaaactc

SEQ ID NO: 2962 - DNA, 15 bp, Homo sapiens
aaaggaaacaaaact

SEQ ID NO: 2963 - DNA, 15 bp, Homo sapiens
aaaaggaaacaaaac

SEQ ID NO: 2964 - DNA, 15 bp, Homo sapiens
gaaaaggaaacaaaa

SEQ ID NO: 2965 - DNA, 15 bp, Homo sapiens
agaaaaggaaacaaa

SEQ ID NO: 2966 - DNA, 15 bp, Homo sapiens
aagaaaaggaaacaa

SEQ ID NO: 2967 - DNA, 15 bp, Homo sapiens
aaagaaaaggaaaca

SEQ ID NO: 2968 - DNA, 15 bp, Homo sapiens
aaaagaaaaggaaac

SEQ ID NO: 2969 - DNA, 15 bp, Homo sapiens
gaaaaagaaaaggaa

SEQ ID NO: 2970 - DNA, 15 bp, Homo sapiens
agaaaaagaaaagga

SEQ ID NO: 2971 - DNA, 15 bp, Homo sapiens
aagaaaaagaaaagg

SEQ ID NO: 2972 - DNA, 15 bp, Homo sapiens
aaagaaaaagaaaag

SEQ ID NO: 2973 - DNA, 15 bp, Homo sapiens
gaaaaaaaagaaaaa

SEQ ID NO: 2974 - DNA, 15 bp, Homo sapiens
agaaaaaaaagaaaa

SEQ ID NO: 2975 - DNA, 15 bp, Homo sapiens
aagaaaaaaaagaaa

SEQ ID NO: 2976 - DNA, 15 bp, Homo sapiens
aaagaaaaaaaagaa

SEQ ID NO: 2977 - DNA, 15 bp, Homo sapiens
gaaagaaaaaaaaga

SEQ ID NO: 2978 - DNA, 15 bp, Homo sapiens
ggaaagaaaaaaaag

SEQ ID NO: 2979 - DNA, 15 bp, Homo sapiens
aggaaagaaaaaaaa

SEQ ID NO: 2980 - DNA, 15 bp, Homo sapiens
aaggaaagaaaaaaa

SEQ ID NO: 2981 - DNA, 15 bp, Homo sapiens
aaaggaaagaaaaaa

SEQ ID NO: 2982 - DNA, 15 bp, Homo sapiens
taaaggaaagaaaaa

SEQ ID NO: 2983 - DNA, 15 bp, Homo sapiens
ttaaaggaaagaaaa

SEQ ID NO: 2984 - DNA, 15 bp, Homo sapiens
cttaaaggaaagaaa

SEQ ID NO: 2985 - DNA, 15 bp, Homo sapiens
acttaaaggaaagaa

SEQ ID NO: 2986 - DNA, 15 bp, Homo sapiens
gacttaaaggaaaga

SEQ ID NO: 2987 - DNA, 15 bp, Homo sapiens
agacttaaaggaaag

SEQ ID NO: 2988 - DNA, 15 bp, Homo sapiens
gagacttaaaggaaa

SEQ ID NO: 2989 - DNA, 15 bp, Homo sapiens
cgagacttaaaggaa

SEQ ID NO: 2990 - DNA, 15 bp, Homo sapiens
ccgagacttaaagga

SEQ ID NO: 2991 - DNA, 15 bp, Homo sapiens
accgagacttaaagg

SEQ ID NO: 2992 - DNA, 15 bp, Homo sapiens
gaccgagacttaaag

SEQ ID NO: 2993 - DNA, 15 bp, Homo sapiens
agaccgagacttaaa

SEQ ID NO: 2994 - DNA, 15 bp, Homo sapiens
cagaccgagacttaa

SEQ ID NO: 2995 - DNA, 15 bp, Homo sapiens
acagaccgagactta

SEQ ID NO: 2996 - DNA, 15 bp, Homo sapiens
gacagaccgagactt

SEQ ID NO: 2997 - DNA, 15 bp, Homo sapiens
cgacagaccgagact

SEQ ID NO: 2998 - DNA, 15 bp, Homo sapiens
gcgacagaccgagac

SEQ ID NO: 2999 - DNA, 15 bp, Homo sapiens
ggcgacagaccgaga

SEQ ID NO: 3000 - DNA, 15 bp, Homo sapiens
gggcgacagaccgag

SEQ ID NO: 3001 - DNA, 15 bp, Homo sapiens
tgggcgacagaccga

SEQ ID NO: 3002 - DNA, 15 bp, Homo sapiens
ctgggcgacagaccg

SEQ ID NO: 3003 - DNA, 15 bp, Homo sapiens
cctgggcgacagacc

SEQ ID NO: 3004 - DNA, 15 bp, Homo sapiens
gcctgggcgacagac

SEQ ID NO: 3005 - DNA, 15 bp, Homo sapiens
tccattgcactccag

SEQ ID NO: 3006 - DNA, 15 bp, Homo sapiens
ttccattgcactcca

SEQ ID NO: 3007 - DNA, 15 bp, Homo sapiens
gttccattgcactcc

SEQ ID NO: 3008 - DNA, 15 bp, Homo sapiens
cgttccattgcactc

SEQ ID NO: 3009 - DNA, 15 bp, Homo sapiens
tcgttccattgcact

SEQ ID NO: 3010 - DNA, 15 bp, Homo sapiens
atcgttccattgcac

SEQ ID NO: 3011 - DNA, 15 bp, Homo sapiens
gatcgttccattgca

SEQ ID NO: 3012 - DNA, 15 bp, Homo sapiens
agatcgttccattgc

SEQ ID NO: 3013 - DNA, 15 bp, Homo sapiens
gagatcgttccattg

SEQ ID NO: 3014 - DNA, 15 bp, Homo sapiens
ggagatcgttccatt

SEQ ID NO: 3015 - DNA, 15 bp, Homo sapiens
cggagatcgttccat

SEQ ID NO: 3016 - DNA, 15 bp, Homo sapiens
gcggagatcgttcca

SEQ ID NO: 3017 - DNA, 15 bp, Homo sapiens
agcggagatcgttcc

SEQ ID NO: 3018 - DNA, 15 bp, Homo sapiens
gagcggagatcgttc

SEQ ID NO: 3019 - DNA, 15 bp, Homo sapiens
tgagcggagatcgtt

SEQ ID NO: 3020 - DNA, 15 bp, Homo sapiens
gtgagcggagatcgt

SEQ ID NO: 3021 - DNA, 15 bp, Homo sapiens
agtgagcggagatcg

SEQ ID NO: 3022 - DNA, 15 bp, Homo sapiens
cagtgagcggagatc

SEQ ID NO: 3023 - DNA, 15 bp, Homo sapiens
gcagtgagcggagat

SEQ ID NO: 3024 - DNA, 15 bp, Homo sapiens
tgcagtgagcggaga

SEQ ID NO: 3025 - DNA, 15 bp, Homo sapiens
ttgcagtgagcggag

SEQ ID NO: 3026 - DNA, 15 bp, Homo sapiens
gttgcagtgagcgga

SEQ ID NO: 3027 - DNA, 15 bp, Homo sapiens
ggttgcagtgagcgg

SEQ ID NO: 3028 - DNA, 15 bp, Homo sapiens
aggttgcagtgagcg

SEQ ID NO: 3029 - DNA, 15 bp, Homo sapiens
gaggttgcagtgagc

SEQ ID NO: 3030 - DNA, 15 bp, Homo sapiens
ggaggttgcagtgag

SEQ ID NO: 3031 - DNA, 15 bp, Homo sapiens
gaggcggaggttgca

SEQ ID NO: 3032 - DNA, 15 bp, Homo sapiens
ggaggcggaggttgc

SEQ ID NO: 3033 - DNA, 15 bp, Homo sapiens
gggaggcggaggttg

SEQ ID NO: 3034 - DNA, 15 bp, Homo sapiens
cgcgcctgtaatccc

SEQ ID NO: 3035 - DNA, 15 bp, Homo sapiens
acgcgcctgtaatcc

SEQ ID NO: 3036 - DNA, 15 bp, Homo sapiens
gacgcgcctgtaatc

SEQ ID NO: 3037 - DNA, 15 bp, Homo sapiens
tgacgcgcctgtaat

SEQ ID NO: 3038 - DNA, 15 bp, Homo sapiens
gtgacgcgcctgtaa

SEQ ID NO: 3039 - DNA, 15 bp, Homo sapiens
ggtgacgcgcctgta

SEQ ID NO: 3040 - DNA, 15 bp, Homo sapiens
tggtgacgcgcctgt

SEQ ID NO: 3041 - DNA, 15 bp, Homo sapiens
gtggtgacgcgcctg

SEQ ID NO: 3042 - DNA, 15 bp, Homo sapiens
tgtggtgacgcgcct

SEQ ID NO: 3043 - DNA, 15 bp, Homo sapiens
atgtggtgacgcgcc

SEQ ID NO: 3044 - DNA, 15 bp, Homo sapiens
gatgtggtgacgcgc

SEQ ID NO: 3045 - DNA, 15 bp, Homo sapiens
ggatgtggtgacgcg

SEQ ID NO: 3046 - DNA, 15 bp, Homo sapiens
tggatgtggtgacgc

SEQ ID NO: 3047 - DNA, 15 bp, Homo sapiens
ctggatgtggtgacg

SEQ ID NO: 3048 - DNA, 15 bp, Homo sapiens
gctggatgtggtgac

SEQ ID NO: 3049 - DNA, 15 bp, Homo sapiens
agctggatgtggtga

SEQ ID NO: 3050 - DNA, 15 bp, Homo sapiens
tagctggatgtggtg

SEQ ID NO: 3051 - DNA, 15 bp, Homo sapiens
ttagctggatgtggt

SEQ ID NO: 3052 - DNA, 15 bp, Homo sapiens
attagctggatgtgg

SEQ ID NO: 3053 - DNA, 15 bp, Homo sapiens
aattagctggatgtg

SEQ ID NO: 3054 - DNA, 15 bp, Homo sapiens
aaattagctggatgt

SEQ ID NO: 3055 - DNA, 15 bp, Homo sapiens
aaaattagctggatg

SEQ ID NO: 3056 - DNA, 15 bp, Homo sapiens
aaaaattagctggat

SEQ ID NO: 3057 - DNA, 15 bp, Homo sapiens
caaaaattagctgga

SEQ ID NO: 3058 - DNA, 15 bp, Homo sapiens
ttgaaaccccgtctc

SEQ ID NO: 3059 - DNA, 15 bp, Homo sapiens
gttgaaaccccgtct

SEQ ID NO: 3060 - DNA, 15 bp, Homo sapiens
agttgaaaccccgtc

SEQ ID NO: 3061 - DNA, 15 bp, Homo sapiens
aagttgaaaccccgt

SEQ ID NO: 3062 - DNA, 15 bp, Homo sapiens
caagttgaaaccccg

SEQ ID NO: 3063 - DNA, 15 bp, Homo sapiens
acaagttgaaacccc

SEQ ID NO: 3064 - DNA, 15 bp, Homo sapiens
aacaagttgaaaccc

SEQ ID NO: 3065 - DNA, 15 bp, Homo sapiens
caacaagttgaaacc

SEQ ID NO: 3066 - DNA, 15 bp, Homo sapiens
ccaacaagttgaaac

SEQ ID NO: 3067 - DNA, 15 bp, Homo sapiens
gccaacaagttgaaa

SEQ ID NO: 3068 - DNA, 15 bp, Homo sapiens
ggccaacaagttgaa

SEQ ID NO: 3069 - DNA, 15 bp, Homo sapiens
tggccaacaagttga

SEQ ID NO: 3070 - DNA, 15 bp, Homo sapiens
ctggccaacaagttg

SEQ ID NO: 3071 - DNA, 15 bp, Homo sapiens
cctggccaacaagtt

SEQ ID NO: 3072 - DNA, 15 bp, Homo sapiens
gcctggccaacaagt

SEQ ID NO: 3073 - DNA, 15 bp, Homo sapiens
agcctggccaacaag

SEQ ID NO: 3074 - DNA, 15 bp, Homo sapiens
cagcctggccaacaa

SEQ ID NO: 3075 - DNA, 15 bp, Homo sapiens
ccagcctggccaaca

SEQ ID NO: 3076 - DNA, 15 bp, Homo sapiens
accagcctggccaac

SEQ ID NO: 3077 - DNA, 15 bp, Homo sapiens
cgagaccagcctggc

SEQ ID NO: 3078 - DNA, 15 bp, Homo sapiens
tcgagaccagcctgg

SEQ ID NO: 3079 - DNA, 15 bp, Homo sapiens
ggttcgagaccagcc

SEQ ID NO: 3080 - DNA, 15 bp, Homo sapiens
gggttcgagaccagc

SEQ ID NO: 3081 - DNA, 15 bp, Homo sapiens
agggttcgagaccag

SEQ ID NO: 3082 - DNA, 15 bp, Homo sapiens
gagggttcgagacca

SEQ ID NO: 3083 - DNA, 15 bp, Homo sapiens
cgagggttcgagacc

SEQ ID NO: 3084 - DNA, 15 bp, Homo sapiens
tcgagggttcgagac

SEQ ID NO: 3085 - DNA, 15 bp, Homo sapiens
gtcgagggttcgaga

SEQ ID NO: 3086 - DNA, 15 bp, Homo sapiens
ggtcgagggttcgag

SEQ ID NO: 3087 - DNA, 15 bp, Homo sapiens
aggtcgagggttcga

SEQ ID NO: 3088 - DNA, 15 bp, Homo sapiens
gaggtcgagggttcg

SEQ ID NO: 3089 - DNA, 15 bp, Homo sapiens
tgaggtcgagggttc

SEQ ID NO: 3090 - DNA, 15 bp, Homo sapiens
ctgaggtcgagggtt

SEQ ID NO: 3091 - DNA, 15 bp, Homo sapiens
cctgaggtcgagggt

SEQ ID NO: 3092 - DNA, 15 bp, Homo sapiens
acctgaggtcgaggg

SEQ ID NO: 3093 - DNA, 15 bp, Homo sapiens
cacctgaggtcgagg

SEQ ID NO: 3094 - DNA, 15 bp, Homo sapiens
tcacctgaggtcgag

SEQ ID NO: 3095 - DNA, 15 bp, Homo sapiens
atcacctgaggtcga

SEQ ID NO: 3096 - DNA, 15 bp, Homo sapiens
gatcacctgaggtcg

SEQ ID NO: 3097 - DNA, 15 bp, Homo sapiens
gtggatcacctgagg

SEQ ID NO: 3098 - DNA, 15 bp, Homo sapiens
ggtggatcacctgag

SEQ ID NO: 3099 - DNA, 15 bp, Homo sapiens
cggtggatcacctga

SEQ ID NO: 3100 - DNA, 15 bp, Homo sapiens
ccggtggatcacctg

SEQ ID NO: 3101 - DNA, 15 bp, Homo sapiens
gccggtggatcacct

SEQ ID NO: 3102 - DNA, 15 bp, Homo sapiens
ggccggtggatcacc

SEQ ID NO: 3103 - DNA, 15 bp, Homo sapiens
aggccggtggatcac

SEQ ID NO: 3104 - DNA, 15 bp, Homo sapiens
gaggccggtggatca

SEQ ID NO: 3105 - DNA, 15 bp, Homo sapiens
cgaggccggtggatc

SEQ ID NO: 3106 - DNA, 15 bp, Homo sapiens
ccgaggccggtggat

SEQ ID NO: 3107 - DNA, 15 bp, Homo sapiens
gccgaggccggtgga

SEQ ID NO: 3108 - DNA, 15 bp, Homo sapiens
ggccgaggccggtgg

SEQ ID NO: 3109 - DNA, 15 bp, Homo sapiens
aggccgaggccggtg

SEQ ID NO: 3110 - DNA, 15 bp, Homo sapiens
gaggccgaggccggt

SEQ ID NO: 3111 - DNA, 15 bp, Homo sapiens
ggaggccgaggccgg

SEQ ID NO: 3112 - DNA, 15 bp, Homo sapiens
gggaggccgaggccg

SEQ ID NO: 3113 - DNA, 15 bp, Homo sapiens
ggggaggccgaggcc

SEQ ID NO: 3114 - DNA, 15 bp, Homo sapiens
tggggaggccgaggc

SEQ ID NO: 3115 - DNA, 15 bp, Homo sapiens
ttggggaggccgagg

SEQ ID NO: 3116 - DNA, 15 bp, Homo sapiens
cttggggaggccgag

SEQ ID NO: 3117 - DNA, 15 bp, Homo sapiens
acttggggaggccga

SEQ ID NO: 3118 - DNA, 15 bp, Homo sapiens
cacttggggaggccg

SEQ ID NO: 3119 - DNA, 15 bp, Homo sapiens
gcacttggggaggcc

SEQ ID NO: 3120 - DNA, 15 bp, Homo sapiens
agcacttggggaggc

SEQ ID NO: 3121 - DNA, 15 bp, Homo sapiens
cagcacttggggagg

SEQ ID NO: 3122 - DNA, 15 bp, Homo sapiens
ccagcacttggggag

SEQ ID NO: 3123 - DNA, 15 bp, Homo sapiens
cccagcacttgggga

SEQ ID NO: 3124 - DNA, 15 bp, Homo sapiens
tcccagcacttgggg

SEQ ID NO: 3125 - DNA, 15 bp, Homo sapiens
atcccagcacttggg

SEQ ID NO: 3126 - DNA, 15 bp, Homo sapiens
aatcccagcacttgg

SEQ ID NO: 3127 - DNA, 15 bp, Homo sapiens
taatcccagcacttg

SEQ ID NO: 3128 - DNA, 15 bp, Homo sapiens
cgcctataatcccag

SEQ ID NO: 3129 - DNA, 15 bp, Homo sapiens
acgcctataatccca

SEQ ID NO: 3130 - DNA, 15 bp, Homo sapiens
cacgcctataatccc

SEQ ID NO: 3131 - DNA, 15 bp, Homo sapiens
tcacgcctataatcc

SEQ ID NO: 3132 - DNA, 15 bp, Homo sapiens
ctcacgcctataatc

SEQ ID NO: 3133 - DNA, 15 bp, Homo sapiens
gctcacgcctataat

SEQ ID NO: 3134 - DNA, 15 bp, Homo sapiens
ggctcacgcctataa

SEQ ID NO: 3135 - DNA, 15 bp, Homo sapiens
tggctcacgcctata

SEQ ID NO: 3136 - DNA, 15 bp, Homo sapiens
gtggctcacgcctat

SEQ ID NO: 3137 - DNA, 15 bp, Homo sapiens
ggtggctcacgccta

SEQ ID NO: 3138 - DNA, 15 bp, Homo sapiens
cgcgcggtggctcac

SEQ ID NO: 3139 - DNA, 15 bp, Homo sapiens
gcgcgcggtggctca

SEQ ID NO: 3140 - DNA, 15 bp, Homo sapiens
cgcgcgcggtggctc

SEQ ID NO: 3141 - DNA, 15 bp, Homo sapiens
ccgcgcgcggtggct

SEQ ID NO: 3142 - DNA, 15 bp, Homo sapiens
gccgcgcgcggtggc

SEQ ID NO: 3143 - DNA, 15 bp, Homo sapiens
ggccgcgcgcggtgg

SEQ ID NO: 3144 - DNA, 15 bp, Homo sapiens
cggccgcgcgcggtg

SEQ ID NO: 3145 - DNA, 15 bp, Homo sapiens
tcggccgcgcgcggt

SEQ ID NO: 3146 - DNA, 15 bp, Homo sapiens
ctcggccgcgcgcgg

SEQ ID NO: 3147 - DNA, 15 bp, Homo sapiens
actcggccgcgcgcg

SEQ ID NO: 3148 - DNA, 15 bp, Homo sapiens
aactcggccgcgcgc

SEQ ID NO: 3149 - DNA, 15 bp, Homo sapiens
aaactcggccgcgcg

SEQ ID NO: 3150 - DNA, 15 bp, Homo sapiens
aaaactcggccgcgc

SEQ ID NO: 3151 - DNA, 15 bp, Homo sapiens
caaaactcggccgcg

SEQ ID NO: 3152 - DNA, 15 bp, Homo sapiens
acaaaactcggccgc

SEQ ID NO: 3153 - DNA, 15 bp, Homo sapiens
aacaaaactcggccg

SEQ ID NO: 3154 - DNA, 15 bp, Homo sapiens
aaacaaaactcggcc

SEQ ID NO: 3155 - DNA, 15 bp, Homo sapiens
gaaacaaaactcggc

SEQ ID NO: 3156 - DNA, 15 bp, Homo sapiens
agaaacaaaactcgg

SEQ ID NO: 3157 - DNA, 15 bp, Homo sapiens
aagaaacaaaactcg

SEQ ID NO: 3158 - DNA, 15 bp, Homo sapiens
aaagaaacaaaactc

SEQ ID NO: 3159 - DNA, 15 bp, Homo sapiens
aaaagaaacaaaact

SEQ ID NO: 3160 - DNA, 15 bp, Homo sapiens
taaaagaaacaaaac

SEQ ID NO: 3161 - DNA, 15 bp, Homo sapiens
ttaaaagaaacaaaa

SEQ ID NO: 3162 - DNA, 15 bp, Homo sapiens
tttaaaagaaacaaa

SEQ ID NO: 3163 - DNA, 15 bp, Homo sapiens
ttttaaaagaaacaa

SEQ ID NO: 3164 - DNA, 15 bp, Homo sapiens
tttttaaaagaaaca

SEQ ID NO: 3165 - DNA, 15 bp, Homo sapiens
gtttttaaaagaaac

SEQ ID NO: 3166 - DNA, 15 bp, Homo sapiens
tgtttttaaaagaaa

SEQ ID NO: 3167 - DNA, 15 bp, Homo sapiens
ttgtttttaaaagaa

SEQ ID NO: 3168 - DNA, 15 bp, Homo sapiens
cttgtttttaaaaga

SEQ ID NO: 3169 - DNA, 15 bp, Homo sapiens
tcttgtttttaaaag

SEQ ID NO: 3170 - DNA, 15 bp, Homo sapiens
gtcttgtttttaaaa

SEQ ID NO: 3171 - DNA, 15 bp, Homo sapiens
agtcttgtttttaaa

SEQ ID NO: 3172 - DNA, 15 bp, Homo sapiens
aagtcttgtttttaa

SEQ ID NO: 3173 - DNA, 15 bp, Homo sapiens
taagtcttgttttta

SEQ ID NO: 3174 - DNA, 15 bp, Homo sapiens
ctaagtcttgttttt

SEQ ID NO: 3175 - DNA, 15 bp, Homo sapiens
cctaagtcttgtttt

SEQ ID NO: 3176 - DNA, 15 bp, Homo sapiens
tcctaagtcttgttt

SEQ ID NO: 3177 - DNA, 15 bp, Homo sapiens
ctcctaagtcttgtt

SEQ ID NO: 3178 - DNA, 15 bp, Homo sapiens
tctcctaagtcttgt

SEQ ID NO: 3179 - DNA, 15 bp, Homo sapiens
ctctcctaagtcttg

SEQ ID NO: 3180 - DNA, 15 bp, Homo sapiens
gctctcctaagtctt

SEQ ID NO: 3181 - DNA, 15 bp, Homo sapiens
ggctctcctaagtct

SEQ ID NO: 3182 - DNA, 15 bp, Homo sapiens
aggctctcctaagtc

SEQ ID NO: 3183 - DNA, 15 bp, Homo sapiens
caggctctcctaagt

SEQ ID NO: 3184 - DNA, 15 bp, Homo sapiens
gcaggctctcctaag

SEQ ID NO: 3185 - DNA, 15 bp, Homo sapiens
cgcaggctctcctaa

SEQ ID NO: 3186 - DNA, 15 bp, Homo sapiens
ccgcaggctctccta

SEQ ID NO: 3187 - DNA, 15 bp, Homo sapiens
tccgcaggctctcct

SEQ ID NO: 3188 - DNA, 15 bp, Homo sapiens
ctccgcaggctctcc

SEQ ID NO: 3189 - DNA, 15 bp, Homo sapiens
tctccgcaggctctc

SEQ ID NO: 3190 - DNA, 15 bp, Homo sapiens
gtctccgcaggctct

SEQ ID NO: 3191 - DNA, 15 bp, Homo sapiens
ggtctccgcaggctc

SEQ ID NO: 3192 - DNA, 15 bp, Homo sapiens
gggtctccgcaggct

SEQ ID NO: 3193 - DNA, 15 bp, Homo sapiens
cgggtctccgcaggc

SEQ ID NO: 3194 - DNA, 15 bp, Homo sapiens
ccgggtctccgcagg

SEQ ID NO: 3195 - DNA, 15 bp, Homo sapiens
tccgggtctccgcag

SEQ ID NO: 3196 - DNA, 15 bp, Homo sapiens
ctccgggtctccgca

SEQ ID NO: 3197 - DNA, 15 bp, Homo sapiens
cctccgggtctccgc

SEQ ID NO: 3198 - DNA, 15 bp, Homo sapiens
acctccgggtctccg

SEQ ID NO: 3199 - DNA, 15 bp, Homo sapiens
cacctccgggtctcc

SEQ ID NO: 3200 - DNA, 15 bp, Homo sapiens
ccacctccgggtctc

SEQ ID NO: 3201 - DNA, 15 bp, Homo sapiens
cccacctccgggtct

SEQ ID NO: 3202 - DNA, 15 bp, Homo sapiens
ccccacctccgggtc

SEQ ID NO: 3203 - DNA, 15 bp, Homo sapiens
accccacctccgggt

SEQ ID NO: 3204 - DNA, 15 bp, Homo sapiens
caccccacctccggg

SEQ ID NO: 3205 - DNA, 15 bp, Homo sapiens
gcaccccacctccgg

SEQ ID NO: 3206 - DNA, 15 bp, Homo sapiens
ggcaccccacctccg

SEQ ID NO: 3207 - DNA, 15 bp, Homo sapiens
gggcaccccacctcc

SEQ ID NO: 3208 - DNA, 15 bp, Homo sapiens
tgggcaccccacctc

SEQ ID NO: 3209 - DNA, 15 bp, Homo sapiens
ttgggcaccccacct

SEQ ID NO: 3210 - DNA, 15 bp, Homo sapiens
attgggcaccccacc

SEQ ID NO: 3211 - DNA, 15 bp, Homo sapiens
gattgggcaccccac

SEQ ID NO: 3212 - DNA, 15 bp, Homo sapiens
ggattgggcacccca

SEQ ID NO: 3213 - DNA, 15 bp, Homo sapiens
aggattgggcacccc

SEQ ID NO: 3214 - DNA, 15 bp, Homo sapiens
gaggattgggcaccc

SEQ ID NO: 3215 - DNA, 15 bp, Homo sapiens
ggaggattgggcacc

SEQ ID NO: 3216 - DNA, 15 bp, Homo sapiens
gggaggattgggcac

SEQ ID NO: 3217 - DNA, 15 bp, Homo sapiens
agggaggattgggca

SEQ ID NO: 3218 - DNA, 15 bp, Homo sapiens
gagggaggattgggc

SEQ ID NO: 3219 - DNA, 15 bp, Homo sapiens
agagggaggattggg

SEQ ID NO: 3220 - DNA, 15 bp, Homo sapiens
gagagggaggattgg

SEQ ID NO: 3221 - DNA, 15 bp, Homo sapiens
ggagagggaggattg

SEQ ID NO: 3222 - DNA, 15 bp, Homo sapiens
gggagagggaggatt

SEQ ID NO: 3223 - DNA, 15 bp, Homo sapiens
tgggagagggaggat

SEQ ID NO: 3224 - DNA, 15 bp, Homo sapiens
gtgggagagggagga

SEQ ID NO: 3225 - DNA, 15 bp, Homo sapiens
cgtgggagagggagg

SEQ ID NO: 3226 - DNA, 15 bp, Homo sapiens
acgtgggagagggag

SEQ ID NO: 3227 - DNA, 15 bp, Homo sapiens
aacgtgggagaggga

SEQ ID NO: 3228 - DNA, 15 bp, Homo sapiens
gaacgtgggagaggg

SEQ ID NO: 3229 - DNA, 15 bp, Homo sapiens
ggaacgtgggagagg

SEQ ID NO: 3230 - DNA, 15 bp, Homo sapiens
gggaacgtgggagag

SEQ ID NO: 3231 - DNA, 15 bp, Homo sapiens
agggaacgtgggaga

SEQ ID NO: 3232 - DNA, 15 bp, Homo sapiens
cagggaacgtgggag

SEQ ID NO: 3233 - DNA, 15 bp, Homo sapiens
gcagggaacgtggga

SEQ ID NO: 3234 - DNA, 15 bp, Homo sapiens
tgcagggaacgtggg

SEQ ID NO: 3235 - DNA, 15 bp, Homo sapiens
ctgcagggaacgtgg

SEQ ID NO: 3236 - DNA, 15 bp, Homo sapiens
gctgcagggaacgtg

SEQ ID NO: 3237 - DNA, 15 bp, Homo sapiens
ggctgcagggaacgt

SEQ ID NO: 3238 - DNA, 15 bp, Homo sapiens
gggctgcagggaacg

SEQ ID NO: 3239 - DNA, 15 bp, Homo sapiens
ggggctgcagggaac

SEQ ID NO: 3240 - DNA, 15 bp, Homo sapiens
tggggctgcagggaa

SEQ ID NO: 3241 - DNA, 15 bp, Homo sapiens
atggggctgcaggga

SEQ ID NO: 3242 - DNA, 15 bp, Homo sapiens
gatggggctgcaggg

SEQ ID NO: 3243 - DNA, 15 bp, Homo sapiens
agatggggctgcagg

SEQ ID NO: 3244 - DNA, 15 bp, Homo sapiens
aagatggggctgcag

SEQ ID NO: 3245 - DNA, 15 bp, Homo sapiens
gaagatggggctgca

SEQ ID NO: 3246 - DNA, 15 bp, Homo sapiens
ggaagatggggctgc

SEQ ID NO: 3247 - DNA, 15 bp, Homo sapiens
tggaagatggggctg

SEQ ID NO: 3248 - DNA, 15 bp, Homo sapiens
ctggaagatggggct

SEQ ID NO: 3249 - DNA, 15 bp, Homo sapiens
tctggaagatggggc

SEQ ID NO: 3250 - DNA, 15 bp, Homo sapiens
gtctggaagatgggg

SEQ ID NO: 3251 - DNA, 15 bp, Homo sapiens
ggtctggaagatggg

SEQ ID NO: 3252 - DNA, 15 bp, Homo sapiens
cggtctggaagatgg

SEQ ID NO: 3253 - DNA, 15 bp, Homo sapiens
acggtctggaagatg

SEQ ID NO: 3254 - DNA, 15 bp, Homo sapiens
aacggtctggaagat

SEQ ID NO: 3255 - DNA, 15 bp, Homo sapiens
caacggtctggaaga

SEQ ID NO: 3256 - DNA, 15 bp, Homo sapiens
gcaacggtctggaag

SEQ ID NO: 3257 - DNA, 15 bp, Homo sapiens
agcaacggtctggaa

SEQ ID NO: 3258 - DNA, 15 bp, Homo sapiens
cagcaacggtctgga

SEQ ID NO: 3259 - DNA, 15 bp, Homo sapiens
gcagcaacggtctgg

SEQ ID NO: 3260 - DNA, 15 bp, Homo sapiens
agcagcaacggtctg

SEQ ID NO: 3261 - DNA, 15 bp, Homo sapiens
cagcagcaacggtct

SEQ ID NO: 3262 - DNA, 15 bp, Homo sapiens
ccagcagcaacggtc

SEQ ID NO: 3263 - DNA, 15 bp, Homo sapiens
accagcagcaacggt

SEQ ID NO: 3264 - DNA, 15 bp, Homo sapiens
gaccagcagcaacgg

SEQ ID NO: 3265 - DNA, 15 bp, Homo sapiens
agaccagcagcaacg

SEQ ID NO: 3266 - DNA, 15 bp, Homo sapiens
gagaccagcagcaac

SEQ ID NO: 3267 - DNA, 15 bp, Homo sapiens
agagaccagcagcaa

SEQ ID NO: 3268 - DNA, 15 bp, Homo sapiens
gagagaccagcagca

SEQ ID NO: 3269 - DNA, 15 bp, Homo sapiens
cgagagaccagcagc

SEQ ID NO: 3270 - DNA, 15 bp, Homo sapiens
ccgagagaccagcag

SEQ ID NO: 3271 - DNA, 15 bp, Homo sapiens
cccgagagaccagca

SEQ ID NO: 3272 - DNA, 15 bp, Homo sapiens
ccccgagagaccagc

SEQ ID NO: 3273 - DNA, 15 bp, Homo sapiens
gccccgagagaccag

SEQ ID NO: 3274 - DNA, 15 bp, Homo sapiens
tgccccgagagacca

SEQ ID NO: 3275 - DNA, 15 bp, Homo sapiens
ctgccccgagagacc

SEQ ID NO: 3276 - DNA, 15 bp, Homo sapiens
gctgccccgagagac

SEQ ID NO: 3277 - DNA, 15 bp, Homo sapiens
agctgccccgagaga

SEQ ID NO: 3278 - DNA, 15 bp, Homo sapiens
aagctgccccgagag

SEQ ID NO: 3279 - DNA, 15 bp, Homo sapiens
gaagctgccccgaga

SEQ ID NO: 3280 - DNA, 15 bp, Homo sapiens
agaagctgccccgag

SEQ ID NO: 3281 - DNA, 15 bp, Homo sapiens
cagaagctgccccga

SEQ ID NO: 3282 - DNA, 15 bp, Homo sapiens
gcagaagctgccccg

SEQ ID NO: 3283 - DNA, 15 bp, Homo sapiens
ggcagaagctgcccc

SEQ ID NO: 3284 - DNA, 15 bp, Homo sapiens
aggcagaagctgccc

SEQ ID NO: 3285 - DNA, 15 bp, Homo sapiens
caggcagaagctgcc

SEQ ID NO: 3286 - DNA, 15 bp, Homo sapiens
ccaggcagaagctgc

SEQ ID NO: 3287 - DNA, 15 bp, Homo sapiens
cccaggcagaagctg

SEQ ID NO: 3288 - DNA, 15 bp, Homo sapiens
gcccaggcagaagct

SEQ ID NO: 3289 - DNA, 15 bp, Homo sapiens
cgcccaggcagaagc

SEQ ID NO: 3290 - DNA, 15 bp, Homo sapiens
gcgcccaggcagaag

SEQ ID NO: 3291 - DNA, 15 bp, Homo sapiens
tgcgcccaggcagaa

SEQ ID NO: 3292 - DNA, 15 bp, Homo sapiens
ctgcgcccaggcaga

SEQ ID NO: 3293 - DNA, 15 bp, Homo sapiens
tctgcgcccaggcag

SEQ ID NO: 3294 - DNA, 15 bp, Homo sapiens
atctgcgcccaggca

SEQ ID NO: 3295 - DNA, 15 bp, Homo sapiens
catctgcgcccaggc

SEQ ID NO: 3296 - DNA, 15 bp, Homo sapiens
ccatctgcgcccagg

SEQ ID NO: 3297 - DNA, 15 bp, Homo sapiens
cccatctgcgcccag

SEQ ID NO: 3298 - DNA, 15 bp, Homo sapiens
ccccatctgcgccca

SEQ ID NO: 3299 - DNA, 15 bp, Homo sapiens
tccccatctgcgccc

SEQ ID NO: 3300 - DNA, 15 bp, Homo sapiens
ttccccatctgcgcc

SEQ ID NO: 3301 - DNA, 15 bp, Homo sapiens
cttccccatctgcgc

SEQ ID NO: 3302 - DNA, 15 bp, Homo sapiens
gcttccccatctgcg

SEQ ID NO: 3303 - DNA, 15 bp, Homo sapiens
agcttccccatctgc

SEQ ID NO: 3304 - DNA, 15 bp, Homo sapiens
cagcttccccatctg

SEQ ID NO: 3305 - DNA, 15 bp, Homo sapiens
ccagcttccccatct

SEQ ID NO: 3306 - DNA, 15 bp, Homo sapiens
cccagcttccccatc

SEQ ID NO: 3307 - DNA, 15 bp, Homo sapiens
gcccagcttccccat

SEQ ID NO: 3308 - DNA, 15 bp, Homo sapiens
ggcccagcttcccca

SEQ ID NO: 3309 - DNA, 15 bp, Homo sapiens
cggcccagcttcccc

SEQ ID NO: 3310 - DNA, 15 bp, Homo sapiens
tcggcccagcttccc

SEQ ID NO: 3311 - DNA, 15 bp, Homo sapiens
ctcggcccagcttcc

SEQ ID NO: 3312 - DNA, 15 bp, Homo sapiens
cctcggcccagcttc

SEQ ID NO: 3313 - DNA, 15 bp, Homo sapiens
acctcggcccagctt

SEQ ID NO: 3314 - DNA, 15 bp, Homo sapiens
cacctcggcccagct

SEQ ID NO: 3315 - DNA, 15 bp, Homo sapiens
ccacctcggcccagc

SEQ ID NO: 3316 - DNA, 15 bp, Homo sapiens
accacctcggcccag

SEQ ID NO: 3317 - DNA, 15 bp, Homo sapiens
caccacctcggccca

SEQ ID NO: 3318 - DNA, 15 bp, Homo sapiens
gcaccacctcggccc

SEQ ID NO: 3319 - DNA, 15 bp, Homo sapiens
ggcaccacctcggcc

SEQ ID NO: 3320 - DNA, 15 bp, Homo sapiens
cggcaccacctcggc

SEQ ID NO: 3321 - DNA, 15 bp, Homo sapiens
acggcaccacctcgg

SEQ ID NO: 3322 - DNA, 15 bp, Homo sapiens
cacggcaccacctcg

SEQ ID NO: 3323 - DNA, 15 bp, Homo sapiens
ccacggcaccacctc

SEQ ID NO: 3324 - DNA, 15 bp, Homo sapiens
tccacggcaccacct

SEQ ID NO: 3325 - DNA, 15 bp, Homo sapiens
ttccacggcaccacc

SEQ ID NO: 3326 - DNA, 15 bp, Homo sapiens
attccacggcaccac

SEQ ID NO: 3327 - DNA, 15 bp, Homo sapiens
cattccacggcacca

SEQ ID NO: 3328 - DNA, 15 bp, Homo sapiens
tcattccacggcacc

SEQ ID NO: 3329 - DNA, 15 bp, Homo sapiens
gtcattccacggcac

SEQ ID NO: 3330 - DNA, 15 bp, Homo sapiens
ggtcattccacggca

SEQ ID NO: 3331 - DNA, 15 bp, Homo sapiens
cggtcattccacggc

SEQ ID NO: 3332 - DNA, 15 bp, Homo sapiens
ccggtcattccacgg

SEQ ID NO: 3333 - DNA, 15 bp, Homo sapiens
cccggtcattccacg

SEQ ID NO: 3334 - DNA, 15 bp, Homo sapiens
tcccggtcattccac

SEQ ID NO: 3335 - DNA, 15 bp, Homo sapiens
ctcccggtcattcca

SEQ ID NO: 3336 - DNA, 15 bp, Homo sapiens
actcccggtcattcc

SEQ ID NO: 3337 - DNA, 15 bp, Homo sapiens
tactcccggtcattc

SEQ ID NO: 3338 - DNA, 15 bp, Homo sapiens
ttactcccggtcatt

SEQ ID NO: 3339 - DNA, 15 bp, Homo sapiens
gttactcccggtcat

SEQ ID NO: 3340 - DNA, 15 bp, Homo sapiens
ggttactcccggtca

SEQ ID NO: 3341 - DNA, 15 bp, Homo sapiens
gggttactcccggtc

SEQ ID NO: 3342 - DNA, 15 bp, Homo sapiens
ggggttactcccggt

SEQ ID NO: 3343 - DNA, 15 bp, Homo sapiens
cggggttactcccgg

SEQ ID NO: 3344 - DNA, 15 bp, Homo sapiens
ccggggttactcccg

SEQ ID NO: 3345 - DNA, 15 bp, Homo sapiens
gccggggttactccc

SEQ ID NO: 3346 - DNA, 15 bp, Homo sapiens
cgccggggttactcc

SEQ ID NO: 3347 - DNA, 15 bp, Homo sapiens
ccgccggggttactc

SEQ ID NO: 3348 - DNA, 15 bp, Homo sapiens
cccgccggggttact

SEQ ID NO: 3349 - DNA, 15 bp, Homo sapiens
gcccgccggggttac

SEQ ID NO: 3350 - DNA, 15 bp, Homo sapiens
cgcccgccggggtta

SEQ ID NO: 3351 - DNA, 15 bp, Homo sapiens
ccgcccgccggggtt

SEQ ID NO: 3352 - DNA, 15 bp, Homo sapiens
gccgcccgccggggt

SEQ ID NO: 3353 - DNA, 15 bp, Homo sapiens
cgccgcccgccgggg

SEQ ID NO: 3354 - DNA, 15 bp, Homo sapiens
gcgccgcccgccggg

SEQ ID NO: 3355 - DNA, 15 bp, Homo sapiens
tgcgccgcccgccgg

SEQ ID NO: 3356 - DNA, 15 bp, Homo sapiens
ctgcgccgcccgccg

SEQ ID NO: 3357 - DNA, 15 bp, Homo sapiens
tctgcgccgcccgcc

SEQ ID NO: 3358 - DNA, 15 bp, Homo sapiens
ttctgcgccgcccgc

SEQ ID NO: 3359 - DNA, 15 bp, Homo sapiens
gttctgcgccgcccg

SEQ ID NO: 3360 - DNA, 15 bp, Homo sapiens
agttctgcgccgccc

SEQ ID NO: 3361 - DNA, 15 bp, Homo sapiens
gagttctgcgccgcc

SEQ ID NO: 3362 - DNA, 15 bp, Homo sapiens
cgagttctgcgccgc

SEQ ID NO: 3363 - DNA, 15 bp, Homo sapiens
ccgagttctgcgccg

SEQ ID NO: 3364 - DNA, 15 bp, Homo sapiens
tccgagttctgcgcc

SEQ ID NO: 3365 - DNA, 15 bp, Homo sapiens
ctccgagttctgcgc

SEQ ID NO: 3366 - DNA, 15 bp, Homo sapiens
gctccgagttctgcg

SEQ ID NO: 3367 - DNA, 15 bp, Homo sapiens
agctccgagttctgc

SEQ ID NO: 3368 - DNA, 15 bp, Homo sapiens
gagctccgagttctg

SEQ ID NO: 3369 - DNA, 15 bp, Homo sapiens
ggagctccgagttct

SEQ ID NO: 3370 - DNA, 15 bp, Homo sapiens
cggagctccgagttc

SEQ ID NO: 3371 - DNA, 15 bp, Homo sapiens
gcggagctccgagtt

SEQ ID NO: 3372 - DNA, 15 bp, Homo sapiens
ggcggagctccgagt

SEQ ID NO: 3373 - DNA, 15 bp, Homo sapiens
cggcggagctccgag

SEQ ID NO: 3374 - DNA, 15 bp, Homo sapiens
gcggcggagctccga

SEQ ID NO: 3375 - DNA, 15 bp, Homo sapiens
cgcggcggagctccg

SEQ ID NO: 3376 - DNA, 15 bp, Homo sapiens
ccgcggcggagctcc

SEQ ID NO: 3377 - DNA, 15 bp, Homo sapiens
cccgcggcggagctc

SEQ ID NO: 3378 - DNA, 15 bp, Homo sapiens
ccccgcggcggagct

SEQ ID NO: 3379 - DNA, 15 bp, Homo sapiens
gccccgcggcggagc

SEQ ID NO: 3380 - DNA, 15 bp, Homo sapiens
agccccgcggcggag

SEQ ID NO: 3381 - DNA, 15 bp, Homo sapiens
cagccccgcggcgga

SEQ ID NO: 3382 - DNA, 15 bp, Homo sapiens
ccagccccgcggcgg

SEQ ID NO: 3383 - DNA, 15 bp, Homo sapiens
cccagccccgcggcg

SEQ ID NO: 3384 - DNA, 15 bp, Homo sapiens
gcccagccccgcggc

SEQ ID NO: 3385 - DNA, 15 bp, Homo sapiens
agcccagccccgcgg

SEQ ID NO: 3386 - DNA, 15 bp, Homo sapiens
cagcccagccccgcg

SEQ ID NO: 3387 - DNA, 15 bp, Homo sapiens
ccagcccagccccgc

SEQ ID NO: 3388 - DNA, 15 bp, Homo sapiens
cccagcccagccccg

SEQ ID NO: 3389 - DNA, 15 bp, Homo sapiens
gcccagcccagcccc

SEQ ID NO: 3390 - DNA, 15 bp, Homo sapiens
agcccagcccagccc

SEQ ID NO: 3391 - DNA, 15 bp, Homo sapiens
gagcccagcccagcc

SEQ ID NO: 3392 - DNA, 15 bp, Homo sapiens
agagcccagcccagc

SEQ ID NO: 3393 - DNA, 15 bp, Homo sapiens
cagagcccagcccag

SEQ ID NO: 3394 - DNA, 15 bp, Homo sapiens
gcagagcccagccca

SEQ ID NO: 3395 - DNA, 15 bp, Homo sapiens
ggcagagcccagccc

SEQ ID NO: 3396 - DNA, 15 bp, Homo sapiens
cggcagagcccagcc

SEQ ID NO: 3397 - DNA, 15 bp, Homo sapiens
acggcagagcccagc

SEQ ID NO: 3398 - DNA, 15 bp, Homo sapiens
cacggcagagcccag

SEQ ID NO: 3399 - DNA, 15 bp, Homo sapiens
tcacggcagagccca

SEQ ID NO: 3400 - DNA, 15 bp, Homo sapiens
ctcacggcagagccc

SEQ ID NO: 3401 - DNA, 15 bp, Homo sapiens
cctcacggcagagcc

SEQ ID NO: 3402 - DNA, 15 bp, Homo sapiens
ccctcacggcagagc

SEQ ID NO: 3403 - DNA, 15 bp, Homo sapiens
accctcacggcagag

SEQ ID NO: 3404 - DNA, 15 bp, Homo sapiens
caccctcacggcaga

SEQ ID NO: 3405 - DNA, 15 bp, Homo sapiens
ccaccctcacggcag

SEQ ID NO: 3406 - DNA, 15 bp, Homo sapiens
cccaccctcacggca

SEQ ID NO: 3407 - DNA, 15 bp, Homo sapiens
ccccaccctcacggc

SEQ ID NO: 3408 - DNA, 15 bp, Homo sapiens
cccccaccctcacgg

SEQ ID NO: 3409 - DNA, 15 bp, Homo sapiens
acccccaccctcacg

SEQ ID NO: 3410 - DNA, 15 bp, Homo sapiens
cacccccaccctcac

SEQ ID NO: 3411 - DNA, 15 bp, Homo sapiens
gcacccccaccctca

SEQ ID NO: 3412 - DNA, 15 bp, Homo sapiens
agcacccccaccctc

SEQ ID NO: 3413 - DNA, 15 bp, Homo sapiens
cagcacccccaccct

SEQ ID NO: 3414 - DNA, 15 bp, Homo sapiens
ccagcacccccaccc

SEQ ID NO: 3415 - DNA, 15 bp, Homo sapiens
cccagcacccccacc

SEQ ID NO: 3416 - DNA, 15 bp, Homo sapiens
gcccagcacccccac

SEQ ID NO: 3417 - DNA, 15 bp, Homo sapiens
cgcccagcaccccca

SEQ ID NO: 3418 - DNA, 15 bp, Homo sapiens
gcgcccagcaccccc

SEQ ID NO: 3419 - DNA, 15 bp, Homo sapiens
cgcgcccagcacccc

SEQ ID NO: 3420 - DNA, 15 bp, Homo sapiens
gcgcgcccagcaccc

SEQ ID NO: 3421 - DNA, 15 bp, Homo sapiens
cgcgcgcccagcacc

SEQ ID NO: 3422 - DNA, 15 bp, Homo sapiens
ccgcgcgcccagcac

SEQ ID NO: 3423 - DNA, 15 bp, Homo sapiens
cccgcgcgcccagca

SEQ ID NO: 3424 - DNA, 15 bp, Homo sapiens
gcccgcgcgcccagc

SEQ ID NO: 3425 - DNA, 15 bp, Homo sapiens
agcccgcgcgcccag

SEQ ID NO: 3426 - DNA, 15 bp, Homo sapiens
cagcccgcgcgccca

SEQ ID NO: 3427 - DNA, 15 bp, Homo sapiens
gcagcccgcgcgccc

SEQ ID NO: 3428 - DNA, 15 bp, Homo sapiens
cgcagcccgcgcgcc

SEQ ID NO: 3429 - DNA, 15 bp, Homo sapiens
ccgcagcccgcgcgc

SEQ ID NO: 3430 - DNA, 15 bp, Homo sapiens
accgcagcccgcgcg

SEQ ID NO: 3431 - DNA, 15 bp, Homo sapiens
caccgcagcccgcgc

SEQ ID NO: 3432 - DNA, 15 bp, Homo sapiens
ccaccgcagcccgcg

SEQ ID NO: 3433 - DNA, 15 bp, Homo sapiens
gccaccgcagcccgc

SEQ ID NO: 3434 - DNA, 15 bp, Homo sapiens
ggccaccgcagcccg

SEQ ID NO: 3435 - DNA, 15 bp, Homo sapiens
gggccaccgcagccc

SEQ ID NO: 3436 - DNA, 15 bp, Homo sapiens
ggggccaccgcagcc

SEQ ID NO: 3437 - DNA, 15 bp, Homo sapiens
gggggccaccgcagc

SEQ ID NO: 3438 - DNA, 15 bp, Homo sapiens
cgggggccaccgcag

SEQ ID NO: 3439 - DNA, 15 bp, Homo sapiens
ccgggggccaccgca

SEQ ID NO: 3440 - DNA, 15 bp, Homo sapiens
tccgggggccaccgc

SEQ ID NO: 3441 - DNA, 15 bp, Homo sapiens
ctccgggggccaccg

SEQ ID NO: 3442 - DNA, 15 bp, Homo sapiens
tctccgggggccacc

SEQ ID NO: 3443 - DNA, 15 bp, Homo sapiens
gtctccgggggccac

SEQ ID NO: 3444 - DNA, 15 bp, Homo sapiens
agtctccgggggcca

SEQ ID NO: 3445 - DNA, 15 bp, Homo sapiens
cagtctccgggggcc

SEQ ID NO: 3446 - DNA, 15 bp, Homo sapiens
ccagtctccgggggc

SEQ ID NO: 3447 - DNA, 15 bp, Homo sapiens
gccagtctccggggg

SEQ ID NO: 3448 - DNA, 15 bp, Homo sapiens
ggccagtctccgggg

SEQ ID NO: 3449 - DNA, 15 bp, Homo sapiens
gggccagtctccggg

SEQ ID NO: 3450 - DNA, 15 bp, Homo sapiens
cgggccagtctccgg

SEQ ID NO: 3451 - DNA, 15 bp, Homo sapiens
gcgggccagtctccg

SEQ ID NO: 3452 - DNA, 15 bp, Homo sapiens
tgcgggccagtctcc

SEQ ID NO: 3453 - DNA, 15 bp, Homo sapiens
ctgcgggccagtctc

SEQ ID NO: 3454 - DNA, 15 bp, Homo sapiens
gctgcgggccagtct

SEQ ID NO: 3455 - DNA, 15 bp, Homo sapiens
cgctgcgggccagtc

SEQ ID NO: 3456 - DNA, 15 bp, Homo sapiens
gcgctgcgggccagt

SEQ ID NO: 3457 - DNA, 15 bp, Homo sapiens
ggcgctgcgggccag

SEQ ID NO: 3458 - DNA, 15 bp, Homo sapiens
aggcgctgcgggcca

SEQ ID NO: 3459 - DNA, 15 bp, Homo sapiens
gaggcgctgcgggcc

SEQ ID NO: 3460 - DNA, 15 bp, Homo sapiens
ggaggcgctgcgggc

SEQ ID NO: 3461 - DNA, 15 bp, Homo sapiens
aggaggcgctgcggg

SEQ ID NO: 3462 - DNA, 15 bp, Homo sapiens
caggaggcgctgcgg

SEQ ID NO: 3463 - DNA, 15 bp, Homo sapiens
ccaggaggcgctgcg

SEQ ID NO: 3464 - DNA, 15 bp, Homo sapiens
gccaggaggcgctgc

SEQ ID NO: 3465 - DNA, 15 bp, Homo sapiens
ggccaggaggcgctg

SEQ ID NO: 3466 - DNA, 15 bp, Homo sapiens
cggccaggaggcgct

SEQ ID NO: 3467 - DNA, 15 bp, Homo sapiens
ccggccaggaggcgc

SEQ ID NO: 3468 - DNA, 15 bp, Homo sapiens
tccggccaggaggcg

SEQ ID NO: 3469 - DNA, 15 bp, Homo sapiens
ctccggccaggaggc

SEQ ID NO: 3470 - DNA, 15 bp, Homo sapiens
cctccggccaggagg

SEQ ID NO: 3471 - DNA, 15 bp, Homo sapiens
tcctccggccaggag

SEQ ID NO: 3472 - DNA, 15 bp, Homo sapiens
gtcctccggccagga

SEQ ID NO: 3473 - DNA, 15 bp, Homo sapiens
ggtcctccggccagg

SEQ ID NO: 3474 - DNA, 15 bp, Homo sapiens
aggtcctccggccag

SEQ ID NO: 3475 - DNA, 15 bp, Homo sapiens
taggtcctccggcca

SEQ ID NO: 3476 - DNA, 15 bp, Homo sapiens
ctaggtcctccggcc

SEQ ID NO: 3477 - DNA, 15 bp, Homo sapiens
cctaggtcctccggc

SEQ ID NO: 3478 - DNA, 15 bp, Homo sapiens
tcctaggtcctccgg

SEQ ID NO: 3479 - DNA, 15 bp, Homo sapiens
ttcctaggtcctccg

SEQ ID NO: 3480 - DNA, 15 bp, Homo sapiens
attcctaggtcctcc

SEQ ID NO: 3481 - DNA, 15 bp, Homo sapiens
gattcctaggtcctc

SEQ ID NO: 3482 - DNA, 15 bp, Homo sapiens
cgattcctaggtcct

SEQ ID NO: 3483 - DNA, 15 bp, Homo sapiens
ccgattcctaggtcc

SEQ ID NO: 3484 - DNA, 15 bp, Homo sapiens
gccgattcctaggtc

SEQ ID NO: 3485 - DNA, 15 bp, Homo sapiens
ggccgattcctaggt

SEQ ID NO: 3486 - DNA, 15 bp, Homo sapiens
cggccgattcctagg

SEQ ID NO: 3487 - DNA, 15 bp, Homo sapiens
ccggccgattcctag

SEQ ID NO: 3488 - DNA, 15 bp, Homo sapiens
gccggccgattccta

SEQ ID NO: 3489 - DNA, 15 bp, Homo sapiens
agccggccgattcct

SEQ ID NO: 3490 - DNA, 15 bp, Homo sapiens
gagccggccgattcc

SEQ ID NO: 3491 - DNA, 15 bp, Homo sapiens
agagccggccgattc

SEQ ID NO: 3492 - DNA, 15 bp, Homo sapiens
tagagccggccgatt

SEQ ID NO: 3493 - DNA, 15 bp, Homo sapiens
gtagagccggccgat

SEQ ID NO: 3494 - DNA, 15 bp, Homo sapiens
agtagagccggccga

SEQ ID NO: 3495 - DNA, 15 bp, Homo sapiens
tagtagagccggccg

SEQ ID NO: 3496 - DNA, 15 bp, Homo sapiens
ctagtagagccggcc

SEQ ID NO: 3497 - DNA, 15 bp, Homo sapiens
cctagtagagccggc

SEQ ID NO: 3498 - DNA, 15 bp, Homo sapiens
acctagtagagccgg

SEQ ID NO: 3499 - DNA, 15 bp, Homo sapiens
cacctagtagagccg

SEQ ID NO: 3500 - DNA, 15 bp, Homo sapiens
acacctagtagagcc

SEQ ID NO: 3501 - DNA, 15 bp, Homo sapiens
gacacctagtagagc

SEQ ID NO: 3502 - DNA, 15 bp, Homo sapiens
agacacctagtagag

SEQ ID NO: 3503 - DNA, 15 bp, Homo sapiens
aagacacctagtaga

SEQ ID NO: 3504 - DNA, 15 bp, Homo sapiens
aaagacacctagtag

SEQ ID NO: 3505 - DNA, 15 bp, Homo sapiens
caaagacacctagta

SEQ ID NO: 3506 - DNA, 15 bp, Homo sapiens
gcaaagacacctagt

SEQ ID NO: 3507 - DNA, 15 bp, Homo sapiens
agcaaagacacctag

SEQ ID NO: 3508 - DNA, 15 bp, Homo sapiens
gagcaaagacaccta

SEQ ID NO: 3509 - DNA, 15 bp, Homo sapiens
cgagcaaagacacct

SEQ ID NO: 3510 - DNA, 15 bp, Homo sapiens
gcgagcaaagacacc

SEQ ID NO: 3511 - DNA, 15 bp, Homo sapiens
cgcgagcaaagacac

SEQ ID NO: 3512 - DNA, 15 bp, Homo sapiens
ccgcgagcaaagaca

SEQ ID NO: 3513 - DNA, 15 bp, Homo sapiens
accgcgagcaaagac

SEQ ID NO: 3514 - DNA, 15 bp, Homo sapiens
aaccgcgagcaaaga

SEQ ID NO: 3515 - DNA, 15 bp, Homo sapiens
gaaccgcgagcaaag

SEQ ID NO: 3516 - DNA, 15 bp, Homo sapiens
ggaaccgcgagcaaa

SEQ ID NO: 3517 - DNA, 15 bp, Homo sapiens
cggaaccgcgagcaa

SEQ ID NO: 3518 - DNA, 15 bp, Homo sapiens
tcggaaccgcgagca

SEQ ID NO: 3519 - DNA, 15 bp, Homo sapiens
gtcggaaccgcgagc

SEQ ID NO: 3520 - DNA, 15 bp, Homo sapiens
agtcggaaccgcgag

SEQ ID NO: 3521 - DNA, 15 bp, Homo sapiens
cagtcggaaccgcga

SEQ ID NO: 3522 - DNA, 15 bp, Homo sapiens
acagtcggaaccgcg

SEQ ID NO: 3523 - DNA, 15 bp, Homo sapiens
cacagtcggaaccgc

SEQ ID NO: 3524 - DNA, 15 bp, Homo sapiens
tcacagtcggaaccg

SEQ ID NO: 3525 - DNA, 15 bp, Homo sapiens
ttcacagtcggaacc

SEQ ID NO: 3526 - DNA, 15 bp, Homo sapiens
attcacagtcggaac

SEQ ID NO: 3527 - DNA, 15 bp, Homo sapiens
gattcacagtcggaa

SEQ ID NO: 3528 - DNA, 15 bp, Homo sapiens
ggattcacagtcgga

SEQ ID NO: 3529 - DNA, 15 bp, Homo sapiens
cggattcacagtcgg

SEQ ID NO: 3530 - DNA, 15 bp, Homo sapiens
ccggattcacagtcg

SEQ ID NO: 3531 - DNA, 15 bp, Homo sapiens
accggattcacagtc

SEQ ID NO: 3532 - DNA, 15 bp, Homo sapiens
caccggattcacagt

SEQ ID NO: 3533 - DNA, 15 bp, Homo sapiens
tcaccggattcacag

SEQ ID NO: 3534 - DNA, 15 bp, Homo sapiens
ttcaccggattcaca

SEQ ID NO: 3535 - DNA, 15 bp, Homo sapiens
cttcaccggattcac

SEQ ID NO: 3536 - DNA, 15 bp, Homo sapiens
tcttcaccggattca

SEQ ID NO: 3537 - DNA, 15 bp, Homo sapiens
gtcttcaccggattc

SEQ ID NO: 3538 - DNA, 15 bp, Homo sapiens
ggtcttcaccggatt

SEQ ID NO: 3539 - DNA, 15 bp, Homo sapiens
cggtcttcaccggat

SEQ ID NO: 3540 - DNA, 15 bp, Homo sapiens
ccggtcttcaccgga

SEQ ID NO: 3541 - DNA, 15 bp, Homo sapiens
accggtcttcaccgg

SEQ ID NO: 3542 - DNA, 15 bp, Homo sapiens
caccggtcttcaccg

SEQ ID NO: 3543 - DNA, 15 bp, Homo sapiens
ccaccggtcttcacc

SEQ ID NO: 3544 - DNA, 15 bp, Homo sapiens
accaccggtcttcac

SEQ ID NO: 3545 - DNA, 15 bp, Homo sapiens
aaccaccggtcttca

SEQ ID NO: 3546 - DNA, 15 bp, Homo sapiens
caaccaccggtcttc

SEQ ID NO: 3547 - DNA, 15 bp, Homo sapiens
gcaaccaccggtctt

SEQ ID NO: 3548 - DNA, 15 bp, Homo sapiens
tgcaaccaccggtct

SEQ ID NO: 3549 - DNA, 15 bp, Homo sapiens
ctgcaaccaccggtc

SEQ ID NO: 3550 - DNA, 15 bp, Homo sapiens
tctgcaaccaccggt

SEQ ID NO: 3551 - DNA, 15 bp, Homo sapiens
gtctgcaaccaccgg

SEQ ID NO: 3552 - DNA, 15 bp, Homo sapiens
cgtctgcaaccaccg

SEQ ID NO: 3553 - DNA, 15 bp, Homo sapiens
ccgtctgcaaccacc

SEQ ID NO: 3554 - DNA, 15 bp, Homo sapiens
cccgtctgcaaccac

SEQ ID NO: 3555 - DNA, 15 bp, Homo sapiens
ccccgtctgcaacca

SEQ ID NO: 3556 - DNA, 15 bp, Homo sapiens
tccccgtctgcaacc

SEQ ID NO: 3557 - DNA, 15 bp, Homo sapiens
ctccccgtctgcaac

SEQ ID NO: 3558 - DNA, 15 bp, Homo sapiens
cctccccgtctgcaa

SEQ ID NO: 3559 - DNA, 15 bp, Homo sapiens
tcctccccgtctgca

SEQ ID NO: 3560 - DNA, 15 bp, Homo sapiens
ttcctccccgtctgc

SEQ ID NO: 3561 - DNA, 15 bp, Homo sapiens
gttcctccccgtctg

SEQ ID NO: 3562 - DNA, 15 bp, Homo sapiens
agttcctccccgtct

SEQ ID NO: 3563 - DNA, 15 bp, Homo sapiens
tagttcctccccgtc

SEQ ID NO: 3564 - DNA, 15 bp, Homo sapiens
atagttcctccccgt

SEQ ID NO: 3565 - DNA, 15 bp, Homo sapiens
catagttcctccccg

SEQ ID NO: 3566 - DNA, 15 bp, Homo sapiens
tcatagttcctcccc

SEQ ID NO: 3567 - DNA, 15 bp, Homo sapiens
ctcatagttcctccc

SEQ ID NO: 3568 - DNA, 15 bp, Homo sapiens
cctcatagttcctcc

SEQ ID NO: 3569 - DNA, 15 bp, Homo sapiens
acctcatagttcctc

SEQ ID NO: 3570 - DNA, 15 bp, Homo sapiens
aacctcatagttcct

SEQ ID NO: 3571 - DNA, 15 bp, Homo sapiens
caacctcatagttcc

SEQ ID NO: 3572 - DNA, 15 bp, Homo sapiens
tcaacctcatagttc

SEQ ID NO: 3573 - DNA, 15 bp, Homo sapiens
ctcaacctcatagtt

SEQ ID NO: 3574 - DNA, 15 bp, Homo sapiens
cctcaacctcatagt

SEQ ID NO: 3575 - DNA, 15 bp, Homo sapiens
gcctcaacctcatag

SEQ ID NO: 3576 - DNA, 15 bp, Homo sapiens
cgcctcaacctcata

SEQ ID NO: 3577 - DNA, 15 bp, Homo sapiens
tcgcctcaacctcat

SEQ ID NO: 3578 - DNA, 15 bp, Homo sapiens
ttcgcctcaacctca

SEQ ID NO: 3579 - DNA, 15 bp, Homo sapiens
tttcgcctcaacctc

SEQ ID NO: 3580 - DNA, 15 bp, Homo sapiens
ctttcgcctcaacct

SEQ ID NO: 3581 - DNA, 15 bp, Homo sapiens
gctttcgcctcaacc

SEQ ID NO: 3582 - DNA, 15 bp, Homo sapiens
ggctttcgcctcaac

SEQ ID NO: 3583 - DNA, 15 bp, Homo sapiens
gggctttcgcctcaa

SEQ ID NO: 3584 - DNA, 15 bp, Homo sapiens
cgggctttcgcctca

SEQ ID NO: 3585 - DNA, 15 bp, Homo sapiens
acgggctttcgcctc

SEQ ID NO: 3586 - DNA, 15 bp, Homo sapiens
aacgggctttcgcct

SEQ ID NO: 3587 - DNA, 15 bp, Homo sapiens
aaacgggctttcgcc

SEQ ID NO: 3588 - DNA, 15 bp, Homo sapiens
aaaacgggctttcgc

SEQ ID NO: 3589 - DNA, 15 bp, Homo sapiens
caaaacgggctttcg

SEQ ID NO: 3590 - DNA, 15 bp, Homo sapiens
acaaaacgggctttc

SEQ ID NO: 3591 - DNA, 15 bp, Homo sapiens
aacaaaacgggcttt

SEQ ID NO: 3592 - DNA, 15 bp, Homo sapiens
aaacaaaacgggctt

SEQ ID NO: 3593 - DNA, 15 bp, Homo sapiens
aaaacaaaacgggct

SEQ ID NO: 3594 - DNA, 15 bp, Homo sapiens
aaaaacaaaacgggc

SEQ ID NO: 3595 - DNA, 15 bp, Homo sapiens
aaaaaacaaaacggg

SEQ ID NO: 3596 - DNA, 15 bp, Homo sapiens
aaaaaaacaaaacgg

SEQ ID NO: 3597 - DNA, 15 bp, Homo sapiens
aaaaaaaacaaaacg

SEQ ID NO: 3598 - DNA, 15 bp, Homo sapiens
aaaaaaaaacaaaac

SEQ ID NO: 3599 - DNA, 15 bp, Homo sapiens
aaaaaaaaaaaacaa

SEQ ID NO: 3600 - DNA, 15 bp, Homo sapiens
aaaaaaaaaaaaaca

SEQ ID NO: 3601 - DNA, 15 bp, Homo sapiens
caaaaaaaaaaaaac

SEQ ID NO: 3602 - DNA, 15 bp, Homo sapiens
acaaaaaaaaaaaaa

SEQ ID NO: 3603 - DNA, 15 bp, Homo sapiens
aacaaaaaaaaaaaa

SEQ ID NO: 3604 - DNA, 15 bp, Homo sapiens
aaacaaaaaaaaaaa

SEQ ID NO: 3605 - DNA, 15 bp, Homo sapiens
caaaaaaacaaaaaa

SEQ ID NO: 3606 - DNA, 15 bp, Homo sapiens
ccaaaaaaacaaaaa

SEQ ID NO: 3607 - DNA, 15 bp, Homo sapiens
accaaaaaaacaaaa

SEQ ID NO: 3608 - DNA, 15 bp, Homo sapiens
aaccaaaaaaacaaa

SEQ ID NO: 3609 - DNA, 15 bp, Homo sapiens
aaaccaaaaaaacaa

SEQ ID NO: 3610 - DNA, 15 bp, Homo sapiens
aaaaccaaaaaaaca

SEQ ID NO: 3611 - DNA, 15 bp, Homo sapiens
aaaaaccaaaaaaac

SEQ ID NO: 3612 - DNA, 15 bp, Homo sapiens
aaaaaaccaaaaaaa

SEQ ID NO: 3613 - DNA, 15 bp, Homo sapiens
aaaaaaaccaaaaaa

SEQ ID NO: 3614 - DNA, 15 bp, Homo sapiens
aaaaaaaaccaaaaa

SEQ ID NO: 3615 - DNA, 15 bp, Homo sapiens
aaaaaaaaaccaaaa

SEQ ID NO: 3616 - DNA, 15 bp, Homo sapiens
aaaaaaaaaaccaaa

SEQ ID NO: 3617 - DNA, 15 bp, Homo sapiens
aaaaaaaaaaaccaa

SEQ ID NO: 3618 - DNA, 15 bp, Homo sapiens
caaaaaaaaaaacca

SEQ ID NO: 3619 - DNA, 15 bp, Homo sapiens
acaaaaaaaaaaacc

SEQ ID NO: 3620 - DNA, 15 bp, Homo sapiens
aacaaaaaaaaaaac

SEQ ID NO: 3621 - DNA, 15 bp, Homo sapiens
taacaaaaaaaaaaa

SEQ ID NO: 3622 - DNA, 15 bp, Homo sapiens
ctaacaaaaaaaaaa

SEQ ID NO: 3623 - DNA, 15 bp, Homo sapiens
gctaacaaaaaaaaa

SEQ ID NO: 3624 - DNA, 15 bp, Homo sapiens
cgctaacaaaaaaaa

SEQ ID NO: 3625 - DNA, 15 bp, Homo sapiens
acgctaacaaaaaaa

SEQ ID NO: 3626 - DNA, 15 bp, Homo sapiens
cacgctaacaaaaaa

SEQ ID NO: 3627 - DNA, 15 bp, Homo sapiens
acacgctaacaaaaa

SEQ ID NO: 3628 - DNA, 15 bp, Homo sapiens
aacacgctaacaaaa

SEQ ID NO: 3629 - DNA, 15 bp, Homo sapiens
aaacacgctaacaaa

SEQ ID NO: 3630 - DNA, 15 bp, Homo sapiens
caaacacgctaacaa

SEQ ID NO: 3631 - DNA, 15 bp, Homo sapiens
gcaaacacgctaaca

SEQ ID NO: 3632 - DNA, 15 bp, Homo sapiens
ggcaaacacgctaac

SEQ ID NO: 3633 - DNA, 15 bp, Homo sapiens
tggcaaacacgctaa

SEQ ID NO: 3634 - DNA, 15 bp, Homo sapiens
ttggcaaacacgcta

SEQ ID NO: 3635 - DNA, 15 bp, Homo sapiens
gttggcaaacacgct

SEQ ID NO: 3636 - DNA, 15 bp, Homo sapiens
agttggcaaacacgc

SEQ ID NO: 3637 - DNA, 15 bp, Homo sapiens
gagttggcaaacacg

SEQ ID NO: 3638 - DNA, 15 bp, Homo sapiens
ggagttggcaaacac

SEQ ID NO: 3639 - DNA, 15 bp, Homo sapiens
gggagttggcaaaca

SEQ ID NO: 3640 - DNA, 15 bp, Homo sapiens
tgggagttggcaaac

SEQ ID NO: 3641 - DNA, 15 bp, Homo sapiens
ctgggagttggcaaa

SEQ ID NO: 3642 - DNA, 15 bp, Homo sapiens
cctgggagttggcaa

SEQ ID NO: 3643 - DNA, 15 bp, Homo sapiens
gcctgggagttggca

SEQ ID NO: 3644 - DNA, 15 bp, Homo sapiens
ggcctgggagttggc

SEQ ID NO: 3645 - DNA, 15 bp, Homo sapiens
tggcctgggagttgg

SEQ ID NO: 3646 - DNA, 15 bp, Homo sapiens
atggcctgggagttg

SEQ ID NO: 3647 - DNA, 15 bp, Homo sapiens
aatggcctgggagtt

SEQ ID NO: 3648 - DNA, 15 bp, Homo sapiens
caatggcctgggagt

SEQ ID NO: 3649 - DNA, 15 bp, Homo sapiens
ccaatggcctgggag

SEQ ID NO: 3650 - DNA, 15 bp, Homo sapiens
accaatggcctggga

SEQ ID NO: 3651 - DNA, 15 bp, Homo sapiens
taccaatggcctggg

SEQ ID NO: 3652 - DNA, 15 bp, Homo sapiens
ttaccaatggcctgg

SEQ ID NO: 3653 - DNA, 15 bp, Homo sapiens
tttaccaatggcctg

SEQ ID NO: 3654 - DNA, 15 bp, Homo sapiens
ctttaccaatggcct

SEQ ID NO: 3655 - DNA, 15 bp, Homo sapiens
gctttaccaatggcc

SEQ ID NO: 3656 - DNA, 15 bp, Homo sapiens
tgctttaccaatggc

SEQ ID NO: 3657 - DNA, 15 bp, Homo sapiens
ctgctttaccaatgg

SEQ ID NO: 3658 - DNA, 15 bp, Homo sapiens
cctgctttaccaatg

SEQ ID NO: 3659 - DNA, 15 bp, Homo sapiens
tcctgctttaccaat

SEQ ID NO: 3660 - DNA, 15 bp, Homo sapiens
ttcctgctttaccaa

SEQ ID NO: 3661 - DNA, 15 bp, Homo sapiens
cttcctgctttacca

SEQ ID NO: 3662 - DNA, 15 bp, Homo sapiens
ccttcctgctttacc

SEQ ID NO: 3663 - DNA, 15 bp, Homo sapiens
accttcctgctttac

SEQ ID NO: 3664 - DNA, 15 bp, Homo sapiens
aaccttcctgcttta

SEQ ID NO: 3665 - DNA, 15 bp, Homo sapiens
gaaccttcctgcttt

SEQ ID NO: 3666 - DNA, 15 bp, Homo sapiens
agaaccttcctgctt

SEQ ID NO: 3667 - DNA, 15 bp, Homo sapiens
aagaaccttcctgct

SEQ ID NO: 3668 - DNA, 15 bp, Homo sapiens
caagaaccttcctgc

SEQ ID NO: 3669 - DNA, 15 bp, Homo sapiens
ccaagaaccttcctg

SEQ ID NO: 3670 - DNA, 15 bp, Homo sapiens
cccaagaaccttcct

SEQ ID NO: 3671 - DNA, 15 bp, Homo sapiens
ccccaagaaccttcc

SEQ ID NO: 3672 - DNA, 15 bp, Homo sapiens
gccccaagaaccttc

SEQ ID NO: 3673 - DNA, 15 bp, Homo sapiens
cgccccaagaacctt

SEQ ID NO: 3674 - DNA, 15 bp, Homo sapiens
ccgccccaagaacct

SEQ ID NO: 3675 - DNA, 15 bp, Homo sapiens
gccgccccaagaacc

SEQ ID NO: 3676 - DNA, 15 bp, Homo sapiens
cgccgccccaagaac

SEQ ID NO: 3677 - DNA, 15 bp, Homo sapiens
ccgccgccccaagaa

SEQ ID NO: 3678 - DNA, 15 bp, Homo sapiens
tccgccgccccaaga

SEQ ID NO: 3679 - DNA, 15 bp, Homo sapiens
gtccgccgccccaag

SEQ ID NO: 3680 - DNA, 15 bp, Homo sapiens
cgtccgccgccccaa

SEQ ID NO: 3681 - DNA, 15 bp, Homo sapiens
ccgtccgccgcccca

SEQ ID NO: 3682 - DNA, 15 bp, Homo sapiens
accgtccgccgcccc

SEQ ID NO: 3683 - DNA, 15 bp, Homo sapiens
caccgtccgccgccc

SEQ ID NO: 3684 - DNA, 15 bp, Homo sapiens
gcaccgtccgccgcc

SEQ ID NO: 3685 - DNA, 15 bp, Homo sapiens
ggcaccgtccgccgc

SEQ ID NO: 3686 - DNA, 15 bp, Homo sapiens
tggcaccgtccgccg

SEQ ID NO: 3687 - DNA, 15 bp, Homo sapiens
ctggcaccgtccgcc

SEQ ID NO: 3688 - DNA, 15 bp, Homo sapiens
cctggcaccgtccgc

SEQ ID NO: 3689 - DNA, 15 bp, Homo sapiens
ccctggcaccgtccg

SEQ ID NO: 3690 - DNA, 15 bp, Homo sapiens
accctggcaccgtcc

SEQ ID NO: 3691 - DNA, 15 bp, Homo sapiens
aaccctggcaccgtc

SEQ ID NO: 3692 - DNA, 15 bp, Homo sapiens
taaccctggcaccgt

SEQ ID NO: 3693 - DNA, 15 bp, Homo sapiens
ataaccctggcaccg

SEQ ID NO: 3694 - DNA, 15 bp, Homo sapiens
cataaccctggcacc

SEQ ID NO: 3695 - DNA, 15 bp, Homo sapiens
acataaccctggcac

SEQ ID NO: 3696 - DNA, 15 bp, Homo sapiens
cacataaccctggca

SEQ ID NO: 3697 - DNA, 15 bp, Homo sapiens
acacataaccctggc

SEQ ID NO: 3698 - DNA, 15 bp, Homo sapiens
tacacataaccctgg

SEQ ID NO: 3699 - DNA, 15 bp, Homo sapiens
ctacacataaccctg

SEQ ID NO: 3700 - DNA, 15 bp, Homo sapiens
cctacacataaccct

SEQ ID NO: 3701 - DNA, 15 bp, Homo sapiens
acctacacataaccc

SEQ ID NO: 3702 - DNA, 15 bp, Homo sapiens
cacctacacataacc

SEQ ID NO: 3703 - DNA, 15 bp, Homo sapiens
gcacctacacataac

SEQ ID NO: 3704 - DNA, 15 bp, Homo sapiens
ggcacctacacataa

SEQ ID NO: 3705 - DNA, 15 bp, Homo sapiens
aggcacctacacata

SEQ ID NO: 3706 - DNA, 15 bp, Homo sapiens
gaggcacctacacat

SEQ ID NO: 3707 - DNA, 15 bp, Homo sapiens
agaggcacctacaca

SEQ ID NO: 3708 - DNA, 15 bp, Homo sapiens
aagaggcacctacac

SEQ ID NO: 3709 - DNA, 15 bp, Homo sapiens
aaagaggcacctaca

SEQ ID NO: 3710 - DNA, 15 bp, Homo sapiens
taaagaggcacctac

SEQ ID NO: 3711 - DNA, 15 bp, Homo sapiens
ctaaagaggcaccta

SEQ ID NO: 3712 - DNA, 15 bp, Homo sapiens
cctaaagaggcacct

SEQ ID NO: 3713 - DNA, 15 bp, Homo sapiens
acctaaagaggcacc

SEQ ID NO: 3714 - DNA, 15 bp, Homo sapiens
tacctaaagaggcac

SEQ ID NO: 3715 - DNA, 15 bp, Homo sapiens
atacctaaagaggca

SEQ ID NO: 3716 - DNA, 15 bp, Homo sapiens
tatacctaaagaggc

SEQ ID NO: 3717 - DNA, 15 bp, Homo sapiens
atatacctaaagagg

SEQ ID NO: 3718 - DNA, 15 bp, Homo sapiens
gatatacctaaagag

SEQ ID NO: 3719 - DNA, 15 bp, Homo sapiens
agatatacctaaaga

SEQ ID NO: 3720 - DNA, 15 bp, Homo sapiens
aagatatacctaaag

SEQ ID NO: 3721 - DNA, 15 bp, Homo sapiens
aaagatatacctaaa

SEQ ID NO: 3722 - DNA, 15 bp, Homo sapiens
aaaagatatacctaa

SEQ ID NO: 3723 - DNA, 15 bp, Homo sapiens
taaaagatataccta

SEQ ID NO: 3724 - DNA, 15 bp, Homo sapiens
ataaaagatatacct

SEQ ID NO: 3725 - DNA, 15 bp, Homo sapiens
gataaaagatatacc

SEQ ID NO: 3726 - DNA, 15 bp, Homo sapiens
tgataaaagatatac

SEQ ID NO: 3727 - DNA, 15 bp, Homo sapiens
ttgataaaagatata

SEQ ID NO: 3728 - DNA, 15 bp, Homo sapiens
tttgataaaagatat

SEQ ID NO: 3729 - DNA, 15 bp, Homo sapiens
ttttgataaaagata

SEQ ID NO: 3730 - DNA, 15 bp, Homo sapiens
tttttgataaaagat

SEQ ID NO: 3731 - DNA, 15 bp, Homo sapiens
ctttttgataaaaga

SEQ ID NO: 3732 - DNA, 15 bp, Homo sapiens
tctttttgataaaag

SEQ ID NO: 3733 - DNA, 15 bp, Homo sapiens
ttctttttgataaaa

SEQ ID NO: 3734 - DNA, 15 bp, Homo sapiens
cttctttttgataaa

SEQ ID NO: 3735 - DNA, 15 bp, Homo sapiens
gcttctttttgataa

SEQ ID NO: 3736 - DNA, 15 bp, Homo sapiens
tgcttctttttgata

SEQ ID NO: 3737 - DNA, 15 bp, Homo sapiens
ttgcttctttttgat

SEQ ID NO: 3738 - DNA, 15 bp, Homo sapiens
tttgcttctttttga

SEQ ID NO: 3739 - DNA, 15 bp, Homo sapiens
ctttgcttctttttg

SEQ ID NO: 3740 - DNA, 15 bp, Homo sapiens
tctttgcttcttttt

SEQ ID NO: 3741 - DNA, 15 bp, Homo sapiens
ttctttgcttctttt

SEQ ID NO: 3742 - DNA, 15 bp, Homo sapiens
tttctttgcttcttt

SEQ ID NO: 3743 - DNA, 15 bp, Homo sapiens
atttctttgcttctt

SEQ ID NO: 3744 - DNA, 15 bp, Homo sapiens
tatttctttgcttct

SEQ ID NO: 3745 - DNA, 15 bp, Homo sapiens
ttatttctttgcttc

SEQ ID NO: 3746 - DNA, 15 bp, Homo sapiens
cttatttctttgctt

SEQ ID NO: 3747 - DNA, 15 bp, Homo sapiens
tcttatttctttgct

SEQ ID NO: 3748 - DNA, 15 bp, Homo sapiens
atcttatttctttgc

SEQ ID NO: 3749 - DNA, 15 bp, Homo sapiens
aatcttatttctttg

SEQ ID NO: 3750 - DNA, 15 bp, Homo sapiens
taatcttatttcttt

SEQ ID NO: 3751 - DNA, 15 bp, Homo sapiens
ttaatcttatttctt

SEQ ID NO: 3752 - DNA, 15 bp, Homo sapiens
tttaatcttatttct

SEQ ID NO: 3753 - DNA, 15 bp, Homo sapiens
ttttaatcttatttc

SEQ ID NO: 3754 - DNA, 15 bp, Homo sapiens
tttttaatcttattt

SEQ ID NO: 3755 - DNA, 15 bp, Homo sapiens
atttttaatcttatt

SEQ ID NO: 3756 - DNA, 15 bp, Homo sapiens
tatttttaatcttat

SEQ ID NO: 3757 - DNA, 15 bp, Homo sapiens
ttatttttaatctta

SEQ ID NO: 3758 - DNA, 15 bp, Homo sapiens
tttatttttaatctt

SEQ ID NO: 3759 - DNA, 15 bp, Homo sapiens
gtttatttttaatct

SEQ ID NO: 3760 - DNA, 15 bp, Homo sapiens
tgtttatttttaatc

SEQ ID NO: 3761 - DNA, 15 bp, Homo sapiens
ttgtttatttttaat

SEQ ID NO: 3762 - DNA, 15 bp, Homo sapiens
tttgtttatttttaa

SEQ ID NO: 3763 - DNA, 15 bp, Homo sapiens
ctttgtttattttta

SEQ ID NO: 3764 - DNA, 15 bp, Homo sapiens
tctttgtttattttt

SEQ ID NO: 3765 - DNA, 15 bp, Homo sapiens
ttctttgtttatttt

SEQ ID NO: 3766 - DNA, 15 bp, Homo sapiens
tttctttgtttattt

SEQ ID NO: 3767 - DNA, 15 bp, Homo sapiens
ttttctttgtttatt

SEQ ID NO: 3768 - DNA, 15 bp, Homo sapiens
tttttctttgtttat

SEQ ID NO: 3769 - DNA, 15 bp, Homo sapiens
ttttttctttgttta

SEQ ID NO: 3770 - DNA, 15 bp, Homo sapiens
cttttttctttgttt

SEQ ID NO: 3771 - DNA, 15 bp, Homo sapiens
acttttttctttgtt

SEQ ID NO: 3772 - DNA, 15 bp, Homo sapiens
aacttttttctttgt

SEQ ID NO: 3773 - DNA, 15 bp, Homo sapiens
caacttttttctttg

SEQ ID NO: 3774 - DNA, 15 bp, Homo sapiens
acaacttttttcttt

SEQ ID NO: 3775 - DNA, 15 bp, Homo sapiens
gacaacttttttctt

SEQ ID NO: 3776 - DNA, 15 bp, Homo sapiens
agacaacttttttct

SEQ ID NO: 3777 - DNA, 15 bp, Homo sapiens
cagacaacttttttc

SEQ ID NO: 3778 - DNA, 15 bp, Homo sapiens
ccagacaactttttt

SEQ ID NO: 3779 - DNA, 15 bp, Homo sapiens
gccagacaacttttt

SEQ ID NO: 3780 - DNA, 15 bp, Homo sapiens
tgccagacaactttt

SEQ ID NO: 3781 - DNA, 15 bp, Homo sapiens
gtgccagacaacttt

SEQ ID NO: 3782 - DNA, 15 bp, Homo sapiens
agtgccagacaactt

SEQ ID NO: 3783 - DNA, 15 bp, Homo sapiens
cagtgccagacaact

SEQ ID NO: 3784 - DNA, 15 bp, Homo sapiens
ccagtgccagacaac

SEQ ID NO: 3785 - DNA, 15 bp, Homo sapiens
gccagtgccagacaa

SEQ ID NO: 3786 - DNA, 15 bp, Homo sapiens
tgccagtgccagaca

SEQ ID NO: 3787 - DNA, 15 bp, Homo sapiens
ctgccagtgccagac

SEQ ID NO: 3788 - DNA, 15 bp, Homo sapiens
actgccagtgccaga

SEQ ID NO: 3789 - DNA, 15 bp, Homo sapiens
tactgccagtgccag

SEQ ID NO: 3790 - DNA, 15 bp, Homo sapiens
ttactgccagtgcca

SEQ ID NO: 3791 - DNA, 15 bp, Homo sapiens
attactgccagtgcc

SEQ ID NO: 3792 - DNA, 15 bp, Homo sapiens
aattactgccagtgc

SEQ ID NO: 3793 - DNA, 15 bp, Homo sapiens
caattactgccagtg

SEQ ID NO: 3794 - DNA, 15 bp, Homo sapiens
ccaattactgccagt

SEQ ID NO: 3795 - DNA, 15 bp, Homo sapiens
gccaattactgccag

SEQ ID NO: 3796 - DNA, 15 bp, Homo sapiens
ggccaattactgcca

SEQ ID NO: 3797 - DNA, 15 bp, Homo sapiens
aggccaattactgcc

SEQ ID NO: 3798 - DNA, 15 bp, Homo sapiens
caggccaattactgc

SEQ ID NO: 3799 - DNA, 15 bp, Homo sapiens
gcaggccaattactg

SEQ ID NO: 3800 - DNA, 15 bp, Homo sapiens
ggcaggccaattact

SEQ ID NO: 3801 - DNA, 15 bp, Homo sapiens
aggcaggccaattac

SEQ ID NO: 3802 - DNA, 15 bp, Homo sapiens
aaggcaggccaatta

SEQ ID NO: 3803 - DNA, 15 bp, Homo sapiens
aaaggcaggccaatt

SEQ ID NO: 3804 - DNA, 15 bp, Homo sapiens
caaaggcaggccaat

SEQ ID NO: 3805 - DNA, 15 bp, Homo sapiens
gcaaaggcaggccaa

SEQ ID NO: 3806 - DNA, 15 bp, Homo sapiens
tgcaaaggcaggcca

SEQ ID NO: 3807 - DNA, 15 bp, Homo sapiens
ctgcaaaggcaggcc

SEQ ID NO: 3808 - DNA, 15 bp, Homo sapiens
gctgcaaaggcaggc

SEQ ID NO: 3809 - DNA, 15 bp, Homo sapiens
tgctgcaaaggcagg

SEQ ID NO: 3810 - DNA, 15 bp, Homo sapiens
gtgctgcaaaggcag

SEQ ID NO: 3811 - DNA, 15 bp, Homo sapiens
agtgctgcaaaggca

SEQ ID NO: 3812 - DNA, 15 bp, Homo sapiens
cagtgctgcaaaggc

SEQ ID NO: 3813 - DNA, 15 bp, Homo sapiens
tcagtgctgcaaagg

SEQ ID NO: 3814 - DNA, 15 bp, Homo sapiens
atcagtgctgcaaag

SEQ ID NO: 3815 - DNA, 15 bp, Homo sapiens
tatcagtgctgcaaa

SEQ ID NO: 3816 - DNA, 15 bp, Homo sapiens
gtatcagtgctgcaa

SEQ ID NO: 3817 - DNA, 15 bp, Homo sapiens
ggtatcagtgctgca

SEQ ID NO: 3818 - DNA, 15 bp, Homo sapiens
tggtatcagtgctgc

SEQ ID NO: 3819 - DNA, 15 bp, Homo sapiens
atggtatcagtgctg

SEQ ID NO: 3820 - DNA, 15 bp, Homo sapiens
aatggtatcagtgct

SEQ ID NO: 3821 - DNA, 15 bp, Homo sapiens
taatggtatcagtgc

SEQ ID NO: 3822 - DNA, 15 bp, Homo sapiens
ctaatggtatcagtg

SEQ ID NO: 3823 - DNA, 15 bp, Homo sapiens
gctaatggtatcagt

SEQ ID NO: 3824 - DNA, 15 bp, Homo sapiens
agctaatggtatcag

SEQ ID NO: 3825 - DNA, 15 bp, Homo sapiens
aagctaatggtatca

SEQ ID NO: 3826 - DNA, 15 bp, Homo sapiens
aaagctaatggtatc

SEQ ID NO: 3827 - DNA, 15 bp, Homo sapiens
aaaagctaatggtat

SEQ ID NO: 3828 - DNA, 15 bp, Homo sapiens
taaaagctaatggta

SEQ ID NO: 3829 - DNA, 15 bp, Homo sapiens
ttaaaagctaatggt

SEQ ID NO: 3830 - DNA, 15 bp, Homo sapiens
tttaaaagctaatgg

SEQ ID NO: 3831 - DNA, 15 bp, Homo sapiens
ttttaaaagctaatg

SEQ ID NO: 3832 - DNA, 15 bp, Homo sapiens
attttaaaagctaat

SEQ ID NO: 3833 - DNA, 15 bp, Homo sapiens
gattttaaaagctaa

SEQ ID NO: 3834 - DNA, 15 bp, Homo sapiens
ggattttaaaagcta

SEQ ID NO: 3835 - DNA, 15 bp, Homo sapiens
cggattttaaaagct

SEQ ID NO: 3836 - DNA, 15 bp, Homo sapiens
tcggattttaaaagc

SEQ ID NO: 3837 - DNA, 15 bp, Homo sapiens
gtcggattttaaaag

SEQ ID NO: 3838 - DNA, 15 bp, Homo sapiens
agtcggattttaaaa

SEQ ID NO: 3839 - DNA, 15 bp, Homo sapiens
aagtcggattttaaa

SEQ ID NO: 3840 - DNA, 15 bp, Homo sapiens
aaagtcggattttaa

SEQ ID NO: 3841 - DNA, 15 bp, Homo sapiens
aaaagtcggatttta

SEQ ID NO: 3842 - DNA, 15 bp, Homo sapiens
gaaaagtcggatttt

SEQ ID NO: 3843 - DNA, 15 bp, Homo sapiens
tgaaaagtcggattt

SEQ ID NO: 3844 - DNA, 15 bp, Homo sapiens
atgaaaagtcggatt

SEQ ID NO: 3845 - DNA, 15 bp, Homo sapiens
aatgaaaagtcggat

SEQ ID NO: 3846 - DNA, 15 bp, Homo sapiens
caatgaaaagtcgga

SEQ ID NO: 3847 - DNA, 15 bp, Homo sapiens
tcaatgaaaagtcgg

SEQ ID NO: 3848 - DNA, 15 bp, Homo sapiens
gtcaatgaaaagtcg

SEQ ID NO: 3849 - DNA, 15 bp, Homo sapiens
tgtcaatgaaaagtc

SEQ ID NO: 3850 - DNA, 15 bp, Homo sapiens
gtgtcaatgaaaagt

SEQ ID NO: 3851 - DNA, 15 bp, Homo sapiens
agtgtcaatgaaaag

SEQ ID NO: 3852 - DNA, 15 bp, Homo sapiens
aagtgtcaatgaaaa

SEQ ID NO: 3853 - DNA, 15 bp, Homo sapiens
gaagtgtcaatgaaa

SEQ ID NO: 3854 - DNA, 15 bp, Homo sapiens
tgaagtgtcaatgaa

SEQ ID NO: 3855 - DNA, 15 bp, Homo sapiens
ttgaagtgtcaatga

SEQ ID NO: 3856 - DNA, 15 bp, Homo sapiens
cttgaagtgtcaatg

SEQ ID NO: 3857 - DNA, 15 bp, Homo sapiens
tcttgaagtgtcaat

SEQ ID NO: 3858 - DNA, 15 bp, Homo sapiens
ttcttgaagtgtcaa

SEQ ID NO: 3859 - DNA, 15 bp, Homo sapiens
cttcttgaagtgtca

SEQ ID NO: 3860 - DNA, 15 bp, Homo sapiens
tcttcttgaagtgtc

SEQ ID NO: 3861 - DNA, 15 bp, Homo sapiens
ctcttcttgaagtgt

SEQ ID NO: 3862 - DNA, 15 bp, Homo sapiens
tctcttcttgaagtg

SEQ ID NO: 3863 - DNA, 15 bp, Homo sapiens
ttctcttcttgaagt

SEQ ID NO: 3864 - DNA, 15 bp, Homo sapiens
attctcttcttgaag

SEQ ID NO: 3865 - DNA, 15 bp, Homo sapiens
cattctcttcttgaa

SEQ ID NO: 3866 - DNA, 15 bp, Homo sapiens
ccattctcttcttga

SEQ ID NO: 3867 - DNA, 15 bp, Homo sapiens
cccattctcttcttg

SEQ ID NO: 3868 - DNA, 15 bp, Homo sapiens
acccattctcttctt

SEQ ID NO: 3869 - DNA, 15 bp, Homo sapiens
tacccattctcttct

SEQ ID NO: 3870 - DNA, 15 bp, Homo sapiens
ctacccattctcttc

SEQ ID NO: 3871 - DNA, 15 bp, Homo sapiens
actacccattctctt

SEQ ID NO: 3872 - DNA, 15 bp, Homo sapiens
tactacccattctct

SEQ ID NO: 3873 - DNA, 15 bp, Homo sapiens
atactacccattctc

SEQ ID NO: 3874 - DNA, 15 bp, Homo sapiens
tatactacccattct

SEQ ID NO: 3875 - DNA, 15 bp, Homo sapiens
atatactacccattc

SEQ ID NO: 3876 - DNA, 15 bp, Homo sapiens
tatatactacccatt

SEQ ID NO: 3877 - DNA, 15 bp, Homo sapiens
gtatatactacccat

SEQ ID NO: 3878 - DNA, 15 bp, Homo sapiens
tgtatatactaccca

SEQ ID NO: 3879 - DNA, 15 bp, Homo sapiens
gtgtatatactaccc

SEQ ID NO: 3880 - DNA, 15 bp, Homo sapiens
tgtgtatatactacc

SEQ ID NO: 3881 - DNA, 15 bp, Homo sapiens
atgtgtatatactac

SEQ ID NO: 3882 - DNA, 15 bp, Homo sapiens
aatgtgtatatacta

SEQ ID NO: 3883 - DNA, 15 bp, Homo sapiens
gaatgtgtatatact

SEQ ID NO: 3884 - DNA, 15 bp, Homo sapiens
tgaatgtgtatatac

SEQ ID NO: 3885 - DNA, 15 bp, Homo sapiens
atgaatgtgtatata

SEQ ID NO: 3886 - DNA, 15 bp, Homo sapiens
gatgaatgtgtatat

SEQ ID NO: 3887 - DNA, 15 bp, Homo sapiens
agatgaatgtgtata

SEQ ID NO: 3888 - DNA, 15 bp, Homo sapiens
gagatgaatgtgtat

SEQ ID NO: 3889 - DNA, 15 bp, Homo sapiens
tgagatgaatgtgta

SEQ ID NO: 3890 - DNA, 15 bp, Homo sapiens
atgagatgaatgtgt

SEQ ID NO: 3891 - DNA, 15 bp, Homo sapiens
tatgagatgaatgtg

SEQ ID NO: 3892 - DNA, 15 bp, Homo sapiens
ctatgagatgaatgt

SEQ ID NO: 3893 - DNA, 15 bp, Homo sapiens
actatgagatgaatg

SEQ ID NO: 3894 - DNA, 15 bp, Homo sapiens
cactatgagatgaat

SEQ ID NO: 3895 - DNA, 15 bp, Homo sapiens
ccactatgagatgaa

SEQ ID NO: 3896 - DNA, 15 bp, Homo sapiens
tccactatgagatga

SEQ ID NO: 3897 - DNA, 15 bp, Homo sapiens
gtccactatgagatg

SEQ ID NO: 3898 - DNA, 15 bp, Homo sapiens
tgtccactatgagat

SEQ ID NO: 3899 - DNA, 15 bp, Homo sapiens
ttgtccactatgaga

SEQ ID NO: 3900 - DNA, 15 bp, Homo sapiens
tttgtccactatgag

SEQ ID NO: 3901 - DNA, 15 bp, Homo sapiens
atttgtccactatga

SEQ ID NO: 3902 - DNA, 15 bp, Homo sapiens
aatttgtccactatg

SEQ ID NO: 3903 - DNA, 15 bp, Homo sapiens
aaatttgtccactat

SEQ ID NO: 3904 - DNA, 15 bp, Homo sapiens
gaaatttgtccacta

SEQ ID NO: 3905 - DNA, 15 bp, Homo sapiens
tgaaatttgtccact

SEQ ID NO: 3906 - DNA, 15 bp, Homo sapiens
atgaaatttgtccac

SEQ ID NO: 3907 - DNA, 15 bp, Homo sapiens
tatgaaatttgtcca

SEQ ID NO: 3908 - DNA, 15 bp, Homo sapiens
atatgaaatttgtcc

SEQ ID NO: 3909 - DNA, 15 bp, Homo sapiens
aatatgaaatttgtc

SEQ ID NO: 3910 - DNA, 15 bp, Homo sapiens
aaatatgaaatttgt

SEQ ID NO: 3911 - DNA, 15 bp, Homo sapiens
taaatatgaaatttg

SEQ ID NO: 3912 - DNA, 15 bp, Homo sapiens
ttaaatatgaaattt

SEQ ID NO: 3913 - DNA, 15 bp, Homo sapiens
tttaaatatgaaatt

SEQ ID NO: 3914 - DNA, 15 bp, Homo sapiens
ttttaaatatgaaat

SEQ ID NO: 3915 - DNA, 15 bp, Homo sapiens
tttttaaatatgaaa

SEQ ID NO: 3916 - DNA, 15 bp, Homo sapiens
ttttttaaatatgaa

SEQ ID NO: 3917 - DNA, 15 bp, Homo sapiens
tttttttaaatatga

SEQ ID NO: 3918 - DNA, 15 bp, Homo sapiens
gtttttttaaatatg

SEQ ID NO: 3919 - DNA, 15 bp, Homo sapiens
ggtttttttaaatat

SEQ ID NO: 3920 - DNA, 15 bp, Homo sapiens
aggtttttttaaata

SEQ ID NO: 3921 - DNA, 15 bp, Homo sapiens
aaggtttttttaaat

SEQ ID NO: 3922 - DNA, 15 bp, Homo sapiens
gaaggtttttttaaa

SEQ ID NO: 3923 - DNA, 15 bp, Homo sapiens
agaaggtttttttaa

SEQ ID NO: 3924 - DNA, 15 bp, Homo sapiens
cagaaggttttttta

SEQ ID NO: 3925 - DNA, 15 bp, Homo sapiens
ccagaaggttttttt

SEQ ID NO: 3926 - DNA, 15 bp, Homo sapiens
cccagaaggtttttt

SEQ ID NO: 3927 - DNA, 15 bp, Homo sapiens
acccagaaggttttt

SEQ ID NO: 3928 - DNA, 15 bp, Homo sapiens
tacccagaaggtttt

SEQ ID NO: 3929 - DNA, 15 bp, Homo sapiens
gtacccagaaggttt

SEQ ID NO: 3930 - DNA, 15 bp, Homo sapiens
agtacccagaaggtt

SEQ ID NO: 3931 - DNA, 15 bp, Homo sapiens
cagtacccagaaggt

SEQ ID NO: 3932 - DNA, 15 bp, Homo sapiens
tcagtacccagaagg

SEQ ID NO: 3933 - DNA, 15 bp, Homo sapiens
ttcagtacccagaag

SEQ ID NO: 3934 - DNA, 15 bp, Homo sapiens
tttcagtacccagaa

SEQ ID NO: 3935 - DNA, 15 bp, Homo sapiens
atttcagtacccaga

SEQ ID NO: 3936 - DNA, 15 bp, Homo sapiens
gatttcagtacccag

SEQ ID NO: 3937 - DNA, 15 bp, Homo sapiens
tgatttcagtaccca

SEQ ID NO: 3938 - DNA, 15 bp, Homo sapiens
ctgatttcagtaccc

SEQ ID NO: 3939 - DNA, 15 bp, Homo sapiens
gctgatttcagtacc

SEQ ID NO: 3940 - DNA, 15 bp, Homo sapiens
tgctgatttcagtac

SEQ ID NO: 3941 - DNA, 15 bp, Homo sapiens
ttgctgatttcagta

SEQ ID NO: 3942 - DNA, 15 bp, Homo sapiens
cttgctgatttcagt

SEQ ID NO: 3943 - DNA, 15 bp, Homo sapiens
acttgctgatttcag

SEQ ID NO: 3944 - DNA, 15 bp, Homo sapiens
gacttgctgatttca

SEQ ID NO: 3945 - DNA, 15 bp, Homo sapiens
tgacttgctgatttc

SEQ ID NO: 3946 - DNA, 15 bp, Homo sapiens
gtgacttgctgattt

SEQ ID NO: 3947 - DNA, 15 bp, Homo sapiens
agtgacttgctgatt

SEQ ID NO: 3948 - DNA, 15 bp, Homo sapiens
aagtgacttgctgat

SEQ ID NO: 3949 - DNA, 15 bp, Homo sapiens
caagtgacttgctga

SEQ ID NO: 3950 - DNA, 15 bp, Homo sapiens
gcaagtgacttgctg

SEQ ID NO: 3951 - DNA, 15 bp, Homo sapiens
ggcaagtgacttgct

SEQ ID NO: 3952 - DNA, 15 bp, Homo sapiens
gggcaagtgacttgc

SEQ ID NO: 3953 - DNA, 15 bp, Homo sapiens
agggcaagtgacttg

SEQ ID NO: 3954 - DNA, 15 bp, Homo sapiens
gagggcaagtgactt

SEQ ID NO: 3955 - DNA, 15 bp, Homo sapiens
ggagggcaagtgact

SEQ ID NO: 3956 - DNA, 15 bp, Homo sapiens
tggagggcaagtgac

SEQ ID NO: 3957 - DNA, 15 bp, Homo sapiens
atggagggcaagtga

SEQ ID NO: 3958 - DNA, 15 bp, Homo sapiens
catggagggcaagtg

SEQ ID NO: 3959 - DNA, 15 bp, Homo sapiens
ccatggagggcaagt

SEQ ID NO: 3960 - DNA, 15 bp, Homo sapiens
gccatggagggcaag

SEQ ID NO: 3961 - DNA, 15 bp, Homo sapiens
ggccatggagggcaa

SEQ ID NO: 3962 - DNA, 15 bp, Homo sapiens
cggccatggagggca

SEQ ID NO: 3963 - DNA, 15 bp, Homo sapiens
tcggccatggagggc

SEQ ID NO: 3964 - DNA, 15 bp, Homo sapiens
ttcggccatggaggg

SEQ ID NO: 3965 - DNA, 15 bp, Homo sapiens
attcggccatggagg

SEQ ID NO: 3966 - DNA, 15 bp, Homo sapiens
gattcggccatggag

SEQ ID NO: 3967 - DNA, 15 bp, Homo sapiens
ggattcggccatgga

SEQ ID NO: 3968 - DNA, 15 bp, Homo sapiens
gggattcggccatgg

SEQ ID NO: 3969 - DNA, 15 bp, Homo sapiens
agggattcggccatg

SEQ ID NO: 3970 - DNA, 15 bp, Homo sapiens
cagggattcggccat

SEQ ID NO: 3971 - DNA, 15 bp, Homo sapiens
gcagggattcggcca

SEQ ID NO: 3972 - DNA, 15 bp, Homo sapiens
agcagggattcggcc

SEQ ID NO: 3973 - DNA, 15 bp, Homo sapiens
aagcagggattcggc

SEQ ID NO: 3974 - DNA, 15 bp, Homo sapiens
gaagcagggattcgg

SEQ ID NO: 3975 - DNA, 15 bp, Homo sapiens
ggaagcagggattcg

SEQ ID NO: 3976 - DNA, 15 bp, Homo sapiens
gggaagcagggattc

SEQ ID NO: 3977 - DNA, 15 bp, Homo sapiens
tgggaagcagggatt

SEQ ID NO: 3978 - DNA, 15 bp, Homo sapiens
gtgggaagcagggat

SEQ ID NO: 3979 - DNA, 15 bp, Homo sapiens
cgtgggaagcaggga

SEQ ID NO: 3980 - DNA, 15 bp, Homo sapiens
tcgtgggaagcaggg

SEQ ID NO: 3981 - DNA, 15 bp, Homo sapiens
ttcgtgggaagcagg

SEQ ID NO: 3982 - DNA, 15 bp, Homo sapiens
cttcgtgggaagcag

SEQ ID NO: 3983 - DNA, 15 bp, Homo sapiens
tcttcgtgggaagca

SEQ ID NO: 3984 - DNA, 15 bp, Homo sapiens
ctcttcgtgggaagc

SEQ ID NO: 3985 - DNA, 15 bp, Homo sapiens
tctcttcgtgggaag

SEQ ID NO: 3986 - DNA, 15 bp, Homo sapiens
ttctcttcgtgggaa

SEQ ID NO: 3987 - DNA, 15 bp, Homo sapiens
gttctcttcgtggga

SEQ ID NO: 3988 - DNA, 15 bp, Homo sapiens
ggttctcttcgtggg

SEQ ID NO: 3989 - DNA, 15 bp, Homo sapiens
aggttctcttcgtgg

SEQ ID NO: 3990 - DNA, 15 bp, Homo sapiens
gaggttctcttcgtg

SEQ ID NO: 3991 - DNA, 15 bp, Homo sapiens
tgaggttctcttcgt

SEQ ID NO: 3992 - DNA, 15 bp, Homo sapiens
gtgaggttctcttcg

SEQ ID NO: 3993 - DNA, 15 bp, Homo sapiens
tgtgaggttctcttc

SEQ ID NO: 3994 - DNA, 15 bp, Homo sapiens
ttgtgaggttctctt

SEQ ID NO: 3995 - DNA, 15 bp, Homo sapiens
tttgtgaggttctct

SEQ ID NO: 3996 - DNA, 15 bp, Homo sapiens
ttttgtgaggttctc

SEQ ID NO: 3997 - DNA, 15 bp, Homo sapiens
tttttgtgaggttct

SEQ ID NO: 3998 - DNA, 15 bp, Homo sapiens
atttttgtgaggttc

SEQ ID NO: 3999 - DNA, 15 bp, Homo sapiens
aatttttgtgaggtt

SEQ ID NO: 4000 - DNA, 15 bp, Homo sapiens
aaatttttgtgaggt

SEQ ID NO: 4001 - DNA, 15 bp, Homo sapiens
gaaatttttgtgagg

SEQ ID NO: 4002 - DNA, 15 bp, Homo sapiens
ggaaatttttgtgag

SEQ ID NO: 4003 - DNA, 15 bp, Homo sapiens
gggaaatttttgtga

SEQ ID NO: 4004 - DNA, 15 bp, Homo sapiens
ggggaaatttttgtg

SEQ ID NO: 4005 - DNA, 15 bp, Homo sapiens
gggggaaatttttgt

SEQ ID NO: 4006 - DNA, 15 bp, Homo sapiens
tgggggaaatttttg

SEQ ID NO: 4007 - DNA, 15 bp, Homo sapiens
ttgggggaaattttt

SEQ ID NO: 4008 - DNA, 15 bp, Homo sapiens
cttgggggaaatttt

SEQ ID NO: 4009 - DNA, 15 bp, Homo sapiens
acttgggggaaattt

SEQ ID NO: 4010 - DNA, 15 bp, Homo sapiens
aacttgggggaaatt

SEQ ID NO: 4011 - DNA, 15 bp, Homo sapiens
taacttgggggaaat

SEQ ID NO: 4012 - DNA, 15 bp, Homo sapiens
ttaacttgggggaaa

SEQ ID NO: 4013 - DNA, 15 bp, Homo sapiens
tttaacttgggggaa

SEQ ID NO: 4014 - DNA, 15 bp, Homo sapiens
ctttaacttggggga

SEQ ID NO: 4015 - DNA, 15 bp, Homo sapiens
tctttaacttggggg

SEQ ID NO: 4016 - DNA, 15 bp, Homo sapiens
ctctttaacttgggg

SEQ ID NO: 4017 - DNA, 15 bp, Homo sapiens
actctttaacttggg

SEQ ID NO: 4018 - DNA, 15 bp, Homo sapiens
cactctttaacttgg

SEQ ID NO: 4019 - DNA, 15 bp, Homo sapiens
ccactctttaacttg

SEQ ID NO: 4020 - DNA, 15 bp, Homo sapiens
tccactctttaactt

SEQ ID NO: 4021 - DNA, 15 bp, Homo sapiens
ttccactctttaact

SEQ ID NO: 4022 - DNA, 15 bp, Homo sapiens
attccactctttaac

SEQ ID NO: 4023 - DNA, 15 bp, Homo sapiens
aattccactctttaa

SEQ ID NO: 4024 - DNA, 15 bp, Homo sapiens
aaattccactcttta

SEQ ID NO: 4025 - DNA, 15 bp, Homo sapiens
aaaattccactcttt

SEQ ID NO: 4026 - DNA, 15 bp, Homo sapiens
gaaaattccactctt

SEQ ID NO: 4027 - DNA, 15 bp, Homo sapiens
agaaaattccactct

SEQ ID NO: 4028 - DNA, 15 bp, Homo sapiens
aagaaaattccactc

SEQ ID NO: 4029 - DNA, 15 bp, Homo sapiens
caagaaaattccact

SEQ ID NO: 4030 - DNA, 15 bp, Homo sapiens
tcaagaaaattccac

SEQ ID NO: 4031 - DNA, 15 bp, Homo sapiens
atcaagaaaattcca

SEQ ID NO: 4032 - DNA, 15 bp, Homo sapiens
aatcaagaaaattcc

SEQ ID NO: 4033 - DNA, 15 bp, Homo sapiens
aaatcaagaaaattc

SEQ ID NO: 4034 - DNA, 15 bp, Homo sapiens
aaaatcaagaaaatt

SEQ ID NO: 4035 - DNA, 15 bp, Homo sapiens
aaaaatcaagaaaat

SEQ ID NO: 4036 - DNA, 15 bp, Homo sapiens
aaaaaatcaagaaaa

SEQ ID NO: 4037 - DNA, 15 bp, Homo sapiens
aaaaaaatcaagaaa

SEQ ID NO: 4038 - DNA, 15 bp, Homo sapiens
aaaaaaaatcaagaa

SEQ ID NO: 4039 - DNA, 15 bp, Homo sapiens
aaaaaaaaatcaaga

SEQ ID NO: 4040 - DNA, 15 bp, Homo sapiens
gaaaaaaaaatcaag

SEQ ID NO: 4041 - DNA, 15 bp, Homo sapiens
agaaaaaaaaatcaa

SEQ ID NO: 4042 - DNA, 15 bp, Homo sapiens
aagaaaaaaaaatca

SEQ ID NO: 4043 - DNA, 15 bp, Homo sapiens
aaagaaaaaaaaatc

SEQ ID NO: 4044 - DNA, 15 bp, Homo sapiens
aaaagaaaaaaaaat

SEQ ID NO: 4045 - DNA, 15 bp, Homo sapiens
aaaaaaagaaaaaaa

SEQ ID NO: 4046 - DNA, 15 bp, Homo sapiens
aaaaaaaagaaaaaa

SEQ ID NO: 4047 - DNA, 15 bp, Homo sapiens
taaaaaaaaaagaaa

SEQ ID NO: 4048 - DNA, 15 bp, Homo sapiens
ttaaaaaaaaaagaa

SEQ ID NO: 4049 - DNA, 15 bp, Homo sapiens
gttaaaaaaaaaaga

SEQ ID NO: 4050 - DNA, 15 bp, Homo sapiens
cgttaaaaaaaaaag

SEQ ID NO: 4051 - DNA, 15 bp, Homo sapiens
ccgttaaaaaaaaaa

SEQ ID NO: 4052 - DNA, 15 bp, Homo sapiens
gccgttaaaaaaaaa

SEQ ID NO: 4053 - DNA, 15 bp, Homo sapiens
ggccgttaaaaaaaa

SEQ ID NO: 4054 - DNA, 15 bp, Homo sapiens
cggccgttaaaaaaa

SEQ ID NO: 4055 - DNA, 15 bp, Homo sapiens
acggccgttaaaaaa

SEQ ID NO: 4056 - DNA, 15 bp, Homo sapiens
tacggccgttaaaaa

SEQ ID NO: 4057 - DNA, 15 bp, Homo sapiens
ctacggccgttaaaa

SEQ ID NO: 4058 - DNA, 15 bp, Homo sapiens
actacggccgttaaa

SEQ ID NO: 4059 - DNA, 15 bp, Homo sapiens
aactacggccgttaa

SEQ ID NO: 4060 - DNA, 15 bp, Homo sapiens
aaactacggccgtta

SEQ ID NO: 4061 - DNA, 15 bp, Homo sapiens
taaactacggccgtt

SEQ ID NO: 4062 - DNA, 15 bp, Homo sapiens
ctaaactacggccgt

SEQ ID NO: 4063 - DNA, 15 bp, Homo sapiens
tctaaactacggccg

SEQ ID NO: 4064 - DNA, 15 bp, Homo sapiens
ttctaaactacggcc

SEQ ID NO: 4065 - DNA, 15 bp, Homo sapiens
gttctaaactacggc

SEQ ID NO: 4066 - DNA, 15 bp, Homo sapiens
ggttctaaactacgg

SEQ ID NO: 4067 - DNA, 15 bp, Homo sapiens
gggttctaaactacg

SEQ ID NO: 4068 - DNA, 15 bp, Homo sapiens
tgggttctaaactac

SEQ ID NO: 4069 - DNA, 15 bp, Homo sapiens
ctgggttctaaacta

SEQ ID NO: 4070 - DNA, 15 bp, Homo sapiens
tctgggttctaaact

SEQ ID NO: 4071 - DNA, 15 bp, Homo sapiens
gtctgggttctaaac

SEQ ID NO: 4072 - DNA, 15 bp, Homo sapiens
agtctgggttctaaa

SEQ ID NO: 4073 - DNA, 15 bp, Homo sapiens
aagtctgggttctaa

SEQ ID NO: 4074 - DNA, 15 bp, Homo sapiens
taagtctgggttcta

SEQ ID NO: 4075 - DNA, 15 bp, Homo sapiens
ttaagtctgggttct

SEQ ID NO: 4076 - DNA, 15 bp, Homo sapiens
tttaagtctgggttc

SEQ ID NO: 4077 - DNA, 15 bp, Homo sapiens
atttaagtctgggtt

SEQ ID NO: 4078 - DNA, 15 bp, Homo sapiens
aatttaagtctgggt

SEQ ID NO: 4079 - DNA, 15 bp, Homo sapiens
taatttaagtctggg

SEQ ID NO: 4080 - DNA, 15 bp, Homo sapiens
ataatttaagtctgg

SEQ ID NO: 4081 - DNA, 15 bp, Homo sapiens
cataatttaagtctg

SEQ ID NO: 4082 - DNA, 15 bp, Homo sapiens
tcataatttaagtct

SEQ ID NO: 4083 - DNA, 15 bp, Homo sapiens
atcataatttaagtc

SEQ ID NO: 4084 - DNA, 15 bp, Homo sapiens
gatcataatttaagt

SEQ ID NO: 4085 - DNA, 15 bp, Homo sapiens
agatcataatttaag

SEQ ID NO: 4086 - DNA, 15 bp, Homo sapiens
aagatcataatttaa

SEQ ID NO: 4087 - DNA, 15 bp, Homo sapiens
gaagatcataattta

SEQ ID NO: 4088 - DNA, 15 bp, Homo sapiens
agaagatcataattt

SEQ ID NO: 4089 - DNA, 15 bp, Homo sapiens
aagaagatcataatt

SEQ ID NO: 4090 - DNA, 15 bp, Homo sapiens
aaagaagatcataat

SEQ ID NO: 4091 - DNA, 15 bp, Homo sapiens
aaaagaagatcataa

SEQ ID NO: 4092 - DNA, 15 bp, Homo sapiens
gaaaagaagatcata

SEQ ID NO: 4093 - DNA, 15 bp, Homo sapiens
tgaaaagaagatcat

SEQ ID NO: 4094 - DNA, 15 bp, Homo sapiens
ttgaaaagaagatca

SEQ ID NO: 4095 - DNA, 15 bp, Homo sapiens
tttgaaaagaagatc

SEQ ID NO: 4096 - DNA, 15 bp, Homo sapiens
gtttgaaaagaagat

SEQ ID NO: 4097 - DNA, 15 bp, Homo sapiens
tgtttgaaaagaaga

SEQ ID NO: 4098 - DNA, 15 bp, Homo sapiens
ttgtttgaaaagaag

SEQ ID NO: 4099 - DNA, 15 bp, Homo sapiens
tttgtttgaaaagaa

SEQ ID NO: 4100 - DNA, 15 bp, Homo sapiens
ttttgtttgaaaaga

SEQ ID NO: 4101 - DNA, 15 bp, Homo sapiens
gttttgtttgaaaag

SEQ ID NO: 4102 - DNA, 15 bp, Homo sapiens
agttttgtttgaaaa

SEQ ID NO: 4103 - DNA, 15 bp, Homo sapiens
aagttttgtttgaaa

SEQ ID NO: 4104 - DNA, 15 bp, Homo sapiens
taagttttgtttgaa

SEQ ID NO: 4105 - DNA, 15 bp, Homo sapiens
ttaagttttgtttga

SEQ ID NO: 4106 - DNA, 15 bp, Homo sapiens
tttaagttttgtttg

SEQ ID NO: 4107 - DNA, 15 bp, Homo sapiens
ctttaagttttgttt

SEQ ID NO: 4108 - DNA, 15 bp, Homo sapiens
actttaagttttgtt

SEQ ID NO: 4109 - DNA, 15 bp, Homo sapiens
gactttaagttttgt

SEQ ID NO: 4110 - DNA, 15 bp, Homo sapiens
ggactttaagttttg

SEQ ID NO: 4111 - DNA, 15 bp, Homo sapiens
aggactttaagtttt

SEQ ID NO: 4112 - DNA, 15 bp, Homo sapiens
aaggactttaagttt

SEQ ID NO: 4113 - DNA, 15 bp, Homo sapiens
taaggactttaagtt

SEQ ID NO: 4114 - DNA, 15 bp, Homo sapiens
ttaaggactttaagt

SEQ ID NO: 4115 - DNA, 15 bp, Homo sapiens
cttaaggactttaag

SEQ ID NO: 4116 - DNA, 15 bp, Homo sapiens
acttaaggactttaa

SEQ ID NO: 4117 - DNA, 15 bp, Homo sapiens
aacttaaggacttta

SEQ ID NO: 4118 - DNA, 15 bp, Homo sapiens
aaacttaaggacttt

SEQ ID NO: 4119 - DNA, 15 bp, Homo sapiens
aaaacttaaggactt

SEQ ID NO: 4120 - DNA, 15 bp, Homo sapiens
gaaaacttaaggact

SEQ ID NO: 4121 - DNA, 15 bp, Homo sapiens
tgaaaacttaaggac

SEQ ID NO: 4122 - DNA, 15 bp, Homo sapiens
atgaaaacttaagga

SEQ ID NO: 4123 - DNA, 15 bp, Homo sapiens
gatgaaaacttaagg

SEQ ID NO: 4124 - DNA, 15 bp, Homo sapiens
agatgaaaacttaag

SEQ ID NO: 4125 - DNA, 15 bp, Homo sapiens
gagatgaaaacttaa

SEQ ID NO: 4126 - DNA, 15 bp, Homo sapiens
ggagatgaaaactta

SEQ ID NO: 4127 - DNA, 15 bp, Homo sapiens
gggagatgaaaactt

SEQ ID NO: 4128 - DNA, 15 bp, Homo sapiens
ggggagatgaaaact

SEQ ID NO: 4129 - DNA, 15 bp, Homo sapiens
aggggagatgaaaac

SEQ ID NO: 4130 - DNA, 15 bp, Homo sapiens
aaggggagatgaaaa

SEQ ID NO: 4131 - DNA, 15 bp, Homo sapiens
aaaggggagatgaaa

SEQ ID NO: 4132 - DNA, 15 bp, Homo sapiens
aaaaggggagatgaa

SEQ ID NO: 4133 - DNA, 15 bp, Homo sapiens
taaaaggggagatga

SEQ ID NO: 4134 - DNA, 15 bp, Homo sapiens
ataaaaggggagatg

SEQ ID NO: 4135 - DNA, 15 bp, Homo sapiens
aataaaaggggagat

SEQ ID NO: 4136 - DNA, 15 bp, Homo sapiens
aaataaaaggggaga

SEQ ID NO: 4137 - DNA, 15 bp, Homo sapiens
gaaataaaaggggag

SEQ ID NO: 4138 - DNA, 15 bp, Homo sapiens
tgaaataaaagggga

SEQ ID NO: 4139 - DNA, 15 bp, Homo sapiens
ttgaaataaaagggg

SEQ ID NO: 4140 - DNA, 15 bp, Homo sapiens
gttgaaataaaaggg

SEQ ID NO: 4141 - DNA, 15 bp, Homo sapiens
ggttgaaataaaagg

SEQ ID NO: 4142 - DNA, 15 bp, Homo sapiens
aggttgaaataaaag

SEQ ID NO: 4143 - DNA, 15 bp, Homo sapiens
taggttgaaataaaa

SEQ ID NO: 4144 - DNA, 15 bp, Homo sapiens
ataggttgaaataaa

SEQ ID NO: 4145 - DNA, 15 bp, Homo sapiens
aataggttgaaataa

SEQ ID NO: 4146 - DNA, 15 bp, Homo sapiens
gaataggttgaaata

SEQ ID NO: 4147 - DNA, 15 bp, Homo sapiens
agaataggttgaaat

SEQ ID NO: 4148 - DNA, 15 bp, Homo sapiens
aagaataggttgaaa

SEQ ID NO: 4149 - DNA, 15 bp, Homo sapiens
gaagaataggttgaa

SEQ ID NO: 4150 - DNA, 15 bp, Homo sapiens
agaagaataggttga

SEQ ID NO: 4151 - DNA, 15 bp, Homo sapiens
gagaagaataggttg

SEQ ID NO: 4152 - DNA, 15 bp, Homo sapiens
tgagaagaataggtt

SEQ ID NO: 4153 - DNA, 15 bp, Homo sapiens
atgagaagaataggt

SEQ ID NO: 4154 - DNA, 15 bp, Homo sapiens
tatgagaagaatagg

SEQ ID NO: 4155 - DNA, 15 bp, Homo sapiens
gtatgagaagaatag

SEQ ID NO: 4156 - DNA, 15 bp, Homo sapiens
ggtatgagaagaata

SEQ ID NO: 4157 - DNA, 15 bp, Homo sapiens
aggtatgagaagaat

SEQ ID NO: 4158 - DNA, 15 bp, Homo sapiens
taggtatgagaagaa

SEQ ID NO: 4159 - DNA, 15 bp, Homo sapiens
gtaggtatgagaaga

SEQ ID NO: 4160 - DNA, 15 bp, Homo sapiens
ggtaggtatgagaag

SEQ ID NO: 4161 - DNA, 15 bp, Homo sapiens
tggtaggtatgagaa

SEQ ID NO: 4162 - DNA, 15 bp, Homo sapiens
gtggtaggtatgaga

SEQ ID NO: 4163 - DNA, 15 bp, Homo sapiens
tgtggtaggtatgag

SEQ ID NO: 4164 - DNA, 15 bp, Homo sapiens
ttgtggtaggtatga

SEQ ID NO: 4165 - DNA, 15 bp, Homo sapiens
tttgtggtaggtatg

SEQ ID NO: 4166 - DNA, 15 bp, Homo sapiens
ttttgtggtaggtat

SEQ ID NO: 4167 - DNA, 15 bp, Homo sapiens
tttttgtggtaggta

SEQ ID NO: 4168 - DNA, 15 bp, Homo sapiens
atttttgtggtaggt

SEQ ID NO: 4169 - DNA, 15 bp, Homo sapiens
tatttttgtggtagg

SEQ ID NO: 4170 - DNA, 15 bp, Homo sapiens
ttatttttgtggtag

SEQ ID NO: 4171 - DNA, 15 bp, Homo sapiens
attatttttgtggta

SEQ ID NO: 4172 - DNA, 15 bp, Homo sapiens
cattatttttgtggt

SEQ ID NO: 4173 - DNA, 15 bp, Homo sapiens
ccattatttttgtgg

SEQ ID NO: 4174 - DNA, 15 bp, Homo sapiens
tccattatttttgtg

SEQ ID NO: 4175 - DNA, 15 bp, Homo sapiens
ctccattatttttgt

SEQ ID NO: 4176 - DNA, 15 bp, Homo sapiens
cctccattatttttg

SEQ ID NO: 4177 - DNA, 15 bp, Homo sapiens
gcctccattattttt

SEQ ID NO: 4178 - DNA, 15 bp, Homo sapiens
agcctccattatttt

SEQ ID NO: 4179 - DNA, 15 bp, Homo sapiens
aagcctccattattt

SEQ ID NO: 4180 - DNA, 15 bp, Homo sapiens
aaagcctccattatt

SEQ ID NO: 4181 - DNA, 15 bp, Homo sapiens
gaaagcctccattat

SEQ ID NO: 4182 - DNA, 15 bp, Homo sapiens
agaaagcctccatta

SEQ ID NO: 4183 - DNA, 15 bp, Homo sapiens
cagaaagcctccatt

SEQ ID NO: 4184 - DNA, 15 bp, Homo sapiens
acagaaagcctccat

SEQ ID NO: 4185 - DNA, 15 bp, Homo sapiens
aacagaaagcctcca

SEQ ID NO: 4186 - DNA, 15 bp, Homo sapiens
caacagaaagcctcc

SEQ ID NO: 4187 - DNA, 15 bp, Homo sapiens
tcaacagaaagcctc

SEQ ID NO: 4188 - DNA, 15 bp, Homo sapiens
ctcaacagaaagcct

SEQ ID NO: 4189 - DNA, 15 bp, Homo sapiens
tctcaacagaaagcc

SEQ ID NO: 4190 - DNA, 15 bp, Homo sapiens
ttctcaacagaaagc

SEQ ID NO: 4191 - DNA, 15 bp, Homo sapiens
tttctcaacagaaag

SEQ ID NO: 4192 - DNA, 15 bp, Homo sapiens
gtttctcaacagaaa

SEQ ID NO: 4193 - DNA, 15 bp, Homo sapiens
agtttctcaacagaa

SEQ ID NO: 4194 - DNA, 15 bp, Homo sapiens
aagtttctcaacaga

SEQ ID NO: 4195 - DNA, 15 bp, Homo sapiens
aaagtttctcaacag

SEQ ID NO: 4196 - DNA, 15 bp, Homo sapiens
gaaagtttctcaaca

SEQ ID NO: 4197 - DNA, 15 bp, Homo sapiens
ggaaagtttctcaac

SEQ ID NO: 4198 - DNA, 15 bp, Homo sapiens
cggaaagtttctcaa

SEQ ID NO: 4199 - DNA, 15 bp, Homo sapiens
acggaaagtttctca

SEQ ID NO: 4200 - DNA, 15 bp, Homo sapiens
aacggaaagtttctc

SEQ ID NO: 4201 - DNA, 15 bp, Homo sapiens
aaacggaaagtttct

SEQ ID NO: 4202 - DNA, 15 bp, Homo sapiens
gaaacggaaagtttc

SEQ ID NO: 4203 - DNA, 15 bp, Homo sapiens
agaaacggaaagttt

SEQ ID NO: 4204 - DNA, 15 bp, Homo sapiens
cagaaacggaaagtt

SEQ ID NO: 4205 - DNA, 15 bp, Homo sapiens
acagaaacggaaagt

SEQ ID NO: 4206 - DNA, 15 bp, Homo sapiens
aacagaaacggaaag

SEQ ID NO: 4207 - DNA, 15 bp, Homo sapiens
caacagaaacggaaa

SEQ ID NO: 4208 - DNA, 15 bp, Homo sapiens
tcaacagaaacggaa

SEQ ID NO: 4209 - DNA, 15 bp, Homo sapiens
ctcaacagaaacgga

SEQ ID NO: 4210 - DNA, 15 bp, Homo sapiens
tctcaacagaaacgg

SEQ ID NO: 4211 - DNA, 15 bp, Homo sapiens
ctctcaacagaaacg

SEQ ID NO: 4212 - DNA, 15 bp, Homo sapiens
actctcaacagaaac

SEQ ID NO: 4213 - DNA, 15 bp, Homo sapiens
tactctcaacagaaa

SEQ ID NO: 4214 - DNA, 15 bp, Homo sapiens
atactctcaacagaa

SEQ ID NO: 4215 - DNA, 15 bp, Homo sapiens
gatactctcaacaga

SEQ ID NO: 4216 - DNA, 15 bp, Homo sapiens
tgatactctcaacag

SEQ ID NO: 4217 - DNA, 15 bp, Homo sapiens
atgatactctcaaca

SEQ ID NO: 4218 - DNA, 15 bp, Homo sapiens
aatgatactctcaac

SEQ ID NO: 4219 - DNA, 15 bp, Homo sapiens
gaatgatactctcaa

SEQ ID NO: 4220 - DNA, 15 bp, Homo sapiens
agaatgatactctca

SEQ ID NO: 4221 - DNA, 15 bp, Homo sapiens
gagaatgatactctc

SEQ ID NO: 4222 - DNA, 15 bp, Homo sapiens
agagaatgatactct

SEQ ID NO: 4223 - DNA, 15 bp, Homo sapiens
aagagaatgatactc

SEQ ID NO: 4224 - DNA, 15 bp, Homo sapiens
caagagaatgatact

SEQ ID NO: 4225 - DNA, 15 bp, Homo sapiens
tcaagagaatgatac

SEQ ID NO: 4226 - DNA, 15 bp, Homo sapiens
ctcaagagaatgata

SEQ ID NO: 4227 - DNA, 15 bp, Homo sapiens
tctcaagagaatgat

SEQ ID NO: 4228 - DNA, 15 bp, Homo sapiens
ttctcaagagaatga

SEQ ID NO: 4229 - DNA, 15 bp, Homo sapiens
tttctcaagagaatg

SEQ ID NO: 4230 - DNA, 15 bp, Homo sapiens
gtttctcaagagaat

SEQ ID NO: 4231 - DNA, 15 bp, Homo sapiens
agtttctcaagagaa

SEQ ID NO: 4232 - DNA, 15 bp, Homo sapiens
aagtttctcaagaga

SEQ ID NO: 4233 - DNA, 15 bp, Homo sapiens
aaagtttctcaagag

SEQ ID NO: 4234 - DNA, 15 bp, Homo sapiens
gaaagtttctcaaga

SEQ ID NO: 4235 - DNA, 15 bp, Homo sapiens
agaaagtttctcaag

SEQ ID NO: 4236 - DNA, 15 bp, Homo sapiens
gagaaagtttctcaa

SEQ ID NO: 4237 - DNA, 15 bp, Homo sapiens
ggagaaagtttctca

SEQ ID NO: 4238 - DNA, 15 bp, Homo sapiens
aggagaaagtttctc

SEQ ID NO: 4239 - DNA, 15 bp, Homo sapiens
taggagaaagtttct

SEQ ID NO: 4240 - DNA, 15 bp, Homo sapiens
ttaggagaaagtttc

SEQ ID NO: 4241 - DNA, 15 bp, Homo sapiens
tttaggagaaagttt

SEQ ID NO: 4242 - DNA, 15 bp, Homo sapiens
atttaggagaaagtt

SEQ ID NO: 4243 - DNA, 15 bp, Homo sapiens
gatttaggagaaagt

SEQ ID NO: 4244 - DNA, 15 bp, Homo sapiens
tgatttaggagaaag

SEQ ID NO: 4245 - DNA, 15 bp, Homo sapiens
ctgatttaggagaaa

SEQ ID NO: 4246 - DNA, 15 bp, Homo sapiens
tctgatttaggagaa

SEQ ID NO: 4247 - DNA, 15 bp, Homo sapiens
ctctgatttaggaga

SEQ ID NO: 4248 - DNA, 15 bp, Homo sapiens
tctctgatttaggag

SEQ ID NO: 4249 - DNA, 15 bp, Homo sapiens
ttctctgatttagga

SEQ ID NO: 4250 - DNA, 15 bp, Homo sapiens
tttctctgatttagg

SEQ ID NO: 4251 - DNA, 15 bp, Homo sapiens
ctttctctgatttag

SEQ ID NO: 4252 - DNA, 15 bp, Homo sapiens
actttctctgattta

SEQ ID NO: 4253 - DNA, 15 bp, Homo sapiens
tactttctctgattt

SEQ ID NO: 4254 - DNA, 15 bp, Homo sapiens
atactttctctgatt

SEQ ID NO: 4255 - DNA, 15 bp, Homo sapiens
catactttctctgat

SEQ ID NO: 4256 - DNA, 15 bp, Homo sapiens
ccatactttctctga

SEQ ID NO: 4257 - DNA, 15 bp, Homo sapiens
tccatactttctctg

SEQ ID NO: 4258 - DNA, 15 bp, Homo sapiens
ttccatactttctct

SEQ ID NO: 4259 - DNA, 15 bp, Homo sapiens
cttccatactttctc

SEQ ID NO: 4260 - DNA, 15 bp, Homo sapiens
gcttccatactttct

SEQ ID NO: 4261 - DNA, 15 bp, Homo sapiens
tgcttccatactttc

SEQ ID NO: 4262 - DNA, 15 bp, Homo sapiens
atgcttccatacttt

SEQ ID NO: 4263 - DNA, 15 bp, Homo sapiens
catgcttccatactt

SEQ ID NO: 4264 - DNA, 15 bp, Homo sapiens
ccatgcttccatact

SEQ ID NO: 4265 - DNA, 15 bp, Homo sapiens
tccatgcttccatac

SEQ ID NO: 4266 - DNA, 15 bp, Homo sapiens
ttccatgcttccata

SEQ ID NO: 4267 - DNA, 15 bp, Homo sapiens
tttccatgcttccat

SEQ ID NO: 4268 - DNA, 15 bp, Homo sapiens
ctttccatgcttcca

SEQ ID NO: 4269 - DNA, 15 bp, Homo sapiens
actttccatgcttcc

SEQ ID NO: 4270 - DNA, 15 bp, Homo sapiens
tactttccatgcttc

SEQ ID NO: 4271 - DNA, 15 bp, Homo sapiens
atactttccatgctt

SEQ ID NO: 4272 - DNA, 15 bp, Homo sapiens
aatactttccatgct

SEQ ID NO: 4273 - DNA, 15 bp, Homo sapiens
gaatactttccatgc

SEQ ID NO: 4274 - DNA, 15 bp, Homo sapiens
ggaatactttccatg

SEQ ID NO: 4275 - DNA, 15 bp, Homo sapiens
aggaatactttccat

SEQ ID NO: 4276 - DNA, 15 bp, Homo sapiens
caggaatactttcca

SEQ ID NO: 4277 - DNA, 15 bp, Homo sapiens
tcaggaatactttcc

SEQ ID NO: 4278 - DNA, 15 bp, Homo sapiens
ctcaggaatactttc

SEQ ID NO: 4279 - DNA, 15 bp, Homo sapiens
actcaggaatacttt

SEQ ID NO: 4280 - DNA, 15 bp, Homo sapiens
tactcaggaatactt

SEQ ID NO: 4281 - DNA, 15 bp, Homo sapiens
ctactcaggaatact

SEQ ID NO: 4282 - DNA, 15 bp, Homo sapiens
tctactcaggaatac

SEQ ID NO: 4283 - DNA, 15 bp, Homo sapiens
ttctactcaggaata

SEQ ID NO: 4284 - DNA, 15 bp, Homo sapiens
gttctactcaggaat

SEQ ID NO: 4285 - DNA, 15 bp, Homo sapiens
ggttctactcaggaa

SEQ ID NO: 4286 - DNA, 15 bp, Homo sapiens
aggttctactcagga

SEQ ID NO: 4287 - DNA, 15 bp, Homo sapiens
gaggttctactcagg

SEQ ID NO: 4288 - DNA, 15 bp, Homo sapiens
agaggttctactcag

SEQ ID NO: 4289 - DNA, 15 bp, Homo sapiens
tagaggttctactca

SEQ ID NO: 4290 - DNA, 15 bp, Homo sapiens
gtagaggttctactc

SEQ ID NO: 4291 - DNA, 15 bp, Homo sapiens
tgtagaggttctact

SEQ ID NO: 4292 - DNA, 15 bp, Homo sapiens
ctgtagaggttctac

SEQ ID NO: 4293 - DNA, 15 bp, Homo sapiens
tctgtagaggttcta

SEQ ID NO: 4294 - DNA, 15 bp, Homo sapiens
atctgtagaggttct

SEQ ID NO: 4295 - DNA, 15 bp, Homo sapiens
tatctgtagaggttc

SEQ ID NO: 4296 - DNA, 15 bp, Homo sapiens
atatctgtagaggtt

SEQ ID NO: 4297 - DNA, 15 bp, Homo sapiens
aatatctgtagaggt

SEQ ID NO: 4298 - DNA, 15 bp, Homo sapiens
taatatctgtagagg

SEQ ID NO: 4299 - DNA, 15 bp, Homo sapiens
gtaatatctgtagag

SEQ ID NO: 4300 - DNA, 15 bp, Homo sapiens
tgtaatatctgtaga

SEQ ID NO: 4301 - DNA, 15 bp, Homo sapiens
ttgtaatatctgtag

SEQ ID NO: 4302 - DNA, 15 bp, Homo sapiens
attgtaatatctgta

SEQ ID NO: 4303 - DNA, 15 bp, Homo sapiens
tattgtaatatctgt

SEQ ID NO: 4304 - DNA, 15 bp, Homo sapiens
atattgtaatatctg

SEQ ID NO: 4305 - DNA, 15 bp, Homo sapiens
aatattgtaatatct

SEQ ID NO: 4306 - DNA, 15 bp, Homo sapiens
aaatattgtaatatc

SEQ ID NO: 4307 - DNA, 15 bp, Homo sapiens
aaaatattgtaatat

SEQ ID NO: 4308 - DNA, 15 bp, Homo sapiens
aaaaatattgtaata

SEQ ID NO: 4309 - DNA, 15 bp, Homo sapiens
gaaaaatattgtaat

SEQ ID NO: 4310 - DNA, 15 bp, Homo sapiens
tgaaaaatattgtaa

SEQ ID NO: 4311 - DNA, 15 bp, Homo sapiens
ttgaaaaatattgta

SEQ ID NO: 4312 - DNA, 15 bp, Homo sapiens
tttgaaaaatattgt

SEQ ID NO: 4313 - DNA, 15 bp, Homo sapiens
atttgaaaaatattg

SEQ ID NO: 4314 - DNA, 15 bp, Homo sapiens
tatttgaaaaatatt

SEQ ID NO: 4315 - DNA, 15 bp, Homo sapiens
gtatttgaaaaatat

SEQ ID NO: 4316 - DNA, 15 bp, Homo sapiens
tgtatttgaaaaata

SEQ ID NO: 4317 - DNA, 15 bp, Homo sapiens
ttgtatttgaaaaat

SEQ ID NO: 4318 - DNA, 15 bp, Homo sapiens
tttgtatttgaaaaa

SEQ ID NO: 4319 - DNA, 15 bp, Homo sapiens
ctttgtatttgaaaa

SEQ ID NO: 4320 - DNA, 15 bp, Homo sapiens
actttgtatttgaaa

SEQ ID NO: 4321 - DNA, 15 bp, Homo sapiens
aactttgtatttgaa

SEQ ID NO: 4322 - DNA, 15 bp, Homo sapiens
aaactttgtatttga

SEQ ID NO: 4323 - DNA, 15 bp, Homo sapiens
gaaactttgtatttg

SEQ ID NO: 4324 - DNA, 15 bp, Homo sapiens
ggaaactttgtattt

SEQ ID NO: 4325 - DNA, 15 bp, Homo sapiens
tggaaactttgtatt

SEQ ID NO: 4326 - DNA, 15 bp, Homo sapiens
atggaaactttgtat

SEQ ID NO: 4327 - DNA, 15 bp, Homo sapiens
aatggaaactttgta

SEQ ID NO: 4328 - DNA, 15 bp, Homo sapiens
caatggaaactttgt

SEQ ID NO: 4329 - DNA, 15 bp, Homo sapiens
acaatggaaactttg

SEQ ID NO: 4330 - DNA, 15 bp, Homo sapiens
gacaatggaaacttt

SEQ ID NO: 4331 - DNA, 15 bp, Homo sapiens
tgacaatggaaactt

SEQ ID NO: 4332 - DNA, 15 bp, Homo sapiens
ctgacaatggaaact

SEQ ID NO: 4333 - DNA, 15 bp, Homo sapiens
gctgacaatggaaac

SEQ ID NO: 4334 - DNA, 15 bp, Homo sapiens
ggctgacaatggaaa

SEQ ID NO: 4335 - DNA, 15 bp, Homo sapiens
aggctgacaatggaa

SEQ ID NO: 4336 - DNA, 15 bp, Homo sapiens
caggctgacaatgga

SEQ ID NO: 4337 - DNA, 15 bp, Homo sapiens
acaggctgacaatgg

SEQ ID NO: 4338 - DNA, 15 bp, Homo sapiens
aacaggctgacaatg

SEQ ID NO: 4339 - DNA, 15 bp, Homo sapiens
aaacaggctgacaat

SEQ ID NO: 4340 - DNA, 15 bp, Homo sapiens
gaaacaggctgacaa

SEQ ID NO: 4341 - DNA, 15 bp, Homo sapiens
ggaaacaggctgaca

SEQ ID NO: 4342 - DNA, 15 bp, Homo sapiens
gggaaacaggctgac

SEQ ID NO: 4343 - DNA, 15 bp, Homo sapiens
tgggaaacaggctga

SEQ ID NO: 4344 - DNA, 15 bp, Homo sapiens
ttgggaaacaggctg

SEQ ID NO: 4345 - DNA, 15 bp, Homo sapiens
cttgggaaacaggct

SEQ ID NO: 4346 - DNA, 15 bp, Homo sapiens
acttgggaaacaggc

SEQ ID NO: 4347 - DNA, 15 bp, Homo sapiens
cacttgggaaacagg

SEQ ID NO: 4348 - DNA, 15 bp, Homo sapiens
gcacttgggaaacag

SEQ ID NO: 4349 - DNA, 15 bp, Homo sapiens
agcacttgggaaaca

SEQ ID NO: 4350 - DNA, 15 bp, Homo sapiens
aagcacttgggaaac

SEQ ID NO: 4351 - DNA, 15 bp, Homo sapiens
gaagcacttgggaaa

SEQ ID NO: 4352 - DNA, 15 bp, Homo sapiens
ggaagcacttgggaa

SEQ ID NO: 4353 - DNA, 15 bp, Homo sapiens
tggaagcacttggga

SEQ ID NO: 4354 - DNA, 15 bp, Homo sapiens
gtggaagcacttggg

SEQ ID NO: 4355 - DNA, 15 bp, Homo sapiens
tgtggaagcacttgg

SEQ ID NO: 4356 - DNA, 15 bp, Homo sapiens
ttgtggaagcacttg

SEQ ID NO: 4357 - DNA, 15 bp, Homo sapiens
tttgtggaagcactt

SEQ ID NO: 4358 - DNA, 15 bp, Homo sapiens
gtttgtggaagcact

SEQ ID NO: 4359 - DNA, 15 bp, Homo sapiens
ggtttgtggaagcac

SEQ ID NO: 4360 - DNA, 15 bp, Homo sapiens
tggtttgtggaagca

SEQ ID NO: 4361 - DNA, 15 bp, Homo sapiens
atggtttgtggaagc

SEQ ID NO: 4362 - DNA, 15 bp, Homo sapiens
aatggtttgtggaag

SEQ ID NO: 4363 - DNA, 15 bp, Homo sapiens
taatggtttgtggaa

SEQ ID NO: 4364 - DNA, 15 bp, Homo sapiens
ttaatggtttgtgga

SEQ ID NO: 4365 - DNA, 15 bp, Homo sapiens
tttaatggtttgtgg

SEQ ID NO: 4366 - DNA, 15 bp, Homo sapiens
atttaatggtttgtg

SEQ ID NO: 4367 - DNA, 15 bp, Homo sapiens
tatttaatggtttgt

SEQ ID NO: 4368 - DNA, 15 bp, Homo sapiens
ttatttaatggtttg

SEQ ID NO: 4369 - DNA, 15 bp, Homo sapiens
attatttaatggttt

SEQ ID NO: 4370 - DNA, 15 bp, Homo sapiens
aattatttaatggtt

SEQ ID NO: 4371 - DNA, 15 bp, Homo sapiens
gaattatttaatggt

SEQ ID NO: 4372 - DNA, 15 bp, Homo sapiens
ggaattatttaatgg

SEQ ID NO: 4373 - DNA, 15 bp, Homo sapiens
tggaattatttaatg

SEQ ID NO: 4374 - DNA, 15 bp, Homo sapiens
gtggaattatttaat

SEQ ID NO: 4375 - DNA, 15 bp, Homo sapiens
tgtggaattatttaa

SEQ ID NO: 4376 - DNA, 15 bp, Homo sapiens
ttgtggaattattta

SEQ ID NO: 4377 - DNA, 15 bp, Homo sapiens
tttgtggaattattt

SEQ ID NO: 4378 - DNA, 15 bp, Homo sapiens
gtttgtggaattatt

SEQ ID NO: 4379 - DNA, 15 bp, Homo sapiens
ggtttgtggaattat

SEQ ID NO: 4380 - DNA, 15 bp, Homo sapiens
tggtttgtggaatta

SEQ ID NO: 4381 - DNA, 15 bp, Homo sapiens
atggtttgtggaatt

SEQ ID NO: 4382 - DNA, 15 bp, Homo sapiens
aatggtttgtggaat

SEQ ID NO: 4383 - DNA, 15 bp, Homo sapiens
ttttaatggtttgtg

SEQ ID NO: 4384 - DNA, 15 bp, Homo sapiens
attttaatggtttgt

SEQ ID NO: 4385 - DNA, 15 bp, Homo sapiens
tattttaatggtttg

SEQ ID NO: 4386 - DNA, 15 bp, Homo sapiens
ttattttaatggttt

SEQ ID NO: 4387 - DNA, 15 bp, Homo sapiens
attattttaatggtt

SEQ ID NO: 4388 - DNA, 15 bp, Homo sapiens
aattattttaatggt

SEQ ID NO: 4389 - DNA, 15 bp, Homo sapiens
taattattttaatgg

SEQ ID NO: 4390 - DNA, 15 bp, Homo sapiens
ttaattattttaatg

SEQ ID NO: 4391 - DNA, 15 bp, Homo sapiens
attaattattttaat

SEQ ID NO: 4392 - DNA, 15 bp, Homo sapiens
cattaattattttaa

SEQ ID NO: 4393 - DNA, 15 bp, Homo sapiens
gcattaattatttta

SEQ ID NO: 4394 - DNA, 15 bp, Homo sapiens
agcattaattatttt

SEQ ID NO: 4395 - DNA, 15 bp, Homo sapiens
tagcattaattattt

SEQ ID NO: 4396 - DNA, 15 bp, Homo sapiens
ctagcattaattatt

SEQ ID NO: 4397 - DNA, 15 bp, Homo sapiens
cctagcattaattat

SEQ ID NO: 4398 - DNA, 15 bp, Homo sapiens
ccctagcattaatta

SEQ ID NO: 4399 - DNA, 15 bp, Homo sapiens
tccctagcattaatt

SEQ ID NO: 4400 - DNA, 15 bp, Homo sapiens
ttccctagcattaat

SEQ ID NO: 4401 - DNA, 15 bp, Homo sapiens
attccctagcattaa

SEQ ID NO: 4402 - DNA, 15 bp, Homo sapiens
aattccctagcatta

SEQ ID NO: 4403 - DNA, 15 bp, Homo sapiens
aaattccctagcatt

SEQ ID NO: 4404 - DNA, 15 bp, Homo sapiens
aaaattccctagcat

SEQ ID NO: 4405 - DNA, 15 bp, Homo sapiens
taaaattccctagca

SEQ ID NO: 4406 - DNA, 15 bp, Homo sapiens
ctaaaattccctagc

SEQ ID NO: 4407 - DNA, 15 bp, Homo sapiens
cctaaaattccctag

SEQ ID NO: 4408 - DNA, 15 bp, Homo sapiens
tcctaaaattcccta

SEQ ID NO: 4409 - DNA, 15 bp, Homo sapiens
ttcctaaaattccct

SEQ ID NO: 4410 - DNA, 15 bp, Homo sapiens
tttcctaaaattccc

SEQ ID NO: 4411 - DNA, 15 bp, Homo sapiens
ttttcctaaaattcc

SEQ ID NO: 4412 - DNA, 15 bp, Homo sapiens
gttttcctaaaattc

SEQ ID NO: 4413 - DNA, 15 bp, Homo sapiens
tgttttcctaaaatt

SEQ ID NO: 4414 - DNA, 15 bp, Homo sapiens
atgttttcctaaaat

SEQ ID NO: 4415 - DNA, 15 bp, Homo sapiens
aatgttttcctaaaa

SEQ ID NO: 4416 - DNA, 15 bp, Homo sapiens
caatgttttcctaaa

SEQ ID NO: 4417 - DNA, 15 bp, Homo sapiens
ccaatgttttcctaa

SEQ ID NO: 4418 - DNA, 15 bp, Homo sapiens
accaatgttttccta

SEQ ID NO: 4419 - DNA, 15 bp, Homo sapiens
aaccaatgttttcct

SEQ ID NO: 4420 - DNA, 15 bp, Homo sapiens
aaaccaatgttttcc

SEQ ID NO: 4421 - DNA, 15 bp, Homo sapiens
taaaccaatgttttc

SEQ ID NO: 4422 - DNA, 15 bp, Homo sapiens
gtaaaccaatgtttt

SEQ ID NO: 4423 - DNA, 15 bp, Homo sapiens
tgtaaaccaatgttt

SEQ ID NO: 4424 - DNA, 15 bp, Homo sapiens
ttgtaaaccaatgtt

SEQ ID NO: 4425 - DNA, 15 bp, Homo sapiens
attgtaaaccaatgt

SEQ ID NO: 4426 - DNA, 15 bp, Homo sapiens
gattgtaaaccaatg

SEQ ID NO: 4427 - DNA, 15 bp, Homo sapiens
tgattgtaaaccaat

SEQ ID NO: 4428 - DNA, 15 bp, Homo sapiens
ctgattgtaaaccaa

SEQ ID NO: 4429 - DNA, 15 bp, Homo sapiens
tctgattgtaaacca

SEQ ID NO: 4430 - DNA, 15 bp, Homo sapiens
ttctgattgtaaacc

SEQ ID NO: 4431 - DNA, 15 bp, Homo sapiens
cttctgattgtaaac

SEQ ID NO: 4432 - DNA, 15 bp, Homo sapiens
ccttctgattgtaaa

SEQ ID NO: 4433 - DNA, 15 bp, Homo sapiens
tccttctgattgtaa

SEQ ID NO: 4434 - DNA, 15 bp, Homo sapiens
gtccttctgattgta

SEQ ID NO: 4435 - DNA, 15 bp, Homo sapiens
ggtccttctgattgt

SEQ ID NO: 4436 - DNA, 15 bp, Homo sapiens
cggtccttctgattg

SEQ ID NO: 4437 - DNA, 15 bp, Homo sapiens
ccggtccttctgatt

SEQ ID NO: 4438 - DNA, 15 bp, Homo sapiens
cccggtccttctgat

SEQ ID NO: 4439 - DNA, 15 bp, Homo sapiens
ccccggtccttctga

SEQ ID NO: 4440 - DNA, 15 bp, Homo sapiens
tccccggtccttctg

SEQ ID NO: 4441 - DNA, 15 bp, Homo sapiens
ttccccggtccttct

SEQ ID NO: 4442 - DNA, 15 bp, Homo sapiens
cttccccggtccttc

SEQ ID NO: 4443 - DNA, 15 bp, Homo sapiens
acttccccggtcctt

SEQ ID NO: 4444 - DNA, 15 bp, Homo sapiens
cacttccccggtcct

SEQ ID NO: 4445 - DNA, 15 bp, Homo sapiens
ccacttccccggtcc

SEQ ID NO: 4446 - DNA, 15 bp, Homo sapiens
cccacttccccggtc

SEQ ID NO: 4447 - DNA, 15 bp, Homo sapiens
acccacttccccggt

SEQ ID NO: 4448 - DNA, 15 bp, Homo sapiens
gacccacttccccgg

SEQ ID NO: 4449 - DNA, 15 bp, Homo sapiens
agacccacttccccg

SEQ ID NO: 4450 - DNA, 15 bp, Homo sapiens
aagacccacttcccc

SEQ ID NO: 4451 - DNA, 15 bp, Homo sapiens
gaagacccacttccc

SEQ ID NO: 4452 - DNA, 15 bp, Homo sapiens
tgaagacccacttcc

SEQ ID NO: 4453 - DNA, 15 bp, Homo sapiens
ctgaagacccacttc

SEQ ID NO: 4454 - DNA, 15 bp, Homo sapiens
gctgaagacccactt

SEQ ID NO: 4455 - DNA, 15 bp, Homo sapiens
ggctgaagacccact

SEQ ID NO: 4456 - DNA, 15 bp, Homo sapiens
aggctgaagacccac

SEQ ID NO: 4457 - DNA, 15 bp, Homo sapiens
aaggctgaagaccca

SEQ ID NO: 4458 - DNA, 15 bp, Homo sapiens
gaaggctgaagaccc

SEQ ID NO: 4459 - DNA, 15 bp, Homo sapiens
tgaaggctgaagacc

SEQ ID NO: 4460 - DNA, 15 bp, Homo sapiens
gtgaaggctgaagac

SEQ ID NO: 4461 - DNA, 15 bp, Homo sapiens
cgtgaaggctgaaga

SEQ ID NO: 4462 - DNA, 15 bp, Homo sapiens
tcgtgaaggctgaag

SEQ ID NO: 4463 - DNA, 15 bp, Homo sapiens
atcgtgaaggctgaa

SEQ ID NO: 4464 - DNA, 15 bp, Homo sapiens
catcgtgaaggctga

SEQ ID NO: 4465 - DNA, 15 bp, Homo sapiens
tcatcgtgaaggctg

SEQ ID NO: 4466 - DNA, 15 bp, Homo sapiens
gtcatcgtgaaggct

SEQ ID NO: 4467 - DNA, 15 bp, Homo sapiens
agtcatcgtgaaggc

SEQ ID NO: 4468 - DNA, 15 bp, Homo sapiens
tagtcatcgtgaagg

SEQ ID NO: 4469 - DNA, 15 bp, Homo sapiens
gtagtcatcgtgaag

SEQ ID NO: 4470 - DNA, 15 bp, Homo sapiens
tgtagtcatcgtgaa

SEQ ID NO: 4471 - DNA, 15 bp, Homo sapiens
ttgtagtcatcgtga

SEQ ID NO: 4472 - DNA, 15 bp, Homo sapiens
cttgtagtcatcgtg

SEQ ID NO: 4473 - DNA, 15 bp, Homo sapiens
gcttgtagtcatcgt

SEQ ID NO: 4474 - DNA, 15 bp, Homo sapiens
ggcttgtagtcatcg

SEQ ID NO: 4475 - DNA, 15 bp, Homo sapiens
tggcttgtagtcatc

SEQ ID NO: 4476 - DNA, 15 bp, Homo sapiens
atggcttgtagtcat

SEQ ID NO: 4477 - DNA, 15 bp, Homo sapiens
aatggcttgtagtca

SEQ ID NO: 4478 - DNA, 15 bp, Homo sapiens
aaatggcttgtagtc

SEQ ID NO: 4479 - DNA, 15 bp, Homo sapiens
taaatggcttgtagt

SEQ ID NO: 4480 - DNA, 15 bp, Homo sapiens
ttaaatggcttgtag

SEQ ID NO: 4481 - DNA, 15 bp, Homo sapiens
cttaaatggcttgta

SEQ ID NO: 4482 - DNA, 15 bp, Homo sapiens
ccttaaatggcttgt

SEQ ID NO: 4483 - DNA, 15 bp, Homo sapiens
cccttaaatggcttg

SEQ ID NO: 4484 - DNA, 15 bp, Homo sapiens
tcccttaaatggctt

SEQ ID NO: 4485 - DNA, 15 bp, Homo sapiens
gtcccttaaatggct

SEQ ID NO: 4486 - DNA, 15 bp, Homo sapiens
agtcccttaaatggc

SEQ ID NO: 4487 - DNA, 15 bp, Homo sapiens
tagtcccttaaatgg

SEQ ID NO: 4488 - DNA, 15 bp, Homo sapiens
ctagtcccttaaatg

SEQ ID NO: 4489 - DNA, 15 bp, Homo sapiens
tctagtcccttaaat

SEQ ID NO: 4490 - DNA, 15 bp, Homo sapiens
ttctagtcccttaaa

SEQ ID NO: 4491 - DNA, 15 bp, Homo sapiens
attctagtcccttaa

SEQ ID NO: 4492 - DNA, 15 bp, Homo sapiens
aattctagtccctta

SEQ ID NO: 4493 - DNA, 15 bp, Homo sapiens
caattctagtccctt

SEQ ID NO: 4494 - DNA, 15 bp, Homo sapiens
gcaattctagtccct

SEQ ID NO: 4495 - DNA, 15 bp, Homo sapiens
agcaattctagtccc

SEQ ID NO: 4496 - DNA, 15 bp, Homo sapiens
tagcaattctagtcc

SEQ ID NO: 4497 - DNA, 15 bp, Homo sapiens
gtagcaattctagtc

SEQ ID NO: 4498 - DNA, 15 bp, Homo sapiens
agtagcaattctagt

SEQ ID NO: 4499 - DNA, 15 bp, Homo sapiens
cagtagcaattctag

SEQ ID NO: 4500 - DNA, 15 bp, Homo sapiens
acagtagcaattcta

SEQ ID NO: 4501 - DNA, 15 bp, Homo sapiens
aacagtagcaattct

SEQ ID NO: 4502 - DNA, 15 bp, Homo sapiens
caacagtagcaattc

SEQ ID NO: 4503 - DNA, 15 bp, Homo sapiens
acaacagtagcaatt

SEQ ID NO: 4504 - DNA, 15 bp, Homo sapiens
gacaacagtagcaat

SEQ ID NO: 4505 - DNA, 15 bp, Homo sapiens
tgacaacagtagcaa

SEQ ID NO: 4506 - DNA, 15 bp, Homo sapiens
ctgacaacagtagca

SEQ ID NO: 4507 - DNA, 15 bp, Homo sapiens
tctgacaacagtagc

SEQ ID NO: 4508 - DNA, 15 bp, Homo sapiens
ctctgacaacagtag

SEQ ID NO: 4509 - DNA, 15 bp, Homo sapiens
gctctgacaacagta

SEQ ID NO: 4510 - DNA, 15 bp, Homo sapiens
tgctctgacaacagt

SEQ ID NO: 4511 - DNA, 15 bp, Homo sapiens
ttgctctgacaacag

SEQ ID NO: 4512 - DNA, 15 bp, Homo sapiens
attgctctgacaaca

SEQ ID NO: 4513 - DNA, 15 bp, Homo sapiens
aattgctctgacaac

SEQ ID NO: 4514 - DNA, 15 bp, Homo sapiens
aaattgctctgacaa

SEQ ID NO: 4515 - DNA, 15 bp, Homo sapiens
taaattgctctgaca

SEQ ID NO: 4516 - DNA, 15 bp, Homo sapiens
ctaaattgctctgac

SEQ ID NO: 4517 - DNA, 15 bp, Homo sapiens
cctaaattgctctga

SEQ ID NO: 4518 - DNA, 15 bp, Homo sapiens
tcctaaattgctctg

SEQ ID NO: 4519 - DNA, 15 bp, Homo sapiens
ctcctaaattgctct

SEQ ID NO: 4520 - DNA, 15 bp, Homo sapiens
actcctaaattgctc

SEQ ID NO: 4521 - DNA, 15 bp, Homo sapiens
gactcctaaattgct

SEQ ID NO: 4522 - DNA, 15 bp, Homo sapiens
agactcctaaattgc

SEQ ID NO: 4523 - DNA, 15 bp, Homo sapiens
cagactcctaaattg

SEQ ID NO: 4524 - DNA, 15 bp, Homo sapiens
acagactcctaaatt

SEQ ID NO: 4525 - DNA, 15 bp, Homo sapiens
tacagactcctaaat

SEQ ID NO: 4526 - DNA, 15 bp, Homo sapiens
atacagactcctaaa

SEQ ID NO: 4527 - DNA, 15 bp, Homo sapiens
aatacagactcctaa

SEQ ID NO: 4528 - DNA, 15 bp, Homo sapiens
aaatacagactccta

SEQ ID NO: 4529 - DNA, 15 bp, Homo sapiens
caaatacagactcct

SEQ ID NO: 4530 - DNA, 15 bp, Homo sapiens
tcaaatacagactcc

SEQ ID NO: 4531 - DNA, 15 bp, Homo sapiens
ctcaaatacagactc

SEQ ID NO: 4532 - DNA, 15 bp, Homo sapiens
gctcaaatacagact

SEQ ID NO: 4533 - DNA, 15 bp, Homo sapiens
tgctcaaatacagac

SEQ ID NO: 4534 - DNA, 15 bp, Homo sapiens
gtgctcaaatacaga

SEQ ID NO: 4535 - DNA, 15 bp, Homo sapiens
ggtgctcaaatacag

SEQ ID NO: 4536 - DNA, 15 bp, Homo sapiens
gggtgctcaaataca

SEQ ID NO: 4537 - DNA, 15 bp, Homo sapiens
cgggtgctcaaatac

SEQ ID NO: 4538 - DNA, 15 bp, Homo sapiens
gcgggtgctcaaata

SEQ ID NO: 4539 - DNA, 15 bp, Homo sapiens
tgcgggtgctcaaat

SEQ ID NO: 4540 - DNA, 15 bp, Homo sapiens
atgcgggtgctcaaa

SEQ ID NO: 4541 - DNA, 15 bp, Homo sapiens
tatgcgggtgctcaa

SEQ ID NO: 4542 - DNA, 15 bp, Homo sapiens
ctatgcgggtgctca

SEQ ID NO: 4543 - DNA, 15 bp, Homo sapiens
actatgcgggtgctc

SEQ ID NO: 4544 - DNA, 15 bp, Homo sapiens
cactatgcgggtgct

SEQ ID NO: 4545 - DNA, 15 bp, Homo sapiens
acactatgcgggtgc

SEQ ID NO: 4546 - DNA, 15 bp, Homo sapiens
aacactatgcgggtg

SEQ ID NO: 4547 - DNA, 15 bp, Homo sapiens
gaacactatgcgggt

SEQ ID NO: 4548 - DNA, 15 bp, Homo sapiens
ggaacactatgcggg

SEQ ID NO: 4549 - DNA, 15 bp, Homo sapiens
tggaacactatgcgg

SEQ ID NO: 4550 - DNA, 15 bp, Homo sapiens
ctggaacactatgcg

SEQ ID NO: 4551 - DNA, 15 bp, Homo sapiens
tctggaacactatgc

SEQ ID NO: 4552 - DNA, 15 bp, Homo sapiens
ttctggaacactatg

SEQ ID NO: 4553 - DNA, 15 bp, Homo sapiens
attctggaacactat

SEQ ID NO: 4554 - DNA, 15 bp, Homo sapiens
cattctggaacacta

SEQ ID NO: 4555 - DNA, 15 bp, Homo sapiens
tcattctggaacact

SEQ ID NO: 4556 - DNA, 15 bp, Homo sapiens
gtcattctggaacac

SEQ ID NO: 4557 - DNA, 15 bp, Homo sapiens
tgtcattctggaaca

SEQ ID NO: 4558 - DNA, 15 bp, Homo sapiens
atgtcattctggaac

SEQ ID NO: 4559 - DNA, 15 bp, Homo sapiens
tatgtcattctggaa

SEQ ID NO: 4560 - DNA, 15 bp, Homo sapiens
atatgtcattctgga

SEQ ID NO: 4561 - DNA, 15 bp, Homo sapiens
gatatgtcattctgg

SEQ ID NO: 4562 - DNA, 15 bp, Homo sapiens
agatatgtcattctg

SEQ ID NO: 4563 - DNA, 15 bp, Homo sapiens
cagatatgtcattct

SEQ ID NO: 4564 - DNA, 15 bp, Homo sapiens
tcagatatgtcattc

SEQ ID NO: 4565 - DNA, 15 bp, Homo sapiens
gtcagatatgtcatt

SEQ ID NO: 4566 - DNA, 15 bp, Homo sapiens
agtcagatatgtcat

SEQ ID NO: 4567 - DNA, 15 bp, Homo sapiens
cagtcagatatgtca

SEQ ID NO: 4568 - DNA, 15 bp, Homo sapiens
acagtcagatatgtc

SEQ ID NO: 4569 - DNA, 15 bp, Homo sapiens
tacagtcagatatgt

SEQ ID NO: 4570 - DNA, 15 bp, Homo sapiens
ttacagtcagatatg

SEQ ID NO: 4571 - DNA, 15 bp, Homo sapiens
gttacagtcagatat

SEQ ID NO: 4572 - DNA, 15 bp, Homo sapiens
ggttacagtcagata

SEQ ID NO: 4573 - DNA, 15 bp, Homo sapiens
aggttacagtcagat

SEQ ID NO: 4574 - DNA, 15 bp, Homo sapiens
caggttacagtcaga

SEQ ID NO: 4575 - DNA, 15 bp, Homo sapiens
ccaggttacagtcag

SEQ ID NO: 4576 - DNA, 15 bp, Homo sapiens
tccaggttacagtca

SEQ ID NO: 4577 - DNA, 15 bp, Homo sapiens
gtccaggttacagtc

SEQ ID NO: 4578 - DNA, 15 bp, Homo sapiens
tgtccaggttacagt

SEQ ID NO: 4579 - DNA, 15 bp, Homo sapiens
gtgtccaggttacag

SEQ ID NO: 4580 - DNA, 15 bp, Homo sapiens
cgtgtccaggttaca

SEQ ID NO: 4581 - DNA, 15 bp, Homo sapiens
acgtgtccaggttac

SEQ ID NO: 4582 - DNA, 15 bp, Homo sapiens
cacgtgtccaggtta

SEQ ID NO: 4583 - DNA, 15 bp, Homo sapiens
acacgtgtccaggtt

SEQ ID NO: 4584 - DNA, 15 bp, Homo sapiens
cacacgtgtccaggt

SEQ ID NO: 4585 - DNA, 15 bp, Homo sapiens
tcacacgtgtccagg

SEQ ID NO: 4586 - DNA, 15 bp, Homo sapiens
atcacacgtgtccag

SEQ ID NO: 4587 - DNA, 15 bp, Homo sapiens
tatcacacgtgtcca

SEQ ID NO: 4588 - DNA, 15 bp, Homo sapiens
atatcacacgtgtcc

SEQ ID NO: 4589 - DNA, 15 bp, Homo sapiens
catatcacacgtgtc

SEQ ID NO: 4590 - DNA, 15 bp, Homo sapiens
acatatcacacgtgt

SEQ ID NO: 4591 - DNA, 15 bp, Homo sapiens
aacatatcacacgtg

SEQ ID NO: 4592 - DNA, 15 bp, Homo sapiens
caacatatcacacgt

SEQ ID NO: 4593 - DNA, 15 bp, Homo sapiens
acaacatatcacacg

SEQ ID NO: 4594 - DNA, 15 bp, Homo sapiens
gacaacatatcacac

SEQ ID NO: 4595 - DNA, 15 bp, Homo sapiens
agacaacatatcaca

SEQ ID NO: 4596 - DNA, 15 bp, Homo sapiens
gagacaacatatcac

SEQ ID NO: 4597 - DNA, 15 bp, Homo sapiens
ggagacaacatatca

SEQ ID NO: 4598 - DNA, 15 bp, Homo sapiens
gggagacaacatatc

SEQ ID NO: 4599 - DNA, 15 bp, Homo sapiens
ggggagacaacatat

SEQ ID NO: 4600 - DNA, 15 bp, Homo sapiens
aggggagacaacata

SEQ ID NO: 4601 - DNA, 15 bp, Homo sapiens
caggggagacaacat

SEQ ID NO: 4602 - DNA, 15 bp, Homo sapiens
gcaggggagacaaca

SEQ ID NO: 4603 - DNA, 15 bp, Homo sapiens
tgcaggggagacaac

SEQ ID NO: 4604 - DNA, 15 bp, Homo sapiens
ctgcaggggagacaa

SEQ ID NO: 4605 - DNA, 15 bp, Homo sapiens
tctgcaggggagaca

SEQ ID NO: 4606 - DNA, 15 bp, Homo sapiens
atctgcaggggagac

SEQ ID NO: 4607 - DNA, 15 bp, Homo sapiens
catctgcaggggaga

SEQ ID NO: 4608 - DNA, 15 bp, Homo sapiens
tcatctgcaggggag

SEQ ID NO: 4609 - DNA, 15 bp, Homo sapiens
ctcatctgcagggga

SEQ ID NO: 4610 - DNA, 15 bp, Homo sapiens
gctcatctgcagggg

SEQ ID NO: 4611 - DNA, 15 bp, Homo sapiens
tgctcatctgcaggg

SEQ ID NO: 4612 - DNA, 15 bp, Homo sapiens
atgctcatctgcagg

SEQ ID NO: 4613 - DNA, 15 bp, Homo sapiens
aatgctcatctgcag

SEQ ID NO: 4614 - DNA, 15 bp, Homo sapiens
aaatgctcatctgca

SEQ ID NO: 4615 - DNA, 15 bp, Homo sapiens
caaatgctcatctgc

SEQ ID NO: 4616 - DNA, 15 bp, Homo sapiens
tcaaatgctcatctg

SEQ ID NO: 4617 - DNA, 15 bp, Homo sapiens
ttcaaatgctcatct

SEQ ID NO: 4618 - DNA, 15 bp, Homo sapiens
tttcaaatgctcatc

SEQ ID NO: 4619 - DNA, 15 bp, Homo sapiens
atttcaaatgctcat

SEQ ID NO: 4620 - DNA, 15 bp, Homo sapiens
gatttcaaatgctca

SEQ ID NO: 4621 - DNA, 15 bp, Homo sapiens
agatttcaaatgctc

SEQ ID NO: 4622 - DNA, 15 bp, Homo sapiens
gagatttcaaatgct

SEQ ID NO: 4623 - DNA, 15 bp, Homo sapiens
tgagatttcaaatgc

SEQ ID NO: 4624 - DNA, 15 bp, Homo sapiens
ttgagatttcaaatg

SEQ ID NO: 4625 - DNA, 15 bp, Homo sapiens
gttgagatttcaaat

SEQ ID NO: 4626 - DNA, 15 bp, Homo sapiens
ggttgagatttcaaa

SEQ ID NO: 4627 - DNA, 15 bp, Homo sapiens
gggttgagatttcaa

SEQ ID NO: 4628 - DNA, 15 bp, Homo sapiens
agggttgagatttca

SEQ ID NO: 4629 - DNA, 15 bp, Homo sapiens
gagggttgagatttc

SEQ ID NO: 4630 - DNA, 15 bp, Homo sapiens
cgagggttgagattt

SEQ ID NO: 4631 - DNA, 15 bp, Homo sapiens
acgagggttgagatt

SEQ ID NO: 4632 - DNA, 15 bp, Homo sapiens
tacgagggttgagat

SEQ ID NO: 4633 - DNA, 15 bp, Homo sapiens
atacgagggttgaga

SEQ ID NO: 4634 - DNA, 15 bp, Homo sapiens
aatacgagggttgag

SEQ ID NO: 4635 - DNA, 15 bp, Homo sapiens
aaatacgagggttga

SEQ ID NO: 4636 - DNA, 15 bp, Homo sapiens
gaaatacgagggttg

SEQ ID NO: 4637 - DNA, 15 bp, Homo sapiens
agaaatacgagggtt

SEQ ID NO: 4638 - DNA, 15 bp, Homo sapiens
tagaaatacgagggt

SEQ ID NO: 4639 - DNA, 15 bp, Homo sapiens
gtagaaatacgaggg

SEQ ID NO: 4640 - DNA, 15 bp, Homo sapiens
cgtagaaatacgagg

SEQ ID NO: 4641 - DNA, 15 bp, Homo sapiens
tcgtagaaatacgag

SEQ ID NO: 4642 - DNA, 15 bp, Homo sapiens
ctcgtagaaatacga

SEQ ID NO: 4643 - DNA, 15 bp, Homo sapiens
actcgtagaaatacg

SEQ ID NO: 4644 - DNA, 15 bp, Homo sapiens
cactcgtagaaatac

SEQ ID NO: 4645 - DNA, 15 bp, Homo sapiens
gcactcgtagaaata

SEQ ID NO: 4646 - DNA, 15 bp, Homo sapiens
tgcactcgtagaaat

SEQ ID NO: 4647 - DNA, 15 bp, Homo sapiens
ctgcactcgtagaaa

SEQ ID NO: 4648 - DNA, 15 bp, Homo sapiens
cctgcactcgtagaa

SEQ ID NO: 4649 - DNA, 15 bp, Homo sapiens
gcctgcactcgtaga

SEQ ID NO: 4650 - DNA, 15 bp, Homo sapiens
ggcctgcactcgtag

SEQ ID NO: 4651 - DNA, 15 bp, Homo sapiens
aggcctgcactcgta

SEQ ID NO: 4652 - DNA, 15 bp, Homo sapiens
taggcctgcactcgt

SEQ ID NO: 4653 - DNA, 15 bp, Homo sapiens
ataggcctgcactcg

SEQ ID NO: 4654 - DNA, 15 bp, Homo sapiens
tataggcctgcactc

SEQ ID NO: 4655 - DNA, 15 bp, Homo sapiens
ttataggcctgcact

SEQ ID NO: 4656 - DNA, 15 bp, Homo sapiens
attataggcctgcac

SEQ ID NO: 4657 - DNA, 15 bp, Homo sapiens
cattataggcctgca

SEQ ID NO: 4658 - DNA, 15 bp, Homo sapiens
ccattataggcctgc

SEQ ID NO: 4659 - DNA, 15 bp, Homo sapiens
tccattataggcctg

SEQ ID NO: 4660 - DNA, 15 bp, Homo sapiens
gtccattataggcct

SEQ ID NO: 4661 - DNA, 15 bp, Homo sapiens
ggtccattataggcc

SEQ ID NO: 4662 - DNA, 15 bp, Homo sapiens
gggtccattataggc

SEQ ID NO: 4663 - DNA, 15 bp, Homo sapiens
agggtccattatagg

SEQ ID NO: 4664 - DNA, 15 bp, Homo sapiens
cagggtccattatag

SEQ ID NO: 4665 - DNA, 15 bp, Homo sapiens
ccagggtccattata

SEQ ID NO: 4666 - DNA, 15 bp, Homo sapiens
cccagggtccattat

SEQ ID NO: 4667 - DNA, 15 bp, Homo sapiens
gcccagggtccatta

SEQ ID NO: 4668 - DNA, 15 bp, Homo sapiens
tgcccagggtccatt

SEQ ID NO: 4669 - DNA, 15 bp, Homo sapiens
gtgcccagggtccat

SEQ ID NO: 4670 - DNA, 15 bp, Homo sapiens
tgtgcccagggtcca

SEQ ID NO: 4671 - DNA, 15 bp, Homo sapiens
atgtgcccagggtcc

SEQ ID NO: 4672 - DNA, 15 bp, Homo sapiens
aatgtgcccagggtc

SEQ ID NO: 4673 - DNA, 15 bp, Homo sapiens
aaatgtgcccagggt

SEQ ID NO: 4674 - DNA, 15 bp, Homo sapiens
aaaatgtgcccaggg

SEQ ID NO: 4675 - DNA, 15 bp, Homo sapiens
aaaaatgtgcccagg

SEQ ID NO: 4676 - DNA, 15 bp, Homo sapiens
aaaaaatgtgcccag

SEQ ID NO: 4677 - DNA, 15 bp, Homo sapiens
aaaaaaatgtgccca

SEQ ID NO: 4678 - DNA, 15 bp, Homo sapiens
aaaaaaaatgtgccc

SEQ ID NO: 4679 - DNA, 15 bp, Homo sapiens
aaaaaaaaatgtgcc

SEQ ID NO: 4680 - DNA, 15 bp, Homo sapiens
aaaaaaaaaatgtgc

SEQ ID NO: 4681 - DNA, 15 bp, Homo sapiens
aaaaaaaaaaatgtg

SEQ ID NO: 4682 - DNA, 15 bp, Homo sapiens
aaaaaaaaaaaatgt

SEQ ID NO: 4683 - DNA, 15 bp, Homo sapiens
aaaaaaaaaaaaatg

SEQ ID NO: 4684 - DNA, 15 bp, Homo sapiens
aaaaaaaaaaaaaat

SEQ ID NO: 4685 - DNA, 15 bp, Homo sapiens
gcatctcaaaaaaaa

SEQ ID NO: 4686 - DNA, 15 bp, Homo sapiens
tgcatctcaaaaaaa

SEQ ID NO: 4687 - DNA, 15 bp, Homo sapiens
ctgcatctcaaaaaa

SEQ ID NO: 4688 - DNA, 15 bp, Homo sapiens
actgcatctcaaaaa

SEQ ID NO: 4689 - DNA, 15 bp, Homo sapiens
gactgcatctcaaaa

SEQ ID NO: 4690 - DNA, 15 bp, Homo sapiens
agactgcatctcaaa

SEQ ID NO: 4691 - DNA, 15 bp, Homo sapiens
gagactgcatctcaa

SEQ ID NO: 4692 - DNA, 15 bp, Homo sapiens
cgagactgcatctca

SEQ ID NO: 4693 - DNA, 15 bp, Homo sapiens
gcgagactgcatctc

SEQ ID NO: 4694 - DNA, 15 bp, Homo sapiens
agcgagactgcatct

SEQ ID NO: 4695 - DNA, 15 bp, Homo sapiens
gagcgagactgcatc

SEQ ID NO: 4696 - DNA, 15 bp, Homo sapiens
agagcgagactgcat

SEQ ID NO: 4697 - DNA, 15 bp, Homo sapiens
cagagcgagactgca

SEQ ID NO: 4698 - DNA, 15 bp, Homo sapiens
acagagcgagactgc

SEQ ID NO: 4699 - DNA, 15 bp, Homo sapiens
aacagagcgagactg

SEQ ID NO: 4700 - DNA, 15 bp, Homo sapiens
aaacagagcgagact

SEQ ID NO: 4701 - DNA, 15 bp, Homo sapiens
gaaacagagcgagac

SEQ ID NO: 4702 - DNA, 15 bp, Homo sapiens
ggaaacagagcgaga

SEQ ID NO: 4703 - DNA, 15 bp, Homo sapiens
gggaaacagagcgag

SEQ ID NO: 4704 - DNA, 15 bp, Homo sapiens
tgggaaacagagcga

SEQ ID NO: 4705 - DNA, 15 bp, Homo sapiens
ctgggaaacagagcg

SEQ ID NO: 4706 - DNA, 15 bp, Homo sapiens
cctgggaaacagagc

SEQ ID NO: 4707 - DNA, 15 bp, Homo sapiens
gcctgggaaacagag

SEQ ID NO: 4708 - DNA, 15 bp, Homo sapiens
agcctgggaaacaga

SEQ ID NO: 4709 - DNA, 15 bp, Homo sapiens
cagcctgggaaacag

SEQ ID NO: 4710 - DNA, 15 bp, Homo sapiens
ccagcctgggaaaca

SEQ ID NO: 4711 - DNA, 15 bp, Homo sapiens
tccagcctgggaaac

SEQ ID NO: 4712 - DNA, 15 bp, Homo sapiens
ctccagcctgggaaa

SEQ ID NO: 4713 - DNA, 15 bp, Homo sapiens
actccagcctgggaa

SEQ ID NO: 4714 - DNA, 15 bp, Homo sapiens
cactccagcctggga

SEQ ID NO: 4715 - DNA, 15 bp, Homo sapiens
gtgccactgcactcc

SEQ ID NO: 4716 - DNA, 15 bp, Homo sapiens
cgtgccactgcactc

SEQ ID NO: 4717 - DNA, 15 bp, Homo sapiens
tcgtgccactgcact

SEQ ID NO: 4718 - DNA, 15 bp, Homo sapiens
atcgtgccactgcac

SEQ ID NO: 4719 - DNA, 15 bp, Homo sapiens
tatcgtgccactgca

SEQ ID NO: 4720 - DNA, 15 bp, Homo sapiens
atatcgtgccactgc

SEQ ID NO: 4721 - DNA, 15 bp, Homo sapiens
catatcgtgccactg

SEQ ID NO: 4722 - DNA, 15 bp, Homo sapiens
ccatatcgtgccact

SEQ ID NO: 4723 - DNA, 15 bp, Homo sapiens
gccatatcgtgccac

SEQ ID NO: 4724 - DNA, 15 bp, Homo sapiens
agccatatcgtgcca

SEQ ID NO: 4725 - DNA, 15 bp, Homo sapiens
gagccatatcgtgcc

SEQ ID NO: 4726 - DNA, 15 bp, Homo sapiens
tgagccatatcgtgc

SEQ ID NO: 4727 - DNA, 15 bp, Homo sapiens
gtgagccatatcgtg

SEQ ID NO: 4728 - DNA, 15 bp, Homo sapiens
agtgagccatatcgt

SEQ ID NO: 4729 - DNA, 15 bp, Homo sapiens
cagtgagccatatcg

SEQ ID NO: 4730 - DNA, 15 bp, Homo sapiens
gcagtgagccatatc

SEQ ID NO: 4731 - DNA, 15 bp, Homo sapiens
tgcagtgagccatat

SEQ ID NO: 4732 - DNA, 15 bp, Homo sapiens
ttgcagtgagccata

SEQ ID NO: 4733 - DNA, 15 bp, Homo sapiens
gttgcagtgagccat

SEQ ID NO: 4734 - DNA, 15 bp, Homo sapiens
aggttgcagtgagcc

SEQ ID NO: 4735 - DNA, 15 bp, Homo sapiens
tggaggttgcagtga

SEQ ID NO: 4736 - DNA, 15 bp, Homo sapiens
gtggaggttgcagtg

SEQ ID NO: 4737 - DNA, 15 bp, Homo sapiens
ggtggaggttgcagt

SEQ ID NO: 4738 - DNA, 15 bp, Homo sapiens
aggtggaggttgcag

SEQ ID NO: 4739 - DNA, 15 bp, Homo sapiens
gaggtggaggttgca

SEQ ID NO: 4740 - DNA, 15 bp, Homo sapiens
ggaggtggaggttgc

SEQ ID NO: 4741 - DNA, 15 bp, Homo sapiens
aggaggtggaggttg

SEQ ID NO: 4742 - DNA, 15 bp, Homo sapiens
aacccaggaggtgga

SEQ ID NO: 4743 - DNA, 15 bp, Homo sapiens
gaacccaggaggtgg

SEQ ID NO: 4744 - DNA, 15 bp, Homo sapiens
tgaacccaggaggtg

SEQ ID NO: 4745 - DNA, 15 bp, Homo sapiens
ttgaacccaggaggt

SEQ ID NO: 4746 - DNA, 15 bp, Homo sapiens
tcttgaacccaggag

SEQ ID NO: 4747 - DNA, 15 bp, Homo sapiens
ctcttgaacccagga

SEQ ID NO: 4748 - DNA, 15 bp, Homo sapiens
tctcttgaacccagg

SEQ ID NO: 4749 - DNA, 15 bp, Homo sapiens
atctcttgaacccag

SEQ ID NO: 4750 - DNA, 15 bp, Homo sapiens
aatctcttgaaccca

SEQ ID NO: 4751 - DNA, 15 bp, Homo sapiens
gtcccagctactcag

SEQ ID NO: 4752 - DNA, 15 bp, Homo sapiens
agtcccagctactca

SEQ ID NO: 4753 - DNA, 15 bp, Homo sapiens
tagtcccagctactc

SEQ ID NO: 4754 - DNA, 15 bp, Homo sapiens
atagtcccagctact

SEQ ID NO: 4755 - DNA, 15 bp, Homo sapiens
tatagtcccagctac

SEQ ID NO: 4756 - DNA, 15 bp, Homo sapiens
ctatagtcccagcta

SEQ ID NO: 4757 - DNA, 15 bp, Homo sapiens
cctatagtcccagct

SEQ ID NO: 4758 - DNA, 15 bp, Homo sapiens
gcctatagtcccagc

SEQ ID NO: 4759 - DNA, 15 bp, Homo sapiens
cgcctatagtcccag

SEQ ID NO: 4760 - DNA, 15 bp, Homo sapiens
gcgcctatagtccca

SEQ ID NO: 4761 - DNA, 15 bp, Homo sapiens
tgcgcctatagtccc

SEQ ID NO: 4762 - DNA, 15 bp, Homo sapiens
gtgcgcctatagtcc

SEQ ID NO: 4763 - DNA, 15 bp, Homo sapiens
cgtgcgcctatagtc

SEQ ID NO: 4764 - DNA, 15 bp, Homo sapiens
gcgtgcgcctatagt

SEQ ID NO: 4765 - DNA, 15 bp, Homo sapiens
ggcgtgcgcctatag

SEQ ID NO: 4766 - DNA, 15 bp, Homo sapiens
tggcgtgcgcctata

SEQ ID NO: 4767 - DNA, 15 bp, Homo sapiens
gtggcgtgcgcctat

SEQ ID NO: 4768 - DNA, 15 bp, Homo sapiens
ggtggcgtgcgccta

SEQ ID NO: 4769 - DNA, 15 bp, Homo sapiens
ctagccaggcatggt

SEQ ID NO: 4770 - DNA, 15 bp, Homo sapiens
actagccaggcatgg

SEQ ID NO: 4771 - DNA, 15 bp, Homo sapiens
aactagccaggcatg

SEQ ID NO: 4772 - DNA, 15 bp, Homo sapiens
aaactagccaggcat

SEQ ID NO: 4773 - DNA, 15 bp, Homo sapiens
aaaactagccaggca

SEQ ID NO: 4774 - DNA, 15 bp, Homo sapiens
aaaaactagccaggc

SEQ ID NO: 4775 - DNA, 15 bp, Homo sapiens
caaaaactagccagg

SEQ ID NO: 4776 - DNA, 15 bp, Homo sapiens
gcaaaaactagccag

SEQ ID NO: 4777 - DNA, 15 bp, Homo sapiens
tgcaaaaactagcca

SEQ ID NO: 4778 - DNA, 15 bp, Homo sapiens
atgcaaaaactagcc

SEQ ID NO: 4779 - DNA, 15 bp, Homo sapiens
aatgcaaaaactagc

SEQ ID NO: 4780 - DNA, 15 bp, Homo sapiens
aaatgcaaaaactag

SEQ ID NO: 4781 - DNA, 15 bp, Homo sapiens
aaaatgcaaaaacta

SEQ ID NO: 4782 - DNA, 15 bp, Homo sapiens
gaaaatgcaaaaact

SEQ ID NO: 4783 - DNA, 15 bp, Homo sapiens
tgaaaatgcaaaaac

SEQ ID NO: 4784 - DNA, 15 bp, Homo sapiens
ctgaaaatgcaaaaa

SEQ ID NO: 4785 - DNA, 15 bp, Homo sapiens
actgaaaatgcaaaa

SEQ ID NO: 4786 - DNA, 15 bp, Homo sapiens
tactgaaaatgcaaa

SEQ ID NO: 4787 - DNA, 15 bp, Homo sapiens
ctactgaaaatgcaa

SEQ ID NO: 4788 - DNA, 15 bp, Homo sapiens
tctactgaaaatgca

SEQ ID NO: 4789 - DNA, 15 bp, Homo sapiens
ctctactgaaaatgc

SEQ ID NO: 4790 - DNA, 15 bp, Homo sapiens
tctctactgaaaatg

SEQ ID NO: 4791 - DNA, 15 bp, Homo sapiens
gtctctactgaaaat

SEQ ID NO: 4792 - DNA, 15 bp, Homo sapiens
tgtctctactgaaaa

SEQ ID NO: 4793 - DNA, 15 bp, Homo sapiens
ctgtctctactgaaa

SEQ ID NO: 4794 - DNA, 15 bp, Homo sapiens
tctgtctctactgaa

SEQ ID NO: 4795 - DNA, 15 bp, Homo sapiens
ctctgtctctactga

SEQ ID NO: 4796 - DNA, 15 bp, Homo sapiens
actctgtctctactg

SEQ ID NO: 4797 - DNA, 15 bp, Homo sapiens
aactctgtctctact

SEQ ID NO: 4798 - DNA, 15 bp, Homo sapiens
aaactctgtctctac

SEQ ID NO: 4799 - DNA, 15 bp, Homo sapiens
gaaactctgtctcta

SEQ ID NO: 4800 - DNA, 15 bp, Homo sapiens
tgaaactctgtctct

SEQ ID NO: 4801 - DNA, 15 bp, Homo sapiens
gtgaaactctgtctc

SEQ ID NO: 4802 - DNA, 15 bp, Homo sapiens
ggtgaaactctgtct

SEQ ID NO: 4803 - DNA, 15 bp, Homo sapiens
tggtgaaactctgtc

SEQ ID NO: 4804 - DNA, 15 bp, Homo sapiens
atggtgaaactctgt

SEQ ID NO: 4805 - DNA, 15 bp, Homo sapiens
catggtgaaactctg

SEQ ID NO: 4806 - DNA, 15 bp, Homo sapiens
acatggtgaaactct

SEQ ID NO: 4807 - DNA, 15 bp, Homo sapiens
gccaacatggtgaaa

SEQ ID NO: 4808 - DNA, 15 bp, Homo sapiens
ggccaacatggtgaa

SEQ ID NO: 4809 - DNA, 15 bp, Homo sapiens
tggccaacatggtga

SEQ ID NO: 4810 - DNA, 15 bp, Homo sapiens
ctggccaacatggtg

SEQ ID NO: 4811 - DNA, 15 bp, Homo sapiens
cctggccaacatggt

SEQ ID NO: 4812 - DNA, 15 bp, Homo sapiens
aatcgagaccatcct

SEQ ID NO: 4813 - DNA, 15 bp, Homo sapiens
aaatcgagaccatcc

SEQ ID NO: 4814 - DNA, 15 bp, Homo sapiens
gaaatcgagaccatc

SEQ ID NO: 4815 - DNA, 15 bp, Homo sapiens
ggaaatcgagaccat

SEQ ID NO: 4816 - DNA, 15 bp, Homo sapiens
aggaaatcgagacca

SEQ ID NO: 4817 - DNA, 15 bp, Homo sapiens
caggaaatcgagacc

SEQ ID NO: 4818 - DNA, 15 bp, Homo sapiens
tcaggaaatcgagac

SEQ ID NO: 4819 - DNA, 15 bp, Homo sapiens
gtcaggaaatcgaga

SEQ ID NO: 4820 - DNA, 15 bp, Homo sapiens
ggtcaggaaatcgag

SEQ ID NO: 4821 - DNA, 15 bp, Homo sapiens
aggtcaggaaatcga

SEQ ID NO: 4822 - DNA, 15 bp, Homo sapiens
gaggtcaggaaatcg

SEQ ID NO: 4823 - DNA, 15 bp, Homo sapiens
agaggtcaggaaatc

SEQ ID NO: 4824 - DNA, 15 bp, Homo sapiens
aagaggtcaggaaat

SEQ ID NO: 4825 - DNA, 15 bp, Homo sapiens
caagaggtcaggaaa

SEQ ID NO: 4826 - DNA, 15 bp, Homo sapiens
tcaagaggtcaggaa

SEQ ID NO: 4827 - DNA, 15 bp, Homo sapiens
atcaagaggtcagga

SEQ ID NO: 4828 - DNA, 15 bp, Homo sapiens
gatcaagaggtcagg

SEQ ID NO: 4829 - DNA, 15 bp, Homo sapiens
ggatcaagaggtcag

SEQ ID NO: 4830 - DNA, 15 bp, Homo sapiens
tggatcaagaggtca

SEQ ID NO: 4831 - DNA, 15 bp, Homo sapiens
gtggatcaagaggtc

SEQ ID NO: 4832 - DNA, 15 bp, Homo sapiens
ggtggatcaagaggt

SEQ ID NO: 4833 - DNA, 15 bp, Homo sapiens
gggtggatcaagagg

SEQ ID NO: 4834 - DNA, 15 bp, Homo sapiens
cgggtggatcaagag

SEQ ID NO: 4835 - DNA, 15 bp, Homo sapiens
gcgggtggatcaaga

SEQ ID NO: 4836 - DNA, 15 bp, Homo sapiens
ggcgggtggatcaag

SEQ ID NO: 4837 - DNA, 15 bp, Homo sapiens
aggcgggtggatcaa

SEQ ID NO: 4838 - DNA, 15 bp, Homo sapiens
cctcacgcctgtaat

SEQ ID NO: 4839 - DNA, 15 bp, Homo sapiens
gcctcacgcctgtaa

SEQ ID NO: 4840 - DNA, 15 bp, Homo sapiens
tgcctcacgcctgta

SEQ ID NO: 4841 - DNA, 15 bp, Homo sapiens
gtgcctcacgcctgt

SEQ ID NO: 4842 - DNA, 15 bp, Homo sapiens
ggtgcctcacgcctg

SEQ ID NO: 4843 - DNA, 15 bp, Homo sapiens
cggtgcctcacgcct

SEQ ID NO: 4844 - DNA, 15 bp, Homo sapiens
gcggtgcctcacgcc

SEQ ID NO: 4845 - DNA, 15 bp, Homo sapiens
cgcggtgcctcacgc

SEQ ID NO: 4846 - DNA, 15 bp, Homo sapiens
gcgcggtgcctcacg

SEQ ID NO: 4847 - DNA, 15 bp, Homo sapiens
ggcgcggtgcctcac

SEQ ID NO: 4848 - DNA, 15 bp, Homo sapiens
gggcgcggtgcctca

SEQ ID NO: 4849 - DNA, 15 bp, Homo sapiens
cgggcgcggtgcctc

SEQ ID NO: 4850 - DNA, 15 bp, Homo sapiens
tcgggcgcggtgcct

SEQ ID NO: 4851 - DNA, 15 bp, Homo sapiens
gtcgggcgcggtgcc

SEQ ID NO: 4852 - DNA, 15 bp, Homo sapiens
ggtcgggcgcggtgc

SEQ ID NO: 4853 - DNA, 15 bp, Homo sapiens
gggtcgggcgcggtg

SEQ ID NO: 4854 - DNA, 15 bp, Homo sapiens
ggggtcgggcgcggt

SEQ ID NO: 4855 - DNA, 15 bp, Homo sapiens
aggggtcgggcgcgg

SEQ ID NO: 4856 - DNA, 15 bp, Homo sapiens
caggggtcgggcgcg

SEQ ID NO: 4857 - DNA, 15 bp, Homo sapiens
ccaggggtcgggcgc

SEQ ID NO: 4858 - DNA, 15 bp, Homo sapiens
tccaggggtcgggcg

SEQ ID NO: 4859 - DNA, 15 bp, Homo sapiens
gtccaggggtcgggc

SEQ ID NO: 4860 - DNA, 15 bp, Homo sapiens
tgtccaggggtcggg

SEQ ID NO: 4861 - DNA, 15 bp, Homo sapiens
gtgtccaggggtcgg

SEQ ID NO: 4862 - DNA, 15 bp, Homo sapiens
tgtgtccaggggtcg

SEQ ID NO: 4863 - DNA, 15 bp, Homo sapiens
atgtgtccaggggtc

SEQ ID NO: 4864 - DNA, 15 bp, Homo sapiens
aatgtgtccaggggt

SEQ ID NO: 4865 - DNA, 15 bp, Homo sapiens
aaatgtgtccagggg

SEQ ID NO: 4866 - DNA, 15 bp, Homo sapiens
aaaatgtgtccaggg

SEQ ID NO: 4867 - DNA, 15 bp, Homo sapiens
caaaatgtgtccagg

SEQ ID NO: 4868 - DNA, 15 bp, Homo sapiens
tcaaaatgtgtccag

SEQ ID NO: 4869 - DNA, 15 bp, Homo sapiens
gtcaaaatgtgtcca

SEQ ID NO: 4870 - DNA, 15 bp, Homo sapiens
agtcaaaatgtgtcc

SEQ ID NO: 4871 - DNA, 15 bp, Homo sapiens
aagtcaaaatgtgtc

SEQ ID NO: 4872 - DNA, 15 bp, Homo sapiens
taagtcaaaatgtgt

SEQ ID NO: 4873 - DNA, 15 bp, Homo sapiens
ctaagtcaaaatgtg

SEQ ID NO: 4874 - DNA, 15 bp, Homo sapiens
tctaagtcaaaatgt

SEQ ID NO: 4875 - DNA, 15 bp, Homo sapiens
ttctaagtcaaaatg

SEQ ID NO: 4876 - DNA, 15 bp, Homo sapiens
gttctaagtcaaaat

SEQ ID NO: 4877 - DNA, 15 bp, Homo sapiens
tgttctaagtcaaaa

SEQ ID NO: 4878 - DNA, 15 bp, Homo sapiens
atgttctaagtcaaa

SEQ ID NO: 4879 - DNA, 15 bp, Homo sapiens
tatgttctaagtcaa

SEQ ID NO: 4880 - DNA, 15 bp, Homo sapiens
atatgttctaagtca

SEQ ID NO: 4881 - DNA, 15 bp, Homo sapiens
aatatgttctaagtc

SEQ ID NO: 4882 - DNA, 15 bp, Homo sapiens
aaatatgttctaagt

SEQ ID NO: 4883 - DNA, 15 bp, Homo sapiens
aaaatatgttctaag

SEQ ID NO: 4884 - DNA, 15 bp, Homo sapiens
gaaaatatgttctaa

SEQ ID NO: 4885 - DNA, 15 bp, Homo sapiens
cgaaaatatgttcta

SEQ ID NO: 4886 - DNA, 15 bp, Homo sapiens
ccgaaaatatgttct

SEQ ID NO: 4887 - DNA, 15 bp, Homo sapiens
accgaaaatatgttc

SEQ ID NO: 4888 - DNA, 15 bp, Homo sapiens
aaccgaaaatatgtt

SEQ ID NO: 4889 - DNA, 15 bp, Homo sapiens
aaaccgaaaatatgt

SEQ ID NO: 4890 - DNA, 15 bp, Homo sapiens
caaaccgaaaatatg

SEQ ID NO: 4891 - DNA, 15 bp, Homo sapiens
acaaaccgaaaatat

SEQ ID NO: 4892 - DNA, 15 bp, Homo sapiens
cacaaaccgaaaata

SEQ ID NO: 4893 - DNA, 15 bp, Homo sapiens
acacaaaccgaaaat

SEQ ID NO: 4894 - DNA, 15 bp, Homo sapiens
cacacaaaccgaaaa

SEQ ID NO: 4895 - DNA, 15 bp, Homo sapiens
tcacacaaaccgaaa

SEQ ID NO: 4896 - DNA, 15 bp, Homo sapiens
ctcacacaaaccgaa

SEQ ID NO: 4897 - DNA, 15 bp, Homo sapiens
tctcacacaaaccga

SEQ ID NO: 4898 - DNA, 15 bp, Homo sapiens
gtctcacacaaaccg

SEQ ID NO: 4899 - DNA, 15 bp, Homo sapiens
tgtctcacacaaacc

SEQ ID NO: 4900 - DNA, 15 bp, Homo sapiens
ctgtctcacacaaac

SEQ ID NO: 4901 - DNA, 15 bp, Homo sapiens
actgtctcacacaaa

SEQ ID NO: 4902 - DNA, 15 bp, Homo sapiens
cactgtctcacacaa

SEQ ID NO: 4903 - DNA, 15 bp, Homo sapiens
gcactgtctcacaca

SEQ ID NO: 4904 - DNA, 15 bp, Homo sapiens
tgcactgtctcacac

SEQ ID NO: 4905 - DNA, 15 bp, Homo sapiens
atgcactgtctcaca

SEQ ID NO: 4906 - DNA, 15 bp, Homo sapiens
aatgcactgtctcac

SEQ ID NO: 4907 - DNA, 15 bp, Homo sapiens
taatgcactgtctca

SEQ ID NO: 4908 - DNA, 15 bp, Homo sapiens
ctaatgcactgtctc

SEQ ID NO: 4909 - DNA, 15 bp, Homo sapiens
actaatgcactgtct

SEQ ID NO: 4910 - DNA, 15 bp, Homo sapiens
cactaatgcactgtc

SEQ ID NO: 4911 - DNA, 15 bp, Homo sapiens
gcactaatgcactgt

SEQ ID NO: 4912 - DNA, 15 bp, Homo sapiens
tgcactaatgcactg

SEQ ID NO: 4913 - DNA, 15 bp, Homo sapiens
ctgcactaatgcact

SEQ ID NO: 4914 - DNA, 15 bp, Homo sapiens
cctgcactaatgcac

SEQ ID NO: 4915 - DNA, 15 bp, Homo sapiens
tcctgcactaatgca

SEQ ID NO: 4916 - DNA, 15 bp, Homo sapiens
atcctgcactaatgc

SEQ ID NO: 4917 - DNA, 15 bp, Homo sapiens
aatcctgcactaatg

SEQ ID NO: 4918 - DNA, 15 bp, Homo sapiens
caatcctgcactaat

SEQ ID NO: 4919 - DNA, 15 bp, Homo sapiens
ccaatcctgcactaa

SEQ ID NO: 4920 - DNA, 15 bp, Homo sapiens
tccaatcctgcacta

SEQ ID NO: 4921 - DNA, 15 bp, Homo sapiens
ttccaatcctgcact

SEQ ID NO: 4922 - DNA, 15 bp, Homo sapiens
tttccaatcctgcac

SEQ ID NO: 4923 - DNA, 15 bp, Homo sapiens
ttttccaatcctgca

SEQ ID NO: 4924 - DNA, 15 bp, Homo sapiens
cttttccaatcctgc

SEQ ID NO: 4925 - DNA, 15 bp, Homo sapiens
tcttttccaatcctg

SEQ ID NO: 4926 - DNA, 15 bp, Homo sapiens
ctcttttccaatcct

SEQ ID NO: 4927 - DNA, 15 bp, Homo sapiens
actcttttccaatcc

SEQ ID NO: 4928 - DNA, 15 bp, Homo sapiens
cactcttttccaatc

SEQ ID NO: 4929 - DNA, 15 bp, Homo sapiens
tcactcttttccaat

SEQ ID NO: 4930 - DNA, 15 bp, Homo sapiens
atcactcttttccaa

SEQ ID NO: 4931 - DNA, 15 bp, Homo sapiens
gatcactcttttcca

SEQ ID NO: 4932 - DNA, 15 bp, Homo sapiens
tgatcactcttttcc

SEQ ID NO: 4933 - DNA, 15 bp, Homo sapiens
ctgatcactcttttc

SEQ ID NO: 4934 - DNA, 15 bp, Homo sapiens
cctgatcactctttt

SEQ ID NO: 4935 - DNA, 15 bp, Homo sapiens
tcctgatcactcttt

SEQ ID NO: 4936 - DNA, 15 bp, Homo sapiens
ttcctgatcactctt

SEQ ID NO: 4937 - DNA, 15 bp, Homo sapiens
attcctgatcactct

SEQ ID NO: 4938 - DNA, 15 bp, Homo sapiens
aattcctgatcactc

SEQ ID NO: 4939 - DNA, 15 bp, Homo sapiens
caattcctgatcact

SEQ ID NO: 4940 - DNA, 15 bp, Homo sapiens
tcaattcctgatcac

SEQ ID NO: 4941 - DNA, 15 bp, Homo sapiens
atcaattcctgatca

SEQ ID NO: 4942 - DNA, 15 bp, Homo sapiens
aatcaattcctgatc

SEQ ID NO: 4943 - DNA, 15 bp, Homo sapiens
caatcaattcctgat

SEQ ID NO: 4944 - DNA, 15 bp, Homo sapiens
acaatcaattcctga

SEQ ID NO: 4945 - DNA, 15 bp, Homo sapiens
aacaatcaattcctg

SEQ ID NO: 4946 - DNA, 15 bp, Homo sapiens
aaacaatcaattcct

SEQ ID NO: 4947 - DNA, 15 bp, Homo sapiens
aaaacaatcaattcc

SEQ ID NO: 4948 - DNA, 15 bp, Homo sapiens
gaaaacaatcaattc

SEQ ID NO: 4949 - DNA, 15 bp, Homo sapiens
tgaaaacaatcaatt

SEQ ID NO: 4950 - DNA, 15 bp, Homo sapiens
ttgaaaacaatcaat

SEQ ID NO: 4951 - DNA, 15 bp, Homo sapiens
cttgaaaacaatcaa

SEQ ID NO: 4952 - DNA, 15 bp, Homo sapiens
ccttgaaaacaatca

SEQ ID NO: 4953 - DNA, 15 bp, Homo sapiens
tccttgaaaacaatc

SEQ ID NO: 4954 - DNA, 15 bp, Homo sapiens
atccttgaaaacaat

SEQ ID NO: 4955 - DNA, 15 bp, Homo sapiens
aatccttgaaaacaa

SEQ ID NO: 4956 - DNA, 15 bp, Homo sapiens
caatccttgaaaaca

SEQ ID NO: 4957 - DNA, 15 bp, Homo sapiens
ccaatccttgaaaac

SEQ ID NO: 4958 - DNA, 15 bp, Homo sapiens
accaatccttgaaaa

SEQ ID NO: 4959 - DNA, 15 bp, Homo sapiens
aaccaatccttgaaa

SEQ ID NO: 4960 - DNA, 15 bp, Homo sapiens
gaaccaatccttgaa

SEQ ID NO: 4961 - DNA, 15 bp, Homo sapiens
ggaaccaatccttga

SEQ ID NO: 4962 - DNA, 15 bp, Homo sapiens
aggaaccaatccttg

SEQ ID NO: 4963 - DNA, 15 bp, Homo sapiens
aaggaaccaatcctt

SEQ ID NO: 4964 - DNA, 15 bp, Homo sapiens
gaaggaaccaatcct

SEQ ID NO: 4965 - DNA, 15 bp, Homo sapiens
agaaggaaccaatcc

SEQ ID NO: 4966 - DNA, 15 bp, Homo sapiens
cagaaggaaccaatc

SEQ ID NO: 4967 - DNA, 15 bp, Homo sapiens
gcagaaggaaccaat

SEQ ID NO: 4968 - DNA, 15 bp, Homo sapiens
agcagaaggaaccaa

SEQ ID NO: 4969 - DNA, 15 bp, Homo sapiens
gagcagaaggaacca

SEQ ID NO: 4970 - DNA, 15 bp, Homo sapiens
tgagcagaaggaacc

SEQ ID NO: 4971 - DNA, 15 bp, Homo sapiens
ttgagcagaaggaac

SEQ ID NO: 4972 - DNA, 15 bp, Homo sapiens
cttgagcagaaggaa

SEQ ID NO: 4973 - DNA, 15 bp, Homo sapiens
ccttgagcagaagga

SEQ ID NO: 4974 - DNA, 15 bp, Homo sapiens
tccttgagcagaagg

SEQ ID NO: 4975 - DNA, 15 bp, Homo sapiens
ttccttgagcagaag

SEQ ID NO: 4976 - DNA, 15 bp, Homo sapiens
cttccttgagcagaa

SEQ ID NO: 4977 - DNA, 15 bp, Homo sapiens
acttccttgagcaga

SEQ ID NO: 4978 - DNA, 15 bp, Homo sapiens
gacttccttgagcag

SEQ ID NO: 4979 - DNA, 15 bp, Homo sapiens
ggacttccttgagca

SEQ ID NO: 4980 - DNA, 15 bp, Homo sapiens
gggacttccttgagc

SEQ ID NO: 4981 - DNA, 15 bp, Homo sapiens
tgggacttccttgag

SEQ ID NO: 4982 - DNA, 15 bp, Homo sapiens
atgggacttccttga

SEQ ID NO: 4983 - DNA, 15 bp, Homo sapiens
aatgggacttccttg

SEQ ID NO: 4984 - DNA, 15 bp, Homo sapiens
caatgggacttcctt

SEQ ID NO: 4985 - DNA, 15 bp, Homo sapiens
acaatgggacttcct

SEQ ID NO: 4986 - DNA, 15 bp, Homo sapiens
tacaatgggacttcc

SEQ ID NO: 4987 - DNA, 15 bp, Homo sapiens
ttacaatgggacttc

SEQ ID NO: 4988 - DNA, 15 bp, Homo sapiens
tttacaatgggactt

SEQ ID NO: 4989 - DNA, 15 bp, Homo sapiens
gtttacaatgggact

SEQ ID NO: 4990 - DNA, 15 bp, Homo sapiens
tgtttacaatgggac

SEQ ID NO: 4991 - DNA, 15 bp, Homo sapiens
atgtttacaatggga

SEQ ID NO: 4992 - DNA, 15 bp, Homo sapiens
tatgtttacaatggg

SEQ ID NO: 4993 - DNA, 15 bp, Homo sapiens
ttatgtttacaatgg

SEQ ID NO: 4994 - DNA, 15 bp, Homo sapiens
tttatgtttacaatg

SEQ ID NO: 4995 - DNA, 15 bp, Homo sapiens
ttttatgtttacaat

SEQ ID NO: 4996 - DNA, 15 bp, Homo sapiens
tttttatgtttacaa

SEQ ID NO: 4997 - DNA, 15 bp, Homo sapiens
ttttttatgtttaca

SEQ ID NO: 4998 - DNA, 15 bp, Homo sapiens
tttttttatgtttac

SEQ ID NO: 4999 - DNA, 15 bp, Homo sapiens
atttttttatgttta

SEQ ID NO: 5000 - DNA, 15 bp, Homo sapiens
catttttttatgttt

SEQ ID NO: 5001 - DNA, 15 bp, Homo sapiens
tcatttttttatgtt

SEQ ID NO: 5002 - DNA, 15 bp, Homo sapiens
ttcatttttttatgt

SEQ ID NO: 5003 - DNA, 15 bp, Homo sapiens
attcatttttttatg

SEQ ID NO: 5004 - DNA, 15 bp, Homo sapiens
cattcatttttttat

SEQ ID NO: 5005 - DNA, 15 bp, Homo sapiens
tcattcattttttta

SEQ ID NO: 5006 - DNA, 15 bp, Homo sapiens
ttcattcattttttt

SEQ ID NO: 5007 - DNA, 15 bp, Homo sapiens
tttcattcatttttt

SEQ ID NO: 5008 - DNA, 15 bp, Homo sapiens
gtttcattcattttt

SEQ ID NO: 5009 - DNA, 15 bp, Homo sapiens
agtttcattcatttt

SEQ ID NO: 5010 - DNA, 15 bp, Homo sapiens
cagtttcattcattt

SEQ ID NO: 5011 - DNA, 15 bp, Homo sapiens
tcagtttcattcatt

SEQ ID NO: 5012 - DNA, 15 bp, Homo sapiens
ttcagtttcattcat

SEQ ID NO: 5013 - DNA, 15 bp, Homo sapiens
cttcagtttcattca

SEQ ID NO: 5014 - DNA, 15 bp, Homo sapiens
tcttcagtttcattc

SEQ ID NO: 5015 - DNA, 15 bp, Homo sapiens
ttcttcagtttcatt

SEQ ID NO: 5016 - DNA, 15 bp, Homo sapiens
cttcttcagtttcat

SEQ ID NO: 5017 - DNA, 15 bp, Homo sapiens
acttcttcagtttca

SEQ ID NO: 5018 - DNA, 15 bp, Homo sapiens
aacttcttcagtttc

SEQ ID NO: 5019 - DNA, 15 bp, Homo sapiens
gaacttcttcagttt

SEQ ID NO: 5020 - DNA, 15 bp, Homo sapiens
tgaacttcttcagtt

SEQ ID NO: 5021 - DNA, 15 bp, Homo sapiens
ctgaacttcttcagt

SEQ ID NO: 5022 - DNA, 15 bp, Homo sapiens
actgaacttcttcag

SEQ ID NO: 5023 - DNA, 15 bp, Homo sapiens
cactgaacttcttca

SEQ ID NO: 5024 - DNA, 15 bp, Homo sapiens
tcactgaacttcttc

SEQ ID NO: 5025 - DNA, 15 bp, Homo sapiens
gtcactgaacttctt

SEQ ID NO: 5026 - DNA, 15 bp, Homo sapiens
agtcactgaacttct

SEQ ID NO: 5027 - DNA, 15 bp, Homo sapiens
aagtcactgaacttc

SEQ ID NO: 5028 - DNA, 15 bp, Homo sapiens
taagtcactgaactt

SEQ ID NO: 5029 - DNA, 15 bp, Homo sapiens
ctaagtcactgaact

SEQ ID NO: 5030 - DNA, 15 bp, Homo sapiens
gctaagtcactgaac

SEQ ID NO: 5031 - DNA, 15 bp, Homo sapiens
agctaagtcactgaa

SEQ ID NO: 5032 - DNA, 15 bp, Homo sapiens
aagctaagtcactga

SEQ ID NO: 5033 - DNA, 15 bp, Homo sapiens
aaagctaagtcactg

SEQ ID NO: 5034 - DNA, 15 bp, Homo sapiens
aaaagctaagtcact

SEQ ID NO: 5035 - DNA, 15 bp, Homo sapiens
aaaaagctaagtcac

SEQ ID NO: 5036 - DNA, 15 bp, Homo sapiens
taaaaagctaagtca

SEQ ID NO: 5037 - DNA, 15 bp, Homo sapiens
ataaaaagctaagtc

SEQ ID NO: 5038 - DNA, 15 bp, Homo sapiens
aataaaaagctaagt

SEQ ID NO: 5039 - DNA, 15 bp, Homo sapiens
taataaaaagctaag

SEQ ID NO: 5040 - DNA, 15 bp, Homo sapiens
ataataaaaagctaa

SEQ ID NO: 5041 - DNA, 15 bp, Homo sapiens
gataataaaaagcta

SEQ ID NO: 5042 - DNA, 15 bp, Homo sapiens
agataataaaaagct

SEQ ID NO: 5043 - DNA, 15 bp, Homo sapiens
aagataataaaaagc

SEQ ID NO: 5044 - DNA, 15 bp, Homo sapiens
gaagataataaaaag

SEQ ID NO: 5045 - DNA, 15 bp, Homo sapiens
agaagataataaaaa

SEQ ID NO: 5046 - DNA, 15 bp, Homo sapiens
cagaagataataaaa

SEQ ID NO: 5047 - DNA, 15 bp, Homo sapiens
acagaagataataaa

SEQ ID NO: 5048 - DNA, 15 bp, Homo sapiens
tacagaagataataa

SEQ ID NO: 5049 - DNA, 15 bp, Homo sapiens
ctacagaagataata

SEQ ID NO: 5050 - DNA, 15 bp, Homo sapiens
actacagaagataat

SEQ ID NO: 5051 - DNA, 15 bp, Homo sapiens
tactacagaagataa

SEQ ID NO: 5052 - DNA, 15 bp, Homo sapiens
gtactacagaagata

SEQ ID NO: 5053 - DNA, 15 bp, Homo sapiens
agtactacagaagat

SEQ ID NO: 5054 - DNA, 15 bp, Homo sapiens
aagtactacagaaga

SEQ ID NO: 5055 - DNA, 15 bp, Homo sapiens
taagtactacagaag

SEQ ID NO: 5056 - DNA, 15 bp, Homo sapiens
gtaagtactacagaa

SEQ ID NO: 5057 - DNA, 15 bp, Homo sapiens
ggtaagtactacaga

SEQ ID NO: 5058 - DNA, 15 bp, Homo sapiens
aggtaagtactacag

SEQ ID NO: 5059 - DNA, 15 bp, Homo sapiens
aaggtaagtactaca

SEQ ID NO: 5060 - DNA, 15 bp, Homo sapiens
aaaggtaagtactac

SEQ ID NO: 5061 - DNA, 15 bp, Homo sapiens
aaaaggtaagtacta

SEQ ID NO: 5062 - DNA, 15 bp, Homo sapiens
aaaaaggtaagtact

SEQ ID NO: 5063 - DNA, 15 bp, Homo sapiens
caaaaaggtaagtac

SEQ ID NO: 5064 - DNA, 15 bp, Homo sapiens
ccaaaaaggtaagta

SEQ ID NO: 5065 - DNA, 15 bp, Homo sapiens
tccaaaaaggtaagt

SEQ ID NO: 5066 - DNA, 15 bp, Homo sapiens
ctccaaaaaggtaag

SEQ ID NO: 5067 - DNA, 15 bp, Homo sapiens
tctccaaaaaggtaa

SEQ ID NO: 5068 - DNA, 15 bp, Homo sapiens
ctctccaaaaaggta

SEQ ID NO: 5069 - DNA, 15 bp, Homo sapiens
cctctccaaaaaggt

SEQ ID NO: 5070 - DNA, 15 bp, Homo sapiens
tcctctccaaaaagg

SEQ ID NO: 5071 - DNA, 15 bp, Homo sapiens
ctcctctccaaaaag

SEQ ID NO: 5072 - DNA, 15 bp, Homo sapiens
actcctctccaaaaa

SEQ ID NO: 5073 - DNA, 15 bp, Homo sapiens
aactcctctccaaaa

SEQ ID NO: 5074 - DNA, 15 bp, Homo sapiens
caactcctctccaaa

SEQ ID NO: 5075 - DNA, 15 bp, Homo sapiens
ccaactcctctccaa

SEQ ID NO: 5076 - DNA, 15 bp, Homo sapiens
accaactcctctcca

SEQ ID NO: 5077 - DNA, 15 bp, Homo sapiens
aaccaactcctctcc

SEQ ID NO: 5078 - DNA, 15 bp, Homo sapiens
caaccaactcctctc

SEQ ID NO: 5079 - DNA, 15 bp, Homo sapiens
ccaaccaactcctct

SEQ ID NO: 5080 - DNA, 15 bp, Homo sapiens
cccaaccaactcctc

SEQ ID NO: 5081 - DNA, 15 bp, Homo sapiens
tcccaaccaactcct

SEQ ID NO: 5082 - DNA, 15 bp, Homo sapiens
atcccaaccaactcc

SEQ ID NO: 5083 - DNA, 15 bp, Homo sapiens
tatcccaaccaactc

SEQ ID NO: 5084 - DNA, 15 bp, Homo sapiens
atatcccaaccaact

SEQ ID NO: 5085 - DNA, 15 bp, Homo sapiens
aatatcccaaccaac

SEQ ID NO: 5086 - DNA, 15 bp, Homo sapiens
aaatatcccaaccaa

SEQ ID NO: 5087 - DNA, 15 bp, Homo sapiens
aaaatatcccaacca

SEQ ID NO: 5088 - DNA, 15 bp, Homo sapiens
aaaaatatcccaacc

SEQ ID NO: 5089 - DNA, 15 bp, Homo sapiens
gaaaaatatcccaac

SEQ ID NO: 5090 - DNA, 15 bp, Homo sapiens
ggaaaaatatcccaa

SEQ ID NO: 5091 - DNA, 15 bp, Homo sapiens
tggaaaaatatccca

SEQ ID NO: 5092 - DNA, 15 bp, Homo sapiens
atggaaaaatatccc

SEQ ID NO: 5093 - DNA, 15 bp, Homo sapiens
aatggaaaaatatcc

SEQ ID NO: 5094 - DNA, 15 bp, Homo sapiens
aaatggaaaaatatc

SEQ ID NO: 5095 - DNA, 15 bp, Homo sapiens
taaatggaaaaatat

SEQ ID NO: 5096 - DNA, 15 bp, Homo sapiens
ttaaatggaaaaata

SEQ ID NO: 5097 - DNA, 15 bp, Homo sapiens
tttaaatggaaaaat

SEQ ID NO: 5098 - DNA, 15 bp, Homo sapiens
atttaaatggaaaaa

SEQ ID NO: 5099 - DNA, 15 bp, Homo sapiens
aatttaaatggaaaa

SEQ ID NO: 5100 - DNA, 15 bp, Homo sapiens
aaatttaaatggaaa

SEQ ID NO: 5101 - DNA, 15 bp, Homo sapiens
aaaatttaaatggaa

SEQ ID NO: 5102 - DNA, 15 bp, Homo sapiens
aaaaatttaaatgga

SEQ ID NO: 5103 - DNA, 15 bp, Homo sapiens
aaaaaatttaaatgg

SEQ ID NO: 5104 - DNA, 15 bp, Homo sapiens
aaaaaaatttaaatg

SEQ ID NO: 5105 - DNA, 15 bp, Homo sapiens
aaaaaaaatttaaat

SEQ ID NO: 5106 - DNA, 15 bp, Homo sapiens
aaaaaaaaatttaaa

SEQ ID NO: 5107 - DNA, 15 bp, Homo sapiens
aaaaaaaaaatttaa

SEQ ID NO: 5108 - DNA, 15 bp, Homo sapiens
taaaaaaaaaattta

SEQ ID NO: 5109 - DNA, 15 bp, Homo sapiens
ttaaaaaaaaaattt

SEQ ID NO: 5110 - DNA, 15 bp, Homo sapiens
tttaaaaaaaaaatt

SEQ ID NO: 5111 - DNA, 15 bp, Homo sapiens
ctttaaaaaaaaaat

SEQ ID NO: 5112 - DNA, 15 bp, Homo sapiens
cctttaaaaaaaaaa

SEQ ID NO: 5113 - DNA, 15 bp, Homo sapiens
ccctttaaaaaaaaa

SEQ ID NO: 5114 - DNA, 15 bp, Homo sapiens
tccctttaaaaaaaa

SEQ ID NO: 5115 - DNA, 15 bp, Homo sapiens
atccctttaaaaaaa

SEQ ID NO: 5116 - DNA, 15 bp, Homo sapiens
gatccctttaaaaaa

SEQ ID NO: 5117 - DNA, 15 bp, Homo sapiens
agatccctttaaaaa

SEQ ID NO: 5118 - DNA, 15 bp, Homo sapiens
aagatccctttaaaa

SEQ ID NO: 5119 - DNA, 15 bp, Homo sapiens
gaagatccctttaaa

SEQ ID NO: 5120 - DNA, 15 bp, Homo sapiens
agaagatccctttaa

SEQ ID NO: 5121 - DNA, 15 bp, Homo sapiens
gagaagatcccttta

SEQ ID NO: 5122 - DNA, 15 bp, Homo sapiens
agagaagatcccttt

SEQ ID NO: 5123 - DNA, 15 bp, Homo sapiens
gagagaagatccctt

SEQ ID NO: 5124 - DNA, 15 bp, Homo sapiens
ggagagaagatccct

SEQ ID NO: 5125 - DNA, 15 bp, Homo sapiens
gggagagaagatccc

SEQ ID NO: 5126 - DNA, 15 bp, Homo sapiens
cgggagagaagatcc

SEQ ID NO: 5127 - DNA, 15 bp, Homo sapiens
acgggagagaagatc

SEQ ID NO: 5128 - DNA, 15 bp, Homo sapiens
tacgggagagaagat

SEQ ID NO: 5129 - DNA, 15 bp, Homo sapiens
ttacgggagagaaga

SEQ ID NO: 5130 - DNA, 15 bp, Homo sapiens
cttacgggagagaag

SEQ ID NO: 5131 - DNA, 15 bp, Homo sapiens
gcttacgggagagaa

SEQ ID NO: 5132 - DNA, 15 bp, Homo sapiens
ggcttacgggagaga

SEQ ID NO: 5133 - DNA, 15 bp, Homo sapiens
cggcttacgggagag

SEQ ID NO: 5134 - DNA, 15 bp, Homo sapiens
ccggcttacgggaga

SEQ ID NO: 5135 - DNA, 15 bp, Homo sapiens
cccggcttacgggag

SEQ ID NO: 5136 - DNA, 15 bp, Homo sapiens
tcccggcttacggga

SEQ ID NO: 5137 - DNA, 15 bp, Homo sapiens
atcccggcttacggg

SEQ ID NO: 5138 - DNA, 15 bp, Homo sapiens
tatcccggcttacgg

SEQ ID NO: 5139 - DNA, 15 bp, Homo sapiens
gtatcccggcttacg

SEQ ID NO: 5140 - DNA, 15 bp, Homo sapiens
agtatcccggcttac

SEQ ID NO: 5141 - DNA, 15 bp, Homo sapiens
aagtatcccggctta

SEQ ID NO: 5142 - DNA, 15 bp, Homo sapiens
taagtatcccggctt

SEQ ID NO: 5143 - DNA, 15 bp, Homo sapiens
ttaagtatcccggct

SEQ ID NO: 5144 - DNA, 15 bp, Homo sapiens
cttaagtatcccggc

SEQ ID NO: 5145 - DNA, 15 bp, Homo sapiens
gcttaagtatcccgg

SEQ ID NO: 5146 - DNA, 15 bp, Homo sapiens
agcttaagtatcccg

SEQ ID NO: 5147 - DNA, 15 bp, Homo sapiens
tagcttaagtatccc

SEQ ID NO: 5148 - DNA, 15 bp, Homo sapiens
atagcttaagtatcc

SEQ ID NO: 5149 - DNA, 15 bp, Homo sapiens
tatagcttaagtatc

SEQ ID NO: 5150 - DNA, 15 bp, Homo sapiens
atatagcttaagtat

SEQ ID NO: 5151 - DNA, 15 bp, Homo sapiens
tatatagcttaagta

SEQ ID NO: 5152 - DNA, 15 bp, Homo sapiens
atatatagcttaagt

SEQ ID NO: 5153 - DNA, 15 bp, Homo sapiens
catatatagcttaag

SEQ ID NO: 5154 - DNA, 15 bp, Homo sapiens
acatatatagcttaa

SEQ ID NO: 5155 - DNA, 15 bp, Homo sapiens
tacatatatagctta

SEQ ID NO: 5156 - DNA, 15 bp, Homo sapiens
ctacatatatagctt

SEQ ID NO: 5157 - DNA, 15 bp, Homo sapiens
actacatatatagct

SEQ ID NO: 5158 - DNA, 15 bp, Homo sapiens
cactacatatatagc

SEQ ID NO: 5159 - DNA, 15 bp, Homo sapiens
ccactacatatatag

SEQ ID NO: 5160 - DNA, 15 bp, Homo sapiens
gccactacatatata

SEQ ID NO: 5161 - DNA, 15 bp, Homo sapiens
agccactacatatat

SEQ ID NO: 5162 - DNA, 15 bp, Homo sapiens
tagccactacatata

SEQ ID NO: 5163 - DNA, 15 bp, Homo sapiens
gtagccactacatat

SEQ ID NO: 5164 - DNA, 15 bp, Homo sapiens
tgtagccactacata

SEQ ID NO: 5165 - DNA, 15 bp, Homo sapiens
ttgtagccactacat

SEQ ID NO: 5166 - DNA, 15 bp, Homo sapiens
tttgtagccactaca

SEQ ID NO: 5167 - DNA, 15 bp, Homo sapiens
atttgtagccactac

SEQ ID NO: 5168 - DNA, 15 bp, Homo sapiens
aatttgtagccacta

SEQ ID NO: 5169 - DNA, 15 bp, Homo sapiens
taatttgtagccact

SEQ ID NO: 5170 - DNA, 15 bp, Homo sapiens
ttaatttgtagccac

SEQ ID NO: 5171 - DNA, 15 bp, Homo sapiens
cttaatttgtagcca

SEQ ID NO: 5172 - DNA, 15 bp, Homo sapiens
ccttaatttgtagcc

SEQ ID NO: 5173 - DNA, 15 bp, Homo sapiens
accttaatttgtagc

SEQ ID NO: 5174 - DNA, 15 bp, Homo sapiens
gaccttaatttgtag

SEQ ID NO: 5175 - DNA, 15 bp, Homo sapiens
agaccttaatttgta

SEQ ID NO: 5176 - DNA, 15 bp, Homo sapiens
aagaccttaatttgt

SEQ ID NO: 5177 - DNA, 15 bp, Homo sapiens
gaagaccttaatttg

SEQ ID NO: 5178 - DNA, 15 bp, Homo sapiens
tgaagaccttaattt

SEQ ID NO: 5179 - DNA, 15 bp, Homo sapiens
gtgaagaccttaatt

SEQ ID NO: 5180 - DNA, 15 bp, Homo sapiens
agtgaagaccttaat

SEQ ID NO: 5181 - DNA, 15 bp, Homo sapiens
cagtgaagaccttaa

SEQ ID NO: 5182 - DNA, 15 bp, Homo sapiens
acagtgaagacctta

SEQ ID NO: 5183 - DNA, 15 bp, Homo sapiens
aacagtgaagacctt

SEQ ID NO: 5184 - DNA, 15 bp, Homo sapiens
aaacagtgaagacct

SEQ ID NO: 5185 - DNA, 15 bp, Homo sapiens
aaaacagtgaagacc

SEQ ID NO: 5186 - DNA, 15 bp, Homo sapiens
gaaaacagtgaagac

SEQ ID NO: 5187 - DNA, 15 bp, Homo sapiens
tgaaaacagtgaaga

SEQ ID NO: 5188 - DNA, 15 bp, Homo sapiens
atgaaaacagtgaag

SEQ ID NO: 5189 - DNA, 15 bp, Homo sapiens
aatgaaaacagtgaa

SEQ ID NO: 5190 - DNA, 15 bp, Homo sapiens
aaatgaaaacagtga

SEQ ID NO: 5191 - DNA, 15 bp, Homo sapiens
aaaatgaaaacagtg

SEQ ID NO: 5192 - DNA, 15 bp, Homo sapiens
aaaaatgaaaacagt

SEQ ID NO: 5193 - DNA, 15 bp, Homo sapiens
taaaaatgaaaacag

SEQ ID NO: 5194 - DNA, 15 bp, Homo sapiens
ctaaaaatgaaaaca

SEQ ID NO: 5195 - DNA, 15 bp, Homo sapiens
gctaaaaatgaaaac

SEQ ID NO: 5196 - DNA, 15 bp, Homo sapiens
agctaaaaatgaaaa

SEQ ID NO: 5197 - DNA, 15 bp, Homo sapiens
cagctaaaaatgaaa

SEQ ID NO: 5198 - DNA, 15 bp, Homo sapiens
gcagctaaaaatgaa

SEQ ID NO: 5199 - DNA, 15 bp, Homo sapiens
agcagctaaaaatga

SEQ ID NO: 5200 - DNA, 15 bp, Homo sapiens
tagcagctaaaaatg

SEQ ID NO: 5201 - DNA, 15 bp, Homo sapiens
ctagcagctaaaaat

SEQ ID NO: 5202 - DNA, 15 bp, Homo sapiens
tctagcagctaaaaa

SEQ ID NO: 5203 - DNA, 15 bp, Homo sapiens
ttctagcagctaaaa

SEQ ID NO: 5204 - DNA, 15 bp, Homo sapiens
attctagcagctaaa

SEQ ID NO: 5205 - DNA, 15 bp, Homo sapiens
tattctagcagctaa

SEQ ID NO: 5206 - DNA, 15 bp, Homo sapiens
ttattctagcagcta

SEQ ID NO: 5207 - DNA, 15 bp, Homo sapiens
cttattctagcagct

SEQ ID NO: 5208 - DNA, 15 bp, Homo sapiens
acttattctagcagc

SEQ ID NO: 5209 - DNA, 15 bp, Homo sapiens
cacttattctagcag

SEQ ID NO: 5210 - DNA, 15 bp, Homo sapiens
tcacttattctagca

SEQ ID NO: 5211 - DNA, 15 bp, Homo sapiens
ttcacttattctagc

SEQ ID NO: 5212 - DNA, 15 bp, Homo sapiens
gttcacttattctag

SEQ ID NO: 5213 - DNA, 15 bp, Homo sapiens
tgttcacttattcta

SEQ ID NO: 5214 - DNA, 15 bp, Homo sapiens
atgttcacttattct

SEQ ID NO: 5215 - DNA, 15 bp, Homo sapiens
aatgttcacttattc

SEQ ID NO: 5216 - DNA, 15 bp, Homo sapiens
taatgttcacttatt

SEQ ID NO: 5217 - DNA, 15 bp, Homo sapiens
gtaatgttcacttat

SEQ ID NO: 5218 - DNA, 15 bp, Homo sapiens
ggtaatgttcactta

SEQ ID NO: 5219 - DNA, 15 bp, Homo sapiens
aggtaatgttcactt

SEQ ID NO: 5220 - DNA, 15 bp, Homo sapiens
aaggtaatgttcact

SEQ ID NO: 5221 - DNA, 15 bp, Homo sapiens
taaggtaatgttcac

SEQ ID NO: 5222 - DNA, 15 bp, Homo sapiens
ctaaggtaatgttca

SEQ ID NO: 5223 - DNA, 15 bp, Homo sapiens
tctaaggtaatgttc

SEQ ID NO: 5224 - DNA, 15 bp, Homo sapiens
atctaaggtaatgtt

SEQ ID NO: 5225 - DNA, 15 bp, Homo sapiens
tatctaaggtaatgt

SEQ ID NO: 5226 - DNA, 15 bp, Homo sapiens
ctatctaaggtaatg

SEQ ID NO: 5227 - DNA, 15 bp, Homo sapiens
tctatctaaggtaat

SEQ ID NO: 5228 - DNA, 15 bp, Homo sapiens
gtctatctaaggtaa

SEQ ID NO: 5229 - DNA, 15 bp, Homo sapiens
agtctatctaaggta

SEQ ID NO: 5230 - DNA, 15 bp, Homo sapiens
gagtctatctaaggt

SEQ ID NO: 5231 - DNA, 15 bp, Homo sapiens
agagtctatctaagg

SEQ ID NO: 5232 - DNA, 15 bp, Homo sapiens
aagagtctatctaag

SEQ ID NO: 5233 - DNA, 15 bp, Homo sapiens
gaagagtctatctaa

SEQ ID NO: 5234 - DNA, 15 bp, Homo sapiens
agaagagtctatcta

SEQ ID NO: 5235 - DNA, 15 bp, Homo sapiens
tagaagagtctatct

SEQ ID NO: 5236 - DNA, 15 bp, Homo sapiens
ttagaagagtctatc

SEQ ID NO: 5237 - DNA, 15 bp, Homo sapiens
attagaagagtctat

SEQ ID NO: 5238 - DNA, 15 bp, Homo sapiens
aattagaagagtcta

SEQ ID NO: 5239 - DNA, 15 bp, Homo sapiens
taattagaagagtct

SEQ ID NO: 5240 - DNA, 15 bp, Homo sapiens
ataattagaagagtc

SEQ ID NO: 5241 - DNA, 15 bp, Homo sapiens
cataattagaagagt

SEQ ID NO: 5242 - DNA, 15 bp, Homo sapiens
tcataattagaagag

SEQ ID NO: 5243 - DNA, 15 bp, Homo sapiens
ttcataattagaaga

SEQ ID NO: 5244 - DNA, 15 bp, Homo sapiens
cttcataattagaag

SEQ ID NO: 5245 - DNA, 15 bp, Homo sapiens
tcttcataattagaa

SEQ ID NO: 5246 - DNA, 15 bp, Homo sapiens
atcttcataattaga

SEQ ID NO: 5247 - DNA, 15 bp, Homo sapiens
tatcttcataattag

SEQ ID NO: 5248 - DNA, 15 bp, Homo sapiens
atatcttcataatta

SEQ ID NO: 5249 - DNA, 15 bp, Homo sapiens
gatatcttcataatt

SEQ ID NO: 5250 - DNA, 15 bp, Homo sapiens
agatatcttcataat

SEQ ID NO: 5251 - DNA, 15 bp, Homo sapiens
tagatatcttcataa

SEQ ID NO: 5252 - DNA, 15 bp, Homo sapiens
ctagatatcttcata

SEQ ID NO: 5253 - DNA, 15 bp, Homo sapiens
tctagatatcttcat

SEQ ID NO: 5254 - DNA, 15 bp, Homo sapiens
atctagatatcttca

SEQ ID NO: 5255 - DNA, 15 bp, Homo sapiens
catctagatatcttc

SEQ ID NO: 5256 - DNA, 15 bp, Homo sapiens
acatctagatatctt

SEQ ID NO: 5257 - DNA, 15 bp, Homo sapiens
gacatctagatatct

SEQ ID NO: 5258 - DNA, 15 bp, Homo sapiens
agacatctagatatc

SEQ ID NO: 5259 - DNA, 15 bp, Homo sapiens
tagacatctagatat

SEQ ID NO: 5260 - DNA, 15 bp, Homo sapiens
ctagacatctagata

SEQ ID NO: 5261 - DNA, 15 bp, Homo sapiens
tctagacatctagat

SEQ ID NO: 5262 - DNA, 15 bp, Homo sapiens
ttctagacatctaga

SEQ ID NO: 5263 - DNA, 15 bp, Homo sapiens
tttctagacatctag

SEQ ID NO: 5264 - DNA, 15 bp, Homo sapiens
ttttctagacatcta

SEQ ID NO: 5265 - DNA, 15 bp, Homo sapiens
attttctagacatct

SEQ ID NO: 5266 - DNA, 15 bp, Homo sapiens
tattttctagacatc

SEQ ID NO: 5267 - DNA, 15 bp, Homo sapiens
atattttctagacat

SEQ ID NO: 5268 - DNA, 15 bp, Homo sapiens
gatattttctagaca

SEQ ID NO: 5269 - DNA, 15 bp, Homo sapiens
tgatattttctagac

SEQ ID NO: 5270 - DNA, 15 bp, Homo sapiens
ttgatattttctaga

SEQ ID NO: 5271 - DNA, 15 bp, Homo sapiens
tttgatattttctag

SEQ ID NO: 5272 - DNA, 15 bp, Homo sapiens
ttttgatattttcta

SEQ ID NO: 5273 - DNA, 15 bp, Homo sapiens
attttgatattttct

SEQ ID NO: 5274 - DNA, 15 bp, Homo sapiens
cattttgatattttc

SEQ ID NO: 5275 - DNA, 15 bp, Homo sapiens
gcattttgatatttt

SEQ ID NO: 5276 - DNA, 15 bp, Homo sapiens
tgcattttgatattt

SEQ ID NO: 5277 - DNA, 15 bp, Homo sapiens
atgcattttgatatt

SEQ ID NO: 5278 - DNA, 15 bp, Homo sapiens
catgcattttgatat

SEQ ID NO: 5279 - DNA, 15 bp, Homo sapiens
acatgcattttgata

SEQ ID NO: 5280 - DNA, 15 bp, Homo sapiens
cacatgcattttgat

SEQ ID NO: 5281 - DNA, 15 bp, Homo sapiens
ccacatgcattttga

SEQ ID NO: 5282 - DNA, 15 bp, Homo sapiens
accacatgcattttg

SEQ ID NO: 5283 - DNA, 15 bp, Homo sapiens
aaccacatgcatttt

SEQ ID NO: 5284 - DNA, 15 bp, Homo sapiens
aaaccacatgcattt

SEQ ID NO: 5285 - DNA, 15 bp, Homo sapiens
aaaaccacatgcatt

SEQ ID NO: 5286 - DNA, 15 bp, Homo sapiens
aaaaaccacatgcat

SEQ ID NO: 5287 - DNA, 15 bp, Homo sapiens
caaaaaccacatgca

SEQ ID NO: 5288 - DNA, 15 bp, Homo sapiens
gcaaaaaccacatgc

SEQ ID NO: 5289 - DNA, 15 bp, Homo sapiens
tgcaaaaaccacatg

SEQ ID NO: 5290 - DNA, 15 bp, Homo sapiens
atgcaaaaaccacat

SEQ ID NO: 5291 - DNA, 15 bp, Homo sapiens
aatgcaaaaaccaca

SEQ ID NO: 5292 - DNA, 15 bp, Homo sapiens
aaatgcaaaaaccac

SEQ ID NO: 5293 - DNA, 15 bp, Homo sapiens
gaaatgcaaaaacca

SEQ ID NO: 5294 - DNA, 15 bp, Homo sapiens
agaaatgcaaaaacc

SEQ ID NO: 5295 - DNA, 15 bp, Homo sapiens
tagaaatgcaaaaac

SEQ ID NO: 5296 - DNA, 15 bp, Homo sapiens
ttagaaatgcaaaaa

SEQ ID NO: 5297 - DNA, 15 bp, Homo sapiens
tttagaaatgcaaaa

SEQ ID NO: 5298 - DNA, 15 bp, Homo sapiens
ttttagaaatgcaaa

SEQ ID NO: 5299 - DNA, 15 bp, Homo sapiens
attttagaaatgcaa

SEQ ID NO: 5300 - DNA, 15 bp, Homo sapiens
tattttagaaatgca

SEQ ID NO: 5301 - DNA, 15 bp, Homo sapiens
gtattttagaaatgc

SEQ ID NO: 5302 - DNA, 15 bp, Homo sapiens
agtattttagaaatg

SEQ ID NO: 5303 - DNA, 15 bp, Homo sapiens
aagtattttagaaat

SEQ ID NO: 5304 - DNA, 15 bp, Homo sapiens
aaagtattttagaaa

SEQ ID NO: 5305 - DNA, 15 bp, Homo sapiens
aaaagtattttagaa

SEQ ID NO: 5306 - DNA, 15 bp, Homo sapiens
taaaagtattttaga

SEQ ID NO: 5307 - DNA, 15 bp, Homo sapiens
ttaaaagtattttag

SEQ ID NO: 5308 - DNA, 15 bp, Homo sapiens
tttaaaagtatttta

SEQ ID NO: 5309 - DNA, 15 bp, Homo sapiens
ttttaaaagtatttt

SEQ ID NO: 5310 - DNA, 15 bp, Homo sapiens
gttttaaaagtattt

SEQ ID NO: 5311 - DNA, 15 bp, Homo sapiens
ggttttaaaagtatt

SEQ ID NO: 5312 - DNA, 15 bp, Homo sapiens
tggttttaaaagtat

SEQ ID NO: 5313 - DNA, 15 bp, Homo sapiens
ttggttttaaaagta

SEQ ID NO: 5314 - DNA, 15 bp, Homo sapiens
tttggttttaaaagt

SEQ ID NO: 5315 - DNA, 15 bp, Homo sapiens
atttggttttaaaag

SEQ ID NO: 5316 - DNA, 15 bp, Homo sapiens
tatttggttttaaaa

SEQ ID NO: 5317 - DNA, 15 bp, Homo sapiens
gtatttggttttaaa

SEQ ID NO: 5318 - DNA, 15 bp, Homo sapiens
agtatttggttttaa

SEQ ID NO: 5319 - DNA, 15 bp, Homo sapiens
aagtatttggtttta

SEQ ID NO: 5320 - DNA, 15 bp, Homo sapiens
aaagtatttggtttt

SEQ ID NO: 5321 - DNA, 15 bp, Homo sapiens
aaaagtatttggttt

SEQ ID NO: 5322 - DNA, 15 bp, Homo sapiens
aaaaagtatttggtt

SEQ ID NO: 5323 - DNA, 15 bp, Homo sapiens
gaaaaagtatttggt

SEQ ID NO: 5324 - DNA, 15 bp, Homo sapiens
agaaaaagtatttgg

SEQ ID NO: 5325 - DNA, 15 bp, Homo sapiens
aagaaaaagtatttg

SEQ ID NO: 5326 - DNA, 15 bp, Homo sapiens
aaagaaaaagtattt

SEQ ID NO: 5327 - DNA, 15 bp, Homo sapiens
aaaagaaaaagtatt

SEQ ID NO: 5328 - DNA, 15 bp, Homo sapiens
aaaaagaaaaagtat

SEQ ID NO: 5329 - DNA, 15 bp, Homo sapiens
aaaaaagaaaaagta

SEQ ID NO: 5330 - DNA, 15 bp, Homo sapiens
aaaaaaagaaaaagt

SEQ ID NO: 5331 - DNA, 15 bp, Homo sapiens
gaaaaaaaaaaaaaa

SEQ ID NO: 5332 - DNA, 15 bp, Homo sapiens
agaaaaaaaaaaaaa

SEQ ID NO: 5333 - DNA, 15 bp, Homo sapiens
cagaaaaaaaaaaaa

SEQ ID NO: 5334 - DNA, 15 bp, Homo sapiens
tcagaaaaaaaaaaa

SEQ ID NO: 5335 - DNA, 15 bp, Homo sapiens
ctcagaaaaaaaaaa

SEQ ID NO: 5336 - DNA, 15 bp, Homo sapiens
tctcagaaaaaaaaa

SEQ ID NO: 5337 - DNA, 15 bp, Homo sapiens
atctcagaaaaaaaa

SEQ ID NO: 5338 - DNA, 15 bp, Homo sapiens
catctcagaaaaaaa

SEQ ID NO: 5339 - DNA, 15 bp, Homo sapiens
ccatctcagaaaaaa

SEQ ID NO: 5340 - DNA, 15 bp, Homo sapiens
tccatctcagaaaaa

SEQ ID NO: 5341 - DNA, 15 bp, Homo sapiens
ctccatctcagaaaa

SEQ ID NO: 5342 - DNA, 15 bp, Homo sapiens
actccatctcagaaa

SEQ ID NO: 5343 - DNA, 15 bp, Homo sapiens
gactccatctcagaa

SEQ ID NO: 5344 - DNA, 15 bp, Homo sapiens
agactccatctcaga

SEQ ID NO: 5345 - DNA, 15 bp, Homo sapiens
aagactccatctcag

SEQ ID NO: 5346 - DNA, 15 bp, Homo sapiens
caagactccatctca

SEQ ID NO: 5347 - DNA, 15 bp, Homo sapiens
gcaagactccatctc

SEQ ID NO: 5348 - DNA, 15 bp, Homo sapiens
agcaagactccatct

SEQ ID NO: 5349 - DNA, 15 bp, Homo sapiens
gagcaagactccatc

SEQ ID NO: 5350 - DNA, 15 bp, Homo sapiens
agagcaagactccat

SEQ ID NO: 5351 - DNA, 15 bp, Homo sapiens
aagagcaagactcca

SEQ ID NO: 5352 - DNA, 15 bp, Homo sapiens
aaagagcaagactcc

SEQ ID NO: 5353 - DNA, 15 bp, Homo sapiens
aaaagagcaagactc

SEQ ID NO: 5354 - DNA, 15 bp, Homo sapiens
caaaagagcaagact

SEQ ID NO: 5355 - DNA, 15 bp, Homo sapiens
gcaaaagagcaagac

SEQ ID NO: 5356 - DNA, 15 bp, Homo sapiens
ggcaaaagagcaaga

SEQ ID NO: 5357 - DNA, 15 bp, Homo sapiens
aggcaaaagagcaag

SEQ ID NO: 5358 - DNA, 15 bp, Homo sapiens
taggcaaaagagcaa

SEQ ID NO: 5359 - DNA, 15 bp, Homo sapiens
ctaggcaaaagagca

SEQ ID NO: 5360 - DNA, 15 bp, Homo sapiens
cctaggcaaaagagc

SEQ ID NO: 5361 - DNA, 15 bp, Homo sapiens
gcctaggcaaaagag

SEQ ID NO: 5362 - DNA, 15 bp, Homo sapiens
agcctaggcaaaaga

SEQ ID NO: 5363 - DNA, 15 bp, Homo sapiens
cagcctaggcaaaag

SEQ ID NO: 5364 - DNA, 15 bp, Homo sapiens
ccagcctaggcaaaa

SEQ ID NO: 5365 - DNA, 15 bp, Homo sapiens
tccagcctaggcaaa

SEQ ID NO: 5366 - DNA, 15 bp, Homo sapiens
ctccagcctaggcaa

SEQ ID NO: 5367 - DNA, 15 bp, Homo sapiens
gctccagcctaggca

SEQ ID NO: 5368 - DNA, 15 bp, Homo sapiens
cgctccagcctaggc

SEQ ID NO: 5369 - DNA, 15 bp, Homo sapiens
gcgctccagcctagg

SEQ ID NO: 5370 - DNA, 15 bp, Homo sapiens
tgcgctccagcctag

SEQ ID NO: 5371 - DNA, 15 bp, Homo sapiens
ctgcgctccagccta

SEQ ID NO: 5372 - DNA, 15 bp, Homo sapiens
actgcgctccagcct

SEQ ID NO: 5373 - DNA, 15 bp, Homo sapiens
tactgcgctccagcc

SEQ ID NO: 5374 - DNA, 15 bp, Homo sapiens
ctactgcgctccagc

SEQ ID NO: 5375 - DNA, 15 bp, Homo sapiens
aaacctggaatacca

SEQ ID NO: 5376 - DNA, 15 bp, Homo sapiens
aaaacctggaatacc

SEQ ID NO: 5377 - DNA, 15 bp, Homo sapiens
caaaacctggaatac

SEQ ID NO: 5378 - DNA, 15 bp, Homo sapiens
ccaaaacctggaata

SEQ ID NO: 5379 - DNA, 15 bp, Homo sapiens
accaaaacctggaat

SEQ ID NO: 5380 - DNA, 15 bp, Homo sapiens
aaccaaaacctggaa

SEQ ID NO: 5381 - DNA, 15 bp, Homo sapiens
aaaccaaaacctgga

SEQ ID NO: 5382 - DNA, 15 bp, Homo sapiens
taaaccaaaacctgg

SEQ ID NO: 5383 - DNA, 15 bp, Homo sapiens
ctaaaccaaaacctg

SEQ ID NO: 5384 - DNA, 15 bp, Homo sapiens
cctaaaccaaaacct

SEQ ID NO: 5385 - DNA, 15 bp, Homo sapiens
ccctaaaccaaaacc

SEQ ID NO: 5386 - DNA, 15 bp, Homo sapiens
tccctaaaccaaaac

SEQ ID NO: 5387 - DNA, 15 bp, Homo sapiens
ttccctaaaccaaaa

SEQ ID NO: 5388 - DNA, 15 bp, Homo sapiens
tttccctaaaccaaa

SEQ ID NO: 5389 - DNA, 15 bp, Homo sapiens
ttttccctaaaccaa

SEQ ID NO: 5390 - DNA, 15 bp, Homo sapiens
cttttccctaaacca

SEQ ID NO: 5391 - DNA, 15 bp, Homo sapiens
acttttccctaaacc

SEQ ID NO: 5392 - DNA, 15 bp, Homo sapiens
tacttttccctaaac

SEQ ID NO: 5393 - DNA, 15 bp, Homo sapiens
ttacttttccctaaa

SEQ ID NO: 5394 - DNA, 15 bp, Homo sapiens
tttacttttccctaa

SEQ ID NO: 5395 - DNA, 15 bp, Homo sapiens
ttttacttttcccta

SEQ ID NO: 5396 - DNA, 15 bp, Homo sapiens
cttttacttttccct

SEQ ID NO: 5397 - DNA, 15 bp, Homo sapiens
acttttacttttccc

SEQ ID NO: 5398 - DNA, 15 bp, Homo sapiens
tacttttacttttcc

SEQ ID NO: 5399 - DNA, 15 bp, Homo sapiens
ttacttttacttttc

SEQ ID NO: 5400 - DNA, 15 bp, Homo sapiens
attacttttactttt

SEQ ID NO: 5401 - DNA, 15 bp, Homo sapiens
aattacttttacttt

SEQ ID NO: 5402 - DNA, 15 bp, Homo sapiens
aaattacttttactt

SEQ ID NO: 5403 - DNA, 15 bp, Homo sapiens
aaaattacttttact

SEQ ID NO: 5404 - DNA, 15 bp, Homo sapiens
taaaattacttttac

SEQ ID NO: 5405 - DNA, 15 bp, Homo sapiens
ataaaattactttta

SEQ ID NO: 5406 - DNA, 15 bp, Homo sapiens
tataaaattactttt

SEQ ID NO: 5407 - DNA, 15 bp, Homo sapiens
ttataaaattacttt

SEQ ID NO: 5408 - DNA, 15 bp, Homo sapiens
attataaaattactt

SEQ ID NO: 5409 - DNA, 15 bp, Homo sapiens
gattataaaattact

SEQ ID NO: 5410 - DNA, 15 bp, Homo sapiens
ggattataaaattac

SEQ ID NO: 5411 - DNA, 15 bp, Homo sapiens
gggattataaaatta

SEQ ID NO: 5412 - DNA, 15 bp, Homo sapiens
tgggattataaaatt

SEQ ID NO: 5413 - DNA, 15 bp, Homo sapiens
ctgggattataaaat

SEQ ID NO: 5414 - DNA, 15 bp, Homo sapiens
gctgggattataaaa

SEQ ID NO: 5415 - DNA, 15 bp, Homo sapiens
agctgggattataaa

SEQ ID NO: 5416 - DNA, 15 bp, Homo sapiens
cagctgggattataa

SEQ ID NO: 5417 - DNA, 15 bp, Homo sapiens
acagctgggattata

SEQ ID NO: 5418 - DNA, 15 bp, Homo sapiens
gacagctgggattat

SEQ ID NO: 5419 - DNA, 15 bp, Homo sapiens
tgacagctgggatta

SEQ ID NO: 5420 - DNA, 15 bp, Homo sapiens
atgacagctgggatt

SEQ ID NO: 5421 - DNA, 15 bp, Homo sapiens
aatgacagctgggat

SEQ ID NO: 5422 - DNA, 15 bp, Homo sapiens
aaatgacagctggga

SEQ ID NO: 5423 - DNA, 15 bp, Homo sapiens
taaatgacagctggg

SEQ ID NO: 5424 - DNA, 15 bp, Homo sapiens
ttaaatgacagctgg

SEQ ID NO: 5425 - DNA, 15 bp, Homo sapiens
cttaaatgacagctg

SEQ ID NO: 5426 - DNA, 15 bp, Homo sapiens
gcttaaatgacagct

SEQ ID NO: 5427 - DNA, 15 bp, Homo sapiens
ggcttaaatgacagc

SEQ ID NO: 5428 - DNA, 15 bp, Homo sapiens
tggcttaaatgacag

SEQ ID NO: 5429 - DNA, 15 bp, Homo sapiens
gtggcttaaatgaca

SEQ ID NO: 5430 - DNA, 15 bp, Homo sapiens
ggtggcttaaatgac

SEQ ID NO: 5431 - DNA, 15 bp, Homo sapiens
gggtggcttaaatga

SEQ ID NO: 5432 - DNA, 15 bp, Homo sapiens
ggggtggcttaaatg

SEQ ID NO: 5433 - DNA, 15 bp, Homo sapiens
aggggtggcttaaat

SEQ ID NO: 5434 - DNA, 15 bp, Homo sapiens
aaggggtggcttaaa

SEQ ID NO: 5435 - DNA, 15 bp, Homo sapiens
aaaggggtggcttaa

SEQ ID NO: 5436 - DNA, 15 bp, Homo sapiens
caaaggggtggctta

SEQ ID NO: 5437 - DNA, 15 bp, Homo sapiens
acaaaggggtggctt

SEQ ID NO: 5438 - DNA, 15 bp, Homo sapiens
cacaaaggggtggct

SEQ ID NO: 5439 - DNA, 15 bp, Homo sapiens
ccacaaaggggtggc

SEQ ID NO: 5440 - DNA, 15 bp, Homo sapiens
cccacaaaggggtgg

SEQ ID NO: 5441 - DNA, 15 bp, Homo sapiens
acccacaaaggggtg

SEQ ID NO: 5442 - DNA, 15 bp, Homo sapiens
tacccacaaaggggt

SEQ ID NO: 5443 - DNA, 15 bp, Homo sapiens
ctacccacaaagggg

SEQ ID NO: 5444 - DNA, 15 bp, Homo sapiens
gctacccacaaaggg

SEQ ID NO: 5445 - DNA, 15 bp, Homo sapiens
tgctacccacaaagg

SEQ ID NO: 5446 - DNA, 15 bp, Homo sapiens
atgctacccacaaag

SEQ ID NO: 5447 - DNA, 15 bp, Homo sapiens
tatgctacccacaaa

SEQ ID NO: 5448 - DNA, 15 bp, Homo sapiens
atatgctacccacaa

SEQ ID NO: 5449 - DNA, 15 bp, Homo sapiens
catatgctacccaca

SEQ ID NO: 5450 - DNA, 15 bp, Homo sapiens
ccatatgctacccac

SEQ ID NO: 5451 - DNA, 15 bp, Homo sapiens
accatatgctaccca

SEQ ID NO: 5452 - DNA, 15 bp, Homo sapiens
gaccatatgctaccc

SEQ ID NO: 5453 - DNA, 15 bp, Homo sapiens
ggaccatatgctacc

SEQ ID NO: 5454 - DNA, 15 bp, Homo sapiens
tggaccatatgctac

SEQ ID NO: 5455 - DNA, 15 bp, Homo sapiens
gtggaccatatgcta

SEQ ID NO: 5456 - DNA, 15 bp, Homo sapiens
agtggaccatatgct

SEQ ID NO: 5457 - DNA, 15 bp, Homo sapiens
gagtggaccatatgc

SEQ ID NO: 5458 - DNA, 15 bp, Homo sapiens
agagtggaccatatg

SEQ ID NO: 5459 - DNA, 15 bp, Homo sapiens
gagagtggaccatat

SEQ ID NO: 5460 - DNA, 15 bp, Homo sapiens
agagagtggaccata

SEQ ID NO: 5461 - DNA, 15 bp, Homo sapiens
gagagagtggaccat

SEQ ID NO: 5462 - DNA, 15 bp, Homo sapiens
tgagagagtggacca

SEQ ID NO: 5463 - DNA, 15 bp, Homo sapiens
ctgagagagtggacc

SEQ ID NO: 5464 - DNA, 15 bp, Homo sapiens
actgagagagtggac

SEQ ID NO: 5465 - DNA, 15 bp, Homo sapiens
aactgagagagtgga

SEQ ID NO: 5466 - DNA, 15 bp, Homo sapiens
gaactgagagagtgg

SEQ ID NO: 5467 - DNA, 15 bp, Homo sapiens
tgaactgagagagtg

SEQ ID NO: 5468 - DNA, 15 bp, Homo sapiens
atgaactgagagagt

SEQ ID NO: 5469 - DNA, 15 bp, Homo sapiens
aatgaactgagagag

SEQ ID NO: 5470 - DNA, 15 bp, Homo sapiens
caatgaactgagaga

SEQ ID NO: 5471 - DNA, 15 bp, Homo sapiens
acaatgaactgagag

SEQ ID NO: 5472 - DNA, 15 bp, Homo sapiens
gacaatgaactgaga

SEQ ID NO: 5473 - DNA, 15 bp, Homo sapiens
ggacaatgaactgag

SEQ ID NO: 5474 - DNA, 15 bp, Homo sapiens
aggacaatgaactga

SEQ ID NO: 5475 - DNA, 15 bp, Homo sapiens
taggacaatgaactg

SEQ ID NO: 5476 - DNA, 15 bp, Homo sapiens
ttaggacaatgaact

SEQ ID NO: 5477 - DNA, 15 bp, Homo sapiens
tttaggacaatgaac

SEQ ID NO: 5478 - DNA, 15 bp, Homo sapiens
ctttaggacaatgaa

SEQ ID NO: 5479 - DNA, 15 bp, Homo sapiens
tctttaggacaatga

SEQ ID NO: 5480 - DNA, 15 bp, Homo sapiens
atctttaggacaatg

SEQ ID NO: 5481 - DNA, 15 bp, Homo sapiens
catctttaggacaat

SEQ ID NO: 5482 - DNA, 15 bp, Homo sapiens
gcatctttaggacaa

SEQ ID NO: 5483 - DNA, 15 bp, Homo sapiens
agcatctttaggaca

SEQ ID NO: 5484 - DNA, 15 bp, Homo sapiens
aagcatctttaggac

SEQ ID NO: 5485 - DNA, 15 bp, Homo sapiens
gaagcatctttagga

SEQ ID NO: 5486 - DNA, 15 bp, Homo sapiens
tgaagcatctttagg

SEQ ID NO: 5487 - DNA, 15 bp, Homo sapiens
atgaagcatctttag

SEQ ID NO: 5488 - DNA, 15 bp, Homo sapiens
gatgaagcatcttta

SEQ ID NO: 5489 - DNA, 15 bp, Homo sapiens
tgatgaagcatcttt

SEQ ID NO: 5490 - DNA, 15 bp, Homo sapiens
ctgatgaagcatctt

SEQ ID NO: 5491 - DNA, 15 bp, Homo sapiens
tctgatgaagcatct

SEQ ID NO: 5492 - DNA, 15 bp, Homo sapiens
ttctgatgaagcatc

SEQ ID NO: 5493 - DNA, 15 bp, Homo sapiens
tttctgatgaagcat

SEQ ID NO: 5494 - DNA, 15 bp, Homo sapiens
ctttctgatgaagca

SEQ ID NO: 5495 - DNA, 15 bp, Homo sapiens
cctttctgatgaagc

SEQ ID NO: 5496 - DNA, 15 bp, Homo sapiens
tcctttctgatgaag

SEQ ID NO: 5497 - DNA, 15 bp, Homo sapiens
ttcctttctgatgaa

SEQ ID NO: 5498 - DNA, 15 bp, Homo sapiens
attcctttctgatga

SEQ ID NO: 5499 - DNA, 15 bp, Homo sapiens
tattcctttctgatg

SEQ ID NO: 5500 - DNA, 15 bp, Homo sapiens
ttattcctttctgat

SEQ ID NO: 5501 - DNA, 15 bp, Homo sapiens
gttattcctttctga

SEQ ID NO: 5502 - DNA, 15 bp, Homo sapiens
agttattcctttctg

SEQ ID NO: 5503 - DNA, 15 bp, Homo sapiens
aagttattcctttct

SEQ ID NO: 5504 - DNA, 15 bp, Homo sapiens
gaagttattcctttc

SEQ ID NO: 5505 - DNA, 15 bp, Homo sapiens
ggaagttattccttt

SEQ ID NO: 5506 - DNA, 15 bp, Homo sapiens
tggaagttattcctt

SEQ ID NO: 5507 - DNA, 15 bp, Homo sapiens
gtggaagttattcct

SEQ ID NO: 5508 - DNA, 15 bp, Homo sapiens
ggtggaagttattcc

SEQ ID NO: 5509 - DNA, 15 bp, Homo sapiens
gggtggaagttattc

SEQ ID NO: 5510 - DNA, 15 bp, Homo sapiens
ggggtggaagttatt

SEQ ID NO: 5511 - DNA, 15 bp, Homo sapiens
cggggtggaagttat

SEQ ID NO: 5512 - DNA, 15 bp, Homo sapiens
acggggtggaagtta

SEQ ID NO: 5513 - DNA, 15 bp, Homo sapiens
aacggggtggaagtt

SEQ ID NO: 5514 - DNA, 15 bp, Homo sapiens
taacggggtggaagt

SEQ ID NO: 5515 - DNA, 15 bp, Homo sapiens
gtaacggggtggaag

SEQ ID NO: 5516 - DNA, 15 bp, Homo sapiens
agtaacggggtggaa

SEQ ID NO: 5517 - DNA, 15 bp, Homo sapiens
gagtaacggggtgga

SEQ ID NO: 5518 - DNA, 15 bp, Homo sapiens
agagtaacggggtgg

SEQ ID NO: 5519 - DNA, 15 bp, Homo sapiens
gagagtaacggggtg

SEQ ID NO: 5520 - DNA, 15 bp, Homo sapiens
agagagtaacggggt

SEQ ID NO: 5521 - DNA, 15 bp, Homo sapiens
cagagagtaacgggg

SEQ ID NO: 5522 - DNA, 15 bp, Homo sapiens
acagagagtaacggg

SEQ ID NO: 5523 - DNA, 15 bp, Homo sapiens
gacagagagtaacgg

SEQ ID NO: 5524 - DNA, 15 bp, Homo sapiens
ggacagagagtaacg

SEQ ID NO: 5525 - DNA, 15 bp, Homo sapiens
gggacagagagtaac

SEQ ID NO: 5526 - DNA, 15 bp, Homo sapiens
ggggacagagagtaa

SEQ ID NO: 5527 - DNA, 15 bp, Homo sapiens
aggggacagagagta

SEQ ID NO: 5528 - DNA, 15 bp, Homo sapiens
aaggggacagagagt

SEQ ID NO: 5529 - DNA, 15 bp, Homo sapiens
taaggggacagagag

SEQ ID NO: 5530 - DNA, 15 bp, Homo sapiens
gtaaggggacagaga

SEQ ID NO: 5531 - DNA, 15 bp, Homo sapiens
agtaaggggacagag

SEQ ID NO: 5532 - DNA, 15 bp, Homo sapiens
gagtaaggggacaga

SEQ ID NO: 5533 - DNA, 15 bp, Homo sapiens
agagtaaggggacag

SEQ ID NO: 5534 - DNA, 15 bp, Homo sapiens
cagagtaaggggaca

SEQ ID NO: 5535 - DNA, 15 bp, Homo sapiens
gcagagtaaggggac

SEQ ID NO: 5536 - DNA, 15 bp, Homo sapiens
agcagagtaagggga

SEQ ID NO: 5537 - DNA, 15 bp, Homo sapiens
aagcagagtaagggg

SEQ ID NO: 5538 - DNA, 15 bp, Homo sapiens
aaagcagagtaaggg

SEQ ID NO: 5539 - DNA, 15 bp, Homo sapiens
taaagcagagtaagg

SEQ ID NO: 5540 - DNA, 15 bp, Homo sapiens
ataaagcagagtaag

SEQ ID NO: 5541 - DNA, 15 bp, Homo sapiens
aataaagcagagtaa

SEQ ID NO: 5542 - DNA, 15 bp, Homo sapiens
aaataaagcagagta

SEQ ID NO: 5543 - DNA, 15 bp, Homo sapiens
aaaataaagcagagt

SEQ ID NO: 5544 - DNA, 15 bp, Homo sapiens
aaaaataaagcagag

SEQ ID NO: 5545 - DNA, 15 bp, Homo sapiens
gaaaaataaagcaga

SEQ ID NO: 5546 - DNA, 15 bp, Homo sapiens
agaaaaataaagcag

SEQ ID NO: 5547 - DNA, 15 bp, Homo sapiens
aagaaaaataaagca

SEQ ID NO: 5548 - DNA, 15 bp, Homo sapiens
gaagaaaaataaagc

SEQ ID NO: 5549 - DNA, 15 bp, Homo sapiens
cgaagaaaaataaag

SEQ ID NO: 5550 - DNA, 15 bp, Homo sapiens
acgaagaaaaataaa

SEQ ID NO: 5551 - DNA, 15 bp, Homo sapiens
gacgaagaaaaataa

SEQ ID NO: 5552 - DNA, 15 bp, Homo sapiens
tgacgaagaaaaata

SEQ ID NO: 5553 - DNA, 15 bp, Homo sapiens
ttgacgaagaaaaat

SEQ ID NO: 5554 - DNA, 15 bp, Homo sapiens
attgacgaagaaaaa

SEQ ID NO: 5555 - DNA, 15 bp, Homo sapiens
gattgacgaagaaaa

SEQ ID NO: 5556 - DNA, 15 bp, Homo sapiens
ggattgacgaagaaa

SEQ ID NO: 5557 - DNA, 15 bp, Homo sapiens
aggattgacgaagaa

SEQ ID NO: 5558 - DNA, 15 bp, Homo sapiens
taggattgacgaaga

SEQ ID NO: 5559 - DNA, 15 bp, Homo sapiens
gtaggattgacgaag

SEQ ID NO: 5560 - DNA, 15 bp, Homo sapiens
ggtaggattgacgaa

SEQ ID NO: 5561 - DNA, 15 bp, Homo sapiens
tggtaggattgacga

SEQ ID NO: 5562 - DNA, 15 bp, Homo sapiens
gtggtaggattgacg

SEQ ID NO: 5563 - DNA, 15 bp, Homo sapiens
ggtggtaggattgac

SEQ ID NO: 5564 - DNA, 15 bp, Homo sapiens
tggtggtaggattga

SEQ ID NO: 5565 - DNA, 15 bp, Homo sapiens
gtggtggtaggattg

SEQ ID NO: 5566 - DNA, 15 bp, Homo sapiens
ggtggtggtaggatt

SEQ ID NO: 5567 - DNA, 15 bp, Homo sapiens
tggtggtggtaggat

SEQ ID NO: 5568 - DNA, 15 bp, Homo sapiens
gtggtggtggtagga

SEQ ID NO: 5569 - DNA, 15 bp, Homo sapiens
ggtggtggtggtagg

SEQ ID NO: 5570 - DNA, 15 bp, Homo sapiens
gggtggtggtggtag

SEQ ID NO: 5571 - DNA, 15 bp, Homo sapiens
tgggtggtggtggta

SEQ ID NO: 5572 - DNA, 15 bp, Homo sapiens
gtgggtggtggtggt

SEQ ID NO: 5573 - DNA, 15 bp, Homo sapiens
agtgggtggtggtgg

SEQ ID NO: 5574 - DNA, 15 bp, Homo sapiens
cagtgggtggtggtg

SEQ ID NO: 5575 - DNA, 15 bp, Homo sapiens
acagtgggtggtggt

SEQ ID NO: 5576 - DNA, 15 bp, Homo sapiens
aacagtgggtggtgg

SEQ ID NO: 5577 - DNA, 15 bp, Homo sapiens
aaacagtgggtggtg

SEQ ID NO: 5578 - DNA, 15 bp, Homo sapiens
caaacagtgggtggt

SEQ ID NO: 5579 - DNA, 15 bp, Homo sapiens
tcaaacagtgggtgg

SEQ ID NO: 5580 - DNA, 15 bp, Homo sapiens
ttcaaacagtgggtg

SEQ ID NO: 5581 - DNA, 15 bp, Homo sapiens
gttcaaacagtgggt

SEQ ID NO: 5582 - DNA, 15 bp, Homo sapiens
tgttcaaacagtggg

SEQ ID NO: 5583 - DNA, 15 bp, Homo sapiens
ttgttcaaacagtgg

SEQ ID NO: 5584 - DNA, 15 bp, Homo sapiens
gttgttcaaacagtg

SEQ ID NO: 5585 - DNA, 15 bp, Homo sapiens
ggttgttcaaacagt

SEQ ID NO: 5586 - DNA, 15 bp, Homo sapiens
gggttgttcaaacag

SEQ ID NO: 5587 - DNA, 15 bp, Homo sapiens
tgggttgttcaaaca

SEQ ID NO: 5588 - DNA, 15 bp, Homo sapiens
gtgggttgttcaaac

SEQ ID NO: 5589 - DNA, 15 bp, Homo sapiens
agtgggttgttcaaa

SEQ ID NO: 5590 - DNA, 15 bp, Homo sapiens
tagtgggttgttcaa

SEQ ID NO: 5591 - DNA, 15 bp, Homo sapiens
atagtgggttgttca

SEQ ID NO: 5592 - DNA, 15 bp, Homo sapiens
aatagtgggttgttc

SEQ ID NO: 5593 - DNA, 15 bp, Homo sapiens
taatagtgggttgtt

SEQ ID NO: 5594 - DNA, 15 bp, Homo sapiens
ataatagtgggttgt

SEQ ID NO: 5595 - DNA, 15 bp, Homo sapiens
aataatagtgggttg

SEQ ID NO: 5596 - DNA, 15 bp, Homo sapiens
aaataatagtgggtt

SEQ ID NO: 5597 - DNA, 15 bp, Homo sapiens
caaataatagtgggt

SEQ ID NO: 5598 - DNA, 15 bp, Homo sapiens
acaaataatagtggg

SEQ ID NO: 5599 - DNA, 15 bp, Homo sapiens
gacaaataatagtgg

SEQ ID NO: 5600 - DNA, 15 bp, Homo sapiens
agacaaataatagtg

SEQ ID NO: 5601 - DNA, 15 bp, Homo sapiens
cagacaaataatagt

SEQ ID NO: 5602 - DNA, 15 bp, Homo sapiens
acagacaaataatag

SEQ ID NO: 5603 - DNA, 15 bp, Homo sapiens
aacagacaaataata

SEQ ID NO: 5604 - DNA, 15 bp, Homo sapiens
aaacagacaaataat

SEQ ID NO: 5605 - DNA, 15 bp, Homo sapiens
gaaacagacaaataa

SEQ ID NO: 5606 - DNA, 15 bp, Homo sapiens
ggaaacagacaaata

SEQ ID NO: 5607 - DNA, 15 bp, Homo sapiens
gggaaacagacaaat

SEQ ID NO: 5608 - DNA, 15 bp, Homo sapiens
tgggaaacagacaaa

SEQ ID NO: 5609 - DNA, 15 bp, Homo sapiens
atgggaaacagacaa

SEQ ID NO: 5610 - DNA, 15 bp, Homo sapiens
gatgggaaacagaca

SEQ ID NO: 5611 - DNA, 15 bp, Homo sapiens
ggatgggaaacagac

SEQ ID NO: 5612 - DNA, 15 bp, Homo sapiens
gggatgggaaacaga

SEQ ID NO: 5613 - DNA, 15 bp, Homo sapiens
agggatgggaaacag

SEQ ID NO: 5614 - DNA, 15 bp, Homo sapiens
cagggatgggaaaca

SEQ ID NO: 5615 - DNA, 15 bp, Homo sapiens
ccagggatgggaaac

SEQ ID NO: 5616 - DNA, 15 bp, Homo sapiens
accagggatgggaaa

SEQ ID NO: 5617 - DNA, 15 bp, Homo sapiens
taccagggatgggaa

SEQ ID NO: 5618 - DNA, 15 bp, Homo sapiens
ctaccagggatggga

SEQ ID NO: 5619 - DNA, 15 bp, Homo sapiens
tctaccagggatggg

SEQ ID NO: 5620 - DNA, 15 bp, Homo sapiens
ttctaccagggatgg

SEQ ID NO: 5621 - DNA, 15 bp, Homo sapiens
attctaccagggatg

SEQ ID NO: 5622 - DNA, 15 bp, Homo sapiens
tattctaccagggat

SEQ ID NO: 5623 - DNA, 15 bp, Homo sapiens
ctattctaccaggga

SEQ ID NO: 5624 - DNA, 15 bp, Homo sapiens
cctattctaccaggg

SEQ ID NO: 5625 - DNA, 15 bp, Homo sapiens
tcctattctaccagg

SEQ ID NO: 5626 - DNA, 15 bp, Homo sapiens
ctcctattctaccag

SEQ ID NO: 5627 - DNA, 15 bp, Homo sapiens
gctcctattctacca

SEQ ID NO: 5628 - DNA, 15 bp, Homo sapiens
ggctcctattctacc

SEQ ID NO: 5629 - DNA, 15 bp, Homo sapiens
gggctcctattctac

SEQ ID NO: 5630 - DNA, 15 bp, Homo sapiens
ggggctcctattcta

SEQ ID NO: 5631 - DNA, 15 bp, Homo sapiens
tggggctcctattct

SEQ ID NO: 5632 - DNA, 15 bp, Homo sapiens
atggggctcctattc

SEQ ID NO: 5633 - DNA, 15 bp, Homo sapiens
catggggctcctatt

SEQ ID NO: 5634 - DNA, 15 bp, Homo sapiens
tcatggggctcctat

SEQ ID NO: 5635 - DNA, 15 bp, Homo sapiens
ttcatggggctccta

SEQ ID NO: 5636 - DNA, 15 bp, Homo sapiens
attcatggggctcct

SEQ ID NO: 5637 - DNA, 15 bp, Homo sapiens
cattcatggggctcc

SEQ ID NO: 5638 - DNA, 15 bp, Homo sapiens
tcattcatggggctc

SEQ ID NO: 5639 - DNA, 15 bp, Homo sapiens
ttcattcatggggct

SEQ ID NO: 5640 - DNA, 15 bp, Homo sapiens
cttcattcatggggc

SEQ ID NO: 5641 - DNA, 15 bp, Homo sapiens
ccttcattcatgggg

SEQ ID NO: 5642 - DNA, 15 bp, Homo sapiens
tccttcattcatggg

SEQ ID NO: 5643 - DNA, 15 bp, Homo sapiens
ttccttcattcatgg

SEQ ID NO: 5644 - DNA, 15 bp, Homo sapiens
gttccttcattcatg

SEQ ID NO: 5645 - DNA, 15 bp, Homo sapiens
agttccttcattcat

SEQ ID NO: 5646 - DNA, 15 bp, Homo sapiens
aagttccttcattca

SEQ ID NO: 5647 - DNA, 15 bp, Homo sapiens
aaagttccttcattc

SEQ ID NO: 5648 - DNA, 15 bp, Homo sapiens
caaagttccttcatt

SEQ ID NO: 5649 - DNA, 15 bp, Homo sapiens
gcaaagttccttcat

SEQ ID NO: 5650 - DNA, 15 bp, Homo sapiens
agcaaagttccttca

SEQ ID NO: 5651 - DNA, 15 bp, Homo sapiens
aagcaaagttccttc

SEQ ID NO: 5652 - DNA, 15 bp, Homo sapiens
gaagcaaagttcctt

SEQ ID NO: 5653 - DNA, 15 bp, Homo sapiens
agaagcaaagttcct

SEQ ID NO: 5654 - DNA, 15 bp, Homo sapiens
cagaagcaaagttcc

SEQ ID NO: 5655 - DNA, 15 bp, Homo sapiens
acagaagcaaagttc

SEQ ID NO: 5656 - DNA, 15 bp, Homo sapiens
aacagaagcaaagtt

SEQ ID NO: 5657 - DNA, 15 bp, Homo sapiens
caacagaagcaaagt

SEQ ID NO: 5658 - DNA, 15 bp, Homo sapiens
acaacagaagcaaag

SEQ ID NO: 5659 - DNA, 15 bp, Homo sapiens
aacaacagaagcaaa

SEQ ID NO: 5660 - DNA, 15 bp, Homo sapiens
gaacaacagaagcaa

SEQ ID NO: 5661 - DNA, 15 bp, Homo sapiens
tgaacaacagaagca

SEQ ID NO: 5662 - DNA, 15 bp, Homo sapiens
gtgaacaacagaagc

SEQ ID NO: 5663 - DNA, 15 bp, Homo sapiens
ggtgaacaacagaag

SEQ ID NO: 5664 - DNA, 15 bp, Homo sapiens
tggtgaacaacagaa

SEQ ID NO: 5665 - DNA, 15 bp, Homo sapiens
gtggtgaacaacaga

SEQ ID NO: 5666 - DNA, 15 bp, Homo sapiens
agtggtgaacaacag

SEQ ID NO: 5667 - DNA, 15 bp, Homo sapiens
cagtggtgaacaaca

SEQ ID NO: 5668 - DNA, 15 bp, Homo sapiens
tcagtggtgaacaac

SEQ ID NO: 5669 - DNA, 15 bp, Homo sapiens
ttcagtggtgaacaa

SEQ ID NO: 5670 - DNA, 15 bp, Homo sapiens
attcagtggtgaaca

SEQ ID NO: 5671 - DNA, 15 bp, Homo sapiens
gattcagtggtgaac

SEQ ID NO: 5672 - DNA, 15 bp, Homo sapiens
agattcagtggtgaa

SEQ ID NO: 5673 - DNA, 15 bp, Homo sapiens
gagattcagtggtga

SEQ ID NO: 5674 - DNA, 15 bp, Homo sapiens
agagattcagtggtg

SEQ ID NO: 5675 - DNA, 15 bp, Homo sapiens
tagagattcagtggt

SEQ ID NO: 5676 - DNA, 15 bp, Homo sapiens
ttagagattcagtgg

SEQ ID NO: 5677 - DNA, 15 bp, Homo sapiens
cttagagattcagtg

SEQ ID NO: 5678 - DNA, 15 bp, Homo sapiens
ccttagagattcagt

SEQ ID NO: 5679 - DNA, 15 bp, Homo sapiens
accttagagattcag

SEQ ID NO: 5680 - DNA, 15 bp, Homo sapiens
taccttagagattca

SEQ ID NO: 5681 - DNA, 15 bp, Homo sapiens
ataccttagagattc

SEQ ID NO: 5682 - DNA, 15 bp, Homo sapiens
cataccttagagatt

SEQ ID NO: 5683 - DNA, 15 bp, Homo sapiens
ccataccttagagat

SEQ ID NO: 5684 - DNA, 15 bp, Homo sapiens
tccataccttagaga

SEQ ID NO: 5685 - DNA, 15 bp, Homo sapiens
ttccataccttagag

SEQ ID NO: 5686 - DNA, 15 bp, Homo sapiens
gttccataccttaga

SEQ ID NO: 5687 - DNA, 15 bp, Homo sapiens
tgttccataccttag

SEQ ID NO: 5688 - DNA, 15 bp, Homo sapiens
gtgttccatacctta

SEQ ID NO: 5689 - DNA, 15 bp, Homo sapiens
tgtgttccatacctt

SEQ ID NO: 5690 - DNA, 15 bp, Homo sapiens
gtgtgttccatacct

SEQ ID NO: 5691 - DNA, 15 bp, Homo sapiens
ggtgtgttccatacc

SEQ ID NO: 5692 - DNA, 15 bp, Homo sapiens
aggtgtgttccatac

SEQ ID NO: 5693 - DNA, 15 bp, Homo sapiens
caggtgtgttccata

SEQ ID NO: 5694 - DNA, 15 bp, Homo sapiens
ccaggtgtgttccat

SEQ ID NO: 5695 - DNA, 15 bp, Homo sapiens
gccaggtgtgttcca

SEQ ID NO: 5696 - DNA, 15 bp, Homo sapiens
tgccaggtgtgttcc

SEQ ID NO: 5697 - DNA, 15 bp, Homo sapiens
atgccaggtgtgttc

SEQ ID NO: 5698 - DNA, 15 bp, Homo sapiens
catgccaggtgtgtt

SEQ ID NO: 5699 - DNA, 15 bp, Homo sapiens
acatgccaggtgtgt

SEQ ID NO: 5700 - DNA, 15 bp, Homo sapiens
cacatgccaggtgtg

SEQ ID NO: 5701 - DNA, 15 bp, Homo sapiens
tcacatgccaggtgt

SEQ ID NO: 5702 - DNA, 15 bp, Homo sapiens
atcacatgccaggtg

SEQ ID NO: 5703 - DNA, 15 bp, Homo sapiens
tatcacatgccaggt

SEQ ID NO: 5704 - DNA, 15 bp, Homo sapiens
ctatcacatgccagg

SEQ ID NO: 5705 - DNA, 15 bp, Homo sapiens
cctatcacatgccag

SEQ ID NO: 5706 - DNA, 15 bp, Homo sapiens
gcctatcacatgcca

SEQ ID NO: 5707 - DNA, 15 bp, Homo sapiens
tgcctatcacatgcc

SEQ ID NO: 5708 - DNA, 15 bp, Homo sapiens
gtgcctatcacatgc

SEQ ID NO: 5709 - DNA, 15 bp, Homo sapiens
agtgcctatcacatg

SEQ ID NO: 5710 - DNA, 15 bp, Homo sapiens
gagtgcctatcacat

SEQ ID NO: 5711 - DNA, 15 bp, Homo sapiens
cgagtgcctatcaca

SEQ ID NO: 5712 - DNA, 15 bp, Homo sapiens
tcgagtgcctatcac

SEQ ID NO: 5713 - DNA, 15 bp, Homo sapiens
atcgagtgcctatca

SEQ ID NO: 5714 - DNA, 15 bp, Homo sapiens
tatcgagtgcctatc

SEQ ID NO: 5715 - DNA, 15 bp, Homo sapiens
ttatcgagtgcctat

SEQ ID NO: 5716 - DNA, 15 bp, Homo sapiens
tttatcgagtgccta

SEQ ID NO: 5717 - DNA, 15 bp, Homo sapiens
atttatcgagtgcct

SEQ ID NO: 5718 - DNA, 15 bp, Homo sapiens
tatttatcgagtgcc

SEQ ID NO: 5719 - DNA, 15 bp, Homo sapiens
atatttatcgagtgc

SEQ ID NO: 5720 - DNA, 15 bp, Homo sapiens
aatatttatcgagtg

SEQ ID NO: 5721 - DNA, 15 bp, Homo sapiens
aaatatttatcgagt

SEQ ID NO: 5722 - DNA, 15 bp, Homo sapiens
caaatatttatcgag

SEQ ID NO: 5723 - DNA, 15 bp, Homo sapiens
acaaatatttatcga

SEQ ID NO: 5724 - DNA, 15 bp, Homo sapiens
aacaaatatttatcg

SEQ ID NO: 5725 - DNA, 15 bp, Homo sapiens
caacaaatatttatc

SEQ ID NO: 5726 - DNA, 15 bp, Homo sapiens
acaacaaatatttat

SEQ ID NO: 5727 - DNA, 15 bp, Homo sapiens
cacaacaaatattta

SEQ ID NO: 5728 - DNA, 15 bp, Homo sapiens
ccacaacaaatattt

SEQ ID NO: 5729 - DNA, 15 bp, Homo sapiens
gccacaacaaatatt

SEQ ID NO: 5730 - DNA, 15 bp, Homo sapiens
agccacaacaaatat

SEQ ID NO: 5731 - DNA, 15 bp, Homo sapiens
gagccacaacaaata

SEQ ID NO: 5732 - DNA, 15 bp, Homo sapiens
tgagccacaacaaat

SEQ ID NO: 5733 - DNA, 15 bp, Homo sapiens
atgagccacaacaaa

SEQ ID NO: 5734 - DNA, 15 bp, Homo sapiens
catgagccacaacaa

SEQ ID NO: 5735 - DNA, 15 bp, Homo sapiens
ccatgagccacaaca

SEQ ID NO: 5736 - DNA, 15 bp, Homo sapiens
cccatgagccacaac

SEQ ID NO: 5737 - DNA, 15 bp, Homo sapiens
gcccatgagccacaa

SEQ ID NO: 5738 - DNA, 15 bp, Homo sapiens
tgcccatgagccaca

SEQ ID NO: 5739 - DNA, 15 bp, Homo sapiens
gtgcccatgagccac

SEQ ID NO: 5740 - DNA, 15 bp, Homo sapiens
ggtgcccatgagcca

SEQ ID NO: 5741 - DNA, 15 bp, Homo sapiens
aggtgcccatgagcc

SEQ ID NO: 5742 - DNA, 15 bp, Homo sapiens
aaggtgcccatgagc

SEQ ID NO: 5743 - DNA, 15 bp, Homo sapiens
caaggtgcccatgag

SEQ ID NO: 5744 - DNA, 15 bp, Homo sapiens
gcaaggtgcccatga

SEQ ID NO: 5745 - DNA, 15 bp, Homo sapiens
tgcaaggtgcccatg

SEQ ID NO: 5746 - DNA, 15 bp, Homo sapiens
ctgcaaggtgcccat

SEQ ID NO: 5747 - DNA, 15 bp, Homo sapiens
tctgcaaggtgccca

SEQ ID NO: 5748 - DNA, 15 bp, Homo sapiens
ctctgcaaggtgccc

SEQ ID NO: 5749 - DNA, 15 bp, Homo sapiens
actctgcaaggtgcc

SEQ ID NO: 5750 - DNA, 15 bp, Homo sapiens
aactctgcaaggtgc

SEQ ID NO: 5751 - DNA, 15 bp, Homo sapiens
taactctgcaaggtg

SEQ ID NO: 5752 - DNA, 15 bp, Homo sapiens
ttaactctgcaaggt

SEQ ID NO: 5753 - DNA, 15 bp, Homo sapiens
cttaactctgcaagg

SEQ ID NO: 5754 - DNA, 15 bp, Homo sapiens
ccttaactctgcaag

SEQ ID NO: 5755 - DNA, 15 bp, Homo sapiens
gccttaactctgcaa

SEQ ID NO: 5756 - DNA, 15 bp, Homo sapiens
agccttaactctgca

SEQ ID NO: 5757 - DNA, 15 bp, Homo sapiens
cagccttaactctgc

SEQ ID NO: 5758 - DNA, 15 bp, Homo sapiens
gcagccttaactctg

SEQ ID NO: 5759 - DNA, 15 bp, Homo sapiens
tgcagccttaactct

SEQ ID NO: 5760 - DNA, 15 bp, Homo sapiens
ctgcagccttaactc

SEQ ID NO: 5761 - DNA, 15 bp, Homo sapiens
actgcagccttaact

SEQ ID NO: 5762 - DNA, 15 bp, Homo sapiens
aactgcagccttaac

SEQ ID NO: 5763 - DNA, 15 bp, Homo sapiens
caactgcagccttaa

SEQ ID NO: 5764 - DNA, 15 bp, Homo sapiens
acaactgcagcctta

SEQ ID NO: 5765 - DNA, 15 bp, Homo sapiens
aacaactgcagcctt

SEQ ID NO: 5766 - DNA, 15 bp, Homo sapiens
aaacaactgcagcct

SEQ ID NO: 5767 - DNA, 15 bp, Homo sapiens
caaacaactgcagcc

SEQ ID NO: 5768 - DNA, 15 bp, Homo sapiens
acaaacaactgcagc

SEQ ID NO: 5769 - DNA, 15 bp, Homo sapiens
cacaaacaactgcag

SEQ ID NO: 5770 - DNA, 15 bp, Homo sapiens
ccacaaacaactgca

SEQ ID NO: 5771 - DNA, 15 bp, Homo sapiens
tccacaaacaactgc

SEQ ID NO: 5772 - DNA, 15 bp, Homo sapiens
ttccacaaacaactg

SEQ ID NO: 5773 - DNA, 15 bp, Homo sapiens
attccacaaacaact

SEQ ID NO: 5774 - DNA, 15 bp, Homo sapiens
aattccacaaacaac

SEQ ID NO: 5775 - DNA, 15 bp, Homo sapiens
aaattccacaaacaa

SEQ ID NO: 5776 - DNA, 15 bp, Homo sapiens
taaattccacaaaca

SEQ ID NO: 5777 - DNA, 15 bp, Homo sapiens
ataaattccacaaac

SEQ ID NO: 5778 - DNA, 15 bp, Homo sapiens
tataaattccacaaa

SEQ ID NO: 5779 - DNA, 15 bp, Homo sapiens
ttataaattccacaa

SEQ ID NO: 5780 - DNA, 15 bp, Homo sapiens
cttataaattccaca

SEQ ID NO: 5781 - DNA, 15 bp, Homo sapiens
acttataaattccac

SEQ ID NO: 5782 - DNA, 15 bp, Homo sapiens
cacttataaattcca

SEQ ID NO: 5783 - DNA, 15 bp, Homo sapiens
ccacttataaattcc

SEQ ID NO: 5784 - DNA, 15 bp, Homo sapiens
accacttataaattc

SEQ ID NO: 5785 - DNA, 15 bp, Homo sapiens
taccacttataaatt

SEQ ID NO: 5786 - DNA, 15 bp, Homo sapiens
ttaccacttataaat

SEQ ID NO: 5787 - DNA, 15 bp, Homo sapiens
attaccacttataaa

SEQ ID NO: 5788 - DNA, 15 bp, Homo sapiens
cattaccacttataa

SEQ ID NO: 5789 - DNA, 15 bp, Homo sapiens
tcattaccacttata

SEQ ID NO: 5790 - DNA, 15 bp, Homo sapiens
ttcattaccacttat

SEQ ID NO: 5791 - DNA, 15 bp, Homo sapiens
attcattaccactta

SEQ ID NO: 5792 - DNA, 15 bp, Homo sapiens
tattcattaccactt

SEQ ID NO: 5793 - DNA, 15 bp, Homo sapiens
atattcattaccact

SEQ ID NO: 5794 - DNA, 15 bp, Homo sapiens
aatattcattaccac

SEQ ID NO: 5795 - DNA, 15 bp, Homo sapiens
aaatattcattacca

SEQ ID NO: 5796 - DNA, 15 bp, Homo sapiens
taaatattcattacc

SEQ ID NO: 5797 - DNA, 15 bp, Homo sapiens
ataaatattcattac

SEQ ID NO: 5798 - DNA, 15 bp, Homo sapiens
gataaatattcatta

SEQ ID NO: 5799 - DNA, 15 bp, Homo sapiens
agataaatattcatt

SEQ ID NO: 5800 - DNA, 15 bp, Homo sapiens
tagataaatattcat

SEQ ID NO: 5801 - DNA, 15 bp, Homo sapiens
gtagataaatattca

SEQ ID NO: 5802 - DNA, 15 bp, Homo sapiens
agtagataaatattc

SEQ ID NO: 5803 - DNA, 15 bp, Homo sapiens
tagtagataaatatt

SEQ ID NO: 5804 - DNA, 15 bp, Homo sapiens
atagtagataaatat

SEQ ID NO: 5805 - DNA, 15 bp, Homo sapiens
aatagtagataaata

SEQ ID NO: 5806 - DNA, 15 bp, Homo sapiens
gaatagtagataaat

SEQ ID NO: 5807 - DNA, 15 bp, Homo sapiens
ggaatagtagataaa

SEQ ID NO: 5808 - DNA, 15 bp, Homo sapiens
aggaatagtagataa

SEQ ID NO: 5809 - DNA, 15 bp, Homo sapiens
gaggaatagtagata

SEQ ID NO: 5810 - DNA, 15 bp, Homo sapiens
agaggaatagtagat

SEQ ID NO: 5811 - DNA, 15 bp, Homo sapiens
aagaggaatagtaga

SEQ ID NO: 5812 - DNA, 15 bp, Homo sapiens
gaagaggaatagtag

SEQ ID NO: 5813 - DNA, 15 bp, Homo sapiens
ggaagaggaatagta

SEQ ID NO: 5814 - DNA, 15 bp, Homo sapiens
tggaagaggaatagt

SEQ ID NO: 5815 - DNA, 15 bp, Homo sapiens
ttggaagaggaatag

SEQ ID NO: 5816 - DNA, 15 bp, Homo sapiens
cttggaagaggaata

SEQ ID NO: 5817 - DNA, 15 bp, Homo sapiens
ccttggaagaggaat

SEQ ID NO: 5818 - DNA, 15 bp, Homo sapiens
gccttggaagaggaa

SEQ ID NO: 5819 - DNA, 15 bp, Homo sapiens
cgccttggaagagga

SEQ ID NO: 5820 - DNA, 15 bp, Homo sapiens
tcgccttggaagagg

SEQ ID NO: 5821 - DNA, 15 bp, Homo sapiens
atcgccttggaagag

SEQ ID NO: 5822 - DNA, 15 bp, Homo sapiens
gatcgccttggaaga

SEQ ID NO: 5823 - DNA, 15 bp, Homo sapiens
tgatcgccttggaag

SEQ ID NO: 5824 - DNA, 15 bp, Homo sapiens
gtgatcgccttggaa

SEQ ID NO: 5825 - DNA, 15 bp, Homo sapiens
tgtgatcgccttgga

SEQ ID NO: 5826 - DNA, 15 bp, Homo sapiens
gtgtgatcgccttgg

SEQ ID NO: 5827 - DNA, 15 bp, Homo sapiens
tgtgtgatcgccttg

SEQ ID NO: 5828 - DNA, 15 bp, Homo sapiens
ttgtgtgatcgcctt

SEQ ID NO: 5829 - DNA, 15 bp, Homo sapiens
attgtgtgatcgcct

SEQ ID NO: 5830 - DNA, 15 bp, Homo sapiens
tattgtgtgatcgcc

SEQ ID NO: 5831 - DNA, 15 bp, Homo sapiens
ttattgtgtgatcgc

SEQ ID NO: 5832 - DNA, 15 bp, Homo sapiens
attattgtgtgatcg

SEQ ID NO: 5833 - DNA, 15 bp, Homo sapiens
gattattgtgtgatc

SEQ ID NO: 5834 - DNA, 15 bp, Homo sapiens
tgattattgtgtgat

SEQ ID NO: 5835 - DNA, 15 bp, Homo sapiens
ctgattattgtgtga

SEQ ID NO: 5836 - DNA, 15 bp, Homo sapiens
cctgattattgtgtg

SEQ ID NO: 5837 - DNA, 15 bp, Homo sapiens
gcctgattattgtgt

SEQ ID NO: 5838 - DNA, 15 bp, Homo sapiens
agcctgattattgtg

SEQ ID NO: 5839 - DNA, 15 bp, Homo sapiens
aagcctgattattgt

SEQ ID NO: 5840 - DNA, 15 bp, Homo sapiens
aaagcctgattattg

SEQ ID NO: 5841 - DNA, 15 bp, Homo sapiens
taaagcctgattatt

SEQ ID NO: 5842 - DNA, 15 bp, Homo sapiens
gtaaagcctgattat

SEQ ID NO: 5843 - DNA, 15 bp, Homo sapiens
tgtaaagcctgatta

SEQ ID NO: 5844 - DNA, 15 bp, Homo sapiens
gtgtaaagcctgatt

SEQ ID NO: 5845 - DNA, 15 bp, Homo sapiens
agtgtaaagcctgat

SEQ ID NO: 5846 - DNA, 15 bp, Homo sapiens
tagtgtaaagcctga

SEQ ID NO: 5847 - DNA, 15 bp, Homo sapiens
atagtgtaaagcctg

SEQ ID NO: 5848 - DNA, 15 bp, Homo sapiens
gatagtgtaaagcct

SEQ ID NO: 5849 - DNA, 15 bp, Homo sapiens
ggatagtgtaaagcc

SEQ ID NO: 5850 - DNA, 15 bp, Homo sapiens
tggatagtgtaaagc

SEQ ID NO: 5851 - DNA, 15 bp, Homo sapiens
ctggatagtgtaaag

SEQ ID NO: 5852 - DNA, 15 bp, Homo sapiens
actggatagtgtaaa

SEQ ID NO: 5853 - DNA, 15 bp, Homo sapiens
aactggatagtgtaa

SEQ ID NO: 5854 - DNA, 15 bp, Homo sapiens
gaactggatagtgta

SEQ ID NO: 5855 - DNA, 15 bp, Homo sapiens
agaactggatagtgt

SEQ ID NO: 5856 - DNA, 15 bp, Homo sapiens
aagaactggatagtg

SEQ ID NO: 5857 - DNA, 15 bp, Homo sapiens
taagaactggatagt

SEQ ID NO: 5858 - DNA, 15 bp, Homo sapiens
ctaagaactggatag

SEQ ID NO: 5859 - DNA, 15 bp, Homo sapiens
cctaagaactggata

SEQ ID NO: 5860 - DNA, 15 bp, Homo sapiens
acctaagaactggat

SEQ ID NO: 5861 - DNA, 15 bp, Homo sapiens
gacctaagaactgga

SEQ ID NO: 5862 - DNA, 15 bp, Homo sapiens
agacctaagaactgg

SEQ ID NO: 5863 - DNA, 15 bp, Homo sapiens
aagacctaagaactg

SEQ ID NO: 5864 - DNA, 15 bp, Homo sapiens
gaagacctaagaact

SEQ ID NO: 5865 - DNA, 15 bp, Homo sapiens
ggaagacctaagaac

SEQ ID NO: 5866 - DNA, 15 bp, Homo sapiens
tggaagacctaagaa

SEQ ID NO: 5867 - DNA, 15 bp, Homo sapiens
ttggaagacctaaga

SEQ ID NO: 5868 - DNA, 15 bp, Homo sapiens
cttggaagacctaag

SEQ ID NO: 5869 - DNA, 15 bp, Homo sapiens
acttggaagacctaa

SEQ ID NO: 5870 - DNA, 15 bp, Homo sapiens
aacttggaagaccta

SEQ ID NO: 5871 - DNA, 15 bp, Homo sapiens
taacttggaagacct

SEQ ID NO: 5872 - DNA, 15 bp, Homo sapiens
ataacttggaagacc

SEQ ID NO: 5873 - DNA, 15 bp, Homo sapiens
cataacttggaagac

SEQ ID NO: 5874 - DNA, 15 bp, Homo sapiens
tcataacttggaaga

SEQ ID NO: 5875 - DNA, 15 bp, Homo sapiens
gtcataacttggaag

SEQ ID NO: 5876 - DNA, 15 bp, Homo sapiens
agtcataacttggaa

SEQ ID NO: 5877 - DNA, 15 bp, Homo sapiens
aagtcataacttgga

SEQ ID NO: 5878 - DNA, 15 bp, Homo sapiens
caagtcataacttgg

SEQ ID NO: 5879 - DNA, 15 bp, Homo sapiens
acaagtcataacttg

SEQ ID NO: 5880 - DNA, 15 bp, Homo sapiens
cacaagtcataactt

SEQ ID NO: 5881 - DNA, 15 bp, Homo sapiens
tcacaagtcataact

SEQ ID NO: 5882 - DNA, 15 bp, Homo sapiens
ctcacaagtcataac

SEQ ID NO: 5883 - DNA, 15 bp, Homo sapiens
cctcacaagtcataa

SEQ ID NO: 5884 - DNA, 15 bp, Homo sapiens
acctcacaagtcata

SEQ ID NO: 5885 - DNA, 15 bp, Homo sapiens
tacctcacaagtcat

SEQ ID NO: 5886 - DNA, 15 bp, Homo sapiens
atacctcacaagtca

SEQ ID NO: 5887 - DNA, 15 bp, Homo sapiens
catacctcacaagtc

SEQ ID NO: 5888 - DNA, 15 bp, Homo sapiens
acatacctcacaagt

SEQ ID NO: 5889 - DNA, 15 bp, Homo sapiens
aacatacctcacaag

SEQ ID NO: 5890 - DNA, 15 bp, Homo sapiens
taacatacctcacaa

SEQ ID NO: 5891 - DNA, 15 bp, Homo sapiens
ttaacatacctcaca

SEQ ID NO: 5892 - DNA, 15 bp, Homo sapiens
attaacatacctcac

SEQ ID NO: 5893 - DNA, 15 bp, Homo sapiens
aattaacatacctca

SEQ ID NO: 5894 - DNA, 15 bp, Homo sapiens
taattaacatacctc

SEQ ID NO: 5895 - DNA, 15 bp, Homo sapiens
ataattaacatacct

SEQ ID NO: 5896 - DNA, 15 bp, Homo sapiens
cataattaacatacc

SEQ ID NO: 5897 - DNA, 15 bp, Homo sapiens
tcataattaacatac

SEQ ID NO: 5898 - DNA, 15 bp, Homo sapiens
atcataattaacata

SEQ ID NO: 5899 - DNA, 15 bp, Homo sapiens
tatcataattaacat

SEQ ID NO: 5900 - DNA, 15 bp, Homo sapiens
ttatcataattaaca

SEQ ID NO: 5901 - DNA, 15 bp, Homo sapiens
attatcataattaac

SEQ ID NO: 5902 - DNA, 15 bp, Homo sapiens
tattatcataattaa

SEQ ID NO: 5903 - DNA, 15 bp, Homo sapiens
ctattatcataatta

SEQ ID NO: 5904 - DNA, 15 bp, Homo sapiens
tctattatcataatt

SEQ ID NO: 5905 - DNA, 15 bp, Homo sapiens
ttctattatcataat

SEQ ID NO: 5906 - DNA, 15 bp, Homo sapiens
cttctattatcataa

SEQ ID NO: 5907 - DNA, 15 bp, Homo sapiens
ccttctattatcata

SEQ ID NO: 5908 - DNA, 15 bp, Homo sapiens
gccttctattatcat

SEQ ID NO: 5909 - DNA, 15 bp, Homo sapiens
tgccttctattatca

SEQ ID NO: 5910 - DNA, 15 bp, Homo sapiens
ctgccttctattatc

SEQ ID NO: 5911 - DNA, 15 bp, Homo sapiens
actgccttctattat

SEQ ID NO: 5912 - DNA, 15 bp, Homo sapiens
aactgccttctatta

SEQ ID NO: 5913 - DNA, 15 bp, Homo sapiens
aaactgccttctatt

SEQ ID NO: 5914 - DNA, 15 bp, Homo sapiens
taaactgccttctat

SEQ ID NO: 5915 - DNA, 15 bp, Homo sapiens
ataaactgccttcta

SEQ ID NO: 5916 - DNA, 15 bp, Homo sapiens
aataaactgccttct

SEQ ID NO: 5917 - DNA, 15 bp, Homo sapiens
aaataaactgccttc

SEQ ID NO: 5918 - DNA, 15 bp, Homo sapiens
caaataaactgcctt

SEQ ID NO: 5919 - DNA, 15 bp, Homo sapiens
ccaaataaactgcct

SEQ ID NO: 5920 - DNA, 15 bp, Homo sapiens
accaaataaactgcc

SEQ ID NO: 5921 - DNA, 15 bp, Homo sapiens
aaccaaataaactgc

SEQ ID NO: 5922 - DNA, 15 bp, Homo sapiens
gaaccaaataaactg

SEQ ID NO: 5923 - DNA, 15 bp, Homo sapiens
tgaaccaaataaact

SEQ ID NO: 5924 - DNA, 15 bp, Homo sapiens
ctgaaccaaataaac

SEQ ID NO: 5925 - DNA, 15 bp, Homo sapiens
tctgaaccaaataaa

SEQ ID NO: 5926 - DNA, 15 bp, Homo sapiens
atctgaaccaaataa

SEQ ID NO: 5927 - DNA, 15 bp, Homo sapiens
aatctgaaccaaata

SEQ ID NO: 5928 - DNA, 15 bp, Homo sapiens
aaatctgaaccaaat

SEQ ID NO: 5929 - DNA, 15 bp, Homo sapiens
taaatctgaaccaaa

SEQ ID NO: 5930 - DNA, 15 bp, Homo sapiens
ataaatctgaaccaa

SEQ ID NO: 5931 - DNA, 15 bp, Homo sapiens
aataaatctgaacca

SEQ ID NO: 5932 - DNA, 15 bp, Homo sapiens
caataaatctgaacc

SEQ ID NO: 5933 - DNA, 15 bp, Homo sapiens
tcaataaatctgaac

SEQ ID NO: 5934 - DNA, 15 bp, Homo sapiens
atcaataaatctgaa

SEQ ID NO: 5935 - DNA, 15 bp, Homo sapiens
catcaataaatctga

SEQ ID NO: 5936 - DNA, 15 bp, Homo sapiens
acatcaataaatctg

SEQ ID NO: 5937 - DNA, 15 bp, Homo sapiens
cacatcaataaatct

SEQ ID NO: 5938 - DNA, 15 bp, Homo sapiens
acacatcaataaatc

SEQ ID NO: 5939 - DNA, 15 bp, Homo sapiens
tacacatcaataaat

SEQ ID NO: 5940 - DNA, 15 bp, Homo sapiens
ttacacatcaataaa

SEQ ID NO: 5941 - DNA, 15 bp, Homo sapiens
attacacatcaataa

SEQ ID NO: 5942 - DNA, 15 bp, Homo sapiens
aattacacatcaata

SEQ ID NO: 5943 - DNA, 15 bp, Homo sapiens
aaattacacatcaat

SEQ ID NO: 5944 - DNA, 15 bp, Homo sapiens
taaattacacatcaa

SEQ ID NO: 5945 - DNA, 15 bp, Homo sapiens
gtaaattacacatca

SEQ ID NO: 5946 - DNA, 15 bp, Homo sapiens
ggtaaattacacatc

SEQ ID NO: 5947 - DNA, 15 bp, Homo sapiens
tggtaaattacacat

SEQ ID NO: 5948 - DNA, 15 bp, Homo sapiens
gtggtaaattacaca

SEQ ID NO: 5949 - DNA, 15 bp, Homo sapiens
tgtggtaaattacac

SEQ ID NO: 5950 - DNA, 15 bp, Homo sapiens
ctgtggtaaattaca

SEQ ID NO: 5951 - DNA, 15 bp, Homo sapiens
actgtggtaaattac

SEQ ID NO: 5952 - DNA, 15 bp, Homo sapiens
tactgtggtaaatta

SEQ ID NO: 5953 - DNA, 15 bp, Homo sapiens
ttactgtggtaaatt

SEQ ID NO: 5954 - DNA, 15 bp, Homo sapiens
cttactgtggtaaat

SEQ ID NO: 5955 - DNA, 15 bp, Homo sapiens
tcttactgtggtaaa

SEQ ID NO: 5956 - DNA, 15 bp, Homo sapiens
gtcttactgtggtaa

SEQ ID NO: 5957 - DNA, 15 bp, Homo sapiens
agtcttactgtggta

SEQ ID NO: 5958 - DNA, 15 bp, Homo sapiens
aagtcttactgtggt

SEQ ID NO: 5959 - DNA, 15 bp, Homo sapiens
gaagtcttactgtgg

SEQ ID NO: 5960 - DNA, 15 bp, Homo sapiens
ggaagtcttactgtg

SEQ ID NO: 5961 - DNA, 15 bp, Homo sapiens
gggaagtcttactgt

SEQ ID NO: 5962 - DNA, 15 bp, Homo sapiens
ggggaagtcttactg

SEQ ID NO: 5963 - DNA, 15 bp, Homo sapiens
aggggaagtcttact

SEQ ID NO: 5964 - DNA, 15 bp, Homo sapiens
aaggggaagtcttac

SEQ ID NO: 5965 - DNA, 15 bp, Homo sapiens
aaaggggaagtctta

SEQ ID NO: 5966 - DNA, 15 bp, Homo sapiens
taaaggggaagtctt

SEQ ID NO: 5967 - DNA, 15 bp, Homo sapiens
gtaaaggggaagtct

SEQ ID NO: 5968 - DNA, 15 bp, Homo sapiens
tgtaaaggggaagtc

SEQ ID NO: 5969 - DNA, 15 bp, Homo sapiens
ttgtaaaggggaagt

SEQ ID NO: 5970 - DNA, 15 bp, Homo sapiens
tttgtaaaggggaag

SEQ ID NO: 5971 - DNA, 15 bp, Homo sapiens
ttttgtaaaggggaa

SEQ ID NO: 5972 - DNA, 15 bp, Homo sapiens
cttttgtaaagggga

SEQ ID NO: 5973 - DNA, 15 bp, Homo sapiens
acttttgtaaagggg

SEQ ID NO: 5974 - DNA, 15 bp, Homo sapiens
tacttttgtaaaggg

SEQ ID NO: 5975 - DNA, 15 bp, Homo sapiens
atacttttgtaaagg

SEQ ID NO: 5976 - DNA, 15 bp, Homo sapiens
catacttttgtaaag

SEQ ID NO: 5977 - DNA, 15 bp, Homo sapiens
tcatacttttgtaaa

SEQ ID NO: 5978 - DNA, 15 bp, Homo sapiens
atcatacttttgtaa

SEQ ID NO: 5979 - DNA, 15 bp, Homo sapiens
catcatacttttgta

SEQ ID NO: 5980 - DNA, 15 bp, Homo sapiens
tcatcatacttttgt

SEQ ID NO: 5981 - DNA, 15 bp, Homo sapiens
ctcatcatacttttg

SEQ ID NO: 5982 - DNA, 15 bp, Homo sapiens
actcatcatactttt

SEQ ID NO: 5983 - DNA, 15 bp, Homo sapiens
aactcatcatacttt

SEQ ID NO: 5984 - DNA, 15 bp, Homo sapiens
aaactcatcatactt

SEQ ID NO: 5985 - DNA, 15 bp, Homo sapiens
aaaactcatcatact

SEQ ID NO: 5986 - DNA, 15 bp, Homo sapiens
caaaactcatcatac

SEQ ID NO: 5987 - DNA, 15 bp, Homo sapiens
tcaaaactcatcata

SEQ ID NO: 5988 - DNA, 15 bp, Homo sapiens
gtcaaaactcatcat

SEQ ID NO: 5989 - DNA, 15 bp, Homo sapiens
tgtcaaaactcatca

SEQ ID NO: 5990 - DNA, 15 bp, Homo sapiens
ttgtcaaaactcatc

SEQ ID NO: 5991 - DNA, 15 bp, Homo sapiens
tttgtcaaaactcat

SEQ ID NO: 5992 - DNA, 15 bp, Homo sapiens
atttgtcaaaactca

SEQ ID NO: 5993 - DNA, 15 bp, Homo sapiens
catttgtcaaaactc

SEQ ID NO: 5994 - DNA, 15 bp, Homo sapiens
ccatttgtcaaaact

SEQ ID NO: 5995 - DNA, 15 bp, Homo sapiens
tccatttgtcaaaac

SEQ ID NO: 5996 - DNA, 15 bp, Homo sapiens
atccatttgtcaaaa

SEQ ID NO: 5997 - DNA, 15 bp, Homo sapiens
tatccatttgtcaaa

SEQ ID NO: 5998 - DNA, 15 bp, Homo sapiens
gtatccatttgtcaa

SEQ ID NO: 5999 - DNA, 15 bp, Homo sapiens
tgtatccatttgtca

SEQ ID NO: 6000 - DNA, 15 bp, Homo sapiens
gtgtatccatttgtc

SEQ ID NO: 6001 - DNA, 15 bp, Homo sapiens
tgtgtatccatttgt

SEQ ID NO: 6002 - DNA, 15 bp, Homo sapiens
atgtgtatccatttg

SEQ ID NO: 6003 - DNA, 15 bp, Homo sapiens
catgtgtatccattt

SEQ ID NO: 6004 - DNA, 15 bp, Homo sapiens
acatgtgtatccatt

SEQ ID NO: 6005 - DNA, 15 bp, Homo sapiens
cacatgtgtatccat

SEQ ID NO: 6006 - DNA, 15 bp, Homo sapiens
acacatgtgtatcca

SEQ ID NO: 6007 - DNA, 15 bp, Homo sapiens
tacacatgtgtatcc

SEQ ID NO: 6008 - DNA, 15 bp, Homo sapiens
atacacatgtgtatc

SEQ ID NO: 6009 - DNA, 15 bp, Homo sapiens
gatacacatgtgtat

SEQ ID NO: 6010 - DNA, 15 bp, Homo sapiens
agatacacatgtgta

SEQ ID NO: 6011 - DNA, 15 bp, Homo sapiens
tagatacacatgtgt

SEQ ID NO: 6012 - DNA, 15 bp, Homo sapiens
gtagatacacatgtg

SEQ ID NO: 6013 - DNA, 15 bp, Homo sapiens
ggtagatacacatgt

SEQ ID NO: 6014 - DNA, 15 bp, Homo sapiens
tggtagatacacatg

SEQ ID NO: 6015 - DNA, 15 bp, Homo sapiens
gtggtagatacacat

SEQ ID NO: 6016 - DNA, 15 bp, Homo sapiens
agtggtagatacaca

SEQ ID NO: 6017 - DNA, 15 bp, Homo sapiens
cagtggtagatacac

SEQ ID NO: 6018 - DNA, 15 bp, Homo sapiens
gcagtggtagataca

SEQ ID NO: 6019 - DNA, 15 bp, Homo sapiens
ggcagtggtagatac

SEQ ID NO: 6020 - DNA, 15 bp, Homo sapiens
tggcagtggtagata

SEQ ID NO: 6021 - DNA, 15 bp, Homo sapiens
atggcagtggtagat

SEQ ID NO: 6022 - DNA, 15 bp, Homo sapiens
catggcagtggtaga

SEQ ID NO: 6023 - DNA, 15 bp, Homo sapiens
gcatggcagtggtag

SEQ ID NO: 6024 - DNA, 15 bp, Homo sapiens
agcatggcagtggta

SEQ ID NO: 6025 - DNA, 15 bp, Homo sapiens
gagcatggcagtggt

SEQ ID NO: 6026 - DNA, 15 bp, Homo sapiens
ggagcatggcagtgg

SEQ ID NO: 6027 - DNA, 15 bp, Homo sapiens
aggagcatggcagtg

SEQ ID NO: 6028 - DNA, 15 bp, Homo sapiens
aaggagcatggcagt

SEQ ID NO: 6029 - DNA, 15 bp, Homo sapiens
aaaggagcatggcag

SEQ ID NO: 6030 - DNA, 15 bp, Homo sapiens
aaaaggagcatggca

SEQ ID NO: 6031 - DNA, 15 bp, Homo sapiens
gaaaaggagcatggc

SEQ ID NO: 6032 - DNA, 15 bp, Homo sapiens
tgaaaaggagcatgg

SEQ ID NO: 6033 - DNA, 15 bp, Homo sapiens
ctgaaaaggagcatg

SEQ ID NO: 6034 - DNA, 15 bp, Homo sapiens
actgaaaaggagcat

SEQ ID NO: 6035 - DNA, 15 bp, Homo sapiens
gactgaaaaggagca

SEQ ID NO: 6036 - DNA, 15 bp, Homo sapiens
agactgaaaaggagc

SEQ ID NO: 6037 - DNA, 15 bp, Homo sapiens
cagactgaaaaggag

SEQ ID NO: 6038 - DNA, 15 bp, Homo sapiens
acagactgaaaagga

SEQ ID NO: 6039 - DNA, 15 bp, Homo sapiens
gacagactgaaaagg

SEQ ID NO: 6040 - DNA, 15 bp, Homo sapiens
cgacagactgaaaag

SEQ ID NO: 6041 - DNA, 15 bp, Homo sapiens
acgacagactgaaaa

SEQ ID NO: 6042 - DNA, 15 bp, Homo sapiens
gacgacagactgaaa

SEQ ID NO: 6043 - DNA, 15 bp, Homo sapiens
ggacgacagactgaa

SEQ ID NO: 6044 - DNA, 15 bp, Homo sapiens
gggacgacagactga

SEQ ID NO: 6045 - DNA, 15 bp, Homo sapiens
ggggacgacagactg

SEQ ID NO: 6046 - DNA, 15 bp, Homo sapiens
aggggacgacagact

SEQ ID NO: 6047 - DNA, 15 bp, Homo sapiens
gaggggacgacagac

SEQ ID NO: 6048 - DNA, 15 bp, Homo sapiens
ggaggggacgacaga

SEQ ID NO: 6049 - DNA, 15 bp, Homo sapiens
tggaggggacgacag

SEQ ID NO: 6050 - DNA, 15 bp, Homo sapiens
gtggaggggacgaca

SEQ ID NO: 6051 - DNA, 15 bp, Homo sapiens
ggtggaggggacgac

SEQ ID NO: 6052 - DNA, 15 bp, Homo sapiens
gggtggaggggacga

SEQ ID NO: 6053 - DNA, 15 bp, Homo sapiens
tgggtggaggggacg

SEQ ID NO: 6054 - DNA, 15 bp, Homo sapiens
atgggtggaggggac

SEQ ID NO: 6055 - DNA, 15 bp, Homo sapiens
catgggtggagggga

SEQ ID NO: 6056 - DNA, 15 bp, Homo sapiens
tcatgggtggagggg

SEQ ID NO: 6057 - DNA, 15 bp, Homo sapiens
gtcatgggtggaggg

SEQ ID NO: 6058 - DNA, 15 bp, Homo sapiens
ggtcatgggtggagg

SEQ ID NO: 6059 - DNA, 15 bp, Homo sapiens
tggtcatgggtggag

SEQ ID NO: 6060 - DNA, 15 bp, Homo sapiens
gtggtcatgggtgga

SEQ ID NO: 6061 - DNA, 15 bp, Homo sapiens
agtggtcatgggtgg

SEQ ID NO: 6062 - DNA, 15 bp, Homo sapiens
cagtggtcatgggtg

SEQ ID NO: 6063 - DNA, 15 bp, Homo sapiens
ccagtggtcatgggt

SEQ ID NO: 6064 - DNA, 15 bp, Homo sapiens
accagtggtcatggg

SEQ ID NO: 6065 - DNA, 15 bp, Homo sapiens
gaccagtggtcatgg

SEQ ID NO: 6066 - DNA, 15 bp, Homo sapiens
tgaccagtggtcatg

SEQ ID NO: 6067 - DNA, 15 bp, Homo sapiens
gtgaccagtggtcat

SEQ ID NO: 6068 - DNA, 15 bp, Homo sapiens
ggtgaccagtggtca

SEQ ID NO: 6069 - DNA, 15 bp, Homo sapiens
tggtgaccagtggtc

SEQ ID NO: 6070 - DNA, 15 bp, Homo sapiens
gtggtgaccagtggt

SEQ ID NO: 6071 - DNA, 15 bp, Homo sapiens
agtggtgaccagtgg

SEQ ID NO: 6072 - DNA, 15 bp, Homo sapiens
cagtggtgaccagtg

SEQ ID NO: 6073 - DNA, 15 bp, Homo sapiens
gcagtggtgaccagt

SEQ ID NO: 6074 - DNA, 15 bp, Homo sapiens
tgcagtggtgaccag

SEQ ID NO: 6075 - DNA, 15 bp, Homo sapiens
ctgcagtggtgacca

SEQ ID NO: 6076 - DNA, 15 bp, Homo sapiens
actgcagtggtgacc

SEQ ID NO: 6077 - DNA, 15 bp, Homo sapiens
cactgcagtggtgac

SEQ ID NO: 6078 - DNA, 15 bp, Homo sapiens
tcactgcagtggtga

SEQ ID NO: 6079 - DNA, 15 bp, Homo sapiens
atcactgcagtggtg

SEQ ID NO: 6080 - DNA, 15 bp, Homo sapiens
aatcactgcagtggt

SEQ ID NO: 6081 - DNA, 15 bp, Homo sapiens
aaatcactgcagtgg

SEQ ID NO: 6082 - DNA, 15 bp, Homo sapiens
gaaatcactgcagtg

SEQ ID NO: 6083 - DNA, 15 bp, Homo sapiens
agaaatcactgcagt

SEQ ID NO: 6084 - DNA, 15 bp, Homo sapiens
cagaaatcactgcag

SEQ ID NO: 6085 - DNA, 15 bp, Homo sapiens
acagaaatcactgca

SEQ ID NO: 6086 - DNA, 15 bp, Homo sapiens
gacagaaatcactgc

SEQ ID NO: 6087 - DNA, 15 bp, Homo sapiens
ggacagaaatcactg

SEQ ID NO: 6088 - DNA, 15 bp, Homo sapiens
gggacagaaatcact

SEQ ID NO: 6089 - DNA, 15 bp, Homo sapiens
ggggacagaaatcac

SEQ ID NO: 6090 - DNA, 15 bp, Homo sapiens
aggggacagaaatca

SEQ ID NO: 6091 - DNA, 15 bp, Homo sapiens
aaggggacagaaatc

SEQ ID NO: 6092 - DNA, 15 bp, Homo sapiens
gaaggggacagaaat

SEQ ID NO: 6093 - DNA, 15 bp, Homo sapiens
tgaaggggacagaaa

SEQ ID NO: 6094 - DNA, 15 bp, Homo sapiens
atgaaggggacagaa

SEQ ID NO: 6095 - DNA, 15 bp, Homo sapiens
aatgaaggggacaga

SEQ ID NO: 6096 - DNA, 15 bp, Homo sapiens
aaatgaaggggacag

SEQ ID NO: 6097 - DNA, 15 bp, Homo sapiens
gaaatgaaggggaca

SEQ ID NO: 6098 - DNA, 15 bp, Homo sapiens
tgaaatgaaggggac

SEQ ID NO: 6099 - DNA, 15 bp, Homo sapiens
gtgaaatgaagggga

SEQ ID NO: 6100 - DNA, 15 bp, Homo sapiens
ggtgaaatgaagggg

SEQ ID NO: 6101 - DNA, 15 bp, Homo sapiens
aggtgaaatgaaggg

SEQ ID NO: 6102 - DNA, 15 bp, Homo sapiens
aaggtgaaatgaagg

SEQ ID NO: 6103 - DNA, 15 bp, Homo sapiens
aaaggtgaaatgaag

SEQ ID NO: 6104 - DNA, 15 bp, Homo sapiens
aaaaggtgaaatgaa

SEQ ID NO: 6105 - DNA, 15 bp, Homo sapiens
gaaaaggtgaaatga

SEQ ID NO: 6106 - DNA, 15 bp, Homo sapiens
ggaaaaggtgaaatg

SEQ ID NO: 6107 - DNA, 15 bp, Homo sapiens
tggaaaaggtgaaat

SEQ ID NO: 6108 - DNA, 15 bp, Homo sapiens
ctggaaaaggtgaaa

SEQ ID NO: 6109 - DNA, 15 bp, Homo sapiens
tctggaaaaggtgaa

SEQ ID NO: 6110 - DNA, 15 bp, Homo sapiens
ttctggaaaaggtga

SEQ ID NO: 6111 - DNA, 15 bp, Homo sapiens
attctggaaaaggtg

SEQ ID NO: 6112 - DNA, 15 bp, Homo sapiens
cattctggaaaaggt

SEQ ID NO: 6113 - DNA, 15 bp, Homo sapiens
acattctggaaaagg

SEQ ID NO: 6114 - DNA, 15 bp, Homo sapiens
gacattctggaaaag

SEQ ID NO: 6115 - DNA, 15 bp, Homo sapiens
tgacattctggaaaa

SEQ ID NO: 6116 - DNA, 15 bp, Homo sapiens
atgacattctggaaa

SEQ ID NO: 6117 - DNA, 15 bp, Homo sapiens
tatgacattctggaa

SEQ ID NO: 6118 - DNA, 15 bp, Homo sapiens
atatgacattctgga

SEQ ID NO: 6119 - DNA, 15 bp, Homo sapiens
tatatgacattctgg

SEQ ID NO: 6120 - DNA, 15 bp, Homo sapiens
ttatatgacattctg

SEQ ID NO: 6121 - DNA, 15 bp, Homo sapiens
tttatatgacattct

SEQ ID NO: 6122 - DNA, 15 bp, Homo sapiens
atttatatgacattc

SEQ ID NO: 6123 - DNA, 15 bp, Homo sapiens
catttatatgacatt

SEQ ID NO: 6124 - DNA, 15 bp, Homo sapiens
ccatttatatgacat

SEQ ID NO: 6125 - DNA, 15 bp, Homo sapiens
tccatttatatgaca

SEQ ID NO: 6126 - DNA, 15 bp, Homo sapiens
ttccatttatatgac

SEQ ID NO: 6127 - DNA, 15 bp, Homo sapiens
attccatttatatga

SEQ ID NO: 6128 - DNA, 15 bp, Homo sapiens
gattccatttatatg

SEQ ID NO: 6129 - DNA, 15 bp, Homo sapiens
tgattccatttatat

SEQ ID NO: 6130 - DNA, 15 bp, Homo sapiens
atgattccatttata

SEQ ID NO: 6131 - DNA, 15 bp, Homo sapiens
catgattccatttat

SEQ ID NO: 6132 - DNA, 15 bp, Homo sapiens
gcatgattccattta

SEQ ID NO: 6133 - DNA, 15 bp, Homo sapiens
tgcatgattccattt

SEQ ID NO: 6134 - DNA, 15 bp, Homo sapiens
ctgcatgattccatt

SEQ ID NO: 6135 - DNA, 15 bp, Homo sapiens
actgcatgattccat

SEQ ID NO: 6136 - DNA, 15 bp, Homo sapiens
tactgcatgattcca

SEQ ID NO: 6137 - DNA, 15 bp, Homo sapiens
atactgcatgattcc

SEQ ID NO: 6138 - DNA, 15 bp, Homo sapiens
catactgcatgattc

SEQ ID NO: 6139 - DNA, 15 bp, Homo sapiens
acatactgcatgatt

SEQ ID NO: 6140 - DNA, 15 bp, Homo sapiens
tacatactgcatgat

SEQ ID NO: 6141 - DNA, 15 bp, Homo sapiens
ctacatactgcatga

SEQ ID NO: 6142 - DNA, 15 bp, Homo sapiens
actacatactgcatg

SEQ ID NO: 6143 - DNA, 15 bp, Homo sapiens
aactacatactgcat

SEQ ID NO: 6144 - DNA, 15 bp, Homo sapiens
aaactacatactgca

SEQ ID NO: 6145 - DNA, 15 bp, Homo sapiens
aaaactacatactgc

SEQ ID NO: 6146 - DNA, 15 bp, Homo sapiens
aaaaactacatactg

SEQ ID NO: 6147 - DNA, 15 bp, Homo sapiens
aaaaaactacatact

SEQ ID NO: 6148 - DNA, 15 bp, Homo sapiens
caaaaaactacatac

SEQ ID NO: 6149 - DNA, 15 bp, Homo sapiens
acaaaaaactacata

SEQ ID NO: 6150 - DNA, 15 bp, Homo sapiens
cacaaaaaactacat

SEQ ID NO: 6151 - DNA, 15 bp, Homo sapiens
acacaaaaaactaca

SEQ ID NO: 6152 - DNA, 15 bp, Homo sapiens
gacacaaaaaactac

SEQ ID NO: 6153 - DNA, 15 bp, Homo sapiens
agacacaaaaaacta

SEQ ID NO: 6154 - DNA, 15 bp, Homo sapiens
cagacacaaaaaact

SEQ ID NO: 6155 - DNA, 15 bp, Homo sapiens
ccagacacaaaaaac

SEQ ID NO: 6156 - DNA, 15 bp, Homo sapiens
gccagacacaaaaaa

SEQ ID NO: 6157 - DNA, 15 bp, Homo sapiens
agccagacacaaaaa

SEQ ID NO: 6158 - DNA, 15 bp, Homo sapiens
aagccagacacaaaa

SEQ ID NO: 6159 - DNA, 15 bp, Homo sapiens
taagccagacacaaa

SEQ ID NO: 6160 - DNA, 15 bp, Homo sapiens
ataagccagacacaa

SEQ ID NO: 6161 - DNA, 15 bp, Homo sapiens
aataagccagacaca

SEQ ID NO: 6162 - DNA, 15 bp, Homo sapiens
aaataagccagacac

SEQ ID NO: 6163 - DNA, 15 bp, Homo sapiens
aaaataagccagaca

SEQ ID NO: 6164 - DNA, 15 bp, Homo sapiens
aaaaataagccagac

SEQ ID NO: 6165 - DNA, 15 bp, Homo sapiens
gaaaaataagccaga

SEQ ID NO: 6166 - DNA, 15 bp, Homo sapiens
agaaaaataagccag

SEQ ID NO: 6167 - DNA, 15 bp, Homo sapiens
aagaaaaataagcca

SEQ ID NO: 6168 - DNA, 15 bp, Homo sapiens
taagaaaaataagcc

SEQ ID NO: 6169 - DNA, 15 bp, Homo sapiens
ctaagaaaaataagc

SEQ ID NO: 6170 - DNA, 15 bp, Homo sapiens
gctaagaaaaataag

SEQ ID NO: 6171 - DNA, 15 bp, Homo sapiens
tgctaagaaaaataa

SEQ ID NO: 6172 - DNA, 15 bp, Homo sapiens
atgctaagaaaaata

SEQ ID NO: 6173 - DNA, 15 bp, Homo sapiens
aatgctaagaaaaat

SEQ ID NO: 6174 - DNA, 15 bp, Homo sapiens
taatgctaagaaaaa

SEQ ID NO: 6175 - DNA, 15 bp, Homo sapiens
ctaatgctaagaaaa

SEQ ID NO: 6176 - DNA, 15 bp, Homo sapiens
cctaatgctaagaaa

SEQ ID NO: 6177 - DNA, 15 bp, Homo sapiens
gcctaatgctaagaa

SEQ ID NO: 6178 - DNA, 15 bp, Homo sapiens
agcctaatgctaaga

SEQ ID NO: 6179 - DNA, 15 bp, Homo sapiens
aagcctaatgctaag

SEQ ID NO: 6180 - DNA, 15 bp, Homo sapiens
aaagcctaatgctaa

SEQ ID NO: 6181 - DNA, 15 bp, Homo sapiens
aaaagcctaatgcta

SEQ ID NO: 6182 - DNA, 15 bp, Homo sapiens
caaaagcctaatgct

SEQ ID NO: 6183 - DNA, 15 bp, Homo sapiens
ccaaaagcctaatgc

SEQ ID NO: 6184 - DNA, 15 bp, Homo sapiens
cccaaaagcctaatg

SEQ ID NO: 6185 - DNA, 15 bp, Homo sapiens
tcccaaaagcctaat

SEQ ID NO: 6186 - DNA, 15 bp, Homo sapiens
atcccaaaagcctaa

SEQ ID NO: 6187 - DNA, 15 bp, Homo sapiens
aatcccaaaagccta

SEQ ID NO: 6188 - DNA, 15 bp, Homo sapiens
gaatcccaaaagcct

SEQ ID NO: 6189 - DNA, 15 bp, Homo sapiens
tgaatcccaaaagcc

SEQ ID NO: 6190 - DNA, 15 bp, Homo sapiens
atgaatcccaaaagc

SEQ ID NO: 6191 - DNA, 15 bp, Homo sapiens
gatgaatcccaaaag

SEQ ID NO: 6192 - DNA, 15 bp, Homo sapiens
ggatgaatcccaaaa

SEQ ID NO: 6193 - DNA, 15 bp, Homo sapiens
tggatgaatcccaaa

SEQ ID NO: 6194 - DNA, 15 bp, Homo sapiens
ctggatgaatcccaa

SEQ ID NO: 6195 - DNA, 15 bp, Homo sapiens
cctggatgaatccca

SEQ ID NO: 6196 - DNA, 15 bp, Homo sapiens
acctggatgaatccc

SEQ ID NO: 6197 - DNA, 15 bp, Homo sapiens
aacctggatgaatcc

SEQ ID NO: 6198 - DNA, 15 bp, Homo sapiens
caacctggatgaatc

SEQ ID NO: 6199 - DNA, 15 bp, Homo sapiens
acaacctggatgaat

SEQ ID NO: 6200 - DNA, 15 bp, Homo sapiens
gacaacctggatgaa

SEQ ID NO: 6201 - DNA, 15 bp, Homo sapiens
cgacaacctggatga

SEQ ID NO: 6202 - DNA, 15 bp, Homo sapiens
gcgacaacctggatg

SEQ ID NO: 6203 - DNA, 15 bp, Homo sapiens
tgcgacaacctggat

SEQ ID NO: 6204 - DNA, 15 bp, Homo sapiens
atgcgacaacctgga

SEQ ID NO: 6205 - DNA, 15 bp, Homo sapiens
catgcgacaacctgg

SEQ ID NO: 6206 - DNA, 15 bp, Homo sapiens
acatgcgacaacctg

SEQ ID NO: 6207 - DNA, 15 bp, Homo sapiens
tacatgcgacaacct

SEQ ID NO: 6208 - DNA, 15 bp, Homo sapiens
ttacatgcgacaacc

SEQ ID NO: 6209 - DNA, 15 bp, Homo sapiens
gttacatgcgacaac

SEQ ID NO: 6210 - DNA, 15 bp, Homo sapiens
tgttacatgcgacaa

SEQ ID NO: 6211 - DNA, 15 bp, Homo sapiens
ctgttacatgcgaca

SEQ ID NO: 6212 - DNA, 15 bp, Homo sapiens
actgttacatgcgac

SEQ ID NO: 6213 - DNA, 15 bp, Homo sapiens
tactgttacatgcga

SEQ ID NO: 6214 - DNA, 15 bp, Homo sapiens
ctactgttacatgcg

SEQ ID NO: 6215 - DNA, 15 bp, Homo sapiens
gctactgttacatgc

SEQ ID NO: 6216 - DNA, 15 bp, Homo sapiens
agctactgttacatg

SEQ ID NO: 6217 - DNA, 15 bp, Homo sapiens
aagctactgttacat

SEQ ID NO: 6218 - DNA, 15 bp, Homo sapiens
taagctactgttaca

SEQ ID NO: 6219 - DNA, 15 bp, Homo sapiens
ataagctactgttac

SEQ ID NO: 6220 - DNA, 15 bp, Homo sapiens
aataagctactgtta

SEQ ID NO: 6221 - DNA, 15 bp, Homo sapiens
gaataagctactgtt

SEQ ID NO: 6222 - DNA, 15 bp, Homo sapiens
ggaataagctactgt

SEQ ID NO: 6223 - DNA, 15 bp, Homo sapiens
aggaataagctactg

SEQ ID NO: 6224 - DNA, 15 bp, Homo sapiens
aaggaataagctact

SEQ ID NO: 6225 - DNA, 15 bp, Homo sapiens
aaaggaataagctac

SEQ ID NO: 6226 - DNA, 15 bp, Homo sapiens
aaaaggaataagcta

SEQ ID NO: 6227 - DNA, 15 bp, Homo sapiens
aaaaaggaataagct

SEQ ID NO: 6228 - DNA, 15 bp, Homo sapiens
taaaaaggaataagc

SEQ ID NO: 6229 - DNA, 15 bp, Homo sapiens
ataaaaaggaataag

SEQ ID NO: 6230 - DNA, 15 bp, Homo sapiens
cataaaaaggaataa

SEQ ID NO: 6231 - DNA, 15 bp, Homo sapiens
ccataaaaaggaata

SEQ ID NO: 6232 - DNA, 15 bp, Homo sapiens
gccataaaaaggaat

SEQ ID NO: 6233 - DNA, 15 bp, Homo sapiens
agccataaaaaggaa

SEQ ID NO: 6234 - DNA, 15 bp, Homo sapiens
cagccataaaaagga

SEQ ID NO: 6235 - DNA, 15 bp, Homo sapiens
tcagccataaaaagg

SEQ ID NO: 6236 - DNA, 15 bp, Homo sapiens
ctcagccataaaaag

SEQ ID NO: 6237 - DNA, 15 bp, Homo sapiens
actcagccataaaaa

SEQ ID NO: 6238 - DNA, 15 bp, Homo sapiens
tactcagccataaaa

SEQ ID NO: 6239 - DNA, 15 bp, Homo sapiens
ttactcagccataaa

SEQ ID NO: 6240 - DNA, 15 bp, Homo sapiens
cttactcagccataa

SEQ ID NO: 6241 - DNA, 15 bp, Homo sapiens
acttactcagccata

SEQ ID NO: 6242 - DNA, 15 bp, Homo sapiens
cacttactcagccat

SEQ ID NO: 6243 - DNA, 15 bp, Homo sapiens
acacttactcagcca

SEQ ID NO: 6244 - DNA, 15 bp, Homo sapiens
gacacttactcagcc

SEQ ID NO: 6245 - DNA, 15 bp, Homo sapiens
ggacacttactcagc

SEQ ID NO: 6246 - DNA, 15 bp, Homo sapiens
gggacacttactcag

SEQ ID NO: 6247 - DNA, 15 bp, Homo sapiens
tgggacacttactca

SEQ ID NO: 6248 - DNA, 15 bp, Homo sapiens
ctgggacacttactc

SEQ ID NO: 6249 - DNA, 15 bp, Homo sapiens
actgggacacttact

SEQ ID NO: 6250 - DNA, 15 bp, Homo sapiens
aactgggacacttac

SEQ ID NO: 6251 - DNA, 15 bp, Homo sapiens
aaactgggacactta

SEQ ID NO: 6252 - DNA, 15 bp, Homo sapiens
aaaactgggacactt

SEQ ID NO: 6253 - DNA, 15 bp, Homo sapiens
taaaactgggacact

SEQ ID NO: 6254 - DNA, 15 bp, Homo sapiens
ataaaactgggacac

SEQ ID NO: 6255 - DNA, 15 bp, Homo sapiens
aataaaactgggaca

SEQ ID NO: 6256 - DNA, 15 bp, Homo sapiens
aaataaaactgggac

SEQ ID NO: 6257 - DNA, 15 bp, Homo sapiens
taaataaaactggga

SEQ ID NO: 6258 - DNA, 15 bp, Homo sapiens
ataaataaaactggg

SEQ ID NO: 6259 - DNA, 15 bp, Homo sapiens
tataaataaaactgg

SEQ ID NO: 6260 - DNA, 15 bp, Homo sapiens
atataaataaaactg

SEQ ID NO: 6261 - DNA, 15 bp, Homo sapiens
tatataaataaaact

SEQ ID NO: 6262 - DNA, 15 bp, Homo sapiens
atatataaataaaac

SEQ ID NO: 6263 - DNA, 15 bp, Homo sapiens
aatatataaataaaa

SEQ ID NO: 6264 - DNA, 15 bp, Homo sapiens
aaatatataaataaa

SEQ ID NO: 6265 - DNA, 15 bp, Homo sapiens
taaatatataaataa

SEQ ID NO: 6266 - DNA, 15 bp, Homo sapiens
ataaatatataaata

SEQ ID NO: 6267 - DNA, 15 bp, Homo sapiens
aataaatatataaat

SEQ ID NO: 6268 - DNA, 15 bp, Homo sapiens
aaataaatatataaa

SEQ ID NO: 6269 - DNA, 15 bp, Homo sapiens
taaataaatatataa

SEQ ID NO: 6270 - DNA, 15 bp, Homo sapiens
ataaataaatatata

SEQ ID NO: 6271 - DNA, 15 bp, Homo sapiens
cataaataaatatat

SEQ ID NO: 6272 - DNA, 15 bp, Homo sapiens
tcataaataaatata

SEQ ID NO: 6273 - DNA, 15 bp, Homo sapiens
ctcataaataaatat

SEQ ID NO: 6274 - DNA, 15 bp, Homo sapiens
cctcataaataaata

SEQ ID NO: 6275 - DNA, 15 bp, Homo sapiens
tcctcataaataaat

SEQ ID NO: 6276 - DNA, 15 bp, Homo sapiens
ctcctcataaataaa

SEQ ID NO: 6277 - DNA, 15 bp, Homo sapiens
cctcctcataaataa

SEQ ID NO: 6278 - DNA, 15 bp, Homo sapiens
acctcctcataaata

SEQ ID NO: 6279 - DNA, 15 bp, Homo sapiens
cacctcctcataaat

SEQ ID NO: 6280 - DNA, 15 bp, Homo sapiens
acacctcctcataaa

SEQ ID NO: 6281 - DNA, 15 bp, Homo sapiens
gacacctcctcataa

SEQ ID NO: 6282 - DNA, 15 bp, Homo sapiens
agacacctcctcata

SEQ ID NO: 6283 - DNA, 15 bp, Homo sapiens
gagacacctcctcat

SEQ ID NO: 6284 - DNA, 15 bp, Homo sapiens
tgagacacctcctca

SEQ ID NO: 6285 - DNA, 15 bp, Homo sapiens
gtgagacacctcctc

SEQ ID NO: 6286 - DNA, 15 bp, Homo sapiens
agtgagacacctcct

SEQ ID NO: 6287 - DNA, 15 bp, Homo sapiens
gagtgagacacctcc

SEQ ID NO: 6288 - DNA, 15 bp, Homo sapiens
agagtgagacacctc

SEQ ID NO: 6289 - DNA, 15 bp, Homo sapiens
cagagtgagacacct

SEQ ID NO: 6290 - DNA, 15 bp, Homo sapiens
acagagtgagacacc

SEQ ID NO: 6291 - DNA, 15 bp, Homo sapiens
gacagagtgagacac

SEQ ID NO: 6292 - DNA, 15 bp, Homo sapiens
tgacagagtgagaca

SEQ ID NO: 6293 - DNA, 15 bp, Homo sapiens
gtgacagagtgagac

SEQ ID NO: 6294 - DNA, 15 bp, Homo sapiens
cgcactccagcctgg

SEQ ID NO: 6295 - DNA, 15 bp, Homo sapiens
ccgcactccagcctg

SEQ ID NO: 6296 - DNA, 15 bp, Homo sapiens
accgcactccagcct

SEQ ID NO: 6297 - DNA, 15 bp, Homo sapiens
taccgcactccagcc

SEQ ID NO: 6298 - DNA, 15 bp, Homo sapiens
ctaccgcactccagc

SEQ ID NO: 6299 - DNA, 15 bp, Homo sapiens
gctaccgcactccag

SEQ ID NO: 6300 - DNA, 15 bp, Homo sapiens
cgctaccgcactcca

SEQ ID NO: 6301 - DNA, 15 bp, Homo sapiens
gcgctaccgcactcc

SEQ ID NO: 6302 - DNA, 15 bp, Homo sapiens
cgcgctaccgcactc

SEQ ID NO: 6303 - DNA, 15 bp, Homo sapiens
tcgcgctaccgcact

SEQ ID NO: 6304 - DNA, 15 bp, Homo sapiens
atcgcgctaccgcac

SEQ ID NO: 6305 - DNA, 15 bp, Homo sapiens
gatcgcgctaccgca

SEQ ID NO: 6306 - DNA, 15 bp, Homo sapiens
agatcgcgctaccgc

SEQ ID NO: 6307 - DNA, 15 bp, Homo sapiens
gagatcgcgctaccg

SEQ ID NO: 6308 - DNA, 15 bp, Homo sapiens
tgagatcgcgctacc

SEQ ID NO: 6309 - DNA, 15 bp, Homo sapiens
ctgagatcgcgctac

SEQ ID NO: 6310 - DNA, 15 bp, Homo sapiens
gctgagatcgcgcta

SEQ ID NO: 6311 - DNA, 15 bp, Homo sapiens
agctgagatcgcgct

SEQ ID NO: 6312 - DNA, 15 bp, Homo sapiens
gagctgagatcgcgc

SEQ ID NO: 6313 - DNA, 15 bp, Homo sapiens
tgagctgagatcgcg

SEQ ID NO: 6314 - DNA, 15 bp, Homo sapiens
gtgagctgagatcgc

SEQ ID NO: 6315 - DNA, 15 bp, Homo sapiens
agtgagctgagatcg

SEQ ID NO: 6316 - DNA, 15 bp, Homo sapiens
cagtgagctgagatc

SEQ ID NO: 6317 - DNA, 15 bp, Homo sapiens
gcagtgagctgagat

SEQ ID NO: 6318 - DNA, 15 bp, Homo sapiens
tgcagtgagctgaga

SEQ ID NO: 6319 - DNA, 15 bp, Homo sapiens
ttgcagtgagctgag

SEQ ID NO: 6320 - DNA, 15 bp, Homo sapiens
gttgcagtgagctga

SEQ ID NO: 6321 - DNA, 15 bp, Homo sapiens
ggttgcagtgagctg

SEQ ID NO: 6322 - DNA, 15 bp, Homo sapiens
aggttgcagtgagct

SEQ ID NO: 6323 - DNA, 15 bp, Homo sapiens
tgggaggcggaggtt

SEQ ID NO: 6324 - DNA, 15 bp, Homo sapiens
ctgggaggcggaggt

SEQ ID NO: 6325 - DNA, 15 bp, Homo sapiens
cctgggaggcggagg

SEQ ID NO: 6326 - DNA, 15 bp, Homo sapiens
acctgggaggcggag

SEQ ID NO: 6327 - DNA, 15 bp, Homo sapiens
aacctgggaggcgga

SEQ ID NO: 6328 - DNA, 15 bp, Homo sapiens
gaacctgggaggcgg

SEQ ID NO: 6329 - DNA, 15 bp, Homo sapiens
tgaacctgggaggcg

SEQ ID NO: 6330 - DNA, 15 bp, Homo sapiens
ttgaacctgggaggc

SEQ ID NO: 6331 - DNA, 15 bp, Homo sapiens
ggaggcaggagaatt

SEQ ID NO: 6332 - DNA, 15 bp, Homo sapiens
aggaggcaggagaat

SEQ ID NO: 6333 - DNA, 15 bp, Homo sapiens
caggaggcaggagaa

SEQ ID NO: 6334 - DNA, 15 bp, Homo sapiens
tcaggaggcaggaga

SEQ ID NO: 6335 - DNA, 15 bp, Homo sapiens
ctcaggaggcaggag

SEQ ID NO: 6336 - DNA, 15 bp, Homo sapiens
actcaggaggcagga

SEQ ID NO: 6337 - DNA, 15 bp, Homo sapiens
tactcaggaggcagg

SEQ ID NO: 6338 - DNA, 15 bp, Homo sapiens
ctactcaggaggcag

SEQ ID NO: 6339 - DNA, 15 bp, Homo sapiens
gctactcaggaggca

SEQ ID NO: 6340 - DNA, 15 bp, Homo sapiens
gtgcctgtaatccca

SEQ ID NO: 6341 - DNA, 15 bp, Homo sapiens
ggtgggtgcctgtaa

SEQ ID NO: 6342 - DNA, 15 bp, Homo sapiens
cggtgggtgcctgta

SEQ ID NO: 6343 - DNA, 15 bp, Homo sapiens
gcggtgggtgcctgt

SEQ ID NO: 6344 - DNA, 15 bp, Homo sapiens
ggcggtgggtgcctg

SEQ ID NO: 6345 - DNA, 15 bp, Homo sapiens
tggcggtgggtgcct

SEQ ID NO: 6346 - DNA, 15 bp, Homo sapiens
gtggcggtgggtgcc

SEQ ID NO: 6347 - DNA, 15 bp, Homo sapiens
cgtggcggtgggtgc

SEQ ID NO: 6348 - DNA, 15 bp, Homo sapiens
gcgtggcggtgggtg

SEQ ID NO: 6349 - DNA, 15 bp, Homo sapiens
ggcgtggcggtgggt

SEQ ID NO: 6350 - DNA, 15 bp, Homo sapiens
gggcgtggcggtggg

SEQ ID NO: 6351 - DNA, 15 bp, Homo sapiens
tgggcgtggcggtgg

SEQ ID NO: 6352 - DNA, 15 bp, Homo sapiens
ttgggcgtggcggtg

SEQ ID NO: 6353 - DNA, 15 bp, Homo sapiens
gttgggcgtggcggt

SEQ ID NO: 6354 - DNA, 15 bp, Homo sapiens
agttgggcgtggcgg

SEQ ID NO: 6355 - DNA, 15 bp, Homo sapiens
tagttgggcgtggcg

SEQ ID NO: 6356 - DNA, 15 bp, Homo sapiens
ttagttgggcgtggc

SEQ ID NO: 6357 - DNA, 15 bp, Homo sapiens
attagttgggcgtgg

SEQ ID NO: 6358 - DNA, 15 bp, Homo sapiens
aattagttgggcgtg

SEQ ID NO: 6359 - DNA, 15 bp, Homo sapiens
aaattagttgggcgt

SEQ ID NO: 6360 - DNA, 15 bp, Homo sapiens
aaaattagttgggcg

SEQ ID NO: 6361 - DNA, 15 bp, Homo sapiens
aaaaattagttgggc

SEQ ID NO: 6362 - DNA, 15 bp, Homo sapiens
taaaaattagttggg

SEQ ID NO: 6363 - DNA, 15 bp, Homo sapiens
ataaaaattagttgg

SEQ ID NO: 6364 - DNA, 15 bp, Homo sapiens
tataaaaattagttg

SEQ ID NO: 6365 - DNA, 15 bp, Homo sapiens
atataaaaattagtt

SEQ ID NO: 6366 - DNA, 15 bp, Homo sapiens
aatataaaaattagt

SEQ ID NO: 6367 - DNA, 15 bp, Homo sapiens
aaatataaaaattag

SEQ ID NO: 6368 - DNA, 15 bp, Homo sapiens
aaaatataaaaatta

SEQ ID NO: 6369 - DNA, 15 bp, Homo sapiens
aaaaatataaaaatt

SEQ ID NO: 6370 - DNA, 15 bp, Homo sapiens
taaaaatataaaaat

SEQ ID NO: 6371 - DNA, 15 bp, Homo sapiens
ctaaaaatataaaaa

SEQ ID NO: 6372 - DNA, 15 bp, Homo sapiens
actaaaaatataaaa

SEQ ID NO: 6373 - DNA, 15 bp, Homo sapiens
tactaaaaatataaa

SEQ ID NO: 6374 - DNA, 15 bp, Homo sapiens
ctactaaaaatataa

SEQ ID NO: 6375 - DNA, 15 bp, Homo sapiens
tctactaaaaatata

SEQ ID NO: 6376 - DNA, 15 bp, Homo sapiens
ccatctctactaaaa

SEQ ID NO: 6377 - DNA, 15 bp, Homo sapiens
cccatctctactaaa

SEQ ID NO: 6378 - DNA, 15 bp, Homo sapiens
ccccatctctactaa

SEQ ID NO: 6379 - DNA, 15 bp, Homo sapiens
tcagcctggccaaca

SEQ ID NO: 6380 - DNA, 15 bp, Homo sapiens
atcagcctggccaac

SEQ ID NO: 6381 - DNA, 15 bp, Homo sapiens
gatcagcctggccaa

SEQ ID NO: 6382 - DNA, 15 bp, Homo sapiens
agatcagcctggcca

SEQ ID NO: 6383 - DNA, 15 bp, Homo sapiens
gagatcagcctggcc

SEQ ID NO: 6384 - DNA, 15 bp, Homo sapiens
tgagatcagcctggc

SEQ ID NO: 6385 - DNA, 15 bp, Homo sapiens
ttgagatcagcctgg

SEQ ID NO: 6386 - DNA, 15 bp, Homo sapiens
tttgagatcagcctg

SEQ ID NO: 6387 - DNA, 15 bp, Homo sapiens
gtttgagatcagcct

SEQ ID NO: 6388 - DNA, 15 bp, Homo sapiens
agtttgagatcagcc

SEQ ID NO: 6389 - DNA, 15 bp, Homo sapiens
gagtttgagatcagc

SEQ ID NO: 6390 - DNA, 15 bp, Homo sapiens
agagtttgagatcag

SEQ ID NO: 6391 - DNA, 15 bp, Homo sapiens
aagagtttgagatca

SEQ ID NO: 6392 - DNA, 15 bp, Homo sapiens
caagagtttgagatc

SEQ ID NO: 6393 - DNA, 15 bp, Homo sapiens
tcaagagtttgagat

SEQ ID NO: 6394 - DNA, 15 bp, Homo sapiens
gtcaagagtttgaga

SEQ ID NO: 6395 - DNA, 15 bp, Homo sapiens
ggtcaagagtttgag

SEQ ID NO: 6396 - DNA, 15 bp, Homo sapiens
aggtcaagagtttga

SEQ ID NO: 6397 - DNA, 15 bp, Homo sapiens
gaggtcaagagtttg

SEQ ID NO: 6398 - DNA, 15 bp, Homo sapiens
tgaggtcaagagttt

SEQ ID NO: 6399 - DNA, 15 bp, Homo sapiens
ctgaggtcaagagtt

SEQ ID NO: 6400 - DNA, 15 bp, Homo sapiens
cctgaggtcaagagt

SEQ ID NO: 6401 - DNA, 15 bp, Homo sapiens
acctgaggtcaagag

SEQ ID NO: 6402 - DNA, 15 bp, Homo sapiens
cacctgaggtcaaga

SEQ ID NO: 6403 - DNA, 15 bp, Homo sapiens
tcacctgaggtcaag

SEQ ID NO: 6404 - DNA, 15 bp, Homo sapiens
atcacctgaggtcaa

SEQ ID NO: 6405 - DNA, 15 bp, Homo sapiens
cggatcacctgaggt

SEQ ID NO: 6406 - DNA, 15 bp, Homo sapiens
gcggatcacctgagg

SEQ ID NO: 6407 - DNA, 15 bp, Homo sapiens
ggcggatcacctgag

SEQ ID NO: 6408 - DNA, 15 bp, Homo sapiens
gggcggatcacctga

SEQ ID NO: 6409 - DNA, 15 bp, Homo sapiens
tgggcggatcacctg

SEQ ID NO: 6410 - DNA, 15 bp, Homo sapiens
gtgggcggatcacct

SEQ ID NO: 6411 - DNA, 15 bp, Homo sapiens
ggtgggcggatcacc

SEQ ID NO: 6412 - DNA, 15 bp, Homo sapiens
aggtgggcggatcac

SEQ ID NO: 6413 - DNA, 15 bp, Homo sapiens
agaggtgggcggatc

SEQ ID NO: 6414 - DNA, 15 bp, Homo sapiens
cagaggtgggcggat

SEQ ID NO: 6415 - DNA, 15 bp, Homo sapiens
ccagaggtgggcgga

SEQ ID NO: 6416 - DNA, 15 bp, Homo sapiens
gccagaggtgggcgg

SEQ ID NO: 6417 - DNA, 15 bp, Homo sapiens
agccagaggtgggcg

SEQ ID NO: 6418 - DNA, 15 bp, Homo sapiens
gagccagaggtgggc

SEQ ID NO: 6419 - DNA, 15 bp, Homo sapiens
ggagccagaggtggg

SEQ ID NO: 6420 - DNA, 15 bp, Homo sapiens
gggagccagaggtgg

SEQ ID NO: 6421 - DNA, 15 bp, Homo sapiens
tgggagccagaggtg

SEQ ID NO: 6422 - DNA, 15 bp, Homo sapiens
ttgggagccagaggt

SEQ ID NO: 6423 - DNA, 15 bp, Homo sapiens
tttgggagccagagg

SEQ ID NO: 6424 - DNA, 15 bp, Homo sapiens
ctttgggagccagag

SEQ ID NO: 6425 - DNA, 15 bp, Homo sapiens
actttgggagccaga

SEQ ID NO: 6426 - DNA, 15 bp, Homo sapiens
cactttgggagccag

SEQ ID NO: 6427 - DNA, 15 bp, Homo sapiens
gcactttgggagcca

SEQ ID NO: 6428 - DNA, 15 bp, Homo sapiens
agcactttgggagcc

SEQ ID NO: 6429 - DNA, 15 bp, Homo sapiens
tagcactttgggagc

SEQ ID NO: 6430 - DNA, 15 bp, Homo sapiens
acagtggctcatgcc

SEQ ID NO: 6431 - DNA, 15 bp, Homo sapiens
cacagtggctcatgc

SEQ ID NO: 6432 - DNA, 15 bp, Homo sapiens
gcacagtggctcatg

SEQ ID NO: 6433 - DNA, 15 bp, Homo sapiens
ggcacagtggctcat

SEQ ID NO: 6434 - DNA, 15 bp, Homo sapiens
gggcacagtggctca

SEQ ID NO: 6435 - DNA, 15 bp, Homo sapiens
tgggcacagtggctc

SEQ ID NO: 6436 - DNA, 15 bp, Homo sapiens
ctgggcacagtggct

SEQ ID NO: 6437 - DNA, 15 bp, Homo sapiens
gctgggcacagtggc

SEQ ID NO: 6438 - DNA, 15 bp, Homo sapiens
ggctgggcacagtgg

SEQ ID NO: 6439 - DNA, 15 bp, Homo sapiens
gggctgggcacagtg

SEQ ID NO: 6440 - DNA, 15 bp, Homo sapiens
ggggctgggcacagt

SEQ ID NO: 6441 - DNA, 15 bp, Homo sapiens
tggggctgggcacag

SEQ ID NO: 6442 - DNA, 15 bp, Homo sapiens
ctggggctgggcaca

SEQ ID NO: 6443 - DNA, 15 bp, Homo sapiens
actggggctgggcac

SEQ ID NO: 6444 - DNA, 15 bp, Homo sapiens
aactggggctgggca

SEQ ID NO: 6445 - DNA, 15 bp, Homo sapiens
aaactggggctgggc

SEQ ID NO: 6446 - DNA, 15 bp, Homo sapiens
aaaactggggctggg

SEQ ID NO: 6447 - DNA, 15 bp, Homo sapiens
taaaactggggctgg

SEQ ID NO: 6448 - DNA, 15 bp, Homo sapiens
ataaaactggggctg

SEQ ID NO: 6449 - DNA, 15 bp, Homo sapiens
aataaaactggggct

SEQ ID NO: 6450 - DNA, 15 bp, Homo sapiens
aaataaaactggggc

SEQ ID NO: 6451 - DNA, 15 bp, Homo sapiens
taaataaaactgggg

SEQ ID NO: 6452 - DNA, 15 bp, Homo sapiens
aataaataaaactgg

SEQ ID NO: 6453 - DNA, 15 bp, Homo sapiens
gaataaataaaactg

SEQ ID NO: 6454 - DNA, 15 bp, Homo sapiens
tgaataaataaaact

SEQ ID NO: 6455 - DNA, 15 bp, Homo sapiens
gtgaataaataaaac

SEQ ID NO: 6456 - DNA, 15 bp, Homo sapiens
ggtgaataaataaaa

SEQ ID NO: 6457 - DNA, 15 bp, Homo sapiens
tggtgaataaataaa

SEQ ID NO: 6458 - DNA, 15 bp, Homo sapiens
ctggtgaataaataa

SEQ ID NO: 6459 - DNA, 15 bp, Homo sapiens
actggtgaataaata

SEQ ID NO: 6460 - DNA, 15 bp, Homo sapiens
aactggtgaataaat

SEQ ID NO: 6461 - DNA, 15 bp, Homo sapiens
caactggtgaataaa

SEQ ID NO: 6462 - DNA, 15 bp, Homo sapiens
tcaactggtgaataa

SEQ ID NO: 6463 - DNA, 15 bp, Homo sapiens
atcaactggtgaata

SEQ ID NO: 6464 - DNA, 15 bp, Homo sapiens
catcaactggtgaat

SEQ ID NO: 6465 - DNA, 15 bp, Homo sapiens
ccatcaactggtgaa

SEQ ID NO: 6466 - DNA, 15 bp, Homo sapiens
accatcaactggtga

SEQ ID NO: 6467 - DNA, 15 bp, Homo sapiens
gaccatcaactggtg

SEQ ID NO: 6468 - DNA, 15 bp, Homo sapiens
agaccatcaactggt

SEQ ID NO: 6469 - DNA, 15 bp, Homo sapiens
aagaccatcaactgg

SEQ ID NO: 6470 - DNA, 15 bp, Homo sapiens
aaagaccatcaactg

SEQ ID NO: 6471 - DNA, 15 bp, Homo sapiens
aaaagaccatcaact

SEQ ID NO: 6472 - DNA, 15 bp, Homo sapiens
gaaaagaccatcaac

SEQ ID NO: 6473 - DNA, 15 bp, Homo sapiens
cgaaaagaccatcaa

SEQ ID NO: 6474 - DNA, 15 bp, Homo sapiens
tcgaaaagaccatca

SEQ ID NO: 6475 - DNA, 15 bp, Homo sapiens
gtcgaaaagaccatc

SEQ ID NO: 6476 - DNA, 15 bp, Homo sapiens
tgtcgaaaagaccat

SEQ ID NO: 6477 - DNA, 15 bp, Homo sapiens
ttgtcgaaaagacca

SEQ ID NO: 6478 - DNA, 15 bp, Homo sapiens
gttgtcgaaaagacc

SEQ ID NO: 6479 - DNA, 15 bp, Homo sapiens
agttgtcgaaaagac

SEQ ID NO: 6480 - DNA, 15 bp, Homo sapiens
tagttgtcgaaaaga

SEQ ID NO: 6481 - DNA, 15 bp, Homo sapiens
ttagttgtcgaaaag

SEQ ID NO: 6482 - DNA, 15 bp, Homo sapiens
attagttgtcgaaaa

SEQ ID NO: 6483 - DNA, 15 bp, Homo sapiens
aattagttgtcgaaa

SEQ ID NO: 6484 - DNA, 15 bp, Homo sapiens
caattagttgtcgaa

SEQ ID NO: 6485 - DNA, 15 bp, Homo sapiens
acaattagttgtcga

SEQ ID NO: 6486 - DNA, 15 bp, Homo sapiens
aacaattagttgtcg

SEQ ID NO: 6487 - DNA, 15 bp, Homo sapiens
aaacaattagttgtc

SEQ ID NO: 6488 - DNA, 15 bp, Homo sapiens
gaaacaattagttgt

SEQ ID NO: 6489 - DNA, 15 bp, Homo sapiens
ggaaacaattagttg

SEQ ID NO: 6490 - DNA, 15 bp, Homo sapiens
tggaaacaattagtt

SEQ ID NO: 6491 - DNA, 15 bp, Homo sapiens
ctggaaacaattagt

SEQ ID NO: 6492 - DNA, 15 bp, Homo sapiens
actggaaacaattag

SEQ ID NO: 6493 - DNA, 15 bp, Homo sapiens
aactggaaacaatta

SEQ ID NO: 6494 - DNA, 15 bp, Homo sapiens
aaactggaaacaatt

SEQ ID NO: 6495 - DNA, 15 bp, Homo sapiens
aaaactggaaacaat

SEQ ID NO: 6496 - DNA, 15 bp, Homo sapiens
aaaaactggaaacaa

SEQ ID NO: 6497 - DNA, 15 bp, Homo sapiens
caaaaactggaaaca

SEQ ID NO: 6498 - DNA, 15 bp, Homo sapiens
ccaaaaactggaaac

SEQ ID NO: 6499 - DNA, 15 bp, Homo sapiens
gccaaaaactggaaa

SEQ ID NO: 6500 - DNA, 15 bp, Homo sapiens
agccaaaaactggaa

SEQ ID NO: 6501 - DNA, 15 bp, Homo sapiens
tagccaaaaactgga

SEQ ID NO: 6502 - DNA, 15 bp, Homo sapiens
atagccaaaaactgg

SEQ ID NO: 6503 - DNA, 15 bp, Homo sapiens
aatagccaaaaactg

SEQ ID NO: 6504 - DNA, 15 bp, Homo sapiens
gaatagccaaaaact

SEQ ID NO: 6505 - DNA, 15 bp, Homo sapiens
agaatagccaaaaac

SEQ ID NO: 6506 - DNA, 15 bp, Homo sapiens
cagaatagccaaaaa

SEQ ID NO: 6507 - DNA, 15 bp, Homo sapiens
acagaatagccaaaa

SEQ ID NO: 6508 - DNA, 15 bp, Homo sapiens
tacagaatagccaaa

SEQ ID NO: 6509 - DNA, 15 bp, Homo sapiens
atacagaatagccaa

SEQ ID NO: 6510 - DNA, 15 bp, Homo sapiens
tatacagaatagcca

SEQ ID NO: 6511 - DNA, 15 bp, Homo sapiens
ttatacagaatagcc

SEQ ID NO: 6512 - DNA, 15 bp, Homo sapiens
cttatacagaatagc

SEQ ID NO: 6513 - DNA, 15 bp, Homo sapiens
ccttatacagaatag

SEQ ID NO: 6514 - DNA, 15 bp, Homo sapiens
gccttatacagaata

SEQ ID NO: 6515 - DNA, 15 bp, Homo sapiens
agccttatacagaat

SEQ ID NO: 6516 - DNA, 15 bp, Homo sapiens
aagccttatacagaa

SEQ ID NO: 6517 - DNA, 15 bp, Homo sapiens
gaagccttatacaga

SEQ ID NO: 6518 - DNA, 15 bp, Homo sapiens
agaagccttatacag

SEQ ID NO: 6519 - DNA, 15 bp, Homo sapiens
tagaagccttataca

SEQ ID NO: 6520 - DNA, 15 bp, Homo sapiens
atagaagccttatac

SEQ ID NO: 6521 - DNA, 15 bp, Homo sapiens
tatagaagccttata

SEQ ID NO: 6522 - DNA, 15 bp, Homo sapiens
ttatagaagccttat

SEQ ID NO: 6523 - DNA, 15 bp, Homo sapiens
tttatagaagcctta

SEQ ID NO: 6524 - DNA, 15 bp, Homo sapiens
atttatagaagcctt

SEQ ID NO: 6525 - DNA, 15 bp, Homo sapiens
tatttatagaagcct

SEQ ID NO: 6526 - DNA, 15 bp, Homo sapiens
atatttatagaagcc

SEQ ID NO: 6527 - DNA, 15 bp, Homo sapiens
aatatttatagaagc

SEQ ID NO: 6528 - DNA, 15 bp, Homo sapiens
gaatatttatagaag

SEQ ID NO: 6529 - DNA, 15 bp, Homo sapiens
tgaatatttatagaa

SEQ ID NO: 6530 - DNA, 15 bp, Homo sapiens
gtgaatatttataga

SEQ ID NO: 6531 - DNA, 15 bp, Homo sapiens
tgtgaatatttatag

SEQ ID NO: 6532 - DNA, 15 bp, Homo sapiens
ttgtgaatatttata

SEQ ID NO: 6533 - DNA, 15 bp, Homo sapiens
tttgtgaatatttat

SEQ ID NO: 6534 - DNA, 15 bp, Homo sapiens
atttgtgaatattta

SEQ ID NO: 6535 - DNA, 15 bp, Homo sapiens
tatttgtgaatattt

SEQ ID NO: 6536 - DNA, 15 bp, Homo sapiens
gtatttgtgaatatt

SEQ ID NO: 6537 - DNA, 15 bp, Homo sapiens
ggtatttgtgaatat

SEQ ID NO: 6538 - DNA, 15 bp, Homo sapiens
aggtatttgtgaata

SEQ ID NO: 6539 - DNA, 15 bp, Homo sapiens
taggtatttgtgaat

SEQ ID NO: 6540 - DNA, 15 bp, Homo sapiens
ctaggtatttgtgaa

SEQ ID NO: 6541 - DNA, 15 bp, Homo sapiens
cctaggtatttgtga

SEQ ID NO: 6542 - DNA, 15 bp, Homo sapiens
tcctaggtatttgtg

SEQ ID NO: 6543 - DNA, 15 bp, Homo sapiens
atcctaggtatttgt

SEQ ID NO: 6544 - DNA, 15 bp, Homo sapiens
catcctaggtatttg

SEQ ID NO: 6545 - DNA, 15 bp, Homo sapiens
ccatcctaggtattt

SEQ ID NO: 6546 - DNA, 15 bp, Homo sapiens
cccatcctaggtatt

SEQ ID NO: 6547 - DNA, 15 bp, Homo sapiens
tcccatcctaggtat

SEQ ID NO: 6548 - DNA, 15 bp, Homo sapiens
atcccatcctaggta

SEQ ID NO: 6549 - DNA, 15 bp, Homo sapiens
catcccatcctaggt

SEQ ID NO: 6550 - DNA, 15 bp, Homo sapiens
tcatcccatcctagg

SEQ ID NO: 6551 - DNA, 15 bp, Homo sapiens
gtcatcccatcctag

SEQ ID NO: 6552 - DNA, 15 bp, Homo sapiens
agtcatcccatccta

SEQ ID NO: 6553 - DNA, 15 bp, Homo sapiens
cagtcatcccatcct

SEQ ID NO: 6554 - DNA, 15 bp, Homo sapiens
ccagtcatcccatcc

SEQ ID NO: 6555 - DNA, 15 bp, Homo sapiens
cccagtcatcccatc

SEQ ID NO: 6556 - DNA, 15 bp, Homo sapiens
acccagtcatcccat

SEQ ID NO: 6557 - DNA, 15 bp, Homo sapiens
gacccagtcatccca

SEQ ID NO: 6558 - DNA, 15 bp, Homo sapiens
tgacccagtcatccc

SEQ ID NO: 6559 - DNA, 15 bp, Homo sapiens
atgacccagtcatcc

SEQ ID NO: 6560 - DNA, 15 bp, Homo sapiens
tatgacccagtcatc

SEQ ID NO: 6561 - DNA, 15 bp, Homo sapiens
atatgacccagtcat

SEQ ID NO: 6562 - DNA, 15 bp, Homo sapiens
tatatgacccagtca

SEQ ID NO: 6563 - DNA, 15 bp, Homo sapiens
ttatatgacccagtc

SEQ ID NO: 6564 - DNA, 15 bp, Homo sapiens
attatatgacccagt

SEQ ID NO: 6565 - DNA, 15 bp, Homo sapiens
tattatatgacccag

SEQ ID NO: 6566 - DNA, 15 bp, Homo sapiens
ctattatatgaccca

SEQ ID NO: 6567 - DNA, 15 bp, Homo sapiens
actattatatgaccc

SEQ ID NO: 6568 - DNA, 15 bp, Homo sapiens
tactattatatgacc

SEQ ID NO: 6569 - DNA, 15 bp, Homo sapiens
gtactattatatgac

SEQ ID NO: 6570 - DNA, 15 bp, Homo sapiens
agtactattatatga

SEQ ID NO: 6571 - DNA, 15 bp, Homo sapiens
cagtactattatatg

SEQ ID NO: 6572 - DNA, 15 bp, Homo sapiens
acagtactattatat

SEQ ID NO: 6573 - DNA, 15 bp, Homo sapiens
tacagtactattata

SEQ ID NO: 6574 - DNA, 15 bp, Homo sapiens
atacagtactattat

SEQ ID NO: 6575 - DNA, 15 bp, Homo sapiens
tatacagtactatta

SEQ ID NO: 6576 - DNA, 15 bp, Homo sapiens
ttatacagtactatt

SEQ ID NO: 6577 - DNA, 15 bp, Homo sapiens
gttatacagtactat

SEQ ID NO: 6578 - DNA, 15 bp, Homo sapiens
ggttatacagtacta

SEQ ID NO: 6579 - DNA, 15 bp, Homo sapiens
aggttatacagtact

SEQ ID NO: 6580 - DNA, 15 bp, Homo sapiens
aaggttatacagtac

SEQ ID NO: 6581 - DNA, 15 bp, Homo sapiens
taaggttatacagta

SEQ ID NO: 6582 - DNA, 15 bp, Homo sapiens
ctaaggttatacagt

SEQ ID NO: 6583 - DNA, 15 bp, Homo sapiens
gctaaggttatacag

SEQ ID NO: 6584 - DNA, 15 bp, Homo sapiens
tgctaaggttataca

SEQ ID NO: 6585 - DNA, 15 bp, Homo sapiens
ctgctaaggttatac

SEQ ID NO: 6586 - DNA, 15 bp, Homo sapiens
tctgctaaggttata

SEQ ID NO: 6587 - DNA, 15 bp, Homo sapiens
ttctgctaaggttat

SEQ ID NO: 6588 - DNA, 15 bp, Homo sapiens
tttctgctaaggtta

SEQ ID NO: 6589 - DNA, 15 bp, Homo sapiens
gtttctgctaaggtt

SEQ ID NO: 6590 - DNA, 15 bp, Homo sapiens
agtttctgctaaggt

SEQ ID NO: 6591 - DNA, 15 bp, Homo sapiens
cagtttctgctaagg

SEQ ID NO: 6592 - DNA, 15 bp, Homo sapiens
acagtttctgctaag

SEQ ID NO: 6593 - DNA, 15 bp, Homo sapiens
gacagtttctgctaa

SEQ ID NO: 6594 - DNA, 15 bp, Homo sapiens
tgacagtttctgcta

SEQ ID NO: 6595 - DNA, 15 bp, Homo sapiens
ttgacagtttctgct

SEQ ID NO: 6596 - DNA, 15 bp, Homo sapiens
tttgacagtttctgc

SEQ ID NO: 6597 - DNA, 15 bp, Homo sapiens
gtttgacagtttctg

SEQ ID NO: 6598 - DNA, 15 bp, Homo sapiens
agtttgacagtttct

SEQ ID NO: 6599 - DNA, 15 bp, Homo sapiens
tagtttgacagtttc

SEQ ID NO: 6600 - DNA, 15 bp, Homo sapiens
atagtttgacagttt

SEQ ID NO: 6601 - DNA, 15 bp, Homo sapiens
aatagtttgacagtt

SEQ ID NO: 6602 - DNA, 15 bp, Homo sapiens
aaatagtttgacagt

SEQ ID NO: 6603 - DNA, 15 bp, Homo sapiens
aaaatagtttgacag

SEQ ID NO: 6604 - DNA, 15 bp, Homo sapiens
gaaaatagtttgaca

SEQ ID NO: 6605 - DNA, 15 bp, Homo sapiens
ggaaaatagtttgac

SEQ ID NO: 6606 - DNA, 15 bp, Homo sapiens
tggaaaatagtttga

SEQ ID NO: 6607 - DNA, 15 bp, Homo sapiens
ttggaaaatagtttg

SEQ ID NO: 6608 - DNA, 15 bp, Homo sapiens
tttggaaaatagttt

SEQ ID NO: 6609 - DNA, 15 bp, Homo sapiens
ctttggaaaatagtt

SEQ ID NO: 6610 - DNA, 15 bp, Homo sapiens
actttggaaaatagt

SEQ ID NO: 6611 - DNA, 15 bp, Homo sapiens
cactttggaaaatag

SEQ ID NO: 6612 - DNA, 15 bp, Homo sapiens
ccactttggaaaata

SEQ ID NO: 6613 - DNA, 15 bp, Homo sapiens
gccactttggaaaat

SEQ ID NO: 6614 - DNA, 15 bp, Homo sapiens
agccactttggaaaa

SEQ ID NO: 6615 - DNA, 15 bp, Homo sapiens
gagccactttggaaa

SEQ ID NO: 6616 - DNA, 15 bp, Homo sapiens
agagccactttggaa

SEQ ID NO: 6617 - DNA, 15 bp, Homo sapiens
aagagccactttgga

SEQ ID NO: 6618 - DNA, 15 bp, Homo sapiens
gaagagccactttgg

SEQ ID NO: 6619 - DNA, 15 bp, Homo sapiens
ggaagagccactttg

SEQ ID NO: 6620 - DNA, 15 bp, Homo sapiens
tggaagagccacttt

SEQ ID NO: 6621 - DNA, 15 bp, Homo sapiens
atggaagagccactt

SEQ ID NO: 6622 - DNA, 15 bp, Homo sapiens
aatggaagagccact

SEQ ID NO: 6623 - DNA, 15 bp, Homo sapiens
aaatggaagagccac

SEQ ID NO: 6624 - DNA, 15 bp, Homo sapiens
aaaatggaagagcca

SEQ ID NO: 6625 - DNA, 15 bp, Homo sapiens
taaaatggaagagcc

SEQ ID NO: 6626 - DNA, 15 bp, Homo sapiens
gtaaaatggaagagc

SEQ ID NO: 6627 - DNA, 15 bp, Homo sapiens
tgtaaaatggaagag

SEQ ID NO: 6628 - DNA, 15 bp, Homo sapiens
ttgtaaaatggaaga

SEQ ID NO: 6629 - DNA, 15 bp, Homo sapiens
attgtaaaatggaag

SEQ ID NO: 6630 - DNA, 15 bp, Homo sapiens
aattgtaaaatggaa

SEQ ID NO: 6631 - DNA, 15 bp, Homo sapiens
gaattgtaaaatgga

SEQ ID NO: 6632 - DNA, 15 bp, Homo sapiens
ggaattgtaaaatgg

SEQ ID NO: 6633 - DNA, 15 bp, Homo sapiens
tggaattgtaaaatg

SEQ ID NO: 6634 - DNA, 15 bp, Homo sapiens
gtggaattgtaaaat

SEQ ID NO: 6635 - DNA, 15 bp, Homo sapiens
tgtggaattgtaaaa

SEQ ID NO: 6636 - DNA, 15 bp, Homo sapiens
ctgtggaattgtaaa

SEQ ID NO: 6637 - DNA, 15 bp, Homo sapiens
actgtggaattgtaa

SEQ ID NO: 6638 - DNA, 15 bp, Homo sapiens
cactgtggaattgta

SEQ ID NO: 6639 - DNA, 15 bp, Homo sapiens
acactgtggaattgt

SEQ ID NO: 6640 - DNA, 15 bp, Homo sapiens
tacactgtggaattg

SEQ ID NO: 6641 - DNA, 15 bp, Homo sapiens
atacactgtggaatt

SEQ ID NO: 6642 - DNA, 15 bp, Homo sapiens
aatacactgtggaat

SEQ ID NO: 6643 - DNA, 15 bp, Homo sapiens
caatacactgtggaa

SEQ ID NO: 6644 - DNA, 15 bp, Homo sapiens
tcaatacactgtgga

SEQ ID NO: 6645 - DNA, 15 bp, Homo sapiens
ctcaatacactgtgg

SEQ ID NO: 6646 - DNA, 15 bp, Homo sapiens
actcaatacactgtg

SEQ ID NO: 6647 - DNA, 15 bp, Homo sapiens
gactcaatacactgt

SEQ ID NO: 6648 - DNA, 15 bp, Homo sapiens
ggactcaatacactg

SEQ ID NO: 6649 - DNA, 15 bp, Homo sapiens
gggactcaatacact

SEQ ID NO: 6650 - DNA, 15 bp, Homo sapiens
tgggactcaatacac

SEQ ID NO: 6651 - DNA, 15 bp, Homo sapiens
ctgggactcaataca

SEQ ID NO: 6652 - DNA, 15 bp, Homo sapiens
actgggactcaatac

SEQ ID NO: 6653 - DNA, 15 bp, Homo sapiens
cactgggactcaata

SEQ ID NO: 6654 - DNA, 15 bp, Homo sapiens
acactgggactcaat

SEQ ID NO: 6655 - DNA, 15 bp, Homo sapiens
gacactgggactcaa

SEQ ID NO: 6656 - DNA, 15 bp, Homo sapiens
agacactgggactca

SEQ ID NO: 6657 - DNA, 15 bp, Homo sapiens
gagacactgggactc

SEQ ID NO: 6658 - DNA, 15 bp, Homo sapiens
ggagacactgggact

SEQ ID NO: 6659 - DNA, 15 bp, Homo sapiens
tggagacactgggac

SEQ ID NO: 6660 - DNA, 15 bp, Homo sapiens
atggagacactggga

SEQ ID NO: 6661 - DNA, 15 bp, Homo sapiens
tatggagacactggg

SEQ ID NO: 6662 - DNA, 15 bp, Homo sapiens
gtatggagacactgg

SEQ ID NO: 6663 - DNA, 15 bp, Homo sapiens
tgtatggagacactg

SEQ ID NO: 6664 - DNA, 15 bp, Homo sapiens
gtgtatggagacact

SEQ ID NO: 6665 - DNA, 15 bp, Homo sapiens
tgtgtatggagacac

SEQ ID NO: 6666 - DNA, 15 bp, Homo sapiens
atgtgtatggagaca

SEQ ID NO: 6667 - DNA, 15 bp, Homo sapiens
catgtgtatggagac

SEQ ID NO: 6668 - DNA, 15 bp, Homo sapiens
gcatgtgtatggaga

SEQ ID NO: 6669 - DNA, 15 bp, Homo sapiens
agcatgtgtatggag

SEQ ID NO: 6670 - DNA, 15 bp, Homo sapiens
tagcatgtgtatgga

SEQ ID NO: 6671 - DNA, 15 bp, Homo sapiens
ctagcatgtgtatgg

SEQ ID NO: 6672 - DNA, 15 bp, Homo sapiens
gctagcatgtgtatg

SEQ ID NO: 6673 - DNA, 15 bp, Homo sapiens
tgctagcatgtgtat

SEQ ID NO: 6674 - DNA, 15 bp, Homo sapiens
gtgctagcatgtgta

SEQ ID NO: 6675 - DNA, 15 bp, Homo sapiens
agtgctagcatgtgt

SEQ ID NO: 6676 - DNA, 15 bp, Homo sapiens
aagtgctagcatgtg

SEQ ID NO: 6677 - DNA, 15 bp, Homo sapiens
aaagtgctagcatgt

SEQ ID NO: 6678 - DNA, 15 bp, Homo sapiens
aaaagtgctagcatg

SEQ ID NO: 6679 - DNA, 15 bp, Homo sapiens
taaaagtgctagcat

SEQ ID NO: 6680 - DNA, 15 bp, Homo sapiens
ttaaaagtgctagca

SEQ ID NO: 6681 - DNA, 15 bp, Homo sapiens
attaaaagtgctagc

SEQ ID NO: 6682 - DNA, 15 bp, Homo sapiens
tattaaaagtgctag

SEQ ID NO: 6683 - DNA, 15 bp, Homo sapiens
atattaaaagtgcta

SEQ ID NO: 6684 - DNA, 15 bp, Homo sapiens
aatattaaaagtgct

SEQ ID NO: 6685 - DNA, 15 bp, Homo sapiens
aaatattaaaagtgc

SEQ ID NO: 6686 - DNA, 15 bp, Homo sapiens
taaatattaaaagtg

SEQ ID NO: 6687 - DNA, 15 bp, Homo sapiens
ttaaatattaaaagt

SEQ ID NO: 6688 - DNA, 15 bp, Homo sapiens
attaaatattaaaag

SEQ ID NO: 6689 - DNA, 15 bp, Homo sapiens
aattaaatattaaaa

SEQ ID NO: 6690 - DNA, 15 bp, Homo sapiens
aaattaaatattaaa

SEQ ID NO: 6691 - DNA, 15 bp, Homo sapiens
taaattaaatattaa

SEQ ID NO: 6692 - DNA, 15 bp, Homo sapiens
ctaaattaaatatta

SEQ ID NO: 6693 - DNA, 15 bp, Homo sapiens
actaaattaaatatt

SEQ ID NO: 6694 - DNA, 15 bp, Homo sapiens
cactaaattaaatat

SEQ ID NO: 6695 - DNA, 15 bp, Homo sapiens
ccactaaattaaata

SEQ ID NO: 6696 - DNA, 15 bp, Homo sapiens
cccactaaattaaat

SEQ ID NO: 6697 - DNA, 15 bp, Homo sapiens
acccactaaattaaa

SEQ ID NO: 6698 - DNA, 15 bp, Homo sapiens
tacccactaaattaa

SEQ ID NO: 6699 - DNA, 15 bp, Homo sapiens
atacccactaaatta

SEQ ID NO: 6700 - DNA, 15 bp, Homo sapiens
catacccactaaatt

SEQ ID NO: 6701 - DNA, 15 bp, Homo sapiens
acatacccactaaat

SEQ ID NO: 6702 - DNA, 15 bp, Homo sapiens
tacatacccactaaa

SEQ ID NO: 6703 - DNA, 15 bp, Homo sapiens
ttacatacccactaa

SEQ ID NO: 6704 - DNA, 15 bp, Homo sapiens
attacatacccacta

SEQ ID NO: 6705 - DNA, 15 bp, Homo sapiens
cattacatacccact

SEQ ID NO: 6706 - DNA, 15 bp, Homo sapiens
tcattacatacccac

SEQ ID NO: 6707 - DNA, 15 bp, Homo sapiens
atcattacataccca

SEQ ID NO: 6708 - DNA, 15 bp, Homo sapiens
tatcattacataccc

SEQ ID NO: 6709 - DNA, 15 bp, Homo sapiens
atatcattacatacc

SEQ ID NO: 6710 - DNA, 15 bp, Homo sapiens
gatatcattacatac

SEQ ID NO: 6711 - DNA, 15 bp, Homo sapiens
agatatcattacata

SEQ ID NO: 6712 - DNA, 15 bp, Homo sapiens
gagatatcattacat

SEQ ID NO: 6713 - DNA, 15 bp, Homo sapiens
tgagatatcattaca

SEQ ID NO: 6714 - DNA, 15 bp, Homo sapiens
atgagatatcattac

SEQ ID NO: 6715 - DNA, 15 bp, Homo sapiens
aatgagatatcatta

SEQ ID NO: 6716 - DNA, 15 bp, Homo sapiens
caatgagatatcatt

SEQ ID NO: 6717 - DNA, 15 bp, Homo sapiens
acaatgagatatcat

SEQ ID NO: 6718 - DNA, 15 bp, Homo sapiens
cacaatgagatatca

SEQ ID NO: 6719 - DNA, 15 bp, Homo sapiens
ccacaatgagatatc

SEQ ID NO: 6720 - DNA, 15 bp, Homo sapiens
accacaatgagatat

SEQ ID NO: 6721 - DNA, 15 bp, Homo sapiens
aaccacaatgagata

SEQ ID NO: 6722 - DNA, 15 bp, Homo sapiens
aaaccacaatgagat

SEQ ID NO: 6723 - DNA, 15 bp, Homo sapiens
aaaaccacaatgaga

SEQ ID NO: 6724 - DNA, 15 bp, Homo sapiens
taaaaccacaatgag

SEQ ID NO: 6725 - DNA, 15 bp, Homo sapiens
ttaaaaccacaatga

SEQ ID NO: 6726 - DNA, 15 bp, Homo sapiens
attaaaaccacaatg

SEQ ID NO: 6727 - DNA, 15 bp, Homo sapiens
aattaaaaccacaat

SEQ ID NO: 6728 - DNA, 15 bp, Homo sapiens
aaattaaaaccacaa

SEQ ID NO: 6729 - DNA, 15 bp, Homo sapiens
caaattaaaaccaca

SEQ ID NO: 6730 - DNA, 15 bp, Homo sapiens
gcaaattaaaaccac

SEQ ID NO: 6731 - DNA, 15 bp, Homo sapiens
tgcaaattaaaacca

SEQ ID NO: 6732 - DNA, 15 bp, Homo sapiens
atgcaaattaaaacc

SEQ ID NO: 6733 - DNA, 15 bp, Homo sapiens
aatgcaaattaaaac

SEQ ID NO: 6734 - DNA, 15 bp, Homo sapiens
aaatgcaaattaaaa

SEQ ID NO: 6735 - DNA, 15 bp, Homo sapiens
gaaatgcaaattaaa

SEQ ID NO: 6736 - DNA, 15 bp, Homo sapiens
agaaatgcaaattaa

SEQ ID NO: 6737 - DNA, 15 bp, Homo sapiens
gagaaatgcaaatta

SEQ ID NO: 6738 - DNA, 15 bp, Homo sapiens
agagaaatgcaaatt

SEQ ID NO: 6739 - DNA, 15 bp, Homo sapiens
cagagaaatgcaaat

SEQ ID NO: 6740 - DNA, 15 bp, Homo sapiens
gcagagaaatgcaaa

SEQ ID NO: 6741 - DNA, 15 bp, Homo sapiens
tgcagagaaatgcaa

SEQ ID NO: 6742 - DNA, 15 bp, Homo sapiens
ctgcagagaaatgca

SEQ ID NO: 6743 - DNA, 15 bp, Homo sapiens
gctgcagagaaatgc

SEQ ID NO: 6744 - DNA, 15 bp, Homo sapiens
agctgcagagaaatg

SEQ ID NO: 6745 - DNA, 15 bp, Homo sapiens
tagctgcagagaaat

SEQ ID NO: 6746 - DNA, 15 bp, Homo sapiens
ttagctgcagagaaa

SEQ ID NO: 6747 - DNA, 15 bp, Homo sapiens
attagctgcagagaa

SEQ ID NO: 6748 - DNA, 15 bp, Homo sapiens
cattagctgcagaga

SEQ ID NO: 6749 - DNA, 15 bp, Homo sapiens
tcattagctgcagag

SEQ ID NO: 6750 - DNA, 15 bp, Homo sapiens
atcattagctgcaga

SEQ ID NO: 6751 - DNA, 15 bp, Homo sapiens
catcattagctgcag

SEQ ID NO: 6752 - DNA, 15 bp, Homo sapiens
tcatcattagctgca

SEQ ID NO: 6753 - DNA, 15 bp, Homo sapiens
ctcatcattagctgc

SEQ ID NO: 6754 - DNA, 15 bp, Homo sapiens
actcatcattagctg

SEQ ID NO: 6755 - DNA, 15 bp, Homo sapiens
cactcatcattagct

SEQ ID NO: 6756 - DNA, 15 bp, Homo sapiens
acactcatcattagc

SEQ ID NO: 6757 - DNA, 15 bp, Homo sapiens
aacactcatcattag

SEQ ID NO: 6758 - DNA, 15 bp, Homo sapiens
aaacactcatcatta

SEQ ID NO: 6759 - DNA, 15 bp, Homo sapiens
gaaacactcatcatt

SEQ ID NO: 6760 - DNA, 15 bp, Homo sapiens
agaaacactcatcat

SEQ ID NO: 6761 - DNA, 15 bp, Homo sapiens
cagaaacactcatca

SEQ ID NO: 6762 - DNA, 15 bp, Homo sapiens
gcagaaacactcatc

SEQ ID NO: 6763 - DNA, 15 bp, Homo sapiens
agcagaaacactcat

SEQ ID NO: 6764 - DNA, 15 bp, Homo sapiens
aagcagaaacactca

SEQ ID NO: 6765 - DNA, 15 bp, Homo sapiens
taagcagaaacactc

SEQ ID NO: 6766 - DNA, 15 bp, Homo sapiens
ataagcagaaacact

SEQ ID NO: 6767 - DNA, 15 bp, Homo sapiens
aataagcagaaacac

SEQ ID NO: 6768 - DNA, 15 bp, Homo sapiens
aaataagcagaaaca

SEQ ID NO: 6769 - DNA, 15 bp, Homo sapiens
caaataagcagaaac

SEQ ID NO: 6770 - DNA, 15 bp, Homo sapiens
ccaaataagcagaaa

SEQ ID NO: 6771 - DNA, 15 bp, Homo sapiens
cccaaataagcagaa

SEQ ID NO: 6772 - DNA, 15 bp, Homo sapiens
tcccaaataagcaga

SEQ ID NO: 6773 - DNA, 15 bp, Homo sapiens
ttcccaaataagcag

SEQ ID NO: 6774 - DNA, 15 bp, Homo sapiens
cttcccaaataagca

SEQ ID NO: 6775 - DNA, 15 bp, Homo sapiens
ccttcccaaataagc

SEQ ID NO: 6776 - DNA, 15 bp, Homo sapiens
accttcccaaataag

SEQ ID NO: 6777 - DNA, 15 bp, Homo sapiens
aaccttcccaaataa

SEQ ID NO: 6778 - DNA, 15 bp, Homo sapiens
aaaccttcccaaata

SEQ ID NO: 6779 - DNA, 15 bp, Homo sapiens
aaaaccttcccaaat

SEQ ID NO: 6780 - DNA, 15 bp, Homo sapiens
taaaaccttcccaaa

SEQ ID NO: 6781 - DNA, 15 bp, Homo sapiens
ttaaaaccttcccaa

SEQ ID NO: 6782 - DNA, 15 bp, Homo sapiens
attaaaaccttccca

SEQ ID NO: 6783 - DNA, 15 bp, Homo sapiens
aattaaaaccttccc

SEQ ID NO: 6784 - DNA, 15 bp, Homo sapiens
aaattaaaaccttcc

SEQ ID NO: 6785 - DNA, 15 bp, Homo sapiens
taaattaaaaccttc

SEQ ID NO: 6786 - DNA, 15 bp, Homo sapiens
ctaaattaaaacctt

SEQ ID NO: 6787 - DNA, 15 bp, Homo sapiens
gctaaattaaaacct

SEQ ID NO: 6788 - DNA, 15 bp, Homo sapiens
tgctaaattaaaacc

SEQ ID NO: 6789 - DNA, 15 bp, Homo sapiens
ctgctaaattaaaac

SEQ ID NO: 6790 - DNA, 15 bp, Homo sapiens
actgctaaattaaaa

SEQ ID NO: 6791 - DNA, 15 bp, Homo sapiens
gactgctaaattaaa

SEQ ID NO: 6792 - DNA, 15 bp, Homo sapiens
agactgctaaattaa

SEQ ID NO: 6793 - DNA, 15 bp, Homo sapiens
cagactgctaaatta

SEQ ID NO: 6794 - DNA, 15 bp, Homo sapiens
acagactgctaaatt

SEQ ID NO: 6795 - DNA, 15 bp, Homo sapiens
aacagactgctaaat

SEQ ID NO: 6796 - DNA, 15 bp, Homo sapiens
caacagactgctaaa

SEQ ID NO: 6797 - DNA, 15 bp, Homo sapiens
acaacagactgctaa

SEQ ID NO: 6798 - DNA, 15 bp, Homo sapiens
tacaacagactgcta

SEQ ID NO: 6799 - DNA, 15 bp, Homo sapiens
atacaacagactgct

SEQ ID NO: 6800 - DNA, 15 bp, Homo sapiens
aatacaacagactgc

SEQ ID NO: 6801 - DNA, 15 bp, Homo sapiens
gaatacaacagactg

SEQ ID NO: 6802 - DNA, 15 bp, Homo sapiens
agaatacaacagact

SEQ ID NO: 6803 - DNA, 15 bp, Homo sapiens
cagaatacaacagac

SEQ ID NO: 6804 - DNA, 15 bp, Homo sapiens
acagaatacaacaga

SEQ ID NO: 6805 - DNA, 15 bp, Homo sapiens
tacagaatacaacag

SEQ ID NO: 6806 - DNA, 15 bp, Homo sapiens
ctacagaatacaaca

SEQ ID NO: 6807 - DNA, 15 bp, Homo sapiens
tctacagaatacaac

SEQ ID NO: 6808 - DNA, 15 bp, Homo sapiens
atctacagaatacaa

SEQ ID NO: 6809 - DNA, 15 bp, Homo sapiens
tatctacagaataca

SEQ ID NO: 6810 - DNA, 15 bp, Homo sapiens
atatctacagaatac

SEQ ID NO: 6811 - DNA, 15 bp, Homo sapiens
aatatctacagaata

SEQ ID NO: 6812 - DNA, 15 bp, Homo sapiens
taatatctacagaat

SEQ ID NO: 6813 - DNA, 15 bp, Homo sapiens
ttaatatctacagaa

SEQ ID NO: 6814 - DNA, 15 bp, Homo sapiens
attaatatctacaga

SEQ ID NO: 6815 - DNA, 15 bp, Homo sapiens
tattaatatctacag

SEQ ID NO: 6816 - DNA, 15 bp, Homo sapiens
ttattaatatctaca

SEQ ID NO: 6817 - DNA, 15 bp, Homo sapiens
gttattaatatctac

SEQ ID NO: 6818 - DNA, 15 bp, Homo sapiens
agttattaatatcta

SEQ ID NO: 6819 - DNA, 15 bp, Homo sapiens
aagttattaatatct

SEQ ID NO: 6820 - DNA, 15 bp, Homo sapiens
gaagttattaatatc

SEQ ID NO: 6821 - DNA, 15 bp, Homo sapiens
tgaagttattaatat

SEQ ID NO: 6822 - DNA, 15 bp, Homo sapiens
ttgaagttattaata

SEQ ID NO: 6823 - DNA, 15 bp, Homo sapiens
tttgaagttattaat

SEQ ID NO: 6824 - DNA, 15 bp, Homo sapiens
ttttgaagttattaa

SEQ ID NO: 6825 - DNA, 15 bp, Homo sapiens
attttgaagttatta

SEQ ID NO: 6826 - DNA, 15 bp, Homo sapiens
tattttgaagttatt

SEQ ID NO: 6827 - DNA, 15 bp, Homo sapiens
atattttgaagttat

SEQ ID NO: 6828 - DNA, 15 bp, Homo sapiens
gatattttgaagtta

SEQ ID NO: 6829 - DNA, 15 bp, Homo sapiens
tgatattttgaagtt

SEQ ID NO: 6830 - DNA, 15 bp, Homo sapiens
ctgatattttgaagt

SEQ ID NO: 6831 - DNA, 15 bp, Homo sapiens
actgatattttgaag

SEQ ID NO: 6832 - DNA, 15 bp, Homo sapiens
cactgatattttgaa

SEQ ID NO: 6833 - DNA, 15 bp, Homo sapiens
ccactgatattttga

SEQ ID NO: 6834 - DNA, 15 bp, Homo sapiens
gccactgatattttg

SEQ ID NO: 6835 - DNA, 15 bp, Homo sapiens
tgccactgatatttt

SEQ ID NO: 6836 - DNA, 15 bp, Homo sapiens
atgccactgatattt

SEQ ID NO: 6837 - DNA, 15 bp, Homo sapiens
aatgccactgatatt

SEQ ID NO: 6838 - DNA, 15 bp, Homo sapiens
aaatgccactgatat

SEQ ID NO: 6839 - DNA, 15 bp, Homo sapiens
caaatgccactgata

SEQ ID NO: 6840 - DNA, 15 bp, Homo sapiens
gcaaatgccactgat

SEQ ID NO: 6841 - DNA, 15 bp, Homo sapiens
tgcaaatgccactga

SEQ ID NO: 6842 - DNA, 15 bp, Homo sapiens
ctgcaaatgccactg

SEQ ID NO: 6843 - DNA, 15 bp, Homo sapiens
actgcaaatgccact

SEQ ID NO: 6844 - DNA, 15 bp, Homo sapiens
aactgcaaatgccac

SEQ ID NO: 6845 - DNA, 15 bp, Homo sapiens
taactgcaaatgcca

SEQ ID NO: 6846 - DNA, 15 bp, Homo sapiens
ttaactgcaaatgcc

SEQ ID NO: 6847 - DNA, 15 bp, Homo sapiens
tttaactgcaaatgc

SEQ ID NO: 6848 - DNA, 15 bp, Homo sapiens
ttttaactgcaaatg

SEQ ID NO: 6849 - DNA, 15 bp, Homo sapiens
attttaactgcaaat

SEQ ID NO: 6850 - DNA, 15 bp, Homo sapiens
aattttaactgcaaa

SEQ ID NO: 6851 - DNA, 15 bp, Homo sapiens
aaattttaactgcaa

SEQ ID NO: 6852 - DNA, 15 bp, Homo sapiens
gaaattttaactgca

SEQ ID NO: 6853 - DNA, 15 bp, Homo sapiens
ggaaattttaactgc

SEQ ID NO: 6854 - DNA, 15 bp, Homo sapiens
aggaaattttaactg

SEQ ID NO: 6855 - DNA, 15 bp, Homo sapiens
aaggaaattttaact

SEQ ID NO: 6856 - DNA, 15 bp, Homo sapiens
taaggaaattttaac

SEQ ID NO: 6857 - DNA, 15 bp, Homo sapiens
ttaaggaaattttaa

SEQ ID NO: 6858 - DNA, 15 bp, Homo sapiens
tttaaggaaatttta

SEQ ID NO: 6859 - DNA, 15 bp, Homo sapiens
ttttaaggaaatttt

SEQ ID NO: 6860 - DNA, 15 bp, Homo sapiens
tttttaaggaaattt

SEQ ID NO: 6861 - DNA, 15 bp, Homo sapiens
ttttttaaggaaatt

SEQ ID NO: 6862 - DNA, 15 bp, Homo sapiens
attttttaaggaaat

SEQ ID NO: 6863 - DNA, 15 bp, Homo sapiens
aattttttaaggaaa

SEQ ID NO: 6864 - DNA, 15 bp, Homo sapiens
caattttttaaggaa

SEQ ID NO: 6865 - DNA, 15 bp, Homo sapiens
ccaattttttaagga

SEQ ID NO: 6866 - DNA, 15 bp, Homo sapiens
gccaattttttaagg

SEQ ID NO: 6867 - DNA, 15 bp, Homo sapiens
ggccaattttttaag

SEQ ID NO: 6868 - DNA, 15 bp, Homo sapiens
tggccaattttttaa

SEQ ID NO: 6869 - DNA, 15 bp, Homo sapiens
ttggccaatttttta

SEQ ID NO: 6870 - DNA, 15 bp, Homo sapiens
tttggccaatttttt

SEQ ID NO: 6871 - DNA, 15 bp, Homo sapiens
ctttggccaattttt

SEQ ID NO: 6872 - DNA, 15 bp, Homo sapiens
cctttggccaatttt

SEQ ID NO: 6873 - DNA, 15 bp, Homo sapiens
acctttggccaattt

SEQ ID NO: 6874 - DNA, 15 bp, Homo sapiens
aacctttggccaatt

SEQ ID NO: 6875 - DNA, 15 bp, Homo sapiens
aaacctttggccaat

SEQ ID NO: 6876 - DNA, 15 bp, Homo sapiens
gaaacctttggccaa

SEQ ID NO: 6877 - DNA, 15 bp, Homo sapiens
ggaaacctttggcca

SEQ ID NO: 6878 - DNA, 15 bp, Homo sapiens
tggaaacctttggcc

SEQ ID NO: 6879 - DNA, 15 bp, Homo sapiens
ctggaaacctttggc

SEQ ID NO: 6880 - DNA, 15 bp, Homo sapiens
gctggaaacctttgg

SEQ ID NO: 6881 - DNA, 15 bp, Homo sapiens
tgctggaaacctttg

SEQ ID NO: 6882 - DNA, 15 bp, Homo sapiens
ctgctggaaaccttt

SEQ ID NO: 6883 - DNA, 15 bp, Homo sapiens
actgctggaaacctt

SEQ ID NO: 6884 - DNA, 15 bp, Homo sapiens
gactgctggaaacct

SEQ ID NO: 6885 - DNA, 15 bp, Homo sapiens
tgactgctggaaacc

SEQ ID NO: 6886 - DNA, 15 bp, Homo sapiens
gtgactgctggaaac

SEQ ID NO: 6887 - DNA, 15 bp, Homo sapiens
agtgactgctggaaa

SEQ ID NO: 6888 - DNA, 15 bp, Homo sapiens
aagtgactgctggaa

SEQ ID NO: 6889 - DNA, 15 bp, Homo sapiens
gaagtgactgctgga

SEQ ID NO: 6890 - DNA, 15 bp, Homo sapiens
agaagtgactgctgg

SEQ ID NO: 6891 - DNA, 15 bp, Homo sapiens
cagaagtgactgctg

SEQ ID NO: 6892 - DNA, 15 bp, Homo sapiens
gcagaagtgactgct

SEQ ID NO: 6893 - DNA, 15 bp, Homo sapiens
ggcagaagtgactgc

SEQ ID NO: 6894 - DNA, 15 bp, Homo sapiens
tggcagaagtgactg

SEQ ID NO: 6895 - DNA, 15 bp, Homo sapiens
atggcagaagtgact

SEQ ID NO: 6896 - DNA, 15 bp, Homo sapiens
catggcagaagtgac

SEQ ID NO: 6897 - DNA, 15 bp, Homo sapiens
gcatggcagaagtga

SEQ ID NO: 6898 - DNA, 15 bp, Homo sapiens
ggcatggcagaagtg

SEQ ID NO: 6899 - DNA, 15 bp, Homo sapiens
gggcatggcagaagt

SEQ ID NO: 6900 - DNA, 15 bp, Homo sapiens
tgggcatggcagaag

SEQ ID NO: 6901 - DNA, 15 bp, Homo sapiens
ttgggcatggcagaa

SEQ ID NO: 6902 - DNA, 15 bp, Homo sapiens
tttgggcatggcaga

SEQ ID NO: 6903 - DNA, 15 bp, Homo sapiens
gtttgggcatggcag

SEQ ID NO: 6904 - DNA, 15 bp, Homo sapiens
agtttgggcatggca

SEQ ID NO: 6905 - DNA, 15 bp, Homo sapiens
cagtttgggcatggc

SEQ ID NO: 6906 - DNA, 15 bp, Homo sapiens
acagtttgggcatgg

SEQ ID NO: 6907 - DNA, 15 bp, Homo sapiens
tacagtttgggcatg

SEQ ID NO: 6908 - DNA, 15 bp, Homo sapiens
atacagtttgggcat

SEQ ID NO: 6909 - DNA, 15 bp, Homo sapiens
catacagtttgggca

SEQ ID NO: 6910 - DNA, 15 bp, Homo sapiens
tcatacagtttgggc

SEQ ID NO: 6911 - DNA, 15 bp, Homo sapiens
ttcatacagtttggg

SEQ ID NO: 6912 - DNA, 15 bp, Homo sapiens
tttcatacagtttgg

SEQ ID NO: 6913 - DNA, 15 bp, Homo sapiens
gtttcatacagtttg

SEQ ID NO: 6914 - DNA, 15 bp, Homo sapiens
tgtttcatacagttt

SEQ ID NO: 6915 - DNA, 15 bp, Homo sapiens
ttgtttcatacagtt

SEQ ID NO: 6916 - DNA, 15 bp, Homo sapiens
cttgtttcatacagt

SEQ ID NO: 6917 - DNA, 15 bp, Homo sapiens
ccttgtttcatacag

SEQ ID NO: 6918 - DNA, 15 bp, Homo sapiens
gccttgtttcataca

SEQ ID NO: 6919 - DNA, 15 bp, Homo sapiens
agccttgtttcatac

SEQ ID NO: 6920 - DNA, 15 bp, Homo sapiens
cagccttgtttcata

SEQ ID NO: 6921 - DNA, 15 bp, Homo sapiens
tcagccttgtttcat

SEQ ID NO: 6922 - DNA, 15 bp, Homo sapiens
ctcagccttgtttca

SEQ ID NO: 6923 - DNA, 15 bp, Homo sapiens
cctcagccttgtttc

SEQ ID NO: 6924 - DNA, 15 bp, Homo sapiens
acctcagccttgttt

SEQ ID NO: 6925 - DNA, 15 bp, Homo sapiens
cacctcagccttgtt

SEQ ID NO: 6926 - DNA, 15 bp, Homo sapiens
acacctcagccttgt

SEQ ID NO: 6927 - DNA, 15 bp, Homo sapiens
cacacctcagccttg

SEQ ID NO: 6928 - DNA, 15 bp, Homo sapiens
ccacacctcagcctt

SEQ ID NO: 6929 - DNA, 15 bp, Homo sapiens
tccacacctcagcct

SEQ ID NO: 6930 - DNA, 15 bp, Homo sapiens
ctccacacctcagcc

SEQ ID NO: 6931 - DNA, 15 bp, Homo sapiens
tctccacacctcagc

SEQ ID NO: 6932 - DNA, 15 bp, Homo sapiens
atctccacacctcag

SEQ ID NO: 6933 - DNA, 15 bp, Homo sapiens
aatctccacacctca

SEQ ID NO: 6934 - DNA, 15 bp, Homo sapiens
caatctccacacctc

SEQ ID NO: 6935 - DNA, 15 bp, Homo sapiens
acaatctccacacct

SEQ ID NO: 6936 - DNA, 15 bp, Homo sapiens
gacaatctccacacc

SEQ ID NO: 6937 - DNA, 15 bp, Homo sapiens
tgacaatctccacac

SEQ ID NO: 6938 - DNA, 15 bp, Homo sapiens
gtgacaatctccaca

SEQ ID NO: 6939 - DNA, 15 bp, Homo sapiens
tgtgacaatctccac

SEQ ID NO: 6940 - DNA, 15 bp, Homo sapiens
atgtgacaatctcca

SEQ ID NO: 6941 - DNA, 15 bp, Homo sapiens
aatgtgacaatctcc

SEQ ID NO: 6942 - DNA, 15 bp, Homo sapiens
aaatgtgacaatctc

SEQ ID NO: 6943 - DNA, 15 bp, Homo sapiens
aaaatgtgacaatct

SEQ ID NO: 6944 - DNA, 15 bp, Homo sapiens
caaaatgtgacaatc

SEQ ID NO: 6945 - DNA, 15 bp, Homo sapiens
ccaaaatgtgacaat

SEQ ID NO: 6946 - DNA, 15 bp, Homo sapiens
gccaaaatgtgacaa

SEQ ID NO: 6947 - DNA, 15 bp, Homo sapiens
tgccaaaatgtgaca

SEQ ID NO: 6948 - DNA, 15 bp, Homo sapiens
ttgccaaaatgtgac

SEQ ID NO: 6949 - DNA, 15 bp, Homo sapiens
cttgccaaaatgtga

SEQ ID NO: 6950 - DNA, 15 bp, Homo sapiens
ccttgccaaaatgtg

SEQ ID NO: 6951 - DNA, 15 bp, Homo sapiens
tccttgccaaaatgt

SEQ ID NO: 6952 - DNA, 15 bp, Homo sapiens
ctccttgccaaaatg

SEQ ID NO: 6953 - DNA, 15 bp, Homo sapiens
actccttgccaaaat

SEQ ID NO: 6954 - DNA, 15 bp, Homo sapiens
cactccttgccaaaa

SEQ ID NO: 6955 - DNA, 15 bp, Homo sapiens
tcactccttgccaaa

SEQ ID NO: 6956 - DNA, 15 bp, Homo sapiens
atcactccttgccaa

SEQ ID NO: 6957 - DNA, 15 bp, Homo sapiens
gatcactccttgcca

SEQ ID NO: 6958 - DNA, 15 bp, Homo sapiens
ggatcactccttgcc

SEQ ID NO: 6959 - DNA, 15 bp, Homo sapiens
tggatcactccttgc

SEQ ID NO: 6960 - DNA, 15 bp, Homo sapiens
gtggatcactccttg

SEQ ID NO: 6961 - DNA, 15 bp, Homo sapiens
agtggatcactcctt

SEQ ID NO: 6962 - DNA, 15 bp, Homo sapiens
aagtggatcactcct

SEQ ID NO: 6963 - DNA, 15 bp, Homo sapiens
caagtggatcactcc

SEQ ID NO: 6964 - DNA, 15 bp, Homo sapiens
ccaagtggatcactc

SEQ ID NO: 6965 - DNA, 15 bp, Homo sapiens
cccaagtggatcact

SEQ ID NO: 6966 - DNA, 15 bp, Homo sapiens
acccaagtggatcac

SEQ ID NO: 6967 - DNA, 15 bp, Homo sapiens
cacccaagtggatca

SEQ ID NO: 6968 - DNA, 15 bp, Homo sapiens
tcacccaagtggatc

SEQ ID NO: 6969 - DNA, 15 bp, Homo sapiens
gtcacccaagtggat

SEQ ID NO: 6970 - DNA, 15 bp, Homo sapiens
agtcacccaagtgga

SEQ ID NO: 6971 - DNA, 15 bp, Homo sapiens
cagtcacccaagtgg

SEQ ID NO: 6972 - DNA, 15 bp, Homo sapiens
tcagtcacccaagtg

SEQ ID NO: 6973 - DNA, 15 bp, Homo sapiens
atcagtcacccaagt

SEQ ID NO: 6974 - DNA, 15 bp, Homo sapiens
catcagtcacccaag

SEQ ID NO: 6975 - DNA, 15 bp, Homo sapiens
tcatcagtcacccaa

SEQ ID NO: 6976 - DNA, 15 bp, Homo sapiens
ctcatcagtcaccca

SEQ ID NO: 6977 - DNA, 15 bp, Homo sapiens
tctcatcagtcaccc

SEQ ID NO: 6978 - DNA, 15 bp, Homo sapiens
gtctcatcagtcacc

SEQ ID NO: 6979 - DNA, 15 bp, Homo sapiens
ggtctcatcagtcac

SEQ ID NO: 6980 - DNA, 15 bp, Homo sapiens
gggtctcatcagtca

SEQ ID NO: 6981 - DNA, 15 bp, Homo sapiens
tgggtctcatcagtc

SEQ ID NO: 6982 - DNA, 15 bp, Homo sapiens
ctgggtctcatcagt

SEQ ID NO: 6983 - DNA, 15 bp, Homo sapiens
tctgggtctcatcag

SEQ ID NO: 6984 - DNA, 15 bp, Homo sapiens
ctctgggtctcatca

SEQ ID NO: 6985 - DNA, 15 bp, Homo sapiens
tctctgggtctcatc

SEQ ID NO: 6986 - DNA, 15 bp, Homo sapiens
ctctctgggtctcat

SEQ ID NO: 6987 - DNA, 15 bp, Homo sapiens
gctctctgggtctca

SEQ ID NO: 6988 - DNA, 15 bp, Homo sapiens
cgctctctgggtctc

SEQ ID NO: 6989 - DNA, 15 bp, Homo sapiens
acgctctctgggtct

SEQ ID NO: 6990 - DNA, 15 bp, Homo sapiens
tacgctctctgggtc

SEQ ID NO: 6991 - DNA, 15 bp, Homo sapiens
gtacgctctctgggt

SEQ ID NO: 6992 - DNA, 15 bp, Homo sapiens
cgtacgctctctggg

SEQ ID NO: 6993 - DNA, 15 bp, Homo sapiens
gcgtacgctctctgg

SEQ ID NO: 6994 - DNA, 15 bp, Homo sapiens
ggcgtacgctctctg

SEQ ID NO: 6995 - DNA, 15 bp, Homo sapiens
aggcgtacgctctct

SEQ ID NO: 6996 - DNA, 15 bp, Homo sapiens
gaggcgtacgctctc

SEQ ID NO: 6997 - DNA, 15 bp, Homo sapiens
cgaggcgtacgctct

SEQ ID NO: 6998 - DNA, 15 bp, Homo sapiens
ccgaggcgtacgctc

SEQ ID NO: 6999 - DNA, 15 bp, Homo sapiens
cccgaggcgtacgct

SEQ ID NO: 7000 - DNA, 15 bp, Homo sapiens
gcccgaggcgtacgc

SEQ ID NO: 7001 - DNA, 15 bp, Homo sapiens
agcccgaggcgtacg

SEQ ID NO: 7002 - DNA, 15 bp, Homo sapiens
aagcccgaggcgtac

SEQ ID NO: 7003 - DNA, 15 bp, Homo sapiens
caagcccgaggcgta

SEQ ID NO: 7004 - DNA, 15 bp, Homo sapiens
tcaagcccgaggcgt

SEQ ID NO: 7005 - DNA, 15 bp, Homo sapiens
ctcaagcccgaggcg

SEQ ID NO: 7006 - DNA, 15 bp, Homo sapiens
cctcaagcccgaggc

SEQ ID NO: 7007 - DNA, 15 bp, Homo sapiens
ccctcaagcccgagg

SEQ ID NO: 7008 - DNA, 15 bp, Homo sapiens
accctcaagcccgag

SEQ ID NO: 7009 - DNA, 15 bp, Homo sapiens
caccctcaagcccga

SEQ ID NO: 7010 - DNA, 15 bp, Homo sapiens
tcaccctcaagcccg

SEQ ID NO: 7011 - DNA, 15 bp, Homo sapiens
ctcaccctcaagccc

SEQ ID NO: 7012 - DNA, 15 bp, Homo sapiens
cctcaccctcaagcc

SEQ ID NO: 7013 - DNA, 15 bp, Homo sapiens
tcctcaccctcaagc

SEQ ID NO: 7014 - DNA, 15 bp, Homo sapiens
gtcctcaccctcaag

SEQ ID NO: 7015 - DNA, 15 bp, Homo sapiens
cgtcctcaccctcaa

SEQ ID NO: 7016 - DNA, 15 bp, Homo sapiens
ccgtcctcaccctca

SEQ ID NO: 7017 - DNA, 15 bp, Homo sapiens
cccgtcctcaccctc

SEQ ID NO: 7018 - DNA, 15 bp, Homo sapiens
gcccgtcctcaccct

SEQ ID NO: 7019 - DNA, 15 bp, Homo sapiens
cgcccgtcctcaccc

SEQ ID NO: 7020 - DNA, 15 bp, Homo sapiens
ccgcccgtcctcacc

SEQ ID NO: 7021 - DNA, 15 bp, Homo sapiens
cccgcccgtcctcac

SEQ ID NO: 7022 - DNA, 15 bp, Homo sapiens
tcccgcccgtcctca

SEQ ID NO: 7023 - DNA, 15 bp, Homo sapiens
ttcccgcccgtcctc

SEQ ID NO: 7024 - DNA, 15 bp, Homo sapiens
cttcccgcccgtcct

SEQ ID NO: 7025 - DNA, 15 bp, Homo sapiens
acttcccgcccgtcc

SEQ ID NO: 7026 - DNA, 15 bp, Homo sapiens
gacttcccgcccgtc

SEQ ID NO: 7027 - DNA, 15 bp, Homo sapiens
cgacttcccgcccgt

SEQ ID NO: 7028 - DNA, 15 bp, Homo sapiens
tcgacttcccgcccg

SEQ ID NO: 7029 - DNA, 15 bp, Homo sapiens
gtcgacttcccgccc

SEQ ID NO: 7030 - DNA, 15 bp, Homo sapiens
agtcgacttcccgcc

SEQ ID NO: 7031 - DNA, 15 bp, Homo sapiens
cagtcgacttcccgc

SEQ ID NO: 7032 - DNA, 15 bp, Homo sapiens
gcagtcgacttcccg

SEQ ID NO: 7033 - DNA, 15 bp, Homo sapiens
tgcagtcgacttccc

SEQ ID NO: 7034 - DNA, 15 bp, Homo sapiens
atgcagtcgacttcc

SEQ ID NO: 7035 - DNA, 15 bp, Homo sapiens
catgcagtcgacttc

SEQ ID NO: 7036 - DNA, 15 bp, Homo sapiens
ccatgcagtcgactt

SEQ ID NO: 7037 - DNA, 15 bp, Homo sapiens
gccatgcagtcgact

SEQ ID NO: 7038 - DNA, 15 bp, Homo sapiens
ggccatgcagtcgac

SEQ ID NO: 7039 - DNA, 15 bp, Homo sapiens
gggccatgcagtcga

SEQ ID NO: 7040 - DNA, 15 bp, Homo sapiens
agggccatgcagtcg

SEQ ID NO: 7041 - DNA, 15 bp, Homo sapiens
cagggccatgcagtc

SEQ ID NO: 7042 - DNA, 15 bp, Homo sapiens
gcagggccatgcagt

SEQ ID NO: 7043 - DNA, 15 bp, Homo sapiens
agcagggccatgcag

SEQ ID NO: 7044 - DNA, 15 bp, Homo sapiens
cagcagggccatgca

SEQ ID NO: 7045 - DNA, 15 bp, Homo sapiens
ccagcagggccatgc

SEQ ID NO: 7046 - DNA, 15 bp, Homo sapiens
gccagcagggccatg

SEQ ID NO: 7047 - DNA, 15 bp, Homo sapiens
ggccagcagggccat

SEQ ID NO: 7048 - DNA, 15 bp, Homo sapiens
aggccagcagggcca

SEQ ID NO: 7049 - DNA, 15 bp, Homo sapiens
aaggccagcagggcc

SEQ ID NO: 7050 - DNA, 15 bp, Homo sapiens
caaggccagcagggc

SEQ ID NO: 7051 - DNA, 15 bp, Homo sapiens
ccaaggccagcaggg

SEQ ID NO: 7052 - DNA, 15 bp, Homo sapiens
cccaaggccagcagg

SEQ ID NO: 7053 - DNA, 15 bp, Homo sapiens
tcccaaggccagcag

SEQ ID NO: 7054 - DNA, 15 bp, Homo sapiens
ctcccaaggccagca

SEQ ID NO: 7055 - DNA, 15 bp, Homo sapiens
cctcccaaggccagc

SEQ ID NO: 7056 - DNA, 15 bp, Homo sapiens
gcctcccaaggccag

SEQ ID NO: 7057 - DNA, 15 bp, Homo sapiens
agcctcccaaggcca

SEQ ID NO: 7058 - DNA, 15 bp, Homo sapiens
cagcctcccaaggcc

SEQ ID NO: 7059 - DNA, 15 bp, Homo sapiens
gcagcctcccaaggc

SEQ ID NO: 7060 - DNA, 15 bp, Homo sapiens
ggcagcctcccaagg

SEQ ID NO: 7061 - DNA, 15 bp, Homo sapiens
gggcagcctcccaag

SEQ ID NO: 7062 - DNA, 15 bp, Homo sapiens
tgggcagcctcccaa

SEQ ID NO: 7063 - DNA, 15 bp, Homo sapiens
ctgggcagcctccca

SEQ ID NO: 7064 - DNA, 15 bp, Homo sapiens
actgggcagcctccc

SEQ ID NO: 7065 - DNA, 15 bp, Homo sapiens
gactgggcagcctcc

SEQ ID NO: 7066 - DNA, 15 bp, Homo sapiens
ggactgggcagcctc

SEQ ID NO: 7067 - DNA, 15 bp, Homo sapiens
aggactgggcagcct

SEQ ID NO: 7068 - DNA, 15 bp, Homo sapiens
aaggactgggcagcc

SEQ ID NO: 7069 - DNA, 15 bp, Homo sapiens
taaggactgggcagc

SEQ ID NO: 7070 - DNA, 15 bp, Homo sapiens
ctaaggactgggcag

SEQ ID NO: 7071 - DNA, 15 bp, Homo sapiens
gctaaggactgggca

SEQ ID NO: 7072 - DNA, 15 bp, Homo sapiens
agctaaggactgggc

SEQ ID NO: 7073 - DNA, 15 bp, Homo sapiens
tagctaaggactggg

SEQ ID NO: 7074 - DNA, 15 bp, Homo sapiens
ttagctaaggactgg

SEQ ID NO: 7075 - DNA, 15 bp, Homo sapiens
tttagctaaggactg

SEQ ID NO: 7076 - DNA, 15 bp, Homo sapiens
ctttagctaaggact

SEQ ID NO: 7077 - DNA, 15 bp, Homo sapiens
gctttagctaaggac

SEQ ID NO: 7078 - DNA, 15 bp, Homo sapiens
agctttagctaagga

SEQ ID NO: 7079 - DNA, 15 bp, Homo sapiens
cagctttagctaagg

SEQ ID NO: 7080 - DNA, 15 bp, Homo sapiens
ccagctttagctaag

SEQ ID NO: 7081 - DNA, 15 bp, Homo sapiens
gccagctttagctaa

SEQ ID NO: 7082 - DNA, 15 bp, Homo sapiens
tgccagctttagcta

SEQ ID NO: 7083 - DNA, 15 bp, Homo sapiens
ctgccagctttagct

SEQ ID NO: 7084 - DNA, 15 bp, Homo sapiens
actgccagctttagc

SEQ ID NO: 7085 - DNA, 15 bp, Homo sapiens
aactgccagctttag

SEQ ID NO: 7086 - DNA, 15 bp, Homo sapiens
taactgccagcttta

SEQ ID NO: 7087 - DNA, 15 bp, Homo sapiens
ataactgccagcttt

SEQ ID NO: 7088 - DNA, 15 bp, Homo sapiens
cataactgccagctt

SEQ ID NO: 7089 - DNA, 15 bp, Homo sapiens
ccataactgccagct

SEQ ID NO: 7090 - DNA, 15 bp, Homo sapiens
cccataactgccagc

SEQ ID NO: 7091 - DNA, 15 bp, Homo sapiens
tcccataactgccag

SEQ ID NO: 7092 - DNA, 15 bp, Homo sapiens
ttcccataactgcca

SEQ ID NO: 7093 - DNA, 15 bp, Homo sapiens
tttcccataactgcc

SEQ ID NO: 7094 - DNA, 15 bp, Homo sapiens
gtttcccataactgc

SEQ ID NO: 7095 - DNA, 15 bp, Homo sapiens
tgtttcccataactg

SEQ ID NO: 7096 - DNA, 15 bp, Homo sapiens
ctgtttcccataact

SEQ ID NO: 7097 - DNA, 15 bp, Homo sapiens
tctgtttcccataac

SEQ ID NO: 7098 - DNA, 15 bp, Homo sapiens
gtctgtttcccataa

SEQ ID NO: 7099 - DNA, 15 bp, Homo sapiens
agtctgtttcccata

SEQ ID NO: 7100 - DNA, 15 bp, Homo sapiens
aagtctgtttcccat

SEQ ID NO: 7101 - DNA, 15 bp, Homo sapiens
taagtctgtttccca

SEQ ID NO: 7102 - DNA, 15 bp, Homo sapiens
ctaagtctgtttccc

SEQ ID NO: 7103 - DNA, 15 bp, Homo sapiens
tctaagtctgtttcc

SEQ ID NO: 7104 - DNA, 15 bp, Homo sapiens
atctaagtctgtttc

SEQ ID NO: 7105 - DNA, 15 bp, Homo sapiens
aatctaagtctgttt

SEQ ID NO: 7106 - DNA, 15 bp, Homo sapiens
gaatctaagtctgtt

SEQ ID NO: 7107 - DNA, 15 bp, Homo sapiens
agaatctaagtctgt

SEQ ID NO: 7108 - DNA, 15 bp, Homo sapiens
tagaatctaagtctg

SEQ ID NO: 7109 - DNA, 15 bp, Homo sapiens
atagaatctaagtct

SEQ ID NO: 7110 - DNA, 15 bp, Homo sapiens
aatagaatctaagtc

SEQ ID NO: 7111 - DNA, 15 bp, Homo sapiens
taatagaatctaagt

SEQ ID NO: 7112 - DNA, 15 bp, Homo sapiens
gtaatagaatctaag

SEQ ID NO: 7113 - DNA, 15 bp, Homo sapiens
cgtaatagaatctaa

SEQ ID NO: 7114 - DNA, 15 bp, Homo sapiens
acgtaatagaatcta

SEQ ID NO: 7115 - DNA, 15 bp, Homo sapiens
aacgtaatagaatct

SEQ ID NO: 7116 - DNA, 15 bp, Homo sapiens
aaacgtaatagaatc

SEQ ID NO: 7117 - DNA, 15 bp, Homo sapiens
aaaacgtaatagaat

SEQ ID NO: 7118 - DNA, 15 bp, Homo sapiens
aaaaacgtaatagaa

SEQ ID NO: 7119 - DNA, 15 bp, Homo sapiens
gaaaaacgtaataga

SEQ ID NO: 7120 - DNA, 15 bp, Homo sapiens
tgaaaaacgtaatag

SEQ ID NO: 7121 - DNA, 15 bp, Homo sapiens
ctgaaaaacgtaata

SEQ ID NO: 7122 - DNA, 15 bp, Homo sapiens
cctgaaaaacgtaat

SEQ ID NO: 7123 - DNA, 15 bp, Homo sapiens
tcctgaaaaacgtaa

SEQ ID NO: 7124 - DNA, 15 bp, Homo sapiens
atcctgaaaaacgta

SEQ ID NO: 7125 - DNA, 15 bp, Homo sapiens
catcctgaaaaacgt

SEQ ID NO: 7126 - DNA, 15 bp, Homo sapiens
acatcctgaaaaacg

SEQ ID NO: 7127 - DNA, 15 bp, Homo sapiens
gacatcctgaaaaac

SEQ ID NO: 7128 - DNA, 15 bp, Homo sapiens
ggacatcctgaaaaa

SEQ ID NO: 7129 - DNA, 15 bp, Homo sapiens
gggacatcctgaaaa

SEQ ID NO: 7130 - DNA, 15 bp, Homo sapiens
tgggacatcctgaaa

SEQ ID NO: 7131 - DNA, 15 bp, Homo sapiens
ctgggacatcctgaa

SEQ ID NO: 7132 - DNA, 15 bp, Homo sapiens
cctgggacatcctga

SEQ ID NO: 7133 - DNA, 15 bp, Homo sapiens
tcctgggacatcctg

SEQ ID NO: 7134 - DNA, 15 bp, Homo sapiens
ctcctgggacatcct

SEQ ID NO: 7135 - DNA, 15 bp, Homo sapiens
actcctgggacatcc

SEQ ID NO: 7136 - DNA, 15 bp, Homo sapiens
gactcctgggacatc

SEQ ID NO: 7137 - DNA, 15 bp, Homo sapiens
tgactcctgggacat

SEQ ID NO: 7138 - DNA, 15 bp, Homo sapiens
gtgactcctgggaca

SEQ ID NO: 7139 - DNA, 15 bp, Homo sapiens
ggtgactcctgggac

SEQ ID NO: 7140 - DNA, 15 bp, Homo sapiens
aggtgactcctggga

SEQ ID NO: 7141 - DNA, 15 bp, Homo sapiens
caggtgactcctggg

SEQ ID NO: 7142 - DNA, 15 bp, Homo sapiens
ccaggtgactcctgg

SEQ ID NO: 7143 - DNA, 15 bp, Homo sapiens
cccaggtgactcctg

SEQ ID NO: 7144 - DNA, 15 bp, Homo sapiens
tcccaggtgactcct

SEQ ID NO: 7145 - DNA, 15 bp, Homo sapiens
ttcccaggtgactcc

SEQ ID NO: 7146 - DNA, 15 bp, Homo sapiens
cttcccaggtgactc

SEQ ID NO: 7147 - DNA, 15 bp, Homo sapiens
gcttcccaggtgact

SEQ ID NO: 7148 - DNA, 15 bp, Homo sapiens
agcttcccaggtgac

SEQ ID NO: 7149 - DNA, 15 bp, Homo sapiens
gagcttcccaggtga

SEQ ID NO: 7150 - DNA, 15 bp, Homo sapiens
tgagcttcccaggtg

SEQ ID NO: 7151 - DNA, 15 bp, Homo sapiens
ctgagcttcccaggt

SEQ ID NO: 7152 - DNA, 15 bp, Homo sapiens
gctgagcttcccagg

SEQ ID NO: 7153 - DNA, 15 bp, Homo sapiens
tgctgagcttcccag

SEQ ID NO: 7154 - DNA, 15 bp, Homo sapiens
ctgctgagcttccca

SEQ ID NO: 7155 - DNA, 15 bp, Homo sapiens
actgctgagcttccc

SEQ ID NO: 7156 - DNA, 15 bp, Homo sapiens
gactgctgagcttcc

SEQ ID NO: 7157 - DNA, 15 bp, Homo sapiens
ggactgctgagcttc

SEQ ID NO: 7158 - DNA, 15 bp, Homo sapiens
aggactgctgagctt

SEQ ID NO: 7159 - DNA, 15 bp, Homo sapiens
aaggactgctgagct

SEQ ID NO: 7160 - DNA, 15 bp, Homo sapiens
aaaggactgctgagc

SEQ ID NO: 7161 - DNA, 15 bp, Homo sapiens
caaaggactgctgag

SEQ ID NO: 7162 - DNA, 15 bp, Homo sapiens
acaaaggactgctga

SEQ ID NO: 7163 - DNA, 15 bp, Homo sapiens
cacaaaggactgctg

SEQ ID NO: 7164 - DNA, 15 bp, Homo sapiens
tcacaaaggactgct

SEQ ID NO: 7165 - DNA, 15 bp, Homo sapiens
gtcacaaaggactgc

SEQ ID NO: 7166 - DNA, 15 bp, Homo sapiens
agtcacaaaggactg

SEQ ID NO: 7167 - DNA, 15 bp, Homo sapiens
aagtcacaaaggact

SEQ ID NO: 7168 - DNA, 15 bp, Homo sapiens
aaagtcacaaaggac

SEQ ID NO: 7169 - DNA, 15 bp, Homo sapiens
gaaagtcacaaagga

SEQ ID NO: 7170 - DNA, 15 bp, Homo sapiens
tgaaagtcacaaagg

SEQ ID NO: 7171 - DNA, 15 bp, Homo sapiens
ttgaaagtcacaaag

SEQ ID NO: 7172 - DNA, 15 bp, Homo sapiens
cttgaaagtcacaaa

SEQ ID NO: 7173 - DNA, 15 bp, Homo sapiens
gcttgaaagtcacaa

SEQ ID NO: 7174 - DNA, 15 bp, Homo sapiens
tgcttgaaagtcaca

SEQ ID NO: 7175 - DNA, 15 bp, Homo sapiens
atgcttgaaagtcac

SEQ ID NO: 7176 - DNA, 15 bp, Homo sapiens
tatgcttgaaagtca

SEQ ID NO: 7177 - DNA, 15 bp, Homo sapiens
atatgcttgaaagtc

SEQ ID NO: 7178 - DNA, 15 bp, Homo sapiens
catatgcttgaaagt

SEQ ID NO: 7179 - DNA, 15 bp, Homo sapiens
ccatatgcttgaaag

SEQ ID NO: 7180 - DNA, 15 bp, Homo sapiens
accatatgcttgaaa

SEQ ID NO: 7181 - DNA, 15 bp, Homo sapiens
taccatatgcttgaa

SEQ ID NO: 7182 - DNA, 15 bp, Homo sapiens
ctaccatatgcttga

SEQ ID NO: 7183 - DNA, 15 bp, Homo sapiens
tctaccatatgcttg

SEQ ID NO: 7184 - DNA, 15 bp, Homo sapiens
ttctaccatatgctt

SEQ ID NO: 7185 - DNA, 15 bp, Homo sapiens
cttctaccatatgct

SEQ ID NO: 7186 - DNA, 15 bp, Homo sapiens
gcttctaccatatgc

SEQ ID NO: 7187 - DNA, 15 bp, Homo sapiens
agcttctaccatatg

SEQ ID NO: 7188 - DNA, 15 bp, Homo sapiens
cagcttctaccatat

SEQ ID NO: 7189 - DNA, 15 bp, Homo sapiens
gcagcttctaccata

SEQ ID NO: 7190 - DNA, 15 bp, Homo sapiens
agcagcttctaccat

SEQ ID NO: 7191 - DNA, 15 bp, Homo sapiens
cagcagcttctacca

SEQ ID NO: 7192 - DNA, 15 bp, Homo sapiens
tcagcagcttctacc

SEQ ID NO: 7193 - DNA, 15 bp, Homo sapiens
ttcagcagcttctac

SEQ ID NO: 7194 - DNA, 15 bp, Homo sapiens
gttcagcagcttcta

SEQ ID NO: 7195 - DNA, 15 bp, Homo sapiens
tgttcagcagcttct

SEQ ID NO: 7196 - DNA, 15 bp, Homo sapiens
gtgttcagcagcttc

SEQ ID NO: 7197 - DNA, 15 bp, Homo sapiens
tgtgttcagcagctt

SEQ ID NO: 7198 - DNA, 15 bp, Homo sapiens
ctgtgttcagcagct

SEQ ID NO: 7199 - DNA, 15 bp, Homo sapiens
tctgtgttcagcagc

SEQ ID NO: 7200 - DNA, 15 bp, Homo sapiens
ctctgtgttcagcag

SEQ ID NO: 7201 - DNA, 15 bp, Homo sapiens
gctctgtgttcagca

SEQ ID NO: 7202 - DNA, 15 bp, Homo sapiens
agctctgtgttcagc

SEQ ID NO: 7203 - DNA, 15 bp, Homo sapiens
gagctctgtgttcag

SEQ ID NO: 7204 - DNA, 15 bp, Homo sapiens
ggagctctgtgttca

SEQ ID NO: 7205 - DNA, 15 bp, Homo sapiens
gggagctctgtgttc

SEQ ID NO: 7206 - DNA, 15 bp, Homo sapiens
agggagctctgtgtt

SEQ ID NO: 7207 - DNA, 15 bp, Homo sapiens
gagggagctctgtgt

SEQ ID NO: 7208 - DNA, 15 bp, Homo sapiens
agagggagctctgtg

SEQ ID NO: 7209 - DNA, 15 bp, Homo sapiens
aagagggagctctgt

SEQ ID NO: 7210 - DNA, 15 bp, Homo sapiens
aaagagggagctctg

SEQ ID NO: 7211 - DNA, 15 bp, Homo sapiens
caaagagggagctct

SEQ ID NO: 7212 - DNA, 15 bp, Homo sapiens
ccaaagagggagctc

SEQ ID NO: 7213 - DNA, 15 bp, Homo sapiens
cccaaagagggagct

SEQ ID NO: 7214 - DNA, 15 bp, Homo sapiens
ccccaaagagggagc

SEQ ID NO: 7215 - DNA, 15 bp, Homo sapiens
tccccaaagagggag

SEQ ID NO: 7216 - DNA, 15 bp, Homo sapiens
atccccaaagaggga

SEQ ID NO: 7217 - DNA, 15 bp, Homo sapiens
tatccccaaagaggg

SEQ ID NO: 7218 - DNA, 15 bp, Homo sapiens
ttatccccaaagagg

SEQ ID NO: 7219 - DNA, 15 bp, Homo sapiens
attatccccaaagag

SEQ ID NO: 7220 - DNA, 15 bp, Homo sapiens
aattatccccaaaga

SEQ ID NO: 7221 - DNA, 15 bp, Homo sapiens
aaattatccccaaag

SEQ ID NO: 7222 - DNA, 15 bp, Homo sapiens
caaattatccccaaa

SEQ ID NO: 7223 - DNA, 15 bp, Homo sapiens
gcaaattatccccaa

SEQ ID NO: 7224 - DNA, 15 bp, Homo sapiens
ggcaaattatcccca

SEQ ID NO: 7225 - DNA, 15 bp, Homo sapiens
gggcaaattatcccc

SEQ ID NO: 7226 - DNA, 15 bp, Homo sapiens
tgggcaaattatccc

SEQ ID NO: 7227 - DNA, 15 bp, Homo sapiens
ttgggcaaattatcc

SEQ ID NO: 7228 - DNA, 15 bp, Homo sapiens
tttgggcaaattatc

SEQ ID NO: 7229 - DNA, 15 bp, Homo sapiens
atttgggcaaattat

SEQ ID NO: 7230 - DNA, 15 bp, Homo sapiens
gatttgggcaaatta

SEQ ID NO: 7231 - DNA, 15 bp, Homo sapiens
tgatttgggcaaatt

SEQ ID NO: 7232 - DNA, 15 bp, Homo sapiens
atgatttgggcaaat

SEQ ID NO: 7233 - DNA, 15 bp, Homo sapiens
aatgatttgggcaaa

SEQ ID NO: 7234 - DNA, 15 bp, Homo sapiens
aaatgatttgggcaa

SEQ ID NO: 7235 - DNA, 15 bp, Homo sapiens
taaatgatttgggca

SEQ ID NO: 7236 - DNA, 15 bp, Homo sapiens
ttaaatgatttgggc

SEQ ID NO: 7237 - DNA, 15 bp, Homo sapiens
attaaatgatttggg

SEQ ID NO: 7238 - DNA, 15 bp, Homo sapiens
gattaaatgatttgg

SEQ ID NO: 7239 - DNA, 15 bp, Homo sapiens
tgattaaatgatttg

SEQ ID NO: 7240 - DNA, 15 bp, Homo sapiens
ctgattaaatgattt

SEQ ID NO: 7241 - DNA, 15 bp, Homo sapiens
cctgattaaatgatt

SEQ ID NO: 7242 - DNA, 15 bp, Homo sapiens
gcctgattaaatgat

SEQ ID NO: 7243 - DNA, 15 bp, Homo sapiens
agcctgattaaatga

SEQ ID NO: 7244 - DNA, 15 bp, Homo sapiens
aagcctgattaaatg

SEQ ID NO: 7245 - DNA, 15 bp, Homo sapiens
caagcctgattaaat

SEQ ID NO: 7246 - DNA, 15 bp, Homo sapiens
tcaagcctgattaaa

SEQ ID NO: 7247 - DNA, 15 bp, Homo sapiens
ctcaagcctgattaa

SEQ ID NO: 7248 - DNA, 15 bp, Homo sapiens
tctcaagcctgatta

SEQ ID NO: 7249 - DNA, 15 bp, Homo sapiens
ttctcaagcctgatt

SEQ ID NO: 7250 - DNA, 15 bp, Homo sapiens
tttctcaagcctgat

SEQ ID NO: 7251 - DNA, 15 bp, Homo sapiens
atttctcaagcctga

SEQ ID NO: 7252 - DNA, 15 bp, Homo sapiens
catttctcaagcctg

SEQ ID NO: 7253 - DNA, 15 bp, Homo sapiens
tcatttctcaagcct

SEQ ID NO: 7254 - DNA, 15 bp, Homo sapiens
ctcatttctcaagcc

SEQ ID NO: 7255 - DNA, 15 bp, Homo sapiens
actcatttctcaagc

SEQ ID NO: 7256 - DNA, 15 bp, Homo sapiens
aactcatttctcaag

SEQ ID NO: 7257 - DNA, 15 bp, Homo sapiens
taactcatttctcaa

SEQ ID NO: 7258 - DNA, 15 bp, Homo sapiens
gtaactcatttctca

SEQ ID NO: 7259 - DNA, 15 bp, Homo sapiens
ggtaactcatttctc

SEQ ID NO: 7260 - DNA, 15 bp, Homo sapiens
tggtaactcatttct

SEQ ID NO: 7261 - DNA, 15 bp, Homo sapiens
gtggtaactcatttc

SEQ ID NO: 7262 - DNA, 15 bp, Homo sapiens
tgtggtaactcattt

SEQ ID NO: 7263 - DNA, 15 bp, Homo sapiens
ctgtggtaactcatt

SEQ ID NO: 7264 - DNA, 15 bp, Homo sapiens
cctgtggtaactcat

SEQ ID NO: 7265 - DNA, 15 bp, Homo sapiens
acctgtggtaactca

SEQ ID NO: 7266 - DNA, 15 bp, Homo sapiens
gacctgtggtaactc

SEQ ID NO: 7267 - DNA, 15 bp, Homo sapiens
ggacctgtggtaact

SEQ ID NO: 7268 - DNA, 15 bp, Homo sapiens
tggacctgtggtaac

SEQ ID NO: 7269 - DNA, 15 bp, Homo sapiens
ctggacctgtggtaa

SEQ ID NO: 7270 - DNA, 15 bp, Homo sapiens
cctggacctgtggta

SEQ ID NO: 7271 - DNA, 15 bp, Homo sapiens
tcctggacctgtggt

SEQ ID NO: 7272 - DNA, 15 bp, Homo sapiens
ctcctggacctgtgg

SEQ ID NO: 7273 - DNA, 15 bp, Homo sapiens
actcctggacctgtg

SEQ ID NO: 7274 - DNA, 15 bp, Homo sapiens
cactcctggacctgt

SEQ ID NO: 7275 - DNA, 15 bp, Homo sapiens
gcactcctggacctg

SEQ ID NO: 7276 - DNA, 15 bp, Homo sapiens
agcactcctggacct

SEQ ID NO: 7277 - DNA, 15 bp, Homo sapiens
cagcactcctggacc

SEQ ID NO: 7278 - DNA, 15 bp, Homo sapiens
gcagcactcctggac

SEQ ID NO: 7279 - DNA, 15 bp, Homo sapiens
ggcagcactcctgga

SEQ ID NO: 7280 - DNA, 15 bp, Homo sapiens
tggcagcactcctgg

SEQ ID NO: 7281 - DNA, 15 bp, Homo sapiens
gtggcagcactcctg

SEQ ID NO: 7282 - DNA, 15 bp, Homo sapiens
ggtggcagcactcct

SEQ ID NO: 7283 - DNA, 15 bp, Homo sapiens
gggtggcagcactcc

SEQ ID NO: 7284 - DNA, 15 bp, Homo sapiens
agggtggcagcactc

SEQ ID NO: 7285 - DNA, 15 bp, Homo sapiens
aagggtggcagcact

SEQ ID NO: 7286 - DNA, 15 bp, Homo sapiens
caagggtggcagcac

SEQ ID NO: 7287 - DNA, 15 bp, Homo sapiens
tcaagggtggcagca

SEQ ID NO: 7288 - DNA, 15 bp, Homo sapiens
ttcaagggtggcagc

SEQ ID NO: 7289 - DNA, 15 bp, Homo sapiens
attcaagggtggcag

SEQ ID NO: 7290 - DNA, 15 bp, Homo sapiens
aattcaagggtggca

SEQ ID NO: 7291 - DNA, 15 bp, Homo sapiens
gaattcaagggtggc

SEQ ID NO: 7292 - DNA, 15 bp, Homo sapiens
agaattcaagggtgg

SEQ ID NO: 7293 - DNA, 15 bp, Homo sapiens
cagaattcaagggtg

SEQ ID NO: 7294 - DNA, 15 bp, Homo sapiens
tcagaattcaagggt

SEQ ID NO: 7295 - DNA, 15 bp, Homo sapiens
gtcagaattcaaggg

SEQ ID NO: 7296 - DNA, 15 bp, Homo sapiens
tgtcagaattcaagg

SEQ ID NO: 7297 - DNA, 15 bp, Homo sapiens
gtgtcagaattcaag

SEQ ID NO: 7298 - DNA, 15 bp, Homo sapiens
ggtgtcagaattcaa

SEQ ID NO: 7299 - DNA, 15 bp, Homo sapiens
gggtgtcagaattca

SEQ ID NO: 7300 - DNA, 15 bp, Homo sapiens
agggtgtcagaattc

SEQ ID NO: 7301 - DNA, 15 bp, Homo sapiens
tagggtgtcagaatt

SEQ ID NO: 7302 - DNA, 15 bp, Homo sapiens
atagggtgtcagaat

SEQ ID NO: 7303 - DNA, 15 bp, Homo sapiens
aatagggtgtcagaa

SEQ ID NO: 7304 - DNA, 15 bp, Homo sapiens
aaatagggtgtcaga

SEQ ID NO: 7305 - DNA, 15 bp, Homo sapiens
gaaatagggtgtcag

SEQ ID NO: 7306 - DNA, 15 bp, Homo sapiens
agaaatagggtgtca

SEQ ID NO: 7307 - DNA, 15 bp, Homo sapiens
gagaaatagggtgtc

SEQ ID NO: 7308 - DNA, 15 bp, Homo sapiens
ggagaaatagggtgt

SEQ ID NO: 7309 - DNA, 15 bp, Homo sapiens
aggagaaatagggtg

SEQ ID NO: 7310 - DNA, 15 bp, Homo sapiens
taggagaaatagggt

SEQ ID NO: 7311 - DNA, 15 bp, Homo sapiens
ataggagaaataggg

SEQ ID NO: 7312 - DNA, 15 bp, Homo sapiens
gataggagaaatagg

SEQ ID NO: 7313 - DNA, 15 bp, Homo sapiens
ggataggagaaatag

SEQ ID NO: 7314 - DNA, 15 bp, Homo sapiens
cggataggagaaata

SEQ ID NO: 7315 - DNA, 15 bp, Homo sapiens
acggataggagaaat

SEQ ID NO: 7316 - DNA, 15 bp, Homo sapiens
gacggataggagaaa

SEQ ID NO: 7317 - DNA, 15 bp, Homo sapiens
agacggataggagaa

SEQ ID NO: 7318 - DNA, 15 bp, Homo sapiens
gagacggataggaga

SEQ ID NO: 7319 - DNA, 15 bp, Homo sapiens
agagacggataggag

SEQ ID NO: 7320 - DNA, 15 bp, Homo sapiens
aagagacggatagga

SEQ ID NO: 7321 - DNA, 15 bp, Homo sapiens
taagagacggatagg

SEQ ID NO: 7322 - DNA, 15 bp, Homo sapiens
ttaagagacggatag

SEQ ID NO: 7323 - DNA, 15 bp, Homo sapiens
attaagagacggata

SEQ ID NO: 7324 - DNA, 15 bp, Homo sapiens
aattaagagacggat

SEQ ID NO: 7325 - DNA, 15 bp, Homo sapiens
taattaagagacgga

SEQ ID NO: 7326 - DNA, 15 bp, Homo sapiens
ttaattaagagacgg

SEQ ID NO: 7327 - DNA, 15 bp, Homo sapiens
attaattaagagacg

SEQ ID NO: 7328 - DNA, 15 bp, Homo sapiens
aattaattaagagac

SEQ ID NO: 7329 - DNA, 15 bp, Homo sapiens
taattaattaagaga

SEQ ID NO: 7330 - DNA, 15 bp, Homo sapiens
ttaattaattaagag

SEQ ID NO: 7331 - DNA, 15 bp, Homo sapiens
cttaattaattaaga

SEQ ID NO: 7332 - DNA, 15 bp, Homo sapiens
gcttaattaattaag

SEQ ID NO: 7333 - DNA, 15 bp, Homo sapiens
tgcttaattaattaa

SEQ ID NO: 7334 - DNA, 15 bp, Homo sapiens
ctgcttaattaatta

SEQ ID NO: 7335 - DNA, 15 bp, Homo sapiens
tctgcttaattaatt

SEQ ID NO: 7336 - DNA, 15 bp, Homo sapiens
gtctgcttaattaat

SEQ ID NO: 7337 - DNA, 15 bp, Homo sapiens
tgtctgcttaattaa

SEQ ID NO: 7338 - DNA, 15 bp, Homo sapiens
atgtctgcttaatta

SEQ ID NO: 7339 - DNA, 15 bp, Homo sapiens
gatgtctgcttaatt

SEQ ID NO: 7340 - DNA, 15 bp, Homo sapiens
ggatgtctgcttaat

SEQ ID NO: 7341 - DNA, 15 bp, Homo sapiens
gggatgtctgcttaa

SEQ ID NO: 7342 - DNA, 15 bp, Homo sapiens
ggggatgtctgctta

SEQ ID NO: 7343 - DNA, 15 bp, Homo sapiens
tggggatgtctgctt

SEQ ID NO: 7344 - DNA, 15 bp, Homo sapiens
ttggggatgtctgct

SEQ ID NO: 7345 - DNA, 15 bp, Homo sapiens
cttggggatgtctgc

SEQ ID NO: 7346 - DNA, 15 bp, Homo sapiens
acttggggatgtctg

SEQ ID NO: 7347 - DNA, 15 bp, Homo sapiens
cacttggggatgtct

SEQ ID NO: 7348 - DNA, 15 bp, Homo sapiens
gcacttggggatgtc

SEQ ID NO: 7349 - DNA, 15 bp, Homo sapiens
agcacttggggatgt

SEQ ID NO: 7350 - DNA, 15 bp, Homo sapiens
aagcacttggggatg

SEQ ID NO: 7351 - DNA, 15 bp, Homo sapiens
taagcacttggggat

SEQ ID NO: 7352 - DNA, 15 bp, Homo sapiens
gtaagcacttgggga

SEQ ID NO: 7353 - DNA, 15 bp, Homo sapiens
cgtaagcacttgggg

SEQ ID NO: 7354 - DNA, 15 bp, Homo sapiens
tcgtaagcacttggg

SEQ ID NO: 7355 - DNA, 15 bp, Homo sapiens
gtcgtaagcacttgg

SEQ ID NO: 7356 - DNA, 15 bp, Homo sapiens
tgtcgtaagcacttg

SEQ ID NO: 7357 - DNA, 15 bp, Homo sapiens
ttgtcgtaagcactt

SEQ ID NO: 7358 - DNA, 15 bp, Homo sapiens
cttgtcgtaagcact

SEQ ID NO: 7359 - DNA, 15 bp, Homo sapiens
gcttgtcgtaagcac

SEQ ID NO: 7360 - DNA, 15 bp, Homo sapiens
ggcttgtcgtaagca

SEQ ID NO: 7361 - DNA, 15 bp, Homo sapiens
tggcttgtcgtaagc

SEQ ID NO: 7362 - DNA, 15 bp, Homo sapiens
ctggcttgtcgtaag

SEQ ID NO: 7363 - DNA, 15 bp, Homo sapiens
cctggcttgtcgtaa

SEQ ID NO: 7364 - DNA, 15 bp, Homo sapiens
tcctggcttgtcgta

SEQ ID NO: 7365 - DNA, 15 bp, Homo sapiens
gtcctggcttgtcgt

SEQ ID NO: 7366 - DNA, 15 bp, Homo sapiens
ggtcctggcttgtcg

SEQ ID NO: 7367 - DNA, 15 bp, Homo sapiens
gggtcctggcttgtc

SEQ ID NO: 7368 - DNA, 15 bp, Homo sapiens
agggtcctggcttgt

SEQ ID NO: 7369 - DNA, 15 bp, Homo sapiens
aagggtcctggcttg

SEQ ID NO: 7370 - DNA, 15 bp, Homo sapiens
aaagggtcctggctt

SEQ ID NO: 7371 - DNA, 15 bp, Homo sapiens
aaaagggtcctggct

SEQ ID NO: 7372 - DNA, 15 bp, Homo sapiens
caaaagggtcctggc

SEQ ID NO: 7373 - DNA, 15 bp, Homo sapiens
gcaaaagggtcctgg

SEQ ID NO: 7374 - DNA, 15 bp, Homo sapiens
tgcaaaagggtcctg

SEQ ID NO: 7375 - DNA, 15 bp, Homo sapiens
atgcaaaagggtcct

SEQ ID NO: 7376 - DNA, 15 bp, Homo sapiens
tatgcaaaagggtcc

SEQ ID NO: 7377 - DNA, 15 bp, Homo sapiens
gtatgcaaaagggtc

SEQ ID NO: 7378 - DNA, 15 bp, Homo sapiens
agtatgcaaaagggt

SEQ ID NO: 7379 - DNA, 15 bp, Homo sapiens
tagtatgcaaaaggg

SEQ ID NO: 7380 - DNA, 15 bp, Homo sapiens
ttagtatgcaaaagg

SEQ ID NO: 7381 - DNA, 15 bp, Homo sapiens
cttagtatgcaaaag

SEQ ID NO: 7382 - DNA, 15 bp, Homo sapiens
ccttagtatgcaaaa

SEQ ID NO: 7383 - DNA, 15 bp, Homo sapiens
tccttagtatgcaaa

SEQ ID NO: 7384 - DNA, 15 bp, Homo sapiens
ttccttagtatgcaa

SEQ ID NO: 7385 - DNA, 15 bp, Homo sapiens
tttccttagtatgca

SEQ ID NO: 7386 - DNA, 15 bp, Homo sapiens
ttttccttagtatgc

SEQ ID NO: 7387 - DNA, 15 bp, Homo sapiens
gttttccttagtatg

SEQ ID NO: 7388 - DNA, 15 bp, Homo sapiens
tgttttccttagtat

SEQ ID NO: 7389 - DNA, 15 bp, Homo sapiens
ctgttttccttagta

SEQ ID NO: 7390 - DNA, 15 bp, Homo sapiens
cctgttttccttagt

SEQ ID NO: 7391 - DNA, 15 bp, Homo sapiens
ccctgttttccttag

SEQ ID NO: 7392 - DNA, 15 bp, Homo sapiens
tccctgttttcctta

SEQ ID NO: 7393 - DNA, 15 bp, Homo sapiens
atccctgttttcctt

SEQ ID NO: 7394 - DNA, 15 bp, Homo sapiens
catccctgttttcct

SEQ ID NO: 7395 - DNA, 15 bp, Homo sapiens
tcatccctgttttcc

SEQ ID NO: 7396 - DNA, 15 bp, Homo sapiens
ttcatccctgttttc

SEQ ID NO: 7397 - DNA, 15 bp, Homo sapiens
cttcatccctgtttt

SEQ ID NO: 7398 - DNA, 15 bp, Homo sapiens
ccttcatccctgttt

SEQ ID NO: 7399 - DNA, 15 bp, Homo sapiens
tccttcatccctgtt

SEQ ID NO: 7400 - DNA, 15 bp, Homo sapiens
ttccttcatccctgt

SEQ ID NO: 7401 - DNA, 15 bp, Homo sapiens
tttccttcatccctg

SEQ ID NO: 7402 - DNA, 15 bp, Homo sapiens
gtttccttcatccct

SEQ ID NO: 7403 - DNA, 15 bp, Homo sapiens
tgtttccttcatccc

SEQ ID NO: 7404 - DNA, 15 bp, Homo sapiens
ctgtttccttcatcc

SEQ ID NO: 7405 - DNA, 15 bp, Homo sapiens
tctgtttccttcatc

SEQ ID NO: 7406 - DNA, 15 bp, Homo sapiens
ttctgtttccttcat

SEQ ID NO: 7407 - DNA, 15 bp, Homo sapiens
tttctgtttccttca

SEQ ID NO: 7408 - DNA, 15 bp, Homo sapiens
atttctgtttccttc

SEQ ID NO: 7409 - DNA, 15 bp, Homo sapiens
catttctgtttcctt

SEQ ID NO: 7410 - DNA, 15 bp, Homo sapiens
ccatttctgtttcct

SEQ ID NO: 7411 - DNA, 15 bp, Homo sapiens
accatttctgtttcc

SEQ ID NO: 7412 - DNA, 15 bp, Homo sapiens
gaccatttctgtttc

SEQ ID NO: 7413 - DNA, 15 bp, Homo sapiens
agaccatttctgttt

SEQ ID NO: 7414 - DNA, 15 bp, Homo sapiens
gagaccatttctgtt

SEQ ID NO: 7415 - DNA, 15 bp, Homo sapiens
agagaccatttctgt

SEQ ID NO: 7416 - DNA, 15 bp, Homo sapiens
cagagaccatttctg

SEQ ID NO: 7417 - DNA, 15 bp, Homo sapiens
gcagagaccatttct

SEQ ID NO: 7418 - DNA, 15 bp, Homo sapiens
agcagagaccatttc

SEQ ID NO: 7419 - DNA, 15 bp, Homo sapiens
gagcagagaccattt

SEQ ID NO: 7420 - DNA, 15 bp, Homo sapiens
agagcagagaccatt

SEQ ID NO: 7421 - DNA, 15 bp, Homo sapiens
cagagcagagaccat

SEQ ID NO: 7422 - DNA, 15 bp, Homo sapiens
tcagagcagagacca

SEQ ID NO: 7423 - DNA, 15 bp, Homo sapiens
gtcagagcagagacc

SEQ ID NO: 7424 - DNA, 15 bp, Homo sapiens
agtcagagcagagac

SEQ ID NO: 7425 - DNA, 15 bp, Homo sapiens
gagtcagagcagaga

SEQ ID NO: 7426 - DNA, 15 bp, Homo sapiens
tgagtcagagcagag

SEQ ID NO: 7427 - DNA, 15 bp, Homo sapiens
ctgagtcagagcaga

SEQ ID NO: 7428 - DNA, 15 bp, Homo sapiens
tctgagtcagagcag

SEQ ID NO: 7429 - DNA, 15 bp, Homo sapiens
ttctgagtcagagca

SEQ ID NO: 7430 - DNA, 15 bp, Homo sapiens
cttctgagtcagagc

SEQ ID NO: 7431 - DNA, 15 bp, Homo sapiens
ccttctgagtcagag

SEQ ID NO: 7432 - DNA, 15 bp, Homo sapiens
accttctgagtcaga

SEQ ID NO: 7433 - DNA, 15 bp, Homo sapiens
taccttctgagtcag

SEQ ID NO: 7434 - DNA, 15 bp, Homo sapiens
ctaccttctgagtca

SEQ ID NO: 7435 - DNA, 15 bp, Homo sapiens
tctaccttctgagtc

SEQ ID NO: 7436 - DNA, 15 bp, Homo sapiens
ttctaccttctgagt

SEQ ID NO: 7437 - DNA, 15 bp, Homo sapiens
tttctaccttctgag

SEQ ID NO: 7438 - DNA, 15 bp, Homo sapiens
atttctaccttctga

SEQ ID NO: 7439 - DNA, 15 bp, Homo sapiens
gatttctaccttctg

SEQ ID NO: 7440 - DNA, 15 bp, Homo sapiens
ggatttctaccttct

SEQ ID NO: 7441 - DNA, 15 bp, Homo sapiens
aggatttctaccttc

SEQ ID NO: 7442 - DNA, 15 bp, Homo sapiens
gaggatttctacctt

SEQ ID NO: 7443 - DNA, 15 bp, Homo sapiens
agaggatttctacct

SEQ ID NO: 7444 - DNA, 15 bp, Homo sapiens
aagaggatttctacc

SEQ ID NO: 7445 - DNA, 15 bp, Homo sapiens
aaagaggatttctac

SEQ ID NO: 7446 - DNA, 15 bp, Homo sapiens
gaaagaggatttcta

SEQ ID NO: 7447 - DNA, 15 bp, Homo sapiens
ggaaagaggatttct

SEQ ID NO: 7448 - DNA, 15 bp, Homo sapiens
gggaaagaggatttc

SEQ ID NO: 7449 - DNA, 15 bp, Homo sapiens
tgggaaagaggattt

SEQ ID NO: 7450 - DNA, 15 bp, Homo sapiens
ctgggaaagaggatt

SEQ ID NO: 7451 - DNA, 15 bp, Homo sapiens
gctgggaaagaggat

SEQ ID NO: 7452 - DNA, 15 bp, Homo sapiens
ggctgggaaagagga

SEQ ID NO: 7453 - DNA, 15 bp, Homo sapiens
tggctgggaaagagg

SEQ ID NO: 7454 - DNA, 15 bp, Homo sapiens
ttggctgggaaagag

SEQ ID NO: 7455 - DNA, 15 bp, Homo sapiens
cttggctgggaaaga

SEQ ID NO: 7456 - DNA, 15 bp, Homo sapiens
acttggctgggaaag

SEQ ID NO: 7457 - DNA, 15 bp, Homo sapiens
gacttggctgggaaa

SEQ ID NO: 7458 - DNA, 15 bp, Homo sapiens
agacttggctgggaa

SEQ ID NO: 7459 - DNA, 15 bp, Homo sapiens
aagacttggctggga

SEQ ID NO: 7460 - DNA, 15 bp, Homo sapiens
gaagacttggctggg

SEQ ID NO: 7461 - DNA, 15 bp, Homo sapiens
ggaagacttggctgg

SEQ ID NO: 7462 - DNA, 15 bp, Homo sapiens
aggaagacttggctg

SEQ ID NO: 7463 - DNA, 15 bp, Homo sapiens
taggaagacttggct

SEQ ID NO: 7464 - DNA, 15 bp, Homo sapiens
ctaggaagacttggc

SEQ ID NO: 7465 - DNA, 15 bp, Homo sapiens
cctaggaagacttgg

SEQ ID NO: 7466 - DNA, 15 bp, Homo sapiens
ccctaggaagacttg

SEQ ID NO: 7467 - DNA, 15 bp, Homo sapiens
tccctaggaagactt

SEQ ID NO: 7468 - DNA, 15 bp, Homo sapiens
ctccctaggaagact

SEQ ID NO: 7469 - DNA, 15 bp, Homo sapiens
gctccctaggaagac

SEQ ID NO: 7470 - DNA, 15 bp, Homo sapiens
tgctccctaggaaga

SEQ ID NO: 7471 - DNA, 15 bp, Homo sapiens
gtgctccctaggaag

SEQ ID NO: 7472 - DNA, 15 bp, Homo sapiens
cgtgctccctaggaa

SEQ ID NO: 7473 - DNA, 15 bp, Homo sapiens
acgtgctccctagga

SEQ ID NO: 7474 - DNA, 15 bp, Homo sapiens
tacgtgctccctagg

SEQ ID NO: 7475 - DNA, 15 bp, Homo sapiens
ctacgtgctccctag

SEQ ID NO: 7476 - DNA, 15 bp, Homo sapiens
cctacgtgctcccta

SEQ ID NO: 7477 - DNA, 15 bp, Homo sapiens
tcctacgtgctccct

SEQ ID NO: 7478 - DNA, 15 bp, Homo sapiens
ttcctacgtgctccc

SEQ ID NO: 7479 - DNA, 15 bp, Homo sapiens
cttcctacgtgctcc

SEQ ID NO: 7480 - DNA, 15 bp, Homo sapiens
ccttcctacgtgctc

SEQ ID NO: 7481 - DNA, 15 bp, Homo sapiens
cccttcctacgtgct

SEQ ID NO: 7482 - DNA, 15 bp, Homo sapiens
gcccttcctacgtgc

SEQ ID NO: 7483 - DNA, 15 bp, Homo sapiens
agcccttcctacgtg

SEQ ID NO: 7484 - DNA, 15 bp, Homo sapiens
gagcccttcctacgt

SEQ ID NO: 7485 - DNA, 15 bp, Homo sapiens
agagcccttcctacg

SEQ ID NO: 7486 - DNA, 15 bp, Homo sapiens
cagagcccttcctac

SEQ ID NO: 7487 - DNA, 15 bp, Homo sapiens
tcagagcccttccta

SEQ ID NO: 7488 - DNA, 15 bp, Homo sapiens
ttcagagcccttcct

SEQ ID NO: 7489 - DNA, 15 bp, Homo sapiens
gttcagagcccttcc

SEQ ID NO: 7490 - DNA, 15 bp, Homo sapiens
ggttcagagcccttc

SEQ ID NO: 7491 - DNA, 15 bp, Homo sapiens
gggttcagagccctt

SEQ ID NO: 7492 - DNA, 15 bp, Homo sapiens
tgggttcagagccct

SEQ ID NO: 7493 - DNA, 15 bp, Homo sapiens
gtgggttcagagccc

SEQ ID NO: 7494 - DNA, 15 bp, Homo sapiens
cgtgggttcagagcc

SEQ ID NO: 7495 - DNA, 15 bp, Homo sapiens
acgtgggttcagagc

SEQ ID NO: 7496 - DNA, 15 bp, Homo sapiens
cacgtgggttcagag

SEQ ID NO: 7497 - DNA, 15 bp, Homo sapiens
acacgtgggttcaga

SEQ ID NO: 7498 - DNA, 15 bp, Homo sapiens
gacacgtgggttcag

SEQ ID NO: 7499 - DNA, 15 bp, Homo sapiens
tgacacgtgggttca

SEQ ID NO: 7500 - DNA, 15 bp, Homo sapiens
ctgacacgtgggttc

SEQ ID NO: 7501 - DNA, 15 bp, Homo sapiens
actgacacgtgggtt

SEQ ID NO: 7502 - DNA, 15 bp, Homo sapiens
aactgacacgtgggt

SEQ ID NO: 7503 - DNA, 15 bp, Homo sapiens
caactgacacgtggg

SEQ ID NO: 7504 - DNA, 15 bp, Homo sapiens
gcaactgacacgtgg

SEQ ID NO: 7505 - DNA, 15 bp, Homo sapiens
tgcaactgacacgtg

SEQ ID NO: 7506 - DNA, 15 bp, Homo sapiens
ctgcaactgacacgt

SEQ ID NO: 7507 - DNA, 15 bp, Homo sapiens
cctgcaactgacacg

SEQ ID NO: 7508 - DNA, 15 bp, Homo sapiens
ccctgcaactgacac

SEQ ID NO: 7509 - DNA, 15 bp, Homo sapiens
cccctgcaactgaca

SEQ ID NO: 7510 - DNA, 15 bp, Homo sapiens
tcccctgcaactgac

SEQ ID NO: 7511 - DNA, 15 bp, Homo sapiens
ctcccctgcaactga

SEQ ID NO: 7512 - DNA, 15 bp, Homo sapiens
cctcccctgcaactg

SEQ ID NO: 7513 - DNA, 15 bp, Homo sapiens
tcctcccctgcaact

SEQ ID NO: 7514 - DNA, 15 bp, Homo sapiens
atcctcccctgcaac

SEQ ID NO: 7515 - DNA, 15 bp, Homo sapiens
tatcctcccctgcaa

SEQ ID NO: 7516 - DNA, 15 bp, Homo sapiens
atatcctcccctgca

SEQ ID NO: 7517 - DNA, 15 bp, Homo sapiens
gatatcctcccctgc

SEQ ID NO: 7518 - DNA, 15 bp, Homo sapiens
tgatatcctcccctg

SEQ ID NO: 7519 - DNA, 15 bp, Homo sapiens
ctgatatcctcccct

SEQ ID NO: 7520 - DNA, 15 bp, Homo sapiens
cctgatatcctcccc

SEQ ID NO: 7521 - DNA, 15 bp, Homo sapiens
tcctgatatcctccc

SEQ ID NO: 7522 - DNA, 15 bp, Homo sapiens
ttcctgatatcctcc

SEQ ID NO: 7523 - DNA, 15 bp, Homo sapiens
tttcctgatatcctc

SEQ ID NO: 7524 - DNA, 15 bp, Homo sapiens
ctttcctgatatcct

SEQ ID NO: 7525 - DNA, 15 bp, Homo sapiens
cctttcctgatatcc

SEQ ID NO: 7526 - DNA, 15 bp, Homo sapiens
tcctttcctgatatc

SEQ ID NO: 7527 - DNA, 15 bp, Homo sapiens
gtcctttcctgatat

SEQ ID NO: 7528 - DNA, 15 bp, Homo sapiens
tgtcctttcctgata

SEQ ID NO: 7529 - DNA, 15 bp, Homo sapiens
atgtcctttcctgat

SEQ ID NO: 7530 - DNA, 15 bp, Homo sapiens
aatgtcctttcctga

SEQ ID NO: 7531 - DNA, 15 bp, Homo sapiens
caatgtcctttcctg

SEQ ID NO: 7532 - DNA, 15 bp, Homo sapiens
tcaatgtcctttcct

SEQ ID NO: 7533 - DNA, 15 bp, Homo sapiens
ttcaatgtcctttcc

SEQ ID NO: 7534 - DNA, 15 bp, Homo sapiens
cttcaatgtcctttc

SEQ ID NO: 7535 - DNA, 15 bp, Homo sapiens
tcttcaatgtccttt

SEQ ID NO: 7536 - DNA, 15 bp, Homo sapiens
ttcttcaatgtcctt

SEQ ID NO: 7537 - DNA, 15 bp, Homo sapiens
cttcttcaatgtcct

SEQ ID NO: 7538 - DNA, 15 bp, Homo sapiens
acttcttcaatgtcc

SEQ ID NO: 7539 - DNA, 15 bp, Homo sapiens
cacttcttcaatgtc

SEQ ID NO: 7540 - DNA, 15 bp, Homo sapiens
ccacttcttcaatgt

SEQ ID NO: 7541 - DNA, 15 bp, Homo sapiens
tccacttcttcaatg

SEQ ID NO: 7542 - DNA, 15 bp, Homo sapiens
ctccacttcttcaat

SEQ ID NO: 7543 - DNA, 15 bp, Homo sapiens
tctccacttcttcaa

SEQ ID NO: 7544 - DNA, 15 bp, Homo sapiens
gtctccacttcttca

SEQ ID NO: 7545 - DNA, 15 bp, Homo sapiens
ggtctccacttcttc

SEQ ID NO: 7546 - DNA, 15 bp, Homo sapiens
aggtctccacttctt

SEQ ID NO: 7547 - DNA, 15 bp, Homo sapiens
taggtctccacttct

SEQ ID NO: 7548 - DNA, 15 bp, Homo sapiens
ttaggtctccacttc

SEQ ID NO: 7549 - DNA, 15 bp, Homo sapiens
cttaggtctccactt

SEQ ID NO: 7550 - DNA, 15 bp, Homo sapiens
acttaggtctccact

SEQ ID NO: 7551 - DNA, 15 bp, Homo sapiens
aacttaggtctccac

SEQ ID NO: 7552 - DNA, 15 bp, Homo sapiens
aaacttaggtctcca

SEQ ID NO: 7553 - DNA, 15 bp, Homo sapiens
caaacttaggtctcc

SEQ ID NO: 7554 - DNA, 15 bp, Homo sapiens
tcaaacttaggtctc

SEQ ID NO: 7555 - DNA, 15 bp, Homo sapiens
ctcaaacttaggtct

SEQ ID NO: 7556 - DNA, 15 bp, Homo sapiens
tctcaaacttaggtc

SEQ ID NO: 7557 - DNA, 15 bp, Homo sapiens
gtctcaaacttaggt

SEQ ID NO: 7558 - DNA, 15 bp, Homo sapiens
ggtctcaaacttagg

SEQ ID NO: 7559 - DNA, 15 bp, Homo sapiens
aggtctcaaacttag

SEQ ID NO: 7560 - DNA, 15 bp, Homo sapiens
taggtctcaaactta

SEQ ID NO: 7561 - DNA, 15 bp, Homo sapiens
ctaggtctcaaactt

SEQ ID NO: 7562 - DNA, 15 bp, Homo sapiens
cctaggtctcaaact

SEQ ID NO: 7563 - DNA, 15 bp, Homo sapiens
gcctaggtctcaaac

SEQ ID NO: 7564 - DNA, 15 bp, Homo sapiens
tgcctaggtctcaaa

SEQ ID NO: 7565 - DNA, 15 bp, Homo sapiens
atgcctaggtctcaa

SEQ ID NO: 7566 - DNA, 15 bp, Homo sapiens
aatgcctaggtctca

SEQ ID NO: 7567 - DNA, 15 bp, Homo sapiens
taatgcctaggtctc

SEQ ID NO: 7568 - DNA, 15 bp, Homo sapiens
ctaatgcctaggtct

SEQ ID NO: 7569 - DNA, 15 bp, Homo sapiens
gctaatgcctaggtc

SEQ ID NO: 7570 - DNA, 15 bp, Homo sapiens
ggctaatgcctaggt

SEQ ID NO: 7571 - DNA, 15 bp, Homo sapiens
tggctaatgcctagg

SEQ ID NO: 7572 - DNA, 15 bp, Homo sapiens
ctggctaatgcctag

SEQ ID NO: 7573 - DNA, 15 bp, Homo sapiens
cctggctaatgccta

SEQ ID NO: 7574 - DNA, 15 bp, Homo sapiens
gcctggctaatgcct

SEQ ID NO: 7575 - DNA, 15 bp, Homo sapiens
agcctggctaatgcc

SEQ ID NO: 7576 - DNA, 15 bp, Homo sapiens
tagcctggctaatgc

SEQ ID NO: 7577 - DNA, 15 bp, Homo sapiens
ctagcctggctaatg

SEQ ID NO: 7578 - DNA, 15 bp, Homo sapiens
gctagcctggctaat

SEQ ID NO: 7579 - DNA, 15 bp, Homo sapiens
tgctagcctggctaa

SEQ ID NO: 7580 - DNA, 15 bp, Homo sapiens
ctgctagcctggcta

SEQ ID NO: 7581 - DNA, 15 bp, Homo sapiens
actgctagcctggct

SEQ ID NO: 7582 - DNA, 15 bp, Homo sapiens
cactgctagcctggc

SEQ ID NO: 7583 - DNA, 15 bp, Homo sapiens
gcactgctagcctgg

SEQ ID NO: 7584 - DNA, 15 bp, Homo sapiens
agcactgctagcctg

SEQ ID NO: 7585 - DNA, 15 bp, Homo sapiens
aagcactgctagcct

SEQ ID NO: 7586 - DNA, 15 bp, Homo sapiens
caagcactgctagcc

SEQ ID NO: 7587 - DNA, 15 bp, Homo sapiens
tcaagcactgctagc

SEQ ID NO: 7588 - DNA, 15 bp, Homo sapiens
ttcaagcactgctag

SEQ ID NO: 7589 - DNA, 15 bp, Homo sapiens
tttcaagcactgcta

SEQ ID NO: 7590 - DNA, 15 bp, Homo sapiens
ttttcaagcactgct

SEQ ID NO: 7591 - DNA, 15 bp, Homo sapiens
tttttcaagcactgc

SEQ ID NO: 7592 - DNA, 15 bp, Homo sapiens
ctttttcaagcactg

SEQ ID NO: 7593 - DNA, 15 bp, Homo sapiens
actttttcaagcact

SEQ ID NO: 7594 - DNA, 15 bp, Homo sapiens
cactttttcaagcac

SEQ ID NO: 7595 - DNA, 15 bp, Homo sapiens
acactttttcaagca

SEQ ID NO: 7596 - DNA, 15 bp, Homo sapiens
gacactttttcaagc

SEQ ID NO: 7597 - DNA, 15 bp, Homo sapiens
agacactttttcaag

SEQ ID NO: 7598 - DNA, 15 bp, Homo sapiens
aagacactttttcaa

SEQ ID NO: 7599 - DNA, 15 bp, Homo sapiens
taagacactttttca

SEQ ID NO: 7600 - DNA, 15 bp, Homo sapiens
ctaagacactttttc

SEQ ID NO: 7601 - DNA, 15 bp, Homo sapiens
cctaagacacttttt

SEQ ID NO: 7602 - DNA, 15 bp, Homo sapiens
tcctaagacactttt

SEQ ID NO: 7603 - DNA, 15 bp, Homo sapiens
gtcctaagacacttt

SEQ ID NO: 7604 - DNA, 15 bp, Homo sapiens
tgtcctaagacactt

SEQ ID NO: 7605 - DNA, 15 bp, Homo sapiens
ttgtcctaagacact

SEQ ID NO: 7606 - DNA, 15 bp, Homo sapiens
cttgtcctaagacac

SEQ ID NO: 7607 - DNA, 15 bp, Homo sapiens
tcttgtcctaagaca

SEQ ID NO: 7608 - DNA, 15 bp, Homo sapiens
ctcttgtcctaagac

SEQ ID NO: 7609 - DNA, 15 bp, Homo sapiens
tctcttgtcctaaga

SEQ ID NO: 7610 - DNA, 15 bp, Homo sapiens
ttctcttgtcctaag

SEQ ID NO: 7611 - DNA, 15 bp, Homo sapiens
gttctcttgtcctaa

SEQ ID NO: 7612 - DNA, 15 bp, Homo sapiens
agttctcttgtccta

SEQ ID NO: 7613 - DNA, 15 bp, Homo sapiens
gagttctcttgtcct

SEQ ID NO: 7614 - DNA, 15 bp, Homo sapiens
tgagttctcttgtcc

SEQ ID NO: 7615 - DNA, 15 bp, Homo sapiens
gtgagttctcttgtc

SEQ ID NO: 7616 - DNA, 15 bp, Homo sapiens
ggtgagttctcttgt

SEQ ID NO: 7617 - DNA, 15 bp, Homo sapiens
tggtgagttctcttg

SEQ ID NO: 7618 - DNA, 15 bp, Homo sapiens
ctggtgagttctctt

SEQ ID NO: 7619 - DNA, 15 bp, Homo sapiens
actggtgagttctct

SEQ ID NO: 7620 - DNA, 15 bp, Homo sapiens
cactggtgagttctc

SEQ ID NO: 7621 - DNA, 15 bp, Homo sapiens
tcactggtgagttct

SEQ ID NO: 7622 - DNA, 15 bp, Homo sapiens
ttcactggtgagttc

SEQ ID NO: 7623 - DNA, 15 bp, Homo sapiens
cttcactggtgagtt

SEQ ID NO: 7624 - DNA, 15 bp, Homo sapiens
acttcactggtgagt

SEQ ID NO: 7625 - DNA, 15 bp, Homo sapiens
gacttcactggtgag

SEQ ID NO: 7626 - DNA, 15 bp, Homo sapiens
ggacttcactggtga

SEQ ID NO: 7627 - DNA, 15 bp, Homo sapiens
gggacttcactggtg

SEQ ID NO: 7628 - DNA, 15 bp, Homo sapiens
tgggacttcactggt

SEQ ID NO: 7629 - DNA, 15 bp, Homo sapiens
ctgggacttcactgg

SEQ ID NO: 7630 - DNA, 15 bp, Homo sapiens
actgggacttcactg

SEQ ID NO: 7631 - DNA, 15 bp, Homo sapiens
cactgggacttcact

SEQ ID NO: 7632 - DNA, 15 bp, Homo sapiens
ccactgggacttcac

SEQ ID NO: 7633 - DNA, 15 bp, Homo sapiens
accactgggacttca

SEQ ID NO: 7634 - DNA, 15 bp, Homo sapiens
taccactgggacttc

SEQ ID NO: 7635 - DNA, 15 bp, Homo sapiens
ctaccactgggactt

SEQ ID NO: 7636 - DNA, 15 bp, Homo sapiens
cctaccactgggact

SEQ ID NO: 7637 - DNA, 15 bp, Homo sapiens
tcctaccactgggac

SEQ ID NO: 7638 - DNA, 15 bp, Homo sapiens
ctcctaccactggga

SEQ ID NO: 7639 - DNA, 15 bp, Homo sapiens
tctcctaccactggg

SEQ ID NO: 7640 - DNA, 15 bp, Homo sapiens
ctctcctaccactgg

SEQ ID NO: 7641 - DNA, 15 bp, Homo sapiens
gctctcctaccactg

SEQ ID NO: 7642 - DNA, 15 bp, Homo sapiens
cgctctcctaccact

SEQ ID NO: 7643 - DNA, 15 bp, Homo sapiens
acgctctcctaccac

SEQ ID NO: 7644 - DNA, 15 bp, Homo sapiens
cacgctctcctacca

SEQ ID NO: 7645 - DNA, 15 bp, Homo sapiens
gcacgctctcctacc

SEQ ID NO: 7646 - DNA, 15 bp, Homo sapiens
tgcacgctctcctac

SEQ ID NO: 7647 - DNA, 15 bp, Homo sapiens
ctgcacgctctccta

SEQ ID NO: 7648 - DNA, 15 bp, Homo sapiens
gctgcacgctctcct

SEQ ID NO: 7649 - DNA, 15 bp, Homo sapiens
tgctgcacgctctcc

SEQ ID NO: 7650 - DNA, 15 bp, Homo sapiens
atgctgcacgctctc

SEQ ID NO: 7651 - DNA, 15 bp, Homo sapiens
tatgctgcacgctct

SEQ ID NO: 7652 - DNA, 15 bp, Homo sapiens
atatgctgcacgctc

SEQ ID NO: 7653 - DNA, 15 bp, Homo sapiens
aatatgctgcacgct

SEQ ID NO: 7654 - DNA, 15 bp, Homo sapiens
gaatatgctgcacgc

SEQ ID NO: 7655 - DNA, 15 bp, Homo sapiens
agaatatgctgcacg

SEQ ID NO: 7656 - DNA, 15 bp, Homo sapiens
cagaatatgctgcac

SEQ ID NO: 7657 - DNA, 15 bp, Homo sapiens
tcagaatatgctgca

SEQ ID NO: 7658 - DNA, 15 bp, Homo sapiens
ctcagaatatgctgc

SEQ ID NO: 7659 - DNA, 15 bp, Homo sapiens
gctcagaatatgctg

SEQ ID NO: 7660 - DNA, 15 bp, Homo sapiens
ggctcagaatatgct

SEQ ID NO: 7661 - DNA, 15 bp, Homo sapiens
aggctcagaatatgc

SEQ ID NO: 7662 - DNA, 15 bp, Homo sapiens
caggctcagaatatg

SEQ ID NO: 7663 - DNA, 15 bp, Homo sapiens
acaggctcagaatat

SEQ ID NO: 7664 - DNA, 15 bp, Homo sapiens
tacaggctcagaata

SEQ ID NO: 7665 - DNA, 15 bp, Homo sapiens
atacaggctcagaat

SEQ ID NO: 7666 - DNA, 15 bp, Homo sapiens
tatacaggctcagaa

SEQ ID NO: 7667 - DNA, 15 bp, Homo sapiens
gtatacaggctcaga

SEQ ID NO: 7668 - DNA, 15 bp, Homo sapiens
tgtatacaggctcag

SEQ ID NO: 7669 - DNA, 15 bp, Homo sapiens
gtgtatacaggctca

SEQ ID NO: 7670 - DNA, 15 bp, Homo sapiens
tgtgtatacaggctc

SEQ ID NO: 7671 - DNA, 15 bp, Homo sapiens
atgtgtatacaggct

SEQ ID NO: 7672 - DNA, 15 bp, Homo sapiens
gatgtgtatacaggc

SEQ ID NO: 7673 - DNA, 15 bp, Homo sapiens
agatgtgtatacagg

SEQ ID NO: 7674 - DNA, 15 bp, Homo sapiens
gagatgtgtatacag

SEQ ID NO: 7675 - DNA, 15 bp, Homo sapiens
ggagatgtgtataca

SEQ ID NO: 7676 - DNA, 15 bp, Homo sapiens
tggagatgtgtatac

SEQ ID NO: 7677 - DNA, 15 bp, Homo sapiens
ctggagatgtgtata

SEQ ID NO: 7678 - DNA, 15 bp, Homo sapiens
cctggagatgtgtat

SEQ ID NO: 7679 - DNA, 15 bp, Homo sapiens
ccctggagatgtgta

SEQ ID NO: 7680 - DNA, 15 bp, Homo sapiens
gccctggagatgtgt

SEQ ID NO: 7681 - DNA, 15 bp, Homo sapiens
tgccctggagatgtg

SEQ ID NO: 7682 - DNA, 15 bp, Homo sapiens
atgccctggagatgt

SEQ ID NO: 7683 - DNA, 15 bp, Homo sapiens
aatgccctggagatg

SEQ ID NO: 7684 - DNA, 15 bp, Homo sapiens
caatgccctggagat

SEQ ID NO: 7685 - DNA, 15 bp, Homo sapiens
gcaatgccctggaga

SEQ ID NO: 7686 - DNA, 15 bp, Homo sapiens
agcaatgccctggag

SEQ ID NO: 7687 - DNA, 15 bp, Homo sapiens
aagcaatgccctgga

SEQ ID NO: 7688 - DNA, 15 bp, Homo sapiens
taagcaatgccctgg

SEQ ID NO: 7689 - DNA, 15 bp, Homo sapiens
ctaagcaatgccctg

SEQ ID NO: 7690 - DNA, 15 bp, Homo sapiens
gctaagcaatgccct

SEQ ID NO: 7691 - DNA, 15 bp, Homo sapiens
tgctaagcaatgccc

SEQ ID NO: 7692 - DNA, 15 bp, Homo sapiens
ctgctaagcaatgcc

SEQ ID NO: 7693 - DNA, 15 bp, Homo sapiens
cctgctaagcaatgc

SEQ ID NO: 7694 - DNA, 15 bp, Homo sapiens
acctgctaagcaatg

SEQ ID NO: 7695 - DNA, 15 bp, Homo sapiens
cacctgctaagcaat

SEQ ID NO: 7696 - DNA, 15 bp, Homo sapiens
ccacctgctaagcaa

SEQ ID NO: 7697 - DNA, 15 bp, Homo sapiens
cccacctgctaagca

SEQ ID NO: 7698 - DNA, 15 bp, Homo sapiens
ccccacctgctaagc

SEQ ID NO: 7699 - DNA, 15 bp, Homo sapiens
tccccacctgctaag

SEQ ID NO: 7700 - DNA, 15 bp, Homo sapiens
ctccccacctgctaa

SEQ ID NO: 7701 - DNA, 15 bp, Homo sapiens
actccccacctgcta

SEQ ID NO: 7702 - DNA, 15 bp, Homo sapiens
cactccccacctgct

SEQ ID NO: 7703 - DNA, 15 bp, Homo sapiens
ccactccccacctgc

SEQ ID NO: 7704 - DNA, 15 bp, Homo sapiens
gccactccccacctg

SEQ ID NO: 7705 - DNA, 15 bp, Homo sapiens
tgccactccccacct

SEQ ID NO: 7706 - DNA, 15 bp, Homo sapiens
ttgccactccccacc

SEQ ID NO: 7707 - DNA, 15 bp, Homo sapiens
cttgccactccccac

SEQ ID NO: 7708 - DNA, 15 bp, Homo sapiens
tcttgccactcccca

SEQ ID NO: 7709 - DNA, 15 bp, Homo sapiens
ctcttgccactcccc

SEQ ID NO: 7710 - DNA, 15 bp, Homo sapiens
tctcttgccactccc

SEQ ID NO: 7711 - DNA, 15 bp, Homo sapiens
ctctcttgccactcc

SEQ ID NO: 7712 - DNA, 15 bp, Homo sapiens
actctcttgccactc

SEQ ID NO: 7713 - DNA, 15 bp, Homo sapiens
tactctcttgccact

SEQ ID NO: 7714 - DNA, 15 bp, Homo sapiens
ctactctcttgccac

SEQ ID NO: 7715 - DNA, 15 bp, Homo sapiens
cctactctcttgcca

SEQ ID NO: 7716 - DNA, 15 bp, Homo sapiens
gcctactctcttgcc

SEQ ID NO: 7717 - DNA, 15 bp, Homo sapiens
agcctactctcttgc

SEQ ID NO: 7718 - DNA, 15 bp, Homo sapiens
cagcctactctcttg

SEQ ID NO: 7719 - DNA, 15 bp, Homo sapiens
ccagcctactctctt

SEQ ID NO: 7720 - DNA, 15 bp, Homo sapiens
tccagcctactctct

SEQ ID NO: 7721 - DNA, 15 bp, Homo sapiens
ctccagcctactctc

SEQ ID NO: 7722 - DNA, 15 bp, Homo sapiens
actccagcctactct

SEQ ID NO: 7723 - DNA, 15 bp, Homo sapiens
gactccagcctactc

SEQ ID NO: 7724 - DNA, 15 bp, Homo sapiens
tgactccagcctact

SEQ ID NO: 7725 - DNA, 15 bp, Homo sapiens
gtgactccagcctac

SEQ ID NO: 7726 - DNA, 15 bp, Homo sapiens
tgtgactccagccta

SEQ ID NO: 7727 - DNA, 15 bp, Homo sapiens
ctgtgactccagcct

SEQ ID NO: 7728 - DNA, 15 bp, Homo sapiens
tctgtgactccagcc

SEQ ID NO: 7729 - DNA, 15 bp, Homo sapiens
ttctgtgactccagc

SEQ ID NO: 7730 - DNA, 15 bp, Homo sapiens
cttctgtgactccag

SEQ ID NO: 7731 - DNA, 15 bp, Homo sapiens
ccttctgtgactcca

SEQ ID NO: 7732 - DNA, 15 bp, Homo sapiens
cccttctgtgactcc

SEQ ID NO: 7733 - DNA, 15 bp, Homo sapiens
tcccttctgtgactc

SEQ ID NO: 7734 - DNA, 15 bp, Homo sapiens
ctcccttctgtgact

SEQ ID NO: 7735 - DNA, 15 bp, Homo sapiens
cctcccttctgtgac

SEQ ID NO: 7736 - DNA, 15 bp, Homo sapiens
gcctcccttctgtga

SEQ ID NO: 7737 - DNA, 15 bp, Homo sapiens
ggcctcccttctgtg

SEQ ID NO: 7738 - DNA, 15 bp, Homo sapiens
tggcctcccttctgt

SEQ ID NO: 7739 - DNA, 15 bp, Homo sapiens
ctggcctcccttctg

SEQ ID NO: 7740 - DNA, 15 bp, Homo sapiens
cctggcctcccttct

SEQ ID NO: 7741 - DNA, 15 bp, Homo sapiens
acctggcctcccttc

SEQ ID NO: 7742 - DNA, 15 bp, Homo sapiens
tacctggcctccctt

SEQ ID NO: 7743 - DNA, 15 bp, Homo sapiens
ctacctggcctccct

SEQ ID NO: 7744 - DNA, 15 bp, Homo sapiens
tctacctggcctccc

SEQ ID NO: 7745 - DNA, 15 bp, Homo sapiens
gtctacctggcctcc

SEQ ID NO: 7746 - DNA, 15 bp, Homo sapiens
ggtctacctggcctc

SEQ ID NO: 7747 - DNA, 15 bp, Homo sapiens
aggtctacctggcct

SEQ ID NO: 7748 - DNA, 15 bp, Homo sapiens
aaggtctacctggcc

SEQ ID NO: 7749 - DNA, 15 bp, Homo sapiens
caaggtctacctggc

SEQ ID NO: 7750 - DNA, 15 bp, Homo sapiens
ccaaggtctacctgg

SEQ ID NO: 7751 - DNA, 15 bp, Homo sapiens
accaaggtctacctg

SEQ ID NO: 7752 - DNA, 15 bp, Homo sapiens
caccaaggtctacct

SEQ ID NO: 7753 - DNA, 15 bp, Homo sapiens
tcaccaaggtctacc

SEQ ID NO: 7754 - DNA, 15 bp, Homo sapiens
ctcaccaaggtctac

SEQ ID NO: 7755 - DNA, 15 bp, Homo sapiens
gctcaccaaggtcta

SEQ ID NO: 7756 - DNA, 15 bp, Homo sapiens
tgctcaccaaggtct

SEQ ID NO: 7757 - DNA, 15 bp, Homo sapiens
gtgctcaccaaggtc

SEQ ID NO: 7758 - DNA, 15 bp, Homo sapiens
agtgctcaccaaggt

SEQ ID NO: 7759 - DNA, 15 bp, Homo sapiens
cagtgctcaccaagg

SEQ ID NO: 7760 - DNA, 15 bp, Homo sapiens
ccagtgctcaccaag

SEQ ID NO: 7761 - DNA, 15 bp, Homo sapiens
tccagtgctcaccaa

SEQ ID NO: 7762 - DNA, 15 bp, Homo sapiens
gtccagtgctcacca

SEQ ID NO: 7763 - DNA, 15 bp, Homo sapiens
agtccagtgctcacc

SEQ ID NO: 7764 - DNA, 15 bp, Homo sapiens
gagtccagtgctcac

SEQ ID NO: 7765 - DNA, 15 bp, Homo sapiens
agagtccagtgctca

SEQ ID NO: 7766 - DNA, 15 bp, Homo sapiens
tagagtccagtgctc

SEQ ID NO: 7767 - DNA, 15 bp, Homo sapiens
atagagtccagtgct

SEQ ID NO: 7768 - DNA, 15 bp, Homo sapiens
catagagtccagtgc

SEQ ID NO: 7769 - DNA, 15 bp, Homo sapiens
acatagagtccagtg

SEQ ID NO: 7770 - DNA, 15 bp, Homo sapiens
aacatagagtccagt

SEQ ID NO: 7771 - DNA, 15 bp, Homo sapiens
gaacatagagtccag

SEQ ID NO: 7772 - DNA, 15 bp, Homo sapiens
tgaacatagagtcca

SEQ ID NO: 7773 - DNA, 15 bp, Homo sapiens
ctgaacatagagtcc

SEQ ID NO: 7774 - DNA, 15 bp, Homo sapiens
cctgaacatagagtc

SEQ ID NO: 7775 - DNA, 15 bp, Homo sapiens
acctgaacatagagt

SEQ ID NO: 7776 - DNA, 15 bp, Homo sapiens
cacctgaacatagag

SEQ ID NO: 7777 - DNA, 15 bp, Homo sapiens
gcacctgaacataga

SEQ ID NO: 7778 - DNA, 15 bp, Homo sapiens
agcacctgaacatag

SEQ ID NO: 7779 - DNA, 15 bp, Homo sapiens
cagcacctgaacata

SEQ ID NO: 7780 - DNA, 15 bp, Homo sapiens
tcagcacctgaacat

SEQ ID NO: 7781 - DNA, 15 bp, Homo sapiens
ctcagcacctgaaca

SEQ ID NO: 7782 - DNA, 15 bp, Homo sapiens
cctcagcacctgaac

SEQ ID NO: 7783 - DNA, 15 bp, Homo sapiens
tcctcagcacctgaa

SEQ ID NO: 7784 - DNA, 15 bp, Homo sapiens
ctcctcagcacctga

SEQ ID NO: 7785 - DNA, 15 bp, Homo sapiens
gctcctcagcacctg

SEQ ID NO: 7786 - DNA, 15 bp, Homo sapiens
agctcctcagcacct

SEQ ID NO: 7787 - DNA, 15 bp, Homo sapiens
cagctcctcagcacc

SEQ ID NO: 7788 - DNA, 15 bp, Homo sapiens
ccagctcctcagcac

SEQ ID NO: 7789 - DNA, 15 bp, Homo sapiens
gccagctcctcagca

SEQ ID NO: 7790 - DNA, 15 bp, Homo sapiens
tgccagctcctcagc

SEQ ID NO: 7791 - DNA, 15 bp, Homo sapiens
ttgccagctcctcag

SEQ ID NO: 7792 - DNA, 15 bp, Homo sapiens
tttgccagctcctca

SEQ ID NO: 7793 - DNA, 15 bp, Homo sapiens
ttttgccagctcctc

SEQ ID NO: 7794 - DNA, 15 bp, Homo sapiens
cttttgccagctcct

SEQ ID NO: 7795 - DNA, 15 bp, Homo sapiens
ccttttgccagctcc

SEQ ID NO: 7796 - DNA, 15 bp, Homo sapiens
accttttgccagctc

SEQ ID NO: 7797 - DNA, 15 bp, Homo sapiens
aaccttttgccagct

SEQ ID NO: 7798 - DNA, 15 bp, Homo sapiens
aaaccttttgccagc

SEQ ID NO: 7799 - DNA, 15 bp, Homo sapiens
aaaaccttttgccag

SEQ ID NO: 7800 - DNA, 15 bp, Homo sapiens
taaaaccttttgcca

SEQ ID NO: 7801 - DNA, 15 bp, Homo sapiens
ttaaaaccttttgcc

SEQ ID NO: 7802 - DNA, 15 bp, Homo sapiens
cttaaaaccttttgc

SEQ ID NO: 7803 - DNA, 15 bp, Homo sapiens
acttaaaaccttttg

SEQ ID NO: 7804 - DNA, 15 bp, Homo sapiens
gacttaaaacctttt

SEQ ID NO: 7805 - DNA, 15 bp, Homo sapiens
cgacttaaaaccttt

SEQ ID NO: 7806 - DNA, 15 bp, Homo sapiens
ccgacttaaaacctt

SEQ ID NO: 7807 - DNA, 15 bp, Homo sapiens
cccgacttaaaacct

SEQ ID NO: 7808 - DNA, 15 bp, Homo sapiens
ccccgacttaaaacc

SEQ ID NO: 7809 - DNA, 15 bp, Homo sapiens
tccccgacttaaaac

SEQ ID NO: 7810 - DNA, 15 bp, Homo sapiens
ctccccgacttaaaa

SEQ ID NO: 7811 - DNA, 15 bp, Homo sapiens
tctccccgacttaaa

SEQ ID NO: 7812 - DNA, 15 bp, Homo sapiens
ctctccccgacttaa

SEQ ID NO: 7813 - DNA, 15 bp, Homo sapiens
cctctccccgactta

SEQ ID NO: 7814 - DNA, 15 bp, Homo sapiens
gcctctccccgactt

SEQ ID NO: 7815 - DNA, 15 bp, Homo sapiens
tgcctctccccgact

SEQ ID NO: 7816 - DNA, 15 bp, Homo sapiens
atgcctctccccgac

SEQ ID NO: 7817 - DNA, 15 bp, Homo sapiens
catgcctctccccga

SEQ ID NO: 7818 - DNA, 15 bp, Homo sapiens
acatgcctctccccg

SEQ ID NO: 7819 - DNA, 15 bp, Homo sapiens
aacatgcctctcccc

SEQ ID NO: 7820 - DNA, 15 bp, Homo sapiens
gaacatgcctctccc

SEQ ID NO: 7821 - DNA, 15 bp, Homo sapiens
tgaacatgcctctcc

SEQ ID NO: 7822 - DNA, 15 bp, Homo sapiens
ctgaacatgcctctc

SEQ ID NO: 7823 - DNA, 15 bp, Homo sapiens
tctgaacatgcctct

SEQ ID NO: 7824 - DNA, 15 bp, Homo sapiens
atctgaacatgcctc

SEQ ID NO: 7825 - DNA, 15 bp, Homo sapiens
tatctgaacatgcct

SEQ ID NO: 7826 - DNA, 15 bp, Homo sapiens
atatctgaacatgcc

SEQ ID NO: 7827 - DNA, 15 bp, Homo sapiens
aatatctgaacatgc

SEQ ID NO: 7828 - DNA, 15 bp, Homo sapiens
aaatatctgaacatg

SEQ ID NO: 7829 - DNA, 15 bp, Homo sapiens
caaatatctgaacat

SEQ ID NO: 7830 - DNA, 15 bp, Homo sapiens
ccaaatatctgaaca

SEQ ID NO: 7831 - DNA, 15 bp, Homo sapiens
accaaatatctgaac

SEQ ID NO: 7832 - DNA, 15 bp, Homo sapiens
gaccaaatatctgaa

SEQ ID NO: 7833 - DNA, 15 bp, Homo sapiens
agaccaaatatctga

SEQ ID NO: 7834 - DNA, 15 bp, Homo sapiens
tagaccaaatatctg

SEQ ID NO: 7835 - DNA, 15 bp, Homo sapiens
ctagaccaaatatct

SEQ ID NO: 7836 - DNA, 15 bp, Homo sapiens
gctagaccaaatatc

SEQ ID NO: 7837 - DNA, 15 bp, Homo sapiens
agctagaccaaatat

SEQ ID NO: 7838 - DNA, 15 bp, Homo sapiens
cagctagaccaaata

SEQ ID NO: 7839 - DNA, 15 bp, Homo sapiens
tcagctagaccaaat

SEQ ID NO: 7840 - DNA, 15 bp, Homo sapiens
ctcagctagaccaaa

SEQ ID NO: 7841 - DNA, 15 bp, Homo sapiens
actcagctagaccaa

SEQ ID NO: 7842 - DNA, 15 bp, Homo sapiens
tactcagctagacca

SEQ ID NO: 7843 - DNA, 15 bp, Homo sapiens
ttactcagctagacc

SEQ ID NO: 7844 - DNA, 15 bp, Homo sapiens
gttactcagctagac

SEQ ID NO: 7845 - DNA, 15 bp, Homo sapiens
agttactcagctaga

SEQ ID NO: 7846 - DNA, 15 bp, Homo sapiens
aagttactcagctag

SEQ ID NO: 7847 - DNA, 15 bp, Homo sapiens
aaagttactcagcta

SEQ ID NO: 7848 - DNA, 15 bp, Homo sapiens
caaagttactcagct

SEQ ID NO: 7849 - DNA, 15 bp, Homo sapiens
ccaaagttactcagc

SEQ ID NO: 7850 - DNA, 15 bp, Homo sapiens
cccaaagttactcag

SEQ ID NO: 7851 - DNA, 15 bp, Homo sapiens
acccaaagttactca

SEQ ID NO: 7852 - DNA, 15 bp, Homo sapiens
cacccaaagttactc

SEQ ID NO: 7853 - DNA, 15 bp, Homo sapiens
gcacccaaagttact

SEQ ID NO: 7854 - DNA, 15 bp, Homo sapiens
agcacccaaagttac

SEQ ID NO: 7855 - DNA, 15 bp, Homo sapiens
gagcacccaaagtta

SEQ ID NO: 7856 - DNA, 15 bp, Homo sapiens
agagcacccaaagtt

SEQ ID NO: 7857 - DNA, 15 bp, Homo sapiens
cagagcacccaaagt

SEQ ID NO: 7858 - DNA, 15 bp, Homo sapiens
acagagcacccaaag

SEQ ID NO: 7859 - DNA, 15 bp, Homo sapiens
cacagagcacccaaa

SEQ ID NO: 7860 - DNA, 15 bp, Homo sapiens
tcacagagcacccaa

SEQ ID NO: 7861 - DNA, 15 bp, Homo sapiens
gtcacagagcaccca

SEQ ID NO: 7862 - DNA, 15 bp, Homo sapiens
tgtcacagagcaccc

SEQ ID NO: 7863 - DNA, 15 bp, Homo sapiens
ttgtcacagagcacc

SEQ ID NO: 7864 - DNA, 15 bp, Homo sapiens
tttgtcacagagcac

SEQ ID NO: 7865 - DNA, 15 bp, Homo sapiens
atttgtcacagagca

SEQ ID NO: 7866 - DNA, 15 bp, Homo sapiens
catttgtcacagagc

SEQ ID NO: 7867 - DNA, 15 bp, Homo sapiens
ccatttgtcacagag

SEQ ID NO: 7868 - DNA, 15 bp, Homo sapiens
accatttgtcacaga

SEQ ID NO: 7869 - DNA, 15 bp, Homo sapiens
aaccatttgtcacag

SEQ ID NO: 7870 - DNA, 15 bp, Homo sapiens
caaccatttgtcaca

SEQ ID NO: 7871 - DNA, 15 bp, Homo sapiens
ccaaccatttgtcac

SEQ ID NO: 7872 - DNA, 15 bp, Homo sapiens
cccaaccatttgtca

SEQ ID NO: 7873 - DNA, 15 bp, Homo sapiens
tcccaaccatttgtc

SEQ ID NO: 7874 - DNA, 15 bp, Homo sapiens
ctcccaaccatttgt

SEQ ID NO: 7875 - DNA, 15 bp, Homo sapiens
tctcccaaccatttg

SEQ ID NO: 7876 - DNA, 15 bp, Homo sapiens
gtctcccaaccattt

SEQ ID NO: 7877 - DNA, 15 bp, Homo sapiens
ggtctcccaaccatt

SEQ ID NO: 7878 - DNA, 15 bp, Homo sapiens
tggtctcccaaccat

SEQ ID NO: 7879 - DNA, 15 bp, Homo sapiens
ctggtctcccaacca

SEQ ID NO: 7880 - DNA, 15 bp, Homo sapiens
actggtctcccaacc

SEQ ID NO: 7881 - DNA, 15 bp, Homo sapiens
cactggtctcccaac

SEQ ID NO: 7882 - DNA, 15 bp, Homo sapiens
tcactggtctcccaa

SEQ ID NO: 7883 - DNA, 15 bp, Homo sapiens
ctcactggtctccca

SEQ ID NO: 7884 - DNA, 15 bp, Homo sapiens
cctcactggtctccc

SEQ ID NO: 7885 - DNA, 15 bp, Homo sapiens
acctcactggtctcc

SEQ ID NO: 7886 - DNA, 15 bp, Homo sapiens
cacctcactggtctc

SEQ ID NO: 7887 - DNA, 15 bp, Homo sapiens
ccacctcactggtct

SEQ ID NO: 7888 - DNA, 15 bp, Homo sapiens
gccacctcactggtc

SEQ ID NO: 7889 - DNA, 15 bp, Homo sapiens
tgccacctcactggt

SEQ ID NO: 7890 - DNA, 15 bp, Homo sapiens
ctgccacctcactgg

SEQ ID NO: 7891 - DNA, 15 bp, Homo sapiens
actgccacctcactg

SEQ ID NO: 7892 - DNA, 15 bp, Homo sapiens
aactgccacctcact

SEQ ID NO: 7893 - DNA, 15 bp, Homo sapiens
caactgccacctcac

SEQ ID NO: 7894 - DNA, 15 bp, Homo sapiens
gcaactgccacctca

SEQ ID NO: 7895 - DNA, 15 bp, Homo sapiens
cgcaactgccacctc

SEQ ID NO: 7896 - DNA, 15 bp, Homo sapiens
ccgcaactgccacct

SEQ ID NO: 7897 - DNA, 15 bp, Homo sapiens
accgcaactgccacc

SEQ ID NO: 7898 - DNA, 15 bp, Homo sapiens
gaccgcaactgccac

SEQ ID NO: 7899 - DNA, 15 bp, Homo sapiens
tgaccgcaactgcca

SEQ ID NO: 7900 - DNA, 15 bp, Homo sapiens
atgaccgcaactgcc

SEQ ID NO: 7901 - DNA, 15 bp, Homo sapiens
gatgaccgcaactgc

SEQ ID NO: 7902 - DNA, 15 bp, Homo sapiens
agatgaccgcaactg

SEQ ID NO: 7903 - DNA, 15 bp, Homo sapiens
tagatgaccgcaact

SEQ ID NO: 7904 - DNA, 15 bp, Homo sapiens
ctagatgaccgcaac

SEQ ID NO: 7905 - DNA, 15 bp, Homo sapiens
cctagatgaccgcaa

SEQ ID NO: 7906 - DNA, 15 bp, Homo sapiens
tcctagatgaccgca

SEQ ID NO: 7907 - DNA, 15 bp, Homo sapiens
ctcctagatgaccgc

SEQ ID NO: 7908 - DNA, 15 bp, Homo sapiens
gctcctagatgaccg

SEQ ID NO: 7909 - DNA, 15 bp, Homo sapiens
tgctcctagatgacc

SEQ ID NO: 7910 - DNA, 15 bp, Homo sapiens
ctgctcctagatgac

SEQ ID NO: 7911 - DNA, 15 bp, Homo sapiens
cctgctcctagatga

SEQ ID NO: 7912 - DNA, 15 bp, Homo sapiens
tcctgctcctagatg

SEQ ID NO: 7913 - DNA, 15 bp, Homo sapiens
atcctgctcctagat

SEQ ID NO: 7914 - DNA, 15 bp, Homo sapiens
gatcctgctcctaga

SEQ ID NO: 7915 - DNA, 15 bp, Homo sapiens
tgatcctgctcctag

SEQ ID NO: 7916 - DNA, 15 bp, Homo sapiens
ctgatcctgctccta

SEQ ID NO: 7917 - DNA, 15 bp, Homo sapiens
tctgatcctgctcct

SEQ ID NO: 7918 - DNA, 15 bp, Homo sapiens
ctctgatcctgctcc

SEQ ID NO: 7919 - DNA, 15 bp, Homo sapiens
actctgatcctgctc

SEQ ID NO: 7920 - DNA, 15 bp, Homo sapiens
cactctgatcctgct

SEQ ID NO: 7921 - DNA, 15 bp, Homo sapiens
ccactctgatcctgc

SEQ ID NO: 7922 - DNA, 15 bp, Homo sapiens
gccactctgatcctg

SEQ ID NO: 7923 - DNA, 15 bp, Homo sapiens
ggccactctgatcct

SEQ ID NO: 7924 - DNA, 15 bp, Homo sapiens
aggccactctgatcc

SEQ ID NO: 7925 - DNA, 15 bp, Homo sapiens
taggccactctgatc

SEQ ID NO: 7926 - DNA, 15 bp, Homo sapiens
ataggccactctgat

SEQ ID NO: 7927 - DNA, 15 bp, Homo sapiens
aataggccactctga

SEQ ID NO: 7928 - DNA, 15 bp, Homo sapiens
caataggccactctg

SEQ ID NO: 7929 - DNA, 15 bp, Homo sapiens
tcaataggccactct

SEQ ID NO: 7930 - DNA, 15 bp, Homo sapiens
gtcaataggccactc

SEQ ID NO: 7931 - DNA, 15 bp, Homo sapiens
agtcaataggccact

SEQ ID NO: 7932 - DNA, 15 bp, Homo sapiens
cagtcaataggccac

SEQ ID NO: 7933 - DNA, 15 bp, Homo sapiens
ccagtcaataggcca

SEQ ID NO: 7934 - DNA, 15 bp, Homo sapiens
cccagtcaataggcc

SEQ ID NO: 7935 - DNA, 15 bp, Homo sapiens
tcccagtcaataggc

SEQ ID NO: 7936 - DNA, 15 bp, Homo sapiens
atcccagtcaatagg

SEQ ID NO: 7937 - DNA, 15 bp, Homo sapiens
catcccagtcaatag

SEQ ID NO: 7938 - DNA, 15 bp, Homo sapiens
tcatcccagtcaata

SEQ ID NO: 7939 - DNA, 15 bp, Homo sapiens
gtcatcccagtcaat

SEQ ID NO: 7940 - DNA, 15 bp, Homo sapiens
agtcatcccagtcaa

SEQ ID NO: 7941 - DNA, 15 bp, Homo sapiens
cagtcatcccagtca

SEQ ID NO: 7942 - DNA, 15 bp, Homo sapiens
acagtcatcccagtc

SEQ ID NO: 7943 - DNA, 15 bp, Homo sapiens
cacagtcatcccagt

SEQ ID NO: 7944 - DNA, 15 bp, Homo sapiens
tcacagtcatcccag

SEQ ID NO: 7945 - DNA, 15 bp, Homo sapiens
ttcacagtcatccca

SEQ ID NO: 7946 - DNA, 15 bp, Homo sapiens
cttcacagtcatccc

SEQ ID NO: 7947 - DNA, 15 bp, Homo sapiens
acttcacagtcatcc

SEQ ID NO: 7948 - DNA, 15 bp, Homo sapiens
cacttcacagtcatc

SEQ ID NO: 7949 - DNA, 15 bp, Homo sapiens
ccacttcacagtcat

SEQ ID NO: 7950 - DNA, 15 bp, Homo sapiens
cccacttcacagtca

SEQ ID NO: 7951 - DNA, 15 bp, Homo sapiens
tcccacttcacagtc

SEQ ID NO: 7952 - DNA, 15 bp, Homo sapiens
atcccacttcacagt

SEQ ID NO: 7953 - DNA, 15 bp, Homo sapiens
gatcccacttcacag

SEQ ID NO: 7954 - DNA, 15 bp, Homo sapiens
ggatcccacttcaca

SEQ ID NO: 7955 - DNA, 15 bp, Homo sapiens
aggatcccacttcac

SEQ ID NO: 7956 - DNA, 15 bp, Homo sapiens
aaggatcccacttca

SEQ ID NO: 7957 - DNA, 15 bp, Homo sapiens
aaaggatcccacttc

SEQ ID NO: 7958 - DNA, 15 bp, Homo sapiens
gaaaggatcccactt

SEQ ID NO: 7959 - DNA, 15 bp, Homo sapiens
ggaaaggatcccact

SEQ ID NO: 7960 - DNA, 15 bp, Homo sapiens
tggaaaggatcccac

SEQ ID NO: 7961 - DNA, 15 bp, Homo sapiens
ctggaaaggatccca

SEQ ID NO: 7962 - DNA, 15 bp, Homo sapiens
gctggaaaggatccc

SEQ ID NO: 7963 - DNA, 15 bp, Homo sapiens
ggctggaaaggatcc

SEQ ID NO: 7964 - DNA, 15 bp, Homo sapiens
tggctggaaaggatc

SEQ ID NO: 7965 - DNA, 15 bp, Homo sapiens
ctggctggaaaggat

SEQ ID NO: 7966 - DNA, 15 bp, Homo sapiens
actggctggaaagga

SEQ ID NO: 7967 - DNA, 15 bp, Homo sapiens
tactggctggaaagg

SEQ ID NO: 7968 - DNA, 15 bp, Homo sapiens
ttactggctggaaag

SEQ ID NO: 7969 - DNA, 15 bp, Homo sapiens
gttactggctggaaa

SEQ ID NO: 7970 - DNA, 15 bp, Homo sapiens
agttactggctggaa

SEQ ID NO: 7971 - DNA, 15 bp, Homo sapiens
cagttactggctgga

SEQ ID NO: 7972 - DNA, 15 bp, Homo sapiens
ccagttactggctgg

SEQ ID NO: 7973 - DNA, 15 bp, Homo sapiens
tccagttactggctg

SEQ ID NO: 7974 - DNA, 15 bp, Homo sapiens
ttccagttactggct

SEQ ID NO: 7975 - DNA, 15 bp, Homo sapiens
tttccagttactggc

SEQ ID NO: 7976 - DNA, 15 bp, Homo sapiens
atttccagttactgg

SEQ ID NO: 7977 - DNA, 15 bp, Homo sapiens
catttccagttactg

SEQ ID NO: 7978 - DNA, 15 bp, Homo sapiens
acatttccagttact

SEQ ID NO: 7979 - DNA, 15 bp, Homo sapiens
cacatttccagttac

SEQ ID NO: 7980 - DNA, 15 bp, Homo sapiens
acacatttccagtta

SEQ ID NO: 7981 - DNA, 15 bp, Homo sapiens
tacacatttccagtt

SEQ ID NO: 7982 - DNA, 15 bp, Homo sapiens
atacacatttccagt

SEQ ID NO: 7983 - DNA, 15 bp, Homo sapiens
catacacatttccag

SEQ ID NO: 7984 - DNA, 15 bp, Homo sapiens
tcatacacatttcca

SEQ ID NO: 7985 - DNA, 15 bp, Homo sapiens
ctcatacacatttcc

SEQ ID NO: 7986 - DNA, 15 bp, Homo sapiens
cctcatacacatttc

SEQ ID NO: 7987 - DNA, 15 bp, Homo sapiens
ccctcatacacattt

SEQ ID NO: 7988 - DNA, 15 bp, Homo sapiens
gccctcatacacatt

SEQ ID NO: 7989 - DNA, 15 bp, Homo sapiens
tgccctcatacacat

SEQ ID NO: 7990 - DNA, 15 bp, Homo sapiens
ctgccctcatacaca

SEQ ID NO: 7991 - DNA, 15 bp, Homo sapiens
tctgccctcatacac

SEQ ID NO: 7992 - DNA, 15 bp, Homo sapiens
ttctgccctcataca

SEQ ID NO: 7993 - DNA, 15 bp, Homo sapiens
cttctgccctcatac

SEQ ID NO: 7994 - DNA, 15 bp, Homo sapiens
acttctgccctcata

SEQ ID NO: 7995 - DNA, 15 bp, Homo sapiens
cacttctgccctcat

SEQ ID NO: 7996 - DNA, 15 bp, Homo sapiens
tcacttctgccctca

SEQ ID NO: 7997 - DNA, 15 bp, Homo sapiens
ctcacttctgccctc

SEQ ID NO: 7998 - DNA, 15 bp, Homo sapiens
actcacttctgccct

SEQ ID NO: 7999 - DNA, 15 bp, Homo sapiens
cactcacttctgccc

SEQ ID NO: 8000 - DNA, 15 bp, Homo sapiens
acactcacttctgcc

SEQ ID NO: 8001 - DNA, 15 bp, Homo sapiens
tacactcacttctgc

SEQ ID NO: 8002 - DNA, 15 bp, Homo sapiens
gtacactcacttctg

SEQ ID NO: 8003 - DNA, 15 bp, Homo sapiens
agtacactcacttct

SEQ ID NO: 8004 - DNA, 15 bp, Homo sapiens
cagtacactcacttc

SEQ ID NO: 8005 - DNA, 15 bp, Homo sapiens
gcagtacactcactt

SEQ ID NO: 8006 - DNA, 15 bp, Homo sapiens
tgcagtacactcact

SEQ ID NO: 8007 - DNA, 15 bp, Homo sapiens
atgcagtacactcac

SEQ ID NO: 8008 - DNA, 15 bp, Homo sapiens
aatgcagtacactca

SEQ ID NO: 8009 - DNA, 15 bp, Homo sapiens
aaatgcagtacactc

SEQ ID NO: 8010 - DNA, 15 bp, Homo sapiens
caaatgcagtacact

SEQ ID NO: 8011 - DNA, 15 bp, Homo sapiens
tcaaatgcagtacac

SEQ ID NO: 8012 - DNA, 15 bp, Homo sapiens
ttcaaatgcagtaca

SEQ ID NO: 8013 - DNA, 15 bp, Homo sapiens
tttcaaatgcagtac

SEQ ID NO: 8014 - DNA, 15 bp, Homo sapiens
gtttcaaatgcagta

SEQ ID NO: 8015 - DNA, 15 bp, Homo sapiens
tgtttcaaatgcagt

SEQ ID NO: 8016 - DNA, 15 bp, Homo sapiens
atgtttcaaatgcag

SEQ ID NO: 8017 - DNA, 15 bp, Homo sapiens
aatgtttcaaatgca

SEQ ID NO: 8018 - DNA, 15 bp, Homo sapiens
caatgtttcaaatgc

SEQ ID NO: 8019 - DNA, 15 bp, Homo sapiens
tcaatgtttcaaatg

SEQ ID NO: 8020 - DNA, 15 bp, Homo sapiens
ctcaatgtttcaaat

SEQ ID NO: 8021 - DNA, 15 bp, Homo sapiens
tctcaatgtttcaaa

SEQ ID NO: 8022 - DNA, 15 bp, Homo sapiens
ttctcaatgtttcaa

SEQ ID NO: 8023 - DNA, 15 bp, Homo sapiens
tttctcaatgtttca

SEQ ID NO: 8024 - DNA, 15 bp, Homo sapiens
atttctcaatgtttc

SEQ ID NO: 8025 - DNA, 15 bp, Homo sapiens
gatttctcaatgttt

SEQ ID NO: 8026 - DNA, 15 bp, Homo sapiens
agatttctcaatgtt

SEQ ID NO: 8027 - DNA, 15 bp, Homo sapiens
tagatttctcaatgt

SEQ ID NO: 8028 - DNA, 15 bp, Homo sapiens
ctagatttctcaatg

SEQ ID NO: 8029 - DNA, 15 bp, Homo sapiens
actagatttctcaat

SEQ ID NO: 8030 - DNA, 15 bp, Homo sapiens
tactagatttctcaa

SEQ ID NO: 8031 - DNA, 15 bp, Homo sapiens
gtactagatttctca

SEQ ID NO: 8032 - DNA, 15 bp, Homo sapiens
tgtactagatttctc

SEQ ID NO: 8033 - DNA, 15 bp, Homo sapiens
atgtactagatttct

SEQ ID NO: 8034 - DNA, 15 bp, Homo sapiens
tatgtactagatttc

SEQ ID NO: 8035 - DNA, 15 bp, Homo sapiens
ctatgtactagattt

SEQ ID NO: 8036 - DNA, 15 bp, Homo sapiens
actatgtactagatt

SEQ ID NO: 8037 - DNA, 15 bp, Homo sapiens
tactatgtactagat

SEQ ID NO: 8038 - DNA, 15 bp, Homo sapiens
gtactatgtactaga

SEQ ID NO: 8039 - DNA, 15 bp, Homo sapiens
agtactatgtactag

SEQ ID NO: 8040 - DNA, 15 bp, Homo sapiens
cagtactatgtacta

SEQ ID NO: 8041 - DNA, 15 bp, Homo sapiens
acagtactatgtact

SEQ ID NO: 8042 - DNA, 15 bp, Homo sapiens
gacagtactatgtac

SEQ ID NO: 8043 - DNA, 15 bp, Homo sapiens
agacagtactatgta

SEQ ID NO: 8044 - DNA, 15 bp, Homo sapiens
gagacagtactatgt

SEQ ID NO: 8045 - DNA, 15 bp, Homo sapiens
agagacagtactatg

SEQ ID NO: 8046 - DNA, 15 bp, Homo sapiens
aagagacagtactat

SEQ ID NO: 8047 - DNA, 15 bp, Homo sapiens
aaagagacagtacta

SEQ ID NO: 8048 - DNA, 15 bp, Homo sapiens
aaaagagacagtact

SEQ ID NO: 8049 - DNA, 15 bp, Homo sapiens
taaaagagacagtac

SEQ ID NO: 8050 - DNA, 15 bp, Homo sapiens
ataaaagagacagta

SEQ ID NO: 8051 - DNA, 15 bp, Homo sapiens
tataaaagagacagt

SEQ ID NO: 8052 - DNA, 15 bp, Homo sapiens
atataaaagagacag

SEQ ID NO: 8053 - DNA, 15 bp, Homo sapiens
gatataaaagagaca

SEQ ID NO: 8054 - DNA, 15 bp, Homo sapiens
agatataaaagagac

SEQ ID NO: 8055 - DNA, 15 bp, Homo sapiens
aagatataaaagaga

SEQ ID NO: 8056 - DNA, 15 bp, Homo sapiens
aaagatataaaagag

SEQ ID NO: 8057 - DNA, 15 bp, Homo sapiens
aaaagatataaaaga

SEQ ID NO: 8058 - DNA, 15 bp, Homo sapiens
aaaaagatataaaag

SEQ ID NO: 8059 - DNA, 15 bp, Homo sapiens
aaaaaagatataaaa

SEQ ID NO: 8060 - DNA, 15 bp, Homo sapiens
aaaaaaagatataaa

SEQ ID NO: 8061 - DNA, 15 bp, Homo sapiens
aaaaaaaagatataa

SEQ ID NO: 8062 - DNA, 15 bp, Homo sapiens
aaaaaaaaagatata

SEQ ID NO: 8063 - DNA, 15 bp, Homo sapiens
aaaaaaaaaagatat

SEQ ID NO: 8064 - DNA, 15 bp, Homo sapiens
aaaaaaaaaaagata

SEQ ID NO: 8065 - DNA, 15 bp, Homo sapiens
aaaaaaaaaaaagat

SEQ ID NO: 8066 - DNA, 15 bp, Homo sapiens
atcaaaaaaaaaaaa

SEQ ID NO: 8067 - DNA, 15 bp, Homo sapiens
aatcaaaaaaaaaaa

SEQ ID NO: 8068 - DNA, 15 bp, Homo sapiens
aaatcaaaaaaaaaa

SEQ ID NO: 8069 - DNA, 15 bp, Homo sapiens
aaaatcaaaaaaaaa

SEQ ID NO: 8070 - DNA, 15 bp, Homo sapiens
caaaatcaaaaaaaa

SEQ ID NO: 8071 - DNA, 15 bp, Homo sapiens
ccaaaatcaaaaaaa

SEQ ID NO: 8072 - DNA, 15 bp, Homo sapiens
accaaaatcaaaaaa

SEQ ID NO: 8073 - DNA, 15 bp, Homo sapiens
aaccaaaatcaaaaa

SEQ ID NO: 8074 - DNA, 15 bp, Homo sapiens
aaaccaaaatcaaaa

SEQ ID NO: 8075 - DNA, 15 bp, Homo sapiens
caaaccaaaatcaaa

SEQ ID NO: 8076 - DNA, 15 bp, Homo sapiens
acaaaccaaaatcaa

SEQ ID NO: 8077 - DNA, 15 bp, Homo sapiens
aacaaaccaaaatca

SEQ ID NO: 8078 - DNA, 15 bp, Homo sapiens
aaacaaaccaaaatc

SEQ ID NO: 8079 - DNA, 15 bp, Homo sapiens
caaacaaaccaaaat

SEQ ID NO: 8080 - DNA, 15 bp, Homo sapiens
acaaacaaaccaaaa

SEQ ID NO: 8081 - DNA, 15 bp, Homo sapiens
aacaaacaaaccaaa

SEQ ID NO: 8082 - DNA, 15 bp, Homo sapiens
gaacaaacaaaccaa

SEQ ID NO: 8083 - DNA, 15 bp, Homo sapiens
tgaacaaacaaacca

SEQ ID NO: 8084 - DNA, 15 bp, Homo sapiens
gtgaacaaacaaacc

SEQ ID NO: 8085 - DNA, 15 bp, Homo sapiens
agtgaacaaacaaac

SEQ ID NO: 8086 - DNA, 15 bp, Homo sapiens
tagtgaacaaacaaa

SEQ ID NO: 8087 - DNA, 15 bp, Homo sapiens
ttagtgaacaaacaa

SEQ ID NO: 8088 - DNA, 15 bp, Homo sapiens
gttagtgaacaaaca

SEQ ID NO: 8089 - DNA, 15 bp, Homo sapiens
agttagtgaacaaac

SEQ ID NO: 8090 - DNA, 15 bp, Homo sapiens
aagttagtgaacaaa

SEQ ID NO: 8091 - DNA, 15 bp, Homo sapiens
caagttagtgaacaa

SEQ ID NO: 8092 - DNA, 15 bp, Homo sapiens
ccaagttagtgaaca

SEQ ID NO: 8093 - DNA, 15 bp, Homo sapiens
tccaagttagtgaac

SEQ ID NO: 8094 - DNA, 15 bp, Homo sapiens
ttccaagttagtgaa

SEQ ID NO: 8095 - DNA, 15 bp, Homo sapiens
tttccaagttagtga

SEQ ID NO: 8096 - DNA, 15 bp, Homo sapiens
ttttccaagttagtg

SEQ ID NO: 8097 - DNA, 15 bp, Homo sapiens
gttttccaagttagt

SEQ ID NO: 8098 - DNA, 15 bp, Homo sapiens
agttttccaagttag

SEQ ID NO: 8099 - DNA, 15 bp, Homo sapiens
cagttttccaagtta

SEQ ID NO: 8100 - DNA, 15 bp, Homo sapiens
tcagttttccaagtt

SEQ ID NO: 8101 - DNA, 15 bp, Homo sapiens
atcagttttccaagt

SEQ ID NO: 8102 - DNA, 15 bp, Homo sapiens
catcagttttccaag

SEQ ID NO: 8103 - DNA, 15 bp, Homo sapiens
acatcagttttccaa

SEQ ID NO: 8104 - DNA, 15 bp, Homo sapiens
cacatcagttttcca

SEQ ID NO: 8105 - DNA, 15 bp, Homo sapiens
ccacatcagttttcc

SEQ ID NO: 8106 - DNA, 15 bp, Homo sapiens
tccacatcagttttc

SEQ ID NO: 8107 - DNA, 15 bp, Homo sapiens
ttccacatcagtttt

SEQ ID NO: 8108 - DNA, 15 bp, Homo sapiens
tttccacatcagttt

SEQ ID NO: 8109 - DNA, 15 bp, Homo sapiens
atttccacatcagtt

SEQ ID NO: 8110 - DNA, 15 bp, Homo sapiens
catttccacatcagt

SEQ ID NO: 8111 - DNA, 15 bp, Homo sapiens
acatttccacatcag

SEQ ID NO: 8112 - DNA, 15 bp, Homo sapiens
gacatttccacatca

SEQ ID NO: 8113 - DNA, 15 bp, Homo sapiens
ggacatttccacatc

SEQ ID NO: 8114 - DNA, 15 bp, Homo sapiens
gggacatttccacat

SEQ ID NO: 8115 - DNA, 15 bp, Homo sapiens
agggacatttccaca

SEQ ID NO: 8116 - DNA, 15 bp, Homo sapiens
aagggacatttccac

SEQ ID NO: 8117 - DNA, 15 bp, Homo sapiens
aaagggacatttcca

SEQ ID NO: 8118 - DNA, 15 bp, Homo sapiens
caaagggacatttcc

SEQ ID NO: 8119 - DNA, 15 bp, Homo sapiens
ccaaagggacatttc

SEQ ID NO: 8120 - DNA, 15 bp, Homo sapiens
gccaaagggacattt

SEQ ID NO: 8121 - DNA, 15 bp, Homo sapiens
agccaaagggacatt

SEQ ID NO: 8122 - DNA, 15 bp, Homo sapiens
aagccaaagggacat

SEQ ID NO: 8123 - DNA, 15 bp, Homo sapiens
gaagccaaagggaca

SEQ ID NO: 8124 - DNA, 15 bp, Homo sapiens
tgaagccaaagggac

SEQ ID NO: 8125 - DNA, 15 bp, Homo sapiens
ctgaagccaaaggga

SEQ ID NO: 8126 - DNA, 15 bp, Homo sapiens
actgaagccaaaggg

SEQ ID NO: 8127 - DNA, 15 bp, Homo sapiens
aactgaagccaaagg

SEQ ID NO: 8128 - DNA, 15 bp, Homo sapiens
taactgaagccaaag

SEQ ID NO: 8129 - DNA, 15 bp, Homo sapiens
gtaactgaagccaaa

SEQ ID NO: 8130 - DNA, 15 bp, Homo sapiens
ggtaactgaagccaa

SEQ ID NO: 8131 - DNA, 15 bp, Homo sapiens
aggtaactgaagcca

SEQ ID NO: 8132 - DNA, 15 bp, Homo sapiens
caggtaactgaagcc

SEQ ID NO: 8133 - DNA, 15 bp, Homo sapiens
tcaggtaactgaagc

SEQ ID NO: 8134 - DNA, 15 bp, Homo sapiens
ctcaggtaactgaag

SEQ ID NO: 8135 - DNA, 15 bp, Homo sapiens
gctcaggtaactgaa

SEQ ID NO: 8136 - DNA, 15 bp, Homo sapiens
tgctcaggtaactga

SEQ ID NO: 8137 - DNA, 15 bp, Homo sapiens
ctgctcaggtaactg

SEQ ID NO: 8138 - DNA, 15 bp, Homo sapiens
tctgctcaggtaact

SEQ ID NO: 8139 - DNA, 15 bp, Homo sapiens
ttctgctcaggtaac

SEQ ID NO: 8140 - DNA, 15 bp, Homo sapiens
cttctgctcaggtaa

SEQ ID NO: 8141 - DNA, 15 bp, Homo sapiens
ccttctgctcaggta

SEQ ID NO: 8142 - DNA, 15 bp, Homo sapiens
cccttctgctcaggt

SEQ ID NO: 8143 - DNA, 15 bp, Homo sapiens
ccccttctgctcagg

SEQ ID NO: 8144 - DNA, 15 bp, Homo sapiens
gccccttctgctcag

SEQ ID NO: 8145 - DNA, 15 bp, Homo sapiens
ggccccttctgctca

SEQ ID NO: 8146 - DNA, 15 bp, Homo sapiens
cggccccttctgctc

SEQ ID NO: 8147 - DNA, 15 bp, Homo sapiens
ccggccccttctgct

SEQ ID NO: 8148 - DNA, 15 bp, Homo sapiens
cccggccccttctgc

SEQ ID NO: 8149 - DNA, 15 bp, Homo sapiens
gcccggccccttctg

SEQ ID NO: 8150 - DNA, 15 bp, Homo sapiens
tgcccggccccttct

SEQ ID NO: 8151 - DNA, 15 bp, Homo sapiens
atgcccggccccttc

SEQ ID NO: 8152 - DNA, 15 bp, Homo sapiens
aatgcccggcccctt

SEQ ID NO: 8153 - DNA, 15 bp, Homo sapiens
caatgcccggcccct

SEQ ID NO: 8154 - DNA, 15 bp, Homo sapiens
gcaatgcccggcccc

SEQ ID NO: 8155 - DNA, 15 bp, Homo sapiens
ggcaatgcccggccc

SEQ ID NO: 8156 - DNA, 15 bp, Homo sapiens
tggcaatgcccggcc

SEQ ID NO: 8157 - DNA, 15 bp, Homo sapiens
ttggcaatgcccggc

SEQ ID NO: 8158 - DNA, 15 bp, Homo sapiens
tttggcaatgcccgg

SEQ ID NO: 8159 - DNA, 15 bp, Homo sapiens
gtttggcaatgcccg

SEQ ID NO: 8160 - DNA, 15 bp, Homo sapiens
agtttggcaatgccc

SEQ ID NO: 8161 - DNA, 15 bp, Homo sapiens
gagtttggcaatgcc

SEQ ID NO: 8162 - DNA, 15 bp, Homo sapiens
agagtttggcaatgc

SEQ ID NO: 8163 - DNA, 15 bp, Homo sapiens
gagagtttggcaatg

SEQ ID NO: 8164 - DNA, 15 bp, Homo sapiens
ggagagtttggcaat

SEQ ID NO: 8165 - DNA, 15 bp, Homo sapiens
aggagagtttggcaa

SEQ ID NO: 8166 - DNA, 15 bp, Homo sapiens
gaggagagtttggca

SEQ ID NO: 8167 - DNA, 15 bp, Homo sapiens
agaggagagtttggc

SEQ ID NO: 8168 - DNA, 15 bp, Homo sapiens
aagaggagagtttgg

SEQ ID NO: 8169 - DNA, 15 bp, Homo sapiens
taagaggagagtttg

SEQ ID NO: 8170 - DNA, 15 bp, Homo sapiens
ctaagaggagagttt

SEQ ID NO: 8171 - DNA, 15 bp, Homo sapiens
cctaagaggagagtt

SEQ ID NO: 8172 - DNA, 15 bp, Homo sapiens
tcctaagaggagagt

SEQ ID NO: 8173 - DNA, 15 bp, Homo sapiens
gtcctaagaggagag

SEQ ID NO: 8174 - DNA, 15 bp, Homo sapiens
tgtcctaagaggaga

SEQ ID NO: 8175 - DNA, 15 bp, Homo sapiens
ctgtcctaagaggag

SEQ ID NO: 8176 - DNA, 15 bp, Homo sapiens
tctgtcctaagagga

SEQ ID NO: 8177 - DNA, 15 bp, Homo sapiens
ttctgtcctaagagg

SEQ ID NO: 8178 - DNA, 15 bp, Homo sapiens
attctgtcctaagag

SEQ ID NO: 8179 - DNA, 15 bp, Homo sapiens
aattctgtcctaaga

SEQ ID NO: 8180 - DNA, 15 bp, Homo sapiens
caattctgtcctaag

SEQ ID NO: 8181 - DNA, 15 bp, Homo sapiens
gcaattctgtcctaa

SEQ ID NO: 8182 - DNA, 15 bp, Homo sapiens
agcaattctgtccta

SEQ ID NO: 8183 - DNA, 15 bp, Homo sapiens
gagcaattctgtcct

SEQ ID NO: 8184 - DNA, 15 bp, Homo sapiens
ggagcaattctgtcc

SEQ ID NO: 8185 - DNA, 15 bp, Homo sapiens
gggagcaattctgtc

SEQ ID NO: 8186 - DNA, 15 bp, Homo sapiens
tgggagcaattctgt

SEQ ID NO: 8187 - DNA, 15 bp, Homo sapiens
ctgggagcaattctg

SEQ ID NO: 8188 - DNA, 15 bp, Homo sapiens
actgggagcaattct

SEQ ID NO: 8189 - DNA, 15 bp, Homo sapiens
tactgggagcaattc

SEQ ID NO: 8190 - DNA, 15 bp, Homo sapiens
atactgggagcaatt

SEQ ID NO: 8191 - DNA, 15 bp, Homo sapiens
aatactgggagcaat

SEQ ID NO: 8192 - DNA, 15 bp, Homo sapiens
caatactgggagcaa

SEQ ID NO: 8193 - DNA, 15 bp, Homo sapiens
tcaatactgggagca

SEQ ID NO: 8194 - DNA, 15 bp, Homo sapiens
atcaatactgggagc

SEQ ID NO: 8195 - DNA, 15 bp, Homo sapiens
gatcaatactgggag

SEQ ID NO: 8196 - DNA, 15 bp, Homo sapiens
tgatcaatactggga

SEQ ID NO: 8197 - DNA, 15 bp, Homo sapiens
atgatcaatactggg

SEQ ID NO: 8198 - DNA, 15 bp, Homo sapiens
aatgatcaatactgg

SEQ ID NO: 8199 - DNA, 15 bp, Homo sapiens
caatgatcaatactg

SEQ ID NO: 8200 - DNA, 15 bp, Homo sapiens
acaatgatcaatact

SEQ ID NO: 8201 - DNA, 15 bp, Homo sapiens
cacaatgatcaatac

SEQ ID NO: 8202 - DNA, 15 bp, Homo sapiens
acacaatgatcaata

SEQ ID NO: 8203 - DNA, 15 bp, Homo sapiens
aacacaatgatcaat

SEQ ID NO: 8204 - DNA, 15 bp, Homo sapiens
gaacacaatgatcaa

SEQ ID NO: 8205 - DNA, 15 bp, Homo sapiens
agaacacaatgatca

SEQ ID NO: 8206 - DNA, 15 bp, Homo sapiens
cagaacacaatgatc

SEQ ID NO: 8207 - DNA, 15 bp, Homo sapiens
tcagaacacaatgat

SEQ ID NO: 8208 - DNA, 15 bp, Homo sapiens
ctcagaacacaatga

SEQ ID NO: 8209 - DNA, 15 bp, Homo sapiens
actcagaacacaatg

SEQ ID NO: 8210 - DNA, 15 bp, Homo sapiens
aactcagaacacaat

SEQ ID NO: 8211 - DNA, 15 bp, Homo sapiens
caactcagaacacaa

SEQ ID NO: 8212 - DNA, 15 bp, Homo sapiens
ccaactcagaacaca

SEQ ID NO: 8213 - DNA, 15 bp, Homo sapiens
cccaactcagaacac

SEQ ID NO: 8214 - DNA, 15 bp, Homo sapiens
ccccaactcagaaca

SEQ ID NO: 8215 - DNA, 15 bp, Homo sapiens
cccccaactcagaac

SEQ ID NO: 8216 - DNA, 15 bp, Homo sapiens
tcccccaactcagaa

SEQ ID NO: 8217 - DNA, 15 bp, Homo sapiens
ctcccccaactcaga

SEQ ID NO: 8218 - DNA, 15 bp, Homo sapiens
gctcccccaactcag

SEQ ID NO: 8219 - DNA, 15 bp, Homo sapiens
tgctcccccaactca

SEQ ID NO: 8220 - DNA, 15 bp, Homo sapiens
ttgctcccccaactc

SEQ ID NO: 8221 - DNA, 15 bp, Homo sapiens
tttgctcccccaact

SEQ ID NO: 8222 - DNA, 15 bp, Homo sapiens
atttgctcccccaac

SEQ ID NO: 8223 - DNA, 15 bp, Homo sapiens
aatttgctcccccaa

SEQ ID NO: 8224 - DNA, 15 bp, Homo sapiens
caatttgctccccca

SEQ ID NO: 8225 - DNA, 15 bp, Homo sapiens
acaatttgctccccc

SEQ ID NO: 8226 - DNA, 15 bp, Homo sapiens
cacaatttgctcccc

SEQ ID NO: 8227 - DNA, 15 bp, Homo sapiens
gcacaatttgctccc

SEQ ID NO: 8228 - DNA, 15 bp, Homo sapiens
tgcacaatttgctcc

SEQ ID NO: 8229 - DNA, 15 bp, Homo sapiens
ctgcacaatttgctc

SEQ ID NO: 8230 - DNA, 15 bp, Homo sapiens
cctgcacaatttgct

SEQ ID NO: 8231 - DNA, 15 bp, Homo sapiens
tcctgcacaatttgc

SEQ ID NO: 8232 - DNA, 15 bp, Homo sapiens
ctcctgcacaatttg

SEQ ID NO: 8233 - DNA, 15 bp, Homo sapiens
cctcctgcacaattt

SEQ ID NO: 8234 - DNA, 15 bp, Homo sapiens
gcctcctgcacaatt

SEQ ID NO: 8235 - DNA, 15 bp, Homo sapiens
ggcctcctgcacaat

SEQ ID NO: 8236 - DNA, 15 bp, Homo sapiens
tggcctcctgcacaa

SEQ ID NO: 8237 - DNA, 15 bp, Homo sapiens
ctggcctcctgcaca

SEQ ID NO: 8238 - DNA, 15 bp, Homo sapiens
cctggcctcctgcac

SEQ ID NO: 8239 - DNA, 15 bp, Homo sapiens
acctggcctcctgca

SEQ ID NO: 8240 - DNA, 15 bp, Homo sapiens
gacctggcctcctgc

SEQ ID NO: 8241 - DNA, 15 bp, Homo sapiens
tgacctggcctcctg

SEQ ID NO: 8242 - DNA, 15 bp, Homo sapiens
ctgacctggcctcct

SEQ ID NO: 8243 - DNA, 15 bp, Homo sapiens
actgacctggcctcc

SEQ ID NO: 8244 - DNA, 15 bp, Homo sapiens
cactgacctggcctc

SEQ ID NO: 8245 - DNA, 15 bp, Homo sapiens
gcactgacctggcct

SEQ ID NO: 8246 - DNA, 15 bp, Homo sapiens
ggcactgacctggcc

SEQ ID NO: 8247 - DNA, 15 bp, Homo sapiens
tggcactgacctggc

SEQ ID NO: 8248 - DNA, 15 bp, Homo sapiens
ttggcactgacctgg

SEQ ID NO: 8249 - DNA, 15 bp, Homo sapiens
cttggcactgacctg

SEQ ID NO: 8250 - DNA, 15 bp, Homo sapiens
ccttggcactgacct

SEQ ID NO: 8251 - DNA, 15 bp, Homo sapiens
accttggcactgacc

SEQ ID NO: 8252 - DNA, 15 bp, Homo sapiens
caccttggcactgac

SEQ ID NO: 8253 - DNA, 15 bp, Homo sapiens
ccaccttggcactga

SEQ ID NO: 8254 - DNA, 15 bp, Homo sapiens
cccaccttggcactg

SEQ ID NO: 8255 - DNA, 15 bp, Homo sapiens
acccaccttggcact

SEQ ID NO: 8256 - DNA, 15 bp, Homo sapiens
cacccaccttggcac

SEQ ID NO: 8257 - DNA, 15 bp, Homo sapiens
ccacccaccttggca

SEQ ID NO: 8258 - DNA, 15 bp, Homo sapiens
cccacccaccttggc

SEQ ID NO: 8259 - DNA, 15 bp, Homo sapiens
tcccacccaccttgg

SEQ ID NO: 8260 - DNA, 15 bp, Homo sapiens
ctcccacccaccttg

SEQ ID NO: 8261 - DNA, 15 bp, Homo sapiens
cctcccacccacctt

SEQ ID NO: 8262 - DNA, 15 bp, Homo sapiens
tcctcccacccacct

SEQ ID NO: 8263 - DNA, 15 bp, Homo sapiens
ttcctcccacccacc

SEQ ID NO: 8264 - DNA, 15 bp, Homo sapiens
attcctcccacccac

SEQ ID NO: 8265 - DNA, 15 bp, Homo sapiens
aattcctcccaccca

SEQ ID NO: 8266 - DNA, 15 bp, Homo sapiens
caattcctcccaccc

SEQ ID NO: 8267 - DNA, 15 bp, Homo sapiens
ccaattcctcccacc

SEQ ID NO: 8268 - DNA, 15 bp, Homo sapiens
tccaattcctcccac

SEQ ID NO: 8269 - DNA, 15 bp, Homo sapiens
ctccaattcctccca

SEQ ID NO: 8270 - DNA, 15 bp, Homo sapiens
gctccaattcctccc

SEQ ID NO: 8271 - DNA, 15 bp, Homo sapiens
tgctccaattcctcc

SEQ ID NO: 8272 - DNA, 15 bp, Homo sapiens
ctgctccaattcctc

SEQ ID NO: 8273 - DNA, 15 bp, Homo sapiens
cctgctccaattcct

SEQ ID NO: 8274 - DNA, 15 bp, Homo sapiens
tcctgctccaattcc

SEQ ID NO: 8275 - DNA, 15 bp, Homo sapiens
ttcctgctccaattc

SEQ ID NO: 8276 - DNA, 15 bp, Homo sapiens
cttcctgctccaatt

SEQ ID NO: 8277 - DNA, 15 bp, Homo sapiens
gcttcctgctccaat

SEQ ID NO: 8278 - DNA, 15 bp, Homo sapiens
agcttcctgctccaa

SEQ ID NO: 8279 - DNA, 15 bp, Homo sapiens
aagcttcctgctcca

SEQ ID NO: 8280 - DNA, 15 bp, Homo sapiens
caagcttcctgctcc

SEQ ID NO: 8281 - DNA, 15 bp, Homo sapiens
gcaagcttcctgctc

SEQ ID NO: 8282 - DNA, 15 bp, Homo sapiens
ggcaagcttcctgct

SEQ ID NO: 8283 - DNA, 15 bp, Homo sapiens
aggcaagcttcctgc

SEQ ID NO: 8284 - DNA, 15 bp, Homo sapiens
taggcaagcttcctg

SEQ ID NO: 8285 - DNA, 15 bp, Homo sapiens
ttaggcaagcttcct

SEQ ID NO: 8286 - DNA, 15 bp, Homo sapiens
cttaggcaagcttcc

SEQ ID NO: 8287 - DNA, 15 bp, Homo sapiens
acttaggcaagcttc

SEQ ID NO: 8288 - DNA, 15 bp, Homo sapiens
cacttaggcaagctt

SEQ ID NO: 8289 - DNA, 15 bp, Homo sapiens
acacttaggcaagct

SEQ ID NO: 8290 - DNA, 15 bp, Homo sapiens
cacacttaggcaagc

SEQ ID NO: 8291 - DNA, 15 bp, Homo sapiens
gcacacttaggcaag

SEQ ID NO: 8292 - DNA, 15 bp, Homo sapiens
ggcacacttaggcaa

SEQ ID NO: 8293 - DNA, 15 bp, Homo sapiens
gggcacacttaggca

SEQ ID NO: 8294 - DNA, 15 bp, Homo sapiens
tgggcacacttaggc

SEQ ID NO: 8295 - DNA, 15 bp, Homo sapiens
ctgggcacacttagg

SEQ ID NO: 8296 - DNA, 15 bp, Homo sapiens
gctgggcacacttag

SEQ ID NO: 8297 - DNA, 15 bp, Homo sapiens
tgctgggcacactta

SEQ ID NO: 8298 - DNA, 15 bp, Homo sapiens
ttgctgggcacactt

SEQ ID NO: 8299 - DNA, 15 bp, Homo sapiens
tttgctgggcacact

SEQ ID NO: 8300 - DNA, 15 bp, Homo sapiens
ctttgctgggcacac

SEQ ID NO: 8301 - DNA, 15 bp, Homo sapiens
gctttgctgggcaca

SEQ ID NO: 8302 - DNA, 15 bp, Homo sapiens
ggctttgctgggcac

SEQ ID NO: 8303 - DNA, 15 bp, Homo sapiens
tggctttgctgggca

SEQ ID NO: 8304 - DNA, 15 bp, Homo sapiens
gtggctttgctgggc

SEQ ID NO: 8305 - DNA, 15 bp, Homo sapiens
cgtggctttgctggg

SEQ ID NO: 8306 - DNA, 15 bp, Homo sapiens
ccgtggctttgctgg

SEQ ID NO: 8307 - DNA, 15 bp, Homo sapiens
accgtggctttgctg

SEQ ID NO: 8308 - DNA, 15 bp, Homo sapiens
taccgtggctttgct

SEQ ID NO: 8309 - DNA, 15 bp, Homo sapiens
ctaccgtggctttgc

SEQ ID NO: 8310 - DNA, 15 bp, Homo sapiens
tctaccgtggctttg

SEQ ID NO: 8311 - DNA, 15 bp, Homo sapiens
ttctaccgtggcttt

SEQ ID NO: 8312 - DNA, 15 bp, Homo sapiens
gttctaccgtggctt

SEQ ID NO: 8313 - DNA, 15 bp, Homo sapiens
agttctaccgtggct

SEQ ID NO: 8314 - DNA, 15 bp, Homo sapiens
aagttctaccgtggc

SEQ ID NO: 8315 - DNA, 15 bp, Homo sapiens
aaagttctaccgtgg

SEQ ID NO: 8316 - DNA, 15 bp, Homo sapiens
gaaagttctaccgtg

SEQ ID NO: 8317 - DNA, 15 bp, Homo sapiens
agaaagttctaccgt

SEQ ID NO: 8318 - DNA, 15 bp, Homo sapiens
tagaaagttctaccg

SEQ ID NO: 8319 - DNA, 15 bp, Homo sapiens
gtagaaagttctacc

SEQ ID NO: 8320 - DNA, 15 bp, Homo sapiens
agtagaaagttctac

SEQ ID NO: 8321 - DNA, 15 bp, Homo sapiens
cagtagaaagttcta

SEQ ID NO: 8322 - DNA, 15 bp, Homo sapiens
acagtagaaagttct

SEQ ID NO: 8323 - DNA, 15 bp, Homo sapiens
cacagtagaaagttc

SEQ ID NO: 8324 - DNA, 15 bp, Homo sapiens
ccacagtagaaagtt

SEQ ID NO: 8325 - DNA, 15 bp, Homo sapiens
gccacagtagaaagt

SEQ ID NO: 8326 - DNA, 15 bp, Homo sapiens
agccacagtagaaag

SEQ ID NO: 8327 - DNA, 15 bp, Homo sapiens
gagccacagtagaaa

SEQ ID NO: 8328 - DNA, 15 bp, Homo sapiens
agagccacagtagaa

SEQ ID NO: 8329 - DNA, 15 bp, Homo sapiens
tagagccacagtaga

SEQ ID NO: 8330 - DNA, 15 bp, Homo sapiens
atagagccacagtag

SEQ ID NO: 8331 - DNA, 15 bp, Homo sapiens
catagagccacagta

SEQ ID NO: 8332 - DNA, 15 bp, Homo sapiens
gcatagagccacagt

SEQ ID NO: 8333 - DNA, 15 bp, Homo sapiens
agcatagagccacag

SEQ ID NO: 8334 - DNA, 15 bp, Homo sapiens
tagcatagagccaca

SEQ ID NO: 8335 - DNA, 15 bp, Homo sapiens
gtagcatagagccac

SEQ ID NO: 8336 - DNA, 15 bp, Homo sapiens
agtagcatagagcca

SEQ ID NO: 8337 - DNA, 15 bp, Homo sapiens
aagtagcatagagcc

SEQ ID NO: 8338 - DNA, 15 bp, Homo sapiens
gaagtagcatagagc

SEQ ID NO: 8339 - DNA, 15 bp, Homo sapiens
agaagtagcatagag

SEQ ID NO: 8340 - DNA, 15 bp, Homo sapiens
aagaagtagcataga

SEQ ID NO: 8341 - DNA, 15 bp, Homo sapiens
taagaagtagcatag

SEQ ID NO: 8342 - DNA, 15 bp, Homo sapiens
ctaagaagtagcata

SEQ ID NO: 8343 - DNA, 15 bp, Homo sapiens
gctaagaagtagcat

SEQ ID NO: 8344 - DNA, 15 bp, Homo sapiens
tgctaagaagtagca

SEQ ID NO: 8345 - DNA, 15 bp, Homo sapiens
ttgctaagaagtagc

SEQ ID NO: 8346 - DNA, 15 bp, Homo sapiens
gttgctaagaagtag

SEQ ID NO: 8347 - DNA, 15 bp, Homo sapiens
ggttgctaagaagta

SEQ ID NO: 8348 - DNA, 15 bp, Homo sapiens
aggttgctaagaagt

SEQ ID NO: 8349 - DNA, 15 bp, Homo sapiens
aaggttgctaagaag

SEQ ID NO: 8350 - DNA, 15 bp, Homo sapiens
gaaggttgctaagaa

SEQ ID NO: 8351 - DNA, 15 bp, Homo sapiens
agaaggttgctaaga

SEQ ID NO: 8352 - DNA, 15 bp, Homo sapiens
gagaaggttgctaag

SEQ ID NO: 8353 - DNA, 15 bp, Homo sapiens
ggagaaggttgctaa

SEQ ID NO: 8354 - DNA, 15 bp, Homo sapiens
tggagaaggttgcta

SEQ ID NO: 8355 - DNA, 15 bp, Homo sapiens
atggagaaggttgct

SEQ ID NO: 8356 - DNA, 15 bp, Homo sapiens
catggagaaggttgc

SEQ ID NO: 8357 - DNA, 15 bp, Homo sapiens
acatggagaaggttg

SEQ ID NO: 8358 - DNA, 15 bp, Homo sapiens
cacatggagaaggtt

SEQ ID NO: 8359 - DNA, 15 bp, Homo sapiens
gcacatggagaaggt

SEQ ID NO: 8360 - DNA, 15 bp, Homo sapiens
agcacatggagaagg

SEQ ID NO: 8361 - DNA, 15 bp, Homo sapiens
aagcacatggagaag

SEQ ID NO: 8362 - DNA, 15 bp, Homo sapiens
gaagcacatggagaa

SEQ ID NO: 8363 - DNA, 15 bp, Homo sapiens
ggaagcacatggaga

SEQ ID NO: 8364 - DNA, 15 bp, Homo sapiens
aggaagcacatggag

SEQ ID NO: 8365 - DNA, 15 bp, Homo sapiens
caggaagcacatgga

SEQ ID NO: 8366 - DNA, 15 bp, Homo sapiens
ccaggaagcacatgg

SEQ ID NO: 8367 - DNA, 15 bp, Homo sapiens
tccaggaagcacatg

SEQ ID NO: 8368 - DNA, 15 bp, Homo sapiens
ctccaggaagcacat

SEQ ID NO: 8369 - DNA, 15 bp, Homo sapiens
tctccaggaagcaca

SEQ ID NO: 8370 - DNA, 15 bp, Homo sapiens
ctctccaggaagcac

SEQ ID NO: 8371 - DNA, 15 bp, Homo sapiens
actctccaggaagca

SEQ ID NO: 8372 - DNA, 15 bp, Homo sapiens
gactctccaggaagc

SEQ ID NO: 8373 - DNA, 15 bp, Homo sapiens
ggactctccaggaag

SEQ ID NO: 8374 - DNA, 15 bp, Homo sapiens
aggactctccaggaa

SEQ ID NO: 8375 - DNA, 15 bp, Homo sapiens
aaggactctccagga

SEQ ID NO: 8376 - DNA, 15 bp, Homo sapiens
caaggactctccagg

SEQ ID NO: 8377 - DNA, 15 bp, Homo sapiens
ccaaggactctccag

SEQ ID NO: 8378 - DNA, 15 bp, Homo sapiens
tccaaggactctcca

SEQ ID NO: 8379 - DNA, 15 bp, Homo sapiens
ctccaaggactctcc

SEQ ID NO: 8380 - DNA, 15 bp, Homo sapiens
actccaaggactctc

SEQ ID NO: 8381 - DNA, 15 bp, Homo sapiens
gactccaaggactct

SEQ ID NO: 8382 - DNA, 15 bp, Homo sapiens
tgactccaaggactc

SEQ ID NO: 8383 - DNA, 15 bp, Homo sapiens
ctgactccaaggact

SEQ ID NO: 8384 - DNA, 15 bp, Homo sapiens
tctgactccaaggac

SEQ ID NO: 8385 - DNA, 15 bp, Homo sapiens
ttctgactccaagga

SEQ ID NO: 8386 - DNA, 15 bp, Homo sapiens
gttctgactccaagg

SEQ ID NO: 8387 - DNA, 15 bp, Homo sapiens
ggttctgactccaag

SEQ ID NO: 8388 - DNA, 15 bp, Homo sapiens
aggttctgactccaa

SEQ ID NO: 8389 - DNA, 15 bp, Homo sapiens
aaggttctgactcca

SEQ ID NO: 8390 - DNA, 15 bp, Homo sapiens
aaaggttctgactcc

SEQ ID NO: 8391 - DNA, 15 bp, Homo sapiens
aaaaggttctgactc

SEQ ID NO: 8392 - DNA, 15 bp, Homo sapiens
aaaaaggttctgact

SEQ ID NO: 8393 - DNA, 15 bp, Homo sapiens
gaaaaaggttctgac

SEQ ID NO: 8394 - DNA, 15 bp, Homo sapiens
agaaaaaggttctga

SEQ ID NO: 8395 - DNA, 15 bp, Homo sapiens
aagaaaaaggttctg

SEQ ID NO: 8396 - DNA, 15 bp, Homo sapiens
caagaaaaaggttct

SEQ ID NO: 8397 - DNA, 15 bp, Homo sapiens
tcaagaaaaaggttc

SEQ ID NO: 8398 - DNA, 15 bp, Homo sapiens
ttcaagaaaaaggtt

SEQ ID NO: 8399 - DNA, 15 bp, Homo sapiens
tttcaagaaaaaggt

SEQ ID NO: 8400 - DNA, 15 bp, Homo sapiens
gtttcaagaaaaagg

SEQ ID NO: 8401 - DNA, 15 bp, Homo sapiens
ggtttcaagaaaaag

SEQ ID NO: 8402 - DNA, 15 bp, Homo sapiens
gggtttcaagaaaaa

SEQ ID NO: 8403 - DNA, 15 bp, Homo sapiens
tgggtttcaagaaaa

SEQ ID NO: 8404 - DNA, 15 bp, Homo sapiens
ctgggtttcaagaaa

SEQ ID NO: 8405 - DNA, 15 bp, Homo sapiens
tctgggtttcaagaa

SEQ ID NO: 8406 - DNA, 15 bp, Homo sapiens
gtctgggtttcaaga

SEQ ID NO: 8407 - DNA, 15 bp, Homo sapiens
tgtctgggtttcaag

SEQ ID NO: 8408 - DNA, 15 bp, Homo sapiens
gtgtctgggtttcaa

SEQ ID NO: 8409 - DNA, 15 bp, Homo sapiens
agtgtctgggtttca

SEQ ID NO: 8410 - DNA, 15 bp, Homo sapiens
aagtgtctgggtttc

SEQ ID NO: 8411 - DNA, 15 bp, Homo sapiens
aaagtgtctgggttt

SEQ ID NO: 8412 - DNA, 15 bp, Homo sapiens
taaagtgtctgggtt

SEQ ID NO: 8413 - DNA, 15 bp, Homo sapiens
gtaaagtgtctgggt

SEQ ID NO: 8414 - DNA, 15 bp, Homo sapiens
agtaaagtgtctggg

SEQ ID NO: 8415 - DNA, 15 bp, Homo sapiens
aagtaaagtgtctgg

SEQ ID NO: 8416 - DNA, 15 bp, Homo sapiens
gaagtaaagtgtctg

SEQ ID NO: 8417 - DNA, 15 bp, Homo sapiens
ggaagtaaagtgtct

SEQ ID NO: 8418 - DNA, 15 bp, Homo sapiens
tggaagtaaagtgtc

SEQ ID NO: 8419 - DNA, 15 bp, Homo sapiens
ttggaagtaaagtgt

SEQ ID NO: 8420 - DNA, 15 bp, Homo sapiens
cttggaagtaaagtg

SEQ ID NO: 8421 - DNA, 15 bp, Homo sapiens
tcttggaagtaaagt

SEQ ID NO: 8422 - DNA, 15 bp, Homo sapiens
ttcttggaagtaaag

SEQ ID NO: 8423 - DNA, 15 bp, Homo sapiens
tttcttggaagtaaa

SEQ ID NO: 8424 - DNA, 15 bp, Homo sapiens
ttttcttggaagtaa

SEQ ID NO: 8425 - DNA, 15 bp, Homo sapiens
attttcttggaagta

SEQ ID NO: 8426 - DNA, 15 bp, Homo sapiens
cattttcttggaagt

SEQ ID NO: 8427 - DNA, 15 bp, Homo sapiens
gcattttcttggaag

SEQ ID NO: 8428 - DNA, 15 bp, Homo sapiens
agcattttcttggaa

SEQ ID NO: 8429 - DNA, 15 bp, Homo sapiens
cagcattttcttgga

SEQ ID NO: 8430 - DNA, 15 bp, Homo sapiens
acagcattttcttgg

SEQ ID NO: 8431 - DNA, 15 bp, Homo sapiens
gacagcattttcttg

SEQ ID NO: 8432 - DNA, 15 bp, Homo sapiens
ggacagcattttctt

SEQ ID NO: 8433 - DNA, 15 bp, Homo sapiens
tggacagcattttct

SEQ ID NO: 8434 - DNA, 15 bp, Homo sapiens
ttggacagcattttc

SEQ ID NO: 8435 - DNA, 15 bp, Homo sapiens
cttggacagcatttt

SEQ ID NO: 8436 - DNA, 15 bp, Homo sapiens
tcttggacagcattt

SEQ ID NO: 8437 - DNA, 15 bp, Homo sapiens
ttcttggacagcatt

SEQ ID NO: 8438 - DNA, 15 bp, Homo sapiens
tttcttggacagcat

SEQ ID NO: 8439 - DNA, 15 bp, Homo sapiens
ttttcttggacagca

SEQ ID NO: 8440 - DNA, 15 bp, Homo sapiens
gttttcttggacagc

SEQ ID NO: 8441 - DNA, 15 bp, Homo sapiens
agttttcttggacag

SEQ ID NO: 8442 - DNA, 15 bp, Homo sapiens
gagttttcttggaca

SEQ ID NO: 8443 - DNA, 15 bp, Homo sapiens
tgagttttcttggac

SEQ ID NO: 8444 - DNA, 15 bp, Homo sapiens
atgagttttcttgga

SEQ ID NO: 8445 - DNA, 15 bp, Homo sapiens
gatgagttttcttgg

SEQ ID NO: 8446 - DNA, 15 bp, Homo sapiens
ggatgagttttcttg

SEQ ID NO: 8447 - DNA, 15 bp, Homo sapiens
aggatgagttttctt

SEQ ID NO: 8448 - DNA, 15 bp, Homo sapiens
aaggatgagttttct

SEQ ID NO: 8449 - DNA, 15 bp, Homo sapiens
gaaggatgagttttc

SEQ ID NO: 8450 - DNA, 15 bp, Homo sapiens
ggaaggatgagtttt

SEQ ID NO: 8451 - DNA, 15 bp, Homo sapiens
gggaaggatgagttt

SEQ ID NO: 8452 - DNA, 15 bp, Homo sapiens
agggaaggatgagtt

SEQ ID NO: 8453 - DNA, 15 bp, Homo sapiens
aagggaaggatgagt

SEQ ID NO: 8454 - DNA, 15 bp, Homo sapiens
gaagggaaggatgag

SEQ ID NO: 8455 - DNA, 15 bp, Homo sapiens
agaagggaaggatga

SEQ ID NO: 8456 - DNA, 15 bp, Homo sapiens
aagaagggaaggatg

SEQ ID NO: 8457 - DNA, 15 bp, Homo sapiens
gaagaagggaaggat

SEQ ID NO: 8458 - DNA, 15 bp, Homo sapiens
agaagaagggaagga

SEQ ID NO: 8459 - DNA, 15 bp, Homo sapiens
gagaagaagggaagg

SEQ ID NO: 8460 - DNA, 15 bp, Homo sapiens
tgagaagaagggaag

SEQ ID NO: 8461 - DNA, 15 bp, Homo sapiens
atgagaagaagggaa

SEQ ID NO: 8462 - DNA, 15 bp, Homo sapiens
catgagaagaaggga

SEQ ID NO: 8463 - DNA, 15 bp, Homo sapiens
tcatgagaagaaggg

SEQ ID NO: 8464 - DNA, 15 bp, Homo sapiens
ttcatgagaagaagg

SEQ ID NO: 8465 - DNA, 15 bp, Homo sapiens
gttcatgagaagaag

SEQ ID NO: 8466 - DNA, 15 bp, Homo sapiens
cgttcatgagaagaa

SEQ ID NO: 8467 - DNA, 15 bp, Homo sapiens
acgttcatgagaaga

SEQ ID NO: 8468 - DNA, 15 bp, Homo sapiens
aacgttcatgagaag

SEQ ID NO: 8469 - DNA, 15 bp, Homo sapiens
caacgttcatgagaa

SEQ ID NO: 8470 - DNA, 15 bp, Homo sapiens
acaacgttcatgaga

SEQ ID NO: 8471 - DNA, 15 bp, Homo sapiens
cacaacgttcatgag

SEQ ID NO: 8472 - DNA, 15 bp, Homo sapiens
acacaacgttcatga

SEQ ID NO: 8473 - DNA, 15 bp, Homo sapiens
tacacaacgttcatg

SEQ ID NO: 8474 - DNA, 15 bp, Homo sapiens
ctacacaacgttcat

SEQ ID NO: 8475 - DNA, 15 bp, Homo sapiens
tctacacaacgttca

SEQ ID NO: 8476 - DNA, 15 bp, Homo sapiens
ctctacacaacgttc

SEQ ID NO: 8477 - DNA, 15 bp, Homo sapiens
cctctacacaacgtt

SEQ ID NO: 8478 - DNA, 15 bp, Homo sapiens
acctctacacaacgt

SEQ ID NO: 8479 - DNA, 15 bp, Homo sapiens
cacctctacacaacg

SEQ ID NO: 8480 - DNA, 15 bp, Homo sapiens
acacctctacacaac

SEQ ID NO: 8481 - DNA, 15 bp, Homo sapiens
cacacctctacacaa

SEQ ID NO: 8482 - DNA, 15 bp, Homo sapiens
acacacctctacaca

SEQ ID NO: 8483 - DNA, 15 bp, Homo sapiens
gacacacctctacac

SEQ ID NO: 8484 - DNA, 15 bp, Homo sapiens
agacacacctctaca

SEQ ID NO: 8485 - DNA, 15 bp, Homo sapiens
aagacacacctctac

SEQ ID NO: 8486 - DNA, 15 bp, Homo sapiens
gaagacacacctcta

SEQ ID NO: 8487 - DNA, 15 bp, Homo sapiens
agaagacacacctct

SEQ ID NO: 8488 - DNA, 15 bp, Homo sapiens
gagaagacacacctc

SEQ ID NO: 8489 - DNA, 15 bp, Homo sapiens
agagaagacacacct

SEQ ID NO: 8490 - DNA, 15 bp, Homo sapiens
aagagaagacacacc

SEQ ID NO: 8491 - DNA, 15 bp, Homo sapiens
gaagagaagacacac

SEQ ID NO: 8492 - DNA, 15 bp, Homo sapiens
ggaagagaagacaca

SEQ ID NO: 8493 - DNA, 15 bp, Homo sapiens
aggaagagaagacac

SEQ ID NO: 8494 - DNA, 15 bp, Homo sapiens
aaggaagagaagaca

SEQ ID NO: 8495 - DNA, 15 bp, Homo sapiens
aaaggaagagaagac

SEQ ID NO: 8496 - DNA, 15 bp, Homo sapiens
caaaggaagagaaga

SEQ ID NO: 8497 - DNA, 15 bp, Homo sapiens
tcaaaggaagagaag

SEQ ID NO: 8498 - DNA, 15 bp, Homo sapiens
ctcaaaggaagagaa

SEQ ID NO: 8499 - DNA, 15 bp, Homo sapiens
gctcaaaggaagaga

SEQ ID NO: 8500 - DNA, 15 bp, Homo sapiens
agctcaaaggaagag

SEQ ID NO: 8501 - DNA, 15 bp, Homo sapiens
aagctcaaaggaaga

SEQ ID NO: 8502 - DNA, 15 bp, Homo sapiens
aaagctcaaaggaag

SEQ ID NO: 8503 - DNA, 15 bp, Homo sapiens
aaaagctcaaaggaa

SEQ ID NO: 8504 - DNA, 15 bp, Homo sapiens
gaaaagctcaaagga

SEQ ID NO: 8505 - DNA, 15 bp, Homo sapiens
ggaaaagctcaaagg

SEQ ID NO: 8506 - DNA, 15 bp, Homo sapiens
tggaaaagctcaaag

SEQ ID NO: 8507 - DNA, 15 bp, Homo sapiens
gtggaaaagctcaaa

SEQ ID NO: 8508 - DNA, 15 bp, Homo sapiens
agtggaaaagctcaa

SEQ ID NO: 8509 - DNA, 15 bp, Homo sapiens
gagtggaaaagctca

SEQ ID NO: 8510 - DNA, 15 bp, Homo sapiens
tgagtggaaaagctc

SEQ ID NO: 8511 - DNA, 15 bp, Homo sapiens
ctgagtggaaaagct

SEQ ID NO: 8512 - DNA, 15 bp, Homo sapiens
cctgagtggaaaagc

SEQ ID NO: 8513 - DNA, 15 bp, Homo sapiens
ccctgagtggaaaag

SEQ ID NO: 8514 - DNA, 15 bp, Homo sapiens
accctgagtggaaaa

SEQ ID NO: 8515 - DNA, 15 bp, Homo sapiens
aaccctgagtggaaa

SEQ ID NO: 8516 - DNA, 15 bp, Homo sapiens
aaaccctgagtggaa

SEQ ID NO: 8517 - DNA, 15 bp, Homo sapiens
taaaccctgagtgga

SEQ ID NO: 8518 - DNA, 15 bp, Homo sapiens
ctaaaccctgagtgg

SEQ ID NO: 8519 - DNA, 15 bp, Homo sapiens
cctaaaccctgagtg

SEQ ID NO: 8520 - DNA, 15 bp, Homo sapiens
ccctaaaccctgagt

SEQ ID NO: 8521 - DNA, 15 bp, Homo sapiens
cccctaaaccctgag

SEQ ID NO: 8522 - DNA, 15 bp, Homo sapiens
tcccctaaaccctga

SEQ ID NO: 8523 - DNA, 15 bp, Homo sapiens
ctcccctaaaccctg

SEQ ID NO: 8524 - DNA, 15 bp, Homo sapiens
cctcccctaaaccct

SEQ ID NO: 8525 - DNA, 15 bp, Homo sapiens
acctcccctaaaccc

SEQ ID NO: 8526 - DNA, 15 bp, Homo sapiens
cacctcccctaaacc

SEQ ID NO: 8527 - DNA, 15 bp, Homo sapiens
tcacctcccctaaac

SEQ ID NO: 8528 - DNA, 15 bp, Homo sapiens
atcacctcccctaaa

SEQ ID NO: 8529 - DNA, 15 bp, Homo sapiens
tatcacctcccctaa

SEQ ID NO: 8530 - DNA, 15 bp, Homo sapiens
atatcacctccccta

SEQ ID NO: 8531 - DNA, 15 bp, Homo sapiens
aatatcacctcccct

SEQ ID NO: 8532 - DNA, 15 bp, Homo sapiens
gaatatcacctcccc

SEQ ID NO: 8533 - DNA, 15 bp, Homo sapiens
agaatatcacctccc

SEQ ID NO: 8534 - DNA, 15 bp, Homo sapiens
tagaatatcacctcc

SEQ ID NO: 8535 - DNA, 15 bp, Homo sapiens
atagaatatcacctc

SEQ ID NO: 8536 - DNA, 15 bp, Homo sapiens
tatagaatatcacct

SEQ ID NO: 8537 - DNA, 15 bp, Homo sapiens
atatagaatatcacc

SEQ ID NO: 8538 - DNA, 15 bp, Homo sapiens
aatatagaatatcac

SEQ ID NO: 8539 - DNA, 15 bp, Homo sapiens
aaatatagaatatca

SEQ ID NO: 8540 - DNA, 15 bp, Homo sapiens
caaatatagaatatc

SEQ ID NO: 8541 - DNA, 15 bp, Homo sapiens
ccaaatatagaatat

SEQ ID NO: 8542 - DNA, 15 bp, Homo sapiens
cccaaatatagaata

SEQ ID NO: 8543 - DNA, 15 bp, Homo sapiens
acccaaatatagaat

SEQ ID NO: 8544 - DNA, 15 bp, Homo sapiens
aacccaaatatagaa

SEQ ID NO: 8545 - DNA, 15 bp, Homo sapiens
aaacccaaatataga

SEQ ID NO: 8546 - DNA, 15 bp, Homo sapiens
caaacccaaatatag

SEQ ID NO: 8547 - DNA, 15 bp, Homo sapiens
ccaaacccaaatata

SEQ ID NO: 8548 - DNA, 15 bp, Homo sapiens
gccaaacccaaatat

SEQ ID NO: 8549 - DNA, 15 bp, Homo sapiens
agccaaacccaaata

SEQ ID NO: 8550 - DNA, 15 bp, Homo sapiens
gagccaaacccaaat

SEQ ID NO: 8551 - DNA, 15 bp, Homo sapiens
agagccaaacccaaa

SEQ ID NO: 8552 - DNA, 15 bp, Homo sapiens
cagagccaaacccaa

SEQ ID NO: 8553 - DNA, 15 bp, Homo sapiens
ccagagccaaaccca

SEQ ID NO: 8554 - DNA, 15 bp, Homo sapiens
cccagagccaaaccc

SEQ ID NO: 8555 - DNA, 15 bp, Homo sapiens
acccagagccaaacc

SEQ ID NO: 8556 - DNA, 15 bp, Homo sapiens
tacccagagccaaac

SEQ ID NO: 8557 - DNA, 15 bp, Homo sapiens
gtacccagagccaaa

SEQ ID NO: 8558 - DNA, 15 bp, Homo sapiens
agtacccagagccaa

SEQ ID NO: 8559 - DNA, 15 bp, Homo sapiens
cagtacccagagcca

SEQ ID NO: 8560 - DNA, 15 bp, Homo sapiens
gcagtacccagagcc

SEQ ID NO: 8561 - DNA, 15 bp, Homo sapiens
tgcagtacccagagc

SEQ ID NO: 8562 - DNA, 15 bp, Homo sapiens
ttgcagtacccagag

SEQ ID NO: 8563 - DNA, 15 bp, Homo sapiens
gttgcagtacccaga

SEQ ID NO: 8564 - DNA, 15 bp, Homo sapiens
tgttgcagtacccag

SEQ ID NO: 8565 - DNA, 15 bp, Homo sapiens
gtgttgcagtaccca

SEQ ID NO: 8566 - DNA, 15 bp, Homo sapiens
agtgttgcagtaccc

SEQ ID NO: 8567 - DNA, 15 bp, Homo sapiens
tagtgttgcagtacc

SEQ ID NO: 8568 - DNA, 15 bp, Homo sapiens
ctagtgttgcagtac

SEQ ID NO: 8569 - DNA, 15 bp, Homo sapiens
cctagtgttgcagta

SEQ ID NO: 8570 - DNA, 15 bp, Homo sapiens
gcctagtgttgcagt

SEQ ID NO: 8571 - DNA, 15 bp, Homo sapiens
agcctagtgttgcag

SEQ ID NO: 8572 - DNA, 15 bp, Homo sapiens
tagcctagtgttgca

SEQ ID NO: 8573 - DNA, 15 bp, Homo sapiens
atagcctagtgttgc

SEQ ID NO: 8574 - DNA, 15 bp, Homo sapiens
aatagcctagtgttg

SEQ ID NO: 8575 - DNA, 15 bp, Homo sapiens
taatagcctagtgtt

SEQ ID NO: 8576 - DNA, 15 bp, Homo sapiens
ttaatagcctagtgt

SEQ ID NO: 8577 - DNA, 15 bp, Homo sapiens
cttaatagcctagtg

SEQ ID NO: 8578 - DNA, 15 bp, Homo sapiens
tcttaatagcctagt

SEQ ID NO: 8579 - DNA, 15 bp, Homo sapiens
atcttaatagcctag

SEQ ID NO: 8580 - DNA, 15 bp, Homo sapiens
aatcttaatagccta

SEQ ID NO: 8581 - DNA, 15 bp, Homo sapiens
aaatcttaatagcct

SEQ ID NO: 8582 - DNA, 15 bp, Homo sapiens
gaaatcttaatagcc

SEQ ID NO: 8583 - DNA, 15 bp, Homo sapiens
tgaaatcttaatagc

SEQ ID NO: 8584 - DNA, 15 bp, Homo sapiens
atgaaatcttaatag

SEQ ID NO: 8585 - DNA, 15 bp, Homo sapiens
gatgaaatcttaata

SEQ ID NO: 8586 - DNA, 15 bp, Homo sapiens
ggatgaaatcttaat

SEQ ID NO: 8587 - DNA, 15 bp, Homo sapiens
aggatgaaatcttaa

SEQ ID NO: 8588 - DNA, 15 bp, Homo sapiens
aaggatgaaatctta

SEQ ID NO: 8589 - DNA, 15 bp, Homo sapiens
taaggatgaaatctt

SEQ ID NO: 8590 - DNA, 15 bp, Homo sapiens
gtaaggatgaaatct

SEQ ID NO: 8591 - DNA, 15 bp, Homo sapiens
agtaaggatgaaatc

SEQ ID NO: 8592 - DNA, 15 bp, Homo sapiens
cagtaaggatgaaat

SEQ ID NO: 8593 - DNA, 15 bp, Homo sapiens
gcagtaaggatgaaa

SEQ ID NO: 8594 - DNA, 15 bp, Homo sapiens
agcagtaaggatgaa

SEQ ID NO: 8595 - DNA, 15 bp, Homo sapiens
aagcagtaaggatga

SEQ ID NO: 8596 - DNA, 15 bp, Homo sapiens
aaagcagtaaggatg

SEQ ID NO: 8597 - DNA, 15 bp, Homo sapiens
caaagcagtaaggat

SEQ ID NO: 8598 - DNA, 15 bp, Homo sapiens
gcaaagcagtaagga

SEQ ID NO: 8599 - DNA, 15 bp, Homo sapiens
ggcaaagcagtaagg

SEQ ID NO: 8600 - DNA, 15 bp, Homo sapiens
gggcaaagcagtaag

SEQ ID NO: 8601 - DNA, 15 bp, Homo sapiens
ggggcaaagcagtaa

SEQ ID NO: 8602 - DNA, 15 bp, Homo sapiens
aggggcaaagcagta

SEQ ID NO: 8603 - DNA, 15 bp, Homo sapiens
gaggggcaaagcagt

SEQ ID NO: 8604 - DNA, 15 bp, Homo sapiens
ggaggggcaaagcag

SEQ ID NO: 8605 - DNA, 15 bp, Homo sapiens
aggaggggcaaagca

SEQ ID NO: 8606 - DNA, 15 bp, Homo sapiens
taggaggggcaaagc

SEQ ID NO: 8607 - DNA, 15 bp, Homo sapiens
ataggaggggcaaag

SEQ ID NO: 8608 - DNA, 15 bp, Homo sapiens
gataggaggggcaaa

SEQ ID NO: 8609 - DNA, 15 bp, Homo sapiens
agataggaggggcaa

SEQ ID NO: 8610 - DNA, 15 bp, Homo sapiens
aagataggaggggca

SEQ ID NO: 8611 - DNA, 15 bp, Homo sapiens
aaagataggaggggc

SEQ ID NO: 8612 - DNA, 15 bp, Homo sapiens
gaaagataggagggg

SEQ ID NO: 8613 - DNA, 15 bp, Homo sapiens
ggaaagataggaggg

SEQ ID NO: 8614 - DNA, 15 bp, Homo sapiens
tggaaagataggagg

SEQ ID NO: 8615 - DNA, 15 bp, Homo sapiens
ctggaaagataggag

SEQ ID NO: 8616 - DNA, 15 bp, Homo sapiens
tctggaaagatagga

SEQ ID NO: 8617 - DNA, 15 bp, Homo sapiens
ttctggaaagatagg

SEQ ID NO: 8618 - DNA, 15 bp, Homo sapiens
tttctggaaagatag

SEQ ID NO: 8619 - DNA, 15 bp, Homo sapiens
gtttctggaaagata

SEQ ID NO: 8620 - DNA, 15 bp, Homo sapiens
ggtttctggaaagat

SEQ ID NO: 8621 - DNA, 15 bp, Homo sapiens
gggtttctggaaaga

SEQ ID NO: 8622 - DNA, 15 bp, Homo sapiens
tgggtttctggaaag

SEQ ID NO: 8623 - DNA, 15 bp, Homo sapiens
gtgggtttctggaaa

SEQ ID NO: 8624 - DNA, 15 bp, Homo sapiens
tgtgggtttctggaa

SEQ ID NO: 8625 - DNA, 15 bp, Homo sapiens
ttgtgggtttctgga

SEQ ID NO: 8626 - DNA, 15 bp, Homo sapiens
attgtgggtttctgg

SEQ ID NO: 8627 - DNA, 15 bp, Homo sapiens
cattgtgggtttctg

SEQ ID NO: 8628 - DNA, 15 bp, Homo sapiens
ccattgtgggtttct

SEQ ID NO: 8629 - DNA, 15 bp, Homo sapiens
tccattgtgggtttc

SEQ ID NO: 8630 - DNA, 15 bp, Homo sapiens
atccattgtgggttt

SEQ ID NO: 8631 - DNA, 15 bp, Homo sapiens
aatccattgtgggtt

SEQ ID NO: 8632 - DNA, 15 bp, Homo sapiens
aaatccattgtgggt

SEQ ID NO: 8633 - DNA, 15 bp, Homo sapiens
caaatccattgtggg

SEQ ID NO: 8634 - DNA, 15 bp, Homo sapiens
gcaaatccattgtgg

SEQ ID NO: 8635 - DNA, 15 bp, Homo sapiens
agcaaatccattgtg

SEQ ID NO: 8636 - DNA, 15 bp, Homo sapiens
tagcaaatccattgt

SEQ ID NO: 8637 - DNA, 15 bp, Homo sapiens
ctagcaaatccattg

SEQ ID NO: 8638 - DNA, 15 bp, Homo sapiens
tctagcaaatccatt

SEQ ID NO: 8639 - DNA, 15 bp, Homo sapiens
ttctagcaaatccat

SEQ ID NO: 8640 - DNA, 15 bp, Homo sapiens
tttctagcaaatcca

SEQ ID NO: 8641 - DNA, 15 bp, Homo sapiens
atttctagcaaatcc

SEQ ID NO: 8642 - DNA, 15 bp, Homo sapiens
tatttctagcaaatc

SEQ ID NO: 8643 - DNA, 15 bp, Homo sapiens
ttatttctagcaaat

SEQ ID NO: 8644 - DNA, 15 bp, Homo sapiens
attatttctagcaaa

SEQ ID NO: 8645 - DNA, 15 bp, Homo sapiens
cattatttctagcaa

SEQ ID NO: 8646 - DNA, 15 bp, Homo sapiens
ccattatttctagca

SEQ ID NO: 8647 - DNA, 15 bp, Homo sapiens
tccattatttctagc

SEQ ID NO: 8648 - DNA, 15 bp, Homo sapiens
ttccattatttctag

SEQ ID NO: 8649 - DNA, 15 bp, Homo sapiens
gttccattatttcta

SEQ ID NO: 8650 - DNA, 15 bp, Homo sapiens
cgttccattatttct

SEQ ID NO: 8651 - DNA, 15 bp, Homo sapiens
acgttccattatttc

SEQ ID NO: 8652 - DNA, 15 bp, Homo sapiens
gacgttccattattt

SEQ ID NO: 8653 - DNA, 15 bp, Homo sapiens
ggacgttccattatt

SEQ ID NO: 8654 - DNA, 15 bp, Homo sapiens
aggacgttccattat

SEQ ID NO: 8655 - DNA, 15 bp, Homo sapiens
caggacgttccatta

SEQ ID NO: 8656 - DNA, 15 bp, Homo sapiens
acaggacgttccatt

SEQ ID NO: 8657 - DNA, 15 bp, Homo sapiens
aacaggacgttccat

SEQ ID NO: 8658 - DNA, 15 bp, Homo sapiens
aaacaggacgttcca

SEQ ID NO: 8659 - DNA, 15 bp, Homo sapiens
caaacaggacgttcc

SEQ ID NO: 8660 - DNA, 15 bp, Homo sapiens
ccaaacaggacgttc

SEQ ID NO: 8661 - DNA, 15 bp, Homo sapiens
tccaaacaggacgtt

SEQ ID NO: 8662 - DNA, 15 bp, Homo sapiens
gtccaaacaggacgt

SEQ ID NO: 8663 - DNA, 15 bp, Homo sapiens
tgtccaaacaggacg

SEQ ID NO: 8664 - DNA, 15 bp, Homo sapiens
ctgtccaaacaggac

SEQ ID NO: 8665 - DNA, 15 bp, Homo sapiens
cctgtccaaacagga

SEQ ID NO: 8666 - DNA, 15 bp, Homo sapiens
tcctgtccaaacagg

SEQ ID NO: 8667 - DNA, 15 bp, Homo sapiens
atcctgtccaaacag

SEQ ID NO: 8668 - DNA, 15 bp, Homo sapiens
tatcctgtccaaaca

SEQ ID NO: 8669 - DNA, 15 bp, Homo sapiens
atatcctgtccaaac

SEQ ID NO: 8670 - DNA, 15 bp, Homo sapiens
tatatcctgtccaaa

SEQ ID NO: 8671 - DNA, 15 bp, Homo sapiens
ttatatcctgtccaa

SEQ ID NO: 8672 - DNA, 15 bp, Homo sapiens
gttatatcctgtcca

SEQ ID NO: 8673 - DNA, 15 bp, Homo sapiens
ggttatatcctgtcc

SEQ ID NO: 8674 - DNA, 15 bp, Homo sapiens
tggttatatcctgtc

SEQ ID NO: 8675 - DNA, 15 bp, Homo sapiens
atggttatatcctgt

SEQ ID NO: 8676 - DNA, 15 bp, Homo sapiens
aatggttatatcctg

SEQ ID NO: 8677 - DNA, 15 bp, Homo sapiens
aaatggttatatcct

SEQ ID NO: 8678 - DNA, 15 bp, Homo sapiens
gaaatggttatatcc

SEQ ID NO: 8679 - DNA, 15 bp, Homo sapiens
agaaatggttatatc

SEQ ID NO: 8680 - DNA, 15 bp, Homo sapiens
gagaaatggttatat

SEQ ID NO: 8681 - DNA, 15 bp, Homo sapiens
tgagaaatggttata

SEQ ID NO: 8682 - DNA, 15 bp, Homo sapiens
ctgagaaatggttat

SEQ ID NO: 8683 - DNA, 15 bp, Homo sapiens
gctgagaaatggtta

SEQ ID NO: 8684 - DNA, 15 bp, Homo sapiens
agctgagaaatggtt

SEQ ID NO: 8685 - DNA, 15 bp, Homo sapiens
tagctgagaaatggt

SEQ ID NO: 8686 - DNA, 15 bp, Homo sapiens
ctagctgagaaatgg

SEQ ID NO: 8687 - DNA, 15 bp, Homo sapiens
tctagctgagaaatg

SEQ ID NO: 8688 - DNA, 15 bp, Homo sapiens
ctctagctgagaaat

SEQ ID NO: 8689 - DNA, 15 bp, Homo sapiens
cctctagctgagaaa

SEQ ID NO: 8690 - DNA, 15 bp, Homo sapiens
tcctctagctgagaa

SEQ ID NO: 8691 - DNA, 15 bp, Homo sapiens
atcctctagctgaga

SEQ ID NO: 8692 - DNA, 15 bp, Homo sapiens
tatcctctagctgag

SEQ ID NO: 8693 - DNA, 15 bp, Homo sapiens
atatcctctagctga

SEQ ID NO: 8694 - DNA, 15 bp, Homo sapiens
aatatcctctagctg

SEQ ID NO: 8695 - DNA, 15 bp, Homo sapiens
caatatcctctagct

SEQ ID NO: 8696 - DNA, 15 bp, Homo sapiens
acaatatcctctagc

SEQ ID NO: 8697 - DNA, 15 bp, Homo sapiens
aacaatatcctctag

SEQ ID NO: 8698 - DNA, 15 bp, Homo sapiens
caacaatatcctcta

SEQ ID NO: 8699 - DNA, 15 bp, Homo sapiens
ccaacaatatcctct

SEQ ID NO: 8700 - DNA, 15 bp, Homo sapiens
tccaacaatatcctc

SEQ ID NO: 8701 - DNA, 15 bp, Homo sapiens
ttccaacaatatcct

SEQ ID NO: 8702 - DNA, 15 bp, Homo sapiens
attccaacaatatcc

SEQ ID NO: 8703 - DNA, 15 bp, Homo sapiens
cattccaacaatatc

SEQ ID NO: 8704 - DNA, 15 bp, Homo sapiens
tcattccaacaatat

SEQ ID NO: 8705 - DNA, 15 bp, Homo sapiens
ttcattccaacaata

SEQ ID NO: 8706 - DNA, 15 bp, Homo sapiens
cttcattccaacaat

SEQ ID NO: 8707 - DNA, 15 bp, Homo sapiens
tcttcattccaacaa

SEQ ID NO: 8708 - DNA, 15 bp, Homo sapiens
ttcttcattccaaca

SEQ ID NO: 8709 - DNA, 15 bp, Homo sapiens
tttcttcattccaac

SEQ ID NO: 8710 - DNA, 15 bp, Homo sapiens
ctttcttcattccaa

SEQ ID NO: 8711 - DNA, 15 bp, Homo sapiens
tctttcttcattcca

SEQ ID NO: 8712 - DNA, 15 bp, Homo sapiens
atctttcttcattcc

SEQ ID NO: 8713 - DNA, 15 bp, Homo sapiens
tatctttcttcattc

SEQ ID NO: 8714 - DNA, 15 bp, Homo sapiens
ttatctttcttcatt

SEQ ID NO: 8715 - DNA, 15 bp, Homo sapiens
tttatctttcttcat

SEQ ID NO: 8716 - DNA, 15 bp, Homo sapiens
atttatctttcttca

SEQ ID NO: 8717 - DNA, 15 bp, Homo sapiens
catttatctttcttc

SEQ ID NO: 8718 - DNA, 15 bp, Homo sapiens
ccatttatctttctt

SEQ ID NO: 8719 - DNA, 15 bp, Homo sapiens
cccatttatctttct

SEQ ID NO: 8720 - DNA, 15 bp, Homo sapiens
ccccatttatctttc

SEQ ID NO: 8721 - DNA, 15 bp, Homo sapiens
tccccatttatcttt

SEQ ID NO: 8722 - DNA, 15 bp, Homo sapiens
ctccccatttatctt

SEQ ID NO: 8723 - DNA, 15 bp, Homo sapiens
tctccccatttatct

SEQ ID NO: 8724 - DNA, 15 bp, Homo sapiens
ttctccccatttatc

SEQ ID NO: 8725 - DNA, 15 bp, Homo sapiens
cttctccccatttat

SEQ ID NO: 8726 - DNA, 15 bp, Homo sapiens
ccttctccccattta

SEQ ID NO: 8727 - DNA, 15 bp, Homo sapiens
cccttctccccattt

SEQ ID NO: 8728 - DNA, 15 bp, Homo sapiens
tcccttctccccatt

SEQ ID NO: 8729 - DNA, 15 bp, Homo sapiens
ttcccttctccccat

SEQ ID NO: 8730 - DNA, 15 bp, Homo sapiens
gttcccttctcccca

SEQ ID NO: 8731 - DNA, 15 bp, Homo sapiens
agttcccttctcccc

SEQ ID NO: 8732 - DNA, 15 bp, Homo sapiens
gagttcccttctccc

SEQ ID NO: 8733 - DNA, 15 bp, Homo sapiens
tgagttcccttctcc

SEQ ID NO: 8734 - DNA, 15 bp, Homo sapiens
gtgagttcccttctc

SEQ ID NO: 8735 - DNA, 15 bp, Homo sapiens
tgtgagttcccttct

SEQ ID NO: 8736 - DNA, 15 bp, Homo sapiens
atgtgagttcccttc

SEQ ID NO: 8737 - DNA, 15 bp, Homo sapiens
aatgtgagttccctt

SEQ ID NO: 8738 - DNA, 15 bp, Homo sapiens
caatgtgagttccct

SEQ ID NO: 8739 - DNA, 15 bp, Homo sapiens
gcaatgtgagttccc

SEQ ID NO: 8740 - DNA, 15 bp, Homo sapiens
agcaatgtgagttcc

SEQ ID NO: 8741 - DNA, 15 bp, Homo sapiens
aagcaatgtgagttc

SEQ ID NO: 8742 - DNA, 15 bp, Homo sapiens
aaagcaatgtgagtt

SEQ ID NO: 8743 - DNA, 15 bp, Homo sapiens
caaagcaatgtgagt

SEQ ID NO: 8744 - DNA, 15 bp, Homo sapiens
ccaaagcaatgtgag

SEQ ID NO: 8745 - DNA, 15 bp, Homo sapiens
gccaaagcaatgtga

SEQ ID NO: 8746 - DNA, 15 bp, Homo sapiens
tgccaaagcaatgtg

SEQ ID NO: 8747 - DNA, 15 bp, Homo sapiens
gtgccaaagcaatgt

SEQ ID NO: 8748 - DNA, 15 bp, Homo sapiens
agtgccaaagcaatg

SEQ ID NO: 8749 - DNA, 15 bp, Homo sapiens
aagtgccaaagcaat

SEQ ID NO: 8750 - DNA, 15 bp, Homo sapiens
taagtgccaaagcaa

SEQ ID NO: 8751 - DNA, 15 bp, Homo sapiens
ttaagtgccaaagca

SEQ ID NO: 8752 - DNA, 15 bp, Homo sapiens
tttaagtgccaaagc

SEQ ID NO: 8753 - DNA, 15 bp, Homo sapiens
atttaagtgccaaag

SEQ ID NO: 8754 - DNA, 15 bp, Homo sapiens
aatttaagtgccaaa

SEQ ID NO: 8755 - DNA, 15 bp, Homo sapiens
taatttaagtgccaa

SEQ ID NO: 8756 - DNA, 15 bp, Homo sapiens
ttaatttaagtgcca

SEQ ID NO: 8757 - DNA, 15 bp, Homo sapiens
cttaatttaagtgcc

SEQ ID NO: 8758 - DNA, 15 bp, Homo sapiens
gcttaatttaagtgc

SEQ ID NO: 8759 - DNA, 15 bp, Homo sapiens
ggcttaatttaagtg

SEQ ID NO: 8760 - DNA, 15 bp, Homo sapiens
tggcttaatttaagt

SEQ ID NO: 8761 - DNA, 15 bp, Homo sapiens
atggcttaatttaag

SEQ ID NO: 8762 - DNA, 15 bp, Homo sapiens
catggcttaatttaa

SEQ ID NO: 8763 - DNA, 15 bp, Homo sapiens
acatggcttaattta

SEQ ID NO: 8764 - DNA, 15 bp, Homo sapiens
tacatggcttaattt

SEQ ID NO: 8765 - DNA, 15 bp, Homo sapiens
gtacatggcttaatt

SEQ ID NO: 8766 - DNA, 15 bp, Homo sapiens
agtacatggcttaat

SEQ ID NO: 8767 - DNA, 15 bp, Homo sapiens
cagtacatggcttaa

SEQ ID NO: 8768 - DNA, 15 bp, Homo sapiens
acagtacatggctta

SEQ ID NO: 8769 - DNA, 15 bp, Homo sapiens
cacagtacatggctt

SEQ ID NO: 8770 - DNA, 15 bp, Homo sapiens
acacagtacatggct

SEQ ID NO: 8771 - DNA, 15 bp, Homo sapiens
aacacagtacatggc

SEQ ID NO: 8772 - DNA, 15 bp, Homo sapiens
caacacagtacatgg

SEQ ID NO: 8773 - DNA, 15 bp, Homo sapiens
ccaacacagtacatg

SEQ ID NO: 8774 - DNA, 15 bp, Homo sapiens
cccaacacagtacat

SEQ ID NO: 8775 - DNA, 15 bp, Homo sapiens
tcccaacacagtaca

SEQ ID NO: 8776 - DNA, 15 bp, Homo sapiens
ttcccaacacagtac

SEQ ID NO: 8777 - DNA, 15 bp, Homo sapiens
tttcccaacacagta

SEQ ID NO: 8778 - DNA, 15 bp, Homo sapiens
atttcccaacacagt

SEQ ID NO: 8779 - DNA, 15 bp, Homo sapiens
aatttcccaacacag

SEQ ID NO: 8780 - DNA, 15 bp, Homo sapiens
taatttcccaacaca

SEQ ID NO: 8781 - DNA, 15 bp, Homo sapiens
ataatttcccaacac

SEQ ID NO: 8782 - DNA, 15 bp, Homo sapiens
aataatttcccaaca

SEQ ID NO: 8783 - DNA, 15 bp, Homo sapiens
aaataatttcccaac

SEQ ID NO: 8784 - DNA, 15 bp, Homo sapiens
taaataatttcccaa

SEQ ID NO: 8785 - DNA, 15 bp, Homo sapiens
ataaataatttccca

SEQ ID NO: 8786 - DNA, 15 bp, Homo sapiens
tataaataatttccc

SEQ ID NO: 8787 - DNA, 15 bp, Homo sapiens
atataaataatttcc

SEQ ID NO: 8788 - DNA, 15 bp, Homo sapiens
aatataaataatttc

SEQ ID NO: 8789 - DNA, 15 bp, Homo sapiens
taatataaataattt

SEQ ID NO: 8790 - DNA, 15 bp, Homo sapiens
ataatataaataatt

SEQ ID NO: 8791 - DNA, 15 bp, Homo sapiens
gataatataaataat

SEQ ID NO: 8792 - DNA, 15 bp, Homo sapiens
agataatataaataa

SEQ ID NO: 8793 - DNA, 15 bp, Homo sapiens
gagataatataaata

SEQ ID NO: 8794 - DNA, 15 bp, Homo sapiens
cgagataatataaat

SEQ ID NO: 8795 - DNA, 15 bp, Homo sapiens
acgagataatataaa

SEQ ID NO: 8796 - DNA, 15 bp, Homo sapiens
aacgagataatataa

SEQ ID NO: 8797 - DNA, 15 bp, Homo sapiens
caacgagataatata

SEQ ID NO: 8798 - DNA, 15 bp, Homo sapiens
tcaacgagataatat

SEQ ID NO: 8799 - DNA, 15 bp, Homo sapiens
ttcaacgagataata

SEQ ID NO: 8800 - DNA, 15 bp, Homo sapiens
attcaacgagataat

SEQ ID NO: 8801 - DNA, 15 bp, Homo sapiens
gattcaacgagataa

SEQ ID NO: 8802 - DNA, 15 bp, Homo sapiens
ggattcaacgagata

SEQ ID NO: 8803 - DNA, 15 bp, Homo sapiens
tggattcaacgagat

SEQ ID NO: 8804 - DNA, 15 bp, Homo sapiens
gtggattcaacgaga

SEQ ID NO: 8805 - DNA, 15 bp, Homo sapiens
tgtggattcaacgag

SEQ ID NO: 8806 - DNA, 15 bp, Homo sapiens
ctgtggattcaacga

SEQ ID NO: 8807 - DNA, 15 bp, Homo sapiens
actgtggattcaacg

SEQ ID NO: 8808 - DNA, 15 bp, Homo sapiens
tactgtggattcaac

SEQ ID NO: 8809 - DNA, 15 bp, Homo sapiens
ctactgtggattcaa

SEQ ID NO: 8810 - DNA, 15 bp, Homo sapiens
tctactgtggattca

SEQ ID NO: 8811 - DNA, 15 bp, Homo sapiens
ttctactgtggattc

SEQ ID NO: 8812 - DNA, 15 bp, Homo sapiens
gttctactgtggatt

SEQ ID NO: 8813 - DNA, 15 bp, Homo sapiens
tgttctactgtggat

SEQ ID NO: 8814 - DNA, 15 bp, Homo sapiens
gtgttctactgtgga

SEQ ID NO: 8815 - DNA, 15 bp, Homo sapiens
tgtgttctactgtgg

SEQ ID NO: 8816 - DNA, 15 bp, Homo sapiens
ctgtgttctactgtg

SEQ ID NO: 8817 - DNA, 15 bp, Homo sapiens
actgtgttctactgt

SEQ ID NO: 8818 - DNA, 15 bp, Homo sapiens
aactgtgttctactg

SEQ ID NO: 8819 - DNA, 15 bp, Homo sapiens
caactgtgttctact

SEQ ID NO: 8820 - DNA, 15 bp, Homo sapiens
tcaactgtgttctac

SEQ ID NO: 8821 - DNA, 15 bp, Homo sapiens
ttcaactgtgttcta

SEQ ID NO: 8822 - DNA, 15 bp, Homo sapiens
gttcaactgtgttct

SEQ ID NO: 8823 - DNA, 15 bp, Homo sapiens
tgttcaactgtgttc

SEQ ID NO: 8824 - DNA, 15 bp, Homo sapiens
gtgttcaactgtgtt

SEQ ID NO: 8825 - DNA, 15 bp, Homo sapiens
ggtgttcaactgtgt

SEQ ID NO: 8826 - DNA, 15 bp, Homo sapiens
tggtgttcaactgtg

SEQ ID NO: 8827 - DNA, 15 bp, Homo sapiens
atggtgttcaactgt

SEQ ID NO: 8828 - DNA, 15 bp, Homo sapiens
tatggtgttcaactg

SEQ ID NO: 8829 - DNA, 15 bp, Homo sapiens
gtatggtgttcaact

SEQ ID NO: 8830 - DNA, 15 bp, Homo sapiens
tgtatggtgttcaac

SEQ ID NO: 8831 - DNA, 15 bp, Homo sapiens
ttgtatggtgttcaa

SEQ ID NO: 8832 - DNA, 15 bp, Homo sapiens
cttgtatggtgttca

SEQ ID NO: 8833 - DNA, 15 bp, Homo sapiens
ccttgtatggtgttc

SEQ ID NO: 8834 - DNA, 15 bp, Homo sapiens
accttgtatggtgtt

SEQ ID NO: 8835 - DNA, 15 bp, Homo sapiens
taccttgtatggtgt

SEQ ID NO: 8836 - DNA, 15 bp, Homo sapiens
ttaccttgtatggtg

SEQ ID NO: 8837 - DNA, 15 bp, Homo sapiens
cttaccttgtatggt

SEQ ID NO: 8838 - DNA, 15 bp, Homo sapiens
acttaccttgtatgg

SEQ ID NO: 8839 - DNA, 15 bp, Homo sapiens
tacttaccttgtatg

SEQ ID NO: 8840 - DNA, 15 bp, Homo sapiens
atacttaccttgtat

SEQ ID NO: 8841 - DNA, 15 bp, Homo sapiens
aatacttaccttgta

SEQ ID NO: 8842 - DNA, 15 bp, Homo sapiens
caatacttaccttgt

SEQ ID NO: 8843 - DNA, 15 bp, Homo sapiens
acaatacttaccttg

SEQ ID NO: 8844 - DNA, 15 bp, Homo sapiens
gacaatacttacctt

SEQ ID NO: 8845 - DNA, 15 bp, Homo sapiens
tgacaatacttacct

SEQ ID NO: 8846 - DNA, 15 bp, Homo sapiens
atgacaatacttacc

SEQ ID NO: 8847 - DNA, 15 bp, Homo sapiens
gatgacaatacttac

SEQ ID NO: 8848 - DNA, 15 bp, Homo sapiens
ggatgacaatactta

SEQ ID NO: 8849 - DNA, 15 bp, Homo sapiens
aggatgacaatactt

SEQ ID NO: 8850 - DNA, 15 bp, Homo sapiens
aaggatgacaatact

SEQ ID NO: 8851 - DNA, 15 bp, Homo sapiens
taaggatgacaatac

SEQ ID NO: 8852 - DNA, 15 bp, Homo sapiens
ataaggatgacaata

SEQ ID NO: 8853 - DNA, 15 bp, Homo sapiens
aataaggatgacaat

SEQ ID NO: 8854 - DNA, 15 bp, Homo sapiens
aaataaggatgacaa

SEQ ID NO: 8855 - DNA, 15 bp, Homo sapiens
aaaataaggatgaca

SEQ ID NO: 8856 - DNA, 15 bp, Homo sapiens
taaaataaggatgac

SEQ ID NO: 8857 - DNA, 15 bp, Homo sapiens
gtaaaataaggatga

SEQ ID NO: 8858 - DNA, 15 bp, Homo sapiens
ggtaaaataaggatg

SEQ ID NO: 8859 - DNA, 15 bp, Homo sapiens
tggtaaaataaggat

SEQ ID NO: 8860 - DNA, 15 bp, Homo sapiens
atggtaaaataagga

SEQ ID NO: 8861 - DNA, 15 bp, Homo sapiens
catggtaaaataagg

SEQ ID NO: 8862 - DNA, 15 bp, Homo sapiens
tcatggtaaaataag

SEQ ID NO: 8863 - DNA, 15 bp, Homo sapiens
ctcatggtaaaataa

SEQ ID NO: 8864 - DNA, 15 bp, Homo sapiens
cctcatggtaaaata

SEQ ID NO: 8865 - DNA, 15 bp, Homo sapiens
tcctcatggtaaaat

SEQ ID NO: 8866 - DNA, 15 bp, Homo sapiens
ttcctcatggtaaaa

SEQ ID NO: 8867 - DNA, 15 bp, Homo sapiens
tttcctcatggtaaa

SEQ ID NO: 8868 - DNA, 15 bp, Homo sapiens
atttcctcatggtaa

SEQ ID NO: 8869 - DNA, 15 bp, Homo sapiens
aatttcctcatggta

SEQ ID NO: 8870 - DNA, 15 bp, Homo sapiens
caatttcctcatggt

SEQ ID NO: 8871 - DNA, 15 bp, Homo sapiens
tcaatttcctcatgg

SEQ ID NO: 8872 - DNA, 15 bp, Homo sapiens
atcaatttcctcatg

SEQ ID NO: 8873 - DNA, 15 bp, Homo sapiens
catcaatttcctcat

SEQ ID NO: 8874 - DNA, 15 bp, Homo sapiens
gcatcaatttcctca

SEQ ID NO: 8875 - DNA, 15 bp, Homo sapiens
agcatcaatttcctc

SEQ ID NO: 8876 - DNA, 15 bp, Homo sapiens
aagcatcaatttcct

SEQ ID NO: 8877 - DNA, 15 bp, Homo sapiens
taagcatcaatttcc

SEQ ID NO: 8878 - DNA, 15 bp, Homo sapiens
ctaagcatcaatttc

SEQ ID NO: 8879 - DNA, 15 bp, Homo sapiens
tctaagcatcaattt

SEQ ID NO: 8880 - DNA, 15 bp, Homo sapiens
ctctaagcatcaatt

SEQ ID NO: 8881 - DNA, 15 bp, Homo sapiens
tctctaagcatcaat

SEQ ID NO: 8882 - DNA, 15 bp, Homo sapiens
ctctctaagcatcaa

SEQ ID NO: 8883 - DNA, 15 bp, Homo sapiens
gctctctaagcatca

SEQ ID NO: 8884 - DNA, 15 bp, Homo sapiens
tgctctctaagcatc

SEQ ID NO: 8885 - DNA, 15 bp, Homo sapiens
atgctctctaagcat

SEQ ID NO: 8886 - DNA, 15 bp, Homo sapiens
tatgctctctaagca

SEQ ID NO: 8887 - DNA, 15 bp, Homo sapiens
ttatgctctctaagc

SEQ ID NO: 8888 - DNA, 15 bp, Homo sapiens
tttatgctctctaag

SEQ ID NO: 8889 - DNA, 15 bp, Homo sapiens
ctttatgctctctaa

SEQ ID NO: 8890 - DNA, 15 bp, Homo sapiens
gctttatgctctcta

SEQ ID NO: 8891 - DNA, 15 bp, Homo sapiens
ggctttatgctctct

SEQ ID NO: 8892 - DNA, 15 bp, Homo sapiens
aggctttatgctctc

SEQ ID NO: 8893 - DNA, 15 bp, Homo sapiens
aaggctttatgctct

SEQ ID NO: 8894 - DNA, 15 bp, Homo sapiens
caaggctttatgctc

SEQ ID NO: 8895 - DNA, 15 bp, Homo sapiens
ccaaggctttatgct

SEQ ID NO: 8896 - DNA, 15 bp, Homo sapiens
gccaaggctttatgc

SEQ ID NO: 8897 - DNA, 15 bp, Homo sapiens
ggccaaggctttatg

SEQ ID NO: 8898 - DNA, 15 bp, Homo sapiens
tggccaaggctttat

SEQ ID NO: 8899 - DNA, 15 bp, Homo sapiens
ctggccaaggcttta

SEQ ID NO: 8900 - DNA, 15 bp, Homo sapiens
cctggccaaggcttt

SEQ ID NO: 8901 - DNA, 15 bp, Homo sapiens
ccctggccaaggctt

SEQ ID NO: 8902 - DNA, 15 bp, Homo sapiens
cccctggccaaggct

SEQ ID NO: 8903 - DNA, 15 bp, Homo sapiens
gcccctggccaaggc

SEQ ID NO: 8904 - DNA, 15 bp, Homo sapiens
tgcccctggccaagg

SEQ ID NO: 8905 - DNA, 15 bp, Homo sapiens
gtgcccctggccaag

SEQ ID NO: 8906 - DNA, 15 bp, Homo sapiens
tgtgcccctggccaa

SEQ ID NO: 8907 - DNA, 15 bp, Homo sapiens
atgtgcccctggcca

SEQ ID NO: 8908 - DNA, 15 bp, Homo sapiens
tatgtgcccctggcc

SEQ ID NO: 8909 - DNA, 15 bp, Homo sapiens
ctatgtgcccctggc

SEQ ID NO: 8910 - DNA, 15 bp, Homo sapiens
actatgtgcccctgg

SEQ ID NO: 8911 - DNA, 15 bp, Homo sapiens
aactatgtgcccctg

SEQ ID NO: 8912 - DNA, 15 bp, Homo sapiens
caactatgtgcccct

SEQ ID NO: 8913 - DNA, 15 bp, Homo sapiens
ccaactatgtgcccc

SEQ ID NO: 8914 - DNA, 15 bp, Homo sapiens
cccaactatgtgccc

SEQ ID NO: 8915 - DNA, 15 bp, Homo sapiens
tcccaactatgtgcc

SEQ ID NO: 8916 - DNA, 15 bp, Homo sapiens
ttcccaactatgtgc

SEQ ID NO: 8917 - DNA, 15 bp, Homo sapiens
cttcccaactatgtg

SEQ ID NO: 8918 - DNA, 15 bp, Homo sapiens
gcttcccaactatgt

SEQ ID NO: 8919 - DNA, 15 bp, Homo sapiens
ggcttcccaactatg

SEQ ID NO: 8920 - DNA, 15 bp, Homo sapiens
cggcttcccaactat

SEQ ID NO: 8921 - DNA, 15 bp, Homo sapiens
ccggcttcccaacta

SEQ ID NO: 8922 - DNA, 15 bp, Homo sapiens
cccggcttcccaact

SEQ ID NO: 8923 - DNA, 15 bp, Homo sapiens
ccccggcttcccaac

SEQ ID NO: 8924 - DNA, 15 bp, Homo sapiens
gccccggcttcccaa

SEQ ID NO: 8925 - DNA, 15 bp, Homo sapiens
agccccggcttccca

SEQ ID NO: 8926 - DNA, 15 bp, Homo sapiens
tagccccggcttccc

SEQ ID NO: 8927 - DNA, 15 bp, Homo sapiens
ttagccccggcttcc

SEQ ID NO: 8928 - DNA, 15 bp, Homo sapiens
attagccccggcttc

SEQ ID NO: 8929 - DNA, 15 bp, Homo sapiens
aattagccccggctt

SEQ ID NO: 8930 - DNA, 15 bp, Homo sapiens
gaattagccccggct

SEQ ID NO: 8931 - DNA, 15 bp, Homo sapiens
tgaattagccccggc

SEQ ID NO: 8932 - DNA, 15 bp, Homo sapiens
atgaattagccccgg

SEQ ID NO: 8933 - DNA, 15 bp, Homo sapiens
catgaattagccccg

SEQ ID NO: 8934 - DNA, 15 bp, Homo sapiens
gcatgaattagcccc

SEQ ID NO: 8935 - DNA, 15 bp, Homo sapiens
ggcatgaattagccc

SEQ ID NO: 8936 - DNA, 15 bp, Homo sapiens
aggcatgaattagcc

SEQ ID NO: 8937 - DNA, 15 bp, Homo sapiens
caggcatgaattagc

SEQ ID NO: 8938 - DNA, 15 bp, Homo sapiens
ccaggcatgaattag

SEQ ID NO: 8939 - DNA, 15 bp, Homo sapiens
cccaggcatgaatta

SEQ ID NO: 8940 - DNA, 15 bp, Homo sapiens
gcccaggcatgaatt

SEQ ID NO: 8941 - DNA, 15 bp, Homo sapiens
agcccaggcatgaat

SEQ ID NO: 8942 - DNA, 15 bp, Homo sapiens
gagcccaggcatgaa

SEQ ID NO: 8943 - DNA, 15 bp, Homo sapiens
agagcccaggcatga

SEQ ID NO: 8944 - DNA, 15 bp, Homo sapiens
aagagcccaggcatg

SEQ ID NO: 8945 - DNA, 15 bp, Homo sapiens
aaagagcccaggcat

SEQ ID NO: 8946 - DNA, 15 bp, Homo sapiens
gaaagagcccaggca

SEQ ID NO: 8947 - DNA, 15 bp, Homo sapiens
agaaagagcccaggc

SEQ ID NO: 8948 - DNA, 15 bp, Homo sapiens
cagaaagagcccagg

SEQ ID NO: 8949 - DNA, 15 bp, Homo sapiens
tcagaaagagcccag

SEQ ID NO: 8950 - DNA, 15 bp, Homo sapiens
atcagaaagagccca

SEQ ID NO: 8951 - DNA, 15 bp, Homo sapiens
tatcagaaagagccc

SEQ ID NO: 8952 - DNA, 15 bp, Homo sapiens
ctatcagaaagagcc

SEQ ID NO: 8953 - DNA, 15 bp, Homo sapiens
actatcagaaagagc

SEQ ID NO: 8954 - DNA, 15 bp, Homo sapiens
aactatcagaaagag

SEQ ID NO: 8955 - DNA, 15 bp, Homo sapiens
aaactatcagaaaga

SEQ ID NO: 8956 - DNA, 15 bp, Homo sapiens
aaaactatcagaaag

SEQ ID NO: 8957 - DNA, 15 bp, Homo sapiens
gaaaactatcagaaa

SEQ ID NO: 8958 - DNA, 15 bp, Homo sapiens
ggaaaactatcagaa

SEQ ID NO: 8959 - DNA, 15 bp, Homo sapiens
aggaaaactatcaga

SEQ ID NO: 8960 - DNA, 15 bp, Homo sapiens
aaggaaaactatcag

SEQ ID NO: 8961 - DNA, 15 bp, Homo sapiens
aaaggaaaactatca

SEQ ID NO: 8962 - DNA, 15 bp, Homo sapiens
aaaaggaaaactatc

SEQ ID NO: 8963 - DNA, 15 bp, Homo sapiens
aaaaaggaaaactat

SEQ ID NO: 8964 - DNA, 15 bp, Homo sapiens
aaaaaaggaaaacta

SEQ ID NO: 8965 - DNA, 15 bp, Homo sapiens
taaaaaaggaaaact

SEQ ID NO: 8966 - DNA, 15 bp, Homo sapiens
ttaaaaaaggaaaac

SEQ ID NO: 8967 - DNA, 15 bp, Homo sapiens
attaaaaaaggaaaa

SEQ ID NO: 8968 - DNA, 15 bp, Homo sapiens
aattaaaaaaggaaa

SEQ ID NO: 8969 - DNA, 15 bp, Homo sapiens
caattaaaaaaggaa

SEQ ID NO: 8970 - DNA, 15 bp, Homo sapiens
acaattaaaaaagga

SEQ ID NO: 8971 - DNA, 15 bp, Homo sapiens
gacaattaaaaaagg

SEQ ID NO: 8972 - DNA, 15 bp, Homo sapiens
ggacaattaaaaaag

SEQ ID NO: 8973 - DNA, 15 bp, Homo sapiens
gggacaattaaaaaa

SEQ ID NO: 8974 - DNA, 15 bp, Homo sapiens
ggggacaattaaaaa

SEQ ID NO: 8975 - DNA, 15 bp, Homo sapiens
aggggacaattaaaa

SEQ ID NO: 8976 - DNA, 15 bp, Homo sapiens
gaggggacaattaaa

SEQ ID NO: 8977 - DNA, 15 bp, Homo sapiens
ggaggggacaattaa

SEQ ID NO: 8978 - DNA, 15 bp, Homo sapiens
aggaggggacaatta

SEQ ID NO: 8979 - DNA, 15 bp, Homo sapiens
gaggaggggacaatt

SEQ ID NO: 8980 - DNA, 15 bp, Homo sapiens
tgaggaggggacaat

SEQ ID NO: 8981 - DNA, 15 bp, Homo sapiens
atgaggaggggacaa

SEQ ID NO: 8982 - DNA, 15 bp, Homo sapiens
aatgaggaggggaca

SEQ ID NO: 8983 - DNA, 15 bp, Homo sapiens
caatgaggaggggac

SEQ ID NO: 8984 - DNA, 15 bp, Homo sapiens
acaatgaggagggga

SEQ ID NO: 8985 - DNA, 15 bp, Homo sapiens
aacaatgaggagggg

SEQ ID NO: 8986 - DNA, 15 bp, Homo sapiens
taacaatgaggaggg

SEQ ID NO: 8987 - DNA, 15 bp, Homo sapiens
gtaacaatgaggagg

SEQ ID NO: 8988 - DNA, 15 bp, Homo sapiens
ggtaacaatgaggag

SEQ ID NO: 8989 - DNA, 15 bp, Homo sapiens
aggtaacaatgagga

SEQ ID NO: 8990 - DNA, 15 bp, Homo sapiens
aaggtaacaatgagg

SEQ ID NO: 8991 - DNA, 15 bp, Homo sapiens
caaggtaacaatgag

SEQ ID NO: 8992 - DNA, 15 bp, Homo sapiens
ccaaggtaacaatga

SEQ ID NO: 8993 - DNA, 15 bp, Homo sapiens
cccaaggtaacaatg

SEQ ID NO: 8994 - DNA, 15 bp, Homo sapiens
ccccaaggtaacaat

SEQ ID NO: 8995 - DNA, 15 bp, Homo sapiens
tccccaaggtaacaa

SEQ ID NO: 8996 - DNA, 15 bp, Homo sapiens
atccccaaggtaaca

SEQ ID NO: 8997 - DNA, 15 bp, Homo sapiens
aatccccaaggtaac

SEQ ID NO: 8998 - DNA, 15 bp, Homo sapiens
aaatccccaaggtaa

SEQ ID NO: 8999 - DNA, 15 bp, Homo sapiens
gaaatccccaaggta

SEQ ID NO: 9000 - DNA, 15 bp, Homo sapiens
tgaaatccccaaggt

SEQ ID NO: 9001 - DNA, 15 bp, Homo sapiens
ttgaaatccccaagg

SEQ ID NO: 9002 - DNA, 15 bp, Homo sapiens
cttgaaatccccaag

SEQ ID NO: 9003 - DNA, 15 bp, Homo sapiens
tcttgaaatccccaa

SEQ ID NO: 9004 - DNA, 15 bp, Homo sapiens
ctcttgaaatcccca

SEQ ID NO: 9005 - DNA, 15 bp, Homo sapiens
tctcttgaaatcccc

SEQ ID NO: 9006 - DNA, 15 bp, Homo sapiens
atctcttgaaatccc

SEQ ID NO: 9007 - DNA, 15 bp, Homo sapiens
aatctcttgaaatcc

SEQ ID NO: 9008 - DNA, 15 bp, Homo sapiens
gaatctcttgaaatc

SEQ ID NO: 9009 - DNA, 15 bp, Homo sapiens
tgaatctcttgaaat

SEQ ID NO: 9010 - DNA, 15 bp, Homo sapiens
atgaatctcttgaaa

SEQ ID NO: 9011 - DNA, 15 bp, Homo sapiens
catgaatctcttgaa

SEQ ID NO: 9012 - DNA, 15 bp, Homo sapiens
acatgaatctcttga

SEQ ID NO: 9013 - DNA, 15 bp, Homo sapiens
tacatgaatctcttg

SEQ ID NO: 9014 - DNA, 15 bp, Homo sapiens
ctacatgaatctctt

SEQ ID NO: 9015 - DNA, 15 bp, Homo sapiens
gctacatgaatctct

SEQ ID NO: 9016 - DNA, 15 bp, Homo sapiens
agctacatgaatctc

SEQ ID NO: 9017 - DNA, 15 bp, Homo sapiens
aagctacatgaatct

SEQ ID NO: 9018 - DNA, 15 bp, Homo sapiens
gaagctacatgaatc

SEQ ID NO: 9019 - DNA, 15 bp, Homo sapiens
agaagctacatgaat

SEQ ID NO: 9020 - DNA, 15 bp, Homo sapiens
tagaagctacatgaa

SEQ ID NO: 9021 - DNA, 15 bp, Homo sapiens
ttagaagctacatga

SEQ ID NO: 9022 - DNA, 15 bp, Homo sapiens
tttagaagctacatg

SEQ ID NO: 9023 - DNA, 15 bp, Homo sapiens
atttagaagctacat

SEQ ID NO: 9024 - DNA, 15 bp, Homo sapiens
gatttagaagctaca

SEQ ID NO: 9025 - DNA, 15 bp, Homo sapiens
tgatttagaagctac

SEQ ID NO: 9026 - DNA, 15 bp, Homo sapiens
ttgatttagaagcta

SEQ ID NO: 9027 - DNA, 15 bp, Homo sapiens
gttgatttagaagct

SEQ ID NO: 9028 - DNA, 15 bp, Homo sapiens
cgttgatttagaagc

SEQ ID NO: 9029 - DNA, 15 bp, Homo sapiens
tcgttgatttagaag

SEQ ID NO: 9030 - DNA, 15 bp, Homo sapiens
ttcgttgatttagaa

SEQ ID NO: 9031 - DNA, 15 bp, Homo sapiens
gttcgttgatttaga

SEQ ID NO: 9032 - DNA, 15 bp, Homo sapiens
agttcgttgatttag

SEQ ID NO: 9033 - DNA, 15 bp, Homo sapiens
cagttcgttgattta

SEQ ID NO: 9034 - DNA, 15 bp, Homo sapiens
tcagttcgttgattt

SEQ ID NO: 9035 - DNA, 15 bp, Homo sapiens
atcagttcgttgatt

SEQ ID NO: 9036 - DNA, 15 bp, Homo sapiens
aatcagttcgttgat

SEQ ID NO: 9037 - DNA, 15 bp, Homo sapiens
gaatcagttcgttga

SEQ ID NO: 9038 - DNA, 15 bp, Homo sapiens
ggaatcagttcgttg

SEQ ID NO: 9039 - DNA, 15 bp, Homo sapiens
aggaatcagttcgtt

SEQ ID NO: 9040 - DNA, 15 bp, Homo sapiens
caggaatcagttcgt

SEQ ID NO: 9041 - DNA, 15 bp, Homo sapiens
ccaggaatcagttcg

SEQ ID NO: 9042 - DNA, 15 bp, Homo sapiens
tccaggaatcagttc

SEQ ID NO: 9043 - DNA, 15 bp, Homo sapiens
ctccaggaatcagtt

SEQ ID NO: 9044 - DNA, 15 bp, Homo sapiens
tctccaggaatcagt

SEQ ID NO: 9045 - DNA, 15 bp, Homo sapiens
ctctccaggaatcag

SEQ ID NO: 9046 - DNA, 15 bp, Homo sapiens
gctctccaggaatca

SEQ ID NO: 9047 - DNA, 15 bp, Homo sapiens
tgctctccaggaatc

SEQ ID NO: 9048 - DNA, 15 bp, Homo sapiens
ctgctctccaggaat

SEQ ID NO: 9049 - DNA, 15 bp, Homo sapiens
gctgctctccaggaa

SEQ ID NO: 9050 - DNA, 15 bp, Homo sapiens
agctgctctccagga

SEQ ID NO: 9051 - DNA, 15 bp, Homo sapiens
aagctgctctccagg

SEQ ID NO: 9052 - DNA, 15 bp, Homo sapiens
gaagctgctctccag

SEQ ID NO: 9053 - DNA, 15 bp, Homo sapiens
agaagctgctctcca

SEQ ID NO: 9054 - DNA, 15 bp, Homo sapiens
cagaagctgctctcc

SEQ ID NO: 9055 - DNA, 15 bp, Homo sapiens
acagaagctgctctc

SEQ ID NO: 9056 - DNA, 15 bp, Homo sapiens
tacagaagctgctct

SEQ ID NO: 9057 - DNA, 15 bp, Homo sapiens
atacagaagctgctc

SEQ ID NO: 9058 - DNA, 15 bp, Homo sapiens
catacagaagctgct

SEQ ID NO: 9059 - DNA, 15 bp, Homo sapiens
tcatacagaagctgc

SEQ ID NO: 9060 - DNA, 15 bp, Homo sapiens
ctcatacagaagctg

SEQ ID NO: 9061 - DNA, 15 bp, Homo sapiens
tctcatacagaagct

SEQ ID NO: 9062 - DNA, 15 bp, Homo sapiens
ttctcatacagaagc

SEQ ID NO: 9063 - DNA, 15 bp, Homo sapiens
tttctcatacagaag

SEQ ID NO: 9064 - DNA, 15 bp, Homo sapiens
ttttctcatacagaa

SEQ ID NO: 9065 - DNA, 15 bp, Homo sapiens
tttttctcatacaga

SEQ ID NO: 9066 - DNA, 15 bp, Homo sapiens
atttttctcatacag

SEQ ID NO: 9067 - DNA, 15 bp, Homo sapiens
gatttttctcataca

SEQ ID NO: 9068 - DNA, 15 bp, Homo sapiens
agatttttctcatac

SEQ ID NO: 9069 - DNA, 15 bp, Homo sapiens
tagatttttctcata

SEQ ID NO: 9070 - DNA, 15 bp, Homo sapiens
ctagatttttctcat

SEQ ID NO: 9071 - DNA, 15 bp, Homo sapiens
gctagatttttctca

SEQ ID NO: 9072 - DNA, 15 bp, Homo sapiens
agctagatttttctc

SEQ ID NO: 9073 - DNA, 15 bp, Homo sapiens
tagctagatttttct

SEQ ID NO: 9074 - DNA, 15 bp, Homo sapiens
ttagctagatttttc

SEQ ID NO: 9075 - DNA, 15 bp, Homo sapiens
attagctagattttt

SEQ ID NO: 9076 - DNA, 15 bp, Homo sapiens
aattagctagatttt

SEQ ID NO: 9077 - DNA, 15 bp, Homo sapiens
taattagctagattt

SEQ ID NO: 9078 - DNA, 15 bp, Homo sapiens
ataattagctagatt

SEQ ID NO: 9079 - DNA, 15 bp, Homo sapiens
aataattagctagat

SEQ ID NO: 9080 - DNA, 15 bp, Homo sapiens
aaataattagctaga

SEQ ID NO: 9081 - DNA, 15 bp, Homo sapiens
taaataattagctag

SEQ ID NO: 9082 - DNA, 15 bp, Homo sapiens
ataaataattagcta

SEQ ID NO: 9083 - DNA, 15 bp, Homo sapiens
aataaataattagct

SEQ ID NO: 9084 - DNA, 15 bp, Homo sapiens
aaataaataattagc

SEQ ID NO: 9085 - DNA, 15 bp, Homo sapiens
gaaataaataattag

SEQ ID NO: 9086 - DNA, 15 bp, Homo sapiens
tgaaataaataatta

SEQ ID NO: 9087 - DNA, 15 bp, Homo sapiens
ctgaaataaataatt

SEQ ID NO: 9088 - DNA, 15 bp, Homo sapiens
actgaaataaataat

SEQ ID NO: 9089 - DNA, 15 bp, Homo sapiens
cactgaaataaataa

SEQ ID NO: 9090 - DNA, 15 bp, Homo sapiens
acactgaaataaata

SEQ ID NO: 9091 - DNA, 15 bp, Homo sapiens
gacactgaaataaat

SEQ ID NO: 9092 - DNA, 15 bp, Homo sapiens
agacactgaaataaa

SEQ ID NO: 9093 - DNA, 15 bp, Homo sapiens
gagacactgaaataa

SEQ ID NO: 9094 - DNA, 15 bp, Homo sapiens
agagacactgaaata

SEQ ID NO: 9095 - DNA, 15 bp, Homo sapiens
cagagacactgaaat

SEQ ID NO: 9096 - DNA, 15 bp, Homo sapiens
ccagagacactgaaa

SEQ ID NO: 9097 - DNA, 15 bp, Homo sapiens
tccagagacactgaa

SEQ ID NO: 9098 - DNA, 15 bp, Homo sapiens
ttccagagacactga

SEQ ID NO: 9099 - DNA, 15 bp, Homo sapiens
attccagagacactg

SEQ ID NO: 9100 - DNA, 15 bp, Homo sapiens
cattccagagacact

SEQ ID NO: 9101 - DNA, 15 bp, Homo sapiens
gcattccagagacac

SEQ ID NO: 9102 - DNA, 15 bp, Homo sapiens
tgcattccagagaca

SEQ ID NO: 9103 - DNA, 15 bp, Homo sapiens
ttgcattccagagac

SEQ ID NO: 9104 - DNA, 15 bp, Homo sapiens
cttgcattccagaga

SEQ ID NO: 9105 - DNA, 15 bp, Homo sapiens
gcttgcattccagag

SEQ ID NO: 9106 - DNA, 15 bp, Homo sapiens
agcttgcattccaga

SEQ ID NO: 9107 - DNA, 15 bp, Homo sapiens
gagcttgcattccag

SEQ ID NO: 9108 - DNA, 15 bp, Homo sapiens
agagcttgcattcca

SEQ ID NO: 9109 - DNA, 15 bp, Homo sapiens
cagagcttgcattcc

SEQ ID NO: 9110 - DNA, 15 bp, Homo sapiens
acagagcttgcattc

SEQ ID NO: 9111 - DNA, 15 bp, Homo sapiens
gacagagcttgcatt

SEQ ID NO: 9112 - DNA, 15 bp, Homo sapiens
ggacagagcttgcat

SEQ ID NO: 9113 - DNA, 15 bp, Homo sapiens
aggacagagcttgca

SEQ ID NO: 9114 - DNA, 15 bp, Homo sapiens
caggacagagcttgc

SEQ ID NO: 9115 - DNA, 15 bp, Homo sapiens
tcaggacagagcttg

SEQ ID NO: 9116 - DNA, 15 bp, Homo sapiens
ctcaggacagagctt

SEQ ID NO: 9117 - DNA, 15 bp, Homo sapiens
gctcaggacagagct

SEQ ID NO: 9118 - DNA, 15 bp, Homo sapiens
ggctcaggacagagc

SEQ ID NO: 9119 - DNA, 15 bp, Homo sapiens
tggctcaggacagag

SEQ ID NO: 9120 - DNA, 15 bp, Homo sapiens
gtggctcaggacaga

SEQ ID NO: 9121 - DNA, 15 bp, Homo sapiens
agtggctcaggacag

SEQ ID NO: 9122 - DNA, 15 bp, Homo sapiens
aagtggctcaggaca

SEQ ID NO: 9123 - DNA, 15 bp, Homo sapiens
taagtggctcaggac

SEQ ID NO: 9124 - DNA, 15 bp, Homo sapiens
ctaagtggctcagga

SEQ ID NO: 9125 - DNA, 15 bp, Homo sapiens
tctaagtggctcagg

SEQ ID NO: 9126 - DNA, 15 bp, Homo sapiens
ttctaagtggctcag

SEQ ID NO: 9127 - DNA, 15 bp, Homo sapiens
tttctaagtggctca

SEQ ID NO: 9128 - DNA, 15 bp, Homo sapiens
ttttctaagtggctc

SEQ ID NO: 9129 - DNA, 15 bp, Homo sapiens
gttttctaagtggct

SEQ ID NO: 9130 - DNA, 15 bp, Homo sapiens
tgttttctaagtggc

SEQ ID NO: 9131 - DNA, 15 bp, Homo sapiens
ttgttttctaagtgg

SEQ ID NO: 9132 - DNA, 15 bp, Homo sapiens
attgttttctaagtg

SEQ ID NO: 9133 - DNA, 15 bp, Homo sapiens
aattgttttctaagt

SEQ ID NO: 9134 - DNA, 15 bp, Homo sapiens
aaattgttttctaag

SEQ ID NO: 9135 - DNA, 15 bp, Homo sapiens
caaattgttttctaa

SEQ ID NO: 9136 - DNA, 15 bp, Homo sapiens
ccaaattgttttcta

SEQ ID NO: 9137 - DNA, 15 bp, Homo sapiens
cccaaattgttttct

SEQ ID NO: 9138 - DNA, 15 bp, Homo sapiens
tcccaaattgttttc

SEQ ID NO: 9139 - DNA, 15 bp, Homo sapiens
atcccaaattgtttt

SEQ ID NO: 9140 - DNA, 15 bp, Homo sapiens
catcccaaattgttt

SEQ ID NO: 9141 - DNA, 15 bp, Homo sapiens
tcatcccaaattgtt

SEQ ID NO: 9142 - DNA, 15 bp, Homo sapiens
gtcatcccaaattgt

SEQ ID NO: 9143 - DNA, 15 bp, Homo sapiens
tgtcatcccaaattg

SEQ ID NO: 9144 - DNA, 15 bp, Homo sapiens
ttgtcatcccaaatt

SEQ ID NO: 9145 - DNA, 15 bp, Homo sapiens
cttgtcatcccaaat

SEQ ID NO: 9146 - DNA, 15 bp, Homo sapiens
gcttgtcatcccaaa

SEQ ID NO: 9147 - DNA, 15 bp, Homo sapiens
tgcttgtcatcccaa

SEQ ID NO: 9148 - DNA, 15 bp, Homo sapiens
atgcttgtcatccca

SEQ ID NO: 9149 - DNA, 15 bp, Homo sapiens
catgcttgtcatccc

SEQ ID NO: 9150 - DNA, 15 bp, Homo sapiens
acatgcttgtcatcc

SEQ ID NO: 9151 - DNA, 15 bp, Homo sapiens
cacatgcttgtcatc

SEQ ID NO: 9152 - DNA, 15 bp, Homo sapiens
acacatgcttgtcat

SEQ ID NO: 9153 - DNA, 15 bp, Homo sapiens
gacacatgcttgtca

SEQ ID NO: 9154 - DNA, 15 bp, Homo sapiens
agacacatgcttgtc

SEQ ID NO: 9155 - DNA, 15 bp, Homo sapiens
gagacacatgcttgt

SEQ ID NO: 9156 - DNA, 15 bp, Homo sapiens
tgagacacatgcttg

SEQ ID NO: 9157 - DNA, 15 bp, Homo sapiens
gtgagacacatgctt

SEQ ID NO: 9158 - DNA, 15 bp, Homo sapiens
tgtgagacacatgct

SEQ ID NO: 9159 - DNA, 15 bp, Homo sapiens
ttgtgagacacatgc

SEQ ID NO: 9160 - DNA, 15 bp, Homo sapiens
attgtgagacacatg

SEQ ID NO: 9161 - DNA, 15 bp, Homo sapiens
cattgtgagacacat

SEQ ID NO: 9162 - DNA, 15 bp, Homo sapiens
gcattgtgagacaca

SEQ ID NO: 9163 - DNA, 15 bp, Homo sapiens
agcattgtgagacac

SEQ ID NO: 9164 - DNA, 15 bp, Homo sapiens
cagcattgtgagaca

SEQ ID NO: 9165 - DNA, 15 bp, Homo sapiens
gcagcattgtgagac

SEQ ID NO: 9166 - DNA, 15 bp, Homo sapiens
agcagcattgtgaga

SEQ ID NO: 9167 - DNA, 15 bp, Homo sapiens
gagcagcattgtgag

SEQ ID NO: 9168 - DNA, 15 bp, Homo sapiens
agagcagcattgtga

SEQ ID NO: 9169 - DNA, 15 bp, Homo sapiens
cagagcagcattgtg

SEQ ID NO: 9170 - DNA, 15 bp, Homo sapiens
ccagagcagcattgt

SEQ ID NO: 9171 - DNA, 15 bp, Homo sapiens
accagagcagcattg

SEQ ID NO: 9172 - DNA, 15 bp, Homo sapiens
aaccagagcagcatt

SEQ ID NO: 9173 - DNA, 15 bp, Homo sapiens
caaccagagcagcat

SEQ ID NO: 9174 - DNA, 15 bp, Homo sapiens
gcaaccagagcagca

SEQ ID NO: 9175 - DNA, 15 bp, Homo sapiens
ggcaaccagagcagc

SEQ ID NO: 9176 - DNA, 15 bp, Homo sapiens
tggcaaccagagcag

SEQ ID NO: 9177 - DNA, 15 bp, Homo sapiens
ctggcaaccagagca

SEQ ID NO: 9178 - DNA, 15 bp, Homo sapiens
actggcaaccagagc

SEQ ID NO: 9179 - DNA, 15 bp, Homo sapiens
cactggcaaccagag

SEQ ID NO: 9180 - DNA, 15 bp, Homo sapiens
gcactggcaaccaga

SEQ ID NO: 9181 - DNA, 15 bp, Homo sapiens
agcactggcaaccag

SEQ ID NO: 9182 - DNA, 15 bp, Homo sapiens
cagcactggcaacca

SEQ ID NO: 9183 - DNA, 15 bp, Homo sapiens
acagcactggcaacc

SEQ ID NO: 9184 - DNA, 15 bp, Homo sapiens
cacagcactggcaac

SEQ ID NO: 9185 - DNA, 15 bp, Homo sapiens
gcacagcactggcaa

SEQ ID NO: 9186 - DNA, 15 bp, Homo sapiens
agcacagcactggca

SEQ ID NO: 9187 - DNA, 15 bp, Homo sapiens
cagcacagcactggc

SEQ ID NO: 9188 - DNA, 15 bp, Homo sapiens
gcagcacagcactgg

SEQ ID NO: 9189 - DNA, 15 bp, Homo sapiens
ggcagcacagcactg

SEQ ID NO: 9190 - DNA, 15 bp, Homo sapiens
tggcagcacagcact

SEQ ID NO: 9191 - DNA, 15 bp, Homo sapiens
ctggcagcacagcac

SEQ ID NO: 9192 - DNA, 15 bp, Homo sapiens
actggcagcacagca

SEQ ID NO: 9193 - DNA, 15 bp, Homo sapiens
aactggcagcacagc

SEQ ID NO: 9194 - DNA, 15 bp, Homo sapiens
caactggcagcacag

SEQ ID NO: 9195 - DNA, 15 bp, Homo sapiens
acaactggcagcaca

SEQ ID NO: 9196 - DNA, 15 bp, Homo sapiens
gacaactggcagcac

SEQ ID NO: 9197 - DNA, 15 bp, Homo sapiens
tgacaactggcagca

SEQ ID NO: 9198 - DNA, 15 bp, Homo sapiens
atgacaactggcagc

SEQ ID NO: 9199 - DNA, 15 bp, Homo sapiens
gatgacaactggcag

SEQ ID NO: 9200 - DNA, 15 bp, Homo sapiens
agatgacaactggca

SEQ ID NO: 9201 - DNA, 15 bp, Homo sapiens
aagatgacaactggc

SEQ ID NO: 9202 - DNA, 15 bp, Homo sapiens
aaagatgacaactgg

SEQ ID NO: 9203 - DNA, 15 bp, Homo sapiens
caaagatgacaactg

SEQ ID NO: 9204 - DNA, 15 bp, Homo sapiens
tcaaagatgacaact

SEQ ID NO: 9205 - DNA, 15 bp, Homo sapiens
ttcaaagatgacaac

SEQ ID NO: 9206 - DNA, 15 bp, Homo sapiens
gttcaaagatgacaa

SEQ ID NO: 9207 - DNA, 15 bp, Homo sapiens
tgttcaaagatgaca

SEQ ID NO: 9208 - DNA, 15 bp, Homo sapiens
ttgttcaaagatgac

SEQ ID NO: 9209 - DNA, 15 bp, Homo sapiens
tttgttcaaagatga

SEQ ID NO: 9210 - DNA, 15 bp, Homo sapiens
gtttgttcaaagatg

SEQ ID NO: 9211 - DNA, 15 bp, Homo sapiens
agtttgttcaaagat

SEQ ID NO: 9212 - DNA, 15 bp, Homo sapiens
cagtttgttcaaaga

SEQ ID NO: 9213 - DNA, 15 bp, Homo sapiens
tcagtttgttcaaag

SEQ ID NO: 9214 - DNA, 15 bp, Homo sapiens
atcagtttgttcaaa

SEQ ID NO: 9215 - DNA, 15 bp, Homo sapiens
catcagtttgttcaa

SEQ ID NO: 9216 - DNA, 15 bp, Homo sapiens
gcatcagtttgttca

SEQ ID NO: 9217 - DNA, 15 bp, Homo sapiens
tgcatcagtttgttc

SEQ ID NO: 9218 - DNA, 15 bp, Homo sapiens
ctgcatcagtttgtt

SEQ ID NO: 9219 - DNA, 15 bp, Homo sapiens
actgcatcagtttgt

SEQ ID NO: 9220 - DNA, 15 bp, Homo sapiens
cactgcatcagtttg

SEQ ID NO: 9221 - DNA, 15 bp, Homo sapiens
gcactgcatcagttt

SEQ ID NO: 9222 - DNA, 15 bp, Homo sapiens
agcactgcatcagtt

SEQ ID NO: 9223 - DNA, 15 bp, Homo sapiens
cagcactgcatcagt

SEQ ID NO: 9224 - DNA, 15 bp, Homo sapiens
ccagcactgcatcag

SEQ ID NO: 9225 - DNA, 15 bp, Homo sapiens
accagcactgcatca

SEQ ID NO: 9226 - DNA, 15 bp, Homo sapiens
aaccagcactgcatc

SEQ ID NO: 9227 - DNA, 15 bp, Homo sapiens
aaaccagcactgcat

SEQ ID NO: 9228 - DNA, 15 bp, Homo sapiens
taaaccagcactgca

SEQ ID NO: 9229 - DNA, 15 bp, Homo sapiens
ttaaaccagcactgc

SEQ ID NO: 9230 - DNA, 15 bp, Homo sapiens
gttaaaccagcactg

SEQ ID NO: 9231 - DNA, 15 bp, Homo sapiens
agttaaaccagcact

SEQ ID NO: 9232 - DNA, 15 bp, Homo sapiens
gagttaaaccagcac

SEQ ID NO: 9233 - DNA, 15 bp, Homo sapiens
agagttaaaccagca

SEQ ID NO: 9234 - DNA, 15 bp, Homo sapiens
aagagttaaaccagc

SEQ ID NO: 9235 - DNA, 15 bp, Homo sapiens
gaagagttaaaccag

SEQ ID NO: 9236 - DNA, 15 bp, Homo sapiens
ggaagagttaaacca

SEQ ID NO: 9237 - DNA, 15 bp, Homo sapiens
aggaagagttaaacc

SEQ ID NO: 9238 - DNA, 15 bp, Homo sapiens
gaggaagagttaaac

SEQ ID NO: 9239 - DNA, 15 bp, Homo sapiens
agaggaagagttaaa

SEQ ID NO: 9240 - DNA, 15 bp, Homo sapiens
aagaggaagagttaa

SEQ ID NO: 9241 - DNA, 15 bp, Homo sapiens
aaagaggaagagtta

SEQ ID NO: 9242 - DNA, 15 bp, Homo sapiens
aaaagaggaagagtt

SEQ ID NO: 9243 - DNA, 15 bp, Homo sapiens
aaaaagaggaagagt

SEQ ID NO: 9244 - DNA, 15 bp, Homo sapiens
caaaaagaggaagag

SEQ ID NO: 9245 - DNA, 15 bp, Homo sapiens
ccaaaaagaggaaga

SEQ ID NO: 9246 - DNA, 15 bp, Homo sapiens
tccaaaaagaggaag

SEQ ID NO: 9247 - DNA, 15 bp, Homo sapiens
ctccaaaaagaggaa

SEQ ID NO: 9248 - DNA, 15 bp, Homo sapiens
actccaaaaagagga

SEQ ID NO: 9249 - DNA, 15 bp, Homo sapiens
tactccaaaaagagg

SEQ ID NO: 9250 - DNA, 15 bp, Homo sapiens
ttactccaaaaagag

SEQ ID NO: 9251 - DNA, 15 bp, Homo sapiens
cttactccaaaaaga

SEQ ID NO: 9252 - DNA, 15 bp, Homo sapiens
tcttactccaaaaag

SEQ ID NO: 9253 - DNA, 15 bp, Homo sapiens
ttcttactccaaaaa

SEQ ID NO: 9254 - DNA, 15 bp, Homo sapiens
tttcttactccaaaa

SEQ ID NO: 9255 - DNA, 15 bp, Homo sapiens
gtttcttactccaaa

SEQ ID NO: 9256 - DNA, 15 bp, Homo sapiens
agtttcttactccaa

SEQ ID NO: 9257 - DNA, 15 bp, Homo sapiens
aagtttcttactcca

SEQ ID NO: 9258 - DNA, 15 bp, Homo sapiens
aaagtttcttactcc

SEQ ID NO: 9259 - DNA, 15 bp, Homo sapiens
caaagtttcttactc

SEQ ID NO: 9260 - DNA, 15 bp, Homo sapiens
ccaaagtttcttact

SEQ ID NO: 9261 - DNA, 15 bp, Homo sapiens
tccaaagtttcttac

SEQ ID NO: 9262 - DNA, 15 bp, Homo sapiens
ctccaaagtttctta

SEQ ID NO: 9263 - DNA, 15 bp, Homo sapiens
cctccaaagtttctt

SEQ ID NO: 9264 - DNA, 15 bp, Homo sapiens
gcctccaaagtttct

SEQ ID NO: 9265 - DNA, 15 bp, Homo sapiens
ggcctccaaagtttc

SEQ ID NO: 9266 - DNA, 15 bp, Homo sapiens
aggcctccaaagttt

SEQ ID NO: 9267 - DNA, 15 bp, Homo sapiens
caggcctccaaagtt

SEQ ID NO: 9268 - DNA, 15 bp, Homo sapiens
acaggcctccaaagt

SEQ ID NO: 9269 - DNA, 15 bp, Homo sapiens
cacaggcctccaaag

SEQ ID NO: 9270 - DNA, 15 bp, Homo sapiens
acacaggcctccaaa

SEQ ID NO: 9271 - DNA, 15 bp, Homo sapiens
gacacaggcctccaa

SEQ ID NO: 9272 - DNA, 15 bp, Homo sapiens
ggacacaggcctcca

SEQ ID NO: 9273 - DNA, 15 bp, Homo sapiens
aggacacaggcctcc

SEQ ID NO: 9274 - DNA, 15 bp, Homo sapiens
aaggacacaggcctc

SEQ ID NO: 9275 - DNA, 15 bp, Homo sapiens
gaaggacacaggcct

SEQ ID NO: 9276 - DNA, 15 bp, Homo sapiens
agaaggacacaggcc

SEQ ID NO: 9277 - DNA, 15 bp, Homo sapiens
tagaaggacacaggc

SEQ ID NO: 9278 - DNA, 15 bp, Homo sapiens
ctagaaggacacagg

SEQ ID NO: 9279 - DNA, 15 bp, Homo sapiens
tctagaaggacacag

SEQ ID NO: 9280 - DNA, 15 bp, Homo sapiens
ttctagaaggacaca

SEQ ID NO: 9281 - DNA, 15 bp, Homo sapiens
cttctagaaggacac

SEQ ID NO: 9282 - DNA, 15 bp, Homo sapiens
acttctagaaggaca

SEQ ID NO: 9283 - DNA, 15 bp, Homo sapiens
aacttctagaaggac

SEQ ID NO: 9284 - DNA, 15 bp, Homo sapiens
aaacttctagaagga

SEQ ID NO: 9285 - DNA, 15 bp, Homo sapiens
caaacttctagaagg

SEQ ID NO: 9286 - DNA, 15 bp, Homo sapiens
gcaaacttctagaag

SEQ ID NO: 9287 - DNA, 15 bp, Homo sapiens
agcaaacttctagaa

SEQ ID NO: 9288 - DNA, 15 bp, Homo sapiens
cagcaaacttctaga

SEQ ID NO: 9289 - DNA, 15 bp, Homo sapiens
tcagcaaacttctag

SEQ ID NO: 9290 - DNA, 15 bp, Homo sapiens
ctcagcaaacttcta

SEQ ID NO: 9291 - DNA, 15 bp, Homo sapiens
gctcagcaaacttct

SEQ ID NO: 9292 - DNA, 15 bp, Homo sapiens
tgctcagcaaacttc

SEQ ID NO: 9293 - DNA, 15 bp, Homo sapiens
ttgctcagcaaactt

SEQ ID NO: 9294 - DNA, 15 bp, Homo sapiens
tttgctcagcaaact

SEQ ID NO: 9295 - DNA, 15 bp, Homo sapiens
atttgctcagcaaac

SEQ ID NO: 9296 - DNA, 15 bp, Homo sapiens
catttgctcagcaaa

SEQ ID NO: 9297 - DNA, 15 bp, Homo sapiens
ccatttgctcagcaa

SEQ ID NO: 9298 - DNA, 15 bp, Homo sapiens
accatttgctcagca

SEQ ID NO: 9299 - DNA, 15 bp, Homo sapiens
taccatttgctcagc

SEQ ID NO: 9300 - DNA, 15 bp, Homo sapiens
ttaccatttgctcag

SEQ ID NO: 9301 - DNA, 15 bp, Homo sapiens
cttaccatttgctca

SEQ ID NO: 9302 - DNA, 15 bp, Homo sapiens
ccttaccatttgctc

SEQ ID NO: 9303 - DNA, 15 bp, Homo sapiens
tccttaccatttgct

SEQ ID NO: 9304 - DNA, 15 bp, Homo sapiens
ttccttaccatttgc

SEQ ID NO: 9305 - DNA, 15 bp, Homo sapiens
tttccttaccatttg

SEQ ID NO: 9306 - DNA, 15 bp, Homo sapiens
ttttccttaccattt

SEQ ID NO: 9307 - DNA, 15 bp, Homo sapiens
cttttccttaccatt

SEQ ID NO: 9308 - DNA, 15 bp, Homo sapiens
tcttttccttaccat

SEQ ID NO: 9309 - DNA, 15 bp, Homo sapiens
ttcttttccttacca

SEQ ID NO: 9310 - DNA, 15 bp, Homo sapiens
tttcttttccttacc

SEQ ID NO: 9311 - DNA, 15 bp, Homo sapiens
atttcttttccttac

SEQ ID NO: 9312 - DNA, 15 bp, Homo sapiens
tatttcttttcctta

SEQ ID NO: 9313 - DNA, 15 bp, Homo sapiens
ctatttcttttcctt

SEQ ID NO: 9314 - DNA, 15 bp, Homo sapiens
cctatttcttttcct

SEQ ID NO: 9315 - DNA, 15 bp, Homo sapiens
acctatttcttttcc

SEQ ID NO: 9316 - DNA, 15 bp, Homo sapiens
gacctatttcttttc

SEQ ID NO: 9317 - DNA, 15 bp, Homo sapiens
ggacctatttctttt

SEQ ID NO: 9318 - DNA, 15 bp, Homo sapiens
aggacctatttcttt

SEQ ID NO: 9319 - DNA, 15 bp, Homo sapiens
taggacctatttctt

SEQ ID NO: 9320 - DNA, 15 bp, Homo sapiens
ttaggacctatttct

SEQ ID NO: 9321 - DNA, 15 bp, Homo sapiens
cttaggacctatttc

SEQ ID NO: 9322 - DNA, 15 bp, Homo sapiens
ccttaggacctattt

SEQ ID NO: 9323 - DNA, 15 bp, Homo sapiens
gccttaggacctatt

SEQ ID NO: 9324 - DNA, 15 bp, Homo sapiens
agccttaggacctat

SEQ ID NO: 9325 - DNA, 15 bp, Homo sapiens
aagccttaggaccta

SEQ ID NO: 9326 - DNA, 15 bp, Homo sapiens
caagccttaggacct

SEQ ID NO: 9327 - DNA, 15 bp, Homo sapiens
tcaagccttaggacc

SEQ ID NO: 9328 - DNA, 15 bp, Homo sapiens
gtcaagccttaggac

SEQ ID NO: 9329 - DNA, 15 bp, Homo sapiens
agtcaagccttagga

SEQ ID NO: 9330 - DNA, 15 bp, Homo sapiens
tagtcaagccttagg

SEQ ID NO: 9331 - DNA, 15 bp, Homo sapiens
atagtcaagccttag

SEQ ID NO: 9332 - DNA, 15 bp, Homo sapiens
aatagtcaagcctta

SEQ ID NO: 9333 - DNA, 15 bp, Homo sapiens
aaatagtcaagcctt

SEQ ID NO: 9334 - DNA, 15 bp, Homo sapiens
gaaatagtcaagcct

SEQ ID NO: 9335 - DNA, 15 bp, Homo sapiens
tgaaatagtcaagcc

SEQ ID NO: 9336 - DNA, 15 bp, Homo sapiens
ctgaaatagtcaagc

SEQ ID NO: 9337 - DNA, 15 bp, Homo sapiens
tctgaaatagtcaag

SEQ ID NO: 9338 - DNA, 15 bp, Homo sapiens
ctctgaaatagtcaa

SEQ ID NO: 9339 - DNA, 15 bp, Homo sapiens
tctctgaaatagtca

SEQ ID NO: 9340 - DNA, 15 bp, Homo sapiens
ttctctgaaatagtc

SEQ ID NO: 9341 - DNA, 15 bp, Homo sapiens
attctctgaaatagt

SEQ ID NO: 9342 - DNA, 15 bp, Homo sapiens
aattctctgaaatag

SEQ ID NO: 9343 - DNA, 15 bp, Homo sapiens
aaattctctgaaata

SEQ ID NO: 9344 - DNA, 15 bp, Homo sapiens
gaaattctctgaaat

SEQ ID NO: 9345 - DNA, 15 bp, Homo sapiens
agaaattctctgaaa

SEQ ID NO: 9346 - DNA, 15 bp, Homo sapiens
aagaaattctctgaa

SEQ ID NO: 9347 - DNA, 15 bp, Homo sapiens
caagaaattctctga

SEQ ID NO: 9348 - DNA, 15 bp, Homo sapiens
tcaagaaattctctg

SEQ ID NO: 9349 - DNA, 15 bp, Homo sapiens
atcaagaaattctct

SEQ ID NO: 9350 - DNA, 15 bp, Homo sapiens
aatcaagaaattctc

SEQ ID NO: 9351 - DNA, 15 bp, Homo sapiens
aaatcaagaaattct

SEQ ID NO: 9352 - DNA, 15 bp, Homo sapiens
taaatcaagaaattc

SEQ ID NO: 9353 - DNA, 15 bp, Homo sapiens
ataaatcaagaaatt

SEQ ID NO: 9354 - DNA, 15 bp, Homo sapiens
aataaatcaagaaat

SEQ ID NO: 9355 - DNA, 15 bp, Homo sapiens
caataaatcaagaaa

SEQ ID NO: 9356 - DNA, 15 bp, Homo sapiens
ccaataaatcaagaa

SEQ ID NO: 9357 - DNA, 15 bp, Homo sapiens
tccaataaatcaaga

SEQ ID NO: 9358 - DNA, 15 bp, Homo sapiens
gtccaataaatcaag

SEQ ID NO: 9359 - DNA, 15 bp, Homo sapiens
agtccaataaatcaa

SEQ ID NO: 9360 - DNA, 15 bp, Homo sapiens
cagtccaataaatca

SEQ ID NO: 9361 - DNA, 15 bp, Homo sapiens
acagtccaataaatc

SEQ ID NO: 9362 - DNA, 15 bp, Homo sapiens
gacagtccaataaat

SEQ ID NO: 9363 - DNA, 15 bp, Homo sapiens
tgacagtccaataaa

SEQ ID NO: 9364 - DNA, 15 bp, Homo sapiens
ttgacagtccaataa

SEQ ID NO: 9365 - DNA, 15 bp, Homo sapiens
attgacagtccaata

SEQ ID NO: 9366 - DNA, 15 bp, Homo sapiens
cattgacagtccaat

SEQ ID NO: 9367 - DNA, 15 bp, Homo sapiens
tcattgacagtccaa

SEQ ID NO: 9368 - DNA, 15 bp, Homo sapiens
ttcattgacagtcca

SEQ ID NO: 9369 - DNA, 15 bp, Homo sapiens
attcattgacagtcc

SEQ ID NO: 9370 - DNA, 15 bp, Homo sapiens
cattcattgacagtc

SEQ ID NO: 9371 - DNA, 15 bp, Homo sapiens
tcattcattgacagt

SEQ ID NO: 9372 - DNA, 15 bp, Homo sapiens
ttcattcattgacag

SEQ ID NO: 9373 - DNA, 15 bp, Homo sapiens
attcattcattgaca

SEQ ID NO: 9374 - DNA, 15 bp, Homo sapiens
aattcattcattgac

SEQ ID NO: 9375 - DNA, 15 bp, Homo sapiens
caattcattcattga

SEQ ID NO: 9376 - DNA, 15 bp, Homo sapiens
ccaattcattcattg

SEQ ID NO: 9377 - DNA, 15 bp, Homo sapiens
tccaattcattcatt

SEQ ID NO: 9378 - DNA, 15 bp, Homo sapiens
ttccaattcattcat

SEQ ID NO: 9379 - DNA, 15 bp, Homo sapiens
attccaattcattca

SEQ ID NO: 9380 - DNA, 15 bp, Homo sapiens
tattccaattcattc

SEQ ID NO: 9381 - DNA, 15 bp, Homo sapiens
gtattccaattcatt

SEQ ID NO: 9382 - DNA, 15 bp, Homo sapiens
tgtattccaattcat

SEQ ID NO: 9383 - DNA, 15 bp, Homo sapiens
atgtattccaattca

SEQ ID NO: 9384 - DNA, 15 bp, Homo sapiens
tatgtattccaattc

SEQ ID NO: 9385 - DNA, 15 bp, Homo sapiens
ctatgtattccaatt

SEQ ID NO: 9386 - DNA, 15 bp, Homo sapiens
actatgtattccaat

SEQ ID NO: 9387 - DNA, 15 bp, Homo sapiens
cactatgtattccaa

SEQ ID NO: 9388 - DNA, 15 bp, Homo sapiens
ccactatgtattcca

SEQ ID NO: 9389 - DNA, 15 bp, Homo sapiens
accactatgtattcc

SEQ ID NO: 9390 - DNA, 15 bp, Homo sapiens
taccactatgtattc

SEQ ID NO: 9391 - DNA, 15 bp, Homo sapiens
ctaccactatgtatt

SEQ ID NO: 9392 - DNA, 15 bp, Homo sapiens
cctaccactatgtat

SEQ ID NO: 9393 - DNA, 15 bp, Homo sapiens
gcctaccactatgta

SEQ ID NO: 9394 - DNA, 15 bp, Homo sapiens
agcctaccactatgt

SEQ ID NO: 9395 - DNA, 15 bp, Homo sapiens
cagcctaccactatg

SEQ ID NO: 9396 - DNA, 15 bp, Homo sapiens
acagcctaccactat

SEQ ID NO: 9397 - DNA, 15 bp, Homo sapiens
gacagcctaccacta

SEQ ID NO: 9398 - DNA, 15 bp, Homo sapiens
agacagcctaccact

SEQ ID NO: 9399 - DNA, 15 bp, Homo sapiens
aagacagcctaccac

SEQ ID NO: 9400 - DNA, 15 bp, Homo sapiens
aaagacagcctacca

SEQ ID NO: 9401 - DNA, 15 bp, Homo sapiens
aaaagacagcctacc

SEQ ID NO: 9402 - DNA, 15 bp, Homo sapiens
gaaaagacagcctac

SEQ ID NO: 9403 - DNA, 15 bp, Homo sapiens
agaaaagacagccta

SEQ ID NO: 9404 - DNA, 15 bp, Homo sapiens
aagaaaagacagcct

SEQ ID NO: 9405 - DNA, 15 bp, Homo sapiens
gaagaaaagacagcc

SEQ ID NO: 9406 - DNA, 15 bp, Homo sapiens
agaagaaaagacagc

SEQ ID NO: 9407 - DNA, 15 bp, Homo sapiens
gagaagaaaagacag

SEQ ID NO: 9408 - DNA, 15 bp, Homo sapiens
tgagaagaaaagaca

SEQ ID NO: 9409 - DNA, 15 bp, Homo sapiens
ctgagaagaaaagac

SEQ ID NO: 9410 - DNA, 15 bp, Homo sapiens
tctgagaagaaaaga

SEQ ID NO: 9411 - DNA, 15 bp, Homo sapiens
gtctgagaagaaaag

SEQ ID NO: 9412 - DNA, 15 bp, Homo sapiens
tgtctgagaagaaaa

SEQ ID NO: 9413 - DNA, 15 bp, Homo sapiens
gtgtctgagaagaaa

SEQ ID NO: 9414 - DNA, 15 bp, Homo sapiens
agtgtctgagaagaa

SEQ ID NO: 9415 - DNA, 15 bp, Homo sapiens
cagtgtctgagaaga

SEQ ID NO: 9416 - DNA, 15 bp, Homo sapiens
gcagtgtctgagaag

SEQ ID NO: 9417 - DNA, 15 bp, Homo sapiens
tgcagtgtctgagaa

SEQ ID NO: 9418 - DNA, 15 bp, Homo sapiens
ttgcagtgtctgaga

SEQ ID NO: 9419 - DNA, 15 bp, Homo sapiens
attgcagtgtctgag

SEQ ID NO: 9420 - DNA, 15 bp, Homo sapiens
aattgcagtgtctga

SEQ ID NO: 9421 - DNA, 15 bp, Homo sapiens
aaattgcagtgtctg

SEQ ID NO: 9422 - DNA, 15 bp, Homo sapiens
gaaattgcagtgtct

SEQ ID NO: 9423 - DNA, 15 bp, Homo sapiens
ggaaattgcagtgtc

SEQ ID NO: 9424 - DNA, 15 bp, Homo sapiens
aggaaattgcagtgt

SEQ ID NO: 9425 - DNA, 15 bp, Homo sapiens
gaggaaattgcagtg

SEQ ID NO: 9426 - DNA, 15 bp, Homo sapiens
ggaggaaattgcagt

SEQ ID NO: 9427 - DNA, 15 bp, Homo sapiens
tggaggaaattgcag

SEQ ID NO: 9428 - DNA, 15 bp, Homo sapiens
ttggaggaaattgca

SEQ ID NO: 9429 - DNA, 15 bp, Homo sapiens
attggaggaaattgc

SEQ ID NO: 9430 - DNA, 15 bp, Homo sapiens
gattggaggaaattg

SEQ ID NO: 9431 - DNA, 15 bp, Homo sapiens
agattggaggaaatt

SEQ ID NO: 9432 - DNA, 15 bp, Homo sapiens
gagattggaggaaat

SEQ ID NO: 9433 - DNA, 15 bp, Homo sapiens
agagattggaggaaa

SEQ ID NO: 9434 - DNA, 15 bp, Homo sapiens
aagagattggaggaa

SEQ ID NO: 9435 - DNA, 15 bp, Homo sapiens
caagagattggagga

SEQ ID NO: 9436 - DNA, 15 bp, Homo sapiens
tcaagagattggagg

SEQ ID NO: 9437 - DNA, 15 bp, Homo sapiens
gtcaagagattggag

SEQ ID NO: 9438 - DNA, 15 bp, Homo sapiens
agtcaagagattgga

SEQ ID NO: 9439 - DNA, 15 bp, Homo sapiens
aagtcaagagattgg

SEQ ID NO: 9440 - DNA, 15 bp, Homo sapiens
aaagtcaagagattg

SEQ ID NO: 9441 - DNA, 15 bp, Homo sapiens
aaaagtcaagagatt

SEQ ID NO: 9442 - DNA, 15 bp, Homo sapiens
gaaaagtcaagagat

SEQ ID NO: 9443 - DNA, 15 bp, Homo sapiens
agaaaagtcaagaga

SEQ ID NO: 9444 - DNA, 15 bp, Homo sapiens
tagaaaagtcaagag

SEQ ID NO: 9445 - DNA, 15 bp, Homo sapiens
ctagaaaagtcaaga

SEQ ID NO: 9446 - DNA, 15 bp, Homo sapiens
tctagaaaagtcaag

SEQ ID NO: 9447 - DNA, 15 bp, Homo sapiens
ttctagaaaagtcaa

SEQ ID NO: 9448 - DNA, 15 bp, Homo sapiens
cttctagaaaagtca

SEQ ID NO: 9449 - DNA, 15 bp, Homo sapiens
acttctagaaaagtc

SEQ ID NO: 9450 - DNA, 15 bp, Homo sapiens
aacttctagaaaagt

SEQ ID NO: 9451 - DNA, 15 bp, Homo sapiens
aaacttctagaaaag

SEQ ID NO: 9452 - DNA, 15 bp, Homo sapiens
aaaacttctagaaaa

SEQ ID NO: 9453 - DNA, 15 bp, Homo sapiens
taaaacttctagaaa

SEQ ID NO: 9454 - DNA, 15 bp, Homo sapiens
ttaaaacttctagaa

SEQ ID NO: 9455 - DNA, 15 bp, Homo sapiens
attaaaacttctaga

SEQ ID NO: 9456 - DNA, 15 bp, Homo sapiens
gattaaaacttctag

SEQ ID NO: 9457 - DNA, 15 bp, Homo sapiens
ggattaaaacttcta

SEQ ID NO: 9458 - DNA, 15 bp, Homo sapiens
tggattaaaacttct

SEQ ID NO: 9459 - DNA, 15 bp, Homo sapiens
ttggattaaaacttc

SEQ ID NO: 9460 - DNA, 15 bp, Homo sapiens
cttggattaaaactt

SEQ ID NO: 9461 - DNA, 15 bp, Homo sapiens
acttggattaaaact

SEQ ID NO: 9462 - DNA, 15 bp, Homo sapiens
gacttggattaaaac

SEQ ID NO: 9463 - DNA, 15 bp, Homo sapiens
ggacttggattaaaa

SEQ ID NO: 9464 - DNA, 15 bp, Homo sapiens
aggacttggattaaa

SEQ ID NO: 9465 - DNA, 15 bp, Homo sapiens
aaggacttggattaa

SEQ ID NO: 9466 - DNA, 15 bp, Homo sapiens
caaggacttggatta

SEQ ID NO: 9467 - DNA, 15 bp, Homo sapiens
acaaggacttggatt

SEQ ID NO: 9468 - DNA, 15 bp, Homo sapiens
aacaaggacttggat

SEQ ID NO: 9469 - DNA, 15 bp, Homo sapiens
caacaaggacttgga

SEQ ID NO: 9470 - DNA, 15 bp, Homo sapiens
ccaacaaggacttgg

SEQ ID NO: 9471 - DNA, 15 bp, Homo sapiens
cccaacaaggacttg

SEQ ID NO: 9472 - DNA, 15 bp, Homo sapiens
acccaacaaggactt

SEQ ID NO: 9473 - DNA, 15 bp, Homo sapiens
cacccaacaaggact

SEQ ID NO: 9474 - DNA, 15 bp, Homo sapiens
ccacccaacaaggac

SEQ ID NO: 9475 - DNA, 15 bp, Homo sapiens
accacccaacaagga

SEQ ID NO: 9476 - DNA, 15 bp, Homo sapiens
taccacccaacaagg

SEQ ID NO: 9477 - DNA, 15 bp, Homo sapiens
ctaccacccaacaag

SEQ ID NO: 9478 - DNA, 15 bp, Homo sapiens
tctaccacccaacaa

SEQ ID NO: 9479 - DNA, 15 bp, Homo sapiens
atctaccacccaaca

SEQ ID NO: 9480 - DNA, 15 bp, Homo sapiens
tatctaccacccaac

SEQ ID NO: 9481 - DNA, 15 bp, Homo sapiens
ttatctaccacccaa

SEQ ID NO: 9482 - DNA, 15 bp, Homo sapiens
tttatctaccaccca

SEQ ID NO: 9483 - DNA, 15 bp, Homo sapiens
ttttatctaccaccc

SEQ ID NO: 9484 - DNA, 15 bp, Homo sapiens
cttttatctaccacc

SEQ ID NO: 9485 - DNA, 15 bp, Homo sapiens
ccttttatctaccac

SEQ ID NO: 9486 - DNA, 15 bp, Homo sapiens
cccttttatctacca

SEQ ID NO: 9487 - DNA, 15 bp, Homo sapiens
acccttttatctacc

SEQ ID NO: 9488 - DNA, 15 bp, Homo sapiens
tacccttttatctac

SEQ ID NO: 9489 - DNA, 15 bp, Homo sapiens
atacccttttatcta

SEQ ID NO: 9490 - DNA, 15 bp, Homo sapiens
aatacccttttatct

SEQ ID NO: 9491 - DNA, 15 bp, Homo sapiens
caatacccttttatc

SEQ ID NO: 9492 - DNA, 15 bp, Homo sapiens
acaatacccttttat

SEQ ID NO: 9493 - DNA, 15 bp, Homo sapiens
aacaataccctttta

SEQ ID NO: 9494 - DNA, 15 bp, Homo sapiens
gaacaataccctttt

SEQ ID NO: 9495 - DNA, 15 bp, Homo sapiens
agaacaatacccttt

SEQ ID NO: 9496 - DNA, 15 bp, Homo sapiens
tagaacaataccctt

SEQ ID NO: 9497 - DNA, 15 bp, Homo sapiens
gtagaacaataccct

SEQ ID NO: 9498 - DNA, 15 bp, Homo sapiens
agtagaacaataccc

SEQ ID NO: 9499 - DNA, 15 bp, Homo sapiens
tagtagaacaatacc

SEQ ID NO: 9500 - DNA, 15 bp, Homo sapiens
ctagtagaacaatac

SEQ ID NO: 9501 - DNA, 15 bp, Homo sapiens
tctagtagaacaata

SEQ ID NO: 9502 - DNA, 15 bp, Homo sapiens
ctctagtagaacaat

SEQ ID NO: 9503 - DNA, 15 bp, Homo sapiens
tctctagtagaacaa

SEQ ID NO: 9504 - DNA, 15 bp, Homo sapiens
gtctctagtagaaca

SEQ ID NO: 9505 - DNA, 15 bp, Homo sapiens
agtctctagtagaac

SEQ ID NO: 9506 - DNA, 15 bp, Homo sapiens
cagtctctagtagaa

SEQ ID NO: 9507 - DNA, 15 bp, Homo sapiens
tcagtctctagtaga

SEQ ID NO: 9508 - DNA, 15 bp, Homo sapiens
gtcagtctctagtag

SEQ ID NO: 9509 - DNA, 15 bp, Homo sapiens
ggtcagtctctagta

SEQ ID NO: 9510 - DNA, 15 bp, Homo sapiens
aggtcagtctctagt

SEQ ID NO: 9511 - DNA, 15 bp, Homo sapiens
aaggtcagtctctag

SEQ ID NO: 9512 - DNA, 15 bp, Homo sapiens
caaggtcagtctcta

SEQ ID NO: 9513 - DNA, 15 bp, Homo sapiens
ccaaggtcagtctct

SEQ ID NO: 9514 - DNA, 15 bp, Homo sapiens
gccaaggtcagtctc

SEQ ID NO: 9515 - DNA, 15 bp, Homo sapiens
tgccaaggtcagtct

SEQ ID NO: 9516 - DNA, 15 bp, Homo sapiens
atgccaaggtcagtc

SEQ ID NO: 9517 - DNA, 15 bp, Homo sapiens
catgccaaggtcagt

SEQ ID NO: 9518 - DNA, 15 bp, Homo sapiens
ccatgccaaggtcag

SEQ ID NO: 9519 - DNA, 15 bp, Homo sapiens
tccatgccaaggtca

SEQ ID NO: 9520 - DNA, 15 bp, Homo sapiens
ctccatgccaaggtc

SEQ ID NO: 9521 - DNA, 15 bp, Homo sapiens
tctccatgccaaggt

SEQ ID NO: 9522 - DNA, 15 bp, Homo sapiens
atctccatgccaagg

SEQ ID NO: 9523 - DNA, 15 bp, Homo sapiens
gatctccatgccaag

SEQ ID NO: 9524 - DNA, 15 bp, Homo sapiens
agatctccatgccaa

SEQ ID NO: 9525 - DNA, 15 bp, Homo sapiens
gagatctccatgcca

SEQ ID NO: 9526 - DNA, 15 bp, Homo sapiens
tgagatctccatgcc

SEQ ID NO: 9527 - DNA, 15 bp, Homo sapiens
atgagatctccatgc

SEQ ID NO: 9528 - DNA, 15 bp, Homo sapiens
aatgagatctccatg

SEQ ID NO: 9529 - DNA, 15 bp, Homo sapiens
aaatgagatctccat

SEQ ID NO: 9530 - DNA, 15 bp, Homo sapiens
caaatgagatctcca

SEQ ID NO: 9531 - DNA, 15 bp, Homo sapiens
ccaaatgagatctcc

SEQ ID NO: 9532 - DNA, 15 bp, Homo sapiens
tccaaatgagatctc

SEQ ID NO: 9533 - DNA, 15 bp, Homo sapiens
gtccaaatgagatct

SEQ ID NO: 9534 - DNA, 15 bp, Homo sapiens
agtccaaatgagatc

SEQ ID NO: 9535 - DNA, 15 bp, Homo sapiens
gagtccaaatgagat

SEQ ID NO: 9536 - DNA, 15 bp, Homo sapiens
tgagtccaaatgaga

SEQ ID NO: 9537 - DNA, 15 bp, Homo sapiens
gtgagtccaaatgag

SEQ ID NO: 9538 - DNA, 15 bp, Homo sapiens
tgtgagtccaaatga

SEQ ID NO: 9539 - DNA, 15 bp, Homo sapiens
ctgtgagtccaaatg

SEQ ID NO: 9540 - DNA, 15 bp, Homo sapiens
tctgtgagtccaaat

SEQ ID NO: 9541 - DNA, 15 bp, Homo sapiens
atctgtgagtccaaa

SEQ ID NO: 9542 - DNA, 15 bp, Homo sapiens
aatctgtgagtccaa

SEQ ID NO: 9543 - DNA, 15 bp, Homo sapiens
aaatctgtgagtcca

SEQ ID NO: 9544 - DNA, 15 bp, Homo sapiens
gaaatctgtgagtcc

SEQ ID NO: 9545 - DNA, 15 bp, Homo sapiens
agaaatctgtgagtc

SEQ ID NO: 9546 - DNA, 15 bp, Homo sapiens
tagaaatctgtgagt

SEQ ID NO: 9547 - DNA, 15 bp, Homo sapiens
ctagaaatctgtgag

SEQ ID NO: 9548 - DNA, 15 bp, Homo sapiens
actagaaatctgtga

SEQ ID NO: 9549 - DNA, 15 bp, Homo sapiens
gactagaaatctgtg

SEQ ID NO: 9550 - DNA, 15 bp, Homo sapiens
agactagaaatctgt

SEQ ID NO: 9551 - DNA, 15 bp, Homo sapiens
tagactagaaatctg

SEQ ID NO: 9552 - DNA, 15 bp, Homo sapiens
ctagactagaaatct

SEQ ID NO: 9553 - DNA, 15 bp, Homo sapiens
gctagactagaaatc

SEQ ID NO: 9554 - DNA, 15 bp, Homo sapiens
cgctagactagaaat

SEQ ID NO: 9555 - DNA, 15 bp, Homo sapiens
gcgctagactagaaa

SEQ ID NO: 9556 - DNA, 15 bp, Homo sapiens
agcgctagactagaa

SEQ ID NO: 9557 - DNA, 15 bp, Homo sapiens
aagcgctagactaga

SEQ ID NO: 9558 - DNA, 15 bp, Homo sapiens
caagcgctagactag

SEQ ID NO: 9559 - DNA, 15 bp, Homo sapiens
ccaagcgctagacta

SEQ ID NO: 9560 - DNA, 15 bp, Homo sapiens
accaagcgctagact

SEQ ID NO: 9561 - DNA, 15 bp, Homo sapiens
aaccaagcgctagac

SEQ ID NO: 9562 - DNA, 15 bp, Homo sapiens
aaaccaagcgctaga

SEQ ID NO: 9563 - DNA, 15 bp, Homo sapiens
aaaaccaagcgctag

SEQ ID NO: 9564 - DNA, 15 bp, Homo sapiens
caaaaccaagcgcta

SEQ ID NO: 9565 - DNA, 15 bp, Homo sapiens
acaaaaccaagcgct

SEQ ID NO: 9566 - DNA, 15 bp, Homo sapiens
tacaaaaccaagcgc

SEQ ID NO: 9567 - DNA, 15 bp, Homo sapiens
atacaaaaccaagcg

SEQ ID NO: 9568 - DNA, 15 bp, Homo sapiens
gatacaaaaccaagc

SEQ ID NO: 9569 - DNA, 15 bp, Homo sapiens
ggatacaaaaccaag

SEQ ID NO: 9570 - DNA, 15 bp, Homo sapiens
tggatacaaaaccaa

SEQ ID NO: 9571 - DNA, 15 bp, Homo sapiens
atggatacaaaacca

SEQ ID NO: 9572 - DNA, 15 bp, Homo sapiens
tatggatacaaaacc

SEQ ID NO: 9573 - DNA, 15 bp, Homo sapiens
gtatggatacaaaac

SEQ ID NO: 9574 - DNA, 15 bp, Homo sapiens
ggtatggatacaaaa

SEQ ID NO: 9575 - DNA, 15 bp, Homo sapiens
aggtatggatacaaa

SEQ ID NO: 9576 - DNA, 15 bp, Homo sapiens
gaggtatggatacaa

SEQ ID NO: 9577 - DNA, 15 bp, Homo sapiens
cgaggtatggataca

SEQ ID NO: 9578 - DNA, 15 bp, Homo sapiens
gcgaggtatggatac

SEQ ID NO: 9579 - DNA, 15 bp, Homo sapiens
agcgaggtatggata

SEQ ID NO: 9580 - DNA, 15 bp, Homo sapiens
tagcgaggtatggat

SEQ ID NO: 9581 - DNA, 15 bp, Homo sapiens
gtagcgaggtatgga

SEQ ID NO: 9582 - DNA, 15 bp, Homo sapiens
agtagcgaggtatgg

SEQ ID NO: 9583 - DNA, 15 bp, Homo sapiens
cagtagcgaggtatg

SEQ ID NO: 9584 - DNA, 15 bp, Homo sapiens
gcagtagcgaggtat

SEQ ID NO: 9585 - DNA, 15 bp, Homo sapiens
tgcagtagcgaggta

SEQ ID NO: 9586 - DNA, 15 bp, Homo sapiens
atgcagtagcgaggt

SEQ ID NO: 9587 - DNA, 15 bp, Homo sapiens
aatgcagtagcgagg

SEQ ID NO: 9588 - DNA, 15 bp, Homo sapiens
gaatgcagtagcgag

SEQ ID NO: 9589 - DNA, 15 bp, Homo sapiens
agaatgcagtagcga

SEQ ID NO: 9590 - DNA, 15 bp, Homo sapiens
aagaatgcagtagcg

SEQ ID NO: 9591 - DNA, 15 bp, Homo sapiens
taagaatgcagtagc

SEQ ID NO: 9592 - DNA, 15 bp, Homo sapiens
ctaagaatgcagtag

SEQ ID NO: 9593 - DNA, 15 bp, Homo sapiens
actaagaatgcagta

SEQ ID NO: 9594 - DNA, 15 bp, Homo sapiens
aactaagaatgcagt

SEQ ID NO: 9595 - DNA, 15 bp, Homo sapiens
gaactaagaatgcag

SEQ ID NO: 9596 - DNA, 15 bp, Homo sapiens
ggaactaagaatgca

SEQ ID NO: 9597 - DNA, 15 bp, Homo sapiens
aggaactaagaatgc

SEQ ID NO: 9598 - DNA, 15 bp, Homo sapiens
aaggaactaagaatg

SEQ ID NO: 9599 - DNA, 15 bp, Homo sapiens
gaaggaactaagaat

SEQ ID NO: 9600 - DNA, 15 bp, Homo sapiens
agaaggaactaagaa

SEQ ID NO: 9601 - DNA, 15 bp, Homo sapiens
cagaaggaactaaga

SEQ ID NO: 9602 - DNA, 15 bp, Homo sapiens
gcagaaggaactaag

SEQ ID NO: 9603 - DNA, 15 bp, Homo sapiens
agcagaaggaactaa

SEQ ID NO: 9604 - DNA, 15 bp, Homo sapiens
gagcagaaggaacta

SEQ ID NO: 9605 - DNA, 15 bp, Homo sapiens
ggagcagaaggaact

SEQ ID NO: 9606 - DNA, 15 bp, Homo sapiens
aggagcagaaggaac

SEQ ID NO: 9607 - DNA, 15 bp, Homo sapiens
aaggagcagaaggaa

SEQ ID NO: 9608 - DNA, 15 bp, Homo sapiens
caaggagcagaagga

SEQ ID NO: 9609 - DNA, 15 bp, Homo sapiens
acaaggagcagaagg

SEQ ID NO: 9610 - DNA, 15 bp, Homo sapiens
aacaaggagcagaag

SEQ ID NO: 9611 - DNA, 15 bp, Homo sapiens
gaacaaggagcagaa

SEQ ID NO: 9612 - DNA, 15 bp, Homo sapiens
ggaacaaggagcaga

SEQ ID NO: 9613 - DNA, 15 bp, Homo sapiens
aggaacaaggagcag

SEQ ID NO: 9614 - DNA, 15 bp, Homo sapiens
gaggaacaaggagca

SEQ ID NO: 9615 - DNA, 15 bp, Homo sapiens
tgaggaacaaggagc

SEQ ID NO: 9616 - DNA, 15 bp, Homo sapiens
atgaggaacaaggag

SEQ ID NO: 9617 - DNA, 15 bp, Homo sapiens
catgaggaacaagga

SEQ ID NO: 9618 - DNA, 15 bp, Homo sapiens
gcatgaggaacaagg

SEQ ID NO: 9619 - DNA, 15 bp, Homo sapiens
ggcatgaggaacaag

SEQ ID NO: 9620 - DNA, 15 bp, Homo sapiens
gggcatgaggaacaa

SEQ ID NO: 9621 - DNA, 15 bp, Homo sapiens
tgggcatgaggaaca

SEQ ID NO: 9622 - DNA, 15 bp, Homo sapiens
ctgggcatgaggaac

SEQ ID NO: 9623 - DNA, 15 bp, Homo sapiens
actgggcatgaggaa

SEQ ID NO: 9624 - DNA, 15 bp, Homo sapiens
cactgggcatgagga

SEQ ID NO: 9625 - DNA, 15 bp, Homo sapiens
acactgggcatgagg

SEQ ID NO: 9626 - DNA, 15 bp, Homo sapiens
gacactgggcatgag

SEQ ID NO: 9627 - DNA, 15 bp, Homo sapiens
ggacactgggcatga

SEQ ID NO: 9628 - DNA, 15 bp, Homo sapiens
gggacactgggcatg

SEQ ID NO: 9629 - DNA, 15 bp, Homo sapiens
tgggacactgggcat

SEQ ID NO: 9630 - DNA, 15 bp, Homo sapiens
gtgggacactgggca

SEQ ID NO: 9631 - DNA, 15 bp, Homo sapiens
ggtgggacactgggc

SEQ ID NO: 9632 - DNA, 15 bp, Homo sapiens
gggtgggacactggg

SEQ ID NO: 9633 - DNA, 15 bp, Homo sapiens
agggtgggacactgg

SEQ ID NO: 9634 - DNA, 15 bp, Homo sapiens
tagggtgggacactg

SEQ ID NO: 9635 - DNA, 15 bp, Homo sapiens
gtagggtgggacact

SEQ ID NO: 9636 - DNA, 15 bp, Homo sapiens
ggtagggtgggacac

SEQ ID NO: 9637 - DNA, 15 bp, Homo sapiens
gggtagggtgggaca

SEQ ID NO: 9638 - DNA, 15 bp, Homo sapiens
agggtagggtgggac

SEQ ID NO: 9639 - DNA, 15 bp, Homo sapiens
aagggtagggtggga

SEQ ID NO: 9640 - DNA, 15 bp, Homo sapiens
caagggtagggtggg

SEQ ID NO: 9641 - DNA, 15 bp, Homo sapiens
gcaagggtagggtgg

SEQ ID NO: 9642 - DNA, 15 bp, Homo sapiens
ggcaagggtagggtg

SEQ ID NO: 9643 - DNA, 15 bp, Homo sapiens
gggcaagggtagggt

SEQ ID NO: 9644 - DNA, 15 bp, Homo sapiens
ggggcaagggtaggg

SEQ ID NO: 9645 - DNA, 15 bp, Homo sapiens
aggggcaagggtagg

SEQ ID NO: 9646 - DNA, 15 bp, Homo sapiens
taggggcaagggtag

SEQ ID NO: 9647 - DNA, 15 bp, Homo sapiens
gtaggggcaagggta

SEQ ID NO: 9648 - DNA, 15 bp, Homo sapiens
agtaggggcaagggt

SEQ ID NO: 9649 - DNA, 15 bp, Homo sapiens
gagtaggggcaaggg

SEQ ID NO: 9650 - DNA, 15 bp, Homo sapiens
ggagtaggggcaagg

SEQ ID NO: 9651 - DNA, 15 bp, Homo sapiens
aggagtaggggcaag

SEQ ID NO: 9652 - DNA, 15 bp, Homo sapiens
gaggagtaggggcaa

SEQ ID NO: 9653 - DNA, 15 bp, Homo sapiens
agaggagtaggggca

SEQ ID NO: 9654 - DNA, 15 bp, Homo sapiens
tagaggagtaggggc

SEQ ID NO: 9655 - DNA, 15 bp, Homo sapiens
ctagaggagtagggg

SEQ ID NO: 9656 - DNA, 15 bp, Homo sapiens
tctagaggagtaggg

SEQ ID NO: 9657 - DNA, 15 bp, Homo sapiens
ctctagaggagtagg

SEQ ID NO: 9658 - DNA, 15 bp, Homo sapiens
cctctagaggagtag

SEQ ID NO: 9659 - DNA, 15 bp, Homo sapiens
gcctctagaggagta

SEQ ID NO: 9660 - DNA, 15 bp, Homo sapiens
ggcctctagaggagt

SEQ ID NO: 9661 - DNA, 15 bp, Homo sapiens
tggcctctagaggag

SEQ ID NO: 9662 - DNA, 15 bp, Homo sapiens
gtggcctctagagga

SEQ ID NO: 9663 - DNA, 15 bp, Homo sapiens
tgtggcctctagagg

SEQ ID NO: 9664 - DNA, 15 bp, Homo sapiens
ctgtggcctctagag

SEQ ID NO: 9665 - DNA, 15 bp, Homo sapiens
actgtggcctctaga

SEQ ID NO: 9666 - DNA, 15 bp, Homo sapiens
cactgtggcctctag

SEQ ID NO: 9667 - DNA, 15 bp, Homo sapiens
tcactgtggcctcta

SEQ ID NO: 9668 - DNA, 15 bp, Homo sapiens
atcactgtggcctct

SEQ ID NO: 9669 - DNA, 15 bp, Homo sapiens
aatcactgtggcctc

SEQ ID NO: 9670 - DNA, 15 bp, Homo sapiens
gaatcactgtggcct

SEQ ID NO: 9671 - DNA, 15 bp, Homo sapiens
tgaatcactgtggcc

SEQ ID NO: 9672 - DNA, 15 bp, Homo sapiens
gtgaatcactgtggc

SEQ ID NO: 9673 - DNA, 15 bp, Homo sapiens
agtgaatcactgtgg

SEQ ID NO: 9674 - DNA, 15 bp, Homo sapiens
cagtgaatcactgtg

SEQ ID NO: 9675 - DNA, 15 bp, Homo sapiens
tcagtgaatcactgt

SEQ ID NO: 9676 - DNA, 15 bp, Homo sapiens
ctcagtgaatcactg

SEQ ID NO: 9677 - DNA, 15 bp, Homo sapiens
gctcagtgaatcact

SEQ ID NO: 9678 - DNA, 15 bp, Homo sapiens
ggctcagtgaatcac

SEQ ID NO: 9679 - DNA, 15 bp, Homo sapiens
tggctcagtgaatca

SEQ ID NO: 9680 - DNA, 15 bp, Homo sapiens
atggctcagtgaatc

SEQ ID NO: 9681 - DNA, 15 bp, Homo sapiens
aatggctcagtgaat

SEQ ID NO: 9682 - DNA, 15 bp, Homo sapiens
aaatggctcagtgaa

SEQ ID NO: 9683 - DNA, 15 bp, Homo sapiens
gaaatggctcagtga

SEQ ID NO: 9684 - DNA, 15 bp, Homo sapiens
tgaaatggctcagtg

SEQ ID NO: 9685 - DNA, 15 bp, Homo sapiens
atgaaatggctcagt

SEQ ID NO: 9686 - DNA, 15 bp, Homo sapiens
tatgaaatggctcag

SEQ ID NO: 9687 - DNA, 15 bp, Homo sapiens
ttatgaaatggctca

SEQ ID NO: 9688 - DNA, 15 bp, Homo sapiens
cttatgaaatggctc

SEQ ID NO: 9689 - DNA, 15 bp, Homo sapiens
gcttatgaaatggct

SEQ ID NO: 9690 - DNA, 15 bp, Homo sapiens
tgcttatgaaatggc

SEQ ID NO: 9691 - DNA, 15 bp, Homo sapiens
gtgcttatgaaatgg

SEQ ID NO: 9692 - DNA, 15 bp, Homo sapiens
tgtgcttatgaaatg

SEQ ID NO: 9693 - DNA, 15 bp, Homo sapiens
ctgtgcttatgaaat

SEQ ID NO: 9694 - DNA, 15 bp, Homo sapiens
gctgtgcttatgaaa

SEQ ID NO: 9695 - DNA, 15 bp, Homo sapiens
agctgtgcttatgaa

SEQ ID NO: 9696 - DNA, 15 bp, Homo sapiens
tagctgtgcttatga

SEQ ID NO: 9697 - DNA, 15 bp, Homo sapiens
ctagctgtgcttatg

SEQ ID NO: 9698 - DNA, 15 bp, Homo sapiens
cctagctgtgcttat

SEQ ID NO: 9699 - DNA, 15 bp, Homo sapiens
tcctagctgtgctta

SEQ ID NO: 9700 - DNA, 15 bp, Homo sapiens
ctcctagctgtgctt

SEQ ID NO: 9701 - DNA, 15 bp, Homo sapiens
tctcctagctgtgct

SEQ ID NO: 9702 - DNA, 15 bp, Homo sapiens
ctctcctagctgtgc

SEQ ID NO: 9703 - DNA, 15 bp, Homo sapiens
actctcctagctgtg

SEQ ID NO: 9704 - DNA, 15 bp, Homo sapiens
aactctcctagctgt

SEQ ID NO: 9705 - DNA, 15 bp, Homo sapiens
gaactctcctagctg

SEQ ID NO: 9706 - DNA, 15 bp, Homo sapiens
tgaactctcctagct

SEQ ID NO: 9707 - DNA, 15 bp, Homo sapiens
atgaactctcctagc

SEQ ID NO: 9708 - DNA, 15 bp, Homo sapiens
catgaactctcctag

SEQ ID NO: 9709 - DNA, 15 bp, Homo sapiens
ccatgaactctccta

SEQ ID NO: 9710 - DNA, 15 bp, Homo sapiens
gccatgaactctcct

SEQ ID NO: 9711 - DNA, 15 bp, Homo sapiens
agccatgaactctcc

SEQ ID NO: 9712 - DNA, 15 bp, Homo sapiens
tagccatgaactctc

SEQ ID NO: 9713 - DNA, 15 bp, Homo sapiens
gtagccatgaactct

SEQ ID NO: 9714 - DNA, 15 bp, Homo sapiens
ggtagccatgaactc

SEQ ID NO: 9715 - DNA, 15 bp, Homo sapiens
tggtagccatgaact

SEQ ID NO: 9716 - DNA, 15 bp, Homo sapiens
ttggtagccatgaac

SEQ ID NO: 9717 - DNA, 15 bp, Homo sapiens
cttggtagccatgaa

SEQ ID NO: 9718 - DNA, 15 bp, Homo sapiens
acttggtagccatga

SEQ ID NO: 9719 - DNA, 15 bp, Homo sapiens
cacttggtagccatg

SEQ ID NO: 9720 - DNA, 15 bp, Homo sapiens
gcacttggtagccat

SEQ ID NO: 9721 - DNA, 15 bp, Homo sapiens
ggcacttggtagcca

SEQ ID NO: 9722 - DNA, 15 bp, Homo sapiens
tggcacttggtagcc

SEQ ID NO: 9723 - DNA, 15 bp, Homo sapiens
ctggcacttggtagc

SEQ ID NO: 9724 - DNA, 15 bp, Homo sapiens
gctggcacttggtag

SEQ ID NO: 9725 - DNA, 15 bp, Homo sapiens
tgctggcacttggta

SEQ ID NO: 9726 - DNA, 15 bp, Homo sapiens
ctgctggcacttggt

SEQ ID NO: 9727 - DNA, 15 bp, Homo sapiens
cctgctggcacttgg

SEQ ID NO: 9728 - DNA, 15 bp, Homo sapiens
ccctgctggcacttg

SEQ ID NO: 9729 - DNA, 15 bp, Homo sapiens
gccctgctggcactt

SEQ ID NO: 9730 - DNA, 15 bp, Homo sapiens
ggccctgctggcact

SEQ ID NO: 9731 - DNA, 15 bp, Homo sapiens
cggccctgctggcac

SEQ ID NO: 9732 - DNA, 15 bp, Homo sapiens
tcggccctgctggca

SEQ ID NO: 9733 - DNA, 15 bp, Homo sapiens
ttcggccctgctggc

SEQ ID NO: 9734 - DNA, 15 bp, Homo sapiens
attcggccctgctgg

SEQ ID NO: 9735 - DNA, 15 bp, Homo sapiens
aattcggccctgctg

SEQ ID NO: 9736 - DNA, 15 bp, Homo sapiens
aaattcggccctgct

SEQ ID NO: 9737 - DNA, 15 bp, Homo sapiens
aaaattcggccctgc

SEQ ID NO: 9738 - DNA, 15 bp, Homo sapiens
gaaaattcggccctg

SEQ ID NO: 9739 - DNA, 15 bp, Homo sapiens
tgaaaattcggccct

SEQ ID NO: 9740 - DNA, 15 bp, Homo sapiens
gtgaaaattcggccc

SEQ ID NO: 9741 - DNA, 15 bp, Homo sapiens
ggtgaaaattcggcc

SEQ ID NO: 9742 - DNA, 15 bp, Homo sapiens
aggtgaaaattcggc

SEQ ID NO: 9743 - DNA, 15 bp, Homo sapiens
caggtgaaaattcgg

SEQ ID NO: 9744 - DNA, 15 bp, Homo sapiens
acaggtgaaaattcg

SEQ ID NO: 9745 - DNA, 15 bp, Homo sapiens
cacaggtgaaaattc

SEQ ID NO: 9746 - DNA, 15 bp, Homo sapiens
acacaggtgaaaatt

SEQ ID NO: 9747 - DNA, 15 bp, Homo sapiens
cacacaggtgaaaat

SEQ ID NO: 9748 - DNA, 15 bp, Homo sapiens
acacacaggtgaaaa

SEQ ID NO: 9749 - DNA, 15 bp, Homo sapiens
gacacacaggtgaaa

SEQ ID NO: 9750 - DNA, 15 bp, Homo sapiens
ggacacacaggtgaa

SEQ ID NO: 9751 - DNA, 15 bp, Homo sapiens
aggacacacaggtga

SEQ ID NO: 9752 - DNA, 15 bp, Homo sapiens
gaggacacacaggtg

SEQ ID NO: 9753 - DNA, 15 bp, Homo sapiens
ggaggacacacaggt

SEQ ID NO: 9754 - DNA, 15 bp, Homo sapiens
gggaggacacacagg

SEQ ID NO: 9755 - DNA, 15 bp, Homo sapiens
agggaggacacacag

SEQ ID NO: 9756 - DNA, 15 bp, Homo sapiens
aagggaggacacaca

SEQ ID NO: 9757 - DNA, 15 bp, Homo sapiens
gaagggaggacacac

SEQ ID NO: 9758 - DNA, 15 bp, Homo sapiens
ggaagggaggacaca

SEQ ID NO: 9759 - DNA, 15 bp, Homo sapiens
tggaagggaggacac

SEQ ID NO: 9760 - DNA, 15 bp, Homo sapiens
atggaagggaggaca

SEQ ID NO: 9761 - DNA, 15 bp, Homo sapiens
aatggaagggaggac

SEQ ID NO: 9762 - DNA, 15 bp, Homo sapiens
aaatggaagggagga

SEQ ID NO: 9763 - DNA, 15 bp, Homo sapiens
aaaatggaagggagg

SEQ ID NO: 9764 - DNA, 15 bp, Homo sapiens
aaaaatggaagggag

SEQ ID NO: 9765 - DNA, 15 bp, Homo sapiens
gaaaaatggaaggga

SEQ ID NO: 9766 - DNA, 15 bp, Homo sapiens
tgaaaaatggaaggg

SEQ ID NO: 9767 - DNA, 15 bp, Homo sapiens
atgaaaaatggaagg

SEQ ID NO: 9768 - DNA, 15 bp, Homo sapiens
gatgaaaaatggaag

SEQ ID NO: 9769 - DNA, 15 bp, Homo sapiens
agatgaaaaatggaa

SEQ ID NO: 9770 - DNA, 15 bp, Homo sapiens
aagatgaaaaatgga

SEQ ID NO: 9771 - DNA, 15 bp, Homo sapiens
gaagatgaaaaatgg

SEQ ID NO: 9772 - DNA, 15 bp, Homo sapiens
agaagatgaaaaatg

SEQ ID NO: 9773 - DNA, 15 bp, Homo sapiens
cagaagatgaaaaat

SEQ ID NO: 9774 - DNA, 15 bp, Homo sapiens
gcagaagatgaaaaa

SEQ ID NO: 9775 - DNA, 15 bp, Homo sapiens
ggcagaagatgaaaa

SEQ ID NO: 9776 - DNA, 15 bp, Homo sapiens
gggcagaagatgaaa

SEQ ID NO: 9777 - DNA, 15 bp, Homo sapiens
ggggcagaagatgaa

SEQ ID NO: 9778 - DNA, 15 bp, Homo sapiens
gggggcagaagatga

SEQ ID NO: 9779 - DNA, 15 bp, Homo sapiens
agggggcagaagatg

SEQ ID NO: 9780 - DNA, 15 bp, Homo sapiens
gagggggcagaagat

SEQ ID NO: 9781 - DNA, 15 bp, Homo sapiens
ggagggggcagaaga

SEQ ID NO: 9782 - DNA, 15 bp, Homo sapiens
gggagggggcagaag

SEQ ID NO: 9783 - DNA, 15 bp, Homo sapiens
ggggagggggcagaa

SEQ ID NO: 9784 - DNA, 15 bp, Homo sapiens
tggggagggggcaga

SEQ ID NO: 9785 - DNA, 15 bp, Homo sapiens
ctggggagggggcag

SEQ ID NO: 9786 - DNA, 15 bp, Homo sapiens
gctggggagggggca

SEQ ID NO: 9787 - DNA, 15 bp, Homo sapiens
agctggggagggggc

SEQ ID NO: 9788 - DNA, 15 bp, Homo sapiens
aagctggggaggggg

SEQ ID NO: 9789 - DNA, 15 bp, Homo sapiens
aaagctggggagggg

SEQ ID NO: 9790 - DNA, 15 bp, Homo sapiens
taaagctggggaggg

SEQ ID NO: 9791 - DNA, 15 bp, Homo sapiens
ttaaagctggggagg

SEQ ID NO: 9792 - DNA, 15 bp, Homo sapiens
gttaaagctggggag

SEQ ID NO: 9793 - DNA, 15 bp, Homo sapiens
agttaaagctgggga

SEQ ID NO: 9794 - DNA, 15 bp, Homo sapiens
aagttaaagctgggg

SEQ ID NO: 9795 - DNA, 15 bp, Homo sapiens
aaagttaaagctggg

SEQ ID NO: 9796 - DNA, 15 bp, Homo sapiens
taaagttaaagctgg

SEQ ID NO: 9797 - DNA, 15 bp, Homo sapiens
ttaaagttaaagctg

SEQ ID NO: 9798 - DNA, 15 bp, Homo sapiens
attaaagttaaagct

SEQ ID NO: 9799 - DNA, 15 bp, Homo sapiens
tattaaagttaaagc

SEQ ID NO: 9800 - DNA, 15 bp, Homo sapiens
atattaaagttaaag

SEQ ID NO: 9801 - DNA, 15 bp, Homo sapiens
tatattaaagttaaa

SEQ ID NO: 9802 - DNA, 15 bp, Homo sapiens
ttatattaaagttaa

SEQ ID NO: 9803 - DNA, 15 bp, Homo sapiens
gttatattaaagtta

SEQ ID NO: 9804 - DNA, 15 bp, Homo sapiens
agttatattaaagtt

SEQ ID NO: 9805 - DNA, 15 bp, Homo sapiens
tagttatattaaagt

SEQ ID NO: 9806 - DNA, 15 bp, Homo sapiens
gtagttatattaaag

SEQ ID NO: 9807 - DNA, 15 bp, Homo sapiens
agtagttatattaaa

SEQ ID NO: 9808 - DNA, 15 bp, Homo sapiens
aagtagttatattaa

SEQ ID NO: 9809 - DNA, 15 bp, Homo sapiens
caagtagttatatta

SEQ ID NO: 9810 - DNA, 15 bp, Homo sapiens
ccaagtagttatatt

SEQ ID NO: 9811 - DNA, 15 bp, Homo sapiens
cccaagtagttatat

SEQ ID NO: 9812 - DNA, 15 bp, Homo sapiens
tcccaagtagttata

SEQ ID NO: 9813 - DNA, 15 bp, Homo sapiens
gtcccaagtagttat

SEQ ID NO: 9814 - DNA, 15 bp, Homo sapiens
agtcccaagtagtta

SEQ ID NO: 9815 - DNA, 15 bp, Homo sapiens
tagtcccaagtagtt

SEQ ID NO: 9816 - DNA, 15 bp, Homo sapiens
atagtcccaagtagt

SEQ ID NO: 9817 - DNA, 15 bp, Homo sapiens
aatagtcccaagtag

SEQ ID NO: 9818 - DNA, 15 bp, Homo sapiens
gaatagtcccaagta

SEQ ID NO: 9819 - DNA, 15 bp, Homo sapiens
ggaatagtcccaagt

SEQ ID NO: 9820 - DNA, 15 bp, Homo sapiens
tggaatagtcccaag

SEQ ID NO: 9821 - DNA, 15 bp, Homo sapiens
ctggaatagtcccaa

SEQ ID NO: 9822 - DNA, 15 bp, Homo sapiens
gctggaatagtccca

SEQ ID NO: 9823 - DNA, 15 bp, Homo sapiens
tgctggaatagtccc

SEQ ID NO: 9824 - DNA, 15 bp, Homo sapiens
atgctggaatagtcc

SEQ ID NO: 9825 - DNA, 15 bp, Homo sapiens
aatgctggaatagtc

SEQ ID NO: 9826 - DNA, 15 bp, Homo sapiens
taatgctggaatagt

SEQ ID NO: 9827 - DNA, 15 bp, Homo sapiens
ttaatgctggaatag

SEQ ID NO: 9828 - DNA, 15 bp, Homo sapiens
tttaatgctggaata

SEQ ID NO: 9829 - DNA, 15 bp, Homo sapiens
atttaatgctggaat

SEQ ID NO: 9830 - DNA, 15 bp, Homo sapiens
tatttaatgctggaa

SEQ ID NO: 9831 - DNA, 15 bp, Homo sapiens
ttatttaatgctgga

SEQ ID NO: 9832 - DNA, 15 bp, Homo sapiens
cttatttaatgctgg

SEQ ID NO: 9833 - DNA, 15 bp, Homo sapiens
ccttatttaatgctg

SEQ ID NO: 9834 - DNA, 15 bp, Homo sapiens
cccttatttaatgct

SEQ ID NO: 9835 - DNA, 15 bp, Homo sapiens
acccttatttaatgc

SEQ ID NO: 9836 - DNA, 15 bp, Homo sapiens
tacccttatttaatg

SEQ ID NO: 9837 - DNA, 15 bp, Homo sapiens
ttacccttatttaat

SEQ ID NO: 9838 - DNA, 15 bp, Homo sapiens
gttacccttatttaa

SEQ ID NO: 9839 - DNA, 15 bp, Homo sapiens
agttacccttattta

SEQ ID NO: 9840 - DNA, 15 bp, Homo sapiens
cagttacccttattt

SEQ ID NO: 9841 - DNA, 15 bp, Homo sapiens
gcagttacccttatt

SEQ ID NO: 9842 - DNA, 15 bp, Homo sapiens
agcagttacccttat

SEQ ID NO: 9843 - DNA, 15 bp, Homo sapiens
cagcagttaccctta

SEQ ID NO: 9844 - DNA, 15 bp, Homo sapiens
ccagcagttaccctt

SEQ ID NO: 9845 - DNA, 15 bp, Homo sapiens
tccagcagttaccct

SEQ ID NO: 9846 - DNA, 15 bp, Homo sapiens
atccagcagttaccc

SEQ ID NO: 9847 - DNA, 15 bp, Homo sapiens
catccagcagttacc

SEQ ID NO: 9848 - DNA, 15 bp, Homo sapiens
ccatccagcagttac

SEQ ID NO: 9849 - DNA, 15 bp, Homo sapiens
cccatccagcagtta

SEQ ID NO: 9850 - DNA, 15 bp, Homo sapiens
acccatccagcagtt

SEQ ID NO: 9851 - DNA, 15 bp, Homo sapiens
cacccatccagcagt

SEQ ID NO: 9852 - DNA, 15 bp, Homo sapiens
ccacccatccagcag

SEQ ID NO: 9853 - DNA, 15 bp, Homo sapiens
gccacccatccagca

SEQ ID NO: 9854 - DNA, 15 bp, Homo sapiens
agccacccatccagc

SEQ ID NO: 9855 - DNA, 15 bp, Homo sapiens
cagccacccatccag

SEQ ID NO: 9856 - DNA, 15 bp, Homo sapiens
ccagccacccatcca

SEQ ID NO: 9857 - DNA, 15 bp, Homo sapiens
cccagccacccatcc

SEQ ID NO: 9858 - DNA, 15 bp, Homo sapiens
tcccagccacccatc

SEQ ID NO: 9859 - DNA, 15 bp, Homo sapiens
atcccagccacccat

SEQ ID NO: 9860 - DNA, 15 bp, Homo sapiens
tatcccagccaccca

SEQ ID NO: 9861 - DNA, 15 bp, Homo sapiens
gtatcccagccaccc

SEQ ID NO: 9862 - DNA, 15 bp, Homo sapiens
tgtatcccagccacc

SEQ ID NO: 9863 - DNA, 15 bp, Homo sapiens
gtgtatcccagccac

SEQ ID NO: 9864 - DNA, 15 bp, Homo sapiens
tgtgtatcccagcca

SEQ ID NO: 9865 - DNA, 15 bp, Homo sapiens
ctgtgtatcccagcc

SEQ ID NO: 9866 - DNA, 15 bp, Homo sapiens
tctgtgtatcccagc

SEQ ID NO: 9867 - DNA, 15 bp, Homo sapiens
ttctgtgtatcccag

SEQ ID NO: 9868 - DNA, 15 bp, Homo sapiens
attctgtgtatccca

SEQ ID NO: 9869 - DNA, 15 bp, Homo sapiens
cattctgtgtatccc

SEQ ID NO: 9870 - DNA, 15 bp, Homo sapiens
acattctgtgtatcc

SEQ ID NO: 9871 - DNA, 15 bp, Homo sapiens
tacattctgtgtatc

SEQ ID NO: 9872 - DNA, 15 bp, Homo sapiens
ctacattctgtgtat

SEQ ID NO: 9873 - DNA, 15 bp, Homo sapiens
actacattctgtgta

SEQ ID NO: 9874 - DNA, 15 bp, Homo sapiens
tactacattctgtgt

SEQ ID NO: 9875 - DNA, 15 bp, Homo sapiens
atactacattctgtg

SEQ ID NO: 9876 - DNA, 15 bp, Homo sapiens
gatactacattctgt

SEQ ID NO: 9877 - DNA, 15 bp, Homo sapiens
ggatactacattctg

SEQ ID NO: 9878 - DNA, 15 bp, Homo sapiens
gggatactacattct

SEQ ID NO: 9879 - DNA, 15 bp, Homo sapiens
agggatactacattc

SEQ ID NO: 9880 - DNA, 15 bp, Homo sapiens
aagggatactacatt

SEQ ID NO: 9881 - DNA, 15 bp, Homo sapiens
caagggatactacat

SEQ ID NO: 9882 - DNA, 15 bp, Homo sapiens
acaagggatactaca

SEQ ID NO: 9883 - DNA, 15 bp, Homo sapiens
aacaagggatactac

SEQ ID NO: 9884 - DNA, 15 bp, Homo sapiens
gaacaagggatacta

SEQ ID NO: 9885 - DNA, 15 bp, Homo sapiens
tgaacaagggatact

SEQ ID NO: 9886 - DNA, 15 bp, Homo sapiens
gtgaacaagggatac

SEQ ID NO: 9887 - DNA, 15 bp, Homo sapiens
cgtgaacaagggata

SEQ ID NO: 9888 - DNA, 15 bp, Homo sapiens
tcgtgaacaagggat

SEQ ID NO: 9889 - DNA, 15 bp, Homo sapiens
ctcgtgaacaaggga

SEQ ID NO: 9890 - DNA, 15 bp, Homo sapiens
tctcgtgaacaaggg

SEQ ID NO: 9891 - DNA, 15 bp, Homo sapiens
ttctcgtgaacaagg

SEQ ID NO: 9892 - DNA, 15 bp, Homo sapiens
cttctcgtgaacaag

SEQ ID NO: 9893 - DNA, 15 bp, Homo sapiens
tcttctcgtgaacaa

SEQ ID NO: 9894 - DNA, 15 bp, Homo sapiens
gtcttctcgtgaaca

SEQ ID NO: 9895 - DNA, 15 bp, Homo sapiens
ggtcttctcgtgaac

SEQ ID NO: 9896 - DNA, 15 bp, Homo sapiens
aggtcttctcgtgaa

SEQ ID NO: 9897 - DNA, 15 bp, Homo sapiens
aaggtcttctcgtga

SEQ ID NO: 9898 - DNA, 15 bp, Homo sapiens
gaaggtcttctcgtg

SEQ ID NO: 9899 - DNA, 15 bp, Homo sapiens
agaaggtcttctcgt

SEQ ID NO: 9900 - DNA, 15 bp, Homo sapiens
aagaaggtcttctcg

SEQ ID NO: 9901 - DNA, 15 bp, Homo sapiens
caagaaggtcttctc

SEQ ID NO: 9902 - DNA, 15 bp, Homo sapiens
gcaagaaggtcttct

SEQ ID NO: 9903 - DNA, 15 bp, Homo sapiens
ggcaagaaggtcttc

SEQ ID NO: 9904 - DNA, 15 bp, Homo sapiens
gggcaagaaggtctt

SEQ ID NO: 9905 - DNA, 15 bp, Homo sapiens
agggcaagaaggtct

SEQ ID NO: 9906 - DNA, 15 bp, Homo sapiens
tagggcaagaaggtc

SEQ ID NO: 9907 - DNA, 15 bp, Homo sapiens
ctagggcaagaaggt

SEQ ID NO: 9908 - DNA, 15 bp, Homo sapiens
gctagggcaagaagg

SEQ ID NO: 9909 - DNA, 15 bp, Homo sapiens
tgctagggcaagaag

SEQ ID NO: 9910 - DNA, 15 bp, Homo sapiens
atgctagggcaagaa

SEQ ID NO: 9911 - DNA, 15 bp, Homo sapiens
catgctagggcaaga

SEQ ID NO: 9912 - DNA, 15 bp, Homo sapiens
ccatgctagggcaag

SEQ ID NO: 9913 - DNA, 15 bp, Homo sapiens
gccatgctagggcaa

SEQ ID NO: 9914 - DNA, 15 bp, Homo sapiens
tgccatgctagggca

SEQ ID NO: 9915 - DNA, 15 bp, Homo sapiens
ttgccatgctagggc

SEQ ID NO: 9916 - DNA, 15 bp, Homo sapiens
tttgccatgctaggg

SEQ ID NO: 9917 - DNA, 15 bp, Homo sapiens
gtttgccatgctagg

SEQ ID NO: 9918 - DNA, 15 bp, Homo sapiens
tgtttgccatgctag

SEQ ID NO: 9919 - DNA, 15 bp, Homo sapiens
ctgtttgccatgcta

SEQ ID NO: 9920 - DNA, 15 bp, Homo sapiens
actgtttgccatgct

SEQ ID NO: 9921 - DNA, 15 bp, Homo sapiens
gactgtttgccatgc

SEQ ID NO: 9922 - DNA, 15 bp, Homo sapiens
ggactgtttgccatg

SEQ ID NO: 9923 - DNA, 15 bp, Homo sapiens
aggactgtttgccat

SEQ ID NO: 9924 - DNA, 15 bp, Homo sapiens
gaggactgtttgcca

SEQ ID NO: 9925 - DNA, 15 bp, Homo sapiens
ggaggactgtttgcc

SEQ ID NO: 9926 - DNA, 15 bp, Homo sapiens
tggaggactgtttgc

SEQ ID NO: 9927 - DNA, 15 bp, Homo sapiens
ttggaggactgtttg

SEQ ID NO: 9928 - DNA, 15 bp, Homo sapiens
cttggaggactgttt

SEQ ID NO: 9929 - DNA, 15 bp, Homo sapiens
ccttggaggactgtt

SEQ ID NO: 9930 - DNA, 15 bp, Homo sapiens
tccttggaggactgt

SEQ ID NO: 9931 - DNA, 15 bp, Homo sapiens
ctccttggaggactg

SEQ ID NO: 9932 - DNA, 15 bp, Homo sapiens
cctccttggaggact

SEQ ID NO: 9933 - DNA, 15 bp, Homo sapiens
gcctccttggaggac

SEQ ID NO: 9934 - DNA, 15 bp, Homo sapiens
tgcctccttggagga

SEQ ID NO: 9935 - DNA, 15 bp, Homo sapiens
gtgcctccttggagg

SEQ ID NO: 9936 - DNA, 15 bp, Homo sapiens
ggtgcctccttggag

SEQ ID NO: 9937 - DNA, 15 bp, Homo sapiens
aggtgcctccttgga

SEQ ID NO: 9938 - DNA, 15 bp, Homo sapiens
caggtgcctccttgg

SEQ ID NO: 9939 - DNA, 15 bp, Homo sapiens
acaggtgcctccttg

SEQ ID NO: 9940 - DNA, 15 bp, Homo sapiens
cacaggtgcctcctt

SEQ ID NO: 9941 - DNA, 15 bp, Homo sapiens
tcacaggtgcctcct

SEQ ID NO: 9942 - DNA, 15 bp, Homo sapiens
gtcacaggtgcctcc

SEQ ID NO: 9943 - DNA, 15 bp, Homo sapiens
tgtcacaggtgcctc

SEQ ID NO: 9944 - DNA, 15 bp, Homo sapiens
gtgtcacaggtgcct

SEQ ID NO: 9945 - DNA, 15 bp, Homo sapiens
ggtgtcacaggtgcc

SEQ ID NO: 9946 - DNA, 15 bp, Homo sapiens
gggtgtcacaggtgc

SEQ ID NO: 9947 - DNA, 15 bp, Homo sapiens
tgggtgtcacaggtg

SEQ ID NO: 9948 - DNA, 15 bp, Homo sapiens
ttgggtgtcacaggt

SEQ ID NO: 9949 - DNA, 15 bp, Homo sapiens
gttgggtgtcacagg

SEQ ID NO: 9950 - DNA, 15 bp, Homo sapiens
cgttgggtgtcacag

SEQ ID NO: 9951 - DNA, 15 bp, Homo sapiens
ccgttgggtgtcaca

SEQ ID NO: 9952 - DNA, 15 bp, Homo sapiens
tccgttgggtgtcac

SEQ ID NO: 9953 - DNA, 15 bp, Homo sapiens
ctccgttgggtgtca

SEQ ID NO: 9954 - DNA, 15 bp, Homo sapiens
actccgttgggtgtc

SEQ ID NO: 9955 - DNA, 15 bp, Homo sapiens
tactccgttgggtgt

SEQ ID NO: 9956 - DNA, 15 bp, Homo sapiens
ctactccgttgggtg

SEQ ID NO: 9957 - DNA, 15 bp, Homo sapiens
cctactccgttgggt

SEQ ID NO: 9958 - DNA, 15 bp, Homo sapiens
ccctactccgttggg

SEQ ID NO: 9959 - DNA, 15 bp, Homo sapiens
cccctactccgttgg

SEQ ID NO: 9960 - DNA, 15 bp, Homo sapiens
ccccctactccgttg

SEQ ID NO: 9961 - DNA, 15 bp, Homo sapiens
cccccctactccgtt

SEQ ID NO: 9962 - DNA, 15 bp, Homo sapiens
gcccccctactccgt

SEQ ID NO: 9963 - DNA, 15 bp, Homo sapiens
cgcccccctactccg

SEQ ID NO: 9964 - DNA, 15 bp, Homo sapiens
ccgcccccctactcc

SEQ ID NO: 9965 - DNA, 15 bp, Homo sapiens
accgcccccctactc

SEQ ID NO: 9966 - DNA, 15 bp, Homo sapiens
caccgcccccctact

SEQ ID NO: 9967 - DNA, 15 bp, Homo sapiens
acaccgcccccctac

SEQ ID NO: 9968 - DNA, 15 bp, Homo sapiens
cacaccgccccccta

SEQ ID NO: 9969 - DNA, 15 bp, Homo sapiens
acacaccgcccccct

SEQ ID NO: 9970 - DNA, 15 bp, Homo sapiens
aacacaccgcccccc

SEQ ID NO: 9971 - DNA, 15 bp, Homo sapiens
gaacacaccgccccc

SEQ ID NO: 9972 - DNA, 15 bp, Homo sapiens
tgaacacaccgcccc

SEQ ID NO: 9973 - DNA, 15 bp, Homo sapiens
ctgaacacaccgccc

SEQ ID NO: 9974 - DNA, 15 bp, Homo sapiens
cctgaacacaccgcc

SEQ ID NO: 9975 - DNA, 15 bp, Homo sapiens
acctgaacacaccgc

SEQ ID NO: 9976 - DNA, 15 bp, Homo sapiens
cacctgaacacaccg

SEQ ID NO: 9977 - DNA, 15 bp, Homo sapiens
gcacctgaacacacc

SEQ ID NO: 9978 - DNA, 15 bp, Homo sapiens
tgcacctgaacacac

SEQ ID NO: 9979 - DNA, 15 bp, Homo sapiens
ctgcacctgaacaca

SEQ ID NO: 9980 - DNA, 15 bp, Homo sapiens
cctgcacctgaacac

SEQ ID NO: 9981 - DNA, 15 bp, Homo sapiens
acctgcacctgaaca

SEQ ID NO: 9982 - DNA, 15 bp, Homo sapiens
cacctgcacctgaac

SEQ ID NO: 9983 - DNA, 15 bp, Homo sapiens
ccacctgcacctgaa

SEQ ID NO: 9984 - DNA, 15 bp, Homo sapiens
tccacctgcacctga

SEQ ID NO: 9985 - DNA, 15 bp, Homo sapiens
ttccacctgcacctg

SEQ ID NO: 9986 - DNA, 15 bp, Homo sapiens
gttccacctgcacct

SEQ ID NO: 9987 - DNA, 15 bp, Homo sapiens
tgttccacctgcacc

SEQ ID NO: 9988 - DNA, 15 bp, Homo sapiens
ttgttccacctgcac

SEQ ID NO: 9989 - DNA, 15 bp, Homo sapiens
cttgttccacctgca

SEQ ID NO: 9990 - DNA, 15 bp, Homo sapiens
ccttgttccacctgc

SEQ ID NO: 9991 - DNA, 15 bp, Homo sapiens
gccttgttccacctg

SEQ ID NO: 9992 - DNA, 15 bp, Homo sapiens
ggccttgttccacct

SEQ ID NO: 9993 - DNA, 15 bp, Homo sapiens
tggccttgttccacc

SEQ ID NO: 9994 - DNA, 15 bp, Homo sapiens
ctggccttgttccac

SEQ ID NO: 9995 - DNA, 15 bp, Homo sapiens
tctggccttgttcca

SEQ ID NO: 9996 - DNA, 15 bp, Homo sapiens
ttctggccttgttcc

SEQ ID NO: 9997 - DNA, 15 bp, Homo sapiens
cttctggccttgttc

SEQ ID NO: 9998 - DNA, 15 bp, Homo sapiens
acttctggccttgtt

SEQ ID NO: 9999 - DNA, 15 bp, Homo sapiens
cacttctggccttgt

SEQ ID NO: 10000 - DNA, 15 bp, Homo sapiens
acacttctggccttg

SEQ ID NO: 10001 - DNA, 15 bp, Homo sapiens
cacacttctggcctt

SEQ ID NO: 10002 - DNA, 15 bp, Homo sapiens
gcacacttctggcct

SEQ ID NO: 10003 - DNA, 15 bp, Homo sapiens
tgcacacttctggcc

SEQ ID NO: 10004 - DNA, 15 bp, Homo sapiens
atgcacacttctggc

SEQ ID NO: 10005 - DNA, 15 bp, Homo sapiens
tatgcacacttctgg

SEQ ID NO: 10006 - DNA, 15 bp, Homo sapiens
atatgcacacttctg

SEQ ID NO: 10007 - DNA, 15 bp, Homo sapiens
catatgcacacttct

SEQ ID NO: 10008 - DNA, 15 bp, Homo sapiens
acatatgcacacttc

SEQ ID NO: 10009 - DNA, 15 bp, Homo sapiens
cacatatgcacactt

SEQ ID NO: 10010 - DNA, 15 bp, Homo sapiens
gcacatatgcacact

SEQ ID NO: 10011 - DNA, 15 bp, Homo sapiens
agcacatatgcacac

SEQ ID NO: 10012 - DNA, 15 bp, Homo sapiens
cagcacatatgcaca

SEQ ID NO: 10013 - DNA, 15 bp, Homo sapiens
tcagcacatatgcac

SEQ ID NO: 10014 - DNA, 15 bp, Homo sapiens
gtcagcacatatgca

SEQ ID NO: 10015 - DNA, 15 bp, Homo sapiens
ggtcagcacatatgc

SEQ ID NO: 10016 - DNA, 15 bp, Homo sapiens
tggtcagcacatatg

SEQ ID NO: 10017 - DNA, 15 bp, Homo sapiens
atggtcagcacatat

SEQ ID NO: 10018 - DNA, 15 bp, Homo sapiens
catggtcagcacata

SEQ ID NO: 10019 - DNA, 15 bp, Homo sapiens
ccatggtcagcacat

SEQ ID NO: 10020 - DNA, 15 bp, Homo sapiens
cccatggtcagcaca

SEQ ID NO: 10021 - DNA, 15 bp, Homo sapiens
tcccatggtcagcac

SEQ ID NO: 10022 - DNA, 15 bp, Homo sapiens
ctcccatggtcagca

SEQ ID NO: 10023 - DNA, 15 bp, Homo sapiens
gctcccatggtcagc

SEQ ID NO: 10024 - DNA, 15 bp, Homo sapiens
agctcccatggtcag

SEQ ID NO: 10025 - DNA, 15 bp, Homo sapiens
aagctcccatggtca

SEQ ID NO: 10026 - DNA, 15 bp, Homo sapiens
caagctcccatggtc

SEQ ID NO: 10027 - DNA, 15 bp, Homo sapiens
acaagctcccatggt

SEQ ID NO: 10028 - DNA, 15 bp, Homo sapiens
aacaagctcccatgg

SEQ ID NO: 10029 - DNA, 15 bp, Homo sapiens
aaacaagctcccatg

SEQ ID NO: 10030 - DNA, 15 bp, Homo sapiens
caaacaagctcccat

SEQ ID NO: 10031 - DNA, 15 bp, Homo sapiens
acaaacaagctccca

SEQ ID NO: 10032 - DNA, 15 bp, Homo sapiens
gacaaacaagctccc

SEQ ID NO: 10033 - DNA, 15 bp, Homo sapiens
cgacaaacaagctcc

SEQ ID NO: 10034 - DNA, 15 bp, Homo sapiens
ccgacaaacaagctc

SEQ ID NO: 10035 - DNA, 15 bp, Homo sapiens
accgacaaacaagct

SEQ ID NO: 10036 - DNA, 15 bp, Homo sapiens
aaccgacaaacaagc

SEQ ID NO: 10037 - DNA, 15 bp, Homo sapiens
aaaccgacaaacaag

SEQ ID NO: 10038 - DNA, 15 bp, Homo sapiens
gaaaccgacaaacaa

SEQ ID NO: 10039 - DNA, 15 bp, Homo sapiens
tgaaaccgacaaaca

SEQ ID NO: 10040 - DNA, 15 bp, Homo sapiens
gtgaaaccgacaaac

SEQ ID NO: 10041 - DNA, 15 bp, Homo sapiens
tgtgaaaccgacaaa

SEQ ID NO: 10042 - DNA, 15 bp, Homo sapiens
ctgtgaaaccgacaa

SEQ ID NO: 10043 - DNA, 15 bp, Homo sapiens
actgtgaaaccgaca

SEQ ID NO: 10044 - DNA, 15 bp, Homo sapiens
aactgtgaaaccgac

SEQ ID NO: 10045 - DNA, 15 bp, Homo sapiens
caactgtgaaaccga

SEQ ID NO: 10046 - DNA, 15 bp, Homo sapiens
tcaactgtgaaaccg

SEQ ID NO: 10047 - DNA, 15 bp, Homo sapiens
atcaactgtgaaacc

SEQ ID NO: 10048 - DNA, 15 bp, Homo sapiens
catcaactgtgaaac

SEQ ID NO: 10049 - DNA, 15 bp, Homo sapiens
gcatcaactgtgaaa

SEQ ID NO: 10050 - DNA, 15 bp, Homo sapiens
ggcatcaactgtgaa

SEQ ID NO: 10051 - DNA, 15 bp, Homo sapiens
gggcatcaactgtga

SEQ ID NO: 10052 - DNA, 15 bp, Homo sapiens
agggcatcaactgtg

SEQ ID NO: 10053 - DNA, 15 bp, Homo sapiens
cagggcatcaactgt

SEQ ID NO: 10054 - DNA, 15 bp, Homo sapiens
tcagggcatcaactg

SEQ ID NO: 10055 - DNA, 15 bp, Homo sapiens
ctcagggcatcaact

SEQ ID NO: 10056 - DNA, 15 bp, Homo sapiens
gctcagggcatcaac

SEQ ID NO: 10057 - DNA, 15 bp, Homo sapiens
ggctcagggcatcaa

SEQ ID NO: 10058 - DNA, 15 bp, Homo sapiens
aggctcagggcatca

SEQ ID NO: 10059 - DNA, 15 bp, Homo sapiens
caggctcagggcatc

SEQ ID NO: 10060 - DNA, 15 bp, Homo sapiens
gcaggctcagggcat

SEQ ID NO: 10061 - DNA, 15 bp, Homo sapiens
ggcaggctcagggca

SEQ ID NO: 10062 - DNA, 15 bp, Homo sapiens
tggcaggctcagggc

SEQ ID NO: 10063 - DNA, 15 bp, Homo sapiens
atggcaggctcaggg

SEQ ID NO: 10064 - DNA, 15 bp, Homo sapiens
tatggcaggctcagg

SEQ ID NO: 10065 - DNA, 15 bp, Homo sapiens
ctatggcaggctcag

SEQ ID NO: 10066 - DNA, 15 bp, Homo sapiens
gctatggcaggctca

SEQ ID NO: 10067 - DNA, 15 bp, Homo sapiens
tgctatggcaggctc

SEQ ID NO: 10068 - DNA, 15 bp, Homo sapiens
ctgctatggcaggct

SEQ ID NO: 10069 - DNA, 15 bp, Homo sapiens
tctgctatggcaggc

SEQ ID NO: 10070 - DNA, 15 bp, Homo sapiens
gtctgctatggcagg

SEQ ID NO: 10071 - DNA, 15 bp, Homo sapiens
agtctgctatggcag

SEQ ID NO: 10072 - DNA, 15 bp, Homo sapiens
aagtctgctatggca

SEQ ID NO: 10073 - DNA, 15 bp, Homo sapiens
caagtctgctatggc

SEQ ID NO: 10074 - DNA, 15 bp, Homo sapiens
acaagtctgctatgg

SEQ ID NO: 10075 - DNA, 15 bp, Homo sapiens
aacaagtctgctatg

SEQ ID NO: 10076 - DNA, 15 bp, Homo sapiens
aaacaagtctgctat

SEQ ID NO: 10077 - DNA, 15 bp, Homo sapiens
gaaacaagtctgcta

SEQ ID NO: 10078 - DNA, 15 bp, Homo sapiens
agaaacaagtctgct

SEQ ID NO: 10079 - DNA, 15 bp, Homo sapiens
gagaaacaagtctgc

SEQ ID NO: 10080 - DNA, 15 bp, Homo sapiens
ggagaaacaagtctg

SEQ ID NO: 10081 - DNA, 15 bp, Homo sapiens
tggagaaacaagtct

SEQ ID NO: 10082 - DNA, 15 bp, Homo sapiens
atggagaaacaagtc

SEQ ID NO: 10083 - DNA, 15 bp, Homo sapiens
catggagaaacaagt

SEQ ID NO: 10084 - DNA, 15 bp, Homo sapiens
ccatggagaaacaag

SEQ ID NO: 10085 - DNA, 15 bp, Homo sapiens
cccatggagaaacaa

SEQ ID NO: 10086 - DNA, 15 bp, Homo sapiens
tcccatggagaaaca

SEQ ID NO: 10087 - DNA, 15 bp, Homo sapiens
atcccatggagaaac

SEQ ID NO: 10088 - DNA, 15 bp, Homo sapiens
catcccatggagaaa

SEQ ID NO: 10089 - DNA, 15 bp, Homo sapiens
gcatcccatggagaa

SEQ ID NO: 10090 - DNA, 15 bp, Homo sapiens
agcatcccatggaga

SEQ ID NO: 10091 - DNA, 15 bp, Homo sapiens
cagcatcccatggag

SEQ ID NO: 10092 - DNA, 15 bp, Homo sapiens
acagcatcccatgga

SEQ ID NO: 10093 - DNA, 15 bp, Homo sapiens
aacagcatcccatgg

SEQ ID NO: 10094 - DNA, 15 bp, Homo sapiens
aaacagcatcccatg

SEQ ID NO: 10095 - DNA, 15 bp, Homo sapiens
aaaacagcatcccat

SEQ ID NO: 10096 - DNA, 15 bp, Homo sapiens
gaaaacagcatccca

SEQ ID NO: 10097 - DNA, 15 bp, Homo sapiens
agaaaacagcatccc

SEQ ID NO: 10098 - DNA, 15 bp, Homo sapiens
aagaaaacagcatcc

SEQ ID NO: 10099 - DNA, 15 bp, Homo sapiens
aaagaaaacagcatc

SEQ ID NO: 10100 - DNA, 15 bp, Homo sapiens
gaaagaaaacagcat

SEQ ID NO: 10101 - DNA, 15 bp, Homo sapiens
ggaaagaaaacagca

SEQ ID NO: 10102 - DNA, 15 bp, Homo sapiens
tggaaagaaaacagc

SEQ ID NO: 10103 - DNA, 15 bp, Homo sapiens
ctggaaagaaaacag

SEQ ID NO: 10104 - DNA, 15 bp, Homo sapiens
tctggaaagaaaaca

SEQ ID NO: 10105 - DNA, 15 bp, Homo sapiens
ctctggaaagaaaac

SEQ ID NO: 10106 - DNA, 15 bp, Homo sapiens
tctctggaaagaaaa

SEQ ID NO: 10107 - DNA, 15 bp, Homo sapiens
gtctctggaaagaaa

SEQ ID NO: 10108 - DNA, 15 bp, Homo sapiens
tgtctctggaaagaa

SEQ ID NO: 10109 - DNA, 15 bp, Homo sapiens
gtgtctctggaaaga

SEQ ID NO: 10110 - DNA, 15 bp, Homo sapiens
tgtgtctctggaaag

SEQ ID NO: 10111 - DNA, 15 bp, Homo sapiens
ctgtgtctctggaaa

SEQ ID NO: 10112 - DNA, 15 bp, Homo sapiens
gctgtgtctctggaa

SEQ ID NO: 10113 - DNA, 15 bp, Homo sapiens
cgctgtgtctctgga

SEQ ID NO: 10114 - DNA, 15 bp, Homo sapiens
gcgctgtgtctctgg

SEQ ID NO: 10115 - DNA, 15 bp, Homo sapiens
agcgctgtgtctctg

SEQ ID NO: 10116 - DNA, 15 bp, Homo sapiens
tagcgctgtgtctct

SEQ ID NO: 10117 - DNA, 15 bp, Homo sapiens
ctagcgctgtgtctc

SEQ ID NO: 10118 - DNA, 15 bp, Homo sapiens
cctagcgctgtgtct

SEQ ID NO: 10119 - DNA, 15 bp, Homo sapiens
ccctagcgctgtgtc

SEQ ID NO: 10120 - DNA, 15 bp, Homo sapiens
accctagcgctgtgt

SEQ ID NO: 10121 - DNA, 15 bp, Homo sapiens
aaccctagcgctgtg

SEQ ID NO: 10122 - DNA, 15 bp, Homo sapiens
caaccctagcgctgt

SEQ ID NO: 10123 - DNA, 15 bp, Homo sapiens
acaaccctagcgctg

SEQ ID NO: 10124 - DNA, 15 bp, Homo sapiens
gacaaccctagcgct

SEQ ID NO: 10125 - DNA, 15 bp, Homo sapiens
ggacaaccctagcgc

SEQ ID NO: 10126 - DNA, 15 bp, Homo sapiens
aggacaaccctagcg

SEQ ID NO: 10127 - DNA, 15 bp, Homo sapiens
gaggacaaccctagc

SEQ ID NO: 10128 - DNA, 15 bp, Homo sapiens
tgaggacaaccctag

SEQ ID NO: 10129 - DNA, 15 bp, Homo sapiens
atgaggacaacccta

SEQ ID NO: 10130 - DNA, 15 bp, Homo sapiens
aatgaggacaaccct

SEQ ID NO: 10131 - DNA, 15 bp, Homo sapiens
taatgaggacaaccc

SEQ ID NO: 10132 - DNA, 15 bp, Homo sapiens
gtaatgaggacaacc

SEQ ID NO: 10133 - DNA, 15 bp, Homo sapiens
ggtaatgaggacaac

SEQ ID NO: 10134 - DNA, 15 bp, Homo sapiens
aggtaatgaggacaa

SEQ ID NO: 10135 - DNA, 15 bp, Homo sapiens
caggtaatgaggaca

SEQ ID NO: 10136 - DNA, 15 bp, Homo sapiens
tcaggtaatgaggac

SEQ ID NO: 10137 - DNA, 15 bp, Homo sapiens
ctcaggtaatgagga

SEQ ID NO: 10138 - DNA, 15 bp, Homo sapiens
tctcaggtaatgagg

SEQ ID NO: 10139 - DNA, 15 bp, Homo sapiens
ctctcaggtaatgag

SEQ ID NO: 10140 - DNA, 15 bp, Homo sapiens
gctctcaggtaatga

SEQ ID NO: 10141 - DNA, 15 bp, Homo sapiens
ggctctcaggtaatg

SEQ ID NO: 10142 - DNA, 15 bp, Homo sapiens
tggctctcaggtaat

SEQ ID NO: 10143 - DNA, 15 bp, Homo sapiens
ctggctctcaggtaa

SEQ ID NO: 10144 - DNA, 15 bp, Homo sapiens
cctggctctcaggta

SEQ ID NO: 10145 - DNA, 15 bp, Homo sapiens
acctggctctcaggt

SEQ ID NO: 10146 - DNA, 15 bp, Homo sapiens
cacctggctctcagg

SEQ ID NO: 10147 - DNA, 15 bp, Homo sapiens
acacctggctctcag

SEQ ID NO: 10148 - DNA, 15 bp, Homo sapiens
gacacctggctctca

SEQ ID NO: 10149 - DNA, 15 bp, Homo sapiens
cgacacctggctctc

SEQ ID NO: 10150 - DNA, 15 bp, Homo sapiens
ccgacacctggctct

SEQ ID NO: 10151 - DNA, 15 bp, Homo sapiens
accgacacctggctc

SEQ ID NO: 10152 - DNA, 15 bp, Homo sapiens
taccgacacctggct

SEQ ID NO: 10153 - DNA, 15 bp, Homo sapiens
ctaccgacacctggc

SEQ ID NO: 10154 - DNA, 15 bp, Homo sapiens
gctaccgacacctgg

SEQ ID NO: 10155 - DNA, 15 bp, Homo sapiens
tgctaccgacacctg

SEQ ID NO: 10156 - DNA, 15 bp, Homo sapiens
atgctaccgacacct

SEQ ID NO: 10157 - DNA, 15 bp, Homo sapiens
aatgctaccgacacc

SEQ ID NO: 10158 - DNA, 15 bp, Homo sapiens
aaatgctaccgacac

SEQ ID NO: 10159 - DNA, 15 bp, Homo sapiens
aaaatgctaccgaca

SEQ ID NO: 10160 - DNA, 15 bp, Homo sapiens
gaaaatgctaccgac

SEQ ID NO: 10161 - DNA, 15 bp, Homo sapiens
agaaaatgctaccga

SEQ ID NO: 10162 - DNA, 15 bp, Homo sapiens
aagaaaatgctaccg

SEQ ID NO: 10163 - DNA, 15 bp, Homo sapiens
caagaaaatgctacc

SEQ ID NO: 10164 - DNA, 15 bp, Homo sapiens
ccaagaaaatgctac

SEQ ID NO: 10165 - DNA, 15 bp, Homo sapiens
accaagaaaatgcta

SEQ ID NO: 10166 - DNA, 15 bp, Homo sapiens
caccaagaaaatgct

SEQ ID NO: 10167 - DNA, 15 bp, Homo sapiens
acaccaagaaaatgc

SEQ ID NO: 10168 - DNA, 15 bp, Homo sapiens
aacaccaagaaaatg

SEQ ID NO: 10169 - DNA, 15 bp, Homo sapiens
aaacaccaagaaaat

SEQ ID NO: 10170 - DNA, 15 bp, Homo sapiens
taaacaccaagaaaa

SEQ ID NO: 10171 - DNA, 15 bp, Homo sapiens
gtaaacaccaagaaa

SEQ ID NO: 10172 - DNA, 15 bp, Homo sapiens
agtaaacaccaagaa

SEQ ID NO: 10173 - DNA, 15 bp, Homo sapiens
gagtaaacaccaaga

SEQ ID NO: 10174 - DNA, 15 bp, Homo sapiens
tgagtaaacaccaag

SEQ ID NO: 10175 - DNA, 15 bp, Homo sapiens
gtgagtaaacaccaa

SEQ ID NO: 10176 - DNA, 15 bp, Homo sapiens
tgtgagtaaacacca

SEQ ID NO: 10177 - DNA, 15 bp, Homo sapiens
gtgtgagtaaacacc

SEQ ID NO: 10178 - DNA, 15 bp, Homo sapiens
agtgtgagtaaacac

SEQ ID NO: 10179 - DNA, 15 bp, Homo sapiens
gagtgtgagtaaaca

SEQ ID NO: 10180 - DNA, 15 bp, Homo sapiens
tgagtgtgagtaaac

SEQ ID NO: 10181 - DNA, 15 bp, Homo sapiens
atgagtgtgagtaaa

SEQ ID NO: 10182 - DNA, 15 bp, Homo sapiens
gatgagtgtgagtaa

SEQ ID NO: 10183 - DNA, 15 bp, Homo sapiens
agatgagtgtgagta

SEQ ID NO: 10184 - DNA, 15 bp, Homo sapiens
tagatgagtgtgagt

SEQ ID NO: 10185 - DNA, 15 bp, Homo sapiens
ttagatgagtgtgag

SEQ ID NO: 10186 - DNA, 15 bp, Homo sapiens
cttagatgagtgtga

SEQ ID NO: 10187 - DNA, 15 bp, Homo sapiens
ccttagatgagtgtg

SEQ ID NO: 10188 - DNA, 15 bp, Homo sapiens
gccttagatgagtgt

SEQ ID NO: 10189 - DNA, 15 bp, Homo sapiens
tgccttagatgagtg

SEQ ID NO: 10190 - DNA, 15 bp, Homo sapiens
gtgccttagatgagt

SEQ ID NO: 10191 - DNA, 15 bp, Homo sapiens
cgtgccttagatgag

SEQ ID NO: 10192 - DNA, 15 bp, Homo sapiens
acgtgccttagatga

SEQ ID NO: 10193 - DNA, 15 bp, Homo sapiens
aacgtgccttagatg

SEQ ID NO: 10194 - DNA, 15 bp, Homo sapiens
caacgtgccttagat

SEQ ID NO: 10195 - DNA, 15 bp, Homo sapiens
acaacgtgccttaga

SEQ ID NO: 10196 - DNA, 15 bp, Homo sapiens
cacaacgtgccttag

SEQ ID NO: 10197 - DNA, 15 bp, Homo sapiens
ccacaacgtgcctta

SEQ ID NO: 10198 - DNA, 15 bp, Homo sapiens
accacaacgtgcctt

SEQ ID NO: 10199 - DNA, 15 bp, Homo sapiens
aaccacaacgtgcct

SEQ ID NO: 10200 - DNA, 15 bp, Homo sapiens
aaaccacaacgtgcc

SEQ ID NO: 10201 - DNA, 15 bp, Homo sapiens
aaaaccacaacgtgc

SEQ ID NO: 10202 - DNA, 15 bp, Homo sapiens
gaaaaccacaacgtg

SEQ ID NO: 10203 - DNA, 15 bp, Homo sapiens
ggaaaaccacaacgt

SEQ ID NO: 10204 - DNA, 15 bp, Homo sapiens
tggaaaaccacaacg

SEQ ID NO: 10205 - DNA, 15 bp, Homo sapiens
ctggaaaaccacaac

SEQ ID NO: 10206 - DNA, 15 bp, Homo sapiens
tctggaaaaccacaa

SEQ ID NO: 10207 - DNA, 15 bp, Homo sapiens
atctggaaaaccaca

SEQ ID NO: 10208 - DNA, 15 bp, Homo sapiens
aatctggaaaaccac

SEQ ID NO: 10209 - DNA, 15 bp, Homo sapiens
taatctggaaaacca

SEQ ID NO: 10210 - DNA, 15 bp, Homo sapiens
ctaatctggaaaacc

SEQ ID NO: 10211 - DNA, 15 bp, Homo sapiens
cctaatctggaaaac

SEQ ID NO: 10212 - DNA, 15 bp, Homo sapiens
tcctaatctggaaaa

SEQ ID NO: 10213 - DNA, 15 bp, Homo sapiens
ttcctaatctggaaa

SEQ ID NO: 10214 - DNA, 15 bp, Homo sapiens
tttcctaatctggaa

SEQ ID NO: 10215 - DNA, 15 bp, Homo sapiens
gtttcctaatctgga

SEQ ID NO: 10216 - DNA, 15 bp, Homo sapiens
agtttcctaatctgg

SEQ ID NO: 10217 - DNA, 15 bp, Homo sapiens
cagtttcctaatctg

SEQ ID NO: 10218 - DNA, 15 bp, Homo sapiens
gcagtttcctaatct

SEQ ID NO: 10219 - DNA, 15 bp, Homo sapiens
agcagtttcctaatc

SEQ ID NO: 10220 - DNA, 15 bp, Homo sapiens
aagcagtttcctaat

SEQ ID NO: 10221 - DNA, 15 bp, Homo sapiens
aaagcagtttcctaa

SEQ ID NO: 10222 - DNA, 15 bp, Homo sapiens
taaagcagtttccta

SEQ ID NO: 10223 - DNA, 15 bp, Homo sapiens
ataaagcagtttcct

SEQ ID NO: 10224 - DNA, 15 bp, Homo sapiens
aataaagcagtttcc

SEQ ID NO: 10225 - DNA, 15 bp, Homo sapiens
caataaagcagtttc

SEQ ID NO: 10226 - DNA, 15 bp, Homo sapiens
tcaataaagcagttt

SEQ ID NO: 10227 - DNA, 15 bp, Homo sapiens
atcaataaagcagtt

SEQ ID NO: 10228 - DNA, 15 bp, Homo sapiens
catcaataaagcagt

SEQ ID NO: 10229 - DNA, 15 bp, Homo sapiens
ccatcaataaagcag

SEQ ID NO: 10230 - DNA, 15 bp, Homo sapiens
accatcaataaagca

SEQ ID NO: 10231 - DNA, 15 bp, Homo sapiens
caccatcaataaagc

SEQ ID NO: 10232 - DNA, 15 bp, Homo sapiens
gcaccatcaataaag

SEQ ID NO: 10233 - DNA, 15 bp, Homo sapiens
agcaccatcaataaa

SEQ ID NO: 10234 - DNA, 15 bp, Homo sapiens
aagcaccatcaataa

SEQ ID NO: 10235 - DNA, 15 bp, Homo sapiens
aaagcaccatcaata

SEQ ID NO: 10236 - DNA, 15 bp, Homo sapiens
aaaagcaccatcaat

SEQ ID NO: 10237 - DNA, 15 bp, Homo sapiens
aaaaagcaccatcaa

SEQ ID NO: 10238 - DNA, 15 bp, Homo sapiens
aaaaaagcaccatca

SEQ ID NO: 10239 - DNA, 15 bp, Homo sapiens
aaaaaaagcaccatc

SEQ ID NO: 10240 - DNA, 15 bp, Homo sapiens
aaaaaaaagcaccat

SEQ ID NO: 10241 - DNA, 15 bp, Homo sapiens
aaaaaaaaagcacca

SEQ ID NO: 10242 - DNA, 15 bp, Homo sapiens
aaaaaaaaaagcacc

SEQ ID NO: 10243 - DNA, 15 bp, Homo sapiens
aaaaaaaaaaagcac

SEQ ID NO: 10244 - DNA, 15 bp, Homo sapiens
tgtctcaaaaaaaaa

SEQ ID NO: 10245 - DNA, 15 bp, Homo sapiens
ctgtctcaaaaaaaa

SEQ ID NO: 10246 - DNA, 15 bp, Homo sapiens
ctctgtctcaaaaaa

SEQ ID NO: 10247 - DNA, 15 bp, Homo sapiens
actctgtctcaaaaa

SEQ ID NO: 10248 - DNA, 15 bp, Homo sapiens
gactctgtctcaaaa

SEQ ID NO: 10249 - DNA, 15 bp, Homo sapiens
agactctgtctcaaa

SEQ ID NO: 10250 - DNA, 15 bp, Homo sapiens
gagactctgtctcaa

SEQ ID NO: 10251 - DNA, 15 bp, Homo sapiens
cgagactctgtctca

SEQ ID NO: 10252 - DNA, 15 bp, Homo sapiens
gcgagactctgtctc

SEQ ID NO: 10253 - DNA, 15 bp, Homo sapiens
agcgagactctgtct

SEQ ID NO: 10254 - DNA, 15 bp, Homo sapiens
gagcgagactctgtc

SEQ ID NO: 10255 - DNA, 15 bp, Homo sapiens
agagcgagactctgt

SEQ ID NO: 10256 - DNA, 15 bp, Homo sapiens
cagagcgagactctg

SEQ ID NO: 10257 - DNA, 15 bp, Homo sapiens
acagagcgagactct

SEQ ID NO: 10258 - DNA, 15 bp, Homo sapiens
tggcgacagagcgag

SEQ ID NO: 10259 - DNA, 15 bp, Homo sapiens
atggcgacagagcga

SEQ ID NO: 10260 - DNA, 15 bp, Homo sapiens
catggcgacagagcg

SEQ ID NO: 10261 - DNA, 15 bp, Homo sapiens
gcatggcgacagagc

SEQ ID NO: 10262 - DNA, 15 bp, Homo sapiens
agcatggcgacagag

SEQ ID NO: 10263 - DNA, 15 bp, Homo sapiens
cagcatggcgacaga

SEQ ID NO: 10264 - DNA, 15 bp, Homo sapiens
ccagcatggcgacag

SEQ ID NO: 10265 - DNA, 15 bp, Homo sapiens
tccagcatggcgaca

SEQ ID NO: 10266 - DNA, 15 bp, Homo sapiens
ctccagcatggcgac

SEQ ID NO: 10267 - DNA, 15 bp, Homo sapiens
actccagcatggcga

SEQ ID NO: 10268 - DNA, 15 bp, Homo sapiens
cactccagcatggcg

SEQ ID NO: 10269 - DNA, 15 bp, Homo sapiens
acactccagcatggc

SEQ ID NO: 10270 - DNA, 15 bp, Homo sapiens
tacactccagcatgg

SEQ ID NO: 10271 - DNA, 15 bp, Homo sapiens
ctacactccagcatg

SEQ ID NO: 10272 - DNA, 15 bp, Homo sapiens
actacactccagcat

SEQ ID NO: 10273 - DNA, 15 bp, Homo sapiens
cactacactccagca

SEQ ID NO: 10274 - DNA, 15 bp, Homo sapiens
ccactacactccagc

SEQ ID NO: 10275 - DNA, 15 bp, Homo sapiens
gccactacactccag

SEQ ID NO: 10276 - DNA, 15 bp, Homo sapiens
tgccactacactcca

SEQ ID NO: 10277 - DNA, 15 bp, Homo sapiens
gtgccactacactcc

SEQ ID NO: 10278 - DNA, 15 bp, Homo sapiens
tgtgccactacactc

SEQ ID NO: 10279 - DNA, 15 bp, Homo sapiens
ttgtgccactacact

SEQ ID NO: 10280 - DNA, 15 bp, Homo sapiens
attgtgccactacac

SEQ ID NO: 10281 - DNA, 15 bp, Homo sapiens
gattgtgccactaca

SEQ ID NO: 10282 - DNA, 15 bp, Homo sapiens
agattgtgccactac

SEQ ID NO: 10283 - DNA, 15 bp, Homo sapiens
aagattgtgccacta

SEQ ID NO: 10284 - DNA, 15 bp, Homo sapiens
caagattgtgccact

SEQ ID NO: 10285 - DNA, 15 bp, Homo sapiens
ccaagattgtgccac

SEQ ID NO: 10286 - DNA, 15 bp, Homo sapiens
gccaagattgtgcca

SEQ ID NO: 10287 - DNA, 15 bp, Homo sapiens
agccaagattgtgcc

SEQ ID NO: 10288 - DNA, 15 bp, Homo sapiens
gagccaagattgtgc

SEQ ID NO: 10289 - DNA, 15 bp, Homo sapiens
tgagccaagattgtg

SEQ ID NO: 10290 - DNA, 15 bp, Homo sapiens
gtgagccaagattgt

SEQ ID NO: 10291 - DNA, 15 bp, Homo sapiens
agtgagccaagattg

SEQ ID NO: 10292 - DNA, 15 bp, Homo sapiens
cagtgagccaagatt

SEQ ID NO: 10293 - DNA, 15 bp, Homo sapiens
gtgcagtgagccaag

SEQ ID NO: 10294 - DNA, 15 bp, Homo sapiens
ggtgcagtgagccaa

SEQ ID NO: 10295 - DNA, 15 bp, Homo sapiens
aggtgcagtgagcca

SEQ ID NO: 10296 - DNA, 15 bp, Homo sapiens
gaggtgcagtgagcc

SEQ ID NO: 10297 - DNA, 15 bp, Homo sapiens
ggaggtgcagtgagc

SEQ ID NO: 10298 - DNA, 15 bp, Homo sapiens
cggaggtgcagtgag

SEQ ID NO: 10299 - DNA, 15 bp, Homo sapiens
gcggaggtgcagtga

SEQ ID NO: 10300 - DNA, 15 bp, Homo sapiens
ggcggaggtgcagtg

SEQ ID NO: 10301 - DNA, 15 bp, Homo sapiens
aggcggaggtgcagt

SEQ ID NO: 10302 - DNA, 15 bp, Homo sapiens
caggcggaggtgcag

SEQ ID NO: 10303 - DNA, 15 bp, Homo sapiens
gcaggcggaggtgca

SEQ ID NO: 10304 - DNA, 15 bp, Homo sapiens
ggcaggcggaggtgc

SEQ ID NO: 10305 - DNA, 15 bp, Homo sapiens
tggcaggcggaggtg

SEQ ID NO: 10306 - DNA, 15 bp, Homo sapiens
ctggcaggcggaggt

SEQ ID NO: 10307 - DNA, 15 bp, Homo sapiens
cctggcaggcggagg

SEQ ID NO: 10308 - DNA, 15 bp, Homo sapiens
acctggcaggcggag

SEQ ID NO: 10309 - DNA, 15 bp, Homo sapiens
aacctggcaggcgga

SEQ ID NO: 10310 - DNA, 15 bp, Homo sapiens
gaacctggcaggcgg

SEQ ID NO: 10311 - DNA, 15 bp, Homo sapiens
tgaacctggcaggcg

SEQ ID NO: 10312 - DNA, 15 bp, Homo sapiens
ctgaacctggcaggc

SEQ ID NO: 10313 - DNA, 15 bp, Homo sapiens
gctgaacctggcagg

SEQ ID NO: 10314 - DNA, 15 bp, Homo sapiens
cgctgaacctggcag

SEQ ID NO: 10315 - DNA, 15 bp, Homo sapiens
tcgctgaacctggca

SEQ ID NO: 10316 - DNA, 15 bp, Homo sapiens
atcgctgaacctggc

SEQ ID NO: 10317 - DNA, 15 bp, Homo sapiens
aatcgctgaacctgg

SEQ ID NO: 10318 - DNA, 15 bp, Homo sapiens
gaatcgctgaacctg

SEQ ID NO: 10319 - DNA, 15 bp, Homo sapiens
agaatcgctgaacct

SEQ ID NO: 10320 - DNA, 15 bp, Homo sapiens
gagaatcgctgaacc

SEQ ID NO: 10321 - DNA, 15 bp, Homo sapiens
ggagaatcgctgaac

SEQ ID NO: 10322 - DNA, 15 bp, Homo sapiens
aggagaatcgctgaa

SEQ ID NO: 10323 - DNA, 15 bp, Homo sapiens
caggagaatcgctga

SEQ ID NO: 10324 - DNA, 15 bp, Homo sapiens
gcaggagaatcgctg

SEQ ID NO: 10325 - DNA, 15 bp, Homo sapiens
acctgtagtcccagc

SEQ ID NO: 10326 - DNA, 15 bp, Homo sapiens
cacctgtagtcccag

SEQ ID NO: 10327 - DNA, 15 bp, Homo sapiens
gcacctgtagtccca

SEQ ID NO: 10328 - DNA, 15 bp, Homo sapiens
ggcacctgtagtccc

SEQ ID NO: 10329 - DNA, 15 bp, Homo sapiens
aggcacctgtagtcc

SEQ ID NO: 10330 - DNA, 15 bp, Homo sapiens
caggcacctgtagtc

SEQ ID NO: 10331 - DNA, 15 bp, Homo sapiens
gcaggcacctgtagt

SEQ ID NO: 10332 - DNA, 15 bp, Homo sapiens
ggcaggcacctgtag

SEQ ID NO: 10333 - DNA, 15 bp, Homo sapiens
tggcaggcacctgta

SEQ ID NO: 10334 - DNA, 15 bp, Homo sapiens
gtggcaggcacctgt

SEQ ID NO: 10335 - DNA, 15 bp, Homo sapiens
ggtggcaggcacctg

SEQ ID NO: 10336 - DNA, 15 bp, Homo sapiens
tggtggcaggcacct

SEQ ID NO: 10337 - DNA, 15 bp, Homo sapiens
atggtggcaggcacc

SEQ ID NO: 10338 - DNA, 15 bp, Homo sapiens
catggtggcaggcac

SEQ ID NO: 10339 - DNA, 15 bp, Homo sapiens
gcatggtggcaggca

SEQ ID NO: 10340 - DNA, 15 bp, Homo sapiens
tacggtgaaaccccg

SEQ ID NO: 10341 - DNA, 15 bp, Homo sapiens
atacggtgaaacccc

SEQ ID NO: 10342 - DNA, 15 bp, Homo sapiens
aatacggtgaaaccc

SEQ ID NO: 10343 - DNA, 15 bp, Homo sapiens
caatacggtgaaacc

SEQ ID NO: 10344 - DNA, 15 bp, Homo sapiens
ccaatacggtgaaac

SEQ ID NO: 10345 - DNA, 15 bp, Homo sapiens
gccaatacggtgaaa

SEQ ID NO: 10346 - DNA, 15 bp, Homo sapiens
agccaatacggtgaa

SEQ ID NO: 10347 - DNA, 15 bp, Homo sapiens
tagccaatacggtga

SEQ ID NO: 10348 - DNA, 15 bp, Homo sapiens
ctagccaatacggtg

SEQ ID NO: 10349 - DNA, 15 bp, Homo sapiens
cctagccaatacggt

SEQ ID NO: 10350 - DNA, 15 bp, Homo sapiens
tcctagccaatacgg

SEQ ID NO: 10351 - DNA, 15 bp, Homo sapiens
atcctagccaatacg

SEQ ID NO: 10352 - DNA, 15 bp, Homo sapiens
catcctagccaatac

SEQ ID NO: 10353 - DNA, 15 bp, Homo sapiens
ccatcctagccaata

SEQ ID NO: 10354 - DNA, 15 bp, Homo sapiens
accatcctagccaat

SEQ ID NO: 10355 - DNA, 15 bp, Homo sapiens
gaccatcctagccaa

SEQ ID NO: 10356 - DNA, 15 bp, Homo sapiens
agaccatcctagcca

SEQ ID NO: 10357 - DNA, 15 bp, Homo sapiens
gagaccatcctagcc

SEQ ID NO: 10358 - DNA, 15 bp, Homo sapiens
cgagaccatcctagc

SEQ ID NO: 10359 - DNA, 15 bp, Homo sapiens
tcgagaccatcctag

SEQ ID NO: 10360 - DNA, 15 bp, Homo sapiens
atcgagaccatccta

SEQ ID NO: 10361 - DNA, 15 bp, Homo sapiens
agaaatcgagaccat

SEQ ID NO: 10362 - DNA, 15 bp, Homo sapiens
aagaaatcgagacca

SEQ ID NO: 10363 - DNA, 15 bp, Homo sapiens
caagaaatcgagacc

SEQ ID NO: 10364 - DNA, 15 bp, Homo sapiens
tcaagaaatcgagac

SEQ ID NO: 10365 - DNA, 15 bp, Homo sapiens
gtcaagaaatcgaga

SEQ ID NO: 10366 - DNA, 15 bp, Homo sapiens
ggtcaagaaatcgag

SEQ ID NO: 10367 - DNA, 15 bp, Homo sapiens
aggtcaagaaatcga

SEQ ID NO: 10368 - DNA, 15 bp, Homo sapiens
gaggtcaagaaatcg

SEQ ID NO: 10369 - DNA, 15 bp, Homo sapiens
cgaggtcaagaaatc

SEQ ID NO: 10370 - DNA, 15 bp, Homo sapiens
acgaggtcaagaaat

SEQ ID NO: 10371 - DNA, 15 bp, Homo sapiens
cacgaggtcaagaaa

SEQ ID NO: 10372 - DNA, 15 bp, Homo sapiens
tcacgaggtcaagaa

SEQ ID NO: 10373 - DNA, 15 bp, Homo sapiens
atcacgaggtcaaga

SEQ ID NO: 10374 - DNA, 15 bp, Homo sapiens
gatcacgaggtcaag

SEQ ID NO: 10375 - DNA, 15 bp, Homo sapiens
ggatcacgaggtcaa

SEQ ID NO: 10376 - DNA, 15 bp, Homo sapiens
aggcggatcacgagg

SEQ ID NO: 10377 - DNA, 15 bp, Homo sapiens
caggcggatcacgag

SEQ ID NO: 10378 - DNA, 15 bp, Homo sapiens
gcaggcggatcacga

SEQ ID NO: 10379 - DNA, 15 bp, Homo sapiens
ggcaggcggatcacg

SEQ ID NO: 10380 - DNA, 15 bp, Homo sapiens
aggcaggcggatcac

SEQ ID NO: 10381 - DNA, 15 bp, Homo sapiens
gaggcaggcggatca

SEQ ID NO: 10382 - DNA, 15 bp, Homo sapiens
cgaggcaggcggatc

SEQ ID NO: 10383 - DNA, 15 bp, Homo sapiens
ccgaggcaggcggat

SEQ ID NO: 10384 - DNA, 15 bp, Homo sapiens
gccgaggcaggcgga

SEQ ID NO: 10385 - DNA, 15 bp, Homo sapiens
ggccgaggcaggcgg

SEQ ID NO: 10386 - DNA, 15 bp, Homo sapiens
aggccgaggcaggcg

SEQ ID NO: 10387 - DNA, 15 bp, Homo sapiens
gaggccgaggcaggc

SEQ ID NO: 10388 - DNA, 15 bp, Homo sapiens
ggaggccgaggcagg

SEQ ID NO: 10389 - DNA, 15 bp, Homo sapiens
gggaggccgaggcag

SEQ ID NO: 10390 - DNA, 15 bp, Homo sapiens
agcctataatcccag

SEQ ID NO: 10391 - DNA, 15 bp, Homo sapiens
aagcctataatccca

SEQ ID NO: 10392 - DNA, 15 bp, Homo sapiens
caagcctataatccc

SEQ ID NO: 10393 - DNA, 15 bp, Homo sapiens
tcaagcctataatcc

SEQ ID NO: 10394 - DNA, 15 bp, Homo sapiens
ctcaagcctataatc

SEQ ID NO: 10395 - DNA, 15 bp, Homo sapiens
gctcaagcctataat

SEQ ID NO: 10396 - DNA, 15 bp, Homo sapiens
ggctcaagcctataa

SEQ ID NO: 10397 - DNA, 15 bp, Homo sapiens
tggctcaagcctata

SEQ ID NO: 10398 - DNA, 15 bp, Homo sapiens
gtggctcaagcctat

SEQ ID NO: 10399 - DNA, 15 bp, Homo sapiens
ggtggctcaagccta

SEQ ID NO: 10400 - DNA, 15 bp, Homo sapiens
tggtggctcaagcct

SEQ ID NO: 10401 - DNA, 15 bp, Homo sapiens
gtggtggctcaagcc

SEQ ID NO: 10402 - DNA, 15 bp, Homo sapiens
cgtggtggctcaagc

SEQ ID NO: 10403 - DNA, 15 bp, Homo sapiens
gcgtggtggctcaag

SEQ ID NO: 10404 - DNA, 15 bp, Homo sapiens
ggcgtggtggctcaa

SEQ ID NO: 10405 - DNA, 15 bp, Homo sapiens
aggcgtggtggctca

SEQ ID NO: 10406 - DNA, 15 bp, Homo sapiens
caggcgtggtggctc

SEQ ID NO: 10407 - DNA, 15 bp, Homo sapiens
ccaggcgtggtggct

SEQ ID NO: 10408 - DNA, 15 bp, Homo sapiens
ggccaggcgtggtgg

SEQ ID NO: 10409 - DNA, 15 bp, Homo sapiens
cggccaggcgtggtg

SEQ ID NO: 10410 - DNA, 15 bp, Homo sapiens
tcggccaggcgtggt

SEQ ID NO: 10411 - DNA, 15 bp, Homo sapiens
atcggccaggcgtgg

SEQ ID NO: 10412 - DNA, 15 bp, Homo sapiens
catcggccaggcgtg

SEQ ID NO: 10413 - DNA, 15 bp, Homo sapiens
ccatcggccaggcgt

SEQ ID NO: 10414 - DNA, 15 bp, Homo sapiens
accatcggccaggcg

SEQ ID NO: 10415 - DNA, 15 bp, Homo sapiens
caccatcggccaggc

SEQ ID NO: 10416 - DNA, 15 bp, Homo sapiens
gcaccatcggccagg

SEQ ID NO: 10417 - DNA, 15 bp, Homo sapiens
agcaccatcggccag

SEQ ID NO: 10418 - DNA, 15 bp, Homo sapiens
aagcaccatcggcca

SEQ ID NO: 10419 - DNA, 15 bp, Homo sapiens
aaagcaccatcggcc

SEQ ID NO: 10420 - DNA, 15 bp, Homo sapiens
aaaagcaccatcggc

SEQ ID NO: 10421 - DNA, 15 bp, Homo sapiens
aaaaagcaccatcgg

SEQ ID NO: 10422 - DNA, 15 bp, Homo sapiens
taaaaagcaccatcg

SEQ ID NO: 10423 - DNA, 15 bp, Homo sapiens
ataaaaagcaccatc

SEQ ID NO: 10424 - DNA, 15 bp, Homo sapiens
gataaaaagcaccat

SEQ ID NO: 10425 - DNA, 15 bp, Homo sapiens
tgataaaaagcacca

SEQ ID NO: 10426 - DNA, 15 bp, Homo sapiens
atgataaaaagcacc

SEQ ID NO: 10427 - DNA, 15 bp, Homo sapiens
aatgataaaaagcac

SEQ ID NO: 10428 - DNA, 15 bp, Homo sapiens
aaatgataaaaagca

SEQ ID NO: 10429 - DNA, 15 bp, Homo sapiens
caaatgataaaaagc

SEQ ID NO: 10430 - DNA, 15 bp, Homo sapiens
tcaaatgataaaaag

SEQ ID NO: 10431 - DNA, 15 bp, Homo sapiens
ttcaaatgataaaaa

SEQ ID NO: 10432 - DNA, 15 bp, Homo sapiens
cttcaaatgataaaa

SEQ ID NO: 10433 - DNA, 15 bp, Homo sapiens
ccttcaaatgataaa

SEQ ID NO: 10434 - DNA, 15 bp, Homo sapiens
tccttcaaatgataa

SEQ ID NO: 10435 - DNA, 15 bp, Homo sapiens
gtccttcaaatgata

SEQ ID NO: 10436 - DNA, 15 bp, Homo sapiens
agtccttcaaatgat

SEQ ID NO: 10437 - DNA, 15 bp, Homo sapiens
gagtccttcaaatga

SEQ ID NO: 10438 - DNA, 15 bp, Homo sapiens
tgagtccttcaaatg

SEQ ID NO: 10439 - DNA, 15 bp, Homo sapiens
ctgagtccttcaaat

SEQ ID NO: 10440 - DNA, 15 bp, Homo sapiens
actgagtccttcaaa

SEQ ID NO: 10441 - DNA, 15 bp, Homo sapiens
aactgagtccttcaa

SEQ ID NO: 10442 - DNA, 15 bp, Homo sapiens
caactgagtccttca

SEQ ID NO: 10443 - DNA, 15 bp, Homo sapiens
acaactgagtccttc

SEQ ID NO: 10444 - DNA, 15 bp, Homo sapiens
tacaactgagtcctt

SEQ ID NO: 10445 - DNA, 15 bp, Homo sapiens
atacaactgagtcct

SEQ ID NO: 10446 - DNA, 15 bp, Homo sapiens
tatacaactgagtcc

SEQ ID NO: 10447 - DNA, 15 bp, Homo sapiens
ttatacaactgagtc

SEQ ID NO: 10448 - DNA, 15 bp, Homo sapiens
gttatacaactgagt

SEQ ID NO: 10449 - DNA, 15 bp, Homo sapiens
ggttatacaactgag

SEQ ID NO: 10450 - DNA, 15 bp, Homo sapiens
gggttatacaactga

SEQ ID NO: 10451 - DNA, 15 bp, Homo sapiens
tgggttatacaactg

SEQ ID NO: 10452 - DNA, 15 bp, Homo sapiens
gtgggttatacaact

SEQ ID NO: 10453 - DNA, 15 bp, Homo sapiens
agtgggttatacaac

SEQ ID NO: 10454 - DNA, 15 bp, Homo sapiens
cagtgggttatacaa

SEQ ID NO: 10455 - DNA, 15 bp, Homo sapiens
tcagtgggttataca

SEQ ID NO: 10456 - DNA, 15 bp, Homo sapiens
ttcagtgggttatac

SEQ ID NO: 10457 - DNA, 15 bp, Homo sapiens
tttcagtgggttata

SEQ ID NO: 10458 - DNA, 15 bp, Homo sapiens
ttttcagtgggttat

SEQ ID NO: 10459 - DNA, 15 bp, Homo sapiens
attttcagtgggtta

SEQ ID NO: 10460 - DNA, 15 bp, Homo sapiens
aattttcagtgggtt

SEQ ID NO: 10461 - DNA, 15 bp, Homo sapiens
taattttcagtgggt

SEQ ID NO: 10462 - DNA, 15 bp, Homo sapiens
ctaattttcagtggg

SEQ ID NO: 10463 - DNA, 15 bp, Homo sapiens
actaattttcagtgg

SEQ ID NO: 10464 - DNA, 15 bp, Homo sapiens
tactaattttcagtg

SEQ ID NO: 10465 - DNA, 15 bp, Homo sapiens
atactaattttcagt

SEQ ID NO: 10466 - DNA, 15 bp, Homo sapiens
catactaattttcag

SEQ ID NO: 10467 - DNA, 15 bp, Homo sapiens
acatactaattttca

SEQ ID NO: 10468 - DNA, 15 bp, Homo sapiens
tacatactaattttc

SEQ ID NO: 10469 - DNA, 15 bp, Homo sapiens
ttacatactaatttt

SEQ ID NO: 10470 - DNA, 15 bp, Homo sapiens
cttacatactaattt

SEQ ID NO: 10471 - DNA, 15 bp, Homo sapiens
ccttacatactaatt

SEQ ID NO: 10472 - DNA, 15 bp, Homo sapiens
tccttacatactaat

SEQ ID NO: 10473 - DNA, 15 bp, Homo sapiens
ttccttacatactaa

SEQ ID NO: 10474 - DNA, 15 bp, Homo sapiens
cttccttacatacta

SEQ ID NO: 10475 - DNA, 15 bp, Homo sapiens
acttccttacatact

SEQ ID NO: 10476 - DNA, 15 bp, Homo sapiens
aacttccttacatac

SEQ ID NO: 10477 - DNA, 15 bp, Homo sapiens
gaacttccttacata

SEQ ID NO: 10478 - DNA, 15 bp, Homo sapiens
tgaacttccttacat

SEQ ID NO: 10479 - DNA, 15 bp, Homo sapiens
ctgaacttccttaca

SEQ ID NO: 10480 - DNA, 15 bp, Homo sapiens
cctgaacttccttac

SEQ ID NO: 10481 - DNA, 15 bp, Homo sapiens
ccctgaacttcctta

SEQ ID NO: 10482 - DNA, 15 bp, Homo sapiens
tccctgaacttcctt

SEQ ID NO: 10483 - DNA, 15 bp, Homo sapiens
ttccctgaacttcct

SEQ ID NO: 10484 - DNA, 15 bp, Homo sapiens
attccctgaacttcc

SEQ ID NO: 10485 - DNA, 15 bp, Homo sapiens
tattccctgaacttc

SEQ ID NO: 10486 - DNA, 15 bp, Homo sapiens
ctattccctgaactt

SEQ ID NO: 10487 - DNA, 15 bp, Homo sapiens
actattccctgaact

SEQ ID NO: 10488 - DNA, 15 bp, Homo sapiens
tactattccctgaac

SEQ ID NO: 10489 - DNA, 15 bp, Homo sapiens
atactattccctgaa

SEQ ID NO: 10490 - DNA, 15 bp, Homo sapiens
tatactattccctga

SEQ ID NO: 10491 - DNA, 15 bp, Homo sapiens
ttatactattccctg

SEQ ID NO: 10492 - DNA, 15 bp, Homo sapiens
cttatactattccct

SEQ ID NO: 10493 - DNA, 15 bp, Homo sapiens
acttatactattccc

SEQ ID NO: 10494 - DNA, 15 bp, Homo sapiens
gacttatactattcc

SEQ ID NO: 10495 - DNA, 15 bp, Homo sapiens
tgacttatactattc

SEQ ID NO: 10496 - DNA, 15 bp, Homo sapiens
gtgacttatactatt

SEQ ID NO: 10497 - DNA, 15 bp, Homo sapiens
agtgacttatactat

SEQ ID NO: 10498 - DNA, 15 bp, Homo sapiens
gagtgacttatacta

SEQ ID NO: 10499 - DNA, 15 bp, Homo sapiens
ggagtgacttatact

SEQ ID NO: 10500 - DNA, 15 bp, Homo sapiens
tggagtgacttatac

SEQ ID NO: 10501 - DNA, 15 bp, Homo sapiens
ctggagtgacttata

SEQ ID NO: 10502 - DNA, 15 bp, Homo sapiens
cctggagtgacttat

SEQ ID NO: 10503 - DNA, 15 bp, Homo sapiens
gcctggagtgactta

SEQ ID NO: 10504 - DNA, 15 bp, Homo sapiens
agcctggagtgactt

SEQ ID NO: 10505 - DNA, 15 bp, Homo sapiens
aagcctggagtgact

SEQ ID NO: 10506 - DNA, 15 bp, Homo sapiens
caagcctggagtgac

SEQ ID NO: 10507 - DNA, 15 bp, Homo sapiens
tcaagcctggagtga

SEQ ID NO: 10508 - DNA, 15 bp, Homo sapiens
ctcaagcctggagtg

SEQ ID NO: 10509 - DNA, 15 bp, Homo sapiens
cctcaagcctggagt

SEQ ID NO: 10510 - DNA, 15 bp, Homo sapiens
gcctcaagcctggag

SEQ ID NO: 10511 - DNA, 15 bp, Homo sapiens
tgcctcaagcctgga

SEQ ID NO: 10512 - DNA, 15 bp, Homo sapiens
ttgcctcaagcctgg

SEQ ID NO: 10513 - DNA, 15 bp, Homo sapiens
tttgcctcaagcctg

SEQ ID NO: 10514 - DNA, 15 bp, Homo sapiens
ttttgcctcaagcct

SEQ ID NO: 10515 - DNA, 15 bp, Homo sapiens
attttgcctcaagcc

SEQ ID NO: 10516 - DNA, 15 bp, Homo sapiens
aattttgcctcaagc

SEQ ID NO: 10517 - DNA, 15 bp, Homo sapiens
aaattttgcctcaag

SEQ ID NO: 10518 - DNA, 15 bp, Homo sapiens
taaattttgcctcaa

SEQ ID NO: 10519 - DNA, 15 bp, Homo sapiens
gtaaattttgcctca

SEQ ID NO: 10520 - DNA, 15 bp, Homo sapiens
tgtaaattttgcctc

SEQ ID NO: 10521 - DNA, 15 bp, Homo sapiens
ttgtaaattttgcct

SEQ ID NO: 10522 - DNA, 15 bp, Homo sapiens
tttgtaaattttgcc

SEQ ID NO: 10523 - DNA, 15 bp, Homo sapiens
atttgtaaattttgc

SEQ ID NO: 10524 - DNA, 15 bp, Homo sapiens
catttgtaaattttg

SEQ ID NO: 10525 - DNA, 15 bp, Homo sapiens
gcatttgtaaatttt

SEQ ID NO: 10526 - DNA, 15 bp, Homo sapiens
agcatttgtaaattt

SEQ ID NO: 10527 - DNA, 15 bp, Homo sapiens
cagcatttgtaaatt

SEQ ID NO: 10528 - DNA, 15 bp, Homo sapiens
gcagcatttgtaaat

SEQ ID NO: 10529 - DNA, 15 bp, Homo sapiens
agcagcatttgtaaa

SEQ ID NO: 10530 - DNA, 15 bp, Homo sapiens
cagcagcatttgtaa

SEQ ID NO: 10531 - DNA, 15 bp, Homo sapiens
tcagcagcatttgta

SEQ ID NO: 10532 - DNA, 15 bp, Homo sapiens
gtcagcagcatttgt

SEQ ID NO: 10533 - DNA, 15 bp, Homo sapiens
agtcagcagcatttg

SEQ ID NO: 10534 - DNA, 15 bp, Homo sapiens
aagtcagcagcattt

SEQ ID NO: 10535 - DNA, 15 bp, Homo sapiens
aaagtcagcagcatt

SEQ ID NO: 10536 - DNA, 15 bp, Homo sapiens
caaagtcagcagcat

SEQ ID NO: 10537 - DNA, 15 bp, Homo sapiens
acaaagtcagcagca

SEQ ID NO: 10538 - DNA, 15 bp, Homo sapiens
tacaaagtcagcagc

SEQ ID NO: 10539 - DNA, 15 bp, Homo sapiens
atacaaagtcagcag

SEQ ID NO: 10540 - DNA, 15 bp, Homo sapiens
catacaaagtcagca

SEQ ID NO: 10541 - DNA, 15 bp, Homo sapiens
acatacaaagtcagc

SEQ ID NO: 10542 - DNA, 15 bp, Homo sapiens
tacatacaaagtcag

SEQ ID NO: 10543 - DNA, 15 bp, Homo sapiens
ttacatacaaagtca

SEQ ID NO: 10544 - DNA, 15 bp, Homo sapiens
cttacatacaaagtc

SEQ ID NO: 10545 - DNA, 15 bp, Homo sapiens
ccttacatacaaagt

SEQ ID NO: 10546 - DNA, 15 bp, Homo sapiens
cccttacatacaaag

SEQ ID NO: 10547 - DNA, 15 bp, Homo sapiens
ccccttacatacaaa

SEQ ID NO: 10548 - DNA, 15 bp, Homo sapiens
tccccttacatacaa

SEQ ID NO: 10549 - DNA, 15 bp, Homo sapiens
ctccccttacataca

SEQ ID NO: 10550 - DNA, 15 bp, Homo sapiens
cctccccttacatac

SEQ ID NO: 10551 - DNA, 15 bp, Homo sapiens
gcctccccttacata

SEQ ID NO: 10552 - DNA, 15 bp, Homo sapiens
tgcctccccttacat

SEQ ID NO: 10553 - DNA, 15 bp, Homo sapiens
atgcctccccttaca

SEQ ID NO: 10554 - DNA, 15 bp, Homo sapiens
aatgcctccccttac

SEQ ID NO: 10555 - DNA, 15 bp, Homo sapiens
aaatgcctcccctta

SEQ ID NO: 10556 - DNA, 15 bp, Homo sapiens
aaaatgcctcccctt

SEQ ID NO: 10557 - DNA, 15 bp, Homo sapiens
gaaaatgcctcccct

SEQ ID NO: 10558 - DNA, 15 bp, Homo sapiens
agaaaatgcctcccc

SEQ ID NO: 10559 - DNA, 15 bp, Homo sapiens
aagaaaatgcctccc

SEQ ID NO: 10560 - DNA, 15 bp, Homo sapiens
taagaaaatgcctcc

SEQ ID NO: 10561 - DNA, 15 bp, Homo sapiens
ctaagaaaatgcctc

SEQ ID NO: 10562 - DNA, 15 bp, Homo sapiens
tctaagaaaatgcct

SEQ ID NO: 10563 - DNA, 15 bp, Homo sapiens
ttctaagaaaatgcc

SEQ ID NO: 10564 - DNA, 15 bp, Homo sapiens
tttctaagaaaatgc

SEQ ID NO: 10565 - DNA, 15 bp, Homo sapiens
ttttctaagaaaatg

SEQ ID NO: 10566 - DNA, 15 bp, Homo sapiens
cttttctaagaaaat

SEQ ID NO: 10567 - DNA, 15 bp, Homo sapiens
tcttttctaagaaaa

SEQ ID NO: 10568 - DNA, 15 bp, Homo sapiens
ctcttttctaagaaa

SEQ ID NO: 10569 - DNA, 15 bp, Homo sapiens
tctcttttctaagaa

SEQ ID NO: 10570 - DNA, 15 bp, Homo sapiens
ctctcttttctaaga

SEQ ID NO: 10571 - DNA, 15 bp, Homo sapiens
cctctcttttctaag

SEQ ID NO: 10572 - DNA, 15 bp, Homo sapiens
acctctcttttctaa

SEQ ID NO: 10573 - DNA, 15 bp, Homo sapiens
tacctctcttttcta

SEQ ID NO: 10574 - DNA, 15 bp, Homo sapiens
ctacctctcttttct

SEQ ID NO: 10575 - DNA, 15 bp, Homo sapiens
cctacctctcttttc

SEQ ID NO: 10576 - DNA, 15 bp, Homo sapiens
acctacctctctttt

SEQ ID NO: 10577 - DNA, 15 bp, Homo sapiens
gacctacctctcttt

SEQ ID NO: 10578 - DNA, 15 bp, Homo sapiens
agacctacctctctt

SEQ ID NO: 10579 - DNA, 15 bp, Homo sapiens
gagacctacctctct

SEQ ID NO: 10580 - DNA, 15 bp, Homo sapiens
agagacctacctctc

SEQ ID NO: 10581 - DNA, 15 bp, Homo sapiens
cagagacctacctct

SEQ ID NO: 10582 - DNA, 15 bp, Homo sapiens
ccagagacctacctc

SEQ ID NO: 10583 - DNA, 15 bp, Homo sapiens
cccagagacctacct

SEQ ID NO: 10584 - DNA, 15 bp, Homo sapiens
tcccagagacctacc

SEQ ID NO: 10585 - DNA, 15 bp, Homo sapiens
atcccagagacctac

SEQ ID NO: 10586 - DNA, 15 bp, Homo sapiens
aatcccagagaccta

SEQ ID NO: 10587 - DNA, 15 bp, Homo sapiens
gaatcccagagacct

SEQ ID NO: 10588 - DNA, 15 bp, Homo sapiens
ggaatcccagagacc

SEQ ID NO: 10589 - DNA, 15 bp, Homo sapiens
tggaatcccagagac

SEQ ID NO: 10590 - DNA, 15 bp, Homo sapiens
ctggaatcccagaga

SEQ ID NO: 10591 - DNA, 15 bp, Homo sapiens
actggaatcccagag

SEQ ID NO: 10592 - DNA, 15 bp, Homo sapiens
tactggaatcccaga

SEQ ID NO: 10593 - DNA, 15 bp, Homo sapiens
atactggaatcccag

SEQ ID NO: 10594 - DNA, 15 bp, Homo sapiens
catactggaatccca

SEQ ID NO: 10595 - DNA, 15 bp, Homo sapiens
gcatactggaatccc

SEQ ID NO: 10596 - DNA, 15 bp, Homo sapiens
ggcatactggaatcc

SEQ ID NO: 10597 - DNA, 15 bp, Homo sapiens
tggcatactggaatc

SEQ ID NO: 10598 - DNA, 15 bp, Homo sapiens
atggcatactggaat

SEQ ID NO: 10599 - DNA, 15 bp, Homo sapiens
aatggcatactggaa

SEQ ID NO: 10600 - DNA, 15 bp, Homo sapiens
aaatggcatactgga

SEQ ID NO: 10601 - DNA, 15 bp, Homo sapiens
gaaatggcatactgg

SEQ ID NO: 10602 - DNA, 15 bp, Homo sapiens
ggaaatggcatactg

SEQ ID NO: 10603 - DNA, 15 bp, Homo sapiens
tggaaatggcatact

SEQ ID NO: 10604 - DNA, 15 bp, Homo sapiens
atggaaatggcatac

SEQ ID NO: 10605 - DNA, 15 bp, Homo sapiens
gatggaaatggcata

SEQ ID NO: 10606 - DNA, 15 bp, Homo sapiens
ggatggaaatggcat

SEQ ID NO: 10607 - DNA, 15 bp, Homo sapiens
aggatggaaatggca

SEQ ID NO: 10608 - DNA, 15 bp, Homo sapiens
gaggatggaaatggc

SEQ ID NO: 10609 - DNA, 15 bp, Homo sapiens
tgaggatggaaatgg

SEQ ID NO: 10610 - DNA, 15 bp, Homo sapiens
ctgaggatggaaatg

SEQ ID NO: 10611 - DNA, 15 bp, Homo sapiens
actgaggatggaaat

SEQ ID NO: 10612 - DNA, 15 bp, Homo sapiens
cactgaggatggaaa

SEQ ID NO: 10613 - DNA, 15 bp, Homo sapiens
acactgaggatggaa

SEQ ID NO: 10614 - DNA, 15 bp, Homo sapiens
aacactgaggatgga

SEQ ID NO: 10615 - DNA, 15 bp, Homo sapiens
aaacactgaggatgg

SEQ ID NO: 10616 - DNA, 15 bp, Homo sapiens
aaaacactgaggatg

SEQ ID NO: 10617 - DNA, 15 bp, Homo sapiens
aaaaacactgaggat

SEQ ID NO: 10618 - DNA, 15 bp, Homo sapiens
caaaaacactgagga

SEQ ID NO: 10619 - DNA, 15 bp, Homo sapiens
ccaaaaacactgagg

SEQ ID NO: 10620 - DNA, 15 bp, Homo sapiens
gccaaaaacactgag

SEQ ID NO: 10621 - DNA, 15 bp, Homo sapiens
ggccaaaaacactga

SEQ ID NO: 10622 - DNA, 15 bp, Homo sapiens
tggccaaaaacactg

SEQ ID NO: 10623 - DNA, 15 bp, Homo sapiens
gtggccaaaaacact

SEQ ID NO: 10624 - DNA, 15 bp, Homo sapiens
ggtggccaaaaacac

SEQ ID NO: 10625 - DNA, 15 bp, Homo sapiens
aggtggccaaaaaca

SEQ ID NO: 10626 - DNA, 15 bp, Homo sapiens
caggtggccaaaaac

SEQ ID NO: 10627 - DNA, 15 bp, Homo sapiens
tcaggtggccaaaaa

SEQ ID NO: 10628 - DNA, 15 bp, Homo sapiens
ctcaggtggccaaaa

SEQ ID NO: 10629 - DNA, 15 bp, Homo sapiens
tctcaggtggccaaa

SEQ ID NO: 10630 - DNA, 15 bp, Homo sapiens
ctctcaggtggccaa

SEQ ID NO: 10631 - DNA, 15 bp, Homo sapiens
tctctcaggtggcca

SEQ ID NO: 10632 - DNA, 15 bp, Homo sapiens
ctctctcaggtggcc

SEQ ID NO: 10633 - DNA, 15 bp, Homo sapiens
cctctctcaggtggc

SEQ ID NO: 10634 - DNA, 15 bp, Homo sapiens
acctctctcaggtgg

SEQ ID NO: 10635 - DNA, 15 bp, Homo sapiens
gacctctctcaggtg

SEQ ID NO: 10636 - DNA, 15 bp, Homo sapiens
agacctctctcaggt

SEQ ID NO: 10637 - DNA, 15 bp, Homo sapiens
tagacctctctcagg

SEQ ID NO: 10638 - DNA, 15 bp, Homo sapiens
atagacctctctcag

SEQ ID NO: 10639 - DNA, 15 bp, Homo sapiens
aatagacctctctca

SEQ ID NO: 10640 - DNA, 15 bp, Homo sapiens
aaatagacctctctc

SEQ ID NO: 10641 - DNA, 15 bp, Homo sapiens
aaaatagacctctct

SEQ ID NO: 10642 - DNA, 15 bp, Homo sapiens
gaaaatagacctctc

SEQ ID NO: 10643 - DNA, 15 bp, Homo sapiens
tgaaaatagacctct

SEQ ID NO: 10644 - DNA, 15 bp, Homo sapiens
ctgaaaatagacctc

SEQ ID NO: 10645 - DNA, 15 bp, Homo sapiens
tctgaaaatagacct

SEQ ID NO: 10646 - DNA, 15 bp, Homo sapiens
ttctgaaaatagacc

SEQ ID NO: 10647 - DNA, 15 bp, Homo sapiens
tttctgaaaatagac

SEQ ID NO: 10648 - DNA, 15 bp, Homo sapiens
atttctgaaaataga

SEQ ID NO: 10649 - DNA, 15 bp, Homo sapiens
catttctgaaaatag

SEQ ID NO: 10650 - DNA, 15 bp, Homo sapiens
gcatttctgaaaata

SEQ ID NO: 10651 - DNA, 15 bp, Homo sapiens
tgcatttctgaaaat

SEQ ID NO: 10652 - DNA, 15 bp, Homo sapiens
atgcatttctgaaaa

SEQ ID NO: 10653 - DNA, 15 bp, Homo sapiens
aatgcatttctgaaa

SEQ ID NO: 10654 - DNA, 15 bp, Homo sapiens
gaatgcatttctgaa

SEQ ID NO: 10655 - DNA, 15 bp, Homo sapiens
agaatgcatttctga

SEQ ID NO: 10656 - DNA, 15 bp, Homo sapiens
aagaatgcatttctg

SEQ ID NO: 10657 - DNA, 15 bp, Homo sapiens
gaagaatgcatttct

SEQ ID NO: 10658 - DNA, 15 bp, Homo sapiens
tgaagaatgcatttc

SEQ ID NO: 10659 - DNA, 15 bp, Homo sapiens
atgaagaatgcattt

SEQ ID NO: 10660 - DNA, 15 bp, Homo sapiens
aatgaagaatgcatt

SEQ ID NO: 10661 - DNA, 15 bp, Homo sapiens
gaatgaagaatgcat

SEQ ID NO: 10662 - DNA, 15 bp, Homo sapiens
ggaatgaagaatgca

SEQ ID NO: 10663 - DNA, 15 bp, Homo sapiens
gggaatgaagaatgc

SEQ ID NO: 10664 - DNA, 15 bp, Homo sapiens
tgggaatgaagaatg

SEQ ID NO: 10665 - DNA, 15 bp, Homo sapiens
ctgggaatgaagaat

SEQ ID NO: 10666 - DNA, 15 bp, Homo sapiens
tctgggaatgaagaa

SEQ ID NO: 10667 - DNA, 15 bp, Homo sapiens
atctgggaatgaaga

SEQ ID NO: 10668 - DNA, 15 bp, Homo sapiens
catctgggaatgaag

SEQ ID NO: 10669 - DNA, 15 bp, Homo sapiens
tcatctgggaatgaa

SEQ ID NO: 10670 - DNA, 15 bp, Homo sapiens
atcatctgggaatga

SEQ ID NO: 10671 - DNA, 15 bp, Homo sapiens
tatcatctgggaatg

SEQ ID NO: 10672 - DNA, 15 bp, Homo sapiens
ttatcatctgggaat

SEQ ID NO: 10673 - DNA, 15 bp, Homo sapiens
gttatcatctgggaa

SEQ ID NO: 10674 - DNA, 15 bp, Homo sapiens
tgttatcatctggga

SEQ ID NO: 10675 - DNA, 15 bp, Homo sapiens
atgttatcatctggg

SEQ ID NO: 10676 - DNA, 15 bp, Homo sapiens
gatgttatcatctgg

SEQ ID NO: 10677 - DNA, 15 bp, Homo sapiens
agatgttatcatctg

SEQ ID NO: 10678 - DNA, 15 bp, Homo sapiens
tagatgttatcatct

SEQ ID NO: 10679 - DNA, 15 bp, Homo sapiens
atagatgttatcatc

SEQ ID NO: 10680 - DNA, 15 bp, Homo sapiens
tatagatgttatcat

SEQ ID NO: 10681 - DNA, 15 bp, Homo sapiens
ctatagatgttatca

SEQ ID NO: 10682 - DNA, 15 bp, Homo sapiens
tctatagatgttatc

SEQ ID NO: 10683 - DNA, 15 bp, Homo sapiens
ttctatagatgttat

SEQ ID NO: 10684 - DNA, 15 bp, Homo sapiens
gttctatagatgtta

SEQ ID NO: 10685 - DNA, 15 bp, Homo sapiens
agttctatagatgtt

SEQ ID NO: 10686 - DNA, 15 bp, Homo sapiens
tagttctatagatgt

SEQ ID NO: 10687 - DNA, 15 bp, Homo sapiens
ttagttctatagatg

SEQ ID NO: 10688 - DNA, 15 bp, Homo sapiens
tttagttctatagat

SEQ ID NO: 10689 - DNA, 15 bp, Homo sapiens
ttttagttctataga

SEQ ID NO: 10690 - DNA, 15 bp, Homo sapiens
attttagttctatag

SEQ ID NO: 10691 - DNA, 15 bp, Homo sapiens
cattttagttctata

SEQ ID NO: 10692 - DNA, 15 bp, Homo sapiens
tcattttagttctat

SEQ ID NO: 10693 - DNA, 15 bp, Homo sapiens
atcattttagttcta

SEQ ID NO: 10694 - DNA, 15 bp, Homo sapiens
aatcattttagttct

SEQ ID NO: 10695 - DNA, 15 bp, Homo sapiens
taatcattttagttc

SEQ ID NO: 10696 - DNA, 15 bp, Homo sapiens
ctaatcattttagtt

SEQ ID NO: 10697 - DNA, 15 bp, Homo sapiens
cctaatcattttagt

SEQ ID NO: 10698 - DNA, 15 bp, Homo sapiens
tcctaatcattttag

SEQ ID NO: 10699 - DNA, 15 bp, Homo sapiens
gtcctaatcatttta

SEQ ID NO: 10700 - DNA, 15 bp, Homo sapiens
ggtcctaatcatttt

SEQ ID NO: 10701 - DNA, 15 bp, Homo sapiens
tggtcctaatcattt

SEQ ID NO: 10702 - DNA, 15 bp, Homo sapiens
atggtcctaatcatt

SEQ ID NO: 10703 - DNA, 15 bp, Homo sapiens
tatggtcctaatcat

SEQ ID NO: 10704 - DNA, 15 bp, Homo sapiens
ttatggtcctaatca

SEQ ID NO: 10705 - DNA, 15 bp, Homo sapiens
gttatggtcctaatc

SEQ ID NO: 10706 - DNA, 15 bp, Homo sapiens
tgttatggtcctaat

SEQ ID NO: 10707 - DNA, 15 bp, Homo sapiens
gtgttatggtcctaa

SEQ ID NO: 10708 - DNA, 15 bp, Homo sapiens
cgtgttatggtccta

SEQ ID NO: 10709 - DNA, 15 bp, Homo sapiens
acgtgttatggtcct

SEQ ID NO: 10710 - DNA, 15 bp, Homo sapiens
tacgtgttatggtcc

SEQ ID NO: 10711 - DNA, 15 bp, Homo sapiens
ctacgtgttatggtc

SEQ ID NO: 10712 - DNA, 15 bp, Homo sapiens
gctacgtgttatggt

SEQ ID NO: 10713 - DNA, 15 bp, Homo sapiens
agctacgtgttatgg

SEQ ID NO: 10714 - DNA, 15 bp, Homo sapiens
gagctacgtgttatg

SEQ ID NO: 10715 - DNA, 15 bp, Homo sapiens
ggagctacgtgttat

SEQ ID NO: 10716 - DNA, 15 bp, Homo sapiens
aggagctacgtgtta

SEQ ID NO: 10717 - DNA, 15 bp, Homo sapiens
taggagctacgtgtt

SEQ ID NO: 10718 - DNA, 15 bp, Homo sapiens
ctaggagctacgtgt

SEQ ID NO: 10719 - DNA, 15 bp, Homo sapiens
gctaggagctacgtg

SEQ ID NO: 10720 - DNA, 15 bp, Homo sapiens
ggctaggagctacgt

SEQ ID NO: 10721 - DNA, 15 bp, Homo sapiens
aggctaggagctacg

SEQ ID NO: 10722 - DNA, 15 bp, Homo sapiens
caggctaggagctac

SEQ ID NO: 10723 - DNA, 15 bp, Homo sapiens
gcaggctaggagcta

SEQ ID NO: 10724 - DNA, 15 bp, Homo sapiens
agcaggctaggagct

SEQ ID NO: 10725 - DNA, 15 bp, Homo sapiens
cagcaggctaggagc

SEQ ID NO: 10726 - DNA, 15 bp, Homo sapiens
acagcaggctaggag

SEQ ID NO: 10727 - DNA, 15 bp, Homo sapiens
gacagcaggctagga

SEQ ID NO: 10728 - DNA, 15 bp, Homo sapiens
cgacagcaggctagg

SEQ ID NO: 10729 - DNA, 15 bp, Homo sapiens
ccgacagcaggctag

SEQ ID NO: 10730 - DNA, 15 bp, Homo sapiens
tccgacagcaggcta

SEQ ID NO: 10731 - DNA, 15 bp, Homo sapiens
ttccgacagcaggct

SEQ ID NO: 10732 - DNA, 15 bp, Homo sapiens
gttccgacagcaggc

SEQ ID NO: 10733 - DNA, 15 bp, Homo sapiens
tgttccgacagcagg

SEQ ID NO: 10734 - DNA, 15 bp, Homo sapiens
gtgttccgacagcag

SEQ ID NO: 10735 - DNA, 15 bp, Homo sapiens
ggtgttccgacagca

SEQ ID NO: 10736 - DNA, 15 bp, Homo sapiens
aggtgttccgacagc

SEQ ID NO: 10737 - DNA, 15 bp, Homo sapiens
gaggtgttccgacag

SEQ ID NO: 10738 - DNA, 15 bp, Homo sapiens
ggaggtgttccgaca

SEQ ID NO: 10739 - DNA, 15 bp, Homo sapiens
gggaggtgttccgac

SEQ ID NO: 10740 - DNA, 15 bp, Homo sapiens
cgggaggtgttccga

SEQ ID NO: 10741 - DNA, 15 bp, Homo sapiens
tcgggaggtgttccg

SEQ ID NO: 10742 - DNA, 15 bp, Homo sapiens
ctcgggaggtgttcc

SEQ ID NO: 10743 - DNA, 15 bp, Homo sapiens
actcgggaggtgttc

SEQ ID NO: 10744 - DNA, 15 bp, Homo sapiens
gactcgggaggtgtt

SEQ ID NO: 10745 - DNA, 15 bp, Homo sapiens
ggactcgggaggtgt

SEQ ID NO: 10746 - DNA, 15 bp, Homo sapiens
gggactcgggaggtg

SEQ ID NO: 10747 - DNA, 15 bp, Homo sapiens
agggactcgggaggt

SEQ ID NO: 10748 - DNA, 15 bp, Homo sapiens
gagggactcgggagg

SEQ ID NO: 10749 - DNA, 15 bp, Homo sapiens
agagggactcgggag

SEQ ID NO: 10750 - DNA, 15 bp, Homo sapiens
aagagggactcggga

SEQ ID NO: 10751 - DNA, 15 bp, Homo sapiens
aaagagggactcggg

SEQ ID NO: 10752 - DNA, 15 bp, Homo sapiens
caaagagggactcgg

SEQ ID NO: 10753 - DNA, 15 bp, Homo sapiens
acaaagagggactcg

SEQ ID NO: 10754 - DNA, 15 bp, Homo sapiens
cacaaagagggactc

SEQ ID NO: 10755 - DNA, 15 bp, Homo sapiens
ccacaaagagggact

SEQ ID NO: 10756 - DNA, 15 bp, Homo sapiens
cccacaaagagggac

SEQ ID NO: 10757 - DNA, 15 bp, Homo sapiens
acccacaaagaggga

SEQ ID NO: 10758 - DNA, 15 bp, Homo sapiens
cacccacaaagaggg

SEQ ID NO: 10759 - DNA, 15 bp, Homo sapiens
tcacccacaaagagg

SEQ ID NO: 10760 - DNA, 15 bp, Homo sapiens
ttcacccacaaagag

SEQ ID NO: 10761 - DNA, 15 bp, Homo sapiens
gttcacccacaaaga

SEQ ID NO: 10762 - DNA, 15 bp, Homo sapiens
ggttcacccacaaag

SEQ ID NO: 10763 - DNA, 15 bp, Homo sapiens
gggttcacccacaaa

SEQ ID NO: 10764 - DNA, 15 bp, Homo sapiens
tgggttcacccacaa

SEQ ID NO: 10765 - DNA, 15 bp, Homo sapiens
ctgggttcacccaca

SEQ ID NO: 10766 - DNA, 15 bp, Homo sapiens
tctgggttcacccac

SEQ ID NO: 10767 - DNA, 15 bp, Homo sapiens
ctctgggttcaccca

SEQ ID NO: 10768 - DNA, 15 bp, Homo sapiens
cctctgggttcaccc

SEQ ID NO: 10769 - DNA, 15 bp, Homo sapiens
gcctctgggttcacc

SEQ ID NO: 10770 - DNA, 15 bp, Homo sapiens
agcctctgggttcac

SEQ ID NO: 10771 - DNA, 15 bp, Homo sapiens
cagcctctgggttca

SEQ ID NO: 10772 - DNA, 15 bp, Homo sapiens
ccagcctctgggttc

SEQ ID NO: 10773 - DNA, 15 bp, Homo sapiens
cccagcctctgggtt

SEQ ID NO: 10774 - DNA, 15 bp, Homo sapiens
tcccagcctctgggt

SEQ ID NO: 10775 - DNA, 15 bp, Homo sapiens
ctcccagcctctggg

SEQ ID NO: 10776 - DNA, 15 bp, Homo sapiens
gctcccagcctctgg

SEQ ID NO: 10777 - DNA, 15 bp, Homo sapiens
agctcccagcctctg

SEQ ID NO: 10778 - DNA, 15 bp, Homo sapiens
cagctcccagcctct

SEQ ID NO: 10779 - DNA, 15 bp, Homo sapiens
ccagctcccagcctc

SEQ ID NO: 10780 - DNA, 15 bp, Homo sapiens
accagctcccagcct

SEQ ID NO: 10781 - DNA, 15 bp, Homo sapiens
caccagctcccagcc

SEQ ID NO: 10782 - DNA, 15 bp, Homo sapiens
tcaccagctcccagc

SEQ ID NO: 10783 - DNA, 15 bp, Homo sapiens
gtcaccagctcccag

SEQ ID NO: 10784 - DNA, 15 bp, Homo sapiens
agtcaccagctccca

SEQ ID NO: 10785 - DNA, 15 bp, Homo sapiens
gagtcaccagctccc

SEQ ID NO: 10786 - DNA, 15 bp, Homo sapiens
tgagtcaccagctcc

SEQ ID NO: 10787 - DNA, 15 bp, Homo sapiens
atgagtcaccagctc

SEQ ID NO: 10788 - DNA, 15 bp, Homo sapiens
catgagtcaccagct

SEQ ID NO: 10789 - DNA, 15 bp, Homo sapiens
tcatgagtcaccagc

SEQ ID NO: 10790 - DNA, 15 bp, Homo sapiens
atcatgagtcaccag

SEQ ID NO: 10791 - DNA, 15 bp, Homo sapiens
gatcatgagtcacca

SEQ ID NO: 10792 - DNA, 15 bp, Homo sapiens
ggatcatgagtcacc

SEQ ID NO: 10793 - DNA, 15 bp, Homo sapiens
tggatcatgagtcac

SEQ ID NO: 10794 - DNA, 15 bp, Homo sapiens
atggatcatgagtca

SEQ ID NO: 10795 - DNA, 15 bp, Homo sapiens
aatggatcatgagtc

SEQ ID NO: 10796 - DNA, 15 bp, Homo sapiens
caatggatcatgagt

SEQ ID NO: 10797 - DNA, 15 bp, Homo sapiens
tcaatggatcatgag

SEQ ID NO: 10798 - DNA, 15 bp, Homo sapiens
ctcaatggatcatga

SEQ ID NO: 10799 - DNA, 15 bp, Homo sapiens
tctcaatggatcatg

SEQ ID NO: 10800 - DNA, 15 bp, Homo sapiens
ttctcaatggatcat

SEQ ID NO: 10801 - DNA, 15 bp, Homo sapiens
cttctcaatggatca

SEQ ID NO: 10802 - DNA, 15 bp, Homo sapiens
gcttctcaatggatc

SEQ ID NO: 10803 - DNA, 15 bp, Homo sapiens
tgcttctcaatggat

SEQ ID NO: 10804 - DNA, 15 bp, Homo sapiens
ctgcttctcaatgga

SEQ ID NO: 10805 - DNA, 15 bp, Homo sapiens
actgcttctcaatgg

SEQ ID NO: 10806 - DNA, 15 bp, Homo sapiens
gactgcttctcaatg

SEQ ID NO: 10807 - DNA, 15 bp, Homo sapiens
tgactgcttctcaat

SEQ ID NO: 10808 - DNA, 15 bp, Homo sapiens
atgactgcttctcaa

SEQ ID NO: 10809 - DNA, 15 bp, Homo sapiens
catgactgcttctca

SEQ ID NO: 10810 - DNA, 15 bp, Homo sapiens
tcatgactgcttctc

SEQ ID NO: 10811 - DNA, 15 bp, Homo sapiens
atcatgactgcttct

SEQ ID NO: 10812 - DNA, 15 bp, Homo sapiens
catcatgactgcttc

SEQ ID NO: 10813 - DNA, 15 bp, Homo sapiens
gcatcatgactgctt

SEQ ID NO: 10814 - DNA, 15 bp, Homo sapiens
tgcatcatgactgct

SEQ ID NO: 10815 - DNA, 15 bp, Homo sapiens
ctgcatcatgactgc

SEQ ID NO: 10816 - DNA, 15 bp, Homo sapiens
tctgcatcatgactg

SEQ ID NO: 10817 - DNA, 15 bp, Homo sapiens
ctctgcatcatgact

SEQ ID NO: 10818 - DNA, 15 bp, Homo sapiens
gctctgcatcatgac

SEQ ID NO: 10819 - DNA, 15 bp, Homo sapiens
agctctgcatcatga

SEQ ID NO: 10820 - DNA, 15 bp, Homo sapiens
cagctctgcatcatg

SEQ ID NO: 10821 - DNA, 15 bp, Homo sapiens
acagctctgcatcat

SEQ ID NO: 10822 - DNA, 15 bp, Homo sapiens
cacagctctgcatca

SEQ ID NO: 10823 - DNA, 15 bp, Homo sapiens
acacagctctgcatc

SEQ ID NO: 10824 - DNA, 15 bp, Homo sapiens
cacacagctctgcat

SEQ ID NO: 10825 - DNA, 15 bp, Homo sapiens
acacacagctctgca

SEQ ID NO: 10826 - DNA, 15 bp, Homo sapiens
aacacacagctctgc

SEQ ID NO: 10827 - DNA, 15 bp, Homo sapiens
caacacacagctctg

SEQ ID NO: 10828 - DNA, 15 bp, Homo sapiens
ccaacacacagctct

SEQ ID NO: 10829 - DNA, 15 bp, Homo sapiens
tccaacacacagctc

SEQ ID NO: 10830 - DNA, 15 bp, Homo sapiens
ctccaacacacagct

SEQ ID NO: 10831 - DNA, 15 bp, Homo sapiens
cctccaacacacagc

SEQ ID NO: 10832 - DNA, 15 bp, Homo sapiens
acctccaacacacag

SEQ ID NO: 10833 - DNA, 15 bp, Homo sapiens
gacctccaacacaca

SEQ ID NO: 10834 - DNA, 15 bp, Homo sapiens
agacctccaacacac

SEQ ID NO: 10835 - DNA, 15 bp, Homo sapiens
gagacctccaacaca

SEQ ID NO: 10836 - DNA, 15 bp, Homo sapiens
tgagacctccaacac

SEQ ID NO: 10837 - DNA, 15 bp, Homo sapiens
ctgagacctccaaca

SEQ ID NO: 10838 - DNA, 15 bp, Homo sapiens
gctgagacctccaac

SEQ ID NO: 10839 - DNA, 15 bp, Homo sapiens
agctgagacctccaa

SEQ ID NO: 10840 - DNA, 15 bp, Homo sapiens
cagctgagacctcca

SEQ ID NO: 10841 - DNA, 15 bp, Homo sapiens
tcagctgagacctcc

SEQ ID NO: 10842 - DNA, 15 bp, Homo sapiens
ctcagctgagacctc

SEQ ID NO: 10843 - DNA, 15 bp, Homo sapiens
tctcagctgagacct

SEQ ID NO: 10844 - DNA, 15 bp, Homo sapiens
ctctcagctgagacc

SEQ ID NO: 10845 - DNA, 15 bp, Homo sapiens
cctctcagctgagac

SEQ ID NO: 10846 - DNA, 15 bp, Homo sapiens
ccctctcagctgaga

SEQ ID NO: 10847 - DNA, 15 bp, Homo sapiens
gccctctcagctgag

SEQ ID NO: 10848 - DNA, 15 bp, Homo sapiens
agccctctcagctga

SEQ ID NO: 10849 - DNA, 15 bp, Homo sapiens
cagccctctcagctg

SEQ ID NO: 10850 - DNA, 15 bp, Homo sapiens
ccagccctctcagct

SEQ ID NO: 10851 - DNA, 15 bp, Homo sapiens
tccagccctctcagc

SEQ ID NO: 10852 - DNA, 15 bp, Homo sapiens
atccagccctctcag

SEQ ID NO: 10853 - DNA, 15 bp, Homo sapiens
aatccagccctctca

SEQ ID NO: 10854 - DNA, 15 bp, Homo sapiens
taatccagccctctc

SEQ ID NO: 10855 - DNA, 15 bp, Homo sapiens
ctaatccagccctct

SEQ ID NO: 10856 - DNA, 15 bp, Homo sapiens
gctaatccagccctc

SEQ ID NO: 10857 - DNA, 15 bp, Homo sapiens
tgctaatccagccct

SEQ ID NO: 10858 - DNA, 15 bp, Homo sapiens
ctgctaatccagccc

SEQ ID NO: 10859 - DNA, 15 bp, Homo sapiens
actgctaatccagcc

SEQ ID NO: 10860 - DNA, 15 bp, Homo sapiens
gactgctaatccagc

SEQ ID NO: 10861 - DNA, 15 bp, Homo sapiens
ggactgctaatccag

SEQ ID NO: 10862 - DNA, 15 bp, Homo sapiens
aggactgctaatcca

SEQ ID NO: 10863 - DNA, 15 bp, Homo sapiens
gaggactgctaatcc

SEQ ID NO: 10864 - DNA, 15 bp, Homo sapiens
tgaggactgctaatc

SEQ ID NO: 10865 - DNA, 15 bp, Homo sapiens
atgaggactgctaat

SEQ ID NO: 10866 - DNA, 15 bp, Homo sapiens
aatgaggactgctaa

SEQ ID NO: 10867 - DNA, 15 bp, Homo sapiens
caatgaggactgcta

SEQ ID NO: 10868 - DNA, 15 bp, Homo sapiens
ccaatgaggactgct

SEQ ID NO: 10869 - DNA, 15 bp, Homo sapiens
accaatgaggactgc

SEQ ID NO: 10870 - DNA, 15 bp, Homo sapiens
caccaatgaggactg

SEQ ID NO: 10871 - DNA, 15 bp, Homo sapiens
acaccaatgaggact

SEQ ID NO: 10872 - DNA, 15 bp, Homo sapiens
tacaccaatgaggac

SEQ ID NO: 10873 - DNA, 15 bp, Homo sapiens
atacaccaatgagga

SEQ ID NO: 10874 - DNA, 15 bp, Homo sapiens
catacaccaatgagg

SEQ ID NO: 10875 - DNA, 15 bp, Homo sapiens
ccatacaccaatgag

SEQ ID NO: 10876 - DNA, 15 bp, Homo sapiens
gccatacaccaatga

SEQ ID NO: 10877 - DNA, 15 bp, Homo sapiens
agccatacaccaatg

SEQ ID NO: 10878 - DNA, 15 bp, Homo sapiens
aagccatacaccaat

SEQ ID NO: 10879 - DNA, 15 bp, Homo sapiens
aaagccatacaccaa

SEQ ID NO: 10880 - DNA, 15 bp, Homo sapiens
caaagccatacacca

SEQ ID NO: 10881 - DNA, 15 bp, Homo sapiens
gcaaagccatacacc

SEQ ID NO: 10882 - DNA, 15 bp, Homo sapiens
tgcaaagccatacac

SEQ ID NO: 10883 - DNA, 15 bp, Homo sapiens
ctgcaaagccataca

SEQ ID NO: 10884 - DNA, 15 bp, Homo sapiens
gctgcaaagccatac

SEQ ID NO: 10885 - DNA, 15 bp, Homo sapiens
tgctgcaaagccata

SEQ ID NO: 10886 - DNA, 15 bp, Homo sapiens
ttgctgcaaagccat

SEQ ID NO: 10887 - DNA, 15 bp, Homo sapiens
attgctgcaaagcca

SEQ ID NO: 10888 - DNA, 15 bp, Homo sapiens
tattgctgcaaagcc

SEQ ID NO: 10889 - DNA, 15 bp, Homo sapiens
ttattgctgcaaagc

SEQ ID NO: 10890 - DNA, 15 bp, Homo sapiens
gttattgctgcaaag

SEQ ID NO: 10891 - DNA, 15 bp, Homo sapiens
agttattgctgcaaa

SEQ ID NO: 10892 - DNA, 15 bp, Homo sapiens
cagttattgctgcaa

SEQ ID NO: 10893 - DNA, 15 bp, Homo sapiens
tcagttattgctgca

SEQ ID NO: 10894 - DNA, 15 bp, Homo sapiens
atcagttattgctgc

SEQ ID NO: 10895 - DNA, 15 bp, Homo sapiens
catcagttattgctg

SEQ ID NO: 10896 - DNA, 15 bp, Homo sapiens
ccatcagttattgct

SEQ ID NO: 10897 - DNA, 15 bp, Homo sapiens
gccatcagttattgc

SEQ ID NO: 10898 - DNA, 15 bp, Homo sapiens
agccatcagttattg

SEQ ID NO: 10899 - DNA, 15 bp, Homo sapiens
cagccatcagttatt

SEQ ID NO: 10900 - DNA, 15 bp, Homo sapiens
acagccatcagttat

SEQ ID NO: 10901 - DNA, 15 bp, Homo sapiens
aacagccatcagtta

SEQ ID NO: 10902 - DNA, 15 bp, Homo sapiens
aaacagccatcagtt

SEQ ID NO: 10903 - DNA, 15 bp, Homo sapiens
gaaacagccatcagt

SEQ ID NO: 10904 - DNA, 15 bp, Homo sapiens
ggaaacagccatcag

SEQ ID NO: 10905 - DNA, 15 bp, Homo sapiens
gggaaacagccatca

SEQ ID NO: 10906 - DNA, 15 bp, Homo sapiens
ggggaaacagccatc

SEQ ID NO: 10907 - DNA, 15 bp, Homo sapiens
aggggaaacagccat

SEQ ID NO: 10908 - DNA, 15 bp, Homo sapiens
gaggggaaacagcca

SEQ ID NO: 10909 - DNA, 15 bp, Homo sapiens
ggaggggaaacagcc

SEQ ID NO: 10910 - DNA, 15 bp, Homo sapiens
aggaggggaaacagc

SEQ ID NO: 10911 - DNA, 15 bp, Homo sapiens
caggaggggaaacag

SEQ ID NO: 10912 - DNA, 15 bp, Homo sapiens
gcaggaggggaaaca

SEQ ID NO: 10913 - DNA, 15 bp, Homo sapiens
agcaggaggggaaac

SEQ ID NO: 10914 - DNA, 15 bp, Homo sapiens
aagcaggaggggaaa

SEQ ID NO: 10915 - DNA, 15 bp, Homo sapiens
aaagcaggaggggaa

SEQ ID NO: 10916 - DNA, 15 bp, Homo sapiens
taaagcaggagggga

SEQ ID NO: 10917 - DNA, 15 bp, Homo sapiens
ataaagcaggagggg

SEQ ID NO: 10918 - DNA, 15 bp, Homo sapiens
gataaagcaggaggg

SEQ ID NO: 10919 - DNA, 15 bp, Homo sapiens
agataaagcaggagg

SEQ ID NO: 10920 - DNA, 15 bp, Homo sapiens
aagataaagcaggag

SEQ ID NO: 10921 - DNA, 15 bp, Homo sapiens
aaagataaagcagga

SEQ ID NO: 10922 - DNA, 15 bp, Homo sapiens
gaaagataaagcagg

SEQ ID NO: 10923 - DNA, 15 bp, Homo sapiens
tgaaagataaagcag

SEQ ID NO: 10924 - DNA, 15 bp, Homo sapiens
ctgaaagataaagca

SEQ ID NO: 10925 - DNA, 15 bp, Homo sapiens
actgaaagataaagc

SEQ ID NO: 10926 - DNA, 15 bp, Homo sapiens
aactgaaagataaag

SEQ ID NO: 10927 - DNA, 15 bp, Homo sapiens
taactgaaagataaa

SEQ ID NO: 10928 - DNA, 15 bp, Homo sapiens
ttaactgaaagataa

SEQ ID NO: 10929 - DNA, 15 bp, Homo sapiens
attaactgaaagata

SEQ ID NO: 10930 - DNA, 15 bp, Homo sapiens
cattaactgaaagat

SEQ ID NO: 10931 - DNA, 15 bp, Homo sapiens
tcattaactgaaaga

SEQ ID NO: 10932 - DNA, 15 bp, Homo sapiens
gtcattaactgaaag

SEQ ID NO: 10933 - DNA, 15 bp, Homo sapiens
ggtcattaactgaaa

SEQ ID NO: 10934 - DNA, 15 bp, Homo sapiens
tggtcattaactgaa

SEQ ID NO: 10935 - DNA, 15 bp, Homo sapiens
ctggtcattaactga

SEQ ID NO: 10936 - DNA, 15 bp, Homo sapiens
gctggtcattaactg

SEQ ID NO: 10937 - DNA, 15 bp, Homo sapiens
ggctggtcattaact

SEQ ID NO: 10938 - DNA, 15 bp, Homo sapiens
tggctggtcattaac

SEQ ID NO: 10939 - DNA, 15 bp, Homo sapiens
gtggctggtcattaa

SEQ ID NO: 10940 - DNA, 15 bp, Homo sapiens
cgtggctggtcatta

SEQ ID NO: 10941 - DNA, 15 bp, Homo sapiens
ccgtggctggtcatt

SEQ ID NO: 10942 - DNA, 15 bp, Homo sapiens
gccgtggctggtcat

SEQ ID NO: 10943 - DNA, 15 bp, Homo sapiens
cgccgtggctggtca

SEQ ID NO: 10944 - DNA, 15 bp, Homo sapiens
acgccgtggctggtc

SEQ ID NO: 10945 - DNA, 15 bp, Homo sapiens
gacgccgtggctggt

SEQ ID NO: 10946 - DNA, 15 bp, Homo sapiens
ggacgccgtggctgg

SEQ ID NO: 10947 - DNA, 15 bp, Homo sapiens
gggacgccgtggctg

SEQ ID NO: 10948 - DNA, 15 bp, Homo sapiens
agggacgccgtggct

SEQ ID NO: 10949 - DNA, 15 bp, Homo sapiens
cagggacgccgtggc

SEQ ID NO: 10950 - DNA, 15 bp, Homo sapiens
gcagggacgccgtgg

SEQ ID NO: 10951 - DNA, 15 bp, Homo sapiens
agcagggacgccgtg

SEQ ID NO: 10952 - DNA, 15 bp, Homo sapiens
cagcagggacgccgt

SEQ ID NO: 10953 - DNA, 15 bp, Homo sapiens
acagcagggacgccg

SEQ ID NO: 10954 - DNA, 15 bp, Homo sapiens
cacagcagggacgcc

SEQ ID NO: 10955 - DNA, 15 bp, Homo sapiens
tcacagcagggacgc

SEQ ID NO: 10956 - DNA, 15 bp, Homo sapiens
ctcacagcagggacg

SEQ ID NO: 10957 - DNA, 15 bp, Homo sapiens
gctcacagcagggac

SEQ ID NO: 10958 - DNA, 15 bp, Homo sapiens
agctcacagcaggga

SEQ ID NO: 10959 - DNA, 15 bp, Homo sapiens
gagctcacagcaggg

SEQ ID NO: 10960 - DNA, 15 bp, Homo sapiens
agagctcacagcagg

SEQ ID NO: 10961 - DNA, 15 bp, Homo sapiens
cagagctcacagcag

SEQ ID NO: 10962 - DNA, 15 bp, Homo sapiens
ccagagctcacagca

SEQ ID NO: 10963 - DNA, 15 bp, Homo sapiens
gccagagctcacagc

SEQ ID NO: 10964 - DNA, 15 bp, Homo sapiens
ggccagagctcacag

SEQ ID NO: 10965 - DNA, 15 bp, Homo sapiens
cggccagagctcaca

SEQ ID NO: 10966 - DNA, 15 bp, Homo sapiens
gcggccagagctcac

SEQ ID NO: 10967 - DNA, 15 bp, Homo sapiens
agcggccagagctca

SEQ ID NO: 10968 - DNA, 15 bp, Homo sapiens
cagcggccagagctc

SEQ ID NO: 10969 - DNA, 15 bp, Homo sapiens
gcagcggccagagct

SEQ ID NO: 10970 - DNA, 15 bp, Homo sapiens
ggcagcggccagagc

SEQ ID NO: 10971 - DNA, 15 bp, Homo sapiens
aggcagcggccagag

SEQ ID NO: 10972 - DNA, 15 bp, Homo sapiens
aaggcagcggccaga

SEQ ID NO: 10973 - DNA, 15 bp, Homo sapiens
gaaggcagcggccag

SEQ ID NO: 10974 - DNA, 15 bp, Homo sapiens
ggaaggcagcggcca

SEQ ID NO: 10975 - DNA, 15 bp, Homo sapiens
tggaaggcagcggcc

SEQ ID NO: 10976 - DNA, 15 bp, Homo sapiens
ctggaaggcagcggc

SEQ ID NO: 10977 - DNA, 15 bp, Homo sapiens
cctggaaggcagcgg

SEQ ID NO: 10978 - DNA, 15 bp, Homo sapiens
ccctggaaggcagcg

SEQ ID NO: 10979 - DNA, 15 bp, Homo sapiens
gccctggaaggcagc

SEQ ID NO: 10980 - DNA, 15 bp, Homo sapiens
agccctggaaggcag

SEQ ID NO: 10981 - DNA, 15 bp, Homo sapiens
gagccctggaaggca

SEQ ID NO: 10982 - DNA, 15 bp, Homo sapiens
ggagccctggaaggc

SEQ ID NO: 10983 - DNA, 15 bp, Homo sapiens
gggagccctggaagg

SEQ ID NO: 10984 - DNA, 15 bp, Homo sapiens
cgggagccctggaag

SEQ ID NO: 10985 - DNA, 15 bp, Homo sapiens
tcgggagccctggaa

SEQ ID NO: 10986 - DNA, 15 bp, Homo sapiens
ctcgggagccctgga

SEQ ID NO: 10987 - DNA, 15 bp, Homo sapiens
gctcgggagccctgg

SEQ ID NO: 10988 - DNA, 15 bp, Homo sapiens
ggctcgggagccctg

SEQ ID NO: 10989 - DNA, 15 bp, Homo sapiens
tggctcgggagccct

SEQ ID NO: 10990 - DNA, 15 bp, Homo sapiens
gtggctcgggagccc

SEQ ID NO: 10991 - DNA, 15 bp, Homo sapiens
tgtggctcgggagcc

SEQ ID NO: 10992 - DNA, 15 bp, Homo sapiens
gtgtggctcgggagc

SEQ ID NO: 10993 - DNA, 15 bp, Homo sapiens
cgtgtggctcgggag

SEQ ID NO: 10994 - DNA, 15 bp, Homo sapiens
gcgtgtggctcggga

SEQ ID NO: 10995 - DNA, 15 bp, Homo sapiens
agcgtgtggctcggg

SEQ ID NO: 10996 - DNA, 15 bp, Homo sapiens
cagcgtgtggctcgg

SEQ ID NO: 10997 - DNA, 15 bp, Homo sapiens
ccagcgtgtggctcg

SEQ ID NO: 10998 - DNA, 15 bp, Homo sapiens
cccagcgtgtggctc

SEQ ID NO: 10999 - DNA, 15 bp, Homo sapiens
ccccagcgtgtggct

SEQ ID NO: 11000 - DNA, 15 bp, Homo sapiens
cccccagcgtgtggc

SEQ ID NO: 11001 - DNA, 15 bp, Homo sapiens
acccccagcgtgtgg

SEQ ID NO: 11002 - DNA, 15 bp, Homo sapiens
cacccccagcgtgtg

SEQ ID NO: 11003 - DNA, 15 bp, Homo sapiens
gcacccccagcgtgt

SEQ ID NO: 11004 - DNA, 15 bp, Homo sapiens
agcacccccagcgtg

SEQ ID NO: 11005 - DNA, 15 bp, Homo sapiens
cagcacccccagcgt

SEQ ID NO: 11006 - DNA, 15 bp, Homo sapiens
ccagcacccccagcg

SEQ ID NO: 11007 - DNA, 15 bp, Homo sapiens
gccagcacccccagc

SEQ ID NO: 11008 - DNA, 15 bp, Homo sapiens
agccagcacccccag

SEQ ID NO: 11009 - DNA, 15 bp, Homo sapiens
cagccagcaccccca

SEQ ID NO: 11010 - DNA, 15 bp, Homo sapiens
tcagccagcaccccc

SEQ ID NO: 11011 - DNA, 15 bp, Homo sapiens
ctcagccagcacccc

SEQ ID NO: 11012 - DNA, 15 bp, Homo sapiens
cctcagccagcaccc

SEQ ID NO: 11013 - DNA, 15 bp, Homo sapiens
ccctcagccagcacc

SEQ ID NO: 11014 - DNA, 15 bp, Homo sapiens
tccctcagccagcac

SEQ ID NO: 11015 - DNA, 15 bp, Homo sapiens
ttccctcagccagca

SEQ ID NO: 11016 - DNA, 15 bp, Homo sapiens
gttccctcagccagc

SEQ ID NO: 11017 - DNA, 15 bp, Homo sapiens
tgttccctcagccag

SEQ ID NO: 11018 - DNA, 15 bp, Homo sapiens
atgttccctcagcca

SEQ ID NO: 11019 - DNA, 15 bp, Homo sapiens
catgttccctcagcc

SEQ ID NO: 11020 - DNA, 15 bp, Homo sapiens
ccatgttccctcagc

SEQ ID NO: 11021 - DNA, 15 bp, Homo sapiens
gccatgttccctcag

SEQ ID NO: 11022 - DNA, 15 bp, Homo sapiens
agccatgttccctca

SEQ ID NO: 11023 - DNA, 15 bp, Homo sapiens
aagccatgttccctc

SEQ ID NO: 11024 - DNA, 15 bp, Homo sapiens
caagccatgttccct

SEQ ID NO: 11025 - DNA, 15 bp, Homo sapiens
acaagccatgttccc

SEQ ID NO: 11026 - DNA, 15 bp, Homo sapiens
aacaagccatgttcc

SEQ ID NO: 11027 - DNA, 15 bp, Homo sapiens
caacaagccatgttc

SEQ ID NO: 11028 - DNA, 15 bp, Homo sapiens
ccaacaagccatgtt

SEQ ID NO: 11029 - DNA, 15 bp, Homo sapiens
gccaacaagccatgt

SEQ ID NO: 11030 - DNA, 15 bp, Homo sapiens
ggccaacaagccatg

SEQ ID NO: 11031 - DNA, 15 bp, Homo sapiens
aggccaacaagccat

SEQ ID NO: 11032 - DNA, 15 bp, Homo sapiens
gaggccaacaagcca

SEQ ID NO: 11033 - DNA, 15 bp, Homo sapiens
tgaggccaacaagcc

SEQ ID NO: 11034 - DNA, 15 bp, Homo sapiens
ctgaggccaacaagc

SEQ ID NO: 11035 - DNA, 15 bp, Homo sapiens
gctgaggccaacaag

SEQ ID NO: 11036 - DNA, 15 bp, Homo sapiens
agctgaggccaacaa

SEQ ID NO: 11037 - DNA, 15 bp, Homo sapiens
cagctgaggccaaca

SEQ ID NO: 11038 - DNA, 15 bp, Homo sapiens
tcagctgaggccaac

SEQ ID NO: 11039 - DNA, 15 bp, Homo sapiens
ctcagctgaggccaa

SEQ ID NO: 11040 - DNA, 15 bp, Homo sapiens
cctcagctgaggcca

SEQ ID NO: 11041 - DNA, 15 bp, Homo sapiens
acctcagctgaggcc

SEQ ID NO: 11042 - DNA, 15 bp, Homo sapiens
aacctcagctgaggc

SEQ ID NO: 11043 - DNA, 15 bp, Homo sapiens
caacctcagctgagg

SEQ ID NO: 11044 - DNA, 15 bp, Homo sapiens
gcaacctcagctgag

SEQ ID NO: 11045 - DNA, 15 bp, Homo sapiens
agcaacctcagctga

SEQ ID NO: 11046 - DNA, 15 bp, Homo sapiens
cagcaacctcagctg

SEQ ID NO: 11047 - DNA, 15 bp, Homo sapiens
gcagcaacctcagct

SEQ ID NO: 11048 - DNA, 15 bp, Homo sapiens
agcagcaacctcagc

SEQ ID NO: 11049 - DNA, 15 bp, Homo sapiens
cagcagcaacctcag

SEQ ID NO: 11050 - DNA, 15 bp, Homo sapiens
acagcagcaacctca

SEQ ID NO: 11051 - DNA, 15 bp, Homo sapiens
cacagcagcaacctc

SEQ ID NO: 11052 - DNA, 15 bp, Homo sapiens
ccacagcagcaacct

SEQ ID NO: 11053 - DNA, 15 bp, Homo sapiens
tccacagcagcaacc

SEQ ID NO: 11054 - DNA, 15 bp, Homo sapiens
ttccacagcagcaac

SEQ ID NO: 11055 - DNA, 15 bp, Homo sapiens
cttccacagcagcaa

SEQ ID NO: 11056 - DNA, 15 bp, Homo sapiens
tcttccacagcagca

SEQ ID NO: 11057 - DNA, 15 bp, Homo sapiens
ttcttccacagcagc

SEQ ID NO: 11058 - DNA, 15 bp, Homo sapiens
gttcttccacagcag

SEQ ID NO: 11059 - DNA, 15 bp, Homo sapiens
ggttcttccacagca

SEQ ID NO: 11060 - DNA, 15 bp, Homo sapiens
aggttcttccacagc

SEQ ID NO: 11061 - DNA, 15 bp, Homo sapiens
gaggttcttccacag

SEQ ID NO: 11062 - DNA, 15 bp, Homo sapiens
tgaggttcttccaca

SEQ ID NO: 11063 - DNA, 15 bp, Homo sapiens
gtgaggttcttccac

SEQ ID NO: 11064 - DNA, 15 bp, Homo sapiens
agtgaggttcttcca

SEQ ID NO: 11065 - DNA, 15 bp, Homo sapiens
aagtgaggttcttcc

SEQ ID NO: 11066 - DNA, 15 bp, Homo sapiens
aaagtgaggttcttc

SEQ ID NO: 11067 - DNA, 15 bp, Homo sapiens
gaaagtgaggttctt

SEQ ID NO: 11068 - DNA, 15 bp, Homo sapiens
tgaaagtgaggttct

SEQ ID NO: 11069 - DNA, 15 bp, Homo sapiens
ctgaaagtgaggttc

SEQ ID NO: 11070 - DNA, 15 bp, Homo sapiens
tctgaaagtgaggtt

SEQ ID NO: 11071 - DNA, 15 bp, Homo sapiens
ttctgaaagtgaggt

SEQ ID NO: 11072 - DNA, 15 bp, Homo sapiens
cttctgaaagtgagg

SEQ ID NO: 11073 - DNA, 15 bp, Homo sapiens
tcttctgaaagtgag

SEQ ID NO: 11074 - DNA, 15 bp, Homo sapiens
ttcttctgaaagtga

SEQ ID NO: 11075 - DNA, 15 bp, Homo sapiens
cttcttctgaaagtg

SEQ ID NO: 11076 - DNA, 15 bp, Homo sapiens
tcttcttctgaaagt

SEQ ID NO: 11077 - DNA, 15 bp, Homo sapiens
gtcttcttctgaaag

SEQ ID NO: 11078 - DNA, 15 bp, Homo sapiens
tgtcttcttctgaaa

SEQ ID NO: 11079 - DNA, 15 bp, Homo sapiens
ttgtcttcttctgaa

SEQ ID NO: 11080 - DNA, 15 bp, Homo sapiens
tttgtcttcttctga

SEQ ID NO: 11081 - DNA, 15 bp, Homo sapiens
gtttgtcttcttctg

SEQ ID NO: 11082 - DNA, 15 bp, Homo sapiens
tgtttgtcttcttct

SEQ ID NO: 11083 - DNA, 15 bp, Homo sapiens
ctgtttgtcttcttc

SEQ ID NO: 11084 - DNA, 15 bp, Homo sapiens
actgtttgtcttctt

SEQ ID NO: 11085 - DNA, 15 bp, Homo sapiens
tactgtttgtcttct

SEQ ID NO: 11086 - DNA, 15 bp, Homo sapiens
ttactgtttgtcttc

SEQ ID NO: 11087 - DNA, 15 bp, Homo sapiens
cttactgtttgtctt

SEQ ID NO: 11088 - DNA, 15 bp, Homo sapiens
gcttactgtttgtct

SEQ ID NO: 11089 - DNA, 15 bp, Homo sapiens
agcttactgtttgtc

SEQ ID NO: 11090 - DNA, 15 bp, Homo sapiens
aagcttactgtttgt

SEQ ID NO: 11091 - DNA, 15 bp, Homo sapiens
caagcttactgtttg

SEQ ID NO: 11092 - DNA, 15 bp, Homo sapiens
ccaagcttactgttt

SEQ ID NO: 11093 - DNA, 15 bp, Homo sapiens
cccaagcttactgtt

SEQ ID NO: 11094 - DNA, 15 bp, Homo sapiens
acccaagcttactgt

SEQ ID NO: 11095 - DNA, 15 bp, Homo sapiens
aacccaagcttactg

SEQ ID NO: 11096 - DNA, 15 bp, Homo sapiens
aaacccaagcttact

SEQ ID NO: 11097 - DNA, 15 bp, Homo sapiens
aaaacccaagcttac

SEQ ID NO: 11098 - DNA, 15 bp, Homo sapiens
aaaaacccaagctta

SEQ ID NO: 11099 - DNA, 15 bp, Homo sapiens
gaaaaacccaagctt

SEQ ID NO: 11100 - DNA, 15 bp, Homo sapiens
tgaaaaacccaagct

SEQ ID NO: 11101 - DNA, 15 bp, Homo sapiens
ctgaaaaacccaagc

SEQ ID NO: 11102 - DNA, 15 bp, Homo sapiens
gctgaaaaacccaag

SEQ ID NO: 11103 - DNA, 15 bp, Homo sapiens
tgctgaaaaacccaa

SEQ ID NO: 11104 - DNA, 15 bp, Homo sapiens
ctgctgaaaaaccca

SEQ ID NO: 11105 - DNA, 15 bp, Homo sapiens
gctgctgaaaaaccc

SEQ ID NO: 11106 - DNA, 15 bp, Homo sapiens
cgctgctgaaaaacc

SEQ ID NO: 11107 - DNA, 15 bp, Homo sapiens
ccgctgctgaaaaac

SEQ ID NO: 11108 - DNA, 15 bp, Homo sapiens
cccgctgctgaaaaa

SEQ ID NO: 11109 - DNA, 15 bp, Homo sapiens
ccccgctgctgaaaa

SEQ ID NO: 11110 - DNA, 15 bp, Homo sapiens
cccccgctgctgaaa

SEQ ID NO: 11111 - DNA, 15 bp, Homo sapiens
ccccccgctgctgaa

SEQ ID NO: 11112 - DNA, 15 bp, Homo sapiens
accccccgctgctga

SEQ ID NO: 11113 - DNA, 15 bp, Homo sapiens
aaccccccgctgctg

SEQ ID NO: 11114 - DNA, 15 bp, Homo sapiens
gaaccccccgctgct

SEQ ID NO: 11115 - DNA, 15 bp, Homo sapiens
agaaccccccgctgc

SEQ ID NO: 11116 - DNA, 15 bp, Homo sapiens
gagaaccccccgctg

SEQ ID NO: 11117 - DNA, 15 bp, Homo sapiens
agagaaccccccgct

SEQ ID NO: 11118 - DNA, 15 bp, Homo sapiens
gagagaaccccccgc

SEQ ID NO: 11119 - DNA, 15 bp, Homo sapiens
tgagagaaccccccg

SEQ ID NO: 11120 - DNA, 15 bp, Homo sapiens
atgagagaacccccc

SEQ ID NO: 11121 - DNA, 15 bp, Homo sapiens
aatgagagaaccccc

SEQ ID NO: 11122 - DNA, 15 bp, Homo sapiens
aaatgagagaacccc

SEQ ID NO: 11123 - DNA, 15 bp, Homo sapiens
aaaatgagagaaccc

SEQ ID NO: 11124 - DNA, 15 bp, Homo sapiens
aaaaatgagagaacc

SEQ ID NO: 11125 - DNA, 15 bp, Homo sapiens
aaaaaatgagagaac

SEQ ID NO: 11126 - DNA, 15 bp, Homo sapiens
gaaaaaatgagagaa

SEQ ID NO: 11127 - DNA, 15 bp, Homo sapiens
agaaaaaatgagaga

SEQ ID NO: 11128 - DNA, 15 bp, Homo sapiens
aagaaaaaatgagag

SEQ ID NO: 11129 - DNA, 15 bp, Homo sapiens
aaagaaaaaatgaga

SEQ ID NO: 11130 - DNA, 15 bp, Homo sapiens
caaagaaaaaatgag

SEQ ID NO: 11131 - DNA, 15 bp, Homo sapiens
acaaagaaaaaatga

SEQ ID NO: 11132 - DNA, 15 bp, Homo sapiens
cacaaagaaaaaatg

SEQ ID NO: 11133 - DNA, 15 bp, Homo sapiens
ccacaaagaaaaaat

SEQ ID NO: 11134 - DNA, 15 bp, Homo sapiens
accacaaagaaaaaa

SEQ ID NO: 11135 - DNA, 15 bp, Homo sapiens
aaccacaaagaaaaa

SEQ ID NO: 11136 - DNA, 15 bp, Homo sapiens
aaaccacaaagaaaa

SEQ ID NO: 11137 - DNA, 15 bp, Homo sapiens
aaaaccacaaagaaa

SEQ ID NO: 11138 - DNA, 15 bp, Homo sapiens
caaaaccacaaagaa

SEQ ID NO: 11139 - DNA, 15 bp, Homo sapiens
tcaaaaccacaaaga

SEQ ID NO: 11140 - DNA, 15 bp, Homo sapiens
ctcaaaaccacaaag

SEQ ID NO: 11141 - DNA, 15 bp, Homo sapiens
actcaaaaccacaaa

SEQ ID NO: 11142 - DNA, 15 bp, Homo sapiens
aactcaaaaccacaa

SEQ ID NO: 11143 - DNA, 15 bp, Homo sapiens
caactcaaaaccaca

SEQ ID NO: 11144 - DNA, 15 bp, Homo sapiens
ccaactcaaaaccac

SEQ ID NO: 11145 - DNA, 15 bp, Homo sapiens
cccaactcaaaacca

SEQ ID NO: 11146 - DNA, 15 bp, Homo sapiens
ccccaactcaaaacc

SEQ ID NO: 11147 - DNA, 15 bp, Homo sapiens
tccccaactcaaaac

SEQ ID NO: 11148 - DNA, 15 bp, Homo sapiens
atccccaactcaaaa

SEQ ID NO: 11149 - DNA, 15 bp, Homo sapiens
aatccccaactcaaa

SEQ ID NO: 11150 - DNA, 15 bp, Homo sapiens
caatccccaactcaa

SEQ ID NO: 11151 - DNA, 15 bp, Homo sapiens
ccaatccccaactca

SEQ ID NO: 11152 - DNA, 15 bp, Homo sapiens
tccaatccccaactc

SEQ ID NO: 11153 - DNA, 15 bp, Homo sapiens
ctccaatccccaact

SEQ ID NO: 11154 - DNA, 15 bp, Homo sapiens
cctccaatccccaac

SEQ ID NO: 11155 - DNA, 15 bp, Homo sapiens
tcctccaatccccaa

SEQ ID NO: 11156 - DNA, 15 bp, Homo sapiens
ctcctccaatcccca

SEQ ID NO: 11157 - DNA, 15 bp, Homo sapiens
cctcctccaatcccc

SEQ ID NO: 11158 - DNA, 15 bp, Homo sapiens
ccctcctccaatccc

SEQ ID NO: 11159 - DNA, 15 bp, Homo sapiens
tccctcctccaatcc

SEQ ID NO: 11160 - DNA, 15 bp, Homo sapiens
ctccctcctccaatc

SEQ ID NO: 11161 - DNA, 15 bp, Homo sapiens
cctccctcctccaat

SEQ ID NO: 11162 - DNA, 15 bp, Homo sapiens
ccctccctcctccaa

SEQ ID NO: 11163 - DNA, 15 bp, Homo sapiens
tccctccctcctcca

SEQ ID NO: 11164 - DNA, 15 bp, Homo sapiens
ctccctccctcctcc

SEQ ID NO: 11165 - DNA, 15 bp, Homo sapiens
cctccctccctcctc

SEQ ID NO: 11166 - DNA, 15 bp, Homo sapiens
ccctccctccctcct

SEQ ID NO: 11167 - DNA, 15 bp, Homo sapiens
tccctccctccctcc

SEQ ID NO: 11168 - DNA, 15 bp, Homo sapiens
ttccctccctccctc

SEQ ID NO: 11169 - DNA, 15 bp, Homo sapiens
cttccctccctccct

SEQ ID NO: 11170 - DNA, 15 bp, Homo sapiens
ccttccctccctccc

SEQ ID NO: 11171 - DNA, 15 bp, Homo sapiens
tccttccctccctcc

SEQ ID NO: 11172 - DNA, 15 bp, Homo sapiens
ttccttccctccctc

SEQ ID NO: 11173 - DNA, 15 bp, Homo sapiens
cttccttccctccct

SEQ ID NO: 11174 - DNA, 15 bp, Homo sapiens
gcttccttccctccc

SEQ ID NO: 11175 - DNA, 15 bp, Homo sapiens
agcttccttccctcc

SEQ ID NO: 11176 - DNA, 15 bp, Homo sapiens
cagcttccttccctc

SEQ ID NO: 11177 - DNA, 15 bp, Homo sapiens
acagcttccttccct

SEQ ID NO: 11178 - DNA, 15 bp, Homo sapiens
cacagcttccttccc

SEQ ID NO: 11179 - DNA, 15 bp, Homo sapiens
acacagcttccttcc

SEQ ID NO: 11180 - DNA, 15 bp, Homo sapiens
aacacagcttccttc

SEQ ID NO: 11181 - DNA, 15 bp, Homo sapiens
caacacagcttcctt

SEQ ID NO: 11182 - DNA, 15 bp, Homo sapiens
ccaacacagcttcct

SEQ ID NO: 11183 - DNA, 15 bp, Homo sapiens
accaacacagcttcc

SEQ ID NO: 11184 - DNA, 15 bp, Homo sapiens
aaccaacacagcttc

SEQ ID NO: 11185 - DNA, 15 bp, Homo sapiens
aaaccaacacagctt

SEQ ID NO: 11186 - DNA, 15 bp, Homo sapiens
aaaaccaacacagct

SEQ ID NO: 11187 - DNA, 15 bp, Homo sapiens
gaaaaccaacacagc

SEQ ID NO: 11188 - DNA, 15 bp, Homo sapiens
tgaaaaccaacacag

SEQ ID NO: 11189 - DNA, 15 bp, Homo sapiens
gtgaaaaccaacaca

SEQ ID NO: 11190 - DNA, 15 bp, Homo sapiens
tgtgaaaaccaacac

SEQ ID NO: 11191 - DNA, 15 bp, Homo sapiens
gtgtgaaaaccaaca

SEQ ID NO: 11192 - DNA, 15 bp, Homo sapiens
tgtgtgaaaaccaac

SEQ ID NO: 11193 - DNA, 15 bp, Homo sapiens
ctgtgtgaaaaccaa

SEQ ID NO: 11194 - DNA, 15 bp, Homo sapiens
cctgtgtgaaaacca

SEQ ID NO: 11195 - DNA, 15 bp, Homo sapiens
ccctgtgtgaaaacc

SEQ ID NO: 11196 - DNA, 15 bp, Homo sapiens
tccctgtgtgaaaac

SEQ ID NO: 11197 - DNA, 15 bp, Homo sapiens
atccctgtgtgaaaa

SEQ ID NO: 11198 - DNA, 15 bp, Homo sapiens
aatccctgtgtgaaa

SEQ ID NO: 11199 - DNA, 15 bp, Homo sapiens
caatccctgtgtgaa

SEQ ID NO: 11200 - DNA, 15 bp, Homo sapiens
tcaatccctgtgtga

SEQ ID NO: 11201 - DNA, 15 bp, Homo sapiens
atcaatccctgtgtg

SEQ ID NO: 11202 - DNA, 15 bp, Homo sapiens
catcaatccctgtgt

SEQ ID NO: 11203 - DNA, 15 bp, Homo sapiens
ccatcaatccctgtg

SEQ ID NO: 11204 - DNA, 15 bp, Homo sapiens
tccatcaatccctgt

SEQ ID NO: 11205 - DNA, 15 bp, Homo sapiens
ttccatcaatccctg

SEQ ID NO: 11206 - DNA, 15 bp, Homo sapiens
attccatcaatccct

SEQ ID NO: 11207 - DNA, 15 bp, Homo sapiens
gattccatcaatccc

SEQ ID NO: 11208 - DNA, 15 bp, Homo sapiens
agattccatcaatcc

SEQ ID NO: 11209 - DNA, 15 bp, Homo sapiens
cagattccatcaatc

SEQ ID NO: 11210 - DNA, 15 bp, Homo sapiens
ccagattccatcaat

SEQ ID NO: 11211 - DNA, 15 bp, Homo sapiens
gccagattccatcaa

SEQ ID NO: 11212 - DNA, 15 bp, Homo sapiens
agccagattccatca

SEQ ID NO: 11213 - DNA, 15 bp, Homo sapiens
gagccagattccatc

SEQ ID NO: 11214 - DNA, 15 bp, Homo sapiens
agagccagattccat

SEQ ID NO: 11215 - DNA, 15 bp, Homo sapiens
aagagccagattcca

SEQ ID NO: 11216 - DNA, 15 bp, Homo sapiens
taagagccagattcc

SEQ ID NO: 11217 - DNA, 15 bp, Homo sapiens
ataagagccagattc

SEQ ID NO: 11218 - DNA, 15 bp, Homo sapiens
cataagagccagatt

SEQ ID NO: 11219 - DNA, 15 bp, Homo sapiens
ccataagagccagat

SEQ ID NO: 11220 - DNA, 15 bp, Homo sapiens
tccataagagccaga

SEQ ID NO: 11221 - DNA, 15 bp, Homo sapiens
gtccataagagccag

SEQ ID NO: 11222 - DNA, 15 bp, Homo sapiens
tgtccataagagcca

SEQ ID NO: 11223 - DNA, 15 bp, Homo sapiens
gtgtccataagagcc

SEQ ID NO: 11224 - DNA, 15 bp, Homo sapiens
tgtgtccataagagc

SEQ ID NO: 11225 - DNA, 15 bp, Homo sapiens
ctgtgtccataagag

SEQ ID NO: 11226 - DNA, 15 bp, Homo sapiens
cctgtgtccataaga

SEQ ID NO: 11227 - DNA, 15 bp, Homo sapiens
tcctgtgtccataag

SEQ ID NO: 11228 - DNA, 15 bp, Homo sapiens
gtcctgtgtccataa

SEQ ID NO: 11229 - DNA, 15 bp, Homo sapiens
agtcctgtgtccata

SEQ ID NO: 11230 - DNA, 15 bp, Homo sapiens
cagtcctgtgtccat

SEQ ID NO: 11231 - DNA, 15 bp, Homo sapiens
acagtcctgtgtcca

SEQ ID NO: 11232 - DNA, 15 bp, Homo sapiens
cacagtcctgtgtcc

SEQ ID NO: 11233 - DNA, 15 bp, Homo sapiens
acacagtcctgtgtc

SEQ ID NO: 11234 - DNA, 15 bp, Homo sapiens
cacacagtcctgtgt

SEQ ID NO: 11235 - DNA, 15 bp, Homo sapiens
ccacacagtcctgtg

SEQ ID NO: 11236 - DNA, 15 bp, Homo sapiens
accacacagtcctgt

SEQ ID NO: 11237 - DNA, 15 bp, Homo sapiens
gaccacacagtcctg

SEQ ID NO: 11238 - DNA, 15 bp, Homo sapiens
ggaccacacagtcct

SEQ ID NO: 11239 - DNA, 15 bp, Homo sapiens
cggaccacacagtcc

SEQ ID NO: 11240 - DNA, 15 bp, Homo sapiens
ccggaccacacagtc

SEQ ID NO: 11241 - DNA, 15 bp, Homo sapiens
tccggaccacacagt

SEQ ID NO: 11242 - DNA, 15 bp, Homo sapiens
atccggaccacacag

SEQ ID NO: 11243 - DNA, 15 bp, Homo sapiens
tatccggaccacaca

SEQ ID NO: 11244 - DNA, 15 bp, Homo sapiens
atatccggaccacac

SEQ ID NO: 11245 - DNA, 15 bp, Homo sapiens
catatccggaccaca

SEQ ID NO: 11246 - DNA, 15 bp, Homo sapiens
ccatatccggaccac

SEQ ID NO: 11247 - DNA, 15 bp, Homo sapiens
gccatatccggacca

SEQ ID NO: 11248 - DNA, 15 bp, Homo sapiens
tgccatatccggacc

SEQ ID NO: 11249 - DNA, 15 bp, Homo sapiens
atgccatatccggac

SEQ ID NO: 11250 - DNA, 15 bp, Homo sapiens
catgccatatccgga

SEQ ID NO: 11251 - DNA, 15 bp, Homo sapiens
acatgccatatccgg

SEQ ID NO: 11252 - DNA, 15 bp, Homo sapiens
cacatgccatatccg

SEQ ID NO: 11253 - DNA, 15 bp, Homo sapiens
ccacatgccatatcc

SEQ ID NO: 11254 - DNA, 15 bp, Homo sapiens
gccacatgccatatc

SEQ ID NO: 11255 - DNA, 15 bp, Homo sapiens
agccacatgccatat

SEQ ID NO: 11256 - DNA, 15 bp, Homo sapiens
aagccacatgccata

SEQ ID NO: 11257 - DNA, 15 bp, Homo sapiens
taagccacatgccat

SEQ ID NO: 11258 - DNA, 15 bp, Homo sapiens
ataagccacatgcca

SEQ ID NO: 11259 - DNA, 15 bp, Homo sapiens
gataagccacatgcc

SEQ ID NO: 11260 - DNA, 15 bp, Homo sapiens
tgataagccacatgc

SEQ ID NO: 11261 - DNA, 15 bp, Homo sapiens
atgataagccacatg

SEQ ID NO: 11262 - DNA, 15 bp, Homo sapiens
tatgataagccacat

SEQ ID NO: 11263 - DNA, 15 bp, Homo sapiens
ctatgataagccaca

SEQ ID NO: 11264 - DNA, 15 bp, Homo sapiens
tctatgataagccac

SEQ ID NO: 11265 - DNA, 15 bp, Homo sapiens
ctctatgataagcca

SEQ ID NO: 11266 - DNA, 15 bp, Homo sapiens
cctctatgataagcc

SEQ ID NO: 11267 - DNA, 15 bp, Homo sapiens
ccctctatgataagc

SEQ ID NO: 11268 - DNA, 15 bp, Homo sapiens
gccctctatgataag

SEQ ID NO: 11269 - DNA, 15 bp, Homo sapiens
tgccctctatgataa

SEQ ID NO: 11270 - DNA, 15 bp, Homo sapiens
ctgccctctatgata

SEQ ID NO: 11271 - DNA, 15 bp, Homo sapiens
tctgccctctatgat

SEQ ID NO: 11272 - DNA, 15 bp, Homo sapiens
atctgccctctatga

SEQ ID NO: 11273 - DNA, 15 bp, Homo sapiens
aatctgccctctatg

SEQ ID NO: 11274 - DNA, 15 bp, Homo sapiens
aaatctgccctctat

SEQ ID NO: 11275 - DNA, 15 bp, Homo sapiens
caaatctgccctcta

SEQ ID NO: 11276 - DNA, 15 bp, Homo sapiens
gcaaatctgccctct

SEQ ID NO: 11277 - DNA, 15 bp, Homo sapiens
tgcaaatctgccctc

SEQ ID NO: 11278 - DNA, 15 bp, Homo sapiens
ctgcaaatctgccct

SEQ ID NO: 11279 - DNA, 15 bp, Homo sapiens
gctgcaaatctgccc

SEQ ID NO: 11280 - DNA, 15 bp, Homo sapiens
ggctgcaaatctgcc

SEQ ID NO: 11281 - DNA, 15 bp, Homo sapiens
tggctgcaaatctgc

SEQ ID NO: 11282 - DNA, 15 bp, Homo sapiens
ctggctgcaaatctg

SEQ ID NO: 11283 - DNA, 15 bp, Homo sapiens
cctggctgcaaatct

SEQ ID NO: 11284 - DNA, 15 bp, Homo sapiens
acctggctgcaaatc

SEQ ID NO: 11285 - DNA, 15 bp, Homo sapiens
tacctggctgcaaat

SEQ ID NO: 11286 - DNA, 15 bp, Homo sapiens
ctacctggctgcaaa

SEQ ID NO: 11287 - DNA, 15 bp, Homo sapiens
tctacctggctgcaa

SEQ ID NO: 11288 - DNA, 15 bp, Homo sapiens
ttctacctggctgca

SEQ ID NO: 11289 - DNA, 15 bp, Homo sapiens
tttctacctggctgc

SEQ ID NO: 11290 - DNA, 15 bp, Homo sapiens
atttctacctggctg

SEQ ID NO: 11291 - DNA, 15 bp, Homo sapiens
tatttctacctggct

SEQ ID NO: 11292 - DNA, 15 bp, Homo sapiens
ctatttctacctggc

SEQ ID NO: 11293 - DNA, 15 bp, Homo sapiens
actatttctacctgg

SEQ ID NO: 11294 - DNA, 15 bp, Homo sapiens
tactatttctacctg

SEQ ID NO: 11295 - DNA, 15 bp, Homo sapiens
ctactatttctacct

SEQ ID NO: 11296 - DNA, 15 bp, Homo sapiens
gctactatttctacc

SEQ ID NO: 11297 - DNA, 15 bp, Homo sapiens
agctactatttctac

SEQ ID NO: 11298 - DNA, 15 bp, Homo sapiens
aagctactatttcta

SEQ ID NO: 11299 - DNA, 15 bp, Homo sapiens
aaagctactatttct

SEQ ID NO: 11300 - DNA, 15 bp, Homo sapiens
caaagctactatttc

SEQ ID NO: 11301 - DNA, 15 bp, Homo sapiens
ccaaagctactattt

SEQ ID NO: 11302 - DNA, 15 bp, Homo sapiens
accaaagctactatt

SEQ ID NO: 11303 - DNA, 15 bp, Homo sapiens
aaccaaagctactat

SEQ ID NO: 11304 - DNA, 15 bp, Homo sapiens
aaaccaaagctacta

SEQ ID NO: 11305 - DNA, 15 bp, Homo sapiens
caaaccaaagctact

SEQ ID NO: 11306 - DNA, 15 bp, Homo sapiens
acaaaccaaagctac

SEQ ID NO: 11307 - DNA, 15 bp, Homo sapiens
cacaaaccaaagcta

SEQ ID NO: 11308 - DNA, 15 bp, Homo sapiens
gcacaaaccaaagct

SEQ ID NO: 11309 - DNA, 15 bp, Homo sapiens
agcacaaaccaaagc

SEQ ID NO: 11310 - DNA, 15 bp, Homo sapiens
tagcacaaaccaaag

SEQ ID NO: 11311 - DNA, 15 bp, Homo sapiens
gtagcacaaaccaaa

SEQ ID NO: 11312 - DNA, 15 bp, Homo sapiens
agtagcacaaaccaa

SEQ ID NO: 11313 - DNA, 15 bp, Homo sapiens
cagtagcacaaacca

SEQ ID NO: 11314 - DNA, 15 bp, Homo sapiens
gcagtagcacaaacc

SEQ ID NO: 11315 - DNA, 15 bp, Homo sapiens
ggcagtagcacaaac

SEQ ID NO: 11316 - DNA, 15 bp, Homo sapiens
gggcagtagcacaaa

SEQ ID NO: 11317 - DNA, 15 bp, Homo sapiens
tgggcagtagcacaa

SEQ ID NO: 11318 - DNA, 15 bp, Homo sapiens
ctgggcagtagcaca

SEQ ID NO: 11319 - DNA, 15 bp, Homo sapiens
cctgggcagtagcac

SEQ ID NO: 11320 - DNA, 15 bp, Homo sapiens
gcctgggcagtagca

SEQ ID NO: 11321 - DNA, 15 bp, Homo sapiens
tgcctgggcagtagc

SEQ ID NO: 11322 - DNA, 15 bp, Homo sapiens
atgcctgggcagtag

SEQ ID NO: 11323 - DNA, 15 bp, Homo sapiens
catgcctgggcagta

SEQ ID NO: 11324 - DNA, 15 bp, Homo sapiens
tcatgcctgggcagt

SEQ ID NO: 11325 - DNA, 15 bp, Homo sapiens
ctcatgcctgggcag

SEQ ID NO: 11326 - DNA, 15 bp, Homo sapiens
actcatgcctgggca

SEQ ID NO: 11327 - DNA, 15 bp, Homo sapiens
aactcatgcctgggc

SEQ ID NO: 11328 - DNA, 15 bp, Homo sapiens
gaactcatgcctggg

SEQ ID NO: 11329 - DNA, 15 bp, Homo sapiens
agaactcatgcctgg

SEQ ID NO: 11330 - DNA, 15 bp, Homo sapiens
cagaactcatgcctg

SEQ ID NO: 11331 - DNA, 15 bp, Homo sapiens
tcagaactcatgcct

SEQ ID NO: 11332 - DNA, 15 bp, Homo sapiens
atcagaactcatgcc

SEQ ID NO: 11333 - DNA, 15 bp, Homo sapiens
gatcagaactcatgc

SEQ ID NO: 11334 - DNA, 15 bp, Homo sapiens
ggatcagaactcatg

SEQ ID NO: 11335 - DNA, 15 bp, Homo sapiens
gggatcagaactcat

SEQ ID NO: 11336 - DNA, 15 bp, Homo sapiens
agggatcagaactca

SEQ ID NO: 11337 - DNA, 15 bp, Homo sapiens
tagggatcagaactc

SEQ ID NO: 11338 - DNA, 15 bp, Homo sapiens
ctagggatcagaact

SEQ ID NO: 11339 - DNA, 15 bp, Homo sapiens
cctagggatcagaac

SEQ ID NO: 11340 - DNA, 15 bp, Homo sapiens
tcctagggatcagaa

SEQ ID NO: 11341 - DNA, 15 bp, Homo sapiens
gtcctagggatcaga

SEQ ID NO: 11342 - DNA, 15 bp, Homo sapiens
ggtcctagggatcag

SEQ ID NO: 11343 - DNA, 15 bp, Homo sapiens
aggtcctagggatca

SEQ ID NO: 11344 - DNA, 15 bp, Homo sapiens
caggtcctagggatc

SEQ ID NO: 11345 - DNA, 15 bp, Homo sapiens
ccaggtcctagggat

SEQ ID NO: 11346 - DNA, 15 bp, Homo sapiens
gccaggtcctaggga

SEQ ID NO: 11347 - DNA, 15 bp, Homo sapiens
agccaggtcctaggg

SEQ ID NO: 11348 - DNA, 15 bp, Homo sapiens
gagccaggtcctagg

SEQ ID NO: 11349 - DNA, 15 bp, Homo sapiens
ggagccaggtcctag

SEQ ID NO: 11350 - DNA, 15 bp, Homo sapiens
cggagccaggtccta

SEQ ID NO: 11351 - DNA, 15 bp, Homo sapiens
tcggagccaggtcct

SEQ ID NO: 11352 - DNA, 15 bp, Homo sapiens
ttcggagccaggtcc

SEQ ID NO: 11353 - DNA, 15 bp, Homo sapiens
attcggagccaggtc

SEQ ID NO: 11354 - DNA, 15 bp, Homo sapiens
gattcggagccaggt

SEQ ID NO: 11355 - DNA, 15 bp, Homo sapiens
cgattcggagccagg

SEQ ID NO: 11356 - DNA, 15 bp, Homo sapiens
gcgattcggagccag

SEQ ID NO: 11357 - DNA, 15 bp, Homo sapiens
ggcgattcggagcca

SEQ ID NO: 11358 - DNA, 15 bp, Homo sapiens
gggcgattcggagcc

SEQ ID NO: 11359 - DNA, 15 bp, Homo sapiens
ggggcgattcggagc

SEQ ID NO: 11360 - DNA, 15 bp, Homo sapiens
aggggcgattcggag

SEQ ID NO: 11361 - DNA, 15 bp, Homo sapiens
caggggcgattcgga

SEQ ID NO: 11362 - DNA, 15 bp, Homo sapiens
tcaggggcgattcgg

SEQ ID NO: 11363 - DNA, 15 bp, Homo sapiens
ctcaggggcgattcg

SEQ ID NO: 11364 - DNA, 15 bp, Homo sapiens
gctcaggggcgattc

SEQ ID NO: 11365 - DNA, 15 bp, Homo sapiens
tgctcaggggcgatt

SEQ ID NO: 11366 - DNA, 15 bp, Homo sapiens
gtgctcaggggcgat

SEQ ID NO: 11367 - DNA, 15 bp, Homo sapiens
ggtgctcaggggcga

SEQ ID NO: 11368 - DNA, 15 bp, Homo sapiens
gggtgctcaggggcg

SEQ ID NO: 11369 - DNA, 15 bp, Homo sapiens
ggggtgctcaggggc

SEQ ID NO: 11370 - DNA, 15 bp, Homo sapiens
tggggtgctcagggg

SEQ ID NO: 11371 - DNA, 15 bp, Homo sapiens
gtggggtgctcaggg

SEQ ID NO: 11372 - DNA, 15 bp, Homo sapiens
agtggggtgctcagg

SEQ ID NO: 11373 - DNA, 15 bp, Homo sapiens
aagtggggtgctcag

SEQ ID NO: 11374 - DNA, 15 bp, Homo sapiens
aaagtggggtgctca

SEQ ID NO: 11375 - DNA, 15 bp, Homo sapiens
aaaagtggggtgctc

SEQ ID NO: 11376 - DNA, 15 bp, Homo sapiens
aaaaagtggggtgct

SEQ ID NO: 11377 - DNA, 15 bp, Homo sapiens
gaaaaagtggggtgc

SEQ ID NO: 11378 - DNA, 15 bp, Homo sapiens
ggaaaaagtggggtg

SEQ ID NO: 11379 - DNA, 15 bp, Homo sapiens
aggaaaaagtggggt

SEQ ID NO: 11380 - DNA, 15 bp, Homo sapiens
aaggaaaaagtgggg

SEQ ID NO: 11381 - DNA, 15 bp, Homo sapiens
aaaggaaaaagtggg

SEQ ID NO: 11382 - DNA, 15 bp, Homo sapiens
aaaaggaaaaagtgg

SEQ ID NO: 11383 - DNA, 15 bp, Homo sapiens
caaaaggaaaaagtg

SEQ ID NO: 11384 - DNA, 15 bp, Homo sapiens
gcaaaaggaaaaagt

SEQ ID NO: 11385 - DNA, 15 bp, Homo sapiens
agcaaaaggaaaaag

SEQ ID NO: 11386 - DNA, 15 bp, Homo sapiens
cagcaaaaggaaaaa

SEQ ID NO: 11387 - DNA, 15 bp, Homo sapiens
gcagcaaaaggaaaa

SEQ ID NO: 11388 - DNA, 15 bp, Homo sapiens
tgcagcaaaaggaaa

SEQ ID NO: 11389 - DNA, 15 bp, Homo sapiens
ctgcagcaaaaggaa

SEQ ID NO: 11390 - DNA, 15 bp, Homo sapiens
gctgcagcaaaagga

SEQ ID NO: 11391 - DNA, 15 bp, Homo sapiens
ggctgcagcaaaagg

SEQ ID NO: 11392 - DNA, 15 bp, Homo sapiens
gggctgcagcaaaag

SEQ ID NO: 11393 - DNA, 15 bp, Homo sapiens
agggctgcagcaaaa

SEQ ID NO: 11394 - DNA, 15 bp, Homo sapiens
cagggctgcagcaaa

SEQ ID NO: 11395 - DNA, 15 bp, Homo sapiens
ccagggctgcagcaa

SEQ ID NO: 11396 - DNA, 15 bp, Homo sapiens
cccagggctgcagca

SEQ ID NO: 11397 - DNA, 15 bp, Homo sapiens
tcccagggctgcagc

SEQ ID NO: 11398 - DNA, 15 bp, Homo sapiens
ctcccagggctgcag

SEQ ID NO: 11399 - DNA, 15 bp, Homo sapiens
gctcccagggctgca

SEQ ID NO: 11400 - DNA, 15 bp, Homo sapiens
ggctcccagggctgc

SEQ ID NO: 11401 - DNA, 15 bp, Homo sapiens
tggctcccagggctg

SEQ ID NO: 11402 - DNA, 15 bp, Homo sapiens
gtggctcccagggct

SEQ ID NO: 11403 - DNA, 15 bp, Homo sapiens
ggtggctcccagggc

SEQ ID NO: 11404 - DNA, 15 bp, Homo sapiens
aggtggctcccaggg

SEQ ID NO: 11405 - DNA, 15 bp, Homo sapiens
caggtggctcccagg

SEQ ID NO: 11406 - DNA, 15 bp, Homo sapiens
ccaggtggctcccag

SEQ ID NO: 11407 - DNA, 15 bp, Homo sapiens
gccaggtggctccca

SEQ ID NO: 11408 - DNA, 15 bp, Homo sapiens
agccaggtggctccc

SEQ ID NO: 11409 - DNA, 15 bp, Homo sapiens
gagccaggtggctcc

SEQ ID NO: 11410 - DNA, 15 bp, Homo sapiens
agagccaggtggctc

SEQ ID NO: 11411 - DNA, 15 bp, Homo sapiens
gagagccaggtggct

SEQ ID NO: 11412 - DNA, 15 bp, Homo sapiens
ggagagccaggtggc

SEQ ID NO: 11413 - DNA, 15 bp, Homo sapiens
tggagagccaggtgg

SEQ ID NO: 11414 - DNA, 15 bp, Homo sapiens
ttggagagccaggtg

SEQ ID NO: 11415 - DNA, 15 bp, Homo sapiens
tttggagagccaggt

SEQ ID NO: 11416 - DNA, 15 bp, Homo sapiens
ttttggagagccagg

SEQ ID NO: 11417 - DNA, 15 bp, Homo sapiens
cttttggagagccag

SEQ ID NO: 11418 - DNA, 15 bp, Homo sapiens
gcttttggagagcca

SEQ ID NO: 11419 - DNA, 15 bp, Homo sapiens
ggcttttggagagcc

SEQ ID NO: 11420 - DNA, 15 bp, Homo sapiens
gggcttttggagagc

SEQ ID NO: 11421 - DNA, 15 bp, Homo sapiens
ggggcttttggagag

SEQ ID NO: 11422 - DNA, 15 bp, Homo sapiens
aggggcttttggaga

SEQ ID NO: 11423 - DNA, 15 bp, Homo sapiens
taggggcttttggag

SEQ ID NO: 11424 - DNA, 15 bp, Homo sapiens
ttaggggcttttgga

SEQ ID NO: 11425 - DNA, 15 bp, Homo sapiens
attaggggcttttgg

SEQ ID NO: 11426 - DNA, 15 bp, Homo sapiens
cattaggggcttttg

SEQ ID NO: 11427 - DNA, 15 bp, Homo sapiens
ccattaggggctttt

SEQ ID NO: 11428 - DNA, 15 bp, Homo sapiens
cccattaggggcttt

SEQ ID NO: 11429 - DNA, 15 bp, Homo sapiens
gcccattaggggctt

SEQ ID NO: 11430 - DNA, 15 bp, Homo sapiens
ggcccattaggggct

SEQ ID NO: 11431 - DNA, 15 bp, Homo sapiens
gggcccattaggggc

SEQ ID NO: 11432 - DNA, 15 bp, Homo sapiens
ggggcccattagggg

SEQ ID NO: 11433 - DNA, 15 bp, Homo sapiens
aggggcccattaggg

SEQ ID NO: 11434 - DNA, 15 bp, Homo sapiens
caggggcccattagg

SEQ ID NO: 11435 - DNA, 15 bp, Homo sapiens
acaggggcccattag

SEQ ID NO: 11436 - DNA, 15 bp, Homo sapiens
tacaggggcccatta

SEQ ID NO: 11437 - DNA, 15 bp, Homo sapiens
atacaggggcccatt

SEQ ID NO: 11438 - DNA, 15 bp, Homo sapiens
aatacaggggcccat

SEQ ID NO: 11439 - DNA, 15 bp, Homo sapiens
aaatacaggggccca

SEQ ID NO: 11440 - DNA, 15 bp, Homo sapiens
gaaatacaggggccc

SEQ ID NO: 11441 - DNA, 15 bp, Homo sapiens
agaaatacaggggcc

SEQ ID NO: 11442 - DNA, 15 bp, Homo sapiens
cagaaatacaggggc

SEQ ID NO: 11443 - DNA, 15 bp, Homo sapiens
ccagaaatacagggg

SEQ ID NO: 11444 - DNA, 15 bp, Homo sapiens
tccagaaatacaggg

SEQ ID NO: 11445 - DNA, 15 bp, Homo sapiens
ttccagaaatacagg

SEQ ID NO: 11446 - DNA, 15 bp, Homo sapiens
cttccagaaatacag

SEQ ID NO: 11447 - DNA, 15 bp, Homo sapiens
gcttccagaaataca

SEQ ID NO: 11448 - DNA, 15 bp, Homo sapiens
agcttccagaaatac

SEQ ID NO: 11449 - DNA, 15 bp, Homo sapiens
cagcttccagaaata

SEQ ID NO: 11450 - DNA, 15 bp, Homo sapiens
acagcttccagaaat

SEQ ID NO: 11451 - DNA, 15 bp, Homo sapiens
cacagcttccagaaa

SEQ ID NO: 11452 - DNA, 15 bp, Homo sapiens
ccacagcttccagaa

SEQ ID NO: 11453 - DNA, 15 bp, Homo sapiens
cccacagcttccaga

SEQ ID NO: 11454 - DNA, 15 bp, Homo sapiens
acccacagcttccag

SEQ ID NO: 11455 - DNA, 15 bp, Homo sapiens
cacccacagcttcca

SEQ ID NO: 11456 - DNA, 15 bp, Homo sapiens
tcacccacagcttcc

SEQ ID NO: 11457 - DNA, 15 bp, Homo sapiens
ttcacccacagcttc

SEQ ID NO: 11458 - DNA, 15 bp, Homo sapiens
cttcacccacagctt

SEQ ID NO: 11459 - DNA, 15 bp, Homo sapiens
acttcacccacagct

SEQ ID NO: 11460 - DNA, 15 bp, Homo sapiens
cacttcacccacagc

SEQ ID NO: 11461 - DNA, 15 bp, Homo sapiens
tcacttcacccacag

SEQ ID NO: 11462 - DNA, 15 bp, Homo sapiens
ctcacttcacccaca

SEQ ID NO: 11463 - DNA, 15 bp, Homo sapiens
actcacttcacccac

SEQ ID NO: 11464 - DNA, 15 bp, Homo sapiens
aactcacttcaccca

SEQ ID NO: 11465 - DNA, 15 bp, Homo sapiens
taactcacttcaccc

SEQ ID NO: 11466 - DNA, 15 bp, Homo sapiens
ctaactcacttcacc

SEQ ID NO: 11467 - DNA, 15 bp, Homo sapiens
actaactcacttcac

SEQ ID NO: 11468 - DNA, 15 bp, Homo sapiens
cactaactcacttca

SEQ ID NO: 11469 - DNA, 15 bp, Homo sapiens
ccactaactcacttc

SEQ ID NO: 11470 - DNA, 15 bp, Homo sapiens
gccactaactcactt

SEQ ID NO: 11471 - DNA, 15 bp, Homo sapiens
ggccactaactcact

SEQ ID NO: 11472 - DNA, 15 bp, Homo sapiens
gggccactaactcac

SEQ ID NO: 11473 - DNA, 15 bp, Homo sapiens
ggggccactaactca

SEQ ID NO: 11474 - DNA, 15 bp, Homo sapiens
tggggccactaactc

SEQ ID NO: 11475 - DNA, 15 bp, Homo sapiens
gtggggccactaact

SEQ ID NO: 11476 - DNA, 15 bp, Homo sapiens
agtggggccactaac

SEQ ID NO: 11477 - DNA, 15 bp, Homo sapiens
gagtggggccactaa

SEQ ID NO: 11478 - DNA, 15 bp, Homo sapiens
agagtggggccacta

SEQ ID NO: 11479 - DNA, 15 bp, Homo sapiens
aagagtggggccact

SEQ ID NO: 11480 - DNA, 15 bp, Homo sapiens
taagagtggggccac

SEQ ID NO: 11481 - DNA, 15 bp, Homo sapiens
ctaagagtggggcca

SEQ ID NO: 11482 - DNA, 15 bp, Homo sapiens
tctaagagtggggcc

SEQ ID NO: 11483 - DNA, 15 bp, Homo sapiens
ctctaagagtggggc

SEQ ID NO: 11484 - DNA, 15 bp, Homo sapiens
tctctaagagtgggg

SEQ ID NO: 11485 - DNA, 15 bp, Homo sapiens
atctctaagagtggg

SEQ ID NO: 11486 - DNA, 15 bp, Homo sapiens
gatctctaagagtgg

SEQ ID NO: 11487 - DNA, 15 bp, Homo sapiens
tgatctctaagagtg

SEQ ID NO: 11488 - DNA, 15 bp, Homo sapiens
ttgatctctaagagt

SEQ ID NO: 11489 - DNA, 15 bp, Homo sapiens
attgatctctaagag

SEQ ID NO: 11490 - DNA, 15 bp, Homo sapiens
tattgatctctaaga

SEQ ID NO: 11491 - DNA, 15 bp, Homo sapiens
gtattgatctctaag

SEQ ID NO: 11492 - DNA, 15 bp, Homo sapiens
agtattgatctctaa

SEQ ID NO: 11493 - DNA, 15 bp, Homo sapiens
cagtattgatctcta

SEQ ID NO: 11494 - DNA, 15 bp, Homo sapiens
ccagtattgatctct

SEQ ID NO: 11495 - DNA, 15 bp, Homo sapiens
cccagtattgatctc

SEQ ID NO: 11496 - DNA, 15 bp, Homo sapiens
acccagtattgatct

SEQ ID NO: 11497 - DNA, 15 bp, Homo sapiens
tacccagtattgatc

SEQ ID NO: 11498 - DNA, 15 bp, Homo sapiens
atacccagtattgat

SEQ ID NO: 11499 - DNA, 15 bp, Homo sapiens
gatacccagtattga

SEQ ID NO: 11500 - DNA, 15 bp, Homo sapiens
agatacccagtattg

SEQ ID NO: 11501 - DNA, 15 bp, Homo sapiens
aagatacccagtatt

SEQ ID NO: 11502 - DNA, 15 bp, Homo sapiens
caagatacccagtat

SEQ ID NO: 11503 - DNA, 15 bp, Homo sapiens
ccaagatacccagta

SEQ ID NO: 11504 - DNA, 15 bp, Homo sapiens
accaagatacccagt

SEQ ID NO: 11505 - DNA, 15 bp, Homo sapiens
caccaagatacccag

SEQ ID NO: 11506 - DNA, 15 bp, Homo sapiens
acaccaagataccca

SEQ ID NO: 11507 - DNA, 15 bp, Homo sapiens
gacaccaagataccc

SEQ ID NO: 11508 - DNA, 15 bp, Homo sapiens
tgacaccaagatacc

SEQ ID NO: 11509 - DNA, 15 bp, Homo sapiens
ttgacaccaagatac

SEQ ID NO: 11510 - DNA, 15 bp, Homo sapiens
attgacaccaagata

SEQ ID NO: 11511 - DNA, 15 bp, Homo sapiens
gattgacaccaagat

SEQ ID NO: 11512 - DNA, 15 bp, Homo sapiens
agattgacaccaaga

SEQ ID NO: 11513 - DNA, 15 bp, Homo sapiens
cagattgacaccaag

SEQ ID NO: 11514 - DNA, 15 bp, Homo sapiens
ccagattgacaccaa

SEQ ID NO: 11515 - DNA, 15 bp, Homo sapiens
tccagattgacacca

SEQ ID NO: 11516 - DNA, 15 bp, Homo sapiens
atccagattgacacc

SEQ ID NO: 11517 - DNA, 15 bp, Homo sapiens
aatccagattgacac

SEQ ID NO: 11518 - DNA, 15 bp, Homo sapiens
gaatccagattgaca

SEQ ID NO: 11519 - DNA, 15 bp, Homo sapiens
agaatccagattgac

SEQ ID NO: 11520 - DNA, 15 bp, Homo sapiens
aagaatccagattga

SEQ ID NO: 11521 - DNA, 15 bp, Homo sapiens
aaagaatccagattg

SEQ ID NO: 11522 - DNA, 15 bp, Homo sapiens
gaaagaatccagatt

SEQ ID NO: 11523 - DNA, 15 bp, Homo sapiens
ggaaagaatccagat

SEQ ID NO: 11524 - DNA, 15 bp, Homo sapiens
aggaaagaatccaga

SEQ ID NO: 11525 - DNA, 15 bp, Homo sapiens
aaggaaagaatccag

SEQ ID NO: 11526 - DNA, 15 bp, Homo sapiens
gaaggaaagaatcca

SEQ ID NO: 11527 - DNA, 15 bp, Homo sapiens
tgaaggaaagaatcc

SEQ ID NO: 11528 - DNA, 15 bp, Homo sapiens
ctgaaggaaagaatc

SEQ ID NO: 11529 - DNA, 15 bp, Homo sapiens
cctgaaggaaagaat

SEQ ID NO: 11530 - DNA, 15 bp, Homo sapiens
gcctgaaggaaagaa

SEQ ID NO: 11531 - DNA, 15 bp, Homo sapiens
ggcctgaaggaaaga

SEQ ID NO: 11532 - DNA, 15 bp, Homo sapiens
aggcctgaaggaaag

SEQ ID NO: 11533 - DNA, 15 bp, Homo sapiens
caggcctgaaggaaa

SEQ ID NO: 11534 - DNA, 15 bp, Homo sapiens
ccaggcctgaaggaa

SEQ ID NO: 11535 - DNA, 15 bp, Homo sapiens
tccaggcctgaagga

SEQ ID NO: 11536 - DNA, 15 bp, Homo sapiens
ctccaggcctgaagg

SEQ ID NO: 11537 - DNA, 15 bp, Homo sapiens
cctccaggcctgaag

SEQ ID NO: 11538 - DNA, 15 bp, Homo sapiens
tcctccaggcctgaa

SEQ ID NO: 11539 - DNA, 15 bp, Homo sapiens
ttcctccaggcctga

SEQ ID NO: 11540 - DNA, 15 bp, Homo sapiens
attcctccaggcctg

SEQ ID NO: 11541 - DNA, 15 bp, Homo sapiens
tattcctccaggcct

SEQ ID NO: 11542 - DNA, 15 bp, Homo sapiens
atattcctccaggcc

SEQ ID NO: 11543 - DNA, 15 bp, Homo sapiens
tatattcctccaggc

SEQ ID NO: 11544 - DNA, 15 bp, Homo sapiens
ttatattcctccagg

SEQ ID NO: 11545 - DNA, 15 bp, Homo sapiens
attatattcctccag

SEQ ID NO: 11546 - DNA, 15 bp, Homo sapiens
tattatattcctcca

SEQ ID NO: 11547 - DNA, 15 bp, Homo sapiens
ttattatattcctcc

SEQ ID NO: 11548 - DNA, 15 bp, Homo sapiens
gttattatattcctc

SEQ ID NO: 11549 - DNA, 15 bp, Homo sapiens
agttattatattcct

SEQ ID NO: 11550 - DNA, 15 bp, Homo sapiens
cagttattatattcc

SEQ ID NO: 11551 - DNA, 15 bp, Homo sapiens
tcagttattatattc

SEQ ID NO: 11552 - DNA, 15 bp, Homo sapiens
ctcagttattatatt

SEQ ID NO: 11553 - DNA, 15 bp, Homo sapiens
tctcagttattatat

SEQ ID NO: 11554 - DNA, 15 bp, Homo sapiens
gtctcagttattata

SEQ ID NO: 11555 - DNA, 15 bp, Homo sapiens
agtctcagttattat

SEQ ID NO: 11556 - DNA, 15 bp, Homo sapiens
aagtctcagttatta

SEQ ID NO: 11557 - DNA, 15 bp, Homo sapiens
caagtctcagttatt

SEQ ID NO: 11558 - DNA, 15 bp, Homo sapiens
acaagtctcagttat

SEQ ID NO: 11559 - DNA, 15 bp, Homo sapiens
aacaagtctcagtta

SEQ ID NO: 11560 - DNA, 15 bp, Homo sapiens
aaacaagtctcagtt

SEQ ID NO: 11561 - DNA, 15 bp, Homo sapiens
aaaacaagtctcagt

SEQ ID NO: 11562 - DNA, 15 bp, Homo sapiens
taaaacaagtctcag

SEQ ID NO: 11563 - DNA, 15 bp, Homo sapiens
ataaaacaagtctca

SEQ ID NO: 11564 - DNA, 15 bp, Homo sapiens
aataaaacaagtctc

SEQ ID NO: 11565 - DNA, 15 bp, Homo sapiens
aaataaaacaagtct

SEQ ID NO: 11566 - DNA, 15 bp, Homo sapiens
gaaataaaacaagtc

SEQ ID NO: 11567 - DNA, 15 bp, Homo sapiens
agaaataaaacaagt

SEQ ID NO: 11568 - DNA, 15 bp, Homo sapiens
cagaaataaaacaag

SEQ ID NO: 11569 - DNA, 15 bp, Homo sapiens
gcagaaataaaacaa

SEQ ID NO: 11570 - DNA, 15 bp, Homo sapiens
tgcagaaataaaaca

SEQ ID NO: 11571 - DNA, 15 bp, Homo sapiens
ctgcagaaataaaac

SEQ ID NO: 11572 - DNA, 15 bp, Homo sapiens
tctgcagaaataaaa

SEQ ID NO: 11573 - DNA, 15 bp, Homo sapiens
ctctgcagaaataaa

SEQ ID NO: 11574 - DNA, 15 bp, Homo sapiens
cctctgcagaaataa

SEQ ID NO: 11575 - DNA, 15 bp, Homo sapiens
ccctctgcagaaata

SEQ ID NO: 11576 - DNA, 15 bp, Homo sapiens
accctctgcagaaat

SEQ ID NO: 11577 - DNA, 15 bp, Homo sapiens
aaccctctgcagaaa

SEQ ID NO: 11578 - DNA, 15 bp, Homo sapiens
gaaccctctgcagaa

SEQ ID NO: 11579 - DNA, 15 bp, Homo sapiens
agaaccctctgcaga

SEQ ID NO: 11580 - DNA, 15 bp, Homo sapiens
tagaaccctctgcag

SEQ ID NO: 11581 - DNA, 15 bp, Homo sapiens
ttagaaccctctgca

SEQ ID NO: 11582 - DNA, 15 bp, Homo sapiens
cttagaaccctctgc

SEQ ID NO: 11583 - DNA, 15 bp, Homo sapiens
gcttagaaccctctg

SEQ ID NO: 11584 - DNA, 15 bp, Homo sapiens
ggcttagaaccctct

SEQ ID NO: 11585 - DNA, 15 bp, Homo sapiens
tggcttagaaccctc

SEQ ID NO: 11586 - DNA, 15 bp, Homo sapiens
atggcttagaaccct

SEQ ID NO: 11587 - DNA, 15 bp, Homo sapiens
aatggcttagaaccc

SEQ ID NO: 11588 - DNA, 15 bp, Homo sapiens
gaatggcttagaacc

SEQ ID NO: 11589 - DNA, 15 bp, Homo sapiens
tgaatggcttagaac

SEQ ID NO: 11590 - DNA, 15 bp, Homo sapiens
gtgaatggcttagaa

SEQ ID NO: 11591 - DNA, 15 bp, Homo sapiens
agtgaatggcttaga

SEQ ID NO: 11592 - DNA, 15 bp, Homo sapiens
aagtgaatggcttag

SEQ ID NO: 11593 - DNA, 15 bp, Homo sapiens
gaagtgaatggctta

SEQ ID NO: 11594 - DNA, 15 bp, Homo sapiens
ggaagtgaatggctt

SEQ ID NO: 11595 - DNA, 15 bp, Homo sapiens
gggaagtgaatggct

SEQ ID NO: 11596 - DNA, 15 bp, Homo sapiens
tgggaagtgaatggc

SEQ ID NO: 11597 - DNA, 15 bp, Homo sapiens
ctgggaagtgaatgg

SEQ ID NO: 11598 - DNA, 15 bp, Homo sapiens
tctgggaagtgaatg

SEQ ID NO: 11599 - DNA, 15 bp, Homo sapiens
atctgggaagtgaat

SEQ ID NO: 11600 - DNA, 15 bp, Homo sapiens
catctgggaagtgaa

SEQ ID NO: 11601 - DNA, 15 bp, Homo sapiens
ccatctgggaagtga

SEQ ID NO: 11602 - DNA, 15 bp, Homo sapiens
cccatctgggaagtg

SEQ ID NO: 11603 - DNA, 15 bp, Homo sapiens
gcccatctgggaagt

SEQ ID NO: 11604 - DNA, 15 bp, Homo sapiens
ggcccatctgggaag

SEQ ID NO: 11605 - DNA, 15 bp, Homo sapiens
tggcccatctgggaa

SEQ ID NO: 11606 - DNA, 15 bp, Homo sapiens
ttggcccatctggga

SEQ ID NO: 11607 - DNA, 15 bp, Homo sapiens
attggcccatctggg

SEQ ID NO: 11608 - DNA, 15 bp, Homo sapiens
tattggcccatctgg

SEQ ID NO: 11609 - DNA, 15 bp, Homo sapiens
ttattggcccatctg

SEQ ID NO: 11610 - DNA, 15 bp, Homo sapiens
attattggcccatct

SEQ ID NO: 11611 - DNA, 15 bp, Homo sapiens
cattattggcccatc

SEQ ID NO: 11612 - DNA, 15 bp, Homo sapiens
gcattattggcccat

SEQ ID NO: 11613 - DNA, 15 bp, Homo sapiens
agcattattggccca

SEQ ID NO: 11614 - DNA, 15 bp, Homo sapiens
aagcattattggccc

SEQ ID NO: 11615 - DNA, 15 bp, Homo sapiens
aaagcattattggcc

SEQ ID NO: 11616 - DNA, 15 bp, Homo sapiens
caaagcattattggc

SEQ ID NO: 11617 - DNA, 15 bp, Homo sapiens
tcaaagcattattgg

SEQ ID NO: 11618 - DNA, 15 bp, Homo sapiens
ctcaaagcattattg

SEQ ID NO: 11619 - DNA, 15 bp, Homo sapiens
actcaaagcattatt

SEQ ID NO: 11620 - DNA, 15 bp, Homo sapiens
tactcaaagcattat

SEQ ID NO: 11621 - DNA, 15 bp, Homo sapiens
ttactcaaagcatta

SEQ ID NO: 11622 - DNA, 15 bp, Homo sapiens
attactcaaagcatt

SEQ ID NO: 11623 - DNA, 15 bp, Homo sapiens
gattactcaaagcat

SEQ ID NO: 11624 - DNA, 15 bp, Homo sapiens
agattactcaaagca

SEQ ID NO: 11625 - DNA, 15 bp, Homo sapiens
cagattactcaaagc

SEQ ID NO: 11626 - DNA, 15 bp, Homo sapiens
ccagattactcaaag

SEQ ID NO: 11627 - DNA, 15 bp, Homo sapiens
tccagattactcaaa

SEQ ID NO: 11628 - DNA, 15 bp, Homo sapiens
ctccagattactcaa

SEQ ID NO: 11629 - DNA, 15 bp, Homo sapiens
tctccagattactca

SEQ ID NO: 11630 - DNA, 15 bp, Homo sapiens
atctccagattactc

SEQ ID NO: 11631 - DNA, 15 bp, Homo sapiens
gatctccagattact

SEQ ID NO: 11632 - DNA, 15 bp, Homo sapiens
tgatctccagattac

SEQ ID NO: 11633 - DNA, 15 bp, Homo sapiens
atgatctccagatta

SEQ ID NO: 11634 - DNA, 15 bp, Homo sapiens
gatgatctccagatt

SEQ ID NO: 11635 - DNA, 15 bp, Homo sapiens
agatgatctccagat

SEQ ID NO: 11636 - DNA, 15 bp, Homo sapiens
aagatgatctccaga

SEQ ID NO: 11637 - DNA, 15 bp, Homo sapiens
aaagatgatctccag

SEQ ID NO: 11638 - DNA, 15 bp, Homo sapiens
taaagatgatctcca

SEQ ID NO: 11639 - DNA, 15 bp, Homo sapiens
ttaaagatgatctcc

SEQ ID NO: 11640 - DNA, 15 bp, Homo sapiens
attaaagatgatctc

SEQ ID NO: 11641 - DNA, 15 bp, Homo sapiens
cattaaagatgatct

SEQ ID NO: 11642 - DNA, 15 bp, Homo sapiens
gcattaaagatgatc

SEQ ID NO: 11643 - DNA, 15 bp, Homo sapiens
cgcattaaagatgat

SEQ ID NO: 11644 - DNA, 15 bp, Homo sapiens
gcgcattaaagatga

SEQ ID NO: 11645 - DNA, 15 bp, Homo sapiens
tgcgcattaaagatg

SEQ ID NO: 11646 - DNA, 15 bp, Homo sapiens
ctgcgcattaaagat

SEQ ID NO: 11647 - DNA, 15 bp, Homo sapiens
cctgcgcattaaaga

SEQ ID NO: 11648 - DNA, 15 bp, Homo sapiens
acctgcgcattaaag

SEQ ID NO: 11649 - DNA, 15 bp, Homo sapiens
cacctgcgcattaaa

SEQ ID NO: 11650 - DNA, 15 bp, Homo sapiens
tcacctgcgcattaa

SEQ ID NO: 11651 - DNA, 15 bp, Homo sapiens
ttcacctgcgcatta

SEQ ID NO: 11652 - DNA, 15 bp, Homo sapiens
attcacctgcgcatt

SEQ ID NO: 11653 - DNA, 15 bp, Homo sapiens
cattcacctgcgcat

SEQ ID NO: 11654 - DNA, 15 bp, Homo sapiens
ccattcacctgcgca

SEQ ID NO: 11655 - DNA, 15 bp, Homo sapiens
tccattcacctgcgc

SEQ ID NO: 11656 - DNA, 15 bp, Homo sapiens
ttccattcacctgcg

SEQ ID NO: 11657 - DNA, 15 bp, Homo sapiens
gttccattcacctgc

SEQ ID NO: 11658 - DNA, 15 bp, Homo sapiens
agttccattcacctg

SEQ ID NO: 11659 - DNA, 15 bp, Homo sapiens
gagttccattcacct

SEQ ID NO: 11660 - DNA, 15 bp, Homo sapiens
agagttccattcacc

SEQ ID NO: 11661 - DNA, 15 bp, Homo sapiens
aagagttccattcac

SEQ ID NO: 11662 - DNA, 15 bp, Homo sapiens
gaagagttccattca

SEQ ID NO: 11663 - DNA, 15 bp, Homo sapiens
ggaagagttccattc

SEQ ID NO: 11664 - DNA, 15 bp, Homo sapiens
tggaagagttccatt

SEQ ID NO: 11665 - DNA, 15 bp, Homo sapiens
gtggaagagttccat

SEQ ID NO: 11666 - DNA, 15 bp, Homo sapiens
tgtggaagagttcca

SEQ ID NO: 11667 - DNA, 15 bp, Homo sapiens
ctgtggaagagttcc

SEQ ID NO: 11668 - DNA, 15 bp, Homo sapiens
tctgtggaagagttc

SEQ ID NO: 11669 - DNA, 15 bp, Homo sapiens
ctctgtggaagagtt

SEQ ID NO: 11670 - DNA, 15 bp, Homo sapiens
cctctgtggaagagt

SEQ ID NO: 11671 - DNA, 15 bp, Homo sapiens
ccctctgtggaagag

SEQ ID NO: 11672 - DNA, 15 bp, Homo sapiens
tccctctgtggaaga

SEQ ID NO: 11673 - DNA, 15 bp, Homo sapiens
atccctctgtggaag

SEQ ID NO: 11674 - DNA, 15 bp, Homo sapiens
catccctctgtggaa

SEQ ID NO: 11675 - DNA, 15 bp, Homo sapiens
acatccctctgtgga

SEQ ID NO: 11676 - DNA, 15 bp, Homo sapiens
cacatccctctgtgg

SEQ ID NO: 11677 - DNA, 15 bp, Homo sapiens
tcacatccctctgtg

SEQ ID NO: 11678 - DNA, 15 bp, Homo sapiens
ctcacatccctctgt

SEQ ID NO: 11679 - DNA, 15 bp, Homo sapiens
cctcacatccctctg

SEQ ID NO: 11680 - DNA, 15 bp, Homo sapiens
ccctcacatccctct

SEQ ID NO: 11681 - DNA, 15 bp, Homo sapiens
gccctcacatccctc

SEQ ID NO: 11682 - DNA, 15 bp, Homo sapiens
agccctcacatccct

SEQ ID NO: 11683 - DNA, 15 bp, Homo sapiens
cagccctcacatccc

SEQ ID NO: 11684 - DNA, 15 bp, Homo sapiens
acagccctcacatcc

SEQ ID NO: 11685 - DNA, 15 bp, Homo sapiens
tacagccctcacatc

SEQ ID NO: 11686 - DNA, 15 bp, Homo sapiens
ctacagccctcacat

SEQ ID NO: 11687 - DNA, 15 bp, Homo sapiens
tctacagccctcaca

SEQ ID NO: 11688 - DNA, 15 bp, Homo sapiens
ctctacagccctcac

SEQ ID NO: 11689 - DNA, 15 bp, Homo sapiens
gctctacagccctca

SEQ ID NO: 11690 - DNA, 15 bp, Homo sapiens
tgctctacagccctc

SEQ ID NO: 11691 - DNA, 15 bp, Homo sapiens
ctgctctacagccct

SEQ ID NO: 11692 - DNA, 15 bp, Homo sapiens
tctgctctacagccc

SEQ ID NO: 11693 - DNA, 15 bp, Homo sapiens
ctctgctctacagcc

SEQ ID NO: 11694 - DNA, 15 bp, Homo sapiens
actctgctctacagc

SEQ ID NO: 11695 - DNA, 15 bp, Homo sapiens
cactctgctctacag

SEQ ID NO: 11696 - DNA, 15 bp, Homo sapiens
tcactctgctctaca

SEQ ID NO: 11697 - DNA, 15 bp, Homo sapiens
ttcactctgctctac

SEQ ID NO: 11698 - DNA, 15 bp, Homo sapiens
gttcactctgctcta

SEQ ID NO: 11699 - DNA, 15 bp, Homo sapiens
agttcactctgctct

SEQ ID NO: 11700 - DNA, 15 bp, Homo sapiens
gagttcactctgctc

SEQ ID NO: 11701 - DNA, 15 bp, Homo sapiens
ggagttcactctgct

SEQ ID NO: 11702 - DNA, 15 bp, Homo sapiens
gggagttcactctgc

SEQ ID NO: 11703 - DNA, 15 bp, Homo sapiens
agggagttcactctg

SEQ ID NO: 11704 - DNA, 15 bp, Homo sapiens
cagggagttcactct

SEQ ID NO: 11705 - DNA, 15 bp, Homo sapiens
tcagggagttcactc

SEQ ID NO: 11706 - DNA, 15 bp, Homo sapiens
ttcagggagttcact

SEQ ID NO: 11707 - DNA, 15 bp, Homo sapiens
tttcagggagttcac

SEQ ID NO: 11708 - DNA, 15 bp, Homo sapiens
gtttcagggagttca

SEQ ID NO: 11709 - DNA, 15 bp, Homo sapiens
agtttcagggagttc

SEQ ID NO: 11710 - DNA, 15 bp, Homo sapiens
gagtttcagggagtt

SEQ ID NO: 11711 - DNA, 15 bp, Homo sapiens
tgagtttcagggagt

SEQ ID NO: 11712 - DNA, 15 bp, Homo sapiens
ctgagtttcagggag

SEQ ID NO: 11713 - DNA, 15 bp, Homo sapiens
tctgagtttcaggga

SEQ ID NO: 11714 - DNA, 15 bp, Homo sapiens
gtctgagtttcaggg

SEQ ID NO: 11715 - DNA, 15 bp, Homo sapiens
cgtctgagtttcagg

SEQ ID NO: 11716 - DNA, 15 bp, Homo sapiens
acgtctgagtttcag

SEQ ID NO: 11717 - DNA, 15 bp, Homo sapiens
gacgtctgagtttca

SEQ ID NO: 11718 - DNA, 15 bp, Homo sapiens
tgacgtctgagtttc

SEQ ID NO: 11719 - DNA, 15 bp, Homo sapiens
ctgacgtctgagttt

SEQ ID NO: 11720 - DNA, 15 bp, Homo sapiens
gctgacgtctgagtt

SEQ ID NO: 11721 - DNA, 15 bp, Homo sapiens
agctgacgtctgagt

SEQ ID NO: 11722 - DNA, 15 bp, Homo sapiens
gagctgacgtctgag

SEQ ID NO: 11723 - DNA, 15 bp, Homo sapiens
agagctgacgtctga

SEQ ID NO: 11724 - DNA, 15 bp, Homo sapiens
aagagctgacgtctg

SEQ ID NO: 11725 - DNA, 15 bp, Homo sapiens
aaagagctgacgtct

SEQ ID NO: 11726 - DNA, 15 bp, Homo sapiens
caaagagctgacgtc

SEQ ID NO: 11727 - DNA, 15 bp, Homo sapiens
acaaagagctgacgt

SEQ ID NO: 11728 - DNA, 15 bp, Homo sapiens
gacaaagagctgacg

SEQ ID NO: 11729 - DNA, 15 bp, Homo sapiens
agacaaagagctgac

SEQ ID NO: 11730 - DNA, 15 bp, Homo sapiens
gagacaaagagctga

SEQ ID NO: 11731 - DNA, 15 bp, Homo sapiens
agagacaaagagctg

SEQ ID NO: 11732 - DNA, 15 bp, Homo sapiens
gagagacaaagagct

SEQ ID NO: 11733 - DNA, 15 bp, Homo sapiens
agagagacaaagagc

SEQ ID NO: 11734 - DNA, 15 bp, Homo sapiens
tagagagacaaagag

SEQ ID NO: 11735 - DNA, 15 bp, Homo sapiens
atagagagacaaaga

SEQ ID NO: 11736 - DNA, 15 bp, Homo sapiens
gatagagagacaaag

SEQ ID NO: 11737 - DNA, 15 bp, Homo sapiens
agatagagagacaaa

SEQ ID NO: 11738 - DNA, 15 bp, Homo sapiens
gagatagagagacaa

SEQ ID NO: 11739 - DNA, 15 bp, Homo sapiens
agagatagagagaca

SEQ ID NO: 11740 - DNA, 15 bp, Homo sapiens
cagagatagagagac

SEQ ID NO: 11741 - DNA, 15 bp, Homo sapiens
tcagagatagagaga

SEQ ID NO: 11742 - DNA, 15 bp, Homo sapiens
ttcagagatagagag

SEQ ID NO: 11743 - DNA, 15 bp, Homo sapiens
gttcagagatagaga

SEQ ID NO: 11744 - DNA, 15 bp, Homo sapiens
tgttcagagatagag

SEQ ID NO: 11745 - DNA, 15 bp, Homo sapiens
gtgttcagagataga

SEQ ID NO: 11746 - DNA, 15 bp, Homo sapiens
ggtgttcagagatag

SEQ ID NO: 11747 - DNA, 15 bp, Homo sapiens
gggtgttcagagata

SEQ ID NO: 11748 - DNA, 15 bp, Homo sapiens
agggtgttcagagat

SEQ ID NO: 11749 - DNA, 15 bp, Homo sapiens
aagggtgttcagaga

SEQ ID NO: 11750 - DNA, 15 bp, Homo sapiens
gaagggtgttcagag

SEQ ID NO: 11751 - DNA, 15 bp, Homo sapiens
ggaagggtgttcaga

SEQ ID NO: 11752 - DNA, 15 bp, Homo sapiens
aggaagggtgttcag

SEQ ID NO: 11753 - DNA, 15 bp, Homo sapiens
aaggaagggtgttca

SEQ ID NO: 11754 - DNA, 15 bp, Homo sapiens
taaggaagggtgttc

SEQ ID NO: 11755 - DNA, 15 bp, Homo sapiens
ctaaggaagggtgtt

SEQ ID NO: 11756 - DNA, 15 bp, Homo sapiens
tctaaggaagggtgt

SEQ ID NO: 11757 - DNA, 15 bp, Homo sapiens
ctctaaggaagggtg

SEQ ID NO: 11758 - DNA, 15 bp, Homo sapiens
tctctaaggaagggt

SEQ ID NO: 11759 - DNA, 15 bp, Homo sapiens
atctctaaggaaggg

SEQ ID NO: 11760 - DNA, 15 bp, Homo sapiens
gatctctaaggaagg

SEQ ID NO: 11761 - DNA, 15 bp, Homo sapiens
ggatctctaaggaag

SEQ ID NO: 11762 - DNA, 15 bp, Homo sapiens
gggatctctaaggaa

SEQ ID NO: 11763 - DNA, 15 bp, Homo sapiens
tgggatctctaagga

SEQ ID NO: 11764 - DNA, 15 bp, Homo sapiens
atgggatctctaagg

SEQ ID NO: 11765 - DNA, 15 bp, Homo sapiens
gatgggatctctaag

SEQ ID NO: 11766 - DNA, 15 bp, Homo sapiens
agatgggatctctaa

SEQ ID NO: 11767 - DNA, 15 bp, Homo sapiens
gagatgggatctcta

SEQ ID NO: 11768 - DNA, 15 bp, Homo sapiens
agagatgggatctct

SEQ ID NO: 11769 - DNA, 15 bp, Homo sapiens
tagagatgggatctc

SEQ ID NO: 11770 - DNA, 15 bp, Homo sapiens
ctagagatgggatct

SEQ ID NO: 11771 - DNA, 15 bp, Homo sapiens
cctagagatgggatc

SEQ ID NO: 11772 - DNA, 15 bp, Homo sapiens
tcctagagatgggat

SEQ ID NO: 11773 - DNA, 15 bp, Homo sapiens
atcctagagatggga

SEQ ID NO: 11774 - DNA, 15 bp, Homo sapiens
catcctagagatggg

SEQ ID NO: 11775 - DNA, 15 bp, Homo sapiens
gcatcctagagatgg

SEQ ID NO: 11776 - DNA, 15 bp, Homo sapiens
tgcatcctagagatg

SEQ ID NO: 11777 - DNA, 15 bp, Homo sapiens
atgcatcctagagat

SEQ ID NO: 11778 - DNA, 15 bp, Homo sapiens
aatgcatcctagaga

SEQ ID NO: 11779 - DNA, 15 bp, Homo sapiens
aaatgcatcctagag

SEQ ID NO: 11780 - DNA, 15 bp, Homo sapiens
gaaatgcatcctaga

SEQ ID NO: 11781 - DNA, 15 bp, Homo sapiens
agaaatgcatcctag

SEQ ID NO: 11782 - DNA, 15 bp, Homo sapiens
gagaaatgcatccta

SEQ ID NO: 11783 - DNA, 15 bp, Homo sapiens
agagaaatgcatcct

SEQ ID NO: 11784 - DNA, 15 bp, Homo sapiens
cagagaaatgcatcc

SEQ ID NO: 11785 - DNA, 15 bp, Homo sapiens
acagagaaatgcatc

SEQ ID NO: 11786 - DNA, 15 bp, Homo sapiens
tacagagaaatgcat

SEQ ID NO: 11787 - DNA, 15 bp, Homo sapiens
ctacagagaaatgca

SEQ ID NO: 11788 - DNA, 15 bp, Homo sapiens
actacagagaaatgc

SEQ ID NO: 11789 - DNA, 15 bp, Homo sapiens
aactacagagaaatg

SEQ ID NO: 11790 - DNA, 15 bp, Homo sapiens
taactacagagaaat

SEQ ID NO: 11791 - DNA, 15 bp, Homo sapiens
ctaactacagagaaa

SEQ ID NO: 11792 - DNA, 15 bp, Homo sapiens
actaactacagagaa

SEQ ID NO: 11793 - DNA, 15 bp, Homo sapiens
aactaactacagaga

SEQ ID NO: 11794 - DNA, 15 bp, Homo sapiens
aaactaactacagag

SEQ ID NO: 11795 - DNA, 15 bp, Homo sapiens
gaaactaactacaga

SEQ ID NO: 11796 - DNA, 15 bp, Homo sapiens
agaaactaactacag

SEQ ID NO: 11797 - DNA, 15 bp, Homo sapiens
tagaaactaactaca

SEQ ID NO: 11798 - DNA, 15 bp, Homo sapiens
ttagaaactaactac

SEQ ID NO: 11799 - DNA, 15 bp, Homo sapiens
cttagaaactaacta

SEQ ID NO: 11800 - DNA, 15 bp, Homo sapiens
acttagaaactaact

SEQ ID NO: 11801 - DNA, 15 bp, Homo sapiens
gacttagaaactaac

SEQ ID NO: 11802 - DNA, 15 bp, Homo sapiens
agacttagaaactaa

SEQ ID NO: 11803 - DNA, 15 bp, Homo sapiens
gagacttagaaacta

SEQ ID NO: 11804 - DNA, 15 bp, Homo sapiens
agagacttagaaact

SEQ ID NO: 11805 - DNA, 15 bp, Homo sapiens
aagagacttagaaac

SEQ ID NO: 11806 - DNA, 15 bp, Homo sapiens
caagagacttagaaa

SEQ ID NO: 11807 - DNA, 15 bp, Homo sapiens
acaagagacttagaa

SEQ ID NO: 11808 - DNA, 15 bp, Homo sapiens
aacaagagacttaga

SEQ ID NO: 11809 - DNA, 15 bp, Homo sapiens
gaacaagagacttag

SEQ ID NO: 11810 - DNA, 15 bp, Homo sapiens
ggaacaagagactta

SEQ ID NO: 11811 - DNA, 15 bp, Homo sapiens
aggaacaagagactt

SEQ ID NO: 11812 - DNA, 15 bp, Homo sapiens
caggaacaagagact

SEQ ID NO: 11813 - DNA, 15 bp, Homo sapiens
acaggaacaagagac

SEQ ID NO: 11814 - DNA, 15 bp, Homo sapiens
aacaggaacaagaga

SEQ ID NO: 11815 - DNA, 15 bp, Homo sapiens
gaacaggaacaagag

SEQ ID NO: 11816 - DNA, 15 bp, Homo sapiens
agaacaggaacaaga

SEQ ID NO: 11817 - DNA, 15 bp, Homo sapiens
cagaacaggaacaag

SEQ ID NO: 11818 - DNA, 15 bp, Homo sapiens
gcagaacaggaacaa

SEQ ID NO: 11819 - DNA, 15 bp, Homo sapiens
ggcagaacaggaaca

SEQ ID NO: 11820 - DNA, 15 bp, Homo sapiens
aggcagaacaggaac

SEQ ID NO: 11821 - DNA, 15 bp, Homo sapiens
aaggcagaacaggaa

SEQ ID NO: 11822 - DNA, 15 bp, Homo sapiens
aaaggcagaacagga

SEQ ID NO: 11823 - DNA, 15 bp, Homo sapiens
taaaggcagaacagg

SEQ ID NO: 11824 - DNA, 15 bp, Homo sapiens
ataaaggcagaacag

SEQ ID NO: 11825 - DNA, 15 bp, Homo sapiens
aataaaggcagaaca

SEQ ID NO: 11826 - DNA, 15 bp, Homo sapiens
aaataaaggcagaac

SEQ ID NO: 11827 - DNA, 15 bp, Homo sapiens
aaaataaaggcagaa

SEQ ID NO: 11828 - DNA, 15 bp, Homo sapiens
aaaaataaaggcaga

SEQ ID NO: 11829 - DNA, 15 bp, Homo sapiens
aaaaaataaaggcag

SEQ ID NO: 11830 - DNA, 15 bp, Homo sapiens
aaaaaaataaaggca

SEQ ID NO: 11831 - DNA, 15 bp, Homo sapiens
aaaaaaaataaaggc

SEQ ID NO: 11832 - DNA, 15 bp, Homo sapiens
aaaaaaaaataaagg

SEQ ID NO: 11833 - DNA, 15 bp, Homo sapiens
gaaaaaaaaataaag

SEQ ID NO: 11834 - DNA, 15 bp, Homo sapiens
ggaaaaaaaaataaa

SEQ ID NO: 11835 - DNA, 15 bp, Homo sapiens
aggaaaaaaaaataa

SEQ ID NO: 11836 - DNA, 15 bp, Homo sapiens
caggaaaaaaaaata

SEQ ID NO: 11837 - DNA, 15 bp, Homo sapiens
ccaggaaaaaaaaat

SEQ ID NO: 11838 - DNA, 15 bp, Homo sapiens
tccaggaaaaaaaaa

SEQ ID NO: 11839 - DNA, 15 bp, Homo sapiens
atccaggaaaaaaaa

SEQ ID NO: 11840 - DNA, 15 bp, Homo sapiens
aatccaggaaaaaaa

SEQ ID NO: 11841 - DNA, 15 bp, Homo sapiens
gaatccaggaaaaaa

SEQ ID NO: 11842 - DNA, 15 bp, Homo sapiens
agaatccaggaaaaa

SEQ ID NO: 11843 - DNA, 15 bp, Homo sapiens
tagaatccaggaaaa

SEQ ID NO: 11844 - DNA, 15 bp, Homo sapiens
ttagaatccaggaaa

SEQ ID NO: 11845 - DNA, 15 bp, Homo sapiens
cttagaatccaggaa

SEQ ID NO: 11846 - DNA, 15 bp, Homo sapiens
gcttagaatccagga

SEQ ID NO: 11847 - DNA, 15 bp, Homo sapiens
ggcttagaatccagg

SEQ ID NO: 11848 - DNA, 15 bp, Homo sapiens
tggcttagaatccag

SEQ ID NO: 11849 - DNA, 15 bp, Homo sapiens
ctggcttagaatcca

SEQ ID NO: 11850 - DNA, 15 bp, Homo sapiens
actggcttagaatcc

SEQ ID NO: 11851 - DNA, 15 bp, Homo sapiens
tactggcttagaatc

SEQ ID NO: 11852 - DNA, 15 bp, Homo sapiens
atactggcttagaat

SEQ ID NO: 11853 - DNA, 15 bp, Homo sapiens
gatactggcttagaa

SEQ ID NO: 11854 - DNA, 15 bp, Homo sapiens
ggatactggcttaga

SEQ ID NO: 11855 - DNA, 15 bp, Homo sapiens
gggatactggcttag

SEQ ID NO: 11856 - DNA, 15 bp, Homo sapiens
ggggatactggctta

SEQ ID NO: 11857 - DNA, 15 bp, Homo sapiens
tggggatactggctt

SEQ ID NO: 11858 - DNA, 15 bp, Homo sapiens
gtggggatactggct

SEQ ID NO: 11859 - DNA, 15 bp, Homo sapiens
agtggggatactggc

SEQ ID NO: 11860 - DNA, 15 bp, Homo sapiens
aagtggggatactgg

SEQ ID NO: 11861 - DNA, 15 bp, Homo sapiens
caagtggggatactg

SEQ ID NO: 11862 - DNA, 15 bp, Homo sapiens
ccaagtggggatact

SEQ ID NO: 11863 - DNA, 15 bp, Homo sapiens
gccaagtggggatac

SEQ ID NO: 11864 - DNA, 15 bp, Homo sapiens
agccaagtggggata

SEQ ID NO: 11865 - DNA, 15 bp, Homo sapiens
cagccaagtggggat

SEQ ID NO: 11866 - DNA, 15 bp, Homo sapiens
acagccaagtgggga

SEQ ID NO: 11867 - DNA, 15 bp, Homo sapiens
gacagccaagtgggg

SEQ ID NO: 11868 - DNA, 15 bp, Homo sapiens
agacagccaagtggg

SEQ ID NO: 11869 - DNA, 15 bp, Homo sapiens
aagacagccaagtgg

SEQ ID NO: 11870 - DNA, 15 bp, Homo sapiens
taagacagccaagtg

SEQ ID NO: 11871 - DNA, 15 bp, Homo sapiens
ttaagacagccaagt

SEQ ID NO: 11872 - DNA, 15 bp, Homo sapiens
attaagacagccaag

SEQ ID NO: 11873 - DNA, 15 bp, Homo sapiens
cattaagacagccaa

SEQ ID NO: 11874 - DNA, 15 bp, Homo sapiens
acattaagacagcca

SEQ ID NO: 11875 - DNA, 15 bp, Homo sapiens
tacattaagacagcc

SEQ ID NO: 11876 - DNA, 15 bp, Homo sapiens
ctacattaagacagc

SEQ ID NO: 11877 - DNA, 15 bp, Homo sapiens
gctacattaagacag

SEQ ID NO: 11878 - DNA, 15 bp, Homo sapiens
agctacattaagaca

SEQ ID NO: 11879 - DNA, 15 bp, Homo sapiens
aagctacattaagac

SEQ ID NO: 11880 - DNA, 15 bp, Homo sapiens
taagctacattaaga

SEQ ID NO: 11881 - DNA, 15 bp, Homo sapiens
ttaagctacattaag

SEQ ID NO: 11882 - DNA, 15 bp, Homo sapiens
gttaagctacattaa

SEQ ID NO: 11883 - DNA, 15 bp, Homo sapiens
tgttaagctacatta

SEQ ID NO: 11884 - DNA, 15 bp, Homo sapiens
atgttaagctacatt

SEQ ID NO: 11885 - DNA, 15 bp, Homo sapiens
catgttaagctacat

SEQ ID NO: 11886 - DNA, 15 bp, Homo sapiens
acatgttaagctaca

SEQ ID NO: 11887 - DNA, 15 bp, Homo sapiens
gacatgttaagctac

SEQ ID NO: 11888 - DNA, 15 bp, Homo sapiens
agacatgttaagcta

SEQ ID NO: 11889 - DNA, 15 bp, Homo sapiens
cagacatgttaagct

SEQ ID NO: 11890 - DNA, 15 bp, Homo sapiens
acagacatgttaagc

SEQ ID NO: 11891 - DNA, 15 bp, Homo sapiens
tacagacatgttaag

SEQ ID NO: 11892 - DNA, 15 bp, Homo sapiens
ttacagacatgttaa

SEQ ID NO: 11893 - DNA, 15 bp, Homo sapiens
attacagacatgtta

SEQ ID NO: 11894 - DNA, 15 bp, Homo sapiens
gattacagacatgtt

SEQ ID NO: 11895 - DNA, 15 bp, Homo sapiens
tgattacagacatgt

SEQ ID NO: 11896 - DNA, 15 bp, Homo sapiens
ttgattacagacatg

SEQ ID NO: 11897 - DNA, 15 bp, Homo sapiens
tttgattacagacat

SEQ ID NO: 11898 - DNA, 15 bp, Homo sapiens
ttttgattacagaca

SEQ ID NO: 11899 - DNA, 15 bp, Homo sapiens
attttgattacagac

SEQ ID NO: 11900 - DNA, 15 bp, Homo sapiens
cattttgattacaga

SEQ ID NO: 11901 - DNA, 15 bp, Homo sapiens
tcattttgattacag

SEQ ID NO: 11902 - DNA, 15 bp, Homo sapiens
atcattttgattaca

SEQ ID NO: 11903 - DNA, 15 bp, Homo sapiens
gatcattttgattac

SEQ ID NO: 11904 - DNA, 15 bp, Homo sapiens
tgatcattttgatta

SEQ ID NO: 11905 - DNA, 15 bp, Homo sapiens
atgatcattttgatt

SEQ ID NO: 11906 - DNA, 15 bp, Homo sapiens
gatgatcattttgat

SEQ ID NO: 11907 - DNA, 15 bp, Homo sapiens
agatgatcattttga

SEQ ID NO: 11908 - DNA, 15 bp, Homo sapiens
aagatgatcattttg

SEQ ID NO: 11909 - DNA, 15 bp, Homo sapiens
aaagatgatcatttt

SEQ ID NO: 11910 - DNA, 15 bp, Homo sapiens
gaaagatgatcattt

SEQ ID NO: 11911 - DNA, 15 bp, Homo sapiens
agaaagatgatcatt

SEQ ID NO: 11912 - DNA, 15 bp, Homo sapiens
cagaaagatgatcat

SEQ ID NO: 11913 - DNA, 15 bp, Homo sapiens
tcagaaagatgatca

SEQ ID NO: 11914 - DNA, 15 bp, Homo sapiens
ctcagaaagatgatc

SEQ ID NO: 11915 - DNA, 15 bp, Homo sapiens
tctcagaaagatgat

SEQ ID NO: 11916 - DNA, 15 bp, Homo sapiens
atctcagaaagatga

SEQ ID NO: 11917 - DNA, 15 bp, Homo sapiens
aatctcagaaagatg

SEQ ID NO: 11918 - DNA, 15 bp, Homo sapiens
gaatctcagaaagat

SEQ ID NO: 11919 - DNA, 15 bp, Homo sapiens
tgaatctcagaaaga

SEQ ID NO: 11920 - DNA, 15 bp, Homo sapiens
ttgaatctcagaaag

SEQ ID NO: 11921 - DNA, 15 bp, Homo sapiens
tttgaatctcagaaa

SEQ ID NO: 11922 - DNA, 15 bp, Homo sapiens
ctttgaatctcagaa

SEQ ID NO: 11923 - DNA, 15 bp, Homo sapiens
cctttgaatctcaga

SEQ ID NO: 11924 - DNA, 15 bp, Homo sapiens
ccctttgaatctcag

SEQ ID NO: 11925 - DNA, 15 bp, Homo sapiens
gccctttgaatctca

SEQ ID NO: 11926 - DNA, 15 bp, Homo sapiens
agccctttgaatctc

SEQ ID NO: 11927 - DNA, 15 bp, Homo sapiens
tagccctttgaatct

SEQ ID NO: 11928 - DNA, 15 bp, Homo sapiens
atagccctttgaatc

SEQ ID NO: 11929 - DNA, 15 bp, Homo sapiens
tatagccctttgaat

SEQ ID NO: 11930 - DNA, 15 bp, Homo sapiens
ttatagccctttgaa

SEQ ID NO: 11931 - DNA, 15 bp, Homo sapiens
cttatagccctttga

SEQ ID NO: 11932 - DNA, 15 bp, Homo sapiens
ccttatagccctttg

SEQ ID NO: 11933 - DNA, 15 bp, Homo sapiens
cccttatagcccttt

SEQ ID NO: 11934 - DNA, 15 bp, Homo sapiens
tcccttatagccctt

SEQ ID NO: 11935 - DNA, 15 bp, Homo sapiens
gtcccttatagccct

SEQ ID NO: 11936 - DNA, 15 bp, Homo sapiens
agtcccttatagccc

SEQ ID NO: 11937 - DNA, 15 bp, Homo sapiens
aagtcccttatagcc

SEQ ID NO: 11938 - DNA, 15 bp, Homo sapiens
aaagtcccttatagc

SEQ ID NO: 11939 - DNA, 15 bp, Homo sapiens
caaagtcccttatag

SEQ ID NO: 11940 - DNA, 15 bp, Homo sapiens
ccaaagtcccttata

SEQ ID NO: 11941 - DNA, 15 bp, Homo sapiens
tccaaagtcccttat

SEQ ID NO: 11942 - DNA, 15 bp, Homo sapiens
ctccaaagtccctta

SEQ ID NO: 11943 - DNA, 15 bp, Homo sapiens
tctccaaagtccctt

SEQ ID NO: 11944 - DNA, 15 bp, Homo sapiens
ctctccaaagtccct

SEQ ID NO: 11945 - DNA, 15 bp, Homo sapiens
tctctccaaagtccc

SEQ ID NO: 11946 - DNA, 15 bp, Homo sapiens
ttctctccaaagtcc

SEQ ID NO: 11947 - DNA, 15 bp, Homo sapiens
attctctccaaagtc

SEQ ID NO: 11948 - DNA, 15 bp, Homo sapiens
aattctctccaaagt

SEQ ID NO: 11949 - DNA, 15 bp, Homo sapiens
aaattctctccaaag

SEQ ID NO: 11950 - DNA, 15 bp, Homo sapiens
gaaattctctccaaa

SEQ ID NO: 11951 - DNA, 15 bp, Homo sapiens
tgaaattctctccaa

SEQ ID NO: 11952 - DNA, 15 bp, Homo sapiens
atgaaattctctcca

SEQ ID NO: 11953 - DNA, 15 bp, Homo sapiens
aatgaaattctctcc

SEQ ID NO: 11954 - DNA, 15 bp, Homo sapiens
gaatgaaattctctc

SEQ ID NO: 11955 - DNA, 15 bp, Homo sapiens
tgaatgaaattctct

SEQ ID NO: 11956 - DNA, 15 bp, Homo sapiens
ctgaatgaaattctc

SEQ ID NO: 11957 - DNA, 15 bp, Homo sapiens
actgaatgaaattct

SEQ ID NO: 11958 - DNA, 15 bp, Homo sapiens
aactgaatgaaattc

SEQ ID NO: 11959 - DNA, 15 bp, Homo sapiens
aaactgaatgaaatt

SEQ ID NO: 11960 - DNA, 15 bp, Homo sapiens
aaaactgaatgaaat

SEQ ID NO: 11961 - DNA, 15 bp, Homo sapiens
gaaaactgaatgaaa

SEQ ID NO: 11962 - DNA, 15 bp, Homo sapiens
ggaaaactgaatgaa

SEQ ID NO: 11963 - DNA, 15 bp, Homo sapiens
aggaaaactgaatga

SEQ ID NO: 11964 - DNA, 15 bp, Homo sapiens
gaggaaaactgaatg

SEQ ID NO: 11965 - DNA, 15 bp, Homo sapiens
tgaggaaaactgaat

SEQ ID NO: 11966 - DNA, 15 bp, Homo sapiens
ttgaggaaaactgaa

SEQ ID NO: 11967 - DNA, 15 bp, Homo sapiens
tttgaggaaaactga

SEQ ID NO: 11968 - DNA, 15 bp, Homo sapiens
gtttgaggaaaactg

SEQ ID NO: 11969 - DNA, 15 bp, Homo sapiens
agtttgaggaaaact

SEQ ID NO: 11970 - DNA, 15 bp, Homo sapiens
tagtttgaggaaaac

SEQ ID NO: 11971 - DNA, 15 bp, Homo sapiens
ctagtttgaggaaaa

SEQ ID NO: 11972 - DNA, 15 bp, Homo sapiens
tctagtttgaggaaa

SEQ ID NO: 11973 - DNA, 15 bp, Homo sapiens
ttctagtttgaggaa

SEQ ID NO: 11974 - DNA, 15 bp, Homo sapiens
attctagtttgagga

SEQ ID NO: 11975 - DNA, 15 bp, Homo sapiens
tattctagtttgagg

SEQ ID NO: 11976 - DNA, 15 bp, Homo sapiens
ttattctagtttgag

SEQ ID NO: 11977 - DNA, 15 bp, Homo sapiens
attattctagtttga

SEQ ID NO: 11978 - DNA, 15 bp, Homo sapiens
cattattctagtttg

SEQ ID NO: 11979 - DNA, 15 bp, Homo sapiens
gcattattctagttt

SEQ ID NO: 11980 - DNA, 15 bp, Homo sapiens
agcattattctagtt

SEQ ID NO: 11981 - DNA, 15 bp, Homo sapiens
aagcattattctagt

SEQ ID NO: 11982 - DNA, 15 bp, Homo sapiens
caagcattattctag

SEQ ID NO: 11983 - DNA, 15 bp, Homo sapiens
gcaagcattattcta

SEQ ID NO: 11984 - DNA, 15 bp, Homo sapiens
tgcaagcattattct

SEQ ID NO: 11985 - DNA, 15 bp, Homo sapiens
gtgcaagcattattc

SEQ ID NO: 11986 - DNA, 15 bp, Homo sapiens
agtgcaagcattatt

SEQ ID NO: 11987 - DNA, 15 bp, Homo sapiens
cagtgcaagcattat

SEQ ID NO: 11988 - DNA, 15 bp, Homo sapiens
acagtgcaagcatta

SEQ ID NO: 11989 - DNA, 15 bp, Homo sapiens
gacagtgcaagcatt

SEQ ID NO: 11990 - DNA, 15 bp, Homo sapiens
agacagtgcaagcat

SEQ ID NO: 11991 - DNA, 15 bp, Homo sapiens
cagacagtgcaagca

SEQ ID NO: 11992 - DNA, 15 bp, Homo sapiens
acagacagtgcaagc

SEQ ID NO: 11993 - DNA, 15 bp, Homo sapiens
tacagacagtgcaag

SEQ ID NO: 11994 - DNA, 15 bp, Homo sapiens
ttacagacagtgcaa

SEQ ID NO: 11995 - DNA, 15 bp, Homo sapiens
tttacagacagtgca

SEQ ID NO: 11996 - DNA, 15 bp, Homo sapiens
ttttacagacagtgc

SEQ ID NO: 11997 - DNA, 15 bp, Homo sapiens
cttttacagacagtg

SEQ ID NO: 11998 - DNA, 15 bp, Homo sapiens
tcttttacagacagt

SEQ ID NO: 11999 - DNA, 15 bp, Homo sapiens
ttcttttacagacag

SEQ ID NO: 12000 - DNA, 15 bp, Homo sapiens
gttcttttacagaca

SEQ ID NO: 12001 - DNA, 15 bp, Homo sapiens
tgttcttttacagac

SEQ ID NO: 12002 - DNA, 15 bp, Homo sapiens
ttgttcttttacaga

SEQ ID NO: 12003 - DNA, 15 bp, Homo sapiens
tttgttcttttacag

SEQ ID NO: 12004 - DNA, 15 bp, Homo sapiens
ttttgttcttttaca

SEQ ID NO: 12005 - DNA, 15 bp, Homo sapiens
cttttgttcttttac

SEQ ID NO: 12006 - DNA, 15 bp, Homo sapiens
acttttgttctttta

SEQ ID NO: 12007 - DNA, 15 bp, Homo sapiens
cacttttgttctttt

SEQ ID NO: 12008 - DNA, 15 bp, Homo sapiens
acacttttgttcttt

SEQ ID NO: 12009 - DNA, 15 bp, Homo sapiens
gacacttttgttctt

SEQ ID NO: 12010 - DNA, 15 bp, Homo sapiens
tgacacttttgttct

SEQ ID NO: 12011 - DNA, 15 bp, Homo sapiens
ttgacacttttgttc

SEQ ID NO: 12012 - DNA, 15 bp, Homo sapiens
tttgacacttttgtt

SEQ ID NO: 12013 - DNA, 15 bp, Homo sapiens
ctttgacacttttgt

SEQ ID NO: 12014 - DNA, 15 bp, Homo sapiens
gctttgacacttttg

SEQ ID NO: 12015 - DNA, 15 bp, Homo sapiens
tgctttgacactttt

SEQ ID NO: 12016 - DNA, 15 bp, Homo sapiens
atgctttgacacttt

SEQ ID NO: 12017 - DNA, 15 bp, Homo sapiens
gatgctttgacactt

SEQ ID NO: 12018 - DNA, 15 bp, Homo sapiens
ggatgctttgacact

SEQ ID NO: 12019 - DNA, 15 bp, Homo sapiens
aggatgctttgacac

SEQ ID NO: 12020 - DNA, 15 bp, Homo sapiens
aaggatgctttgaca

SEQ ID NO: 12021 - DNA, 15 bp, Homo sapiens
aaaggatgctttgac

SEQ ID NO: 12022 - DNA, 15 bp, Homo sapiens
aaaaggatgctttga

SEQ ID NO: 12023 - DNA, 15 bp, Homo sapiens
caaaaggatgctttg

SEQ ID NO: 12024 - DNA, 15 bp, Homo sapiens
acaaaaggatgcttt

SEQ ID NO: 12025 - DNA, 15 bp, Homo sapiens
aacaaaaggatgctt

SEQ ID NO: 12026 - DNA, 15 bp, Homo sapiens
gaacaaaaggatgct

SEQ ID NO: 12027 - DNA, 15 bp, Homo sapiens
tgaacaaaaggatgc

SEQ ID NO: 12028 - DNA, 15 bp, Homo sapiens
gtgaacaaaaggatg

SEQ ID NO: 12029 - DNA, 15 bp, Homo sapiens
agtgaacaaaaggat

SEQ ID NO: 12030 - DNA, 15 bp, Homo sapiens
tagtgaacaaaagga

SEQ ID NO: 12031 - DNA, 15 bp, Homo sapiens
ttagtgaacaaaagg

SEQ ID NO: 12032 - DNA, 15 bp, Homo sapiens
tttagtgaacaaaag

SEQ ID NO: 12033 - DNA, 15 bp, Homo sapiens
atttagtgaacaaaa

SEQ ID NO: 12034 - DNA, 15 bp, Homo sapiens
aatttagtgaacaaa

SEQ ID NO: 12035 - DNA, 15 bp, Homo sapiens
aaatttagtgaacaa

SEQ ID NO: 12036 - DNA, 15 bp, Homo sapiens
gaaatttagtgaaca

SEQ ID NO: 12037 - DNA, 15 bp, Homo sapiens
ggaaatttagtgaac

SEQ ID NO: 12038 - DNA, 15 bp, Homo sapiens
aggaaatttagtgaa

SEQ ID NO: 12039 - DNA, 15 bp, Homo sapiens
aaggaaatttagtga

SEQ ID NO: 12040 - DNA, 15 bp, Homo sapiens
aaaggaaatttagtg

SEQ ID NO: 12041 - DNA, 15 bp, Homo sapiens
aaaaggaaatttagt

SEQ ID NO: 12042 - DNA, 15 bp, Homo sapiens
aaaaaggaaatttag

SEQ ID NO: 12043 - DNA, 15 bp, Homo sapiens
aaaaaaggaaattta

SEQ ID NO: 12044 - DNA, 15 bp, Homo sapiens
taaaaaaggaaattt

SEQ ID NO: 12045 - DNA, 15 bp, Homo sapiens
ataaaaaaggaaatt

SEQ ID NO: 12046 - DNA, 15 bp, Homo sapiens
aataaaaaaggaaat

SEQ ID NO: 12047 - DNA, 15 bp, Homo sapiens
taataaaaaaggaaa

SEQ ID NO: 12048 - DNA, 15 bp, Homo sapiens
ataataaaaaaggaa

SEQ ID NO: 12049 - DNA, 15 bp, Homo sapiens
tataataaaaaagga

SEQ ID NO: 12050 - DNA, 15 bp, Homo sapiens
ctataataaaaaagg

SEQ ID NO: 12051 - DNA, 15 bp, Homo sapiens
actataataaaaaag

SEQ ID NO: 12052 - DNA, 15 bp, Homo sapiens
cactataataaaaaa

SEQ ID NO: 12053 - DNA, 15 bp, Homo sapiens
acactataataaaaa

SEQ ID NO: 12054 - DNA, 15 bp, Homo sapiens
aacactataataaaa

SEQ ID NO: 12055 - DNA, 15 bp, Homo sapiens
taacactataataaa

SEQ ID NO: 12056 - DNA, 15 bp, Homo sapiens
gtaacactataataa

SEQ ID NO: 12057 - DNA, 15 bp, Homo sapiens
agtaacactataata

SEQ ID NO: 12058 - DNA, 15 bp, Homo sapiens
aagtaacactataat

SEQ ID NO: 12059 - DNA, 15 bp, Homo sapiens
taagtaacactataa

SEQ ID NO: 12060 - DNA, 15 bp, Homo sapiens
ttaagtaacactata

SEQ ID NO: 12061 - DNA, 15 bp, Homo sapiens
tttaagtaacactat

SEQ ID NO: 12062 - DNA, 15 bp, Homo sapiens
atttaagtaacacta

SEQ ID NO: 12063 - DNA, 15 bp, Homo sapiens
tatttaagtaacact

SEQ ID NO: 12064 - DNA, 15 bp, Homo sapiens
atatttaagtaacac

SEQ ID NO: 12065 - DNA, 15 bp, Homo sapiens
aatatttaagtaaca

SEQ ID NO: 12066 - DNA, 15 bp, Homo sapiens
taatatttaagtaac

SEQ ID NO: 12067 - DNA, 15 bp, Homo sapiens
ctaatatttaagtaa

SEQ ID NO: 12068 - DNA, 15 bp, Homo sapiens
cctaatatttaagta

SEQ ID NO: 12069 - DNA, 15 bp, Homo sapiens
tcctaatatttaagt

SEQ ID NO: 12070 - DNA, 15 bp, Homo sapiens
ttcctaatatttaag

SEQ ID NO: 12071 - DNA, 15 bp, Homo sapiens
cttcctaatatttaa

SEQ ID NO: 12072 - DNA, 15 bp, Homo sapiens
acttcctaatattta

SEQ ID NO: 12073 - DNA, 15 bp, Homo sapiens
tacttcctaatattt

SEQ ID NO: 12074 - DNA, 15 bp, Homo sapiens
ttacttcctaatatt

SEQ ID NO: 12075 - DNA, 15 bp, Homo sapiens
tttacttcctaatat

SEQ ID NO: 12076 - DNA, 15 bp, Homo sapiens
ttttacttcctaata

SEQ ID NO: 12077 - DNA, 15 bp, Homo sapiens
cttttacttcctaat

SEQ ID NO: 12078 - DNA, 15 bp, Homo sapiens
acttttacttcctaa

SEQ ID NO: 12079 - DNA, 15 bp, Homo sapiens
tacttttacttccta

SEQ ID NO: 12080 - DNA, 15 bp, Homo sapiens
ctacttttacttcct

SEQ ID NO: 12081 - DNA, 15 bp, Homo sapiens
cctacttttacttcc

SEQ ID NO: 12082 - DNA, 15 bp, Homo sapiens
acctacttttacttc

SEQ ID NO: 12083 - DNA, 15 bp, Homo sapiens
tacctacttttactt

SEQ ID NO: 12084 - DNA, 15 bp, Homo sapiens
atacctacttttact

SEQ ID NO: 12085 - DNA, 15 bp, Homo sapiens
tatacctacttttac

SEQ ID NO: 12086 - DNA, 15 bp, Homo sapiens
ttatacctactttta

SEQ ID NO: 12087 - DNA, 15 bp, Homo sapiens
tttatacctactttt

SEQ ID NO: 12088 - DNA, 15 bp, Homo sapiens
gtttatacctacttt

SEQ ID NO: 12089 - DNA, 15 bp, Homo sapiens
agtttatacctactt

SEQ ID NO: 12090 - DNA, 15 bp, Homo sapiens
aagtttatacctact

SEQ ID NO: 12091 - DNA, 15 bp, Homo sapiens
gaagtttatacctac

SEQ ID NO: 12092 - DNA, 15 bp, Homo sapiens
agaagtttataccta

SEQ ID NO: 12093 - DNA, 15 bp, Homo sapiens
aagaagtttatacct

SEQ ID NO: 12094 - DNA, 15 bp, Homo sapiens
taagaagtttatacc

SEQ ID NO: 12095 - DNA, 15 bp, Homo sapiens
ataagaagtttatac

SEQ ID NO: 12096 - DNA, 15 bp, Homo sapiens
tataagaagtttata

SEQ ID NO: 12097 - DNA, 15 bp, Homo sapiens
ctataagaagtttat

SEQ ID NO: 12098 - DNA, 15 bp, Homo sapiens
cctataagaagttta

SEQ ID NO: 12099 - DNA, 15 bp, Homo sapiens
gcctataagaagttt

SEQ ID NO: 12100 - DNA, 15 bp, Homo sapiens
agcctataagaagtt

SEQ ID NO: 12101 - DNA, 15 bp, Homo sapiens
cagcctataagaagt

SEQ ID NO: 12102 - DNA, 15 bp, Homo sapiens
acagcctataagaag

SEQ ID NO: 12103 - DNA, 15 bp, Homo sapiens
aacagcctataagaa

SEQ ID NO: 12104 - DNA, 15 bp, Homo sapiens
taacagcctataaga

SEQ ID NO: 12105 - DNA, 15 bp, Homo sapiens
ataacagcctataag

SEQ ID NO: 12106 - DNA, 15 bp, Homo sapiens
aataacagcctataa

SEQ ID NO: 12107 - DNA, 15 bp, Homo sapiens
taataacagcctata

SEQ ID NO: 12108 - DNA, 15 bp, Homo sapiens
ataataacagcctat

SEQ ID NO: 12109 - DNA, 15 bp, Homo sapiens
tataataacagccta

SEQ ID NO: 12110 - DNA, 15 bp, Homo sapiens
gtataataacagcct

SEQ ID NO: 12111 - DNA, 15 bp, Homo sapiens
tgtataataacagcc

SEQ ID NO: 12112 - DNA, 15 bp, Homo sapiens
ttgtataataacagc

SEQ ID NO: 12113 - DNA, 15 bp, Homo sapiens
gttgtataataacag

SEQ ID NO: 12114 - DNA, 15 bp, Homo sapiens
agttgtataataaca

SEQ ID NO: 12115 - DNA, 15 bp, Homo sapiens
tagttgtataataac

SEQ ID NO: 12116 - DNA, 15 bp, Homo sapiens
atagttgtataataa

SEQ ID NO: 12117 - DNA, 15 bp, Homo sapiens
tatagttgtataata

SEQ ID NO: 12118 - DNA, 15 bp, Homo sapiens
atatagttgtataat

SEQ ID NO: 12119 - DNA, 15 bp, Homo sapiens
catatagttgtataa

SEQ ID NO: 12120 - DNA, 15 bp, Homo sapiens
tcatatagttgtata

SEQ ID NO: 12121 - DNA, 15 bp, Homo sapiens
gtcatatagttgtat

SEQ ID NO: 12122 - DNA, 15 bp, Homo sapiens
ggtcatatagttgta

SEQ ID NO: 12123 - DNA, 15 bp, Homo sapiens
gggtcatatagttgt

SEQ ID NO: 12124 - DNA, 15 bp, Homo sapiens
tgggtcatatagttg

SEQ ID NO: 12125 - DNA, 15 bp, Homo sapiens
atgggtcatatagtt

SEQ ID NO: 12126 - DNA, 15 bp, Homo sapiens
tatgggtcatatagt

SEQ ID NO: 12127 - DNA, 15 bp, Homo sapiens
gtatgggtcatatag

SEQ ID NO: 12128 - DNA, 15 bp, Homo sapiens
tgtatgggtcatata

SEQ ID NO: 12129 - DNA, 15 bp, Homo sapiens
atgtatgggtcatat

SEQ ID NO: 12130 - DNA, 15 bp, Homo sapiens
tatgtatgggtcata

SEQ ID NO: 12131 - DNA, 15 bp, Homo sapiens
atatgtatgggtcat

SEQ ID NO: 12132 - DNA, 15 bp, Homo sapiens
aatatgtatgggtca

SEQ ID NO: 12133 - DNA, 15 bp, Homo sapiens
aaatatgtatgggtc

SEQ ID NO: 12134 - DNA, 15 bp, Homo sapiens
taaatatgtatgggt

SEQ ID NO: 12135 - DNA, 15 bp, Homo sapiens
gtaaatatgtatggg

SEQ ID NO: 12136 - DNA, 15 bp, Homo sapiens
tgtaaatatgtatgg

SEQ ID NO: 12137 - DNA, 15 bp, Homo sapiens
ttgtaaatatgtatg

SEQ ID NO: 12138 - DNA, 15 bp, Homo sapiens
tttgtaaatatgtat

SEQ ID NO: 12139 - DNA, 15 bp, Homo sapiens
atttgtaaatatgta

SEQ ID NO: 12140 - DNA, 15 bp, Homo sapiens
aatttgtaaatatgt

SEQ ID NO: 12141 - DNA, 15 bp, Homo sapiens
taatttgtaaatatg

SEQ ID NO: 12142 - DNA, 15 bp, Homo sapiens
ttaatttgtaaatat

SEQ ID NO: 12143 - DNA, 15 bp, Homo sapiens
cttaatttgtaaata

SEQ ID NO: 12144 - DNA, 15 bp, Homo sapiens
acttaatttgtaaat

SEQ ID NO: 12145 - DNA, 15 bp, Homo sapiens
cacttaatttgtaaa

SEQ ID NO: 12146 - DNA, 15 bp, Homo sapiens
gcacttaatttgtaa

SEQ ID NO: 12147 - DNA, 15 bp, Homo sapiens
tgcacttaatttgta

SEQ ID NO: 12148 - DNA, 15 bp, Homo sapiens
ctgcacttaatttgt

SEQ ID NO: 12149 - DNA, 15 bp, Homo sapiens
gctgcacttaatttg

SEQ ID NO: 12150 - DNA, 15 bp, Homo sapiens
ggctgcacttaattt

SEQ ID NO: 12151 - DNA, 15 bp, Homo sapiens
tggctgcacttaatt

SEQ ID NO: 12152 - DNA, 15 bp, Homo sapiens
ttggctgcacttaat

SEQ ID NO: 12153 - DNA, 15 bp, Homo sapiens
tttggctgcacttaa

SEQ ID NO: 12154 - DNA, 15 bp, Homo sapiens
ttttggctgcactta

SEQ ID NO: 12155 - DNA, 15 bp, Homo sapiens
attttggctgcactt

SEQ ID NO: 12156 - DNA, 15 bp, Homo sapiens
aattttggctgcact

SEQ ID NO: 12157 - DNA, 15 bp, Homo sapiens
caattttggctgcac

SEQ ID NO: 12158 - DNA, 15 bp, Homo sapiens
gcaattttggctgca

SEQ ID NO: 12159 - DNA, 15 bp, Homo sapiens
tgcaattttggctgc

SEQ ID NO: 12160 - DNA, 15 bp, Homo sapiens
ttgcaattttggctg

SEQ ID NO: 12161 - DNA, 15 bp, Homo sapiens
tttgcaattttggct

SEQ ID NO: 12162 - DNA, 15 bp, Homo sapiens
ttttgcaattttggc

SEQ ID NO: 12163 - DNA, 15 bp, Homo sapiens
attttgcaattttgg

SEQ ID NO: 12164 - DNA, 15 bp, Homo sapiens
gattttgcaattttg

SEQ ID NO: 12165 - DNA, 15 bp, Homo sapiens
tgattttgcaatttt

SEQ ID NO: 12166 - DNA, 15 bp, Homo sapiens
ttgattttgcaattt

SEQ ID NO: 12167 - DNA, 15 bp, Homo sapiens
attgattttgcaatt

SEQ ID NO: 12168 - DNA, 15 bp, Homo sapiens
tattgattttgcaat

SEQ ID NO: 12169 - DNA, 15 bp, Homo sapiens
gtattgattttgcaa

SEQ ID NO: 12170 - DNA, 15 bp, Homo sapiens
ggtattgattttgca

SEQ ID NO: 12171 - DNA, 15 bp, Homo sapiens
tggtattgattttgc

SEQ ID NO: 12172 - DNA, 15 bp, Homo sapiens
atggtattgattttg

SEQ ID NO: 12173 - DNA, 15 bp, Homo sapiens
aatggtattgatttt

SEQ ID NO: 12174 - DNA, 15 bp, Homo sapiens
gaatggtattgattt

SEQ ID NO: 12175 - DNA, 15 bp, Homo sapiens
tgaatggtattgatt

SEQ ID NO: 12176 - DNA, 15 bp, Homo sapiens
ttgaatggtattgat

SEQ ID NO: 12177 - DNA, 15 bp, Homo sapiens
tttgaatggtattga

SEQ ID NO: 12178 - DNA, 15 bp, Homo sapiens
atttgaatggtattg

SEQ ID NO: 12179 - DNA, 15 bp, Homo sapiens
aatttgaatggtatt

SEQ ID NO: 12180 - DNA, 15 bp, Homo sapiens
taatttgaatggtat

SEQ ID NO: 12181 - DNA, 15 bp, Homo sapiens
ttaatttgaatggta

SEQ ID NO: 12182 - DNA, 15 bp, Homo sapiens
attaatttgaatggt

SEQ ID NO: 12183 - DNA, 15 bp, Homo sapiens
tattaatttgaatgg

SEQ ID NO: 12184 - DNA, 15 bp, Homo sapiens
gtattaatttgaatg

SEQ ID NO: 12185 - DNA, 15 bp, Homo sapiens
ggtattaatttgaat

SEQ ID NO: 12186 - DNA, 15 bp, Homo sapiens
aggtattaatttgaa

SEQ ID NO: 12187 - DNA, 15 bp, Homo sapiens
aaggtattaatttga

SEQ ID NO: 12188 - DNA, 15 bp, Homo sapiens
taaggtattaatttg

SEQ ID NO: 12189 - DNA, 15 bp, Homo sapiens
ttaaggtattaattt

SEQ ID NO: 12190 - DNA, 15 bp, Homo sapiens
tttaaggtattaatt

SEQ ID NO: 12191 - DNA, 15 bp, Homo sapiens
atttaaggtattaat

SEQ ID NO: 12192 - DNA, 15 bp, Homo sapiens
catttaaggtattaa

SEQ ID NO: 12193 - DNA, 15 bp, Homo sapiens
acatttaaggtatta

SEQ ID NO: 12194 - DNA, 15 bp, Homo sapiens
cacatttaaggtatt

SEQ ID NO: 12195 - DNA, 15 bp, Homo sapiens
ccacatttaaggtat

SEQ ID NO: 12196 - DNA, 15 bp, Homo sapiens
accacatttaaggta

SEQ ID NO: 12197 - DNA, 15 bp, Homo sapiens
caccacatttaaggt

SEQ ID NO: 12198 - DNA, 15 bp, Homo sapiens
tcaccacatttaagg

SEQ ID NO: 12199 - DNA, 15 bp, Homo sapiens
ctcaccacatttaag

SEQ ID NO: 12200 - DNA, 15 bp, Homo sapiens
cctcaccacatttaa

SEQ ID NO: 12201 - DNA, 15 bp, Homo sapiens
gcctcaccacattta

SEQ ID NO: 12202 - DNA, 15 bp, Homo sapiens
tgcctcaccacattt

SEQ ID NO: 12203 - DNA, 15 bp, Homo sapiens
ctgcctcaccacatt

SEQ ID NO: 12204 - DNA, 15 bp, Homo sapiens
gctgcctcaccacat

SEQ ID NO: 12205 - DNA, 15 bp, Homo sapiens
agctgcctcaccaca

SEQ ID NO: 12206 - DNA, 15 bp, Homo sapiens
cagctgcctcaccac

SEQ ID NO: 12207 - DNA, 15 bp, Homo sapiens
acagctgcctcacca

SEQ ID NO: 12208 - DNA, 15 bp, Homo sapiens
aacagctgcctcacc

SEQ ID NO: 12209 - DNA, 15 bp, Homo sapiens
caacagctgcctcac

SEQ ID NO: 12210 - DNA, 15 bp, Homo sapiens
acaacagctgcctca

SEQ ID NO: 12211 - DNA, 15 bp, Homo sapiens
aacaacagctgcctc

SEQ ID NO: 12212 - DNA, 15 bp, Homo sapiens
gaacaacagctgcct

SEQ ID NO: 12213 - DNA, 15 bp, Homo sapiens
tgaacaacagctgcc

SEQ ID NO: 12214 - DNA, 15 bp, Homo sapiens
ttgaacaacagctgc

SEQ ID NO: 12215 - DNA, 15 bp, Homo sapiens
gttgaacaacagctg

SEQ ID NO: 12216 - DNA, 15 bp, Homo sapiens
agttgaacaacagct

SEQ ID NO: 12217 - DNA, 15 bp, Homo sapiens
cagttgaacaacagc

SEQ ID NO: 12218 - DNA, 15 bp, Homo sapiens
tcagttgaacaacag

SEQ ID NO: 12219 - DNA, 15 bp, Homo sapiens
ttcagttgaacaaca

SEQ ID NO: 12220 - DNA, 15 bp, Homo sapiens
tttcagttgaacaac

SEQ ID NO: 12221 - DNA, 15 bp, Homo sapiens
gtttcagttgaacaa

SEQ ID NO: 12222 - DNA, 15 bp, Homo sapiens
ggtttcagttgaaca

SEQ ID NO: 12223 - DNA, 15 bp, Homo sapiens
tggtttcagttgaac

SEQ ID NO: 12224 - DNA, 15 bp, Homo sapiens
ttggtttcagttgaa

SEQ ID NO: 12225 - DNA, 15 bp, Homo sapiens
tttggtttcagttga

SEQ ID NO: 12226 - DNA, 15 bp, Homo sapiens
atttggtttcagttg

SEQ ID NO: 12227 - DNA, 15 bp, Homo sapiens
aatttggtttcagtt

SEQ ID NO: 12228 - DNA, 15 bp, Homo sapiens
taatttggtttcagt

SEQ ID NO: 12229 - DNA, 15 bp, Homo sapiens
ataatttggtttcag

SEQ ID NO: 12230 - DNA, 15 bp, Homo sapiens
tataatttggtttca

SEQ ID NO: 12231 - DNA, 15 bp, Homo sapiens
ttataatttggtttc

SEQ ID NO: 12232 - DNA, 15 bp, Homo sapiens
cttataatttggttt

SEQ ID NO: 12233 - DNA, 15 bp, Homo sapiens
acttataatttggtt

SEQ ID NO: 12234 - DNA, 15 bp, Homo sapiens
aacttataatttggt

SEQ ID NO: 12235 - DNA, 15 bp, Homo sapiens
caacttataatttgg

SEQ ID NO: 12236 - DNA, 15 bp, Homo sapiens
gcaacttataatttg

SEQ ID NO: 12237 - DNA, 15 bp, Homo sapiens
tgcaacttataattt

SEQ ID NO: 12238 - DNA, 15 bp, Homo sapiens
atgcaacttataatt

SEQ ID NO: 12239 - DNA, 15 bp, Homo sapiens
catgcaacttataat

SEQ ID NO: 12240 - DNA, 15 bp, Homo sapiens
ccatgcaacttataa

SEQ ID NO: 12241 - DNA, 15 bp, Homo sapiens
gccatgcaacttata

SEQ ID NO: 12242 - DNA, 15 bp, Homo sapiens
tgccatgcaacttat

SEQ ID NO: 12243 - DNA, 15 bp, Homo sapiens
ctgccatgcaactta

SEQ ID NO: 12244 - DNA, 15 bp, Homo sapiens
actgccatgcaactt

SEQ ID NO: 12245 - DNA, 15 bp, Homo sapiens
tactgccatgcaact

SEQ ID NO: 12246 - DNA, 15 bp, Homo sapiens
ttactgccatgcaac

SEQ ID NO: 12247 - DNA, 15 bp, Homo sapiens
tttactgccatgcaa

SEQ ID NO: 12248 - DNA, 15 bp, Homo sapiens
atttactgccatgca

SEQ ID NO: 12249 - DNA, 15 bp, Homo sapiens
catttactgccatgc

SEQ ID NO: 12250 - DNA, 15 bp, Homo sapiens
gcatttactgccatg

SEQ ID NO: 12251 - DNA, 15 bp, Homo sapiens
agcatttactgccat

SEQ ID NO: 12252 - DNA, 15 bp, Homo sapiens
tagcatttactgcca

SEQ ID NO: 12253 - DNA, 15 bp, Homo sapiens
atagcatttactgcc

SEQ ID NO: 12254 - DNA, 15 bp, Homo sapiens
gatagcatttactgc

SEQ ID NO: 12255 - DNA, 15 bp, Homo sapiens
tgatagcatttactg

SEQ ID NO: 12256 - DNA, 15 bp, Homo sapiens
atgatagcatttact

SEQ ID NO: 12257 - DNA, 15 bp, Homo sapiens
catgatagcatttac

SEQ ID NO: 12258 - DNA, 15 bp, Homo sapiens
gcatgatagcattta

SEQ ID NO: 12259 - DNA, 15 bp, Homo sapiens
agcatgatagcattt

SEQ ID NO: 12260 - DNA, 15 bp, Homo sapiens
cagcatgatagcatt

SEQ ID NO: 12261 - DNA, 15 bp, Homo sapiens
tcagcatgatagcat

SEQ ID NO: 12262 - DNA, 15 bp, Homo sapiens
atcagcatgatagca

SEQ ID NO: 12263 - DNA, 15 bp, Homo sapiens
gatcagcatgatagc

SEQ ID NO: 12264 - DNA, 15 bp, Homo sapiens
tgatcagcatgatag

SEQ ID NO: 12265 - DNA, 15 bp, Homo sapiens
atgatcagcatgata

SEQ ID NO: 12266 - DNA, 15 bp, Homo sapiens
aatgatcagcatgat

SEQ ID NO: 12267 - DNA, 15 bp, Homo sapiens
aaatgatcagcatga

SEQ ID NO: 12268 - DNA, 15 bp, Homo sapiens
aaaatgatcagcatg

SEQ ID NO: 12269 - DNA, 15 bp, Homo sapiens
caaaatgatcagcat

SEQ ID NO: 12270 - DNA, 15 bp, Homo sapiens
tcaaaatgatcagca

SEQ ID NO: 12271 - DNA, 15 bp, Homo sapiens
ctcaaaatgatcagc

SEQ ID NO: 12272 - DNA, 15 bp, Homo sapiens
actcaaaatgatcag

SEQ ID NO: 12273 - DNA, 15 bp, Homo sapiens
aactcaaaatgatca

SEQ ID NO: 12274 - DNA, 15 bp, Homo sapiens
aaactcaaaatgatc

SEQ ID NO: 12275 - DNA, 15 bp, Homo sapiens
caaactcaaaatgat

SEQ ID NO: 12276 - DNA, 15 bp, Homo sapiens
ccaaactcaaaatga

SEQ ID NO: 12277 - DNA, 15 bp, Homo sapiens
gccaaactcaaaatg

SEQ ID NO: 12278 - DNA, 15 bp, Homo sapiens
ggccaaactcaaaat

SEQ ID NO: 12279 - DNA, 15 bp, Homo sapiens
tggccaaactcaaaa

SEQ ID NO: 12280 - DNA, 15 bp, Homo sapiens
ctggccaaactcaaa

SEQ ID NO: 12281 - DNA, 15 bp, Homo sapiens
actggccaaactcaa

SEQ ID NO: 12282 - DNA, 15 bp, Homo sapiens
gactggccaaactca

SEQ ID NO: 12283 - DNA, 15 bp, Homo sapiens
agactggccaaactc

SEQ ID NO: 12284 - DNA, 15 bp, Homo sapiens
tagactggccaaact

SEQ ID NO: 12285 - DNA, 15 bp, Homo sapiens
atagactggccaaac

SEQ ID NO: 12286 - DNA, 15 bp, Homo sapiens
tatagactggccaaa

SEQ ID NO: 12287 - DNA, 15 bp, Homo sapiens
atatagactggccaa

SEQ ID NO: 12288 - DNA, 15 bp, Homo sapiens
aatatagactggcca

SEQ ID NO: 12289 - DNA, 15 bp, Homo sapiens
taatatagactggcc

SEQ ID NO: 12290 - DNA, 15 bp, Homo sapiens
ataatatagactggc

SEQ ID NO: 12291 - DNA, 15 bp, Homo sapiens
gataatatagactgg

SEQ ID NO: 12292 - DNA, 15 bp, Homo sapiens
tgataatatagactg

SEQ ID NO: 12293 - DNA, 15 bp, Homo sapiens
atgataatatagact

SEQ ID NO: 12294 - DNA, 15 bp, Homo sapiens
catgataatatagac

SEQ ID NO: 12295 - DNA, 15 bp, Homo sapiens
acatgataatataga

SEQ ID NO: 12296 - DNA, 15 bp, Homo sapiens
cacatgataatatag

SEQ ID NO: 12297 - DNA, 15 bp, Homo sapiens
gcacatgataatata

SEQ ID NO: 12298 - DNA, 15 bp, Homo sapiens
agcacatgataatat

SEQ ID NO: 12299 - DNA, 15 bp, Homo sapiens
tagcacatgataata

SEQ ID NO: 12300 - DNA, 15 bp, Homo sapiens
ttagcacatgataat

SEQ ID NO: 12301 - DNA, 15 bp, Homo sapiens
attagcacatgataa

SEQ ID NO: 12302 - DNA, 15 bp, Homo sapiens
cattagcacatgata

SEQ ID NO: 12303 - DNA, 15 bp, Homo sapiens
tcattagcacatgat

SEQ ID NO: 12304 - DNA, 15 bp, Homo sapiens
atcattagcacatga

SEQ ID NO: 12305 - DNA, 15 bp, Homo sapiens
aatcattagcacatg

SEQ ID NO: 12306 - DNA, 15 bp, Homo sapiens
caatcattagcacat

SEQ ID NO: 12307 - DNA, 15 bp, Homo sapiens
tcaatcattagcaca

SEQ ID NO: 12308 - DNA, 15 bp, Homo sapiens
ttcaatcattagcac

SEQ ID NO: 12309 - DNA, 15 bp, Homo sapiens
attcaatcattagca

SEQ ID NO: 12310 - DNA, 15 bp, Homo sapiens
aattcaatcattagc

SEQ ID NO: 12311 - DNA, 15 bp, Homo sapiens
gaattcaatcattag

SEQ ID NO: 12312 - DNA, 15 bp, Homo sapiens
agaattcaatcatta

SEQ ID NO: 12313 - DNA, 15 bp, Homo sapiens
gagaattcaatcatt

SEQ ID NO: 12314 - DNA, 15 bp, Homo sapiens
ggagaattcaatcat

SEQ ID NO: 12315 - DNA, 15 bp, Homo sapiens
tggagaattcaatca

SEQ ID NO: 12316 - DNA, 15 bp, Homo sapiens
gtggagaattcaatc

SEQ ID NO: 12317 - DNA, 15 bp, Homo sapiens
ggtggagaattcaat

SEQ ID NO: 12318 - DNA, 15 bp, Homo sapiens
gggtggagaattcaa

SEQ ID NO: 12319 - DNA, 15 bp, Homo sapiens
tgggtggagaattca

SEQ ID NO: 12320 - DNA, 15 bp, Homo sapiens
atgggtggagaattc

SEQ ID NO: 12321 - DNA, 15 bp, Homo sapiens
aatgggtggagaatt

SEQ ID NO: 12322 - DNA, 15 bp, Homo sapiens
aaatgggtggagaat

SEQ ID NO: 12323 - DNA, 15 bp, Homo sapiens
aaaatgggtggagaa

SEQ ID NO: 12324 - DNA, 15 bp, Homo sapiens
aaaaatgggtggaga

SEQ ID NO: 12325 - DNA, 15 bp, Homo sapiens
gaaaaatgggtggag

SEQ ID NO: 12326 - DNA, 15 bp, Homo sapiens
agaaaaatgggtgga

SEQ ID NO: 12327 - DNA, 15 bp, Homo sapiens
tagaaaaatgggtgg

SEQ ID NO: 12328 - DNA, 15 bp, Homo sapiens
gtagaaaaatgggtg

SEQ ID NO: 12329 - DNA, 15 bp, Homo sapiens
agtagaaaaatgggt

SEQ ID NO: 12330 - DNA, 15 bp, Homo sapiens
aagtagaaaaatggg

SEQ ID NO: 12331 - DNA, 15 bp, Homo sapiens
caagtagaaaaatgg

SEQ ID NO: 12332 - DNA, 15 bp, Homo sapiens
acaagtagaaaaatg

SEQ ID NO: 12333 - DNA, 15 bp, Homo sapiens
tacaagtagaaaaat

SEQ ID NO: 12334 - DNA, 15 bp, Homo sapiens
atacaagtagaaaaa

SEQ ID NO: 12335 - DNA, 15 bp, Homo sapiens
catacaagtagaaaa

SEQ ID NO: 12336 - DNA, 15 bp, Homo sapiens
tcatacaagtagaaa

SEQ ID NO: 12337 - DNA, 15 bp, Homo sapiens
gtcatacaagtagaa

SEQ ID NO: 12338 - DNA, 15 bp, Homo sapiens
ggtcatacaagtaga

SEQ ID NO: 12339 - DNA, 15 bp, Homo sapiens
aggtcatacaagtag

SEQ ID NO: 12340 - DNA, 15 bp, Homo sapiens
aaggtcatacaagta

SEQ ID NO: 12341 - DNA, 15 bp, Homo sapiens
taaggtcatacaagt

SEQ ID NO: 12342 - DNA, 15 bp, Homo sapiens
ttaaggtcatacaag

SEQ ID NO: 12343 - DNA, 15 bp, Homo sapiens
attaaggtcatacaa

SEQ ID NO: 12344 - DNA, 15 bp, Homo sapiens
aattaaggtcataca

SEQ ID NO: 12345 - DNA, 15 bp, Homo sapiens
aaattaaggtcatac

SEQ ID NO: 12346 - DNA, 15 bp, Homo sapiens
caaattaaggtcata

SEQ ID NO: 12347 - DNA, 15 bp, Homo sapiens
tcaaattaaggtcat

SEQ ID NO: 12348 - DNA, 15 bp, Homo sapiens
atcaaattaaggtca

SEQ ID NO: 12349 - DNA, 15 bp, Homo sapiens
catcaaattaaggtc

SEQ ID NO: 12350 - DNA, 15 bp, Homo sapiens
ccatcaaattaaggt

SEQ ID NO: 12351 - DNA, 15 bp, Homo sapiens
gccatcaaattaagg

SEQ ID NO: 12352 - DNA, 15 bp, Homo sapiens
tgccatcaaattaag

SEQ ID NO: 12353 - DNA, 15 bp, Homo sapiens
gtgccatcaaattaa

SEQ ID NO: 12354 - DNA, 15 bp, Homo sapiens
ggtgccatcaaatta

SEQ ID NO: 12355 - DNA, 15 bp, Homo sapiens
aggtgccatcaaatt

SEQ ID NO: 12356 - DNA, 15 bp, Homo sapiens
caggtgccatcaaat

SEQ ID NO: 12357 - DNA, 15 bp, Homo sapiens
acaggtgccatcaaa

SEQ ID NO: 12358 - DNA, 15 bp, Homo sapiens
aacaggtgccatcaa

SEQ ID NO: 12359 - DNA, 15 bp, Homo sapiens
gaacaggtgccatca

SEQ ID NO: 12360 - DNA, 15 bp, Homo sapiens
ggaacaggtgccatc

SEQ ID NO: 12361 - DNA, 15 bp, Homo sapiens
tggaacaggtgccat

SEQ ID NO: 12362 - DNA, 15 bp, Homo sapiens
atggaacaggtgcca

SEQ ID NO: 12363 - DNA, 15 bp, Homo sapiens
gatggaacaggtgcc

SEQ ID NO: 12364 - DNA, 15 bp, Homo sapiens
ggatggaacaggtgc

SEQ ID NO: 12365 - DNA, 15 bp, Homo sapiens
aggatggaacaggtg

SEQ ID NO: 12366 - DNA, 15 bp, Homo sapiens
gaggatggaacaggt

SEQ ID NO: 12367 - DNA, 15 bp, Homo sapiens
tgaggatggaacagg

SEQ ID NO: 12368 - DNA, 15 bp, Homo sapiens
atgaggatggaacag

SEQ ID NO: 12369 - DNA, 15 bp, Homo sapiens
catgaggatggaaca

SEQ ID NO: 12370 - DNA, 15 bp, Homo sapiens
tcatgaggatggaac

SEQ ID NO: 12371 - DNA, 15 bp, Homo sapiens
ctcatgaggatggaa

SEQ ID NO: 12372 - DNA, 15 bp, Homo sapiens
actcatgaggatgga

SEQ ID NO: 12373 - DNA, 15 bp, Homo sapiens
aactcatgaggatgg

SEQ ID NO: 12374 - DNA, 15 bp, Homo sapiens
aaactcatgaggatg

SEQ ID NO: 12375 - DNA, 15 bp, Homo sapiens
caaactcatgaggat

SEQ ID NO: 12376 - DNA, 15 bp, Homo sapiens
gcaaactcatgagga

SEQ ID NO: 12377 - DNA, 15 bp, Homo sapiens
agcaaactcatgagg

SEQ ID NO: 12378 - DNA, 15 bp, Homo sapiens
tagcaaactcatgag

SEQ ID NO: 12379 - DNA, 15 bp, Homo sapiens
gtagcaaactcatga

SEQ ID NO: 12380 - DNA, 15 bp, Homo sapiens
tgtagcaaactcatg

SEQ ID NO: 12381 - DNA, 15 bp, Homo sapiens
ttgtagcaaactcat

SEQ ID NO: 12382 - DNA, 15 bp, Homo sapiens
attgtagcaaactca

SEQ ID NO: 12383 - DNA, 15 bp, Homo sapiens
aattgtagcaaactc

SEQ ID NO: 12384 - DNA, 15 bp, Homo sapiens
taattgtagcaaact

SEQ ID NO: 12385 - DNA, 15 bp, Homo sapiens
ataattgtagcaaac

SEQ ID NO: 12386 - DNA, 15 bp, Homo sapiens
tataattgtagcaaa

SEQ ID NO: 12387 - DNA, 15 bp, Homo sapiens
gtataattgtagcaa

SEQ ID NO: 12388 - DNA, 15 bp, Homo sapiens
agtataattgtagca

SEQ ID NO: 12389 - DNA, 15 bp, Homo sapiens
cagtataattgtagc

SEQ ID NO: 12390 - DNA, 15 bp, Homo sapiens
ccagtataattgtag

SEQ ID NO: 12391 - DNA, 15 bp, Homo sapiens
accagtataattgta

SEQ ID NO: 12392 - DNA, 15 bp, Homo sapiens
caccagtataattgt

SEQ ID NO: 12393 - DNA, 15 bp, Homo sapiens
gcaccagtataattg

SEQ ID NO: 12394 - DNA, 15 bp, Homo sapiens
ggcaccagtataatt

SEQ ID NO: 12395 - DNA, 15 bp, Homo sapiens
tggcaccagtataat

SEQ ID NO: 12396 - DNA, 15 bp, Homo sapiens
ttggcaccagtataa

SEQ ID NO: 12397 - DNA, 15 bp, Homo sapiens
gttggcaccagtata

SEQ ID NO: 12398 - DNA, 15 bp, Homo sapiens
tgttggcaccagtat

SEQ ID NO: 12399 - DNA, 15 bp, Homo sapiens
gtgttggcaccagta

SEQ ID NO: 12400 - DNA, 15 bp, Homo sapiens
tgtgttggcaccagt

SEQ ID NO: 12401 - DNA, 15 bp, Homo sapiens
ttgtgttggcaccag

SEQ ID NO: 12402 - DNA, 15 bp, Homo sapiens
attgtgttggcacca

SEQ ID NO: 12403 - DNA, 15 bp, Homo sapiens
gattgtgttggcacc

SEQ ID NO: 12404 - DNA, 15 bp, Homo sapiens
tgattgtgttggcac

SEQ ID NO: 12405 - DNA, 15 bp, Homo sapiens
atgattgtgttggca

SEQ ID NO: 12406 - DNA, 15 bp, Homo sapiens
tatgattgtgttggc

SEQ ID NO: 12407 - DNA, 15 bp, Homo sapiens
ttatgattgtgttgg

SEQ ID NO: 12408 - DNA, 15 bp, Homo sapiens
tttatgattgtgttg

SEQ ID NO: 12409 - DNA, 15 bp, Homo sapiens
gtttatgattgtgtt

SEQ ID NO: 12410 - DNA, 15 bp, Homo sapiens
tgtttatgattgtgt

SEQ ID NO: 12411 - DNA, 15 bp, Homo sapiens
gtgtttatgattgtg

SEQ ID NO: 12412 - DNA, 15 bp, Homo sapiens
tgtgtttatgattgt

SEQ ID NO: 12413 - DNA, 15 bp, Homo sapiens
ttgtgtttatgattg

SEQ ID NO: 12414 - DNA, 15 bp, Homo sapiens
tttgtgtttatgatt

SEQ ID NO: 12415 - DNA, 15 bp, Homo sapiens
atttgtgtttatgat

SEQ ID NO: 12416 - DNA, 15 bp, Homo sapiens
tatttgtgtttatga

SEQ ID NO: 12417 - DNA, 15 bp, Homo sapiens
atatttgtgtttatg

SEQ ID NO: 12418 - DNA, 15 bp, Homo sapiens
tatatttgtgtttat

SEQ ID NO: 12419 - DNA, 15 bp, Homo sapiens
ttatatttgtgttta

SEQ ID NO: 12420 - DNA, 15 bp, Homo sapiens
tttatatttgtgttt

SEQ ID NO: 12421 - DNA, 15 bp, Homo sapiens
gtttatatttgtgtt

SEQ ID NO: 12422 - DNA, 15 bp, Homo sapiens
agtttatatttgtgt

SEQ ID NO: 12423 - DNA, 15 bp, Homo sapiens
aagtttatatttgtg

SEQ ID NO: 12424 - DNA, 15 bp, Homo sapiens
caagtttatatttgt

SEQ ID NO: 12425 - DNA, 15 bp, Homo sapiens
ccaagtttatatttg

SEQ ID NO: 12426 - DNA, 15 bp, Homo sapiens
cccaagtttatattt

SEQ ID NO: 12427 - DNA, 15 bp, Homo sapiens
gcccaagtttatatt

SEQ ID NO: 12428 - DNA, 15 bp, Homo sapiens
agcccaagtttatat

SEQ ID NO: 12429 - DNA, 15 bp, Homo sapiens
aagcccaagtttata

SEQ ID NO: 12430 - DNA, 15 bp, Homo sapiens
aaagcccaagtttat

SEQ ID NO: 12431 - DNA, 15 bp, Homo sapiens
caaagcccaagttta

SEQ ID NO: 12432 - DNA, 15 bp, Homo sapiens
tcaaagcccaagttt

SEQ ID NO: 12433 - DNA, 15 bp, Homo sapiens
ttcaaagcccaagtt

SEQ ID NO: 12434 - DNA, 15 bp, Homo sapiens
tttcaaagcccaagt

SEQ ID NO: 12435 - DNA, 15 bp, Homo sapiens
atttcaaagcccaag

SEQ ID NO: 12436 - DNA, 15 bp, Homo sapiens
gatttcaaagcccaa

SEQ ID NO: 12437 - DNA, 15 bp, Homo sapiens
agatttcaaagccca

SEQ ID NO: 12438 - DNA, 15 bp, Homo sapiens
aagatttcaaagccc

SEQ ID NO: 12439 - DNA, 15 bp, Homo sapiens
caagatttcaaagcc

SEQ ID NO: 12440 - DNA, 15 bp, Homo sapiens
acaagatttcaaagc

SEQ ID NO: 12441 - DNA, 15 bp, Homo sapiens
cacaagatttcaaag

SEQ ID NO: 12442 - DNA, 15 bp, Homo sapiens
gcacaagatttcaaa

SEQ ID NO: 12443 - DNA, 15 bp, Homo sapiens
ggcacaagatttcaa

SEQ ID NO: 12444 - DNA, 15 bp, Homo sapiens
tggcacaagatttca

SEQ ID NO: 12445 - DNA, 15 bp, Homo sapiens
ctggcacaagatttc

SEQ ID NO: 12446 - DNA, 15 bp, Homo sapiens
tctggcacaagattt

SEQ ID NO: 12447 - DNA, 15 bp, Homo sapiens
ttctggcacaagatt

SEQ ID NO: 12448 - DNA, 15 bp, Homo sapiens
gttctggcacaagat

SEQ ID NO: 12449 - DNA, 15 bp, Homo sapiens
agttctggcacaaga

SEQ ID NO: 12450 - DNA, 15 bp, Homo sapiens
aagttctggcacaag

SEQ ID NO: 12451 - DNA, 15 bp, Homo sapiens
caagttctggcacaa

SEQ ID NO: 12452 - DNA, 15 bp, Homo sapiens
ccaagttctggcaca

SEQ ID NO: 12453 - DNA, 15 bp, Homo sapiens
gccaagttctggcac

SEQ ID NO: 12454 - DNA, 15 bp, Homo sapiens
agccaagttctggca

SEQ ID NO: 12455 - DNA, 15 bp, Homo sapiens
aagccaagttctggc

SEQ ID NO: 12456 - DNA, 15 bp, Homo sapiens
aaagccaagttctgg

SEQ ID NO: 12457 - DNA, 15 bp, Homo sapiens
taaagccaagttctg

SEQ ID NO: 12458 - DNA, 15 bp, Homo sapiens
ttaaagccaagttct

SEQ ID NO: 12459 - DNA, 15 bp, Homo sapiens
tttaaagccaagttc

SEQ ID NO: 12460 - DNA, 15 bp, Homo sapiens
ctttaaagccaagtt

SEQ ID NO: 12461 - DNA, 15 bp, Homo sapiens
actttaaagccaagt

SEQ ID NO: 12462 - DNA, 15 bp, Homo sapiens
tactttaaagccaag

SEQ ID NO: 12463 - DNA, 15 bp, Homo sapiens
ttactttaaagccaa

SEQ ID NO: 12464 - DNA, 15 bp, Homo sapiens
cttactttaaagcca

SEQ ID NO: 12465 - DNA, 15 bp, Homo sapiens
gcttactttaaagcc

SEQ ID NO: 12466 - DNA, 15 bp, Homo sapiens
tgcttactttaaagc

SEQ ID NO: 12467 - DNA, 15 bp, Homo sapiens
atgcttactttaaag

SEQ ID NO: 12468 - DNA, 15 bp, Homo sapiens
aatgcttactttaaa

SEQ ID NO: 12469 - DNA, 15 bp, Homo sapiens
aaatgcttactttaa

SEQ ID NO: 12470 - DNA, 15 bp, Homo sapiens
taaatgcttacttta

SEQ ID NO: 12471 - DNA, 15 bp, Homo sapiens
ttaaatgcttacttt

SEQ ID NO: 12472 - DNA, 15 bp, Homo sapiens
tttaaatgcttactt

SEQ ID NO: 12473 - DNA, 15 bp, Homo sapiens
ttttaaatgcttact

SEQ ID NO: 12474 - DNA, 15 bp, Homo sapiens
tttttaaatgcttac

SEQ ID NO: 12475 - DNA, 15 bp, Homo sapiens
ttttttaaatgctta

SEQ ID NO: 12476 - DNA, 15 bp, Homo sapiens
attttttaaatgctt

SEQ ID NO: 12477 - DNA, 15 bp, Homo sapiens
gattttttaaatgct

SEQ ID NO: 12478 - DNA, 15 bp, Homo sapiens
ggattttttaaatgc

SEQ ID NO: 12479 - DNA, 15 bp, Homo sapiens
tggattttttaaatg

SEQ ID NO: 12480 - DNA, 15 bp, Homo sapiens
atggattttttaaat

SEQ ID NO: 12481 - DNA, 15 bp, Homo sapiens
tatggattttttaaa

SEQ ID NO: 12482 - DNA, 15 bp, Homo sapiens
atatggattttttaa

SEQ ID NO: 12483 - DNA, 15 bp, Homo sapiens
catatggatttttta

SEQ ID NO: 12484 - DNA, 15 bp, Homo sapiens
acatatggatttttt

SEQ ID NO: 12485 - DNA, 15 bp, Homo sapiens
cacatatggattttt

SEQ ID NO: 12486 - DNA, 15 bp, Homo sapiens
acacatatggatttt

SEQ ID NO: 12487 - DNA, 15 bp, Homo sapiens
aacacatatggattt

SEQ ID NO: 12488 - DNA, 15 bp, Homo sapiens
aaacacatatggatt

SEQ ID NO: 12489 - DNA, 15 bp, Homo sapiens
taaacacatatggat

SEQ ID NO: 12490 - DNA, 15 bp, Homo sapiens
ataaacacatatgga

SEQ ID NO: 12491 - DNA, 15 bp, Homo sapiens
aataaacacatatgg

SEQ ID NO: 12492 - DNA, 15 bp, Homo sapiens
taataaacacatatg

SEQ ID NO: 12493 - DNA, 15 bp, Homo sapiens
ctaataaacacatat

SEQ ID NO: 12494 - DNA, 15 bp, Homo sapiens
tctaataaacacata

SEQ ID NO: 12495 - DNA, 15 bp, Homo sapiens
gtctaataaacacat

SEQ ID NO: 12496 - DNA, 15 bp, Homo sapiens
agtctaataaacaca

SEQ ID NO: 12497 - DNA, 15 bp, Homo sapiens
aagtctaataaacac

SEQ ID NO: 12498 - DNA, 15 bp, Homo sapiens
aaagtctaataaaca

SEQ ID NO: 12499 - DNA, 15 bp, Homo sapiens
caaagtctaataaac

SEQ ID NO: 12500 - DNA, 15 bp, Homo sapiens
acaaagtctaataaa

SEQ ID NO: 12501 - DNA, 15 bp, Homo sapiens
aacaaagtctaataa

SEQ ID NO: 12502 - DNA, 15 bp, Homo sapiens
aaacaaagtctaata

SEQ ID NO: 12503 - DNA, 15 bp, Homo sapiens
taaacaaagtctaat

SEQ ID NO: 12504 - DNA, 15 bp, Homo sapiens
ctaaacaaagtctaa

SEQ ID NO: 12505 - DNA, 15 bp, Homo sapiens
tctaaacaaagtcta

SEQ ID NO: 12506 - DNA, 15 bp, Homo sapiens
atctaaacaaagtct

SEQ ID NO: 12507 - DNA, 15 bp, Homo sapiens
catctaaacaaagtc

SEQ ID NO: 12508 - DNA, 15 bp, Homo sapiens
tcatctaaacaaagt

SEQ ID NO: 12509 - DNA, 15 bp, Homo sapiens
gtcatctaaacaaag

SEQ ID NO: 12510 - DNA, 15 bp, Homo sapiens
agtcatctaaacaaa

SEQ ID NO: 12511 - DNA, 15 bp, Homo sapiens
cagtcatctaaacaa

SEQ ID NO: 12512 - DNA, 15 bp, Homo sapiens
acagtcatctaaaca

SEQ ID NO: 12513 - DNA, 15 bp, Homo sapiens
aacagtcatctaaac

SEQ ID NO: 12514 - DNA, 15 bp, Homo sapiens
caacagtcatctaaa

SEQ ID NO: 12515 - DNA, 15 bp, Homo sapiens
tcaacagtcatctaa

SEQ ID NO: 12516 - DNA, 15 bp, Homo sapiens
ttcaacagtcatcta

SEQ ID NO: 12517 - DNA, 15 bp, Homo sapiens
tttcaacagtcatct

SEQ ID NO: 12518 - DNA, 15 bp, Homo sapiens
atttcaacagtcatc

SEQ ID NO: 12519 - DNA, 15 bp, Homo sapiens
catttcaacagtcat

SEQ ID NO: 12520 - DNA, 15 bp, Homo sapiens
tcatttcaacagtca

SEQ ID NO: 12521 - DNA, 15 bp, Homo sapiens
ttcatttcaacagtc

SEQ ID NO: 12522 - DNA, 15 bp, Homo sapiens
tttcatttcaacagt

SEQ ID NO: 12523 - DNA, 15 bp, Homo sapiens
ttttcatttcaacag

SEQ ID NO: 12524 - DNA, 15 bp, Homo sapiens
gttttcatttcaaca

SEQ ID NO: 12525 - DNA, 15 bp, Homo sapiens
tgttttcatttcaac

SEQ ID NO: 12526 - DNA, 15 bp, Homo sapiens
ttgttttcatttcaa

SEQ ID NO: 12527 - DNA, 15 bp, Homo sapiens
tttgttttcatttca

SEQ ID NO: 12528 - DNA, 15 bp, Homo sapiens
ctttgttttcatttc

SEQ ID NO: 12529 - DNA, 15 bp, Homo sapiens
actttgttttcattt

SEQ ID NO: 12530 - DNA, 15 bp, Homo sapiens
cactttgttttcatt

SEQ ID NO: 12531 - DNA, 15 bp, Homo sapiens
acactttgttttcat

SEQ ID NO: 12532 - DNA, 15 bp, Homo sapiens
aacactttgttttca

SEQ ID NO: 12533 - DNA, 15 bp, Homo sapiens
aaacactttgttttc

SEQ ID NO: 12534 - DNA, 15 bp, Homo sapiens
taaacactttgtttt

SEQ ID NO: 12535 - DNA, 15 bp, Homo sapiens
ttaaacactttgttt

SEQ ID NO: 12536 - DNA, 15 bp, Homo sapiens
tttaaacactttgtt

SEQ ID NO: 12537 - DNA, 15 bp, Homo sapiens
ttttaaacactttgt

SEQ ID NO: 12538 - DNA, 15 bp, Homo sapiens
attttaaacactttg

SEQ ID NO: 12539 - DNA, 15 bp, Homo sapiens
gattttaaacacttt

SEQ ID NO: 12540 - DNA, 15 bp, Homo sapiens
ggattttaaacactt

SEQ ID NO: 12541 - DNA, 15 bp, Homo sapiens
aggattttaaacact

SEQ ID NO: 12542 - DNA, 15 bp, Homo sapiens
gaggattttaaacac

SEQ ID NO: 12543 - DNA, 15 bp, Homo sapiens
agaggattttaaaca

SEQ ID NO: 12544 - DNA, 15 bp, Homo sapiens
aagaggattttaaac

SEQ ID NO: 12545 - DNA, 15 bp, Homo sapiens
taagaggattttaaa

SEQ ID NO: 12546 - DNA, 15 bp, Homo sapiens
ctaagaggattttaa

SEQ ID NO: 12547 - DNA, 15 bp, Homo sapiens
tctaagaggatttta

SEQ ID NO: 12548 - DNA, 15 bp, Homo sapiens
ctctaagaggatttt

SEQ ID NO: 12549 - DNA, 15 bp, Homo sapiens
tctctaagaggattt

SEQ ID NO: 12550 - DNA, 15 bp, Homo sapiens
ttctctaagaggatt

SEQ ID NO: 12551 - DNA, 15 bp, Homo sapiens
gttctctaagaggat

SEQ ID NO: 12552 - DNA, 15 bp, Homo sapiens
agttctctaagagga

SEQ ID NO: 12553 - DNA, 15 bp, Homo sapiens
aagttctctaagagg

SEQ ID NO: 12554 - DNA, 15 bp, Homo sapiens
taagttctctaagag

SEQ ID NO: 12555 - DNA, 15 bp, Homo sapiens
ttaagttctctaaga

SEQ ID NO: 12556 - DNA, 15 bp, Homo sapiens
tttaagttctctaag

SEQ ID NO: 12557 - DNA, 15 bp, Homo sapiens
atttaagttctctaa

SEQ ID NO: 12558 - DNA, 15 bp, Homo sapiens
tatttaagttctcta

SEQ ID NO: 12559 - DNA, 15 bp, Homo sapiens
atatttaagttctct

SEQ ID NO: 12560 - DNA, 15 bp, Homo sapiens
tatatttaagttctc

SEQ ID NO: 12561 - DNA, 15 bp, Homo sapiens
ttatatttaagttct

SEQ ID NO: 12562 - DNA, 15 bp, Homo sapiens
attatatttaagttc

SEQ ID NO: 12563 - DNA, 15 bp, Homo sapiens
gattatatttaagtt

SEQ ID NO: 12564 - DNA, 15 bp, Homo sapiens
ggattatatttaagt

SEQ ID NO: 12565 - DNA, 15 bp, Homo sapiens
gggattatatttaag

SEQ ID NO: 12566 - DNA, 15 bp, Homo sapiens
agggattatatttaa

SEQ ID NO: 12567 - DNA, 15 bp, Homo sapiens
gagggattatattta

SEQ ID NO: 12568 - DNA, 15 bp, Homo sapiens
tgagggattatattt

SEQ ID NO: 12569 - DNA, 15 bp, Homo sapiens
ctgagggattatatt

SEQ ID NO: 12570 - DNA, 15 bp, Homo sapiens
gctgagggattatat

SEQ ID NO: 12571 - DNA, 15 bp, Homo sapiens
tgctgagggattata

SEQ ID NO: 12572 - DNA, 15 bp, Homo sapiens
ttgctgagggattat

SEQ ID NO: 12573 - DNA, 15 bp, Homo sapiens
attgctgagggatta

SEQ ID NO: 12574 - DNA, 15 bp, Homo sapiens
tattgctgagggatt

SEQ ID NO: 12575 - DNA, 15 bp, Homo sapiens
atattgctgagggat

SEQ ID NO: 12576 - DNA, 15 bp, Homo sapiens
catattgctgaggga

SEQ ID NO: 12577 - DNA, 15 bp, Homo sapiens
acatattgctgaggg

SEQ ID NO: 12578 - DNA, 15 bp, Homo sapiens
tacatattgctgagg

SEQ ID NO: 12579 - DNA, 15 bp, Homo sapiens
atacatattgctgag

SEQ ID NO: 12580 - DNA, 15 bp, Homo sapiens
tatacatattgctga

SEQ ID NO: 12581 - DNA, 15 bp, Homo sapiens
gtatacatattgctg

SEQ ID NO: 12582 - DNA, 15 bp, Homo sapiens
tgtatacatattgct

SEQ ID NO: 12583 - DNA, 15 bp, Homo sapiens
ctgtatacatattgc

SEQ ID NO: 12584 - DNA, 15 bp, Homo sapiens
tctgtatacatattg

SEQ ID NO: 12585 - DNA, 15 bp, Homo sapiens
atctgtatacatatt

SEQ ID NO: 12586 - DNA, 15 bp, Homo sapiens
gatctgtatacatat

SEQ ID NO: 12587 - DNA, 15 bp, Homo sapiens
agatctgtatacata

SEQ ID NO: 12588 - DNA, 15 bp, Homo sapiens
aagatctgtatacat

SEQ ID NO: 12589 - DNA, 15 bp, Homo sapiens
gaagatctgtataca

SEQ ID NO: 12590 - DNA, 15 bp, Homo sapiens
ggaagatctgtatac

SEQ ID NO: 12591 - DNA, 15 bp, Homo sapiens
aggaagatctgtata

SEQ ID NO: 12592 - DNA, 15 bp, Homo sapiens
aaggaagatctgtat

SEQ ID NO: 12593 - DNA, 15 bp, Homo sapiens
aaaggaagatctgta

SEQ ID NO: 12594 - DNA, 15 bp, Homo sapiens
caaaggaagatctgt

SEQ ID NO: 12595 - DNA, 15 bp, Homo sapiens
tcaaaggaagatctg

SEQ ID NO: 12596 - DNA, 15 bp, Homo sapiens
ctcaaaggaagatct

SEQ ID NO: 12597 - DNA, 15 bp, Homo sapiens
tctcaaaggaagatc

SEQ ID NO: 12598 - DNA, 15 bp, Homo sapiens
ttctcaaaggaagat

SEQ ID NO: 12599 - DNA, 15 bp, Homo sapiens
tttctcaaaggaaga

SEQ ID NO: 12600 - DNA, 15 bp, Homo sapiens
ttttctcaaaggaag

SEQ ID NO: 12601 - DNA, 15 bp, Homo sapiens
tttttctcaaaggaa

SEQ ID NO: 12602 - DNA, 15 bp, Homo sapiens
gtttttctcaaagga

SEQ ID NO: 12603 - DNA, 15 bp, Homo sapiens
agtttttctcaaagg

SEQ ID NO: 12604 - DNA, 15 bp, Homo sapiens
cagtttttctcaaag

SEQ ID NO: 12605 - DNA, 15 bp, Homo sapiens
tcagtttttctcaaa

SEQ ID NO: 12606 - DNA, 15 bp, Homo sapiens
atcagtttttctcaa

SEQ ID NO: 12607 - DNA, 15 bp, Homo sapiens
aatcagtttttctca

SEQ ID NO: 12608 - DNA, 15 bp, Homo sapiens
caatcagtttttctc

SEQ ID NO: 12609 - DNA, 15 bp, Homo sapiens
acaatcagtttttct

SEQ ID NO: 12610 - DNA, 15 bp, Homo sapiens
cacaatcagtttttc

SEQ ID NO: 12611 - DNA, 15 bp, Homo sapiens
acacaatcagttttt

SEQ ID NO: 12612 - DNA, 15 bp, Homo sapiens
aacacaatcagtttt

SEQ ID NO: 12613 - DNA, 15 bp, Homo sapiens
gaacacaatcagttt

SEQ ID NO: 12614 - DNA, 15 bp, Homo sapiens
tgaacacaatcagtt

SEQ ID NO: 12615 - DNA, 15 bp, Homo sapiens
ctgaacacaatcagt

SEQ ID NO: 12616 - DNA, 15 bp, Homo sapiens
gctgaacacaatcag

SEQ ID NO: 12617 - DNA, 15 bp, Homo sapiens
ggctgaacacaatca

SEQ ID NO: 12618 - DNA, 15 bp, Homo sapiens
aggctgaacacaatc

SEQ ID NO: 12619 - DNA, 15 bp, Homo sapiens
gaggctgaacacaat

SEQ ID NO: 12620 - DNA, 15 bp, Homo sapiens
agaggctgaacacaa

SEQ ID NO: 12621 - DNA, 15 bp, Homo sapiens
gagaggctgaacaca

SEQ ID NO: 12622 - DNA, 15 bp, Homo sapiens
tgagaggctgaacac

SEQ ID NO: 12623 - DNA, 15 bp, Homo sapiens
atgagaggctgaaca

SEQ ID NO: 12624 - DNA, 15 bp, Homo sapiens
catgagaggctgaac

SEQ ID NO: 12625 - DNA, 15 bp, Homo sapiens
acatgagaggctgaa

SEQ ID NO: 12626 - DNA, 15 bp, Homo sapiens
aacatgagaggctga

SEQ ID NO: 12627 - DNA, 15 bp, Homo sapiens
taacatgagaggctg

SEQ ID NO: 12628 - DNA, 15 bp, Homo sapiens
gtaacatgagaggct

SEQ ID NO: 12629 - DNA, 15 bp, Homo sapiens
tgtaacatgagaggc

SEQ ID NO: 12630 - DNA, 15 bp, Homo sapiens
ttgtaacatgagagg

SEQ ID NO: 12631 - DNA, 15 bp, Homo sapiens
tttgtaacatgagag

SEQ ID NO: 12632 - DNA, 15 bp, Homo sapiens
atttgtaacatgaga

SEQ ID NO: 12633 - DNA, 15 bp, Homo sapiens
catttgtaacatgag

SEQ ID NO: 12634 - DNA, 15 bp, Homo sapiens
ccatttgtaacatga

SEQ ID NO: 12635 - DNA, 15 bp, Homo sapiens
cccatttgtaacatg

SEQ ID NO: 12636 - DNA, 15 bp, Homo sapiens
ccccatttgtaacat

SEQ ID NO: 12637 - DNA, 15 bp, Homo sapiens
tccccatttgtaaca

SEQ ID NO: 12638 - DNA, 15 bp, Homo sapiens
ttccccatttgtaac

SEQ ID NO: 12639 - DNA, 15 bp, Homo sapiens
gttccccatttgtaa

SEQ ID NO: 12640 - DNA, 15 bp, Homo sapiens
ggttccccatttgta

SEQ ID NO: 12641 - DNA, 15 bp, Homo sapiens
aggttccccatttgt

SEQ ID NO: 12642 - DNA, 15 bp, Homo sapiens
caggttccccatttg

SEQ ID NO: 12643 - DNA, 15 bp, Homo sapiens
tcaggttccccattt

SEQ ID NO: 12644 - DNA, 15 bp, Homo sapiens
ttcaggttccccatt

SEQ ID NO: 12645 - DNA, 15 bp, Homo sapiens
attcaggttccccat

SEQ ID NO: 12646 - DNA, 15 bp, Homo sapiens
aattcaggttcccca

SEQ ID NO: 12647 - DNA, 15 bp, Homo sapiens
gaattcaggttcccc

SEQ ID NO: 12648 - DNA, 15 bp, Homo sapiens
agaattcaggttccc

SEQ ID NO: 12649 - DNA, 15 bp, Homo sapiens
cagaattcaggttcc

SEQ ID NO: 12650 - DNA, 15 bp, Homo sapiens
tcagaattcaggttc

SEQ ID NO: 12651 - DNA, 15 bp, Homo sapiens
ctcagaattcaggtt

SEQ ID NO: 12652 - DNA, 15 bp, Homo sapiens
cctcagaattcaggt

SEQ ID NO: 12653 - DNA, 15 bp, Homo sapiens
acctcagaattcagg

SEQ ID NO: 12654 - DNA, 15 bp, Homo sapiens
gacctcagaattcag

SEQ ID NO: 12655 - DNA, 15 bp, Homo sapiens
agacctcagaattca

SEQ ID NO: 12656 - DNA, 15 bp, Homo sapiens
gagacctcagaattc

SEQ ID NO: 12657 - DNA, 15 bp, Homo sapiens
agagacctcagaatt

SEQ ID NO: 12658 - DNA, 15 bp, Homo sapiens
tagagacctcagaat

SEQ ID NO: 12659 - DNA, 15 bp, Homo sapiens
ctagagacctcagaa

SEQ ID NO: 12660 - DNA, 15 bp, Homo sapiens
actagagacctcaga

SEQ ID NO: 12661 - DNA, 15 bp, Homo sapiens
cactagagacctcag

SEQ ID NO: 12662 - DNA, 15 bp, Homo sapiens
tcactagagacctca

SEQ ID NO: 12663 - DNA, 15 bp, Homo sapiens
ctcactagagacctc

SEQ ID NO: 12664 - DNA, 15 bp, Homo sapiens
tctcactagagacct

SEQ ID NO: 12665 - DNA, 15 bp, Homo sapiens
ctctcactagagacc

SEQ ID NO: 12666 - DNA, 15 bp, Homo sapiens
tctctcactagagac

SEQ ID NO: 12667 - DNA, 15 bp, Homo sapiens
ttctctcactagaga

SEQ ID NO: 12668 - DNA, 15 bp, Homo sapiens
gttctctcactagag

SEQ ID NO: 12669 - DNA, 15 bp, Homo sapiens
tgttctctcactaga

SEQ ID NO: 12670 - DNA, 15 bp, Homo sapiens
ctgttctctcactag

SEQ ID NO: 12671 - DNA, 15 bp, Homo sapiens
cctgttctctcacta

SEQ ID NO: 12672 - DNA, 15 bp, Homo sapiens
ccctgttctctcact

SEQ ID NO: 12673 - DNA, 15 bp, Homo sapiens
tccctgttctctcac

SEQ ID NO: 12674 - DNA, 15 bp, Homo sapiens
gtccctgttctctca

SEQ ID NO: 12675 - DNA, 15 bp, Homo sapiens
agtccctgttctctc

SEQ ID NO: 12676 - DNA, 15 bp, Homo sapiens
cagtccctgttctct

SEQ ID NO: 12677 - DNA, 15 bp, Homo sapiens
ccagtccctgttctc

SEQ ID NO: 12678 - DNA, 15 bp, Homo sapiens
tccagtccctgttct

SEQ ID NO: 12679 - DNA, 15 bp, Homo sapiens
ttccagtccctgttc

SEQ ID NO: 12680 - DNA, 15 bp, Homo sapiens
attccagtccctgtt

SEQ ID NO: 12681 - DNA, 15 bp, Homo sapiens
gattccagtccctgt

SEQ ID NO: 12682 - DNA, 15 bp, Homo sapiens
agattccagtccctg

SEQ ID NO: 12683 - DNA, 15 bp, Homo sapiens
cagattccagtccct

SEQ ID NO: 12684 - DNA, 15 bp, Homo sapiens
acagattccagtccc

SEQ ID NO: 12685 - DNA, 15 bp, Homo sapiens
cacagattccagtcc

SEQ ID NO: 12686 - DNA, 15 bp, Homo sapiens
ccacagattccagtc

SEQ ID NO: 12687 - DNA, 15 bp, Homo sapiens
tccacagattccagt

SEQ ID NO: 12688 - DNA, 15 bp, Homo sapiens
atccacagattccag

SEQ ID NO: 12689 - DNA, 15 bp, Homo sapiens
gatccacagattcca

SEQ ID NO: 12690 - DNA, 15 bp, Homo sapiens
ggatccacagattcc

SEQ ID NO: 12691 - DNA, 15 bp, Homo sapiens
aggatccacagattc

SEQ ID NO: 12692 - DNA, 15 bp, Homo sapiens
taggatccacagatt

SEQ ID NO: 12693 - DNA, 15 bp, Homo sapiens
ataggatccacagat

SEQ ID NO: 12694 - DNA, 15 bp, Homo sapiens
gataggatccacaga

SEQ ID NO: 12695 - DNA, 15 bp, Homo sapiens
agataggatccacag

SEQ ID NO: 12696 - DNA, 15 bp, Homo sapiens
cagataggatccaca

SEQ ID NO: 12697 - DNA, 15 bp, Homo sapiens
acagataggatccac

SEQ ID NO: 12698 - DNA, 15 bp, Homo sapiens
aacagataggatcca

SEQ ID NO: 12699 - DNA, 15 bp, Homo sapiens
aaacagataggatcc

SEQ ID NO: 12700 - DNA, 15 bp, Homo sapiens
aaaacagataggatc

SEQ ID NO: 12701 - DNA, 15 bp, Homo sapiens
taaaacagataggat

SEQ ID NO: 12702 - DNA, 15 bp, Homo sapiens
ttaaaacagatagga

SEQ ID NO: 12703 - DNA, 15 bp, Homo sapiens
attaaaacagatagg

SEQ ID NO: 12704 - DNA, 15 bp, Homo sapiens
tattaaaacagatag

SEQ ID NO: 12705 - DNA, 15 bp, Homo sapiens
ttattaaaacagata

SEQ ID NO: 12706 - DNA, 15 bp, Homo sapiens
attattaaaacagat

SEQ ID NO: 12707 - DNA, 15 bp, Homo sapiens
tattattaaaacaga

SEQ ID NO: 12708 - DNA, 15 bp, Homo sapiens
ttattattaaaacag

SEQ ID NO: 12709 - DNA, 15 bp, Homo sapiens
attattattaaaaca

SEQ ID NO: 12710 - DNA, 15 bp, Homo sapiens
aattattattaaaac

SEQ ID NO: 12711 - DNA, 15 bp, Homo sapiens
caattattattaaaa

SEQ ID NO: 12712 - DNA, 15 bp, Homo sapiens
acaattattattaaa

SEQ ID NO: 12713 - DNA, 15 bp, Homo sapiens
tacaattattattaa

SEQ ID NO: 12714 - DNA, 15 bp, Homo sapiens
ttacaattattatta

SEQ ID NO: 12715 - DNA, 15 bp, Homo sapiens
tttacaattattatt

SEQ ID NO: 12716 - DNA, 15 bp, Homo sapiens
ctttacaattattat

SEQ ID NO: 12717 - DNA, 15 bp, Homo sapiens
actttacaattatta

SEQ ID NO: 12718 - DNA, 15 bp, Homo sapiens
tactttacaattatt

SEQ ID NO: 12719 - DNA, 15 bp, Homo sapiens
atactttacaattat

SEQ ID NO: 12720 - DNA, 15 bp, Homo sapiens
tatactttacaatta

SEQ ID NO: 12721 - DNA, 15 bp, Homo sapiens
ttatactttacaatt

SEQ ID NO: 12722 - DNA, 15 bp, Homo sapiens
attatactttacaat

SEQ ID NO: 12723 - DNA, 15 bp, Homo sapiens
tattatactttacaa

SEQ ID NO: 12724 - DNA, 15 bp, Homo sapiens
ctattatactttaca

SEQ ID NO: 12725 - DNA, 15 bp, Homo sapiens
tctattatactttac

SEQ ID NO: 12726 - DNA, 15 bp, Homo sapiens
atctattatacttta

SEQ ID NO: 12727 - DNA, 15 bp, Homo sapiens
tatctattatacttt

SEQ ID NO: 12728 - DNA, 15 bp, Homo sapiens
ttatctattatactt

SEQ ID NO: 12729 - DNA, 15 bp, Homo sapiens
attatctattatact

SEQ ID NO: 12730 - DNA, 15 bp, Homo sapiens
tattatctattatac

SEQ ID NO: 12731 - DNA, 15 bp, Homo sapiens
atattatctattata

SEQ ID NO: 12732 - DNA, 15 bp, Homo sapiens
aatattatctattat

SEQ ID NO: 12733 - DNA, 15 bp, Homo sapiens
taatattatctatta

SEQ ID NO: 12734 - DNA, 15 bp, Homo sapiens
ataatattatctatt

SEQ ID NO: 12735 - DNA, 15 bp, Homo sapiens
tataatattatctat

SEQ ID NO: 12736 - DNA, 15 bp, Homo sapiens
atataatattatcta

SEQ ID NO: 12737 - DNA, 15 bp, Homo sapiens
aatataatattatct

SEQ ID NO: 12738 - DNA, 15 bp, Homo sapiens
taatataatattatc

SEQ ID NO: 12739 - DNA, 15 bp, Homo sapiens
ttaatataatattat

SEQ ID NO: 12740 - DNA, 15 bp, Homo sapiens
attaatataatatta

SEQ ID NO: 12741 - DNA, 15 bp, Homo sapiens
tattaatataatatt

SEQ ID NO: 12742 - DNA, 15 bp, Homo sapiens
ttattaatataatat

SEQ ID NO: 12743 - DNA, 15 bp, Homo sapiens
tttattaatataata

SEQ ID NO: 12744 - DNA, 15 bp, Homo sapiens
ttttattaatataat

SEQ ID NO: 12745 - DNA, 15 bp, Homo sapiens
attttattaatataa

SEQ ID NO: 12746 - DNA, 15 bp, Homo sapiens
tattttattaatata

SEQ ID NO: 12747 - DNA, 15 bp, Homo sapiens
ttattttattaatat

SEQ ID NO: 12748 - DNA, 15 bp, Homo sapiens
tttattttattaata

SEQ ID NO: 12749 - DNA, 15 bp, Homo sapiens
ttttattttattaat

SEQ ID NO: 12750 - DNA, 15 bp, Homo sapiens
cttttattttattaa

SEQ ID NO: 12751 - DNA, 15 bp, Homo sapiens
gcttttattttatta

SEQ ID NO: 12752 - DNA, 15 bp, Homo sapiens
tgcttttattttatt

SEQ ID NO: 12753 - DNA, 15 bp, Homo sapiens
ttgcttttattttat

SEQ ID NO: 12754 - DNA, 15 bp, Homo sapiens
tttgcttttatttta

SEQ ID NO: 12755 - DNA, 15 bp, Homo sapiens
gtttgcttttatttt

SEQ ID NO: 12756 - DNA, 15 bp, Homo sapiens
tgtttgcttttattt

SEQ ID NO: 12757 - DNA, 15 bp, Homo sapiens
gtgtttgcttttatt

SEQ ID NO: 12758 - DNA, 15 bp, Homo sapiens
agtgtttgcttttat

SEQ ID NO: 12759 - DNA, 15 bp, Homo sapiens
aagtgtttgctttta

SEQ ID NO: 12760 - DNA, 15 bp, Homo sapiens
taagtgtttgctttt

SEQ ID NO: 12761 - DNA, 15 bp, Homo sapiens
ctaagtgtttgcttt

SEQ ID NO: 12762 - DNA, 15 bp, Homo sapiens
tctaagtgtttgctt

SEQ ID NO: 12763 - DNA, 15 bp, Homo sapiens
ttctaagtgtttgct

SEQ ID NO: 12764 - DNA, 15 bp, Homo sapiens
attctaagtgtttgc

SEQ ID NO: 12765 - DNA, 15 bp, Homo sapiens
cattctaagtgtttg

SEQ ID NO: 12766 - DNA, 15 bp, Homo sapiens
tcattctaagtgttt

SEQ ID NO: 12767 - DNA, 15 bp, Homo sapiens
ctcattctaagtgtt

SEQ ID NO: 12768 - DNA, 15 bp, Homo sapiens
gctcattctaagtgt

SEQ ID NO: 12769 - DNA, 15 bp, Homo sapiens
agctcattctaagtg

SEQ ID NO: 12770 - DNA, 15 bp, Homo sapiens
aagctcattctaagt

SEQ ID NO: 12771 - DNA, 15 bp, Homo sapiens
gaagctcattctaag

SEQ ID NO: 12772 - DNA, 15 bp, Homo sapiens
ggaagctcattctaa

SEQ ID NO: 12773 - DNA, 15 bp, Homo sapiens
tggaagctcattcta

SEQ ID NO: 12774 - DNA, 15 bp, Homo sapiens
atggaagctcattct

SEQ ID NO: 12775 - DNA, 15 bp, Homo sapiens
catggaagctcattc

SEQ ID NO: 12776 - DNA, 15 bp, Homo sapiens
acatggaagctcatt

SEQ ID NO: 12777 - DNA, 15 bp, Homo sapiens
cacatggaagctcat

SEQ ID NO: 12778 - DNA, 15 bp, Homo sapiens
acacatggaagctca

SEQ ID NO: 12779 - DNA, 15 bp, Homo sapiens
cacacatggaagctc

SEQ ID NO: 12780 - DNA, 15 bp, Homo sapiens
tcacacatggaagct

SEQ ID NO: 12781 - DNA, 15 bp, Homo sapiens
ctcacacatggaagc

SEQ ID NO: 12782 - DNA, 15 bp, Homo sapiens
cctcacacatggaag

SEQ ID NO: 12783 - DNA, 15 bp, Homo sapiens
gcctcacacatggaa

SEQ ID NO: 12784 - DNA, 15 bp, Homo sapiens
tgcctcacacatgga

SEQ ID NO: 12785 - DNA, 15 bp, Homo sapiens
gtgcctcacacatgg

SEQ ID NO: 12786 - DNA, 15 bp, Homo sapiens
agtgcctcacacatg

SEQ ID NO: 12787 - DNA, 15 bp, Homo sapiens
tagtgcctcacacat

SEQ ID NO: 12788 - DNA, 15 bp, Homo sapiens
ttagtgcctcacaca

SEQ ID NO: 12789 - DNA, 15 bp, Homo sapiens
gttagtgcctcacac

SEQ ID NO: 12790 - DNA, 15 bp, Homo sapiens
agttagtgcctcaca

SEQ ID NO: 12791 - DNA, 15 bp, Homo sapiens
cagttagtgcctcac

SEQ ID NO: 12792 - DNA, 15 bp, Homo sapiens
tcagttagtgcctca

SEQ ID NO: 12793 - DNA, 15 bp, Homo sapiens
atcagttagtgcctc

SEQ ID NO: 12794 - DNA, 15 bp, Homo sapiens
aatcagttagtgcct

SEQ ID NO: 12795 - DNA, 15 bp, Homo sapiens
taatcagttagtgcc

SEQ ID NO: 12796 - DNA, 15 bp, Homo sapiens
ctaatcagttagtgc

SEQ ID NO: 12797 - DNA, 15 bp, Homo sapiens
cctaatcagttagtg

SEQ ID NO: 12798 - DNA, 15 bp, Homo sapiens
gcctaatcagttagt

SEQ ID NO: 12799 - DNA, 15 bp, Homo sapiens
tgcctaatcagttag

SEQ ID NO: 12800 - DNA, 15 bp, Homo sapiens
atgcctaatcagtta

SEQ ID NO: 12801 - DNA, 15 bp, Homo sapiens
aatgcctaatcagtt

SEQ ID NO: 12802 - DNA, 15 bp, Homo sapiens
taatgcctaatcagt

SEQ ID NO: 12803 - DNA, 15 bp, Homo sapiens
ataatgcctaatcag

SEQ ID NO: 12804 - DNA, 15 bp, Homo sapiens
aataatgcctaatca

SEQ ID NO: 12805 - DNA, 15 bp, Homo sapiens
taataatgcctaatc

SEQ ID NO: 12806 - DNA, 15 bp, Homo sapiens
ttaataatgcctaat

SEQ ID NO: 12807 - DNA, 15 bp, Homo sapiens
gttaataatgcctaa

SEQ ID NO: 12808 - DNA, 15 bp, Homo sapiens
agttaataatgccta

SEQ ID NO: 12809 - DNA, 15 bp, Homo sapiens
tagttaataatgcct

SEQ ID NO: 12810 - DNA, 15 bp, Homo sapiens
ctagttaataatgcc

SEQ ID NO: 12811 - DNA, 15 bp, Homo sapiens
tctagttaataatgc

SEQ ID NO: 12812 - DNA, 15 bp, Homo sapiens
atctagttaataatg

SEQ ID NO: 12813 - DNA, 15 bp, Homo sapiens
aatctagttaataat

SEQ ID NO: 12814 - DNA, 15 bp, Homo sapiens
aaatctagttaataa

SEQ ID NO: 12815 - DNA, 15 bp, Homo sapiens
taaatctagttaata

SEQ ID NO: 12816 - DNA, 15 bp, Homo sapiens
ataaatctagttaat

SEQ ID NO: 12817 - DNA, 15 bp, Homo sapiens
aataaatctagttaa

SEQ ID NO: 12818 - DNA, 15 bp, Homo sapiens
gaataaatctagtta

SEQ ID NO: 12819 - DNA, 15 bp, Homo sapiens
ggaataaatctagtt

SEQ ID NO: 12820 - DNA, 15 bp, Homo sapiens
aggaataaatctagt

SEQ ID NO: 12821 - DNA, 15 bp, Homo sapiens
aaggaataaatctag

SEQ ID NO: 12822 - DNA, 15 bp, Homo sapiens
aaaggaataaatcta

SEQ ID NO: 12823 - DNA, 15 bp, Homo sapiens
aaaaggaataaatct

SEQ ID NO: 12824 - DNA, 15 bp, Homo sapiens
taaaaggaataaatc

SEQ ID NO: 12825 - DNA, 15 bp, Homo sapiens
ttaaaaggaataaat

SEQ ID NO: 12826 - DNA, 15 bp, Homo sapiens
cttaaaaggaataaa

SEQ ID NO: 12827 - DNA, 15 bp, Homo sapiens
ccttaaaaggaataa

SEQ ID NO: 12828 - DNA, 15 bp, Homo sapiens
gccttaaaaggaata

SEQ ID NO: 12829 - DNA, 15 bp, Homo sapiens
ggccttaaaaggaat

SEQ ID NO: 12830 - DNA, 15 bp, Homo sapiens
gggccttaaaaggaa

SEQ ID NO: 12831 - DNA, 15 bp, Homo sapiens
ggggccttaaaagga

SEQ ID NO: 12832 - DNA, 15 bp, Homo sapiens
cggggccttaaaagg

SEQ ID NO: 12833 - DNA, 15 bp, Homo sapiens
gcggggccttaaaag

SEQ ID NO: 12834 - DNA, 15 bp, Homo sapiens
cgcggggccttaaaa

SEQ ID NO: 12835 - DNA, 15 bp, Homo sapiens
tcgcggggccttaaa

SEQ ID NO: 12836 - DNA, 15 bp, Homo sapiens
atcgcggggccttaa

SEQ ID NO: 12837 - DNA, 15 bp, Homo sapiens
catcgcggggcctta

SEQ ID NO: 12838 - DNA, 15 bp, Homo sapiens
acatcgcggggcctt

SEQ ID NO: 12839 - DNA, 15 bp, Homo sapiens
tacatcgcggggcct

SEQ ID NO: 12840 - DNA, 15 bp, Homo sapiens
gtacatcgcggggcc

SEQ ID NO: 12841 - DNA, 15 bp, Homo sapiens
agtacatcgcggggc

SEQ ID NO: 12842 - DNA, 15 bp, Homo sapiens
cagtacatcgcgggg

SEQ ID NO: 12843 - DNA, 15 bp, Homo sapiens
acagtacatcgcggg

SEQ ID NO: 12844 - DNA, 15 bp, Homo sapiens
aacagtacatcgcgg

SEQ ID NO: 12845 - DNA, 15 bp, Homo sapiens
taacagtacatcgcg

SEQ ID NO: 12846 - DNA, 15 bp, Homo sapiens
ataacagtacatcgc

SEQ ID NO: 12847 - DNA, 15 bp, Homo sapiens
aataacagtacatcg

SEQ ID NO: 12848 - DNA, 15 bp, Homo sapiens
aaataacagtacatc

SEQ ID NO: 12849 - DNA, 15 bp, Homo sapiens
gaaataacagtacat

SEQ ID NO: 12850 - DNA, 15 bp, Homo sapiens
ggaaataacagtaca

SEQ ID NO: 12851 - DNA, 15 bp, Homo sapiens
tggaaataacagtac

SEQ ID NO: 12852 - DNA, 15 bp, Homo sapiens
gtggaaataacagta

SEQ ID NO: 12853 - DNA, 15 bp, Homo sapiens
tgtggaaataacagt

SEQ ID NO: 12854 - DNA, 15 bp, Homo sapiens
atgtggaaataacag

SEQ ID NO: 12855 - DNA, 15 bp, Homo sapiens
catgtggaaataaca

SEQ ID NO: 12856 - DNA, 15 bp, Homo sapiens
acatgtggaaataac

SEQ ID NO: 12857 - DNA, 15 bp, Homo sapiens
aacatgtggaaataa

SEQ ID NO: 12858 - DNA, 15 bp, Homo sapiens
caacatgtggaaata

SEQ ID NO: 12859 - DNA, 15 bp, Homo sapiens
acaacatgtggaaat

SEQ ID NO: 12860 - DNA, 15 bp, Homo sapiens
tacaacatgtggaaa

SEQ ID NO: 12861 - DNA, 15 bp, Homo sapiens
ctacaacatgtggaa

SEQ ID NO: 12862 - DNA, 15 bp, Homo sapiens
gctacaacatgtgga

SEQ ID NO: 12863 - DNA, 15 bp, Homo sapiens
agctacaacatgtgg

SEQ ID NO: 12864 - DNA, 15 bp, Homo sapiens
cagctacaacatgtg

SEQ ID NO: 12865 - DNA, 15 bp, Homo sapiens
ccagctacaacatgt

SEQ ID NO: 12866 - DNA, 15 bp, Homo sapiens
cccagctacaacatg

SEQ ID NO: 12867 - DNA, 15 bp, Homo sapiens
ccccagctacaacat

SEQ ID NO: 12868 - DNA, 15 bp, Homo sapiens
tccccagctacaaca

SEQ ID NO: 12869 - DNA, 15 bp, Homo sapiens
ttccccagctacaac

SEQ ID NO: 12870 - DNA, 15 bp, Homo sapiens
gttccccagctacaa

SEQ ID NO: 12871 - DNA, 15 bp, Homo sapiens
cgttccccagctaca

SEQ ID NO: 12872 - DNA, 15 bp, Homo sapiens
acgttccccagctac

SEQ ID NO: 12873 - DNA, 15 bp, Homo sapiens
cacgttccccagcta

SEQ ID NO: 12874 - DNA, 15 bp, Homo sapiens
gcacgttccccagct

SEQ ID NO: 12875 - DNA, 15 bp, Homo sapiens
agcacgttccccagc

SEQ ID NO: 12876 - DNA, 15 bp, Homo sapiens
tagcacgttccccag

SEQ ID NO: 12877 - DNA, 15 bp, Homo sapiens
gtagcacgttcccca

SEQ ID NO: 12878 - DNA, 15 bp, Homo sapiens
agtagcacgttcccc

SEQ ID NO: 12879 - DNA, 15 bp, Homo sapiens
gagtagcacgttccc

SEQ ID NO: 12880 - DNA, 15 bp, Homo sapiens
tgagtagcacgttcc

SEQ ID NO: 12881 - DNA, 15 bp, Homo sapiens
ctgagtagcacgttc

SEQ ID NO: 12882 - DNA, 15 bp, Homo sapiens
tctgagtagcacgtt

SEQ ID NO: 12883 - DNA, 15 bp, Homo sapiens
ctctgagtagcacgt

SEQ ID NO: 12884 - DNA, 15 bp, Homo sapiens
tctctgagtagcacg

SEQ ID NO: 12885 - DNA, 15 bp, Homo sapiens
ctctctgagtagcac

SEQ ID NO: 12886 - DNA, 15 bp, Homo sapiens
cctctctgagtagca

SEQ ID NO: 12887 - DNA, 15 bp, Homo sapiens
acctctctgagtagc

SEQ ID NO: 12888 - DNA, 15 bp, Homo sapiens
aacctctctgagtag

SEQ ID NO: 12889 - DNA, 15 bp, Homo sapiens
taacctctctgagta

SEQ ID NO: 12890 - DNA, 15 bp, Homo sapiens
ttaacctctctgagt

SEQ ID NO: 12891 - DNA, 15 bp, Homo sapiens
cttaacctctctgag

SEQ ID NO: 12892 - DNA, 15 bp, Homo sapiens
acttaacctctctga

SEQ ID NO: 12893 - DNA, 15 bp, Homo sapiens
tacttaacctctctg

SEQ ID NO: 12894 - DNA, 15 bp, Homo sapiens
ttacttaacctctct

SEQ ID NO: 12895 - DNA, 15 bp, Homo sapiens
gttacttaacctctc

SEQ ID NO: 12896 - DNA, 15 bp, Homo sapiens
agttacttaacctct

SEQ ID NO: 12897 - DNA, 15 bp, Homo sapiens
aagttacttaacctc

SEQ ID NO: 12898 - DNA, 15 bp, Homo sapiens
caagttacttaacct

SEQ ID NO: 12899 - DNA, 15 bp, Homo sapiens
acaagttacttaacc

SEQ ID NO: 12900 - DNA, 15 bp, Homo sapiens
gacaagttacttaac

SEQ ID NO: 12901 - DNA, 15 bp, Homo sapiens
agacaagttacttaa

SEQ ID NO: 12902 - DNA, 15 bp, Homo sapiens
cagacaagttactta

SEQ ID NO: 12903 - DNA, 15 bp, Homo sapiens
tcagacaagttactt

SEQ ID NO: 12904 - DNA, 15 bp, Homo sapiens
ctcagacaagttact

SEQ ID NO: 12905 - DNA, 15 bp, Homo sapiens
cctcagacaagttac

SEQ ID NO: 12906 - DNA, 15 bp, Homo sapiens
acctcagacaagtta

SEQ ID NO: 12907 - DNA, 15 bp, Homo sapiens
gacctcagacaagtt

SEQ ID NO: 12908 - DNA, 15 bp, Homo sapiens
ggacctcagacaagt

SEQ ID NO: 12909 - DNA, 15 bp, Homo sapiens
tggacctcagacaag

SEQ ID NO: 12910 - DNA, 15 bp, Homo sapiens
gtggacctcagacaa

SEQ ID NO: 12911 - DNA, 15 bp, Homo sapiens
tgtggacctcagaca

SEQ ID NO: 12912 - DNA, 15 bp, Homo sapiens
gtgtggacctcagac

SEQ ID NO: 12913 - DNA, 15 bp, Homo sapiens
ggtgtggacctcaga

SEQ ID NO: 12914 - DNA, 15 bp, Homo sapiens
tggtgtggacctcag

SEQ ID NO: 12915 - DNA, 15 bp, Homo sapiens
gtggtgtggacctca

SEQ ID NO: 12916 - DNA, 15 bp, Homo sapiens
agtggtgtggacctc

SEQ ID NO: 12917 - DNA, 15 bp, Homo sapiens
tagtggtgtggacct

SEQ ID NO: 12918 - DNA, 15 bp, Homo sapiens
ttagtggtgtggacc

SEQ ID NO: 12919 - DNA, 15 bp, Homo sapiens
gttagtggtgtggac

SEQ ID NO: 12920 - DNA, 15 bp, Homo sapiens
tgttagtggtgtgga

SEQ ID NO: 12921 - DNA, 15 bp, Homo sapiens
ttgttagtggtgtgg

SEQ ID NO: 12922 - DNA, 15 bp, Homo sapiens
cttgttagtggtgtg

SEQ ID NO: 12923 - DNA, 15 bp, Homo sapiens
ccttgttagtggtgt

SEQ ID NO: 12924 - DNA, 15 bp, Homo sapiens
tccttgttagtggtg

SEQ ID NO: 12925 - DNA, 15 bp, Homo sapiens
ctccttgttagtggt

SEQ ID NO: 12926 - DNA, 15 bp, Homo sapiens
gctccttgttagtgg

SEQ ID NO: 12927 - DNA, 15 bp, Homo sapiens
tgctccttgttagtg

SEQ ID NO: 12928 - DNA, 15 bp, Homo sapiens
gtgctccttgttagt

SEQ ID NO: 12929 - DNA, 15 bp, Homo sapiens
tgtgctccttgttag

SEQ ID NO: 12930 - DNA, 15 bp, Homo sapiens
ctgtgctccttgtta

SEQ ID NO: 12931 - DNA, 15 bp, Homo sapiens
cctgtgctccttgtt

SEQ ID NO: 12932 - DNA, 15 bp, Homo sapiens
acctgtgctccttgt

SEQ ID NO: 12933 - DNA, 15 bp, Homo sapiens
tacctgtgctccttg

SEQ ID NO: 12934 - DNA, 15 bp, Homo sapiens
ctacctgtgctcctt

SEQ ID NO: 12935 - DNA, 15 bp, Homo sapiens
cctacctgtgctcct

SEQ ID NO: 12936 - DNA, 15 bp, Homo sapiens
ccctacctgtgctcc

SEQ ID NO: 12937 - DNA, 15 bp, Homo sapiens
accctacctgtgctc

SEQ ID NO: 12938 - DNA, 15 bp, Homo sapiens
aaccctacctgtgct

SEQ ID NO: 12939 - DNA, 15 bp, Homo sapiens
gaaccctacctgtgc

SEQ ID NO: 12940 - DNA, 15 bp, Homo sapiens
tgaaccctacctgtg

SEQ ID NO: 12941 - DNA, 15 bp, Homo sapiens
ttgaaccctacctgt

SEQ ID NO: 12942 - DNA, 15 bp, Homo sapiens
tttgaaccctacctg

SEQ ID NO: 12943 - DNA, 15 bp, Homo sapiens
atttgaaccctacct

SEQ ID NO: 12944 - DNA, 15 bp, Homo sapiens
gatttgaaccctacc

SEQ ID NO: 12945 - DNA, 15 bp, Homo sapiens
ggatttgaaccctac

SEQ ID NO: 12946 - DNA, 15 bp, Homo sapiens
tggatttgaacccta

SEQ ID NO: 12947 - DNA, 15 bp, Homo sapiens
ctggatttgaaccct

SEQ ID NO: 12948 - DNA, 15 bp, Homo sapiens
tctggatttgaaccc

SEQ ID NO: 12949 - DNA, 15 bp, Homo sapiens
atctggatttgaacc

SEQ ID NO: 12950 - DNA, 15 bp, Homo sapiens
tatctggatttgaac

SEQ ID NO: 12951 - DNA, 15 bp, Homo sapiens
ttatctggatttgaa

SEQ ID NO: 12952 - DNA, 15 bp, Homo sapiens
attatctggatttga

SEQ ID NO: 12953 - DNA, 15 bp, Homo sapiens
gattatctggatttg

SEQ ID NO: 12954 - DNA, 15 bp, Homo sapiens
agattatctggattt

SEQ ID NO: 12955 - DNA, 15 bp, Homo sapiens
cagattatctggatt

SEQ ID NO: 12956 - DNA, 15 bp, Homo sapiens
tcagattatctggat

SEQ ID NO: 12957 - DNA, 15 bp, Homo sapiens
gtcagattatctgga

SEQ ID NO: 12958 - DNA, 15 bp, Homo sapiens
agtcagattatctgg

SEQ ID NO: 12959 - DNA, 15 bp, Homo sapiens
aagtcagattatctg

SEQ ID NO: 12960 - DNA, 15 bp, Homo sapiens
aaagtcagattatct

SEQ ID NO: 12961 - DNA, 15 bp, Homo sapiens
caaagtcagattatc

SEQ ID NO: 12962 - DNA, 15 bp, Homo sapiens
ccaaagtcagattat

SEQ ID NO: 12963 - DNA, 15 bp, Homo sapiens
tccaaagtcagatta

SEQ ID NO: 12964 - DNA, 15 bp, Homo sapiens
ctccaaagtcagatt

SEQ ID NO: 12965 - DNA, 15 bp, Homo sapiens
gctccaaagtcagat

SEQ ID NO: 12966 - DNA, 15 bp, Homo sapiens
agctccaaagtcaga

SEQ ID NO: 12967 - DNA, 15 bp, Homo sapiens
cagctccaaagtcag

SEQ ID NO: 12968 - DNA, 15 bp, Homo sapiens
ccagctccaaagtca

SEQ ID NO: 12969 - DNA, 15 bp, Homo sapiens
gccagctccaaagtc

SEQ ID NO: 12970 - DNA, 15 bp, Homo sapiens
tgccagctccaaagt

SEQ ID NO: 12971 - DNA, 15 bp, Homo sapiens
gtgccagctccaaag

SEQ ID NO: 12972 - DNA, 15 bp, Homo sapiens
agtgccagctccaaa

SEQ ID NO: 12973 - DNA, 15 bp, Homo sapiens
gagtgccagctccaa

SEQ ID NO: 12974 - DNA, 15 bp, Homo sapiens
agagtgccagctcca

SEQ ID NO: 12975 - DNA, 15 bp, Homo sapiens
tagagtgccagctcc

SEQ ID NO: 12976 - DNA, 15 bp, Homo sapiens
ttagagtgccagctc

SEQ ID NO: 12977 - DNA, 15 bp, Homo sapiens
gttagagtgccagct

SEQ ID NO: 12978 - DNA, 15 bp, Homo sapiens
agttagagtgccagc

SEQ ID NO: 12979 - DNA, 15 bp, Homo sapiens
gagttagagtgccag

SEQ ID NO: 12980 - DNA, 15 bp, Homo sapiens
tgagttagagtgcca

SEQ ID NO: 12981 - DNA, 15 bp, Homo sapiens
ttgagttagagtgcc

SEQ ID NO: 12982 - DNA, 15 bp, Homo sapiens
attgagttagagtgc

SEQ ID NO: 12983 - DNA, 15 bp, Homo sapiens
cattgagttagagtg

SEQ ID NO: 12984 - DNA, 15 bp, Homo sapiens
acattgagttagagt

SEQ ID NO: 12985 - DNA, 15 bp, Homo sapiens
cacattgagttagag

SEQ ID NO: 12986 - DNA, 15 bp, Homo sapiens
gcacattgagttaga

SEQ ID NO: 12987 - DNA, 15 bp, Homo sapiens
ggcacattgagttag

SEQ ID NO: 12988 - DNA, 15 bp, Homo sapiens
aggcacattgagtta

SEQ ID NO: 12989 - DNA, 15 bp, Homo sapiens
taggcacattgagtt

SEQ ID NO: 12990 - DNA, 15 bp, Homo sapiens
ttaggcacattgagt

SEQ ID NO: 12991 - DNA, 15 bp, Homo sapiens
attaggcacattgag

SEQ ID NO: 12992 - DNA, 15 bp, Homo sapiens
gattaggcacattga

SEQ ID NO: 12993 - DNA, 15 bp, Homo sapiens
cgattaggcacattg

SEQ ID NO: 12994 - DNA, 15 bp, Homo sapiens
gcgattaggcacatt

SEQ ID NO: 12995 - DNA, 15 bp, Homo sapiens
agcgattaggcacat

SEQ ID NO: 12996 - DNA, 15 bp, Homo sapiens
aagcgattaggcaca

SEQ ID NO: 12997 - DNA, 15 bp, Homo sapiens
aaagcgattaggcac

SEQ ID NO: 12998 - DNA, 15 bp, Homo sapiens
aaaagcgattaggca

SEQ ID NO: 12999 - DNA, 15 bp, Homo sapiens
gaaaagcgattaggc

SEQ ID NO: 13000 - DNA, 15 bp, Homo sapiens
tgaaaagcgattagg

SEQ ID NO: 13001 - DNA, 15 bp, Homo sapiens
ctgaaaagcgattag

SEQ ID NO: 13002 - DNA, 15 bp, Homo sapiens
actgaaaagcgatta

SEQ ID NO: 13003 - DNA, 15 bp, Homo sapiens
cactgaaaagcgatt

SEQ ID NO: 13004 - DNA, 15 bp, Homo sapiens
ccactgaaaagcgat

SEQ ID NO: 13005 - DNA, 15 bp, Homo sapiens
accactgaaaagcga

SEQ ID NO: 13006 - DNA, 15 bp, Homo sapiens
caccactgaaaagcg

SEQ ID NO: 13007 - DNA, 15 bp, Homo sapiens
acaccactgaaaagc

SEQ ID NO: 13008 - DNA, 15 bp, Homo sapiens
gacaccactgaaaag

SEQ ID NO: 13009 - DNA, 15 bp, Homo sapiens
tgacaccactgaaaa

SEQ ID NO: 13010 - DNA, 15 bp, Homo sapiens
atgacaccactgaaa

SEQ ID NO: 13011 - DNA, 15 bp, Homo sapiens
aatgacaccactgaa

SEQ ID NO: 13012 - DNA, 15 bp, Homo sapiens
taatgacaccactga

SEQ ID NO: 13013 - DNA, 15 bp, Homo sapiens
ataatgacaccactg

SEQ ID NO: 13014 - DNA, 15 bp, Homo sapiens
aataatgacaccact

SEQ ID NO: 13015 - DNA, 15 bp, Homo sapiens
aaataatgacaccac

SEQ ID NO: 13016 - DNA, 15 bp, Homo sapiens
aaaataatgacacca

SEQ ID NO: 13017 - DNA, 15 bp, Homo sapiens
caaaataatgacacc

SEQ ID NO: 13018 - DNA, 15 bp, Homo sapiens
gcaaaataatgacac

SEQ ID NO: 13019 - DNA, 15 bp, Homo sapiens
ggcaaaataatgaca

SEQ ID NO: 13020 - DNA, 15 bp, Homo sapiens
aggcaaaataatgac

SEQ ID NO: 13021 - DNA, 15 bp, Homo sapiens
taggcaaaataatga

SEQ ID NO: 13022 - DNA, 15 bp, Homo sapiens
ataggcaaaataatg

SEQ ID NO: 13023 - DNA, 15 bp, Homo sapiens
aataggcaaaataat

SEQ ID NO: 13024 - DNA, 15 bp, Homo sapiens
gaataggcaaaataa

SEQ ID NO: 13025 - DNA, 15 bp, Homo sapiens
agaataggcaaaata

SEQ ID NO: 13026 - DNA, 15 bp, Homo sapiens
gagaataggcaaaat

SEQ ID NO: 13027 - DNA, 15 bp, Homo sapiens
ggagaataggcaaaa

SEQ ID NO: 13028 - DNA, 15 bp, Homo sapiens
tggagaataggcaaa

SEQ ID NO: 13029 - DNA, 15 bp, Homo sapiens
atggagaataggcaa

SEQ ID NO: 13030 - DNA, 15 bp, Homo sapiens
gatggagaataggca

SEQ ID NO: 13031 - DNA, 15 bp, Homo sapiens
agatggagaataggc

SEQ ID NO: 13032 - DNA, 15 bp, Homo sapiens
cagatggagaatagg

SEQ ID NO: 13033 - DNA, 15 bp, Homo sapiens
tcagatggagaatag

SEQ ID NO: 13034 - DNA, 15 bp, Homo sapiens
ctcagatggagaata

SEQ ID NO: 13035 - DNA, 15 bp, Homo sapiens
tctcagatggagaat

SEQ ID NO: 13036 - DNA, 15 bp, Homo sapiens
ttctcagatggagaa

SEQ ID NO: 13037 - DNA, 15 bp, Homo sapiens
attctcagatggaga

SEQ ID NO: 13038 - DNA, 15 bp, Homo sapiens
tattctcagatggag

SEQ ID NO: 13039 - DNA, 15 bp, Homo sapiens
atattctcagatgga

SEQ ID NO: 13040 - DNA, 15 bp, Homo sapiens
aatattctcagatgg

SEQ ID NO: 13041 - DNA, 15 bp, Homo sapiens
caatattctcagatg

SEQ ID NO: 13042 - DNA, 15 bp, Homo sapiens
tcaatattctcagat

SEQ ID NO: 13043 - DNA, 15 bp, Homo sapiens
ttcaatattctcaga

SEQ ID NO: 13044 - DNA, 15 bp, Homo sapiens
cttcaatattctcag

SEQ ID NO: 13045 - DNA, 15 bp, Homo sapiens
acttcaatattctca

SEQ ID NO: 13046 - DNA, 15 bp, Homo sapiens
aacttcaatattctc

SEQ ID NO: 13047 - DNA, 15 bp, Homo sapiens
aaacttcaatattct

SEQ ID NO: 13048 - DNA, 15 bp, Homo sapiens
gaaacttcaatattc

SEQ ID NO: 13049 - DNA, 15 bp, Homo sapiens
agaaacttcaatatt

SEQ ID NO: 13050 - DNA, 15 bp, Homo sapiens
cagaaacttcaatat

SEQ ID NO: 13051 - DNA, 15 bp, Homo sapiens
tcagaaacttcaata

SEQ ID NO: 13052 - DNA, 15 bp, Homo sapiens
gtcagaaacttcaat

SEQ ID NO: 13053 - DNA, 15 bp, Homo sapiens
agtcagaaacttcaa

SEQ ID NO: 13054 - DNA, 15 bp, Homo sapiens
gagtcagaaacttca

SEQ ID NO: 13055 - DNA, 15 bp, Homo sapiens
ggagtcagaaacttc

SEQ ID NO: 13056 - DNA, 15 bp, Homo sapiens
aggagtcagaaactt

SEQ ID NO: 13057 - DNA, 15 bp, Homo sapiens
aaggagtcagaaact

SEQ ID NO: 13058 - DNA, 15 bp, Homo sapiens
gaaggagtcagaaac

SEQ ID NO: 13059 - DNA, 15 bp, Homo sapiens
ggaaggagtcagaaa

SEQ ID NO: 13060 - DNA, 15 bp, Homo sapiens
aggaaggagtcagaa

SEQ ID NO: 13061 - DNA, 15 bp, Homo sapiens
aaggaaggagtcaga

SEQ ID NO: 13062 - DNA, 15 bp, Homo sapiens
caaggaaggagtcag

SEQ ID NO: 13063 - DNA, 15 bp, Homo sapiens
gcaaggaaggagtca

SEQ ID NO: 13064 - DNA, 15 bp, Homo sapiens
ggcaaggaaggagtc

SEQ ID NO: 13065 - DNA, 15 bp, Homo sapiens
aggcaaggaaggagt

SEQ ID NO: 13066 - DNA, 15 bp, Homo sapiens
aaggcaaggaaggag

SEQ ID NO: 13067 - DNA, 15 bp, Homo sapiens
aaaggcaaggaagga

SEQ ID NO: 13068 - DNA, 15 bp, Homo sapiens
gaaaggcaaggaagg

SEQ ID NO: 13069 - DNA, 15 bp, Homo sapiens
agaaaggcaaggaag

SEQ ID NO: 13070 - DNA, 15 bp, Homo sapiens
gagaaaggcaaggaa

SEQ ID NO: 13071 - DNA, 15 bp, Homo sapiens
ggagaaaggcaagga

SEQ ID NO: 13072 - DNA, 15 bp, Homo sapiens
gggagaaaggcaagg

SEQ ID NO: 13073 - DNA, 15 bp, Homo sapiens
agggagaaaggcaag

SEQ ID NO: 13074 - DNA, 15 bp, Homo sapiens
cagggagaaaggcaa

SEQ ID NO: 13075 - DNA, 15 bp, Homo sapiens
gcagggagaaaggca

SEQ ID NO: 13076 - DNA, 15 bp, Homo sapiens
ggcagggagaaaggc

SEQ ID NO: 13077 - DNA, 15 bp, Homo sapiens
aggcagggagaaagg

SEQ ID NO: 13078 - DNA, 15 bp, Homo sapiens
gaggcagggagaaag

SEQ ID NO: 13079 - DNA, 15 bp, Homo sapiens
ggaggcagggagaaa

SEQ ID NO: 13080 - DNA, 15 bp, Homo sapiens
gggaggcagggagaa

SEQ ID NO: 13081 - DNA, 15 bp, Homo sapiens
cgggaggcagggaga

SEQ ID NO: 13082 - DNA, 15 bp, Homo sapiens
acgggaggcagggag

SEQ ID NO: 13083 - DNA, 15 bp, Homo sapiens
cacgggaggcaggga

SEQ ID NO: 13084 - DNA, 15 bp, Homo sapiens
ccacgggaggcaggg

SEQ ID NO: 13085 - DNA, 15 bp, Homo sapiens
accacgggaggcagg

SEQ ID NO: 13086 - DNA, 15 bp, Homo sapiens
aaccacgggaggcag

SEQ ID NO: 13087 - DNA, 15 bp, Homo sapiens
taaccacgggaggca

SEQ ID NO: 13088 - DNA, 15 bp, Homo sapiens
ataaccacgggaggc

SEQ ID NO: 13089 - DNA, 15 bp, Homo sapiens
gataaccacgggagg

SEQ ID NO: 13090 - DNA, 15 bp, Homo sapiens
ggataaccacgggag

SEQ ID NO: 13091 - DNA, 15 bp, Homo sapiens
gggataaccacggga

SEQ ID NO: 13092 - DNA, 15 bp, Homo sapiens
ggggataaccacggg

SEQ ID NO: 13093 - DNA, 15 bp, Homo sapiens
tggggataaccacgg

SEQ ID NO: 13094 - DNA, 15 bp, Homo sapiens
ctggggataaccacg

SEQ ID NO: 13095 - DNA, 15 bp, Homo sapiens
cctggggataaccac

SEQ ID NO: 13096 - DNA, 15 bp, Homo sapiens
acctggggataacca

SEQ ID NO: 13097 - DNA, 15 bp, Homo sapiens
gacctggggataacc

SEQ ID NO: 13098 - DNA, 15 bp, Homo sapiens
agacctggggataac

SEQ ID NO: 13099 - DNA, 15 bp, Homo sapiens
aagacctggggataa

SEQ ID NO: 13100 - DNA, 15 bp, Homo sapiens
caagacctggggata

SEQ ID NO: 13101 - DNA, 15 bp, Homo sapiens
ccaagacctggggat

SEQ ID NO: 13102 - DNA, 15 bp, Homo sapiens
accaagacctgggga

SEQ ID NO: 13103 - DNA, 15 bp, Homo sapiens
caccaagacctgggg

SEQ ID NO: 13104 - DNA, 15 bp, Homo sapiens
acaccaagacctggg

SEQ ID NO: 13105 - DNA, 15 bp, Homo sapiens
aacaccaagacctgg

SEQ ID NO: 13106 - DNA, 15 bp, Homo sapiens
gaacaccaagacctg

SEQ ID NO: 13107 - DNA, 15 bp, Homo sapiens
ggaacaccaagacct

SEQ ID NO: 13108 - DNA, 15 bp, Homo sapiens
tggaacaccaagacc

SEQ ID NO: 13109 - DNA, 15 bp, Homo sapiens
ctggaacaccaagac

SEQ ID NO: 13110 - DNA, 15 bp, Homo sapiens
actggaacaccaaga

SEQ ID NO: 13111 - DNA, 15 bp, Homo sapiens
gactggaacaccaag

SEQ ID NO: 13112 - DNA, 15 bp, Homo sapiens
ggactggaacaccaa

SEQ ID NO: 13113 - DNA, 15 bp, Homo sapiens
aggactggaacacca

SEQ ID NO: 13114 - DNA, 15 bp, Homo sapiens
gaggactggaacacc

SEQ ID NO: 13115 - DNA, 15 bp, Homo sapiens
agaggactggaacac

SEQ ID NO: 13116 - DNA, 15 bp, Homo sapiens
tagaggactggaaca

SEQ ID NO: 13117 - DNA, 15 bp, Homo sapiens
atagaggactggaac

SEQ ID NO: 13118 - DNA, 15 bp, Homo sapiens
catagaggactggaa

SEQ ID NO: 13119 - DNA, 15 bp, Homo sapiens
acatagaggactgga

SEQ ID NO: 13120 - DNA, 15 bp, Homo sapiens
gacatagaggactgg

SEQ ID NO: 13121 - DNA, 15 bp, Homo sapiens
ggacatagaggactg

SEQ ID NO: 13122 - DNA, 15 bp, Homo sapiens
cggacatagaggact

SEQ ID NO: 13123 - DNA, 15 bp, Homo sapiens
acggacatagaggac

SEQ ID NO: 13124 - DNA, 15 bp, Homo sapiens
gacggacatagagga

SEQ ID NO: 13125 - DNA, 15 bp, Homo sapiens
ggacggacatagagg

SEQ ID NO: 13126 - DNA, 15 bp, Homo sapiens
aggacggacatagag

SEQ ID NO: 13127 - DNA, 15 bp, Homo sapiens
aaggacggacataga

SEQ ID NO: 13128 - DNA, 15 bp, Homo sapiens
taaggacggacatag

SEQ ID NO: 13129 - DNA, 15 bp, Homo sapiens
gtaaggacggacata

SEQ ID NO: 13130 - DNA, 15 bp, Homo sapiens
agtaaggacggacat

SEQ ID NO: 13131 - DNA, 15 bp, Homo sapiens
gagtaaggacggaca

SEQ ID NO: 13132 - DNA, 15 bp, Homo sapiens
agagtaaggacggac

SEQ ID NO: 13133 - DNA, 15 bp, Homo sapiens
aagagtaaggacgga

SEQ ID NO: 13134 - DNA, 15 bp, Homo sapiens
taagagtaaggacgg

SEQ ID NO: 13135 - DNA, 15 bp, Homo sapiens
ataagagtaaggacg

SEQ ID NO: 13136 - DNA, 15 bp, Homo sapiens
aataagagtaaggac

SEQ ID NO: 13137 - DNA, 15 bp, Homo sapiens
gaataagagtaagga

SEQ ID NO: 13138 - DNA, 15 bp, Homo sapiens
ggaataagagtaagg

SEQ ID NO: 13139 - DNA, 15 bp, Homo sapiens
aggaataagagtaag

SEQ ID NO: 13140 - DNA, 15 bp, Homo sapiens
aaggaataagagtaa

SEQ ID NO: 13141 - DNA, 15 bp, Homo sapiens
aaaggaataagagta

SEQ ID NO: 13142 - DNA, 15 bp, Homo sapiens
caaaggaataagagt

SEQ ID NO: 13143 - DNA, 15 bp, Homo sapiens
gcaaaggaataagag

SEQ ID NO: 13144 - DNA, 15 bp, Homo sapiens
agcaaaggaataaga

SEQ ID NO: 13145 - DNA, 15 bp, Homo sapiens
tagcaaaggaataag

SEQ ID NO: 13146 - DNA, 15 bp, Homo sapiens
gtagcaaaggaataa

SEQ ID NO: 13147 - DNA, 15 bp, Homo sapiens
tgtagcaaaggaata

SEQ ID NO: 13148 - DNA, 15 bp, Homo sapiens
ctgtagcaaaggaat

SEQ ID NO: 13149 - DNA, 15 bp, Homo sapiens
actgtagcaaaggaa

SEQ ID NO: 13150 - DNA, 15 bp, Homo sapiens
cactgtagcaaagga

SEQ ID NO: 13151 - DNA, 15 bp, Homo sapiens
acactgtagcaaagg

SEQ ID NO: 13152 - DNA, 15 bp, Homo sapiens
cacactgtagcaaag

SEQ ID NO: 13153 - DNA, 15 bp, Homo sapiens
tcacactgtagcaaa

SEQ ID NO: 13154 - DNA, 15 bp, Homo sapiens
atcacactgtagcaa

SEQ ID NO: 13155 - DNA, 15 bp, Homo sapiens
gatcacactgtagca

SEQ ID NO: 13156 - DNA, 15 bp, Homo sapiens
ggatcacactgtagc

SEQ ID NO: 13157 - DNA, 15 bp, Homo sapiens
tggatcacactgtag

SEQ ID NO: 13158 - DNA, 15 bp, Homo sapiens
ctggatcacactgta

SEQ ID NO: 13159 - DNA, 15 bp, Homo sapiens
cctggatcacactgt

SEQ ID NO: 13160 - DNA, 15 bp, Homo sapiens
ccctggatcacactg

SEQ ID NO: 13161 - DNA, 15 bp, Homo sapiens
gccctggatcacact

SEQ ID NO: 13162 - DNA, 15 bp, Homo sapiens
agccctggatcacac

SEQ ID NO: 13163 - DNA, 15 bp, Homo sapiens
gagccctggatcaca

SEQ ID NO: 13164 - DNA, 15 bp, Homo sapiens
ggagccctggatcac

SEQ ID NO: 13165 - DNA, 15 bp, Homo sapiens
aggagccctggatca

SEQ ID NO: 13166 - DNA, 15 bp, Homo sapiens
caggagccctggatc

SEQ ID NO: 13167 - DNA, 15 bp, Homo sapiens
gcaggagccctggat

SEQ ID NO: 13168 - DNA, 15 bp, Homo sapiens
ggcaggagccctgga

SEQ ID NO: 13169 - DNA, 15 bp, Homo sapiens
gggcaggagccctgg

SEQ ID NO: 13170 - DNA, 15 bp, Homo sapiens
ggggcaggagccctg

SEQ ID NO: 13171 - DNA, 15 bp, Homo sapiens
aggggcaggagccct

SEQ ID NO: 13172 - DNA, 15 bp, Homo sapiens
aaggggcaggagccc

SEQ ID NO: 13173 - DNA, 15 bp, Homo sapiens
gaaggggcaggagcc

SEQ ID NO: 13174 - DNA, 15 bp, Homo sapiens
agaaggggcaggagc

SEQ ID NO: 13175 - DNA, 15 bp, Homo sapiens
aagaaggggcaggag

SEQ ID NO: 13176 - DNA, 15 bp, Homo sapiens
taagaaggggcagga

SEQ ID NO: 13177 - DNA, 15 bp, Homo sapiens
ataagaaggggcagg

SEQ ID NO: 13178 - DNA, 15 bp, Homo sapiens
gataagaaggggcag

SEQ ID NO: 13179 - DNA, 15 bp, Homo sapiens
ggataagaaggggca

SEQ ID NO: 13180 - DNA, 15 bp, Homo sapiens
aggataagaaggggc

SEQ ID NO: 13181 - DNA, 15 bp, Homo sapiens
caggataagaagggg

SEQ ID NO: 13182 - DNA, 15 bp, Homo sapiens
ccaggataagaaggg

SEQ ID NO: 13183 - DNA, 15 bp, Homo sapiens
accaggataagaagg

SEQ ID NO: 13184 - DNA, 15 bp, Homo sapiens
taccaggataagaag

SEQ ID NO: 13185 - DNA, 15 bp, Homo sapiens
ctaccaggataagaa

SEQ ID NO: 13186 - DNA, 15 bp, Homo sapiens
tctaccaggataaga

SEQ ID NO: 13187 - DNA, 15 bp, Homo sapiens
ctctaccaggataag

SEQ ID NO: 13188 - DNA, 15 bp, Homo sapiens
cctctaccaggataa

SEQ ID NO: 13189 - DNA, 15 bp, Homo sapiens
ccctctaccaggata

SEQ ID NO: 13190 - DNA, 15 bp, Homo sapiens
cccctctaccaggat

SEQ ID NO: 13191 - DNA, 15 bp, Homo sapiens
ccccctctaccagga

SEQ ID NO: 13192 - DNA, 15 bp, Homo sapiens
gccccctctaccagg

SEQ ID NO: 13193 - DNA, 15 bp, Homo sapiens
ggccccctctaccag

SEQ ID NO: 13194 - DNA, 15 bp, Homo sapiens
gggccccctctacca

SEQ ID NO: 13195 - DNA, 15 bp, Homo sapiens
tgggccccctctacc

SEQ ID NO: 13196 - DNA, 15 bp, Homo sapiens
gtgggccccctctac

SEQ ID NO: 13197 - DNA, 15 bp, Homo sapiens
agtgggccccctcta

SEQ ID NO: 13198 - DNA, 15 bp, Homo sapiens
aagtgggccccctct

SEQ ID NO: 13199 - DNA, 15 bp, Homo sapiens
caagtgggccccctc

SEQ ID NO: 13200 - DNA, 15 bp, Homo sapiens
gcaagtgggccccct

SEQ ID NO: 13201 - DNA, 15 bp, Homo sapiens
agcaagtgggccccc

SEQ ID NO: 13202 - DNA, 15 bp, Homo sapiens
cagcaagtgggcccc

SEQ ID NO: 13203 - DNA, 15 bp, Homo sapiens
ccagcaagtgggccc

SEQ ID NO: 13204 - DNA, 15 bp, Homo sapiens
cccagcaagtgggcc

SEQ ID NO: 13205 - DNA, 15 bp, Homo sapiens
tcccagcaagtgggc

SEQ ID NO: 13206 - DNA, 15 bp, Homo sapiens
ttcccagcaagtggg

SEQ ID NO: 13207 - DNA, 15 bp, Homo sapiens
tttcccagcaagtgg

SEQ ID NO: 13208 - DNA, 15 bp, Homo sapiens
atttcccagcaagtg

SEQ ID NO: 13209 - DNA, 15 bp, Homo sapiens
aatttcccagcaagt

SEQ ID NO: 13210 - DNA, 15 bp, Homo sapiens
caatttcccagcaag

SEQ ID NO: 13211 - DNA, 15 bp, Homo sapiens
acaatttcccagcaa

SEQ ID NO: 13212 - DNA, 15 bp, Homo sapiens
gacaatttcccagca

SEQ ID NO: 13213 - DNA, 15 bp, Homo sapiens
agacaatttcccagc

SEQ ID NO: 13214 - DNA, 15 bp, Homo sapiens
gagacaatttcccag

SEQ ID NO: 13215 - DNA, 15 bp, Homo sapiens
ggagacaatttccca

SEQ ID NO: 13216 - DNA, 15 bp, Homo sapiens
cggagacaatttccc

SEQ ID NO: 13217 - DNA, 15 bp, Homo sapiens
gcggagacaatttcc

SEQ ID NO: 13218 - DNA, 15 bp, Homo sapiens
ggcggagacaatttc

SEQ ID NO: 13219 - DNA, 15 bp, Homo sapiens
tggcggagacaattt

SEQ ID NO: 13220 - DNA, 15 bp, Homo sapiens
atggcggagacaatt

SEQ ID NO: 13221 - DNA, 15 bp, Homo sapiens
catggcggagacaat

SEQ ID NO: 13222 - DNA, 15 bp, Homo sapiens
ccatggcggagacaa

SEQ ID NO: 13223 - DNA, 15 bp, Homo sapiens
accatggcggagaca

SEQ ID NO: 13224 - DNA, 15 bp, Homo sapiens
aaccatggcggagac

SEQ ID NO: 13225 - DNA, 15 bp, Homo sapiens
aaaccatggcggaga

SEQ ID NO: 13226 - DNA, 15 bp, Homo sapiens
taaaccatggcggag

SEQ ID NO: 13227 - DNA, 15 bp, Homo sapiens
ataaaccatggcgga

SEQ ID NO: 13228 - DNA, 15 bp, Homo sapiens
gataaaccatggcgg

SEQ ID NO: 13229 - DNA, 15 bp, Homo sapiens
ggataaaccatggcg

SEQ ID NO: 13230 - DNA, 15 bp, Homo sapiens
tggataaaccatggc

SEQ ID NO: 13231 - DNA, 15 bp, Homo sapiens
atggataaaccatgg

SEQ ID NO: 13232 - DNA, 15 bp, Homo sapiens
catggataaaccatg

SEQ ID NO: 13233 - DNA, 15 bp, Homo sapiens
acatggataaaccat

SEQ ID NO: 13234 - DNA, 15 bp, Homo sapiens
aacatggataaacca

SEQ ID NO: 13235 - DNA, 15 bp, Homo sapiens
caacatggataaacc

SEQ ID NO: 13236 - DNA, 15 bp, Homo sapiens
acaacatggataaac

SEQ ID NO: 13237 - DNA, 15 bp, Homo sapiens
cacaacatggataaa

SEQ ID NO: 13238 - DNA, 15 bp, Homo sapiens
acacaacatggataa

SEQ ID NO: 13239 - DNA, 15 bp, Homo sapiens
cacacaacatggata

SEQ ID NO: 13240 - DNA, 15 bp, Homo sapiens
acacacaacatggat

SEQ ID NO: 13241 - DNA, 15 bp, Homo sapiens
gacacacaacatgga

SEQ ID NO: 13242 - DNA, 15 bp, Homo sapiens
ggacacacaacatgg

SEQ ID NO: 13243 - DNA, 15 bp, Homo sapiens
tggacacacaacatg

SEQ ID NO: 13244 - DNA, 15 bp, Homo sapiens
atggacacacaacat

SEQ ID NO: 13245 - DNA, 15 bp, Homo sapiens
aatggacacacaaca

SEQ ID NO: 13246 - DNA, 15 bp, Homo sapiens
taatggacacacaac

SEQ ID NO: 13247 - DNA, 15 bp, Homo sapiens
ctaatggacacacaa

SEQ ID NO: 13248 - DNA, 15 bp, Homo sapiens
actaatggacacaca

SEQ ID NO: 13249 - DNA, 15 bp, Homo sapiens
cactaatggacacac

SEQ ID NO: 13250 - DNA, 15 bp, Homo sapiens
tcactaatggacaca

SEQ ID NO: 13251 - DNA, 15 bp, Homo sapiens
ctcactaatggacac

SEQ ID NO: 13252 - DNA, 15 bp, Homo sapiens
actcactaatggaca

SEQ ID NO: 13253 - DNA, 15 bp, Homo sapiens
tactcactaatggac

SEQ ID NO: 13254 - DNA, 15 bp, Homo sapiens
ctactcactaatgga

SEQ ID NO: 13255 - DNA, 15 bp, Homo sapiens
actactcactaatgg

SEQ ID NO: 13256 - DNA, 15 bp, Homo sapiens
cactactcactaatg

SEQ ID NO: 13257 - DNA, 15 bp, Homo sapiens
ccactactcactaat

SEQ ID NO: 13258 - DNA, 15 bp, Homo sapiens
cccactactcactaa

SEQ ID NO: 13259 - DNA, 15 bp, Homo sapiens
tcccactactcacta

SEQ ID NO: 13260 - DNA, 15 bp, Homo sapiens
ttcccactactcact

SEQ ID NO: 13261 - DNA, 15 bp, Homo sapiens
cttcccactactcac

SEQ ID NO: 13262 - DNA, 15 bp, Homo sapiens
tcttcccactactca

SEQ ID NO: 13263 - DNA, 15 bp, Homo sapiens
ttcttcccactactc

SEQ ID NO: 13264 - DNA, 15 bp, Homo sapiens
attcttcccactact

SEQ ID NO: 13265 - DNA, 15 bp, Homo sapiens
gattcttcccactac

SEQ ID NO: 13266 - DNA, 15 bp, Homo sapiens
tgattcttcccacta

SEQ ID NO: 13267 - DNA, 15 bp, Homo sapiens
atgattcttcccact

SEQ ID NO: 13268 - DNA, 15 bp, Homo sapiens
tatgattcttcccac

SEQ ID NO: 13269 - DNA, 15 bp, Homo sapiens
atatgattcttccca

SEQ ID NO: 13270 - DNA, 15 bp, Homo sapiens
gatatgattcttccc

SEQ ID NO: 13271 - DNA, 15 bp, Homo sapiens
tgatatgattcttcc

SEQ ID NO: 13272 - DNA, 15 bp, Homo sapiens
atgatatgattcttc

SEQ ID NO: 13273 - DNA, 15 bp, Homo sapiens
catgatatgattctt

SEQ ID NO: 13274 - DNA, 15 bp, Homo sapiens
acatgatatgattct

SEQ ID NO: 13275 - DNA, 15 bp, Homo sapiens
aacatgatatgattc

SEQ ID NO: 13276 - DNA, 15 bp, Homo sapiens
caacatgatatgatt

SEQ ID NO: 13277 - DNA, 15 bp, Homo sapiens
ccaacatgatatgat

SEQ ID NO: 13278 - DNA, 15 bp, Homo sapiens
gccaacatgatatga

SEQ ID NO: 13279 - DNA, 15 bp, Homo sapiens
tgccaacatgatatg

SEQ ID NO: 13280 - DNA, 15 bp, Homo sapiens
ttgccaacatgatat

SEQ ID NO: 13281 - DNA, 15 bp, Homo sapiens
attgccaacatgata

SEQ ID NO: 13282 - DNA, 15 bp, Homo sapiens
cattgccaacatgat

SEQ ID NO: 13283 - DNA, 15 bp, Homo sapiens
tcattgccaacatga

SEQ ID NO: 13284 - DNA, 15 bp, Homo sapiens
ttcattgccaacatg

SEQ ID NO: 13285 - DNA, 15 bp, Homo sapiens
tttcattgccaacat

SEQ ID NO: 13286 - DNA, 15 bp, Homo sapiens
ctttcattgccaaca

SEQ ID NO: 13287 - DNA, 15 bp, Homo sapiens
cctttcattgccaac

SEQ ID NO: 13288 - DNA, 15 bp, Homo sapiens
ccctttcattgccaa

SEQ ID NO: 13289 - DNA, 15 bp, Homo sapiens
cccctttcattgcca

SEQ ID NO: 13290 - DNA, 15 bp, Homo sapiens
ccccctttcattgcc

SEQ ID NO: 13291 - DNA, 15 bp, Homo sapiens
cccccctttcattgc

SEQ ID NO: 13292 - DNA, 15 bp, Homo sapiens
gcccccctttcattg

SEQ ID NO: 13293 - DNA, 15 bp, Homo sapiens
agcccccctttcatt

SEQ ID NO: 13294 - DNA, 15 bp, Homo sapiens
tagcccccctttcat

SEQ ID NO: 13295 - DNA, 15 bp, Homo sapiens
atagcccccctttca

SEQ ID NO: 13296 - DNA, 15 bp, Homo sapiens
catagcccccctttc

SEQ ID NO: 13297 - DNA, 15 bp, Homo sapiens
ccatagccccccttt

SEQ ID NO: 13298 - DNA, 15 bp, Homo sapiens
gccatagcccccctt

SEQ ID NO: 13299 - DNA, 15 bp, Homo sapiens
agccatagcccccct

SEQ ID NO: 13300 - DNA, 15 bp, Homo sapiens
gagccatagcccccc

SEQ ID NO: 13301 - DNA, 15 bp, Homo sapiens
agagccatagccccc

SEQ ID NO: 13302 - DNA, 15 bp, Homo sapiens
cagagccatagcccc

SEQ ID NO: 13303 - DNA, 15 bp, Homo sapiens
ccagagccatagccc

SEQ ID NO: 13304 - DNA, 15 bp, Homo sapiens
cccagagccatagcc

SEQ ID NO: 13305 - DNA, 15 bp, Homo sapiens
ccccagagccatagc

SEQ ID NO: 13306 - DNA, 15 bp, Homo sapiens
accccagagccatag

SEQ ID NO: 13307 - DNA, 15 bp, Homo sapiens
taccccagagccata

SEQ ID NO: 13308 - DNA, 15 bp, Homo sapiens
ctaccccagagccat

SEQ ID NO: 13309 - DNA, 15 bp, Homo sapiens
actaccccagagcca

SEQ ID NO: 13310 - DNA, 15 bp, Homo sapiens
gactaccccagagcc

SEQ ID NO: 13311 - DNA, 15 bp, Homo sapiens
agactaccccagagc

SEQ ID NO: 13312 - DNA, 15 bp, Homo sapiens
tagactaccccagag

SEQ ID NO: 13313 - DNA, 15 bp, Homo sapiens
ctagactaccccaga

SEQ ID NO: 13314 - DNA, 15 bp, Homo sapiens
actagactaccccag

SEQ ID NO: 13315 - DNA, 15 bp, Homo sapiens
gactagactacccca

SEQ ID NO: 13316 - DNA, 15 bp, Homo sapiens
agactagactacccc

SEQ ID NO: 13317 - DNA, 15 bp, Homo sapiens
cagactagactaccc

SEQ ID NO: 13318 - DNA, 15 bp, Homo sapiens
tcagactagactacc

SEQ ID NO: 13319 - DNA, 15 bp, Homo sapiens
ttcagactagactac

SEQ ID NO: 13320 - DNA, 15 bp, Homo sapiens
gttcagactagacta

SEQ ID NO: 13321 - DNA, 15 bp, Homo sapiens
ggttcagactagact

SEQ ID NO: 13322 - DNA, 15 bp, Homo sapiens
aggttcagactagac

SEQ ID NO: 13323 - DNA, 15 bp, Homo sapiens
gaggttcagactaga

SEQ ID NO: 13324 - DNA, 15 bp, Homo sapiens
agaggttcagactag

SEQ ID NO: 13325 - DNA, 15 bp, Homo sapiens
aagaggttcagacta

SEQ ID NO: 13326 - DNA, 15 bp, Homo sapiens
taagaggttcagact

SEQ ID NO: 13327 - DNA, 15 bp, Homo sapiens
ataagaggttcagac

SEQ ID NO: 13328 - DNA, 15 bp, Homo sapiens
aataagaggttcaga

SEQ ID NO: 13329 - DNA, 15 bp, Homo sapiens
aaataagaggttcag

SEQ ID NO: 13330 - DNA, 15 bp, Homo sapiens
aaaataagaggttca

SEQ ID NO: 13331 - DNA, 15 bp, Homo sapiens
taaaataagaggttc

SEQ ID NO: 13332 - DNA, 15 bp, Homo sapiens
gtaaaataagaggtt

SEQ ID NO: 13333 - DNA, 15 bp, Homo sapiens
cgtaaaataagaggt

SEQ ID NO: 13334 - DNA, 15 bp, Homo sapiens
ccgtaaaataagagg

SEQ ID NO: 13335 - DNA, 15 bp, Homo sapiens
tccgtaaaataagag

SEQ ID NO: 13336 - DNA, 15 bp, Homo sapiens
atccgtaaaataaga

SEQ ID NO: 13337 - DNA, 15 bp, Homo sapiens
catccgtaaaataag

SEQ ID NO: 13338 - DNA, 15 bp, Homo sapiens
tcatccgtaaaataa

SEQ ID NO: 13339 - DNA, 15 bp, Homo sapiens
ctcatccgtaaaata

SEQ ID NO: 13340 - DNA, 15 bp, Homo sapiens
tctcatccgtaaaat

SEQ ID NO: 13341 - DNA, 15 bp, Homo sapiens
ttctcatccgtaaaa

SEQ ID NO: 13342 - DNA, 15 bp, Homo sapiens
tttctcatccgtaaa

SEQ ID NO: 13343 - DNA, 15 bp, Homo sapiens
ctttctcatccgtaa

SEQ ID NO: 13344 - DNA, 15 bp, Homo sapiens
gctttctcatccgta

SEQ ID NO: 13345 - DNA, 15 bp, Homo sapiens
agctttctcatccgt

SEQ ID NO: 13346 - DNA, 15 bp, Homo sapiens
cagctttctcatccg

SEQ ID NO: 13347 - DNA, 15 bp, Homo sapiens
tcagctttctcatcc

SEQ ID NO: 13348 - DNA, 15 bp, Homo sapiens
ctcagctttctcatc

SEQ ID NO: 13349 - DNA, 15 bp, Homo sapiens
cctcagctttctcat

SEQ ID NO: 13350 - DNA, 15 bp, Homo sapiens
acctcagctttctca

SEQ ID NO: 13351 - DNA, 15 bp, Homo sapiens
tacctcagctttctc

SEQ ID NO: 13352 - DNA, 15 bp, Homo sapiens
gtacctcagctttct

SEQ ID NO: 13353 - DNA, 15 bp, Homo sapiens
tgtacctcagctttc

SEQ ID NO: 13354 - DNA, 15 bp, Homo sapiens
ttgtacctcagcttt

SEQ ID NO: 13355 - DNA, 15 bp, Homo sapiens
tttgtacctcagctt

SEQ ID NO: 13356 - DNA, 15 bp, Homo sapiens
ctttgtacctcagct

SEQ ID NO: 13357 - DNA, 15 bp, Homo sapiens
gctttgtacctcagc

SEQ ID NO: 13358 - DNA, 15 bp, Homo sapiens
tgctttgtacctcag

SEQ ID NO: 13359 - DNA, 15 bp, Homo sapiens
ctgctttgtacctca

SEQ ID NO: 13360 - DNA, 15 bp, Homo sapiens
cctgctttgtacctc

SEQ ID NO: 13361 - DNA, 15 bp, Homo sapiens
ccctgctttgtacct

SEQ ID NO: 13362 - DNA, 15 bp, Homo sapiens
tccctgctttgtacc

SEQ ID NO: 13363 - DNA, 15 bp, Homo sapiens
ttccctgctttgtac

SEQ ID NO: 13364 - DNA, 15 bp, Homo sapiens
cttccctgctttgta

SEQ ID NO: 13365 - DNA, 15 bp, Homo sapiens
ccttccctgctttgt

SEQ ID NO: 13366 - DNA, 15 bp, Homo sapiens
cccttccctgctttg

SEQ ID NO: 13367 - DNA, 15 bp, Homo sapiens
tcccttccctgcttt

SEQ ID NO: 13368 - DNA, 15 bp, Homo sapiens
atcccttccctgctt

SEQ ID NO: 13369 - DNA, 15 bp, Homo sapiens
aatcccttccctgct

SEQ ID NO: 13370 - DNA, 15 bp, Homo sapiens
aaatcccttccctgc

SEQ ID NO: 13371 - DNA, 15 bp, Homo sapiens
gaaatcccttccctg

SEQ ID NO: 13372 - DNA, 15 bp, Homo sapiens
agaaatcccttccct

SEQ ID NO: 13373 - DNA, 15 bp, Homo sapiens
aagaaatcccttccc

SEQ ID NO: 13374 - DNA, 15 bp, Homo sapiens
caagaaatcccttcc

SEQ ID NO: 13375 - DNA, 15 bp, Homo sapiens
tcaagaaatcccttc

SEQ ID NO: 13376 - DNA, 15 bp, Homo sapiens
ctcaagaaatccctt

SEQ ID NO: 13377 - DNA, 15 bp, Homo sapiens
cctcaagaaatccct

SEQ ID NO: 13378 - DNA, 15 bp, Homo sapiens
acctcaagaaatccc

SEQ ID NO: 13379 - DNA, 15 bp, Homo sapiens
gacctcaagaaatcc

SEQ ID NO: 13380 - DNA, 15 bp, Homo sapiens
tgacctcaagaaatc

SEQ ID NO: 13381 - DNA, 15 bp, Homo sapiens
gtgacctcaagaaat

SEQ ID NO: 13382 - DNA, 15 bp, Homo sapiens
ggtgacctcaagaaa

SEQ ID NO: 13383 - DNA, 15 bp, Homo sapiens
gggtgacctcaagaa

SEQ ID NO: 13384 - DNA, 15 bp, Homo sapiens
tgggtgacctcaaga

SEQ ID NO: 13385 - DNA, 15 bp, Homo sapiens
ctgggtgacctcaag

SEQ ID NO: 13386 - DNA, 15 bp, Homo sapiens
gctgggtgacctcaa

SEQ ID NO: 13387 - DNA, 15 bp, Homo sapiens
ggctgggtgacctca

SEQ ID NO: 13388 - DNA, 15 bp, Homo sapiens
tggctgggtgacctc

SEQ ID NO: 13389 - DNA, 15 bp, Homo sapiens
ctggctgggtgacct

SEQ ID NO: 13390 - DNA, 15 bp, Homo sapiens
gctggctgggtgacc

SEQ ID NO: 13391 - DNA, 15 bp, Homo sapiens
tgctggctgggtgac

SEQ ID NO: 13392 - DNA, 15 bp, Homo sapiens
ttgctggctgggtga

SEQ ID NO: 13393 - DNA, 15 bp, Homo sapiens
gttgctggctgggtg

SEQ ID NO: 13394 - DNA, 15 bp, Homo sapiens
agttgctggctgggt

SEQ ID NO: 13395 - DNA, 15 bp, Homo sapiens
cagttgctggctggg

SEQ ID NO: 13396 - DNA, 15 bp, Homo sapiens
tcagttgctggctgg

SEQ ID NO: 13397 - DNA, 15 bp, Homo sapiens
ctcagttgctggctg

SEQ ID NO: 13398 - DNA, 15 bp, Homo sapiens
gctcagttgctggct

SEQ ID NO: 13399 - DNA, 15 bp, Homo sapiens
agctcagttgctggc

SEQ ID NO: 13400 - DNA, 15 bp, Homo sapiens
cagctcagttgctgg

SEQ ID NO: 13401 - DNA, 15 bp, Homo sapiens
gcagctcagttgctg

SEQ ID NO: 13402 - DNA, 15 bp, Homo sapiens
tgcagctcagttgct

SEQ ID NO: 13403 - DNA, 15 bp, Homo sapiens
ttgcagctcagttgc

SEQ ID NO: 13404 - DNA, 15 bp, Homo sapiens
gttgcagctcagttg

SEQ ID NO: 13405 - DNA, 15 bp, Homo sapiens
ggttgcagctcagtt

SEQ ID NO: 13406 - DNA, 15 bp, Homo sapiens
tggttgcagctcagt

SEQ ID NO: 13407 - DNA, 15 bp, Homo sapiens
ctggttgcagctcag

SEQ ID NO: 13408 - DNA, 15 bp, Homo sapiens
tctggttgcagctca

SEQ ID NO: 13409 - DNA, 15 bp, Homo sapiens
ttctggttgcagctc

SEQ ID NO: 13410 - DNA, 15 bp, Homo sapiens
cttctggttgcagct

SEQ ID NO: 13411 - DNA, 15 bp, Homo sapiens
gcttctggttgcagc

SEQ ID NO: 13412 - DNA, 15 bp, Homo sapiens
agcttctggttgcag

SEQ ID NO: 13413 - DNA, 15 bp, Homo sapiens
cagcttctggttgca

SEQ ID NO: 13414 - DNA, 15 bp, Homo sapiens
tcagcttctggttgc

SEQ ID NO: 13415 - DNA, 15 bp, Homo sapiens
ctcagcttctggttg

SEQ ID NO: 13416 - DNA, 15 bp, Homo sapiens
tctcagcttctggtt

SEQ ID NO: 13417 - DNA, 15 bp, Homo sapiens
atctcagcttctggt

SEQ ID NO: 13418 - DNA, 15 bp, Homo sapiens
gatctcagcttctgg

SEQ ID NO: 13419 - DNA, 15 bp, Homo sapiens
ggatctcagcttctg

SEQ ID NO: 13420 - DNA, 15 bp, Homo sapiens
gggatctcagcttct

SEQ ID NO: 13421 - DNA, 15 bp, Homo sapiens
ggggatctcagcttc

SEQ ID NO: 13422 - DNA, 15 bp, Homo sapiens
tggggatctcagctt

SEQ ID NO: 13423 - DNA, 15 bp, Homo sapiens
ctggggatctcagct

SEQ ID NO: 13424 - DNA, 15 bp, Homo sapiens
cctggggatctcagc

SEQ ID NO: 13425 - DNA, 15 bp, Homo sapiens
tcctggggatctcag

SEQ ID NO: 13426 - DNA, 15 bp, Homo sapiens
gtcctggggatctca

SEQ ID NO: 13427 - DNA, 15 bp, Homo sapiens
agtcctggggatctc

SEQ ID NO: 13428 - DNA, 15 bp, Homo sapiens
tagtcctggggatct

SEQ ID NO: 13429 - DNA, 15 bp, Homo sapiens
ctagtcctggggatc

SEQ ID NO: 13430 - DNA, 15 bp, Homo sapiens
cctagtcctggggat

SEQ ID NO: 13431 - DNA, 15 bp, Homo sapiens
ccctagtcctgggga

SEQ ID NO: 13432 - DNA, 15 bp, Homo sapiens
gccctagtcctgggg

SEQ ID NO: 13433 - DNA, 15 bp, Homo sapiens
ggccctagtcctggg

SEQ ID NO: 13434 - DNA, 15 bp, Homo sapiens
cggccctagtcctgg

SEQ ID NO: 13435 - DNA, 15 bp, Homo sapiens
tcggccctagtcctg

SEQ ID NO: 13436 - DNA, 15 bp, Homo sapiens
ctcggccctagtcct

SEQ ID NO: 13437 - DNA, 15 bp, Homo sapiens
gctcggccctagtcc

SEQ ID NO: 13438 - DNA, 15 bp, Homo sapiens
ggctcggccctagtc

SEQ ID NO: 13439 - DNA, 15 bp, Homo sapiens
aggctcggccctagt

SEQ ID NO: 13440 - DNA, 15 bp, Homo sapiens
gaggctcggccctag

SEQ ID NO: 13441 - DNA, 15 bp, Homo sapiens
tgaggctcggcccta

SEQ ID NO: 13442 - DNA, 15 bp, Homo sapiens
atgaggctcggccct

SEQ ID NO: 13443 - DNA, 15 bp, Homo sapiens
aatgaggctcggccc

SEQ ID NO: 13444 - DNA, 15 bp, Homo sapiens
gaatgaggctcggcc

SEQ ID NO: 13445 - DNA, 15 bp, Homo sapiens
agaatgaggctcggc

SEQ ID NO: 13446 - DNA, 15 bp, Homo sapiens
cagaatgaggctcgg

SEQ ID NO: 13447 - DNA, 15 bp, Homo sapiens
acagaatgaggctcg

SEQ ID NO: 13448 - DNA, 15 bp, Homo sapiens
gacagaatgaggctc

SEQ ID NO: 13449 - DNA, 15 bp, Homo sapiens
ggacagaatgaggct

SEQ ID NO: 13450 - DNA, 15 bp, Homo sapiens
gggacagaatgaggc

SEQ ID NO: 13451 - DNA, 15 bp, Homo sapiens
tgggacagaatgagg

SEQ ID NO: 13452 - DNA, 15 bp, Homo sapiens
atgggacagaatgag

SEQ ID NO: 13453 - DNA, 15 bp, Homo sapiens
gatgggacagaatga

SEQ ID NO: 13454 - DNA, 15 bp, Homo sapiens
tgatgggacagaatg

SEQ ID NO: 13455 - DNA, 15 bp, Homo sapiens
gtgatgggacagaat

SEQ ID NO: 13456 - DNA, 15 bp, Homo sapiens
tgtgatgggacagaa

SEQ ID NO: 13457 - DNA, 15 bp, Homo sapiens
ctgtgatgggacaga

SEQ ID NO: 13458 - DNA, 15 bp, Homo sapiens
actgtgatgggacag

SEQ ID NO: 13459 - DNA, 15 bp, Homo sapiens
cactgtgatgggaca

SEQ ID NO: 13460 - DNA, 15 bp, Homo sapiens
tcactgtgatgggac

SEQ ID NO: 13461 - DNA, 15 bp, Homo sapiens
gtcactgtgatggga

SEQ ID NO: 13462 - DNA, 15 bp, Homo sapiens
agtcactgtgatggg

SEQ ID NO: 13463 - DNA, 15 bp, Homo sapiens
aagtcactgtgatgg

SEQ ID NO: 13464 - DNA, 15 bp, Homo sapiens
aaagtcactgtgatg

SEQ ID NO: 13465 - DNA, 15 bp, Homo sapiens
aaaagtcactgtgat

SEQ ID NO: 13466 - DNA, 15 bp, Homo sapiens
gaaaagtcactgtga

SEQ ID NO: 13467 - DNA, 15 bp, Homo sapiens
agaaaagtcactgtg

SEQ ID NO: 13468 - DNA, 15 bp, Homo sapiens
aagaaaagtcactgt

SEQ ID NO: 13469 - DNA, 15 bp, Homo sapiens
gaagaaaagtcactg

SEQ ID NO: 13470 - DNA, 15 bp, Homo sapiens
ggaagaaaagtcact

SEQ ID NO: 13471 - DNA, 15 bp, Homo sapiens
gggaagaaaagtcac

SEQ ID NO: 13472 - DNA, 15 bp, Homo sapiens
agggaagaaaagtca

SEQ ID NO: 13473 - DNA, 15 bp, Homo sapiens
gagggaagaaaagtc

SEQ ID NO: 13474 - DNA, 15 bp, Homo sapiens
ggagggaagaaaagt

SEQ ID NO: 13475 - DNA, 15 bp, Homo sapiens
aggagggaagaaaag

SEQ ID NO: 13476 - DNA, 15 bp, Homo sapiens
gaggagggaagaaaa

SEQ ID NO: 13477 - DNA, 15 bp, Homo sapiens
ggaggagggaagaaa

SEQ ID NO: 13478 - DNA, 15 bp, Homo sapiens
tggaggagggaagaa

SEQ ID NO: 13479 - DNA, 15 bp, Homo sapiens
ttggaggagggaaga

SEQ ID NO: 13480 - DNA, 15 bp, Homo sapiens
tttggaggagggaag

SEQ ID NO: 13481 - DNA, 15 bp, Homo sapiens
gtttggaggagggaa

SEQ ID NO: 13482 - DNA, 15 bp, Homo sapiens
agtttggaggaggga

SEQ ID NO: 13483 - DNA, 15 bp, Homo sapiens
tagtttggaggaggg

SEQ ID NO: 13484 - DNA, 15 bp, Homo sapiens
atagtttggaggagg

SEQ ID NO: 13485 - DNA, 15 bp, Homo sapiens
aatagtttggaggag

SEQ ID NO: 13486 - DNA, 15 bp, Homo sapiens
aaatagtttggagga

SEQ ID NO: 13487 - DNA, 15 bp, Homo sapiens
aaaatagtttggagg

SEQ ID NO: 13488 - DNA, 15 bp, Homo sapiens
aaaaatagtttggag

SEQ ID NO: 13489 - DNA, 15 bp, Homo sapiens
taaaaatagtttgga

SEQ ID NO: 13490 - DNA, 15 bp, Homo sapiens
ataaaaatagtttgg

SEQ ID NO: 13491 - DNA, 15 bp, Homo sapiens
aataaaaatagtttg

SEQ ID NO: 13492 - DNA, 15 bp, Homo sapiens
aaataaaaatagttt

SEQ ID NO: 13493 - DNA, 15 bp, Homo sapiens
aaaataaaaatagtt

SEQ ID NO: 13494 - DNA, 15 bp, Homo sapiens
aaaaataaaaatagt

SEQ ID NO: 13495 - DNA, 15 bp, Homo sapiens
aaaaaataaaaatag

SEQ ID NO: 13496 - DNA, 15 bp, Homo sapiens
taaaaaataaaaata

SEQ ID NO: 13497 - DNA, 15 bp, Homo sapiens
ataaaaaataaaaat

SEQ ID NO: 13498 - DNA, 15 bp, Homo sapiens
aataaaaaataaaaa

SEQ ID NO: 13499 - DNA, 15 bp, Homo sapiens
aaataaaaaataaaa

SEQ ID NO: 13500 - DNA, 15 bp, Homo sapiens
aaaataaaaaataaa

SEQ ID NO: 13501 - DNA, 15 bp, Homo sapiens
aaaaataaaaaataa

SEQ ID NO: 13502 - DNA, 15 bp, Homo sapiens
aaaaaataaaaaata

SEQ ID NO: 13503 - DNA, 15 bp, Homo sapiens
aaaaaaataaaaaat

SEQ ID NO: 13504 - DNA, 15 bp, Homo sapiens
caaaaaaataaaaaa

SEQ ID NO: 13505 - DNA, 15 bp, Homo sapiens
gcaaaaaaataaaaa

SEQ ID NO: 13506 - DNA, 15 bp, Homo sapiens
tgcaaaaaaataaaa

SEQ ID NO: 13507 - DNA, 15 bp, Homo sapiens
ctgcaaaaaaataaa

SEQ ID NO: 13508 - DNA, 15 bp, Homo sapiens
gctgcaaaaaaataa

SEQ ID NO: 13509 - DNA, 15 bp, Homo sapiens
agctgcaaaaaaata

SEQ ID NO: 13510 - DNA, 15 bp, Homo sapiens
cagctgcaaaaaaat

SEQ ID NO: 13511 - DNA, 15 bp, Homo sapiens
gcagctgcaaaaaaa

SEQ ID NO: 13512 - DNA, 15 bp, Homo sapiens
agcagctgcaaaaaa

SEQ ID NO: 13513 - DNA, 15 bp, Homo sapiens
aagcagctgcaaaaa

SEQ ID NO: 13514 - DNA, 15 bp, Homo sapiens
taagcagctgcaaaa

SEQ ID NO: 13515 - DNA, 15 bp, Homo sapiens
ctaagcagctgcaaa

SEQ ID NO: 13516 - DNA, 15 bp, Homo sapiens
gctaagcagctgcaa

SEQ ID NO: 13517 - DNA, 15 bp, Homo sapiens
tgctaagcagctgca

SEQ ID NO: 13518 - DNA, 15 bp, Homo sapiens
ctgctaagcagctgc

SEQ ID NO: 13519 - DNA, 15 bp, Homo sapiens
gctgctaagcagctg

SEQ ID NO: 13520 - DNA, 15 bp, Homo sapiens
agctgctaagcagct

SEQ ID NO: 13521 - DNA, 15 bp, Homo sapiens
aagctgctaagcagc

SEQ ID NO: 13522 - DNA, 15 bp, Homo sapiens
caagctgctaagcag

SEQ ID NO: 13523 - DNA, 15 bp, Homo sapiens
tcaagctgctaagca

SEQ ID NO: 13524 - DNA, 15 bp, Homo sapiens
ttcaagctgctaagc

SEQ ID NO: 13525 - DNA, 15 bp, Homo sapiens
cttcaagctgctaag

SEQ ID NO: 13526 - DNA, 15 bp, Homo sapiens
acttcaagctgctaa

SEQ ID NO: 13527 - DNA, 15 bp, Homo sapiens
aacttcaagctgcta

SEQ ID NO: 13528 - DNA, 15 bp, Homo sapiens
taacttcaagctgct

SEQ ID NO: 13529 - DNA, 15 bp, Homo sapiens
ctaacttcaagctgc

SEQ ID NO: 13530 - DNA, 15 bp, Homo sapiens
tctaacttcaagctg

SEQ ID NO: 13531 - DNA, 15 bp, Homo sapiens
ttctaacttcaagct

SEQ ID NO: 13532 - DNA, 15 bp, Homo sapiens
cttctaacttcaagc

SEQ ID NO: 13533 - DNA, 15 bp, Homo sapiens
tcttctaacttcaag

SEQ ID NO: 13534 - DNA, 15 bp, Homo sapiens
ttcttctaacttcaa

SEQ ID NO: 13535 - DNA, 15 bp, Homo sapiens
tttcttctaacttca

SEQ ID NO: 13536 - DNA, 15 bp, Homo sapiens
ctttcttctaacttc

SEQ ID NO: 13537 - DNA, 15 bp, Homo sapiens
cctttcttctaactt

SEQ ID NO: 13538 - DNA, 15 bp, Homo sapiens
ccctttcttctaact

SEQ ID NO: 13539 - DNA, 15 bp, Homo sapiens
gccctttcttctaac

SEQ ID NO: 13540 - DNA, 15 bp, Homo sapiens
tgccctttcttctaa

SEQ ID NO: 13541 - DNA, 15 bp, Homo sapiens
ctgccctttcttcta

SEQ ID NO: 13542 - DNA, 15 bp, Homo sapiens
cctgccctttcttct

SEQ ID NO: 13543 - DNA, 15 bp, Homo sapiens
ccctgccctttcttc

SEQ ID NO: 13544 - DNA, 15 bp, Homo sapiens
tccctgccctttctt

SEQ ID NO: 13545 - DNA, 15 bp, Homo sapiens
ttccctgccctttct

SEQ ID NO: 13546 - DNA, 15 bp, Homo sapiens
tttccctgccctttc

SEQ ID NO: 13547 - DNA, 15 bp, Homo sapiens
ttttccctgcccttt

SEQ ID NO: 13548 - DNA, 15 bp, Homo sapiens
cttttccctgccctt

SEQ ID NO: 13549 - DNA, 15 bp, Homo sapiens
ccttttccctgccct

SEQ ID NO: 13550 - DNA, 15 bp, Homo sapiens
accttttccctgccc

SEQ ID NO: 13551 - DNA, 15 bp, Homo sapiens
aaccttttccctgcc

SEQ ID NO: 13552 - DNA, 15 bp, Homo sapiens
aaaccttttccctgc

SEQ ID NO: 13553 - DNA, 15 bp, Homo sapiens
aaaaccttttccctg

SEQ ID NO: 13554 - DNA, 15 bp, Homo sapiens
gaaaaccttttccct

SEQ ID NO: 13555 - DNA, 15 bp, Homo sapiens
ggaaaaccttttccc

SEQ ID NO: 13556 - DNA, 15 bp, Homo sapiens
cggaaaaccttttcc

SEQ ID NO: 13557 - DNA, 15 bp, Homo sapiens
acggaaaaccttttc

SEQ ID NO: 13558 - DNA, 15 bp, Homo sapiens
cacggaaaacctttt

SEQ ID NO: 13559 - DNA, 15 bp, Homo sapiens
gcacggaaaaccttt

SEQ ID NO: 13560 - DNA, 15 bp, Homo sapiens
agcacggaaaacctt

SEQ ID NO: 13561 - DNA, 15 bp, Homo sapiens
aagcacggaaaacct

SEQ ID NO: 13562 - DNA, 15 bp, Homo sapiens
taagcacggaaaacc

SEQ ID NO: 13563 - DNA, 15 bp, Homo sapiens
ctaagcacggaaaac

SEQ ID NO: 13564 - DNA, 15 bp, Homo sapiens
gctaagcacggaaaa

SEQ ID NO: 13565 - DNA, 15 bp, Homo sapiens
ggctaagcacggaaa

SEQ ID NO: 13566 - DNA, 15 bp, Homo sapiens
tggctaagcacggaa

SEQ ID NO: 13567 - DNA, 15 bp, Homo sapiens
ctggctaagcacgga

SEQ ID NO: 13568 - DNA, 15 bp, Homo sapiens
cctggctaagcacgg

SEQ ID NO: 13569 - DNA, 15 bp, Homo sapiens
ccctggctaagcacg

SEQ ID NO: 13570 - DNA, 15 bp, Homo sapiens
tccctggctaagcac

SEQ ID NO: 13571 - DNA, 15 bp, Homo sapiens
ttccctggctaagca

SEQ ID NO: 13572 - DNA, 15 bp, Homo sapiens
cttccctggctaagc

SEQ ID NO: 13573 - DNA, 15 bp, Homo sapiens
ccttccctggctaag

SEQ ID NO: 13574 - DNA, 15 bp, Homo sapiens
tccttccctggctaa

SEQ ID NO: 13575 - DNA, 15 bp, Homo sapiens
ttccttccctggcta

SEQ ID NO: 13576 - DNA, 15 bp, Homo sapiens
attccttccctggct

SEQ ID NO: 13577 - DNA, 15 bp, Homo sapiens
gattccttccctggc

SEQ ID NO: 13578 - DNA, 15 bp, Homo sapiens
ggattccttccctgg

SEQ ID NO: 13579 - DNA, 15 bp, Homo sapiens
aggattccttccctg

SEQ ID NO: 13580 - DNA, 15 bp, Homo sapiens
caggattccttccct

SEQ ID NO: 13581 - DNA, 15 bp, Homo sapiens
gcaggattccttccc

SEQ ID NO: 13582 - DNA, 15 bp, Homo sapiens
tgcaggattccttcc

SEQ ID NO: 13583 - DNA, 15 bp, Homo sapiens
ttgcaggattccttc

SEQ ID NO: 13584 - DNA, 15 bp, Homo sapiens
gttgcaggattcctt

SEQ ID NO: 13585 - DNA, 15 bp, Homo sapiens
tgttgcaggattcct

SEQ ID NO: 13586 - DNA, 15 bp, Homo sapiens
ctgttgcaggattcc

SEQ ID NO: 13587 - DNA, 15 bp, Homo sapiens
cctgttgcaggattc

SEQ ID NO: 13588 - DNA, 15 bp, Homo sapiens
tcctgttgcaggatt

SEQ ID NO: 13589 - DNA, 15 bp, Homo sapiens
atcctgttgcaggat

SEQ ID NO: 13590 - DNA, 15 bp, Homo sapiens
catcctgttgcagga

SEQ ID NO: 13591 - DNA, 15 bp, Homo sapiens
acatcctgttgcagg

SEQ ID NO: 13592 - DNA, 15 bp, Homo sapiens
cacatcctgttgcag

SEQ ID NO: 13593 - DNA, 15 bp, Homo sapiens
ccacatcctgttgca

SEQ ID NO: 13594 - DNA, 15 bp, Homo sapiens
cccacatcctgttgc

SEQ ID NO: 13595 - DNA, 15 bp, Homo sapiens
ccccacatcctgttg

SEQ ID NO: 13596 - DNA, 15 bp, Homo sapiens
accccacatcctgtt

SEQ ID NO: 13597 - DNA, 15 bp, Homo sapiens
aaccccacatcctgt

SEQ ID NO: 13598 - DNA, 15 bp, Homo sapiens
caaccccacatcctg

SEQ ID NO: 13599 - DNA, 15 bp, Homo sapiens
ccaaccccacatcct

SEQ ID NO: 13600 - DNA, 15 bp, Homo sapiens
cccaaccccacatcc

SEQ ID NO: 13601 - DNA, 15 bp, Homo sapiens
acccaaccccacatc

SEQ ID NO: 13602 - DNA, 15 bp, Homo sapiens
gacccaaccccacat

SEQ ID NO: 13603 - DNA, 15 bp, Homo sapiens
tgacccaaccccaca

SEQ ID NO: 13604 - DNA, 15 bp, Homo sapiens
atgacccaaccccac

SEQ ID NO: 13605 - DNA, 15 bp, Homo sapiens
aatgacccaacccca

SEQ ID NO: 13606 - DNA, 15 bp, Homo sapiens
gaatgacccaacccc

SEQ ID NO: 13607 - DNA, 15 bp, Homo sapiens
tgaatgacccaaccc

SEQ ID NO: 13608 - DNA, 15 bp, Homo sapiens
ttgaatgacccaacc

SEQ ID NO: 13609 - DNA, 15 bp, Homo sapiens
tttgaatgacccaac

SEQ ID NO: 13610 - DNA, 15 bp, Homo sapiens
atttgaatgacccaa

SEQ ID NO: 13611 - DNA, 15 bp, Homo sapiens
aatttgaatgaccca

SEQ ID NO: 13612 - DNA, 15 bp, Homo sapiens
caatttgaatgaccc

SEQ ID NO: 13613 - DNA, 15 bp, Homo sapiens
ccaatttgaatgacc

SEQ ID NO: 13614 - DNA, 15 bp, Homo sapiens
cccaatttgaatgac

SEQ ID NO: 13615 - DNA, 15 bp, Homo sapiens
gcccaatttgaatga

SEQ ID NO: 13616 - DNA, 15 bp, Homo sapiens
ggcccaatttgaatg

SEQ ID NO: 13617 - DNA, 15 bp, Homo sapiens
tggcccaatttgaat

SEQ ID NO: 13618 - DNA, 15 bp, Homo sapiens
ctggcccaatttgaa

SEQ ID NO: 13619 - DNA, 15 bp, Homo sapiens
tctggcccaatttga

SEQ ID NO: 13620 - DNA, 15 bp, Homo sapiens
gtctggcccaatttg

SEQ ID NO: 13621 - DNA, 15 bp, Homo sapiens
agtctggcccaattt

SEQ ID NO: 13622 - DNA, 15 bp, Homo sapiens
gagtctggcccaatt

SEQ ID NO: 13623 - DNA, 15 bp, Homo sapiens
ggagtctggcccaat

SEQ ID NO: 13624 - DNA, 15 bp, Homo sapiens
tggagtctggcccaa

SEQ ID NO: 13625 - DNA, 15 bp, Homo sapiens
gtggagtctggccca

SEQ ID NO: 13626 - DNA, 15 bp, Homo sapiens
agtggagtctggccc

SEQ ID NO: 13627 - DNA, 15 bp, Homo sapiens
cagtggagtctggcc

SEQ ID NO: 13628 - DNA, 15 bp, Homo sapiens
ccagtggagtctggc

SEQ ID NO: 13629 - DNA, 15 bp, Homo sapiens
accagtggagtctgg

SEQ ID NO: 13630 - DNA, 15 bp, Homo sapiens
gaccagtggagtctg

SEQ ID NO: 13631 - DNA, 15 bp, Homo sapiens
agaccagtggagtct

SEQ ID NO: 13632 - DNA, 15 bp, Homo sapiens
aagaccagtggagtc

SEQ ID NO: 13633 - DNA, 15 bp, Homo sapiens
caagaccagtggagt

SEQ ID NO: 13634 - DNA, 15 bp, Homo sapiens
acaagaccagtggag

SEQ ID NO: 13635 - DNA, 15 bp, Homo sapiens
aacaagaccagtgga

SEQ ID NO: 13636 - DNA, 15 bp, Homo sapiens
caacaagaccagtgg

SEQ ID NO: 13637 - DNA, 15 bp, Homo sapiens
gcaacaagaccagtg

SEQ ID NO: 13638 - DNA, 15 bp, Homo sapiens
agcaacaagaccagt

SEQ ID NO: 13639 - DNA, 15 bp, Homo sapiens
aagcaacaagaccag

SEQ ID NO: 13640 - DNA, 15 bp, Homo sapiens
gaagcaacaagacca

SEQ ID NO: 13641 - DNA, 15 bp, Homo sapiens
agaagcaacaagacc

SEQ ID NO: 13642 - DNA, 15 bp, Homo sapiens
aagaagcaacaagac

SEQ ID NO: 13643 - DNA, 15 bp, Homo sapiens
caagaagcaacaaga

SEQ ID NO: 13644 - DNA, 15 bp, Homo sapiens
gcaagaagcaacaag

SEQ ID NO: 13645 - DNA, 15 bp, Homo sapiens
agcaagaagcaacaa

SEQ ID NO: 13646 - DNA, 15 bp, Homo sapiens
aagcaagaagcaaca

SEQ ID NO: 13647 - DNA, 15 bp, Homo sapiens
caagcaagaagcaac

SEQ ID NO: 13648 - DNA, 15 bp, Homo sapiens
ccaagcaagaagcaa

SEQ ID NO: 13649 - DNA, 15 bp, Homo sapiens
accaagcaagaagca

SEQ ID NO: 13650 - DNA, 15 bp, Homo sapiens
taccaagcaagaagc

SEQ ID NO: 13651 - DNA, 15 bp, Homo sapiens
ataccaagcaagaag

SEQ ID NO: 13652 - DNA, 15 bp, Homo sapiens
aataccaagcaagaa

SEQ ID NO: 13653 - DNA, 15 bp, Homo sapiens
caataccaagcaaga

SEQ ID NO: 13654 - DNA, 15 bp, Homo sapiens
gcaataccaagcaag

SEQ ID NO: 13655 - DNA, 15 bp, Homo sapiens
tgcaataccaagcaa

SEQ ID NO: 13656 - DNA, 15 bp, Homo sapiens
ctgcaataccaagca

SEQ ID NO: 13657 - DNA, 15 bp, Homo sapiens
tctgcaataccaagc

SEQ ID NO: 13658 - DNA, 15 bp, Homo sapiens
atctgcaataccaag

SEQ ID NO: 13659 - DNA, 15 bp, Homo sapiens
catctgcaataccaa

SEQ ID NO: 13660 - DNA, 15 bp, Homo sapiens
ccatctgcaatacca

SEQ ID NO: 13661 - DNA, 15 bp, Homo sapiens
cccatctgcaatacc

SEQ ID NO: 13662 - DNA, 15 bp, Homo sapiens
acccatctgcaatac

SEQ ID NO: 13663 - DNA, 15 bp, Homo sapiens
aacccatctgcaata

SEQ ID NO: 13664 - DNA, 15 bp, Homo sapiens
aaacccatctgcaat

SEQ ID NO: 13665 - DNA, 15 bp, Homo sapiens
taaacccatctgcaa

SEQ ID NO: 13666 - DNA, 15 bp, Homo sapiens
ttaaacccatctgca

SEQ ID NO: 13667 - DNA, 15 bp, Homo sapiens
tttaaacccatctgc

SEQ ID NO: 13668 - DNA, 15 bp, Homo sapiens
ttttaaacccatctg

SEQ ID NO: 13669 - DNA, 15 bp, Homo sapiens
cttttaaacccatct

SEQ ID NO: 13670 - DNA, 15 bp, Homo sapiens
acttttaaacccatc

SEQ ID NO: 13671 - DNA, 15 bp, Homo sapiens
cacttttaaacccat

SEQ ID NO: 13672 - DNA, 15 bp, Homo sapiens
acacttttaaaccca

SEQ ID NO: 13673 - DNA, 15 bp, Homo sapiens
aacacttttaaaccc

SEQ ID NO: 13674 - DNA, 15 bp, Homo sapiens
taacacttttaaacc

SEQ ID NO: 13675 - DNA, 15 bp, Homo sapiens
ctaacacttttaaac

SEQ ID NO: 13676 - DNA, 15 bp, Homo sapiens
cctaacacttttaaa

SEQ ID NO: 13677 - DNA, 15 bp, Homo sapiens
tcctaacacttttaa

SEQ ID NO: 13678 - DNA, 15 bp, Homo sapiens
atcctaacactttta

SEQ ID NO: 13679 - DNA, 15 bp, Homo sapiens
aatcctaacactttt

SEQ ID NO: 13680 - DNA, 15 bp, Homo sapiens
taatcctaacacttt

SEQ ID NO: 13681 - DNA, 15 bp, Homo sapiens
ctaatcctaacactt

SEQ ID NO: 13682 - DNA, 15 bp, Homo sapiens
tctaatcctaacact

SEQ ID NO: 13683 - DNA, 15 bp, Homo sapiens
ctctaatcctaacac

SEQ ID NO: 13684 - DNA, 15 bp, Homo sapiens
tctctaatcctaaca

SEQ ID NO: 13685 - DNA, 15 bp, Homo sapiens
ctctctaatcctaac

SEQ ID NO: 13686 - DNA, 15 bp, Homo sapiens
tctctctaatcctaa

SEQ ID NO: 13687 - DNA, 15 bp, Homo sapiens
atctctctaatccta

SEQ ID NO: 13688 - DNA, 15 bp, Homo sapiens
tatctctctaatcct

SEQ ID NO: 13689 - DNA, 15 bp, Homo sapiens
ctatctctctaatcc

SEQ ID NO: 13690 - DNA, 15 bp, Homo sapiens
cctatctctctaatc

SEQ ID NO: 13691 - DNA, 15 bp, Homo sapiens
gcctatctctctaat

SEQ ID NO: 13692 - DNA, 15 bp, Homo sapiens
tgcctatctctctaa

SEQ ID NO: 13693 - DNA, 15 bp, Homo sapiens
ctgcctatctctcta

SEQ ID NO: 13694 - DNA, 15 bp, Homo sapiens
cctgcctatctctct

SEQ ID NO: 13695 - DNA, 15 bp, Homo sapiens
acctgcctatctctc

SEQ ID NO: 13696 - DNA, 15 bp, Homo sapiens
aacctgcctatctct

SEQ ID NO: 13697 - DNA, 15 bp, Homo sapiens
aaacctgcctatctc

SEQ ID NO: 13698 - DNA, 15 bp, Homo sapiens
taaacctgcctatct

SEQ ID NO: 13699 - DNA, 15 bp, Homo sapiens
ctaaacctgcctatc

SEQ ID NO: 13700 - DNA, 15 bp, Homo sapiens
gctaaacctgcctat

SEQ ID NO: 13701 - DNA, 15 bp, Homo sapiens
ggctaaacctgccta

SEQ ID NO: 13702 - DNA, 15 bp, Homo sapiens
tggctaaacctgcct

SEQ ID NO: 13703 - DNA, 15 bp, Homo sapiens
ttggctaaacctgcc

SEQ ID NO: 13704 - DNA, 15 bp, Homo sapiens
tttggctaaacctgc

SEQ ID NO: 13705 - DNA, 15 bp, Homo sapiens
ctttggctaaacctg

SEQ ID NO: 13706 - DNA, 15 bp, Homo sapiens
cctttggctaaacct

SEQ ID NO: 13707 - DNA, 15 bp, Homo sapiens
gcctttggctaaacc

SEQ ID NO: 13708 - DNA, 15 bp, Homo sapiens
tgcctttggctaaac

SEQ ID NO: 13709 - DNA, 15 bp, Homo sapiens
ctgcctttggctaaa

SEQ ID NO: 13710 - DNA, 15 bp, Homo sapiens
actgcctttggctaa

SEQ ID NO: 13711 - DNA, 15 bp, Homo sapiens
aactgcctttggcta

SEQ ID NO: 13712 - DNA, 15 bp, Homo sapiens
aaactgcctttggct

SEQ ID NO: 13713 - DNA, 15 bp, Homo sapiens
caaactgcctttggc

SEQ ID NO: 13714 - DNA, 15 bp, Homo sapiens
acaaactgcctttgg

SEQ ID NO: 13715 - DNA, 15 bp, Homo sapiens
tacaaactgcctttg

SEQ ID NO: 13716 - DNA, 15 bp, Homo sapiens
ctacaaactgccttt

SEQ ID NO: 13717 - DNA, 15 bp, Homo sapiens
gctacaaactgcctt

SEQ ID NO: 13718 - DNA, 15 bp, Homo sapiens
ggctacaaactgcct

SEQ ID NO: 13719 - DNA, 15 bp, Homo sapiens
aggctacaaactgcc

SEQ ID NO: 13720 - DNA, 15 bp, Homo sapiens
aaggctacaaactgc

SEQ ID NO: 13721 - DNA, 15 bp, Homo sapiens
caaggctacaaactg

SEQ ID NO: 13722 - DNA, 15 bp, Homo sapiens
acaaggctacaaact

SEQ ID NO: 13723 - DNA, 15 bp, Homo sapiens
cacaaggctacaaac

SEQ ID NO: 13724 - DNA, 15 bp, Homo sapiens
ccacaaggctacaaa

SEQ ID NO: 13725 - DNA, 15 bp, Homo sapiens
gccacaaggctacaa

SEQ ID NO: 13726 - DNA, 15 bp, Homo sapiens
tgccacaaggctaca

SEQ ID NO: 13727 - DNA, 15 bp, Homo sapiens
ctgccacaaggctac

SEQ ID NO: 13728 - DNA, 15 bp, Homo sapiens
tctgccacaaggcta

SEQ ID NO: 13729 - DNA, 15 bp, Homo sapiens
ctctgccacaaggct

SEQ ID NO: 13730 - DNA, 15 bp, Homo sapiens
actctgccacaaggc

SEQ ID NO: 13731 - DNA, 15 bp, Homo sapiens
aactctgccacaagg

SEQ ID NO: 13732 - DNA, 15 bp, Homo sapiens
gaactctgccacaag

SEQ ID NO: 13733 - DNA, 15 bp, Homo sapiens
agaactctgccacaa

SEQ ID NO: 13734 - DNA, 15 bp, Homo sapiens
aagaactctgccaca

SEQ ID NO: 13735 - DNA, 15 bp, Homo sapiens
aaagaactctgccac

SEQ ID NO: 13736 - DNA, 15 bp, Homo sapiens
aaaagaactctgcca

SEQ ID NO: 13737 - DNA, 15 bp, Homo sapiens
aaaaagaactctgcc

SEQ ID NO: 13738 - DNA, 15 bp, Homo sapiens
taaaaagaactctgc

SEQ ID NO: 13739 - DNA, 15 bp, Homo sapiens
ttaaaaagaactctg

SEQ ID NO: 13740 - DNA, 15 bp, Homo sapiens
tttaaaaagaactct

SEQ ID NO: 13741 - DNA, 15 bp, Homo sapiens
ctttaaaaagaactc

SEQ ID NO: 13742 - DNA, 15 bp, Homo sapiens
tctttaaaaagaact

SEQ ID NO: 13743 - DNA, 15 bp, Homo sapiens
ttctttaaaaagaac

SEQ ID NO: 13744 - DNA, 15 bp, Homo sapiens
cttctttaaaaagaa

SEQ ID NO: 13745 - DNA, 15 bp, Homo sapiens
ccttctttaaaaaga

SEQ ID NO: 13746 - DNA, 15 bp, Homo sapiens
tccttctttaaaaag

SEQ ID NO: 13747 - DNA, 15 bp, Homo sapiens
ttccttctttaaaaa

SEQ ID NO: 13748 - DNA, 15 bp, Homo sapiens
cttccttctttaaaa

SEQ ID NO: 13749 - DNA, 15 bp, Homo sapiens
acttccttctttaaa

SEQ ID NO: 13750 - DNA, 15 bp, Homo sapiens
cacttccttctttaa

SEQ ID NO: 13751 - DNA, 15 bp, Homo sapiens
ccacttccttcttta

SEQ ID NO: 13752 - DNA, 15 bp, Homo sapiens
cccacttccttcttt

SEQ ID NO: 13753 - DNA, 15 bp, Homo sapiens
tcccacttccttctt

SEQ ID NO: 13754 - DNA, 15 bp, Homo sapiens
atcccacttccttct

SEQ ID NO: 13755 - DNA, 15 bp, Homo sapiens
catcccacttccttc

SEQ ID NO: 13756 - DNA, 15 bp, Homo sapiens
gcatcccacttcctt

SEQ ID NO: 13757 - DNA, 15 bp, Homo sapiens
tgcatcccacttcct

SEQ ID NO: 13758 - DNA, 15 bp, Homo sapiens
ttgcatcccacttcc

SEQ ID NO: 13759 - DNA, 15 bp, Homo sapiens
gttgcatcccacttc

SEQ ID NO: 13760 - DNA, 15 bp, Homo sapiens
tgttgcatcccactt

SEQ ID NO: 13761 - DNA, 15 bp, Homo sapiens
gtgttgcatcccact

SEQ ID NO: 13762 - DNA, 15 bp, Homo sapiens
ggtgttgcatcccac

SEQ ID NO: 13763 - DNA, 15 bp, Homo sapiens
gggtgttgcatccca

SEQ ID NO: 13764 - DNA, 15 bp, Homo sapiens
agggtgttgcatccc

SEQ ID NO: 13765 - DNA, 15 bp, Homo sapiens
cagggtgttgcatcc

SEQ ID NO: 13766 - DNA, 15 bp, Homo sapiens
tcagggtgttgcatc

SEQ ID NO: 13767 - DNA, 15 bp, Homo sapiens
gtcagggtgttgcat

SEQ ID NO: 13768 - DNA, 15 bp, Homo sapiens
tgtcagggtgttgca

SEQ ID NO: 13769 - DNA, 15 bp, Homo sapiens
gtgtcagggtgttgc

SEQ ID NO: 13770 - DNA, 15 bp, Homo sapiens
tgtgtcagggtgttg

SEQ ID NO: 13771 - DNA, 15 bp, Homo sapiens
ttgtgtcagggtgtt

SEQ ID NO: 13772 - DNA, 15 bp, Homo sapiens
tttgtgtcagggtgt

SEQ ID NO: 13773 - DNA, 15 bp, Homo sapiens
ctttgtgtcagggtg

SEQ ID NO: 13774 - DNA, 15 bp, Homo sapiens
cctttgtgtcagggt

SEQ ID NO: 13775 - DNA, 15 bp, Homo sapiens
ccctttgtgtcaggg

SEQ ID NO: 13776 - DNA, 15 bp, Homo sapiens
cccctttgtgtcagg

SEQ ID NO: 13777 - DNA, 15 bp, Homo sapiens
gcccctttgtgtcag

SEQ ID NO: 13778 - DNA, 15 bp, Homo sapiens
agcccctttgtgtca

SEQ ID NO: 13779 - DNA, 15 bp, Homo sapiens
aagcccctttgtgtc

SEQ ID NO: 13780 - DNA, 15 bp, Homo sapiens
taagcccctttgtgt

SEQ ID NO: 13781 - DNA, 15 bp, Homo sapiens
ttaagcccctttgtg

SEQ ID NO: 13782 - DNA, 15 bp, Homo sapiens
cttaagcccctttgt

SEQ ID NO: 13783 - DNA, 15 bp, Homo sapiens
acttaagcccctttg

SEQ ID NO: 13784 - DNA, 15 bp, Homo sapiens
aacttaagccccttt

SEQ ID NO: 13785 - DNA, 15 bp, Homo sapiens
caacttaagcccctt

SEQ ID NO: 13786 - DNA, 15 bp, Homo sapiens
acaacttaagcccct

SEQ ID NO: 13787 - DNA, 15 bp, Homo sapiens
aacaacttaagcccc

SEQ ID NO: 13788 - DNA, 15 bp, Homo sapiens
taacaacttaagccc

SEQ ID NO: 13789 - DNA, 15 bp, Homo sapiens
ataacaacttaagcc

SEQ ID NO: 13790 - DNA, 15 bp, Homo sapiens
tataacaacttaagc

SEQ ID NO: 13791 - DNA, 15 bp, Homo sapiens
gtataacaacttaag

SEQ ID NO: 13792 - DNA, 15 bp, Homo sapiens
ggtataacaacttaa

SEQ ID NO: 13793 - DNA, 15 bp, Homo sapiens
tggtataacaactta

SEQ ID NO: 13794 - DNA, 15 bp, Homo sapiens
gtggtataacaactt

SEQ ID NO: 13795 - DNA, 15 bp, Homo sapiens
agtggtataacaact

SEQ ID NO: 13796 - DNA, 15 bp, Homo sapiens
cagtggtataacaac

SEQ ID NO: 13797 - DNA, 15 bp, Homo sapiens
gcagtggtataacaa

SEQ ID NO: 13798 - DNA, 15 bp, Homo sapiens
ggcagtggtataaca

SEQ ID NO: 13799 - DNA, 15 bp, Homo sapiens
aggcagtggtataac

SEQ ID NO: 13800 - DNA, 15 bp, Homo sapiens
caggcagtggtataa

SEQ ID NO: 13801 - DNA, 15 bp, Homo sapiens
gcaggcagtggtata

SEQ ID NO: 13802 - DNA, 15 bp, Homo sapiens
agcaggcagtggtat

SEQ ID NO: 13803 - DNA, 15 bp, Homo sapiens
tagcaggcagtggta

SEQ ID NO: 13804 - DNA, 15 bp, Homo sapiens
ttagcaggcagtggt

SEQ ID NO: 13805 - DNA, 15 bp, Homo sapiens
gttagcaggcagtgg

SEQ ID NO: 13806 - DNA, 15 bp, Homo sapiens
ggttagcaggcagtg

SEQ ID NO: 13807 - DNA, 15 bp, Homo sapiens
aggttagcaggcagt

SEQ ID NO: 13808 - DNA, 15 bp, Homo sapiens
caggttagcaggcag

SEQ ID NO: 13809 - DNA, 15 bp, Homo sapiens
acaggttagcaggca

SEQ ID NO: 13810 - DNA, 15 bp, Homo sapiens
aacaggttagcaggc

SEQ ID NO: 13811 - DNA, 15 bp, Homo sapiens
aaacaggttagcagg

SEQ ID NO: 13812 - DNA, 15 bp, Homo sapiens
aaaacaggttagcag

SEQ ID NO: 13813 - DNA, 15 bp, Homo sapiens
gaaaacaggttagca

SEQ ID NO: 13814 - DNA, 15 bp, Homo sapiens
ggaaaacaggttagc

SEQ ID NO: 13815 - DNA, 15 bp, Homo sapiens
aggaaaacaggttag

SEQ ID NO: 13816 - DNA, 15 bp, Homo sapiens
aaggaaaacaggtta

SEQ ID NO: 13817 - DNA, 15 bp, Homo sapiens
taaggaaaacaggtt

SEQ ID NO: 13818 - DNA, 15 bp, Homo sapiens
ttaaggaaaacaggt

SEQ ID NO: 13819 - DNA, 15 bp, Homo sapiens
gttaaggaaaacagg

SEQ ID NO: 13820 - DNA, 15 bp, Homo sapiens
agttaaggaaaacag

SEQ ID NO: 13821 - DNA, 15 bp, Homo sapiens
gagttaaggaaaaca

SEQ ID NO: 13822 - DNA, 15 bp, Homo sapiens
agagttaaggaaaac

SEQ ID NO: 13823 - DNA, 15 bp, Homo sapiens
gagagttaaggaaaa

SEQ ID NO: 13824 - DNA, 15 bp, Homo sapiens
agagagttaaggaaa

SEQ ID NO: 13825 - DNA, 15 bp, Homo sapiens
aagagagttaaggaa

SEQ ID NO: 13826 - DNA, 15 bp, Homo sapiens
gaagagagttaagga

SEQ ID NO: 13827 - DNA, 15 bp, Homo sapiens
ggaagagagttaagg

SEQ ID NO: 13828 - DNA, 15 bp, Homo sapiens
aggaagagagttaag

SEQ ID NO: 13829 - DNA, 15 bp, Homo sapiens
caggaagagagttaa

SEQ ID NO: 13830 - DNA, 15 bp, Homo sapiens
tcaggaagagagtta

SEQ ID NO: 13831 - DNA, 15 bp, Homo sapiens
atcaggaagagagtt

SEQ ID NO: 13832 - DNA, 15 bp, Homo sapiens
aatcaggaagagagt

SEQ ID NO: 13833 - DNA, 15 bp, Homo sapiens
aaatcaggaagagag

SEQ ID NO: 13834 - DNA, 15 bp, Homo sapiens
gaaatcaggaagaga

SEQ ID NO: 13835 - DNA, 15 bp, Homo sapiens
agaaatcaggaagag

SEQ ID NO: 13836 - DNA, 15 bp, Homo sapiens
tagaaatcaggaaga

SEQ ID NO: 13837 - DNA, 15 bp, Homo sapiens
ttagaaatcaggaag

SEQ ID NO: 13838 - DNA, 15 bp, Homo sapiens
tttagaaatcaggaa

SEQ ID NO: 13839 - DNA, 15 bp, Homo sapiens
ctttagaaatcagga

SEQ ID NO: 13840 - DNA, 15 bp, Homo sapiens
cctttagaaatcagg

SEQ ID NO: 13841 - DNA, 15 bp, Homo sapiens
tcctttagaaatcag

SEQ ID NO: 13842 - DNA, 15 bp, Homo sapiens
ttcctttagaaatca

SEQ ID NO: 13843 - DNA, 15 bp, Homo sapiens
cttcctttagaaatc

SEQ ID NO: 13844 - DNA, 15 bp, Homo sapiens
acttcctttagaaat

SEQ ID NO: 13845 - DNA, 15 bp, Homo sapiens
tacttcctttagaaa

SEQ ID NO: 13846 - DNA, 15 bp, Homo sapiens
atacttcctttagaa

SEQ ID NO: 13847 - DNA, 15 bp, Homo sapiens
tatacttcctttaga

SEQ ID NO: 13848 - DNA, 15 bp, Homo sapiens
atatacttcctttag

SEQ ID NO: 13849 - DNA, 15 bp, Homo sapiens
aatatacttccttta

SEQ ID NO: 13850 - DNA, 15 bp, Homo sapiens
aaatatacttccttt

SEQ ID NO: 13851 - DNA, 15 bp, Homo sapiens
aaaatatacttcctt

SEQ ID NO: 13852 - DNA, 15 bp, Homo sapiens
caaaatatacttcct

SEQ ID NO: 13853 - DNA, 15 bp, Homo sapiens
gcaaaatatacttcc

SEQ ID NO: 13854 - DNA, 15 bp, Homo sapiens
agcaaaatatacttc

SEQ ID NO: 13855 - DNA, 15 bp, Homo sapiens
cagcaaaatatactt

SEQ ID NO: 13856 - DNA, 15 bp, Homo sapiens
tcagcaaaatatact

SEQ ID NO: 13857 - DNA, 15 bp, Homo sapiens
ttcagcaaaatatac

SEQ ID NO: 13858 - DNA, 15 bp, Homo sapiens
attcagcaaaatata

SEQ ID NO: 13859 - DNA, 15 bp, Homo sapiens
gattcagcaaaatat

SEQ ID NO: 13860 - DNA, 15 bp, Homo sapiens
tgattcagcaaaata

SEQ ID NO: 13861 - DNA, 15 bp, Homo sapiens
ctgattcagcaaaat

SEQ ID NO: 13862 - DNA, 15 bp, Homo sapiens
tctgattcagcaaaa

SEQ ID NO: 13863 - DNA, 15 bp, Homo sapiens
ttctgattcagcaaa

SEQ ID NO: 13864 - DNA, 15 bp, Homo sapiens
tttctgattcagcaa

SEQ ID NO: 13865 - DNA, 15 bp, Homo sapiens
ctttctgattcagca

SEQ ID NO: 13866 - DNA, 15 bp, Homo sapiens
tctttctgattcagc

SEQ ID NO: 13867 - DNA, 15 bp, Homo sapiens
ttctttctgattcag

SEQ ID NO: 13868 - DNA, 15 bp, Homo sapiens
tttctttctgattca

SEQ ID NO: 13869 - DNA, 15 bp, Homo sapiens
ttttctttctgattc

SEQ ID NO: 13870 - DNA, 15 bp, Homo sapiens
cttttctttctgatt

SEQ ID NO: 13871 - DNA, 15 bp, Homo sapiens
acttttctttctgat

SEQ ID NO: 13872 - DNA, 15 bp, Homo sapiens
cacttttctttctga

SEQ ID NO: 13873 - DNA, 15 bp, Homo sapiens
tcacttttctttctg

SEQ ID NO: 13874 - DNA, 15 bp, Homo sapiens
atcacttttctttct

SEQ ID NO: 13875 - DNA, 15 bp, Homo sapiens
aatcacttttctttc

SEQ ID NO: 13876 - DNA, 15 bp, Homo sapiens
aaatcacttttcttt

SEQ ID NO: 13877 - DNA, 15 bp, Homo sapiens
taaatcacttttctt

SEQ ID NO: 13878 - DNA, 15 bp, Homo sapiens
ataaatcacttttct

SEQ ID NO: 13879 - DNA, 15 bp, Homo sapiens
aataaatcacttttc

SEQ ID NO: 13880 - DNA, 15 bp, Homo sapiens
aaataaatcactttt

SEQ ID NO: 13881 - DNA, 15 bp, Homo sapiens
gaaataaatcacttt

SEQ ID NO: 13882 - DNA, 15 bp, Homo sapiens
tgaaataaatcactt

SEQ ID NO: 13883 - DNA, 15 bp, Homo sapiens
ctgaaataaatcact

SEQ ID NO: 13884 - DNA, 15 bp, Homo sapiens
cctgaaataaatcac

SEQ ID NO: 13885 - DNA, 15 bp, Homo sapiens
acctgaaataaatca

SEQ ID NO: 13886 - DNA, 15 bp, Homo sapiens
aacctgaaataaatc

SEQ ID NO: 13887 - DNA, 15 bp, Homo sapiens
caacctgaaataaat

SEQ ID NO: 13888 - DNA, 15 bp, Homo sapiens
gcaacctgaaataaa

SEQ ID NO: 13889 - DNA, 15 bp, Homo sapiens
agcaacctgaaataa

SEQ ID NO: 13890 - DNA, 15 bp, Homo sapiens
cagcaacctgaaata

SEQ ID NO: 13891 - DNA, 15 bp, Homo sapiens
tcagcaacctgaaat

SEQ ID NO: 13892 - DNA, 15 bp, Homo sapiens
atcagcaacctgaaa

SEQ ID NO: 13893 - DNA, 15 bp, Homo sapiens
catcagcaacctgaa

SEQ ID NO: 13894 - DNA, 15 bp, Homo sapiens
gcatcagcaacctga

SEQ ID NO: 13895 - DNA, 15 bp, Homo sapiens
agcatcagcaacctg

SEQ ID NO: 13896 - DNA, 15 bp, Homo sapiens
aagcatcagcaacct

SEQ ID NO: 13897 - DNA, 15 bp, Homo sapiens
taagcatcagcaacc

SEQ ID NO: 13898 - DNA, 15 bp, Homo sapiens
ctaagcatcagcaac

SEQ ID NO: 13899 - DNA, 15 bp, Homo sapiens
tctaagcatcagcaa

SEQ ID NO: 13900 - DNA, 15 bp, Homo sapiens
atctaagcatcagca

SEQ ID NO: 13901 - DNA, 15 bp, Homo sapiens
aatctaagcatcagc

SEQ ID NO: 13902 - DNA, 15 bp, Homo sapiens
caatctaagcatcag

SEQ ID NO: 13903 - DNA, 15 bp, Homo sapiens
acaatctaagcatca

SEQ ID NO: 13904 - DNA, 15 bp, Homo sapiens
aacaatctaagcatc

SEQ ID NO: 13905 - DNA, 15 bp, Homo sapiens
taacaatctaagcat

SEQ ID NO: 13906 - DNA, 15 bp, Homo sapiens
ctaacaatctaagca

SEQ ID NO: 13907 - DNA, 15 bp, Homo sapiens
tctaacaatctaagc

SEQ ID NO: 13908 - DNA, 15 bp, Homo sapiens
ctctaacaatctaag

SEQ ID NO: 13909 - DNA, 15 bp, Homo sapiens
actctaacaatctaa

SEQ ID NO: 13910 - DNA, 15 bp, Homo sapiens
aactctaacaatcta

SEQ ID NO: 13911 - DNA, 15 bp, Homo sapiens
caactctaacaatct

SEQ ID NO: 13912 - DNA, 15 bp, Homo sapiens
ccaactctaacaatc

SEQ ID NO: 13913 - DNA, 15 bp, Homo sapiens
tccaactctaacaat

SEQ ID NO: 13914 - DNA, 15 bp, Homo sapiens
ttccaactctaacaa

SEQ ID NO: 13915 - DNA, 15 bp, Homo sapiens
tttccaactctaaca

SEQ ID NO: 13916 - DNA, 15 bp, Homo sapiens
ctttccaactctaac

SEQ ID NO: 13917 - DNA, 15 bp, Homo sapiens
tctttccaactctaa

SEQ ID NO: 13918 - DNA, 15 bp, Homo sapiens
atctttccaactcta

SEQ ID NO: 13919 - DNA, 15 bp, Homo sapiens
gatctttccaactct

SEQ ID NO: 13920 - DNA, 15 bp, Homo sapiens
agatctttccaactc

SEQ ID NO: 13921 - DNA, 15 bp, Homo sapiens
cagatctttccaact

SEQ ID NO: 13922 - DNA, 15 bp, Homo sapiens
ccagatctttccaac

SEQ ID NO: 13923 - DNA, 15 bp, Homo sapiens
gccagatctttccaa

SEQ ID NO: 13924 - DNA, 15 bp, Homo sapiens
agccagatctttcca

SEQ ID NO: 13925 - DNA, 15 bp, Homo sapiens
aagccagatctttcc

SEQ ID NO: 13926 - DNA, 15 bp, Homo sapiens
caagccagatctttc

SEQ ID NO: 13927 - DNA, 15 bp, Homo sapiens
gcaagccagatcttt

SEQ ID NO: 13928 - DNA, 15 bp, Homo sapiens
tgcaagccagatctt

SEQ ID NO: 13929 - DNA, 15 bp, Homo sapiens
atgcaagccagatct

SEQ ID NO: 13930 - DNA, 15 bp, Homo sapiens
gatgcaagccagatc

SEQ ID NO: 13931 - DNA, 15 bp, Homo sapiens
agatgcaagccagat

SEQ ID NO: 13932 - DNA, 15 bp, Homo sapiens
aagatgcaagccaga

SEQ ID NO: 13933 - DNA, 15 bp, Homo sapiens
caagatgcaagccag

SEQ ID NO: 13934 - DNA, 15 bp, Homo sapiens
acaagatgcaagcca

SEQ ID NO: 13935 - DNA, 15 bp, Homo sapiens
tacaagatgcaagcc

SEQ ID NO: 13936 - DNA, 15 bp, Homo sapiens
gtacaagatgcaagc

SEQ ID NO: 13937 - DNA, 15 bp, Homo sapiens
tgtacaagatgcaag

SEQ ID NO: 13938 - DNA, 15 bp, Homo sapiens
ctgtacaagatgcaa

SEQ ID NO: 13939 - DNA, 15 bp, Homo sapiens
gctgtacaagatgca

SEQ ID NO: 13940 - DNA, 15 bp, Homo sapiens
agctgtacaagatgc

SEQ ID NO: 13941 - DNA, 15 bp, Homo sapiens
cagctgtacaagatg

SEQ ID NO: 13942 - DNA, 15 bp, Homo sapiens
tcagctgtacaagat

SEQ ID NO: 13943 - DNA, 15 bp, Homo sapiens
gtcagctgtacaaga

SEQ ID NO: 13944 - DNA, 15 bp, Homo sapiens
tgtcagctgtacaag

SEQ ID NO: 13945 - DNA, 15 bp, Homo sapiens
ctgtcagctgtacaa

SEQ ID NO: 13946 - DNA, 15 bp, Homo sapiens
tctgtcagctgtaca

SEQ ID NO: 13947 - DNA, 15 bp, Homo sapiens
ttctgtcagctgtac

SEQ ID NO: 13948 - DNA, 15 bp, Homo sapiens
gttctgtcagctgta

SEQ ID NO: 13949 - DNA, 15 bp, Homo sapiens
agttctgtcagctgt

SEQ ID NO: 13950 - DNA, 15 bp, Homo sapiens
cagttctgtcagctg

SEQ ID NO: 13951 - DNA, 15 bp, Homo sapiens
ccagttctgtcagct

SEQ ID NO: 13952 - DNA, 15 bp, Homo sapiens
cccagttctgtcagc

SEQ ID NO: 13953 - DNA, 15 bp, Homo sapiens
ccccagttctgtcag

SEQ ID NO: 13954 - DNA, 15 bp, Homo sapiens
gccccagttctgtca

SEQ ID NO: 13955 - DNA, 15 bp, Homo sapiens
agccccagttctgtc

SEQ ID NO: 13956 - DNA, 15 bp, Homo sapiens
gagccccagttctgt

SEQ ID NO: 13957 - DNA, 15 bp, Homo sapiens
tgagccccagttctg

SEQ ID NO: 13958 - DNA, 15 bp, Homo sapiens
ctgagccccagttct

SEQ ID NO: 13959 - DNA, 15 bp, Homo sapiens
cctgagccccagttc

SEQ ID NO: 13960 - DNA, 15 bp, Homo sapiens
ccctgagccccagtt

SEQ ID NO: 13961 - DNA, 15 bp, Homo sapiens
cccctgagccccagt

SEQ ID NO: 13962 - DNA, 15 bp, Homo sapiens
ccccctgagccccag

SEQ ID NO: 13963 - DNA, 15 bp, Homo sapiens
cccccctgagcccca

SEQ ID NO: 13964 - DNA, 15 bp, Homo sapiens
gcccccctgagcccc

SEQ ID NO: 13965 - DNA, 15 bp, Homo sapiens
tgcccccctgagccc

SEQ ID NO: 13966 - DNA, 15 bp, Homo sapiens
gtgcccccctgagcc

SEQ ID NO: 13967 - DNA, 15 bp, Homo sapiens
tgtgcccccctgagc

SEQ ID NO: 13968 - DNA, 15 bp, Homo sapiens
ctgtgcccccctgag

SEQ ID NO: 13969 - DNA, 15 bp, Homo sapiens
cctgtgcccccctga

SEQ ID NO: 13970 - DNA, 15 bp, Homo sapiens
acctgtgcccccctg

SEQ ID NO: 13971 - DNA, 15 bp, Homo sapiens
cacctgtgcccccct

SEQ ID NO: 13972 - DNA, 15 bp, Homo sapiens
gcacctgtgcccccc

SEQ ID NO: 13973 - DNA, 15 bp, Homo sapiens
ggcacctgtgccccc

SEQ ID NO: 13974 - DNA, 15 bp, Homo sapiens
gggcacctgtgcccc

SEQ ID NO: 13975 - DNA, 15 bp, Homo sapiens
tgggcacctgtgccc

SEQ ID NO: 13976 - DNA, 15 bp, Homo sapiens
ctgggcacctgtgcc

SEQ ID NO: 13977 - DNA, 15 bp, Homo sapiens
tctgggcacctgtgc

SEQ ID NO: 13978 - DNA, 15 bp, Homo sapiens
ctctgggcacctgtg

SEQ ID NO: 13979 - DNA, 15 bp, Homo sapiens
actctgggcacctgt

SEQ ID NO: 13980 - DNA, 15 bp, Homo sapiens
aactctgggcacctg

SEQ ID NO: 13981 - DNA, 15 bp, Homo sapiens
caactctgggcacct

SEQ ID NO: 13982 - DNA, 15 bp, Homo sapiens
ccaactctgggcacc

SEQ ID NO: 13983 - DNA, 15 bp, Homo sapiens
accaactctgggcac

SEQ ID NO: 13984 - DNA, 15 bp, Homo sapiens
gaccaactctgggca

SEQ ID NO: 13985 - DNA, 15 bp, Homo sapiens
tgaccaactctgggc

SEQ ID NO: 13986 - DNA, 15 bp, Homo sapiens
ctgaccaactctggg

SEQ ID NO: 13987 - DNA, 15 bp, Homo sapiens
actgaccaactctgg

SEQ ID NO: 13988 - DNA, 15 bp, Homo sapiens
gactgaccaactctg

SEQ ID NO: 13989 - DNA, 15 bp, Homo sapiens
tgactgaccaactct

SEQ ID NO: 13990 - DNA, 15 bp, Homo sapiens
ctgactgaccaactc

SEQ ID NO: 13991 - DNA, 15 bp, Homo sapiens
cctgactgaccaact

SEQ ID NO: 13992 - DNA, 15 bp, Homo sapiens
tcctgactgaccaac

SEQ ID NO: 13993 - DNA, 15 bp, Homo sapiens
ttcctgactgaccaa

SEQ ID NO: 13994 - DNA, 15 bp, Homo sapiens
tttcctgactgacca

SEQ ID NO: 13995 - DNA, 15 bp, Homo sapiens
ctttcctgactgacc

SEQ ID NO: 13996 - DNA, 15 bp, Homo sapiens
actttcctgactgac

SEQ ID NO: 13997 - DNA, 15 bp, Homo sapiens
tactttcctgactga

SEQ ID NO: 13998 - DNA, 15 bp, Homo sapiens
ctactttcctgactg

SEQ ID NO: 13999 - DNA, 15 bp, Homo sapiens
gctactttcctgact

SEQ ID NO: 14000 - DNA, 15 bp, Homo sapiens
tgctactttcctgac

SEQ ID NO: 14001 - DNA, 15 bp, Homo sapiens
gtgctactttcctga

SEQ ID NO: 14002 - DNA, 15 bp, Homo sapiens
ggtgctactttcctg

SEQ ID NO: 14003 - DNA, 15 bp, Homo sapiens
tggtgctactttcct

SEQ ID NO: 14004 - DNA, 15 bp, Homo sapiens
ctggtgctactttcc

SEQ ID NO: 14005 - DNA, 15 bp, Homo sapiens
tctggtgctactttc

SEQ ID NO: 14006 - DNA, 15 bp, Homo sapiens
ttctggtgctacttt

SEQ ID NO: 14007 - DNA, 15 bp, Homo sapiens
gttctggtgctactt

SEQ ID NO: 14008 - DNA, 15 bp, Homo sapiens
ggttctggtgctact

SEQ ID NO: 14009 - DNA, 15 bp, Homo sapiens
tggttctggtgctac

SEQ ID NO: 14010 - DNA, 15 bp, Homo sapiens
ctggttctggtgcta

SEQ ID NO: 14011 - DNA, 15 bp, Homo sapiens
actggttctggtgct

SEQ ID NO: 14012 - DNA, 15 bp, Homo sapiens
gactggttctggtgc

SEQ ID NO: 14013 - DNA, 15 bp, Homo sapiens
agactggttctggtg

SEQ ID NO: 14014 - DNA, 15 bp, Homo sapiens
gagactggttctggt

SEQ ID NO: 14015 - DNA, 15 bp, Homo sapiens
ggagactggttctgg

SEQ ID NO: 14016 - DNA, 15 bp, Homo sapiens
aggagactggttctg

SEQ ID NO: 14017 - DNA, 15 bp, Homo sapiens
caggagactggttct

SEQ ID NO: 14018 - DNA, 15 bp, Homo sapiens
ccaggagactggttc

SEQ ID NO: 14019 - DNA, 15 bp, Homo sapiens
accaggagactggtt

SEQ ID NO: 14020 - DNA, 15 bp, Homo sapiens
caccaggagactggt

SEQ ID NO: 14021 - DNA, 15 bp, Homo sapiens
ccaccaggagactgg

SEQ ID NO: 14022 - DNA, 15 bp, Homo sapiens
gccaccaggagactg

SEQ ID NO: 14023 - DNA, 15 bp, Homo sapiens
ggccaccaggagact

SEQ ID NO: 14024 - DNA, 15 bp, Homo sapiens
gggccaccaggagac

SEQ ID NO: 14025 - DNA, 15 bp, Homo sapiens
agggccaccaggaga

SEQ ID NO: 14026 - DNA, 15 bp, Homo sapiens
tagggccaccaggag

SEQ ID NO: 14027 - DNA, 15 bp, Homo sapiens
gtagggccaccagga

SEQ ID NO: 14028 - DNA, 15 bp, Homo sapiens
tgtagggccaccagg

SEQ ID NO: 14029 - DNA, 15 bp, Homo sapiens
ctgtagggccaccag

SEQ ID NO: 14030 - DNA, 15 bp, Homo sapiens
actgtagggccacca

SEQ ID NO: 14031 - DNA, 15 bp, Homo sapiens
aactgtagggccacc

SEQ ID NO: 14032 - DNA, 15 bp, Homo sapiens
caactgtagggccac

SEQ ID NO: 14033 - DNA, 15 bp, Homo sapiens
gcaactgtagggcca

SEQ ID NO: 14034 - DNA, 15 bp, Homo sapiens
tgcaactgtagggcc

SEQ ID NO: 14035 - DNA, 15 bp, Homo sapiens
ctgcaactgtagggc

SEQ ID NO: 14036 - DNA, 15 bp, Homo sapiens
tctgcaactgtaggg

SEQ ID NO: 14037 - DNA, 15 bp, Homo sapiens
gtctgcaactgtagg

SEQ ID NO: 14038 - DNA, 15 bp, Homo sapiens
ggtctgcaactgtag

SEQ ID NO: 14039 - DNA, 15 bp, Homo sapiens
gggtctgcaactgta

SEQ ID NO: 14040 - DNA, 15 bp, Homo sapiens
agggtctgcaactgt

SEQ ID NO: 14041 - DNA, 15 bp, Homo sapiens
aagggtctgcaactg

SEQ ID NO: 14042 - DNA, 15 bp, Homo sapiens
aaagggtctgcaact

SEQ ID NO: 14043 - DNA, 15 bp, Homo sapiens
aaaagggtctgcaac

SEQ ID NO: 14044 - DNA, 15 bp, Homo sapiens
aaaaagggtctgcaa

SEQ ID NO: 14045 - DNA, 15 bp, Homo sapiens
aaaaaagggtctgca

SEQ ID NO: 14046 - DNA, 15 bp, Homo sapiens
caaaaaagggtctgc

SEQ ID NO: 14047 - DNA, 15 bp, Homo sapiens
gcaaaaaagggtctg

SEQ ID NO: 14048 - DNA, 15 bp, Homo sapiens
agcaaaaaagggtct

SEQ ID NO: 14049 - DNA, 15 bp, Homo sapiens
aagcaaaaaagggtc

SEQ ID NO: 14050 - DNA, 15 bp, Homo sapiens
aaagcaaaaaagggt

SEQ ID NO: 14051 - DNA, 15 bp, Homo sapiens
caaagcaaaaaaggg

SEQ ID NO: 14052 - DNA, 15 bp, Homo sapiens
gcaaagcaaaaaagg

SEQ ID NO: 14053 - DNA, 15 bp, Homo sapiens
agcaaagcaaaaaag

SEQ ID NO: 14054 - DNA, 15 bp, Homo sapiens
gagcaaagcaaaaaa

SEQ ID NO: 14055 - DNA, 15 bp, Homo sapiens
agagcaaagcaaaaa

SEQ ID NO: 14056 - DNA, 15 bp, Homo sapiens
gagagcaaagcaaaa

SEQ ID NO: 14057 - DNA, 15 bp, Homo sapiens
agagagcaaagcaaa

SEQ ID NO: 14058 - DNA, 15 bp, Homo sapiens
cagagagcaaagcaa

SEQ ID NO: 14059 - DNA, 15 bp, Homo sapiens
acagagagcaaagca

SEQ ID NO: 14060 - DNA, 15 bp, Homo sapiens
cacagagagcaaagc

SEQ ID NO: 14061 - DNA, 15 bp, Homo sapiens
acacagagagcaaag

SEQ ID NO: 14062 - DNA, 15 bp, Homo sapiens
tacacagagagcaaa

SEQ ID NO: 14063 - DNA, 15 bp, Homo sapiens
atacacagagagcaa

SEQ ID NO: 14064 - DNA, 15 bp, Homo sapiens
tatacacagagagca

SEQ ID NO: 14065 - DNA, 15 bp, Homo sapiens
gtatacacagagagc

SEQ ID NO: 14066 - DNA, 15 bp, Homo sapiens
agtatacacagagag

SEQ ID NO: 14067 - DNA, 15 bp, Homo sapiens
tagtatacacagaga

SEQ ID NO: 14068 - DNA, 15 bp, Homo sapiens
ttagtatacacagag

SEQ ID NO: 14069 - DNA, 15 bp, Homo sapiens
tttagtatacacaga

SEQ ID NO: 14070 - DNA, 15 bp, Homo sapiens
ctttagtatacacag

SEQ ID NO: 14071 - DNA, 15 bp, Homo sapiens
gctttagtatacaca

SEQ ID NO: 14072 - DNA, 15 bp, Homo sapiens
agctttagtatacac

SEQ ID NO: 14073 - DNA, 15 bp, Homo sapiens
aagctttagtataca

SEQ ID NO: 14074 - DNA, 15 bp, Homo sapiens
gaagctttagtatac

SEQ ID NO: 14075 - DNA, 15 bp, Homo sapiens
agaagctttagtata

SEQ ID NO: 14076 - DNA, 15 bp, Homo sapiens
tagaagctttagtat

SEQ ID NO: 14077 - DNA, 15 bp, Homo sapiens
atagaagctttagta

SEQ ID NO: 14078 - DNA, 15 bp, Homo sapiens
catagaagctttagt

SEQ ID NO: 14079 - DNA, 15 bp, Homo sapiens
acatagaagctttag

SEQ ID NO: 14080 - DNA, 15 bp, Homo sapiens
gacatagaagcttta

SEQ ID NO: 14081 - DNA, 15 bp, Homo sapiens
agacatagaagcttt

SEQ ID NO: 14082 - DNA, 15 bp, Homo sapiens
gagacatagaagctt

SEQ ID NO: 14083 - DNA, 15 bp, Homo sapiens
agagacatagaagct

SEQ ID NO: 14084 - DNA, 15 bp, Homo sapiens
cagagacatagaagc

SEQ ID NO: 14085 - DNA, 15 bp, Homo sapiens
tcagagacatagaag

SEQ ID NO: 14086 - DNA, 15 bp, Homo sapiens
ttcagagacatagaa

SEQ ID NO: 14087 - DNA, 15 bp, Homo sapiens
attcagagacataga

SEQ ID NO: 14088 - DNA, 15 bp, Homo sapiens
gattcagagacatag

SEQ ID NO: 14089 - DNA, 15 bp, Homo sapiens
agattcagagacata

SEQ ID NO: 14090 - DNA, 15 bp, Homo sapiens
gagattcagagacat

SEQ ID NO: 14091 - DNA, 15 bp, Homo sapiens
tgagattcagagaca

SEQ ID NO: 14092 - DNA, 15 bp, Homo sapiens
ttgagattcagagac

SEQ ID NO: 14093 - DNA, 15 bp, Homo sapiens
cttgagattcagaga

SEQ ID NO: 14094 - DNA, 15 bp, Homo sapiens
acttgagattcagag

SEQ ID NO: 14095 - DNA, 15 bp, Homo sapiens
aacttgagattcaga

SEQ ID NO: 14096 - DNA, 15 bp, Homo sapiens
gaacttgagattcag

SEQ ID NO: 14097 - DNA, 15 bp, Homo sapiens
agaacttgagattca

SEQ ID NO: 14098 - DNA, 15 bp, Homo sapiens
cagaacttgagattc

SEQ ID NO: 14099 - DNA, 15 bp, Homo sapiens
tcagaacttgagatt

SEQ ID NO: 14100 - DNA, 15 bp, Homo sapiens
gtcagaacttgagat

SEQ ID NO: 14101 - DNA, 15 bp, Homo sapiens
agtcagaacttgaga

SEQ ID NO: 14102 - DNA, 15 bp, Homo sapiens
cagtcagaacttgag

SEQ ID NO: 14103 - DNA, 15 bp, Homo sapiens
ccagtcagaacttga

SEQ ID NO: 14104 - DNA, 15 bp, Homo sapiens
accagtcagaacttg

SEQ ID NO: 14105 - DNA, 15 bp, Homo sapiens
taccagtcagaactt

SEQ ID NO: 14106 - DNA, 15 bp, Homo sapiens
ctaccagtcagaact

SEQ ID NO: 14107 - DNA, 15 bp, Homo sapiens
gctaccagtcagaac

SEQ ID NO: 14108 - DNA, 15 bp, Homo sapiens
agctaccagtcagaa

SEQ ID NO: 14109 - DNA, 15 bp, Homo sapiens
tagctaccagtcaga

SEQ ID NO: 14110 - DNA, 15 bp, Homo sapiens
gtagctaccagtcag

SEQ ID NO: 14111 - DNA, 15 bp, Homo sapiens
agtagctaccagtca

SEQ ID NO: 14112 - DNA, 15 bp, Homo sapiens
aagtagctaccagtc

SEQ ID NO: 14113 - DNA, 15 bp, Homo sapiens
aaagtagctaccagt

SEQ ID NO: 14114 - DNA, 15 bp, Homo sapiens
gaaagtagctaccag

SEQ ID NO: 14115 - DNA, 15 bp, Homo sapiens
ggaaagtagctacca

SEQ ID NO: 14116 - DNA, 15 bp, Homo sapiens
tggaaagtagctacc

SEQ ID NO: 14117 - DNA, 15 bp, Homo sapiens
ttggaaagtagctac

SEQ ID NO: 14118 - DNA, 15 bp, Homo sapiens
attggaaagtagcta

SEQ ID NO: 14119 - DNA, 15 bp, Homo sapiens
gattggaaagtagct

SEQ ID NO: 14120 - DNA, 15 bp, Homo sapiens
ggattggaaagtagc

SEQ ID NO: 14121 - DNA, 15 bp, Homo sapiens
tggattggaaagtag

SEQ ID NO: 14122 - DNA, 15 bp, Homo sapiens
gtggattggaaagta

SEQ ID NO: 14123 - DNA, 15 bp, Homo sapiens
ggtggattggaaagt

SEQ ID NO: 14124 - DNA, 15 bp, Homo sapiens
aggtggattggaaag

SEQ ID NO: 14125 - DNA, 15 bp, Homo sapiens
caggtggattggaaa

SEQ ID NO: 14126 - DNA, 15 bp, Homo sapiens
ccaggtggattggaa

SEQ ID NO: 14127 - DNA, 15 bp, Homo sapiens
gccaggtggattgga

SEQ ID NO: 14128 - DNA, 15 bp, Homo sapiens
agccaggtggattgg

SEQ ID NO: 14129 - DNA, 15 bp, Homo sapiens
aagccaggtggattg

SEQ ID NO: 14130 - DNA, 15 bp, Homo sapiens
taagccaggtggatt

SEQ ID NO: 14131 - DNA, 15 bp, Homo sapiens
ctaagccaggtggat

SEQ ID NO: 14132 - DNA, 15 bp, Homo sapiens
tctaagccaggtgga

SEQ ID NO: 14133 - DNA, 15 bp, Homo sapiens
atctaagccaggtgg

SEQ ID NO: 14134 - DNA, 15 bp, Homo sapiens
aatctaagccaggtg

SEQ ID NO: 14135 - DNA, 15 bp, Homo sapiens
aaatctaagccaggt

SEQ ID NO: 14136 - DNA, 15 bp, Homo sapiens
gaaatctaagccagg

SEQ ID NO: 14137 - DNA, 15 bp, Homo sapiens
agaaatctaagccag

SEQ ID NO: 14138 - DNA, 15 bp, Homo sapiens
tagaaatctaagcca

SEQ ID NO: 14139 - DNA, 15 bp, Homo sapiens
ctagaaatctaagcc

SEQ ID NO: 14140 - DNA, 15 bp, Homo sapiens
tctagaaatctaagc

SEQ ID NO: 14141 - DNA, 15 bp, Homo sapiens
atctagaaatctaag

SEQ ID NO: 14142 - DNA, 15 bp, Homo sapiens
aatctagaaatctaa

SEQ ID NO: 14143 - DNA, 15 bp, Homo sapiens
taatctagaaatcta

SEQ ID NO: 14144 - DNA, 15 bp, Homo sapiens
ataatctagaaatct

SEQ ID NO: 14145 - DNA, 15 bp, Homo sapiens
tataatctagaaatc

SEQ ID NO: 14146 - DNA, 15 bp, Homo sapiens
atataatctagaaat

SEQ ID NO: 14147 - DNA, 15 bp, Homo sapiens
aatataatctagaaa

SEQ ID NO: 14148 - DNA, 15 bp, Homo sapiens
caatataatctagaa

SEQ ID NO: 14149 - DNA, 15 bp, Homo sapiens
acaatataatctaga

SEQ ID NO: 14150 - DNA, 15 bp, Homo sapiens
aacaatataatctag

SEQ ID NO: 14151 - DNA, 15 bp, Homo sapiens
aaacaatataatcta

SEQ ID NO: 14152 - DNA, 15 bp, Homo sapiens
taaacaatataatct

SEQ ID NO: 14153 - DNA, 15 bp, Homo sapiens
ctaaacaatataatc

SEQ ID NO: 14154 - DNA, 15 bp, Homo sapiens
tctaaacaatataat

SEQ ID NO: 14155 - DNA, 15 bp, Homo sapiens
gtctaaacaatataa

SEQ ID NO: 14156 - DNA, 15 bp, Homo sapiens
cgtctaaacaatata

SEQ ID NO: 14157 - DNA, 15 bp, Homo sapiens
acgtctaaacaatat

SEQ ID NO: 14158 - DNA, 15 bp, Homo sapiens
gacgtctaaacaata

SEQ ID NO: 14159 - DNA, 15 bp, Homo sapiens
tgacgtctaaacaat

SEQ ID NO: 14160 - DNA, 15 bp, Homo sapiens
ctgacgtctaaacaa

SEQ ID NO: 14161 - DNA, 15 bp, Homo sapiens
tctgacgtctaaaca

SEQ ID NO: 14162 - DNA, 15 bp, Homo sapiens
ttctgacgtctaaac

SEQ ID NO: 14163 - DNA, 15 bp, Homo sapiens
gttctgacgtctaaa

SEQ ID NO: 14164 - DNA, 15 bp, Homo sapiens
ggttctgacgtctaa

SEQ ID NO: 14165 - DNA, 15 bp, Homo sapiens
aggttctgacgtcta

SEQ ID NO: 14166 - DNA, 15 bp, Homo sapiens
gaggttctgacgtct

SEQ ID NO: 14167 - DNA, 15 bp, Homo sapiens
agaggttctgacgtc

SEQ ID NO: 14168 - DNA, 15 bp, Homo sapiens
aagaggttctgacgt

SEQ ID NO: 14169 - DNA, 15 bp, Homo sapiens
taagaggttctgacg

SEQ ID NO: 14170 - DNA, 15 bp, Homo sapiens
ttaagaggttctgac

SEQ ID NO: 14171 - DNA, 15 bp, Homo sapiens
cttaagaggttctga

SEQ ID NO: 14172 - DNA, 15 bp, Homo sapiens
ccttaagaggttctg

SEQ ID NO: 14173 - DNA, 15 bp, Homo sapiens
cccttaagaggttct

SEQ ID NO: 14174 - DNA, 15 bp, Homo sapiens
acccttaagaggttc

SEQ ID NO: 14175 - DNA, 15 bp, Homo sapiens
aacccttaagaggtt

SEQ ID NO: 14176 - DNA, 15 bp, Homo sapiens
aaacccttaagaggt

SEQ ID NO: 14177 - DNA, 15 bp, Homo sapiens
aaaacccttaagagg

SEQ ID NO: 14178 - DNA, 15 bp, Homo sapiens
caaaacccttaagag

SEQ ID NO: 14179 - DNA, 15 bp, Homo sapiens
ccaaaacccttaaga

SEQ ID NO: 14180 - DNA, 15 bp, Homo sapiens
cccaaaacccttaag

SEQ ID NO: 14181 - DNA, 15 bp, Homo sapiens
ccccaaaacccttaa

SEQ ID NO: 14182 - DNA, 15 bp, Homo sapiens
gccccaaaaccctta

SEQ ID NO: 14183 - DNA, 15 bp, Homo sapiens
ggccccaaaaccctt

SEQ ID NO: 14184 - DNA, 15 bp, Homo sapiens
tggccccaaaaccct

SEQ ID NO: 14185 - DNA, 15 bp, Homo sapiens
gtggccccaaaaccc

SEQ ID NO: 14186 - DNA, 15 bp, Homo sapiens
agtggccccaaaacc

SEQ ID NO: 14187 - DNA, 15 bp, Homo sapiens
aagtggccccaaaac

SEQ ID NO: 14188 - DNA, 15 bp, Homo sapiens
caagtggccccaaaa

SEQ ID NO: 14189 - DNA, 15 bp, Homo sapiens
acaagtggccccaaa

SEQ ID NO: 14190 - DNA, 15 bp, Homo sapiens
aacaagtggccccaa

SEQ ID NO: 14191 - DNA, 15 bp, Homo sapiens
taacaagtggcccca

SEQ ID NO: 14192 - DNA, 15 bp, Homo sapiens
ctaacaagtggcccc

SEQ ID NO: 14193 - DNA, 15 bp, Homo sapiens
gctaacaagtggccc

SEQ ID NO: 14194 - DNA, 15 bp, Homo sapiens
agctaacaagtggcc

SEQ ID NO: 14195 - DNA, 15 bp, Homo sapiens
gagctaacaagtggc

SEQ ID NO: 14196 - DNA, 15 bp, Homo sapiens
tgagctaacaagtgg

SEQ ID NO: 14197 - DNA, 15 bp, Homo sapiens
gtgagctaacaagtg

SEQ ID NO: 14198 - DNA, 15 bp, Homo sapiens
tgtgagctaacaagt

SEQ ID NO: 14199 - DNA, 15 bp, Homo sapiens
atgtgagctaacaag

SEQ ID NO: 14200 - DNA, 15 bp, Homo sapiens
tatgtgagctaacaa

SEQ ID NO: 14201 - DNA, 15 bp, Homo sapiens
ctatgtgagctaaca

SEQ ID NO: 14202 - DNA, 15 bp, Homo sapiens
actatgtgagctaac

SEQ ID NO: 14203 - DNA, 15 bp, Homo sapiens
cactatgtgagctaa

SEQ ID NO: 14204 - DNA, 15 bp, Homo sapiens
tcactatgtgagcta

SEQ ID NO: 14205 - DNA, 15 bp, Homo sapiens
ctcactatgtgagct

SEQ ID NO: 14206 - DNA, 15 bp, Homo sapiens
tctcactatgtgagc

SEQ ID NO: 14207 - DNA, 15 bp, Homo sapiens
ttctcactatgtgag

SEQ ID NO: 14208 - DNA, 15 bp, Homo sapiens
gttctcactatgtga

SEQ ID NO: 14209 - DNA, 15 bp, Homo sapiens
ggttctcactatgtg

SEQ ID NO: 14210 - DNA, 15 bp, Homo sapiens
tggttctcactatgt

SEQ ID NO: 14211 - DNA, 15 bp, Homo sapiens
ctggttctcactatg

SEQ ID NO: 14212 - DNA, 15 bp, Homo sapiens
gctggttctcactat

SEQ ID NO: 14213 - DNA, 15 bp, Homo sapiens
ggctggttctcacta

SEQ ID NO: 14214 - DNA, 15 bp, Homo sapiens
gggctggttctcact

SEQ ID NO: 14215 - DNA, 15 bp, Homo sapiens
agggctggttctcac

SEQ ID NO: 14216 - DNA, 15 bp, Homo sapiens
cagggctggttctca

SEQ ID NO: 14217 - DNA, 15 bp, Homo sapiens
gcagggctggttctc

SEQ ID NO: 14218 - DNA, 15 bp, Homo sapiens
ggcagggctggttct

SEQ ID NO: 14219 - DNA, 15 bp, Homo sapiens
gggcagggctggttc

SEQ ID NO: 14220 - DNA, 15 bp, Homo sapiens
tgggcagggctggtt

SEQ ID NO: 14221 - DNA, 15 bp, Homo sapiens
atgggcagggctggt

SEQ ID NO: 14222 - DNA, 15 bp, Homo sapiens
aatgggcagggctgg

SEQ ID NO: 14223 - DNA, 15 bp, Homo sapiens
taatgggcagggctg

SEQ ID NO: 14224 - DNA, 15 bp, Homo sapiens
ctaatgggcagggct

SEQ ID NO: 14225 - DNA, 15 bp, Homo sapiens
cctaatgggcagggc

SEQ ID NO: 14226 - DNA, 15 bp, Homo sapiens
acctaatgggcaggg

SEQ ID NO: 14227 - DNA, 15 bp, Homo sapiens
tacctaatgggcagg

SEQ ID NO: 14228 - DNA, 15 bp, Homo sapiens
ctacctaatgggcag

SEQ ID NO: 14229 - DNA, 15 bp, Homo sapiens
cctacctaatgggca

SEQ ID NO: 14230 - DNA, 15 bp, Homo sapiens
ccctacctaatgggc

SEQ ID NO: 14231 - DNA, 15 bp, Homo sapiens
cccctacctaatggg

SEQ ID NO: 14232 - DNA, 15 bp, Homo sapiens
tcccctacctaatgg

SEQ ID NO: 14233 - DNA, 15 bp, Homo sapiens
ttcccctacctaatg

SEQ ID NO: 14234 - DNA, 15 bp, Homo sapiens
cttcccctacctaat

SEQ ID NO: 14235 - DNA, 15 bp, Homo sapiens
tcttcccctacctaa

SEQ ID NO: 14236 - DNA, 15 bp, Homo sapiens
ttcttcccctaccta

SEQ ID NO: 14237 - DNA, 15 bp, Homo sapiens
cttcttcccctacct

SEQ ID NO: 14238 - DNA, 15 bp, Homo sapiens
acttcttcccctacc

SEQ ID NO: 14239 - DNA, 15 bp, Homo sapiens
aacttcttcccctac

SEQ ID NO: 14240 - DNA, 15 bp, Homo sapiens
taacttcttccccta

SEQ ID NO: 14241 - DNA, 15 bp, Homo sapiens
ctaacttcttcccct

SEQ ID NO: 14242 - DNA, 15 bp, Homo sapiens
gctaacttcttcccc

SEQ ID NO: 14243 - DNA, 15 bp, Homo sapiens
tgctaacttcttccc

SEQ ID NO: 14244 - DNA, 15 bp, Homo sapiens
ctgctaacttcttcc

SEQ ID NO: 14245 - DNA, 15 bp, Homo sapiens
actgctaacttcttc

SEQ ID NO: 14246 - DNA, 15 bp, Homo sapiens
gactgctaacttctt

SEQ ID NO: 14247 - DNA, 15 bp, Homo sapiens
ggactgctaacttct

SEQ ID NO: 14248 - DNA, 15 bp, Homo sapiens
tggactgctaacttc

SEQ ID NO: 14249 - DNA, 15 bp, Homo sapiens
atggactgctaactt

SEQ ID NO: 14250 - DNA, 15 bp, Homo sapiens
catggactgctaact

SEQ ID NO: 14251 - DNA, 15 bp, Homo sapiens
tcatggactgctaac

SEQ ID NO: 14252 - DNA, 15 bp, Homo sapiens
atcatggactgctaa

SEQ ID NO: 14253 - DNA, 15 bp, Homo sapiens
tatcatggactgcta

SEQ ID NO: 14254 - DNA, 15 bp, Homo sapiens
ctatcatggactgct

SEQ ID NO: 14255 - DNA, 15 bp, Homo sapiens
gctatcatggactgc

SEQ ID NO: 14256 - DNA, 15 bp, Homo sapiens
agctatcatggactg

SEQ ID NO: 14257 - DNA, 15 bp, Homo sapiens
cagctatcatggact

SEQ ID NO: 14258 - DNA, 15 bp, Homo sapiens
acagctatcatggac

SEQ ID NO: 14259 - DNA, 15 bp, Homo sapiens
aacagctatcatgga

SEQ ID NO: 14260 - DNA, 15 bp, Homo sapiens
caacagctatcatgg

SEQ ID NO: 14261 - DNA, 15 bp, Homo sapiens
gcaacagctatcatg

SEQ ID NO: 14262 - DNA, 15 bp, Homo sapiens
ggcaacagctatcat

SEQ ID NO: 14263 - DNA, 15 bp, Homo sapiens
aggcaacagctatca

SEQ ID NO: 14264 - DNA, 15 bp, Homo sapiens
caggcaacagctatc

SEQ ID NO: 14265 - DNA, 15 bp, Homo sapiens
gcaggcaacagctat

SEQ ID NO: 14266 - DNA, 15 bp, Homo sapiens
tgcaggcaacagcta

SEQ ID NO: 14267 - DNA, 15 bp, Homo sapiens
ctgcaggcaacagct

SEQ ID NO: 14268 - DNA, 15 bp, Homo sapiens
gctgcaggcaacagc

SEQ ID NO: 14269 - DNA, 15 bp, Homo sapiens
cgctgcaggcaacag

SEQ ID NO: 14270 - DNA, 15 bp, Homo sapiens
acgctgcaggcaaca

SEQ ID NO: 14271 - DNA, 15 bp, Homo sapiens
tacgctgcaggcaac

SEQ ID NO: 14272 - DNA, 15 bp, Homo sapiens
atacgctgcaggcaa

SEQ ID NO: 14273 - DNA, 15 bp, Homo sapiens
catacgctgcaggca

SEQ ID NO: 14274 - DNA, 15 bp, Homo sapiens
ccatacgctgcaggc

SEQ ID NO: 14275 - DNA, 15 bp, Homo sapiens
tccatacgctgcagg

SEQ ID NO: 14276 - DNA, 15 bp, Homo sapiens
atccatacgctgcag

SEQ ID NO: 14277 - DNA, 15 bp, Homo sapiens
catccatacgctgca

SEQ ID NO: 14278 - DNA, 15 bp, Homo sapiens
acatccatacgctgc

SEQ ID NO: 14279 - DNA, 15 bp, Homo sapiens
aacatccatacgctg

SEQ ID NO: 14280 - DNA, 15 bp, Homo sapiens
gaacatccatacgct

SEQ ID NO: 14281 - DNA, 15 bp, Homo sapiens
tgaacatccatacgc

SEQ ID NO: 14282 - DNA, 15 bp, Homo sapiens
atgaacatccatacg

SEQ ID NO: 14283 - DNA, 15 bp, Homo sapiens
aatgaacatccatac

SEQ ID NO: 14284 - DNA, 15 bp, Homo sapiens
caatgaacatccata

SEQ ID NO: 14285 - DNA, 15 bp, Homo sapiens
gcaatgaacatccat

SEQ ID NO: 14286 - DNA, 15 bp, Homo sapiens
tgcaatgaacatcca

SEQ ID NO: 14287 - DNA, 15 bp, Homo sapiens
gtgcaatgaacatcc

SEQ ID NO: 14288 - DNA, 15 bp, Homo sapiens
tgtgcaatgaacatc

SEQ ID NO: 14289 - DNA, 15 bp, Homo sapiens
ctgtgcaatgaacat

SEQ ID NO: 14290 - DNA, 15 bp, Homo sapiens
actgtgcaatgaaca

SEQ ID NO: 14291 - DNA, 15 bp, Homo sapiens
aactgtgcaatgaac

SEQ ID NO: 14292 - DNA, 15 bp, Homo sapiens
gaactgtgcaatgaa

SEQ ID NO: 14293 - DNA, 15 bp, Homo sapiens
ggaactgtgcaatga

SEQ ID NO: 14294 - DNA, 15 bp, Homo sapiens
aggaactgtgcaatg

SEQ ID NO: 14295 - DNA, 15 bp, Homo sapiens
caggaactgtgcaat

SEQ ID NO: 14296 - DNA, 15 bp, Homo sapiens
acaggaactgtgcaa

SEQ ID NO: 14297 - DNA, 15 bp, Homo sapiens
gacaggaactgtgca

SEQ ID NO: 14298 - DNA, 15 bp, Homo sapiens
agacaggaactgtgc

SEQ ID NO: 14299 - DNA, 15 bp, Homo sapiens
gagacaggaactgtg

SEQ ID NO: 14300 - DNA, 15 bp, Homo sapiens
ggagacaggaactgt

SEQ ID NO: 14301 - DNA, 15 bp, Homo sapiens
aggagacaggaactg

SEQ ID NO: 14302 - DNA, 15 bp, Homo sapiens
caggagacaggaact

SEQ ID NO: 14303 - DNA, 15 bp, Homo sapiens
tcaggagacaggaac

SEQ ID NO: 14304 - DNA, 15 bp, Homo sapiens
ctcaggagacaggaa

SEQ ID NO: 14305 - DNA, 15 bp, Homo sapiens
tctcaggagacagga

SEQ ID NO: 14306 - DNA, 15 bp, Homo sapiens
atctcaggagacagg

SEQ ID NO: 14307 - DNA, 15 bp, Homo sapiens
gatctcaggagacag

SEQ ID NO: 14308 - DNA, 15 bp, Homo sapiens
ggatctcaggagaca

SEQ ID NO: 14309 - DNA, 15 bp, Homo sapiens
aggatctcaggagac

SEQ ID NO: 14310 - DNA, 15 bp, Homo sapiens
caggatctcaggaga

SEQ ID NO: 14311 - DNA, 15 bp, Homo sapiens
ccaggatctcaggag

SEQ ID NO: 14312 - DNA, 15 bp, Homo sapiens
tccaggatctcagga

SEQ ID NO: 14313 - DNA, 15 bp, Homo sapiens
ctccaggatctcagg

SEQ ID NO: 14314 - DNA, 15 bp, Homo sapiens
actccaggatctcag

SEQ ID NO: 14315 - DNA, 15 bp, Homo sapiens
cactccaggatctca

SEQ ID NO: 14316 - DNA, 15 bp, Homo sapiens
acactccaggatctc

SEQ ID NO: 14317 - DNA, 15 bp, Homo sapiens
tacactccaggatct

SEQ ID NO: 14318 - DNA, 15 bp, Homo sapiens
atacactccaggatc

SEQ ID NO: 14319 - DNA, 15 bp, Homo sapiens
tatacactccaggat

SEQ ID NO: 14320 - DNA, 15 bp, Homo sapiens
gtatacactccagga

SEQ ID NO: 14321 - DNA, 15 bp, Homo sapiens
cgtatacactccagg

SEQ ID NO: 14322 - DNA, 15 bp, Homo sapiens
gcgtatacactccag

SEQ ID NO: 14323 - DNA, 15 bp, Homo sapiens
agcgtatacactcca

SEQ ID NO: 14324 - DNA, 15 bp, Homo sapiens
aagcgtatacactcc

SEQ ID NO: 14325 - DNA, 15 bp, Homo sapiens
caagcgtatacactc

SEQ ID NO: 14326 - DNA, 15 bp, Homo sapiens
ccaagcgtatacact

SEQ ID NO: 14327 - DNA, 15 bp, Homo sapiens
gccaagcgtatacac

SEQ ID NO: 14328 - DNA, 15 bp, Homo sapiens
ggccaagcgtataca

SEQ ID NO: 14329 - DNA, 15 bp, Homo sapiens
aggccaagcgtatac

SEQ ID NO: 14330 - DNA, 15 bp, Homo sapiens
gaggccaagcgtata

SEQ ID NO: 14331 - DNA, 15 bp, Homo sapiens
tgaggccaagcgtat

SEQ ID NO: 14332 - DNA, 15 bp, Homo sapiens
ctgaggccaagcgta

SEQ ID NO: 14333 - DNA, 15 bp, Homo sapiens
tctgaggccaagcgt

SEQ ID NO: 14334 - DNA, 15 bp, Homo sapiens
ctctgaggccaagcg

SEQ ID NO: 14335 - DNA, 15 bp, Homo sapiens
gctctgaggccaagc

SEQ ID NO: 14336 - DNA, 15 bp, Homo sapiens
ggctctgaggccaag

SEQ ID NO: 14337 - DNA, 15 bp, Homo sapiens
gggctctgaggccaa

SEQ ID NO: 14338 - DNA, 15 bp, Homo sapiens
tgggctctgaggcca

SEQ ID NO: 14339 - DNA, 15 bp, Homo sapiens
ctgggctctgaggcc

SEQ ID NO: 14340 - DNA, 15 bp, Homo sapiens
gctgggctctgaggc

SEQ ID NO: 14341 - DNA, 15 bp, Homo sapiens
tgctgggctctgagg

SEQ ID NO: 14342 - DNA, 15 bp, Homo sapiens
gtgctgggctctgag

SEQ ID NO: 14343 - DNA, 15 bp, Homo sapiens
tgtgctgggctctga

SEQ ID NO: 14344 - DNA, 15 bp, Homo sapiens
ctgtgctgggctctg

SEQ ID NO: 14345 - DNA, 15 bp, Homo sapiens
tctgtgctgggctct

SEQ ID NO: 14346 - DNA, 15 bp, Homo sapiens
ctctgtgctgggctc

SEQ ID NO: 14347 - DNA, 15 bp, Homo sapiens
gctctgtgctgggct

SEQ ID NO: 14348 - DNA, 15 bp, Homo sapiens
ggctctgtgctgggc

SEQ ID NO: 14349 - DNA, 15 bp, Homo sapiens
aggctctgtgctggg

SEQ ID NO: 14350 - DNA, 15 bp, Homo sapiens
caggctctgtgctgg

SEQ ID NO: 14351 - DNA, 15 bp, Homo sapiens
ccaggctctgtgctg

SEQ ID NO: 14352 - DNA, 15 bp, Homo sapiens
gccaggctctgtgct

SEQ ID NO: 14353 - DNA, 15 bp, Homo sapiens
ggccaggctctgtgc

SEQ ID NO: 14354 - DNA, 15 bp, Homo sapiens
gggccaggctctgtg

SEQ ID NO: 14355 - DNA, 15 bp, Homo sapiens
agggccaggctctgt

SEQ ID NO: 14356 - DNA, 15 bp, Homo sapiens
aagggccaggctctg

SEQ ID NO: 14357 - DNA, 15 bp, Homo sapiens
caagggccaggctct

SEQ ID NO: 14358 - DNA, 15 bp, Homo sapiens
ccaagggccaggctc

SEQ ID NO: 14359 - DNA, 15 bp, Homo sapiens
cccaagggccaggct

SEQ ID NO: 14360 - DNA, 15 bp, Homo sapiens
tcccaagggccaggc

SEQ ID NO: 14361 - DNA, 15 bp, Homo sapiens
gtcccaagggccagg

SEQ ID NO: 14362 - DNA, 15 bp, Homo sapiens
tgtcccaagggccag

SEQ ID NO: 14363 - DNA, 15 bp, Homo sapiens
atgtcccaagggcca

SEQ ID NO: 14364 - DNA, 15 bp, Homo sapiens
catgtcccaagggcc

SEQ ID NO: 14365 - DNA, 15 bp, Homo sapiens
gcatgtcccaagggc

SEQ ID NO: 14366 - DNA, 15 bp, Homo sapiens
agcatgtcccaaggg

SEQ ID NO: 14367 - DNA, 15 bp, Homo sapiens
aagcatgtcccaagg

SEQ ID NO: 14368 - DNA, 15 bp, Homo sapiens
taagcatgtcccaag

SEQ ID NO: 14369 - DNA, 15 bp, Homo sapiens
ctaagcatgtcccaa

SEQ ID NO: 14370 - DNA, 15 bp, Homo sapiens
actaagcatgtccca

SEQ ID NO: 14371 - DNA, 15 bp, Homo sapiens
tactaagcatgtccc

SEQ ID NO: 14372 - DNA, 15 bp, Homo sapiens
ttactaagcatgtcc

SEQ ID NO: 14373 - DNA, 15 bp, Homo sapiens
cttactaagcatgtc

SEQ ID NO: 14374 - DNA, 15 bp, Homo sapiens
acttactaagcatgt

SEQ ID NO: 14375 - DNA, 15 bp, Homo sapiens
tacttactaagcatg

SEQ ID NO: 14376 - DNA, 15 bp, Homo sapiens
atacttactaagcat

SEQ ID NO: 14377 - DNA, 15 bp, Homo sapiens
aatacttactaagca

SEQ ID NO: 14378 - DNA, 15 bp, Homo sapiens
aaatacttactaagc

SEQ ID NO: 14379 - DNA, 15 bp, Homo sapiens
taaatacttactaag

SEQ ID NO: 14380 - DNA, 15 bp, Homo sapiens
gtaaatacttactaa

SEQ ID NO: 14381 - DNA, 15 bp, Homo sapiens
agtaaatacttacta

SEQ ID NO: 14382 - DNA, 15 bp, Homo sapiens
cagtaaatacttact

SEQ ID NO: 14383 - DNA, 15 bp, Homo sapiens
tcagtaaatacttac

SEQ ID NO: 14384 - DNA, 15 bp, Homo sapiens
ttcagtaaatactta

SEQ ID NO: 14385 - DNA, 15 bp, Homo sapiens
attcagtaaatactt

SEQ ID NO: 14386 - DNA, 15 bp, Homo sapiens
cattcagtaaatact

SEQ ID NO: 14387 - DNA, 15 bp, Homo sapiens
tcattcagtaaatac

SEQ ID NO: 14388 - DNA, 15 bp, Homo sapiens
ctcattcagtaaata

SEQ ID NO: 14389 - DNA, 15 bp, Homo sapiens
actcattcagtaaat

SEQ ID NO: 14390 - DNA, 15 bp, Homo sapiens
cactcattcagtaaa

SEQ ID NO: 14391 - DNA, 15 bp, Homo sapiens
ccactcattcagtaa

SEQ ID NO: 14392 - DNA, 15 bp, Homo sapiens
cccactcattcagta

SEQ ID NO: 14393 - DNA, 15 bp, Homo sapiens
tcccactcattcagt

SEQ ID NO: 14394 - DNA, 15 bp, Homo sapiens
ttcccactcattcag

SEQ ID NO: 14395 - DNA, 15 bp, Homo sapiens
tttcccactcattca

SEQ ID NO: 14396 - DNA, 15 bp, Homo sapiens
atttcccactcattc

SEQ ID NO: 14397 - DNA, 15 bp, Homo sapiens
catttcccactcatt

SEQ ID NO: 14398 - DNA, 15 bp, Homo sapiens
acatttcccactcat

SEQ ID NO: 14399 - DNA, 15 bp, Homo sapiens
gacatttcccactca

SEQ ID NO: 14400 - DNA, 15 bp, Homo sapiens
agacatttcccactc

SEQ ID NO: 14401 - DNA, 15 bp, Homo sapiens
aagacatttcccact

SEQ ID NO: 14402 - DNA, 15 bp, Homo sapiens
taagacatttcccac

SEQ ID NO: 14403 - DNA, 15 bp, Homo sapiens
ttaagacatttccca

SEQ ID NO: 14404 - DNA, 15 bp, Homo sapiens
cttaagacatttccc

SEQ ID NO: 14405 - DNA, 15 bp, Homo sapiens
ccttaagacatttcc

SEQ ID NO: 14406 - DNA, 15 bp, Homo sapiens
gccttaagacatttc

SEQ ID NO: 14407 - DNA, 15 bp, Homo sapiens
ggccttaagacattt

SEQ ID NO: 14408 - DNA, 15 bp, Homo sapiens
gggccttaagacatt

SEQ ID NO: 14409 - DNA, 15 bp, Homo sapiens
tgggccttaagacat

SEQ ID NO: 14410 - DNA, 15 bp, Homo sapiens
atgggccttaagaca

SEQ ID NO: 14411 - DNA, 15 bp, Homo sapiens
aatgggccttaagac

SEQ ID NO: 14412 - DNA, 15 bp, Homo sapiens
taatgggccttaaga

SEQ ID NO: 14413 - DNA, 15 bp, Homo sapiens
ctaatgggccttaag

SEQ ID NO: 14414 - DNA, 15 bp, Homo sapiens
actaatgggccttaa

SEQ ID NO: 14415 - DNA, 15 bp, Homo sapiens
aactaatgggcctta

SEQ ID NO: 14416 - DNA, 15 bp, Homo sapiens
aaactaatgggcctt

SEQ ID NO: 14417 - DNA, 15 bp, Homo sapiens
caaactaatgggcct

SEQ ID NO: 14418 - DNA, 15 bp, Homo sapiens
gcaaactaatgggcc

SEQ ID NO: 14419 - DNA, 15 bp, Homo sapiens
tgcaaactaatgggc

SEQ ID NO: 14420 - DNA, 15 bp, Homo sapiens
ctgcaaactaatggg

SEQ ID NO: 14421 - DNA, 15 bp, Homo sapiens
cctgcaaactaatgg

SEQ ID NO: 14422 - DNA, 15 bp, Homo sapiens
acctgcaaactaatg

SEQ ID NO: 14423 - DNA, 15 bp, Homo sapiens
gacctgcaaactaat

SEQ ID NO: 14424 - DNA, 15 bp, Homo sapiens
agacctgcaaactaa

SEQ ID NO: 14425 - DNA, 15 bp, Homo sapiens
aagacctgcaaacta

SEQ ID NO: 14426 - DNA, 15 bp, Homo sapiens
caagacctgcaaact

SEQ ID NO: 14427 - DNA, 15 bp, Homo sapiens
tcaagacctgcaaac

SEQ ID NO: 14428 - DNA, 15 bp, Homo sapiens
ctcaagacctgcaaa

SEQ ID NO: 14429 - DNA, 15 bp, Homo sapiens
cctcaagacctgcaa

SEQ ID NO: 14430 - DNA, 15 bp, Homo sapiens
tcctcaagacctgca

SEQ ID NO: 14431 - DNA, 15 bp, Homo sapiens
ctcctcaagacctgc

SEQ ID NO: 14432 - DNA, 15 bp, Homo sapiens
cctcctcaagacctg

SEQ ID NO: 14433 - DNA, 15 bp, Homo sapiens
gcctcctcaagacct

SEQ ID NO: 14434 - DNA, 15 bp, Homo sapiens
agcctcctcaagacc

SEQ ID NO: 14435 - DNA, 15 bp, Homo sapiens
gagcctcctcaagac

SEQ ID NO: 14436 - DNA, 15 bp, Homo sapiens
ggagcctcctcaaga

SEQ ID NO: 14437 - DNA, 15 bp, Homo sapiens
gggagcctcctcaag

SEQ ID NO: 14438 - DNA, 15 bp, Homo sapiens
agggagcctcctcaa

SEQ ID NO: 14439 - DNA, 15 bp, Homo sapiens
aagggagcctcctca

SEQ ID NO: 14440 - DNA, 15 bp, Homo sapiens
caagggagcctcctc

SEQ ID NO: 14441 - DNA, 15 bp, Homo sapiens
gcaagggagcctcct

SEQ ID NO: 14442 - DNA, 15 bp, Homo sapiens
tgcaagggagcctcc

SEQ ID NO: 14443 - DNA, 15 bp, Homo sapiens
gtgcaagggagcctc

SEQ ID NO: 14444 - DNA, 15 bp, Homo sapiens
agtgcaagggagcct

SEQ ID NO: 14445 - DNA, 15 bp, Homo sapiens
tagtgcaagggagcc

SEQ ID NO: 14446 - DNA, 15 bp, Homo sapiens
ctagtgcaagggagc

SEQ ID NO: 14447 - DNA, 15 bp, Homo sapiens
cctagtgcaagggag

SEQ ID NO: 14448 - DNA, 15 bp, Homo sapiens
tcctagtgcaaggga

SEQ ID NO: 14449 - DNA, 15 bp, Homo sapiens
ttcctagtgcaaggg

SEQ ID NO: 14450 - DNA, 15 bp, Homo sapiens
cttcctagtgcaagg

SEQ ID NO: 14451 - DNA, 15 bp, Homo sapiens
tcttcctagtgcaag

SEQ ID NO: 14452 - DNA, 15 bp, Homo sapiens
ttcttcctagtgcaa

SEQ ID NO: 14453 - DNA, 15 bp, Homo sapiens
attcttcctagtgca

SEQ ID NO: 14454 - DNA, 15 bp, Homo sapiens
tattcttcctagtgc

SEQ ID NO: 14455 - DNA, 15 bp, Homo sapiens
ctattcttcctagtg

SEQ ID NO: 14456 - DNA, 15 bp, Homo sapiens
tctattcttcctagt

SEQ ID NO: 14457 - DNA, 15 bp, Homo sapiens
ttctattcttcctag

SEQ ID NO: 14458 - DNA, 15 bp, Homo sapiens
tttctattcttccta

SEQ ID NO: 14459 - DNA, 15 bp, Homo sapiens
ctttctattcttcct

SEQ ID NO: 14460 - DNA, 15 bp, Homo sapiens
gctttctattcttcc

SEQ ID NO: 14461 - DNA, 15 bp, Homo sapiens
tgctttctattcttc

SEQ ID NO: 14462 - DNA, 15 bp, Homo sapiens
atgctttctattctt

SEQ ID NO: 14463 - DNA, 15 bp, Homo sapiens
tatgctttctattct

SEQ ID NO: 14464 - DNA, 15 bp, Homo sapiens
gtatgctttctattc

SEQ ID NO: 14465 - DNA, 15 bp, Homo sapiens
tgtatgctttctatt

SEQ ID NO: 14466 - DNA, 15 bp, Homo sapiens
atgtatgctttctat

SEQ ID NO: 14467 - DNA, 15 bp, Homo sapiens
tatgtatgctttcta

SEQ ID NO: 14468 - DNA, 15 bp, Homo sapiens
ttatgtatgctttct

SEQ ID NO: 14469 - DNA, 15 bp, Homo sapiens
tttatgtatgctttc

SEQ ID NO: 14470 - DNA, 15 bp, Homo sapiens
ctttatgtatgcttt

SEQ ID NO: 14471 - DNA, 15 bp, Homo sapiens
gctttatgtatgctt

SEQ ID NO: 14472 - DNA, 15 bp, Homo sapiens
ggctttatgtatgct

SEQ ID NO: 14473 - DNA, 15 bp, Homo sapiens
aggctttatgtatgc

SEQ ID NO: 14474 - DNA, 15 bp, Homo sapiens
caggctttatgtatg

SEQ ID NO: 14475 - DNA, 15 bp, Homo sapiens
acaggctttatgtat

SEQ ID NO: 14476 - DNA, 15 bp, Homo sapiens
cacaggctttatgta

SEQ ID NO: 14477 - DNA, 15 bp, Homo sapiens
acacaggctttatgt

SEQ ID NO: 14478 - DNA, 15 bp, Homo sapiens
cacacaggctttatg

SEQ ID NO: 14479 - DNA, 15 bp, Homo sapiens
gcacacaggctttat

SEQ ID NO: 14480 - DNA, 15 bp, Homo sapiens
agcacacaggcttta

SEQ ID NO: 14481 - DNA, 15 bp, Homo sapiens
cagcacacaggcttt

SEQ ID NO: 14482 - DNA, 15 bp, Homo sapiens
gcagcacacaggctt

SEQ ID NO: 14483 - DNA, 15 bp, Homo sapiens
ggcagcacacaggct

SEQ ID NO: 14484 - DNA, 15 bp, Homo sapiens
cggcagcacacaggc

SEQ ID NO: 14485 - DNA, 15 bp, Homo sapiens
gcggcagcacacagg

SEQ ID NO: 14486 - DNA, 15 bp, Homo sapiens
ggcggcagcacacag

SEQ ID NO: 14487 - DNA, 15 bp, Homo sapiens
tggcggcagcacaca

SEQ ID NO: 14488 - DNA, 15 bp, Homo sapiens
ctggcggcagcacac

SEQ ID NO: 14489 - DNA, 15 bp, Homo sapiens
cctggcggcagcaca

SEQ ID NO: 14490 - DNA, 15 bp, Homo sapiens
tcctggcggcagcac

SEQ ID NO: 14491 - DNA, 15 bp, Homo sapiens
ttcctggcggcagca

SEQ ID NO: 14492 - DNA, 15 bp, Homo sapiens
cttcctggcggcagc

SEQ ID NO: 14493 - DNA, 15 bp, Homo sapiens
tcttcctggcggcag

SEQ ID NO: 14494 - DNA, 15 bp, Homo sapiens
gtcttcctggcggca

SEQ ID NO: 14495 - DNA, 15 bp, Homo sapiens
agtcttcctggcggc

SEQ ID NO: 14496 - DNA, 15 bp, Homo sapiens
tagtcttcctggcgg

SEQ ID NO: 14497 - DNA, 15 bp, Homo sapiens
ctagtcttcctggcg

SEQ ID NO: 14498 - DNA, 15 bp, Homo sapiens
tctagtcttcctggc

SEQ ID NO: 14499 - DNA, 15 bp, Homo sapiens
ttctagtcttcctgg

SEQ ID NO: 14500 - DNA, 15 bp, Homo sapiens
tttctagtcttcctg

SEQ ID NO: 14501 - DNA, 15 bp, Homo sapiens
gtttctagtcttcct

SEQ ID NO: 14502 - DNA, 15 bp, Homo sapiens
cgtttctagtcttcc

SEQ ID NO: 14503 - DNA, 15 bp, Homo sapiens
gcgtttctagtcttc

SEQ ID NO: 14504 - DNA, 15 bp, Homo sapiens
agcgtttctagtctt

SEQ ID NO: 14505 - DNA, 15 bp, Homo sapiens
tagcgtttctagtct

SEQ ID NO: 14506 - DNA, 15 bp, Homo sapiens
atagcgtttctagtc

SEQ ID NO: 14507 - DNA, 15 bp, Homo sapiens
catagcgtttctagt

SEQ ID NO: 14508 - DNA, 15 bp, Homo sapiens
acatagcgtttctag

SEQ ID NO: 14509 - DNA, 15 bp, Homo sapiens
aacatagcgtttcta

SEQ ID NO: 14510 - DNA, 15 bp, Homo sapiens
gaacatagcgtttct

SEQ ID NO: 14511 - DNA, 15 bp, Homo sapiens
tgaacatagcgtttc

SEQ ID NO: 14512 - DNA, 15 bp, Homo sapiens
ctgaacatagcgttt

SEQ ID NO: 14513 - DNA, 15 bp, Homo sapiens
gctgaacatagcgtt

SEQ ID NO: 14514 - DNA, 15 bp, Homo sapiens
ggctgaacatagcgt

SEQ ID NO: 14515 - DNA, 15 bp, Homo sapiens
aggctgaacatagcg

SEQ ID NO: 14516 - DNA, 15 bp, Homo sapiens
caggctgaacatagc

SEQ ID NO: 14517 - DNA, 15 bp, Homo sapiens
ccaggctgaacatag

SEQ ID NO: 14518 - DNA, 15 bp, Homo sapiens
tccaggctgaacata

SEQ ID NO: 14519 - DNA, 15 bp, Homo sapiens
ctccaggctgaacat

SEQ ID NO: 14520 - DNA, 15 bp, Homo sapiens
gctccaggctgaaca

SEQ ID NO: 14521 - DNA, 15 bp, Homo sapiens
agctccaggctgaac

SEQ ID NO: 14522 - DNA, 15 bp, Homo sapiens
cagctccaggctgaa

SEQ ID NO: 14523 - DNA, 15 bp, Homo sapiens
tcagctccaggctga

SEQ ID NO: 14524 - DNA, 15 bp, Homo sapiens
ttcagctccaggctg

SEQ ID NO: 14525 - DNA, 15 bp, Homo sapiens
attcagctccaggct

SEQ ID NO: 14526 - DNA, 15 bp, Homo sapiens
cattcagctccaggc

SEQ ID NO: 14527 - DNA, 15 bp, Homo sapiens
ccattcagctccagg

SEQ ID NO: 14528 - DNA, 15 bp, Homo sapiens
accattcagctccag

SEQ ID NO: 14529 - DNA, 15 bp, Homo sapiens
taccattcagctcca

SEQ ID NO: 14530 - DNA, 15 bp, Homo sapiens
ataccattcagctcc

SEQ ID NO: 14531 - DNA, 15 bp, Homo sapiens
tataccattcagctc

SEQ ID NO: 14532 - DNA, 15 bp, Homo sapiens
gtataccattcagct

SEQ ID NO: 14533 - DNA, 15 bp, Homo sapiens
ggtataccattcagc

SEQ ID NO: 14534 - DNA, 15 bp, Homo sapiens
gggtataccattcag

SEQ ID NO: 14535 - DNA, 15 bp, Homo sapiens
ggggtataccattca

SEQ ID NO: 14536 - DNA, 15 bp, Homo sapiens
tggggtataccattc

SEQ ID NO: 14537 - DNA, 15 bp, Homo sapiens
ctggggtataccatt

SEQ ID NO: 14538 - DNA, 15 bp, Homo sapiens
tctggggtataccat

SEQ ID NO: 14539 - DNA, 15 bp, Homo sapiens
ctctggggtatacca

SEQ ID NO: 14540 - DNA, 15 bp, Homo sapiens
gctctggggtatacc

SEQ ID NO: 14541 - DNA, 15 bp, Homo sapiens
tgctctggggtatac

SEQ ID NO: 14542 - DNA, 15 bp, Homo sapiens
ttgctctggggtata

SEQ ID NO: 14543 - DNA, 15 bp, Homo sapiens
gttgctctggggtat

SEQ ID NO: 14544 - DNA, 15 bp, Homo sapiens
ggttgctctggggta

SEQ ID NO: 14545 - DNA, 15 bp, Homo sapiens
gggttgctctggggt

SEQ ID NO: 14546 - DNA, 15 bp, Homo sapiens
agggttgctctgggg

SEQ ID NO: 14547 - DNA, 15 bp, Homo sapiens
cagggttgctctggg

SEQ ID NO: 14548 - DNA, 15 bp, Homo sapiens
acagggttgctctgg

SEQ ID NO: 14549 - DNA, 15 bp, Homo sapiens
aacagggttgctctg

SEQ ID NO: 14550 - DNA, 15 bp, Homo sapiens
caacagggttgctct

SEQ ID NO: 14551 - DNA, 15 bp, Homo sapiens
tcaacagggttgctc

SEQ ID NO: 14552 - DNA, 15 bp, Homo sapiens
ttcaacagggttgct

SEQ ID NO: 14553 - DNA, 15 bp, Homo sapiens
tttcaacagggttgc

SEQ ID NO: 14554 - DNA, 15 bp, Homo sapiens
ctttcaacagggttg

SEQ ID NO: 14555 - DNA, 15 bp, Homo sapiens
cctttcaacagggtt

SEQ ID NO: 14556 - DNA, 15 bp, Homo sapiens
gcctttcaacagggt

SEQ ID NO: 14557 - DNA, 15 bp, Homo sapiens
tgcctttcaacaggg

SEQ ID NO: 14558 - DNA, 15 bp, Homo sapiens
ctgcctttcaacagg

SEQ ID NO: 14559 - DNA, 15 bp, Homo sapiens
actgcctttcaacag

SEQ ID NO: 14560 - DNA, 15 bp, Homo sapiens
cactgcctttcaaca

SEQ ID NO: 14561 - DNA, 15 bp, Homo sapiens
gcactgcctttcaac

SEQ ID NO: 14562 - DNA, 15 bp, Homo sapiens
agcactgcctttcaa

SEQ ID NO: 14563 - DNA, 15 bp, Homo sapiens
aagcactgcctttca

SEQ ID NO: 14564 - DNA, 15 bp, Homo sapiens
caagcactgcctttc

SEQ ID NO: 14565 - DNA, 15 bp, Homo sapiens
gcaagcactgccttt

SEQ ID NO: 14566 - DNA, 15 bp, Homo sapiens
ggcaagcactgcctt

SEQ ID NO: 14567 - DNA, 15 bp, Homo sapiens
aggcaagcactgcct

SEQ ID NO: 14568 - DNA, 15 bp, Homo sapiens
aaggcaagcactgcc

SEQ ID NO: 14569 - DNA, 15 bp, Homo sapiens
aaaggcaagcactgc

SEQ ID NO: 14570 - DNA, 15 bp, Homo sapiens
aaaaggcaagcactg

SEQ ID NO: 14571 - DNA, 15 bp, Homo sapiens
gaaaaggcaagcact

SEQ ID NO: 14572 - DNA, 15 bp, Homo sapiens
tgaaaaggcaagcac

SEQ ID NO: 14573 - DNA, 15 bp, Homo sapiens
atgaaaaggcaagca

SEQ ID NO: 14574 - DNA, 15 bp, Homo sapiens
aatgaaaaggcaagc

SEQ ID NO: 14575 - DNA, 15 bp, Homo sapiens
gaatgaaaaggcaag

SEQ ID NO: 14576 - DNA, 15 bp, Homo sapiens
agaatgaaaaggcaa

SEQ ID NO: 14577 - DNA, 15 bp, Homo sapiens
cagaatgaaaaggca

SEQ ID NO: 14578 - DNA, 15 bp, Homo sapiens
acagaatgaaaaggc

SEQ ID NO: 14579 - DNA, 15 bp, Homo sapiens
cacagaatgaaaagg

SEQ ID NO: 14580 - DNA, 15 bp, Homo sapiens
acacagaatgaaaag

SEQ ID NO: 14581 - DNA, 15 bp, Homo sapiens
gacacagaatgaaaa

SEQ ID NO: 14582 - DNA, 15 bp, Homo sapiens
ggacacagaatgaaa

SEQ ID NO: 14583 - DNA, 15 bp, Homo sapiens
aggacacagaatgaa

SEQ ID NO: 14584 - DNA, 15 bp, Homo sapiens
caggacacagaatga

SEQ ID NO: 14585 - DNA, 15 bp, Homo sapiens
ccaggacacagaatg

SEQ ID NO: 14586 - DNA, 15 bp, Homo sapiens
accaggacacagaat

SEQ ID NO: 14587 - DNA, 15 bp, Homo sapiens
aaccaggacacagaa

SEQ ID NO: 14588 - DNA, 15 bp, Homo sapiens
aaaccaggacacaga

SEQ ID NO: 14589 - DNA, 15 bp, Homo sapiens
caaaccaggacacag

SEQ ID NO: 14590 - DNA, 15 bp, Homo sapiens
gcaaaccaggacaca

SEQ ID NO: 14591 - DNA, 15 bp, Homo sapiens
agcaaaccaggacac

SEQ ID NO: 14592 - DNA, 15 bp, Homo sapiens
cagcaaaccaggaca

SEQ ID NO: 14593 - DNA, 15 bp, Homo sapiens
ccagcaaaccaggac

SEQ ID NO: 14594 - DNA, 15 bp, Homo sapiens
accagcaaaccagga

SEQ ID NO: 14595 - DNA, 15 bp, Homo sapiens
taccagcaaaccagg

SEQ ID NO: 14596 - DNA, 15 bp, Homo sapiens
ttaccagcaaaccag

SEQ ID NO: 14597 - DNA, 15 bp, Homo sapiens
gttaccagcaaacca

SEQ ID NO: 14598 - DNA, 15 bp, Homo sapiens
agttaccagcaaacc

SEQ ID NO: 14599 - DNA, 15 bp, Homo sapiens
gagttaccagcaaac

SEQ ID NO: 14600 - DNA, 15 bp, Homo sapiens
ggagttaccagcaaa

SEQ ID NO: 14601 - DNA, 15 bp, Homo sapiens
aggagttaccagcaa

SEQ ID NO: 14602 - DNA, 15 bp, Homo sapiens
caggagttaccagca

SEQ ID NO: 14603 - DNA, 15 bp, Homo sapiens
ccaggagttaccagc

SEQ ID NO: 14604 - DNA, 15 bp, Homo sapiens
cccaggagttaccag

SEQ ID NO: 14605 - DNA, 15 bp, Homo sapiens
acccaggagttacca

SEQ ID NO: 14606 - DNA, 15 bp, Homo sapiens
gacccaggagttacc

SEQ ID NO: 14607 - DNA, 15 bp, Homo sapiens
ggacccaggagttac

SEQ ID NO: 14608 - DNA, 15 bp, Homo sapiens
gggacccaggagtta

SEQ ID NO: 14609 - DNA, 15 bp, Homo sapiens
ggggacccaggagtt

SEQ ID NO: 14610 - DNA, 15 bp, Homo sapiens
aggggacccaggagt

SEQ ID NO: 14611 - DNA, 15 bp, Homo sapiens
caggggacccaggag

SEQ ID NO: 14612 - DNA, 15 bp, Homo sapiens
gcaggggacccagga

SEQ ID NO: 14613 - DNA, 15 bp, Homo sapiens
ggcaggggacccagg

SEQ ID NO: 14614 - DNA, 15 bp, Homo sapiens
aggcaggggacccag

SEQ ID NO: 14615 - DNA, 15 bp, Homo sapiens
gaggcaggggaccca

SEQ ID NO: 14616 - DNA, 15 bp, Homo sapiens
agaggcaggggaccc

SEQ ID NO: 14617 - DNA, 15 bp, Homo sapiens
gagaggcaggggacc

SEQ ID NO: 14618 - DNA, 15 bp, Homo sapiens
ggagaggcaggggac

SEQ ID NO: 14619 - DNA, 15 bp, Homo sapiens
aggagaggcagggga

SEQ ID NO: 14620 - DNA, 15 bp, Homo sapiens
caggagaggcagggg

SEQ ID NO: 14621 - DNA, 15 bp, Homo sapiens
acaggagaggcaggg

SEQ ID NO: 14622 - DNA, 15 bp, Homo sapiens
tacaggagaggcagg

SEQ ID NO: 14623 - DNA, 15 bp, Homo sapiens
gtacaggagaggcag

SEQ ID NO: 14624 - DNA, 15 bp, Homo sapiens
ggtacaggagaggca

SEQ ID NO: 14625 - DNA, 15 bp, Homo sapiens
gggtacaggagaggc

SEQ ID NO: 14626 - DNA, 15 bp, Homo sapiens
ggggtacaggagagg

SEQ ID NO: 14627 - DNA, 15 bp, Homo sapiens
gggggtacaggagag

SEQ ID NO: 14628 - DNA, 15 bp, Homo sapiens
tgggggtacaggaga

SEQ ID NO: 14629 - DNA, 15 bp, Homo sapiens
atgggggtacaggag

SEQ ID NO: 14630 - DNA, 15 bp, Homo sapiens
aatgggggtacagga

SEQ ID NO: 14631 - DNA, 15 bp, Homo sapiens
caatgggggtacagg

SEQ ID NO: 14632 - DNA, 15 bp, Homo sapiens
acaatgggggtacag

SEQ ID NO: 14633 - DNA, 15 bp, Homo sapiens
cacaatgggggtaca

SEQ ID NO: 14634 - DNA, 15 bp, Homo sapiens
gcacaatgggggtac

SEQ ID NO: 14635 - DNA, 15 bp, Homo sapiens
tgcacaatgggggta

SEQ ID NO: 14636 - DNA, 15 bp, Homo sapiens
ctgcacaatgggggt

SEQ ID NO: 14637 - DNA, 15 bp, Homo sapiens
tctgcacaatggggg

SEQ ID NO: 14638 - DNA, 15 bp, Homo sapiens
gtctgcacaatgggg

SEQ ID NO: 14639 - DNA, 15 bp, Homo sapiens
agtctgcacaatggg

SEQ ID NO: 14640 - DNA, 15 bp, Homo sapiens
cagtctgcacaatgg

SEQ ID NO: 14641 - DNA, 15 bp, Homo sapiens
tcagtctgcacaatg

SEQ ID NO: 14642 - DNA, 15 bp, Homo sapiens
ctcagtctgcacaat

SEQ ID NO: 14643 - DNA, 15 bp, Homo sapiens
cctcagtctgcacaa

SEQ ID NO: 14644 - DNA, 15 bp, Homo sapiens
ccctcagtctgcaca

SEQ ID NO: 14645 - DNA, 15 bp, Homo sapiens
cccctcagtctgcac

SEQ ID NO: 14646 - DNA, 15 bp, Homo sapiens
ccccctcagtctgca

SEQ ID NO: 14647 - DNA, 15 bp, Homo sapiens
cccccctcagtctgc

SEQ ID NO: 14648 - DNA, 15 bp, Homo sapiens
tcccccctcagtctg

SEQ ID NO: 14649 - DNA, 15 bp, Homo sapiens
gtcccccctcagtct

SEQ ID NO: 14650 - DNA, 15 bp, Homo sapiens
ggtcccccctcagtc

SEQ ID NO: 14651 - DNA, 15 bp, Homo sapiens
tggtcccccctcagt

SEQ ID NO: 14652 - DNA, 15 bp, Homo sapiens
atggtcccccctcag

SEQ ID NO: 14653 - DNA, 15 bp, Homo sapiens
gatggtcccccctca

SEQ ID NO: 14654 - DNA, 15 bp, Homo sapiens
tgatggtcccccctc

SEQ ID NO: 14655 - DNA, 15 bp, Homo sapiens
ctgatggtcccccct

SEQ ID NO: 14656 - DNA, 15 bp, Homo sapiens
gctgatggtcccccc

SEQ ID NO: 14657 - DNA, 15 bp, Homo sapiens
ggctgatggtccccc

SEQ ID NO: 14658 - DNA, 15 bp, Homo sapiens
tggctgatggtcccc

SEQ ID NO: 14659 - DNA, 15 bp, Homo sapiens
ctggctgatggtccc

SEQ ID NO: 14660 - DNA, 15 bp, Homo sapiens
cctggctgatggtcc

SEQ ID NO: 14661 - DNA, 15 bp, Homo sapiens
ccctggctgatggtc

SEQ ID NO: 14662 - DNA, 15 bp, Homo sapiens
accctggctgatggt

SEQ ID NO: 14663 - DNA, 15 bp, Homo sapiens
aaccctggctgatgg

SEQ ID NO: 14664 - DNA, 15 bp, Homo sapiens
taaccctggctgatg

SEQ ID NO: 14665 - DNA, 15 bp, Homo sapiens
ctaaccctggctgat

SEQ ID NO: 14666 - DNA, 15 bp, Homo sapiens
actaaccctggctga

SEQ ID NO: 14667 - DNA, 15 bp, Homo sapiens
aactaaccctggctg

SEQ ID NO: 14668 - DNA, 15 bp, Homo sapiens
aaactaaccctggct

SEQ ID NO: 14669 - DNA, 15 bp, Homo sapiens
aaaactaaccctggc

SEQ ID NO: 14670 - DNA, 15 bp, Homo sapiens
gaaaactaaccctgg

SEQ ID NO: 14671 - DNA, 15 bp, Homo sapiens
ggaaaactaaccctg

SEQ ID NO: 14672 - DNA, 15 bp, Homo sapiens
cggaaaactaaccct

SEQ ID NO: 14673 - DNA, 15 bp, Homo sapiens
gcggaaaactaaccc

SEQ ID NO: 14674 - DNA, 15 bp, Homo sapiens
agcggaaaactaacc

SEQ ID NO: 14675 - DNA, 15 bp, Homo sapiens
cagcggaaaactaac

SEQ ID NO: 14676 - DNA, 15 bp, Homo sapiens
acagcggaaaactaa

SEQ ID NO: 14677 - DNA, 15 bp, Homo sapiens
aacagcggaaaacta

SEQ ID NO: 14678 - DNA, 15 bp, Homo sapiens
aaacagcggaaaact

SEQ ID NO: 14679 - DNA, 15 bp, Homo sapiens
gaaacagcggaaaac

SEQ ID NO: 14680 - DNA, 15 bp, Homo sapiens
agaaacagcggaaaa

SEQ ID NO: 14681 - DNA, 15 bp, Homo sapiens
cagaaacagcggaaa

SEQ ID NO: 14682 - DNA, 15 bp, Homo sapiens
acagaaacagcggaa

SEQ ID NO: 14683 - DNA, 15 bp, Homo sapiens
aacagaaacagcgga

SEQ ID NO: 14684 - DNA, 15 bp, Homo sapiens
taacagaaacagcgg

SEQ ID NO: 14685 - DNA, 15 bp, Homo sapiens
ctaacagaaacagcg

SEQ ID NO: 14686 - DNA, 15 bp, Homo sapiens
cctaacagaaacagc

SEQ ID NO: 14687 - DNA, 15 bp, Homo sapiens
gcctaacagaaacag

SEQ ID NO: 14688 - DNA, 15 bp, Homo sapiens
tgcctaacagaaaca

SEQ ID NO: 14689 - DNA, 15 bp, Homo sapiens
ttgcctaacagaaac

SEQ ID NO: 14690 - DNA, 15 bp, Homo sapiens
tttgcctaacagaaa

SEQ ID NO: 14691 - DNA, 15 bp, Homo sapiens
ctttgcctaacagaa

SEQ ID NO: 14692 - DNA, 15 bp, Homo sapiens
tctttgcctaacaga

SEQ ID NO: 14693 - DNA, 15 bp, Homo sapiens
ttctttgcctaacag

SEQ ID NO: 14694 - DNA, 15 bp, Homo sapiens
attctttgcctaaca

SEQ ID NO: 14695 - DNA, 15 bp, Homo sapiens
tattctttgcctaac

SEQ ID NO: 14696 - DNA, 15 bp, Homo sapiens
ttattctttgcctaa

SEQ ID NO: 14697 - DNA, 15 bp, Homo sapiens
tttattctttgccta

SEQ ID NO: 14698 - DNA, 15 bp, Homo sapiens
atttattctttgcct

SEQ ID NO: 14699 - DNA, 15 bp, Homo sapiens
aatttattctttgcc

SEQ ID NO: 14700 - DNA, 15 bp, Homo sapiens
caatttattctttgc

SEQ ID NO: 14701 - DNA, 15 bp, Homo sapiens
tcaatttattctttg

SEQ ID NO: 14702 - DNA, 15 bp, Homo sapiens
ttcaatttattcttt

SEQ ID NO: 14703 - DNA, 15 bp, Homo sapiens
attcaatttattctt

SEQ ID NO: 14704 - DNA, 15 bp, Homo sapiens
aattcaatttattct

SEQ ID NO: 14705 - DNA, 15 bp, Homo sapiens
caattcaatttattc

SEQ ID NO: 14706 - DNA, 15 bp, Homo sapiens
tcaattcaatttatt

SEQ ID NO: 14707 - DNA, 15 bp, Homo sapiens
ctcaattcaatttat

SEQ ID NO: 14708 - DNA, 15 bp, Homo sapiens
actcaattcaattta

SEQ ID NO: 14709 - DNA, 15 bp, Homo sapiens
aactcaattcaattt

SEQ ID NO: 14710 - DNA, 15 bp, Homo sapiens
caactcaattcaatt

SEQ ID NO: 14711 - DNA, 15 bp, Homo sapiens
acaactcaattcaat

SEQ ID NO: 14712 - DNA, 15 bp, Homo sapiens
cacaactcaattcaa

SEQ ID NO: 14713 - DNA, 15 bp, Homo sapiens
tcacaactcaattca

SEQ ID NO: 14714 - DNA, 15 bp, Homo sapiens
ttcacaactcaattc

SEQ ID NO: 14715 - DNA, 15 bp, Homo sapiens
tttcacaactcaatt

SEQ ID NO: 14716 - DNA, 15 bp, Homo sapiens
ctttcacaactcaat

SEQ ID NO: 14717 - DNA, 15 bp, Homo sapiens
actttcacaactcaa

SEQ ID NO: 14718 - DNA, 15 bp, Homo sapiens
aactttcacaactca

SEQ ID NO: 14719 - DNA, 15 bp, Homo sapiens
caactttcacaactc

SEQ ID NO: 14720 - DNA, 15 bp, Homo sapiens
ccaactttcacaact

SEQ ID NO: 14721 - DNA, 15 bp, Homo sapiens
cccaactttcacaac

SEQ ID NO: 14722 - DNA, 15 bp, Homo sapiens
acccaactttcacaa

SEQ ID NO: 14723 - DNA, 15 bp, Homo sapiens
cacccaactttcaca

SEQ ID NO: 14724 - DNA, 15 bp, Homo sapiens
gcacccaactttcac

SEQ ID NO: 14725 - DNA, 15 bp, Homo sapiens
tgcacccaactttca

SEQ ID NO: 14726 - DNA, 15 bp, Homo sapiens
ttgcacccaactttc

SEQ ID NO: 14727 - DNA, 15 bp, Homo sapiens
tttgcacccaacttt

SEQ ID NO: 14728 - DNA, 15 bp, Homo sapiens
ctttgcacccaactt

SEQ ID NO: 14729 - DNA, 15 bp, Homo sapiens
gctttgcacccaact

SEQ ID NO: 14730 - DNA, 15 bp, Homo sapiens
agctttgcacccaac

SEQ ID NO: 14731 - DNA, 15 bp, Homo sapiens
gagctttgcacccaa

SEQ ID NO: 14732 - DNA, 15 bp, Homo sapiens
tgagctttgcaccca

SEQ ID NO: 14733 - DNA, 15 bp, Homo sapiens
ctgagctttgcaccc

SEQ ID NO: 14734 - DNA, 15 bp, Homo sapiens
actgagctttgcacc

SEQ ID NO: 14735 - DNA, 15 bp, Homo sapiens
aactgagctttgcac

SEQ ID NO: 14736 - DNA, 15 bp, Homo sapiens
aaactgagctttgca

SEQ ID NO: 14737 - DNA, 15 bp, Homo sapiens
caaactgagctttgc

SEQ ID NO: 14738 - DNA, 15 bp, Homo sapiens
ccaaactgagctttg

SEQ ID NO: 14739 - DNA, 15 bp, Homo sapiens
cccaaactgagcttt

SEQ ID NO: 14740 - DNA, 15 bp, Homo sapiens
acccaaactgagctt

SEQ ID NO: 14741 - DNA, 15 bp, Homo sapiens
gacccaaactgagct

SEQ ID NO: 14742 - DNA, 15 bp, Homo sapiens
ggacccaaactgagc

SEQ ID NO: 14743 - DNA, 15 bp, Homo sapiens
tggacccaaactgag

SEQ ID NO: 14744 - DNA, 15 bp, Homo sapiens
ttggacccaaactga

SEQ ID NO: 14745 - DNA, 15 bp, Homo sapiens
tttggacccaaactg

SEQ ID NO: 14746 - DNA, 15 bp, Homo sapiens
ctttggacccaaact

SEQ ID NO: 14747 - DNA, 15 bp, Homo sapiens
actttggacccaaac

SEQ ID NO: 14748 - DNA, 15 bp, Homo sapiens
tactttggacccaaa

SEQ ID NO: 14749 - DNA, 15 bp, Homo sapiens
ttactttggacccaa

SEQ ID NO: 14750 - DNA, 15 bp, Homo sapiens
gttactttggaccca

SEQ ID NO: 14751 - DNA, 15 bp, Homo sapiens
tgttactttggaccc

SEQ ID NO: 14752 - DNA, 15 bp, Homo sapiens
ctgttactttggacc

SEQ ID NO: 14753 - DNA, 15 bp, Homo sapiens
actgttactttggac

SEQ ID NO: 14754 - DNA, 15 bp, Homo sapiens
aactgttactttgga

SEQ ID NO: 14755 - DNA, 15 bp, Homo sapiens
taactgttactttgg

SEQ ID NO: 14756 - DNA, 15 bp, Homo sapiens
ttaactgttactttg

SEQ ID NO: 14757 - DNA, 15 bp, Homo sapiens
gttaactgttacttt

SEQ ID NO: 14758 - DNA, 15 bp, Homo sapiens
agttaactgttactt

SEQ ID NO: 14759 - DNA, 15 bp, Homo sapiens
aagttaactgttact

SEQ ID NO: 14760 - DNA, 15 bp, Homo sapiens
caagttaactgttac

SEQ ID NO: 14761 - DNA, 15 bp, Homo sapiens
acaagttaactgtta

SEQ ID NO: 14762 - DNA, 15 bp, Homo sapiens
cacaagttaactgtt

SEQ ID NO: 14763 - DNA, 15 bp, Homo sapiens
acacaagttaactgt

SEQ ID NO: 14764 - DNA, 15 bp, Homo sapiens
cacacaagttaactg

SEQ ID NO: 14765 - DNA, 15 bp, Homo sapiens
ccacacaagttaact

SEQ ID NO: 14766 - DNA, 15 bp, Homo sapiens
cccacacaagttaac

SEQ ID NO: 14767 - DNA, 15 bp, Homo sapiens
acccacacaagttaa

SEQ ID NO: 14768 - DNA, 15 bp, Homo sapiens
cacccacacaagtta

SEQ ID NO: 14769 - DNA, 15 bp, Homo sapiens
ccacccacacaagtt

SEQ ID NO: 14770 - DNA, 15 bp, Homo sapiens
gccacccacacaagt

SEQ ID NO: 14771 - DNA, 15 bp, Homo sapiens
tgccacccacacaag

SEQ ID NO: 14772 - DNA, 15 bp, Homo sapiens
ctgccacccacacaa

SEQ ID NO: 14773 - DNA, 15 bp, Homo sapiens
cctgccacccacaca

SEQ ID NO: 14774 - DNA, 15 bp, Homo sapiens
acctgccacccacac

SEQ ID NO: 14775 - DNA, 15 bp, Homo sapiens
tacctgccacccaca

SEQ ID NO: 14776 - DNA, 15 bp, Homo sapiens
atacctgccacccac

SEQ ID NO: 14777 - DNA, 15 bp, Homo sapiens
aatacctgccaccca

SEQ ID NO: 14778 - DNA, 15 bp, Homo sapiens
gaatacctgccaccc

SEQ ID NO: 14779 - DNA, 15 bp, Homo sapiens
tgaatacctgccacc

SEQ ID NO: 14780 - DNA, 15 bp, Homo sapiens
ctgaatacctgccac

SEQ ID NO: 14781 - DNA, 15 bp, Homo sapiens
actgaatacctgcca

SEQ ID NO: 14782 - DNA, 15 bp, Homo sapiens
tactgaatacctgcc

SEQ ID NO: 14783 - DNA, 15 bp, Homo sapiens
gtactgaatacctgc

SEQ ID NO: 14784 - DNA, 15 bp, Homo sapiens
tgtactgaatacctg

SEQ ID NO: 14785 - DNA, 15 bp, Homo sapiens
ttgtactgaatacct

SEQ ID NO: 14786 - DNA, 15 bp, Homo sapiens
tttgtactgaatacc

SEQ ID NO: 14787 - DNA, 15 bp, Homo sapiens
gtttgtactgaatac

SEQ ID NO: 14788 - DNA, 15 bp, Homo sapiens
tgtttgtactgaata

SEQ ID NO: 14789 - DNA, 15 bp, Homo sapiens
ctgtttgtactgaat

SEQ ID NO: 14790 - DNA, 15 bp, Homo sapiens
cctgtttgtactgaa

SEQ ID NO: 14791 - DNA, 15 bp, Homo sapiens
ccctgtttgtactga

SEQ ID NO: 14792 - DNA, 15 bp, Homo sapiens
gccctgtttgtactg

SEQ ID NO: 14793 - DNA, 15 bp, Homo sapiens
agccctgtttgtact

SEQ ID NO: 14794 - DNA, 15 bp, Homo sapiens
cagccctgtttgtac

SEQ ID NO: 14795 - DNA, 15 bp, Homo sapiens
ccagccctgtttgta

SEQ ID NO: 14796 - DNA, 15 bp, Homo sapiens
cccagccctgtttgt

SEQ ID NO: 14797 - DNA, 15 bp, Homo sapiens
ccccagccctgtttg

SEQ ID NO: 14798 - DNA, 15 bp, Homo sapiens
tccccagccctgttt

SEQ ID NO: 14799 - DNA, 15 bp, Homo sapiens
gtccccagccctgtt

SEQ ID NO: 14800 - DNA, 15 bp, Homo sapiens
tgtccccagccctgt

SEQ ID NO: 14801 - DNA, 15 bp, Homo sapiens
ctgtccccagccctg

SEQ ID NO: 14802 - DNA, 15 bp, Homo sapiens
cctgtccccagccct

SEQ ID NO: 14803 - DNA, 15 bp, Homo sapiens
tcctgtccccagccc

SEQ ID NO: 14804 - DNA, 15 bp, Homo sapiens
ttcctgtccccagcc

SEQ ID NO: 14805 - DNA, 15 bp, Homo sapiens
cttcctgtccccagc

SEQ ID NO: 14806 - DNA, 15 bp, Homo sapiens
ccttcctgtccccag

SEQ ID NO: 14807 - DNA, 15 bp, Homo sapiens
cccttcctgtcccca

SEQ ID NO: 14808 - DNA, 15 bp, Homo sapiens
ccccttcctgtcccc

SEQ ID NO: 14809 - DNA, 15 bp, Homo sapiens
tccccttcctgtccc

SEQ ID NO: 14810 - DNA, 15 bp, Homo sapiens
ttccccttcctgtcc

SEQ ID NO: 14811 - DNA, 15 bp, Homo sapiens
cttccccttcctgtc

SEQ ID NO: 14812 - DNA, 15 bp, Homo sapiens
tcttccccttcctgt

SEQ ID NO: 14813 - DNA, 15 bp, Homo sapiens
ctcttccccttcctg

SEQ ID NO: 14814 - DNA, 15 bp, Homo sapiens
tctcttccccttcct

SEQ ID NO: 14815 - DNA, 15 bp, Homo sapiens
ttctcttccccttcc

SEQ ID NO: 14816 - DNA, 15 bp, Homo sapiens
gttctcttccccttc

SEQ ID NO: 14817 - DNA, 15 bp, Homo sapiens
agttctcttcccctt

SEQ ID NO: 14818 - DNA, 15 bp, Homo sapiens
aagttctcttcccct

SEQ ID NO: 14819 - DNA, 15 bp, Homo sapiens
gaagttctcttcccc

SEQ ID NO: 14820 - DNA, 15 bp, Homo sapiens
tgaagttctcttccc

SEQ ID NO: 14821 - DNA, 15 bp, Homo sapiens
ctgaagttctcttcc

SEQ ID NO: 14822 - DNA, 15 bp, Homo sapiens
tctgaagttctcttc

SEQ ID NO: 14823 - DNA, 15 bp, Homo sapiens
ctctgaagttctctt

SEQ ID NO: 14824 - DNA, 15 bp, Homo sapiens
gctctgaagttctct

SEQ ID NO: 14825 - DNA, 15 bp, Homo sapiens
agctctgaagttctc

SEQ ID NO: 14826 - DNA, 15 bp, Homo sapiens
aagctctgaagttct

SEQ ID NO: 14827 - DNA, 15 bp, Homo sapiens
aaagctctgaagttc

SEQ ID NO: 14828 - DNA, 15 bp, Homo sapiens
gaaagctctgaagtt

SEQ ID NO: 14829 - DNA, 15 bp, Homo sapiens
tgaaagctctgaagt

SEQ ID NO: 14830 - DNA, 15 bp, Homo sapiens
gtgaaagctctgaag

SEQ ID NO: 14831 - DNA, 15 bp, Homo sapiens
cgtgaaagctctgaa

SEQ ID NO: 14832 - DNA, 15 bp, Homo sapiens
tcgtgaaagctctga

SEQ ID NO: 14833 - DNA, 15 bp, Homo sapiens
atcgtgaaagctctg

SEQ ID NO: 14834 - DNA, 15 bp, Homo sapiens
gatcgtgaaagctct

SEQ ID NO: 14835 - DNA, 15 bp, Homo sapiens
ggatcgtgaaagctc

SEQ ID NO: 14836 - DNA, 15 bp, Homo sapiens
aggatcgtgaaagct

SEQ ID NO: 14837 - DNA, 15 bp, Homo sapiens
gaggatcgtgaaagc

SEQ ID NO: 14838 - DNA, 15 bp, Homo sapiens
tgaggatcgtgaaag

SEQ ID NO: 14839 - DNA, 15 bp, Homo sapiens
atgaggatcgtgaaa

SEQ ID NO: 14840 - DNA, 15 bp, Homo sapiens
gatgaggatcgtgaa

SEQ ID NO: 14841 - DNA, 15 bp, Homo sapiens
agatgaggatcgtga

SEQ ID NO: 14842 - DNA, 15 bp, Homo sapiens
cagatgaggatcgtg

SEQ ID NO: 14843 - DNA, 15 bp, Homo sapiens
ccagatgaggatcgt

SEQ ID NO: 14844 - DNA, 15 bp, Homo sapiens
accagatgaggatcg

SEQ ID NO: 14845 - DNA, 15 bp, Homo sapiens
aaccagatgaggatc

SEQ ID NO: 14846 - DNA, 15 bp, Homo sapiens
aaaccagatgaggat

SEQ ID NO: 14847 - DNA, 15 bp, Homo sapiens
aaaaccagatgagga

SEQ ID NO: 14848 - DNA, 15 bp, Homo sapiens
taaaaccagatgagg

SEQ ID NO: 14849 - DNA, 15 bp, Homo sapiens
ctaaaaccagatgag

SEQ ID NO: 14850 - DNA, 15 bp, Homo sapiens
cctaaaaccagatga

SEQ ID NO: 14851 - DNA, 15 bp, Homo sapiens
gcctaaaaccagatg

SEQ ID NO: 14852 - DNA, 15 bp, Homo sapiens
agcctaaaaccagat

SEQ ID NO: 14853 - DNA, 15 bp, Homo sapiens
cagcctaaaaccaga

SEQ ID NO: 14854 - DNA, 15 bp, Homo sapiens
tcagcctaaaaccag

SEQ ID NO: 14855 - DNA, 15 bp, Homo sapiens
atcagcctaaaacca

SEQ ID NO: 14856 - DNA, 15 bp, Homo sapiens
gatcagcctaaaacc

SEQ ID NO: 14857 - DNA, 15 bp, Homo sapiens
ggatcagcctaaaac

SEQ ID NO: 14858 - DNA, 15 bp, Homo sapiens
tggatcagcctaaaa

SEQ ID NO: 14859 - DNA, 15 bp, Homo sapiens
ctggatcagcctaaa

SEQ ID NO: 14860 - DNA, 15 bp, Homo sapiens
tctggatcagcctaa

SEQ ID NO: 14861 - DNA, 15 bp, Homo sapiens
ctctggatcagccta

SEQ ID NO: 14862 - DNA, 15 bp, Homo sapiens
cctctggatcagcct

SEQ ID NO: 14863 - DNA, 15 bp, Homo sapiens
gcctctggatcagcc

SEQ ID NO: 14864 - DNA, 15 bp, Homo sapiens
ggcctctggatcagc

SEQ ID NO: 14865 - DNA, 15 bp, Homo sapiens
tggcctctggatcag

SEQ ID NO: 14866 - DNA, 15 bp, Homo sapiens
ttggcctctggatca

SEQ ID NO: 14867 - DNA, 15 bp, Homo sapiens
cttggcctctggatc

SEQ ID NO: 14868 - DNA, 15 bp, Homo sapiens
ccttggcctctggat

SEQ ID NO: 14869 - DNA, 15 bp, Homo sapiens
accttggcctctgga

SEQ ID NO: 14870 - DNA, 15 bp, Homo sapiens
gaccttggcctctgg

SEQ ID NO: 14871 - DNA, 15 bp, Homo sapiens
ggaccttggcctctg

SEQ ID NO: 14872 - DNA, 15 bp, Homo sapiens
gggaccttggcctct

SEQ ID NO: 14873 - DNA, 15 bp, Homo sapiens
ggggaccttggcctc

SEQ ID NO: 14874 - DNA, 15 bp, Homo sapiens
tggggaccttggcct

SEQ ID NO: 14875 - DNA, 15 bp, Homo sapiens
atggggaccttggcc

SEQ ID NO: 14876 - DNA, 15 bp, Homo sapiens
catggggaccttggc

SEQ ID NO: 14877 - DNA, 15 bp, Homo sapiens
ccatggggaccttgg

SEQ ID NO: 14878 - DNA, 15 bp, Homo sapiens
tccatggggaccttg

SEQ ID NO: 14879 - DNA, 15 bp, Homo sapiens
ttccatggggacctt

SEQ ID NO: 14880 - DNA, 15 bp, Homo sapiens
gttccatggggacct

SEQ ID NO: 14881 - DNA, 15 bp, Homo sapiens
tgttccatggggacc

SEQ ID NO: 14882 - DNA, 15 bp, Homo sapiens
ttgttccatggggac

SEQ ID NO: 14883 - DNA, 15 bp, Homo sapiens
tttgttccatgggga

SEQ ID NO: 14884 - DNA, 15 bp, Homo sapiens
gtttgttccatgggg

SEQ ID NO: 14885 - DNA, 15 bp, Homo sapiens
agtttgttccatggg

SEQ ID NO: 14886 - DNA, 15 bp, Homo sapiens
cagtttgttccatgg

SEQ ID NO: 14887 - DNA, 15 bp, Homo sapiens
ccagtttgttccatg

SEQ ID NO: 14888 - DNA, 15 bp, Homo sapiens
tccagtttgttccat

SEQ ID NO: 14889 - DNA, 15 bp, Homo sapiens
gtccagtttgttcca

SEQ ID NO: 14890 - DNA, 15 bp, Homo sapiens
tgtccagtttgttcc

SEQ ID NO: 14891 - DNA, 15 bp, Homo sapiens
ttgtccagtttgttc

SEQ ID NO: 14892 - DNA, 15 bp, Homo sapiens
tttgtccagtttgtt

SEQ ID NO: 14893 - DNA, 15 bp, Homo sapiens
ctttgtccagtttgt

SEQ ID NO: 14894 - DNA, 15 bp, Homo sapiens
actttgtccagtttg

SEQ ID NO: 14895 - DNA, 15 bp, Homo sapiens
cactttgtccagttt

SEQ ID NO: 14896 - DNA, 15 bp, Homo sapiens
tcactttgtccagtt

SEQ ID NO: 14897 - DNA, 15 bp, Homo sapiens
ctcactttgtccagt

SEQ ID NO: 14898 - DNA, 15 bp, Homo sapiens
cctcactttgtccag

SEQ ID NO: 14899 - DNA, 15 bp, Homo sapiens
ccctcactttgtcca

SEQ ID NO: 14900 - DNA, 15 bp, Homo sapiens
accctcactttgtcc

SEQ ID NO: 14901 - DNA, 15 bp, Homo sapiens
caccctcactttgtc

SEQ ID NO: 14902 - DNA, 15 bp, Homo sapiens
ccaccctcactttgt

SEQ ID NO: 14903 - DNA, 15 bp, Homo sapiens
gccaccctcactttg

SEQ ID NO: 14904 - DNA, 15 bp, Homo sapiens
ggccaccctcacttt

SEQ ID NO: 14905 - DNA, 15 bp, Homo sapiens
tggccaccctcactt

SEQ ID NO: 14906 - DNA, 15 bp, Homo sapiens
gtggccaccctcact

SEQ ID NO: 14907 - DNA, 15 bp, Homo sapiens
tgtggccaccctcac

SEQ ID NO: 14908 - DNA, 15 bp, Homo sapiens
atgtggccaccctca

SEQ ID NO: 14909 - DNA, 15 bp, Homo sapiens
catgtggccaccctc

SEQ ID NO: 14910 - DNA, 15 bp, Homo sapiens
ccatgtggccaccct

SEQ ID NO: 14911 - DNA, 15 bp, Homo sapiens
gccatgtggccaccc

SEQ ID NO: 14912 - DNA, 15 bp, Homo sapiens
ggccatgtggccacc

SEQ ID NO: 14913 - DNA, 15 bp, Homo sapiens
aggccatgtggccac

SEQ ID NO: 14914 - DNA, 15 bp, Homo sapiens
gaggccatgtggcca

SEQ ID NO: 14915 - DNA, 15 bp, Homo sapiens
agaggccatgtggcc

SEQ ID NO: 14916 - DNA, 15 bp, Homo sapiens
aagaggccatgtggc

SEQ ID NO: 14917 - DNA, 15 bp, Homo sapiens
aaagaggccatgtgg

SEQ ID NO: 14918 - DNA, 15 bp, Homo sapiens
aaaagaggccatgtg

SEQ ID NO: 14919 - DNA, 15 bp, Homo sapiens
gaaaagaggccatgt

SEQ ID NO: 14920 - DNA, 15 bp, Homo sapiens
agaaaagaggccatg

SEQ ID NO: 14921 - DNA, 15 bp, Homo sapiens
aagaaaagaggccat

SEQ ID NO: 14922 - DNA, 15 bp, Homo sapiens
aaagaaaagaggcca

SEQ ID NO: 14923 - DNA, 15 bp, Homo sapiens
aaaagaaaagaggcc

SEQ ID NO: 14924 - DNA, 15 bp, Homo sapiens
caaaagaaaagaggc

SEQ ID NO: 14925 - DNA, 15 bp, Homo sapiens
gcaaaagaaaagagg

SEQ ID NO: 14926 - DNA, 15 bp, Homo sapiens
ggcaaaagaaaagag

SEQ ID NO: 14927 - DNA, 15 bp, Homo sapiens
aggcaaaagaaaaga

SEQ ID NO: 14928 - DNA, 15 bp, Homo sapiens
aaggcaaaagaaaag

SEQ ID NO: 14929 - DNA, 15 bp, Homo sapiens
aaaggcaaaagaaaa

SEQ ID NO: 14930 - DNA, 15 bp, Homo sapiens
taaaggcaaaagaaa

SEQ ID NO: 14931 - DNA, 15 bp, Homo sapiens
ataaaggcaaaagaa

SEQ ID NO: 14932 - DNA, 15 bp, Homo sapiens
aataaaggcaaaaga

SEQ ID NO: 14933 - DNA, 15 bp, Homo sapiens
taataaaggcaaaag

SEQ ID NO: 14934 - DNA, 15 bp, Homo sapiens
ataataaaggcaaaa

SEQ ID NO: 14935 - DNA, 15 bp, Homo sapiens
aataataaaggcaaa

SEQ ID NO: 14936 - DNA, 15 bp, Homo sapiens
taataataaaggcaa

SEQ ID NO: 14937 - DNA, 15 bp, Homo sapiens
ttaataataaaggca

SEQ ID NO: 14938 - DNA, 15 bp, Homo sapiens
attaataataaaggc

SEQ ID NO: 14939 - DNA, 15 bp, Homo sapiens
aattaataataaagg

SEQ ID NO: 14940 - DNA, 15 bp, Homo sapiens
aaattaataataaag

SEQ ID NO: 14941 - DNA, 15 bp, Homo sapiens
aaaattaataataaa

SEQ ID NO: 14942 - DNA, 15 bp, Homo sapiens
gaaaattaataataa

SEQ ID NO: 14943 - DNA, 15 bp, Homo sapiens
agaaaattaataata

SEQ ID NO: 14944 - DNA, 15 bp, Homo sapiens
gagaaaattaataat

SEQ ID NO: 14945 - DNA, 15 bp, Homo sapiens
tgagaaaattaataa

SEQ ID NO: 14946 - DNA, 15 bp, Homo sapiens
ttgagaaaattaata

SEQ ID NO: 14947 - DNA, 15 bp, Homo sapiens
tttgagaaaattaat

SEQ ID NO: 14948 - DNA, 15 bp, Homo sapiens
atttgagaaaattaa

SEQ ID NO: 14949 - DNA, 15 bp, Homo sapiens
tatttgagaaaatta

SEQ ID NO: 14950 - DNA, 15 bp, Homo sapiens
ctatttgagaaaatt

SEQ ID NO: 14951 - DNA, 15 bp, Homo sapiens
tctatttgagaaaat

SEQ ID NO: 14952 - DNA, 15 bp, Homo sapiens
atctatttgagaaaa

SEQ ID NO: 14953 - DNA, 15 bp, Homo sapiens
gatctatttgagaaa

SEQ ID NO: 14954 - DNA, 15 bp, Homo sapiens
agatctatttgagaa

SEQ ID NO: 14955 - DNA, 15 bp, Homo sapiens
cagatctatttgaga

SEQ ID NO: 14956 - DNA, 15 bp, Homo sapiens
tcagatctatttgag

SEQ ID NO: 14957 - DNA, 15 bp, Homo sapiens
gtcagatctatttga

SEQ ID NO: 14958 - DNA, 15 bp, Homo sapiens
agtcagatctatttg

SEQ ID NO: 14959 - DNA, 15 bp, Homo sapiens
tagtcagatctattt

SEQ ID NO: 14960 - DNA, 15 bp, Homo sapiens
ctagtcagatctatt

SEQ ID NO: 14961 - DNA, 15 bp, Homo sapiens
actagtcagatctat

SEQ ID NO: 14962 - DNA, 15 bp, Homo sapiens
gactagtcagatcta

SEQ ID NO: 14963 - DNA, 15 bp, Homo sapiens
tgactagtcagatct

SEQ ID NO: 14964 - DNA, 15 bp, Homo sapiens
atgactagtcagatc

SEQ ID NO: 14965 - DNA, 15 bp, Homo sapiens
catgactagtcagat

SEQ ID NO: 14966 - DNA, 15 bp, Homo sapiens
acatgactagtcaga

SEQ ID NO: 14967 - DNA, 15 bp, Homo sapiens
cacatgactagtcag

SEQ ID NO: 14968 - DNA, 15 bp, Homo sapiens
ccacatgactagtca

SEQ ID NO: 14969 - DNA, 15 bp, Homo sapiens
gccacatgactagtc

SEQ ID NO: 14970 - DNA, 15 bp, Homo sapiens
agccacatgactagt

SEQ ID NO: 14971 - DNA, 15 bp, Homo sapiens
cagccacatgactag

SEQ ID NO: 14972 - DNA, 15 bp, Homo sapiens
ccagccacatgacta

SEQ ID NO: 14973 - DNA, 15 bp, Homo sapiens
cccagccacatgact

SEQ ID NO: 14974 - DNA, 15 bp, Homo sapiens
tcccagccacatgac

SEQ ID NO: 14975 - DNA, 15 bp, Homo sapiens
ttcccagccacatga

SEQ ID NO: 14976 - DNA, 15 bp, Homo sapiens
tttcccagccacatg

SEQ ID NO: 14977 - DNA, 15 bp, Homo sapiens
ttttcccagccacat

SEQ ID NO: 14978 - DNA, 15 bp, Homo sapiens
attttcccagccaca

SEQ ID NO: 14979 - DNA, 15 bp, Homo sapiens
tattttcccagccac

SEQ ID NO: 14980 - DNA, 15 bp, Homo sapiens
ctattttcccagcca

SEQ ID NO: 14981 - DNA, 15 bp, Homo sapiens
actattttcccagcc

SEQ ID NO: 14982 - DNA, 15 bp, Homo sapiens
aactattttcccagc

SEQ ID NO: 14983 - DNA, 15 bp, Homo sapiens
taactattttcccag

SEQ ID NO: 14984 - DNA, 15 bp, Homo sapiens
ttaactattttccca

SEQ ID NO: 14985 - DNA, 15 bp, Homo sapiens
attaactattttccc

SEQ ID NO: 14986 - DNA, 15 bp, Homo sapiens
aattaactattttcc

SEQ ID NO: 14987 - DNA, 15 bp, Homo sapiens
caattaactattttc

SEQ ID NO: 14988 - DNA, 15 bp, Homo sapiens
acaattaactatttt

SEQ ID NO: 14989 - DNA, 15 bp, Homo sapiens
cacaattaactattt

SEQ ID NO: 14990 - DNA, 15 bp, Homo sapiens
tcacaattaactatt

SEQ ID NO: 14991 - DNA, 15 bp, Homo sapiens
atcacaattaactat

SEQ ID NO: 14992 - DNA, 15 bp, Homo sapiens
aatcacaattaacta

SEQ ID NO: 14993 - DNA, 15 bp, Homo sapiens
aaatcacaattaact

SEQ ID NO: 14994 - DNA, 15 bp, Homo sapiens
aaaatcacaattaac

SEQ ID NO: 14995 - DNA, 15 bp, Homo sapiens
aaaaatcacaattaa

SEQ ID NO: 14996 - DNA, 15 bp, Homo sapiens
aaaaaatcacaatta

SEQ ID NO: 14997 - DNA, 15 bp, Homo sapiens
aaaaaaatcacaatt

SEQ ID NO: 14998 - DNA, 15 bp, Homo sapiens
aaaaaaaatcacaat

SEQ ID NO: 14999 - DNA, 15 bp, Homo sapiens
aaaaaaaaatcacaa

SEQ ID NO: 15000 - DNA, 15 bp, Homo sapiens
aaaaaaaaaatcaca

SEQ ID NO: 15001 - DNA, 15 bp, Homo sapiens
aaaaaaaaaaatcac

SEQ ID NO: 15002 - DNA, 15 bp, Homo sapiens
aaaaaaaaaaaatca

SEQ ID NO: 15003 - DNA, 15 bp, Homo sapiens
aaaaaaaaaaaaatc

SEQ ID NO: 15004 - DNA, 15 bp, Homo sapiens
gtttaaaaaaaaaaa

SEQ ID NO: 15005 - DNA, 15 bp, Homo sapiens
agtttaaaaaaaaaa

SEQ ID NO: 15006 - DNA, 15 bp, Homo sapiens
cagtttaaaaaaaaa

SEQ ID NO: 15007 - DNA, 15 bp, Homo sapiens
tcagtttaaaaaaaa

SEQ ID NO: 15008 - DNA, 15 bp, Homo sapiens
ctcagtttaaaaaaa

SEQ ID NO: 15009 - DNA, 15 bp, Homo sapiens
actcagtttaaaaaa

SEQ ID NO: 15010 - DNA, 15 bp, Homo sapiens
gactcagtttaaaaa

SEQ ID NO: 15011 - DNA, 15 bp, Homo sapiens
agactcagtttaaaa

SEQ ID NO: 15012 - DNA, 15 bp, Homo sapiens
gagactcagtttaaa

SEQ ID NO: 15013 - DNA, 15 bp, Homo sapiens
tgagactcagtttaa

SEQ ID NO: 15014 - DNA, 15 bp, Homo sapiens
gtgagactcagttta

SEQ ID NO: 15015 - DNA, 15 bp, Homo sapiens
agtgagactcagttt

SEQ ID NO: 15016 - DNA, 15 bp, Homo sapiens
gagtgagactcagtt

SEQ ID NO: 15017 - DNA, 15 bp, Homo sapiens
agagtgagactcagt

SEQ ID NO: 15018 - DNA, 15 bp, Homo sapiens
tagagtgagactcag

SEQ ID NO: 15019 - DNA, 15 bp, Homo sapiens
atagagtgagactca

SEQ ID NO: 15020 - DNA, 15 bp, Homo sapiens
aatagagtgagactc

SEQ ID NO: 15021 - DNA, 15 bp, Homo sapiens
caatagagtgagact

SEQ ID NO: 15022 - DNA, 15 bp, Homo sapiens
gcaatagagtgagac

SEQ ID NO: 15023 - DNA, 15 bp, Homo sapiens
ggcaatagagtgaga

SEQ ID NO: 15024 - DNA, 15 bp, Homo sapiens
gggcaatagagtgag

SEQ ID NO: 15025 - DNA, 15 bp, Homo sapiens
tgggcaatagagtga

SEQ ID NO: 15026 - DNA, 15 bp, Homo sapiens
ctgggcaatagagtg

SEQ ID NO: 15027 - DNA, 15 bp, Homo sapiens
cctgggcaatagagt

SEQ ID NO: 15028 - DNA, 15 bp, Homo sapiens
gcctgggcaatagag

SEQ ID NO: 15029 - DNA, 15 bp, Homo sapiens
agcctgggcaataga

SEQ ID NO: 15030 - DNA, 15 bp, Homo sapiens
cagcctgggcaatag

SEQ ID NO: 15031 - DNA, 15 bp, Homo sapiens
ccagcctgggcaata

SEQ ID NO: 15032 - DNA, 15 bp, Homo sapiens
tccagcctgggcaat

SEQ ID NO: 15033 - DNA, 15 bp, Homo sapiens
taccactgcactcca

SEQ ID NO: 15034 - DNA, 15 bp, Homo sapiens
ataccactgcactcc

SEQ ID NO: 15035 - DNA, 15 bp, Homo sapiens
cataccactgcactc

SEQ ID NO: 15036 - DNA, 15 bp, Homo sapiens
tcataccactgcact

SEQ ID NO: 15037 - DNA, 15 bp, Homo sapiens
atcataccactgcac

SEQ ID NO: 15038 - DNA, 15 bp, Homo sapiens
gatcataccactgca

SEQ ID NO: 15039 - DNA, 15 bp, Homo sapiens
agatcataccactgc

SEQ ID NO: 15040 - DNA, 15 bp, Homo sapiens
gagatcataccactg

SEQ ID NO: 15041 - DNA, 15 bp, Homo sapiens
tgagatcataccact

SEQ ID NO: 15042 - DNA, 15 bp, Homo sapiens
ctgagatcataccac

SEQ ID NO: 15043 - DNA, 15 bp, Homo sapiens
gctgagatcatacca

SEQ ID NO: 15044 - DNA, 15 bp, Homo sapiens
agctgagatcatacc

SEQ ID NO: 15045 - DNA, 15 bp, Homo sapiens
gagctgagatcatac

SEQ ID NO: 15046 - DNA, 15 bp, Homo sapiens
cgagctgagatcata

SEQ ID NO: 15047 - DNA, 15 bp, Homo sapiens
gcgagctgagatcat

SEQ ID NO: 15048 - DNA, 15 bp, Homo sapiens
ggcgagctgagatca

SEQ ID NO: 15049 - DNA, 15 bp, Homo sapiens
cggcgagctgagatc

SEQ ID NO: 15050 - DNA, 15 bp, Homo sapiens
gcggcgagctgagat

SEQ ID NO: 15051 - DNA, 15 bp, Homo sapiens
tgcggcgagctgaga

SEQ ID NO: 15052 - DNA, 15 bp, Homo sapiens
ttgcggcgagctgag

SEQ ID NO: 15053 - DNA, 15 bp, Homo sapiens
gttgcggcgagctga

SEQ ID NO: 15054 - DNA, 15 bp, Homo sapiens
ggttgcggcgagctg

SEQ ID NO: 15055 - DNA, 15 bp, Homo sapiens
aggttgcggcgagct

SEQ ID NO: 15056 - DNA, 15 bp, Homo sapiens
tcccgggaggcagag

SEQ ID NO: 15057 - DNA, 15 bp, Homo sapiens
atcccgggaggcaga

SEQ ID NO: 15058 - DNA, 15 bp, Homo sapiens
gatcccgggaggcag

SEQ ID NO: 15059 - DNA, 15 bp, Homo sapiens
tgatcccgggaggca

SEQ ID NO: 15060 - DNA, 15 bp, Homo sapiens
ttgatcccgggaggc

SEQ ID NO: 15061 - DNA, 15 bp, Homo sapiens
cttgatcccgggagg

SEQ ID NO: 15062 - DNA, 15 bp, Homo sapiens
gcttgatcccgggag

SEQ ID NO: 15063 - DNA, 15 bp, Homo sapiens
tgcttgatcccggga

SEQ ID NO: 15064 - DNA, 15 bp, Homo sapiens
ttgcttgatcccggg

SEQ ID NO: 15065 - DNA, 15 bp, Homo sapiens
attgcttgatcccgg

SEQ ID NO: 15066 - DNA, 15 bp, Homo sapiens
aattgcttgatcccg

SEQ ID NO: 15067 - DNA, 15 bp, Homo sapiens
caattgcttgatccc

SEQ ID NO: 15068 - DNA, 15 bp, Homo sapiens
acaattgcttgatcc

SEQ ID NO: 15069 - DNA, 15 bp, Homo sapiens
gacaattgcttgatc

SEQ ID NO: 15070 - DNA, 15 bp, Homo sapiens
tgacaattgcttgat

SEQ ID NO: 15071 - DNA, 15 bp, Homo sapiens
atgacaattgcttga

SEQ ID NO: 15072 - DNA, 15 bp, Homo sapiens
catgacaattgcttg

SEQ ID NO: 15073 - DNA, 15 bp, Homo sapiens
gcatgacaattgctt

SEQ ID NO: 15074 - DNA, 15 bp, Homo sapiens
ggcatgacaattgct

SEQ ID NO: 15075 - DNA, 15 bp, Homo sapiens
aggcatgacaattgc

SEQ ID NO: 15076 - DNA, 15 bp, Homo sapiens
gaggcatgacaattg

SEQ ID NO: 15077 - DNA, 15 bp, Homo sapiens
tgaggcatgacaatt

SEQ ID NO: 15078 - DNA, 15 bp, Homo sapiens
ctgaggcatgacaat

SEQ ID NO: 15079 - DNA, 15 bp, Homo sapiens
gctgaggcatgacaa

SEQ ID NO: 15080 - DNA, 15 bp, Homo sapiens
ggctgaggcatgaca

SEQ ID NO: 15081 - DNA, 15 bp, Homo sapiens
aggctgaggcatgac

SEQ ID NO: 15082 - DNA, 15 bp, Homo sapiens
gaggctgaggcatga

SEQ ID NO: 15083 - DNA, 15 bp, Homo sapiens
ggaggctgaggcatg

SEQ ID NO: 15084 - DNA, 15 bp, Homo sapiens
gggaggctgaggcat

SEQ ID NO: 15085 - DNA, 15 bp, Homo sapiens
ccgggaggctgaggc

SEQ ID NO: 15086 - DNA, 15 bp, Homo sapiens
cccgggaggctgagg

SEQ ID NO: 15087 - DNA, 15 bp, Homo sapiens
acccgggaggctgag

SEQ ID NO: 15088 - DNA, 15 bp, Homo sapiens
tacccgggaggctga

SEQ ID NO: 15089 - DNA, 15 bp, Homo sapiens
ctacccgggaggctg

SEQ ID NO: 15090 - DNA, 15 bp, Homo sapiens
gctacccgggaggct

SEQ ID NO: 15091 - DNA, 15 bp, Homo sapiens
agctacccgggaggc

SEQ ID NO: 15092 - DNA, 15 bp, Homo sapiens
cagctacccgggagg

SEQ ID NO: 15093 - DNA, 15 bp, Homo sapiens
ccagctacccgggag

SEQ ID NO: 15094 - DNA, 15 bp, Homo sapiens
cccagctacccggga

SEQ ID NO: 15095 - DNA, 15 bp, Homo sapiens
tcccagctacccggg

SEQ ID NO: 15096 - DNA, 15 bp, Homo sapiens
atcccagctacccgg

SEQ ID NO: 15097 - DNA, 15 bp, Homo sapiens
aatcccagctacccg

SEQ ID NO: 15098 - DNA, 15 bp, Homo sapiens
taatcccagctaccc

SEQ ID NO: 15099 - DNA, 15 bp, Homo sapiens
ataatcccagctacc

SEQ ID NO: 15100 - DNA, 15 bp, Homo sapiens
cataatcccagctac

SEQ ID NO: 15101 - DNA, 15 bp, Homo sapiens
ccataatcccagcta

SEQ ID NO: 15102 - DNA, 15 bp, Homo sapiens
cccataatcccagct

SEQ ID NO: 15103 - DNA, 15 bp, Homo sapiens
gcccataatcccagc

SEQ ID NO: 15104 - DNA, 15 bp, Homo sapiens
tgcccataatcccag

SEQ ID NO: 15105 - DNA, 15 bp, Homo sapiens
gtgcccataatccca

SEQ ID NO: 15106 - DNA, 15 bp, Homo sapiens
tgtgcccataatccc

SEQ ID NO: 15107 - DNA, 15 bp, Homo sapiens
gtgtgcccataatcc

SEQ ID NO: 15108 - DNA, 15 bp, Homo sapiens
tgtgtgcccataatc

SEQ ID NO: 15109 - DNA, 15 bp, Homo sapiens
ctgtgtgcccataat

SEQ ID NO: 15110 - DNA, 15 bp, Homo sapiens
gctgtgtgcccataa

SEQ ID NO: 15111 - DNA, 15 bp, Homo sapiens
tgctgtgtgcccata

SEQ ID NO: 15112 - DNA, 15 bp, Homo sapiens
gtgctgtgtgcccat

SEQ ID NO: 15113 - DNA, 15 bp, Homo sapiens
ggtgctgtgtgccca

SEQ ID NO: 15114 - DNA, 15 bp, Homo sapiens
tggtgctgtgtgccc

SEQ ID NO: 15115 - DNA, 15 bp, Homo sapiens
gtggtgctgtgtgcc

SEQ ID NO: 15116 - DNA, 15 bp, Homo sapiens
cgtggtgctgtgtgc

SEQ ID NO: 15117 - DNA, 15 bp, Homo sapiens
gcgtggtgctgtgtg

SEQ ID NO: 15118 - DNA, 15 bp, Homo sapiens
ggcgtggtgctgtgt

SEQ ID NO: 15119 - DNA, 15 bp, Homo sapiens
aggcgtggtgctgtg

SEQ ID NO: 15120 - DNA, 15 bp, Homo sapiens
caggcgtggtgctgt

SEQ ID NO: 15121 - DNA, 15 bp, Homo sapiens
ccaggcgtggtgctg

SEQ ID NO: 15122 - DNA, 15 bp, Homo sapiens
gccaggcgtggtgct

SEQ ID NO: 15123 - DNA, 15 bp, Homo sapiens
agccaggcgtggtgc

SEQ ID NO: 15124 - DNA, 15 bp, Homo sapiens
ttagccaggcgtggt

SEQ ID NO: 15125 - DNA, 15 bp, Homo sapiens
attagccaggcgtgg

SEQ ID NO: 15126 - DNA, 15 bp, Homo sapiens
aattagccaggcgtg

SEQ ID NO: 15127 - DNA, 15 bp, Homo sapiens
aaattagccaggcgt

SEQ ID NO: 15128 - DNA, 15 bp, Homo sapiens
aaaattagccaggcg

SEQ ID NO: 15129 - DNA, 15 bp, Homo sapiens
aaaaattagccaggc

SEQ ID NO: 15130 - DNA, 15 bp, Homo sapiens
atgtctctactaaaa

SEQ ID NO: 15131 - DNA, 15 bp, Homo sapiens
catgtctctactaaa

SEQ ID NO: 15132 - DNA, 15 bp, Homo sapiens
ccatgtctctactaa

SEQ ID NO: 15133 - DNA, 15 bp, Homo sapiens
accatgtctctacta

SEQ ID NO: 15134 - DNA, 15 bp, Homo sapiens
aaccatgtctctact

SEQ ID NO: 15135 - DNA, 15 bp, Homo sapiens
aaaccatgtctctac

SEQ ID NO: 15136 - DNA, 15 bp, Homo sapiens
aaaaccatgtctcta

SEQ ID NO: 15137 - DNA, 15 bp, Homo sapiens
taaaaccatgtctct

SEQ ID NO: 15138 - DNA, 15 bp, Homo sapiens
ctaaaaccatgtctc

SEQ ID NO: 15139 - DNA, 15 bp, Homo sapiens
gctaaaaccatgtct

SEQ ID NO: 15140 - DNA, 15 bp, Homo sapiens
tgctaaaaccatgtc

SEQ ID NO: 15141 - DNA, 15 bp, Homo sapiens
atgctaaaaccatgt

SEQ ID NO: 15142 - DNA, 15 bp, Homo sapiens
catgctaaaaccatg

SEQ ID NO: 15143 - DNA, 15 bp, Homo sapiens
acatgctaaaaccat

SEQ ID NO: 15144 - DNA, 15 bp, Homo sapiens
aacatgctaaaacca

SEQ ID NO: 15145 - DNA, 15 bp, Homo sapiens
caacatgctaaaacc

SEQ ID NO: 15146 - DNA, 15 bp, Homo sapiens
ccaacatgctaaaac

SEQ ID NO: 15147 - DNA, 15 bp, Homo sapiens
gccaacatgctaaaa

SEQ ID NO: 15148 - DNA, 15 bp, Homo sapiens
ggccaacatgctaaa

SEQ ID NO: 15149 - DNA, 15 bp, Homo sapiens
tggccaacatgctaa

SEQ ID NO: 15150 - DNA, 15 bp, Homo sapiens
ctggccaacatgcta

SEQ ID NO: 15151 - DNA, 15 bp, Homo sapiens
cctggccaacatgct

SEQ ID NO: 15152 - DNA, 15 bp, Homo sapiens
gcctggccaacatgc

SEQ ID NO: 15153 - DNA, 15 bp, Homo sapiens
caagaccagcctggc

SEQ ID NO: 15154 - DNA, 15 bp, Homo sapiens
tcaagaccagcctgg

SEQ ID NO: 15155 - DNA, 15 bp, Homo sapiens
ttcaagaccagcctg

SEQ ID NO: 15156 - DNA, 15 bp, Homo sapiens
gttcaagaccagcct

SEQ ID NO: 15157 - DNA, 15 bp, Homo sapiens
agttcaagaccagcc

SEQ ID NO: 15158 - DNA, 15 bp, Homo sapiens
gagttcaagaccagc

SEQ ID NO: 15159 - DNA, 15 bp, Homo sapiens
tcaggagttcaagac

SEQ ID NO: 15160 - DNA, 15 bp, Homo sapiens
gtcaggagttcaaga

SEQ ID NO: 15161 - DNA, 15 bp, Homo sapiens
ggtcaggagttcaag

SEQ ID NO: 15162 - DNA, 15 bp, Homo sapiens
aggtcaggagttcaa

SEQ ID NO: 15163 - DNA, 15 bp, Homo sapiens
gaggtcaggagttca

SEQ ID NO: 15164 - DNA, 15 bp, Homo sapiens
ttgaggtcaggagtt

SEQ ID NO: 15165 - DNA, 15 bp, Homo sapiens
cttgaggtcaggagt

SEQ ID NO: 15166 - DNA, 15 bp, Homo sapiens
ggatcacttgaggtc

SEQ ID NO: 15167 - DNA, 15 bp, Homo sapiens
tgaggtgggtggatc

SEQ ID NO: 15168 - DNA, 15 bp, Homo sapiens
ctgaggtgggtggat

SEQ ID NO: 15169 - DNA, 15 bp, Homo sapiens
gctgaggtgggtgga

SEQ ID NO: 15170 - DNA, 15 bp, Homo sapiens
ggctgaggtgggtgg

SEQ ID NO: 15171 - DNA, 15 bp, Homo sapiens
aggctgaggtgggtg

SEQ ID NO: 15172 - DNA, 15 bp, Homo sapiens
aaggctgaggtgggt

SEQ ID NO: 15173 - DNA, 15 bp, Homo sapiens
gaaggctgaggtggg

SEQ ID NO: 15174 - DNA, 15 bp, Homo sapiens
ggaaggctgaggtgg

SEQ ID NO: 15175 - DNA, 15 bp, Homo sapiens
tggaaggctgaggtg

SEQ ID NO: 15176 - DNA, 15 bp, Homo sapiens
ttggaaggctgaggt

SEQ ID NO: 15177 - DNA, 15 bp, Homo sapiens
attggaaggctgagg

SEQ ID NO: 15178 - DNA, 15 bp, Homo sapiens
gattggaaggctgag

SEQ ID NO: 15179 - DNA, 15 bp, Homo sapiens
agattggaaggctga

SEQ ID NO: 15180 - DNA, 15 bp, Homo sapiens
cagattggaaggctg

SEQ ID NO: 15181 - DNA, 15 bp, Homo sapiens
gcagattggaaggct

SEQ ID NO: 15182 - DNA, 15 bp, Homo sapiens
agcagattggaaggc

SEQ ID NO: 15183 - DNA, 15 bp, Homo sapiens
cagcagattggaagg

SEQ ID NO: 15184 - DNA, 15 bp, Homo sapiens
ccagcagattggaag

SEQ ID NO: 15185 - DNA, 15 bp, Homo sapiens
cccagcagattggaa

SEQ ID NO: 15186 - DNA, 15 bp, Homo sapiens
tcccagcagattgga

SEQ ID NO: 15187 - DNA, 15 bp, Homo sapiens
atcccagcagattgg

SEQ ID NO: 15188 - DNA, 15 bp, Homo sapiens
aatcccagcagattg

SEQ ID NO: 15189 - DNA, 15 bp, Homo sapiens
taatcccagcagatt

SEQ ID NO: 15190 - DNA, 15 bp, Homo sapiens
gtaatcccagcagat

SEQ ID NO: 15191 - DNA, 15 bp, Homo sapiens
tgtaatcccagcaga

SEQ ID NO: 15192 - DNA, 15 bp, Homo sapiens
ctgtaatcccagcag

SEQ ID NO: 15193 - DNA, 15 bp, Homo sapiens
tgcagtggctcatgc

SEQ ID NO: 15194 - DNA, 15 bp, Homo sapiens
gtgcagtggctcatg

SEQ ID NO: 15195 - DNA, 15 bp, Homo sapiens
ggtgcagtggctcat

SEQ ID NO: 15196 - DNA, 15 bp, Homo sapiens
gggtgcagtggctca

SEQ ID NO: 15197 - DNA, 15 bp, Homo sapiens
tgggtgcagtggctc

SEQ ID NO: 15198 - DNA, 15 bp, Homo sapiens
ctgggtgcagtggct

SEQ ID NO: 15199 - DNA, 15 bp, Homo sapiens
gctgggtgcagtggc

SEQ ID NO: 15200 - DNA, 15 bp, Homo sapiens
ggctgggtgcagtgg

SEQ ID NO: 15201 - DNA, 15 bp, Homo sapiens
tggctgggtgcagtg

SEQ ID NO: 15202 - DNA, 15 bp, Homo sapiens
ctggctgggtgcagt

SEQ ID NO: 15203 - DNA, 15 bp, Homo sapiens
tctggctgggtgcag

SEQ ID NO: 15204 - DNA, 15 bp, Homo sapiens
ctctggctgggtgca

SEQ ID NO: 15205 - DNA, 15 bp, Homo sapiens
actctggctgggtgc

SEQ ID NO: 15206 - DNA, 15 bp, Homo sapiens
tactctggctgggtg

SEQ ID NO: 15207 - DNA, 15 bp, Homo sapiens
gtactctggctgggt

SEQ ID NO: 15208 - DNA, 15 bp, Homo sapiens
ggtactctggctggg

SEQ ID NO: 15209 - DNA, 15 bp, Homo sapiens
tggtactctggctgg

SEQ ID NO: 15210 - DNA, 15 bp, Homo sapiens
gtggtactctggctg

SEQ ID NO: 15211 - DNA, 15 bp, Homo sapiens
agtggtactctggct

SEQ ID NO: 15212 - DNA, 15 bp, Homo sapiens
tagtggtactctggc

SEQ ID NO: 15213 - DNA, 15 bp, Homo sapiens
atagtggtactctgg

SEQ ID NO: 15214 - DNA, 15 bp, Homo sapiens
aatagtggtactctg

SEQ ID NO: 15215 - DNA, 15 bp, Homo sapiens
aaatagtggtactct

SEQ ID NO: 15216 - DNA, 15 bp, Homo sapiens
caaatagtggtactc

SEQ ID NO: 15217 - DNA, 15 bp, Homo sapiens
ccaaatagtggtact

SEQ ID NO: 15218 - DNA, 15 bp, Homo sapiens
cccaaatagtggtac

SEQ ID NO: 15219 - DNA, 15 bp, Homo sapiens
gcccaaatagtggta

SEQ ID NO: 15220 - DNA, 15 bp, Homo sapiens
tgcccaaatagtggt

SEQ ID NO: 15221 - DNA, 15 bp, Homo sapiens
atgcccaaatagtgg

SEQ ID NO: 15222 - DNA, 15 bp, Homo sapiens
aatgcccaaatagtg

SEQ ID NO: 15223 - DNA, 15 bp, Homo sapiens
gaatgcccaaatagt

SEQ ID NO: 15224 - DNA, 15 bp, Homo sapiens
agaatgcccaaatag

SEQ ID NO: 15225 - DNA, 15 bp, Homo sapiens
aagaatgcccaaata

SEQ ID NO: 15226 - DNA, 15 bp, Homo sapiens
aaagaatgcccaaat

SEQ ID NO: 15227 - DNA, 15 bp, Homo sapiens
taaagaatgcccaaa

SEQ ID NO: 15228 - DNA, 15 bp, Homo sapiens
ttaaagaatgcccaa

SEQ ID NO: 15229 - DNA, 15 bp, Homo sapiens
attaaagaatgccca

SEQ ID NO: 15230 - DNA, 15 bp, Homo sapiens
cattaaagaatgccc

SEQ ID NO: 15231 - DNA, 15 bp, Homo sapiens
tcattaaagaatgcc

SEQ ID NO: 15232 - DNA, 15 bp, Homo sapiens
ttcattaaagaatgc

SEQ ID NO: 15233 - DNA, 15 bp, Homo sapiens
tttcattaaagaatg

SEQ ID NO: 15234 - DNA, 15 bp, Homo sapiens
ttttcattaaagaat

SEQ ID NO: 15235 - DNA, 15 bp, Homo sapiens
tttttcattaaagaa

SEQ ID NO: 15236 - DNA, 15 bp, Homo sapiens
ctttttcattaaaga

SEQ ID NO: 15237 - DNA, 15 bp, Homo sapiens
tctttttcattaaag

SEQ ID NO: 15238 - DNA, 15 bp, Homo sapiens
ttctttttcattaaa

SEQ ID NO: 15239 - DNA, 15 bp, Homo sapiens
attctttttcattaa

SEQ ID NO: 15240 - DNA, 15 bp, Homo sapiens
cattctttttcatta

SEQ ID NO: 15241 - DNA, 15 bp, Homo sapiens
tcattctttttcatt

SEQ ID NO: 15242 - DNA, 15 bp, Homo sapiens
ttcattctttttcat

SEQ ID NO: 15243 - DNA, 15 bp, Homo sapiens
gttcattctttttca

SEQ ID NO: 15244 - DNA, 15 bp, Homo sapiens
agttcattctttttc

SEQ ID NO: 15245 - DNA, 15 bp, Homo sapiens
tagttcattcttttt

SEQ ID NO: 15246 - DNA, 15 bp, Homo sapiens
atagttcattctttt

SEQ ID NO: 15247 - DNA, 15 bp, Homo sapiens
gatagttcattcttt

SEQ ID NO: 15248 - DNA, 15 bp, Homo sapiens
ggatagttcattctt

SEQ ID NO: 15249 - DNA, 15 bp, Homo sapiens
tggatagttcattct

SEQ ID NO: 15250 - DNA, 15 bp, Homo sapiens
ttggatagttcattc

SEQ ID NO: 15251 - DNA, 15 bp, Homo sapiens
tttggatagttcatt

SEQ ID NO: 15252 - DNA, 15 bp, Homo sapiens
ttttggatagttcat

SEQ ID NO: 15253 - DNA, 15 bp, Homo sapiens
tttttggatagttca

SEQ ID NO: 15254 - DNA, 15 bp, Homo sapiens
atttttggatagttc

SEQ ID NO: 15255 - DNA, 15 bp, Homo sapiens
aatttttggatagtt

SEQ ID NO: 15256 - DNA, 15 bp, Homo sapiens
taatttttggatagt

SEQ ID NO: 15257 - DNA, 15 bp, Homo sapiens
ttaatttttggatag

SEQ ID NO: 15258 - DNA, 15 bp, Homo sapiens
tttaatttttggata

SEQ ID NO: 15259 - DNA, 15 bp, Homo sapiens
ttttaatttttggat

SEQ ID NO: 15260 - DNA, 15 bp, Homo sapiens
gttttaatttttgga

SEQ ID NO: 15261 - DNA, 15 bp, Homo sapiens
agttttaatttttgg

SEQ ID NO: 15262 - DNA, 15 bp, Homo sapiens
gagttttaatttttg

SEQ ID NO: 15263 - DNA, 15 bp, Homo sapiens
ggagttttaattttt

SEQ ID NO: 15264 - DNA, 15 bp, Homo sapiens
aggagttttaatttt

SEQ ID NO: 15265 - DNA, 15 bp, Homo sapiens
gaggagttttaattt

SEQ ID NO: 15266 - DNA, 15 bp, Homo sapiens
tgaggagttttaatt

SEQ ID NO: 15267 - DNA, 15 bp, Homo sapiens
atgaggagttttaat

SEQ ID NO: 15268 - DNA, 15 bp, Homo sapiens
aatgaggagttttaa

SEQ ID NO: 15269 - DNA, 15 bp, Homo sapiens
aaatgaggagtttta

SEQ ID NO: 15270 - DNA, 15 bp, Homo sapiens
taaatgaggagtttt

SEQ ID NO: 15271 - DNA, 15 bp, Homo sapiens
ataaatgaggagttt

SEQ ID NO: 15272 - DNA, 15 bp, Homo sapiens
cataaatgaggagtt

SEQ ID NO: 15273 - DNA, 15 bp, Homo sapiens
tcataaatgaggagt

SEQ ID NO: 15274 - DNA, 15 bp, Homo sapiens
ctcataaatgaggag

SEQ ID NO: 15275 - DNA, 15 bp, Homo sapiens
gctcataaatgagga

SEQ ID NO: 15276 - DNA, 15 bp, Homo sapiens
agctcataaatgagg

SEQ ID NO: 15277 - DNA, 15 bp, Homo sapiens
aagctcataaatgag

SEQ ID NO: 15278 - DNA, 15 bp, Homo sapiens
aaagctcataaatga

SEQ ID NO: 15279 - DNA, 15 bp, Homo sapiens
aaaagctcataaatg

SEQ ID NO: 15280 - DNA, 15 bp, Homo sapiens
taaaagctcataaat

SEQ ID NO: 15281 - DNA, 15 bp, Homo sapiens
ctaaaagctcataaa

SEQ ID NO: 15282 - DNA, 15 bp, Homo sapiens
tctaaaagctcataa

SEQ ID NO: 15283 - DNA, 15 bp, Homo sapiens
ctctaaaagctcata

SEQ ID NO: 15284 - DNA, 15 bp, Homo sapiens
tctctaaaagctcat

SEQ ID NO: 15285 - DNA, 15 bp, Homo sapiens
ttctctaaaagctca

SEQ ID NO: 15286 - DNA, 15 bp, Homo sapiens
attctctaaaagctc

SEQ ID NO: 15287 - DNA, 15 bp, Homo sapiens
aattctctaaaagct

SEQ ID NO: 15288 - DNA, 15 bp, Homo sapiens
aaattctctaaaagc

SEQ ID NO: 15289 - DNA, 15 bp, Homo sapiens
aaaattctctaaaag

SEQ ID NO: 15290 - DNA, 15 bp, Homo sapiens
taaaattctctaaaa

SEQ ID NO: 15291 - DNA, 15 bp, Homo sapiens
gtaaaattctctaaa

SEQ ID NO: 15292 - DNA, 15 bp, Homo sapiens
tgtaaaattctctaa

SEQ ID NO: 15293 - DNA, 15 bp, Homo sapiens
ctgtaaaattctcta

SEQ ID NO: 15294 - DNA, 15 bp, Homo sapiens
tctgtaaaattctct

SEQ ID NO: 15295 - DNA, 15 bp, Homo sapiens
ctctgtaaaattctc

SEQ ID NO: 15296 - DNA, 15 bp, Homo sapiens
actctgtaaaattct

SEQ ID NO: 15297 - DNA, 15 bp, Homo sapiens
tactctgtaaaattc

SEQ ID NO: 15298 - DNA, 15 bp, Homo sapiens
ctactctgtaaaatt

SEQ ID NO: 15299 - DNA, 15 bp, Homo sapiens
tctactctgtaaaat

SEQ ID NO: 15300 - DNA, 15 bp, Homo sapiens
atctactctgtaaaa

SEQ ID NO: 15301 - DNA, 15 bp, Homo sapiens
catctactctgtaaa

SEQ ID NO: 15302 - DNA, 15 bp, Homo sapiens
ccatctactctgtaa

SEQ ID NO: 15303 - DNA, 15 bp, Homo sapiens
tccatctactctgta

SEQ ID NO: 15304 - DNA, 15 bp, Homo sapiens
ttccatctactctgt

SEQ ID NO: 15305 - DNA, 15 bp, Homo sapiens
tttccatctactctg

SEQ ID NO: 15306 - DNA, 15 bp, Homo sapiens
gtttccatctactct

SEQ ID NO: 15307 - DNA, 15 bp, Homo sapiens
agtttccatctactc

SEQ ID NO: 15308 - DNA, 15 bp, Homo sapiens
gagtttccatctact

SEQ ID NO: 15309 - DNA, 15 bp, Homo sapiens
agagtttccatctac

SEQ ID NO: 15310 - DNA, 15 bp, Homo sapiens
gagagtttccatcta

SEQ ID NO: 15311 - DNA, 15 bp, Homo sapiens
agagagtttccatct

SEQ ID NO: 15312 - DNA, 15 bp, Homo sapiens
cagagagtttccatc

SEQ ID NO: 15313 - DNA, 15 bp, Homo sapiens
gcagagagtttccat

SEQ ID NO: 15314 - DNA, 15 bp, Homo sapiens
tgcagagagtttcca

SEQ ID NO: 15315 - DNA, 15 bp, Homo sapiens
atgcagagagtttcc

SEQ ID NO: 15316 - DNA, 15 bp, Homo sapiens
gatgcagagagtttc

SEQ ID NO: 15317 - DNA, 15 bp, Homo sapiens
ggatgcagagagttt

SEQ ID NO: 15318 - DNA, 15 bp, Homo sapiens
aggatgcagagagtt

SEQ ID NO: 15319 - DNA, 15 bp, Homo sapiens
aaggatgcagagagt

SEQ ID NO: 15320 - DNA, 15 bp, Homo sapiens
aaaggatgcagagag

SEQ ID NO: 15321 - DNA, 15 bp, Homo sapiens
gaaaggatgcagaga

SEQ ID NO: 15322 - DNA, 15 bp, Homo sapiens
ggaaaggatgcagag

SEQ ID NO: 15323 - DNA, 15 bp, Homo sapiens
gggaaaggatgcaga

SEQ ID NO: 15324 - DNA, 15 bp, Homo sapiens
ggggaaaggatgcag

SEQ ID NO: 15325 - DNA, 15 bp, Homo sapiens
tggggaaaggatgca

SEQ ID NO: 15326 - DNA, 15 bp, Homo sapiens
gtggggaaaggatgc

SEQ ID NO: 15327 - DNA, 15 bp, Homo sapiens
agtggggaaaggatg

SEQ ID NO: 15328 - DNA, 15 bp, Homo sapiens
aagtggggaaaggat

SEQ ID NO: 15329 - DNA, 15 bp, Homo sapiens
gaagtggggaaagga

SEQ ID NO: 15330 - DNA, 15 bp, Homo sapiens
agaagtggggaaagg

SEQ ID NO: 15331 - DNA, 15 bp, Homo sapiens
tagaagtggggaaag

SEQ ID NO: 15332 - DNA, 15 bp, Homo sapiens
ctagaagtggggaaa

SEQ ID NO: 15333 - DNA, 15 bp, Homo sapiens
actagaagtggggaa

SEQ ID NO: 15334 - DNA, 15 bp, Homo sapiens
aactagaagtgggga

SEQ ID NO: 15335 - DNA, 15 bp, Homo sapiens
aaactagaagtgggg

SEQ ID NO: 15336 - DNA, 15 bp, Homo sapiens
gaaactagaagtggg

SEQ ID NO: 15337 - DNA, 15 bp, Homo sapiens
tgaaactagaagtgg

SEQ ID NO: 15338 - DNA, 15 bp, Homo sapiens
gtgaaactagaagtg

SEQ ID NO: 15339 - DNA, 15 bp, Homo sapiens
ggtgaaactagaagt

SEQ ID NO: 15340 - DNA, 15 bp, Homo sapiens
aggtgaaactagaag

SEQ ID NO: 15341 - DNA, 15 bp, Homo sapiens
caggtgaaactagaa

SEQ ID NO: 15342 - DNA, 15 bp, Homo sapiens
tcaggtgaaactaga

SEQ ID NO: 15343 - DNA, 15 bp, Homo sapiens
gtcaggtgaaactag

SEQ ID NO: 15344 - DNA, 15 bp, Homo sapiens
tgtcaggtgaaacta

SEQ ID NO: 15345 - DNA, 15 bp, Homo sapiens
gtgtcaggtgaaact

SEQ ID NO: 15346 - DNA, 15 bp, Homo sapiens
tgtgtcaggtgaaac

SEQ ID NO: 15347 - DNA, 15 bp, Homo sapiens
atgtgtcaggtgaaa

SEQ ID NO: 15348 - DNA, 15 bp, Homo sapiens
aatgtgtcaggtgaa

SEQ ID NO: 15349 - DNA, 15 bp, Homo sapiens
aaatgtgtcaggtga

SEQ ID NO: 15350 - DNA, 15 bp, Homo sapiens
gaaatgtgtcaggtg

SEQ ID NO: 15351 - DNA, 15 bp, Homo sapiens
agaaatgtgtcaggt

SEQ ID NO: 15352 - DNA, 15 bp, Homo sapiens
aagaaatgtgtcagg

SEQ ID NO: 15353 - DNA, 15 bp, Homo sapiens
gaagaaatgtgtcag

SEQ ID NO: 15354 - DNA, 15 bp, Homo sapiens
ggaagaaatgtgtca

SEQ ID NO: 15355 - DNA, 15 bp, Homo sapiens
gggaagaaatgtgtc

SEQ ID NO: 15356 - DNA, 15 bp, Homo sapiens
agggaagaaatgtgt

SEQ ID NO: 15357 - DNA, 15 bp, Homo sapiens
cagggaagaaatgtg

SEQ ID NO: 15358 - DNA, 15 bp, Homo sapiens
acagggaagaaatgt

SEQ ID NO: 15359 - DNA, 15 bp, Homo sapiens
gacagggaagaaatg

SEQ ID NO: 15360 - DNA, 15 bp, Homo sapiens
ggacagggaagaaat

SEQ ID NO: 15361 - DNA, 15 bp, Homo sapiens
aggacagggaagaaa

SEQ ID NO: 15362 - DNA, 15 bp, Homo sapiens
aaggacagggaagaa

SEQ ID NO: 15363 - DNA, 15 bp, Homo sapiens
taaggacagggaaga

SEQ ID NO: 15364 - DNA, 15 bp, Homo sapiens
gtaaggacagggaag

SEQ ID NO: 15365 - DNA, 15 bp, Homo sapiens
agtaaggacagggaa

SEQ ID NO: 15366 - DNA, 15 bp, Homo sapiens
gagtaaggacaggga

SEQ ID NO: 15367 - DNA, 15 bp, Homo sapiens
ggagtaaggacaggg

SEQ ID NO: 15368 - DNA, 15 bp, Homo sapiens
aggagtaaggacagg

SEQ ID NO: 15369 - DNA, 15 bp, Homo sapiens
caggagtaaggacag

SEQ ID NO: 15370 - DNA, 15 bp, Homo sapiens
ccaggagtaaggaca

SEQ ID NO: 15371 - DNA, 15 bp, Homo sapiens
cccaggagtaaggac

SEQ ID NO: 15372 - DNA, 15 bp, Homo sapiens
gcccaggagtaagga

SEQ ID NO: 15373 - DNA, 15 bp, Homo sapiens
ggcccaggagtaagg

SEQ ID NO: 15374 - DNA, 15 bp, Homo sapiens
cggcccaggagtaag

SEQ ID NO: 15375 - DNA, 15 bp, Homo sapiens
ccggcccaggagtaa

SEQ ID NO: 15376 - DNA, 15 bp, Homo sapiens
gccggcccaggagta

SEQ ID NO: 15377 - DNA, 15 bp, Homo sapiens
tgccggcccaggagt

SEQ ID NO: 15378 - DNA, 15 bp, Homo sapiens
ctgccggcccaggag

SEQ ID NO: 15379 - DNA, 15 bp, Homo sapiens
gctgccggcccagga

SEQ ID NO: 15380 - DNA, 15 bp, Homo sapiens
tgctgccggcccagg

SEQ ID NO: 15381 - DNA, 15 bp, Homo sapiens
ctgctgccggcccag

SEQ ID NO: 15382 - DNA, 15 bp, Homo sapiens
actgctgccggccca

SEQ ID NO: 15383 - DNA, 15 bp, Homo sapiens
cactgctgccggccc

SEQ ID NO: 15384 - DNA, 15 bp, Homo sapiens
ccactgctgccggcc

SEQ ID NO: 15385 - DNA, 15 bp, Homo sapiens
accactgctgccggc

SEQ ID NO: 15386 - DNA, 15 bp, Homo sapiens
gaccactgctgccgg

SEQ ID NO: 15387 - DNA, 15 bp, Homo sapiens
tgaccactgctgccg

SEQ ID NO: 15388 - DNA, 15 bp, Homo sapiens
atgaccactgctgcc

SEQ ID NO: 15389 - DNA, 15 bp, Homo sapiens
catgaccactgctgc

SEQ ID NO: 15390 - DNA, 15 bp, Homo sapiens
tcatgaccactgctg

SEQ ID NO: 15391 - DNA, 15 bp, Homo sapiens
atcatgaccactgct

SEQ ID NO: 15392 - DNA, 15 bp, Homo sapiens
aatcatgaccactgc

SEQ ID NO: 15393 - DNA, 15 bp, Homo sapiens
gaatcatgaccactg

SEQ ID NO: 15394 - DNA, 15 bp, Homo sapiens
ggaatcatgaccact

SEQ ID NO: 15395 - DNA, 15 bp, Homo sapiens
tggaatcatgaccac

SEQ ID NO: 15396 - DNA, 15 bp, Homo sapiens
ttggaatcatgacca

SEQ ID NO: 15397 - DNA, 15 bp, Homo sapiens
attggaatcatgacc

SEQ ID NO: 15398 - DNA, 15 bp, Homo sapiens
gattggaatcatgac

SEQ ID NO: 15399 - DNA, 15 bp, Homo sapiens
ggattggaatcatga

SEQ ID NO: 15400 - DNA, 15 bp, Homo sapiens
gggattggaatcatg

SEQ ID NO: 15401 - DNA, 15 bp, Homo sapiens
tgggattggaatcat

SEQ ID NO: 15402 - DNA, 15 bp, Homo sapiens
ctgggattggaatca

SEQ ID NO: 15403 - DNA, 15 bp, Homo sapiens
gctgggattggaatc

SEQ ID NO: 15404 - DNA, 15 bp, Homo sapiens
agctgggattggaat

SEQ ID NO: 15405 - DNA, 15 bp, Homo sapiens
aagctgggattggaa

SEQ ID NO: 15406 - DNA, 15 bp, Homo sapiens
caagctgggattgga

SEQ ID NO: 15407 - DNA, 15 bp, Homo sapiens
ccaagctgggattgg

SEQ ID NO: 15408 - DNA, 15 bp, Homo sapiens
gccaagctgggattg

SEQ ID NO: 15409 - DNA, 15 bp, Homo sapiens
ggccaagctgggatt

SEQ ID NO: 15410 - DNA, 15 bp, Homo sapiens
tggccaagctgggat

SEQ ID NO: 15411 - DNA, 15 bp, Homo sapiens
gtggccaagctggga

SEQ ID NO: 15412 - DNA, 15 bp, Homo sapiens
ggtggccaagctggg

SEQ ID NO: 15413 - DNA, 15 bp, Homo sapiens
tggtggccaagctgg

SEQ ID NO: 15414 - DNA, 15 bp, Homo sapiens
atggtggccaagctg

SEQ ID NO: 15415 - DNA, 15 bp, Homo sapiens
gatggtggccaagct

SEQ ID NO: 15416 - DNA, 15 bp, Homo sapiens
agatggtggccaagc

SEQ ID NO: 15417 - DNA, 15 bp, Homo sapiens
cagatggtggccaag

SEQ ID NO: 15418 - DNA, 15 bp, Homo sapiens
gcagatggtggccaa

SEQ ID NO: 15419 - DNA, 15 bp, Homo sapiens
ggcagatggtggcca

SEQ ID NO: 15420 - DNA, 15 bp, Homo sapiens
aggcagatggtggcc

SEQ ID NO: 15421 - DNA, 15 bp, Homo sapiens
gaggcagatggtggc

SEQ ID NO: 15422 - DNA, 15 bp, Homo sapiens
tgaggcagatggtgg

SEQ ID NO: 15423 - DNA, 15 bp, Homo sapiens
ctgaggcagatggtg

SEQ ID NO: 15424 - DNA, 15 bp, Homo sapiens
actgaggcagatggt

SEQ ID NO: 15425 - DNA, 15 bp, Homo sapiens
cactgaggcagatgg

SEQ ID NO: 15426 - DNA, 15 bp, Homo sapiens
ccactgaggcagatg

SEQ ID NO: 15427 - DNA, 15 bp, Homo sapiens
gccactgaggcagat

SEQ ID NO: 15428 - DNA, 15 bp, Homo sapiens
ggccactgaggcaga

SEQ ID NO: 15429 - DNA, 15 bp, Homo sapiens
aggccactgaggcag

SEQ ID NO: 15430 - DNA, 15 bp, Homo sapiens
taggccactgaggca

SEQ ID NO: 15431 - DNA, 15 bp, Homo sapiens
ctaggccactgaggc

SEQ ID NO: 15432 - DNA, 15 bp, Homo sapiens
cctaggccactgagg

SEQ ID NO: 15433 - DNA, 15 bp, Homo sapiens
tcctaggccactgag

SEQ ID NO: 15434 - DNA, 15 bp, Homo sapiens
ttcctaggccactga

SEQ ID NO: 15435 - DNA, 15 bp, Homo sapiens
tttcctaggccactg

SEQ ID NO: 15436 - DNA, 15 bp, Homo sapiens
ttttcctaggccact

SEQ ID NO: 15437 - DNA, 15 bp, Homo sapiens
gttttcctaggccac

SEQ ID NO: 15438 - DNA, 15 bp, Homo sapiens
agttttcctaggcca

SEQ ID NO: 15439 - DNA, 15 bp, Homo sapiens
gagttttcctaggcc

SEQ ID NO: 15440 - DNA, 15 bp, Homo sapiens
ggagttttcctaggc

SEQ ID NO: 15441 - DNA, 15 bp, Homo sapiens
aggagttttcctagg

SEQ ID NO: 15442 - DNA, 15 bp, Homo sapiens
aaggagttttcctag

SEQ ID NO: 15443 - DNA, 15 bp, Homo sapiens
aaaggagttttccta

SEQ ID NO: 15444 - DNA, 15 bp, Homo sapiens
gaaaggagttttcct

SEQ ID NO: 15445 - DNA, 15 bp, Homo sapiens
agaaaggagttttcc

SEQ ID NO: 15446 - DNA, 15 bp, Homo sapiens
gagaaaggagttttc

SEQ ID NO: 15447 - DNA, 15 bp, Homo sapiens
ggagaaaggagtttt

SEQ ID NO: 15448 - DNA, 15 bp, Homo sapiens
tggagaaaggagttt

SEQ ID NO: 15449 - DNA, 15 bp, Homo sapiens
ctggagaaaggagtt

SEQ ID NO: 15450 - DNA, 15 bp, Homo sapiens
tctggagaaaggagt

SEQ ID NO: 15451 - DNA, 15 bp, Homo sapiens
ctctggagaaaggag

SEQ ID NO: 15452 - DNA, 15 bp, Homo sapiens
gctctggagaaagga

SEQ ID NO: 15453 - DNA, 15 bp, Homo sapiens
agctctggagaaagg

SEQ ID NO: 15454 - DNA, 15 bp, Homo sapiens
aagctctggagaaag

SEQ ID NO: 15455 - DNA, 15 bp, Homo sapiens
aaagctctggagaaa

SEQ ID NO: 15456 - DNA, 15 bp, Homo sapiens
taaagctctggagaa

SEQ ID NO: 15457 - DNA, 15 bp, Homo sapiens
ctaaagctctggaga

SEQ ID NO: 15458 - DNA, 15 bp, Homo sapiens
actaaagctctggag

SEQ ID NO: 15459 - DNA, 15 bp, Homo sapiens
aactaaagctctgga

SEQ ID NO: 15460 - DNA, 15 bp, Homo sapiens
aaactaaagctctgg

SEQ ID NO: 15461 - DNA, 15 bp, Homo sapiens
aaaactaaagctctg

SEQ ID NO: 15462 - DNA, 15 bp, Homo sapiens
gaaaactaaagctct

SEQ ID NO: 15463 - DNA, 15 bp, Homo sapiens
agaaaactaaagctc

SEQ ID NO: 15464 - DNA, 15 bp, Homo sapiens
gagaaaactaaagct

SEQ ID NO: 15465 - DNA, 15 bp, Homo sapiens
agagaaaactaaagc

SEQ ID NO: 15466 - DNA, 15 bp, Homo sapiens
aagagaaaactaaag

SEQ ID NO: 15467 - DNA, 15 bp, Homo sapiens
gaagagaaaactaaa

SEQ ID NO: 15468 - DNA, 15 bp, Homo sapiens
agaagagaaaactaa

SEQ ID NO: 15469 - DNA, 15 bp, Homo sapiens
tagaagagaaaacta

SEQ ID NO: 15470 - DNA, 15 bp, Homo sapiens
gtagaagagaaaact

SEQ ID NO: 15471 - DNA, 15 bp, Homo sapiens
cgtagaagagaaaac

SEQ ID NO: 15472 - DNA, 15 bp, Homo sapiens
ccgtagaagagaaaa

SEQ ID NO: 15473 - DNA, 15 bp, Homo sapiens
tccgtagaagagaaa

SEQ ID NO: 15474 - DNA, 15 bp, Homo sapiens
ttccgtagaagagaa

SEQ ID NO: 15475 - DNA, 15 bp, Homo sapiens
attccgtagaagaga

SEQ ID NO: 15476 - DNA, 15 bp, Homo sapiens
cattccgtagaagag

SEQ ID NO: 15477 - DNA, 15 bp, Homo sapiens
tcattccgtagaaga

SEQ ID NO: 15478 - DNA, 15 bp, Homo sapiens
ttcattccgtagaag

SEQ ID NO: 15479 - DNA, 15 bp, Homo sapiens
cttcattccgtagaa

SEQ ID NO: 15480 - DNA, 15 bp, Homo sapiens
tcttcattccgtaga

SEQ ID NO: 15481 - DNA, 15 bp, Homo sapiens
ttcttcattccgtag

SEQ ID NO: 15482 - DNA, 15 bp, Homo sapiens
tttcttcattccgta

SEQ ID NO: 15483 - DNA, 15 bp, Homo sapiens
ctttcttcattccgt

SEQ ID NO: 15484 - DNA, 15 bp, Homo sapiens
actttcttcattccg

SEQ ID NO: 15485 - DNA, 15 bp, Homo sapiens
aactttcttcattcc

SEQ ID NO: 15486 - DNA, 15 bp, Homo sapiens
taactttcttcattc

SEQ ID NO: 15487 - DNA, 15 bp, Homo sapiens
ttaactttcttcatt

SEQ ID NO: 15488 - DNA, 15 bp, Homo sapiens
tttaactttcttcat

SEQ ID NO: 15489 - DNA, 15 bp, Homo sapiens
ttttaactttcttca

SEQ ID NO: 15490 - DNA, 15 bp, Homo sapiens
gttttaactttcttc

SEQ ID NO: 15491 - DNA, 15 bp, Homo sapiens
tgttttaactttctt

SEQ ID NO: 15492 - DNA, 15 bp, Homo sapiens
ttgttttaactttct

SEQ ID NO: 15493 - DNA, 15 bp, Homo sapiens
tttgttttaactttc

SEQ ID NO: 15494 - DNA, 15 bp, Homo sapiens
atttgttttaacttt

SEQ ID NO: 15495 - DNA, 15 bp, Homo sapiens
tatttgttttaactt

SEQ ID NO: 15496 - DNA, 15 bp, Homo sapiens
ctatttgttttaact

SEQ ID NO: 15497 - DNA, 15 bp, Homo sapiens
caaaaaggtaagtgg

SEQ ID NO: 15498 - DNA, 15 bp, Homo sapiens
gcaaaaaggtaagtg

SEQ ID NO: 15499 - DNA, 15 bp, Homo sapiens
ggcaaaaaggtaagt

SEQ ID NO: 15500 - DNA, 15 bp, Homo sapiens
aggcaaaaaggtaag

SEQ ID NO: 15501 - DNA, 15 bp, Homo sapiens
gaggcaaaaaggtaa

SEQ ID NO: 15502 - DNA, 15 bp, Homo sapiens
agaggcaaaaaggta

SEQ ID NO: 15503 - DNA, 15 bp, Homo sapiens
gagaggcaaaaaggt

SEQ ID NO: 15504 - DNA, 15 bp, Homo sapiens
tgagaggcaaaaagg

SEQ ID NO: 15505 - DNA, 15 bp, Homo sapiens
ctgagaggcaaaaag

SEQ ID NO: 15506 - DNA, 15 bp, Homo sapiens
tctgagaggcaaaaa

SEQ ID NO: 15507 - DNA, 15 bp, Homo sapiens
ttctgagaggcaaaa

SEQ ID NO: 15508 - DNA, 15 bp, Homo sapiens
attctgagaggcaaa

SEQ ID NO: 15509 - DNA, 15 bp, Homo sapiens
tattctgagaggcaa

SEQ ID NO: 15510 - DNA, 15 bp, Homo sapiens
atattctgagaggca

SEQ ID NO: 15511 - DNA, 15 bp, Homo sapiens
gatattctgagaggc

SEQ ID NO: 15512 - DNA, 15 bp, Homo sapiens
agatattctgagagg

SEQ ID NO: 15513 - DNA, 15 bp, Homo sapiens
aagatattctgagag

SEQ ID NO: 15514 - DNA, 15 bp, Homo sapiens
aaagatattctgaga

SEQ ID NO: 15515 - DNA, 15 bp, Homo sapiens
aaaagatattctgag

SEQ ID NO: 15516 - DNA, 15 bp, Homo sapiens
caaaagatattctga

SEQ ID NO: 15517 - DNA, 15 bp, Homo sapiens
tcaaaagatattctg

SEQ ID NO: 15518 - DNA, 15 bp, Homo sapiens
atcaaaagatattct

SEQ ID NO: 15519 - DNA, 15 bp, Homo sapiens
tatcaaaagatattc

SEQ ID NO: 15520 - DNA, 15 bp, Homo sapiens
atatcaaaagatatt

SEQ ID NO: 15521 - DNA, 15 bp, Homo sapiens
aatatcaaaagatat

SEQ ID NO: 15522 - DNA, 15 bp, Homo sapiens
aaatatcaaaagata

SEQ ID NO: 15523 - DNA, 15 bp, Homo sapiens
aaaatatcaaaagat

SEQ ID NO: 15524 - DNA, 15 bp, Homo sapiens
aaaaatatcaaaaga

SEQ ID NO: 15525 - DNA, 15 bp, Homo sapiens
taaaaatatcaaaag

SEQ ID NO: 15526 - DNA, 15 bp, Homo sapiens
ataaaaatatcaaaa

SEQ ID NO: 15527 - DNA, 15 bp, Homo sapiens
gataaaaatatcaaa

SEQ ID NO: 15528 - DNA, 15 bp, Homo sapiens
agataaaaatatcaa

SEQ ID NO: 15529 - DNA, 15 bp, Homo sapiens
cagataaaaatatca

SEQ ID NO: 15530 - DNA, 15 bp, Homo sapiens
acagataaaaatatc

SEQ ID NO: 15531 - DNA, 15 bp, Homo sapiens
aacagataaaaatat

SEQ ID NO: 15532 - DNA, 15 bp, Homo sapiens
aaacagataaaaata

SEQ ID NO: 15533 - DNA, 15 bp, Homo sapiens
aaaacagataaaaat

SEQ ID NO: 15534 - DNA, 15 bp, Homo sapiens
aaaaacagataaaaa

SEQ ID NO: 15535 - DNA, 15 bp, Homo sapiens
aaaaaacagataaaa

SEQ ID NO: 15536 - DNA, 15 bp, Homo sapiens
gaaaaaacagataaa

SEQ ID NO: 15537 - DNA, 15 bp, Homo sapiens
ggaaaaaacagataa

SEQ ID NO: 15538 - DNA, 15 bp, Homo sapiens
gggaaaaaacagata

SEQ ID NO: 15539 - DNA, 15 bp, Homo sapiens
ggggaaaaaacagat

SEQ ID NO: 15540 - DNA, 15 bp, Homo sapiens
tggggaaaaaacaga

SEQ ID NO: 15541 - DNA, 15 bp, Homo sapiens
atggggaaaaaacag

SEQ ID NO: 15542 - DNA, 15 bp, Homo sapiens
aatggggaaaaaaca

SEQ ID NO: 15543 - DNA, 15 bp, Homo sapiens
caatggggaaaaaac

SEQ ID NO: 15544 - DNA, 15 bp, Homo sapiens
tcaatggggaaaaaa

SEQ ID NO: 15545 - DNA, 15 bp, Homo sapiens
ttcaatggggaaaaa

SEQ ID NO: 15546 - DNA, 15 bp, Homo sapiens
attcaatggggaaaa

SEQ ID NO: 15547 - DNA, 15 bp, Homo sapiens
cattcaatggggaaa

SEQ ID NO: 15548 - DNA, 15 bp, Homo sapiens
acattcaatggggaa

SEQ ID NO: 15549 - DNA, 15 bp, Homo sapiens
aacattcaatgggga

SEQ ID NO: 15550 - DNA, 15 bp, Homo sapiens
taacattcaatgggg

SEQ ID NO: 15551 - DNA, 15 bp, Homo sapiens
ataacattcaatggg

SEQ ID NO: 15552 - DNA, 15 bp, Homo sapiens
aataacattcaatgg

SEQ ID NO: 15553 - DNA, 15 bp, Homo sapiens
taataacattcaatg

SEQ ID NO: 15554 - DNA, 15 bp, Homo sapiens
gtaataacattcaat

SEQ ID NO: 15555 - DNA, 15 bp, Homo sapiens
ggtaataacattcaa

SEQ ID NO: 15556 - DNA, 15 bp, Homo sapiens
aggtaataacattca

SEQ ID NO: 15557 - DNA, 15 bp, Homo sapiens
aaggtaataacattc

SEQ ID NO: 15558 - DNA, 15 bp, Homo sapiens
taaggtaataacatt

SEQ ID NO: 15559 - DNA, 15 bp, Homo sapiens
ataaggtaataacat

SEQ ID NO: 15560 - DNA, 15 bp, Homo sapiens
gataaggtaataaca

SEQ ID NO: 15561 - DNA, 15 bp, Homo sapiens
tgataaggtaataac

SEQ ID NO: 15562 - DNA, 15 bp, Homo sapiens
ttgataaggtaataa

SEQ ID NO: 15563 - DNA, 15 bp, Homo sapiens
cttgataaggtaata

SEQ ID NO: 15564 - DNA, 15 bp, Homo sapiens
gcttgataaggtaat

SEQ ID NO: 15565 - DNA, 15 bp, Homo sapiens
agcttgataaggtaa

SEQ ID NO: 15566 - DNA, 15 bp, Homo sapiens
gagcttgataaggta

SEQ ID NO: 15567 - DNA, 15 bp, Homo sapiens
tgagcttgataaggt

SEQ ID NO: 15568 - DNA, 15 bp, Homo sapiens
ttgagcttgataagg

SEQ ID NO: 15569 - DNA, 15 bp, Homo sapiens
tttgagcttgataag

SEQ ID NO: 15570 - DNA, 15 bp, Homo sapiens
ttttgagcttgataa

SEQ ID NO: 15571 - DNA, 15 bp, Homo sapiens
tttttgagcttgata

SEQ ID NO: 15572 - DNA, 15 bp, Homo sapiens
ttttttgagcttgat

SEQ ID NO: 15573 - DNA, 15 bp, Homo sapiens
cttttttgagcttga

SEQ ID NO: 15574 - DNA, 15 bp, Homo sapiens
acttttttgagcttg

SEQ ID NO: 15575 - DNA, 15 bp, Homo sapiens
tacttttttgagctt

SEQ ID NO: 15576 - DNA, 15 bp, Homo sapiens
gtacttttttgagct

SEQ ID NO: 15577 - DNA, 15 bp, Homo sapiens
ggtacttttttgagc

SEQ ID NO: 15578 - DNA, 15 bp, Homo sapiens
gggtacttttttgag

SEQ ID NO: 15579 - DNA, 15 bp, Homo sapiens
agggtacttttttga

SEQ ID NO: 15580 - DNA, 15 bp, Homo sapiens
tagggtacttttttg

SEQ ID NO: 15581 - DNA, 15 bp, Homo sapiens
atagggtactttttt

SEQ ID NO: 15582 - DNA, 15 bp, Homo sapiens
gatagggtacttttt

SEQ ID NO: 15583 - DNA, 15 bp, Homo sapiens
cgatagggtactttt

SEQ ID NO: 15584 - DNA, 15 bp, Homo sapiens
gcgatagggtacttt

SEQ ID NO: 15585 - DNA, 15 bp, Homo sapiens
agcgatagggtactt

SEQ ID NO: 15586 - DNA, 15 bp, Homo sapiens
tagcgatagggtact

SEQ ID NO: 15587 - DNA, 15 bp, Homo sapiens
atagcgatagggtac

SEQ ID NO: 15588 - DNA, 15 bp, Homo sapiens
aatagcgatagggta

SEQ ID NO: 15589 - DNA, 15 bp, Homo sapiens
aaatagcgatagggt

SEQ ID NO: 15590 - DNA, 15 bp, Homo sapiens
aaaatagcgataggg

SEQ ID NO: 15591 - DNA, 15 bp, Homo sapiens
taaaatagcgatagg

SEQ ID NO: 15592 - DNA, 15 bp, Homo sapiens
ttaaaatagcgatag

SEQ ID NO: 15593 - DNA, 15 bp, Homo sapiens
cttaaaatagcgata

SEQ ID NO: 15594 - DNA, 15 bp, Homo sapiens
acttaaaatagcgat

SEQ ID NO: 15595 - DNA, 15 bp, Homo sapiens
aacttaaaatagcga

SEQ ID NO: 15596 - DNA, 15 bp, Homo sapiens
gaacttaaaatagcg

SEQ ID NO: 15597 - DNA, 15 bp, Homo sapiens
tgaacttaaaatagc

SEQ ID NO: 15598 - DNA, 15 bp, Homo sapiens
ctgaacttaaaatag

SEQ ID NO: 15599 - DNA, 15 bp, Homo sapiens
actgaacttaaaata

SEQ ID NO: 15600 - DNA, 15 bp, Homo sapiens
aactgaacttaaaat

SEQ ID NO: 15601 - DNA, 15 bp, Homo sapiens
caactgaacttaaaa

SEQ ID NO: 15602 - DNA, 15 bp, Homo sapiens
acaactgaacttaaa

SEQ ID NO: 15603 - DNA, 15 bp, Homo sapiens
cacaactgaacttaa

SEQ ID NO: 15604 - DNA, 15 bp, Homo sapiens
acacaactgaactta

SEQ ID NO: 15605 - DNA, 15 bp, Homo sapiens
aacacaactgaactt

SEQ ID NO: 15606 - DNA, 15 bp, Homo sapiens
taacacaactgaact

SEQ ID NO: 15607 - DNA, 15 bp, Homo sapiens
ttaacacaactgaac

SEQ ID NO: 15608 - DNA, 15 bp, Homo sapiens
tttaacacaactgaa

SEQ ID NO: 15609 - DNA, 15 bp, Homo sapiens
atttaacacaactga

SEQ ID NO: 15610 - DNA, 15 bp, Homo sapiens
gatttaacacaactg

SEQ ID NO: 15611 - DNA, 15 bp, Homo sapiens
agatttaacacaact

SEQ ID NO: 15612 - DNA, 15 bp, Homo sapiens
tagatttaacacaac

SEQ ID NO: 15613 - DNA, 15 bp, Homo sapiens
atagatttaacacaa

SEQ ID NO: 15614 - DNA, 15 bp, Homo sapiens
tatagatttaacaca

SEQ ID NO: 15615 - DNA, 15 bp, Homo sapiens
ttatagatttaacac

SEQ ID NO: 15616 - DNA, 15 bp, Homo sapiens
tttatagatttaaca

SEQ ID NO: 15617 - DNA, 15 bp, Homo sapiens
atttatagatttaac

SEQ ID NO: 15618 - DNA, 15 bp, Homo sapiens
aatttatagatttaa

SEQ ID NO: 15619 - DNA, 15 bp, Homo sapiens
taatttatagattta

SEQ ID NO: 15620 - DNA, 15 bp, Homo sapiens
ctaatttatagattt

SEQ ID NO: 15621 - DNA, 15 bp, Homo sapiens
gctaatttatagatt

SEQ ID NO: 15622 - DNA, 15 bp, Homo sapiens
agctaatttatagat

SEQ ID NO: 15623 - DNA, 15 bp, Homo sapiens
aagctaatttataga

SEQ ID NO: 15624 - DNA, 15 bp, Homo sapiens
caagctaatttatag

SEQ ID NO: 15625 - DNA, 15 bp, Homo sapiens
ccaagctaatttata

SEQ ID NO: 15626 - DNA, 15 bp, Homo sapiens
cccaagctaatttat

SEQ ID NO: 15627 - DNA, 15 bp, Homo sapiens
tcccaagctaattta

SEQ ID NO: 15628 - DNA, 15 bp, Homo sapiens
ttcccaagctaattt

SEQ ID NO: 15629 - DNA, 15 bp, Homo sapiens
tttcccaagctaatt

SEQ ID NO: 15630 - DNA, 15 bp, Homo sapiens
atttcccaagctaat

SEQ ID NO: 15631 - DNA, 15 bp, Homo sapiens
aatttcccaagctaa

SEQ ID NO: 15632 - DNA, 15 bp, Homo sapiens
aaatttcccaagcta

SEQ ID NO: 15633 - DNA, 15 bp, Homo sapiens
caaatttcccaagct

SEQ ID NO: 15634 - DNA, 15 bp, Homo sapiens
ccaaatttcccaagc

SEQ ID NO: 15635 - DNA, 15 bp, Homo sapiens
tccaaatttcccaag

SEQ ID NO: 15636 - DNA, 15 bp, Homo sapiens
atccaaatttcccaa

SEQ ID NO: 15637 - DNA, 15 bp, Homo sapiens
tatccaaatttccca

SEQ ID NO: 15638 - DNA, 15 bp, Homo sapiens
atatccaaatttccc

SEQ ID NO: 15639 - DNA, 15 bp, Homo sapiens
aatatccaaatttcc

SEQ ID NO: 15640 - DNA, 15 bp, Homo sapiens
taatatccaaatttc

SEQ ID NO: 15641 - DNA, 15 bp, Homo sapiens
ttaatatccaaattt

SEQ ID NO: 15642 - DNA, 15 bp, Homo sapiens
tttaatatccaaatt

SEQ ID NO: 15643 - DNA, 15 bp, Homo sapiens
atttaatatccaaat

SEQ ID NO: 15644 - DNA, 15 bp, Homo sapiens
catttaatatccaaa

SEQ ID NO: 15645 - DNA, 15 bp, Homo sapiens
tcatttaatatccaa

SEQ ID NO: 15646 - DNA, 15 bp, Homo sapiens
ttcatttaatatcca

SEQ ID NO: 15647 - DNA, 15 bp, Homo sapiens
gttcatttaatatcc

SEQ ID NO: 15648 - DNA, 15 bp, Homo sapiens
agttcatttaatatc

SEQ ID NO: 15649 - DNA, 15 bp, Homo sapiens
gagttcatttaatat

SEQ ID NO: 15650 - DNA, 15 bp, Homo sapiens
tgagttcatttaata

SEQ ID NO: 15651 - DNA, 15 bp, Homo sapiens
atgagttcatttaat

SEQ ID NO: 15652 - DNA, 15 bp, Homo sapiens
catgagttcatttaa

SEQ ID NO: 15653 - DNA, 15 bp, Homo sapiens
tcatgagttcattta

SEQ ID NO: 15654 - DNA, 15 bp, Homo sapiens
ttcatgagttcattt

SEQ ID NO: 15655 - DNA, 15 bp, Homo sapiens
cttcatgagttcatt

SEQ ID NO: 15656 - DNA, 15 bp, Homo sapiens
tcttcatgagttcat

SEQ ID NO: 15657 - DNA, 15 bp, Homo sapiens
ttcttcatgagttca

SEQ ID NO: 15658 - DNA, 15 bp, Homo sapiens
cttcttcatgagttc

SEQ ID NO: 15659 - DNA, 15 bp, Homo sapiens
gcttcttcatgagtt

SEQ ID NO: 15660 - DNA, 15 bp, Homo sapiens
tgcttcttcatgagt

SEQ ID NO: 15661 - DNA, 15 bp, Homo sapiens
ctgcttcttcatgag

SEQ ID NO: 15662 - DNA, 15 bp, Homo sapiens
tctgcttcttcatga

SEQ ID NO: 15663 - DNA, 15 bp, Homo sapiens
ctctgcttcttcatg

SEQ ID NO: 15664 - DNA, 15 bp, Homo sapiens
actctgcttcttcat

SEQ ID NO: 15665 - DNA, 15 bp, Homo sapiens
aactctgcttcttca

SEQ ID NO: 15666 - DNA, 15 bp, Homo sapiens
aaactctgcttcttc

SEQ ID NO: 15667 - DNA, 15 bp, Homo sapiens
taaactctgcttctt

SEQ ID NO: 15668 - DNA, 15 bp, Homo sapiens
ctaaactctgcttct

SEQ ID NO: 15669 - DNA, 15 bp, Homo sapiens
gctaaactctgcttc

SEQ ID NO: 15670 - DNA, 15 bp, Homo sapiens
agctaaactctgctt

SEQ ID NO: 15671 - DNA, 15 bp, Homo sapiens
gagctaaactctgct

SEQ ID NO: 15672 - DNA, 15 bp, Homo sapiens
agagctaaactctgc

SEQ ID NO: 15673 - DNA, 15 bp, Homo sapiens
gagagctaaactctg

SEQ ID NO: 15674 - DNA, 15 bp, Homo sapiens
ggagagctaaactct

SEQ ID NO: 15675 - DNA, 15 bp, Homo sapiens
aggagagctaaactc

SEQ ID NO: 15676 - DNA, 15 bp, Homo sapiens
aaggagagctaaact

SEQ ID NO: 15677 - DNA, 15 bp, Homo sapiens
taaggagagctaaac

SEQ ID NO: 15678 - DNA, 15 bp, Homo sapiens
ttaaggagagctaaa

SEQ ID NO: 15679 - DNA, 15 bp, Homo sapiens
attaaggagagctaa

SEQ ID NO: 15680 - DNA, 15 bp, Homo sapiens
aattaaggagagcta

SEQ ID NO: 15681 - DNA, 15 bp, Homo sapiens
gaattaaggagagct

SEQ ID NO: 15682 - DNA, 15 bp, Homo sapiens
agaattaaggagagc

SEQ ID NO: 15683 - DNA, 15 bp, Homo sapiens
gagaattaaggagag

SEQ ID NO: 15684 - DNA, 15 bp, Homo sapiens
tgagaattaaggaga

SEQ ID NO: 15685 - DNA, 15 bp, Homo sapiens
atgagaattaaggag

SEQ ID NO: 15686 - DNA, 15 bp, Homo sapiens
gatgagaattaagga

SEQ ID NO: 15687 - DNA, 15 bp, Homo sapiens
agatgagaattaagg

SEQ ID NO: 15688 - DNA, 15 bp, Homo sapiens
aagatgagaattaag

SEQ ID NO: 15689 - DNA, 15 bp, Homo sapiens
gaagatgagaattaa

SEQ ID NO: 15690 - DNA, 15 bp, Homo sapiens
ggaagatgagaatta

SEQ ID NO: 15691 - DNA, 15 bp, Homo sapiens
aggaagatgagaatt

SEQ ID NO: 15692 - DNA, 15 bp, Homo sapiens
aaggaagatgagaat

SEQ ID NO: 15693 - DNA, 15 bp, Homo sapiens
aaaggaagatgagaa

SEQ ID NO: 15694 - DNA, 15 bp, Homo sapiens
taaaggaagatgaga

SEQ ID NO: 15695 - DNA, 15 bp, Homo sapiens
ataaaggaagatgag

SEQ ID NO: 15696 - DNA, 15 bp, Homo sapiens
aataaaggaagatga

SEQ ID NO: 15697 - DNA, 15 bp, Homo sapiens
aaataaaggaagatg

SEQ ID NO: 15698 - DNA, 15 bp, Homo sapiens
taaataaaggaagat

SEQ ID NO: 15699 - DNA, 15 bp, Homo sapiens
ataaataaaggaaga

SEQ ID NO: 15700 - DNA, 15 bp, Homo sapiens
gataaataaaggaag

SEQ ID NO: 15701 - DNA, 15 bp, Homo sapiens
ggataaataaaggaa

SEQ ID NO: 15702 - DNA, 15 bp, Homo sapiens
aggataaataaagga

SEQ ID NO: 15703 - DNA, 15 bp, Homo sapiens
taggataaataaagg

SEQ ID NO: 15704 - DNA, 15 bp, Homo sapiens
gtaggataaataaag

SEQ ID NO: 15705 - DNA, 15 bp, Homo sapiens
agtaggataaataaa

SEQ ID NO: 15706 - DNA, 15 bp, Homo sapiens
tagtaggataaataa

SEQ ID NO: 15707 - DNA, 15 bp, Homo sapiens
gtagtaggataaata

SEQ ID NO: 15708 - DNA, 15 bp, Homo sapiens
tgtagtaggataaat

SEQ ID NO: 15709 - DNA, 15 bp, Homo sapiens
ctgtagtaggataaa

SEQ ID NO: 15710 - DNA, 15 bp, Homo sapiens
actgtagtaggataa

SEQ ID NO: 15711 - DNA, 15 bp, Homo sapiens
aactgtagtaggata

SEQ ID NO: 15712 - DNA, 15 bp, Homo sapiens
gaactgtagtaggat

SEQ ID NO: 15713 - DNA, 15 bp, Homo sapiens
agaactgtagtagga

SEQ ID NO: 15714 - DNA, 15 bp, Homo sapiens
cagaactgtagtagg

SEQ ID NO: 15715 - DNA, 15 bp, Homo sapiens
acagaactgtagtag

SEQ ID NO: 15716 - DNA, 15 bp, Homo sapiens
cacagaactgtagta

SEQ ID NO: 15717 - DNA, 15 bp, Homo sapiens
ccacagaactgtagt

SEQ ID NO: 15718 - DNA, 15 bp, Homo sapiens
accacagaactgtag

SEQ ID NO: 15719 - DNA, 15 bp, Homo sapiens
aaccacagaactgta

SEQ ID NO: 15720 - DNA, 15 bp, Homo sapiens
aaaccacagaactgt

SEQ ID NO: 15721 - DNA, 15 bp, Homo sapiens
aaaaccacagaactg

SEQ ID NO: 15722 - DNA, 15 bp, Homo sapiens
gaaaaccacagaact

SEQ ID NO: 15723 - DNA, 15 bp, Homo sapiens
agaaaaccacagaac

SEQ ID NO: 15724 - DNA, 15 bp, Homo sapiens
aagaaaaccacagaa

SEQ ID NO: 15725 - DNA, 15 bp, Homo sapiens
aaagaaaaccacaga

SEQ ID NO: 15726 - DNA, 15 bp, Homo sapiens
aaaagaaaaccacag

SEQ ID NO: 15727 - DNA, 15 bp, Homo sapiens
taaaagaaaaccaca

SEQ ID NO: 15728 - DNA, 15 bp, Homo sapiens
ataaaagaaaaccac

SEQ ID NO: 15729 - DNA, 15 bp, Homo sapiens
cataaaagaaaacca

SEQ ID NO: 15730 - DNA, 15 bp, Homo sapiens
acataaaagaaaacc

SEQ ID NO: 15731 - DNA, 15 bp, Homo sapiens
tacataaaagaaaac

SEQ ID NO: 15732 - DNA, 15 bp, Homo sapiens
ttacataaaagaaaa

SEQ ID NO: 15733 - DNA, 15 bp, Homo sapiens
cttacataaaagaaa

SEQ ID NO: 15734 - DNA, 15 bp, Homo sapiens
tcttacataaaagaa

SEQ ID NO: 15735 - DNA, 15 bp, Homo sapiens
ttcttacataaaaga

SEQ ID NO: 15736 - DNA, 15 bp, Homo sapiens
cttcttacataaaag

SEQ ID NO: 15737 - DNA, 15 bp, Homo sapiens
gcttcttacataaaa

SEQ ID NO: 15738 - DNA, 15 bp, Homo sapiens
tgcttcttacataaa

SEQ ID NO: 15739 - DNA, 15 bp, Homo sapiens
gtgcttcttacataa

SEQ ID NO: 15740 - DNA, 15 bp, Homo sapiens
tgtgcttcttacata

SEQ ID NO: 15741 - DNA, 15 bp, Homo sapiens
atgtgcttcttacat

SEQ ID NO: 15742 - DNA, 15 bp, Homo sapiens
catgtgcttcttaca

SEQ ID NO: 15743 - DNA, 15 bp, Homo sapiens
acatgtgcttcttac

SEQ ID NO: 15744 - DNA, 15 bp, Homo sapiens
aacatgtgcttctta

SEQ ID NO: 15745 - DNA, 15 bp, Homo sapiens
aaacatgtgcttctt

SEQ ID NO: 15746 - DNA, 15 bp, Homo sapiens
caaacatgtgcttct

SEQ ID NO: 15747 - DNA, 15 bp, Homo sapiens
ccaaacatgtgcttc

SEQ ID NO: 15748 - DNA, 15 bp, Homo sapiens
gccaaacatgtgctt

SEQ ID NO: 15749 - DNA, 15 bp, Homo sapiens
agccaaacatgtgct

SEQ ID NO: 15750 - DNA, 15 bp, Homo sapiens
tagccaaacatgtgc

SEQ ID NO: 15751 - DNA, 15 bp, Homo sapiens
ttagccaaacatgtg

SEQ ID NO: 15752 - DNA, 15 bp, Homo sapiens
cttagccaaacatgt

SEQ ID NO: 15753 - DNA, 15 bp, Homo sapiens
acttagccaaacatg

SEQ ID NO: 15754 - DNA, 15 bp, Homo sapiens
aacttagccaaacat

SEQ ID NO: 15755 - DNA, 15 bp, Homo sapiens
taacttagccaaaca

SEQ ID NO: 15756 - DNA, 15 bp, Homo sapiens
ttaacttagccaaac

SEQ ID NO: 15757 - DNA, 15 bp, Homo sapiens
attaacttagccaaa

SEQ ID NO: 15758 - DNA, 15 bp, Homo sapiens
cattaacttagccaa

SEQ ID NO: 15759 - DNA, 15 bp, Homo sapiens
gcattaacttagcca

SEQ ID NO: 15760 - DNA, 15 bp, Homo sapiens
ggcattaacttagcc

SEQ ID NO: 15761 - DNA, 15 bp, Homo sapiens
aggcattaacttagc

SEQ ID NO: 15762 - DNA, 15 bp, Homo sapiens
taggcattaacttag

SEQ ID NO: 15763 - DNA, 15 bp, Homo sapiens
ctaggcattaactta

SEQ ID NO: 15764 - DNA, 15 bp, Homo sapiens
cctaggcattaactt

SEQ ID NO: 15765 - DNA, 15 bp, Homo sapiens
acctaggcattaact

SEQ ID NO: 15766 - DNA, 15 bp, Homo sapiens
aacctaggcattaac

SEQ ID NO: 15767 - DNA, 15 bp, Homo sapiens
aaacctaggcattaa

SEQ ID NO: 15768 - DNA, 15 bp, Homo sapiens
aaaacctaggcatta

SEQ ID NO: 15769 - DNA, 15 bp, Homo sapiens
aaaaacctaggcatt

SEQ ID NO: 15770 - DNA, 15 bp, Homo sapiens
aaaaaacctaggcat

SEQ ID NO: 15771 - DNA, 15 bp, Homo sapiens
aaaaaaacctaggca

SEQ ID NO: 15772 - DNA, 15 bp, Homo sapiens
caaaaaaacctaggc

SEQ ID NO: 15773 - DNA, 15 bp, Homo sapiens
acaaaaaaacctagg

SEQ ID NO: 15774 - DNA, 15 bp, Homo sapiens
aacaaaaaaacctag

SEQ ID NO: 15775 - DNA, 15 bp, Homo sapiens
aaacaaaaaaaccta

SEQ ID NO: 15776 - DNA, 15 bp, Homo sapiens
taaacaaaaaaacct

SEQ ID NO: 15777 - DNA, 15 bp, Homo sapiens
ataaacaaaaaaacc

SEQ ID NO: 15778 - DNA, 15 bp, Homo sapiens
cataaacaaaaaaac

SEQ ID NO: 15779 - DNA, 15 bp, Homo sapiens
acataaacaaaaaaa

SEQ ID NO: 15780 - DNA, 15 bp, Homo sapiens
cacataaacaaaaaa

SEQ ID NO: 15781 - DNA, 15 bp, Homo sapiens
acacataaacaaaaa

SEQ ID NO: 15782 - DNA, 15 bp, Homo sapiens
gacacataaacaaaa

SEQ ID NO: 15783 - DNA, 15 bp, Homo sapiens
ggacacataaacaaa

SEQ ID NO: 15784 - DNA, 15 bp, Homo sapiens
tggacacataaacaa

SEQ ID NO: 15785 - DNA, 15 bp, Homo sapiens
atggacacataaaca

SEQ ID NO: 15786 - DNA, 15 bp, Homo sapiens
aatggacacataaac

SEQ ID NO: 15787 - DNA, 15 bp, Homo sapiens
gaatggacacataaa

SEQ ID NO: 15788 - DNA, 15 bp, Homo sapiens
agaatggacacataa

SEQ ID NO: 15789 - DNA, 15 bp, Homo sapiens
gagaatggacacata

SEQ ID NO: 15790 - DNA, 15 bp, Homo sapiens
tgagaatggacacat

SEQ ID NO: 15791 - DNA, 15 bp, Homo sapiens
gtgagaatggacaca

SEQ ID NO: 15792 - DNA, 15 bp, Homo sapiens
agtgagaatggacac

SEQ ID NO: 15793 - DNA, 15 bp, Homo sapiens
cagtgagaatggaca

SEQ ID NO: 15794 - DNA, 15 bp, Homo sapiens
acagtgagaatggac

SEQ ID NO: 15795 - DNA, 15 bp, Homo sapiens
cacagtgagaatgga

SEQ ID NO: 15796 - DNA, 15 bp, Homo sapiens
ccacagtgagaatgg

SEQ ID NO: 15797 - DNA, 15 bp, Homo sapiens
tccacagtgagaatg

SEQ ID NO: 15798 - DNA, 15 bp, Homo sapiens
atccacagtgagaat

SEQ ID NO: 15799 - DNA, 15 bp, Homo sapiens
tatccacagtgagaa

SEQ ID NO: 15800 - DNA, 15 bp, Homo sapiens
ctatccacagtgaga

SEQ ID NO: 15801 - DNA, 15 bp, Homo sapiens
actatccacagtgag

SEQ ID NO: 15802 - DNA, 15 bp, Homo sapiens
tactatccacagtga

SEQ ID NO: 15803 - DNA, 15 bp, Homo sapiens
atactatccacagtg

SEQ ID NO: 15804 - DNA, 15 bp, Homo sapiens
aatactatccacagt

SEQ ID NO: 15805 - DNA, 15 bp, Homo sapiens
gaatactatccacag

SEQ ID NO: 15806 - DNA, 15 bp, Homo sapiens
agaatactatccaca

SEQ ID NO: 15807 - DNA, 15 bp, Homo sapiens
gagaatactatccac

SEQ ID NO: 15808 - DNA, 15 bp, Homo sapiens
agagaatactatcca

SEQ ID NO: 15809 - DNA, 15 bp, Homo sapiens
aagagaatactatcc

SEQ ID NO: 15810 - DNA, 15 bp, Homo sapiens
aaagagaatactatc

SEQ ID NO: 15811 - DNA, 15 bp, Homo sapiens
aaaagagaatactat

SEQ ID NO: 15812 - DNA, 15 bp, Homo sapiens
gaaaagagaatacta

SEQ ID NO: 15813 - DNA, 15 bp, Homo sapiens
ggaaaagagaatact

SEQ ID NO: 15814 - DNA, 15 bp, Homo sapiens
gggaaaagagaatac

SEQ ID NO: 15815 - DNA, 15 bp, Homo sapiens
ggggaaaagagaata

SEQ ID NO: 15816 - DNA, 15 bp, Homo sapiens
tggggaaaagagaat

SEQ ID NO: 15817 - DNA, 15 bp, Homo sapiens
gtggggaaaagagaa

SEQ ID NO: 15818 - DNA, 15 bp, Homo sapiens
tgtggggaaaagaga

SEQ ID NO: 15819 - DNA, 15 bp, Homo sapiens
atgtggggaaaagag

SEQ ID NO: 15820 - DNA, 15 bp, Homo sapiens
aatgtggggaaaaga

SEQ ID NO: 15821 - DNA, 15 bp, Homo sapiens
taatgtggggaaaag

SEQ ID NO: 15822 - DNA, 15 bp, Homo sapiens
ataatgtggggaaaa

SEQ ID NO: 15823 - DNA, 15 bp, Homo sapiens
tataatgtggggaaa

SEQ ID NO: 15824 - DNA, 15 bp, Homo sapiens
atataatgtggggaa

SEQ ID NO: 15825 - DNA, 15 bp, Homo sapiens
aatataatgtgggga

SEQ ID NO: 15826 - DNA, 15 bp, Homo sapiens
taatataatgtgggg

SEQ ID NO: 15827 - DNA, 15 bp, Homo sapiens
ttaatataatgtggg

SEQ ID NO: 15828 - DNA, 15 bp, Homo sapiens
attaatataatgtgg

SEQ ID NO: 15829 - DNA, 15 bp, Homo sapiens
aattaatataatgtg

SEQ ID NO: 15830 - DNA, 15 bp, Homo sapiens
aaattaatataatgt

SEQ ID NO: 15831 - DNA, 15 bp, Homo sapiens
taaattaatataatg

SEQ ID NO: 15832 - DNA, 15 bp, Homo sapiens
ttaaattaatataat

SEQ ID NO: 15833 - DNA, 15 bp, Homo sapiens
gttaaattaatataa

SEQ ID NO: 15834 - DNA, 15 bp, Homo sapiens
agttaaattaatata

SEQ ID NO: 15835 - DNA, 15 bp, Homo sapiens
cagttaaattaatat

SEQ ID NO: 15836 - DNA, 15 bp, Homo sapiens
ccagttaaattaata

SEQ ID NO: 15837 - DNA, 15 bp, Homo sapiens
accagttaaattaat

SEQ ID NO: 15838 - DNA, 15 bp, Homo sapiens
aaccagttaaattaa

SEQ ID NO: 15839 - DNA, 15 bp, Homo sapiens
aaaccagttaaatta

SEQ ID NO: 15840 - DNA, 15 bp, Homo sapiens
aaaaccagttaaatt

SEQ ID NO: 15841 - DNA, 15 bp, Homo sapiens
gaaaaccagttaaat

SEQ ID NO: 15842 - DNA, 15 bp, Homo sapiens
tgaaaaccagttaaa

SEQ ID NO: 15843 - DNA, 15 bp, Homo sapiens
ctgaaaaccagttaa

SEQ ID NO: 15844 - DNA, 15 bp, Homo sapiens
tctgaaaaccagtta

SEQ ID NO: 15845 - DNA, 15 bp, Homo sapiens
ctctgaaaaccagtt

SEQ ID NO: 15846 - DNA, 15 bp, Homo sapiens
tctctgaaaaccagt

SEQ ID NO: 15847 - DNA, 15 bp, Homo sapiens
gtctctgaaaaccag

SEQ ID NO: 15848 - DNA, 15 bp, Homo sapiens
agtctctgaaaacca

SEQ ID NO: 15849 - DNA, 15 bp, Homo sapiens
tagtctctgaaaacc

SEQ ID NO: 15850 - DNA, 15 bp, Homo sapiens
ttagtctctgaaaac

SEQ ID NO: 15851 - DNA, 15 bp, Homo sapiens
attagtctctgaaaa

SEQ ID NO: 15852 - DNA, 15 bp, Homo sapiens
tattagtctctgaaa

SEQ ID NO: 15853 - DNA, 15 bp, Homo sapiens
ctattagtctctgaa

SEQ ID NO: 15854 - DNA, 15 bp, Homo sapiens
gctattagtctctga

SEQ ID NO: 15855 - DNA, 15 bp, Homo sapiens
tgctattagtctctg

SEQ ID NO: 15856 - DNA, 15 bp, Homo sapiens
ttgctattagtctct

SEQ ID NO: 15857 - DNA, 15 bp, Homo sapiens
attgctattagtctc

SEQ ID NO: 15858 - DNA, 15 bp, Homo sapiens
cattgctattagtct

SEQ ID NO: 15859 - DNA, 15 bp, Homo sapiens
gcattgctattagtc

SEQ ID NO: 15860 - DNA, 15 bp, Homo sapiens
agcattgctattagt

SEQ ID NO: 15861 - DNA, 15 bp, Homo sapiens
tagcattgctattag

SEQ ID NO: 15862 - DNA, 15 bp, Homo sapiens
atagcattgctatta

SEQ ID NO: 15863 - DNA, 15 bp, Homo sapiens
aatagcattgctatt

SEQ ID NO: 15864 - DNA, 15 bp, Homo sapiens
taatagcattgctat

SEQ ID NO: 15865 - DNA, 15 bp, Homo sapiens
ataatagcattgcta

SEQ ID NO: 15866 - DNA, 15 bp, Homo sapiens
aataatagcattgct

SEQ ID NO: 15867 - DNA, 15 bp, Homo sapiens
aaataatagcattgc

SEQ ID NO: 15868 - DNA, 15 bp, Homo sapiens
taaataatagcattg

SEQ ID NO: 15869 - DNA, 15 bp, Homo sapiens
ctaaataatagcatt

SEQ ID NO: 15870 - DNA, 15 bp, Homo sapiens
cctaaataatagcat

SEQ ID NO: 15871 - DNA, 15 bp, Homo sapiens
tcctaaataatagca

SEQ ID NO: 15872 - DNA, 15 bp, Homo sapiens
ctcctaaataatagc

SEQ ID NO: 15873 - DNA, 15 bp, Homo sapiens
tctcctaaataatag

SEQ ID NO: 15874 - DNA, 15 bp, Homo sapiens
ttctcctaaataata

SEQ ID NO: 15875 - DNA, 15 bp, Homo sapiens
attctcctaaataat

SEQ ID NO: 15876 - DNA, 15 bp, Homo sapiens
aattctcctaaataa

SEQ ID NO: 15877 - DNA, 15 bp, Homo sapiens
aaattctcctaaata

SEQ ID NO: 15878 - DNA, 15 bp, Homo sapiens
taaattctcctaaat

SEQ ID NO: 15879 - DNA, 15 bp, Homo sapiens
gtaaattctcctaaa

SEQ ID NO: 15880 - DNA, 15 bp, Homo sapiens
ggtaaattctcctaa

SEQ ID NO: 15881 - DNA, 15 bp, Homo sapiens
aggtaaattctccta

SEQ ID NO: 15882 - DNA, 15 bp, Homo sapiens
aaggtaaattctcct

SEQ ID NO: 15883 - DNA, 15 bp, Homo sapiens
caaggtaaattctcc

SEQ ID NO: 15884 - DNA, 15 bp, Homo sapiens
ccaaggtaaattctc

SEQ ID NO: 15885 - DNA, 15 bp, Homo sapiens
accaaggtaaattct

SEQ ID NO: 15886 - DNA, 15 bp, Homo sapiens
aaccaaggtaaattc

SEQ ID NO: 15887 - DNA, 15 bp, Homo sapiens
gaaccaaggtaaatt

SEQ ID NO: 15888 - DNA, 15 bp, Homo sapiens
agaaccaaggtaaat

SEQ ID NO: 15889 - DNA, 15 bp, Homo sapiens
cagaaccaaggtaaa

SEQ ID NO: 15890 - DNA, 15 bp, Homo sapiens
tcagaaccaaggtaa

SEQ ID NO: 15891 - DNA, 15 bp, Homo sapiens
atcagaaccaaggta

SEQ ID NO: 15892 - DNA, 15 bp, Homo sapiens
aatcagaaccaaggt

SEQ ID NO: 15893 - DNA, 15 bp, Homo sapiens
taatcagaaccaagg

SEQ ID NO: 15894 - DNA, 15 bp, Homo sapiens
ttaatcagaaccaag

SEQ ID NO: 15895 - DNA, 15 bp, Homo sapiens
gttaatcagaaccaa

SEQ ID NO: 15896 - DNA, 15 bp, Homo sapiens
agttaatcagaacca

SEQ ID NO: 15897 - DNA, 15 bp, Homo sapiens
aagttaatcagaacc

SEQ ID NO: 15898 - DNA, 15 bp, Homo sapiens
taagttaatcagaac

SEQ ID NO: 15899 - DNA, 15 bp, Homo sapiens
gtaagttaatcagaa

SEQ ID NO: 15900 - DNA, 15 bp, Homo sapiens
ggtaagttaatcaga

SEQ ID NO: 15901 - DNA, 15 bp, Homo sapiens
gggtaagttaatcag

SEQ ID NO: 15902 - DNA, 15 bp, Homo sapiens
tgggtaagttaatca

SEQ ID NO: 15903 - DNA, 15 bp, Homo sapiens
atgggtaagttaatc

SEQ ID NO: 15904 - DNA, 15 bp, Homo sapiens
tatgggtaagttaat

SEQ ID NO: 15905 - DNA, 15 bp, Homo sapiens
gtatgggtaagttaa

SEQ ID NO: 15906 - DNA, 15 bp, Homo sapiens
agtatgggtaagtta

SEQ ID NO: 15907 - DNA, 15 bp, Homo sapiens
aagtatgggtaagtt

SEQ ID NO: 15908 - DNA, 15 bp, Homo sapiens
caagtatgggtaagt

SEQ ID NO: 15909 - DNA, 15 bp, Homo sapiens
gcaagtatgggtaag

SEQ ID NO: 15910 - DNA, 15 bp, Homo sapiens
tgcaagtatgggtaa

SEQ ID NO: 15911 - DNA, 15 bp, Homo sapiens
ttgcaagtatgggta

SEQ ID NO: 15912 - DNA, 15 bp, Homo sapiens
tttgcaagtatgggt

SEQ ID NO: 15913 - DNA, 15 bp, Homo sapiens
atttgcaagtatggg

SEQ ID NO: 15914 - DNA, 15 bp, Homo sapiens
gatttgcaagtatgg

SEQ ID NO: 15915 - DNA, 15 bp, Homo sapiens
tgatttgcaagtatg

SEQ ID NO: 15916 - DNA, 15 bp, Homo sapiens
atgatttgcaagtat

SEQ ID NO: 15917 - DNA, 15 bp, Homo sapiens
aatgatttgcaagta

SEQ ID NO: 15918 - DNA, 15 bp, Homo sapiens
aaatgatttgcaagt

SEQ ID NO: 15919 - DNA, 15 bp, Homo sapiens
caaatgatttgcaag

SEQ ID NO: 15920 - DNA, 15 bp, Homo sapiens
gcaaatgatttgcaa

SEQ ID NO: 15921 - DNA, 15 bp, Homo sapiens
tgcaaatgatttgca

SEQ ID NO: 15922 - DNA, 15 bp, Homo sapiens
ctgcaaatgatttgc

SEQ ID NO: 15923 - DNA, 15 bp, Homo sapiens
gctgcaaatgatttg

SEQ ID NO: 15924 - DNA, 15 bp, Homo sapiens
agctgcaaatgattt

SEQ ID NO: 15925 - DNA, 15 bp, Homo sapiens
aagctgcaaatgatt

SEQ ID NO: 15926 - DNA, 15 bp, Homo sapiens
aaagctgcaaatgat

SEQ ID NO: 15927 - DNA, 15 bp, Homo sapiens
aaaagctgcaaatga

SEQ ID NO: 15928 - DNA, 15 bp, Homo sapiens
aaaaagctgcaaatg

SEQ ID NO: 15929 - DNA, 15 bp, Homo sapiens
taaaaagctgcaaat

SEQ ID NO: 15930 - DNA, 15 bp, Homo sapiens
ctaaaaagctgcaaa

SEQ ID NO: 15931 - DNA, 15 bp, Homo sapiens
actaaaaagctgcaa

SEQ ID NO: 15932 - DNA, 15 bp, Homo sapiens
aactaaaaagctgca

SEQ ID NO: 15933 - DNA, 15 bp, Homo sapiens
taactaaaaagctgc

SEQ ID NO: 15934 - DNA, 15 bp, Homo sapiens
ttaactaaaaagctg

SEQ ID NO: 15935 - DNA, 15 bp, Homo sapiens
gttaactaaaaagct

SEQ ID NO: 15936 - DNA, 15 bp, Homo sapiens
agttaactaaaaagc

SEQ ID NO: 15937 - DNA, 15 bp, Homo sapiens
aagttaactaaaaag

SEQ ID NO: 15938 - DNA, 15 bp, Homo sapiens
aaagttaactaaaaa

SEQ ID NO: 15939 - DNA, 15 bp, Homo sapiens
caaagttaactaaaa

SEQ ID NO: 15940 - DNA, 15 bp, Homo sapiens
acaaagttaactaaa

SEQ ID NO: 15941 - DNA, 15 bp, Homo sapiens
cacaaagttaactaa

SEQ ID NO: 15942 - DNA, 15 bp, Homo sapiens
tcacaaagttaacta

SEQ ID NO: 15943 - DNA, 15 bp, Homo sapiens
ctcacaaagttaact

SEQ ID NO: 15944 - DNA, 15 bp, Homo sapiens
actcacaaagttaac

SEQ ID NO: 15945 - DNA, 15 bp, Homo sapiens
aactcacaaagttaa

SEQ ID NO: 15946 - DNA, 15 bp, Homo sapiens
gaactcacaaagtta

SEQ ID NO: 15947 - DNA, 15 bp, Homo sapiens
agaactcacaaagtt

SEQ ID NO: 15948 - DNA, 15 bp, Homo sapiens
gagaactcacaaagt

SEQ ID NO: 15949 - DNA, 15 bp, Homo sapiens
agagaactcacaaag

SEQ ID NO: 15950 - DNA, 15 bp, Homo sapiens
aagagaactcacaaa

SEQ ID NO: 15951 - DNA, 15 bp, Homo sapiens
taagagaactcacaa

SEQ ID NO: 15952 - DNA, 15 bp, Homo sapiens
ctaagagaactcaca

SEQ ID NO: 15953 - DNA, 15 bp, Homo sapiens
tctaagagaactcac

SEQ ID NO: 15954 - DNA, 15 bp, Homo sapiens
atctaagagaactca

SEQ ID NO: 15955 - DNA, 15 bp, Homo sapiens
aatctaagagaactc

SEQ ID NO: 15956 - DNA, 15 bp, Homo sapiens
aaatctaagagaact

SEQ ID NO: 15957 - DNA, 15 bp, Homo sapiens
taaatctaagagaac

SEQ ID NO: 15958 - DNA, 15 bp, Homo sapiens
gtaaatctaagagaa

SEQ ID NO: 15959 - DNA, 15 bp, Homo sapiens
cgtaaatctaagaga

SEQ ID NO: 15960 - DNA, 15 bp, Homo sapiens
tcgtaaatctaagag

SEQ ID NO: 15961 - DNA, 15 bp, Homo sapiens
gtcgtaaatctaaga

SEQ ID NO: 15962 - DNA, 15 bp, Homo sapiens
ggtcgtaaatctaag

SEQ ID NO: 15963 - DNA, 15 bp, Homo sapiens
tggtcgtaaatctaa

SEQ ID NO: 15964 - DNA, 15 bp, Homo sapiens
atggtcgtaaatcta

SEQ ID NO: 15965 - DNA, 15 bp, Homo sapiens
catggtcgtaaatct

SEQ ID NO: 15966 - DNA, 15 bp, Homo sapiens
gcatggtcgtaaatc

SEQ ID NO: 15967 - DNA, 15 bp, Homo sapiens
ggcatggtcgtaaat

SEQ ID NO: 15968 - DNA, 15 bp, Homo sapiens
tggcatggtcgtaaa

SEQ ID NO: 15969 - DNA, 15 bp, Homo sapiens
ctggcatggtcgtaa

SEQ ID NO: 15970 - DNA, 15 bp, Homo sapiens
tctggcatggtcgta

SEQ ID NO: 15971 - DNA, 15 bp, Homo sapiens
ttctggcatggtcgt

SEQ ID NO: 15972 - DNA, 15 bp, Homo sapiens
tttctggcatggtcg

SEQ ID NO: 15973 - DNA, 15 bp, Homo sapiens
gtttctggcatggtc

SEQ ID NO: 15974 - DNA, 15 bp, Homo sapiens
tgtttctggcatggt

SEQ ID NO: 15975 - DNA, 15 bp, Homo sapiens
ctgtttctggcatgg

SEQ ID NO: 15976 - DNA, 15 bp, Homo sapiens
tctgtttctggcatg

SEQ ID NO: 15977 - DNA, 15 bp, Homo sapiens
ttctgtttctggcat

SEQ ID NO: 15978 - DNA, 15 bp, Homo sapiens
tttctgtttctggca

SEQ ID NO: 15979 - DNA, 15 bp, Homo sapiens
ctttctgtttctggc

SEQ ID NO: 15980 - DNA, 15 bp, Homo sapiens
cctttctgtttctgg

SEQ ID NO: 15981 - DNA, 15 bp, Homo sapiens
tcctttctgtttctg

SEQ ID NO: 15982 - DNA, 15 bp, Homo sapiens
atcctttctgtttct

SEQ ID NO: 15983 - DNA, 15 bp, Homo sapiens
tatcctttctgtttc

SEQ ID NO: 15984 - DNA, 15 bp, Homo sapiens
atatcctttctgttt

SEQ ID NO: 15985 - DNA, 15 bp, Homo sapiens
aatatcctttctgtt

SEQ ID NO: 15986 - DNA, 15 bp, Homo sapiens
aaatatcctttctgt

SEQ ID NO: 15987 - DNA, 15 bp, Homo sapiens
aaaatatcctttctg

SEQ ID NO: 15988 - DNA, 15 bp, Homo sapiens
gaaaatatcctttct

SEQ ID NO: 15989 - DNA, 15 bp, Homo sapiens
tgaaaatatcctttc

SEQ ID NO: 15990 - DNA, 15 bp, Homo sapiens
atgaaaatatccttt

SEQ ID NO: 15991 - DNA, 15 bp, Homo sapiens
gatgaaaatatcctt

SEQ ID NO: 15992 - DNA, 15 bp, Homo sapiens
agatgaaaatatcct

SEQ ID NO: 15993 - DNA, 15 bp, Homo sapiens
gagatgaaaatatcc

SEQ ID NO: 15994 - DNA, 15 bp, Homo sapiens
agagatgaaaatatc

SEQ ID NO: 15995 - DNA, 15 bp, Homo sapiens
aagagatgaaaatat

SEQ ID NO: 15996 - DNA, 15 bp, Homo sapiens
gaagagatgaaaata

SEQ ID NO: 15997 - DNA, 15 bp, Homo sapiens
ggaagagatgaaaat

SEQ ID NO: 15998 - DNA, 15 bp, Homo sapiens
aggaagagatgaaaa

SEQ ID NO: 15999 - DNA, 15 bp, Homo sapiens
aaggaagagatgaaa

SEQ ID NO: 16000 - DNA, 15 bp, Homo sapiens
aaaggaagagatgaa

SEQ ID NO: 16001 - DNA, 15 bp, Homo sapiens
gaaaggaagagatga

SEQ ID NO: 16002 - DNA, 15 bp, Homo sapiens
agaaaggaagagatg

SEQ ID NO: 16003 - DNA, 15 bp, Homo sapiens
cagaaaggaagagat

SEQ ID NO: 16004 - DNA, 15 bp, Homo sapiens
tcagaaaggaagaga

SEQ ID NO: 16005 - DNA, 15 bp, Homo sapiens
atcagaaaggaagag

SEQ ID NO: 16006 - DNA, 15 bp, Homo sapiens
catcagaaaggaaga

SEQ ID NO: 16007 - DNA, 15 bp, Homo sapiens
acatcagaaaggaag

SEQ ID NO: 16008 - DNA, 15 bp, Homo sapiens
aacatcagaaaggaa

SEQ ID NO: 16009 - DNA, 15 bp, Homo sapiens
aaacatcagaaagga

SEQ ID NO: 16010 - DNA, 15 bp, Homo sapiens
taaacatcagaaagg

SEQ ID NO: 16011 - DNA, 15 bp, Homo sapiens
ataaacatcagaaag

SEQ ID NO: 16012 - DNA, 15 bp, Homo sapiens
aataaacatcagaaa

SEQ ID NO: 16013 - DNA, 15 bp, Homo sapiens
gaataaacatcagaa

SEQ ID NO: 16014 - DNA, 15 bp, Homo sapiens
agaataaacatcaga

SEQ ID NO: 16015 - DNA, 15 bp, Homo sapiens
aagaataaacatcag

SEQ ID NO: 16016 - DNA, 15 bp, Homo sapiens
gaagaataaacatca

SEQ ID NO: 16017 - DNA, 15 bp, Homo sapiens
agaagaataaacatc

SEQ ID NO: 16018 - DNA, 15 bp, Homo sapiens
aagaagaataaacat

SEQ ID NO: 16019 - DNA, 15 bp, Homo sapiens
caagaagaataaaca

SEQ ID NO: 16020 - DNA, 15 bp, Homo sapiens
acaagaagaataaac

SEQ ID NO: 16021 - DNA, 15 bp, Homo sapiens
aacaagaagaataaa

SEQ ID NO: 16022 - DNA, 15 bp, Homo sapiens
aaacaagaagaataa

SEQ ID NO: 16023 - DNA, 15 bp, Homo sapiens
gaaacaagaagaata

SEQ ID NO: 16024 - DNA, 15 bp, Homo sapiens
ggaaacaagaagaat

SEQ ID NO: 16025 - DNA, 15 bp, Homo sapiens
aggaaacaagaagaa

SEQ ID NO: 16026 - DNA, 15 bp, Homo sapiens
aaggaaacaagaaga

SEQ ID NO: 16027 - DNA, 15 bp, Homo sapiens
aaaggaaacaagaag

SEQ ID NO: 16028 - DNA, 15 bp, Homo sapiens
aaaaggaaacaagaa

SEQ ID NO: 16029 - DNA, 15 bp, Homo sapiens
aaaaaggaaacaaga

SEQ ID NO: 16030 - DNA, 15 bp, Homo sapiens
aaaaaaggaaacaag

SEQ ID NO: 16031 - DNA, 15 bp, Homo sapiens
aaaaaaaggaaacaa

SEQ ID NO: 16032 - DNA, 15 bp, Homo sapiens
taaaaaaaggaaaca

SEQ ID NO: 16033 - DNA, 15 bp, Homo sapiens
ataaaaaaaggaaac

SEQ ID NO: 16034 - DNA, 15 bp, Homo sapiens
gataaaaaaaggaaa

SEQ ID NO: 16035 - DNA, 15 bp, Homo sapiens
ggataaaaaaaggaa

SEQ ID NO: 16036 - DNA, 15 bp, Homo sapiens
gggataaaaaaagga

SEQ ID NO: 16037 - DNA, 15 bp, Homo sapiens
ggggataaaaaaagg

SEQ ID NO: 16038 - DNA, 15 bp, Homo sapiens
gggggataaaaaaag

SEQ ID NO: 16039 - DNA, 15 bp, Homo sapiens
tgggggataaaaaaa

SEQ ID NO: 16040 - DNA, 15 bp, Homo sapiens
atgggggataaaaaa

SEQ ID NO: 16041 - DNA, 15 bp, Homo sapiens
aatgggggataaaaa

SEQ ID NO: 16042 - DNA, 15 bp, Homo sapiens
taatgggggataaaa

SEQ ID NO: 16043 - DNA, 15 bp, Homo sapiens
ataatgggggataaa

SEQ ID NO: 16044 - DNA, 15 bp, Homo sapiens
tataatgggggataa

SEQ ID NO: 16045 - DNA, 15 bp, Homo sapiens
atataatgggggata

SEQ ID NO: 16046 - DNA, 15 bp, Homo sapiens
aatataatgggggat

SEQ ID NO: 16047 - DNA, 15 bp, Homo sapiens
gaatataatggggga

SEQ ID NO: 16048 - DNA, 15 bp, Homo sapiens
agaatataatggggg

SEQ ID NO: 16049 - DNA, 15 bp, Homo sapiens
gagaatataatgggg

SEQ ID NO: 16050 - DNA, 15 bp, Homo sapiens
tgagaatataatggg

SEQ ID NO: 16051 - DNA, 15 bp, Homo sapiens
ttgagaatataatgg

SEQ ID NO: 16052 - DNA, 15 bp, Homo sapiens
cttgagaatataatg

SEQ ID NO: 16053 - DNA, 15 bp, Homo sapiens
tcttgagaatataat

SEQ ID NO: 16054 - DNA, 15 bp, Homo sapiens
ttcttgagaatataa

SEQ ID NO: 16055 - DNA, 15 bp, Homo sapiens
attcttgagaatata

SEQ ID NO: 16056 - DNA, 15 bp, Homo sapiens
gattcttgagaatat

SEQ ID NO: 16057 - DNA, 15 bp, Homo sapiens
agattcttgagaata

SEQ ID NO: 16058 - DNA, 15 bp, Homo sapiens
gagattcttgagaat

SEQ ID NO: 16059 - DNA, 15 bp, Homo sapiens
agagattcttgagaa

SEQ ID NO: 16060 - DNA, 15 bp, Homo sapiens
gagagattcttgaga

SEQ ID NO: 16061 - DNA, 15 bp, Homo sapiens
tgagagattcttgag

SEQ ID NO: 16062 - DNA, 15 bp, Homo sapiens
ttgagagattcttga

SEQ ID NO: 16063 - DNA, 15 bp, Homo sapiens
attgagagattcttg

SEQ ID NO: 16064 - DNA, 15 bp, Homo sapiens
tattgagagattctt

SEQ ID NO: 16065 - DNA, 15 bp, Homo sapiens
gtattgagagattct

SEQ ID NO: 16066 - DNA, 15 bp, Homo sapiens
agtattgagagattc

SEQ ID NO: 16067 - DNA, 15 bp, Homo sapiens
tagtattgagagatt

SEQ ID NO: 16068 - DNA, 15 bp, Homo sapiens
ttagtattgagagat

SEQ ID NO: 16069 - DNA, 15 bp, Homo sapiens
cttagtattgagaga

SEQ ID NO: 16070 - DNA, 15 bp, Homo sapiens
tcttagtattgagag

SEQ ID NO: 16071 - DNA, 15 bp, Homo sapiens
ttcttagtattgaga

SEQ ID NO: 16072 - DNA, 15 bp, Homo sapiens
tttcttagtattgag

SEQ ID NO: 16073 - DNA, 15 bp, Homo sapiens
atttcttagtattga

SEQ ID NO: 16074 - DNA, 15 bp, Homo sapiens
tatttcttagtattg

SEQ ID NO: 16075 - DNA, 15 bp, Homo sapiens
ctatttcttagtatt

SEQ ID NO: 16076 - DNA, 15 bp, Homo sapiens
gctatttcttagtat

SEQ ID NO: 16077 - DNA, 15 bp, Homo sapiens
cgctatttcttagta

SEQ ID NO: 16078 - DNA, 15 bp, Homo sapiens
tcgctatttcttagt

SEQ ID NO: 16079 - DNA, 15 bp, Homo sapiens
gtcgctatttcttag

SEQ ID NO: 16080 - DNA, 15 bp, Homo sapiens
agtcgctatttctta

SEQ ID NO: 16081 - DNA, 15 bp, Homo sapiens
aagtcgctatttctt

SEQ ID NO: 16082 - DNA, 15 bp, Homo sapiens
gaagtcgctatttct

SEQ ID NO: 16083 - DNA, 15 bp, Homo sapiens
tgaagtcgctatttc

SEQ ID NO: 16084 - DNA, 15 bp, Homo sapiens
atgaagtcgctattt

SEQ ID NO: 16085 - DNA, 15 bp, Homo sapiens
aatgaagtcgctatt

SEQ ID NO: 16086 - DNA, 15 bp, Homo sapiens
aaatgaagtcgctat

SEQ ID NO: 16087 - DNA, 15 bp, Homo sapiens
aaaatgaagtcgcta

SEQ ID NO: 16088 - DNA, 15 bp, Homo sapiens
aaaaatgaagtcgct

SEQ ID NO: 16089 - DNA, 15 bp, Homo sapiens
gaaaaatgaagtcgc

SEQ ID NO: 16090 - DNA, 15 bp, Homo sapiens
tgaaaaatgaagtcg

SEQ ID NO: 16091 - DNA, 15 bp, Homo sapiens
ctgaaaaatgaagtc

SEQ ID NO: 16092 - DNA, 15 bp, Homo sapiens
gctgaaaaatgaagt

SEQ ID NO: 16093 - DNA, 15 bp, Homo sapiens
cgctgaaaaatgaag

SEQ ID NO: 16094 - DNA, 15 bp, Homo sapiens
gcgctgaaaaatgaa

SEQ ID NO: 16095 - DNA, 15 bp, Homo sapiens
cgcgctgaaaaatga

SEQ ID NO: 16096 - DNA, 15 bp, Homo sapiens
ccgcgctgaaaaatg

SEQ ID NO: 16097 - DNA, 15 bp, Homo sapiens
tccgcgctgaaaaat

SEQ ID NO: 16098 - DNA, 15 bp, Homo sapiens
ctccgcgctgaaaaa

SEQ ID NO: 16099 - DNA, 15 bp, Homo sapiens
actccgcgctgaaaa

SEQ ID NO: 16100 - DNA, 15 bp, Homo sapiens
cactccgcgctgaaa

SEQ ID NO: 16101 - DNA, 15 bp, Homo sapiens
gcactccgcgctgaa

SEQ ID NO: 16102 - DNA, 15 bp, Homo sapiens
tgcactccgcgctga

SEQ ID NO: 16103 - DNA, 15 bp, Homo sapiens
atgcactccgcgctg

SEQ ID NO: 16104 - DNA, 15 bp, Homo sapiens
aatgcactccgcgct

SEQ ID NO: 16105 - DNA, 15 bp, Homo sapiens
taatgcactccgcgc

SEQ ID NO: 16106 - DNA, 15 bp, Homo sapiens
ataatgcactccgcg

SEQ ID NO: 16107 - DNA, 15 bp, Homo sapiens
aataatgcactccgc

SEQ ID NO: 16108 - DNA, 15 bp, Homo sapiens
aaataatgcactccg

SEQ ID NO: 16109 - DNA, 15 bp, Homo sapiens
aaaataatgcactcc

SEQ ID NO: 16110 - DNA, 15 bp, Homo sapiens
caaaataatgcactc

SEQ ID NO: 16111 - DNA, 15 bp, Homo sapiens
ccaaaataatgcact

SEQ ID NO: 16112 - DNA, 15 bp, Homo sapiens
gccaaaataatgcac

SEQ ID NO: 16113 - DNA, 15 bp, Homo sapiens
agccaaaataatgca

SEQ ID NO: 16114 - DNA, 15 bp, Homo sapiens
tagccaaaataatgc

SEQ ID NO: 16115 - DNA, 15 bp, Homo sapiens
gtagccaaaataatg

SEQ ID NO: 16116 - DNA, 15 bp, Homo sapiens
ggtagccaaaataat

SEQ ID NO: 16117 - DNA, 15 bp, Homo sapiens
tggtagccaaaataa

SEQ ID NO: 16118 - DNA, 15 bp, Homo sapiens
atggtagccaaaata

SEQ ID NO: 16119 - DNA, 15 bp, Homo sapiens
catggtagccaaaat

SEQ ID NO: 16120 - DNA, 15 bp, Homo sapiens
tcatggtagccaaaa

SEQ ID NO: 16121 - DNA, 15 bp, Homo sapiens
atcatggtagccaaa

SEQ ID NO: 16122 - DNA, 15 bp, Homo sapiens
aatcatggtagccaa

SEQ ID NO: 16123 - DNA, 15 bp, Homo sapiens
gaatcatggtagcca

SEQ ID NO: 16124 - DNA, 15 bp, Homo sapiens
tgaatcatggtagcc

SEQ ID NO: 16125 - DNA, 15 bp, Homo sapiens
ctgaatcatggtagc

SEQ ID NO: 16126 - DNA, 15 bp, Homo sapiens
tctgaatcatggtag

SEQ ID NO: 16127 - DNA, 15 bp, Homo sapiens
ttctgaatcatggta

SEQ ID NO: 16128 - DNA, 15 bp, Homo sapiens
cttctgaatcatggt

SEQ ID NO: 16129 - DNA, 15 bp, Homo sapiens
gcttctgaatcatgg

SEQ ID NO: 16130 - DNA, 15 bp, Homo sapiens
ggcttctgaatcatg

SEQ ID NO: 16131 - DNA, 15 bp, Homo sapiens
aggcttctgaatcat

SEQ ID NO: 16132 - DNA, 15 bp, Homo sapiens
gaggcttctgaatca

SEQ ID NO: 16133 - DNA, 15 bp, Homo sapiens
agaggcttctgaatc

SEQ ID NO: 16134 - DNA, 15 bp, Homo sapiens
aagaggcttctgaat

SEQ ID NO: 16135 - DNA, 15 bp, Homo sapiens
caagaggcttctgaa

SEQ ID NO: 16136 - DNA, 15 bp, Homo sapiens
gcaagaggcttctga

SEQ ID NO: 16137 - DNA, 15 bp, Homo sapiens
ggcaagaggcttctg

SEQ ID NO: 16138 - DNA, 15 bp, Homo sapiens
aggcaagaggcttct

SEQ ID NO: 16139 - DNA, 15 bp, Homo sapiens
taggcaagaggcttc

SEQ ID NO: 16140 - DNA, 15 bp, Homo sapiens
ttaggcaagaggctt

SEQ ID NO: 16141 - DNA, 15 bp, Homo sapiens
cttaggcaagaggct

SEQ ID NO: 16142 - DNA, 15 bp, Homo sapiens
ccttaggcaagaggc

SEQ ID NO: 16143 - DNA, 15 bp, Homo sapiens
gccttaggcaagagg

SEQ ID NO: 16144 - DNA, 15 bp, Homo sapiens
ggccttaggcaagag

SEQ ID NO: 16145 - DNA, 15 bp, Homo sapiens
gggccttaggcaaga

SEQ ID NO: 16146 - DNA, 15 bp, Homo sapiens
tgggccttaggcaag

SEQ ID NO: 16147 - DNA, 15 bp, Homo sapiens
ttgggccttaggcaa

SEQ ID NO: 16148 - DNA, 15 bp, Homo sapiens
attgggccttaggca

SEQ ID NO: 16149 - DNA, 15 bp, Homo sapiens
aattgggccttaggc

SEQ ID NO: 16150 - DNA, 15 bp, Homo sapiens
aaattgggccttagg

SEQ ID NO: 16151 - DNA, 15 bp, Homo sapiens
aaaattgggccttag

SEQ ID NO: 16152 - DNA, 15 bp, Homo sapiens
taaaattgggcctta

SEQ ID NO: 16153 - DNA, 15 bp, Homo sapiens
ataaaattgggcctt

SEQ ID NO: 16154 - DNA, 15 bp, Homo sapiens
aataaaattgggcct

SEQ ID NO: 16155 - DNA, 15 bp, Homo sapiens
gaataaaattgggcc

SEQ ID NO: 16156 - DNA, 15 bp, Homo sapiens
agaataaaattgggc

SEQ ID NO: 16157 - DNA, 15 bp, Homo sapiens
cagaataaaattggg

SEQ ID NO: 16158 - DNA, 15 bp, Homo sapiens
gcagaataaaattgg

SEQ ID NO: 16159 - DNA, 15 bp, Homo sapiens
agcagaataaaattg

SEQ ID NO: 16160 - DNA, 15 bp, Homo sapiens
tagcagaataaaatt

SEQ ID NO: 16161 - DNA, 15 bp, Homo sapiens
ctagcagaataaaat

SEQ ID NO: 16162 - DNA, 15 bp, Homo sapiens
actagcagaataaaa

SEQ ID NO: 16163 - DNA, 15 bp, Homo sapiens
aactagcagaataaa

SEQ ID NO: 16164 - DNA, 15 bp, Homo sapiens
aaactagcagaataa

SEQ ID NO: 16165 - DNA, 15 bp, Homo sapiens
aaaactagcagaata

SEQ ID NO: 16166 - DNA, 15 bp, Homo sapiens
gaaaactagcagaat

SEQ ID NO: 16167 - DNA, 15 bp, Homo sapiens
agaaaactagcagaa

SEQ ID NO: 16168 - DNA, 15 bp, Homo sapiens
gagaaaactagcaga

SEQ ID NO: 16169 - DNA, 15 bp, Homo sapiens
agagaaaactagcag

SEQ ID NO: 16170 - DNA, 15 bp, Homo sapiens
cagagaaaactagca

SEQ ID NO: 16171 - DNA, 15 bp, Homo sapiens
acagagaaaactagc

SEQ ID NO: 16172 - DNA, 15 bp, Homo sapiens
aacagagaaaactag

SEQ ID NO: 16173 - DNA, 15 bp, Homo sapiens
gaacagagaaaacta

SEQ ID NO: 16174 - DNA, 15 bp, Homo sapiens
agaacagagaaaact

SEQ ID NO: 16175 - DNA, 15 bp, Homo sapiens
aagaacagagaaaac

SEQ ID NO: 16176 - DNA, 15 bp, Homo sapiens
aaagaacagagaaaa

SEQ ID NO: 16177 - DNA, 15 bp, Homo sapiens
caaagaacagagaaa

SEQ ID NO: 16178 - DNA, 15 bp, Homo sapiens
acaaagaacagagaa

SEQ ID NO: 16179 - DNA, 15 bp, Homo sapiens
tacaaagaacagaga

SEQ ID NO: 16180 - DNA, 15 bp, Homo sapiens
gtacaaagaacagag

SEQ ID NO: 16181 - DNA, 15 bp, Homo sapiens
tgtacaaagaacaga

SEQ ID NO: 16182 - DNA, 15 bp, Homo sapiens
atgtacaaagaacag

SEQ ID NO: 16183 - DNA, 15 bp, Homo sapiens
catgtacaaagaaca

SEQ ID NO: 16184 - DNA, 15 bp, Homo sapiens
ccatgtacaaagaac

SEQ ID NO: 16185 - DNA, 15 bp, Homo sapiens
gccatgtacaaagaa

SEQ ID NO: 16186 - DNA, 15 bp, Homo sapiens
ggccatgtacaaaga

SEQ ID NO: 16187 - DNA, 15 bp, Homo sapiens
gggccatgtacaaag

SEQ ID NO: 16188 - DNA, 15 bp, Homo sapiens
agggccatgtacaaa

SEQ ID NO: 16189 - DNA, 15 bp, Homo sapiens
aagggccatgtacaa

SEQ ID NO: 16190 - DNA, 15 bp, Homo sapiens
caagggccatgtaca

SEQ ID NO: 16191 - DNA, 15 bp, Homo sapiens
gcaagggccatgtac

SEQ ID NO: 16192 - DNA, 15 bp, Homo sapiens
cgcaagggccatgta

SEQ ID NO: 16193 - DNA, 15 bp, Homo sapiens
gcgcaagggccatgt

SEQ ID NO: 16194 - DNA, 15 bp, Homo sapiens
agcgcaagggccatg

SEQ ID NO: 16195 - DNA, 15 bp, Homo sapiens
cagcgcaagggccat

SEQ ID NO: 16196 - DNA, 15 bp, Homo sapiens
gcagcgcaagggcca

SEQ ID NO: 16197 - DNA, 15 bp, Homo sapiens
ggcagcgcaagggcc

SEQ ID NO: 16198 - DNA, 15 bp, Homo sapiens
gggcagcgcaagggc

SEQ ID NO: 16199 - DNA, 15 bp, Homo sapiens
agggcagcgcaaggg

SEQ ID NO: 16200 - DNA, 15 bp, Homo sapiens
tagggcagcgcaagg

SEQ ID NO: 16201 - DNA, 15 bp, Homo sapiens
ttagggcagcgcaag

SEQ ID NO: 16202 - DNA, 15 bp, Homo sapiens
gttagggcagcgcaa

SEQ ID NO: 16203 - DNA, 15 bp, Homo sapiens
ggttagggcagcgca

SEQ ID NO: 16204 - DNA, 15 bp, Homo sapiens
aggttagggcagcgc

SEQ ID NO: 16205 - DNA, 15 bp, Homo sapiens
aaggttagggcagcg

SEQ ID NO: 16206 - DNA, 15 bp, Homo sapiens
caaggttagggcagc

SEQ ID NO: 16207 - DNA, 15 bp, Homo sapiens
tcaaggttagggcag

SEQ ID NO: 16208 - DNA, 15 bp, Homo sapiens
ttcaaggttagggca

SEQ ID NO: 16209 - DNA, 15 bp, Homo sapiens
attcaaggttagggc

SEQ ID NO: 16210 - DNA, 15 bp, Homo sapiens
aattcaaggttaggg

SEQ ID NO: 16211 - DNA, 15 bp, Homo sapiens
taattcaaggttagg

SEQ ID NO: 16212 - DNA, 15 bp, Homo sapiens
ttaattcaaggttag

SEQ ID NO: 16213 - DNA, 15 bp, Homo sapiens
gttaattcaaggtta

SEQ ID NO: 16214 - DNA, 15 bp, Homo sapiens
cgttaattcaaggtt

SEQ ID NO: 16215 - DNA, 15 bp, Homo sapiens
acgttaattcaaggt

SEQ ID NO: 16216 - DNA, 15 bp, Homo sapiens
cacgttaattcaagg

SEQ ID NO: 16217 - DNA, 15 bp, Homo sapiens
ccacgttaattcaag

SEQ ID NO: 16218 - DNA, 15 bp, Homo sapiens
gccacgttaattcaa

SEQ ID NO: 16219 - DNA, 15 bp, Homo sapiens
agccacgttaattca

SEQ ID NO: 16220 - DNA, 15 bp, Homo sapiens
tagccacgttaattc

SEQ ID NO: 16221 - DNA, 15 bp, Homo sapiens
ttagccacgttaatt

SEQ ID NO: 16222 - DNA, 15 bp, Homo sapiens
tttagccacgttaat

SEQ ID NO: 16223 - DNA, 15 bp, Homo sapiens
atttagccacgttaa

SEQ ID NO: 16224 - DNA, 15 bp, Homo sapiens
gatttagccacgtta

SEQ ID NO: 16225 - DNA, 15 bp, Homo sapiens
agatttagccacgtt

SEQ ID NO: 16226 - DNA, 15 bp, Homo sapiens
gagatttagccacgt

SEQ ID NO: 16227 - DNA, 15 bp, Homo sapiens
tgagatttagccacg

SEQ ID NO: 16228 - DNA, 15 bp, Homo sapiens
ttgagatttagccac

SEQ ID NO: 16229 - DNA, 15 bp, Homo sapiens
cttgagatttagcca

SEQ ID NO: 16230 - DNA, 15 bp, Homo sapiens
tcttgagatttagcc

SEQ ID NO: 16231 - DNA, 15 bp, Homo sapiens
ttcttgagatttagc

SEQ ID NO: 16232 - DNA, 15 bp, Homo sapiens
attcttgagatttag

SEQ ID NO: 16233 - DNA, 15 bp, Homo sapiens
aattcttgagattta

SEQ ID NO: 16234 - DNA, 15 bp, Homo sapiens
aaattcttgagattt

SEQ ID NO: 16235 - DNA, 15 bp, Homo sapiens
taaattcttgagatt

SEQ ID NO: 16236 - DNA, 15 bp, Homo sapiens
ttaaattcttgagat

SEQ ID NO: 16237 - DNA, 15 bp, Homo sapiens
cttaaattcttgaga

SEQ ID NO: 16238 - DNA, 15 bp, Homo sapiens
tcttaaattcttgag

SEQ ID NO: 16239 - DNA, 15 bp, Homo sapiens
ctcttaaattcttga

SEQ ID NO: 16240 - DNA, 15 bp, Homo sapiens
gctcttaaattcttg

SEQ ID NO: 16241 - DNA, 15 bp, Homo sapiens
tgctcttaaattctt

SEQ ID NO: 16242 - DNA, 15 bp, Homo sapiens
gtgctcttaaattct

SEQ ID NO: 16243 - DNA, 15 bp, Homo sapiens
ggtgctcttaaattc

SEQ ID NO: 16244 - DNA, 15 bp, Homo sapiens
cggtgctcttaaatt

SEQ ID NO: 16245 - DNA, 15 bp, Homo sapiens
acggtgctcttaaat

SEQ ID NO: 16246 - DNA, 15 bp, Homo sapiens
cacggtgctcttaaa

SEQ ID NO: 16247 - DNA, 15 bp, Homo sapiens
tcacggtgctcttaa

SEQ ID NO: 16248 - DNA, 15 bp, Homo sapiens
gtcacggtgctctta

SEQ ID NO: 16249 - DNA, 15 bp, Homo sapiens
agtcacggtgctctt

SEQ ID NO: 16250 - DNA, 15 bp, Homo sapiens
cagtcacggtgctct

SEQ ID NO: 16251 - DNA, 15 bp, Homo sapiens
acagtcacggtgctc

SEQ ID NO: 16252 - DNA, 15 bp, Homo sapiens
cacagtcacggtgct

SEQ ID NO: 16253 - DNA, 15 bp, Homo sapiens
acacagtcacggtgc

SEQ ID NO: 16254 - DNA, 15 bp, Homo sapiens
gacacagtcacggtg

SEQ ID NO: 16255 - DNA, 15 bp, Homo sapiens
ggacacagtcacggt

SEQ ID NO: 16256 - DNA, 15 bp, Homo sapiens
aggacacagtcacgg

SEQ ID NO: 16257 - DNA, 15 bp, Homo sapiens
gaggacacagtcacg

SEQ ID NO: 16258 - DNA, 15 bp, Homo sapiens
tgaggacacagtcac

SEQ ID NO: 16259 - DNA, 15 bp, Homo sapiens
ctgaggacacagtca

SEQ ID NO: 16260 - DNA, 15 bp, Homo sapiens
cctgaggacacagtc

SEQ ID NO: 16261 - DNA, 15 bp, Homo sapiens
gcctgaggacacagt

SEQ ID NO: 16262 - DNA, 15 bp, Homo sapiens
agcctgaggacacag

SEQ ID NO: 16263 - DNA, 15 bp, Homo sapiens
tagcctgaggacaca

SEQ ID NO: 16264 - DNA, 15 bp, Homo sapiens
ctagcctgaggacac

SEQ ID NO: 16265 - DNA, 15 bp, Homo sapiens
cctagcctgaggaca

SEQ ID NO: 16266 - DNA, 15 bp, Homo sapiens
ccctagcctgaggac

SEQ ID NO: 16267 - DNA, 15 bp, Homo sapiens
tccctagcctgagga

SEQ ID NO: 16268 - DNA, 15 bp, Homo sapiens
ctccctagcctgagg

SEQ ID NO: 16269 - DNA, 15 bp, Homo sapiens
cctccctagcctgag

SEQ ID NO: 16270 - DNA, 15 bp, Homo sapiens
ccctccctagcctga

SEQ ID NO: 16271 - DNA, 15 bp, Homo sapiens
tccctccctagcctg

SEQ ID NO: 16272 - DNA, 15 bp, Homo sapiens
ttccctccctagcct

SEQ ID NO: 16273 - DNA, 15 bp, Homo sapiens
tttccctccctagcc

SEQ ID NO: 16274 - DNA, 15 bp, Homo sapiens
atttccctccctagc

SEQ ID NO: 16275 - DNA, 15 bp, Homo sapiens
catttccctccctag

SEQ ID NO: 16276 - DNA, 15 bp, Homo sapiens
ccatttccctcccta

SEQ ID NO: 16277 - DNA, 15 bp, Homo sapiens
cccatttccctccct

SEQ ID NO: 16278 - DNA, 15 bp, Homo sapiens
acccatttccctccc

SEQ ID NO: 16279 - DNA, 15 bp, Homo sapiens
aacccatttccctcc

SEQ ID NO: 16280 - DNA, 15 bp, Homo sapiens
gaacccatttccctc

SEQ ID NO: 16281 - DNA, 15 bp, Homo sapiens
tgaacccatttccct

SEQ ID NO: 16282 - DNA, 15 bp, Homo sapiens
gtgaacccatttccc

SEQ ID NO: 16283 - DNA, 15 bp, Homo sapiens
tgtgaacccatttcc

SEQ ID NO: 16284 - DNA, 15 bp, Homo sapiens
ctgtgaacccatttc

SEQ ID NO: 16285 - DNA, 15 bp, Homo sapiens
tctgtgaacccattt

SEQ ID NO: 16286 - DNA, 15 bp, Homo sapiens
ctctgtgaacccatt

SEQ ID NO: 16287 - DNA, 15 bp, Homo sapiens
actctgtgaacccat

SEQ ID NO: 16288 - DNA, 15 bp, Homo sapiens
cactctgtgaaccca

SEQ ID NO: 16289 - DNA, 15 bp, Homo sapiens
tcactctgtgaaccc

SEQ ID NO: 16290 - DNA, 15 bp, Homo sapiens
gtcactctgtgaacc

SEQ ID NO: 16291 - DNA, 15 bp, Homo sapiens
agtcactctgtgaac

SEQ ID NO: 16292 - DNA, 15 bp, Homo sapiens
cagtcactctgtgaa

SEQ ID NO: 16293 - DNA, 15 bp, Homo sapiens
ccagtcactctgtga

SEQ ID NO: 16294 - DNA, 15 bp, Homo sapiens
tccagtcactctgtg

SEQ ID NO: 16295 - DNA, 15 bp, Homo sapiens
atccagtcactctgt

SEQ ID NO: 16296 - DNA, 15 bp, Homo sapiens
aatccagtcactctg

SEQ ID NO: 16297 - DNA, 15 bp, Homo sapiens
caatccagtcactct

SEQ ID NO: 16298 - DNA, 15 bp, Homo sapiens
acaatccagtcactc

SEQ ID NO: 16299 - DNA, 15 bp, Homo sapiens
cacaatccagtcact

SEQ ID NO: 16300 - DNA, 15 bp, Homo sapiens
ccacaatccagtcac

SEQ ID NO: 16301 - DNA, 15 bp, Homo sapiens
accacaatccagtca

SEQ ID NO: 16302 - DNA, 15 bp, Homo sapiens
gaccacaatccagtc

SEQ ID NO: 16303 - DNA, 15 bp, Homo sapiens
agaccacaatccagt

SEQ ID NO: 16304 - DNA, 15 bp, Homo sapiens
tagaccacaatccag

SEQ ID NO: 16305 - DNA, 15 bp, Homo sapiens
atagaccacaatcca

SEQ ID NO: 16306 - DNA, 15 bp, Homo sapiens
catagaccacaatcc

SEQ ID NO: 16307 - DNA, 15 bp, Homo sapiens
tcatagaccacaatc

SEQ ID NO: 16308 - DNA, 15 bp, Homo sapiens
ttcatagaccacaat

SEQ ID NO: 16309 - DNA, 15 bp, Homo sapiens
gttcatagaccacaa

SEQ ID NO: 16310 - DNA, 15 bp, Homo sapiens
agttcatagaccaca

SEQ ID NO: 16311 - DNA, 15 bp, Homo sapiens
aagttcatagaccac

SEQ ID NO: 16312 - DNA, 15 bp, Homo sapiens
gaagttcatagacca

SEQ ID NO: 16313 - DNA, 15 bp, Homo sapiens
cgaagttcatagacc

SEQ ID NO: 16314 - DNA, 15 bp, Homo sapiens
ccgaagttcatagac

SEQ ID NO: 16315 - DNA, 15 bp, Homo sapiens
gccgaagttcataga

SEQ ID NO: 16316 - DNA, 15 bp, Homo sapiens
tgccgaagttcatag

SEQ ID NO: 16317 - DNA, 15 bp, Homo sapiens
ctgccgaagttcata

SEQ ID NO: 16318 - DNA, 15 bp, Homo sapiens
gctgccgaagttcat

SEQ ID NO: 16319 - DNA, 15 bp, Homo sapiens
ggctgccgaagttca

SEQ ID NO: 16320 - DNA, 15 bp, Homo sapiens
tggctgccgaagttc

SEQ ID NO: 16321 - DNA, 15 bp, Homo sapiens
ctggctgccgaagtt

SEQ ID NO: 16322 - DNA, 15 bp, Homo sapiens
gctggctgccgaagt

SEQ ID NO: 16323 - DNA, 15 bp, Homo sapiens
tgctggctgccgaag

SEQ ID NO: 16324 - DNA, 15 bp, Homo sapiens
ctgctggctgccgaa

SEQ ID NO: 16325 - DNA, 15 bp, Homo sapiens
gctgctggctgccga

SEQ ID NO: 16326 - DNA, 15 bp, Homo sapiens
tgctgctggctgccg

SEQ ID NO: 16327 - DNA, 15 bp, Homo sapiens
ttgctgctggctgcc

SEQ ID NO: 16328 - DNA, 15 bp, Homo sapiens
tttgctgctggctgc

SEQ ID NO: 16329 - DNA, 15 bp, Homo sapiens
ttttgctgctggctg

SEQ ID NO: 16330 - DNA, 15 bp, Homo sapiens
cttttgctgctggct

SEQ ID NO: 16331 - DNA, 15 bp, Homo sapiens
acttttgctgctggc

SEQ ID NO: 16332 - DNA, 15 bp, Homo sapiens
gacttttgctgctgg

SEQ ID NO: 16333 - DNA, 15 bp, Homo sapiens
tgacttttgctgctg

SEQ ID NO: 16334 - DNA, 15 bp, Homo sapiens
ctgacttttgctgct

SEQ ID NO: 16335 - DNA, 15 bp, Homo sapiens
cctgacttttgctgc

SEQ ID NO: 16336 - DNA, 15 bp, Homo sapiens
gcctgacttttgctg

SEQ ID NO: 16337 - DNA, 15 bp, Homo sapiens
tgcctgacttttgct

SEQ ID NO: 16338 - DNA, 15 bp, Homo sapiens
atgcctgacttttgc

SEQ ID NO: 16339 - DNA, 15 bp, Homo sapiens
catgcctgacttttg

SEQ ID NO: 16340 - DNA, 15 bp, Homo sapiens
tcatgcctgactttt

SEQ ID NO: 16341 - DNA, 15 bp, Homo sapiens
ttcatgcctgacttt

SEQ ID NO: 16342 - DNA, 15 bp, Homo sapiens
attcatgcctgactt

SEQ ID NO: 16343 - DNA, 15 bp, Homo sapiens
tattcatgcctgact

SEQ ID NO: 16344 - DNA, 15 bp, Homo sapiens
ttattcatgcctgac

SEQ ID NO: 16345 - DNA, 15 bp, Homo sapiens
attattcatgcctga

SEQ ID NO: 16346 - DNA, 15 bp, Homo sapiens
gattattcatgcctg

SEQ ID NO: 16347 - DNA, 15 bp, Homo sapiens
tgattattcatgcct

SEQ ID NO: 16348 - DNA, 15 bp, Homo sapiens
ttgattattcatgcc

SEQ ID NO: 16349 - DNA, 15 bp, Homo sapiens
cttgattattcatgc

SEQ ID NO: 16350 - DNA, 15 bp, Homo sapiens
acttgattattcatg

SEQ ID NO: 16351 - DNA, 15 bp, Homo sapiens
cacttgattattcat

SEQ ID NO: 16352 - DNA, 15 bp, Homo sapiens
ccacttgattattca

SEQ ID NO: 16353 - DNA, 15 bp, Homo sapiens
tccacttgattattc

SEQ ID NO: 16354 - DNA, 15 bp, Homo sapiens
gtccacttgattatt

SEQ ID NO: 16355 - DNA, 15 bp, Homo sapiens
tgtccacttgattat

SEQ ID NO: 16356 - DNA, 15 bp, Homo sapiens
ctgtccacttgatta

SEQ ID NO: 16357 - DNA, 15 bp, Homo sapiens
actgtccacttgatt

SEQ ID NO: 16358 - DNA, 15 bp, Homo sapiens
cactgtccacttgat

SEQ ID NO: 16359 - DNA, 15 bp, Homo sapiens
tcactgtccacttga

SEQ ID NO: 16360 - DNA, 15 bp, Homo sapiens
ttcactgtccacttg

SEQ ID NO: 16361 - DNA, 15 bp, Homo sapiens
gttcactgtccactt

SEQ ID NO: 16362 - DNA, 15 bp, Homo sapiens
tgttcactgtccact

SEQ ID NO: 16363 - DNA, 15 bp, Homo sapiens
atgttcactgtccac

SEQ ID NO: 16364 - DNA, 15 bp, Homo sapiens
gatgttcactgtcca

SEQ ID NO: 16365 - DNA, 15 bp, Homo sapiens
agatgttcactgtcc

SEQ ID NO: 16366 - DNA, 15 bp, Homo sapiens
cagatgttcactgtc

SEQ ID NO: 16367 - DNA, 15 bp, Homo sapiens
acagatgttcactgt

SEQ ID NO: 16368 - DNA, 15 bp, Homo sapiens
tacagatgttcactg

SEQ ID NO: 16369 - DNA, 15 bp, Homo sapiens
ctacagatgttcact

SEQ ID NO: 16370 - DNA, 15 bp, Homo sapiens
actacagatgttcac

SEQ ID NO: 16371 - DNA, 15 bp, Homo sapiens
cactacagatgttca

SEQ ID NO: 16372 - DNA, 15 bp, Homo sapiens
acactacagatgttc

SEQ ID NO: 16373 - DNA, 15 bp, Homo sapiens
cacactacagatgtt

SEQ ID NO: 16374 - DNA, 15 bp, Homo sapiens
ccacactacagatgt

SEQ ID NO: 16375 - DNA, 15 bp, Homo sapiens
cccacactacagatg

SEQ ID NO: 16376 - DNA, 15 bp, Homo sapiens
tcccacactacagat

SEQ ID NO: 16377 - DNA, 15 bp, Homo sapiens
ctcccacactacaga

SEQ ID NO: 16378 - DNA, 15 bp, Homo sapiens
tctcccacactacag

SEQ ID NO: 16379 - DNA, 15 bp, Homo sapiens
atctcccacactaca

SEQ ID NO: 16380 - DNA, 15 bp, Homo sapiens
catctcccacactac

SEQ ID NO: 16381 - DNA, 15 bp, Homo sapiens
acatctcccacacta

SEQ ID NO: 16382 - DNA, 15 bp, Homo sapiens
aacatctcccacact

SEQ ID NO: 16383 - DNA, 15 bp, Homo sapiens
caacatctcccacac

SEQ ID NO: 16384 - DNA, 15 bp, Homo sapiens
ccaacatctcccaca

SEQ ID NO: 16385 - DNA, 15 bp, Homo sapiens
gccaacatctcccac

SEQ ID NO: 16386 - DNA, 15 bp, Homo sapiens
tgccaacatctccca

SEQ ID NO: 16387 - DNA, 15 bp, Homo sapiens
atgccaacatctccc

SEQ ID NO: 16388 - DNA, 15 bp, Homo sapiens
tatgccaacatctcc

SEQ ID NO: 16389 - DNA, 15 bp, Homo sapiens
ttatgccaacatctc

SEQ ID NO: 16390 - DNA, 15 bp, Homo sapiens
gttatgccaacatct

SEQ ID NO: 16391 - DNA, 15 bp, Homo sapiens
agttatgccaacatc

SEQ ID NO: 16392 - DNA, 15 bp, Homo sapiens
tagttatgccaacat

SEQ ID NO: 16393 - DNA, 15 bp, Homo sapiens
atagttatgccaaca

SEQ ID NO: 16394 - DNA, 15 bp, Homo sapiens
catagttatgccaac

SEQ ID NO: 16395 - DNA, 15 bp, Homo sapiens
tcatagttatgccaa

SEQ ID NO: 16396 - DNA, 15 bp, Homo sapiens
ttcatagttatgcca

SEQ ID NO: 16397 - DNA, 15 bp, Homo sapiens
attcatagttatgcc

SEQ ID NO: 16398 - DNA, 15 bp, Homo sapiens
cattcatagttatgc

SEQ ID NO: 16399 - DNA, 15 bp, Homo sapiens
tcattcatagttatg

SEQ ID NO: 16400 - DNA, 15 bp, Homo sapiens
atcattcatagttat

SEQ ID NO: 16401 - DNA, 15 bp, Homo sapiens
catcattcatagtta

SEQ ID NO: 16402 - DNA, 15 bp, Homo sapiens
tcatcattcatagtt

SEQ ID NO: 16403 - DNA, 15 bp, Homo sapiens
atcatcattcatagt

SEQ ID NO: 16404 - DNA, 15 bp, Homo sapiens
aatcatcattcatag

SEQ ID NO: 16405 - DNA, 15 bp, Homo sapiens
gaatcatcattcata

SEQ ID NO: 16406 - DNA, 15 bp, Homo sapiens
tgaatcatcattcat

SEQ ID NO: 16407 - DNA, 15 bp, Homo sapiens
ttgaatcatcattca

SEQ ID NO: 16408 - DNA, 15 bp, Homo sapiens
cttgaatcatcattc

SEQ ID NO: 16409 - DNA, 15 bp, Homo sapiens
tcttgaatcatcatt

SEQ ID NO: 16410 - DNA, 15 bp, Homo sapiens
ctcttgaatcatcat

SEQ ID NO: 16411 - DNA, 15 bp, Homo sapiens
actcttgaatcatca

SEQ ID NO: 16412 - DNA, 15 bp, Homo sapiens
cactcttgaatcatc

SEQ ID NO: 16413 - DNA, 15 bp, Homo sapiens
ccactcttgaatcat

SEQ ID NO: 16414 - DNA, 15 bp, Homo sapiens
accactcttgaatca

SEQ ID NO: 16415 - DNA, 15 bp, Homo sapiens
aaccactcttgaatc

SEQ ID NO: 16416 - DNA, 15 bp, Homo sapiens
aaaccactcttgaat

SEQ ID NO: 16417 - DNA, 15 bp, Homo sapiens
caaaccactcttgaa

SEQ ID NO: 16418 - DNA, 15 bp, Homo sapiens
tcaaaccactcttga

SEQ ID NO: 16419 - DNA, 15 bp, Homo sapiens
atcaaaccactcttg

SEQ ID NO: 16420 - DNA, 15 bp, Homo sapiens
catcaaaccactctt

SEQ ID NO: 16421 - DNA, 15 bp, Homo sapiens
gcatcaaaccactct

SEQ ID NO: 16422 - DNA, 15 bp, Homo sapiens
tgcatcaaaccactc

SEQ ID NO: 16423 - DNA, 15 bp, Homo sapiens
atgcatcaaaccact

SEQ ID NO: 16424 - DNA, 15 bp, Homo sapiens
tatgcatcaaaccac

SEQ ID NO: 16425 - DNA, 15 bp, Homo sapiens
atatgcatcaaacca

SEQ ID NO: 16426 - DNA, 15 bp, Homo sapiens
aatatgcatcaaacc

SEQ ID NO: 16427 - DNA, 15 bp, Homo sapiens
caatatgcatcaaac

SEQ ID NO: 16428 - DNA, 15 bp, Homo sapiens
tcaatatgcatcaaa

SEQ ID NO: 16429 - DNA, 15 bp, Homo sapiens
ttcaatatgcatcaa

SEQ ID NO: 16430 - DNA, 15 bp, Homo sapiens
attcaatatgcatca

SEQ ID NO: 16431 - DNA, 15 bp, Homo sapiens
tattcaatatgcatc

SEQ ID NO: 16432 - DNA, 15 bp, Homo sapiens
ttattcaatatgcat

SEQ ID NO: 16433 - DNA, 15 bp, Homo sapiens
gttattcaatatgca

SEQ ID NO: 16434 - DNA, 15 bp, Homo sapiens
tgttattcaatatgc

SEQ ID NO: 16435 - DNA, 15 bp, Homo sapiens
atgttattcaatatg

SEQ ID NO: 16436 - DNA, 15 bp, Homo sapiens
catgttattcaatat

SEQ ID NO: 16437 - DNA, 15 bp, Homo sapiens
tcatgttattcaata

SEQ ID NO: 16438 - DNA, 15 bp, Homo sapiens
atcatgttattcaat

SEQ ID NO: 16439 - DNA, 15 bp, Homo sapiens
catcatgttattcaa

SEQ ID NO: 16440 - DNA, 15 bp, Homo sapiens
tcatcatgttattca

SEQ ID NO: 16441 - DNA, 15 bp, Homo sapiens
atcatcatgttattc

SEQ ID NO: 16442 - DNA, 15 bp, Homo sapiens
tatcatcatgttatt

SEQ ID NO: 16443 - DNA, 15 bp, Homo sapiens
ttatcatcatgttat

SEQ ID NO: 16444 - DNA, 15 bp, Homo sapiens
cttatcatcatgtta

SEQ ID NO: 16445 - DNA, 15 bp, Homo sapiens
acttatcatcatgtt

SEQ ID NO: 16446 - DNA, 15 bp, Homo sapiens
tacttatcatcatgt

SEQ ID NO: 16447 - DNA, 15 bp, Homo sapiens
gtacttatcatcatg

SEQ ID NO: 16448 - DNA, 15 bp, Homo sapiens
agtacttatcatcat

SEQ ID NO: 16449 - DNA, 15 bp, Homo sapiens
tagtacttatcatca

SEQ ID NO: 16450 - DNA, 15 bp, Homo sapiens
ctagtacttatcatc

SEQ ID NO: 16451 - DNA, 15 bp, Homo sapiens
tctagtacttatcat

SEQ ID NO: 16452 - DNA, 15 bp, Homo sapiens
gtctagtacttatca

SEQ ID NO: 16453 - DNA, 15 bp, Homo sapiens
agtctagtacttatc

SEQ ID NO: 16454 - DNA, 15 bp, Homo sapiens
gagtctagtacttat

SEQ ID NO: 16455 - DNA, 15 bp, Homo sapiens
agagtctagtactta

SEQ ID NO: 16456 - DNA, 15 bp, Homo sapiens
cagagtctagtactt

SEQ ID NO: 16457 - DNA, 15 bp, Homo sapiens
acagagtctagtact

SEQ ID NO: 16458 - DNA, 15 bp, Homo sapiens
cacagagtctagtac

SEQ ID NO: 16459 - DNA, 15 bp, Homo sapiens
gcacagagtctagta

SEQ ID NO: 16460 - DNA, 15 bp, Homo sapiens
agcacagagtctagt

SEQ ID NO: 16461 - DNA, 15 bp, Homo sapiens
tagcacagagtctag

SEQ ID NO: 16462 - DNA, 15 bp, Homo sapiens
ttagcacagagtcta

SEQ ID NO: 16463 - DNA, 15 bp, Homo sapiens
cttagcacagagtct

SEQ ID NO: 16464 - DNA, 15 bp, Homo sapiens
gcttagcacagagtc

SEQ ID NO: 16465 - DNA, 15 bp, Homo sapiens
ggcttagcacagagt

SEQ ID NO: 16466 - DNA, 15 bp, Homo sapiens
aggcttagcacagag

SEQ ID NO: 16467 - DNA, 15 bp, Homo sapiens
aaggcttagcacaga

SEQ ID NO: 16468 - DNA, 15 bp, Homo sapiens
gaaggcttagcacag

SEQ ID NO: 16469 - DNA, 15 bp, Homo sapiens
agaaggcttagcaca

SEQ ID NO: 16470 - DNA, 15 bp, Homo sapiens
tagaaggcttagcac

SEQ ID NO: 16471 - DNA, 15 bp, Homo sapiens
atagaaggcttagca

SEQ ID NO: 16472 - DNA, 15 bp, Homo sapiens
catagaaggcttagc

SEQ ID NO: 16473 - DNA, 15 bp, Homo sapiens
acatagaaggcttag

SEQ ID NO: 16474 - DNA, 15 bp, Homo sapiens
cacatagaaggctta

SEQ ID NO: 16475 - DNA, 15 bp, Homo sapiens
tcacatagaaggctt

SEQ ID NO: 16476 - DNA, 15 bp, Homo sapiens
ttcacatagaaggct

SEQ ID NO: 16477 - DNA, 15 bp, Homo sapiens
tttcacatagaaggc

SEQ ID NO: 16478 - DNA, 15 bp, Homo sapiens
atttcacatagaagg

SEQ ID NO: 16479 - DNA, 15 bp, Homo sapiens
tatttcacatagaag

SEQ ID NO: 16480 - DNA, 15 bp, Homo sapiens
gtatttcacatagaa

SEQ ID NO: 16481 - DNA, 15 bp, Homo sapiens
tgtatttcacataga

SEQ ID NO: 16482 - DNA, 15 bp, Homo sapiens
atgtatttcacatag

SEQ ID NO: 16483 - DNA, 15 bp, Homo sapiens
aatgtatttcacata

SEQ ID NO: 16484 - DNA, 15 bp, Homo sapiens
aaatgtatttcacat

SEQ ID NO: 16485 - DNA, 15 bp, Homo sapiens
taaatgtatttcaca

SEQ ID NO: 16486 - DNA, 15 bp, Homo sapiens
ttaaatgtatttcac

SEQ ID NO: 16487 - DNA, 15 bp, Homo sapiens
attaaatgtatttca

SEQ ID NO: 16488 - DNA, 15 bp, Homo sapiens
aattaaatgtatttc

SEQ ID NO: 16489 - DNA, 15 bp, Homo sapiens
gaattaaatgtattt

SEQ ID NO: 16490 - DNA, 15 bp, Homo sapiens
agaattaaatgtatt

SEQ ID NO: 16491 - DNA, 15 bp, Homo sapiens
gagaattaaatgtat

SEQ ID NO: 16492 - DNA, 15 bp, Homo sapiens
tgagaattaaatgta

SEQ ID NO: 16493 - DNA, 15 bp, Homo sapiens
atgagaattaaatgt

SEQ ID NO: 16494 - DNA, 15 bp, Homo sapiens
tatgagaattaaatg

SEQ ID NO: 16495 - DNA, 15 bp, Homo sapiens
ttatgagaattaaat

SEQ ID NO: 16496 - DNA, 15 bp, Homo sapiens
attatgagaattaaa

SEQ ID NO: 16497 - DNA, 15 bp, Homo sapiens
tattatgagaattaa

SEQ ID NO: 16498 - DNA, 15 bp, Homo sapiens
ttattatgagaatta

SEQ ID NO: 16499 - DNA, 15 bp, Homo sapiens
gttattatgagaatt

SEQ ID NO: 16500 - DNA, 15 bp, Homo sapiens
agttattatgagaat

SEQ ID NO: 16501 - DNA, 15 bp, Homo sapiens
gagttattatgagaa

SEQ ID NO: 16502 - DNA, 15 bp, Homo sapiens
agagttattatgaga

SEQ ID NO: 16503 - DNA, 15 bp, Homo sapiens
tagagttattatgag

SEQ ID NO: 16504 - DNA, 15 bp, Homo sapiens
ctagagttattatga

SEQ ID NO: 16505 - DNA, 15 bp, Homo sapiens
tctagagttattatg

SEQ ID NO: 16506 - DNA, 15 bp, Homo sapiens
ctctagagttattat

SEQ ID NO: 16507 - DNA, 15 bp, Homo sapiens
gctctagagttatta

SEQ ID NO: 16508 - DNA, 15 bp, Homo sapiens
tgctctagagttatt

SEQ ID NO: 16509 - DNA, 15 bp, Homo sapiens
ctgctctagagttat

SEQ ID NO: 16510 - DNA, 15 bp, Homo sapiens
actgctctagagtta

SEQ ID NO: 16511 - DNA, 15 bp, Homo sapiens
cactgctctagagtt

SEQ ID NO: 16512 - DNA, 15 bp, Homo sapiens
ccactgctctagagt

SEQ ID NO: 16513 - DNA, 15 bp, Homo sapiens
accactgctctagag

SEQ ID NO: 16514 - DNA, 15 bp, Homo sapiens
aaccactgctctaga

SEQ ID NO: 16515 - DNA, 15 bp, Homo sapiens
gaaccactgctctag

SEQ ID NO: 16516 - DNA, 15 bp, Homo sapiens
agaaccactgctcta

SEQ ID NO: 16517 - DNA, 15 bp, Homo sapiens
gagaaccactgctct

SEQ ID NO: 16518 - DNA, 15 bp, Homo sapiens
cgagaaccactgctc

SEQ ID NO: 16519 - DNA, 15 bp, Homo sapiens
tcgagaaccactgct

SEQ ID NO: 16520 - DNA, 15 bp, Homo sapiens
gtcgagaaccactgc

SEQ ID NO: 16521 - DNA, 15 bp, Homo sapiens
ggtcgagaaccactg

SEQ ID NO: 16522 - DNA, 15 bp, Homo sapiens
cggtcgagaaccact

SEQ ID NO: 16523 - DNA, 15 bp, Homo sapiens
ccggtcgagaaccac

SEQ ID NO: 16524 - DNA, 15 bp, Homo sapiens
cccggtcgagaacca

SEQ ID NO: 16525 - DNA, 15 bp, Homo sapiens
ccccggtcgagaacc

SEQ ID NO: 16526 - DNA, 15 bp, Homo sapiens
gccccggtcgagaac

SEQ ID NO: 16527 - DNA, 15 bp, Homo sapiens
ggccccggtcgagaa

SEQ ID NO: 16528 - DNA, 15 bp, Homo sapiens
cggccccggtcgaga

SEQ ID NO: 16529 - DNA, 15 bp, Homo sapiens
ccggccccggtcgag

SEQ ID NO: 16530 - DNA, 15 bp, Homo sapiens
accggccccggtcga

SEQ ID NO: 16531 - DNA, 15 bp, Homo sapiens
aaccggccccggtcg

SEQ ID NO: 16532 - DNA, 15 bp, Homo sapiens
taaccggccccggtc

SEQ ID NO: 16533 - DNA, 15 bp, Homo sapiens
ataaccggccccggt

SEQ ID NO: 16534 - DNA, 15 bp, Homo sapiens
gataaccggccccgg

SEQ ID NO: 16535 - DNA, 15 bp, Homo sapiens
ggataaccggccccg

SEQ ID NO: 16536 - DNA, 15 bp, Homo sapiens
gggataaccggcccc

SEQ ID NO: 16537 - DNA, 15 bp, Homo sapiens
ggggataaccggccc

SEQ ID NO: 16538 - DNA, 15 bp, Homo sapiens
gggggataaccggcc

SEQ ID NO: 16539 - DNA, 15 bp, Homo sapiens
agggggataaccggc

SEQ ID NO: 16540 - DNA, 15 bp, Homo sapiens
tagggggataaccgg

SEQ ID NO: 16541 - DNA, 15 bp, Homo sapiens
gtagggggataaccg

SEQ ID NO: 16542 - DNA, 15 bp, Homo sapiens
ggtagggggataacc

SEQ ID NO: 16543 - DNA, 15 bp, Homo sapiens
gggtagggggataac

SEQ ID NO: 16544 - DNA, 15 bp, Homo sapiens
ggggtagggggataa

SEQ ID NO: 16545 - DNA, 15 bp, Homo sapiens
tggggtagggggata

SEQ ID NO: 16546 - DNA, 15 bp, Homo sapiens
gtggggtagggggat

SEQ ID NO: 16547 - DNA, 15 bp, Homo sapiens
ggtggggtaggggga

SEQ ID NO: 16548 - DNA, 15 bp, Homo sapiens
gggtggggtaggggg

SEQ ID NO: 16549 - DNA, 15 bp, Homo sapiens
ggggtggggtagggg

SEQ ID NO: 16550 - DNA, 15 bp, Homo sapiens
tggggtggggtaggg

SEQ ID NO: 16551 - DNA, 15 bp, Homo sapiens
gtggggtggggtagg

SEQ ID NO: 16552 - DNA, 15 bp, Homo sapiens
ggtggggtggggtag

SEQ ID NO: 16553 - DNA, 15 bp, Homo sapiens
gggtggggtggggta

SEQ ID NO: 16554 - DNA, 15 bp, Homo sapiens
agggtggggtggggt

SEQ ID NO: 16555 - DNA, 15 bp, Homo sapiens
gagggtggggtgggg

SEQ ID NO: 16556 - DNA, 15 bp, Homo sapiens
tgagggtggggtggg

SEQ ID NO: 16557 - DNA, 15 bp, Homo sapiens
gtgagggtggggtgg

SEQ ID NO: 16558 - DNA, 15 bp, Homo sapiens
ggtgagggtggggtg

SEQ ID NO: 16559 - DNA, 15 bp, Homo sapiens
gggtgagggtggggt

SEQ ID NO: 16560 - DNA, 15 bp, Homo sapiens
agggtgagggtgggg

SEQ ID NO: 16561 - DNA, 15 bp, Homo sapiens
aagggtgagggtggg

SEQ ID NO: 16562 - DNA, 15 bp, Homo sapiens
gaagggtgagggtgg

SEQ ID NO: 16563 - DNA, 15 bp, Homo sapiens
ggaagggtgagggtg

SEQ ID NO: 16564 - DNA, 15 bp, Homo sapiens
tggaagggtgagggt

SEQ ID NO: 16565 - DNA, 15 bp, Homo sapiens
gtggaagggtgaggg

SEQ ID NO: 16566 - DNA, 15 bp, Homo sapiens
ggtggaagggtgagg

SEQ ID NO: 16567 - DNA, 15 bp, Homo sapiens
tggtggaagggtgag

SEQ ID NO: 16568 - DNA, 15 bp, Homo sapiens
ctggtggaagggtga

SEQ ID NO: 16569 - DNA, 15 bp, Homo sapiens
cctggtggaagggtg

SEQ ID NO: 16570 - DNA, 15 bp, Homo sapiens
ccctggtggaagggt

SEQ ID NO: 16571 - DNA, 15 bp, Homo sapiens
tccctggtggaaggg

SEQ ID NO: 16572 - DNA, 15 bp, Homo sapiens
gtccctggtggaagg

SEQ ID NO: 16573 - DNA, 15 bp, Homo sapiens
tgtccctggtggaag

SEQ ID NO: 16574 - DNA, 15 bp, Homo sapiens
atgtccctggtggaa

SEQ ID NO: 16575 - DNA, 15 bp, Homo sapiens
tatgtccctggtgga

SEQ ID NO: 16576 - DNA, 15 bp, Homo sapiens
ttatgtccctggtgg

SEQ ID NO: 16577 - DNA, 15 bp, Homo sapiens
gttatgtccctggtg

SEQ ID NO: 16578 - DNA, 15 bp, Homo sapiens
tgttatgtccctggt

SEQ ID NO: 16579 - DNA, 15 bp, Homo sapiens
atgttatgtccctgg

SEQ ID NO: 16580 - DNA, 15 bp, Homo sapiens
gatgttatgtccctg

SEQ ID NO: 16581 - DNA, 15 bp, Homo sapiens
agatgttatgtccct

SEQ ID NO: 16582 - DNA, 15 bp, Homo sapiens
cagatgttatgtccc

SEQ ID NO: 16583 - DNA, 15 bp, Homo sapiens
ccagatgttatgtcc

SEQ ID NO: 16584 - DNA, 15 bp, Homo sapiens
tccagatgttatgtc

SEQ ID NO: 16585 - DNA, 15 bp, Homo sapiens
ctccagatgttatgt

SEQ ID NO: 16586 - DNA, 15 bp, Homo sapiens
tctccagatgttatg

SEQ ID NO: 16587 - DNA, 15 bp, Homo sapiens
atctccagatgttat

SEQ ID NO: 16588 - DNA, 15 bp, Homo sapiens
tatctccagatgtta

SEQ ID NO: 16589 - DNA, 15 bp, Homo sapiens
atatctccagatgtt

SEQ ID NO: 16590 - DNA, 15 bp, Homo sapiens
aatatctccagatgt

SEQ ID NO: 16591 - DNA, 15 bp, Homo sapiens
aaatatctccagatg

SEQ ID NO: 16592 - DNA, 15 bp, Homo sapiens
aaaatatctccagat

SEQ ID NO: 16593 - DNA, 15 bp, Homo sapiens
aaaaatatctccaga

SEQ ID NO: 16594 - DNA, 15 bp, Homo sapiens
caaaaatatctccag

SEQ ID NO: 16595 - DNA, 15 bp, Homo sapiens
ccaaaaatatctcca

SEQ ID NO: 16596 - DNA, 15 bp, Homo sapiens
accaaaaatatctcc

SEQ ID NO: 16597 - DNA, 15 bp, Homo sapiens
aaccaaaaatatctc

SEQ ID NO: 16598 - DNA, 15 bp, Homo sapiens
caaccaaaaatatct

SEQ ID NO: 16599 - DNA, 15 bp, Homo sapiens
acaaccaaaaatatc

SEQ ID NO: 16600 - DNA, 15 bp, Homo sapiens
gacaaccaaaaatat

SEQ ID NO: 16601 - DNA, 15 bp, Homo sapiens
tgacaaccaaaaata

SEQ ID NO: 16602 - DNA, 15 bp, Homo sapiens
gtgacaaccaaaaat

SEQ ID NO: 16603 - DNA, 15 bp, Homo sapiens
tgtgacaaccaaaaa

SEQ ID NO: 16604 - DNA, 15 bp, Homo sapiens
ttgtgacaaccaaaa

SEQ ID NO: 16605 - DNA, 15 bp, Homo sapiens
attgtgacaaccaaa

SEQ ID NO: 16606 - DNA, 15 bp, Homo sapiens
gattgtgacaaccaa

SEQ ID NO: 16607 - DNA, 15 bp, Homo sapiens
ggattgtgacaacca

SEQ ID NO: 16608 - DNA, 15 bp, Homo sapiens
aggattgtgacaacc

SEQ ID NO: 16609 - DNA, 15 bp, Homo sapiens
caggattgtgacaac

SEQ ID NO: 16610 - DNA, 15 bp, Homo sapiens
ccaggattgtgacaa

SEQ ID NO: 16611 - DNA, 15 bp, Homo sapiens
cccaggattgtgaca

SEQ ID NO: 16612 - DNA, 15 bp, Homo sapiens
tcccaggattgtgac

SEQ ID NO: 16613 - DNA, 15 bp, Homo sapiens
ttcccaggattgtga

SEQ ID NO: 16614 - DNA, 15 bp, Homo sapiens
attcccaggattgtg

SEQ ID NO: 16615 - DNA, 15 bp, Homo sapiens
cattcccaggattgt

SEQ ID NO: 16616 - DNA, 15 bp, Homo sapiens
acattcccaggattg

SEQ ID NO: 16617 - DNA, 15 bp, Homo sapiens
tacattcccaggatt

SEQ ID NO: 16618 - DNA, 15 bp, Homo sapiens
atacattcccaggat

SEQ ID NO: 16619 - DNA, 15 bp, Homo sapiens
catacattcccagga

SEQ ID NO: 16620 - DNA, 15 bp, Homo sapiens
acatacattcccagg

SEQ ID NO: 16621 - DNA, 15 bp, Homo sapiens
cacatacattcccag

SEQ ID NO: 16622 - DNA, 15 bp, Homo sapiens
gcacatacattccca

SEQ ID NO: 16623 - DNA, 15 bp, Homo sapiens
agcacatacattccc

SEQ ID NO: 16624 - DNA, 15 bp, Homo sapiens
cagcacatacattcc

SEQ ID NO: 16625 - DNA, 15 bp, Homo sapiens
tcagcacatacattc

SEQ ID NO: 16626 - DNA, 15 bp, Homo sapiens
atcagcacatacatt

SEQ ID NO: 16627 - DNA, 15 bp, Homo sapiens
tatcagcacatacat

SEQ ID NO: 16628 - DNA, 15 bp, Homo sapiens
atatcagcacataca

SEQ ID NO: 16629 - DNA, 15 bp, Homo sapiens
aatatcagcacatac

SEQ ID NO: 16630 - DNA, 15 bp, Homo sapiens
aaatatcagcacata

SEQ ID NO: 16631 - DNA, 15 bp, Homo sapiens
taaatatcagcacat

SEQ ID NO: 16632 - DNA, 15 bp, Homo sapiens
ctaaatatcagcaca

SEQ ID NO: 16633 - DNA, 15 bp, Homo sapiens
tctaaatatcagcac

SEQ ID NO: 16634 - DNA, 15 bp, Homo sapiens
ctctaaatatcagca

SEQ ID NO: 16635 - DNA, 15 bp, Homo sapiens
cctctaaatatcagc

SEQ ID NO: 16636 - DNA, 15 bp, Homo sapiens
acctctaaatatcag

SEQ ID NO: 16637 - DNA, 15 bp, Homo sapiens
aacctctaaatatca

SEQ ID NO: 16638 - DNA, 15 bp, Homo sapiens
caacctctaaatatc

SEQ ID NO: 16639 - DNA, 15 bp, Homo sapiens
tcaacctctaaatat

SEQ ID NO: 16640 - DNA, 15 bp, Homo sapiens
ctcaacctctaaata

SEQ ID NO: 16641 - DNA, 15 bp, Homo sapiens
cctcaacctctaaat

SEQ ID NO: 16642 - DNA, 15 bp, Homo sapiens
acctcaacctctaaa

SEQ ID NO: 16643 - DNA, 15 bp, Homo sapiens
gacctcaacctctaa

SEQ ID NO: 16644 - DNA, 15 bp, Homo sapiens
tgacctcaacctcta

SEQ ID NO: 16645 - DNA, 15 bp, Homo sapiens
ctgacctcaacctct

SEQ ID NO: 16646 - DNA, 15 bp, Homo sapiens
cctgacctcaacctc

SEQ ID NO: 16647 - DNA, 15 bp, Homo sapiens
ccctgacctcaacct

SEQ ID NO: 16648 - DNA, 15 bp, Homo sapiens
tccctgacctcaacc

SEQ ID NO: 16649 - DNA, 15 bp, Homo sapiens
atccctgacctcaac

SEQ ID NO: 16650 - DNA, 15 bp, Homo sapiens
catccctgacctcaa

SEQ ID NO: 16651 - DNA, 15 bp, Homo sapiens
gcatccctgacctca

SEQ ID NO: 16652 - DNA, 15 bp, Homo sapiens
agcatccctgacctc

SEQ ID NO: 16653 - DNA, 15 bp, Homo sapiens
cagcatccctgacct

SEQ ID NO: 16654 - DNA, 15 bp, Homo sapiens
gcagcatccctgacc

SEQ ID NO: 16655 - DNA, 15 bp, Homo sapiens
agcagcatccctgac

SEQ ID NO: 16656 - DNA, 15 bp, Homo sapiens
cagcagcatccctga

SEQ ID NO: 16657 - DNA, 15 bp, Homo sapiens
tcagcagcatccctg

SEQ ID NO: 16658 - DNA, 15 bp, Homo sapiens
ttcagcagcatccct

SEQ ID NO: 16659 - DNA, 15 bp, Homo sapiens
gttcagcagcatccc

SEQ ID NO: 16660 - DNA, 15 bp, Homo sapiens
agttcagcagcatcc

SEQ ID NO: 16661 - DNA, 15 bp, Homo sapiens
aagttcagcagcatc

SEQ ID NO: 16662 - DNA, 15 bp, Homo sapiens
gaagttcagcagcat

SEQ ID NO: 16663 - DNA, 15 bp, Homo sapiens
cgaagttcagcagca

SEQ ID NO: 16664 - DNA, 15 bp, Homo sapiens
acgaagttcagcagc

SEQ ID NO: 16665 - DNA, 15 bp, Homo sapiens
tacgaagttcagcag

SEQ ID NO: 16666 - DNA, 15 bp, Homo sapiens
ctacgaagttcagca

SEQ ID NO: 16667 - DNA, 15 bp, Homo sapiens
tctacgaagttcagc

SEQ ID NO: 16668 - DNA, 15 bp, Homo sapiens
ttctacgaagttcag

SEQ ID NO: 16669 - DNA, 15 bp, Homo sapiens
attctacgaagttca

SEQ ID NO: 16670 - DNA, 15 bp, Homo sapiens
aattctacgaagttc

SEQ ID NO: 16671 - DNA, 15 bp, Homo sapiens
gaattctacgaagtt

SEQ ID NO: 16672 - DNA, 15 bp, Homo sapiens
tgaattctacgaagt

SEQ ID NO: 16673 - DNA, 15 bp, Homo sapiens
atgaattctacgaag

SEQ ID NO: 16674 - DNA, 15 bp, Homo sapiens
tatgaattctacgaa

SEQ ID NO: 16675 - DNA, 15 bp, Homo sapiens
ctatgaattctacga

SEQ ID NO: 16676 - DNA, 15 bp, Homo sapiens
cctatgaattctacg

SEQ ID NO: 16677 - DNA, 15 bp, Homo sapiens
tcctatgaattctac

SEQ ID NO: 16678 - DNA, 15 bp, Homo sapiens
ctcctatgaattcta

SEQ ID NO: 16679 - DNA, 15 bp, Homo sapiens
tctcctatgaattct

SEQ ID NO: 16680 - DNA, 15 bp, Homo sapiens
ctctcctatgaattc

SEQ ID NO: 16681 - DNA, 15 bp, Homo sapiens
actctcctatgaatt

SEQ ID NO: 16682 - DNA, 15 bp, Homo sapiens
gactctcctatgaat

SEQ ID NO: 16683 - DNA, 15 bp, Homo sapiens
agactctcctatgaa

SEQ ID NO: 16684 - DNA, 15 bp, Homo sapiens
gagactctcctatga

SEQ ID NO: 16685 - DNA, 15 bp, Homo sapiens
agagactctcctatg

SEQ ID NO: 16686 - DNA, 15 bp, Homo sapiens
gagagactctcctat

SEQ ID NO: 16687 - DNA, 15 bp, Homo sapiens
tgagagactctccta

SEQ ID NO: 16688 - DNA, 15 bp, Homo sapiens
gtgagagactctcct

SEQ ID NO: 16689 - DNA, 15 bp, Homo sapiens
tgtgagagactctcc

SEQ ID NO: 16690 - DNA, 15 bp, Homo sapiens
ttgtgagagactctc

SEQ ID NO: 16691 - DNA, 15 bp, Homo sapiens
gttgtgagagactct

SEQ ID NO: 16692 - DNA, 15 bp, Homo sapiens
tgttgtgagagactc

SEQ ID NO: 16693 - DNA, 15 bp, Homo sapiens
gtgttgtgagagact

SEQ ID NO: 16694 - DNA, 15 bp, Homo sapiens
ggtgttgtgagagac

SEQ ID NO: 16695 - DNA, 15 bp, Homo sapiens
aggtgttgtgagaga

SEQ ID NO: 16696 - DNA, 15 bp, Homo sapiens
taggtgttgtgagag

SEQ ID NO: 16697 - DNA, 15 bp, Homo sapiens
ataggtgttgtgaga

SEQ ID NO: 16698 - DNA, 15 bp, Homo sapiens
gataggtgttgtgag

SEQ ID NO: 16699 - DNA, 15 bp, Homo sapiens
agataggtgttgtga

SEQ ID NO: 16700 - DNA, 15 bp, Homo sapiens
cagataggtgttgtg

SEQ ID NO: 16701 - DNA, 15 bp, Homo sapiens
ccagataggtgttgt

SEQ ID NO: 16702 - DNA, 15 bp, Homo sapiens
gccagataggtgttg

SEQ ID NO: 16703 - DNA, 15 bp, Homo sapiens
ggccagataggtgtt

SEQ ID NO: 16704 - DNA, 15 bp, Homo sapiens
gggccagataggtgt

SEQ ID NO: 16705 - DNA, 15 bp, Homo sapiens
ggggccagataggtg

SEQ ID NO: 16706 - DNA, 15 bp, Homo sapiens
tggggccagataggt

SEQ ID NO: 16707 - DNA, 15 bp, Homo sapiens
ttggggccagatagg

SEQ ID NO: 16708 - DNA, 15 bp, Homo sapiens
tttggggccagatag

SEQ ID NO: 16709 - DNA, 15 bp, Homo sapiens
atttggggccagata

SEQ ID NO: 16710 - DNA, 15 bp, Homo sapiens
catttggggccagat

SEQ ID NO: 16711 - DNA, 15 bp, Homo sapiens
acatttggggccaga

SEQ ID NO: 16712 - DNA, 15 bp, Homo sapiens
gacatttggggccag

SEQ ID NO: 16713 - DNA, 15 bp, Homo sapiens
tgacatttggggcca

SEQ ID NO: 16714 - DNA, 15 bp, Homo sapiens
ctgacatttggggcc

SEQ ID NO: 16715 - DNA, 15 bp, Homo sapiens
actgacatttggggc

SEQ ID NO: 16716 - DNA, 15 bp, Homo sapiens
tactgacatttgggg

SEQ ID NO: 16717 - DNA, 15 bp, Homo sapiens
ctactgacatttggg

SEQ ID NO: 16718 - DNA, 15 bp, Homo sapiens
cctactgacatttgg

SEQ ID NO: 16719 - DNA, 15 bp, Homo sapiens
ccctactgacatttg

SEQ ID NO: 16720 - DNA, 15 bp, Homo sapiens
accctactgacattt

SEQ ID NO: 16721 - DNA, 15 bp, Homo sapiens
gaccctactgacatt

SEQ ID NO: 16722 - DNA, 15 bp, Homo sapiens
tgaccctactgacat

SEQ ID NO: 16723 - DNA, 15 bp, Homo sapiens
gtgaccctactgaca

SEQ ID NO: 16724 - DNA, 15 bp, Homo sapiens
agtgaccctactgac

SEQ ID NO: 16725 - DNA, 15 bp, Homo sapiens
tagtgaccctactga

SEQ ID NO: 16726 - DNA, 15 bp, Homo sapiens
atagtgaccctactg

SEQ ID NO: 16727 - DNA, 15 bp, Homo sapiens
gatagtgaccctact

SEQ ID NO: 16728 - DNA, 15 bp, Homo sapiens
tgatagtgaccctac

SEQ ID NO: 16729 - DNA, 15 bp, Homo sapiens
ttgatagtgacccta

SEQ ID NO: 16730 - DNA, 15 bp, Homo sapiens
cttgatagtgaccct

SEQ ID NO: 16731 - DNA, 15 bp, Homo sapiens
tcttgatagtgaccc

SEQ ID NO: 16732 - DNA, 15 bp, Homo sapiens
ttcttgatagtgacc

SEQ ID NO: 16733 - DNA, 15 bp, Homo sapiens
tttcttgatagtgac

SEQ ID NO: 16734 - DNA, 15 bp, Homo sapiens
ttttcttgatagtga

SEQ ID NO: 16735 - DNA, 15 bp, Homo sapiens
attttcttgatagtg

SEQ ID NO: 16736 - DNA, 15 bp, Homo sapiens
gattttcttgatagt

SEQ ID NO: 16737 - DNA, 15 bp, Homo sapiens
agattttcttgatag

SEQ ID NO: 16738 - DNA, 15 bp, Homo sapiens
cagattttcttgata

SEQ ID NO: 16739 - DNA, 15 bp, Homo sapiens
gcagattttcttgat

SEQ ID NO: 16740 - DNA, 15 bp, Homo sapiens
agcagattttcttga

SEQ ID NO: 16741 - DNA, 15 bp, Homo sapiens
gagcagattttcttg

SEQ ID NO: 16742 - DNA, 15 bp, Homo sapiens
agagcagattttctt

SEQ ID NO: 16743 - DNA, 15 bp, Homo sapiens
tagagcagattttct

SEQ ID NO: 16744 - DNA, 15 bp, Homo sapiens
ctagagcagattttc

SEQ ID NO: 16745 - DNA, 15 bp, Homo sapiens
gctagagcagatttt

SEQ ID NO: 16746 - DNA, 15 bp, Homo sapiens
tgctagagcagattt

SEQ ID NO: 16747 - DNA, 15 bp, Homo sapiens
ctgctagagcagatt

SEQ ID NO: 16748 - DNA, 15 bp, Homo sapiens
actgctagagcagat

SEQ ID NO: 16749 - DNA, 15 bp, Homo sapiens
cactgctagagcaga

SEQ ID NO: 16750 - DNA, 15 bp, Homo sapiens
gcactgctagagcag

SEQ ID NO: 16751 - DNA, 15 bp, Homo sapiens
ggcactgctagagca

SEQ ID NO: 16752 - DNA, 15 bp, Homo sapiens
aggcactgctagagc

SEQ ID NO: 16753 - DNA, 15 bp, Homo sapiens
caggcactgctagag

SEQ ID NO: 16754 - DNA, 15 bp, Homo sapiens
gcaggcactgctaga

SEQ ID NO: 16755 - DNA, 15 bp, Homo sapiens
agcaggcactgctag

SEQ ID NO: 16756 - DNA, 15 bp, Homo sapiens
gagcaggcactgcta

SEQ ID NO: 16757 - DNA, 15 bp, Homo sapiens
tgagcaggcactgct

SEQ ID NO: 16758 - DNA, 15 bp, Homo sapiens
atgagcaggcactgc

SEQ ID NO: 16759 - DNA, 15 bp, Homo sapiens
tatgagcaggcactg

SEQ ID NO: 16760 - DNA, 15 bp, Homo sapiens
atatgagcaggcact

SEQ ID NO: 16761 - DNA, 15 bp, Homo sapiens
aatatgagcaggcac

SEQ ID NO: 16762 - DNA, 15 bp, Homo sapiens
taatatgagcaggca

SEQ ID NO: 16763 - DNA, 15 bp, Homo sapiens
ataatatgagcaggc

SEQ ID NO: 16764 - DNA, 15 bp, Homo sapiens
gataatatgagcagg

SEQ ID NO: 16765 - DNA, 15 bp, Homo sapiens
ggataatatgagcag

SEQ ID NO: 16766 - DNA, 15 bp, Homo sapiens
gggataatatgagca

SEQ ID NO: 16767 - DNA, 15 bp, Homo sapiens
ggggataatatgagc

SEQ ID NO: 16768 - DNA, 15 bp, Homo sapiens
tggggataatatgag

SEQ ID NO: 16769 - DNA, 15 bp, Homo sapiens
atggggataatatga

SEQ ID NO: 16770 - DNA, 15 bp, Homo sapiens
catggggataatatg

SEQ ID NO: 16771 - DNA, 15 bp, Homo sapiens
acatggggataatat

SEQ ID NO: 16772 - DNA, 15 bp, Homo sapiens
aacatggggataata

SEQ ID NO: 16773 - DNA, 15 bp, Homo sapiens
caacatggggataat

SEQ ID NO: 16774 - DNA, 15 bp, Homo sapiens
tcaacatggggataa

SEQ ID NO: 16775 - DNA, 15 bp, Homo sapiens
ttcaacatggggata

SEQ ID NO: 16776 - DNA, 15 bp, Homo sapiens
tttcaacatggggat

SEQ ID NO: 16777 - DNA, 15 bp, Homo sapiens
atttcaacatgggga

SEQ ID NO: 16778 - DNA, 15 bp, Homo sapiens
tatttcaacatgggg

SEQ ID NO: 16779 - DNA, 15 bp, Homo sapiens
ctatttcaacatggg

SEQ ID NO: 16780 - DNA, 15 bp, Homo sapiens
gctatttcaacatgg

SEQ ID NO: 16781 - DNA, 15 bp, Homo sapiens
tgctatttcaacatg

SEQ ID NO: 16782 - DNA, 15 bp, Homo sapiens
ttgctatttcaacat

SEQ ID NO: 16783 - DNA, 15 bp, Homo sapiens
cttgctatttcaaca

SEQ ID NO: 16784 - DNA, 15 bp, Homo sapiens
tcttgctatttcaac

SEQ ID NO: 16785 - DNA, 15 bp, Homo sapiens
atcttgctatttcaa

SEQ ID NO: 16786 - DNA, 15 bp, Homo sapiens
catcttgctatttca

SEQ ID NO: 16787 - DNA, 15 bp, Homo sapiens
ccatcttgctatttc

SEQ ID NO: 16788 - DNA, 15 bp, Homo sapiens
cccatcttgctattt

SEQ ID NO: 16789 - DNA, 15 bp, Homo sapiens
tcccatcttgctatt

SEQ ID NO: 16790 - DNA, 15 bp, Homo sapiens
ttcccatcttgctat

SEQ ID NO: 16791 - DNA, 15 bp, Homo sapiens
cttcccatcttgcta

SEQ ID NO: 16792 - DNA, 15 bp, Homo sapiens
acttcccatcttgct

SEQ ID NO: 16793 - DNA, 15 bp, Homo sapiens
cacttcccatcttgc

SEQ ID NO: 16794 - DNA, 15 bp, Homo sapiens
gcacttcccatcttg

SEQ ID NO: 16795 - DNA, 15 bp, Homo sapiens
tgcacttcccatctt

SEQ ID NO: 16796 - DNA, 15 bp, Homo sapiens
ttgcacttcccatct

SEQ ID NO: 16797 - DNA, 15 bp, Homo sapiens
tttgcacttcccatc

SEQ ID NO: 16798 - DNA, 15 bp, Homo sapiens
ctttgcacttcccat

SEQ ID NO: 16799 - DNA, 15 bp, Homo sapiens
actttgcacttccca

SEQ ID NO: 16800 - DNA, 15 bp, Homo sapiens
cactttgcacttccc

SEQ ID NO: 16801 - DNA, 15 bp, Homo sapiens
ccactttgcacttcc

SEQ ID NO: 16802 - DNA, 15 bp, Homo sapiens
accactttgcacttc

SEQ ID NO: 16803 - DNA, 15 bp, Homo sapiens
caccactttgcactt

SEQ ID NO: 16804 - DNA, 15 bp, Homo sapiens
gcaccactttgcact

SEQ ID NO: 16805 - DNA, 15 bp, Homo sapiens
agcaccactttgcac

SEQ ID NO: 16806 - DNA, 15 bp, Homo sapiens
aagcaccactttgca

SEQ ID NO: 16807 - DNA, 15 bp, Homo sapiens
gaagcaccactttgc

SEQ ID NO: 16808 - DNA, 15 bp, Homo sapiens
cgaagcaccactttg

SEQ ID NO: 16809 - DNA, 15 bp, Homo sapiens
ccgaagcaccacttt

SEQ ID NO: 16810 - DNA, 15 bp, Homo sapiens
accgaagcaccactt

SEQ ID NO: 16811 - DNA, 15 bp, Homo sapiens
taccgaagcaccact

SEQ ID NO: 16812 - DNA, 15 bp, Homo sapiens
gtaccgaagcaccac

SEQ ID NO: 16813 - DNA, 15 bp, Homo sapiens
agtaccgaagcacca

SEQ ID NO: 16814 - DNA, 15 bp, Homo sapiens
gagtaccgaagcacc

SEQ ID NO: 16815 - DNA, 15 bp, Homo sapiens
agagtaccgaagcac

SEQ ID NO: 16816 - DNA, 15 bp, Homo sapiens
aagagtaccgaagca

SEQ ID NO: 16817 - DNA, 15 bp, Homo sapiens
caagagtaccgaagc

SEQ ID NO: 16818 - DNA, 15 bp, Homo sapiens
ccaagagtaccgaag

SEQ ID NO: 16819 - DNA, 15 bp, Homo sapiens
tccaagagtaccgaa

SEQ ID NO: 16820 - DNA, 15 bp, Homo sapiens
ctccaagagtaccga

SEQ ID NO: 16821 - DNA, 15 bp, Homo sapiens
gctccaagagtaccg

SEQ ID NO: 16822 - DNA, 15 bp, Homo sapiens
tgctccaagagtacc

SEQ ID NO: 16823 - DNA, 15 bp, Homo sapiens
ctgctccaagagtac

SEQ ID NO: 16824 - DNA, 15 bp, Homo sapiens
gctgctccaagagta

SEQ ID NO: 16825 - DNA, 15 bp, Homo sapiens
agctgctccaagagt

SEQ ID NO: 16826 - DNA, 15 bp, Homo sapiens
aagctgctccaagag

SEQ ID NO: 16827 - DNA, 15 bp, Homo sapiens
aaagctgctccaaga

SEQ ID NO: 16828 - DNA, 15 bp, Homo sapiens
caaagctgctccaag

SEQ ID NO: 16829 - DNA, 15 bp, Homo sapiens
tcaaagctgctccaa

SEQ ID NO: 16830 - DNA, 15 bp, Homo sapiens
gtcaaagctgctcca

SEQ ID NO: 16831 - DNA, 15 bp, Homo sapiens
agtcaaagctgctcc

SEQ ID NO: 16832 - DNA, 15 bp, Homo sapiens
aagtcaaagctgctc

SEQ ID NO: 16833 - DNA, 15 bp, Homo sapiens
aaagtcaaagctgct

SEQ ID NO: 16834 - DNA, 15 bp, Homo sapiens
caaagtcaaagctgc

SEQ ID NO: 16835 - DNA, 15 bp, Homo sapiens
ccaaagtcaaagctg

SEQ ID NO: 16836 - DNA, 15 bp, Homo sapiens
accaaagtcaaagct

SEQ ID NO: 16837 - DNA, 15 bp, Homo sapiens
caccaaagtcaaagc

SEQ ID NO: 16838 - DNA, 15 bp, Homo sapiens
tcaccaaagtcaaag

SEQ ID NO: 16839 - DNA, 15 bp, Homo sapiens
ctcaccaaagtcaaa

SEQ ID NO: 16840 - DNA, 15 bp, Homo sapiens
tctcaccaaagtcaa

SEQ ID NO: 16841 - DNA, 15 bp, Homo sapiens
ttctcaccaaagtca

SEQ ID NO: 16842 - DNA, 15 bp, Homo sapiens
tttctcaccaaagtc

SEQ ID NO: 16843 - DNA, 15 bp, Homo sapiens
gtttctcaccaaagt

SEQ ID NO: 16844 - DNA, 15 bp, Homo sapiens
cgtttctcaccaaag

SEQ ID NO: 16845 - DNA, 15 bp, Homo sapiens
gcgtttctcaccaaa

SEQ ID NO: 16846 - DNA, 15 bp, Homo sapiens
ggcgtttctcaccaa

SEQ ID NO: 16847 - DNA, 15 bp, Homo sapiens
aggcgtttctcacca

SEQ ID NO: 16848 - DNA, 15 bp, Homo sapiens
aaggcgtttctcacc

SEQ ID NO: 16849 - DNA, 15 bp, Homo sapiens
aaaggcgtttctcac

SEQ ID NO: 16850 - DNA, 15 bp, Homo sapiens
aaaaggcgtttctca

SEQ ID NO: 16851 - DNA, 15 bp, Homo sapiens
taaaaggcgtttctc

SEQ ID NO: 16852 - DNA, 15 bp, Homo sapiens
ttaaaaggcgtttct

SEQ ID NO: 16853 - DNA, 15 bp, Homo sapiens
tttaaaaggcgtttc

SEQ ID NO: 16854 - DNA, 15 bp, Homo sapiens
ttttaaaaggcgttt

SEQ ID NO: 16855 - DNA, 15 bp, Homo sapiens
tttttaaaaggcgtt

SEQ ID NO: 16856 - DNA, 15 bp, Homo sapiens
gtttttaaaaggcgt

SEQ ID NO: 16857 - DNA, 15 bp, Homo sapiens
tgtttttaaaaggcg

SEQ ID NO: 16858 - DNA, 15 bp, Homo sapiens
ttgtttttaaaaggc

SEQ ID NO: 16859 - DNA, 15 bp, Homo sapiens
attgtttttaaaagg

SEQ ID NO: 16860 - DNA, 15 bp, Homo sapiens
cattgtttttaaaag

SEQ ID NO: 16861 - DNA, 15 bp, Homo sapiens
acattgtttttaaaa

SEQ ID NO: 16862 - DNA, 15 bp, Homo sapiens
aacattgtttttaaa

SEQ ID NO: 16863 - DNA, 15 bp, Homo sapiens
aaacattgtttttaa

SEQ ID NO: 16864 - DNA, 15 bp, Homo sapiens
gaaacattgttttta

SEQ ID NO: 16865 - DNA, 15 bp, Homo sapiens
agaaacattgttttt

SEQ ID NO: 16866 - DNA, 15 bp, Homo sapiens
aagaaacattgtttt

SEQ ID NO: 16867 - DNA, 15 bp, Homo sapiens
gaagaaacattgttt

SEQ ID NO: 16868 - DNA, 15 bp, Homo sapiens
ggaagaaacattgtt

SEQ ID NO: 16869 - DNA, 15 bp, Homo sapiens
gggaagaaacattgt

SEQ ID NO: 16870 - DNA, 15 bp, Homo sapiens
tgggaagaaacattg

SEQ ID NO: 16871 - DNA, 15 bp, Homo sapiens
atgggaagaaacatt

SEQ ID NO: 16872 - DNA, 15 bp, Homo sapiens
gatgggaagaaacat

SEQ ID NO: 16873 - DNA, 15 bp, Homo sapiens
agatgggaagaaaca

SEQ ID NO: 16874 - DNA, 15 bp, Homo sapiens
aagatgggaagaaac

SEQ ID NO: 16875 - DNA, 15 bp, Homo sapiens
gaagatgggaagaaa

SEQ ID NO: 16876 - DNA, 15 bp, Homo sapiens
ggaagatgggaagaa

SEQ ID NO: 16877 - DNA, 15 bp, Homo sapiens
gggaagatgggaaga

SEQ ID NO: 16878 - DNA, 15 bp, Homo sapiens
tgggaagatgggaag

SEQ ID NO: 16879 - DNA, 15 bp, Homo sapiens
gtgggaagatgggaa

SEQ ID NO: 16880 - DNA, 15 bp, Homo sapiens
ggtgggaagatggga

SEQ ID NO: 16881 - DNA, 15 bp, Homo sapiens
gggtgggaagatggg

SEQ ID NO: 16882 - DNA, 15 bp, Homo sapiens
ggggtgggaagatgg

SEQ ID NO: 16883 - DNA, 15 bp, Homo sapiens
tggggtgggaagatg

SEQ ID NO: 16884 - DNA, 15 bp, Homo sapiens
atggggtgggaagat

SEQ ID NO: 16885 - DNA, 15 bp, Homo sapiens
catggggtgggaaga

SEQ ID NO: 16886 - DNA, 15 bp, Homo sapiens
ccatggggtgggaag

SEQ ID NO: 16887 - DNA, 15 bp, Homo sapiens
cccatggggtgggaa

SEQ ID NO: 16888 - DNA, 15 bp, Homo sapiens
ccccatggggtggga

SEQ ID NO: 16889 - DNA, 15 bp, Homo sapiens
tccccatggggtggg

SEQ ID NO: 16890 - DNA, 15 bp, Homo sapiens
ctccccatggggtgg

SEQ ID NO: 16891 - DNA, 15 bp, Homo sapiens
cctccccatggggtg

SEQ ID NO: 16892 - DNA, 15 bp, Homo sapiens
acctccccatggggt

SEQ ID NO: 16893 - DNA, 15 bp, Homo sapiens
cacctccccatgggg

SEQ ID NO: 16894 - DNA, 15 bp, Homo sapiens
acacctccccatggg

SEQ ID NO: 16895 - DNA, 15 bp, Homo sapiens
cacacctccccatgg

SEQ ID NO: 16896 - DNA, 15 bp, Homo sapiens
ccacacctccccatg

SEQ ID NO: 16897 - DNA, 15 bp, Homo sapiens
cccacacctccccat

SEQ ID NO: 16898 - DNA, 15 bp, Homo sapiens
ccccacacctcccca

SEQ ID NO: 16899 - DNA, 15 bp, Homo sapiens
accccacacctcccc

SEQ ID NO: 16900 - DNA, 15 bp, Homo sapiens
aaccccacacctccc

SEQ ID NO: 16901 - DNA, 15 bp, Homo sapiens
caaccccacacctcc

SEQ ID NO: 16902 - DNA, 15 bp, Homo sapiens
ccaaccccacacctc

SEQ ID NO: 16903 - DNA, 15 bp, Homo sapiens
cccaaccccacacct

SEQ ID NO: 16904 - DNA, 15 bp, Homo sapiens
acccaaccccacacc

SEQ ID NO: 16905 - DNA, 15 bp, Homo sapiens
cacccaaccccacac

SEQ ID NO: 16906 - DNA, 15 bp, Homo sapiens
ccacccaaccccaca

SEQ ID NO: 16907 - DNA, 15 bp, Homo sapiens
cccacccaaccccac

SEQ ID NO: 16908 - DNA, 15 bp, Homo sapiens
acccacccaacccca

SEQ ID NO: 16909 - DNA, 15 bp, Homo sapiens
tacccacccaacccc

SEQ ID NO: 16910 - DNA, 15 bp, Homo sapiens
ctacccacccaaccc

SEQ ID NO: 16911 - DNA, 15 bp, Homo sapiens
cctacccacccaacc

SEQ ID NO: 16912 - DNA, 15 bp, Homo sapiens
gcctacccacccaac

SEQ ID NO: 16913 - DNA, 15 bp, Homo sapiens
tgcctacccacccaa

SEQ ID NO: 16914 - DNA, 15 bp, Homo sapiens
gtgcctacccaccca

SEQ ID NO: 16915 - DNA, 15 bp, Homo sapiens
ggtgcctacccaccc

SEQ ID NO: 16916 - DNA, 15 bp, Homo sapiens
tggtgcctacccacc

SEQ ID NO: 16917 - DNA, 15 bp, Homo sapiens
ttggtgcctacccac

SEQ ID NO: 16918 - DNA, 15 bp, Homo sapiens
tttggtgcctaccca

SEQ ID NO: 16919 - DNA, 15 bp, Homo sapiens
ctttggtgcctaccc

SEQ ID NO: 16920 - DNA, 15 bp, Homo sapiens
gctttggtgcctacc

SEQ ID NO: 16921 - DNA, 15 bp, Homo sapiens
tgctttggtgcctac

SEQ ID NO: 16922 - DNA, 15 bp, Homo sapiens
ttgctttggtgccta

SEQ ID NO: 16923 - DNA, 15 bp, Homo sapiens
cttgctttggtgcct

SEQ ID NO: 16924 - DNA, 15 bp, Homo sapiens
tcttgctttggtgcc

SEQ ID NO: 16925 - DNA, 15 bp, Homo sapiens
atcttgctttggtgc

SEQ ID NO: 16926 - DNA, 15 bp, Homo sapiens
aatcttgctttggtg

SEQ ID NO: 16927 - DNA, 15 bp, Homo sapiens
aaatcttgctttggt

SEQ ID NO: 16928 - DNA, 15 bp, Homo sapiens
taaatcttgctttgg

SEQ ID NO: 16929 - DNA, 15 bp, Homo sapiens
ctaaatcttgctttg

SEQ ID NO: 16930 - DNA, 15 bp, Homo sapiens
tctaaatcttgcttt

SEQ ID NO: 16931 - DNA, 15 bp, Homo sapiens
ttctaaatcttgctt

SEQ ID NO: 16932 - DNA, 15 bp, Homo sapiens
cttctaaatcttgct

SEQ ID NO: 16933 - DNA, 15 bp, Homo sapiens
tcttctaaatcttgc

SEQ ID NO: 16934 - DNA, 15 bp, Homo sapiens
ctcttctaaatcttg

SEQ ID NO: 16935 - DNA, 15 bp, Homo sapiens
actcttctaaatctt

SEQ ID NO: 16936 - DNA, 15 bp, Homo sapiens
aactcttctaaatct

SEQ ID NO: 16937 - DNA, 15 bp, Homo sapiens
aaactcttctaaatc

SEQ ID NO: 16938 - DNA, 15 bp, Homo sapiens
aaaactcttctaaat

SEQ ID NO: 16939 - DNA, 15 bp, Homo sapiens
gaaaactcttctaaa

SEQ ID NO: 16940 - DNA, 15 bp, Homo sapiens
agaaaactcttctaa

SEQ ID NO: 16941 - DNA, 15 bp, Homo sapiens
cagaaaactcttcta

SEQ ID NO: 16942 - DNA, 15 bp, Homo sapiens
acagaaaactcttct

SEQ ID NO: 16943 - DNA, 15 bp, Homo sapiens
tacagaaaactcttc

SEQ ID NO: 16944 - DNA, 15 bp, Homo sapiens
ctacagaaaactctt

SEQ ID NO: 16945 - DNA, 15 bp, Homo sapiens
cctacagaaaactct

SEQ ID NO: 16946 - DNA, 15 bp, Homo sapiens
tcctacagaaaactc

SEQ ID NO: 16947 - DNA, 15 bp, Homo sapiens
ttcctacagaaaact

SEQ ID NO: 16948 - DNA, 15 bp, Homo sapiens
attcctacagaaaac

SEQ ID NO: 16949 - DNA, 15 bp, Homo sapiens
aattcctacagaaaa

SEQ ID NO: 16950 - DNA, 15 bp, Homo sapiens
aaattcctacagaaa

SEQ ID NO: 16951 - DNA, 15 bp, Homo sapiens
taaattcctacagaa

SEQ ID NO: 16952 - DNA, 15 bp, Homo sapiens
ataaattcctacaga

SEQ ID NO: 16953 - DNA, 15 bp, Homo sapiens
tataaattcctacag

SEQ ID NO: 16954 - DNA, 15 bp, Homo sapiens
ttataaattcctaca

SEQ ID NO: 16955 - DNA, 15 bp, Homo sapiens
attataaattcctac

SEQ ID NO: 16956 - DNA, 15 bp, Homo sapiens
cattataaattccta

SEQ ID NO: 16957 - DNA, 15 bp, Homo sapiens
ccattataaattcct

SEQ ID NO: 16958 - DNA, 15 bp, Homo sapiens
accattataaattcc

SEQ ID NO: 16959 - DNA, 15 bp, Homo sapiens
taccattataaattc

SEQ ID NO: 16960 - DNA, 15 bp, Homo sapiens
ttaccattataaatt

SEQ ID NO: 16961 - DNA, 15 bp, Homo sapiens
tttaccattataaat

SEQ ID NO: 16962 - DNA, 15 bp, Homo sapiens
ctttaccattataaa

SEQ ID NO: 16963 - DNA, 15 bp, Homo sapiens
cctttaccattataa

SEQ ID NO: 16964 - DNA, 15 bp, Homo sapiens
tcctttaccattata

SEQ ID NO: 16965 - DNA, 15 bp, Homo sapiens
atcctttaccattat

SEQ ID NO: 16966 - DNA, 15 bp, Homo sapiens
gatcctttaccatta

SEQ ID NO: 16967 - DNA, 15 bp, Homo sapiens
tgatcctttaccatt

SEQ ID NO: 16968 - DNA, 15 bp, Homo sapiens
ttgatcctttaccat

SEQ ID NO: 16969 - DNA, 15 bp, Homo sapiens
gttgatcctttacca

SEQ ID NO: 16970 - DNA, 15 bp, Homo sapiens
agttgatcctttacc

SEQ ID NO: 16971 - DNA, 15 bp, Homo sapiens
aagttgatcctttac

SEQ ID NO: 16972 - DNA, 15 bp, Homo sapiens
gaagttgatccttta

SEQ ID NO: 16973 - DNA, 15 bp, Homo sapiens
tgaagttgatccttt

SEQ ID NO: 16974 - DNA, 15 bp, Homo sapiens
atgaagttgatcctt

SEQ ID NO: 16975 - DNA, 15 bp, Homo sapiens
aatgaagttgatcct

SEQ ID NO: 16976 - DNA, 15 bp, Homo sapiens
aaatgaagttgatcc

SEQ ID NO: 16977 - DNA, 15 bp, Homo sapiens
gaaatgaagttgatc

SEQ ID NO: 16978 - DNA, 15 bp, Homo sapiens
ggaaatgaagttgat

SEQ ID NO: 16979 - DNA, 15 bp, Homo sapiens
tggaaatgaagttga

SEQ ID NO: 16980 - DNA, 15 bp, Homo sapiens
ttggaaatgaagttg

SEQ ID NO: 16981 - DNA, 15 bp, Homo sapiens
cttggaaatgaagtt

SEQ ID NO: 16982 - DNA, 15 bp, Homo sapiens
gcttggaaatgaagt

SEQ ID NO: 16983 - DNA, 15 bp, Homo sapiens
agcttggaaatgaag

SEQ ID NO: 16984 - DNA, 15 bp, Homo sapiens
tagcttggaaatgaa

SEQ ID NO: 16985 - DNA, 15 bp, Homo sapiens
atagcttggaaatga

SEQ ID NO: 16986 - DNA, 15 bp, Homo sapiens
aatagcttggaaatg

SEQ ID NO: 16987 - DNA, 15 bp, Homo sapiens
aaatagcttggaaat

SEQ ID NO: 16988 - DNA, 15 bp, Homo sapiens
taaatagcttggaaa

SEQ ID NO: 16989 - DNA, 15 bp, Homo sapiens
ataaatagcttggaa

SEQ ID NO: 16990 - DNA, 15 bp, Homo sapiens
cataaatagcttgga

SEQ ID NO: 16991 - DNA, 15 bp, Homo sapiens
tcataaatagcttgg

SEQ ID NO: 16992 - DNA, 15 bp, Homo sapiens
ctcataaatagcttg

SEQ ID NO: 16993 - DNA, 15 bp, Homo sapiens
cctcataaatagctt

SEQ ID NO: 16994 - DNA, 15 bp, Homo sapiens
ccctcataaatagct

SEQ ID NO: 16995 - DNA, 15 bp, Homo sapiens
accctcataaatagc

SEQ ID NO: 16996 - DNA, 15 bp, Homo sapiens
aaccctcataaatag

SEQ ID NO: 16997 - DNA, 15 bp, Homo sapiens
aaaccctcataaata

SEQ ID NO: 16998 - DNA, 15 bp, Homo sapiens
taaaccctcataaat

SEQ ID NO: 16999 - DNA, 15 bp, Homo sapiens
ataaaccctcataaa

SEQ ID NO: 17000 - DNA, 15 bp, Homo sapiens
cataaaccctcataa

SEQ ID NO: 17001 - DNA, 15 bp, Homo sapiens
acataaaccctcata

SEQ ID NO: 17002 - DNA, 15 bp, Homo sapiens
aacataaaccctcat

SEQ ID NO: 17003 - DNA, 15 bp, Homo sapiens
aaacataaaccctca

SEQ ID NO: 17004 - DNA, 15 bp, Homo sapiens
taaacataaaccctc

SEQ ID NO: 17005 - DNA, 15 bp, Homo sapiens
ctaaacataaaccct

SEQ ID NO: 17006 - DNA, 15 bp, Homo sapiens
cctaaacataaaccc

SEQ ID NO: 17007 - DNA, 15 bp, Homo sapiens
tcctaaacataaacc

SEQ ID NO: 17008 - DNA, 15 bp, Homo sapiens
ttcctaaacataaac

SEQ ID NO: 17009 - DNA, 15 bp, Homo sapiens
tttcctaaacataaa

SEQ ID NO: 17010 - DNA, 15 bp, Homo sapiens
ttttcctaaacataa

SEQ ID NO: 17011 - DNA, 15 bp, Homo sapiens
cttttcctaaacata

SEQ ID NO: 17012 - DNA, 15 bp, Homo sapiens
acttttcctaaacat

SEQ ID NO: 17013 - DNA, 15 bp, Homo sapiens
cacttttcctaaaca

SEQ ID NO: 17014 - DNA, 15 bp, Homo sapiens
gcacttttcctaaac

SEQ ID NO: 17015 - DNA, 15 bp, Homo sapiens
agcacttttcctaaa

SEQ ID NO: 17016 - DNA, 15 bp, Homo sapiens
tagcacttttcctaa

SEQ ID NO: 17017 - DNA, 15 bp, Homo sapiens
ttagcacttttccta

SEQ ID NO: 17018 - DNA, 15 bp, Homo sapiens
cttagcacttttcct

SEQ ID NO: 17019 - DNA, 15 bp, Homo sapiens
gcttagcacttttcc

SEQ ID NO: 17020 - DNA, 15 bp, Homo sapiens
agcttagcacttttc

SEQ ID NO: 17021 - DNA, 15 bp, Homo sapiens
aagcttagcactttt

SEQ ID NO: 17022 - DNA, 15 bp, Homo sapiens
taagcttagcacttt

SEQ ID NO: 17023 - DNA, 15 bp, Homo sapiens
ctaagcttagcactt

SEQ ID NO: 17024 - DNA, 15 bp, Homo sapiens
tctaagcttagcact

SEQ ID NO: 17025 - DNA, 15 bp, Homo sapiens
ctctaagcttagcac

SEQ ID NO: 17026 - DNA, 15 bp, Homo sapiens
tctctaagcttagca

SEQ ID NO: 17027 - DNA, 15 bp, Homo sapiens
ttctctaagcttagc

SEQ ID NO: 17028 - DNA, 15 bp, Homo sapiens
cttctctaagcttag

SEQ ID NO: 17029 - DNA, 15 bp, Homo sapiens
ccttctctaagctta

SEQ ID NO: 17030 - DNA, 15 bp, Homo sapiens
tccttctctaagctt

SEQ ID NO: 17031 - DNA, 15 bp, Homo sapiens
ctccttctctaagct

SEQ ID NO: 17032 - DNA, 15 bp, Homo sapiens
cctccttctctaagc

SEQ ID NO: 17033 - DNA, 15 bp, Homo sapiens
tcctccttctctaag

SEQ ID NO: 17034 - DNA, 15 bp, Homo sapiens
ctcctccttctctaa

SEQ ID NO: 17035 - DNA, 15 bp, Homo sapiens
tctcctccttctcta

SEQ ID NO: 17036 - DNA, 15 bp, Homo sapiens
ttctcctccttctct

SEQ ID NO: 17037 - DNA, 15 bp, Homo sapiens
tttctcctccttctc

SEQ ID NO: 17038 - DNA, 15 bp, Homo sapiens
atttctcctccttct

SEQ ID NO: 17039 - DNA, 15 bp, Homo sapiens
gatttctcctccttc

SEQ ID NO: 17040 - DNA, 15 bp, Homo sapiens
agatttctcctcctt

SEQ ID NO: 17041 - DNA, 15 bp, Homo sapiens
cagatttctcctcct

SEQ ID NO: 17042 - DNA, 15 bp, Homo sapiens
tcagatttctcctcc

SEQ ID NO: 17043 - DNA, 15 bp, Homo sapiens
atcagatttctcctc

SEQ ID NO: 17044 - DNA, 15 bp, Homo sapiens
aatcagatttctcct

SEQ ID NO: 17045 - DNA, 15 bp, Homo sapiens
aaatcagatttctcc

SEQ ID NO: 17046 - DNA, 15 bp, Homo sapiens
aaaatcagatttctc

SEQ ID NO: 17047 - DNA, 15 bp, Homo sapiens
taaaatcagatttct

SEQ ID NO: 17048 - DNA, 15 bp, Homo sapiens
ataaaatcagatttc

SEQ ID NO: 17049 - DNA, 15 bp, Homo sapiens
aataaaatcagattt

SEQ ID NO: 17050 - DNA, 15 bp, Homo sapiens
taataaaatcagatt

SEQ ID NO: 17051 - DNA, 15 bp, Homo sapiens
ttaataaaatcagat

SEQ ID NO: 17052 - DNA, 15 bp, Homo sapiens
attaataaaatcaga

SEQ ID NO: 17053 - DNA, 15 bp, Homo sapiens
cattaataaaatcag

SEQ ID NO: 17054 - DNA, 15 bp, Homo sapiens
tcattaataaaatca

SEQ ID NO: 17055 - DNA, 15 bp, Homo sapiens
ctcattaataaaatc

SEQ ID NO: 17056 - DNA, 15 bp, Homo sapiens
actcattaataaaat

SEQ ID NO: 17057 - DNA, 15 bp, Homo sapiens
cactcattaataaaa

SEQ ID NO: 17058 - DNA, 15 bp, Homo sapiens
acactcattaataaa

SEQ ID NO: 17059 - DNA, 15 bp, Homo sapiens
tacactcattaataa

SEQ ID NO: 17060 - DNA, 15 bp, Homo sapiens
ctacactcattaata

SEQ ID NO: 17061 - DNA, 15 bp, Homo sapiens
gctacactcattaat

SEQ ID NO: 17062 - DNA, 15 bp, Homo sapiens
ggctacactcattaa

SEQ ID NO: 17063 - DNA, 15 bp, Homo sapiens
tggctacactcatta

SEQ ID NO: 17064 - DNA, 15 bp, Homo sapiens
atggctacactcatt

SEQ ID NO: 17065 - DNA, 15 bp, Homo sapiens
tatggctacactcat

SEQ ID NO: 17066 - DNA, 15 bp, Homo sapiens
ttatggctacactca

SEQ ID NO: 17067 - DNA, 15 bp, Homo sapiens
attatggctacactc

SEQ ID NO: 17068 - DNA, 15 bp, Homo sapiens
cattatggctacact

SEQ ID NO: 17069 - DNA, 15 bp, Homo sapiens
ccattatggctacac

SEQ ID NO: 17070 - DNA, 15 bp, Homo sapiens
gccattatggctaca

SEQ ID NO: 17071 - DNA, 15 bp, Homo sapiens
tgccattatggctac

SEQ ID NO: 17072 - DNA, 15 bp, Homo sapiens
atgccattatggcta

SEQ ID NO: 17073 - DNA, 15 bp, Homo sapiens
tatgccattatggct

SEQ ID NO: 17074 - DNA, 15 bp, Homo sapiens
atatgccattatggc

SEQ ID NO: 17075 - DNA, 15 bp, Homo sapiens
gatatgccattatgg

SEQ ID NO: 17076 - DNA, 15 bp, Homo sapiens
ggatatgccattatg

SEQ ID NO: 17077 - DNA, 15 bp, Homo sapiens
aggatatgccattat

SEQ ID NO: 17078 - DNA, 15 bp, Homo sapiens
caggatatgccatta

SEQ ID NO: 17079 - DNA, 15 bp, Homo sapiens
ccaggatatgccatt

SEQ ID NO: 17080 - DNA, 15 bp, Homo sapiens
gccaggatatgccat

SEQ ID NO: 17081 - DNA, 15 bp, Homo sapiens
tgccaggatatgcca

SEQ ID NO: 17082 - DNA, 15 bp, Homo sapiens
ctgccaggatatgcc

SEQ ID NO: 17083 - DNA, 15 bp, Homo sapiens
tctgccaggatatgc

SEQ ID NO: 17084 - DNA, 15 bp, Homo sapiens
ttctgccaggatatg

SEQ ID NO: 17085 - DNA, 15 bp, Homo sapiens
cttctgccaggatat

SEQ ID NO: 17086 - DNA, 15 bp, Homo sapiens
acttctgccaggata

SEQ ID NO: 17087 - DNA, 15 bp, Homo sapiens
gacttctgccaggat

SEQ ID NO: 17088 - DNA, 15 bp, Homo sapiens
tgacttctgccagga

SEQ ID NO: 17089 - DNA, 15 bp, Homo sapiens
ttgacttctgccagg

SEQ ID NO: 17090 - DNA, 15 bp, Homo sapiens
gttgacttctgccag

SEQ ID NO: 17091 - DNA, 15 bp, Homo sapiens
agttgacttctgcca

SEQ ID NO: 17092 - DNA, 15 bp, Homo sapiens
aagttgacttctgcc

SEQ ID NO: 17093 - DNA, 15 bp, Homo sapiens
aaagttgacttctgc

SEQ ID NO: 17094 - DNA, 15 bp, Homo sapiens
caaagttgacttctg

SEQ ID NO: 17095 - DNA, 15 bp, Homo sapiens
ccaaagttgacttct

SEQ ID NO: 17096 - DNA, 15 bp, Homo sapiens
accaaagttgacttc

SEQ ID NO: 17097 - DNA, 15 bp, Homo sapiens
aaccaaagttgactt

SEQ ID NO: 17098 - DNA, 15 bp, Homo sapiens
aaaccaaagttgact

SEQ ID NO: 17099 - DNA, 15 bp, Homo sapiens
gaaaccaaagttgac

SEQ ID NO: 17100 - DNA, 15 bp, Homo sapiens
agaaaccaaagttga

SEQ ID NO: 17101 - DNA, 15 bp, Homo sapiens
tagaaaccaaagttg

SEQ ID NO: 17102 - DNA, 15 bp, Homo sapiens
ctagaaaccaaagtt

SEQ ID NO: 17103 - DNA, 15 bp, Homo sapiens
tctagaaaccaaagt

SEQ ID NO: 17104 - DNA, 15 bp, Homo sapiens
ctctagaaaccaaag

SEQ ID NO: 17105 - DNA, 15 bp, Homo sapiens
cctctagaaaccaaa

SEQ ID NO: 17106 - DNA, 15 bp, Homo sapiens
ccctctagaaaccaa

SEQ ID NO: 17107 - DNA, 15 bp, Homo sapiens
tccctctagaaacca

SEQ ID NO: 17108 - DNA, 15 bp, Homo sapiens
ctccctctagaaacc

SEQ ID NO: 17109 - DNA, 15 bp, Homo sapiens
cctccctctagaaac

SEQ ID NO: 17110 - DNA, 15 bp, Homo sapiens
gcctccctctagaaa

SEQ ID NO: 17111 - DNA, 15 bp, Homo sapiens
agcctccctctagaa

SEQ ID NO: 17112 - DNA, 15 bp, Homo sapiens
tagcctccctctaga

SEQ ID NO: 17113 - DNA, 15 bp, Homo sapiens
atagcctccctctag

SEQ ID NO: 17114 - DNA, 15 bp, Homo sapiens
aatagcctccctcta

SEQ ID NO: 17115 - DNA, 15 bp, Homo sapiens
taatagcctccctct

SEQ ID NO: 17116 - DNA, 15 bp, Homo sapiens
ataatagcctccctc

SEQ ID NO: 17117 - DNA, 15 bp, Homo sapiens
cataatagcctccct

SEQ ID NO: 17118 - DNA, 15 bp, Homo sapiens
tcataatagcctccc

SEQ ID NO: 17119 - DNA, 15 bp, Homo sapiens
ttcataatagcctcc

SEQ ID NO: 17120 - DNA, 15 bp, Homo sapiens
tttcataatagcctc

SEQ ID NO: 17121 - DNA, 15 bp, Homo sapiens
ttttcataatagcct

SEQ ID NO: 17122 - DNA, 15 bp, Homo sapiens
cttttcataatagcc

SEQ ID NO: 17123 - DNA, 15 bp, Homo sapiens
tcttttcataatagc

SEQ ID NO: 17124 - DNA, 15 bp, Homo sapiens
ttcttttcataatag

SEQ ID NO: 17125 - DNA, 15 bp, Homo sapiens
tttcttttcataata

SEQ ID NO: 17126 - DNA, 15 bp, Homo sapiens
atttcttttcataat

SEQ ID NO: 17127 - DNA, 15 bp, Homo sapiens
tatttcttttcataa

SEQ ID NO: 17128 - DNA, 15 bp, Homo sapiens
gtatttcttttcata

SEQ ID NO: 17129 - DNA, 15 bp, Homo sapiens
ggtatttcttttcat

SEQ ID NO: 17130 - DNA, 15 bp, Homo sapiens
aggtatttcttttca

SEQ ID NO: 17131 - DNA, 15 bp, Homo sapiens
caggtatttcttttc

SEQ ID NO: 17132 - DNA, 15 bp, Homo sapiens
ccaggtatttctttt

SEQ ID NO: 17133 - DNA, 15 bp, Homo sapiens
tccaggtatttcttt

SEQ ID NO: 17134 - DNA, 15 bp, Homo sapiens
ttccaggtatttctt

SEQ ID NO: 17135 - DNA, 15 bp, Homo sapiens
gttccaggtatttct

SEQ ID NO: 17136 - DNA, 15 bp, Homo sapiens
tgttccaggtatttc

SEQ ID NO: 17137 - DNA, 15 bp, Homo sapiens
atgttccaggtattt

SEQ ID NO: 17138 - DNA, 15 bp, Homo sapiens
aatgttccaggtatt

SEQ ID NO: 17139 - DNA, 15 bp, Homo sapiens
gaatgttccaggtat

SEQ ID NO: 17140 - DNA, 15 bp, Homo sapiens
ggaatgttccaggta

SEQ ID NO: 17141 - DNA, 15 bp, Homo sapiens
gggaatgttccaggt

SEQ ID NO: 17142 - DNA, 15 bp, Homo sapiens
ggggaatgttccagg

SEQ ID NO: 17143 - DNA, 15 bp, Homo sapiens
aggggaatgttccag

SEQ ID NO: 17144 - DNA, 15 bp, Homo sapiens
caggggaatgttcca

SEQ ID NO: 17145 - DNA, 15 bp, Homo sapiens
ccaggggaatgttcc

SEQ ID NO: 17146 - DNA, 15 bp, Homo sapiens
cccaggggaatgttc

SEQ ID NO: 17147 - DNA, 15 bp, Homo sapiens
acccaggggaatgtt

SEQ ID NO: 17148 - DNA, 15 bp, Homo sapiens
aacccaggggaatgt

SEQ ID NO: 17149 - DNA, 15 bp, Homo sapiens
aaacccaggggaatg

SEQ ID NO: 17150 - DNA, 15 bp, Homo sapiens
caaacccaggggaat

SEQ ID NO: 17151 - DNA, 15 bp, Homo sapiens
ccaaacccaggggaa

SEQ ID NO: 17152 - DNA, 15 bp, Homo sapiens
tccaaacccagggga

SEQ ID NO: 17153 - DNA, 15 bp, Homo sapiens
ttccaaacccagggg

SEQ ID NO: 17154 - DNA, 15 bp, Homo sapiens
cttccaaacccaggg

SEQ ID NO: 17155 - DNA, 15 bp, Homo sapiens
ccttccaaacccagg

SEQ ID NO: 17156 - DNA, 15 bp, Homo sapiens
accttccaaacccag

SEQ ID NO: 17157 - DNA, 15 bp, Homo sapiens
caccttccaaaccca

SEQ ID NO: 17158 - DNA, 15 bp, Homo sapiens
tcaccttccaaaccc

SEQ ID NO: 17159 - DNA, 15 bp, Homo sapiens
ctcaccttccaaacc

SEQ ID NO: 17160 - DNA, 15 bp, Homo sapiens
actcaccttccaaac

SEQ ID NO: 17161 - DNA, 15 bp, Homo sapiens
aactcaccttccaaa

SEQ ID NO: 17162 - DNA, 15 bp, Homo sapiens
gaactcaccttccaa

SEQ ID NO: 17163 - DNA, 15 bp, Homo sapiens
agaactcaccttcca

SEQ ID NO: 17164 - DNA, 15 bp, Homo sapiens
tagaactcaccttcc

SEQ ID NO: 17165 - DNA, 15 bp, Homo sapiens
ctagaactcaccttc

SEQ ID NO: 17166 - DNA, 15 bp, Homo sapiens
cctagaactcacctt

SEQ ID NO: 17167 - DNA, 15 bp, Homo sapiens
acctagaactcacct

SEQ ID NO: 17168 - DNA, 15 bp, Homo sapiens
aacctagaactcacc

SEQ ID NO: 17169 - DNA, 15 bp, Homo sapiens
gaacctagaactcac

SEQ ID NO: 17170 - DNA, 15 bp, Homo sapiens
tgaacctagaactca

SEQ ID NO: 17171 - DNA, 15 bp, Homo sapiens
ttgaacctagaactc

SEQ ID NO: 17172 - DNA, 15 bp, Homo sapiens
attgaacctagaact

SEQ ID NO: 17173 - DNA, 15 bp, Homo sapiens
cattgaacctagaac

SEQ ID NO: 17174 - DNA, 15 bp, Homo sapiens
tcattgaacctagaa

SEQ ID NO: 17175 - DNA, 15 bp, Homo sapiens
atcattgaacctaga

SEQ ID NO: 17176 - DNA, 15 bp, Homo sapiens
catcattgaacctag

SEQ ID NO: 17177 - DNA, 15 bp, Homo sapiens
ccatcattgaaccta

SEQ ID NO: 17178 - DNA, 15 bp, Homo sapiens
cccatcattgaacct

SEQ ID NO: 17179 - DNA, 15 bp, Homo sapiens
tcccatcattgaacc

SEQ ID NO: 17180 - DNA, 15 bp, Homo sapiens
ttcccatcattgaac

SEQ ID NO: 17181 - DNA, 15 bp, Homo sapiens
cttcccatcattgaa

SEQ ID NO: 17182 - DNA, 15 bp, Homo sapiens
tcttcccatcattga

SEQ ID NO: 17183 - DNA, 15 bp, Homo sapiens
ttcttcccatcattg

SEQ ID NO: 17184 - DNA, 15 bp, Homo sapiens
attcttcccatcatt

SEQ ID NO: 17185 - DNA, 15 bp, Homo sapiens
aattcttcccatcat

SEQ ID NO: 17186 - DNA, 15 bp, Homo sapiens
aaattcttcccatca

SEQ ID NO: 17187 - DNA, 15 bp, Homo sapiens
aaaattcttcccatc

SEQ ID NO: 17188 - DNA, 15 bp, Homo sapiens
taaaattcttcccat

SEQ ID NO: 17189 - DNA, 15 bp, Homo sapiens
ctaaaattcttccca

SEQ ID NO: 17190 - DNA, 15 bp, Homo sapiens
tctaaaattcttccc

SEQ ID NO: 17191 - DNA, 15 bp, Homo sapiens
ctctaaaattcttcc

SEQ ID NO: 17192 - DNA, 15 bp, Homo sapiens
cctctaaaattcttc

SEQ ID NO: 17193 - DNA, 15 bp, Homo sapiens
acctctaaaattctt

SEQ ID NO: 17194 - DNA, 15 bp, Homo sapiens
gacctctaaaattct

SEQ ID NO: 17195 - DNA, 15 bp, Homo sapiens
ggacctctaaaattc

SEQ ID NO: 17196 - DNA, 15 bp, Homo sapiens
tggacctctaaaatt

SEQ ID NO: 17197 - DNA, 15 bp, Homo sapiens
ttggacctctaaaat

SEQ ID NO: 17198 - DNA, 15 bp, Homo sapiens
cttggacctctaaaa

SEQ ID NO: 17199 - DNA, 15 bp, Homo sapiens
tcttggacctctaaa

SEQ ID NO: 17200 - DNA, 15 bp, Homo sapiens
atcttggacctctaa

SEQ ID NO: 17201 - DNA, 15 bp, Homo sapiens
tatcttggacctcta

SEQ ID NO: 17202 - DNA, 15 bp, Homo sapiens
ttatcttggacctct

SEQ ID NO: 17203 - DNA, 15 bp, Homo sapiens
tttatcttggacctc

SEQ ID NO: 17204 - DNA, 15 bp, Homo sapiens
ttttatcttggacct

SEQ ID NO: 17205 - DNA, 15 bp, Homo sapiens
cttttatcttggacc

SEQ ID NO: 17206 - DNA, 15 bp, Homo sapiens
ccttttatcttggac

SEQ ID NO: 17207 - DNA, 15 bp, Homo sapiens
cccttttatcttgga

SEQ ID NO: 17208 - DNA, 15 bp, Homo sapiens
gcccttttatcttgg

SEQ ID NO: 17209 - DNA, 15 bp, Homo sapiens
tgcccttttatcttg

SEQ ID NO: 17210 - DNA, 15 bp, Homo sapiens
ttgcccttttatctt

SEQ ID NO: 17211 - DNA, 15 bp, Homo sapiens
tttgcccttttatct

SEQ ID NO: 17212 - DNA, 15 bp, Homo sapiens
ctttgcccttttatc

SEQ ID NO: 17213 - DNA, 15 bp, Homo sapiens
tctttgcccttttat

SEQ ID NO: 17214 - DNA, 15 bp, Homo sapiens
atctttgccctttta

SEQ ID NO: 17215 - DNA, 15 bp, Homo sapiens
aatctttgccctttt

SEQ ID NO: 17216 - DNA, 15 bp, Homo sapiens
taatctttgcccttt

SEQ ID NO: 17217 - DNA, 15 bp, Homo sapiens
ttaatctttgccctt

SEQ ID NO: 17218 - DNA, 15 bp, Homo sapiens
tttaatctttgccct

SEQ ID NO: 17219 - DNA, 15 bp, Homo sapiens
atttaatctttgccc

SEQ ID NO: 17220 - DNA, 15 bp, Homo sapiens
aatttaatctttgcc

SEQ ID NO: 17221 - DNA, 15 bp, Homo sapiens
aaatttaatctttgc

SEQ ID NO: 17222 - DNA, 15 bp, Homo sapiens
aaaatttaatctttg

SEQ ID NO: 17223 - DNA, 15 bp, Homo sapiens
caaaatttaatcttt

SEQ ID NO: 17224 - DNA, 15 bp, Homo sapiens
acaaaatttaatctt

SEQ ID NO: 17225 - DNA, 15 bp, Homo sapiens
gacaaaatttaatct

SEQ ID NO: 17226 - DNA, 15 bp, Homo sapiens
agacaaaatttaatc

SEQ ID NO: 17227 - DNA, 15 bp, Homo sapiens
gagacaaaatttaat

SEQ ID NO: 17228 - DNA, 15 bp, Homo sapiens
agagacaaaatttaa

SEQ ID NO: 17229 - DNA, 15 bp, Homo sapiens
gagagacaaaattta

SEQ ID NO: 17230 - DNA, 15 bp, Homo sapiens
tgagagacaaaattt

SEQ ID NO: 17231 - DNA, 15 bp, Homo sapiens
atgagagacaaaatt

SEQ ID NO: 17232 - DNA, 15 bp, Homo sapiens
catgagagacaaaat

SEQ ID NO: 17233 - DNA, 15 bp, Homo sapiens
tcatgagagacaaaa

SEQ ID NO: 17234 - DNA, 15 bp, Homo sapiens
ctcatgagagacaaa

SEQ ID NO: 17235 - DNA, 15 bp, Homo sapiens
actcatgagagacaa

SEQ ID NO: 17236 - DNA, 15 bp, Homo sapiens
aactcatgagagaca

SEQ ID NO: 17237 - DNA, 15 bp, Homo sapiens
gaactcatgagagac

SEQ ID NO: 17238 - DNA, 15 bp, Homo sapiens
agaactcatgagaga

SEQ ID NO: 17239 - DNA, 15 bp, Homo sapiens
gagaactcatgagag

SEQ ID NO: 17240 - DNA, 15 bp, Homo sapiens
agagaactcatgaga

SEQ ID NO: 17241 - DNA, 15 bp, Homo sapiens
cagagaactcatgag

SEQ ID NO: 17242 - DNA, 15 bp, Homo sapiens
ccagagaactcatga

SEQ ID NO: 17243 - DNA, 15 bp, Homo sapiens
gccagagaactcatg

SEQ ID NO: 17244 - DNA, 15 bp, Homo sapiens
agccagagaactcat

SEQ ID NO: 17245 - DNA, 15 bp, Homo sapiens
gagccagagaactca

SEQ ID NO: 17246 - DNA, 15 bp, Homo sapiens
tgagccagagaactc

SEQ ID NO: 17247 - DNA, 15 bp, Homo sapiens
ctgagccagagaact

SEQ ID NO: 17248 - DNA, 15 bp, Homo sapiens
cctgagccagagaac

SEQ ID NO: 17249 - DNA, 15 bp, Homo sapiens
acctgagccagagaa

SEQ ID NO: 17250 - DNA, 15 bp, Homo sapiens
cacctgagccagaga

SEQ ID NO: 17251 - DNA, 15 bp, Homo sapiens
ccacctgagccagag

SEQ ID NO: 17252 - DNA, 15 bp, Homo sapiens
accacctgagccaga

SEQ ID NO: 17253 - DNA, 15 bp, Homo sapiens
caccacctgagccag

SEQ ID NO: 17254 - DNA, 15 bp, Homo sapiens
acaccacctgagcca

SEQ ID NO: 17255 - DNA, 15 bp, Homo sapiens
cacaccacctgagcc

SEQ ID NO: 17256 - DNA, 15 bp, Homo sapiens
tcacaccacctgagc

SEQ ID NO: 17257 - DNA, 15 bp, Homo sapiens
ttcacaccacctgag

SEQ ID NO: 17258 - DNA, 15 bp, Homo sapiens
gttcacaccacctga

SEQ ID NO: 17259 - DNA, 15 bp, Homo sapiens
agttcacaccacctg

SEQ ID NO: 17260 - DNA, 15 bp, Homo sapiens
aagttcacaccacct

SEQ ID NO: 17261 - DNA, 15 bp, Homo sapiens
aaagttcacaccacc

SEQ ID NO: 17262 - DNA, 15 bp, Homo sapiens
caaagttcacaccac

SEQ ID NO: 17263 - DNA, 15 bp, Homo sapiens
gcaaagttcacacca

SEQ ID NO: 17264 - DNA, 15 bp, Homo sapiens
tgcaaagttcacacc

SEQ ID NO: 17265 - DNA, 15 bp, Homo sapiens
ctgcaaagttcacac

SEQ ID NO: 17266 - DNA, 15 bp, Homo sapiens
tctgcaaagttcaca

SEQ ID NO: 17267 - DNA, 15 bp, Homo sapiens
gtctgcaaagttcac

SEQ ID NO: 17268 - DNA, 15 bp, Homo sapiens
tgtctgcaaagttca

SEQ ID NO: 17269 - DNA, 15 bp, Homo sapiens
ctgtctgcaaagttc

SEQ ID NO: 17270 - DNA, 15 bp, Homo sapiens
actgtctgcaaagtt

SEQ ID NO: 17271 - DNA, 15 bp, Homo sapiens
gactgtctgcaaagt

SEQ ID NO: 17272 - DNA, 15 bp, Homo sapiens
agactgtctgcaaag

SEQ ID NO: 17273 - DNA, 15 bp, Homo sapiens
gagactgtctgcaaa

SEQ ID NO: 17274 - DNA, 15 bp, Homo sapiens
agagactgtctgcaa

SEQ ID NO: 17275 - DNA, 15 bp, Homo sapiens
aagagactgtctgca

SEQ ID NO: 17276 - DNA, 15 bp, Homo sapiens
aaagagactgtctgc

SEQ ID NO: 17277 - DNA, 15 bp, Homo sapiens
taaagagactgtctg

SEQ ID NO: 17278 - DNA, 15 bp, Homo sapiens
ttaaagagactgtct

SEQ ID NO: 17279 - DNA, 15 bp, Homo sapiens
attaaagagactgtc

SEQ ID NO: 17280 - DNA, 15 bp, Homo sapiens
aattaaagagactgt

SEQ ID NO: 17281 - DNA, 15 bp, Homo sapiens
gaattaaagagactg

SEQ ID NO: 17282 - DNA, 15 bp, Homo sapiens
tgaattaaagagact

SEQ ID NO: 17283 - DNA, 15 bp, Homo sapiens
gtgaattaaagagac

SEQ ID NO: 17284 - DNA, 15 bp, Homo sapiens
agtgaattaaagaga

SEQ ID NO: 17285 - DNA, 15 bp, Homo sapiens
gagtgaattaaagag

SEQ ID NO: 17286 - DNA, 15 bp, Homo sapiens
tgagtgaattaaaga

SEQ ID NO: 17287 - DNA, 15 bp, Homo sapiens
atgagtgaattaaag

SEQ ID NO: 17288 - DNA, 15 bp, Homo sapiens
tatgagtgaattaaa

SEQ ID NO: 17289 - DNA, 15 bp, Homo sapiens
gtatgagtgaattaa

SEQ ID NO: 17290 - DNA, 15 bp, Homo sapiens
tgtatgagtgaatta

SEQ ID NO: 17291 - DNA, 15 bp, Homo sapiens
atgtatgagtgaatt

SEQ ID NO: 17292 - DNA, 15 bp, Homo sapiens
catgtatgagtgaat

SEQ ID NO: 17293 - DNA, 15 bp, Homo sapiens
gcatgtatgagtgaa

SEQ ID NO: 17294 - DNA, 15 bp, Homo sapiens
agcatgtatgagtga

SEQ ID NO: 17295 - DNA, 15 bp, Homo sapiens
tagcatgtatgagtg

SEQ ID NO: 17296 - DNA, 15 bp, Homo sapiens
ctagcatgtatgagt

SEQ ID NO: 17297 - DNA, 15 bp, Homo sapiens
actagcatgtatgag

SEQ ID NO: 17298 - DNA, 15 bp, Homo sapiens
gactagcatgtatga

SEQ ID NO: 17299 - DNA, 15 bp, Homo sapiens
agactagcatgtatg

SEQ ID NO: 17300 - DNA, 15 bp, Homo sapiens
gagactagcatgtat

SEQ ID NO: 17301 - DNA, 15 bp, Homo sapiens
ggagactagcatgta

SEQ ID NO: 17302 - DNA, 15 bp, Homo sapiens
gggagactagcatgt

SEQ ID NO: 17303 - DNA, 15 bp, Homo sapiens
tgggagactagcatg

SEQ ID NO: 17304 - DNA, 15 bp, Homo sapiens
ctgggagactagcat

SEQ ID NO: 17305 - DNA, 15 bp, Homo sapiens
gctgggagactagca

SEQ ID NO: 17306 - DNA, 15 bp, Homo sapiens
agctgggagactagc

SEQ ID NO: 17307 - DNA, 15 bp, Homo sapiens
gagctgggagactag

SEQ ID NO: 17308 - DNA, 15 bp, Homo sapiens
tgagctgggagacta

SEQ ID NO: 17309 - DNA, 15 bp, Homo sapiens
ctgagctgggagact

SEQ ID NO: 17310 - DNA, 15 bp, Homo sapiens
gctgagctgggagac

SEQ ID NO: 17311 - DNA, 15 bp, Homo sapiens
tgctgagctgggaga

SEQ ID NO: 17312 - DNA, 15 bp, Homo sapiens
ttgctgagctgggag

SEQ ID NO: 17313 - DNA, 15 bp, Homo sapiens
cttgctgagctggga

SEQ ID NO: 17314 - DNA, 15 bp, Homo sapiens
ccttgctgagctggg

SEQ ID NO: 17315 - DNA, 15 bp, Homo sapiens
cccttgctgagctgg

SEQ ID NO: 17316 - DNA, 15 bp, Homo sapiens
gcccttgctgagctg

SEQ ID NO: 17317 - DNA, 15 bp, Homo sapiens
agcccttgctgagct

SEQ ID NO: 17318 - DNA, 15 bp, Homo sapiens
aagcccttgctgagc

SEQ ID NO: 17319 - DNA, 15 bp, Homo sapiens
aaagcccttgctgag

SEQ ID NO: 17320 - DNA, 15 bp, Homo sapiens
caaagcccttgctga

SEQ ID NO: 17321 - DNA, 15 bp, Homo sapiens
tcaaagcccttgctg

SEQ ID NO: 17322 - DNA, 15 bp, Homo sapiens
ctcaaagcccttgct

SEQ ID NO: 17323 - DNA, 15 bp, Homo sapiens
tctcaaagcccttgc

SEQ ID NO: 17324 - DNA, 15 bp, Homo sapiens
ctctcaaagcccttg

SEQ ID NO: 17325 - DNA, 15 bp, Homo sapiens
tctctcaaagccctt

SEQ ID NO: 17326 - DNA, 15 bp, Homo sapiens
ctctctcaaagccct

SEQ ID NO: 17327 - DNA, 15 bp, Homo sapiens
gctctctcaaagccc

SEQ ID NO: 17328 - DNA, 15 bp, Homo sapiens
tgctctctcaaagcc

SEQ ID NO: 17329 - DNA, 15 bp, Homo sapiens
ctgctctctcaaagc

SEQ ID NO: 17330 - DNA, 15 bp, Homo sapiens
cctgctctctcaaag

SEQ ID NO: 17331 - DNA, 15 bp, Homo sapiens
acctgctctctcaaa

SEQ ID NO: 17332 - DNA, 15 bp, Homo sapiens
cacctgctctctcaa

SEQ ID NO: 17333 - DNA, 15 bp, Homo sapiens
acacctgctctctca

SEQ ID NO: 17334 - DNA, 15 bp, Homo sapiens
gacacctgctctctc

SEQ ID NO: 17335 - DNA, 15 bp, Homo sapiens
agacacctgctctct

SEQ ID NO: 17336 - DNA, 15 bp, Homo sapiens
cagacacctgctctc

SEQ ID NO: 17337 - DNA, 15 bp, Homo sapiens
acagacacctgctct

SEQ ID NO: 17338 - DNA, 15 bp, Homo sapiens
tacagacacctgctc

SEQ ID NO: 17339 - DNA, 15 bp, Homo sapiens
atacagacacctgct

SEQ ID NO: 17340 - DNA, 15 bp, Homo sapiens
catacagacacctgc

SEQ ID NO: 17341 - DNA, 15 bp, Homo sapiens
gcatacagacacctg

SEQ ID NO: 17342 - DNA, 15 bp, Homo sapiens
agcatacagacacct

SEQ ID NO: 17343 - DNA, 15 bp, Homo sapiens
gagcatacagacacc

SEQ ID NO: 17344 - DNA, 15 bp, Homo sapiens
agagcatacagacac

SEQ ID NO: 17345 - DNA, 15 bp, Homo sapiens
cagagcatacagaca

SEQ ID NO: 17346 - DNA, 15 bp, Homo sapiens
ccagagcatacagac

SEQ ID NO: 17347 - DNA, 15 bp, Homo sapiens
accagagcatacaga

SEQ ID NO: 17348 - DNA, 15 bp, Homo sapiens
taccagagcatacag

SEQ ID NO: 17349 - DNA, 15 bp, Homo sapiens
ttaccagagcataca

SEQ ID NO: 17350 - DNA, 15 bp, Homo sapiens
cttaccagagcatac

SEQ ID NO: 17351 - DNA, 15 bp, Homo sapiens
acttaccagagcata

SEQ ID NO: 17352 - DNA, 15 bp, Homo sapiens
cacttaccagagcat

SEQ ID NO: 17353 - DNA, 15 bp, Homo sapiens
tcacttaccagagca

SEQ ID NO: 17354 - DNA, 15 bp, Homo sapiens
ttcacttaccagagc

SEQ ID NO: 17355 - DNA, 15 bp, Homo sapiens
cttcacttaccagag

SEQ ID NO: 17356 - DNA, 15 bp, Homo sapiens
ccttcacttaccaga

SEQ ID NO: 17357 - DNA, 15 bp, Homo sapiens
gccttcacttaccag

SEQ ID NO: 17358 - DNA, 15 bp, Homo sapiens
tgccttcacttacca

SEQ ID NO: 17359 - DNA, 15 bp, Homo sapiens
ttgccttcacttacc

SEQ ID NO: 17360 - DNA, 15 bp, Homo sapiens
tttgccttcacttac

SEQ ID NO: 17361 - DNA, 15 bp, Homo sapiens
ctttgccttcactta

SEQ ID NO: 17362 - DNA, 15 bp, Homo sapiens
actttgccttcactt

SEQ ID NO: 17363 - DNA, 15 bp, Homo sapiens
cactttgccttcact

SEQ ID NO: 17364 - DNA, 15 bp, Homo sapiens
gcactttgccttcac

SEQ ID NO: 17365 - DNA, 15 bp, Homo sapiens
tgcactttgccttca

SEQ ID NO: 17366 - DNA, 15 bp, Homo sapiens
atgcactttgccttc

SEQ ID NO: 17367 - DNA, 15 bp, Homo sapiens
tatgcactttgcctt

SEQ ID NO: 17368 - DNA, 15 bp, Homo sapiens
ttatgcactttgcct

SEQ ID NO: 17369 - DNA, 15 bp, Homo sapiens
cttatgcactttgcc

SEQ ID NO: 17370 - DNA, 15 bp, Homo sapiens
ccttatgcactttgc

SEQ ID NO: 17371 - DNA, 15 bp, Homo sapiens
tccttatgcactttg

SEQ ID NO: 17372 - DNA, 15 bp, Homo sapiens
ctccttatgcacttt

SEQ ID NO: 17373 - DNA, 15 bp, Homo sapiens
cctccttatgcactt

SEQ ID NO: 17374 - DNA, 15 bp, Homo sapiens
acctccttatgcact

SEQ ID NO: 17375 - DNA, 15 bp, Homo sapiens
aacctccttatgcac

SEQ ID NO: 17376 - DNA, 15 bp, Homo sapiens
caacctccttatgca

SEQ ID NO: 17377 - DNA, 15 bp, Homo sapiens
ccaacctccttatgc

SEQ ID NO: 17378 - DNA, 15 bp, Homo sapiens
cccaacctccttatg

SEQ ID NO: 17379 - DNA, 15 bp, Homo sapiens
ccccaacctccttat

SEQ ID NO: 17380 - DNA, 15 bp, Homo sapiens
accccaacctcctta

SEQ ID NO: 17381 - DNA, 15 bp, Homo sapiens
gaccccaacctcctt

SEQ ID NO: 17382 - DNA, 15 bp, Homo sapiens
ggaccccaacctcct

SEQ ID NO: 17383 - DNA, 15 bp, Homo sapiens
tggaccccaacctcc

SEQ ID NO: 17384 - DNA, 15 bp, Homo sapiens
atggaccccaacctc

SEQ ID NO: 17385 - DNA, 15 bp, Homo sapiens
tatggaccccaacct

SEQ ID NO: 17386 - DNA, 15 bp, Homo sapiens
ttatggaccccaacc

SEQ ID NO: 17387 - DNA, 15 bp, Homo sapiens
attatggaccccaac

SEQ ID NO: 17388 - DNA, 15 bp, Homo sapiens
cattatggaccccaa

SEQ ID NO: 17389 - DNA, 15 bp, Homo sapiens
ccattatggacccca

SEQ ID NO: 17390 - DNA, 15 bp, Homo sapiens
gccattatggacccc

SEQ ID NO: 17391 - DNA, 15 bp, Homo sapiens
cgccattatggaccc

SEQ ID NO: 17392 - DNA, 15 bp, Homo sapiens
tcgccattatggacc

SEQ ID NO: 17393 - DNA, 15 bp, Homo sapiens
ttcgccattatggac

SEQ ID NO: 17394 - DNA, 15 bp, Homo sapiens
cttcgccattatgga

SEQ ID NO: 17395 - DNA, 15 bp, Homo sapiens
tcttcgccattatgg

SEQ ID NO: 17396 - DNA, 15 bp, Homo sapiens
ctcttcgccattatg

SEQ ID NO: 17397 - DNA, 15 bp, Homo sapiens
tctcttcgccattat

SEQ ID NO: 17398 - DNA, 15 bp, Homo sapiens
ttctcttcgccatta

SEQ ID NO: 17399 - DNA, 15 bp, Homo sapiens
cttctcttcgccatt

SEQ ID NO: 17400 - DNA, 15 bp, Homo sapiens
ccttctcttcgccat

SEQ ID NO: 17401 - DNA, 15 bp, Homo sapiens
tccttctcttcgcca

SEQ ID NO: 17402 - DNA, 15 bp, Homo sapiens
ctccttctcttcgcc

SEQ ID NO: 17403 - DNA, 15 bp, Homo sapiens
gctccttctcttcgc

SEQ ID NO: 17404 - DNA, 15 bp, Homo sapiens
ggctccttctcttcg

SEQ ID NO: 17405 - DNA, 15 bp, Homo sapiens
gggctccttctcttc

SEQ ID NO: 17406 - DNA, 15 bp, Homo sapiens
agggctccttctctt

SEQ ID NO: 17407 - DNA, 15 bp, Homo sapiens
aagggctccttctct

SEQ ID NO: 17408 - DNA, 15 bp, Homo sapiens
gaagggctccttctc

SEQ ID NO: 17409 - DNA, 15 bp, Homo sapiens
tgaagggctccttct

SEQ ID NO: 17410 - DNA, 15 bp, Homo sapiens
ctgaagggctccttc

SEQ ID NO: 17411 - DNA, 15 bp, Homo sapiens
actgaagggctcctt

SEQ ID NO: 17412 - DNA, 15 bp, Homo sapiens
gactgaagggctcct

SEQ ID NO: 17413 - DNA, 15 bp, Homo sapiens
tgactgaagggctcc

SEQ ID NO: 17414 - DNA, 15 bp, Homo sapiens
ctgactgaagggctc

SEQ ID NO: 17415 - DNA, 15 bp, Homo sapiens
tctgactgaagggct

SEQ ID NO: 17416 - DNA, 15 bp, Homo sapiens
ctctgactgaagggc

SEQ ID NO: 17417 - DNA, 15 bp, Homo sapiens
actctgactgaaggg

SEQ ID NO: 17418 - DNA, 15 bp, Homo sapiens
cactctgactgaagg

SEQ ID NO: 17419 - DNA, 15 bp, Homo sapiens
ccactctgactgaag

SEQ ID NO: 17420 - DNA, 15 bp, Homo sapiens
gccactctgactgaa

SEQ ID NO: 17421 - DNA, 15 bp, Homo sapiens
agccactctgactga

SEQ ID NO: 17422 - DNA, 15 bp, Homo sapiens
aagccactctgactg

SEQ ID NO: 17423 - DNA, 15 bp, Homo sapiens
aaagccactctgact

SEQ ID NO: 17424 - DNA, 15 bp, Homo sapiens
caaagccactctgac

SEQ ID NO: 17425 - DNA, 15 bp, Homo sapiens
tcaaagccactctga

SEQ ID NO: 17426 - DNA, 15 bp, Homo sapiens
ttcaaagccactctg

SEQ ID NO: 17427 - DNA, 15 bp, Homo sapiens
attcaaagccactct

SEQ ID NO: 17428 - DNA, 15 bp, Homo sapiens
gattcaaagccactc

SEQ ID NO: 17429 - DNA, 15 bp, Homo sapiens
agattcaaagccact

SEQ ID NO: 17430 - DNA, 15 bp, Homo sapiens
aagattcaaagccac

SEQ ID NO: 17431 - DNA, 15 bp, Homo sapiens
caagattcaaagcca

SEQ ID NO: 17432 - DNA, 15 bp, Homo sapiens
ccaagattcaaagcc

SEQ ID NO: 17433 - DNA, 15 bp, Homo sapiens
gccaagattcaaagc

SEQ ID NO: 17434 - DNA, 15 bp, Homo sapiens
agccaagattcaaag

SEQ ID NO: 17435 - DNA, 15 bp, Homo sapiens
gagccaagattcaaa

SEQ ID NO: 17436 - DNA, 15 bp, Homo sapiens
agagccaagattcaa

SEQ ID NO: 17437 - DNA, 15 bp, Homo sapiens
cagagccaagattca

SEQ ID NO: 17438 - DNA, 15 bp, Homo sapiens
gcagagccaagattc

SEQ ID NO: 17439 - DNA, 15 bp, Homo sapiens
ggcagagccaagatt

SEQ ID NO: 17440 - DNA, 15 bp, Homo sapiens
tggcagagccaagat

SEQ ID NO: 17441 - DNA, 15 bp, Homo sapiens
atggcagagccaaga

SEQ ID NO: 17442 - DNA, 15 bp, Homo sapiens
aatggcagagccaag

SEQ ID NO: 17443 - DNA, 15 bp, Homo sapiens
aaatggcagagccaa

SEQ ID NO: 17444 - DNA, 15 bp, Homo sapiens
caaatggcagagcca

SEQ ID NO: 17445 - DNA, 15 bp, Homo sapiens
gcaaatggcagagcc

SEQ ID NO: 17446 - DNA, 15 bp, Homo sapiens
ggcaaatggcagagc

SEQ ID NO: 17447 - DNA, 15 bp, Homo sapiens
tggcaaatggcagag

SEQ ID NO: 17448 - DNA, 15 bp, Homo sapiens
ttggcaaatggcaga

SEQ ID NO: 17449 - DNA, 15 bp, Homo sapiens
attggcaaatggcag

SEQ ID NO: 17450 - DNA, 15 bp, Homo sapiens
gattggcaaatggca

SEQ ID NO: 17451 - DNA, 15 bp, Homo sapiens
agattggcaaatggc

SEQ ID NO: 17452 - DNA, 15 bp, Homo sapiens
aagattggcaaatgg

SEQ ID NO: 17453 - DNA, 15 bp, Homo sapiens
caagattggcaaatg

SEQ ID NO: 17454 - DNA, 15 bp, Homo sapiens
ccaagattggcaaat

SEQ ID NO: 17455 - DNA, 15 bp, Homo sapiens
tccaagattggcaaa

SEQ ID NO: 17456 - DNA, 15 bp, Homo sapiens
gtccaagattggcaa

SEQ ID NO: 17457 - DNA, 15 bp, Homo sapiens
ggtccaagattggca

SEQ ID NO: 17458 - DNA, 15 bp, Homo sapiens
tggtccaagattggc

SEQ ID NO: 17459 - DNA, 15 bp, Homo sapiens
atggtccaagattgg

SEQ ID NO: 17460 - DNA, 15 bp, Homo sapiens
aatggtccaagattg

SEQ ID NO: 17461 - DNA, 15 bp, Homo sapiens
caatggtccaagatt

SEQ ID NO: 17462 - DNA, 15 bp, Homo sapiens
ccaatggtccaagat

SEQ ID NO: 17463 - DNA, 15 bp, Homo sapiens
cccaatggtccaaga

SEQ ID NO: 17464 - DNA, 15 bp, Homo sapiens
gcccaatggtccaag

SEQ ID NO: 17465 - DNA, 15 bp, Homo sapiens
tgcccaatggtccaa

SEQ ID NO: 17466 - DNA, 15 bp, Homo sapiens
ctgcccaatggtcca

SEQ ID NO: 17467 - DNA, 15 bp, Homo sapiens
actgcccaatggtcc

SEQ ID NO: 17468 - DNA, 15 bp, Homo sapiens
cactgcccaatggtc

SEQ ID NO: 17469 - DNA, 15 bp, Homo sapiens
acactgcccaatggt

SEQ ID NO: 17470 - DNA, 15 bp, Homo sapiens
tacactgcccaatgg

SEQ ID NO: 17471 - DNA, 15 bp, Homo sapiens
atacactgcccaatg

SEQ ID NO: 17472 - DNA, 15 bp, Homo sapiens
aatacactgcccaat

SEQ ID NO: 17473 - DNA, 15 bp, Homo sapiens
taatacactgcccaa

SEQ ID NO: 17474 - DNA, 15 bp, Homo sapiens
ttaatacactgccca

SEQ ID NO: 17475 - DNA, 15 bp, Homo sapiens
gttaatacactgccc

SEQ ID NO: 17476 - DNA, 15 bp, Homo sapiens
agttaatacactgcc

SEQ ID NO: 17477 - DNA, 15 bp, Homo sapiens
gagttaatacactgc

SEQ ID NO: 17478 - DNA, 15 bp, Homo sapiens
agagttaatacactg

SEQ ID NO: 17479 - DNA, 15 bp, Homo sapiens
aagagttaatacact

SEQ ID NO: 17480 - DNA, 15 bp, Homo sapiens
aaagagttaatacac

SEQ ID NO: 17481 - DNA, 15 bp, Homo sapiens
caaagagttaataca

SEQ ID NO: 17482 - DNA, 15 bp, Homo sapiens
tcaaagagttaatac

SEQ ID NO: 17483 - DNA, 15 bp, Homo sapiens
ttcaaagagttaata

SEQ ID NO: 17484 - DNA, 15 bp, Homo sapiens
attcaaagagttaat

SEQ ID NO: 17485 - DNA, 15 bp, Homo sapiens
gattcaaagagttaa

SEQ ID NO: 17486 - DNA, 15 bp, Homo sapiens
agattcaaagagtta

SEQ ID NO: 17487 - DNA, 15 bp, Homo sapiens
gagattcaaagagtt

SEQ ID NO: 17488 - DNA, 15 bp, Homo sapiens
tgagattcaaagagt

SEQ ID NO: 17489 - DNA, 15 bp, Homo sapiens
ctgagattcaaagag

SEQ ID NO: 17490 - DNA, 15 bp, Homo sapiens
gctgagattcaaaga

SEQ ID NO: 17491 - DNA, 15 bp, Homo sapiens
agctgagattcaaag

SEQ ID NO: 17492 - DNA, 15 bp, Homo sapiens
aagctgagattcaaa

SEQ ID NO: 17493 - DNA, 15 bp, Homo sapiens
gaagctgagattcaa

SEQ ID NO: 17494 - DNA, 15 bp, Homo sapiens
ggaagctgagattca

SEQ ID NO: 17495 - DNA, 15 bp, Homo sapiens
aggaagctgagattc

SEQ ID NO: 17496 - DNA, 15 bp, Homo sapiens
gaggaagctgagatt

SEQ ID NO: 17497 - DNA, 15 bp, Homo sapiens
agaggaagctgagat

SEQ ID NO: 17498 - DNA, 15 bp, Homo sapiens
aagaggaagctgaga

SEQ ID NO: 17499 - DNA, 15 bp, Homo sapiens
gaagaggaagctgag

SEQ ID NO: 17500 - DNA, 15 bp, Homo sapiens
agaagaggaagctga

SEQ ID NO: 17501 - DNA, 15 bp, Homo sapiens
cagaagaggaagctg

SEQ ID NO: 17502 - DNA, 15 bp, Homo sapiens
acagaagaggaagct

SEQ ID NO: 17503 - DNA, 15 bp, Homo sapiens
tacagaagaggaagc

SEQ ID NO: 17504 - DNA, 15 bp, Homo sapiens
ttacagaagaggaag

SEQ ID NO: 17505 - DNA, 15 bp, Homo sapiens
tttacagaagaggaa

SEQ ID NO: 17506 - DNA, 15 bp, Homo sapiens
ttttacagaagagga

SEQ ID NO: 17507 - DNA, 15 bp, Homo sapiens
attttacagaagagg

SEQ ID NO: 17508 - DNA, 15 bp, Homo sapiens
cattttacagaagag

SEQ ID NO: 17509 - DNA, 15 bp, Homo sapiens
acattttacagaaga

SEQ ID NO: 17510 - DNA, 15 bp, Homo sapiens
cacattttacagaag

SEQ ID NO: 17511 - DNA, 15 bp, Homo sapiens
acacattttacagaa

SEQ ID NO: 17512 - DNA, 15 bp, Homo sapiens
tacacattttacaga

SEQ ID NO: 17513 - DNA, 15 bp, Homo sapiens
atacacattttacag

SEQ ID NO: 17514 - DNA, 15 bp, Homo sapiens
tatacacattttaca

SEQ ID NO: 17515 - DNA, 15 bp, Homo sapiens
ttatacacattttac

SEQ ID NO: 17516 - DNA, 15 bp, Homo sapiens
gttatacacatttta

SEQ ID NO: 17517 - DNA, 15 bp, Homo sapiens
tgttatacacatttt

SEQ ID NO: 17518 - DNA, 15 bp, Homo sapiens
ttgttatacacattt

SEQ ID NO: 17519 - DNA, 15 bp, Homo sapiens
cttgttatacacatt

SEQ ID NO: 17520 - DNA, 15 bp, Homo sapiens
tcttgttatacacat

SEQ ID NO: 17521 - DNA, 15 bp, Homo sapiens
ctcttgttatacaca

SEQ ID NO: 17522 - DNA, 15 bp, Homo sapiens
actcttgttatacac

SEQ ID NO: 17523 - DNA, 15 bp, Homo sapiens
tactcttgttataca

SEQ ID NO: 17524 - DNA, 15 bp, Homo sapiens
gtactcttgttatac

SEQ ID NO: 17525 - DNA, 15 bp, Homo sapiens
agtactcttgttata

SEQ ID NO: 17526 - DNA, 15 bp, Homo sapiens
tagtactcttgttat

SEQ ID NO: 17527 - DNA, 15 bp, Homo sapiens
ttagtactcttgtta

SEQ ID NO: 17528 - DNA, 15 bp, Homo sapiens
attagtactcttgtt

SEQ ID NO: 17529 - DNA, 15 bp, Homo sapiens
aattagtactcttgt

SEQ ID NO: 17530 - DNA, 15 bp, Homo sapiens
caattagtactcttg

SEQ ID NO: 17531 - DNA, 15 bp, Homo sapiens
ccaattagtactctt

SEQ ID NO: 17532 - DNA, 15 bp, Homo sapiens
tccaattagtactct

SEQ ID NO: 17533 - DNA, 15 bp, Homo sapiens
atccaattagtactc

SEQ ID NO: 17534 - DNA, 15 bp, Homo sapiens
aatccaattagtact

SEQ ID NO: 17535 - DNA, 15 bp, Homo sapiens
caatccaattagtac

SEQ ID NO: 17536 - DNA, 15 bp, Homo sapiens
acaatccaattagta

SEQ ID NO: 17537 - DNA, 15 bp, Homo sapiens
aacaatccaattagt

SEQ ID NO: 17538 - DNA, 15 bp, Homo sapiens
aaacaatccaattag

SEQ ID NO: 17539 - DNA, 15 bp, Homo sapiens
caaacaatccaatta

SEQ ID NO: 17540 - DNA, 15 bp, Homo sapiens
tcaaacaatccaatt

SEQ ID NO: 17541 - DNA, 15 bp, Homo sapiens
atcaaacaatccaat

SEQ ID NO: 17542 - DNA, 15 bp, Homo sapiens
catcaaacaatccaa

SEQ ID NO: 17543 - DNA, 15 bp, Homo sapiens
tcatcaaacaatcca

SEQ ID NO: 17544 - DNA, 15 bp, Homo sapiens
atcatcaaacaatcc

SEQ ID NO: 17545 - DNA, 15 bp, Homo sapiens
aatcatcaaacaatc

SEQ ID NO: 17546 - DNA, 15 bp, Homo sapiens
taatcatcaaacaat

SEQ ID NO: 17547 - DNA, 15 bp, Homo sapiens
ttaatcatcaaacaa

SEQ ID NO: 17548 - DNA, 15 bp, Homo sapiens
tttaatcatcaaaca

SEQ ID NO: 17549 - DNA, 15 bp, Homo sapiens
atttaatcatcaaac

SEQ ID NO: 17550 - DNA, 15 bp, Homo sapiens
catttaatcatcaaa

SEQ ID NO: 17551 - DNA, 15 bp, Homo sapiens
tcatttaatcatcaa

SEQ ID NO: 17552 - DNA, 15 bp, Homo sapiens
ctcatttaatcatca

SEQ ID NO: 17553 - DNA, 15 bp, Homo sapiens
actcatttaatcatc

SEQ ID NO: 17554 - DNA, 15 bp, Homo sapiens
aactcatttaatcat

SEQ ID NO: 17555 - DNA, 15 bp, Homo sapiens
taactcatttaatca

SEQ ID NO: 17556 - DNA, 15 bp, Homo sapiens
ttaactcatttaatc

SEQ ID NO: 17557 - DNA, 15 bp, Homo sapiens
attaactcatttaat

SEQ ID NO: 17558 - DNA, 15 bp, Homo sapiens
cattaactcatttaa

SEQ ID NO: 17559 - DNA, 15 bp, Homo sapiens
acattaactcattta

SEQ ID NO: 17560 - DNA, 15 bp, Homo sapiens
cacattaactcattt

SEQ ID NO: 17561 - DNA, 15 bp, Homo sapiens
acacattaactcatt

SEQ ID NO: 17562 - DNA, 15 bp, Homo sapiens
tacacattaactcat

SEQ ID NO: 17563 - DNA, 15 bp, Homo sapiens
atacacattaactca

SEQ ID NO: 17564 - DNA, 15 bp, Homo sapiens
tatacacattaactc

SEQ ID NO: 17565 - DNA, 15 bp, Homo sapiens
ttatacacattaact

SEQ ID NO: 17566 - DNA, 15 bp, Homo sapiens
tttatacacattaac

SEQ ID NO: 17567 - DNA, 15 bp, Homo sapiens
ctttatacacattaa

SEQ ID NO: 17568 - DNA, 15 bp, Homo sapiens
gctttatacacatta

SEQ ID NO: 17569 - DNA, 15 bp, Homo sapiens
tgctttatacacatt

SEQ ID NO: 17570 - DNA, 15 bp, Homo sapiens
gtgctttatacacat

SEQ ID NO: 17571 - DNA, 15 bp, Homo sapiens
agtgctttatacaca

SEQ ID NO: 17572 - DNA, 15 bp, Homo sapiens
gagtgctttatacac

SEQ ID NO: 17573 - DNA, 15 bp, Homo sapiens
tgagtgctttataca

SEQ ID NO: 17574 - DNA, 15 bp, Homo sapiens
gtgagtgctttatac

SEQ ID NO: 17575 - DNA, 15 bp, Homo sapiens
tgtgagtgctttata

SEQ ID NO: 17576 - DNA, 15 bp, Homo sapiens
ttgtgagtgctttat

SEQ ID NO: 17577 - DNA, 15 bp, Homo sapiens
gttgtgagtgcttta

SEQ ID NO: 17578 - DNA, 15 bp, Homo sapiens
ggttgtgagtgcttt

SEQ ID NO: 17579 - DNA, 15 bp, Homo sapiens
gggttgtgagtgctt

SEQ ID NO: 17580 - DNA, 15 bp, Homo sapiens
agggttgtgagtgct

SEQ ID NO: 17581 - DNA, 15 bp, Homo sapiens
cagggttgtgagtgc

SEQ ID NO: 17582 - DNA, 15 bp, Homo sapiens
ccagggttgtgagtg

SEQ ID NO: 17583 - DNA, 15 bp, Homo sapiens
accagggttgtgagt

SEQ ID NO: 17584 - DNA, 15 bp, Homo sapiens
taccagggttgtgag

SEQ ID NO: 17585 - DNA, 15 bp, Homo sapiens
gtaccagggttgtga

SEQ ID NO: 17586 - DNA, 15 bp, Homo sapiens
tgtaccagggttgtg

SEQ ID NO: 17587 - DNA, 15 bp, Homo sapiens
atgtaccagggttgt

SEQ ID NO: 17588 - DNA, 15 bp, Homo sapiens
tatgtaccagggttg

SEQ ID NO: 17589 - DNA, 15 bp, Homo sapiens
ctatgtaccagggtt

SEQ ID NO: 17590 - DNA, 15 bp, Homo sapiens
actatgtaccagggt

SEQ ID NO: 17591 - DNA, 15 bp, Homo sapiens
tactatgtaccaggg

SEQ ID NO: 17592 - DNA, 15 bp, Homo sapiens
ttactatgtaccagg

SEQ ID NO: 17593 - DNA, 15 bp, Homo sapiens
cttactatgtaccag

SEQ ID NO: 17594 - DNA, 15 bp, Homo sapiens
tcttactatgtacca

SEQ ID NO: 17595 - DNA, 15 bp, Homo sapiens
gtcttactatgtacc

SEQ ID NO: 17596 - DNA, 15 bp, Homo sapiens
ggtcttactatgtac

SEQ ID NO: 17597 - DNA, 15 bp, Homo sapiens
aggtcttactatgta

SEQ ID NO: 17598 - DNA, 15 bp, Homo sapiens
aaggtcttactatgt

SEQ ID NO: 17599 - DNA, 15 bp, Homo sapiens
aaaggtcttactatg

SEQ ID NO: 17600 - DNA, 15 bp, Homo sapiens
gaaaggtcttactat

SEQ ID NO: 17601 - DNA, 15 bp, Homo sapiens
tgaaaggtcttacta

SEQ ID NO: 17602 - DNA, 15 bp, Homo sapiens
atgaaaggtcttact

SEQ ID NO: 17603 - DNA, 15 bp, Homo sapiens
aatgaaaggtcttac

SEQ ID NO: 17604 - DNA, 15 bp, Homo sapiens
taatgaaaggtctta

SEQ ID NO: 17605 - DNA, 15 bp, Homo sapiens
ataatgaaaggtctt

SEQ ID NO: 17606 - DNA, 15 bp, Homo sapiens
aataatgaaaggtct

SEQ ID NO: 17607 - DNA, 15 bp, Homo sapiens
taataatgaaaggtc

SEQ ID NO: 17608 - DNA, 15 bp, Homo sapiens
ataataatgaaaggt

SEQ ID NO: 17609 - DNA, 15 bp, Homo sapiens
aataataatgaaagg

SEQ ID NO: 17610 - DNA, 15 bp, Homo sapiens
taataataatgaaag

SEQ ID NO: 17611 - DNA, 15 bp, Homo sapiens
ataataataatgaaa

SEQ ID NO: 17612 - DNA, 15 bp, Homo sapiens
gataataataatgaa

SEQ ID NO: 17613 - DNA, 15 bp, Homo sapiens
tgataataataatga

SEQ ID NO: 17614 - DNA, 15 bp, Homo sapiens
atgataataataatg

SEQ ID NO: 17615 - DNA, 15 bp, Homo sapiens
gatgataataataat

SEQ ID NO: 17616 - DNA, 15 bp, Homo sapiens
tgatgataataataa

SEQ ID NO: 17617 - DNA, 15 bp, Homo sapiens
atgatgataataata

SEQ ID NO: 17618 - DNA, 15 bp, Homo sapiens
gatgatgataataat

SEQ ID NO: 17619 - DNA, 15 bp, Homo sapiens
tgatgatgataataa

SEQ ID NO: 17620 - DNA, 15 bp, Homo sapiens
ttgatgatgataata

SEQ ID NO: 17621 - DNA, 15 bp, Homo sapiens
attgatgatgataat

SEQ ID NO: 17622 - DNA, 15 bp, Homo sapiens
aattgatgatgataa

SEQ ID NO: 17623 - DNA, 15 bp, Homo sapiens
aaattgatgatgata

SEQ ID NO: 17624 - DNA, 15 bp, Homo sapiens
aaaattgatgatgat

SEQ ID NO: 17625 - DNA, 15 bp, Homo sapiens
aaaaattgatgatga

SEQ ID NO: 17626 - DNA, 15 bp, Homo sapiens
aaaaaattgatgatg

SEQ ID NO: 17627 - DNA, 15 bp, Homo sapiens
aaaaaaattgatgat

SEQ ID NO: 17628 - DNA, 15 bp, Homo sapiens
aaaaaaaattgatga

SEQ ID NO: 17629 - DNA, 15 bp, Homo sapiens
taaaaaaaattgatg

SEQ ID NO: 17630 - DNA, 15 bp, Homo sapiens
ttaaaaaaaattgat

SEQ ID NO: 17631 - DNA, 15 bp, Homo sapiens
gttaaaaaaaattga

SEQ ID NO: 17632 - DNA, 15 bp, Homo sapiens
ggttaaaaaaaattg

SEQ ID NO: 17633 - DNA, 15 bp, Homo sapiens
aggttaaaaaaaatt

SEQ ID NO: 17634 - DNA, 15 bp, Homo sapiens
gaggttaaaaaaaat

SEQ ID NO: 17635 - DNA, 15 bp, Homo sapiens
agaggttaaaaaaaa

SEQ ID NO: 17636 - DNA, 15 bp, Homo sapiens
aagaggttaaaaaaa

SEQ ID NO: 17637 - DNA, 15 bp, Homo sapiens
aaagaggttaaaaaa

SEQ ID NO: 17638 - DNA, 15 bp, Homo sapiens
aaaagaggttaaaaa

SEQ ID NO: 17639 - DNA, 15 bp, Homo sapiens
gaaaagaggttaaaa

SEQ ID NO: 17640 - DNA, 15 bp, Homo sapiens
ggaaaagaggttaaa

SEQ ID NO: 17641 - DNA, 15 bp, Homo sapiens
aggaaaagaggttaa

SEQ ID NO: 17642 - DNA, 15 bp, Homo sapiens
caggaaaagaggtta

SEQ ID NO: 17643 - DNA, 15 bp, Homo sapiens
tcaggaaaagaggtt

SEQ ID NO: 17644 - DNA, 15 bp, Homo sapiens
atcaggaaaagaggt

SEQ ID NO: 17645 - DNA, 15 bp, Homo sapiens
gatcaggaaaagagg

SEQ ID NO: 17646 - DNA, 15 bp, Homo sapiens
agatcaggaaaagag

SEQ ID NO: 17647 - DNA, 15 bp, Homo sapiens
cagatcaggaaaaga

SEQ ID NO: 17648 - DNA, 15 bp, Homo sapiens
gcagatcaggaaaag

SEQ ID NO: 17649 - DNA, 15 bp, Homo sapiens
agcagatcaggaaaa

SEQ ID NO: 17650 - DNA, 15 bp, Homo sapiens
aagcagatcaggaaa

SEQ ID NO: 17651 - DNA, 15 bp, Homo sapiens
taagcagatcaggaa

SEQ ID NO: 17652 - DNA, 15 bp, Homo sapiens
gtaagcagatcagga

SEQ ID NO: 17653 - DNA, 15 bp, Homo sapiens
tgtaagcagatcagg

SEQ ID NO: 17654 - DNA, 15 bp, Homo sapiens
gtgtaagcagatcag

SEQ ID NO: 17655 - DNA, 15 bp, Homo sapiens
agtgtaagcagatca

SEQ ID NO: 17656 - DNA, 15 bp, Homo sapiens
gagtgtaagcagatc

SEQ ID NO: 17657 - DNA, 15 bp, Homo sapiens
tgagtgtaagcagat

SEQ ID NO: 17658 - DNA, 15 bp, Homo sapiens
gtgagtgtaagcaga

SEQ ID NO: 17659 - DNA, 15 bp, Homo sapiens
ggtgagtgtaagcag

SEQ ID NO: 17660 - DNA, 15 bp, Homo sapiens
tggtgagtgtaagca

SEQ ID NO: 17661 - DNA, 15 bp, Homo sapiens
ctggtgagtgtaagc

SEQ ID NO: 17662 - DNA, 15 bp, Homo sapiens
gctggtgagtgtaag

SEQ ID NO: 17663 - DNA, 15 bp, Homo sapiens
agctggtgagtgtaa

SEQ ID NO: 17664 - DNA, 15 bp, Homo sapiens
aagctggtgagtgta

SEQ ID NO: 17665 - DNA, 15 bp, Homo sapiens
gaagctggtgagtgt

SEQ ID NO: 17666 - DNA, 15 bp, Homo sapiens
tgaagctggtgagtg

SEQ ID NO: 17667 - DNA, 15 bp, Homo sapiens
ctgaagctggtgagt

SEQ ID NO: 17668 - DNA, 15 bp, Homo sapiens
gctgaagctggtgag

SEQ ID NO: 17669 - DNA, 15 bp, Homo sapiens
agctgaagctggtga

SEQ ID NO: 17670 - DNA, 15 bp, Homo sapiens
cagctgaagctggtg

SEQ ID NO: 17671 - DNA, 15 bp, Homo sapiens
gcagctgaagctggt

SEQ ID NO: 17672 - DNA, 15 bp, Homo sapiens
agcagctgaagctgg

SEQ ID NO: 17673 - DNA, 15 bp, Homo sapiens
gagcagctgaagctg

SEQ ID NO: 17674 - DNA, 15 bp, Homo sapiens
ggagcagctgaagct

SEQ ID NO: 17675 - DNA, 15 bp, Homo sapiens
tggagcagctgaagc

SEQ ID NO: 17676 - DNA, 15 bp, Homo sapiens
ttggagcagctgaag

SEQ ID NO: 17677 - DNA, 15 bp, Homo sapiens
tttggagcagctgaa

SEQ ID NO: 17678 - DNA, 15 bp, Homo sapiens
atttggagcagctga

SEQ ID NO: 17679 - DNA, 15 bp, Homo sapiens
catttggagcagctg

SEQ ID NO: 17680 - DNA, 15 bp, Homo sapiens
ccatttggagcagct

SEQ ID NO: 17681 - DNA, 15 bp, Homo sapiens
gccatttggagcagc

SEQ ID NO: 17682 - DNA, 15 bp, Homo sapiens
agccatttggagcag

SEQ ID NO: 17683 - DNA, 15 bp, Homo sapiens
aagccatttggagca

SEQ ID NO: 17684 - DNA, 15 bp, Homo sapiens
caagccatttggagc

SEQ ID NO: 17685 - DNA, 15 bp, Homo sapiens
acaagccatttggag

SEQ ID NO: 17686 - DNA, 15 bp, Homo sapiens
tacaagccatttgga

SEQ ID NO: 17687 - DNA, 15 bp, Homo sapiens
ttacaagccatttgg

SEQ ID NO: 17688 - DNA, 15 bp, Homo sapiens
cttacaagccatttg

SEQ ID NO: 17689 - DNA, 15 bp, Homo sapiens
tcttacaagccattt

SEQ ID NO: 17690 - DNA, 15 bp, Homo sapiens
atcttacaagccatt

SEQ ID NO: 17691 - DNA, 15 bp, Homo sapiens
aatcttacaagccat

SEQ ID NO: 17692 - DNA, 15 bp, Homo sapiens
aaatcttacaagcca

SEQ ID NO: 17693 - DNA, 15 bp, Homo sapiens
aaaatcttacaagcc

SEQ ID NO: 17694 - DNA, 15 bp, Homo sapiens
aaaaatcttacaagc

SEQ ID NO: 17695 - DNA, 15 bp, Homo sapiens
aaaaaatcttacaag

SEQ ID NO: 17696 - DNA, 15 bp, Homo sapiens
caaaaaatcttacaa

SEQ ID NO: 17697 - DNA, 15 bp, Homo sapiens
acaaaaaatcttaca

SEQ ID NO: 17698 - DNA, 15 bp, Homo sapiens
aacaaaaaatcttac

SEQ ID NO: 17699 - DNA, 15 bp, Homo sapiens
aaacaaaaaatctta

SEQ ID NO: 17700 - DNA, 15 bp, Homo sapiens
caaacaaaaaatctt

SEQ ID NO: 17701 - DNA, 15 bp, Homo sapiens
gcaaacaaaaaatct

SEQ ID NO: 17702 - DNA, 15 bp, Homo sapiens
ggcaaacaaaaaatc

SEQ ID NO: 17703 - DNA, 15 bp, Homo sapiens
gggcaaacaaaaaat

SEQ ID NO: 17704 - DNA, 15 bp, Homo sapiens
agggcaaacaaaaaa

SEQ ID NO: 17705 - DNA, 15 bp, Homo sapiens
aagggcaaacaaaaa

SEQ ID NO: 17706 - DNA, 15 bp, Homo sapiens
aaagggcaaacaaaa

SEQ ID NO: 17707 - DNA, 15 bp, Homo sapiens
caaagggcaaacaaa

SEQ ID NO: 17708 - DNA, 15 bp, Homo sapiens
gcaaagggcaaacaa

SEQ ID NO: 17709 - DNA, 15 bp, Homo sapiens
agcaaagggcaaaca

SEQ ID NO: 17710 - DNA, 15 bp, Homo sapiens
cagcaaagggcaaac

SEQ ID NO: 17711 - DNA, 15 bp, Homo sapiens
acagcaaagggcaaa

SEQ ID NO: 17712 - DNA, 15 bp, Homo sapiens
gacagcaaagggcaa

SEQ ID NO: 17713 - DNA, 15 bp, Homo sapiens
tgacagcaaagggca

SEQ ID NO: 17714 - DNA, 15 bp, Homo sapiens
ctgacagcaaagggc

SEQ ID NO: 17715 - DNA, 15 bp, Homo sapiens
actgacagcaaaggg

SEQ ID NO: 17716 - DNA, 15 bp, Homo sapiens
aactgacagcaaagg

SEQ ID NO: 17717 - DNA, 15 bp, Homo sapiens
caactgacagcaaag

SEQ ID NO: 17718 - DNA, 15 bp, Homo sapiens
gcaactgacagcaaa

SEQ ID NO: 17719 - DNA, 15 bp, Homo sapiens
ggcaactgacagcaa

SEQ ID NO: 17720 - DNA, 15 bp, Homo sapiens
tggcaactgacagca

SEQ ID NO: 17721 - DNA, 15 bp, Homo sapiens
atggcaactgacagc

SEQ ID NO: 17722 - DNA, 15 bp, Homo sapiens
catggcaactgacag

SEQ ID NO: 17723 - DNA, 15 bp, Homo sapiens
ccatggcaactgaca

SEQ ID NO: 17724 - DNA, 15 bp, Homo sapiens
cccatggcaactgac

SEQ ID NO: 17725 - DNA, 15 bp, Homo sapiens
ccccatggcaactga

SEQ ID NO: 17726 - DNA, 15 bp, Homo sapiens
tccccatggcaactg

SEQ ID NO: 17727 - DNA, 15 bp, Homo sapiens
ttccccatggcaact

SEQ ID NO: 17728 - DNA, 15 bp, Homo sapiens
cttccccatggcaac

SEQ ID NO: 17729 - DNA, 15 bp, Homo sapiens
tcttccccatggcaa

SEQ ID NO: 17730 - DNA, 15 bp, Homo sapiens
atcttccccatggca

SEQ ID NO: 17731 - DNA, 15 bp, Homo sapiens
gatcttccccatggc

SEQ ID NO: 17732 - DNA, 15 bp, Homo sapiens
ggatcttccccatgg

SEQ ID NO: 17733 - DNA, 15 bp, Homo sapiens
tggatcttccccatg

SEQ ID NO: 17734 - DNA, 15 bp, Homo sapiens
atggatcttccccat

SEQ ID NO: 17735 - DNA, 15 bp, Homo sapiens
aatggatcttcccca

SEQ ID NO: 17736 - DNA, 15 bp, Homo sapiens
gaatggatcttcccc

SEQ ID NO: 17737 - DNA, 15 bp, Homo sapiens
tgaatggatcttccc

SEQ ID NO: 17738 - DNA, 15 bp, Homo sapiens
atgaatggatcttcc

SEQ ID NO: 17739 - DNA, 15 bp, Homo sapiens
aatgaatggatcttc

SEQ ID NO: 17740 - DNA, 15 bp, Homo sapiens
aaatgaatggatctt

SEQ ID NO: 17741 - DNA, 15 bp, Homo sapiens
aaaatgaatggatct

SEQ ID NO: 17742 - DNA, 15 bp, Homo sapiens
aaaaatgaatggatc

SEQ ID NO: 17743 - DNA, 15 bp, Homo sapiens
aaaaaatgaatggat

SEQ ID NO: 17744 - DNA, 15 bp, Homo sapiens
aaaaaaatgaatgga

SEQ ID NO: 17745 - DNA, 15 bp, Homo sapiens
gaaaaaaatgaatgg

SEQ ID NO: 17746 - DNA, 15 bp, Homo sapiens
tgaaaaaaatgaatg

SEQ ID NO: 17747 - DNA, 15 bp, Homo sapiens
ctgaaaaaaatgaat

SEQ ID NO: 17748 - DNA, 15 bp, Homo sapiens
actgaaaaaaatgaa

SEQ ID NO: 17749 - DNA, 15 bp, Homo sapiens
gactgaaaaaaatga

SEQ ID NO: 17750 - DNA, 15 bp, Homo sapiens
tgactgaaaaaaatg

SEQ ID NO: 17751 - DNA, 15 bp, Homo sapiens
ttgactgaaaaaaat

SEQ ID NO: 17752 - DNA, 15 bp, Homo sapiens
gttgactgaaaaaaa

SEQ ID NO: 17753 - DNA, 15 bp, Homo sapiens
ggttgactgaaaaaa

SEQ ID NO: 17754 - DNA, 15 bp, Homo sapiens
tggttgactgaaaaa

SEQ ID NO: 17755 - DNA, 15 bp, Homo sapiens
ttggttgactgaaaa

SEQ ID NO: 17756 - DNA, 15 bp, Homo sapiens
gttggttgactgaaa

SEQ ID NO: 17757 - DNA, 15 bp, Homo sapiens
tgttggttgactgaa

SEQ ID NO: 17758 - DNA, 15 bp, Homo sapiens
atgttggttgactga

SEQ ID NO: 17759 - DNA, 15 bp, Homo sapiens
tatgttggttgactg

SEQ ID NO: 17760 - DNA, 15 bp, Homo sapiens
atatgttggttgact

SEQ ID NO: 17761 - DNA, 15 bp, Homo sapiens
aatatgttggttgac

SEQ ID NO: 17762 - DNA, 15 bp, Homo sapiens
aaatatgttggttga

SEQ ID NO: 17763 - DNA, 15 bp, Homo sapiens
aaaatatgttggttg

SEQ ID NO: 17764 - DNA, 15 bp, Homo sapiens
caaaatatgttggtt

SEQ ID NO: 17765 - DNA, 15 bp, Homo sapiens
tcaaaatatgttggt

SEQ ID NO: 17766 - DNA, 15 bp, Homo sapiens
ctcaaaatatgttgg

SEQ ID NO: 17767 - DNA, 15 bp, Homo sapiens
gctcaaaatatgttg

SEQ ID NO: 17768 - DNA, 15 bp, Homo sapiens
tgctcaaaatatgtt

SEQ ID NO: 17769 - DNA, 15 bp, Homo sapiens
atgctcaaaatatgt

SEQ ID NO: 17770 - DNA, 15 bp, Homo sapiens
gatgctcaaaatatg

SEQ ID NO: 17771 - DNA, 15 bp, Homo sapiens
agatgctcaaaatat

SEQ ID NO: 17772 - DNA, 15 bp, Homo sapiens
cagatgctcaaaata

SEQ ID NO: 17773 - DNA, 15 bp, Homo sapiens
gcagatgctcaaaat

SEQ ID NO: 17774 - DNA, 15 bp, Homo sapiens
agcagatgctcaaaa

SEQ ID NO: 17775 - DNA, 15 bp, Homo sapiens
cagcagatgctcaaa

SEQ ID NO: 17776 - DNA, 15 bp, Homo sapiens
gcagcagatgctcaa

SEQ ID NO: 17777 - DNA, 15 bp, Homo sapiens
ggcagcagatgctca

SEQ ID NO: 17778 - DNA, 15 bp, Homo sapiens
gggcagcagatgctc

SEQ ID NO: 17779 - DNA, 15 bp, Homo sapiens
agggcagcagatgct

SEQ ID NO: 17780 - DNA, 15 bp, Homo sapiens
tagggcagcagatgc

SEQ ID NO: 17781 - DNA, 15 bp, Homo sapiens
gtagggcagcagatg

SEQ ID NO: 17782 - DNA, 15 bp, Homo sapiens
tgtagggcagcagat

SEQ ID NO: 17783 - DNA, 15 bp, Homo sapiens
ctgtagggcagcaga

SEQ ID NO: 17784 - DNA, 15 bp, Homo sapiens
cctgtagggcagcag

SEQ ID NO: 17785 - DNA, 15 bp, Homo sapiens
tcctgtagggcagca

SEQ ID NO: 17786 - DNA, 15 bp, Homo sapiens
atcctgtagggcagc

SEQ ID NO: 17787 - DNA, 15 bp, Homo sapiens
gatcctgtagggcag

SEQ ID NO: 17788 - DNA, 15 bp, Homo sapiens
ggatcctgtagggca

SEQ ID NO: 17789 - DNA, 15 bp, Homo sapiens
aggatcctgtagggc

SEQ ID NO: 17790 - DNA, 15 bp, Homo sapiens
taggatcctgtaggg

SEQ ID NO: 17791 - DNA, 15 bp, Homo sapiens
ctaggatcctgtagg

SEQ ID NO: 17792 - DNA, 15 bp, Homo sapiens
tctaggatcctgtag

SEQ ID NO: 17793 - DNA, 15 bp, Homo sapiens
atctaggatcctgta

SEQ ID NO: 17794 - DNA, 15 bp, Homo sapiens
tatctaggatcctgt

SEQ ID NO: 17795 - DNA, 15 bp, Homo sapiens
atatctaggatcctg

SEQ ID NO: 17796 - DNA, 15 bp, Homo sapiens
catatctaggatcct

SEQ ID NO: 17797 - DNA, 15 bp, Homo sapiens
ccatatctaggatcc

SEQ ID NO: 17798 - DNA, 15 bp, Homo sapiens
cccatatctaggatc

SEQ ID NO: 17799 - DNA, 15 bp, Homo sapiens
ccccatatctaggat

SEQ ID NO: 17800 - DNA, 15 bp, Homo sapiens
cccccatatctagga

SEQ ID NO: 17801 - DNA, 15 bp, Homo sapiens
gcccccatatctagg

SEQ ID NO: 17802 - DNA, 15 bp, Homo sapiens
agcccccatatctag

SEQ ID NO: 17803 - DNA, 15 bp, Homo sapiens
cagcccccatatcta

SEQ ID NO: 17804 - DNA, 15 bp, Homo sapiens
gcagcccccatatct

SEQ ID NO: 17805 - DNA, 15 bp, Homo sapiens
tgcagcccccatatc

SEQ ID NO: 17806 - DNA, 15 bp, Homo sapiens
ctgcagcccccatat

SEQ ID NO: 17807 - DNA, 15 bp, Homo sapiens
tctgcagcccccata

SEQ ID NO: 17808 - DNA, 15 bp, Homo sapiens
ctctgcagcccccat

SEQ ID NO: 17809 - DNA, 15 bp, Homo sapiens
tctctgcagccccca

SEQ ID NO: 17810 - DNA, 15 bp, Homo sapiens
atctctgcagccccc

SEQ ID NO: 17811 - DNA, 15 bp, Homo sapiens
tatctctgcagcccc

SEQ ID NO: 17812 - DNA, 15 bp, Homo sapiens
atatctctgcagccc

SEQ ID NO: 17813 - DNA, 15 bp, Homo sapiens
gatatctctgcagcc

SEQ ID NO: 17814 - DNA, 15 bp, Homo sapiens
ggatatctctgcagc

SEQ ID NO: 17815 - DNA, 15 bp, Homo sapiens
tggatatctctgcag

SEQ ID NO: 17816 - DNA, 15 bp, Homo sapiens
ctggatatctctgca

SEQ ID NO: 17817 - DNA, 15 bp, Homo sapiens
cctggatatctctgc

SEQ ID NO: 17818 - DNA, 15 bp, Homo sapiens
tcctggatatctctg

SEQ ID NO: 17819 - DNA, 15 bp, Homo sapiens
ttcctggatatctct

SEQ ID NO: 17820 - DNA, 15 bp, Homo sapiens
gttcctggatatctc

SEQ ID NO: 17821 - DNA, 15 bp, Homo sapiens
tgttcctggatatct

SEQ ID NO: 17822 - DNA, 15 bp, Homo sapiens
atgttcctggatatc

SEQ ID NO: 17823 - DNA, 15 bp, Homo sapiens
tatgttcctggatat

SEQ ID NO: 17824 - DNA, 15 bp, Homo sapiens
ttatgttcctggata

SEQ ID NO: 17825 - DNA, 15 bp, Homo sapiens
cttatgttcctggat

SEQ ID NO: 17826 - DNA, 15 bp, Homo sapiens
gcttatgttcctgga

SEQ ID NO: 17827 - DNA, 15 bp, Homo sapiens
ggcttatgttcctgg

SEQ ID NO: 17828 - DNA, 15 bp, Homo sapiens
aggcttatgttcctg

SEQ ID NO: 17829 - DNA, 15 bp, Homo sapiens
aaggcttatgttcct

SEQ ID NO: 17830 - DNA, 15 bp, Homo sapiens
caaggcttatgttcc

SEQ ID NO: 17831 - DNA, 15 bp, Homo sapiens
tcaaggcttatgttc

SEQ ID NO: 17832 - DNA, 15 bp, Homo sapiens
atcaaggcttatgtt

SEQ ID NO: 17833 - DNA, 15 bp, Homo sapiens
aatcaaggcttatgt

SEQ ID NO: 17834 - DNA, 15 bp, Homo sapiens
taatcaaggcttatg

SEQ ID NO: 17835 - DNA, 15 bp, Homo sapiens
ttaatcaaggcttat

SEQ ID NO: 17836 - DNA, 15 bp, Homo sapiens
attaatcaaggctta

SEQ ID NO: 17837 - DNA, 15 bp, Homo sapiens
aattaatcaaggctt

SEQ ID NO: 17838 - DNA, 15 bp, Homo sapiens
caattaatcaaggct

SEQ ID NO: 17839 - DNA, 15 bp, Homo sapiens
ccaattaatcaaggc

SEQ ID NO: 17840 - DNA, 15 bp, Homo sapiens
cccaattaatcaagg

SEQ ID NO: 17841 - DNA, 15 bp, Homo sapiens
acccaattaatcaag

SEQ ID NO: 17842 - DNA, 15 bp, Homo sapiens
gacccaattaatcaa

SEQ ID NO: 17843 - DNA, 15 bp, Homo sapiens
tgacccaattaatca

SEQ ID NO: 17844 - DNA, 15 bp, Homo sapiens
ctgacccaattaatc

SEQ ID NO: 17845 - DNA, 15 bp, Homo sapiens
tctgacccaattaat

SEQ ID NO: 17846 - DNA, 15 bp, Homo sapiens
atctgacccaattaa

SEQ ID NO: 17847 - DNA, 15 bp, Homo sapiens
gatctgacccaatta

SEQ ID NO: 17848 - DNA, 15 bp, Homo sapiens
tgatctgacccaatt

SEQ ID NO: 17849 - DNA, 15 bp, Homo sapiens
ctgatctgacccaat

SEQ ID NO: 17850 - DNA, 15 bp, Homo sapiens
actgatctgacccaa

SEQ ID NO: 17851 - DNA, 15 bp, Homo sapiens
cactgatctgaccca

SEQ ID NO: 17852 - DNA, 15 bp, Homo sapiens
gcactgatctgaccc

SEQ ID NO: 17853 - DNA, 15 bp, Homo sapiens
agcactgatctgacc

SEQ ID NO: 17854 - DNA, 15 bp, Homo sapiens
gagcactgatctgac

SEQ ID NO: 17855 - DNA, 15 bp, Homo sapiens
tgagcactgatctga

SEQ ID NO: 17856 - DNA, 15 bp, Homo sapiens
ctgagcactgatctg

SEQ ID NO: 17857 - DNA, 15 bp, Homo sapiens
gctgagcactgatct

SEQ ID NO: 17858 - DNA, 15 bp, Homo sapiens
tgctgagcactgatc

SEQ ID NO: 17859 - DNA, 15 bp, Homo sapiens
ctgctgagcactgat

SEQ ID NO: 17860 - DNA, 15 bp, Homo sapiens
cctgctgagcactga

SEQ ID NO: 17861 - DNA, 15 bp, Homo sapiens
ccctgctgagcactg

SEQ ID NO: 17862 - DNA, 15 bp, Homo sapiens
gccctgctgagcact

SEQ ID NO: 17863 - DNA, 15 bp, Homo sapiens
agccctgctgagcac

SEQ ID NO: 17864 - DNA, 15 bp, Homo sapiens
cagccctgctgagca

SEQ ID NO: 17865 - DNA, 15 bp, Homo sapiens
ccagccctgctgagc

SEQ ID NO: 17866 - DNA, 15 bp, Homo sapiens
gccagccctgctgag

SEQ ID NO: 17867 - DNA, 15 bp, Homo sapiens
tgccagccctgctga

SEQ ID NO: 17868 - DNA, 15 bp, Homo sapiens
ttgccagccctgctg

SEQ ID NO: 17869 - DNA, 15 bp, Homo sapiens
cttgccagccctgct

SEQ ID NO: 17870 - DNA, 15 bp, Homo sapiens
acttgccagccctgc

SEQ ID NO: 17871 - DNA, 15 bp, Homo sapiens
cacttgccagccctg

SEQ ID NO: 17872 - DNA, 15 bp, Homo sapiens
gcacttgccagccct

SEQ ID NO: 17873 - DNA, 15 bp, Homo sapiens
agcacttgccagccc

SEQ ID NO: 17874 - DNA, 15 bp, Homo sapiens
tagcacttgccagcc

SEQ ID NO: 17875 - DNA, 15 bp, Homo sapiens
ctagcacttgccagc

SEQ ID NO: 17876 - DNA, 15 bp, Homo sapiens
cctagcacttgccag

SEQ ID NO: 17877 - DNA, 15 bp, Homo sapiens
acctagcacttgcca

SEQ ID NO: 17878 - DNA, 15 bp, Homo sapiens
aacctagcacttgcc

SEQ ID NO: 17879 - DNA, 15 bp, Homo sapiens
aaacctagcacttgc

SEQ ID NO: 17880 - DNA, 15 bp, Homo sapiens
gaaacctagcacttg

SEQ ID NO: 17881 - DNA, 15 bp, Homo sapiens
agaaacctagcactt

SEQ ID NO: 17882 - DNA, 15 bp, Homo sapiens
aagaaacctagcact

SEQ ID NO: 17883 - DNA, 15 bp, Homo sapiens
aaagaaacctagcac

SEQ ID NO: 17884 - DNA, 15 bp, Homo sapiens
aaaagaaacctagca

SEQ ID NO: 17885 - DNA, 15 bp, Homo sapiens
taaaagaaacctagc

SEQ ID NO: 17886 - DNA, 15 bp, Homo sapiens
ttaaaagaaacctag

SEQ ID NO: 17887 - DNA, 15 bp, Homo sapiens
cttaaaagaaaccta

SEQ ID NO: 17888 - DNA, 15 bp, Homo sapiens
acttaaaagaaacct

SEQ ID NO: 17889 - DNA, 15 bp, Homo sapiens
cacttaaaagaaacc

SEQ ID NO: 17890 - DNA, 15 bp, Homo sapiens
ccacttaaaagaaac

SEQ ID NO: 17891 - DNA, 15 bp, Homo sapiens
gccacttaaaagaaa

SEQ ID NO: 17892 - DNA, 15 bp, Homo sapiens
tgccacttaaaagaa

SEQ ID NO: 17893 - DNA, 15 bp, Homo sapiens
atgccacttaaaaga

SEQ ID NO: 17894 - DNA, 15 bp, Homo sapiens
tatgccacttaaaag

SEQ ID NO: 17895 - DNA, 15 bp, Homo sapiens
atatgccacttaaaa

SEQ ID NO: 17896 - DNA, 15 bp, Homo sapiens
gatatgccacttaaa

SEQ ID NO: 17897 - DNA, 15 bp, Homo sapiens
agatatgccacttaa

SEQ ID NO: 17898 - DNA, 15 bp, Homo sapiens
aagatatgccactta

SEQ ID NO: 17899 - DNA, 15 bp, Homo sapiens
taagatatgccactt

SEQ ID NO: 17900 - DNA, 15 bp, Homo sapiens
ttaagatatgccact

SEQ ID NO: 17901 - DNA, 15 bp, Homo sapiens
tttaagatatgccac

SEQ ID NO: 17902 - DNA, 15 bp, Homo sapiens
ttttaagatatgcca

SEQ ID NO: 17903 - DNA, 15 bp, Homo sapiens
cttttaagatatgcc

SEQ ID NO: 17904 - DNA, 15 bp, Homo sapiens
ccttttaagatatgc

SEQ ID NO: 17905 - DNA, 15 bp, Homo sapiens
accttttaagatatg

SEQ ID NO: 17906 - DNA, 15 bp, Homo sapiens
taccttttaagatat

SEQ ID NO: 17907 - DNA, 15 bp, Homo sapiens
ataccttttaagata

SEQ ID NO: 17908 - DNA, 15 bp, Homo sapiens
tataccttttaagat

SEQ ID NO: 17909 - DNA, 15 bp, Homo sapiens
atataccttttaaga

SEQ ID NO: 17910 - DNA, 15 bp, Homo sapiens
catataccttttaag

SEQ ID NO: 17911 - DNA, 15 bp, Homo sapiens
acatataccttttaa

SEQ ID NO: 17912 - DNA, 15 bp, Homo sapiens
gacatatacctttta

SEQ ID NO: 17913 - DNA, 15 bp, Homo sapiens
ggacatatacctttt

SEQ ID NO: 17914 - DNA, 15 bp, Homo sapiens
aggacatataccttt

SEQ ID NO: 17915 - DNA, 15 bp, Homo sapiens
taggacatatacctt

SEQ ID NO: 17916 - DNA, 15 bp, Homo sapiens
ttaggacatatacct

SEQ ID NO: 17917 - DNA, 15 bp, Homo sapiens
tttaggacatatacc

SEQ ID NO: 17918 - DNA, 15 bp, Homo sapiens
gtttaggacatatac

SEQ ID NO: 17919 - DNA, 15 bp, Homo sapiens
tgtttaggacatata

SEQ ID NO: 17920 - DNA, 15 bp, Homo sapiens
atgtttaggacatat

SEQ ID NO: 17921 - DNA, 15 bp, Homo sapiens
tatgtttaggacata

SEQ ID NO: 17922 - DNA, 15 bp, Homo sapiens
ctatgtttaggacat

SEQ ID NO: 17923 - DNA, 15 bp, Homo sapiens
gctatgtttaggaca

SEQ ID NO: 17924 - DNA, 15 bp, Homo sapiens
agctatgtttaggac

SEQ ID NO: 17925 - DNA, 15 bp, Homo sapiens
aagctatgtttagga

SEQ ID NO: 17926 - DNA, 15 bp, Homo sapiens
aaagctatgtttagg

SEQ ID NO: 17927 - DNA, 15 bp, Homo sapiens
caaagctatgtttag

SEQ ID NO: 17928 - DNA, 15 bp, Homo sapiens
acaaagctatgttta

SEQ ID NO: 17929 - DNA, 15 bp, Homo sapiens
cacaaagctatgttt

SEQ ID NO: 17930 - DNA, 15 bp, Homo sapiens
tcacaaagctatgtt

SEQ ID NO: 17931 - DNA, 15 bp, Homo sapiens
atcacaaagctatgt

SEQ ID NO: 17932 - DNA, 15 bp, Homo sapiens
catcacaaagctatg

SEQ ID NO: 17933 - DNA, 15 bp, Homo sapiens
ccatcacaaagctat

SEQ ID NO: 17934 - DNA, 15 bp, Homo sapiens
gccatcacaaagcta

SEQ ID NO: 17935 - DNA, 15 bp, Homo sapiens
tgccatcacaaagct

SEQ ID NO: 17936 - DNA, 15 bp, Homo sapiens
ctgccatcacaaagc

SEQ ID NO: 17937 - DNA, 15 bp, Homo sapiens
gctgccatcacaaag

SEQ ID NO: 17938 - DNA, 15 bp, Homo sapiens
tgctgccatcacaaa

SEQ ID NO: 17939 - DNA, 15 bp, Homo sapiens
atgctgccatcacaa

SEQ ID NO: 17940 - DNA, 15 bp, Homo sapiens
catgctgccatcaca

SEQ ID NO: 17941 - DNA, 15 bp, Homo sapiens
tcatgctgccatcac

SEQ ID NO: 17942 - DNA, 15 bp, Homo sapiens
atcatgctgccatca

SEQ ID NO: 17943 - DNA, 15 bp, Homo sapiens
catcatgctgccatc

SEQ ID NO: 17944 - DNA, 15 bp, Homo sapiens
ccatcatgctgccat

SEQ ID NO: 17945 - DNA, 15 bp, Homo sapiens
cccatcatgctgcca

SEQ ID NO: 17946 - DNA, 15 bp, Homo sapiens
acccatcatgctgcc

SEQ ID NO: 17947 - DNA, 15 bp, Homo sapiens
tacccatcatgctgc

SEQ ID NO: 17948 - DNA, 15 bp, Homo sapiens
gtacccatcatgctg

SEQ ID NO: 17949 - DNA, 15 bp, Homo sapiens
tgtacccatcatgct

SEQ ID NO: 17950 - DNA, 15 bp, Homo sapiens
ttgtacccatcatgc

SEQ ID NO: 17951 - DNA, 15 bp, Homo sapiens
tttgtacccatcatg

SEQ ID NO: 17952 - DNA, 15 bp, Homo sapiens
ttttgtacccatcat

SEQ ID NO: 17953 - DNA, 15 bp, Homo sapiens
cttttgtacccatca

SEQ ID NO: 17954 - DNA, 15 bp, Homo sapiens
gcttttgtacccatc

SEQ ID NO: 17955 - DNA, 15 bp, Homo sapiens
tgcttttgtacccat

SEQ ID NO: 17956 - DNA, 15 bp, Homo sapiens
gtgcttttgtaccca

SEQ ID NO: 17957 - DNA, 15 bp, Homo sapiens
tgtgcttttgtaccc

SEQ ID NO: 17958 - DNA, 15 bp, Homo sapiens
gtgtgcttttgtacc

SEQ ID NO: 17959 - DNA, 15 bp, Homo sapiens
tgtgtgcttttgtac

SEQ ID NO: 17960 - DNA, 15 bp, Homo sapiens
gtgtgtgcttttgta

SEQ ID NO: 17961 - DNA, 15 bp, Homo sapiens
agtgtgtgcttttgt

SEQ ID NO: 17962 - DNA, 15 bp, Homo sapiens
aagtgtgtgcttttg

SEQ ID NO: 17963 - DNA, 15 bp, Homo sapiens
taagtgtgtgctttt

SEQ ID NO: 17964 - DNA, 15 bp, Homo sapiens
ttaagtgtgtgcttt

SEQ ID NO: 17965 - DNA, 15 bp, Homo sapiens
cttaagtgtgtgctt

SEQ ID NO: 17966 - DNA, 15 bp, Homo sapiens
acttaagtgtgtgct

SEQ ID NO: 17967 - DNA, 15 bp, Homo sapiens
cacttaagtgtgtgc

SEQ ID NO: 17968 - DNA, 15 bp, Homo sapiens
acacttaagtgtgtg

SEQ ID NO: 17969 - DNA, 15 bp, Homo sapiens
gacacttaagtgtgt

SEQ ID NO: 17970 - DNA, 15 bp, Homo sapiens
tgacacttaagtgtg

SEQ ID NO: 17971 - DNA, 15 bp, Homo sapiens
ctgacacttaagtgt

SEQ ID NO: 17972 - DNA, 15 bp, Homo sapiens
actgacacttaagtg

SEQ ID NO: 17973 - DNA, 15 bp, Homo sapiens
tactgacacttaagt

SEQ ID NO: 17974 - DNA, 15 bp, Homo sapiens
ctactgacacttaag

SEQ ID NO: 17975 - DNA, 15 bp, Homo sapiens
tctactgacacttaa

SEQ ID NO: 17976 - DNA, 15 bp, Homo sapiens
atctactgacactta

SEQ ID NO: 17977 - DNA, 15 bp, Homo sapiens
gatctactgacactt

SEQ ID NO: 17978 - DNA, 15 bp, Homo sapiens
agatctactgacact

SEQ ID NO: 17979 - DNA, 15 bp, Homo sapiens
cagatctactgacac

SEQ ID NO: 17980 - DNA, 15 bp, Homo sapiens
ccagatctactgaca

SEQ ID NO: 17981 - DNA, 15 bp, Homo sapiens
cccagatctactgac

SEQ ID NO: 17982 - DNA, 15 bp, Homo sapiens
acccagatctactga

SEQ ID NO: 17983 - DNA, 15 bp, Homo sapiens
aacccagatctactg

SEQ ID NO: 17984 - DNA, 15 bp, Homo sapiens
gaacccagatctact

SEQ ID NO: 17985 - DNA, 15 bp, Homo sapiens
tgaacccagatctac

SEQ ID NO: 17986 - DNA, 15 bp, Homo sapiens
ttgaacccagatcta

SEQ ID NO: 17987 - DNA, 15 bp, Homo sapiens
tttgaacccagatct

SEQ ID NO: 17988 - DNA, 15 bp, Homo sapiens
gtttgaacccagatc

SEQ ID NO: 17989 - DNA, 15 bp, Homo sapiens
tgtttgaacccagat

SEQ ID NO: 17990 - DNA, 15 bp, Homo sapiens
atgtttgaacccaga

SEQ ID NO: 17991 - DNA, 15 bp, Homo sapiens
aatgtttgaacccag

SEQ ID NO: 17992 - DNA, 15 bp, Homo sapiens
caatgtttgaaccca

SEQ ID NO: 17993 - DNA, 15 bp, Homo sapiens
ccaatgtttgaaccc

SEQ ID NO: 17994 - DNA, 15 bp, Homo sapiens
accaatgtttgaacc

SEQ ID NO: 17995 - DNA, 15 bp, Homo sapiens
caccaatgtttgaac

SEQ ID NO: 17996 - DNA, 15 bp, Homo sapiens
gcaccaatgtttgaa

SEQ ID NO: 17997 - DNA, 15 bp, Homo sapiens
tgcaccaatgtttga

SEQ ID NO: 17998 - DNA, 15 bp, Homo sapiens
ctgcaccaatgtttg

SEQ ID NO: 17999 - DNA, 15 bp, Homo sapiens
actgcaccaatgttt

SEQ ID NO: 18000 - DNA, 15 bp, Homo sapiens
aactgcaccaatgtt

SEQ ID NO: 18001 - DNA, 15 bp, Homo sapiens
aaactgcaccaatgt

SEQ ID NO: 18002 - DNA, 15 bp, Homo sapiens
gaaactgcaccaatg

SEQ ID NO: 18003 - DNA, 15 bp, Homo sapiens
agaaactgcaccaat

SEQ ID NO: 18004 - DNA, 15 bp, Homo sapiens
aagaaactgcaccaa

SEQ ID NO: 18005 - DNA, 15 bp, Homo sapiens
taagaaactgcacca

SEQ ID NO: 18006 - DNA, 15 bp, Homo sapiens
ataagaaactgcacc

SEQ ID NO: 18007 - DNA, 15 bp, Homo sapiens
cataagaaactgcac

SEQ ID NO: 18008 - DNA, 15 bp, Homo sapiens
ccataagaaactgca

SEQ ID NO: 18009 - DNA, 15 bp, Homo sapiens
gccataagaaactgc

SEQ ID NO: 18010 - DNA, 15 bp, Homo sapiens
agccataagaaactg

SEQ ID NO: 18011 - DNA, 15 bp, Homo sapiens
gagccataagaaact

SEQ ID NO: 18012 - DNA, 15 bp, Homo sapiens
cgagccataagaaac

SEQ ID NO: 18013 - DNA, 15 bp, Homo sapiens
acgagccataagaaa

SEQ ID NO: 18014 - DNA, 15 bp, Homo sapiens
tacgagccataagaa

SEQ ID NO: 18015 - DNA, 15 bp, Homo sapiens
ttacgagccataaga

SEQ ID NO: 18016 - DNA, 15 bp, Homo sapiens
gttacgagccataag

SEQ ID NO: 18017 - DNA, 15 bp, Homo sapiens
agttacgagccataa

SEQ ID NO: 18018 - DNA, 15 bp, Homo sapiens
aagttacgagccata

SEQ ID NO: 18019 - DNA, 15 bp, Homo sapiens
caagttacgagccat

SEQ ID NO: 18020 - DNA, 15 bp, Homo sapiens
acaagttacgagcca

SEQ ID NO: 18021 - DNA, 15 bp, Homo sapiens
aacaagttacgagcc

SEQ ID NO: 18022 - DNA, 15 bp, Homo sapiens
gaacaagttacgagc

SEQ ID NO: 18023 - DNA, 15 bp, Homo sapiens
tgaacaagttacgag

SEQ ID NO: 18024 - DNA, 15 bp, Homo sapiens
ttgaacaagttacga

SEQ ID NO: 18025 - DNA, 15 bp, Homo sapiens
tttgaacaagttacg

SEQ ID NO: 18026 - DNA, 15 bp, Homo sapiens
gtttgaacaagttac

SEQ ID NO: 18027 - DNA, 15 bp, Homo sapiens
ggtttgaacaagtta

SEQ ID NO: 18028 - DNA, 15 bp, Homo sapiens
aggtttgaacaagtt

SEQ ID NO: 18029 - DNA, 15 bp, Homo sapiens
gaggtttgaacaagt

SEQ ID NO: 18030 - DNA, 15 bp, Homo sapiens
tgaggtttgaacaag

SEQ ID NO: 18031 - DNA, 15 bp, Homo sapiens
ctgaggtttgaacaa

SEQ ID NO: 18032 - DNA, 15 bp, Homo sapiens
actgaggtttgaaca

SEQ ID NO: 18033 - DNA, 15 bp, Homo sapiens
aactgaggtttgaac

SEQ ID NO: 18034 - DNA, 15 bp, Homo sapiens
aaactgaggtttgaa

SEQ ID NO: 18035 - DNA, 15 bp, Homo sapiens
gaaactgaggtttga

SEQ ID NO: 18036 - DNA, 15 bp, Homo sapiens
agaaactgaggtttg

SEQ ID NO: 18037 - DNA, 15 bp, Homo sapiens
aagaaactgaggttt

SEQ ID NO: 18038 - DNA, 15 bp, Homo sapiens
gaagaaactgaggtt

SEQ ID NO: 18039 - DNA, 15 bp, Homo sapiens
tgaagaaactgaggt

SEQ ID NO: 18040 - DNA, 15 bp, Homo sapiens
gtgaagaaactgagg

SEQ ID NO: 18041 - DNA, 15 bp, Homo sapiens
agtgaagaaactgag

SEQ ID NO: 18042 - DNA, 15 bp, Homo sapiens
aagtgaagaaactga

SEQ ID NO: 18043 - DNA, 15 bp, Homo sapiens
gaagtgaagaaactg

SEQ ID NO: 18044 - DNA, 15 bp, Homo sapiens
agaagtgaagaaact

SEQ ID NO: 18045 - DNA, 15 bp, Homo sapiens
tagaagtgaagaaac

SEQ ID NO: 18046 - DNA, 15 bp, Homo sapiens
ttagaagtgaagaaa

SEQ ID NO: 18047 - DNA, 15 bp, Homo sapiens
tttagaagtgaagaa

SEQ ID NO: 18048 - DNA, 15 bp, Homo sapiens
ttttagaagtgaaga

SEQ ID NO: 18049 - DNA, 15 bp, Homo sapiens
gttttagaagtgaag

SEQ ID NO: 18050 - DNA, 15 bp, Homo sapiens
cgttttagaagtgaa

SEQ ID NO: 18051 - DNA, 15 bp, Homo sapiens
ccgttttagaagtga

SEQ ID NO: 18052 - DNA, 15 bp, Homo sapiens
accgttttagaagtg

SEQ ID NO: 18053 - DNA, 15 bp, Homo sapiens
taccgttttagaagt

SEQ ID NO: 18054 - DNA, 15 bp, Homo sapiens
ttaccgttttagaag

SEQ ID NO: 18055 - DNA, 15 bp, Homo sapiens
attaccgttttagaa

SEQ ID NO: 18056 - DNA, 15 bp, Homo sapiens
cattaccgttttaga

SEQ ID NO: 18057 - DNA, 15 bp, Homo sapiens
tcattaccgttttag

SEQ ID NO: 18058 - DNA, 15 bp, Homo sapiens
atcattaccgtttta

SEQ ID NO: 18059 - DNA, 15 bp, Homo sapiens
tatcattaccgtttt

SEQ ID NO: 18060 - DNA, 15 bp, Homo sapiens
gtatcattaccgttt

SEQ ID NO: 18061 - DNA, 15 bp, Homo sapiens
tgtatcattaccgtt

SEQ ID NO: 18062 - DNA, 15 bp, Homo sapiens
ttgtatcattaccgt

SEQ ID NO: 18063 - DNA, 15 bp, Homo sapiens
gttgtatcattaccg

SEQ ID NO: 18064 - DNA, 15 bp, Homo sapiens
ggttgtatcattacc

SEQ ID NO: 18065 - DNA, 15 bp, Homo sapiens
aggttgtatcattac

SEQ ID NO: 18066 - DNA, 15 bp, Homo sapiens
taggttgtatcatta

SEQ ID NO: 18067 - DNA, 15 bp, Homo sapiens
gtaggttgtatcatt

SEQ ID NO: 18068 - DNA, 15 bp, Homo sapiens
ggtaggttgtatcat

SEQ ID NO: 18069 - DNA, 15 bp, Homo sapiens
aggtaggttgtatca

SEQ ID NO: 18070 - DNA, 15 bp, Homo sapiens
gaggtaggttgtatc

SEQ ID NO: 18071 - DNA, 15 bp, Homo sapiens
tgaggtaggttgtat

SEQ ID NO: 18072 - DNA, 15 bp, Homo sapiens
gtgaggtaggttgta

SEQ ID NO: 18073 - DNA, 15 bp, Homo sapiens
tgtgaggtaggttgt

SEQ ID NO: 18074 - DNA, 15 bp, Homo sapiens
ctgtgaggtaggttg

SEQ ID NO: 18075 - DNA, 15 bp, Homo sapiens
cctgtgaggtaggtt

SEQ ID NO: 18076 - DNA, 15 bp, Homo sapiens
ccctgtgaggtaggt

SEQ ID NO: 18077 - DNA, 15 bp, Homo sapiens
accctgtgaggtagg

SEQ ID NO: 18078 - DNA, 15 bp, Homo sapiens
aaccctgtgaggtag

SEQ ID NO: 18079 - DNA, 15 bp, Homo sapiens
taaccctgtgaggta

SEQ ID NO: 18080 - DNA, 15 bp, Homo sapiens
ataaccctgtgaggt

SEQ ID NO: 18081 - DNA, 15 bp, Homo sapiens
aataaccctgtgagg

SEQ ID NO: 18082 - DNA, 15 bp, Homo sapiens
taataaccctgtgag

SEQ ID NO: 18083 - DNA, 15 bp, Homo sapiens
ataataaccctgtga

SEQ ID NO: 18084 - DNA, 15 bp, Homo sapiens
cataataaccctgtg

SEQ ID NO: 18085 - DNA, 15 bp, Homo sapiens
tcataataaccctgt

SEQ ID NO: 18086 - DNA, 15 bp, Homo sapiens
ttcataataaccctg

SEQ ID NO: 18087 - DNA, 15 bp, Homo sapiens
attcataataaccct

SEQ ID NO: 18088 - DNA, 15 bp, Homo sapiens
aattcataataaccc

SEQ ID NO: 18089 - DNA, 15 bp, Homo sapiens
taattcataataacc

SEQ ID NO: 18090 - DNA, 15 bp, Homo sapiens
ttaattcataataac

SEQ ID NO: 18091 - DNA, 15 bp, Homo sapiens
tttaattcataataa

SEQ ID NO: 18092 - DNA, 15 bp, Homo sapiens
atttaattcataata

SEQ ID NO: 18093 - DNA, 15 bp, Homo sapiens
tatttaattcataat

SEQ ID NO: 18094 - DNA, 15 bp, Homo sapiens
gtatttaattcataa

SEQ ID NO: 18095 - DNA, 15 bp, Homo sapiens
agtatttaattcata

SEQ ID NO: 18096 - DNA, 15 bp, Homo sapiens
cagtatttaattcat

SEQ ID NO: 18097 - DNA, 15 bp, Homo sapiens
ccagtatttaattca

SEQ ID NO: 18098 - DNA, 15 bp, Homo sapiens
tccagtatttaattc

SEQ ID NO: 18099 - DNA, 15 bp, Homo sapiens
ctccagtatttaatt

SEQ ID NO: 18100 - DNA, 15 bp, Homo sapiens
tctccagtatttaat

SEQ ID NO: 18101 - DNA, 15 bp, Homo sapiens
atctccagtatttaa

SEQ ID NO: 18102 - DNA, 15 bp, Homo sapiens
catctccagtattta

SEQ ID NO: 18103 - DNA, 15 bp, Homo sapiens
tcatctccagtattt

SEQ ID NO: 18104 - DNA, 15 bp, Homo sapiens
ctcatctccagtatt

SEQ ID NO: 18105 - DNA, 15 bp, Homo sapiens
tctcatctccagtat

SEQ ID NO: 18106 - DNA, 15 bp, Homo sapiens
atctcatctccagta

SEQ ID NO: 18107 - DNA, 15 bp, Homo sapiens
tatctcatctccagt

SEQ ID NO: 18108 - DNA, 15 bp, Homo sapiens
gtatctcatctccag

SEQ ID NO: 18109 - DNA, 15 bp, Homo sapiens
tgtatctcatctcca

SEQ ID NO: 18110 - DNA, 15 bp, Homo sapiens
gtgtatctcatctcc

SEQ ID NO: 18111 - DNA, 15 bp, Homo sapiens
tgtgtatctcatctc

SEQ ID NO: 18112 - DNA, 15 bp, Homo sapiens
ttgtgtatctcatct

SEQ ID NO: 18113 - DNA, 15 bp, Homo sapiens
tttgtgtatctcatc

SEQ ID NO: 18114 - DNA, 15 bp, Homo sapiens
ttttgtgtatctcat

SEQ ID NO: 18115 - DNA, 15 bp, Homo sapiens
gttttgtgtatctca

SEQ ID NO: 18116 - DNA, 15 bp, Homo sapiens
cgttttgtgtatctc

SEQ ID NO: 18117 - DNA, 15 bp, Homo sapiens
acgttttgtgtatct

SEQ ID NO: 18118 - DNA, 15 bp, Homo sapiens
gacgttttgtgtatc

SEQ ID NO: 18119 - DNA, 15 bp, Homo sapiens
agacgttttgtgtat

SEQ ID NO: 18120 - DNA, 15 bp, Homo sapiens
aagacgttttgtgta

SEQ ID NO: 18121 - DNA, 15 bp, Homo sapiens
caagacgttttgtgt

SEQ ID NO: 18122 - DNA, 15 bp, Homo sapiens
tcaagacgttttgtg

SEQ ID NO: 18123 - DNA, 15 bp, Homo sapiens
ctcaagacgttttgt

SEQ ID NO: 18124 - DNA, 15 bp, Homo sapiens
actcaagacgttttg

SEQ ID NO: 18125 - DNA, 15 bp, Homo sapiens
tactcaagacgtttt

SEQ ID NO: 18126 - DNA, 15 bp, Homo sapiens
gtactcaagacgttt

SEQ ID NO: 18127 - DNA, 15 bp, Homo sapiens
tgtactcaagacgtt

SEQ ID NO: 18128 - DNA, 15 bp, Homo sapiens
gtgtactcaagacgt

SEQ ID NO: 18129 - DNA, 15 bp, Homo sapiens
tgtgtactcaagacg

SEQ ID NO: 18130 - DNA, 15 bp, Homo sapiens
ctgtgtactcaagac

SEQ ID NO: 18131 - DNA, 15 bp, Homo sapiens
actgtgtactcaaga

SEQ ID NO: 18132 - DNA, 15 bp, Homo sapiens
tactgtgtactcaag

SEQ ID NO: 18133 - DNA, 15 bp, Homo sapiens
ctactgtgtactcaa

SEQ ID NO: 18134 - DNA, 15 bp, Homo sapiens
gctactgtgtactca

SEQ ID NO: 18135 - DNA, 15 bp, Homo sapiens
agctactgtgtactc

SEQ ID NO: 18136 - DNA, 15 bp, Homo sapiens
cagctactgtgtact

SEQ ID NO: 18137 - DNA, 15 bp, Homo sapiens
gcagctactgtgtac

SEQ ID NO: 18138 - DNA, 15 bp, Homo sapiens
ggcagctactgtgta

SEQ ID NO: 18139 - DNA, 15 bp, Homo sapiens
gggcagctactgtgt

SEQ ID NO: 18140 - DNA, 15 bp, Homo sapiens
tgggcagctactgtg

SEQ ID NO: 18141 - DNA, 15 bp, Homo sapiens
ttgggcagctactgt

SEQ ID NO: 18142 - DNA, 15 bp, Homo sapiens
attgggcagctactg

SEQ ID NO: 18143 - DNA, 15 bp, Homo sapiens
tattgggcagctact

SEQ ID NO: 18144 - DNA, 15 bp, Homo sapiens
atattgggcagctac

SEQ ID NO: 18145 - DNA, 15 bp, Homo sapiens
aatattgggcagcta

SEQ ID NO: 18146 - DNA, 15 bp, Homo sapiens
caatattgggcagct

SEQ ID NO: 18147 - DNA, 15 bp, Homo sapiens
ccaatattgggcagc

SEQ ID NO: 18148 - DNA, 15 bp, Homo sapiens
gccaatattgggcag

SEQ ID NO: 18149 - DNA, 15 bp, Homo sapiens
agccaatattgggca

SEQ ID NO: 18150 - DNA, 15 bp, Homo sapiens
cagccaatattgggc

SEQ ID NO: 18151 - DNA, 15 bp, Homo sapiens
acagccaatattggg

SEQ ID NO: 18152 - DNA, 15 bp, Homo sapiens
tacagccaatattgg

SEQ ID NO: 18153 - DNA, 15 bp, Homo sapiens
ttacagccaatattg

SEQ ID NO: 18154 - DNA, 15 bp, Homo sapiens
cttacagccaatatt

SEQ ID NO: 18155 - DNA, 15 bp, Homo sapiens
acttacagccaatat

SEQ ID NO: 18156 - DNA, 15 bp, Homo sapiens
tacttacagccaata

SEQ ID NO: 18157 - DNA, 15 bp, Homo sapiens
atacttacagccaat

SEQ ID NO: 18158 - DNA, 15 bp, Homo sapiens
aatacttacagccaa

SEQ ID NO: 18159 - DNA, 15 bp, Homo sapiens
taatacttacagcca

SEQ ID NO: 18160 - DNA, 15 bp, Homo sapiens
ataatacttacagcc

SEQ ID NO: 18161 - DNA, 15 bp, Homo sapiens
tataatacttacagc

SEQ ID NO: 18162 - DNA, 15 bp, Homo sapiens
ttataatacttacag

SEQ ID NO: 18163 - DNA, 15 bp, Homo sapiens
tttataatacttaca

SEQ ID NO: 18164 - DNA, 15 bp, Homo sapiens
atttataatacttac

SEQ ID NO: 18165 - DNA, 15 bp, Homo sapiens
gatttataatactta

SEQ ID NO: 18166 - DNA, 15 bp, Homo sapiens
agatttataatactt

SEQ ID NO: 18167 - DNA, 15 bp, Homo sapiens
tagatttataatact

SEQ ID NO: 18168 - DNA, 15 bp, Homo sapiens
gtagatttataatac

SEQ ID NO: 18169 - DNA, 15 bp, Homo sapiens
tgtagatttataata

SEQ ID NO: 18170 - DNA, 15 bp, Homo sapiens
ttgtagatttataat

SEQ ID NO: 18171 - DNA, 15 bp, Homo sapiens
cttgtagatttataa

SEQ ID NO: 18172 - DNA, 15 bp, Homo sapiens
gcttgtagatttata

SEQ ID NO: 18173 - DNA, 15 bp, Homo sapiens
agcttgtagatttat

SEQ ID NO: 18174 - DNA, 15 bp, Homo sapiens
cagcttgtagattta

SEQ ID NO: 18175 - DNA, 15 bp, Homo sapiens
acagcttgtagattt

SEQ ID NO: 18176 - DNA, 15 bp, Homo sapiens
cacagcttgtagatt

SEQ ID NO: 18177 - DNA, 15 bp, Homo sapiens
tcacagcttgtagat

SEQ ID NO: 18178 - DNA, 15 bp, Homo sapiens
ttcacagcttgtaga

SEQ ID NO: 18179 - DNA, 15 bp, Homo sapiens
attcacagcttgtag

SEQ ID NO: 18180 - DNA, 15 bp, Homo sapiens
aattcacagcttgta

SEQ ID NO: 18181 - DNA, 15 bp, Homo sapiens
taattcacagcttgt

SEQ ID NO: 18182 - DNA, 15 bp, Homo sapiens
ttaattcacagcttg

SEQ ID NO: 18183 - DNA, 15 bp, Homo sapiens
attaattcacagctt

SEQ ID NO: 18184 - DNA, 15 bp, Homo sapiens
aattaattcacagct

SEQ ID NO: 18185 - DNA, 15 bp, Homo sapiens
aaattaattcacagc

SEQ ID NO: 18186 - DNA, 15 bp, Homo sapiens
aaaattaattcacag

SEQ ID NO: 18187 - DNA, 15 bp, Homo sapiens
taaaattaattcaca

SEQ ID NO: 18188 - DNA, 15 bp, Homo sapiens
gtaaaattaattcac

SEQ ID NO: 18189 - DNA, 15 bp, Homo sapiens
ggtaaaattaattca

SEQ ID NO: 18190 - DNA, 15 bp, Homo sapiens
aggtaaaattaattc

SEQ ID NO: 18191 - DNA, 15 bp, Homo sapiens
gaggtaaaattaatt

SEQ ID NO: 18192 - DNA, 15 bp, Homo sapiens
agaggtaaaattaat

SEQ ID NO: 18193 - DNA, 15 bp, Homo sapiens
gagaggtaaaattaa

SEQ ID NO: 18194 - DNA, 15 bp, Homo sapiens
agagaggtaaaatta

SEQ ID NO: 18195 - DNA, 15 bp, Homo sapiens
cagagaggtaaaatt

SEQ ID NO: 18196 - DNA, 15 bp, Homo sapiens
ccagagaggtaaaat

SEQ ID NO: 18197 - DNA, 15 bp, Homo sapiens
tccagagaggtaaaa

SEQ ID NO: 18198 - DNA, 15 bp, Homo sapiens
atccagagaggtaaa

SEQ ID NO: 18199 - DNA, 15 bp, Homo sapiens
gatccagagaggtaa

SEQ ID NO: 18200 - DNA, 15 bp, Homo sapiens
ggatccagagaggta

SEQ ID NO: 18201 - DNA, 15 bp, Homo sapiens
aggatccagagaggt

SEQ ID NO: 18202 - DNA, 15 bp, Homo sapiens
caggatccagagagg

SEQ ID NO: 18203 - DNA, 15 bp, Homo sapiens
acaggatccagagag

SEQ ID NO: 18204 - DNA, 15 bp, Homo sapiens
aacaggatccagaga

SEQ ID NO: 18205 - DNA, 15 bp, Homo sapiens
caacaggatccagag

SEQ ID NO: 18206 - DNA, 15 bp, Homo sapiens
tcaacaggatccaga

SEQ ID NO: 18207 - DNA, 15 bp, Homo sapiens
atcaacaggatccag

SEQ ID NO: 18208 - DNA, 15 bp, Homo sapiens
tatcaacaggatcca

SEQ ID NO: 18209 - DNA, 15 bp, Homo sapiens
atatcaacaggatcc

SEQ ID NO: 18210 - DNA, 15 bp, Homo sapiens
aatatcaacaggatc

SEQ ID NO: 18211 - DNA, 15 bp, Homo sapiens
aaatatcaacaggat

SEQ ID NO: 18212 - DNA, 15 bp, Homo sapiens
gaaatatcaacagga

SEQ ID NO: 18213 - DNA, 15 bp, Homo sapiens
agaaatatcaacagg

SEQ ID NO: 18214 - DNA, 15 bp, Homo sapiens
tagaaatatcaacag

SEQ ID NO: 18215 - DNA, 15 bp, Homo sapiens
ctagaaatatcaaca

SEQ ID NO: 18216 - DNA, 15 bp, Homo sapiens
tctagaaatatcaac

SEQ ID NO: 18217 - DNA, 15 bp, Homo sapiens
gtctagaaatatcaa

SEQ ID NO: 18218 - DNA, 15 bp, Homo sapiens
ggtctagaaatatca

SEQ ID NO: 18219 - DNA, 15 bp, Homo sapiens
tggtctagaaatatc

SEQ ID NO: 18220 - DNA, 15 bp, Homo sapiens
atggtctagaaatat

SEQ ID NO: 18221 - DNA, 15 bp, Homo sapiens
aatggtctagaaata

SEQ ID NO: 18222 - DNA, 15 bp, Homo sapiens
gaatggtctagaaat

SEQ ID NO: 18223 - DNA, 15 bp, Homo sapiens
ggaatggtctagaaa

SEQ ID NO: 18224 - DNA, 15 bp, Homo sapiens
tggaatggtctagaa

SEQ ID NO: 18225 - DNA, 15 bp, Homo sapiens
gtggaatggtctaga

SEQ ID NO: 18226 - DNA, 15 bp, Homo sapiens
ggtggaatggtctag

SEQ ID NO: 18227 - DNA, 15 bp, Homo sapiens
aggtggaatggtcta

SEQ ID NO: 18228 - DNA, 15 bp, Homo sapiens
taggtggaatggtct

SEQ ID NO: 18229 - DNA, 15 bp, Homo sapiens
ctaggtggaatggtc

SEQ ID NO: 18230 - DNA, 15 bp, Homo sapiens
actaggtggaatggt

SEQ ID NO: 18231 - DNA, 15 bp, Homo sapiens
cactaggtggaatgg

SEQ ID NO: 18232 - DNA, 15 bp, Homo sapiens
ccactaggtggaatg

SEQ ID NO: 18233 - DNA, 15 bp, Homo sapiens
cccactaggtggaat

SEQ ID NO: 18234 - DNA, 15 bp, Homo sapiens
ccccactaggtggaa

SEQ ID NO: 18235 - DNA, 15 bp, Homo sapiens
gccccactaggtgga

SEQ ID NO: 18236 - DNA, 15 bp, Homo sapiens
ggccccactaggtgg

SEQ ID NO: 18237 - DNA, 15 bp, Homo sapiens
tggccccactaggtg

SEQ ID NO: 18238 - DNA, 15 bp, Homo sapiens
atggccccactaggt

SEQ ID NO: 18239 - DNA, 15 bp, Homo sapiens
aatggccccactagg

SEQ ID NO: 18240 - DNA, 15 bp, Homo sapiens
aaatggccccactag

SEQ ID NO: 18241 - DNA, 15 bp, Homo sapiens
gaaatggccccacta

SEQ ID NO: 18242 - DNA, 15 bp, Homo sapiens
ggaaatggccccact

SEQ ID NO: 18243 - DNA, 15 bp, Homo sapiens
aggaaatggccccac

SEQ ID NO: 18244 - DNA, 15 bp, Homo sapiens
taggaaatggcccca

SEQ ID NO: 18245 - DNA, 15 bp, Homo sapiens
gtaggaaatggcccc

SEQ ID NO: 18246 - DNA, 15 bp, Homo sapiens
ggtaggaaatggccc

SEQ ID NO: 18247 - DNA, 15 bp, Homo sapiens
aggtaggaaatggcc

SEQ ID NO: 18248 - DNA, 15 bp, Homo sapiens
caggtaggaaatggc

SEQ ID NO: 18249 - DNA, 15 bp, Homo sapiens
tcaggtaggaaatgg

SEQ ID NO: 18250 - DNA, 15 bp, Homo sapiens
ctcaggtaggaaatg

SEQ ID NO: 18251 - DNA, 15 bp, Homo sapiens
actcaggtaggaaat

SEQ ID NO: 18252 - DNA, 15 bp, Homo sapiens
gactcaggtaggaaa

SEQ ID NO: 18253 - DNA, 15 bp, Homo sapiens
tgactcaggtaggaa

SEQ ID NO: 18254 - DNA, 15 bp, Homo sapiens
gtgactcaggtagga

SEQ ID NO: 18255 - DNA, 15 bp, Homo sapiens
ggtgactcaggtagg

SEQ ID NO: 18256 - DNA, 15 bp, Homo sapiens
gggtgactcaggtag

SEQ ID NO: 18257 - DNA, 15 bp, Homo sapiens
cgggtgactcaggta

SEQ ID NO: 18258 - DNA, 15 bp, Homo sapiens
acgggtgactcaggt

SEQ ID NO: 18259 - DNA, 15 bp, Homo sapiens
cacgggtgactcagg

SEQ ID NO: 18260 - DNA, 15 bp, Homo sapiens
ccacgggtgactcag

SEQ ID NO: 18261 - DNA, 15 bp, Homo sapiens
accacgggtgactca

SEQ ID NO: 18262 - DNA, 15 bp, Homo sapiens
caccacgggtgactc

SEQ ID NO: 18263 - DNA, 15 bp, Homo sapiens
acaccacgggtgact

SEQ ID NO: 18264 - DNA, 15 bp, Homo sapiens
gacaccacgggtgac

SEQ ID NO: 18265 - DNA, 15 bp, Homo sapiens
tgacaccacgggtga

SEQ ID NO: 18266 - DNA, 15 bp, Homo sapiens
ttgacaccacgggtg

SEQ ID NO: 18267 - DNA, 15 bp, Homo sapiens
tttgacaccacgggt

SEQ ID NO: 18268 - DNA, 15 bp, Homo sapiens
atttgacaccacggg

SEQ ID NO: 18269 - DNA, 15 bp, Homo sapiens
tatttgacaccacgg

SEQ ID NO: 18270 - DNA, 15 bp, Homo sapiens
ctatttgacaccacg

SEQ ID NO: 18271 - DNA, 15 bp, Homo sapiens
tctatttgacaccac

SEQ ID NO: 18272 - DNA, 15 bp, Homo sapiens
ttctatttgacacca

SEQ ID NO: 18273 - DNA, 15 bp, Homo sapiens
attctatttgacacc

SEQ ID NO: 18274 - DNA, 15 bp, Homo sapiens
cattctatttgacac

SEQ ID NO: 18275 - DNA, 15 bp, Homo sapiens
acattctatttgaca

SEQ ID NO: 18276 - DNA, 15 bp, Homo sapiens
gacattctatttgac

SEQ ID NO: 18277 - DNA, 15 bp, Homo sapiens
tgacattctatttga

SEQ ID NO: 18278 - DNA, 15 bp, Homo sapiens
atgacattctatttg

SEQ ID NO: 18279 - DNA, 15 bp, Homo sapiens
catgacattctattt

SEQ ID NO: 18280 - DNA, 15 bp, Homo sapiens
acatgacattctatt

SEQ ID NO: 18281 - DNA, 15 bp, Homo sapiens
cacatgacattctat

SEQ ID NO: 18282 - DNA, 15 bp, Homo sapiens
ccacatgacattcta

SEQ ID NO: 18283 - DNA, 15 bp, Homo sapiens
gccacatgacattct

SEQ ID NO: 18284 - DNA, 15 bp, Homo sapiens
ggccacatgacattc

SEQ ID NO: 18285 - DNA, 15 bp, Homo sapiens
aggccacatgacatt

SEQ ID NO: 18286 - DNA, 15 bp, Homo sapiens
gaggccacatgacat

SEQ ID NO: 18287 - DNA, 15 bp, Homo sapiens
ggaggccacatgaca

SEQ ID NO: 18288 - DNA, 15 bp, Homo sapiens
aggaggccacatgac

SEQ ID NO: 18289 - DNA, 15 bp, Homo sapiens
caggaggccacatga

SEQ ID NO: 18290 - DNA, 15 bp, Homo sapiens
tcaggaggccacatg

SEQ ID NO: 18291 - DNA, 15 bp, Homo sapiens
ctcaggaggccacat

SEQ ID NO: 18292 - DNA, 15 bp, Homo sapiens
actcaggaggccaca

SEQ ID NO: 18293 - DNA, 15 bp, Homo sapiens
aactcaggaggccac

SEQ ID NO: 18294 - DNA, 15 bp, Homo sapiens
caactcaggaggcca

SEQ ID NO: 18295 - DNA, 15 bp, Homo sapiens
ccaactcaggaggcc

SEQ ID NO: 18296 - DNA, 15 bp, Homo sapiens
cccaactcaggaggc

SEQ ID NO: 18297 - DNA, 15 bp, Homo sapiens
acccaactcaggagg

SEQ ID NO: 18298 - DNA, 15 bp, Homo sapiens
tacccaactcaggag

SEQ ID NO: 18299 - DNA, 15 bp, Homo sapiens
ctacccaactcagga

SEQ ID NO: 18300 - DNA, 15 bp, Homo sapiens
tctacccaactcagg

SEQ ID NO: 18301 - DNA, 15 bp, Homo sapiens
ttctacccaactcag

SEQ ID NO: 18302 - DNA, 15 bp, Homo sapiens
attctacccaactca

SEQ ID NO: 18303 - DNA, 15 bp, Homo sapiens
aattctacccaactc

SEQ ID NO: 18304 - DNA, 15 bp, Homo sapiens
caattctacccaact

SEQ ID NO: 18305 - DNA, 15 bp, Homo sapiens
ccaattctacccaac

SEQ ID NO: 18306 - DNA, 15 bp, Homo sapiens
gccaattctacccaa

SEQ ID NO: 18307 - DNA, 15 bp, Homo sapiens
agccaattctaccca

SEQ ID NO: 18308 - DNA, 15 bp, Homo sapiens
cagccaattctaccc

SEQ ID NO: 18309 - DNA, 15 bp, Homo sapiens
gcagccaattctacc

SEQ ID NO: 18310 - DNA, 15 bp, Homo sapiens
agcagccaattctac

SEQ ID NO: 18311 - DNA, 15 bp, Homo sapiens
gagcagccaattcta

SEQ ID NO: 18312 - DNA, 15 bp, Homo sapiens
tgagcagccaattct

SEQ ID NO: 18313 - DNA, 15 bp, Homo sapiens
atgagcagccaattc

SEQ ID NO: 18314 - DNA, 15 bp, Homo sapiens
gatgagcagccaatt

SEQ ID NO: 18315 - DNA, 15 bp, Homo sapiens
agatgagcagccaat

SEQ ID NO: 18316 - DNA, 15 bp, Homo sapiens
gagatgagcagccaa

SEQ ID NO: 18317 - DNA, 15 bp, Homo sapiens
tgagatgagcagcca

SEQ ID NO: 18318 - DNA, 15 bp, Homo sapiens
ttgagatgagcagcc

SEQ ID NO: 18319 - DNA, 15 bp, Homo sapiens
gttgagatgagcagc

SEQ ID NO: 18320 - DNA, 15 bp, Homo sapiens
ggttgagatgagcag

SEQ ID NO: 18321 - DNA, 15 bp, Homo sapiens
gggttgagatgagca

SEQ ID NO: 18322 - DNA, 15 bp, Homo sapiens
ggggttgagatgagc

SEQ ID NO: 18323 - DNA, 15 bp, Homo sapiens
cggggttgagatgag

SEQ ID NO: 18324 - DNA, 15 bp, Homo sapiens
gcggggttgagatga

SEQ ID NO: 18325 - DNA, 15 bp, Homo sapiens
agcggggttgagatg

SEQ ID NO: 18326 - DNA, 15 bp, Homo sapiens
tagcggggttgagat

SEQ ID NO: 18327 - DNA, 15 bp, Homo sapiens
gtagcggggttgaga

SEQ ID NO: 18328 - DNA, 15 bp, Homo sapiens
agtagcggggttgag

SEQ ID NO: 18329 - DNA, 15 bp, Homo sapiens
cagtagcggggttga

SEQ ID NO: 18330 - DNA, 15 bp, Homo sapiens
tcagtagcggggttg

SEQ ID NO: 18331 - DNA, 15 bp, Homo sapiens
gtcagtagcggggtt

SEQ ID NO: 18332 - DNA, 15 bp, Homo sapiens
agtcagtagcggggt

SEQ ID NO: 18333 - DNA, 15 bp, Homo sapiens
tagtcagtagcgggg

SEQ ID NO: 18334 - DNA, 15 bp, Homo sapiens
atagtcagtagcggg

SEQ ID NO: 18335 - DNA, 15 bp, Homo sapiens
gatagtcagtagcgg

SEQ ID NO: 18336 - DNA, 15 bp, Homo sapiens
agatagtcagtagcg

SEQ ID NO: 18337 - DNA, 15 bp, Homo sapiens
gagatagtcagtagc

SEQ ID NO: 18338 - DNA, 15 bp, Homo sapiens
agagatagtcagtag

SEQ ID NO: 18339 - DNA, 15 bp, Homo sapiens
cagagatagtcagta

SEQ ID NO: 18340 - DNA, 15 bp, Homo sapiens
acagagatagtcagt

SEQ ID NO: 18341 - DNA, 15 bp, Homo sapiens
cacagagatagtcag

SEQ ID NO: 18342 - DNA, 15 bp, Homo sapiens
tcacagagatagtca

SEQ ID NO: 18343 - DNA, 15 bp, Homo sapiens
atcacagagatagtc

SEQ ID NO: 18344 - DNA, 15 bp, Homo sapiens
aatcacagagatagt

SEQ ID NO: 18345 - DNA, 15 bp, Homo sapiens
aaatcacagagatag

SEQ ID NO: 18346 - DNA, 15 bp, Homo sapiens
taaatcacagagata

SEQ ID NO: 18347 - DNA, 15 bp, Homo sapiens
gtaaatcacagagat

SEQ ID NO: 18348 - DNA, 15 bp, Homo sapiens
ggtaaatcacagaga

SEQ ID NO: 18349 - DNA, 15 bp, Homo sapiens
gggtaaatcacagag

SEQ ID NO: 18350 - DNA, 15 bp, Homo sapiens
agggtaaatcacaga

SEQ ID NO: 18351 - DNA, 15 bp, Homo sapiens
aagggtaaatcacag

SEQ ID NO: 18352 - DNA, 15 bp, Homo sapiens
gaagggtaaatcaca

SEQ ID NO: 18353 - DNA, 15 bp, Homo sapiens
ggaagggtaaatcac

SEQ ID NO: 18354 - DNA, 15 bp, Homo sapiens
aggaagggtaaatca

SEQ ID NO: 18355 - DNA, 15 bp, Homo sapiens
gaggaagggtaaatc

SEQ ID NO: 18356 - DNA, 15 bp, Homo sapiens
ggaggaagggtaaat

SEQ ID NO: 18357 - DNA, 15 bp, Homo sapiens
tggaggaagggtaaa

SEQ ID NO: 18358 - DNA, 15 bp, Homo sapiens
ctggaggaagggtaa

SEQ ID NO: 18359 - DNA, 15 bp, Homo sapiens
gctggaggaagggta

SEQ ID NO: 18360 - DNA, 15 bp, Homo sapiens
ggctggaggaagggt

SEQ ID NO: 18361 - DNA, 15 bp, Homo sapiens
aggctggaggaaggg

SEQ ID NO: 18362 - DNA, 15 bp, Homo sapiens
aaggctggaggaagg

SEQ ID NO: 18363 - DNA, 15 bp, Homo sapiens
taaggctggaggaag

SEQ ID NO: 18364 - DNA, 15 bp, Homo sapiens
ctaaggctggaggaa

SEQ ID NO: 18365 - DNA, 15 bp, Homo sapiens
gctaaggctggagga

SEQ ID NO: 18366 - DNA, 15 bp, Homo sapiens
ggctaaggctggagg

SEQ ID NO: 18367 - DNA, 15 bp, Homo sapiens
aggctaaggctggag

SEQ ID NO: 18368 - DNA, 15 bp, Homo sapiens
aaggctaaggctgga

SEQ ID NO: 18369 - DNA, 15 bp, Homo sapiens
caaggctaaggctgg

SEQ ID NO: 18370 - DNA, 15 bp, Homo sapiens
gcaaggctaaggctg

SEQ ID NO: 18371 - DNA, 15 bp, Homo sapiens
agcaaggctaaggct

SEQ ID NO: 18372 - DNA, 15 bp, Homo sapiens
tagcaaggctaaggc

SEQ ID NO: 18373 - DNA, 15 bp, Homo sapiens
gtagcaaggctaagg

SEQ ID NO: 18374 - DNA, 15 bp, Homo sapiens
tgtagcaaggctaag

SEQ ID NO: 18375 - DNA, 15 bp, Homo sapiens
atgtagcaaggctaa

SEQ ID NO: 18376 - DNA, 15 bp, Homo sapiens
tatgtagcaaggcta

SEQ ID NO: 18377 - DNA, 15 bp, Homo sapiens
atatgtagcaaggct

SEQ ID NO: 18378 - DNA, 15 bp, Homo sapiens
tatatgtagcaaggc

SEQ ID NO: 18379 - DNA, 15 bp, Homo sapiens
ttatatgtagcaagg

SEQ ID NO: 18380 - DNA, 15 bp, Homo sapiens
tttatatgtagcaag

SEQ ID NO: 18381 - DNA, 15 bp, Homo sapiens
ttttatatgtagcaa

SEQ ID NO: 18382 - DNA, 15 bp, Homo sapiens
attttatatgtagca

SEQ ID NO: 18383 - DNA, 15 bp, Homo sapiens
gattttatatgtagc

SEQ ID NO: 18384 - DNA, 15 bp, Homo sapiens
tgattttatatgtag

SEQ ID NO: 18385 - DNA, 15 bp, Homo sapiens
ttgattttatatgta

SEQ ID NO: 18386 - DNA, 15 bp, Homo sapiens
cttgattttatatgt

SEQ ID NO: 18387 - DNA, 15 bp, Homo sapiens
tcttgattttatatg

SEQ ID NO: 18388 - DNA, 15 bp, Homo sapiens
gtcttgattttatat

SEQ ID NO: 18389 - DNA, 15 bp, Homo sapiens
tgtcttgattttata

SEQ ID NO: 18390 - DNA, 15 bp, Homo sapiens
ttgtcttgattttat

SEQ ID NO: 18391 - DNA, 15 bp, Homo sapiens
attgtcttgatttta

SEQ ID NO: 18392 - DNA, 15 bp, Homo sapiens
tattgtcttgatttt

SEQ ID NO: 18393 - DNA, 15 bp, Homo sapiens
ttattgtcttgattt

SEQ ID NO: 18394 - DNA, 15 bp, Homo sapiens
attattgtcttgatt

SEQ ID NO: 18395 - DNA, 15 bp, Homo sapiens
cattattgtcttgat

SEQ ID NO: 18396 - DNA, 15 bp, Homo sapiens
acattattgtcttga

SEQ ID NO: 18397 - DNA, 15 bp, Homo sapiens
aacattattgtcttg

SEQ ID NO: 18398 - DNA, 15 bp, Homo sapiens
aaacattattgtctt

SEQ ID NO: 18399 - DNA, 15 bp, Homo sapiens
gaaacattattgtct

SEQ ID NO: 18400 - DNA, 15 bp, Homo sapiens
ggaaacattattgtc

SEQ ID NO: 18401 - DNA, 15 bp, Homo sapiens
aggaaacattattgt

SEQ ID NO: 18402 - DNA, 15 bp, Homo sapiens
taggaaacattattg

SEQ ID NO: 18403 - DNA, 15 bp, Homo sapiens
ataggaaacattatt

SEQ ID NO: 18404 - DNA, 15 bp, Homo sapiens
gataggaaacattat

SEQ ID NO: 18405 - DNA, 15 bp, Homo sapiens
agataggaaacatta

SEQ ID NO: 18406 - DNA, 15 bp, Homo sapiens
gagataggaaacatt

SEQ ID NO: 18407 - DNA, 15 bp, Homo sapiens
tgagataggaaacat

SEQ ID NO: 18408 - DNA, 15 bp, Homo sapiens
gtgagataggaaaca

SEQ ID NO: 18409 - DNA, 15 bp, Homo sapiens
tgtgagataggaaac

SEQ ID NO: 18410 - DNA, 15 bp, Homo sapiens
ctgtgagataggaaa

SEQ ID NO: 18411 - DNA, 15 bp, Homo sapiens
cctgtgagataggaa

SEQ ID NO: 18412 - DNA, 15 bp, Homo sapiens
ccctgtgagatagga

SEQ ID NO: 18413 - DNA, 15 bp, Homo sapiens
accctgtgagatagg

SEQ ID NO: 18414 - DNA, 15 bp, Homo sapiens
aaccctgtgagatag

SEQ ID NO: 18415 - DNA, 15 bp, Homo sapiens
caaccctgtgagata

SEQ ID NO: 18416 - DNA, 15 bp, Homo sapiens
acaaccctgtgagat

SEQ ID NO: 18417 - DNA, 15 bp, Homo sapiens
gacaaccctgtgaga

SEQ ID NO: 18418 - DNA, 15 bp, Homo sapiens
ggacaaccctgtgag

SEQ ID NO: 18419 - DNA, 15 bp, Homo sapiens
aggacaaccctgtga

SEQ ID NO: 18420 - DNA, 15 bp, Homo sapiens
caggacaaccctgtg

SEQ ID NO: 18421 - DNA, 15 bp, Homo sapiens
tcaggacaaccctgt

SEQ ID NO: 18422 - DNA, 15 bp, Homo sapiens
ctcaggacaaccctg

SEQ ID NO: 18423 - DNA, 15 bp, Homo sapiens
cctcaggacaaccct

SEQ ID NO: 18424 - DNA, 15 bp, Homo sapiens
tcctcaggacaaccc

SEQ ID NO: 18425 - DNA, 15 bp, Homo sapiens
atcctcaggacaacc

SEQ ID NO: 18426 - DNA, 15 bp, Homo sapiens
aatcctcaggacaac

SEQ ID NO: 18427 - DNA, 15 bp, Homo sapiens
taatcctcaggacaa

SEQ ID NO: 18428 - DNA, 15 bp, Homo sapiens
ttaatcctcaggaca

SEQ ID NO: 18429 - DNA, 15 bp, Homo sapiens
tttaatcctcaggac

SEQ ID NO: 18430 - DNA, 15 bp, Homo sapiens
atttaatcctcagga

SEQ ID NO: 18431 - DNA, 15 bp, Homo sapiens
aatttaatcctcagg

SEQ ID NO: 18432 - DNA, 15 bp, Homo sapiens
taatttaatcctcag

SEQ ID NO: 18433 - DNA, 15 bp, Homo sapiens
ttaatttaatcctca

SEQ ID NO: 18434 - DNA, 15 bp, Homo sapiens
cttaatttaatcctc

SEQ ID NO: 18435 - DNA, 15 bp, Homo sapiens
acttaatttaatcct

SEQ ID NO: 18436 - DNA, 15 bp, Homo sapiens
tacttaatttaatcc

SEQ ID NO: 18437 - DNA, 15 bp, Homo sapiens
ttacttaatttaatc

SEQ ID NO: 18438 - DNA, 15 bp, Homo sapiens
attacttaatttaat

SEQ ID NO: 18439 - DNA, 15 bp, Homo sapiens
aattacttaatttaa

SEQ ID NO: 18440 - DNA, 15 bp, Homo sapiens
taattacttaattta

SEQ ID NO: 18441 - DNA, 15 bp, Homo sapiens
ttaattacttaattt

SEQ ID NO: 18442 - DNA, 15 bp, Homo sapiens
attaattacttaatt

SEQ ID NO: 18443 - DNA, 15 bp, Homo sapiens
tattaattacttaat

SEQ ID NO: 18444 - DNA, 15 bp, Homo sapiens
atattaattacttaa

SEQ ID NO: 18445 - DNA, 15 bp, Homo sapiens
tatattaattactta

SEQ ID NO: 18446 - DNA, 15 bp, Homo sapiens
ttatattaattactt

SEQ ID NO: 18447 - DNA, 15 bp, Homo sapiens
tttatattaattact

SEQ ID NO: 18448 - DNA, 15 bp, Homo sapiens
ttttatattaattac

SEQ ID NO: 18449 - DNA, 15 bp, Homo sapiens
attttatattaatta

SEQ ID NO: 18450 - DNA, 15 bp, Homo sapiens
cattttatattaatt

SEQ ID NO: 18451 - DNA, 15 bp, Homo sapiens
acattttatattaat

SEQ ID NO: 18452 - DNA, 15 bp, Homo sapiens
cacattttatattaa

SEQ ID NO: 18453 - DNA, 15 bp, Homo sapiens
gcacattttatatta

SEQ ID NO: 18454 - DNA, 15 bp, Homo sapiens
ggcacattttatatt

SEQ ID NO: 18455 - DNA, 15 bp, Homo sapiens
aggcacattttatat

SEQ ID NO: 18456 - DNA, 15 bp, Homo sapiens
aaggcacattttata

SEQ ID NO: 18457 - DNA, 15 bp, Homo sapiens
caaggcacattttat

SEQ ID NO: 18458 - DNA, 15 bp, Homo sapiens
acaaggcacatttta

SEQ ID NO: 18459 - DNA, 15 bp, Homo sapiens
tacaaggcacatttt

SEQ ID NO: 18460 - DNA, 15 bp, Homo sapiens
gtacaaggcacattt

SEQ ID NO: 18461 - DNA, 15 bp, Homo sapiens
tgtacaaggcacatt

SEQ ID NO: 18462 - DNA, 15 bp, Homo sapiens
atgtacaaggcacat

SEQ ID NO: 18463 - DNA, 15 bp, Homo sapiens
tatgtacaaggcaca

SEQ ID NO: 18464 - DNA, 15 bp, Homo sapiens
atatgtacaaggcac

SEQ ID NO: 18465 - DNA, 15 bp, Homo sapiens
aatatgtacaaggca

SEQ ID NO: 18466 - DNA, 15 bp, Homo sapiens
caatatgtacaaggc

SEQ ID NO: 18467 - DNA, 15 bp, Homo sapiens
ccaatatgtacaagg

SEQ ID NO: 18468 - DNA, 15 bp, Homo sapiens
cccaatatgtacaag

SEQ ID NO: 18469 - DNA, 15 bp, Homo sapiens
gcccaatatgtacaa

SEQ ID NO: 18470 - DNA, 15 bp, Homo sapiens
ggcccaatatgtaca

SEQ ID NO: 18471 - DNA, 15 bp, Homo sapiens
gggcccaatatgtac

SEQ ID NO: 18472 - DNA, 15 bp, Homo sapiens
agggcccaatatgta

SEQ ID NO: 18473 - DNA, 15 bp, Homo sapiens
tagggcccaatatgt

SEQ ID NO: 18474 - DNA, 15 bp, Homo sapiens
ttagggcccaatatg

SEQ ID NO: 18475 - DNA, 15 bp, Homo sapiens
tttagggcccaatat

SEQ ID NO: 18476 - DNA, 15 bp, Homo sapiens
atttagggcccaata

SEQ ID NO: 18477 - DNA, 15 bp, Homo sapiens
tatttagggcccaat

SEQ ID NO: 18478 - DNA, 15 bp, Homo sapiens
ttatttagggcccaa

SEQ ID NO: 18479 - DNA, 15 bp, Homo sapiens
tttatttagggccca

SEQ ID NO: 18480 - DNA, 15 bp, Homo sapiens
gtttatttagggccc

SEQ ID NO: 18481 - DNA, 15 bp, Homo sapiens
tgtttatttagggcc

SEQ ID NO: 18482 - DNA, 15 bp, Homo sapiens
ctgtttatttagggc

SEQ ID NO: 18483 - DNA, 15 bp, Homo sapiens
actgtttatttaggg

SEQ ID NO: 18484 - DNA, 15 bp, Homo sapiens
tactgtttatttagg

SEQ ID NO: 18485 - DNA, 15 bp, Homo sapiens
ctactgtttatttag

SEQ ID NO: 18486 - DNA, 15 bp, Homo sapiens
gctactgtttattta

SEQ ID NO: 18487 - DNA, 15 bp, Homo sapiens
agctactgtttattt

SEQ ID NO: 18488 - DNA, 15 bp, Homo sapiens
tagctactgtttatt

SEQ ID NO: 18489 - DNA, 15 bp, Homo sapiens
gtagctactgtttat

SEQ ID NO: 18490 - DNA, 15 bp, Homo sapiens
agtagctactgttta

SEQ ID NO: 18491 - DNA, 15 bp, Homo sapiens
tagtagctactgttt

SEQ ID NO: 18492 - DNA, 15 bp, Homo sapiens
atagtagctactgtt

SEQ ID NO: 18493 - DNA, 15 bp, Homo sapiens
aatagtagctactgt

SEQ ID NO: 18494 - DNA, 15 bp, Homo sapiens
aaatagtagctactg

SEQ ID NO: 18495 - DNA, 15 bp, Homo sapiens
taaatagtagctact

SEQ ID NO: 18496 - DNA, 15 bp, Homo sapiens
ataaatagtagctac

SEQ ID NO: 18497 - DNA, 15 bp, Homo sapiens
gataaatagtagcta

SEQ ID NO: 18498 - DNA, 15 bp, Homo sapiens
ggataaatagtagct

SEQ ID NO: 18499 - DNA, 15 bp, Homo sapiens
aggataaatagtagc

SEQ ID NO: 18500 - DNA, 15 bp, Homo sapiens
aaggataaatagtag

SEQ ID NO: 18501 - DNA, 15 bp, Homo sapiens
taaggataaatagta

SEQ ID NO: 18502 - DNA, 15 bp, Homo sapiens
ttaaggataaatagt

SEQ ID NO: 18503 - DNA, 15 bp, Homo sapiens
tttaaggataaatag

SEQ ID NO: 18504 - DNA, 15 bp, Homo sapiens
ctttaaggataaata

SEQ ID NO: 18505 - DNA, 15 bp, Homo sapiens
actttaaggataaat

SEQ ID NO: 18506 - DNA, 15 bp, Homo sapiens
tactttaaggataaa

SEQ ID NO: 18507 - DNA, 15 bp, Homo sapiens
gtactttaaggataa

SEQ ID NO: 18508 - DNA, 15 bp, Homo sapiens
tgtactttaaggata

SEQ ID NO: 18509 - DNA, 15 bp, Homo sapiens
ttgtactttaaggat

SEQ ID NO: 18510 - DNA, 15 bp, Homo sapiens
tttgtactttaagga

SEQ ID NO: 18511 - DNA, 15 bp, Homo sapiens
atttgtactttaagg

SEQ ID NO: 18512 - DNA, 15 bp, Homo sapiens
catttgtactttaag

SEQ ID NO: 18513 - DNA, 15 bp, Homo sapiens
ccatttgtactttaa

SEQ ID NO: 18514 - DNA, 15 bp, Homo sapiens
accatttgtacttta

SEQ ID NO: 18515 - DNA, 15 bp, Homo sapiens
taccatttgtacttt

SEQ ID NO: 18516 - DNA, 15 bp, Homo sapiens
ctaccatttgtactt

SEQ ID NO: 18517 - DNA, 15 bp, Homo sapiens
actaccatttgtact

SEQ ID NO: 18518 - DNA, 15 bp, Homo sapiens
aactaccatttgtac

SEQ ID NO: 18519 - DNA, 15 bp, Homo sapiens
aaactaccatttgta

SEQ ID NO: 18520 - DNA, 15 bp, Homo sapiens
gaaactaccatttgt

SEQ ID NO: 18521 - DNA, 15 bp, Homo sapiens
tgaaactaccatttg

SEQ ID NO: 18522 - DNA, 15 bp, Homo sapiens
ctgaaactaccattt

SEQ ID NO: 18523 - DNA, 15 bp, Homo sapiens
tctgaaactaccatt

SEQ ID NO: 18524 - DNA, 15 bp, Homo sapiens
ctctgaaactaccat

SEQ ID NO: 18525 - DNA, 15 bp, Homo sapiens
gctctgaaactacca

SEQ ID NO: 18526 - DNA, 15 bp, Homo sapiens
agctctgaaactacc

SEQ ID NO: 18527 - DNA, 15 bp, Homo sapiens
aagctctgaaactac

SEQ ID NO: 18528 - DNA, 15 bp, Homo sapiens
gaagctctgaaacta

SEQ ID NO: 18529 - DNA, 15 bp, Homo sapiens
tgaagctctgaaact

SEQ ID NO: 18530 - DNA, 15 bp, Homo sapiens
ttgaagctctgaaac

SEQ ID NO: 18531 - DNA, 15 bp, Homo sapiens
cttgaagctctgaaa

SEQ ID NO: 18532 - DNA, 15 bp, Homo sapiens
ccttgaagctctgaa

SEQ ID NO: 18533 - DNA, 15 bp, Homo sapiens
gccttgaagctctga

SEQ ID NO: 18534 - DNA, 15 bp, Homo sapiens
agccttgaagctctg

SEQ ID NO: 18535 - DNA, 15 bp, Homo sapiens
cagccttgaagctct

SEQ ID NO: 18536 - DNA, 15 bp, Homo sapiens
tcagccttgaagctc

SEQ ID NO: 18537 - DNA, 15 bp, Homo sapiens
atcagccttgaagct

SEQ ID NO: 18538 - DNA, 15 bp, Homo sapiens
catcagccttgaagc

SEQ ID NO: 18539 - DNA, 15 bp, Homo sapiens
ccatcagccttgaag

SEQ ID NO: 18540 - DNA, 15 bp, Homo sapiens
gccatcagccttgaa

SEQ ID NO: 18541 - DNA, 15 bp, Homo sapiens
agccatcagccttga

SEQ ID NO: 18542 - DNA, 15 bp, Homo sapiens
tagccatcagccttg

SEQ ID NO: 18543 - DNA, 15 bp, Homo sapiens
atagccatcagcctt

SEQ ID NO: 18544 - DNA, 15 bp, Homo sapiens
aatagccatcagcct

SEQ ID NO: 18545 - DNA, 15 bp, Homo sapiens
aaatagccatcagcc

SEQ ID NO: 18546 - DNA, 15 bp, Homo sapiens
taaatagccatcagc

SEQ ID NO: 18547 - DNA, 15 bp, Homo sapiens
ataaatagccatcag

SEQ ID NO: 18548 - DNA, 15 bp, Homo sapiens
gataaatagccatca

SEQ ID NO: 18549 - DNA, 15 bp, Homo sapiens
agataaatagccatc

SEQ ID NO: 18550 - DNA, 15 bp, Homo sapiens
aagataaatagccat

SEQ ID NO: 18551 - DNA, 15 bp, Homo sapiens
taagataaatagcca

SEQ ID NO: 18552 - DNA, 15 bp, Homo sapiens
gtaagataaatagcc

SEQ ID NO: 18553 - DNA, 15 bp, Homo sapiens
agtaagataaatagc

SEQ ID NO: 18554 - DNA, 15 bp, Homo sapiens
gagtaagataaatag

SEQ ID NO: 18555 - DNA, 15 bp, Homo sapiens
tgagtaagataaata

SEQ ID NO: 18556 - DNA, 15 bp, Homo sapiens
atgagtaagataaat

SEQ ID NO: 18557 - DNA, 15 bp, Homo sapiens
tatgagtaagataaa

SEQ ID NO: 18558 - DNA, 15 bp, Homo sapiens
gtatgagtaagataa

SEQ ID NO: 18559 - DNA, 15 bp, Homo sapiens
agtatgagtaagata

SEQ ID NO: 18560 - DNA, 15 bp, Homo sapiens
gagtatgagtaagat

SEQ ID NO: 18561 - DNA, 15 bp, Homo sapiens
agagtatgagtaaga

SEQ ID NO: 18562 - DNA, 15 bp, Homo sapiens
aagagtatgagtaag

SEQ ID NO: 18563 - DNA, 15 bp, Homo sapiens
aaagagtatgagtaa

SEQ ID NO: 18564 - DNA, 15 bp, Homo sapiens
caaagagtatgagta

SEQ ID NO: 18565 - DNA, 15 bp, Homo sapiens
acaaagagtatgagt

SEQ ID NO: 18566 - DNA, 15 bp, Homo sapiens
aacaaagagtatgag

SEQ ID NO: 18567 - DNA, 15 bp, Homo sapiens
aaacaaagagtatga

SEQ ID NO: 18568 - DNA, 15 bp, Homo sapiens
taaacaaagagtatg

SEQ ID NO: 18569 - DNA, 15 bp, Homo sapiens
ctaaacaaagagtat

SEQ ID NO: 18570 - DNA, 15 bp, Homo sapiens
gctaaacaaagagta

SEQ ID NO: 18571 - DNA, 15 bp, Homo sapiens
agctaaacaaagagt

SEQ ID NO: 18572 - DNA, 15 bp, Homo sapiens
aagctaaacaaagag

SEQ ID NO: 18573 - DNA, 15 bp, Homo sapiens
gaagctaaacaaaga

SEQ ID NO: 18574 - DNA, 15 bp, Homo sapiens
tgaagctaaacaaag

SEQ ID NO: 18575 - DNA, 15 bp, Homo sapiens
atgaagctaaacaaa

SEQ ID NO: 18576 - DNA, 15 bp, Homo sapiens
aatgaagctaaacaa

SEQ ID NO: 18577 - DNA, 15 bp, Homo sapiens
aaatgaagctaaaca

SEQ ID NO: 18578 - DNA, 15 bp, Homo sapiens
aaaatgaagctaaac

SEQ ID NO: 18579 - DNA, 15 bp, Homo sapiens
aaaaatgaagctaaa

SEQ ID NO: 18580 - DNA, 15 bp, Homo sapiens
aaaaaatgaagctaa

SEQ ID NO: 18581 - DNA, 15 bp, Homo sapiens
aaaaaaatgaagcta

SEQ ID NO: 18582 - DNA, 15 bp, Homo sapiens
gaaaaaaatgaagct

SEQ ID NO: 18583 - DNA, 15 bp, Homo sapiens
ggaaaaaaatgaagc

SEQ ID NO: 18584 - DNA, 15 bp, Homo sapiens
gggaaaaaaatgaag

SEQ ID NO: 18585 - DNA, 15 bp, Homo sapiens
ggggaaaaaaatgaa

SEQ ID NO: 18586 - DNA, 15 bp, Homo sapiens
aggggaaaaaaatga

SEQ ID NO: 18587 - DNA, 15 bp, Homo sapiens
taggggaaaaaaatg

SEQ ID NO: 18588 - DNA, 15 bp, Homo sapiens
ttaggggaaaaaaat

SEQ ID NO: 18589 - DNA, 15 bp, Homo sapiens
attaggggaaaaaaa

SEQ ID NO: 18590 - DNA, 15 bp, Homo sapiens
aattaggggaaaaaa

SEQ ID NO: 18591 - DNA, 15 bp, Homo sapiens
aaattaggggaaaaa

SEQ ID NO: 18592 - DNA, 15 bp, Homo sapiens
gaaattaggggaaaa

SEQ ID NO: 18593 - DNA, 15 bp, Homo sapiens
tgaaattaggggaaa

SEQ ID NO: 18594 - DNA, 15 bp, Homo sapiens
atgaaattaggggaa

SEQ ID NO: 18595 - DNA, 15 bp, Homo sapiens
aatgaaattagggga

SEQ ID NO: 18596 - DNA, 15 bp, Homo sapiens
taatgaaattagggg

SEQ ID NO: 18597 - DNA, 15 bp, Homo sapiens
ctaatgaaattaggg

SEQ ID NO: 18598 - DNA, 15 bp, Homo sapiens
actaatgaaattagg

SEQ ID NO: 18599 - DNA, 15 bp, Homo sapiens
tactaatgaaattag

SEQ ID NO: 18600 - DNA, 15 bp, Homo sapiens
atactaatgaaatta

SEQ ID NO: 18601 - DNA, 15 bp, Homo sapiens
aatactaatgaaatt

SEQ ID NO: 18602 - DNA, 15 bp, Homo sapiens
aaatactaatgaaat

SEQ ID NO: 18603 - DNA, 15 bp, Homo sapiens
aaaatactaatgaaa

SEQ ID NO: 18604 - DNA, 15 bp, Homo sapiens
gaaaatactaatgaa

SEQ ID NO: 18605 - DNA, 15 bp, Homo sapiens
agaaaatactaatga

SEQ ID NO: 18606 - DNA, 15 bp, Homo sapiens
aagaaaatactaatg

SEQ ID NO: 18607 - DNA, 15 bp, Homo sapiens
aaagaaaatactaat

SEQ ID NO: 18608 - DNA, 15 bp, Homo sapiens
aaaagaaaatactaa

SEQ ID NO: 18609 - DNA, 15 bp, Homo sapiens
gaaaagaaaatacta

SEQ ID NO: 18610 - DNA, 15 bp, Homo sapiens
agaaaagaaaatact

SEQ ID NO: 18611 - DNA, 15 bp, Homo sapiens
aagaaaagaaaatac

SEQ ID NO: 18612 - DNA, 15 bp, Homo sapiens
aaagaaaagaaaata

SEQ ID NO: 18613 - DNA, 15 bp, Homo sapiens
aaaagaaaagaaaat

SEQ ID NO: 18614 - DNA, 15 bp, Homo sapiens
aaaaagaaaagaaaa

SEQ ID NO: 18615 - DNA, 15 bp, Homo sapiens
aaaaaagaaaagaaa

SEQ ID NO: 18616 - DNA, 15 bp, Homo sapiens
aaaaaaagaaaagaa

SEQ ID NO: 18617 - DNA, 15 bp, Homo sapiens
aaaaaaaagaaaaga

SEQ ID NO: 18618 - DNA, 15 bp, Homo sapiens
aaaaaaaaagaaaag

SEQ ID NO: 18619 - DNA, 15 bp, Homo sapiens
acctcaaaaaaaaaa

SEQ ID NO: 18620 - DNA, 15 bp, Homo sapiens
cacctcaaaaaaaaa

SEQ ID NO: 18621 - DNA, 15 bp, Homo sapiens
tcacctcaaaaaaaa

SEQ ID NO: 18622 - DNA, 15 bp, Homo sapiens
ttcacctcaaaaaaa

SEQ ID NO: 18623 - DNA, 15 bp, Homo sapiens
cttcacctcaaaaaa

SEQ ID NO: 18624 - DNA, 15 bp, Homo sapiens
acttcacctcaaaaa

SEQ ID NO: 18625 - DNA, 15 bp, Homo sapiens
gacttcacctcaaaa

SEQ ID NO: 18626 - DNA, 15 bp, Homo sapiens
agacttcacctcaaa

SEQ ID NO: 18627 - DNA, 15 bp, Homo sapiens
gagacttcacctcaa

SEQ ID NO: 18628 - DNA, 15 bp, Homo sapiens
tgagacttcacctca

SEQ ID NO: 18629 - DNA, 15 bp, Homo sapiens
gtgagacttcacctc

SEQ ID NO: 18630 - DNA, 15 bp, Homo sapiens
agtgagacttcacct

SEQ ID NO: 18631 - DNA, 15 bp, Homo sapiens
gagtgagacttcacc

SEQ ID NO: 18632 - DNA, 15 bp, Homo sapiens
agagtgagacttcac

SEQ ID NO: 18633 - DNA, 15 bp, Homo sapiens
cagagtgagacttca

SEQ ID NO: 18634 - DNA, 15 bp, Homo sapiens
acagagtgagacttc

SEQ ID NO: 18635 - DNA, 15 bp, Homo sapiens
aacagagtgagactt

SEQ ID NO: 18636 - DNA, 15 bp, Homo sapiens
gcaacagagtgagac

SEQ ID NO: 18637 - DNA, 15 bp, Homo sapiens
ggcaacagagtgaga

SEQ ID NO: 18638 - DNA, 15 bp, Homo sapiens
gggcaacagagtgag

SEQ ID NO: 18639 - DNA, 15 bp, Homo sapiens
tgggcaacagagtga

SEQ ID NO: 18640 - DNA, 15 bp, Homo sapiens
ctgggcaacagagtg

SEQ ID NO: 18641 - DNA, 15 bp, Homo sapiens
cctgggcaacagagt

SEQ ID NO: 18642 - DNA, 15 bp, Homo sapiens
ctccattgcactcca

SEQ ID NO: 18643 - DNA, 15 bp, Homo sapiens
gctccattgcactcc

SEQ ID NO: 18644 - DNA, 15 bp, Homo sapiens
cgctccattgcactc

SEQ ID NO: 18645 - DNA, 15 bp, Homo sapiens
tcgctccattgcact

SEQ ID NO: 18646 - DNA, 15 bp, Homo sapiens
atcgctccattgcac

SEQ ID NO: 18647 - DNA, 15 bp, Homo sapiens
gatcgctccattgca

SEQ ID NO: 18648 - DNA, 15 bp, Homo sapiens
agatcgctccattgc

SEQ ID NO: 18649 - DNA, 15 bp, Homo sapiens
aagatcgctccattg

SEQ ID NO: 18650 - DNA, 15 bp, Homo sapiens
caagatcgctccatt

SEQ ID NO: 18651 - DNA, 15 bp, Homo sapiens
ccaagatcgctccat

SEQ ID NO: 18652 - DNA, 15 bp, Homo sapiens
gccaagatcgctcca

SEQ ID NO: 18653 - DNA, 15 bp, Homo sapiens
agccaagatcgctcc

SEQ ID NO: 18654 - DNA, 15 bp, Homo sapiens
gagccaagatcgctc

SEQ ID NO: 18655 - DNA, 15 bp, Homo sapiens
tgagccaagatcgct

SEQ ID NO: 18656 - DNA, 15 bp, Homo sapiens
ggtgagccaagatcg

SEQ ID NO: 18657 - DNA, 15 bp, Homo sapiens
gggtgagccaagatc

SEQ ID NO: 18658 - DNA, 15 bp, Homo sapiens
ggggtgagccaagat

SEQ ID NO: 18659 - DNA, 15 bp, Homo sapiens
tggggtgagccaaga

SEQ ID NO: 18660 - DNA, 15 bp, Homo sapiens
ttggggtgagccaag

SEQ ID NO: 18661 - DNA, 15 bp, Homo sapiens
gttggggtgagccaa

SEQ ID NO: 18662 - DNA, 15 bp, Homo sapiens
ggttggggtgagcca

SEQ ID NO: 18663 - DNA, 15 bp, Homo sapiens
aggttggggtgagcc

SEQ ID NO: 18664 - DNA, 15 bp, Homo sapiens
gaggttggggtgagc

SEQ ID NO: 18665 - DNA, 15 bp, Homo sapiens
agaggttggggtgag

SEQ ID NO: 18666 - DNA, 15 bp, Homo sapiens
cagaggttggggtga

SEQ ID NO: 18667 - DNA, 15 bp, Homo sapiens
acagaggttggggtg

SEQ ID NO: 18668 - DNA, 15 bp, Homo sapiens
gacagaggttggggt

SEQ ID NO: 18669 - DNA, 15 bp, Homo sapiens
agacagaggttgggg

SEQ ID NO: 18670 - DNA, 15 bp, Homo sapiens
gagacagaggttggg

SEQ ID NO: 18671 - DNA, 15 bp, Homo sapiens
ggagacagaggttgg

SEQ ID NO: 18672 - DNA, 15 bp, Homo sapiens
aggagacagaggttg

SEQ ID NO: 18673 - DNA, 15 bp, Homo sapiens
caggagacagaggtt

SEQ ID NO: 18674 - DNA, 15 bp, Homo sapiens
ccaggagacagaggt

SEQ ID NO: 18675 - DNA, 15 bp, Homo sapiens
cccaggagacagagg

SEQ ID NO: 18676 - DNA, 15 bp, Homo sapiens
acccaggagacagag

SEQ ID NO: 18677 - DNA, 15 bp, Homo sapiens
aacccaggagacaga

SEQ ID NO: 18678 - DNA, 15 bp, Homo sapiens
gaacccaggagacag

SEQ ID NO: 18679 - DNA, 15 bp, Homo sapiens
tgaacccaggagaca

SEQ ID NO: 18680 - DNA, 15 bp, Homo sapiens
ttgaacccaggagac

SEQ ID NO: 18681 - DNA, 15 bp, Homo sapiens
tttgaacccaggaga

SEQ ID NO: 18682 - DNA, 15 bp, Homo sapiens
gtttgaacccaggag

SEQ ID NO: 18683 - DNA, 15 bp, Homo sapiens
tgtttgaacccagga

SEQ ID NO: 18684 - DNA, 15 bp, Homo sapiens
ctgtttgaacccagg

SEQ ID NO: 18685 - DNA, 15 bp, Homo sapiens
actgtttgaacccag

SEQ ID NO: 18686 - DNA, 15 bp, Homo sapiens
aactgtttgaaccca

SEQ ID NO: 18687 - DNA, 15 bp, Homo sapiens
gaactgtttgaaccc

SEQ ID NO: 18688 - DNA, 15 bp, Homo sapiens
agaactgtttgaacc

SEQ ID NO: 18689 - DNA, 15 bp, Homo sapiens
gagaactgtttgaac

SEQ ID NO: 18690 - DNA, 15 bp, Homo sapiens
ggagaactgtttgaa

SEQ ID NO: 18691 - DNA, 15 bp, Homo sapiens
aggagaactgtttga

SEQ ID NO: 18692 - DNA, 15 bp, Homo sapiens
caggagaactgtttg

SEQ ID NO: 18693 - DNA, 15 bp, Homo sapiens
gcaggagaactgttt

SEQ ID NO: 18694 - DNA, 15 bp, Homo sapiens
ggcaggagaactgtt

SEQ ID NO: 18695 - DNA, 15 bp, Homo sapiens
aggcaggagaactgt

SEQ ID NO: 18696 - DNA, 15 bp, Homo sapiens
ctgaggcaggagaac

SEQ ID NO: 18697 - DNA, 15 bp, Homo sapiens
actcgggaggctgag

SEQ ID NO: 18698 - DNA, 15 bp, Homo sapiens
tactcgggaggctga

SEQ ID NO: 18699 - DNA, 15 bp, Homo sapiens
ctactcgggaggctg

SEQ ID NO: 18700 - DNA, 15 bp, Homo sapiens
gctactcgggaggct

SEQ ID NO: 18701 - DNA, 15 bp, Homo sapiens
agctactcgggaggc

SEQ ID NO: 18702 - DNA, 15 bp, Homo sapiens
cagctactcgggagg

SEQ ID NO: 18703 - DNA, 15 bp, Homo sapiens
ccagctactcgggag

SEQ ID NO: 18704 - DNA, 15 bp, Homo sapiens
cccagctactcggga

SEQ ID NO: 18705 - DNA, 15 bp, Homo sapiens
tcccagctactcggg

SEQ ID NO: 18706 - DNA, 15 bp, Homo sapiens
agcctgtaatcccag

SEQ ID NO: 18707 - DNA, 15 bp, Homo sapiens
gagcctgtaatccca

SEQ ID NO: 18708 - DNA, 15 bp, Homo sapiens
ggagcctgtaatccc

SEQ ID NO: 18709 - DNA, 15 bp, Homo sapiens
gggagcctgtaatcc

SEQ ID NO: 18710 - DNA, 15 bp, Homo sapiens
cgggagcctgtaatc

SEQ ID NO: 18711 - DNA, 15 bp, Homo sapiens
gcgggagcctgtaat

SEQ ID NO: 18712 - DNA, 15 bp, Homo sapiens
ggcgggagcctgtaa

SEQ ID NO: 18713 - DNA, 15 bp, Homo sapiens
tggcgggagcctgta

SEQ ID NO: 18714 - DNA, 15 bp, Homo sapiens
gtggcgggagcctgt

SEQ ID NO: 18715 - DNA, 15 bp, Homo sapiens
ggtggcgggagcctg

SEQ ID NO: 18716 - DNA, 15 bp, Homo sapiens
tggtggcgggagcct

SEQ ID NO: 18717 - DNA, 15 bp, Homo sapiens
atggtggcgggagcc

SEQ ID NO: 18718 - DNA, 15 bp, Homo sapiens
catggtggcgggagc

SEQ ID NO: 18719 - DNA, 15 bp, Homo sapiens
gcatggtggcgggag

SEQ ID NO: 18720 - DNA, 15 bp, Homo sapiens
ggcatggtggcggga

SEQ ID NO: 18721 - DNA, 15 bp, Homo sapiens
gggcatggtggcggg

SEQ ID NO: 18722 - DNA, 15 bp, Homo sapiens
tgggcatggtggcgg

SEQ ID NO: 18723 - DNA, 15 bp, Homo sapiens
atagctgggcatggt

SEQ ID NO: 18724 - DNA, 15 bp, Homo sapiens
aatagctgggcatgg

SEQ ID NO: 18725 - DNA, 15 bp, Homo sapiens
aaatagctgggcatg

SEQ ID NO: 18726 - DNA, 15 bp, Homo sapiens
aaaatagctgggcat

SEQ ID NO: 18727 - DNA, 15 bp, Homo sapiens
aaaaatagctgggca

SEQ ID NO: 18728 - DNA, 15 bp, Homo sapiens
aaaaaatagctgggc

SEQ ID NO: 18729 - DNA, 15 bp, Homo sapiens
aaaaaaatagctggg

SEQ ID NO: 18730 - DNA, 15 bp, Homo sapiens
caaaaaaatagctgg

SEQ ID NO: 18731 - DNA, 15 bp, Homo sapiens
acaaaaaaatagctg

SEQ ID NO: 18732 - DNA, 15 bp, Homo sapiens
tacaaaaaaatagct

SEQ ID NO: 18733 - DNA, 15 bp, Homo sapiens
atacaaaaaaatagc

SEQ ID NO: 18734 - DNA, 15 bp, Homo sapiens
aatacaaaaaaatag

SEQ ID NO: 18735 - DNA, 15 bp, Homo sapiens
aaatacaaaaaaata

SEQ ID NO: 18736 - DNA, 15 bp, Homo sapiens
gaaaatacaaaaaaa

SEQ ID NO: 18737 - DNA, 15 bp, Homo sapiens
tgaaaatacaaaaaa

SEQ ID NO: 18738 - DNA, 15 bp, Homo sapiens
ctgaaaatacaaaaa

SEQ ID NO: 18739 - DNA, 15 bp, Homo sapiens
actgaaaatacaaaa

SEQ ID NO: 18740 - DNA, 15 bp, Homo sapiens
tactgaaaatacaaa

SEQ ID NO: 18741 - DNA, 15 bp, Homo sapiens
tctctactgaaaata

SEQ ID NO: 18742 - DNA, 15 bp, Homo sapiens
atctctactgaaaat

SEQ ID NO: 18743 - DNA, 15 bp, Homo sapiens
catctctactgaaaa

SEQ ID NO: 18744 - DNA, 15 bp, Homo sapiens
ccatctctactgaaa

SEQ ID NO: 18745 - DNA, 15 bp, Homo sapiens
cccatctctactgaa

SEQ ID NO: 18746 - DNA, 15 bp, Homo sapiens
ccccatctctactga

SEQ ID NO: 18747 - DNA, 15 bp, Homo sapiens
accccatctctactg

SEQ ID NO: 18748 - DNA, 15 bp, Homo sapiens
gggtgaaaccccatc

SEQ ID NO: 18749 - DNA, 15 bp, Homo sapiens
agggtgaaaccccat

SEQ ID NO: 18750 - DNA, 15 bp, Homo sapiens
aagggtgaaacccca

SEQ ID NO: 18751 - DNA, 15 bp, Homo sapiens
aaagggtgaaacccc

SEQ ID NO: 18752 - DNA, 15 bp, Homo sapiens
aaaagggtgaaaccc

SEQ ID NO: 18753 - DNA, 15 bp, Homo sapiens
caaaagggtgaaacc

SEQ ID NO: 18754 - DNA, 15 bp, Homo sapiens
tcaaaagggtgaaac

SEQ ID NO: 18755 - DNA, 15 bp, Homo sapiens
gtcaaaagggtgaaa

SEQ ID NO: 18756 - DNA, 15 bp, Homo sapiens
ggtcaaaagggtgaa

SEQ ID NO: 18757 - DNA, 15 bp, Homo sapiens
tggtcaaaagggtga

SEQ ID NO: 18758 - DNA, 15 bp, Homo sapiens
ctggtcaaaagggtg

SEQ ID NO: 18759 - DNA, 15 bp, Homo sapiens
cctggtcaaaagggt

SEQ ID NO: 18760 - DNA, 15 bp, Homo sapiens
gcctggtcaaaaggg

SEQ ID NO: 18761 - DNA, 15 bp, Homo sapiens
agcctggtcaaaagg

SEQ ID NO: 18762 - DNA, 15 bp, Homo sapiens
cagcctggtcaaaag

SEQ ID NO: 18763 - DNA, 15 bp, Homo sapiens
ccagcctggtcaaaa

SEQ ID NO: 18764 - DNA, 15 bp, Homo sapiens
accagcctggtcaaa

SEQ ID NO: 18765 - DNA, 15 bp, Homo sapiens
aagaccagcctggtc

SEQ ID NO: 18766 - DNA, 15 bp, Homo sapiens
caagaccagcctggt

SEQ ID NO: 18767 - DNA, 15 bp, Homo sapiens
atgaggtcaggagtt

SEQ ID NO: 18768 - DNA, 15 bp, Homo sapiens
catgaggtcaggagt

SEQ ID NO: 18769 - DNA, 15 bp, Homo sapiens
tcatgaggtcaggag

SEQ ID NO: 18770 - DNA, 15 bp, Homo sapiens
atcatgaggtcagga

SEQ ID NO: 18771 - DNA, 15 bp, Homo sapiens
gatcatgaggtcagg

SEQ ID NO: 18772 - DNA, 15 bp, Homo sapiens
tgatcatgaggtcag

SEQ ID NO: 18773 - DNA, 15 bp, Homo sapiens
ttgatcatgaggtca

SEQ ID NO: 18774 - DNA, 15 bp, Homo sapiens
gttgatcatgaggtc

SEQ ID NO: 18775 - DNA, 15 bp, Homo sapiens
ggttgatcatgaggt

SEQ ID NO: 18776 - DNA, 15 bp, Homo sapiens
gggttgatcatgagg

SEQ ID NO: 18777 - DNA, 15 bp, Homo sapiens
tgggttgatcatgag

SEQ ID NO: 18778 - DNA, 15 bp, Homo sapiens
gtgggttgatcatga

SEQ ID NO: 18779 - DNA, 15 bp, Homo sapiens
ggtgggttgatcatg

SEQ ID NO: 18780 - DNA, 15 bp, Homo sapiens
aggtgggttgatcat

SEQ ID NO: 18781 - DNA, 15 bp, Homo sapiens
gaggtgggttgatca

SEQ ID NO: 18782 - DNA, 15 bp, Homo sapiens
tgaggtgggttgatc

SEQ ID NO: 18783 - DNA, 15 bp, Homo sapiens
ctgaggtgggttgat

SEQ ID NO: 18784 - DNA, 15 bp, Homo sapiens
gctgaggtgggttga

SEQ ID NO: 18785 - DNA, 15 bp, Homo sapiens
ggctgaggtgggttg

SEQ ID NO: 18786 - DNA, 15 bp, Homo sapiens
aggctgaggtgggtt

SEQ ID NO: 18787 - DNA, 15 bp, Homo sapiens
gaggctgaggtgggt

SEQ ID NO: 18788 - DNA, 15 bp, Homo sapiens
ggaggctgaggtggg

SEQ ID NO: 18789 - DNA, 15 bp, Homo sapiens
gggaggctgaggtgg

SEQ ID NO: 18790 - DNA, 15 bp, Homo sapiens
tgggaggctgaggtg

SEQ ID NO: 18791 - DNA, 15 bp, Homo sapiens
ttgggaggctgaggt

SEQ ID NO: 18792 - DNA, 15 bp, Homo sapiens
acacctgtaatccca

SEQ ID NO: 18793 - DNA, 15 bp, Homo sapiens
cacacctgtaatccc

SEQ ID NO: 18794 - DNA, 15 bp, Homo sapiens
tcacacctgtaatcc

SEQ ID NO: 18795 - DNA, 15 bp, Homo sapiens
ctcacacctgtaatc

SEQ ID NO: 18796 - DNA, 15 bp, Homo sapiens
gctcacacctgtaat

SEQ ID NO: 18797 - DNA, 15 bp, Homo sapiens
ggctcacacctgtaa

SEQ ID NO: 18798 - DNA, 15 bp, Homo sapiens
tggctcacacctgta

SEQ ID NO: 18799 - DNA, 15 bp, Homo sapiens
gtggctcacacctgt

SEQ ID NO: 18800 - DNA, 15 bp, Homo sapiens
ggtggctcacacctg

SEQ ID NO: 18801 - DNA, 15 bp, Homo sapiens
tggtggctcacacct

SEQ ID NO: 18802 - DNA, 15 bp, Homo sapiens
gtggtggctcacacc

SEQ ID NO: 18803 - DNA, 15 bp, Homo sapiens
cgtggtggctcacac

SEQ ID NO: 18804 - DNA, 15 bp, Homo sapiens
gcgtggtggctcaca

SEQ ID NO: 18805 - DNA, 15 bp, Homo sapiens
ggcgtggtggctcac

SEQ ID NO: 18806 - DNA, 15 bp, Homo sapiens
aggccgggcgtggtg

SEQ ID NO: 18807 - DNA, 15 bp, Homo sapiens
gaggccgggcgtggt

SEQ ID NO: 18808 - DNA, 15 bp, Homo sapiens
tgaggccgggcgtgg

SEQ ID NO: 18809 - DNA, 15 bp, Homo sapiens
atgaggccgggcgtg

SEQ ID NO: 18810 - DNA, 15 bp, Homo sapiens
tatgaggccgggcgt

SEQ ID NO: 18811 - DNA, 15 bp, Homo sapiens
ttatgaggccgggcg

SEQ ID NO: 18812 - DNA, 15 bp, Homo sapiens
cttatgaggccgggc

SEQ ID NO: 18813 - DNA, 15 bp, Homo sapiens
acttatgaggccggg

SEQ ID NO: 18814 - DNA, 15 bp, Homo sapiens
tacttatgaggccgg

SEQ ID NO: 18815 - DNA, 15 bp, Homo sapiens
atacttatgaggccg

SEQ ID NO: 18816 - DNA, 15 bp, Homo sapiens
aatacttatgaggcc

SEQ ID NO: 18817 - DNA, 15 bp, Homo sapiens
aaatacttatgaggc

SEQ ID NO: 18818 - DNA, 15 bp, Homo sapiens
aaaatacttatgagg

SEQ ID NO: 18819 - DNA, 15 bp, Homo sapiens
gaaaatacttatgag

SEQ ID NO: 18820 - DNA, 15 bp, Homo sapiens
agaaaatacttatga

SEQ ID NO: 18821 - DNA, 15 bp, Homo sapiens
tagaaaatacttatg

SEQ ID NO: 18822 - DNA, 15 bp, Homo sapiens
ttagaaaatacttat

SEQ ID NO: 18823 - DNA, 15 bp, Homo sapiens
tttagaaaatactta

SEQ ID NO: 18824 - DNA, 15 bp, Homo sapiens
atttagaaaatactt

SEQ ID NO: 18825 - DNA, 15 bp, Homo sapiens
aatttagaaaatact

SEQ ID NO: 18826 - DNA, 15 bp, Homo sapiens
aaatttagaaaatac

SEQ ID NO: 18827 - DNA, 15 bp, Homo sapiens
taaatttagaaaata

SEQ ID NO: 18828 - DNA, 15 bp, Homo sapiens
ataaatttagaaaat

SEQ ID NO: 18829 - DNA, 15 bp, Homo sapiens
aataaatttagaaaa

SEQ ID NO: 18830 - DNA, 15 bp, Homo sapiens
aaataaatttagaaa

SEQ ID NO: 18831 - DNA, 15 bp, Homo sapiens
taaataaatttagaa

SEQ ID NO: 18832 - DNA, 15 bp, Homo sapiens
gtaaataaatttaga

SEQ ID NO: 18833 - DNA, 15 bp, Homo sapiens
tgtaaataaatttag

SEQ ID NO: 18834 - DNA, 15 bp, Homo sapiens
ctgtaaataaattta

SEQ ID NO: 18835 - DNA, 15 bp, Homo sapiens
actgtaaataaattt

SEQ ID NO: 18836 - DNA, 15 bp, Homo sapiens
gactgtaaataaatt

SEQ ID NO: 18837 - DNA, 15 bp, Homo sapiens
tgactgtaaataaat

SEQ ID NO: 18838 - DNA, 15 bp, Homo sapiens
atgactgtaaataaa

SEQ ID NO: 18839 - DNA, 15 bp, Homo sapiens
catgactgtaaataa

SEQ ID NO: 18840 - DNA, 15 bp, Homo sapiens
gcatgactgtaaata

SEQ ID NO: 18841 - DNA, 15 bp, Homo sapiens
ggcatgactgtaaat

SEQ ID NO: 18842 - DNA, 15 bp, Homo sapiens
tggcatgactgtaaa

SEQ ID NO: 18843 - DNA, 15 bp, Homo sapiens
atggcatgactgtaa

SEQ ID NO: 18844 - DNA, 15 bp, Homo sapiens
aatggcatgactgta

SEQ ID NO: 18845 - DNA, 15 bp, Homo sapiens
aaatggcatgactgt

SEQ ID NO: 18846 - DNA, 15 bp, Homo sapiens
taaatggcatgactg

SEQ ID NO: 18847 - DNA, 15 bp, Homo sapiens
ttaaatggcatgact

SEQ ID NO: 18848 - DNA, 15 bp, Homo sapiens
tttaaatggcatgac

SEQ ID NO: 18849 - DNA, 15 bp, Homo sapiens
ttttaaatggcatga

SEQ ID NO: 18850 - DNA, 15 bp, Homo sapiens
cttttaaatggcatg

SEQ ID NO: 18851 - DNA, 15 bp, Homo sapiens
ccttttaaatggcat

SEQ ID NO: 18852 - DNA, 15 bp, Homo sapiens
tccttttaaatggca

SEQ ID NO: 18853 - DNA, 15 bp, Homo sapiens
ttccttttaaatggc

SEQ ID NO: 18854 - DNA, 15 bp, Homo sapiens
tttccttttaaatgg

SEQ ID NO: 18855 - DNA, 15 bp, Homo sapiens
ctttccttttaaatg

SEQ ID NO: 18856 - DNA, 15 bp, Homo sapiens
actttccttttaaat

SEQ ID NO: 18857 - DNA, 15 bp, Homo sapiens
aactttccttttaaa

SEQ ID NO: 18858 - DNA, 15 bp, Homo sapiens
caactttccttttaa

SEQ ID NO: 18859 - DNA, 15 bp, Homo sapiens
acaactttcctttta

SEQ ID NO: 18860 - DNA, 15 bp, Homo sapiens
tacaactttcctttt

SEQ ID NO: 18861 - DNA, 15 bp, Homo sapiens
atacaactttccttt

SEQ ID NO: 18862 - DNA, 15 bp, Homo sapiens
aatacaactttcctt

SEQ ID NO: 18863 - DNA, 15 bp, Homo sapiens
gaatacaactttcct

SEQ ID NO: 18864 - DNA, 15 bp, Homo sapiens
ggaatacaactttcc

SEQ ID NO: 18865 - DNA, 15 bp, Homo sapiens
aggaatacaactttc

SEQ ID NO: 18866 - DNA, 15 bp, Homo sapiens
caggaatacaacttt

SEQ ID NO: 18867 - DNA, 15 bp, Homo sapiens
acaggaatacaactt

SEQ ID NO: 18868 - DNA, 15 bp, Homo sapiens
gacaggaatacaact

SEQ ID NO: 18869 - DNA, 15 bp, Homo sapiens
agacaggaatacaac

SEQ ID NO: 18870 - DNA, 15 bp, Homo sapiens
aagacaggaatacaa

SEQ ID NO: 18871 - DNA, 15 bp, Homo sapiens
aaagacaggaataca

SEQ ID NO: 18872 - DNA, 15 bp, Homo sapiens
caaagacaggaatac

SEQ ID NO: 18873 - DNA, 15 bp, Homo sapiens
acaaagacaggaata

SEQ ID NO: 18874 - DNA, 15 bp, Homo sapiens
aacaaagacaggaat

SEQ ID NO: 18875 - DNA, 15 bp, Homo sapiens
taacaaagacaggaa

SEQ ID NO: 18876 - DNA, 15 bp, Homo sapiens
ttaacaaagacagga

SEQ ID NO: 18877 - DNA, 15 bp, Homo sapiens
attaacaaagacagg

SEQ ID NO: 18878 - DNA, 15 bp, Homo sapiens
tattaacaaagacag

SEQ ID NO: 18879 - DNA, 15 bp, Homo sapiens
atattaacaaagaca

SEQ ID NO: 18880 - DNA, 15 bp, Homo sapiens
aatattaacaaagac

SEQ ID NO: 18881 - DNA, 15 bp, Homo sapiens
aaatattaacaaaga

SEQ ID NO: 18882 - DNA, 15 bp, Homo sapiens
taaatattaacaaag

SEQ ID NO: 18883 - DNA, 15 bp, Homo sapiens
ataaatattaacaaa

SEQ ID NO: 18884 - DNA, 15 bp, Homo sapiens
tataaatattaacaa

SEQ ID NO: 18885 - DNA, 15 bp, Homo sapiens
ttataaatattaaca

SEQ ID NO: 18886 - DNA, 15 bp, Homo sapiens
cttataaatattaac

SEQ ID NO: 18887 - DNA, 15 bp, Homo sapiens
acttataaatattaa

SEQ ID NO: 18888 - DNA, 15 bp, Homo sapiens
cacttataaatatta

SEQ ID NO: 18889 - DNA, 15 bp, Homo sapiens
tcacttataaatatt

SEQ ID NO: 18890 - DNA, 15 bp, Homo sapiens
atcacttataaatat

SEQ ID NO: 18891 - DNA, 15 bp, Homo sapiens
aatcacttataaata

SEQ ID NO: 18892 - DNA, 15 bp, Homo sapiens
aaatcacttataaat

SEQ ID NO: 18893 - DNA, 15 bp, Homo sapiens
aaaatcacttataaa

SEQ ID NO: 18894 - DNA, 15 bp, Homo sapiens
taaaatcacttataa

SEQ ID NO: 18895 - DNA, 15 bp, Homo sapiens
ataaaatcacttata

SEQ ID NO: 18896 - DNA, 15 bp, Homo sapiens
aataaaatcacttat

SEQ ID NO: 18897 - DNA, 15 bp, Homo sapiens
gaataaaatcactta

SEQ ID NO: 18898 - DNA, 15 bp, Homo sapiens
tgaataaaatcactt

SEQ ID NO: 18899 - DNA, 15 bp, Homo sapiens
ctgaataaaatcact

SEQ ID NO: 18900 - DNA, 15 bp, Homo sapiens
gctgaataaaatcac

SEQ ID NO: 18901 - DNA, 15 bp, Homo sapiens
agctgaataaaatca

SEQ ID NO: 18902 - DNA, 15 bp, Homo sapiens
tagctgaataaaatc

SEQ ID NO: 18903 - DNA, 15 bp, Homo sapiens
gtagctgaataaaat

SEQ ID NO: 18904 - DNA, 15 bp, Homo sapiens
tgtagctgaataaaa

SEQ ID NO: 18905 - DNA, 15 bp, Homo sapiens
ttgtagctgaataaa

SEQ ID NO: 18906 - DNA, 15 bp, Homo sapiens
cttgtagctgaataa

SEQ ID NO: 18907 - DNA, 15 bp, Homo sapiens
gcttgtagctgaata

SEQ ID NO: 18908 - DNA, 15 bp, Homo sapiens
agcttgtagctgaat

SEQ ID NO: 18909 - DNA, 15 bp, Homo sapiens
aagcttgtagctgaa

SEQ ID NO: 18910 - DNA, 15 bp, Homo sapiens
caagcttgtagctga

SEQ ID NO: 18911 - DNA, 15 bp, Homo sapiens
ccaagcttgtagctg

SEQ ID NO: 18912 - DNA, 15 bp, Homo sapiens
tccaagcttgtagct

SEQ ID NO: 18913 - DNA, 15 bp, Homo sapiens
ttccaagcttgtagc

SEQ ID NO: 18914 - DNA, 15 bp, Homo sapiens
attccaagcttgtag

SEQ ID NO: 18915 - DNA, 15 bp, Homo sapiens
cattccaagcttgta

SEQ ID NO: 18916 - DNA, 15 bp, Homo sapiens
ccattccaagcttgt

SEQ ID NO: 18917 - DNA, 15 bp, Homo sapiens
gccattccaagcttg

SEQ ID NO: 18918 - DNA, 15 bp, Homo sapiens
tgccattccaagctt

SEQ ID NO: 18919 - DNA, 15 bp, Homo sapiens
atgccattccaagct

SEQ ID NO: 18920 - DNA, 15 bp, Homo sapiens
tatgccattccaagc

SEQ ID NO: 18921 - DNA, 15 bp, Homo sapiens
atatgccattccaag

SEQ ID NO: 18922 - DNA, 15 bp, Homo sapiens
tatatgccattccaa

SEQ ID NO: 18923 - DNA, 15 bp, Homo sapiens
ttatatgccattcca

SEQ ID NO: 18924 - DNA, 15 bp, Homo sapiens
attatatgccattcc

SEQ ID NO: 18925 - DNA, 15 bp, Homo sapiens
aattatatgccattc

SEQ ID NO: 18926 - DNA, 15 bp, Homo sapiens
aaattatatgccatt

SEQ ID NO: 18927 - DNA, 15 bp, Homo sapiens
aaaattatatgccat

SEQ ID NO: 18928 - DNA, 15 bp, Homo sapiens
caaaattatatgcca

SEQ ID NO: 18929 - DNA, 15 bp, Homo sapiens
acaaaattatatgcc

SEQ ID NO: 18930 - DNA, 15 bp, Homo sapiens
tacaaaattatatgc

SEQ ID NO: 18931 - DNA, 15 bp, Homo sapiens
atacaaaattatatg

SEQ ID NO: 18932 - DNA, 15 bp, Homo sapiens
aatacaaaattatat

SEQ ID NO: 18933 - DNA, 15 bp, Homo sapiens
gaatacaaaattata

SEQ ID NO: 18934 - DNA, 15 bp, Homo sapiens
agaatacaaaattat

SEQ ID NO: 18935 - DNA, 15 bp, Homo sapiens
cagaatacaaaatta

SEQ ID NO: 18936 - DNA, 15 bp, Homo sapiens
gcagaatacaaaatt

SEQ ID NO: 18937 - DNA, 15 bp, Homo sapiens
agcagaatacaaaat

SEQ ID NO: 18938 - DNA, 15 bp, Homo sapiens
aagcagaatacaaaa

SEQ ID NO: 18939 - DNA, 15 bp, Homo sapiens
aaagcagaatacaaa

SEQ ID NO: 18940 - DNA, 15 bp, Homo sapiens
aaaagcagaatacaa

SEQ ID NO: 18941 - DNA, 15 bp, Homo sapiens
aaaaagcagaataca

SEQ ID NO: 18942 - DNA, 15 bp, Homo sapiens
aaaaaagcagaatac

SEQ ID NO: 18943 - DNA, 15 bp, Homo sapiens
gaaaaaagcagaata

SEQ ID NO: 18944 - DNA, 15 bp, Homo sapiens
tgaaaaaagcagaat

SEQ ID NO: 18945 - DNA, 15 bp, Homo sapiens
gtgaaaaaagcagaa

SEQ ID NO: 18946 - DNA, 15 bp, Homo sapiens
agtgaaaaaagcaga

SEQ ID NO: 18947 - DNA, 15 bp, Homo sapiens
aagtgaaaaaagcag

SEQ ID NO: 18948 - DNA, 15 bp, Homo sapiens
taagtgaaaaaagca

SEQ ID NO: 18949 - DNA, 15 bp, Homo sapiens
ttaagtgaaaaaagc

SEQ ID NO: 18950 - DNA, 15 bp, Homo sapiens
attaagtgaaaaaag

SEQ ID NO: 18951 - DNA, 15 bp, Homo sapiens
tattaagtgaaaaaa

SEQ ID NO: 18952 - DNA, 15 bp, Homo sapiens
atattaagtgaaaaa

SEQ ID NO: 18953 - DNA, 15 bp, Homo sapiens
aatattaagtgaaaa

SEQ ID NO: 18954 - DNA, 15 bp, Homo sapiens
taatattaagtgaaa

SEQ ID NO: 18955 - DNA, 15 bp, Homo sapiens
gtaatattaagtgaa

SEQ ID NO: 18956 - DNA, 15 bp, Homo sapiens
tgtaatattaagtga

SEQ ID NO: 18957 - DNA, 15 bp, Homo sapiens
atgtaatattaagtg

SEQ ID NO: 18958 - DNA, 15 bp, Homo sapiens
catgtaatattaagt

SEQ ID NO: 18959 - DNA, 15 bp, Homo sapiens
ccatgtaatattaag

SEQ ID NO: 18960 - DNA, 15 bp, Homo sapiens
gccatgtaatattaa

SEQ ID NO: 18961 - DNA, 15 bp, Homo sapiens
agccatgtaatatta

SEQ ID NO: 18962 - DNA, 15 bp, Homo sapiens
tagccatgtaatatt

SEQ ID NO: 18963 - DNA, 15 bp, Homo sapiens
ttagccatgtaatat

SEQ ID NO: 18964 - DNA, 15 bp, Homo sapiens
attagccatgtaata

SEQ ID NO: 18965 - DNA, 15 bp, Homo sapiens
cattagccatgtaat

SEQ ID NO: 18966 - DNA, 15 bp, Homo sapiens
tcattagccatgtaa

SEQ ID NO: 18967 - DNA, 15 bp, Homo sapiens
atcattagccatgta

SEQ ID NO: 18968 - DNA, 15 bp, Homo sapiens
aatcattagccatgt

SEQ ID NO: 18969 - DNA, 15 bp, Homo sapiens
aaatcattagccatg

SEQ ID NO: 18970 - DNA, 15 bp, Homo sapiens
gaaatcattagccat

SEQ ID NO: 18971 - DNA, 15 bp, Homo sapiens
agaaatcattagcca

SEQ ID NO: 18972 - DNA, 15 bp, Homo sapiens
cagaaatcattagcc

SEQ ID NO: 18973 - DNA, 15 bp, Homo sapiens
acagaaatcattagc

SEQ ID NO: 18974 - DNA, 15 bp, Homo sapiens
cacagaaatcattag

SEQ ID NO: 18975 - DNA, 15 bp, Homo sapiens
acacagaaatcatta

SEQ ID NO: 18976 - DNA, 15 bp, Homo sapiens
aacacagaaatcatt

SEQ ID NO: 18977 - DNA, 15 bp, Homo sapiens
aaacacagaaatcat

SEQ ID NO: 18978 - DNA, 15 bp, Homo sapiens
gaaacacagaaatca

SEQ ID NO: 18979 - DNA, 15 bp, Homo sapiens
tgaaacacagaaatc

SEQ ID NO: 18980 - DNA, 15 bp, Homo sapiens
atgaaacacagaaat

SEQ ID NO: 18981 - DNA, 15 bp, Homo sapiens
tatgaaacacagaaa

SEQ ID NO: 18982 - DNA, 15 bp, Homo sapiens
ttatgaaacacagaa

SEQ ID NO: 18983 - DNA, 15 bp, Homo sapiens
tttatgaaacacaga

SEQ ID NO: 18984 - DNA, 15 bp, Homo sapiens
gtttatgaaacacag

SEQ ID NO: 18985 - DNA, 15 bp, Homo sapiens
tgtttatgaaacaca

SEQ ID NO: 18986 - DNA, 15 bp, Homo sapiens
atgtttatgaaacac

SEQ ID NO: 18987 - DNA, 15 bp, Homo sapiens
aatgtttatgaaaca

SEQ ID NO: 18988 - DNA, 15 bp, Homo sapiens
taatgtttatgaaac

SEQ ID NO: 18989 - DNA, 15 bp, Homo sapiens
ataatgtttatgaaa

SEQ ID NO: 18990 - DNA, 15 bp, Homo sapiens
aataatgtttatgaa

SEQ ID NO: 18991 - DNA, 15 bp, Homo sapiens
gaataatgtttatga

SEQ ID NO: 18992 - DNA, 15 bp, Homo sapiens
agaataatgtttatg

SEQ ID NO: 18993 - DNA, 15 bp, Homo sapiens
cagaataatgtttat

SEQ ID NO: 18994 - DNA, 15 bp, Homo sapiens
tcagaataatgttta

SEQ ID NO: 18995 - DNA, 15 bp, Homo sapiens
atcagaataatgttt

SEQ ID NO: 18996 - DNA, 15 bp, Homo sapiens
catcagaataatgtt

SEQ ID NO: 18997 - DNA, 15 bp, Homo sapiens
tcatcagaataatgt

SEQ ID NO: 18998 - DNA, 15 bp, Homo sapiens
atcatcagaataatg

SEQ ID NO: 18999 - DNA, 15 bp, Homo sapiens
catcatcagaataat

SEQ ID NO: 19000 - DNA, 15 bp, Homo sapiens
ccatcatcagaataa

SEQ ID NO: 19001 - DNA, 15 bp, Homo sapiens
gccatcatcagaata

SEQ ID NO: 19002 - DNA, 15 bp, Homo sapiens
tgccatcatcagaat

SEQ ID NO: 19003 - DNA, 15 bp, Homo sapiens
atgccatcatcagaa

SEQ ID NO: 19004 - DNA, 15 bp, Homo sapiens
catgccatcatcaga

SEQ ID NO: 19005 - DNA, 15 bp, Homo sapiens
tcatgccatcatcag

SEQ ID NO: 19006 - DNA, 15 bp, Homo sapiens
atcatgccatcatca

SEQ ID NO: 19007 - DNA, 15 bp, Homo sapiens
tatcatgccatcatc

SEQ ID NO: 19008 - DNA, 15 bp, Homo sapiens
atatcatgccatcat

SEQ ID NO: 19009 - DNA, 15 bp, Homo sapiens
tatatcatgccatca

SEQ ID NO: 19010 - DNA, 15 bp, Homo sapiens
atatatcatgccatc

SEQ ID NO: 19011 - DNA, 15 bp, Homo sapiens
aatatatcatgccat

SEQ ID NO: 19012 - DNA, 15 bp, Homo sapiens
caatatatcatgcca

SEQ ID NO: 19013 - DNA, 15 bp, Homo sapiens
acaatatatcatgcc

SEQ ID NO: 19014 - DNA, 15 bp, Homo sapiens
aacaatatatcatgc

SEQ ID NO: 19015 - DNA, 15 bp, Homo sapiens
caacaatatatcatg

SEQ ID NO: 19016 - DNA, 15 bp, Homo sapiens
tcaacaatatatcat

SEQ ID NO: 19017 - DNA, 15 bp, Homo sapiens
ctcaacaatatatca

SEQ ID NO: 19018 - DNA, 15 bp, Homo sapiens
actcaacaatatatc

SEQ ID NO: 19019 - DNA, 15 bp, Homo sapiens
tactcaacaatatat

SEQ ID NO: 19020 - DNA, 15 bp, Homo sapiens
gtactcaacaatata

SEQ ID NO: 19021 - DNA, 15 bp, Homo sapiens
tgtactcaacaatat

SEQ ID NO: 19022 - DNA, 15 bp, Homo sapiens
atgtactcaacaata

SEQ ID NO: 19023 - DNA, 15 bp, Homo sapiens
catgtactcaacaat

SEQ ID NO: 19024 - DNA, 15 bp, Homo sapiens
acatgtactcaacaa

SEQ ID NO: 19025 - DNA, 15 bp, Homo sapiens
tacatgtactcaaca

SEQ ID NO: 19026 - DNA, 15 bp, Homo sapiens
gtacatgtactcaac

SEQ ID NO: 19027 - DNA, 15 bp, Homo sapiens
ggtacatgtactcaa

SEQ ID NO: 19028 - DNA, 15 bp, Homo sapiens
tggtacatgtactca

SEQ ID NO: 19029 - DNA, 15 bp, Homo sapiens
atggtacatgtactc

SEQ ID NO: 19030 - DNA, 15 bp, Homo sapiens
tatggtacatgtact

SEQ ID NO: 19031 - DNA, 15 bp, Homo sapiens
ttatggtacatgtac

SEQ ID NO: 19032 - DNA, 15 bp, Homo sapiens
attatggtacatgta

SEQ ID NO: 19033 - DNA, 15 bp, Homo sapiens
aattatggtacatgt

SEQ ID NO: 19034 - DNA, 15 bp, Homo sapiens
caattatggtacatg

SEQ ID NO: 19035 - DNA, 15 bp, Homo sapiens
tcaattatggtacat

SEQ ID NO: 19036 - DNA, 15 bp, Homo sapiens
ttcaattatggtaca

SEQ ID NO: 19037 - DNA, 15 bp, Homo sapiens
attcaattatggtac

SEQ ID NO: 19038 - DNA, 15 bp, Homo sapiens
gattcaattatggta

SEQ ID NO: 19039 - DNA, 15 bp, Homo sapiens
tgattcaattatggt

SEQ ID NO: 19040 - DNA, 15 bp, Homo sapiens
atgattcaattatgg

SEQ ID NO: 19041 - DNA, 15 bp, Homo sapiens
aatgattcaattatg

SEQ ID NO: 19042 - DNA, 15 bp, Homo sapiens
aaatgattcaattat

SEQ ID NO: 19043 - DNA, 15 bp, Homo sapiens
gaaatgattcaatta

SEQ ID NO: 19044 - DNA, 15 bp, Homo sapiens
ggaaatgattcaatt

SEQ ID NO: 19045 - DNA, 15 bp, Homo sapiens
gggaaatgattcaat

SEQ ID NO: 19046 - DNA, 15 bp, Homo sapiens
agggaaatgattcaa

SEQ ID NO: 19047 - DNA, 15 bp, Homo sapiens
tagggaaatgattca

SEQ ID NO: 19048 - DNA, 15 bp, Homo sapiens
atagggaaatgattc

SEQ ID NO: 19049 - DNA, 15 bp, Homo sapiens
aatagggaaatgatt

SEQ ID NO: 19050 - DNA, 15 bp, Homo sapiens
caatagggaaatgat

SEQ ID NO: 19051 - DNA, 15 bp, Homo sapiens
gcaatagggaaatga

SEQ ID NO: 19052 - DNA, 15 bp, Homo sapiens
agcaatagggaaatg

SEQ ID NO: 19053 - DNA, 15 bp, Homo sapiens
tagcaatagggaaat

SEQ ID NO: 19054 - DNA, 15 bp, Homo sapiens
atagcaatagggaaa

SEQ ID NO: 19055 - DNA, 15 bp, Homo sapiens
catagcaatagggaa

SEQ ID NO: 19056 - DNA, 15 bp, Homo sapiens
gcatagcaataggga

SEQ ID NO: 19057 - DNA, 15 bp, Homo sapiens
tgcatagcaataggg

SEQ ID NO: 19058 - DNA, 15 bp, Homo sapiens
ttgcatagcaatagg

SEQ ID NO: 19059 - DNA, 15 bp, Homo sapiens
attgcatagcaatag

SEQ ID NO: 19060 - DNA, 15 bp, Homo sapiens
aattgcatagcaata

SEQ ID NO: 19061 - DNA, 15 bp, Homo sapiens
taattgcatagcaat

SEQ ID NO: 19062 - DNA, 15 bp, Homo sapiens
ttaattgcatagcaa

SEQ ID NO: 19063 - DNA, 15 bp, Homo sapiens
cttaattgcatagca

SEQ ID NO: 19064 - DNA, 15 bp, Homo sapiens
acttaattgcatagc

SEQ ID NO: 19065 - DNA, 15 bp, Homo sapiens
aacttaattgcatag

SEQ ID NO: 19066 - DNA, 15 bp, Homo sapiens
caacttaattgcata

SEQ ID NO: 19067 - DNA, 15 bp, Homo sapiens
acaacttaattgcat

SEQ ID NO: 19068 - DNA, 15 bp, Homo sapiens
aacaacttaattgca

SEQ ID NO: 19069 - DNA, 15 bp, Homo sapiens
aaacaacttaattgc

SEQ ID NO: 19070 - DNA, 15 bp, Homo sapiens
gaaacaacttaattg

SEQ ID NO: 19071 - DNA, 15 bp, Homo sapiens
ggaaacaacttaatt

SEQ ID NO: 19072 - DNA, 15 bp, Homo sapiens
tggaaacaacttaat

SEQ ID NO: 19073 - DNA, 15 bp, Homo sapiens
ttggaaacaacttaa

SEQ ID NO: 19074 - DNA, 15 bp, Homo sapiens
attggaaacaactta

SEQ ID NO: 19075 - DNA, 15 bp, Homo sapiens
tattggaaacaactt

SEQ ID NO: 19076 - DNA, 15 bp, Homo sapiens
atattggaaacaact

SEQ ID NO: 19077 - DNA, 15 bp, Homo sapiens
aatattggaaacaac

SEQ ID NO: 19078 - DNA, 15 bp, Homo sapiens
aaatattggaaacaa

SEQ ID NO: 19079 - DNA, 15 bp, Homo sapiens
aaaatattggaaaca

SEQ ID NO: 19080 - DNA, 15 bp, Homo sapiens
caaaatattggaaac

SEQ ID NO: 19081 - DNA, 15 bp, Homo sapiens
gcaaaatattggaaa

SEQ ID NO: 19082 - DNA, 15 bp, Homo sapiens
tgcaaaatattggaa

SEQ ID NO: 19083 - DNA, 15 bp, Homo sapiens
ttgcaaaatattgga

SEQ ID NO: 19084 - DNA, 15 bp, Homo sapiens
attgcaaaatattgg

SEQ ID NO: 19085 - DNA, 15 bp, Homo sapiens
aattgcaaaatattg

SEQ ID NO: 19086 - DNA, 15 bp, Homo sapiens
taattgcaaaatatt

SEQ ID NO: 19087 - DNA, 15 bp, Homo sapiens
ataattgcaaaatat

SEQ ID NO: 19088 - DNA, 15 bp, Homo sapiens
tataattgcaaaata

SEQ ID NO: 19089 - DNA, 15 bp, Homo sapiens
ttataattgcaaaat

SEQ ID NO: 19090 - DNA, 15 bp, Homo sapiens
attataattgcaaaa

SEQ ID NO: 19091 - DNA, 15 bp, Homo sapiens
cattataattgcaaa

SEQ ID NO: 19092 - DNA, 15 bp, Homo sapiens
acattataattgcaa

SEQ ID NO: 19093 - DNA, 15 bp, Homo sapiens
aacattataattgca

SEQ ID NO: 19094 - DNA, 15 bp, Homo sapiens
aaacattataattgc

SEQ ID NO: 19095 - DNA, 15 bp, Homo sapiens
gaaacattataattg

SEQ ID NO: 19096 - DNA, 15 bp, Homo sapiens
tgaaacattataatt

SEQ ID NO: 19097 - DNA, 15 bp, Homo sapiens
ttgaaacattataat

SEQ ID NO: 19098 - DNA, 15 bp, Homo sapiens
attgaaacattataa

SEQ ID NO: 19099 - DNA, 15 bp, Homo sapiens
cattgaaacattata

SEQ ID NO: 19100 - DNA, 15 bp, Homo sapiens
tcattgaaacattat

SEQ ID NO: 19101 - DNA, 15 bp, Homo sapiens
ttcattgaaacatta

SEQ ID NO: 19102 - DNA, 15 bp, Homo sapiens
attcattgaaacatt

SEQ ID NO: 19103 - DNA, 15 bp, Homo sapiens
cattcattgaaacat

SEQ ID NO: 19104 - DNA, 15 bp, Homo sapiens
tcattcattgaaaca

SEQ ID NO: 19105 - DNA, 15 bp, Homo sapiens
ttcattcattgaaac

SEQ ID NO: 19106 - DNA, 15 bp, Homo sapiens
attcattcattgaaa

SEQ ID NO: 19107 - DNA, 15 bp, Homo sapiens
tattcattcattgaa

SEQ ID NO: 19108 - DNA, 15 bp, Homo sapiens
ttattcattcattga

SEQ ID NO: 19109 - DNA, 15 bp, Homo sapiens
gttattcattcattg

SEQ ID NO: 19110 - DNA, 15 bp, Homo sapiens
agttattcattcatt

SEQ ID NO: 19111 - DNA, 15 bp, Homo sapiens
aagttattcattcat

SEQ ID NO: 19112 - DNA, 15 bp, Homo sapiens
aaagttattcattca

SEQ ID NO: 19113 - DNA, 15 bp, Homo sapiens
taaagttattcattc

SEQ ID NO: 19114 - DNA, 15 bp, Homo sapiens
ataaagttattcatt

SEQ ID NO: 19115 - DNA, 15 bp, Homo sapiens
cataaagttattcat

SEQ ID NO: 19116 - DNA, 15 bp, Homo sapiens
gcataaagttattca

SEQ ID NO: 19117 - DNA, 15 bp, Homo sapiens
tgcataaagttattc

SEQ ID NO: 19118 - DNA, 15 bp, Homo sapiens
atgcataaagttatt

SEQ ID NO: 19119 - DNA, 15 bp, Homo sapiens
tatgcataaagttat

SEQ ID NO: 19120 - DNA, 15 bp, Homo sapiens
atatgcataaagtta

SEQ ID NO: 19121 - DNA, 15 bp, Homo sapiens
tatatgcataaagtt

SEQ ID NO: 19122 - DNA, 15 bp, Homo sapiens
ctatatgcataaagt

SEQ ID NO: 19123 - DNA, 15 bp, Homo sapiens
gctatatgcataaag

SEQ ID NO: 19124 - DNA, 15 bp, Homo sapiens
agctatatgcataaa

SEQ ID NO: 19125 - DNA, 15 bp, Homo sapiens
aagctatatgcataa

SEQ ID NO: 19126 - DNA, 15 bp, Homo sapiens
aaagctatatgcata

SEQ ID NO: 19127 - DNA, 15 bp, Homo sapiens
aaaagctatatgcat

SEQ ID NO: 19128 - DNA, 15 bp, Homo sapiens
aaaaagctatatgca

SEQ ID NO: 19129 - DNA, 15 bp, Homo sapiens
caaaaagctatatgc

SEQ ID NO: 19130 - DNA, 15 bp, Homo sapiens
tcaaaaagctatatg

SEQ ID NO: 19131 - DNA, 15 bp, Homo sapiens
atcaaaaagctatat

SEQ ID NO: 19132 - DNA, 15 bp, Homo sapiens
tatcaaaaagctata

SEQ ID NO: 19133 - DNA, 15 bp, Homo sapiens
atatcaaaaagctat

SEQ ID NO: 19134 - DNA, 15 bp, Homo sapiens
gatatcaaaaagcta

SEQ ID NO: 19135 - DNA, 15 bp, Homo sapiens
agatatcaaaaagct

SEQ ID NO: 19136 - DNA, 15 bp, Homo sapiens
aagatatcaaaaagc

SEQ ID NO: 19137 - DNA, 15 bp, Homo sapiens
taagatatcaaaaag

SEQ ID NO: 19138 - DNA, 15 bp, Homo sapiens
ttaagatatcaaaaa

SEQ ID NO: 19139 - DNA, 15 bp, Homo sapiens
cttaagatatcaaaa

SEQ ID NO: 19140 - DNA, 15 bp, Homo sapiens
acttaagatatcaaa

SEQ ID NO: 19141 - DNA, 15 bp, Homo sapiens
aacttaagatatcaa

SEQ ID NO: 19142 - DNA, 15 bp, Homo sapiens
gaacttaagatatca

SEQ ID NO: 19143 - DNA, 15 bp, Homo sapiens
tgaacttaagatatc

SEQ ID NO: 19144 - DNA, 15 bp, Homo sapiens
ctgaacttaagatat

SEQ ID NO: 19145 - DNA, 15 bp, Homo sapiens
actgaacttaagata

SEQ ID NO: 19146 - DNA, 15 bp, Homo sapiens
aactgaacttaagat

SEQ ID NO: 19147 - DNA, 15 bp, Homo sapiens
aaactgaacttaaga

SEQ ID NO: 19148 - DNA, 15 bp, Homo sapiens
gaaactgaacttaag

SEQ ID NO: 19149 - DNA, 15 bp, Homo sapiens
ggaaactgaacttaa

SEQ ID NO: 19150 - DNA, 15 bp, Homo sapiens
aggaaactgaactta

SEQ ID NO: 19151 - DNA, 15 bp, Homo sapiens
taggaaactgaactt

SEQ ID NO: 19152 - DNA, 15 bp, Homo sapiens
ctaggaaactgaact

SEQ ID NO: 19153 - DNA, 15 bp, Homo sapiens
cctaggaaactgaac

SEQ ID NO: 19154 - DNA, 15 bp, Homo sapiens
tcctaggaaactgaa

SEQ ID NO: 19155 - DNA, 15 bp, Homo sapiens
atcctaggaaactga

SEQ ID NO: 19156 - DNA, 15 bp, Homo sapiens
catcctaggaaactg

SEQ ID NO: 19157 - DNA, 15 bp, Homo sapiens
tcatcctaggaaact

SEQ ID NO: 19158 - DNA, 15 bp, Homo sapiens
ttcatcctaggaaac

SEQ ID NO: 19159 - DNA, 15 bp, Homo sapiens
attcatcctaggaaa

SEQ ID NO: 19160 - DNA, 15 bp, Homo sapiens
aattcatcctaggaa

SEQ ID NO: 19161 - DNA, 15 bp, Homo sapiens
aaattcatcctagga

SEQ ID NO: 19162 - DNA, 15 bp, Homo sapiens
gaaattcatcctagg

SEQ ID NO: 19163 - DNA, 15 bp, Homo sapiens
ggaaattcatcctag

SEQ ID NO: 19164 - DNA, 15 bp, Homo sapiens
tggaaattcatccta

SEQ ID NO: 19165 - DNA, 15 bp, Homo sapiens
ctggaaattcatcct

SEQ ID NO: 19166 - DNA, 15 bp, Homo sapiens
cctggaaattcatcc

SEQ ID NO: 19167 - DNA, 15 bp, Homo sapiens
tcctggaaattcatc

SEQ ID NO: 19168 - DNA, 15 bp, Homo sapiens
ttcctggaaattcat

SEQ ID NO: 19169 - DNA, 15 bp, Homo sapiens
attcctggaaattca

SEQ ID NO: 19170 - DNA, 15 bp, Homo sapiens
tattcctggaaattc

SEQ ID NO: 19171 - DNA, 15 bp, Homo sapiens
ctattcctggaaatt

SEQ ID NO: 19172 - DNA, 15 bp, Homo sapiens
actattcctggaaat

SEQ ID NO: 19173 - DNA, 15 bp, Homo sapiens
tactattcctggaaa

SEQ ID NO: 19174 - DNA, 15 bp, Homo sapiens
ttactattcctggaa

SEQ ID NO: 19175 - DNA, 15 bp, Homo sapiens
attactattcctgga

SEQ ID NO: 19176 - DNA, 15 bp, Homo sapiens
aattactattcctgg

SEQ ID NO: 19177 - DNA, 15 bp, Homo sapiens
caattactattcctg

SEQ ID NO: 19178 - DNA, 15 bp, Homo sapiens
ccaattactattcct

SEQ ID NO: 19179 - DNA, 15 bp, Homo sapiens
cccaattactattcc

SEQ ID NO: 19180 - DNA, 15 bp, Homo sapiens
gcccaattactattc

SEQ ID NO: 19181 - DNA, 15 bp, Homo sapiens
tgcccaattactatt

SEQ ID NO: 19182 - DNA, 15 bp, Homo sapiens
ttgcccaattactat

SEQ ID NO: 19183 - DNA, 15 bp, Homo sapiens
tttgcccaattacta

SEQ ID NO: 19184 - DNA, 15 bp, Homo sapiens
atttgcccaattact

SEQ ID NO: 19185 - DNA, 15 bp, Homo sapiens
catttgcccaattac

SEQ ID NO: 19186 - DNA, 15 bp, Homo sapiens
ccatttgcccaatta

SEQ ID NO: 19187 - DNA, 15 bp, Homo sapiens
cccatttgcccaatt

SEQ ID NO: 19188 - DNA, 15 bp, Homo sapiens
tcccatttgcccaat

SEQ ID NO: 19189 - DNA, 15 bp, Homo sapiens
atcccatttgcccaa

SEQ ID NO: 19190 - DNA, 15 bp, Homo sapiens
tatcccatttgccca

SEQ ID NO: 19191 - DNA, 15 bp, Homo sapiens
ttatcccatttgccc

SEQ ID NO: 19192 - DNA, 15 bp, Homo sapiens
tttatcccatttgcc

SEQ ID NO: 19193 - DNA, 15 bp, Homo sapiens
gtttatcccatttgc

SEQ ID NO: 19194 - DNA, 15 bp, Homo sapiens
tgtttatcccatttg

SEQ ID NO: 19195 - DNA, 15 bp, Homo sapiens
atgtttatcccattt

SEQ ID NO: 19196 - DNA, 15 bp, Homo sapiens
catgtttatcccatt

SEQ ID NO: 19197 - DNA, 15 bp, Homo sapiens
tcatgtttatcccat

SEQ ID NO: 19198 - DNA, 15 bp, Homo sapiens
gtcatgtttatccca

SEQ ID NO: 19199 - DNA, 15 bp, Homo sapiens
agtcatgtttatccc

SEQ ID NO: 19200 - DNA, 15 bp, Homo sapiens
gagtcatgtttatcc

SEQ ID NO: 19201 - DNA, 15 bp, Homo sapiens
agagtcatgtttatc

SEQ ID NO: 19202 - DNA, 15 bp, Homo sapiens
aagagtcatgtttat

SEQ ID NO: 19203 - DNA, 15 bp, Homo sapiens
caagagtcatgttta

SEQ ID NO: 19204 - DNA, 15 bp, Homo sapiens
tcaagagtcatgttt

SEQ ID NO: 19205 - DNA, 15 bp, Homo sapiens
ttcaagagtcatgtt

SEQ ID NO: 19206 - DNA, 15 bp, Homo sapiens
attcaagagtcatgt

SEQ ID NO: 19207 - DNA, 15 bp, Homo sapiens
tattcaagagtcatg

SEQ ID NO: 19208 - DNA, 15 bp, Homo sapiens
gtattcaagagtcat

SEQ ID NO: 19209 - DNA, 15 bp, Homo sapiens
cgtattcaagagtca

SEQ ID NO: 19210 - DNA, 15 bp, Homo sapiens
acgtattcaagagtc

SEQ ID NO: 19211 - DNA, 15 bp, Homo sapiens
tacgtattcaagagt

SEQ ID NO: 19212 - DNA, 15 bp, Homo sapiens
atacgtattcaagag

SEQ ID NO: 19213 - DNA, 15 bp, Homo sapiens
aatacgtattcaaga

SEQ ID NO: 19214 - DNA, 15 bp, Homo sapiens
caatacgtattcaag

SEQ ID NO: 19215 - DNA, 15 bp, Homo sapiens
acaatacgtattcaa

SEQ ID NO: 19216 - DNA, 15 bp, Homo sapiens
aacaatacgtattca

SEQ ID NO: 19217 - DNA, 15 bp, Homo sapiens
taacaatacgtattc

SEQ ID NO: 19218 - DNA, 15 bp, Homo sapiens
ttaacaatacgtatt

SEQ ID NO: 19219 - DNA, 15 bp, Homo sapiens
gttaacaatacgtat

SEQ ID NO: 19220 - DNA, 15 bp, Homo sapiens
tgttaacaatacgta

SEQ ID NO: 19221 - DNA, 15 bp, Homo sapiens
atgttaacaatacgt

SEQ ID NO: 19222 - DNA, 15 bp, Homo sapiens
aatgttaacaatacg

SEQ ID NO: 19223 - DNA, 15 bp, Homo sapiens
caatgttaacaatac

SEQ ID NO: 19224 - DNA, 15 bp, Homo sapiens
gcaatgttaacaata

SEQ ID NO: 19225 - DNA, 15 bp, Homo sapiens
agcaatgttaacaat

SEQ ID NO: 19226 - DNA, 15 bp, Homo sapiens
aagcaatgttaacaa

SEQ ID NO: 19227 - DNA, 15 bp, Homo sapiens
aaagcaatgttaaca

SEQ ID NO: 19228 - DNA, 15 bp, Homo sapiens
gaaagcaatgttaac

SEQ ID NO: 19229 - DNA, 15 bp, Homo sapiens
ggaaagcaatgttaa

SEQ ID NO: 19230 - DNA, 15 bp, Homo sapiens
gggaaagcaatgtta

SEQ ID NO: 19231 - DNA, 15 bp, Homo sapiens
tgggaaagcaatgtt

SEQ ID NO: 19232 - DNA, 15 bp, Homo sapiens
ttgggaaagcaatgt

SEQ ID NO: 19233 - DNA, 15 bp, Homo sapiens
tttgggaaagcaatg

SEQ ID NO: 19234 - DNA, 15 bp, Homo sapiens
ctttgggaaagcaat

SEQ ID NO: 19235 - DNA, 15 bp, Homo sapiens
cctttgggaaagcaa

SEQ ID NO: 19236 - DNA, 15 bp, Homo sapiens
ccctttgggaaagca

SEQ ID NO: 19237 - DNA, 15 bp, Homo sapiens
gccctttgggaaagc

SEQ ID NO: 19238 - DNA, 15 bp, Homo sapiens
agccctttgggaaag

SEQ ID NO: 19239 - DNA, 15 bp, Homo sapiens
gagccctttgggaaa

SEQ ID NO: 19240 - DNA, 15 bp, Homo sapiens
tgagccctttgggaa

SEQ ID NO: 19241 - DNA, 15 bp, Homo sapiens
ttgagccctttggga

SEQ ID NO: 19242 - DNA, 15 bp, Homo sapiens
gttgagccctttggg

SEQ ID NO: 19243 - DNA, 15 bp, Homo sapiens
agttgagccctttgg

SEQ ID NO: 19244 - DNA, 15 bp, Homo sapiens
cagttgagccctttg

SEQ ID NO: 19245 - DNA, 15 bp, Homo sapiens
tcagttgagcccttt

SEQ ID NO: 19246 - DNA, 15 bp, Homo sapiens
atcagttgagccctt

SEQ ID NO: 19247 - DNA, 15 bp, Homo sapiens
aatcagttgagccct

SEQ ID NO: 19248 - DNA, 15 bp, Homo sapiens
aaatcagttgagccc

SEQ ID NO: 19249 - DNA, 15 bp, Homo sapiens
taaatcagttgagcc

SEQ ID NO: 19250 - DNA, 15 bp, Homo sapiens
ataaatcagttgagc

SEQ ID NO: 19251 - DNA, 15 bp, Homo sapiens
tataaatcagttgag

SEQ ID NO: 19252 - DNA, 15 bp, Homo sapiens
atataaatcagttga

SEQ ID NO: 19253 - DNA, 15 bp, Homo sapiens
aatataaatcagttg

SEQ ID NO: 19254 - DNA, 15 bp, Homo sapiens
aaatataaatcagtt

SEQ ID NO: 19255 - DNA, 15 bp, Homo sapiens
gaaatataaatcagt

SEQ ID NO: 19256 - DNA, 15 bp, Homo sapiens
ggaaatataaatcag

SEQ ID NO: 19257 - DNA, 15 bp, Homo sapiens
cggaaatataaatca

SEQ ID NO: 19258 - DNA, 15 bp, Homo sapiens
acggaaatataaatc

SEQ ID NO: 19259 - DNA, 15 bp, Homo sapiens
cacggaaatataaat

SEQ ID NO: 19260 - DNA, 15 bp, Homo sapiens
acacggaaatataaa

SEQ ID NO: 19261 - DNA, 15 bp, Homo sapiens
aacacggaaatataa

SEQ ID NO: 19262 - DNA, 15 bp, Homo sapiens
gaacacggaaatata

SEQ ID NO: 19263 - DNA, 15 bp, Homo sapiens
tgaacacggaaatat

SEQ ID NO: 19264 - DNA, 15 bp, Homo sapiens
atgaacacggaaata

SEQ ID NO: 19265 - DNA, 15 bp, Homo sapiens
aatgaacacggaaat

SEQ ID NO: 19266 - DNA, 15 bp, Homo sapiens
taatgaacacggaaa

SEQ ID NO: 19267 - DNA, 15 bp, Homo sapiens
ataatgaacacggaa

SEQ ID NO: 19268 - DNA, 15 bp, Homo sapiens
gataatgaacacgga

SEQ ID NO: 19269 - DNA, 15 bp, Homo sapiens
agataatgaacacgg

SEQ ID NO: 19270 - DNA, 15 bp, Homo sapiens
aagataatgaacacg

SEQ ID NO: 19271 - DNA, 15 bp, Homo sapiens
aaagataatgaacac

SEQ ID NO: 19272 - DNA, 15 bp, Homo sapiens
aaaagataatgaaca

SEQ ID NO: 19273 - DNA, 15 bp, Homo sapiens
taaaagataatgaac

SEQ ID NO: 19274 - DNA, 15 bp, Homo sapiens
ttaaaagataatgaa

SEQ ID NO: 19275 - DNA, 15 bp, Homo sapiens
tttaaaagataatga

SEQ ID NO: 19276 - DNA, 15 bp, Homo sapiens
gtttaaaagataatg

SEQ ID NO: 19277 - DNA, 15 bp, Homo sapiens
ggtttaaaagataat

SEQ ID NO: 19278 - DNA, 15 bp, Homo sapiens
tggtttaaaagataa

SEQ ID NO: 19279 - DNA, 15 bp, Homo sapiens
ctggtttaaaagata

SEQ ID NO: 19280 - DNA, 15 bp, Homo sapiens
gctggtttaaaagat

SEQ ID NO: 19281 - DNA, 15 bp, Homo sapiens
agctggtttaaaaga

SEQ ID NO: 19282 - DNA, 15 bp, Homo sapiens
gagctggtttaaaag

SEQ ID NO: 19283 - DNA, 15 bp, Homo sapiens
tgagctggtttaaaa

SEQ ID NO: 19284 - DNA, 15 bp, Homo sapiens
atgagctggtttaaa

SEQ ID NO: 19285 - DNA, 15 bp, Homo sapiens
aatgagctggtttaa

SEQ ID NO: 19286 - DNA, 15 bp, Homo sapiens
aaatgagctggttta

SEQ ID NO: 19287 - DNA, 15 bp, Homo sapiens
taaatgagctggttt

SEQ ID NO: 19288 - DNA, 15 bp, Homo sapiens
gtaaatgagctggtt

SEQ ID NO: 19289 - DNA, 15 bp, Homo sapiens
agtaaatgagctggt

SEQ ID NO: 19290 - DNA, 15 bp, Homo sapiens
gagtaaatgagctgg

SEQ ID NO: 19291 - DNA, 15 bp, Homo sapiens
tgagtaaatgagctg

SEQ ID NO: 19292 - DNA, 15 bp, Homo sapiens
gtgagtaaatgagct

SEQ ID NO: 19293 - DNA, 15 bp, Homo sapiens
ggtgagtaaatgagc

SEQ ID NO: 19294 - DNA, 15 bp, Homo sapiens
tggtgagtaaatgag

SEQ ID NO: 19295 - DNA, 15 bp, Homo sapiens
ttggtgagtaaatga

SEQ ID NO: 19296 - DNA, 15 bp, Homo sapiens
tttggtgagtaaatg

SEQ ID NO: 19297 - DNA, 15 bp, Homo sapiens
gtttggtgagtaaat

SEQ ID NO: 19298 - DNA, 15 bp, Homo sapiens
tgtttggtgagtaaa

SEQ ID NO: 19299 - DNA, 15 bp, Homo sapiens
atgtttggtgagtaa

SEQ ID NO: 19300 - DNA, 15 bp, Homo sapiens
aatgtttggtgagta

SEQ ID NO: 19301 - DNA, 15 bp, Homo sapiens
aaatgtttggtgagt

SEQ ID NO: 19302 - DNA, 15 bp, Homo sapiens
aaaatgtttggtgag

SEQ ID NO: 19303 - DNA, 15 bp, Homo sapiens
aaaaatgtttggtga

SEQ ID NO: 19304 - DNA, 15 bp, Homo sapiens
taaaaatgtttggtg

SEQ ID NO: 19305 - DNA, 15 bp, Homo sapiens
ttaaaaatgtttggt

SEQ ID NO: 19306 - DNA, 15 bp, Homo sapiens
tttaaaaatgtttgg

SEQ ID NO: 19307 - DNA, 15 bp, Homo sapiens
ctttaaaaatgtttg

SEQ ID NO: 19308 - DNA, 15 bp, Homo sapiens
gctttaaaaatgttt

SEQ ID NO: 19309 - DNA, 15 bp, Homo sapiens
ggctttaaaaatgtt

SEQ ID NO: 19310 - DNA, 15 bp, Homo sapiens
tggctttaaaaatgt

SEQ ID NO: 19311 - DNA, 15 bp, Homo sapiens
atggctttaaaaatg

SEQ ID NO: 19312 - DNA, 15 bp, Homo sapiens
aatggctttaaaaat

SEQ ID NO: 19313 - DNA, 15 bp, Homo sapiens
taatggctttaaaaa

SEQ ID NO: 19314 - DNA, 15 bp, Homo sapiens
ataatggctttaaaa

SEQ ID NO: 19315 - DNA, 15 bp, Homo sapiens
gataatggctttaaa

SEQ ID NO: 19316 - DNA, 15 bp, Homo sapiens
tgataatggctttaa

SEQ ID NO: 19317 - DNA, 15 bp, Homo sapiens
atgataatggcttta

SEQ ID NO: 19318 - DNA, 15 bp, Homo sapiens
catgataatggcttt

SEQ ID NO: 19319 - DNA, 15 bp, Homo sapiens
acatgataatggctt

SEQ ID NO: 19320 - DNA, 15 bp, Homo sapiens
cacatgataatggct

SEQ ID NO: 19321 - DNA, 15 bp, Homo sapiens
ccacatgataatggc

SEQ ID NO: 19322 - DNA, 15 bp, Homo sapiens
accacatgataatgg

SEQ ID NO: 19323 - DNA, 15 bp, Homo sapiens
taccacatgataatg

SEQ ID NO: 19324 - DNA, 15 bp, Homo sapiens
ctaccacatgataat

SEQ ID NO: 19325 - DNA, 15 bp, Homo sapiens
cctaccacatgataa

SEQ ID NO: 19326 - DNA, 15 bp, Homo sapiens
gcctaccacatgata

SEQ ID NO: 19327 - DNA, 15 bp, Homo sapiens
agcctaccacatgat

SEQ ID NO: 19328 - DNA, 15 bp, Homo sapiens
aagcctaccacatga

SEQ ID NO: 19329 - DNA, 15 bp, Homo sapiens
taagcctaccacatg

SEQ ID NO: 19330 - DNA, 15 bp, Homo sapiens
ctaagcctaccacat

SEQ ID NO: 19331 - DNA, 15 bp, Homo sapiens
actaagcctaccaca

SEQ ID NO: 19332 - DNA, 15 bp, Homo sapiens
tactaagcctaccac

SEQ ID NO: 19333 - DNA, 15 bp, Homo sapiens
ttactaagcctacca

SEQ ID NO: 19334 - DNA, 15 bp, Homo sapiens
cttactaagcctacc

SEQ ID NO: 19335 - DNA, 15 bp, Homo sapiens
tcttactaagcctac

SEQ ID NO: 19336 - DNA, 15 bp, Homo sapiens
ttcttactaagccta

SEQ ID NO: 19337 - DNA, 15 bp, Homo sapiens
cttcttactaagcct

SEQ ID NO: 19338 - DNA, 15 bp, Homo sapiens
tcttcttactaagcc

SEQ ID NO: 19339 - DNA, 15 bp, Homo sapiens
ttcttcttactaagc

SEQ ID NO: 19340 - DNA, 15 bp, Homo sapiens
tttcttcttactaag

SEQ ID NO: 19341 - DNA, 15 bp, Homo sapiens
ctttcttcttactaa

SEQ ID NO: 19342 - DNA, 15 bp, Homo sapiens
actttcttcttacta

SEQ ID NO: 19343 - DNA, 15 bp, Homo sapiens
cactttcttcttact

SEQ ID NO: 19344 - DNA, 15 bp, Homo sapiens
tcactttcttcttac

SEQ ID NO: 19345 - DNA, 15 bp, Homo sapiens
gtcactttcttctta

SEQ ID NO: 19346 - DNA, 15 bp, Homo sapiens
ggtcactttcttctt

SEQ ID NO: 19347 - DNA, 15 bp, Homo sapiens
gggtcactttcttct

SEQ ID NO: 19348 - DNA, 15 bp, Homo sapiens
agggtcactttcttc

SEQ ID NO: 19349 - DNA, 15 bp, Homo sapiens
tagggtcactttctt

SEQ ID NO: 19350 - DNA, 15 bp, Homo sapiens
ttagggtcactttct

SEQ ID NO: 19351 - DNA, 15 bp, Homo sapiens
cttagggtcactttc

SEQ ID NO: 19352 - DNA, 15 bp, Homo sapiens
ccttagggtcacttt

SEQ ID NO: 19353 - DNA, 15 bp, Homo sapiens
cccttagggtcactt

SEQ ID NO: 19354 - DNA, 15 bp, Homo sapiens
tcccttagggtcact

SEQ ID NO: 19355 - DNA, 15 bp, Homo sapiens
ctcccttagggtcac

SEQ ID NO: 19356 - DNA, 15 bp, Homo sapiens
tctcccttagggtca

SEQ ID NO: 19357 - DNA, 15 bp, Homo sapiens
ttctcccttagggtc

SEQ ID NO: 19358 - DNA, 15 bp, Homo sapiens
cttctcccttagggt

SEQ ID NO: 19359 - DNA, 15 bp, Homo sapiens
gcttctcccttaggg

SEQ ID NO: 19360 - DNA, 15 bp, Homo sapiens
agcttctcccttagg

SEQ ID NO: 19361 - DNA, 15 bp, Homo sapiens
aagcttctcccttag

SEQ ID NO: 19362 - DNA, 15 bp, Homo sapiens
taagcttctccctta

SEQ ID NO: 19363 - DNA, 15 bp, Homo sapiens
ataagcttctccctt

SEQ ID NO: 19364 - DNA, 15 bp, Homo sapiens
tataagcttctccct

SEQ ID NO: 19365 - DNA, 15 bp, Homo sapiens
atataagcttctccc

SEQ ID NO: 19366 - DNA, 15 bp, Homo sapiens
tatataagcttctcc

SEQ ID NO: 19367 - DNA, 15 bp, Homo sapiens
atatataagcttctc

SEQ ID NO: 19368 - DNA, 15 bp, Homo sapiens
tatatataagcttct

SEQ ID NO: 19369 - DNA, 15 bp, Homo sapiens
ttatatataagcttc

SEQ ID NO: 19370 - DNA, 15 bp, Homo sapiens
tttatatataagctt

SEQ ID NO: 19371 - DNA, 15 bp, Homo sapiens
atttatatataagct

SEQ ID NO: 19372 - DNA, 15 bp, Homo sapiens
tatttatatataagc

SEQ ID NO: 19373 - DNA, 15 bp, Homo sapiens
ctatttatatataag

SEQ ID NO: 19374 - DNA, 15 bp, Homo sapiens
cctatttatatataa

SEQ ID NO: 19375 - DNA, 15 bp, Homo sapiens
ccctatttatatata

SEQ ID NO: 19376 - DNA, 15 bp, Homo sapiens
accctatttatatat

SEQ ID NO: 19377 - DNA, 15 bp, Homo sapiens
gaccctatttatata

SEQ ID NO: 19378 - DNA, 15 bp, Homo sapiens
ggaccctatttatat

SEQ ID NO: 19379 - DNA, 15 bp, Homo sapiens
gggaccctatttata

SEQ ID NO: 19380 - DNA, 15 bp, Homo sapiens
agggaccctatttat

SEQ ID NO: 19381 - DNA, 15 bp, Homo sapiens
cagggaccctattta

SEQ ID NO: 19382 - DNA, 15 bp, Homo sapiens
ccagggaccctattt

SEQ ID NO: 19383 - DNA, 15 bp, Homo sapiens
accagggaccctatt

SEQ ID NO: 19384 - DNA, 15 bp, Homo sapiens
caccagggaccctat

SEQ ID NO: 19385 - DNA, 15 bp, Homo sapiens
acaccagggacccta

SEQ ID NO: 19386 - DNA, 15 bp, Homo sapiens
tacaccagggaccct

SEQ ID NO: 19387 - DNA, 15 bp, Homo sapiens
gtacaccagggaccc

SEQ ID NO: 19388 - DNA, 15 bp, Homo sapiens
ggtacaccagggacc

SEQ ID NO: 19389 - DNA, 15 bp, Homo sapiens
tggtacaccagggac

SEQ ID NO: 19390 - DNA, 15 bp, Homo sapiens
ttggtacaccaggga

SEQ ID NO: 19391 - DNA, 15 bp, Homo sapiens
cttggtacaccaggg

SEQ ID NO: 19392 - DNA, 15 bp, Homo sapiens
acttggtacaccagg

SEQ ID NO: 19393 - DNA, 15 bp, Homo sapiens
cacttggtacaccag

SEQ ID NO: 19394 - DNA, 15 bp, Homo sapiens
gcacttggtacacca

SEQ ID NO: 19395 - DNA, 15 bp, Homo sapiens
agcacttggtacacc

SEQ ID NO: 19396 - DNA, 15 bp, Homo sapiens
cagcacttggtacac

SEQ ID NO: 19397 - DNA, 15 bp, Homo sapiens
tcagcacttggtaca

SEQ ID NO: 19398 - DNA, 15 bp, Homo sapiens
atcagcacttggtac

SEQ ID NO: 19399 - DNA, 15 bp, Homo sapiens
tatcagcacttggta

SEQ ID NO: 19400 - DNA, 15 bp, Homo sapiens
gtatcagcacttggt

SEQ ID NO: 19401 - DNA, 15 bp, Homo sapiens
tgtatcagcacttgg

SEQ ID NO: 19402 - DNA, 15 bp, Homo sapiens
ctgtatcagcacttg

SEQ ID NO: 19403 - DNA, 15 bp, Homo sapiens
tctgtatcagcactt

SEQ ID NO: 19404 - DNA, 15 bp, Homo sapiens
gtctgtatcagcact

SEQ ID NO: 19405 - DNA, 15 bp, Homo sapiens
tgtctgtatcagcac

SEQ ID NO: 19406 - DNA, 15 bp, Homo sapiens
gtgtctgtatcagca

SEQ ID NO: 19407 - DNA, 15 bp, Homo sapiens
tgtgtctgtatcagc

SEQ ID NO: 19408 - DNA, 15 bp, Homo sapiens
ttgtgtctgtatcag

SEQ ID NO: 19409 - DNA, 15 bp, Homo sapiens
tttgtgtctgtatca

SEQ ID NO: 19410 - DNA, 15 bp, Homo sapiens
ctttgtgtctgtatc

SEQ ID NO: 19411 - DNA, 15 bp, Homo sapiens
actttgtgtctgtat

SEQ ID NO: 19412 - DNA, 15 bp, Homo sapiens
tactttgtgtctgta

SEQ ID NO: 19413 - DNA, 15 bp, Homo sapiens
gtactttgtgtctgt

SEQ ID NO: 19414 - DNA, 15 bp, Homo sapiens
ggtactttgtgtctg

SEQ ID NO: 19415 - DNA, 15 bp, Homo sapiens
aggtactttgtgtct

SEQ ID NO: 19416 - DNA, 15 bp, Homo sapiens
caggtactttgtgtc

SEQ ID NO: 19417 - DNA, 15 bp, Homo sapiens
ccaggtactttgtgt

SEQ ID NO: 19418 - DNA, 15 bp, Homo sapiens
cccaggtactttgtg

SEQ ID NO: 19419 - DNA, 15 bp, Homo sapiens
ccccaggtactttgt

SEQ ID NO: 19420 - DNA, 15 bp, Homo sapiens
tccccaggtactttg

SEQ ID NO: 19421 - DNA, 15 bp, Homo sapiens
ttccccaggtacttt

SEQ ID NO: 19422 - DNA, 15 bp, Homo sapiens
tttccccaggtactt

SEQ ID NO: 19423 - DNA, 15 bp, Homo sapiens
atttccccaggtact

SEQ ID NO: 19424 - DNA, 15 bp, Homo sapiens
aatttccccaggtac

SEQ ID NO: 19425 - DNA, 15 bp, Homo sapiens
caatttccccaggta

SEQ ID NO: 19426 - DNA, 15 bp, Homo sapiens
tcaatttccccaggt

SEQ ID NO: 19427 - DNA, 15 bp, Homo sapiens
ctcaatttccccagg

SEQ ID NO: 19428 - DNA, 15 bp, Homo sapiens
tctcaatttccccag

SEQ ID NO: 19429 - DNA, 15 bp, Homo sapiens
atctcaatttcccca

SEQ ID NO: 19430 - DNA, 15 bp, Homo sapiens
catctcaatttcccc

SEQ ID NO: 19431 - DNA, 15 bp, Homo sapiens
tcatctcaatttccc

SEQ ID NO: 19432 - DNA, 15 bp, Homo sapiens
ctcatctcaatttcc

SEQ ID NO: 19433 - DNA, 15 bp, Homo sapiens
cctcatctcaatttc

SEQ ID NO: 19434 - DNA, 15 bp, Homo sapiens
ccctcatctcaattt

SEQ ID NO: 19435 - DNA, 15 bp, Homo sapiens
tccctcatctcaatt

SEQ ID NO: 19436 - DNA, 15 bp, Homo sapiens
ctccctcatctcaat

SEQ ID NO: 19437 - DNA, 15 bp, Homo sapiens
actccctcatctcaa

SEQ ID NO: 19438 - DNA, 15 bp, Homo sapiens
gactccctcatctca

SEQ ID NO: 19439 - DNA, 15 bp, Homo sapiens
ggactccctcatctc

SEQ ID NO: 19440 - DNA, 15 bp, Homo sapiens
aggactccctcatct

SEQ ID NO: 19441 - DNA, 15 bp, Homo sapiens
caggactccctcatc

SEQ ID NO: 19442 - DNA, 15 bp, Homo sapiens
ccaggactccctcat

SEQ ID NO: 19443 - DNA, 15 bp, Homo sapiens
gccaggactccctca

SEQ ID NO: 19444 - DNA, 15 bp, Homo sapiens
agccaggactccctc

SEQ ID NO: 19445 - DNA, 15 bp, Homo sapiens
gagccaggactccct

SEQ ID NO: 19446 - DNA, 15 bp, Homo sapiens
tgagccaggactccc

SEQ ID NO: 19447 - DNA, 15 bp, Homo sapiens
ctgagccaggactcc

SEQ ID NO: 19448 - DNA, 15 bp, Homo sapiens
gctgagccaggactc

SEQ ID NO: 19449 - DNA, 15 bp, Homo sapiens
agctgagccaggact

SEQ ID NO: 19450 - DNA, 15 bp, Homo sapiens
cagctgagccaggac

SEQ ID NO: 19451 - DNA, 15 bp, Homo sapiens
ccagctgagccagga

SEQ ID NO: 19452 - DNA, 15 bp, Homo sapiens
cccagctgagccagg

SEQ ID NO: 19453 - DNA, 15 bp, Homo sapiens
tcccagctgagccag

SEQ ID NO: 19454 - DNA, 15 bp, Homo sapiens
ctcccagctgagcca

SEQ ID NO: 19455 - DNA, 15 bp, Homo sapiens
tctcccagctgagcc

SEQ ID NO: 19456 - DNA, 15 bp, Homo sapiens
ttctcccagctgagc

SEQ ID NO: 19457 - DNA, 15 bp, Homo sapiens
tttctcccagctgag

SEQ ID NO: 19458 - DNA, 15 bp, Homo sapiens
ttttctcccagctga

SEQ ID NO: 19459 - DNA, 15 bp, Homo sapiens
cttttctcccagctg

SEQ ID NO: 19460 - DNA, 15 bp, Homo sapiens
acttttctcccagct

SEQ ID NO: 19461 - DNA, 15 bp, Homo sapiens
aacttttctcccagc

SEQ ID NO: 19462 - DNA, 15 bp, Homo sapiens
gaacttttctcccag

SEQ ID NO: 19463 - DNA, 15 bp, Homo sapiens
tgaacttttctccca

SEQ ID NO: 19464 - DNA, 15 bp, Homo sapiens
atgaacttttctccc

SEQ ID NO: 19465 - DNA, 15 bp, Homo sapiens
aatgaacttttctcc

SEQ ID NO: 19466 - DNA, 15 bp, Homo sapiens
aaatgaacttttctc

SEQ ID NO: 19467 - DNA, 15 bp, Homo sapiens
aaaatgaacttttct

SEQ ID NO: 19468 - DNA, 15 bp, Homo sapiens
gaaaatgaacttttc

SEQ ID NO: 19469 - DNA, 15 bp, Homo sapiens
tgaaaatgaactttt

SEQ ID NO: 19470 - DNA, 15 bp, Homo sapiens
atgaaaatgaacttt

SEQ ID NO: 19471 - DNA, 15 bp, Homo sapiens
tatgaaaatgaactt

SEQ ID NO: 19472 - DNA, 15 bp, Homo sapiens
ctatgaaaatgaact

SEQ ID NO: 19473 - DNA, 15 bp, Homo sapiens
tctatgaaaatgaac

SEQ ID NO: 19474 - DNA, 15 bp, Homo sapiens
ctctatgaaaatgaa

SEQ ID NO: 19475 - DNA, 15 bp, Homo sapiens
actctatgaaaatga

SEQ ID NO: 19476 - DNA, 15 bp, Homo sapiens
gactctatgaaaatg

SEQ ID NO: 19477 - DNA, 15 bp, Homo sapiens
tgactctatgaaaat

SEQ ID NO: 19478 - DNA, 15 bp, Homo sapiens
atgactctatgaaaa

SEQ ID NO: 19479 - DNA, 15 bp, Homo sapiens
catgactctatgaaa

SEQ ID NO: 19480 - DNA, 15 bp, Homo sapiens
ccatgactctatgaa

SEQ ID NO: 19481 - DNA, 15 bp, Homo sapiens
accatgactctatga

SEQ ID NO: 19482 - DNA, 15 bp, Homo sapiens
aaccatgactctatg

SEQ ID NO: 19483 - DNA, 15 bp, Homo sapiens
aaaccatgactctat

SEQ ID NO: 19484 - DNA, 15 bp, Homo sapiens
aaaaccatgactcta

SEQ ID NO: 19485 - DNA, 15 bp, Homo sapiens
caaaaccatgactct

SEQ ID NO: 19486 - DNA, 15 bp, Homo sapiens
acaaaaccatgactc

SEQ ID NO: 19487 - DNA, 15 bp, Homo sapiens
aacaaaaccatgact

SEQ ID NO: 19488 - DNA, 15 bp, Homo sapiens
gaacaaaaccatgac

SEQ ID NO: 19489 - DNA, 15 bp, Homo sapiens
agaacaaaaccatga

SEQ ID NO: 19490 - DNA, 15 bp, Homo sapiens
aagaacaaaaccatg

SEQ ID NO: 19491 - DNA, 15 bp, Homo sapiens
aaagaacaaaaccat

SEQ ID NO: 19492 - DNA, 15 bp, Homo sapiens
caaagaacaaaacca

SEQ ID NO: 19493 - DNA, 15 bp, Homo sapiens
ccaaagaacaaaacc

SEQ ID NO: 19494 - DNA, 15 bp, Homo sapiens
gccaaagaacaaaac

SEQ ID NO: 19495 - DNA, 15 bp, Homo sapiens
tgccaaagaacaaaa

SEQ ID NO: 19496 - DNA, 15 bp, Homo sapiens
ctgccaaagaacaaa

SEQ ID NO: 19497 - DNA, 15 bp, Homo sapiens
tctgccaaagaacaa

SEQ ID NO: 19498 - DNA, 15 bp, Homo sapiens
ttctgccaaagaaca

SEQ ID NO: 19499 - DNA, 15 bp, Homo sapiens
tttctgccaaagaac

SEQ ID NO: 19500 - DNA, 15 bp, Homo sapiens
ctttctgccaaagaa

SEQ ID NO: 19501 - DNA, 15 bp, Homo sapiens
tctttctgccaaaga

SEQ ID NO: 19502 - DNA, 15 bp, Homo sapiens
ttctttctgccaaag

SEQ ID NO: 19503 - DNA, 15 bp, Homo sapiens
tttctttctgccaaa

SEQ ID NO: 19504 - DNA, 15 bp, Homo sapiens
ttttctttctgccaa

SEQ ID NO: 19505 - DNA, 15 bp, Homo sapiens
attttctttctgcca

SEQ ID NO: 19506 - DNA, 15 bp, Homo sapiens
aattttctttctgcc

SEQ ID NO: 19507 - DNA, 15 bp, Homo sapiens
caattttctttctgc

SEQ ID NO: 19508 - DNA, 15 bp, Homo sapiens
gcaattttctttctg

SEQ ID NO: 19509 - DNA, 15 bp, Homo sapiens
agcaattttctttct

SEQ ID NO: 19510 - DNA, 15 bp, Homo sapiens
aagcaattttctttc

SEQ ID NO: 19511 - DNA, 15 bp, Homo sapiens
aaagcaattttcttt

SEQ ID NO: 19512 - DNA, 15 bp, Homo sapiens
gaaagcaattttctt

SEQ ID NO: 19513 - DNA, 15 bp, Homo sapiens
agaaagcaattttct

SEQ ID NO: 19514 - DNA, 15 bp, Homo sapiens
aagaaagcaattttc

SEQ ID NO: 19515 - DNA, 15 bp, Homo sapiens
gaagaaagcaatttt

SEQ ID NO: 19516 - DNA, 15 bp, Homo sapiens
ggaagaaagcaattt

SEQ ID NO: 19517 - DNA, 15 bp, Homo sapiens
gggaagaaagcaatt

SEQ ID NO: 19518 - DNA, 15 bp, Homo sapiens
ggggaagaaagcaat

SEQ ID NO: 19519 - DNA, 15 bp, Homo sapiens
tggggaagaaagcaa

SEQ ID NO: 19520 - DNA, 15 bp, Homo sapiens
gtggggaagaaagca

SEQ ID NO: 19521 - DNA, 15 bp, Homo sapiens
ggtggggaagaaagc

SEQ ID NO: 19522 - DNA, 15 bp, Homo sapiens
gggtggggaagaaag

SEQ ID NO: 19523 - DNA, 15 bp, Homo sapiens
ggggtggggaagaaa

SEQ ID NO: 19524 - DNA, 15 bp, Homo sapiens
gggggtggggaagaa

SEQ ID NO: 19525 - DNA, 15 bp, Homo sapiens
tgggggtggggaaga

SEQ ID NO: 19526 - DNA, 15 bp, Homo sapiens
gtgggggtggggaag

SEQ ID NO: 19527 - DNA, 15 bp, Homo sapiens
ggtgggggtggggaa

SEQ ID NO: 19528 - DNA, 15 bp, Homo sapiens
gggtgggggtgggga

SEQ ID NO: 19529 - DNA, 15 bp, Homo sapiens
gctgggggtgggggt

SEQ ID NO: 19530 - DNA, 15 bp, Homo sapiens
agctgggggtggggg

SEQ ID NO: 19531 - DNA, 15 bp, Homo sapiens
aagctgggggtgggg

SEQ ID NO: 19532 - DNA, 15 bp, Homo sapiens
aaagctgggggtggg

SEQ ID NO: 19533 - DNA, 15 bp, Homo sapiens
taaagctgggggtgg

SEQ ID NO: 19534 - DNA, 15 bp, Homo sapiens
ataaagctgggggtg

SEQ ID NO: 19535 - DNA, 15 bp, Homo sapiens
aataaagctgggggt

SEQ ID NO: 19536 - DNA, 15 bp, Homo sapiens
caataaagctggggg

SEQ ID NO: 19537 - DNA, 15 bp, Homo sapiens
tcaataaagctgggg

SEQ ID NO: 19538 - DNA, 15 bp, Homo sapiens
ctcaataaagctggg

SEQ ID NO: 19539 - DNA, 15 bp, Homo sapiens
cctcaataaagctgg

SEQ ID NO: 19540 - DNA, 15 bp, Homo sapiens
acctcaataaagctg

SEQ ID NO: 19541 - DNA, 15 bp, Homo sapiens
tacctcaataaagct

SEQ ID NO: 19542 - DNA, 15 bp, Homo sapiens
atacctcaataaagc

SEQ ID NO: 19543 - DNA, 15 bp, Homo sapiens
tatacctcaataaag

SEQ ID NO: 19544 - DNA, 15 bp, Homo sapiens
ttatacctcaataaa

SEQ ID NO: 19545 - DNA, 15 bp, Homo sapiens
attatacctcaataa

SEQ ID NO: 19546 - DNA, 15 bp, Homo sapiens
aattatacctcaata

SEQ ID NO: 19547 - DNA, 15 bp, Homo sapiens
caattatacctcaat

SEQ ID NO: 19548 - DNA, 15 bp, Homo sapiens
tcaattatacctcaa

SEQ ID NO: 19549 - DNA, 15 bp, Homo sapiens
gtcaattatacctca

SEQ ID NO: 19550 - DNA, 15 bp, Homo sapiens
tgtcaattatacctc

SEQ ID NO: 19551 - DNA, 15 bp, Homo sapiens
ttgtcaattatacct

SEQ ID NO: 19552 - DNA, 15 bp, Homo sapiens
tttgtcaattatacc

SEQ ID NO: 19553 - DNA, 15 bp, Homo sapiens
atttgtcaattatac

SEQ ID NO: 19554 - DNA, 15 bp, Homo sapiens
tatttgtcaattata

SEQ ID NO: 19555 - DNA, 15 bp, Homo sapiens
ttatttgtcaattat

SEQ ID NO: 19556 - DNA, 15 bp, Homo sapiens
tttatttgtcaatta

SEQ ID NO: 19557 - DNA, 15 bp, Homo sapiens
ttttatttgtcaatt

SEQ ID NO: 19558 - DNA, 15 bp, Homo sapiens
tttttatttgtcaat

SEQ ID NO: 19559 - DNA, 15 bp, Homo sapiens
atttttatttgtcaa

SEQ ID NO: 19560 - DNA, 15 bp, Homo sapiens
gatatacaattttta

SEQ ID NO: 19561 - DNA, 15 bp, Homo sapiens
agatatacaattttt

SEQ ID NO: 19562 - DNA, 15 bp, Homo sapiens
aagatatacaatttt

SEQ ID NO: 19563 - DNA, 15 bp, Homo sapiens
aaagatatacaattt

SEQ ID NO: 19564 - DNA, 15 bp, Homo sapiens
taaagatatacaatt

SEQ ID NO: 19565 - DNA, 15 bp, Homo sapiens
ttaaagatatacaat

SEQ ID NO: 19566 - DNA, 15 bp, Homo sapiens
cttaaagatatacaa

SEQ ID NO: 19567 - DNA, 15 bp, Homo sapiens
tcttaaagatataca

SEQ ID NO: 19568 - DNA, 15 bp, Homo sapiens
atcttaaagatatac

SEQ ID NO: 19569 - DNA, 15 bp, Homo sapiens
tatcttaaagatata

SEQ ID NO: 19570 - DNA, 15 bp, Homo sapiens
atatcttaaagatat

SEQ ID NO: 19571 - DNA, 15 bp, Homo sapiens
catatcttaaagata

SEQ ID NO: 19572 - DNA, 15 bp, Homo sapiens
gcatatcttaaagat

SEQ ID NO: 19573 - DNA, 15 bp, Homo sapiens
tgcatatcttaaaga

SEQ ID NO: 19574 - DNA, 15 bp, Homo sapiens
ttgcatatcttaaag

SEQ ID NO: 19575 - DNA, 15 bp, Homo sapiens
attgcatatcttaaa

SEQ ID NO: 19576 - DNA, 15 bp, Homo sapiens
cattgcatatcttaa

SEQ ID NO: 19577 - DNA, 15 bp, Homo sapiens
acattgcatatctta

SEQ ID NO: 19578 - DNA, 15 bp, Homo sapiens
cacattgcatatctt

SEQ ID NO: 19579 - DNA, 15 bp, Homo sapiens
tcacattgcatatct

SEQ ID NO: 19580 - DNA, 15 bp, Homo sapiens
atcacattgcatatc

SEQ ID NO: 19581 - DNA, 15 bp, Homo sapiens
tatcacattgcatat

SEQ ID NO: 19582 - DNA, 15 bp, Homo sapiens
atatcacattgcata

SEQ ID NO: 19583 - DNA, 15 bp, Homo sapiens
tatatcacattgcat

SEQ ID NO: 19584 - DNA, 15 bp, Homo sapiens
atatatcacattgca

SEQ ID NO: 19585 - DNA, 15 bp, Homo sapiens
tatatatcacattgc

SEQ ID NO: 19586 - DNA, 15 bp, Homo sapiens
atatatatcacattg

SEQ ID NO: 19587 - DNA, 15 bp, Homo sapiens
catatatatcacatt

SEQ ID NO: 19588 - DNA, 15 bp, Homo sapiens
acatatatatcacat

SEQ ID NO: 19589 - DNA, 15 bp, Homo sapiens
tacatatatatcaca

SEQ ID NO: 19590 - DNA, 15 bp, Homo sapiens
atacatatatatcac

SEQ ID NO: 19591 - DNA, 15 bp, Homo sapiens
tatacatatatatca

SEQ ID NO: 19592 - DNA, 15 bp, Homo sapiens
atatacatatatatc

SEQ ID NO: 19593 - DNA, 15 bp, Homo sapiens
gatatacatatatat

SEQ ID NO: 19594 - DNA, 15 bp, Homo sapiens
agatatacatatata

SEQ ID NO: 19595 - DNA, 15 bp, Homo sapiens
gagatatacatatat

SEQ ID NO: 19596 - DNA, 15 bp, Homo sapiens
tgagatatacatata

SEQ ID NO: 19597 - DNA, 15 bp, Homo sapiens
ttgagatatacatat

SEQ ID NO: 19598 - DNA, 15 bp, Homo sapiens
gttgagatatacata

SEQ ID NO: 19599 - DNA, 15 bp, Homo sapiens
agttgagatatacat

SEQ ID NO: 19600 - DNA, 15 bp, Homo sapiens
aagttgagatataca

SEQ ID NO: 19601 - DNA, 15 bp, Homo sapiens
taagttgagatatac

SEQ ID NO: 19602 - DNA, 15 bp, Homo sapiens
ttaagttgagatata

SEQ ID NO: 19603 - DNA, 15 bp, Homo sapiens
tttaagttgagatat

SEQ ID NO: 19604 - DNA, 15 bp, Homo sapiens
ttttaagttgagata

SEQ ID NO: 19605 - DNA, 15 bp, Homo sapiens
tttttaagttgagat

SEQ ID NO: 19606 - DNA, 15 bp, Homo sapiens
ttttttaagttgaga

SEQ ID NO: 19607 - DNA, 15 bp, Homo sapiens
attttttaagttgag

SEQ ID NO: 19608 - DNA, 15 bp, Homo sapiens
tattttttaagttga

SEQ ID NO: 19609 - DNA, 15 bp, Homo sapiens
ttattttttaagttg

SEQ ID NO: 19610 - DNA, 15 bp, Homo sapiens
cttattttttaagtt

SEQ ID NO: 19611 - DNA, 15 bp, Homo sapiens
gcttattttttaagt

SEQ ID NO: 19612 - DNA, 15 bp, Homo sapiens
agcttattttttaag

SEQ ID NO: 19613 - DNA, 15 bp, Homo sapiens
tagcttattttttaa

SEQ ID NO: 19614 - DNA, 15 bp, Homo sapiens
gtagcttatttttta

SEQ ID NO: 19615 - DNA, 15 bp, Homo sapiens
tgtagcttatttttt

SEQ ID NO: 19616 - DNA, 15 bp, Homo sapiens
ctgtagcttattttt

SEQ ID NO: 19617 - DNA, 15 bp, Homo sapiens
tctgtagcttatttt

SEQ ID NO: 19618 - DNA, 15 bp, Homo sapiens
ttctgtagcttattt

SEQ ID NO: 19619 - DNA, 15 bp, Homo sapiens
attctgtagcttatt

SEQ ID NO: 19620 - DNA, 15 bp, Homo sapiens
tattctgtagcttat

SEQ ID NO: 19621 - DNA, 15 bp, Homo sapiens
ttattctgtagctta

SEQ ID NO: 19622 - DNA, 15 bp, Homo sapiens
tttattctgtagctt

SEQ ID NO: 19623 - DNA, 15 bp, Homo sapiens
ttttattctgtagct

SEQ ID NO: 19624 - DNA, 15 bp, Homo sapiens
tttttattctgtagc

SEQ ID NO: 19625 - DNA, 15 bp, Homo sapiens
ctttttattctgtag

SEQ ID NO: 19626 - DNA, 15 bp, Homo sapiens
cctttttattctgta

SEQ ID NO: 19627 - DNA, 15 bp, Homo sapiens
acctttttattctgt

SEQ ID NO: 19628 - DNA, 15 bp, Homo sapiens
cacctttttattctg

SEQ ID NO: 19629 - DNA, 15 bp, Homo sapiens
acacctttttattct

SEQ ID NO: 19630 - DNA, 15 bp, Homo sapiens
aacacctttttattc

SEQ ID NO: 19631 - DNA, 15 bp, Homo sapiens
aaacacctttttatt

SEQ ID NO: 19632 - DNA, 15 bp, Homo sapiens
caaacacctttttat

SEQ ID NO: 19633 - DNA, 15 bp, Homo sapiens
gcaaacaccttttta

SEQ ID NO: 19634 - DNA, 15 bp, Homo sapiens
agcaaacaccttttt

SEQ ID NO: 19635 - DNA, 15 bp, Homo sapiens
tagcaaacacctttt

SEQ ID NO: 19636 - DNA, 15 bp, Homo sapiens
atagcaaacaccttt

SEQ ID NO: 19637 - DNA, 15 bp, Homo sapiens
aatagcaaacacctt

SEQ ID NO: 19638 - DNA, 15 bp, Homo sapiens
taatagcaaacacct

SEQ ID NO: 19639 - DNA, 15 bp, Homo sapiens
ttaatagcaaacacc

SEQ ID NO: 19640 - DNA, 15 bp, Homo sapiens
tttaatagcaaacac

SEQ ID NO: 19641 - DNA, 15 bp, Homo sapiens
ttttaatagcaaaca

SEQ ID NO: 19642 - DNA, 15 bp, Homo sapiens
tttttaatagcaaac

SEQ ID NO: 19643 - DNA, 15 bp, Homo sapiens
ttttttaatagcaaa

SEQ ID NO: 19644 - DNA, 15 bp, Homo sapiens
tttttttaatagcaa

SEQ ID NO: 19645 - DNA, 15 bp, Homo sapiens
ttttttttaatagca

SEQ ID NO: 19646 - DNA, 15 bp, Homo sapiens
tttttttttaatagc

SEQ ID NO: 19647 - DNA, 15 bp, Homo sapiens
ctttttttttaatag

SEQ ID NO: 19648 - DNA, 15 bp, Homo sapiens
tctttttttttaata

SEQ ID NO: 19649 - DNA, 15 bp, Homo sapiens
ttctttttttttaat

SEQ ID NO: 19650 - DNA, 15 bp, Homo sapiens
tttctttttttttaa

SEQ ID NO: 19651 - DNA, 15 bp, Homo sapiens
ttttcttttttttta

SEQ ID NO: 19652 - DNA, 15 bp, Homo sapiens
cttttcttttttttt

SEQ ID NO: 19653 - DNA, 15 bp, Homo sapiens
ccttttctttttttt

SEQ ID NO: 19654 - DNA, 15 bp, Homo sapiens
gccttttcttttttt

SEQ ID NO: 19655 - DNA, 15 bp, Homo sapiens
agccttttctttttt

SEQ ID NO: 19656 - DNA, 15 bp, Homo sapiens
cagccttttcttttt

SEQ ID NO: 19657 - DNA, 15 bp, Homo sapiens
tcagccttttctttt

SEQ ID NO: 19658 - DNA, 15 bp, Homo sapiens
ttcagccttttcttt

SEQ ID NO: 19659 - DNA, 15 bp, Homo sapiens
attcagccttttctt

SEQ ID NO: 19660 - DNA, 15 bp, Homo sapiens
cattcagccttttct

SEQ ID NO: 19661 - DNA, 15 bp, Homo sapiens
acattcagccttttc

SEQ ID NO: 19662 - DNA, 15 bp, Homo sapiens
gacattcagcctttt

SEQ ID NO: 19663 - DNA, 15 bp, Homo sapiens
tgacattcagccttt

SEQ ID NO: 19664 - DNA, 15 bp, Homo sapiens
atgacattcagcctt

SEQ ID NO: 19665 - DNA, 15 bp, Homo sapiens
aatgacattcagcct

SEQ ID NO: 19666 - DNA, 15 bp, Homo sapiens
gaatgacattcagcc

SEQ ID NO: 19667 - DNA, 15 bp, Homo sapiens
ggaatgacattcagc

SEQ ID NO: 19668 - DNA, 15 bp, Homo sapiens
gggaatgacattcag

SEQ ID NO: 19669 - DNA, 15 bp, Homo sapiens
tgggaatgacattca

SEQ ID NO: 19670 - DNA, 15 bp, Homo sapiens
ttgggaatgacattc

SEQ ID NO: 19671 - DNA, 15 bp, Homo sapiens
cttgggaatgacatt

SEQ ID NO: 19672 - DNA, 15 bp, Homo sapiens
gcttgggaatgacat

SEQ ID NO: 19673 - DNA, 15 bp, Homo sapiens
agcttgggaatgaca

SEQ ID NO: 19674 - DNA, 15 bp, Homo sapiens
aagcttgggaatgac

SEQ ID NO: 19675 - DNA, 15 bp, Homo sapiens
caagcttgggaatga

SEQ ID NO: 19676 - DNA, 15 bp, Homo sapiens
ccaagcttgggaatg

SEQ ID NO: 19677 - DNA, 15 bp, Homo sapiens
tccaagcttgggaat

SEQ ID NO: 19678 - DNA, 15 bp, Homo sapiens
ttccaagcttgggaa

SEQ ID NO: 19679 - DNA, 15 bp, Homo sapiens
tttccaagcttggga

SEQ ID NO: 19680 - DNA, 15 bp, Homo sapiens
atttccaagcttggg

SEQ ID NO: 19681 - DNA, 15 bp, Homo sapiens
aatttccaagcttgg

SEQ ID NO: 19682 - DNA, 15 bp, Homo sapiens
aaatttccaagcttg

SEQ ID NO: 19683 - DNA, 15 bp, Homo sapiens
caaatttccaagctt

SEQ ID NO: 19684 - DNA, 15 bp, Homo sapiens
tcaaatttccaagct

SEQ ID NO: 19685 - DNA, 15 bp, Homo sapiens
ctcaaatttccaagc

SEQ ID NO: 19686 - DNA, 15 bp, Homo sapiens
actcaaatttccaag

SEQ ID NO: 19687 - DNA, 15 bp, Homo sapiens
tactcaaatttccaa

SEQ ID NO: 19688 - DNA, 15 bp, Homo sapiens
atactcaaatttcca

SEQ ID NO: 19689 - DNA, 15 bp, Homo sapiens
catactcaaatttcc

SEQ ID NO: 19690 - DNA, 15 bp, Homo sapiens
acatactcaaatttc

SEQ ID NO: 19691 - DNA, 15 bp, Homo sapiens
aacatactcaaattt

SEQ ID NO: 19692 - DNA, 15 bp, Homo sapiens
caacatactcaaatt

SEQ ID NO: 19693 - DNA, 15 bp, Homo sapiens
gcaacatactcaaat

SEQ ID NO: 19694 - DNA, 15 bp, Homo sapiens
ggcaacatactcaaa

SEQ ID NO: 19695 - DNA, 15 bp, Homo sapiens
aggcaacatactcaa

SEQ ID NO: 19696 - DNA, 15 bp, Homo sapiens
gaggcaacatactca

SEQ ID NO: 19697 - DNA, 15 bp, Homo sapiens
agaggcaacatactc

SEQ ID NO: 19698 - DNA, 15 bp, Homo sapiens
aagaggcaacatact

SEQ ID NO: 19699 - DNA, 15 bp, Homo sapiens
aaagaggcaacatac

SEQ ID NO: 19700 - DNA, 15 bp, Homo sapiens
caaagaggcaacata

SEQ ID NO: 19701 - DNA, 15 bp, Homo sapiens
ccaaagaggcaacat

SEQ ID NO: 19702 - DNA, 15 bp, Homo sapiens
cccaaagaggcaaca

SEQ ID NO: 19703 - DNA, 15 bp, Homo sapiens
tcccaaagaggcaac

SEQ ID NO: 19704 - DNA, 15 bp, Homo sapiens
atcccaaagaggcaa

SEQ ID NO: 19705 - DNA, 15 bp, Homo sapiens
aatcccaaagaggca

SEQ ID NO: 19706 - DNA, 15 bp, Homo sapiens
taatcccaaagaggc

SEQ ID NO: 19707 - DNA, 15 bp, Homo sapiens
ataatcccaaagagg

SEQ ID NO: 19708 - DNA, 15 bp, Homo sapiens
aataatcccaaagag

SEQ ID NO: 19709 - DNA, 15 bp, Homo sapiens
aaataatcccaaaga

SEQ ID NO: 19710 - DNA, 15 bp, Homo sapiens
taaataatcccaaag

SEQ ID NO: 19711 - DNA, 15 bp, Homo sapiens
gtaaataatcccaaa

SEQ ID NO: 19712 - DNA, 15 bp, Homo sapiens
tgtaaataatcccaa

SEQ ID NO: 19713 - DNA, 15 bp, Homo sapiens
ctgtaaataatccca

SEQ ID NO: 19714 - DNA, 15 bp, Homo sapiens
tctgtaaataatccc

SEQ ID NO: 19715 - DNA, 15 bp, Homo sapiens
ttctgtaaataatcc

SEQ ID NO: 19716 - DNA, 15 bp, Homo sapiens
tttctgtaaataatc

SEQ ID NO: 19717 - DNA, 15 bp, Homo sapiens
atttctgtaaataat

SEQ ID NO: 19718 - DNA, 15 bp, Homo sapiens
tatttctgtaaataa

SEQ ID NO: 19719 - DNA, 15 bp, Homo sapiens
atatttctgtaaata

SEQ ID NO: 19720 - DNA, 15 bp, Homo sapiens
aatatttctgtaaat

SEQ ID NO: 19721 - DNA, 15 bp, Homo sapiens
taatatttctgtaaa

SEQ ID NO: 19722 - DNA, 15 bp, Homo sapiens
ctaatatttctgtaa

SEQ ID NO: 19723 - DNA, 15 bp, Homo sapiens
gctaatatttctgta

SEQ ID NO: 19724 - DNA, 15 bp, Homo sapiens
tgctaatatttctgt

SEQ ID NO: 19725 - DNA, 15 bp, Homo sapiens
ttgctaatatttctg

SEQ ID NO: 19726 - DNA, 15 bp, Homo sapiens
cttgctaatatttct

SEQ ID NO: 19727 - DNA, 15 bp, Homo sapiens
tcttgctaatatttc

SEQ ID NO: 19728 - DNA, 15 bp, Homo sapiens
gtcttgctaatattt

SEQ ID NO: 19729 - DNA, 15 bp, Homo sapiens
ggtcttgctaatatt

SEQ ID NO: 19730 - DNA, 15 bp, Homo sapiens
tggtcttgctaatat

SEQ ID NO: 19731 - DNA, 15 bp, Homo sapiens
ctggtcttgctaata

SEQ ID NO: 19732 - DNA, 15 bp, Homo sapiens
gctggtcttgctaat

SEQ ID NO: 19733 - DNA, 15 bp, Homo sapiens
ggctggtcttgctaa

SEQ ID NO: 19734 - DNA, 15 bp, Homo sapiens
gggctggtcttgcta

SEQ ID NO: 19735 - DNA, 15 bp, Homo sapiens
ggggctggtcttgct

SEQ ID NO: 19736 - DNA, 15 bp, Homo sapiens
tggggctggtcttgc

SEQ ID NO: 19737 - DNA, 15 bp, Homo sapiens
atggggctggtcttg

SEQ ID NO: 19738 - DNA, 15 bp, Homo sapiens
gatggggctggtctt

SEQ ID NO: 19739 - DNA, 15 bp, Homo sapiens
agatggggctggtct

SEQ ID NO: 19740 - DNA, 15 bp, Homo sapiens
aagatggggctggtc

SEQ ID NO: 19741 - DNA, 15 bp, Homo sapiens
aaagatggggctggt

SEQ ID NO: 19742 - DNA, 15 bp, Homo sapiens
caaagatggggctgg

SEQ ID NO: 19743 - DNA, 15 bp, Homo sapiens
ccaaagatggggctg

SEQ ID NO: 19744 - DNA, 15 bp, Homo sapiens
accaaagatggggct

SEQ ID NO: 19745 - DNA, 15 bp, Homo sapiens
gaccaaagatggggc

SEQ ID NO: 19746 - DNA, 15 bp, Homo sapiens
agaccaaagatgggg

SEQ ID NO: 19747 - DNA, 15 bp, Homo sapiens
aagaccaaagatggg

SEQ ID NO: 19748 - DNA, 15 bp, Homo sapiens
caagaccaaagatgg

SEQ ID NO: 19749 - DNA, 15 bp, Homo sapiens
tcaagaccaaagatg

SEQ ID NO: 19750 - DNA, 15 bp, Homo sapiens
ctcaagaccaaagat

SEQ ID NO: 19751 - DNA, 15 bp, Homo sapiens
actcaagaccaaaga

SEQ ID NO: 19752 - DNA, 15 bp, Homo sapiens
tactcaagaccaaag

SEQ ID NO: 19753 - DNA, 15 bp, Homo sapiens
gtactcaagaccaaa

SEQ ID NO: 19754 - DNA, 15 bp, Homo sapiens
agtactcaagaccaa

SEQ ID NO: 19755 - DNA, 15 bp, Homo sapiens
gagtactcaagacca

SEQ ID NO: 19756 - DNA, 15 bp, Homo sapiens
ggagtactcaagacc

SEQ ID NO: 19757 - DNA, 15 bp, Homo sapiens
tggagtactcaagac

SEQ ID NO: 19758 - DNA, 15 bp, Homo sapiens
gtggagtactcaaga

SEQ ID NO: 19759 - DNA, 15 bp, Homo sapiens
agtggagtactcaag

SEQ ID NO: 19760 - DNA, 15 bp, Homo sapiens
cagtggagtactcaa

SEQ ID NO: 19761 - DNA, 15 bp, Homo sapiens
acagtggagtactca

SEQ ID NO: 19762 - DNA, 15 bp, Homo sapiens
gacagtggagtactc

SEQ ID NO: 19763 - DNA, 15 bp, Homo sapiens
tgacagtggagtact

SEQ ID NO: 19764 - DNA, 15 bp, Homo sapiens
ctgacagtggagtac

SEQ ID NO: 19765 - DNA, 15 bp, Homo sapiens
gctgacagtggagta

SEQ ID NO: 19766 - DNA, 15 bp, Homo sapiens
tgctgacagtggagt

SEQ ID NO: 19767 - DNA, 15 bp, Homo sapiens
atgctgacagtggag

SEQ ID NO: 19768 - DNA, 15 bp, Homo sapiens
catgctgacagtgga

SEQ ID NO: 19769 - DNA, 15 bp, Homo sapiens
gcatgctgacagtgg

SEQ ID NO: 19770 - DNA, 15 bp, Homo sapiens
agcatgctgacagtg

SEQ ID NO: 19771 - DNA, 15 bp, Homo sapiens
aagcatgctgacagt

SEQ ID NO: 19772 - DNA, 15 bp, Homo sapiens
aaagcatgctgacag

SEQ ID NO: 19773 - DNA, 15 bp, Homo sapiens
gaaagcatgctgaca

SEQ ID NO: 19774 - DNA, 15 bp, Homo sapiens
agaaagcatgctgac

SEQ ID NO: 19775 - DNA, 15 bp, Homo sapiens
aagaaagcatgctga

SEQ ID NO: 19776 - DNA, 15 bp, Homo sapiens
gaagaaagcatgctg

SEQ ID NO: 19777 - DNA, 15 bp, Homo sapiens
ggaagaaagcatgct

SEQ ID NO: 19778 - DNA, 15 bp, Homo sapiens
tggaagaaagcatgc

SEQ ID NO: 19779 - DNA, 15 bp, Homo sapiens
ctggaagaaagcatg

SEQ ID NO: 19780 - DNA, 15 bp, Homo sapiens
tctggaagaaagcat

SEQ ID NO: 19781 - DNA, 15 bp, Homo sapiens
ctctggaagaaagca

SEQ ID NO: 19782 - DNA, 15 bp, Homo sapiens
tctctggaagaaagc

SEQ ID NO: 19783 - DNA, 15 bp, Homo sapiens
ctctctggaagaaag

SEQ ID NO: 19784 - DNA, 15 bp, Homo sapiens
cctctctggaagaaa

SEQ ID NO: 19785 - DNA, 15 bp, Homo sapiens
ccctctctggaagaa

SEQ ID NO: 19786 - DNA, 15 bp, Homo sapiens
tccctctctggaaga

SEQ ID NO: 19787 - DNA, 15 bp, Homo sapiens
atccctctctggaag

SEQ ID NO: 19788 - DNA, 15 bp, Homo sapiens
gatccctctctggaa

SEQ ID NO: 19789 - DNA, 15 bp, Homo sapiens
ggatccctctctgga

SEQ ID NO: 19790 - DNA, 15 bp, Homo sapiens
tggatccctctctgg

SEQ ID NO: 19791 - DNA, 15 bp, Homo sapiens
atggatccctctctg

SEQ ID NO: 19792 - DNA, 15 bp, Homo sapiens
aatggatccctctct

SEQ ID NO: 19793 - DNA, 15 bp, Homo sapiens
aaatggatccctctc

SEQ ID NO: 19794 - DNA, 15 bp, Homo sapiens
caaatggatccctct

SEQ ID NO: 19795 - DNA, 15 bp, Homo sapiens
gcaaatggatccctc

SEQ ID NO: 19796 - DNA, 15 bp, Homo sapiens
ggcaaatggatccct

SEQ ID NO: 19797 - DNA, 15 bp, Homo sapiens
aggcaaatggatccc

SEQ ID NO: 19798 - DNA, 15 bp, Homo sapiens
aaggcaaatggatcc

SEQ ID NO: 19799 - DNA, 15 bp, Homo sapiens
aaaggcaaatggatc

SEQ ID NO: 19800 - DNA, 15 bp, Homo sapiens
taaaggcaaatggat

SEQ ID NO: 19801 - DNA, 15 bp, Homo sapiens
ataaaggcaaatgga

SEQ ID NO: 19802 - DNA, 15 bp, Homo sapiens
aataaaggcaaatgg

SEQ ID NO: 19803 - DNA, 15 bp, Homo sapiens
aaataaaggcaaatg

SEQ ID NO: 19804 - DNA, 15 bp, Homo sapiens
aaaataaaggcaaat

SEQ ID NO: 19805 - DNA, 15 bp, Homo sapiens
aaaaataaaggcaaa

SEQ ID NO: 19806 - DNA, 15 bp, Homo sapiens
gaaaaataaaggcaa

SEQ ID NO: 19807 - DNA, 15 bp, Homo sapiens
tgaaaaataaaggca

SEQ ID NO: 19808 - DNA, 15 bp, Homo sapiens
atgaaaaataaaggc

SEQ ID NO: 19809 - DNA, 15 bp, Homo sapiens
aatgaaaaataaagg

SEQ ID NO: 19810 - DNA, 15 bp, Homo sapiens
gaatgaaaaataaag

SEQ ID NO: 19811 - DNA, 15 bp, Homo sapiens
agaatgaaaaataaa

SEQ ID NO: 19812 - DNA, 15 bp, Homo sapiens
cagaatgaaaaataa

SEQ ID NO: 19813 - DNA, 15 bp, Homo sapiens
acagaatgaaaaata

SEQ ID NO: 19814 - DNA, 15 bp, Homo sapiens
aacagaatgaaaaat

SEQ ID NO: 19815 - DNA, 15 bp, Homo sapiens
caacagaatgaaaaa

SEQ ID NO: 19816 - DNA, 15 bp, Homo sapiens
acaacagaatgaaaa

SEQ ID NO: 19817 - DNA, 15 bp, Homo sapiens
cacaacagaatgaaa

SEQ ID NO: 19818 - DNA, 15 bp, Homo sapiens
gcacaacagaatgaa

SEQ ID NO: 19819 - DNA, 15 bp, Homo sapiens
ggcacaacagaatga

SEQ ID NO: 19820 - DNA, 15 bp, Homo sapiens
cggcacaacagaatg

SEQ ID NO: 19821 - DNA, 15 bp, Homo sapiens
acggcacaacagaat

SEQ ID NO: 19822 - DNA, 15 bp, Homo sapiens
gacggcacaacagaa

SEQ ID NO: 19823 - DNA, 15 bp, Homo sapiens
agacggcacaacaga

SEQ ID NO: 19824 - DNA, 15 bp, Homo sapiens
tagacggcacaacag

SEQ ID NO: 19825 - DNA, 15 bp, Homo sapiens
atagacggcacaaca

SEQ ID NO: 19826 - DNA, 15 bp, Homo sapiens
catagacggcacaac

SEQ ID NO: 19827 - DNA, 15 bp, Homo sapiens
gcatagacggcacaa

SEQ ID NO: 19828 - DNA, 15 bp, Homo sapiens
tgcatagacggcaca

SEQ ID NO: 19829 - DNA, 15 bp, Homo sapiens
ttgcatagacggcac

SEQ ID NO: 19830 - DNA, 15 bp, Homo sapiens
tttgcatagacggca

SEQ ID NO: 19831 - DNA, 15 bp, Homo sapiens
gtttgcatagacggc

SEQ ID NO: 19832 - DNA, 15 bp, Homo sapiens
agtttgcatagacgg

SEQ ID NO: 19833 - DNA, 15 bp, Homo sapiens
tagtttgcatagacg

SEQ ID NO: 19834 - DNA, 15 bp, Homo sapiens
atagtttgcatagac

SEQ ID NO: 19835 - DNA, 15 bp, Homo sapiens
aatagtttgcataga

SEQ ID NO: 19836 - DNA, 15 bp, Homo sapiens
gaatagtttgcatag

SEQ ID NO: 19837 - DNA, 15 bp, Homo sapiens
agaatagtttgcata

(The sequence listing continues in the following parts.)

1. A single stranded oligonucleotide having a sequence 5′-X-Y-Z, wherein X is any nucleotide, Y is a nucleotide sequence of 6 nucleotides in length that is not a seed sequence of a human microRNA, and Z is a nucleotide sequence of 1-23 nucleotides in length, wherein the single stranded oligonucleotide is complementary with at least 8 consecutive nucleotides of a PRC2-associated region of an APOA1 gene or an ABCA1 gene.

2. The single stranded oligonucleotide of claim 1, wherein the oligonucleotide does not comprise three or more consecutive guanosine nucleotides.

3. The single stranded oligonucleotide of claim 1, wherein the oligonucleotide does not comprise four or more consecutive guanosine nucleotides.

4. The single stranded oligonucleotide of claim 1, wherein the oligonucleotide is 8 to 30 nucleotides in length.

5. The single stranded oligonucleotide of claim 1, wherein the oligonucleotide is 8 to 10 nucleotides in length and all but 1, 2, or 3 of the nucleotides of the complementary sequence of the PRC2-associated region are cytosine or guanosine nucleotides.

6. The single stranded oligonucleotide of claim 1, wherein at least one nucleotide of the oligonucleotide is a nucleotide analogue.

7. The single stranded oligonucleotide of claim 6, wherein the at least one nucleotide analogue results in an increase in Tm of the oligonucleotide in a range of 1 to 5° C. compared with an oligonucleotide that does not have the at least one nucleotide analogue.

8. The single stranded oligonucleotide of claim 1, wherein at least one nucleotide of the oligonucleotide comprises a 2′ O-methyl.

9. The single stranded oligonucleotide of claim 1, wherein each nucleotide of the oligonucleotide comprises a 2′ O-methyl.

10. The single stranded oligonucleotide of claim 1, wherein the oligonucleotide comprises at least one ribonucleotide, at least one deoxyribonucleotide, or at least one bridged nucleotide.

11. The single strand oligonucleotide of claim 10, wherein the bridged nucleotide is a LNA nucleotide, a cEt nucleotide or a ENA modified nucleotide.

12. The single stranded oligonucleotide of claim 1, wherein each nucleotide of the oligonucleotide is a LNA nucleotide.

13. The single stranded oligonucleotide of claim 1, wherein the nucleotides of the oligonucleotide comprise alternating deoxyribonucleotides and 2′-fluoro-deoxyribonucleotides.

14. The single stranded oligonucleotide of claim 1, wherein the nucleotides of the oligonucleotide comprise alternating deoxyribonucleotides and 2′-O-methyl nucleotides.

15. The single stranded oligonucleotide of claim 1, wherein the nucleotides of the oligonucleotide comprise alternating deoxyribonucleotides and ENA nucleotide analogues.

16. The single stranded oligonucleotide of claim 1, wherein the nucleotides of the oligonucleotide comprise alternating deoxyribonucleotides and LNA nucleotides.

17. The single stranded oligonucleotide of claim 13, wherein the 5′ nucleotide of the oligonucleotide is a deoxyribonucleotide.

18. The single stranded oligonucleotide of claim 1, wherein the nucleotides of the oligonucleotide comprise alternating LNA nucleotides and 2′-O-methyl nucleotides.

19. The single stranded oligonucleotide of claim 18, wherein the 5′ nucleotide of the oligonucleotide is a LNA nucleotide.

20. The single stranded oligonucleotide of claim 1, wherein the nucleotides of the oligonucleotide comprise deoxyribonucleotides flanked by at least one LNA nucleotide on each of the 5′ and 3′ ends of the deoxyribonucleotides.

21. The single stranded oligonucleotide of claim 1, further comprising phosphorothioate internucleotide linkages between at least two nucleotides.

22. The single stranded oligonucleotide of claim 21, further comprising phosphorothioate internucleotide linkages between all nucleotides.

23. The single stranded oligonucleotide of claim 1, wherein the nucleotide at the 3′ position of the oligonucleotide has a 3′ hydroxyl group.

24. The single stranded oligonucleotide of claim 1, wherein the nucleotide at the 3′ position of the oligonucleotide has a 3′ thiophosphate.

25. The single stranded oligonucleotide of claim 1, further comprising a biotin moiety conjugated to the 5′ nucleotide.

26. A single stranded oligonucleotide comprising a region of complementarity that is complementary with at least 8 consecutive nucleotides of a PRC2-associated region of an APOA1 gene or an ABCA1 gene, wherein the oligonucleotide has at least one of:
a) a sequence that is 5′X-Y-Z, wherein X is any nucleotide and wherein X is anchored at the 5′ end of the oligonucleotide, Y is a nucleotide sequence of 6 nucleotides in length that is not a human seed sequence of a microRNA, and Z is a nucleotide sequence of 1 to 23 nucleotides in length;
b) a sequence that does not comprise three or more consecutive guanosine nucleotides;
c) a sequence that has less than a threshold level of sequence identity with every sequence of nucleotides, of equivalent length to the second nucleotide sequence, that are between 50 kilobases upstream of a 5′-end of an off-target gene and 50 kilobases downstream of a 3′-end of the off-target gene;
d) a sequence that is complementary to a PRC2-associated region that encodes an RNA that forms a secondary structure comprising at least two single stranded loops; and/or
e) a sequence that has greater than 60% G-C content.

27. The single stranded oligonucleotide of claim 26, wherein the oligonucleotide has the sequence 5′X-Y-Z and wherein the oligonucleotide is 8-50 nucleotides in length.

28. A composition comprising a single stranded oligonucleotide of claim 1 and a carrier.

29. A composition comprising a single stranded oligonucleotide of claim 1 in a buffered solution.

30. A composition of claim 28, wherein the oligonucleotide is conjugated to the carrier.

31. The composition of claim 30, wherein the carrier is a peptide.

32. The composition of claim 30, wherein the carrier is a steroid.

33. A pharmaceutical composition comprising a composition of claim 28 and a pharmaceutically acceptable carrier.

34. A kit comprising a container housing the composition of claim 28.

35. A method of increasing expression of an APOA1 gene or an ABCA1 gene in a cell, the method comprising delivering the single stranded oligonucleotide of claim 1 into the cell.

36. The method of claim 35, wherein delivery of the single stranded oligonucleotide into the cell results in a level of expression of the APOA1 gene or the ABCA1 gene that is at least 50% greater than a level of expression of APOA1 or ABCA1 in a control cell that does not comprise the single stranded oligonucleotide.

37. A method increasing levels of an APOA1 gene or an ABCA1 gene in a subject, the method comprising administering the single stranded oligonucleotide of claim 1 to the subject.

38. A method of treating a condition associated with decreased levels of an APOA1 gene or an ABCA1 gene in a subject, the method comprising administering the single stranded oligonucleotide of claim 1 to the subject.

39. The method of claim 38, wherein the condition is dyslipidemia or atherosclerosis.
